United States Patent Application Publication US 2016/0078168 A1 - sequence listing, part 8

SEQ ID NO: 165583 - RNA, 79 nt, Homo sapiens
gaaaaggaggaacgccggcccgagaaagcccgccagcaggaagggaagaaggagaagaagaaacggagaccggcacacc

SEQ ID NO: 165584 - RNA, 52 nt, Homo sapiens
cccggggccggcggccaggggcgcgaccccccgagcgggaaagcgagggacg

SEQ ID NO: 165585 - RNA, 52 nt, Homo sapiens
ccccacccccgagcccagcaccgcgggaagggagaaagccagaaggccgagg

SEQ ID NO: 165586 - RNA, 57 nt, Homo sapiens
acgcgagaacaagaacgacaagcacacaccaccgcagacccaacagaggaagccgca

SEQ ID NO: 165587 - RNA, 83 nt, Homo sapiens
aggacaagaaggccaaacagccacaagaggaaaggaccacccacccaccgcgcgggcagcacccacaccgagacaacaacggg

SEQ ID NO: 165588 - RNA, 69 nt, Homo sapiens
gagagaaagagagagcgggaaagaaagcagaggccgagacaggcggggccggggagcccgggccagacc

SEQ ID NO: 165589 - RNA, 118 nt, Homo sapiens
ggagaggggccccagccgcaccccagcagcagcagagcccgccagacccccgaaggcaaaggaccgggccgacggaccgggggggccgaagaagccgcgcgcgcccaagaggaaggac

SEQ ID NO: 165590 - RNA, 56 nt, Homo sapiens
caaggaggacaccaacagagagacagacacaaggaggaagagcgagagaagaagca

SEQ ID NO: 165591 - RNA, 81 nt, Homo sapiens
gcaagagggagaaggacaccaggcagaggcaagccccccgggaagacacaaacgcaccaccagaaagccaagcggaaaagg

SEQ ID NO: 165592 - RNA, 69 nt, Homo sapiens
ccacaagggaagaaccacagcagcgggagagaggagagcagagagcagaaacaccgaccacccaacccc

SEQ ID NO: 165593 - RNA, 79 nt, Homo sapiens
ggccagcagacggccgacaaagcagcgggggacaccacaggaaaggagagcgaaggacgagggcgcaccccacaccgca

SEQ ID NO: 165594 - RNA, 80 nt, Homo sapiens
cagagaagaaggagaacagaaaacacaacagggccaccagccagagaagcggcaggaacgcggccagagaagccacaggc

SEQ ID NO: 165595 - RNA, 66 nt, Homo sapiens
cggaggcggcgccgaggaaccggccagcacaggagaaggggggcagaaagaagaggaggacaacaa

SEQ ID NO: 165596 - RNA, 79 nt, Homo sapiens
aaaccaagccgaaggaaaggcagaacgccgaacaggagcaacaggcgcagcccaacgggcccccaagaccccgaggaga

SEQ ID NO: 165597 - RNA, 80 nt, Homo sapiens
ggacaagagaccacacccaggaagccaggcacgcacagcgggaggcgagcagcccagaccggaaggagggcagagacagc

SEQ ID NO: 165598 - RNA, 52 nt, Homo sapiens
caggaagaaagaagaaagacaggaccaagagcccaaggcgacggcgccgagg

SEQ ID NO: 165599 - RNA, 81 nt, Homo sapiens
ccgaccgagagagcgaagccagccgcaggagaaacgaagcaaagcagaccgggcaccaaaaacaaaaaaacaaaacagaaa

SEQ ID NO: 165600 - RNA, 70 nt, Homo sapiens
aaagcacccaggcacgccagacaccgccaccaccgagaagacaaaacaagggacaagcaaggggccaagg

SEQ ID NO: 165601 - RNA, 77 nt, Homo sapiens
gaccgaggcaggagccgccaagcgaaccgggaggaggggcaaagagaaccaggagaccccaccaccacagaaaaagg

SEQ ID NO: 165602 - RNA, 65 nt, Homo sapiens
ccgcacagccgcggcccggaaggggccgaggccgggaagaggggagaggccgcccgcagaagcca

SEQ ID NO: 165603 - RNA, 79 nt, Homo sapiens
gcgcggaaagccgaggcggggcgccaagaccagcagcaccaggagccccccgcccagacaagacagggccagcacagca

SEQ ID NO: 165604 - RNA, 78 nt, Homo sapiens
gcagcccgcggcggcgcgcccagggcagggcccaaggaaggacccgccagaaccgcggaaggaggaacaagcaacagg

SEQ ID NO: 165605 - RNA, 60 nt, Homo sapiens
gagcaggaaacgaagcaagccaaaaaggggccccaccccaccggagaacccgccgacggc

SEQ ID NO: 165606 - RNA, 78 nt, Homo sapiens
cggaaccagaagcagagccaacagaccgaacaaagagcaccacggggcccggcgacaggcaaacaaccaggacgagac

SEQ ID NO: 165607 - RNA, 67 nt, Homo sapiens
gagaagaagccaggggagagcacggggcagaaaagcgagacccaaggccccggccagaagaagacgg

SEQ ID NO: 165608 - RNA, 75 nt, Homo sapiens
aggcgccgcccggcagcggacccgaacccaagggggccaaacgaaagcagaaggccagaacgaggcagccgacac

SEQ ID NO: 165609 - RNA, 52 nt, Homo sapiens
cagggggcccaccgggaagaagaagagaacgagccaaaaggacaaaccagac

SEQ ID NO: 165610 - RNA, 114 nt, Homo sapiens
ggcagggagccagaaccagggcagagaggggccggagggggaaagcccgcagccgcaagcaaggcgccaccggaagaaacgggaggggaggagccgggaaagacagcgccaagc

SEQ ID NO: 165611 - RNA, 80 nt, Homo sapiens
gccaagcaccaccaagagccacaccggagagcacagggagagcgagggagcaggacggaagaggggcagccccgggaaaa

SEQ ID NO: 165612 - RNA, 54 nt, Homo sapiens
cgcaggaaagggaacacgggggcgcggagcgggaaagacacggagcaggccgga

SEQ ID NO: 165613 - RNA, 85 nt, Homo sapiens
cagccgaaccaccgccccagagcccggcccagaccgacgagagcacaaagcaaggaggagaggcagcacaagcagaagccgggcc

SEQ ID NO: 165614 - RNA, 79 nt, Homo sapiens
ccacaagaccggcccaagccgagcagacggcacgaagggcggccgccgccgggggggccccagcccggccgaacgggcg

SEQ ID NO: 165615 - RNA, 75 nt, Homo sapiens
gccccaggccaagagggacccacccggcggacggagaggccgcccacggagcgcagagccaaccccaagccccgc

SEQ ID NO: 165616 - RNA, 75 nt, Homo sapiens
gcgcgcagcgaagcccagggaggccaccaggaccgggcaaggagggacagcccgaccaagcccggaggagaaggc

SEQ ID NO: 165617 - RNA, 56 nt, Homo sapiens
cgggagcacagcaccgcggggcgacgagggacggaggcggaacagaaaaccacaaa

SEQ ID NO: 165618 - RNA, 73 nt, Homo sapiens
gaacagagccgaccaagagggagagcgagcggagacgaacaccacgacgaaaggaaaagaagagaccgggagg

SEQ ID NO: 165619 - RNA, 79 nt, Homo sapiens
gccacagcccccccgaccccacccgaggaaacacagaggccaacagcaagagcaaccagggaccaccccacaacaggga

SEQ ID NO: 165620 - RNA, 72 nt, Homo sapiens
agcagcagagaagaaaaacagaaccacacaaacgaacgaaaacaaacggaagagagggcagcaagaaagaac

SEQ ID NO: 165621 - RNA, 83 nt, Homo sapiens
cggcccggccccgcagcagcccgccggcccgaagggcccagcaggcgcacccgaccaaggaagacaacgcgcggggcaagacc

SEQ ID NO: 165622 - RNA, 53 nt, Homo sapiens
gaggccagagcggaagccaaaggcaacgacaacgccaggagccagaaccccga

SEQ ID NO: 165623 - RNA, 60 nt, Homo sapiens
gccaaaggagccccacaaaagggaccaagaaaggcccagggaccaaagcccggacaaggc

SEQ ID NO: 165624 - RNA, 55 nt, Homo sapiens
ccggccaagggacagagcaacgcaccccacagcaagagccgagacaacccaacgg

SEQ ID NO: 165625 - RNA, 80 nt, Homo sapiens
acccgggaaaaaggcccccggggggcgcagcggcagcagcagcggagcgcccaaggagaaacagacaggggcaagcggga

SEQ ID NO: 165626 - RNA, 69 nt, Homo sapiens
ggcaaacgccacagcgggaaagaacaagacccgaagagaagccaggcagaggagagagcacaaaaccca

SEQ ID NO: 165627 - RNA, 54 nt, Homo sapiens
acacgcagaacgaccagcagggggccacggacggggccgagcacaaccacccac

SEQ ID NO: 165628 - RNA, 76 nt, Homo sapiens
caccaccaccacaacaacgcaccaggcgcagacagacaagagcaccagaccgcaacaggagcagacggagaaagag

SEQ ID NO: 165629 - RNA, 79 nt, Homo sapiens
aagcgcagcccgcagacagaggggcgacgaccgcacaacagaaaccggccaaggagcaaggcagcagaagacggcggca

SEQ ID NO: 165630 - RNA, 67 nt, Homo sapiens
gcagcagaacgaggccccacccagcgcacacaccaccacacacgaagcgagagaaaacgccagagca

SEQ ID NO: 165631 - RNA, 85 nt, Homo sapiens
aaacgagaaggggaaaaaacacaggacacgcggcagagagaggccgccagacagcgcagacaagaaggagagcaagcacacaaac

SEQ ID NO: 165632 - RNA, 41 nt, Homo sapiens
gacagaacagagacaccaaggaaccacgaagaccacacccg

SEQ ID NO: 165633 - RNA, 72 nt, Homo sapiens
gaggcccgcagcaaagcagggcaaccagccaggagaaagccacagaccggcccaagaaaggagaacagagaa

SEQ ID NO: 165634 - RNA, 82 nt, Homo sapiens
agaagcgcagcaaacacgaacacccgaaggccgagcagggaacggcaccgggagaggaggccaagcggaggaccgagccccc

SEQ ID NO: 165635 - RNA, 74 nt, Homo sapiens
cggcgcgagaccaacagacacccggggcgagcaccgcgaaggagcaagcagacagggaagagaaagccaaaccc

SEQ ID NO: 165636 - RNA, 58 nt, Homo sapiens
cacggagaggcaccgcgggcaacaggcccacagaaccagcgagagggaagcacgagac

SEQ ID NO: 165637 - RNA, 75 nt, Homo sapiens
gagaacccggacacgcccaaaggagacagaagggacgggaaaaggaaaagaagagaaggcgaggcagccaaccca

SEQ ID NO: 165638 - RNA, 57 nt, Homo sapiens
accgcgaggccagaccccaaagacagacgggaccaagaaaggcccagggaccaaagc

SEQ ID NO: 165639 - RNA, 85 nt, Homo sapiens
ggacgcaggagcccccccggcagcaacccccacacccagcaccagagcaaccaaaacaggacaagaaacaccaaacaagcaacag

SEQ ID NO: 165640 - RNA, 78 nt, Homo sapiens
gcccaccacccccccgccacgcagggccgaggaagccaagcggccaagacccccccaggaagcccccaggcaaggaca

SEQ ID NO: 165641 - RNA, 68 nt, Homo sapiens
agaggagaaggcggaaggcccacaccccacccaggggcacacacgaccaaccagcagcaaggggacgg

SEQ ID NO: 165642 - RNA, 75 nt, Homo sapiens
aggcaagaagggcgcgcgacaggggcaggcggcacaggagagaggggcccaggaccacaacgcacgggccgagga

SEQ ID NO: 165643 - RNA, 54 nt, Homo sapiens
gaccaccgggcgcaccccacccgggccgcccgaaggggaggagaagaggggagg

SEQ ID NO: 165644 - RNA, 83 nt, Homo sapiens
cggaccagccggcgcaagcgggcgaagaggacagcagcggacggccggaccaagaggcgccgccccccagcaaacgagaaaaa

SEQ ID NO: 165645 - RNA, 80 nt, Homo sapiens
gggaagcggcaggcaaaaggaaaacaaaggcacaggagccacagcggagaagaagaaaccaaaaaacaggagggcaggaa

SEQ ID NO: 165646 - RNA, 68 nt, Homo sapiens
acaggcgaacccgcaccccaccgagcaaacagggacacacgaagaaaaagggaaaagcggcagggcgg

SEQ ID NO: 165647 - RNA, 55 nt, Homo sapiens
gaggcacagcaggaaccagggcacacagccggcagcagggagaccagaccaggac

SEQ ID NO: 165648 - RNA, 68 nt, Homo sapiens
accccagcagaccagagcagggaaggccggcagcgcgacagccacccgggggagggcagaaaccaccc

SEQ ID NO: 165649 - RNA, 87 nt, Homo sapiens
aagcccccgcaggaaccacaacccaaccaggaaacccagcggcggcagaaccagccggcacaaagccgaaccagagagagcaacgcc

SEQ ID NO: 165650 - RNA, 100 nt, Homo sapiens
cagaaggcaccagagagaggccgaacggagcagacaaaggccaacagagcacaggcaaggcaccgagggggggcaacaccaaaacaaaccagccaacaaa

SEQ ID NO: 165651 - RNA, 84 nt, Homo sapiens
caggaacccaccagaaggaaccaaccggacacaaacaagcagcaggaggacaccaaagggcaccacagaacagccgaagcaggc

SEQ ID NO: 165652 - RNA, 49 nt, Homo sapiens
ggaaaaggcgggcacaggccgaccgcgcgagcccaaaagcaaagcaggg

SEQ ID NO: 165653 - RNA, 82 nt, Homo sapiens
cacccccaggagggcgacaaggagcccagcacccagggcagaaagcagccccacgcaggccccaccaggcgccgccgcgcac

SEQ ID NO: 165654 - RNA, 78 nt, Homo sapiens
ccgagagccgcccgggccagcggccgcgcacccccggccggaggccccaggacgccagcgggaggaggagggggcggc

SEQ ID NO: 165655 - RNA, 73 nt, Homo sapiens
agccagaacacaccgaccacggccgggcacagaacaaagggccaagaccaggacgcaagcgcaaacacaccag

SEQ ID NO: 165656 - RNA, 111 nt, Homo sapiens
gcagaaacagaggagggaggcacaaaaagagagggccacgagagagaaagacacaggcccccacagagagcacacaaacaaagcgaaaccacggaagaaaagggcaaagga

SEQ ID NO: 165657 - RNA, 86 nt, Homo sapiens
gggagcgcggggcgacgcggcgcagggacccgggacagcggagaggcgcagagccccgagccccggccccaaagacccaaaacaga

SEQ ID NO: 165658 - RNA, 58 nt, Homo sapiens
acaggggccacaaaacccaggcgcggaagcaaggaaacaggaacacgaaagaggaaaa

SEQ ID NO: 165659 - RNA, 64 nt, Homo sapiens
caagccgacgcagcgcccaccacgacggaggcccagagcaagagaggcacccacccgaagaccc

SEQ ID NO: 165660 - RNA, 74 nt, Homo sapiens
cggggagagccaagaaaaacaacgccccagaacacagagagcagaggacccccagcagcggccacagacaggag

SEQ ID NO: 165661 - RNA, 80 nt, Homo sapiens
ccgagcaagaggcacaagcaacaaaaagaaacagaacacggcacgagcgcggcagagaagaccgagaggccacaacaagg

SEQ ID NO: 165662 - RNA, 70 nt, Homo sapiens
gaaacaggcaaaacaaccagaaggggagaaggcaggcaccacaaaaaggacagagagaaaccgaagaagg

SEQ ID NO: 165663 - RNA, 78 nt, Homo sapiens
aggccgggcggcgccgccccaccggacccgcaggaagccgggcaacacccgcgcagccgggaagagacagcggaccac

SEQ ID NO: 165664 - RNA, 86 nt, Homo sapiens
accggcacggggcgggcagcggcgccgggcacaggagggaagagcaagggccgggggaaagcagcaggagacccaaaccacagcca

SEQ ID NO: 165665 - RNA, 79 nt, Homo sapiens
ggagcgacccggacaccgacgcgccacgcggagcccgggcaagaggaagacagaacgaccgcgagaccacaaacagaga

SEQ ID NO: 165666 - RNA, 74 nt, Homo sapiens
gagaggacggacgcgcacaagacaagaacgaagagaaagggccagaaggaagacccagaaagagagcgaaaccc

SEQ ID NO: 165667 - RNA, 71 nt, Homo sapiens
agagaaaagagacggagcaagagaacgcaagagacggagaccagaaagcgggcaacaccaaccgagacgcg

SEQ ID NO: 165668 - RNA, 73 nt, Homo sapiens
ggaccccccaagagaagcgcaagagcaacaccccaccccaaggcagccgccgccccaggagaccggaaggaca

SEQ ID NO: 165669 - RNA, 68 nt, Homo sapiens
gacagacgcgcagaaacagaagcagcaaaacaccgaggaacacaagaagcaaggagccgccacccagc

SEQ ID NO: 165670 - RNA, 118 nt, Homo sapiens
ggaggagaacacaagagggcgccaccaacagaaaaaaaaaagaccaaaaggagcagaaaacacagcccccacagccagaaaaaagacagaccgagcggggaggcaaggacggagccac

SEQ ID NO: 165671 - RNA, 86 nt, Homo sapiens
ccagaccaagcaacaggggaaagcgggacacgccaaaggacccgcgggacccaagccccaccaggcccaggaccaggcgcccagag

SEQ ID NO: 165672 - RNA, 50 nt, Homo sapiens
cagagacggcccgcggccggcgcgcagggagcagagcaagagaaaagaac

SEQ ID NO: 165673 - RNA, 52 nt, Homo sapiens
cacccaggccaggcaccggccgccaccagggcacgggcaaggagagccaagc

SEQ ID NO: 165674 - RNA, 56 nt, Homo sapiens
ccgaggggaacaaaccaggaagcgggagaggccacccgcccacgagcggaagaacc

SEQ ID NO: 165675 - RNA, 73 nt, Homo sapiens
gacaacacaaagagggaggccagccccggcacagaggcaccgaccgcaccggaggagaagaccagccccagac

SEQ ID NO: 165676 - RNA, 83 nt, Homo sapiens
cgccgcaaagcaacacagcgaggccggcggcagggaggcagggagaccccaaggcaaaaccaccacacgacaaaaaccggaac

SEQ ID NO: 165677 - RNA, 64 nt, Homo sapiens
ggcgcccgcgccacagccaccagagccggcagcaaagagggaacagcaccgaccacgacacccc

SEQ ID NO: 165678 - RNA, 75 nt, Homo sapiens
agcgggcagcgccagaccgcgacaggcccgaaaaaaacccaggcggcccagggaggagcagcaggccaccaagca

SEQ ID NO: 165679 - RNA, 84 nt, Homo sapiens
caagccgggagacgcacagcaagagcccggacaccggaagcgggaaagggaaaccccaccccgggcgagggcgggggcgaaccg

SEQ ID NO: 165680 - RNA, 73 nt, Homo sapiens
gagcccgcagaccgcagaaggccggagacaccagcagaacccacgcggaggaaagaaaaacccggcgggagca

SEQ ID NO: 165681 - RNA, 84 nt, Homo sapiens
agaagcggcgcggagcgaaggccgccgaaccgccggcagccggcgacgaggacgacccccgcccgcacacgacaaggagagcga

SEQ ID NO: 165682 - RNA, 54 nt, Homo sapiens
ccaagccgcaggagaaacgaagacagacaccaaaagggaccaccacacgaaacc

SEQ ID NO: 165683 - RNA, 84 nt, Homo sapiens
acacagccccaaacaggacgaaggcggcgaaggaaggggcaggaccagcgcccggcaggcgccacgcgccgcagaccgaccggc

SEQ ID NO: 165684 - RNA, 70 nt, Homo sapiens
gcgccggcggaagggggacaccagagccgcggacccggaagcccggggcggcgacggagcacgacccaag

SEQ ID NO: 165685 - RNA, 64 nt, Homo sapiens
gagagggaaacgcacgccagagcaagggcgcagggaaaccgaccaggcaagggaggaagccgcc

SEQ ID NO: 165686 - RNA, 84 nt, Homo sapiens
ggcaaggaacaggcgagaaacaggccgggaacccaacaagggagcaaacagagaaagaacccaaacacacagaaaaaccccaaa

SEQ ID NO: 165687 - RNA, 77 nt, Homo sapiens
caagaaaaggaggccgcgccacagagacaaggcagagaggagggcaaaaagacaaacaccaccggagcacaaacacg

SEQ ID NO: 165688 - RNA, 70 nt, Homo sapiens
aagaagaagacacacccaggcaagaaccaaaagccaagaaacacacacgaagcacgaagagaagagaaac

SEQ ID NO: 165689 - RNA, 78 nt, Homo sapiens
cgcgacacgaacaccgaggaggccaaggcgacaaaccaagaggagccagaggcgaccgaaagaaaagggccacagaca

SEQ ID NO: 165690 - RNA, 76 nt, Homo sapiens
gcgccgcgccgcgccgcaccccgagcgaccggagcaacgcacgaaaacgcacgaggagcacagaaacgcacagacc

SEQ ID NO: 165691 - RNA, 85 nt, Homo sapiens
ggaggacgacggcgagcacagacggcccgaggaccgcgaagccacacccgggaccacccagacgccgccgcacaggagcccccgc

SEQ ID NO: 165692 - RNA, 89 nt, Homo sapiens
ggcgaacccgcggcgcaaaacgagaagcagggcccgagcggaagaggaaagaaggagccgcacccggaaggccgggcgcgggcaggggc

SEQ ID NO: 165693 - RNA, 74 nt, Homo sapiens
agcgaaaccaggaggacagggcacagaaaaacaagagagcagacgggcacgaagccagagcaagacccacgaag

SEQ ID NO: 165694 - RNA, 82 nt, Homo sapiens
cggagcgcggcgcccgcggccgggcggcgcggccgcccgggccgggccccaccggacggcgggacaagggcgcaccggggcg

SEQ ID NO: 165695 - RNA, 85 nt, Homo sapiens
agagaaaaccgaagcaagccgcagaaagacaaacccaggccccaggccacaacaggaaccaagaagaagcaggggagaagaagag

SEQ ID NO: 165696 - RNA, 67 nt, Homo sapiens
cccgaagcaagaagaaaggacacaccaagggaaacgaagaaggaaccagcaccagacagaagacgca

SEQ ID NO: 165697 - RNA, 80 nt, Homo sapiens
aacaagaggccacgcagagccacgccgagcgagcacccccggccccagacagccacaccgggaaggagaagcgggacaag

SEQ ID NO: 165698 - RNA, 91 nt, Homo sapiens
caggcgcgcacaacaacaaaaccagagaaaacggggggaaaagaaacaaacaacaagaagaaggacaaggaacgaaggcaaggaggcgggc

SEQ ID NO: 165699 - RNA, 62 nt, Homo sapiens
gaggccgaacggagcagacaaagacacacgggggaagacagcaaagacgggagaggagagac

SEQ ID NO: 165700 - RNA, 85 nt, Homo sapiens
cgggggcccaaggacaggcacaggcccaggcgaagaggaaagacaagagccgcccgcccagaaacgccacaggggacgcaccacc

SEQ ID NO: 165701 - RNA, 62 nt, Homo sapiens
gggagccagaagcgaaaggcaggcagaccgggggacccaagggagagagggaacggcgaaag

SEQ ID NO: 165702 - RNA, 72 nt, Homo sapiens
caaacggcccagcaaccacacaaggccaccgggcggggggcgcgccgccaccaacccacagacaacgcagga

SEQ ID NO: 165703 - RNA, 73 nt, Homo sapiens
aaggacgagcgacaagaagacgaagaagggcgaagagagaacacgcacggaaggaaggagaccacgagaaaga

SEQ ID NO: 165704 - RNA, 57 nt, Homo sapiens
cgaaggggaacgggaaaggaacaacgggcaagaaagacccaacagaggaagccgcaa

SEQ ID NO: 165705 - RNA, 73 nt, Homo sapiens
cggaggcccaaccgaagaaaacaagacagccgcgcacacagaggggggcagggccacagggaaagaaaacaga

SEQ ID NO: 165706 - RNA, 73 nt, Homo sapiens
agagaagcaaagaccaaacccagaaagagaggggagggggggagaaaaaagacaccagcagcgccgaacgcag

SEQ ID NO: 165707 - RNA, 41 nt, Homo sapiens
cggcccaaggccagcccgcagccccagggcacaccgacagc

SEQ ID NO: 165708 - RNA, 64 nt, Homo sapiens
aaaagccagagccaaaaaaacggcggaaaaaagcggagaagaggccaagacgggaaaagggacg

SEQ ID NO: 165709 - RNA, 71 nt, Homo sapiens
aagagccgagccccgggccaggcaaccgggccagaacaggcgaaaaaaggggggagaacaagcaaacgcag

SEQ ID NO: 165710 - RNA, 74 nt, Homo sapiens
cccgccagcccagacacaccagccagcccagagacgggagcagccccccggacgagagaggaggggaagaagag

SEQ ID NO: 165711 - RNA, 70 nt, Homo sapiens
gggaggaagaaaaaggaagaacagcccgcccgcaggaaccaaccaaaacgacagaacccaggagaaagag

SEQ ID NO: 165712 - RNA, 84 nt, Homo sapiens
gagcccgccaaccccggaccccgcggccggggcagcggcgccgcgccgcgcccgagggagaggaaggcacaaccacgaggaagc

SEQ ID NO: 165713 - RNA, 78 nt, Homo sapiens
gcccgcccgccaaagcgcccagccaacgacccacgcagccgcccggcggagacagcagccaacgcacgcaagggggcc

SEQ ID NO: 165714 - RNA, 70 nt, Homo sapiens
cagcaaaagaaggccaaagaaggagaaaagggagcagcaggagccccgcgggaacgaaaacaaacggaag

SEQ ID NO: 165715 - RNA, 33 nt, Homo sapiens
gaagaaggagaacaaaagaggagccgccgcgcc

SEQ ID NO: 165716 - RNA, 73 nt, Homo sapiens
gacgggcacacacaaacgaggccgcgacagccaccaaagcagcgcggacaagaaaagacagaaaggaaaagca

SEQ ID NO: 165717 - RNA, 31 nt, Homo sapiens
aaagccaaaaaggagaaagccgcaggggaag

SEQ ID NO: 165718 - RNA, 73 nt, Homo sapiens
caaaaggaagaccaggggagcaggacggcacgcgcacccgaccccaggccacagccccggcaccgggggacag

SEQ ID NO: 165719 - RNA, 83 nt, Homo sapiens
ccaggcaggcggcgcggggcccgcgcccggagcggcgccaggcgaacccccagaagagcaacggagaagaagcagaacaccaa

SEQ ID NO: 165720 - RNA, 83 nt, Homo sapiens
cacgagcacacgaaggcccggcagcccacacggccaaccaggacggcagggcaccgagccgccaagggcgacccggcagcagc

SEQ ID NO: 165721 - RNA, 70 nt, Homo sapiens
caccccacacgggagaggacaggagaccggaacaggcaaccagcaagaggagcagaggcggaaggcagaa

SEQ ID NO: 165722 - RNA, 83 nt, Homo sapiens
aaagccaagaggcggacaaaacgccaggcggaccagaaggccagcaaaggaacccgcgcccagaagggaaggccacggacggg

SEQ ID NO: 165723 - RNA, 71 nt, Homo sapiens
gaccggggaaaaggcgcgccgaggggcgccggccaggcggaggcagggacaagcacggccacgcagccgac

SEQ ID NO: 165724 - RNA, 76 nt, Homo sapiens
accaggccaccaccgcgcacgccagcagcaaggccaggaaggaaacgggagaaccggaagcccaggccggccaaca

SEQ ID NO: 165725 - RNA, 74 nt, Homo sapiens
aaaggaagacccaacgaaaggggcgacaccagggccgcagaggagagaagaggacagaaggaagacgccaaggg

SEQ ID NO: 165726 - RNA, 55 nt, Homo sapiens
aacaccaggcaccgagagaccagcagcgggcgagaacgcggacaagcaaacaaag

SEQ ID NO: 165727 - RNA, 37 nt, Homo sapiens
cgcggcccaaaaggacaagccgccgcaagaaaaggag

SEQ ID NO: 165728 - RNA, 71 nt, Homo sapiens
gaagacaacaaggagaagaccagagaacccgcaaaaaaggaagccggaggggggagaaggcgacccggaga

SEQ ID NO: 165729 - RNA, 78 nt, Homo sapiens
ccgagggaagcggccggcggcgagccgccggggcgggccacagcgcgggccggccacagcaggcgacacgagccaggc

SEQ ID NO: 165730 - RNA, 74 nt, Homo sapiens
cgccgcaccaggccaccgccacgggccgagacacgcagcggcggccagggaccaggagagaaacagaggaaagc

SEQ ID NO: 165731 - RNA, 123 nt, Homo sapiens
cggggaggcgcgggaggcccggaggaggaccgcgggggcacacgaggcgcacaagagccaagggcacaggagaggggaccgccgggcggccggaccagggcgccgggagccgcaggagccggc

SEQ ID NO: 165732 - RNA, 39 nt, Homo sapiens
agagcagggaaagaaggaaagagaagggagggcgacgag

SEQ ID NO: 165733 - RNA, 56 nt, Homo sapiens
gaacaagaggagaggaagagagcaaggacaccagcaggaacgggagacacaagcac

SEQ ID NO: 165734 - RNA, 69 nt, Homo sapiens
agggaacaccggcggagaaggcacaaaacagaaaacgacagaagcacgacaacaacgggcagcaagcca

SEQ ID NO: 165735 - RNA, 72 nt, Homo sapiens
cagcgcagcccgggacgagcgcagcagcagaagcgcagaggggagaagcgcgaaagcagagaaggcagaagg

SEQ ID NO: 165736 - RNA, 106 nt, Homo sapiens
cgacacgagggcacgcgggcaagggcaaccgcggggaagcggggcggcaccggacaccaagacggagggaccaggacaggcgggagaacagagacacacgcccagc

SEQ ID NO: 165737 - RNA, 74 nt, Homo sapiens
ccaggaaaagaggggcaaagaagcggaaaacaccggccagacacaggccccgagggcagcacgaccggaccgga

SEQ ID NO: 165738 - RNA, 48 nt, Homo sapiens
ccgacgccaggcagcgcccccaaacgagcggcaggcggggcagaagag

SEQ ID NO: 165739 - RNA, 80 nt, Homo sapiens
ccgcccccacccacgcccagcaacagccacccgaaaacacagaccacaggggggggaagacaacccggagaacacccagg

SEQ ID NO: 165740 - RNA, 79 nt, Homo sapiens
gcaccgccgggcccgcccgcacgaaaccggccggcagaagcggccgggaccggcccggaacacgcggcccagcccccca

SEQ ID NO: 165741 - RNA, 69 nt, Homo sapiens
ccccccggaagggcaccgcgacgacaccccggggaggcgaggagagagaaagccccacgaagagagaag

SEQ ID NO: 165742 - RNA, 80 nt, Homo sapiens
agacgcgaccaacccaggcacagcggagccggcgcggggccacaaaggcgaaacacccaggaaacgccccaagaagacgc

SEQ ID NO: 165743 - RNA, 75 nt, Homo sapiens
cgcgcacgggaaccgaagagagccgggcagggccgcaaggccaggcgcgcagaggcacccaacggcacagacccc

SEQ ID NO: 165744 - RNA, 59 nt, Homo sapiens
acacggaggccacccagcgaggaagccgccccgacaggggccccaccagccaacacccc

SEQ ID NO: 165745 - RNA, 39 nt, Homo sapiens
caacccgcccggaacaagccaggggaccagaacgcagcc

SEQ ID NO: 165746 - RNA, 66 nt, Homo sapiens
aacggaccagaccgaccaccaaaagggcccaccacgaggacaacgaggcaacacacacagagaccc

SEQ ID NO: 165747 - RNA, 63 nt, Homo sapiens
cccgggcggaacgacgacggccaggccaaccgggagacagagcagaacccgcccagagccagc

SEQ ID NO: 165748 - RNA, 76 nt, Homo sapiens
ggccccggcgggggcgcgggcggcgggcagcccgcgggcgcccagcacagagggccggagcggagagggccgggag

SEQ ID NO: 165749 - RNA, 82 nt, Homo sapiens
ccgcccgagccagcccgccagcagccccagccaaaggggagcgcggccacagacgcacaggcagagacacaaggggagaagc

SEQ ID NO: 165750 - RNA, 73 nt, Homo sapiens
aggccggcagcggcgcggggacccgcccgcccccggcgcgcccaggacagccagcacaaaaaaacaaaacgag

SEQ ID NO: 165751 - RNA, 77 nt, Homo sapiens
caccggcccccagaccagccccccgcagaagccaagagacccacccaacagcgaacaaaggcccaacaccaaaggac

SEQ ID NO: 165752 - RNA, 73 nt, Homo sapiens
cgcaacccgaaggaacgggcggaccagggcgagcacgagcacccgccccaacgagagcagcggggagaaagaa

SEQ ID NO: 165753 - RNA, 79 nt, Homo sapiens
gcgggggcccgcgcagcagcgaccacggcccgaaaagaaagcgaacacacaaaacaagaaaaggcacgcaaacccacaa

SEQ ID NO: 165754 - RNA, 55 nt, Homo sapiens
ggccgcgcggcccgcagggaggcaggggaagcacaaaagcgcacccgcgccagcg

SEQ ID NO: 165755 - RNA, 88 nt, Homo sapiens
gacaacgagcagccacacccagacgagcgggagaaggcgcgcgcaagcacgcgaggaggcgggcgcaaagacaccgccagaagaccag

SEQ ID NO: 165756 - RNA, 61 nt, Homo sapiens
ccaagccccgaagcacacagaaaggggcgggccccggccagggcccaggcagccggggcgg

SEQ ID NO: 165757 - RNA, 79 nt, Homo sapiens
cagggcccggcgaaggacccggccgaggcgggcgcaagagaaggcaccaagagggcggagaacggaaaagcaccaggaa

SEQ ID NO: 165758 - RNA, 65 nt, Homo sapiens
cgggagaaaagacccccaagagcacagccggaagagcagcagagaagcccccacaaaaaggaaga

SEQ ID NO: 165759 - RNA, 82 nt, Homo sapiens
gacggcccccaagaaggcagcgcgggcccgagggaggcagagcaccgagacggagccagaacgagcccagcggagcagagac

SEQ ID NO: 165760 - RNA, 73 nt, Homo sapiens
aagaggcaaggcccgcagaaccagaggaccggcaacaacccgaggacgaaccaccccgcgccagcagcacagc

SEQ ID NO: 165761 - RNA, 73 nt, Homo sapiens
gagaacaagacacacaggcacccagcaaacaaaggggacagaaaaaccgcgacacagcaggaggaccggcaaa

SEQ ID NO: 165762 - RNA, 71 nt, Homo sapiens
cgcgggcacggccggagggggagcccaaagaagaaaacccggccccgccgaaggggaaaaacaaggcccac

SEQ ID NO: 165763 - RNA, 74 nt, Homo sapiens
caggggaacacaccagaaggagaggcgaacgacccccaacccccaccagcaccacgccacgcgggccacccccg

SEQ ID NO: 165764 - RNA, 117 nt, Homo sapiens
cacaaggaccccagaagcagggaacacgggggcccggccgaccagcgcacaagaccggacccagcagccagcgaagccccaaggaagccgggacgcccacagacccagcagcgcacg

SEQ ID NO: 165765 - RNA, 59 nt, Homo sapiens
caggcaacgaggagacggaagacaacccaggaccccaacgcagacacgaaggaagacac

SEQ ID NO: 165766 - RNA, 73 nt, Homo sapiens
aaacacggggaacaaacggcaagagccagaagcccggcggaagagccggaggagccaccaacagaagcaggag

SEQ ID NO: 165767 - RNA, 76 nt, Homo sapiens
acccacggaagggcaaacgccacggaaaaacccacggcaaaccccaaacccaaccgggagccagaagaaacagcgc

SEQ ID NO: 165768 - RNA, 71 nt, Homo sapiens
gagcaaggaacaggcggggcgcaaaacggacagaaggaacagcccaggacagagcgcacacaagagagggc

SEQ ID NO: 165769 - RNA, 77 nt, Homo sapiens
gcagaacgagcacagccgaacaggaggccaaacaggagaaagcaacacacgaagggccagggaccaggacaggcggg

SEQ ID NO: 165770 - RNA, 58 nt, Homo sapiens
acgcgcggaaggcagcgcccagcagcgcaggacaccgagacccgacaggccagacgga

SEQ ID NO: 165771 - RNA, 71 nt, Homo sapiens
ggcagcaaaggcggagcccagggaagccaccacagagaagacggcaggggaagggggccagacaaccaggg

SEQ ID NO: 165772 - RNA, 73 nt, Homo sapiens
ggaggcgagcgcgccgcccggagccgcgcacacggggacaagaaaaccagaaacgggggcccgacaagacaca

SEQ ID NO: 165773 - RNA, 73 nt, Homo sapiens
gggcccagcaaagggaccaagccagagcagccacggaaagggaaaagaacggcgcacagaaccaccccccagc

SEQ ID NO: 165774 - RNA, 83 nt, Homo sapiens
cgccacccgcgagcccaccgccaagacggaaaccagaccaggcgaccagaagcaagaacaacaaacgcccaccaaaaggacgc

SEQ ID NO: 165775 - RNA, 74 nt, Homo sapiens
aagccagcgcaaagccacaaacagaaggaagagcaccggggggaagaagaagggaacaagcggagggacgcacg

SEQ ID NO: 165776 - RNA, 50 nt, Homo sapiens
gagagagacacgaacaaggcccaaagcccagccaaggacccgaaaaacga

SEQ ID NO: 165777 - RNA, 57 nt, Homo sapiens
aaaaacaccagacaagagagagccaccccagggccaccaaggacggccgcggcgcga

SEQ ID NO: 165778 - RNA, 75 nt, Homo sapiens
gacgagagcaaccagccagaagaggcagagaccccccaagggccagagggcaggccccaccagcagacggcgacg

SEQ ID NO: 165779 - RNA, 74 nt, Homo sapiens
gcaccggccgagccacggagcaaggggccaggaggaaagaggcgccccacaaacagacagccaaaaagcacacg

SEQ ID NO: 165780 - RNA, 73 nt, Homo sapiens
aaagaagagcagaaacccgccccgagaagcccacaaacaaggggccaggcacaaagagggcgggacacccagg

SEQ ID NO: 165781 - RNA, 75 nt, Homo sapiens
ccggcagcagccaagggccaggaagcagagagaacagagcgaaagcacacgaagaggcagcccagaagaagaaag

SEQ ID NO: 165782 - RNA, 77 nt, Homo sapiens
cgcggcaaagcgcgaggcccgcggccgccgacgcgcgagccggccgccgcaggcaagcgccccaggggccaccccgg

SEQ ID NO: 165783 - RNA, 79 nt, Homo sapiens
cagcccccgagggcgggacacagcagccaacagagcagcagcagagcagccacgagagacagcaggccgagcccgagcg

SEQ ID NO: 165784 - RNA, 71 nt, Homo sapiens
aaacgcgcagcccagacacgagagccgccacaagcggccccaaagcgaaaagaacccacagccggaacacc

SEQ ID NO: 165785 - RNA, 70 nt, Homo sapiens
cagaggcaaggggccaccaggaggccagggggcgccagggggcggaccggccaaacagccaaagccaccc

SEQ ID NO: 165786 - RNA, 87 nt, Homo sapiens
ccgcccaagccgcacagccgcggcggcagcagcaggagagccaggcccaaggccggaacagccggagcaagcccgagagccacggag

SEQ ID NO: 165787 - RNA, 68 nt, Homo sapiens
ggggagccgccgcagaacaaaaagcgggcaacaacgcccacagacagaccgccgagcaaagcccacaa

SEQ ID NO: 165788 - RNA, 61 nt, Homo sapiens
cacgagaggagcaagcgggaaccaccccagaaaacagggaaagggagcagcaccggccaca

SEQ ID NO: 165789 - RNA, 42 nt, Homo sapiens
ccgaacagaaaacgcagacaagaggcgcagcagcgggaaggc

SEQ ID NO: 165790 - RNA, 73 nt, Homo sapiens
aagaccacacacgggaaacacaaaacgacccgacaaacggacagcaggaccagaacaaggagaagcaccgggc

SEQ ID NO: 165791 - RNA, 95 nt, Homo sapiens
agcggaacaggagccgacgacccggaccaagaaggggaggcccgcggcaggaagggaccacagaccagcacgccggcgccacgaaccgagcgaca

SEQ ID NO: 165792 - RNA, 38 nt, Homo sapiens
cagagccgacccccaccgcaagacggagccgccgcgcc

SEQ ID NO: 165793 - RNA, 70 nt, Homo sapiens
cggggaccccggagcccagaagacagagggcgaggaagcgccacgcagagagcaaggcgagggagaaccc

SEQ ID NO: 165794 - RNA, 73 nt, Homo sapiens
gagccaccccccgcagaccagccacggcacggaacaccaaaaggggagggaaagcggcagcaaccgaggacgg

SEQ ID NO: 165795 - RNA, 76 nt, Homo sapiens
aaacaggagccccacgaccggaggcggagaagacgacccacggcgcccgcgcacgaaaagacagcagggggagcag

SEQ ID NO: 165796 - RNA, 82 nt, Homo sapiens
agcgacccagcaaccgcacgaaccggcacggagaagagaagaaggaccggggagacaggaacacgggcaagacagcgcgggc

SEQ ID NO: 165797 - RNA, 70 nt, Homo sapiens
cgcgcgcaaggaagaaacccccagccgacgcccgcgccccccagcaagcccacggcagacacagcaggcc

SEQ ID NO: 165798 - RNA, 72 nt, Homo sapiens
caaagggaccacaccgacagcggacgccccagcacccccagcgggcagaccagagagagcaacagcaggcca

SEQ ID NO: 165799 - RNA, 74 nt, Homo sapiens
gaagcaccaaagcgcgccaagaggccagccgagccggccaggaccagggggaacccgcagcagcacagacccag

SEQ ID NO: 165800 - RNA, 67 nt, Homo sapiens
ggcaagccccacacagggacagcaaagccccaccgaaggaagcgacaagcagggaagaaccagcgga

SEQ ID NO: 165801 - RNA, 62 nt, Homo sapiens
gaccgacaggaggccccggaagacggacagccagcaggggcagaagcagcagacggaacgag

SEQ ID NO: 165802 - RNA, 80 nt, Homo sapiens
ggccagggccaaggagagacagaagggccaagcccacgcagagcaaagaaaggggagcaagaagaaagagcagggaggag

SEQ ID NO: 165803 - RNA, 81 nt, Homo sapiens
aggcacacccggaagggcccggcaggaccgaccagccgagggccacgccggaccccgccacggcacaacaaaaccaagcgc

SEQ ID NO: 165804 - RNA, 71 nt, Homo sapiens
gcaccaggacacacccggaagcaagggcaagaggggaagccaagaaggcaggacaagccacaaccccaaaa

SEQ ID NO: 165805 - RNA, 80 nt, Homo sapiens
gcgcccggccggaggcaggggaaaggaagaaagcagagaacgggaagggccacaccaccgccagcacaggaagacagaac

SEQ ID NO: 165806 - RNA, 70 nt, Homo sapiens
gggacagacgaccgggacaccagggcagcaaagaggaaaagcagccaagacccgcggcgccagcagccgg

SEQ ID NO: 165807 - RNA, 62 nt, Homo sapiens
agccccagcaccgccccccggaagaaggaagagcagaagaaggaagcaagagaagaaccagc

SEQ ID NO: 165808 - RNA, 48 nt, Homo sapiens
acccaaaggccagcaaggaaaacccacagcggcaacacgagacaaagc

SEQ ID NO: 165809 - RNA, 87 nt, Homo sapiens
ggagagggaggcgggaggagcggcagccgcgaggaggcgcgggagggcgagaacgaccccgagacgccgcggcgagccgcacagggc

SEQ ID NO: 165810 - RNA, 58 nt, Homo sapiens
aaacaggaacaaaacagaccggagaagccgagacgggcccccaccccacaggaggaag

SEQ ID NO: 165811 - RNA, 72 nt, Homo sapiens
aggggacgcgggaaagcgcagacggggaacgggacagggcagcgcaagcagagaaagggggaggcggacccg

SEQ ID NO: 165812 - RNA, 76 nt, Homo sapiens
acacagcaaacacacggacgagcacgcaaccacgggcccccgcgcgcagaccgagacaacacggaccagcaacagc

SEQ ID NO: 165813 - RNA, 55 nt, Homo sapiens
aaaggggcaagcaaagcacagcaacagaagccaggcaaggaacgcggagaaacaa

SEQ ID NO: 165814 - RNA, 92 nt, Homo sapiens
agcccccccaagaccaggcgccagggcgagaccggagagccccagacgccagcgccaagagggaagcgggaaccgaccaaggcacagcccca

SEQ ID NO: 165815 - RNA, 70 nt, Homo sapiens
aaagccggcgaggggaggccaaacaaccaccaagcgacagaccaaagagaccagggacagccggaaacag

SEQ ID NO: 165816 - RNA, 66 nt, Homo sapiens
agaaacgaaacaggcagagaagcaggccggggaaacaagcagacggaacaaaccaaggcaacagga

SEQ ID NO: 165817 - RNA, 57 nt, Homo sapiens
gcagccccgccagccacccccaggcccacccccccccagacgcgagaacggacaccc

SEQ ID NO: 165818 - RNA, 78 nt, Homo sapiens
cccaacaccccaacggggcagagagaggggacaccacgccagcgcaaggccgaagggaaggcaccggcacgagagagg

SEQ ID NO: 165819 - RNA, 82 nt, Homo sapiens
cagcggcaaggagagacgcgcgaggggcgccgaagcgaggggccaagacgcccccaagaaagcgccagaggaaggaccccca

SEQ ID NO: 165820 - RNA, 78 nt, Homo sapiens
gaaaaggaaacaccacaaagaaacaggggagggaccgaggacacggcggccaaccgggaggaggggagcgccggaccc

SEQ ID NO: 165821 - RNA, 72 nt, Homo sapiens
ccagacccagaagggcaaaagaaagggacaaaagcagccaaacaggagcacagaaagcacgagagggccacc

SEQ ID NO: 165822 - RNA, 69 nt, Homo sapiens
gacagggcaccacaagaacaggcgacaaacagagcccgggaagcgcagagggaacacggccacgagggg

SEQ ID NO: 165823 - RNA, 87 nt, Homo sapiens
cacaagcagacggcaaaggcaagagaacagcagcgccgcccgccgacagccaggcccgggagaaggcaggagacagaacgagcgaaa

SEQ ID NO: 165824 - RNA, 65 nt, Homo sapiens
aagcagaggaacggggcaacgcgagcagaacagcccagccgaagagaagagaacagaaacggaac

SEQ ID NO: 165825 - RNA, 65 nt, Homo sapiens
aacaaaccaagcccagggacagagcgcggggccccaaaaacacaacccagcaggcgaagaagcag

SEQ ID NO: 165826 - RNA, 81 nt, Homo sapiens
gcgccaccgagccggaccggagacggggccaacagaggagcaagaggggggggcccccccgaagaaaggaaccggggagcg

SEQ ID NO: 165827 - RNA, 86 nt, Homo sapiens
gaacgcgaccagcagcagaaggaaagggccgagaaagaagagaggaagaagaggaggaggaggaagaggaggaagacgaggagaga

SEQ ID NO: 165828 - RNA, 67 nt, Homo sapiens
aaggcgcaccggaggacgacaggcaaaggcaggaaacccgcaagagaagcacccaaaaagcgcaaaa

SEQ ID NO: 165829 - RNA, 34 nt, Homo sapiens
cagcaggcgccaccagcccggaggaaaaagggcc

SEQ ID NO: 165830 - RNA, 73 nt, Homo sapiens
gagccacaaagcgcgccacagggcccgaaccggggcaaccacccgggagaacagaacgggaaaagaacggcaa

SEQ ID NO: 165831 - RNA, 67 nt, Homo sapiens
caaaagggacggacaaaggaacaggaccagagagaagcacgggaccaagagcgccgggaaaacgagc

SEQ ID NO: 165832 - RNA, 53 nt, Homo sapiens
gcagaacgagacgggcacgggaaggggaaaaaagcagcggaggagaaaaaaaa

SEQ ID NO: 165833 - RNA, 51 nt, Homo sapiens
aaagcgcaaagaagccggcagcacagccagaagcggccgggcaggccggcg

SEQ ID NO: 165834 - RNA, 84 nt, Homo sapiens
aagcggaccccggcccaggcggcccgagaaaagcaggagaagcgggagcacagcaagcgggagcaggcagaccaaaggaacaga

SEQ ID NO: 165835 - RNA, 75 nt, Homo sapiens
ggagccgaagacacgacagacccgacgcacagaacagacaagaaaaagggaagggagaaaaaccaaagccgaaag

SEQ ID NO: 165836 - RNA, 75 nt, Homo sapiens
ggacagacccacaacaccaggcgccagaacaccggaaacgccaggccacaagggagcaaacgaaaagccacgaag

SEQ ID NO: 165837 - RNA, 81 nt, Homo sapiens
ccagaccgccaagaggcacaggacggccggagcagcagaacaagagcggagaccaagggagccccgcagcagcagaagacg

SEQ ID NO: 165838 - RNA, 81 nt, Homo sapiens
ggaggggaccgacgccggcagaacacgcgcgggaccccgggcacggcgcgcgggagccaccggaaggccgcgggggaagga

SEQ ID NO: 165839 - RNA, 69 nt, Homo sapiens
agggcgaaccgaagaggaaagagcaagaccccgccggagccccaaacagccggacgagcgggagaggac

SEQ ID NO: 165840 - RNA, 84 nt, Homo sapiens
gcgccgcgcagccaccgccgccgccgccgcccccagcgccgccagacgaccgcgccacccgcagagaaggaaaaacgggcccac

SEQ ID NO: 165841 - RNA, 66 nt, Homo sapiens
aggggacggacccggcccccccgcccgaccgagccgggaaagcaccgccgaagaaacagggggcac

SEQ ID NO: 165842 - RNA, 66 nt, Homo sapiens
acgcacacgacagcaacaagacacggagcaaggaggaaaacacacggagcacccgaagaagacaag

SEQ ID NO: 165843 - RNA, 70 nt, Homo sapiens
ggaaaacggcaccgcgagcgcagggcgggaaaccaacccgcaaggcagaaccagcaagggaagggcgaaa

SEQ ID NO: 165844 - RNA, 75 nt, Homo sapiens
gacacggggcgacgccacagagaaagggagacgggcgaacacagggaagaaggacggagccagccgcaggggcga

SEQ ID NO: 165845 - RNA, 69 nt, Homo sapiens
ggaaaaagagaaacccaagagggaaccacccccaacaaccagggcaaggaggaaaaagcggccaacagg

SEQ ID NO: 165846 - RNA, 80 nt, Homo sapiens
aacccggccgacccggaccaacaaccccaaggggacacggaaaacgacagaacgaagcagaagaacgcccaggcaggcag

SEQ ID NO: 165847 - RNA, 71 nt, Homo sapiens
gcagaacaggagaggggaaaaaccacgcggagaagggagagacaacaaaaaacaaggaaaggcaaagagaa

SEQ ID NO: 165848 - RNA, 68 nt, Homo sapiens
acacccccacgcggaacacaggcaaaagggaaagaaggagcgggccggaggaaaaggaaaaaacagaa

SEQ ID NO: 165849 - RNA, 85 nt, Homo sapiens
ccggcgccccgagccggccgagcggcgacggaccgcgagggccagcaccccaagccaggccagcccaggggaacgaggagcgacc

SEQ ID NO: 165850 - RNA, 73 nt, Homo sapiens
ggccagggccaaccgaaacagcaagaacacacgaaccacagcgaaacagaacagacacaagggcagaaggaag

SEQ ID NO: 165851 - RNA, 82 nt, Homo sapiens
ggagcaccagcgcgccacgacccgcagacaagaaagagaaagggccagccaaagaagaaaaccagagcacagagcggacaga

SEQ ID NO: 165852 - RNA, 76 nt, Homo sapiens
acaaagacagcccaccaggaagagcgaaaaacaaccgagcacaaaaaaggcacccggagaacagacagaccagccg

SEQ ID NO: 165853 - RNA, 74 nt, Homo sapiens
ccccagggcccccaaacgcacagaaagagcgaacacccagaaacgggccaaaggacggaacgcaccagacggag

SEQ ID NO: 165854 - RNA, 81 nt, Homo sapiens
cacccccgcggggccgggggcggcgagcaggagccgggccccggcaccgccgaagcaaggaggggcccaccacagccaccc

SEQ ID NO: 165855 - RNA, 71 nt, Homo sapiens
gccaaaacggaagcacccaaacagccaaggaagaagaaaaaaaaaggagaagaaaaaggagggcccccgga

SEQ ID NO: 165856 - RNA, 74 nt, Homo sapiens
ccggccgccgcaggagaggagcaccggcccaggcggaggcaaggcggacccggcggcgcaacccacccccgggc

SEQ ID NO: 165857 - RNA, 77 nt, Homo sapiens
gggcagcgcgacccccccaggacaccccaccggagcgggaagcagagaacgggaggccaagaaggccagcggcaggc

SEQ ID NO: 165858 - RNA, 74 nt, Homo sapiens
gagagaaacaaaagcgccagagccaagaacgcccgcagaaaaacaaacggcacacaacgcacaaaacggaaaga

SEQ ID NO: 165859 - RNA, 76 nt, Homo sapiens
acccgcccagcccccgagagaaaggaggcaaacgaccaaacacggcccccccgcaccgcgcccaggacgaaacccc

SEQ ID NO: 165860 - RNA, 55 nt, Homo sapiens
agcggaaaagcgaagccgagcccaaacaaaggaccagaaggaaaacacaccaggc

SEQ ID NO: 165861 - RNA, 69 nt, Homo sapiens
aggccagcccacagcaggcgaccaggaggaacagaccggcggccgacgggacaacgccacgggcacggg

SEQ ID NO: 165862 - RNA, 81 nt, Homo sapiens
ggccaggcggccccgagcggaacggagaaagcgaggaacggcgcggcaggcaccgcccagcccagccgccaagccaccagc

SEQ ID NO: 165863 - RNA, 118 nt, Homo sapiens
gaccgcgaaggagcagagagagcgacaacacgcgaacggcgaggcccagcaaaaaccaaagagagcccggcagggaaccaacccagccacaaccaccccagggcgaccacagagcgcc

SEQ ID NO: 165864 - RNA, 61 nt, Homo sapiens
gagcccaggccacagacccacacgccggcggccaagccgagccacacgccagacaccaggg

SEQ ID NO: 165865 - RNA, 80 nt, Homo sapiens
gaaaagcaggccgaagaaccgagcgacagagacaagcgagcgccgcacaaaaagcagagaggcagcacagcaggcgacaa

SEQ ID NO: 165866 - RNA, 78 nt, Homo sapiens
gacccacacagacaacagccggggcagcggagcagaaaagcgaggcaagggcggcaggggggggcgcaaaccgaacca

SEQ ID NO: 165867 - RNA, 79 nt, Homo sapiens
cggccgacgcgcccgccgccagcaggggcgccccggacgagagcccggcgggggcgcagggcacagaagagacgaaagg

SEQ ID NO: 165868 - RNA, 71 nt, Homo sapiens
agccagaccgccaaaccagagaaagaaacacccgaacagcgaacgacaaagccgaaaggccgcaagcagaa

SEQ ID NO: 165869 - RNA, 67 nt, Homo sapiens
gcccagaggaccccagccgcgcccgggagagcaagggggagagagacgcgggaaccgccagcaaacc

SEQ ID NO: 165870 - RNA, 63 nt, Homo sapiens
ggagccggaagcgcgcaagggcaagacacccaagggcagaaagggggcagaggaaagagggag

SEQ ID NO: 165871 - RNA, 85 nt, Homo sapiens
ggacggcggcgcggagaaggcaggagaaagacagcaaagaaaaggagaagaaaggaaaaaaacaaccccgggcaccccgccagcc

SEQ ID NO: 165872 - RNA, 69 nt, Homo sapiens
aaagcggagcaggaaagaggcgaacacaaagaaagaaccccaggaccccagcgaacccggggccagacg

SEQ ID NO: 165873 - RNA, 67 nt, Homo sapiens
cgccccacagaggggcgacggaaccaacggacccaaaaaacaaggaggaaaggccccaagaaacccc

SEQ ID NO: 165874 - RNA, 70 nt, Homo sapiens
aggagagcccaagccggaacagccaacaaagagaggagacgaccagaaaaccccaaagagagggaccaag

SEQ ID NO: 165875 - RNA, 51 nt, Homo sapiens
ggcaagagccaacccaaaaccaaaccaggagggccggaggacccaagcggg

SEQ ID NO: 165876 - RNA, 85 nt, Homo sapiens
ccgcaccaccaacgcggccgacaacagccggcgccgccacgggaaagggagcagcaccggccacacccacagcacgaccggaacc

SEQ ID NO: 165877 - RNA, 64 nt, Homo sapiens
agccagacggaccaaaagcacgcccgaggaacccggaagaaaacaggaggaaaagacaggaaaa

SEQ ID NO: 165878 - RNA, 64 nt, Homo sapiens
agcaacgaagcagcaaaaagcggaaaaaaacaacggggggaaaaccaaaagaggccgaacaacg

SEQ ID NO: 165879 - RNA, 72 nt, Homo sapiens
acaggcaaaaagggcaagacaagggaagaggaaagaaaacaacgaagcaagcccaagggcgcaggggcaaca

SEQ ID NO: 165880 - RNA, 75 nt, Homo sapiens
aaacccacccacgcgggaacagacaaggaacccacccacgcaccaccacgagagccgggacccaagacccagaag

SEQ ID NO: 165881 - RNA, 79 nt, Homo sapiens
ccagcaaaccgccaacccgcgccgccgccaccagcccaaaacgcccgagaaccagcagcccaaaggagagcggaaaaaa

SEQ ID NO: 165882 - RNA, 38 nt, Homo sapiens
ccgaagcgacccaggagggagccagaaaaacacagcgg

SEQ ID NO: 165883 - RNA, 58 nt, Homo sapiens
gccagggcagcaggagagagccacgccgcaagaagagccacaggaaagcaaagaggcg

SEQ ID NO: 165884 - RNA, 67 nt, Homo sapiens
ggcgggcagaacacggaggaagacaacgaggggcacgcgcccacccaggcgcagacgaccgcgagga

SEQ ID NO: 165885 - RNA, 75 nt, Homo sapiens
caacaagagggagccaggccagaaaacgggggcagcccaaggaccaagggagaagagacccaggaggcagggcag

SEQ ID NO: 165886 - RNA, 77 nt, Homo sapiens
agcaaggcggcagagcaaggggcacgcagaaggaccggccacgcagaagacaagaagaagccaagagaaaggaccag

SEQ ID NO: 165887 - RNA, 80 nt, Homo sapiens
ccgaccgccgggaccggagggaggaagcgggacacccgggagcaggaaaggaaggacagcgagcccagcacagggaggac

SEQ ID NO: 165888 - RNA, 75 nt, Homo sapiens
caacccggcccaagggacccccgccagcccccaaagcagggcacaggcggcaaagagccggacaaaaacgcaagg

SEQ ID NO: 165889 - RNA, 72 nt, Homo sapiens
gacgccacccaagacacaaacggcgacacagaacacaagaccaacgggggaggcacaagaggaagagccaga

SEQ ID NO: 165890 - RNA, 42 nt, Homo sapiens
ggagacacggccagacgcccccaaaaaccaccgaaagcgcgg

SEQ ID NO: 165891 - RNA, 85 nt, Homo sapiens
aacaggcaaaaaacaaaagaaaaacggaacaggaacaaaaggagcaaaggcagaagcacggaaagaaaggagaaaccaaaggacc

SEQ ID NO: 165892 - RNA, 61 nt, Homo sapiens
ggcgcgcgcggacagcaagcaccaaggagaaagaagacaggagggagaggagggacgggac

SEQ ID NO: 165893 - RNA, 58 nt, Homo sapiens
ggaaaagagcggagagcggacccgacacgagagaaacagaggacgaccgggaggacaa

SEQ ID NO: 165894 - RNA, 62 nt, Homo sapiens
cagaaaccgaagagaaaggccaacgagaacaagcacaggccggggggggcacagagccccgg

SEQ ID NO: 165895 - RNA, 76 nt, Homo sapiens
gggggcgcggagggaccagcgagcgggaggcaaggaaacagcaaacgacacagaagaacagagccagcccaaggca

SEQ ID NO: 165896 - RNA, 35 nt, Homo sapiens
ggcgcgccccggccggagcacacaggccacccacg

SEQ ID NO: 165897 - RNA, 68 nt, Homo sapiens
ggcggcggagcggcggaagaagggaggcaggcgacaacagaggagaaggcgaagaaaacagccaagca

SEQ ID NO: 165898 - RNA, 75 nt, Homo sapiens
gaggagcaaaagcagcaggagcaacccaagacccagcaagaaagccgccaagaggcacaagccggacaacgaaaa

SEQ ID NO: 165899 - RNA, 83 nt, Homo sapiens
acgaacaggaaagaaagcagcccacccagacaggcgcccaacgagaagaagacccgaggaaagaaaggcaggagaggagcccg

SEQ ID NO: 165900 - RNA, 53 nt, Homo sapiens
caagaccccacagcaacagccacgcgggccacaccgagccaacccgagggagc

SEQ ID NO: 165901 - RNA, 58 nt, Homo sapiens
gccccagggagaacacaaggccaaacgccagggcgaaggaaccacagcacagccacag

SEQ ID NO: 165902 - RNA, 76 nt, Homo sapiens
gcccagaccggccaggggacggcgagcaccgggcggagcaggagcaagcagcagggacgcaccaaaacggacagcc

SEQ ID NO: 165903 - RNA, 69 nt, Homo sapiens
gccgggcaacccacgggccgaccggacacaagagggcaagaaaggcgcgacgggccgaaaagggacgaa

SEQ ID NO: 165904 - RNA, 72 nt, Homo sapiens
gagccacccgaaggcgaacgaacaaaacaggagcgaggacacgcaccagcggacggggagggcggccaacag

SEQ ID NO: 165905 - RNA, 78 nt, Homo sapiens
cagaaccccacagccacaccagccaaaggagcgacgaggaaaccccgaagcaacggccaagccagcaccaaaggggga

SEQ ID NO: 165906 - RNA, 76 nt, Homo sapiens
cggcgagcagaacacggcgagcggccaaaagaagcaagggaaagaccaggagccagaaaccaaccaaagagggagg

SEQ ID NO: 165907 - RNA, 44 nt, Homo sapiens
gcgaggaggcgcagcagacaggagcggcagcaggcaccagaacg

SEQ ID NO: 165908 - RNA, 77 nt, Homo sapiens
ggagagagaaaccaacaggagcccaccaggcgcggcggcgagaagccaaacacacgccggaaagaaagagggcaagc

SEQ ID NO: 165909 - RNA, 85 nt, Homo sapiens
gaaaaccaaacaggggggcagaagcagcaggaaagacaaaagaggggccagaggcaccaaaaacccccgcagaagagcaggaccc

SEQ ID NO: 165910 - RNA, 72 nt, Homo sapiens
gagacacggccagacgcccccacggagaaaaagaaagcggcgcgccaacagacccgggggaagcacaggcaa

SEQ ID NO: 165911 - RNA, 73 nt, Homo sapiens
caacacagcagggcaaggcgggaccaggacggaccaacacaagcacccaaaagaccgaagcaggccagaccca

SEQ ID NO: 165912 - RNA, 70 nt, Homo sapiens
gcccaggcagcgggacaaccgcaccagggggcccccaaagggaagccaaacacaaaggaagaagcccgga

SEQ ID NO: 165913 - RNA, 73 nt, Homo sapiens
gccgcggcgcggcgccacggcaccggcacggaccaccccaacaccgggggagaaccgggcccaccagggacac

SEQ ID NO: 165914 - RNA, 66 nt, Homo sapiens
ccgaccgggccgggcagagcacgcgagcggacgaccggggacaaccaccggcacgaggaggacgaa

SEQ ID NO: 165915 - RNA, 73 nt, Homo sapiens
aggcgggccaggcgccccgaggcgcgggggaagcgggcggaccccgaaaaggcgagggcccccaaggaagaca

SEQ ID NO: 165916 - RNA, 73 nt, Homo sapiens
cgcaagcaagcgggacagagggaaagggaccaagcccaaagaggagaaagagccaaggcggacgaaggaacaa

SEQ ID NO: 165917 - RNA, 72 nt, Homo sapiens
aaagaggcaagacccgggcggcagacaaaccaaagagcggaaacaccaaacccagcccaaggacacaagcaa

SEQ ID NO: 165918 - RNA, 41 nt, Homo sapiens
gggcgacgcgcacgcgcggcggcggaggcaaggcgagacca

SEQ ID NO: 165919 - RNA, 71 nt, Homo sapiens
gcgccgccgaccccccggcgccgcgccggcggcggagaaggaagccaacaccggagccagaaagccgaacc

SEQ ID NO: 165920 - RNA, 75 nt, Homo sapiens
gagcgcaagcaggagcgccgcgcgaagagccaaggagaggacaacgagggaagcggggcacaacggacacgcaca

SEQ ID NO: 165921 - RNA, 73 nt, Homo sapiens
agagaaaaaaagaaaaaaggaaaagcggaaaaagcaaaaaaagcagcacacacagcagaaaggcaggcagcgc

SEQ ID NO: 165922 - RNA, 77 nt, Homo sapiens
cagcccgaagacccacccccagaccagcacgcaagagacaacgacaagggcgaggacaaccaaagaagagaacaaac

SEQ ID NO: 165923 - RNA, 83 nt, Homo sapiens
ccaacgccacgccgcgccgccgcccccacgccaggaagaaaaaagcgggcacgggcagcacaaagccggagggcgccgggcac

SEQ ID NO: 165924 - RNA, 82 nt, Homo sapiens
aagcggccaaagccgcccagacggccaccggcgggaggaacaaaagccagaaccacaagacagacccaagagggcggggcaa

SEQ ID NO: 165925 - RNA, 76 nt, Homo sapiens
ggaagcgcaagaaacccaaaaaccaaccaccaaagacaagaacagaaaccaggaggacagagaggaaacgaaagaa

SEQ ID NO: 165926 - RNA, 75 nt, Homo sapiens
gaaccaagaagacccggaagcccaagaagggggaccggcccaaaaagaaacacgaagacaccgacgcccgcgggg

SEQ ID NO: 165927 - RNA, 89 nt, Homo sapiens
aagaccaccgagggaagccaaggcccccagaacacacaggagaagaaaggaagagacgacagccagcaggcaggagcccgcccagaaca

SEQ ID NO: 165928 - RNA, 76 nt, Homo sapiens
gacaggacgggcgccgccccgcgcggcagggccggggggggcacagagccccggaagacagcccccagcgaccaga

SEQ ID NO: 165929 - RNA, 85 nt, Homo sapiens
gaaaggagacaacaaaaaggagaaggaagaagcagaccggagcagcagagacgaaagccacacgcccaggagaagagaagcgcag

SEQ ID NO: 165930 - RNA, 87 nt, Homo sapiens
caagcgccgcgacacaccgcacccacacgggcgagaagcccacgaggcaacacgcaaggccgccaccagaggcggcagaagcacaca

SEQ ID NO: 165931 - RNA, 80 nt, Homo sapiens
acaaggcaaggaacgagagaaaccaccaaaccaacccgcaaaccagggacagaggaaaagacacggcaaaacaagcagac

SEQ ID NO: 165932 - RNA, 69 nt, Homo sapiens
agcccacgcccagaggaggcagccaccagcaggaggaaaaccaacgccacgaccagagacgaagaagga

SEQ ID NO: 165933 - RNA, 66 nt, Homo sapiens
cacgaccggacgcccacgaccccagcaggggaagggaggacacgggagccagaggaaccaagcaca

SEQ ID NO: 165934 - RNA, 72 nt, Homo sapiens
cacccaagccaaccacagccaagagcagccaaacgacgccacgaacaaaagagagaccaagcaagggaacac

SEQ ID NO: 165935 - RNA, 81 nt, Homo sapiens
caacggcacgaccagaaaaccccggaggggagcaccagaagagccagagagccgaagagagaaacccccaaagaagagccc

SEQ ID NO: 165936 - RNA, 74 nt, Homo sapiens
aacaagaaccaaagaaaacaaaaggggacagggcggagaacggaaaagcaccaggaagcagagaggaccgcaga

SEQ ID NO: 165937 - RNA, 57 nt, Homo sapiens
gcacccagcagagacagcaaccggccacgaggagggcaccgccggccaggaggagag

SEQ ID NO: 165938 - RNA, 75 nt, Homo sapiens
cagccgcggagccgggggcaggagccaggcacagcagggaccagaaacgggaaaccgcgggggcaggagaaggag

SEQ ID NO: 165939 - RNA, 77 nt, Homo sapiens
cccccagagcgcgggaacgggggcggccgggacggaggacgcgcagcaccgcaccaacgaccgaagcaccaggcaca

SEQ ID NO: 165940 - RNA, 67 nt, Homo sapiens
caccacgggcggccccagaaggagcagaacagaaggcgcacaaaggaaagagaagcaaaaccaccca

SEQ ID NO: 165941 - RNA, 35 nt, Homo sapiens
ccaggcagaccgcagcaaagaacgaagcgaccgcc

SEQ ID NO: 165942 - RNA, 69 nt, Homo sapiens
acaccagcaccgggccaacaggccagccaagaaaggaacgcagccccaaggaaccaccaaacgccacag

SEQ ID NO: 165943 - RNA, 76 nt, Homo sapiens
gcggcgcagcccacggcgcaggcccacggagcgcagccgccgaggaccagagaagacacacaacaaccccacggag

SEQ ID NO: 165944 - RNA, 72 nt, Homo sapiens
aaccggccacggaaaacgaagccgagaagaaaccgcaagaaagaaagcgggcacaacaacccaaaaccacca

SEQ ID NO: 165945 - RNA, 83 nt, Homo sapiens
gccccgcgagacaaagcgggcgaccggccgccaagagaagggcacccgcacggccggcccggcgaccccgggggcagcacgcc

SEQ ID NO: 165946 - RNA, 79 nt, Homo sapiens
ccaagacggaaagcagaggacccagcaaagaaaaggggagcggacgggcccaggagcaggagccacgcagacgggccgc

SEQ ID NO: 165947 - RNA, 69 nt, Homo sapiens
agagggcggcgaaggaggcagaggcacagcgcagacacaaaaacagacgggaagccaaggaaggccaga

SEQ ID NO: 165948 - RNA, 81 nt, Homo sapiens
aaaaacacacggggagaaccgccggggcaccggggggggcgggaaggaaggagcagggagcaagacccaggcacggggcgc

SEQ ID NO: 165949 - RNA, 50 nt, Homo sapiens
ggacagccggccgagacgaaaggcgggggcgcaacacacagagggagaaa

SEQ ID NO: 165950 - RNA, 80 nt, Homo sapiens
cagcccccccgcccgcgcgccccggagcgcgaaggagcgcggggacgaagccacgacagcagagaggagcacggcagagg

SEQ ID NO: 165951 - RNA, 58 nt, Homo sapiens
aaggccgaacgaaaaccacccgcggacagggccaggcagcgccaaggaccgggacaga

SEQ ID NO: 165952 - RNA, 71 nt, Homo sapiens
acacagcaaccgccagggggcggaaccaaagaaaaacagaaagaggaaaaccagagaaacaagaggaggag

SEQ ID NO: 165953 - RNA, 119 nt, Homo sapiens
cgcagggagcgcggcaggccagagcccaggccccagagcccgcggagaggaggcagacgaggcagcagccacagaccagaggcagccggagcaggcgcggcggcggcacaccccacaag

SEQ ID NO: 165954 - RNA, 69 nt, Homo sapiens
gagggaggaggacccagccaaagagagaacgaaaggaaaccggaaacacagaggcgaagcgaggaacaa

SEQ ID NO: 165955 - RNA, 61 nt, Homo sapiens
ccacagcgagggaaaggccagccccagagaaggacagaaaacgggccccagacacaagccc

SEQ ID NO: 165956 - RNA, 37 nt, Homo sapiens
gagagcacaagcgcaagaaaggcccaccgggaaaaaa

SEQ ID NO: 165957 - RNA, 63 nt, Homo sapiens
cgcccgcacaggacacgaggcgcgacgccacagaccacggcccagagaacgaaaacaaacgga

SEQ ID NO: 165958 - RNA, 80 nt, Homo sapiens
gaagaagcgaaaaggagcacgccaggcgaccacgagcccccaggccgagagcacaaggaccgccagcgggagaccccgag

SEQ ID NO: 165959 - RNA, 50 nt, Homo sapiens
acgagaaaaaacgacagcacggaccacagacaaggccgacgcgcacgaac

SEQ ID NO: 165960 - RNA, 42 nt, Homo sapiens
aaaacacaggacacgcggcagagagcccgccgacacagccac

SEQ ID NO: 165961 - RNA, 84 nt, Homo sapiens
acccggagacagcccaaaacccggaagagcgccccaggagaaacaagcagaagccaagaccggcccgaggcggccgccacacac

SEQ ID NO: 165962 - RNA, 55 nt, Homo sapiens
gcccggccgcccgccagcggccaagaagcccgcccagaaaacagaagacaccccg

SEQ ID NO: 165963 - RNA, 38 nt, Homo sapiens
caaaagaggcagaaggcccaaaggacacgaaacaaaag

SEQ ID NO: 165964 - RNA, 66 nt, Homo sapiens
agagccgcccgggccagcggccgcgcacccccggccggaggcaccagcgcaccagcccgacgggga

SEQ ID NO: 165965 - RNA, 64 nt, Homo sapiens
aagagaggaacgaagaagcagccccccaaggaaggaaagcgcaagagagaaacggcccagacag

SEQ ID NO: 165966 - RNA, 84 nt, Homo sapiens
gggggacaggcggacgaaagaggacacgggaagaacaaagacagaccgcacgcccggggagaggcgccccgacaagccgcagcg

SEQ ID NO: 165967 - RNA, 85 nt, Homo sapiens
cagcacagccccaccaggcccagggccggcccccccaggacaacccagaggcaacaaaggcgagcaaggcagccgcggagcccga

SEQ ID NO: 165968 - RNA, 78 nt, Homo sapiens
ggacacggggcagacacaacacgaggggcgccgcgggacgcagaggagaggcggagaccgacgcggaaaaaaagaccc

SEQ ID NO: 165969 - RNA, 74 nt, Homo sapiens
aaagccggacccaggagaagaggggagagggaccacacagaaacgacaagcaagcgacaagaaggcagcggaaa

SEQ ID NO: 165970 - RNA, 93 nt, Homo sapiens
cagaaggagcggaggagccacggaaggacgacgacaaacacgcagaggaaggagcagcgcaaggccaggccacacaagccccagccaaaacca

SEQ ID NO: 165971 - RNA, 75 nt, Homo sapiens
cccaccagaaagaggcacagccccaaaagaaaggcaggggggaggcaaagaaagaagcccggaaacgggcggaag

SEQ ID NO: 165972 - RNA, 118 nt, Homo sapiens
gacaccaaacacacgggaccgaaacaggccggggcacagcacagcgccggcgcaagggcgacaggagccaagggaaaacacaccaaacggaacccggggaccaccagacaggccccag

SEQ ID NO: 165973 - RNA, 60 nt, Homo sapiens
agccacggggcccgcccagagccgcaagcaccacgaccgagaggagacgccaaggcccca

SEQ ID NO: 165974 - RNA, 53 nt, Homo sapiens
aaggaccaagaaccagagcgaggaaaacgccacgacagacacaaccaagcacc

SEQ ID NO: 165975 - RNA, 77 nt, Homo sapiens
acaccggagcaacgaggcgccgggaccggcgcagagacaggcgcgaggagacaccgcaggacagcaagcacacggag

SEQ ID NO: 165976 - RNA, 73 nt, Homo sapiens
caaaggcaccgagaaaaccaaaaggggcgcgggccagaaagacacacaggagagcggcgcagaaaaacaaaag

SEQ ID NO: 165977 - RNA, 65 nt, Homo sapiens
aagggaagagcggcccaaagagcacgcacgggagcacacagaggccagacagcaacagagaagag

SEQ ID NO: 165978 - RNA, 73 nt, Homo sapiens
cgaggagaaacagcagaaacgcaccaggccaaagaaagagaaggaaagaacgccggacaacagcggcgaagaa

SEQ ID NO: 165979 - RNA, 44 nt, Homo sapiens
acagcaaagccaagccaacagggcgccaagccggcaagagaaag

SEQ ID NO: 165980 - RNA, 87 nt, Homo sapiens
cgggaccccagggcccagggcccccccggccccaggccaccccagcacggacggagccaaccaaccccagggaggcaaacagaaaag

SEQ ID NO: 165981 - RNA, 37 nt, Homo sapiens
cgaagaaaagcgacgcagacacggcccgggcaaacag

SEQ ID NO: 165982 - RNA, 94 nt, Homo sapiens
cgggggggggcgggcggcacggcgcgagccccaagaaccggccaccggccccacacgaccgcggccggagcgggacggaaggggacacaggcaa

SEQ ID NO: 165983 - RNA, 80 nt, Homo sapiens
caacaccgcagccgcagcggacggcaggcccgagggcgaggggcccgggcagagggaaagcagaggacggaacaacccgg

SEQ ID NO: 165984 - RNA, 83 nt, Homo sapiens
gcaggggcggggcaacgcggaaggacgagccgggaggggagacaccgaccccaagcgagagagcagaagacaaggagacaagc

SEQ ID NO: 165985 - RNA, 54 nt, Homo sapiens
cacgggcggcgaaaggggcgggcaaacccgaggcaaccaacacggcagaaccgg

SEQ ID NO: 165986 - RNA, 73 nt, Homo sapiens
aaagagggacagccgcacggaggcgaaacacaaagggggagcacaggcagcaaggccgggaggaaccacaaac

SEQ ID NO: 165987 - RNA, 73 nt, Homo sapiens
ggcgcccgaaggaccagcgcaacggcaaggacccgcccccaagacgggcaaaccgacaccagcgacacaagcg

SEQ ID NO: 165988 - RNA, 73 nt, Homo sapiens
aaggaccgaaaggcaacaaagaaggagcgaagagccacaggacggacccgaagaaagaaaggaagaggcggaa

SEQ ID NO: 165989 - RNA, 87 nt, Homo sapiens
aggggacggaaacgccaccagcaggaggaagaggaaacggaggcgggggcagcccgcccgcaggaacggagcgaggaggacgacaag

SEQ ID NO: 165990 - RNA, 76 nt, Homo sapiens
ggcccgcgcggagccgcaccgaccccgaggcggcggagcaggaacccccgaacgcaaagccaccgacggacaagag

SEQ ID NO: 165991 - RNA, 58 nt, Homo sapiens
acgcacccccacgcgcaggagccaagaaggcgccgccggagcgcccggaggccacaga

SEQ ID NO: 165992 - RNA, 79 nt, Homo sapiens
gccggccgggggacgagccggagcagcagccagagagaagggagaccgagccaggccaggagagaagaaccgcagacca

SEQ ID NO: 165993 - RNA, 73 nt, Homo sapiens
gcaccaggcccaggagagagaggcggacaacccgacaccacaggacgggcgccaggcgaacgcgggagaccac

SEQ ID NO: 165994 - RNA, 72 nt, Homo sapiens
gcagggaggggaaacgaagcgcacgaaacaccaagccaacgggacaggaaaaccagcccacagcgcaagaag

SEQ ID NO: 165995 - RNA, 108 nt, Homo sapiens
ggcacagagacaagaagagaagcgaaagcacacgggggagcagacagaccagaccaggcggcggcccgacagagaccgacgaagaggcgcaaggcaaagaaaagccga

SEQ ID NO: 165996 - RNA, 74 nt, Homo sapiens
ggcaaggcggcgcgacgagaggccgcccccagcgaggggccggcggacgcccgggggcgcacgcacacaagacg

SEQ ID NO: 165997 - RNA, 83 nt, Homo sapiens
ggagagcaagaacccaggcggcgcgacgccagcaacccccgggcagccagggcaacgggaaaccaacaagcccccccggcacc

SEQ ID NO: 165998 - RNA, 61 nt, Homo sapiens
cagggaagacaacaccagggggaggccaggggggaaccgagcagcacagaagccagcaccc

SEQ ID NO: 165999 - RNA, 69 nt, Homo sapiens
agccccagcgcccacaccgccagccacacaaagccggagaaggaaagcacgacagaggcccacaagcgc

SEQ ID NO: 166000 - RNA, 71 nt, Homo sapiens
cagaccaacggcacagcagccacgacgccagcggaacggcaagcgaagaacgaaaccacaacaaacagaac

SEQ ID NO: 166001 - RNA, 72 nt, Homo sapiens
agacggagccgccacccagagcgcacggcgacgccccaggggaaaacccccgggaccagaccacgggcaccg

SEQ ID NO: 166002 - RNA, 73 nt, Homo sapiens
gagacgaaccgcaaagagaccgacccgaagaggcgcggaccaacacaagaacgggcgaagcagcaaaacacac

SEQ ID NO: 166003 - RNA, 76 nt, Homo sapiens
ggagcgcaaaaacgagacaaaaaaggcaaaagcgcagaaacagaaacagaaagggcacacggcccgaacaagggaa

SEQ ID NO: 166004 - RNA, 87 nt, Homo sapiens
ggcacacagacacgcacggagggcccaacccacagcgccccagggaacacaccagggacggccagaaaccacaagaaaacaggggag

SEQ ID NO: 166005 - RNA, 81 nt, Homo sapiens
aacagggaccaccgacgacaaggggagggcaggggcgcaggccaagcccgcaggccacgcaagcgggccaggcagaggggc

SEQ ID NO: 166006 - RNA, 73 nt, Homo sapiens
gaacgaccagacggagcgagaaaagcagaggcaacaagacggaaagagcaaggaggacaggagagacaacgga

SEQ ID NO: 166007 - RNA, 71 nt, Homo sapiens
cgaggacagcaccaaacaacaccaaaggaagaaagaccagcgagaggacaggaaacggcgaccaagggaag

SEQ ID NO: 166008 - RNA, 78 nt, Homo sapiens
ggagaggagcagaaggagcaaaaggcggacaggcaggacagcccaggccaagacagcagccacgaggaaaaagaaggg

SEQ ID NO: 166009 - RNA, 92 nt, Homo sapiens
gcgacagaggagggaggaaaacaaccgagggcagaagcacagacaaacgaaggacagagagaacaccgaaagagccaacccgagaaaggccg

SEQ ID NO: 166010 - RNA, 61 nt, Homo sapiens
acgaaaaggagaggaacggcaagaaagcaagcagaagcaccagccggcaaacaccaggcgc

SEQ ID NO: 166011 - RNA, 90 nt, Homo sapiens
gcggagccaccagcccgcaagcccagacaagccggggaggaagggcggcggaccgggcggggacagagagcaccagcacccacggcaccg

SEQ ID NO: 166012 - RNA, 83 nt, Homo sapiens
cgaacccgcacgcaggccaggggccggccagcacagagagaggcccaacacagagaaccagaagaacgcaggaaaaaaacaca

SEQ ID NO: 166013 - RNA, 40 nt, Homo sapiens
agcgagcgcgcgaggggcggccgagaccaggaagacaacg

SEQ ID NO: 166014 - RNA, 77 nt, Homo sapiens
ccagagcgcaagaaaaccaccagaccaaggaaaacgaacccaaaacaaaaccgacggcacacaaccaaccggcgagc

SEQ ID NO: 166015 - RNA, 72 nt, Homo sapiens
ggcacgggaaagaaacaacgaccgcccccaaaggaagaaaaagacaaccagggacaaaaaaggcaacaacca

SEQ ID NO: 166016 - RNA, 78 nt, Homo sapiens
cgccgcagagacaagaccgccgaacaacgccacggagggccggaaccagggggagaggcaccagcaacagaccaaccg

SEQ ID NO: 166017 - RNA, 70 nt, Homo sapiens
cggcgaccgagaggcgcggagccggggacgcgccacaccaccacaggaggcaagaaccgcacccacccca

SEQ ID NO: 166018 - RNA, 58 nt, Homo sapiens
aagaccccagcaccacagaaaaaagcaaagaaggcaagcgaaaccacaggaagcccga

SEQ ID NO: 166019 - RNA, 71 nt, Homo sapiens
gaagccacagccacgagggggccaaggagaccgcacgccggacggagcccaccaccaggagaaagggcccc

SEQ ID NO: 166020 - RNA, 71 nt, Homo sapiens
gcgccagggagcgccgcggcggagcggcaagggggaaagcggaccaagaggaaacccgaagaggcacagga

SEQ ID NO: 166021 - RNA, 61 nt, Homo sapiens
caggggggggcaaacccgagagaacgggccaagagcacagcagccccccagcaaacaaagc

SEQ ID NO: 166022 - RNA, 76 nt, Homo sapiens
aagcgggccgggaggagacagagagcccggacaacagcaccagggcagcgcagccccaggacggccgcacgccacc

SEQ ID NO: 166023 - RNA, 74 nt, Homo sapiens
aaagaaagggcacaagccagaacccccagagcacccaagaaccaggggacaggccccggcccaacccacacgcc

SEQ ID NO: 166024 - RNA, 83 nt, Homo sapiens
acaagccagcccgggaccgaggacccaaaccaaaaagggggaagaaagaaaaccggccagcagcagccacggaaaagaaaaag

SEQ ID NO: 166025 - RNA, 63 nt, Homo sapiens
ccgccgaacgacaggacgggggcggccggcccccagaggaccacccgcacccaggggacgcac

SEQ ID NO: 166026 - RNA, 72 nt, Homo sapiens
aacgcagagaacggaaaacacaccgaggggcgaagccaacaaagaaaaggaaagcagaaaagacacacaaac

SEQ ID NO: 166027 - RNA, 62 nt, Homo sapiens
ggcaccggggcggccggccaaagccaggggccgggagaggaaggccccaagcagccagcaga

SEQ ID NO: 166028 - RNA, 63 nt, Homo sapiens
cccaccgcagcaaggacgccgcagcagcaccggaggggccaggaaaagcaggggcgccccgcc

SEQ ID NO: 166029 - RNA, 64 nt, Homo sapiens
gggcggccccggagagagagccgcgcacgcacagacaagaggagaacgccaagccaaccgaaaa

SEQ ID NO: 166030 - RNA, 57 nt, Homo sapiens
cggcgccggggcggggcccaggagacggagagagggccgaggcagacaagggaaagg

SEQ ID NO: 166031 - RNA, 50 nt, Homo sapiens
gcagaccccacaacggaccagcagccaccgagaagaccaagagacagaag

SEQ ID NO: 166032 - RNA, 81 nt, Homo sapiens
ggggcgggggcccacacgccaggagcccgacccccggaccaagacgacccacgcccacgagacagggagcacgggcacaga

SEQ ID NO: 166033 - RNA, 77 nt, Homo sapiens
aaggccggccaagcaaaaagacaaaaccccggccgaacaagccaacaccagacacaagcagcccgagcgacaacacc

SEQ ID NO: 166034 - RNA, 63 nt, Homo sapiens
cagaccaaagcaaccgggaaccgagcagaagggcaaacgccagcgggggcaggacgggcaggc

SEQ ID NO: 166035 - RNA, 83 nt, Homo sapiens
aagagggaaccccagcgccaaagcgaggaagacagccaagcagagaaacgaaggagcgacaaggagaccggcccccggcagaa

SEQ ID NO: 166036 - RNA, 37 nt, Homo sapiens
accgcccgccaggacgacggaacgaccggggaagaag

SEQ ID NO: 166037 - RNA, 79 nt, Homo sapiens
cggcacagccgcccagccacccccaggacgcccgcaacccgacacgggcggagaacggaaaagcaccaggaagcagaga

SEQ ID NO: 166038 - RNA, 76 nt, Homo sapiens
cccccccccccaccccccgcccaacccccaacgaggaaggaaggagcagggcaaccggagagacgggggccagggc

SEQ ID NO: 166039 - RNA, 51 nt, Homo sapiens
gaacaaagagagagaagacaggacaaagcaggaagaagcgcccaaaggcac

SEQ ID NO: 166040 - RNA, 80 nt, Homo sapiens
gagacaaaggcaccaggccaccacagaaacaaaagcaacaaagagggcccagggacggcaggcacaggaggcaaaggacc

SEQ ID NO: 166041 - RNA, 69 nt, Homo sapiens
aagcaccgagcccacccacacccaagaacgccaagcgccaaaggcaaaaaggaagccgggcaaggagaa

SEQ ID NO: 166042 - RNA, 74 nt, Homo sapiens
gcccaaagaggcgagagcaaaaagaagggcggaaggacaggaaggcacacgaaagagcccagacggcccagcaa

SEQ ID NO: 166043 - RNA, 87 nt, Homo sapiens
cccagcgggaggaaggacccggggaggccggccacgccccgcacgggcggagaacggaaaagcaccaggaagcagagaggaccgcag

SEQ ID NO: 166044 - RNA, 36 nt, Homo sapiens
ccccccgcgggagggagagagagaaagccgcacacc

SEQ ID NO: 166045 - RNA, 85 nt, Homo sapiens
gcccggggcagggcccggccccgaccccgcggccggacgacccaagcccgcgagcaggagaggcccgaggacgaggaggacgagg

SEQ ID NO: 166046 - RNA, 67 nt, Homo sapiens
agaggaaagcaaaggagcagggaggcccccagggacccaccaggccacacccagcggaaaagaccgc

SEQ ID NO: 166047 - RNA, 83 nt, Homo sapiens
aagacaccgggaccccggaagccaaaaaggacaccaggggggaaaaaccacacaggcaaagaacgcgcaaaacaggacgaaaa

SEQ ID NO: 166048 - RNA, 70 nt, Homo sapiens
ggagcggaggagacgggccgcacccgccccccgcgcccgccaccggccgccgcccgcaacagacacagcc

SEQ ID NO: 166049 - RNA, 38 nt, Homo sapiens
ccgaggagccacgcagcagaaccagagacgagacgggc

SEQ ID NO: 166050 - RNA, 89 nt, Homo sapiens
cgcccagccaggagacagaggccagggcggcccagggccgccggaggcccagaagagagagcgcagcaggccgcgaacaccgcagcccc

SEQ ID NO: 166051 - RNA, 80 nt, Homo sapiens
aaagacaggcgccaggagcacagaagagcgaggaggacggcagcacacggccgggcaggccggacaacgagagcgcggcg

SEQ ID NO: 166052 - RNA, 56 nt, Homo sapiens
aaaacgcccgccacggcagggcgggagagacccagagcaaaacgagcaccaagggc

SEQ ID NO: 166053 - RNA, 38 nt, Homo sapiens
aaggaagcagcggccacgccagaaccacagagaagaga

SEQ ID NO: 166054 - RNA, 79 nt, Homo sapiens
ccgaagacaggggaggagggcgccccgaaccgcaccaggaccacaaaacaaaccacccaacacaagcaaagaccacgaa

SEQ ID NO: 166055 - RNA, 75 nt, Homo sapiens
ggaggcagggaggaaggggggagggggaggagccgaacgagccccagccagggacgacaagacagccaaacccag

SEQ ID NO: 166056 - RNA, 78 nt, Homo sapiens
cggcgcggcggcggggcggccgcgaccaggcaccgacgagagggcgcaccgcgccggagcccgaccgcggggacccgg

SEQ ID NO: 166057 - RNA, 69 nt, Homo sapiens
acaagagacgaaacacgcaccaaaaacaaaagagagcgcacgaccgaaggagacccaggaagaaagggc

SEQ ID NO: 166058 - RNA, 71 nt, Homo sapiens
gcgcagcaaacaagacagcagcgaagcagcagggacgcaccaaaacggacagccgaagacaggcgacccac

SEQ ID NO: 166059 - RNA, 49 nt, Homo sapiens
gcacccgcggagacggacgcccggaaaaggggacccaaccacagccccc

SEQ ID NO: 166060 - RNA, 71 nt, Homo sapiens
gcaggaaaccgaagacaggccaccccggaggaagccacagggaggaggaccagcgggagggccacggaacg

SEQ ID NO: 166061 - RNA, 37 nt, Homo sapiens
accaagccagaaaacaggaggaaaccgagaagggaag

SEQ ID NO: 166062 - RNA, 74 nt, Homo sapiens
cacagagcgagaggaaggggggggcaagacgccaagagaaaaggcgagagcacaaagcaccaagagccgagaag

SEQ ID NO: 166063 - RNA, 72 nt, Homo sapiens
acccaagacaagacagcgcaaggcaggacacacagcaacgaagcaggggaggagggaagaccggacagcgag

SEQ ID NO: 166064 - RNA, 72 nt, Homo sapiens
aaggaacgggccgaaccgggagcgaggaaccagaacgaaaagcgccagaaaggaaagcgccacacggagagc

SEQ ID NO: 166065 - RNA, 77 nt, Homo sapiens
gcggagacgccagggaccggcgggagggagaccgcaagcaagagcacagaagccagggagccgaaggcaagacaagg

SEQ ID NO: 166066 - RNA, 72 nt, Homo sapiens
ccgagccaagcaggaaggcccagcaaagagaagaaggccaaccaagccccgagcagacccagccgaaaccaa

SEQ ID NO: 166067 - RNA, 74 nt, Homo sapiens
ggggaaagggccggaaaacacacgccccgaaaccgggcaagccgagagacaaagagagaagcggggaagaaagc

SEQ ID NO: 166068 - RNA, 88 nt, Homo sapiens
cggggcccagcagacagccgaggggagcgcggggcccggcagaaagggcggagaacggaaaagcaccaggaagcagagaggaccgcag

SEQ ID NO: 166069 - RNA, 80 nt, Homo sapiens
gggccgagcggcgcccggagcccgcgggccgacacgcggcgggacagcaggggggcaagagcagacggcggcagacaaca

SEQ ID NO: 166070 - RNA, 84 nt, Homo sapiens
gacgaccggagaccccgaacagcgcccccaggggcgggcccaaagggcccgaagccccccaccagaggaagcaaggagccggag

SEQ ID NO: 166071 - RNA, 54 nt, Homo sapiens
cggaagaagcgcgcggagcgcgggagacaacggcaagcggagaagagcaaggcc

SEQ ID NO: 166072 - RNA, 110 nt, Homo sapiens
agccgggcaggccccgagaggaacccagccgacacgacgccgccggcaggcccgcgcaccagccgcaggcaccaagaagaccaacaagcagaagagccaagacaaaaagg

SEQ ID NO: 166073 - RNA, 85 nt, Homo sapiens
cacgcgccgggagggggcccgagccccgcaacaccgcggcccacgggacccccaggagggacccgcagccagagacgcgcacgaa

SEQ ID NO: 166074 - RNA, 76 nt, Homo sapiens
caagacaacaggcccgaagaggaagccacaggagcagcaaaggaccaggaaggggacagggaacagcggaagcaga

SEQ ID NO: 166075 - RNA, 85 nt, Homo sapiens
gacgcgcaaccacgggggacgggaacgagggggaagcggcccagaggagggagcgaggaaccaccggacgaagacagcaaggaga

SEQ ID NO: 166076 - RNA, 37 nt, Homo sapiens
caccgcccaccgagccggcccgccccgccagagcgac

SEQ ID NO: 166077 - RNA, 80 nt, Homo sapiens
aggaccggaggccgggaagccaacgaccacacgcaccacccaggcccaggaccgagcccgacgcccacagacaggcgaac

SEQ ID NO: 166078 - RNA, 71 nt, Homo sapiens
cacagagacaaccgaagaccagggaaaggcaagagaaagcagacgagcagagaggccgcgcaggagggagg

SEQ ID NO: 166079 - RNA, 69 nt, Homo sapiens
aaacggcggaaaaaagcggagaagagcacgcagcaacgcagagagcaaaacccagacgcagccccaaga

SEQ ID NO: 166080 - RNA, 73 nt, Homo sapiens
cgcgccggcaccggggcggccggccaaagccaggcccgggggcgaaaaacaccaccagggcaagggaaggggc

SEQ ID NO: 166081 - RNA, 79 nt, Homo sapiens
gaccggccgccggcccccagaacaaggacaaccaaaggggacggcaaaagggaaggcagcgcgggacagaaagaaagcc

SEQ ID NO: 166082 - RNA, 56 nt, Homo sapiens
ggcagaagggaggcagaaacacagcgaccgagagagaccacaccgcgccagacccc

SEQ ID NO: 166083 - RNA, 79 nt, Homo sapiens
cagccacggcaggaaggcgaggcccgcccggcacaggggaacaacggcccaagagcacagagaagaccaagggccgcca

SEQ ID NO: 166084 - RNA, 59 nt, Homo sapiens
acgaagagcagggaaacaccacgaagcagccaaggcaggcagccgcccgacggggcccc

SEQ ID NO: 166085 - RNA, 35 nt, Homo sapiens
ggaaaaggcgagaagcaagagaaaccacaacccca

SEQ ID NO: 166086 - RNA, 56 nt, Homo sapiens
gagcacacgacgggacccacgaggcacagcagcgggaacacagcaacacagcgcca

SEQ ID NO: 166087 - RNA, 78 nt, Homo sapiens
gggggcggccgggacggaggacgcgcagcaggcagcggcaccaacggacagggacaagaagaagcggacgcccccaac

SEQ ID NO: 166088 - RNA, 72 nt, Homo sapiens
ggagggagaccggggcacggacgcacgccacccgcgaccagagccggccaaaaagccggccaaagaagcaag

SEQ ID NO: 166089 - RNA, 79 nt, Homo sapiens
aggagaacgaaacggagccagagaaggcagaagggacggccgggccagggaggggcaccgccggcgggacagagaacca

SEQ ID NO: 166090 - RNA, 66 nt, Homo sapiens
aaaaaagcggagaagagccgagcacaccacaggccaaacggaggaaggcaccacggcgccaaacga

SEQ ID NO: 166091 - RNA, 75 nt, Homo sapiens
ggagaaaagaagaacacgcccaaaacgagaacacgaggacccaaagaacaaacccggagagaagaaaaccccagc

SEQ ID NO: 166092 - RNA, 84 nt, Homo sapiens
ccaaggagcacggacggacccagcacgaggaggcgcgaggagaggacaccagcaggaaaacacgggccccagaaacaaggaaag

SEQ ID NO: 166093 - RNA, 69 nt, Homo sapiens
ggcagaccacacccacagaaggagagcaaaggagacaggggccgcaaggccaggcgcgcagaggcaccc

SEQ ID NO: 166094 - RNA, 83 nt, Homo sapiens
gaccccacggaaagacaccggccagcggccagagcgagcagacggacaacaggaagccaagccacaagaccgccaagaacccc

SEQ ID NO: 166095 - RNA, 74 nt, Homo sapiens
ccagaagaaacggggccaagagacgacaaaggagaggaaaacagccacccgacccacaacacgggaagaggcac

SEQ ID NO: 166096 - RNA, 56 nt, Homo sapiens
ccggagcgaaccaccccaaacagggagagaacagcacacagaggcgcaaggggaag

SEQ ID NO: 166097 - RNA, 65 nt, Homo sapiens
agcgaaaagccagagagcgccaaacagagagaggggaaaacgacccccaggaaaaagaaaaggac

SEQ ID NO: 166098 - RNA, 33 nt, Homo sapiens
acggcccaagcgaaaaggggagccaggacagga

SEQ ID NO: 166099 - RNA, 77 nt, Homo sapiens
gacgagagagaagaggagagagaagagaccacgccgcgaggcaaacgcaagggaaaaaagggcaggggaaagagaga

SEQ ID NO: 166100 - RNA, 75 nt, Homo sapiens
acgccgcgcccgcggagggaaaaggcagaagcccccggggagagacagacagagggacacagagaggaagaaagg

SEQ ID NO: 166101 - RNA, 89 nt, Homo sapiens
agaaacaaaggcaagcacaaagcaaaaaacgcaacaccagcacagagcaaaagagccaacacccaggccaggccgcccggaaggaggcc

SEQ ID NO: 166102 - RNA, 69 nt, Homo sapiens
gagaaaagcggaaaaagcaggacaggcagaggaaagagcacgaaacccccaggcaccagagagcgcaga

SEQ ID NO: 166103 - RNA, 79 nt, Homo sapiens
cccggcggacagcgggcagagccaggagcccgggccgagggggggccccagcccggccgaacgggcgcacgacacaaac

SEQ ID NO: 166104 - RNA, 80 nt, Homo sapiens
cagaagagacgcaggccgggggcagcgccaggaccgggagaggggacgaaggcgaaccagcaagacaaagcaacaaaaga

SEQ ID NO: 166105 - RNA, 75 nt, Homo sapiens
gcagagaaaaagggaaggccccaaagcagaccccagggaaaaagacccgagaagcgcagacccaccagggaaagc

SEQ ID NO: 166106 - RNA, 81 nt, Homo sapiens
aggacgcgcgcccgagccagccccacgccgcggcgcgcccgggccccgcgacccaggcgccagggcaccacacccgggaag

SEQ ID NO: 166107 - RNA, 70 nt, Homo sapiens
ggaagacaggaagggcgggcaaacaggacggcccgacacccagccggaggaaagagcccaccgagcccga

SEQ ID NO: 166108 - RNA, 80 nt, Homo sapiens
cggggagccgggcgggaccggcgcggcgccgggggcaccgcgccgccgagagagacgggggccaccagcgcccccaggcc

SEQ ID NO: 166109 - RNA, 56 nt, Homo sapiens
ggccgcgaccggccgggaaagggagcagcaccggccacacccacagcacgaccgga

SEQ ID NO: 166110 - RNA, 83 nt, Homo sapiens
aagcccgcgccgcccccaggagcacaaaagggcccgagaccgaggacgagaagaagcgcgaggaaggcaaagggcggaccgca

SEQ ID NO: 166111 - RNA, 75 nt, Homo sapiens
gagaacccaagcaacaaagcggcccacgcacgggacagcacggccaagcagagcaagggccccgagaaaggcaga

SEQ ID NO: 166112 - RNA, 62 nt, Homo sapiens
gaaaaccccagcggaacacccacggacaagaaccaagagcagaacccgcaaggaccccacaa

SEQ ID NO: 166113 - RNA, 63 nt, Homo sapiens
aacaggcagaacagacagaccaaccgagcgcggcacgaagacccgaagaaacacacgggcagg

SEQ ID NO: 166114 - RNA, 67 nt, Homo sapiens
gaccaggagaggaaggaaggggcgagggccacgaaaaaccgggcgcgcaaacgaaaccggcagcagc

SEQ ID NO: 166115 - RNA, 71 nt, Homo sapiens
aagaagaaaagccaaaaccaccccggacccaagaaacacaggggaaacacgagagagcaacagccgacaga

SEQ ID NO: 166116 - RNA, 51 nt, Homo sapiens
cccgccaacgaaccacaggcgagaccgagacaaggggacaagggagggaac

SEQ ID NO: 166117 - RNA, 78 nt, Homo sapiens
gacagcgaacagcgcggccgcaggaagaaggaggccgaccaggccgacaaagcagacgcccgcaaacgaccggggaaa

SEQ ID NO: 166118 - RNA, 74 nt, Homo sapiens
aacgccaagaggcgaggcggacgaaacccgaccggacccaaaacacgcggacaccagaggacgcccggcagaag

SEQ ID NO: 166119 - RNA, 82 nt, Homo sapiens
ggacacgaaaccaccgggaagcgccggggaacgcagacgcaaaacgaagaagcaaggccgacaacacgaggagaccaccaaa

SEQ ID NO: 166120 - RNA, 71 nt, Homo sapiens
acaccacaaaaaacagaagagaaagaccagaacccggaagcgaaacaggcgagagaaccccaagcgaagga

SEQ ID NO: 166121 - RNA, 65 nt, Homo sapiens
ggcccgccagccccgcgccgacggccggacccgccccggcggaggaggcgaaaggaagaaagcac

SEQ ID NO: 166122 - RNA, 83 nt, Homo sapiens
cgcccgggagaggccgcggcggccaggccccagacacagacgagcaggggaagggccccagacccaagcagagaggagaggag

SEQ ID NO: 166123 - RNA, 67 nt, Homo sapiens
gacgcgccgcgccccaagccccggagggacagcgggagccagaagcccccgcggccacggagggcaa

SEQ ID NO: 166124 - RNA, 75 nt, Homo sapiens
ggaacgcgccgccgccacagcgcgaaaggggcggagaacaagagagaaacggagaaaaacggccgggaaaacaac

SEQ ID NO: 166125 - RNA, 73 nt, Homo sapiens
acgcagggcgcccccggccgcgccacggccgcggagggaacccgggccccgccccccacacagacacggcacc

SEQ ID NO: 166126 - RNA, 70 nt, Homo sapiens
gggcgggaagggaccacccaggaaggagcggacacaaaaggggccggaaaggccggcgagagccggggcg

SEQ ID NO: 166127 - RNA, 55 nt, Homo sapiens
ggaccggccgacacgcggcccccgaccgacaagagagggcggcagaaggaacacc

SEQ ID NO: 166128 - RNA, 69 nt, Homo sapiens
gggaacccccacgcggccagcgaaaacgcccagagcgcaaacacggccacagcaggcccggcaacaagc

SEQ ID NO: 166129 - RNA, 81 nt, Homo sapiens
caagaagaagagccgcccccaccagacgaggccaccagccagggaacgccggggggggcacagagccccggaagacagccc

SEQ ID NO: 166130 - RNA, 69 nt, Homo sapiens
gaaacaggcaaaacaaccagaaggggagaaggcaggcaccacaaaaaggacaggccaccaggggaacaa

SEQ ID NO: 166131 - RNA, 73 nt, Homo sapiens
gggccgcgagacacaaggaaccaagaaccgaacagggggaaagggaaccgaagggccgagaagccgcgggggc

SEQ ID NO: 166132 - RNA, 78 nt, Homo sapiens
cggagggccgagggagggccgagccagccgcggccggaggagcccccaggccgagacagacccagcacggaccccccc

SEQ ID NO: 166133 - RNA, 61 nt, Homo sapiens
acaacacccacgcaggccagagaggagcacagaccagcgcgcgaccggagccccacagcgg

SEQ ID NO: 166134 - RNA, 51 nt, Homo sapiens
cacgcacagaagagcccggcaaaacagcgaggcaaccagggaggcaccaaa

SEQ ID NO: 166135 - RNA, 78 nt, Homo sapiens
cgcccacacgacccagacaagagacgacccccacaacacgggaagagggaaagacagagagaacgaagcaagaagaca

SEQ ID NO: 166136 - RNA, 67 nt, Homo sapiens
gaaaccaagagagagaccggagcccacccccagcagaggaaagaaggaccaaaccggaaaacagaaa

SEQ ID NO: 166137 - RNA, 80 nt, Homo sapiens
ggcccaggcacaagggcccagagacccggccgacgcccggaagacaagagagggaacagaaacccagaaagaaaaggaga

SEQ ID NO: 166138 - RNA, 80 nt, Homo sapiens
ggaagaaaacagagaaagcaagagcagcagacggcggggaaaaacgcaggaccaaaagaaggcaaaagggagcaaagcca

SEQ ID NO: 166139 - RNA, 81 nt, Homo sapiens
agacagcacaaccagcggccccggccccaacaggcccgcgcccagagccccgcagggggacaacccacggcacccgggacc

SEQ ID NO: 166140 - RNA, 75 nt, Homo sapiens
cgagaggagcgggcgcacgggaggggaacgggccgaacgcaggaccaggcacagacaccacgaacagggaggaaa

SEQ ID NO: 166141 - RNA, 63 nt, Homo sapiens
gacacgagccaagaaaagaagaagccgagaagagagcacagaagagaggcaccaggacgagag

SEQ ID NO: 166142 - RNA, 61 nt, Homo sapiens
acgcgggcaagggagcgggagcggcggcgccccgccgcaggcgaccggcccgaggaccgcc

SEQ ID NO: 166143 - RNA, 78 nt, Homo sapiens
agaccggcaccgaagaccaaacccaagaggaggaggaggagagcaacaccagcaaaggcccacgcggcagaggacacc

SEQ ID NO: 166144 - RNA, 72 nt, Homo sapiens
agcgccccgacccgcaggccagggagcccaagacgaaggggccacggaagaagagcgcaggagccgcagacg

SEQ ID NO: 166145 - RNA, 80 nt, Homo sapiens
gccgccgccgcagcgggaccgcgcgaccggcgcccgcccgcgaggacaagaagggcagagaagccagaacggagaaacaa

SEQ ID NO: 166146 - RNA, 77 nt, Homo sapiens
cagcggcccggagcccgccggcgcaccaggagacaaaggacaggcagaaaccagaacaggcaaagggcccccagacc

SEQ ID NO: 166147 - RNA, 77 nt, Homo sapiens
gccccgagccagcagcgcgcaccaccgcgaaggcgggccggggaccgcaggacgggagagaagcgccggccggaaag

SEQ ID NO: 166148 - RNA, 80 nt, Homo sapiens
cagcccccaggacgaagagcccgacagcacacgaaggggcagaccaacaccacccagcaaaaaccccgacgaacgcgcca

SEQ ID NO: 166149 - RNA, 74 nt, Homo sapiens
cgaagggcccaggccacacacagaaccgacccaaggaacccaaaggccagggcagcagagcacggagggcagga

SEQ ID NO: 166150 - RNA, 86 nt, Homo sapiens
aggccgaggcgggaagccccagcgccgggccaaggccaaggccagccggacaaaacaaagacaaagagccgggaaaaacccagcag

SEQ ID NO: 166151 - RNA, 74 nt, Homo sapiens
gcccccaaaggcggaacagggcaaaaacccgggagaccaaccaagaagagagagaaggaaggaaaaaaacccag

SEQ ID NO: 166152 - RNA, 75 nt, Homo sapiens
ggccggccgcccccccgcgcagagagagacacagccgaaagcggacgcaagagcaagaccagccgcggagacgac

SEQ ID NO: 166153 - RNA, 77 nt, Homo sapiens
ggaaggccgagaagaagcaaagggcaaccagggaaacaggagagcaagcgggcaacagagagagccagaagaaagga

SEQ ID NO: 166154 - RNA, 58 nt, Homo sapiens
gaaagaacgcagaggcccacagcaagaaagaagcggcacggaaggaaacggcccagca

SEQ ID NO: 166155 - RNA, 55 nt, Homo sapiens
acgaggcggagaaacaccaacaggaacagaaagggaaccaaaacaggcccgacac

SEQ ID NO: 166156 - RNA, 69 nt, Homo sapiens
aagcccgagcaaaggaagaaccaaagaaaacaagagggccagaggaggacagcacgacccggacacgaa

SEQ ID NO: 166157 - RNA, 71 nt, Homo sapiens
caggggagaagacaggccgcgccggaagcaacacggcccagcgaaaaaaagggggagaggcaccagcaaca

SEQ ID NO: 166158 - RNA, 69 nt, Homo sapiens
ccacccaggccccgacgccccgaggggcaacaggaaaacaacccagagaacccaaacccccagacaaga

SEQ ID NO: 166159 - RNA, 78 nt, Homo sapiens
cagagagacgacacagcagcaaggcaaagcaaaacacgaccggccaaaggaggagaagcagagaccagaccgcaaagg

SEQ ID NO: 166160 - RNA, 114 nt, Homo sapiens
cgagccacaagcagcagagaagaccaggaaagacaggaggccacccccaaagaaaagacgaagaacggaagcgccccagaggagagggcggagagacggagaaaacgcaggaag

SEQ ID NO: 166161 - RNA, 40 nt, Homo sapiens
ccgaggccccccacccaggagaacagcaaccgaggaggac

SEQ ID NO: 166162 - RNA, 60 nt, Homo sapiens
aaggaccaagaaccagcacccaccccgagggggaacgagccgagccgagaaaacacccaa

SEQ ID NO: 166163 - RNA, 81 nt, Homo sapiens
aagcacccggaaccacacacgcaagcgccccacagagcaagacacagggggcgcggaagagggagcgcgaaggagcgcacc

SEQ ID NO: 166164 - RNA, 78 nt, Homo sapiens
accccaagagacagcagcgaacggaagcccggaggcagaggccccacacaggggcgcaacgccggagcgggggaaccg

SEQ ID NO: 166165 - RNA, 67 nt, Homo sapiens
ggaaggggccgacaaaagcgcagcaagacggccgcgcggcccgcagggcgacagaaaaaggaccgcc

SEQ ID NO: 166166 - RNA, 58 nt, Homo sapiens
acaaaacaccaccgcaggggagagaagagaagagccccgaggcgccaagaaaacacag

SEQ ID NO: 166167 - RNA, 79 nt, Homo sapiens
gccccaggagaacagggaagagcagcggaggaagcgaaaacaaagcgaaaaccagggaaacgccccgagccaagccccc

SEQ ID NO: 166168 - RNA, 79 nt, Homo sapiens
cggaggccgcggagcgccagccaagaaggaagggacgcaaaaaggaagccccacaaggaccaggcaaaacggaagagca

SEQ ID NO: 166169 - RNA, 73 nt, Homo sapiens
ggagcaagcaggacaaacagcacaagagcggacaacccaccaccaggaggccgagaaggacagagaaccggga

SEQ ID NO: 166170 - RNA, 77 nt, Homo sapiens
aacagaaggaccagccccacaacggggcccgcaagcagaacaaaacgagaaagaaggaacagggggggccacccaca

SEQ ID NO: 166171 - RNA, 84 nt, Homo sapiens
gcggagcgcggccgacgcggcccgccggccccagggcccccggccgcgccccaccacacgccgcaaccaagccgggcacgcaaa

SEQ ID NO: 166172 - RNA, 77 nt, Homo sapiens
agagagagaaggaacaggagaaagcaggaggagcgcgggcgggaagcacaaagagcggagaagcaccaagagcccgg

SEQ ID NO: 166173 - RNA, 94 nt, Homo sapiens
ggcggaggccccagggaagcgcagaaagcaggcgaacccgcggcgcaaaacgggcggagaacggaaaagcaccaggaagcagagaggaccgcag

SEQ ID NO: 166174 - RNA, 87 nt, Homo sapiens
ccgccgcacagacagcccggagaggggaaaaccacgccccggaccaagcccgggagcaaggcagcaacaggcccagggccgagagcc

SEQ ID NO: 166175 - RNA, 61 nt, Homo sapiens
aagcaagagcgacgcaagaggcagccaccacgggccggggcggagaacggaaaagcaccag

SEQ ID NO: 166176 - RNA, 71 nt, Homo sapiens
gacaccagggccaaccgaggaaacccgaccaggcagcaacagccacggaccaaagaaggcaccgggaagaa

SEQ ID NO: 166177 - RNA, 72 nt, Homo sapiens
accaaaaggggcgcggcagagcaacccgcccccagaaggccaccggccaaaaggacacgagcaccaaaagaa

SEQ ID NO: 166178 - RNA, 64 nt, Homo sapiens
gccaaagaagggagagagaaccggggaacagaccggaggaaccgagcggaacaccaggaccaga

SEQ ID NO: 166179 - RNA, 89 nt, Homo sapiens
ggcacgcaagggaagacgcgaggaggcagccgccgcccgcccgccaaacgcagaaagggacgcaccaaagaagacagacacgcagaaaa

SEQ ID NO: 166180 - RNA, 40 nt, Homo sapiens
cgaccgaacccgacccagagccgggaagggaggaccagag

SEQ ID NO: 166181 - RNA, 82 nt, Homo sapiens
cgccgccgccgccaagaagggcagcgagcaggagagcgacggcagccggcccgggcgcccccagacacggaccgcgccgagc

SEQ ID NO: 166182 - RNA, 72 nt, Homo sapiens
aaagacaaacaacccagaaccccgcaggacgggaacacaggaacaaaacaaagaccgcccgggaccaggcca

SEQ ID NO: 166183 - RNA, 75 nt, Homo sapiens
aagggggacagaaaaacagaccaaagaaccggagagccggaaacagaagggaccagccaacgcaggcggagcaca

SEQ ID NO: 166184 - RNA, 63 nt, Homo sapiens
gccccacaaagcagcggagaagggacaacacccgccacaggccaagaacccaaagcaaggcga

SEQ ID NO: 166185 - RNA, 89 nt, Homo sapiens
gcccaagggcgagccggcgcggggcggcgcgggcggaggcggcggagcgcgagagccgagcggaccagggccaaccgccccccagcagc

SEQ ID NO: 166186 - RNA, 55 nt, Homo sapiens
ccggaacgcggcagcccccgccaggcccaccaaggggagaagcagaccgcaccag

SEQ ID NO: 166187 - RNA, 85 nt, Homo sapiens
cgaccagccgcggagccgggggcagagaaccagagagcacagagaaagcgggaaacggccaaacagaacaccaacaaggccaaag

SEQ ID NO: 166188 - RNA, 71 nt, Homo sapiens
gagggggaaaaaagaaaaacacagcaacaccaggccacgccagcaaggggggagcagcacaagaccggagc

SEQ ID NO: 166189 - RNA, 77 nt, Homo sapiens
gcacgagcaacagacgagcgcgccaggccgacagccgcggccgggcccgagagacgccggcccaccagccagcgggg

SEQ ID NO: 166190 - RNA, 53 nt, Homo sapiens
ccggaccgcgcaggccggggacacggcacagcaagggggagcgggcggccagc

SEQ ID NO: 166191 - RNA, 81 nt, Homo sapiens
gggcagccggagagccgggaaagaacaccagcaggaaaaaagagcggcagaaggccaaacggccgagcaggcgagcgaaga

SEQ ID NO: 166192 - RNA, 82 nt, Homo sapiens
ccccgccaagggccccaagagggcacacagcacacaccgacaggagggcccgacccggccacagcccaaccgccacgcgaca

SEQ ID NO: 166193 - RNA, 73 nt, Homo sapiens
aaccccacaccccccggcgagccaagaacacggccacccaacagaaggggagaaaaacaggaaaagaaagacg

SEQ ID NO: 166194 - RNA, 81 nt, Homo sapiens
gccaggccacgaaaccgcaagaaccggggcgacagaggagaagcgcgcaggaggccagcgacaaggaggaagggaaccagc

SEQ ID NO: 166195 - RNA, 82 nt, Homo sapiens
aacccccgcaggaacagcacaaacacggggggaccacggaaagaggggacagcccagagcaagcacacggaggcccgggagc

SEQ ID NO: 166196 - RNA, 70 nt, Homo sapiens
cgaggggcgaaccacggaaaggaggaagaagacaccggggacagacaggggaccaagaaaggcccaggga

SEQ ID NO: 166197 - RNA, 69 nt, Homo sapiens
agggaaaagggggaggaagagaagacaacgcacaacagaagaagagaacgagccaaaaggacaaaccag

SEQ ID NO: 166198 - RNA, 78 nt, Homo sapiens
gcaggcccggccgacggccacacggcggccgcagggcgccggagccccccagggaagaaaacgccagagaagcagagc

SEQ ID NO: 166199 - RNA, 76 nt, Homo sapiens
gcacagacagaacccgcaccagaagcgggcaccaacagacaaccagggcaagcagaggcaaaggcaagggcggaaa

SEQ ID NO: 166200 - RNA, 67 nt, Homo sapiens
ggcaccaggaccaccgcggcagcacgcggcgaagaaagcggggacgcacgaaagaagaaaggacacg

SEQ ID NO: 166201 - RNA, 73 nt, Homo sapiens
cgagaaaagagaggcagagagacccgccgcaagagcacaaggggaggaacagaacgaggaaccaccgagagcc

SEQ ID NO: 166202 - RNA, 74 nt, Homo sapiens
cgggagaaaacccggaaagacagaagaaagggagcccccaagaacagcgagcacaggaaggaaaccggaccggg

SEQ ID NO: 166203 - RNA, 51 nt, Homo sapiens
accaagaaccagcacccgaggaggccgcgaggcacagaagaccgggagacg

SEQ ID NO: 166204 - RNA, 60 nt, Homo sapiens
cgggcaagccccaccagccccccccaagagagcggggcccggcgcacccaccaccgccgc

SEQ ID NO: 166205 - RNA, 41 nt, Homo sapiens
cccgagggcgggacacagggacccagccccaacacgccccg

SEQ ID NO: 166206 - RNA, 77 nt, Homo sapiens
gacccaagcacaccagaaagaacacgaccaggaaagacagacaggcccagaggccaccagaagccggccggaagcaa

SEQ ID NO: 166207 - RNA, 51 nt, Homo sapiens
agcgagcggaccccgaccccgaggcgagacggaaagcgaaaacgcgagcgg

SEQ ID NO: 166208 - RNA, 115 nt, Homo sapiens
cgacaaggaaggaagaaggcgcacaccccagcgcgcaaagcgcgaggggcgagaacaaacagacgccgaagccgcggaaggagaagacacagcagcacaacagagacagccgagg

SEQ ID NO: 166209 - RNA, 72 nt, Homo sapiens
acacagcccgggcgccggcgagaacgagcgcaggacaaaccggcgaccacacacggggacgacggggaagcc

SEQ ID NO: 166210 - RNA, 76 nt, Homo sapiens
gaaaagcaaaaaggcacaagcggacaaaagcacggcccaaagaagagcaggccaaggaacaagaagagaaacgaag

SEQ ID NO: 166211 - RNA, 79 nt, Homo sapiens
gaaacaaggcaacagaaagagcaacagcagggcaacagacagccccagcacagaggaaagagaaagagccagcaagagg

SEQ ID NO: 166212 - RNA, 34 nt, Homo sapiens
gcaggccgcccccggcaagccccgggaacagaga

SEQ ID NO: 166213 - RNA, 75 nt, Homo sapiens
aagagaagaccagcaaaaggagaccccccggcaccagccgaggccacagcacagacaagaggaccgaagagaaaa

SEQ ID NO: 166214 - RNA, 74 nt, Homo sapiens
gcaagacaagaagaagccaagcagaaaagccaggaagcggcccaggacagaaaccaaggagccgccgcgcccag

SEQ ID NO: 166215 - RNA, 56 nt, Homo sapiens
cagaagaccagggaggaccgacaggccggccggggggggcgcggggcccacgcccc

SEQ ID NO: 166216 - RNA, 78 nt, Homo sapiens
gggcgcgcggaggaagcggccaggacacgcagcacagcagaggacgagaacagaagggccaagaaaagaagcagaaac

SEQ ID NO: 166217 - RNA, 82 nt, Homo sapiens
cacgaggggaggacccaaggagaggcacccgggacggaaccaacagacaccccgaagaaccccaaagaaacccagagaccaa

SEQ ID NO: 166218 - RNA, 78 nt, Homo sapiens
ggaggagcaggaaagagaagggaagcaagaacgcgggaggagacaaaggaggcccagaggaaaaagacacgcgagaag

SEQ ID NO: 166219 - RNA, 75 nt, Homo sapiens
acagagcagaacagaaacaaacagaggcaccgcccaggaggaaggaccaggaaaggaacgggcaaacggaacaga

SEQ ID NO: 166220 - RNA, 69 nt, Homo sapiens
ccaagggagagggggcccggagagcaaggcacccggaccaccgaccccggggaaggagggggggcgggc

SEQ ID NO: 166221 - RNA, 76 nt, Homo sapiens
ggcaaaaggcggcgccgaggagcgggacaacccaggagcagacagagaagcgcgcagcaggaggcacaggaggaag

SEQ ID NO: 166222 - RNA, 63 nt, Homo sapiens
gagccaaaaggaggccggagagacagcccaggaagggccgcccagcggcacccacgacgcagc

SEQ ID NO: 166223 - RNA, 68 nt, Homo sapiens
aagacaagacgaagccaccgcagaaggggagacacaagggcacgaagggaagccaacagacccaggag

SEQ ID NO: 166224 - RNA, 79 nt, Homo sapiens
cgcccaaccgcccggccacgacgagacaagccccaggagcaccaccaacccgcccgaccggccgcagcacagagcccgc

SEQ ID NO: 166225 - RNA, 76 nt, Homo sapiens
aaaccaggcgcgacgaagagccccccaagcccgaagaggaaggagcgggcccaagaaaagccgcgacaagaagaga

SEQ ID NO: 166226 - RNA, 69 nt, Homo sapiens
agagaacagagaccggcaaggacccagcagcggacacagcccacgcagaggaaccaccggacaaacacc

SEQ ID NO: 166227 - RNA, 76 nt, Homo sapiens
gggaccagcagccgggccagggccagagcaaaggacccgagccccaaagacagaaaagccccgagacggaagagaa

SEQ ID NO: 166228 - RNA, 77 nt, Homo sapiens
gcagagccacgcgacgcacaacccgagacccgggagggcaagaaggaacagacaaaaacggccggaaggaaacacag

SEQ ID NO: 166229 - RNA, 64 nt, Homo sapiens
ccgagcggacccacagcaagaacggccagggggcccggcccccgccagaccagcggccgcaggc

SEQ ID NO: 166230 - RNA, 81 nt, Homo sapiens
cccaggccaagcaaccaccagcagcccccagagcggaacacaggcaaagaaaccccaaagccagcaagaccacagcagcac

SEQ ID NO: 166231 - RNA, 65 nt, Homo sapiens
gaaacacagaggaaaacggaaagccgagcacaccgagaggaaggcacaacagaggacaagagaac

SEQ ID NO: 166232 - RNA, 58 nt, Homo sapiens
cccggaaagaagagacacagaggagccacacccccaggaaccgccccagaggaggaca

SEQ ID NO: 166233 - RNA, 67 nt, Homo sapiens
cgcgcagggagcaacagccaagccaaagacggaccacagagacacgggacgcgcagcggcccaacga

SEQ ID NO: 166234 - RNA, 42 nt, Homo sapiens
ggccgcgaaacgcggagacccaacgaacagggcaaaagcaga

SEQ ID NO: 166235 - RNA, 55 nt, Homo sapiens
gccggaagggcaggcacagggcaaggaggagggagacaggggcaaaaaacggcag

SEQ ID NO: 166236 - RNA, 72 nt, Homo sapiens
cagaaggagaaggacccacccacagggagcaaacggggagggggaaccaggcaggacggcaagaagaaaccg

SEQ ID NO: 166237 - RNA, 69 nt, Homo sapiens
gaccacagccgagcgagagcaggaagacggcagagggacaaaaaaaacaaaacacgaagcgcaacaaac

SEQ ID NO: 166238 - RNA, 78 nt, Homo sapiens
cgacgggggggacgagcggagcccgggacaggagacgccggcccaagagccgcagggaggaggggccaaccaccagca

SEQ ID NO: 166239 - RNA, 67 nt, Homo sapiens
acgcgcacacaagggagcccccccaccacccccgagagaagcaaaaagccacgagggacacaaggcc

SEQ ID NO: 166240 - RNA, 68 nt, Homo sapiens
gccaagcaaacagaagcgcggccaagagccggaggagccaccaacagaagcaggagccaggaaaccaa

SEQ ID NO: 166241 - RNA, 66 nt, Homo sapiens
gaacccagaggcgggaggggccgggaggcagaggggcagggaacagccaggcgagcccgaagagcg

SEQ ID NO: 166242 - RNA, 87 nt, Homo sapiens
caggacaagggacagccagagacacaaaagaaaaccgcagggggcaaaggacagcacgggaggaccgcccgccgaccgggcggcacc

SEQ ID NO: 166243 - RNA, 75 nt, Homo sapiens
agaccccccagacccagagcgacgcccgcccgccaaaaggacgcgacgcagacccaagcacccggcacccgagcc

SEQ ID NO: 166244 - RNA, 79 nt, Homo sapiens
gaccccccggcgccgcgccggcggcggcacgggcaggagacaaccagaggaggaccaggaacgcagacccccgaaaacc

SEQ ID NO: 166245 - RNA, 41 nt, Homo sapiens
cgccccgcgcacaacaggcgggggccacggacggggccgag

SEQ ID NO: 166246 - RNA, 77 nt, Homo sapiens
cgacacggccacccacgccggaggccggggagccgacgccggcccccacccgagacacaacagagaaagggccaaaa

SEQ ID NO: 166247 - RNA, 102 nt, Homo sapiens
agaaacccagcaaaagcgggaagaacaaaggaaggggagcccgggacccccgggggcgcaggagaaaagcagaagcccaggacgcccggcaccggagacgcg

SEQ ID NO: 166248 - RNA, 80 nt, Homo sapiens
gcgcccccgccggccccaaagacgcaaacggcccaccgccccgggggagaggcgacagggggaccgcggcgcgagggacg

SEQ ID NO: 166249 - RNA, 79 nt, Homo sapiens
gaacaacagggcaagagaacagcacccggacaaccaggagcggcacgggccggcccaacaacccggagccagggaccca

SEQ ID NO: 166250 - RNA, 77 nt, Homo sapiens
cccgcgcccgccccaacccagccacaggggcccccggagggccacaagccagagcgccccggccaaggcagaccagc

SEQ ID NO: 166251 - RNA, 72 nt, Homo sapiens
gaaacagacacagcacaccacaccaaggacgggaaggggcggaaaacgaggaaacaccggacccacggcgca

SEQ ID NO: 166252 - RNA, 77 nt, Homo sapiens
ggcccccccaggacaacccagaggcaacaaaggcgagaccccaacaggaaccccccggcggcagagagcagaagggc

SEQ ID NO: 166253 - RNA, 75 nt, Homo sapiens
cgacaaggagagaagcgcggagccccaagagcagagggaaggcaacacgagcggaagaacacacaccgggaccgc

SEQ ID NO: 166254 - RNA, 120 nt, Homo sapiens
gcagcccgccccccggaagggcaccgcgacgacaccccggggaggcgaggagagagaaagccgacaagagacaacccccaaaagcaccgagaccgggcagagcccagggggagaagccag

SEQ ID NO: 166255 - RNA, 74 nt, Homo sapiens
gcgccccccgcaccgaacacaaggcaggagcgagaagagagagcagagacagccgcggaacgagggaaaccgcc

SEQ ID NO: 166256 - RNA, 71 nt, Homo sapiens
cggagcgcgaggcgggcgcggagaagcgcggagagccaaaccccagccaccggaagaagaagagaacaccg

SEQ ID NO: 166257 - RNA, 70 nt, Homo sapiens
gcgcccccccagcgcaagggcagaaaagcccggccggagggacggcgcagacaccacccgacccacaagc

SEQ ID NO: 166258 - RNA, 69 nt, Homo sapiens
ggcgcccgcccgcccaaccccggccaccaaagcagggccgcaacgggagcgcccgccaagaggagggca

SEQ ID NO: 166259 - RNA, 77 nt, Homo sapiens
agaaccccacagcgaaggaaaaggcgccaccaggggccagaaccgcccacggcccccacagcggacccggaacccca

SEQ ID NO: 166260 - RNA, 82 nt, Homo sapiens
gacacaagagcgcgagaccaacagcgaaagacccaggcagacaagccggaacacaggaaccggaagcgcacgaaccggccag

SEQ ID NO: 166261 - RNA, 47 nt, Homo sapiens
cagccaggccccgcgggaggagagaaccgggccggccaggcggaggc

SEQ ID NO: 166262 - RNA, 55 nt, Homo sapiens
cagaaaacgcaaggagaaacccaagagcagcggcaggacaggcgcaacagccaga

SEQ ID NO: 166263 - RNA, 77 nt, Homo sapiens
gggcgagaaaggcccacgcagcccccaagcaggccgcagccaagccggaacaggagcggcgagcccaaacgcaaggg

SEQ ID NO: 166264 - RNA, 134 nt, Homo sapiens
ccggggagaggccaacagcaagagccacagagccgcacgagccagacgaaccgggccccgcagggagacaggggaaaaggggaaacagacaggagaagagaaaggaggaaggggcgaaaccaaagaagaagaaa

SEQ ID NO: 166265 - RNA, 74 nt, Homo sapiens
acccagcaacacggagacacagggcggcagcaggagcccagcccggcgacagcgaaagaaagaacccgagaccc

SEQ ID NO: 166266 - RNA, 57 nt, Homo sapiens
ccacccgaaaagcacgaacaccgagaagcggagacaagaacgaaggcacagccgacc

SEQ ID NO: 166267 - RNA, 78 nt, Homo sapiens
acggcaagaagacgacaggccgcaacacaaagaaacaggagacgaagagaacagaagagccaaagccggcggacagca

SEQ ID NO: 166268 - RNA, 83 nt, Homo sapiens
agcgagccagcgcccggagcaagcggagccccccaagagccggaaaggacaggacaccccagggagagaccgagaccagaaaa

SEQ ID NO: 166269 - RNA, 52 nt, Homo sapiens
cagcagcgcgcaagaccgagaccagacccggggccgcaaggccaggcgcgca

SEQ ID NO: 166270 - RNA, 63 nt, Homo sapiens
cacgccggaggaaccgagaagagcagagcggagggagccccagacacggacgccacaaacggg

SEQ ID NO: 166271 - RNA, 80 nt, Homo sapiens
ggaagaacaggcaaggaagagagaagaagaaggaggccgcggccagaaacccaagaaaaagcgaaggaacgcagagcgaa

SEQ ID NO: 166272 - RNA, 63 nt, Homo sapiens
agaggcgccaggacgaaggcccacgggcaaggcccagcaggaggaaagggcagaaaaggcgcg

SEQ ID NO: 166273 - RNA, 71 nt, Homo sapiens
cggggacagacagggagcagagaaaccaaaagggggaagagaaaagcacgagaaagagaaaaaagagcgac

SEQ ID NO: 166274 - RNA, 80 nt, Homo sapiens
cggagcgggaggcgggccagcgacaaaaagaggggggcaagccggggcacaggaccgagcggagaaagccgaaccacacg

SEQ ID NO: 166275 - RNA, 69 nt, Homo sapiens
acacagagcagccccaagaagagcaaaggaggccgagcgcaccagccgagagcagcaagacaggaacgg

SEQ ID NO: 166276 - RNA, 68 nt, Homo sapiens
aaacgagggacaacacagacccaccagcagacgagggggaagaaaagggaggggacaaaagaccacca

SEQ ID NO: 166277 - RNA, 81 nt, Homo sapiens
aagaagaagaagagcagacggcagccaccaaggcaggcagcgaagagcacagagaagaggaacaagccgagaagaagacaa

SEQ ID NO: 166278 - RNA, 52 nt, Homo sapiens
cagaaagaggagcagagacgccggacagacaacacgcggggccgggagacag

SEQ ID NO: 166279 - RNA, 58 nt, Homo sapiens
acaccgacccacaggagcgcccgcggaggagcgcccgggaacgacgagcccgggacag

SEQ ID NO: 166280 - RNA, 65 nt, Homo sapiens
cggggcgccgccgggcggccgggcgcggcgagcccagacaaaacagaggagaccagaccagaagc

SEQ ID NO: 166281 - RNA, 87 nt, Homo sapiens
ccacgagcaccgaagagcgcgccgcccccgaagccgacccgcgcccccgccggccgccgccgcccagccgcgcccgccgccccccag

SEQ ID NO: 166282 - RNA, 59 nt, Homo sapiens
gaagacggcagcggccccggagacacaccggcccggccgcccaaagaacaaccccccgg

SEQ ID NO: 166283 - RNA, 55 nt, Homo sapiens
cccgccggcgcgcccgcgcggcgcggggaccgcggcccggagcgggggacagcga

SEQ ID NO: 166284 - RNA, 52 nt, Homo sapiens
ccccaccccagaggcgcggagcgccccagggacgaggcaagacaacggcgaa

SEQ ID NO: 166285 - RNA, 73 nt, Homo sapiens
cgaggcagaggcgacacaagaagagggcggagcggagacgggagaagaaaagacgacagcagaccacagcccg

SEQ ID NO: 166286 - RNA, 82 nt, Homo sapiens
ggcgcccccccgccaaggcccggcgagaggggagcgaccgccagcacggcccggaaggaacaagaggcccaggagaagcgac

SEQ ID NO: 166287 - RNA, 69 nt, Homo sapiens
caggcgaggccgggacaaagaacgcgaaggggcgccgaaccgagcccgaagggaagggccggcgggcca

SEQ ID NO: 166288 - RNA, 116 nt, Homo sapiens
agcaggagaggggccgggccccgcagcggaaccggacccagcccgagccgccccacacccacaggcacgagaagagaagcccagagcaaaacaccccaaaccagaccaccgacgcc

SEQ ID NO: 166289 - RNA, 74 nt, Homo sapiens
cgggacggaccgagaccggaccgagagcggaccgagagcgcgaaacgcacgagaaggcaggcagaaaaccgaag

SEQ ID NO: 166290 - RNA, 73 nt, Homo sapiens
gggaaacaccagaaaacaccccgggcggaaaaaccgcacagccaacaggcaagaagagaaccgacagcacaag

SEQ ID NO: 166291 - RNA, 73 nt, Homo sapiens
gaaacaaggacagaccaaaaggcgcgccaaagcgccaaaaaccgcacgcgagggagagcgcgagagacacgag

SEQ ID NO: 166292 - RNA, 70 nt, Homo sapiens
acggaggaaagaagaagacagcacgcagaaccaccaaacccccaccgcaaggaccccacaaaggcacccg

SEQ ID NO: 166293 - RNA, 52 nt, Homo sapiens
cacgcgcggaaggcagcgcccagcagcgcagacgagaagaggcgaacggaag

SEQ ID NO: 166294 - RNA, 74 nt, Homo sapiens
gcgccgcgccacccgcccgagagaaggaggccgcagcggggcccagcacgagagaggagaaggagaaacggagg

SEQ ID NO: 166295 - RNA, 77 nt, Homo sapiens
agggcccaccaccagcccagaaaaccacccgcgccgaagaaaacaggagccccaagaacccccaccccgcccagccg

SEQ ID NO: 166296 - RNA, 34 nt, Homo sapiens
cagagaaacgaaagccaaaagaaacccccaaaac

SEQ ID NO: 166297 - RNA, 74 nt, Homo sapiens
cgagaccgccaacaggacaccgaagccaaccgggcaaggccagagaaggcgggagaaagacacgaaccacagaa

SEQ ID NO: 166298 - RNA, 77 nt, Homo sapiens
gacaacaacagacgggaagcgagaaaacagacagagcagaagaaaccaagacggcagagagcaaaagcagaccggaa

SEQ ID NO: 166299 - RNA, 80 nt, Homo sapiens
cgagaaaggcagacacaagagcaagcccgcacgggaaggcaccacggaaagaaacccaaaggaagcaagaagggagacac

SEQ ID NO: 166300 - RNA, 70 nt, Homo sapiens
cccggaggcggcgcagcagcaccgggaccagcgcccgagcccaacacgcagcgaaccaccaacgcgcgca

SEQ ID NO: 166301 - RNA, 78 nt, Homo sapiens
aacaaacgaagggcaccggggacacaaggacacggcacaaacgaggaacgccaagcggagcgacagggcacacacgac

SEQ ID NO: 166302 - RNA, 70 nt, Homo sapiens
gcagacaaagccccaccccagagcggagaccgacccaagaaaccaaaagacaaggcgcccgcgaagagcc

SEQ ID NO: 166303 - RNA, 79 nt, Homo sapiens
gccaacacagaaacacgaagaagagagacaaccaaaagacacaagggcacgaaagagaccagaaaggccacagagaaag

SEQ ID NO: 166304 - RNA, 76 nt, Homo sapiens
caaaaaggcaaccacagagagagagagggaggggaaacggaaacggccagaagcaggacaaagcagagaacaaccc

SEQ ID NO: 166305 - RNA, 53 nt, Homo sapiens
acgacccgaagagaagggggacaaaggcaagagagaagagaaggaaaggacgg

SEQ ID NO: 166306 - RNA, 83 nt, Homo sapiens
ggccgcccagccaggacgcgcccggagaagacaagcagaccggaagaccgacggaagaccacaccccgagggagcccaggaca

SEQ ID NO: 166307 - RNA, 79 nt, Homo sapiens
gaagaaggaagggccacccaggacaggggcacccaggaggcggcgacggcggcggcggggggagaggaagagaaagaag

SEQ ID NO: 166308 - RNA, 89 nt, Homo sapiens
cccagggaagccacagcaccccagcacccagccagcagaggcccggaggggcggggggacccaaccgcggcggagcccaggagccaggg

SEQ ID NO: 166309 - RNA, 59 nt, Homo sapiens
acggaccgaaggccacaaaaccacgacacggcaggaaggcaacaggacaacgcgggcac

SEQ ID NO: 166310 - RNA, 66 nt, Homo sapiens
cgcgaacccgccacgcggccggacaaggcacgaggcgcggcgaccaccacagcagagcccggcgaa

SEQ ID NO: 166311 - RNA, 59 nt, Homo sapiens
ccagagcagaggccgcgagacagaccaagaagaacaaccgcagaaaccagaaaccacag

SEQ ID NO: 166312 - RNA, 105 nt, Homo sapiens
ggggcgaccccaaaggcaccagaagacccaaaacggaaggcgcgcaagaggccaaaacagaagaggcaaagcccagccacagcagcagcccagcagcaaacaacc

SEQ ID NO: 166313 - RNA, 69 nt, Homo sapiens
gccaggaaggaaagccccgaccacacgagggagacggaaaccaacaagcagaagacaacagggagcaga

SEQ ID NO: 166314 - RNA, 57 nt, Homo sapiens
caaccaggggaccagagaggacggcaccagccaggagggaaagacaaggagccgggc

SEQ ID NO: 166315 - RNA, 76 nt, Homo sapiens
cagcagcccgccccaggagagagggcgaagccacgaagagcccgagagcgagaggccgagccaacaccagaccagg

SEQ ID NO: 166316 - RNA, 54 nt, Homo sapiens
cgacagggcggagccacccccagggagagcgcgcagacggagccaggggagaaa

SEQ ID NO: 166317 - RNA, 81 nt, Homo sapiens
ggggcgggaccccgccgcggcgggaggcggagaagaagcaggcgccccccaccagccacagacacagacgacacggcggac

SEQ ID NO: 166318 - RNA, 114 nt, Homo sapiens
cgaggcgcggccaaagccggccggcgggcacgagaccaaggggcccaccgcaccacgccccagggcggcgccgaggccgggccagggcccaaggaaagccccgaagccaccagg

SEQ ID NO: 166319 - RNA, 108 nt, Homo sapiens
ggccgcgcgcgccccccgcggagcccgcgcagccgcgcagccccacgcaacgggcccgcgcgcagacaacaggcacaaagagagaaggaacacccacagggcagacag

SEQ ID NO: 166320 - RNA, 72 nt, Homo sapiens
cagccgcggcagggaaaggcagagaccgggcacaaccagccagcaacccgcccgggccaagcaccgcccacc

SEQ ID NO: 166321 - RNA, 75 nt, Homo sapiens
cacaagccacaggccacgagggccccgcccaggcccaagaagagccacaacccaaaccagacacaccgagcccca

SEQ ID NO: 166322 - RNA, 80 nt, Homo sapiens
gcggagggggaccccggcccggcaggaaacaggaacacgaaagaggaaaaacgcacaagaaaccgaagccaaggaggaga

SEQ ID NO: 166323 - RNA, 74 nt, Homo sapiens
agaacacacgcaccccggggacagggacagaggcacagaagagcgcaggggagcggagcaagaaaccaagacaa

SEQ ID NO: 166324 - RNA, 89 nt, Homo sapiens
cagcgccagcccaggagaggaaggagcggcgcggcgcgcgcggaagcaggaggagcaagcacaacaggccgaagaggccggagaaggac

SEQ ID NO: 166325 - RNA, 78 nt, Homo sapiens
ggaagacgaggagaggagaagagcgaaagaggccagcagagaagaaccggccaggagcgagggcaccggcacggacca

SEQ ID NO: 166326 - RNA, 82 nt, Homo sapiens
gacggcaccgggagagcgggggaacgagggcagcgaagacgcagcggagggacagaagccaccggaggagagcagacacagc

SEQ ID NO: 166327 - RNA, 66 nt, Homo sapiens
ggacgcggagggcgacgccgagggccagcgggacggagcagggaacagaaggagcggcggacacac

SEQ ID NO: 166328 - RNA, 79 nt, Homo sapiens
caaggggcccgaacagaggggggggacacagcgagccacgcgccaggaagcccggccaaggagccaaccgcgcgagccc

SEQ ID NO: 166329 - RNA, 72 nt, Homo sapiens
cccaccagaagaaccggcgacccccccaaggagcagggaagccaaccggagaagagcaacaagcaagaggga

SEQ ID NO: 166330 - RNA, 77 nt, Homo sapiens
acccggggacaagcgcgggaacggcgcggaagagaggcgagggagccgaccacagcgaagcagaaggccccccggag

SEQ ID NO: 166331 - RNA, 76 nt, Homo sapiens
agaaaggggacggaggaacccggagcagcggggagaggcaccagcaacagaccaaccgcagcaagcacagagacag

SEQ ID NO: 166332 - RNA, 88 nt, Homo sapiens
aaacggggcgcgggggccgcgcgaagacaggaccagggcacggagggacagcaaaaccggcgccacggaccaaacacaaccaagcacg

SEQ ID NO: 166333 - RNA, 69 nt, Homo sapiens
aagggacaaacggaagcaaggaaaacaagaacagcgaaaaagagagcagcgaggaaggagccagacgcc

SEQ ID NO: 166334 - RNA, 75 nt, Homo sapiens
aaccggaacccacaccagaggacagagcccacagaaaagagccgacaagaggcagccaccccccccacgcgcacc

SEQ ID NO: 166335 - RNA, 75 nt, Homo sapiens
acaagcaggcaccgggccacgcaccgccgcgcgcgggccggaaggggggcgacgcggaaggcacaacacggcaac

SEQ ID NO: 166336 - RNA, 85 nt, Homo sapiens
ccgccaagcgcggccgccgcccccgcccagaagagaccaagaccggcccgcgccggcaggaggcgcgaagaaggcccccggggga

SEQ ID NO: 166337 - RNA, 70 nt, Homo sapiens
aagacaggacccacggggcacggagcgcggacgcccaggagcgggcgccggcggagcgccgcccccaggg

SEQ ID NO: 166338 - RNA, 42 nt, Homo sapiens
accccagcagcacccaagcaggaggcgggcagcccgcagacc

SEQ ID NO: 166339 - RNA, 61 nt, Homo sapiens
gccgccgggccggaggccacgaggaaggaagaaagagaccgacagagccacaagaaacaaa

SEQ ID NO: 166340 - RNA, 53 nt, Homo sapiens
agacccagcgcccaaccgcccgggggcccaccacagccacccacggccgaggc

SEQ ID NO: 166341 - RNA, 86 nt, Homo sapiens
cgcgcgcggggccggcgcgcagcccggcgggacagcggggcggcggcgccgggggccggggagcgccaggaggagacaggaagaga

SEQ ID NO: 166342 - RNA, 67 nt, Homo sapiens
gaacacaaacaccgaagcacgggcccaacaggcaccccacaaacagggcagcaggaaacaggggacc

SEQ ID NO: 166343 - RNA, 74 nt, Homo sapiens
aaagaaacaagcaagccgccaaaggagaaggaaggaaccgggagaaggacagagcgcagaccacccggaagccg

SEQ ID NO: 166344 - RNA, 79 nt, Homo sapiens
aggcacagcgggccgagaaagcaaacagaaaggccaaaacccccaagaacgcaaggagggacaggacggaaggagcgga

SEQ ID NO: 166345 - RNA, 43 nt, Homo sapiens
ggcaggccccggggcaaaggagcccacccaagggccagagacc

SEQ ID NO: 166346 - RNA, 81 nt, Homo sapiens
aaaccgcgaaggaccaaaggcgaccgggcagcgccacggccaccacgcggcagacagggcccgcccggagcaaagacccgg

SEQ ID NO: 166347 - RNA, 80 nt, Homo sapiens
gggaggagagacggcggcggaaaaccccaaaaggacaaagacggcggaaaacccgaagcagaagcccgacacaggcacaa

SEQ ID NO: 166348 - RNA, 71 nt, Homo sapiens
accacaaaggagcccaaccagagcggagcgcagaccgaggaaaaggagagaggaacaggagacagcggaga

SEQ ID NO: 166349 - RNA, 57 nt, Homo sapiens
gggagcaggacaagccacccccaggcacaggccgcgagacgacgacccgccccgcac

SEQ ID NO: 166350 - RNA, 78 nt, Homo sapiens
aacaaagggggaagccgagaagagaaaccaaaaggggaggaaccccacagaccagcaaacggggcacggaagccagac

SEQ ID NO: 166351 - RNA, 71 nt, Homo sapiens
agcgcaaagggcagagaaaaaagagcagcgaggcgaaagcaaccacaggacacaaaccggcacgaaaagga

SEQ ID NO: 166352 - RNA, 57 nt, Homo sapiens
gccacaggagcgggacggggcgcccagacgagcccaccacggaccacccgcagccag

SEQ ID NO: 166353 - RNA, 68 nt, Homo sapiens
gcagggggaggcccacagcaggggaaagcaggccaccccgccacagagcccccgccaagagcaggagc

SEQ ID NO: 166354 - RNA, 72 nt, Homo sapiens
gcagggcagggcccgaagcaggccagcgcacagaaggagccaaaaaggggagaggaagaaagaagagaggag

SEQ ID NO: 166355 - RNA, 78 nt, Homo sapiens
cagagccgcagagcaaccagcaagagaaagacagcaaagaaaaggagaagaaaggaaaaaaacaaccccgggcacccc

SEQ ID NO: 166356 - RNA, 60 nt, Homo sapiens
ggcagaggaccggaggccgggaagccaacgaccacacgcagcacgcagcacgggggcagg

SEQ ID NO: 166357 - RNA, 87 nt, Homo sapiens
agaaggaggagaccccgccggcaaccaccccgcgagaagaaacagaccccgacaaaaagcagaagacagcgaaacggaaaagaaaag

SEQ ID NO: 166358 - RNA, 74 nt, Homo sapiens
cagccaggaaaaaaacaacagaggggaccaagggagaggaggggcacagggccagagcagagggaggaagcgga

SEQ ID NO: 166359 - RNA, 84 nt, Homo sapiens
cgccgccgccgaggaggcgagcagccgggagacaccgccaccgccagggaagaaaaggacccccagagagcaaaaacaaacaaa

SEQ ID NO: 166360 - RNA, 59 nt, Homo sapiens
cagacggccaccggcgggaggaacaaaagggaaggagaaacaacaagaaaacggcccgg

SEQ ID NO: 166361 - RNA, 77 nt, Homo sapiens
ggcagcagcgggccccgccaccggcacaccgaaggagaaggcagaagagagcacaaaggagccagcgagaaggaggc

SEQ ID NO: 166362 - RNA, 77 nt, Homo sapiens
cccgcccggggcagcaggcaacccaaccggcacgccacaccgcaagcgcagcacccaccagcggccaaccgcccacg

SEQ ID NO: 166363 - RNA, 75 nt, Homo sapiens
aaacgcccagaaccacagaacacaacccgccaaggaacaaggagcgggaaagggagcagcaccggccacacccac

SEQ ID NO: 166364 - RNA, 79 nt, Homo sapiens
acggcggcggggaaaacgacgcccacggaggaagaggggaggccgcccgagggggcgaaggccacccggaggagaagga

SEQ ID NO: 166365 - RNA, 109 nt, Homo sapiens
ggcaggggcaggaagaacccacgggcagcacacacgaaagagaagccccggagaaccaccgggaggaacgggccacaacacccggcaccagcggccacccgcccccaga

SEQ ID NO: 166366 - RNA, 33 nt, Homo sapiens
gcaaaacagaacgcgacaggacccagaccagcc

SEQ ID NO: 166367 - RNA, 75 nt, Homo sapiens
acgcgcacaccaaagcaaggggaaacacaagaccggaggccacggacccgcgaagagcgacggccccagggacaa

SEQ ID NO: 166368 - RNA, 81 nt, Homo sapiens
cgggccgggcgcacggcggcccccggccaccgccggccaggagcacagcaagcgggagcaggcagaccaaaggaacagaag

SEQ ID NO: 166369 - RNA, 88 nt, Homo sapiens
cgaaccggccggggacccaaaagccaacacaccgccaccccgggccagggagccccggccccacaagaccaaggcgcaagccacagcc

SEQ ID NO: 166370 - RNA, 82 nt, Homo sapiens
cgccccaccgggacgccgggccgcgggcggacccacaggagacaagggaaggagaaaacacaaagcgagaggagcaccaggg

SEQ ID NO: 166371 - RNA, 76 nt, Homo sapiens
gcgagcgcacgccaacgacgaggaccgacgcaggagaaccagcggcgggcaaaaaacagaaaaacgaccggacagc

SEQ ID NO: 166372 - RNA, 74 nt, Homo sapiens
aggagccagaaacgcaaaggagagccaggacaagcccaagacggacagggagccaaacaggcagcgaccagacg

SEQ ID NO: 166373 - RNA, 82 nt, Homo sapiens
cgcacgcgggcagggaacaggcggagcggaaggaaacaccagacacacccccagaccggacgacgaacgcccgacaacgaca

SEQ ID NO: 166374 - RNA, 76 nt, Homo sapiens
aaagaagcggcaaggagagaaacagccgacgagcccggagcgagagcgagagaagggaccagccagaagaaacaac

SEQ ID NO: 166375 - RNA, 79 nt, Homo sapiens
cagggccgagaggacgccagcggcgcgcagggagagaagcccccagccaggagagcagcggaacaaggcaccaggagga

SEQ ID NO: 166376 - RNA, 54 nt, Homo sapiens
aaagcacgcagaggagacaggaaaaggccaaagcgccggaggaagagcggaaaa

SEQ ID NO: 166377 - RNA, 58 nt, Homo sapiens
ggcaacaaggcggacaagagaagccgccaggcagcacccacagggcacaccaaagcgg

SEQ ID NO: 166378 - RNA, 81 nt, Homo sapiens
aagcccacgaacacaaagcaggagggagagggccaagaagcagcggacacgccgcggcacccccagagaaaagacccaagc

SEQ ID NO: 166379 - RNA, 72 nt, Homo sapiens
gaccggaacgaccccggcagacccggaaaaaggaagcaacgccaccagaggaagcaaaagaagcgaaccggg

SEQ ID NO: 166380 - RNA, 75 nt, Homo sapiens
gcggggcagaaaaacaagacaacaaccccccccgcgaaacgcgaggaagagggcaagaagccagagcaaaaaaac

SEQ ID NO: 166381 - RNA, 39 nt, Homo sapiens
acgggagacaagcgcagcgagaacggcggccaaagcgcc

SEQ ID NO: 166382 - RNA, 57 nt, Homo sapiens
gagcggaaaacccagaaccggcccacaggcaacagacaacacccacaaacagccgcc

SEQ ID NO: 166383 - RNA, 47 nt, Homo sapiens
ccccgcggccccggccggaggagacaggcagagccagagcccaagcc

SEQ ID NO: 166384 - RNA, 55 nt, Homo sapiens
ggagcagcgcaggagaaaaagaggcagcacggcaggagacgaggagaggacagca

SEQ ID NO: 166385 - RNA, 76 nt, Homo sapiens
acaggcgccggggagcagagccggaagcggcaggccacaaagccacagacagacgcgaagcaaagcgccacccaga

SEQ ID NO: 166386 - RNA, 88 nt, Homo sapiens
cacagaaacccggacgagaggcagcgagaggaaaagcccccaccccgcgcacacagcgcaacaaacagccggcaccagagaagagaga

SEQ ID NO: 166387 - RNA, 73 nt, Homo sapiens
gcaagccccagcgaccccaagcaaaccgcccccgaaaacacaagaaaagcacgcacagacagagccaacaccg

SEQ ID NO: 166388 - RNA, 75 nt, Homo sapiens
aaggcccggacacagcaaaccgggccacaggccacaccaaaaagcaaagcaaagaaagaaggaaaaaaaaaaagc

SEQ ID NO: 166389 - RNA, 58 nt, Homo sapiens
cccggggcggagcggcggaagcccgcggggcaaaagaaacaacgaagcaagcccaagg

SEQ ID NO: 166390 - RNA, 34 nt, Homo sapiens
agcaaggcacagaaggcgaaacgaaaaccagaag

SEQ ID NO: 166391 - RNA, 66 nt, Homo sapiens
ggcagacaaaagggccaaagaagggagagaggacacacccagaccgaccggagaaacggccagaga

SEQ ID NO: 166392 - RNA, 58 nt, Homo sapiens
aacagaacccaaaagccgacaaccccagaaacaggcagaaaagacagaagcgaggaaa

SEQ ID NO: 166393 - RNA, 86 nt, Homo sapiens
cgcgcccggccgcgccggacgacggaaggagaaacgacaggcaacaagacaagcggcggggccccggacgaaagcaagaagacaca

SEQ ID NO: 166394 - RNA, 77 nt, Homo sapiens
gacaggaacacgcccggggaagcgggacagcaagggaggcagcagacgggaagaagagagaaaacaaaagcgagaca

SEQ ID NO: 166395 - RNA, 83 nt, Homo sapiens
cgcgcgggcgccaagaaagccagccaggcaaaagggaagcgaaaccaaccagaagccgagaagacccgggaaaaggagaagag

SEQ ID NO: 166396 - RNA, 57 nt, Homo sapiens
gccccccggccagggaacgaggccgggaaccccgcagaagaagaggggggcaaaaga

SEQ ID NO: 166397 - RNA, 53 nt, Homo sapiens
gggggggcgggcaggccggccacagacaagaaggcgcagagacgcaagcggaa

SEQ ID NO: 166398 - RNA, 48 nt, Homo sapiens
gccccggcaagaccgaaggcgccggccaaaagagaggagccgcgcacc

SEQ ID NO: 166399 - RNA, 80 nt, Homo sapiens
aaaacacaccggagacggggggaaacaggcgaggcggcggcgcccggagggcagcgagccgggagggacaaagacaccca

SEQ ID NO: 166400 - RNA, 75 nt, Homo sapiens
gcagcacaagaccgcccgggggagcaccaccggagcccagagcccggcagggcccggcccgccccccacccccgg

SEQ ID NO: 166401 - RNA, 78 nt, Homo sapiens
caccacaaaaacgaaggcggcggaacaggcccaaacccggaaaaagcagccgaagaccagcgggaaagagaaaaaagc

SEQ ID NO: 166402 - RNA, 79 nt, Homo sapiens
aaacaggaaaaccacggagcgcccgcgggaccaggacaagaccggaccggacccaaaggggagcacggggaggggaggc

SEQ ID NO: 166403 - RNA, 85 nt, Homo sapiens
aaggcgcccacggccccagccaccacccgcacggcgcaggccggaacacgggcggccacgaggaggcgaccaacgacgaagagca

SEQ ID NO: 166404 - RNA, 56 nt, Homo sapiens
gcgaccaccgacgcgccaccgggcagaaggaccggggcgcagacccaggggagccc

SEQ ID NO: 166405 - RNA, 79 nt, Homo sapiens
acgcagcaaacaaaaagaacggccagccgaacacccaacaagaaggcaacgacaaacagccaagcaagccccagggccc

SEQ ID NO: 166406 - RNA, 72 nt, Homo sapiens
agagcacgagaccaaaaagaccgggcaccgagccgggaggggcgaagccagacgcccgacgccccagagcac

SEQ ID NO: 166407 - RNA, 70 nt, Homo sapiens
gggcaaaggcaggcgcagagccagcacggccgagaagcgaaccagaaacacaggacagcagaccacagcc

SEQ ID NO: 166408 - RNA, 43 nt, Homo sapiens
cgggacaccccggaagcgggaaagggccagcgcgaccacgagc

SEQ ID NO: 166409 - RNA, 74 nt, Homo sapiens
gagcggaacccgagcacgccgccccagcccgcccgggagaaaggcacccggaagagccaacgggagagggcagc

SEQ ID NO: 166410 - RNA, 65 nt, Homo sapiens
ccgccgaacccggccgaagagcggcggcggcagcggcggaagcccggggcggcgacggagcacga

SEQ ID NO: 166411 - RNA, 83 nt, Homo sapiens
ggacggacccgcagacggagacggggccggagggagcacggccagggggaagacaaacggagagccaggaccggagaggaaca

SEQ ID NO: 166412 - RNA, 77 nt, Homo sapiens
gcggaggaggcgagaagaggaaaacagccacagcagccgaagagagaggaagaggaagggagggaaaaagaaagcag

SEQ ID NO: 166413 - RNA, 77 nt, Homo sapiens
gagacccaacccgagcgcggagaacccgcccagaagccagaccccaggggaggcaagcaggggggcaaaggaaagaa

SEQ ID NO: 166414 - RNA, 69 nt, Homo sapiens
accggggcgcaaggccagccccagggaggcacagaaaaggaccggagagcaaggaaaccccagaagcac

SEQ ID NO: 166415 - RNA, 66 nt, Homo sapiens
ggaaagagaagagcaagaggaagacgccgcgcccaagcagaaaagaagggggaaaaggaaaccaga

SEQ ID NO: 166416 - RNA, 44 nt, Homo sapiens
aaccggcagggcaagcggcgacacacgacggaaccgccgcgccc

SEQ ID NO: 166417 - RNA, 73 nt, Homo sapiens
ggagcgaccccacccgggcgcgcggcggaaaggcacagacccggagcagcaggaaacaacaagaacggcgcga

SEQ ID NO: 166418 - RNA, 91 nt, Homo sapiens
aaggaccaagacccagaacaccaagaaaggacaagagacggaaacccaaagagaggaggcgcagcccccaagacgggcccccccacggcaa

SEQ ID NO: 166419 - RNA, 56 nt, Homo sapiens
acagcccggccacaacagagcgaggaacaaaccagcgccgcccggcacacaaccag

SEQ ID NO: 166420 - RNA, 82 nt, Homo sapiens
gacagggcgggggacacgcaggagagccccgcgaccacggcacacgcgacagaaaaagcggggaaaacaaaaaaaagaagga

SEQ ID NO: 166421 - RNA, 59 nt, Homo sapiens
gagagagcggaagcccggggacgcccccaggacagcccaaggcggaaaagcgaaggaag

SEQ ID NO: 166422 - RNA, 67 nt, Homo sapiens
gaacggcgaagaggcaccaaaaagaaccgcagacagggaacgggccccgcaccacccgggaccggcc

SEQ ID NO: 166423 - RNA, 71 nt, Homo sapiens
ccaagccgcagccggcaggccggggaccacgagaggcggacacgagcgaaccgaaaagagacacggagggg

SEQ ID NO: 166424 - RNA, 70 nt, Homo sapiens
aacccccaaggaaggaagaggccgggaagaaggagggacacagcagcgcggagagcggcccgggacgaga

SEQ ID NO: 166425 - RNA, 82 nt, Homo sapiens
agagcaggcgacacgcaggagacacgcagaccccaccaagaggcggagcgacccggcccaaggacccaacgccacccagggc

SEQ ID NO: 166426 - RNA, 81 nt, Homo sapiens
gaaacagagaagacgcaacagcccacagaggcaccaaaccaggcaccacacgaaccgaggcacaccaaaggcggaaggagg

SEQ ID NO: 166427 - RNA, 79 nt, Homo sapiens
gcgcgagccaggacccggagcggagcgcaagaagaaggccgggggcacgccgcacgcaagaagaggacagccggacaca

SEQ ID NO: 166428 - RNA, 67 nt, Homo sapiens
ggaaaacgggcgagcggcggccacaaaccagaggaggacacccgcaaccgacacacagcaaaagcaa

SEQ ID NO: 166429 - RNA, 73 nt, Homo sapiens
accacgccggcaccaggacccacagacaagcagaccggaagaccgacggaagaccacaccccgagggagccca

SEQ ID NO: 166430 - RNA, 73 nt, Homo sapiens
cagggcgcccccggaaaacaggaaaagccaaccgggagaggacacagagcgaaacaggggcacaaacaagggc

SEQ ID NO: 166431 - RNA, 70 nt, Homo sapiens
ccaacaccggggaggggcgccgccacacacgccccagcacagggaacgcaccgcgcccagacacacacgg

SEQ ID NO: 166432 - RNA, 78 nt, Homo sapiens
agaaagcagggggacgcaaaggccaaggggcggcaaaaagacggacagaagagcggggggacggcaccaaggaacagc

SEQ ID NO: 166433 - RNA, 75 nt, Homo sapiens
ggcaagaccagacaaggaacaaccagcaggggaaggagacacagaccagcacgaagccccaggggccccacgccg

SEQ ID NO: 166434 - RNA, 74 nt, Homo sapiens
caagcgccgccagggcacaggcaggcggaaggcccagaaggggaagacccccagcgaacagagacccaaaaaga

SEQ ID NO: 166435 - RNA, 83 nt, Homo sapiens
caccgggaccccggaagccaaaaaggaggaagcagcaaagcagcgcgcagcgcagccaagaacaaaacagggagaaacccgaa

SEQ ID NO: 166436 - RNA, 58 nt, Homo sapiens
cacagacaaaggcacagcgcgcaaaggaaggaaagaacgaggacacaaagagaagacc

SEQ ID NO: 166437 - RNA, 68 nt, Homo sapiens
gaccagaaagggaacaaccggcaggcacacacaccgaccccaccaggacgggccaacgcacggcccgg

SEQ ID NO: 166438 - RNA, 73 nt, Homo sapiens
ccgacacagaagcacggagcccaagacagagagagcaaaacgacgaaggagccaagaggaccgggacccaaac

SEQ ID NO: 166439 - RNA, 76 nt, Homo sapiens
aggaaacaggaacacccaagacaaaaaggcaaaacccacgacaagaaggcaccagaggggcggcaaccccgacccc

SEQ ID NO: 166440 - RNA, 99 nt, Homo sapiens
ggcagaggaggaacccgcaaccgaagcacaaaagacaaacccggggaccaagagcggacagcccgggcagaaagcagacacgggagcaaagacacgagg

SEQ ID NO: 166441 - RNA, 69 nt, Homo sapiens
agacgaagaagaagcaagcgaggcccacaagaagaacagaggagacccagcgcacaggacagcaacaag

SEQ ID NO: 166442 - RNA, 68 nt, Homo sapiens
gggagccgccaggcagggcccgacgacaccggacggaaaagcaggagagcgcgcgccgcgcgcccgca

SEQ ID NO: 166443 - RNA, 80 nt, Homo sapiens
cggagaccaggggagcagcaaggagcaaaacacgagagcccacaccgggaaaggaccaaaggccgcggacagagaagagg

SEQ ID NO: 166444 - RNA, 80 nt, Homo sapiens
gggacaagaagggcaaagccgaacgccggccacaggcacacggcgaacgacggggaccaccagcggcaaagaagagacag

SEQ ID NO: 166445 - RNA, 73 nt, Homo sapiens
ccgcggccggcagccccggggcgcggacagagaaaccggggaaacagccaagagggaaagaaacccaggcaca

SEQ ID NO: 166446 - RNA, 73 nt, Homo sapiens
aaaggagcaaggagaagagccaggaacagagggagaaaccaacgacccaccaggggagaagcagaccgcacca

SEQ ID NO: 166447 - RNA, 36 nt, Homo sapiens
gaacccggggccagagggacccaaacggacaaggcg

SEQ ID NO: 166448 - RNA, 80 nt, Homo sapiens
cgggaagcccaccgacgaggacggaggacggagaggaccgcaccagcacgcccacccagaggagggagccacaccaaagc

SEQ ID NO: 166449 - RNA, 65 nt, Homo sapiens
aagacaaggccaaagccaaccgaagacaggccagaaaggaggcgaccaagcaaaaggggggcgcg

SEQ ID NO: 166450 - RNA, 77 nt, Homo sapiens
cgggcaagcaccagagagggcgagggaggaaaggaaagaccggagaagagcaggagagcagagggacagcgaagcga

SEQ ID NO: 166451 - RNA, 62 nt, Homo sapiens
agccgccacgcccccccaaacggacagaggcgcccaacagcgaccacccacccagggcccaa

SEQ ID NO: 166452 - RNA, 72 nt, Homo sapiens
gaagaagcagggcagaggaccaggacgcggcaaagaaccgaagacagcccccgaccacggagacaagacgca

SEQ ID NO: 166453 - RNA, 82 nt, Homo sapiens
ggggaaccaggcgccccgagagacaagggaggcgaggacggacaaaaggaaacggacgggaggccagccagcagaaggagga

SEQ ID NO: 166454 - RNA, 87 nt, Homo sapiens
aagaacagcggggcagaagcgcgggcaagcggagcccagggagaaagcggacggccacaccgagccacaaaccagaaaggagagggg

SEQ ID NO: 166455 - RNA, 74 nt, Homo sapiens
gagggggaagaaacacaaaaccggaaaggaagaaaggagcaaagggaggagcacaaacgcccaccacacagcag

SEQ ID NO: 166456 - RNA, 71 nt, Homo sapiens
gggagagggcacaccagagacggcccgcggccggcgcgcaggacggaagcgcagggcgccaagaaccagag

SEQ ID NO: 166457 - RNA, 63 nt, Homo sapiens
ggaaggccggaaaggaccagaccgcccaggaaacggccccgggaccaaggacacgcagacccg

SEQ ID NO: 166458 - RNA, 73 nt, Homo sapiens
ccagcgccagacggacgaggcggcggagaacaagcggcaggagacgggcagacaacgaacaagcgaagaacca

SEQ ID NO: 166459 - RNA, 43 nt, Homo sapiens
cagccccggaagccagcaggcaggcagcggccccgcgaagcgg

SEQ ID NO: 166460 - RNA, 76 nt, Homo sapiens
gacgcaggcgcacggagacccgccggcaagaaagccagcacaccccaagagcccaccagagcccaagaccagccgg

SEQ ID NO: 166461 - RNA, 76 nt, Homo sapiens
cagacggggcccggaaccggagggggcacaaaaacacgacaacccaacaaaaaaaagaagggagcaaagaaaacac

SEQ ID NO: 166462 - RNA, 79 nt, Homo sapiens
gcccgcaggcagggaggaccagcgaaaaggacaaggaccaagaacaaaggagaagaaaccaagaagagaaaaacaaaaa

SEQ ID NO: 166463 - RNA, 77 nt, Homo sapiens
acagggagaaaccccacccccaagaaccaacccccaaaggcgggacaggaaacgaaccaccaacacccgaaggaccc

SEQ ID NO: 166464 - RNA, 61 nt, Homo sapiens
acgccagagcacaaggcaggcacggggagaggaccgcaggcccgacaaaccagccggcggg

SEQ ID NO: 166465 - RNA, 77 nt, Homo sapiens
ggggggcgaacacgccgcggcccgcggaacccaggagaaacgagagggacagcaaggaagacgccagagagcggcac

SEQ ID NO: 166466 - RNA, 78 nt, Homo sapiens
aggagcgggaagaggcgggggagacccgaccaccggaagccacggcccggacccccgccacgcaagaccgcgcccgcc

SEQ ID NO: 166467 - RNA, 74 nt, Homo sapiens
gcggagaccccggaaggacgggcggggggagaaccgcccagacacgacggcagagccggccccagcggcggagg

SEQ ID NO: 166468 - RNA, 76 nt, Homo sapiens
ccccaaggaaaagaaagcagaggggaaacagagcaaaggagacaggaagccagaagacgaaggaagaccaaggaag

SEQ ID NO: 166469 - RNA, 47 nt, Homo sapiens
ccggcggggagcgcagcgcgcagcccggcacagccacaaacggcaga

SEQ ID NO: 166470 - RNA, 71 nt, Homo sapiens
aggagggaccaccagaccagagcacagaaggacaggagaggcacaaacaacagagcgggacaaaagaacca

SEQ ID NO: 166471 - RNA, 80 nt, Homo sapiens
cgccgcaccggccaggcgcggcggagagggaacaggcacgccccacccgccagccgagcccccgacgcagcacaaagccc

SEQ ID NO: 166472 - RNA, 76 nt, Homo sapiens
cagccagacaaacaccagacgcccagagagaggccagaccaccacggaaacaaggacgggcgggcagcccgccggc

SEQ ID NO: 166473 - RNA, 71 nt, Homo sapiens
ccccccgggaaagaccgaggaagaaaggggaccacaggccaaggaggcccacgcggaccggcagcgccacc

SEQ ID NO: 166474 - RNA, 70 nt, Homo sapiens
ggggcgcgcccaggagcacgagaggacacaggaaacgccgacagacccggcgaggaacacagcacaaaac

SEQ ID NO: 166475 - RNA, 75 nt, Homo sapiens
aacgagggcacacggcggcagggccgggccagcgccaccgcccggaccggccccaccccggcccgcagacaaagc

SEQ ID NO: 166476 - RNA, 75 nt, Homo sapiens
gcaacccacacaagcgaaggcgcgcaccggaagcaccagcgaggaaggcccagaaacagggaaagaaccaaagca

SEQ ID NO: 166477 - RNA, 73 nt, Homo sapiens
gcgacagccagacaccggaagccaagcagggcgacccagcaacgcggccggccaggggcaagcgagcacggag

SEQ ID NO: 166478 - RNA, 43 nt, Homo sapiens
ccaccccgcgccagcagcacagcacgacaccgaaaacgagaaa

SEQ ID NO: 166479 - RNA, 73 nt, Homo sapiens
aagcaggaagaaacaggaaaccacaaaaaaacacaaagaaacgggcaaagaggcagagaaagcaagagacgca

SEQ ID NO: 166480 - RNA, 77 nt, Homo sapiens
agagagcccggacaggaagggcaggcccgaaggggggaagcgaggcaggaagcccagcacgccgaaggccacgcgac

SEQ ID NO: 166481 - RNA, 78 nt, Homo sapiens
cgacgacgcggaggcagagaagggaacgcccggcccagccccacaacggcaagcggagaagagcaaggccgaaccgag

SEQ ID NO: 166482 - RNA, 68 nt, Homo sapiens
ggagagacagcacagcacccacaaagcaacggacagcagaccacagcccggcaggcccaaaaacccaa

SEQ ID NO: 166483 - RNA, 68 nt, Homo sapiens
agccgagagaaagcaagcaaagggaacggagggaaagcgacaaacaaccaacccacagagacccagag

SEQ ID NO: 166484 - RNA, 63 nt, Homo sapiens
ggaaagaggaggaaaacaaaagcgcacaggaagaacaaagggggagccgccaccaaaagcaga

SEQ ID NO: 166485 - RNA, 72 nt, Homo sapiens
aaagggacccgaaccgccccaggagaaaacagaccagaacacaacagagaaagaagagaagccccaaaagag

SEQ ID NO: 166486 - RNA, 78 nt, Homo sapiens
cgggaccacaaagcacgacggcacccgggggccacacgcaggccccgcgccaggccccaaaagcacgcacgaaaccgg

SEQ ID NO: 166487 - RNA, 77 nt, Homo sapiens
ggaggacagacgcggcagcgaacgggggcgaacggggcgagccggaggagcacccaaccccgcgggcagcggacagg

SEQ ID NO: 166488 - RNA, 77 nt, Homo sapiens
gaggggcgacaggaggcagcgcaagaagaccgcagcagcccaaaggacccccacgaagaacaccagcaccacaggca

SEQ ID NO: 166489 - RNA, 68 nt, Homo sapiens
aaaacaggagcagaggaccgaggaagaaaacagggaaaaacaccacagcggcaccgacgaagccgcaa

SEQ ID NO: 166490 - RNA, 37 nt, Homo sapiens
agcagcggagagccaaacaagagggacgagacggccc

SEQ ID NO: 166491 - RNA, 79 nt, Homo sapiens
cgaagccccagccccggcagagggacggacacgcggacgcagcggagggagcgaagaacagagccgcccaaagagacac

SEQ ID NO: 166492 - RNA, 53 nt, Homo sapiens
aaaggcaaaccaagcgaccaaggccggacacaaggagaagaagacacagagag

SEQ ID NO: 166493 - RNA, 75 nt, Homo sapiens
gagcggcagccagaccagaccacagcagggcacagagcagaggacaccacaggaaggaggcgcagagagaaggcc

SEQ ID NO: 166494 - RNA, 79 nt, Homo sapiens
gcggggggaccggcgggcggagccggaaaccggccggcgcaggcacacaccggccccaggaaaggggggcggggaaaag

SEQ ID NO: 166495 - RNA, 81 nt, Homo sapiens
ggcggcggcggcgcggcccaaaaggaaagaccacagcaagaccacgcccccagccgggggaccaggccgaacgacccggac

SEQ ID NO: 166496 - RNA, 74 nt, Homo sapiens
gaggaaacggcaagaccaaaaaacacaaaccaggcaacaggcagaaaaagaaccaggaacgaagagcaggcacc

SEQ ID NO: 166497 - RNA, 66 nt, Homo sapiens
accaaggccaagcaaggaaaaaaagcagggaggagaagcgggccagaacaagagccaagaggaagg

SEQ ID NO: 166498 - RNA, 77 nt, Homo sapiens
gggccccagggcgcagacaaggcaggggagcgcgaaggacggaggcccagaagggagaaagccggccaacccagcgc

SEQ ID NO: 166499 - RNA, 81 nt, Homo sapiens
gccgcccacggcagcccagggacccgagcaccgccggccccgggccagcccaggcgcaaggaagaagagacgccgcgcggc

SEQ ID NO: 166500 - RNA, 75 nt, Homo sapiens
agcagaagaaaagaagggcccgagggaccgccaacaagcggcccgcaccgggccagacaacaccacccacaagcc

SEQ ID NO: 166501 - RNA, 69 nt, Homo sapiens
gaagccaggggcgcggggcggggaggcgggaccagacgaggaacagcaaaaagcgccacgcccacaaag

SEQ ID NO: 166502 - RNA, 99 nt, Homo sapiens
aagcacacaagagcggcgaaggagcacgaagaagcagggcgagggcagaacagacgaaggcacaggggcagcaagaggagaccaggaggcagcggacag

SEQ ID NO: 166503 - RNA, 78 nt, Homo sapiens
gggcacagacgaaagaaggccaaagaagcagaacgacaaaagccaagggcaaacggaggaaggagaagaacaccagaa

SEQ ID NO: 166504 - RNA, 69 nt, Homo sapiens
ccgacagccgcagaacgcagggaaaaaccaggacaaaaagcaaaggacggcgcaaggaggccagacggc

SEQ ID NO: 166505 - RNA, 73 nt, Homo sapiens
acccgagaagacgagcagaacagaacaggagccagggaacacacacccgagaacagccgccaagccacccccc

SEQ ID NO: 166506 - RNA, 80 nt, Homo sapiens
ggcggaggcgccccgccaggccagcggaccccagggaagcacacccgggccgggaccaggacgggagcggccgaccgcac

SEQ ID NO: 166507 - RNA, 52 nt, Homo sapiens
gaaggcgaacacagaggaaaccgcaccgcccggaggccccccgaaaaagccg

SEQ ID NO: 166508 - RNA, 80 nt, Homo sapiens
cacaccagaggagaacgaacccccaacaggcagcacaggcaacagcgagaaccgacgaacgaaaggaacccggaagagcc

SEQ ID NO: 166509 - RNA, 71 nt, Homo sapiens
gcccggcgccggccgagaaggcagaggcggccgccgaccgaagcggagcagccggaggacggagaagcggg

SEQ ID NO: 166510 - RNA, 77 nt, Homo sapiens
aaaaacaacccaaccacggggaaaaggcaaaaacccacaccgcaacccagcgagagaaaggccaccggcccaggcgg

SEQ ID NO: 166511 - RNA, 73 nt, Homo sapiens
cagaagcaccagaaacgagccaaaaagacaagcgaaaaagggcagaccaaggacccgaagacaaaaccaccca

SEQ ID NO: 166512 - RNA, 54 nt, Homo sapiens
gcggcagcaccggagaggcccgggggcgaaaaacaccaccagggcaagggaagg

SEQ ID NO: 166513 - RNA, 76 nt, Homo sapiens
ggaaaaaaccagaggacacgaagcccaaaggaagaagagcaccagaaaggcaaagggggcgcgaagcaaggaaaag

SEQ ID NO: 166514 - RNA, 53 nt, Homo sapiens
agcccaggcggcccagcgggggaacccacagcggcaacgcccgcggaaaacaa

SEQ ID NO: 166515 - RNA, 72 nt, Homo sapiens
cagaggcgaagacggggagccacgaggagaaaaccaccaagaaaaccaagaagaacaaccggaggccgaggg

SEQ ID NO: 166516 - RNA, 81 nt, Homo sapiens
ccaagggggagagcccagcgcgggaagagcagaaaggaaacgggggcgcacaggaaacagaaaaaacagcaaagggagcaa

SEQ ID NO: 166517 - RNA, 92 nt, Homo sapiens
cccggcgcccgcggccagccgcaagacccgccacaagcaacgcgggaagagaaggccaggcgccggcaggagcgaacacacacgaacaacga

SEQ ID NO: 166518 - RNA, 83 nt, Homo sapiens
gcgggcagccacaaggggacccacccaccacacccaggggccacgacgccccgggcgcaccagacgccgccgcggggagcgag

SEQ ID NO: 166519 - RNA, 88 nt, Homo sapiens
ggcacgccagcggcgcgagaggaccaccggggcggcccggcggagaccccaagaagaagcggaagaggagccgcggaaccaagacaca

SEQ ID NO: 166520 - RNA, 76 nt, Homo sapiens
cggggaccccggagcaaaaacaggagagaaacagggccacacaggccaagacccaggaaaagccgaagcaggagag

SEQ ID NO: 166521 - RNA, 103 nt, Homo sapiens
cggaccagaggaaggcagcaccaggaagacaggggaacacccccagagagaggaagaaagaagcgaaagagagaagagcaagagaaagcaaagaacaaacgca

SEQ ID NO: 166522 - RNA, 73 nt, Homo sapiens
ccagccaacaggaagccaaaggagcaccacagcccaccacaacagcacaccacccccggagaagaaggaggcc

SEQ ID NO: 166523 - RNA, 82 nt, Homo sapiens
ggagaaggcagagaaaaagaaacgaggaccaaagcccagccccagcaaaacggaaccagggaaagaacaggaacaaggcagg

SEQ ID NO: 166524 - RNA, 74 nt, Homo sapiens
gggacgagacaaccgccgaccccaagggcaagccagcgacgagacaccagaggaacacacagcgagaggaagga

SEQ ID NO: 166525 - RNA, 71 nt, Homo sapiens
agccgagcagcacgagcgcgcacagagggaaaaaccgagcacccaggaagaggcacccccgcccgccagag

SEQ ID NO: 166526 - RNA, 87 nt, Homo sapiens
gcagggcaccgcgcgaagcggccaaagccgcccagacggccaccggcgggaggaacaaaagacaaggcgagggaaaccaacacaaga

SEQ ID NO: 166527 - RNA, 75 nt, Homo sapiens
ggggcgccaccccaacgacagacccgacggaaccacccaccagagcgggccaaccacgagcaaacagggaagacg

SEQ ID NO: 166528 - RNA, 80 nt, Homo sapiens
caacgcaacaggccaccggcggccggacccccccagggagacgcgagacggcggcccagaaacgaaggaggcccaaccac

SEQ ID NO: 166529 - RNA, 77 nt, Homo sapiens
cgaaacgcccaggggagggaaacgggaggggacgcacaaacgaaaagcaaagccacccagaggaggaaagacaagcc

SEQ ID NO: 166530 - RNA, 64 nt, Homo sapiens
aaaacaacagggcagggaacaggaagaccgcaggaaagcaggaaggcaagaaagccaaggacga

SEQ ID NO: 166531 - RNA, 41 nt, Homo sapiens
gcagcagcagccgccaagacgggcagccgacccacaccagc

SEQ ID NO: 166532 - RNA, 83 nt, Homo sapiens
aaccgacggcgagccgcagcccacccaacgcgccgccggcacgggccgccgcaccacagcaccgagggaaagacaaggagccg

SEQ ID NO: 166533 - RNA, 42 nt, Homo sapiens
cagcagcacgggcagcagaaaccccagcgggaacagaacaga

SEQ ID NO: 166534 - RNA, 76 nt, Homo sapiens
gccgaacccgcgcgacaaaaggaccagacaaacaaaagggggacagagaagacgacagaaagaaaaaagaaagaga

SEQ ID NO: 166535 - RNA, 79 nt, Homo sapiens
aagagccaaccacaggagggaaaccacgcaggcaaacgagaaaaagccgagaaggccagacgccaaagaacacggcaga

SEQ ID NO: 166536 - RNA, 84 nt, Homo sapiens
aaggggccggcaacaccagacaccaaggacagcccgcaagaaagaaccaagagggagacaagggaaaaggaagacaaaaaacac

SEQ ID NO: 166537 - RNA, 66 nt, Homo sapiens
accgaggcaaaagaaaggcccccacagagagcacacaaacaaagcgaaaccacggaagaaaagggc

SEQ ID NO: 166538 - RNA, 84 nt, Homo sapiens
caccagggccaccaaccccacccagacgaagccgaagaaaagaggcaaggaccccccaagcagagcccggggagccacgaagaa

SEQ ID NO: 166539 - RNA, 72 nt, Homo sapiens
gggcaacaccgagggccaccggagacgaagacaggaaggaaaaaccacgcgcccggccacgggaggcggaca

SEQ ID NO: 166540 - RNA, 68 nt, Homo sapiens
gaacaaacagcacagaacgaggaaggggagggaaaaaccgaggggggaaggcaggcaggcaaacccac

SEQ ID NO: 166541 - RNA, 78 nt, Homo sapiens
ggagcagcgccccggacggagacgagcagagggggcacggaggcgcaggagcgggggaggcgggaagcggagcgaagg

SEQ ID NO: 166542 - RNA, 75 nt, Homo sapiens
acgaggcagagaacaagacggacgcaccgacggaaccaaacagcagcaaaggaccccgggaaaggggcgggcgcc

SEQ ID NO: 166543 - RNA, 59 nt, Homo sapiens
gccaacagaggaaggaacaaagacccagcagggcgggcggagagaacgagagcacgaag

SEQ ID NO: 166544 - RNA, 81 nt, Homo sapiens
gcgaaacgaggccaaggacaggacccagccacaagcgaacaggacggaaacgaaggaagaggacaccccaagacaaaacag

SEQ ID NO: 166545 - RNA, 102 nt, Homo sapiens
cgcgcgccaagacgggggcgccacggcgaggaccgggcgcggacacaaccccccagccggagacgagccaaagcgcagggccgagcggagccgcacccgcga

SEQ ID NO: 166546 - RNA, 75 nt, Homo sapiens
gggggggaagggagaacccagagcacaagaccgaagcgagaaccagccagacccaaggagagaacaaaggaaaaa

SEQ ID NO: 166547 - RNA, 59 nt, Homo sapiens
cagcacagacccgagcagcgaccggacagaagacagaccgacagacgccaaaccacccg

SEQ ID NO: 166548 - RNA, 83 nt, Homo sapiens
aggaaccagaacaccccgagagagaggagaagagcccagcacaacgaagaccgccgggcgaagggggggcagagccgggcccc

SEQ ID NO: 166549 - RNA, 75 nt, Homo sapiens
ggagagaagcgacagccgcaggcacgaacgagcaggagcagcaaccgaagcgaagggccgggacggagaaaggga

SEQ ID NO: 166550 - RNA, 40 nt, Homo sapiens
aacagcaacaagcaggcccgggaggagcggggacacgagg

SEQ ID NO: 166551 - RNA, 69 nt, Homo sapiens
cccgcgggcgggagaacggaaaaccccaacccggccaaaaaagggaaacccagagaagacggaagagcg

SEQ ID NO: 166552 - RNA, 67 nt, Homo sapiens
cgagcgcgagcggcgcgagaaagcacaccccacggcccggcggcacggcacgaggggggggccaggc

SEQ ID NO: 166553 - RNA, 53 nt, Homo sapiens
ggaagggaaagcagaggaaggcagaagaaaaaggaacaaagggcagaagcaga

SEQ ID NO: 166554 - RNA, 73 nt, Homo sapiens
aagcgggcggcgcgggggagaggccgggccaagcacacaggcacaaaacagagcgggcacaaaacaaccgcgc

SEQ ID NO: 166555 - RNA, 46 nt, Homo sapiens
gacaaagccgcccacccccagcggcacagaagagggaaggcaccag

SEQ ID NO: 166556 - RNA, 36 nt, Homo sapiens
gaacgccgggccagcgagagaggcccggcgggagca

SEQ ID NO: 166557 - RNA, 55 nt, Homo sapiens
gagccaccgggcggccaagcacacaacaggggagagcggaaaagaccgcggaaag

SEQ ID NO: 166558 - RNA, 81 nt, Homo sapiens
agaaccagcacgaggccgggggaggcggaaccagcgcaagccagaagcgcggacaccgcggaccgaaaccgggggaacgca

SEQ ID NO: 166559 - RNA, 75 nt, Homo sapiens
gacgccccagagaaagcccgccgcaccagcaagcgcggggaccaaccagacgccgacacgcagggccaagagaaa

SEQ ID NO: 166560 - RNA, 75 nt, Homo sapiens
ggagcggccgggggaggcaggggcgcggcagggccccagcgcaaagcccaaggccacaccaggacccagcacgcc

SEQ ID NO: 166561 - RNA, 73 nt, Homo sapiens
agagccacgaacacaaaggagggacagcagcaagagccccaaagccaccagggaccaggaggaagaagagagc

SEQ ID NO: 166562 - RNA, 63 nt, Homo sapiens
agagcccgccccaggagagccacgaaggaccagcaaaaggccaaaacggaagaacccccgcaa

SEQ ID NO: 166563 - RNA, 102 nt, Homo sapiens
cggcagccacacagaaaggagagagaagaagagaagaaggaaagcaacacgaaacaagaacccaggaaaaagaagggaacggagagacaaaacccacgaagg

SEQ ID NO: 166564 - RNA, 56 nt, Homo sapiens
agcggacccacagcaagaacggccagagagacaagagagacaccccaaccgacaaa

SEQ ID NO: 166565 - RNA, 77 nt, Homo sapiens
agcgacccccaccacccagccccgagagcggaaccacaagcaccagcacgccggcaaacggagcgagcggcgccccg

SEQ ID NO: 166566 - RNA, 78 nt, Homo sapiens
gagagcacgagaaaagaagcaaggaagcgaagcagccgaagcacaaaagagagacgcccagggagacaacagccacac

SEQ ID NO: 166567 - RNA, 60 nt, Homo sapiens
cggaaagggacccgacacgaggacaacccgccacaacgacaaaggaccccaaagaccccg

SEQ ID NO: 166568 - RNA, 74 nt, Homo sapiens
ggcaggcgcaccaaggccgcgccgggagaaggaggagcagaacacaggggacagggaagaggccagccgggagg

SEQ ID NO: 166569 - RNA, 76 nt, Homo sapiens
gggcgcccgacgcccagcacaggaaccggcaggagaaggggcccggcagccgcccgaagaaagagggaagaaagag

SEQ ID NO: 166570 - RNA, 63 nt, Homo sapiens
aaaaagcacagagccccacaggcagccccagaggacaaagccaacccacagcgacgacaacaa

SEQ ID NO: 166571 - RNA, 77 nt, Homo sapiens
cagccaccagccccaccaggcaccaggcagggacagcagcaacagaggcgaaggcgccccggcaaggccaccgcaga

SEQ ID NO: 166572 - RNA, 76 nt, Homo sapiens
ggggaagcacccgagaagcagaagacccggaaacagcccccgggcacgcagaacagacgccccagcaccgccggca

SEQ ID NO: 166573 - RNA, 80 nt, Homo sapiens
gcaagagcagcacccaggacaaacagcacccaagaaaacccaggccgcgaaggagaagaccggacaccaaccgacggccg

SEQ ID NO: 166574 - RNA, 55 nt, Homo sapiens
gggcaagagggggaaagcacagggggaacgggaaccagggaacaagcagcagccg

SEQ ID NO: 166575 - RNA, 78 nt, Homo sapiens
cgccccaacaccagggaagagacacacccaggcaggagacagagagaaagcaacagcaggccagccccagagcccggg

SEQ ID NO: 166576 - RNA, 76 nt, Homo sapiens
aagcagcagaggagagagaccgagaaagagaaggaacagaacagacaccaccgaaacgcgccaagcagacaggcaa

SEQ ID NO: 166577 - RNA, 75 nt, Homo sapiens
gagggaaagcacaagcggagcccaacgaaaccgaacagaaaagggacgcggaagcaacaggagcaagaagagagg

SEQ ID NO: 166578 - RNA, 79 nt, Homo sapiens
gggcgacggggcgcccgagcccaacggcccggacgggcaggggcgagccacaaccgggggaaagacggaaaagaagagc

SEQ ID NO: 166579 - RNA, 70 nt, Homo sapiens
acccagacccagcggaaaggagcgcgcccggcggggagcgcagcgcgggcccgagggcaggacagcaggc

SEQ ID NO: 166580 - RNA, 52 nt, Homo sapiens
gcggaaaagcaaagacaagccgggaagagaaagcgggggcacccgaggagga

SEQ ID NO: 166581 - RNA, 73 nt, Homo sapiens
gcggacccggagcgacaagcgccccgacggagcgccaggacgaccgccagagcggaacgaccccagagcgagc

SEQ ID NO: 166582 - RNA, 86 nt, Homo sapiens
cgcccgccgggccgcccgccgcccgggccccgcggcgccgcagcacccgggaagggaagaagagaaagccgaaaaagacaagggga

SEQ ID NO: 166583 - RNA, 64 nt, Homo sapiens
ccaccccccaccgcccccggcaggggaaaaccaaggggcaaaccaggggaaaaaacacagaggc

SEQ ID NO: 166584 - RNA, 72 nt, Homo sapiens
caacccaccaacaccgacccggggaaggagggcgaaacaaaggaccagcacgggaaccggccgcccagcgca

SEQ ID NO: 166585 - RNA, 66 nt, Homo sapiens
agggaggcccacgcaacggaagaagggaggccggaaaaagggaaagaacaaaacacacagcgaagc

SEQ ID NO: 166586 - RNA, 71 nt, Homo sapiens
agccgggcgcggaaacgagagagcccgagggaaaagacaggcaacaggaaagcaagggaaggcgccccaac

SEQ ID NO: 166587 - RNA, 43 nt, Homo sapiens
acgccgggcgccaagcacccgaccgcggcccaggcacagcggg

SEQ ID NO: 166588 - RNA, 83 nt, Homo sapiens
ggcgaaggagcacccggcaggcggcggcggcggcgcggggacgccccggcgcgaagggcaggcagaaggggggcccaccagcg

SEQ ID NO: 166589 - RNA, 76 nt, Homo sapiens
gaaacgacacaggaccagacagcaggggacggaaaagcaacaggcagcagcaaggaaacagaacagcgggggagaa

SEQ ID NO: 166590 - RNA, 68 nt, Homo sapiens
cagaaaaccagccccaggaggggacaaaaccccgaaaaaggcggggacgacagcgcaggggggcgaca

SEQ ID NO: 166591 - RNA, 49 nt, Homo sapiens
gcgcccccaaacgagaaacccagaaaacgccaaaccgaccaggagaaaa

SEQ ID NO: 166592 - RNA, 74 nt, Homo sapiens
aaaaaggaaaaagagaaaagaaagaaccagacaaagacaaggaacaaggcgccggcggcagagcggggagacga

SEQ ID NO: 166593 - RNA, 76 nt, Homo sapiens
cgccagagggaggcgcgaaagaggccagggagccggcgacggggcgcagaagacgaccccgacgcaggccaggagc

SEQ ID NO: 166594 - RNA, 64 nt, Homo sapiens
aagacacgacaagacgaccgggaaagccagggaggccgcgaaggacagggcagaccgccagcag

SEQ ID NO: 166595 - RNA, 66 nt, Homo sapiens
aaagaacacagggagcgagaacgggccaggcaggaaggcgggaaaacggcacaaggcgacgaggga

SEQ ID NO: 166596 - RNA, 65 nt, Homo sapiens
aagaggagaaacaaggaccaacaggaacaaagaggacacagaaagaagacaagccaccagcaagc

SEQ ID NO: 166597 - RNA, 72 nt, Homo sapiens
gaccccccgcagccgccccccccccggaaaaggcccacgccgggcgagggaaagacaaggagccgggccgag

SEQ ID NO: 166598 - RNA, 69 nt, Homo sapiens
ggggcccgccaggcgggccgcggcggcccggacaggggccccagaggcgaagaaaagccacacggggag

SEQ ID NO: 166599 - RNA, 70 nt, Homo sapiens
aagacgcaacagaaaacaagaaaggaacccaacagagacccgcccacgcaggagaagacagaggagccag

SEQ ID NO: 166600 - RNA, 53 nt, Homo sapiens
gcggaccggaggagcgccaagaccaccacaaagaggacagcagaccacagccc

SEQ ID NO: 166601 - RNA, 63 nt, Homo sapiens
aaccaacagccccccagggcccgcgacccaaaaggcccagaccacaacagggaacacacggag

SEQ ID NO: 166602 - RNA, 59 nt, Homo sapiens
gcaggagccaccgagccgaaggagagacaaaggaggaccgcgccaacaggacgaggaga

SEQ ID NO: 166603 - RNA, 76 nt, Homo sapiens
ccgccggagacagggcaagggggaccacgaagcaacgccaaaccaaagagaagagcgccagggagacaagaccgac

SEQ ID NO: 166604 - RNA, 59 nt, Homo sapiens
cgcgaaagcggggcacaggcgggcacgcgcccagaaagagccgcagacgcacagcaacc

SEQ ID NO: 166605 - RNA, 88 nt, Homo sapiens
cagcacagcagcgacgggcccaggaaaaagaggaaagggacgccggggccgggccaggagcagagaaagaagcccggcgaggccggag

SEQ ID NO: 166606 - RNA, 87 nt, Homo sapiens
ccggaggaggaccgggccgccaggcaagacagcgacgcgccaccggcggggggcgagcaacaccgggcaaggggagagccaggcgca

SEQ ID NO: 166607 - RNA, 44 nt, Homo sapiens
ccacgggacggcggcgcggagaaggcagagccaggacaaaacca

SEQ ID NO: 166608 - RNA, 66 nt, Homo sapiens
aaaacaaaggaagagccccgaggagaccaggaccgaaagacaacaacgcagagaagaacgccggcc

SEQ ID NO: 166609 - RNA, 80 nt, Homo sapiens
gcggcggcaaccgccccggccaggaacacagacgggggcgagcggacccgcagccccaaagagagaacaaggagcaggcc

SEQ ID NO: 166610 - RNA, 74 nt, Homo sapiens
gagcccaaccagagcggagcgcagaccgaggaaaaggagagagcgggaacagcccgggccgccgcacccaccgc

SEQ ID NO: 166611 - RNA, 60 nt, Homo sapiens
aggagccgcacagagaacaggcacagaggggaagcgcaggacgcaaggaccaaaaaacaa

SEQ ID NO: 166612 - RNA, 55 nt, Homo sapiens
gccaggaacaaagagcaaggggcgcggggggccaccaacacccccggaacaccag

SEQ ID NO: 166613 - RNA, 77 nt, Homo sapiens
ggagcacccacaagaaggggaccgcagaccggcagcccgaaaggacccgaacacggaagaaagacacgcaggaggcc

SEQ ID NO: 166614 - RNA, 80 nt, Homo sapiens
ggcaaagcaagcagcagcggaggaggagcagaagaaagcacgaggggaagcgcgggcccgaggacaacccccccggcacg

SEQ ID NO: 166615 - RNA, 54 nt, Homo sapiens
cgagggaagcggcacgaacaccaaggacgaaaaggcccaggccggcggaaaacc

SEQ ID NO: 166616 - RNA, 65 nt, Homo sapiens
cgcaaacgaagcaaaggagaaaaaaaaaccaacacaagaggccgagcggccccgagccgggacac

SEQ ID NO: 166617 - RNA, 61 nt, Homo sapiens
agcccagcccccagaaaggaggacaacgggacccagaagagcgaaaccaggcccaaaagac

SEQ ID NO: 166618 - RNA, 80 nt, Homo sapiens
aaacggcacaccaggcggcaggggcaaccagacgggccaaggcgggagaccagggccagcccggccacaccccaggcggc

SEQ ID NO: 166619 - RNA, 83 nt, Homo sapiens
ccccggcccacaggggggggcaaacccgagagaacggaggaacaaagaccgacacgaaaaaaaccacgggcagggaaacacag

SEQ ID NO: 166620 - RNA, 71 nt, Homo sapiens
aaaaggcagaccgaggaccggaacagggcgccaaaaacaacccgccgacacagccaccaagaaggcacaag

SEQ ID NO: 166621 - RNA, 67 nt, Homo sapiens
ccggccaggaccggccaagcgaaagacagaggcccagccgaaagaggggaggcacgacgacagaagg

SEQ ID NO: 166622 - RNA, 76 nt, Homo sapiens
ggcgagcggggcgcgccgcagagcggcaccgaaggacaggagaccaaaccgaggcgcggagcacacagaaacgcac

SEQ ID NO: 166623 - RNA, 76 nt, Homo sapiens
acccgcgggcccgagcaaaaccccggacaagaaagccagagaaacgacaccagggccgccgcacaagacccagccc

SEQ ID NO: 166624 - RNA, 57 nt, Homo sapiens
agggacccacccggcggccgacgcccgccgcggccggggaacaggccacagccagga

SEQ ID NO: 166625 - RNA, 72 nt, Homo sapiens
gcgcccgaagcaggaagaccggagggagcgcagcacagcggggggaggaggggcacccagaaccggagagcc

SEQ ID NO: 166626 - RNA, 65 nt, Homo sapiens
ggaacacgaacacacgacacagacagggaaagagcaaggaaaggcccgagccaaaagacccagag

SEQ ID NO: 166627 - RNA, 62 nt, Homo sapiens
cccccgggacccaaggccacaaaggagagcccgggagagaagcccacagacacacccaaagc

SEQ ID NO: 166628 - RNA, 73 nt, Homo sapiens
cagggaagacgaaccaagacaaccggagggaaaccaggcgcacaaagagcagggaaaccggccagagaaaaca

SEQ ID NO: 166629 - RNA, 78 nt, Homo sapiens
cagccccaagagcgggacacagacgcgccaggggccagcgacggggaaggcaggggcgaacgcgggggaaggggaggc

SEQ ID NO: 166630 - RNA, 80 nt, Homo sapiens
cacaccaggagagaagcgacagccgcagggaaaagcacagggccaggaagcagagggacagccaggccagaaacaggccc

SEQ ID NO: 166631 - RNA, 100 nt, Homo sapiens
ccaggccagcgccccaggccaagagggacccacccggcgccgagagcggcccaggaggaacaaccagcccacccggagagggcacgcgcggggagacggc

SEQ ID NO: 166632 - RNA, 78 nt, Homo sapiens
cgaagggagaaagccccggagcccgcagagcacagagaaccacacaggaccgaaaagacgcggccccaaaggaaacac

SEQ ID NO: 166633 - RNA, 62 nt, Homo sapiens
gacaccccgaagccgagaaaggggcagggaccccacacaaacaaagaaaggaaacgcaagga

SEQ ID NO: 166634 - RNA, 76 nt, Homo sapiens
aagagcacagaaggagggccggcccagggagaacgcaaaaccaccacccccacaaaaaacgcagggagaaaaggac

SEQ ID NO: 166635 - RNA, 113 nt, Homo sapiens
gcgaaacagcgacgaggagcaccaacgagcagagggaagaacgagaaccaagcgagagcgccaggagcaagcgggcaagcggagggagggacacacccggccaccaccccccc

SEQ ID NO: 166636 - RNA, 73 nt, Homo sapiens
gaacggaacacgaaccaccaaccccaacccagaagggacgaccacaggcacagggaaggacccagaacagagc

SEQ ID NO: 166637 - RNA, 86 nt, Homo sapiens
agaaagaagaccgccggacagaaccacgccaaaggaagcagcgcagcaaagagggagcacgcgcccacccccacagacacacccgg

SEQ ID NO: 166638 - RNA, 78 nt, Homo sapiens
cgcaccgaggagaagaccaggaggcgggccaagggaggcagacgggcaaaaggaagcgaaaaggagagcagaagaccc

SEQ ID NO: 166639 - RNA, 57 nt, Homo sapiens
caacccacaccagaaaggacacacagacacgcagcggccgaggcaggggaagagagc

SEQ ID NO: 166640 - RNA, 78 nt, Homo sapiens
gaaccgggcaccgagagcaagaaaagggaagaaaaggacccccagagagcaaaaacaaacaaaccaagcggaccgccc

SEQ ID NO: 166641 - RNA, 83 nt, Homo sapiens
cacgaggcgggcagcagcagccccggggcccggagagggcaggccggagagcgacccgacaaggcccacgcccaccaccacca

SEQ ID NO: 166642 - RNA, 79 nt, Homo sapiens
cgaggcaaaacagcaggaccgagacgcaacaggccaagaggccaggagcgcccggaggaagcgcaaacggacagcagcc

SEQ ID NO: 166643 - RNA, 96 nt, Homo sapiens
gagaccgaggaaacaccagagggccaggccagaagagccgaccacaaggggaggacaaccgcccgggaccaggaggcagacgggcaaaaggaagcg

SEQ ID NO: 166644 - RNA, 81 nt, Homo sapiens
agacccgagcagaggccgagaggcgggcaaagggagaaaaccacgagaccagaagggagcgccccaccggaaggaggagcg

SEQ ID NO: 166645 - RNA, 80 nt, Homo sapiens
ccacaaaaccgaaaacaggaccacacaaagcacggaaaagacgagggaagaagaccgacaacaaccaggggaagggaaaa

SEQ ID NO: 166646 - RNA, 71 nt, Homo sapiens
ccccgcccgcgcgaccgcagggcgcccggcaagaagaccgagcgagagcagccagagcgagagaagaggag

SEQ ID NO: 166647 - RNA, 76 nt, Homo sapiens
cacccgcagagcgaggaccggaagggggccaccacagcccagccccagaggacgcccagcaggggcagcaccccgg

SEQ ID NO: 166648 - RNA, 123 nt, Homo sapiens
ggagcccgcggggggccagcggaagaaccccccgggagccagaccggcaccgaagaccccgaacacccaacaagaaggcaacgacaaacagccaagcaagccccagggccccgaaaccacgaa

SEQ ID NO: 166649 - RNA, 79 nt, Homo sapiens
caacccgacagcagaggcgcagggggcgagggaagagcccggaccgggaaggggagaaagacagcaaagaaaaggagaa

SEQ ID NO: 166650 - RNA, 70 nt, Homo sapiens
gcgaagcagcagaccgacccgaacaaggccaacaccagcaggaggcagaaggcaaagcaagcccgcacag

SEQ ID NO: 166651 - RNA, 75 nt, Homo sapiens
cgcaacccgcaccccggaccacgacacgcggcccggcgggccagcagccacaggagacagggaaacgaaaaccac

SEQ ID NO: 166652 - RNA, 66 nt, Homo sapiens
caaaccagagaaccaggacagacggggggccgaagggagggacagcagcgagagccgggagggccc

SEQ ID NO: 166653 - RNA, 75 nt, Homo sapiens
acagggagccgcagaagaaaaagggcgcacgggacggggggcccgggcgaaaccggaccgggcccggaggagcga

SEQ ID NO: 166654 - RNA, 74 nt, Homo sapiens
aggacagagaaggaaagacacagaagacacacaaccacaagggaaaaggagcacagcaagcgggagcaggcaga

SEQ ID NO: 166655 - RNA, 76 nt, Homo sapiens
gaagaagcaggaaagcgaccaccaccaggaaccgaaagacgacgcaccgaaacgaagagcaacgaagacaggagag

SEQ ID NO: 166656 - RNA, 75 nt, Homo sapiens
acaaacggccaagaagggccaccccacagacgcggaaggcggcacacaacacaaaaccacagcaagaacagacgg

SEQ ID NO: 166657 - RNA, 67 nt, Homo sapiens
gggccggagcagccgcgggcgcccgaggggccgagcgagcaggaggcccaaggaacagcacagcagc

SEQ ID NO: 166658 - RNA, 84 nt, Homo sapiens
gggagcagaaggaccgaacccaggagcccgcacgccacggagagaaccagaccaggaggcgggcgagcaggagccacgccagag

SEQ ID NO: 166659 - RNA, 69 nt, Homo sapiens
gagggggggcgcgccggaaaccggagcgcgcagcaggcaacccccgaccagaaaacccagagcccacgc

SEQ ID NO: 166660 - RNA, 75 nt, Homo sapiens
gggaaccccggagaaaaggccaagaaggcaggggcaacgaggaacaggccaagaaacaacacagccaaggccagc

SEQ ID NO: 166661 - RNA, 76 nt, Homo sapiens
ggacggcggggccgggccggagacgcgcccgcgcgcaggggaagcgggcaggaccgaagacccccccgagcccggc

SEQ ID NO: 166662 - RNA, 56 nt, Homo sapiens
cagaagaagagcgagggggcccgcagcgaaacaacaaggcagaaggaacgagggag

SEQ ID NO: 166663 - RNA, 74 nt, Homo sapiens
ccaaacccagagggcccacaccaccggacacagggaacacaggcgcagaacgccggcaggaaaggagacacaaa

SEQ ID NO: 166664 - RNA, 95 nt, Homo sapiens
caagggacgagccacacaccaaggccagcacaaggacgccggacagcgaagggggagcgcggccacagacgcacaggcagagacacaaggggaga

SEQ ID NO: 166665 - RNA, 90 nt, Homo sapiens
cgcagccagggaagacacaagggcacccggccccacgccccaggcaccccgcaggccgagccgcccggaaccaagaccaagcagcagacc

SEQ ID NO: 166666 - RNA, 77 nt, Homo sapiens
accaagggcgaaggagccggcccaaggaaaaccgccgccggggccagcaagaacaaaaagcaccaacagacccaccc

SEQ ID NO: 166667 - RNA, 75 nt, Homo sapiens
cacaagagcaaagcccgggagaacaaaggagcgcccgggagcagaaggggacgggacgaggaaccagcacccgga

SEQ ID NO: 166668 - RNA, 83 nt, Homo sapiens
ccagaggaggccccccagccagggaacgcgcagcagcaggaaaacccagagccacaggagagaaaaaaagggagccacagaca

SEQ ID NO: 166669 - RNA, 69 nt, Homo sapiens
agcagggcccgggcccggccaccaccgcccagccgccagacggaaaggccaccaggcggcagcgcgggc

SEQ ID NO: 166670 - RNA, 73 nt, Homo sapiens
gagaggggaaacagcggagacggaacgggagaagaggcaaagaaacaccaaacacagacccagcaccacgaaa

SEQ ID NO: 166671 - RNA, 78 nt, Homo sapiens
aagacccggggcaggcgcaggaggcacccaaggggaggaaggccgcgagaaggacagaagaggaagacaggagggcgg

SEQ ID NO: 166672 - RNA, 79 nt, Homo sapiens
ggaaaccggcagcgggacggaacagcccaaccagcagacccaaagacaggaccacgcaccagcagagaaggaaagcaaa

SEQ ID NO: 166673 - RNA, 83 nt, Homo sapiens
gagaggccacgaccaacaaacaaaacagaaaaagaaaaagaagaaaaaagaaaccagcacacaggcaaggggacccaggagaa

SEQ ID NO: 166674 - RNA, 72 nt, Homo sapiens
gaggggcacgagcgccacaaccccaggccgaggacgaagacgacggggagacagcggaggagcgggaccagg

SEQ ID NO: 166675 - RNA, 69 nt, Homo sapiens
cacacggaaggcgggcacaaagcggcccaaaacaagcaccagagaccagagacagaacggccacaggag

SEQ ID NO: 166676 - RNA, 60 nt, Homo sapiens
cgaagagccaagagcagaccggccagccacgaagcagagaggacccaggggagaaaccgc

SEQ ID NO: 166677 - RNA, 77 nt, Homo sapiens
ggagaaggaccaagaaccaggaccgaaaagacgcggccccaaaggaaacacccgaagaacacagcgccagcccaacg

SEQ ID NO: 166678 - RNA, 82 nt, Homo sapiens
ccagcgcgcagcgcgcaggaaccccccaaacgcaaaagccgccccaagaccgccagagcggaacgaccccagagcgagcccg

SEQ ID NO: 166679 - RNA, 74 nt, Homo sapiens
aacggagaagaagacggcaagagcagcagagacccagaagacccacgggcgaagagacacgcgagcagaccagg

SEQ ID NO: 166680 - RNA, 70 nt, Homo sapiens
ccccagcggcagacggaaacgacagaagcagagagacaagggcagagccaagcgccgcccgggcccaagc

SEQ ID NO: 166681 - RNA, 69 nt, Homo sapiens
ggcgggacgcagggaaggagcgaggaagacggacggcaggacagcccaggccaagacagcagccacgag

SEQ ID NO: 166682 - RNA, 65 nt, Homo sapiens
accgagggaaaaaccgaagaagacacccaccaggacccggcaagagacccggaagagaaaaagcc

SEQ ID NO: 166683 - RNA, 82 nt, Homo sapiens
gcccgcgcagccgccgccccgaccgggcgccagcccccggacagccgcccggggggccagcccagcaggaaggaccaccgca

SEQ ID NO: 166684 - RNA, 83 nt, Homo sapiens
cgcccggcccacgacacaggaagaagacagggcacccggcgcgcacacaaagaaccgcagaagagaacacggccacacccaac

SEQ ID NO: 166685 - RNA, 75 nt, Homo sapiens
ggacagcgccggccacccaaagcacgggggcaacagaggagaacaacagagaacgaacaccaccgcaaaacaaca

SEQ ID NO: 166686 - RNA, 39 nt, Homo sapiens
gaccagcagccgccaaagcgcgccccagaccaccggcag

SEQ ID NO: 166687 - RNA, 50 nt, Homo sapiens
gaccagaccaagagccgacaaccacaacaggaaggcgaagaaggccacgg

SEQ ID NO: 166688 - RNA, 58 nt, Homo sapiens
cacgacgggggagcaacgcacagcaagccaagcggcagccggcacccgcacaacccag

SEQ ID NO: 166689 - RNA, 63 nt, Homo sapiens
gagacagcccaaaacccggaagagcgccccaggagaaacaaaaacggcgaggaaagagaggag

SEQ ID NO: 166690 - RNA, 80 nt, Homo sapiens
aagacgccaggaccggaagcagagaaagggaggagggacacacgacaggcccgagagggaacccacaccaaaacacccac

SEQ ID NO: 166691 - RNA, 74 nt, Homo sapiens
aagagaggaggggcaccggggccaccccaggaaggcacaaaggcccagccaggcaagagagaggggcgccaggg

SEQ ID NO: 166692 - RNA, 69 nt, Homo sapiens
gagcccaaaacccaccaaccaggccaccagcgaaaggcacagccaccgaaagaggaagacacgagacca

SEQ ID NO: 166693 - RNA, 70 nt, Homo sapiens
aagaggagacagcagggcagccccgggcaaaagaaacaaccacagggaggaaccaggccacagggcacca

SEQ ID NO: 166694 - RNA, 60 nt, Homo sapiens
aaaacgccaaggaacgcagagggacaaaaaaaacaaaacacgaagcgcaacaaaccaccc

SEQ ID NO: 166695 - RNA, 63 nt, Homo sapiens
ggcagggcagaggacagcaagggacaacagaaggacaggcaaaaagacagccgaaaaagggcg

SEQ ID NO: 166696 - RNA, 72 nt, Homo sapiens
ccaccagcccccaagggacacaaagacacggacggggcaagcgaaggaggcccagccgcagccacccaaggc

SEQ ID NO: 166697 - RNA, 76 nt, Homo sapiens
gaacaccaccaaaaagggggaaaagccgcggaaacccacaggaagccgaaaaagcagggcagcacggaggggcaag

SEQ ID NO: 166698 - RNA, 66 nt, Homo sapiens
gggcgcggggggagggcacagccagcaaagaacagacacacaaaaacaccgggccacagagcaacc

SEQ ID NO: 166699 - RNA, 69 nt, Homo sapiens
gaaggcgccccacccagcacgagaaaaaaaccaaggagccaaacaccaaggccgcaccgagcgagagac

SEQ ID NO: 166700 - RNA, 76 nt, Homo sapiens
ggggaacagccggaagggcggggggcgggccggaggggagacgggaggcaggggcgagacgggacacccccggaac

SEQ ID NO: 166701 - RNA, 80 nt, Homo sapiens
ccaaccgagagcaccaggagagcagaaacaccagaggccgcagcaagagaaggccagcagagacagaaaacggcacccca

SEQ ID NO: 166702 - RNA, 76 nt, Homo sapiens
gcaaaccagaccccaaaggccagcgaagacggaggaccacaccggaagccagcaaagaaaacgccagcggagacaa

SEQ ID NO: 166703 - RNA, 82 nt, Homo sapiens
cgcccgccccccgcccccccagccggagaccagaggcaccgacgggagaccacacgaaggggcagaagagcacaagacggaa

SEQ ID NO: 166704 - RNA, 103 nt, Homo sapiens
gagcccggccggagcgggcggagacgccgggcagccgaacggagggcgacggagggaggggccaagggcccccagcggccgacagcgccagaagcgccagcgc

SEQ ID NO: 166705 - RNA, 88 nt, Homo sapiens
ggcagaggcacgggagaagaggaggagcggccgggggaggcaggggcgcggcagcggcaggggccgccgaaggggagcagcgccggag

SEQ ID NO: 166706 - RNA, 76 nt, Homo sapiens
gccacgcgggggcaagacgaaggagggcgccccagaccgcccggcagcagaacaccaaccagcccccggccccccg

SEQ ID NO: 166707 - RNA, 72 nt, Homo sapiens
agaagccgaagacggagaaaaaggaacagggaggggagagaaaggcaagcagggcgagagagcacaccaccc

SEQ ID NO: 166708 - RNA, 81 nt, Homo sapiens
gaccggcccacaacacgcccggcaaaagagaagaagaaggaggccgcggccagaaacccaagaaaaagcgaaggaacgcag

SEQ ID NO: 166709 - RNA, 75 nt, Homo sapiens
gaagcaagaccagcacagcacaagacacaggggagccgccaccaaaagcagacggaaaacccacggggaagacca

SEQ ID NO: 166710 - RNA, 72 nt, Homo sapiens
ccacagaacggcaaagaaggcgagcccaggcagagaacacagggagcgccgccgcgcgcgcgcccgcagaca

SEQ ID NO: 166711 - RNA, 67 nt, Homo sapiens
cggcccagcaccccgagaaccgcaggagccagagcaacaagaagcgccccgagccgcgaccggacac

SEQ ID NO: 166712 - RNA, 78 nt, Homo sapiens
cggagccacaagaaccgggcacagacacgaccagagacagggaaacagaacgacagcccgcaccgacgccggcggcca

SEQ ID NO: 166713 - RNA, 96 nt, Homo sapiens
gccgccccgcgagcacagagcccgccgccgaccgccgcccgccacacccgccgccaggccaggcagagcagcccaccagggaggggagggggggag

SEQ ID NO: 166714 - RNA, 79 nt, Homo sapiens
gacgccgcgccaccgagccggaccggagacggggccaacagaacacaagcagcagaacggaaaaggccgaacaaagaac

SEQ ID NO: 166715 - RNA, 80 nt, Homo sapiens
cgcagcggcaaggagagacgcgcgaggggcgccgaagcgagggggaaaaagaggaagcaggaagcaaaagaacagacgca

SEQ ID NO: 166716 - RNA, 63 nt, Homo sapiens
ggaagaagggcccaccaggagcgcgcaggcaggagaagggcaccggggaggaccgcgcgacgc

SEQ ID NO: 166717 - RNA, 59 nt, Homo sapiens
gcgacagagagaggcagaccacgaacggaacgaacagaaaggcaaaaaaccaaaaaggg

SEQ ID NO: 166718 - RNA, 78 nt, Homo sapiens
gacacgcgcccggagcaccccgcggagcggagcgacagggcggcgacggcggcgcgaggaccgaccgggcccgcggac

SEQ ID NO: 166719 - RNA, 77 nt, Homo sapiens
ggagaccgaaaagaccgaagaaacggacgaaagccagaaccgcgccggaccgggccggaaccacgaggagagcagga

SEQ ID NO: 166720 - RNA, 74 nt, Homo sapiens
ggacggaaagaaacacgagcacgccggacaggaggaacccgacaaacaacagaccaaggggcggaaaacccgaa

SEQ ID NO: 166721 - RNA, 77 nt, Homo sapiens
gaaagaacgccgaacacgaaagacagcagcgagaggaagaaaggacacaaagcagaagaaaagccacaaacagaagc

SEQ ID NO: 166722 - RNA, 52 nt, Homo sapiens
cccccaccaagccagcaagaagacgagcaggcgccaaaaagaagccggcccc

SEQ ID NO: 166723 - RNA, 77 nt, Homo sapiens
ggcagcaacccagaggaccccagagcaccaagaggggagagcacaacaggaaccagagaaacaaggagccaggcgca

SEQ ID NO: 166724 - RNA, 77 nt, Homo sapiens
cgcaacgaggggaaaccgcggaaggaaagaccacagcaagaccacgcccccagccgggggaccaggccgaacgaccc

SEQ ID NO: 166725 - RNA, 61 nt, Homo sapiens
acgacaacaaccagagcagaagacagaacccaccagacaacacacgggaagagcaagacca

SEQ ID NO: 166726 - RNA, 79 nt, Homo sapiens
acacgcccaacaccccccggaacaccacccagcccaagagaccggacccaaggccagccagccccaggcaccagcggac

SEQ ID NO: 166727 - RNA, 42 nt, Homo sapiens
agcacgcagccccaggcagcaagccaaaaaggggccccaccc

SEQ ID NO: 166728 - RNA, 69 nt, Homo sapiens
ccaccacagagcgggaagaggggcgagacccaaagagaagacgaaacggacggcacgggaaaaacagga

SEQ ID NO: 166729 - RNA, 100 nt, Homo sapiens
cgacacggaggaaggaaaagagccggaaagaagagacagagaggggaagaaccccagacaaagcagcccagaagcccgcaggcagcggaaaaccacagaa

SEQ ID NO: 166730 - RNA, 75 nt, Homo sapiens
cgacacccagaggaagcgaccgagagcaggggagaaccaagaaccgggcagggcgcccccaggacccgccccccc

SEQ ID NO: 166731 - RNA, 74 nt, Homo sapiens
ccggcggagaaaaccggcacgcaaaacggccgcccaagggacgaaccaaagcaaaccacgggacgggggacccg

SEQ ID NO: 166732 - RNA, 74 nt, Homo sapiens
cgcggcgcggccgggccgcgccccccggcgggccggacggccacagagggagcaagaggaggcgaccgcggcaa

SEQ ID NO: 166733 - RNA, 69 nt, Homo sapiens
gccggggcagaaacaaccaggccaggaacgaagggagagaggcagaacagaacaaacggagaaacaccg

SEQ ID NO: 166734 - RNA, 72 nt, Homo sapiens
gccgcgaggggaagaggaagcaaagccaaggagggcaggagaaaggagaaaaagaggcagggagaagaaacg

SEQ ID NO: 166735 - RNA, 53 nt, Homo sapiens
gcccgaggcagagcacacggggaagggggacacagccagggcgcaggcagcgc

SEQ ID NO: 166736 - RNA, 78 nt, Homo sapiens
gcacaccaaacgacagggagccgaggacggagacacaaggacgaaggcaaagaaggagaaagccgagcacacgaggaa

SEQ ID NO: 166737 - RNA, 71 nt, Homo sapiens
aaaaagcagggaggagaggcaaaaagaagcaaggaagccccacagccaacagaaagcacaagcaaccccac

SEQ ID NO: 166738 - RNA, 59 nt, Homo sapiens
cccccacccaggaaaaagggaaagaaacccggcaaggggaaggcgaggggggagggaaa

SEQ ID NO: 166739 - RNA, 77 nt, Homo sapiens
caaccccagaagcgcgcccgggagcggcggagaaaccaccacaaacacgaggccagcaacgaccaacaagacagacc

SEQ ID NO: 166740 - RNA, 71 nt, Homo sapiens
gccagcccgccgggaccgcaggagcaggacccgaggagggccgcacccgagaacgaaggacggccgggccc

SEQ ID NO: 166741 - RNA, 80 nt, Homo sapiens
cccccgcagcccagcccgcccgcagccgccgcggaccaggcagccggggagccggaggcccagccaccggagagcgcggg

SEQ ID NO: 166742 - RNA, 78 nt, Homo sapiens
accaccagagggcaagaaggcacagaaaggaagaccagcagaagcgacggaaaaccggcagcaggagaggccacgcca

SEQ ID NO: 166743 - RNA, 77 nt, Homo sapiens
gaaacggagagcccgagaccaagggaggcagggcaggccggccccgcaagcggcgcggcggaagagagagccacggg

SEQ ID NO: 166744 - RNA, 96 nt, Homo sapiens
cgcccggcgcccacaccccccgaagcacaagaccaccaaaggaggccgccagggaaaaacacgggaagagagccgaagaaacggacaagaagcggc

SEQ ID NO: 166745 - RNA, 69 nt, Homo sapiens
aaaagcggccgcacaagcccaccacagcggagaagagaacccgaccgaagaaggaacaggcagaaagaa

SEQ ID NO: 166746 - RNA, 74 nt, Homo sapiens
gcccggcccgagccccgcccagcacccgccggacggccgagaccgaacaggaaggaagggaacacggacgacga

SEQ ID NO: 166747 - RNA, 77 nt, Homo sapiens
ccgcccgccacccgcgcgccgccgccgaggagaaagggaaacacaaagaagacaccagaagggccagcaccacgaca

SEQ ID NO: 166748 - RNA, 69 nt, Homo sapiens
gcccccgagggcgggacacaggcaaacccaagacggaaaaggggggaaagaaagaagcacagggggaca

SEQ ID NO: 166749 - RNA, 85 nt, Homo sapiens
cagaaggcaaacaggaagcacaaagggaagaggggcagcccagcagcgcccaagccgccagaagcccgggagccagcggaccaga

SEQ ID NO: 166750 - RNA, 50 nt, Homo sapiens
caccccgcccaaggaggcccagcgaggaggcacccgggaagcggaaaagc

SEQ ID NO: 166751 - RNA, 61 nt, Homo sapiens
acccagcccgccggccggccccacgggacgcaaaagggaccacagaccagcagcgaccagg

SEQ ID NO: 166752 - RNA, 57 nt, Homo sapiens
acagccaggcagacgccaccagggcaacccgccgagggcgcggcacggaggcagcgg

SEQ ID NO: 166753 - RNA, 75 nt, Homo sapiens
accgaacgacaggaccaaaacaccccaaggagcaccgccagcaagaccgaggaggcgccgcccgggggacccaca

SEQ ID NO: 166754 - RNA, 70 nt, Homo sapiens
aaagggaccaaaccaagagggaggcacagcgggacccccggagaagggaccagggagagccaagagcccc

SEQ ID NO: 166755 - RNA, 59 nt, Homo sapiens
cgcaggaaacaggcggcggcggggggagcgggaagaggagcaccgccccaggcggagac

SEQ ID NO: 166756 - RNA, 75 nt, Homo sapiens
cgccgagcccgagggcacgaaccgggaaagagcagccggcccagcccaccccaggcccccccagcccagcaccac

SEQ ID NO: 166757 - RNA, 82 nt, Homo sapiens
ccgcgccggcgcacggcggccgcggcgcggcgccacggagagaccaggaaggaaaagcaaaaccagcaggccagagggagcg

SEQ ID NO: 166758 - RNA, 97 nt, Homo sapiens
gccgccaccaagccacgcgcccgcggaccccgggagacgggccgggagcccggccacggacccgcgggacgagcgggaggggcggcaaggaaccacg

SEQ ID NO: 166759 - RNA, 65 nt, Homo sapiens
acacaggaaacagaccgccaggacaacaaaggaggagcccagcagaaaaggggaaccacaaaacc

SEQ ID NO: 166760 - RNA, 79 nt, Homo sapiens
ccccccgagggagcagcggaggaaggaggagcagcagaccggacgggacgccccggacaggcacggcaagaagaggcca

SEQ ID NO: 166761 - RNA, 74 nt, Homo sapiens
caagaaaaggagcccagggcccggaggaccgaaagagacacagcaaagaagccgcccggagcagagggaaacag

SEQ ID NO: 166762 - RNA, 78 nt, Homo sapiens
ggaccccaccgccaggaccccccaggagagcgccccagggcaagccccgcccggccaacaaggaaggcagagacacga

SEQ ID NO: 166763 - RNA, 88 nt, Homo sapiens
gcccaggcggcaccggcaaggccgagcagaagcgcaacgcagagcgggaagggcagaggaagagcgagcggcgcacaaggagccacca

SEQ ID NO: 166764 - RNA, 63 nt, Homo sapiens
aacaaggggaagacccaaggaaccaggcgaaggccccggccccaacaggcccgcgcccagagc

SEQ ID NO: 166765 - RNA, 81 nt, Homo sapiens
gagaagccaacagggcaagaaccgacaagccaccggcggaaagcgcagccagcgagccgccgccaagaggacaggagaggc

SEQ ID NO: 166766 - RNA, 73 nt, Homo sapiens
aagaaacaagccgggaaagggacaagaagggcaaagccgaaagcgccgcaaggcacagccagcccgccaggga

SEQ ID NO: 166767 - RNA, 74 nt, Homo sapiens
ccagccccagacaccaccaccagagaaccggcaacaaggcggcaaccggaaacaagaccgcgcacgggagcgca

SEQ ID NO: 166768 - RNA, 79 nt, Homo sapiens
ccacaccccgcgcccgcaacccagaccaagggcacaaggaggaaggggagagaaggcgcaccagaggaagaccggaaga

SEQ ID NO: 166769 - RNA, 72 nt, Homo sapiens
aagggggccagggcaaacagcgaaaaccgaaacaggcaaccaagaaaaagcacgccacgaagagaagggaga

SEQ ID NO: 166770 - RNA, 49 nt, Homo sapiens
agagcagcacaaggaagcgccccaaagagcggccagggggcagacagcg

SEQ ID NO: 166771 - RNA, 79 nt, Homo sapiens
ggagagaccgcgggcagagggacaccgggcagggccgcagaaacagcgcgaacgaagaacagacacgagaacaaagaga

SEQ ID NO: 166772 - RNA, 63 nt, Homo sapiens
aagccaggagccaccaacaccaaaaaggaaaggaaaccacccgggaacggagccggagcgcac

SEQ ID NO: 166773 - RNA, 54 nt, Homo sapiens
aaccgccacacaaaagcggacaagcgaagagagacgagcaggagagccgacgca

SEQ ID NO: 166774 - RNA, 56 nt, Homo sapiens
gcgagggaagcgccgggccagaccaccacggaaacaaggacgggcgggcagcccgc

SEQ ID NO: 166775 - RNA, 87 nt, Homo sapiens
ggagcagcagcccccacgcgcacagaggcagccggcgcaggagcagcagcgcagcgggcaggccggaccggcgggacaggccaggca

SEQ ID NO: 166776 - RNA, 107 nt, Homo sapiens
gagaagaagacaggcacgaaacccaaaaagcaaaaaacgcccacaccagaggagcagggacggggggaaaagcgcacccgggcccgggcgagaaagaagacaccaaa

SEQ ID NO: 166777 - RNA, 68 nt, Homo sapiens
ggagccacagccagcccagcccgccccggcgccccaaccccggcagccccaggggcgaaggagaaaga

SEQ ID NO: 166778 - RNA, 63 nt, Homo sapiens
gagcggacggacaagagcccgcacagcccaaggaaagaagagccagcaaaaaacccacgaccc

SEQ ID NO: 166779 - RNA, 75 nt, Homo sapiens
agacagaaccgcccacagaacaccggcacagccgcagcagcagaggacccccagacagccaggccccagcagccc

SEQ ID NO: 166780 - RNA, 82 nt, Homo sapiens
ccaaacgaggacccagcggagcaagaagaggaccggcagggcagagcaggaggccccccgagggcggaggcggggcagacag

SEQ ID NO: 166781 - RNA, 63 nt, Homo sapiens
gcagccgagaacgccgcgcgcgcacccaacagcgaccgagcggaaagagaagggagggcgacg

SEQ ID NO: 166782 - RNA, 73 nt, Homo sapiens
ccgcccagacgacaagcggaccagagaagacacacaacaaccccacggagccccaccggaaggagaaaaccgc

SEQ ID NO: 166783 - RNA, 83 nt, Homo sapiens
caaggccccagaaaggggagcgccgccgccgcagcgggaccgcgcgaccggcgcccgcccgcgacgaagggagggaaggaagg

SEQ ID NO: 166784 - RNA, 76 nt, Homo sapiens
ggacgacagggcggagccacccccagggagagcgcgcagggaccgacacaagaagcagccagaacagacgggaaaa

SEQ ID NO: 166785 - RNA, 39 nt, Homo sapiens
caggcagaagagcacacacgaaacaagggacgaacaaaa

SEQ ID NO: 166786 - RNA, 66 nt, Homo sapiens
gaacgccagcagcacggcacccccaacaccggccacggaaaaacggcaaaggccaggaggaaggag

SEQ ID NO: 166787 - RNA, 76 nt, Homo sapiens
ccgcaagccgcgaggccacgccccgcccaggggccgcaaggccaggcgcgcagaggcacccaacggcacagacccc

SEQ ID NO: 166788 - RNA, 86 nt, Homo sapiens
agaagaaaaagggaaagcagcaagcaaggccaaaacagaccaggagaaagagcagcgagccagcagggagcagaacgagaaaacca

SEQ ID NO: 166789 - RNA, 50 nt, Homo sapiens
ccagcaagcccccaacgaaaaacacggagagcaacaaagagggaagcgga

SEQ ID NO: 166790 - RNA, 73 nt, Homo sapiens
gggcgcgggcaaggacagagcagaggacgcgcaggggcacccccacggagcccgggccaaggagacggaagaa

SEQ ID NO: 166791 - RNA, 57 nt, Homo sapiens
gcaaaacagaggcgcagccccaaacgggaccaggaggaagaaacgcgcacaagcgac

SEQ ID NO: 166792 - RNA, 75 nt, Homo sapiens
agaaacggccagcccgggcgaagacggaaaagaagaaaacagggaaaggaggcaaacacgagaagaagccaggac

SEQ ID NO: 166793 - RNA, 88 nt, Homo sapiens
gaagcaaagggcaaccagggaaacaggagaggaagcaagccggagcagggggcacaaggaccacgcagcagaaagagacgaagaaggc

SEQ ID NO: 166794 - RNA, 70 nt, Homo sapiens
acgacgaagaaggcagcaagaaaaagccagaaggagaggagcaccagacagcaaacgaggacaacccaga

SEQ ID NO: 166795 - RNA, 71 nt, Homo sapiens
caaagcgcaggacgggccggcccacggaacaaacggaagcagggccccagccggaaccaaaaagaagcccc

SEQ ID NO: 166796 - RNA, 85 nt, Homo sapiens
cccgcgccccaggcccgcagacgagagcgccagaggggaaaaaagcagaggccagggcgccggggcccgcgccggagggaggccc

SEQ ID NO: 166797 - RNA, 97 nt, Homo sapiens
agcccggaaccgccgagcacgcaacaacaaacccccggaacacggcaaggaggacggcgcgcccacgcggaggggggggacacagccacgcaacccg

SEQ ID NO: 166798 - RNA, 69 nt, Homo sapiens
gcacgccggccgggggccgacacaggggccgcaaggccaggcgcgcagaggcacccaacggcacagacc

SEQ ID NO: 166799 - RNA, 83 nt, Homo sapiens
agcaccaagcggcaacggccaaaccaaggagagccccaggagggacagcgggaaccaccagcgcggagaccgggcagggacgg

SEQ ID NO: 166800 - RNA, 86 nt, Homo sapiens
gcgagcccgccgccgccgccaccacccacccggacacagggacccggcaaagagagaggcacacgccgccgaaggccaggagcaga

SEQ ID NO: 166801 - RNA, 74 nt, Homo sapiens
ggggaagccgcaaccagccacaccaagagaccacaaaaggagaacccaggcagcaccagggccaaaagaagacc

SEQ ID NO: 166802 - RNA, 68 nt, Homo sapiens
agagcgaggcccgccacccccccgcgcagacaacgaagagaggaaagaagcggaaaggagggagcaca

SEQ ID NO: 166803 - RNA, 79 nt, Homo sapiens
cagaaggccgcagcagacccccccccccacccccggaagaagcccaggacccaggaaggagacacaggaaaacaaagcc

SEQ ID NO: 166804 - RNA, 39 nt, Homo sapiens
cccgcgcgcgccccgcgagggcaagaaagccagagcccg

SEQ ID NO: 166805 - RNA, 43 nt, Homo sapiens
cgggcaccagcgcaagcccccagcaagaggagccaggagcacg

SEQ ID NO: 166806 - RNA, 79 nt, Homo sapiens
gcggagggaccagcgagcgggaggcaaggacgacaggccagcccacagggccaccggggcccgggaaggaggcagccag

SEQ ID NO: 166807 - RNA, 76 nt, Homo sapiens
ccgaagcgggcgcgcgcacggcaggacggagacgacgcaagaacagccaacacagaagacaccgccacgaggccac

SEQ ID NO: 166808 - RNA, 71 nt, Homo sapiens
gcggcaagagaggagaacaaaccccagcaaagagggcacaggggaaagaccgagccagcacaagcgagcga

SEQ ID NO: 166809 - RNA, 76 nt, Homo sapiens
ccaccgcgaacccagccaagcgccacacccggggccagagcgaaacgggccagcccccagagcaggagcaggaaaa

SEQ ID NO: 166810 - RNA, 72 nt, Homo sapiens
ccaggagcgccacgcgcggaaggcagcgcccagcagcgcagggcaagaaagccagagcccgaacggaaccca

SEQ ID NO: 166811 - RNA, 111 nt, Homo sapiens
aggggagaggggagcaggggccaaggagcacggacggacccagcacgaggaggcgcgaggagagcggaaggccaaagacagacgggcccagcacacagggacaacgccagg

SEQ ID NO: 166812 - RNA, 82 nt, Homo sapiens
gggccgcagccgccggcaagccgcgaaggaagaccgcaacccaccaaggagcacaggacgaagaggaaggaaaaaacaggcg

SEQ ID NO: 166813 - RNA, 107 nt, Homo sapiens
ccacaggacgggcgcccgggggcccccagcacccccagccccacccaccgccaggagcccccccagcacaagagggccagggaccaggggacgcccaagacggccac

SEQ ID NO: 166814 - RNA, 76 nt, Homo sapiens
ccagcccccaagagcggggcacagccccaggagcccccgcgccccgccacccgggccacgccgggcgcgcacggcc

SEQ ID NO: 166815 - RNA, 73 nt, Homo sapiens
acaccaagggacgcagcggaagaaaagaaagacgccaaggggggcacgaacaccccacggacagccaagcgcg

SEQ ID NO: 166816 - RNA, 67 nt, Homo sapiens
acgagaggacgaagcccaagccggcaggcccgaccacgaagaagaggacaggggacgcgcggaaaac

SEQ ID NO: 166817 - RNA, 66 nt, Homo sapiens
agcacacgaaagagaaaaggaaaccagagcaccgaaggacaccacgggaagcgaggccccgacgac

SEQ ID NO: 166818 - RNA, 80 nt, Homo sapiens
aaagcacaaaagggaaagagacggagaaaagaagaacacgcccaaaacgagccggggggggcacagagccccggaagaca

SEQ ID NO: 166819 - RNA, 62 nt, Homo sapiens
aggcaagggcccaaacagaccagggcagcaccggagcgggcgaggcagggggcgaggagcgg

SEQ ID NO: 166820 - RNA, 71 nt, Homo sapiens
gggccaaagggcagggggcccggccgccgaggccccgggcagcacgacgcagcacccaaagcgacccgaaa

SEQ ID NO: 166821 - RNA, 105 nt, Homo sapiens
cagcaaagggaccccacagcagcaggggggacacagaagaagaaaaccagggaggagaggagagacccagagccgacagaagaagaccacaacaaaaaggacgaa

SEQ ID NO: 166822 - RNA, 78 nt, Homo sapiens
acgcaccccggccgcccgggcagccacccccggcccgcgccacagcaggcgggggcgaaaaagcgaagaaagaaagag

SEQ ID NO: 166823 - RNA, 58 nt, Homo sapiens
gcaaaaagaagcccggcagaagacaacgaaacggaggagcccaggaggaagaagaagc

SEQ ID NO: 166824 - RNA, 49 nt, Homo sapiens
cccggccgacaaccacgccaccgcaccagccaagacagacgggccagac

SEQ ID NO: 166825 - RNA, 74 nt, Homo sapiens
gaagcccagaaaagaaaggggacaggccgaaagaccgcaaaggagacggaagggacaaaaggacgcgaaaagag

SEQ ID NO: 166826 - RNA, 79 nt, Homo sapiens
ggagccgaggcgcaggggcgcgggccccgggggcgccgagggcacaagggcaacgacagaagggcgaagccaacgccag

SEQ ID NO: 166827 - RNA, 80 nt, Homo sapiens
acagccgccgagcacaagcccagcacccgcagggggcagggggggagggcggagaacggaaaagcaccaggaagcagaga

SEQ ID NO: 166828 - RNA, 71 nt, Homo sapiens
ccacccgagcagccagagcggaccggggcagaccaaacggcaaggacgccgccggcaaaaaggcaaaaaga

SEQ ID NO: 166829 - RNA, 61 nt, Homo sapiens
cggcgggcggagacaggaccgcggcgagcaagaaacacaggggaaacacgagagagcaaca

SEQ ID NO: 166830 - RNA, 80 nt, Homo sapiens
cccgaccccaaccgcacgaggaaaggaggagaacaggaagagcacgaggggcgggaacggaaaagacaaggaagcagaga

SEQ ID NO: 166831 - RNA, 83 nt, Homo sapiens
acaacacgcccgggagacgagaccgaaccggcaccgcacaccggaccaggaaacggaggcgggcagcaagaagggacacgagg

SEQ ID NO: 166832 - RNA, 78 nt, Homo sapiens
ggaaacccacaggaggcaaccacacagagcaagaagcaccaggagacccagcccgaaaccccagcaaacccgaaccga

SEQ ID NO: 166833 - RNA, 63 nt, Homo sapiens
aagaagagaacccagggaagccgaagagccaggaaggggaggagcacagaacgccaggaccaa

SEQ ID NO: 166834 - RNA, 68 nt, Homo sapiens
agcagaagagaacccaaagaaggcacaaacaacagagcgggacaaaagaaccagaagccaagagcaaa

SEQ ID NO: 166835 - RNA, 72 nt, Homo sapiens
cacagcgcagccagcaaaacggcaaaggcgaccggaccaaaggcaaaagaacaaggccacacagccgcacga

SEQ ID NO: 166836 - RNA, 74 nt, Homo sapiens
gaaacggagccagggagcacggcgaaaacagcacgaaggaaaccagacggacaccggggcaaaggaggcgagaa

SEQ ID NO: 166837 - RNA, 86 nt, Homo sapiens
cgccccgccgcccagaggacgcccaacaccacccacccaccacggcacaaggaccaggaaaaagcgaagggaagacgcgacaaaag

SEQ ID NO: 166838 - RNA, 76 nt, Homo sapiens
agaagcgagaggaccgggaacccaacaagagaaaaccccagaagcagcaggcgagaggcagaacccggaaagaagg

SEQ ID NO: 166839 - RNA, 80 nt, Homo sapiens
cgcggagggagccgcgggaggaccgcagggggacggaagcggcagcgggcagccggcccagcacagggagcagaacccca

SEQ ID NO: 166840 - RNA, 77 nt, Homo sapiens
gaacgcaaaaaaagcccaaagagccaccgggcgccccagcagagaccagagaagccccccaccagccccaacagcaa

SEQ ID NO: 166841 - RNA, 62 nt, Homo sapiens
ggggggccccgaggagccaggccacaccccaggggcaaggggagaacggcaggccccacacc

SEQ ID NO: 166842 - RNA, 79 nt, Homo sapiens
gcagggaccgcggcgcccgagggcccgggacgagcggcccagcgacgagcgaagaggcacaaaaccgccaggagccgac

SEQ ID NO: 166843 - RNA, 74 nt, Homo sapiens
aggaagagccagcacagacccgaggaacgggagaaccacccggcaagccagaagagaagcgagaaaagaaaagg

SEQ ID NO: 166844 - RNA, 70 nt, Homo sapiens
ccggcgcgccccgcccggaccgcgcagaaccagggcggcggccagcgccacgcgcagacggcagaaaaca

SEQ ID NO: 166845 - RNA, 71 nt, Homo sapiens
gcaggacacaaccaaggccgacaaagggaccagaggcagccagccaagagaggaggagagaaggaacgcag

SEQ ID NO: 166846 - RNA, 72 nt, Homo sapiens
cccggacgggagagcgccggcggagaaaaagcaccaacaagacgcaaaaccagcaggccgcgaagagggagc

SEQ ID NO: 166847 - RNA, 74 nt, Homo sapiens
aaaaaaaagcaggccacgcaacccggcccaccaaaggcacgggaccggaccacgaagagccggagggggacccg

SEQ ID NO: 166848 - RNA, 85 nt, Homo sapiens
aaggaaacggaaagacccagggaaacgacagcagccccgcaaagggaacaggaagcagccacggaggggacgcccagacccaccg

SEQ ID NO: 166849 - RNA, 69 nt, Homo sapiens
gccagggcgaaaaaaaaggaccaggcacagacaccacgaacagggaggaaagccaggaggagagcagaa

SEQ ID NO: 166850 - RNA, 81 nt, Homo sapiens
cggagggggccggagaagagagccggggcgacacggagagaaacaaaccgggcaaggcaggcccggcaaacggaaggcaag

SEQ ID NO: 166851 - RNA, 72 nt, Homo sapiens
ccccagacgagccgagaaggggggcgcccccgaggacccggccaggaccgcaggggaaccgcacgcccgggc

SEQ ID NO: 166852 - RNA, 64 nt, Homo sapiens
agcggggacgcccgggagcacaggcgggggaagggaggagggcgagggaacgggcaggagcggc

SEQ ID NO: 166853 - RNA, 72 nt, Homo sapiens
cgacacacacgaccaggacaagcgccccaaaccagaggaagagaaaggcaggaacacacggacagagcgcac

SEQ ID NO: 166854 - RNA, 82 nt, Homo sapiens
ccaggaaacaggcagcaaaagagcccagaagaggagaagaaaaccacgcaggagaggggacaaagaaagaagaaaggaaaga

SEQ ID NO: 166855 - RNA, 70 nt, Homo sapiens
cgcgacagggaaaagacggaaagaccaacggagacaaaacagccagacggcgagacacaagaagaaacgg

SEQ ID NO: 166856 - RNA, 82 nt, Homo sapiens
agaaggccggggccggccagaagcgggcggcgcgggggagagaggagaggaagacaccccccccaccgaaagaacccgaacg

SEQ ID NO: 166857 - RNA, 80 nt, Homo sapiens
ggaggcggaggcagaggggaggcgcgaaagacacagcccacccgcagcagccacccagggaggagcacagggcgccagcc

SEQ ID NO: 166858 - RNA, 65 nt, Homo sapiens
cggccaacccgggccgggacccaagccagggacacagggcacggcagacaggaaaggaaagcagg

SEQ ID NO: 166859 - RNA, 67 nt, Homo sapiens
gcacaaagggagggggcagcccgcaggagcaagcgcagcaccaccaacaggaggaaaaaggaacaag

SEQ ID NO: 166860 - RNA, 64 nt, Homo sapiens
acaggaacggaggcgggcggccagaagcaaccggacaaggggcccgaccagggaccgaacgagg

SEQ ID NO: 166861 - RNA, 85 nt, Homo sapiens
gaacagagccgggagcaagaagaacacccagaggcggacgaaagaaagaaggagcaccaacgcaaagaaaaagaccaagaagacc

SEQ ID NO: 166862 - RNA, 57 nt, Homo sapiens
ggcggggcccgggcgagcagcccgccccggacgcagggaagacacacccaggaccaa

SEQ ID NO: 166863 - RNA, 83 nt, Homo sapiens
gaaaggcgggaaaaaagcacggcagcgcgcgccacgggccaacagaaaacccgcagcccaaagggcagaagaagaagaagacg

SEQ ID NO: 166864 - RNA, 94 nt, Homo sapiens
aagacgcgagagcaccgaagacggcaagcacggccacgccaaggggcccgggaccgacggaagaagcggacggagcgcagccgccgagggcaca

SEQ ID NO: 166865 - RNA, 79 nt, Homo sapiens
caaaccacgcggcggcagcaggccagcggccggcgggagacgcagcgcgacccagcagggaagaagagaaagccgaaaa

SEQ ID NO: 166866 - RNA, 82 nt, Homo sapiens
aggacacaagaaggcgcggagaaagccacacaggcggggccagacgagggagggccaagaacccggaggagggcaagccgga

SEQ ID NO: 166867 - RNA, 71 nt, Homo sapiens
acagggaagagaaaagaaggcccgaaacagagcgggagagccccccacgacccagaaccagggaagagggc

SEQ ID NO: 166868 - RNA, 77 nt, Homo sapiens
gacccaaaggggagaaaagacacacagagcgagaccccaaaccaaaaggaagagaccaagccgaagcgcggccgcag

SEQ ID NO: 166869 - RNA, 74 nt, Homo sapiens
gcgaaagaggcggcccaggagcggcggcgaagaaggaggcaggcacgggagccgaagagagacgggggcaccag

SEQ ID NO: 166870 - RNA, 44 nt, Homo sapiens
agagagcccgagcgagagaaagggacccacaagagggcagaacg

SEQ ID NO: 166871 - RNA, 50 nt, Homo sapiens
ccaaccaaggccccgaaccacaggggagcaccaggcacaagccaaaaagg

SEQ ID NO: 166872 - RNA, 72 nt, Homo sapiens
gaggagaccaaaaaaaacaacagcagagcaaggaaagccagacaccccagaggggacggcagagacaaaacc

SEQ ID NO: 166873 - RNA, 52 nt, Homo sapiens
gaggaacccagaagaccaggggacccgagggagaaacccaaccgaggcaaaa

SEQ ID NO: 166874 - RNA, 53 nt, Homo sapiens
cgcggccagcgaaaacgcccaggggaaagagggaccagcgcagcagaagcagg

SEQ ID NO: 166875 - RNA, 80 nt, Homo sapiens
aggccgccagcagaggcggagcccgcagaccgcagaaggccggagacaccagcaggaggggcccgagagaagagaagagc

SEQ ID NO: 166876 - RNA, 76 nt, Homo sapiens
ggccacccaccgccaccgggacgccacaagaacaggaggacaccagaaaggccgcccccagcgaggggccggcgga

SEQ ID NO: 166877 - RNA, 68 nt, Homo sapiens
aaaaccagaagcacaaggacagagcacccaccacaggagggcggggccgagggaggaagccgcaggcg

SEQ ID NO: 166878 - RNA, 76 nt, Homo sapiens
gaaacaaagaagcaaggaccgggaaacaaaacacaaggagggaaagcagccccgcgaagccgggaacccggagagc

SEQ ID NO: 166879 - RNA, 86 nt, Homo sapiens
ggcagcgaggagacccggcgccgccaggccgacgaaaagcccaagcagggagaagaggagagagcagccaggccccggccgagccc

SEQ ID NO: 166880 - RNA, 74 nt, Homo sapiens
cacccagcccgagcaaaccaaaaaaccaaggacgacgggaaaccggacccgcaaagaggaaacaaaagaaaaag

SEQ ID NO: 166881 - RNA, 76 nt, Homo sapiens
aagagacgacccaccgcgcccagcggcacacaacaccaaggccggcccagagcggaggaacaaaggcggaccacag

SEQ ID NO: 166882 - RNA, 63 nt, Homo sapiens
gaaggaccaagaaccagggcccaaggaggcagaaacgaagcaggacacaacaggaaccagagc

SEQ ID NO: 166883 - RNA, 78 nt, Homo sapiens
acccagaggcccgcacgggacccccgcgcagcccaccagcagccaccagaggcgcagggagcaggagaagcggagcga

SEQ ID NO: 166884 - RNA, 89 nt, Homo sapiens
aacaaggcaacagaaagagcaacagcagggcaacagaagaggcgacaaaggccggacagagagaacgggcgcacggggcaccaagccac

SEQ ID NO: 166885 - RNA, 70 nt, Homo sapiens
ccggaccagaaagccgagacccagaccagcaggaacaagcagaaccgaaagagaagaaggcgaagaggaa

SEQ ID NO: 166886 - RNA, 64 nt, Homo sapiens
agagaggaccccggacacgaaagccgggaaagggcaaaaaacaggcagccagacgaaacacagg

SEQ ID NO: 166887 - RNA, 82 nt, Homo sapiens
gggcacgagaacacacaaacgagcagcaccagacaaaccggacaagggcaacacccccacaaagagcaagccagccggacgc

SEQ ID NO: 166888 - RNA, 85 nt, Homo sapiens
cccgccgcgagggacccggccgggcccacgcaccgggagcggcaagaacgggaacccccaaagaaggaaagggagcaagcccccc

SEQ ID NO: 166889 - RNA, 73 nt, Homo sapiens
caccagcagcaagcacagagagaccaccacaaaagagaccccggagccagcgccgcaggggccaaggaaggaa

SEQ ID NO: 166890 - RNA, 51 nt, Homo sapiens
gcaggcaagaggcagagaaaggagcagggcagaagaaaagggggcaaaccc

SEQ ID NO: 166891 - RNA, 77 nt, Homo sapiens
acaggagaaccacccaagaagagagcagcgggagccgagccaaggcgcagcacaaggaaaacgagagaaacgaaggc

SEQ ID NO: 166892 - RNA, 49 nt, Homo sapiens
aacccagagcgcacaagaccaaaggcaaccagacacacaaccaccagaa

SEQ ID NO: 166893 - RNA, 72 nt, Homo sapiens
cagggaggagacgggcggaaaaccccgcgcaaggagcggaccaacagacaagacaagaccacacccgggaga

SEQ ID NO: 166894 - RNA, 76 nt, Homo sapiens
cgagacgggagccccggccccggagccaggacaaaaccaggcagaaccaacacgaacccaagcacaaacaagaaaa

SEQ ID NO: 166895 - RNA, 78 nt, Homo sapiens
caggaaccgacgggaacagggaccacaaagcaaagagcgcccaagggaggaaaacgggagccaaggacccgagacgga

SEQ ID NO: 166896 - RNA, 73 nt, Homo sapiens
ccaccccgcagccccgccaggcgaagcaaacaagcaacccacagccaagagcaagagacgccaaggacagaga

SEQ ID NO: 166897 - RNA, 59 nt, Homo sapiens
ggcgaggagaaccaacggcccgaaagaggagggagccgagcgcgcccagaagacgacag

SEQ ID NO: 166898 - RNA, 75 nt, Homo sapiens
aggacgccaccaggaagggcccgcccgagaggacgaaggcacaagggcggacccgacccgagaggaggcgccagc

SEQ ID NO: 166899 - RNA, 81 nt, Homo sapiens
cacgggcgcaaccgcagcacacagcgaccgggagaacaagacgggagaggacgcagacggaaccgaccgagcagggcacaa

SEQ ID NO: 166900 - RNA, 71 nt, Homo sapiens
cacagcagacaaaggaaaacgaccaggccaggaaaaagaagggaggaacaagccaccgcacgagggcccaa

SEQ ID NO: 166901 - RNA, 57 nt, Homo sapiens
agaggaacaaagacggagagcccagagacacggacaagaacccaagaaacaggaaaa

SEQ ID NO: 166902 - RNA, 64 nt, Homo sapiens
cgccccagaaagagacaacacaggaacaagcaccacagaggaagggccaccaccaacccggaag

SEQ ID NO: 166903 - RNA, 75 nt, Homo sapiens
ggaggggagggaagggacaagaagaacgcccggccccggaccccggaaccccgaccccgccccggcagagcagcc

SEQ ID NO: 166904 - RNA, 72 nt, Homo sapiens
aggagacacgcagacccacacgcgaaaaacccgccacccccacccggcgccccgcgacgagacaagccacgg

SEQ ID NO: 166905 - RNA, 72 nt, Homo sapiens
cccgccccagccggggcgggcaccgggcaagaagggagaagacacgcaacacagccaagaaaaggacaagac

SEQ ID NO: 166906 - RNA, 77 nt, Homo sapiens
ggagaagaaagacacccagacagagagcgcaccacgacaaagaagagaaaacgcggcagagcaacaaacacagccag

SEQ ID NO: 166907 - RNA, 81 nt, Homo sapiens
cgaggagccagaggcgccagccgcgaaggggcggcgcgcgccgggcgccggagggaacggagggaaagcgacaaacaacca

SEQ ID NO: 166908 - RNA, 91 nt, Homo sapiens
ggggagcaaaaccaacgccggccggagcagcagcccgagcccgaaggaggcgccaagggagacaccacaggggcaaaggccgcaagcgacc

SEQ ID NO: 166909 - RNA, 87 nt, Homo sapiens
gggccccgggacccggccccgccgggcaggacgccgccagcgcgaaggcgcagcccggaggccgcgcggaggagccacgcacccagg

SEQ ID NO: 166910 - RNA, 41 nt, Homo sapiens
agcgaccaccaacagaccgaaggcaaccacggcgacaggaa

SEQ ID NO: 166911 - RNA, 79 nt, Homo sapiens
acacgaaacagagaggggaaggagcccagcgacaaaaggggagcggacgggcccaggagcaggagccacgcagacgggc

SEQ ID NO: 166912 - RNA, 60 nt, Homo sapiens
aggcgccgcggcacgcgaggccccgccagacagaagcgaaggggacagggggagaaccgc

SEQ ID NO: 166913 - RNA, 78 nt, Homo sapiens
agagacagaagaagcggaggccggcaaagccaagccaaaagaccaagggacagggaaaaaggcgccaaagcacagagc

SEQ ID NO: 166914 - RNA, 75 nt, Homo sapiens
gcaccacaccacggcaggcgcaggccacagccgaaaccagccagcaacacaggccaaagagcaccaagagaccac

SEQ ID NO: 166915 - RNA, 52 nt, Homo sapiens
gacacccaaaagcggaccaaggccgagaaaccaccaggcgaaggaagaaacg

SEQ ID NO: 166916 - RNA, 65 nt, Homo sapiens
aggggcggaggcggaggcagaggggaggcgcgaaagaacagcgcgagccacaaggcaaggaagca

SEQ ID NO: 166917 - RNA, 78 nt, Homo sapiens
ccccggcccacaggggggggcaaacccgagagaacggagcggcgggaaaccaccaacaacacccccaaaccaaaacag

SEQ ID NO: 166918 - RNA, 71 nt, Homo sapiens
gaagacgcacaccgggagacccacgccacacaggaggaaaaggcagaggaagggaacagaagaagcgaaaa

SEQ ID NO: 166919 - RNA, 69 nt, Homo sapiens
gaggcaggaccggaccgcaacagggggcagcacgccgaaggagagaccagacaacaggccagggaaggg

SEQ ID NO: 166920 - RNA, 76 nt, Homo sapiens
aaccccagcccagagcagagcagggaccgggaggaaggcaagggccacgagacccgagcacgaggaggcaggagcc

SEQ ID NO: 166921 - RNA, 73 nt, Homo sapiens
cgagaccgcggcggggccaccggacaacaccgccccagcccaccagacaagcaaggggcagaccaacaccacc

SEQ ID NO: 166922 - RNA, 56 nt, Homo sapiens
gaccgcgcagaaccagggcggcggccagcgccacgcacgggagagaagcgccggcc

SEQ ID NO: 166923 - RNA, 75 nt, Homo sapiens
aaaagagcagaccgaagaaggaccgacacaagaagcagccagaacagacgggaaaagaaacccaccacaaaacac

SEQ ID NO: 166924 - RNA, 78 nt, Homo sapiens
ccacaccggggcagcagagggaggcgccagcgcgacgagaggcacgcgcacagaagagacacagaaggagcggaaaga

SEQ ID NO: 166925 - RNA, 73 nt, Homo sapiens
gacccggaaacagaccccaagacacaaaacaagaacgacgacacagcaaggcaccgaaggacagaagaggacc

SEQ ID NO: 166926 - RNA, 47 nt, Homo sapiens
ccacagcccgccggcacggcagaaaccgcccccaaagccagagccca

SEQ ID NO: 166927 - RNA, 64 nt, Homo sapiens
gaacacccgccaaagcagagaaaaccccgagaaccaagaacggaagaccagcccggacccaacg

SEQ ID NO: 166928 - RNA, 70 nt, Homo sapiens
gaccaaagaaggaaggaaagaacaggcagggagggcacgcggccagaaagcgaaccaacgggccccagac

SEQ ID NO: 166929 - RNA, 74 nt, Homo sapiens
caagacagagccaagccagaaacagaacagcgcccacaaaggcaggaaacgcaaccggacagaagaggaggcaa

SEQ ID NO: 166930 - RNA, 58 nt, Homo sapiens
gccgagcacccaggcgacgcccaccaaggacccggccaggaccgcaggggaaccgcac

SEQ ID NO: 166931 - RNA, 55 nt, Homo sapiens
ggccccccaaagcaccgcgcagggaggagcgggagcacccgagcggaagacccgg

SEQ ID NO: 166932 - RNA, 76 nt, Homo sapiens
ggagcaagaggcagacagaccgagacgggcaaccaacaagaaacagacacaccgcacaggcagaggcagggcagac

SEQ ID NO: 166933 - RNA, 76 nt, Homo sapiens
aaggcggagcacccgagagccaccaaaggggacagcccagaccaaaccccagacaaaaaaaacggaaaagcagaac

SEQ ID NO: 166934 - RNA, 73 nt, Homo sapiens
accggaaggaggcgaggagcagagcaccaggcacccagcggagacagaaaaacgaaggaaggaggacccgagg

SEQ ID NO: 166935 - RNA, 64 nt, Homo sapiens
ccaagaccagaagaccgacaggaggccccggaagacggacccggcaggcgaggagaccacggga

SEQ ID NO: 166936 - RNA, 76 nt, Homo sapiens
caagaagaacacccgaacacgggacaaaccagcaccagcgcaaacaacaccaaggaccgcaggccaggacacgcaa

SEQ ID NO: 166937 - RNA, 81 nt, Homo sapiens
agggcccagagggcaaggagcgggacaccgcccacacacaaacccgggccacaggaggaaaaggccagcagggagcgcgga

SEQ ID NO: 166938 - RNA, 41 nt, Homo sapiens
cagcgccgccaaccaggaggcgcagggaaaagaagaacgcc

SEQ ID NO: 166939 - RNA, 80 nt, Homo sapiens
ccagaggcagggggcgacccgaacccaaaggaggaaacagcggcaagccacagacgacccagcgggaggaagaagaggcc

SEQ ID NO: 166940 - RNA, 62 nt, Homo sapiens
gaaggaggccaagaaaggacgagagaaacggcgaggaaagagaggagccccggaaagaaaag

SEQ ID NO: 166941 - RNA, 61 nt, Homo sapiens
gcgcgggagggcgggaggcccggagcgcccggagccggagggacgaggagcacaaccagac

SEQ ID NO: 166942 - RNA, 73 nt, Homo sapiens
aagcagcccacgcaccaagccccaggagccagccccagaccaaccaggcgcgcccagagaaggacggagaagc

SEQ ID NO: 166943 - RNA, 59 nt, Homo sapiens
gaaaacagagacaaagacaacgaaagagacagcacaaaaaggaccaggagccaggccca

SEQ ID NO: 166944 - RNA, 58 nt, Homo sapiens
gggaaacccaagcagaaaggggcaagacgccaagagaaaaggcgagagcacaaagcac

SEQ ID NO: 166945 - RNA, 72 nt, Homo sapiens
gaagacagaaggaagccggccacaggaagacgggaagccaagcaggacaaccacaaaagcagcaaacagaag

SEQ ID NO: 166946 - RNA, 84 nt, Homo sapiens
ggggccacaggagaggcggcccccgcgacaggaccagcaggccacgccacccagcgcagaaccagaacccaccagacaacaagc

SEQ ID NO: 166947 - RNA, 77 nt, Homo sapiens
agccgcagcccacaccacgcgggccagagcgccacgcgacagggacacagggcggcggggccaggagacaggccagg

SEQ ID NO: 166948 - RNA, 88 nt, Homo sapiens
gccgcgaaccccgcccgagcccgccggaccccccgacccagggcaaggaccccccaagcagagcccggggagccacgaagaagcagga

SEQ ID NO: 166949 - RNA, 73 nt, Homo sapiens
gcaggcaaccccaccggcaggccaacaaggacaaagggaagaacagggccaaggggcaggcccggccaaagcc

SEQ ID NO: 166950 - RNA, 61 nt, Homo sapiens
aagcagccaggagcacggggggggccagggagcccggaagccacacaccccaagcaacgag

SEQ ID NO: 166951 - RNA, 79 nt, Homo sapiens
gccaaagcagcgaagaagaggcccaacccccaccccgcccaaggaggcccagcgaaagagccgcagacgcacagcaacc

SEQ ID NO: 166952 - RNA, 41 nt, Homo sapiens
cccgaggcccccagaagcaggacaggacaacgcacaacagg

SEQ ID NO: 166953 - RNA, 77 nt, Homo sapiens
gaggccgacagcacgccgagaagagcggcgggaggggaaggagcagccacccgggcagaaaggccgggcgaagggcc

SEQ ID NO: 166954 - RNA, 39 nt, Homo sapiens
accgaaagcggcgccaaggcccgcccgggagaagcccgc

SEQ ID NO: 166955 - RNA, 68 nt, Homo sapiens
aagcaagcgcggaagccccgaaaccccaggacccagacacaagcagcccgacggccaggaggcgaaga

SEQ ID NO: 166956 - RNA, 95 nt, Homo sapiens
acggccgccaccgcgcaggaggcaaagaagcgaggagcaggcaacgcagccggcacccgcacaacccagggggccgaacccagaccaacaaaagg

SEQ ID NO: 166957 - RNA, 74 nt, Homo sapiens
ccccacccaccaaaccggagggggaaaaaacccaaggcgcaaagacaccacgccacccaagagagagcaaaaac

SEQ ID NO: 166958 - RNA, 74 nt, Homo sapiens
cgcccccagcacagcgccccaccccagcccccaacccccagggcaggaaaggagggcgaaacacaagcaccacc

SEQ ID NO: 166959 - RNA, 62 nt, Homo sapiens
ggacccggggacaagcgcacgggcccgccgccagaacggggaaggacaagccgcgcagcccg

SEQ ID NO: 166960 - RNA, 73 nt, Homo sapiens
caggaccgaacgaccgccgcggcggggcccaaacagcagaggggcagaaacaggaccgcccgcaccaggagga

SEQ ID NO: 166961 - RNA, 50 nt, Homo sapiens
gaacaagggcaagggccagcggaaaggagcggcgcccggaacaccaccaa

SEQ ID NO: 166962 - RNA, 45 nt, Homo sapiens
ccccacgcaggagccccgaccagcagggacgcgagagcccacgaa

SEQ ID NO: 166963 - RNA, 46 nt, Homo sapiens
agggaagcgacagggaggaacggaggaagcccccacgcgagacgca

SEQ ID NO: 166964 - RNA, 79 nt, Homo sapiens
aacggcgcaccggagagacgcagaggggcggcgggggcaaaggaaaaggagagcggaaggaaagagacacagcaaccgg

SEQ ID NO: 166965 - RNA, 76 nt, Homo sapiens
aagaagcagcgaaagggacaacgggaaggagaggcaacaaaggggagaccagggggacccccgcgcccccaaggcc

SEQ ID NO: 166966 - RNA, 79 nt, Homo sapiens
cggaggagcagcgcgcccgcgccagcacacgacaccgagccgccgccgaccgagcagacagaaccagcaagaagacaaa

SEQ ID NO: 166967 - RNA, 59 nt, Homo sapiens
gaacacccccagcggccagggggggaggacgcaccgcgggcggccacggaccccagccc

SEQ ID NO: 166968 - RNA, 78 nt, Homo sapiens
cacggagagagagccgggacggcagggaggcgagaccggccgcgggccagagaacggaaggcggagacccccgcgagg

SEQ ID NO: 166969 - RNA, 74 nt, Homo sapiens
caacaggaaaacaaaagaggagaaagagaaggacggagaagcgaaagccagaccggcaagagcggaagaaagca

SEQ ID NO: 166970 - RNA, 61 nt, Homo sapiens
cagacgcagggcgcccccgaagccacagggaaaacaagggcgacagcaagagggacggacg

SEQ ID NO: 166971 - RNA, 71 nt, Homo sapiens
accggaaaacggaaacaaggccgggaacgggaaacgcgcgccgagaagccacccgccgagagggagcggcc

SEQ ID NO: 166972 - RNA, 85 nt, Homo sapiens
gggccccagcagcccccgaaggcccacaggacaggagagaaagacgaagaccggcgaaaaagaaaccaagaaaaaagagacacca

SEQ ID NO: 166973 - RNA, 76 nt, Homo sapiens
cggcgcgcggcgcgccgcccggcgagcgggccggaggaaaagaaagggagcagaagaggggaagaaagagacccgc

SEQ ID NO: 166974 - RNA, 83 nt, Homo sapiens
caaacagaagaacccaaaaggcgagggcagaagccaaaccgaccacagacacaaggacaaggagacaaaccccagaaccccag

SEQ ID NO: 166975 - RNA, 73 nt, Homo sapiens
aaggaaaacgaaggaaaaaggcaacccgcgaggaggaaaaacgacacgcgagagaaaaggaacagccgaagcc

SEQ ID NO: 166976 - RNA, 78 nt, Homo sapiens
agaaaaagaccagacgcggaaaaagaagcgaggcagccggcacccgcacaacccagggggccgaacccagaccaacaa

SEQ ID NO: 166977 - RNA, 81 nt, Homo sapiens
cccgacgggggccgggacacaccacacaggaaaacacagcggagcacgacagcaagagagcaagaacacgcgggcccaccg

SEQ ID NO: 166978 - RNA, 73 nt, Homo sapiens
cagccccggaagacaacgcagacgccagcaccaagccggcagaaacaaaaagaagcacgggaaaaagccggca

SEQ ID NO: 166979 - RNA, 85 nt, Homo sapiens
gcgcgccagcaacagcagcaacgccgcacccgaaaggaggccccgccggggacccgaaaaaaaaggcacggcgaagcagcggaga

SEQ ID NO: 166980 - RNA, 72 nt, Homo sapiens
agcccaaacaagcaccaaccaaggcagacggaacaagacccgcggagaaccacgaaggacccacagggggac

SEQ ID NO: 166981 - RNA, 62 nt, Homo sapiens
cagccacgcgggcgagcggcggggagcggcgaagccgcgggcgaggagaagacagaggagcc

SEQ ID NO: 166982 - RNA, 77 nt, Homo sapiens
ggagaaccgacgaaccgggcccagggagggaggggaaaaaggcccgaacccccccaggagaaccaccgccagaagac

SEQ ID NO: 166983 - RNA, 81 nt, Homo sapiens
ggagcccagggaagcagccgaccagccgcggagccgggggcaggaggggcagcagcaggacagggaacccgggagacagca

SEQ ID NO: 166984 - RNA, 72 nt, Homo sapiens
ggaacgggggaagcagacccgggaagcgcggaaaaagggacaaagggaccccgacggagagacaaagaagac

SEQ ID NO: 166985 - RNA, 76 nt, Homo sapiens
ggagaccgccccggacgggaggaccgcggacgacggccgcagaggacaaacagcaggggccaagaaagaaggagag

SEQ ID NO: 166986 - RNA, 79 nt, Homo sapiens
gcgggagaaagagaaaagagaaggcagggggagaaggcccccacgccccaggaggagcaggccagaccaagagaggcgg

SEQ ID NO: 166987 - RNA, 64 nt, Homo sapiens
gcgggccggcgcccggggccccggagaggcccggccaacgcaacagggagcccacgcaagaggg

SEQ ID NO: 166988 - RNA, 58 nt, Homo sapiens
gggacaacagcggagccaaggcaacacgaaagaggcggacgaacccaaggaggcagga

SEQ ID NO: 166989 - RNA, 77 nt, Homo sapiens
caagggggaccgcgcggcggccgcgagccgcggagcgaaaaacaggggcggggacccaacacaccaagacccaaaac

SEQ ID NO: 166990 - RNA, 33 nt, Homo sapiens
ggacgccggaacggggagaccggaaacgagaga

SEQ ID NO: 166991 - RNA, 76 nt, Homo sapiens
gggacggaccgagaccggaccgagagcggaccgagagcgcgaaacgcacgagaaggacaggaaaagccagagagcg

SEQ ID NO: 166992 - RNA, 76 nt, Homo sapiens
ccggaccgagaacgaagaagacgaccccgacgcaggccaggagccgcggacagaagccgagcacggccgagacaaa

SEQ ID NO: 166993 - RNA, 82 nt, Homo sapiens
cccagcgcggggggggaacgcggggaaggcgaggcacgaccccacccccgaggcccgaccgcagccgaaccagggagcagcg

SEQ ID NO: 166994 - RNA, 68 nt, Homo sapiens
acggagcagaggcgcgaagcgaggaagaggaacggcagccggcacccaaaacgaggagaaaagccccc

SEQ ID NO: 166995 - RNA, 73 nt, Homo sapiens
gaacgcgcaggcaggaagaaaggggacacggcccgcagccggccggggcccagcagcccacccggggccgagg

SEQ ID NO: 166996 - RNA, 82 nt, Homo sapiens
aaagacaccagcggcggaaggcagggaaaccgggcaacacaggagggcggcaggagcagaccaacaaaaagaacagagagga

SEQ ID NO: 166997 - RNA, 81 nt, Homo sapiens
gaaccgggcggagcagaccagagaagagcacagaagaccagagagggccagaggagccaggaggaaaacacaccaaggaag

SEQ ID NO: 166998 - RNA, 66 nt, Homo sapiens
caggaaccgccccgcagcagccgacccggcacaacaaaaagggccagaaacagagaggcagaccac

SEQ ID NO: 166999 - RNA, 85 nt, Homo sapiens
ccgcccggcagccaccccgcgagaaagccagcaagccgcccaccgaagggaccaggcgacccaggaggcccggcagcccgcagca

SEQ ID NO: 167000 - RNA, 74 nt, Homo sapiens
ggccagaggcgaggcagggaggacccacccccgggggaaaagaacgagggccagagagggacaaggaaagcaaa

SEQ ID NO: 167001 - RNA, 49 nt, Homo sapiens
ccgggaagcgcggaaaaagggacaaaggagccaaaccgaacgacagcgc

SEQ ID NO: 167002 - RNA, 68 nt, Homo sapiens
agaacacgagaccaaaaaagggcggcgggacaagcccaagagccgacacagccccgaagcgaaagaga

SEQ ID NO: 167003 - RNA, 79 nt, Homo sapiens
gccgcgcccggccccgcgcgggcggacggcggaggcgcccccaggagccaccaccccgaagacgagccacgcccagaag

SEQ ID NO: 167004 - RNA, 98 nt, Homo sapiens
acaccaccaggggaggaggaaaacacacagacgaaggcaaaagaggccgagcgcaggaggagggaagaacgccacaaccgcccccagcccaacccgag

SEQ ID NO: 167005 - RNA, 94 nt, Homo sapiens
ggacgccgagagccagagagagcggacgacagaacccggccgacccggaccaacaaccccaagggagcggcaggggaggcgaagaagagcccgg

SEQ ID NO: 167006 - RNA, 82 nt, Homo sapiens
acccggaggaccgcgacacggaccgaaccaggagcaggcgagcgaagacagggccagcgagcccgggccgaggagaagcagc

SEQ ID NO: 167007 - RNA, 68 nt, Homo sapiens
aagaaaggcaggaaccaggaacaggcgcccagacgagcccaccacggaccacccgcagccagcgagcc

SEQ ID NO: 167008 - RNA, 76 nt, Homo sapiens
gccaaagggccccggggaagaccgaggagcagggagcaaccacaaggaaaggaaaccaccgaaccgagccagacgg

SEQ ID NO: 167009 - RNA, 82 nt, Homo sapiens
ccgggacggaccgagaccggaccgagagcggaccgagagcgcgaaacgcacgagaaggcccccacagagagcacacaaacaa

SEQ ID NO: 167010 - RNA, 72 nt, Homo sapiens
gacacacccacacaacggccccagcccggcaaggagagccaggacggggggccaggcggggacccagggaca

SEQ ID NO: 167011 - RNA, 50 nt, Homo sapiens
cacggggcgagaaggcggcgcacaaggacacagagcccggcacccagcca

SEQ ID NO: 167012 - RNA, 81 nt, Homo sapiens
cagcaggcagaacaccaaaagcaagaggcaagcggaggaccaccacgggggcaggcaggagccagacggcaagccgcggga

SEQ ID NO: 167013 - RNA, 74 nt, Homo sapiens
gagaaggaccaagaaccaggagaacggaagccagagaaaaggaagagagagcaagagaggccacgcccacgagg

SEQ ID NO: 167014 - RNA, 75 nt, Homo sapiens
aaaagagccagaagcacaggaaggacaaaacccagggggagcgggacggccacgcagagcggagcaggagagcgg

SEQ ID NO: 167015 - RNA, 68 nt, Homo sapiens
agcacaaccaccagaagaacgacagagaggagggagaacaagcaacggcggggaaagacaaggagccg

SEQ ID NO: 167016 - RNA, 77 nt, Homo sapiens
ggaaacccaaacaacacccgcaccgggcgccccgcaggggaccaagaaacaaccagaaacaggcagaacacagagac

SEQ ID NO: 167017 - RNA, 54 nt, Homo sapiens
accgagaacaaggcggagcccaagagaggcaccggccccacgcggagagcgaca

SEQ ID NO: 167018 - RNA, 70 nt, Homo sapiens
gcgacccgcagccacgacccgccccgggggccggaccgcacaggcgcaggcgcaaggggccaggggacca

SEQ ID NO: 167019 - RNA, 74 nt, Homo sapiens
cccaacaaacagcagaccacccggccaagcaccagaaggccaacacaaccaaggggaaacagcaaaacacgaaa

SEQ ID NO: 167020 - RNA, 69 nt, Homo sapiens
gagacaagcagaggcaaaccaccaccaaaaaaacgccaaagaacgggcaaaagagcacgaaggggaagc

SEQ ID NO: 167021 - RNA, 75 nt, Homo sapiens
aaggcccccgaggagcgcgggcgccgaggaaaacggacgacggaggaggccacccggacagggaaaaccgcgccc

SEQ ID NO: 167022 - RNA, 75 nt, Homo sapiens
acaagccaacaggccgcgaaggcggaagaggaagcacagagcggacagagcagccaagaagagggaaagaagaca

SEQ ID NO: 167023 - RNA, 82 nt, Homo sapiens
gcacaagaagacaaggagaaacgcaggcagcaaagaggcccaagaggacggccggagcagcagaacaagagcggagaccaag

SEQ ID NO: 167024 - RNA, 75 nt, Homo sapiens
gaccgaacgcgccagcgcggggcaacaggaagaagccccacggcagcagcaaccacacgccgaaaccggcgacgc

SEQ ID NO: 167025 - RNA, 52 nt, Homo sapiens
acagaggcgggacacaaaaccaaccccgcaaggaccagcacccagaagcagc

SEQ ID NO: 167026 - RNA, 77 nt, Homo sapiens
cagccccccgcggcggcagccacagggacggaccggacccagacacggccaccccagccgaccccgaaacgcggcaa

SEQ ID NO: 167027 - RNA, 88 nt, Homo sapiens
aacccccacaaaggaagacaggggagcagaaaggcacaggaaacccagcagcgccggacccgggaagaacgggagccaagggacagcc

SEQ ID NO: 167028 - RNA, 72 nt, Homo sapiens
gaaagcaagcgaagcacgaccaggcagaggagaagcgcagcaagcgagggaaagcgaggcgaggagcagagg

SEQ ID NO: 167029 - RNA, 73 nt, Homo sapiens
cggcccaagcggcaaacggcagagcaggccgcggcgacccagcgagagggagaacaaaacagaagaaaggaga

SEQ ID NO: 167030 - RNA, 79 nt, Homo sapiens
cgaaccccaccgcacccgagccgcccggccaccccgcacgcggaagcgaccgggaaaaccggaggccagcccacccaga

SEQ ID NO: 167031 - RNA, 75 nt, Homo sapiens
gggcagacaacggagcccgggacaacaggcacaaagagagaaggaacacccacagggcagacagagaaagaacac

SEQ ID NO: 167032 - RNA, 91 nt, Homo sapiens
cagcaccgggcgaaaaggaggaaaagaagccagaccgagggagagagaccggcagagcaaccaaggaacaaagcaccaagagcgccgccgg

SEQ ID NO: 167033 - RNA, 79 nt, Homo sapiens
cgcggcacgcgggcccgagcgcagccgcgcagggagaagaggcacccagcaaaagacggaagagagagcagcccagcca

SEQ ID NO: 167034 - RNA, 56 nt, Homo sapiens
ccggagccccagacaacccggacggccggccaaaccaaagaccacgggggccaaac

SEQ ID NO: 167035 - RNA, 78 nt, Homo sapiens
gaaggcacggacgcccccaagggcagagggagcaggaagaagccccagcggagccgaaacgaaaccaccacagaaaca

SEQ ID NO: 167036 - RNA, 67 nt, Homo sapiens
cggcggaggaggaggaggggaccgccgacaccggagagaggaggacagcaagacgacccgcaagcag

SEQ ID NO: 167037 - RNA, 72 nt, Homo sapiens
ccagggagaccacaaaagagcagaggaggaacaccaggcacaagcaaagcaccacaggggaaaacaagcaga

SEQ ID NO: 167038 - RNA, 74 nt, Homo sapiens
gaagaaagccaacaagaggaagcaggaaaaacaaagaagacccaggaaccaggccaagcggaaacaggaaggaa

SEQ ID NO: 167039 - RNA, 77 nt, Homo sapiens
agccggaacgcacccgaacccgaccacccggcggggagcacggagaccgccagcccagacagggccacagacccggc

SEQ ID NO: 167040 - RNA, 80 nt, Homo sapiens
agcggcggaggcacacggaggacggcaggacgggccggggggacacgcgggaggaacagcgcccccgggcccccacgaca

SEQ ID NO: 167041 - RNA, 74 nt, Homo sapiens
gagaaaggcgcgccccagcagacacgagaacacaaggaacgaaaggaagggaagaagcagaaccaagacaaaag

SEQ ID NO: 167042 - RNA, 76 nt, Homo sapiens
aaggaacgaaggcggggggggcgaggaagagacaggcgggggagaagaagcagggccaaacgcaggagaaagaaca

SEQ ID NO: 167043 - RNA, 61 nt, Homo sapiens
aagaagggccaccccacagacgcacacaaaagagggacaacacaagccacagcgcccaggc

SEQ ID NO: 167044 - RNA, 75 nt, Homo sapiens
gaagaacaccgaaaccagaaggggaagccaagaagaaggcaacgcacaggagcacgcaacacacccaccaaggaa

SEQ ID NO: 167045 - RNA, 77 nt, Homo sapiens
ggagcagccagagccaaagaagccgcaggagcccgaagacaaggggaacacccaaaaaggaccaccacccacccagg

SEQ ID NO: 167046 - RNA, 78 nt, Homo sapiens
accaggcgaggggcacaaaaagcacaaaccaacaaaaccagcaacaccccaacagggccggcccagggagaacgcaaa

SEQ ID NO: 167047 - RNA, 83 nt, Homo sapiens
agccacggccgcccgcgacaccccagcagaagaccccaagaagaagcggaagaggagccgcggaaccaagacacaaggaacag

SEQ ID NO: 167048 - RNA, 80 nt, Homo sapiens
cggaagacaaccaggcagcgcacgagagaggcgccccaggaccgaagcagcagagcgacaacggggaacagggaagaaga

SEQ ID NO: 167049 - RNA, 72 nt, Homo sapiens
acacaaggaaagacacaagaaggcaacaacacccagagggaagacccaccagagaagcccccgcgggcgcac

SEQ ID NO: 167050 - RNA, 59 nt, Homo sapiens
ccaaccaaggaaaggcacggccacgacagcgacgcaggacgagcagcgagggcccggga

SEQ ID NO: 167051 - RNA, 90 nt, Homo sapiens
gacgaaccacaggaagcgcggggcggcggcgaaaggacgcaagaggagccaggagcacggggggaacaagaccgccgggacggaagacgg

SEQ ID NO: 167052 - RNA, 75 nt, Homo sapiens
gaaggagaacccaccccggcccacggccgacagacgaaagcaaggcaaaccagggggccacacagagcgcagagg

SEQ ID NO: 167053 - RNA, 77 nt, Homo sapiens
gcgaggagaggggccgagacccccaggacagcccccggccgcggccggggacagcgcaccaaagaagcacgaagaag

SEQ ID NO: 167054 - RNA, 60 nt, Homo sapiens
aaggaagccacggcagacacacaacccgacccgacgaagcgggggaccccccggccgccg

SEQ ID NO: 167055 - RNA, 80 nt, Homo sapiens
gaccagggcccccccacggcaccacaccgcgaccgaagcgcaagagggaacggacgggacaggagacgcagccaaagggc

SEQ ID NO: 167056 - RNA, 78 nt, Homo sapiens
ggaaggaaagaaaggaggagggaaacagagaacaaaaacagggccgagagaacagcagaagagcgaggggaaaaaagc

SEQ ID NO: 167057 - RNA, 71 nt, Homo sapiens
cgacgcaacccgcccgggcaagcaacccgcccagccccgcaaacgggacacagacacccagacagacagga

SEQ ID NO: 167058 - RNA, 72 nt, Homo sapiens
acggagagaaaccacaagggggggcgaggaagagacaggcgggggagaagaagcagggccaaacgcaggaga

SEQ ID NO: 167059 - RNA, 58 nt, Homo sapiens
accagagaacagccgcaaagaccaggacagggggaaaaggaaacggaacgccaagcga

SEQ ID NO: 167060 - RNA, 89 nt, Homo sapiens
ggacggcacgcagcccggcgggaggaaaagaccaccacggacaggcgcgggaggagcgcaggacgaggacagaggccaggggcccaggg

SEQ ID NO: 167061 - RNA, 47 nt, Homo sapiens
gggaggagagagggagagccaaagaaggagggcacggagcggggagc

SEQ ID NO: 167062 - RNA, 33 nt, Homo sapiens
accaaacgggaacacggcacaaggagcggggca

SEQ ID NO: 167063 - RNA, 75 nt, Homo sapiens
gggacggaccgagaccggaccgagagcggaccgagagcgcgaaacgcacgagaagccagaagaaggccagggagg

SEQ ID NO: 167064 - RNA, 82 nt, Homo sapiens
gcagagcccggggacggcgaggccccagaccacacgggagcacggcccaggcagccaagaaggcagagagacacacaagaaa

SEQ ID NO: 167065 - RNA, 72 nt, Homo sapiens
cacacccgccgacgaggaacggcggagcagggagcccaaagaccccggagacagagaagaggggcaaggcca

SEQ ID NO: 167066 - RNA, 76 nt, Homo sapiens
cccacggagcccccgcagggcgagagcgccccagggagaacggagaaaccacccaagggagagacacgaaaagccc

SEQ ID NO: 167067 - RNA, 35 nt, Homo sapiens
cgacggacaaaggccacagcgaggagccgaaccag

SEQ ID NO: 167068 - RNA, 78 nt, Homo sapiens
ggcgagcagcaccagggcccagccggcgggcggccaccagagggcgcccacgcgcagggacgcggccgggaggcgcgg

SEQ ID NO: 167069 - RNA, 80 nt, Homo sapiens
agaagcagaacccaaaggaaccacaccggagcccgagcgagcgcaggcacgacagagcagcagcaggcggcacgcacaag

SEQ ID NO: 167070 - RNA, 68 nt, Homo sapiens
cccacgaagggaggaaaagggcagggacagcgcaggcagcagggagcggcaggggaggcgaagaagag

SEQ ID NO: 167071 - RNA, 97 nt, Homo sapiens
gccccagcccgggaccagcagcacaccagacggcagcggcaacaccagcggacagccaagccaggcaggaagccccccccggacacggagagcaaag

SEQ ID NO: 167072 - RNA, 55 nt, Homo sapiens
agccaaacaacgccacaggccaaaagaaagccagaggccgcaaaggcaaagaagc

SEQ ID NO: 167073 - RNA, 100 nt, Homo sapiens
ggcacacgcgcgaaaaagcgcagagaagaaaaaagaaaaggaagcacacgaacagccccaggcgggggaggaggaggggacgaggcagaaacgcacgaag

SEQ ID NO: 167074 - RNA, 64 nt, Homo sapiens
ggcaggggcaaccagacgggccaaggccccggagccagcgggggccaagacaacaagacgaaca

SEQ ID NO: 167075 - RNA, 84 nt, Homo sapiens
gccagcaggggcgccccggacgagagcccggcgggggcgcagcagacagggcaacggccacccaaccagcgcgccaggcacggg

SEQ ID NO: 167076 - RNA, 72 nt, Homo sapiens
gaagggcgcgagcggggacaaagcggccgggaccggagggaaaacacgaggcgcaccacccagcaccccaaa

SEQ ID NO: 167077 - RNA, 85 nt, Homo sapiens
ggcaccaggaaggggacgggacggacgggaggggcgccgcggcggcgggcgcccccaggcggagccacacacccccacaccaagc

SEQ ID NO: 167078 - RNA, 73 nt, Homo sapiens
aaaacaaagagagaaaaagcggcagcacaaacaacccaccaaaaagacaggggagaccaaaagaccccggaca

SEQ ID NO: 167079 - RNA, 71 nt, Homo sapiens
gaccccgaaaaaaagaggagcccgcaagaggccagcgaaaaccgaagaaggacaggagaaacaggggccaa

SEQ ID NO: 167080 - RNA, 35 nt, Homo sapiens
ggagagcgcagacgagcagagaggagccaccggcc

SEQ ID NO: 167081 - RNA, 71 nt, Homo sapiens
caccgagcccgcccacgacggagaggaggggacggggcccgggcgcaaggacagcccaaggaggcccgggg

SEQ ID NO: 167082 - RNA, 67 nt, Homo sapiens
ccaagacagcgccgcagacgaaaaagaagcggaacgcagagccagaagagacgaaggacccagagac

SEQ ID NO: 167083 - RNA, 87 nt, Homo sapiens
aggggggagcaagacacggaggaccggagagcaaccccggagggcagaagagccacccagggaggggagacaggacaggacagccga

SEQ ID NO: 167084 - RNA, 79 nt, Homo sapiens
caaaggcccacacaggacagcgccggccacccaaagcacgggggcaacagaggagaaacgagaccagaaggaagcagaa

SEQ ID NO: 167085 - RNA, 85 nt, Homo sapiens
agacgcgcccgacgcccggaagccccggaccacacagaagccgagccgggaacccacagggagggcgagaccagcacagaccgaa

SEQ ID NO: 167086 - RNA, 81 nt, Homo sapiens
ggcggaggccccagggaagcgcagaaagcaggcgaacccgcggcgcaaaacggaggaagaaagacgcacacaccgaacaga

SEQ ID NO: 167087 - RNA, 57 nt, Homo sapiens
aaaagaggagcagcaggcacagcacgggcagagccagcaccaggccccaccggggag

SEQ ID NO: 167088 - RNA, 77 nt, Homo sapiens
gcgccagcggcggacgaggggcccccgggaggagccaggaggcgacaagacaggacccgaagaagcacgggcaccac

SEQ ID NO: 167089 - RNA, 62 nt, Homo sapiens
caaagcacgcagaggagacaggaaaaggccaaagcccggcgaccacaagaacaccaacaaga

SEQ ID NO: 167090 - RNA, 70 nt, Homo sapiens
cggcacggaagcgaggcaaacacgagaagacaacggcaagcggagaagagcaaggccgaaccgagaggaa

SEQ ID NO: 167091 - RNA, 61 nt, Homo sapiens
ccagagcaggagcggggaaaacaggccaagggcacacgggccacagaggaccagcaaggag

SEQ ID NO: 167092 - RNA, 69 nt, Homo sapiens
ccgaacaaaaaagaagcgaaggggcagagacacaaggcccacaggccacccgccagacgcagcggggca

SEQ ID NO: 167093 - RNA, 76 nt, Homo sapiens
gaagcggaggccggcaaagccaagaagaggaacagcaaccgggcgcgaaaaaaaaccggggaaaaaagagaaagcg

SEQ ID NO: 167094 - RNA, 77 nt, Homo sapiens
aaagcgccgggcggaccagcaggaggcagcacggcaggagacgaggagaggacagcaggacacccggaccccaccgc

SEQ ID NO: 167095 - RNA, 75 nt, Homo sapiens
cagaccgccaagaggcacagcccgccgacacagccaccaagaaggcacaagcagaacgggaaaaggggcggaaag

SEQ ID NO: 167096 - RNA, 81 nt, Homo sapiens
cccccgccacgccccagacaggggaacgcggcgaccgccaagaaaggcagcgaggggagagcgagccggaagaaaacagaa

SEQ ID NO: 167097 - RNA, 70 nt, Homo sapiens
acgcgaaggacgccggccaaacccaggacaaggcacggggccaaaaaggcacgagggaacgggaaagaac

SEQ ID NO: 167098 - RNA, 78 nt, Homo sapiens
caacagaaagagcaacagcagggcaacagcacagagacaaccgccaccgggccgcccgggaagagccaccgcaaccac

SEQ ID NO: 167099 - RNA, 69 nt, Homo sapiens
caaggacagaagcgaaacgccggaaggagcgcaaagaaggagcgcccgagcggcgccgacacgggaaga

SEQ ID NO: 167100 - RNA, 85 nt, Homo sapiens
cggaggaggaggggagaggccggaggacaccaacaggcaaaggccggcgggcagccccagggccccccgcgggacccagccagca

SEQ ID NO: 167101 - RNA, 77 nt, Homo sapiens
gaaaggcaggaccgcggagaaggggcaccggcgccaccgagacacgagccagaccccaacaacaggagagagcaagc

SEQ ID NO: 167102 - RNA, 77 nt, Homo sapiens
ccgcaagaaaagggagacgacagaccggggcaagccccgggcgggacaggccaaccacaaggacagagccaccacag

SEQ ID NO: 167103 - RNA, 72 nt, Homo sapiens
gcgggaggccacgggagggccgcgcgccggagaccgaagggaagacagaccgcgaggccacacccaagaccg

SEQ ID NO: 167104 - RNA, 37 nt, Homo sapiens
aaacgccccacgaccaggcacggagcgcggacgccca

SEQ ID NO: 167105 - RNA, 75 nt, Homo sapiens
aagcccaaaccccaggccaagcaaccaccagcagcccccagagcggaacacaggaggcgaaagcgcgccaagagc

SEQ ID NO: 167106 - RNA, 63 nt, Homo sapiens
gcagccccccacaggaagccccccaccaaaaaacagaaggccagaccgacagaaaacggagca

SEQ ID NO: 167107 - RNA, 65 nt, Homo sapiens
ggcaggaccgggcggaggccgccaagacgccgaacacaaccccagagccggcagcgggccccccg

SEQ ID NO: 167108 - RNA, 73 nt, Homo sapiens
gaacaagccaggagggcaaagaaacccgggagccaaagaacagcccccacagagagcacacaaacaaagcgaa

SEQ ID NO: 167109 - RNA, 76 nt, Homo sapiens
aggacgagggccgggccgggcgcgggcgagaaagggagaagaaccaacaacggaaaaccagcgggacaaggcacca

SEQ ID NO: 167110 - RNA, 75 nt, Homo sapiens
caccaccaacaaaccggccccgaagagcgaaagcgccaccggaggccgagccaccaccagacaagcacagagacc

SEQ ID NO: 167111 - RNA, 79 nt, Homo sapiens
aacacgagaccgaccgcccccaggaggggagggaagaaaacgccagagaagcagagcagcccggagcgaggggagaccg

SEQ ID NO: 167112 - RNA, 58 nt, Homo sapiens
agaaaaccccacccccaccggcaccaccccagccagggaaaaccaacggcccggagga

SEQ ID NO: 167113 - RNA, 72 nt, Homo sapiens
aaggaaaggagaaaacacccaaacggaaggacacagagccaacccagaagagccaagaaacgaaaagcacca

SEQ ID NO: 167114 - RNA, 49 nt, Homo sapiens
cagaaaggagaacaccacagcgggagagaggaaggaggccgaagggcgg

SEQ ID NO: 167115 - RNA, 68 nt, Homo sapiens
ccaagccaaacacaagcagaaggagcgaagaagagacaacgaagagaggaaagaagcggaaaggaggg

SEQ ID NO: 167116 - RNA, 75 nt, Homo sapiens
ggccggcacaacagcgccaacaacggccagggagcggaccagccaaacaaacagcgagacgacgggaccgaagga

SEQ ID NO: 167117 - RNA, 36 nt, Homo sapiens
agagagagagagggagggaccacccaagaagaccaa

SEQ ID NO: 167118 - RNA, 70 nt, Homo sapiens
aagcgacagcacggaccccagaagcggaccagccacacaaggcggaaaggaacaaaggacaagcaagggg

SEQ ID NO: 167119 - RNA, 78 nt, Homo sapiens
cgaaaaaagggcaagaagccagaagcaagagccccgacagcagccaagaccccccgaccggccagaccccaaccccca

SEQ ID NO: 167120 - RNA, 102 nt, Homo sapiens
ccaagcccggcccggcccgacaccgcgggccgccagacgggaaggggacgaacagcggggacgccccagcagaccgcccaggagaggaaagcaggaggaaag

SEQ ID NO: 167121 - RNA, 77 nt, Homo sapiens
gggacccagcccaggcggcgcggacggggcgggcaggaaaaggaagagcaaaaacaaaaacccagcagacaaaagac

SEQ ID NO: 167122 - RNA, 83 nt, Homo sapiens
cagcaggccaccccccagcaaccggggcgcagcggcacaacaaaggcagagagaccccccccaaaagccgcaaaggagaaacg

SEQ ID NO: 167123 - RNA, 71 nt, Homo sapiens
caccgagagacggagccccggccgcccgggcagaggaaaggcccgagccaaaagacccagagaaaggagca

SEQ ID NO: 167124 - RNA, 81 nt, Homo sapiens
acggccacacggcggccgcagggcgccggagccccccagagcggcgggaggggaaggagcagccacccgggcagaaaggcc

SEQ ID NO: 167125 - RNA, 71 nt, Homo sapiens
agacgaggcgagcgagaagaggggaagaggcaggaggacacaacgacacacaagcgcgacaccacaccaga

SEQ ID NO: 167126 - RNA, 56 nt, Homo sapiens
cggacgcggcggaggcgagcgaggaaaagcagacaagagaacagggggacgccagg

SEQ ID NO: 167127 - RNA, 75 nt, Homo sapiens
cggaaggaaaaggggacggagcacaaacggaggaaacgacaaaacgggaccagagaaggcagaagcgcacaagcc

SEQ ID NO: 167128 - RNA, 77 nt, Homo sapiens
gcggcccccggcagcgcccggcgaccccgcgcgcacgcggcgcgccggacccgagcggggaccgagaaagacccccg

SEQ ID NO: 167129 - RNA, 67 nt, Homo sapiens
agggccaaagaagggagagaggcggcgaaggcgggcaggcccagggccccccaccgcgcccccaccg

SEQ ID NO: 167130 - RNA, 72 nt, Homo sapiens
cccgagcacaaggcaagagaccaaccccagccccgaaaggaaagcggggcagcaaggcaaggaaaaaacgaa

SEQ ID NO: 167131 - RNA, 79 nt, Homo sapiens
agcccgcgagcacaggagggagagaggaccccgggacacgaaagccaggaaaggaccgagggaacagccaggagagcaa

SEQ ID NO: 167132 - RNA, 63 nt, Homo sapiens
cgccgccggcacccccccgacaacggcaagcggagaagagcaaggccgaaccgagaggaaggg

SEQ ID NO: 167133 - RNA, 72 nt, Homo sapiens
cacggccaacaacacgcccaggaaggcacaaccccagaagcgggcgcggacggcaggggcgccggggaaccc

SEQ ID NO: 167134 - RNA, 73 nt, Homo sapiens
ggaccaccccaggcccagaacacgcaaacgcagaagacaaggggagccagaaggaccagcagggccggcaaca

SEQ ID NO: 167135 - RNA, 62 nt, Homo sapiens
gccggaccgagcggccggaaaaacaaccaccagcgagcaaaaaggcaaagaccaagaccacc

SEQ ID NO: 167136 - RNA, 72 nt, Homo sapiens
cagaagggaagcaaccaaggacagacaggcaggagacacacacaaggaacgacacaccacaagcgcagaaga

SEQ ID NO: 167137 - RNA, 68 nt, Homo sapiens
ccgccccagcccaggccggccgcgccaggaccgaggaaggaaaacggagccaagacagaacgaagaga

SEQ ID NO: 167138 - RNA, 77 nt, Homo sapiens
gcacggcgaacggccgggagaggggaagaggggacaaagccgcccacccccagcggcacagagccccaaaacccaga

SEQ ID NO: 167139 - RNA, 77 nt, Homo sapiens
cgggacccggccagaggaaagaacccgagagagggggcaccccagacaggagaacgggacagggcagacgggaggag

SEQ ID NO: 167140 - RNA, 82 nt, Homo sapiens
aaccgacagcgagaccaagcaaacaggaacacgacgagaagaccagaaccaggaaagaccgagggcagacggacaaagcaca

SEQ ID NO: 167141 - RNA, 61 nt, Homo sapiens
ccaaacccagccgcgcagcccgaagaggaacaaggggagaagaagcccagcccacgcgacg

SEQ ID NO: 167142 - RNA, 81 nt, Homo sapiens
cgccgaggccagcacccaagggggcaagggcggagaaacaagaacaggagacacgggaagccgaggagaaaagaaaaggac

SEQ ID NO: 167143 - RNA, 86 nt, Homo sapiens
cagcacccgcccgaggacagagaggcgagcgcccggaggggagagagcggaggacagccgagaggagagagcacaccccaaagccc

SEQ ID NO: 167144 - RNA, 57 nt, Homo sapiens
aggaggcaggaagagacacaggacaaccacaagacaacaaaaacacggacccaaccc

SEQ ID NO: 167145 - RNA, 84 nt, Homo sapiens
cacagaccgccagcacggccgcaccggccggcggagaaaaccggcacgcaaaacggccgcccaaggcgaggaaaaccaccacac

SEQ ID NO: 167146 - RNA, 81 nt, Homo sapiens
aaaagaggagaccagcgcacaggaacggagggggcacgcacaccccccggccccgaagaccaagcagcaaacgaagagccc

SEQ ID NO: 167147 - RNA, 85 nt, Homo sapiens
gcaccggcgcgggggcaggcgcgcgccgcaacgccgagcgcaccgacacgccgccaaaggaccagcgaagcaggccccggcagcc

SEQ ID NO: 167148 - RNA, 74 nt, Homo sapiens
gacacaaaacacgagaccaaggaaccccggaaaaggagacagaagcgcaagaacccgacaagaaggaacaagaa

SEQ ID NO: 167149 - RNA, 79 nt, Homo sapiens
gcaagcacgcgggcggccgggccccaggcagacccgaccgaccagcggcgggagaggagagcgccacccgggaccagga

SEQ ID NO: 167150 - RNA, 73 nt, Homo sapiens
ccaacagcaggggacacaccacacagacaacccaccaagacaggacgacagagggcacaaaccacaccacgag

SEQ ID NO: 167151 - RNA, 72 nt, Homo sapiens
aagagaacaacgaaggaaaggcgccacgggcaacggagaagggaaagacaacccagaacggaaaaaaccagg

SEQ ID NO: 167152 - RNA, 83 nt, Homo sapiens
cggagcggcggaggaggaggccgcaggagacccccgacgaccccgcccggcggggaaggagcaaggaagcaagccagaaagcc

SEQ ID NO: 167153 - RNA, 78 nt, Homo sapiens
acaaagaacgcacaagagaggaaccagcaggcaaagaaagcaaaagaagagcgaccgacagaggagaaaggaaacccg

SEQ ID NO: 167154 - RNA, 61 nt, Homo sapiens
gccagaaccccgcagccccgggcacgagaagagaagcccagagcaaaacaccccaaaccag

SEQ ID NO: 167155 - RNA, 77 nt, Homo sapiens
cagccagaaagcggcacgaacagagccgggagcaagaagaacacccagagagagcgccgaaaagcccagaaaacgcc

SEQ ID NO: 167156 - RNA, 56 nt, Homo sapiens
gccgccgcacaggcaccaagggcccaccaacaggacccagggaaaggggaggcaag

SEQ ID NO: 167157 - RNA, 62 nt, Homo sapiens
gggcccacgcccccaagcacaaagcggccaccagagagccagccccgggcaacaaagggaaa

SEQ ID NO: 167158 - RNA, 68 nt, Homo sapiens
acagcaggacaagaagggaaaacccaggcaaccaaaaggggaaaggcagagagaagagagaggaaacg

SEQ ID NO: 167159 - RNA, 82 nt, Homo sapiens
gagcccacaagcaagccaagcacgaagaaccaggcagcaaagaggaaagggacgagacagaagaacggcagagaaaaccaag

SEQ ID NO: 167160 - RNA, 85 nt, Homo sapiens
ccagaacccggccccaccgccccaccaccccaccagacggcgccccaagaccaacgcacccccagacgccgacccagaaagccag

SEQ ID NO: 167161 - RNA, 72 nt, Homo sapiens
aggaccgacggcagcagcgggaagccaacacagaaaccgccacagggaggcccacaagcggcacccaccaag

SEQ ID NO: 167162 - RNA, 71 nt, Homo sapiens
ggagaacgaccacaaggagagacacagaaaagaacaaaagcggggcgaaagaaaacaagagaggaaaacaa

SEQ ID NO: 167163 - RNA, 67 nt, Homo sapiens
gcggcgggccggacgacaagacgccgccagccaccggcgcgaagccagaccagaccagcaggggcac

SEQ ID NO: 167164 - RNA, 65 nt, Homo sapiens
agcagcaggaagcgaggaaaaaaccaaagccaggacaaggagagaggcagaacagaacaaacgga

SEQ ID NO: 167165 - RNA, 69 nt, Homo sapiens
aggggccggcccccccggggcaacccagacggcaacaaaggcgagacagaagacaggagccagagggac

SEQ ID NO: 167166 - RNA, 75 nt, Homo sapiens
gagccaagccggccgcggccgggacggccaaacgaaaacaaacggaagagagggcagcaagaaagaacaagaaag

SEQ ID NO: 167167 - RNA, 76 nt, Homo sapiens
ccggcaggcgcacaggcccggccaggcacaagggcaccacaaaggcgagaaaggcgcacaccaagcggcgcacagg

SEQ ID NO: 167168 - RNA, 75 nt, Homo sapiens
cgcgccacggaggggcagccacccccgacaacaggcacaaagagagaaggaacacccacagggcagacagagaaa

SEQ ID NO: 167169 - RNA, 33 nt, Homo sapiens
gaaaaaacggacgacagcaaaacaaacggagag

SEQ ID NO: 167170 - RNA, 61 nt, Homo sapiens
agcggccggaccgccagaggcgaggcggcccagcacacgacgccgcagcggcacccccgcc

SEQ ID NO: 167171 - RNA, 67 nt, Homo sapiens
aaaggacacacagacagccagggagaggacccaaaggacgccaaacgcgaaagggagaaagaagaac

SEQ ID NO: 167172 - RNA, 76 nt, Homo sapiens
gcggacgcgcgggagaaaacggcgcaccggagagacgcagaggggcggcgggggccaccgaggaacgggagcgggg

SEQ ID NO: 167173 - RNA, 69 nt, Homo sapiens
cacaccccgcgaaaggaggaggcacagacccccgaaggcaaccaacagcggacaacaccccagccggga

SEQ ID NO: 167174 - RNA, 81 nt, Homo sapiens
gccggcccaggagcagcccaacaaaggaccgggccaagagcacacgggaccccaccagcgcccacagcaagcaggcgcagc

SEQ ID NO: 167175 - RNA, 79 nt, Homo sapiens
acggcccaaccgccggacgcagcgaaggccaagccacgacgagacaagccccaggagcaccaccaacccgcccgaccgg

SEQ ID NO: 167176 - RNA, 76 nt, Homo sapiens
gccggaccagccccgaaacacgggaaccaaaagagcagaaggagcgagagaacagcaccaccgccgaaaccgcaag

SEQ ID NO: 167177 - RNA, 83 nt, Homo sapiens
gggacggcggccagaggcgcggggcgccgccgcgcagcgccgcgcgggaggccgcagcaccccggcggggccaccccagcgcg

SEQ ID NO: 167178 - RNA, 69 nt, Homo sapiens
agccagggcagcaaaagacaaacgaagcacaaaccaggaacagcaggacaacaaccaaaaacaacccac

SEQ ID NO: 167179 - RNA, 76 nt, Homo sapiens
gcggccgaggggcggacaccagcgagcggagcgggcgacggacacagagacacagacacccaaggagcaccgagag

SEQ ID NO: 167180 - RNA, 63 nt, Homo sapiens
gcccaggaggagcaccggaaggggacccgaaagaaacgagagaagaccccaacgacaaaagcc

SEQ ID NO: 167181 - RNA, 69 nt, Homo sapiens
ggaaacgaaggaaagcaccgggcgggacggccgaaaaccgagacccgcgccaggcgacccagggaaggg

SEQ ID NO: 167182 - RNA, 77 nt, Homo sapiens
accccgggcgggaagacagaaccagggccgggggccagggaaggaggcaagaaggcacaggaacaggaccaaaaaaa

SEQ ID NO: 167183 - RNA, 83 nt, Homo sapiens
acccccaacccggccacggccccaggccccaagaaaagcaccaacaccgaggacagcaggaggaccagaccacggagacgcca

SEQ ID NO: 167184 - RNA, 70 nt, Homo sapiens
aaaaagcggaggcgcgcaggagccaaggaaacgaaagagcccagacacccaagagggccaagccagaaaa

SEQ ID NO: 167185 - RNA, 65 nt, Homo sapiens
cacacaaaacacagccacacaagagaggcccaaaaaacaggagggcgggcgagcgacccggaccg

SEQ ID NO: 167186 - RNA, 77 nt, Homo sapiens
cacccgagcagcggaccggagaggaggagggcgggacaacacgaggacacaagaagcgccccgagccggaccgccca

SEQ ID NO: 167187 - RNA, 84 nt, Homo sapiens
ccgccggccggccaccccgcagccccgcccagggccaggccgcagaccgcccggccgcggacgcaagaggaggaaggcgggaac

SEQ ID NO: 167188 - RNA, 86 nt, Homo sapiens
gcaacggagagacgggggccacacacgcaaaaaaaaacgggaagacccaccgccagcccaccacgccgcacagagaccaaggaaga

SEQ ID NO: 167189 - RNA, 80 nt, Homo sapiens
cggaagaggaggaggcgagcgagagcaggaagaggagccgcccagggggacaggaccacgccgcgaggcaaacgcaaggg

SEQ ID NO: 167190 - RNA, 81 nt, Homo sapiens
gcagcagccccggggcccggagaggcccacagcagggaccacccgaggccagccagccccccaggccacacacccccggga

SEQ ID NO: 167191 - RNA, 58 nt, Homo sapiens
agaaggaggaaagagaagggaaagggggcagcaaagagaagcgacagggcccccggcc

SEQ ID NO: 167192 - RNA, 83 nt, Homo sapiens
cagacgccaaggggggcaagggcggccggcccccgacagccaggcccgcgagaagccgccaggcacagagaaggcaaacggga

SEQ ID NO: 167193 - RNA, 80 nt, Homo sapiens
cagcgcgaggcgcggcgcgcgccagaccggcgagcccgagcaggccaccagcccccgggccaagagcagcacggagacag

SEQ ID NO: 167194 - RNA, 75 nt, Homo sapiens
ggccgccggaccagcgccccccccaggcgggccaaccaccccaggcgcagccgcggagaaccgaaccaacagcca

SEQ ID NO: 167195 - RNA, 52 nt, Homo sapiens
acaaccccacagggccagcaccggggaacaagaggcgagcaaaccaagaaca

SEQ ID NO: 167196 - RNA, 79 nt, Homo sapiens
ggcgccaaggccgggagcagcaggaggcaaagggaccccaagaaaccaaagggcaagagccgcagcccggcagacagca

SEQ ID NO: 167197 - RNA, 79 nt, Homo sapiens
gagggcgcaccgggggcgggggcgccagcccaccaagaagggccgagcacagcaagcaagcccaggccccccgagcgca

SEQ ID NO: 167198 - RNA, 78 nt, Homo sapiens
acccagccagaccagggacaaagagcaaacagacagggccgcagcccaggaaacacagaaacgagaagcacaccgaag

SEQ ID NO: 167199 - RNA, 66 nt, Homo sapiens
gcagcaccaaaccaagaggcggccagcaggaggcgagaagggggagccccccagacccgaaaggag

SEQ ID NO: 167200 - RNA, 81 nt, Homo sapiens
aaagagagaaccccaaccggggaggaaaaccgacgaagcccacggcagacacagcaggccaacccagaaccaccgaagaag

SEQ ID NO: 167201 - RNA, 42 nt, Homo sapiens
gcgcgcccccagccccaagaaagcaaccagccgaaaaagcag

SEQ ID NO: 167202 - RNA, 86 nt, Homo sapiens
cgagcaacaccgagagaggaggagccagacgacaagcacacacaggcgcgaaacggaaaaagaggccgacgaaaccaccggcacgc

SEQ ID NO: 167203 - RNA, 69 nt, Homo sapiens
ggaaaggaggaagaagacaccggggacagacaggaccaagacacccaggagaaagacagcggggaaaag

SEQ ID NO: 167204 - RNA, 71 nt, Homo sapiens
aaccagggcccacagaggagaggcggcagggcacccccaagcaggcaggcagccagacccaaggagcccac

SEQ ID NO: 167205 - RNA, 77 nt, Homo sapiens
acagaaaggagaacaccacagaaagggcaagcagaaaccgggaagggggcgccggcggacgcacccggacgcaaagc

SEQ ID NO: 167206 - RNA, 82 nt, Homo sapiens
aggaccccagcacacgcagagaccgaggcaccagaaggcaaggacaagcaggcgcgcaaaggagacgggacagcagaggccg

SEQ ID NO: 167207 - RNA, 75 nt, Homo sapiens
aaacgccgcccacacaccaaggagagacaggaggacacccaggcagacgggaggaagaagaggaggagacagagc

SEQ ID NO: 167208 - RNA, 70 nt, Homo sapiens
aaccaagcccggaagacaaaagcaggggcggcagagaaccgaaagagacgcagaaggccagacacagaac

SEQ ID NO: 167209 - RNA, 76 nt, Homo sapiens
ggagaagcagagccccagcgagcccagcaagacgacagaaaggaggaacccagcccccagccccagacgggaaacc

SEQ ID NO: 167210 - RNA, 69 nt, Homo sapiens
gagcaaggcgcggccccacgaggcaggagcgcggcaaggcggaaagaaggcggcacaagaaaagagacc

SEQ ID NO: 167211 - RNA, 52 nt, Homo sapiens
acaacaacaaccggaaacacgaaggaacccaaaggacagggagcaaaaaaaa

SEQ ID NO: 167212 - RNA, 62 nt, Homo sapiens
caacccagacccagcccgggcccggagcaggacagacccccaggcagcccacagcaagcacg

SEQ ID NO: 167213 - RNA, 84 nt, Homo sapiens
cgacccccgggccggccggccgacgaggcgccgaagacaggggaggagggcgccccgaaccgcaccagcaaaggagagccagag

SEQ ID NO: 167214 - RNA, 93 nt, Homo sapiens
gggaaggcgggagacgagaagccgaaaagcgcagcgagcggagccgccggagaagcacagagggaaggagaaggagacacagaaggagcagca

SEQ ID NO: 167215 - RNA, 82 nt, Homo sapiens
gcccccaaccgcgccagcggagcgaacccgagagcgggagcgggcgggccaggaaaagacagacggggaaaaaaaacgaaga

SEQ ID NO: 167216 - RNA, 82 nt, Homo sapiens
aggccccagcagggaccaccccaacaaggaggcagagggcaccacagacaagaaagcccccacggaaggccacgagggcgga

SEQ ID NO: 167217 - RNA, 64 nt, Homo sapiens
gggcgcggcgaccccggcggcgggaggcccggccgggcaggccggggggggcacagagccccgg

SEQ ID NO: 167218 - RNA, 44 nt, Homo sapiens
gagggcggccgcgccggcccagggaaggaagagaaccgaagaag

SEQ ID NO: 167219 - RNA, 59 nt, Homo sapiens
gaaccacaaaaggaagaacaggccaacaaacaggaaacaaaggaagagggagccacagg

SEQ ID NO: 167220 - RNA, 73 nt, Homo sapiens
cgaaaccccagaccgaaaagcaaagaagcagcaacgagggccaaccagcagaaggcaccacaagccgaacagc

SEQ ID NO: 167221 - RNA, 80 nt, Homo sapiens
gagaaggccacaccacgcagaacgcaacaccaaggcacaccaccccaggggagcagggcagcaccccccacgcgcgagag

SEQ ID NO: 167222 - RNA, 77 nt, Homo sapiens
cggcaacaacccgaggacgaaccaccccgcgccagcagcacagcacggggcacaaggaccagcgccgaggagccaca

SEQ ID NO: 167223 - RNA, 66 nt, Homo sapiens
cccaagagcgggaacaggcggcaaaagaagacagcggcccacacgcccgacaaccgggaaagagaa

SEQ ID NO: 167224 - RNA, 71 nt, Homo sapiens
cgccacgcgcggaaggcagcgcccagcagcgcaggcgagaccaccacaaaagaaagcggcagggagggaag

SEQ ID NO: 167225 - RNA, 81 nt, Homo sapiens
cggcagcaggagggggagcgccggagcagaggagaaccacgcgcgagggcccggcacagcgggaagccggagacagacaag

SEQ ID NO: 167226 - RNA, 76 nt, Homo sapiens
cggcggcggcacgagcccgaccaggaggcacgagaagagaagcccagagcaaaacaccccaaaccagaccaccgac

SEQ ID NO: 167227 - RNA, 70 nt, Homo sapiens
cgcgcagcgggaacaacccaaacgaagagagaaggcgaaggcacaaaacagagaggcacagagagaaaac

SEQ ID NO: 167228 - RNA, 75 nt, Homo sapiens
cagcgcaaggcaccggccagagggacccagagagggaccagggccaaagaagagccggggggcaggcggacagca

SEQ ID NO: 167229 - RNA, 73 nt, Homo sapiens
aaacagcaagggaacaacaacaggacgccacaggcaaagaagggaaggacacaaccgaggcccagcaagagcc

SEQ ID NO: 167230 - RNA, 40 nt, Homo sapiens
cgcgggacacaagacgggcaaggagggaccacccagagac

SEQ ID NO: 167231 - RNA, 80 nt, Homo sapiens
gcagagcgagccggagaagagggggcccggggggaggaggggcaggcccggcgagggcggagaaggaacagggagagaaa

SEQ ID NO: 167232 - RNA, 56 nt, Homo sapiens
gggggccaagaggagacgacacgcaccaagccaggaaacaggaacacgaaagagga

SEQ ID NO: 167233 - RNA, 68 nt, Homo sapiens
cccgccaccacccaaagaggacccaccacggcgccacagcggcagggggggaaaagcggacaagggca

SEQ ID NO: 167234 - RNA, 66 nt, Homo sapiens
agaagggggaggccccgcaaccagggggaagaccacaagggccggacagacacgaagagcaggcgc

SEQ ID NO: 167235 - RNA, 68 nt, Homo sapiens
aagaagccaggcaaagaagaaaggccacacccgggcagccgcggggggcagacaaccacgcgcggcaa

SEQ ID NO: 167236 - RNA, 54 nt, Homo sapiens
aaaaacagcgcacacgagaacgaggggagagcggaggggaaagagcgcaggcac

SEQ ID NO: 167237 - RNA, 60 nt, Homo sapiens
caccccccacccaccggccccgggcaccaggcccaggcccgggggaggaccgggcagccc

SEQ ID NO: 167238 - RNA, 75 nt, Homo sapiens
cagacgggaaaaaagagcaccagagacagggaagacaagcaaggcagggcggagaagggagagggcagaagacag

SEQ ID NO: 167239 - RNA, 75 nt, Homo sapiens
gcccacagcggcgccacgccacacgcccgccccggcacgagcccagcccccggaggaaggaagggaacacggacg

SEQ ID NO: 167240 - RNA, 66 nt, Homo sapiens
agggagacgcagcaacaaaagaaggaagcacagaaaagccgagaccacagcgagaggaaaacagaa

SEQ ID NO: 167241 - RNA, 57 nt, Homo sapiens
ggcaaccacgggaaagcgggaggaaggcgaccgggcaaaaggggcccccccggcgcg

SEQ ID NO: 167242 - RNA, 57 nt, Homo sapiens
cagcagaaacaaagaagcagcgcgaaagggcacacaccccaggagggggagggggga

SEQ ID NO: 167243 - RNA, 82 nt, Homo sapiens
cacagcacccacaaagcaacgcaccgaacgaccggagcgagcacagaggacacaccccacacagcaagaggcacggacccgc

SEQ ID NO: 167244 - RNA, 80 nt, Homo sapiens
ccggaaccagagcagcagacccaaaggacaaccccgcaacagaaacgaacaccagcagaaagaggcacagacgcaaagcg

SEQ ID NO: 167245 - RNA, 59 nt, Homo sapiens
ccggagcccggccagccgcggccgaccgccagccgcgacaggggggagacgccagccac

SEQ ID NO: 167246 - RNA, 82 nt, Homo sapiens
gcagaagacggagagcgggccccaccccaccgcccacaccgggcaaaagcagaccggaaaacccaccggcaagaccacaccc

SEQ ID NO: 167247 - RNA, 75 nt, Homo sapiens
gcagccgagaacgccgcgcgcgcacccaacagcgaccgagcgggcggagaacggaaaagcaccaggaagcagaga

SEQ ID NO: 167248 - RNA, 81 nt, Homo sapiens
agcccaggacaaccggaagccgcaacaggaggacagaaaaaagaggaacccaccacaaagaaagccgacaagagacaaccc

SEQ ID NO: 167249 - RNA, 72 nt, Homo sapiens
agaagagaaaacgaaacagagcaacggcccaaagcgacgaaggccaccccaccccagaaaagccgaaccccc

SEQ ID NO: 167250 - RNA, 78 nt, Homo sapiens
ggcggcccggcacggcagcggacaggcagaggcgaggaaaaaaccacgacaaaaccacccaccgggggggcccggggc

SEQ ID NO: 167251 - RNA, 82 nt, Homo sapiens
agcggccgggccgcgccgcgcgcagaagagcaggcaccccggaccagcgccggccgcccgcaggacaccgagggcccagccg

SEQ ID NO: 167252 - RNA, 84 nt, Homo sapiens
gcggcaccgaaggacaggaggccaccagcccccgggccaagagcagcacggagacagagccacacaccggggcgagccacgagg

SEQ ID NO: 167253 - RNA, 65 nt, Homo sapiens
gaaagagcggaagaacgggaaagaaagcgagagaacaccggaaacacgagaccagaaacagaacg

SEQ ID NO: 167254 - RNA, 83 nt, Homo sapiens
agaccaggcagagccccgcgacgccaggacggagaagaagacaaacggcagcgcaagacacccgaggggccgaggcaagacaa

SEQ ID NO: 167255 - RNA, 77 nt, Homo sapiens
aaagagcgacggcgccccagccggacacaacgaacccgggacagacggaccgagacaacccacccgagggagaagag

SEQ ID NO: 167256 - RNA, 72 nt, Homo sapiens
cccacgacagaccacgacaagagcacaaccccgaggagcacagaacccacggaggaaggaccccgaggcacc

SEQ ID NO: 167257 - RNA, 68 nt, Homo sapiens
gaaaccaaagggaacgggggagagaagccacaaagcaagcaggcgccaccccaagcaccggcacagca

SEQ ID NO: 167258 - RNA, 59 nt, Homo sapiens
aggggcagagaaagcagggaaaggagagcaccacacaagccagcaggggggaaagaaag

SEQ ID NO: 167259 - RNA, 71 nt, Homo sapiens
cgcagcccgccggcgcgccccacgggccaggaggccaccggaggaggggagagggccggcacccgagaggg

SEQ ID NO: 167260 - RNA, 81 nt, Homo sapiens
aagagaggcaccccgaagaggcgaggagcaacccagggacgaggaaacagaaaacaacgaaaacaaagaaagaaacaagca

SEQ ID NO: 167261 - RNA, 74 nt, Homo sapiens
aggcaacggggaccccggagcccagaagacagagggcgagagcgcacacaagagggaagcgcaaacgaacagag

SEQ ID NO: 167262 - RNA, 79 nt, Homo sapiens
gcccagcagcaaccagccacccgcccccaagaaggaagcacagggccggccggaacagcagagaagccggccccagccc

SEQ ID NO: 167263 - RNA, 70 nt, Homo sapiens
gacaccaacgggaccagaagagagaaaagacacagacggcaaaacccaaaaaaccagaagagggacaagc

SEQ ID NO: 167264 - RNA, 55 nt, Homo sapiens
gaacacgggagcagcggaaacgcgagcaggaagggcagcaggaggcaaaccggcc

SEQ ID NO: 167265 - RNA, 55 nt, Homo sapiens
acagcgagcggaccccgaccccgaggcgagacggaaaggagggagccaggagcgc

SEQ ID NO: 167266 - RNA, 72 nt, Homo sapiens
gacccagccgcaaacaaagggacacccagaagagaggacagaagcaaaaagcagcaggcgcaaaaacgaacc

SEQ ID NO: 167267 - RNA, 61 nt, Homo sapiens
cagaagcggaaacaagcggaaaggacacagcaggaggcaaagggaccccaagaaaccaaag

SEQ ID NO: 167268 - RNA, 78 nt, Homo sapiens
gcggagacggaacgggagaagaggcaaagaaacaccaaccccaggaggaccaaaaggagcgcgggccgagccgagggc

SEQ ID NO: 167269 - RNA, 85 nt, Homo sapiens
aggcgccccaggacccaggcaaggaggaccaccagaccgagcgaacccagacaaccagccaaacaaagacggaaaagagaagaca

SEQ ID NO: 167270 - RNA, 55 nt, Homo sapiens
cggacccagccccagaaggcccacaacccccgaccccggccgcacgcggcacccc

SEQ ID NO: 167271 - RNA, 76 nt, Homo sapiens
gaaggggaacgggaaaggaacaacgggcaagaaaggggaggcgagcagcccagaccggaaggagggcagagacagc

SEQ ID NO: 167272 - RNA, 70 nt, Homo sapiens
ccgacgccaggcagcgcccccaaacgagcgacacagaaggaacacagcccaagcagcaaacccgccccca

SEQ ID NO: 167273 - RNA, 89 nt, Homo sapiens
caaacagcggccacgaaagccgccaggaaaagcgcccccaccggcgggggaagaagcccacgcacagaccaggagagaagacgaaaaag

SEQ ID NO: 167274 - RNA, 81 nt, Homo sapiens
gcaccaacacccaacaaaaagcagaagaaacaccgagacggcgaggagcaccccagacagaacaaagaaccaggaggcagc

SEQ ID NO: 167275 - RNA, 76 nt, Homo sapiens
cgcaacaccaaggcacaccaccccagagagggccgaggcagacaagggaaaggccgcgcaggggaccaccccagac

SEQ ID NO: 167276 - RNA, 79 nt, Homo sapiens
ggcaacgagccagaccaccccgaaccgagcccacgagccaagaagcgggagcccgcggacagaccgcaaaggcgcagaa

SEQ ID NO: 167277 - RNA, 79 nt, Homo sapiens
ggcgccccaggcgcacaaccaaaccagaccgcagcaggggaaggagggcgaaacaaaggaccagcacgggaaccggccg

SEQ ID NO: 167278 - RNA, 76 nt, Homo sapiens
gcgaagacaaaagacgcagcaaacaaaaagaacggccaggcagagggcccaccccggagagaccccagggccccca

SEQ ID NO: 167279 - RNA, 71 nt, Homo sapiens
aaagagcggacgggagaaagacacagcccacacccagggagggcagaacgacgaaagacggacaggacgag

SEQ ID NO: 167280 - RNA, 95 nt, Homo sapiens
gcccggaggccgcacccgccccggcggggcccaggcagcgaacagccaaacagacagaggccggcaagggaaaggccgaaggagaagaggagggc

SEQ ID NO: 167281 - RNA, 57 nt, Homo sapiens
ggagaagaggggagagggaccacacagaaacgcggaggaggccgccgaaggaggagc

SEQ ID NO: 167282 - RNA, 69 nt, Homo sapiens
ccccagagcccccaaacgacggccaaccgaaccgaagcagccacaaaaagccacgaacaggaagagaag

SEQ ID NO: 167283 - RNA, 81 nt, Homo sapiens
aaagacggcgccaagcgcgcggacacgagccacccacagagcccggaagaggacccgggggccagcccacagaccagccaa

SEQ ID NO: 167284 - RNA, 74 nt, Homo sapiens
cgccaggccgcgccgacgcacccagcacgggccagaacccaaggagaaaggcggcgacaaagcggccagaagaa

SEQ ID NO: 167285 - RNA, 67 nt, Homo sapiens
gccgccagagcgcggccgccaaggccagggggcagaacagggaagccgacagcaaggcggaaaagaa

SEQ ID NO: 167286 - RNA, 83 nt, Homo sapiens
cggaggccacgaggaaggaagaagcccagaagcaaaaccgaacaccggaagaggacccagcggacacagccaacaaaaacaac

SEQ ID NO: 167287 - RNA, 65 nt, Homo sapiens
gcgcaaagaaggaggaaacacggaacgacgacgccaggcaagaaacacagaagggggccaccacc

SEQ ID NO: 167288 - RNA, 66 nt, Homo sapiens
acccccgccggaggaaccgaagaccagccgcagccccggcgcaggaacacaggacggccgaacacg

SEQ ID NO: 167289 - RNA, 83 nt, Homo sapiens
agggcagcacagagaccgcgaaagcggaccaaggaaccaggggcaggaaacacagggagagccgcagaggccgcccaccacgc

SEQ ID NO: 167290 - RNA, 59 nt, Homo sapiens
cacaaaagagcagaggaggaacaccaggcacaagccaagccccagcaaacaaccggccc

SEQ ID NO: 167291 - RNA, 41 nt, Homo sapiens
ggcggaacggaacagaagcaagaacaccgaaggaaaaggaa

SEQ ID NO: 167292 - RNA, 77 nt, Homo sapiens
cgagcccccagagcaggacacagaaggaccaacaagagccgaagaagaacaacccaggaagccacgcaacacagacc

SEQ ID NO: 167293 - RNA, 72 nt, Homo sapiens
aacagaaggaacgacccccaagccagagccgaggcagacccaccgaaaagaaagggcaagaacccaaaagca

SEQ ID NO: 167294 - RNA, 69 nt, Homo sapiens
ccaccacccaaagccccgcacccgcccccccccggcaggagaggcggcaggccgggggggagcacagag

SEQ ID NO: 167295 - RNA, 77 nt, Homo sapiens
cggccgggggcgccagagcaacggggggaccaaggcaacgaacacaagcagcgggcaacaacagaacagaaaacacc

SEQ ID NO: 167296 - RNA, 64 nt, Homo sapiens
gcggcgcccccgggcagcaagggggaggcccccaaggagcccaaaagaaacagggcgcaggaaa

SEQ ID NO: 167297 - RNA, 64 nt, Homo sapiens
agaccaagaacccagagccagagaaagaagacaaagagacccgaagggaccccgacggagagac

SEQ ID NO: 167298 - RNA, 85 nt, Homo sapiens
ccgccgcgggagcgccgccaagcaggaggagcaagcacaacaggccgaagaggccggagaaggacacgcgaagaagaagagacag

SEQ ID NO: 167299 - RNA, 89 nt, Homo sapiens
agaaagccccgacggggggacagaaggggcacacaaaaacaaaccaggggacagggaaagcagaaccgcgggaaaagaagggagaagca

SEQ ID NO: 167300 - RNA, 75 nt, Homo sapiens
cgcgggggcggggggccgagcaaccagaaccggagcaggaggcgcacaacacccaggaccgccgcgccgaccgga

SEQ ID NO: 167301 - RNA, 82 nt, Homo sapiens
cagagaggggagccggcgaggacaaaaccgaaggaggcgaagaaggggaacaaggaacccaacccaggacaacgcaacagga

SEQ ID NO: 167302 - RNA, 85 nt, Homo sapiens
gcggagggcgcgggccgaccgggcgcaccgaccaggccccaaagccccaaggcgacaagaccggaccggcaaaacgagcccagac

SEQ ID NO: 167303 - RNA, 75 nt, Homo sapiens
gaccgcaaaaaggccaagggccagaccaaaggaaccagagcaggagaaaacgaggggcgagcgaaacacagagaa

SEQ ID NO: 167304 - RNA, 90 nt, Homo sapiens
cgaagaaggaggcaggcacggggaaagacagagaagcgaagacagagacgggaaagacagggagagagacacggagagagacgcagaagg

SEQ ID NO: 167305 - RNA, 79 nt, Homo sapiens
aacagaaaagcagccagaaacgaaaacaaagagaacagcaagaaagacagcggaaacagcccgaacgcacagaagaaac

SEQ ID NO: 167306 - RNA, 82 nt, Homo sapiens
ccaagcaaacgcagaaggacgcccacgagcaaccaagagacagggcagaccgccagcagcacagcaagccacagagagggcc

SEQ ID NO: 167307 - RNA, 63 nt, Homo sapiens
ccgaggcacccgaagaagagaccaccaaccaggacaccgcgaccagcaccacccaaacaagac

SEQ ID NO: 167308 - RNA, 67 nt, Homo sapiens
ccaagacacgcacgagaagcggcgaaggggggccacgaggggagggagcggagagaaaggcaagcgg

SEQ ID NO: 167309 - RNA, 78 nt, Homo sapiens
gagagcagaagaacacagacagcggaagagaaggagccaaaaaggggagaggaagaaagaagagaggaggcagcagga

SEQ ID NO: 167310 - RNA, 75 nt, Homo sapiens
agcaacggcggccccaggcccaggccccccaccaccagaggcaagacagccggcagagaagacccacagcacacc

SEQ ID NO: 167311 - RNA, 60 nt, Homo sapiens
agcagcgaggaacaaccaagccgaggaccacagccggaaggcagcgcccgcagacaacga

SEQ ID NO: 167312 - RNA, 33 nt, Homo sapiens
aagacccaggaaagggcaccgccgaccgaaacc

SEQ ID NO: 167313 - RNA, 79 nt, Homo sapiens
ccgggggcaggcgggcagaggagcagaccgccgggcgaagggggggcagagccgggccccagccaggggggacaagcac

SEQ ID NO: 167314 - RNA, 80 nt, Homo sapiens
gggcccccaaaaagcggcaaaagcaagagaacagacccagggagcacagccaacaccgcaaccaccgccgagaacgagcg

SEQ ID NO: 167315 - RNA, 52 nt, Homo sapiens
cagacgacacccaaccgggccagaagcaggcggggagaaaaacaggaaaaga

SEQ ID NO: 167316 - RNA, 75 nt, Homo sapiens
aaagcacaacagggaggacagaggaagaaaaagaagacgccagcaccagggacagggcaacagcagaagagcgga

SEQ ID NO: 167317 - RNA, 70 nt, Homo sapiens
cgaccaacaggcgaagccgaggaaaggagacaccaaggaaaaagcccagccggacgagcagaaacagcca

SEQ ID NO: 167318 - RNA, 77 nt, Homo sapiens
cgcaacacaagggagccggggcccccagcaagaacgggaacaaaaccgcacaacaaagagagcagggagagaagggg

SEQ ID NO: 167319 - RNA, 79 nt, Homo sapiens
ccggcagaagcagagacaccaggacagaaaagacaggcgccaggagcacagaagagcgaggagcggacaacaaccaagg

SEQ ID NO: 167320 - RNA, 77 nt, Homo sapiens
gccgccccgccagaagaggagacgacggacggcgggcaccggccgacggcgcagcaaccacagaaagagccgacgcg

SEQ ID NO: 167321 - RNA, 80 nt, Homo sapiens
caccccaccccccggagcagggcacacccagcccggccagaagaacagaaacgaccaacggaagaacgagaaagggggcc

SEQ ID NO: 167322 - RNA, 84 nt, Homo sapiens
ccagcagggcacgccccgaacccgcgcgcagggaacagcggggcaaacagacagcccagagcaagcacacggaggcccgggagc

SEQ ID NO: 167323 - RNA, 74 nt, Homo sapiens
ccgcggggcaaaaacacaagaagagagcgagaacaccgcaaggacggggggcccgggcgaaaccggaccgggcc

SEQ ID NO: 167324 - RNA, 71 nt, Homo sapiens
cccacgccacaccaccccccagaaccgcaggaggcacacccgccagccagcggcgcccggggcaaccaacc

SEQ ID NO: 167325 - RNA, 76 nt, Homo sapiens
ggggcgggaacccaggggccggcacagcacaaaccaagaaccccaacaccaccaagcagcggacagaaggcacggg

SEQ ID NO: 167326 - RNA, 71 nt, Homo sapiens
agccaaaacaaagagccggcccaagacaaggggcaaaggccgaagacgagggagcacagcacaggaagggc

SEQ ID NO: 167327 - RNA, 73 nt, Homo sapiens
cagcaccccaacgggccaaagagcgcaccagacagggaggaagcgcgaaggggaaacggagaaggacaccagc

SEQ ID NO: 167328 - RNA, 74 nt, Homo sapiens
aggcggcacgaaacggagcccggagcagcggcggcgaaagacaagacccgcagcacgagccaccagcacagaag

SEQ ID NO: 167329 - RNA, 92 nt, Homo sapiens
cggacggaaagagccgacggaaagagccgacggacggccggcgagggcacgggacaagaagaagagcgccgagaaaaggacccggcaaacca

SEQ ID NO: 167330 - RNA, 62 nt, Homo sapiens
gacagcgagaacaaaggagagaggaccacccagaggagcaacggaccaaacaaacaacaccg

SEQ ID NO: 167331 - RNA, 78 nt, Homo sapiens
ggcggccacagaaaagcccacggcaagacagcaccaacaacagcacccccaaacagaaggagcccagaacaagaccgc

SEQ ID NO: 167332 - RNA, 39 nt, Homo sapiens
ggaagcaagagccagacccaaaccgcccagccaacccgc

SEQ ID NO: 167333 - RNA, 102 nt, Homo sapiens
ggaacccagaacaaacagaaacaaagcaggcaccaaggacagagcaggaccaaaagaagcaaaacagggcacccaaaaagagaggcgagaacacggaaagcc

SEQ ID NO: 167334 - RNA, 74 nt, Homo sapiens
ggcggcagcggccccagaccgccagcgcaggaaggccggggcgcaggacagcagcagaccagcacgaggaagga

SEQ ID NO: 167335 - RNA, 73 nt, Homo sapiens
ggggacccgcggggcaagccgacggaacagaccaaacccgacgacagggacaccacccacccagcccacaagg

SEQ ID NO: 167336 - RNA, 78 nt, Homo sapiens
ccggagcacacgacagcaggacaggccagccgggagagccaggcacgccagccaaagggcggcccccgacacaccaca

SEQ ID NO: 167337 - RNA, 72 nt, Homo sapiens
ggggccaagggaccacacgagggcaagaaagccagggccaagcagcaaggacaaaacgggcgaaggagaccc

SEQ ID NO: 167338 - RNA, 73 nt, Homo sapiens
gggaaagcaaggccacagcaccaagcacaagacggaacaaaagggaacgaagggaagcgcaggcggaaaccaa

SEQ ID NO: 167339 - RNA, 68 nt, Homo sapiens
cagcaaaacagaaagaggaggagaagggagaaaggggggaggcaagcaggggggcaaaggaaagaagg

SEQ ID NO: 167340 - RNA, 82 nt, Homo sapiens
acggggcacacggcgagcaggaaccaaggaggggcacaagcccgcaggacgagcagggaagagggggagcagaccggaagac

SEQ ID NO: 167341 - RNA, 87 nt, Homo sapiens
gcgcccgcgcgcggggaccccacgggggccaaccgccccccagcagcaggcacgggcgaaccccgagccccgccccacgcccgccgg

SEQ ID NO: 167342 - RNA, 88 nt, Homo sapiens
ggggagcgaagcgagggcgaagcacgacacagaaggggaggggagggaaaggcccaggaaaaaggaacgcaagcacaggaccagaaac

SEQ ID NO: 167343 - RNA, 78 nt, Homo sapiens
gggacgaggaccccggccacccaagaccgagacgggaggcgaggcggcaccaaaaagaaaagaacagaccagccaaac

SEQ ID NO: 167344 - RNA, 59 nt, Homo sapiens
ccccgaaaaaggccgaaggaaccagcaaagagccccaggaacaagccgggaaagacgcg

SEQ ID NO: 167345 - RNA, 65 nt, Homo sapiens
caggaaaacaaagaggccaagaagacagagggacacaaaaggcgcaacaaagcaagcaacaaggc

SEQ ID NO: 167346 - RNA, 77 nt, Homo sapiens
cagagcacaggcgcgcaaacggaggaaagggcacagaggggcccagaaaacaagccagcaggcccgcaagcaacaag

SEQ ID NO: 167347 - RNA, 80 nt, Homo sapiens
aagacccagaggaagccaaaagagcagcccaccaagaagggccgggacagagcacgagaccaccacaccaagcggagaac

SEQ ID NO: 167348 - RNA, 76 nt, Homo sapiens
caccccccacgccccaccacaacaaacgaggaaccagcacaagacaaacaacccggacaaggccacccccgggaag

SEQ ID NO: 167349 - RNA, 74 nt, Homo sapiens
aaagaagcaggaggagaggagaaagacagcaaagaaaaggagaagaaaggaaaaaaacaaccccgggcaccccg

SEQ ID NO: 167350 - RNA, 80 nt, Homo sapiens
aggccaccaagagacaaaagaagagaaagccccaagcgacaggggagggacccaggggcaagacggaagcaaggcaaagg

SEQ ID NO: 167351 - RNA, 64 nt, Homo sapiens
caaccacacaccaccagaaagcaagcgcgaaggcagacgcggccagccaccagacacaccgcaa

SEQ ID NO: 167352 - RNA, 75 nt, Homo sapiens
aagacaaaccggggcagccagagaggccagaagagagcgggcaccaccccaagcagggacagcaacagaccagcg

SEQ ID NO: 167353 - RNA, 107 nt, Homo sapiens
cgcggcgcgagacggaggcgaggcaaacggggggcgcggagggaccagcgagcggggacgaacagcggggacgccccagcagaccgcccaggagaggaaagcaggag

SEQ ID NO: 167354 - RNA, 76 nt, Homo sapiens
ggaacgaacgggaccagagggggacagcgaaaagaggaaaaaagcagccgacagcgggaagacgagaacaaaagaa

SEQ ID NO: 167355 - RNA, 74 nt, Homo sapiens
ggagaaggagaacgacggcaccggaaggggcgagacgggacacccccggaacacaggcccaggcaggcaacaca

SEQ ID NO: 167356 - RNA, 69 nt, Homo sapiens
aggaccgccggagacagggcaaagagaacggacgagaccaacgcggaaaccagcaagaaaaccagcggc

SEQ ID NO: 167357 - RNA, 81 nt, Homo sapiens
gcccgggaagcgggccggcagcgcccggacgaggagggcccaaagcacaagcgaccgccgaaggagcccccgaacggcaac

SEQ ID NO: 167358 - RNA, 70 nt, Homo sapiens
acaggcgggaggccccccgcgccgggaaccaggcacaggcaccgacgacagcagcacaaacagcgccgcc

SEQ ID NO: 167359 - RNA, 70 nt, Homo sapiens
ggaagcccccccggcacgacaccgccccaacccacgagaggacagcccagccggagaacaccgggcccca

SEQ ID NO: 167360 - RNA, 63 nt, Homo sapiens
ccacgaaacaacagagaccaccagggggaaggggaggagaagaccacagaggaagagacagag

SEQ ID NO: 167361 - RNA, 80 nt, Homo sapiens
cggcgcggacggccccccaggggccccagagcccgcgccacgagccagggagccgccgggaccggcccgggagacgacaa

SEQ ID NO: 167362 - RNA, 82 nt, Homo sapiens
ccagaaaaagccaagccaccgagacccggaggaggcgaagcgagaggacaggaggaacagcacagcagcgggccggaaaagc

SEQ ID NO: 167363 - RNA, 81 nt, Homo sapiens
ggggaggggagcggcaggcgagaccgcgcgcgaggagaggagcgcaacagcagcaccaggcggaagaagagcaccaaaaag

SEQ ID NO: 167364 - RNA, 70 nt, Homo sapiens
ggcgagagcgggcaccccccaaacgacgcagccacggagagggcggagaacggaaaagcaccaggaagca

SEQ ID NO: 167365 - RNA, 81 nt, Homo sapiens
gagacccggagccggcccaacggccagacaggccaagccgacgccagcgggcgccacccaacaggcgcaccgcccacggcc

SEQ ID NO: 167366 - RNA, 54 nt, Homo sapiens
ggaaaacaaaaaaaggcggcacaacacaaggagaaagacagcaaagaaaaggag

SEQ ID NO: 167367 - RNA, 70 nt, Homo sapiens
gggaaccgaagaacgggggagaggggcagcgcccagccccggccagggcgagggcacgccagaccaccca

SEQ ID NO: 167368 - RNA, 75 nt, Homo sapiens
ccccccgagggcgagcccccccacagcaggaaagagcagagcagaaaaacgggccgaaaaaaacaaggcacgggc

SEQ ID NO: 167369 - RNA, 80 nt, Homo sapiens
cggacccccacacgaaggccgcaaggcggggaggagagaagagaaagcgaaagggagaaccccgggaccagccggaaaaa

SEQ ID NO: 167370 - RNA, 51 nt, Homo sapiens
ggacgccggagaggcaccggaccgcacacaaaagagggacaacacaagcca

SEQ ID NO: 167371 - RNA, 85 nt, Homo sapiens
ccaggcagaaggccccccgaacagcaggcgccaccagcccggagcgagcccggacggccacgacgggcgcggaggcaggacccag

SEQ ID NO: 167372 - RNA, 81 nt, Homo sapiens
cacgacccacaggagccccaggagcccagacaccagccccccaccagggcccggccaggccccaccgccacaagcagggga

SEQ ID NO: 167373 - RNA, 74 nt, Homo sapiens
cgcaggccaaggagaaagcaggagagccgagagccaaggcggacaaagcaccacccagcacaacagcaacagag

SEQ ID NO: 167374 - RNA, 51 nt, Homo sapiens
aaggggcagcagacccaccggaaaggcacagcaaggcggggcgggcacaga

SEQ ID NO: 167375 - RNA, 80 nt, Homo sapiens
aaagaagccacagaacaggggaggcagccaggggcccagcggagaagagcccaggcccggaagagaggaaacggagaaga

SEQ ID NO: 167376 - RNA, 84 nt, Homo sapiens
cgcgccacagccaccagagccggcagcaaagagggaacagggcggagaacggaaaagcaccaggaagcagagaggaccgcagaa

SEQ ID NO: 167377 - RNA, 49 nt, Homo sapiens
ccagaggcggaggagggaccaaagccagcgcagaagagagccgcccggg

SEQ ID NO: 167378 - RNA, 77 nt, Homo sapiens
caccagcccagaccgccgacccaccggagccggcgcagccccccaaccaggcaagagcaacgaaccaaagcaaagga

SEQ ID NO: 167379 - RNA, 70 nt, Homo sapiens
agccgcaaacaggcgcgcagaccggccgggccaaaccgaacagaacggcaaccgagccgggacagacagc

SEQ ID NO: 167380 - RNA, 70 nt, Homo sapiens
acacaggaagaacgcagagaacacccaccacagacagaacccgaaacaagagagacccaaaagggccaga

SEQ ID NO: 167381 - RNA, 75 nt, Homo sapiens
ccgggaagaagcgccgcgcacggaccggcagagggccagaaacacagggacaagcacggagggcacccaacacac

SEQ ID NO: 167382 - RNA, 77 nt, Homo sapiens
cagcggcaagaggaccggccacgaaaaaccagaggaaaaaccacaggaggagacacgagccaaaagaagcaagggaa

SEQ ID NO: 167383 - RNA, 76 nt, Homo sapiens
aaggggaggggagcacacagaagggccaaggaaaaacgagcagaaagaagccagggcgaccaagagagaaacagaa

SEQ ID NO: 167384 - RNA, 60 nt, Homo sapiens
ccggcgagagcggcggcccggggcgcgaccagaggaacccgagcaggaacaccccagccc

SEQ ID NO: 167385 - RNA, 80 nt, Homo sapiens
cagggccagcagcggacagcgcagagaggccggacaagaggagcagaccggaggggcggacagcaagcccgagaagcaag

SEQ ID NO: 167386 - RNA, 65 nt, Homo sapiens
ggccgcccccgcgcccgggcccgccccggccgcggccgggcccagggcccgccagaggagagccg

SEQ ID NO: 167387 - RNA, 70 nt, Homo sapiens
ggcgagagggaccaggccgaaaggggcaccccccaccacgccaaggagacacagcacagcagagagacac

SEQ ID NO: 167388 - RNA, 67 nt, Homo sapiens
ggaaagggaaaaccagggggcagggcaaacagaacccgggaacaggagagcaccagccaggacgccc

SEQ ID NO: 167389 - RNA, 42 nt, Homo sapiens
cccggagagcgggaacagaggagaggagacgccggagcggga

SEQ ID NO: 167390 - RNA, 77 nt, Homo sapiens
gggggcagaggaggcggccaaggaccggccgacacgcggcccccgaccggccggggaaccaggggggaaccaccaga

SEQ ID NO: 167391 - RNA, 75 nt, Homo sapiens
aaacacaagagggaggagacaccaaccagaaaggcccggacaccccaacagccaccccaggacggcagaacagcc

SEQ ID NO: 167392 - RNA, 74 nt, Homo sapiens
agccgcacaggggcagggaaccgaaagacaagaacggcggccaaagcgccagacaagggccgagccccggagag

SEQ ID NO: 167393 - RNA, 35 nt, Homo sapiens
agcgacccaccgaacaggccgggccaagagcgccc

SEQ ID NO: 167394 - RNA, 79 nt, Homo sapiens
gccacaagggagaaaccgaaaacaggcacggaccaccaagcagagggcgagccagcgcgcccaccgcagggaagaaaac

SEQ ID NO: 167395 - RNA, 86 nt, Homo sapiens
gacggcccagcgacgcaccagcaagacggcaggcgagagccgacccaggccgccggccccacagggggcgaccgacggaagaaaca

SEQ ID NO: 167396 - RNA, 52 nt, Homo sapiens
caccccaccaccagagcggcgccccggccggcccgagggccgcccccggccc

SEQ ID NO: 167397 - RNA, 78 nt, Homo sapiens
gcacggaccgcacgccccaccgggcgccccacgggccgaagccgaggagcagacccccagggcacccggagcagggaa

SEQ ID NO: 167398 - RNA, 78 nt, Homo sapiens
ggggcaagcggggcagggcacacgggagagaccggggcagccccccgcagacggcagcgggagagaggagagcagaga

SEQ ID NO: 167399 - RNA, 83 nt, Homo sapiens
ccaaggccaccgagcccgcaaaaccagccaaaccaggaaaggacaggggagaagacacaccaggacaaaaacacggaccaaga

SEQ ID NO: 167400 - RNA, 71 nt, Homo sapiens
cggaccaaaggacaaaaacagagcaaagagggcacaaaccagcaccgggagagagagacggggccccacgg

SEQ ID NO: 167401 - RNA, 55 nt, Homo sapiens
caagcggaaaagagcagcgcccagccccagcaggcaacacagagcgaccgaaaga

SEQ ID NO: 167402 - RNA, 72 nt, Homo sapiens
cggcgccaccccacgaagaccgaggagcagggagcaaccacaaggaaaggaaaccaccgaaccgagccagac

SEQ ID NO: 167403 - RNA, 89 nt, Homo sapiens
ccaaaagaagggaacagaagagagggagcaagcaacagccacagggggccagggaaggccggagcgagggagagcaggaacacagagag

SEQ ID NO: 167404 - RNA, 57 nt, Homo sapiens
ggaagccgacagacaaccagaacagccaaggaccgaagaacagcgcccaggcaacac

SEQ ID NO: 167405 - RNA, 77 nt, Homo sapiens
gggggaggaggcaacgccgcgccgaggcaggcgcccaggcaagagcccgcccacgggaaaccgccgggcagcagcag

SEQ ID NO: 167406 - RNA, 89 nt, Homo sapiens
gggccagcggcgccgccgaaggccacggcgagccccgaggacggggccgaccgaggccagaggacacccgcggcaagagcgccagcagc

SEQ ID NO: 167407 - RNA, 78 nt, Homo sapiens
gcccgaggaccggaggagcacagagggccccagggccgacgaagagaaaaaccaccgcacagcgcgagaagagggggc

SEQ ID NO: 167408 - RNA, 78 nt, Homo sapiens
cccgaccacgccccggaggaccaggaaccagaaccacagaggacaaacccagcagaaaaccccacccggccacgccag

SEQ ID NO: 167409 - RNA, 55 nt, Homo sapiens
gggcagaaggccgaaagagcacggacccggaagggcacggggaaccagggaccca

SEQ ID NO: 167410 - RNA, 76 nt, Homo sapiens
cgaggggacccaagcggagacagcaccgacagaaggagaagacggcccagcagagcacccaaccagcgggaacaca

SEQ ID NO: 167411 - RNA, 95 nt, Homo sapiens
gaacagaaggaaaagggcaagcgaaaaaacaacgacaggaccacggaaaacagccgcggagaaccgaaccaacagccagccaaagccaggcagca

SEQ ID NO: 167412 - RNA, 43 nt, Homo sapiens
ggggacacacgggccacaagaggcaagcaaccccggggaagag

SEQ ID NO: 167413 - RNA, 73 nt, Homo sapiens
caggaaaccaccccgagcggcgggcaaaaaggccgggcggccggggggggcacagagccccggaagacagccc

SEQ ID NO: 167414 - RNA, 62 nt, Homo sapiens
cagcaaagggcccaaaccaggcagaaggaggcacaggagagaggcaacaaggccaggaacgg

SEQ ID NO: 167415 - RNA, 97 nt, Homo sapiens
agggagagaccacccacaccgaggaagaccagaaacacagccgagaggaggaagaagaagaagaagaaaaagccaaccagagccaggacccgaaaag

SEQ ID NO: 167416 - RNA, 50 nt, Homo sapiens
caaacgcggacagaagcacacgaccgcgagagggcgaagaacgccaaaac

SEQ ID NO: 167417 - RNA, 80 nt, Homo sapiens
caggggaccgcaacaggaacggaggcgggcggccaggagggacaggcaagaaggaagaaggcagaggcgcagccaggggg

SEQ ID NO: 167418 - RNA, 61 nt, Homo sapiens
cgggcaagaccacccgcaagcacgcgcgcggaaggaacaagcaggggaccagcaccggcca

SEQ ID NO: 167419 - RNA, 116 nt, Homo sapiens
cgaacacaaagggaaagaggagaggcacccgaaagccaggccagaaaacaggacaggaagagcacccaagcgcaagcaaaagaaggcccccccagcagagccaccccaaaagcaag

SEQ ID NO: 167420 - RNA, 76 nt, Homo sapiens
cgccggaccgccaaggggacggcacccaccgcccacgacaaggcggaccaaaaccccagcaaggggcagccggcgg

SEQ ID NO: 167421 - RNA, 67 nt, Homo sapiens
cgcagagcaaagggggcccccagggaggccgcacggcccacgcgaaaccgccgcgcccgggaaagga

SEQ ID NO: 167422 - RNA, 83 nt, Homo sapiens
aagggcaacaccccacggccaggaaaacggggaccaccacgcccagcaaaccagccagcacgggggcccagccagccagcagc

SEQ ID NO: 167423 - RNA, 76 nt, Homo sapiens
gaaacgggccacaacacacgaccaccggaggggggggcaaggagaaaaagggcgaaggcacagcggaaagagggca

SEQ ID NO: 167424 - RNA, 85 nt, Homo sapiens
ccccagggccaggcgccgccagaacggaccaggccaaccggagcgcacccacgccacaagccggacggcggcagcgcggccgggg

SEQ ID NO: 167425 - RNA, 84 nt, Homo sapiens
accaccccaaggggcccaagagagcggaacaaaagaggcagaggaggggacacggggacgcccggcggcccgcagagggcggca

SEQ ID NO: 167426 - RNA, 40 nt, Homo sapiens
acaaagcgccaggaaaggagagccacaagaagaggacagc

SEQ ID NO: 167427 - RNA, 85 nt, Homo sapiens
aacaaggcgccgcccagccgcggaggagagcggggccggcaagaaggacaagagcggcagcaggaaaggaggcaagccagaaagc

SEQ ID NO: 167428 - RNA, 65 nt, Homo sapiens
aaaccagaggaaaaaccacaggaggagacacgaggaccgaggaaggaaaacggagccaagacaga

SEQ ID NO: 167429 - RNA, 76 nt, Homo sapiens
ccaagggcgaaaaaaaagggaagaggagacaccccgggggccccgagcaaaccaggaagggcaccagggaagccag

SEQ ID NO: 167430 - RNA, 57 nt, Homo sapiens
caggcgccaaccggaacagcaaacggaacaagaggaaaagaaaagccaagaggaaag

SEQ ID NO: 167431 - RNA, 77 nt, Homo sapiens
gaggcacggaggaaaacaaaggccgagagacccgagcccacagcccccaagggagcccaagaagaacacggagcgag

SEQ ID NO: 167432 - RNA, 80 nt, Homo sapiens
agcaggacacaggggcccgcacgagccaaaggacacagcaacacccgaaagggaaaagcacagggccaggaagcagaggg

SEQ ID NO: 167433 - RNA, 76 nt, Homo sapiens
caaaccacaacagcgcgaacagaggcacccgaagccaaagggaaaaggacagaacgaccgcccggccagcccaccc

SEQ ID NO: 167434 - RNA, 71 nt, Homo sapiens
gcacaacccaaggccggaacccaaagggagccgaaggcccagggcgacacgagaaggcggccagcggggaa

SEQ ID NO: 167435 - RNA, 86 nt, Homo sapiens
cacaccagcggcgcaggacgggcacagcagagaccaaaggcagggcaaggaaacggccacaaggccagcggaccaaagggagccac

SEQ ID NO: 167436 - RNA, 72 nt, Homo sapiens
gaacgaaaaacagaaacgagccagacgaaacagcagacaaacagggaacggccagcaccaagggcaccagga

SEQ ID NO: 167437 - RNA, 78 nt, Homo sapiens
aagggaagaagggagacaaaggaaaacaaaggcgggaagaaggggaggccgaaagccagccaaaagcccagaagagga

SEQ ID NO: 167438 - RNA, 71 nt, Homo sapiens
gccaccagagcagcaggaagggagagccacccaagagacaagcagcagcagcgaacgccgaccaggccacg

SEQ ID NO: 167439 - RNA, 80 nt, Homo sapiens
ccaggacccacggaagccagaaagcaccgaaaggggcccccggccggccgcgccaacagcccgggagagcgagcggaacg

SEQ ID NO: 167440 - RNA, 71 nt, Homo sapiens
ccggaacaggcacaccccacacaagcacgccaagggcaagcaagaaaaacccaacacggcagcaaaaagca

SEQ ID NO: 167441 - RNA, 78 nt, Homo sapiens
aaaacgcaagccaagaggagccacagccaagaggcccccaagaagcagagggcgccaggggagaggaggcagaaggag

SEQ ID NO: 167442 - RNA, 74 nt, Homo sapiens
cccgccacagggcaagacggaccaccaaggaaccagaaggccaacccaccgacaagagaccaagacagacagac

SEQ ID NO: 167443 - RNA, 80 nt, Homo sapiens
cagagaaacaggaacagcagaagcaagcagggcaagcaacaggaggcaaacacgccccgggggaccacacccagaccggc

SEQ ID NO: 167444 - RNA, 74 nt, Homo sapiens
aggacagcggagaggaaccagagaccaggcagacacaaggaacagccagccaggagaaaaacgaacccaacaga

SEQ ID NO: 167445 - RNA, 55 nt, Homo sapiens
ccagccggagccccagacaacccggacggccggccaaaccgcagacgcagagcca

SEQ ID NO: 167446 - RNA, 86 nt, Homo sapiens
gcgagcagccaggcggcgggccagggacgcacaccgagacgaacacagaacagcacgaccagaggggaagccaagcaaacgcagaa

SEQ ID NO: 167447 - RNA, 74 nt, Homo sapiens
ccagcgcagcagagcgccaagacggagccaaaaaccgaacacccggaaggggacaagggacggcgaacagaccc

SEQ ID NO: 167448 - RNA, 76 nt, Homo sapiens
gaagaagcggaaaaaagaaaaccagaagcggagcgggggcccgagaagccgacgggacaagaaaccacagagccga

SEQ ID NO: 167449 - RNA, 65 nt, Homo sapiens
cccgcccccgcagcagcgccagggccggccaaggagcgaaaaggaccaaccaggccggaacgagc

SEQ ID NO: 167450 - RNA, 36 nt, Homo sapiens
cagccaagcgccgccggccgccagcacccaacaaac

SEQ ID NO: 167451 - RNA, 77 nt, Homo sapiens
gggaggaaaacaaccgagggcagacaaccccaacagagcggcaaacagggcagacacaaggcaccacaacaaccgag

SEQ ID NO: 167452 - RNA, 68 nt, Homo sapiens
acacagaaacccgccccggcgaaacagaacaccgaacaccagcgggcgaccgacaaaagaagaccacc

SEQ ID NO: 167453 - RNA, 38 nt, Homo sapiens
agagcgagcggcaacccggaggagagagagagggccca

SEQ ID NO: 167454 - RNA, 74 nt, Homo sapiens
ccccaccggacggccacagacgggacgggccgaggagagacagccccacagacgcaggcgcagaaaagaagcac

SEQ ID NO: 167455 - RNA, 75 nt, Homo sapiens
ggcaggaacagacacggggaagcgcaaaaacaagacggggcgccccacagaggggcgacgagcaggcgccggggc

SEQ ID NO: 167456 - RNA, 88 nt, Homo sapiens
ccgcaggcgaggacggcggaccccgcggcgggaggagccgccccgaggaagacagagagcaagaccccagcccaaccgaggcggcaag

SEQ ID NO: 167457 - RNA, 103 nt, Homo sapiens
cgccggaccgcggcagaagaaagcaagacccaggacaccccgaagccgagaaagaacagccccagcgcggcacagaccaccgggagcaacacccaagcaaaaa

SEQ ID NO: 167458 - RNA, 75 nt, Homo sapiens
gccgggccaagcccgcgccgggccgcccagcgcccgcaagaggcccgagccaggggacagcagacgagcgaacag

SEQ ID NO: 167459 - RNA, 50 nt, Homo sapiens
acaggaaagaacgcaaaacagcggaagcacgcagaaccggccgaaaagca

SEQ ID NO: 167460 - RNA, 121 nt, Homo sapiens
cagcagggcgagacagcgaaagcacgaacaggaaacaggaagccgggagagaaacacagagccaccgcaaccaccccgcagcgaaacaaagagcgcgcagaagcgggaggcccgggaggca

SEQ ID NO: 167461 - RNA, 73 nt, Homo sapiens
aaccacaaccccaccaggaaagcacagagagcaggaacaaggcagccaagcacaaggacgagacccaagcagg

SEQ ID NO: 167462 - RNA, 133 nt, Homo sapiens
gccccccgcccggcagcgccccgcgagaaggaggagcccccgcccggcagccaccccacgggaagaggggacccagacacgccaaagccggagccacaggaaggagacagggccccaggacgacacagcagca

SEQ ID NO: 167463 - RNA, 75 nt, Homo sapiens
gaccgggaccgcgcggacccggccgggagaagcagcagcgcaagagcccaaaaggcagagcgaggagagaagaag

SEQ ID NO: 167464 - RNA, 73 nt, Homo sapiens
caccagaaggcagcagcggaggaccccaagaagcaggcagacacaggcccaccaggacgagagagcgacgagg

SEQ ID NO: 167465 - RNA, 120 nt, Homo sapiens
gcgaaccaagggccacggggagacaaggcaaaaaagcaaaacgaagagcccaaggaacagaaagagccaggaagcgagcccagcccagcacaggggagccaccgaagcccaaaacacggg

SEQ ID NO: 167466 - RNA, 71 nt, Homo sapiens
agaacggggggcgaaggcaaggcacaaagcccgacagggcaacacccgacaaaggaacacaggagagcgga

SEQ ID NO: 167467 - RNA, 69 nt, Homo sapiens
aacaggacgccccaggcgcaggagcacggagccgccgccgaaccagggggaaggccccgggcagccgag

SEQ ID NO: 167468 - RNA, 71 nt, Homo sapiens
aaaggccgcgggggcaacggagaaaacccggaaccgcgacggcggcaggcaaccagaggccaggccagaga

SEQ ID NO: 167469 - RNA, 77 nt, Homo sapiens
ccaagaggcggacggcccggagagacgaaccgaagcgggcgggcccccccacccagaggcgcagagacaaggaaggg

SEQ ID NO: 167470 - RNA, 73 nt, Homo sapiens
gaagaccacaaaaaagagacccacagccagcaacaccgcacccggaaacaagccacgaaggagagaaaaccag

SEQ ID NO: 167471 - RNA, 50 nt, Homo sapiens
cggaacacccagaggccagcacaacagccccgagccccggccccaaagac

SEQ ID NO: 167472 - RNA, 75 nt, Homo sapiens
gaaggaggcagaggcacaccgaaaggcacgggaaccccagaacgccggaaacgcagcgagcccacagaaacgcgc

SEQ ID NO: 167473 - RNA, 75 nt, Homo sapiens
ggagcgccgggcacagagcgccgacgcacgggcggccgggggggccgacgagaagaacaggaacaaccgacaccc

SEQ ID NO: 167474 - RNA, 70 nt, Homo sapiens
aagaggagaagacaccaaaaagcaaacggaccagaccgaccaccaaaaaagccccccagggaaagcccaa

SEQ ID NO: 167475 - RNA, 81 nt, Homo sapiens
cagcgcccgcgccccgccgcgagccgcgcggagccgcgcagccccggagcacggggagagaaggaagagagaaagaaagga

SEQ ID NO: 167476 - RNA, 84 nt, Homo sapiens
gaccgcccccgagaagaacacacagggaccacgggcgcagggccggcggagaggcccgacagagccccaaggaagccgagccag

SEQ ID NO: 167477 - RNA, 83 nt, Homo sapiens
ccgacggcagcagcgggaagccaacacagaaaccgccacagggcagcagcaaggacaagaggagaaaagccagcaagcacaag

SEQ ID NO: 167478 - RNA, 66 nt, Homo sapiens
caaccggcagagcggaccgaaagaaggcagcagcaccagcacaacaaggaggcggacccgacgaag

SEQ ID NO: 167479 - RNA, 66 nt, Homo sapiens
cgccaagagagaaaccaacaagcgggaaacagcaggaaacaaacagaggggaggaacccacccaca

SEQ ID NO: 167480 - RNA, 93 nt, Homo sapiens
gccacggcggaggacgacgcgccaaccagacgcgcgggagggcggagaacggaaaagcaccaggaagcagagaggaccgcagaagggaaggag

SEQ ID NO: 167481 - RNA, 74 nt, Homo sapiens
ccgaccaccccgggcgggaagacagaaccagggccgggggccagaaagaagcggcacggaaggaaacggcccag

SEQ ID NO: 167482 - RNA, 58 nt, Homo sapiens
ccgaccaagcaccgcagacccaaccccagcaaggccagcaggcaacacgggagaagga

SEQ ID NO: 167483 - RNA, 84 nt, Homo sapiens
accgcgaaaaggccaagaggaacagaaaccgaagagaaaggccaacgagaacaagcacagcaaaagggcagaaaagcagggcaa

SEQ ID NO: 167484 - RNA, 75 nt, Homo sapiens
agcacaaggaagcacaaacccaaaacccagagggcgagaagaagagagaccaaaaaaccaaggacgacgggaaac

SEQ ID NO: 167485 - RNA, 72 nt, Homo sapiens
ggccggacaggcagaacagaacagggcggacaaacaccagacaccaccagaggagaggaagcgagacaaacg

SEQ ID NO: 167486 - RNA, 41 nt, Homo sapiens
ccggcacaccccggagaaccgcagagccaggacgccccaag

SEQ ID NO: 167487 - RNA, 73 nt, Homo sapiens
agacaaggcagcaccacacagagacaaccgccaccgggccgcccgggaagagccaccgcaaccacaccggccg

SEQ ID NO: 167488 - RNA, 75 nt, Homo sapiens
gaacgggacaggacagagcagcacggagcgcaagagcgcccagaagaaaagaaaacaagagaacagagggcaaaa

SEQ ID NO: 167489 - RNA, 74 nt, Homo sapiens
gccggaccaaacagaggaagcaacaaagcgaagggccaaccaggagagggggaggagcaagaggaacccacaaa

SEQ ID NO: 167490 - RNA, 35 nt, Homo sapiens
aagcggaagagagccaagcagaacgcgggaccgaa

SEQ ID NO: 167491 - RNA, 76 nt, Homo sapiens
ggggcagccgccgcccccgggaacccaggagaaacgagagggacagcaaggaagacgccagagagcggcacaccgc

SEQ ID NO: 167492 - RNA, 83 nt, Homo sapiens
gaggcacaaaaagagggcaggaagaggggcaacccccgaagcccaggagaagaagcgaagaaagcaacaagggaggaaggacc

SEQ ID NO: 167493 - RNA, 80 nt, Homo sapiens
aaacccagacaccgacgggccgcgaggggaagaggaagcaaagccaaggaaaaaccagaagagaaaaaacaaaggggaga

SEQ ID NO: 167494 - RNA, 56 nt, Homo sapiens
cagcaggacccaccgcagcaaaacaccaggccaagacaagcgcgcacgcggccaca

SEQ ID NO: 167495 - RNA, 72 nt, Homo sapiens
ccgacccaccccgcccggacccgcggaaggccaaaccacaaggagagaacggggacaaggcaagacagacac

SEQ ID NO: 167496 - RNA, 74 nt, Homo sapiens
gcacaggccccccccaacggcacaacaccagcaaaacagaaccccaaaccccaacaagaacacgacgggccaac

SEQ ID NO: 167497 - RNA, 70 nt, Homo sapiens
cgaacccggggcgggggcccggccacccgcagcaccgcgagggacgcaccccccccagcagcaaggcacc

SEQ ID NO: 167498 - RNA, 56 nt, Homo sapiens
agagagcaacggaaaagcgcagaggaccaagaaaggcccagggaccaaagcccgga

SEQ ID NO: 167499 - RNA, 76 nt, Homo sapiens
agacgagcgggggacggcacgggccgcagaagacagggcggcgggccggacgacaaaacgcggcagaacggaggca

SEQ ID NO: 167500 - RNA, 54 nt, Homo sapiens
ccagccgcaccggcaccaccgccggcgcggacgggacgaacagcggggacgccc

SEQ ID NO: 167501 - RNA, 90 nt, Homo sapiens
ggaccgcaacgccgacagaacgaggggacgaacggaggcaggcgaggagcgagccgaggggggccggggcaggggggcgccgcgaagagg

SEQ ID NO: 167502 - RNA, 71 nt, Homo sapiens
ccggacaaagaaacgaaggacacacagccaggcccagcaaaaggggaaggcccagaagaaaaagagaaaaa

SEQ ID NO: 167503 - RNA, 82 nt, Homo sapiens
cgagggggagacggcacagcaccgccaaaagccagcccagaaggcagcgggggcacagcgagggggcagaccccagcgccac

SEQ ID NO: 167504 - RNA, 75 nt, Homo sapiens
gggacggaaaccccacgggggggggcacgggaccaaggcccaacaccaccaccgccaagaggaaccgcaaaaagg

SEQ ID NO: 167505 - RNA, 53 nt, Homo sapiens
ggaccccaccaaaccgaaaagacccgccgcaagcaaaaccaccagccaacgga

SEQ ID NO: 167506 - RNA, 76 nt, Homo sapiens
ccgagcgcgggggccccagccccgcccgcccccagcccgggggggccccagcccggccgaacgggcgcacgacaca

SEQ ID NO: 167507 - RNA, 58 nt, Homo sapiens
caaaggggaaaaagccaaaacggacaagccaaggcacgagccaaagaaacaaacacag

SEQ ID NO: 167508 - RNA, 52 nt, Homo sapiens
aacaaaacacgaaagacacggaagcacaccagaggagggacaagacagggac

SEQ ID NO: 167509 - RNA, 107 nt, Homo sapiens
gcacaagaagaaacacccggaccccgcaacgcggaacccaagaaggcggagagaggaagggccgggccaaaaaaagcacccagcaaagaaacccggaaaaagacaag

SEQ ID NO: 167510 - RNA, 62 nt, Homo sapiens
ggaggaaaccagggcgggggcccaagaaccagcgggaaccgggaaagagaaaagggaagagg

SEQ ID NO: 167511 - RNA, 79 nt, Homo sapiens
ggacccccgagcgccgcagcccagcacaacgaggagaccagacgccaacaagacagaagaccagcccgccgcacccagg

SEQ ID NO: 167512 - RNA, 79 nt, Homo sapiens
gaaccagagcgcccggccgcggccagcggagcccgggcggggcaggagccggacgaccgaaaacccagccagacaaaag

SEQ ID NO: 167513 - RNA, 69 nt, Homo sapiens
agacaagagcagcacccaaaagaccaggagccacaaaggaggggagaggacagaaaccgaagcgaaaag

SEQ ID NO: 167514 - RNA, 72 nt, Homo sapiens
gcccgacaacacagggcaggacgcagagagaaaaaacgcagagaaaccagcaacacagcaggcgcgcccggc

SEQ ID NO: 167515 - RNA, 78 nt, Homo sapiens
aagaaacagccccccgacagcccgggaagaagcagacacaagaccggcggaaagagacgaccgacggccaagcacagc

SEQ ID NO: 167516 - RNA, 80 nt, Homo sapiens
agccagaaaccggggaccaacaaccaccaagaaacagagggaggagccaaacggggcgccgcgccaagagccccccaacc

SEQ ID NO: 167517 - RNA, 77 nt, Homo sapiens
cacaaggcccgaggacggcacccccgaccaggggccaagaagccgccccaggcaacacgacacagcgcccggagacc

SEQ ID NO: 167518 - RNA, 64 nt, Homo sapiens
caaggagggaaaagaaagaagagaggagaaccagccaggacaccaggggggaaaaaccacacag

SEQ ID NO: 167519 - RNA, 75 nt, Homo sapiens
aggggcagggcagaagggcgcggagggacgcacccccacagggcagaaggcggggccccgggccgcaccccccac

SEQ ID NO: 167520 - RNA, 78 nt, Homo sapiens
acgcagcccgaggacaagcggcggaggcaccgccccaacccccccccgcccggagaaccccgcggaacgagcagcggg

SEQ ID NO: 167521 - RNA, 73 nt, Homo sapiens
cgcaccgcccgccgcccgccgcgcgccgccggccaagaagacgcggagggaggcgaggagggaccgagccaca

SEQ ID NO: 167522 - RNA, 75 nt, Homo sapiens
agaagaaaggagaaacagagggagaacaagcgggccaaaagcagagaaccaaagaacacggccaggacaagacca

SEQ ID NO: 167523 - RNA, 81 nt, Homo sapiens
cagaagaaacacgaaagagaccaaccccacgagaaggaaagcgcacggcagcagcaaaaccacagagaaacggcccaagag

SEQ ID NO: 167524 - RNA, 82 nt, Homo sapiens
ggaagaagggccagaaaaaagaggggcaaagaaaaaggagagaaaaagaggcaaaacaacaagaagaaaagagaaaaaagag

SEQ ID NO: 167525 - RNA, 76 nt, Homo sapiens
ggcacaccaggcggcaggggcaaccagacgggccaagcaccagcccgaagaagccgggcagaccaggcagcagcgg

SEQ ID NO: 167526 - RNA, 78 nt, Homo sapiens
agaaaagacccaaagagacccagaaagaaaaaaggcaggaaacaggaagaacagaagaaaggacaacgggcagaccaa

SEQ ID NO: 167527 - RNA, 80 nt, Homo sapiens
gaaaggcagacaaggaaggaacgcaggagcgcagaacacaaacagaacagacacaacagcccagcaagcagagcgaccag

SEQ ID NO: 167528 - RNA, 56 nt, Homo sapiens
ccagggagccaagcgccgcccggccgaaaacgccagaaacaagaagagaccaacag

SEQ ID NO: 167529 - RNA, 50 nt, Homo sapiens
acgaccggggagcaccggagcgagcgcgaaccaggacaccccccaggcac

SEQ ID NO: 167530 - RNA, 80 nt, Homo sapiens
gcagaccacagaacccagcaacaaggacaccaggggggaaaaaccacacaggcaaagaacgcgcaaaacaggacgaaaac

SEQ ID NO: 167531 - RNA, 65 nt, Homo sapiens
gaggccccaaagcagcagcagcagacagaggcaaaaaggagaaggcgaggagcaccgaaggggac

SEQ ID NO: 167532 - RNA, 122 nt, Homo sapiens
ggacccccagagcaaggcaaagagcccggaggggagagaggggcggaggccggccaggagagaaccacaagcagagaacagaggaaaaacacggggaaaaagaaaacagacagaggcagcag

SEQ ID NO: 167533 - RNA, 50 nt, Homo sapiens
ggcggagaccccccccaacaagcaagacaagcaccgacacagacaacgac

SEQ ID NO: 167534 - RNA, 81 nt, Homo sapiens
ggaaagccggcaagagggagaaggacaccaggcagaggcaaggcaaccggccccgcaaagccaaccgcaaccgccagggaa

SEQ ID NO: 167535 - RNA, 65 nt, Homo sapiens
cacagggcgcaacaagagcgacaaacgcaggggcccagaagacaccgcgaggggccgccaccgag

SEQ ID NO: 167536 - RNA, 55 nt, Homo sapiens
aggacccgccaccaaaggccagcgagcgccgacacccaacaagaccagcccccag

SEQ ID NO: 167537 - RNA, 74 nt, Homo sapiens
cgaggccgcaggaggagggagggagagaagcccccagccaggagagcagcggaacaaggcaccaggaggaggcg

SEQ ID NO: 167538 - RNA, 100 nt, Homo sapiens
ggagaaaaacaacaccaggacacagaaggcgaaacagaaggcggaggcagaacgaaagagggaccaaagaacccaccgccccgaggaaacgagaagccca

SEQ ID NO: 167539 - RNA, 86 nt, Homo sapiens
cgcccacggcgaggaagcagccaagaaaaaaagacgaaagaagaagaagagcaaagggcccgcagagaaggggcagaagccaaaaa

SEQ ID NO: 167540 - RNA, 79 nt, Homo sapiens
cccgccggcaaggaggcaccgcggcagacgggaccacgaggcaacgccccaggaacacaagggcaagacagccgggaac

SEQ ID NO: 167541 - RNA, 75 nt, Homo sapiens
cgcagcccaccccagagaaagaccaggggaacggcaacgacagaagcacgcgccagaagaacagcggggcgccga

SEQ ID NO: 167542 - RNA, 70 nt, Homo sapiens
gggacaccggcagcaggggaccggccccacgccgcggggggcacgcccgaagggccgaggacaagcagcg

SEQ ID NO: 167543 - RNA, 80 nt, Homo sapiens
ccccgggggccacgagcgggagaaggcgagcggccagacaaaggaaacaaccgcggcaaggaaccacaggcaaccccgca

SEQ ID NO: 167544 - RNA, 78 nt, Homo sapiens
gacgcccaagcccggggccggcaccaggccgagaccccgacaggaggagacgccaagagccccccaagagaaggaacc

SEQ ID NO: 167545 - RNA, 76 nt, Homo sapiens
ccgccagagaacacaaaccagaacaagggggaaaacaacgagcacggcaagggaaagaggcaagaccggaaaggcc

SEQ ID NO: 167546 - RNA, 83 nt, Homo sapiens
acacaggagaagaaaggagaaacagagggagaacaaggggaacgaaacgcacacccggccccagcagccacagcggaggcccc

SEQ ID NO: 167547 - RNA, 81 nt, Homo sapiens
gaacccggaccaagggagccccaaacaagggggacggacagagaccgcagccagaccacgcgagccggcccgggcccaccc

SEQ ID NO: 167548 - RNA, 72 nt, Homo sapiens
cgggacggccaaaacgggccccaggggacagccgggagaggaacagaagcagacagacagaaagcgcccagg

SEQ ID NO: 167549 - RNA, 58 nt, Homo sapiens
gaccaccgaggcggagggggagaacacccaggaaaggcccgagccaaaagacccagag

SEQ ID NO: 167550 - RNA, 57 nt, Homo sapiens
agagagggggaggagcgggcagaacgagggcaccagagcacagcggacccccgggga

SEQ ID NO: 167551 - RNA, 86 nt, Homo sapiens
agaacgccaccccggcaacacacagacaccagggggccagcggcaggaagggggcaaggacccgccaggagagaccgggacccaag

SEQ ID NO: 167552 - RNA, 68 nt, Homo sapiens
gaccaagcagacgaacacacaaacacccgaaaagacgcgcagcacccacccgagagccccagagcgca

SEQ ID NO: 167553 - RNA, 83 nt, Homo sapiens
cgcgagaagacaagcgccaccaggacagccagagagcgaagagacgcccagcgcgcgggccgccgcaccgcgaggaacccgag

SEQ ID NO: 167554 - RNA, 86 nt, Homo sapiens
ccgcgggcgccgagcagccaccgcccgaccaagcgccggcccgcccgcagcggcaggaaagcaccgggaggaaagagagccacacg

SEQ ID NO: 167555 - RNA, 72 nt, Homo sapiens
cagaagcaagcgcgggcgaacacgacaacacagcgagcgaaaccagaaaaacacggagagcaacaaagaggg

SEQ ID NO: 167556 - RNA, 75 nt, Homo sapiens
agagccccgaaaaggaacgggaaagggcacacggcccgaacaagggaacaccagcacagcggcagaagcaaggcc

SEQ ID NO: 167557 - RNA, 47 nt, Homo sapiens
aacccggccgggagccgcgcgaggcgggaagcggacagcaagacagg

SEQ ID NO: 167558 - RNA, 75 nt, Homo sapiens
gaaaagccgagagacacggacaacagaggaggggaacaggaggaggggcgacaaccaggggcaggagaacaagga

SEQ ID NO: 167559 - RNA, 114 nt, Homo sapiens
ccccccggcccgaccgcccgcggccggaccgcaccggacagagcggacacaccagcagggggccccgacccccacggacaggcccgagcgggagaggacgggccgaccaccgcg

SEQ ID NO: 167560 - RNA, 79 nt, Homo sapiens
aaacaccaggcggcaaggaaaagggaaaaagacccgagaagcgcagacccaccagggaaagcaaaggcagggccaaaaa

SEQ ID NO: 167561 - RNA, 77 nt, Homo sapiens
aagccacccgagcggaccccgagggagcacaagcgggaggggccggcgaagcgaagaagccgcgaggaagaccaaag

SEQ ID NO: 167562 - RNA, 98 nt, Homo sapiens
aaaggacacccaaggagcacaagagcgccccaagcaaggaagcgacagagagaaaaggaacagccgaagccaggggcaagcgaaaccacagaagaaag

SEQ ID NO: 167563 - RNA, 76 nt, Homo sapiens
gcaagcaccaaggaaggcggagcagcaagccgagagcgaaaaaccaagcggagaggagcagccaacgggcccgcaa

SEQ ID NO: 167564 - RNA, 71 nt, Homo sapiens
gagaagccgaccccaagaaagagagagacagaagccacagaaagcaaaccccacgagaacaaagcacggca

SEQ ID NO: 167565 - RNA, 81 nt, Homo sapiens
ggaggccggccggcggcagaacaagcccaggagcccggacgaaggacaagaccaaggcgaacacccaaacccaggagcgga

SEQ ID NO: 167566 - RNA, 79 nt, Homo sapiens
cccaacagcacgcacggcggcagcggccagccgccgagggcacccggaccagcggcaggaggaagaagaccagcagcac

SEQ ID NO: 167567 - RNA, 66 nt, Homo sapiens
aaggaccaaggacccaaagcacaggaaccaccgaaagcggcgcaacgaggcgccacccgggcagag

SEQ ID NO: 167568 - RNA, 73 nt, Homo sapiens
agaagaaagcagcagggaagcgggaaaggaaagaagaccgcacagacagaaaagaagaaaaggggggaaaaag

SEQ ID NO: 167569 - RNA, 42 nt, Homo sapiens
gcggagcggggacgcagagaccaggacaacacacccgggccc

SEQ ID NO: 167570 - RNA, 72 nt, Homo sapiens
aaggccagaggaaagccagaaggcaccagagagaggccgaacggagcagacaaagccgcaggcaccaagaag

SEQ ID NO: 167571 - RNA, 78 nt, Homo sapiens
cagcccccaaaggcagaacagcggaaacagagagcaaggagaagcgagaggcgcagaaagaggaccggccagagcgac

SEQ ID NO: 167572 - RNA, 56 nt, Homo sapiens
gcacgcagaggagacaggaaaaggccaaaggggaggcaaagaagggagacgaacaa

SEQ ID NO: 167573 - RNA, 76 nt, Homo sapiens
ccgacggcaacaggcaccccccagagaaaggagagcggccgcaagagacaggggccaggccaggggcaggggaagc

SEQ ID NO: 167574 - RNA, 37 nt, Homo sapiens
ccgcacaccccgaagggggaaagaccggcacacaaag

SEQ ID NO: 167575 - RNA, 45 nt, Homo sapiens
gaacgcacaagccaaaaccggggaggaaacgcaggagggccggag

SEQ ID NO: 167576 - RNA, 62 nt, Homo sapiens
gaagaccagcaggaaagcaggagcccacagggaggacagagcccaggaccaagagcacaaca

SEQ ID NO: 167577 - RNA, 75 nt, Homo sapiens
cccgggagagggggccagggaggacccccgaagaaccccccagggcggggaccacgaaggagacccaacaccccg

SEQ ID NO: 167578 - RNA, 85 nt, Homo sapiens
cccgggccgccggcaggcggccgcagcaacccgccgggacggaggcgcaaagaaggcacagaaggagaaacggcacaaccaccca

SEQ ID NO: 167579 - RNA, 74 nt, Homo sapiens
acgcagggcgcccccggggcgacagcaagaaggagccagcacagaggcaaaagaaccaacaaaggccaaaagag

SEQ ID NO: 167580 - RNA, 111 nt, Homo sapiens
ggcgggggcgccggcagaggaccaggcaccaccggccccggaaggcacacaggaccccgcgagccagcggcgacgggaacaagccccaaagagcgccgcacaagaagagag

SEQ ID NO: 167581 - RNA, 79 nt, Homo sapiens
gggccagagacgacacgccgcacgacgcgccaacaacgggcacacaagccccaagcccccagcaccggaccgcggaccc

SEQ ID NO: 167582 - RNA, 71 nt, Homo sapiens
caacgccggccggagcagcagcccgaggaagcagacacccaagagacgcccccggccgggagaacacaagc

SEQ ID NO: 167583 - RNA, 88 nt, Homo sapiens
cgcggagccgcggcggagccggaggaagcgaggcacccaagcacacaggaccccgcgagccagcggcgacgggaacaagccccaaaga

SEQ ID NO: 167584 - RNA, 67 nt, Homo sapiens
cggcagcggcaccacggggacgcaaaggacggcagacaagagaaaacaacaaggaacgacagaggaa

SEQ ID NO: 167585 - RNA, 84 nt, Homo sapiens
cggcccccgccccaggagcgcgagcccacaacacccccagcggccgccggccccccacgaggagaagacagaggagccagacca

SEQ ID NO: 167586 - RNA, 79 nt, Homo sapiens
ggcggcggcaagggcgggagggagcggcgccgcgggaggagcgccagcccgcggcgaaccaagagaaaaggcccgaaga

SEQ ID NO: 167587 - RNA, 70 nt, Homo sapiens
ggacagccggggacaagaaggccccagaaccacagagggaggggcccgagagaagagaagagcggaggaa

SEQ ID NO: 167588 - RNA, 78 nt, Homo sapiens
cagagcagcgaaaagaagaggccggacccggcgaggacacccagaacccccaaagccggaagaaacgcggaccgcgga

SEQ ID NO: 167589 - RNA, 76 nt, Homo sapiens
ccagagacgcgagcccgccgccgccgccaccacccacccggacacagaaggccaggcaggacgacgcggagcaggg

SEQ ID NO: 167590 - RNA, 69 nt, Homo sapiens
gcccgccgcgggagagaggacccccccccccccccaagggacacaggacaaggagccaccggagaggaa

SEQ ID NO: 167591 - RNA, 64 nt, Homo sapiens
ccgaacgagcggaggccaacaaaaaacgaagagagaagaagaacagggagaaacccgagggaca

SEQ ID NO: 167592 - RNA, 79 nt, Homo sapiens
ggacaggaagggaacgggaaagcgcaacaggacccaaacagccgagcagaccgggaaccgcaccgggaaagaggaggag

SEQ ID NO: 167593 - RNA, 81 nt, Homo sapiens
aggagaagaagaaggaggcaggaagaaaggagcacgagaccggggcaaagagcagcacccacacagccgacagagacagag

SEQ ID NO: 167594 - RNA, 80 nt, Homo sapiens
cgagggcgaagcacgacacagaaggggaggggagggaaaggcccaggaaaaaggaaaaaagcagagagaacacaagccaa

SEQ ID NO: 167595 - RNA, 80 nt, Homo sapiens
accacccggaacgaagacgaaaagccacgaagaaaaggggaaggaggcgaacaggaaggcaaagaaaccccaaagccagc

SEQ ID NO: 167596 - RNA, 72 nt, Homo sapiens
aagcaccggaccgagaacgaagccaccgcccccggccgccgggggacagcgggcccacgcgggagccacagg

SEQ ID NO: 167597 - RNA, 79 nt, Homo sapiens
ccggcgcaggagcagcagcgcagggggaagagcaggaggacaccggggacggggcagcaacccacccaacccgggggcc

SEQ ID NO: 167598 - RNA, 56 nt, Homo sapiens
cggaggacccccgcccgaaccgagggaacaggccccagcggcggaggaaagagagc

SEQ ID NO: 167599 - RNA, 66 nt, Homo sapiens
ccccagcgacaccgccaagagccgacacaccggaccaccagccaccccgaagcagcacagacgcag

SEQ ID NO: 167600 - RNA, 91 nt, Homo sapiens
cgccaccaccacgccagccgcaccagccgcccaagccgcacagccgcggcggcagcagcaggagagggaacccacccaccacccagggcac

SEQ ID NO: 167601 - RNA, 85 nt, Homo sapiens
ggacccgagccagcgccgcacaggaccggccaccgcccccgcaccgacggccaggcaccaaccagcggacacacggaaaagggac

SEQ ID NO: 167602 - RNA, 77 nt, Homo sapiens
cggcgcgcgcggcaccaggccggaaggcccaccgcggccccgaggagaggggacccgcaggggcaagaggccgaaaa

SEQ ID NO: 167603 - RNA, 75 nt, Homo sapiens
agaggaagaagcgggacccgcagggcaaaggggggaagaacaagggcacaggggaagaagaaaggaaggcaacca

SEQ ID NO: 167604 - RNA, 72 nt, Homo sapiens
cggaaaggaggaagaagacaccggggacagacaggggccagcgagacagaccgaaacccaaagaaaaggagc

SEQ ID NO: 167605 - RNA, 81 nt, Homo sapiens
ggggccaggaagcggaggagccccggaggcagagcggcgccaggagccgcccggcaaagcgaaagcgcaggaccgaggaga

SEQ ID NO: 167606 - RNA, 63 nt, Homo sapiens
gcacagcacaccaaggacgcagcgcggagggccagccgcacgccaaaccaaacaggaagcacc

SEQ ID NO: 167607 - RNA, 81 nt, Homo sapiens
ggaggaggaggagagccgggaggcaaagggcccgcagcccccggaagccaaagacccccagggacccggccccagcaccgc

SEQ ID NO: 167608 - RNA, 60 nt, Homo sapiens
gacacccagagacggaggaaacccgacagcaaagagagagagaacccgagcgccgcagcg

SEQ ID NO: 167609 - RNA, 82 nt, Homo sapiens
gggcccggaggaccggcagccggggggaagacaaggaggacggcaagaagaagcgaaaaccgcccacaacaccagcacgaaa

SEQ ID NO: 167610 - RNA, 65 nt, Homo sapiens
gggaccgggcgcagaggacacccggccacacgccggggaccaggaaacgggcccaggagaaaacc

SEQ ID NO: 167611 - RNA, 71 nt, Homo sapiens
gagcgagagcccagaagccgagaccagccgcacacacggggcccgaggaagagaaaggggagcaagaagaa

SEQ ID NO: 167612 - RNA, 72 nt, Homo sapiens
ccgcacaccgcgacggcgcgcggcgcgagggcggagaacggaaaagcaccaggaagcagagaggaccgcaga

SEQ ID NO: 167613 - RNA, 76 nt, Homo sapiens
aacacggccaagaagagggaaacggggagcaggaacaggggggaccaaggggaggggggcagcagaggagaggagg

SEQ ID NO: 167614 - RNA, 67 nt, Homo sapiens
gggccgagaagcggggcaccacgaaggaccgaagagagacccggagacccaaaaaccggcccggcga

SEQ ID NO: 167615 - RNA, 60 nt, Homo sapiens
acacccaggaaccgagccgccgacggacagaggcaggcgacacgagacccacgccacccc

SEQ ID NO: 167616 - RNA, 73 nt, Homo sapiens
ggaacagcgggggcggagaagagccaggcaagcagaagaggaacagaagaagcagagcagagacggagcagca

SEQ ID NO: 167617 - RNA, 79 nt, Homo sapiens
ccaaggaaaaacggagagccacaaaaaaggaagcgaaagaagaagaaggacgagaagaagagaagagaggagaggagaa

SEQ ID NO: 167618 - RNA, 80 nt, Homo sapiens
gcaaagccaagaggcggacaaaacgccaggcggaccagaaggccagcaaagggggcaaggccaaagggcaccgggacgag

SEQ ID NO: 167619 - RNA, 97 nt, Homo sapiens
cgagacacaccaggccggcaggcgagaaaagcgagaccgcggcgaggaccgaaagccaacaggcagaccagagacagcgccacgcacccggggagca

SEQ ID NO: 167620 - RNA, 65 nt, Homo sapiens
ggacacagacggggggagcccaggaacggccggaggacaggcgaagccagacacaagagaaaaag

SEQ ID NO: 167621 - RNA, 40 nt, Homo sapiens
gcgagacccacagaggaccagagacaacagccgcacccaa

SEQ ID NO: 167622 - RNA, 88 nt, Homo sapiens
caggggcgcagaagggagaggggagcgacccggggaccgaccggggaccccgccgaagagagccaggacaaaaccaggcagaaccaac

SEQ ID NO: 167623 - RNA, 87 nt, Homo sapiens
aggcgaagcgcgagagcagcgagcggcggaagaggggagaacaaccacggaagaggagcccagggcagcagggacacgcccgaagag

SEQ ID NO: 167624 - RNA, 60 nt, Homo sapiens
ccaggaccgagaccggagcagccggggcggagcggggcagaaagaaagcaggaccagggg

SEQ ID NO: 167625 - RNA, 72 nt, Homo sapiens
aaaggcaaaagcgcagaaacagaaacaaaaccggcccacaacacagccacggaccaggagcgaacgagaaga

SEQ ID NO: 167626 - RNA, 93 nt, Homo sapiens
cgaagacggaaacgaggaaaccgggaaagccaccgaaaaggacaagaacccaaccagcagcaaaacaccaaggaaagggagcagcaaccccag

SEQ ID NO: 167627 - RNA, 75 nt, Homo sapiens
cggcgccaggacaggagccgagaacacgggccaaccgcgcgcgaaagcgcgcaagggagcgcgaaggacggaggc

SEQ ID NO: 167628 - RNA, 68 nt, Homo sapiens
gggaagacaagccaaggaacacagaagagaacccgaacacagcaggagcaagcgggggcaggagccaa

SEQ ID NO: 167629 - RNA, 79 nt, Homo sapiens
acaaccgcagggaccacagcaccgaaaacaccaggaaagacaggagaccaaaaagggcacgcacggagaaaggaagaca

SEQ ID NO: 167630 - RNA, 58 nt, Homo sapiens
agggcgccacacgggccagggcagggccacccagggacgggcgggggacccaacacag

SEQ ID NO: 167631 - RNA, 78 nt, Homo sapiens
ccagggaaggcggaccaggaagccccccacgccggagagggcacggcggagaggcacgaggaacaaggcagcgaggga

SEQ ID NO: 167632 - RNA, 74 nt, Homo sapiens
ggacagcgggcgaagaaggaacgaagcaagagcacaggggaaaaacgagaacacagaagagaacccgaacacag

SEQ ID NO: 167633 - RNA, 62 nt, Homo sapiens
accgcaggcagacaaaagggccaaagaagggagagaggagggcggcggggaaagaaagggga

SEQ ID NO: 167634 - RNA, 77 nt, Homo sapiens
ggaccgacaccgcccggagggcgccccccccccgaggcgcccgcagggccaggacggcgccacggccggaacgcaca

SEQ ID NO: 167635 - RNA, 83 nt, Homo sapiens
agacccagcggacaagccacgacagaaccaccgcaggaccagaaccgaccgaaccagggaaacccccggaggacaggccaggc

SEQ ID NO: 167636 - RNA, 75 nt, Homo sapiens
ggaggaggggcaggcccggcgaaggacagggcgaaccccgcgccccgcagcggagagcgcggccgaggcagaagg

SEQ ID NO: 167637 - RNA, 70 nt, Homo sapiens
aaaagacgaagaaccccaaacacggacaaagggaagaaacgaggagcaccggcagcgagcggaccggcag

SEQ ID NO: 167638 - RNA, 54 nt, Homo sapiens
ccaaggcggcaccaagacaccagccgaacacacgaccgcgagagggcgaagaac

SEQ ID NO: 167639 - RNA, 84 nt, Homo sapiens
ggaggagaagaagggaggcagagaaggcggggaccaagagaagagcagaggaccagcaccgccgagacacgcacacaccgcaag

SEQ ID NO: 167640 - RNA, 73 nt, Homo sapiens
cgaaaaggaccgagaacccgcaggacccagccgccgccccaccgacggagacggacgcccgggaggggagcag

SEQ ID NO: 167641 - RNA, 86 nt, Homo sapiens
gcggacccccgcggcgcgcagcccagcagccccgcccccggagagggaacagaagggaggaaacaaaagaagcagcagcacgcaca

SEQ ID NO: 167642 - RNA, 65 nt, Homo sapiens
acgggaaagaacagagaaggccagagaaacaccaaaacacgagaacaaacgcgcaccgaaaagaa

SEQ ID NO: 167643 - RNA, 66 nt, Homo sapiens
cagggcaaaaacggagggcgaaggcgagaaggggagaggaggacgagaggaaaacggaggaacaag

SEQ ID NO: 167644 - RNA, 77 nt, Homo sapiens
gcagccgcccgcgagaacagcaggcaacaaaagaaaaagaccacagagaggaaggaagcaacacagcaaaagaacac

SEQ ID NO: 167645 - RNA, 77 nt, Homo sapiens
cccggaaaaaagggaaggacacggacacagcaagacccagcccgccagggaccgccgacagcagccgaccagggcgc

SEQ ID NO: 167646 - RNA, 83 nt, Homo sapiens
agcacgacagggcagggcagaaagcagcagaaaaaaggccaggagacaaccagaccccggggcccagcggagcacaggagggc

SEQ ID NO: 167647 - RNA, 53 nt, Homo sapiens
aacccccacgcggccagcgaaaacgcccagaagagaccgacccaaacccaccc

SEQ ID NO: 167648 - RNA, 71 nt, Homo sapiens
gggcgccacaccggacacaggccaggggcaccccccgggaagaagccccccagcaaagccaaccgcggacg

SEQ ID NO: 167649 - RNA, 70 nt, Homo sapiens
caacccgcgaaagcaggaaagggcaaaagcggcaaagggaaaaaggcgccgggacaaccagaggcgaaga

SEQ ID NO: 167650 - RNA, 69 nt, Homo sapiens
gggaggcccgcggagccgaggcgggagggcgcgccagaggacaccagacccaaggcgcaagaaaaggag

SEQ ID NO: 167651 - RNA, 44 nt, Homo sapiens
ccgagcccagccgaaggagaaggggggccccgagccccggcccc

SEQ ID NO: 167652 - RNA, 75 nt, Homo sapiens
ccagcaaagccagccaacacaacaaggaaaagggcaggccaaacggacggcagaaccacagggagagaaaaaaca

SEQ ID NO: 167653 - RNA, 111 nt, Homo sapiens
gacagcaacaagcgacaaccagaaggggaacgaaagacagaagcagagcgaacagagggccacggagaagaagacagagcagaaagccaaaaacacagaacgacaaccagc

SEQ ID NO: 167654 - RNA, 71 nt, Homo sapiens
ccgccgcgacgagccagaccgccaaaccagagaaagaaacacccgaacagcgaaggcgcaacagaacagca

SEQ ID NO: 167655 - RNA, 79 nt, Homo sapiens
gacgccggcaggcggggccgcgccacccgcaaacagggcagaagaagacgcaaaacgggcggcaaaggcacccaaggga

SEQ ID NO: 167656 - RNA, 79 nt, Homo sapiens
gacaagagaagggccggcccggggagccaagcagcccggaggagacgacggcccgggacccgaaggcacccgggcggcc

SEQ ID NO: 167657 - RNA, 76 nt, Homo sapiens
acaggacagacagccagagcaggcaaaggaaggaagacacccacacaccacccaacgacccagagaggaaaaccgg

SEQ ID NO: 167658 - RNA, 89 nt, Homo sapiens
cccgcacagcggcccggggaaggaagcggagaacgcgggcaggacagacaaagggagaggcgggccacggcgacccaggccgagccgcg

SEQ ID NO: 167659 - RNA, 79 nt, Homo sapiens
gagaacgcccgggaccgagcacccgccccgggcaccaacaagaaagaagacgagggcgaaggaagaaaaagagaccgag

SEQ ID NO: 167660 - RNA, 66 nt, Homo sapiens
cggaaggagcccagccccgaccaagcagggaagcaggcgaacaagaaaaccaagaacacagagaac

SEQ ID NO: 167661 - RNA, 38 nt, Homo sapiens
gccggaggccaggggaaccaagaaggagcgagggagga

SEQ ID NO: 167662 - RNA, 73 nt, Homo sapiens
caaaaggaccagacaaacaaaagggggcagaggacccgcggccccgcaggggcccgggacgagaagggagggg

SEQ ID NO: 167663 - RNA, 70 nt, Homo sapiens
agccaccgaagccggcaaacgcgaagaggaggagaagccaagacaccgcgaaagagacggggcaccacgg

SEQ ID NO: 167664 - RNA, 86 nt, Homo sapiens
ccgacacgacgccgccggcaggcccgcgcaccagggagaccaccgggcccacaggagcgaccagggaagcccacgccacgcccggc

SEQ ID NO: 167665 - RNA, 81 nt, Homo sapiens
cggcgcgccggcgcgcggcgcggacaggcccaaacgggggagaggcagacagggcaggaaaccccagaaagggggcggagg

SEQ ID NO: 167666 - RNA, 77 nt, Homo sapiens
gagagaacgaagaaggaggaggggaggcaaagcaaggaggggcaggagcacacccccacaggaccccccacagaagg

SEQ ID NO: 167667 - RNA, 73 nt, Homo sapiens
gcccacaaaacccagcacgcacgagccgagcggaagggaaaggcccaagcgaaccgaagcaagccccccacca

SEQ ID NO: 167668 - RNA, 83 nt, Homo sapiens
gcgcgcgcggcgcggcggccgggccccgagacggggacggcgacagggggaccgcggcgcgagggacgcaccgccccaggacg

SEQ ID NO: 167669 - RNA, 75 nt, Homo sapiens
gcgaacagccagaaagacacaaaccgagaagggaacagcaaaacaaaggacaagaaaagagcgagaagaagagag

SEQ ID NO: 167670 - RNA, 73 nt, Homo sapiens
ccgaagccggcccgcccggagggaaaggccgcaaggagaacgcaggagcagggccgagagccaggggaaaggc

SEQ ID NO: 167671 - RNA, 72 nt, Homo sapiens
gacggcgaggggcaaggcggaagcaacaagagacaccagcgggggagcgcaccggaccccaagagggccgga

SEQ ID NO: 167672 - RNA, 68 nt, Homo sapiens
ccagcccgaacaaacgcgccggaacggaaccaaaggcggacagggcaacaccaccaaaggaagaggga

SEQ ID NO: 167673 - RNA, 68 nt, Homo sapiens
gacaggaccaaggaacgggggccagcagagaaagcaaagaaggccaaaggcagagaagacagagcaag

SEQ ID NO: 167674 - RNA, 68 nt, Homo sapiens
aaagagagcgcacgaccgaagccagcacaacagacacccggccagaccagcccaaacgaccaccggcc

SEQ ID NO: 167675 - RNA, 78 nt, Homo sapiens
cgggccacggcacgcagaaggggaaagaaaaagagcccaccaaaaggaacagacggccccaggcggacaacgcaccca

SEQ ID NO: 167676 - RNA, 78 nt, Homo sapiens
ccgagccccggccgccgccgcgagcaccgaaaagagcaagaaaggagcaggcagagcaaggaaacaagagggcgagca

SEQ ID NO: 167677 - RNA, 69 nt, Homo sapiens
cccccaagaaggcaagaagcacgcaacgacccgggcccaagcaacccggccaccgcgagcccggggagc

SEQ ID NO: 167678 - RNA, 80 nt, Homo sapiens
ccaccgccggcgcgggaaacgggcgaagcgacgagccgcgaggagggcagaccagaaacgggggcagagccggccagggg

SEQ ID NO: 167679 - RNA, 62 nt, Homo sapiens
ggagaggagcccggacccgggggagcagcacgccacccccacacccccaggaagcaggcgcc

SEQ ID NO: 167680 - RNA, 79 nt, Homo sapiens
ccaagcccacccacaaagagaacgacagccagacgcaaggcgaggaggaagaacagagagaagaacgagagccaaagga

SEQ ID NO: 167681 - RNA, 76 nt, Homo sapiens
cgggccgcgcgcggacgcaagcagacaaagaaacagccggaaaagcacgagcacaagacgaaaacgacacgccaga

SEQ ID NO: 167682 - RNA, 71 nt, Homo sapiens
ggcaccacccacgcaggggaaaaaagagccggacgacagagcacggcaagaggagcagcggagcgggaccc

SEQ ID NO: 167683 - RNA, 76 nt, Homo sapiens
agcgagcgagggggggcgcgccggaaaccggagcgcgcagcaggacaggcagaaaggccagggaagggacaaccac

SEQ ID NO: 167684 - RNA, 81 nt, Homo sapiens
cccgggcaaacgacccgcccagccccgagagcggggacaggcacaccaccacgcccagggaagaaccgaagacccagaaca

SEQ ID NO: 167685 - RNA, 46 nt, Homo sapiens
cgcggcggccccgggaccaaggagagacaccaggcgccgagaaggc

SEQ ID NO: 167686 - RNA, 81 nt, Homo sapiens
gaagacgagacgcaccccaacacgacacggccagccccgcggcggcacaggcaccccccaaccaggcacaaggcccaacag

SEQ ID NO: 167687 - RNA, 76 nt, Homo sapiens
ccgccacgggccgagacacgcagcggcggccagggaccacaagaggggaaacaacagaagaagcaaggaaaacaga

SEQ ID NO: 167688 - RNA, 58 nt, Homo sapiens
cacccacaccacgacaccgaaaacccaccgagcccgccaaagggcccagaccaagccc

SEQ ID NO: 167689 - RNA, 72 nt, Homo sapiens
ccgcgacagacaccaagggcgcgcgacacgaacaccgaggaggccaaggacccagaagaaccacgcgcaggc

SEQ ID NO: 167690 - RNA, 77 nt, Homo sapiens
ccaaccccgcagaccagcagcaggacagaagggaaagccaaaaaggagcaagggaccccaggagagagcgccgcgac

SEQ ID NO: 167691 - RNA, 76 nt, Homo sapiens
ccagcccagcgaccagcagagaaaaagcgcgacccagcaacaccccagaccaagggaacgcaaaggcaggagcgga

SEQ ID NO: 167692 - RNA, 57 nt, Homo sapiens
ccccgaaggcccacaggacaggagagaaagacgggggcgaggcgaaggagggccgaa

SEQ ID NO: 167693 - RNA, 70 nt, Homo sapiens
aacaaaagaagacccccaccgaacaccccaggccaacaagcagagcacggggccccacccagggcccacc

SEQ ID NO: 167694 - RNA, 70 nt, Homo sapiens
caccaacacagcccccggggacaacagagccgacacagccaagaagcagagcaaaacaggaaaaacagcc

SEQ ID NO: 167695 - RNA, 79 nt, Homo sapiens
agccaacccggagcccgccgcggcccccggcacaggcagcggaggagcccgaccgacccgagcccagaccccacagcca

SEQ ID NO: 167696 - RNA, 74 nt, Homo sapiens
gaaggaccagcacgcgcgcggccccgccacgcaccccccacaccgcaccagcgagcaggcgacccaaaagagcg

SEQ ID NO: 167697 - RNA, 89 nt, Homo sapiens
acaggggagccaacgcaccaggcgaaaacagaacgcccagaaagagaacgcggaggaaacacggggaaacgagaaaagagaaaccagag

SEQ ID NO: 167698 - RNA, 74 nt, Homo sapiens
ggaggacgaaccaccaaccagcagaaggaagccaagacaaagccagacccagcgaaagccgcagcggggagaag

SEQ ID NO: 167699 - RNA, 70 nt, Homo sapiens
cagaaggaacgacgcggaccagaagccagagcgaggacgccggcagaggcgcgaacagggcccacccgcc

SEQ ID NO: 167700 - RNA, 72 nt, Homo sapiens
agacgcagggcgcccccgccaaggagaccgggagagagacgaaggacgcgcaggggcagcagacacggaaac

SEQ ID NO: 167701 - RNA, 70 nt, Homo sapiens
cgagaacgaaagagaccagaggaacacagccgaggcagggcgcaagagaaaacaaaagcaagaaaaggcg

SEQ ID NO: 167702 - RNA, 63 nt, Homo sapiens
ggaaccggaggagaagcccagggagcgcaccccaggaaaccagaacagcaaagagagggcgag

SEQ ID NO: 167703 - RNA, 54 nt, Homo sapiens
ccaagcaaaaaacaaaacaacaagaggaaacgagccaaaacagaagaggcaaag

SEQ ID NO: 167704 - RNA, 73 nt, Homo sapiens
aggagcagaggcagggaaagaaaaacgaaaaaggcagaagaacgcagacagaagaaggaaacaagaggcaagg

SEQ ID NO: 167705 - RNA, 60 nt, Homo sapiens
cgggcggcagcccgagaccgcagcagacccccccaagacacaagacccaccaccccaccg

SEQ ID NO: 167706 - RNA, 80 nt, Homo sapiens
cagcgcaggcggggcccgaggcccgggaaggagcaaacgcgggaagcagggcagagaacacacagaagagaaaaaccgaa

SEQ ID NO: 167707 - RNA, 114 nt, Homo sapiens
cacgaagccggcgcaccccacaccgacaccacggaggaggcggccggagggccggaagaaacgcggaccgcggagggccggagagcgggacccagagcggaaacacaagaacga

SEQ ID NO: 167708 - RNA, 86 nt, Homo sapiens
gggcagcgaggcgccgacaagaccgccgcccggacgcacgaaccaagccacaacccgaggaccgccgggagagccgcccacccccc

SEQ ID NO: 167709 - RNA, 71 nt, Homo sapiens
ggaagacaaccaggagaagaccaaagaccacccacgagaaaaagcagacccgaaagcagggccgaggcacg

SEQ ID NO: 167710 - RNA, 57 nt, Homo sapiens
ccagaaacccaaacgcaccaacagggaggagcaaaaaggacagagcacagagccagc

SEQ ID NO: 167711 - RNA, 66 nt, Homo sapiens
cccaaacccaaaccgaggagcgcccgccccagggagacaaccgagcacaaaaaaggcacccggaga

SEQ ID NO: 167712 - RNA, 74 nt, Homo sapiens
ggaacacccagacccacggcagagccaagacaggaacgagaggaaaaaagccgcaagagaggagaacagaaaac

SEQ ID NO: 167713 - RNA, 81 nt, Homo sapiens
cgagccggccggggcccccccggccggcagggggacgggggccgaggccggaagaaaacggggagcccgaggcaacgccca

SEQ ID NO: 167714 - RNA, 66 nt, Homo sapiens
ggcaaacacaaaaacaccgacacagaggccccagcaaaggaaaggggccggaggaacgaaacagca

SEQ ID NO: 167715 - RNA, 78 nt, Homo sapiens
cggagggcgccagacggggccggaggcggggaggagcccggccagcccgaggacagaagagggggaaccgacacgcag

SEQ ID NO: 167716 - RNA, 76 nt, Homo sapiens
gaaccacacaacaaacaaaccacggaaagaccgacagccacagacgagagggcagacccggacccccacagccccc

SEQ ID NO: 167717 - RNA, 70 nt, Homo sapiens
ccaggcagacgccaccagggccaaaaccacaccaaaaccaagggacagaaacagccaagcccgaaagggc

SEQ ID NO: 167718 - RNA, 63 nt, Homo sapiens
gaacaggcgcccaaaagcccacggcgagggacagaagagaaaccccaaggcgcagacaccgac

SEQ ID NO: 167719 - RNA, 86 nt, Homo sapiens
ccagaagggcacggagcgaccacccacccaggcagggcccccccagagccaaggacaacacagccaagcggcagaaggcggagaga

SEQ ID NO: 167720 - RNA, 87 nt, Homo sapiens
aaaaacccaaaaagaggggggacagcagcagcagacggcccccacagagagcacacaaacaaagcgaaaccacggaagaaaagggca

SEQ ID NO: 167721 - RNA, 79 nt, Homo sapiens
ccgccgccccgaaaccaccgcgagcggaacagcagagaacacaacacaggacaagcaagcccagagcgccggacgaagc

SEQ ID NO: 167722 - RNA, 87 nt, Homo sapiens
caggacccgggccgcagcagcccccaggcgagcggaaggaggagaaaaaggcggcgccccgcccgaggaggagaggagaaggagcag

SEQ ID NO: 167723 - RNA, 73 nt, Homo sapiens
gcggccaggcgacgggaagcgaccgcaggcgggcccccgaccgggcaagccccggcccgaggcccaccccagg

SEQ ID NO: 167724 - RNA, 70 nt, Homo sapiens
gacacacgggccacaacagacaccccaaacaaagcaggcccagcggggcgagggagaacaggggaccagc

SEQ ID NO: 167725 - RNA, 80 nt, Homo sapiens
caagagagcccacagacccagccacgaaggcaaccagaggccaggccagagacaccccaagccgcagacccggaaccggc

SEQ ID NO: 167726 - RNA, 85 nt, Homo sapiens
cggggcgaggacccccgagccagccagaaccgaggacgcagccaggagcggcggcccaggagcggagcgggagcaggcgggagca

SEQ ID NO: 167727 - RNA, 39 nt, Homo sapiens
aacggggcacgaccgagggcaggaggagcgaaaccaggg

SEQ ID NO: 167728 - RNA, 60 nt, Homo sapiens
agcggagccaaaagacacccgaggagaggaagagagggaagggacgcaaaaaggaagccc

SEQ ID NO: 167729 - RNA, 63 nt, Homo sapiens
agacagaaggagaaaggaggaaaaacagccagggccgggcccagcgcccgaccagccgccccg

SEQ ID NO: 167730 - RNA, 95 nt, Homo sapiens
ccggcccggacggagccggcggcgcggccggcagccggcagcgcagcggggcacgaagaacacaaagcaaaaaggaaaagaagagaagaagaggc

SEQ ID NO: 167731 - RNA, 107 nt, Homo sapiens
ggacccacgcagcaggagcgcccgcccgagccagcccgccagcagccccagccaaagggcccggccaggccccaccgccacaagcaggggaacaccgccaaccccaa

SEQ ID NO: 167732 - RNA, 80 nt, Homo sapiens
cggaccgggccccggggccgaccggcggcgcaggcggagcgggaagggcagagggcaccacagacaagaaagcccccacg

SEQ ID NO: 167733 - RNA, 64 nt, Homo sapiens
acacaaaaacgaaccacgcagaggggaacagaaggcacagagaacaggcccaagaaaaaaaaag

SEQ ID NO: 167734 - RNA, 77 nt, Homo sapiens
acagcaagggaaagaacaggaagggaagacccgagaaaagaaaaagagggagaccacaaagaagccgggaggagaaa

SEQ ID NO: 167735 - RNA, 78 nt, Homo sapiens
gccgcagcgcagcgccagccagaccacccaaaggaggcaaaagcaagcaacggagaacacccaagaagaaagacacac

SEQ ID NO: 167736 - RNA, 42 nt, Homo sapiens
gggccacagagccgcagaaagggacccaggagaaggaccaga

SEQ ID NO: 167737 - RNA, 75 nt, Homo sapiens
acgcacacaccaagaagcgccgcaggaggagaaagacgaagggacaagagaaaaaaagggcgggcgaacaaaaag

SEQ ID NO: 167738 - RNA, 80 nt, Homo sapiens
gccacggacaccaggcaggccagagcagcaccaggccagagccagaacaacccgaacaagagaaggaggcggagagccag

SEQ ID NO: 167739 - RNA, 77 nt, Homo sapiens
acaggacgaagagaacgcccgggaccgagcacccgccccgggcaccaacgcccccacagagagcacacaaacaaagc

SEQ ID NO: 167740 - RNA, 84 nt, Homo sapiens
ggggacggaggcagagagagaagagagacgaggacgcgcacaggaaaggacgcggaacaagcaggcagccaggcagcagaaggc

SEQ ID NO: 167741 - RNA, 64 nt, Homo sapiens
ggagagagggagagccaaagaaggaccagaggacgcaccagaagacagggcaaccagaagcccc

SEQ ID NO: 167742 - RNA, 77 nt, Homo sapiens
agacaaaccccacccggaccaaacagaaccaccggaaagccccacagaccaccccacacagaccgcgccccaggcga

SEQ ID NO: 167743 - RNA, 54 nt, Homo sapiens
caggccaaagaacacaaaaaggcccacccaagacccgaagaagagcagcaccca

SEQ ID NO: 167744 - RNA, 46 nt, Homo sapiens
ggaagggaggaacaggccaggaaccggaaggacaggagaaacaggg

SEQ ID NO: 167745 - RNA, 74 nt, Homo sapiens
gcccgaaacgggggaagaaggagagaaaaggagcgccccacagcaaggcgggcaggagggcgcacgcccacaga

SEQ ID NO: 167746 - RNA, 90 nt, Homo sapiens
ggccagccccgcaggggccgaccgcaacacggcgcggaaaacgcgaacgggcaagcggacgggcgcaaaccagggcggcgggacgccgaa

SEQ ID NO: 167747 - RNA, 77 nt, Homo sapiens
ggaaccaaaagcagggaaaccggagccggaaagccaaggacaacagggcgacccacgcaccgggcggcccagaagga

SEQ ID NO: 167748 - RNA, 51 nt, Homo sapiens
gccagcccacagcagaaggaagaagagagggcgaaggaggccacacagaag

SEQ ID NO: 167749 - RNA, 87 nt, Homo sapiens
ggagcacacaagcaaagacgggccaccagacccaccagccaaaacagagggagacgagaaaagggccgagcacaagccaagaaggcg

SEQ ID NO: 167750 - RNA, 59 nt, Homo sapiens
acagaaacaccagacagcgacaggaccgagggcaccgcgcccgcagacacaccccaaac

SEQ ID NO: 167751 - RNA, 50 nt, Homo sapiens
gaaacagccaaaacagcacaacagcgacacccggcacaccacaaaggccg

SEQ ID NO: 167752 - RNA, 56 nt, Homo sapiens
gcgcaaaaaaagcccgccggccgacaaccagcgggagaacgacaggagggggccag

SEQ ID NO: 167753 - RNA, 86 nt, Homo sapiens
cggcggcgggacggcggccccgcgcagcccccggccgcagcgcaggcagcccagcaggcgacagggggaccgcggcgcgagggacg

SEQ ID NO: 167754 - RNA, 65 nt, Homo sapiens
aaaagacaagggggcaaaggggagcccggagcaaccaggagcaaaaggcaaaacaaagcaaaagg

SEQ ID NO: 167755 - RNA, 77 nt, Homo sapiens
cggaaggacaacagcccgacaaccagggaagcagagagcaaccaagcaccaccaagcccacagcagcaggaacaaga

SEQ ID NO: 167756 - RNA, 51 nt, Homo sapiens
caagcagaaccagagcaagaaaacaaggacccaaagacaggaccacgcacc

SEQ ID NO: 167757 - RNA, 74 nt, Homo sapiens
gcaagccgcaagagagaaggaaaccagggagcgcaggcaggcagccgaaacaggacccaggaagagccacgcac

SEQ ID NO: 167758 - RNA, 78 nt, Homo sapiens
gacgccaccacggccacacagacagcgaccacacgaggcccagagagggcaccgggaggacccccaccaagaaggcag

SEQ ID NO: 167759 - RNA, 78 nt, Homo sapiens
gcagcagcccccaacagaaaaaagagagaacccaccgcaagagaccaaaggccaagagcaccgcagccaccagcccgg

SEQ ID NO: 167760 - RNA, 76 nt, Homo sapiens
aagccgccgggcgccgcgccgggagaaaccagaggcaagcgacgggaaggaccaccaaacccagccagcgcaacac

SEQ ID NO: 167761 - RNA, 82 nt, Homo sapiens
gggccagaggcagaaaacggacggaagaaaaggcggccgggcggagaacggaaaagcaccaggaagcagagaggaccgcaga

SEQ ID NO: 167762 - RNA, 56 nt, Homo sapiens
gcaaccaccaggcagagacagccaacaaaaacaggcgaggcagacggcagaaaaca

SEQ ID NO: 167763 - RNA, 65 nt, Homo sapiens
cccaaaacccggaagagcgccccaggagaaacaagccgaagcgcccagcaggcaccaaggccggg

SEQ ID NO: 167764 - RNA, 79 nt, Homo sapiens
acaagaaagcaccgcagaagaccaggcaacacagagaacagcccgccgagggccgggaaccgcagagaagagcaggggg

SEQ ID NO: 167765 - RNA, 81 nt, Homo sapiens
gagcggaagccgaggcagaggcgacacaagaagagggcggagcggagacgggagaagaaaagaccgccggaggaagagcgg

SEQ ID NO: 167766 - RNA, 58 nt, Homo sapiens
cacagcccaagaagaagggggaggagagcggcgacacacggggagcaagaaagaagca

SEQ ID NO: 167767 - RNA, 109 nt, Homo sapiens
gaggcgcgccgcacccggacggaccgccacgcgcccgggagacgcccgcgccgccggccaagacaaggggcgcagagcggggggacaggcgcaagaccggagaagcagg

SEQ ID NO: 167768 - RNA, 73 nt, Homo sapiens
caaacgcacacgacagcaacaagacacggagcaaggaggaaaacacacggaggcagcacggcaggagacgagg

SEQ ID NO: 167769 - RNA, 77 nt, Homo sapiens
gacagaagcgaacccacgaagggggcaaggagacaaaagaaagggaccgggcagggaaggcggagagaacgaaagaa

SEQ ID NO: 167770 - RNA, 91 nt, Homo sapiens
cgggggaaagggagacggcgagacgcgcagcgccggcgcccgggagacccaggaggagcccgcaggacgggcccagggaacacgggagccc

SEQ ID NO: 167771 - RNA, 74 nt, Homo sapiens
agacgaggaagaaccaaacaagaagacccagagagagggccagcgagacagaccgaaacccaaagaaaaggagc

SEQ ID NO: 167772 - RNA, 90 nt, Homo sapiens
caccacaaaaacgaaggcggcggggacgcgcgacaagggagacggggccggaggccgggaaccggggcaggaccacaccagagccgcacg

SEQ ID NO: 167773 - RNA, 75 nt, Homo sapiens
accgaagcccgcgcccacagcgcgacaagccagaaaagagcgcaccagggaagggaagaaacaaggagccggagc

SEQ ID NO: 167774 - RNA, 89 nt, Homo sapiens
cgagcgggggcccggccggagagagcgaagcggaggccaggaagcggagaagccgagagaaggagcgaagaaggaagccaagcggaaga

SEQ ID NO: 167775 - RNA, 82 nt, Homo sapiens
cgccacaaagaagggaaaaccagcgagggccgaaagaccagagaagccggaacaaagaacaagggccagaagcagcgaacag

SEQ ID NO: 167776 - RNA, 63 nt, Homo sapiens
ggaaccagcgcaccgggaagggaagaccgagagcgcaaaagcagaccggaaaacccaccggca

SEQ ID NO: 167777 - RNA, 81 nt, Homo sapiens
cgacacccaccccgggaggccagccacccaaagccccaaggagaagaacggagacggacaaaccggcgaccacacacgggg

SEQ ID NO: 167778 - RNA, 55 nt, Homo sapiens
gaaaagaggcggcccacccccccggccgcgaggggccgcaaggccaggcgcgcag

SEQ ID NO: 167779 - RNA, 103 nt, Homo sapiens
ggccgaagaacaggagcaggaaccaggacagcccgaggaagaggaggaggaagaacgggagcagaaaacagcccccgcagaaaagcgcggaaaaggaacagaa

SEQ ID NO: 167780 - RNA, 54 nt, Homo sapiens
gcaagaaaaggaggagcggcaggagggaaagcaaggaaacgcccccccagaggc

SEQ ID NO: 167781 - RNA, 71 nt, Homo sapiens
ggcacaaagcgcaggaacggaccaagaggcacagagcggccgcggacccaaaccgcaccgcggaggaaccc

SEQ ID NO: 167782 - RNA, 78 nt, Homo sapiens
ggaaccagcaacaagccagggcgaaaccaagaaccacagacggccaaaaacgagaaggaggaagcgaaaaacccccac

SEQ ID NO: 167783 - RNA, 77 nt, Homo sapiens
ccgcggccaaacccccccacccacagagaaagggcgcaaaaagaaagaaaacaaaagccagccaaaaacagaccgaa

SEQ ID NO: 167784 - RNA, 58 nt, Homo sapiens
ggagcacgcaggcagacacgcaagaagaagggcgacaaggaacgccaggcggacggcg

SEQ ID NO: 167785 - RNA, 65 nt, Homo sapiens
gccggcccgcgggggagccccgggagccgcacggcacgcagcacgggggcaggggccgacccaga

SEQ ID NO: 167786 - RNA, 80 nt, Homo sapiens
ggacacccggagcggaggacaggcggagcccggcacgggcaaacagagcaggcagggaaccgccaaggcagaggagcaga

SEQ ID NO: 167787 - RNA, 40 nt, Homo sapiens
gaaaaaagacccaaccaacgcaggccaaaacgaaggagac

SEQ ID NO: 167788 - RNA, 71 nt, Homo sapiens
cacacagcgaaagaggagccgcaccacagagacgaagaagaaccggaacaacccaagggacgaggcaccag

SEQ ID NO: 167789 - RNA, 67 nt, Homo sapiens
ggggaggccccagcgcagcagagcgccaagacgaaccaacggcccgggaccaccggcgacagcagaa

SEQ ID NO: 167790 - RNA, 73 nt, Homo sapiens
acaacggcacagcggggggggacaagagggcaagcgaaaaaggaccagcccaacggggacccagcaggaccaa

SEQ ID NO: 167791 - RNA, 70 nt, Homo sapiens
cggacaaaggaaggagagggaaaagcacacaggaagcagaggaaggcaaacagggggcaccgacccgcac

SEQ ID NO: 167792 - RNA, 75 nt, Homo sapiens
acgagcggaggacacccaacccgggcacagcccacaagcgaaggagggaggaacccaccggggaggaggggaagg

SEQ ID NO: 167793 - RNA, 55 nt, Homo sapiens
gagaacgagaccccacacgccaccgaaaaggaagaacccaggacgagaaaaaaca

SEQ ID NO: 167794 - RNA, 78 nt, Homo sapiens
gcaggacacaaacccagaccagaccagacccggagagaacagcaaagaaaaccagccccagccaggcccggaacggcg

SEQ ID NO: 167795 - RNA, 61 nt, Homo sapiens
gccgagagcgagaaacaaagccacccagccaagaaggggagcagcccgacgaaagcccgag

SEQ ID NO: 167796 - RNA, 56 nt, Homo sapiens
ccggccccggagcggcggaccccggcaggaagcaaagagaggagagagaaacaccc

SEQ ID NO: 167797 - RNA, 82 nt, Homo sapiens
agggaaagaacacaagaacagcaaaacgagaacagagggggcggaggaaagagcacacgggagcgcccccgagagaaccaaa

SEQ ID NO: 167798 - RNA, 77 nt, Homo sapiens
ggccgagcgggcacgagcggaccccgcccaggccgggagcgcacaaggccgaggcccaccgcgcgaccccaaacgcc

SEQ ID NO: 167799 - RNA, 91 nt, Homo sapiens
ccgggcaggcggagcagggccggaccccgcggcgcccccggcccggagcaacgagcgcagcgccgaacaccccaccagaccacccagcaag

SEQ ID NO: 167800 - RNA, 72 nt, Homo sapiens
ggagagaccgcaccaacggcaagagcaccacgaagaaacgcccagaggagccagaaacagccaaacaacaga

SEQ ID NO: 167801 - RNA, 75 nt, Homo sapiens
aagccaccgggaaagcgggaacaacaccgccaaggcagcaggaggagccagagcagggcagaagacaagcaacgc

SEQ ID NO: 167802 - RNA, 72 nt, Homo sapiens
gcgccaagggcacgggaagaccggaggggacgaagaacgggagaggcaaaaaccaagggaaagaggagaggg

SEQ ID NO: 167803 - RNA, 70 nt, Homo sapiens
gccccgccggccgcaggaaaccaaggcagggggaaagagcacagcagaaacacacaaaccaagggagaca

SEQ ID NO: 167804 - RNA, 79 nt, Homo sapiens
accgaccggccaacgacgccccaaggcgccaaggaggggacccccaggcgccaaaagccagaacaagaagcggaggcgg

SEQ ID NO: 167805 - RNA, 69 nt, Homo sapiens
agaaagacccaacagaaacacggaccgaaagagggccaaagagggaaacggccaccgcccaaggaagca

SEQ ID NO: 167806 - RNA, 79 nt, Homo sapiens
ggaaggccgagcagggaagccggcaccccaggccccaccggcacccaccgaggcaggggggagaacaggacgcaacgag

SEQ ID NO: 167807 - RNA, 83 nt, Homo sapiens
gccccgccagcagcacgggaggccgcccgcccgggcgcgccaggcacagccaagagcggaccggcagcggccagcgcagcggc

SEQ ID NO: 167808 - RNA, 73 nt, Homo sapiens
ggggaccagcacccgcagggaggcagcagcgcgggagaaaaggcccagcaaaaacacaggcaaaagaagaacg

SEQ ID NO: 167809 - RNA, 72 nt, Homo sapiens
ggcccggcggagaggggggcccgccacgggagagcgaaggcacgagcgcccagaagaggaacccagacccac

SEQ ID NO: 167810 - RNA, 77 nt, Homo sapiens
caggccaccacagaaacaaaagcaacaaagaggggcaccacaagccgaacagccagccagcaaaagaacagcagcac

SEQ ID NO: 167811 - RNA, 78 nt, Homo sapiens
ggccggacaccgcacgcccggcccgggacccacgaggaagcggccgcggcgaaccccagagccagcgggcagacgaac

SEQ ID NO: 167812 - RNA, 75 nt, Homo sapiens
gacccccagacacacacacccaacccaaaccaagggcgaaaagccaggagcaaaagacgagcgcgacgccaccag

SEQ ID NO: 167813 - RNA, 74 nt, Homo sapiens
gggaagaaggcgaggcaccggaacagacgcaggaagcccccaggacccaaacagagccacaggaaccagccggc

SEQ ID NO: 167814 - RNA, 74 nt, Homo sapiens
gaccaccgcagcaccagcgcgggccggaacaagcagaaagcacgaacaacgagaacaagacacgagcaaacccc

SEQ ID NO: 167815 - RNA, 78 nt, Homo sapiens
ggcagaggcgcaaggcggagaacacaggaaaacaacaccagggcaagaagagcagcagaaaacaggcagaaaagcaga

SEQ ID NO: 167816 - RNA, 73 nt, Homo sapiens
gaagacggaaaaaacagacacaaggggggcccccggagagacagaaccaacaccagagaagcgccgcgaacga

SEQ ID NO: 167817 - RNA, 100 nt, Homo sapiens
caaggacacaggacaccgggaggggagagaggacgggagaccagcagcccacagaggaacacaaaaaacaggcgacggggaaacaccaggaggagagccg

SEQ ID NO: 167818 - RNA, 107 nt, Homo sapiens
agggcaacgggaaggcaagaaaaggaccgacaccccaaaaccaagcccaccacgagaagggagaaccggggaaaggcgacgaccggcacgggacccgccgcggcccg

SEQ ID NO: 167819 - RNA, 75 nt, Homo sapiens
gcacgagggagagagagggaccgaaaccaccagagcaccaaggagacagacgagccggcgcagaaaagaaggagc

SEQ ID NO: 167820 - RNA, 64 nt, Homo sapiens
gcgaggaaaggccgaggagccggagccgcaggcgaaggggagcaagggagaaaagcaaagggaa

SEQ ID NO: 167821 - RNA, 77 nt, Homo sapiens
gacccggaacacccccccgggaggaaggccaaaacgcaaggcagagcgaccggaagcaggcccaggagaaggaacaa

SEQ ID NO: 167822 - RNA, 72 nt, Homo sapiens
aagaggcagcaggcccaacgacaccagaaggaagcagagcgaagaaccaccacgacgccaaccgccacggcg

SEQ ID NO: 167823 - RNA, 69 nt, Homo sapiens
cgccagcggcacggccggacccgcagggcaacaagagaggagaccacaaccaccagaagaccggcgaaa

SEQ ID NO: 167824 - RNA, 84 nt, Homo sapiens
ggacacaggcagcaccaccacacccaggggcagagagaagagcacacagaaggccaggagcgacagagcggggaacacgagaca

SEQ ID NO: 167825 - RNA, 98 nt, Homo sapiens
gccgagggcgccccggcccgcgccagggagacaggcgccaaggggagaaggaagggaccaccaacggagcagagaaggcaaaacggaaagaggcagag

SEQ ID NO: 167826 - RNA, 69 nt, Homo sapiens
aaaaggaacagagaagacacaaaacgagcgcaaacgagaacagcacgcacccaagacgccgagacaagg

SEQ ID NO: 167827 - RNA, 61 nt, Homo sapiens
ggccccagccgcgccggcccgggcacgcagcccacgcccagaggaaagcaccggggaagaa

SEQ ID NO: 167828 - RNA, 64 nt, Homo sapiens
cgccaccgccgaccgaagccgcaaaaggccggggacagaaagggaaacggacggaaggaccggg

SEQ ID NO: 167829 - RNA, 87 nt, Homo sapiens
acagccggagcgaccccccagaccggccgccccccccccacggcacccccaccagaaggcagcggaggaggagaaagagaggacccc

SEQ ID NO: 167830 - RNA, 74 nt, Homo sapiens
cgaacccagaggacacgcgaaacacaaagcccaagcagaggacacacgaacgagaacccgggaggagaaggaca

SEQ ID NO: 167831 - RNA, 65 nt, Homo sapiens
cgccagcggggacaggcagcgaacaccggaaacacagacgcaaccgcccaggcagacaggaaaag

SEQ ID NO: 167832 - RNA, 87 nt, Homo sapiens
cccggacagcccgcggagccagacgccgggccgcaagacagcccgggacaacaccgagggggagacaagggacggcgaaggaacggg

SEQ ID NO: 167833 - RNA, 75 nt, Homo sapiens
gaccccgacacaacagaagaggagcacggaggagccgaccgcagcgagggaccagcggcggggaggcccgaccac

SEQ ID NO: 167834 - RNA, 80 nt, Homo sapiens
aagcccaggacgagacacacggcacacaccagcaggcgcagaacgagggacaagaacagaacccccacagcagcacgcag

SEQ ID NO: 167835 - RNA, 61 nt, Homo sapiens
gaaagaccagcaggagccgcccgaaaagaccaggccaaagcgagcagaaggaaccccccga

SEQ ID NO: 167836 - RNA, 63 nt, Homo sapiens
ggagaagcagcacggacaggagaggaagacgaggaagcagaagaacaccaagcccaccaacaa

SEQ ID NO: 167837 - RNA, 66 nt, Homo sapiens
cgaggcgagacggaaagaaggagcgacgaaaggaagaagccaggggcgcggggcggggaggcggga

SEQ ID NO: 167838 - RNA, 73 nt, Homo sapiens
ccaagagaagcgcaagagcaacaccccaccccaaggaagaagaagcggccgcgagaaggagcgccgggaagaa

SEQ ID NO: 167839 - RNA, 70 nt, Homo sapiens
acgaggacaaaagcaacgaccgagacagaggcacaaaaggagaaagcagaagaaacaggagaaagcaaaa

SEQ ID NO: 167840 - RNA, 53 nt, Homo sapiens
ggcggcagcccgagaccgcagcagggaagaaggccgaagaagaacccccggcc

SEQ ID NO: 167841 - RNA, 80 nt, Homo sapiens
ccaggcccagcagaagagcgaaccagcaggcaacaggacaacgagggaaacaaaggcaaaccgacaccagcgacacaagc

SEQ ID NO: 167842 - RNA, 79 nt, Homo sapiens
ggaagcgacagagagaggcaggacccgagagcagccccagaggcccggaccaggcagaccgcccggaccccccaccaac

SEQ ID NO: 167843 - RNA, 78 nt, Homo sapiens
ccacgaaccaagagaggcaaaggaagaacaacagaggaccccaggaaggagcaagacgagaacaacgacaaaagaagg

SEQ ID NO: 167844 - RNA, 78 nt, Homo sapiens
gaagggaggcaaagaaaaggagaaaagaagccaaagggacacggagacacgggaagccgaggagaaaagaaaaggaca

SEQ ID NO: 167845 - RNA, 75 nt, Homo sapiens
gcccccggacggcgcggaccccgacggcgccggccgggggagaggaagaagcgcagaaccagcgaggcaaaccac

SEQ ID NO: 167846 - RNA, 71 nt, Homo sapiens
cgcacacacagcacgggccaggcaacaccggcggccagcaccggacaggagagcaccagaggcgcccgaga

SEQ ID NO: 167847 - RNA, 68 nt, Homo sapiens
caacaacagaacaccaaccaggcgacggaacgcgaaaagaccaggagaaggaaggaggcggggcaagc

SEQ ID NO: 167848 - RNA, 54 nt, Homo sapiens
aaggcgaggccgaggccaaggacggcgaagagccaagagcagagaaaagaagac

SEQ ID NO: 167849 - RNA, 30 nt, Homo sapiens
gcaccccaggaaaccagcccgaagggaaac

SEQ ID NO: 167850 - RNA, 67 nt, Homo sapiens
aaaagaagcccggacaccgggagagacaaaggggcaagaccaggccgccaggagacagaccgacagc

SEQ ID NO: 167851 - RNA, 41 nt, Homo sapiens
ggccaccggcggagcgagacgcgcgcacggccacgccaacg

SEQ ID NO: 167852 - RNA, 70 nt, Homo sapiens
cagaccagagaggagacagcagacgcaccaaagggacagaaccaaagggcgaacagagccagacggccac

SEQ ID NO: 167853 - RNA, 77 nt, Homo sapiens
ggaccaccggggaaacagcagcaccaaaacgaggacagaagccgaggccgccagcgccaagaaaaaaacaaggccaa

SEQ ID NO: 167854 - RNA, 90 nt, Homo sapiens
agaacagcacgaccagaggggaagccaagcaaacgcagaaggacgcccacgagcaaccaagaggaaggaagaaaccgaagacagggggca

SEQ ID NO: 167855 - RNA, 78 nt, Homo sapiens
acagcgaccagggcaaccgggaccagcgagcgacaggaagcgcagaaaggaagagaagaagaagcagaaagggcagga

SEQ ID NO: 167856 - RNA, 67 nt, Homo sapiens
ggagccacacgcccagcagccaccaacacccaaagggcgagaggacagccgacggaccagagcgagc

SEQ ID NO: 167857 - RNA, 72 nt, Homo sapiens
aaagcgaaccaggcccggaccagcccgggcgcccgcacggacccccagccgggcgaggcgaggccacccggg

SEQ ID NO: 167858 - RNA, 68 nt, Homo sapiens
ggcagagacaagcccccccaagaacaccgaagccaaaccagacacggagcgcgaaacagagcgccccg

SEQ ID NO: 167859 - RNA, 83 nt, Homo sapiens
gcaaagcagcggcgcagcccgggcccgggcgcgccaggcacagccaagagcggaccggcagcggccagcgcagcggccggagc

SEQ ID NO: 167860 - RNA, 127 nt, Homo sapiens
aacccagcgccaccaccacgccagccgcaccagccgcccaagccgcacagccgcggcggcagcagcaggagaggacagacaagcagacggggccgccacacgcccaaccagggcaccgcaagcggga

SEQ ID NO: 167861 - RNA, 69 nt, Homo sapiens
ccgacaaaacagggcccacccgaagcggccagccgcaggaaccggcgaaggagaaccggaggaccagcc

SEQ ID NO: 167862 - RNA, 77 nt, Homo sapiens
cgcgaggcgagggcagagccgcggggcaagacgggaccccagcccaacgccaaacgagccggacccggaggacggaa

SEQ ID NO: 167863 - RNA, 67 nt, Homo sapiens
gcccgacacgcaaacaccaggaacaccagcgcagaggccagagcaacagaaacgagggagggcaacg

SEQ ID NO: 167864 - RNA, 70 nt, Homo sapiens
agaagaggagcgaccaaaccgaggaaaggaaagaaagcacgagacaacgaggaaaaagcccaggaccaac

SEQ ID NO: 167865 - RNA, 72 nt, Homo sapiens
gcccagaacagaagcgcccggagacgacaaacaaccagacgcacagcacccacagcacagccccggaggagg

SEQ ID NO: 167866 - RNA, 79 nt, Homo sapiens
cgggcgccagccccgcgccgggcccgccgagcccgacagcgagggcacaacacgaaggagaaagccggagccacgaccc

SEQ ID NO: 167867 - RNA, 74 nt, Homo sapiens
gggaccccaagaagaccacagagggacccggacaaccagaggcagccagcagggggaggcaccgggaaaacgca

SEQ ID NO: 167868 - RNA, 69 nt, Homo sapiens
gagcagcccaggaaccacaggcgcaaaaaccagacaccccacaccaccacccagacgaccaaaagggca

SEQ ID NO: 167869 - RNA, 55 nt, Homo sapiens
cgccgcacacgaggagccgaaaaggaaaagcccaccagaagaaggaagcggcaag

SEQ ID NO: 167870 - RNA, 87 nt, Homo sapiens
acagcaccgggagccgcagaccggcggcgcggaacccggacgagacagcggggcagacccaaaggaaacgcacgaaagaaacaggag

SEQ ID NO: 167871 - RNA, 51 nt, Homo sapiens
ccccgccccccccgcgggaaagcgcaggcaggagaaggacagcagagccac

SEQ ID NO: 167872 - RNA, 76 nt, Homo sapiens
aggcgcaaaaaaagcccgccgggacgaacagcggggacgccccagcagaccgcccaggagaggaaagcaggaggaa

SEQ ID NO: 167873 - RNA, 66 nt, Homo sapiens
agaaggaccaagaaccagagaaggacggagaagcgaaagccagaccggcaagagcggaagaaagca

SEQ ID NO: 167874 - RNA, 73 nt, Homo sapiens
ccgagccagcgccggccgcgcgccgcgcccgcgccacagcccgcagggaaggagcaagacgagggaaacacaa

SEQ ID NO: 167875 - RNA, 78 nt, Homo sapiens
gcagggaggccacaggggccgacaacacagagcaaggggagccgccaccaaaagcagacggaaaacccacggggaaga

SEQ ID NO: 167876 - RNA, 68 nt, Homo sapiens
agagcccagggccgccggggccaacagccccaaaagcacgcacgaaaccggcaagccagcggagggga

SEQ ID NO: 167877 - RNA, 87 nt, Homo sapiens
cgagaggcgggcgaggcggcccagcggcggcagccaccaggagagaacgccgcgccgcgcgacaacggcccggcaggcaaggccggc

SEQ ID NO: 167878 - RNA, 76 nt, Homo sapiens
gcagccccgcggccgagaggcagcgaacggaacagccccaagccggaaacccaggaacggaaacagaacggaacag

SEQ ID NO: 167879 - RNA, 83 nt, Homo sapiens
gcagaagcggcgcaggggccggccagcgacagcagcacacaagaaacggcccaagagaccaagggagaacacaggaaggaaag

SEQ ID NO: 167880 - RNA, 70 nt, Homo sapiens
agcgcacgagaacaggaccaccaggaaacgcgcaagacgcccaagagaagagcaccccgcggagccccag

SEQ ID NO: 167881 - RNA, 71 nt, Homo sapiens
aggccgggaaccgaccgcggcgcgccacccggccgcagcaaaaaccaggccgggagaccaccgaggaacac

SEQ ID NO: 167882 - RNA, 73 nt, Homo sapiens
acagcaacagcaaaagaagagaggggagggaagagagcccaagggagcagggcacccgaccccaagacccgac

SEQ ID NO: 167883 - RNA, 75 nt, Homo sapiens
acgaggaaaaagccaaaggggaccaggaggaaccagagaaggagaaacagcagggccaaaggcaagaacccggga

SEQ ID NO: 167884 - RNA, 78 nt, Homo sapiens
cccgggaaccgccgggaacccgccagcaccaccgcccaaccccagggggagagacaaccagagcggaaagggagaaaa

SEQ ID NO: 167885 - RNA, 75 nt, Homo sapiens
ccagaacagcccaagaggccgaccgagacgggcggagaggagaagaacaaggaaagacgcagcagagggagacca

SEQ ID NO: 167886 - RNA, 62 nt, Homo sapiens
agggagaccaggacagaccaagagaaaaggacccgcaaagaaaaagccagccgaggacggga

SEQ ID NO: 167887 - RNA, 71 nt, Homo sapiens
gccgaggcgggcgcaagagaaggcaccaagagaaaggaagcggaagagaagaccggcaacaagaaaaaaag

SEQ ID NO: 167888 - RNA, 60 nt, Homo sapiens
aggaaagcaaaggagcagggaggcccccaggggccgggaacagcgcgagcagaggcaaga

SEQ ID NO: 167889 - RNA, 71 nt, Homo sapiens
aggcgcccaaaacaagcgaagggcaaacagcacagaagaaggcaaagaaagaacgcagaacagcagcaaag

SEQ ID NO: 167890 - RNA, 83 nt, Homo sapiens
gaagccccgacaccaggggacacccagaagcggcgccgccggcaggggcaacaccggaggacagcaacccccaccgaacaaag

SEQ ID NO: 167891 - RNA, 79 nt, Homo sapiens
cacagccagaaaggggggccgacaggcgcccacacccaagcagcaagccccagccaagacccaccaggcaggggaagaa

SEQ ID NO: 167892 - RNA, 76 nt, Homo sapiens
gcccgaacaacccaggaacagcaggacggccagagagccgcagcaaagcgagagcccccagcagccaagccggcgc

SEQ ID NO: 167893 - RNA, 58 nt, Homo sapiens
acgaaagaggacacgggaagaacaaagacagaccgggaagaaagcacgggaaaaggcc

SEQ ID NO: 167894 - RNA, 80 nt, Homo sapiens
ccaagacacaagccaagcccagaacccccccaccccacagccggagcaccagaaagaccagaggcaacagggacaggcca

SEQ ID NO: 167895 - RNA, 81 nt, Homo sapiens
cagaagcccggcggaagcccccgggcaacggacacaagccccggccaccgccggcacgcacagggagaaagggccgccaac

SEQ ID NO: 167896 - RNA, 63 nt, Homo sapiens
agcagagaaaggagcagaccagaaggcgcagagaggaaccaaagaagaccaaccaaaaagaac

SEQ ID NO: 167897 - RNA, 79 nt, Homo sapiens
cccgggaggcacgaaggcaccgggcccagcacagccagcaccgcacgcccgcaagggagaaacagaaaaacgcggaaac

SEQ ID NO: 167898 - RNA, 78 nt, Homo sapiens
agggccgccaacggccccagcacacagccagagagccaggaagcaaggaggcaaaccgacaccagcgacacaagcgcg

SEQ ID NO: 167899 - RNA, 77 nt, Homo sapiens
caggagcaaagcagagcgggcaggacaaccaggggaccagagaggacggcaccagccaggagcagggcagaaaagaa

SEQ ID NO: 167900 - RNA, 78 nt, Homo sapiens
acagaagaacgagcagaaagaacagaccacccgaaagccaggagggggccacaccgaacccagccgggaggccaaggc

SEQ ID NO: 167901 - RNA, 70 nt, Homo sapiens
ggacgcggccaagggaccaaggggaaacaaaccgcccacgacaaagcagccgcacaccacgagagggcgg

SEQ ID NO: 167902 - RNA, 84 nt, Homo sapiens
gcgcgaagcacagcagagcacgccaccgaccagccaaaagcagcgaacaacccagccgccagcccagcccagcccagcccagcc

SEQ ID NO: 167903 - RNA, 78 nt, Homo sapiens
gcgcccccgggggcccgacgcacacgggggcggacaccacaagaagggcgccagggacacaacggaggcaagacccca

SEQ ID NO: 167904 - RNA, 61 nt, Homo sapiens
aggagggagagaggaccccgggacacgaaagccaggaaaggaggagcggcaccgaggaccg

SEQ ID NO: 167905 - RNA, 74 nt, Homo sapiens
aaagagaagacgaagagaccgaaggagagcgacgcaggggaggacagggaacggcgaggagccaccgggacggc

SEQ ID NO: 167906 - RNA, 105 nt, Homo sapiens
cgagcacagagcccgccgccgaccgccgcccgccacacccgccgccagggacgaacagcggggacgccccagcagaccgcccaggagaggaaagcaggaggaaag

SEQ ID NO: 167907 - RNA, 78 nt, Homo sapiens
cccgcgcccagcgcccggcggacaccgagaagcgaccgcgagaaagacgaagagggaagcccgcggcgggaagccccg

SEQ ID NO: 167908 - RNA, 53 nt, Homo sapiens
ggaacagcagagcggcgaccaccagaagacaagacccccgggaaggaacaagc

SEQ ID NO: 167909 - RNA, 57 nt, Homo sapiens
ccgaggagaaccagcggagaggagaggaaaacccaagacaaggaagggcaaagccca

SEQ ID NO: 167910 - RNA, 74 nt, Homo sapiens
ccaggaggggcgagcgccacaacaagcgagacacgagacggggaaaaagaaaagggcgaagacccgaagcagcg

SEQ ID NO: 167911 - RNA, 81 nt, Homo sapiens
cgcgggccccgcagcgcacccggcggcggacagaaaacagggccagacgggaagaaacgagaagggaccaggggcggaagc

SEQ ID NO: 167912 - RNA, 63 nt, Homo sapiens
aaaacggccaagaggcagaccaggaaagggcagagacccagagaacccaaacaagaccaaaac

SEQ ID NO: 167913 - RNA, 73 nt, Homo sapiens
ggcgggaagcggggcggcgccggacgccggccccgcgggagcaccaaaacagaaagaaggaggccaagaccaa

SEQ ID NO: 167914 - RNA, 83 nt, Homo sapiens
ggccccggcccccacacccgagccaggaacagacaaggggagaaccgccagcgacgggaaggcaggacccacgcacgagcaac

SEQ ID NO: 167915 - RNA, 72 nt, Homo sapiens
cacccaaggaccacccccacaggccccaggaaccacaggaagaccgaggagcagggagcaaccacaaggaaa

SEQ ID NO: 167916 - RNA, 56 nt, Homo sapiens
gacaggcagccgaggcgcccccgcgcgagcagggagaccacgagcaaggcaaaacc

SEQ ID NO: 167917 - RNA, 63 nt, Homo sapiens
gggaggccgaagggccccgggacccgccgcgagggacccggggggaaagagcccagaagacag

SEQ ID NO: 167918 - RNA, 72 nt, Homo sapiens
gggcgagaaacacaggaagcggggaaaagggcaaagcccacacaaaacaaccgacaagggaggcgaggacgg

SEQ ID NO: 167919 - RNA, 79 nt, Homo sapiens
ggacaacacgcccgggagacgagaccgaaccggcaccgcacaccggaccaggaaacggaggcggaagggaaggcaccac

SEQ ID NO: 167920 - RNA, 70 nt, Homo sapiens
gacgcaaacaacgggcaagaacggaagcacgggcggaggaaagcacaagcagagcccccgcagagggaaa

SEQ ID NO: 167921 - RNA, 109 nt, Homo sapiens
agacgcggcggggcgcaaaccgagacaagcaccccgaagcgccgaccagcacgggacggacgagacgacggagaggggaagaggagcagaaggggcccccggagggcca

SEQ ID NO: 167922 - RNA, 83 nt, Homo sapiens
acagggaaccaggcacgcccgaacaagacgacgacacagagaggccccccaacccagacgaagacagaagaacccagaaaaga

SEQ ID NO: 167923 - RNA, 71 nt, Homo sapiens
aaagggaaacaagcaaacagacccaagcagggcccaacccccccagcgcccgccccagcacccgaagacgc

SEQ ID NO: 167924 - RNA, 79 nt, Homo sapiens
aacgaaacccccgcaccggggggccgccgggcgcggcaaggacaagccgccgcaagaaaaggagacaggaagagaaaaa

SEQ ID NO: 167925 - RNA, 88 nt, Homo sapiens
agaacgagcgggagagccacaggggaaggcggaccagccggaagcgggcagcccacccagaggagcgcaccccaagaccacgagacaa

SEQ ID NO: 167926 - RNA, 112 nt, Homo sapiens
cccccgcaacgcccccggcccgcagcccccgccggccgcccaacaccgaacaccggcaacaaccacaagcagaagagacggggcaaaccggggggggacccaccgcgaggcc

SEQ ID NO: 167927 - RNA, 77 nt, Homo sapiens
acaacaagagacgggacaagacagggcaaaggacagaccaggggcgggccccggccagggcccaggcagccggggcg

SEQ ID NO: 167928 - RNA, 38 nt, Homo sapiens
cggcggcccgcgcacaggaggcaggggaagcacaaaag

SEQ ID NO: 167929 - RNA, 57 nt, Homo sapiens
cagagagccagccccaaccgaacccagacgcagaacacaccaaaccacgcaagcgag

SEQ ID NO: 167930 - RNA, 61 nt, Homo sapiens
cagaggacgccccagagcagcgcggccaggacaggacagcagccgcaaccaagcacacgag

SEQ ID NO: 167931 - RNA, 76 nt, Homo sapiens
aagcggacagaacagacgggacccccagccaaaggcaaaggaaccaagaagcaaaccaagacacaagagccgaccc

SEQ ID NO: 167932 - RNA, 72 nt, Homo sapiens
agaagacagagcaccaacgaggaccgggggagcggccgaggacaagcacaagcagcaccaaaaggcagcacc

SEQ ID NO: 167933 - RNA, 49 nt, Homo sapiens
ccaaacccagcaagagaagaggaaaaggaaaaagaggcaggaggcgacc

SEQ ID NO: 167934 - RNA, 59 nt, Homo sapiens
ccaccagccagaaagacacgacgaacggaaggacccgagccccaaagacagaaaagccc

SEQ ID NO: 167935 - RNA, 67 nt, Homo sapiens
aagcgcagaaagcaggcgaacccgcggcgcaaaacgggaaagggagcagcaccggccacacccacag

SEQ ID NO: 167936 - RNA, 74 nt, Homo sapiens
caaagaaaagcaaagaaagccccggccaaccccccgcgacagacaaacggaagagaaaagggagacagcccgga

SEQ ID NO: 167937 - RNA, 78 nt, Homo sapiens
gagagaaaggcggaagacgagagaggcagagaaggcgaaaaaaccagaaagagcgaacacggcaagaacgaagggagg

SEQ ID NO: 167938 - RNA, 57 nt, Homo sapiens
gaggaagaccagaggaagcgacagagagaggcagaccgggacaggaaggaagaggag

SEQ ID NO: 167939 - RNA, 76 nt, Homo sapiens
cagaggaggagacagaagcaagcaagcggaggcagcccaggacccgcaccccgagacggacacacaccgccaggcc

SEQ ID NO: 167940 - RNA, 42 nt, Homo sapiens
acaaagccggcacgcgcgcgaggccagaaaggaggcccacag

SEQ ID NO: 167941 - RNA, 47 nt, Homo sapiens
gcgccagcgagaacgagcgaagaagggaagaccacaacaagcaagca

SEQ ID NO: 167942 - RNA, 79 nt, Homo sapiens
gcgccgaccaccccagcaccagcccagagggaaagcacaccaccccagccagcccccgcggggaggcagagcccgcggg

SEQ ID NO: 167943 - RNA, 58 nt, Homo sapiens
gggcagccaccaccgcagcagcggaaggagaagggaacagagaagaaaggacagggac

SEQ ID NO: 167944 - RNA, 78 nt, Homo sapiens
aggggacagcaaccgacaagcaagggcaaggccagagaaggcgggagaaagacacgaaccacagaacgcaacaggaca

SEQ ID NO: 167945 - RNA, 89 nt, Homo sapiens
caacacgcgggcagcgaacaagcgggagcaaggagggcgaagagcgaggagagagaaaagcccggaaacgcaaaccaagcaaccaacaa

SEQ ID NO: 167946 - RNA, 84 nt, Homo sapiens
ggaggacagcaggccccgcgccggaagaccaggccgccagaaggaggaacagaaagaaaagcacagaaaaagaaagccaagaga

SEQ ID NO: 167947 - RNA, 77 nt, Homo sapiens
cggccgagaaagaaggaggaggggggaggcgaacagccggcgcccggacgcgaggggggagggagcaaaaggacgga

SEQ ID NO: 167948 - RNA, 74 nt, Homo sapiens
cagccccaggaggggacaaaaccccgaaaaaggcggggccaaagggcgagggcacaaaaaaccacaccccccac

SEQ ID NO: 167949 - RNA, 78 nt, Homo sapiens
gaaaccgaggccccgggaggaaaagcagcagaacgcagcgcccagcagggccaggaacagcccaggaagaacaagaag

SEQ ID NO: 167950 - RNA, 73 nt, Homo sapiens
agcaaggaaaagacccggaaagaagagacacagaggagccacacccccagacgagaaccgggaccgcaaccca

SEQ ID NO: 167951 - RNA, 72 nt, Homo sapiens
cacaccccacaggaccccagagcgacagcccgggacaccaagaaagaacggagcgcgaaggacggaggccca

SEQ ID NO: 167952 - RNA, 94 nt, Homo sapiens
gcaggccgcgagcagcggacgccggccgccgcaggagagccgcgaagcagccacggaccccagcacgaaaagacgggagaaaaaggggccaggg

SEQ ID NO: 167953 - RNA, 83 nt, Homo sapiens
cgccgcgcagccgccggaagcgcgagcgcagcgcccgggcgacggcggggccgcgcggccagggcacggccgagcagagagga

SEQ ID NO: 167954 - RNA, 75 nt, Homo sapiens
gcgggccgccaaggcccccggccggccccgcccccggccgagcgacgggaccagaccaccacagcgccccgagag

SEQ ID NO: 167955 - RNA, 68 nt, Homo sapiens
gaaagaccaacggagacaaaacagccaacgccaggaagccggacgcgcagggaaaacgagaggaccca

SEQ ID NO: 167956 - RNA, 69 nt, Homo sapiens
caacccgagaacacgggagaagccgaagacgcacaaccaagaaggaccggcccagagaggggccaaacc

SEQ ID NO: 167957 - RNA, 34 nt, Homo sapiens
acccgcccacgcagcagccaagaagagggaaaga

SEQ ID NO: 167958 - RNA, 59 nt, Homo sapiens
caggacccaaggagagcagcggaggcgacgcgcccagaaggcaaccagacacacaacca

SEQ ID NO: 167959 - RNA, 70 nt, Homo sapiens
ccgcccagcagcccaggccgagacgaaaggcagggcggaccaagcccaagcccagggacacacacaagcg

SEQ ID NO: 167960 - RNA, 80 nt, Homo sapiens
gcgagcagacgacaagccgggagcgggcggccaaccagggcggagaacggaaaagcaccaggaagcagagaggaccgcag

SEQ ID NO: 167961 - RNA, 83 nt, Homo sapiens
gaagaccgcggagaccaagcccaccaacccgcccagaaaaacgacaaaggaggacaccagcaaaaaggaaaggcaacacggga

SEQ ID NO: 167962 - RNA, 49 nt, Homo sapiens
ccaaccaaagggcccgcagaaaaggacagggggagaggcaaggaaacga

SEQ ID NO: 167963 - RNA, 70 nt, Homo sapiens
accacaggcacccagcagccagacgaggggaagcacgagcaagaagggagaaaaaccggaacaagaagcg

SEQ ID NO: 167964 - RNA, 71 nt, Homo sapiens
gcccaaaagaggagccaaaagagaaagcacagaaaccaaagccagccagcggcaaccggcacgcaccagag

SEQ ID NO: 167965 - RNA, 51 nt, Homo sapiens
agagaccgcaggaagaagcgaagaggcgggaaaacggcacaaggcgacgag

SEQ ID NO: 167966 - RNA, 71 nt, Homo sapiens
caagccaccgaccacaccgcccggggccgggcagcgagcccacacaggccccgggccagcagccgcacccg

SEQ ID NO: 167967 - RNA, 61 nt, Homo sapiens
gaccgcagaaggccggagacaccagcaggccgagaccgggaggaagcggagaaaagagccc

SEQ ID NO: 167968 - RNA, 75 nt, Homo sapiens
cggagcagcggacccaggcagcccaaaagagcgggaacagacacagcagagcagaagaaaaagaggacaagaaaa

SEQ ID NO: 167969 - RNA, 56 nt, Homo sapiens
agcagaagaaacacccaaaaccgcccaaacaggaaaggcgcgcccccacccggggc

SEQ ID NO: 167970 - RNA, 75 nt, Homo sapiens
gggcaccagcaccccgcaccacagccaggggaaccaagagcccaggacaaagagaaagagcgccaaaaagaacaa

SEQ ID NO: 167971 - RNA, 77 nt, Homo sapiens
ggagacgcagaacgggcagagaccgcaggaagaagcgaagagacacagccaaaccaaaccccaccaaaaagcagagc

SEQ ID NO: 167972 - RNA, 75 nt, Homo sapiens
cccagggaaaggagacaaggaccgaaacagaaacggaacaccaagaaccggagcgcgggaacaaagagaagacac

SEQ ID NO: 167973 - RNA, 62 nt, Homo sapiens
aaaaaggagccgcgcccccggagacagacgcagggcgcccccgggaaacggccagcaaggac

SEQ ID NO: 167974 - RNA, 53 nt, Homo sapiens
aaaagagaacgaaaaaaagcagagaaacaacacacgggaaagaaaacaagcca

SEQ ID NO: 167975 - RNA, 58 nt, Homo sapiens
ggacgggaaggaccagaccacacgccagccccccgggccccgaggaaccccccggccg

SEQ ID NO: 167976 - RNA, 67 nt, Homo sapiens
gggacgaccaccacagccacaggaggccaccagaaaccaagaccaacaccagcgggcaaggggcggc

SEQ ID NO: 167977 - RNA, 64 nt, Homo sapiens
aacagcccgagccagcaacagacgcaaccggccccagcaagccaccaccagaacaccaacgcca

SEQ ID NO: 167978 - RNA, 76 nt, Homo sapiens
cgaggacccggggccgaggagcgggaagaggcgggaaaaaggcacaaacccagcacagagaagacggcgacaagca

SEQ ID NO: 167979 - RNA, 71 nt, Homo sapiens
agccggcaccagggcccaggacccaaagacaggaccacgcaccagcagagaaggaaagcaaaccgaagcag

SEQ ID NO: 167980 - RNA, 79 nt, Homo sapiens
ggcaacacccgccgcagagaacaccgaaaacccccagcacagaaaggggacccgacggaaagaagaaggggagaaccca

SEQ ID NO: 167981 - RNA, 74 nt, Homo sapiens
agaagacggacgccgaagaggcaggcgaaggcaacagcccaaaaccgcccggcagacgggaaacaacgagccaa

SEQ ID NO: 167982 - RNA, 88 nt, Homo sapiens
aaggcaccggacaggccaaggcaggggccagaagacaaagcaaccaaacgccaccagaggaagacgagagaagaggaggcagcccggg

SEQ ID NO: 167983 - RNA, 69 nt, Homo sapiens
agacgggcagaagagagagaaaggggaagggggccagacaaccagggaagcacagacacgcgcaccggg

SEQ ID NO: 167984 - RNA, 40 nt, Homo sapiens
ccgagaccgggacacagacaccagaccagagcacgggcag

SEQ ID NO: 167985 - RNA, 74 nt, Homo sapiens
cgggcaaggaggggaggcgagaacacgaggaggggcgaccacacgccgaggcgccagacgcagaaaagaaaaga

SEQ ID NO: 167986 - RNA, 82 nt, Homo sapiens
cacagggcccgcccacaggcagcagcacggcacagcacgccgaccagccggcgccaaagacggcggggaaaaacgcaggacc

SEQ ID NO: 167987 - RNA, 72 nt, Homo sapiens
ccgcagaaaagcagaagacacagacaaaaggagggcgaaggagagagaagcgcccacagcgaagccaagcac

SEQ ID NO: 167988 - RNA, 88 nt, Homo sapiens
ccaagccggccgagggcaggggaagacggaagaaggagacgcgcccgccggaaccccaagaagaagcggaagaggagccgcggaacca

SEQ ID NO: 167989 - RNA, 63 nt, Homo sapiens
cggcagcgaccacgggaaggcgccgcgcacgaagcggaacgggcacaaagaaggcgcaggcaa

SEQ ID NO: 167990 - RNA, 83 nt, Homo sapiens
cgagcgcgccgcccggagccgcgcacacgacagaaccaaggagagacacacggaacaagagacaaaaaaagaagcacagggaa

SEQ ID NO: 167991 - RNA, 38 nt, Homo sapiens
gcgccccccggcgggccggacgggcgggccaaaaacag

SEQ ID NO: 167992 - RNA, 80 nt, Homo sapiens
cagggacccacccccgacagggacacagggagccccagacccacaggaccccagcccggcacaaacaggaaggacagcca

SEQ ID NO: 167993 - RNA, 56 nt, Homo sapiens
cggacaagaagaagacagaacgcccccaccaccgcaaacagccggagagacacagg

SEQ ID NO: 167994 - RNA, 73 nt, Homo sapiens
agagaagccgaccccaagaaagagagagacagaagccacagagcagcccgacggccaggaggcgaagagacga

SEQ ID NO: 167995 - RNA, 83 nt, Homo sapiens
gggagggagggcgggcggcgcgaggggcgcgggcccgggggccaggacgaaggacaggcgggcgggacccccaggcgccacag

SEQ ID NO: 167996 - RNA, 69 nt, Homo sapiens
aacagcggcaagccacagacggccgccaggcacagagaaggcaaacgggagggcgaggacaccaagagc

SEQ ID NO: 167997 - RNA, 60 nt, Homo sapiens
ggacaaaggaacaggaccaggcgaccaagaccaggcacagagcaccaaacggcaggcgca

SEQ ID NO: 167998 - RNA, 75 nt, Homo sapiens
cggaccacgaagaggagccggggaggggccagggccaagcacacggggagacggagaagccgccccccggcgcgc

SEQ ID NO: 167999 - RNA, 75 nt, Homo sapiens
ccccggagccagcagaaggagggacgagaaaagcgacgaggagcaaccagagacgagcaaaacacacaaaggccc

SEQ ID NO: 168000 - RNA, 81 nt, Homo sapiens
gccgaccccccggcgccgcgccggcggcgagaccgaaggagcagacgaggcacgagcgccagcgcgagacagacggggcgc

SEQ ID NO: 168001 - RNA, 74 nt, Homo sapiens
agaagccaggccgcagacacgccccacggacggagcggggggaacgggcagaagagagacgggggcaccagagc

SEQ ID NO: 168002 - RNA, 53 nt, Homo sapiens
ggaaggcagcgcacgccgcagaggaaaacaaggcggaaacccacgcaaacaga

SEQ ID NO: 168003 - RNA, 80 nt, Homo sapiens
cagcccccgggagcgggacacagagagggcacagacccaggccagcagaacgggcccaaccgcagcccagaacacccacc

SEQ ID NO: 168004 - RNA, 75 nt, Homo sapiens
ggagccaaggaaacaggagcgaagcccagcgggccggacggggcggggggaacgggagcccacaagcccggaggg

SEQ ID NO: 168005 - RNA, 80 nt, Homo sapiens
ggaggcgacgacccgcgcagacacggaccgcgggccagccgccaaagaccccgccggagggggcacccgaggaggaagag

SEQ ID NO: 168006 - RNA, 69 nt, Homo sapiens
gggaacgaggcgccgaccccacaggaagggaagcacagcgacccggaagcccagaggcacggggcagaa

SEQ ID NO: 168007 - RNA, 75 nt, Homo sapiens
ccaaccaaggggaccgagaaggaacaacaagcagggagaagaaaaccaagccacaaagaaaacccacagaaccaa

SEQ ID NO: 168008 - RNA, 51 nt, Homo sapiens
cacagaacaaaagcagggggccgggagcggaggggggccacgggcggcggc

SEQ ID NO: 168009 - RNA, 73 nt, Homo sapiens
cgagccccaaaacaaggacgaggaaaccgagaagggaagccaagcagagaagcgcgaccagacaaccagccgc

SEQ ID NO: 168010 - RNA, 62 nt, Homo sapiens
caagaggacgaaacagaaaacaagccgacagaagaaagcagacagagagagggcaccaccca

SEQ ID NO: 168011 - RNA, 58 nt, Homo sapiens
ccgacgacgggggccccggaggccgcgcggaggggacagcccagaccaaaccccagac

SEQ ID NO: 168012 - RNA, 36 nt, Homo sapiens
aaaacaagagaccacagaagacaaaccaaggagaaa

SEQ ID NO: 168013 - RNA, 82 nt, Homo sapiens
agggccgccccgggggccgaaggggaaccggagagacacggcaccagaccccacagcggccgcggcaccacacagaaacccc

SEQ ID NO: 168014 - RNA, 87 nt, Homo sapiens
gacagccgagggcggccgagcccggcgcagggaccggcgcgcgggagcgcacggccccaacgaggagcaggagcggccgcggagcag

SEQ ID NO: 168015 - RNA, 81 nt, Homo sapiens
agggcagcaagaggcgcgcagagggcgcagagaccgaccaccgggggccaagccacccgcaccggaaggacgggcagacga

SEQ ID NO: 168016 - RNA, 69 nt, Homo sapiens
aggacacacgagcgcgaaaggagagaccccgccacaccaaccgcaagagacagccgacaaaccccaacg

SEQ ID NO: 168017 - RNA, 78 nt, Homo sapiens
acagagaccagaaacacaggcagacggaagcacagaagcgcagacagggaaacccaaacagagggcccagaaagaccg

SEQ ID NO: 168018 - RNA, 55 nt, Homo sapiens
ccgcgccgcgagggcccccccagaccaaacccgggaaagaaaaacccagcagcac

SEQ ID NO: 168019 - RNA, 69 nt, Homo sapiens
cgggggaaccggcgcgccggcgcgcggcgcggacaggcccaaacggggcgggccggggccaccaagggg

SEQ ID NO: 168020 - RNA, 74 nt, Homo sapiens
agcacgagccccccagccgcgaagagacccgacagagacagggccaaagcggcaggagaaggaagggaccggaa

SEQ ID NO: 168021 - RNA, 76 nt, Homo sapiens
ggagaaggaccaagaaccagggaaacacaaagaagacaccagaagggccagcaccacgacaacacggcgacagaca

SEQ ID NO: 168022 - RNA, 89 nt, Homo sapiens
cccgcgcccgcggcgcagcggggcggcagcgaggcggaggcgacgaggaggcggacccccggcgcagggaaccaagaccaggacaaaga

SEQ ID NO: 168023 - RNA, 55 nt, Homo sapiens
cccacacacggaagccaagagaccagggggaggggaacagcagcggagaacacgg

SEQ ID NO: 168024 - RNA, 40 nt, Homo sapiens
cccggacaacaaccgcacacgaacgagacggggcaccacg

SEQ ID NO: 168025 - RNA, 80 nt, Homo sapiens
cgcgcggcgcggcggccgggccccgagacggggacggcagcggaccggcaccgcgcggaacgcgcccagccgggaacgcc

SEQ ID NO: 168026 - RNA, 74 nt, Homo sapiens
gccaaaccgagcacagaaagagaccgcccgcccaacggggaggcaagcaggggggcaaaggaaagaaggcagaa

SEQ ID NO: 168027 - RNA, 69 nt, Homo sapiens
cccgcggggggcccgccccgccgcgcccgccggccgacgagggagaaagagaagcagaagaaaacaaga

SEQ ID NO: 168028 - RNA, 70 nt, Homo sapiens
gggaaccaccgaggccagagcagacacaaagcaccggagggaaagggccaaaaggacaaacaaggaaaac

SEQ ID NO: 168029 - RNA, 42 nt, Homo sapiens
gcccagccccagcgcggcccaggaccacaagaacaggaggag

SEQ ID NO: 168030 - RNA, 83 nt, Homo sapiens
gagaaccgcggcggccggagcgagaagccaagcacacagagcagcagaagagggcaggaaaaaaaagggcacgggagcaaaca

SEQ ID NO: 168031 - RNA, 55 nt, Homo sapiens
ggcccccgcgaagacggcccaccagcccaggagaaaagacgcagcccgaaggcgg

SEQ ID NO: 168032 - RNA, 80 nt, Homo sapiens
caggggacgcaagagcagcaaagggacagagggaaggagcccaggcgaggaagagacaagcaagagagaacacacgcagc

SEQ ID NO: 168033 - RNA, 57 nt, Homo sapiens
gccacacaacggagagcgcaagcccagcgggacagggacccggcagcaaccccaaca

SEQ ID NO: 168034 - RNA, 64 nt, Homo sapiens
gagcggccaaccggggcgcagggcaaggcagggagcccgacaacacagggcagaacacgacgcc

SEQ ID NO: 168035 - RNA, 73 nt, Homo sapiens
gcagccagaagaacaagaagaggcagaccccgccagaccaacaagcggagggcgccggcccgggcggaggcag

SEQ ID NO: 168036 - RNA, 80 nt, Homo sapiens
gaagaagcgccaccgcagccggggcacccaccgggcgcacgccccgcagccgagaccgacccgcccgcccgcggccccgc

SEQ ID NO: 168037 - RNA, 79 nt, Homo sapiens
aaggaaaccgcccgcccccaggcacccaaccgccgcagacccgaacagaccgaggcgcaagaccacaagggcaggcaag

SEQ ID NO: 168038 - RNA, 82 nt, Homo sapiens
ccaacaacgaaaaccggaggggaacggcgcggagcggagcggcaggacacacaggccgacaagccacaaggaggcaaaggag

SEQ ID NO: 168039 - RNA, 69 nt, Homo sapiens
ccggacccccagaagaagaggggaacagcgaaacgaagaaagaagcggcagaagaaagaccaacagaca

SEQ ID NO: 168040 - RNA, 88 nt, Homo sapiens
gggggccccgggcggcggcaaaggagacagaccggagggagcaaccccaaggccaggggaggccacgaagggggagcccgcagaagcg

SEQ ID NO: 168041 - RNA, 80 nt, Homo sapiens
ggagacccaggcgggacagagggagccaggcagagggggaggaacacgaccggaagacaggccaaggagagcagcgcgga

SEQ ID NO: 168042 - RNA, 77 nt, Homo sapiens
gcacgccaagccaaggaaggccgagaagaagcaaagggcaaccagggaaacaggagaggagggccagacaaggggaa

SEQ ID NO: 168043 - RNA, 72 nt, Homo sapiens
agcccccgagcagcgggacacagcgaaggacaacgcaccggacaaggagggaacgagcccgaaaacagagga

SEQ ID NO: 168044 - RNA, 71 nt, Homo sapiens
cggcacgcgcaagacagggcagcccacgcggccagccgagggccagcaagcagagcccggacaggcccgcc

SEQ ID NO: 168045 - RNA, 68 nt, Homo sapiens
ccgccccacacgcagaaaagggagagaggaagacggggcccaaagaggaagggggaaaggaccaaaaa

SEQ ID NO: 168046 - RNA, 70 nt, Homo sapiens
ggcgccgccaaacgccgccaccagcgcagacagccaggccaagaaaaaacagaacaacaagagaaaaaga

SEQ ID NO: 168047 - RNA, 61 nt, Homo sapiens
agacggacagaacgccggacagggacgacccagcgagcccaccaaaggcggccgcgccgac

SEQ ID NO: 168048 - RNA, 74 nt, Homo sapiens
cacgacagaagcggaaggacacgagggccaaaaggcagaaggcagaaaaaaaaggagaaggaaagcaaaaggcg

SEQ ID NO: 168049 - RNA, 60 nt, Homo sapiens
gcccgcaggagcagcggaggaacgcagcagggggcgagcaggcaacagagcggggaggag

SEQ ID NO: 168050 - RNA, 73 nt, Homo sapiens
ccagcagcagcaccaaaagcacagaagacagacgaggaggggaaaaggaccagaacggaagcaacagggggcg

SEQ ID NO: 168051 - RNA, 90 nt, Homo sapiens
cgaggagagcgcccacaagacggagccggccgcaccacacgggcacagcagcccggcccaggggccgcacggggggggcccggcaaaagc

SEQ ID NO: 168052 - RNA, 55 nt, Homo sapiens
ggcagggggagaaggccaggaaagaaggaggagacaggggagaaaaagaacaccg

SEQ ID NO: 168053 - RNA, 70 nt, Homo sapiens
agggagaagagacaacaagacagagaacgacggaaccaagaaaacacgagaaaacagcccagaggaacaa

SEQ ID NO: 168054 - RNA, 78 nt, Homo sapiens
gccaggcgccgagcggccccaacaggcccgccgcgccgggccagcggcgccgccgaagggacgggcgacccccgcggc

SEQ ID NO: 168055 - RNA, 75 nt, Homo sapiens
ggacgccggagaggcaggcgcggcccgcggggcgccaggcacgcgaggcccccagcacaccgacagagaacccag

SEQ ID NO: 168056 - RNA, 81 nt, Homo sapiens
gggaagagacaaccgcgacacaaaaacacgcagggaaaaagcagcaaagggagaaaagaaggccaaacagaagcaggccca

SEQ ID NO: 168057 - RNA, 81 nt, Homo sapiens
gcgaggaggccaccaccaggccccgcgccacacgcgagggcagcaccgcagaggacccaaagcagacggggcccggagcag

SEQ ID NO: 168058 - RNA, 83 nt, Homo sapiens
gcgcgccaacggcccagacaagcgagcgcacgcgcggagaaggggccgagggcagcggcaaacgcagccacaggccaagaggc

SEQ ID NO: 168059 - RNA, 73 nt, Homo sapiens
agaccggcccgaccgcccacagacccaaacaaaggggaaaaagaaaagggcgaagacccgaagcagcgcagga

SEQ ID NO: 168060 - RNA, 53 nt, Homo sapiens
ccgacgcccccagccggcccgaagccggaaacaccggaccaaaccagagacaa

SEQ ID NO: 168061 - RNA, 72 nt, Homo sapiens
cacgcgggaagagcaagaggaaaaaagccgaaagggcggagaaaagaaagccacagcgccggaccagaaaaa

SEQ ID NO: 168062 - RNA, 84 nt, Homo sapiens
cccgcaagcaccaccacgaggcagggccccagcaagaaggcagccaagcacaaggcagcgaggggccccaaacacccaaagggg

SEQ ID NO: 168063 - RNA, 88 nt, Homo sapiens
gagccggcgcggggcggcgcgggcggaggcggcggagcgcgagagccgagcggaccaggccaaacgaccaagaaagcgggacgcggaa

SEQ ID NO: 168064 - RNA, 83 nt, Homo sapiens
cacggccgcggccggcccccggcaggccaccgcacacccagacacacaaggggccaagggcaggaccgggccccggcccccag

SEQ ID NO: 168065 - RNA, 37 nt, Homo sapiens
aaacgacaccacccgaccgacagagcggcagacacgc

SEQ ID NO: 168066 - RNA, 85 nt, Homo sapiens
ccggcagcccagggagaaaaaacgcaggcaaagccgaaagacccacccagccgggcccccagaccacggccgaccgcagaggccc

SEQ ID NO: 168067 - RNA, 60 nt, Homo sapiens
gagcagcacccagggccgcaaaaacacagggagagggagagaacagcacacagaggcgca

SEQ ID NO: 168068 - RNA, 78 nt, Homo sapiens
gaggcccacgcgacaaggggacgggaggaaagccgcgccaaagccgaagccccaagggggacacggaaagcacaagga

SEQ ID NO: 168069 - RNA, 65 nt, Homo sapiens
cgaagacaggccgaaaccccaaaaggaccgaacaaccgcgcgaacacggccaaagaaccaggcac

SEQ ID NO: 168070 - RNA, 71 nt, Homo sapiens
cacaccaaagaagaaagaaaaggcggcgagccagaccaagcgaagagcgcggagggcagagacaggcaaca

SEQ ID NO: 168071 - RNA, 56 nt, Homo sapiens
gcgggcgccgggccaggacggccagggccccccacgcgagaacccgggccggggcc

SEQ ID NO: 168072 - RNA, 48 nt, Homo sapiens
cgcccaggggacaccgggaagacggcaccgaaagcgaaggaagcccgc

SEQ ID NO: 168073 - RNA, 72 nt, Homo sapiens
agacaaaaacccaaagcagggcgaaggaacaaaagacgcaagaaaacgagagaaaccaagagagagaccgga

SEQ ID NO: 168074 - RNA, 70 nt, Homo sapiens
gaaccggaagccgacccggagccgagcaaccagacgcgacgcgacggaacccggaccaccggcgcggacc

SEQ ID NO: 168075 - RNA, 69 nt, Homo sapiens
aaaagggaccccaccgaccccgaccgcaaccgaagggagggcaagcagaaagcagaggaaaacgaacaa

SEQ ID NO: 168076 - RNA, 68 nt, Homo sapiens
aagacccaggaaagcagaacgggccaagaagaggagcgaaagaagaccaccaaccagaaaaaccagga

SEQ ID NO: 168077 - RNA, 75 nt, Homo sapiens
gacagagcaaggcacgccaggaacagagcagccaaggccggggaggagaaggaggcggccgcacgaacgcccaac

SEQ ID NO: 168078 - RNA, 65 nt, Homo sapiens
accccgaacgccgaagaaacccaagcgagggcagaaaggacaggaagccaaacaggcccgagcac

SEQ ID NO: 168079 - RNA, 76 nt, Homo sapiens
cgaagggaccaggcagacgggaagaacccagaaagaaaggagcgccccaaaaggaaacagagaagcagaaagcagg

SEQ ID NO: 168080 - RNA, 84 nt, Homo sapiens
cccggggggcgagcccgccgcacccgggccgcgccggcacggccccagcgcaaagcccaaggccacaccaggacccagcacgcc

SEQ ID NO: 168081 - RNA, 77 nt, Homo sapiens
cccaacagaagccgccaagcaaaagagccaaagcagcagccccgacagccacggaacagcagaagaggagccccgcc

SEQ ID NO: 168082 - RNA, 78 nt, Homo sapiens
cccgaagcccccgcaggaaccacaacccaaccagacaagcagaccggaagaccgacggaagaccacaccccgagggag

SEQ ID NO: 168083 - RNA, 75 nt, Homo sapiens
agaagaagacaccagcaacagacgcgacaccagaaaaggaaaccagccagggaggaggggcagcgccaccgcggc

SEQ ID NO: 168084 - RNA, 52 nt, Homo sapiens
gacagaccgcagacaggaacacgcgccagcgacgcggggccacccacagcaa

SEQ ID NO: 168085 - RNA, 71 nt, Homo sapiens
ggaaggccgcacagaggccaacgccaaagcccgccccaggacgaacgaaccacggcaacagccggggaggg

SEQ ID NO: 168086 - RNA, 70 nt, Homo sapiens
aacgcacaaagccgaggccacacaacgggcacccccgacgccccacccgcccaggaaaccgccgacgcgc

SEQ ID NO: 168087 - RNA, 64 nt, Homo sapiens
ccgcgggcggcgcgcggccgaagcgaagggcgacgccaagccggaggaggacaaaagcagcccc

SEQ ID NO: 168088 - RNA, 46 nt, Homo sapiens
gagcgacaacgggacgggaaacgaagagacccagacgaagagcgca

SEQ ID NO: 168089 - RNA, 70 nt, Homo sapiens
cccgggaaaccgcccaaaacaagcacgacagggaagacccagaaaagaaacacaaaacaagcgggaaaga

SEQ ID NO: 168090 - RNA, 69 nt, Homo sapiens
gccaagaggcaggcccgagggccccccggggccccccgggcaaggcccgaggccagaggggggggcacc

SEQ ID NO: 168091 - RNA, 78 nt, Homo sapiens
gccagggaccgcccagccccacacgcagagaacacggaccagaaagccaggggccccccggcacggagcagcgcgggg

SEQ ID NO: 168092 - RNA, 73 nt, Homo sapiens
aaggggcaggacgaagagcagggaaacaccacgaagcagccaagccaaggccgacaaaaccggccgggaagca

SEQ ID NO: 168093 - RNA, 73 nt, Homo sapiens
caccaaagcgaacgaagagcaccgggagcggcgaagaggcaccggaggagggcggcgacggcggcgcgaggac

SEQ ID NO: 168094 - RNA, 55 nt, Homo sapiens
cccaacaaccggggaaaagaacgaaaacaccacacggcgcacaacaaggaaagaa

SEQ ID NO: 168095 - RNA, 85 nt, Homo sapiens
cgggagagagcaggccggaccccagccccaggcagccaccaacaccacaacgggcacacaggccagcccagccacacagcccgcg

SEQ ID NO: 168096 - RNA, 77 nt, Homo sapiens
agcgagggaaagaacaaaccgcacgacacaggaaaggacaaaaccagaagcagggggggcgggcacgaagcaagcag

SEQ ID NO: 168097 - RNA, 57 nt, Homo sapiens
agcaagaaggagaaacacaaggcagaaaggaaccaggagccagcggaggaaaagaaa

SEQ ID NO: 168098 - RNA, 60 nt, Homo sapiens
ccagcccaccagcacggcagcaaagacacgcacccccagagcgcaagaccgggggacggg

SEQ ID NO: 168099 - RNA, 80 nt, Homo sapiens
gagacgcgcggggcgggccgccagcggggacaggcagcggcacagagcaggcacccaaacaggcaaccccaagaaaaggg

SEQ ID NO: 168100 - RNA, 78 nt, Homo sapiens
gcggacggccaggagaacaaggcacacagagacagacaaagcagccgagacgggccccaagagcgaccgcagcacggg

SEQ ID NO: 168101 - RNA, 66 nt, Homo sapiens
ggaacagcgagacacgggacaaaaaccaaagaagcaaacaggggcaggaaaacccaaaacgaaaaa

SEQ ID NO: 168102 - RNA, 76 nt, Homo sapiens
gggcggggcggcccaccaacaggaacagggcagacgagcggaggacacccaacccggggcagcgcagcaaggaaaa

SEQ ID NO: 168103 - RNA, 57 nt, Homo sapiens
ggagggccgccggaggaaacgcgcacgggaaacggacccagacagacggcacgccca

SEQ ID NO: 168104 - RNA, 76 nt, Homo sapiens
aaacggagccaggcacaagaaaacggcggagaaaccaccacaaacacgaggccagcaacgaccaacaagacagacc

SEQ ID NO: 168105 - RNA, 82 nt, Homo sapiens
gcaaaccaccaaaaacaacacccagaaagaggacacaccggaacaaagaaaaccaaaacgcaacagaaacaacaggcaagag

SEQ ID NO: 168106 - RNA, 41 nt, Homo sapiens
agcagggccaagaagcaacagccacgaggacaagcagaaac

SEQ ID NO: 168107 - RNA, 44 nt, Homo sapiens
ccagaagagcggagagacgaaagagagggagaacaagaccaaga

SEQ ID NO: 168108 - RNA, 55 nt, Homo sapiens
gcccaagggcaacgacaagaggaggccgggcggacacggaacccgaccacgaacg

SEQ ID NO: 168109 - RNA, 92 nt, Homo sapiens
acacgccaggagccgggaggccagagagaaccgccggcagggacccaccagcaagacacaggcccaggaacacagaccaccaggagccagcc

SEQ ID NO: 168110 - RNA, 61 nt, Homo sapiens
accaaaggagcgcgggaaaaaaacagaacgcggcagaacggaggcaggcagcacgagacac

SEQ ID NO: 168111 - RNA, 78 nt, Homo sapiens
cgggccgcggacaaccaccccggagcaagcgcaaggaagaagagacgccgcgcggcagacaaggcccggcaggcaaag

SEQ ID NO: 168112 - RNA, 84 nt, Homo sapiens
ccgccgccgaccgccgcccgccacacccgccgccagagcggcaccaaaagaaccacgccgagggaagcagagaaagcggggaca

SEQ ID NO: 168113 - RNA, 74 nt, Homo sapiens
accggaaaacgacgccccaacggccaaacaaacccgaccgacgacgcagcacagagaggaaacgaggaaacgac

SEQ ID NO: 168114 - RNA, 85 nt, Homo sapiens
aaggggcagacaacaacaaagacaaacaagacaaacgacggaaaaggagagagaggaaaccggcaagcagcccagccgagcagcc

SEQ ID NO: 168115 - RNA, 79 nt, Homo sapiens
cgaaagccccacaccagaccacggagggagcggaaaccgacgcagacggacaccaggcagaaagagcccacaagacaaa

SEQ ID NO: 168116 - RNA, 71 nt, Homo sapiens
ggagcgcgcggccgagcgcaagagggcacgacacgccggaagacgcccagaagagcacaaagaaccaacgc

SEQ ID NO: 168117 - RNA, 76 nt, Homo sapiens
agagcgcggagccgcgcccccggggaaaggaggacaaaaggaaaaaaaaaaagggaagacagagaggcggggaaag

SEQ ID NO: 168118 - RNA, 91 nt, Homo sapiens
ggggccagcggaagaaccccccgggagccagaccggcaccgaagaccgccaggccaggacagagggaagggaagcgcagaccagaaacgcc

SEQ ID NO: 168119 - RNA, 68 nt, Homo sapiens
ccacgaggacagcggaagaaaaggaacgagcagagcgacagcgaagcgcagcaacacaagccccaggc

SEQ ID NO: 168120 - RNA, 78 nt, Homo sapiens
caccgcagccacaggaaacacagcagcgaccacaagccgggcgcccagccccgcaggaccacgccgcgaggcaaacgc

SEQ ID NO: 168121 - RNA, 75 nt, Homo sapiens
cgaagcagggccgacacaagcccgcagacagaccgcagaggcggccgcgagaagacccggggacagcacaggaga

SEQ ID NO: 168122 - RNA, 79 nt, Homo sapiens
cgggcgggcaggagggcggcggcggcggcgcggcgaagaaggggacgccgacaaggggcgccgacagcgagagcgcacc

SEQ ID NO: 168123 - RNA, 73 nt, Homo sapiens
aggcaccaggccaccacagaaacaaaagcaacaaagaggaggcaggggaccccccgagggcagcccggcccca

SEQ ID NO: 168124 - RNA, 73 nt, Homo sapiens
cagccaagcaccagaaggagagaagacggaacacgcgaacacgcaaaaggaagcggcaggcacgggacccaag

SEQ ID NO: 168125 - RNA, 78 nt, Homo sapiens
ggagcccggaggccgagaaagcaacagccaccccaggcaagcgacacaaccagaacagaggcaggcagaaggaccagg

SEQ ID NO: 168126 - RNA, 79 nt, Homo sapiens
ggaaacagcagagaccccagacgccaccacaacccccagacgcaagccaaggggccaccacagagcccgcagggacaca

SEQ ID NO: 168127 - RNA, 83 nt, Homo sapiens
aagccgaaggcagccacaggccgggaacccaacaagggagcaaacagagaaagaacccaaacacacagaaaaaccccaaaaag

SEQ ID NO: 168128 - RNA, 76 nt, Homo sapiens
ccacccggaggagcagcccgccccgccgggggagacgacccccgccagcaaggcgccaccggaagaaacgggaggg

SEQ ID NO: 168129 - RNA, 82 nt, Homo sapiens
cggcgcggcgcgccggagcgcgacccggccggcgccggacaggagccagaggagccccaccgcccagcggcccggaggcggg

SEQ ID NO: 168130 - RNA, 63 nt, Homo sapiens
gggaaaaccgagcgaaccgaggaccaaaaggaagaagagagggcgaaggaggccacacagaag

SEQ ID NO: 168131 - RNA, 74 nt, Homo sapiens
aaaaagaagcgacagaccgcacacggcagccaaacacagccaccccaggccgcaaagagcagggccgccccgag

SEQ ID NO: 168132 - RNA, 87 nt, Homo sapiens
ccaagccaccacaggcgcagcgcaccgccccaccacccaggggcgcagacggggaagcggagccaacagccagggcccggagcgggg

SEQ ID NO: 168133 - RNA, 83 nt, Homo sapiens
cgacgccgggaccggccaagggcccacacaccaagaccaagggcgccacagaggggccagagccacggaaaagggggacagac

SEQ ID NO: 168134 - RNA, 77 nt, Homo sapiens
ggcccgggcaagccaacacggccacaaggggcggacagcgcccgaagagcggaaagagagaagaaaaccaggccgga

SEQ ID NO: 168135 - RNA, 85 nt, Homo sapiens
ggacaaaaaaaccggaaaaagaagccaagaagcaaaaaagggacgcaagaagaaccaccaggacccaggaagccacccgcagagg

SEQ ID NO: 168136 - RNA, 71 nt, Homo sapiens
gcccagaggaccccagccgcgcccgggagagcaaggaccacaccacggagccaggaggaagccaggacacg

SEQ ID NO: 168137 - RNA, 37 nt, Homo sapiens
agccgggggacagcgaggaagaaggccggcccacagc

SEQ ID NO: 168138 - RNA, 79 nt, Homo sapiens
caggcccccggacggcgcggaccccgacggcgccgggacaggaagagcacccaagcgcaagcaaaagaaggccccccca

SEQ ID NO: 168139 - RNA, 75 nt, Homo sapiens
gcagccagacccaagggggcagagggccagacccccaacaaagccaaaggagaaacggacccagcaggggcagcc

SEQ ID NO: 168140 - RNA, 77 nt, Homo sapiens
agccgccgccgcagcgcgaacaggacgccgcaacgcccaaccaggagcaacggggcggcacacaaggagcgaagggc

SEQ ID NO: 168141 - RNA, 126 nt, Homo sapiens
cgagaaaaacacgggcgccaggaacgcggaacagaaccaaaggcaggacagccagcaggggaccaagaaaggcccagggaccaaagcccggacaaggcccgagcaccaggaccgcagaaggcccca

SEQ ID NO: 168142 - RNA, 70 nt, Homo sapiens
ggagaaccggcacagcccccgggcggaaggccggacagggacgcaggagaacagacacacagagagaaag

SEQ ID NO: 168143 - RNA, 73 nt, Homo sapiens
cggagcgaaacacgacggaaggagacaggaagccagccggccccaacccagggaggggggggacacgacagcc

SEQ ID NO: 168144 - RNA, 83 nt, Homo sapiens
caggcgaagcgaggcggccaccaggagacagcgcgaccagcccgcgccccgcccacacagaacgaaaaaggcacaaacccagc

SEQ ID NO: 168145 - RNA, 75 nt, Homo sapiens
gcaaaccggacaaccaccaaccacagcaccaagagacagaggaaagagaagaacccgaagaaccaaaggcaacac

SEQ ID NO: 168146 - RNA, 84 nt, Homo sapiens
gaacagccgaagaagggcccccggaagaaccgaaggacacacagagaggaaaagaggcccaaagaaggagccacggaaggccca

SEQ ID NO: 168147 - RNA, 88 nt, Homo sapiens
cgggcggagggggcggcggcagcgacggcagcggcggcggcggacaaacaggcaccgcaggacccagaccaggacggaacacaccaac

SEQ ID NO: 168148 - RNA, 120 nt, Homo sapiens
gcgggggcggaccgaagcaggagcccaagccacgggacagagcccggccccagagaaggagcgccaaggccagcgccacacacgagccagcggccaaagccaacagccacggaggccccg

SEQ ID NO: 168149 - RNA, 77 nt, Homo sapiens
cacgacccagacccagcggaaaggagcgcgcccggcggggagcgcagcgcgacgaccagacacccacccacagacag

SEQ ID NO: 168150 - RNA, 110 nt, Homo sapiens
gccggcgcccccccgaagacgggcccagccggggccgacgccggggcagcaggaggcccaaggaacagcacagcagcgacacacggaccggagcagcccacagccacagg

SEQ ID NO: 168151 - RNA, 84 nt, Homo sapiens
ccgggcccaaacgccagccagccagcaggggcccgcagcgcccgcaaccggggcgaacaggcggccgccaagaccgaggagccg

SEQ ID NO: 168152 - RNA, 76 nt, Homo sapiens
ggagaaccagagcggcagacgagcaggacaaggagacggcagagccaaggccgggacaccaggacccaggaagcca

SEQ ID NO: 168153 - RNA, 64 nt, Homo sapiens
cgaacacggggacaagagggccccgggaaagagaccaagaaggaggcccagaggaaaaagacac

SEQ ID NO: 168154 - RNA, 88 nt, Homo sapiens
cacgcaccaccagagaacgggccgagggaagcagcggaagaccaaacagcagcccagcaggccgaggaggcccggggccaaacaggag

SEQ ID NO: 168155 - RNA, 73 nt, Homo sapiens
ggaccaagaaccagagcggagagaagaaggaaaacccagcaaccagagaagagcccaccagcagaccgagcca

SEQ ID NO: 168156 - RNA, 51 nt, Homo sapiens
cacagagcgaacgggcgcacgacgaggcacgacgagggagaccaacaggag

SEQ ID NO: 168157 - RNA, 46 nt, Homo sapiens
ccacacaaacccgggacgggccgagagccccaggaggggagcaacg

SEQ ID NO: 168158 - RNA, 57 nt, Homo sapiens
ccgggcccccccgcccagcgcgagggcccggaacacgcagccgagccgggaggagcc

SEQ ID NO: 168159 - RNA, 70 nt, Homo sapiens
ccccagccgcagccacaacaccggcaggaaccaccaggacagaacagaagcacggagaacaaaacgcaca

SEQ ID NO: 168160 - RNA, 72 nt, Homo sapiens
aagaaagaaagcggcacggcggaagcagaacgagaaacaagacaccacgcccccccaaaaagagccgaaaaa

SEQ ID NO: 168161 - RNA, 119 nt, Homo sapiens
ggcggagcggggacagcggccggcaacccgccaggcaggccccccggagcggccccgccgcggcaaaagcagaccggaaaacccaccggcaagaccacacccgaggggagcccaggaca

SEQ ID NO: 168162 - RNA, 75 nt, Homo sapiens
aaagaagagacaaaagagagagcggaaacgagggaaagacagacgcgaagcaaagcgccacccagaagacgacag

SEQ ID NO: 168163 - RNA, 49 nt, Homo sapiens
aaggggaaccccggagaaaaggccaagaaggcagggggaaacagcagca

SEQ ID NO: 168164 - RNA, 103 nt, Homo sapiens
aacacgaagaagaccaacaaagacagcaccccacagcaggcagagacaaccaacaagaagcgacgcccagacacgaacccacaaaccagcagcacggaagaaa

SEQ ID NO: 168165 - RNA, 82 nt, Homo sapiens
ccggggcgggcgcccccgcagcaggaggacgagcaccaggacacgggcggagccaggaccccaaacgcagagcacagcaagc

SEQ ID NO: 168166 - RNA, 62 nt, Homo sapiens
caaccgagaagacagaggaaggggcgagaacagcccaggccggccacgcggaggaaccgcgc

SEQ ID NO: 168167 - RNA, 76 nt, Homo sapiens
gcgccaggacagcacccaaaggcgaagggccagcaggcgaaagagaagcaaaggaagaagcgaagcaacggagagc

SEQ ID NO: 168168 - RNA, 71 nt, Homo sapiens
acaaagaacacaaagaaaaccgaggagcaagaaggaggaggaaaaacgggaaagagcgcagagggaccaac

SEQ ID NO: 168169 - RNA, 57 nt, Homo sapiens
cgccgcgaggagcggcgcgggccccccccaccgcgggagcaagaggcagacagaccg

SEQ ID NO: 168170 - RNA, 59 nt, Homo sapiens
cggcccccccaacccagagcaaagagacgccgggaggcgacaccacgcacgggagcaag

SEQ ID NO: 168171 - RNA, 63 nt, Homo sapiens
ccaaccgaaaaagccgacaaaaaaaagcaaaagcgcccaggaggacccaaagacaggaccacg

SEQ ID NO: 168172 - RNA, 87 nt, Homo sapiens
ccagcagaggccagcacgagaacccaggacgagaacccccgcgaaccagaggaacccagcgagcgagagcggaccagaggacggaag

SEQ ID NO: 168173 - RNA, 57 nt, Homo sapiens
caccggaagcacagggcagaacgggagagaacagcacacagaggcgcaaggggaaga

SEQ ID NO: 168174 - RNA, 54 nt, Homo sapiens
ccggggggccagaaggggaagggcagcagacccggcccagggccaagggaggag

SEQ ID NO: 168175 - RNA, 40 nt, Homo sapiens
cagcacggaccaggaggcgagcaacagggcaacgcggggc

SEQ ID NO: 168176 - RNA, 63 nt, Homo sapiens
aaaccgcccgagggaccagggcggcgacggcggcgcgaggaccgaccgggcccgcggacgaag

SEQ ID NO: 168177 - RNA, 54 nt, Homo sapiens
aagcccaccaaccgaacagagccgacaggcacgaagaaaaggaaaacccacgcg

SEQ ID NO: 168178 - RNA, 70 nt, Homo sapiens
agacagaaaacaccgagcacacaggaccagaacagcgcaggagcacagaggccaagcgcaagaaacagca

SEQ ID NO: 168179 - RNA, 71 nt, Homo sapiens
agccacagagcaagagaaggagcccggagggaagcgagagcgacaggaagccgccaggagaccagagacag

SEQ ID NO: 168180 - RNA, 76 nt, Homo sapiens
cggccagccaagaaccgcacgacacgaacaaccaggaggagaaaccagaggcaagcgacgggaaggaccaccaaac

SEQ ID NO: 168181 - RNA, 52 nt, Homo sapiens
caagccacccaccgagcaggaagagagaaggcgaaggcacaaaacagagagg

SEQ ID NO: 168182 - RNA, 79 nt, Homo sapiens
cagaaagcacggacggcgaggacacagcagcacgaccaagacacccaggagaaagacagcggggaaaagaaaaaggagg

SEQ ID NO: 168183 - RNA, 54 nt, Homo sapiens
ccgcaaggcacagacacacagcacaggaagcgagaagacaaagcgaagagagaa

SEQ ID NO: 168184 - RNA, 72 nt, Homo sapiens
aaagagcacccccacgagggagccgagggcggagcggagacgaccgagcgaacaccaagaagcaaaacgcgc

SEQ ID NO: 168185 - RNA, 82 nt, Homo sapiens
ggagacacgaggaagggaagagcgaagagagaccgaaaaaagaaagaaaaagaccgagcagggccaggccacagcagagcgc

SEQ ID NO: 168186 - RNA, 79 nt, Homo sapiens
cggagccaggccgcgaaaaccacaacgcaccagagggcaagagcccagcgagacaccggagggccggggaaggcgcacg

SEQ ID NO: 168187 - RNA, 71 nt, Homo sapiens
gaggccagggagccgaccagaggagcggagaccgacacaacccccggcgccccccccaacccaacggcacc

SEQ ID NO: 168188 - RNA, 83 nt, Homo sapiens
gccagacggaagggggcccacggacagaaggggacggagagacaagagagggaagagggggaggggaagaagggagaagaaag

SEQ ID NO: 168189 - RNA, 95 nt, Homo sapiens
cgggagaaggagggccaagaggcggaagcggaggagcccaggagacccggggacagcacgcccaggccccggcggaggcaaggcgggaccggcca

SEQ ID NO: 168190 - RNA, 83 nt, Homo sapiens
caggcgcggacccaaaaagccgggcccccagagagagcgcacccaggccagcaccagcgccagccaccagcagcggcaccccc

SEQ ID NO: 168191 - RNA, 75 nt, Homo sapiens
ccaaagcagcgaagaagaggcccaacccccaccccgcccaaggaggcccagcggaaccaggaaagaaagagaacg

SEQ ID NO: 168192 - RNA, 82 nt, Homo sapiens
agaagaagagccaccgagaagccaagaaaccccacaagacgaagcagacgggcagaaaaccaggcgaagcaggcccaagagc

SEQ ID NO: 168193 - RNA, 78 nt, Homo sapiens
cgcgccgcgcgcccaagccggcggacggcaggccccaggcggcgcccagcggccacacgccccaagcgccacgcccgg

SEQ ID NO: 168194 - RNA, 65 nt, Homo sapiens
gaccaagaaccagaaccaccacaaggcgccccacacacggaagaagcgcaggagaagggagacca

SEQ ID NO: 168195 - RNA, 76 nt, Homo sapiens
caagagggagccccgcagacgggacacagcacaccggagagacgaggcagaaaacacagagaaaacacggagaaac

SEQ ID NO: 168196 - RNA, 42 nt, Homo sapiens
cacaccggggcaccaaacaaagcccgaagacaaggggaacac

SEQ ID NO: 168197 - RNA, 58 nt, Homo sapiens
ccaaaaagagcaaacaaccggggcagacaacagagacgacgcagccagagcagcaaga

SEQ ID NO: 168198 - RNA, 83 nt, Homo sapiens
gcgaccgacgcagccgcgcagccagagcggagccggaccccggcacgcccgggaggagcggacaggaaccgccccagaggagg

SEQ ID NO: 168199 - RNA, 84 nt, Homo sapiens
gacggcacacagccgggggccgaggccccacggcccccgggacccccggcaggccaaacccggagccagaggccaagaagagaa

SEQ ID NO: 168200 - RNA, 76 nt, Homo sapiens
ggaccaaaacaaacaagaaggagcccgcccagagaggaacgaagggcaccacgacaaaccaagacgacaaagagag

SEQ ID NO: 168201 - RNA, 79 nt, Homo sapiens
acaacagccggcagccagaagcagccaggcaaggccaaacacccggagaccggcggaacgggcacaaagaaggcgcagg

SEQ ID NO: 168202 - RNA, 49 nt, Homo sapiens
cgaagacagccaagccgcgcccacaagcagaccggaagaccgacggaag

SEQ ID NO: 168203 - RNA, 43 nt, Homo sapiens
ggcgggaagaagggggcccagacgcgaccggaaaggagagaga

SEQ ID NO: 168204 - RNA, 68 nt, Homo sapiens
gaacaggcacgccaacagacccagccggcgaccagacagcgcgacaccaacaaccccacgaagcacac

SEQ ID NO: 168205 - RNA, 77 nt, Homo sapiens
ccagaacgcagacagaggagcggacccccgcggcgcgcagcccagcagggccgccgcgggagagccaaccgcgccac

SEQ ID NO: 168206 - RNA, 74 nt, Homo sapiens
acgaaagagggcacccacccacgaagggaggaaaagggcagggacagcgcaggcagcagagcggccaccccaaa

SEQ ID NO: 168207 - RNA, 66 nt, Homo sapiens
cccgaccgcaggcccccccccggccacacccaaccaggacacaaggcacgaggacgaagaggaaag

SEQ ID NO: 168208 - RNA, 82 nt, Homo sapiens
acgcaggaggagaaccgcgaccgcgcaaagccagcggaccaccgggaaaaagccaaagcaggccgccacaacgaaaagccaa

SEQ ID NO: 168209 - RNA, 39 nt, Homo sapiens
cagacagcgagcgcacacaggcagcaggaggagccagag

SEQ ID NO: 168210 - RNA, 74 nt, Homo sapiens
ccccccaggggaggaggcacacagccacccggagccaggaaagggcgcccgcggacagaccgaaacaaggaccc

SEQ ID NO: 168211 - RNA, 54 nt, Homo sapiens
ggccggggcgcaccgcgccacgaaggaagacccggagcagacaacagggagacc

SEQ ID NO: 168212 - RNA, 80 nt, Homo sapiens
accgcggggggaacccgaggaaaaacaggaagaagccagaggcgaccgggagcagcacgacccgcggcgaccacaccagc

SEQ ID NO: 168213 - RNA, 67 nt, Homo sapiens
gaacagaaaaagaaaagcagcagaccagacacaagaaaaccagccgagaaggcaagagacccgccca

SEQ ID NO: 168214 - RNA, 71 nt, Homo sapiens
aaaaaaccaggaggaaaacacgcccagcacaacaaccagaacggcaacgaaaagagacacgacgcaaaccc

SEQ ID NO: 168215 - RNA, 73 nt, Homo sapiens
cgacccgcgccgccagcgacggagcagagaggggaagacccggagagcggaccaacgaggaacaggggaagac

SEQ ID NO: 168216 - RNA, 81 nt, Homo sapiens
ggagggcggagcagcccggcggcggcggccgaaccaaccgagcggaccgacccaaaaccaacaaggccgacgcgcacgaac

SEQ ID NO: 168217 - RNA, 81 nt, Homo sapiens
gaaaagagacagaagaaggacaaagaccaccaggcaaaagggggggccgcccgcccaaggcaggaagaggggccgcaaaga

SEQ ID NO: 168218 - RNA, 39 nt, Homo sapiens
ccgcgcagcgcgcgcccaagacaagcagaccggaagacc

SEQ ID NO: 168219 - RNA, 76 nt, Homo sapiens
gcacagagacaggaagaggacggagcaccaccaggaagacgaaggacaaggaagaaaaaccagggacaacccaaaa

SEQ ID NO: 168220 - RNA, 77 nt, Homo sapiens
aggagccagaaaacgaggcgcccgcaaggaaggaccggccacgccacccccagcccaccgccggcgcagcagggaaa

SEQ ID NO: 168221 - RNA, 68 nt, Homo sapiens
acccaaggaaaaacaggacaaaggaagccaagcaggaggcaaccagggggaaggccccgggcagccga

SEQ ID NO: 168222 - RNA, 65 nt, Homo sapiens
cgagccagaccaagcgaagagcgcggaggaagacgaagcagaaacgaaaaaacaccaccaacagg

SEQ ID NO: 168223 - RNA, 80 nt, Homo sapiens
ggaaccccccagcagggcagcggcaagggcggggcggcagcgcggagaagcagcacggcgccaggggcggcggccgcccc

SEQ ID NO: 168224 - RNA, 80 nt, Homo sapiens
agaacaggcgaagcagcaggaaaacggaggggggaagacagggcccagcaccacaggacgggccgggaagccgccagcag

SEQ ID NO: 168225 - RNA, 70 nt, Homo sapiens
caaccgaggaaggcaacagaacagcccacccaaacaagaacacgcaaccacacaggaaccaacaaccagg

SEQ ID NO: 168226 - RNA, 81 nt, Homo sapiens
ggagcgcaagcgccggggagagaccgcggccaggagccaagaagaccagaccgcgggaggagccgacagcggaggggggaa

SEQ ID NO: 168227 - RNA, 75 nt, Homo sapiens
gggaccgggcgggaacccgcggggagcgggacacgaacgggggacgaagggaacccgccgggcggcccggcaccc

SEQ ID NO: 168228 - RNA, 44 nt, Homo sapiens
ggacaggcgggcgcagcagcaaaggaaacagaacgacagcccgc

SEQ ID NO: 168229 - RNA, 36 nt, Homo sapiens
acccccagcgggcaggccagccccgagagcgcagac

SEQ ID NO: 168230 - RNA, 76 nt, Homo sapiens
gcacaagggcagcaccagaaaggccccagggcaggggcccggagagcgcgccccccaggacccagaccgagccccg

SEQ ID NO: 168231 - RNA, 80 nt, Homo sapiens
ccggacgaccaggagaagcgccccaccgggcagaaagagagacccgaaacgaagaagcacgagggaaccagaaggagcgc

SEQ ID NO: 168232 - RNA, 50 nt, Homo sapiens
ggccgggagcggaacccaaaaaaagggccgcgaagcaggccagggcaagg

SEQ ID NO: 168233 - RNA, 82 nt, Homo sapiens
gaaaggcacgaagaaaagagaaggaaaaacagaacggcaaaccggaaaaaaacgggagggcaaaacacagaagaagcaggcc

SEQ ID NO: 168234 - RNA, 84 nt, Homo sapiens
cagccgacaggcggaggcccccgggcaagaggcgcaaacaagccaacccaggaggaaaaacggcacacagagaaaaaaagggaa

SEQ ID NO: 168235 - RNA, 66 nt, Homo sapiens
acagagaaagcagacacgaacaagccgagcgaccacccaggggagaaggcaaggaacacaagcggc

SEQ ID NO: 168236 - RNA, 67 nt, Homo sapiens
cccgaaagaagcggacggagaccgcgcgaaacgcccagaaaccaagaagcagcacgccggaaaacca

SEQ ID NO: 168237 - RNA, 51 nt, Homo sapiens
acaaaggcaagccacgaaggacaggagagacaacggaggcaagaaagacgg

SEQ ID NO: 168238 - RNA, 73 nt, Homo sapiens
gaggaaaaccagagaaacaagaggaggaggggccaagaacccaaagcaaggcgagacaaggggccaaccagcc

SEQ ID NO: 168239 - RNA, 52 nt, Homo sapiens
ggcggacgggggaccccagagaagacggaagagcccgagcgaagagaggaag

SEQ ID NO: 168240 - RNA, 74 nt, Homo sapiens
cagaggaaagaacggaacaccgagaaaaagacgcccaggaaaagaaaaaacaaggcaagcagagaagagaagag

SEQ ID NO: 168241 - RNA, 53 nt, Homo sapiens
gccaccgaggcagagaagcccgcaagcgcagcaagcccacggcggcccccaca

SEQ ID NO: 168242 - RNA, 73 nt, Homo sapiens
gccgccggcgggaccgcagcacggggaaacgaccgccccaaaacggaccaggagaacacagcgaaaaagggcg

SEQ ID NO: 168243 - RNA, 77 nt, Homo sapiens
cggcgggacccagggccaccagacagaaggaccaccaagaggcgcggggacagcccagcacaacccccgcgaaccgg

SEQ ID NO: 168244 - RNA, 78 nt, Homo sapiens
aggaccaccacagaaggaagaagcgcgcggggccggggcccaccaccgcacagcgcccagccgcgagaagcccgacga

SEQ ID NO: 168245 - RNA, 72 nt, Homo sapiens
cagcggcccaggagcagaccagaagggagagaccaggacacagagaacaggaccgggaaccccggacaaaac

SEQ ID NO: 168246 - RNA, 76 nt, Homo sapiens
gccccgagccagccccgacagcgggaaccgcgaggaaaaccaccacacaggggaaacacccagacaacacacacaa

SEQ ID NO: 168247 - RNA, 79 nt, Homo sapiens
ccacccgggcaccgccgcccgacccggaccggcagaaggcccgggccccaagagccaagaaaggacgagaccgaagaga

SEQ ID NO: 168248 - RNA, 77 nt, Homo sapiens
ggcaagaacagcgacaaggagagaagcgcggagccccaaggcggcacagcaaacacacaagagccagcaaagggagc

SEQ ID NO: 168249 - RNA, 70 nt, Homo sapiens
gacacgggagagagaaggacgaggcccaacagaggcggaagcgggcgcgccaagaagcaccacgagaaga

SEQ ID NO: 168250 - RNA, 83 nt, Homo sapiens
agggcgcagcccaggagcccaaggcggcccggcgggcgacggacggccggacaggcggcggccccacccaaagcagaacaaga

SEQ ID NO: 168251 - RNA, 48 nt, Homo sapiens
ggggccgcgaaccgacgaggacacagcaggggccagacaaccagaccc

SEQ ID NO: 168252 - RNA, 73 nt, Homo sapiens
ggccccaccagcgacgcgccaaaggagagaaaacagacagaaaagaaccagaaccggccaaaagcgaaaaggc

SEQ ID NO: 168253 - RNA, 63 nt, Homo sapiens
aagagcgcagagacagaggaccaaaggaagaagcgaagacggaaacgaggaaaccgggaaagc

SEQ ID NO: 168254 - RNA, 75 nt, Homo sapiens
gcaccggacacgaggagaaacagcagaaacgcaccaggccaaagaaagagaagggagggcagaacaacagcagca

SEQ ID NO: 168255 - RNA, 79 nt, Homo sapiens
ccacgcgccgccgcccccggagcgcggcacgaggcgggccggggcgggagcccgagccccacaccgccgggcagcaggg

SEQ ID NO: 168256 - RNA, 63 nt, Homo sapiens
gccccggcccacaggggggggcaaacccgagagaacggaccccgccccccgaggcgcagcccg

SEQ ID NO: 168257 - RNA, 74 nt, Homo sapiens
gggccgcgccaagccagagagagcccccaccgaccagaagaggcgggggagcccgcagagcaagcaaaggacag

SEQ ID NO: 168258 - RNA, 70 nt, Homo sapiens
gcccggacgggccggagcggggcgcggaaggaggaagaagagccagggggacccaagcggggaagagggc

SEQ ID NO: 168259 - RNA, 75 nt, Homo sapiens
gggaaaggaacacccccagcggccagacgggaagacccagggcacaagaaaacaacggcgggggacaagacccaa

SEQ ID NO: 168260 - RNA, 59 nt, Homo sapiens
caagaccacacggaccagcgccgaagcccccacccaggaaggaacaaccccacaccacc

SEQ ID NO: 168261 - RNA, 84 nt, Homo sapiens
gccgaacccaacacaggcaggaggacaccgagcccagaagacaagacagggagcaacaaaggaagaaggagaaagggccaaccc

SEQ ID NO: 168262 - RNA, 79 nt, Homo sapiens
caacgacaagcccgcgccgcccccaggagcacaaaagggaaagcaccgggaggaaagagagccacacgaagaacacggc

SEQ ID NO: 168263 - RNA, 87 nt, Homo sapiens
gaggaagacgagccgggaggaacggcccggaaacaggaggacgaacgcacaccagcaccagcccaccaaaccagcacgaccccggag

SEQ ID NO: 168264 - RNA, 77 nt, Homo sapiens
cgcaaggcgaggacccaaaggggacaaacccgggagaacacccccccaggaggcgagcccaaaggggcaggacaaga

SEQ ID NO: 168265 - RNA, 76 nt, Homo sapiens
aagagcgacaggaggagacaggcgagagaggaggacacgaccgaggggcgagaaggagcgcagacacagacacacc

SEQ ID NO: 168266 - RNA, 75 nt, Homo sapiens
gccaccaggagaagcaaaagagggaaaaagcgcggcaggcaaggccacggaaagagaagcaggacacgcggccgc

SEQ ID NO: 168267 - RNA, 77 nt, Homo sapiens
caggccagagaaccgagcaccagcacccaaaagagaacacaagacgacagaagaaaaccaccaaaggaaaagccgac

SEQ ID NO: 168268 - RNA, 75 nt, Homo sapiens
gccccgcccccaagcgggcgaacccaggcacccagagacggagcggaaaccaaggaagaaaagccacccaggccc

SEQ ID NO: 168269 - RNA, 81 nt, Homo sapiens
gaagagagcacgcagccaggaaaccacgagagcaagaacgaggccaaggaggagggacacagagacagcgaagaaagaacg

SEQ ID NO: 168270 - RNA, 71 nt, Homo sapiens
ccagaagcggagagagcggagcagaagagcgcccccgccagggaagaaccacaaggagccgcaaaacacac

SEQ ID NO: 168271 - RNA, 83 nt, Homo sapiens
ggagaaaccgacacaaaagcagagcgcgaacggagaaagggagacaagcaacaccggaggaccaacggagcgaagagccccgg

SEQ ID NO: 168272 - RNA, 55 nt, Homo sapiens
gggaccccggccggggaagcaaccggagaaccgggccggagcgagggagagcagg

SEQ ID NO: 168273 - RNA, 80 nt, Homo sapiens
gaggaacagaagaagaagaaccggaagaaacgccgagaagcccaaaaacaaagggcaaaggacacaccgcacaaacggcc

SEQ ID NO: 168274 - RNA, 89 nt, Homo sapiens
cggacaacggagaccagaccacgcagccacgcgggcgagcggcggggagcggcgaagccgcgggcgaggacccccgcagagagagcagc

SEQ ID NO: 168275 - RNA, 79 nt, Homo sapiens
ggaaacaccaggcgcggcggcccagccccgacacagaccagggcgagagagagccaagagaaaggccccaagaagacag

SEQ ID NO: 168276 - RNA, 88 nt, Homo sapiens
cgagcggcaccaacagcggcgcgggcaagaagcgcgaaggaaaaagcccaccggaggaggggccagcgccagacggcggccacaacca

SEQ ID NO: 168277 - RNA, 71 nt, Homo sapiens
aggacggggaacacgcagaaggcccgcaagaagcccagcgcagcaagaccgccagccagagaacgcgagac

SEQ ID NO: 168278 - RNA, 63 nt, Homo sapiens
ccgaaagacaccgggcccccgagagaaaggagggcggaagacccggggcgcgaggacagaaaa

SEQ ID NO: 168279 - RNA, 83 nt, Homo sapiens
gcgggccgaccgggcgcaccgaccaggccccaaagccccaaggcgacaagaccggaccgaaggaacgaaaggcaaaacacagc

SEQ ID NO: 168280 - RNA, 54 nt, Homo sapiens
aaaagccaagaggaggacagcgcacacagcaagcacgagcccccgagcacgccc

SEQ ID NO: 168281 - RNA, 78 nt, Homo sapiens
aagccagcccggcaagagcaccagaagcggccgaggcggcaaagaaacgccccaggaagaagccaagccaaaggccca

SEQ ID NO: 168282 - RNA, 43 nt, Homo sapiens
acgacgggagaacgaccggcaggacgaacgccagcccgaagaa

SEQ ID NO: 168283 - RNA, 76 nt, Homo sapiens
ggaccccaaaccagaaagcagggccgcaccccaggagcaagaaagagagccagaagaggcgagaagcagacgcccg

SEQ ID NO: 168284 - RNA, 56 nt, Homo sapiens
gcgggggcccgagaagccgacgggggaggggcgaccccggggcccggccagcacga

SEQ ID NO: 168285 - RNA, 57 nt, Homo sapiens
caccacgaaaaaccagccagcggcgacgacacggccaggaccaaccccgcccccacc

SEQ ID NO: 168286 - RNA, 71 nt, Homo sapiens
aagggcagcaagaaagggaaggccggcagaaagaagagaaaaaggaaccggggagagaaagcggaagaaga

SEQ ID NO: 168287 - RNA, 78 nt, Homo sapiens
aaaacccaagccgacaaccggaggacacagccagggcggacgggaaagcagaagggccgggcaaccacaccgccaacc

SEQ ID NO: 168288 - RNA, 81 nt, Homo sapiens
gggagccccgcccgcccccccgcccaccacgaggcggggccaggccagcagcagaacacaccgcacccaggcgggaggcag

SEQ ID NO: 168289 - RNA, 80 nt, Homo sapiens
aaagacgggcaggcgagcccgacggacaacagacaggagccgggggggcgagcccgccgagagcgccaaggaggagacaa

SEQ ID NO: 168290 - RNA, 72 nt, Homo sapiens
gacaccggaagcgggaaaggaaagccgaagagacccccagaagccagcagcccgcagagcgcagcagaacgc

SEQ ID NO: 168291 - RNA, 89 nt, Homo sapiens
ccgggacccggcgcaggcaggcggaggaagaagccacccgagcggaccccgagaaaaggcgacggcggagacagaagagaggagagccc

SEQ ID NO: 168292 - RNA, 77 nt, Homo sapiens
ggagcgcggaacaccacaggccccaggcccaccaggggcacgagccagccgaagggccggccccccaccacggccga

SEQ ID NO: 168293 - RNA, 81 nt, Homo sapiens
gccgccgccgccaccggcgcccgaaccgcccggccgggagccgccgcgggcaggacgcgcgcgcagacgggggcagaagcg

SEQ ID NO: 168294 - RNA, 63 nt, Homo sapiens
aagggacaggccggaaagaccaaccaaaaacacagaagcgagaacggcaagaaagagagaagg

SEQ ID NO: 168295 - RNA, 81 nt, Homo sapiens
ccgcccagcccccgagagcgggaacaggcacgcgccaccaccccagccagagacggacacgggaaaaagacacaaagagag

SEQ ID NO: 168296 - RNA, 79 nt, Homo sapiens
ccgggcgggggagcgagcagagcgaaggccgagggaaggagaggaggagcagaagagcgcagaaccggccgaaaagcac

SEQ ID NO: 168297 - RNA, 84 nt, Homo sapiens
caaacgaaaagcaggaaccagagggcaaacacgcgccaagacaacggaacgccgaaaaagaaacggccggggggggcacagagc

SEQ ID NO: 168298 - RNA, 80 nt, Homo sapiens
ccgccacccgcggggagacacggcaaagggccaccaggaggcaacacggaaaccgaggagcaccacaaccccagggacag

SEQ ID NO: 168299 - RNA, 68 nt, Homo sapiens
gaaaagaaggcaacaagggcgccgaaagagcgcccaggccagcccacagacaaacgggcggcagcccc

SEQ ID NO: 168300 - RNA, 73 nt, Homo sapiens
caaagcgcagcgaccggccaaggaggcacaaaaagaacaaccagaaggaacgcagagaccgacggagagcagc

SEQ ID NO: 168301 - RNA, 75 nt, Homo sapiens
acagcaccaagccaggggccccaccaggagccagggaggacgaagaaaggaggggaagcagaaagcaaacggccc

SEQ ID NO: 168302 - RNA, 65 nt, Homo sapiens
ccgcgcccgcccagcgccgcagcacgcggaccagggcgcaaaccagaagaagaggggggaagaaa

SEQ ID NO: 168303 - RNA, 77 nt, Homo sapiens
acaaccacccacccccgagacagaagaaagagcccaacagagaggaaacgaggcggcgcggccagaggggcgaaggc

SEQ ID NO: 168304 - RNA, 78 nt, Homo sapiens
gcagacacacaacccgacccgacgagaaagcgagaagaggaaacgggcagaagaagaaaaccagggccagaaggaaga

SEQ ID NO: 168305 - RNA, 58 nt, Homo sapiens
gcgacgaccgccgccaacaacaggcggagaacggaaaagcaccaggaagcagagagga

SEQ ID NO: 168306 - RNA, 77 nt, Homo sapiens
ggggcgcggcgggaaggagcgggcgacccgggggggccagcggagcccgggcagaagacccgagcggcccgagacaa

SEQ ID NO: 168307 - RNA, 65 nt, Homo sapiens
ccaacggaccccggggagcggagagcccacacacggccccccggacagccagagaaccaaaggca

SEQ ID NO: 168308 - RNA, 79 nt, Homo sapiens
gggccacggaagccaccgacaggcccgagggcccgagagcaccgcgccagacagacgggaaacacgaccgccgcgggac

SEQ ID NO: 168309 - RNA, 77 nt, Homo sapiens
gagacgcgcgacccccagacaggaggagccacccgcacagacacgccaaggagcccgggaaggaagacccacaagag

SEQ ID NO: 168310 - RNA, 70 nt, Homo sapiens
cggcggagcgggacggcgggcaacggcccacacggaccaaaacagggaaggaagaaccaggagggaaaac

SEQ ID NO: 168311 - RNA, 60 nt, Homo sapiens
gcaacaagagaaaacccggagacccggccaaacagccaaaggagccgaacccaaaaagag

SEQ ID NO: 168312 - RNA, 67 nt, Homo sapiens
aaagacccaaagacccaagaagaccagaccggacaaggacaaagaacaccgcccagccaagggggag

SEQ ID NO: 168313 - RNA, 77 nt, Homo sapiens
ccacggacaaacaccccaaggagaccagaccggaagggggggaggacgccaccacaccgccccagaggcacacaccc

SEQ ID NO: 168314 - RNA, 72 nt, Homo sapiens
caaaggcccagcacgcacgccaagacgaggggcccggagaggaagaccaccgggcagacaccgcaggacaac

SEQ ID NO: 168315 - RNA, 74 nt, Homo sapiens
gacacagaaagaaacaaccagaccccaaagaagccacagaacaggggaggcagccaggaggaaggccaggaacg

SEQ ID NO: 168316 - RNA, 72 nt, Homo sapiens
gaccccgcccccgcacgacacaggacacggaccgcggcgccacccacgaccccgaagacgacggccccagag

SEQ ID NO: 168317 - RNA, 74 nt, Homo sapiens
gaaaacgaagcagaggaacaacaagaaggaggaagaacggcgaggcaaaccacacaccgggagaggagcacaag

SEQ ID NO: 168318 - RNA, 80 nt, Homo sapiens
acgagggcggcgcgggagcagcacccacagccaaggcgggagccacgagccacgcgcccaggcgcaggcaggggccacac

SEQ ID NO: 168319 - RNA, 77 nt, Homo sapiens
cagggggagggccgcgcgccgccagagagaccccagggggccgccaaggccccgcagccgccaacccgacagcgcca

SEQ ID NO: 168320 - RNA, 61 nt, Homo sapiens
cgaaaagcagcaacgagaagaagccaccaaggagcaggaaaacgacaacggcaagcggaga

SEQ ID NO: 168321 - RNA, 62 nt, Homo sapiens
gccggacccgagagccgggagccaccacgccgcaagccgcaggcaaggacccccgcccagcc

SEQ ID NO: 168322 - RNA, 64 nt, Homo sapiens
ccggagagaaacacaacaccgaagaacgcccggaaacagaaaacaggcacggcagacacaccga

SEQ ID NO: 168323 - RNA, 80 nt, Homo sapiens
ccgcggagcaaggaaaagacccggaaagaagagacacagaggagccacacccccagccagcaaaacgccggaagaaccgg

SEQ ID NO: 168324 - RNA, 64 nt, Homo sapiens
cacagccgcggcggcagcagcaggagagccaaacggaggaaaaggacgccgaaaagggagagca

SEQ ID NO: 168325 - RNA, 72 nt, Homo sapiens
caccgcaaggccaacacacgccccggcgccgaccaggcgacacgaagcagcagacaggggagagggagacgc

SEQ ID NO: 168326 - RNA, 90 nt, Homo sapiens
accaggcgaagcggccgagcaggcgagcgaacgacggccggcgcggaagaggccggcggcgggacggccccacgggacccgccccgacca

SEQ ID NO: 168327 - RNA, 36 nt, Homo sapiens
cccccaaaggcgggagacaggcgaaggcaagggacc

SEQ ID NO: 168328 - RNA, 71 nt, Homo sapiens
gacaccgacgggccgcgaggggaagaggaagcaaagccaaggagcacggggccaaccccggccgggcggaa

SEQ ID NO: 168329 - RNA, 76 nt, Homo sapiens
cgcagcccaggcgcgggggcgacgacagcaaaaaccagccaaggcagggcacagagccggaacacccaccggcaca

SEQ ID NO: 168330 - RNA, 77 nt, Homo sapiens
aaccgaaggccggcgcaggagcccggcgcaggacgaagagcagcaaaaaccacaaagcaacgcaaacacaagaccca

SEQ ID NO: 168331 - RNA, 80 nt, Homo sapiens
cggccggcgaacaagagaggcgggccaggccagcgggccggggagcgccagccgagaggagcgcggagcgcgcgggagcc

SEQ ID NO: 168332 - RNA, 80 nt, Homo sapiens
gcgcaggcccccccagaggaagcgggagcggcagagccggagcccaggaagagagaaggccacgcccgaccccaagcaac

SEQ ID NO: 168333 - RNA, 76 nt, Homo sapiens
aagacagacacacaagaggacagggagaaagggccccaagagcaaaaaaagaagcgagaagcacgcccgaaggcca

SEQ ID NO: 168334 - RNA, 75 nt, Homo sapiens
agccacagccaggagccccagaacgggaccccaggggccgcgagacgacccagaggccccagacaagagcccggg

SEQ ID NO: 168335 - RNA, 79 nt, Homo sapiens
aaacgcgccacaacgccgacgcaccacacgacggcgcagggcaggcagggggcagggcgaccacggagccccccagaca

SEQ ID NO: 168336 - RNA, 76 nt, Homo sapiens
gccccgccggagaacccccccagggggaacgacacaacaagccggaagggaagcaggaaaaccgccgccggggcca

SEQ ID NO: 168337 - RNA, 66 nt, Homo sapiens
gacaacaaacgcaggggcaagcggacacccccagcaaagagaacagaaggggcaggcacaggagac

SEQ ID NO: 168338 - RNA, 81 nt, Homo sapiens
ccggccgggccggccagcgccggaaaccaacaagccgcagggcggagaaaaagggaacccgaggaagcaacagaaccgggg

SEQ ID NO: 168339 - RNA, 59 nt, Homo sapiens
gccacggcaggacccaccggcccgacacagagagaacaaaccgacagggaagaaagaaa

SEQ ID NO: 168340 - RNA, 86 nt, Homo sapiens
caacaccccggccaccgacccacaaggggcggggaaacgcaaaggcaaaagcaagaaaggcggcagagcccagccccacacagcca

SEQ ID NO: 168341 - RNA, 68 nt, Homo sapiens
ggggaggcgggaccagacgaggaacagcaaaaagcaccaggacagagacaccagccgaggcagcgcag

SEQ ID NO: 168342 - RNA, 69 nt, Homo sapiens
aaagagccaagggaaaaagcgcgcaggccgagaccaggccgacacgcgagacaagagaccgcagccgcc

SEQ ID NO: 168343 - RNA, 67 nt, Homo sapiens
aaggcaagcgacggcccgaacgagcggaggccaacaaagcggagagcaaagcgggaccaaagcgcgc

SEQ ID NO: 168344 - RNA, 79 nt, Homo sapiens
ggcccgagaaggaggggagagccacacaccccgaccacgcggccgagaggagcaggccgggcccgccagggcacgcgcc

SEQ ID NO: 168345 - RNA, 73 nt, Homo sapiens
gcagacaacggagcccggggaagcgcggcgcagccagacgcaaaaaggagccaccaaggaaaaagagaagacc

SEQ ID NO: 168346 - RNA, 60 nt, Homo sapiens
caggcaaagccggcgacccgcacagccgcaccccaacccccagaggcccacgcggaccgg

SEQ ID NO: 168347 - RNA, 67 nt, Homo sapiens
ccagaccacggaaagacggacagccaagcaacgaaggcgggacagcacaagacggcagacgaggccg

SEQ ID NO: 168348 - RNA, 69 nt, Homo sapiens
cgccgggccggccgaccacccagcggagaacgcagcgcaagaagcacgcaaagccgccgacaacggcga

SEQ ID NO: 168349 - RNA, 78 nt, Homo sapiens
gcacaaaggaccaacagaagaacccagaacaacccaagaggacaaacccccagacaccaaaaaggcaaggacagaacc

SEQ ID NO: 168350 - RNA, 55 nt, Homo sapiens
gagaggaaccacaagcaggccggggaaccaggggggaaccaccagaggaagagag

SEQ ID NO: 168351 - RNA, 67 nt, Homo sapiens
acagcccaacagcccaagggccgaccaagcagaacccgagaagagccgagaaacacccgacaaagcc

SEQ ID NO: 168352 - RNA, 72 nt, Homo sapiens
caggacacgaagcgcagggacgcaaaaagcaaggcaaaccagggggccacacagagcgcagagggaaagacg

SEQ ID NO: 168353 - RNA, 61 nt, Homo sapiens
cggagcagcggaaaagcaaagacggccgccaacaggagcacagccaagagccaacaccaaa

SEQ ID NO: 168354 - RNA, 75 nt, Homo sapiens
ggagaggaggcggcccagcgaagcaggcaaaaggcggccagccacggcaaggccgcccgagggagacccagaggc

SEQ ID NO: 168355 - RNA, 58 nt, Homo sapiens
gacaaggccccagggaagcagacaccacccaccaaccaagcacagaaaaaagcccccg

SEQ ID NO: 168356 - RNA, 77 nt, Homo sapiens
agccgaagcagcggaaggcagcccagccacgaaggccccccagggcacgacaaggaacaggaggcgccagggcgcaa

SEQ ID NO: 168357 - RNA, 73 nt, Homo sapiens
gccgaacggccacagggacaggaacccacaggggaagagacaccgagagaaggaccgagccccgaacgcgggg

SEQ ID NO: 168358 - RNA, 112 nt, Homo sapiens
ggcccccggagagaaacacaacaccgaagaacgcccggaaacagaaaacagacaaagcaagggaaacacagcagcagaggccagcaaacccaccaggaggaacaagcccgcg

SEQ ID NO: 168359 - RNA, 71 nt, Homo sapiens
aagacgcaggggggaaccacagcgacaaggagggccaaaaccaggcgagaaccaggagaagcggggggaag

SEQ ID NO: 168360 - RNA, 81 nt, Homo sapiens
cggaaggagcggcccacggcaaagcccgagaacacgaaacaaggaagaaagaagcaagaaaaacagaccgggggaaaaagc

SEQ ID NO: 168361 - RNA, 83 nt, Homo sapiens
ggcgccgagaggccggcgggacgcgggcgccaggaccggccgaacgcagagggaaaggccaccaagacagccagggcaacccc

SEQ ID NO: 168362 - RNA, 84 nt, Homo sapiens
agaggaaaaggagcgagcagacgacaagccgggagcgggcggccaaccagaaacggcgaggaaagagaggagccccggaaagaa

SEQ ID NO: 168363 - RNA, 74 nt, Homo sapiens
ccgcgagaacgaagggaggggaccaacaggacaacacgccgaggcaagcggacagaaacgacggacccagaggc

SEQ ID NO: 168364 - RNA, 88 nt, Homo sapiens
ccggggcaaccggaggagacagacgacgggaggaccaggacagcagggaagaacggaaaccagagaaagaaacgcccccacacaaaag

SEQ ID NO: 168365 - RNA, 87 nt, Homo sapiens
gaaaaccgagcgcgggagaaggaagaaggaccggggagacaggaacacgggcaagacagcgcgggcaccgccgcagggccggccgcg

SEQ ID NO: 168366 - RNA, 73 nt, Homo sapiens
caccggacccggaagcaggacagggcagaccgccagcagcacagcaagccacagagagggccggcagggcggg

SEQ ID NO: 168367 - RNA, 74 nt, Homo sapiens
gcgacacacgacggggaaacccaccagggaagcccgacgcaccaagagcagcacaacaacacaggcaacaccgc

SEQ ID NO: 168368 - RNA, 73 nt, Homo sapiens
caaacaggaagagggagcccgccgacagcccacacgcagaagaagaacccagccggaaaacggaaaggaggcc

SEQ ID NO: 168369 - RNA, 69 nt, Homo sapiens
aaagacccggcaaagccaaccggcagcagcagaacgaaaaacagggcaccgcagagaaagaaggaagga

SEQ ID NO: 168370 - RNA, 40 nt, Homo sapiens
acgcaccgcaggcacagggagggagcaacgcgagccaagc

SEQ ID NO: 168371 - RNA, 49 nt, Homo sapiens
ccaccccgaaacgccccgaaaagacgggcaacagggaaaagcacagggc

SEQ ID NO: 168372 - RNA, 80 nt, Homo sapiens
gagagcccagggggcccagggcgccaagggcggccggaggaggccaacgccgaccggaaggaagaccggacggaccagag

SEQ ID NO: 168373 - RNA, 72 nt, Homo sapiens
cgggcccagaaggcgagaccagagacgagaagcacccccgcaaacggaagcaccaaacagaaaccccgcaaa

SEQ ID NO: 168374 - RNA, 79 nt, Homo sapiens
gagacaagacggggaccgagagaagcacggggaccggagaagagagcaggcagccaggccaccgagcggcagcacagcc

SEQ ID NO: 168375 - RNA, 64 nt, Homo sapiens
gggagaccacagcaagacgccaggacccacggaagccagaaaggcgacgaggcggagacacggg

SEQ ID NO: 168376 - RNA, 71 nt, Homo sapiens
gaaaagccaacgccggcgaagacaccaaagaaaccgccacccgagaaaacaggaaaaaagcaggccccgcg

SEQ ID NO: 168377 - RNA, 88 nt, Homo sapiens
gagccaaaagacgcagagccccagggcggacagcagcccggggcaaccggagccccccaggaggcagacgaggcggagaagaagccga

SEQ ID NO: 168378 - RNA, 78 nt, Homo sapiens
gaagagccagaagaggcgcagagacaagaaaccacaaggcacccaaaggcacccaaggcacagccagagaacaacaca

SEQ ID NO: 168379 - RNA, 73 nt, Homo sapiens
ggggacggcccacgcagaggcacgccaggcggagcaccaccgcaaacaccacgcccacagaaacggcgcggca

SEQ ID NO: 168380 - RNA, 73 nt, Homo sapiens
cgccggcaaggaggcaccgcggcagacgggaccacgaggcaacgccccagcgggccgaggaggacgcagagcc

SEQ ID NO: 168381 - RNA, 49 nt, Homo sapiens
ggacgcggacgcacggaagaagagacacgaagagcacggagcggaagag

SEQ ID NO: 168382 - RNA, 57 nt, Homo sapiens
aggagccccacgccacggcggacacagacaggcaggagaagaaggagcggcagaagg

SEQ ID NO: 168383 - RNA, 82 nt, Homo sapiens
cggcagaggcagcagccgcccccgcacggcgccccaccaccgaacagacccgagagaagaaccacgaagcgcccgagacgcc

SEQ ID NO: 168384 - RNA, 60 nt, Homo sapiens
aagggagcagacccccaggcccggccgggccaagagggagccaggagcgcgggagcgaag

SEQ ID NO: 168385 - RNA, 79 nt, Homo sapiens
ggccccgcggcaggaagccaaggcaccgggacgcgcacccccgcgccgcacggggacgagcgcaccccccggaggcggc

SEQ ID NO: 168386 - RNA, 69 nt, Homo sapiens
gagcaaaggcgagagccacaaccgacagaacaaggccgaaaagcaccggaagaaaagagccaacaccac

SEQ ID NO: 168387 - RNA, 72 nt, Homo sapiens
acaaaaccgggagggacacaagaaggagcacgaaaaaccgaacgagacaacagccaacgacaggcgcgaaag

SEQ ID NO: 168388 - RNA, 76 nt, Homo sapiens
aacagacaggacaagcaaccggcgacaaagaagagcagcccagcgcgcaccagggcgccagggagagagccacggc

SEQ ID NO: 168389 - RNA, 62 nt, Homo sapiens
accgacaggcccgagggcccgagagcaccgcgccagacaggcagaccgaccaaacagggagc

SEQ ID NO: 168390 - RNA, 70 nt, Homo sapiens
aggcaggggggacccgcccaaccccgagaggagcgcgcgcccaggcggaggaaggggcgcgagccgcgca

SEQ ID NO: 168391 - RNA, 65 nt, Homo sapiens
gagcaaggcacccgggacgagcgagaaagggacggccccaagcggcagcgaggaagaagccccaa

SEQ ID NO: 168392 - RNA, 78 nt, Homo sapiens
accagagggacggagccagcccgggcgcgccaggcacagccaagagcggaccggcagcggccagcgcagcggccggag

SEQ ID NO: 168393 - RNA, 53 nt, Homo sapiens
cccccgaccgcacacaggaacccaacaaggggagggcacaggcacgaacagac

SEQ ID NO: 168394 - RNA, 83 nt, Homo sapiens
gagcaagaaaagcccgggagcagaagggaggcccaagacccacaacaaaaggcacgccccaccggaggaagcaaaaaaagcag

SEQ ID NO: 168395 - RNA, 64 nt, Homo sapiens
cagccaaccacagggccacaaagggaaaaagcgcggcaaagcgcggcccacacaggagccaagg

SEQ ID NO: 168396 - RNA, 82 nt, Homo sapiens
cacgcagggcagccccaggcgggcgcggccagcagccagagcacagacagggacccgagacaggggcaagcaagcacaaacc

SEQ ID NO: 168397 - RNA, 80 nt, Homo sapiens
gaggaagcggaaaccagggccacagcacgcagccccaggcagaacacaccagcaagacgacgggagccaagcaagacaga

SEQ ID NO: 168398 - RNA, 74 nt, Homo sapiens
gacaagacgcggcgccgacgggccccgaggccgcgggcggaggacagcagcggacggccggaccaagaggcgcc

SEQ ID NO: 168399 - RNA, 49 nt, Homo sapiens
agccgccaaagccagacgacaacggcaagcggagaagagcaaggccgaa

SEQ ID NO: 168400 - RNA, 72 nt, Homo sapiens
ccacccaccacgacggaggacggaggagagggcggcaggaaaggaagacagggcagaagccaggaccccacc

SEQ ID NO: 168401 - RNA, 60 nt, Homo sapiens
ccaagcaacggagaccgggggggcaagcaaccaggccgcacggccacaccagaagaaaag

SEQ ID NO: 168402 - RNA, 77 nt, Homo sapiens
gaagcaccggccagggcaccggggcccggcgcccgggcccgccccggagggggaaaagaaacaaacaacaagaagaa

SEQ ID NO: 168403 - RNA, 70 nt, Homo sapiens
aaacaacagggaaccaaggggacaaaccaacagaagggcaaccagaaacaagagaagacgaacaaagaca

SEQ ID NO: 168404 - RNA, 71 nt, Homo sapiens
aaagcccgaacgaggaaaaacagccaagacggcaaagccccccagaagaccagggggcaggagaaacggca

SEQ ID NO: 168405 - RNA, 42 nt, Homo sapiens
gaagaacggccgggaaaccaggcaccgacgagagggcgcacc

SEQ ID NO: 168406 - RNA, 75 nt, Homo sapiens
ggacacacagacccccaccaagcagacgccaaggcaacacacggccaggacacgacccagaacccaaaagccccg

SEQ ID NO: 168407 - RNA, 71 nt, Homo sapiens
acaccaacacccccagagacacaagccaagccagggacccaaagaacaagccacacgcccacaaggaagaa

SEQ ID NO: 168408 - RNA, 76 nt, Homo sapiens
gcccgggccagcccaggaccccaggggaacaagaggccacgcagagccacgccgacacacgaaggcggacgccagg

SEQ ID NO: 168409 - RNA, 76 nt, Homo sapiens
gacgagggcggcgcgggagcagcacccacagccaaggcgggagccacgagccagcaaagcggagaccaacaagaaa

SEQ ID NO: 168410 - RNA, 85 nt, Homo sapiens
accgcgaccgccccgggcacggccccagcgggcccaccccacccaggcgcagaacagcacacggccccagcggaccaaccaggag

SEQ ID NO: 168411 - RNA, 80 nt, Homo sapiens
ccgagagccaccgcggcgccgggccgcgggacccggagcaccgggccggcggacaggagggcgcgagcgcccaaaggacg

SEQ ID NO: 168412 - RNA, 103 nt, Homo sapiens
cagcccacagagagcaaaacacaagagagcagggaggagccgcggcgagccgcacagggcaacacacgcaccgcacggcccccgcccacaaagcgccacaacg

SEQ ID NO: 168413 - RNA, 65 nt, Homo sapiens
ccacgagcggaggaggagaaccgccagggacaagagaaaaaaagggcgggcgaacaaaaagagca

SEQ ID NO: 168414 - RNA, 65 nt, Homo sapiens
ccgcacagacaacgaaaacagagcagaagggaccagaagggggcaacagaggggcccagacagag

SEQ ID NO: 168415 - RNA, 76 nt, Homo sapiens
gaagaagcaaaagagcggccagaggcaccagggagacagcggccacgggggaagaacggagaacgagccacgcaga

SEQ ID NO: 168416 - RNA, 81 nt, Homo sapiens
ggacaaagaccggcagagggggcggaggaagaacaggccaggcccggagagaagaaacacaagaaccccaaaacagacgga

SEQ ID NO: 168417 - RNA, 71 nt, Homo sapiens
cgcacgacgggacacgccagcaagacaagcacgcagcacgggggcaggggccgacccagaacgccagcgcc

SEQ ID NO: 168418 - RNA, 98 nt, Homo sapiens
cggaaggaagaaggcagcagggcaaaaaggacccaagaagaacagaaggaagacaaagagacggcacccccaaagaagagcaaaagagaaagaagaaa

SEQ ID NO: 168419 - RNA, 87 nt, Homo sapiens
caaggcggaggcgccgcccggggccccgcggcgcaggaggcggggagcgcagagcgggcgagcgcgcccaagacacagccccagcag

SEQ ID NO: 168420 - RNA, 70 nt, Homo sapiens
accacaaacaacacgaccaaggagggaacaggggcacacacaagcaaaacaccccccaccacaaagaccg

SEQ ID NO: 168421 - RNA, 62 nt, Homo sapiens
aacaaccaccagccacaaccacagaccagagggccccacgacaaagggccagacagccaccg

SEQ ID NO: 168422 - RNA, 70 nt, Homo sapiens
gcagaagccacgcaaaggaggaggcagcaacagagaaaacaggacccagcgcaggcagcaagaaaaaaac

SEQ ID NO: 168423 - RNA, 79 nt, Homo sapiens
ggaaaccggagcgcgcagcaggacagcccagagcaagcacacggaggcccgggagccagaccgggagcccgccccagcc

SEQ ID NO: 168424 - RNA, 91 nt, Homo sapiens
cggcgcgcggaggaggcgcagcagcggaagaccccagccagggcgcccgcgccggcagaggaggcgagcacccgccagggagaggaacccc

SEQ ID NO: 168425 - RNA, 67 nt, Homo sapiens
ccgaccccaaggcaaaaaggggagcgagaaccaaggaagcgagaaaaggagaggggagagcaaggga

SEQ ID NO: 168426 - RNA, 55 nt, Homo sapiens
cggaggggacgaagacaaaaaccaggcacaagcagaggaaccagggaaccgccgc

SEQ ID NO: 168427 - RNA, 90 nt, Homo sapiens
aggaccgcgcccggaccgccgcggacacggcggccagacacccagcgcaaggggagaggccccgcaaagaagggggcgagaagaaaaagg

SEQ ID NO: 168428 - RNA, 51 nt, Homo sapiens
gacaaagcgaaagcacaccaagacaacaggcacaaagagagaaggaacacc

SEQ ID NO: 168429 - RNA, 65 nt, Homo sapiens
gcgcgcccaccaaggacgaggggaccgcagaaaggaagcagagcagaggaaggacaagcaagaac

SEQ ID NO: 168430 - RNA, 107 nt, Homo sapiens
cgagccggcgcggggcggcgcgggcggaggcggcggagcgcgagagccgagcggaccagaccaagacacccaggagaaagacagcggggaaaagaaaaaggaggggg

SEQ ID NO: 168431 - RNA, 57 nt, Homo sapiens
aacaaccccacccagacaaaaccaaaccgcacaaacaaagccaaggaacaaagaagg

SEQ ID NO: 168432 - RNA, 72 nt, Homo sapiens
gacaaaggcgccgcagcaccccccggacccagccccgggaggagaaccaggaccaaagcaccagcacagaag

SEQ ID NO: 168433 - RNA, 76 nt, Homo sapiens
cacggagagcaggcagcgggggggcgagcccgaaacgaggcgggagcagcacagaaccaacggcccgggaccaccg

SEQ ID NO: 168434 - RNA, 72 nt, Homo sapiens
acggacccccaggcgccacccgggaccggccgggccgacccaggcagagacaagagcacggccgccccggcc

SEQ ID NO: 168435 - RNA, 73 nt, Homo sapiens
cagcacacgggaggcaaacgaaaaccggaacagcagcacagcaaagacgaccgcccggaccggggcgggcggc

SEQ ID NO: 168436 - RNA, 74 nt, Homo sapiens
gaaagcaagacccaggacaccccgaagccgagaaaggccaagagacagacaccaaacagacgagaaacgcagca

SEQ ID NO: 168437 - RNA, 75 nt, Homo sapiens
gggccaacggacagaggcccagagcccgggacaagaaagaccgcaaggggaaggacaaggcgagaccaccagaag

SEQ ID NO: 168438 - RNA, 129 nt, Homo sapiens
agcaccgccccaaccagaagaaaccagccagagagccaagaagaacagacagacaggcccagagcaaacgaggccccgagagcccaccagcacaggaaaaacccacagcagaaccggagcagcaaggca

SEQ ID NO: 168439 - RNA, 79 nt, Homo sapiens
gaaaaaaaaaacggagaagacaccacaagcaacacaagaacagaagccaaggcgcgagaaggcaccggggcaaacggca

SEQ ID NO: 168440 - RNA, 117 nt, Homo sapiens
cgagaccgccgcccccacagcacacgaccgcccgggcccccccggacacacaggagaccccaaggggcaagacgccaagagaaaaggcgagagcacaaagcaccaagagccgagaag

SEQ ID NO: 168441 - RNA, 78 nt, Homo sapiens
cggagcacgagaaaacggcggggcacgcagcacgggggcaggggccgacccagaacgccagcgccgcaaggaaaaaaa

SEQ ID NO: 168442 - RNA, 73 nt, Homo sapiens
cccaccaagaacccagagaaggccggcccacagcccaaaaagaaacaggaccgaaagccagagcgaagccaaa

SEQ ID NO: 168443 - RNA, 76 nt, Homo sapiens
ggggcagaaacagagaaggaacagggaaaacgacccggaaagagccagaccaggacaacagggccaagcccgaagg

SEQ ID NO: 168444 - RNA, 84 nt, Homo sapiens
cagaggcgggaggggccgggaggcagaggggcagggaccagccgacagcgaccaaggccagagcgaaaggccacggccagccgc

SEQ ID NO: 168445 - RNA, 85 nt, Homo sapiens
aagccacaaaaggggagaggcccaggaggacagcccaagacacagccccagcagcccccagacccacagacacacccagggaaaa

SEQ ID NO: 168446 - RNA, 82 nt, Homo sapiens
cacgccgggccaaaaaggagccgcccgcagcgaggagccggagcgcacagagaagaggggacaagaggaccaagagaagaca

SEQ ID NO: 168447 - RNA, 78 nt, Homo sapiens
caaggcaagaccgaacagaaggaacgacgcggaccagaagccagagcgaggacgccggcagcccagaagaacaggcgg

SEQ ID NO: 168448 - RNA, 56 nt, Homo sapiens
ggaaaaacacacaacgaaaacagacgagcgaaaggagcaaagagaaaacgacgcca

SEQ ID NO: 168449 - RNA, 76 nt, Homo sapiens
ccaaggcaaaagacgaaaaccaccggaacggcgaagaggcaccaaaaagaaccgcagacagaggaaccaggacaga

SEQ ID NO: 168450 - RNA, 59 nt, Homo sapiens
gcaaaaccacacagcgaaaagaacaaccggacggcacccccggcaaggggagcacccca

SEQ ID NO: 168451 - RNA, 87 nt, Homo sapiens
aaagcagcggcgcagcccgggggcggcacccaccccccgagcccgcccgccggccccagcccccaccagcagccccgggccacaggc

SEQ ID NO: 168452 - RNA, 74 nt, Homo sapiens
gggagggccccgcggaccaccgccggggacaccaccagggcagaagacccgagcggcccgagacaaggggaccc

SEQ ID NO: 168453 - RNA, 81 nt, Homo sapiens
gccgcccaaccccaccacccccccagacacaggaacaacccgccaccggacgaggagccaagaggacaccaggggccgggc

SEQ ID NO: 168454 - RNA, 73 nt, Homo sapiens
gggcacaccaggacccccccgcggcggccgacccgccagacccacaccgccggagagacggggcgccagggcc

SEQ ID NO: 168455 - RNA, 72 nt, Homo sapiens
aaagacagcgaccccacccacaccaggagaggccacaacaccagcacgggaagaggaccagagaggacaacc

SEQ ID NO: 168456 - RNA, 78 nt, Homo sapiens
gcaaaggccagcaaagcaggcgaggaggagcaccggaaagaacaaagcagggcgcaggcgaaaccgggccccaacaga

SEQ ID NO: 168457 - RNA, 81 nt, Homo sapiens
ccaacgggaccgggcagccgcgcaggcggcacacagcccgcccagcaaccgcaaggacgggccaacgcacggcccggcaga

SEQ ID NO: 168458 - RNA, 69 nt, Homo sapiens
aagcccaccccccgcccagaccggccaaggacccagcagcggccgcgagaaccgggcagagcagcccgg

SEQ ID NO: 168459 - RNA, 81 nt, Homo sapiens
acaacaccacagccggaccgcacccgcaccgccaaccacgggcgaggaggcgccgcgcagaacgagccaacgggacgcaaa

SEQ ID NO: 168460 - RNA, 33 nt, Homo sapiens
ggaccgcgcccgcagccgccagccgggaggggg

SEQ ID NO: 168461 - RNA, 97 nt, Homo sapiens
gagaaagggggcgccaggagggcgacaaggcaaagaaccgaagacgacccaaaagggaccagccccgaacagcaggacccaacggcagcgggaaaaa

SEQ ID NO: 168462 - RNA, 35 nt, Homo sapiens
cccccacgcaaaagagggaccagcggggacaaggg

SEQ ID NO: 168463 - RNA, 72 nt, Homo sapiens
gcccgcgcagcagaagacggagacaagagacgcagaaaacgcaggacccccgcggacgcgaaggcgaaaaaa

SEQ ID NO: 168464 - RNA, 76 nt, Homo sapiens
cggaacgagccggccggagcccccgcccaaggagaagcgcccaagcggacggccgggagagagcgcgaaccggaaa

SEQ ID NO: 168465 - RNA, 84 nt, Homo sapiens
gcggcagcgcacgcgggaggccgaggagaagcggaggagcggcgaagcgcggcgcagagaacagcccaccaccacccgagcgca

SEQ ID NO: 168466 - RNA, 90 nt, Homo sapiens
gggacccggggacggcacccagaggaccaggcggcggccaacggaccacaccaaaagccaccaaaggaacacgccaggaaaccagagaca

SEQ ID NO: 168467 - RNA, 54 nt, Homo sapiens
ccggacggggcggggggaacggccaccgggagcaggagagggccagaagacaaa

SEQ ID NO: 168468 - RNA, 73 nt, Homo sapiens
ggcaggaacgcacgaaaaggaaccaggcgccccaggagaaggaccgaagagggagacgcgcacggaccggaac

SEQ ID NO: 168469 - RNA, 78 nt, Homo sapiens
caacccccccacgccacacagggaaggcacacagcagccaagaggcgaggaggaggagagaacaaccgcgcacggaag

SEQ ID NO: 168470 - RNA, 75 nt, Homo sapiens
cccgagagcgggacgcagaacgggcagcgagcccgaggcacaccggaccccaacagcacaggagcggaggggccc

SEQ ID NO: 168471 - RNA, 70 nt, Homo sapiens
aagagggaagagggaaaagggcggagagagacaacacgaaaaaccaccagcgggacagagaagaggacgg

SEQ ID NO: 168472 - RNA, 81 nt, Homo sapiens
cgcgagcggcgggcgggcgggagcgcccaagggggcggagagcggggggggcacccaggccacagaggaggaaagagaggg

SEQ ID NO: 168473 - RNA, 79 nt, Homo sapiens
agagaaaggacgagcagcaagcagggagcaagacaggggcaaggccgaggggaacagcacacagagaggaggcggaagc

SEQ ID NO: 168474 - RNA, 73 nt, Homo sapiens
agaggaggccgccagcagaggcggagcccgcagaccgcagaaggccggagacaccagcaggagcagcccgagc

SEQ ID NO: 168475 - RNA, 87 nt, Homo sapiens
ccgggccgaaggagaccaaggagcggacggcacaccgcgaaggcagcaagagcaaccaccaccagccgggcccagaagcagcccgcc

SEQ ID NO: 168476 - RNA, 61 nt, Homo sapiens
aggagagaaaccacaggcccccaccccaaccccgccccaagccgcccaccagccccccccc

SEQ ID NO: 168477 - RNA, 69 nt, Homo sapiens
aaaaccagagaaaacggggcacccggaaacaagccacgaaggagagaaaaccagcagcagcgcagcaga

SEQ ID NO: 168478 - RNA, 81 nt, Homo sapiens
gaggaaccggcccggggccccgaaacgggccgcccccacagcaccccgggcggcggaggcaaaagcagaccggaaaaccca

SEQ ID NO: 168479 - RNA, 73 nt, Homo sapiens
aaacacaaggagcagagacaaaaccaagccaaacacaagcagaaggagcgaagaagaggggaacacaagacag

SEQ ID NO: 168480 - RNA, 75 nt, Homo sapiens
cacgaccgcggcccaggccggcgacagggcacaagaacgaggcgcccccacgacccccgagcacccacgggagac

SEQ ID NO: 168481 - RNA, 61 nt, Homo sapiens
cagagccgagaaacgcgaaaaggaagcggaagggcgggaaaacggcacaaggcgacgaggg

SEQ ID NO: 168482 - RNA, 73 nt, Homo sapiens
agaagggaagaagcggagaggcaggaaaaggaagagcaaaaacaaaaacccagcagacaaaagacagaagcaa

SEQ ID NO: 168483 - RNA, 79 nt, Homo sapiens
ggggaaaaggcaaaaacccacaccgcaacccagcgagagaaaggggagggagcagcgcacacaaggacgaaggaaaagg

SEQ ID NO: 168484 - RNA, 66 nt, Homo sapiens
aagccaggagccaccaacaccaaaaagagccccaggagggacagcgggaaccaccagcgcggagac

SEQ ID NO: 168485 - RNA, 83 nt, Homo sapiens
aaacggacagcacagaccaccggcaccacaaaaaccccaccacgcggcaggggccgccgaggaaaaagcaacaagaagaaaac

SEQ ID NO: 168486 - RNA, 85 nt, Homo sapiens
caccaacgagacccgccacacgacccgggcgcgccaggcacagccaagagcggaccggcagcggccagcgcagcggccggagcag

SEQ ID NO: 168487 - RNA, 72 nt, Homo sapiens
gcggcccgggcccccccgccggaaacagggcggagaacggaaaagcaccaggaagcagagaggaccgcagaa

SEQ ID NO: 168488 - RNA, 69 nt, Homo sapiens
agcacagaagaagcaacacgagaaccaccccgacacaacaccaccagaagaaaacaccggagcccaaga

SEQ ID NO: 168489 - RNA, 72 nt, Homo sapiens
cgcacggaaccgagcaaaaagcacgaaacgcgaaaagagggaacaaaaagcgccacaccccccaccaagccc

SEQ ID NO: 168490 - RNA, 76 nt, Homo sapiens
accgggaccccaagccaaagaacccacacaaggacaagggacaccgagccaggggggcaagacccaggagaacagg

SEQ ID NO: 168491 - RNA, 82 nt, Homo sapiens
accaccacagaaggaagaagcccgaagcggaggacccggcccagccgggcaggccgacccccaccagccgagacacaagcag

SEQ ID NO: 168492 - RNA, 81 nt, Homo sapiens
cacgcgggggccaaacgcacagaagcccgacgccgccgacgccacgagggcgccacgacggacgcaacgcgcgccggaagg

SEQ ID NO: 168493 - RNA, 55 nt, Homo sapiens
caagcaggaccacccaccagccaccagaggaaaggcaagggcagaaaagagggga

SEQ ID NO: 168494 - RNA, 78 nt, Homo sapiens
gcgagagcacgccaacgacgcccccagaggaaacggcccacgggaccacagcaggcgccggggaaggaaccagaacgg

SEQ ID NO: 168495 - RNA, 67 nt, Homo sapiens
ggagaaaggacacacgaaaacagacgggggaacaagaggaccccgcgcggggggcagccccgggagc

SEQ ID NO: 168496 - RNA, 71 nt, Homo sapiens
gcgccggcggccccaccccacgcagccccccacgcgcagggcccggagcggggggaaaacccccaggggag

SEQ ID NO: 168497 - RNA, 37 nt, Homo sapiens
ggaacaaagagagagaagagaagaaagcgacagaggc

SEQ ID NO: 168498 - RNA, 77 nt, Homo sapiens
agaggcgggccgggcggggagccaggcagccgaacccccggagggaggggaaggccccagaagaaaaaaaacacgaa

SEQ ID NO: 168499 - RNA, 52 nt, Homo sapiens
aaaagccgccacacgccaaagcgagacgacgggaccgaaggaccccgccaga

SEQ ID NO: 168500 - RNA, 75 nt, Homo sapiens
cacgaaccaaaagggacggacaaaggaacaggaccagaaaacgcacgcaaggcgcaaaagggaagaacaggccga

SEQ ID NO: 168501 - RNA, 73 nt, Homo sapiens
ggcgcaggcgcgcagaacggacccagagcccggcccggaccgcacaggacgagcgaagacagggaaaagaaaa

SEQ ID NO: 168502 - RNA, 78 nt, Homo sapiens
caacccaaccgcagagggaccgggccacccgggggcccacagggccaggcccaagcccagcagaccaacagcgcagcc

SEQ ID NO: 168503 - RNA, 59 nt, Homo sapiens
gcaccacgcccgccccagcggagaggggagcagaccggaagacccgaccggcaagacca

SEQ ID NO: 168504 - RNA, 76 nt, Homo sapiens
cacaaaagagcagaggaggaacaccaggcacaagggaggcacacaaggccaacacgaggacagcacggcagcaacc

SEQ ID NO: 168505 - RNA, 36 nt, Homo sapiens
ggaaacggagggagcagccacagaccaaaagcgaag

SEQ ID NO: 168506 - RNA, 75 nt, Homo sapiens
aggacaaccaggagccccgggcaggagagacaacaaagcgcaaccaagggggcccccaaagggaagccaaacaca

SEQ ID NO: 168507 - RNA, 74 nt, Homo sapiens
ccggccccaccccccaaggaaaagcacagaagagaaggacacgcaaaccaccaagcccaacgcagccaggcaag

SEQ ID NO: 168508 - RNA, 81 nt, Homo sapiens
accgacgcgcggaggagaagagacccggggaggcagggagcaagaggcagacagaccgagacgggcaaccaacaagaaaca

SEQ ID NO: 168509 - RNA, 79 nt, Homo sapiens
gggcagaaggacagcaaaggaagccaagggaccgcgaggacgagagagaaggacaagcccccacgaggaaaaccccccc

SEQ ID NO: 168510 - RNA, 76 nt, Homo sapiens
gagccgcccaagcccgggccagggccaccccggcgagaacggcggccaaagcgccagacaagggccgagccccgga

SEQ ID NO: 168511 - RNA, 67 nt, Homo sapiens
ggcgcacggcccgagcgggggcagccgcagaggcgcgggagaagaaccaacaacggaaaaccagcgg

SEQ ID NO: 168512 - RNA, 68 nt, Homo sapiens
aggcgcccaaccgacacacgaaacaaccccgaccggccgcaggaaagcagacgaaggacaagccgagg

SEQ ID NO: 168513 - RNA, 89 nt, Homo sapiens
acaagcagagcaccggacacgaggagaaacagcagaaacgcaccaggccaaagaaagagaagaggaggcaagcggcggccaggcccagg

SEQ ID NO: 168514 - RNA, 70 nt, Homo sapiens
gcaaaagacagaaaaccgaggcaccaagccggccagcaagacccgagcccagggaagggcaggcgcccag

SEQ ID NO: 168515 - RNA, 78 nt, Homo sapiens
ccgcccgggcccgccccacaggagccggacacgcagacagcaagccagagacccagagcagcagcgaagagaaggccc

SEQ ID NO: 168516 - RNA, 54 nt, Homo sapiens
ccaagccaggcccagcagccgccaccgggggggagccgcacgacccgaacgcca

SEQ ID NO: 168517 - RNA, 78 nt, Homo sapiens
ggcagaagcacaccaaacaaagaaaagaacaagcggagaaggggaagggacagcccagacacaaacaaagccaaccca

SEQ ID NO: 168518 - RNA, 78 nt, Homo sapiens
cgcacgagaccccgagccggagcggaaaaacccgggaaaacccagaggaaccaaagcccccaggcccgcccaaccaga

SEQ ID NO: 168519 - RNA, 67 nt, Homo sapiens
acggcgcagccgaagcaacccaccagccacgggcacccacccgcagggagagaacagcacacagagg

SEQ ID NO: 168520 - RNA, 72 nt, Homo sapiens
gcagccagcccaggagagacagcccacaccggcaggccaacaaccaagacgaacgaacgcccagacaagccc

SEQ ID NO: 168521 - RNA, 74 nt, Homo sapiens
gccgagaagcggggcaccacgaaggaccgaagagagaggacgacgaacacccaggcaggccagagccgaaccaa

SEQ ID NO: 168522 - RNA, 76 nt, Homo sapiens
aaaaagcggccaaagaaggaagcgcgcaccggaaaggggacagacacggccggcgccgagccgggggccgacagca

SEQ ID NO: 168523 - RNA, 63 nt, Homo sapiens
aacgggaaagagacagcacaggacgcagagagcgggaaaggcgcagcagagacgggcggagca

SEQ ID NO: 168524 - RNA, 77 nt, Homo sapiens
ccgcccgggccagcggccgcgcacccccggccggaggcaccagcacccagagcccagagaaagaggacaggcagaag

SEQ ID NO: 168525 - RNA, 83 nt, Homo sapiens
gagcggcgcagaccgagacccggacagggcaggaaacaggggggaagcgaggcaggaagcccagcacgccgaaggccacgcga

SEQ ID NO: 168526 - RNA, 79 nt, Homo sapiens
agggcccggccaccgccaagaccagcaggaggagagaagagaaagcgaaagggagaaccccgggaccagccggaaaaaa

SEQ ID NO: 168527 - RNA, 74 nt, Homo sapiens
ggacaggagagcagcagcacgaaaccaaagggaaaacagagacagcagcagacggaagggagagaccagcagcc

SEQ ID NO: 168528 - RNA, 39 nt, Homo sapiens
ccagccccccacccaacgcgcagccagagcggagccaca

SEQ ID NO: 168529 - RNA, 36 nt, Homo sapiens
agcgcccagcccacccaacccccagagacaccaggg

SEQ ID NO: 168530 - RNA, 63 nt, Homo sapiens
ccaaaaaggcgacggcgccgaaacggaacccgcaccaagaaaacaccgggaaaggcccaaacc

SEQ ID NO: 168531 - RNA, 79 nt, Homo sapiens
agcccccacgcagcccagaagccgggagacaaggaaaacacacagaaaacaacaggggagcggaccaccaggcaagcgg

SEQ ID NO: 168532 - RNA, 79 nt, Homo sapiens
cagcggccagacggccagcggcagcaagaacccgagcacgcagccccgaaggcggcccggccccccaaaaggcagcaca

SEQ ID NO: 168533 - RNA, 80 nt, Homo sapiens
gggcgcggcggcgggacaccgagcccggggaggggccccgcgagacagcccaccgaggaagaccaaaggaccaaccaaca

SEQ ID NO: 168534 - RNA, 73 nt, Homo sapiens
ccacaaagcacgacaaagaggggaacagcaaaggcggaaaacacagacacggcaccgaaaggagggaaaaggg

SEQ ID NO: 168535 - RNA, 71 nt, Homo sapiens
ccagggggcgccgccccacggaggaccacgccgcgaggcaaacgcaagggaaaaaagggcaggggaaagag

SEQ ID NO: 168536 - RNA, 72 nt, Homo sapiens
agagcgcgcccaccgaccccgccccacaccggacacgggacaacaacgcagcccgaggaccagcagcagggg

SEQ ID NO: 168537 - RNA, 73 nt, Homo sapiens
gagccaaggacccaaaaaccaggacgaaaagaaaagcgccggccgagaagacccgaggcccgggcaacaagag

SEQ ID NO: 168538 - RNA, 74 nt, Homo sapiens
aagacaaaagccacccaggccggccagcacccaccgagaaggccagcagcccaggccagccgccaggcccaaaa

SEQ ID NO: 168539 - RNA, 73 nt, Homo sapiens
cagcagaaccagccgaacccgaacacggacgacagaacacagcggcaggccagcagagccaggacaacagaaa

SEQ ID NO: 168540 - RNA, 73 nt, Homo sapiens
gagcaaaagcaccccgcaccaacgagaagaggggagaagcccgaggaagagaccaagaacagaaacaggccag

SEQ ID NO: 168541 - RNA, 67 nt, Homo sapiens
accaaaccaagcaaggaaagaacaagaaaggagagcgagacgacgggaccgaaggaccccgccagag

SEQ ID NO: 168542 - RNA, 79 nt, Homo sapiens
gcccgccaggcgcgcggagccacacaaagacagaaggagaccggagccgccccgccagaaagccaggggcaccaccaca

SEQ ID NO: 168543 - RNA, 80 nt, Homo sapiens
acacaccccgcgcagggccacagggaagggaaagacagagcaaacaaagaagcaggagggaagaaagaagcaagaagggg

SEQ ID NO: 168544 - RNA, 80 nt, Homo sapiens
ggcagggaccccggggggcccaagccaccccagagcccggaagcaacacgaccaaaccagaaaacgacccccgagaaggg

SEQ ID NO: 168545 - RNA, 87 nt, Homo sapiens
cagggaagcgcagaaagcaggcgaacccgcggcgcaaaacggcccagcagaagacgggacaaacagccccaaagagcaggcccgacg

SEQ ID NO: 168546 - RNA, 42 nt, Homo sapiens
gacaaacagcacaagagcggacaaagacagggaacagcaaag

SEQ ID NO: 168547 - RNA, 71 nt, Homo sapiens
cagaaccgagccaagaagcgccacagaccaaacaggaaaacagacggcgggcccgagaaaggaggagaaac

SEQ ID NO: 168548 - RNA, 86 nt, Homo sapiens
ggagccggcaggacggaaggggaagaggcccacccggagaaccccacggagaaccagaggggacccaagggagagagggaacggcg

SEQ ID NO: 168549 - RNA, 58 nt, Homo sapiens
caacgagacacagccgggcaaacaaagccgaggcaccaaacgacccggacgcgacggg

SEQ ID NO: 168550 - RNA, 67 nt, Homo sapiens
gaaaaagccacagacggagcagaacaacagaagcgaaagcgggaagcaaggccgagccaacgcacag

SEQ ID NO: 168551 - RNA, 80 nt, Homo sapiens
ccgggaccggagcccccgggccgggggcggcccgcgacgggaagccaggggaacaagaggcggagacagaacagagccca

SEQ ID NO: 168552 - RNA, 79 nt, Homo sapiens
gaggacagcgggagagagaagagccagagggacacgcgggcacggccggaggcacacgacggcgcccaaaacgagagag

SEQ ID NO: 168553 - RNA, 78 nt, Homo sapiens
aaagccccccggagacgcaaccaagacccggcacgaccccagggaaagcccccggcgggggggcggacaggaaagcag

SEQ ID NO: 168554 - RNA, 81 nt, Homo sapiens
ccgcaacccagcgagagaaagacaagggaggcgaggacggacaaaaggaaacggacgggaggccagccagcagaaggagga

SEQ ID NO: 168555 - RNA, 76 nt, Homo sapiens
gcacagccagaagaccgaagcgcgacggaagagacaaaagcagcgacaaaacagagcgacgagaggggaagaagga

SEQ ID NO: 168556 - RNA, 71 nt, Homo sapiens
gaagacaaagagggacagcaagaaaaacaagaggaaaagggagaaccaacaaagagggcaccacgaaacaa

SEQ ID NO: 168557 - RNA, 60 nt, Homo sapiens
cccaagacgcacagcaaacccacaggcaccacccccccaacaccccacagagcagaaacc

SEQ ID NO: 168558 - RNA, 75 nt, Homo sapiens
agagaaaaccccgcccgcagcgacacaccaagcggaggggacgccacgcaacgccgacagcgaacgggcacgacg

SEQ ID NO: 168559 - RNA, 72 nt, Homo sapiens
caaaaggagcagcgcaggagacagggcccgggcacaaaaaccgacgagccagaacagagaaaaggaggccgg

SEQ ID NO: 168560 - RNA, 78 nt, Homo sapiens
gcggggcgggcgagcgcaaagagccgcgcccgcgccgggaggcgaggacgaggaaagccccaggaagaagaagaagcc

SEQ ID NO: 168561 - RNA, 75 nt, Homo sapiens
cacaaaaaaggaagcgaaagcacggcagacacaccgaccagaggaaggcgaacccgccacgcagcaggagcaggg

SEQ ID NO: 168562 - RNA, 84 nt, Homo sapiens
ggagacaagaagacgccaacgagcggcgcggacggcgcgcggacaccagaccgggcccccagcagccaagggccgcgagcccgg

SEQ ID NO: 168563 - RNA, 73 nt, Homo sapiens
ccagacgggccaacaggcgaggagagcacagagaaaccccacagggggggaccaggcaggccggccacagccc

SEQ ID NO: 168564 - RNA, 68 nt, Homo sapiens
ccccaacgagaacccacaacccgaaacccagccaaagccacccccggccaaagagcacagggacagaa

SEQ ID NO: 168565 - RNA, 84 nt, Homo sapiens
gccagggaaccaggggccgggcagagcggagcggagcgcgcgcccgccccgccgggaggaccgcgagaaagcaccgggaggaaa

SEQ ID NO: 168566 - RNA, 80 nt, Homo sapiens
acagaagcaaaagcgcagcaaagcgggaagacaaaaaacgcacaaggcagagaaggaaacgggagacgagagagaaaaaa

SEQ ID NO: 168567 - RNA, 79 nt, Homo sapiens
accaagagggacaaccggaaaaaaacaagcccaggacccacgacagagagacaagagagacaccccaaccgacaaagag

SEQ ID NO: 168568 - RNA, 93 nt, Homo sapiens
ggggccagggaaagagggacaccagcaccacagggaccaaccacacaccagggccaagacgagccggcgcagaagggggccccccagagaggg

SEQ ID NO: 168569 - RNA, 73 nt, Homo sapiens
gagaaggaccaagaaccagcgaacagaaggcaaaaaaaacaggcaaaaaaaagccaacaagaagaagccagca

SEQ ID NO: 168570 - RNA, 76 nt, Homo sapiens
gaagacgaaaggcacgagcgagaccggagagaccacaaggccggccgacaaagaaaaagcccacgacacagccaaa

SEQ ID NO: 168571 - RNA, 62 nt, Homo sapiens
gagagaggccaccgagagaccccaggccagaaccaaccggggccccaaagggagcccagcca

SEQ ID NO: 168572 - RNA, 59 nt, Homo sapiens
caagcccgggagaagcacggaaggaaaacacaggaggaggccgaggggacgcgggaccc

SEQ ID NO: 168573 - RNA, 53 nt, Homo sapiens
gaccggcagacccagcaaaagcgccacagccaaacacagcaaggcaacagaac

SEQ ID NO: 168574 - RNA, 80 nt, Homo sapiens
acaccggggcagcagagggaggcgccagcgcgacgagaggcacgaacgccaaaagacgaacacaaagggaaagaggagag

SEQ ID NO: 168575 - RNA, 76 nt, Homo sapiens
cggggcaacagaagaagaggggccccaaaggcagcgcggcagggccggggcagcagaagaggacaagcagacagca

SEQ ID NO: 168576 - RNA, 72 nt, Homo sapiens
gcggcggggggaaaaggagccccaccaagacaacggcaagcggagaagagcaaggccgaaccgagaggaagg

SEQ ID NO: 168577 - RNA, 65 nt, Homo sapiens
aagcaggagcgggcgcaggaggagcaacaaggggacaacggccccgaaagagaagagaaagggca

SEQ ID NO: 168578 - RNA, 75 nt, Homo sapiens
cggagggcccacaacccgcagagaccacggcgcgccccggccggaggacaccccccaggcacagccacaccccag

SEQ ID NO: 168579 - RNA, 126 nt, Homo sapiens
ccgacccacccggaccccgggccaccgcaggccccagaccgggggccgccgccagccccggaaggccgagaggacggcgccgcggagggccaggagaagaggcgggagcaagccaaaccgcccgga

SEQ ID NO: 168580 - RNA, 73 nt, Homo sapiens
agagccgccgggcccaccgcaaccgcgaccgcccccccgaaccccgcagcgaggagggaccccagggcgacag

SEQ ID NO: 168581 - RNA, 80 nt, Homo sapiens
ccaacccggcgcagcgcagccaggcccgggccagcggcgccccgccaccgccagccgaggcagagacagggcgagaagag

SEQ ID NO: 168582 - RNA, 70 nt, Homo sapiens
agaccagacaaggaaacagcagaaaccggaaccacacacaccacaggaagccaagcgaggaaaacgccac

SEQ ID NO: 168583 - RNA, 77 nt, Homo sapiens
acggaacgaaaacacagaaggcccagggcgccccgcaggagagccagcgccggggaggccgggggaccggagcaaag

SEQ ID NO: 168584 - RNA, 32 nt, Homo sapiens
gacgggcaacagacagagagaaccccacccaa

SEQ ID NO: 168585 - RNA, 80 nt, Homo sapiens
cggggagaagcccaacaaggacggaccgacagcccccaggaaggaggcggcggccgcgagagcccagccgccgggcaggg

SEQ ID NO: 168586 - RNA, 71 nt, Homo sapiens
aggaagaacacgagaacgcgcaggcacggcagagagaagaaagaaagaccggccagcgccgcaccacggcg

SEQ ID NO: 168587 - RNA, 79 nt, Homo sapiens
ggagcgagggcgcgcgcggcgcgccccaggacgagagcaagccccccgaggagagcagggaagacaaagagagaagcgg

SEQ ID NO: 168588 - RNA, 56 nt, Homo sapiens
ggcgacaccgcgacaccccaacaaacaccagcgcggacaacggcaagcggagaaga

SEQ ID NO: 168589 - RNA, 72 nt, Homo sapiens
ggaacaagagcggcgagggaaaaaaacgagacagggaggccgcacagaggaggagcaccaaaccgagggagg

SEQ ID NO: 168590 - RNA, 60 nt, Homo sapiens
caaggaggagaggcgaggacagaacgaagcgcaggcacggagaagagccgcgagcgcagc

SEQ ID NO: 168591 - RNA, 85 nt, Homo sapiens
aggcggggaggaggccccaaagggcgaggcagcgccagacccggccacgaggaccagggggggagacggcagcccagcgagcaag

SEQ ID NO: 168592 - RNA, 73 nt, Homo sapiens
gcgcacaagcccgccaccacccaaagaggcagaaaagaaccaggaaggaagcaggcaaaaccagaaccaccca

SEQ ID NO: 168593 - RNA, 82 nt, Homo sapiens
cagagcccaggacacaagcccagcgggaccagacaccgcggaagcgaaccacagagaagagaggccccggcccggcagaaca

SEQ ID NO: 168594 - RNA, 81 nt, Homo sapiens
cagaggccggagggcccaaaacgcacacccccaacaaccggacgacgacgggaaccaaccccccaccggcaaagagggaga

SEQ ID NO: 168595 - RNA, 68 nt, Homo sapiens
gggcaccaggggacacagaggccgagagccagagcccagagaggaacgccggccgcgaggcgaacaga

SEQ ID NO: 168596 - RNA, 114 nt, Homo sapiens
gaagggaaaaaaagaagagaaagagaaccaggaggcgcaaaaaaagaggaagagggagaggggggaagcgaagccgagacggccgaccccgccacgagcgcgaagaagcacgca

SEQ ID NO: 168597 - RNA, 81 nt, Homo sapiens
cgagcagccagaccgacccacccgcgcggccagccggcccggccggacgaaagaagcaccaggggccggcagggggccaga

SEQ ID NO: 168598 - RNA, 74 nt, Homo sapiens
ccagggagcggcaagaaggcccagcgagaagaacacgggggaccgccaagacgccaagcgagcggccaagaggg

SEQ ID NO: 168599 - RNA, 64 nt, Homo sapiens
gagccgagggccacccccggcccgccccgcgccccgcagggccagaaaaacaaccaccagcgag

SEQ ID NO: 168600 - RNA, 72 nt, Homo sapiens
cggccgagacggcggcagcagcggcacagggcaaacgaagaaaacgacccagccagaggacaaaggaccgag

SEQ ID NO: 168601 - RNA, 74 nt, Homo sapiens
agggcagacaagcaccacgcaggcaccgggaagacacgcggaaaacgggcgcagggagacgaccggagcacagg

SEQ ID NO: 168602 - RNA, 76 nt, Homo sapiens
gcaaaccgaaagaccccagaggagggagggccggcccagggagaacgcaaaaccaccacccccacaaaaaacgcag

SEQ ID NO: 168603 - RNA, 53 nt, Homo sapiens
cgcgaaagcacagagcaaccagacaaaagcaggagccaaggggaaaggagaaa

SEQ ID NO: 168604 - RNA, 77 nt, Homo sapiens
ccaccagaccccggccgccgaccgcggccccgccggccgccggccgcgcgggggggacgcagcggagccggcgagcc

SEQ ID NO: 168605 - RNA, 82 nt, Homo sapiens
ccggaacagacgggccccaagaggccagccccccgagggcaacgagaaagagacggcagaaagaaacgagccgacaaaaaaa

SEQ ID NO: 168606 - RNA, 79 nt, Homo sapiens
cggcaggcaaacacggaacgcggcgaccgccagcgcaaaggaaaagccaaggagacgggccgggaccagggaccaggcc

SEQ ID NO: 168607 - RNA, 82 nt, Homo sapiens
gcccgggcaggcagcggccgccgccgccgagacagcgcgcgggcgagcaccccacgcacccacggaacaggaagaggcgaga

SEQ ID NO: 168608 - RNA, 92 nt, Homo sapiens
ggaaaggaagaaggcagaagagacaggagaggccgagcccgaacaggggggacccgcgaaggccacagcgcaccagggcgccggcggcccac

SEQ ID NO: 168609 - RNA, 67 nt, Homo sapiens
cggcgcccgcgccacagccaccagagccggcagcaaagagggaacagaccgggaacagccaggaggg

SEQ ID NO: 168610 - RNA, 79 nt, Homo sapiens
gcggagccagaaggccggcgaccaagcgccacccgcccggaccgacaggaaagaaggagcccacaaagaaaagaacacc

SEQ ID NO: 168611 - RNA, 35 nt, Homo sapiens
acaaaaacccccaccgcagaggagcccccgcaccc

SEQ ID NO: 168612 - RNA, 118 nt, Homo sapiens
cagcagaagccggggacccgacggacacaacggcagaccgcagaacacccagccaggcggccaaccagagaggaaagccgaggacagccacacacgccccgggcaccagcaggagaag

SEQ ID NO: 168613 - RNA, 68 nt, Homo sapiens
cccaaaccacaacaacacacgagagcccccagaagacagcaaaagaacccccagcggaccaggcccag

SEQ ID NO: 168614 - RNA, 42 nt, Homo sapiens
gccaagacacgcacgacacccccaagggaacagcccaggccg

SEQ ID NO: 168615 - RNA, 77 nt, Homo sapiens
ggacagcaaccagcagcgcaggccggaacaacccaacaacaaagaggggccgaagccccggcccgaagcacagggca

SEQ ID NO: 168616 - RNA, 76 nt, Homo sapiens
cccccgcccgggcccgcgcaacccgccagagggaacccaagccagaccgcccgagaaagacaggaagaccgaggca

SEQ ID NO: 168617 - RNA, 74 nt, Homo sapiens
agcgccacaagacaaagaaacaaaagaaaagaaccgggaaagcccaacggcaaaaccccaccgaacaaagcagc

SEQ ID NO: 168618 - RNA, 83 nt, Homo sapiens
cggaagaaaagagacagaagcaggaccggcccacgccaagaagggagacggacccgccgagcgccgaacgcccagaaaagcca

SEQ ID NO: 168619 - RNA, 62 nt, Homo sapiens
ccagagagaggaagccgaaaacacccgcaaccagacaggaggagagaaagaacccacgcagg

SEQ ID NO: 168620 - RNA, 81 nt, Homo sapiens
gaggggcacgagcgccacaaccccagcaaacggggacagcgccgaccggaacagggaccacggaagcccaggaccagcccc

SEQ ID NO: 168621 - RNA, 81 nt, Homo sapiens
cacccaacaagagcaacgcccagcgggccggcgcccggggccccggagaggaggaaaggcccggagagagcgaggcgcagc

SEQ ID NO: 168622 - RNA, 76 nt, Homo sapiens
aggaggacgccagacgcacggaaagcagcgcaggagccaagaccacagcagcacccagcagccaggagagagagac

SEQ ID NO: 168623 - RNA, 89 nt, Homo sapiens
gcggcacagccagaagaccgaagcgcgacggaaggaaagaccacagcaagaccacgcccccagccgggggaccaggccgaacgacccgg

SEQ ID NO: 168624 - RNA, 73 nt, Homo sapiens
aaacggagaacacagccagccagcacaccaccaggagcagaacggaaaaccccaaaggaaacgagagagagac

SEQ ID NO: 168625 - RNA, 73 nt, Homo sapiens
aaaaagaggcaaaaaacagaggcgcccagagaggccgcccgggagggagggaaccgaccgacagcccgacagc

SEQ ID NO: 168626 - RNA, 79 nt, Homo sapiens
cgcgggcccaggggcgccgaggaccgagaccggaaagcgccagaagaacgccgcccggggcagacacgagacagggaca

SEQ ID NO: 168627 - RNA, 81 nt, Homo sapiens
agcaaacacgaggccacggggaaacacagcagaacacagacaaaaggacagcgacagacagcaaacacagccagaacagag

SEQ ID NO: 168628 - RNA, 81 nt, Homo sapiens
cggacggccgaggcggccgggagccgggcgcggccggggaccggagaaacgcggaaaccccaaggcgcagacaccgacgga

SEQ ID NO: 168629 - RNA, 76 nt, Homo sapiens
aacggagggcgacggagggagacccgcgaccggcagcagagccgcccgcaccaccaggcacaccaaggacccgccc

SEQ ID NO: 168630 - RNA, 75 nt, Homo sapiens
gagacacaccgcacccaaccaccaccaagaacaaggacaagacagcaaagcagcgaagcaaagaagaacgaagga

SEQ ID NO: 168631 - RNA, 73 nt, Homo sapiens
ccgaggcgaccgcggaccggcgccccggcgcgaagaggcggaccggacggccgaggacagacagccggggcaa

SEQ ID NO: 168632 - RNA, 76 nt, Homo sapiens
agaacgcccgagccccaacccacgcgccccaagggggggccgaagaagccagggggaggaaagcagacagacccac

SEQ ID NO: 168633 - RNA, 85 nt, Homo sapiens
ccaccgccggcgcgggaaacgggcgaagcgacgagccgcgaggagggcgcccgcgccggcagaggaggcgagcacccgccaggga

SEQ ID NO: 168634 - RNA, 78 nt, Homo sapiens
agacccccaacaggggccaagaagcgggacggcagcggagagaacggccaaggccggccagcaggaacaccagcggga

SEQ ID NO: 168635 - RNA, 71 nt, Homo sapiens
ggccggcgggcgggggccccgcgccgcggccgagcagcggggggcagcacgccgaaggagagaccagacaa

SEQ ID NO: 168636 - RNA, 63 nt, Homo sapiens
caagaaaaggaaaaccacacagacaaagagaccgcagacacaacagaagcaaaagaaagagcg

SEQ ID NO: 168637 - RNA, 64 nt, Homo sapiens
agacagcgcaccaagccgacaggcccaaaccagaaacgcgagcggggcgcgcccgccaggcagg

SEQ ID NO: 168638 - RNA, 70 nt, Homo sapiens
caggagccgggccagcaagggcgggcaacccggcggaacgggaaacacacagaagaccgcagaccaaggg

SEQ ID NO: 168639 - RNA, 82 nt, Homo sapiens
cgcagcccccgccggccgcccaacaccgaacaccgccccagaagaagggacacgagaaacgaagcaggagagaagaggagga

SEQ ID NO: 168640 - RNA, 86 nt, Homo sapiens
ggaaggagacacggccccccaaggaaaacagggcggcacccaccccccgagcccgcccgccggccccagcccccaccagcagcccc

SEQ ID NO: 168641 - RNA, 53 nt, Homo sapiens
gggacaaacaccgagaaaacaaaagacgaacaagaaagacaaagagcacaaca

SEQ ID NO: 168642 - RNA, 76 nt, Homo sapiens
ccacacaacccaggcaaccaacaggccagacgagcaggcacgcaggagcccgacccacagcagcgagccaccccca

SEQ ID NO: 168643 - RNA, 76 nt, Homo sapiens
cggagaaagacccaggaaaagagacgaccacacaaccacacgccccagaaagcagccgagcggaggaaagacagca

SEQ ID NO: 168644 - RNA, 74 nt, Homo sapiens
gccacgcaagcggggagccaaagagaaccagaccaacaggggcagggaccccacacaaacaaagaaaggaaacg

SEQ ID NO: 168645 - RNA, 87 nt, Homo sapiens
cgcgacgcccgcgccccgaaaaacaaccaccagcgagcaaaaaggcaaagaccaagaccaccaagaagcgccccagcggcaacacca

SEQ ID NO: 168646 - RNA, 80 nt, Homo sapiens
ggaaaccagagcgggagagacagaaagaaagcccacaccagaaaggaaggccagaagccagagaaacggagcgacgagcc

SEQ ID NO: 168647 - RNA, 69 nt, Homo sapiens
gaaaccgagccgaagcagaaacgcaacgagggggaaccaagggcggacagcccaacgacaacaaagaag

SEQ ID NO: 168648 - RNA, 84 nt, Homo sapiens
cgcgcggcgcggacggagcagaaccccaggacgcgcccccgggagcgggcgcccagaggcccggcagggcagagacacccaaga

SEQ ID NO: 168649 - RNA, 63 nt, Homo sapiens
cacccgagcgaagaagaagcgaaacaacggcaagcggagaagagcaaggccgaaccgagagga

SEQ ID NO: 168650 - RNA, 80 nt, Homo sapiens
caccccaaacccgagaaagagccacagacgacgccgccaccacgcgcgggcgcggagcagggagaaaaaccagaagcgaa

SEQ ID NO: 168651 - RNA, 77 nt, Homo sapiens
cacaagcagcacagcaaggcaacaccaccccaccaagacgggaaaagccggcagcaaaagcacccgaccgccaccag

SEQ ID NO: 168652 - RNA, 63 nt, Homo sapiens
caagaaggaagccaccagccgccaagagaagccgaaggcgggaagaaaccggaaggggccgcc

SEQ ID NO: 168653 - RNA, 58 nt, Homo sapiens
gcccgggagacgccccgccgcccacccaggaagcccggggcggcgacggagcacgacc

SEQ ID NO: 168654 - RNA, 76 nt, Homo sapiens
gaggcgaaaggaccagccggaggacacggccaagaggaggggcagagggcaccacagacaagaaagcccccacgga

SEQ ID NO: 168655 - RNA, 58 nt, Homo sapiens
acaaagagacaagccgagagaaagcaagcaaagaaggaaaagaacgcgcgagaagggg

SEQ ID NO: 168656 - RNA, 79 nt, Homo sapiens
gagaccaggggcaccgcagcgaccacccacacaaacccgggacgggccgagaggcacgcaggaaccacaccacacggag

SEQ ID NO: 168657 - RNA, 51 nt, Homo sapiens
ggagcgcagcacgaaaacggaaagggaagggccgaacggccacagggacag

SEQ ID NO: 168658 - RNA, 78 nt, Homo sapiens
aggcaaagccgcaaagagccagccggcgacacggcgaccgccggggccgcccccgaggccggcacggccgacgcgcca

SEQ ID NO: 168659 - RNA, 55 nt, Homo sapiens
cacaaggggaggacaaccgcccgggaccagagcgacgccgacaaaggaggaaaag

SEQ ID NO: 168660 - RNA, 75 nt, Homo sapiens
gaggccacggggagccccagagcaccgcccagaacccggaggcggggaccagagggaaaaggcacccagcggacg

SEQ ID NO: 168661 - RNA, 80 nt, Homo sapiens
gagcaaccgggaacaaccaagcaacagagaaaaaaacagaaccgagaacccacgggccaccacccggcagcagaacaaca

SEQ ID NO: 168662 - RNA, 80 nt, Homo sapiens
gacagggacacagggagccccagacccacagaggaagacaccaccggacaccgaccaggccgcccgagcagcgaggccca

SEQ ID NO: 168663 - RNA, 85 nt, Homo sapiens
aaaagaacccgccgcacccggcccagcgacccgaccccgcgcgacgacccgccgccgccgggcggagagaaggagggggcagagc

SEQ ID NO: 168664 - RNA, 83 nt, Homo sapiens
cggccccagcggcggcggcgcgcgccgggcccgggcggcgggagaagcggaggggcgggaagaaaggcgaaggagggaagcga

SEQ ID NO: 168665 - RNA, 115 nt, Homo sapiens
ccgggcggacgccgcagagcgccgaggaggcccgcggggcaaccgccacgagacaccaaggcgagaacgcggacaagcaaacaaagaggaaaaagagggcaacagcgaaggaaca

SEQ ID NO: 168666 - RNA, 86 nt, Homo sapiens
gcccgacacgcagagcgagagcaacccgggacacaagcccccgcgggggaagcccccaagagagcggacagacaacaggagaacca

SEQ ID NO: 168667 - RNA, 78 nt, Homo sapiens
cagagacgggccgaaacggggaggcggagacgagagagacaaagaggagcagcggaagaaacccccgcaacgacgggc

SEQ ID NO: 168668 - RNA, 72 nt, Homo sapiens
gggggggaccgagacgcagccaagacggccccaaccacacccccagggaaccacgggaccgaccagacccca

SEQ ID NO: 168669 - RNA, 81 nt, Homo sapiens
cgcgccggagccccgggccagaccggccaaggagcaaggcagcagaagacggcggcagagcagcggaccaggagggcagac

SEQ ID NO: 168670 - RNA, 81 nt, Homo sapiens
cagcacgaccagaggggaagccaagcaaacgcagaaggacgcccacgagcaaccaagaacaggagaacccagcgacgacag

SEQ ID NO: 168671 - RNA, 59 nt, Homo sapiens
agccccgcggggaagaacggcacgcggggcccaacgaaccgaagagaaaaggccaccag

SEQ ID NO: 168672 - RNA, 39 nt, Homo sapiens
aagcccgcgccgccggcaccagagagccgccggccaggc

SEQ ID NO: 168673 - RNA, 75 nt, Homo sapiens
ccgccagccggcccggcggcgcgcgcgcgacgcgcgcgcccggcccggggggaagaagacggacagaagcaacaa

SEQ ID NO: 168674 - RNA, 78 nt, Homo sapiens
ccaagggaacaccggcaagcgcgccccagaccaccggcagggaacagccgagcagaccgaggaggcccaccagcagac

SEQ ID NO: 168675 - RNA, 115 nt, Homo sapiens
ggggcaggcggaccggacaaagacgcaacggcgaggaagagacgacagcaaggcggcggcggagaaaccaccacaaacacgaggccagcaacgaccaacaagacagacccgccca

SEQ ID NO: 168676 - RNA, 68 nt, Homo sapiens
acaggcacagacaaccaggaaaagccaacgcaaggcaagacgcaggacagcaccagcggccgccagcg

SEQ ID NO: 168677 - RNA, 69 nt, Homo sapiens
caggacgaggaagacaaggccagccacggaaggagacacccgaacacaaaagaggggggcccagccccg

SEQ ID NO: 168678 - RNA, 77 nt, Homo sapiens
gcggcacccgacagaccggagcccagggccaggcacgccggccaaggggagggaaggaagaggcccagaaggagaga

SEQ ID NO: 168679 - RNA, 76 nt, Homo sapiens
ccaggaacgcggcaggcgcccccgacccccagacgccggaaagaaggcccccgcccgccaaggccaccgagccaca

SEQ ID NO: 168680 - RNA, 34 nt, Homo sapiens
aaccggaacccgcggggaacacacggccgggcac

SEQ ID NO: 168681 - RNA, 40 nt, Homo sapiens
cagaccccgcggccccaaggcgggcgaccagaagcaacag

SEQ ID NO: 168682 - RNA, 79 nt, Homo sapiens
cagggacacaaccaggaggacaggaggagaaggcagagcccccccaggcagaagcccgagcgggaaccagcgaagccag

SEQ ID NO: 168683 - RNA, 75 nt, Homo sapiens
agacccggacgagagaggagaaacacggccgggggagaagaccgcggcgcccgccgccccccagcgccaagcccc

SEQ ID NO: 168684 - RNA, 70 nt, Homo sapiens
ccccccaagcccaggccccaacagcccgcgcgaagacagcagcgaaccaagaccgccccaccaccacagg

SEQ ID NO: 168685 - RNA, 81 nt, Homo sapiens
aggccccaccccgccacagaacccacagaacaagcacaagcccggcggagcccaccaccacggcaagcacagagaacgaca

SEQ ID NO: 168686 - RNA, 73 nt, Homo sapiens
ggaccccaagccaaagaacccacacaaggacaaggcgcagaaacaaacaacacaggagaaaccgaagacggaa

SEQ ID NO: 168687 - RNA, 87 nt, Homo sapiens
gggggcgaggcgaggcgaggcggccgccggcgcccgggacgcggaccgccaggaccaaaccacccaggacacggagcagcgggagcc

SEQ ID NO: 168688 - RNA, 71 nt, Homo sapiens
ggcagagcaaaggacacaccacaaggcgaggacagggccgaggagggcggaaccacccggaggaggggcgc

SEQ ID NO: 168689 - RNA, 69 nt, Homo sapiens
gggaaagcagaaaacagaaacaccaccgaaaacgacacggaggaccgcccaagacgacagacagaagaa

SEQ ID NO: 168690 - RNA, 75 nt, Homo sapiens
gaccgcagacgggggacgcagggaggagcgggacaccccggaagcgggaaagagggaacaggcacgccccacccg

SEQ ID NO: 168691 - RNA, 74 nt, Homo sapiens
caaggcacaacaggaagaacggccgagcgaccaggagaggagcccccgcccgaagaccggggagggccccccag

SEQ ID NO: 168692 - RNA, 34 nt, Homo sapiens
aggcaggacgaggggcaaggagccccgccagagg

SEQ ID NO: 168693 - RNA, 78 nt, Homo sapiens
aagagagacacggccgaaggcgaacgccgcggccaaggagccgccaaagccagacgacaagggaggcgaggacggaca

SEQ ID NO: 168694 - RNA, 71 nt, Homo sapiens
gcacacgcccccgaagcggggacgcgggccggaacacaagggcaagacagccgggaaccccaccccacccc

SEQ ID NO: 168695 - RNA, 90 nt, Homo sapiens
ggagcaaagcccccacgcccagccaggagcaccgccgaggacccagcacaccgaggcagcagccgcccaaaacacaaaccaaagaagaaa

SEQ ID NO: 168696 - RNA, 63 nt, Homo sapiens
caaggagacggcccgaagccccgccagagcaagccgaaccagaccaccacaaagacccagcgg

SEQ ID NO: 168697 - RNA, 63 nt, Homo sapiens
accaggcccgggggcggcggccacgccaaggacggaaacgccaccccggaaacaggaagagga

SEQ ID NO: 168698 - RNA, 71 nt, Homo sapiens
agcacagggcagaacgacacgaaaacacaaagagaagaccgaaggcggcgcaccgcgcaagcaaggacagg

SEQ ID NO: 168699 - RNA, 55 nt, Homo sapiens
ccacccagcggggagcacggcgagcagccaggccaggagagcaaaaaggcccgag

SEQ ID NO: 168700 - RNA, 80 nt, Homo sapiens
cgagggcggcccggggcacccgcacgggaagcaggcccgccacaggaaagcaacccaccacaagacaaagaccaccagga

SEQ ID NO: 168701 - RNA, 65 nt, Homo sapiens
gaggcccgggccgcacaacgcggagcggaagagcaccaagagaaaggacggggcccgggcacgag

SEQ ID NO: 168702 - RNA, 84 nt, Homo sapiens
cacagccgccaagcggggcgccccccgacgcccgagcagcaggaggccccagaagaaaacggagcggagaggggcgcggccaga

SEQ ID NO: 168703 - RNA, 93 nt, Homo sapiens
gccgaacgacgccccgcacaccggagcgcccagcgcgaggagaggggaggagacacgaagcgacgcagagccagaagggaggcagggaacacg

SEQ ID NO: 168704 - RNA, 80 nt, Homo sapiens
ggaacccacgaccaaagcggaaggccgccagagcagcccagcaggaggcggcccagcgccaaggccgcagggggccagcc

SEQ ID NO: 168705 - RNA, 56 nt, Homo sapiens
gaaggaccaagaaccagggaagcgcagagaagagaaaaacccagaaaacgaaggcg

SEQ ID NO: 168706 - RNA, 73 nt, Homo sapiens
cacagaacaccggcacaggcaaccagcaagcagaaggaaaagagcagccagagcgcggaacacaagagaggaa

SEQ ID NO: 168707 - RNA, 73 nt, Homo sapiens
agccacgcgcaggaaaccaccccgagcggcgggcaaaaaggccgggcggcgccacaggagccgcagaagcaaa

SEQ ID NO: 168708 - RNA, 80 nt, Homo sapiens
gggccgcggcgcccggggaaagccgggccccgagggcggaccgagggaaggggcgagagaaaaagaagaacaggaaaagg

SEQ ID NO: 168709 - RNA, 79 nt, Homo sapiens
cggcaccgcggagcaaaaaaagagcccgcaagaagaacagagacagcagccaaacccccaggcaaggacccacgggacc

SEQ ID NO: 168710 - RNA, 77 nt, Homo sapiens
agcgcggaagacgcacaagggaagacgcgcagcaagagggccacacggggaagaagaaaaaaagagagaacaacaag

SEQ ID NO: 168711 - RNA, 87 nt, Homo sapiens
agccgaggccaacggaacacaacaccaacacaccacagagaccagcaagacgcccagccccagagccagggcaccacgcgccaaccc

SEQ ID NO: 168712 - RNA, 56 nt, Homo sapiens
gcgccacagggaaacaaccacagacacagaccgcaaaagccagggcccacacggaa

SEQ ID NO: 168713 - RNA, 74 nt, Homo sapiens
gacggaccggacacaccggggccagagaacaagcccagacagcaagacgcgagcgcaggggaccaggcagagga

SEQ ID NO: 168714 - RNA, 82 nt, Homo sapiens
ccacccccgagcccggagccgcgccgccgcccccagccccccgcccggggagggcaccagggaagagaaacaacagagacga

SEQ ID NO: 168715 - RNA, 87 nt, Homo sapiens
gggcccggggcgcgcagcgcccgccggggcggggaccggggcgaggagagaggaaccacccaggaggaggggcgcagacccccagaa

SEQ ID NO: 168716 - RNA, 55 nt, Homo sapiens
ggaagagagccgggcccgccgggcgaagccgaacagcaaaggacccgaagacacc

SEQ ID NO: 168717 - RNA, 68 nt, Homo sapiens
gagaagcccagaccgcagggcgggaaaaaaccaagcagcgagcaccagggaagcgcaagaaagcacag

SEQ ID NO: 168718 - RNA, 41 nt, Homo sapiens
ccccgaccgccgcgcccggagaagacgaccccgacgcaggc

SEQ ID NO: 168719 - RNA, 73 nt, Homo sapiens
agaacaaaccgcacgacacaggaaaggacaaaaccagaagcaggggaaccgaaagagcgagccccagggccgg

SEQ ID NO: 168720 - RNA, 69 nt, Homo sapiens
acaccacaccaaaaagcaccaggaacaagccgcggggaagcaaaggccagccaccacagacagggccca

SEQ ID NO: 168721 - RNA, 63 nt, Homo sapiens
gcggcagcccgccccacacaggaaaccaaaccaaaacaaagcaccaagccggcaggggccgca

SEQ ID NO: 168722 - RNA, 68 nt, Homo sapiens
ggacaaggacccgccagcccccaagagcggacacaggcaagaaaaggagaagaaagaagaaaaaaaag

SEQ ID NO: 168723 - RNA, 79 nt, Homo sapiens
caaacgccggggaccccggcagccacccaccgccgccgcccccagaagccccaccagcccaacgccgccccgaacgagc

SEQ ID NO: 168724 - RNA, 71 nt, Homo sapiens
cgggccagagcaaaaggggccccacggaggccacagccacaacaacccagggaaagagccgaggcagaaga

SEQ ID NO: 168725 - RNA, 75 nt, Homo sapiens
acgcacgggaccagagacacaggcacgacagaagcagcagaagcagcagaacaagcggagagcaccagccccgca

SEQ ID NO: 168726 - RNA, 55 nt, Homo sapiens
acaagcagagccggcaccacaggaagccgagcaggcggaggcagggcggaccggc

SEQ ID NO: 168727 - RNA, 81 nt, Homo sapiens
aagcgcaccccgacgccgaggaacgagagcgcgaagcaagaaagagagcacggcaacagcgccgcgcagggaaaaaacaac

SEQ ID NO: 168728 - RNA, 90 nt, Homo sapiens
ccccccagacaagaggacaccgcggaggaagcccgagcgggaagaagccgcagcaagccgcagcggcgcgcaccgggcggcccaggaccg

SEQ ID NO: 168729 - RNA, 61 nt, Homo sapiens
acgcagggcgcccccggcggcgagaagaggaggaacaagagccagagaccagagcagcaag

SEQ ID NO: 168730 - RNA, 76 nt, Homo sapiens
acccgcgagacacacgggaccaccagggccagccgggacaccacagcaagaggaacgggcacgccagaaaagacca

SEQ ID NO: 168731 - RNA, 70 nt, Homo sapiens
cacgagcacacggccagcgcaggcagggggacacgcgcccgccagagggaaccgcgggaagcgacacccg

SEQ ID NO: 168732 - RNA, 54 nt, Homo sapiens
ggagagaggaccacccagaggagcaacgccgggcacgggccacgcggaacccag

SEQ ID NO: 168733 - RNA, 59 nt, Homo sapiens
gaggaagcaaagccaaggcagagcgacggaagcaaaccccaaccaaagcgccgggggcg

SEQ ID NO: 168734 - RNA, 74 nt, Homo sapiens
gccggagacagggagaccaagagacagacaccgccccgagacgagaggcgaggggacggcggggagcgcaggac

SEQ ID NO: 168735 - RNA, 87 nt, Homo sapiens
cacggacaccggcggccccaccagcagacgcagccgagacaccagcccgaaacaccaccaaggcgacagcgaccgaagaacagagcg

SEQ ID NO: 168736 - RNA, 59 nt, Homo sapiens
accaccgaccagccacccagacagcacaagagggccagggaccaggggacgcccaagac

SEQ ID NO: 168737 - RNA, 63 nt, Homo sapiens
ggagaacaagggacaggaaacagaagagggacaacgaggaaggaacagagccacagagaaaaa

SEQ ID NO: 168738 - RNA, 71 nt, Homo sapiens
gacagagaggagggagaacaagcaacggcgggggagccgccaccaaaagcagacggaaaacccacggggaa

SEQ ID NO: 168739 - RNA, 77 nt, Homo sapiens
gcaagagaagcaaggagccccgccacacacgcaaacgagaaaagcacaaaaacaaccaaaccagcacccaaagcaaa

SEQ ID NO: 168740 - RNA, 57 nt, Homo sapiens
acaaccgacaccgcagaaccagcaggaaaaaggaccaggcacagagcgcaaagacag

SEQ ID NO: 168741 - RNA, 79 nt, Homo sapiens
cggacaagcggcgggacgccaggacgcggcgagcaagacaaaggagagaggcaccaccagaccaaagagagcgagaacc

SEQ ID NO: 168742 - RNA, 77 nt, Homo sapiens
cacaaggaccgcggacagagacaacaccgagagagaaacacgcaacaggccggaaagagcgaagccaggcgaaaacg

SEQ ID NO: 168743 - RNA, 79 nt, Homo sapiens
gagccgagcagccccagcagccacaacacagcagcccccaggagagcaggaaaagccggagaagccaacaggcggaagg

SEQ ID NO: 168744 - RNA, 67 nt, Homo sapiens
gcagcgcgagagaaggcacggagcaaggagacccccacccagaagaccagcgggacagcagacccca

SEQ ID NO: 168745 - RNA, 32 nt, Homo sapiens
aggacccggccacacacagccgaggagggcaa

SEQ ID NO: 168746 - RNA, 74 nt, Homo sapiens
ccgggacaacgcgacgagcaacccagcgccgaagaaacagaacgacagcccgcaccgacgccggcggccagcca

SEQ ID NO: 168747 - RNA, 79 nt, Homo sapiens
ggaggccccagggaagcgcagaaagcaggcgaacccgcggcgcaaaacgagacgccggcccaccagccagcggggagcc

SEQ ID NO: 168748 - RNA, 47 nt, Homo sapiens
agagggcgggaaggcaggcggggacgagagccccggcacaaacggac

SEQ ID NO: 168749 - RNA, 40 nt, Homo sapiens
agaaaagcggcagaagaaagcaagcccacaggacacagga

SEQ ID NO: 168750 - RNA, 59 nt, Homo sapiens
ccaagcgacggccccacaagagagggcggcagaccagaagccaagaccacgagagaaaa

SEQ ID NO: 168751 - RNA, 81 nt, Homo sapiens
cacccacgccacccggggggcgcacccccgggaccgagaggagcggaagcgcgcggacccagcagccccccaccaaagccc

SEQ ID NO: 168752 - RNA, 83 nt, Homo sapiens
ggaagaggcacgcgagggggcgcgaggggaacggaggccagagcgcgggcggagaacggaaaagcaccaggaagcagagagga

SEQ ID NO: 168753 - RNA, 75 nt, Homo sapiens
accagggaccaccgaacaaaaccaagccgacccaagggacaagaacaacacacgaggccgccgcgcccaggcgga

SEQ ID NO: 168754 - RNA, 77 nt, Homo sapiens
cgccaggaccccagcacacccagcagcacaccgcacagaccaggcgccggaccgaaggcgcgaccacgacgagaagc

SEQ ID NO: 168755 - RNA, 64 nt, Homo sapiens
aaaagacaagggaggcgcccccgccgacaagaagccccaagaggagaaccgaggcgagacaccc

SEQ ID NO: 168756 - RNA, 75 nt, Homo sapiens
agaagggaaggaaacgcccagggggacgagaagccagcaggacacccgcaagacgggagccagcggagccccaca

SEQ ID NO: 168757 - RNA, 59 nt, Homo sapiens
gagaggggaaccagcagaagagcccgcggccccaaaaagcggcgcaagacggagggcgg

SEQ ID NO: 168758 - RNA, 71 nt, Homo sapiens
acccacgaacgcccaccccccgaacccagccgcaccggagacccccacccagaagaccagcgggacagcag

SEQ ID NO: 168759 - RNA, 75 nt, Homo sapiens
ggaacggcggagcagggagcccaaagaccccggagacagaggccggaagagcgggagcgggagccaggcagaagg

SEQ ID NO: 168760 - RNA, 84 nt, Homo sapiens
cacaaaccagcagggaggccagagaaaaagaaaagacaccgcacgaaaggaacacacaacggagccagaagagcaaaaaaacag

SEQ ID NO: 168761 - RNA, 90 nt, Homo sapiens
ccgccgcccggccgaccagggaccgcccgccgcggcgcccgggcccagcagaggagcacgcagcgaacaagaagagagccaccccaacag

SEQ ID NO: 168762 - RNA, 70 nt, Homo sapiens
gaggccacgaacacgccggagccgccagccaagagaaaccaccaagagccaggaaggcaaaggccgagag

SEQ ID NO: 168763 - RNA, 73 nt, Homo sapiens
aggggagaaacacacagaccagaggggggacggggaggaacacccagcggccaggcgacgagagaggcgggag

SEQ ID NO: 168764 - RNA, 72 nt, Homo sapiens
agagaggagagaggaaggcggaccagaggaaagaacggaaaaaagagccagcccgagaagcaggagagaaag

SEQ ID NO: 168765 - RNA, 83 nt, Homo sapiens
cggaacccgcaccaagccgcccacacgccaaccggccagaggacgagggcccgggggcggcgccaagccgaaggccgacccaa

SEQ ID NO: 168766 - RNA, 80 nt, Homo sapiens
cagggaacccggcaccgccccagaaggaagccgccagagcggccggaaggggaacgcagaaacaggagacgccgcgcggc

SEQ ID NO: 168767 - RNA, 75 nt, Homo sapiens
cagaagccaaagggccaccaaggcaaaggcagacaacccgcaggcaggacgcgggggaaccgcggggagccagac

SEQ ID NO: 168768 - RNA, 75 nt, Homo sapiens
gcacagccccaaaccaggcggggcaagggaaaagaacacaacacgaggagaaacaaggagcccccccggagcgcc

SEQ ID NO: 168769 - RNA, 85 nt, Homo sapiens
cgaacgacaggacgggggcggccggcccccaggaacacgacacagaccccggccggaacccagggagaccagccccccccacgca

SEQ ID NO: 168770 - RNA, 74 nt, Homo sapiens
gggagccagaccccgaggagggacaagcaggccaaagggcagagaaagagcgagagggaaaggaagagaaccaa

SEQ ID NO: 168771 - RNA, 80 nt, Homo sapiens
acgagccgggaggaacggcccggaaacaggaggacggccagaagcccccaggaggagaacgagcaacggaagccagaaga

SEQ ID NO: 168772 - RNA, 53 nt, Homo sapiens
ggaccgccgcgcacgggcaaggcgacacaccgaggagcaacacccccagggag

SEQ ID NO: 168773 - RNA, 102 nt, Homo sapiens
ggcccgggcgccgagccgcaggagagacacgcgggccgaccccagagcggcgcggacagggaaacacaaagaagacaccagaagggccagcaccacgacaac

SEQ ID NO: 168774 - RNA, 80 nt, Homo sapiens
caggaaggagggcaacccagaaaacgaaggaacacaaaacggggagcagcagagaagcgcggcggcaccccaccgcccag

SEQ ID NO: 168775 - RNA, 85 nt, Homo sapiens
cacagaccacaacaccaggaggaccagcggacgacccccgggacagagacaccaggcgccgagaaggccagcagagaaacaggca

SEQ ID NO: 168776 - RNA, 72 nt, Homo sapiens
gcagaacaaaggaagccaacagccgagaacaaacaggaagccagcagaacggccaaggcacgggacaagcca

SEQ ID NO: 168777 - RNA, 41 nt, Homo sapiens
cggagcggagcggagcccggaggaggggcgcggaacagaaa

SEQ ID NO: 168778 - RNA, 76 nt, Homo sapiens
caagagccagaagcccggcggaaggacagcaggcaaaaaaaagaccgaacgagaaaaggcacccagcacacagcaa

SEQ ID NO: 168779 - RNA, 62 nt, Homo sapiens
gacccaggccacgccgagccgccaggcagcaggacggacaggcagcgccaacaaaaaaaaac

SEQ ID NO: 168780 - RNA, 77 nt, Homo sapiens
ccgggggcgcaccgccgccgccaaggcggagaaccggagaaggcaaagacaacgacaggcccggaagcaccaaaggg

SEQ ID NO: 168781 - RNA, 84 nt, Homo sapiens
gccgcagcaacaccaggagaggccgggggcagccgccacggcagcgccaggcagagccagagcccaagcccccgcagggagccc

SEQ ID NO: 168782 - RNA, 70 nt, Homo sapiens
gggaaaaaaagagaacaagcaccaagggccgaacgaaaccccaggggacaagggcaaacaaacagcagag

SEQ ID NO: 168783 - RNA, 78 nt, Homo sapiens
ccaaggaaacaggagcgaagcccagcgggccggacggggcggggggaacggacaccagaggacgcccggcagaaggga

SEQ ID NO: 168784 - RNA, 87 nt, Homo sapiens
gacgcgagcccgccgccgccgccaccacccacccggacacagcgggcagaggggcaggagccgccgacccagccgacccacgggcag

SEQ ID NO: 168785 - RNA, 86 nt, Homo sapiens
cggcccaggaaacgccgcggaaggacccaggaaagcgccccacacaacccccgccgacagccacagacggagccaccgcaccaggc

SEQ ID NO: 168786 - RNA, 69 nt, Homo sapiens
ccccagcccgccccaaaagagggaaagacaacaaggagaacagaagaacgaccaagaggcacacaacaa

SEQ ID NO: 168787 - RNA, 77 nt, Homo sapiens
ccaagccgaagcagcaggcgcgaggcccggcagacgggccggggcgcagacaagggaggcgaggacggacaaaagga

SEQ ID NO: 168788 - RNA, 83 nt, Homo sapiens
caaagcgacaggacacgagggcgagcccccacggcggcggggacacccgacaagaacaggacaccaggccgagcacgaaccga

SEQ ID NO: 168789 - RNA, 80 nt, Homo sapiens
gaggaacagcagccaggaaggaaacacaggaggggagagcaggaacgcaagcccaagagaaggcgagcaggaaagcggcc

SEQ ID NO: 168790 - RNA, 61 nt, Homo sapiens
gcccgccaccgcgcggagccgcagagcgggcaccaggaccccggcacggggaaaacagagg

SEQ ID NO: 168791 - RNA, 79 nt, Homo sapiens
gcaagggccccccggcacagcggggaccgagcccaggccccacgacacgcgggccccgaccagggagaccccacccccc

SEQ ID NO: 168792 - RNA, 79 nt, Homo sapiens
cgaagcacgggcagccagcccaaggggcgcagcgggcagggcccaggggccgcgggacccggggcgggcggcacgccag

SEQ ID NO: 168793 - RNA, 74 nt, Homo sapiens
gcggcaggaaaggagggaccgggcggggaccggaccccgccccgcaacgcaaggaaccgccacccagcgccccc

SEQ ID NO: 168794 - RNA, 72 nt, Homo sapiens
acagccaccaggagacgggagcaagggggccgcgcacccaacccagggcaaaggcaaaaaggccccagcagc

SEQ ID NO: 168795 - RNA, 70 nt, Homo sapiens
gaccaaaaaaaaaacgcgaacaccgacggagccagggcacccaaacaacaaaccgagggacaaggaccgc

SEQ ID NO: 168796 - RNA, 53 nt, Homo sapiens
agagcgaggacgccggcagcacgccggcagaaccccgcagagagggagcaggg

SEQ ID NO: 168797 - RNA, 43 nt, Homo sapiens
gccccacccgagcggccccaaggggaccggggaggggagcagg

SEQ ID NO: 168798 - RNA, 76 nt, Homo sapiens
agcagccgggccagggccagagcaaaggaggagccaggagaaagccaggaagaaaagacccacagaaaagagacaa

SEQ ID NO: 168799 - RNA, 81 nt, Homo sapiens
gcaaccaggcccaaagaagacggccaagggaacgggaggccaaagggggccaccggaggcgggacacccagcaccccacgc

SEQ ID NO: 168800 - RNA, 71 nt, Homo sapiens
ccaaagaaagcaccagggggcaggcaaaccgggaaagcaagccaaaacagcccggaaaagcacacagacga

SEQ ID NO: 168801 - RNA, 60 nt, Homo sapiens
cgcacggcaccggacaaagacccggaccgcagcaagacagaggagccaacaaaagacaag

SEQ ID NO: 168802 - RNA, 62 nt, Homo sapiens
cccagcacgggaggccaaggaggacagaccgggaaaggggccaagggggccgaggaagcagg

SEQ ID NO: 168803 - RNA, 72 nt, Homo sapiens
agacaagccgcccggaagcggacaccccggcacagcccacccagaagaaccggcccgaagagaacaacacag

SEQ ID NO: 168804 - RNA, 76 nt, Homo sapiens
aagagcaggacaccggaagcgggaaaggggcgcccccccaccagccgacgaaggaccgcgcggaaccccgcaggag

SEQ ID NO: 168805 - RNA, 104 nt, Homo sapiens
gaaagacaggccccacggccgccaccgcgcaggaggcaaagaagcgaggagcaggcaacaaggcacaccgaaccggacaccgaagacggagcgggccggggaac

SEQ ID NO: 168806 - RNA, 76 nt, Homo sapiens
gccaaacaaaacacgggacacccacacagcgcaaaaagagcgagaacccgagcagcgccagagcaacacaccgcgc

SEQ ID NO: 168807 - RNA, 61 nt, Homo sapiens
ccgcgggacggcggcggggcgccgaggcagccgggacagaacggccgagcgaccaggagag

SEQ ID NO: 168808 - RNA, 69 nt, Homo sapiens
caaaggaaagaaacccacgggcagagcgaaaaagggaggccaggacgagccaggacgcgagccagaccc

SEQ ID NO: 168809 - RNA, 77 nt, Homo sapiens
ggaaacagcaagcgaagccgaaaaagcgcccgagacgggcccgccgaaagaacgccagaacaaacagcgagaaaacc

SEQ ID NO: 168810 - RNA, 64 nt, Homo sapiens
aagagacagccagcacaccccgcgagcaagagcggccgccaccccagccgcagaggggaagagc

SEQ ID NO: 168811 - RNA, 81 nt, Homo sapiens
acagagccaggggcaggacccggccgcgcccgcagcgggagaacagagacccaccaagaaaccagaacccggacaagggaa

SEQ ID NO: 168812 - RNA, 53 nt, Homo sapiens
agcccccgccaccacaccaagcacgagccgcggcccgcggcccaccggacaaa

SEQ ID NO: 168813 - RNA, 64 nt, Homo sapiens
ggaaaaccgagcgaaccgaggaccaaaagcggaacacgggcaacgggggaagacggccagaaca

SEQ ID NO: 168814 - RNA, 73 nt, Homo sapiens
acaagccaaagcaaggaagagaccagcaacggccgaaaagggacccaggcacagcacccagaagcagcgcaca

SEQ ID NO: 168815 - RNA, 80 nt, Homo sapiens
cacgagggagggcggcggcccaccaaggaaagggcgacagcaacagccgccggcggaagagaaggagggggcagagcacg

SEQ ID NO: 168816 - RNA, 88 nt, Homo sapiens
ccaagagagccgcgacggcccagaccaggcgaggcgcagaaggggacagaacaaccagaaggaaaacacaccaggcacagaaaggccc

SEQ ID NO: 168817 - RNA, 67 nt, Homo sapiens
ggcaacaaggcacacaagcggggaggaccccagaccacgggcgcaagggagagagagggagcggccg

SEQ ID NO: 168818 - RNA, 86 nt, Homo sapiens
cggagcaaaaaaagagcccgcaagaagaacagagacagcagccaaacccccagacacgagaggcgagggacgacagagcaagcggc

SEQ ID NO: 168819 - RNA, 44 nt, Homo sapiens
gccaagagaaaggaggaggaccaagaccccggaccggggcccag

SEQ ID NO: 168820 - RNA, 62 nt, Homo sapiens
gcccgagcggcccgccgagcccgggggcgcgccccgcagggaaggagacccaggaagaaagg

SEQ ID NO: 168821 - RNA, 79 nt, Homo sapiens
cgaaagccccccaaagcaagaaggacgaccgcacggccaaagagccgagcagggaagagacggccacccacaaagaacg

SEQ ID NO: 168822 - RNA, 69 nt, Homo sapiens
agcccccaaaggaggaacagacaccacgccacccaagagagagcaaaaaccgagaaccagaggcacaca

SEQ ID NO: 168823 - RNA, 51 nt, Homo sapiens
gcaaacgagagaccaaccagggcggaggaaaggacgccaggaaaaaaggaa

SEQ ID NO: 168824 - RNA, 80 nt, Homo sapiens
gaaaaccgaagggaaggccagcagcgcgcggagaagaacggggagccagggagcgcacccgaacacccacaaagggacag

SEQ ID NO: 168825 - RNA, 82 nt, Homo sapiens
cgccaaggcgacccccaccgagacgaagcgggcggcgaaggagaggaacggaaaaggacagaaccagagcgaaaacgcaaga

SEQ ID NO: 168826 - RNA, 62 nt, Homo sapiens
ggaaccccacggcccccgccagcacacaccgagcagaggcagcgagaagaaaaagaagagag

SEQ ID NO: 168827 - RNA, 69 nt, Homo sapiens
aagcgcaacaggaacgacgaaccaaaaaccacgaggggacaacgaaggaggcaagcaacaaagggacaa

SEQ ID NO: 168828 - RNA, 78 nt, Homo sapiens
cgggacgcgcccgcggccggagcgccccgagcgccggcagcggccgcgggggccagggcgcgggagagcagccggacc

SEQ ID NO: 168829 - RNA, 73 nt, Homo sapiens
agcagagcgacgcgcgccgcacggaggcaagaagaaacccaccgcaaagaggcccaagagaaacaggcacgcc

SEQ ID NO: 168830 - RNA, 80 nt, Homo sapiens
ggagagaccagcccacagcccgccaccgcgcggagccgcagagcgggcaccagggagcccagaggagcgggcgaacaggg

SEQ ID NO: 168831 - RNA, 68 nt, Homo sapiens
gaaggcagaggcggacccaaagacaggaccacgcaccagcagagaaggaaagcaaaccgaagcaggcg

SEQ ID NO: 168832 - RNA, 72 nt, Homo sapiens
ccccgaagaagaccccccacacgggacagagaggcgcaggcaagacccggaaggcccagaagaaaccgccac

SEQ ID NO: 168833 - RNA, 77 nt, Homo sapiens
ggaagaacacagcccgggaaagcacagaaagccaaaaggacaacacagagaaccggaaagaacaagccaccaaaaag

SEQ ID NO: 168834 - RNA, 60 nt, Homo sapiens
cccgcgcggcgcggggaccgcggcccgaggagaaggcagagcccccccaggcagaagccc

SEQ ID NO: 168835 - RNA, 80 nt, Homo sapiens
gcgaggaaaaggcggcgggagcacgagacacgagacaggagagaaaggagagacaaaggaccagacaaaggcaaaaagga

SEQ ID NO: 168836 - RNA, 60 nt, Homo sapiens
aggaggaccgcacgacagcggcccgcgggagaggagccaagcccaacgggacgggaaaac

SEQ ID NO: 168837 - RNA, 38 nt, Homo sapiens
ccaggcacggacagggcggggcggcgcaggcgcggggc

SEQ ID NO: 168838 - RNA, 78 nt, Homo sapiens
caaggagcccggccccacaccggcacacagcagacgcggacagggggccagagcaaggaaagcggaagaaggcgacag

SEQ ID NO: 168839 - RNA, 55 nt, Homo sapiens
cgccgaggacgaaaaggccagcagcacgaggaaggaaaaccgcaacggacaacgg

SEQ ID NO: 168840 - RNA, 65 nt, Homo sapiens
acgggagaaccaagcaggaccgccaggaggaaggcaaacaggaccgagggggacagccagaagca

SEQ ID NO: 168841 - RNA, 74 nt, Homo sapiens
ccacccagaggagcaacgagccccagaaaaagaccagggaaaagcccagcgaagaggacccagcaggaacagag

SEQ ID NO: 168842 - RNA, 77 nt, Homo sapiens
gccaccggcaggcgcacaggcccggccaggcacaagggcaccacaaaggagaccggaaaccgagagaaacgaagacg

SEQ ID NO: 168843 - RNA, 45 nt, Homo sapiens
ggaggaacaggccaggaaccggcaagggcccaaaccggacagaag

SEQ ID NO: 168844 - RNA, 88 nt, Homo sapiens
caggaccgcccgccgggagccccggagccgcggcagcgccgagggcccccccccaggcccgggccgagcaacgaacgaggaagggagc

SEQ ID NO: 168845 - RNA, 82 nt, Homo sapiens
accggagacggccagacaggaacaagacccggacaccaggccacagccgggaagcagagggagaaagaggcgcgaggaggaa

SEQ ID NO: 168846 - RNA, 49 nt, Homo sapiens
gaggagaggaagcagaacgaaagagccggaacccgaagaggcagcagcg

SEQ ID NO: 168847 - RNA, 68 nt, Homo sapiens
aaagagaggacgcagcgagaaagcgggggagagcagcggcgccagcccgggccacaccgggacgcacc

SEQ ID NO: 168848 - RNA, 70 nt, Homo sapiens
accggacgagcggggcaaccgaccggcgcggagggggcccaagaaaggacagcagaccacagcccggcag

SEQ ID NO: 168849 - RNA, 59 nt, Homo sapiens
cagacgccaacgcaggagcacccagccaacagcaggcaggggcgcacccagggacccag

SEQ ID NO: 168850 - RNA, 72 nt, Homo sapiens
ggccccccccacagccgcaggacccacggagccgccccccagcagggccagggccgggaccggagggaaaac

SEQ ID NO: 168851 - RNA, 77 nt, Homo sapiens
cacgacggcggaacggggaacgacggcccagcaggcggggaagagaaagggcgcgggacaaccaacacaaccaaaga

SEQ ID NO: 168852 - RNA, 74 nt, Homo sapiens
cacgcagcgccacaaacaagaggaccagggagggaaaagacacgggaccacggagagagcccaagcaggaaccg

SEQ ID NO: 168853 - RNA, 34 nt, Homo sapiens
cagaacgagagccacagcagcgaagaagaaagaa

SEQ ID NO: 168854 - RNA, 70 nt, Homo sapiens
acaaagaccgagccaaccacaacaacacgaacgcaggaaccaacagagaaagaggacgggggccagacaa

SEQ ID NO: 168855 - RNA, 71 nt, Homo sapiens
gagcacacaggagcacacccaggacagacagccccaggaggacacaacacgaccagcagggacacaaaaca

SEQ ID NO: 168856 - RNA, 90 nt, Homo sapiens
cccaggcccggcagcccaacccagcaggacaaggggggaacgccaagcacaacggcagcagaacacccacaggcaagaaaggaagggggg

SEQ ID NO: 168857 - RNA, 78 nt, Homo sapiens
agacagccaagacgcagaccggaaaaccaaaggcagacccagaagagcacaaaacagagaaaagggaagggcccggag

SEQ ID NO: 168858 - RNA, 84 nt, Homo sapiens
ccgggagccggagcgggcgcggacgccgaggcaccgaggcaccagaggagagaccgcggccaggagccaagaagaccagaccgc

SEQ ID NO: 168859 - RNA, 63 nt, Homo sapiens
aagacgacgcaccgcaggcagacaaaagggccaaagaagggagagagagacagggcaaagaca

SEQ ID NO: 168860 - RNA, 73 nt, Homo sapiens
aggagcaggaacggagcagcagcccaacgccccgagggacagagagccgaaagccgggcaaggggaaagaagg

SEQ ID NO: 168861 - RNA, 77 nt, Homo sapiens
gaaaaacaaagccaaggaaaccccaacacagagccaagcgccaagccggagccagcgagcacaagacagcgggcagg

SEQ ID NO: 168862 - RNA, 84 nt, Homo sapiens
agaaaaacaaacacacgcaaaggagaaaggaaccgacagcccacaggaccccaaccgggccagaggaggaaagacgccccgcag

SEQ ID NO: 168863 - RNA, 69 nt, Homo sapiens
ggggaaccgagcgggggagaggacgcgcgaaccagcagcaggcccagaccgaagcggcagccaaaaccg

SEQ ID NO: 168864 - RNA, 84 nt, Homo sapiens
aggcggcgcggacggggcggccaggcaagacaggccaacaccgccaccagagaaccacacaaaggaaaggggacaagaccaaag

SEQ ID NO: 168865 - RNA, 61 nt, Homo sapiens
aaaacaagcccccaggaaccacgaacaaaacaggaagcggaaaacagaaccacagacaccc

SEQ ID NO: 168866 - RNA, 74 nt, Homo sapiens
cgccccgcgagaaggaggagcccccgcccggcagccaccccacgggaagaaggacacagacaaaagaccaggag

SEQ ID NO: 168867 - RNA, 74 nt, Homo sapiens
cagaaagcccagaaaccaaaagagaagacggcagaccccgaaccggcaagacagagacaacaggacccaaggaa

SEQ ID NO: 168868 - RNA, 71 nt, Homo sapiens
agcaaggggcaaggagcagaagcagcccacaaggcaaagcacaccagaccagaaagagccaggacagaagc

SEQ ID NO: 168869 - RNA, 71 nt, Homo sapiens
gcgcggcacgggccccgggccccacgccaggacacgagaggagaggagagaccggcccaccaccgcacaag

SEQ ID NO: 168870 - RNA, 72 nt, Homo sapiens
gcaagccaggccaaaggcgccaggaaggagcacgaaacaaggacaggaaggcagcacccgcgggaaagaagg

SEQ ID NO: 168871 - RNA, 53 nt, Homo sapiens
agagaaaggaccaccagggcggccacaacacagaccgcccggccgacacggca

SEQ ID NO: 168872 - RNA, 78 nt, Homo sapiens
acacgcacaaggagagagggaaggcccgccccagcgggccaccgcggcacacgaggaggcggccagggggccgaaagc

SEQ ID NO: 168873 - RNA, 58 nt, Homo sapiens
gcggagaccccgaaggcgcaaacgacaccacccgaccgggaaagcacaaggaagaagc

SEQ ID NO: 168874 - RNA, 63 nt, Homo sapiens
aaacaagccgggaaagggacaagaagggcaaagccgaagcaggaggccagagaacggaaaaac

SEQ ID NO: 168875 - RNA, 72 nt, Homo sapiens
ccagcaccaaaacgggaacagggcggaaccaaagaaaaacagaaagaggaaaaccagagaaacaagaggagg

SEQ ID NO: 168876 - RNA, 70 nt, Homo sapiens
cgcagccgacggccccaggcccgcgggacccgccagggacaaagccagaagacaccgcaggggacagaac

SEQ ID NO: 168877 - RNA, 70 nt, Homo sapiens
gaacaccccacagggaagagggagaaaagaaagccagaaggaaggaagcaacgaaccaagaaaaaacgga

SEQ ID NO: 168878 - RNA, 73 nt, Homo sapiens
gcgaggcagggagcaacgaacaagaacaccgccgggcaaaaggggcggaaaaagccagcacaaggcacgaagc

SEQ ID NO: 168879 - RNA, 79 nt, Homo sapiens
cccaggccgcccgcccacagccagcaagagaggaaacgaggcgggaagacgaaacgccaaaacacacaacgaaagggca

SEQ ID NO: 168880 - RNA, 83 nt, Homo sapiens
cgcgagggggcgcaggaccggccgcaggccaccgacacgagacaaccgggagccggcgaagagagagaaacgaaaaagaggaa

SEQ ID NO: 168881 - RNA, 85 nt, Homo sapiens
gaacacccagccacggaaccaggagcgcagagagacaagagagacaccccaaccgacaaagagcaccagacagccgggaacgacc

SEQ ID NO: 168882 - RNA, 68 nt, Homo sapiens
aagacaccaaaaagcaaacggaccagaccgaccaccaaaacgggaaaggccgaaagaaaaaggaagcc

SEQ ID NO: 168883 - RNA, 62 nt, Homo sapiens
gccacaggaggcgcggaggacgccccaccgccgacgcccccagccaccagacggcaccaaac

SEQ ID NO: 168884 - RNA, 76 nt, Homo sapiens
aaacaagaaacaaccagggcaaaaggaaaggacccaccaagagagcgagacacaggagaacgacgagaagaacaaa

SEQ ID NO: 168885 - RNA, 35 nt, Homo sapiens
ggaacaaaggcacagccagccagaaccgcccaaac

SEQ ID NO: 168886 - RNA, 60 nt, Homo sapiens
ccagccgcagccacaacaccggcaggaaccaccaggacagaggcgcgggaacaggacgac

SEQ ID NO: 168887 - RNA, 77 nt, Homo sapiens
acgcagccggacccgcgaaccgggcagggcacgggaccagcccagggggcccacagcgagcccaagcgcacgcaggc

SEQ ID NO: 168888 - RNA, 69 nt, Homo sapiens
agaacccacagagggcaggagggaacccggcgcaaccgcacccacgaagacacaaagagaagagagcaa

SEQ ID NO: 168889 - RNA, 62 nt, Homo sapiens
gaccaggcccgggggcggcggccacgccaaggacggaaagcaccgggaggaaagagagccac

SEQ ID NO: 168890 - RNA, 59 nt, Homo sapiens
aaacaacgggcacaaaaacaaccagggcacaaccagggcagcagggagccgcgagaagg

SEQ ID NO: 168891 - RNA, 64 nt, Homo sapiens
cggagccggaaagccgggcgggagcccccggccaggcccaggggacacccagcaggccagggaa

SEQ ID NO: 168892 - RNA, 65 nt, Homo sapiens
ccagcgccgcgacgggaggagcgccggaacgccgaggcccagaggccgggaagaaggagggacac

SEQ ID NO: 168893 - RNA, 74 nt, Homo sapiens
ggaaggacaggcaggagaggcagcaggacaagggggacaggacaggaggagcccccaaaccagagggcgagaga

SEQ ID NO: 168894 - RNA, 71 nt, Homo sapiens
acggagcacacggacagccgaaaaggaaaaggagccagggcggaccccgcgggacagaacgcacgggggcc

SEQ ID NO: 168895 - RNA, 74 nt, Homo sapiens
gaagccccggagaaccacccggaggagacggggcagacaacggagcccggggacacaggaaagggaagcgccca

SEQ ID NO: 168896 - RNA, 83 nt, Homo sapiens
gaaggggacgggacggacgggaggggcgccgcggcggcgggcgcccccaggccaaggcacgagaacaagccacgcaggggcac

SEQ ID NO: 168897 - RNA, 58 nt, Homo sapiens
ggagggagccgcgcgccggcgcgcgccgagaaccggaacagaagacagggaaggaccc

SEQ ID NO: 168898 - RNA, 54 nt, Homo sapiens
cgaaaccggcagcgcacacgggagagaagccgaagggcagggaccagccgagga

SEQ ID NO: 168899 - RNA, 79 nt, Homo sapiens
cgcccgcgcagaggaacaacagccaggagaagaggcacaaaagacaccccgaggacggaagcccccagacgagaaaaca

SEQ ID NO: 168900 - RNA, 80 nt, Homo sapiens
gaggaggacgacaagcccaggggccacccacaaacccagcagaaacccagagaaaccgaggaggaacaaccgaagggaga

SEQ ID NO: 168901 - RNA, 70 nt, Homo sapiens
caagggaacaccggcaaggaaaaagcgcgcaggagggcagcaccgcaaaaagccaaaacagaccgagaaa

SEQ ID NO: 168902 - RNA, 92 nt, Homo sapiens
cggagcgcggagcccggccccgcaccaggaggaggacgacagcacggaagaaggaccggggagacaggaacacgggcaagacagcgcgggca

SEQ ID NO: 168903 - RNA, 71 nt, Homo sapiens
gcccgacccgccaccgccaggccaggagcggaggcagggcgccccgcgggaaaaaaaggaacgagcccaaa

SEQ ID NO: 168904 - RNA, 71 nt, Homo sapiens
ggaggcgaggcaaacggggggcgcggagggaccagcgagcggcaagggggaacaggcaaagggcagcaccg

SEQ ID NO: 168905 - RNA, 53 nt, Homo sapiens
cggaagcccgccccagagcagggcagcgacacccagacccaccggaccaggcc

SEQ ID NO: 168906 - RNA, 79 nt, Homo sapiens
ccaaggggcaggaaagcaccggaacacgaggggagccgccaccaaaagcagacggaaaacccacggggaagaccacacc

SEQ ID NO: 168907 - RNA, 77 nt, Homo sapiens
cagcggccaagcaacccccgcccagccgaaacgcgggaacagcaaccccaagggagacggagacaacaagcggagag

SEQ ID NO: 168908 - RNA, 96 nt, Homo sapiens
cccccgggaaaagggggacgcggggaagagggacgggacccaaaggcaagagggcccggcgagagaaaaaaccagaggagacaaggaaacgggcac

SEQ ID NO: 168909 - RNA, 80 nt, Homo sapiens
gagcaccgagccagcccaggaaaaggagaggaacaaacggaagacccaaaacgaaagaagggagaggcggggagcagcgc

SEQ ID NO: 168910 - RNA, 79 nt, Homo sapiens
agcgaggggacccagagaagaaacaacacagaacaacaaaaccagccgcgcacccgcccacggaaagacccagggacac

SEQ ID NO: 168911 - RNA, 76 nt, Homo sapiens
ggaagacgccgcgccaccgagccggaccggagacggggccaacagaccggccaacgccccaccggcgccacgcggg

SEQ ID NO: 168912 - RNA, 59 nt, Homo sapiens
aagaggaaggggacgaaaagaaaccacagacaaagcaggacgaggaagaggaggcacag

SEQ ID NO: 168913 - RNA, 74 nt, Homo sapiens
cacacaagagaaaccaaaaacaagaccccaaagaggccggcacggggcacccaaggaaacagcaccaaaagcaa

SEQ ID NO: 168914 - RNA, 79 nt, Homo sapiens
agagagcaggaagaaggaagaaaaggaccgcagaaacaggaacacgaaagaggaaaaacgcacaagaaaccgaagccaa

SEQ ID NO: 168915 - RNA, 78 nt, Homo sapiens
caccggcagaagacccgcagcccgaagcccccccaccgccccggacccccgggagacgacaccggggccccgcccacc

SEQ ID NO: 168916 - RNA, 70 nt, Homo sapiens
ggaaagggccagagcccaaaggcccagaccaacggagcgacacgcgcgacggaggccgcagggccagaac

SEQ ID NO: 168917 - RNA, 38 nt, Homo sapiens
gcagcaccaggccagcccgaagccgccgcacccaggcg

SEQ ID NO: 168918 - RNA, 71 nt, Homo sapiens
ccccgaggagagaagggagaacaaggcgaagccacaaggggaaccacagcaaggaggcacccaccacccca

SEQ ID NO: 168919 - RNA, 62 nt, Homo sapiens
aaaaggagcgcccgagcgaccaaagaccgggaaaaaaaacacggagcagggggccgagcaaa

SEQ ID NO: 168920 - RNA, 79 nt, Homo sapiens
cacacacaagaaaggcaacaaaaccacgcaggcagacgccagacacacagccccagcaaccaccaaacaggaggagaca

SEQ ID NO: 168921 - RNA, 86 nt, Homo sapiens
caagacccaccccgggaagaaagcaaacagaggaagaaggcaccacgacaaaccggagccgaggggagggaggccagccaagacga

SEQ ID NO: 168922 - RNA, 61 nt, Homo sapiens
caaaaggagacgaaccaagaaacaggaccgccgcccgacaagggcggggccgggaacaagg

SEQ ID NO: 168923 - RNA, 85 nt, Homo sapiens
gaaaccagcccacgccaggcaagggcccggccgccccgcaccgagcgccccgcccccccgcggcacagcccgcaggacagaagcc

SEQ ID NO: 168924 - RNA, 62 nt, Homo sapiens
gccggccaaggagaagcccaccagggacggacaacccccgccccacccaccaaggaccaaaa

SEQ ID NO: 168925 - RNA, 49 nt, Homo sapiens
aagacagcgcaaggcagaaaccggaaggcgaaacagcgcgccgaagagc

SEQ ID NO: 168926 - RNA, 65 nt, Homo sapiens
aaaaagagaggagggagaacacagaaacccgccccggacacagaggaaaaagacaaaccagcccc

SEQ ID NO: 168927 - RNA, 78 nt, Homo sapiens
aaaggagccccagggagcgggaccccaaacagcggcaccaacgccgcccaaaaggcccccccagagcgcaagcgaaaa

SEQ ID NO: 168928 - RNA, 87 nt, Homo sapiens
gcgggggccgcgaccaggacgaggaagaacgagacgccaaacaagaagaaggaaccacaacagagcgcagaaggagccagaagggaa

SEQ ID NO: 168929 - RNA, 77 nt, Homo sapiens
gggccccaacaccagccgccgccccgcagccccccgcagcacccagccggccacggaccgaaggagaagaaggagaa

SEQ ID NO: 168930 - RNA, 66 nt, Homo sapiens
gcaaggagccaccagcacggaccaggaggcgagcaacagaccgaaacaaggaccccccgggagaag

SEQ ID NO: 168931 - RNA, 66 nt, Homo sapiens
ggagaccccgcgccggacccgaggcagcgacaccggccacacacaggacaagagcgaagccacacg

SEQ ID NO: 168932 - RNA, 60 nt, Homo sapiens
cggacggcgagcgcgagcggcgcgagaaagcaccgcgcgccgcgcccccccaccagcccc

SEQ ID NO: 168933 - RNA, 75 nt, Homo sapiens
gcggacgccaggggccagacccacaggcgaagagccggaggagcccgacaccacaacacgggacagaagggcgca

SEQ ID NO: 168934 - RNA, 78 nt, Homo sapiens
ggccaaacaagaggcaaggggggaggagcgccgccccccgcacaaggcgccaaacgagggaccacggcggggcagagg

SEQ ID NO: 168935 - RNA, 75 nt, Homo sapiens
ggagaagagggcagggcccccggccgcgggagaagggccccggagaggcggacgcggccaggcggaaaggcaacc

SEQ ID NO: 168936 - RNA, 114 nt, Homo sapiens
cccgacccccgaacccccagcccaaacccggaaacccagcggcccagccgggcagggacagcagggacagccgggagagcaggagagacccgcgagggaagccggggagaaagg

SEQ ID NO: 168937 - RNA, 105 nt, Homo sapiens
caccccaccaccgaagcagagaagccgaggagaacccaggagcaggaagaaaacaccggagcccaagacaccaaaacagacgcaggcaagaggcagaaggacaaa

SEQ ID NO: 168938 - RNA, 77 nt, Homo sapiens
ggccccacagaccggcacaggcacaaaacaacaagagcccgagcgccacggaacgagaggcagaggacagaaggaac

SEQ ID NO: 168939 - RNA, 71 nt, Homo sapiens
gcaaggaccgcaggacccaggccagaccggagcagcggggacagagcagagggaggcaaccccaaagaaac

SEQ ID NO: 168940 - RNA, 73 nt, Homo sapiens
ggggggcagccagaagaaggaccggaagcacacaacaggaaaacaaaagaggagaaaggcacacaagccgaag

SEQ ID NO: 168941 - RNA, 84 nt, Homo sapiens
ggccccgccgccaagaggagcgagcggacccgcgagggaagggggagcaacagacaagcccgaaaggaacagcagcaggaacga

SEQ ID NO: 168942 - RNA, 69 nt, Homo sapiens
cgccgcccgcgggagccgccgccggccacccggggggaaacaaagcccagccgcagaaaaaaaggcagg

SEQ ID NO: 168943 - RNA, 74 nt, Homo sapiens
acccagaggccaacgcaggggagaaaccaaagggaaaagccaccgaccacacgccacaaacccaccgcaagcgc

SEQ ID NO: 168944 - RNA, 102 nt, Homo sapiens
gaagaccgccggggcggaaagggacccgacacgaagaaccaggagcggcagaccgccgccaggaggaggcacgcagcccgagaaggagccacgccagaagca

SEQ ID NO: 168945 - RNA, 74 nt, Homo sapiens
ggaggggccgggaggcagaggggcagggcgaggcagaagcacggagccacacaaagcggaagagaaagacccag

SEQ ID NO: 168946 - RNA, 42 nt, Homo sapiens
ccagacacagacgagcaggggaagaaacggcgaggaaagaga

SEQ ID NO: 168947 - RNA, 78 nt, Homo sapiens
agcaaggcccggaagcgaggaccccaggaagccggaaggccaggaaagaacaagcaccggagagagagcaccagcggc

SEQ ID NO: 168948 - RNA, 65 nt, Homo sapiens
ccggacccagagaccggggggccccagccccgagccggcgaacaagaaaccagggcgaaggacga

SEQ ID NO: 168949 - RNA, 66 nt, Homo sapiens
ggggcccgccgaaccgcccagacccagggaaaaggacagagcgggagccaccagcgccaaagggaa

SEQ ID NO: 168950 - RNA, 74 nt, Homo sapiens
cccagccccgggagcgggacacagggagagaacagcacacagaggcgcaaggggaagagaaaagacagaagcac

SEQ ID NO: 168951 - RNA, 71 nt, Homo sapiens
gacggccagagacaccacaaaacgccgcaccagggacaacccgccacaacgacaaaggaccccaaagaccc

SEQ ID NO: 168952 - RNA, 56 nt, Homo sapiens
cccgcagacaacaaggccacgcccacaacacccagcccggaccaagagacgaggaa

SEQ ID NO: 168953 - RNA, 83 nt, Homo sapiens
cgggaccagcagaacaagagccagcaaagaacagcagcagggccgcggaaaaaaagcgcagaaaaggcacagaaacgggaggg

SEQ ID NO: 168954 - RNA, 73 nt, Homo sapiens
cggagcggggcacaaagcccccgggggaccgagcagggacaccaagccgcagaacgaggccagaaccagacag

SEQ ID NO: 168955 - RNA, 79 nt, Homo sapiens
ggaaaagaccgaggcagcaccaccgaccagccacccagacagaacacggaaacagaggaaaaaaagaaagcaaggaaac

SEQ ID NO: 168956 - RNA, 60 nt, Homo sapiens
gcaccagagaaggagcacccggggagcacagaggaagagagagccggaagccaggggcac

SEQ ID NO: 168957 - RNA, 83 nt, Homo sapiens
aacaagaggaaagacacaccaccaagaagccagcaagcggccaggagaaggaaggcagcaccgaaggcaccggcagaccagcc

SEQ ID NO: 168958 - RNA, 66 nt, Homo sapiens
aaaccgggcgaagaccgcaagaggaaaagggcgggaagcggggaaaggaaaacaccagcacaccaa

SEQ ID NO: 168959 - RNA, 73 nt, Homo sapiens
aagaacaaagacacaggcaccaaaaggcaggaaaagcagacaagagaacagggggacgccaggagcgcgaagc

SEQ ID NO: 168960 - RNA, 75 nt, Homo sapiens
ggccccaccgagccagcaccccaggccaggcgcacaccaggggcaccaggccggcccccgcggggcggcacccca

SEQ ID NO: 168961 - RNA, 88 nt, Homo sapiens
aaagcaggacggaggagcgaccaccgaaacccgagaggagcaggagcaaccgacaggcgggccggacagcgcgcccagcacaggagcc

SEQ ID NO: 168962 - RNA, 72 nt, Homo sapiens
caacaccagacaccaaggacagcccgcaaggcgaccggcccgaggaccgccgcacgaccaaacgcagaaccc

SEQ ID NO: 168963 - RNA, 77 nt, Homo sapiens
cgccgggcaagacccaagcgacaccgaacagcgagcacacggcagacacaagaggcaaagcagggaacaaggagaca

SEQ ID NO: 168964 - RNA, 63 nt, Homo sapiens
aagggcagcggccacacaccaaaaagggggcgcccaacccccgaccggaacagggaccaagcg

SEQ ID NO: 168965 - RNA, 79 nt, Homo sapiens
cccccgcgagccgcggccacgcgagagggacacgcaggacgagcggccgaagcagcgcggccggagaaaccacggacgg

SEQ ID NO: 168966 - RNA, 37 nt, Homo sapiens
ccacgcagccccacccccagcacaggagaggacaagg

SEQ ID NO: 168967 - RNA, 51 nt, Homo sapiens
accagaagggacaaggaccggcggccacacccgccaggcacgagaacaggg

SEQ ID NO: 168968 - RNA, 84 nt, Homo sapiens
ggcgaacgggagccaaagggccccgggccggggaaccaggaggagaggggaggaggggcccagcgaggcagaacggacaccgga

SEQ ID NO: 168969 - RNA, 72 nt, Homo sapiens
caagccacagacgcccagcacagcggggggaccgaaagccgcgagacccgcgcacgcgacggaacaaggagg

SEQ ID NO: 168970 - RNA, 85 nt, Homo sapiens
accccgcccccagcccgcagcagcagcccaccgaaggccaggggcacgcacaccccccggccccgaagaccaagcagcaaacgaa

SEQ ID NO: 168971 - RNA, 74 nt, Homo sapiens
aacgaccaaggcccccagcgggagcaacgcgagccgcaggaaccgacaagaagaccagccaggacaaggaagaa

SEQ ID NO: 168972 - RNA, 45 nt, Homo sapiens
cgcaaacgggcggcggggcaaagacaagcagaccggaagaccgac

SEQ ID NO: 168973 - RNA, 84 nt, Homo sapiens
ggaagagggccgggggcgcggccgcgcgccgccggcgaaggaggaggcggccggccccagcagagaccagagaagccccccacc

SEQ ID NO: 168974 - RNA, 75 nt, Homo sapiens
aaagcccgcaaaaagccacggacagggaagcagaaccccaggaacagagggagaaagcaggcaccacacccgagg

SEQ ID NO: 168975 - RNA, 85 nt, Homo sapiens
gagccacagcgagggggcagacgcaacgcaaggaccgcagaagcgggccaacggcacaaaaggcacgggacaaccaaaaaagcag

SEQ ID NO: 168976 - RNA, 67 nt, Homo sapiens
gacacaagacgaaggagagcgaagcaagggaccgaagaagccaaagagacacaagcagcgaggacca

SEQ ID NO: 168977 - RNA, 70 nt, Homo sapiens
caaacaccacacaaaaaagggacggagcaaaacccggccagacggacccgagaccccacggagaccccag

SEQ ID NO: 168978 - RNA, 75 nt, Homo sapiens
acagaccgcggaccccgaaggagcaggagcgagaccaacgggagccccaagggcaccacaagccgaacagccagc

SEQ ID NO: 168979 - RNA, 73 nt, Homo sapiens
gcggaggcagaggggaggcgcgaaagacggagcggaaccgccagaccacaagaaaagcagaagagccggagag

SEQ ID NO: 168980 - RNA, 117 nt, Homo sapiens
gcagaggcgcggagcgggcagccgccgccaccccgcggccgcacccccgccccagaagacgaccccgacgcaggccaggagccgcggacagaagccgagcacggccgagacaaaagg

SEQ ID NO: 168981 - RNA, 81 nt, Homo sapiens
agggcggccagccccagccagcggacgagggcaaggcgcacaccgaggcgcccacacgggccaccaaaacagcgcagagaa

SEQ ID NO: 168982 - RNA, 87 nt, Homo sapiens
ccggggcggcgccgaggggaggaggcggaagaaagaccacagcaagaccacgcccccagccgggggaccaggccgaacgacccggac

SEQ ID NO: 168983 - RNA, 82 nt, Homo sapiens
gcagcaccagcaacgccaagggaagaagaagcacacagagcgaagcgcgaggagcagcagccagacggacgacggggaaccc

SEQ ID NO: 168984 - RNA, 60 nt, Homo sapiens
gaaaccgacgcccagggcgaaagggaccgccaagcaccagaacccaaaaacgaaacagga

SEQ ID NO: 168985 - RNA, 85 nt, Homo sapiens
acccggccccggcccacaggggggggcaaacccgagagaacggaagggcgaacgaggaaggaagcgagccgagaccaggaagaca

SEQ ID NO: 168986 - RNA, 71 nt, Homo sapiens
cgccggcagccaagaacaacccacccagcccggcaggggaagaagagaaagccgaaaaagacaaggggagg

SEQ ID NO: 168987 - RNA, 74 nt, Homo sapiens
gcggcggcggcgcaggcgaggcaggcagacgggagcgggccgagaaaaaccacagagacacacgcaagccgacg

SEQ ID NO: 168988 - RNA, 77 nt, Homo sapiens
caggccagcgcggccaagacccgccgcaaggacccgagccccaaagacagaaaagccccgagacggaagagaagaga

SEQ ID NO: 168989 - RNA, 40 nt, Homo sapiens
cggccaccccccaggacccaaagaaaccgccgggcgaagg

SEQ ID NO: 168990 - RNA, 73 nt, Homo sapiens
aaaacgaccggcggaaacaaagccaccaggcgcacaccagagaaagcgaaagaagcaaggagaaaagcagcaa

SEQ ID NO: 168991 - RNA, 83 nt, Homo sapiens
cgcggagcaggagcggggccggaacggagccgaggcgcaggggcgcggagccaggacaaaaccaggcagaaccaacacgaacc

SEQ ID NO: 168992 - RNA, 54 nt, Homo sapiens
gagcggacccccgcggcgcgcagcccagcaggaagaccgcccccgacaaagaag

SEQ ID NO: 168993 - RNA, 75 nt, Homo sapiens
accgcagaagcacgcacgcgcgcagaagggccaggccggggccgccagccaccaggagagaacgccgcgccgcgc

SEQ ID NO: 168994 - RNA, 67 nt, Homo sapiens
aaaaggccacagaggggaccaaccagacggcccacaacacaggcaaccgcccgccagccccccaccc

SEQ ID NO: 168995 - RNA, 84 nt, Homo sapiens
agagaagagaagaacagcacaggacaggggggaccaaggcaacgaacacaagcagcgggcaacaacagaacagaaaacaccgcc

SEQ ID NO: 168996 - RNA, 76 nt, Homo sapiens
gcacggccacagagaaaaccaacccgagccaaagaacacagaccaggcccacggaggaggaaaaagaggcccccgc

SEQ ID NO: 168997 - RNA, 78 nt, Homo sapiens
cccccccccccccagcggggccccaagaagccgagacacgcgggcggggaccaggggcgcacccaacaggaagcaggc

SEQ ID NO: 168998 - RNA, 82 nt, Homo sapiens
ggaccagggcgcgccagcaccgccaccagagcgcccgcgcgggaccccaggggggaggcaaagaaagaagcccggaaacggg

SEQ ID NO: 168999 - RNA, 76 nt, Homo sapiens
agcccacaccgccccccgggacccccggagcccccagacccaagaagacagcgaaccagaagcagacaaagaagaa

SEQ ID NO: 169000 - RNA, 78 nt, Homo sapiens
ggggcacgacgacccaacagcaaggaccagccgaaacaagaaaacgaaaaaccccccagaaaacaggagcagaaaaag

SEQ ID NO: 169001 - RNA, 62 nt, Homo sapiens
cacggccgccaagcccacaaggaaaccgcacgggcaagacccagagagggaccagggccaaa

SEQ ID NO: 169002 - RNA, 81 nt, Homo sapiens
gcgggccgccgagcggacccggaccggggcacacaccacgggacacaggggaaaggcgcgcaagccgcggacaagcgcgga

SEQ ID NO: 169003 - RNA, 83 nt, Homo sapiens
ccgcggcggccgcgcagggagcccgaggcaacgccggggcgcccgaggcggaaggcgcaggggaaggagggcgaaacaaagga

SEQ ID NO: 169004 - RNA, 75 nt, Homo sapiens
aagaagccaagaagcagccgccaggggacaaaggagccaggacaaggaagaagagagggcgaaggaggccacaca

SEQ ID NO: 169005 - RNA, 89 nt, Homo sapiens
gaagcaggccaaggagacgaggacgccgagaagaccccaggccaccgcaccaaggcgcccaagaagggaagaaaacgccagagaagcag

SEQ ID NO: 169006 - RNA, 78 nt, Homo sapiens
ggcggcgggcagagcaacgcagaacccgaggaaaggaggccaacagaaagaacccagcaccgcaagcccacagagaga

SEQ ID NO: 169007 - RNA, 59 nt, Homo sapiens
agcggagcaaagaacaccaccaagcagcggccagacaccccggaaaccccggaagacac

SEQ ID NO: 169008 - RNA, 58 nt, Homo sapiens
gaaaaggaagcgaccgcaaccgacggagggccaggagcaagagagacccacgcggcca

SEQ ID NO: 169009 - RNA, 89 nt, Homo sapiens
cggcggcgagaaggcggacccagacagcgaccccagagaaggggcaacacccccacaaagagcaagccagccggacgcaccacgggggg

SEQ ID NO: 169010 - RNA, 81 nt, Homo sapiens
agaaacaggaagaagagccaaaggggacacggaacccaaggagacgaagcgaagcaggagaaggaggggaaaaaaccggcc

SEQ ID NO: 169011 - RNA, 67 nt, Homo sapiens
aagcaaacggaccagaccgaccaccaaaacccgcccaaaagcgcaacaaggccaaagaaaagacgcc

SEQ ID NO: 169012 - RNA, 75 nt, Homo sapiens
cagaagggaagaacaaggccaaggcgaaaaccacaaagggaacaacagaagcgagagagaacgcccccgaagggg

SEQ ID NO: 169013 - RNA, 81 nt, Homo sapiens
ccacggccaggccagggcagaggcgaagggcgggggcgagggcccgggacagcgcacccacacagggcggggcgaggaggg

SEQ ID NO: 169014 - RNA, 64 nt, Homo sapiens
gccaaggagacacacacaggggcgcaagacaggcagaagcccccggggagagacagacagaggg

SEQ ID NO: 169015 - RNA, 69 nt, Homo sapiens
ggaaagaagggggaacaacgagagcggccacccgaggccccacaccccacagaagcggagcaagcaggg

SEQ ID NO: 169016 - RNA, 37 nt, Homo sapiens
aacgccggagggcacgcgaaaccccaggggcaggaca

SEQ ID NO: 169017 - RNA, 77 nt, Homo sapiens
ggcgcggcagcggagggacggcagccgcgcgcaacggggcggcacacaaggagcgaagggcagggagaacgccaggc

SEQ ID NO: 169018 - RNA, 117 nt, Homo sapiens
ccaccgccggcgccgccgcccgggaccggcgagaaggccacaaccaagagaaacaaccggcggaaaacaccccaaaagccaaaagggaaaggaaaagaccaacaacagcgcaggaca

SEQ ID NO: 169019 - RNA, 76 nt, Homo sapiens
gccaagcggggagcgcccgcgacagaggagggaggaaaacaaccgagggcagagccacgaagacggcaaggaggaa

SEQ ID NO: 169020 - RNA, 77 nt, Homo sapiens
ggcgcgggaaagcccccgcccaaaccacgagggaagaagccgagccacggagcacccaaagagaccacccgcagcga

SEQ ID NO: 169021 - RNA, 73 nt, Homo sapiens
gcggaagagcagagagaaggcagggcaaaccagaaagacggggaaccgcccaaaagcccgccagaagaaggac

SEQ ID NO: 169022 - RNA, 112 nt, Homo sapiens
acggggagacggggccgaccacagcagccgcacccggggaacccagacgcccggggcaggagccaggccaaggggagcaagcggggagacagagccggagcccgagcgcgcc

SEQ ID NO: 169023 - RNA, 74 nt, Homo sapiens
ccggccacaggaaacccagccggccaaagaccggggacccgcgacgcaacccaggacgagaaaaaacagagcgg

SEQ ID NO: 169024 - RNA, 77 nt, Homo sapiens
ggccacccccagcaacacccgagcccaccccaccaccccaaagccaccaggacccaagaagggaccacagaccagca

SEQ ID NO: 169025 - RNA, 65 nt, Homo sapiens
cccaggccacaagacaccgccggaaccgacaaggagagaccaccagcgacgagaaacagcccgaa

SEQ ID NO: 169026 - RNA, 73 nt, Homo sapiens
agaagcaaagggcacaaagcagaaagcgcggcagaggacggccaggagcgagaggaagcgggcccaacagaaa

SEQ ID NO: 169027 - RNA, 90 nt, Homo sapiens
accaggcgacacaaagcagcccccaacgaagaggcacaaaggagccccagagccaggcagggggagaaccgcgagggagccccgggaaga

SEQ ID NO: 169028 - RNA, 74 nt, Homo sapiens
gcaccccaccagagcaggacaagaagacacggacggcaccagcaccggacgcgaggaggaggcccggaaccacc

SEQ ID NO: 169029 - RNA, 75 nt, Homo sapiens
gggccaagacgagcgacaggagcacacccggagaagcaggagcccaccggcaggcgggcgccacggaaaggaggg

SEQ ID NO: 169030 - RNA, 76 nt, Homo sapiens
gcggccgcccgaagaggagagagcgcgggcccaggaaggagaaagaagacaggagggagaggagggacgggacggg

SEQ ID NO: 169031 - RNA, 63 nt, Homo sapiens
aaggcgggagaagaggagcaccacaaacggagagcagaggccaggaggggcccagcccggcca

SEQ ID NO: 169032 - RNA, 77 nt, Homo sapiens
acccgccacggcacaggaaaaaagaaggggaagaaacgaaaaaggcagaagaacgcagacagaagaaggaaacaaga

SEQ ID NO: 169033 - RNA, 80 nt, Homo sapiens
ccgccacgacggcagccaccggcggggggccggaagcaccgggcggagacggagcggcggcaagcagcgagagacaacaa

SEQ ID NO: 169034 - RNA, 71 nt, Homo sapiens
ggacacgaggagaaacagcagaaacgcaccaggccaaagaaagagaagcaagaaacaacagcgaccagagc

SEQ ID NO: 169035 - RNA, 67 nt, Homo sapiens
agagaaggaagaaagggaaagaaggaagaacacaacacgaaaggagaagaggacgggaggagaaaag

SEQ ID NO: 169036 - RNA, 84 nt, Homo sapiens
cggcaccacaccaagggcgccccagcaagccgcggccaagcagaagaaccagcacaggcgaagccaaccaggcgcaaaggaaca

SEQ ID NO: 169037 - RNA, 75 nt, Homo sapiens
ccaacacaacacagaccaaaggacccaaccggacaacaagacgccaaggccccaaaggacaaagcacagacagca

SEQ ID NO: 169038 - RNA, 70 nt, Homo sapiens
gggccgccgaccaacacccgaggcggacgcagagacagggggggggaagcccccccggagaaagcccaca

SEQ ID NO: 169039 - RNA, 84 nt, Homo sapiens
agaaaccgcccgcacagagcaggaggccgcagccccaggcgagacagacagccgcgacggaaggaaacaagaaggggaagcacc

SEQ ID NO: 169040 - RNA, 68 nt, Homo sapiens
ccgcccccagcggcggagccacgaaaccaggacggaaaccgggaaggccgagagggaggaccgccagg

SEQ ID NO: 169041 - RNA, 80 nt, Homo sapiens
acgcgcccccgggagcgggcgcccagagaccccagccgcgcacacacggcgacgcgcccagaagaccgcacagaggcccc

SEQ ID NO: 169042 - RNA, 83 nt, Homo sapiens
acggaggaggcagaaggagccacagaaacggaggagagaacagagacacggcccgagaccccgagacagacaagcacacagag

SEQ ID NO: 169043 - RNA, 47 nt, Homo sapiens
cccacaccccggaccgagggacgcgggggacccacagcccggcgacc

SEQ ID NO: 169044 - RNA, 80 nt, Homo sapiens
acagacagggccgcagcacgggagagaagagaagcagaacagcaagcacgcgcaaaagagaagacgaaaagaagcaacaa

SEQ ID NO: 169045 - RNA, 75 nt, Homo sapiens
aaaacacagcgaggagaaacaggaagaccgcaggaaagcaggaaggcaagaaagccaaggacgaaacccacacgg

SEQ ID NO: 169046 - RNA, 37 nt, Homo sapiens
acccagaggagcaaccccgagacacgagccccaaggg

SEQ ID NO: 169047 - RNA, 78 nt, Homo sapiens
gaccaggagacaagagcaaccagaaagagagggacaagagacgaggacgcgcacaggaaaggacgcggaacaagcagg

SEQ ID NO: 169048 - RNA, 71 nt, Homo sapiens
gcggccagaacgcggcacaagccgggcggggcaaggagcggcggcgcggcgaaggagcacgcaagcaggga

SEQ ID NO: 169049 - RNA, 75 nt, Homo sapiens
cacagaccgaacggggaaggagccacaagccacacggaccccggcgcacccagggcggagaacggaaaagcacca

SEQ ID NO: 169050 - RNA, 76 nt, Homo sapiens
cagcacggcccggcaaccacccacccgccgcgagaagaagggcaccgaggccggagaggaccgacagagcaccggc

SEQ ID NO: 169051 - RNA, 62 nt, Homo sapiens
agccccgagagcggaaccacaagcaccagcacgccggcaacaggagagccgccgccccagcc

SEQ ID NO: 169052 - RNA, 50 nt, Homo sapiens
aacccagacagcaaggaacccaaacaggcgcagcgaggaggggaagcccc

SEQ ID NO: 169053 - RNA, 70 nt, Homo sapiens
aaagccccgggagaagcagcgccgcccggggcagaccaggcaggacaaggcacgaggcgcggcgaccacc

SEQ ID NO: 169054 - RNA, 69 nt, Homo sapiens
gcacgggcacgacgggacacccagcaacaccagaagcaccagcaccaagaccagccagggagacgaccc

SEQ ID NO: 169055 - RNA, 69 nt, Homo sapiens
cgagagacggcgaggccaggaagaggaggcaaaaggcacacaagggcgggccagcaccggccacagacc

SEQ ID NO: 169056 - RNA, 54 nt, Homo sapiens
aacggaaagaaaaggagagcaccacgaaggaaccagacagcaccaggggccaga

SEQ ID NO: 169057 - RNA, 89 nt, Homo sapiens
gaggccgagacaacaacggcaccgcgagaggagcgggaaggccccgcacccggagaccgggggaagacaagcacaagagaggaggccga

SEQ ID NO: 169058 - RNA, 68 nt, Homo sapiens
ggaagaaccgccggggacgaaacaaaaagaccggaagcgagaccccaacgccaagaaccaagaaagac

SEQ ID NO: 169059 - RNA, 70 nt, Homo sapiens
ggaaccacagcagcaaaccagcacgaggaggggcaacggggggaacagggcaccgaaggagcgacagcgc

SEQ ID NO: 169060 - RNA, 59 nt, Homo sapiens
cgccgcgccccaccacgcagccagacccaacggacacgcagagcaaacgaacgcggagc

SEQ ID NO: 169061 - RNA, 88 nt, Homo sapiens
cgggggcaagagaaagcccaccacaagaagcggaagagagggggcgcccagcgccaacaccaaggacaagaaaggaccggcccaagga

SEQ ID NO: 169062 - RNA, 61 nt, Homo sapiens
gcaacagaagaccgccagagacagagaagacaacggcagccggaagggcagaggacaaaag

SEQ ID NO: 169063 - RNA, 72 nt, Homo sapiens
ggcgacggcaggccacgcaccagcaggaccaagccacgccaggagacgagcaaacaagcgcagagaaaggga

SEQ ID NO: 169064 - RNA, 62 nt, Homo sapiens
cccgcgggccgccccaccccacaggaaggacacagacaaaagaccaggagagagcagcaaag

SEQ ID NO: 169065 - RNA, 84 nt, Homo sapiens
ggcagaagaagcaacacgcaaacgagagcgaggcaagaaaaacagacggcagcgcacgcgaagagacacgcaggccacaaaaag

SEQ ID NO: 169066 - RNA, 81 nt, Homo sapiens
aggaggcgggggcgccggcagaggaccaggcaccaccggccccggaagagagagcaagccgccaggcgcgggagccgggga

SEQ ID NO: 169067 - RNA, 63 nt, Homo sapiens
acgcaggccccgcgccaggaaacgacagggagaaaaagcaaagaagacagcaaagagagagcg

SEQ ID NO: 169068 - RNA, 58 nt, Homo sapiens
aagcgaaggggaaggcgccgaagaggacgaagggaagggagcccaaaacaggagcgca

SEQ ID NO: 169069 - RNA, 77 nt, Homo sapiens
gagaaaaggccagggcccacgcaagaaagggacaaggccccaggcgcaggaaagacacacagagaaaagggacaagg

SEQ ID NO: 169070 - RNA, 73 nt, Homo sapiens
aaccggaccaccccgaagaaagcacagaaaagcccgagggcacccaccagagcagacaaagaaggaaacccgg

SEQ ID NO: 169071 - RNA, 54 nt, Homo sapiens
cgcgagcggccagcacaagcgcggcagaagcgaaccggacacgcggagagcggg

SEQ ID NO: 169072 - RNA, 107 nt, Homo sapiens
cggcagcgccccgcgagaaggaggagcccccgcccggcagccaccccacgggaaaccagaaggaaaacacaccaggcacagaaaggccccccgccaagccaaggcca

SEQ ID NO: 169073 - RNA, 77 nt, Homo sapiens
ggagcccgcacgagcagcgaacaggaaagaccacagcaagaccacgcccccagccgggggaccaggccgaacgaccc

SEQ ID NO: 169074 - RNA, 77 nt, Homo sapiens
cgggcgcgaagcagcagaccgacccgaacaaggccaacaccagcagggagccgaaaaaacagggaaagcagggaaga

SEQ ID NO: 169075 - RNA, 74 nt, Homo sapiens
cggaaacgggggcggagaggagcaaacagcaagagccgggaggaagccggaacgggggacaggcgagaagcgcc

SEQ ID NO: 169076 - RNA, 52 nt, Homo sapiens
ggcagaggggcccagaaaccagaaccaaaaagcaagcaggacagcccccagc

SEQ ID NO: 169077 - RNA, 71 nt, Homo sapiens
gcgaagacagggggcccaaacgggagacaacccccgaaggaggacagcgcacgaaacacacaaagaaccac

SEQ ID NO: 169078 - RNA, 81 nt, Homo sapiens
gacccacaaagcaccaacgcagccccagcacggcgacagacacggggaacccgaccaacagagccggaaaacagacagaag

SEQ ID NO: 169079 - RNA, 74 nt, Homo sapiens
accgccgccagacagcgaagggacaacagagacagagaaaaggaacagccgaagccaggggcaagcgaaaccac

SEQ ID NO: 169080 - RNA, 82 nt, Homo sapiens
gcccgaggccgagggcggccgacagagccccggcccccccgcagacccccggaaaggcaggagagcgaaagagagcggaaaa

SEQ ID NO: 169081 - RNA, 81 nt, Homo sapiens
gacagccagcccagaccagacagacggacagacgggggagacgccccggagagcgggcagggaggaggcagcacccggaag

SEQ ID NO: 169082 - RNA, 76 nt, Homo sapiens
gcaagccggacccacgacggcaggaaaggaggccaggacggagagggagaagggcagagacgacggcacacaacag

SEQ ID NO: 169083 - RNA, 83 nt, Homo sapiens
gccggagacagcggggcaaaggggcagccaaaggcaagacgaaccaaccagcacaacagaccaggggcgcaagggacccacga

SEQ ID NO: 169084 - RNA, 76 nt, Homo sapiens
cgcgaaagcgcccgcgacccccagggaagaggaggccagcacagaggagcccaggaggaggaccccccgaccccag

SEQ ID NO: 169085 - RNA, 78 nt, Homo sapiens
gcggccgcgaggccgcagccccgaacccccccaccaccggaaggcccgggcagagacaaccccaacagaacgccccag

SEQ ID NO: 169086 - RNA, 86 nt, Homo sapiens
cggcaccgaagccccgagccccccagcgcagggcgaaaccaagaggagggaagcaggcagacgcgaggccggccaacaagacagcg

SEQ ID NO: 169087 - RNA, 62 nt, Homo sapiens
acgcccaaacggaacagcgagacacgggacaaaaaccaaagcagcgagacacccgacagaca

SEQ ID NO: 169088 - RNA, 77 nt, Homo sapiens
gggaagacacaaaagaggcacggcggcagagagcaccagccaggacgcccacccggcccgcagacaagacgaaccga

SEQ ID NO: 169089 - RNA, 78 nt, Homo sapiens
cccgccggcagcccaaccagggaggccgcgcccggaaagaccacagcaagaccacgcccccagccgggggaccaggcc

SEQ ID NO: 169090 - RNA, 59 nt, Homo sapiens
cggaagcggggcgcacaccaccggacaaccgacaaaaggaccgacagcaagaaaaggag

SEQ ID NO: 169091 - RNA, 77 nt, Homo sapiens
ccagccggaccagaccgggcacagcaaagcgaggaccagaccggccgcaagaaaacgaaggaggcccaaccacaaaa

SEQ ID NO: 169092 - RNA, 45 nt, Homo sapiens
gccggccccaagaacggggaccagagaaacaccccggccgagccc

SEQ ID NO: 169093 - RNA, 86 nt, Homo sapiens
acagacgccggggaggcagcgcgggacccagcccaggcggcgcggacggggcggcacccagccacaccccaccgcccagagaaggg

SEQ ID NO: 169094 - RNA, 80 nt, Homo sapiens
aaaacaggacgcaagaacgccgaaccaggaacaacaagaaccaagccacagaacgcggcagaacggaggcaggcagcacg

SEQ ID NO: 169095 - RNA, 81 nt, Homo sapiens
gacgcgcgcgcaggccggacccagagcccggcgccagggggcagacccagcaacaagggcaggcccagcccacaagaccag

SEQ ID NO: 169096 - RNA, 72 nt, Homo sapiens
gaaacgcgggagggacccagaaggaaaggaaagaccacagcaagaccacgcccccagccgggggaccaggcc

SEQ ID NO: 169097 - RNA, 72 nt, Homo sapiens
acagacgcgcgaccggagccggcccagggaacaggagagcgggacccgcccaagcaaggaccaggaggagaa

SEQ ID NO: 169098 - RNA, 66 nt, Homo sapiens
gcagaggagcaagggcaaaacacgaccccaccagagacaaagaggcgcaagccgcagcgggccccg

SEQ ID NO: 169099 - RNA, 79 nt, Homo sapiens
gcacggaaaccagcacccaaaagcaagacccaagaggacccaccccggcacccccccggagacacccgacacgacccac

SEQ ID NO: 169100 - RNA, 35 nt, Homo sapiens
cgaccaccaaaaaaacggacgccgccagccaccgg

SEQ ID NO: 169101 - RNA, 79 nt, Homo sapiens
gcggcggccacggaggcaccagaagaagcaccaggaaggaaagaaccggagaccggcacgagagggagaaccaccgggg

SEQ ID NO: 169102 - RNA, 72 nt, Homo sapiens
agagaaagagaagcggcacccccaggaagcgcggacgggccaacgcacggcccggcagagccagcacccccc

SEQ ID NO: 169103 - RNA, 81 nt, Homo sapiens
aaaacagggcagaacccaccagacagaccgaagccgagccagacaggaggagagaaagaacccacgcaggacgacagaaga

SEQ ID NO: 169104 - RNA, 75 nt, Homo sapiens
cccaccaaagccagaggcgaaaggagaaagacacagcaggccaagcaaagagcagcaggaaaaaaccaggaacgc

SEQ ID NO: 169105 - RNA, 82 nt, Homo sapiens
gccgccgccggagcaacccggggaccgagagcagacccccggggccagggacccaggcaagcaccgcacggaacgcgagcag

SEQ ID NO: 169106 - RNA, 72 nt, Homo sapiens
cacgggcaggaaggcagcgcacgacagcaaaaggggaccaaacacgaaaacagcccgcacaaaaggagccaa

SEQ ID NO: 169107 - RNA, 76 nt, Homo sapiens
cgaagaagcacgaaagccccacccgccgcagcaagcagagacagaaccaaggagagacacacggaacaagagacaa

SEQ ID NO: 169108 - RNA, 73 nt, Homo sapiens
caggccaggaaaacacgcccgaacgggcacacgggcgaggggcaggacccgcgagacaggggaaggaaaaaac

SEQ ID NO: 169109 - RNA, 73 nt, Homo sapiens
cagacggaaacaaggcaacagaaagagcaacagcagggcaacaggaccgcacaggcgcaggcgcaaggggcca

SEQ ID NO: 169110 - RNA, 80 nt, Homo sapiens
gcgaccagagagcggcggaaaggaaagcccgacagaagcaccgagacccaagaaagggacgcacccgagaacgccgggcg

SEQ ID NO: 169111 - RNA, 87 nt, Homo sapiens
acaccgaagcagcgacggcacagcgggaagaagaagacccgaggaccgggaacgaaggggccccgaggaagcagaagccgagggacg

SEQ ID NO: 169112 - RNA, 78 nt, Homo sapiens
cgagcccagccgaaggagaaggggggccggacgggcgcccggaaaagacgacagaagccacgaaccgacgcaaacccc

SEQ ID NO: 169113 - RNA, 79 nt, Homo sapiens
gcagggcgagggagcagcagaaaccggaaaacacacccagcagcacgcaaggcaagagcaacgaaccaaagcaaaggag

SEQ ID NO: 169114 - RNA, 71 nt, Homo sapiens
agaccgaaaacggggacagaacaaggcggcaccgaaacaaagggagagcaaccggaaacaaccagaaaaac

SEQ ID NO: 169115 - RNA, 71 nt, Homo sapiens
cacagccgcagggggagaacccgcggaaaccccgcacagcccagaagcccgagcacgagacaaagagacgc

SEQ ID NO: 169116 - RNA, 65 nt, Homo sapiens
caaagggagaagggaacgcggcaacacaacacagccaagaaaacagagaacaaaacaagaaagag

SEQ ID NO: 169117 - RNA, 74 nt, Homo sapiens
gcgcacagagaaaagggaagcagcggagcacagacagcaaggaacgcacagaacagcaagagacgcaaccacag

SEQ ID NO: 169118 - RNA, 82 nt, Homo sapiens
agcgccaaaggaccggacccagagaagaggaaaaccaccgggcagcagcgagcacagcgaagaaagccagaaaaaaggaacc

SEQ ID NO: 169119 - RNA, 84 nt, Homo sapiens
cgggggcggcacccggcaaaggaagggaccgagaccaccagcagacagcagcagcccgggagccgagccaggaggaaccaccgg

SEQ ID NO: 169120 - RNA, 73 nt, Homo sapiens
aaagaacagaggaaccaggcgcaggcgccaccaggggccagaaccgcccacggcccccacagcggacccggaa

SEQ ID NO: 169121 - RNA, 73 nt, Homo sapiens
aaagagacgacaaagcgggaccagagcaaggagaggaacggccaaaacggggccaagggcagggagaagggac

SEQ ID NO: 169122 - RNA, 75 nt, Homo sapiens
ggccgcaaggagaacgcagggcaaaagcggcgggcccgaaagcgccccgggacccagagcagcagccaggaccgg

SEQ ID NO: 169123 - RNA, 74 nt, Homo sapiens
ggcgcacgcgcggggacggcacaacggaagcaccagacaagacagaaagcaccgcaaggcagagggcagacaga

SEQ ID NO: 169124 - RNA, 69 nt, Homo sapiens
gccaccggaacgcccaccaagcaagccaccgaaaaagacaaaagaaccaaagacggaaaccaaagcagc

SEQ ID NO: 169125 - RNA, 63 nt, Homo sapiens
ggacagggaacagcggaagcagaaagaggagaggccccgcaaagaagggggcgagaagaaaaa

SEQ ID NO: 169126 - RNA, 79 nt, Homo sapiens
gcaagacaccgggaccccggaagccaaaaagggaaggcggcagcacgcggccaacagaagagaccgccgacaaaggaca

SEQ ID NO: 169127 - RNA, 58 nt, Homo sapiens
accgcaacgacggcagccccgccggaccggagaagaacaagccgacccaaagccgccg

SEQ ID NO: 169128 - RNA, 82 nt, Homo sapiens
ggcggaggagagccgcagagcgcgcagaccccgggggccgaagacaccaggacaacagaaggaaaaggcccacgggggaaag

SEQ ID NO: 169129 - RNA, 77 nt, Homo sapiens
gggcacaggggaaaagccaccagggaacgggcacaggacaccagcagccgcaacggcacacacgcccgccaccaccc

SEQ ID NO: 169130 - RNA, 77 nt, Homo sapiens
cgccgccgccccgccagcgccagacggacgaggcggcggagaacaagcggcagccccagaggaccagaagaagaaga

SEQ ID NO: 169131 - RNA, 76 nt, Homo sapiens
cagaaagaagaaaaggaacccggccgagagacaagaccagccagcggccccgagaaacccaagaacagaccgccag

SEQ ID NO: 169132 - RNA, 80 nt, Homo sapiens
agaaagcgccagaaccggaacagcgcacaaccggacagggccacaggcccgggagcggcgcgggcaagaacggaagcacg

SEQ ID NO: 169133 - RNA, 68 nt, Homo sapiens
gaggcggacaggacggaagccgcgaacccccgaccgggagcccacgggacccagaccacaagacagga

SEQ ID NO: 169134 - RNA, 70 nt, Homo sapiens
cagagagacgggagacgagagaacacgccggagagcagaagaggagccaggaagcgaaaaacggaagccc

SEQ ID NO: 169135 - RNA, 82 nt, Homo sapiens
acaacggcccaagacaggcccacccagcccccggagaaacagggcgggagagaaagagagggacccaaggggcccgcaggac

SEQ ID NO: 169136 - RNA, 62 nt, Homo sapiens
caccgcaccgagccaagaaacgcggagcgaacccggccaggcgagagaaccagagaaaaagg

SEQ ID NO: 169137 - RNA, 68 nt, Homo sapiens
gccgccaaggacgaaagaagacagagaagcaaagaagcagccccagcaggaggcaacgagggaacaac

SEQ ID NO: 169138 - RNA, 81 nt, Homo sapiens
aacggacggaaggccaaaccacgggcgcggcgagcagcaaccaagaagcgagcgagacgggacggaagacggagaaaagcg

SEQ ID NO: 169139 - RNA, 76 nt, Homo sapiens
agaggagacaaaccccagacgcgccggagggccagggaaggggaagacggcagcgggccggaggcccaaaagaaac

SEQ ID NO: 169140 - RNA, 69 nt, Homo sapiens
ggaaccacacacaccacaggaagccagcgaagcgcgaaagaggcagaagaagggggagagccaaagaag

SEQ ID NO: 169141 - RNA, 78 nt, Homo sapiens
gccaccccccgcgcggcgggggacgcggaaccagcggagaaacgcgagagcgcggagccagcgcccggcaaggagcga

SEQ ID NO: 169142 - RNA, 81 nt, Homo sapiens
cacgagcaccagccagagccaggcaggccaaaccagccgaaggggcagacaggagaggagagacgccacgaacagccacaa

SEQ ID NO: 169143 - RNA, 59 nt, Homo sapiens
agaccgggcgagcgacccaggaaggagagagggaagcagagagcaaccaagcaccacca

SEQ ID NO: 169144 - RNA, 63 nt, Homo sapiens
gaagaagcgggccacccacaaagggagaccagaaggcaaggagccgggaagcagggcaaaggg

SEQ ID NO: 169145 - RNA, 66 nt, Homo sapiens
gaaacaaccaacagaagaaaaacccggcaaacagcgaacaagaggcgccagcgggcgcgccggaag

SEQ ID NO: 169146 - RNA, 75 nt, Homo sapiens
gaagacacaaaacgcagaccccgccgcacgcaagcgagccccagaccgaacaggcggggagagagaagaaccaga

SEQ ID NO: 169147 - RNA, 74 nt, Homo sapiens
ccccacaggccgaggagcaggaaaacaagcgggaaggggaaccccccccccagaggacagagcacccgacgcga

SEQ ID NO: 169148 - RNA, 74 nt, Homo sapiens
agccgagccagggcccaggaggggcacccgaggggggacagaggccaggaagcaggccgggcacgcagagagca

SEQ ID NO: 169149 - RNA, 55 nt, Homo sapiens
acgcaggaagaacaagccaaccgggccaaagggagaacacccagcagaggcgcag

SEQ ID NO: 169150 - RNA, 66 nt, Homo sapiens
ggagaagcacaagcagcacacaagaaaacaggggcacagacgacagaagccaagagggcgcaaaga

SEQ ID NO: 169151 - RNA, 81 nt, Homo sapiens
agacgcagggcagggccccgcccggcggggaagacagagcgccgccaccgccgccaccacggagcgagaagcccagaagac

SEQ ID NO: 169152 - RNA, 82 nt, Homo sapiens
gccgcccgggggaaaacaggcgcgcccggagcagcggaacaggccgacagcccagccaaggcaaaagcagaccggaaaaccc

SEQ ID NO: 169153 - RNA, 73 nt, Homo sapiens
gaccagagaaccagaagagaagacaggccccagccaacgaaaagccaccgaaggaagggggggcccagaggcc

SEQ ID NO: 169154 - RNA, 74 nt, Homo sapiens
accgagacggagaaggagcggacaggcagaacagaggccaaaagaagaagaggcgaagcgggaagcggcaccaa

SEQ ID NO: 169155 - RNA, 86 nt, Homo sapiens
ggaagcgccacaccggagcaacgaggcgccgggaccggcgcagagacaggcgcgaggagacaccgcagaccccccacgcgcgcgcg

SEQ ID NO: 169156 - RNA, 68 nt, Homo sapiens
caaccgcgaacggacaaaagacaggaccgggcaaaccagaacaagaccgaaccgggccagcaggagcc

SEQ ID NO: 169157 - RNA, 81 nt, Homo sapiens
agcagggaaacccagcgagagaccaggcccgaaaaagcccaagacagcagaagcagacaccccaggaacagcaaagaaaag

SEQ ID NO: 169158 - RNA, 74 nt, Homo sapiens
aggccaagcacccacagcaaagagagccccaggagaaggagcgggagccaaaaagcccgaccaccggaacaaaa

SEQ ID NO: 169159 - RNA, 67 nt, Homo sapiens
gaaaaacccacaaacagcacaacgggcagacgccgaagagagcaccgagccaaggccaaggaaaaca

SEQ ID NO: 169160 - RNA, 70 nt, Homo sapiens
accaagaaccaggacgaggaaccaaggcgagaaaacaacgagacaaagaacgaaagaaaccgaagaaaaa

SEQ ID NO: 169161 - RNA, 74 nt, Homo sapiens
aaggacggaaaggggcgccgacacgaacgcgagggaggccacaccagggaaagccaaaacaggaaacaggaaaa

SEQ ID NO: 169162 - RNA, 39 nt, Homo sapiens
agaaagagaagaccccgaaggggaaggaacaaagcagag

SEQ ID NO: 169163 - RNA, 84 nt, Homo sapiens
gggaccaggcgaagcggccgagcaggcgagcgaacgacgcccagaaaccccgaaggccaccgccaccacccccagcccggccac

SEQ ID NO: 169164 - RNA, 77 nt, Homo sapiens
ggaggggaaagcaaccacacggcagcagcaggcccccgaccagagaccgacagaaaggacaacggcacgcggcagag

SEQ ID NO: 169165 - RNA, 67 nt, Homo sapiens
gaggaggcaggacggcccggccccgcgcgcggcgccgccgccgccagcgcgaacgggaaaagaacgg

SEQ ID NO: 169166 - RNA, 83 nt, Homo sapiens
gaagccgaaaagcgcagcgagcggagccgccggagggcaccgccgaccgaaaccgcaaacacacgacagaggcaaggcaaaca

SEQ ID NO: 169167 - RNA, 80 nt, Homo sapiens
cgcgagaggaagacacccgaccgacaaaaggacagcccagagcaagcacacggaggcccgggagccagaccgggagcccg

SEQ ID NO: 169168 - RNA, 57 nt, Homo sapiens
gaccacaaggaaaaccaagaaccagaacggccacagaacacacggccgcgagagaag

SEQ ID NO: 169169 - RNA, 73 nt, Homo sapiens
caggaccggaacaaacaagggacggacaagggagggccaagaacccggaggagggcaacaccggacagcacag

SEQ ID NO: 169170 - RNA, 82 nt, Homo sapiens
ccccagagcccagggcaggacaccgacaggaacagggaccacgggggcaagaagcaagcaaccaggcgccgcaccagaagag

SEQ ID NO: 169171 - RNA, 83 nt, Homo sapiens
ggagagagcgagcgagggggggcgcgccggaaaccggagcgcgcagcagcacgagccagggagccgccgggaccggcccggga

SEQ ID NO: 169172 - RNA, 53 nt, Homo sapiens
ggcgggcgagccggaggaaggagaacacgaccaaaaagagccaagcgagaaga

SEQ ID NO: 169173 - RNA, 51 nt, Homo sapiens
ccggaagaaccgcagccgagcggggccggccacagggacgaacagcgggga

SEQ ID NO: 169174 - RNA, 74 nt, Homo sapiens
agcagggccaaagggggggcacaaacagggcgaaagaaggacaccggcagaagaaagcgggacaacggaggcca

SEQ ID NO: 169175 - RNA, 65 nt, Homo sapiens
cccggcccagaccacccccccaccgcgcccccacgcaaaaaggccggaaacgaggagaggcggag

SEQ ID NO: 169176 - RNA, 76 nt, Homo sapiens
gaccagccaagcgccggagcaaggaaggacccaggaagcacggaccaaccacgaggaggacagggaagaaaggaag

SEQ ID NO: 169177 - RNA, 81 nt, Homo sapiens
accgggccagacgccgcaccagaaggccggccagggcagaagcgggaagcgaccccccagaaaaggacagcaaagacccaa

SEQ ID NO: 169178 - RNA, 77 nt, Homo sapiens
gagggaggccgcggcccgggccgcaccagagcgcccggcccacgacacaggaagaagacaggagggccagagaaaaa

SEQ ID NO: 169179 - RNA, 71 nt, Homo sapiens
aaggagacaggagagaagcgcagcaagcccggcccgcagggcgaagagccaagaagggacagggcaaagcc

SEQ ID NO: 169180 - RNA, 85 nt, Homo sapiens
gagcaaggcgaagaaccagaccggaccagagagaagccagacgaccaaagaacagccgcaccgggagccaccgccaacacccccc

SEQ ID NO: 169181 - RNA, 79 nt, Homo sapiens
caacccagcccagcggacacccgcggaaccggaggaggggagcggggaagaggggggcgggccgagcacccgcaggccc

SEQ ID NO: 169182 - RNA, 56 nt, Homo sapiens
cacaagccagccggacagcaacagacaacgaagagaggaaagaagcggaaaggagg

SEQ ID NO: 169183 - RNA, 79 nt, Homo sapiens
gcacaagcggagcccaacgaaaccgaacaggcaccaaccagcggacacacggaaaagggacgggaaaagccgagaaaga

SEQ ID NO: 169184 - RNA, 41 nt, Homo sapiens
cccccgagcagcgggacacaggcagagggcaggagccgaga

SEQ ID NO: 169185 - RNA, 34 nt, Homo sapiens
caaaagagccacccaagaaaacagaaacgccgga

SEQ ID NO: 169186 - RNA, 78 nt, Homo sapiens
cccaacggccaccgcccggggagaggcagaccagggacccgggagcgggggccaacagcagggcggggcggaacgcgg

SEQ ID NO: 169187 - RNA, 86 nt, Homo sapiens
aacaccagacgagcaccacaggacccgcaccaggacacgacacagcccaaagagagagaggggaacagggcgggaccaccaggagc

SEQ ID NO: 169188 - RNA, 36 nt, Homo sapiens
gaagaacggagacagagaaaggcaccggagagcgaa

SEQ ID NO: 169189 - RNA, 54 nt, Homo sapiens
gcaccaacagaacggccccaaaggagggggcgaagagaaaccccagcacaggcc

SEQ ID NO: 169190 - RNA, 68 nt, Homo sapiens
aaaacacgggcccgacgacccaggaccgaaggagaagaaggagaaggggaggagaaggcaagccggaa

SEQ ID NO: 169191 - RNA, 73 nt, Homo sapiens
aagaaaagagacccgcgcagcccggacaaaagggagcaccgacacgaggaacagcaggcgcgccaggacagaa

SEQ ID NO: 169192 - RNA, 75 nt, Homo sapiens
caaacaaaaagacacgaagaggaggaagcccagcagaccaccccacgaagaccaagcccagaaccagaagaaaac

SEQ ID NO: 169193 - RNA, 88 nt, Homo sapiens
gcggagaccggcggggacagccaccggagcgcagcgccaggaagaaggcgcggaaggagaagacacagccacaggaaggagggcgaga

SEQ ID NO: 169194 - RNA, 83 nt, Homo sapiens
gcgcccccgcccaggaccagccccggggaagccaaccaccgcgcacgagagcgacacggacaagggggcccccaaagggaagc

SEQ ID NO: 169195 - RNA, 79 nt, Homo sapiens
ccacgaggcacccggacccgcaggccgcgcagagaccaccagggaggggaagggccgaaacagacaaccgagaggccac

SEQ ID NO: 169196 - RNA, 54 nt, Homo sapiens
accaccggacaaccgacaaaagaaacaggaacaacacccggaaagcaggcacac

SEQ ID NO: 169197 - RNA, 68 nt, Homo sapiens
aaaaaagcaaccgccaaagagagacgcgcaacacagagggcaggcagcacaggaggggagggaaggaa

SEQ ID NO: 169198 - RNA, 78 nt, Homo sapiens
cagaggggagcacagagcgagaccaggaaagaagggggcagaagagggacagggaagaagaccgcaacacagcaaccc

SEQ ID NO: 169199 - RNA, 48 nt, Homo sapiens
ggcagaaaaacaccagaggaaacagagcagaaacgaaaggagaaaaac

SEQ ID NO: 169200 - RNA, 73 nt, Homo sapiens
gccccagagccaaggaggaaggggccggacccgggaagaaaagggggagcgcacgaagcggggcccagcggcg

SEQ ID NO: 169201 - RNA, 56 nt, Homo sapiens
gacgcccgcaggcccgcgggcgcaccggcgacgacaacggcaagcggagaagagca

SEQ ID NO: 169202 - RNA, 87 nt, Homo sapiens
gggcgggcccgggggcgagcagcgcacccgggcagcggcggagggagggcagccagaaccggaggaccagaagaagcacgagaagca

SEQ ID NO: 169203 - RNA, 74 nt, Homo sapiens
cgggaaagcacagaaagccaaaagggcccaggacgacgaacggaagcagccaacaacacgagacggggcgaacg

SEQ ID NO: 169204 - RNA, 75 nt, Homo sapiens
ccaccggcagaaaagagacggacgcggagacagaggcacaaaaggagaaagcagaagaaacaggagaaagcaaaa

SEQ ID NO: 169205 - RNA, 82 nt, Homo sapiens
gccggccgcagcgccccacccccggcggcggcacgagcccgaccaggagcccgcaacccagaaaggaagaaggccgcaaagc

SEQ ID NO: 169206 - RNA, 69 nt, Homo sapiens
aagcccccaggccagaaccggagagaagaaagaccacccaaagcaaacacaggaggaccggaagaagag

SEQ ID NO: 169207 - RNA, 73 nt, Homo sapiens
cggcccacacgggaagcgcgggaagggaaagcacacagagaaaaaaagggaacaaaacacagcaagcagacaa

SEQ ID NO: 169208 - RNA, 64 nt, Homo sapiens
caggagaaggaccgaagagagaaaaggaacagccgaagccaggggcaagcgaaaccacagaaga

SEQ ID NO: 169209 - RNA, 83 nt, Homo sapiens
gcaggcggaggggacggcaggcgaggcggaacaggccgggcaccaaggcgcaggcaaaagcagaccggaaaacccaccggcaa

SEQ ID NO: 169210 - RNA, 52 nt, Homo sapiens
cccgccacacgcggcccacaacagccgacccagcagacgcgcgggcaaacag

SEQ ID NO: 169211 - RNA, 72 nt, Homo sapiens
ccagccgggccccagcaggagcacggagcaagcggcagggacacacaggaagacgaacacggaacgggcgag

SEQ ID NO: 169212 - RNA, 86 nt, Homo sapiens
gccaggggcccgagggcggggaccggcggcgcggaggagcgaggcagcgacaggacgggaacggacccccaggcaaaccgccccgc

SEQ ID NO: 169213 - RNA, 78 nt, Homo sapiens
ggaggggcagcagaaaccacccacccaaggaagacccacgccacaccaccccccaggccccagcggcggaggaaagag

SEQ ID NO: 169214 - RNA, 68 nt, Homo sapiens
acccgccggagcagcccgaggccccagccagcgaacgccacagcagaccgggaaaaaaggaagcgaag

SEQ ID NO: 169215 - RNA, 61 nt, Homo sapiens
agcccaccgcggggagcagacaacccccagggcagacccgaagcggacacgggagccggcc

SEQ ID NO: 169216 - RNA, 82 nt, Homo sapiens
cagcgcagacacgccaccaaggagcacaccccacccagcgggcaaggggccgggccgagggccaggacccccgcccaggcgg

SEQ ID NO: 169217 - RNA, 77 nt, Homo sapiens
accgccgggggacggaggcccagaaacggcagacacacaggaaaaacaggcaaaacaggaagccaggaaaagaaagc

SEQ ID NO: 169218 - RNA, 79 nt, Homo sapiens
aaaacagacgcgcccagagcgcagcacgggcgcagaaaacacggggaagagaaagccaaaaagaagccaacaagccgcg

SEQ ID NO: 169219 - RNA, 77 nt, Homo sapiens
agaagcgccgcgggacggccgagccccgcaaaaacggacacccgaggccgccaggggagccagggcgagccaccggg

SEQ ID NO: 169220 - RNA, 85 nt, Homo sapiens
ggcggcgacggcgcaggcgaagcgaaacagcggccaaccagagaggaaagccgaggacagccacacacgccccgggcaccagcag

SEQ ID NO: 169221 - RNA, 77 nt, Homo sapiens
cccgcacagaagaccacagaggagaggccacagccacaaccaggacggcacagcacccccggcacaagaccggcagg

SEQ ID NO: 169222 - RNA, 60 nt, Homo sapiens
ggaacggcagagccccacacccaccccggaaacacgaagcccggcccagagccccgacaa

SEQ ID NO: 169223 - RNA, 66 nt, Homo sapiens
agagacccacagccagcaacaccacaggaagggaaggggcggagacgggcggaacgcaggaggcca

SEQ ID NO: 169224 - RNA, 86 nt, Homo sapiens
gcacagagcccgccgccgaccgccgcccgccacacccgccgccagacacggcacagccaacaagcggagggacaacagcaaaagac

SEQ ID NO: 169225 - RNA, 74 nt, Homo sapiens
aaccccaccggccgacagccgcgacggcgagcccgggccgcgcccgagggcagcgcaagaccccgcacggaagc

SEQ ID NO: 169226 - RNA, 88 nt, Homo sapiens
ccacggcagacacacaacccgacccgacgaggcgcagcgaggaggggaagccccccgcaggaccagggaaagaggagaaacccgggag

SEQ ID NO: 169227 - RNA, 91 nt, Homo sapiens
gaaacgccaagaggggcggccgccgagccacagccagacaggcggccacagggaccaacgcacaaaagcaacacaagcagaaacaagcacc

SEQ ID NO: 169228 - RNA, 62 nt, Homo sapiens
agaaaaacaaagccaaggaaaccccaacacagagccaagcgccaagcacgcccccgggccgc

SEQ ID NO: 169229 - RNA, 53 nt, Homo sapiens
agacgcccaagccaaagggcaagagacgcagacgacggaccggaacgaccccc

SEQ ID NO: 169230 - RNA, 70 nt, Homo sapiens
gggaccaggaccccagggaaccgaacaagacagaaagcgggacgcgcaaccccaggccagaccccacccg

SEQ ID NO: 169231 - RNA, 58 nt, Homo sapiens
cgcccgcgcggcgcggggaccgcggcccgagcaaggcgcggaccaggcgggcgcgacg

SEQ ID NO: 169232 - RNA, 78 nt, Homo sapiens
ccacagagacaagagagaggccccagaggaagaacacgcccaccagaacaagggggaggaagccccacccacacaagc

SEQ ID NO: 169233 - RNA, 75 nt, Homo sapiens
aaacccaccgagcccgccaaaggcgacacagacaagagaaagaggcggagggccggcaggaagaagcaacaaccg

SEQ ID NO: 169234 - RNA, 76 nt, Homo sapiens
gaaagaacaccaaccaaagcgccaaagaaagcaagcagaagaggaacagaagaagcagagcagagacggagcagca

SEQ ID NO: 169235 - RNA, 81 nt, Homo sapiens
cgccgacccgccgagcaaaagcggcgcgagggcggcccgcagaagagcacagaaggagaaggccagcaaagcggaagacca

SEQ ID NO: 169236 - RNA, 76 nt, Homo sapiens
ggacaagaaagggacacagaacggacacagaaggacacggaaacagagccccccacagagcacaagacaggacgaa

SEQ ID NO: 169237 - RNA, 76 nt, Homo sapiens
ccgaagaggcagcacccgagcccagagagccagcaagcgcaacggcggcgccggccaggcggagacagggagagag

SEQ ID NO: 169238 - RNA, 72 nt, Homo sapiens
gagccacagggacccagcaaaggagagcaggagaaaaacggcagcagaacggaaaggcgaagagaagaggga

SEQ ID NO: 169239 - RNA, 57 nt, Homo sapiens
agagggacccggacaaccagaggcagccagcagggggagacgacacacaagagccag

SEQ ID NO: 169240 - RNA, 79 nt, Homo sapiens
cagcaccccagacccaaggacggagagaagggcacaagaaccaagcaacagaagcaggcgggaagaagacaagaagaga

SEQ ID NO: 169241 - RNA, 78 nt, Homo sapiens
cgaaggggagaagagccagccgaaagcagaacaggccaagcagaacagcaggacaacaaccaaaaacaacccacccag

SEQ ID NO: 169242 - RNA, 36 nt, Homo sapiens
ccaaagcggcggagagagcccagagaccccaacggg

SEQ ID NO: 169243 - RNA, 82 nt, Homo sapiens
caaccaacaaccacgggaagccgcggccccaagcaccagcccacccccagcagagaccagagaagccccccaccagccccaa

SEQ ID NO: 169244 - RNA, 78 nt, Homo sapiens
cggagcccgcagaaccccacagcaagaggacgagaaggagggggcagagcacggcaggcagaaggggccaacccgggg

SEQ ID NO: 169245 - RNA, 54 nt, Homo sapiens
aaacaaggcgaccccagaaagggcaccgaaaggccggcccccaacccccacgcc

SEQ ID NO: 169246 - RNA, 79 nt, Homo sapiens
caccgccaggcaggcacaaaggaggggaaagcgcgaaaaagggcgcaaggccaagccagagacacacggaggaaaaacc

SEQ ID NO: 169247 - RNA, 75 nt, Homo sapiens
ccacgcccagccaagagagggagcaggccggagacccggacaaggcaagcccagcacccaccggggaggacaggc

SEQ ID NO: 169248 - RNA, 79 nt, Homo sapiens
gggaccaggggcccggaggagcagggcagagcacgcgcgcagcgaagcccagggaggccaccaggccccccagccccag

SEQ ID NO: 169249 - RNA, 74 nt, Homo sapiens
gagagcacccacaaagaccacagaggacacagcgcgccccagcaacagacccgcggaggcaagggcgaccggcc

SEQ ID NO: 169250 - RNA, 75 nt, Homo sapiens
aacgacacaccgaggaggaggcccccacgccccaaacgaagacccccaggggacaagaaccagcagaacagaaac

SEQ ID NO: 169251 - RNA, 57 nt, Homo sapiens
gaagaaagcaagacccaggacaccccgaagccgagaaagagccgcgaagcagccacg

SEQ ID NO: 169252 - RNA, 84 nt, Homo sapiens
gcacagagccaaagaggacaggaacaagcgccagagggaaggaacaccagccagccgggaacccagggcaacagagacgccagg

SEQ ID NO: 169253 - RNA, 80 nt, Homo sapiens
gaacgggacggcgagagagccagagccccggcacaaagcagaccgccccacgggcgcgcccgcgacagcaccccggagga

SEQ ID NO: 169254 - RNA, 76 nt, Homo sapiens
gaccgcccaacgcgaccggaagacaagggagacggaggagaagccaccccaccacccaccagaaggcgacggcccc

SEQ ID NO: 169255 - RNA, 76 nt, Homo sapiens
cagaggccagcgcgcgcaacacaagacaagaacccacgggaggccgaagaaaaaacaagaagggaggcaaacgcag

SEQ ID NO: 169256 - RNA, 74 nt, Homo sapiens
aaaacaccggcacagcaccacaaggcaccgccgccaggaaggggaccgaaacccgccacacggaaccgaaggag

SEQ ID NO: 169257 - RNA, 82 nt, Homo sapiens
gcaaggacaccaccagggagccaggagagagaagccggccccaaacaggaacacgaagagccccccaaaggagaacgacgcc

SEQ ID NO: 169258 - RNA, 62 nt, Homo sapiens
agcgccacaccccaagcagcacaagaggggaaccgcccaaaagcccgccagaagaaggacgg

SEQ ID NO: 169259 - RNA, 74 nt, Homo sapiens
ccccagagcccacacccgcagagcgaggaccggaagaaggggcagaccaacaccacccagcaaaaaccccgacg

SEQ ID NO: 169260 - RNA, 40 nt, Homo sapiens
cacgaaaaccaagacacaaaaccagagcaggagaggaacc

SEQ ID NO: 169261 - RNA, 55 nt, Homo sapiens
gccgccgaacgccgcccgcacgccgccggcacaacccaagagagcagaaaaaaga

SEQ ID NO: 169262 - RNA, 61 nt, Homo sapiens
caaccacagccacccaggacccagcagaaaccaggccgaaagaaacccaaaaaaaccagaa

SEQ ID NO: 169263 - RNA, 53 nt, Homo sapiens
cgggggagcccagaggagacaggaaagcgcaggcaggagaaggacagcagagc

SEQ ID NO: 169264 - RNA, 63 nt, Homo sapiens
agccgcggccccagccaccacgacccaggaaaccgcgcagagacaggggcacaaaaccagggg

SEQ ID NO: 169265 - RNA, 75 nt, Homo sapiens
cgcgcgcaggccgcccccaccggaagaaaacacgaagaaacgcaggagcccaccgcgagcccccaggaggcggag

SEQ ID NO: 169266 - RNA, 75 nt, Homo sapiens
gacggagcgcagcggcacgcacgcgaagacagcggcagaacagcagaccagaggcccaggccccgcacggcagcc

SEQ ID NO: 169267 - RNA, 59 nt, Homo sapiens
gcgaccgcggcgcgagcaccagggacgccagaggggaagccgcacgagggagagacgga

SEQ ID NO: 169268 - RNA, 74 nt, Homo sapiens
gaaggacacccaggaggccaaaacagaagaggcaaagcccagccacagcagcagcccagcagcaaacaaccaaa

SEQ ID NO: 169269 - RNA, 40 nt, Homo sapiens
aaccacaggaggagacacgagagccgaacggaggagggaa

SEQ ID NO: 169270 - RNA, 79 nt, Homo sapiens
cccccacacgggaggagccaaggggagcgcgcggcgggcagagccgacgccgaagcaggacacaaagaaaagacgaagg

SEQ ID NO: 169271 - RNA, 83 nt, Homo sapiens
ccccggcggccgaagacacgcgacccggagacagcccaaaacccggaagagcgccccaggagaaacaagggaaccagaagagg

SEQ ID NO: 169272 - RNA, 75 nt, Homo sapiens
gcagaggagccagaagggggaagcccaagccccccaggggaggaggcacacagccacccggagccaggaaagggc

SEQ ID NO: 169273 - RNA, 73 nt, Homo sapiens
cggccagcaccacgaggcgggcccggggagcaagaccaccgggcagaccagagaggacaaccgcgcaccaacc

SEQ ID NO: 169274 - RNA, 64 nt, Homo sapiens
gagcccaggagcgccacgcgcggaaggcagcgcccagcagcgcaggccccccacccggcgcccc

SEQ ID NO: 169275 - RNA, 78 nt, Homo sapiens
cggcagcggcggcggcggggggaaaggcggagacggccccaccggcaccgagaaagacaagagggcgaaggggcaccc

SEQ ID NO: 169276 - RNA, 75 nt, Homo sapiens
caaaagcacgcacgaaaccggcaagccagcggaggggaaccaaagagagcacagagcaagaaaccgacagaaggc

SEQ ID NO: 169277 - RNA, 79 nt, Homo sapiens
ggagcggggccgaggccgaaggcccgcggcgccccggcgcagaacaacaagaaggagaaagacacaacgacagaagaaa

SEQ ID NO: 169278 - RNA, 61 nt, Homo sapiens
agccagagcgggaggacgacgagagaggagggaaggccaggacaggggaacaggcacacga

SEQ ID NO: 169279 - RNA, 56 nt, Homo sapiens
cgccgacgagcccccggaaccacacccagagccggccggaggaagaggagaaaagc

SEQ ID NO: 169280 - RNA, 76 nt, Homo sapiens
ccaagaagaccacagagggacccggacaaccagaggcagccagcagggggaggacgggagcacccacgaaaggaag

SEQ ID NO: 169281 - RNA, 77 nt, Homo sapiens
gcaggagggagaccacagcaagacaccgggaccccggaagccaaaaagcaaacccacagcagccccccccacaaccc

SEQ ID NO: 169282 - RNA, 78 nt, Homo sapiens
acggacgacggccagcacagccggcccgggagagcgcacggacggggcgaagagagaacacgcacggaaggaaggaga

SEQ ID NO: 169283 - RNA, 76 nt, Homo sapiens
cgagaacgagagaccgaaaaagaaggacgagccacaagacagggaggccgcacagaggaggagcaccaaaccgagg

SEQ ID NO: 169284 - RNA, 75 nt, Homo sapiens
aaaaacagcaagaacccaaaaggcacacagcgaaccgaagaaacacacagcggacagaagaccacgaaaagcgga

SEQ ID NO: 169285 - RNA, 55 nt, Homo sapiens
cccaggcacccagccagggggagccaaggggcccccaaagggaagccaaacacaa

SEQ ID NO: 169286 - RNA, 64 nt, Homo sapiens
gccgcgaacaccaaccagcacaaaggcccaagacagcagaccacagcccggcaggcccaaaaac

SEQ ID NO: 169287 - RNA, 69 nt, Homo sapiens
gcccacgaagaacgaagagcggacagaagacacagcaggcagccccgggcaaccagcaagcccagagaa

SEQ ID NO: 169288 - RNA, 64 nt, Homo sapiens
aaaaccagagagcgagaacacaagcggggaggacgaagaaacaaagggaaaagaaacacacccc

SEQ ID NO: 169289 - RNA, 76 nt, Homo sapiens
ccgccgcggggcgcgcggcgccggcggcgcgcgacccccgcgcagacacgggcgcagccccgagcccacagcccca

SEQ ID NO: 169290 - RNA, 75 nt, Homo sapiens
caaaaaaagaccacaaggaaggcagaaaacagaccgacaggaaacaaaccacaggcccccagaaagaccgggacg

SEQ ID NO: 169291 - RNA, 74 nt, Homo sapiens
cacccgcgacagacgcccagcagcaggacacaagaagcaagcagaagaaaaaccagcacgcaggaacaacagac

SEQ ID NO: 169292 - RNA, 74 nt, Homo sapiens
cggccacgaagaggcacagcgaacgggcagcaggaggagcagcccggaagagagagcacaaggagagaacaggg

SEQ ID NO: 169293 - RNA, 76 nt, Homo sapiens
aacaaaagaagaccaggagaccgcaagcccacagagagccaggccaaggcacaaacagggagaaacaggaggagac

SEQ ID NO: 169294 - RNA, 50 nt, Homo sapiens
gcagggaaggcggcgaacggagccggaggaagaaagcacgggaaaaggcc

SEQ ID NO: 169295 - RNA, 72 nt, Homo sapiens
cacacaccagaaccggaggaggaccgcggagggaacaccgcgggacaagggcgcaccggggcgcagcgaggg

SEQ ID NO: 169296 - RNA, 75 nt, Homo sapiens
ccaaaggggcggcggcagcagcaaaccagcccaaggggaagacgagagagccgcccggggagaggaaccaaccac

SEQ ID NO: 169297 - RNA, 78 nt, Homo sapiens
cgggccaacccaaaaccagggcggcaaaacgagcgggccaggggagaaccgccagcgacgggaaggcaggacccacgc

SEQ ID NO: 169298 - RNA, 70 nt, Homo sapiens
gcaacagcagccgcaaaaacaaggcggaaacaacgggcaaggggggggccgaagccgacagggacccgga

SEQ ID NO: 169299 - RNA, 70 nt, Homo sapiens
caagcggggcggcaaggaagcagggcggagaacggaaaagcaccaggaagcagagaggaccgcagaaggg

SEQ ID NO: 169300 - RNA, 59 nt, Homo sapiens
cagcgggggcgagcaaaggaagaacaaaagcgcaggaggagagaccagcagcaaaccca

SEQ ID NO: 169301 - RNA, 84 nt, Homo sapiens
gagccaggcagggagccccagagagacaagccccaaggagcccggccccacaccggcacacagcacagggaaaccaagagcaga

SEQ ID NO: 169302 - RNA, 61 nt, Homo sapiens
ccaagcaaagaccagcgccggaacaccaccgccaggccaggaagcaccgggcgagccccgc

SEQ ID NO: 169303 - RNA, 83 nt, Homo sapiens
accggcggcaccggcggcggcgcgcagcggcaggcggagagacccgccgccagccaaggacggcgaagagccaagagcagaga

SEQ ID NO: 169304 - RNA, 77 nt, Homo sapiens
caccagcggaaaaccaaggagcacggggccacagcaggaggaacggcacacaggaggaacacgaccccaacaaccac

SEQ ID NO: 169305 - RNA, 83 nt, Homo sapiens
cgcccgccgggacgcgggccggggcgcgcgggcggcgcgggccacaccagaggagccggaagagcggaaagaggcggagaggg

SEQ ID NO: 169306 - RNA, 95 nt, Homo sapiens
gccgaccccaggcagccccgcacgagcggcaaccgaaagccagcagcggggcaacgggagaccgcagaaggagaaaacaaaaaacacacagagca

SEQ ID NO: 169307 - RNA, 76 nt, Homo sapiens
agaacgcaagcagagaggcaccaccaccccacgaagaagggggaaaacaaggccagacaggagccgcgcaagaccg

SEQ ID NO: 169308 - RNA, 68 nt, Homo sapiens
acggcaagaagcaagaagacaaggagcagagacaggccaagggaacacggccagaggagccggcacag

SEQ ID NO: 169309 - RNA, 56 nt, Homo sapiens
agcgcgcacggcaggacgaggcacagaagggaaaaaggaacccaggccccaaacac

SEQ ID NO: 169310 - RNA, 75 nt, Homo sapiens
ggaggaaaggaggggacagagcacagaagaagaacaaagcaaggcagaagacccagcaacagcgagaccaccgag

SEQ ID NO: 169311 - RNA, 72 nt, Homo sapiens
ggcagacgggacggccaacggaggagagaaaccggccagcagcgggcagcagaggagaagccccaaacagga

SEQ ID NO: 169312 - RNA, 78 nt, Homo sapiens
ccgggaacccccacgcggccagcgaaaacgcccaggccagagcgcccccgagacccacgagccaccagcgcaagacac

SEQ ID NO: 169313 - RNA, 77 nt, Homo sapiens
gcgcagccgcgcgcccgcacaaaggaacgaagcccaaaaggcagagacggaccgagacaggagagcaggggcccagc

SEQ ID NO: 169314 - RNA, 40 nt, Homo sapiens
gaacgccgcgcgaggacgcggcagcaaacaagaggccaac

SEQ ID NO: 169315 - RNA, 72 nt, Homo sapiens
gacgggcccacaaacgacaggcagccagcggcagaggacgcacggcagaaagcaggaccggcacgcgccggc

SEQ ID NO: 169316 - RNA, 76 nt, Homo sapiens
caggaggaagcgcagacccgcgagccaccgcaccaggcggaggcaggcgcgacggccacgcacccgcccccgggca

SEQ ID NO: 169317 - RNA, 90 nt, Homo sapiens
caccggaggacacagagggcaaagggggagaaggcacacaccgagcacggagccggggagaaaggaaaacggccccgggccagaaaccag

SEQ ID NO: 169318 - RNA, 79 nt, Homo sapiens
cggaaaaaccaagaggcaaaggcggagagaaaggacccacgaaaacaagaacaccacgcggaagaagcaggagacaagg

SEQ ID NO: 169319 - RNA, 74 nt, Homo sapiens
gacgacggcagacaacagcgagaagagaacggagaaacaggacagccgaccccacaagacaacaagcagccaaa

SEQ ID NO: 169320 - RNA, 86 nt, Homo sapiens
ccgcgggagagcaggaaggccacggcggcggaaccccaggaggcggaggcccgaaggcccacaggacagagcccacagcaccccca

SEQ ID NO: 169321 - RNA, 82 nt, Homo sapiens
aaaggaaggaacgcagaagagcacaggcgagaagaaagagcggagaagcggaggagaccaaggaggccaccaccacagaagg

SEQ ID NO: 169322 - RNA, 81 nt, Homo sapiens
caaagcggggacccagacccggagcccagggaagcagccgaccagccgcggagccgggggcaggacaaacaacagaccaag

SEQ ID NO: 169323 - RNA, 81 nt, Homo sapiens
ccccaagagcgggacgcaggcacggaaagagccaccgacagacaagcaagcaagaagaaggcacagacgacgggaacagca

SEQ ID NO: 169324 - RNA, 108 nt, Homo sapiens
agaaaaggaccgccggcccgcaacacccccccaccaggcgcgccagacccccaaaggccaaagaagagacgaagcaaaggcgcccggagccccagaaccgaagaagag

SEQ ID NO: 169325 - RNA, 56 nt, Homo sapiens
aggaggaaagggaggacagcccagcaggacaagaaaggaccagcagaagagcaagg

SEQ ID NO: 169326 - RNA, 83 nt, Homo sapiens
cgggcccggccacggcggagccaaggccgccaggcacagagaaggcaaacgggagggcgaggacaccaagagcagcgcggagc

SEQ ID NO: 169327 - RNA, 76 nt, Homo sapiens
agaaccacggcaggaggaaaggacgaccagcggacacgaacagaggccgggaagaaacgagccaccaccccgcccc

SEQ ID NO: 169328 - RNA, 80 nt, Homo sapiens
caaaaggggagaggcccaggaggacagcgggacagcaagggaggcagcagacgggaagaagagagaaaacaaaagcgaga

SEQ ID NO: 169329 - RNA, 79 nt, Homo sapiens
aaccccgcacagaacagccacgggcaacagagcaggaccagggcggaacgcacccaggaggcagggccggcagacagcc

SEQ ID NO: 169330 - RNA, 79 nt, Homo sapiens
agagcaaggaggccccagcggaccgaacagggccccacggcacgacaggagaccggggcgaggccccggggccggcgga

SEQ ID NO: 169331 - RNA, 116 nt, Homo sapiens
ccgcgcagcgccccgcagggcgaggacggccgaaccccgcgcccgcaggacgccccagccagggaaaagaacaggaagagaaaccagcagggcagagacccaggacaaacggccga

SEQ ID NO: 169332 - RNA, 53 nt, Homo sapiens
ccacccgcaacaagccgccagcaccaagccgagcagcaccaaaaagccaagga

SEQ ID NO: 169333 - RNA, 73 nt, Homo sapiens
agaagcagaaacccagcccaccagaggacccagaaaggagccagaacgggaagaaaaaagcgcgcggaggcag

SEQ ID NO: 169334 - RNA, 79 nt, Homo sapiens
gggaagagccagaacagagcagaaacaaagaagagagcaggaagaaggaagaaaaggaccgcaagaagaacggcacaca

SEQ ID NO: 169335 - RNA, 82 nt, Homo sapiens
acggcccagccccagcgcggcccaggacacaaggcacgaggacgaagaggaaaggggccacgaggaagacgggagggagccc

SEQ ID NO: 169336 - RNA, 53 nt, Homo sapiens
gaaaggaaacagaggagagaacacggcagcagcagaaaccgcgccccagacca

SEQ ID NO: 169337 - RNA, 75 nt, Homo sapiens
caacaacaaaaagaaagcgcgacacaggcgagaggaggaagcagcaaagcagcgcgcagcgcagccaagaacaaa

SEQ ID NO: 169338 - RNA, 38 nt, Homo sapiens
gcccaccgcaggacaccggaacagccagcaaagacaag

SEQ ID NO: 169339 - RNA, 78 nt, Homo sapiens
gcagaagaagcacccagcaagcgagggaccgggacgccacagccaggcagacccgcagaccaacgaaaaccacggcgc

SEQ ID NO: 169340 - RNA, 57 nt, Homo sapiens
caggcgcagacgcgcgggcgggaagaggcggcgggcaaggcagagagaacacgacaa

SEQ ID NO: 169341 - RNA, 89 nt, Homo sapiens
cgaaggggaggcacggaaaacgggcagggagccacagcaagcggcgaagaggaaaaaaaacagaacaggaggggagagggcaggaacca

SEQ ID NO: 169342 - RNA, 76 nt, Homo sapiens
agaggaccccggccggaggcaaggcccccccagccccacgaccaggacaccccagcccacggaggacacccccacg

SEQ ID NO: 169343 - RNA, 85 nt, Homo sapiens
aaagccaagaggcggacaaaacgccaggcggaccagaaggccagcaaagaggggagcaacacgaagaaacgaagccggaggggag

SEQ ID NO: 169344 - RNA, 86 nt, Homo sapiens
ccggggagacgaggggaaagacgaagaggaggagaaaaaccagcggagagagagacggaggagcaggaccagcagcaggacccacc

SEQ ID NO: 169345 - RNA, 43 nt, Homo sapiens
gccacacgaggaacaaacgggcccccgagaggccccggcgacc

SEQ ID NO: 169346 - RNA, 77 nt, Homo sapiens
gaggggaaaggccggccagcgggacaggagggcaggaagagcgcagcggggacaagagccccagcccccagcagccg

SEQ ID NO: 169347 - RNA, 74 nt, Homo sapiens
aggccacgaaagccaagaaaagagcgacacagacaagacggccaacagggagcgggcgaagccggccacagcca

SEQ ID NO: 169348 - RNA, 73 nt, Homo sapiens
caccgagacccaggaagccagcaagacggagcccgaggaaagcagaaagacagcaaggaacgcacagaacagc

SEQ ID NO: 169349 - RNA, 68 nt, Homo sapiens
ggaagaaccccccgggagccagaccggcaccgaagaccggaacgcaccgcgcccagacacacacgggc

SEQ ID NO: 169350 - RNA, 74 nt, Homo sapiens
caacaccaccgacggcaacaacacgcagcggccgaggcaggggaagagagcggccccggacacgcgagcggcgg

SEQ ID NO: 169351 - RNA, 78 nt, Homo sapiens
aggacaggaccggcagggggagcgagcgaccagaaacagacaccaaagaaaccgccacccgagaaaacaggaaaaaag

SEQ ID NO: 169352 - RNA, 76 nt, Homo sapiens
caagaacagcgacaaggagagaagcgcggagccccaagaccagacaaagggagcaccagccagaccgggaagaaac

SEQ ID NO: 169353 - RNA, 40 nt, Homo sapiens
gaccgcccgccgcggcgcccggacgccacccagagcagcc

SEQ ID NO: 169354 - RNA, 56 nt, Homo sapiens
agaaggagggaccggccggggcaaggagaaaagaggagacagcaaggaagaagaaa

SEQ ID NO: 169355 - RNA, 45 nt, Homo sapiens
ggagaaggaccaagaaccagacacggagagacgaggacccagcca

SEQ ID NO: 169356 - RNA, 83 nt, Homo sapiens
cgcaaggcgccaggaggaccggggcgggagagcgacccgggccggcagagagcgcgccagccggaaggaaccacggcaccagg

SEQ ID NO: 169357 - RNA, 76 nt, Homo sapiens
ggagagccccaccaagccccgaagcccgcaccaacacacgaggcgaagaaagaccacagagcagagcgacacgaaa

SEQ ID NO: 169358 - RNA, 75 nt, Homo sapiens
ccggccagcgccggaaaccaacaaaaaacaggcgggcacaccgggacagacagaccacgcagggggaaaaagagc

SEQ ID NO: 169359 - RNA, 73 nt, Homo sapiens
gccgccagcgggacgcgacaaaacggaagagagaaggccacgcccgaccccaagcaacaacggggcagggaca

SEQ ID NO: 169360 - RNA, 86 nt, Homo sapiens
gaggaagaagccacccgagcggaccccgagaaggaccggggagggcgcccacagggaaggaggcgggaccgcggcaggggcgggcc

SEQ ID NO: 169361 - RNA, 74 nt, Homo sapiens
ggggccggccggaggagagcggaggcgacgcggccgggggcccggccccggcaggggaaaagaaggaggccagc

SEQ ID NO: 169362 - RNA, 81 nt, Homo sapiens
gaacccagaggcgggaggggccgggaggcagaggggcagggaaaccaggagaagggcaaagagccaggaaaagagcaacgg

SEQ ID NO: 169363 - RNA, 69 nt, Homo sapiens
accgaagcaacacaaggagccggacacaagagggcaagaaaggcgcgacgggccgaaaagggacgaagg

SEQ ID NO: 169364 - RNA, 76 nt, Homo sapiens
acgaccagaccaaagacaggaaagggccgggaagccgagagccaaagaccacgggggccaaacaccaggagaaggg

SEQ ID NO: 169365 - RNA, 73 nt, Homo sapiens
ggagaggggccccaaacggcgggcggcagggggacaccgcggagagggcggcgaaggcgcgccacggagccac

SEQ ID NO: 169366 - RNA, 76 nt, Homo sapiens
gcgagcggcaggcgcagcgcagccgccagcgcaagggaaagacaaggagccgggccgagaaaccgaaccagagacc

SEQ ID NO: 169367 - RNA, 84 nt, Homo sapiens
aagggacagcaacaaagcccgaacagcagcagcgcgagcgacaacgggacgggaaacagcgacagacagaacgccggaggcgag

SEQ ID NO: 169368 - RNA, 70 nt, Homo sapiens
agaggaacaggcggcgggcgagccggccacgacgccccgggcgcaccagacgccgccgcggggagcgagc

SEQ ID NO: 169369 - RNA, 73 nt, Homo sapiens
agggcaaaacaagcacagaagaacaccgggggccccagcccaaaggggcaggacaagacagaaggccaaggga

SEQ ID NO: 169370 - RNA, 78 nt, Homo sapiens
ggaaagggaagcaagagccagacccaaagggaaacacccagcagcaacccaggcgcacccccagaccagagccccacc

SEQ ID NO: 169371 - RNA, 84 nt, Homo sapiens
caccgcaaagcggggacccagacccggagcccagggaagcagccgaccagccgcggagccgggggcaggccgcgaagaggaaac

SEQ ID NO: 169372 - RNA, 79 nt, Homo sapiens
agacggagcagagccgcgggcgccggagccgaggcgagcgccgcgcgcaccacgagaagaacggcacacaccccccaga

SEQ ID NO: 169373 - RNA, 71 nt, Homo sapiens
cggcccgcccccgggcgagcccccggcccacgagaaggcacacagccagaaaaggacccaagggggcaaag

SEQ ID NO: 169374 - RNA, 87 nt, Homo sapiens
ggcgcacccaggagaaggagcagacaagaccccaacaacaaggcccccaagacaagccagccaggacggaacccgcaccaccacaca

SEQ ID NO: 169375 - RNA, 83 nt, Homo sapiens
gagcggcgagccgaaaagcgagcgcgaggaaaaggcggcgggaggaacggcagagcgaaacaaacaagagggcgaaccagcac

SEQ ID NO: 169376 - RNA, 106 nt, Homo sapiens
cgcgccggaaggggcccgaagcccccgcaggaaccacaacccaaccaggcacacgcagccagaagcaacaagagaagcagaaaaacagacacgcaagagaaacagg

SEQ ID NO: 169377 - RNA, 84 nt, Homo sapiens
gcgcggcagggagcgcgggggcccgcgcagcagcgaccacgcgcccaagggccccacgaccgacccggagcgaccgaccccaag

SEQ ID NO: 169378 - RNA, 76 nt, Homo sapiens
agaggaaccggcccagagcacagaaggcagacgcagccgccggagggcgcggagcggggaccgcacaccgcccgac

SEQ ID NO: 169379 - RNA, 79 nt, Homo sapiens
ggcacccggaccggagaggaggggaggacagcccagagcaagcacacggaggcccgggagccagaccgggagcccgccc

SEQ ID NO: 169380 - RNA, 72 nt, Homo sapiens
agcaagcgaagcacggccaaagagcacagggacagaaaaacagcgcagacgagccgcaaggacaagacggaa

SEQ ID NO: 169381 - RNA, 55 nt, Homo sapiens
acggaccgaggggcgcaggggggcagaagaaaaagcaggacaacagggcaaggag

SEQ ID NO: 169382 - RNA, 83 nt, Homo sapiens
gcagcggggaagcagcccacgcccggcagccggcgcaccccgccaccggaggagcagagccgggcaggccacgcagaacaaga

SEQ ID NO: 169383 - RNA, 62 nt, Homo sapiens
gcagcgggaagagcagaaccggggcggagcaccgcaggagaaccaagcacacgaccagacgg

SEQ ID NO: 169384 - RNA, 76 nt, Homo sapiens
gagccagagccagggccgcagcagccaaccaaagaaaacgaacgagccgcagacagggggagccgggaaggagaag

SEQ ID NO: 169385 - RNA, 88 nt, Homo sapiens
gaacgccgccgccgccgccgcagagcgcagccggggccgaggaggcgggaggcggcagaagcagccagaggagggcacaggcggcgcg

SEQ ID NO: 169386 - RNA, 88 nt, Homo sapiens
ccgcgaggacgaccccgcagaaggccgggacagcagaaaacagccagcagaaaaagccaaaaagcaagcggacaaaagaagaaacaag

SEQ ID NO: 169387 - RNA, 86 nt, Homo sapiens
ccgcgaggacgaggcggcgccgccgggcgggagggcccgccccaccgggggccaccccagggaggagaagagggacccagaaggcg

SEQ ID NO: 169388 - RNA, 61 nt, Homo sapiens
agcagccacgccgcgcaggcccaggggcacaggggggggacccgcaagaccggggccgagg

SEQ ID NO: 169389 - RNA, 53 nt, Homo sapiens
cagagcacaacggaggccgaccggccggacgcaccagcggcaaccaagccggg

SEQ ID NO: 169390 - RNA, 73 nt, Homo sapiens
ggaccgcaggcgggcgccgcgcgagccacccagcgaggcggacccaagaccggggaaagcacggcaccagaaa

SEQ ID NO: 169391 - RNA, 75 nt, Homo sapiens
cgcgccagccagcccgcgaccgcccgcgccggcaccggggcggccggccaaagccagcgaaaaaagagaacgggc

SEQ ID NO: 169392 - RNA, 63 nt, Homo sapiens
aaaaccgccacgccaccgaacagcccacaagcacagggaccgccccagggggggggggaccca

SEQ ID NO: 169393 - RNA, 86 nt, Homo sapiens
ggagggaggggaaacacaaagccggcacgcgcgcgagcaggccgaaaagaggaagaccaggcgggaggagggaaagagaaggcgag

SEQ ID NO: 169394 - RNA, 81 nt, Homo sapiens
aagaacgacccgcccggggcagcaggggcaaagaaaaaggagagaaaaagaggcaaaacaacaagaagaaaagagaaaaaa

SEQ ID NO: 169395 - RNA, 91 nt, Homo sapiens
gcgggaaacagccgcggcgggcaggccaggacgcaggcccgcccccggggcagagcgggagcacggcggcgaggagaaaggaaggagagga

SEQ ID NO: 169396 - RNA, 77 nt, Homo sapiens
ccagccgagacggccaccccccggcccggaggagagcgggagggcgggcccacgagggaaccaacacagggacccag

SEQ ID NO: 169397 - RNA, 73 nt, Homo sapiens
ggccacacgcccgcgccgggaccgcccgacggcgaagaaagccagaccccccaggagaccccaaggcgagccc

SEQ ID NO: 169398 - RNA, 81 nt, Homo sapiens
acacaagagagcagggaggaggggacccaagggagagagggaacggcgaaagggcagcccggaaggagcaccaccaccgga

SEQ ID NO: 169399 - RNA, 62 nt, Homo sapiens
caccaccaagcggagaaagcgccaggacagagcgggagccaccagcgccaaagggaagccag

SEQ ID NO: 169400 - RNA, 82 nt, Homo sapiens
cggagggcgcagcgcccacccgcgccagagaccagaaaagaaacccgaccgccccaggggcacagcaggaccagcagggccc

SEQ ID NO: 169401 - RNA, 98 nt, Homo sapiens
gccgaccgagcccaggagcgccacgcgcggaaggcagcgcccagcagcgcaggcgggcgcggacggcaggggcgccggggaacccgcgggaagaagca

SEQ ID NO: 169402 - RNA, 69 nt, Homo sapiens
gaaagcaggagcacagaaccaacagagcgggggcaaaagaaagggggggccagccaaagcagcagaaag

SEQ ID NO: 169403 - RNA, 73 nt, Homo sapiens
gacccaaacacacccgcgaacagcagacccaaacgacccaggcagccgcaaagccagagacccaccaacaggc

SEQ ID NO: 169404 - RNA, 83 nt, Homo sapiens
agcggagcagccggaggacgcggagcccaagaaacgggcagccaggcccccacagcccgcagggaaggacaaaagggggagag

SEQ ID NO: 169405 - RNA, 78 nt, Homo sapiens
aagccgaggagcagccaaaggagggccacgcgccccggcccaagggcgcacgaaggggaaccgaagcgaacacagcga

SEQ ID NO: 169406 - RNA, 68 nt, Homo sapiens
cggaggaagcggcaggcccgacaggacccagaccggaacgggcacgacgcaccaaagaaaaaggaagc

SEQ ID NO: 169407 - RNA, 76 nt, Homo sapiens
gaaacggaaacagaacaacgcaaaggccccaaccacggagccaggggaaccgcccaccaccaccaccaggaaaaca

SEQ ID NO: 169408 - RNA, 96 nt, Homo sapiens
ccgaaaaccaaacaccaagcccacagagggaaagaagaggccccagcacacgacccgcgaccaaccccacacgcgacaagaaaaccaaaacccaac

SEQ ID NO: 169409 - RNA, 78 nt, Homo sapiens
gagaagcggggcaccacgaaggaccgaagagagacaggggccaggccaggggcaggggaagcacccaaccaacgagcg

SEQ ID NO: 169410 - RNA, 78 nt, Homo sapiens
ccacaggagcgcggaagacgcacaagggaagacgcgcagcaagagacgaagaggagcagaaccagaagggacacacag

SEQ ID NO: 169411 - RNA, 96 nt, Homo sapiens
gaagaccgaggggcacaccgaccagccgcacgccgaccggcgccgggagaccggaaaagacccgcaaccgcgcccgggccgccggacaaaacacgg

SEQ ID NO: 169412 - RNA, 89 nt, Homo sapiens
gcaagagaacagcagcgccgcccgccgacagccaggcccgggagaacccaggggagcggaaagcacaggaggagcagaagaccgggcga

SEQ ID NO: 169413 - RNA, 88 nt, Homo sapiens
gggccggcagaggaagaggcggcggcgaaaggaacggcgaaggcccacgggagaaaaccgggcgcaaggcaggcgaacgaaggagggc

SEQ ID NO: 169414 - RNA, 73 nt, Homo sapiens
gcggcggcccaggcccggccccgaagagagcccggaaccaccggccgcagccgcagaaggaggcgaagagcag

SEQ ID NO: 169415 - RNA, 59 nt, Homo sapiens
aaacgggaagacacacccgacccaggacaccaacacgcggaagccccaacccgaagcac

SEQ ID NO: 169416 - RNA, 68 nt, Homo sapiens
caaacgcgaacacccaaagaaaagcaaacccggaccccagagcgggggggagagcgcggggccacagg

SEQ ID NO: 169417 - RNA, 86 nt, Homo sapiens
ccgaccaacaccagaacccagcgcccccagagccaggacaaaaccaggcagaaccaacacgaacccaagcacaaacaagaaaacga

SEQ ID NO: 169418 - RNA, 51 nt, Homo sapiens
caacaaagccgacccaacccaagggccaaaggcgaagaccagggccacagc

SEQ ID NO: 169419 - RNA, 86 nt, Homo sapiens
caaccggcaggcggacggcacgcagcccggcgggaggaaaagaccaccacgaacaccgaagaagcaggcacaccccccacaccaga

SEQ ID NO: 169420 - RNA, 70 nt, Homo sapiens
agaaggagaagaaaaggcaagacaaaacagagagaagaacagcaaaagcaaagggccaggcaggaaaggg

SEQ ID NO: 169421 - RNA, 81 nt, Homo sapiens
ccacaaaagaaagaaaccgcgaggcagggaaagaagggcaagaagaccggaaggagagaaagccagaccggaaaagaagaa

SEQ ID NO: 169422 - RNA, 64 nt, Homo sapiens
gaaacacgaccaaggggcagcggcaagcaggggagccagccacacagagacagaccaccgaaga

SEQ ID NO: 169423 - RNA, 87 nt, Homo sapiens
gcagacgcaacgcaaggaccgcagcaaccccggagagcgagcgggcacgagccgggcgcacggaagcacaccggggggccccgaggc

SEQ ID NO: 169424 - RNA, 71 nt, Homo sapiens
cagcgaagagccagcgacgagcagggcacccagcaaaaaggagcacaggacccagaagaaccacgcgcagg

SEQ ID NO: 169425 - RNA, 71 nt, Homo sapiens
caaaaacggcagggaagggaacgcacggcagacaagaaagccaaacgaggagaggaaaccccgccacgagc

SEQ ID NO: 169426 - RNA, 81 nt, Homo sapiens
ccaaaacccggaagagcgccccaggagaaacaagggagaagccgcaccaggcgccgggcggcgacccccacgcgacaccgc

SEQ ID NO: 169427 - RNA, 80 nt, Homo sapiens
cagagacaaaagcaacaggacagaaacaggaaagcagagccacagaagcgaaggccaccagggagaaccagcccgaaggc

SEQ ID NO: 169428 - RNA, 61 nt, Homo sapiens
ccaccagccccaaaaggcggcaacagcccggccacccgaggacccagaccgcccgcacgcc

SEQ ID NO: 169429 - RNA, 76 nt, Homo sapiens
gaaacaacgacgggcagcaaaggaacacagacagagcagaaagggacgcacaccgagacgaacacagaacagcacg

SEQ ID NO: 169430 - RNA, 73 nt, Homo sapiens
gcgcgggaccagacaaaaggaggaaacccggccggcgggcagacccggacaccaccaacaaggcaccaaaccg

SEQ ID NO: 169431 - RNA, 69 nt, Homo sapiens
acaccgccccgagacgagcggagcggaggcagacacacacggggggagagggagggggggacacggccg

SEQ ID NO: 169432 - RNA, 74 nt, Homo sapiens
acaggccaaacggaaagacgaaggggccccagagccaaggaggaaggggccggaagccggcggaaaccgacaaa

SEQ ID NO: 169433 - RNA, 74 nt, Homo sapiens
gggcagaggaccggagcgccccgccgcgagccagcagcaccggaacaccaagagaagacacccaccgggacacc

SEQ ID NO: 169434 - RNA, 75 nt, Homo sapiens
agacgacgaacggaacagaaccggcaggacaaacccgaggcgagaaccaagacaacaggcgaagaagggaaacga

SEQ ID NO: 169435 - RNA, 62 nt, Homo sapiens
gaggaaggcgcagcgcaccgaaagagcaccgcacaaaacaacaagggcgcggcacccaggcg

SEQ ID NO: 169436 - RNA, 75 nt, Homo sapiens
caccgacccacaggagcgcccgcggaggagcgcccgggagcacccacgggagaccggggggcaagaaaaggaaga

SEQ ID NO: 169437 - RNA, 54 nt, Homo sapiens
ggcgacgaaccacaaacggcgggaccaaagcaaaaagcggaaccacaagaagaa

SEQ ID NO: 169438 - RNA, 75 nt, Homo sapiens
cgcacggagaacaccccgccgggcgggccaacaagccccagaccaagacggacagaacaaaggggggaacaaaca

SEQ ID NO: 169439 - RNA, 90 nt, Homo sapiens
gccaaggagcacggacggacccagcacgaggaggcgcgaggagagcccagaaccgggacaacccagcaaacaggccagacccgacaggag

SEQ ID NO: 169440 - RNA, 65 nt, Homo sapiens
acaccaaggcggggagcggcgccgacagagcccacggagcaggacaggaagaagcgggagcggaa

SEQ ID NO: 169441 - RNA, 73 nt, Homo sapiens
gggcgcgcggcgccggcggcgcgcgacccccgcgcagagcaccggagcaagcggcaacaacaggggacaaccc

SEQ ID NO: 169442 - RNA, 61 nt, Homo sapiens
accagcaccaccagcaggcacagcccacagcgcggcaccgaccccggggggcgcggggggc

SEQ ID NO: 169443 - RNA, 38 nt, Homo sapiens
cagccaacccaggaccaaggaagaagacggcacgggac

SEQ ID NO: 169444 - RNA, 76 nt, Homo sapiens
gcaaccgggcggagccagccgggccagccccgcgacggcccacgagccaagcccagcccgagccgacgagcgcggg

SEQ ID NO: 169445 - RNA, 73 nt, Homo sapiens
cagcggaacaggccgacagcccagccaagaaaccagcccgagcagcagccgagaaagggggccaggcaaacaa

SEQ ID NO: 169446 - RNA, 82 nt, Homo sapiens
agccagccccgccgaacgagcgggaagcaaaggcggcgggcgcagaggcccccaggaggagagcaaggaccggcaggggcgc

SEQ ID NO: 169447 - RNA, 68 nt, Homo sapiens
agggaaaaaagcagcaaacacgggacaaaaaccagaccagagacaagggcagagccaagcgccgcccg

SEQ ID NO: 169448 - RNA, 66 nt, Homo sapiens
ggaaaaaccaaaggaaccagaagcggcaagcacgcaggcccaacgacggcaggggaaaaacgaggc

SEQ ID NO: 169449 - RNA, 80 nt, Homo sapiens
caaaagcacgcacgaaaccggcaagccagcggaggggagacaagagcgccgcgagacagcagggagagcaaaggagcagg

SEQ ID NO: 169450 - RNA, 42 nt, Homo sapiens
agggggcccgcaagaaacgaagaagcaaaagacgagaggacc

SEQ ID NO: 169451 - RNA, 80 nt, Homo sapiens
ccaagggcacgagccaaggagcacaacgggcagggacagagagaccaggagcacacagagaaccagaggcaaagaagagg

SEQ ID NO: 169452 - RNA, 98 nt, Homo sapiens
aaccacagaaacaaagaccagaccaaggagggacccaacagggacaggaggaagggcccccggaggacacagcaacaaggaccacggaagcagagacc

SEQ ID NO: 169453 - RNA, 73 nt, Homo sapiens
cacaccgccccagagaccccggaaaaaaccaaaacagccacgagaacaccccagggcaagcaacaggaggcaa

SEQ ID NO: 169454 - RNA, 79 nt, Homo sapiens
acaagcggacagaacagacgggacccccagccaaaggcaaaggacacgaggaggccagagaaacaagcaagcggcacca

SEQ ID NO: 169455 - RNA, 63 nt, Homo sapiens
aaaaaagcagcaaacacgggacaaaaaccagaccaggacccacagaaggaggaagaggaggac

SEQ ID NO: 169456 - RNA, 102 nt, Homo sapiens
acccgcgcccaggccagcgccccaggccaagagggacccacccggcggcgcgagaccgcacagcaaggaaagcacccagagaaggaccggaagagcaagacg

SEQ ID NO: 169457 - RNA, 78 nt, Homo sapiens
ggacaccgcacagccgggaaaggcgggagcagcggaagacaccaaggccagggagggccaccgcacggaagagaccgg

SEQ ID NO: 169458 - RNA, 88 nt, Homo sapiens
agagaacaaccgacaaaacagcaagccaacagggaagcgacacaccccaaaaaggagagaacccggacccagaggaaagcagaaacac

SEQ ID NO: 169459 - RNA, 83 nt, Homo sapiens
cgagccggaggagcacccaaccccgcgccgggacaaccagaggcgaagagcccacccgccaaccggagcagagaccgcagcag

SEQ ID NO: 169460 - RNA, 72 nt, Homo sapiens
gacccaagccgggggacgaccgggacagcaccggcgcaccagaaaacaccgggaaaggcccaaaccggcgaa

SEQ ID NO: 169461 - RNA, 77 nt, Homo sapiens
cagagggaaaggaccaccacaggaaagaagagccgcgaaggccaggacgcagaggcacagagcccagcggaccagag

SEQ ID NO: 169462 - RNA, 80 nt, Homo sapiens
aagaacaagaaacacaacaaaaaagagagggaagcaaagaggccccaaggcccagaagaaaaagcgcagcgcacggaaaa

SEQ ID NO: 169463 - RNA, 90 nt, Homo sapiens
gccggagcccggggaaagaggcgggagagggaggagcccagaccgggcgacccgccgagaaaagccaggaaagaaaagacaaccagcccc

SEQ ID NO: 169464 - RNA, 82 nt, Homo sapiens
gcaccaaaaggcgacacaggaagcgcaacgagcaaaggaaagccgagcagcaaaaaagggaggcaaggcgaaaaaagcaaga

SEQ ID NO: 169465 - RNA, 83 nt, Homo sapiens
cacgagaggacagcccagcaaggccagcagagcccaagggcgccagccaccacccagacgaccagacgagagcagacacgccc

SEQ ID NO: 169466 - RNA, 65 nt, Homo sapiens
agagcagcagcagcagagagaaacagcagaaagcaggagcccggaaaggagaaggaaaagacggc

SEQ ID NO: 169467 - RNA, 72 nt, Homo sapiens
acaaacagacaggaaccaagacgcggaacagcacaccaggagagaagcgacagccgcagcacgggggagccg

SEQ ID NO: 169468 - RNA, 76 nt, Homo sapiens
cagccccccggaacccgcacaaagaaggagccaccgccaagcgaagggcgggaacaagcgcgagaaggaacaaacc

SEQ ID NO: 169469 - RNA, 81 nt, Homo sapiens
aaaaacaagcaccagaggcccgagcagccagcacggaggcaaccgccgcgggccgagcccgcccgccaggaccaggacaga

SEQ ID NO: 169470 - RNA, 72 nt, Homo sapiens
accaaaggaagaagcgaagacggaaacgaggaaaccgggaaagccaccgaaaagaccgcgcacagaaagccc

SEQ ID NO: 169471 - RNA, 83 nt, Homo sapiens
acacagaggaggagacccaccgccgggcgccgaaggacaagccccgcggaaaacaaacgccaccagggagcagaggagcacga

SEQ ID NO: 169472 - RNA, 72 nt, Homo sapiens
aagcaaggaggccgcaaagggcacgaagcaggaaagaacgacgccagggagaacgcccaaaccccaagcccg

SEQ ID NO: 169473 - RNA, 75 nt, Homo sapiens
acaaaaaggaggacggaagggaagaaacacagaagaagcccggacaaagccgaggcaccaaacgacccggacgcg

SEQ ID NO: 169474 - RNA, 81 nt, Homo sapiens
cgcgaacggggccagcgccgcgcccggggccggcgcccgggccaccggccgcagcgcaaaccagcaaaagcagaaagcacg

SEQ ID NO: 169475 - RNA, 64 nt, Homo sapiens
acgccaagcgccaaaggcaaaaaggggaaagggagcagcaccggccacacccacagcacgaccg

SEQ ID NO: 169476 - RNA, 78 nt, Homo sapiens
caaacaagccgacagagggaaaccaacagccaggaagcaacaggaaagagaaaggagaccacaagaccccgcgccacc

SEQ ID NO: 169477 - RNA, 80 nt, Homo sapiens
gcacaaaaacagaggggagacagaaggaagaaagagaggccggagaaaacaccaacaaagcagcccgaggaggcacgcaa

SEQ ID NO: 169478 - RNA, 77 nt, Homo sapiens
gaaaggcccaccggccgggagggcccagggcggggcccgagggcgagcaaggcaaccagcaagaacaggccacgcca

SEQ ID NO: 169479 - RNA, 73 nt, Homo sapiens
caagcaggaccacccaccagccaccagcgcacgggaagcaggaaaacgaggccgcgggccggggcggggcaaa

SEQ ID NO: 169480 - RNA, 80 nt, Homo sapiens
cagcgcaacaaacgcgagacgcacagcccggccggggaggggcggccccacggcgagcagaggcacagggccaggcacac

SEQ ID NO: 169481 - RNA, 57 nt, Homo sapiens
ccaggcggaaggcgcgagaagcgagcgcgacaaacccagagccggaacacgccaccg

SEQ ID NO: 169482 - RNA, 58 nt, Homo sapiens
aagggcagaagggaagaacaggagaaaggccccaacgagcaaccgagacaaaaagaag

SEQ ID NO: 169483 - RNA, 71 nt, Homo sapiens
caaagaaaaagaagaagcacacacacagggacccagaaagcgggaaacaggaaaaaaccaacaaaagcagc

SEQ ID NO: 169484 - RNA, 78 nt, Homo sapiens
aaaacagcacaccaggaagcaagggggcaaacacgaaaagagacaagagagaaaacgggaaaaaaaaaacaggaacca

SEQ ID NO: 169485 - RNA, 64 nt, Homo sapiens
ccgacagccgcgacggcgagcccgggccgcgcccgagagcgcacaaaaggagcggagccgccag

SEQ ID NO: 169486 - RNA, 121 nt, Homo sapiens
ccgggggccgaggggccaaccagcgaagagcgacaagccgcggcagccgcggaccaccgccgccaggcaacggggcggcacacaaggagcgaagggcagggagaacgccaggcacagcacg

SEQ ID NO: 169487 - RNA, 90 nt, Homo sapiens
ggagccgccgcgcgcccgcgcccccgcgcgacgccagggcacggccgagcagagaggacggggacgaccgggccagacaccgggaggaac

SEQ ID NO: 169488 - RNA, 68 nt, Homo sapiens
aggaagaaacccccagccgacgcccgcgccccccagcaagaccccgcagggacagcggggaaagaaca

SEQ ID NO: 169489 - RNA, 41 nt, Homo sapiens
accagacagaaggggaggaccgcagcaggagggagccagga

SEQ ID NO: 169490 - RNA, 58 nt, Homo sapiens
gcgggcggggaggcgaggccggacgcacccggggggcccagcaaagcaggagagcagc

SEQ ID NO: 169491 - RNA, 85 nt, Homo sapiens
agacgcgcagcgccggcgcccgggagacccaggaggagcccgcagagcgagccaaggcagcaaggagacgacagccggagagcgg

SEQ ID NO: 169492 - RNA, 58 nt, Homo sapiens
ggaggcagaggggaggcgcgaaagccacgagcgcagacaaagccggcgaaaaccagcc

SEQ ID NO: 169493 - RNA, 71 nt, Homo sapiens
ccgaggggcgcaaagcccaacggaggccacccgggcaggaccgaggaaggaaaacggagccaagacagaac

SEQ ID NO: 169494 - RNA, 86 nt, Homo sapiens
gccagaaaacagaaggccacgcggaaacaaggcgaccccagaaaggaaggagggccccggagcagccacaccaccgaggccccacc

SEQ ID NO: 169495 - RNA, 80 nt, Homo sapiens
cagaggagccaggaggaaaacacaccaagacagggaccaccccgcccggacccccccacagacaggcagcggcagaggaa

SEQ ID NO: 169496 - RNA, 72 nt, Homo sapiens
agagaggcgccgacacaggaaagccaaaaggcccgagagaccaacgccccgccccaaagaaagagacagaaa

SEQ ID NO: 169497 - RNA, 52 nt, Homo sapiens
gggaaccccggagaaaaggccaagaaggcagcgaagcaggaggggaaggcgc

SEQ ID NO: 169498 - RNA, 83 nt, Homo sapiens
caccgagaccacacgccgacagcgggccaagcgccggagcacaaagacgaagccgaagggccagggagggcagcggggagcgg

SEQ ID NO: 169499 - RNA, 71 nt, Homo sapiens
aaaaaaggaagcgaaaagcgggccaacagacgggccacaggacagcggcacgaccaaaaagacacagagga

SEQ ID NO: 169500 - RNA, 70 nt, Homo sapiens
ggaagcacgaagccaaacggaagccgcgaggggaacgaagccaccggggccagaacagcggcggacaccg

SEQ ID NO: 169501 - RNA, 65 nt, Homo sapiens
aagaccaacacaaaggggaaagagcccgggagaggcccgcgccaccccgggggccacgcagaccg

SEQ ID NO: 169502 - RNA, 66 nt, Homo sapiens
aacaaacacagaaagcgaggcggccaggcagcccaacacaccggcacccgggagaaagcccgaaag

SEQ ID NO: 169503 - RNA, 69 nt, Homo sapiens
cgcaccgcaggcagacaaaagggccaaagaagggagagaggcagcacccacagggcacaccaaagcggg

SEQ ID NO: 169504 - RNA, 71 nt, Homo sapiens
accagaggaggccccccagccagggaacccccaagggaggaagaaaccgaagagggaaaccgaccgccaca

SEQ ID NO: 169505 - RNA, 69 nt, Homo sapiens
gcaccgggagcggcgaagaggcaccggaggaggacccaaaagcccacgccgcagggggaaccaggaggg

SEQ ID NO: 169506 - RNA, 74 nt, Homo sapiens
ggccgccagggaagaccacaacaagcaagcagcagcacgcgaaagggccaaggcaagaccggcccccaggcccc

SEQ ID NO: 169507 - RNA, 56 nt, Homo sapiens
cagccgcgcgaccgcgccggaaacgaagccccgagccccggccccaaagacccaaa

SEQ ID NO: 169508 - RNA, 57 nt, Homo sapiens
aggggaggacagcagagagaaagaaccggaacaccaggaacgacacaggagcccgag

SEQ ID NO: 169509 - RNA, 35 nt, Homo sapiens
acacagcaccaacaccagcacacacagccccggcg

SEQ ID NO: 169510 - RNA, 73 nt, Homo sapiens
acacgggcggaagccacggaacgaaaacacagaaggcccgacaccagaggaccagaacccacgagaaacagac

SEQ ID NO: 169511 - RNA, 70 nt, Homo sapiens
acaaagacggaccaacccaggacccccccacagaaagccagaggacgagccggggagccgggacgggcag

SEQ ID NO: 169512 - RNA, 75 nt, Homo sapiens
gaaggggggggcggacgcgcaagaagaaggagagacgaccacgcaacagaaaaagagcgcacccaagggaagagc

SEQ ID NO: 169513 - RNA, 84 nt, Homo sapiens
caccagccacgcagcagaggaaacaaaggaggaccggcgcggcagaagcagaacccaggcggcacgcaagccgaggaccccccc

SEQ ID NO: 169514 - RNA, 80 nt, Homo sapiens
aaacagaagaaggggcggaccggggcagagaacacaggaccaggccacccaaggccgaagggaagcagagagcaaccaag

SEQ ID NO: 169515 - RNA, 63 nt, Homo sapiens
accagccccgcaacccggaccagcagaaaccagaggggacccacaagagggcagaacgaggcc

SEQ ID NO: 169516 - RNA, 74 nt, Homo sapiens
ccagaggcaggggcggacagacagccacgacgagaggaccaccgacgcagcccgccgcccgcagccaaaggagg

SEQ ID NO: 169517 - RNA, 82 nt, Homo sapiens
gaagagaaagccccaagcgacaggggagggacccagcacccgacagcacaaaggcaagaaagaaaaagccccagccgcccgc

SEQ ID NO: 169518 - RNA, 72 nt, Homo sapiens
gcgggcaaggaacaggcgagaaacagaaaagcgcccaggaagcggaaaaacaaaagagccgcccaacgacgc

SEQ ID NO: 169519 - RNA, 82 nt, Homo sapiens
gcgcgcgggagcgccagcaagccggaaggggcgaccggaccgggagaagaaggcgccgaggcaaggggacagcacgggagcg

SEQ ID NO: 169520 - RNA, 76 nt, Homo sapiens
ccacgcagcggagaccgcaggacaccgggaccgggggcgcagcaccgggacgacacacacaagaagaggcggccac

SEQ ID NO: 169521 - RNA, 75 nt, Homo sapiens
agagcccggcgggggcgcaggcagagagacgaagagagaagcagggcagaaagagcggaaacgagaagagcaaac

SEQ ID NO: 169522 - RNA, 75 nt, Homo sapiens
gcagaaagagaaaaagcggggaagaaaaagccccacaaagggaaggccgaagacgcaaccaaccaaaacagccag

SEQ ID NO: 169523 - RNA, 56 nt, Homo sapiens
accccgggagcccagccaccacagacagaagaacaggacaccaggccgagcacgaa

SEQ ID NO: 169524 - RNA, 76 nt, Homo sapiens
cagccaggcccgcgagccgccaggcgcaagggccaagcacgcgccagacaacaggcacaaagagagaaggaacacc

SEQ ID NO: 169525 - RNA, 76 nt, Homo sapiens
ccccaccccccacccccacaccggcccgggggaccagcagcgcccacccagaaaacgacagaagcacgacaacaac

SEQ ID NO: 169526 - RNA, 42 nt, Homo sapiens
gcccaggcgcacacggaaggaacggacgaagccacaggagac

SEQ ID NO: 169527 - RNA, 99 nt, Homo sapiens
ggccacaaaacccacgaacgaaagaggaaaccacaaaccagagaccggccagccacagagcagagaaagccggaccagcagggagccggggcaacggca

SEQ ID NO: 169528 - RNA, 96 nt, Homo sapiens
ggacacggaacaaccaccaggccagccacacaagaaggccgcccaccaagccgcccccgagcccaagcaacacggagacaccgccaggacaaccaa

SEQ ID NO: 169529 - RNA, 50 nt, Homo sapiens
gccccgaaccgcaggcagcgcgcgacggccacgagccccgcacaaagccc

SEQ ID NO: 169530 - RNA, 61 nt, Homo sapiens
gggagaaggcgcaacgcggcgcaccgaggaagccgacaggaccgggggcacggaggggaag

SEQ ID NO: 169531 - RNA, 66 nt, Homo sapiens
acagaacaagaccgacaggaggccaaccacgagaaggcaaacgaaagaagaaaagaagacgaagcg

SEQ ID NO: 169532 - RNA, 64 nt, Homo sapiens
gcaccagcacgcccacccagaggagaaagacagcaaagaaaaggagaagaaaggaaaaaaacaa

SEQ ID NO: 169533 - RNA, 82 nt, Homo sapiens
gaaggcagcgaaaggacacgggagaaagggagccgagcgagaccacgcaccacgggcgggcccaaaggaccagccaaaaccc

SEQ ID NO: 169534 - RNA, 74 nt, Homo sapiens
ccccggcgggggccggaggaggcgggacacaccacccagggggaaaacaggcgagggaagggcggcgcagacca

SEQ ID NO: 169535 - RNA, 72 nt, Homo sapiens
cagacacccaccggaacacaaccacgcccggcgagaaccacccccgaacaacaaacccacaccagagacccc

SEQ ID NO: 169536 - RNA, 85 nt, Homo sapiens
cgaaccccaaggccaacagagagaagagaccagaaaacagggccagacgggaagaaacgagaagggaccaggggcggaagcggaa

SEQ ID NO: 169537 - RNA, 57 nt, Homo sapiens
agcggcagaaacaaggcgcagacaagagagggcggcagaaggaacaccgagaaaccg

SEQ ID NO: 169538 - RNA, 79 nt, Homo sapiens
cccaacgagacgcacaagaaaagcgcaagaagaggaggaagccagcgagggacaaagagagacaccagagccagcagcc

SEQ ID NO: 169539 - RNA, 74 nt, Homo sapiens
cgacgccaaagagcacgcagagagcccggcagaccagccagcagcaaagcagacccagccacgggcccggacgc

SEQ ID NO: 169540 - RNA, 74 nt, Homo sapiens
ggggcgggccgggcggcgggagcggccaggcaaggggggacgggcacacacaaacgccacagcaggagcacaag

SEQ ID NO: 169541 - RNA, 73 nt, Homo sapiens
cggaacgcagcaacgacccgagcacaaggcaagagaccaaccccagccccgaaaggaacggggggccacgacg

SEQ ID NO: 169542 - RNA, 69 nt, Homo sapiens
ccagcagcagcagagcaggcagggcagaagaaaaggacgaaggggcccagggcgcacgcgaccaaacac

SEQ ID NO: 169543 - RNA, 79 nt, Homo sapiens
ccacgcagcggagaccgcaggacaccgggaccgggggcgcagcaccgcgagaagaacgaacagaacagggaaagcagaa

SEQ ID NO: 169544 - RNA, 80 nt, Homo sapiens
gaacagagcgccgggacaggaaaccacaaccggacagagagcagagcccccaaggaaaagaaagcagaggggaaacagag

SEQ ID NO: 169545 - RNA, 50 nt, Homo sapiens
ggagaaaggaagggccccgagacaggcgaacaagaggcgccagcgggcgc

SEQ ID NO: 169546 - RNA, 69 nt, Homo sapiens
agagaagagcaccaccaccgggacccaagaagcgagacagaaacgcgaggagcagcacaagcacgagaa

SEQ ID NO: 169547 - RNA, 76 nt, Homo sapiens
gcgacaaacaaagaaagacggacccaccgaaccaaaagggagcgagagcaccagaggcccggcagccccgccgcac

SEQ ID NO: 169548 - RNA, 84 nt, Homo sapiens
gagccccaccccgaccccgccgcgacagccaccccggccggcggcgcccagcgggaccaagagggcgacgcaaggccgaggaga

SEQ ID NO: 169549 - RNA, 51 nt, Homo sapiens
gaagagcaaacagaggagaaccacgagaacccaggaggcacacacgaagga

SEQ ID NO: 169550 - RNA, 80 nt, Homo sapiens
agcgggccgagcccggccgccagaccacagcacagccgggaaggggagccaccagccccccgaccgggcgagcaggagcg

SEQ ID NO: 169551 - RNA, 84 nt, Homo sapiens
cagcagacagacagccaggcgcccagaggggccccggagccagagacaagcgggcgacacgagagggaagccccagagcggggc

SEQ ID NO: 169552 - RNA, 77 nt, Homo sapiens
caagcggaagacacaaacagcagggagaagagacaacaagacaggagacggggccagggagaaaggaaggccaggag

SEQ ID NO: 169553 - RNA, 74 nt, Homo sapiens
gccggcaaccccgggcggccgcaccgccagaacccaggacgagaaaaaacagagcggaacaagcggcccaagag

SEQ ID NO: 169554 - RNA, 80 nt, Homo sapiens
cagcagcggagcgcccaaggagggcccaaagcacaagcgaccgccgaaggagcccccgaacggcaacgccccccccccac

SEQ ID NO: 169555 - RNA, 86 nt, Homo sapiens
gggccgccgggagagacgagacagcaggccccagcacgacaaacaggggaaggcaaaccagaagagaagaaaacaacaaaaaaggg

SEQ ID NO: 169556 - RNA, 73 nt, Homo sapiens
gagagagaacgcaaacccgagaaaggagaacagggaaacgggcaaaccgacacaaagcgagagggaacaggac

SEQ ID NO: 169557 - RNA, 88 nt, Homo sapiens
cgggggcccgcgcccagcgagcgcggagcgcacgggacgcaagaggcggagccaaccgcgcaaggccaagcagggacggcagcgcgcg

SEQ ID NO: 169558 - RNA, 81 nt, Homo sapiens
cagacaagcaggagccggggaaacgcaggaggcaggcgaaaagaggccagcaaacacaaacagaagaacacagcaaccacc

SEQ ID NO: 169559 - RNA, 85 nt, Homo sapiens
cagggcaaggcggggagagaggcccgggccggggacacgggcggcaagccgccacgcggggcgggacccgcagcgcggcccgcag

SEQ ID NO: 169560 - RNA, 79 nt, Homo sapiens
caccggccccgaaaagggagcgagcgcccgagaaagaggccggacaaccaccagcagaccaagccaaagaaacacccaa

SEQ ID NO: 169561 - RNA, 77 nt, Homo sapiens
acggaaccgccgccgcgagcccaccgcccggcagacacagccgcgcccccaccagagcccgcgggcagaacgccagc

SEQ ID NO: 169562 - RNA, 61 nt, Homo sapiens
gggccgcgagcggaggagcaccgccgcggaaggagaccggagacgagacggaggccggccc

SEQ ID NO: 169563 - RNA, 81 nt, Homo sapiens
gaggaccgcaccgccaagccaagccaacccaaacagacgaggggaccgggcggaccaagggggccacagaagaggaccggg

SEQ ID NO: 169564 - RNA, 81 nt, Homo sapiens
cgccggcccgcgcgcgcaccccgcggacgccacagcgcgaaagagccagacccagaggcagcgcaacaaggggaccccagg

SEQ ID NO: 169565 - RNA, 73 nt, Homo sapiens
agaaacgggaagagaaagcaaagggcacaagcccccgaagacaagaggccggggagaccgacaaccccggcca

SEQ ID NO: 169566 - RNA, 78 nt, Homo sapiens
cagaaacgaaagagcgaggcgaaccgcaagcagacccaagagcccacccaccgggccgggacacgaggaggcggcggg

SEQ ID NO: 169567 - RNA, 79 nt, Homo sapiens
ggcagccgggccaccagacaacggagaagacaggaggacacccaggcagacgggaggaagaagaggaggagacagagca

SEQ ID NO: 169568 - RNA, 78 nt, Homo sapiens
aagcgccagaagaaaagaagcagcaaaccaaccagaaagaggaaccagcaacacacaagaaacccagccaccaaggga

SEQ ID NO: 169569 - RNA, 57 nt, Homo sapiens
cgcagggcgcccccgggaggggaagaaaccgccaggaagagaggaggccacagagga

SEQ ID NO: 169570 - RNA, 73 nt, Homo sapiens
agccggaaagaaaaggaaaacagagacgcgaagacccagggacacgagacgagaacagacccgcccgcaagcc

SEQ ID NO: 169571 - RNA, 95 nt, Homo sapiens
ggggcaggggcgggcggcagaacagccaagagcgcggaacgcgcgaaaagccgagacagaagggccaagagagcagcacagacggagaacaggag

SEQ ID NO: 169572 - RNA, 72 nt, Homo sapiens
agcagagcggaaggagccagccacaggcggcggaacggaacagaagcaagggagcgaggcggccagggcccc

SEQ ID NO: 169573 - RNA, 74 nt, Homo sapiens
ccaagacccggccggcgccgcggccgcggggcggaaaacaccccaaaagccaaaagggaaaggaaaagaccaac

SEQ ID NO: 169574 - RNA, 76 nt, Homo sapiens
cggccccaccgccccaccaccccaccagacggcgccccaagaccaaggcacagaggagaacccgggagggcccaag

SEQ ID NO: 169575 - RNA, 114 nt, Homo sapiens
ccgcgggcgaccccggaccagcagcccccgaaccgcgcgcgcccagggcccggccgacccgcggcccgacgcaaacagcagacggaagaccccacggcaaaaccacacccgagg

SEQ ID NO: 169576 - RNA, 55 nt, Homo sapiens
agacagaagacagacagcgggaccgagcaccgcagaccgccgaggagaagcgccc

SEQ ID NO: 169577 - RNA, 75 nt, Homo sapiens
agcgcggagcacggaagaaggcagacagggaccgaaccaaaggcagacccagaagagcacaaaacagagaaaagg

SEQ ID NO: 169578 - RNA, 75 nt, Homo sapiens
gcaaagcccgaacacggacaagggaggaaccagcagaagggcaaggagcacacgagagacaagagagacacccca

SEQ ID NO: 169579 - RNA, 70 nt, Homo sapiens
cagaacagccggcaagagcacaggaagcaaccaagcgaaagacagaggcccagccgaaagaggggaggca

SEQ ID NO: 169580 - RNA, 34 nt, Homo sapiens
gcccaaccgaagaaaacaagagagcgcagaaagg

SEQ ID NO: 169581 - RNA, 61 nt, Homo sapiens
caaccgccacagggaggagggacagaaaagccaaccacgaacccggaaagggcgggcccga

SEQ ID NO: 169582 - RNA, 80 nt, Homo sapiens
cacgcacagaagaggccagcccaggaacagcagaggcgggccgaggcccggaaagggccacacgagcagggcggccggca

SEQ ID NO: 169583 - RNA, 64 nt, Homo sapiens
ccccccaggcggggccggaagagggagaaaagggggagcgcccgaccaacaagcccaccagcca

SEQ ID NO: 169584 - RNA, 77 nt, Homo sapiens
aggaagacacgagggcagagcgaagaagaacacacggaacaaacccggacaccacacccgcgcgccacagcccgccc

SEQ ID NO: 169585 - RNA, 54 nt, Homo sapiens
gggaccgaccgcaacagaacggacccgccaaccgcaaagagagcaaacgccgag

SEQ ID NO: 169586 - RNA, 77 nt, Homo sapiens
ggggggccagcgcccgcacgccccgaccccacgagcgaaggacaagggcccgaaggaaaagaaaccgggagcacccc

SEQ ID NO: 169587 - RNA, 70 nt, Homo sapiens
acgcaaaaaagaaaccggagcggaaacaagaacaaggcacgaaaggggaaagacaagcagggaagagaaa

SEQ ID NO: 169588 - RNA, 97 nt, Homo sapiens
acgccaagcgacgagcgcacgccacccggcagccggcgacgcacacaccacgcagaacacaggcagcaccccaacgcagccccgcccgccgccccca

SEQ ID NO: 169589 - RNA, 67 nt, Homo sapiens
agcaacagccccaccccgaaacgccccgaaaagacgggcaacaggaagggaccgaacaccagacaaa

SEQ ID NO: 169590 - RNA, 77 nt, Homo sapiens
gcgccaggaggagggggcgccgcggcaggcacgggaagcgcccacgggagagccgcagcgaagggcgagccgaaggg

SEQ ID NO: 169591 - RNA, 72 nt, Homo sapiens
aggacaggccagaagcgcaaagagacagaacgagacgccccccgacaggaccaggaacccgggaaggacacc

SEQ ID NO: 169592 - RNA, 69 nt, Homo sapiens
cggggagacccggggacccccgacgccaggcagcgcccccaaacggaacagcagccggaagcgagggcc

SEQ ID NO: 169593 - RNA, 77 nt, Homo sapiens
gaaggaccaagaaccaggggacgaggaaacagaaaacaacgaaaacaaagaaagaaacaagcaagacggagcaaccc

SEQ ID NO: 169594 - RNA, 84 nt, Homo sapiens
gaaagacccaccacggagaaagcaccagacccgcgaccgacagcccccagcccccccagccgcagggagcccgggccagagacc

SEQ ID NO: 169595 - RNA, 61 nt, Homo sapiens
gagcgcgaaacgcacgagaaggccaagaacccaaagcaaggcgagacaaggggccaaccag

SEQ ID NO: 169596 - RNA, 77 nt, Homo sapiens
gagggcgccggggcggacccggaacggcagcgcacccacccacccccgcacccgggaccggacagcccaaggcggaa

SEQ ID NO: 169597 - RNA, 79 nt, Homo sapiens
agcgaagaaccgcaagcccacgaaagaaagccacgagcggcagcagaagcagcggccaagaacccaggcacgcaagaaa

SEQ ID NO: 169598 - RNA, 65 nt, Homo sapiens
ccaagagaaggaaagacagagccggccaaggaggagacacagccgccagaagcgaaccagaagaa

SEQ ID NO: 169599 - RNA, 55 nt, Homo sapiens
cggcgccccggcccccgccccagcccgccggcggcggcgggcacacagagaaaaa

SEQ ID NO: 169600 - RNA, 69 nt, Homo sapiens
acagccgggaaaaacccagggagccgcgcggagggccagcagagccagacggacaaccgccagagaccc

SEQ ID NO: 169601 - RNA, 59 nt, Homo sapiens
ggagacccaggcgggacagagggagccaggcagagccaaacccgcgcccgggcaaggcg

SEQ ID NO: 169602 - RNA, 54 nt, Homo sapiens
aagaagccagcagcaaaagacgaacccagagaaaaagggaacccggaaccacca

SEQ ID NO: 169603 - RNA, 68 nt, Homo sapiens
cagacaccgagccagcaagcccccaacgaggcgcggccagcgaagaagacgcagccagacccggcgac

SEQ ID NO: 169604 - RNA, 72 nt, Homo sapiens
gggaagacagaaccagggccgggggccaggaaaacggagaagaggggcccgacggagcaaagaagagaaaag

SEQ ID NO: 169605 - RNA, 78 nt, Homo sapiens
gggaaggcggggcccaaggcgccacaaggcgaacagcgcggagaacacaaggaagaaaagaaagcaagacaggcaagg

SEQ ID NO: 169606 - RNA, 69 nt, Homo sapiens
ccagcagcacaaaggaggacggaaaagcgcccaggaagcggaaaaacaaaagagccgcccaacgacgcc

SEQ ID NO: 169607 - RNA, 70 nt, Homo sapiens
aacaggaggcaagaagcagaacaacgcggaacagacagggaccaggacaagccggaccaaggcagacaac

SEQ ID NO: 169608 - RNA, 70 nt, Homo sapiens
gaacaaagggcagggagccagacgcagacacaaaccgacccagcagaccacgggaggggaaaaagagacc

SEQ ID NO: 169609 - RNA, 73 nt, Homo sapiens
gcaccagccggacaaaggagagaagggacccaggcagccaccggaagagaaaaccaagaacgacagaggggca

SEQ ID NO: 169610 - RNA, 58 nt, Homo sapiens
cgcgcgcccgccgcccgaggagccccgcgcggcagacgggagcgggccgagaaaaacc

SEQ ID NO: 169611 - RNA, 61 nt, Homo sapiens
aaaccggcggagcacacaggcgcacaaaagagcacaaaagcaccaaggcgcacaacagcga

SEQ ID NO: 169612 - RNA, 66 nt, Homo sapiens
cagacagaccagacaacgagggagggacacaggagagaaccagagaaggccgggagagccgcaggc

SEQ ID NO: 169613 - RNA, 82 nt, Homo sapiens
ggagcggccagggccccacaggggcacaaccgagcgggccacaccacgaggcgagccaagagcgaggcagccgccggaccac

SEQ ID NO: 169614 - RNA, 60 nt, Homo sapiens
gaaggaccaagaaccagacacggaagaaaaacgagaggcaccgaagcacaaaaaccacag

SEQ ID NO: 169615 - RNA, 61 nt, Homo sapiens
cccggccccggcccacaggggggggcaaacccgagagaacggggcaaggagagccaagcgg

SEQ ID NO: 169616 - RNA, 56 nt, Homo sapiens
aagaagaaaaagcagaagggaagagaggcaaggcagccgcggagcccgacacaggc

SEQ ID NO: 169617 - RNA, 86 nt, Homo sapiens
cgagcgcggaccccgagccagcgggcggcgggaggaccccaagaaggacaacccgaggcgaggcgggcggccaacgccagcggcgg

SEQ ID NO: 169618 - RNA, 58 nt, Homo sapiens
cggaggcgggcggccagagcacgaaggagagagaggagaagccagaaaagaaacacca

SEQ ID NO: 169619 - RNA, 81 nt, Homo sapiens
agccagggcccgaccgcagggagcagaggggacagaggcaccaaggaccccaagacagaacggccgagcgaccaggagagg

SEQ ID NO: 169620 - RNA, 77 nt, Homo sapiens
gggggacccgcggaagcaacgccgccgccgccccacccggggcaggggccagggccaggaagaagaaccgcagagag

SEQ ID NO: 169621 - RNA, 99 nt, Homo sapiens
gaggccggccaacacaaagccccagcccaacaggaccgccgggggaccggaacgaacaaagacaaccccacgaggacaaaggaccgaaccgggggacga

SEQ ID NO: 169622 - RNA, 68 nt, Homo sapiens
cagggaccaccgacgacaaggggagggcaggggcgcagaacaaagaagccacagacaaagagggagga

SEQ ID NO: 169623 - RNA, 74 nt, Homo sapiens
acaggaacaagagcaggagcagggaggacacaaaggaggagaaccccacaccagaaccgaccgaaccggagcac

SEQ ID NO: 169624 - RNA, 81 nt, Homo sapiens
cacaccagggggcgggacaaccagccccgagacacggacgcaggaggccagcaagcgcacccagccacacccgacaccagc

SEQ ID NO: 169625 - RNA, 65 nt, Homo sapiens
agcacagcacccacaaagcaacggccagccaaccccagcaccccagggcagcagagacccccacg

SEQ ID NO: 169626 - RNA, 79 nt, Homo sapiens
aggaggaaaaagaccccccgacggccaggaggcgaagagacgaggaagcccaggagcccgaacacaaaaagacccgacc

SEQ ID NO: 169627 - RNA, 78 nt, Homo sapiens
caggacacacccaggaagcagccagaccaagaacaaccgcggacacggagaggaaggacaagaggcggcaggaaggag

SEQ ID NO: 169628 - RNA, 69 nt, Homo sapiens
gaccagcagccggggccaaaagaaagggcaagaacggaagcacgggcggaggaaagcacaagcagagcc

SEQ ID NO: 169629 - RNA, 73 nt, Homo sapiens
cccacaccaccgcgaccaagccagcaacagcggacaggcagaagaacgacgagagccaagaacaaaggcgcca

SEQ ID NO: 169630 - RNA, 86 nt, Homo sapiens
caaggaggaggccaccaaccagacggcgagagaggcgcggagaaccagaccccagagcccaggacgcgcaagcccaagacagcggc

SEQ ID NO: 169631 - RNA, 73 nt, Homo sapiens
agcaggcagggccagggagacgaggcccggacaggacggcccgccacgggccccgcagccgcgcccgagcgcc

SEQ ID NO: 169632 - RNA, 83 nt, Homo sapiens
gccaggagcgcagagccgcgagccaacgccaaaagggggacggcagggcggagaacggaaaagcaccaggaagcagagaggac

SEQ ID NO: 169633 - RNA, 131 nt, Homo sapiens
gggagcgccggacccagcacggagggaccgcagagagaggcgcagaaggaccgggagcacagccgccgaagacaggccaccgcacccaggggaggagggcacaagaagccacgcagcccgaccgcgccaag

SEQ ID NO: 169634 - RNA, 76 nt, Homo sapiens
gcacaaggcgagaccccgaaagacaagacgcgagaggcgcccaagaacaaaccaccgggagaaccaccaaaagaaa

SEQ ID NO: 169635 - RNA, 74 nt, Homo sapiens
aaggcagcccccgacaacccggaccagcaaaacaggagaccacaaccagggaaagaacggaagccacagaaacg

SEQ ID NO: 169636 - RNA, 68 nt, Homo sapiens
gcccggggaaccacaggaaccccaccaggcagacccccagaaaacacaagcgacaaagggaaacagag

SEQ ID NO: 169637 - RNA, 91 nt, Homo sapiens
cgacaagccgcggcagccgcggaccaccgccgccagggccgcaggagggaagcgcacggaaaccgccccgggaggcacagagcaggagacg

SEQ ID NO: 169638 - RNA, 58 nt, Homo sapiens
ccggcagagggagcgcgggagccaacgcgcccaaggaagacggccaccggccacgacg

SEQ ID NO: 169639 - RNA, 70 nt, Homo sapiens
ccaggagggaacccgaagcgggcgcgcgcacggcaggacggagagaggcccgaagagaggaagggcaagg

SEQ ID NO: 169640 - RNA, 96 nt, Homo sapiens
cccagggcaaggcaagaggcacgagccccaacccaagccaggcgacccacgcgcggcaggacaaggaggccaacggacaaacacccacggagcaac

SEQ ID NO: 169641 - RNA, 81 nt, Homo sapiens
cccgcccccccccagagcaagaccgagccgaaaggcccgagagaggaagcaggacagcacgcccgaagaggaaggagagca

SEQ ID NO: 169642 - RNA, 76 nt, Homo sapiens
cggcgacgcccgccgcccacgcagcccaggccggacaagacgcagagagccgacagaccccgaagggacagggaaa

SEQ ID NO: 169643 - RNA, 76 nt, Homo sapiens
gacccgccgaagcaccgcgggcgcgcgggggaagaagcgaaggagaccgcacagcagggacaaaaacagagcaacc

SEQ ID NO: 169644 - RNA, 79 nt, Homo sapiens
gcacccccagggggccacagcgcccagccaaagaacccagcagcggggcaagcccgacccacccacccgacagagaccg

SEQ ID NO: 169645 - RNA, 71 nt, Homo sapiens
ccgcaacccgcggcagagagaaaagaggaagagcggcaaaacgaccgacggaacaggagagcgagcagcaa

SEQ ID NO: 169646 - RNA, 74 nt, Homo sapiens
ggagacacccaggaggcagaagccagaagaccgcaggaaagcaggaaggcaagaaagccaaggacgaaacccac

SEQ ID NO: 169647 - RNA, 59 nt, Homo sapiens
aaagaaaaagaaccaggaaagacaggaagagcacccaagcgcaagcaaaagaaggcccc

SEQ ID NO: 169648 - RNA, 70 nt, Homo sapiens
gccaaacccaagggggagagggagaagaagaggaaagggcgccagagacaagccagggagaacacccccg

SEQ ID NO: 169649 - RNA, 85 nt, Homo sapiens
cggcgcacaggaaagcaaccgaagggacaaaagggaaccaaacggagagcggcgccaagccggcaagagaaagagaggccagaac

SEQ ID NO: 169650 - RNA, 77 nt, Homo sapiens
cagcaaggaaaaccaggaccagaggccagcccacagcagaagggaaagcagagccaagagaacccaaccaaacaggg

SEQ ID NO: 169651 - RNA, 86 nt, Homo sapiens
ccaagagggaagcagacgagagcaaggagcaaccagggagcacagaaacggccaaaaccaaagagaaaacgcgggcagaacagccc

SEQ ID NO: 169652 - RNA, 72 nt, Homo sapiens
gcaggggcggggcaacgcggaagacggaaaagcaaaggcagcagggaggagcgaggaggccaaaaaggcgaa

SEQ ID NO: 169653 - RNA, 79 nt, Homo sapiens
agacgccagccaacaagccgacaaccagaagcgacacaggcaaagaacagagcagcaccagcaaaagaacgaagaagac

SEQ ID NO: 169654 - RNA, 69 nt, Homo sapiens
aacaaacagagaacggcgggaagcccggacacaagagggcaagaaaggcgcgacgggccgaaaagggac

SEQ ID NO: 169655 - RNA, 72 nt, Homo sapiens
caagaaccacccaaaaggagagggggcagcacaccggcagagcaaccgagaccgacaagggagaaggcaacg

SEQ ID NO: 169656 - RNA, 68 nt, Homo sapiens
aaagcaaagacggaggagagcagaaccacaaagaagcgccaaccagccgcaaggaggaaaggcaaacg

SEQ ID NO: 169657 - RNA, 79 nt, Homo sapiens
caaaaagaagccaacaaagcagcagggggggccgaagaagccagggggaggaaagcagacagacccaccaagagggcgg

SEQ ID NO: 169658 - RNA, 100 nt, Homo sapiens
aggacaccaaggacccaagccgacaccacaacaaagaagaccacacacgggaaacacaaaacgacaggccccaaagcaaccggaaacagaagcaaagacc

SEQ ID NO: 169659 - RNA, 48 nt, Homo sapiens
ccacggaaccagagacaccacgaaaacccggaagagcgagaggccaag

SEQ ID NO: 169660 - RNA, 74 nt, Homo sapiens
aaggagccccagcggagaaagacgagacgacgggaccgaaggaccccgccagagacaaccgagcgccaggagag

SEQ ID NO: 169661 - RNA, 42 nt, Homo sapiens
gacggacaacaccggggagcgcggagcccacgagagcagcga

SEQ ID NO: 169662 - RNA, 71 nt, Homo sapiens
cagcagcagagggggcgagcgcacgccggaaacagcgccacgccagacgcaaagagcgccaacaacagggg

SEQ ID NO: 169663 - RNA, 79 nt, Homo sapiens
ccgccgagcaggcgccgccccagcccgcgaacgccgagagcggcccaggaggaacaaccagcccacccggagagggcac

SEQ ID NO: 169664 - RNA, 80 nt, Homo sapiens
caagcgcggacgcggcccggcgccgagccagggaggcgcgaggaccccaggcacgggaagacacgggcccgggcgggcca

SEQ ID NO: 169665 - RNA, 81 nt, Homo sapiens
cagcaccggcccaggggccaacaccagcaggaaaaaagagcggcagaaggccaaacggccgagcaggcgagcgaagagaca

SEQ ID NO: 169666 - RNA, 77 nt, Homo sapiens
aagacggggcgccccacagaggggcgacgaaaaggcacacacacccgcaggagagcgccggagaaaggaagaaccca

SEQ ID NO: 169667 - RNA, 73 nt, Homo sapiens
agcgcccggggggaagggaagacccgaaacggccaaaacgaaacaagcgaggaaagggaccaacacgaacaaa

SEQ ID NO: 169668 - RNA, 71 nt, Homo sapiens
ggcgccaccagcaaccagagggccagagggaaggacagggaaaagccgggccacagaagcaccaccacaag

SEQ ID NO: 169669 - RNA, 84 nt, Homo sapiens
ccgccggccccaaagacgcaaacggcccaccgccccgggggagagaacggcaagggggcaggagcgggagcgcagcgaccacac

SEQ ID NO: 169670 - RNA, 86 nt, Homo sapiens
cggaccagccagaggacgcgggccgaggagagcggaggagggggccagcgacgacagagacccaggaaaccaaagcaagacaagcg

SEQ ID NO: 169671 - RNA, 73 nt, Homo sapiens
gaagcgcagaagcccgaagaaaacagcgggaagagacagccaaggagaaaagaaagccagaaggaaggaagca

SEQ ID NO: 169672 - RNA, 73 nt, Homo sapiens
aaaccggaaagcagcgagcaaggcaagcaaaacacgagcggcacaaagcaaggacaacagcccagaacggacg

SEQ ID NO: 169673 - RNA, 63 nt, Homo sapiens
caagacgccgggaccccggaaaccagaaaggacagacgacgggggggacacaagcacaaacac

SEQ ID NO: 169674 - RNA, 70 nt, Homo sapiens
ggggggcgcgcccggcagcccgccacagccacgcccagccacaacagcccgagcaacacgagcgcacccc

SEQ ID NO: 169675 - RNA, 54 nt, Homo sapiens
aagacgaacaagaaccaagaccaggaaacccgaacccaagagagccaaaacccc

SEQ ID NO: 169676 - RNA, 83 nt, Homo sapiens
cagcccaccagcaggcgggacccgcaccggaaggccacgccaaggccgaagcccagaacacacaacaccagggaggaaaagcc

SEQ ID NO: 169677 - RNA, 73 nt, Homo sapiens
gaagaagaaaagccaaagaaccaaagcaaagaaacaccaggagagagagcgaaaaccccagcggaaacccagc

SEQ ID NO: 169678 - RNA, 73 nt, Homo sapiens
aggaaccagcaaaaaccagagaagaggggccccaccccacgggcgccagcccacagggacacaagcaggcacc

SEQ ID NO: 169679 - RNA, 59 nt, Homo sapiens
gggccgagcaacaggagggcgaccacaagcaaacaggaggagacacacagccccagacg

SEQ ID NO: 169680 - RNA, 76 nt, Homo sapiens
ggagcacaacaggcagacagacaagacacggcaaagagaccccccaggggacagaaggagccgagccggaggagca

SEQ ID NO: 169681 - RNA, 38 nt, Homo sapiens
accgggcgccgacgagacggccagggccccccacgcga

SEQ ID NO: 169682 - RNA, 71 nt, Homo sapiens
cgagccgaccccagaggacaggcgggccagcggcccaggaggcaagagcgagaagagcgcaagacagaaag

SEQ ID NO: 169683 - RNA, 86 nt, Homo sapiens
cgagaggccagccagacccccggccgacaggcggcgcgggcggcggacccaaagacaggaccacgcaccagcagagaaggaaagca

SEQ ID NO: 169684 - RNA, 72 nt, Homo sapiens
acccgcgcgggccgagagccgccccgaacgggggcccccccgccggacaggaccggggagggagaaagcgag

SEQ ID NO: 169685 - RNA, 40 nt, Homo sapiens
agaagaagccgcagaccccgcggcgaaagcaaagagagca

SEQ ID NO: 169686 - RNA, 85 nt, Homo sapiens
gcacccccgccccccaggcgacgagacccagggcagggccaaccgccccccagcagcaggcacgggcgaaccccgagccccgccc

SEQ ID NO: 169687 - RNA, 73 nt, Homo sapiens
ggaccccggccaggcaagacgacgaacgcgccccccgccggagaagcacgagggaaaaccagagaaagagagg

SEQ ID NO: 169688 - RNA, 73 nt, Homo sapiens
aaaggccagggcccacgcaagggcggagaacggaaaagcaccaggaagcagagaggaccgcagaagggaagga

SEQ ID NO: 169689 - RNA, 78 nt, Homo sapiens
gagaggaagggaggcgcggagcccggggcagcacggaaccaaaaccgccaggacgaaccaagaaacaaaagggaagac

SEQ ID NO: 169690 - RNA, 82 nt, Homo sapiens
gcaagcgcgggacaggacagcaggaccaggccggagcaaagaagaaggagcgagcgcagcggcaaccccaaaaaaaaaaaag

SEQ ID NO: 169691 - RNA, 70 nt, Homo sapiens
gagcgagggggggcgcgccggaaaccggagcgcgcagcaggggacccccgcagccgaagcaagccacaca

SEQ ID NO: 169692 - RNA, 76 nt, Homo sapiens
ccagcaagcccagagaacccacagaaaccaaggaaaaggcccaagagccccaacgccccacgcaccaaccgaccaa

SEQ ID NO: 169693 - RNA, 78 nt, Homo sapiens
agccacccgcccaccaaagagacccccggagaaccgggcccagcagcacgggcggaagaggagaaccggaaccgggag

SEQ ID NO: 169694 - RNA, 69 nt, Homo sapiens
aaaagcacggcagcgcgcgccacgggccaacagccccacccaagaagagcgaggcgggacaaacaaggc

SEQ ID NO: 169695 - RNA, 97 nt, Homo sapiens
gccccgagaacaccgaccgcaggaccaggcagccagaccaggcccgggagaagaccaccacagcggcagagcgccggcccaggcggaggcaaggcgc

SEQ ID NO: 169696 - RNA, 74 nt, Homo sapiens
gaccgcggacagcgaacccggagcgaccaagcggccgccacacagaaccgaacaccaaagagaagaacaaacca

SEQ ID NO: 169697 - RNA, 77 nt, Homo sapiens
cggggccgagaagacacgaccaggaaacaggccgacagcggaaaagaacgaccgaaacagcccagcaaacagacaag

SEQ ID NO: 169698 - RNA, 75 nt, Homo sapiens
gggggcaggacacacggaacccaaacgcggcaaaaaccccccacgaaagaaacggaggccaggaaacgagagcag

SEQ ID NO: 169699 - RNA, 79 nt, Homo sapiens
ggccgggaaggacacacccacaagaccaccacggccggaaggcacgggggggcagaccgacccaggcagccaacaagaa

SEQ ID NO: 169700 - RNA, 33 nt, Homo sapiens
acgaacgcaagaaggaagaccggggaaccagca

SEQ ID NO: 169701 - RNA, 48 nt, Homo sapiens
caccggccgggcgcgcgccgagccgcgcagggccagaggcgcaagcac

SEQ ID NO: 169702 - RNA, 72 nt, Homo sapiens
acagaacaggggcgggacagacgaagggagcacacgaacagcaaccaaagaacgcccagaagacagagacaa

SEQ ID NO: 169703 - RNA, 71 nt, Homo sapiens
acccgccgggcgcccccccagcgggcggagggacaaccagacggaaaacccgaaggccagcggcaggccac

SEQ ID NO: 169704 - RNA, 75 nt, Homo sapiens
cgcacgacagaagccgccagcgagccccacacaggaaccaacacagggagggccaagaaccccagaagagggaaa

SEQ ID NO: 169705 - RNA, 62 nt, Homo sapiens
cgaccggcggggcgcgccaaggacacggcacaccgaccgacgacaaccggagagcaagaagc

SEQ ID NO: 169706 - RNA, 80 nt, Homo sapiens
ggcgagcgacccccggccgaagccggagaaaagacccggccgaggggacaagcagaggccgagggcggggcacagaaggg

SEQ ID NO: 169707 - RNA, 79 nt, Homo sapiens
gggaccaccccgcgccccgccagcaccggccccaccacagggaggcacccaccaggggccaggccggaggcagagggca

SEQ ID NO: 169708 - RNA, 86 nt, Homo sapiens
gcccccgcagcagcgccagacagagcgccgccaccgccgccaccacggagcgagaagcccagaagacgccccggcggccccgggcc

SEQ ID NO: 169709 - RNA, 75 nt, Homo sapiens
gaacccaaaggaaaagcgaccagggaaagaacccaacgcggagagccacaacaacgaacaccccaaaggagagga

SEQ ID NO: 169710 - RNA, 60 nt, Homo sapiens
agaagacagcccaagggcccagcaaccaaaaacggcgaggaaagagaggagccccggaaa

SEQ ID NO: 169711 - RNA, 79 nt, Homo sapiens
cgccgaaccacagcaaagccacacgccccccaaagcaggccaccggacagcagcgggagaccagaccggaaggggggga

SEQ ID NO: 169712 - RNA, 75 nt, Homo sapiens
cagcaggacggaagcgagggcacgggcggcagcccgagaccgcagcagggcccccaagccggcaggggaacgagg

SEQ ID NO: 169713 - RNA, 65 nt, Homo sapiens
gcaacacaagcacagccacaagacaagcaacaggagagccccaagagcccaagaacccaacaagg

SEQ ID NO: 169714 - RNA, 76 nt, Homo sapiens
aaggccgcgggggcaacggagaaaacccggaaccgcgacggcggcagggaccgaaagacaacaacgcagagaagaa

SEQ ID NO: 169715 - RNA, 75 nt, Homo sapiens
cgcgcggggcggggcgcgcgcaggccggggagcgccagggcagagaacacacagaagagaaaaaccgaacacagg

SEQ ID NO: 169716 - RNA, 75 nt, Homo sapiens
gggagaggacggacgcgcacaagacaagaagccaggagaacagaagaaaggccagagaaagcagcacgacgagaa

SEQ ID NO: 169717 - RNA, 68 nt, Homo sapiens
ccgaacgacaagacacgggagagagaaggacgaggcccaacagaggggcaggcaagaaagagagcgga

SEQ ID NO: 169718 - RNA, 69 nt, Homo sapiens
agaacacagaagcaaggcagcaagcgcggcgagaaggcgggcgcggacggcaggggcgccggggaaccc

SEQ ID NO: 169719 - RNA, 77 nt, Homo sapiens
agacgacagcgagagacccggaggcacaggcgaagggagcagcagaggaagagaccagaaccaaaagcagcagcagc

SEQ ID NO: 169720 - RNA, 69 nt, Homo sapiens
cccaagaaggcaagaagcacgcaacgacccgggcccaagggccgcaaggccaggcgcgcagaggcaccc

SEQ ID NO: 169721 - RNA, 81 nt, Homo sapiens
gcgagacaccgcaccaccagacagggcacccaaaaagagaggcgagaacacggaaagcccagcagcaaacaaaccaaacac

SEQ ID NO: 169722 - RNA, 84 nt, Homo sapiens
ccggccagaagacgcgagagcaccgaagacggcaagcacggccacgccaagacagaggcaagacgagacgcaaaagcgcagcgg

SEQ ID NO: 169723 - RNA, 87 nt, Homo sapiens
caagccagcagagaagggggcggcagcgccagcccggcgccccccccagccccagcggaagccacagagaggacaaacaacaacccc

SEQ ID NO: 169724 - RNA, 80 nt, Homo sapiens
gggcgccccaagcggaaagcgcacggggaaaacaaggggacccgggaagaggggagccgccagcgaccgaggccggcgga

SEQ ID NO: 169725 - RNA, 84 nt, Homo sapiens
ccgagcgcgcccccgagcagccaggcagcagcgcggagaagggagggcgggaagccggccccggcggggggcacggcggcccag

SEQ ID NO: 169726 - RNA, 59 nt, Homo sapiens
cccagagacacaccggagcacacccacagaggcagaccgaaaacacccagcaagaaggg

SEQ ID NO: 169727 - RNA, 55 nt, Homo sapiens
cgccgaggggcgggaacgaaacgggcgcccaccgccggagacgccccgccggacg

SEQ ID NO: 169728 - RNA, 73 nt, Homo sapiens
caaagcacaagaagaagacgagagcccacaagccgcaccagagcagcgaaaccagggcagaacaagccgacaa

SEQ ID NO: 169729 - RNA, 59 nt, Homo sapiens
ccagggagagggaagcagaaagcggcgaggaagaacagaaaacgaaggaaggaggaccc

SEQ ID NO: 169730 - RNA, 70 nt, Homo sapiens
aggcagggcgcgagggcgggggcagcggcaggacgcaaagccgaccacagaaagaccgggcacccaaacg

SEQ ID NO: 169731 - RNA, 77 nt, Homo sapiens
aggaagaggaagggaccagaaaaccccaaagagcaagaagaccgaaacgagcaagcagaaccgcaaaggcagaagag

SEQ ID NO: 169732 - RNA, 67 nt, Homo sapiens
acggagagaaaccacaaggggcagaagagacaacacagaaaccagggcggaggcaggaacagcagca

SEQ ID NO: 169733 - RNA, 84 nt, Homo sapiens
aaagcgggagaagacacggcgagaacggggccagcacagagaggcgacagcggagaagggaaggcggagggcagggcagaccgg

SEQ ID NO: 169734 - RNA, 80 nt, Homo sapiens
gggaggccgaaggggcggacacgagaccaaaagaaccgaacgacacagaggacccaaggaggaggggcgccgcacacaca

SEQ ID NO: 169735 - RNA, 51 nt, Homo sapiens
ggaacgcaggacccaaagcccggacccccaacgaaccgaaaggaagaaaag

SEQ ID NO: 169736 - RNA, 77 nt, Homo sapiens
gcaccggccgagaggcaaggaagccgccagggagaaaagacgaggaagcccaaaaaccgcaagaaaggcacagaaga

SEQ ID NO: 169737 - RNA, 82 nt, Homo sapiens
ccccagcagcccacgcgcagcgcccgcacaccggcagcaaaagaggacaagaccgacgccccggcgcagcaggaaggggagc

SEQ ID NO: 169738 - RNA, 66 nt, Homo sapiens
caacccgccgcgcaccgacccgacgcgccggcccacgcgcggccaaggccggcaagaagccaacgg

SEQ ID NO: 169739 - RNA, 69 nt, Homo sapiens
cgaccacaccagaccccaccggaaagccagcagacaccgggaaaggaaacaccggccagcaggggggcg

SEQ ID NO: 169740 - RNA, 81 nt, Homo sapiens
cagcaggggcagcgggccgcaggggcgcgcagcgcggggagcgccagggcacccagacccggaccacgcccaccaccacca

SEQ ID NO: 169741 - RNA, 58 nt, Homo sapiens
cgccgacacaaacgccaagggacggaccacgcccgcaccaggcgaaagagaggacaca

SEQ ID NO: 169742 - RNA, 73 nt, Homo sapiens
cgggcacaccgcccagggccaggccgccggccccaggacgcgccggacaagaacgagccagcaaacccgagga

SEQ ID NO: 169743 - RNA, 81 nt, Homo sapiens
gcgcgcccggcggcgccgcccgcgcgcgcgcgcgccgcgcgcgccgcccggcgcaggacaggaggccagggcacgggaagg

SEQ ID NO: 169744 - RNA, 57 nt, Homo sapiens
gcgagggcccaaccccggacgcagaaaccaaagagccaggcgacccccgcgcccgag

SEQ ID NO: 169745 - RNA, 70 nt, Homo sapiens
cgagcagcggggagcagacgaaaacggggggaaacggcagagccacaacgcagcaagacaaggaagcaac

SEQ ID NO: 169746 - RNA, 63 nt, Homo sapiens
agcacaagaccaaagacaagcagagacgaccgcagacgcgacgagagccacagacgagagggc

SEQ ID NO: 169747 - RNA, 79 nt, Homo sapiens
ccggacccaggaagcggacccgggagcccggcgagagaggcccggcgagcgggggcaaggcccccggccgcggccccga

SEQ ID NO: 169748 - RNA, 75 nt, Homo sapiens
ggccaccgccgcacgccgagccgacggacgcacaggccgcgccccaggggaccaggcagagcacccccaggaagg

SEQ ID NO: 169749 - RNA, 98 nt, Homo sapiens
gcagacgcgccaccaagggagagccagggccggaagaaaaccaccagcaacccacaaacagaaaagaagaaaaaaagaacgacaaagaaaaggaagaa

SEQ ID NO: 169750 - RNA, 62 nt, Homo sapiens
gagagcgcccggcccccagcgccgcggaaagcaacccaccacaagacaaagaccaccaggac

SEQ ID NO: 169751 - RNA, 99 nt, Homo sapiens
cggggagcaaaaccaacgccggccggagcagcagcccgaggaagaaggaggccgaccaggccgacaaagcagacgcccgcaaacgaccggggaaagcac

SEQ ID NO: 169752 - RNA, 71 nt, Homo sapiens
cgccgacacaaacgccaagggacggaccacgcccgcaccaggcaccaacggacaaccaggcacgggacaac

SEQ ID NO: 169753 - RNA, 89 nt, Homo sapiens
cccccacacgcaccagagccagggcgcaggagcagcagcacagcccaggcagaaggggagaggaggaagaaggggaggaggagagcgcg

SEQ ID NO: 169754 - RNA, 77 nt, Homo sapiens
gagaaacaggcacacaagggaggaggcaaagccaggggagacgagcaagacgagaacacccaagcgacagagaggcc

SEQ ID NO: 169755 - RNA, 89 nt, Homo sapiens
gcgagcggagcagcgcgccacgaggccccgcaaagaagggggcgagaagaaaaagggccgcgccacaacgaagggaacccgagaaacac

SEQ ID NO: 169756 - RNA, 84 nt, Homo sapiens
cgcccgcgccgggcccggaaagcgccgcccagcagccgcagggaaggggcccggccaggaccggggaagggggccgagagcagc

SEQ ID NO: 169757 - RNA, 68 nt, Homo sapiens
cgcaaaccacacaaggaaggaaacgaagaggccacacagaggaaccagcacgaagaaaccagagcgaa

SEQ ID NO: 169758 - RNA, 74 nt, Homo sapiens
gggacagacaagggggaacaaaccaccggcccaaagacaaccgggcacaggaacccaaggaccgcaaagaaaac

SEQ ID NO: 169759 - RNA, 64 nt, Homo sapiens
ggaaagaccagccacaggccaaacgcagaagagcagcacaggaagaacaacacacgcaggagaa

SEQ ID NO: 169760 - RNA, 95 nt, Homo sapiens
cccacgaccagcaggaagaacaaacgagaaggcagagaggggaagaccaagagcacagagccagagcacagagcaccacgaacaaacagaaagcg

SEQ ID NO: 169761 - RNA, 42 nt, Homo sapiens
gcggaggcgcccaggacaggcgcccaaagacccggacaacac

SEQ ID NO: 169762 - RNA, 36 nt, Homo sapiens
cagaacgaaaagcgccagaaagggccaacagagcgc

SEQ ID NO: 169763 - RNA, 81 nt, Homo sapiens
caaggaggaccagaaaacggggacacaggaacgccacaagaaacaacagcaaggcgagggccacgaaacagaggagaagaa

SEQ ID NO: 169764 - RNA, 81 nt, Homo sapiens
aacgggacaagcggggcaaccggacgagcggggcaaccgaccggcgcggagggggcccaagaaagaacccaaaggcggcgg

SEQ ID NO: 169765 - RNA, 85 nt, Homo sapiens
gcacgcaaaacggaaaagcgggaggggagcggaaaaggaagcaccaccgggccgcgacgcgggaaaacaaagaaccgaacaacgg

SEQ ID NO: 169766 - RNA, 67 nt, Homo sapiens
ccaaacccaaaccgcggcggcgacccaccacgccagccagcacaacacgaaaggagaagaggacggg

SEQ ID NO: 169767 - RNA, 88 nt, Homo sapiens
accgccacgccagcacgccaacccggacggacaacaccggggagcgcgggcacgcagccagaggggccagaagagagaggaggcacgc

SEQ ID NO: 169768 - RNA, 71 nt, Homo sapiens
gaaagaagaggcggaaagaaccagagcgcaaaagcaagaggcaaaaaggaggcagaccgaaaagggcggaa

SEQ ID NO: 169769 - RNA, 113 nt, Homo sapiens
ccaggaggcagggaggaaggggggagggggaggagccgaacgagccccagccagggcgggagagacggcaggacacgagcgggagaggaggcaggaaaacggcacagaaccag

SEQ ID NO: 169770 - RNA, 76 nt, Homo sapiens
gcaaaaaacacagggacgagccaccagaggaggaagaagacagaagagcccgcgaacggaagcggagcggacccag

SEQ ID NO: 169771 - RNA, 78 nt, Homo sapiens
agcaaccagcagcgcaggccggaacaacccaacaggaggggggaagacagggcccagcaccacaggacgggccgggaa

SEQ ID NO: 169772 - RNA, 53 nt, Homo sapiens
ccgcccccccgacagacgcgccaccagcaaaaccagagaaacaggcagagaaa

SEQ ID NO: 169773 - RNA, 79 nt, Homo sapiens
aaagacggacaggaacaagaaagcagggagaggaggaaggaccccaccgaagaacgagggagaaacacaggacaacgga

SEQ ID NO: 169774 - RNA, 46 nt, Homo sapiens
ggagaaggaccaagaaccagaggaggaaaaccaggaaggacaggac

SEQ ID NO: 169775 - RNA, 79 nt, Homo sapiens
agcagaaacacaaagcagcccaaccaaaggcccgagaacacgaaacaaggaagaaagaagcaagaaaaacagaccgggg

SEQ ID NO: 169776 - RNA, 48 nt, Homo sapiens
cgaggcccccagccagggaacagagacggggcaccacgggccaggcgg

SEQ ID NO: 169777 - RNA, 71 nt, Homo sapiens
cagggcaaaccacagcgagaaaggcccccacacccggaacgacaccaggaacccaagaaccacagccgcca

SEQ ID NO: 169778 - RNA, 83 nt, Homo sapiens
agccgcaggcgcagacccacccgccagaagccccccgcagacacccaaggacaagcgcaccacaaccacgagacaccggaccg

SEQ ID NO: 169779 - RNA, 31 nt, Homo sapiens
aggagccggggcggggccgaacaggaagaaa

SEQ ID NO: 169780 - RNA, 72 nt, Homo sapiens
gcgaggcggccaccgcgacccggccgcgccggcgccgaccccgcgcgccaggggacagagcagccaggccac

SEQ ID NO: 169781 - RNA, 77 nt, Homo sapiens
ccagaccagagacagaagcagaggacgccagggacgaggaggggagccacgcccaaggaagaagaagcaccgaacgg

SEQ ID NO: 169782 - RNA, 75 nt, Homo sapiens
gccaagggggggcggcacccacgaccgggcccccccacacaggaaacggggacagaagaacgaagaacaaggaca

SEQ ID NO: 169783 - RNA, 75 nt, Homo sapiens
aagaagcccggcagaaggaaaaacccaggaacccaggaaaacccaaccccaagaaacagaagcaaaaaaggcgcc

SEQ ID NO: 169784 - RNA, 67 nt, Homo sapiens
accgccggagacagccaagggcaggaaacacgaagaaacacacagcgagcaccggccgcagacaccc

SEQ ID NO: 169785 - RNA, 81 nt, Homo sapiens
gggacccccagggagccccagcacgccggacgaggaaggcgagaccagagggaggaacagaaccaaggcgccagaaaggaa

SEQ ID NO: 169786 - RNA, 40 nt, Homo sapiens
ggacccagcacgaccccccaagcgccccagagcacacagc

SEQ ID NO: 169787 - RNA, 73 nt, Homo sapiens
aaacccaacaagccccagaaccgcagcacccggccacagcgcacagcagggaaggaaagaccaggagcaggcc

SEQ ID NO: 169788 - RNA, 85 nt, Homo sapiens
cagcccagccgcgccagcgcccggcgccgcgcgccacccccgagcggacgaaagaaagaaggagcaccaacgcaaagaaaaagac

SEQ ID NO: 169789 - RNA, 74 nt, Homo sapiens
agcggacaccaccccgacaccagaccagaaggaccacgggagaagcaggcacacggaaccccccaagaagcccg

SEQ ID NO: 169790 - RNA, 75 nt, Homo sapiens
aaaaaggaggaccccgccaagggccccaagagggcacacagcacacaccgacagggggacccccggacacgggag

SEQ ID NO: 169791 - RNA, 73 nt, Homo sapiens
cggcagaagcgaggaggggagaaagaaaaaggggccaagaaccgcaagccaccagcgacggaaccagcaaccg

SEQ ID NO: 169792 - RNA, 72 nt, Homo sapiens
cgcaagaaacagacagcacagagcacaggagaagcaagcaagaacaccaccagaaagaagaggaaacaaaaa

SEQ ID NO: 169793 - RNA, 77 nt, Homo sapiens
gagcggcagcagcaccagcccaagagaagcgcggggaggaaacggcccacccaagagcgaagggaggagaaagacgg

SEQ ID NO: 169794 - RNA, 72 nt, Homo sapiens
cagccaccaaaacagaaggcgcagagaagcacagagaagccaccaacaaacagacccccaagaccacacaac

SEQ ID NO: 169795 - RNA, 76 nt, Homo sapiens
agggaccacacgcgccaacacagaaaaaacccgcccagcagccgaaagccaggaaaacgaaagcgagaagccgaag

SEQ ID NO: 169796 - RNA, 70 nt, Homo sapiens
ggagccagggaggcggcggcgggaacgagggcgagcagaggacgacaggccgggagaacagagagaaggg

SEQ ID NO: 169797 - RNA, 55 nt, Homo sapiens
gggggggaccaccgccggccaggggcggaaaccccgaaaagcaaaggcccaccca

SEQ ID NO: 169798 - RNA, 74 nt, Homo sapiens
aaagggcacgaagcaggaaagaacgacgccagggaggaaacagaagacagccgaaccaagggcgacaaccagag

SEQ ID NO: 169799 - RNA, 63 nt, Homo sapiens
ccccaaggaagccacggcagacacacaacccgacccgacgaacagacgaggagcgcagagcgc

SEQ ID NO: 169800 - RNA, 84 nt, Homo sapiens
cgggcggacacgccagaggaggaggccggggaaggccgcgggggcagcaagcagcagggacgcgaggcggaggcgggaccacca

SEQ ID NO: 169801 - RNA, 72 nt, Homo sapiens
ccgcacccggggacaagcgcgggaacggcgcggaagccaagagaaaccaccaagagccaggaaggcaaaggc

SEQ ID NO: 169802 - RNA, 73 nt, Homo sapiens
ggaccagggcggaacgcacccaggacacagacggaagggagggccacccacggcaggcccagccgcaacaagc

SEQ ID NO: 169803 - RNA, 70 nt, Homo sapiens
aagaacaggggccagggaaaggagcagagagagagagcagaaggggagaaaccgcagggggccaagaacc

SEQ ID NO: 169804 - RNA, 66 nt, Homo sapiens
cgggggaagccggacaggagaaggcccaaaaaccaccaaaggacaggagaaaagaaagcaaccagc

SEQ ID NO: 169805 - RNA, 80 nt, Homo sapiens
ccgcaccagccgcccaagccgcacagccgcggcggcagcagcaggagagggaccccacacgggcagcggcccgaccagcc

SEQ ID NO: 169806 - RNA, 57 nt, Homo sapiens
caaacacgccggaaaccccgcccacagcacgaggaagggaccacagaccagcacgcc

SEQ ID NO: 169807 - RNA, 100 nt, Homo sapiens
gcgaaaacaggcccacgcagagaaacgggcagcaagaccgcccacccgcgaggaccacccgcacccaggggacgcacggcccaaccccgagcaaggacgc

SEQ ID NO: 169808 - RNA, 86 nt, Homo sapiens
gcaaaaggcggcgccgaggagcgggacaacccaggagcagacagagaagcgcgcagcaggacgaagagcagcaaaaaccacaaagc

SEQ ID NO: 169809 - RNA, 78 nt, Homo sapiens
ggccagagggaaccaaccgggaccccaagccaaagaacccacacaaggacaagggaagcagaacggaaaaagcaaaag

SEQ ID NO: 169810 - RNA, 109 nt, Homo sapiens
ggagacagcaaacggggcacaaggacgagcgacaagaagacgaagaaggacccgcccggcggacacgacaaacccaggccccaacaccaccggaaggcaggaacgaccg

SEQ ID NO: 169811 - RNA, 77 nt, Homo sapiens
agagggccaggccagaagagccgaccacaaggggaggacaaccgcccgggaccagggggaaaccacaccacccgcca

SEQ ID NO: 169812 - RNA, 90 nt, Homo sapiens
agggccgacccccccgccggggagggcccagcgcaccgacaggagaaagaaggggcaagaggaagaagcagaagcagagagaggagcgaa

SEQ ID NO: 169813 - RNA, 70 nt, Homo sapiens
ccgcgcacccccggccggaggcaccagcaccagcgccgaagaaggacgacagggccacccaccccacggc

SEQ ID NO: 169814 - RNA, 53 nt, Homo sapiens
cgacggcggagggcccgggaacccgagcgcagaggggaagcagaggacccagg

SEQ ID NO: 169815 - RNA, 83 nt, Homo sapiens
aacacagagaggcggaaaggcaccggagacagaggcggaaccaaaagcagggaaaccgaaggcagagggggcgagggaggaaa

SEQ ID NO: 169816 - RNA, 81 nt, Homo sapiens
agccgcccggccggcgaagacagcacaggggaagacagagggggccaccagcgcgccagcgaggcagccgcgcccccgcca

SEQ ID NO: 169817 - RNA, 53 nt, Homo sapiens
cgaagcgaccaagcagaaggcaaaccgacaccagcgacacaagcgcgagggaa

SEQ ID NO: 169818 - RNA, 72 nt, Homo sapiens
caaccggaagaacaaaaccagaaagacggacggaggacagagggaaggaccacgacacagcaccgcccgacc

SEQ ID NO: 169819 - RNA, 98 nt, Homo sapiens
gaagaagaggcccaacccccaccccgcccaaggaggcccagcgagacgaagaggagcagaaccagaagggacacacaggacggcaggaaggccagcca

SEQ ID NO: 169820 - RNA, 56 nt, Homo sapiens
agacccgcagcgggacaagcgggcaagacaaagggaccgacacaagaagcagccag

SEQ ID NO: 169821 - RNA, 80 nt, Homo sapiens
gcccccagaggccgggccgcacccccgccagacacacggccccgaaccgaaacacaccaggagagagcgcgcagagaaca

SEQ ID NO: 169822 - RNA, 57 nt, Homo sapiens
aagaaaaagacggaaaggacacgcccagaagagcacaaagaaccaacgccaaggcag

SEQ ID NO: 169823 - RNA, 79 nt, Homo sapiens
aacgcgacgcgagagaaggacccacggcgcgcgaaggccacgagagacgaaccagacagggcagagacagcggacgacg

SEQ ID NO: 169824 - RNA, 77 nt, Homo sapiens
agcacaagaaagacaccccgagagcggccgagggaagaaaccagcgcaaggaacccagcagaagccagccgccacgc

SEQ ID NO: 169825 - RNA, 39 nt, Homo sapiens
ccagaggagcgaaagagagagaaccggcgaaggagcacg

SEQ ID NO: 169826 - RNA, 63 nt, Homo sapiens
cgcccacccagaagagcaggaaaggagggcaccaaccacaaagggggggccccagcccggccg

SEQ ID NO: 169827 - RNA, 69 nt, Homo sapiens
ccaacaaggaaacccgaacgcgacaagccaacagcggggcaaagcaagagaggcccgcacccgcagaga

SEQ ID NO: 169828 - RNA, 81 nt, Homo sapiens
ccgaggggacgcagggcccaggacgccccagaagacgaaggcacggaacggcccgcggcgaacaacccagccgccagccca

SEQ ID NO: 169829 - RNA, 43 nt, Homo sapiens
ccgacgccaccacgccgcggaggacacgacgaccgaaacaaga

SEQ ID NO: 169830 - RNA, 77 nt, Homo sapiens
gcggaccggcgccccggcgcgaagaggcggaccggacggccgagggaaacccagacgacaaggaaggccaagggacc

SEQ ID NO: 169831 - RNA, 55 nt, Homo sapiens
acgcagggcgcccccgcaaaaccccggacaagaaagccagagaaacgacaccagg

SEQ ID NO: 169832 - RNA, 66 nt, Homo sapiens
cgcgaacccaggagcgcaaagagaaagaacaagaacacgcagcacggcgaccggcccgaggaccgc

SEQ ID NO: 169833 - RNA, 70 nt, Homo sapiens
aaccaaaaggaagacgggaacccggcgcaaggagccaggacagagggcagcggcacaacccagagggccc

SEQ ID NO: 169834 - RNA, 81 nt, Homo sapiens
cgagaccggagagccgcaggacggcgcggcagagccccgacgccacagaacgggcagccagagcgggaaaggaggcaggcc

SEQ ID NO: 169835 - RNA, 63 nt, Homo sapiens
cggccgccgcaggagggaagaggagcgaaaaggcagggagaaaacaaagaaaggaaaagaacg

SEQ ID NO: 169836 - RNA, 78 nt, Homo sapiens
gcccacgcgcggccaagcacacggcggcggcgaagccaagacacgggcccgccgagggcgggacccgcgcaggcgcag

SEQ ID NO: 169837 - RNA, 67 nt, Homo sapiens
gaaggagaaacacacacacaaagaccggaaaaaaaggggggaacccagaaaaggagcacaacaggca

SEQ ID NO: 169838 - RNA, 76 nt, Homo sapiens
accgaccaccaaaagcccgagccggcaaacgagagcaaaagggaccgaggcaagaagggacgaacggggcggggac

SEQ ID NO: 169839 - RNA, 69 nt, Homo sapiens
ggcccgcccccccgggccccagcggccccggggcgcgcgaggaagaagagagggcgaaggaggccacac

SEQ ID NO: 169840 - RNA, 73 nt, Homo sapiens
ccaaaccagaacacagcgcaacaagccacagggcaaggagaaacccacaaaggcgaaccaagccaacggaaag

SEQ ID NO: 169841 - RNA, 71 nt, Homo sapiens
ggccgggagcagcagagcagggagacggaggaggaggagaagaagagagggaggacggaggcacaggagga

SEQ ID NO: 169842 - RNA, 61 nt, Homo sapiens
cggacgagaacggagagaacgcggaaggagacggagaagaaaagcagcaacagacggaacc

SEQ ID NO: 169843 - RNA, 61 nt, Homo sapiens
agcgcacccggcaggcgcaacagagcgccggcgggcagcagcccagccaaagccggaaaag

SEQ ID NO: 169844 - RNA, 44 nt, Homo sapiens
cagccagggcgaacccccgcagaccgcgaccgcacaagcagccg

SEQ ID NO: 169845 - RNA, 72 nt, Homo sapiens
aacagaccacccccaaacggaaagggcaggaagaccaggcaaaggaacgaaacccgaaaacccggaaaaaca

SEQ ID NO: 169846 - RNA, 76 nt, Homo sapiens
acggaaacacgacagaagcagggcgaaccagagaaaacggcaaggaagcaccgaaaccgcaggcaccaggaagagc

SEQ ID NO: 169847 - RNA, 87 nt, Homo sapiens
aggcccggaggcggacagagaggcaagcgcagggggacggggaccagcagcgcgccgccgcccagagacaggcagaaaagacgaccc

SEQ ID NO: 169848 - RNA, 80 nt, Homo sapiens
ccccaggccaagcaaccaccagcagcccccagagcggaacacagaaagaaaccgacgggaagaaacagagagcaaaggga

SEQ ID NO: 169849 - RNA, 41 nt, Homo sapiens
gcacaagaagaagacgagaaccacacgggaagaccaacaaa

SEQ ID NO: 169850 - RNA, 76 nt, Homo sapiens
gcgcagcgacacaggaggagacggcgcacagggcccaggaagaaacacagaagccgcccgcacaagagggaaaaaa

SEQ ID NO: 169851 - RNA, 80 nt, Homo sapiens
ccgcgggcgccgggccaggacggcggcggaggcggaccggggggcccgggcccgccagacccgcagaccaccaaccccga

SEQ ID NO: 169852 - RNA, 57 nt, Homo sapiens
aagcggggcgggagccgcagcggcgcacaacaaggaaagaaccccacccaccgcccc

SEQ ID NO: 169853 - RNA, 83 nt, Homo sapiens
ggcaaccgggcggagccagccgggccagccccgcgacggcccacgagccaagcccagaaaccccccccagagggcagagaaac

SEQ ID NO: 169854 - RNA, 80 nt, Homo sapiens
cagcaccgcccagacagcccgaggagccaagagaccacgggcagggggcgacagcagcccggccagaggcgccgcaagcc

SEQ ID NO: 169855 - RNA, 92 nt, Homo sapiens
agagaacacggcaaaccccaaaaacagaaggggaaaagcaccaagggcggagaacggaaaagcaccaggaagcagagaggaccgcagaaggg

SEQ ID NO: 169856 - RNA, 80 nt, Homo sapiens
cagcgacagcagcgcacaggggcccgggagaccgggggagcagaggccgaccggaggcagccgcagccaccacccccagc

SEQ ID NO: 169857 - RNA, 51 nt, Homo sapiens
gcggaagaaggaaccccgaagagacgacaccccgcgaccgaaggccgccgc

SEQ ID NO: 169858 - RNA, 82 nt, Homo sapiens
gcagggaggagcacgaggggcacgggggcccagccacaccaacgcaggaggaagagcaagcaggcccgagggacaaagaagg

SEQ ID NO: 169859 - RNA, 76 nt, Homo sapiens
caacgagccaagcccagaaaagcgcccaagggcagccagaaaccggcgacagacaggaggagagcagcgcgcggca

SEQ ID NO: 169860 - RNA, 76 nt, Homo sapiens
accagcccacaacacaacaccaacgccgggggcccgacaggggagagccaccgacccaagagccaccccaaaccaa

SEQ ID NO: 169861 - RNA, 69 nt, Homo sapiens
ggaacaaccagacaagaggaaccgcgccccagaaggcagaggaacacaacagggagcccggggacaggc

SEQ ID NO: 169862 - RNA, 82 nt, Homo sapiens
gcagaacaacagcgaggaagaagaggacgacgacgacgaggaagaggaggcgaggcagcccaaggccaaccccacgcaccgc

SEQ ID NO: 169863 - RNA, 63 nt, Homo sapiens
cgcgcccccggacggccacgagaccggaaacaaacaaccccgaagccccggagaacccacagc

SEQ ID NO: 169864 - RNA, 81 nt, Homo sapiens
cacagcaagacaccgggaccccggaagccaaaaagagggcggagaaggaacagggagagaaacaacgggaacagaaaggag

SEQ ID NO: 169865 - RNA, 71 nt, Homo sapiens
cccgcagagcgcaccacaaagcgcgcaacgccaacccaggcgagaggcaaaggaacagagcacacagacca

SEQ ID NO: 169866 - RNA, 55 nt, Homo sapiens
cagagaccaggagccggaggcaaggaggccacggggccgaagacaccaaccgggc

SEQ ID NO: 169867 - RNA, 79 nt, Homo sapiens
cgcaccaccacgggaggggcccgcaggaaggacggaccaggggcagacaccagcgcagccgcccagcagcagcagccca

SEQ ID NO: 169868 - RNA, 63 nt, Homo sapiens
ccacagcgggcaccacacagaccagacaagagaaagcgacaagacacggggcaagggagcaag

SEQ ID NO: 169869 - RNA, 92 nt, Homo sapiens
cggacggaaagcgacaagggaggcgccgccagcggccgggaccgaacaggcgaaaccgacgcccccgaaaaggacacagcacaagcaagaca

SEQ ID NO: 169870 - RNA, 59 nt, Homo sapiens
caccggaagcgggaaaggacaaagcagccagaccaaagcacagcgccagagacccccgg

SEQ ID NO: 169871 - RNA, 82 nt, Homo sapiens
aacgacagagaacgggggcggcgcaaggacgacgaagggaccacagaccagcacgccggcgccacgaaccgagcgacaggac

SEQ ID NO: 169872 - RNA, 71 nt, Homo sapiens
cggaggaaaacaggcgaaggagcggggccgaccgcaacccaccaaggagcacaggacgaagaggaaggaaa

SEQ ID NO: 169873 - RNA, 66 nt, Homo sapiens
gcacagccaggacaccggaaccgggaaagggagcgcaagacacagggcacagaagggaaaccaaac

SEQ ID NO: 169874 - RNA, 78 nt, Homo sapiens
ggagagagcccagagacacacagacagcgagacggagaagaaggaaaagaagaaacagaaagagaaaaaaccccggcg

SEQ ID NO: 169875 - RNA, 68 nt, Homo sapiens
gccccacaacgcacccaccgacgcaaagccgaccacagaaagaccgggcacccaaacgggaacaacag

SEQ ID NO: 169876 - RNA, 58 nt, Homo sapiens
cagagagggccaaacccggaggccacaacagagaaggaaccagggacccaaagcaacg

SEQ ID NO: 169877 - RNA, 72 nt, Homo sapiens
ccgagcggggaccccagaaaaacagaaggaaaagagccggagcaaccaccagacggcaggaagcaaaagcca

SEQ ID NO: 169878 - RNA, 57 nt, Homo sapiens
cacgacaccggcgaggaacggcaggcaacccccacgacgcagacggcagagcagccg

SEQ ID NO: 169879 - RNA, 38 nt, Homo sapiens
gagcaggcgaagaggaacgaaccgacaacggcaagcgg

SEQ ID NO: 169880 - RNA, 76 nt, Homo sapiens
gcggaacgcccgccccgcagagaggggaagaccgaggccggcggcgcggacaggaagaacacgcgacgcggcagaa

SEQ ID NO: 169881 - RNA, 85 nt, Homo sapiens
ccaccgccgggggcggaaagaaccaagagggagacaagggaaaaggaagacaaaaaacacaaggaaagaacccagaaaggaagaa

SEQ ID NO: 169882 - RNA, 66 nt, Homo sapiens
gcgcacaagagaccgggagagaaggccagcgacagccgggagaaccgagggaggaaggaaggccaa

SEQ ID NO: 169883 - RNA, 95 nt, Homo sapiens
aagaaaagcccgggagcagaagggaggcccaagacccacaacaaaaggcaggcgaacgaaggagggcgagggagcaaggacaccgcggagcacgg

SEQ ID NO: 169884 - RNA, 76 nt, Homo sapiens
caaggcaccaagcgggggggaaagaccacagcaagaccacgcccccagccgggggaccaggccgaacgacccggac

SEQ ID NO: 169885 - RNA, 82 nt, Homo sapiens
ggcgccgccaggccgacgaaaagcccaaggggacgccggaaagaccagaaaagcacccaagcaaagcccaaaccaaggccca

SEQ ID NO: 169886 - RNA, 69 nt, Homo sapiens
gcgaccgccaaacgggagccccgaaccaaggagcacacgcagacacagaaaagcaacgaagccacaaca

SEQ ID NO: 169887 - RNA, 75 nt, Homo sapiens
gggggacccgcccccccacgaaagaacaggaaagcaaaaccagggggcaacaaagaaaaaaacaaacaacagcaa

SEQ ID NO: 169888 - RNA, 48 nt, Homo sapiens
accagaaagcaccccacaggggagacacggggacccggcaaaccgaag

SEQ ID NO: 169889 - RNA, 82 nt, Homo sapiens
gacaacccagaggcaacaaaggcgaggagcacagaccagcgcgcgaccggagccccacagcggcacaggccccagccaagcc

SEQ ID NO: 169890 - RNA, 73 nt, Homo sapiens
ccaggagggcaagccagccaagcaaaggccgggaacgggaaacgcgcgccgagaagccacccgccgagaggga

SEQ ID NO: 169891 - RNA, 72 nt, Homo sapiens
acgaagcgaccaaagcgcacggcagcgagaggcgaccggaacgcacaccaccgagggaacagagagcagaca

SEQ ID NO: 169892 - RNA, 67 nt, Homo sapiens
agaaagaacaagaacacgcagcacgggcggagccgagcgaggccccagaaggacaagcacaagaaaa

SEQ ID NO: 169893 - RNA, 83 nt, Homo sapiens
cgcccccggcccgaccgccgcccgacgccacgcccggcccggccgcgcccgcggaaccagaccagcgagacgacgggaccgaa

SEQ ID NO: 169894 - RNA, 53 nt, Homo sapiens
cggcgggcaaaggacgccaggaggaagggacaaaaggggccccaaccgaccga

SEQ ID NO: 169895 - RNA, 63 nt, Homo sapiens
acccacggaaagcagccagcagcacccaggggggcaagccgagcggcaacgaaacaggagcca

SEQ ID NO: 169896 - RNA, 66 nt, Homo sapiens
ggaggcgcgacacggaggcgcccggaacaggaggagaagagagacaccgaaaacgagaaacgaaag

SEQ ID NO: 169897 - RNA, 70 nt, Homo sapiens
aggaccacccgcccaccccggcgggcccggggcggaccagcggacaagccccagacacaaacgcgcccga

SEQ ID NO: 169898 - RNA, 71 nt, Homo sapiens
gccacccagccaggcccaaccgcccacgacagcgggcaccaccacggaggacgcaagggcaggcaacccag

SEQ ID NO: 169899 - RNA, 84 nt, Homo sapiens
gagaaaagcgagaccgcggcgaggaccgacaaggacgaggcccaaggaaacggcggcgccagcaggacgcgcaacacgcggcag

SEQ ID NO: 169900 - RNA, 54 nt, Homo sapiens
cgaagacgaaagaacagcgaggggacacagaagaaaaaagacccacaggcgaag

SEQ ID NO: 169901 - RNA, 80 nt, Homo sapiens
aggcgaggagaaagcggcgcgcggagacgcacccccagacgccgacccagaaagccagggacaccaaaccccgagcgccg

SEQ ID NO: 169902 - RNA, 73 nt, Homo sapiens
cgcccacccccggcaaagccgagcaaagcccacaaaagaggcagcagacagcaacagcagcagccgcgccacc

SEQ ID NO: 169903 - RNA, 80 nt, Homo sapiens
gccaagccccaagcagcaccccaagcagggggaggggcccggacagggacggaaagggggcaacccgggggccgagacca

SEQ ID NO: 169904 - RNA, 59 nt, Homo sapiens
gggccgggacgcagcccggcggcagcagggcaacaaggacaggcagagcaggcgaaaaa

SEQ ID NO: 169905 - RNA, 78 nt, Homo sapiens
acgcggagccaggccgaggggcggacgcggccgcgcgagcaaggaaccccgggccccgccacccacgcgaccagccca

SEQ ID NO: 169906 - RNA, 84 nt, Homo sapiens
ggcgcacaagcaggccggcacagccgcggagcggacccagcaagacggcaggaagaggcgagaaggagcacgccaagccaagaa

SEQ ID NO: 169907 - RNA, 59 nt, Homo sapiens
ccaccggggagaagagcggggaggcccacgcagggcgaaccgaggcgggaggagcaggc

SEQ ID NO: 169908 - RNA, 108 nt, Homo sapiens
ggccaacaagggcaagccagcacggcagggcagcaacacgagagaacggaggccggcagccgggaccgcaaggcgggaccaggcggagccaggggagcgagggccccc

SEQ ID NO: 169909 - RNA, 66 nt, Homo sapiens
gccaaacacagaacagcaaagaggaggccagcgcggccagcagaagagacaacagcccaagacaca

SEQ ID NO: 169910 - RNA, 55 nt, Homo sapiens
caccacccgccgggacagcaggagagaggcaccccccaaccaggcacaaggccca

SEQ ID NO: 169911 - RNA, 80 nt, Homo sapiens
gagaggaggcagaagacggccagggagagaggaacccaagacaccaccagaaacggccgggaaacagaagggcaaaacga

SEQ ID NO: 169912 - RNA, 76 nt, Homo sapiens
gggccagcggccgcgcacccccggccggaggcaccagcgccaacccaccccaccgaggccgcagacaccggggaga

SEQ ID NO: 169913 - RNA, 79 nt, Homo sapiens
gggcaagacccccgaagagggccagcaccgcacacgcaggcagccaagagggaagcgcccgacaagcccagcggcccga

SEQ ID NO: 169914 - RNA, 68 nt, Homo sapiens
agagccggaagaccaggaaggagccggggcggagaaacaggcgccaaacgacagagaccccaccacgg

SEQ ID NO: 169915 - RNA, 84 nt, Homo sapiens
cacgcggccggccaagggcccaggggcggcgggagaggggaagagggaggaacaggggcgacaagagagggacaacgggagacg

SEQ ID NO: 169916 - RNA, 85 nt, Homo sapiens
gcacacaaggacccaaagacaaggcaaaagagcaaagcacagacgcagccagcaaggaaggcgggaacgcccggaggaacccagg

SEQ ID NO: 169917 - RNA, 37 nt, Homo sapiens
gcccagcaaagagaagaagacgacgagaagcacccac

SEQ ID NO: 169918 - RNA, 36 nt, Homo sapiens
caacggcgggaaaggggcgagaagcaggcggaggga

SEQ ID NO: 169919 - RNA, 56 nt, Homo sapiens
gcggaggcgcgcaggagccaagggagaaaagaagcagcccacgaaccccgacaaca

SEQ ID NO: 169920 - RNA, 80 nt, Homo sapiens
aacccagacagaaggacacgagaagaaaaggcaagagggagacaaagagagagcaggggaccgagggaagggccaaacca

SEQ ID NO: 169921 - RNA, 55 nt, Homo sapiens
ccacacaaaacccagcgccaggcccaggccagcggacaggcaaggaaccaccgag

SEQ ID NO: 169922 - RNA, 92 nt, Homo sapiens
gccgcgcccgaaccccggcccgaacccaggggaagaaacgagcgagcccgggacagcaagagccaagcgccgggacagccagggccagccag

SEQ ID NO: 169923 - RNA, 85 nt, Homo sapiens
ccgggcgggcgaggcgcagggcccccacaccgcgccgccaaggcaagggagggagagagcaaaaccagggccaaccgccccccag

SEQ ID NO: 169924 - RNA, 67 nt, Homo sapiens
cggggggcggccgcgcggccgggggcgcgggcggcggcgccggcaggaagacaagcagaccggaaga

SEQ ID NO: 169925 - RNA, 72 nt, Homo sapiens
gccgaggggcgacgaaacaacaggaggcagcacggcaggagacgaggagaggacagcaggacacccggaccc

SEQ ID NO: 169926 - RNA, 75 nt, Homo sapiens
gagaaccgcgaaggccccaaccacggggaaacaccaaacccaccccgagggggcgcccccaggaccgccccaaac

SEQ ID NO: 169927 - RNA, 82 nt, Homo sapiens
cggccgccccccggcgccgcgccgggagcccgcccgcccgccggcccaggaggcgaaccgcgagcccagaaggcgagggacg

SEQ ID NO: 169928 - RNA, 70 nt, Homo sapiens
agcaccgccgagcggaccccaagaggggacagcagaaagacaaaggacgcagaacgagagagacgcacgg

SEQ ID NO: 169929 - RNA, 77 nt, Homo sapiens
gcaccgccgcagagggcaagcggggccccaggccacgcagcggcccggagcggaacacgggagcccacagaaccaaa

SEQ ID NO: 169930 - RNA, 72 nt, Homo sapiens
aaaagaacacgggaacacgagacggggcaacaaagaaaacaccagaaggggccccacgaagggccacagaac

SEQ ID NO: 169931 - RNA, 73 nt, Homo sapiens
ggaccaagaaccagaacacagggcgccggaagagggaacgcgaagggaaaaaagaagagaaacgggcccaccc

SEQ ID NO: 169932 - RNA, 67 nt, Homo sapiens
ggacccagccccgggaaaaaccagaagagaaaaaacaaaggggagaggcaccccgcgggacgaccgg

SEQ ID NO: 169933 - RNA, 82 nt, Homo sapiens
agagaggaggcgcgagagcgggaagaggcggcagacagcgggaggagcaagaggggggggcccccccgaagaaaggaaccgg

SEQ ID NO: 169934 - RNA, 65 nt, Homo sapiens
cggaggaccgggagcggcggggccacggccagggcaggacagcagcccgcaacaggccggccagc

SEQ ID NO: 169935 - RNA, 74 nt, Homo sapiens
cccgcggagacagacaagacaagaccggcggggaagcgaacccagaccacccaggcaccccacaccagccccca

SEQ ID NO: 169936 - RNA, 66 nt, Homo sapiens
aagggaagaggccggggagcagagcacgggcgcgagacaaaagcggaaccgcaaggaagcgaaggg

SEQ ID NO: 169937 - RNA, 69 nt, Homo sapiens
agaaggaccaagaaccagaaaccagggcgaaggacgaggaccgaaaaagggcagaggacgaccagagcg

SEQ ID NO: 169938 - RNA, 105 nt, Homo sapiens
ggcccggccaggcagcggcgccccgaaagggcacggggccggggaacgggaagaggagcggaaaaacaagcaaaagaaaaacagggaaagaggagaaagaaagga

SEQ ID NO: 169939 - RNA, 75 nt, Homo sapiens
ggagaccccaagagaccaagaaacgccaagccaaccccgaaaagcgcacgaggagcaggaaccgaggaggaacgc

SEQ ID NO: 169940 - RNA, 79 nt, Homo sapiens
ggggccccggccgcaggagggagaccacagcaagacaccgggaccccggaagccaaaaagaaacccgagaggagcagga

SEQ ID NO: 169941 - RNA, 72 nt, Homo sapiens
gggcggccggcggccacgaccacggaccgggcagggacccgggcaggcagcacgaagggagaaggagaccca

SEQ ID NO: 169942 - RNA, 50 nt, Homo sapiens
ccccgcgcaaagaccgcagaggcgaggccgccaaagggagcgaggagaca

SEQ ID NO: 169943 - RNA, 100 nt, Homo sapiens
cacagagacaaccgaagaccagggaaaggcaagagaaagcagacgagaaagagcgggcgagaaagcggaaagagaagcgaggaaacgcacacaaaccacg

SEQ ID NO: 169944 - RNA, 67 nt, Homo sapiens
gcaacgacggcagccccgccggggcagcgggggcagagacggggaacagggccacccacacggacgc

SEQ ID NO: 169945 - RNA, 83 nt, Homo sapiens
ggcggcgcagcagaagaaccacgcagagcgagcggaaacccccacgggcgcaaagaacagccagaccccacaaccccaaaggg

SEQ ID NO: 169946 - RNA, 83 nt, Homo sapiens
gggcgccgagggagcaagcgcagccaacggaaaagcagggggcccacggggcagggaagagcacaagcgccgcgcgccacgac

SEQ ID NO: 169947 - RNA, 54 nt, Homo sapiens
caccagcgacccccacaaccaccacgggggccgcaaggccaggcgcgcagaggc

SEQ ID NO: 169948 - RNA, 72 nt, Homo sapiens
aagcccgggagacagcaaaacaagacagaacccccacccagaagacaaagaccgcagagcccaccagcaccg

SEQ ID NO: 169949 - RNA, 58 nt, Homo sapiens
cagcgaggccccaccgggacgggaacagccaagcaggccagaggcagaggcagcaggc

SEQ ID NO: 169950 - RNA, 82 nt, Homo sapiens
aaacacaaacccaggagcaccacgggaaggggaagacggcagcgggccggaggcccaaaagaaacaagaaaccaggggaagg

SEQ ID NO: 169951 - RNA, 79 nt, Homo sapiens
ggggacgccacacagcacaacacaacacgccccgaagaaggggcagaccaacaccacccagcaaaaaccccgacgaacg

SEQ ID NO: 169952 - RNA, 80 nt, Homo sapiens
gaggccgcgggaggaggcgccccgcgcagcggcggcggagcagagcgccccagaccccccgggcaggccggaagaaaaaa

SEQ ID NO: 169953 - RNA, 79 nt, Homo sapiens
acagcacaccaggagagggccagggggagcccaaacgaaaagagaagacacgcagacaagccggagaacgcccagaccg

SEQ ID NO: 169954 - RNA, 77 nt, Homo sapiens
gagccgcggagcaaacaacccagacggagcaaccagggagcacagaaacggccaaaaccaaagagaaaacgcgggca

SEQ ID NO: 169955 - RNA, 67 nt, Homo sapiens
gagaaggaccaagaaccaggaaccaggagagagccacaaagcgcgccacagggcccgaaccggggca

SEQ ID NO: 169956 - RNA, 59 nt, Homo sapiens
gaacgagcaaaaaacggcgcccccgcccagcaggaagaacaacccgcaacggagcagga

SEQ ID NO: 169957 - RNA, 82 nt, Homo sapiens
agcaggcaaagacggcaaaagcacaaggaccgcggacagagacaacaccgagagagaaggacaggcagccaagaggaaacag

SEQ ID NO: 169958 - RNA, 58 nt, Homo sapiens
gcaccagcagccaccaggagcccgagagagaagggaaaacagggcggcacccaggcga

SEQ ID NO: 169959 - RNA, 67 nt, Homo sapiens
gaaggcgggcgacagcggcaggggccccgaaccagaagccggcggaaaccgccaggggaagaagcca

SEQ ID NO: 169960 - RNA, 42 nt, Homo sapiens
cccggggcaccacccccaaggacagagcgggagccaccagcg

SEQ ID NO: 169961 - RNA, 86 nt, Homo sapiens
ccagccgccccagaacgcagacagaggagcggacccccgcggcgcgcagcccagcagcacggaagaagacgacacagagaagcaaa

SEQ ID NO: 169962 - RNA, 66 nt, Homo sapiens
aagaacgaacggcgggcgcgggaagccaccaccagagggcaagaaggcacagaaaggaagaccagc

SEQ ID NO: 169963 - RNA, 77 nt, Homo sapiens
cacccgacgcgaaacgagagcgggcgacgcacgaggcacacaggaaggaggggagcagggacgcgcggcggcggggc

SEQ ID NO: 169964 - RNA, 68 nt, Homo sapiens
acaccgacaaagggaaccacgacagacacaaggagggagaacagcacaagcgggggagccaagggaga

SEQ ID NO: 169965 - RNA, 74 nt, Homo sapiens
ggcaccaccggccccggaagagacaccgaggcccggcacgagccgccagcccgccagagcgcccgaggagaagc

SEQ ID NO: 169966 - RNA, 83 nt, Homo sapiens
cccggggagagcgacgaggacgagacgcagaccacagcgacgaggacgacgccgccccgagagcagggaccgggccaagacga

SEQ ID NO: 169967 - RNA, 85 nt, Homo sapiens
cacagaccccgggcccacaggccaggaaggggacacaggcaaaacggacaaagaccgcaaaaagacccgaacggaaagccaaacc

SEQ ID NO: 169968 - RNA, 85 nt, Homo sapiens
gagggagcgagccagcaagcggaagcgccccaccgcgggcgccaaggggagcagaaggaccggacacagggagacaccagaacac

SEQ ID NO: 169969 - RNA, 42 nt, Homo sapiens
ccacaaaggaacggcaggcccaggccacgaagacggcaagga

SEQ ID NO: 169970 - RNA, 78 nt, Homo sapiens
acaagaacaaaggccgcgacggaggggggaccaaggcaacgaacacaagcagcgggcaacaacagaacagaaaacacc

SEQ ID NO: 169971 - RNA, 81 nt, Homo sapiens
gacccccaacaggggccaagaagcggagaggccaggaagagaggagacaaacacgacgaagcaagcaagcaaccgccccca

SEQ ID NO: 169972 - RNA, 77 nt, Homo sapiens
gccagaccacagcacagccgggaaggggagccaccagcccccggcccggcagccaggcggggaaggaggaagaaagg

SEQ ID NO: 169973 - RNA, 68 nt, Homo sapiens
gcccccgccagccgaacgacaggcggagaacggaaaagcaccaggaagcagagaggaccgcagaaggg

SEQ ID NO: 169974 - RNA, 80 nt, Homo sapiens
aggagcgggcgacccgggggggccagcggagcccggaaggggaaccacaaagaagagaaggcgggccaagaccgacaacg

SEQ ID NO: 169975 - RNA, 56 nt, Homo sapiens
acagcgacgcccagacaccccggagcacagggaggcccacggcacagcagcagcgg

SEQ ID NO: 169976 - RNA, 83 nt, Homo sapiens
gaggcgccggcgacggagggcagcgggccgggagacgccagcggccggccggcagagagcagcaccagcagaagagggcccga

SEQ ID NO: 169977 - RNA, 85 nt, Homo sapiens
cgggcggggcccggcggagcccggacgggcgccacaccaacaccacggaaccagccaagacaaggggcgcagagcggggggacag

SEQ ID NO: 169978 - RNA, 39 nt, Homo sapiens
cccgagagcgggacgcagaaagacagaaccagcacagca

SEQ ID NO: 169979 - RNA, 41 nt, Homo sapiens
caaaagcacagcccaaccacaggggcggagaacggaaaagc

SEQ ID NO: 169980 - RNA, 53 nt, Homo sapiens
acacccacaagaaacagaccaccccacgaagaccaagcccagaaccagaagaa

SEQ ID NO: 169981 - RNA, 64 nt, Homo sapiens
gcgcccccccccaacaggcggcccagacaacggcaagcggagaagagcaaggccgaaccgagag

SEQ ID NO: 169982 - RNA, 67 nt, Homo sapiens
acccaaccaggcacagagaaagggcgcccgagaggaggcgcccggccgccgggcacccgaccggggc

SEQ ID NO: 169983 - RNA, 80 nt, Homo sapiens
acccaggcagagcgcagccagaacagccgcggaccgggggggggccaccgaggagaaagagccccggagcagggagcggg

SEQ ID NO: 169984 - RNA, 78 nt, Homo sapiens
cggcgcgggggcccggagcggggcgcgggccgggaagaagcgccgcgcacggaccggcagagagccgagggaggagaa

SEQ ID NO: 169985 - RNA, 85 nt, Homo sapiens
gcaccgcgcgaagcggccaaagccgcccagacggccaccggcgggaggaacaaaagacagccagcagaagcggggacagaagaga

SEQ ID NO: 169986 - RNA, 77 nt, Homo sapiens
ccacaggcgaaagacccacaccaggcaaaagggaaagcaaggggaagggcccaagaagacaccccaccagaaaccga

SEQ ID NO: 169987 - RNA, 77 nt, Homo sapiens
ggagcccgcgcccgccgcgggagagaggacccccccccccccccaagcgcgccggagagcagccaagaaagccacag

SEQ ID NO: 169988 - RNA, 59 nt, Homo sapiens
acagcggccgggaacgaccgaaacaccaggcggccaggaaacacaaggagccaggaccg

SEQ ID NO: 169989 - RNA, 49 nt, Homo sapiens
caagaaaacgagagaagcgagaggagccaaagcagacccccaagcgagc

SEQ ID NO: 169990 - RNA, 69 nt, Homo sapiens
gaggagagacaccggagaggagggagaacaagacgaggaacaaaaacacagggaaggccgccaagggga

SEQ ID NO: 169991 - RNA, 75 nt, Homo sapiens
gcgccggcgcacagcagaggaaggaggcagaaagggagccccaagagagagggccaagccaaccggccaaaacaa

SEQ ID NO: 169992 - RNA, 58 nt, Homo sapiens
agccccgggcagccccgcccggacagggagacccgaccaccggaagccacggcccgga

SEQ ID NO: 169993 - RNA, 75 nt, Homo sapiens
ccagacgccgacggccagagggaccggagcaaaaagcgcacgcaaggaaaccggcacaggggcagagccagggca

SEQ ID NO: 169994 - RNA, 68 nt, Homo sapiens
agacccagcgcaggagacgggcacaccgacaaaggaaccaccgccgacggaaagcaacgggaccaccg

SEQ ID NO: 169995 - RNA, 78 nt, Homo sapiens
gggcacggggcccccaccacagagccgcacgccaccaggagcccgacacagccaggcaaccccaccggcgacacgcag

SEQ ID NO: 169996 - RNA, 80 nt, Homo sapiens
aagccggaggagaagcaagaaggcccggacacagcaaaccgggccacaggaggaggcaaaccaaagcgacagcaagcaaa

SEQ ID NO: 169997 - RNA, 65 nt, Homo sapiens
cacaccgggcggagacccacgacacggcaacgccaggacccgaaaagccagcaagcgagaccaac

SEQ ID NO: 169998 - RNA, 79 nt, Homo sapiens
aggagcgaggagcagaaaccagccacgggccggaggcaaaaaagccccaaggacgccccccaaggacacggaagcacgg

SEQ ID NO: 169999 - RNA, 63 nt, Homo sapiens
cggcgagaggacggagggggcccgacaaagcccccaagagagccagcggcggagccacagcag

SEQ ID NO: 170000 - RNA, 80 nt, Homo sapiens
ccgcccaggcacacagacaacagagcaacccaccggacggggcaggacaccaggggggaaaaaccacacaggcaaagaac

SEQ ID NO: 170001 - RNA, 69 nt, Homo sapiens
ggacacgaccccggaccacgggaaggcaacagggcacagcacgcaagaaccagcggcacggagagaaga

SEQ ID NO: 170002 - RNA, 67 nt, Homo sapiens
cgaaacaggagaaaaagaaggcgagaggaaccagcaaaaaagagagaggacccaagaagaccagccg

SEQ ID NO: 170003 - RNA, 106 nt, Homo sapiens
aggagacaaaagaagagagacacaaagagcacaaaaaagcggaaaaacgagggcccgagcgcccagcggaaccaacagccaggagcccggagagccagccgaaggc

SEQ ID NO: 170004 - RNA, 74 nt, Homo sapiens
cggaaagcgaaggaaagagccaaagagggaagcccaacccagaaagagagaaccccacccaagagacaaagacc

SEQ ID NO: 170005 - RNA, 69 nt, Homo sapiens
aaaaaaggacggcccagagcggcagggacaaggccgggacaaccagaggcgaagagcccacccgccaac

SEQ ID NO: 170006 - RNA, 81 nt, Homo sapiens
gccgggggagacgacccccgccaggccacggcaagccccaaggacggggcccacgaggccagaggacgccgggcaagagcg

SEQ ID NO: 170007 - RNA, 73 nt, Homo sapiens
acagcaccaccaacccaccaccaccaggagaaagcaagcagaaagagcagcagaacaggggggaccagggaga

SEQ ID NO: 170008 - RNA, 80 nt, Homo sapiens
gcgagcgagggggggcgcgccggaaaccggagcgcgcagcagggaaagcaggcaggagggagagcgccgaagaaccaccc

SEQ ID NO: 170009 - RNA, 74 nt, Homo sapiens
gccccccaggcccacaaccagcccagcagcagcaagcagcaggaacccggagggagaaagaagagcagcaggag

SEQ ID NO: 170010 - RNA, 88 nt, Homo sapiens
ccagggcgcgcacacaggccccggaagaacccagacaccaggcaagaccaaccggccacaccgcgaaggccaaagaggccacaaagaa

SEQ ID NO: 170011 - RNA, 63 nt, Homo sapiens
aggcaggacccaacgacaggcgccccggcccaacgaacggccgagcgaccaggagaggagccc

SEQ ID NO: 170012 - RNA, 68 nt, Homo sapiens
caccgagagagaggacacgaaacagagaggggaaggagcccagcgaccaaggagcacaaagggccaac

SEQ ID NO: 170013 - RNA, 77 nt, Homo sapiens
agcccaccaaggacagcccagccacaccccaaaagggaaagggacagacaggacgagaggacagaacgaggcaacca

SEQ ID NO: 170014 - RNA, 77 nt, Homo sapiens
ccagaacccgccccgcccaaaagaccaccgcccaacacaacacgcaggaaaagaggcacagagagaagaaggacagc

SEQ ID NO: 170015 - RNA, 75 nt, Homo sapiens
acaggaaggaagacacgacaagggcgccacaaaggggggagggggccaccccgaagcgagacgggacacagcggc

SEQ ID NO: 170016 - RNA, 74 nt, Homo sapiens
cagaccaacgcacaggaccgaccagaggcagaggacggagaggccacgaacgacgcacggaggccacaacacca

SEQ ID NO: 170017 - RNA, 80 nt, Homo sapiens
cagaagagaaagccggcggccagagaagcaagggggaagacggaccacaagggaaacaacaaaagacgcaggaagagacg

SEQ ID NO: 170018 - RNA, 77 nt, Homo sapiens
gaaagaaacgagaagcgcaaagccaggagacggacggaacgcggcgcgaccagaaaaccgagaaagccgagaaaaga

SEQ ID NO: 170019 - RNA, 68 nt, Homo sapiens
ccgcccagcggagagcaaaaccgaagacaaccccaaaacccggaccaccgccaaggccagcagagccc

SEQ ID NO: 170020 - RNA, 88 nt, Homo sapiens
gaaaacagagcagcacagagcagcaggagggaaaagaagaaggaacgaccgaagaaggacagcaaccacgagaaaacggaaccgaaag

SEQ ID NO: 170021 - RNA, 86 nt, Homo sapiens
ccccggcggcggcggaggcgcgccgagaaccgacgagggccgccagcagacagccggcacacaggcacaagggcggagcccagaga

SEQ ID NO: 170022 - RNA, 77 nt, Homo sapiens
aaagaggaagaagcgggacccgcagggcaaaggggggaagaacaaggaacacaccgcaaaacgcaaaacaagaagga

SEQ ID NO: 170023 - RNA, 83 nt, Homo sapiens
cccagggaaggcagcggccggagcgcgcaagccacgcacccagacggaggcagggcgcaacgcccacacaacccgccccgggc

SEQ ID NO: 170024 - RNA, 103 nt, Homo sapiens
aaaaacacccaggaggcaccagaaagacaaaagagcaagaaacaagcagacggaaaagaccagacaaggccaggacggggacagcgacaagagcgagcggggg

SEQ ID NO: 170025 - RNA, 88 nt, Homo sapiens
accgaaaccagccccggacgagaagcgcagcaacggcgggggaccacgagagcgacgcgcccggggcacggccaacgggggcagcgcc

SEQ ID NO: 170026 - RNA, 85 nt, Homo sapiens
gcagggaaaagaccgaggcagcaccaccgaccagccacccagacaggacccagccgccgccccaccgacggagacggacgcccgg

SEQ ID NO: 170027 - RNA, 73 nt, Homo sapiens
ccaaagggcgcaggcgaagggcgaaagcagacaccaagcaaacagagcaccagagagcagcaccagcagaaga

SEQ ID NO: 170028 - RNA, 73 nt, Homo sapiens
ccgcacccaccaagcagaggcccaggacgagcaagcaaccggacaccacccggagagcccgcgggaacacagg

SEQ ID NO: 170029 - RNA, 59 nt, Homo sapiens
cggacaggaaccggacagcacaccagggccgggacacacgagcagacggcagaaaacag

SEQ ID NO: 170030 - RNA, 82 nt, Homo sapiens
cgacgccgcggacccccgcgaccgcgcggaccagggcgacaaagggacccggcagacggcagaaaacagacgaagcaacagc

SEQ ID NO: 170031 - RNA, 71 nt, Homo sapiens
gaagaccgcccaagcgcccggaggcccacagcagggggcagacagccaccacgccgagggcacccggagaa

SEQ ID NO: 170032 - RNA, 74 nt, Homo sapiens
gccagcgagcccagaagaccgagcgggacaggggcacgcggagccgggcggagccagcacgagacaacaagacc

SEQ ID NO: 170033 - RNA, 89 nt, Homo sapiens
ccaacacaggcaggaggacaccgagcccagaagacaagacagggagcaacaaaggcagcaaggagcgcccacggcagagccacaacgga

SEQ ID NO: 170034 - RNA, 60 nt, Homo sapiens
gggcgggggccccagccccacagaccagcccagcacaggagaaacggcgcaggcgcagcc

SEQ ID NO: 170035 - RNA, 70 nt, Homo sapiens
ggagaggcccaggaggacaggaagaagaccccccagcagcgagcgcccggccggcacccccagccgaaaa

SEQ ID NO: 170036 - RNA, 41 nt, Homo sapiens
gcccacacgggacaagaaacgagccgcacaaacacgcagag

SEQ ID NO: 170037 - RNA, 78 nt, Homo sapiens
ccccccgcccgcgcggggcggagggagacgcggcggcagcggagacgaaccagcggacaggacgccacgcggaggagc

SEQ ID NO: 170038 - RNA, 83 nt, Homo sapiens
gcgggagcgagccaaggcggcgcggcggccacgggcgcagcacccagaagcaagaaaggacagcaaagcgaagaagcaaagaa

SEQ ID NO: 170039 - RNA, 82 nt, Homo sapiens
ggaaacgaggagccggccgaacaccccaccagaccacccagcaagcccacaaaaaaggcacaagcagggacagcccgcccag

SEQ ID NO: 170040 - RNA, 80 nt, Homo sapiens
gcgaggagcgcccagagcaccgccacaccccagagaccgaagcggcacaagacaggggacaggaccggcccaacagggca

SEQ ID NO: 170041 - RNA, 78 nt, Homo sapiens
aggaccgagacaacacggggcaagcaagaacagaccgccacaccagaaagagaaggggagagacacagcccaagaaca

SEQ ID NO: 170042 - RNA, 66 nt, Homo sapiens
gacccgcagccccaaagaacggaacgaggggcggagaccgcggaacgcgagggaacaggaaccgga

SEQ ID NO: 170043 - RNA, 69 nt, Homo sapiens
aacgacagcacaccgggaccccgggagggcccagcaaccggccagcgaaccggagacaaacaggcaggg

SEQ ID NO: 170044 - RNA, 83 nt, Homo sapiens
caggccacgaccagggcccggcggggacgagcaggaagcgcggcgagcgagcggcagcagagaacaccaccgggaccccaagc

SEQ ID NO: 170045 - RNA, 95 nt, Homo sapiens
acgccagcgggacgaggaccgagaccgcggccgggaccgagggggaccaaaagaacccagccaacccgcagagggaggggaggggcgagcggagg

SEQ ID NO: 170046 - RNA, 78 nt, Homo sapiens
caggggcagggcagaagggcgcggagggacgcacccccacagggcagaaggaacagagacgcaggcaagagcgcggag

SEQ ID NO: 170047 - RNA, 81 nt, Homo sapiens
cggggcgcggcggccgccaccaggcacccggaagagcgcggccgaagaaaccaggaaccgaagaagcgaagaaacagcgga

SEQ ID NO: 170048 - RNA, 73 nt, Homo sapiens
aaccggaagggccgaagccgccacggcagcgcggagccagcgcccggcaaggagcgagcgggagacaccggcc

SEQ ID NO: 170049 - RNA, 75 nt, Homo sapiens
ggcgcccccggacagaccaacgcaaagagagcgaagaccggccaagggcagaaagacgccaggaggcgagccgag

SEQ ID NO: 170050 - RNA, 56 nt, Homo sapiens
ggggcccgacaacggcacgaccgcccacggacacgcgggcaggcccgcacaccgga

SEQ ID NO: 170051 - RNA, 81 nt, Homo sapiens
aggaagccacggcagacacacaacccgacccgacgaggacagccaaagaccggagcggagagagaagaaacaggccacaga

SEQ ID NO: 170052 - RNA, 62 nt, Homo sapiens
cgcaacccggaccagcagaaaccagagggagcgacccgagcggcaggaagaaggagaaggac

SEQ ID NO: 170053 - RNA, 87 nt, Homo sapiens
cacacacgccagcagaccaccccgggagggaccgggacaccacagcaagaggaacgggcacgccagaaaagaccaggagaagcagac

SEQ ID NO: 170054 - RNA, 84 nt, Homo sapiens
aaaagagaaagaaacagacaagcgagagagcagcgcaacaggaagacccaaggaagaacaagcaacaaaaagccagagcccaca

SEQ ID NO: 170055 - RNA, 82 nt, Homo sapiens
cgccccaccggcggaacccagcaagggaaagaaaaggcccgaaccaagcagacgccgaagccaccgggggaaagccccccgc

SEQ ID NO: 170056 - RNA, 71 nt, Homo sapiens
caggcagccaccagcggacaggcaaccgcccaggaaacaaccacggaacaacagacagccacgacggggca

SEQ ID NO: 170057 - RNA, 78 nt, Homo sapiens
agggaaccggcagggcaagcggcgacacacgacggaagaaagggagcagccaacaggccagcagcggcggaaacacca

SEQ ID NO: 170058 - RNA, 79 nt, Homo sapiens
agaccacccagcgaagcagcaaacgaacagcgagagcgcaccagaaggcagggaaacaacgagaagagagggaacacgg

SEQ ID NO: 170059 - RNA, 56 nt, Homo sapiens
accaggagcccgagagagaaggcaagggggaacaggcaaagggcagcaccgaccac

SEQ ID NO: 170060 - RNA, 63 nt, Homo sapiens
ccaacaagggcaaccaaggccaccagcgcgggaccccccccaaagggaaggcaggaggcagca

SEQ ID NO: 170061 - RNA, 71 nt, Homo sapiens
cacggcggacgcgcgggagaaaacggcgcaccggagagacgcagaggggcggcgggggagcccgggggagg

SEQ ID NO: 170062 - RNA, 81 nt, Homo sapiens
cgagcagccccgccacccggacgccaggacggagaagaagacaaacggcagcgcaagacacccgaggggccgaggcaagac

SEQ ID NO: 170063 - RNA, 90 nt, Homo sapiens
agcggcgggcgagggcaccccgagccccgcgggccgcgcgggacccgccaggcggccgccccggaacggacaagaccagaagcagaacga

SEQ ID NO: 170064 - RNA, 66 nt, Homo sapiens
aggaccaagaaccaggacacaggaggagggcagaccaaacagcggccaaagaagagaaacggcaag

SEQ ID NO: 170065 - RNA, 82 nt, Homo sapiens
cgcagaggcaaggggccaccaggaggccagggggcgccaggggaggcaagcaggggggcaaaggaaagaaggcagaaaggga

SEQ ID NO: 170066 - RNA, 45 nt, Homo sapiens
gaagaggacgaagaaagggagagagagcccaaaagcaaagcaggg

SEQ ID NO: 170067 - RNA, 76 nt, Homo sapiens
caccaggggccccagggaagagacccgcaaagaccgggagaccaagggcccgaagacaccccgccaaaaggacaga

SEQ ID NO: 170068 - RNA, 42 nt, Homo sapiens
gccgggagcgcgcagccaggcgggggccggccccagcccaga

SEQ ID NO: 170069 - RNA, 73 nt, Homo sapiens
agagcaaggagaggaacggccaaaacgggggaggcaagcaggggggcaaaggaaagaaggcagaaagggaggc

SEQ ID NO: 170070 - RNA, 77 nt, Homo sapiens
caaaaagccagaagcccaccccaaaggacacaagaggaagcccacaggcagagagggcagagcgaggagccagacag

SEQ ID NO: 170071 - RNA, 39 nt, Homo sapiens
cagagagagccaaacccccagggaccagcaaagagaggg

SEQ ID NO: 170072 - RNA, 78 nt, Homo sapiens
acacgggggcgacacaggggccgggagcgcccagggggaaggcacaggcggagaacaaagggggacagagaagaaaag

SEQ ID NO: 170073 - RNA, 79 nt, Homo sapiens
cggccccggccccgcccggccggcgcgccccggagggcgcggcgcgcgaggagcaggaaaaggccccaaaggcgagcca

SEQ ID NO: 170074 - RNA, 77 nt, Homo sapiens
ggcgccgcagcacccgcgagcgccccgggggcgccgagggcacaagggcaacgacagaagggcgaagccaacgccag

SEQ ID NO: 170075 - RNA, 65 nt, Homo sapiens
cgccggcccaccaaacagaaacgagaacgaggcaccggacacagggcaccgggagcaacacagcc

SEQ ID NO: 170076 - RNA, 75 nt, Homo sapiens
cggggcaaccggagccccccaggaggaaaacgcagaacaaagcgggacagacccgcaaggaagagccggacagaa

SEQ ID NO: 170077 - RNA, 56 nt, Homo sapiens
gccagccccgggggccacgagcggggcagagaacacacagaagagaaaaaccgaac

SEQ ID NO: 170078 - RNA, 73 nt, Homo sapiens
cgacggggaggacaaaaaaaacagcgaacggccaaccaacgggcagaaaaaccagacccaggcagaggacaac

SEQ ID NO: 170079 - RNA, 81 nt, Homo sapiens
gccgggaagaagcgccgcgcacggaccggcagagggacgggagcagcggaaggcccagaccgagcggcgccccgggggcgg

SEQ ID NO: 170080 - RNA, 60 nt, Homo sapiens
gccgccgggccacggcaggcagaagagcacgacgacggccaccagagaggacgcccaaca

SEQ ID NO: 170081 - RNA, 73 nt, Homo sapiens
gccggccgccgcaggagcccagaagccgaaaagcaaggcccccacaagcaacccgccacacgccaccccggcc

SEQ ID NO: 170082 - RNA, 64 nt, Homo sapiens
cgcaaaacggcgggcaagagggacaaggggcccgcaaaacggaggcgggggcacaggccccaag

SEQ ID NO: 170083 - RNA, 85 nt, Homo sapiens
acccacccaccagacccagaagccacggcgggacgaccaccagggaccaagggccagggggaggacggcagcagaggaagaggag

SEQ ID NO: 170084 - RNA, 81 nt, Homo sapiens
acagaagaagaggaggaggaggaggaagaggaggaagaaaaacgaggacaagacgaggacaccagaggacgcccggcagaa

SEQ ID NO: 170085 - RNA, 84 nt, Homo sapiens
gacacgaggacgccacccgcgagaaccagccgggaggggaagacgagccaaaccaggcgaccgagcagccaagcaacgggcccc

SEQ ID NO: 170086 - RNA, 77 nt, Homo sapiens
aggccgagggggcggacacaaggcacggaaaaaccgcgagcccgggggccagcacaggaggaaagcacggcacgccg

SEQ ID NO: 170087 - RNA, 69 nt, Homo sapiens
ccaggagcgccacgcgcggaaggcagcgcccagcagcgcagcagcacccaggaccacaacagagaggca

SEQ ID NO: 170088 - RNA, 54 nt, Homo sapiens
agcaagccgccaggaacacaaagaagcccacacacagcccccagagcacgacag

SEQ ID NO: 170089 - RNA, 80 nt, Homo sapiens
cccagccccacagaccagcccagcacaggacccggcgggggcaaggaagcacggaggcccgggaacaaggacaacgccac

SEQ ID NO: 170090 - RNA, 75 nt, Homo sapiens
aaaaccgacacacaagaaaccaggagaaccagcagaagaacggagacgcagaaaaaccacgacaaagaaggccaa

SEQ ID NO: 170091 - RNA, 76 nt, Homo sapiens
cagaaacccaggaaacgagaccagaccccagagaggaggcacagaaggcgggcgcggacggcaggggcgccgggga

SEQ ID NO: 170092 - RNA, 65 nt, Homo sapiens
cgcagcacagggaaccgaggggagccgaccacggacgccagcagcgagacacccgacagacaggg

SEQ ID NO: 170093 - RNA, 71 nt, Homo sapiens
cggaaggacgaggcgaggcgagaaacgagggccacacagggacgaaaacccgcggcgagcgcgcagaagga

SEQ ID NO: 170094 - RNA, 71 nt, Homo sapiens
ggaagccgggccggccgcgcgacgggggacagaacggcaccgacgagacggagagaagacggaacaagaaa

SEQ ID NO: 170095 - RNA, 36 nt, Homo sapiens
cccacacgagcaaccgaggccaagggcagggagaag

SEQ ID NO: 170096 - RNA, 80 nt, Homo sapiens
cagcggcaaagccaggccccccagcggaaacgccaggccagccaacacaaggagaaagcagaagggccccaaggccaccc

SEQ ID NO: 170097 - RNA, 72 nt, Homo sapiens
cgggccagcaagggcgggcaacccggcggaacggaaggaacgagcaggagagaaagaaagagaaacgagaac

SEQ ID NO: 170098 - RNA, 82 nt, Homo sapiens
aagcccacagaggggggcagggccaggaagcgaccacaaagcaaggaggccccagagccagcggagaagagagcggaaagag

SEQ ID NO: 170099 - RNA, 76 nt, Homo sapiens
cgaacccccaagcggggcccacccaaacgacccaggcccagaaggggaagacccccagcgaacagagacccaaaaa

SEQ ID NO: 170100 - RNA, 79 nt, Homo sapiens
aaccgaggcgcgggagccgcaccaccaacgcggccgacaacagccggcgccgccacggcaaaagcagaccggaaaaccc

SEQ ID NO: 170101 - RNA, 79 nt, Homo sapiens
cccacacccaagaacgccaagcgccaaaggcaaaaagggccccgagccccggccccaaagacccaaaacagagacaccc

SEQ ID NO: 170102 - RNA, 73 nt, Homo sapiens
ccagagcccggacgagacagaacacgagccaaggaaaaccaagacaggaaaacccaggacaacaaacagcaag

SEQ ID NO: 170103 - RNA, 64 nt, Homo sapiens
accaagagaaaaaaaaggagcaagaggaaacaggccagggaggccgccaggcggacaacaggac

SEQ ID NO: 170104 - RNA, 61 nt, Homo sapiens
cagggcccagcggccacacggcccaacaccgcaaagcagagcggccgaaccccaggaccag

SEQ ID NO: 170105 - RNA, 74 nt, Homo sapiens
caaggcacaaaaccgcgcggaaaccaccgggacagaacgaccgcccggccagcccaccccccgacgaaggccac

SEQ ID NO: 170106 - RNA, 78 nt, Homo sapiens
agcggaggaaggaggagcagcagaccggacgggacgccccggacaggggagaaaaagaacaccgcagagcccacaaag

SEQ ID NO: 170107 - RNA, 70 nt, Homo sapiens
ggagagaagaaggcaagcgacggcccgaacgagcggaggccaacaaaacccaacccggagccggggacgg

SEQ ID NO: 170108 - RNA, 71 nt, Homo sapiens
ccaaggagcaacacaacaaggagacagggcccaaaccaaaaaggaaagcacccagggcaaaagagaccaag

SEQ ID NO: 170109 - RNA, 77 nt, Homo sapiens
cagcccagccgaaggaaagaccaggccgcaccaagagcaaaaggaaaaccacaccacacaggccgagaaaaacacca

SEQ ID NO: 170110 - RNA, 78 nt, Homo sapiens
ccgacccgggccccgccagcccccggcggaaagaacagacacaccaacagcagcagcggagcgaggccggcccggccg

SEQ ID NO: 170111 - RNA, 82 nt, Homo sapiens
gggaccggcgcggcgccgggggcaccgcgccgccgagacagcgcacgaaacacacaaagaaccaccaccgggaggaagccag

SEQ ID NO: 170112 - RNA, 36 nt, Homo sapiens
caccgacacagcccagccggcgccgcgggccccgcc

SEQ ID NO: 170113 - RNA, 76 nt, Homo sapiens
gccgaccacagcacacgaaacggaggcaccaacccccacacgcccggggaaccaggcgaggggggcaaccagaaga

SEQ ID NO: 170114 - RNA, 78 nt, Homo sapiens
aaggaagcagcaaaccaggagcaagaacaacaggacagggacccagacgcggcaaaccccccaaccgaaaaaccagga

SEQ ID NO: 170115 - RNA, 44 nt, Homo sapiens
cgaggccggcaacggagacccaagccaccagcgaacaggccaaa

SEQ ID NO: 170116 - RNA, 67 nt, Homo sapiens
agaggggaccccagacgagcacaaaacgccggaccgagggagagcacaacacggaagcggggaaaaa

SEQ ID NO: 170117 - RNA, 76 nt, Homo sapiens
gacgacgaggaagaggaggcgaggaggccaggaaacacgaggcaagacagggaggccagggaaacgcgcagccagc

SEQ ID NO: 170118 - RNA, 57 nt, Homo sapiens
cggcgccaccgagacacgagccagggggcccacgcggaggacgcagaacacggcggg

SEQ ID NO: 170119 - RNA, 75 nt, Homo sapiens
cagcaaaacaggcagccgagaaaaggagcacggaagaccaggggagagacaggcgccagacagacaagcaccaaa

SEQ ID NO: 170120 - RNA, 74 nt, Homo sapiens
agaagagacaagaaaaaaaagcacagcaaaaagcagaggcaagaaacaacagcgaccagagccgaagagaacgc

SEQ ID NO: 170121 - RNA, 59 nt, Homo sapiens
agacgaggccgggacgcagccggccaggccgcgcagaagacgaccccgacgcaggccag

SEQ ID NO: 170122 - RNA, 94 nt, Homo sapiens
cggcggcgagacgaggcgcagccaccaacgcgcacgggcgccacgcgcggcgcacacgggcgcgggccgaaccggggcaccagcaccagagccc

SEQ ID NO: 170123 - RNA, 105 nt, Homo sapiens
accacagagggacccggacaaccagaggcagccagcagggggaggggacccaagggagagagggaacggcgaaagggcagcccggaaggagcaccaccaccggaa

SEQ ID NO: 170124 - RNA, 33 nt, Homo sapiens
gagaacggcacacgcgagcgagcgaagacaaga

SEQ ID NO: 170125 - RNA, 39 nt, Homo sapiens
gcggaggcgaaagcggaacgagacagaaggacagagaag

SEQ ID NO: 170126 - RNA, 63 nt, Homo sapiens
gcagcagccccgaagagaaacacacggacaacaaacgaaggcgaccgagaacacagagaacgg

SEQ ID NO: 170127 - RNA, 76 nt, Homo sapiens
cggccgccggcacggcggagcccccgacggggggaaaagagcggccaccaaacaggcgggagggcgaggccaagag

SEQ ID NO: 170128 - RNA, 67 nt, Homo sapiens
cggcgccacagcaccgcgcagggaccagacccgaacgacaacacgaagaggaagagaacacagagac

SEQ ID NO: 170129 - RNA, 64 nt, Homo sapiens
ccccaagccggaagaaccgcagccgagcggggccggccacaggggggcccgggccgacgcggca

SEQ ID NO: 170130 - RNA, 83 nt, Homo sapiens
ggggaccccggcgggcggcaggaggacaggccagcgacgccggcaggcgaagggagggccgccccaaccgacgcaccagccgg

SEQ ID NO: 170131 - RNA, 76 nt, Homo sapiens
gaggcaggaagcaaaaagacgggggcagagaagacgaagggggggccgcccgcccaaggcaggaagaggggccgca

SEQ ID NO: 170132 - RNA, 67 nt, Homo sapiens
ccaacgaccgcgaaacagacggcagcaggagagaagagccagcacccaacgaaggaagaaaggggac

SEQ ID NO: 170133 - RNA, 83 nt, Homo sapiens
cacagccccaccaggcccagggccggcccccccaggacaacccagaggcaacaaaggcgagaacaggccaagacaaccgggaa

SEQ ID NO: 170134 - RNA, 70 nt, Homo sapiens
gcgaagaggcggaccggacggccgagcaccaggacccgggaacccagaacagagcgaaaccgcaagaacc

SEQ ID NO: 170135 - RNA, 74 nt, Homo sapiens
gaccggcagaccgccgggggacggaggcccagaaacgacaacggagccgggcaagaacgaaacacaagggacaa

SEQ ID NO: 170136 - RNA, 75 nt, Homo sapiens
ccgcaggaaggacggaccaggggcaggaagcgcaggcgcagcaacgccaaaaagaaaccgaagaagagaagaaca

SEQ ID NO: 170137 - RNA, 80 nt, Homo sapiens
agagaggagcgaaagaaggggaggcaaggaagccgacaaggaaacacagaggccaacagcaagagcaaccagggaccacc

SEQ ID NO: 170138 - RNA, 76 nt, Homo sapiens
gacgaacagaaaaaaacgaacggaaacagggcacaagagaggcggaaaagggcagacccaaggggaaagggccgca

SEQ ID NO: 170139 - RNA, 67 nt, Homo sapiens
ggccgggagaccgcgcacacgcagacacccacaagcacaagggcggaagagcgcgggaggggaggcc

SEQ ID NO: 170140 - RNA, 82 nt, Homo sapiens
cccgcgccgcaccaacgggaagggccggcccgcccccggccggggcgcagcggaggcagggcgggacgaccccacaacccga

SEQ ID NO: 170141 - RNA, 72 nt, Homo sapiens
gcgggagcgcgcccgccgagcgcaacagcggcgggcggggcaccccaggcgggaaaacggcacaaggcgacg

SEQ ID NO: 170142 - RNA, 76 nt, Homo sapiens
aaggccccacacagacgggaaccccggccacgcgggaccaaccgagggccgacggaaagagcaaacagcaagcaac

SEQ ID NO: 170143 - RNA, 79 nt, Homo sapiens
cccaccgcagcaaggcccggccgagggcggccggaggccaacgggaggaagagaggacagagacgaggcgggcccaagg

SEQ ID NO: 170144 - RNA, 75 nt, Homo sapiens
caccgcaaggccggcgcacagaggcgcagcgggccagcaggacgcagcagaccacacggcccaccggccccggaa

SEQ ID NO: 170145 - RNA, 77 nt, Homo sapiens
cgggaacccccacgcggccagcgaaaacgcccagccagcggaccacaagcaaacaaaagccaacacgaaccccaagc

SEQ ID NO: 170146 - RNA, 73 nt, Homo sapiens
cacggaagacgcaggacccgggaaaaaggaagacagcgagaagccacgcccaggaagaaaggaccccagaccg

SEQ ID NO: 170147 - RNA, 68 nt, Homo sapiens
ccgaagccggaccagcaggagacaggaagacgaaagaaagagagccgaggcgcaaaaaaagagagcca

SEQ ID NO: 170148 - RNA, 58 nt, Homo sapiens
aaagccaacacgcaccgcaggcacagggcaaaagagacggacaagcaaggcaggagaa

SEQ ID NO: 170149 - RNA, 89 nt, Homo sapiens
cacggaggccgcgggaagacgcggcggcggcggcggaggagagccgcagagcgcgcagaccccggccccgccagcaggcgaagcaggga

SEQ ID NO: 170150 - RNA, 72 nt, Homo sapiens
aggacagaaaagacaggcgccaggagcacagaagagcgaggagaggaagaaaggggacacaaccaggagccg

SEQ ID NO: 170151 - RNA, 62 nt, Homo sapiens
caccaaagcacccgaaaccagacaggaacgccgaagaggagcagcagaacggagagaaacag

SEQ ID NO: 170152 - RNA, 74 nt, Homo sapiens
acacgaaggcagaggcccccaccagaggccagagcacccccaccaagccgaggaagcccccacgacgaccgccc

SEQ ID NO: 170153 - RNA, 69 nt, Homo sapiens
gacaggaggagggagaaaagcggacgccggggaggccaaaaaggaacaagcagaaagcacgaacaacga

SEQ ID NO: 170154 - RNA, 82 nt, Homo sapiens
gccccagcccgccggcggcggcggacggcaagcgggggcaaggacgcagccccgcagaggggcacaaggaagaaagccgggg

SEQ ID NO: 170155 - RNA, 77 nt, Homo sapiens
gagaccagacagagagcaaaccaaagcagcagcagaggcaccaaacgcggccaaccggccaacggagaagcacaggc

SEQ ID NO: 170156 - RNA, 93 nt, Homo sapiens
cgagaagcccgcccgcccaacacacaacaggcccaccagaagagccgacaagccggcagaaggcagacacaaacaaaagggcagccacacgag

SEQ ID NO: 170157 - RNA, 54 nt, Homo sapiens
gaacagccggggccgggagacagcggaagaagaccaggacaacgcaaagcaccg

SEQ ID NO: 170158 - RNA, 66 nt, Homo sapiens
acagcggaggagaccgggaaaccgccgaagacgaaggaaggggaggagcacagaacgccaggacca

SEQ ID NO: 170159 - RNA, 74 nt, Homo sapiens
agcaccgacgcagggggagccaaaaggcacgggaaaaaagacaccaaacagccaccaaggacccaaccgcgcac

SEQ ID NO: 170160 - RNA, 86 nt, Homo sapiens
cgggccggcgccggagacgagccgggacgcacaccgagacgaacacagaacagcacgaccagaggggaagccaagcaaacgcagaa

SEQ ID NO: 170161 - RNA, 72 nt, Homo sapiens
accccaggagagcacgcaggcggacccggggggcggggcagcagagcccagcacacagcagggaggcgaggc

SEQ ID NO: 170162 - RNA, 82 nt, Homo sapiens
cccggccaccgcgcccccgcgcgagcacccgagcggcggcggcggcagcagcggcagcggcaagcaccaagagagaagaagc

SEQ ID NO: 170163 - RNA, 77 nt, Homo sapiens
gaggcggcacgggcgccacgagcagacagacagggcgcgccaccagagcaggcaaagaaaaagccagccgaggacgg

SEQ ID NO: 170164 - RNA, 80 nt, Homo sapiens
caaaccgacaagaaaaagcggcggcccagggagaaccaggaaaggaggagaaagagaaggaaacccacagacccagcaaa

SEQ ID NO: 170165 - RNA, 80 nt, Homo sapiens
gaccgacacagcgggacacagagacgacacacgcacaagggccaggcgcgggccgccagacccgaggagaggcagcacgc

SEQ ID NO: 170166 - RNA, 59 nt, Homo sapiens
ggacgcaaaccgagccccgcgccgcaggaccgaaagaaccgcacagagcaggcccaccg

SEQ ID NO: 170167 - RNA, 70 nt, Homo sapiens
gaaagccagggaccagcgccgcgacgccagaggagaacgagcccagcgcagcccagcaggggcgcgcagc

SEQ ID NO: 170168 - RNA, 59 nt, Homo sapiens
gccgggcggcggacccgggcgcgcagcagcggggggaccgaccggccgacagagggagc

SEQ ID NO: 170169 - RNA, 62 nt, Homo sapiens
gccggccagcgccggaaaccaacaagccggacacccaacagcacgcagacaaggcaccaaca

SEQ ID NO: 170170 - RNA, 59 nt, Homo sapiens
agggacagagcccggaagagaacgcagccacaacacaggggaacgagaagccacacgca

SEQ ID NO: 170171 - RNA, 82 nt, Homo sapiens
agacgcacagaagcacaaaacggaaagagagcgaggcaaacaaaaaagaaaaaagaaagaagcacaacgaagcgaaggaaag

SEQ ID NO: 170172 - RNA, 76 nt, Homo sapiens
cggcgcaggcggaagcgcacaggaagaagagggggacacccaaagagaccgaagagccagaggaacaaggcaaggc

SEQ ID NO: 170173 - RNA, 39 nt, Homo sapiens
cgggggcagggggcccgggacagagcagcggggagaaag

SEQ ID NO: 170174 - RNA, 92 nt, Homo sapiens
cgcacggagcgggcccgggccagaggcagaaaacggacggaagaaaaggcggccgggacaacccgccacaacgacaaaggaccccaaagacc

SEQ ID NO: 170175 - RNA, 79 nt, Homo sapiens
cagcagcacaagcccgcccccacaaaccgagcaagagagagcaagaggaagcagggggaaagaggcaaaaggccaaaac

SEQ ID NO: 170176 - RNA, 72 nt, Homo sapiens
gccgcgccagcgcccggcgccgcgcgccacccccgaacaccaccccacaacaccgagcaaagaaaagaagag

SEQ ID NO: 170177 - RNA, 81 nt, Homo sapiens
gccagcggcccccagggcccgcagacggccaggaaagccgccgggcggcaaccggcgggaacccgacacaagcgacggaga

SEQ ID NO: 170178 - RNA, 82 nt, Homo sapiens
cagaaaggggcgcgggcgcaggagcggggccgcggcggggccggaggaggagcagcgcggaggaggaagccccccggccaga

SEQ ID NO: 170179 - RNA, 76 nt, Homo sapiens
ccaccccacaagcacagccaagccaggcggaagagaggacggggacgggccccaggacgaggaagacaaggccagc

SEQ ID NO: 170180 - RNA, 64 nt, Homo sapiens
cgggaggggccgggaggcagaggggcaggggaagcagaggagagcagaagaccggccccacacc

SEQ ID NO: 170181 - RNA, 75 nt, Homo sapiens
gaacaacagacccaaaaagcaacggcagaacagaacacgagcgagaaaacagagcagacagagacaaaaaccagc

SEQ ID NO: 170182 - RNA, 81 nt, Homo sapiens
agagcaaaggggaaagcagaaagccggccaaggaacagagcggcagccggcacccgcacaacccagggggccgaacccaga

SEQ ID NO: 170183 - RNA, 54 nt, Homo sapiens
cccacccaagcacgcaccaagacgacaagaagagcccccccagcagagccccac

SEQ ID NO: 170184 - RNA, 74 nt, Homo sapiens
ccaccacgggcacccgcgccgggcaccgaggaccagccaagacagggcccaaacccgagcccgcaagcagagac

SEQ ID NO: 170185 - RNA, 36 nt, Homo sapiens
ggcggggcccacagggagcagcagcagaggagaagc

SEQ ID NO: 170186 - RNA, 59 nt, Homo sapiens
ggaaacgggcgaagcgacgagccgcgaggagcaacacagaagcggagcccaggcacccc

SEQ ID NO: 170187 - RNA, 70 nt, Homo sapiens
agacccggggacccccgacgccaggcagcgcccccaaacgaagccagacagccgaaacaacaccagccgg

SEQ ID NO: 170188 - RNA, 74 nt, Homo sapiens
ggggccaggcaggacccaacgacaggcgccccggcccaacggcacgaagacagccccaacagacgagaagcaag

SEQ ID NO: 170189 - RNA, 78 nt, Homo sapiens
cccggggagcagccccccgggccccgagccagcccacgcagccgccccgaaggagccaggaggcaaaccggccgaaga

SEQ ID NO: 170190 - RNA, 53 nt, Homo sapiens
cgaagggcggaaacggcggggacagggggggcacaagggccaaccgaggacac

SEQ ID NO: 170191 - RNA, 73 nt, Homo sapiens
cacacggggagacacagcggaagagaggaaggagacagagagagcaaagaaaccagagccaccggcccaggcg

SEQ ID NO: 170192 - RNA, 71 nt, Homo sapiens
aaagcgggacaaaccaggggaaaagccacggcaggacaaggggcagaccacaaggagagaagagagggagc

SEQ ID NO: 170193 - RNA, 74 nt, Homo sapiens
gcgccaaaacagcgcccagccagcgcacacaagcggagggcgacgccgagacaaggcggcgccgaggaagagca

SEQ ID NO: 170194 - RNA, 71 nt, Homo sapiens
agacaaccacgcagagacgcagacaaaaagaaaagcagcagcaacgggaacgaagagagaaagcaaacacg

SEQ ID NO: 170195 - RNA, 87 nt, Homo sapiens
gccgggagccgggagaaaagccgaaggccagaggcacggacgaccccggagagagcgggcgagcagaaacccggaaggcagaaaggc

SEQ ID NO: 170196 - RNA, 77 nt, Homo sapiens
caccgccggacccaaagcacggcaccggacagacgaagcaaagcgagaggagaaggagcgagcgagcggccagcaac

SEQ ID NO: 170197 - RNA, 77 nt, Homo sapiens
cccccagcggccgcagggccgacaagcggaccaagccagacccaaggacccccaaggccagcagggcgaaggaccgg

SEQ ID NO: 170198 - RNA, 71 nt, Homo sapiens
aaaggccaggcaaaaaaggcagggggagaccgagcaaaccgcgaccaagacacgagagagaggcaggccag

SEQ ID NO: 170199 - RNA, 60 nt, Homo sapiens
ggcacgcacaccacgcccaagccggaacaccaagacacgagccagaaaagagcccgagcc

SEQ ID NO: 170200 - RNA, 83 nt, Homo sapiens
ccgggaggagcagccgcgcgccgagaagcacccgcgacccagaagggcggcgacggcggcgcgaggaccgaccgggcccgcgg

SEQ ID NO: 170201 - RNA, 74 nt, Homo sapiens
ccacggcgggccgcgggaggacaccacccacaggaaacccgaagaggggagaaaaggaacaagaaaacaacgga

SEQ ID NO: 170202 - RNA, 83 nt, Homo sapiens
gccgcagccgagccaccagagaagcggcacagcagagaaggagcagagaacgaccaagaggaggcccaaagggggaaaagcag

SEQ ID NO: 170203 - RNA, 67 nt, Homo sapiens
aacaaaggacagaggcaaaccaggggacagggaaagcagaaccgcgggaaaagaagggagaagcaga

SEQ ID NO: 170204 - RNA, 61 nt, Homo sapiens
caggaccaccagaaggccgaggaaacggacccaggagagggggagggaccccaccggggca

SEQ ID NO: 170205 - RNA, 63 nt, Homo sapiens
gaaacagcagaaacgcaccaggccaaagaaagagaaggagcggcaggggaggcgaagaagagc

SEQ ID NO: 170206 - RNA, 116 nt, Homo sapiens
agcagccaagagaaaaccccgcccgcagcgacacaccaagcggaggggacgccacgcaacgccgccccccacacaagaacggagcacgagaaaagcacccagagaggaaagcccac

SEQ ID NO: 170207 - RNA, 72 nt, Homo sapiens
cccagcccccagcagcgggaacaggacgagcgggggaaaaaagacacagaaccagccaagcaggagcaaaac

SEQ ID NO: 170208 - RNA, 71 nt, Homo sapiens
agagccggaagccaggcacaccgcaaggacccaaaggggaggcgcgccgggcggcgagacccccgaggcca

SEQ ID NO: 170209 - RNA, 70 nt, Homo sapiens
cgaccagagagcgcggccggaggacaggacaacgggacggaaaagccggccacagcccccggcgcacaca

SEQ ID NO: 170210 - RNA, 58 nt, Homo sapiens
cggagcgggcgacgagcgacccgggagacacgacgcgaaggagccggaaggggcacca

SEQ ID NO: 170211 - RNA, 70 nt, Homo sapiens
aaagcagcacgacaccgccaagaagacagccgcccggggacccgccgcgcggggggcggccgaccacggc

SEQ ID NO: 170212 - RNA, 33 nt, Homo sapiens
cccacacgagcaaccgagggaggaaggagcccc

SEQ ID NO: 170213 - RNA, 81 nt, Homo sapiens
gagacacccaccagaagaggcacgacgggcccccgagagaaccgaggaccgcggcacagaccgcaacgccacggggacgcg

SEQ ID NO: 170214 - RNA, 87 nt, Homo sapiens
ggaagcgggcggagagggcgggggccacagggagaacaaagggcaaaggacacaccgcacaaacggccgcgcaccacacaacaccag

SEQ ID NO: 170215 - RNA, 68 nt, Homo sapiens
gaagcccgacagggcccacccagcgaaacccaaaaagcaaaaagaacgaaacgaagccgggaaagaag

SEQ ID NO: 170216 - RNA, 80 nt, Homo sapiens
acagccgagacgcaaacccaggggacccagagcaacaaacagacagagaccgagagaggcgacagccacccacagcccca

SEQ ID NO: 170217 - RNA, 71 nt, Homo sapiens
aaaacccagaagcacacggaaaggagccgcaaggcacgaagcacgaagacacgacacgccaaaagaacaca

SEQ ID NO: 170218 - RNA, 69 nt, Homo sapiens
aagacacggagacagagaagaaggaacaggaaaagggaggcaaagacaaccagaaacccgccacgcagc

SEQ ID NO: 170219 - RNA, 74 nt, Homo sapiens
gagcaagaccccggaacccgaagcgggaaagggagaacggcagaaccaagggaccaaagcgggacggcaggcca

SEQ ID NO: 170220 - RNA, 78 nt, Homo sapiens
ggaacgacccgaggggggagagcgcgggggcgacggccgagcagcaaagaagaaacaccccgccgccagggacaagcc

SEQ ID NO: 170221 - RNA, 59 nt, Homo sapiens
ggaccgggccaaggagggccagaccacaagccaacacgcaaggacagcagcggacggcc

SEQ ID NO: 170222 - RNA, 74 nt, Homo sapiens
caagaggggccgccgggcgaggcacccagccgccgcccaggaccccgccccgagcagccaagaagagggaaaga

SEQ ID NO: 170223 - RNA, 64 nt, Homo sapiens
gcgcagccggaaaccagaggccaggagggaggagcaggacgcagggagacgagccgaaaaagga

SEQ ID NO: 170224 - RNA, 79 nt, Homo sapiens
aagagccgcagcgaaaacgggaagcagcagaaaaagccgagccgaaggacaagcaaagaaagccagaggacaaacgaaa

SEQ ID NO: 170225 - RNA, 83 nt, Homo sapiens
acaccacagccgcggggccgggcccccgggcccgaccagcggagccccggacccggagaggggagagaagggggagccggcga

SEQ ID NO: 170226 - RNA, 54 nt, Homo sapiens
gcaagggaaagcagcacgagacaggacacagaacagagaagaagcagacgagac

SEQ ID NO: 170227 - RNA, 69 nt, Homo sapiens
gaggaaacggcaagaccaaaaaacacaaaccaggcaacaggcagaaaaagaaccagcgcggcccgagcc

SEQ ID NO: 170228 - RNA, 72 nt, Homo sapiens
agacaccggaacccgaaggagcagggagggcgaacgccaggcacgacagcagagcaagagcgccagacacag

SEQ ID NO: 170229 - RNA, 78 nt, Homo sapiens
gagggggggcgcgccggaaaccggagcgcgcagcagggcagggcggaggcgcacggaggccgagagaggaggaggccc

SEQ ID NO: 170230 - RNA, 80 nt, Homo sapiens
ggcgcgcaggaggaaggcgccgcgcgggacccggaggaccgaccccagcccacgggcacgcaggccaaagccacccccaa

SEQ ID NO: 170231 - RNA, 83 nt, Homo sapiens
cgccccaggagcgcgagcccacaacacccccagcggccgccggccccccacgagggcagccagagcgggaaaggaggcaggcc

SEQ ID NO: 170232 - RNA, 68 nt, Homo sapiens
gagacaggcggcagacgggggcagagacaggcaacagacggcaacgaaaggcacaaaaacgcaacaca

SEQ ID NO: 170233 - RNA, 55 nt, Homo sapiens
accagcaaccagcagcaccgagaggcagaggccaaagagggacaaggaagccagg

SEQ ID NO: 170234 - RNA, 73 nt, Homo sapiens
ggcgcggcacgggaagaccaccgagcaccagaacaggagcccacccagcaggaaggaacgcaaagcggagcca

SEQ ID NO: 170235 - RNA, 72 nt, Homo sapiens
gaagcggaagacgggccacggacaggggggcacgacccccccagaggcggaccacaagggcaagagaacaac

SEQ ID NO: 170236 - RNA, 40 nt, Homo sapiens
cgccagaagagaaccacaagggggaaagcccaccgacacc

SEQ ID NO: 170237 - RNA, 84 nt, Homo sapiens
ggaggagagggcggggaagaggcggcagccgaggccgcgaacgcacaggaggggcccccggagggccacaagccagagcgcccc

SEQ ID NO: 170238 - RNA, 73 nt, Homo sapiens
caggaaaaagacagcccgcagcacgaccagcaggaacgaccaggagagaagacgaaaaagaagaagcagcgaa

SEQ ID NO: 170239 - RNA, 84 nt, Homo sapiens
caccgaggaagagcgggagaaaggaagacccgaggaccgggaacgaaggggccccgaggaagcagaagccgagggacggggcgc

SEQ ID NO: 170240 - RNA, 65 nt, Homo sapiens
aggaaaggggggagcaagacaagccaaggcaaacccagagaacccaaggagaagagaacaaacgc

SEQ ID NO: 170241 - RNA, 74 nt, Homo sapiens
ccaaggcacggaggccgcggccgccaggcacagagaaggcaaacgggagggcgaggacaccaagagcagcgcgg

SEQ ID NO: 170242 - RNA, 84 nt, Homo sapiens
cagcaggcacccccaacagcacccaccccagcacaagccaggaacccccacaagcggaaaacgccagcggacaaaagggacgcg

SEQ ID NO: 170243 - RNA, 80 nt, Homo sapiens
gaagagggcgagaaggaaagaggccaaagagaaagggggcgggccacaggcgcgcaggcaagggggacaaggagaagaaa

SEQ ID NO: 170244 - RNA, 77 nt, Homo sapiens
acccaaaacaggagcaaaggggagggcaggcgaaaacccccaacaaagggggagccagccaccgagacgccgacagc

SEQ ID NO: 170245 - RNA, 83 nt, Homo sapiens
gcggcaaggaccagaccgcgggaacagccagcaaaggcaggggaggaagccacccgagagcagcaagggacaacaaagccagg

SEQ ID NO: 170246 - RNA, 82 nt, Homo sapiens
ccagagccacagagcgccgggacagagaggcagcgccccgagcggacagcggggacacgcgaacaggaaacaggacagggca

SEQ ID NO: 170247 - RNA, 71 nt, Homo sapiens
gcaagggacccccggccccccagcgcccccggggcaaacccgagccagccccacaaggacaaaacagcgcg

SEQ ID NO: 170248 - RNA, 78 nt, Homo sapiens
aagcgggacaagcccgggaacaacacaccagagccagcggaccacaagcaaacaaaagccaacacgaaccccaagccc

SEQ ID NO: 170249 - RNA, 67 nt, Homo sapiens
ccagaaccccaaagagccggccgcgcacaagccggagaagcacacaaagagaaagggaaagaagaaa

SEQ ID NO: 170250 - RNA, 77 nt, Homo sapiens
agaagggaaaacaggaaaggcaggcgggaagccgggggccccgcaaaacaggcccgaggacggcgaacacaccaacc

SEQ ID NO: 170251 - RNA, 78 nt, Homo sapiens
gcgcaccaaggaacacgacaggaacgaggaagaacagcaaagaccaacagagcccaccagaagaaacgaacgaagcag

SEQ ID NO: 170252 - RNA, 53 nt, Homo sapiens
aagggacccccccgaagagccacggaaggcagacggaacaagacccgcggaga

SEQ ID NO: 170253 - RNA, 87 nt, Homo sapiens
aggaaaaccgagacccgagaccagaaacacacagaccaaagcgcagccagcacacacggaaccacaccaagaccgcagggaaccacc

SEQ ID NO: 170254 - RNA, 76 nt, Homo sapiens
gggagcgccggagcagcggacccaggcaggagaagacagaggagccagaccaagagacagcacaggcgagcgagca

SEQ ID NO: 170255 - RNA, 70 nt, Homo sapiens
cagaaagcgcagagcaaacaccaaaggacccgacaaacggacagcaggaccagaacaaggagaagcaccg

SEQ ID NO: 170256 - RNA, 74 nt, Homo sapiens
gcaaaaccagaggagagccggcgacagcaagaagaggcaggcggcaaggagagacccaaaagacacgcaagaca

SEQ ID NO: 170257 - RNA, 73 nt, Homo sapiens
gcaacggggcacaacgcggccggcgcccgcacccaccgagaaccagccaccgaccccccgccgacacagccac

SEQ ID NO: 170258 - RNA, 60 nt, Homo sapiens
ggacgggcccgcacaaaccaccggcccagggaaggagaggaggaaaaccgagacccgaga

SEQ ID NO: 170259 - RNA, 54 nt, Homo sapiens
gggagagagaaaaaccggacgagcgagcaaggaagcgaaagggggcagacagaa

SEQ ID NO: 170260 - RNA, 78 nt, Homo sapiens
cgcgccgggagaccgcggaggccgacaggacgggcgccgccccgcgcggcagggcacacacccgaaaaaagaagccaa

SEQ ID NO: 170261 - RNA, 76 nt, Homo sapiens
aggaccccggccacccaagaccgagacgggaggcgaggcggcaccaaaaagagaaaaggaagcggcaaacaagacc

SEQ ID NO: 170262 - RNA, 73 nt, Homo sapiens
agagcccagaaaagagcaagagagagaagaagccggcagcccggcccaggccgagaaaaaagagacagacggc

SEQ ID NO: 170263 - RNA, 75 nt, Homo sapiens
aggcgccgccggccgccaaccgcggggcggcaccaccgagcccacgggcacggcacccggcacccccggagccac

SEQ ID NO: 170264 - RNA, 70 nt, Homo sapiens
agaggaccacgcagcaaggcgcacacagagggaaaacagcccccggccgggaccaggaggaacaagagaa

SEQ ID NO: 170265 - RNA, 82 nt, Homo sapiens
gccgccgccaagcccggcccggcccgacaccgcgggccgccagacgggaaggcggggggggaagaggaggaggcgcccgaca

SEQ ID NO: 170266 - RNA, 74 nt, Homo sapiens
aaagaaccccaccggacccggaagcaggacggaccgaacccaccggacacccccaggagaaaacacaacacaca

SEQ ID NO: 170267 - RNA, 77 nt, Homo sapiens
ccgccacgggccgagacacgcagcggcggccagggaccagcaagaagcccggcgccaaggaaaaagacgccaaaagc

SEQ ID NO: 170268 - RNA, 38 nt, Homo sapiens
accccgagcagcggggaagcggaaggagggccccggag

SEQ ID NO: 170269 - RNA, 76 nt, Homo sapiens
gcacagcagcgggaacacagcaacacagcgccaccgcggcacccagggcccagccgcggggggcagacaaccacgc

SEQ ID NO: 170270 - RNA, 83 nt, Homo sapiens
gggaagcgaagacagggggcccaaacgggagacaacccccgaaggagggacgagaacccaaccacacgcacacaaaaaaccca

SEQ ID NO: 170271 - RNA, 58 nt, Homo sapiens
ggagcgcaaggcgcgagcaggacccaaaggaaccaaggacggggccggaagccgccga

SEQ ID NO: 170272 - RNA, 68 nt, Homo sapiens
ggagagcccaaacaccaccaccaagggaccccgacggagagacaaagaagacggagggggggccagcc

SEQ ID NO: 170273 - RNA, 73 nt, Homo sapiens
ccgccccgggccgcggccgccgacagcccaaggcggaaaagcgaaggaagccacaagcacagcccacacaaac

SEQ ID NO: 170274 - RNA, 74 nt, Homo sapiens
agcccgggaacgaagcagagcagagagacgaagagagaagcagggcagaaagagcggaaacgagaagagcaaac

SEQ ID NO: 170275 - RNA, 70 nt, Homo sapiens
gaaggaccaagaaccaggaagaaacgcacagacgcgaaagagggaagaaagaaacgaccggcggggcggg

SEQ ID NO: 170276 - RNA, 77 nt, Homo sapiens
cgcccagcagaagaagagaggagggagaacacagaaaccggccccaggcgccggaccgaaggcgcgaccacgacgag

SEQ ID NO: 170277 - RNA, 61 nt, Homo sapiens
gaagggaagcaggcggccaaggagaagggcgcaccaagagcgcccacagcccaccgcgcca

SEQ ID NO: 170278 - RNA, 75 nt, Homo sapiens
aagcaaggaggggaaaaaccgcgaagcaggggccgcgggaagggacagacagccagagggaaacgagagccagaa

SEQ ID NO: 170279 - RNA, 61 nt, Homo sapiens
ccgggccacgcgccccgcagcccggcagcggcaaccaagggcagaccgcacaagcagcccc

SEQ ID NO: 170280 - RNA, 68 nt, Homo sapiens
acaagaaaagcgaaccacaccagcaagacgacgaagaacagcagacaacaggcacaaagagagaagga

SEQ ID NO: 170281 - RNA, 81 nt, Homo sapiens
agccaaaggcacgacgcccgggaagagggggagcggccagcgagagccagggcccaaagaaccgggggcacccgaggagga

SEQ ID NO: 170282 - RNA, 80 nt, Homo sapiens
caggcccagaggcaagaccgccgccaggcggcaagagaagccgagccaggccgcggagagccgcccgcgcccaccgccgc

SEQ ID NO: 170283 - RNA, 65 nt, Homo sapiens
acacagccaggagccgcgaagagacaaaagaagagcggagccagaggagcggcaagagacaacca

SEQ ID NO: 170284 - RNA, 116 nt, Homo sapiens
aagagagagaaaaaggacaaaagccaagaggaggacagcgcacacagcaagcacgagggaccaagaaaggcccagggaccaaagcccggacaaggcccgagcaccaggaccgcaga

SEQ ID NO: 170285 - RNA, 71 nt, Homo sapiens
gggcagaaagaccgagggagcgcgggagaagacaccggggaacaaccgcaagcaggaagaaaagagcgggg

SEQ ID NO: 170286 - RNA, 66 nt, Homo sapiens
cccaccagacggcgccccaagaccagagggcacaggaaaagaccccacaagcaaggacaaagaccc

SEQ ID NO: 170287 - RNA, 76 nt, Homo sapiens
acgcaacgccacaaagcggcgcggcaccccagaacaacgcagcaacgagcagcgcaagaccccaggacaaccacga

SEQ ID NO: 170288 - RNA, 69 nt, Homo sapiens
ggccccgggaccggcgcccccccggcaccggagagcgaagcaccagaaggacacagaggaaagaacaca

SEQ ID NO: 170289 - RNA, 69 nt, Homo sapiens
cccgagagcgagaacagaacgacgcccccgccacacaggaacaccagcgcacaaccccaagcaaagaaa

SEQ ID NO: 170290 - RNA, 81 nt, Homo sapiens
aggagccggggcccgagccccgcccggcccgggccagcgggggcgagccacagccagcaccgagacaaccaagcaagggcc

SEQ ID NO: 170291 - RNA, 74 nt, Homo sapiens
cagcgcacacgaccgcagaaggccaaggaaaaggaacagagagagcagaaccgaaacggggaaagaccgaagaa

SEQ ID NO: 170292 - RNA, 78 nt, Homo sapiens
cgcaacgcgccgcagggaccacagcacgagaggaccccacgggacccagacgagagagccggcagcgcccgagggagc

SEQ ID NO: 170293 - RNA, 32 nt, Homo sapiens
cagggcgcccccgacaagaaaccagggaaagg

SEQ ID NO: 170294 - RNA, 55 nt, Homo sapiens
aaaggccgcggccagggcccagcgcccccaagaaaacaaagcccggaggagccac

SEQ ID NO: 170295 - RNA, 90 nt, Homo sapiens
agcacccgagcaaaccccagcaagagcggaggcgcccggcggagcagaggaaccacacgcgacaggccagaaagacacacaggagagcgg

SEQ ID NO: 170296 - RNA, 83 nt, Homo sapiens
gcgcgccaccgcgccggagcgaagaaacgccccgggacaggacgagaacccccgcgaaccagaggaacccagcgagcgagagc

SEQ ID NO: 170297 - RNA, 59 nt, Homo sapiens
ccccgacccgaagaacgggcggcagacgcagacaaacaaaacaagaagccgaagaagac

SEQ ID NO: 170298 - RNA, 57 nt, Homo sapiens
cgcaaagggcacgaagcaggaaagaacgacgccagggagacggggggggcggcagga

SEQ ID NO: 170299 - RNA, 76 nt, Homo sapiens
aaaggaggggcgggaagccggggccaaacgcaccccaggcgcccggagaaggcaaccaaaggcaggacacaaaaac

SEQ ID NO: 170300 - RNA, 78 nt, Homo sapiens
gcgggaccagcgaaaccagccagggaacggaaaagaagggggagcacagccacccgggagagcccagcaaaaaggccc

SEQ ID NO: 170301 - RNA, 81 nt, Homo sapiens
gagagaaggcaaagaaaaagcaaaaacgaaggaccgaagcgagcccaaccggcccggagcccaaggccccaggcagcccac

SEQ ID NO: 170302 - RNA, 76 nt, Homo sapiens
ccagcgggagagcgcgcacaacgcacggggggaggaaccaacggaggagccaagcgggaaaaggggcaccgacgca

SEQ ID NO: 170303 - RNA, 42 nt, Homo sapiens
gggcagcagacccagcaggcagggaacccacagcccccggag

SEQ ID NO: 170304 - RNA, 70 nt, Homo sapiens
agcaaagacccccggggcgccaccggacagccggaaaaggagacgaagaaggaacccccacggcgaagcc

SEQ ID NO: 170305 - RNA, 58 nt, Homo sapiens
gaaagaacagagaggcacgagacggaaccccccggccagacgccaggaagccggacgc

SEQ ID NO: 170306 - RNA, 73 nt, Homo sapiens
gagcgaagcggagggggccccaccaaaaccccgaaaggaagcaagaaacagaaagcaagagaagggagaaccg

SEQ ID NO: 170307 - RNA, 76 nt, Homo sapiens
ggcaggcggaagcgccagaggagccaccagaccaagacacccaggagaaagacagcggggaaaagaaaaaggaggg

SEQ ID NO: 170308 - RNA, 78 nt, Homo sapiens
gagcgcgaaggaccacagagcagggaaacagaaccccaaacggggcgacggcacgagagaagaggcgacaagggccag

SEQ ID NO: 170309 - RNA, 91 nt, Homo sapiens
ccagcaccaccgagaagcgccacaaaccaggccaagaccacgcgacgcagagcggaaggagcccaagccaggaccggaaaaaaccaccgga

SEQ ID NO: 170310 - RNA, 51 nt, Homo sapiens
ggagggagcggaaaccgacgcagacgggacagccacgccccagagaagggc

SEQ ID NO: 170311 - RNA, 74 nt, Homo sapiens
cccagacaaagggaggagacacgccgcggaggcggcgacaaagaacgccggacccagagggcagagaaagcgga

SEQ ID NO: 170312 - RNA, 41 nt, Homo sapiens
ggagaaggaccaagaaccagcaagggcaacacgggaaacca

SEQ ID NO: 170313 - RNA, 59 nt, Homo sapiens
aacgaagaaaacgaagccgcacccccccccagcagccagcaggacaggcacacccgggc

SEQ ID NO: 170314 - RNA, 67 nt, Homo sapiens
gggaccccggagcccagaagacagagggcgaggaccgacagcacgaggaggagagaagaaaagcggc

SEQ ID NO: 170315 - RNA, 79 nt, Homo sapiens
agaaccgagaaagcaaagaaacaacgacccagaaccgaccgggcagaccagccggcccgcgccaccacacaccagggag

SEQ ID NO: 170316 - RNA, 79 nt, Homo sapiens
gccaagggcaacaacgacgccgaaacacgccagccaccacaggccccaggaaggcaaaaagcagagacacccggagcgc

SEQ ID NO: 170317 - RNA, 68 nt, Homo sapiens
gagggaggaaaacaaccgagggcagaggaaaaagcccaggagcacacggcgcggaaacgaccgaccgg

SEQ ID NO: 170318 - RNA, 85 nt, Homo sapiens
cgggccgcgaggacgaggcggcgccgccgggcgggagagcaagaacgaggccaaggaggagggacacagagacagcgaagaaaga

SEQ ID NO: 170319 - RNA, 76 nt, Homo sapiens
gaaaagaccaggcgagaacccagcagccagaaccaaaaaggagagcgggaggagaaggaaccaagaagaaaaaagg

SEQ ID NO: 170320 - RNA, 79 nt, Homo sapiens
ccgacgcaccacacgacggcgcagggcaggacggccagcagaagcaggcgagccccccgagaaaaagaagaaacgcggg

SEQ ID NO: 170321 - RNA, 91 nt, Homo sapiens
gagcccaggagcgccacgcgcggaaggcagcgcccagcagcgcaggcagcagacgacaggacggcagagccccaagaaagcgcaaccgaga

SEQ ID NO: 170322 - RNA, 70 nt, Homo sapiens
agagaagagagaagccaccagcaaaaagaccccaccccgcggccaccaccgcgcccaacagaagaagccc

SEQ ID NO: 170323 - RNA, 74 nt, Homo sapiens
gcacccaaggccaagaaggcggacgacagccgaggagaagaagcagaagaagacaaagcagcaaaaacaaagaa

SEQ ID NO: 170324 - RNA, 68 nt, Homo sapiens
ccagggggaaaaacacaccagcacagggaggagcaggacaaaacgacaaaacacgagcaagccaccga

SEQ ID NO: 170325 - RNA, 76 nt, Homo sapiens
ccagacgcgacagagcgagccgccaggagcaaggcagcgacccagggcacagcggggcacagcccccagacgggaa

SEQ ID NO: 170326 - RNA, 56 nt, Homo sapiens
acaggaaggggcagacaagcacgccgcccagacaaccccccagggaacccgagaag

SEQ ID NO: 170327 - RNA, 58 nt, Homo sapiens
cacaggaccccagagcgacagcccgggacaccaagaaagaacggaggggcagcagacc

SEQ ID NO: 170328 - RNA, 75 nt, Homo sapiens
cgacaagaggcgacgcgaaccggggcacaagaaggccaaccccaaaagagagaacacaggcaagacgaaaaccgc

SEQ ID NO: 170329 - RNA, 81 nt, Homo sapiens
ggagcgacgacggccgcgccaagcggaaaccccgacaagggaccgggcgggccccgcaggaaacccccaccggcccacaca

SEQ ID NO: 170330 - RNA, 76 nt, Homo sapiens
gccccggccgccaggagcagccgccggcgccaagagacagccccagaagggccggaccgcggaggaggggcgccac

SEQ ID NO: 170331 - RNA, 83 nt, Homo sapiens
ggaccccgacagcgcggggcgggcaccaaggccgaagcacccggggcggagcacgccccggcccagcaggacggcagcccccg

SEQ ID NO: 170332 - RNA, 113 nt, Homo sapiens
gggagccccgggggacaggcccccggcgcgcggggcgcccgggggagcaacccggcgaggaccggaagccccgcgccaaaggacaagaccggacagaaggagggaagcggagc

SEQ ID NO: 170333 - RNA, 75 nt, Homo sapiens
aaagagaacaccggagggaaaagaacggagcccaccgcaggacaccggaacccagagggaaacagccagacgggg

SEQ ID NO: 170334 - RNA, 62 nt, Homo sapiens
gcgaggcaggaccggccggcagacgggcccgcaccgagcagagccgggcaggccacgcagaa

SEQ ID NO: 170335 - RNA, 69 nt, Homo sapiens
cggagcgcccgggcacggggagagaacacgaccaccaggacggaaagacccgggggaagaacaagagag

SEQ ID NO: 170336 - RNA, 84 nt, Homo sapiens
caggagcgaggcagcgaccgaaagccgccaggggcccagagccccgcagggagaaaggaagggccaagaaaagaagaaggacgg

SEQ ID NO: 170337 - RNA, 59 nt, Homo sapiens
ccagcacccggccgagacggcggcagcagcggcacagcccaaagacaacaggccccccc

SEQ ID NO: 170338 - RNA, 75 nt, Homo sapiens
aggaagaaagcaggaaacagacaccccaaaagcccccaaaccaggaagcaggaagccagcaaggcagaaaacacg

SEQ ID NO: 170339 - RNA, 85 nt, Homo sapiens
gaagaagcagcaggagcagcagcgcagccacccaaggagagaaacagccagcaacagaaggagcccagccacccaggagaggagc

SEQ ID NO: 170340 - RNA, 77 nt, Homo sapiens
gacccagcggcacaaggaccagggcagagccacgccacccccacaggagagagcaccaggagacaaagccacaaaaa

SEQ ID NO: 170341 - RNA, 56 nt, Homo sapiens
cccaaaagcaggaaaacggggaaccagaaccaaggggccgcaacccggccagcggc

SEQ ID NO: 170342 - RNA, 71 nt, Homo sapiens
gaggagggggcaccgagcaacgagggcaggaacggggggccacgacgggccaaagcggagaagacacaagg

SEQ ID NO: 170343 - RNA, 63 nt, Homo sapiens
ggacgaagcccaaaccacaagccacaaaagggcacacaggccccgagaaccaagagaaccccc

SEQ ID NO: 170344 - RNA, 81 nt, Homo sapiens
cagcacaagcaaagaaccaacgaaacacacaaaagagaaccagcagaaaccaccaagagcacaggcccaccaggagcagga

SEQ ID NO: 170345 - RNA, 64 nt, Homo sapiens
cgcggggcgccagggacagccaccggcggccgggacccacaggacagcagaccacagcccggca

SEQ ID NO: 170346 - RNA, 58 nt, Homo sapiens
acggggccagggaacccggcaccgccccaggacccaaagacaggaccacgcaccagca

SEQ ID NO: 170347 - RNA, 79 nt, Homo sapiens
cacaccccggacacagcaggcgggagaggaggcagccaggaacggccgcaggggacaacagagccgacacagccaagaa

SEQ ID NO: 170348 - RNA, 78 nt, Homo sapiens
aggacagaggaaaagccccagcgcgcgcccggacagacaaggacaggagcgaaggaaaaaacagaagacgcagcccag

SEQ ID NO: 170349 - RNA, 91 nt, Homo sapiens
ccaccaccacgccagccgcaccagccgcccaagccgcacagccgcggcggcagcagcaggagagaacagaaaggccccggagcagcgcgac

SEQ ID NO: 170350 - RNA, 77 nt, Homo sapiens
ccccccagccaccaagagaagggaaaggaggacaaaaggaaaaaaaaaaagggaagacagagaggcggggaaaggca

SEQ ID NO: 170351 - RNA, 74 nt, Homo sapiens
gccccaccagccaaacaccgcggccgccacgcggccgcgcgcagaaggagagagcaagacacgaggaaagagga

SEQ ID NO: 170352 - RNA, 82 nt, Homo sapiens
cgccccacccgcaccccacggaccgcacgcgaaggcccggaccgcgcccgggggacccaacaagccccaggacagaaggaaa

SEQ ID NO: 170353 - RNA, 52 nt, Homo sapiens
aaggaccaagaaccaggcccaccgagaccagagaagaccgacaacaggcaaa

SEQ ID NO: 170354 - RNA, 71 nt, Homo sapiens
caccgcggcccgcgcaggagaccgagccaaacacaagacagcagcccccgaaagcacacaagaaacagagg

SEQ ID NO: 170355 - RNA, 69 nt, Homo sapiens
acggggaccccggagcccagaagacagagggcgagcgaaggacaagcagcagcaagacccggcgagaca

SEQ ID NO: 170356 - RNA, 53 nt, Homo sapiens
gcggacccgccaccggaggagcccccggaaagagccgcccgagagacaaaccc

SEQ ID NO: 170357 - RNA, 50 nt, Homo sapiens
caccaaccacccacacaacacagaagaagacaggaagggaaggggcggag

SEQ ID NO: 170358 - RNA, 50 nt, Homo sapiens
cccaggaaggagccaaagcacaagaagaagacgagcaccaggacaaaaga

SEQ ID NO: 170359 - RNA, 39 nt, Homo sapiens
acaacccaaagagcaggcaagaggaggaacgacgagaag

SEQ ID NO: 170360 - RNA, 71 nt, Homo sapiens
cgggccgccggcaggcggccgcagcaacccgccgggcaacacaaagcagaagacgagggcaacacacacag

SEQ ID NO: 170361 - RNA, 77 nt, Homo sapiens
gccgcgcacgggccgcgcggggaaggcggcggccaagagcgcccgcacgagagcggggacgggaaagagggcagaag

SEQ ID NO: 170362 - RNA, 87 nt, Homo sapiens
gagagggcgaggccgccgcgacacccccgcaccggggccgggcccagaggacccgggaaggacaaagaggggggccccagccccagg

SEQ ID NO: 170363 - RNA, 70 nt, Homo sapiens
cccgccgaacccgaaaggagagacagagcacgagacgccacgaaaacccaccaaaaaaaaggagaaagga

SEQ ID NO: 170364 - RNA, 73 nt, Homo sapiens
gaagaggagacaccccgggggccccgagcaaaccagggaaaagggccagggacgaagccccgggcccggaccg

SEQ ID NO: 170365 - RNA, 78 nt, Homo sapiens
gggaaaagacgcagcccccaaggaagggggggcggaaggggacacgacggaagagcagcccaccaggcggccacgccc

SEQ ID NO: 170366 - RNA, 72 nt, Homo sapiens
ccggccgggccggccagcgccggaaaccaacaaagacacgcaggaccagcccgccgggagaacagcaggaga

SEQ ID NO: 170367 - RNA, 72 nt, Homo sapiens
gacacggagggcacggaagccggggcagcggccacagcaacggacggagagagccaacggaccacaacagag

SEQ ID NO: 170368 - RNA, 75 nt, Homo sapiens
cagccaaggcggcccgacaccgccacccccagcaggaaagaggggaaacgaggcacggagcggacaggaccagac

SEQ ID NO: 170369 - RNA, 69 nt, Homo sapiens
aagcaaggccgggcagagaagggggccagagacaagcaggcacagaacgaaccaaaaaggaaaggaccc

SEQ ID NO: 170370 - RNA, 81 nt, Homo sapiens
cacgaggcagcgggaggcggccggagacccacaaccacccacagcaaagcaaacgccagaaggacaaggccgccagaggcg

SEQ ID NO: 170371 - RNA, 62 nt, Homo sapiens
cccgcgcccgccccccagcaccgggcggacggggaaaagccccagagcggaaggcgaagcac

SEQ ID NO: 170372 - RNA, 71 nt, Homo sapiens
ccgaaacgcggcacccacaggcaagggaacacccgagagcagacagcgcacaaaccggcgccacggggaaa

SEQ ID NO: 170373 - RNA, 82 nt, Homo sapiens
agaagcggccccacaccacccgcagggccggcacggccaaggagaggacccaaagacaggaccacgcaccagcagagaagga

SEQ ID NO: 170374 - RNA, 75 nt, Homo sapiens
gaggcacccaaagggagccccggggagccgcagaaagccgcaacaccgagaaaaaaaccacggccaccaaaggaa

SEQ ID NO: 170375 - RNA, 68 nt, Homo sapiens
gacagaacggcagcggagaaaacaaccagggccagccggaaggaaagaccagcgcgccagaccaggag

SEQ ID NO: 170376 - RNA, 58 nt, Homo sapiens
agcccagagacgggaacaggagcccacgaaagggccagcagcccccagaagaagccag

SEQ ID NO: 170377 - RNA, 57 nt, Homo sapiens
gggaagagcaggcgcaaccagagaagaggcgaaagaagagggaaaagacgagcagga

SEQ ID NO: 170378 - RNA, 81 nt, Homo sapiens
ccagaagcagcaggaggcgcgggcaggcagagcaccaggcacagacgggggccccaggaccagcacaccgaacagaggcgc

SEQ ID NO: 170379 - RNA, 78 nt, Homo sapiens
cgcccagccgacacaaccgcaaaaaccaagagccacgcccccagagagcagacgcagccagccccggacggacccccg

SEQ ID NO: 170380 - RNA, 82 nt, Homo sapiens
agaggccgaggacagccaggagaagaagagaaaaggagggaacacagacccagccgccaaagcacagcaaggaggaaacagc

SEQ ID NO: 170381 - RNA, 69 nt, Homo sapiens
aaggaccaagaaccagggccggagccggaggaacgacgaaccagaagagacccaaggacaacgcaaggg

SEQ ID NO: 170382 - RNA, 71 nt, Homo sapiens
gaagaggggccaggaagaacacggaggaaagacaagccccaaaagcagccgggaaaggagccggccggcgg

SEQ ID NO: 170383 - RNA, 74 nt, Homo sapiens
ccagggacggcagcccacagcaccacaaaggaccaccgcacagccaaggaggaagcaggaaagaccacggccca

SEQ ID NO: 170384 - RNA, 79 nt, Homo sapiens
accaggacgcccaggacgcaacaagcgggaaagggcaagaaccaggggaggcacccagcaggcggagcaagacagcagc

SEQ ID NO: 170385 - RNA, 73 nt, Homo sapiens
ggcacagcacgggcagagccagaaagcgaaaccggaccaagaaaaaacaaaagcaaaaaagaagcaacacaac

SEQ ID NO: 170386 - RNA, 72 nt, Homo sapiens
ccgagccaagaagaagaagagccagaaaagggacaaaaaagagaggcgacaagcaccaagcagacaaacgag

SEQ ID NO: 170387 - RNA, 73 nt, Homo sapiens
cagaagagcgcccccggggcgaaggaacaaaagacgcaagaaaacgagagaaaccaagagagagaccggagcc

SEQ ID NO: 170388 - RNA, 78 nt, Homo sapiens
gggggacccaaaggaaagggcgggcggaacgacccagaaccggcgagaccagaaccgaggcggacgggcccagcggcg

SEQ ID NO: 170389 - RNA, 70 nt, Homo sapiens
agccgaacgagcacggaaagaggcaagcgacaccaagaaagaccccaaggcaacccaaccgagaggccaa

SEQ ID NO: 170390 - RNA, 77 nt, Homo sapiens
ggcgcgggaagcccgcggcgcgcgccccccggacccgcaggcgcagggaagcaacaggaaaccaaacaagggaagag

SEQ ID NO: 170391 - RNA, 80 nt, Homo sapiens
ggaaggaacggcagccaggaaagagggagccaagcgaaggaaaagggagcaggaagaagagagccaagcgaacgccgagg

SEQ ID NO: 170392 - RNA, 81 nt, Homo sapiens
cagggacaaccaaagcaagaaagcccaggggggaaaggaacagcaagccagacaagggacccacccagccaaaagaaccca

SEQ ID NO: 170393 - RNA, 68 nt, Homo sapiens
cggcagcaagcggggaacgccgcaccacgaaccagaccaagcggggccaacgagaagcaccggagaca

SEQ ID NO: 170394 - RNA, 79 nt, Homo sapiens
ggaggggccgcgcccgcggccaggcggagcggggacccagcgcagaagcagcgccagggacacaggacaaggagccacc

SEQ ID NO: 170395 - RNA, 83 nt, Homo sapiens
gcaagacccaggggggacaagacaggggccggcagcggcagaggcccagagaaggacaggagcccagccggcagcgcagcaag

SEQ ID NO: 170396 - RNA, 95 nt, Homo sapiens
ggaccgagcaacaccgagagaggaggagccagacgacaagcacacacaggcgcgaaacggaaaaagacaagagacgaaaccacccacacaaggag

SEQ ID NO: 170397 - RNA, 75 nt, Homo sapiens
cggagcggcgagagcccccacggacccggggaaggaggcgaaacacggagccaaagagaaccaccgccaccaaaa

SEQ ID NO: 170398 - RNA, 82 nt, Homo sapiens
cccgggacggcggcggaccgcgcgagcagggcgcgccccgcagcaggcccagcaggaggaaagggcagaaaaggcgcgacag

SEQ ID NO: 170399 - RNA, 68 nt, Homo sapiens
cggggcagggggaagaagaggcggcggcggcggggagcccccccggaagccggagaacgggacaggac

SEQ ID NO: 170400 - RNA, 33 nt, Homo sapiens
cccacaagccaacagggcaacaggcggagacag

SEQ ID NO: 170401 - RNA, 76 nt, Homo sapiens
gcaggcgcccccaggaacgggaacagacgcccaccagaaaagaccgacgagaacaggggggaaagacaaggcagac

SEQ ID NO: 170402 - RNA, 60 nt, Homo sapiens
gaagagcaaaaccagcgggcggccgcgcccccaggacacaagacggagcgccgcgcccag

SEQ ID NO: 170403 - RNA, 64 nt, Homo sapiens
acgaccgaaaaccagaaccacacaggaaggcccgcacgcagaggaaacggcaaaccgaggcgag

SEQ ID NO: 170404 - RNA, 75 nt, Homo sapiens
caagccacagaacccaacacagagccaaaggggagaaacgacggaaggaaaacccccggggcaaagacaagccga

SEQ ID NO: 170405 - RNA, 61 nt, Homo sapiens
cggcaagcgccagaaaccccgggaaggcccccagacccaaagacacccagaacccaaccag

SEQ ID NO: 170406 - RNA, 66 nt, Homo sapiens
ggcgaaccaaccgcaaagcccaaagcgagaaaagaggcccacgcggaccggcagcgccaccggacc

SEQ ID NO: 170407 - RNA, 55 nt, Homo sapiens
gcacaaggccacacaacggaccacacaagcaggaggaagcaaacaagccaaagcc

SEQ ID NO: 170408 - RNA, 76 nt, Homo sapiens
agcacggacacaagaggaagcggaaaccagggccacagcacgcagccccaggcaggagaaacaaggaagagcaacg

SEQ ID NO: 170409 - RNA, 68 nt, Homo sapiens
aagaccagcacgaagaagccacagccgcacggacccccagaggcgcggccagcgaagaagacgcagcc

SEQ ID NO: 170410 - RNA, 75 nt, Homo sapiens
ccggcggccgccacccggggccggcgaggacgcaacgcgagaacagaaccacggacaccaaaaagcggaacgacc

SEQ ID NO: 170411 - RNA, 65 nt, Homo sapiens
cgcgcacggcaccaaggcaagacgggacccaaaacgacacacaaaccaaaagccgggagaaccac

SEQ ID NO: 170412 - RNA, 65 nt, Homo sapiens
aaaggggaaccccggagaaaaggccaagaaggcagggaggcacaacagcaccccgaacagaaggg

SEQ ID NO: 170413 - RNA, 79 nt, Homo sapiens
agaggccgcgccgggcagagggcagagcggcgggaaaccaccaacaacacccccaaaccaaaacagccggaagcgggca

SEQ ID NO: 170414 - RNA, 86 nt, Homo sapiens
acgagaggagcggagcccgcagaaccccacagcaagaggacgaacccaggagaaacgagagggacagcaaggaagacgccagagag

SEQ ID NO: 170415 - RNA, 72 nt, Homo sapiens
caggaacagcgccagcgcaagaggagccaagcaaacagaagcgcggccaagcagagggccacagaaaagaaa

SEQ ID NO: 170416 - RNA, 55 nt, Homo sapiens
ccccggcggagcgacagcggcaaaaaacacaggggaaacacgagagagcaacagc

SEQ ID NO: 170417 - RNA, 67 nt, Homo sapiens
aaaggcagacaacccgcagaggcccacgcggaccggcagcgccaccggaccaccagacaaggacacg

SEQ ID NO: 170418 - RNA, 73 nt, Homo sapiens
gccccagcagagcacaagcccgcaaagagccagaccaagcaaccggaacaccaaacaccaggacaggcaagcc

SEQ ID NO: 170419 - RNA, 74 nt, Homo sapiens
ccccgggacaaggaccggcccagccccgagagccgggacacaggaagcacaaacaccagcccgaacgagacgag

SEQ ID NO: 170420 - RNA, 74 nt, Homo sapiens
gaggcaccgccccaggacaaaagggggacagacaagcggaagaacacggaaccaccacaaaaggaaggggacac

SEQ ID NO: 170421 - RNA, 79 nt, Homo sapiens
agaagggagcggaggacacgggggccacaaagccccccggagacgcaaccaagaaagcaccgggaggaaagagagccac

SEQ ID NO: 170422 - RNA, 68 nt, Homo sapiens
accaagcggcagcaaacaccccagaaggcccgcaaagaacaaccacaacacagcccggcagaggaacc

SEQ ID NO: 170423 - RNA, 70 nt, Homo sapiens
accccaaccggggaggaaaaccgacgaaggacccgcgggacgagcgggaggggcggcaaggaaccacgga

SEQ ID NO: 170424 - RNA, 71 nt, Homo sapiens
agagggcaggcaagaaaaaaaacaaacacacgagcaagccagaagagcaagaccaggccaggacaaacgca

SEQ ID NO: 170425 - RNA, 81 nt, Homo sapiens
gcgagcggacccgcagccccaaagacagcccagagcaagcacacggaggcccgggagccagaccgggagcccgccccagcc

SEQ ID NO: 170426 - RNA, 74 nt, Homo sapiens
gcagcggacccgcgggaggaacacagacaaccagggacacaccccgccaggcaggaagcaggaggacgaaacca

SEQ ID NO: 170427 - RNA, 58 nt, Homo sapiens
aggaacccagcccaacaccaccaaaagacgggaccagaccccacaagaaaacacacaa

SEQ ID NO: 170428 - RNA, 88 nt, Homo sapiens
agagcacacgcgccccccgacgagacccgcaaccggagaacgccaagcgccgccacgacaagccagaaagagacaaccagcaccaaga

SEQ ID NO: 170429 - RNA, 41 nt, Homo sapiens
gcagccgccaagaccgcgaggggcagaacccccgagcggcc

SEQ ID NO: 170430 - RNA, 57 nt, Homo sapiens
cggaaccccgcggcgggagcgcggcggggccgcagaggaaaaggggagaaacggcac

SEQ ID NO: 170431 - RNA, 77 nt, Homo sapiens
ggggggggccagggagcccggaaggggccgggcgacacaaagacgagccacaacccgaggcagcgaggaaaagaagg

SEQ ID NO: 170432 - RNA, 77 nt, Homo sapiens
caagacggagcggaaagcccacggaaaaaccgggggaaaaaaaaagaacaaacgccgccgaccagaacaagagacaa

SEQ ID NO: 170433 - RNA, 65 nt, Homo sapiens
cggcggcaccgacccgcggcccccgaccgcccaggcaaggagagcgaaaggaaaacaaggcacca

SEQ ID NO: 170434 - RNA, 73 nt, Homo sapiens
acagagggggaaagccaaggaaaaacggagagccacaaaaaaggaagcgaaaggccaaccgccccccagcagc

SEQ ID NO: 170435 - RNA, 57 nt, Homo sapiens
cccaggccccccgccccgcgcagcaggaaaaaggaaaccaacgaaccccgaaccgga

SEQ ID NO: 170436 - RNA, 51 nt, Homo sapiens
ccggagccgggggaccagcggcgggcccaagcgacgaggggaagcacgagc

SEQ ID NO: 170437 - RNA, 84 nt, Homo sapiens
agcgggcggagccgacgagcggcggaggacgggcgccgaccgaaggacgcgcagcaacaacagccgagcagcaagccagccccc

SEQ ID NO: 170438 - RNA, 55 nt, Homo sapiens
caacaggagccgaaaccggaacgcagggacagaggaaacaagaagcgggcccaca

SEQ ID NO: 170439 - RNA, 80 nt, Homo sapiens
ccgggcgggggcaccgagggcaccacgcgcggacgggaacagaacacaacaaagcacccccggagcccaccaaaaaaagc

SEQ ID NO: 170440 - RNA, 88 nt, Homo sapiens
cgaggaggggccccagcagcccccgaaggcccacaggacaggagagaaagacgggacaaacagcgcagagaagagaagacaggaccag

SEQ ID NO: 170441 - RNA, 68 nt, Homo sapiens
aaaccggcaggcgcccggacacagaagaggacagcaagccaggcggcagacaaacggaaccaaccaaa

SEQ ID NO: 170442 - RNA, 73 nt, Homo sapiens
gaagccaagcaacagcccacaggagcagggacggggggaaaagcgcacccgggcccgggcgagaaagaagaca

SEQ ID NO: 170443 - RNA, 100 nt, Homo sapiens
cgagaagagcagagcggagggagccccagacacgaaggggcagaccaacaccacccagcaaaaaccccgacgaacgcgccagggagcgccagacacccac

SEQ ID NO: 170444 - RNA, 77 nt, Homo sapiens
ccagggagagaggacggggacccgcgacccagccccccacccaacgcgaccagacaaagggagcaccagccagaccg

SEQ ID NO: 170445 - RNA, 72 nt, Homo sapiens
caaaagaaggccaaagaaggagaaaagggagcagcaggagccccgcggggcaggaccggccagggaaccagg

SEQ ID NO: 170446 - RNA, 81 nt, Homo sapiens
cgagggaggagcggggacggcgacccaggagagacgggaaaggaacccacggaagaccagaaaccaagcaacaggccagaa

SEQ ID NO: 170447 - RNA, 80 nt, Homo sapiens
cgaaaggaagcaagcagcagaagagccaaggaaaaacagcaagaacccaaaagggccaaacaacaaacgcagcacagcca

SEQ ID NO: 170448 - RNA, 83 nt, Homo sapiens
cgagagccacagcggcagcccagcccggcccggcagcgacaggaagacgacaagaagccaaagacgggagagagaaggcagaa

SEQ ID NO: 170449 - RNA, 71 nt, Homo sapiens
cgagacacagcaaagcaaccaccaggcagagacagccaacaaaaacaggcgagccaagagcaagagacgcc

SEQ ID NO: 170450 - RNA, 79 nt, Homo sapiens
acccggaacagacgggccccaagaggccagccccccgagggcaacgagaaagagacgggcgagcaacggcccaaccaac

SEQ ID NO: 170451 - RNA, 77 nt, Homo sapiens
gggggacggaggagccccggcggagaccacgcaaggccacagccaaacagaggaaagagcggagcccgccagaaaca

SEQ ID NO: 170452 - RNA, 79 nt, Homo sapiens
caccgggcccagcacagccagcaccgcacgcccgcaagggaggcgcaaggggacggaaaccaaggaaccaaagagcgag

SEQ ID NO: 170453 - RNA, 71 nt, Homo sapiens
agcccgaccgcgaccggaccaacagcggagggccgagggaggaaggaacaccccggcacggcagccgggaa

SEQ ID NO: 170454 - RNA, 68 nt, Homo sapiens
gccgacggaacaagggaaccgggaggacgacgccaccaccggcaagacaaacgggaaagcgaaaacac

SEQ ID NO: 170455 - RNA, 53 nt, Homo sapiens
acggggacgcgcaacaacaccgaggggacacagagccacaaaagaggaaacaa

SEQ ID NO: 170456 - RNA, 59 nt, Homo sapiens
agacccgcaaccggagaacgccaagcgccgccacgacaaggcgggcggcggacgaaggg

SEQ ID NO: 170457 - RNA, 72 nt, Homo sapiens
gccaagcccaccagaagcagaggcggcaccaggagcagccgcagaaccggaaaccggcacagggaagagaaa

SEQ ID NO: 170458 - RNA, 39 nt, Homo sapiens
cgacgacagacccgagcgacaggaaagggcacacggccc

SEQ ID NO: 170459 - RNA, 78 nt, Homo sapiens
agcaacagggccgggccggaggaagagaggaaaacccaagacaaggaagggcaaagcccacagcacaagaggcgggcg

SEQ ID NO: 170460 - RNA, 111 nt, Homo sapiens
gcaggaggagcagccaacccaggggaccacgcgaccaaggacggagagcggaagaccggcccacacaggagaaaacgacgcccacaccaaccccacaccccacaagcaaca

SEQ ID NO: 170461 - RNA, 83 nt, Homo sapiens
ccaagcagaaaggaacagaacgcggccccagccacaccaagcagagccaaagccggcggacagcagacgaacgaaaggcccca

SEQ ID NO: 170462 - RNA, 71 nt, Homo sapiens
cagaccaaagaagagccagaaaaccccccagaaagaggccaaagcaagagaaaaccgagaaaacgggacaa

SEQ ID NO: 170463 - RNA, 96 nt, Homo sapiens
gcgggccgcgccgcgccgccgcccacaagcggcgccgcgccccggccgcacgggacagcgacagcagacaagcaacacaaggggaagaccggaaag

SEQ ID NO: 170464 - RNA, 65 nt, Homo sapiens
ccggcgaaaggagagcaccggagcagaagccacagcaaaagccaaggagaagcaagacccggacc

SEQ ID NO: 170465 - RNA, 66 nt, Homo sapiens
gccccaacagcgggacacaggaagggaacacagcgccaccgaacagcagacagcgaaggcccaagg

SEQ ID NO: 170466 - RNA, 84 nt, Homo sapiens
agaggacaggcggaggccccagggaagcgcagaaagcaggcgaacccgcggcgcaaaacggggagaaagaagacaaggaaagaa

SEQ ID NO: 170467 - RNA, 75 nt, Homo sapiens
agccaaggggaaaaggaaagaaagaccaaggagcgcccaggaggcacacacgaaggaaccaggaagacagaggag

SEQ ID NO: 170468 - RNA, 69 nt, Homo sapiens
aacggcggcgcggagccagcgcgcagaccagcggggaacccagaaccgcggaccacagcaaaccaagca

SEQ ID NO: 170469 - RNA, 70 nt, Homo sapiens
ccagccgccccagcggcgcggcgccgcccacgacaacggcaagcggagaagagcaaggccgaaccgagag

SEQ ID NO: 170470 - RNA, 79 nt, Homo sapiens
agccaagaagcaaaaccaccgggaggccaacggccgcaccgcgcagagagaaggcagagaaaaccgaaggagcaagagc

SEQ ID NO: 170471 - RNA, 47 nt, Homo sapiens
agcggagagagaggagaaaaggagacaggcaaggagccagcaggaga

SEQ ID NO: 170472 - RNA, 67 nt, Homo sapiens
acgcgacgccgcccgccggagcagaccaagggcggggacaggcccaagcgggccaagggaagaccac

SEQ ID NO: 170473 - RNA, 73 nt, Homo sapiens
ggacagaacccggaccacaggaacaaccagaaaaggaggaacagacaaccgaagagaaggaccaaaacaagaa

SEQ ID NO: 170474 - RNA, 73 nt, Homo sapiens
ccgcccaacaaacagaggacaggggggcaggggcccgcaccaaaccacggaaggacagagaaaggcggaagca

SEQ ID NO: 170475 - RNA, 72 nt, Homo sapiens
gcggccagcaccccaacgggccaaagaacagccagcaaagacaagagcagaccagcagccgcagcgcgacag

SEQ ID NO: 170476 - RNA, 117 nt, Homo sapiens
aggaggccgccagcagaggcggagcccgcagaccgcagaaggccggagacaccagcaggagacggcgaagaacagaggaacaacgccaacgacaagacgaggaccaacgccagccag

SEQ ID NO: 170477 - RNA, 66 nt, Homo sapiens
caacccgaaccccgcacagagcagacgaaaccgacaagcgcgcaaagcagggaacgagcaaaacgg

SEQ ID NO: 170478 - RNA, 77 nt, Homo sapiens
ccacgccccgggcgccaacgccggggacggggcgggagaccgccacaggcccgggagccggaaaggaggggggccac

SEQ ID NO: 170479 - RNA, 70 nt, Homo sapiens
aaagaagaaggagaggcagcaagacaagcgccaacccaaacgagcgagacacacagaaaggaaaagggaa

SEQ ID NO: 170480 - RNA, 78 nt, Homo sapiens
ccaccggcgacgggaggacccggcacgggagacacacccgcacacgccagcgaagcagggacgagagacaaagaggca

SEQ ID NO: 170481 - RNA, 59 nt, Homo sapiens
cacaggaccacgcggaaccccagagcacgagagagcaagacgcacaagagaaggagagg

SEQ ID NO: 170482 - RNA, 72 nt, Homo sapiens
gagagcggcacccaggagagcagcaccaagcaaggaaacagggagccaagaagaaagacacagacacggcga

SEQ ID NO: 170483 - RNA, 79 nt, Homo sapiens
gcccaccagacccgaaacacgcacaggcgcgggaagcgaaaagggggaccaacgaaggcacaccgcccgagcaagcaac

SEQ ID NO: 170484 - RNA, 74 nt, Homo sapiens
cccccgcgccggggggccccccgcggcagcagaccgccaaagacgcagccaccgcccacaagcagcacaaccac

SEQ ID NO: 170485 - RNA, 81 nt, Homo sapiens
cagaggaggaggagggcaacccggacaagcgggggaaaagccaccgaccacacgccacaaacccaccgcaagcgccaccac

SEQ ID NO: 170486 - RNA, 76 nt, Homo sapiens
ccgcagccgagcgggcccgccgccggagcgaggaccagggacgggagaaagaacagacaagccgcaagaaccgggg

SEQ ID NO: 170487 - RNA, 69 nt, Homo sapiens
ggaaaagcgaggcaaaggccaccacaagaagcagcaaaggaccgaagaggccaacgaaacccagggaga

SEQ ID NO: 170488 - RNA, 88 nt, Homo sapiens
ggaaggcgggagacgagaagccgaaaagcgcagcgagcggagccgccggagcacaaaccacacaagaggagaccaagaacccaagagg

SEQ ID NO: 170489 - RNA, 118 nt, Homo sapiens
cggacccaagcagaccgccccccaccgagccagccccacccggccccagcaacacagcaccgggagggaccgaggacacggcggccaaccgggaggaggggagcgccggacccagcac

SEQ ID NO: 170490 - RNA, 74 nt, Homo sapiens
cggcaggcgaacaggaacggagccaaccgcccaggaaggacaaaggagccaagaggacaccagaaaccagaagg

SEQ ID NO: 170491 - RNA, 82 nt, Homo sapiens
accacaaacacaacaacagggaccagggaggagagagcgaggccacccagaaggccagccccagcggcccccagccccggaa

SEQ ID NO: 170492 - RNA, 71 nt, Homo sapiens
aagccccgggggcccgaaaagaaaaggaaggggaaggaagaaggaggagcgagaacagaaggcggccggag

SEQ ID NO: 170493 - RNA, 65 nt, Homo sapiens
cgaacggaagaggcagacgaacgggggcaggaggacggcaaggacgacacaagaccaccaccacc

SEQ ID NO: 170494 - RNA, 53 nt, Homo sapiens
aggggcaggaggggccgcagccaggcgagcggccggaagaagaagaacacagg

SEQ ID NO: 170495 - RNA, 83 nt, Homo sapiens
aaaaaccacaccccccaccgaggaagagcgggagaaagggcccagaagaggccacaaggaagaagcagcagcgccaaggaccc

SEQ ID NO: 170496 - RNA, 77 nt, Homo sapiens
cagggcccacccccaagagagccgcagccgccagggacgggggccaccggacaggcccccgcggggaggcagagccc

SEQ ID NO: 170497 - RNA, 84 nt, Homo sapiens
aggccaggccgacacccaggcagggccaggggggacgaggcagggggggcagcgaccgagcaccaggaaacccaccagagaagg

SEQ ID NO: 170498 - RNA, 76 nt, Homo sapiens
cgccgcagggccccacccaggagcgcgccaggagggaaaaccccgaccaaaagaagcaggacacaggagaagcgag

SEQ ID NO: 170499 - RNA, 53 nt, Homo sapiens
cgcgagccccaggcccagcggccgccagggacccagagacccaggcagcaggg

SEQ ID NO: 170500 - RNA, 69 nt, Homo sapiens
acccgcccagcccccgagagcaggaacagggagaagacaacacgaagaagaccacgacagggcaggcag

SEQ ID NO: 170501 - RNA, 81 nt, Homo sapiens
gcccggggggagacagccacgggaagagggcaccaacaaagcgccagccagcgggcagacgccacggcacgagaaggcacc

SEQ ID NO: 170502 - RNA, 72 nt, Homo sapiens
cagcgcggcggggagcgacgagcgccggagacccaggcccaaggaaaaaagagaaaacacacacagcaggca

SEQ ID NO: 170503 - RNA, 75 nt, Homo sapiens
cgccaagggcggccccgaggaagcaaggccgcggggggagaccccaccaccggacaccacgggaagcgaggcccc

SEQ ID NO: 170504 - RNA, 65 nt, Homo sapiens
cagaacggaacaggccggcggccccaccccccagacggagccaccaccaccccgagagacggacc

SEQ ID NO: 170505 - RNA, 51 nt, Homo sapiens
cgggacagcccagaaaaaggaacaccaagaagaagagaggcacagaagcag

SEQ ID NO: 170506 - RNA, 78 nt, Homo sapiens
ggcgggaggagacggagcccggaggaagaaggagggcgaccgcaccagccccaccaggcggggaagagccaagaccca

SEQ ID NO: 170507 - RNA, 70 nt, Homo sapiens
aacacccacacagcaacaaggaaaaaaagggcagagaaggggacgagacggcaggaccaacggggcagga

SEQ ID NO: 170508 - RNA, 80 nt, Homo sapiens
gcagaacaccgacaacggcggagagaccccgcggcgggcgcacaccacgccggccccgagacagcagcaagaggggacga

SEQ ID NO: 170509 - RNA, 83 nt, Homo sapiens
ccccgaacagcacccccagcagccaccagcaggaacaggccgagagcagccagaagacaaagaggggaagacacagaaccaac

SEQ ID NO: 170510 - RNA, 62 nt, Homo sapiens
acgcaagccacaggccaccgccggaaccgcgggcccgaaggagggacgaggccacagcagaa

SEQ ID NO: 170511 - RNA, 70 nt, Homo sapiens
gcccgacccgccggacccaaagcccagacccaggaacaaggagacaagacccggccgccggcaaccaacg

SEQ ID NO: 170512 - RNA, 55 nt, Homo sapiens
ggcggaccccgcggcgggaggagccgccccgagaccagggcgaaggaagaacagg

SEQ ID NO: 170513 - RNA, 73 nt, Homo sapiens
ccgaaagagaacaaagaacgaagggaagcgcagaaaggaaaacaaaggagcacaggaggggaacagggaggaa

SEQ ID NO: 170514 - RNA, 54 nt, Homo sapiens
ggccagaaggaccggcggacacgagacacaaaaacagacgggaagccaaggaag

SEQ ID NO: 170515 - RNA, 57 nt, Homo sapiens
gaggggcccggcggcggggaggccccagccgggggcccgccgcaaaagcagaggaac

SEQ ID NO: 170516 - RNA, 84 nt, Homo sapiens
acagggacaagccccggaacacaaccggacagcaaaccagccagcacgggggcccagccagccagcagcgaggggggacggagg

SEQ ID NO: 170517 - RNA, 74 nt, Homo sapiens
gagcagaacaaacggccaagaagggccaccccacagacgggccggagcgagggagagcaggaacacagagagga

SEQ ID NO: 170518 - RNA, 72 nt, Homo sapiens
agaggaggccgcaagccagcgaaaccaagaaccagacccaaaagagcaaacaaccgacggagaaggaaaaaa

SEQ ID NO: 170519 - RNA, 73 nt, Homo sapiens
ggccgacccgccagaggaggccccccagccacggaaacgggacaagaaaaccagaaacgggggcccgacaaga

SEQ ID NO: 170520 - RNA, 72 nt, Homo sapiens
aggccgagaaacagagagaaaagagacggagcaagagaacgcaagagacggcgaccggcccgaggaccgccg

SEQ ID NO: 170521 - RNA, 68 nt, Homo sapiens
gcggaagaccgccaaaaaggacacggagccagccacccgccaagaagaagggaccacgaggaagcaaa

SEQ ID NO: 170522 - RNA, 74 nt, Homo sapiens
cggaggggaccgacgccggcagaacacgcgcgggaccccgggcacggcgcgcgggagggccaagcagcccagcc

SEQ ID NO: 170523 - RNA, 77 nt, Homo sapiens
gagaaagagcccggagggcaggcagagagaaagcaagaagcccccgaggaggagagcaaggcgaagagaaggaaaag

SEQ ID NO: 170524 - RNA, 100 nt, Homo sapiens
gccgcggcgacccggaggaaccggcccgcgcccgcccccgggagcccgcacgggcgcagagacaaggaagggaagcggagaaaaggagcaaaaaacaacc

SEQ ID NO: 170525 - RNA, 71 nt, Homo sapiens
cagcaccggaagcccaccggaaaagagagagagcagccaggacacggccaaggccggcgagaacgcccgcg

SEQ ID NO: 170526 - RNA, 83 nt, Homo sapiens
cagaaccaccgggagacagcggccgaagcaccgacaaggcaagaacacaagagcgcacagccggggaagcccagggaggacaa

SEQ ID NO: 170527 - RNA, 68 nt, Homo sapiens
agcgcgaaacgcacgagaaggggcggcgaagccaaccacagcccggagagagacgagagaaccaaacc

SEQ ID NO: 170528 - RNA, 80 nt, Homo sapiens
gcggcggcggcggcggaggagagccgcagagcgcgcagaccccgggggacgaacggaagggccccgaaaaggagcccacg

SEQ ID NO: 170529 - RNA, 69 nt, Homo sapiens
aacgagcccaaccccgccagaagcggagagccagcaggcgcaaacggcacagcacagacagggacccga

SEQ ID NO: 170530 - RNA, 76 nt, Homo sapiens
caaccagaacaaaacagacccagggaggaggaggagaggaaaaagccgagaaccagccaaaacacacgaacaggga

SEQ ID NO: 170531 - RNA, 71 nt, Homo sapiens
cagcggccaccaagggaagagcaaccaggacacagaaaaaagcgcgcggaggcaggccagcagcaagaaac

SEQ ID NO: 170532 - RNA, 57 nt, Homo sapiens
aaaaacaacaccaaaaagccgcaggggcaaggggcagacagaagccacagcaggcca

SEQ ID NO: 170533 - RNA, 74 nt, Homo sapiens
gaggcaaacaacaaggggagcccgccgacacagccaccaagaaggcacaagcagaacgggaaaaggggcggaaa

SEQ ID NO: 170534 - RNA, 40 nt, Homo sapiens
cccaagaaaacccgaggaacggcacaaaaccacaacaagc

SEQ ID NO: 170535 - RNA, 58 nt, Homo sapiens
cccccccagcgagcaagaagaagaaccccggggaggggggggccgcccgcccaaggca

SEQ ID NO: 170536 - RNA, 75 nt, Homo sapiens
aggccccccggaagcgagagacacggcggcagccccagggcggcggcagcacaggagcggaccagcccggggaga

SEQ ID NO: 170537 - RNA, 59 nt, Homo sapiens
caccaaacccccaccgcaagagccaaaaccaggccaaccgcacgcaacgccagaaaaaa

SEQ ID NO: 170538 - RNA, 83 nt, Homo sapiens
ccgcgcgccgccggcgaaggaggaggcggccgggcgggggagcgggaggagccagagcacaccgcaccacggccacaggcgcc

SEQ ID NO: 170539 - RNA, 54 nt, Homo sapiens
cggagaggaccacacaaccgagcagcacaggacgaacgaaccacggcaacagcc

SEQ ID NO: 170540 - RNA, 41 nt, Homo sapiens
gaacaggcgccgccaccacgcccagacggagcgccgcgccc

SEQ ID NO: 170541 - RNA, 74 nt, Homo sapiens
ggccgagaaacagagagaaaagagacggagcaagagaacgcaagagacgaaggccgggacagcagaaaacagcc

SEQ ID NO: 170542 - RNA, 69 nt, Homo sapiens
gcccagcgagaccgaggaaggaccagccagcaagaccgagcgacagaagaagggcaccaaaaagcaaca

SEQ ID NO: 170543 - RNA, 70 nt, Homo sapiens
cccaaacgcacaagcaaaaccacccacagaggcaagcgccccaagggcgaagcaagcccagcggagggac

SEQ ID NO: 170544 - RNA, 84 nt, Homo sapiens
caaacgggggggcggccggggccgccaccacacgaaacagggcaaggacgcggcccagagaccccccacgggaacggaagcaac

SEQ ID NO: 170545 - RNA, 84 nt, Homo sapiens
gcaccggccccccccacccgacggaacccggggaggcggaaggccccccagcccccggagagcagcagcccgccggcgaggcag

SEQ ID NO: 170546 - RNA, 78 nt, Homo sapiens
gccgcccgggcacgcgaggaacccagcagccggcggacgaacccagcggggccgccccacccgaggcccaccccaacg

SEQ ID NO: 170547 - RNA, 72 nt, Homo sapiens
cacaccacagcacgcggccgggccacacagcacccggccacgaccagagagggcagaggagccgccgcaccc

SEQ ID NO: 170548 - RNA, 36 nt, Homo sapiens
ccagcccagaagagaggacaggaacaagcagaaagc

SEQ ID NO: 170549 - RNA, 68 nt, Homo sapiens
gaaccccggccacagaaaaagagaccgagaagagagagcccagagacagcgcgaaacgacgaaagaag

SEQ ID NO: 170550 - RNA, 84 nt, Homo sapiens
ccaggagcgccgcggccgccgcagccagaccgggagcgaggaggcgcaaggacccccgcgccagagcggggcccggcgcaccca

SEQ ID NO: 170551 - RNA, 75 nt, Homo sapiens
ggaagcggaagcagcaaaagcaaggcaggccaaaaacaggacagccaggaaggcaggaacagaccaacccccggc

SEQ ID NO: 170552 - RNA, 84 nt, Homo sapiens
gaacacggacaccaacgagcgaagcagaacaggaaacccaggcccaacggcaggggagcaagaagaaagccccaaaacgaccca

SEQ ID NO: 170553 - RNA, 70 nt, Homo sapiens
cagcaagcccaggcacggcccggcaagggcgggggagaagaaaggaccaggcgggcccgagacaagcggc

SEQ ID NO: 170554 - RNA, 76 nt, Homo sapiens
cacacgcgaaccaggccccagacagcgcaaggcgcacagaggaagggagaaggccccgaagacaaggagcaacagg

SEQ ID NO: 170555 - RNA, 68 nt, Homo sapiens
cccagaacacaacagggcaaaggccccgacaggacaccaacaggaaaaggaagccagagacacgagga

SEQ ID NO: 170556 - RNA, 110 nt, Homo sapiens
ggaagaccccgaaggaaaaggaggaacgccggcccgagaaagcccgccagcaggcacgcagcacgggggcaggggccgacccagaacgccagcgccgcaaggaaaaaaac

SEQ ID NO: 170557 - RNA, 68 nt, Homo sapiens
ggacaccccggcgccgccgcacgcggacacgcgggccggaaggcgcgagcagcaagcccagagcccgg

SEQ ID NO: 170558 - RNA, 74 nt, Homo sapiens
cagagaaaagaaaacaagaacgcaaggagaagcccacagaggaacacaaaaaacaggcgacggggaaacaccag

SEQ ID NO: 170559 - RNA, 80 nt, Homo sapiens
cgcgcccggcggcggcgggagcccaggagccgccccgcccggggacgaagagcgcagcccccggcggaaagcaccgcaag

SEQ ID NO: 170560 - RNA, 84 nt, Homo sapiens
aaaaccaacgccggccggagcagcagcccgagggcacgccagggccgacgaccaccccacggccacggggcgaaggaggaaggc

SEQ ID NO: 170561 - RNA, 77 nt, Homo sapiens
cccgggggcgcccgcgggaagaacccagaacgggcggccagcggcgagcgcacggggggaccgcggggggcgccagg

SEQ ID NO: 170562 - RNA, 87 nt, Homo sapiens
gcacggaggcggcccgcccggaaggcaagcgcagcaacaacagagagcacggcagggccggaaagagggcgggcccgcacggagcgc

SEQ ID NO: 170563 - RNA, 70 nt, Homo sapiens
ccagcagcggggaacagaggccgaaagagagggagaaagcccagaggcaggcaaagcaacagaaacagaa

SEQ ID NO: 170564 - RNA, 40 nt, Homo sapiens
gcgcaggccaaagggacccaggagaagaggagccggacgg

SEQ ID NO: 170565 - RNA, 102 nt, Homo sapiens
agaggagagaaggcagcaggccagggcagcagcaagggcgacagccggcagaagacccgcgaacggacacacacaaacgcagaacagaaacaggagcggaga

SEQ ID NO: 170566 - RNA, 82 nt, Homo sapiens
gcacaggaagcagcagaaggcccaacgggcaaccaagacggccacgaagaaccaaaagaaaagagaaaaaaaaaacacaaag

SEQ ID NO: 170567 - RNA, 83 nt, Homo sapiens
ggcgaccagcaggaggaaaaaaaagaaggagccaagaggaccgggaaaggagcaaagcaccagcagaaccacgcggggaaaag

SEQ ID NO: 170568 - RNA, 57 nt, Homo sapiens
ggacgcgcacgagggacggggaaagagagggccgaggcagacaagggaaaggccgcg

SEQ ID NO: 170569 - RNA, 59 nt, Homo sapiens
cgaggccccccagacagggaacgcgcagcagcaggaaaacccagagccacaggagagaa

SEQ ID NO: 170570 - RNA, 61 nt, Homo sapiens
ccccagccaggcacgaacagaaaaagccagggcacccccgagaggacaacaggcacggaag

SEQ ID NO: 170571 - RNA, 79 nt, Homo sapiens
ccgccacaacgcggcagcgccggcgcccaagccaagcacgggaacacagcacccacccacacccacacccgcgacggga

SEQ ID NO: 170572 - RNA, 77 nt, Homo sapiens
cgcgcacccccggccggaggcaccagcggccaaaaaggggggacgcgggcgagaagccgggcagcggaaggaacacc

SEQ ID NO: 170573 - RNA, 76 nt, Homo sapiens
gaagcagagggggggggccagcgacccggggccgagaagacacggagcagagagaacgggacacgcggaaggcagc

SEQ ID NO: 170574 - RNA, 73 nt, Homo sapiens
cagagaaggcggccgcgcagacccagaagcagccaaaggagcaggacagagacaggcccagggaaggcccccc

SEQ ID NO: 170575 - RNA, 59 nt, Homo sapiens
gggaagagagccccccaacagccaaccacggagcaggacccaggcagaggaggccggag

SEQ ID NO: 170576 - RNA, 70 nt, Homo sapiens
cacaagccgggaagggagcaccgagaggcagacaagacacccgcagggaaggagaaacaacaagaaaacg

SEQ ID NO: 170577 - RNA, 59 nt, Homo sapiens
ggggagccccgcgccacagggaaaagcacagggccaggaagcagagggacagccaggcc

SEQ ID NO: 170578 - RNA, 73 nt, Homo sapiens
ccgcagcaggacaaaccgaagagaacgaaaggaccccgccgcagcaagagagagcaaggagcaggcgcagagc

SEQ ID NO: 170579 - RNA, 79 nt, Homo sapiens
cgaagacgcgcggagaaagagaccaccgaggacgccagaaagagggcaacggccgacgaacaccgcccaacgcagccgc

SEQ ID NO: 170580 - RNA, 82 nt, Homo sapiens
cacagagcacaagccccccaacagaggaagagagggagagcccgcgcagaggagacggacggcggcgggagggggaggaaga

SEQ ID NO: 170581 - RNA, 72 nt, Homo sapiens
gaaggacaagggccaggagaagcagagagcagcgcacaggagggcccgaacggcaccaccgggggcccccac

SEQ ID NO: 170582 - RNA, 90 nt, Homo sapiens
gaccaaccggggaaacccagacgccacagcaccgcgaccacaaaaggaagaagccccagcggccagagcacgacgagcccagggcgagga

SEQ ID NO: 170583 - RNA, 68 nt, Homo sapiens
gcagccagaccaagaacaaccgcggacacggagaggaaggacacagccccgaagcgaaagagagccaa

SEQ ID NO: 170584 - RNA, 40 nt, Homo sapiens
gccgaccaaaagaccacggggacagagcacaggaaaggga

SEQ ID NO: 170585 - RNA, 87 nt, Homo sapiens
aggacaaaaaccaggcagcaacagcggggggggaagaggaggaggcgcccgacacgacaaaccacgcccaaacggagaaaacccagg

SEQ ID NO: 170586 - RNA, 86 nt, Homo sapiens
ccgagaaaaagcagaagaccagcgaaacggaaaagaaaagcgaaccaagaaacagccaagaagggaaaggacgaggaagagaagag

SEQ ID NO: 170587 - RNA, 73 nt, Homo sapiens
ccacaagaacaccagaggcacgacaaggaggccccgggggcagaccccaggaggacacccaaaagagacagac

SEQ ID NO: 170588 - RNA, 83 nt, Homo sapiens
cgccgcgcggagcgcccccgcgccccgcaccagagcggggcaccgagccgggaagccaggagggaagcccagaagacgcacaa

SEQ ID NO: 170589 - RNA, 53 nt, Homo sapiens
caggagaacgggacacgaaggaaaacaagggaccccaacccggggcagaagag

SEQ ID NO: 170590 - RNA, 59 nt, Homo sapiens
gcgaacccgaggcaaccggaggcggaacacagaaacgccccgggccagccgccaaggcc

SEQ ID NO: 170591 - RNA, 83 nt, Homo sapiens
acgccaccaccgcagccgccgagggccaggacgccaagagccaggagcaggggcgcggcagaggcgcggacgagcagcgcagg

SEQ ID NO: 170592 - RNA, 73 nt, Homo sapiens
aggagacagagacggccgcagaagccagggacccaaacccacaggcgaaaccaagccaaggccaccgagccac

SEQ ID NO: 170593 - RNA, 75 nt, Homo sapiens
cgcgaaccccggccgcgacgacccagagcacgggcccccggacgcgagcccgcccccgagcagggaaagcgcaag

SEQ ID NO: 170594 - RNA, 81 nt, Homo sapiens
cgcacgccccagacccccgggccgaaggagaccaaggagcggacggcacaccgcgaagagaggagcgggaaggccccgcac

SEQ ID NO: 170595 - RNA, 107 nt, Homo sapiens
gaccaaccagggcacagaggaggagaaaaaagcccagccgaagaggaaaaacacggcgagagggccacaggccaggcaaccaaacccggcccaaggaccccgccagc

SEQ ID NO: 170596 - RNA, 77 nt, Homo sapiens
cgcccccgccaccccacaccggagacagcccagagcaagcacacggaggcccgggagccagaccgggagcccgcccc

SEQ ID NO: 170597 - RNA, 83 nt, Homo sapiens
ccggcgcacgcccccgagaaggccggagagaccgggggccgcgacacacaccagcccccgcaaccagcgacaaacccgaaggc

SEQ ID NO: 170598 - RNA, 70 nt, Homo sapiens
gggcccccaggcaggcagccggcgaacaagaggcgccagcgggcgcgccggaagaacagcgccacgccac

SEQ ID NO: 170599 - RNA, 72 nt, Homo sapiens
cgcaagaaacaggagaccacaaagccccggcacaaagcgcaggaacggaccaaggcggaaccagacagccgg

SEQ ID NO: 170600 - RNA, 60 nt, Homo sapiens
agcgaaaaggccgcaagccaagaaaagaaggagggagagaaaccaaacgaccacaggaaa

SEQ ID NO: 170601 - RNA, 112 nt, Homo sapiens
cagggagcaagaggcagacagaccgagacgggcaaccaacaagaaacagacacaccgcacagaggcggccccaggggggaccaacaagggagaaccaacagaacaaccggag

SEQ ID NO: 170602 - RNA, 76 nt, Homo sapiens
ccaacccacacccaccaagaccacacgaaaacgcaaaccaaccaggaacgacaaagcccaggaagacgacgaaccg

SEQ ID NO: 170603 - RNA, 68 nt, Homo sapiens
ggaagcaagcacgggccacccacaaacggacggcccccccaccggccggacggcagcagccaccacag

SEQ ID NO: 170604 - RNA, 76 nt, Homo sapiens
gccggaaccgcgcaggccgcccccagaaccgcccaaccgcacggcacccaaacgaggaaagaaccaaggaagacac

SEQ ID NO: 170605 - RNA, 79 nt, Homo sapiens
caccgccaaagcaaaaacggagcaaagaagaaggagcgagcgcagcggcaaccccaaaaaaaaaaaagaagccagaaag

SEQ ID NO: 170606 - RNA, 36 nt, Homo sapiens
cccagggaacggcggcacaaccaaggccggcccccg

SEQ ID NO: 170607 - RNA, 53 nt, Homo sapiens
agaaggaccaagaaccagggcggcgacggcggcgcgaggaccgaccgggcccg

SEQ ID NO: 170608 - RNA, 69 nt, Homo sapiens
ccgagagccgcccgggccagcggccgcgcacccccggccggaggcaccagccccgaaaacgcggcgaac

SEQ ID NO: 170609 - RNA, 73 nt, Homo sapiens
gcaccagcaggcaaggggcacgagagacaaacccgagagcaaaacaaccagccggaaccggacagcacaagcc

SEQ ID NO: 170610 - RNA, 119 nt, Homo sapiens
cccggccagcgcggcgcgcgcgcccgccgccccgcccacgaggagcacagccgggccgcgcgaagggggaagaaggaggccggggaggaagagagcaggggggcgccaggcacccgaga

SEQ ID NO: 170611 - RNA, 56 nt, Homo sapiens
ccggcaccaggaccaccgcggcagcacgcggcgaagacaaacagaccccagaaaga

SEQ ID NO: 170612 - RNA, 83 nt, Homo sapiens
cgacagcgcggggcgggcaccaaggccgaagcacccggccacaacacagcagcccccaggagagcaggaaaagccggagaagc

SEQ ID NO: 170613 - RNA, 75 nt, Homo sapiens
acagaaaccccccacaggaaaggagggaagccagaggccaaaggcaggagaacgcgcgagacggggacagacacc

SEQ ID NO: 170614 - RNA, 77 nt, Homo sapiens
gcgggagccggcacaagcgaacagagcacgcggaccagggccacagagccgaacacagcagagggggacaagcccac

SEQ ID NO: 170615 - RNA, 89 nt, Homo sapiens
aggggaggacgaggggacggggcggggggcgcccaaaccgggcagcaggaccgacaagagcggaaccccaacaccccagccagagccga

SEQ ID NO: 170616 - RNA, 83 nt, Homo sapiens
ggacacccagcggcgacacgcgacgcgccaaaacccgcccggaaaggggacaccggacccaaagacaggaccacgcaccagca

SEQ ID NO: 170617 - RNA, 69 nt, Homo sapiens
gacgaccaggaagaacggagcacgacagaaacacagccgcagacgacaagcaaggaagagaaaaaacga

SEQ ID NO: 170618 - RNA, 82 nt, Homo sapiens
acggaaccaaaaccaacgacaagaggggaaaaccgaccaaccaacgaggaaaccgaagaaccagccccggggacgaaagaga

SEQ ID NO: 170619 - RNA, 61 nt, Homo sapiens
agaccccaacagcaaaccggggcccccccaggacacaggagcaagcaaaccagccggcggg

SEQ ID NO: 170620 - RNA, 62 nt, Homo sapiens
ggaccagaccggaacgcccaagccccaccgcgaggcagaaacgaggcgaccgagcagacaga

SEQ ID NO: 170621 - RNA, 81 nt, Homo sapiens
ccgagcccaccagacaccggccagcacgagaccagggagacccaccagacagcggaccagcgcgcaggaagcgggcaaaaa

SEQ ID NO: 170622 - RNA, 82 nt, Homo sapiens
ccagcggccagagcgcagcgaaacccgaagcgacagcgccgcgaagcaccaggcgccggaagaccccggcgggcagagcaaa

SEQ ID NO: 170623 - RNA, 98 nt, Homo sapiens
ccgagggagcgccaggagggaacccgaagcgggcgcgcgcacggcaggacggaggaggagggacagacgagagacaacagaaacaggcaacagaggcc

SEQ ID NO: 170624 - RNA, 82 nt, Homo sapiens
aggccgagacaccgcagcgccgccgccgccaccgagccgccgcgaaaaacgggccgagaaagcgagcgaaaagaagaacaga

SEQ ID NO: 170625 - RNA, 91 nt, Homo sapiens
cgccagagagcgacccggggggagcgcggggcgacgcggcgcagggacccgggacagcggagagcacacgcacaggagagggcgcaagaag

SEQ ID NO: 170626 - RNA, 55 nt, Homo sapiens
gaaaaggcaagaaggaacggaaggcacaacagcgcagcagcagaagcgcagaggg

SEQ ID NO: 170627 - RNA, 72 nt, Homo sapiens
gcaggaacaagcagccgccgacccgagggaacacggacgccgcaggagggccaagaggccgacgcggaaaca

SEQ ID NO: 170628 - RNA, 92 nt, Homo sapiens
agcgcagcacacagccgaccgaggaagggcagcaaacacacacgacaaagagccccccccgacccacacaagcggacaaagcacaagggcga

SEQ ID NO: 170629 - RNA, 73 nt, Homo sapiens
gaaccagaccagcaaggaaaggacacccccaacaaggcaccagcccagccacagccagcccagacccagagga

SEQ ID NO: 170630 - RNA, 73 nt, Homo sapiens
cacggaggcgcgcggagaaagcggacaccgcgcgggccgccacccgaagaacagaggcacacgaaaacccaac

SEQ ID NO: 170631 - RNA, 80 nt, Homo sapiens
caacaaacaaccggagggaggaggaaagaacccagggaccaagcgaaacgcaaacggaacccaccccaaaaagaaagaac

SEQ ID NO: 170632 - RNA, 84 nt, Homo sapiens
gagccgagcccccgccgcgccagggccagaacgaccgagggcacggccgaggaccgccgaccaggaacagcgaacgggacccag

SEQ ID NO: 170633 - RNA, 70 nt, Homo sapiens
aaggcagcaagagagcacaggagccaaccgaaccgaagcagccacaaaaagccacgaacaggaagagaag

SEQ ID NO: 170634 - RNA, 71 nt, Homo sapiens
agaaaggcccaccggccgggagggcccagggcggggcccgagaagccgaggccgccagcgccaagaaaaaa

SEQ ID NO: 170635 - RNA, 78 nt, Homo sapiens
cagacgaccggacggaaaggcaacagcaaggcagagagcagagacggcagagaggacggggacgggccccaggacgag

SEQ ID NO: 170636 - RNA, 57 nt, Homo sapiens
ccgggccccgcgcacagccccagcgcagaccgaaacaaggaccccccgggagaagaa

SEQ ID NO: 170637 - RNA, 75 nt, Homo sapiens
acaaccccagcagaaaggcaacaggcagagaaccaagcagacaccaagaggagccagcagagcggcagcgccacg

SEQ ID NO: 170638 - RNA, 79 nt, Homo sapiens
ccgaggcccaggacagccaggcaccagcaccaagaaaacagacaagcaagcagagacacacagcaaaagccaacacaca

SEQ ID NO: 170639 - RNA, 76 nt, Homo sapiens
ccagaggccagccgccgggccaggcccacggagaggccaagccgcgacgcacccgggggcgcggcaagaccgcaac

SEQ ID NO: 170640 - RNA, 65 nt, Homo sapiens
cagagcaaggaggccccagcggaccgaacaggagcgagaacccgagcagcgccagagcaacacac

SEQ ID NO: 170641 - RNA, 76 nt, Homo sapiens
cgccaggccgagccacagcaaagagggagggcgacaccgccagaaggcgcaccgcagcaggcaggaggcaagcgga

SEQ ID NO: 170642 - RNA, 60 nt, Homo sapiens
gaggaaacggagggcgcggcagccggaggaagcggagccggacaagacgcggacggagcc

SEQ ID NO: 170643 - RNA, 76 nt, Homo sapiens
ccagcgccgggcagcgaaccagaaaagacgagaaagcacaggggaggagagagaggaccaccaggcaaccaaagcc

SEQ ID NO: 170644 - RNA, 82 nt, Homo sapiens
gcggagccggggcgcgcgcgcggcacgcgccgcgggacccgaggcgagccaagcagccagccggcccggccggacgaaagaa

SEQ ID NO: 170645 - RNA, 82 nt, Homo sapiens
acaggacgaaggcggcgaaggcgagcgccgcgggggggaagggccaggagggcggagcgaaggccaagagggggcaccgggg

SEQ ID NO: 170646 - RNA, 61 nt, Homo sapiens
acgccgcgcagcggccgccaagagggcaaggcggagaccgacgacccggaggggacccggc

SEQ ID NO: 170647 - RNA, 74 nt, Homo sapiens
cagacgacacaacccgggcgcgcaccgccggccaggaggagagcgcaccaccaaaaaggcaaacacaccagccc

SEQ ID NO: 170648 - RNA, 84 nt, Homo sapiens
gccagccccagagagaaaagcccagaaaccccgaaggccaccgccaccacccccagcccggccaccaccagcagacgagaccac

SEQ ID NO: 170649 - RNA, 82 nt, Homo sapiens
ggaagaggagcgcgccccggggaaagagacaacgaagaaaggagcacaaaagaacaaacacacgagccaaaagcacaaacaa

SEQ ID NO: 170650 - RNA, 71 nt, Homo sapiens
gaacaaagcacaagcagggacacacggacaccagaagaaacgaagccgcgcgaagcgcggaggccaaagaa

SEQ ID NO: 170651 - RNA, 77 nt, Homo sapiens
ccagcaaaaggagagaggaaaaacggaacaagcacccacagagcacgccagcacgcaggcaggaggaagcgggcaaa

SEQ ID NO: 170652 - RNA, 78 nt, Homo sapiens
aaaccagaacgacacgaaggcacccacccgcgaaacccgaaccaaagaccccccgaggacgggccagaccggaggccc

SEQ ID NO: 170653 - RNA, 100 nt, Homo sapiens
gagacacagagaaacacacagacccgagaaacgggaacgagcacagggggaagggggacgcgccaaggcgcagagaacaccgagcggagcaaggagaagc

SEQ ID NO: 170654 - RNA, 74 nt, Homo sapiens
agaaaacccaccgagacggccacagacaacggaggggggggaagacaacccggagaacacccaggggacgccca

SEQ ID NO: 170655 - RNA, 64 nt, Homo sapiens
aggaaaggggggagagacaagcaagcaggacagcaacccccgcacgggacggaccagaagcggc

SEQ ID NO: 170656 - RNA, 82 nt, Homo sapiens
gggacagcccgcgcccagacaggaagcacgcaagcggcgagggacccagcacccgagggacccgaggagcccaccaagccga

SEQ ID NO: 170657 - RNA, 75 nt, Homo sapiens
cggagaacccggagcagacgcccgacagagacgagggggcccagacgccaccgagagacccgcaaggagcaacca

SEQ ID NO: 170658 - RNA, 81 nt, Homo sapiens
cggcgagcgcagcgcgaccgggaggcccagccacgagagaagaaagaaaaagaaaccgccagcccagagacacgaaaggga

SEQ ID NO: 170659 - RNA, 42 nt, Homo sapiens
aaccacgagacggccccaaggaagaaaggaaaggcacggagc

SEQ ID NO: 170660 - RNA, 72 nt, Homo sapiens
agccagcccccgcagagcccccagggacaccagcgggaaagagagcaagacagagaagcgcggggaaccagg

SEQ ID NO: 170661 - RNA, 78 nt, Homo sapiens
ggaaaaacagaacagcgcccgcgaaagcaaacccccggggcgcccaagagcgcaggggaacgcaacgccagagaacgg

SEQ ID NO: 170662 - RNA, 68 nt, Homo sapiens
agccagcacaaacggacagaagaaagggacagcaaagaggaaaggacagggcggagagaaaggacgag

SEQ ID NO: 170663 - RNA, 80 nt, Homo sapiens
cggggccgcgcgcccgccccggccgcaggcacagaacacaccagaggcggaccaagaccccaggaagccccggggcaggc

SEQ ID NO: 170664 - RNA, 86 nt, Homo sapiens
gcggaaaggaaagcccgacagaagcaccgagacccaagaaagcaccaggacaaaagaagggcagcacaaaggaaagccccaaaccc

SEQ ID NO: 170665 - RNA, 36 nt, Homo sapiens
agcaacgcgggaagagaagggagcggcaggggaggc

SEQ ID NO: 170666 - RNA, 87 nt, Homo sapiens
gaagccgaggaaagcggaagcggccggcaggggaaggacgaggaagggaaaaggccgaggcacagcgggaagaccgcaaagacgacc

SEQ ID NO: 170667 - RNA, 65 nt, Homo sapiens
cccagaagcagcagacggcacacgcagcagaagcccggaaaaccggaaggcgaaacagcgcgccg

SEQ ID NO: 170668 - RNA, 74 nt, Homo sapiens
agggagaacacagaaacccgccccggaaccaggaagagcgagacagagagaagcaggcggaccacgaacaaaga

SEQ ID NO: 170669 - RNA, 38 nt, Homo sapiens
gggcaaccccaccgacggccagagcacaaagacagggg

SEQ ID NO: 170670 - RNA, 88 nt, Homo sapiens
aggcaggccaggcggacgccggggagacagcgcaaggccggggacagcggcgccccaccgcacgggcagacacccaaaggacggcggg

SEQ ID NO: 170671 - RNA, 82 nt, Homo sapiens
ccgcagcccgccgggagccgaccgaggcgcccgcggggcggggaccgccgcccgggggcggagaacggaaaagcaccaggaa

SEQ ID NO: 170672 - RNA, 82 nt, Homo sapiens
acggacacccacagcggggcggcggcggcggcggcgcggcccaaaaggggaccacggacggccacgcagccccgaggcgcgc

SEQ ID NO: 170673 - RNA, 38 nt, Homo sapiens
ccgacagccgcagaacggccaggcaggaggggaggaca

SEQ ID NO: 170674 - RNA, 71 nt, Homo sapiens
aggcaacagaggagcaacaaggagcgcggaacccaaggaaaggacggcggagccgggaaggaaccccaagg

SEQ ID NO: 170675 - RNA, 97 nt, Homo sapiens
gcggaccgacacaagacccccgaggagacagaggccgcggcagcaacgggacaaggagggcaagaccccagaagaggggcagccagacgccagaggg

SEQ ID NO: 170676 - RNA, 80 nt, Homo sapiens
aagggccccgccacagggaaaacagcgccagcagcccgggggcgacgacgaggaccaggagccaggggcgggggaacgag

SEQ ID NO: 170677 - RNA, 70 nt, Homo sapiens
cgagaagagcgcgaggaggaagacgaacgaacagccagaagaaaagggcagggcggagaacggaaaagca

SEQ ID NO: 170678 - RNA, 63 nt, Homo sapiens
caacgccccgcagccccccacagacgaggacggcagcaacaacgaaacaacggacccaccgaa

SEQ ID NO: 170679 - RNA, 64 nt, Homo sapiens
aaagcaagagaggcaggccaccagccaaagaggcgagagcagagcaacggcagaacaagaacag

SEQ ID NO: 170680 - RNA, 89 nt, Homo sapiens
caacagccaagagggcgcccagagacaacgagagaacggaccccgagagccccccgccccaaacgaagaagcgaaagcggcccggacgc

SEQ ID NO: 170681 - RNA, 78 nt, Homo sapiens
ccccggccgcaacgcccagaagcagaaagaccaggggaggggccccacccccgaagacgagccccggcagaaccccga

SEQ ID NO: 170682 - RNA, 59 nt, Homo sapiens
gcccccggcacaggcagcggaggagcccgaccgacccggaggcaggggaagcacaaaag

SEQ ID NO: 170683 - RNA, 76 nt, Homo sapiens
cccaggacaacgaaaggccagcaccagggacagaaagaaggaaaaaacgcaagaaggaagaaagagagaaagcaag

SEQ ID NO: 170684 - RNA, 75 nt, Homo sapiens
ggccggagagaggaaaccacccaaaacgcgcagggcgcacgggaccgccgccccagcggggggggcccaaacgcc

SEQ ID NO: 170685 - RNA, 85 nt, Homo sapiens
acaaacaggcgccaggagaggcgaaaaagcaagcaacgcgagcacaggaaaacgggaagaaggaaaacccccgaagacaaggagg

SEQ ID NO: 170686 - RNA, 80 nt, Homo sapiens
cgcagcagaggcaagaaaaaggccagacaggcacaacgaccgaaacgcgggcaagcaggagagcgcaacacgaaggcgga

SEQ ID NO: 170687 - RNA, 75 nt, Homo sapiens
acgacccagcagccagagagccagccgggggagcacccagaacagcagcaaggcaagaaaggcaagggaaaaagg

SEQ ID NO: 170688 - RNA, 83 nt, Homo sapiens
ggcccgaagagggaagacacgcggaaacagccacacaggcccacagcacagaacccggcgggcgacacaggccagggcgacgg

SEQ ID NO: 170689 - RNA, 75 nt, Homo sapiens
acggaggacgcagcaacagaggagcggccacgaaaacgagagcggaagaccaccaaaagcaggaaaacgagacgg

SEQ ID NO: 170690 - RNA, 76 nt, Homo sapiens
gcacgacccaccgcaacaccaccaacccaccgagggacaaacggagaagccaacggggagcaaggaacccggagcg

SEQ ID NO: 170691 - RNA, 74 nt, Homo sapiens
gcgaaagcggaacgagcgagaaaagccgacgcaagagggaaagcggagcacagccccagcgggaaaggacagaa

SEQ ID NO: 170692 - RNA, 84 nt, Homo sapiens
cggcgacagccaggcccggaagcgagggcggccgcgccggcccagggcccaccgcaccggacgacgggggacacagaacgcaag

SEQ ID NO: 170693 - RNA, 76 nt, Homo sapiens
ccgggaaccggccccggcaaacaggaagacaggaccaccggcgaggcggacacagccccgcaaccgaaccccccaa

SEQ ID NO: 170694 - RNA, 60 nt, Homo sapiens
ggggacggggccgcagggagaacagagagaagggcgggagaaaccaaggaaagagaaaag

SEQ ID NO: 170695 - RNA, 73 nt, Homo sapiens
cagaaagcaggggaccacagggagcaggcccagggcaaaacagaaacgaacaccgccgagcgcagcgagaagg

SEQ ID NO: 170696 - RNA, 74 nt, Homo sapiens
gccccagcgccaccgccgaccgaagccgcaaaaggaagaccaaagcaagggaggagaagccagccccgcggcgg

SEQ ID NO: 170697 - RNA, 80 nt, Homo sapiens
ccgacagagaacaccaagaaggaccagcaaagagggaggggacaccagggacacaccaaaaaggaagaaaagaaaagggc

SEQ ID NO: 170698 - RNA, 72 nt, Homo sapiens
ccccagcaaaccaggcagccaccccggcaggaccgcgcgcgaagaccgagaaggggccgcaaggccaggcgc

SEQ ID NO: 170699 - RNA, 81 nt, Homo sapiens
ccaaaagccaccagcaggggcgacaacagcacagcgcacaagagaaggagaggcacaaacaaaacagaccgaagaagagaa

SEQ ID NO: 170700 - RNA, 69 nt, Homo sapiens
cgggacgggcggacgcgcgaggaccagaggagcgagagcagcaagaaccacacccagcagcaagcagcg

SEQ ID NO: 170701 - RNA, 62 nt, Homo sapiens
cgggaccccagggcagcgaagcaggggacaccagcagcgccgccggaccaccgggcagcaga

SEQ ID NO: 170702 - RNA, 54 nt, Homo sapiens
ggacgggggcacgaagcagggccgacacaagcccgcagcgccccacaggaagcc

SEQ ID NO: 170703 - RNA, 78 nt, Homo sapiens
gaaaaccagagaagggaaacgacacgagcaaaaacgggggaagacagacggagaaggaacccggccgggcggagcagc

SEQ ID NO: 170704 - RNA, 80 nt, Homo sapiens
gcaaggagaggcccagcaaacaaaggcaggaagagaaaaggaagggaccacagaccagcacgccggcgccacgaaccgag

SEQ ID NO: 170705 - RNA, 79 nt, Homo sapiens
cccagaccccaccggagaagagcagaagggggcgcggggaggaggaccgaaggagaagaaggagaaggggaggagaagg

SEQ ID NO: 170706 - RNA, 78 nt, Homo sapiens
cgccgagggcgaccagacaacgccagcaagaacgaggaggacgcgggggcggacaggaccaccaggaacaaagagaaa

SEQ ID NO: 170707 - RNA, 76 nt, Homo sapiens
ggcgcgcggcgcgagccgcagccggcccgccgacaagcagaccggaagaccgacggaagaccacaccccgagggag

SEQ ID NO: 170708 - RNA, 85 nt, Homo sapiens
gggcgcagccgcggcgcggggcgcccggcaccgccaacgcgagccaagccccaaggcacccacagccagcaggcaggaaaggcac

SEQ ID NO: 170709 - RNA, 62 nt, Homo sapiens
acaaggacagaagaagagccaggaccaaagacagaggagaaccgggccagccccccacccac

SEQ ID NO: 170710 - RNA, 68 nt, Homo sapiens
gaaaagagcacccccacgagggagccgagggcggagcggagacgaccgaggcaacaaacaaggaggaa

SEQ ID NO: 170711 - RNA, 69 nt, Homo sapiens
gaggacacgggagagccgaaccagaagagaaagccgggcaggcggcacacaggaaggggccccagaagc

SEQ ID NO: 170712 - RNA, 58 nt, Homo sapiens
aaagaacacggcaacgaaaagcgacagccaacgggggcagcagcaggaaggaaaagaa

SEQ ID NO: 170713 - RNA, 74 nt, Homo sapiens
gagagcgcaggacgagggaccacagagcccaccacacagcaggccaggacgcgaagggaggagcaaaccggccc

SEQ ID NO: 170714 - RNA, 77 nt, Homo sapiens
caaccgccgcgaaacccaagccgccgcgaggagcggcgcgggccccccccaccgcggaggaagaagacagaagagcc

SEQ ID NO: 170715 - RNA, 102 nt, Homo sapiens
cccagagggagaaggagacagccacggagcacaccaggaaaagacaagagcgagcaagccgccgcagcaagccagagaccaaagccacagcaagacaagggg

SEQ ID NO: 170716 - RNA, 79 nt, Homo sapiens
gggagcacaggcggagcagcaaagggacccagggccggcacgggcagcgagcagccacccggaggagggcgcccgggcc

SEQ ID NO: 170717 - RNA, 71 nt, Homo sapiens
acccaggcgacgcccaccaagacggggcaccaagggcgcaggaaagcacgcacaggcaccacgagaaggac

SEQ ID NO: 170718 - RNA, 84 nt, Homo sapiens
gccccaagcccgaggcccagaggaggagaacgacgccgcggccggaagagggcgccggggcggacccggaacggcagcgcaccc

SEQ ID NO: 170719 - RNA, 85 nt, Homo sapiens
agaaagaccaggcacaggcggcgcgccgggagacgagcagggaaaagccaccgaccacacgccacaaacccaccgcaagcgccac

SEQ ID NO: 170720 - RNA, 70 nt, Homo sapiens
gcagcccccagagcggaacacagaaagcacagcccagggaagccgggagggggcaggagccgcgagaaag

SEQ ID NO: 170721 - RNA, 78 nt, Homo sapiens
ccgggcggcaagcaccagcagggaaggagaagagagcaaggacacagaagaaagcccaagaggacacagcaagaaggg

SEQ ID NO: 170722 - RNA, 70 nt, Homo sapiens
cagaagaggagagagagcaagagaggaagaagaacgacccgcccggggcagcagcaacgacgacaaagga

SEQ ID NO: 170723 - RNA, 74 nt, Homo sapiens
gcacccaaggccaagaaggcggacgacagccgaggaaaagcaacggcgcaagaggcggggcgggcagaggacac

SEQ ID NO: 170724 - RNA, 62 nt, Homo sapiens
gccagaacacagagacagcagcccaggcaaagaaaggccgccaggccaaggacccaggcgca

SEQ ID NO: 170725 - RNA, 73 nt, Homo sapiens
cgacccagagagaccaggcggcggaagagagccgggcccgccgggcgaagccgaacagcaaggaaaaacagag

SEQ ID NO: 170726 - RNA, 69 nt, Homo sapiens
gcgcggacaacaccaggaaaagacagagggcaagaaggagagacacagcgccggaaccggagagaccgc

SEQ ID NO: 170727 - RNA, 58 nt, Homo sapiens
gaagacgaacaaacagcaagaaagaccacaagaccaccaacagaagcgcccccccccc

SEQ ID NO: 170728 - RNA, 60 nt, Homo sapiens
agacacaaaggacggaggcacggccccaccgaggcaccaccaaccaaagcggcaacccga

SEQ ID NO: 170729 - RNA, 71 nt, Homo sapiens
ggaggccacccagaaccgacaaagagacagagggaagaaacagacgcggagagaagagagacccggcaaac

SEQ ID NO: 170730 - RNA, 77 nt, Homo sapiens
acccccgggccaagacgcagcacaggaagaccaacaaacagcagcaacaccacccaagagccacacgaaggcaaaaa

SEQ ID NO: 170731 - RNA, 81 nt, Homo sapiens
agggccaacaggcgaagggaggcccaacccgacacgagccaagcaagcagaagaaaaaaggaaagcggcagacagagggca

SEQ ID NO: 170732 - RNA, 75 nt, Homo sapiens
cccagggacagagcagccaaaacggcacgggaggggagagagaaccggcacaccggagcaacccagaacacagcg

SEQ ID NO: 170733 - RNA, 77 nt, Homo sapiens
aacaagggagaaagacaacaccacgaagccgcaaacccagcggcggagaaaccaccacaaacacgaggccagcaacg

SEQ ID NO: 170734 - RNA, 60 nt, Homo sapiens
agaaaggacagggagagaagccaagaaagacaggggagccgccaccaaaagcagacggaa

SEQ ID NO: 170735 - RNA, 61 nt, Homo sapiens
gggccagggaacgcggacgcaacacaggccgcagacccagaaacgacagaaacccgagcgg

SEQ ID NO: 170736 - RNA, 73 nt, Homo sapiens
gcgcccgacgccccgcgggaccccccgccggaccccacagcaacaagaggagaagcgcggcgaggagaccacc

SEQ ID NO: 170737 - RNA, 77 nt, Homo sapiens
ggagacacccgagcgcaagacgggccgcaccgaaacccaacggaaaagacaggaaaccaaaccagagagagaaaccg

SEQ ID NO: 170738 - RNA, 82 nt, Homo sapiens
ccgcccacagcgcggcgcggccgagagccgcggcccggcggaaaggacagcagcaacccacaggcgcaccgaggagaccaca

SEQ ID NO: 170739 - RNA, 80 nt, Homo sapiens
ggcgggcgggccggcagagcagcaccccacaggacaacccgaggagccaccagaaagagcgaggccggaaccaccgcagg

SEQ ID NO: 170740 - RNA, 83 nt, Homo sapiens
gcgaggagccccgagaagcaagaggggacggaaagagagccgcagcgcagaacaagggaaaaaagggcaaaaagggcaaaaaa

SEQ ID NO: 170741 - RNA, 69 nt, Homo sapiens
gaaaccgcccccagaacacaacagggcaaaggccccgacagcaaaacaagcacgacagggaagacccag

SEQ ID NO: 170742 - RNA, 75 nt, Homo sapiens
gaaaagcagcaagaaagaaaaaaccaggaccggaaaagaaggagggacgaagagagccaggaggcagagcaacag

SEQ ID NO: 170743 - RNA, 67 nt, Homo sapiens
cgccccaccgccgacgcccccagccaccagacagggccggcagcaggcgaggcaggcgcaacacagc

SEQ ID NO: 170744 - RNA, 73 nt, Homo sapiens
cccgggcggaagacgcaggagcaaagagagcgggccacacccaaaaccggacaggcagggcaagaagacacca

SEQ ID NO: 170745 - RNA, 41 nt, Homo sapiens
gcgcaaccacgagacggccccaagcggaggcacccaccacg

SEQ ID NO: 170746 - RNA, 56 nt, Homo sapiens
ggccaagacgaccggggagacgggcgcaggccagaggaaggggaggcaagcagggg

SEQ ID NO: 170747 - RNA, 67 nt, Homo sapiens
ggagaaggcccgcccacagggcgcggcgcccagacggaacagggccgacaagcacgcagcccgaacc

SEQ ID NO: 170748 - RNA, 57 nt, Homo sapiens
caaaggcagcgcggcagggcgagggaaaaagcgggaggaggcgggccagaacacgac

SEQ ID NO: 170749 - RNA, 72 nt, Homo sapiens
cggggagggaagcgcgaccaggaacgccggaaagaaaaggacaaaggaagggccggaaagaacccaaggaag

SEQ ID NO: 170750 - RNA, 77 nt, Homo sapiens
ggcgaccgagggaagaccacaaccacgaccacaaaccggcggagccacaggcccgaaaagaaagcgaacacacaaaa

SEQ ID NO: 170751 - RNA, 86 nt, Homo sapiens
acccggccccggacggagcgccggccgcaccaccgccccggccggcccaccggcagaaaagacaccagccagcgcagggagcggaa

SEQ ID NO: 170752 - RNA, 61 nt, Homo sapiens
gggaccgcggaagggaaggaaaaaccgagggaaccaccgggagaaaaagaacaccgcagag

SEQ ID NO: 170753 - RNA, 55 nt, Homo sapiens
caagagcgcggaacaggacgccccgaaacccgccacccccacccggcgccccgcg

SEQ ID NO: 170754 - RNA, 78 nt, Homo sapiens
cacacacaaggccacaaacccagaaggccggggcagaaagaaaaaagagggcccggggccgaggcaggaggacacaga

SEQ ID NO: 170755 - RNA, 43 nt, Homo sapiens
ggcgagaacgaccccgagacgccggaaccaaaaagaagcccca

SEQ ID NO: 170756 - RNA, 54 nt, Homo sapiens
ggacagcgcaggcagcagcggcggagaaaccaccacaaacacgaggccagcaac

SEQ ID NO: 170757 - RNA, 75 nt, Homo sapiens
cacaggcccacaagacgaagagggaaagcccacccaaaacaacagaacagaaccacaggccgcagaccaagaaga

SEQ ID NO: 170758 - RNA, 54 nt, Homo sapiens
gaaaaccccgacccgcaacaaccaaggcccagccggcacaaagagagacccgaa

SEQ ID NO: 170759 - RNA, 72 nt, Homo sapiens
agagggggagcccccagccagaagagggaggagccaagccgccaggccaccacagcccggggagcccacagc

SEQ ID NO: 170760 - RNA, 76 nt, Homo sapiens
ggcgcgcaggagccaagccagagaagcaaaagaaacaaggcaagacggaagcaagaagaaaagcaacaacccaggg

SEQ ID NO: 170761 - RNA, 71 nt, Homo sapiens
cagaagaccagaggcagagaccagcacaaggaaagcaggcagagaggagacaagagaagagcaaggcaagg

SEQ ID NO: 170762 - RNA, 57 nt, Homo sapiens
ccccgcccacagagcagccccccagaacagaaagaggcgagcgaagaccaaccgagg

SEQ ID NO: 170763 - RNA, 73 nt, Homo sapiens
ggcaggagcgcggggaccccaaggcacccggaaaggcagcggacagaaaggaagaacagaagaccgaaacaaa

SEQ ID NO: 170764 - RNA, 54 nt, Homo sapiens
gaagccggagaaaagacccggccgagggggaacagaggagcagcggcagaaaaa

SEQ ID NO: 170765 - RNA, 77 nt, Homo sapiens
aagaacagagacaaaggaccaaagaaacgccaagggaccacggaacagcgcaagaaaacaagcagaaaacaagaaga

SEQ ID NO: 170766 - RNA, 59 nt, Homo sapiens
ggagcaggaaaaacacagagacagacggcggcaggaagccagcgcgacgcgaagaacac

SEQ ID NO: 170767 - RNA, 65 nt, Homo sapiens
gacggggaaccaagcgcaacaggaacgacgaaccaaaaaccaaaacgcacgcaaggcgcaaaagg

SEQ ID NO: 170768 - RNA, 82 nt, Homo sapiens
agaccgggaagcaaaagaagagcgccacccccaacacaggccaccagaccaaggagaacagaagcgcgccaggcgccagcaa

SEQ ID NO: 170769 - RNA, 75 nt, Homo sapiens
ccgagcagccaagcaaggccgggcgaaagcacaagagagaaacaacgaagcaagcccaagggcgcaggggcaaca

SEQ ID NO: 170770 - RNA, 88 nt, Homo sapiens
ccagaaaccagcagaaccgcgggacaagaacagggccacagaaggaggcccgaccaacccagagaagagcagcaccaaagaaacagag

SEQ ID NO: 170771 - RNA, 55 nt, Homo sapiens
acggccaaccaggggaccaccagaaggggacgaaaaaagaacccggaagagagac

SEQ ID NO: 170772 - RNA, 57 nt, Homo sapiens
caaggagagaagaaccaaagaagcaaaacacgagagaggagcgggaaggccccgcac

SEQ ID NO: 170773 - RNA, 72 nt, Homo sapiens
aagggccccgaaaggaaggagcacaagccaaggacgcaggcccaaaaaaacaggaacacagaaagccaaaca

SEQ ID NO: 170774 - RNA, 77 nt, Homo sapiens
agcggcagcaacccaacccagagaggaagagacgaggaggaaagcggaaagagaccgacaccaacagaaagggagaa

SEQ ID NO: 170775 - RNA, 69 nt, Homo sapiens
ggggaaggagcccagcgacccccgcgcaggggaaaccgcccccaaaggccagaggacgacaacagcaac

SEQ ID NO: 170776 - RNA, 77 nt, Homo sapiens
cccgccgcacaaccagcccccccaagaccaggcgccagggcgagggcggcagaccccaacagaaaagagcacagcgg

SEQ ID NO: 170777 - RNA, 73 nt, Homo sapiens
gggcgcgccggaaaccggagcgcgcagcagaccaacgggagccgcaaggacaacagccgcggccagacagcgg

SEQ ID NO: 170778 - RNA, 78 nt, Homo sapiens
aaaaaacagaacaggaggggagagggcaggaaccaccgcccaaagggaaagggagcagcaccggccacacccacagca

SEQ ID NO: 170779 - RNA, 73 nt, Homo sapiens
cagaagccggggacccgacggacacaacggcagaccgcagaacacccagccaggggggagccacggaccaggg

SEQ ID NO: 170780 - RNA, 79 nt, Homo sapiens
agcggcaccacccccagcaccaccccagccccgcgcccggcgcaaggcaagcacaaaccacagcaccgagagcggcccg

SEQ ID NO: 170781 - RNA, 72 nt, Homo sapiens
cgaaacgaaaaacaaccaacgggaagagccagaagggacagagcgcggaagggacggacgaggaacaggacg

SEQ ID NO: 170782 - RNA, 61 nt, Homo sapiens
gggacggaacaacgacagagaaggggggcagaaagaagaggaggacaacaagccaacagag

SEQ ID NO: 170783 - RNA, 93 nt, Homo sapiens
agacagcaggaagaggggagggaggcagcccacaccggggaaagacggggcgaggacgggaccaagggaacggaagccccagcccgcgcgagc

SEQ ID NO: 170784 - RNA, 85 nt, Homo sapiens
gggcacaacggcaaaggcagaccaacaagaggacccaggagaaacgccccaaagagacgcaggcagaaggaaagggcgcagaccg

SEQ ID NO: 170785 - RNA, 63 nt, Homo sapiens
ccgcacagacccaacaggccagacaggagcgaagggcaagggcccagcccgcgccccaacagg

SEQ ID NO: 170786 - RNA, 72 nt, Homo sapiens
cgcgcgcagcgccgcggcccaagaagagaaaggagcggacaacaaagaagggcccggaacccaggacaccgc

SEQ ID NO: 170787 - RNA, 81 nt, Homo sapiens
cagagcggcgaacacgccgacagggcaaagccaaagcaagagccaccgacagaaaagcacgccagaagaagaccagaccga

SEQ ID NO: 170788 - RNA, 54 nt, Homo sapiens
cggacccgcaccgcagcggcagaagcccccggggagagacagacagagggacac

SEQ ID NO: 170789 - RNA, 80 nt, Homo sapiens
cgcccgcgagccgccggccgggagggaccgggccgaagggaagacacaggaagcgccgaggaaggaaaccagcccagaac

SEQ ID NO: 170790 - RNA, 38 nt, Homo sapiens
aaccccaagcgcccaaagaagcacaaggacaacagcag

SEQ ID NO: 170791 - RNA, 73 nt, Homo sapiens
cccaaaccaaggggcaaaggaaggcggccgaggggcaaagggaagagggaaaggaagggagggcaggaaggcc

SEQ ID NO: 170792 - RNA, 76 nt, Homo sapiens
ccgccccccgagcccgcccccgaggcgcagaagggagagacggaaagcagaagacgggcccagccgggaacgcagc

SEQ ID NO: 170793 - RNA, 70 nt, Homo sapiens
ggagaagagaaagagacgcagaagacgggacagggaggagaagagaaaagcaacgggaagaagaagaaac

SEQ ID NO: 170794 - RNA, 73 nt, Homo sapiens
ggcgcacggcggccgcggcgcggcgccacgacaacaggcacaaagagagaaggaacacccacagggcagacag

SEQ ID NO: 170795 - RNA, 72 nt, Homo sapiens
ggaaagaaggcaaaacacgggaagcggaagaaagaagagccaagaagggaagaaaacaagaaaaagaaggca

SEQ ID NO: 170796 - RNA, 80 nt, Homo sapiens
aaaagaggcaaagagacaggggcaaagccccacaagggacggcccccgaggcagcccgacgggaggcacaacaagcgacg

SEQ ID NO: 170797 - RNA, 79 nt, Homo sapiens
caccgacccgacgcgccggcccacgcgcggccaagggcggaaaacaccccaaaagccaaaagggaaaggaaaagaccaa

SEQ ID NO: 170798 - RNA, 94 nt, Homo sapiens
acgggaccaggcgaagcggccgagcaggcgagcgaacgacggacccaaagacaggaccacgcaccagcagagaaggaaagcaaaccgaagcagg

SEQ ID NO: 170799 - RNA, 78 nt, Homo sapiens
ccagaggaaaaaccacaggaggagacacgagagcccggaagcaggaagaggagggcaggcacgcagccagcagcagcg

SEQ ID NO: 170800 - RNA, 50 nt, Homo sapiens
gcagcgcggagacgagaagaggagccaggaggagagaacaagaaaagcgc

SEQ ID NO: 170801 - RNA, 57 nt, Homo sapiens
ccggccaggaaacacccccggcgcgagcccggccaacgcaacagggagcccacgcaa

SEQ ID NO: 170802 - RNA, 67 nt, Homo sapiens
gaaccgcgacggcggcagggccgggagggcccgaacccaaagcacagcaacgaaaagaccccagcgg

SEQ ID NO: 170803 - RNA, 77 nt, Homo sapiens
gcggggaaaggcgcgagacccagaggccgcgcggcagcggagagccgcccgaccaaccggcacggaaccccagagaa

SEQ ID NO: 170804 - RNA, 72 nt, Homo sapiens
caaccgggaaagcccggggcaggagcagcaaggcgaaccggcgcggagcggccgggccacaggaggaccggg

SEQ ID NO: 170805 - RNA, 71 nt, Homo sapiens
ccgcccccgcagccccgacaaggacagccagcaggggcagaagcagcagacggaacgagggcaaagaaggc

SEQ ID NO: 170806 - RNA, 73 nt, Homo sapiens
gaagccgggaagcagacccacgcagccggagcgaagaacaccacagggacgccagggcaccacgccagcacga

SEQ ID NO: 170807 - RNA, 72 nt, Homo sapiens
caaaccggagaggggaaggagcaaacagccaggccacgcgcagagcgaacaccaccgcgaagacgcagccac

SEQ ID NO: 170808 - RNA, 42 nt, Homo sapiens
gggaaggagagaagaaccaggagcaggaggagaagaaacccc

SEQ ID NO: 170809 - RNA, 37 nt, Homo sapiens
cagaggagcgaaagagagaggacgaagaaaccgaaca

SEQ ID NO: 170810 - RNA, 68 nt, Homo sapiens
cgaccacagggccccaggcacggaccagagaaaaagcaccccaggcacgggaacggaggccacgagca

SEQ ID NO: 170811 - RNA, 58 nt, Homo sapiens
aagaaacacaaaagcaaaagagagccaaaaagggaagaaaagcagaccccgaaaggac

SEQ ID NO: 170812 - RNA, 70 nt, Homo sapiens
ggaaccacgagggaaggagagcagcaaaaacaaggcgcgcgaacacaaaggcgcgagggaccaacaaaga

SEQ ID NO: 170813 - RNA, 70 nt, Homo sapiens
agagggcaaccaacggacaagacaaaaacaaagacggaaaacaggacagaagacaaacagaccccagaaa

SEQ ID NO: 170814 - RNA, 78 nt, Homo sapiens
gcgaggcagcgacaggacgggaacggcgggccaaggaaagcggagggagccccagaggacggccacagccagaaaaga

SEQ ID NO: 170815 - RNA, 77 nt, Homo sapiens
accaggcccagggccggcccccccaggacaacccagaggcaacaaaggcgagcccagagcaggggaccccaccggcg

SEQ ID NO: 170816 - RNA, 78 nt, Homo sapiens
gagggacagagcaccgacaacaggcaaccacagccagaggaaacgaggccagagaggaaaaaaggacaagacaaaagg

SEQ ID NO: 170817 - RNA, 73 nt, Homo sapiens
gaagaacagcgggaaagaaggcaaaacacggggaaacacaaagaagacaccagaagggccagcaccacgacaa

SEQ ID NO: 170818 - RNA, 53 nt, Homo sapiens
gcgcgccagcccaggaaaggcgccgaagagaccagaggacaagacaaagggag

SEQ ID NO: 170819 - RNA, 77 nt, Homo sapiens
cacgggccccagcagcccaggcagggcaacgcagaggggagcccagcacccggggcacaagagcggggagggccggg

SEQ ID NO: 170820 - RNA, 83 nt, Homo sapiens
gcagagagcagagagaggggccagagaacagaaacggcaaagggccggggacaccaggacccgagccccaaagacagaaaagc

SEQ ID NO: 170821 - RNA, 57 nt, Homo sapiens
cgggcggggaagcgcgccacagcaggcgggaaaggggagagccgacaaaagcaccag

SEQ ID NO: 170822 - RNA, 62 nt, Homo sapiens
ggaaaaaaagcggaagagcgccagcacggggccacacgcggacccggagggaccagacgggc

SEQ ID NO: 170823 - RNA, 49 nt, Homo sapiens
gccacgaccgggagaccgaagaccgcaggaaagcaggaaggcaagaaag

SEQ ID NO: 170824 - RNA, 72 nt, Homo sapiens
aaggcggaggaacgagacgcgaaccagcgaagcaaaccaacaccccccgggaacaagaaggcagcacacccc

SEQ ID NO: 170825 - RNA, 83 nt, Homo sapiens
cacaaagaggcggcccacgcagcagaaacgcggaggcgcgaggaagaacggcaaaacggaggagcagagcgaaacggaagaga

SEQ ID NO: 170826 - RNA, 69 nt, Homo sapiens
aaacccgacagcaaagggacagagcgaagaaccccccaagaagacgaaacccccgggccacaagaaggg

SEQ ID NO: 170827 - RNA, 83 nt, Homo sapiens
ccagagcaaggggaacgccacggacgggaccgagacaggggcccggcaccgcgcccgagcccacccacagacagaaggggagg

SEQ ID NO: 170828 - RNA, 69 nt, Homo sapiens
gccccaagccggaagaaccgcagccgagcggggccggccacagaaggagaagaagcaccagccgacgcg

SEQ ID NO: 170829 - RNA, 74 nt, Homo sapiens
gacaacgcggagcggcgaagagcaaccaggcacacaggccgaagaagccagggagcggagcgccagaaaagaca

SEQ ID NO: 170830 - RNA, 82 nt, Homo sapiens
ggacaacagaggaggggaacaggaggaggcgagccaggaagccacccacaagcggagacccccaggaggcgaaggggagccg

SEQ ID NO: 170831 - RNA, 59 nt, Homo sapiens
gccagaagcgcccaagaggccgaggaagaccggaaggccagagccgcccgcccaggcgg

SEQ ID NO: 170832 - RNA, 78 nt, Homo sapiens
gaacgggacagcggccaccaaaccaaccgcagagagacagagcaccacccagaaaagagcaaccccggccaccagccc

SEQ ID NO: 170833 - RNA, 56 nt, Homo sapiens
gccccccccggcgggcgccaggcagcagaccgggccagcgcagcgcacggcggcaa

SEQ ID NO: 170834 - RNA, 76 nt, Homo sapiens
aacccccaccaacaaacaaacacaagcccccccagaccaggccagggaacacccacggaagagaacgcccgagccc

SEQ ID NO: 170835 - RNA, 74 nt, Homo sapiens
cagccagaagaaggaccggaagcacacaacaggaaaacaaaagaggagaaaggggagcaggagaagaagagggg

SEQ ID NO: 170836 - RNA, 85 nt, Homo sapiens
ggagagacgcccagcagacggcccaagggggcacacaggagaagaaggagggagcagcagggggagcaccgccgagaaacgcgcg

SEQ ID NO: 170837 - RNA, 57 nt, Homo sapiens
gcggacgccggggagacgcaggcgagggggaaagcaggggagaaaagaaaagaaaga

SEQ ID NO: 170838 - RNA, 75 nt, Homo sapiens
aggacgcacaggagagcaacgccagaaaagaagagagccagcaggaacaagcaggaccaagcaagcacaggaaaa

SEQ ID NO: 170839 - RNA, 80 nt, Homo sapiens
ggccccccaggggcccccgcggcggccagaagggcacaagagacaagccccggcagaggcagcgcgagaaggggacgaac

SEQ ID NO: 170840 - RNA, 80 nt, Homo sapiens
aacgccgagcgcaccgacacgccgccaaagggggcacccgaggaggaagagggcagggcccacggaaagaagggaaaccc

SEQ ID NO: 170841 - RNA, 76 nt, Homo sapiens
gagcggagggcacaggcccaaacaagaaacaccaagcagggcagacccccaaagaacaaggccggggggggcacag

SEQ ID NO: 170842 - RNA, 48 nt, Homo sapiens
ggaagccgacagacaaccagcaacacccccagggagcgggggcggaaa

SEQ ID NO: 170843 - RNA, 62 nt, Homo sapiens
ggacccagcgcgggacagccagaggaggagagaaagaaagccagcgcaacgagagaaccagc

SEQ ID NO: 170844 - RNA, 68 nt, Homo sapiens
gacgcaccgcaggcagacaaaagggccaaagaagggagagaggcgagagcacagacaaaacaacaacc

SEQ ID NO: 170845 - RNA, 73 nt, Homo sapiens
ccagaaagaaaacgacgagaaccagagaggagacgacccccaagggcaggccacgaggacgacggggaaaagc

SEQ ID NO: 170846 - RNA, 53 nt, Homo sapiens
ccagggaggcaggggcagaaacagagaaggaacagcagcaagaaggaacgaca

SEQ ID NO: 170847 - RNA, 65 nt, Homo sapiens
cgaggagagcggaggaggggaccaaaccagacggcggaaaacggggacaccggaccggacccggg

SEQ ID NO: 170848 - RNA, 105 nt, Homo sapiens
agaggcaccgggacggaccgagaccggaccgagagcggaccgagagcgcgaaacgcacgagaagggggagcgggccggagagaagagaggggcgcgaggagaagg

SEQ ID NO: 170849 - RNA, 56 nt, Homo sapiens
aaaacgaaggcggcggaacccagacccaagaaccagaaccagccaagcggcaagaa

SEQ ID NO: 170850 - RNA, 69 nt, Homo sapiens
gagcaagaggcgaagcacggcacaagcaccccgcccaagagaaggaagaaaccaaacgaaacacaacga

SEQ ID NO: 170851 - RNA, 69 nt, Homo sapiens
gcccaccaacacccaggaagggcgcgccgcacgagcccagaagcggcacaaccagaaggagacccaaca

SEQ ID NO: 170852 - RNA, 109 nt, Homo sapiens
ccaccacggcaagaggagaaggcgaggccacagaaccagccacagcggggcggagagaccccgcgagcaagaaggggagaccgcccgcggcacgaggaaaccaaaagaa

SEQ ID NO: 170853 - RNA, 68 nt, Homo sapiens
gagaccagcagcgcagccagcgaacacccagccgcagcagcgaggaaaagaagggaggcaggcccaga

SEQ ID NO: 170854 - RNA, 77 nt, Homo sapiens
gcaagcgagcgcaagggcaagaccggggcacgggcagaaggggcagaccaacaccacccagcaaaaaccccgacgaa

SEQ ID NO: 170855 - RNA, 57 nt, Homo sapiens
accagaccgcaagccgacacacagcagcgcaggggagccaggcaggcaggaaacggg

SEQ ID NO: 170856 - RNA, 72 nt, Homo sapiens
gccacccagcccaccaaacacgccggaaaccccgcccacagcacgagcacagggaacaccagaggcgggacc

SEQ ID NO: 170857 - RNA, 70 nt, Homo sapiens
cgcagacaccaccagcagcgcaaggcgcccgccgccagcaaccacaaaagaagacccaaagcaccaacaa

SEQ ID NO: 170858 - RNA, 73 nt, Homo sapiens
ggaggggacgaagaacggaaggagcggagaacggaccacccagcagcccccacacaccaaccaccgacacccg

SEQ ID NO: 170859 - RNA, 86 nt, Homo sapiens
acgcaggaaccaaaacacaggccagacggggcagggaacaacgggcgaaagggcacacacggagggcgcggagcggggacgcaggc

SEQ ID NO: 170860 - RNA, 66 nt, Homo sapiens
caggcgaacggcgcgcagaagacaaccaagggcaaaggcagaaaccacgcaacccggagaccacaa

SEQ ID NO: 170861 - RNA, 82 nt, Homo sapiens
gcccgcccacccagggccggaaaagccaacgccggcgaaggacacaggaaagggaagcgcccaacaccacaaaacacgacaa

SEQ ID NO: 170862 - RNA, 85 nt, Homo sapiens
accaaacggagccaggaggaccaagaaccgggaacgcacaaccccagccacaagcacgggccagcgggaccaggccagcgcacac

SEQ ID NO: 170863 - RNA, 85 nt, Homo sapiens
aggaggaaccggagaccccgaaaacggaagcgcagggagaaggaagaggggaaaagggaagagaaggaacggggaccggccaaga

SEQ ID NO: 170864 - RNA, 80 nt, Homo sapiens
gcgcacgaggggaggccgcccagacgccagaacaccgaccccggcgcgcgacaccaaggaggaggaagcccggcggggcg

SEQ ID NO: 170865 - RNA, 67 nt, Homo sapiens
acaaacagccccgcgaccccgggcagagcgaaagcaacagagcacaacaagagcaaacggcgaaacc

SEQ ID NO: 170866 - RNA, 45 nt, Homo sapiens
ggacaagcgaggaagcaaggagggcaaagagaagcaacagcaaga

SEQ ID NO: 170867 - RNA, 78 nt, Homo sapiens
cggaacagcccaaagccggacggccccgcgccacagggccacacaccacgccggccaggcacaaagacagagccaagg

SEQ ID NO: 170868 - RNA, 86 nt, Homo sapiens
gacccaggcgcccccagagccaagcagcgcgaccggccgagcccgagggggcagcagcccccaggcagccccagggcagcagcagc

SEQ ID NO: 170869 - RNA, 72 nt, Homo sapiens
ccgcgacaccccacaacgcgcggagccgacacggaaggaggcagaaagggagccccaagagagagggccaag

SEQ ID NO: 170870 - RNA, 71 nt, Homo sapiens
ggaaagcacgcgcacagaggcagaacagcgaacaaccaccccccaaccacgggagcggaagacccggagga

SEQ ID NO: 170871 - RNA, 80 nt, Homo sapiens
ccccaaaagacgggggacgccggagacccccccccacagcaaagaaggccaagaagacgacacaaaaggagcaccgagcg

SEQ ID NO: 170872 - RNA, 82 nt, Homo sapiens
ggcgagacgcccggaccaggaagcggacgcgggacggaagcacacgcggcgccccaacagacaccgaggaccaaaaccaagg

SEQ ID NO: 170873 - RNA, 87 nt, Homo sapiens
ccgcaccaagccgcccacacgccaaccggccagaggacgagggaacgaaaagcccacaggcaagaagaagccagcagcagcaagaaa

SEQ ID NO: 170874 - RNA, 84 nt, Homo sapiens
gaagcagaaaccagaaacaaacgagaaaagaagagcacagaaggaggccaggaaaaaaaggcacagaacaaggcaccccagaga

SEQ ID NO: 170875 - RNA, 68 nt, Homo sapiens
acgcagagccaaaccacacagaccgcacagccaagaagacccaccaaaaggggagcgggagcacagac

SEQ ID NO: 170876 - RNA, 75 nt, Homo sapiens
ggccgagggcaggacccgcaggccagaccccgggagcccagccaccacagacaggcgcaaggaagaagagacgcc

SEQ ID NO: 170877 - RNA, 72 nt, Homo sapiens
gacccaagccgacaccacaacaaagaagaccacacacgggaaacacaaaacggggagcgagaccgaccaacc

SEQ ID NO: 170878 - RNA, 103 nt, Homo sapiens
gcgcgccagcgcgagaagggcgacacacgaggcgcaccagagaccggacccgccagggggcggaaccgaaggcccggaccgcaaagccgggaaggaagacaca

SEQ ID NO: 170879 - RNA, 78 nt, Homo sapiens
caaagagcagggggggcgacccagaggagagcccaaacagacgacgcaaaaagccagagacagagaacccaaacaaaa

SEQ ID NO: 170880 - RNA, 81 nt, Homo sapiens
gagacacgcgccggaagacagaacgggaaacggcgccacccagaagcagaaaaaaggcagcggaaagaagaaaagaaacgg

SEQ ID NO: 170881 - RNA, 36 nt, Homo sapiens
cacgggaccacccaccagaaccgaaggaagaagaga

SEQ ID NO: 170882 - RNA, 71 nt, Homo sapiens
cgaccagaaacaagcagaagagagcgcgagcagaaccgagaagcgccccagaaaggaagcaaggagggggg

SEQ ID NO: 170883 - RNA, 57 nt, Homo sapiens
cgaggcgacgcgaaaagcggaggagagaaagaacccacgcaggacgacagaagaggc

SEQ ID NO: 170884 - RNA, 78 nt, Homo sapiens
aagcgaggcaaaacccccaagcccccgggaaggaggagacgcgaaggaaagacccgcaggagcggaggaggcagaaga

SEQ ID NO: 170885 - RNA, 69 nt, Homo sapiens
ccaacaacagaccggggaccgcccagcagcccaggccgagacgaaaggcagagacaagcaccagcaaga

SEQ ID NO: 170886 - RNA, 77 nt, Homo sapiens
gcagagacggaggccacagacgaggacaagggccacccccaaccaggaccaaagacgaccaccaaagccagccccca

SEQ ID NO: 170887 - RNA, 48 nt, Homo sapiens
aagaggagggcccagaagaaaaaggagaagggccgggagacgaccacc

SEQ ID NO: 170888 - RNA, 80 nt, Homo sapiens
gaagggcaggcaagacccaccccgggaagaaagcaaacagcagcgcaccgcaaaggccccagggagccccgcgccaggca

SEQ ID NO: 170889 - RNA, 68 nt, Homo sapiens
aaacccagaaagggaaacgcagagacaagagaacaaggaacgggagcagaaaaacaaaggcgaagcgc

SEQ ID NO: 170890 - RNA, 81 nt, Homo sapiens
accgaccaccgaggcggagggggagaacacccagggcagcaggagcggagggcccccgcccaggggaaggacgaggacccg

SEQ ID NO: 170891 - RNA, 82 nt, Homo sapiens
agaggcgcaaacaagccaacccaggaggaaaaacggaagaaaaccagcaggcccaacccaagcagggcaaaaacccaggcgg

SEQ ID NO: 170892 - RNA, 98 nt, Homo sapiens
agcaacccacacggggggcgaagaagagcgccagacccacaggcaaaagggaaagcaaggggaagggcccaagaagacaccccaccagaaaccgaacg

SEQ ID NO: 170893 - RNA, 74 nt, Homo sapiens
caagccggacccgaagaccaggcccagccagcagagccacgccagagcaccggggacaccacaccacgacccga

SEQ ID NO: 170894 - RNA, 75 nt, Homo sapiens
acagaaccaaagcgaccccgaaaaaaagaggagcccgcaagaggccagcgaaaaccgaaggaagaccgcaggaaa

SEQ ID NO: 170895 - RNA, 72 nt, Homo sapiens
acgcgcgcgggcacccacggagccccggggcggcccgggcccgccggccacaccacacgcccccgccgccca

SEQ ID NO: 170896 - RNA, 64 nt, Homo sapiens
ccccaagacaccagggagcagggcgccagccggccagaggaggcgaacaggagcggaagacagc

SEQ ID NO: 170897 - RNA, 76 nt, Homo sapiens
gggcagcggagcggccgacagggagaaacgccacaccgggaaaggagggcccagaagccaagaggaagaccgaccg

SEQ ID NO: 170898 - RNA, 67 nt, Homo sapiens
gagcacagagaaagagaagagaagagaaaggcccggagacgggcccaccagggaggaagaggcaggc

SEQ ID NO: 170899 - RNA, 75 nt, Homo sapiens
cagcacacaaaacagcagaagaaagcagagaacgggaagggccacaccaccgccagcacaggaagacagaacccc

SEQ ID NO: 170900 - RNA, 84 nt, Homo sapiens
aaacccgggagacccgccgaaccgggagccggaccgggaccaggaccgggccccacccacaaagaaggccaagaagacgacaca

SEQ ID NO: 170901 - RNA, 69 nt, Homo sapiens
ggccgacccgcggagacagacaagacaagaccggcggggaagcggaggacagcaagacgacccgcaagc

SEQ ID NO: 170902 - RNA, 78 nt, Homo sapiens
acgaaggaaaaggaacaaagcaaggacaaacacccgggaagacacacacaaggaggcgggggaggagagaacagccac

SEQ ID NO: 170903 - RNA, 62 nt, Homo sapiens
cggaaaaccggcccccaacgacaaaaggcagaggggaggagacacgaagcgacgcagagcca

SEQ ID NO: 170904 - RNA, 76 nt, Homo sapiens
cagagcccaggaggggcgagaaacggagcccgcggaccccaacccgaggaggccagggggaaccgaccagaggaag

SEQ ID NO: 170905 - RNA, 77 nt, Homo sapiens
ccgcgagagcgccccagccgccgaccccaggccacgagcagaccgggacaccaccgggggagcagaggccgaccgga

SEQ ID NO: 170906 - RNA, 97 nt, Homo sapiens
ggggcccaagaagacacacaacccaggacacaagaaaccccacacggaagaacgaagaggaacgccacaaagcaggcgaacaagaacacaggaaaga

SEQ ID NO: 170907 - RNA, 73 nt, Homo sapiens
gacgcagcagcgcggacccggagcgacaagcgccccgacggagcgccaggacgcccccggcagggccaaggcc

SEQ ID NO: 170908 - RNA, 47 nt, Homo sapiens
gcgaggcgaaacgaagagacagaggccaccaaaaagaggaagcagcg

SEQ ID NO: 170909 - RNA, 82 nt, Homo sapiens
caccgcagcgaccacccacacaaacccgggacgggccgagagaacccaagaaggcagaagccagccccgcaggccgccaccc

SEQ ID NO: 170910 - RNA, 83 nt, Homo sapiens
cagacaacaggcgccaaaaaggagcaagaggcaggggagaaaaaccagaggcgaagaaaccgccggcaacacaaagccgagcc

SEQ ID NO: 170911 - RNA, 70 nt, Homo sapiens
cagggcaggacaccgacaggaacagggaccacgggggaacaagggggcgcaacagcccaggcagcacggc

SEQ ID NO: 170912 - RNA, 79 nt, Homo sapiens
gaggcgcaccagacgaaagcaaccaacgcagagcaccagaagcaaacgggaacgaggcgaggaaccaaaggccaccccg

SEQ ID NO: 170913 - RNA, 91 nt, Homo sapiens
cagccgcacacccgagccgcccgccgagcacaccagaaaaggacccaagggggcaaaggcggaaacagcagaggacaccaggagaggcggc

SEQ ID NO: 170914 - RNA, 74 nt, Homo sapiens
gcacagagcccgccgccgaccgccgcccgccacacccgccgccaggccccgggggcgccgagggcacaagggca

SEQ ID NO: 170915 - RNA, 67 nt, Homo sapiens
cggcaggggggagacgggccggaacacccggcgaaccagaggcagagaccacaagaaccaggagaga

SEQ ID NO: 170916 - RNA, 76 nt, Homo sapiens
ggggcaagagcgggggcgggaccccgccgcggcgggagggagggaacaaaaagaccccacggccgggcgacagaag

SEQ ID NO: 170917 - RNA, 82 nt, Homo sapiens
aggcaagggggggcacaaaagcaacacgggcgaaccgaccaagaacaacacccagagggccaggagaaggcgaagagagcag

SEQ ID NO: 170918 - RNA, 55 nt, Homo sapiens
agggggggcgcgccggaaaccggagcgcgcagcaggcccccgcggggaggcagag

SEQ ID NO: 170919 - RNA, 59 nt, Homo sapiens
aggccggggggccaggcccaccgccacggccagaacacaaagcggaaccggaagaaaag

SEQ ID NO: 170920 - RNA, 80 nt, Homo sapiens
agaccgcaaacggaagcggacgcgggaggacggcacaccgcggcgagacaggagacccccacaggaagaacagcaaaaca

SEQ ID NO: 170921 - RNA, 71 nt, Homo sapiens
agaagagagagagacagaagagcagcgcaacaacccgaaagccccaagagaaagggaaaaaacaaaaacac

SEQ ID NO: 170922 - RNA, 74 nt, Homo sapiens
cagaacacgcgccgcaaccaagccgacgagacggagaggaggcacacaccaacgcaagcccacagaagaggccc

SEQ ID NO: 170923 - RNA, 68 nt, Homo sapiens
ggacgccaagagggcaacaagcggcgaagagcccgaacaggaaggcacacaggcggagacccgaaaac

SEQ ID NO: 170924 - RNA, 70 nt, Homo sapiens
agagaccgcaaacgcagcgaagcccagaacagaagaacacaggccggaaccgggaaccgaaaacaaagca

SEQ ID NO: 170925 - RNA, 85 nt, Homo sapiens
cgggcgcagaggccacacccacagagaacccagacaacaggacgccgccaagcacccagccacaccccaccgcccagagaaggga

SEQ ID NO: 170926 - RNA, 76 nt, Homo sapiens
ccccgccccccccccgcgggcaccgaggacccgcccgcccagacccgacagaagcaaggggagacaggcgcccgcc

SEQ ID NO: 170927 - RNA, 76 nt, Homo sapiens
cacagcaacacggccgaaaccccaagcaccaccaccaccccggaaaccagccccacgacggcaggcgcacggaaca

SEQ ID NO: 170928 - RNA, 118 nt, Homo sapiens
gcagcgccgccggcggccaagcagccaaccagccaaccgggccccccagcagacgcgggcgaaccgaccaagaacaacacccagagggccaggagaaggcgaagagagcagcgaccaa

SEQ ID NO: 170929 - RNA, 60 nt, Homo sapiens
gagaggggacgccaaccgggcgggcagccgagcccgggggaggcgagcacgcaagcgaca

SEQ ID NO: 170930 - RNA, 90 nt, Homo sapiens
aagccaaccaagccaggcacacaggccccacaccccaccaaacccgaccagcggacccggccaacacacgcggaacccaggaaaccgcac

SEQ ID NO: 170931 - RNA, 56 nt, Homo sapiens
ggacgggaaccccgagagaagaggcgcggcagaggaagaagaaggcgcaaagcgcc

SEQ ID NO: 170932 - RNA, 56 nt, Homo sapiens
ggagccgcccccaacccaggccaagaccaagaccccaggagagggaacccccgcca

SEQ ID NO: 170933 - RNA, 73 nt, Homo sapiens
agagaggacgggagggcaacgagcacaacaggagcacgaggagggggaaccagaagaggccaaccagcacgaa

SEQ ID NO: 170934 - RNA, 47 nt, Homo sapiens
ggagaaaaggccaagaaggcaggaaaggccagcgccggagcgggggg

SEQ ID NO: 170935 - RNA, 72 nt, Homo sapiens
gggagcagagcccgaaagaacagcaagcagagaggcggaccccgcgggcgcgcggcccgaacccagcgagag

SEQ ID NO: 170936 - RNA, 78 nt, Homo sapiens
gcggccgggacggaggacgcgcagcgggaggccaccgccccaccagcaggcaacgccacagaccgccagcgccaggac

SEQ ID NO: 170937 - RNA, 64 nt, Homo sapiens
agcccaggaggccgagcgcgggaaagcagcgggacaggagacaaggcaaccgcgcccagaccgc

SEQ ID NO: 170938 - RNA, 68 nt, Homo sapiens
cgagcaaaaggaagcaacccagaagagcgaaggacccagcgaggagggaaccgaggaggcgcaaaggg

SEQ ID NO: 170939 - RNA, 101 nt, Homo sapiens
aggaggcaccgaggcggggccgcacaccggcgagccaaccgagccaggcgcaaaaagggggcacggaccacaacaggaaacacgcaacggcgcgggagggc

SEQ ID NO: 170940 - RNA, 67 nt, Homo sapiens
cccacaggccgccccaacaccagggaagagacacacccaggccaaacgccggcggacagcaagacag

SEQ ID NO: 170941 - RNA, 62 nt, Homo sapiens
gcccccggcccgcagcccccgccggccgcccaacaccgaacaccaggacaccccaaggcacc

SEQ ID NO: 170942 - RNA, 42 nt, Homo sapiens
ggagcacacggaggccggagaagaggccgaagaaggagcacg

SEQ ID NO: 170943 - RNA, 80 nt, Homo sapiens
ccggacaacaacacggaggcccaagaaagacgacacagcagccacaaaaccaagcgacagggcaacccaggaagaaaccc

SEQ ID NO: 170944 - RNA, 45 nt, Homo sapiens
ccgcgccgccgcgcgagaggaaggagggaagacagaaagcaagag

SEQ ID NO: 170945 - RNA, 83 nt, Homo sapiens
cgaggcaggcgaaccgggcaccgagagcaagaaaagggagcagaaccaaaaagcgccaagcagccagcgaaaacagcacaggc

SEQ ID NO: 170946 - RNA, 57 nt, Homo sapiens
gccagggggacacaggagagacagccagaaaacggcccaagggcaaagagaaccagg

SEQ ID NO: 170947 - RNA, 69 nt, Homo sapiens
ggaccgggaaacaaacccaagacccagcgcccgcggggagcccagacacggcgcaccccagacacccaa

SEQ ID NO: 170948 - RNA, 71 nt, Homo sapiens
gaggagagccgggggcgcgcgggggcaaccccaagcccagacagccgggggcggcccaagagcccccagaa

SEQ ID NO: 170949 - RNA, 69 nt, Homo sapiens
agaagcagagacaggaaaagggagagcccaggcaaacagcaaagaacagagacaggagaaaaaacaccc

SEQ ID NO: 170950 - RNA, 82 nt, Homo sapiens
ggagacaggcagggaagagagaccagaaaggacaggacggcggagcgagccaaggcagcaaggagacgacagccggagagcg

SEQ ID NO: 170951 - RNA, 77 nt, Homo sapiens
ggaaaaggagaggaaaccagaagggagaaggcgaagagcaaacggaaagaacccagagcgccaaaacaccagcacag

SEQ ID NO: 170952 - RNA, 77 nt, Homo sapiens
cagcggagcgagggaccgacaagagaaaaccagacaacccccaccccacaccgcacagaaaagccgcccaggcccag

SEQ ID NO: 170953 - RNA, 79 nt, Homo sapiens
ccggcgcaccccacaccgacaccacggaggaggcggccggaggacccgcgaccaaccccacacgcgacaagaaaaccaa

SEQ ID NO: 170954 - RNA, 84 nt, Homo sapiens
gggagggagacgcggcgaaacgccaggggacggcggaagggcgggcgaaggacagaaaacgggccccagacacaagccccacca

SEQ ID NO: 170955 - RNA, 67 nt, Homo sapiens
ggcaaggaggcaccgcggcagacgggaccacgaggcaacgccccaggaaaagcgacacaccaggcgc

SEQ ID NO: 170956 - RNA, 86 nt, Homo sapiens
cagcgccccggacgcagggagcccccaccaagccccagagcgggaggggcaggacggggcaggaaacggaacgccaagcgaagaag

SEQ ID NO: 170957 - RNA, 76 nt, Homo sapiens
aggagcgcacccagcgcaggacacggcagaaacagagacagaccaagcccgggagcgccccgagcggccaggaacg

SEQ ID NO: 170958 - RNA, 80 nt, Homo sapiens
agggcagggacggggaggaggagcccccgagaggaggcagacccccacaagacgacacccgacgcaaggccagcagagcc

SEQ ID NO: 170959 - RNA, 81 nt, Homo sapiens
caacccccgggaagccaagccgcagaccggcgcgagaaccgggagccacgcacccaaggcagacccagaaggccgaggcca

SEQ ID NO: 170960 - RNA, 70 nt, Homo sapiens
aaaggaacaacgggcaagaaaggaggacccaaaggccaaagacacaggaaccaggcaacgggggcacccg

SEQ ID NO: 170961 - RNA, 81 nt, Homo sapiens
ggccaggccgccgccgagccgagggaaagggagcagcaccggccacacccacagcacgaccggaacccagcgaccgacgcc

SEQ ID NO: 170962 - RNA, 76 nt, Homo sapiens
gaaacggacacagggcgcaacgagacacggagcagcccagcaagcccagagggacgaagggaaccccccagagcaa

SEQ ID NO: 170963 - RNA, 74 nt, Homo sapiens
aacaccagaacaaaaggcagggcggaccgccgggggccgaagggcaacacagcagaccggccagcgcggcgccc

SEQ ID NO: 170964 - RNA, 77 nt, Homo sapiens
gcaaacggaaacccccaggcaacccacacccgcagaacacaaccgcaacaaagcggaaggccaaagacagacgggcc

SEQ ID NO: 170965 - RNA, 80 nt, Homo sapiens
cgagagacaacagcagagacaggaaggcaagaacaacaagaaggagaaagacacaacgacagaagaaaaaacacaagaaa

SEQ ID NO: 170966 - RNA, 74 nt, Homo sapiens
aaggaaggaaaaaacacacaggaagaaaaaccggaggggaaacaaacaaagaaaggacacaggaacaaagaggc

SEQ ID NO: 170967 - RNA, 70 nt, Homo sapiens
acacaagaagaaaaacgaaccacgagcggaagcacaacgggaagaaagcaaaggggaaagaaaaaaacag

SEQ ID NO: 170968 - RNA, 38 nt, Homo sapiens
gcccggacggcacagggccgggcagaggagcagaaaag

SEQ ID NO: 170969 - RNA, 71 nt, Homo sapiens
acagaaacgcaccaccaagacagacgcccaaaggacggcacacgagggagcgaccacaaaagcgggaaagc

SEQ ID NO: 170970 - RNA, 70 nt, Homo sapiens
ggcggacccacaagccaccaaagccgcagacagacaaacggaagaggggccgcaaggccaggcgcgcaga

SEQ ID NO: 170971 - RNA, 65 nt, Homo sapiens
acaggagcgccaacgagacgacgggaccgaaggaccccgccagagacaaccgagcgccaggagag

SEQ ID NO: 170972 - RNA, 80 nt, Homo sapiens
ccgcgcgcgaggagaggagcgcaacagcagcaccaggggaaagcacaaggaagaagcggacggggaagagagaaagcaga

SEQ ID NO: 170973 - RNA, 79 nt, Homo sapiens
ggagcccccgcgcgcccggccggcccggagcaccgagccgcggcacggaggagcgagacgacgggaccgaaggaccccg

SEQ ID NO: 170974 - RNA, 72 nt, Homo sapiens
ggcgacgggaagcgaccgcaggcgggcccccgaccgacgggaacaaaggagaaagggcacgaagagagagga

SEQ ID NO: 170975 - RNA, 73 nt, Homo sapiens
aaccaaccccacaacaccgccggagacagccaaggagaaccgcagccagaagcaaagcagacagacgcgaaaa

SEQ ID NO: 170976 - RNA, 66 nt, Homo sapiens
aagacaagccccaaaagcagccgggaaaggagccggccggcggcaaagaccgccaccggcggacga

SEQ ID NO: 170977 - RNA, 77 nt, Homo sapiens
gcggagcagagggagccgcccccgcggggcgcccggagccggccagcgcaccaaccaggaacaggaggcccggaccc

SEQ ID NO: 170978 - RNA, 80 nt, Homo sapiens
gaacagcgggaacaacaagaaaagaaaaagaaaggaggaagcaaagaaaagaacaggacacagacacgaaaacacaaaga

SEQ ID NO: 170979 - RNA, 75 nt, Homo sapiens
agacgaaggaacagagcaagcagcagacccaacccccgcagacaaaagggagaggaacacaagcaagaaggccgg

SEQ ID NO: 170980 - RNA, 87 nt, Homo sapiens
agcgcgcaggcggacagcccccagaccggagaggaccgcacaccggagcccccaggcccgccgccagagggacaggagccaggccag

SEQ ID NO: 170981 - RNA, 100 nt, Homo sapiens
gacgaaaggaaccagacaagcaaagaaccaggacaaaaaggaagacggaggaaagaaagaagaagaaccacccccggagaccgagaacgggacagacacg

SEQ ID NO: 170982 - RNA, 75 nt, Homo sapiens
gaaacagggcacagcgaaggccaagcagaagaaccagcacaggcgaagccaaccaggcgcaaaggaacagcgggc

SEQ ID NO: 170983 - RNA, 50 nt, Homo sapiens
aagccgggccacaccaaagagcagagccaaacgacaccgccagaagcacc

SEQ ID NO: 170984 - RNA, 81 nt, Homo sapiens
gagggcaaccacaccacccagcccaaaaggaaaagagaaacccaccaggaccaagaacagaggggaacggcaacgacagaa

SEQ ID NO: 170985 - RNA, 88 nt, Homo sapiens
agcaggaaggcgcggagaccacgacgggggggaggcggcagcgcaaccacgagacggccccaaggcccgggaggagcggggacacgag

SEQ ID NO: 170986 - RNA, 76 nt, Homo sapiens
acacccgccggcaacgcggagggagccagccaggggcagccggccgggccccagaagagaagggagaagagccagg

SEQ ID NO: 170987 - RNA, 76 nt, Homo sapiens
ggcggccccgcagggcacaacacggagcacaagccccccagaagccccccgccccccccgcagcgcgcagagcccg

SEQ ID NO: 170988 - RNA, 51 nt, Homo sapiens
aggggaaccccggagaaaaggccaagaaggcagcacgcagccgggaacaag

SEQ ID NO: 170989 - RNA, 83 nt, Homo sapiens
gagaggagcagaaggagcaaaaggcggacaggcagcagaaaacacagagaaaacacggagaaacagcaacaggagaaaagggg

SEQ ID NO: 170990 - RNA, 80 nt, Homo sapiens
ccaaacggagcacgacgcccagagcagcagaaccaggcagaaaccaaggggagcgcgcagcagcggaccgaacaacgcaa

SEQ ID NO: 170991 - RNA, 72 nt, Homo sapiens
ccggacccagcccagcgcacgccagacgagcccggccccgggcccgcacggcccaccaccgagcggcaccac

SEQ ID NO: 170992 - RNA, 82 nt, Homo sapiens
gcgggggcgcgcccgccgacccgcgcccgccccccagcaccgggcggacgggcgcgggagagcagccggacccagaccaggg

SEQ ID NO: 170993 - RNA, 66 nt, Homo sapiens
gagaagcaaagcccccaacaggagaagagagaggacagcggccggacgcagagacacaagcagcga

SEQ ID NO: 170994 - RNA, 78 nt, Homo sapiens
acagcccagggaaggcaccaaaagggggggcaggaaagacggaagggaccagccagagagaagcaacaaccagggcac

SEQ ID NO: 170995 - RNA, 72 nt, Homo sapiens
gggggagccccgggagccgcacgacggcaccaggacaagcgagggagacacgggcggaagccgagaagagcc

SEQ ID NO: 170996 - RNA, 76 nt, Homo sapiens
ggggaacagggaccagcccaccaagaacaagagcgggcggagaacggaaaagcaccaggaagcagagaggaccgca

SEQ ID NO: 170997 - RNA, 55 nt, Homo sapiens
caaagagaaccaggcaaaagagagaaggcagcaggcagagagagacagcagaggg

SEQ ID NO: 170998 - RNA, 100 nt, Homo sapiens
cggaggcgggagcgcggaaacggaaccgggaggcgacgcacacgagcggaggcgaagccgcaggagcccaagaggggaaggcgcgcacaaggcaggaacc

SEQ ID NO: 170999 - RNA, 68 nt, Homo sapiens
cagccacccacgagcccggcaaaagcgcacaaacgcccaaggagcaggaagacagaagacgacaggaa

SEQ ID NO: 171000 - RNA, 77 nt, Homo sapiens
cgagaccaaacaacgcgggaccacccaaaagacagagccaccagcagcaccggaacaacaaaacaaagagacccaca

SEQ ID NO: 171001 - RNA, 75 nt, Homo sapiens
caacacacaccacccccccaccaccaccacaacaacgcaccaggcgcagacagacaacgacaccgaacagcgagc

SEQ ID NO: 171002 - RNA, 52 nt, Homo sapiens
cgaggaaaaggagagaggccacccaggggaccacacacgcggaacaaaccca

SEQ ID NO: 171003 - RNA, 72 nt, Homo sapiens
caagaagaggcagaccccgccagaccaacaagcggaggagcggcagcccacaagcaggaagaccagccccag

SEQ ID NO: 171004 - RNA, 74 nt, Homo sapiens
caaaacacccacccaggaacgacgaaagaacgagaaggaaaagcagaaaaaagaagaccgcgaaaaaaggccaa

SEQ ID NO: 171005 - RNA, 40 nt, Homo sapiens
cgaaagcgcacccacaaggaggaacaggagcaccacgaga

SEQ ID NO: 171006 - RNA, 80 nt, Homo sapiens
gggaccgaggccgcgagagaagagaagggcggggaaagggagcagcaccggccacacccacagcacgaccggaacccagc

SEQ ID NO: 171007 - RNA, 77 nt, Homo sapiens
agaaccaggcgggaccagagcagggccagcaaaaacacccacgggagccccgaggggcccgggcaagcgccagcaag

SEQ ID NO: 171008 - RNA, 69 nt, Homo sapiens
caaccccaggcagggcagccaggcccagcgaaccgccagggagccagaagcaggggcgagccgcgccgc

SEQ ID NO: 171009 - RNA, 85 nt, Homo sapiens
ccgagaagcagcgcagccgcagccgccccgaagagggggacacgacccggagcacccgaccccgaacggagccgcggcgcccagg

SEQ ID NO: 171010 - RNA, 73 nt, Homo sapiens
aggaggcaagaaaggggaaccccggagaaaaggccaagaaggcaggacggacagcgcaggagaagagggccac

SEQ ID NO: 171011 - RNA, 77 nt, Homo sapiens
agagagcaacgcaacaacaacgcgacaaaggagagaaacagccaaaacagcacaacagcacacagaaagacaaggga

SEQ ID NO: 171012 - RNA, 71 nt, Homo sapiens
cggagaaggagacaccggaggacgaagagggggagggggccgccccgggggcccagacaacgaccgaagaa

SEQ ID NO: 171013 - RNA, 73 nt, Homo sapiens
ggcagcacacacgaaagagaagccccggagcaaccgggcggcgagaggggcgaagggagacgggacccacgcg

SEQ ID NO: 171014 - RNA, 75 nt, Homo sapiens
agcgggaagagacggagagaggaggagggagcccacgcaccccgcggagcagcgcggcacaacgcggcggacgcg

SEQ ID NO: 171015 - RNA, 62 nt, Homo sapiens
acaggaagagaggccggcccccagcgaaaagagagcgggacgaagccgacaggagaagcgga

SEQ ID NO: 171016 - RNA, 73 nt, Homo sapiens
agaacgcaacgaaacaaggaagagaaacaggggcccagaccaagccccaccaacagaagagccccacacacag

SEQ ID NO: 171017 - RNA, 75 nt, Homo sapiens
gaggacggaagaaccaccgccacggaagcgacagcgaaaaacgcgaccaaaacacgcgacgagagcaggacaccc

SEQ ID NO: 171018 - RNA, 66 nt, Homo sapiens
accccagcaggggaagggaggcaagcccacagcgcagccgcggaaggccaccgccccaccgacaac

SEQ ID NO: 171019 - RNA, 54 nt, Homo sapiens
ggaagccacggcagacacacaacccgacccgacgagaaccaaaggggagaaaag

SEQ ID NO: 171020 - RNA, 87 nt, Homo sapiens
gcggccgggcaccaggaaggggacgggacggacgggaggggcgccgcggcggcgggcgcccccagagagccgccgcccgggagccgg

SEQ ID NO: 171021 - RNA, 33 nt, Homo sapiens
gccagcggcgggaggacaagggggaacgccccc

SEQ ID NO: 171022 - RNA, 78 nt, Homo sapiens
ggccagacaggcacgcaggggcagacaggggcaaggccgaggggaacagcacacagagaggaggcggaagcacgccag

SEQ ID NO: 171023 - RNA, 95 nt, Homo sapiens
gaagacgacgcaccgcaggcagacaaaagggccaaagaagggagagagccagaggacaaaacccagccggcacaaaccaggaaaggaagccggag

SEQ ID NO: 171024 - RNA, 82 nt, Homo sapiens
ggaggaaaggcaccccaccagagaaccaggaggaacacggaggacccaaaccgaacaaggcaccaagaagcacagcagggcc

SEQ ID NO: 171025 - RNA, 54 nt, Homo sapiens
gcgcacacaaaagaggagaaaaccgggcgcagccccgggacaaccagaggcgaa

SEQ ID NO: 171026 - RNA, 69 nt, Homo sapiens
caaaaacaggcgagacgacacgcgaccccgagaaggggccgccccaaagggcacggcaaggacgaagca

SEQ ID NO: 171027 - RNA, 75 nt, Homo sapiens
gcagcaaaccggcggaggacggaaccaggggagagcgacccaaacaaagaaaaggaagaccaggccagccgaagc

SEQ ID NO: 171028 - RNA, 75 nt, Homo sapiens
ggacaccggaagcgggaaaggccgagaagaccgcaggagacacagcaacaaaagccaacgacaacggaaccagga

SEQ ID NO: 171029 - RNA, 73 nt, Homo sapiens
ggccaggcggggaagcaagcggggccacgacgcccgcggggcagccccgggcaaccagcaagcccagagaacc

SEQ ID NO: 171030 - RNA, 97 nt, Homo sapiens
cagagagagagcggaacgggagaaagcacgggaggagagaaagaaccaagagggagacaagggaaaaggaagacaaaaaacacaaggaaagaaccca

SEQ ID NO: 171031 - RNA, 66 nt, Homo sapiens
accggaagcaccagcgaggaagagggaaggggaacaggaccggccacagacagccccccaggggcc

SEQ ID NO: 171032 - RNA, 75 nt, Homo sapiens
caaagaggccagaacacaaaaacaaaaaaggaacggagaaaaacggcgaggaaagagaggagccccggaaagaaa

SEQ ID NO: 171033 - RNA, 82 nt, Homo sapiens
aacaagaagaagagaacccgcggaggagaccggcgaggagaagcagggggagagcacaaggcgaacaagcccccaggcgaga

SEQ ID NO: 171034 - RNA, 64 nt, Homo sapiens
gacagcaggacacaaaccaaaacgagcagggagcgaacaagaaaagaaggcgcagcggacgaag

SEQ ID NO: 171035 - RNA, 76 nt, Homo sapiens
gagaaaaagaagaagagacgagaagagaaagaaggccacagacaagagagccccaggccaaccacggacgcaggac

SEQ ID NO: 171036 - RNA, 38 nt, Homo sapiens
gacacaggcggcaccaccaccccagaaccaagccgcca

SEQ ID NO: 171037 - RNA, 67 nt, Homo sapiens
gaaggaccaagaaccagaagaggaacagcaaccgggcgcgaaaaaaaaccggggaaaaaagagaaag

SEQ ID NO: 171038 - RNA, 56 nt, Homo sapiens
gcagggcgcccccgggccagaggggaggccaccaggaagcgggccgggcacggccc

SEQ ID NO: 171039 - RNA, 75 nt, Homo sapiens
ccgagcagagggcgcagccgcacaaaggagcgacaaggcggaacagaaaccagagagcacagaagcaaagagcag

SEQ ID NO: 171040 - RNA, 51 nt, Homo sapiens
cccacgaaaagcagcacgagcgcaagccccggggcagagacacaggacacc

SEQ ID NO: 171041 - RNA, 74 nt, Homo sapiens
cagagcaaggaggccccagcggaccgaacagagggccgcggcagaaaccgcaggcagaagaaacacaagagcag

SEQ ID NO: 171042 - RNA, 74 nt, Homo sapiens
agcaaaaaacgcccacaccagagaaacaacgaacgagcaaggaagggccaaggcagaccccacaccggagaacg

SEQ ID NO: 171043 - RNA, 42 nt, Homo sapiens
gcccccgagagcgagaccacaggcggagcgcaggagccgaga

SEQ ID NO: 171044 - RNA, 80 nt, Homo sapiens
cagaacaaaagcagacccagagagagcagggagagaagggcgccagcccccgcaggggagaggggcgcccaagacacggc

SEQ ID NO: 171045 - RNA, 73 nt, Homo sapiens
aggggccagcgacaacccccagaagagaccaacgccaccaaccaaccgcgacgccgcaccacgggcgcggcga

SEQ ID NO: 171046 - RNA, 83 nt, Homo sapiens
aacaaaggggcagacaacaacaaagacaaacaagacaaacgacggaaaaggagagagagagagacagagagaggagaaagcgg

SEQ ID NO: 171047 - RNA, 71 nt, Homo sapiens
cagcgggcgaccgacaaaagaagaccaccaccaaaccaagggacagaaaagaggcaggccgggcacagaac

SEQ ID NO: 171048 - RNA, 65 nt, Homo sapiens
ccggccaaacccaggacaagaacagccagcagaagcacaccaacgacaggcccgaaagaaggcga

SEQ ID NO: 171049 - RNA, 87 nt, Homo sapiens
cgcccgggacggcggagaggcgccccccgcagcagagcgggcgggacccaccggggcaggaggggccacggggcccagcccaagcac

SEQ ID NO: 171050 - RNA, 68 nt, Homo sapiens
ccggcacggacccagacaagaccagccggccgggaggaagcccaaaaggaaagaaccagagacgacac

SEQ ID NO: 171051 - RNA, 68 nt, Homo sapiens
caggacccaacccaaaggcaccgcccaacagcgccacacgagacaaaagagcccaacccaggcacagg

SEQ ID NO: 171052 - RNA, 58 nt, Homo sapiens
accgcgcagcgccggggcgcaacgccggagcgggggaaccgacgcccagccgagagga

SEQ ID NO: 171053 - RNA, 79 nt, Homo sapiens
aagaggccgagcagacccagaagacgagccacaggagcccggcccacgcgggaacgagccggccgagcgccgcgggaga

SEQ ID NO: 171054 - RNA, 71 nt, Homo sapiens
gcacaacgcccgacagcaggaggaccccagcccggcacaaacaggaaggacagccagcccagccccagaga

SEQ ID NO: 171055 - RNA, 81 nt, Homo sapiens
cgaaccccaggagcaagggaaggagcccggaggggagggaagagacaggaagagggcccagggccggagcgagggagagca

SEQ ID NO: 171056 - RNA, 79 nt, Homo sapiens
gaccacggggcagacagcaagggagagagcccgcagagcgcgcacccagcagcaacaggggaccggggggagagcggcc

SEQ ID NO: 171057 - RNA, 70 nt, Homo sapiens
cgagaggcgccacaagcccgggggcaaaacccaaaaacccagaaacagggaaaagcaacacaggaaaaga

SEQ ID NO: 171058 - RNA, 80 nt, Homo sapiens
ccgggccgcggcccacgcccgcggagcagccgaaaaagcggggaaaacaaaaaaaagaaggagggaagagggggccagga

SEQ ID NO: 171059 - RNA, 79 nt, Homo sapiens
cgaagaggagagagcgcgggcccaggaaggggcaaggccacaggccccaagaaccgacgagccccgcccccacagcagg

SEQ ID NO: 171060 - RNA, 82 nt, Homo sapiens
ggggggagacggggaggacaggccagcgcggccaagacccgccgcaagaagagaagccagagcccaaggcccgcggaagcca

SEQ ID NO: 171061 - RNA, 76 nt, Homo sapiens
acagacgaacaccagaaggaaggaaacccggcagagaacaccaaacaaccaagaaaagccaagcacagagcccaga

SEQ ID NO: 171062 - RNA, 79 nt, Homo sapiens
aggaccacgccggcgccgcaaagacccaaccgccccggggccccgacccgccaaagacccagaaggggagcgcggaccg

SEQ ID NO: 171063 - RNA, 83 nt, Homo sapiens
ggagagcgcggaggggaaccccgagccgcaggaccggaggacagaaacagagcgcggcgcgagggagaaaagcgagagaagag

SEQ ID NO: 171064 - RNA, 78 nt, Homo sapiens
agagcaaggaggccccagcggaccgaacaggggcgacagagcgaaagaaacgagccaggccaagacgggaaagcaccc

SEQ ID NO: 171065 - RNA, 63 nt, Homo sapiens
acagaaagagcaacagcagggcaacagagagaggagaagcagcgaggcacaagagcacgcgag

SEQ ID NO: 171066 - RNA, 75 nt, Homo sapiens
acccccgacgccaaccaagaggaacaaaacgggggaaagacacccgcaccagcgccaaccggagcgacaccacgg

SEQ ID NO: 171067 - RNA, 74 nt, Homo sapiens
gggggaggcaaaggaggaagaggggaggacggggggaagggggaaggagcagaaggcaaaaacagcagaaaagg

SEQ ID NO: 171068 - RNA, 77 nt, Homo sapiens
cagggcgcccccgcacccaaacacagcacagcagacaaggagacgacgcggaagccgcccggaaagggagaagagaa

SEQ ID NO: 171069 - RNA, 60 nt, Homo sapiens
gggcccgcgggcccagaggaggccggggaccagggcccaggacaacggccccggaggcgg

SEQ ID NO: 171070 - RNA, 71 nt, Homo sapiens
ggaaaccgggaaagccaccgaaaagggcgggggccacccgcccaggacgcccccccccacagggagcgggc

SEQ ID NO: 171071 - RNA, 76 nt, Homo sapiens
agggaacggaggagcgagccacggcggcgcaaaaccgcgagacaacaggcaacgcaaacaggagaggggccagcaa

SEQ ID NO: 171072 - RNA, 78 nt, Homo sapiens
accggacaaccgacaaaagggccgggaccagagaagcggacagcaagcgcccacgaccccccagaaacaacaccgacc

SEQ ID NO: 171073 - RNA, 71 nt, Homo sapiens
cccagcagcagacccaagaagacagaccccgaggagacggcagcgcgcggaagggccggcccaacccgacc

SEQ ID NO: 171074 - RNA, 70 nt, Homo sapiens
agcccacagagagccaggccaagagccccggggcccgcgcaaaaccaaccggaagggaaaggcgaagggg

SEQ ID NO: 171075 - RNA, 98 nt, Homo sapiens
gcgcggagcacaaaagagcccgcggggaggcgcggccgccccgcgggggacggcacggagccagcagcagcaagcagcgggcaagacccgcgccggcc

SEQ ID NO: 171076 - RNA, 78 nt, Homo sapiens
caccggaacaagaagagagaccaacccgagaaaaagggcgaggagaggcaccccggagggaggccagagaaaccagag

SEQ ID NO: 171077 - RNA, 81 nt, Homo sapiens
gaaaccacaaggacccagggaggaagacagcgaacccccccaccacaggagcccagacccgggcacggcacaccgcccagg

SEQ ID NO: 171078 - RNA, 72 nt, Homo sapiens
gaaaaaaaagggaagaggagacaccccgggggccccgagcaaaccaggacgggcacgaaagccccgcccggc

SEQ ID NO: 171079 - RNA, 75 nt, Homo sapiens
ccccaaagagcaacaaaacagagagcaggccccagcaccacaacacccaggacccccggggccaacacgaggagg

SEQ ID NO: 171080 - RNA, 79 nt, Homo sapiens
acgagaaaccggaggagcaggaaagaaaccccagaaagcaaacgggccgaagaagcaggaccgacagaacgagacaaca

SEQ ID NO: 171081 - RNA, 107 nt, Homo sapiens
cagccacgggagcacagcgggagaaaagaagccaaagaagaacagacaggcagggaggaaagacaggaaagaagccaccacagaaaccgaagagccagggcggcaaa

SEQ ID NO: 171082 - RNA, 76 nt, Homo sapiens
ggacaagaagggcaaagccgaacagcagggacgcaccaaaacggacagccgaagacaggcgacccaccaccaggac

SEQ ID NO: 171083 - RNA, 80 nt, Homo sapiens
acccggacagcgaccgcaagaggaaagcaggcaggagggagagcgccgaagaaccaccccccgccccgggcgggggaagc

SEQ ID NO: 171084 - RNA, 60 nt, Homo sapiens
gacggaaacaaggcaacagaaagagcaacagcagggcaacaggacaggacaacaacaccc

SEQ ID NO: 171085 - RNA, 83 nt, Homo sapiens
accgcaggcgggcgccgcgcgagccacccagcgaggcaaaagcagaccggaaaacccaccggcaagaccacacccgaggggag

SEQ ID NO: 171086 - RNA, 79 nt, Homo sapiens
ggccggccgggcacagcagaggccgcgcagcagcaaaggagagcggaaccggaaaagggacccccaccaaccaggaaaa

SEQ ID NO: 171087 - RNA, 86 nt, Homo sapiens
ccgggcacggacagggcgaaagccgaccacccggcgaagggacaagaacccaagaaacaggaaaaaacccaaaacaccaaaaggac

SEQ ID NO: 171088 - RNA, 122 nt, Homo sapiens
ggccccacgaagaagacaacgcagaacaggcagaagaggacggcaggaggccaggccggcagagacgaaacgcacgcagagcacgaaggaacccggccaacgaggcacacccgacgggcagc

SEQ ID NO: 171089 - RNA, 75 nt, Homo sapiens
cgccacaaggcccaagcacaggacaagcaaacccagccggaggcacccagagcggaccggggagggagaaacaaa

SEQ ID NO: 171090 - RNA, 78 nt, Homo sapiens
gcgcagggcgcggggaccgcccgcggcacccggagcaccagccgcgcgccggaggaaacggagcacccaccaacgaga

SEQ ID NO: 171091 - RNA, 73 nt, Homo sapiens
gggacggagaaaggggccaacaagaaaaggacgggcgccaccagcaaaaccagagaaacaggcagagaaagac

SEQ ID NO: 171092 - RNA, 74 nt, Homo sapiens
gaggagggagaacaagacgaggaacaaaaacgcaagggaccgaagagcagacaagggccaaaacacgaacagac

SEQ ID NO: 171093 - RNA, 69 nt, Homo sapiens
aagaaaccacaggccggaacgagaagagcagaagaggagcagcacagagaagaaagacagggcgaagaa

SEQ ID NO: 171094 - RNA, 80 nt, Homo sapiens
gcagcgaggagccgaggggacagaggcaccgcagcgagaggagcagccaaggagggcagcagaccgcgcgccagacgcca

SEQ ID NO: 171095 - RNA, 81 nt, Homo sapiens
gacaacccgaggggccaggggggacacggggagcgcgccgagcggagaccggacgacaagcagaccggaagaccgacggaa

SEQ ID NO: 171096 - RNA, 84 nt, Homo sapiens
gcgggcccgaggcgcaccaagggcgaaggagccggcccaaggcaaaaacaaccaggcagagagacaagcaggagcgaagcagga

SEQ ID NO: 171097 - RNA, 71 nt, Homo sapiens
agccggagggaggcggaaccgaggccagacgggcgccagccacgggacaaccaagcaccggagcgccccgc

SEQ ID NO: 171098 - RNA, 62 nt, Homo sapiens
agcccccagaaaggaggacaacgggacccagaagaggaagccgagaccagggggaaggggaa

SEQ ID NO: 171099 - RNA, 68 nt, Homo sapiens
gaaacccgccccgagaagcccacaaacaaggagcgagaacagaaggcggccggaggaaggcgcaaaag

SEQ ID NO: 171100 - RNA, 81 nt, Homo sapiens
agacccaacagaaacacggaccgaaagagggccaaagaggaccaaaagccccaacagcggcaagaccagcacacagaggcc

SEQ ID NO: 171101 - RNA, 76 nt, Homo sapiens
cgaacaggagaacccccagcggagcgcaaggcacacagagaaaaaaagggaacaaaacacagcaagcagacaaaag

SEQ ID NO: 171102 - RNA, 101 nt, Homo sapiens
aagaagggcagaagcgcaggggagaggagagaaaaagaacccggagaaacgaagcgggacggaggggaaagggggacagcgcacaaacggcaaccagggac

SEQ ID NO: 171103 - RNA, 62 nt, Homo sapiens
aggaacaccaaggaccaaaagaacacagcacggggggcagaaagagaagacagaaaggaggg

SEQ ID NO: 171104 - RNA, 80 nt, Homo sapiens
gaaccagcaacaagccaggcggagacagcagccaacgcacgcaagggggccgcaaccaggagaacgagcagcaggaagac

SEQ ID NO: 171105 - RNA, 77 nt, Homo sapiens
gcagggggaccggccgcggcacaccggagagcgacgggacccccccgcagaagggaagaaaagggaaccagcggagc

SEQ ID NO: 171106 - RNA, 79 nt, Homo sapiens
ggggaaggacgggcgggccggcgccggagacgagccgagcgaacgaagcggaagcaccagaaaacagccccgaaccaga

SEQ ID NO: 171107 - RNA, 72 nt, Homo sapiens
acaaggcggcaaagcggggaggccagcgacgccaggaagaaaacggggagcaccgcaaagcaaggcgaacag

SEQ ID NO: 171108 - RNA, 77 nt, Homo sapiens
ggagacagagcgaggcagagggggcccagagccgggcgccacccgaggacaagaaacagagggaggaccaagccaca

SEQ ID NO: 171109 - RNA, 74 nt, Homo sapiens
cccaccacccaccagagaacaaggacagccaacgccagaacagcggcagcgaaacagaacagaaggcccagcag

SEQ ID NO: 171110 - RNA, 77 nt, Homo sapiens
cgcggacgcaccgccgggccgcccccaccccgcccgacccccaaggagccccagcgacgaagacacgcaagcgacac

SEQ ID NO: 171111 - RNA, 77 nt, Homo sapiens
ggagcggcgaagagcaaccagggaagaaagcacgggaaaaggccgggcccacaggggagagcccagaaaaggcacaa

SEQ ID NO: 171112 - RNA, 54 nt, Homo sapiens
caacacccaacccgaagcgacgcaaggaaagggaggcaagcaggggggcaaagg

SEQ ID NO: 171113 - RNA, 84 nt, Homo sapiens
ggcaaggcggcggacggcgcgcgcccgaggcgaggaggagcgcggcgaagaggccccaggaccggcgaggccccccccccagca

SEQ ID NO: 171114 - RNA, 87 nt, Homo sapiens
caggcacgagcagcaggacgcccacgagcccacgcggcccggacggcccaccgacacgcaaagaccacccaaaggcaaggaaccaga

SEQ ID NO: 171115 - RNA, 62 nt, Homo sapiens
gacgggaggcaacagaagccagagccgcaccaagacaggaagggaaggggcggagacgggcg

SEQ ID NO: 171116 - RNA, 72 nt, Homo sapiens
agacgcaggaagcgagaaagagagcgcagaagacgcgcaagaccgagcaagacgccgcagccgagcacgagc

SEQ ID NO: 171117 - RNA, 78 nt, Homo sapiens
gaacccgaagcgggcgcgcgcacggcaggacggagggggcaagaccagagaccacagaccccagaaccagggcacccg

SEQ ID NO: 171118 - RNA, 75 nt, Homo sapiens
gggaaacaggcaaaggaagaagccagcgagcggggcgcgcggccgacgcggcccagagaccccccacgggaacgg

SEQ ID NO: 171119 - RNA, 76 nt, Homo sapiens
acagcgagcggagccggcaggaaggggaccgggcggcggagcggcggaagaagaaacgcagaagaggaagcgagca

SEQ ID NO: 171120 - RNA, 72 nt, Homo sapiens
gaggcggccaaggggacgagcaaaggaagcgcgaacagcagcgcagggccaaccgccccccagcagcaggca

SEQ ID NO: 171121 - RNA, 84 nt, Homo sapiens
ggagccacggggaagggacccgaaggggaccccagcccccccagccgaaacgcacgccagaagacgccacagggacacaagcca

SEQ ID NO: 171122 - RNA, 79 nt, Homo sapiens
gggcccagaaggcgagaccagagacgagaaggagagacagcgcggagaccacccagccggcgaaacacaaagccgacag

SEQ ID NO: 171123 - RNA, 84 nt, Homo sapiens
cggaaaccggcggcgccagccaccggagcaaccacaacccgcacaccaggagacaaagccacaaaaacaccagaaaaaccaagc

SEQ ID NO: 171124 - RNA, 77 nt, Homo sapiens
aacggccgaagcgccgagccagagccagggaacggaggagcgagccacggcgaaacaagggacgaacaaaacaccga

SEQ ID NO: 171125 - RNA, 73 nt, Homo sapiens
agccacagcggggcggagaggagcggcagcccacaagcaggaagaccagccccaggagggaaacagagcaccc

SEQ ID NO: 171126 - RNA, 87 nt, Homo sapiens
acaaaggggaggaggacgccagacgcacggaaagcagcgcaggagccaagaccacagcagcacccagccccagcagaccacaggagg

SEQ ID NO: 171127 - RNA, 73 nt, Homo sapiens
ggcccgcgcagaacagcggggagaaaacgaccgaggaaccaaggaagggaaaagaaaggccacgggaggaggg

SEQ ID NO: 171128 - RNA, 72 nt, Homo sapiens
ggcgccaggccggcccaagagcagaggagcaaggaagaaaggagaaggccaggcggccggggagccccagga

SEQ ID NO: 171129 - RNA, 78 nt, Homo sapiens
gcgggcgcccgaggggccgagcgagggcaccgagggcggccgagcccggaccacgggcagccgcccaccgccaccagg

SEQ ID NO: 171130 - RNA, 85 nt, Homo sapiens
agagagcccagcagcccacacagagagcagaaacaccagaggccgcagcaagagaaggccagcagagacagaaaacggcacccca

SEQ ID NO: 171131 - RNA, 82 nt, Homo sapiens
gaaagaaaacacaggcggggacggcccggaaggaagacccacaagagaccacgcagagacagcacccaaccggcagcagcag

SEQ ID NO: 171132 - RNA, 74 nt, Homo sapiens
cccgagccagaaaagcagggaggagggaaccgcccgagcaccccccacgacccacacggggcacacacagaacg

SEQ ID NO: 171133 - RNA, 76 nt, Homo sapiens
aggaggaaagcggcacagggagacaggcgcccaccgcaccgccgcacgggccgcgaagggcacagccagcgggaac

SEQ ID NO: 171134 - RNA, 81 nt, Homo sapiens
ggagaagggcccccagaaaccaacccagcacaaccaaaaggcccccccaccacaaagcccaaacagacaaagccaaacagg

SEQ ID NO: 171135 - RNA, 78 nt, Homo sapiens
aaggaaacaacccgcgacaccgacgggaccagccccagaacgggccggccgccaagacacccccggcccggcacagaa

SEQ ID NO: 171136 - RNA, 62 nt, Homo sapiens
gaacagggaacggaaacgccggccaaaccgaacacaccaaggacacgggacccaggccacgg

SEQ ID NO: 171137 - RNA, 89 nt, Homo sapiens
gcacacggaagggcaccaaggcacgaagaggaccgagagagaaggaaagagaaagcacagagaagaaaaaagcaaagagggaaaagcca

SEQ ID NO: 171138 - RNA, 71 nt, Homo sapiens
ggagaggggaaacagcggagacggaacgggagaagaggcaaagaaacaccaaaacgaggagcagagaaaga

SEQ ID NO: 171139 - RNA, 77 nt, Homo sapiens
gcagcagaacgcccacagagcggagagaggaacaaacaggcaaggagcgccacggaaggagagcgcagacgagcaga

SEQ ID NO: 171140 - RNA, 87 nt, Homo sapiens
aaacccaccgcaagcgccaccaccacagagccacaaaacacagggagggccccgagaacccgaaggcgccaacccccaacccacgcg

SEQ ID NO: 171141 - RNA, 75 nt, Homo sapiens
ggaacgagggcgagcagaggacgacaggccgggaggcagccaaacgggccggcaggacaggagacagagcacacc

SEQ ID NO: 171142 - RNA, 76 nt, Homo sapiens
accaaaagaaccagcaagaaacaacaagacaacaagcccaagaggagcaagcgaacaaaaaaccgaaaaacacacg

SEQ ID NO: 171143 - RNA, 83 nt, Homo sapiens
gcgaggcgagcgcgggagccgggcggcgagccgggggagcgccgaaaagcaccggagccgccgcgcagggcacccgcacgacg

SEQ ID NO: 171144 - RNA, 75 nt, Homo sapiens
cccccacaacagccacacgagacgcaaccgccacggcgacaagggaacacaaaccagacaggagaggcaccccca

SEQ ID NO: 171145 - RNA, 78 nt, Homo sapiens
ggcccggaggaccgccccgcaggcagccgggaaggggacccccaaggaccgcccagccgaaagagagccaaggggagc

SEQ ID NO: 171146 - RNA, 85 nt, Homo sapiens
ggaggaagaaacccagacagacgccggggaggcagcgcgggacccagcccaggcggcgcggacggggcggaaaggaagcacgcgc

SEQ ID NO: 171147 - RNA, 73 nt, Homo sapiens
caccaagaacggggaaagcgccgaaaaccaggaaccaaagaggggaaagggagagaggagcacagaaccgagg

SEQ ID NO: 171148 - RNA, 71 nt, Homo sapiens
aacagcaacgaacaggcaggaggaaccaggcggaagcacaaacaaggcccaggccagaggcacgccaaagc

SEQ ID NO: 171149 - RNA, 59 nt, Homo sapiens
caagagacccggaaggaaggagacgaggcagccggcacccgcacaacccagggggccga

SEQ ID NO: 171150 - RNA, 76 nt, Homo sapiens
aaacaacaaaggaagggacagagaagcaggagaggaaaggcggagccagacaccgccgggccaagcaagaccgaag

SEQ ID NO: 171151 - RNA, 42 nt, Homo sapiens
acagcgcgggcgggggacagccagcaccaaggaagagcaacc

SEQ ID NO: 171152 - RNA, 77 nt, Homo sapiens
ccaaggggaccccgagcgggggaccggcgggagaccggagcagcgcccagccagagcggaaagaccccacccaaccc

SEQ ID NO: 171153 - RNA, 108 nt, Homo sapiens
gcgcgaagcgcggggcgggcccgggcgcggcgggcgcgcccgccagcgcccggagaacggacccaaagacaggaccacgcaccagcagagaaggaaagcaaaccgaag

SEQ ID NO: 171154 - RNA, 81 nt, Homo sapiens
accagcccggccacagaaaccagaccagaaagaaaacccaggaaacacaaggggccaagcagaggaggagaggagaaacca

SEQ ID NO: 171155 - RNA, 61 nt, Homo sapiens
ggacgcggaaccgcacgcagagaaagaagaaggagagacgaccacgcaacagaaaaagagc

SEQ ID NO: 171156 - RNA, 61 nt, Homo sapiens
ggcggcgacagcgggaggagaaagcaacgaagggggaacagaaaaggcaagaaggaacgga

SEQ ID NO: 171157 - RNA, 75 nt, Homo sapiens
acgaccgaaacaccaggggcccagcggagaagagcccaggcccggaagagaggaaacggagaagagagagcagga

SEQ ID NO: 171158 - RNA, 71 nt, Homo sapiens
gggcagggacagcgcaggcagcagggaagcccagaggcacggggcagaacaccaacagagggccgaccggg

SEQ ID NO: 171159 - RNA, 62 nt, Homo sapiens
agaagaggcaaagaaacaccaagaaagccaggccagaagaaggaaggccggggaggggacag

SEQ ID NO: 171160 - RNA, 60 nt, Homo sapiens
gaagccgggagcgagcccaggcggcaggaaggagagaaaaggcgaaccgaaagagaaaac

SEQ ID NO: 171161 - RNA, 79 nt, Homo sapiens
agaagccgaggagaagaagagaacccacagagaaaggagcaagaaagcaaaccggcacaaagggccaccacaaacaagc

SEQ ID NO: 171162 - RNA, 70 nt, Homo sapiens
aggaacggaaaaaacaggcccagggggcaaagaggggggaacccaaaagacaaaacgggaagcagcaaaa

SEQ ID NO: 171163 - RNA, 85 nt, Homo sapiens
gccgacacaccaccacggaacgccaaccggcggaccgcgagacagccagccgaccgaggagggccgcgaaaccaacgacaacagc

SEQ ID NO: 171164 - RNA, 63 nt, Homo sapiens
ggcagccgccgccaccccgcggccgcacccccgccccaggcgccgcgaggccgcggccaggcc

SEQ ID NO: 171165 - RNA, 73 nt, Homo sapiens
cggccagagagcggcacagggcccgcgcaccgcccagaggaaaaccaacagagacaacaaagagaagaaacag

SEQ ID NO: 171166 - RNA, 59 nt, Homo sapiens
cccagcccgaaagcaaccgggcgcaggccacaggccgagccccgacggggcaagaaagc

SEQ ID NO: 171167 - RNA, 75 nt, Homo sapiens
ccgacagcccaaggcgaggccggggcaggcccccaagaaagagcagcgagccgcacgggcagcggggcccagcac

SEQ ID NO: 171168 - RNA, 80 nt, Homo sapiens
ggaacacaaccaagcaacacaagcacccccggcaacgaaagcaaaccgagagcaggcgaaggccgggacccaggcccacc

SEQ ID NO: 171169 - RNA, 77 nt, Homo sapiens
aacacaagcgagggaagcagaaagagaaggaaggcaggacaggaaagaggagagaaacgccaaagaaaaaacaaaac

SEQ ID NO: 171170 - RNA, 76 nt, Homo sapiens
aaggaccaagaaccagagaagaggaagagagagagggcccaaaccaccagaaccgaagaagagaaaacaaagaaag

SEQ ID NO: 171171 - RNA, 72 nt, Homo sapiens
cccaagggcgagaaggacccgaggacggacaggagcgccgcccgcacggaccgagaccgggcacaacaagga

SEQ ID NO: 171172 - RNA, 76 nt, Homo sapiens
cggagagaaaagaacaggggggccacagaggcccgaaagcagaacagagaaggaacgaaaagaaaaaaaaaggaag

SEQ ID NO: 171173 - RNA, 57 nt, Homo sapiens
aaaccagcacccaaggcagccggaaacgagggggggggacccaaagcagggcgacga

SEQ ID NO: 171174 - RNA, 106 nt, Homo sapiens
ggggagagacacacgggacaaacagaagaaggccagccaaaaaaggcgaccagcgaggacagagaaaaaagaacagaagagcaaggaaaacacgcaaacagaagaa

SEQ ID NO: 171175 - RNA, 51 nt, Homo sapiens
cggcgacaccacgggaggcagaccacgagaagccagggccaagggcaggga

SEQ ID NO: 171176 - RNA, 63 nt, Homo sapiens
cacagcccaacgcgcaagaaccaggaaaagcaccgaagcaacgaccacacgaaacaacgaaga

SEQ ID NO: 171177 - RNA, 77 nt, Homo sapiens
acaagagggagccaggccagaaaacgggacagccaagcaccgaacaggacaacacaaacaaaaaagagagggagaaa

SEQ ID NO: 171178 - RNA, 84 nt, Homo sapiens
cgggcccgcggaccagccagggcacggccgggacggggcggccggacggaccagcagacccgcccggagggcccaccagggggg

SEQ ID NO: 171179 - RNA, 75 nt, Homo sapiens
gcacaaaacagcagacccaagagcagcggaaaagaccagcacagaacagagaagcacaccgacaaaagggaggag

SEQ ID NO: 171180 - RNA, 71 nt, Homo sapiens
ggaacgacccgaggggggagagcgcgggggcgacggccgagcagggcaacaaggacccagacaaggcgggg

SEQ ID NO: 171181 - RNA, 90 nt, Homo sapiens
gcgggcccggccggcggcggcggcggcggcggcggcggcgcagaggagaacgccaagccaaccgaaaaagccgacaaaaaaaagcaaaag

SEQ ID NO: 171182 - RNA, 74 nt, Homo sapiens
accaacgcagcagggaagaaaaggcagagaagcaccccccgcccggaggggagagcgcgacgcggagaagagcg

SEQ ID NO: 171183 - RNA, 70 nt, Homo sapiens
cggaaaggggacgcgcccccccacgaccgcgacaccaacaggccagacaccagcggcaccgggcccaccc

SEQ ID NO: 171184 - RNA, 60 nt, Homo sapiens
gagacgcaccagcagccaccaggagcccgagagagaaggccagcggaccacaagcaaaca

SEQ ID NO: 171185 - RNA, 76 nt, Homo sapiens
gaccagcagacaagagaaacaggccgaaaagaaacccagaagcgggagcgcggagggggcgggcacggaagcacca

SEQ ID NO: 171186 - RNA, 60 nt, Homo sapiens
aagaagcgaacagggcgacaacaccccgagacaaggccagaacggagggggagaagcccc

SEQ ID NO: 171187 - RNA, 84 nt, Homo sapiens
ccggcgccgaggcggccacccgagacgcggcgcgcacgcccggccgcgagaacaagcagaggaaagacacgccagagaagaaca

SEQ ID NO: 171188 - RNA, 74 nt, Homo sapiens
cgaggggaagaggaagcaaagccaaggcagaacaaaacgccacccaggcaggaggaccaaagagagacacaccc

SEQ ID NO: 171189 - RNA, 78 nt, Homo sapiens
agcgggcgcagcgcgccaaaaccgggacggacaagacccgggaaggaggcgacagggaggccagaaccccagcaacga

SEQ ID NO: 171190 - RNA, 75 nt, Homo sapiens
aaacccacaagcccacaagaaagaagaacgagacagacacaggagccgccaggccggccgggagaaggcaagccc

SEQ ID NO: 171191 - RNA, 80 nt, Homo sapiens
gggagcgaagcgagggcgaagcacgacacagaaggggaggggagggaaaggcccaggaaaaagggcgccacacggacccc

SEQ ID NO: 171192 - RNA, 77 nt, Homo sapiens
gcgaaaggaaacgaagaagccaggaccggagagacggggaacacgcaaccggcccccgggcgacacaggagcaggac

SEQ ID NO: 171193 - RNA, 82 nt, Homo sapiens
cggaccacggcgcagacgcgggcgagcgcggccggacgccagcggacacgcgggcgagggcgcgcgggggcacagcccaggc

SEQ ID NO: 171194 - RNA, 87 nt, Homo sapiens
cagagaagagaaagaaaccaaaaacagcaagcgcagagccaaacagccaggcagcaacaacaaggggccgcgaagaacgcaaaacca

SEQ ID NO: 171195 - RNA, 58 nt, Homo sapiens
agcgcagaccgcgcccgccgagaacggccgagcgaccaggagaggagcccccgcccga

SEQ ID NO: 171196 - RNA, 80 nt, Homo sapiens
caagacccagagcagaagaagcggcccgccagagaacgcacccagggagcacgcagccccgaaggcggcccggcccccca

SEQ ID NO: 171197 - RNA, 72 nt, Homo sapiens
aacggagagccacaaaaaaggaagcgaaagaaacaaaaagccaacggaaaaagaaacggcagagcacaggac

SEQ ID NO: 171198 - RNA, 40 nt, Homo sapiens
caacagacaggcccccggaacgaagagagacggggaccag

SEQ ID NO: 171199 - RNA, 82 nt, Homo sapiens
gaaggacgagcccaagagcggcgaggaggcgccacacccccccgacgccgcgcggggacgcaagggaagaaaccccggagcc

SEQ ID NO: 171200 - RNA, 80 nt, Homo sapiens
caggaaggaggaggaggcgggggagggacagacaacggcaggagagggcccgacaacgaagagaccccaaaacggaacgg

SEQ ID NO: 171201 - RNA, 82 nt, Homo sapiens
cgacagcgaacagcgcggccgcaggccacggaaacgacgagaggacagaaaggccaccacagccagaagggcagcagagaaa

SEQ ID NO: 171202 - RNA, 84 nt, Homo sapiens
agaccggcaccgcggagcaaaaaaagagcccgcaagaagaacagagacagcagccaaacccccagacacccggaagcaggcgaa

SEQ ID NO: 171203 - RNA, 85 nt, Homo sapiens
ggcggcagggcaagcagcgcggcccggccagcgaccggggcgccggcgcggccgccggagagggcgaccccacccaagacaccca

SEQ ID NO: 171204 - RNA, 99 nt, Homo sapiens
ggaacagaacggggaacaggaccagaacccacacagcgaagaacaaggcgggaagagacaaaacgaagagcacggagggaagcaaacccaccaaaccag

SEQ ID NO: 171205 - RNA, 76 nt, Homo sapiens
cacagccagccccaggggaaccaccccaagggggccaaaaccccgccaagaccaaacagccgcgaaccaaagaaga

SEQ ID NO: 171206 - RNA, 66 nt, Homo sapiens
ggaagcccaaaccagcacaagagagacacccacgcccacacgccaccaaggacaaaggaaaagaac

SEQ ID NO: 171207 - RNA, 79 nt, Homo sapiens
aaggccccagccgcggaggaggcgagaagaggaaaacagaccccgcgaggcaagacaagaccaggcacacgaccaagaa

SEQ ID NO: 171208 - RNA, 67 nt, Homo sapiens
gcgccgccagcgccgcccccgccaacagggacaagccacacggcaaagaagcagagcagggcaaaga

SEQ ID NO: 171209 - RNA, 80 nt, Homo sapiens
cccgcgcggggcgcgggcgcggccggaccgcagccgcaagagcagagagggccaccacccgaaggaagcaccaggagccc

SEQ ID NO: 171210 - RNA, 76 nt, Homo sapiens
cagacgcagggcgcccccggaccgcacgacggcaccagcaacgggacggcacgggccccagcgggcacgaggcaac

SEQ ID NO: 171211 - RNA, 80 nt, Homo sapiens
gggaaagagcaagaagaccgcacacggcaaaaacagcaagggagcaacagcggagagccgacagcagcagaaggagaaaa

SEQ ID NO: 171212 - RNA, 77 nt, Homo sapiens
gcacgcaggccgggcaggcggcaaccaaacggcgccaagaagccgaggccgccagcgccaagaaaaaaacaaggcca

SEQ ID NO: 171213 - RNA, 66 nt, Homo sapiens
accgaggaccggcgacgccagaacaggacgagcagggggaggaacaaagcgaggaagggaagggaa

SEQ ID NO: 171214 - RNA, 84 nt, Homo sapiens
agcccccagcccgcgaccacagccagagcccagcaggagccgccacaccaggcaacaggggccgggagcccaaccgaggccgga

SEQ ID NO: 171215 - RNA, 70 nt, Homo sapiens
gagcggagcgaggacaccggacgagagacccaccaaaaggggagcgggagcacagacccaggagaagaag

SEQ ID NO: 171216 - RNA, 92 nt, Homo sapiens
acagggcagaaaaccagccccaggaggggacaaaaccccgaaaaaggcgcagaggggaggagacacgaagcgacgcagagccagaagggagg

SEQ ID NO: 171217 - RNA, 58 nt, Homo sapiens
agaaagaagcgaaggacgacagcagccagaaacccagacagcaccacacaggcagagc

SEQ ID NO: 171218 - RNA, 69 nt, Homo sapiens
gagaaaaggccaagaaggcaggcgcaaaaaccagacaccccacaccaccacccagacgaccaaaagggc

SEQ ID NO: 171219 - RNA, 80 nt, Homo sapiens
gcgcaagagaaaacgacgaacagaacgaacagaaagagaagcgacaagagagggcggcagaaggaacaccgagaaaccgc

SEQ ID NO: 171220 - RNA, 72 nt, Homo sapiens
caccaacggaaaacaacacagacagacgaaacaaggaagcgcaagagccagcaaccagagggaagcggccaa

SEQ ID NO: 171221 - RNA, 67 nt, Homo sapiens
cccgacgccaggcagcgcccccaaacgaggagcggagggagcacacgggcgaagaacccccaaacca

SEQ ID NO: 171222 - RNA, 78 nt, Homo sapiens
gagaagaaagggagaagggaccccggaggccgcagaagagaccaagaccggcccgcgccggcaggaggcgcgaagaag

SEQ ID NO: 171223 - RNA, 86 nt, Homo sapiens
ccggcgcgcggcgcggacaggcccaaacggacagacaagcagacggggccgccacacgcccaaccagggcaccgcaagcgggaaga

SEQ ID NO: 171224 - RNA, 39 nt, Homo sapiens
caagggacggccaccccaggccgacacgaacggacaaca

SEQ ID NO: 171225 - RNA, 83 nt, Homo sapiens
cacgagcacacacaagacaagggcgcgcgaggaccaagagcgccgggcacaggcacgcagcggcccgggacacgcccgcggac

SEQ ID NO: 171226 - RNA, 74 nt, Homo sapiens
ggaacaggacagaaaggccagcagcggagagccaaacaagaaccagcaggcgaagacgcaggagagcacagacg

SEQ ID NO: 171227 - RNA, 52 nt, Homo sapiens
ggaacagacgcaggaaggcggcaccaggacgccgaaaagcgaccggacgcag

SEQ ID NO: 171228 - RNA, 69 nt, Homo sapiens
gccaagccagaggccgcgaaaggaaccagggcagacacaaggaacagccagccaggagaaaaacgaacc

SEQ ID NO: 171229 - RNA, 73 nt, Homo sapiens
aaaacaaggcgaggagaagcaggcagaaacaggcagaacagacagaccaaccgagacaccaaaaaggagagaa

SEQ ID NO: 171230 - RNA, 59 nt, Homo sapiens
ccgaagaaaagggaaaacgcgcgggccaagagaaaggacagggacaggaaagaaagaaa

SEQ ID NO: 171231 - RNA, 52 nt, Homo sapiens
ccccagaacccagagacgggcaggagcgcacaccagagggcccgcgagggca

SEQ ID NO: 171232 - RNA, 65 nt, Homo sapiens
gaggaggcagcgcggggcagcgcgagccgggaagcccgggaccgggagcccgggaccgggagccg

SEQ ID NO: 171233 - RNA, 71 nt, Homo sapiens
cgcaggggaaagaacgagagccaggccgcagggagcagagagcggaaaggcggcaacaaccagcaggacgc

SEQ ID NO: 171234 - RNA, 77 nt, Homo sapiens
ggcagcgcgccgacagccaggaccagcagaaaagcacacgaggccgggcagcggcagacaccagcaaacacagacaa

SEQ ID NO: 171235 - RNA, 70 nt, Homo sapiens
ccagacaagaggaaccgcgccccagaaggcagaggaacacaacaggaaggcgccacaagcaaaccagccg

SEQ ID NO: 171236 - RNA, 76 nt, Homo sapiens
agcgaaggccggaggacaaggagcgaaaacgccacaacagagggggccagggcggggaagacaaacagaacaacgg

SEQ ID NO: 171237 - RNA, 73 nt, Homo sapiens
aaacacaccaccggaaaagaccagccagagcacagaggagcagggcaagaccaagagcagccaacaaacagac

SEQ ID NO: 171238 - RNA, 76 nt, Homo sapiens
ggggcacgcccacgcaggggcaccccgggaaaaaccagaagagaaaaaacaaaggggagaggcaccccgcgggacg

SEQ ID NO: 171239 - RNA, 69 nt, Homo sapiens
gccccccaccggaccacacggcgaagccaaaagcgaggccgaccccgacaccaagacaaccgaagggaa

SEQ ID NO: 171240 - RNA, 74 nt, Homo sapiens
cacaaaccagaggaggacgaccagaggaaggcggggaggcggaagaccaggagaaagcacgacccacaaaacgg

SEQ ID NO: 171241 - RNA, 78 nt, Homo sapiens
gacaccagaagcacgaagaccaggacacaaccggaaccgcaggaggccgggaagaaggagggacacagcagcgcggag

SEQ ID NO: 171242 - RNA, 78 nt, Homo sapiens
ggccaaaggcgcgcaaggaggaaggcccccgaagcacccgcgagccaggccaccgcccgaggcagcccaggggacaca

SEQ ID NO: 171243 - RNA, 81 nt, Homo sapiens
ccccccacggagcagaacccgacccgggaagaaggaaggccacccggcaaaccacagccggaaccaaggcgagacccacca

SEQ ID NO: 171244 - RNA, 75 nt, Homo sapiens
aagaagaacagagacagcagccaaacccccaggcacccacgaggcggcgacggaaagccccccacgggaggccag

SEQ ID NO: 171245 - RNA, 56 nt, Homo sapiens
gaaacagcagaaacgcaccaggccaaagaaagagaaacagacaccccaaacaaagc

SEQ ID NO: 171246 - RNA, 74 nt, Homo sapiens
ggccagcgcgcggcgggcgagggagacgaacacaaggccacccaagcccccccaacaagaggcgagggcgggag

SEQ ID NO: 171247 - RNA, 80 nt, Homo sapiens
cggagccccagcgcccacgcaccccaccggcgcgcgcggcggcccgcgcacaggcggcgcccagcggccacacgccccaa

SEQ ID NO: 171248 - RNA, 62 nt, Homo sapiens
acaacccccgcaggcggcggggcagggcagacaacaccgacgagagagccgaccaccaaaac

SEQ ID NO: 171249 - RNA, 68 nt, Homo sapiens
cgggcccagcggacgggcgggcggcgggcaagcacacaagaagggccaaaggaaccgcgccacagcgg

SEQ ID NO: 171250 - RNA, 70 nt, Homo sapiens
ccagccacggggccccccaacggggccagagcccgaagaccccagacccacgaccgcccgcgcaggagac

SEQ ID NO: 171251 - RNA, 77 nt, Homo sapiens
gaaacaagacgaagccgaagagaacccacaacagccacgacccgaagaaccccggggggacgccccaccgcgcaccc

SEQ ID NO: 171252 - RNA, 70 nt, Homo sapiens
ccagagggaagcggaaaaacgggggacgaccgacacaacagcaggcagcccgcccagcggcacgccaccc

SEQ ID NO: 171253 - RNA, 54 nt, Homo sapiens
agaaaaagacgacgcccggaagaggcgaaacgcagaagaaccaggacaagaacg

SEQ ID NO: 171254 - RNA, 57 nt, Homo sapiens
ccggacgcgccggcccgaagaaggcgggggacccgggcgacacaggggacccaggcc

SEQ ID NO: 171255 - RNA, 88 nt, Homo sapiens
caccgaggcaaggagggaaggcaacagagccaagccagagggaacaagagaagccagagaaaccccgcaccgccagccggggagggcc

SEQ ID NO: 171256 - RNA, 80 nt, Homo sapiens
cggaggagcagcgcagcgcccgaggaagccggggccgagcaccaggacaaaagaagggcagcacaaaggaaagccccaaa

SEQ ID NO: 171257 - RNA, 56 nt, Homo sapiens
aaacgcccgggaacggggacaggaaggaacacacggacgcagcggaaagaccccac

SEQ ID NO: 171258 - RNA, 61 nt, Homo sapiens
aggccaagccacaggggaacgaaaaagaagaaggcagagggggcgagggaggaaagggggc

SEQ ID NO: 171259 - RNA, 67 nt, Homo sapiens
gggcaagagcaggagcccggcaccccccgccgacaaggaggagagcagcaccagcagaagagggccc

SEQ ID NO: 171260 - RNA, 75 nt, Homo sapiens
ggagaaaggaaacagaggagagaacacggccgcaagcgcaagagaaaaagaacggacgcacaaggcaaagcaaaa

SEQ ID NO: 171261 - RNA, 90 nt, Homo sapiens
gccgaggccccccgacggcggaggcgcccgcgggccccacagccaaggcggaccacggggcgccagcccgggaagacaccagggaagaag

SEQ ID NO: 171262 - RNA, 53 nt, Homo sapiens
ccgggcccaaagaaaggagaaacaaacagccagggcaacgagccgcccaggac

SEQ ID NO: 171263 - RNA, 89 nt, Homo sapiens
caaacgaggagaaggaagacgaaccagaaaacacgcaaagacacacagcgaagacgacaacaacccggccaagggcccgggacaccggg

SEQ ID NO: 171264 - RNA, 79 nt, Homo sapiens
cagagccgaaacgcaaacacaacaagcaaggaaccggagcaaacgacccgaccagcgcgcggcggccccggggagagca

SEQ ID NO: 171265 - RNA, 78 nt, Homo sapiens
cagccccccgcccggggagggcaccagaggccgaagacaagccccggcacaggaggagagaaaccagccgaggcagcc

SEQ ID NO: 171266 - RNA, 77 nt, Homo sapiens
gcgagccggccccaaaacgagagagccaggacccgaaaagccagcaagcgagaccaacaccaacacgagggcggcgg

SEQ ID NO: 171267 - RNA, 66 nt, Homo sapiens
gcccgcgcggggcgcgggcgcggccggaccgcagccgcaaggaggccaaaggaagaccaggaaaga

SEQ ID NO: 171268 - RNA, 82 nt, Homo sapiens
ccagcccagccgcaagccaaccagccacagcccaccgaggcaccacagcccaggacacaaagccgcagaaagaaccgagcaa

SEQ ID NO: 171269 - RNA, 79 nt, Homo sapiens
cgaacagaaggaacgacgcggaccagaagccagagcgaggacgccggcaggcccaggcccaccacccccagcccaacca

SEQ ID NO: 171270 - RNA, 118 nt, Homo sapiens
ccgcccgcccccgcggcgagccaaaccccaaaacccgcagccggccggcggccgacaccgcagcagaagcaaggaaaaaggaaagaaaggcaaagcagcacgcagaaacgaggccagc

SEQ ID NO: 171271 - RNA, 49 nt, Homo sapiens
gagccacgaggcccacacaaagagcagcgagcacgggagcaacaaaggc

SEQ ID NO: 171272 - RNA, 68 nt, Homo sapiens
gccaagagcgacaggaggagacaggcgagagaggaggacacgaccggagaagaggaacgccccgggcc

SEQ ID NO: 171273 - RNA, 67 nt, Homo sapiens
ccaccgggagagagggaaaaaacaaccccgccggacacacagccaggcccagcaaaaggggaaggcc

SEQ ID NO: 171274 - RNA, 82 nt, Homo sapiens
gacggggcggcgccccgcgccgccgcgcccacggccccgccagcaaggcggcgcgcccaggaggccaggaacaaaaaacccc

SEQ ID NO: 171275 - RNA, 38 nt, Homo sapiens
ggacccagcccagaacagacggccgccacagcccagac

SEQ ID NO: 171276 - RNA, 74 nt, Homo sapiens
aagaggggggacagcagcagcagacgacaagggaggcgaggacggacaaaaggaaacggacgggaggccagcca

SEQ ID NO: 171277 - RNA, 71 nt, Homo sapiens
aggagccggaccggaaccagaggagaggagaaaaccaggggcggaaggaccgagccagagcaaagaacacg

SEQ ID NO: 171278 - RNA, 65 nt, Homo sapiens
gcagcgaagaggacgcccgagcgcgagcgacgacaaaccccgaaaaacgcagaacaaagcgggac

SEQ ID NO: 171279 - RNA, 85 nt, Homo sapiens
ggcggaggccccagggaagcgcagaaagcaggcgaacccgcggcgcaaaacgacggcaagaagaagcgaaaaccgcccacaacac

SEQ ID NO: 171280 - RNA, 84 nt, Homo sapiens
agcaggcacagggacgagggggcggaaggcaccgagaagacgccaaagcgccgccaccgcaacaccgcccagcgccaggagaca

SEQ ID NO: 171281 - RNA, 74 nt, Homo sapiens
cgcaaaaagggggcaaccaggcaaacagagggaaggcagacggacaaggcgaaggaaaacaacaggcaacagac

SEQ ID NO: 171282 - RNA, 40 nt, Homo sapiens
ggagaaggacgaagaggaagccgaggcggagaagaaccca

SEQ ID NO: 171283 - RNA, 70 nt, Homo sapiens
gagggggggggggcccgccaacgaaccacaggcgagaccgagacaaggggcgaaaagcacccaccaccag

SEQ ID NO: 171284 - RNA, 72 nt, Homo sapiens
ggaccccggagcccagaagacagagggcgagagccacggcaggaagcacagaacccgggccgccagagccca

SEQ ID NO: 171285 - RNA, 80 nt, Homo sapiens
gggagcagcccgaacgccacagaaacaccggcccagacagacacaagaaacagccaaaggccaggaggacagaggaccac

SEQ ID NO: 171286 - RNA, 84 nt, Homo sapiens
gccgccgggcccgggcaggggcggggcaacgcggaagaaccccccacggaaaggacgaaagaaagaagcagccccagaaagaag

SEQ ID NO: 171287 - RNA, 72 nt, Homo sapiens
ggaggaccgcaccagaagggacaaggaccggcggccacacccgccagggcagccgccccagaaaccgcaggg

SEQ ID NO: 171288 - RNA, 66 nt, Homo sapiens
aaacaaaggagagccgaccaagcgcaacccccagccacaacgcgaaccgggcggacgaaggaggcg

SEQ ID NO: 171289 - RNA, 61 nt, Homo sapiens
aacaaacccaaacaggagaagaacccagggacacccgaaccccaaagacgggaggggacgg

SEQ ID NO: 171290 - RNA, 65 nt, Homo sapiens
ccggaggagaagagacccaaaagcaggccggcaccggaggcagaacccaaggggcaggaagaggc

SEQ ID NO: 171291 - RNA, 76 nt, Homo sapiens
cgggagaggcgggacaagccaagggacaggggggccgggggaacgaggaagcgcccaaggcgaccggcccgaggac

SEQ ID NO: 171292 - RNA, 69 nt, Homo sapiens
cggcaagaaagagcagaccgggcggagaagagacacggaagaacacgagaaggaggcccgaaacgaaca

SEQ ID NO: 171293 - RNA, 81 nt, Homo sapiens
cgggcgcccggagccccaggccccagccaacccgaaaaccccccagcggccacagagagcacaaagagcccacccggaaaa

SEQ ID NO: 171294 - RNA, 67 nt, Homo sapiens
ggagggaccggaaagggaaagaaaacaccagaggaccgaagaaggccgccccccccacacaccagcc

SEQ ID NO: 171295 - RNA, 70 nt, Homo sapiens
gaggaccaaggccggaaaaacccgagaggagccaggaccccccaggcgacccagaacgcggacaaacacc

SEQ ID NO: 171296 - RNA, 75 nt, Homo sapiens
gcgcccaagccgccagaagcccgggagccagcggaccagaggaaagcccagccaccggagacgggcaccagggcc

SEQ ID NO: 171297 - RNA, 50 nt, Homo sapiens
gcgaacaccaaccagcacaaaggcccaaaccgcagaccagggccccacga

SEQ ID NO: 171298 - RNA, 76 nt, Homo sapiens
cgaacaccacaaacgaggacgagagccaagggagggagggaagaaaggagagaccagccgccgcacccagggaaaa

SEQ ID NO: 171299 - RNA, 69 nt, Homo sapiens
gggacaaagcgagcggcacacgggacaaccaagagcaacagaccacgcaacaaaaagcacccgaaaagg

SEQ ID NO: 171300 - RNA, 70 nt, Homo sapiens
ggggcggggggaacgcccaccacaaaccaaacgagcaagaaggagcgaggcagagccacaggagaagcag

SEQ ID NO: 171301 - RNA, 70 nt, Homo sapiens
acggagagaaaggaggaaagggccgccacagaaaccagggaggcaggggacccaagaacagggaggaaag

SEQ ID NO: 171302 - RNA, 83 nt, Homo sapiens
gccaggagccgggaggccagagagaaccgccggcagggacccaccagcaagacacagggcgggaagcacggcacgcacggagc

SEQ ID NO: 171303 - RNA, 79 nt, Homo sapiens
ggagagcgggccccaacaccagccgccgccccgcagccccccgcagcacccagccggccacgaagacgaccccgacgca

SEQ ID NO: 171304 - RNA, 62 nt, Homo sapiens
cagaagcgcaccccgacgccgaggaacgagagcgcgaagcaaggggaaaggacaagggacag

SEQ ID NO: 171305 - RNA, 69 nt, Homo sapiens
ccccacgcggccagcgaaaacgcccaggcacccggaaacaagccacgaaggagagaaaaccagcagcag

SEQ ID NO: 171306 - RNA, 77 nt, Homo sapiens
ccgggccggaccgcaggagggagaccacagcaagacccaggaccccggaagccagaaagggcaccgccgaccgaaac

SEQ ID NO: 171307 - RNA, 79 nt, Homo sapiens
cggcgggccccggcgaggcagcgcggccgcagcagcccgcgccagccggaagcccgagggcagcgcccacggccgcgac

SEQ ID NO: 171308 - RNA, 68 nt, Homo sapiens
gcggacacccaaaacccgagacagggcagcgaaaaacgaacggccccacaaggacaaaacagcgcgaa

SEQ ID NO: 171309 - RNA, 79 nt, Homo sapiens
cgaaggcacgccgcggcgcaggacacacgaagccgagaggccggagcccaacagaaagcccagccccccccaccgccac

SEQ ID NO: 171310 - RNA, 66 nt, Homo sapiens
ggggagccccgggagccgcacgagcgggaacagcccacggcgaccagggccaggccaaggagggcg

SEQ ID NO: 171311 - RNA, 84 nt, Homo sapiens
aagaagcagaggaggcccacaggcccgcccggacaccgaggaaaagcccggaaaagcagccaagcggaagacagagccgcaaag

SEQ ID NO: 171312 - RNA, 39 nt, Homo sapiens
ccagaggaagaagagggaggaacagcagccggaagcgag

SEQ ID NO: 171313 - RNA, 52 nt, Homo sapiens
aagcgcgaagccggccgaggggaagggcgggacaccgaaaaggagacaagcg

SEQ ID NO: 171314 - RNA, 71 nt, Homo sapiens
aagcagcaagaggacaaggagaaggacggggggcagacaggagcccaaggccggagcccacccagcaacac

SEQ ID NO: 171315 - RNA, 69 nt, Homo sapiens
caaggacccggggaaccaccccccaaaccgcagcgcccgaaagggaaggaagaaggccagcgaagggaa

SEQ ID NO: 171316 - RNA, 53 nt, Homo sapiens
acgcccaaaggccagagcacagcgccaaagcagagacagaaaaacggcccgga

SEQ ID NO: 171317 - RNA, 76 nt, Homo sapiens
gccccggccgggccggccagcgccggaaaccaacaaaaagcaggagcccggaaaggagaaggaaaagacggcagga

SEQ ID NO: 171318 - RNA, 87 nt, Homo sapiens
aacaggagaacgggaagccccgccgagaaaagccaccacgcggagagaagagacgaggaggaggggagaccgcggcaggacacgagg

SEQ ID NO: 171319 - RNA, 94 nt, Homo sapiens
ggaagccacagagacaggccagacccgcccccgaaaggacccgacagcccacgcgcgagggaagcagacaacaggcacgcacaccaagaacaac

SEQ ID NO: 171320 - RNA, 73 nt, Homo sapiens
gagaagcacagccccccgaaaccaaaagccaaggacggcacggaagaggggaaaagaagcagcagggccaaaa

SEQ ID NO: 171321 - RNA, 74 nt, Homo sapiens
cagagaaccagaagagaagacaggccccagccaacgaagcacaggccaacgcgccacggcagaacgaagaccag

SEQ ID NO: 171322 - RNA, 90 nt, Homo sapiens
acagcggcgccggcgggcggcgcccgaaaggagcggcccggaaggggagggcgaagaaaacaccaggaacaaggggagaagaagcccagc

SEQ ID NO: 171323 - RNA, 42 nt, Homo sapiens
ccggagggaacaggcggcgcagaccacccacgaacacgggcc

SEQ ID NO: 171324 - RNA, 73 nt, Homo sapiens
caagagcaagaaaaggggcccgggaggggaaaaaccagagacccccgaagacggcgaaaaacagaggggaccc

SEQ ID NO: 171325 - RNA, 79 nt, Homo sapiens
gcgggccggccacggcgggagagcggcaagaaacaggcagacccgaagaaaaacacagaacggagccgggggaagaaga

SEQ ID NO: 171326 - RNA, 62 nt, Homo sapiens
gaccggagcagcaacgcaagacaccggcacgcaacaggccaacagacagacaaggcagaaaa

SEQ ID NO: 171327 - RNA, 56 nt, Homo sapiens
gaagcgacgagcaggcccacccccccagggacgaacagcggggacgccccagcaga

SEQ ID NO: 171328 - RNA, 84 nt, Homo sapiens
gggacagaggcaccaaggaccccaagacaggacaagacgacagaaaccgccgaaagagagaaggaaagacgcaaccaggaagcc

SEQ ID NO: 171329 - RNA, 62 nt, Homo sapiens
caaccagggaccggcacgaaaccaacaccgcccaaggaccgagccggggggaaaagaccccc

SEQ ID NO: 171330 - RNA, 66 nt, Homo sapiens
aaacaccacagacacgcacaggagaagggcccggagagaagaagagagggcgaaggaggccacaca

SEQ ID NO: 171331 - RNA, 85 nt, Homo sapiens
acgcaggcaaacgagaaaaagccgagaaggccagacgaagagaggccggccacacaacagccaagcaacgcggcaagaaaaacag

SEQ ID NO: 171332 - RNA, 70 nt, Homo sapiens
gaaggcgccggccaaaagaggcccgcaagaagcccagcgcagcaagaccgccagccagagaacgcgagac

SEQ ID NO: 171333 - RNA, 69 nt, Homo sapiens
cccccggcacaggccccaccgggcgcaaaaaccagacaccccacaccaccacccagacgaccaaaaggg

SEQ ID NO: 171334 - RNA, 70 nt, Homo sapiens
gcaacgacccaagcgcgcagagaaggccccaaaagaccgggaagagccaaacagacacgaccggggaaga

SEQ ID NO: 171335 - RNA, 82 nt, Homo sapiens
ggggaacgaaagacagaagcagagcgaacagagacagcaccaaagcaggcggggcgaaggcggagccccgggaccggccccc

SEQ ID NO: 171336 - RNA, 68 nt, Homo sapiens
ggagcgggagaaaagaaccgacccacaccaaggaagaagagcaccggcgacaaaggacagccaccccg

SEQ ID NO: 171337 - RNA, 52 nt, Homo sapiens
ggcccagcaaagagcagaccaaaggcagggggagaccacgccggggacacag

SEQ ID NO: 171338 - RNA, 76 nt, Homo sapiens
cgaaacagagccaaccgagaggagccgaaagcagaaaacgaacgaaaccaccacagcaaccgcccccggaagacca

SEQ ID NO: 171339 - RNA, 86 nt, Homo sapiens
caaaagcgaaagggcacaccacaggcagcccaaggcgccccccggcaccgcccgccccccgaggagccaagccaacaaggccacac

SEQ ID NO: 171340 - RNA, 75 nt, Homo sapiens
aaccgccccggcgggaagcggagggaaccccccaaagaaacggcaagagagcaggaaccagaaagaaaagccaga

SEQ ID NO: 171341 - RNA, 67 nt, Homo sapiens
cgcagacggacaggagcccagacaagaaaaggggaagaaggccaaccgggggccaagggggaaggga

SEQ ID NO: 171342 - RNA, 88 nt, Homo sapiens
gaagggacagaggacaacgggggccgggcaccacaggggaagcgacgaggaagccaagcaggccggaaggggaaagggagagcaaggg

SEQ ID NO: 171343 - RNA, 39 nt, Homo sapiens
ccacaagacgcaccaacgcaaggcagaacagagaagaag

SEQ ID NO: 171344 - RNA, 78 nt, Homo sapiens
aaggaaagagcagaaaaaaagcgcgcaacacaacaaaacaaaccccgacacaggagagcaagcccacccgcgagaagc

SEQ ID NO: 171345 - RNA, 73 nt, Homo sapiens
gcccgcgcggcgcggggaccgcggcccgggaccacggccccgacacacccgcgcgacccccaacaccggagga

SEQ ID NO: 171346 - RNA, 58 nt, Homo sapiens
aaaccgggcccaacggggaaccccaagcgcaggagccgcaggccgacccaccgggcac

SEQ ID NO: 171347 - RNA, 85 nt, Homo sapiens
cgacgcggcgcgcgcggacgaagagccccccccccaacaccgcgacacgcagagcccaaaaggcagagcgaggagagaagaagga

SEQ ID NO: 171348 - RNA, 85 nt, Homo sapiens
cggaacgaccccaccagagaacagggggacgcacaccgagacgaacacagaacagcacgaccagaggggaagccaagcaaacgca

SEQ ID NO: 171349 - RNA, 75 nt, Homo sapiens
ccggacagcgccacggcgggccgcgggaggacaccacccacaggcaaaacggaggaggcagggagagagcaccgg

SEQ ID NO: 171350 - RNA, 53 nt, Homo sapiens
gaagccacaaaggaaaaggaggcaccgcggcgcacccggggaaagggggggcc

SEQ ID NO: 171351 - RNA, 72 nt, Homo sapiens
gcacgacggaggcacaaggaggacgccggcgccgccaggacgaagcagccaagccagaggggagccaaagac

SEQ ID NO: 171352 - RNA, 83 nt, Homo sapiens
ccacgggagcgcgcagagacaccgccaaccccgcgaagcccgagaagcgaaccaagccaacggaaaggcaccgagcagaaaag

SEQ ID NO: 171353 - RNA, 83 nt, Homo sapiens
acacgacggcaacgggacagcacgaggacaaccaccaccagcgagcaaaagaacaaagaccaagaccaagaagcgccccagcg

SEQ ID NO: 171354 - RNA, 75 nt, Homo sapiens
agcacaagcgcagccaccgcgcggccagaccgccaccagcgcggaggccccgccgcccggacgccacaagagaaa

SEQ ID NO: 171355 - RNA, 77 nt, Homo sapiens
gcggccgcagcaacccgccggcccgccgacacagccaccaagaaggcacaagcagaacgggaaaaggggcggaaaga

SEQ ID NO: 171356 - RNA, 78 nt, Homo sapiens
cgcagcacgaccagcaggaacgagaacaggagagggaaggcaaaacaacccgcagggcacacgcaccgcaggagaaca

SEQ ID NO: 171357 - RNA, 38 nt, Homo sapiens
gaacaggacccaggaccaggaggacagcgaacggagga

SEQ ID NO: 171358 - RNA, 85 nt, Homo sapiens
ccggagcggccggacggaaagcgacaagggaggcgccgccagcggccgggaccgaacaggcgagccccccaagagaacccagggg

SEQ ID NO: 171359 - RNA, 112 nt, Homo sapiens
acaagagccacgcgaggacagaaaacgcaagacaacaggagaggaaagcggaaagccaagcagaggcagccagcaagaagacagaaagggcccaaaggcggagagaaagagg

SEQ ID NO: 171360 - RNA, 58 nt, Homo sapiens
cggaggagccccggaggcagagcggcgccagcaaaagggagaccacaacagccaccaa

SEQ ID NO: 171361 - RNA, 57 nt, Homo sapiens
cgaaccgaccgagagcgcagacccgaaagaagacggaacgggagcccacagacgaga

SEQ ID NO: 171362 - RNA, 67 nt, Homo sapiens
aaggaccaagaaccaggcaccgaagagcaagggaaacggaacggaaaaccagagccagagagagaaa

SEQ ID NO: 171363 - RNA, 88 nt, Homo sapiens
ccaaaggccaaggggggccggccagccggcaaaagaggacgggggcaaccggacagagaagcccaagagaagcaggaggagcagcgca

SEQ ID NO: 171364 - RNA, 57 nt, Homo sapiens
gcgagcgggggccgggcagcaccaggcaaagacggcaggaaccggcaaacgggggaa

SEQ ID NO: 171365 - RNA, 72 nt, Homo sapiens
acaaggaaccacgcccgcgggacacaagacgggcaagagcagacacaaccagagacgacagccaaaccgcaa

SEQ ID NO: 171366 - RNA, 71 nt, Homo sapiens
cggggaccagaaaggaacggcaagacaacaagcgagagcagcaggaagaagaggaagaaaaaccaagcggc

SEQ ID NO: 171367 - RNA, 47 nt, Homo sapiens
aaaaaagggcaagaagccagaaggggaacaggaaaaacgagaggaga

SEQ ID NO: 171368 - RNA, 82 nt, Homo sapiens
cgaggagcgggaagaggcgggcggcggaggcggaccggggggcccgggcccgccagacccgcagaccaccaaccccgacgga

SEQ ID NO: 171369 - RNA, 61 nt, Homo sapiens
gagaaagacaaccaaccccaccgaggaggacagagacgcaagaaaaccagcgccccacagg

SEQ ID NO: 171370 - RNA, 77 nt, Homo sapiens
gaaaggaaagcacaagcgccacccggccgggaggagaaacagaacccaaacaaggcaagaacaaagaagaccaaggg

SEQ ID NO: 171371 - RNA, 80 nt, Homo sapiens
gaaaaaggggccaagaaccgcaagggcccacgagacgcgaacaaacgccgcgccgccagaagaacagaccgggagaccag

SEQ ID NO: 171372 - RNA, 82 nt, Homo sapiens
gggccggagcgagaccgggcggccacagccgcagggagaacccgaggcgggagagaacaggagagaaaaccggaagagagcc

SEQ ID NO: 171373 - RNA, 107 nt, Homo sapiens
cgcagcggccccggcggggcaagagcgggggcgggaccccgccgcggcgggagggcaggcagcccgaggcccacaagcagagaagagaacacacccagaaggcaaga

SEQ ID NO: 171374 - RNA, 71 nt, Homo sapiens
accgcgggacgccgccgcggcccggacgaccgcccagaagggaagccaagaccacgaccagagaaaacaag

SEQ ID NO: 171375 - RNA, 79 nt, Homo sapiens
gacagcaagagcgcagggcggagaaaagccagagcacgccggccaaccacgacgcggagcaccgccacagcagaaagac

SEQ ID NO: 171376 - RNA, 55 nt, Homo sapiens
gccgggaggaacggcccggaaacaggaggaccccacgcggaggaagagagaacca

SEQ ID NO: 171377 - RNA, 70 nt, Homo sapiens
gggcagaacggaaaagcagggagaccaaccgaaggacaagggaaggagcagaggcaaagagcgacgcaca

SEQ ID NO: 171378 - RNA, 84 nt, Homo sapiens
cggccacaaagccccaggaaagaggggagaagcggaaagcgcgagagacgcggccaaacaaagggggagcagaccacaggcgga

SEQ ID NO: 171379 - RNA, 57 nt, Homo sapiens
gcaccagcagccaccaggagcccgagagagaagggggggacaggaacagaaagcgaa

SEQ ID NO: 171380 - RNA, 93 nt, Homo sapiens
gaaagcgccgcgaagcgccgccggccccgccgccaagaggagcgagcggacccgcgagggcaccggcccgaccagccacgacacccacgaaag

SEQ ID NO: 171381 - RNA, 84 nt, Homo sapiens
acacggccccacggcacaacacacccgcaagggccacacagaagcaccgaaaagaaagcacagaacaagaagaacgaagaaaaa

SEQ ID NO: 171382 - RNA, 77 nt, Homo sapiens
gaagagccaccagacaccaggaggaccagcagcaaaagaaggagggccccaggaaaggaaagggccgagaaagaaga

SEQ ID NO: 171383 - RNA, 83 nt, Homo sapiens
ccaaccagcccgagcccggaaacaaagggaagggcaagggaaaaggcggcgggcggaggcgccagcggagccagcaaggacgc

SEQ ID NO: 171384 - RNA, 74 nt, Homo sapiens
ggcaaaagaaagaaagcaggaggcaagcagaggaagccggaaaagaagcaagcagccggccacaaggaaccagg

SEQ ID NO: 171385 - RNA, 74 nt, Homo sapiens
ccgggaaagggccagaaagcaccagcggaagaaaaaggagagcaaaacagaaggaaccacgaagaacagcagaa

SEQ ID NO: 171386 - RNA, 50 nt, Homo sapiens
gacgaacggcagacggaaacaacggccgagcgaccaggagaggagccccc

SEQ ID NO: 171387 - RNA, 69 nt, Homo sapiens
gaacaaccagacaagaggaaccgcgccccagaaggcagaggaacacaacagggcgagcaaggcaaccag

SEQ ID NO: 171388 - RNA, 59 nt, Homo sapiens
gacaaagagggggcccaagaagcggccggagcgggacggaaggggacacaggcaagacc

SEQ ID NO: 171389 - RNA, 73 nt, Homo sapiens
cgcggggaaggcgaggcacgaccccacccccgaggcccgaccgggccgcaccggcgcagcgcccgccacccga

SEQ ID NO: 171390 - RNA, 43 nt, Homo sapiens
gcccccagcgcagcggccgcgaaaaaaccagaggaggagaaga

SEQ ID NO: 171391 - RNA, 70 nt, Homo sapiens
acaaccgcacggcccaggcccgcagagcccacggggaaggacagaaagaaggaaaaaacgcaagaaggaa

SEQ ID NO: 171392 - RNA, 70 nt, Homo sapiens
gggcgggggaggggcgacggagccaggcggagcggcgccgccgggaagaagagagggcgaaggaggccac

SEQ ID NO: 171393 - RNA, 62 nt, Homo sapiens
ccaccaggcgcccagaccaggagagcacaggcagccggacacagagcgcaaaggagaagaaa

SEQ ID NO: 171394 - RNA, 75 nt, Homo sapiens
cgaagacccagccaaagaaaaaacaggacaagggacagccagagacacaaaaggaggaagaaaaccagggcgcag

SEQ ID NO: 171395 - RNA, 76 nt, Homo sapiens
cagcacggccgcgggccgcacgggacagccaagcggacgcacgcccggaccgacaggaaagaaggagcccacaaag

SEQ ID NO: 171396 - RNA, 77 nt, Homo sapiens
ggagacggagggcagccggaagaccacagcagccaaggcccgcggaggggcccgaaagaaaccaagaaacaagggag

SEQ ID NO: 171397 - RNA, 60 nt, Homo sapiens
gcaggcccaacgagagccaccaagcggaccagaacaaggcccgggagaagcggccgccag

SEQ ID NO: 171398 - RNA, 80 nt, Homo sapiens
agacgacaagcacacacaggcgcgaaacggaaaaaggccagcccagaacaaagcaggccacggaaggagcacacaaaaca

SEQ ID NO: 171399 - RNA, 80 nt, Homo sapiens
ccaccccgaagagcacaaccgggcgcccggacgggggcaagcggaagggagcccaagaggaccaggaacaagcagaaagc

SEQ ID NO: 171400 - RNA, 57 nt, Homo sapiens
ccagcaccccgagaaccgcaggagccagagggaaagaccaggagaaggcggggagga

SEQ ID NO: 171401 - RNA, 75 nt, Homo sapiens
gcgcaccggaagcaccagcgaggaaggggaggcaagcaggggggcaaaggaaagaaggcagaaagggaggccagg

SEQ ID NO: 171402 - RNA, 82 nt, Homo sapiens
ccacggcgcccacccaacgcgaagacggaacccgggacgacgggggaggacgaagccagcggggcccaggagaccccagagg

SEQ ID NO: 171403 - RNA, 74 nt, Homo sapiens
agacaaggcggagacaaacccaagcagacagaaggaccaaaaaggggagcccaaaagcacgaagcgccagagga

SEQ ID NO: 171404 - RNA, 85 nt, Homo sapiens
cagaagcagcgggggaaaacagaagcacagcagcaaaagcaaagacccccggggcgccaccggacagagcagcgagaagggagga

SEQ ID NO: 171405 - RNA, 80 nt, Homo sapiens
agaaaccacccagagcaaagaaggccccagaagaagggacacgagaaacgaagcaggagagaagaggaggaagaagggaa

SEQ ID NO: 171406 - RNA, 73 nt, Homo sapiens
aaacccgaccagaccagggacgccagaccacaccaaacgccaccaaaggacaggagaaaagaaagcaaccagc

SEQ ID NO: 171407 - RNA, 71 nt, Homo sapiens
agaaaaccaggagaacggcaaagaacggccaaggaaggagcgagggcgaggacagaggaccaaacaaaaag

SEQ ID NO: 171408 - RNA, 41 nt, Homo sapiens
ggcagaccccgggcagcagggggaaaaaacacagaggcaga

SEQ ID NO: 171409 - RNA, 70 nt, Homo sapiens
gaagcgggacggccccaggagaagagccagagcgggaggacgacgagagagaaccggacacagacgaggc

SEQ ID NO: 171410 - RNA, 65 nt, Homo sapiens
ccgcgccccagaaggcagaggaacacaacaggggaaccaaaccagcaccagagaaaagaaggccc

SEQ ID NO: 171411 - RNA, 58 nt, Homo sapiens
cggagaaagccaagggccgagcaacgcggagggcagaaggcgcaaaggcaaagaccag

SEQ ID NO: 171412 - RNA, 81 nt, Homo sapiens
ggacgacccgagcaacccccagagcaggagggacaggaacaggagcgaccaggacacccccgcccgccacggagacggaag

SEQ ID NO: 171413 - RNA, 78 nt, Homo sapiens
ccgggccgagccaacaggaccagcagggcgggcaggcccacacagagaaggaacagaacagacaccaccgaaacgcgc

SEQ ID NO: 171414 - RNA, 75 nt, Homo sapiens
agcggccagcaggagcgccggggccggggcgaacgcggccgggaaaaaagaggggcacggcccgaaacaccagcg

SEQ ID NO: 171415 - RNA, 58 nt, Homo sapiens
gcgaagggagaggacagcagggaggcgggacgcggccgaccgccgaagagggccacgg

SEQ ID NO: 171416 - RNA, 107 nt, Homo sapiens
agcgacggcacgccgaagcaccgccggggggaagccccgcgccggccgcccgggcccccacagagagcacacaaacaaagcgaaaccacggaagaaaagggcaaagg

SEQ ID NO: 171417 - RNA, 76 nt, Homo sapiens
ggccggcgcgaagacgcgggggccgccccccgagaagaacggcacacaccccccagaacccgaagggaaccaaaga

SEQ ID NO: 171418 - RNA, 58 nt, Homo sapiens
ggcagcgccaggcggagcagaccaccgggacaaaacgccgaaacaggcaacaggcaaa

SEQ ID NO: 171419 - RNA, 78 nt, Homo sapiens
gcaaagccacagcgcagcaggacagggagccaccagggacacacgggaggacagggcaacacaagaaagaacgcaggg

SEQ ID NO: 171420 - RNA, 74 nt, Homo sapiens
gagccccccaaggcccaggaccgcgcagacccgcccgaccgacccgggagggacagaggccaaccccccccaaa

SEQ ID NO: 171421 - RNA, 79 nt, Homo sapiens
ggagagggcaggaaccaccgcccaaagggaggggacaggacggcacggagaggagggcgcccaccccggcacgacccag

SEQ ID NO: 171422 - RNA, 78 nt, Homo sapiens
ggcgcagaaagcaaacggccaagagaagaaggaaaaacgggcagaaggaggcgagaaagggcccggggaaggcgcaag

SEQ ID NO: 171423 - RNA, 60 nt, Homo sapiens
gcgaacgccgcggccaaggagccgccaaagccagacgagagggccgaggcagacaaggga

SEQ ID NO: 171424 - RNA, 72 nt, Homo sapiens
aggaaggagaggcagggggacacgcaacacgggagaaaaaggggagcggacgggcccaggagcaggagccac

SEQ ID NO: 171425 - RNA, 73 nt, Homo sapiens
ccacgggccgagacacgcagcggcggccagggaccaagcccagcaagaccacgacacgagagcgccgccagcc

SEQ ID NO: 171426 - RNA, 58 nt, Homo sapiens
agcgaccacgacggagaagcagggccaaggagaacccgcaacacaaaccccaccaaca

SEQ ID NO: 171427 - RNA, 56 nt, Homo sapiens
gaggcagacaaggaaacgggcagaaaggggaaaaaccagaagagaaaaaacaaagg

SEQ ID NO: 171428 - RNA, 77 nt, Homo sapiens
agcccagccagacaccccaacccagaaccagcgcaccacgccaagcaccagcccacaccgggagaaccgaggcaacg

SEQ ID NO: 171429 - RNA, 76 nt, Homo sapiens
aaccaagacccagccaagcagaggccacacgaacggagaagacagaggagccagaccaagagacagcacaggcgag

SEQ ID NO: 171430 - RNA, 83 nt, Homo sapiens
aggagcagccaaccagcagcagccacaggagagagacaggaggagaacgaggaaacccaagcaagagaaggaagagacaaggg

SEQ ID NO: 171431 - RNA, 83 nt, Homo sapiens
cagcgggcccggccgccacccgggaaagacaggccgacagcgggcgaccgcggcccagccagcgggaccggcgaccaggcgaa

SEQ ID NO: 171432 - RNA, 72 nt, Homo sapiens
cacgagaagaggaggcggggagaccaggaccgcccacaagggaggcagaacgcaagagacagccagcgaaac

SEQ ID NO: 171433 - RNA, 83 nt, Homo sapiens
caccacgcggccacggaacaaccgaacgcaccgaggagaagaccaggaggcgggccaaggaaaacacgagccacgaagaccgc

SEQ ID NO: 171434 - RNA, 85 nt, Homo sapiens
ggccggagcccagcagcggggagccccgagaacgccccagcggggagacacagaaggggcacccggccgccgccagggcaaggac

SEQ ID NO: 171435 - RNA, 80 nt, Homo sapiens
ccagaaagccccggaacaaaaagccccagaccagagacagaagcagaggacgccagcccgcgccgaggccgaagcgaaaa

SEQ ID NO: 171436 - RNA, 69 nt, Homo sapiens
gcccaccggagagcagagagcggaaaacggcgcagccaacaagggggcgggaagcggggaaaggaaaac

SEQ ID NO: 171437 - RNA, 70 nt, Homo sapiens
cccgggcgaagagcccccccccaaggcacaggaagagggcggcacgcggccagagagcacaacgggagga

SEQ ID NO: 171438 - RNA, 82 nt, Homo sapiens
aagaacccgaccgacggagagagacagggcagggcagcagcacgaccgacccagcagccccggcagacccagggaacggaaa

SEQ ID NO: 171439 - RNA, 49 nt, Homo sapiens
cgaggggcggaacacccgccaaagcagagaaaagaaggaggcgccaggg

SEQ ID NO: 171440 - RNA, 71 nt, Homo sapiens
aacaaggcgaagagcaccgagggaagaagaagacagcacggcgagaaacgaacggaaggaaacagaaacca

SEQ ID NO: 171441 - RNA, 97 nt, Homo sapiens
caaacaggcagccggcccagaaccgccaaagagaagccaagcggggaagacaagccacgccgcaagaagagccacaggaaagcaaagaggcgagcca

SEQ ID NO: 171442 - RNA, 83 nt, Homo sapiens
gcggaaggagcacgaggaagcacaggaagcgccaggaaacacaacgcaagggccaacgcaaaacacagccaaggccaaccacc

SEQ ID NO: 171443 - RNA, 72 nt, Homo sapiens
cacgaaaccggcaagccagcggaggggagccaggaaaggcgaacaccccaggccgcgaggcccccgagccag

SEQ ID NO: 171444 - RNA, 54 nt, Homo sapiens
gccgccaggcccgcaggaccgccggagacagggcaagagacggcgcaggaccgg

SEQ ID NO: 171445 - RNA, 72 nt, Homo sapiens
aaaacaagaccaggaagaggaggacgaaaggacagacgggccagccgagccggccaggaccagggggaaccc

SEQ ID NO: 171446 - RNA, 70 nt, Homo sapiens
aacggagacgcaggagaagaacacccgccgaccaaagagaccccgacaagggaccgggcgggccccgcag

SEQ ID NO: 171447 - RNA, 63 nt, Homo sapiens
aaggaagccgcgcgcccgcccccgggcgcgcggcaggacgcaccagccgaggaacgccggcga

SEQ ID NO: 171448 - RNA, 73 nt, Homo sapiens
agagacagcacaacacccagacagaggaagccagaaaggaggagcaaggaagcccaggaacgagaacccaagc

SEQ ID NO: 171449 - RNA, 84 nt, Homo sapiens
ggcaaagccagaccagcggccgggggcagaccccagcccacaacccacgcgcaccggcgcccagcgacaaagaaaagccagcgg

SEQ ID NO: 171450 - RNA, 75 nt, Homo sapiens
ccccaggccagccgaagcgagaacgaagggcacacgaacgaaaggaaacacaggcccaagcacagaggaaacgac

SEQ ID NO: 171451 - RNA, 72 nt, Homo sapiens
gaaacaggacgaaaaaagggcaagaagccagaaggccggacccaagccagaagcccgcaaagcccccagacc

SEQ ID NO: 171452 - RNA, 77 nt, Homo sapiens
agcggggcacaggcgggcacgcgcccagggacgccagacaaaggccgcagggcgagggcaggaggagagcggcaacc

SEQ ID NO: 171453 - RNA, 74 nt, Homo sapiens
cagagcccccagaaaggcgaaaacgggacaggaggagggcagagccaagacgccagggaagaagggacacagag

SEQ ID NO: 171454 - RNA, 73 nt, Homo sapiens
ccagccagacaccagaggagaggcgcgagccgggaggacgcccccgacaaccaagccaccggacccggcagac

SEQ ID NO: 171455 - RNA, 88 nt, Homo sapiens
gacggagggagacaaagcagcgcccgcgccgggcccggaaagcgccgcccagcagccgcaggccaccgaaagacacagggagggcagc

SEQ ID NO: 171456 - RNA, 59 nt, Homo sapiens
agaggccagacagagcagcggagcagccccgcgaagcacagccacaaccggcacgacga

SEQ ID NO: 171457 - RNA, 78 nt, Homo sapiens
gcaacagcaccggggacagcgagcggcacagaagaccacgcccagcaggaggccacgcgcagccccggaagagccacc

SEQ ID NO: 171458 - RNA, 77 nt, Homo sapiens
gaaaacagacacagccagccagccacacggcagaaaaagaaccgggaagccggaagcaggacgccgcccgaagcggg

SEQ ID NO: 171459 - RNA, 73 nt, Homo sapiens
aacagaaaacgggaagagagggaacacgcaggagggcaccaggaagggaacagcaagcgaagaaggaacgcca

SEQ ID NO: 171460 - RNA, 81 nt, Homo sapiens
cacggcccaccaagccaacaggggcacccggagccagcccggggcggcagcccggccaagcgccaggcggagacccacagg

SEQ ID NO: 171461 - RNA, 75 nt, Homo sapiens
gaaccgggagaggaaccggcccagagcacagaagagccaaaccccagccaccggaagaagaagagaacaccgaga

SEQ ID NO: 171462 - RNA, 83 nt, Homo sapiens
gagcggagaaccgaagagcaaaggcaagaaggcaacgacgccacgggaaggaccaccaaccagggagaacaacacccacagcg

SEQ ID NO: 171463 - RNA, 85 nt, Homo sapiens
acaacaagagacgggacaagacagggcaaaggacagaccaggcgacagacacagcaccggccccggcagcgggacgcaggacggc

SEQ ID NO: 171464 - RNA, 79 nt, Homo sapiens
cagcaagaacagccaaacaggcccgcagcccccggaagccaaagacccccagggacccggccccagcaccgccgggagc

SEQ ID NO: 171465 - RNA, 84 nt, Homo sapiens
cacaggcaccgcccacacccgggcggaacgacgacggccaggccaaccgggagacagagcaggaaaccccccaggcaagaggcg

SEQ ID NO: 171466 - RNA, 71 nt, Homo sapiens
caagaccagacgaacagacagaacgaacagagagacgaagggccagaccgacagggagcagccacacagac

SEQ ID NO: 171467 - RNA, 66 nt, Homo sapiens
gagagggaagagaaggggaagagaggaaggcagaggaaaaggaagacgcccaccagccggacaccc

SEQ ID NO: 171468 - RNA, 67 nt, Homo sapiens
aaaaagagaagaaggagagcagagcaaaacccgaacggcagaccacccgaaagggcaacgcagaggg

SEQ ID NO: 171469 - RNA, 74 nt, Homo sapiens
ccgcgaccagaccgcggccggggagcccccggcccggcagccgagagcggcccaggaggaacaaccagcccacc

SEQ ID NO: 171470 - RNA, 64 nt, Homo sapiens
agacaagaaaaagcggaaggggagagccacaggagacgacagaacagaagaggggaagcacccg

SEQ ID NO: 171471 - RNA, 74 nt, Homo sapiens
acaaagcaacaaacaacgaaaccacgccgcaaaccagacagaggaaaagggcccaaagggaggcaagaccaaca

SEQ ID NO: 171472 - RNA, 82 nt, Homo sapiens
agaggggacgacagagccagcgagcgaaccagaccaaaaacgcaacaacagacggggaaagacagagaagcgaagacagaga

SEQ ID NO: 171473 - RNA, 55 nt, Homo sapiens
ggacaagccccaggccgaggagcccacaggaaacagaagacagccgaaccaaggg

SEQ ID NO: 171474 - RNA, 57 nt, Homo sapiens
ggaggggcagccacccccggcacacaagccagccccccccgggaaccaccaggccgc

SEQ ID NO: 171475 - RNA, 75 nt, Homo sapiens
agcccccagcgggaacaggcacccgccacagaccgggccaaacaacccaggaggaagagacacgcggagggagga

SEQ ID NO: 171476 - RNA, 77 nt, Homo sapiens
aaaccaaggagcccgcgacgcgaggccaaggaaagaagggaaacaccccaacccccagacgaacccccccaccaccc

SEQ ID NO: 171477 - RNA, 80 nt, Homo sapiens
agccgcagccgagccaccagagaagcggcacagcagagaaggagcagagaacgaccaagaggaggccggggggggcacag

SEQ ID NO: 171478 - RNA, 53 nt, Homo sapiens
aacaagccccaagacacccaagcagacaaagccagacaaagcgggaggcccgg

SEQ ID NO: 171479 - RNA, 78 nt, Homo sapiens
gagccgagaaccaggaggagaagcgccacgcgagcaacaaacaagacagagagaaagagaggagccaacagacccgca

SEQ ID NO: 171480 - RNA, 77 nt, Homo sapiens
aacaaaaagcagcaaaccggaccaccccgaagaaagcacaggacaaaacagcaccaacggagaaagacaacaggaag

SEQ ID NO: 171481 - RNA, 65 nt, Homo sapiens
gccacagccccccaacccgcgcagcggaccggccaaaccaagccgaggcccagcggaacgccccc

SEQ ID NO: 171482 - RNA, 72 nt, Homo sapiens
gggcgccacccgaggacaagccagacgagacggaggcacacgcggccaggacacacagacaaagacaggaaa

SEQ ID NO: 171483 - RNA, 83 nt, Homo sapiens
ccccccaccgaaccgacaaggggcacccagcaccgaagccaagaaaggggccagccgggccgccgagacgccgagcgggagcg

SEQ ID NO: 171484 - RNA, 109 nt, Homo sapiens
aaaggccagggagaaccaagggcccaccggagcagcccgggaaaggccaggagaacggaaaacagccccaaagcagcagaccgaagaaagaagacccgcaacgacaaaa

SEQ ID NO: 171485 - RNA, 83 nt, Homo sapiens
aggcaccaaaggccaccggaggccccaaagaacccgcgagacacaaccacacaaaccagccagcacgggggcccagccagcca

SEQ ID NO: 171486 - RNA, 76 nt, Homo sapiens
agccccgcgcgggacccggggcgccacgggggccagaagcagacggaacagccccaagccggaaacccaggaacgg

SEQ ID NO: 171487 - RNA, 59 nt, Homo sapiens
cgcaagggaaagcacgaaagaggacgagccgggaggggagacaccgaccccaagcgaga

SEQ ID NO: 171488 - RNA, 75 nt, Homo sapiens
cagggagagggaagaaaagcggagaaggagccaaacccaaagagagaagaacggcacacaccccccagaacccga

SEQ ID NO: 171489 - RNA, 62 nt, Homo sapiens
aaggacaaaagccaagaggaggacagcgcacacagcaagcacgaggacacacagcaacgaag

SEQ ID NO: 171490 - RNA, 78 nt, Homo sapiens
cccgcgggcggccggcgggcggggcggcggcgcgacagggggcggcaccacgccccccccgccccgaggcccggaagc

SEQ ID NO: 171491 - RNA, 59 nt, Homo sapiens
gacgaccagcggacacgaacaggccgggcgaggcgaggccacccgggccgccggcggcc

SEQ ID NO: 171492 - RNA, 58 nt, Homo sapiens
acgggagccaacaggcagcggggcgggcgagcgcaggacggagcgccgacccaggcgg

SEQ ID NO: 171493 - RNA, 86 nt, Homo sapiens
cggaagaggacgaccaaggaccccagaaccccaagaaacagggaacccacacagaagcaaagaaggccgagggacgaggaccggag

SEQ ID NO: 171494 - RNA, 82 nt, Homo sapiens
aagaggagccaggaggagagcccacagggcaaagagagcagacccgaggagcccgcagccgcaagaccgccacaagaaagga

SEQ ID NO: 171495 - RNA, 60 nt, Homo sapiens
cgccgaccgccgcccgccacacccgccgccagcgcgcgaccggccccaacgcacaccacc

SEQ ID NO: 171496 - RNA, 82 nt, Homo sapiens
gagggaggccagcggccgcaccgaggcgagcaggagcagggaacagggcccacacccaacccagccgagccgcccgccagac

SEQ ID NO: 171497 - RNA, 72 nt, Homo sapiens
cgcgggacccgccggaagcccaggcaacccccggagagcggaaaagcagccacaagcaaacccgacggaggc

SEQ ID NO: 171498 - RNA, 86 nt, Homo sapiens
acggagccgcagagggcccacggggaagcgagagaggagggagaagaagaaagccagccgaaagaagcagcccaccgggacaagag

SEQ ID NO: 171499 - RNA, 73 nt, Homo sapiens
gggagggagacaaggagacaacaggcacaaagagagaaggaacacccacagggcagacagagaaagaacacaa

SEQ ID NO: 171500 - RNA, 75 nt, Homo sapiens
aaccgggcggagccagccgggccagccccgcgacggcccacgagccaagcccagcggacgaaaagaacaagcgcc

SEQ ID NO: 171501 - RNA, 76 nt, Homo sapiens
cgacccaaagggaaaacagaaacaggcggcaccaggacgccgaaaagcgaccggacgcaggcacagggacacgcga

SEQ ID NO: 171502 - RNA, 87 nt, Homo sapiens
gcgaggggccgcccgcgggaaggcgccggcccgggccgccccccgggaacgggagccgccgcgcagaaacagccaccccaaagccca

SEQ ID NO: 171503 - RNA, 57 nt, Homo sapiens
gaccaggcccgggggcggcggccacgccaaggacgggcggaaagagaaaaggccccc

SEQ ID NO: 171504 - RNA, 90 nt, Homo sapiens
ccaagcagaagccgaggagccggagaggggcggcgccgcgcggccgagcacaacaccccgacccccaaggaggcagaggagccaccaggc

SEQ ID NO: 171505 - RNA, 33 nt, Homo sapiens
aggagacgcgagacaaagagcgcgaaaaggcga

SEQ ID NO: 171506 - RNA, 73 nt, Homo sapiens
gccgcagaacacgcggacacgcccggggcgaggcccgcggggccaggaggaagcacaagccagcagacgacaa

SEQ ID NO: 171507 - RNA, 92 nt, Homo sapiens
aaaaaaaaaaggcagaacccgagacaaccaccgggggccaccaccgaggagccccaggggaagccacgaccacacagcaaggcagagggcgg

SEQ ID NO: 171508 - RNA, 89 nt, Homo sapiens
cagcaaacaaagaggccgcggaggagaagccggaggaggacaacgacaccaccgcagcgacgagcagcaaaaccccggacaagaaagcc

SEQ ID NO: 171509 - RNA, 76 nt, Homo sapiens
cagccgaccgagcccaggagcgccacgcgcggaaggcagcgcccagcagcgcagcacgaggagaacaacagaacag

SEQ ID NO: 171510 - RNA, 36 nt, Homo sapiens
ccgagagcgggacacaacaacccgacgaagacgcca

SEQ ID NO: 171511 - RNA, 54 nt, Homo sapiens
aggaggagcgcagcccggcccgccagcaggggggcgcgccagcaaaacacaaag

SEQ ID NO: 171512 - RNA, 76 nt, Homo sapiens
accagggacagccagaccggagaagcaaaacggagccgccgcgcaggggacgcgccacagacgggggaacccagaa

SEQ ID NO: 171513 - RNA, 61 nt, Homo sapiens
gagcaaggaggccccagcggaccgaacagaccggagggggaagaaaacaaccaacagagcc

SEQ ID NO: 171514 - RNA, 66 nt, Homo sapiens
aaggaggaggcagcaccacagaaagagagaacaaaccaggggagggaaacgagaaaaacgacgcca

SEQ ID NO: 171515 - RNA, 53 nt, Homo sapiens
acagggcaaaggccccgacaggcaccgacagcacagcagaaaggccgccccgc

SEQ ID NO: 171516 - RNA, 81 nt, Homo sapiens
accaccaccacccacacccaccaacaacaccacaaaaccacagccaaggacgacaaaccagcaggaccggagagcaaacga

SEQ ID NO: 171517 - RNA, 80 nt, Homo sapiens
ggaagaccccaccccgaaacggaggaagaacgccgccaccagccaccaccaagcgcaccccagaaaacaccaaagagagc

SEQ ID NO: 171518 - RNA, 84 nt, Homo sapiens
cgagaccggagagccgcaggacggcgcggcagagccccgacgccacagaacgagcggaagcgagggcaccaaccaggagaggag

SEQ ID NO: 171519 - RNA, 69 nt, Homo sapiens
gcaccagcacaccacacgcagcgcgcaacaccccacaggaggggagggagcaaagccgcacacggaggg

SEQ ID NO: 171520 - RNA, 87 nt, Homo sapiens
aaagaagaagaacggaaggaacagagggggcaaagccaacaaccccccgagccccccgagggcgcgcgggggcacagcccaggcgca

SEQ ID NO: 171521 - RNA, 74 nt, Homo sapiens
cgcgaacccaaggcagacacaacaccacaagcaggaagaagaagcggccgcgagaaggagcgccgggaagaagc

SEQ ID NO: 171522 - RNA, 82 nt, Homo sapiens
cgcccagaacagggcgcccgagacccccagcgcgccggaggagaacaagagcccgagacaagcagaccggaagaccgacgga

SEQ ID NO: 171523 - RNA, 111 nt, Homo sapiens
caacccggagaaaagcacgccacaagaaaccgaaggaccagaggaacacgcgaacagcgcggagaacacaaggaagaaaagaaagcaagacaggcaaggaagagaggaaga

SEQ ID NO: 171524 - RNA, 87 nt, Homo sapiens
accgcgaaggaccagagagggagcccgccacacagcccgacggccagcggaagggccagggacaaacccaccgaagcaccaccaaaa

SEQ ID NO: 171525 - RNA, 77 nt, Homo sapiens
cccccagagccggggaagcccagggaagaaggcgaggcaccggaacagacgcaggaagaagcgcacacaacagaaga

SEQ ID NO: 171526 - RNA, 74 nt, Homo sapiens
ccgccgccacccacaaggcacaacaggaaggagggccagacaaggggaacacaagaggagagaaggggaccgca

SEQ ID NO: 171527 - RNA, 78 nt, Homo sapiens
aaaccaggacacaccgagacccaggaagccagcaagacggagcccgaggaaagcagaaagcccccaaaacacaagagg

SEQ ID NO: 171528 - RNA, 53 nt, Homo sapiens
gggccgggagggcgccaggaaccggccgaaccagaccggagcaggggcagcga

SEQ ID NO: 171529 - RNA, 84 nt, Homo sapiens
gcagccaagaagaggaacgaagaccacaaaacgaaaagaaccaaaacaagagcgaggcagccaacccagagaagcagacgggag

SEQ ID NO: 171530 - RNA, 80 nt, Homo sapiens
ccaaaaacaaaacgaaccaggacggcaaacacagccagcggcccaccccaccagcaggccaaggcacgggcccagccacc

SEQ ID NO: 171531 - RNA, 76 nt, Homo sapiens
aaggcaaagggcaaagaacccaaggaccgcaaagaaaacccagagaacaccacccgaagagacaccgagaaaggca

SEQ ID NO: 171532 - RNA, 72 nt, Homo sapiens
ccgaagaaaacagcgggaagagacagccaagggggcggcgaacaagcggaaaaagaagcggagagaaacgca

SEQ ID NO: 171533 - RNA, 34 nt, Homo sapiens
aaagagccagcccgggaaacacaaagaagacacc

SEQ ID NO: 171534 - RNA, 60 nt, Homo sapiens
cgggacagagggagccaggcagaggacccaaagacaggaccacgcaccagcagagaagga

SEQ ID NO: 171535 - RNA, 70 nt, Homo sapiens
aggaccggagcccccggaaaacacgcccggccggggagcaaggggaggagagaagaagagcccccaagca

SEQ ID NO: 171536 - RNA, 74 nt, Homo sapiens
cccagcagcccaggggaaaggaacacccccagcggccagcgcagagccagaaggccacgcccaaagcccaccac

SEQ ID NO: 171537 - RNA, 46 nt, Homo sapiens
agagagagacacggagacaacggcaagcggagaagagcaaggccga

SEQ ID NO: 171538 - RNA, 38 nt, Homo sapiens
acacaaagcggccacaaacaagccaccaggacaggaag

SEQ ID NO: 171539 - RNA, 80 nt, Homo sapiens
cgagcaggaggcgccacagggcggggggcacggcagcgcaggaccaccgcgggcccggcccgggacagcacaggaagccg

SEQ ID NO: 171540 - RNA, 79 nt, Homo sapiens
aaggacaggacacagagcccacaagagcacaagccggggagagccaaagacaaagcaaaaacaaccaggcagagagaca

SEQ ID NO: 171541 - RNA, 65 nt, Homo sapiens
acacaacccggccgcagagcccagggaccagaagcagcagccccagaagccccgaagccggggca

SEQ ID NO: 171542 - RNA, 75 nt, Homo sapiens
acagcccaacaggaaaaggaagcaaaggaccaaagagcgggacaggacggacgcgcccaaaaggaaccagcccga

SEQ ID NO: 171543 - RNA, 84 nt, Homo sapiens
acgggagccgggagccgaggcccgacgcgggagcgcggacgaggggccgagaaacagacaacccacagaacaaagcggaccaag

SEQ ID NO: 171544 - RNA, 79 nt, Homo sapiens
aaagggacccgacacgaaacggcagaggggccggaagaaagcggcgaacccaggaacagggcaggaaaaggggaggaag

SEQ ID NO: 171545 - RNA, 77 nt, Homo sapiens
caagaaaagacagaagagaaagggggggcgacgcgacaaagacaggaaggaagggaacacggacgacgagacacgac

SEQ ID NO: 171546 - RNA, 102 nt, Homo sapiens
gggggcggagccaggaagcaaaggaagcacacacccgccccccccgcaggggacagcggacgcaagcgcccgaaggccaccagcgcaccggcggaaggagcc

SEQ ID NO: 171547 - RNA, 70 nt, Homo sapiens
cacgacccaccagccccacgagccgggcaagagcccaaggacggcccacacggggaagaccagccccacc

SEQ ID NO: 171548 - RNA, 71 nt, Homo sapiens
cggaggaaagagaagaaagaaccgaaagacacgagaccagaagccaagaaacgaggagagccaccaccaag

SEQ ID NO: 171549 - RNA, 76 nt, Homo sapiens
cccacgacggaagccaaggccacgccagacgggcgcacccccgaagcgaccgcagcggcgcccccacacagacagc

SEQ ID NO: 171550 - RNA, 77 nt, Homo sapiens
caaagccgaagaccccggagccccagccagggaaccacggagcacgagaaaacggcggggccaagccgacgccagcg

SEQ ID NO: 171551 - RNA, 79 nt, Homo sapiens
gagggccgccggccgaagccacgcccacgggcggagcgggcccaccggcccgcaacaaggagaccgcgaaggcgacacc

SEQ ID NO: 171552 - RNA, 77 nt, Homo sapiens
gggcggcagaccgagagggggccagcccagacggggggagaaggacggcagaaaacgagacgccggcggcgaaaaaa

SEQ ID NO: 171553 - RNA, 87 nt, Homo sapiens
aaagcgaggaaggggaggacgaggaggaggccaggggggccgaaccgcggcccgagccgagccagaggggaggcaagcccagagcgg

SEQ ID NO: 171554 - RNA, 73 nt, Homo sapiens
gcgggggaggggagcccgcgcccgccgcgggagagaggacccccccccccccccaagcggagcggaggcagac

SEQ ID NO: 171555 - RNA, 86 nt, Homo sapiens
cgcgaacggggccagcgccgcgcccggggccggcgcccgggccaccggccgcagaagaagaagcagacgacgccacgggaaaagaa

SEQ ID NO: 171556 - RNA, 72 nt, Homo sapiens
cgaacacccgccggaccaagggcagaaaaagaagcaacagaaggcaacaacccccaaggaaccccaggacag

SEQ ID NO: 171557 - RNA, 77 nt, Homo sapiens
ccccgagagcggaaacagacaccagaagcgggagaaaaaaaccaacggcaaaagagagcgcccagggaccgagacgg

SEQ ID NO: 171558 - RNA, 78 nt, Homo sapiens
caaccgcccacccagcgcacaccccagccgagaaaacaaaggcgaagcaagagcgagaaccaaaagagaaacgagaaa

SEQ ID NO: 171559 - RNA, 74 nt, Homo sapiens
gccccagccccgagccggcgaacaaggccccccaggccacccaggaccagcggcacacccccccgcggcccaaa

SEQ ID NO: 171560 - RNA, 71 nt, Homo sapiens
gccacacgcgacgggggagccgcggccaggaaggaggagggcaacgaacaagccacagaccaagcaccagc

SEQ ID NO: 171561 - RNA, 76 nt, Homo sapiens
ccagccggcggagaggaccacagggggcgccgagcccccagaaagggcggcccacccgccacaacgacacagcacg

SEQ ID NO: 171562 - RNA, 53 nt, Homo sapiens
cgaaacagaaaacaagagaccacagaaggccccaccgaagggaagccgaagga

SEQ ID NO: 171563 - RNA, 63 nt, Homo sapiens
cggaaggacggggcaggaagaaaaaacaccgaaaacgagaaacgaaagagacacgggggcaca

SEQ ID NO: 171564 - RNA, 73 nt, Homo sapiens
agcgcggacgcgcccgggccaaccggggccgagaaccaccacggaggggccaggccacgcggggccggccggc

SEQ ID NO: 171565 - RNA, 78 nt, Homo sapiens
acggcggacccgggggaaaccgcaaaaggccaaggaaaaggaacagagagagcagaaccgaaacggggaaagaccgaa

SEQ ID NO: 171566 - RNA, 47 nt, Homo sapiens
cccaccagagcaccgcccacccgccaggacccaaagacaggaccacg

SEQ ID NO: 171567 - RNA, 74 nt, Homo sapiens
agccacagagcaagagaaggagcccggagggaagcgagagcgacaggaagccgccagcggaagccgcagaagga

SEQ ID NO: 171568 - RNA, 72 nt, Homo sapiens
ccgcccgccagaaccgcgcgccacccacaaccaggccgggaacggcagacgcagcagagagaccaccagcga

SEQ ID NO: 171569 - RNA, 72 nt, Homo sapiens
gggaaagggccggaaaacacacgccccgaaaccgggcaagccgagaggaagaagagagggcgaaggaggcca

SEQ ID NO: 171570 - RNA, 113 nt, Homo sapiens
agagccacagagggggaaagccaaggaaaaacggagagccacaaaaaaggaagcgaaaagacgaggaacagaaaagagaaaccagggagcgcccaagaaaccaagaagaacac

SEQ ID NO: 171571 - RNA, 54 nt, Homo sapiens
cccagaaggcaacgcgccgcaaaacagaacgcgggggaagaagagcgcaccgaa

SEQ ID NO: 171572 - RNA, 99 nt, Homo sapiens
cggcacagccccagcaacaccccgcagccgcgcaaaaaaagaaaaccaacggcccggaggaccacagcccaggggccccaggcgaaacccagccggagc

SEQ ID NO: 171573 - RNA, 73 nt, Homo sapiens
aaggaccggagggcggggcgggacgccccaccggccaggggccggacccgaaaacacaagaacacagcaacac

SEQ ID NO: 171574 - RNA, 77 nt, Homo sapiens
accccccgagcagcccggggaccagcacgcaggaggcagaggggacacaagaagaacgggacccacaaagagaagga

SEQ ID NO: 171575 - RNA, 96 nt, Homo sapiens
gaagcaaggcgacgccagaggaggaaaggaagacaaggacacacagcaacgaagcaggggaggagggaagaccggacagcgagccaagagagaaga

SEQ ID NO: 171576 - RNA, 69 nt, Homo sapiens
gacccaacagacgcagaaaaacccggagcaggaaaggacagggaagcaggagcgaccgcccaccgccac

SEQ ID NO: 171577 - RNA, 56 nt, Homo sapiens
agagacacaaaaacagaacagggacaccaggagacagaacagacagaaaaaacaac

SEQ ID NO: 171578 - RNA, 76 nt, Homo sapiens
cccgcacccagcaccaacagccccagcgcagcgcggagaggaagaagacggcacgggacccccagcacaggcagca

SEQ ID NO: 171579 - RNA, 85 nt, Homo sapiens
accaccaagaagcggcaggcaaagaggacaaggaccaggggacccagaaaggaaccaggaccacggagacgaccagaggcaggac

SEQ ID NO: 171580 - RNA, 79 nt, Homo sapiens
cagaagccgagcaacaccccggccaccgacccacaagggggcacccgaggaggaagagggcagggcccacggaaagaag

SEQ ID NO: 171581 - RNA, 88 nt, Homo sapiens
ccggccacagccgcagcggagcccacgagaggcagcgccaggcggagcagaccaccggggccaggaaggagaaagaaccagagaagga

SEQ ID NO: 171582 - RNA, 74 nt, Homo sapiens
gcacccgcgacccagaaggaaacaaaaagccaacggaaaaagaaacggcagagcacaggaccgaagaaggggac

SEQ ID NO: 171583 - RNA, 67 nt, Homo sapiens
ggcacccggggggcagcgaaagggaaagacaaggagccgggccgagaaaccgaaccagagaccagag

SEQ ID NO: 171584 - RNA, 82 nt, Homo sapiens
cgccaagggcgaggggggcgggagcggacgagccccgggaagaagaggggcggggcgggcaccaggaacagcagagaacaaa

SEQ ID NO: 171585 - RNA, 61 nt, Homo sapiens
gaagaccaagacaggccggaacccgaaaggcagccagggccccgaaggagcacccaaccca

SEQ ID NO: 171586 - RNA, 61 nt, Homo sapiens
gccaagcaaccaccagcagcccccagagcggaacacagaggagaaggcagagcccccccag

SEQ ID NO: 171587 - RNA, 82 nt, Homo sapiens
cagaaaggaggaaaaagaaacgaaaagcgcacgaaacgaagggcaccggccacccaaaacaaaaaagaagccaagcccgggg

SEQ ID NO: 171588 - RNA, 56 nt, Homo sapiens
gagcccaccgaagggcaccagcacacgccgccagggcaacggcgaagacaaggagc

SEQ ID NO: 171589 - RNA, 51 nt, Homo sapiens
aaggggacaggccgaaagaccgcaaagggacgggagacccacggccacacc

SEQ ID NO: 171590 - RNA, 75 nt, Homo sapiens
gcgcggggcaaaaccaaccggagcagccgagggaaccagaggggccagacgaaaggaggccggcagaagacgcca

SEQ ID NO: 171591 - RNA, 75 nt, Homo sapiens
cggcgcgccggcgcgcggcgcggacaggcccaaacgagagaacgagggccaaagccaacgaagaaaagaggagcg

SEQ ID NO: 171592 - RNA, 41 nt, Homo sapiens
gagaaacggaccgccaaagagagcaacgaaagagaggacaa

SEQ ID NO: 171593 - RNA, 70 nt, Homo sapiens
gccgaagcaacaaggcacacagaacacaagagccaccccaacagcagccagcaaggagcccgcaaggcaa

SEQ ID NO: 171594 - RNA, 89 nt, Homo sapiens
ggagacggggggaaacaggcgaggcggcggcgcccggagggcagcgagcaccccagagagaccggaccaaacaaccaggaagcgccaaa

SEQ ID NO: 171595 - RNA, 69 nt, Homo sapiens
accaagaaccagaaaaacaggaaaccaaccaaagggacaccaccaaggaaaacacagaacggagagaaa

SEQ ID NO: 171596 - RNA, 61 nt, Homo sapiens
gcgggacccaagggggccacacagccaaacccaaaagcagaccccagccagacggcaccga

SEQ ID NO: 171597 - RNA, 88 nt, Homo sapiens
ggccggagcagaaacgagcggaccacggagcccgggaggggaaccaaccgggagccccccaagagacccaggggaagacccaaaggca

SEQ ID NO: 171598 - RNA, 76 nt, Homo sapiens
gacacgaggaagagaggacgagacgacaacgagggagccgcggaagaaggccggcccccaaaaagaggcgaacaga

SEQ ID NO: 171599 - RNA, 54 nt, Homo sapiens
cgccggccggcggccggagaaacgaggagccaggcaaccagagaagccgaacgc

SEQ ID NO: 171600 - RNA, 83 nt, Homo sapiens
cgaagagcaaaggcaagaaggcaacgacgccacgggaaggaccaccaaccagggaccaaggcggagacagcgagacaaggcgg

SEQ ID NO: 171601 - RNA, 71 nt, Homo sapiens
aggggaagccacgaagcggagagcaggacagagacaggcccagggaaggccccccaggcagagcaaagggc

SEQ ID NO: 171602 - RNA, 87 nt, Homo sapiens
ccggcacacagccgcgcagcgggcgagaagcgcccggccagccggcggagcccacgacgagcggaaaaggacacggacgacaccgag

SEQ ID NO: 171603 - RNA, 82 nt, Homo sapiens
cagggcgccgccacgccgcaggaggcggaggacgagaacccccgcgaaccagaggaacccagcgagcgagagcggaccagag

SEQ ID NO: 171604 - RNA, 59 nt, Homo sapiens
agggccagaaagaaggacagggccgagcagggagagagagcaaccggagccaggcaaga

SEQ ID NO: 171605 - RNA, 66 nt, Homo sapiens
caagaaaacaagggaaaggcgcccggcagggcacccacaagagacaagcccagggacgacgcagac

SEQ ID NO: 171606 - RNA, 86 nt, Homo sapiens
ggaaaaggcaaaaacccacaccgcaacccagcgagagaaagagacgggaacagagaagcgagcggaggagacggaggcaggagagg

SEQ ID NO: 171607 - RNA, 77 nt, Homo sapiens
gcggcgagcgcccgggaaccccaggcccgggggcacaaggggcagggcagcccaaggaccaagggagaagagaccca

SEQ ID NO: 171608 - RNA, 73 nt, Homo sapiens
cagaaagacacacggagacaaaccgcgccaagggcgacccaccaacaggcaacccagacaaagaagagcagcc

SEQ ID NO: 171609 - RNA, 75 nt, Homo sapiens
acagcaaagcagggaggagggaggacacacagggggagaccaaaaagggagcagacccggaggacaaccagaagg

SEQ ID NO: 171610 - RNA, 52 nt, Homo sapiens
gcgggggggggccgaccggagcgggccaggccgggaggccaaagagcacagg

SEQ ID NO: 171611 - RNA, 84 nt, Homo sapiens
cgagaacgagcacaaccccagggccgcacgggggcgaccaggccgccagccggggcaagaaggaagaagacggcacgggacccc

SEQ ID NO: 171612 - RNA, 74 nt, Homo sapiens
cggagagaacgcggaaggagacggagaagaacggagggaaggaagcaagaaacagggaggacagaaacacggga

SEQ ID NO: 171613 - RNA, 73 nt, Homo sapiens
ccccgcgcagcggccccggcggggcaagagcgggggcgggaccccgccgcggcgggagggcgccaacggccga

SEQ ID NO: 171614 - RNA, 93 nt, Homo sapiens
gcgacaaagaaacagccagaacccaagccaaaacacagcgaggagaaacaggcaggaacacagccaggcccccacccccaggaggcgaaggca

SEQ ID NO: 171615 - RNA, 83 nt, Homo sapiens
gagcggagaggagagcacacggcaccgagggagcggcccagcaggagggcggggccgcggcagccacccccacagcacgccac

SEQ ID NO: 171616 - RNA, 80 nt, Homo sapiens
agacggggcaggaaacaaggccgaccagcagcagcagacgggaaagcgcaccagggaacaaagccgccaggaacaaaaac

SEQ ID NO: 171617 - RNA, 78 nt, Homo sapiens
gcgggccgcgcggccgcggacggagccgggcgcggcgcacgccgcccgcccagggggcggaaccgaaggcccggaccg

SEQ ID NO: 171618 - RNA, 59 nt, Homo sapiens
agcgcagccacaaggccgcaggggagccgagagccacagcgcgaacagagaaaccagag

SEQ ID NO: 171619 - RNA, 72 nt, Homo sapiens
gggccaagccaccaacccgcaagaacccagaacgccccggcagggccaggcagcggccagcaaaccgcaaac

SEQ ID NO: 171620 - RNA, 75 nt, Homo sapiens
cggagaacgcggggagaagcccacccggaggagccagcgccgcgacgggacgggagaaagaacagacaagccgca

SEQ ID NO: 171621 - RNA, 59 nt, Homo sapiens
cagcccccaacgaagaggcacaaagacagaccggcgcaggagaaaagggacagggccgc

SEQ ID NO: 171622 - RNA, 82 nt, Homo sapiens
gggggcggcgggaaggggcacgaacgcggggacgcgacagcgcccgcggggccgggcggggcaggaagccaggagaaccaca

SEQ ID NO: 171623 - RNA, 62 nt, Homo sapiens
gaggaaggaccagccaggacagccaggcacaaaggaagcagccaagagcccgagccgcccac

SEQ ID NO: 171624 - RNA, 90 nt, Homo sapiens
cccaggcagcaaggcaaaacaggcaagagcaacgaaccaaagcaaaggaggccgggggaagacggaaaagagagacggggccccggggag

SEQ ID NO: 171625 - RNA, 67 nt, Homo sapiens
acaaacaagaggcgagggcaccaaaaaaacgccaccccagaagaaagacaaggcgaccgaaccaagg

SEQ ID NO: 171626 - RNA, 81 nt, Homo sapiens
ggcccacacgggagaaccaagcaggaccgccaggaggaaggcaaacaggagaaccaacagaggcaaaagcagagacaacaa

SEQ ID NO: 171627 - RNA, 70 nt, Homo sapiens
gcggcgcgaacaaggaacgaaacgcggccacgaaggagaccaggccaaccggagcgcacccacgccacaa

SEQ ID NO: 171628 - RNA, 68 nt, Homo sapiens
cccgacagagggggcagcagcgcacagcggacagcaagcagaagaagaggaggggcagcagcaggaca

SEQ ID NO: 171629 - RNA, 78 nt, Homo sapiens
cagacgcagggcgcccccgcagggacgcagccagcgaggccaccagcgccccgcgaaaggagcgcccgagacacgagc

SEQ ID NO: 171630 - RNA, 67 nt, Homo sapiens
gccacaaaaaaggaagcgaaagaggaaggcccagcgaagagggagaccaacgaggggacgcgcaaca

SEQ ID NO: 171631 - RNA, 78 nt, Homo sapiens
agcgacggcgcccgggagcggccggaggccccagcagccgaccgaggggaggaccagagaaaccagcaggccaacggc

SEQ ID NO: 171632 - RNA, 71 nt, Homo sapiens
aaggaggagacaggcaagacggcggcagaccggagaggcgcggcacaggaaagggacccgcgccgggaccc

SEQ ID NO: 171633 - RNA, 74 nt, Homo sapiens
gacggcacgccgacgggcaacagaccaccggccacaggccccagggcaggggcccggagagcgcgccccccagg

SEQ ID NO: 171634 - RNA, 53 nt, Homo sapiens
caggccagagaaggggaaggaggggcagcgaaaaccgaggaggagcaccagcc

SEQ ID NO: 171635 - RNA, 56 nt, Homo sapiens
cagccaaacaaaaagccacccagaaggaccgcaacacagagggcggaagccaccaa

SEQ ID NO: 171636 - RNA, 80 nt, Homo sapiens
agaagcagcaacagccagaaacaccaagggcaacgcagaaaaagcggggaaaacaaaaaaaagaaggagggaagaggggg

SEQ ID NO: 171637 - RNA, 77 nt, Homo sapiens
gcgagcacacaaaaaaaccaaagaggagccagaccagaccaccagccggaaggggcgaccggaccgggagaagaagg

SEQ ID NO: 171638 - RNA, 55 nt, Homo sapiens
cacaccccacgcacgcgaaggagaacagagacacccgggccacgagggcagcccg

SEQ ID NO: 171639 - RNA, 75 nt, Homo sapiens
cggccagaaaaggacgcaagcccacgccaaaaagggaaaaaagagagccacgacgaaagcaaacaccgacaaagg

SEQ ID NO: 171640 - RNA, 74 nt, Homo sapiens
cggcgcccccagccggagccccagacaacccggacggccggccaaagacacaggaacgccacaagaaacaacag

SEQ ID NO: 171641 - RNA, 71 nt, Homo sapiens
acccgggcgacggaccaagcaccagccggacgcacaaaccagcgagagaaagagcgcggaagcgggaaagc

SEQ ID NO: 171642 - RNA, 55 nt, Homo sapiens
gcaccgggaacgaagacacagcaagcacaaccaagcagaagagagaggagggcac

SEQ ID NO: 171643 - RNA, 81 nt, Homo sapiens
ccgaaaccccaagcaccaccaccaccccggaaaccagcagaagaagaaggagaaggagagaaggaagcgaggcgaagaaaa

SEQ ID NO: 171644 - RNA, 74 nt, Homo sapiens
gacccaaccaagggaccaggagacagacccagcacggaccccccccccagccgggcgaggccccgaaacgcagc

SEQ ID NO: 171645 - RNA, 82 nt, Homo sapiens
cccagcccaggcggcgcggacggggcggcgcagcaaaggagcagcgggagaaccagagcaccgcgaagaaagcaagcgggca

SEQ ID NO: 171646 - RNA, 82 nt, Homo sapiens
agcaaaaaggaaaaggggcccaacacagaaaggaagagagaagggcacagaccaagacaacgaaccccggccaggacaggcc

SEQ ID NO: 171647 - RNA, 125 nt, Homo sapiens
gcggccgggcaacgaccggcggggggcgcggcgccgggacgcaccgcaccgagggcgagcccaggggacagagacgaaccggccccccaggaccgaccacgcccggccggcccgcacgcgcagcc

SEQ ID NO: 171648 - RNA, 59 nt, Homo sapiens
cagagaccaaagaagcgagaagcaggaagaaagcggaagagagaacccaggacgagaaa

SEQ ID NO: 171649 - RNA, 91 nt, Homo sapiens
aaaggccaaagcccagccccaggcacagaccccagcgaggcgaccggcccgaggaccgccgcacgaccaaacgcagaacccacaccccaag

SEQ ID NO: 171650 - RNA, 74 nt, Homo sapiens
gggaaggaccagacggggacgcacacggaagaaacgcaacccaaggacacgagcccagccaggcgagccagcgc

SEQ ID NO: 171651 - RNA, 104 nt, Homo sapiens
gaagagagaccgacacccaagacaagacagcgcaaggcagggaccaagaaaggcccagggaccaaagcccggacaaggcccgagcaccaggaccgcagaaggcc

SEQ ID NO: 171652 - RNA, 78 nt, Homo sapiens
gaagcagaggaaaagaaggcaagaagaagggggaaggaaggcaccccgcaacccgcagagaggacccggcccgacggc

SEQ ID NO: 171653 - RNA, 74 nt, Homo sapiens
caaaaaggagaaggaagaagcagaccggagcagcagagacgcacagacaacagcagcgccgagaaaccggcagc

SEQ ID NO: 171654 - RNA, 69 nt, Homo sapiens
ccggcggcccgaccggccgcgacagcgaacagcgcggccgcaggaggagagaagaccgagcggaggagc

SEQ ID NO: 171655 - RNA, 76 nt, Homo sapiens
ggggcggggcaacgcggaagcgggaccccacaccagccagggaacaacggcccccagcagacagagcgggagggcg

SEQ ID NO: 171656 - RNA, 76 nt, Homo sapiens
accaagaaccaggccaagcgccgaacccgaggggaagaaaggaacagagacagacccgggggcccccaaggagagg

SEQ ID NO: 171657 - RNA, 56 nt, Homo sapiens
ccgaagcacgcgggagacgggccccccaggcaaagccaaccacgccgaacgggacg

SEQ ID NO: 171658 - RNA, 77 nt, Homo sapiens
ccagaacggaaaccacggacaaacaccccaaggaggggaaagcgcgaaaaagggcgcaaggccaagccagagacaca

SEQ ID NO: 171659 - RNA, 76 nt, Homo sapiens
ggacacggccagcgaggacagacaggacacaaaggaaaaggaaaaaacaaggggaagacccaaggaaccaggcgaa

SEQ ID NO: 171660 - RNA, 53 nt, Homo sapiens
gccagacaaccggagccacgccccacgaccgccagggaccggcccagcccacc

SEQ ID NO: 171661 - RNA, 88 nt, Homo sapiens
gcacaggcaccaagagccaaccgagggcgccgagaagccagcacgccgggagcggacacagcccagcaggacagaaggagcaagcggg

SEQ ID NO: 171662 - RNA, 80 nt, Homo sapiens
aaaccagaaaggggaggggagcacacagaagggccaaggaaaaacgagcagaaagaagccagggagaacacccagcagag

SEQ ID NO: 171663 - RNA, 75 nt, Homo sapiens
acggggaaagagaaccgaacccgaggcaaccaaagaggacgaagccaggacggaaggacgaaaacagaaagaccc

SEQ ID NO: 171664 - RNA, 80 nt, Homo sapiens
gcccgcagagagagagcgcgagagaggagagggcagacggacaagagcgcggaacaggacgccccgacccggggcaagac

SEQ ID NO: 171665 - RNA, 78 nt, Homo sapiens
ggcggccggagacagaaagaggaagggacacagacggccacgacgaagaaccaacaccacgggaaagaagaaaaaaaa

SEQ ID NO: 171666 - RNA, 41 nt, Homo sapiens
cagcagcgagaaggaggcaaaccagaccccaccggaagccc

SEQ ID NO: 171667 - RNA, 83 nt, Homo sapiens
cccagccgaaggagaagggggagcggccgcgaacaccgagccaaccccaccaccgaccccgagggcgccaggaggaagagggg

SEQ ID NO: 171668 - RNA, 85 nt, Homo sapiens
agccgggagacaccgccaccgccagcacaaagcgaagaacaaacagccgacgccaggaaacgggccgagcagcaacaacagcagc

SEQ ID NO: 171669 - RNA, 70 nt, Homo sapiens
gacgacagaccagaccaagcaacagagacggccggcaacaagcgaggggggaggccaggcgcccagaacg

SEQ ID NO: 171670 - RNA, 55 nt, Homo sapiens
cggccaagaacagaggaaggggccggggcagcagaagaggacaagcagacagcac

SEQ ID NO: 171671 - RNA, 82 nt, Homo sapiens
gacgggacacaccccaccccacaggacgccccagagaaagcccgccgcaccagcaagcgcgggcaaggccagcagagcccaa

SEQ ID NO: 171672 - RNA, 67 nt, Homo sapiens
gaacccgaagcgggcgcgcgcacggcaggacggaggcagaaaaccgcgcgggagggggcaagccacc

SEQ ID NO: 171673 - RNA, 63 nt, Homo sapiens
gaaagaagcggaagggaggcgcgcgaccagagagcaaagccgaggaccgacaagagccaggaa

SEQ ID NO: 171674 - RNA, 84 nt, Homo sapiens
gaacgacgaggcccgccaccggacggcggcgcccccgggccccagccgcacggcgagccgccggggggccggcggaggaaacac

SEQ ID NO: 171675 - RNA, 86 nt, Homo sapiens
gaggcccccgggcaagaggcgcaaacaagccaacccaggaggaaaaacgcccccgcaaccagcgacaaacccgaaggcgagacgag

SEQ ID NO: 171676 - RNA, 74 nt, Homo sapiens
aagcacaggcagaacgcagaagcacaaccgccacgagggccaaagccaggaggcagaggaggcggaggagacac

SEQ ID NO: 171677 - RNA, 63 nt, Homo sapiens
cgggcagccgccgccaccccgcggccgcacccccgccccaggaaaccccccaggcaagaggcg

SEQ ID NO: 171678 - RNA, 71 nt, Homo sapiens
cgcggcccggagcgcggcccgaggcccgcccagaggaagaccgcaggaaagcaggaaggcaagaaagccaa

SEQ ID NO: 171679 - RNA, 74 nt, Homo sapiens
ccagaagaaggaccggaagcacacaacaggaaaacaaaagaggagaaagggcccccacgacccgccccagcccc

SEQ ID NO: 171680 - RNA, 62 nt, Homo sapiens
aggcggacgacgaccggccaacaaggaaaaaacggaagcacaaaacaagagaagcacgaaga

SEQ ID NO: 171681 - RNA, 76 nt, Homo sapiens
gggccagcagaaggccggcagcacaagcggaacacgcccgcaaagcagcaggcaacaaaagaaaaagaccacagag

SEQ ID NO: 171682 - RNA, 83 nt, Homo sapiens
gagaagcgcgcgggcgcgcaggccgcggggagcaccggggagagagcccaccaaggaaccacgaaaccaccgcgcagaaaaaa

SEQ ID NO: 171683 - RNA, 69 nt, Homo sapiens
aaacgcaaaaaaaagcaagaggcaggccaaagagagaagcacacaaggaagacaggaggccagagcgac

SEQ ID NO: 171684 - RNA, 79 nt, Homo sapiens
cgaaagaagaaaacaagcggacacgggaaaaccgaagccgaagaggccaagacccacaggccgacccaaagaagaccca

SEQ ID NO: 171685 - RNA, 67 nt, Homo sapiens
ccccccacgcagaaacgaggggccaagggcccccagcggccgacagcgccagaagcgccagcgccca

SEQ ID NO: 171686 - RNA, 50 nt, Homo sapiens
ggggacaaagcagcgagcccacagaggcaaccacgagacagacaacagaa

SEQ ID NO: 171687 - RNA, 66 nt, Homo sapiens
ggcggcggcgcccggagggcagcgaggaaggaagcagccaccccgccaggccccccgcccgccgcc

SEQ ID NO: 171688 - RNA, 40 nt, Homo sapiens
aaagaacgacgccagggaggcacccggccagggcacagac

SEQ ID NO: 171689 - RNA, 82 nt, Homo sapiens
caaagccgcccagacggccaccggcgggaggaacaaaagcgcgcgcagagaccagcgccgacggggcagaggcgaggcagca

SEQ ID NO: 171690 - RNA, 36 nt, Homo sapiens
caggagagcacgagcaggcagaccggaaggccccaa

SEQ ID NO: 171691 - RNA, 73 nt, Homo sapiens
aaaaagaaagacaaaaacgcaccaacaacaaggcggaacaaaaggccaaacacagcacgccaccaacccggcg

SEQ ID NO: 171692 - RNA, 77 nt, Homo sapiens
cagcacgaccagccaagcgccggagcaaggaagcaccaggacaaaagaagggcagcacaaaggaaagccccaaaccc

SEQ ID NO: 171693 - RNA, 59 nt, Homo sapiens
ggggcaagccccagagagcgagcgaagaacagcaccacaaggaccgcagagagcggccc

SEQ ID NO: 171694 - RNA, 53 nt, Homo sapiens
gccagcaaccgaaacgcacacaaacggacagagcgaagaaccccccaagaaga

SEQ ID NO: 171695 - RNA, 65 nt, Homo sapiens
cagacaccccggggcgaaaaacagggcaaaggggaaagggagccagcagaggcggcgcagccgag

SEQ ID NO: 171696 - RNA, 55 nt, Homo sapiens
gcccgcgacagaggagggaggaaaacaaccgagggcagagacgggaaaagccagc

SEQ ID NO: 171697 - RNA, 69 nt, Homo sapiens
agacaaggcacacccaaaggaacacaaaagaaaacacgagaacaccagagacagaacagacagaaaaaa

SEQ ID NO: 171698 - RNA, 62 nt, Homo sapiens
caggaaagaagaggaaccagcacaggcaccccccagaggaagcacagggcccacgcccacaa

SEQ ID NO: 171699 - RNA, 76 nt, Homo sapiens
gagacaagaggaaccaggacgaggaaccagggacagagggcccggccaggccccaccgccacaagcaggggaacac

SEQ ID NO: 171700 - RNA, 77 nt, Homo sapiens
gacccgacgcaacgcggagcgcaaggcgagggacgagaacgagaacagaagaccaggacccaaaaagccccgaagga

SEQ ID NO: 171701 - RNA, 100 nt, Homo sapiens
acggagccacaagacaagaacagaaaaacagcagccaagcggagaaggaggaaggccagcaaaaaaacaagaagagcacaagaccaaccaaccaaagaaa

SEQ ID NO: 171702 - RNA, 58 nt, Homo sapiens
caaacacgccggaaaccccgcccacagcacgagaaaacagacgacgaggagacccggg

SEQ ID NO: 171703 - RNA, 72 nt, Homo sapiens
aacgaacagccggggcagggccgacgcgcggaggcccggcaaagaagacagggacccgcagccgcccaccgc

SEQ ID NO: 171704 - RNA, 70 nt, Homo sapiens
ggagaacgggacagaaagcagggaggggaaaaggcagagggcccaccccggagagaccccagggccccca

SEQ ID NO: 171705 - RNA, 75 nt, Homo sapiens
aaaacccagacaccgacgggccgcgaggggaagaggaagcaaagccaaggggcacgagaaagacacggcaccggc

SEQ ID NO: 171706 - RNA, 80 nt, Homo sapiens
gggcggccccgcgcgggcagcgcagccaggccgcgggacaagacaagagagggcggcagaaggaacaccgagaaaccgca

SEQ ID NO: 171707 - RNA, 83 nt, Homo sapiens
ggaggagccaacaagcgcacggagccccaagagagaggcaggaagaggcggagggagagccaggaaggagaacacggaggaaa

SEQ ID NO: 171708 - RNA, 69 nt, Homo sapiens
gcacggccgaaggagacagcccagaagaacgaggcacacgggggggcccacgaccgagcggccacaagg

SEQ ID NO: 171709 - RNA, 67 nt, Homo sapiens
gcacggcccgagcgggggcagccgcagaggcgcggcaggacgccgccacacaacgcaagggaggcag

SEQ ID NO: 171710 - RNA, 76 nt, Homo sapiens
cgccagacaacacacggacaccaaggaaacacccaaaccacgggcggcggcccaccaccgcccgcgagaacgcaac

SEQ ID NO: 171711 - RNA, 61 nt, Homo sapiens
aagagccgggcggcgacaacgcggcgcagaagaaccaacagccgcaacccggccacggcag

SEQ ID NO: 171712 - RNA, 60 nt, Homo sapiens
gccagcgagcccgggcacccgcggaccagaccccagccacccccagggccaggcaagaaa

SEQ ID NO: 171713 - RNA, 79 nt, Homo sapiens
aacaacaccacaaaaccacagccaagggcagagacaggcaacagacggcaacgaaaggcacaaaaacgcaacacaaaga

SEQ ID NO: 171714 - RNA, 72 nt, Homo sapiens
acacagaaaggacgcggaaaaagggaccaagcgagacggacgggaaaaacggggaccccacgacggcggccc

SEQ ID NO: 171715 - RNA, 76 nt, Homo sapiens
ccccgggacccgcaagaggcaccccagccacccggaacccgagacgcggcggggcgggaaagaggcggccccacac

SEQ ID NO: 171716 - RNA, 50 nt, Homo sapiens
ggagagaggagaacgaacaccggaccgccaggcaagcggcagccacaccc

SEQ ID NO: 171717 - RNA, 82 nt, Homo sapiens
ccacccaggccccgacgccccgaggcacccgccggcgccccccggcacaacccgcgggcaccagccccggacgacaccgcgg

SEQ ID NO: 171718 - RNA, 76 nt, Homo sapiens
agagggcccaggaagaggcaaggaagaaaacaccggagcccaagacaccaaaacagacgcaggcaagaggcagaag

SEQ ID NO: 171719 - RNA, 73 nt, Homo sapiens
cggcaagcggagaccccgcgagcggcgcgagcggcagcaggacaccccggcaacggggcggcacacaaggagc

SEQ ID NO: 171720 - RNA, 80 nt, Homo sapiens
ggggaacagacaccgcaagaaaaaaggggagacacgcgaaagcaaaccgaggaggcaggcggaaccaacgaaagccaaag

SEQ ID NO: 171721 - RNA, 70 nt, Homo sapiens
agcaaggaagaaagcagcccagcgcacacaagagagggccgggcgggaagaaaggaaagaggagaaagaa

SEQ ID NO: 171722 - RNA, 73 nt, Homo sapiens
cgccgacggcgccaaacacaggaacagccagcaaagacaagagcagaccagcagccgcagcgcgacagccaaa

SEQ ID NO: 171723 - RNA, 72 nt, Homo sapiens
acgagaagaaccggaagccgacccggagccgagcaaccaggaccccgcagaggggcgcggaggaggccgggg

SEQ ID NO: 171724 - RNA, 80 nt, Homo sapiens
gggcccagcaggaccggcaaagggggccggcgaaggccaacacgcgggacgaggcaggggcgcggggggccaccaacacc

SEQ ID NO: 171725 - RNA, 80 nt, Homo sapiens
gacgcggaccagaagccagagcgaggacgccggcaggagaagcccaggacgcggcggcgcccggacacccagcccgccgc

SEQ ID NO: 171726 - RNA, 34 nt, Homo sapiens
cacgaagaaaggcccaaggaggagcagcgacgag

SEQ ID NO: 171727 - RNA, 84 nt, Homo sapiens
ccgacgacccggaccaagaaggggaggcccgcggcagacgaacggggaagaagcagccgcccaaacaccaggcagggccccaga

SEQ ID NO: 171728 - RNA, 57 nt, Homo sapiens
gaccacccaaaccccccaagaaggaggccccgcgccaccgccgggcccggcacgagg

SEQ ID NO: 171729 - RNA, 89 nt, Homo sapiens
agaacccagaaagaaaggagcgccccaaaaggaaacagcccagcacgacagagacccggaaagcgagcagcaaagacccagcacccaac

SEQ ID NO: 171730 - RNA, 75 nt, Homo sapiens
gggacaagaagggcaaagccgaaacaaagagccgggaaaaacccagcagggggcgaaagaaaccccaggcaggac

SEQ ID NO: 171731 - RNA, 58 nt, Homo sapiens
gggccaccccacagacggacaacaaaacaagcgcagacgacagaaaaccaagaaccgc

SEQ ID NO: 171732 - RNA, 58 nt, Homo sapiens
gggcgggcgccgcgggacccccgggccagggccccgggggcgccgagggcacaagggc

SEQ ID NO: 171733 - RNA, 68 nt, Homo sapiens
agacacgagcaaagagacccaagaccccacaagcggagaccgaaggaccaccggcagcgggaaaaaac

SEQ ID NO: 171734 - RNA, 60 nt, Homo sapiens
cgacgccccaaggcgccaaggaggggacccccagggccacgaagaaacacgaagcgagca

SEQ ID NO: 171735 - RNA, 31 nt, Homo sapiens
agggagagccaaagaagggaagaaaagaaca

SEQ ID NO: 171736 - RNA, 88 nt, Homo sapiens
gcggggccgcgccgcgaccccacggccgggcaccgaaagggcggagaacggaaaagcaccaggaagcagagaggaccgcagaagggaa

SEQ ID NO: 171737 - RNA, 78 nt, Homo sapiens
ccaccaaaccggagggggaaaaaacccaaggcgcaaaggggacgagcagccaaaggcacgacgcccgggaagaggggg

SEQ ID NO: 171738 - RNA, 72 nt, Homo sapiens
caggacaagaaagaagaagaaaagcacgaacacccaaagccaaggaggaacaacaaagagaagcaacagacg

SEQ ID NO: 171739 - RNA, 68 nt, Homo sapiens
aaaaaaagacaagaagaagccagaccggaaccagggaggcacgccacccagggccagacacgcagggc

SEQ ID NO: 171740 - RNA, 69 nt, Homo sapiens
aggagccggaaacggacaaacagcccagaaccgggacaacccagcaaacaggccagacccgacaggagc

SEQ ID NO: 171741 - RNA, 39 nt, Homo sapiens
gggaggacacagagccagcaggcgccccggcaaggccac

SEQ ID NO: 171742 - RNA, 56 nt, Homo sapiens
gcagacagaggagcggacccccgcggcgcgcagcccagcaggcaaccaacagaggg

SEQ ID NO: 171743 - RNA, 75 nt, Homo sapiens
ggagggcgggcccagagaccaagacacgaaagaaagccgacagcaaggagccgggggggcgagcccgccgagagc

SEQ ID NO: 171744 - RNA, 71 nt, Homo sapiens
gaaaagcgggcaccggcgcggcgagggagcagcaccagggaggacgccccggaggagcccccggcccaggc

SEQ ID NO: 171745 - RNA, 72 nt, Homo sapiens
aggcgccaaaccccaccgccacgggggagccccccagacccgaaaggagacaagaggacagccgcacggaac

SEQ ID NO: 171746 - RNA, 72 nt, Homo sapiens
gagagggacacagcgaagaacgaagccccccacgaggaggccgccggcccggagaggcacccggccacagca

SEQ ID NO: 171747 - RNA, 72 nt, Homo sapiens
gcccgaccgcgggggccgaaggcagcgcaagaggagcacgacggcacagccacagccgcaagccaagagcag

SEQ ID NO: 171748 - RNA, 69 nt, Homo sapiens
ggggcgagagcaccgccaggaaccaccgagggaaagaccaaaccccaaagcaggccaaacccaggagga

SEQ ID NO: 171749 - RNA, 71 nt, Homo sapiens
ggacagcagaggaaacgagggacaacacagacccaccagcagaagagcggaagccggcagaagaagaccca

SEQ ID NO: 171750 - RNA, 115 nt, Homo sapiens
caggggcgccacggccccagcggcgggagcaggagagcccagggcgcaaaaacaccgcaagggcggagcacgccccggcccagcaggacggcagcccccgccccagcaacacgag

SEQ ID NO: 171751 - RNA, 59 nt, Homo sapiens
cgaccaggccccaaagccccaaggcgacaagaccggaccgccagggccaaggcggcaac

SEQ ID NO: 171752 - RNA, 74 nt, Homo sapiens
aacgagcacccccgaagcacccaggaaacccgaccgccccaggggcacagcaggaccagcagggccccacacag

SEQ ID NO: 171753 - RNA, 83 nt, Homo sapiens
cagcccgacccaggcgccgggaccccaggccagacagggccgaggccccagagggcagcagcccagccaaagccggaaaagga

SEQ ID NO: 171754 - RNA, 83 nt, Homo sapiens
ccgaagaaaggcgcagccgcaagaggggcacacgcccgcacgagcagcggagaagggcggaaacggcgagcaacagaggccga

SEQ ID NO: 171755 - RNA, 82 nt, Homo sapiens
ggcacgcgacgcacagaggaacacgccggggcccaaccacaagacgaccaaaggaggaaggaaacggaggaaaacaacagaa

SEQ ID NO: 171756 - RNA, 36 nt, Homo sapiens
aagaccaggaaacccgaacccaggagcgccgcacca

SEQ ID NO: 171757 - RNA, 78 nt, Homo sapiens
cggccggaaaaccgcaagaccacagcaggcacgcgagaaggggagggggagaaagaagaggaagaagccacaggcaag

SEQ ID NO: 171758 - RNA, 62 nt, Homo sapiens
ccgccaccgggagggggaagagccgggagagaaggagggggcagagcacggcaggcagaagg

SEQ ID NO: 171759 - RNA, 72 nt, Homo sapiens
gcagggaaaaagcagaagcgagcacaagggcaaaggaggaagaacggggaggaagggaaccccaccgggacc

SEQ ID NO: 171760 - RNA, 77 nt, Homo sapiens
gacgcggcgccggaggcaaagggagacgagggaaaaggccaaccaagcggagagcaaaagagggggagcacagcgag

SEQ ID NO: 171761 - RNA, 73 nt, Homo sapiens
agacacgcgccgggaggagcggggccccccgggccgccggcccgccgccccacagaagagagaagaagcaaac

SEQ ID NO: 171762 - RNA, 70 nt, Homo sapiens
aaagaagagaggaagaagaccccaagcaagacgccagagaaaaagaaggaaagacaacagaaacaagaca

SEQ ID NO: 171763 - RNA, 81 nt, Homo sapiens
ccgccgcgggcccgcgcgccgccccgagccaggagaacgagccgaggaggagccgggcccacaggaagggaaggggcggag

SEQ ID NO: 171764 - RNA, 74 nt, Homo sapiens
cggcgccgcgcgcgcacaaggcggccgaagagggcgcgcgcagcgaaccaccagaaccccagccccacaccgag

SEQ ID NO: 171765 - RNA, 68 nt, Homo sapiens
ggacggaaggacggaagagacccggaaggccagaaaagcagagggaagaaagggaaggagcagcccag

SEQ ID NO: 171766 - RNA, 80 nt, Homo sapiens
acacaagaaacaaacgaagcacccccagcaccagggaacaggaaacaagcgaagggaagaagcagacagcccacagacgg

SEQ ID NO: 171767 - RNA, 77 nt, Homo sapiens
ggagaaaaggagagaaacacggagacagcaccaaacccacagaggcacgaggaaacccgaagaggggagaaaaggaa

SEQ ID NO: 171768 - RNA, 89 nt, Homo sapiens
gcaaacgcggcaaggccacaagggaacgggcggccccggagagagagccgcgcacgcacagacaaggagcaggaaaggacaaggagccc

SEQ ID NO: 171769 - RNA, 73 nt, Homo sapiens
cagagaccagccccaggccccagcgcgagagacacaggaacggaaacccggaaaaacccagaacaccccgacc

SEQ ID NO: 171770 - RNA, 107 nt, Homo sapiens
cggcgccccacccgcccccgcgggcgccgggccaggacgggggaacgcccgcggacggcagggcgcgacaagaagcgcccgcccgacgagcggcccgccaccaccgg

SEQ ID NO: 171771 - RNA, 88 nt, Homo sapiens
ccagccccgccaggaccccggggaccgccggagcccgagcgccgccgcgcccggcgccgaagaacggaccgaagccaaagaacaagag

SEQ ID NO: 171772 - RNA, 72 nt, Homo sapiens
acaccgaaccgccacccaggcccaagaagacaagagagggcggcagaaggaacaccgagaaaccgcacaccg

SEQ ID NO: 171773 - RNA, 90 nt, Homo sapiens
ggcgcggcgcagcccacggcgcaggcccacggagcgcagccgccgaggaagggaaaaggccgaggcacagcgggaagaccgcaaagacga

SEQ ID NO: 171774 - RNA, 76 nt, Homo sapiens
gcccaagcacaggagggaggagagaagaggcaacaggcggaagcacagcaaaggcagaagacgaggaaaagaggga

SEQ ID NO: 171775 - RNA, 56 nt, Homo sapiens
aacgccccagggagacgcccgccgcgcggagccagcgcccggcaaggagcgagcgg

SEQ ID NO: 171776 - RNA, 61 nt, Homo sapiens
cgggcggcggcagcgggccagacccaggaccgcgacacggcgggacccgagagaacgcaag

SEQ ID NO: 171777 - RNA, 60 nt, Homo sapiens
gccgccccgccccggcccaaagccgaggccgccggagccccagacaccccccacacacca

SEQ ID NO: 171778 - RNA, 65 nt, Homo sapiens
gaacacccgccggaccaagggcaggaagcgcgggaagcccaggacgggacgacccgggcggagga

SEQ ID NO: 171779 - RNA, 75 nt, Homo sapiens
ggagcccccagacccaagaagacagcgaaccaggcaagaacggaagcacgggcggaggaaagcacaagcagagcc

SEQ ID NO: 171780 - RNA, 101 nt, Homo sapiens
caggacacggcgggaagacggggacaagaggaggagacggagcacgccaaaggggacacaaagcgcgggaaagaaccccgcacccggaacaccagccagcc

SEQ ID NO: 171781 - RNA, 76 nt, Homo sapiens
caaaggagagcacaaccacgcagggaagcccaggggcagacaggaagggaaggggcggagacgggcggaacgcagg

SEQ ID NO: 171782 - RNA, 111 nt, Homo sapiens
cgcgccgcccgccgcccgccaccccggcacccaagccgcccccgccgccccggcccggcgcgcagagcccaagagacacaggcagaagaagaccgcaaggaagaagaggga

SEQ ID NO: 171783 - RNA, 81 nt, Homo sapiens
ccacgagaagcagaggaggaacccgggccgagagcccagacacagacaggaccgcaccacgcggcccggaccaccggccac

SEQ ID NO: 171784 - RNA, 75 nt, Homo sapiens
agcgacagaaggagaaaaagacgagggagagacccacagagcggcccgaaaggacgggagagaaacagaggaaag

SEQ ID NO: 171785 - RNA, 88 nt, Homo sapiens
ccgcccccagagaggggagccggcgaggacaaaaccgaaggaggggcggcgacggcggcgcgaggaccgaccgggcccgcggacgaag

SEQ ID NO: 171786 - RNA, 73 nt, Homo sapiens
gcacacagagaccccacaggacagaacgacacaaaagggaagggagccggcagaagggaccaagaccccagag

SEQ ID NO: 171787 - RNA, 69 nt, Homo sapiens
aaagaccccacggcaggagaagcgcaaccgaggagcacccagggcccgccaccagaagacagaccgcga

SEQ ID NO: 171788 - RNA, 56 nt, Homo sapiens
ccgagcaagaaagcagccaggaaaagggaccaccaaagagaaacaagaaccgccac

SEQ ID NO: 171789 - RNA, 68 nt, Homo sapiens
aaaacgaagaggagaagacaccaaaaagcaaacggaccagaccgaccaccaaaaggcgaagagagaac

SEQ ID NO: 171790 - RNA, 68 nt, Homo sapiens
agagggacgagagcgccacacacaagacaacgaagagaggaaagaagcggaaaggagggagcacacaa

SEQ ID NO: 171791 - RNA, 77 nt, Homo sapiens
ccccagcccaaacccggaaacccagcggcccagccggacccacaggaccgcgaacaaggaggccacaaaacacccgg

SEQ ID NO: 171792 - RNA, 72 nt, Homo sapiens
aaaaccggcccgaggggacgggggaacccggggccagagagagagagggcgcaaaaacccagaaccacagcc

SEQ ID NO: 171793 - RNA, 83 nt, Homo sapiens
caagcgcgccgcgccgcagcggcgccgcggacaagcacgagggcgcgccgagacgcccgaggcaacacaccgaaaaaagggaa

SEQ ID NO: 171794 - RNA, 70 nt, Homo sapiens
gaaagaacacgcacagcggccagcagaagggcaaccgaagcagcaaggaagaaaaccagaaaacagaaag

SEQ ID NO: 171795 - RNA, 79 nt, Homo sapiens
gggggggcaagggcagacgggccagcagcccccaagacccccccgagaacggccccgcccaacaccaaccgacaccacc

SEQ ID NO: 171796 - RNA, 81 nt, Homo sapiens
ggcagccggacacgccaacccgcgaaagcaggaaagggcaaaagcggcaaagggaaaaaggcggcagaagaaaacagagag

SEQ ID NO: 171797 - RNA, 72 nt, Homo sapiens
ccgacgcggaggagccggcacaagaaaggacggcgggggagcgggaggagccagagcacaccgcaccacggc

SEQ ID NO: 171798 - RNA, 70 nt, Homo sapiens
gaaacggaaaaagaaacgacagaaaaacagggacaaggcaagaagccaaaacgagaaggaggagcgaggc

SEQ ID NO: 171799 - RNA, 72 nt, Homo sapiens
ggacgggcagggagccggagaggaccccgcagccccgccacagacagccaaagagaagccaggcggggcaga

SEQ ID NO: 171800 - RNA, 72 nt, Homo sapiens
agaaccacccggacacacggggagccaaagcaccacacaaaggacagaaagcaggacccgccagcggaggag

SEQ ID NO: 171801 - RNA, 81 nt, Homo sapiens
gcaaaaaaaaaaaaccagagggaaacggcacaccaggcggcaggggcaaccagacgggccaagaaacccgcgccagagagc

SEQ ID NO: 171802 - RNA, 53 nt, Homo sapiens
caagcacacgggaggcagaagcgaggaaggcagggagacggacggaacgcggc

SEQ ID NO: 171803 - RNA, 71 nt, Homo sapiens
agacaaaggcaccaggccaccacagaaacaaaagcaacaaagaggagcggagaaagagggagacgcacccc

SEQ ID NO: 171804 - RNA, 71 nt, Homo sapiens
agagacagaagccacaggggaaggaagaagaagggccgagaaaaaggcccccaccgcacagagacagacag

SEQ ID NO: 171805 - RNA, 59 nt, Homo sapiens
ccccggaccgggccgcgcacgccgcccaggcgacggggccaaggggcagagcgcccagc

SEQ ID NO: 171806 - RNA, 66 nt, Homo sapiens
ggggggggccaggagaagcaccgaacaaacggagcccgcaagacccaagaagccgcccacccaaag

SEQ ID NO: 171807 - RNA, 72 nt, Homo sapiens
ggaaacggaaccaagaacaagcacgcaggcacccggaaacaagccacgaaggagagaaaaccagcagcagcg

SEQ ID NO: 171808 - RNA, 68 nt, Homo sapiens
aaggaccaagaaccagggccaagggcagggagaagggacaacacagaacacagaccagggcaggacca

SEQ ID NO: 171809 - RNA, 99 nt, Homo sapiens
gagaacaaagggagaagaggaagcccgacaacgaagaaaacaggggcacagacgacagaagccaagagggcgcaaagaggaaaagaagagaaaagcggg

SEQ ID NO: 171810 - RNA, 78 nt, Homo sapiens
gcacacaccaccacacacggagaaggcgagcggccagacaaaggaaacaaccgcggcaaggaaccacaggcaaccccg

SEQ ID NO: 171811 - RNA, 37 nt, Homo sapiens
ggaaaggagcgccgcaggccaagacaacaaaaaaggg

SEQ ID NO: 171812 - RNA, 41 nt, Homo sapiens
gcgagcagaacacggcgagcggaaaggcgaaaagcgaagac

SEQ ID NO: 171813 - RNA, 72 nt, Homo sapiens
gccgccgcgagcaccgaaaagagcccaaaaggcagagcgaggagagaagaaggagggaaagccaaacaacgg

SEQ ID NO: 171814 - RNA, 84 nt, Homo sapiens
gcggagcggggagagaccgccgggccggcccgcaccaggagcggaacaagacggaaggcgaccacaccaccccagacacggccg

SEQ ID NO: 171815 - RNA, 82 nt, Homo sapiens
cgcggccggagagcagagcccgggacccaggaaacagaacgacagcccgcaccgacgccggcggccagccagagagcacgcc

SEQ ID NO: 171816 - RNA, 81 nt, Homo sapiens
gcggaggggaggccggccaggcagggccggcggcggaaccgccaggccgagccggccgggcggagaacggaaaagcaccag

SEQ ID NO: 171817 - RNA, 74 nt, Homo sapiens
gaagcaggagcgggagcggcagagggaaggagcggagaccacaggggccgcggccaagcgccgaaccacaccaa

SEQ ID NO: 171818 - RNA, 85 nt, Homo sapiens
aggaagacccagagaggagaaaagaacagggcggaagaaaaccaaaaagcagggaagaggggcgggcgcacaggggacaggacaa

SEQ ID NO: 171819 - RNA, 85 nt, Homo sapiens
gccgaaaagaaacccagaagagacaagagagacaccccaaccgacaaagagcaccagacagccgggaacgacccccacgaaaacc

SEQ ID NO: 171820 - RNA, 65 nt, Homo sapiens
ccacaacacagacccagaagagacgaaaaagacggcagaacagcgaacaaccaccccccaaccac

SEQ ID NO: 171821 - RNA, 77 nt, Homo sapiens
gccccggagagcgggacacagcaaaacgaaaaccagagggccccagcaggcacaagaaaaagaacccacgccagacc

SEQ ID NO: 171822 - RNA, 94 nt, Homo sapiens
agcaaagcccccacgcccagccaggagcaccgccgaggacccagcacaccgaggaccccgaggcccgccgcccgcgggcccacgaggccgggga

SEQ ID NO: 171823 - RNA, 62 nt, Homo sapiens
cacaaagagcgccccacgagagaacggcacacgcgagcggaccacccagaaaaagaggaagc

SEQ ID NO: 171824 - RNA, 73 nt, Homo sapiens
ggcaggggggacccacagaggaaaaggaaaggaacagagcgaccgaagacaggcaccaaaagaccaagcacag

SEQ ID NO: 171825 - RNA, 77 nt, Homo sapiens
aggcgggcacagcacgggaaaggaaagaccacagcaagaccacgcccccagccgggggaccaggccgaacgacccgg

SEQ ID NO: 171826 - RNA, 79 nt, Homo sapiens
cgccgccgaccgccgcccgccacacccgccgccagggggcacccgaggaggaagagggcagggcccacggaaagaaggg

SEQ ID NO: 171827 - RNA, 71 nt, Homo sapiens
gcccagccagcccgagcaagaaagagagccagccggcacaggcgaagcagaaagcaaacggcggcgcccgc

SEQ ID NO: 171828 - RNA, 82 nt, Homo sapiens
gaaaaagcagaagcacaagccaaacgaccccgccccccgaggcgcagcccgaacccagcagccacacgccaacaacgagaca

SEQ ID NO: 171829 - RNA, 45 nt, Homo sapiens
cccaagaagagaaagccaagaaaggaaagccaggccagaagaagg

SEQ ID NO: 171830 - RNA, 74 nt, Homo sapiens
cagccccgaccaagcagggcagccacacaaaagggaagcgggcagaaccgagaaaaacagcagagaccaggggc

SEQ ID NO: 171831 - RNA, 76 nt, Homo sapiens
ggagccagcagggacaaggaccagaagaaacgcaccggaaaggccaccagaacacaccagccgagggaacaaaagg

SEQ ID NO: 171832 - RNA, 66 nt, Homo sapiens
gaggccccgagccagccccgacagcgggaaccgacggaccacaaaacccaacgcggacccggcagc

SEQ ID NO: 171833 - RNA, 80 nt, Homo sapiens
cgcaccggcccccgccaccagggagcggacgagcgaggccgcgcggacaagacaagagagggaagagggggaggggaaga

SEQ ID NO: 171834 - RNA, 60 nt, Homo sapiens
cacgcaaaaggaggagggagaacaagccgacggagaccgcccgcccagggcacaggagcc

SEQ ID NO: 171835 - RNA, 72 nt, Homo sapiens
gggacacacccacgaacacaaagggcccggacggagcccaagggagacgggccgcaaggccaggcgcgcaga

SEQ ID NO: 171836 - RNA, 69 nt, Homo sapiens
ggggagcccagcggcgcgccggcagcagaacgggaagaagaagaaggcgaagaagcacaacaccaccaa

SEQ ID NO: 171837 - RNA, 74 nt, Homo sapiens
gcaaaaaagaacagccagaagaaccagggaccaccaggacacaagaaggggagagagagaagaagaaccggaag

SEQ ID NO: 171838 - RNA, 74 nt, Homo sapiens
ggcgcaccgcagccccgcgaccccgaagaccacaggagcagcaacccagccccggaaccacgccaggggaagaa

SEQ ID NO: 171839 - RNA, 59 nt, Homo sapiens
cgaaggccagaaagcaagggaaggaagagaaccgaagaagaaaaccaaaaacgaaaaag

SEQ ID NO: 171840 - RNA, 70 nt, Homo sapiens
cccaggaaagccaccacgccacacaccaaacgagcgagggcccacaagaccccccaagcacagagggaaa

SEQ ID NO: 171841 - RNA, 86 nt, Homo sapiens
gcgccacgcacgcccaccccacgccaggccccggaagcggcggggaggccgcccacccccacaccgcggccgcgccgagagccagc

SEQ ID NO: 171842 - RNA, 76 nt, Homo sapiens
caggggcgggaaagacccaggagaagccgcccaaagaacggcccggcaacacagaacaaaaaggccaaacagacag

SEQ ID NO: 171843 - RNA, 75 nt, Homo sapiens
agcgaacggagaagaaacggacagaacagacgcaggaagagggccggggagcacaggaagcagaccagccggagc

SEQ ID NO: 171844 - RNA, 68 nt, Homo sapiens
ggcacaccagaaacacgcagcaaaaaggcagccaaggcccacggagcaggaagggaaacaggaggaag

SEQ ID NO: 171845 - RNA, 72 nt, Homo sapiens
ccagaaaccaagaccaaggaagacgaacgcaccccagagccgacccccaccgcaagccaggacccgaaaagc

SEQ ID NO: 171846 - RNA, 51 nt, Homo sapiens
aagagaagaaagaggacaacagacggcaggcaaccaggaccgggaacggcc

SEQ ID NO: 171847 - RNA, 44 nt, Homo sapiens
gccacgggagaagggcagcacggcagggaaacccagacgacaag

SEQ ID NO: 171848 - RNA, 39 nt, Homo sapiens
cggaccagccccagaacggagcaccccgggcgccccagg

SEQ ID NO: 171849 - RNA, 55 nt, Homo sapiens
caccaacgggaccagaaggaagccggcgagcaaggggaagcccagccgcagaccg

SEQ ID NO: 171850 - RNA, 90 nt, Homo sapiens
gcaccgcgcccgcagcgccgccccacgggccgcgcgggagggcccgaacgaagcgcgcggcaggcgcgcgccgccccaggccgcaagacc

SEQ ID NO: 171851 - RNA, 82 nt, Homo sapiens
cgacccgccgcacaccaaagagaccgaaggagcagacgaggcacgagcgccagcgcgagacagacggggcgcagaagcggcg

SEQ ID NO: 171852 - RNA, 54 nt, Homo sapiens
cgacagcagccgcaccgcgcgccagccacacacgcagcacaacaggccagagga

SEQ ID NO: 171853 - RNA, 79 nt, Homo sapiens
gggggcacgaagggggacacaggcgagagggacagcccagaccaaaccccagacaaaaaaaacggaaaagcagaacaag

SEQ ID NO: 171854 - RNA, 72 nt, Homo sapiens
gccgggaagcagcaccaacccggcccaccaaaccccggacagaggacgcgccgggccagagagggaagacac

SEQ ID NO: 171855 - RNA, 77 nt, Homo sapiens
agccgccagccccacggacggacgccagccccacaacagagccgggggggcgagcccgccgagagcgccaaggagga

SEQ ID NO: 171856 - RNA, 76 nt, Homo sapiens
gcgaaggccgggacccggccccggcccacaggggggggcaaacccgagagaacggggggagagagacgcgggaacc

SEQ ID NO: 171857 - RNA, 68 nt, Homo sapiens
ggagagccgaaccagaagagaaaggccccccagagaagcccgagaccaggacaggaaaaacgggaaga

SEQ ID NO: 171858 - RNA, 80 nt, Homo sapiens
gaacgcccgagcaagcacagggacagccgaaccaagacgggaggaccaaagaagccaaccgacacaacagcaagacgcaa

SEQ ID NO: 171859 - RNA, 112 nt, Homo sapiens
agccacagagggggaaagccaaggaaaaacggagagccacaaaaaaggaagcgaaaccgaagcaggacacaaagaaaagacgaaggaagcaacacaaggaagcggagggaac

SEQ ID NO: 171860 - RNA, 77 nt, Homo sapiens
caccgaggcagaagagaggacaaccaccaacaacgaggcacccaaaaggaggagggcgccagcgaacccgccgagcc

SEQ ID NO: 171861 - RNA, 99 nt, Homo sapiens
cagggcaaggagccaggaaggaggaggaaaaaaggagcaaaaggaacacagaccaagaacgagcaaaacaacgaaaaccagcaaaggagcaaagaaccg

SEQ ID NO: 171862 - RNA, 73 nt, Homo sapiens
agccgggaagcaggcgcccgaaaaacacccacgggggaaccaccgaaggcaagccccaaggcacaaaagagga

SEQ ID NO: 171863 - RNA, 77 nt, Homo sapiens
cccccagccccgccggcaaggccacgggcacgggcggggacacacccagaggaggaaggcccgccgaaggagaaggg

SEQ ID NO: 171864 - RNA, 71 nt, Homo sapiens
accggcaggggacccgggaggggcagaagaaacacacaggagaacccccgagaacagagagaacacgccca

SEQ ID NO: 171865 - RNA, 79 nt, Homo sapiens
ccgcagaagaacggccgggaaaccagccgacaaccccggaacgcgggcaaaaggccccaggggaccgggggaggcccca

SEQ ID NO: 171866 - RNA, 58 nt, Homo sapiens
gcccccggggccgcggagccaggaggcgacgacgagagggaggaggagaagggcagag

SEQ ID NO: 171867 - RNA, 75 nt, Homo sapiens
aagccgcagaaagcagcacgcaggaccagcacacgcaagcccacgccgccacgacacacgggccgggagggccag

SEQ ID NO: 171868 - RNA, 73 nt, Homo sapiens
aaagaccagaaagaggccacccaagaaacgccaaaaggagggccacaggagcggggccaccaggaagggcaag

SEQ ID NO: 171869 - RNA, 82 nt, Homo sapiens
caagggagcaaggaacaccgacaaaccgaccgaccaggagccacaggcaaagccaaccacgccgaacgggacgaagaaggag

SEQ ID NO: 171870 - RNA, 76 nt, Homo sapiens
acacgcccagcagccaccaacacccaaagggcaaagacacagcggaacgacaacaagagggggaacccgcgaagaa

SEQ ID NO: 171871 - RNA, 84 nt, Homo sapiens
ccagccccagaggacaccagcgggaagccggagaggagaccgaagagagaaccaagaaaacgaagacaaacacaaggcaagcgc

SEQ ID NO: 171872 - RNA, 69 nt, Homo sapiens
acccgaagcgggccgccaagagggaagaagcagcgcaagcaagagcgccccggagggaagagaaaagag

SEQ ID NO: 171873 - RNA, 73 nt, Homo sapiens
gggcggggcagagcagcccccagccagccgcgaggacggggagcaaccgccaggggaagaggagaagagaggg

SEQ ID NO: 171874 - RNA, 54 nt, Homo sapiens
agccagccgcggccggaggagcccccaggccggagggcgggggcggcagagggc

SEQ ID NO: 171875 - RNA, 69 nt, Homo sapiens
gcccgcgcggcgcggggaccgcggcccggacaaaccggcgaccacacacggggacgacggggaagccgg

SEQ ID NO: 171876 - RNA, 75 nt, Homo sapiens
aagaagagaagcagaaaaccagaagcacaaggacagagcacccaccacaggaggagaaagaaggcggaaggaggg

SEQ ID NO: 171877 - RNA, 56 nt, Homo sapiens
ggcggagcccgcagaccgcagaaggccggagacaccagcagcagggaagacacacc

SEQ ID NO: 171878 - RNA, 126 nt, Homo sapiens
ccagcgccaccaccacgccagccgcaccagccgcccaagccgcacagccgcggcggcagcagcaggagagggaagaagcccagcggaggcgaacggcccccgccaacacgaggaccccacggagag

SEQ ID NO: 171879 - RNA, 88 nt, Homo sapiens
acaaagcgaacaagagaagacgaaaaaaagggaggcgaggagcggggaggaccggaagcagagagcgaaagcagcaagggacagcacc

SEQ ID NO: 171880 - RNA, 79 nt, Homo sapiens
gagccccacagaaggggagcccgggcggcacccggaggagaagaggcgcggaacaagcgggagagcaaggaaagcgaag

SEQ ID NO: 171881 - RNA, 31 nt, Homo sapiens
acaggaccacgcaaacggagaaagaagaaca

SEQ ID NO: 171882 - RNA, 105 nt, Homo sapiens
cggaccgagaccggaccgagagcggaccgagagcgcgaaacgcacgagaaggaacagagacgcaggcaagagcgcggaggagagagccaaaagaagggggccagc

SEQ ID NO: 171883 - RNA, 86 nt, Homo sapiens
ggggaacaacagcaccaccaaccgcaggagcgagaacccgagcagcgccagagcaacacaccgcgccccagcacgcaggccgggcc

SEQ ID NO: 171884 - RNA, 78 nt, Homo sapiens
gacgcacacaggagagccaggacagccacaccccaagagaggccacgcaagcccccccgggagagcaggaagacagca

SEQ ID NO: 171885 - RNA, 81 nt, Homo sapiens
cagcggaggaggccagccacaggcgggaggccccgaaggagcaaggaaacgcgaaccaagggccacggggagacaaggcaa

SEQ ID NO: 171886 - RNA, 76 nt, Homo sapiens
gcccggcagcggacccgcgggagcccagggcccagacacaggaacgggcaccccaagagcaaagaggagaagaggg

SEQ ID NO: 171887 - RNA, 82 nt, Homo sapiens
aggacacacagagaggccaaagccagagacagagcacaaagggccgccgggcagaagcacgaggacgagggcggcacgcccc

SEQ ID NO: 171888 - RNA, 70 nt, Homo sapiens
ggcgccagccacaggccaaagacgggcaagaggcggacacgagcgaaccgaaaagagacacggaggggaa

SEQ ID NO: 171889 - RNA, 72 nt, Homo sapiens
cagagcccaggggggcgcaggcgcgggacaaccaacacaaccaaagagaagaaaacgcaaagaacagaacaa

SEQ ID NO: 171890 - RNA, 81 nt, Homo sapiens
gaaaaccgcaacaaaagaagagcccaagaggcgccagagaccacacagcacgcaccggaggggcacagcagggaggaacac

SEQ ID NO: 171891 - RNA, 80 nt, Homo sapiens
gccggcagccggccccgccggacgccgagcaccgccaaagcgcaacccggccggaaacggaggggacggccaagacgccc

SEQ ID NO: 171892 - RNA, 78 nt, Homo sapiens
gagagcaggaagaggaaccacaagaaaacaaaagaaacgcccacagaacaccgagccggcacagccacaccgagaaga

SEQ ID NO: 171893 - RNA, 71 nt, Homo sapiens
ggagggaggggaaagacccacaccaagagcaaacgccaacgaaaaacaaggaggaacagggaaagaacgaa

SEQ ID NO: 171894 - RNA, 88 nt, Homo sapiens
gcgcccgggaggaaggaacgaggcaaggagcaaagcagcggcgcagcccggggaagcggagcacagggcgcaagggggggggaccagc

SEQ ID NO: 171895 - RNA, 76 nt, Homo sapiens
acaacagccagaaccgggagcgaaaacgccacaacagagggggccagggcggggaagacaaacagaacaacgggca

SEQ ID NO: 171896 - RNA, 85 nt, Homo sapiens
cgcaccagcagcccaaggaggacgccgggaggaccggcggacaggaaccgggccccgaccgaccccgcccccacggccagcccca

SEQ ID NO: 171897 - RNA, 79 nt, Homo sapiens
aaaacaaggagaaaacaaaggaaaaaccagaaagaagggccccaaacggagccgcgaagcagccacggaccccagcacg

SEQ ID NO: 171898 - RNA, 63 nt, Homo sapiens
ccaaagcaggaaacgcccagaagacgcgaccggaaaggagagagagacagaaccacagacaag

SEQ ID NO: 171899 - RNA, 77 nt, Homo sapiens
acaaaacccagacaccgacgggccgcgaggggaagaggaagcaaagccaaggccggggaggaggagggcgggaccgc

SEQ ID NO: 171900 - RNA, 64 nt, Homo sapiens
gcagccacggaagcgacaccggaggaagacccacacgagacaaaggacaggcagaaaccagaac

SEQ ID NO: 171901 - RNA, 39 nt, Homo sapiens
acagcgccaagacacgccaggggccaagcaagaggagcc

SEQ ID NO: 171902 - RNA, 61 nt, Homo sapiens
caacagaggagagaaccaaaaggagacgaaccaagaaacagccacaggggaaaagaaacgg

SEQ ID NO: 171903 - RNA, 89 nt, Homo sapiens
cgccgcccgcagccgccgcccgccgcagggcgcgacggcccgcacgcgccgcgccaccggcgcgcccgaaccaagacacccaggagaaa

SEQ ID NO: 171904 - RNA, 80 nt, Homo sapiens
acgaggaggagacgaccggccggaaaaccgcaagaccacagcagagagacggggcaccggagccaggaggccgacccgac

SEQ ID NO: 171905 - RNA, 79 nt, Homo sapiens
acagcaaagcgaggaccagaccggccgcaagagacccaaccgcggcacacagaaaacccggacccaccccgcccagaac

SEQ ID NO: 171906 - RNA, 75 nt, Homo sapiens
ccgaggcaagaagggacgaacggggcggggacaggcacgggggacggcagcgcgcaggggagccacggaaaggca

SEQ ID NO: 171907 - RNA, 74 nt, Homo sapiens
ccccccgcccgccgaccgcggcagacggcggcggcagagaagaaacgccaggaagccaagcaagggcggaaaac

SEQ ID NO: 171908 - RNA, 73 nt, Homo sapiens
agaacaaaccacacacagcaacaaaggagaaaggcgaggcaaacacaaacgggcaagcaaaagaccgccaaaa

SEQ ID NO: 171909 - RNA, 80 nt, Homo sapiens
aagacagcacggcagcggaaacaggaaaccacacagcaccagagagcaggcaacgaaagcaaaccgagagcaggcgaagg

SEQ ID NO: 171910 - RNA, 50 nt, Homo sapiens
acaccaagagggaagcacaggcagacggcagaaaacagacgaagcaacag

SEQ ID NO: 171911 - RNA, 74 nt, Homo sapiens
caaaccggaaaccgccaaaaccccccacacaccccgccgggaacgcacaccagcaccagcccaccaaaccagca

SEQ ID NO: 171912 - RNA, 82 nt, Homo sapiens
cggccggcaagcacccgggacccacccacagggacccagccaggccaaagcaaagagcaaaagcgaagacccccaaccagcc

SEQ ID NO: 171913 - RNA, 60 nt, Homo sapiens
aaaggaaggagcaagggccagagcagaaaagggaggagaacaccaaacagaggaacaggc

SEQ ID NO: 171914 - RNA, 76 nt, Homo sapiens
aaaaagacggacagcccacgggaacaagaggggacagaaagaaagcagggggacagaccggcgcaaacgcagcagc

SEQ ID NO: 171915 - RNA, 77 nt, Homo sapiens
gccccgcccaggcccccccccgggacggcaggacccgccacagagggcccagccgcagccacccaaggcgccccgca

SEQ ID NO: 171916 - RNA, 82 nt, Homo sapiens
agacagccgcggccaagaagcagaagcgagcaggacgagaacagcaaccagaccccggagacgagaaaagccaacgggggaa

SEQ ID NO: 171917 - RNA, 70 nt, Homo sapiens
agacggggggaggacccgaccaggcgcgacacaaaaacggggacggggcaggaagaagccccagaccaca

SEQ ID NO: 171918 - RNA, 75 nt, Homo sapiens
gagcacggaagcacaagcagggcccgaggcgcggggcacgccgcccggcccccacccgcccgcgccaccgcccac

SEQ ID NO: 171919 - RNA, 77 nt, Homo sapiens
acacccgagagagacgagacaacaggacccagaagccaagcccacgagagaagcgagaaaggaaagaaggggaccgg

SEQ ID NO: 171920 - RNA, 81 nt, Homo sapiens
gaccggcgcgcgggagcgcacggccccaacgggggcacccgaggaggaagagggcagggcccacggaaagaagggaaaccc

SEQ ID NO: 171921 - RNA, 79 nt, Homo sapiens
caaagagcacaaaaaagcggaaaaacgaggaaagaccacagcaagaccacgcccccagccgggggaccaggccgaacga

SEQ ID NO: 171922 - RNA, 82 nt, Homo sapiens
cgaggagagcgcggagccgcgcccccggagaaagacagcacaggaagggaccgccacaaagaaaagacaggaagaacacgag

SEQ ID NO: 171923 - RNA, 40 nt, Homo sapiens
gaccgggacggaccgggaggcacagccagaagaaccacag

SEQ ID NO: 171924 - RNA, 74 nt, Homo sapiens
gcagcgcagaaggaaccggcaaagcgcaggaacgggaacgcaggagcgaccagggggagcgccagagagagggg

SEQ ID NO: 171925 - RNA, 73 nt, Homo sapiens
gccaaagccaccagagccggaggcgagccgcgcgggagagaggagccacacaggccggaagccacccagggcc

SEQ ID NO: 171926 - RNA, 90 nt, Homo sapiens
gacccggcgcgcgccccaccaagggcgagacaccccgccaggagacagcacgcccgaagagaccggcacggcacgcaccggcgccgcaag

SEQ ID NO: 171927 - RNA, 80 nt, Homo sapiens
cccgcagaccgcagaaggccggagacaccagcagcaccgcaggcagcagaagaccggaggaccggggcgagggaccgaga

SEQ ID NO: 171928 - RNA, 74 nt, Homo sapiens
cggagacggggggaggagagaaagggcaacccacgagagaacagaggaccagaccccagcagggaaagcaccgc

SEQ ID NO: 171929 - RNA, 73 nt, Homo sapiens
aaggggaaggaacagaaggaccacaggggccgcaagccagaccgacggcagggcaaaccagacgagagagaag

SEQ ID NO: 171930 - RNA, 77 nt, Homo sapiens
gccgagaaaggaaaccggaggacgccgccggcaaaaaggcaaaaagagcgcgaagagacggagcagaaggggcagag

SEQ ID NO: 171931 - RNA, 58 nt, Homo sapiens
caacaaggccacgcccacaacacccagaacaggggcaaccgcgcaacggcgccggagg

SEQ ID NO: 171932 - RNA, 78 nt, Homo sapiens
cagaccccgagggcgccccggggaagacggaagagacgccacacagagcgcacgcacagcacaacgcgcgcgacacgg

SEQ ID NO: 171933 - RNA, 76 nt, Homo sapiens
cccaagaaggaggcaggaaggaccgagaccaggaggaagacggcgaaggcccaggggccgagggaagcacgagggg

SEQ ID NO: 171934 - RNA, 109 nt, Homo sapiens
gcggcgcgcggaccccgccgagccagcgccggccgcgcgccgcgcccgcgccacagaaggccaacagaaagggagaagggaagaaagcgcagacacgcgcagacaaaag

SEQ ID NO: 171935 - RNA, 86 nt, Homo sapiens
gcagaaggccgaaagagcacggacccggaaggccgcaccgcgaggaacccgagcccaccggcagcaccgcaccggagccccggccc

SEQ ID NO: 171936 - RNA, 83 nt, Homo sapiens
caaccgcaaccagacgccagcgggacgaggaccgagaccgcggccgggaccgagggggcagcagggaggaagaaaaacagagc

SEQ ID NO: 171937 - RNA, 73 nt, Homo sapiens
gggggcgaacggggcgagccggaggagcacccaaccccgcgccccggaacagagacagagacacggcacaccg

SEQ ID NO: 171938 - RNA, 86 nt, Homo sapiens
gaggacagcaggagggcggagacaacagaaacagaaacgagggaaacagaaagccaagacgaacgaccaaacaaccacccgcaaag

SEQ ID NO: 171939 - RNA, 77 nt, Homo sapiens
gccagccccgccgaacgagcgggaagcaaagggaccccacaccacaaaccgaggaaagaagggacagcagaaaacgc

SEQ ID NO: 171940 - RNA, 81 nt, Homo sapiens
gccgcgagcccgaggccaggcgccggccggcgcgaagacgcgggggccgccccccgcccggaccgacaggaaagaaggagc

SEQ ID NO: 171941 - RNA, 90 nt, Homo sapiens
ccggggcacagcacagcgccggcgcaagagcagagcaaagcggcagccccggacagggagggccgaccaggaggacagcaagcccacacg

SEQ ID NO: 171942 - RNA, 81 nt, Homo sapiens
accgcaagaccgagccgccgagcgacaacccgcgccccgagggcagaaaacagaccgcaaaagccagggcccacacggaaa

SEQ ID NO: 171943 - RNA, 83 nt, Homo sapiens
ccaaacccggaaacccagcggcccagccggccgacggccaggagaaagccaccaagaagaagccgggacccggcagaaggccc

SEQ ID NO: 171944 - RNA, 74 nt, Homo sapiens
ccccaccagccaagcaaacaccccccccaccaccccaccagaaaggaacgcccaaaacccgccggaccgaagaa

SEQ ID NO: 171945 - RNA, 74 nt, Homo sapiens
cgaaaagcgccaaggaaaaggacgagaacgccgcgacagaaaaccgcgcgaaacgcccagaaaccaagaagcag

SEQ ID NO: 171946 - RNA, 82 nt, Homo sapiens
gggcggagcgacacacgggccaaaacgagagggacgacggcccggcggaaggcccaagcgggggcgagaggaaaaaagagag

SEQ ID NO: 171947 - RNA, 72 nt, Homo sapiens
cggaggaggaggggagaggccggaggacaccaacagagcgggggcagaagaaccagagacgggcgaaccaga

SEQ ID NO: 171948 - RNA, 75 nt, Homo sapiens
ggcaggcaccacaaaaaggacagacagcgcacgaaacacacaaagaaccaccaccgggaggaagccagacaaccc

SEQ ID NO: 171949 - RNA, 86 nt, Homo sapiens
gcgcgggggcccgcgcagcagcgaccacgggaacggcaggagcagcgagggaacggaagagagggccgaagcccaaaccgcagggg

SEQ ID NO: 171950 - RNA, 39 nt, Homo sapiens
gcagacccgaggagcccgcagcccagcgacaagcgcccc

SEQ ID NO: 171951 - RNA, 74 nt, Homo sapiens
cgcagccgcggagcccggccgcacgggaccacacgcagaccgcacccgaaagccaggcgaaaccacccaacagg

SEQ ID NO: 171952 - RNA, 78 nt, Homo sapiens
agacccaggaagcacagagcgaccagacacggcccacggccagagaaagggcgcaaaaagaaagaaaacaaaagccag

SEQ ID NO: 171953 - RNA, 60 nt, Homo sapiens
cccagaaccggcacccaaaacggcgcgcccggaggagcgagacggacccggaggagcgcc

SEQ ID NO: 171954 - RNA, 63 nt, Homo sapiens
cgcgagcccgagccgaggccgagacgccagagccaacgaaggccggagcacccaggaccccgc

SEQ ID NO: 171955 - RNA, 70 nt, Homo sapiens
cgcacggacgcaccccacgggaacccacgaccaaagcggaaggccgccggcgcggcacccacaaagcacg

SEQ ID NO: 171956 - RNA, 63 nt, Homo sapiens
cgccgaccaggccggccgcgccccccaggacccgccggcgcgagaaccaaaggaaaccgaaaa

SEQ ID NO: 171957 - RNA, 100 nt, Homo sapiens
acaccaggagagagcgcgcagagaacagaaggcaaaagagggaggagagcgaccgaagcagaaagagacgaagaggagcagaaccagaagggacacacag

SEQ ID NO: 171958 - RNA, 85 nt, Homo sapiens
ccaccccggacagccagggcgcggccgcccgaagaggagagagcgcgggcccaggaagggcggagaacggaaaagcaccaggaag

SEQ ID NO: 171959 - RNA, 76 nt, Homo sapiens
ggagggacagggagagaagaagaccgcggagagcgaacagagaaacaggaaagaggagaccaagcaccagaagaag

SEQ ID NO: 171960 - RNA, 71 nt, Homo sapiens
gacgaggcgcgggcgcgcacccgagccgcaagcagcccgcacagcggacgcaaagaaaaagacggcaaaag

SEQ ID NO: 171961 - RNA, 74 nt, Homo sapiens
caacacgcaaagaacaaaccaaaccacgaaggccaagagagagaaccgcagccagaagcaaagcagacagacgc

SEQ ID NO: 171962 - RNA, 69 nt, Homo sapiens
cgcccgccgcgggagagagaacagaccggccccccaaacacccgagcccagccccgccccgaccaccag

SEQ ID NO: 171963 - RNA, 79 nt, Homo sapiens
cagaggcagggggcgacccgaacccaaaggaggaaacagcggcaagccacagacgggacgcaacaaagcagccagagaa

SEQ ID NO: 171964 - RNA, 64 nt, Homo sapiens
acgaaggagaaacacgcacaaccagaccaacgaggaacaaccaacaaagcggcccacaggcaac

SEQ ID NO: 171965 - RNA, 62 nt, Homo sapiens
gagagagcccgcagcggaaagagcgggcaggaagcaggaaaacaggaaaagaaaacacaggg

SEQ ID NO: 171966 - RNA, 63 nt, Homo sapiens
gcagggggacgcaaaggccaaggggcggcaaaaagaaagacagcacacggagcgcgaagaaac

SEQ ID NO: 171967 - RNA, 79 nt, Homo sapiens
caacccccaagcagcaagaagggagggagcgggaaggggagcgaaggccgcgcagccagagggaacagcggaccgggag

SEQ ID NO: 171968 - RNA, 40 nt, Homo sapiens
cgagggacgcagagcggccgcgagaccgagccagaggacg

SEQ ID NO: 171969 - RNA, 38 nt, Homo sapiens
ggacggggaagacggaggcaggaggccgcccaccccag

SEQ ID NO: 171970 - RNA, 57 nt, Homo sapiens
ggcgcggacacgcaaaccacacaagcggccggagcgggacggaaggggacacaggca

SEQ ID NO: 171971 - RNA, 88 nt, Homo sapiens
ccggccgcggcacaccggagagcgacgggacccccccgcagaagcgggcacagaaagcgagagagccaaagacgagaggagaggaagc

SEQ ID NO: 171972 - RNA, 82 nt, Homo sapiens
cgaggcggccacccgagacgcggcgcgcacgcccggccgcggcacacagagaaaaaaagggaacaaaacacagcaagcagac

SEQ ID NO: 171973 - RNA, 81 nt, Homo sapiens
gggcagggagcggaccggaggcgccgccgcgacagcagcagccaggaggacgagagcccaagaccgcgagcgaaggagaca

SEQ ID NO: 171974 - RNA, 63 nt, Homo sapiens
aagcccaaacgggaaagacgagcaaacaggaacaagcacaacagcaagaaaaaccaacaaaag

SEQ ID NO: 171975 - RNA, 61 nt, Homo sapiens
caaggggagagagggaacagaaaggagaacaccacaggagagcgacaacaccaagaggaga

SEQ ID NO: 171976 - RNA, 78 nt, Homo sapiens
aaggagcagccagaaagcggcacgaacagagccgggagcaagaagaacacccagagaccaccccgcgcgcccaggaga

SEQ ID NO: 171977 - RNA, 73 nt, Homo sapiens
ccgccaccagacaagagccacaacccacgcaaagaaacaagacagacgaagaaggaaaagcgaacagaaccag

SEQ ID NO: 171978 - RNA, 76 nt, Homo sapiens
cagaaagcggacaacaaggggcaagacggaagcaaggcaaaggaaagaccgagcggcgggagcgaagcgcaaggaa

SEQ ID NO: 171979 - RNA, 57 nt, Homo sapiens
cggccagcgaaaacgcccagccacgaagaccgggcgccagggccgccgccccgcccg

SEQ ID NO: 171980 - RNA, 60 nt, Homo sapiens
acccgcccccagggagggaacaaagcccacagcaccggggcaagccgggagaggaagaca

SEQ ID NO: 171981 - RNA, 69 nt, Homo sapiens
cccgaggacaccccgggggaacacgaagaagcgaccaacacagaaggaagagagaagagggggaagaag

SEQ ID NO: 171982 - RNA, 74 nt, Homo sapiens
gagcaacaaagccgacccaacccaagggccaaagccggaaacgaaacagcgcagccaggaacaggacgaagacc

SEQ ID NO: 171983 - RNA, 69 nt, Homo sapiens
gccggcccacgcgcggccaaggcgccggggaaggaaccagaacggcaccccccccccggcccggacgcg

SEQ ID NO: 171984 - RNA, 79 nt, Homo sapiens
gaggaggggaggaggaggaggacagggaaaggagcggggagccccgcgccacagagacccccggagacccccacgacac

SEQ ID NO: 171985 - RNA, 76 nt, Homo sapiens
cggcgcggcgccgcccccgccgccgcccgccgcccccggcggagcagccgcagccacggaaagagggcaaccccgc

SEQ ID NO: 171986 - RNA, 90 nt, Homo sapiens
gcacgaggaggcgcccgcaccccaagaagaccacaccacaacccaccgagcggccaggaggcccggaggagaaacgaggaggaagagaag

SEQ ID NO: 171987 - RNA, 68 nt, Homo sapiens
agggccagagacacaccccaccagagggggggaggcccaggacgggagagacaagcagggaccggaga

SEQ ID NO: 171988 - RNA, 76 nt, Homo sapiens
gcgcaaaacaggacgaaaacaaagggggaagccgagaagcccgaccagcaggacccgcaggcgagagagaaggcag

SEQ ID NO: 171989 - RNA, 59 nt, Homo sapiens
cagcgggccggacggggcggggggaacgagcgccgcccggcgggcgccgggagccgcca

SEQ ID NO: 171990 - RNA, 68 nt, Homo sapiens
gccgcccaaaagaggggaacccagacaaccacaccccccggagaaggacgagcagggggaggaacaaa

SEQ ID NO: 171991 - RNA, 81 nt, Homo sapiens
caagacgaagaacagaaggcgacaaggccaagaccgccagcaaaggaagacgagaacaaagccagccgaaacaccagcaag

SEQ ID NO: 171992 - RNA, 73 nt, Homo sapiens
acgcggggaaggcgaggcacgaccccacccccgaggcccgaccgacaagcagaccggaagaccgacggaagac

SEQ ID NO: 171993 - RNA, 67 nt, Homo sapiens
cccgaacagcagcagcgcgagcgacaacgggacgggaaacaccgaggccaaaagaaaggaagaaaac

SEQ ID NO: 171994 - RNA, 73 nt, Homo sapiens
gggaggcagaggggcaggggggcggcgcgccgagacccaccccgacagacgagaagagacccagcaaggaaaa

SEQ ID NO: 171995 - RNA, 71 nt, Homo sapiens
gccgaccagagaacagggaccaccagaccccagcccccagcgaacacgcacacacaccggcaccaggaacc

SEQ ID NO: 171996 - RNA, 71 nt, Homo sapiens
ggaccgggcgcgccgcgggagcgaggcgggacaagggcgcaccggggcgcagcgagggaggacaacggggc

SEQ ID NO: 171997 - RNA, 75 nt, Homo sapiens
ggagccaaggaaacaggagcgaagcccagcgggccggacggggcggggggaacgacgcacccccagacgccgacc

SEQ ID NO: 171998 - RNA, 73 nt, Homo sapiens
aacccggacgaaacgaccccaccagccccaaaaggcggcaacagccaaggccgacaaaaccggccgggaagca

SEQ ID NO: 171999 - RNA, 82 nt, Homo sapiens
ggggcaagccccgggcgggacagcccagaagcgaggcgaagcagcggcgagaaacgagagcacgagaaagaaggccagaagg

SEQ ID NO: 172000 - RNA, 82 nt, Homo sapiens
gccgaggaaccacacgggggcacggggccacccgaccaccacacccaccaggagagaagggaggaccagaggggcaaaagga

SEQ ID NO: 172001 - RNA, 60 nt, Homo sapiens
ccgaggagaaaacacccaggacagcaagaaccaggagcaccggggcagaaggagaaggac

SEQ ID NO: 172002 - RNA, 73 nt, Homo sapiens
accaccaagagccaaagagcgaccgccacaggccgggaagccaagaagagagagggccaccgcggcaccagca

SEQ ID NO: 172003 - RNA, 74 nt, Homo sapiens
cccaccccaggccagccccagccccacaccacacagcagcaccgcccggagccccgggcaacaaggccccggga

SEQ ID NO: 172004 - RNA, 52 nt, Homo sapiens
caggcggagccgaccgggccaggacgaacacaaaggggcagcaacaccagac

SEQ ID NO: 172005 - RNA, 108 nt, Homo sapiens
gaaaaacccaacagccaaggacagaggaccaaagcggaccagagacaggggaacaggacgcaagagacgcgccacagccagcggacaaacagcccggggccaagagag

SEQ ID NO: 172006 - RNA, 72 nt, Homo sapiens
acaggaacaggagccaaaagagaagacacccaaggcgaccggacagaagacagaccgacagacgccaaacca

SEQ ID NO: 172007 - RNA, 74 nt, Homo sapiens
gagcagggacagccaagaaccaaaaaggaccacgaagaccagcagggacacagcaggacaagaacgacagaaag

SEQ ID NO: 172008 - RNA, 66 nt, Homo sapiens
gcggaggcccccccgcagcaggagcagcccgggccggcaacggggacccgacaagagagcagagaa

SEQ ID NO: 172009 - RNA, 77 nt, Homo sapiens
gcggcaccaacggcaccaacacgcggagcggaagacggcaacccagagaggagccacacaggccggaagccacccag

SEQ ID NO: 172010 - RNA, 74 nt, Homo sapiens
cagccaaaaagcggcgcccgaaggccagggggcaagccaaaggcaaaggaacaaccgagaaccagacaaaaaag

SEQ ID NO: 172011 - RNA, 78 nt, Homo sapiens
ggagacagaaagagaccggaccagaaaccaggagccacggacaagaccaaaagacacaagaaaccaagggaagggcga

SEQ ID NO: 172012 - RNA, 80 nt, Homo sapiens
gcggaagaggcggccggcgaaaggagcgggccggcaagggagagagccaaaccggcgccaagccccaacacaggccaagg

SEQ ID NO: 172013 - RNA, 84 nt, Homo sapiens
cggccgggcaacgaccggcggggggcgcggcgccgggacgcaccgcaccgagggcgagcccagacaaacgagggagcaggagac

SEQ ID NO: 172014 - RNA, 74 nt, Homo sapiens
aagaaggagaccagacaagcgccagaaaagaacgaaaagacccaacacggccacacgccagcacggagcgcggc

SEQ ID NO: 172015 - RNA, 47 nt, Homo sapiens
gagccggaaacggacaaacaggaggaagaaagacgcacacaccgaac

SEQ ID NO: 172016 - RNA, 86 nt, Homo sapiens
acaaagagagaagagccgacacgagagcagcaccaaccaaaacccgaaaaagccaccagggccagaggaagagcaacaaaggcgga

SEQ ID NO: 172017 - RNA, 99 nt, Homo sapiens
cggagccagggaggcagcagggcagccacgaggggaccaaaccccacacccaggggagggcaagagccaggggagaccaccagacacaaccacagccgg

SEQ ID NO: 172018 - RNA, 79 nt, Homo sapiens
gagaaagccacccagagaagagagaaccacagggaaggcagagaccgcagaaggcccaggaaacgagggcaggaaggac

SEQ ID NO: 172019 - RNA, 59 nt, Homo sapiens
ccacaacagggacgaacgagcgcaggagggacggaacaaaagaagccgcgagagagccg

SEQ ID NO: 172020 - RNA, 83 nt, Homo sapiens
gaaaagcaaaaggacaggaaaaggacagaacgccaacgaagccaacgcaaagcaaagcgagcccccagaccaggacccagacc

SEQ ID NO: 172021 - RNA, 68 nt, Homo sapiens
cccgcgacgccaaccacgacgaagcggaaggcagaagaaaagaggaaccggaaaacaaaaagcaagcc

SEQ ID NO: 172022 - RNA, 65 nt, Homo sapiens
gccggccgagaaggcagaggcggaggcaggggaagcacaaaagcgcacccgcgccagcgaggacc

SEQ ID NO: 172023 - RNA, 59 nt, Homo sapiens
gcagcagcgagaaaggagccggggaccccccaaagacaaggagaaagaggacacggccg

SEQ ID NO: 172024 - RNA, 75 nt, Homo sapiens
aaaaaaggcgcaagaagggcaaggggaccaggaggcaaaagaaacaaaagaacagaaggacagacccagaccgag

SEQ ID NO: 172025 - RNA, 72 nt, Homo sapiens
ccccacagaaaaggaaagcccgggaagcaggcgcaaaaacaggaaaacgacacgacggccgagaaagcggag

SEQ ID NO: 172026 - RNA, 46 nt, Homo sapiens
acccacccaagcccacgaggcggagcgccggaccagcgcgagcgcc

SEQ ID NO: 172027 - RNA, 86 nt, Homo sapiens
cccagcgacccgaccccgcgcgacgacccgccgccgccgggcggaggcgaagcgcccaggggagaacccagaaacagacccgccgg

SEQ ID NO: 172028 - RNA, 75 nt, Homo sapiens
ccaaagaacgcaggaccccggaaagggaaaggaaccaaaaccgaggaagggcaaaacgcagaagggaagcaaaag

SEQ ID NO: 172029 - RNA, 107 nt, Homo sapiens
gaaaaagaaagcagaacaaagaagcagcaaaccccccaagacaaaggggcaaaagcagaccggaaaacccaccggcaagaccacacccgaggggagcccaggacacc

SEQ ID NO: 172030 - RNA, 89 nt, Homo sapiens
ggacccggagacaccccgcagcacagccgcgaccaaggaaggaacggcccaggaccggaccgcagcagaaggggggcagcggagcacag

SEQ ID NO: 172031 - RNA, 76 nt, Homo sapiens
gagcgagaggccggcacacggagggggcgcagcgccccggccaagaccaaagaaaaaagagaaggaaagcggacaa

SEQ ID NO: 172032 - RNA, 70 nt, Homo sapiens
gggccagcgacaacccccagaagagaccaacgccaccaaccaaccgaaaacaccgggaaaggcccaaacc

SEQ ID NO: 172033 - RNA, 78 nt, Homo sapiens
acaaacgcccgaaaaagcagaaagggaaagaagccaggcaagccccaggagagaagaccagaggaagagggaccagaa

SEQ ID NO: 172034 - RNA, 49 nt, Homo sapiens
cccagcaagacacggggagagacccccagggggagccagacgaccaggg

SEQ ID NO: 172035 - RNA, 73 nt, Homo sapiens
cacgaagccgagaggccggacgaggacagcccagagcaagcacacggaggcccgggagccagaccgggagccc

SEQ ID NO: 172036 - RNA, 76 nt, Homo sapiens
acggggcaagggccaaggccgggggaacccccaaaaaacacccagggcaggccaggaacgcaagcgccgagacagc

SEQ ID NO: 172037 - RNA, 75 nt, Homo sapiens
gaagccaggggaggcgaagccgagagagcgggggaaggagcaggaaaagcacacgccggacggaaacccacagcc

SEQ ID NO: 172038 - RNA, 31 nt, Homo sapiens
cacacccgggcaagaaagggcgcaaaaagaa

SEQ ID NO: 172039 - RNA, 83 nt, Homo sapiens
cacaccaggcggagaaagggcagaggcccccacggcaccgcagaacaggccaggggaagacaaccacaggccagaagcaacgc

SEQ ID NO: 172040 - RNA, 55 nt, Homo sapiens
ggaggcccccggacggaggcaggcagaaagagcacggacagagggaagggaacgc

SEQ ID NO: 172041 - RNA, 81 nt, Homo sapiens
gggggggggggggagcagggaagacgccgcgccaccgagccggaccggagacggggccaacagagccagaggacagaaagc

SEQ ID NO: 172042 - RNA, 54 nt, Homo sapiens
aaacaaacggacagcccagggccaaaaagcagaaaaacaaaccagcccaagaag

SEQ ID NO: 172043 - RNA, 80 nt, Homo sapiens
gaacaggagccagaaggaagggagcacggacaaggaaggggcaggagacaaaggcagcccaaggccaaccccacgcaccg

SEQ ID NO: 172044 - RNA, 79 nt, Homo sapiens
agaaccaagcggcaaagcaccgaacggcgcgaccagaagaagaacaaacagcagaaagaaaccaaggagacacccccga

SEQ ID NO: 172045 - RNA, 59 nt, Homo sapiens
cagggggggcccaggagaagacgaaccccacacagcgcggacaagagacaaagggacga

SEQ ID NO: 172046 - RNA, 92 nt, Homo sapiens
ccaggaccgcacaggcagacgcgggccagcccagcaccgacagccgacgcgcagaagcagagccaccggggaccccagccaggccacgggga

SEQ ID NO: 172047 - RNA, 77 nt, Homo sapiens
ggcgggggaaacagcaagcggcgggacgaccggcgagcgggggaacgcggacagggcggagaacggaaaagcaccag

SEQ ID NO: 172048 - RNA, 74 nt, Homo sapiens
agggccgccccaggacaggggacgggcgcccaggaacagaggaggaggcggcaaggagacggcccgccgggaca

SEQ ID NO: 172049 - RNA, 117 nt, Homo sapiens
gacgaagcaggccaggaagaaagagaggaaagaagaaaaccaagaaagccccacggcacagccagaggacaacacacacacacaagaaacagggccaggagggggcccagcacagga

SEQ ID NO: 172050 - RNA, 75 nt, Homo sapiens
agacaagagcaaagcacccaccagaaagaggcacagccccaaaagaaaggcaggcgacgaggcggagacacgggg

SEQ ID NO: 172051 - RNA, 70 nt, Homo sapiens
aacgcgagaagaccccaacggaaaacaacagcggacgacccaaaaaccggcaagaacggaagcacgggcg

SEQ ID NO: 172052 - RNA, 87 nt, Homo sapiens
aaggacaggcgccggggggaaccaacagcccccacgcaggacggaacaaaacaccaagaagcaaacgagccaaaaccgaggaacgac

SEQ ID NO: 172053 - RNA, 38 nt, Homo sapiens
accccggccgagcgaggagcgacccccggacgcagagc

SEQ ID NO: 172054 - RNA, 86 nt, Homo sapiens
gggagaggcgcagcggaggcggaagcaggaccggggcacggagccgcccacccacgcaacccagacagaagagccgggaaagcagc

SEQ ID NO: 172055 - RNA, 64 nt, Homo sapiens
aggaggcgagcccgcggaaccgcagccagacacacggcagggaaccccaccccggaaggcgggg

SEQ ID NO: 172056 - RNA, 83 nt, Homo sapiens
agaagcggaagaagcagacccagaaggcgacaagcccagagggacagaggacgcgaaaggccaaaaaccgcagcagaaagagg

SEQ ID NO: 172057 - RNA, 80 nt, Homo sapiens
ccgagaggaagaaaaggccagggggaaggaaaggccaccgcgcccaggcaggggcaggggccacacagcacgcagcccga

SEQ ID NO: 172058 - RNA, 51 nt, Homo sapiens
gacgggccgcgaggggaagaggaagcaaagccaagcaagcacgagaaaaga

SEQ ID NO: 172059 - RNA, 39 nt, Homo sapiens
gggaagggcggacacaccgggaacgacacagccgcacag

SEQ ID NO: 172060 - RNA, 66 nt, Homo sapiens
agggaaccgcgggccgccaggagagaagacggagaaagacagcaaagaaaaggagaagaaaggaaa

SEQ ID NO: 172061 - RNA, 96 nt, Homo sapiens
cccacacacgccagcagaccaccccgggagggaaaggggcagaccaacaccacccagcaaaaaccccgacgaacgcgccagggagcgccagacacc

SEQ ID NO: 172062 - RNA, 81 nt, Homo sapiens
ggaacccgaagaagaaaggacgacagccagagagcaaaccagccggcgggcgccacaacggacgacgaaaacacagcccag

SEQ ID NO: 172063 - RNA, 74 nt, Homo sapiens
ccaacccacgcccgaccgccacccgggaagcacgccacaaaggggcgaagacgaagagaccaagagggccagca

SEQ ID NO: 172064 - RNA, 86 nt, Homo sapiens
aaggacgcccgcaccggaggaggagaaggagaggcgccgccaggagaagaaggaaggggaagaggcagaaaaggaagagacgcccc

SEQ ID NO: 172065 - RNA, 77 nt, Homo sapiens
cgaccgggaaagccagggaggccgcgaaggaacccaaccgaagaagaacagacccagacaaacacagcagcgacggg

SEQ ID NO: 172066 - RNA, 79 nt, Homo sapiens
gcggaggggcgcgcccccagccacagagcccgaccggcccacagccacccgacggccacaggagggcacaccgagccac

SEQ ID NO: 172067 - RNA, 83 nt, Homo sapiens
cgaacgagcaaaggcacgggcagccggaaggacaccaagagcggaccgggccccggaagaaaacacgaagaaacgcaggagcc

SEQ ID NO: 172068 - RNA, 74 nt, Homo sapiens
aaacacggggaacaaacggcaagagccagaagcccggcggaaggacgaacgcagacacccgagcgacacaggaa

SEQ ID NO: 172069 - RNA, 75 nt, Homo sapiens
ggaaacggacacagggcgcaacgagacacggagcagcccagcaagcccagaggaagcaaaaagggaaagacaggg

SEQ ID NO: 172070 - RNA, 83 nt, Homo sapiens
aagcaaagcaaaggagaaggcagcgggacggacaggcagggaagcaacgcagagagacgaggacgcgcacaggaaaggacgcg

SEQ ID NO: 172071 - RNA, 80 nt, Homo sapiens
acacaccaacaaagcaggacagaaggaaaaagccaacgccagcgggagaaagaacgcaacaaaagggacagagaagcaag

SEQ ID NO: 172072 - RNA, 72 nt, Homo sapiens
ggagcccgcgcccgccgcgggagagaggacccccccccccccccaaggcgcacggaagaccaggagagagag

SEQ ID NO: 172073 - RNA, 81 nt, Homo sapiens
aacaggaaaaaaaaggaggcgacaagcaacaacaacaagcggcgagcaaaaaccggaggagcagaagagaggaaaagggac

SEQ ID NO: 172074 - RNA, 72 nt, Homo sapiens
cagccaggaggacccccggggaaagggcccagcacgacagagacccggaaagcgagcagcaaagacccagca

SEQ ID NO: 172075 - RNA, 77 nt, Homo sapiens
gcggagcaaagaacaccaccaagcaggcccgaccccgaacccaccggaggcaagcacggagccgcgcggagaacacc

SEQ ID NO: 172076 - RNA, 72 nt, Homo sapiens
ccccaccccgcggagagcggcaacagcaacaaacggaaaccacgggcagacaagagaagccacggagcaaga

SEQ ID NO: 172077 - RNA, 87 nt, Homo sapiens
cccggaggagcggagagcgagcggcaacccggaggagaaagaagaaacaaagagggacccagccaccaaaaggaggcgaagggccag

SEQ ID NO: 172078 - RNA, 76 nt, Homo sapiens
cagaaacacacagaccaaagcggacaccagaggaccagaacccacgagaaacagacgagccaaccagaccccagga

SEQ ID NO: 172079 - RNA, 56 nt, Homo sapiens
gcacagaccgcccaagccgaggaccaaaccaaagacccggcgggggcaaggaagca

SEQ ID NO: 172080 - RNA, 81 nt, Homo sapiens
gggacggaccgagaccggaccgagagcggaccgagagcgcgaaacgcacgagaagaaggagcgagggacaaaacaaagagg

SEQ ID NO: 172081 - RNA, 80 nt, Homo sapiens
gcgcgcccgggccggggagcaagcgccagcccgcagagcccgcccccccggcagccagcccgcccagacaccagcagccc

SEQ ID NO: 172082 - RNA, 56 nt, Homo sapiens
cgcgaaacgcacgagaagggggcgacagacagcggaaagccccaggaggggcgggg

SEQ ID NO: 172083 - RNA, 80 nt, Homo sapiens
cggagcgccggccgcgcaggggcaagccggagaaagacagcaaagaaaaggagaagaaaggaaaaaaacaaccccgggca

SEQ ID NO: 172084 - RNA, 87 nt, Homo sapiens
gcccgcgcccgccgcgggagagaggacccccccccccccccaagcaaccccaaggccaggggaggccacgaagggggagcccgcaga

SEQ ID NO: 172085 - RNA, 51 nt, Homo sapiens
aaagacggcagaagcacacagaagaaagacccggcacaaaacgaccccgga

SEQ ID NO: 172086 - RNA, 38 nt, Homo sapiens
gccgaaggcagcacaacgcccagaggcggaagacagaa

SEQ ID NO: 172087 - RNA, 36 nt, Homo sapiens
gagcaagcggacagagccaaggaagcaggcggagaa

SEQ ID NO: 172088 - RNA, 65 nt, Homo sapiens
gcagggaccagcggaacgaggccgcgaaaggcgagacgacgggaccgaaggaccccgccagagac

SEQ ID NO: 172089 - RNA, 86 nt, Homo sapiens
cgacaagaacgcaggacggccgcggcaccgaaccacaaggaggacgagagccgcagccacagcaaaccggcaacacgcaggcgcgg

SEQ ID NO: 172090 - RNA, 82 nt, Homo sapiens
cgcagccgcgaagggaaccgcgggccgccaggagagaagacgggaacccgaccagcccagggccccagagcaggaggagggg

SEQ ID NO: 172091 - RNA, 78 nt, Homo sapiens
ggggaggagcccagcaacggcgcaaacccccagaggaccacacaccccgaccacagcgcaacaacccacgcacgaaca

SEQ ID NO: 172092 - RNA, 53 nt, Homo sapiens
ggagccgggaccgcagccaaagccgcaaaagaacacagaccaccaggcaaaac

SEQ ID NO: 172093 - RNA, 96 nt, Homo sapiens
accaaggcacacagagcagaagaaaaagccgaaacaggcagcggaaggggaggagcacagaacgccaggaccaaaacagggagaaacacagccaga

SEQ ID NO: 172094 - RNA, 75 nt, Homo sapiens
gcgaaggccagcggcaccgacagggacaccaccgaaccccagcccaagccgcgcccggccgggcccgggaggagc

SEQ ID NO: 172095 - RNA, 72 nt, Homo sapiens
gcccgccacacccaggagccaccaagacaggcccaaaaacgcgacggcaacacaaggagcccaagggggccg

SEQ ID NO: 172096 - RNA, 73 nt, Homo sapiens
gcaaggagcgaaggaacgccccaaacagaaggcggaccccggcagcaagcaacagagcgccaagcccccgcac

SEQ ID NO: 172097 - RNA, 62 nt, Homo sapiens
ccggggcgggcggcgggcaccgcagcgccggaagaggcgcaccagccgggccaggacagaaa

SEQ ID NO: 172098 - RNA, 79 nt, Homo sapiens
gggacaccacgaaacgaccaaacagcgacgagagaccggcaggcacagccacagacagaaagacgggcccagccaaaaa

SEQ ID NO: 172099 - RNA, 69 nt, Homo sapiens
ggggaaacaacgagaaggcgaccaaaggaggaaaaggaagggaaaacaagaggaaaaaaccagcaaccc

SEQ ID NO: 172100 - RNA, 80 nt, Homo sapiens
ggaccggccgagaggaagacgagccgggaggaacggcccggaaacaggaggacgccccgcccagcggcccgccccaggac

SEQ ID NO: 172101 - RNA, 50 nt, Homo sapiens
cacgcgcggaaggcagcgcccagcagcgcaggccaacagaaaaacagccg

SEQ ID NO: 172102 - RNA, 76 nt, Homo sapiens
ccgccaagcgcagaacccagaccaggggacacgcgcaggaggaggagaagaagcacgagcggacccggagaaggac

SEQ ID NO: 172103 - RNA, 41 nt, Homo sapiens
acccccccccagacacagagacaaaaggacagcgacagaca

SEQ ID NO: 172104 - RNA, 70 nt, Homo sapiens
gaaccccggagaaaaggccaagaaggcaggcgggaagaggagacgccaacagaagagcagcagacaccga

SEQ ID NO: 172105 - RNA, 67 nt, Homo sapiens
cagccgccagggacgggggccaccggacaggacagaaagcgggacacaagcaggagcacagaccccg

SEQ ID NO: 172106 - RNA, 56 nt, Homo sapiens
ccgaccaaggacgagaccaaccccaagaacagaacgaggagcccacgccaaggaga

SEQ ID NO: 172107 - RNA, 71 nt, Homo sapiens
ccgacaccaccacaaagaaccgcggagaggaccacgccggcaggaaccagcaaaagcggcgccaggaaaga

SEQ ID NO: 172108 - RNA, 78 nt, Homo sapiens
ggacccggaagcggcagcgaggagacccggcgccgccaggccgacgaaaagcccaagacaaaaggacagcgacagaca

SEQ ID NO: 172109 - RNA, 84 nt, Homo sapiens
aaggcggcccggcgggcgacggacggccggacagggggaggaacacgaccggaagacaggccaaggagagcagcgcggacagga

SEQ ID NO: 172110 - RNA, 68 nt, Homo sapiens
caaagaaaaaaagcagggcaccagccgccagcacccaacaaacgaaggaccagggcaagaaacacaac

SEQ ID NO: 172111 - RNA, 74 nt, Homo sapiens
caacgggaaaaaacacccaagaacacgacggaacaacaaaggcagaaaggaaccaggagccagcggaggaaaag

SEQ ID NO: 172112 - RNA, 69 nt, Homo sapiens
gaggaacgccgggcgcgggcccacgcggcgcagggaaacaggccagccacgcagcagcagaagccaggc

SEQ ID NO: 172113 - RNA, 68 nt, Homo sapiens
ccaaaccaaaccacagacgaaaggcaacacaagggcaaagggaagagcgcagggaaggggaacggaag

SEQ ID NO: 172114 - RNA, 116 nt, Homo sapiens
ccgggcaggccaacgagagacgcagaggcgggccagagcccaggagcgcgacaacgacaagcaccccccggggaaagacacgccccaccgagggcagggccgcccgaacccggggg

SEQ ID NO: 172115 - RNA, 68 nt, Homo sapiens
gcccgaggcccggagcgaccaggagacccaaagagacacccacaagaaaagaagaaaagggaaagaga

SEQ ID NO: 172116 - RNA, 93 nt, Homo sapiens
ggaaagaacacagagggacgagccaaaacaaaaaaggcacaccgcaaaaaggagccaccccccgcaaaccagacaacgaagagaggaaagaag

SEQ ID NO: 172117 - RNA, 79 nt, Homo sapiens
ccaaggacaccacagccccgacgaacacggggacaccaacaggacccgggagcaagaggcagacagaccgagacgggca

SEQ ID NO: 172118 - RNA, 75 nt, Homo sapiens
aaaaaccgagcggagaggagaaagaggccggaaaggaaaaacaccagaacggaaacagaaggacacaccagaggg

SEQ ID NO: 172119 - RNA, 97 nt, Homo sapiens
cccccgcagccgaggcccagcgggcacccagcagccaagcagaaaaggcaacacaccagagccggcagcacagaggccggcagcggaaacagggggg

SEQ ID NO: 172120 - RNA, 81 nt, Homo sapiens
gggagaaggcgcaacgcggcgcggcgccggccgagcccgggaaaacgacagcagcagcagggccggaagacgccaccgcaa

SEQ ID NO: 172121 - RNA, 56 nt, Homo sapiens
ccgccccaacccacgagaggacagcccagggcggaaacagggagggccacagcccc

SEQ ID NO: 172122 - RNA, 75 nt, Homo sapiens
acggagggagggagagcccacgacagaacgaaaagaaaggaccccagcccgccccccaaagcgaagccaaagcga

SEQ ID NO: 172123 - RNA, 79 nt, Homo sapiens
cagccaccaggggaagggagaacaaggcgccacaggagccgcagaagcaaaggcaccgccaaaccgaaaacgcgggaaa

SEQ ID NO: 172124 - RNA, 79 nt, Homo sapiens
caaacacaaagacgaacaaagacggcaacgcgcacagcgcagagaagcacaggagacgaggaaggaaaacaagcagaag

SEQ ID NO: 172125 - RNA, 69 nt, Homo sapiens
cgcagaagcccagaaaagaaagacgcagaaaacagacacacagcggagacaagcagggccggcaggagg

SEQ ID NO: 172126 - RNA, 83 nt, Homo sapiens
aaaaaacagcgagaacgaggaacgcagacagcaggcgaagccagacacaagagaaaaagcaacccaaaacagaaacgaagaag

SEQ ID NO: 172127 - RNA, 33 nt, Homo sapiens
ggagcgaagccgaacaggccgcagcggcaccca

SEQ ID NO: 172128 - RNA, 75 nt, Homo sapiens
ggcgcccgcggccagccgcaagacccgccacaagcaacgcgggaagagaagggcagacacaaggaacagccagcc

SEQ ID NO: 172129 - RNA, 68 nt, Homo sapiens
ccggcggggagcacggaggcggacaaggacaccgcgaaaggcagcaccacagcaccacaggacaacac

SEQ ID NO: 172130 - RNA, 75 nt, Homo sapiens
agaggcaccgaacccagcacggcaaccgcgcggcaggccaggggaccgaacccacaaacaaagcaccagaaagca

SEQ ID NO: 172131 - RNA, 77 nt, Homo sapiens
caagcggcccacacgggacggcgcggccacccgcagagccacccgccccccggcagcgggagaacaggaccgagaag

SEQ ID NO: 172132 - RNA, 74 nt, Homo sapiens
gagagccaggaagccaggagcaggacgcagaagacgcagggccaaggagaggagggggcgcagcaaagggggga

SEQ ID NO: 172133 - RNA, 78 nt, Homo sapiens
ggacccaagcccgaggcagcagacagccgggccccaagcacaccgacagagaacccaggccaacacacagacagaggc

SEQ ID NO: 172134 - RNA, 91 nt, Homo sapiens
cacaaccggagcccagagccacgcaaagcaaacgagagcgccagggacggaagcgacagcgcaggaggcggggcaagggccggccccaggg

SEQ ID NO: 172135 - RNA, 82 nt, Homo sapiens
cgagcgaagcacccccagcggggaccgcccgggacaacagcgcggggcacagcaacgaagggggaacagaaaaggcaagaag

SEQ ID NO: 172136 - RNA, 112 nt, Homo sapiens
gaggcaaccaagaagaggaaaagaacagagccacacaagaaggccaggaacaaccaagcggagggcagaagaagacagccagaacagcaagcgaggaccaccgcccgacccg

SEQ ID NO: 172137 - RNA, 78 nt, Homo sapiens
ggggaccaaggccgagagccggaacaaacgagggcccgggaggaccgacgcagccaggaagcgcaggcgcagcaacgc

SEQ ID NO: 172138 - RNA, 44 nt, Homo sapiens
cagcaccaccccagccccgcgcccgcccggaacgaccaggagac

SEQ ID NO: 172139 - RNA, 119 nt, Homo sapiens
gagaaaacccacgcgaagggcaccagagcggcacagggggacccacccccccaggcacgccagggccaagacgaccggaggcggccaggcgggccccacccgagccggagacacagcgg

SEQ ID NO: 172140 - RNA, 66 nt, Homo sapiens
gacggggaaggccggggcgcccggcgccggccgagaaggcagaggcgacacccagggggcggcaag

SEQ ID NO: 172141 - RNA, 72 nt, Homo sapiens
cggcggccccagcacaaaccagggaaagaacagccagcagacgaaaccagaagcagccccaaggcggggggg

SEQ ID NO: 172142 - RNA, 80 nt, Homo sapiens
gcgcgaaggccgggacccggccccggcccacaggggggggcaaacccgagagaacggcgagcaggcgacccaaaagagcg

SEQ ID NO: 172143 - RNA, 72 nt, Homo sapiens
agccagacccacccaaaaagaaggaggcaggggaagcacaaaagcgcacccgcgccagcgaggaccggaacg

SEQ ID NO: 172144 - RNA, 71 nt, Homo sapiens
cggagaaggccgggcgagcgcaaaggaaggcgccgggcccgacccgcgagaggcggcaggagggaaagcaa

SEQ ID NO: 172145 - RNA, 68 nt, Homo sapiens
cagaggaggcccccagccacgggaacacaacggcaagcggagaagagcaaggccgaaccgagaggaag

SEQ ID NO: 172146 - RNA, 54 nt, Homo sapiens
cggccagcgaaaacgcccaggagacaggagggaccgggcagaagaacgggggac

SEQ ID NO: 172147 - RNA, 116 nt, Homo sapiens
agagaacaagacgaagaacagaaggcgacaaggccaagaccgccagcaaaggaagacgaggcgggaaaacggcacaaggcgacgagggagggcagaccgccaggccagcacagcac

SEQ ID NO: 172148 - RNA, 82 nt, Homo sapiens
gacccgcgggcccaagcacaccggagcaacaaccggcgggccgaggccgcaggaggagggagggacaaggcaacgagagcca

SEQ ID NO: 172149 - RNA, 72 nt, Homo sapiens
gacccaaagaacggccaggaaaagcgccaacagcagaaaacacggaagagaccgcagacacagcggaccaga

SEQ ID NO: 172150 - RNA, 75 nt, Homo sapiens
aacaaaggacaaagagagcacccaagaagagcaggaagcagaacggaaaaagcaaaagcgagaagaagagaaaag

SEQ ID NO: 172151 - RNA, 44 nt, Homo sapiens
cggagaaaaggccaagaaggcagcaaaccagggccaacaaggca

SEQ ID NO: 172152 - RNA, 79 nt, Homo sapiens
accacacgaaccgcaccaccagcggacgacccgcgggacagagcacgggcagagacagccacaaaccagaggggaccag

SEQ ID NO: 172153 - RNA, 32 nt, Homo sapiens
cgggaagcggaggaaaagggaagcggcaggag

SEQ ID NO: 172154 - RNA, 77 nt, Homo sapiens
acacagaccagcaaggaaaggggcaagcagagacaacagcgggagcaccagaacaagcagaagggagcaggaacaga

SEQ ID NO: 172155 - RNA, 75 nt, Homo sapiens
ccgaccggaggacgcggagaaccggcacagcccccggagacggccgccacagcccagacggcgaaagcgggccaa

SEQ ID NO: 172156 - RNA, 79 nt, Homo sapiens
gaagacaaagagggaggagaaaggaagcaaagcgaagcaaacccccgaagcagagcaggaaggaacacgagaccaagac

SEQ ID NO: 172157 - RNA, 72 nt, Homo sapiens
gaaagagagaagagagacagaagagcaagccagaccaagaagaaccgccccagcccgcaaccgaggcccccg

SEQ ID NO: 172158 - RNA, 71 nt, Homo sapiens
aggcccggccaggcacaagggcaccacaaagcagaagaccccggaacagagaaaccaaaaccagcaccccc

SEQ ID NO: 172159 - RNA, 83 nt, Homo sapiens
cagccccacccgcgcccaagccagacccggagcggaggagccgacacccaaaggacggcgggaagagggggcagaaggacgga

SEQ ID NO: 172160 - RNA, 73 nt, Homo sapiens
gcagggcgcccccgcaccgaagggcacaaacagaaggcaccagccccaaaaagaggccagcggccagagcacc

SEQ ID NO: 172161 - RNA, 71 nt, Homo sapiens
gaaaccggacgcgacgggagccgaagacacaaagcgcaagaggcagcagaccggaagaaaaaaacacagca

SEQ ID NO: 172162 - RNA, 72 nt, Homo sapiens
ccccaggagaagagccagagcgggaggacgacgagagaggcaaaagcagaccggaaaacccaccggcaagac

SEQ ID NO: 172163 - RNA, 63 nt, Homo sapiens
cgggagcccggcaagccgccaccgggagaagcggccgggccaagaagcaagagaaagagcaag

SEQ ID NO: 172164 - RNA, 84 nt, Homo sapiens
cgggagcgcccgaggaacacgccgcaggcaaaagcagaccggaaaacccaccggcaagaccacacccgaggggagcccaggaca

SEQ ID NO: 172165 - RNA, 121 nt, Homo sapiens
gcaagcccggagaaaacaggacccggaaggaaacggcgaagaccgccgaaagacccacggcagggcaaccccaccgcggaaggcaggcacacagacgagaacagagaggacccgagacggg

SEQ ID NO: 172166 - RNA, 71 nt, Homo sapiens
aagccacacagcaagaaaagagaaacacaccgacaagcggaagaccggggagggcaggaaaaagaaaccgg

SEQ ID NO: 172167 - RNA, 73 nt, Homo sapiens
agcacaggcccgggcgaaggggccacgcgaagcccggagcgcaaaggcagggaggagccccgcagaaccgccg

SEQ ID NO: 172168 - RNA, 80 nt, Homo sapiens
cccacaaggcagagggcgcgccgaggccgggggaggcgccggaacaacagcaggaaggcaccaaacggacacaaaaacac

SEQ ID NO: 172169 - RNA, 76 nt, Homo sapiens
gggcccagccaccaacaccgaacgaaacaagaaggggagaaaacgcaggccacaaagacaggaccaagaggaaaaa

SEQ ID NO: 172170 - RNA, 87 nt, Homo sapiens
cgaaacgagaaccagcccccgaagccgcgggcccggccggcggcggcggcggcggcggcggcggcgcaggaaaaagccaggccgcca

SEQ ID NO: 172171 - RNA, 78 nt, Homo sapiens
ccaccaggacacccgggaagagcaagacaacagggccaccccgaaccccaagggaagaaggaaaaaacgaaagaagaa

SEQ ID NO: 172172 - RNA, 64 nt, Homo sapiens
cgaagaacagcgggaaagaaggcaaaacacgggcagcccaaggccaaccccacgcaccgcccgc

SEQ ID NO: 172173 - RNA, 77 nt, Homo sapiens
cagaggagcggagaaccacagacggagacacggcacacagaaacaagaaggggaccagggagaacggccaggcccgg

SEQ ID NO: 172174 - RNA, 81 nt, Homo sapiens
acgccacagaaaccaggcagcgagagagaggagaagcgacgaggaaggcccccaagggacagacgaaagggagcggcccca

SEQ ID NO: 172175 - RNA, 55 nt, Homo sapiens
cggccagggcccagaccaggcagagagccagcaacacgggaaacaaggggcaggc

SEQ ID NO: 172176 - RNA, 78 nt, Homo sapiens
cacggagggaccagcagccaggaccggagcagggaaaaggcccacgagacaagaagggccacacaagcagagaaggag

SEQ ID NO: 172177 - RNA, 66 nt, Homo sapiens
agaggcgagcgcccaggacgggcccgagaagggaccgcggaaccccggccggcacaaggaaccagc

SEQ ID NO: 172178 - RNA, 59 nt, Homo sapiens
cgacgcgaggagcggagaacgcacagaacacccggggcgcagaccacaagacgggaaac

SEQ ID NO: 172179 - RNA, 75 nt, Homo sapiens
cggagcggaggagcagcaaaccgggcagccccaaacggaaagaagagcaaaaaggaagcaccaagccaggagaag

SEQ ID NO: 172180 - RNA, 55 nt, Homo sapiens
gaaacacgggaagcacgacagaaccggccagaggcgaggaggagcggcagagaca

SEQ ID NO: 172181 - RNA, 103 nt, Homo sapiens
gcagcaccaacgcaggcaagaaggccggggaagacagagccccagaaaaaagaaccgggagacacggaggacgcgggacagacagggacggagcagagccagg

SEQ ID NO: 172182 - RNA, 35 nt, Homo sapiens
cgcggggccacaagagaccgagacaacacggacca

SEQ ID NO: 172183 - RNA, 82 nt, Homo sapiens
cccggaaggccagggaggaccccagacaccggagacgggaaagagccggcccaacagagaacggcaaacagcgagaaaccac

SEQ ID NO: 172184 - RNA, 80 nt, Homo sapiens
cagcgcccgagccccggccgccgccgcgagcaccgaaaagcgggaacagcccgggccgccgcacccaccgcggagaagca

SEQ ID NO: 172185 - RNA, 75 nt, Homo sapiens
ccaagacaccccgacggcgaagcccaccagagccaaaaagcggaacaaaaagcagcaagggcaggaaaggaagaa

SEQ ID NO: 172186 - RNA, 79 nt, Homo sapiens
gacaccggaagcgggaaagaaagccaaggacacgcaggacgaagaaggaggagagcccagaagaaaccaaaggggaacc

SEQ ID NO: 172187 - RNA, 69 nt, Homo sapiens
cgacaccgcacgcgcacggacggcacagcccgccgaacccgaaaggaggcccgagagagaaagggaaag

SEQ ID NO: 172188 - RNA, 77 nt, Homo sapiens
ggccaacaaccacacacggacagacgcagccgaagaggacaacaaaaagaaacaggaagaaggaaaagaacggccca

SEQ ID NO: 172189 - RNA, 77 nt, Homo sapiens
acgagaacgccgcgacagaaaacgaacggggaagaagcagccgcccaaacaccaggcagggccccagaccgaggcag

SEQ ID NO: 172190 - RNA, 76 nt, Homo sapiens
cacagccccaccccgaaaaaaacgagagaagaggcgaaagaagagggaaaagacgagcaggagaagaaaacaagaa

SEQ ID NO: 172191 - RNA, 71 nt, Homo sapiens
ggaggccccgaaagccagggccgaccccgaagccgcggccgaaggcagaacggggccccgcacccagacaa

SEQ ID NO: 172192 - RNA, 62 nt, Homo sapiens
cgcaccgcaggcagacaaaagggccaaagaagggagagagagccgagacagagacgaaccaa

SEQ ID NO: 172193 - RNA, 49 nt, Homo sapiens
cggcacacgacacaaggaaaggcacaacaccagacggaggccagcccag

SEQ ID NO: 172194 - RNA, 65 nt, Homo sapiens
ggaccaagaaccagagaggggcggaaagggaaagcgcaggaaccacccacaggagaagaacgaaa

SEQ ID NO: 172195 - RNA, 60 nt, Homo sapiens
acgcaccacgaaaagggaaacaaagcgaagagagcgagggggaaaagcaaaagcagaggg

SEQ ID NO: 172196 - RNA, 42 nt, Homo sapiens
ccccgggggagaccaggaccgcacagaggagcgccgccccca

SEQ ID NO: 172197 - RNA, 80 nt, Homo sapiens
ccggagcggaccgcgggcggcgggacaggacacagaacagagaagaagcagacgagacagaaaaagaaccagacagagaa

SEQ ID NO: 172198 - RNA, 60 nt, Homo sapiens
gacaggcagaaccccggcgcggcccgaaagggcaagcagaaaccgggaagggggcgccgg

SEQ ID NO: 172199 - RNA, 79 nt, Homo sapiens
caaccgaaggacacaaagaaccaaccagccacagaacaaggaggagacaagagcacccaaaggcagcagcccaaggagc

SEQ ID NO: 172200 - RNA, 80 nt, Homo sapiens
cagagcaaccgaccgaccagaggaccgacaacaagacgagcacgccaggaaagagagaagaaaaccgaacaacaaaccag

SEQ ID NO: 172201 - RNA, 77 nt, Homo sapiens
aggaccaagaaccagcccgacggccaggaggcgaagagacgaggaagcccaggagcccgaacacaaaaagacccgac

SEQ ID NO: 172202 - RNA, 57 nt, Homo sapiens
caaaagcaaaaaaggaggccaaagacacgggacggacagggaaagagacaaagacca

SEQ ID NO: 172203 - RNA, 74 nt, Homo sapiens
ccgggcggaccccggccaacagcccggagcaacgcacgaaaacgcacgaggagcacagaaacgcacagacccac

SEQ ID NO: 172204 - RNA, 40 nt, Homo sapiens
cccacccgcacagccgaggcagaggggaggagacacgaag

SEQ ID NO: 172205 - RNA, 74 nt, Homo sapiens
aaacaaaggcaggaagagaaaagcggagcggcggacaccagaagagaaaagggcaagccagacgcacagggcca

SEQ ID NO: 172206 - RNA, 53 nt, Homo sapiens
cggcaccaggaccaccgcggcagcacgcggcggggggacccaaacgagcagcc

SEQ ID NO: 172207 - RNA, 99 nt, Homo sapiens
cccacaaggaagggaagcccagaaggcagagacgcacgccgcccaccagagggagcccgcgccgagggacaccgaaaagcaaagggagaggacacacga

SEQ ID NO: 172208 - RNA, 84 nt, Homo sapiens
gcaaaaaccaacacggcaaaaacgcaaaagacgagaggaccgacaccagagcagaaggcagagcggagaaggagcggaggaggc

SEQ ID NO: 172209 - RNA, 85 nt, Homo sapiens
aacgcccaaccggcagggaaagggcgagaagcgcgccgcccccacagaggggagcccaaaagcacgaagcgccagaggacaccgc

SEQ ID NO: 172210 - RNA, 53 nt, Homo sapiens
cacgacaaccgcaccaacaaagacagggaaaacgagacaagagaaccaaaagc

SEQ ID NO: 172211 - RNA, 64 nt, Homo sapiens
acggacacccccggcagacaggaccacgaagaaaccgaagacacaggagaaacaaacgcagggc

SEQ ID NO: 172212 - RNA, 67 nt, Homo sapiens
cagacccggcacgccccagcacacgagcagcaagaacaaacccaaggccacaacgccgcaacaaaag

SEQ ID NO: 172213 - RNA, 80 nt, Homo sapiens
ggggccccaccagacagggaccggcggcaaccggaaggaacggaggaaggggcccggacccgaagaagcgcacagcgcca

SEQ ID NO: 172214 - RNA, 79 nt, Homo sapiens
gaaccccgggcgccgggccccagcagacccgaagccgcccggacgccacaggcccccgccccgccgccacacccgagaa

SEQ ID NO: 172215 - RNA, 83 nt, Homo sapiens
aagcgcagaaagcaggcgaacccgcggcgcaaaacgccggggccaaagcgaccaaccccccaccgcacgcagggggccccccg

SEQ ID NO: 172216 - RNA, 75 nt, Homo sapiens
caaagccaggaacaccaccaccaggcaccgccccggagccacagcaaagccacccaaggcaggcacagcaccaga

SEQ ID NO: 172217 - RNA, 40 nt, Homo sapiens
ggcgccagcccaagagaggggcggcgcacaccaagggaga

SEQ ID NO: 172218 - RNA, 55 nt, Homo sapiens
gaaagccaggggcagggccccaggacagcaagaaccagggggaaaggaagaaaag

SEQ ID NO: 172219 - RNA, 99 nt, Homo sapiens
gacgcgccagacgaacaaaaaggagaaagaaacccgaaaccaggaacacaaccaggcaagagggagaagacagcgaccagggaggcaacaacaaggagc

SEQ ID NO: 172220 - RNA, 72 nt, Homo sapiens
agggaacaaacaccggagcaccgggcaagacggaagcaaggcaaaggaaagaccgagcggcgggagcgaagc

SEQ ID NO: 172221 - RNA, 77 nt, Homo sapiens
ccggagggcccacgcagcgccggacaaggaagcagagccccgggccgggaaggggaaacggccacgcaggaaccaca

SEQ ID NO: 172222 - RNA, 83 nt, Homo sapiens
gaaaaggcgaccgccccaaggaaccacgcgagggcacccgggcacggacccgccgcaggcaagcccgccaggcgcccaaacgc

SEQ ID NO: 172223 - RNA, 73 nt, Homo sapiens
ccccgcgaaagcacggccccggaagcgcagggaacagggggaccaacaaaccgaacagaggcccaggaagacg

SEQ ID NO: 172224 - RNA, 77 nt, Homo sapiens
aacaaaaacgccagcagagaggagagacggaaaagggagcaacggacaaagccacagaacacccccaaagagcaacg

SEQ ID NO: 172225 - RNA, 81 nt, Homo sapiens
acgcagccaacccaaaaagagcgggggcacgaacagcacaccggaggaagccacacaccgggccaggagcgaccccccaca

SEQ ID NO: 172226 - RNA, 71 nt, Homo sapiens
cccgccaacacaccacgggaccgggcaagggaagaaaagagaagaccacagaaacagccaaccccaggcag

SEQ ID NO: 172227 - RNA, 65 nt, Homo sapiens
ccacaaggacaaccagcaggcgggggagccgaacgcggaacaacacgagcagaaaacaggggaag

SEQ ID NO: 172228 - RNA, 78 nt, Homo sapiens
gagagaaggacgacaagcccaccgagggaagagaaagccaaacccacccccgggcaggcagacgccggccgcacccgc

SEQ ID NO: 172229 - RNA, 58 nt, Homo sapiens
caacaggaggccggaagacccaaagcgagggccaagggcggagcacgagaaagcggca

SEQ ID NO: 172230 - RNA, 69 nt, Homo sapiens
gccgccccaccacacagcaacggacaaagggcccacaggccacccgccagacgcagcggggcagaagac

SEQ ID NO: 172231 - RNA, 75 nt, Homo sapiens
gggccagcggagacagcaagggacagagcgaagaaccccccaagaagacgaaacccccgggccacaagaaggggg

SEQ ID NO: 172232 - RNA, 97 nt, Homo sapiens
ggagacgggacagacagccgcacgaaccggaccaggaggacgcaccagcagcgcgcacccagggcacaggagacagagaggaggagccgcgggaaca

SEQ ID NO: 172233 - RNA, 56 nt, Homo sapiens
accacggagggaaagaccaggcaggccaccaggagaccaaaccaacccagaggcaa

SEQ ID NO: 172234 - RNA, 73 nt, Homo sapiens
aaacccgcgagcaggaaccccaggaaacggccagggcaaaacccaggacccacagcgcaccagaaagccggag

SEQ ID NO: 172235 - RNA, 76 nt, Homo sapiens
ccaccgcggccaccgcgcgaaccgccgcaggagcccagacacgaggggggaccgaagcacggacgcacagacaccc

SEQ ID NO: 172236 - RNA, 80 nt, Homo sapiens
gacaagaccggaccagccagaggacgcgggccgaggagagcggaggaggggacaagaggaaaagggagaaccaacaaaga

SEQ ID NO: 172237 - RNA, 75 nt, Homo sapiens
aggcccaagcgaaaaagcgggaacgcaggacccaaagcgcacaagcagaggaaccagggaaccgccgccagcaac

SEQ ID NO: 172238 - RNA, 80 nt, Homo sapiens
ccgaggagcgagcaggaagaaaggacagacaagaagagagagagggccgcaaagaaggccagggcagcaggaaagccccc

SEQ ID NO: 172239 - RNA, 66 nt, Homo sapiens
cacgaacggaccgacggggaaagagcccgggagaggcccgcgccaccccgggggccacgcagaccg

SEQ ID NO: 172240 - RNA, 57 nt, Homo sapiens
gggaagacaaccggcgggaggaaaccagggcgggggcccgaagcggcacagagagcg

SEQ ID NO: 172241 - RNA, 87 nt, Homo sapiens
agcacacccgggagccaagaggccgagggggcgcggcccggaaagcagcacaaagcacacgcaaaagggcggaagacggcagcaaca

SEQ ID NO: 172242 - RNA, 81 nt, Homo sapiens
cgaaggaaaagaaagaccgaagggccgaagagggggagggccgagaccgaaaagggaaaaccagcaagaagcgacaaaaaa

SEQ ID NO: 172243 - RNA, 63 nt, Homo sapiens
cggcccagacgggcagcgggacgccacaccagcggacagccaccaagaggccagaaggcagaa

SEQ ID NO: 172244 - RNA, 42 nt, Homo sapiens
cccagagccagcgccacacagaaagaaccaagagggagacaa

SEQ ID NO: 172245 - RNA, 81 nt, Homo sapiens
ggggaaaacagagaccggggaaccaccccacacaccaccggaagagaagaacgaccggaagaggaggagagaggaccggcg

SEQ ID NO: 172246 - RNA, 79 nt, Homo sapiens
gaaggcaagaagcagaaagagacgccaggcgagcggaggagaagaaggagagacgaccacgcaacagaaaaagagcgca

SEQ ID NO: 172247 - RNA, 90 nt, Homo sapiens
acggccaggagcgaccagcccccagaacagagccaaggcggaagaggagacgaccagaaaaccccaaagagagggaccaagggaaagaaa

SEQ ID NO: 172248 - RNA, 80 nt, Homo sapiens
cgggggcgccggaggagggcggcccgccggcgaggaaccgagcgaagacgggcaggccagagcacccaaacgacccgcca

SEQ ID NO: 172249 - RNA, 72 nt, Homo sapiens
gccgggcgaagaaccaagcaggccacggaacaacagcaccgagaggaggaaccaagaaaaaaggcaggacca

SEQ ID NO: 172250 - RNA, 79 nt, Homo sapiens
ggcgcagcggagcaagaaaggccaaaagagagaggacggcgggaaccccggccgcgcccgggggaccacacaagcccag

SEQ ID NO: 172251 - RNA, 74 nt, Homo sapiens
aagaacaaagaagccaccgggcggcagcagcagggacccccagaagcccgagaagaccgcacaaccgaggcggc

SEQ ID NO: 172252 - RNA, 37 nt, Homo sapiens
gagagcccacacgaaaggcagaaggcggcagggagca

SEQ ID NO: 172253 - RNA, 118 nt, Homo sapiens
acggcagcgcagaggcacacggccccagccccaccagcaggagcacacaggagagccggagaggaggaaggagaagcccgggagcgcgcgggccggcggagcaaggagacggagggca

SEQ ID NO: 172254 - RNA, 76 nt, Homo sapiens
cggagaaaaccaaggcgcggaaaggaagaggcacaagagagagggcacaggacagagagcccagaggggaccgagc

SEQ ID NO: 172255 - RNA, 77 nt, Homo sapiens
gcggagagcgagcggcaacccggagagagaacggacgagaccaacgcggaaaccagcaagaaaaccagcggcgcaaa

SEQ ID NO: 172256 - RNA, 73 nt, Homo sapiens
aaaaagaccgggcaaagaagaaaaaacaccagcagcccagcaaccaaaaagaagaccgcacccaaacaaggga

SEQ ID NO: 172257 - RNA, 73 nt, Homo sapiens
cgcgggccaggagagcgccggcgggaccgaaggagaagaaggagaaggggaggagaaggcaagccggaaagag

SEQ ID NO: 172258 - RNA, 90 nt, Homo sapiens
ggaggcgggccgcagcgggaccccagccccgccaagcgcggccgccgcccccgcccagaaggaaggcccgaagccacagagcggaaggag

SEQ ID NO: 172259 - RNA, 41 nt, Homo sapiens
ccaaaagcaaccgcgaagagcagccagagacgcgcacgaaa

SEQ ID NO: 172260 - RNA, 56 nt, Homo sapiens
aagaagcacgaaagccccacccgccgcagcaagcagagcgaacaccccccagccac

SEQ ID NO: 172261 - RNA, 80 nt, Homo sapiens
cggaaacaccccggaggcgacccaccccccagccccgccggccggccccacgcacccccgcccaagcaaggacccgagga

SEQ ID NO: 172262 - RNA, 85 nt, Homo sapiens
acaacacgaaaccagacggggcccggaaccggagggggcacaaagaccgaaggccaagagcacgggaaggacaaacaaggagcga

SEQ ID NO: 172263 - RNA, 70 nt, Homo sapiens
ggccgggaagccggcggaccgcgccgcgccggagcagaaacgacagggagaaaaagcaaagaagacagca

SEQ ID NO: 172264 - RNA, 82 nt, Homo sapiens
agagcaagaaaagcccgggagcagaagggaggcccaagacccacaacaaaagaaccaagccgccacagggagaaaagagcag

SEQ ID NO: 172265 - RNA, 38 nt, Homo sapiens
gcgcagccgcaccggccaaggacaaggaagaacgccga

SEQ ID NO: 172266 - RNA, 79 nt, Homo sapiens
gcagaacgaacaggaacaaagccagacgggggggcacaaggcccgcggagacaacaaaggaagcccacaacccgcaggg

SEQ ID NO: 172267 - RNA, 74 nt, Homo sapiens
aaagcaccaggaagcagagaaagccgagggccagggagcgcggaaggaccacggagccggcagacggcaacgga

SEQ ID NO: 172268 - RNA, 70 nt, Homo sapiens
ggcgggcacccccaggggcccacagcgcccacgcacaggaaaagaaacggagagaggcaccagccgaaga

SEQ ID NO: 172269 - RNA, 54 nt, Homo sapiens
agaacagcgacacgaacggaagaagcaggaaggggagcgacagaacaagaaaga

SEQ ID NO: 172270 - RNA, 57 nt, Homo sapiens
ggagggcggccaaccgcacagacgaccaacggaaaagcaaaggcagcagggaggagc

SEQ ID NO: 172271 - RNA, 37 nt, Homo sapiens
accccaaaacggcccacggagcaccacgaaaagcgaa

SEQ ID NO: 172272 - RNA, 70 nt, Homo sapiens
ccccaggccaagagggacccacccggcggacccaccggagcgccgcgcggggcaggccgggcgggcagag

SEQ ID NO: 172273 - RNA, 66 nt, Homo sapiens
agggccagcgccacgaggacaaagaaggcacaagcaacggcaccaggagacaaagccacaaaaaca

SEQ ID NO: 172274 - RNA, 73 nt, Homo sapiens
ggccacagccgcagggagaacccgaggcggggacagggaggaaaaccagagagaaggagagccccgaagaagc

SEQ ID NO: 172275 - RNA, 71 nt, Homo sapiens
cagcaccaaacacaggccacccaggccgcagagggaaggaccacgacacagcaccgcccgaccggcagacc

SEQ ID NO: 172276 - RNA, 73 nt, Homo sapiens
aggaacccacaacgaagggaagccacggaagaaaggggacgaagggaacccgccgggcggcccggcacccagc

SEQ ID NO: 172277 - RNA, 88 nt, Homo sapiens
ggcacgcacgcgaagacagcggcagaccaaaagccccaacagcggcaagaccagcacacagaggccagagcacccagcgcagcagcgg

SEQ ID NO: 172278 - RNA, 80 nt, Homo sapiens
agcgggacgagagcgccggaggccgagcggaggggcggagaacggaaaagcaccaggaagcagagaggaccgcagaaggg

SEQ ID NO: 172279 - RNA, 80 nt, Homo sapiens
acagaagaacacacagcggggaaaagggagaagcagaagcccgcacagagcagggaccccaaccgccgggggaggacacc

SEQ ID NO: 172280 - RNA, 75 nt, Homo sapiens
ccaggaccaccaccagcacccaaaggggcacgcaaaagggcagccgacggaggagaaagacgccgcagacgagca

SEQ ID NO: 172281 - RNA, 74 nt, Homo sapiens
agggcgggcgcggcgcggggggcggagcgggcgcggagcccccacaggcaggccaggcgggagagaaagcaaca

SEQ ID NO: 172282 - RNA, 60 nt, Homo sapiens
gccgaagaggccgcaggggagagcagggaaggagggccccggagcagccacaccaccgag

SEQ ID NO: 172283 - RNA, 82 nt, Homo sapiens
cgaaagacgggccagagacgacaacccgggccccgagacaagcagaccggaagaccgacggaagaccacaccccgagggagc

SEQ ID NO: 172284 - RNA, 78 nt, Homo sapiens
ccgggggcgaggagacaaaaaagcccaaggccgagcccacgccggcccccgggggcccacaagcgcaagcggcgcgcc

SEQ ID NO: 172285 - RNA, 89 nt, Homo sapiens
gcagagccagcccccgaccccgggccaccgggcccccgggccgccggcacccgccaccaccgcggggcacgcagccagaggggccagaa

SEQ ID NO: 172286 - RNA, 58 nt, Homo sapiens
gacaagacccgccagaacaggcagccgcgaacccccagaaccgaaacgaccaccgaga

SEQ ID NO: 172287 - RNA, 68 nt, Homo sapiens
caggcgcaaaacccgagaaagggcaaccacaaggaggagcccaaaggcgaaaggggcagcccgcccgc

SEQ ID NO: 172288 - RNA, 76 nt, Homo sapiens
ccccccagagagccagaaagaagaaagggcaaaagaacaaacacgagaccccagaggccggcgaagaaaaccgaag

SEQ ID NO: 172289 - RNA, 56 nt, Homo sapiens
cagcgcccagcagcgcagacggcagcgggggaaaaccaagaacaaacaacccccca

SEQ ID NO: 172290 - RNA, 59 nt, Homo sapiens
ccagagaggcaggagccacgacccggggaccggacaggagagacaacggaggcaagaaa

SEQ ID NO: 172291 - RNA, 64 nt, Homo sapiens
cagcccgaggcccggagcgaccaggccccacacgaccagcaagagcaggccaaaaaggagaaag

SEQ ID NO: 172292 - RNA, 90 nt, Homo sapiens
cggccagcccgcggcaccccgcggacagggcggggccccagccccaccccagccccaaaggaggcgcgagagggacgccccggagccaac

SEQ ID NO: 172293 - RNA, 83 nt, Homo sapiens
aaggaaaggcgcaccaaggaacacgacgacagcagggaagaacggaaaccagagaaagaaacgcccccacacaaaagcgagac

SEQ ID NO: 172294 - RNA, 81 nt, Homo sapiens
cccaaggaccagagacgggaccaacgcaccaccaacaccccaaacccaaagggccggaggcccgacaaagaacaagccaca

SEQ ID NO: 172295 - RNA, 79 nt, Homo sapiens
accccggcaacccagggccggcgcgcgccaccagacgggaagaccccgcgaggaagagaaaacaagaggcaggaggcaa

SEQ ID NO: 172296 - RNA, 59 nt, Homo sapiens
ggggggaaacaggcgaggcggcggcgcccggagggcagcgaggcagaggcagggcagac

SEQ ID NO: 172297 - RNA, 76 nt, Homo sapiens
acaaggcccggacaaagccgaaaccaggagaaaccccagaggaacccacgagaaaaacagacaaaggaggccgcag

SEQ ID NO: 172298 - RNA, 85 nt, Homo sapiens
ccccggcccacaggggggggcaaacccgagagaacggaccccgcgagcaaaggaggaggaccacaccaaaagagcacagggcagg

SEQ ID NO: 172299 - RNA, 43 nt, Homo sapiens
cagcaggacaaggccaaccaagcccgccgcacccagggaaaaa

SEQ ID NO: 172300 - RNA, 87 nt, Homo sapiens
ccggaagcgcggagggagccgcgggaggaccgcaggcaacgcaaccaccaccgaggccccgaaaagcacggcgcagggagccccccc

SEQ ID NO: 172301 - RNA, 68 nt, Homo sapiens
gcaggacgcaccaccagcaacaacgccagccagcagcaaggaaggcaggccccaaaacaggagaggca

SEQ ID NO: 172302 - RNA, 86 nt, Homo sapiens
aagcagcgcggagacggaggcccgccccagagacgcgcccccagggaagcagaggggaagcagggaagcaaagcgaagcaaacccc

SEQ ID NO: 172303 - RNA, 66 nt, Homo sapiens
acgccccaggggaaaacccccgggaccagggccagaacgaacagagccaaggagacgcgggacaag

SEQ ID NO: 172304 - RNA, 81 nt, Homo sapiens
acgagagaggcaccgggacggaccgagaccggaccgagagcggaccgagagcgcgaaacgcacgagaagcccagcacggcc

SEQ ID NO: 172305 - RNA, 86 nt, Homo sapiens
cagggaccacaggggcagcgccggagggagaagaaaggcgaaggcgcgaaagggccagagagcaaggagggaacagaaccaagcgc

SEQ ID NO: 172306 - RNA, 66 nt, Homo sapiens
gcccggcaacgaaaagacagcaaacccggccagcaaccaggacgggagccgagcaccaccaccgcg

SEQ ID NO: 172307 - RNA, 68 nt, Homo sapiens
gaacgcgggaacaggacgggcggcaaagacgcaacaacagcgagcaagagaggaacgcgaagcagaac

SEQ ID NO: 172308 - RNA, 71 nt, Homo sapiens
accagggcagaagccgaacacgacagaaagaaaggccaaagcagcagcaacccagagaaacgggcccaggg

SEQ ID NO: 172309 - RNA, 87 nt, Homo sapiens
aacaggcgaccaacacgacagaccagcaaaacaaaaaggaccagcccagagggaacccaccagaaaacgacacacaaacgcagccaa

SEQ ID NO: 172310 - RNA, 34 nt, Homo sapiens
ggcccccagccacgggaacagaggggaccaggcc

SEQ ID NO: 172311 - RNA, 74 nt, Homo sapiens
gggccagcacaggcgaggagcccaccagacccgaaacacgcacaggcgcgggaagcgaggcagcgagaagaaaa

SEQ ID NO: 172312 - RNA, 82 nt, Homo sapiens
gggcaccaccggcaaccccagggaccggaaagacagacaggaggggaggaggccaggagccgacaagcaacagcggaccaag

SEQ ID NO: 172313 - RNA, 53 nt, Homo sapiens
gcgacaggagcacggcagcaggcaagaaacaacagcgaccagagccgaagaga

SEQ ID NO: 172314 - RNA, 80 nt, Homo sapiens
gggaggcggcagcgaagaagacgaaaaaaacccagaaaccccaccacgcggcaggggccgccgaggaaaaagcaacaaga

SEQ ID NO: 172315 - RNA, 63 nt, Homo sapiens
gagaggaggagccgcagacgaagggagaagcagaccgcaccaggcgggaccccgaaaaagccc

SEQ ID NO: 172316 - RNA, 76 nt, Homo sapiens
acaccagaaaaccaagggggagagcccagcgcgggaagagcagaaaggccaagcagccagcgaggcaagggaccag

SEQ ID NO: 172317 - RNA, 103 nt, Homo sapiens
ggaacagaaggagaaaccgggaaagcagaaaagcgcagaaaagccaaccaaagagaggcacaacacagaaaagggcccaaggaagaaagacaagaaagaccaa

SEQ ID NO: 172318 - RNA, 77 nt, Homo sapiens
acggacaaaacgacgacgaggaggagacggacaaaggaaaagaaccaacagacggagcacggcgccgaggaaaaagc

SEQ ID NO: 172319 - RNA, 78 nt, Homo sapiens
ggagacggagccgcagagggcccacggggaagcgagagaggagggaacaagcagaaagcacgaacaacgagaacaaga

SEQ ID NO: 172320 - RNA, 51 nt, Homo sapiens
aaagggccaaagaagggagagagacaaccagacgacaggagaagaaagagc

SEQ ID NO: 172321 - RNA, 85 nt, Homo sapiens
gcaagggaaagagcccggaggcaagggacggcgggaggagggccgaggccccacagacgggcgccacgcaggcgacggcggccgg

SEQ ID NO: 172322 - RNA, 74 nt, Homo sapiens
ccgagagcggaccgagagcgcgaaacgcacgagaaggaaccagacacaaagaggaagcccacacagaacgaaca

SEQ ID NO: 172323 - RNA, 76 nt, Homo sapiens
gaccagcagcgccaaccgcaccacgcgcgccaggaccagcagaaaaaggagcccaagccccaccaccagcacaccc

SEQ ID NO: 172324 - RNA, 77 nt, Homo sapiens
ccgaaggacaagcgacagacccccgccaccggaggcccaccggcagcaagaccagacacagcgagccagcagcaccg

SEQ ID NO: 172325 - RNA, 77 nt, Homo sapiens
ccgaggcccagaggaggaggaggcgaagagagaagcagccgaggcagcggcagagggggggaggaggccaacacgcc

SEQ ID NO: 172326 - RNA, 73 nt, Homo sapiens
aacaagagggaccggcggagccacaaacacccaggggggacggccacaggaggaggcagggcggggggggaga

SEQ ID NO: 172327 - RNA, 79 nt, Homo sapiens
aagagcaaggacaaacacaacagaaagaccaacagaaggacgggccaggaggcaaaaggaagacgaggcccagcaaaag

SEQ ID NO: 172328 - RNA, 80 nt, Homo sapiens
agacagcggaagaagacccagggaaacccccaggcaccgacgagagggcgcaccgcgccggagcccgaccgcggggaccc

SEQ ID NO: 172329 - RNA, 73 nt, Homo sapiens
ggcagacaaaagggccaaagaagggagagaggcgcgagagcgcggagagccagagggccgccgaaggaacacc

SEQ ID NO: 172330 - RNA, 66 nt, Homo sapiens
cagccacggacgccacagagggaagaccccaaggcgaagaaagcaacaagggaggaaggaccaggc

SEQ ID NO: 172331 - RNA, 75 nt, Homo sapiens
caggaagacggccagggaaccaaacagcagagcaggagcccagaggacagaaccccagcccagagccaacacccc

SEQ ID NO: 172332 - RNA, 70 nt, Homo sapiens
ggagccgcggcagaccgaggggcaccgaccgcacgggccacccaaaacaggcgggcgcggacggcagggg

SEQ ID NO: 172333 - RNA, 80 nt, Homo sapiens
ccaaacaggagcaccgcggcgcaaaagaagacgcgcccccaaaccaggccgaagaggggaaaagcgaccaaaaaagagaa

SEQ ID NO: 172334 - RNA, 80 nt, Homo sapiens
ggaccgcggcccgacgaggaagcacgaaagcaccaacgagacccgccacacgagcaaaagcagaccggaaaacccaccgg

SEQ ID NO: 172335 - RNA, 79 nt, Homo sapiens
cgcggagcgggcagccgccgccaccccgcggccgcacccccgccccaggcgggggagccaagggagagggaagaaaaca

SEQ ID NO: 172336 - RNA, 82 nt, Homo sapiens
agagacagagaggagccaacccccaggaaggaaagacagaaccaaaagccaaagacggcagaaaaaagaaaaagagaaacga

SEQ ID NO: 172337 - RNA, 62 nt, Homo sapiens
cagcgcgaccgccaccgcggggaccaggaagcacgcagcggaccacgagggagaaacagagg

SEQ ID NO: 172338 - RNA, 67 nt, Homo sapiens
aacaagcaccaagcagaagaggagagccagagcgcagaagccccaggaggcggaggagccgccggcc

SEQ ID NO: 172339 - RNA, 73 nt, Homo sapiens
gcaccaggaagcgcaaaagaaaacccaaggggagggaacagcacacccaccccaggagaagcagagaacccca

SEQ ID NO: 172340 - RNA, 74 nt, Homo sapiens
gccccaccgcagcccaccccagagaaagaccaggacaaaccggcgaccacacacggggacgacggggaagccgg

SEQ ID NO: 172341 - RNA, 82 nt, Homo sapiens
ggaacagacaccgcaagaaaaaaggggagacacgcgaaagcaaaccgaggagagaagaaagaaggcagacaaaacaagagga

SEQ ID NO: 172342 - RNA, 83 nt, Homo sapiens
cccgagcacgcccggcaacccgaagccacaggaggaggagggggacccagcaaagcccccaagccacaaaacggggaaggaaa

SEQ ID NO: 172343 - RNA, 36 nt, Homo sapiens
gagcaaggagggaggacccgcgccgaagcgaccccc

SEQ ID NO: 172344 - RNA, 69 nt, Homo sapiens
ggagcggacccaccggccaccggcggagcgagggaacgggcgacgaagcggcgaagcaggagaagccca

SEQ ID NO: 172345 - RNA, 61 nt, Homo sapiens
ggcaaggaagccccgcaaaccccccaaacaacacccaacagcccaaagcaaaggagcaaca

SEQ ID NO: 172346 - RNA, 69 nt, Homo sapiens
gccccccagagcgagacacaggcccaaagcccagccaaggacccgaaaaacgagccacaccaaaaggga

SEQ ID NO: 172347 - RNA, 79 nt, Homo sapiens
cgccaaaaccaggaggaggcagcaagcgaagcaccagcgggaacgcagcccgccccaagcgggaaaaaccccccccgcc

SEQ ID NO: 172348 - RNA, 75 nt, Homo sapiens
cggagacccgcgcgccaggcgcgcccgggagcagcccaggggcccgccggacgggaaaagaagcccccccgccgc

SEQ ID NO: 172349 - RNA, 84 nt, Homo sapiens
aagaacaccaaagggaagaaggcccccggaccccacgcgcccaaaccgaagcaccccgcaccacaaccgcacccagacacacca

SEQ ID NO: 172350 - RNA, 80 nt, Homo sapiens
caacccaaggccagccgcggcaacgaccgcaaccgcacggcgcccagcgccggccggcccggcccggcgaggaccccaag

SEQ ID NO: 172351 - RNA, 90 nt, Homo sapiens
gcggccggggcagcggcgccgcgccgcgcccgagggaggggagccacgaagcccccacccacaggcgacagaggcaccgcaccagagggc

SEQ ID NO: 172352 - RNA, 54 nt, Homo sapiens
gcccacagagaggaccggaggcccaccacacacgcagggcgcagcaaagaagag

SEQ ID NO: 172353 - RNA, 69 nt, Homo sapiens
cgcgaagacgaaggaaagcagggagggagccaacaccaggcgcgaacaggaaaaaaaagaaaacaagcg

SEQ ID NO: 172354 - RNA, 75 nt, Homo sapiens
ggcgcagcggcagcagcagcggagcgcccaaggaggacccaagcggccaccagccagaaacccacggcggaacca

SEQ ID NO: 172355 - RNA, 65 nt, Homo sapiens
ccagccgcccaagccgcacagccgcggcggcagcagcaggagaggccgaccccgggacacaccca

SEQ ID NO: 172356 - RNA, 52 nt, Homo sapiens
acaggcaaaagcggaacaagaaagcaggaccgaaccccaccaggaggcacca

SEQ ID NO: 172357 - RNA, 80 nt, Homo sapiens
ccagcaagcgagggaccgggacgccacagccagagccgagaaggacagagggccagccccaggcccaggcaaaaagcaaa

SEQ ID NO: 172358 - RNA, 77 nt, Homo sapiens
agaggaggggaggaggaggaggacagggaaaggagcggggagccccgcgccacagacacacaacggacacgccaacc

SEQ ID NO: 172359 - RNA, 78 nt, Homo sapiens
aacacgcaaagcaaggacaacgaccacaggaacggaaaaaacagcaccaggagacaaagccacaaaaacaccagaaaa

SEQ ID NO: 172360 - RNA, 70 nt, Homo sapiens
gagaaaggggaacaggagacaaccacagcgcggcaggcggacgccagccaaccccacagccgagccaaag

SEQ ID NO: 172361 - RNA, 78 nt, Homo sapiens
ggggccgagcgccgcggcggccgccccgcagcaggcgagaggcagaacccggaaagaaggaagggaccaccacaaggc

SEQ ID NO: 172362 - RNA, 71 nt, Homo sapiens
agcagcacaagccagaaccgaccgcgcacaggcgagaacgcggacaagcaaacaaagaggaaaaagagggc

SEQ ID NO: 172363 - RNA, 44 nt, Homo sapiens
cccggcgcagcagcacacaaggaggagcagcccccacaacacga

SEQ ID NO: 172364 - RNA, 38 nt, Homo sapiens
agaccgaggaaaaggagagaggaggacgggaaagaccc

SEQ ID NO: 172365 - RNA, 60 nt, Homo sapiens
gcaaaccgccaacccgcgccgccgccaccagcccaaaacggaccagcccaggagaggaac

SEQ ID NO: 172366 - RNA, 70 nt, Homo sapiens
accgaaggcaaggcccaccggccaagcgccagagagaaagcaaggggggagaaaaggccaagggcaggag

SEQ ID NO: 172367 - RNA, 74 nt, Homo sapiens
acgaggccccgacaggcggcgcacggaaacagccacagcagggaaggggcacgaagaccaaccggccaaagaag

SEQ ID NO: 172368 - RNA, 75 nt, Homo sapiens
ggagaagaaggaagaaaggaaagcgagggcccagcccaaggacccgacaggagaccggaaacgagagaaacgaag

SEQ ID NO: 172369 - RNA, 59 nt, Homo sapiens
caaagcaggcggagagaggcgcaaaggaacccaggcgccaggccagcaaaggcaaccga

SEQ ID NO: 172370 - RNA, 75 nt, Homo sapiens
gaagccaggaggggaagaaacccaggagagccgccgggacacagacccccccgagaggcccgagggcagcgacag

SEQ ID NO: 172371 - RNA, 69 nt, Homo sapiens
ggcgcacccgcagcgggacagaccacaggagccaggggcaaagaaaaaggagagaaaaagaggcaaaac

SEQ ID NO: 172372 - RNA, 82 nt, Homo sapiens
ccgccaccgcgaacaggagcccgacagaaggaacgcaagcacaggaccagaaacgaaaggcagcagaagaggaaagccagaa

SEQ ID NO: 172373 - RNA, 57 nt, Homo sapiens
caacggaccacaagaggccggcggggagccaggaacgggggacaaggagaggcacac

SEQ ID NO: 172374 - RNA, 81 nt, Homo sapiens
accgacggccacagcagaggacgcagaagcgaggagccaagaacaacaaaggaaagcaggaaaacggcgcaaacggagagg

SEQ ID NO: 172375 - RNA, 77 nt, Homo sapiens
aacggggagccacacggagaggggcgagcggggccacgaccccgaccccggcccggggaggggcaacccgacgaagc

SEQ ID NO: 172376 - RNA, 81 nt, Homo sapiens
cacgggcccggcagcaaaacaaccaacccacgccaagacggcccagcagacaggccgagggaggaagaagacagaagagcc

SEQ ID NO: 172377 - RNA, 76 nt, Homo sapiens
agggacgcgcaaccacgggggacgggaacgagggggaagcggcccagggagggcgccagggacgaaaccacgcagc

SEQ ID NO: 172378 - RNA, 65 nt, Homo sapiens
gacaggaaaagggagagcccagaacagccagcaaagacaagagcagaccagcagccgcagcgcga

SEQ ID NO: 172379 - RNA, 76 nt, Homo sapiens
acagcccaaacgccccacgaccagacaaggcgcccgcgaagagcccgcggccccaggcccccccccgccgcccccc

SEQ ID NO: 172380 - RNA, 88 nt, Homo sapiens
gcgcggggagcgcgccggaccaagcgggcccagaagcggagcgagaagaggcgacaccagggcccaaagaacaaccgaaaggaagaag

SEQ ID NO: 172381 - RNA, 50 nt, Homo sapiens
ccgggaagacacacacaaggagcccaagacacagccccagcagcccccag

SEQ ID NO: 172382 - RNA, 85 nt, Homo sapiens
cagggacaccggggcgacgggagaccgaaggaagaaaccggacacgcagaccccaccaagaggcggagcgacccggcccaaggac

SEQ ID NO: 172383 - RNA, 57 nt, Homo sapiens
agccgaaacccagggacggcgcaccacagcccaggcgcacacacaaaggggagccag

SEQ ID NO: 172384 - RNA, 84 nt, Homo sapiens
cggcccgcgggcgaagcggacgcagccgcgagcccggaggcggcgggaggaggcggcggccggagagccacccgcacgaggccc

SEQ ID NO: 172385 - RNA, 55 nt, Homo sapiens
ggaaggacgcaaaacaccaaaaggagagcacaccgcacgccccgggagggcagac

SEQ ID NO: 172386 - RNA, 64 nt, Homo sapiens
gaaaacaccggcgaggcggcccagcacccccgaggccacagagcaggacgagcaagcaaccgga

SEQ ID NO: 172387 - RNA, 81 nt, Homo sapiens
gcagccagggggggcgaaggccaaggacacgagacggccgcaagcgccaacacaccgcagccccacggcggaggagcagca

SEQ ID NO: 172388 - RNA, 67 nt, Homo sapiens
agcagaggaggacgaggacagagaagccaagaggaagaaggaggaggaagcacgggaagacacacag

SEQ ID NO: 172389 - RNA, 41 nt, Homo sapiens
gaaggagcgggcccaagaaaaggcccccgacagcgcccggg

SEQ ID NO: 172390 - RNA, 80 nt, Homo sapiens
ggccgagaacgaagaggccgccgccgggcccaggcccgcgaccgccgccagcgcccgagggcggagaacggaaaagcacc

SEQ ID NO: 172391 - RNA, 75 nt, Homo sapiens
caggagacgagaccaccggcaacacgaacgaaaccagaacagaaagggacgggacagcaaaaggcgaccaggaca

SEQ ID NO: 172392 - RNA, 56 nt, Homo sapiens
gcggccgggggcccagcccgggcggcgcggccaggcaaagagcacacgccggagcc

SEQ ID NO: 172393 - RNA, 71 nt, Homo sapiens
gaccccccgcgcggcgccgccaacgcgcccccgagaaccgagggcaccggagggaagcgggccaccgcccg

SEQ ID NO: 172394 - RNA, 53 nt, Homo sapiens
aagggaggaaaagggcagggacagcgcaggcagcaggaccagaacagagaaga

SEQ ID NO: 172395 - RNA, 80 nt, Homo sapiens
gcagacaaggcaccaacagaacggccccaaaggaggaagaggagaaaggacggcacgaggcgagcagggggagagagggc

SEQ ID NO: 172396 - RNA, 67 nt, Homo sapiens
gcggaagggagcgccagcaggccgggcgcagacaggaagggaaggggcggagacgggcggaacgcag

SEQ ID NO: 172397 - RNA, 78 nt, Homo sapiens
gcggacccaacaggacgccccaggcgcaggagcacggagccgccgccgaacgagagcccagacagagaaagcagacac

SEQ ID NO: 172398 - RNA, 98 nt, Homo sapiens
gccaacacccgcaccaggagaggacaaggcagggacgcacaaggcaccacagagggagaccgcccccggggcgagagaccccaaccccccaagcgaag

SEQ ID NO: 172399 - RNA, 76 nt, Homo sapiens
gaaagaaaaccgggaccacagaggaaagacccccaggcaaaccgccccgcagcaccacccggcccggcaaccagga

SEQ ID NO: 172400 - RNA, 71 nt, Homo sapiens
ccacgaccccagcaggggaagcccagcacggaagagaaaaacacccccacagccgcgaaccagcagagccg

SEQ ID NO: 172401 - RNA, 61 nt, Homo sapiens
cggcagccccccaggggagacacggcagacggccacggacagcggggcgagggacgcgggg

SEQ ID NO: 172402 - RNA, 56 nt, Homo sapiens
cagcgcgggagagagccaggccagaaggggcaagaaccgaagcaaaagagcaaaac

SEQ ID NO: 172403 - RNA, 77 nt, Homo sapiens
gagacacgggaaaggagaggaaagagagcggacgaaagaaagaaggagcaccaacgcaaagaaaaagaccaagaaga

SEQ ID NO: 172404 - RNA, 78 nt, Homo sapiens
gacggacagccaagcaacgaaggccaccggagcaagagcgacaacaacacaaccagaaaacaacgggcagaaggccaa

SEQ ID NO: 172405 - RNA, 70 nt, Homo sapiens
aagacgcgcgagcacacaggagaagcaagaggcgcaaagaagagacggcaagcaggaaacggaggacggg

SEQ ID NO: 172406 - RNA, 69 nt, Homo sapiens
caacacagaaacaggaagcgccaaaagaaccaagaaaagggcacgacgaacaaacaccagcgagggaca

SEQ ID NO: 172407 - RNA, 71 nt, Homo sapiens
aagaagacagaccgaacagggaggcaggcgacaacagaggagaaggcgaagaaaacagccaagcaccagaa

SEQ ID NO: 172408 - RNA, 78 nt, Homo sapiens
aggcgcgaggcggccaccgcgacccggccgcgccggcgccgaccccgcgcgccagggagcaagggccagagaaggagg

SEQ ID NO: 172409 - RNA, 70 nt, Homo sapiens
caccggccccgcaagaggagccagggcagcgacacccagacccaccggaccaggcccacccagaagcaac

SEQ ID NO: 172410 - RNA, 34 nt, Homo sapiens
ggccacgcaaacaaaggcagagacacaagcaaaa

SEQ ID NO: 172411 - RNA, 73 nt, Homo sapiens
ccaagaggcggccaaggggacgagcaaaggaagcgcgaacagcagcgcagcccacagcaccggcccaagcagc

SEQ ID NO: 172412 - RNA, 64 nt, Homo sapiens
gggaggaacggcccggaaacaggaggacggaaagaacgccggacaacagcggcgaagaaggcaa

SEQ ID NO: 172413 - RNA, 85 nt, Homo sapiens
aaaggaaaggccagagcggagaccagcacccagaagagagaccgcaacgagaacaaagggccgggagcgagggcgccagggaagg

SEQ ID NO: 172414 - RNA, 78 nt, Homo sapiens
gcgggggccagagcagaccaccgccaggaagggcacgcacagcccaagcaaaggacaagagcgcccaagcggacagcc

SEQ ID NO: 172415 - RNA, 71 nt, Homo sapiens
gcaacaaaaaacgaagaccaagcagggccccgcagaggcggaaaggacaaagagaaaaacgacacaccaag

SEQ ID NO: 172416 - RNA, 86 nt, Homo sapiens
gcccaaggcggaggcgccgcccggggccccgcggcgcaggaggcggggagcgcagagcgggcgagcgcgccaagggacaaaagcca

SEQ ID NO: 172417 - RNA, 82 nt, Homo sapiens
aagaagagcaaggagaagaggccggaagggaaggaacagcccccaacaaccacaaagaaaaagaaagggaagccaaagggag

SEQ ID NO: 172418 - RNA, 79 nt, Homo sapiens
ggccaggcagccgcacgccgcaggagggaagcgcacggaaaccgccccgggaggcacagagcaggagacgccacccgag

SEQ ID NO: 172419 - RNA, 117 nt, Homo sapiens
cccgccccgccggcgcagcgcgagcggggccgggcgaagaagcagccacaaagccagccaggcacaacgagacccggaggagacagaccccaggcccggacgagccccggggggcga

SEQ ID NO: 172420 - RNA, 73 nt, Homo sapiens
gaagacgagccgggaggaacggcccggaaacaggaggacgccccgggggcgccgagggcacaagggcaacgac

SEQ ID NO: 172421 - RNA, 68 nt, Homo sapiens
aaaacgccaccccggcagagaggaggggaccacaggcccagggcggggaggcgcgcggccgcaagaaa

SEQ ID NO: 172422 - RNA, 71 nt, Homo sapiens
agcacccaagagaagagcgagccgcagccgacaaagacagccggccggcagccaggagcgggagaaggccc

SEQ ID NO: 172423 - RNA, 89 nt, Homo sapiens
accagcagcagagagaggaccaacaagagaaggcacgcagggccagcgggaccagagggcgccaggcgcccagcggcccagaggaggga

SEQ ID NO: 172424 - RNA, 78 nt, Homo sapiens
gcggccgggcggagagaaccagcgaggacgagcacgggcccagacgcagacaaacgagaagagagaagagggacagaa

SEQ ID NO: 172425 - RNA, 84 nt, Homo sapiens
ggacagagaagcccccaaggagcgcaggacaaaaccgggaagaaaagaaaggagcaaagcaacagaagacaaggcgcacacaca

SEQ ID NO: 172426 - RNA, 74 nt, Homo sapiens
gggcccaccagacagcgaacagaggcagaacaaggcggcagaggagaaagagcacaaaagaggcgggaacccgc

SEQ ID NO: 172427 - RNA, 64 nt, Homo sapiens
aaggcagcgcacgacagcaaaagggaggggggaagacagggcccagcaccacaggacgggccgg

SEQ ID NO: 172428 - RNA, 69 nt, Homo sapiens
gagaaaaggccaagaaggcaggcaccaagccacaaaacaggccagaccgggcacagacaccgcggaccc

SEQ ID NO: 172429 - RNA, 69 nt, Homo sapiens
ggcaagcggacaaggccgaccagggggacaggcaggccccaggcacgccagcgacaaccagccgaccca

SEQ ID NO: 172430 - RNA, 78 nt, Homo sapiens
gcccgggcccgccccacaggagccggacacgcagacagcaagggcccagcggacaggcgaagcgcaccaggccggggc

SEQ ID NO: 172431 - RNA, 73 nt, Homo sapiens
caggccgggaccaacaaaaaagagaaaaggccagagacccccagccagccaaccaaggccggagaagcggagg

SEQ ID NO: 172432 - RNA, 72 nt, Homo sapiens
accacaacccaccgagcggccaggaggcccggaggacccgaaaaccagaaccgcaaaaagacaacggacaag

SEQ ID NO: 172433 - RNA, 63 nt, Homo sapiens
cacacgggaaacacaaaacccgggaacagacgaaaccaacaacaaacccggaggagaagagcg

SEQ ID NO: 172434 - RNA, 76 nt, Homo sapiens
gggacgggggaacccggggccagaggcagagagccaggcgaccaacaagcacagcagaggggacgcccgcaggaga

SEQ ID NO: 172435 - RNA, 43 nt, Homo sapiens
cgagacagaagcagcacaggaggagcagaaggaccccaagggc

SEQ ID NO: 172436 - RNA, 69 nt, Homo sapiens
caaaaacacaggaagcaaaagaagaggaccacacacagacagagacagcaaagccccacccagacggca

SEQ ID NO: 172437 - RNA, 75 nt, Homo sapiens
ggacccggaaccacgacagacagaccagaaaacccacggggacagaagcccaaaggacagggcccaaaaaggcaa

SEQ ID NO: 172438 - RNA, 81 nt, Homo sapiens
cggagaagaaccaaagaggaagacaaaagcaaaacgcagcacaggcccagacccagccggaccgcccggaaaagaagaccc

SEQ ID NO: 172439 - RNA, 85 nt, Homo sapiens
cggcagcggcggcggcggcggcccccgcgccaaggggccaagggagagcggggccccccccaaggcaccccccggcggaacgaag

SEQ ID NO: 172440 - RNA, 75 nt, Homo sapiens
gcgcaaaaacaagacggggcgccccacagaggggcgacggccgcagccaagccggaacaggagcggcgagcccaa

SEQ ID NO: 172441 - RNA, 81 nt, Homo sapiens
cgaaccggcaggccgcgccaggagccaccaagcggcgacgccggaccgcgaagagacgagaggggcacggaaggggagagg

SEQ ID NO: 172442 - RNA, 73 nt, Homo sapiens
gaaaaacaagcaccaagcagaagaggagagccagagcgcagaagccccaggaggcggaggagccgccgggccc

SEQ ID NO: 172443 - RNA, 76 nt, Homo sapiens
ggacagcagcgcaggcaaaaaacagccgaaagaggccaaccaaggccaaagaaaggagacaccgaacacccccacc

SEQ ID NO: 172444 - RNA, 75 nt, Homo sapiens
cgagagcagaaaaaggcgggaggcgaccaggaacagccacggacagccaggccaggggcaccagggaaccgagag

SEQ ID NO: 172445 - RNA, 79 nt, Homo sapiens
ggggacacagcagaagcacaccaagaaaaggcgcaaccgaaagggacaggaagaaaaagaaaaacagagcagcgggcag

SEQ ID NO: 172446 - RNA, 73 nt, Homo sapiens
gcaagcaggacccgggaggaccaggagcgccccaagcccggagagaggaggccgcagccgggccagcgcccca

SEQ ID NO: 172447 - RNA, 56 nt, Homo sapiens
gcaagggcgaggcagccccaaacaccggcaacgaaagcaaaccgagagcaggcgaa

SEQ ID NO: 172448 - RNA, 77 nt, Homo sapiens
aggcacccgggcccagccgggaacccccacgcggccagcgaaaacgcccagacaccgggaagggcacgacaggaaaa

SEQ ID NO: 172449 - RNA, 78 nt, Homo sapiens
ggggagaggccggcgggaacgaacagccgacggggcgaccgccggcccagggggcgcaaggaagaagagacgccgcgc

SEQ ID NO: 172450 - RNA, 68 nt, Homo sapiens
gcagggcgggagaggacgagagccaggccaagaacggaagaaccaagccgccacagggagaaaagagc

SEQ ID NO: 172451 - RNA, 85 nt, Homo sapiens
gaagaaaccaaggaacagccagaggacaccaaggcaaagagaaacagaacagagccaaggggaagagaaagcgaagcgggaaccc

SEQ ID NO: 172452 - RNA, 76 nt, Homo sapiens
aaaggacggaaaagcggggcagcagcaggaaggaaaagaagacggcaagaaaacagaacagaagcaaagagaaaag

SEQ ID NO: 172453 - RNA, 79 nt, Homo sapiens
gcaggaagcggagaaagcaagcagccaccagggagagaagagcaagccgcagagcaagcgaaaacaaacaagaggacgg

SEQ ID NO: 172454 - RNA, 77 nt, Homo sapiens
ggaaaaaccaaggaagaaaaagagcgcccaaggccacacacacaggggccgacggagcaagagcgaggaacagcgga

SEQ ID NO: 172455 - RNA, 97 nt, Homo sapiens
gaaacagacaaaaaaggaagaaccaccgagaagagaaaaaacaaaaggacggggaccaaaaagggagaccaaagaggaaggggaccaacacagaggg

SEQ ID NO: 172456 - RNA, 82 nt, Homo sapiens
gaaaaagcaaaacgggcaaaagaccaaagaaggcaaggagagaagagaagaacagcacaggacagccaagcagagaggagaa

SEQ ID NO: 172457 - RNA, 73 nt, Homo sapiens
aaaagagagcggcagaggaaaagcgcgccaaaaggacagcggcagaaagaccgggcgcggagaaacaagaacc

SEQ ID NO: 172458 - RNA, 71 nt, Homo sapiens
agagggccacccgccccaagaaaccccgagacccaggaagcgaggagggaaggaaagaggaaaggacccag

SEQ ID NO: 172459 - RNA, 63 nt, Homo sapiens
cacccaagcgacgacacggacagaaagggaccggacagccagagcgcgggcgcggagacacag

SEQ ID NO: 172460 - RNA, 82 nt, Homo sapiens
ggcgcccggagccggccccgcccacccgcaaacagacccagcccgcggaaggcgcccaaagcaggccacaccagcaccagca

SEQ ID NO: 172461 - RNA, 72 nt, Homo sapiens
aaccggacccgcagcacgaagggggagagcacaaggcgaacaagcccccaggcgagagcaaagcggaaagcg

SEQ ID NO: 172462 - RNA, 33 nt, Homo sapiens
gacgaaggccaccaagaaccaggggagaaagca

SEQ ID NO: 172463 - RNA, 84 nt, Homo sapiens
cgagggaccgcgagcccggccaggacacaggcaggccgggcggcagagccccacggcccgcagggccggggacacaagcaacag

SEQ ID NO: 172464 - RNA, 78 nt, Homo sapiens
gccgcaggagacgagaggacgggaccaggcgaagcggccgagcaggcgagcgaacgacggcggggccgaggcgcggca

SEQ ID NO: 172465 - RNA, 72 nt, Homo sapiens
aggaaccaccgaaagcggcgcaacgagacacagggaaaggaggcgcaccgaggaaggaggaacagaagaaac

SEQ ID NO: 172466 - RNA, 68 nt, Homo sapiens
aagagaagagaaaggcccggagacagcaggaacgcaacggaaagggaaggaccgaccccaaggggaga

SEQ ID NO: 172467 - RNA, 88 nt, Homo sapiens
gcgggaagcaggacgcgccgcgccccaagcagggagagcaacaagccccggccccagagccagccggagagcgcagcccagagacagc

SEQ ID NO: 172468 - RNA, 62 nt, Homo sapiens
gcgggggggcgcgaggacccggacagccggagcaggcaagaaaggacaaaggaacggaaaag

SEQ ID NO: 172469 - RNA, 59 nt, Homo sapiens
ccgaaagcaccaaagacgagacaaaaacagccacaggaaagaagcccagcaaagagcca

SEQ ID NO: 172470 - RNA, 93 nt, Homo sapiens
gcaaggagaaaaagaagcacagcccccagcaccaagcagaaggcccaaagaagcccaggacaggagaagcgagccacggcgaagcaaagccac

SEQ ID NO: 172471 - RNA, 78 nt, Homo sapiens
aaccccagcccgggagcgcaccgcaaggcacaacaggccgacaaggaagcagggcgggacaagcgggaaaaagacgga

SEQ ID NO: 172472 - RNA, 87 nt, Homo sapiens
cgggggaggcgccgggaagcgacggcgccggcggcccgcccgccaggagcccggaaggggccgcacgagacagaaagacacaccaaa

SEQ ID NO: 172473 - RNA, 69 nt, Homo sapiens
gcccgaggcgggcgacagcaacccgacccgggacacgcaacagagcccagcgagaggagaacgggagcc

SEQ ID NO: 172474 - RNA, 56 nt, Homo sapiens
cggaggcagccggccaacaccggaccaaaccagagacaaaaggcacagccagaacg

SEQ ID NO: 172475 - RNA, 84 nt, Homo sapiens
ccccccacacacgcaccgcacagcaccggagaaccaggcggccccagcacccgcagagcagacacgcgagacaacggacgacac

SEQ ID NO: 172476 - RNA, 60 nt, Homo sapiens
ggagaaggcgcaacgcggcgcgaacaagacaccaagggaaggaaacacaaaccagcacga

SEQ ID NO: 172477 - RNA, 80 nt, Homo sapiens
cgagcacagagcccgccgccgaccgccgcccgccacacccgccgccaggcaagaacggaagcacgggcggaggaaagcac

SEQ ID NO: 172478 - RNA, 84 nt, Homo sapiens
gaagcgcagaaagcaggcgaacccgcggcgcaaaacggccaaacacacaggaacgccagaccccagccgagggaggcaacagca

SEQ ID NO: 172479 - RNA, 69 nt, Homo sapiens
gaggcggccaaggggacgagcaaaggaagcgcgaacagcagcgcagacaagggaggcgaggacggacaa

SEQ ID NO: 172480 - RNA, 67 nt, Homo sapiens
ggcccggaggaagaaagccaaggagggaggaagaagaagccagaacacaaaccaggacaggcaagac

SEQ ID NO: 172481 - RNA, 86 nt, Homo sapiens
gacagagggccgagaaggacaggacaggacgagaacccccgcgaaccagaggaacccagcgagcgagagcggaccagaggacggaa

SEQ ID NO: 172482 - RNA, 71 nt, Homo sapiens
gagccgaagcgccgcaggcgcgcccggaccgacgcgcaccccggacaccccgggcccaggcagcgcagacg

SEQ ID NO: 172483 - RNA, 87 nt, Homo sapiens
cggaccacgcagggcacaccgaccggcggcagaggccggacggcgagcacgacccccccgggacccccacacgcccccccgcggaca

SEQ ID NO: 172484 - RNA, 75 nt, Homo sapiens
gggaggaacccagaacggagggcacgagcgggccgagaccagccaaccagaacgaagcccaaagaaaaggggagg

SEQ ID NO: 172485 - RNA, 72 nt, Homo sapiens
acaccaaaagaggacagaagcaggagaacagcccagaggggagagccgcagcgcacccccagagaccagagc

SEQ ID NO: 172486 - RNA, 76 nt, Homo sapiens
ccagcagggaccgggcacagacaacccccaccgcaaccagaaacaaaggaaaccagacgaaacaacagccaaagac

SEQ ID NO: 172487 - RNA, 70 nt, Homo sapiens
acaagccgaacaccgacgaagagcaaggaagccaccaggcaggcaaccagcgggaccagaggagaccgga

SEQ ID NO: 172488 - RNA, 78 nt, Homo sapiens
gcgaacggggcgcccgccgggaaaccggcaggagggggacaagccaagaaaaagcaacacaggccaaggcagccccac

SEQ ID NO: 172489 - RNA, 51 nt, Homo sapiens
gaccaggaaaagaaccaaaagaaggagagcagccagcgggacagaaggagg

SEQ ID NO: 172490 - RNA, 59 nt, Homo sapiens
acagaagaacgagcagaaagaacagaccacccgaaaggacaccaacgggccaagaggga

SEQ ID NO: 172491 - RNA, 50 nt, Homo sapiens
gggggcgcggccggacaccagagagacgacggaggcgccgcacgacgcgg

SEQ ID NO: 172492 - RNA, 98 nt, Homo sapiens
cgcccccaccaagccggagccacccaaagccagcagagccgaggaaggcaccaggagaggaggaggggagacgcccaggcagaaagcccaaccagccc

SEQ ID NO: 172493 - RNA, 72 nt, Homo sapiens
gacccaccgaagcagcggccccggggagcccgagaagaccaagacgaccaagcacggaaagaaccccaacgg

SEQ ID NO: 172494 - RNA, 70 nt, Homo sapiens
cggagcgaggggcgggcgcaggcaggcagagaagacaggacgaagaccagcaagagaaacgggccgagca

SEQ ID NO: 172495 - RNA, 76 nt, Homo sapiens
cagcggacaccgcccgcgcaggaagggcgcaccaccaccgccggcgagcaccaggagagcccccaggccgcacccg

SEQ ID NO: 172496 - RNA, 71 nt, Homo sapiens
ggggcgcaggcagcaaagggccgcgacagaaaggagagccagcaaagcgacaaggcaccagcacgggacgg

SEQ ID NO: 172497 - RNA, 59 nt, Homo sapiens
accgccagccagacgaagcccaggacacaaagccgcagaaagaaccgagcaagccaagc

SEQ ID NO: 172498 - RNA, 80 nt, Homo sapiens
cggcgaggacaaaaccgaaggagggacaccaggggggaaaaaccacacaggcaaagaacgcgcaaaacaggacgaaaaca

SEQ ID NO: 172499 - RNA, 83 nt, Homo sapiens
acccgcgaggggacggacaacccgacgaggaacgaagggacaagacccgccagaacagggaccaggaggcggggccccccgga

SEQ ID NO: 172500 - RNA, 39 nt, Homo sapiens
aggggccagagcacagaaggagccgaacggaagagggca

SEQ ID NO: 172501 - RNA, 62 nt, Homo sapiens
caaagaccagaagaagaaggacgggagagaaaaccaagcaacccccagaagaacaggcggcg

SEQ ID NO: 172502 - RNA, 69 nt, Homo sapiens
ggcggcccgaccggccgcgacagcgaacagcgcggccgcaggacgaggagagacggccccacgagggcc

SEQ ID NO: 172503 - RNA, 74 nt, Homo sapiens
acccgaccgacaaaagggagaggcgccaccccagcggcaccaagcgccggaacggagcagggacggaaagagga

SEQ ID NO: 172504 - RNA, 79 nt, Homo sapiens
caaacccagccagaacagaagaagagaccgacagcccacagacccagacagagggagcggagacaacgaagggaccaac

SEQ ID NO: 172505 - RNA, 85 nt, Homo sapiens
cgcggacacccccgcgagagccgccgccaggaccggaaaacagcggcgaccagcagggacagaagagcgcgaaaggaacaagaaa

SEQ ID NO: 172506 - RNA, 75 nt, Homo sapiens
gaagcagacggagaagagcggcaaagggaccaccacagaaggagaagaaaggggaccggggacacacccacgaac

SEQ ID NO: 172507 - RNA, 80 nt, Homo sapiens
gcaaacgaccagacggcagggaggcacaaaggggaacacaggccgacggccaggaggacgacagaggcagaagaaaaaga

SEQ ID NO: 172508 - RNA, 69 nt, Homo sapiens
acccaccgaaacaaccaggaggcaggagcaggacacccagaacgcaagaagaacgcagggggcccagac

SEQ ID NO: 172509 - RNA, 67 nt, Homo sapiens
gaaaaggaaagaaaagaagcgaccagggaacaggaggaccgggggaaagcaaaaaaaccaccccaag

SEQ ID NO: 172510 - RNA, 112 nt, Homo sapiens
aacaagcagccaagcccagacaagccccagggaagccacagcaccccagcacccagagaccgacagaaaggacaacggcacgcggcagagacggagaccgcggcggggcaag

SEQ ID NO: 172511 - RNA, 85 nt, Homo sapiens
agcagcagccccacaacaggccccccgccccccccccgcgggcaccgaggacccgcccgcccagaaagcaccgggaggaaagaga

SEQ ID NO: 172512 - RNA, 74 nt, Homo sapiens
cccgcccagccccagaggacaagcacaccagaaaaaaccgagcagaagggaagaaaagcgagacgcagcgggga

SEQ ID NO: 172513 - RNA, 74 nt, Homo sapiens
ggcagagaaagcccagaacaggccgccgacagaacagaaaggcaaaaagagacacacagggaaggcagagaaaa

SEQ ID NO: 172514 - RNA, 72 nt, Homo sapiens
aaacggggaaaaggcggccacgaggcaaccagcaagcgaaggaggaccagacaagaaggcacaggcgaccga

SEQ ID NO: 172515 - RNA, 55 nt, Homo sapiens
cggcggggcacggggggcgacggccaagcgcgaacaggaaaagaaaaccaaagga

SEQ ID NO: 172516 - RNA, 73 nt, Homo sapiens
cgcgcgcgaggagaggagcgcaacagcagcaccaggacaacggcaagcggagaagagcaaggccgaaccgaga

SEQ ID NO: 172517 - RNA, 72 nt, Homo sapiens
caggcgcccccacagagaagcagagcagcacaagccagaaccgaccgcgcacagccgcggagaaccgaacca

SEQ ID NO: 172518 - RNA, 37 nt, Homo sapiens
gagacgggccagacaagggggagaccccacagaaccc

SEQ ID NO: 172519 - RNA, 85 nt, Homo sapiens
gcccggagaacgagaccaacgccccgcaaggcccccagcacacagcgcggccaaacagacgcccgcagcgcgcgggcacaggcac

SEQ ID NO: 172520 - RNA, 75 nt, Homo sapiens
cagcaccccaagcacacccgcacgaggcagagaacaagacggacgcaccgacggaaccaggaaaggcacaccggc

SEQ ID NO: 172521 - RNA, 81 nt, Homo sapiens
gccgagaacgccgcgcgcgcacccaacagcgaccgagcgaacgagggcaaacccacagacaaccagagccaaagggcaccg

SEQ ID NO: 172522 - RNA, 69 nt, Homo sapiens
cccgcgacagaggagggaggaaaacaaccgagggcagacacagcccgggagaggaaagcgcgcaggaag

SEQ ID NO: 172523 - RNA, 76 nt, Homo sapiens
aaaaggagcgaccacagagaacaaagacgagacagcccacaacggagaaaaagaagaaaagcacagacaacgcaca

SEQ ID NO: 172524 - RNA, 81 nt, Homo sapiens
gacggacaggcagggaagcaacgcagaggggaaacggccgggaagacaaccagaccccagaccgagaaggagggacagccg

SEQ ID NO: 172525 - RNA, 77 nt, Homo sapiens
aaggacaggccaaccggcccaaaccaggaccgacgaccccgaagcgcacaacgcagggcgaaagaggagccacacag

SEQ ID NO: 172526 - RNA, 70 nt, Homo sapiens
gggccaggaaaaggggggaaggcacacaacgacccggacagcgaccgcaagacaccgaggagcaacaccc

SEQ ID NO: 172527 - RNA, 78 nt, Homo sapiens
gaaacgcagcgcgcccccaggaggcgagcccgcggaaccgcagccagagaaggagacgccgagagcagaaacccggac

SEQ ID NO: 172528 - RNA, 73 nt, Homo sapiens
aagcaaggccaccaacaagagcaacccaggacaaaggccaggaggaggacagcacaggacgagcagaggggcg

SEQ ID NO: 172529 - RNA, 79 nt, Homo sapiens
gagcacccgccccggggaccacgccccggacccacagaggggccaggggaacacccacccggagaccggaccgaaggca

SEQ ID NO: 172530 - RNA, 59 nt, Homo sapiens
aaaaagcgcgcaccaggaagaaacggcaggagaacccccagcccagcaggcgggccgga

SEQ ID NO: 172531 - RNA, 73 nt, Homo sapiens
aggagagcgcaaaaaacgcgggaacagaagcaaggccgcggacccggcggaggcagggcacacaggcagacaa

SEQ ID NO: 172532 - RNA, 80 nt, Homo sapiens
gggacggcggcccagcgagggcggcccggggcacccgcacgggaagcaggcccgccacagccagaggaaggaaaggagag

SEQ ID NO: 172533 - RNA, 73 nt, Homo sapiens
aagacggaaaaaaagagcacccgagaaaaaagcacgcagaggaaacgagcgcgcgaggagaagaaccaagaga

SEQ ID NO: 172534 - RNA, 71 nt, Homo sapiens
cgcccgggccagcggccgcgcacccccggccggaggcaccagcgcccaaccaggaaggagacgccaggagg

SEQ ID NO: 172535 - RNA, 66 nt, Homo sapiens
ggaggcgcccgcccaagccccagcgaaagcaacaaggccgccacccaggaaagcgcccagacacaa

SEQ ID NO: 172536 - RNA, 67 nt, Homo sapiens
caggccagcccggacccggaggcccccagcccagagcccgaagaacgcgccaccacaagaaagcacg

SEQ ID NO: 172537 - RNA, 83 nt, Homo sapiens
ccggagacggagaagggcagacacggccagacggcagcacgcgacggaagacccgaagacccgcgggaccaagggagaaagca

SEQ ID NO: 172538 - RNA, 83 nt, Homo sapiens
ggcgcggcgccccgggcccagcacgcggggcaggcgacccaacagaggaagccgcaagaaacgggacgacaggaaggccagag

SEQ ID NO: 172539 - RNA, 73 nt, Homo sapiens
gccccaaacgagagggcggaggacaagccgcggagcagggggaggggacaacaaccgacagcccccccacaaa

SEQ ID NO: 172540 - RNA, 79 nt, Homo sapiens
gcgcagcgcgagcggggccgggcgaagaagcagccacaaagccagccagggcccagggcgggggcgggcacagcacgca

SEQ ID NO: 172541 - RNA, 78 nt, Homo sapiens
gcccgcgcgagcgggagggagcggcgaccgggcggaagaagccggcaggccagaccagaaggagcacaggcggaggcc

SEQ ID NO: 172542 - RNA, 83 nt, Homo sapiens
ggcggcccagcgagggcggcccggggcacccgcacgggaagcaggcccgccacaggaccgagcaacaccagcaaaaccccgaa

SEQ ID NO: 172543 - RNA, 81 nt, Homo sapiens
ccacagaaggcagaggcagaaccacagcccggaccgacaggaaagaaggagcccacaaagaaaagaacaccgccagcagcc

SEQ ID NO: 172544 - RNA, 71 nt, Homo sapiens
aaagacggaaaacaagacgaggacgcgagggcccgacgggccaggagggggccgaggggacccgcccacgg

SEQ ID NO: 172545 - RNA, 71 nt, Homo sapiens
ggccagagaagaccggaaggcgcgcgccgccacgccccaacgccggacacagaaagacaagggaagagccc

SEQ ID NO: 172546 - RNA, 84 nt, Homo sapiens
gcaccgacagcgccgccaccgagccgggcccaccccccaccaaggaagaaagccggacccacagccgccagagagaccgggcca

SEQ ID NO: 172547 - RNA, 62 nt, Homo sapiens
cgcgcgaagacaggaccagggcacggaggggagaaccgccagcgacgggaaggcaggaccca

SEQ ID NO: 172548 - RNA, 76 nt, Homo sapiens
ccgccacccagagcgcacggcgacgccccaggggaaaacccccgggaccaggaagcaggaagagcgggcagcaggg

SEQ ID NO: 172549 - RNA, 87 nt, Homo sapiens
agggcgcccgagacccccagcgcgccggaggagaacaagagcccgaggcggccgcgggacggggacaccaccacgacgcgcaccaca

SEQ ID NO: 172550 - RNA, 76 nt, Homo sapiens
cagaagcacagccacagagcagcccagaagaccagggacaggacagaggccccggaaccgacccgcgacggggccc

SEQ ID NO: 172551 - RNA, 92 nt, Homo sapiens
aggaagcgcgggccagcgacccgcgccagcgcccagggggggaaaccaccgacgaccaaagcaaaaaaaaggccagaggacaggccgagagg

SEQ ID NO: 172552 - RNA, 77 nt, Homo sapiens
gaagaaggaagggacacagcccacagggcccggacccaagaccagcaccaaggccccccaggaaccggcagccagca

SEQ ID NO: 172553 - RNA, 66 nt, Homo sapiens
aacggcaaaccgcccccgggccagaacgcggcagaacggaggcaggcagcacgagacacaccacaa

SEQ ID NO: 172554 - RNA, 39 nt, Homo sapiens
ggcgacgaccgcacaacagaaacccgggagagggcccaa

SEQ ID NO: 172555 - RNA, 59 nt, Homo sapiens
aaaggggaagccaagcccccccgagccacccagaggacagcaaggggagggacgccagc

SEQ ID NO: 172556 - RNA, 74 nt, Homo sapiens
caaaggaacagcaaaccacccagacggcaagagagccggccaggacacacaggcgaaccgagaggaagggcagc

SEQ ID NO: 172557 - RNA, 58 nt, Homo sapiens
gcccccggcccgggcacgggacaggagaaaaggacgacggaaccaccacgaaaaaaag

SEQ ID NO: 172558 - RNA, 70 nt, Homo sapiens
agggggcgaacgcaggggagaggagaagagagcggcggaagggacaaaacggggagaccaacaaaacagg

SEQ ID NO: 172559 - RNA, 78 nt, Homo sapiens
agccggaaggacccaggcccagacacccaaccacccgggccggacgacgggggacagaagaggaaaacaccacaaaag

SEQ ID NO: 172560 - RNA, 80 nt, Homo sapiens
cggcgcaaccgggaccccaacagaacaccaggcagagagaacacaaggaacgaaaggaagggaagaagcagaaccaagac

SEQ ID NO: 172561 - RNA, 89 nt, Homo sapiens
gccgccgccgccgcgccgagcggaggaggaggaggaggcgaggaggagagacaccccaagaagaagcggaagaggagccgcggaaccaa

SEQ ID NO: 172562 - RNA, 78 nt, Homo sapiens
acgcaggagcgcgccccagaggcagcgcaaagcagcagcacaccccgacaagggaaggaacccacgcggccacccccc

SEQ ID NO: 172563 - RNA, 83 nt, Homo sapiens
ggggggcgcggcgccgggacgcaccgcaccgagggcgagcccagaaaggaaggcacaagggccagcaggaggccggcgagacg

SEQ ID NO: 172564 - RNA, 43 nt, Homo sapiens
aaaaacgccagaacacgacgagggccaccgcaccaggcggagg

SEQ ID NO: 172565 - RNA, 57 nt, Homo sapiens
cacaagcaagacacaaagagcagcggaggagaggggcggagcgggggggcacacaga

SEQ ID NO: 172566 - RNA, 85 nt, Homo sapiens
acccagaccaccggcccggcccccaaaggcgggaaaggcggagccaccggccggcgaagaaaaaagcggccagaccacaagcggg

SEQ ID NO: 172567 - RNA, 75 nt, Homo sapiens
gagcagaacagagagacagccagcccagaccacggcgagcccagaacgaagcggcccagcgggcccaccgggcga

SEQ ID NO: 172568 - RNA, 79 nt, Homo sapiens
gggcggcacgcacgcgggcagggaacaggcggagcggaaggcacgcaggaccagggacgaagagggcacggagccaagc

SEQ ID NO: 172569 - RNA, 79 nt, Homo sapiens
aaagaggacaaccaggagccccgggcaggagagacaacaaagcgcaaccaagaccaagagaagagacgagcgggggacg

SEQ ID NO: 172570 - RNA, 83 nt, Homo sapiens
agaggaagacgacgaggaagagcccgccgaagcgcagaaaaggagcccggaaagggaaggagggggcggggacaccagcccga

SEQ ID NO: 172571 - RNA, 62 nt, Homo sapiens
gggagaaacacaggaacaaacgacagccagccagcaggcaacaggcccagaccaggcccaaa

SEQ ID NO: 172572 - RNA, 63 nt, Homo sapiens
accggaacaacagggcaggacccccaaggaggacaaggcaagaaacacaaacgggagacggca

SEQ ID NO: 172573 - RNA, 71 nt, Homo sapiens
cgaacacaaaggagggacagcagcaagagccccaaagccaccaggagccccagcacaagacgacgaggccc

SEQ ID NO: 172574 - RNA, 78 nt, Homo sapiens
cgggggagcagcaaaggagaaaagagaaaggagcaaaaacaccaccacaacaaaagaaggggaccaacagggcggaac

SEQ ID NO: 172575 - RNA, 77 nt, Homo sapiens
gcggggcggagcaacagcggcggggcggcagcaccacgcgcgagaggagaccgcgagagggggcccaccacacgccc

SEQ ID NO: 172576 - RNA, 72 nt, Homo sapiens
cagccgaagccgcagggaggggaaacgaagcgcacgaaacaccaagccaggaggaagaagaggaggagagga

SEQ ID NO: 172577 - RNA, 83 nt, Homo sapiens
cagggacagggggaagcgaggagccacacagaccagaacggcagacggacggccggcccgggcagaccagaccagacacacag

SEQ ID NO: 172578 - RNA, 55 nt, Homo sapiens
aagaaaacacagccgacccaagacgggcgaacagagggccaaaagagaaacaggc

SEQ ID NO: 172579 - RNA, 80 nt, Homo sapiens
ccggagcaaacgacgagaaagcccacagccaaagccgggcggacgcgcaaagcccccaacaccggccgcagaaagccggc

SEQ ID NO: 172580 - RNA, 78 nt, Homo sapiens
agaccaaccccagggcgccaagacagagcaacacggcagccagagcccccggccgcaaagagcaggaagagcccagcc

SEQ ID NO: 172581 - RNA, 79 nt, Homo sapiens
acgaggggaccaaaccccacacccaggagacgccggggcccggcgccaccaccggggagccagagcaagaggccaaggc

SEQ ID NO: 172582 - RNA, 78 nt, Homo sapiens
aagcagaagaacgcagaaagagacacaccgacgaaaaacccagaagcgaggcgaagcagcggcgagaaacgagagcac

SEQ ID NO: 172583 - RNA, 67 nt, Homo sapiens
agccagccggacagagacccaacagcagcaagcgaacaccagaggaccgacccccgggagcaaaaga

SEQ ID NO: 172584 - RNA, 81 nt, Homo sapiens
accagccacccaaagcacgaccagagaagaggcgaaagaagagggaaaagacgagcaggagaagaaaacaagaaaaagaag

SEQ ID NO: 172585 - RNA, 74 nt, Homo sapiens
gcggggcccgggcaagaaccggaaccccaggaccgacaccaacaccagccgcgcgcagcccacagcaacaaggg

SEQ ID NO: 172586 - RNA, 76 nt, Homo sapiens
aaaagacaaaaggaagagaagacaaggaaagaccacagcaagaccacgcccccagccgggggaccaggccgaacga

SEQ ID NO: 172587 - RNA, 55 nt, Homo sapiens
aacacgcccacagacgcagccacgcggcccaggcaggccccccgaaggaagagac

SEQ ID NO: 172588 - RNA, 79 nt, Homo sapiens
aaggggaaaaaaccaccaggcaccgagaaacacaaggccacccggagaaaggccacggccccagcccaccggaccggac

SEQ ID NO: 172589 - RNA, 99 nt, Homo sapiens
gacagcaagaagaaagccagaggaagccagcccacgcgccgcccagggggcacgcccacggaagccccccaaagcgagggacacaagaccccacgaaga

SEQ ID NO: 172590 - RNA, 78 nt, Homo sapiens
cgagccaccaagagaaaaagaacccaccggcacaaccgcacgcaagcgacagcgggccagaagagggaacggcaagag

SEQ ID NO: 172591 - RNA, 65 nt, Homo sapiens
agggacaagaggaccaaaccggccaggcgagagcaaaagaagcaaaacggacaagcggaagggca

SEQ ID NO: 172592 - RNA, 65 nt, Homo sapiens
cgcggagccggaagagccccgagcgaccccacagccaccagcagcgccccgccacaacccagccg

SEQ ID NO: 172593 - RNA, 81 nt, Homo sapiens
gcggagcaccaggcggccagagcagaggccggagggagcgcacaccgcagaccccccccaggccgcagagcaccaacaacc

SEQ ID NO: 172594 - RNA, 60 nt, Homo sapiens
ggcgccgccggcgcggccggcacacgaggaggaggcaaaacagacagaacgcagaaagca

SEQ ID NO: 172595 - RNA, 66 nt, Homo sapiens
aaccgcacgacacgaacaaccaggagcagggcggagccccgcgagggagacccgccccaggagaac

SEQ ID NO: 172596 - RNA, 77 nt, Homo sapiens
cggcgcccgaggcggagggacggagggaaagacaaggagccgggccgagaaaccgaaccagagaccagagaagaaac

SEQ ID NO: 172597 - RNA, 79 nt, Homo sapiens
aaacccagaacacgggagaaaaaggaaaacgcggaaaaccgacacaacagcgggcgacgcacgaggcacacaggaagga

SEQ ID NO: 172598 - RNA, 71 nt, Homo sapiens
acagccaggaaccaaggccagacgaccaaaggagaaggcaccagccagcaaagcgggaaccagcaggccgg

SEQ ID NO: 172599 - RNA, 79 nt, Homo sapiens
agcggccagcgcaggaggacgaccggggggcaggaggcacccggggcaggagagcaccaccgacaccgagaagcagaga

SEQ ID NO: 172600 - RNA, 76 nt, Homo sapiens
gccgacccagggaccaacaccaaaaagcaacgacaggccgcaaaggcgccagggaagacgggccggagcccaggcg

SEQ ID NO: 172601 - RNA, 77 nt, Homo sapiens
gagcagaagaccgcccgggcccaaggaacgaaaaacggagaaggccaggaaggcaggggggcgaccaccaaggagcg

SEQ ID NO: 172602 - RNA, 73 nt, Homo sapiens
cagagaaccacccgaaggaagccgggaggccgggcggagagggagcggcagaaaagcagacacccaagcagac

SEQ ID NO: 172603 - RNA, 77 nt, Homo sapiens
ggggaggcgaggccggacgcacccggggggcccagaaacaacggacacccccgggaacccaccaaaaaggacaccga

SEQ ID NO: 172604 - RNA, 49 nt, Homo sapiens
ggaacacgggagcggaagaggcgaaggagaaccaagaaggagcgaggga

SEQ ID NO: 172605 - RNA, 65 nt, Homo sapiens
gcaccccccggacccagccccggaaggggggcggcgcaggacgagagcccccgcaggacccgggg

SEQ ID NO: 172606 - RNA, 68 nt, Homo sapiens
acagggcgggaaacggggaaggagccagacggaccaaaagcacgggaccaaccaagaagaaacaacga

SEQ ID NO: 172607 - RNA, 76 nt, Homo sapiens
gggccaagcccggagaccagcacgaccggcacggcagacacaccgaccagaggaaggcgaacccgccacgcagcag

SEQ ID NO: 172608 - RNA, 69 nt, Homo sapiens
ggcgcgccaccgcaaaggcccgcgcaccgccagggaagaaacgggggcccagagcaggcggacaggagc

SEQ ID NO: 172609 - RNA, 73 nt, Homo sapiens
ggcgccccacccagcacgagaaaaaaaggcacaggaagcggagcgagacccagagcggcaaagaaagagagaa

SEQ ID NO: 172610 - RNA, 83 nt, Homo sapiens
acagaagagcgaagcgaggacacacccaggaaaagaccaggacggacaagcacagccggaaggagaacggaagaggacaagag

SEQ ID NO: 172611 - RNA, 64 nt, Homo sapiens
aacacccagacccgcagcaaaaccgcccccaaagccagagcccaagccaaaaaggccccgcaaa

SEQ ID NO: 172612 - RNA, 73 nt, Homo sapiens
acggcggacacacggaggcgcggggaggcacggcacaaaggcccgacgccggcgaaagacggaaacgagcgcc

SEQ ID NO: 172613 - RNA, 51 nt, Homo sapiens
aaaaccgaaaacaggaccacacaaagcacggacgccgccagccaccggcgc

SEQ ID NO: 172614 - RNA, 74 nt, Homo sapiens
cgcacgaccagcccgaacaagacaggaaggaaagagggcaaccgaagaccaacaagggcggagagcagccggag

SEQ ID NO: 172615 - RNA, 71 nt, Homo sapiens
caggccgacagccgcggccgggcccgagcagagaacaaagaaggcccccacaacccaagcacgcgacgggg

SEQ ID NO: 172616 - RNA, 66 nt, Homo sapiens
agaagacaacgcacaacaggacggagaggagcaggaggagccgcgggcaaggaggagcgccaagag

SEQ ID NO: 172617 - RNA, 78 nt, Homo sapiens
cacgaggagaagaaggaaagagaagacgaagagaccgaaggacagacgagccagcgcagcagccgacacgggagccga

SEQ ID NO: 172618 - RNA, 85 nt, Homo sapiens
gcgaggagaagcgcagcgacggcgcgggagagcgcgccagccggccgcgaccggacagcaaggaccagcaaaaggaccggaccaa

SEQ ID NO: 172619 - RNA, 66 nt, Homo sapiens
cgagggcgcaacgagaggaacgagacccaagcagccagaaaaaagcaccgggaggaaagagagcca

SEQ ID NO: 172620 - RNA, 38 nt, Homo sapiens
cacagcgaggagaaacagaacagaaggcagcccgaaac

SEQ ID NO: 172621 - RNA, 73 nt, Homo sapiens
caaggaaaggaacagggaagcagcacgagagcgggacgggacccccaccaaccaggaaaaggagcgccacagg

SEQ ID NO: 172622 - RNA, 78 nt, Homo sapiens
ggagaaggggagacaagcacaagcaaagggacaccaccagcaggaaccgagaggggagagcaacggaaggaaacgaag

SEQ ID NO: 172623 - RNA, 78 nt, Homo sapiens
gcccaaccaggcgccccgcggccggcgcggggacgggcaggcaccaccccaggcaaaagaacaacgccagcagcagag

SEQ ID NO: 172624 - RNA, 74 nt, Homo sapiens
gcaaagcgcagcccgcagacagaggggcgacgaccgcacaacagaagacacaagagaggaaacccccggaagcc

SEQ ID NO: 172625 - RNA, 90 nt, Homo sapiens
acccccagccggagcagccggaccagcccagaaggcagcggcggcccaggccagcacccgcagacccaaggccagccagccccaggcacc

SEQ ID NO: 172626 - RNA, 77 nt, Homo sapiens
cgcccggcccggaaccaggagcgaggccccccgcgcccacaccgcaccccccagagggagcccagagaccaggcgag

SEQ ID NO: 172627 - RNA, 83 nt, Homo sapiens
gcgaagcaccgcagccgggcagacacacgacgagaaccggggaaagggagcagcaccggccacacccacagcacgaccggaac

SEQ ID NO: 172628 - RNA, 69 nt, Homo sapiens
cggcacacgcagcagaagcccggagaagaagaccaaaggacaaaaaagacggagagagaacaggccaac

SEQ ID NO: 172629 - RNA, 79 nt, Homo sapiens
gggaaggaacagaagaggcgcccagaaacagcacggagaaaccaacagagggcgggaccacggagcacggcaccgaaga

SEQ ID NO: 172630 - RNA, 76 nt, Homo sapiens
gaggagggcggaaggacccgggagggaacgagcagagaccgaagcagccaggagggccacaagagggacggaacgg

SEQ ID NO: 172631 - RNA, 78 nt, Homo sapiens
ggccgggccggagacgcgcccgcgcgcaggggaagcgggcagcaaggcgccaccggaagaaacgggaggggaggagcc

SEQ ID NO: 172632 - RNA, 75 nt, Homo sapiens
cgagagaaggcacggcggcgcagaaaagcacagaagacaagacggaagcgaacacaacgacggcacccggaggaa

SEQ ID NO: 172633 - RNA, 50 nt, Homo sapiens
gcaaacggaccagaccgaccaccaaaagaggcgacccgcgcccggggcgg

SEQ ID NO: 172634 - RNA, 71 nt, Homo sapiens
aaaacacacagacgaaggcaaaagaggacagaacgcaacgaagaaagaacggaaggaagaccgaccagaac

SEQ ID NO: 172635 - RNA, 55 nt, Homo sapiens
caaaagggaaaaaacaggagcacaggcgagagcgagacaaaacagggcaaggcgc

SEQ ID NO: 172636 - RNA, 74 nt, Homo sapiens
caagccggaggagaagcaagaaggcccggacacagcaaaccgggccacaggggagaagcagaccgcaccaggcg

SEQ ID NO: 172637 - RNA, 79 nt, Homo sapiens
ggacgaggaagaagggcaggaccgggcggaggccgccaagacgggccacccacccaggacccccccgggcaaagcaggg

SEQ ID NO: 172638 - RNA, 42 nt, Homo sapiens
gaaccggaagggagaaagaaagacaagagcaccacagcaaaa

SEQ ID NO: 172639 - RNA, 86 nt, Homo sapiens
ccggcgcgaccgccccagcccggggcccacacggccgcccggccaccgcgcccgacgagccgcaggcgggcagaaacaaaaagaag

SEQ ID NO: 172640 - RNA, 83 nt, Homo sapiens
ccgaacacccaaccagggccgggaaacgagagcacaccagggggcaaacgcagaggcgggaacaaacagccccaagacgggaa

SEQ ID NO: 172641 - RNA, 76 nt, Homo sapiens
agaaccccaaaaaaaggccaacggaccacaccaaaagccaccaaaggaacacgccaggaaaccagagacacacaaa

SEQ ID NO: 172642 - RNA, 67 nt, Homo sapiens
aagaaccccccgggagccagaccggcaccgaagacccggagcaacaccccgcaccgggaaccgcgga

SEQ ID NO: 172643 - RNA, 83 nt, Homo sapiens
ccgccgccaccacccacccggacacaggacacgaggaggggacggcccgccacaggcacagacgaggagggaagcgaagcggg

SEQ ID NO: 172644 - RNA, 77 nt, Homo sapiens
gcagggggacgcaaaggccaaggggcggcaaaaaggggaaagagggaccagcgcagcagaagcagggagacggcgcc

SEQ ID NO: 172645 - RNA, 67 nt, Homo sapiens
caccaccgggcagagaagggccaaggcggggagaccccagaggcaaggcgggaaaaccgccacaaag

SEQ ID NO: 172646 - RNA, 63 nt, Homo sapiens
aggggcggaggcggaggcagaggggaggcgcgaaaggaaaaagaacagaggccaacccgacaa

SEQ ID NO: 172647 - RNA, 81 nt, Homo sapiens
ccccacacccacacgaccagaggcgcaagccgcagcgggccccgcggaccggaagcccaagaccacccacggggcagaaac

SEQ ID NO: 172648 - RNA, 74 nt, Homo sapiens
caaacggagccgaagaccaaagagaaagaggagccgggaaaccgaagaaggcagagaaggcaaacaggaggcgc

SEQ ID NO: 172649 - RNA, 63 nt, Homo sapiens
acggagacagagccgaaggccggcagaagacaacgaagagaggaaagaagcggaaaggaggga

SEQ ID NO: 172650 - RNA, 75 nt, Homo sapiens
ggagagcccaggagcgggcgggacaggaaccaggagaaccaaccgaaggcacagggaagaacaaaacgacagagg

SEQ ID NO: 172651 - RNA, 64 nt, Homo sapiens
ccggcggcgcgcgacgcccagagccgcggccggggcgcgggaggcgaccaggccgcgggaagcg

SEQ ID NO: 172652 - RNA, 84 nt, Homo sapiens
gggcgcaggcgcggcgcaggacggccggccaaccagacggagccgggagcccgccgggcagcaaagcccgcgacacccgacgag

SEQ ID NO: 172653 - RNA, 61 nt, Homo sapiens
cccggcccgcaagccaacccagcaccacaagcaggaaccgcaaaggcgaacaaagagaaaa

SEQ ID NO: 172654 - RNA, 55 nt, Homo sapiens
gcacagcggaggcgacacccagagagcccagaggaagagagaggacacagcagcg

SEQ ID NO: 172655 - RNA, 77 nt, Homo sapiens
ccaggaaaaagacagcccgcagcacgaccagcaggaacgggaaacccagacgacaaggaaggccaagggacccacga

SEQ ID NO: 172656 - RNA, 68 nt, Homo sapiens
gggcagggcgcaccacgaaaacaacacagcagggaagcagaaggggcggagcaggacccaaagaagcc

SEQ ID NO: 172657 - RNA, 85 nt, Homo sapiens
ggaggaggaggcgaggaggagagacgccgaacgaggcggggggcccgagaccacaccacacccaccagggaggaccggagaagca

SEQ ID NO: 172658 - RNA, 73 nt, Homo sapiens
aagacaagaagaaaggggaaagcaagaaaaagagccaaacggagaaaaagagccgcagacgcacagcaaccac

SEQ ID NO: 172659 - RNA, 68 nt, Homo sapiens
aaagaggcaagaccggaaaggccacacaacagccagcaaagacaagagcagaccagcagccgcagcgc

SEQ ID NO: 172660 - RNA, 75 nt, Homo sapiens
gacacacaagaggacagggagaaagggccccaagaaagccagggaaaaccggaaagcaaggagcaccaaacacca

SEQ ID NO: 172661 - RNA, 71 nt, Homo sapiens
cgcggcgagaggccggacccgaaaaacgagacgggcggcgaacggcggaggcagggcccgaaccgaacgac

SEQ ID NO: 172662 - RNA, 73 nt, Homo sapiens
aagcccacgcagcccaggaggaaagaccggaggcaccagagcaggccccagagaaggagaagagagagacgcg

SEQ ID NO: 172663 - RNA, 75 nt, Homo sapiens
ccacaaaggaacgcccacccacggggaccagcagccgggccagggccagagcaaagaaacggcgaggaaagagag

SEQ ID NO: 172664 - RNA, 85 nt, Homo sapiens
cgaggggccaaccagcgaagagcgacaagccgcggcagccgcggaccaccgccgccagggacacgggggggaaacaagcacgggc

SEQ ID NO: 172665 - RNA, 64 nt, Homo sapiens
gcggagaaagggcagaggcccccacggcacagggcgggcagccccaggcccagagacggcgccg

SEQ ID NO: 172666 - RNA, 75 nt, Homo sapiens
gaggaaaaaacgaccaagccagagaacagcccccacgcagcccagaagaaacagagccagaccagcgaaaagcca

SEQ ID NO: 172667 - RNA, 80 nt, Homo sapiens
gcccccagggagggccaccaagggacaagcccagcagccacagggaccagcaggccaggaaggaaacagccagagcaccc

SEQ ID NO: 172668 - RNA, 73 nt, Homo sapiens
caccacccaaggagaaggcagcgccgacacccgacggccacgaacccgagggagagacccgccccgcgcacga

SEQ ID NO: 172669 - RNA, 63 nt, Homo sapiens
gggagagcggaccccccgccaccgcccgagcccaggagagaaaaacaggccaggaagagcacc

SEQ ID NO: 172670 - RNA, 84 nt, Homo sapiens
gaagccggaaaggacgcccgccaacgaggaccgcaggggaaggagaagcccagcagcccggcaagcagacagcaaccaaaccgg

SEQ ID NO: 172671 - RNA, 78 nt, Homo sapiens
ggacagagcccccgaggccccagaacaccgggacacgggagccccgcaggacccccgcacacgcccacacagcagcag

SEQ ID NO: 172672 - RNA, 75 nt, Homo sapiens
acggggaccccggagcccagaagacagagggcgagacgaacaagagaccccgcgagacagccgcccccacccagg

SEQ ID NO: 172673 - RNA, 83 nt, Homo sapiens
cgagggcgcggcgcgggccgagaaggaagccaaaagaaacccccaaaaccggaagaaagagaaggaacagaggacacgcacac

SEQ ID NO: 172674 - RNA, 69 nt, Homo sapiens
cacacagcacaacacaacacgccccgaaggcacacgacaagaaacagacagggggcaggcaccaaaggg

SEQ ID NO: 172675 - RNA, 83 nt, Homo sapiens
gacccagggcccgggacgccgagcccgacccgggcgccccgccggcaccccgcgcggacaccaggagaaacggcgcaggcgca

SEQ ID NO: 172676 - RNA, 86 nt, Homo sapiens
ccccacgggcggcggcggggccgagcgcggcccgcaggcgagcgccgaaaccgggcgcaggcggagaccgagcccagcggacccaa

SEQ ID NO: 172677 - RNA, 72 nt, Homo sapiens
agacagcagagagagagcggaacgggagaaagcacgggaggagagaaaacgacagaagcacgacaacaacgg

SEQ ID NO: 172678 - RNA, 72 nt, Homo sapiens
ccccagcacgcggaccacccaaacacccagcgaggccacgggaggaccaacaggaagcgcgcgccaggagca

SEQ ID NO: 172679 - RNA, 81 nt, Homo sapiens
gcaaaacgggcaaaagaccaaagaaggcaaggagagaagagaagaacagcacaggacaggcacaacaacaaccaaaaaaca

SEQ ID NO: 172680 - RNA, 75 nt, Homo sapiens
ggagagacaggacccgagagcaaggccagcagagcccaagggcgccagccaccacccagacgaccagacgagagc

SEQ ID NO: 172681 - RNA, 69 nt, Homo sapiens
agcgggaaaggaggcgaaagcagggaaccaaggaagaaggaaagggaagaccaacaacccagcggaaga

SEQ ID NO: 172682 - RNA, 76 nt, Homo sapiens
cggcacgacgaggaggccggagagcggccgcaccgccagccgcccggcggggcaagcagagaacccacaggagggc

SEQ ID NO: 172683 - RNA, 76 nt, Homo sapiens
caagcaaggcccaaaagcggaacaggcaggccagcaagcacaccaggccacgacaggacgggcggcagagaagaga

SEQ ID NO: 172684 - RNA, 75 nt, Homo sapiens
gagcacgcagagagaacagggcaacaggccggggcgcgacgagagaccgcgcacacgggcccagaagcagcccag

SEQ ID NO: 172685 - RNA, 38 nt, Homo sapiens
cccaaccacacccagagaagagacaggccaaccggacc

SEQ ID NO: 172686 - RNA, 83 nt, Homo sapiens
gccggcccccccaggacaacccagaggcaacaaaggcgaggaaggagcaagacgagaacaacgacaaaagaaggggcggggca

SEQ ID NO: 172687 - RNA, 74 nt, Homo sapiens
agggcgcggcacggggacgacgcggccgggcccggcaccgccgcggacggccggggggaaggagacgcacaccc

SEQ ID NO: 172688 - RNA, 75 nt, Homo sapiens
ccgggcgcgcggaggaagcgcacaacagagggacgaaagacaaagagccgagacgcggggagacccagggcagaa

SEQ ID NO: 172689 - RNA, 74 nt, Homo sapiens
gcgagcagaccgcgaccccggaggccggcggacaggccgcacaaaaagggagaagcccgagcacaacccggcaa

SEQ ID NO: 172690 - RNA, 66 nt, Homo sapiens
gggccggcgagcgcgcgccaccaggggacagaccagagcaggaccaaaggcgcacagagccgaacc

SEQ ID NO: 172691 - RNA, 55 nt, Homo sapiens
aagcagcaccccaccgaaaaagccggacacaagagggcaagaaaggcgcgacggg

SEQ ID NO: 172692 - RNA, 81 nt, Homo sapiens
caccgcgaacaggagcccgacagaaggcacccggacacgaccaaaacccccaaagccaccagaaagccgcgagcccacaga

SEQ ID NO: 172693 - RNA, 79 nt, Homo sapiens
gaaacacggaaacgagagggacgagagcgccacacacaagagggcgaaaggagcagagaagaaagagacaaaggaagac

SEQ ID NO: 172694 - RNA, 77 nt, Homo sapiens
ggaagcgagaagaaaagccacccccacgaaggggaaaggcacccgcagagccacccgcccgagcgaggccacagagg

SEQ ID NO: 172695 - RNA, 57 nt, Homo sapiens
gcgacgcggcgcagggacccgggacagcggagaggaaagcaggaaaacggcgcaaac

SEQ ID NO: 172696 - RNA, 78 nt, Homo sapiens
gacagacaacaagagggcagaacaccaacacgcaacaaaagaacaggagccaccagaaaggaacagaaacaggccaga

SEQ ID NO: 172697 - RNA, 60 nt, Homo sapiens
cagggagacgcacagccaggacaccggaaccgggaaaggagagaaagagcagaaacgaac

SEQ ID NO: 172698 - RNA, 79 nt, Homo sapiens
ccaggcccaagccgaaccgggagaagaccccggcgcgggaacggacaagaagagaagaaaagaaacaaaccgggacgag

SEQ ID NO: 172699 - RNA, 50 nt, Homo sapiens
caaaccacacggagcaaagcagaagaaggaagcaagagaagaaccagccg

SEQ ID NO: 172700 - RNA, 79 nt, Homo sapiens
aggaggaggaagagaagaaaggcagccaaaggcacacggccaggagacagaacagacagaaaaaacaacaagaaaccca

SEQ ID NO: 172701 - RNA, 81 nt, Homo sapiens
aaaccccgggggacacccccagggcaccacaagccgaacagccagccagcaaaagaacagcagcaccagaagcagccagca

SEQ ID NO: 172702 - RNA, 68 nt, Homo sapiens
ccggccccggcaccgcccggagggggccccaccgggcccgaaggcgcgagcaagaggcaagagaaaac

SEQ ID NO: 172703 - RNA, 74 nt, Homo sapiens
gggccccggcccagcaaccgacaacgcggcccggagcccaaaagcgacgaggagaaaggcagcggcacagaccg

SEQ ID NO: 172704 - RNA, 37 nt, Homo sapiens
gaggcggcggggagcagcaggagaggggcccggcgaa

SEQ ID NO: 172705 - RNA, 60 nt, Homo sapiens
aggaagaaaacaaccggacacacccgggccagggcacgcgaaaaaagcccaggacccacc

SEQ ID NO: 172706 - RNA, 77 nt, Homo sapiens
aggcgggcgccaggcaccaggccggcaagaagccaacggagaaccaaggccaagaccagaaccagcccgggaaagga

SEQ ID NO: 172707 - RNA, 75 nt, Homo sapiens
ccgccgcgcgggaaacgaacgaggccgagagagaaggggaccccagcccaacgccaaacgagccggacccggagg

SEQ ID NO: 172708 - RNA, 58 nt, Homo sapiens
cacccgacccagagcccccgcccgcggaaggccaaagacagacgggcccagcacacag

SEQ ID NO: 172709 - RNA, 87 nt, Homo sapiens
ccggggacccgccagccggaccgcgcaggccggggacacggcacagcaagccacaacacagcagcccccaggagagcaggaaaagcc

SEQ ID NO: 172710 - RNA, 83 nt, Homo sapiens
aaagaaaaggagaaaagaagccaaagggacacgcaggaagacacaaggaggggcaccgaggaagaggacggaagaccggcccg

SEQ ID NO: 172711 - RNA, 76 nt, Homo sapiens
agagacgagcgggggacggcacgggccgcagaagacagggcggcgggccggacgacaaggcggcgcggacaacgcc

SEQ ID NO: 172712 - RNA, 72 nt, Homo sapiens
gcacaaggacaggcgccggggggaaccaacagcccccacgcagaccccccggcggaaggcacacgcacacac

SEQ ID NO: 172713 - RNA, 81 nt, Homo sapiens
cgcgagcacagagcccgccgccgaccgccgcccgccacacccgccgccagaaagccgggaccgacgccaggccccacacca

SEQ ID NO: 172714 - RNA, 76 nt, Homo sapiens
gccagcagcccgccgcacggccggcaagcacccgggacccacccacagggacccagccagccgcagcccaccaagc

SEQ ID NO: 172715 - RNA, 68 nt, Homo sapiens
aaaccacgagagcccgcccaacaaacagaggacagggcaggggaaggcgggcaagcgcaaggagagaa

SEQ ID NO: 172716 - RNA, 72 nt, Homo sapiens
ggagcaccagaccggaggagagcgacacagacaaggggcgcagagcccggacagacagaaagcgcccaggac

SEQ ID NO: 172717 - RNA, 46 nt, Homo sapiens
gagggaacgggaaagaacagagaaggcaacggcgaagcaagacgag

SEQ ID NO: 172718 - RNA, 43 nt, Homo sapiens
accccggccagcccgccacacgggcacgagaggggccacgggc

SEQ ID NO: 172719 - RNA, 51 nt, Homo sapiens
ggcagacacacaacccgacccgacgaaaacagacgcacgccgaaaaaaaac

SEQ ID NO: 172720 - RNA, 72 nt, Homo sapiens
acggcaaggaacacagaggaaagcgagaaccccgaacagaggagccaacagaacgacacgcaaggagagcag

SEQ ID NO: 172721 - RNA, 68 nt, Homo sapiens
agcaagaaagggaagccgagaaacagccagacgcaaagacgcaaagacagaccgggagacggaaaaag

SEQ ID NO: 172722 - RNA, 69 nt, Homo sapiens
cagggagaccaagagacagacaccgccccgagacgagggacggaaaaggcgcacacgacccggagaacc

SEQ ID NO: 172723 - RNA, 80 nt, Homo sapiens
aagggccggagagcgcaggaccaagcgccaccgggggccaagaaagaggagggggaagagagagacgaaaccaaaaggag

SEQ ID NO: 172724 - RNA, 63 nt, Homo sapiens
ccccccgagacagccacccacgcgacgcacacccccacagagagcggagaagggagaggacgc

SEQ ID NO: 172725 - RNA, 79 nt, Homo sapiens
gccaagcggggagcgcccgcgacagaggagggaggaaaacaaccgagggcagaagccccccaagagaacccagggggag

SEQ ID NO: 172726 - RNA, 75 nt, Homo sapiens
caggaacacagacgggggcgagcggacccgcagccccaaaggacgaacagcggggacgccccagcagaccgccca

SEQ ID NO: 172727 - RNA, 88 nt, Homo sapiens
gacgagaagcgcagcaacggcgggggaccacgagagcgaccaggacaaaaccccagaggaacggacaaagaaaccagaagaaggcaaa

SEQ ID NO: 172728 - RNA, 78 nt, Homo sapiens
acccaggacggaccggaaggcccagaaccaaggccacggggcgccggccacgaggggcggaagaccaggcaggacagc

SEQ ID NO: 172729 - RNA, 71 nt, Homo sapiens
ccgaagagccggcacggagaaacaccccggcggaggcacccaacaacccaggagaggccagaaacacacca

SEQ ID NO: 172730 - RNA, 79 nt, Homo sapiens
agacaagaccaaggcaacaaggacaacaagagacgggacaagacagggcaaaggacagaccagcccggaccaagagacg

SEQ ID NO: 172731 - RNA, 79 nt, Homo sapiens
ggcgcggccacggagaagggcgcggcaacagcagcgcaggagaaggagaaagaaaaagaaaccagccaaacagcgagac

SEQ ID NO: 172732 - RNA, 79 nt, Homo sapiens
gcccagcccggccggcgcgccacgccgagggcggagaacggaaaagcaccaggaagcagagaggaccgcagaagggaag

SEQ ID NO: 172733 - RNA, 71 nt, Homo sapiens
aaaggacggagagcccaagaaaggaaaaagcagacggacacaaagacaggcacccaagacaggccagaccg

SEQ ID NO: 172734 - RNA, 64 nt, Homo sapiens
cagaaagagagagcacaggcagcagaacaaggacggcccccgagcacaccagcaagagcgaagg

SEQ ID NO: 172735 - RNA, 73 nt, Homo sapiens
ggcggcacccgcacccggggacaagcgcgggaacggcgcggaagacagccagcacaacaaccaagacaggacc

SEQ ID NO: 172736 - RNA, 75 nt, Homo sapiens
aaaaagaaggaaagacaacagaaacaagacaggaacgccagcggaagaccaccaaaagcaggaaaacgagacggc

SEQ ID NO: 172737 - RNA, 68 nt, Homo sapiens
ggggaaaggccagcgcagaaacgcaggcggccccacaagacggacgggggcgacaagcgaaccaacgc

SEQ ID NO: 172738 - RNA, 64 nt, Homo sapiens
aaaaacgcaacaccagcacagaggaggagagaaagaacccacgcaggacgacagaagaggccgg

SEQ ID NO: 172739 - RNA, 88 nt, Homo sapiens
cggcggccgaagacacgcgacccggagacagcccaaaacccggaagagcgccccaggagaaacaagaagggccgggccggggcacggg

SEQ ID NO: 172740 - RNA, 73 nt, Homo sapiens
ggcgaagcgcccgggcccaaaagcggaggggaaagccaagcccgaggaggccggagagaaaacacacacagcg

SEQ ID NO: 172741 - RNA, 40 nt, Homo sapiens
acaggcccaaaaacaagacccaggccgaccacaccgagac

SEQ ID NO: 172742 - RNA, 83 nt, Homo sapiens
cgccgcgcgaccaggaggcggcggcgccgccggcgcagacaggcagcaaagaaaggaggagaagcccagccgcgcgagggcgg

SEQ ID NO: 172743 - RNA, 83 nt, Homo sapiens
cagcggccgccgccgcggccccggggaccgaagaggaagggcggccgggcccacacagccggcgaaaccgcaccacgagaccc

SEQ ID NO: 172744 - RNA, 66 nt, Homo sapiens
gaagcacacaacccagaccccgcacgagagcggagagccaccaagcaaacccccacaaaaagaggg

SEQ ID NO: 172745 - RNA, 44 nt, Homo sapiens
agccggcgggacacacgggcagagaccacaagaaccaggagaga

SEQ ID NO: 172746 - RNA, 63 nt, Homo sapiens
ccgaaaagacagagaggggaaaccccgaaaggggggcagggagagaaggacagagacggagaa

SEQ ID NO: 172747 - RNA, 58 nt, Homo sapiens
ccaggccacaaaagaaagaaaccgcgaggcagggaaagaagccggagcgaagaacacc

SEQ ID NO: 172748 - RNA, 87 nt, Homo sapiens
acgcacagaggaacacgccggggcccaaccacaagacgaccaaaggaggaaggagcacaggcggaggcagcggaggccccgccgcgc

SEQ ID NO: 172749 - RNA, 79 nt, Homo sapiens
ccccaccaggcacccgacacccgcccgccccgcccaagaagggggaaaaggaccagacccagaagaagaagagaaaagg

SEQ ID NO: 172750 - RNA, 66 nt, Homo sapiens
ccgaggaggcagaccacaaacccgggacggccacggcaaagggaaggggaacaggaccggccacag

SEQ ID NO: 172751 - RNA, 53 nt, Homo sapiens
gcaacgcgagaaaacaaggcagaagaaggaacgaccgaggaaggagaaacaga

SEQ ID NO: 172752 - RNA, 76 nt, Homo sapiens
gaggcaagaccgccccgccgcccagaggacgcccaacaccacccacccaccacgagggagaacaagaccaagagga

SEQ ID NO: 172753 - RNA, 84 nt, Homo sapiens
ggaggaccccgccaagggccccaagagggcacacagcacacaccgacagggcgggcagcagcggcgcacaaaagcaggaaaggc

SEQ ID NO: 172754 - RNA, 80 nt, Homo sapiens
gagaggcgagccgcgagagggccggcaggcccgggaaggaagaagaagcagagagccaggaaaagaaagagaacccagcc

SEQ ID NO: 172755 - RNA, 78 nt, Homo sapiens
aggaagccacggcagacacacaacccgacccgacgaggggagagaaagccccgaagagaagaggagggggaagaccca

SEQ ID NO: 172756 - RNA, 80 nt, Homo sapiens
ccggcagaagcagagacaccaggacagaaaagacaggcgccaggagcacagaagagcgaggagggaacccgaagaacgca

SEQ ID NO: 172757 - RNA, 64 nt, Homo sapiens
gccagccgcggccggaggagcccccaggccagcagagggaaggcaacacgagcggaagaacaca

SEQ ID NO: 172758 - RNA, 76 nt, Homo sapiens
aaaggccagggaaacaacccagaaagaccacagcaagaccacgcccccagccgggggaccaggccgaacgacccgg

SEQ ID NO: 172759 - RNA, 73 nt, Homo sapiens
ccgagagccgcccgggccagcggccgcgcacccccggccggaggcaccagccccagcccgggacggggcccgc

SEQ ID NO: 172760 - RNA, 80 nt, Homo sapiens
caccgccgccgggccggaggccacgaggaaggaagaaccagcaccgcaagaagcggaagcgccacagagggagagccgag

SEQ ID NO: 172761 - RNA, 85 nt, Homo sapiens
agccagccgagggccaccgggaaggacagaaggagcgggacggagcgggccaccggggccacgacagcgagcgaccccggccgag

SEQ ID NO: 172762 - RNA, 76 nt, Homo sapiens
acgcccgcaacccgacacggcacccggaagcaaggcggccagcaaagaggagagaacacagccagaggggaaaaac

SEQ ID NO: 172763 - RNA, 62 nt, Homo sapiens
caagacaccggacaccgagggcccccaaaagccgcaagaaccggggcgacagaggagaagcg

SEQ ID NO: 172764 - RNA, 76 nt, Homo sapiens
gcccgccgcaggagggcggcccggacaagccagacaacgccgacagcaaaacacgaaccccggaaggaagagcagg

SEQ ID NO: 172765 - RNA, 82 nt, Homo sapiens
ggagaagcagcagagcggagcagcacccaggagccggaagagaggcaggaaagaccacagcaagaccacgcccccagccggg

SEQ ID NO: 172766 - RNA, 38 nt, Homo sapiens
acggggcaagggcaggagacaagcgcaagcagccagag

SEQ ID NO: 172767 - RNA, 68 nt, Homo sapiens
gagcgcaccagaaggcagggaaacaacgagagcacaagccggacccccacccggcccgagaagaggac

SEQ ID NO: 172768 - RNA, 79 nt, Homo sapiens
ccccaacaccagcaccgcagaggcaaggggccaccaggaggccagggggcgccaggcccgcagaggcaaccccgcagac

SEQ ID NO: 172769 - RNA, 80 nt, Homo sapiens
caaccgcagagggaccgggccacccgggggcccacagaccacagagaagagcacaaaaaaccgcacaagcccccaaaggg

SEQ ID NO: 172770 - RNA, 78 nt, Homo sapiens
ccccgagagcgggaaacagagccgagcggagaccaacccccaggaggcccagagcagaggagggcccaggaccgggac

SEQ ID NO: 172771 - RNA, 58 nt, Homo sapiens
gcggacgaggcagcaacacaaagagagaagaagaaggaggccgcggccagaaacccaa

SEQ ID NO: 172772 - RNA, 79 nt, Homo sapiens
gccgaagcagccgggagccggagcgggcgcggacgccgaggcaccgaggcaccagaggagagaacacaaggaacgaaag

SEQ ID NO: 172773 - RNA, 80 nt, Homo sapiens
aagaccggccagccgcagaggacagcaggcccaagcgcacacccagagaggggcgaaaacgcggaagcggagacacaggc

SEQ ID NO: 172774 - RNA, 72 nt, Homo sapiens
acaagaaggacacaggagaagaaaggagaaacagagggagaacaagggggacacagccagggcgcaggcagc

SEQ ID NO: 172775 - RNA, 76 nt, Homo sapiens
acggaaccacacagggccgccaccaacagagaagacagagcaccaacgagacgcaagaggcgccccaaggaaaggg

SEQ ID NO: 172776 - RNA, 75 nt, Homo sapiens
ggggaggaggcggggcccgcggaggagccggaaaccccaccacgcggcaggggccgccgaggaaaaagcaacaag

SEQ ID NO: 172777 - RNA, 54 nt, Homo sapiens
gagggccagcccgccgggaccgcagaaaaccagaaggcaccgacaggaaaggaa

SEQ ID NO: 172778 - RNA, 78 nt, Homo sapiens
acagcaaagcagaaaaagacgagacgaagaaacaaaaaccaggaacagcaggaacgaaaccccaccaccccccccggg

SEQ ID NO: 172779 - RNA, 78 nt, Homo sapiens
caaagaccgcgcccagcgaagaccaaaccaaccgagccaccccagcagccaggagccagcgacaacagcaccagagcc

SEQ ID NO: 172780 - RNA, 63 nt, Homo sapiens
gagagaacaacggcaagggagaagagagggaaaaacaaagaagaccgggaagcccgccagaag

SEQ ID NO: 172781 - RNA, 73 nt, Homo sapiens
acgagcaccgcgccggcccagcaccccgagaaccgcaggagccagaggaagcggaggaggaagaagcaaaggg

SEQ ID NO: 172782 - RNA, 89 nt, Homo sapiens
cagaccacagcacaggcaccggacgggacagcccagaaaaaggaacaccaagaagaagaggggaggaccaccgcacagagcccgaacag

SEQ ID NO: 172783 - RNA, 57 nt, Homo sapiens
gaaagaagggggcagaagaggggagagaaaacagacagaaaagaaccagaaccggcc

SEQ ID NO: 172784 - RNA, 67 nt, Homo sapiens
cccagccaaaaacgccgaaacggaaagcccaagaggagacgacaggagccaccacacccaggcggag

SEQ ID NO: 172785 - RNA, 40 nt, Homo sapiens
aggagagcagcaaaaacaagagcgcccgcaaggcaacgac

SEQ ID NO: 172786 - RNA, 71 nt, Homo sapiens
acggcagccgggcccaggccgcagccgacccaacaggcgggcgccaggcaccaggcgggaaaaccgccaca

SEQ ID NO: 172787 - RNA, 69 nt, Homo sapiens
ggaaggagagacggccgaaaacccggcacagaacgaccagaccaaagcccaggagaggacaaaaggacg

SEQ ID NO: 172788 - RNA, 75 nt, Homo sapiens
aagcccacaaaacaccagagcgaccaagaaggagagcgacagcccaagcaccaggagaggagccaagcccaacgg

SEQ ID NO: 172789 - RNA, 71 nt, Homo sapiens
acgcgagccaggggaccaggacggggaaggaagggcacgggcagcaaaggagagaacagaaagaagacaca

SEQ ID NO: 172790 - RNA, 76 nt, Homo sapiens
aggggcgagcaggccggagggaccgggaagagaggcagaaacgaagcgaaaggaaaccaaaaggaaaaaacagaag

SEQ ID NO: 172791 - RNA, 75 nt, Homo sapiens
gggcccaagaaaaagcaccggacgccagaaaggaggcccacagccgaccgagcggggcaggacacggaagaacaa

SEQ ID NO: 172792 - RNA, 82 nt, Homo sapiens
cacccagccgggcaacagagcagcggaagaggacgcccccaaggggccccgacacagccccaggggaaacccaacccagaga

SEQ ID NO: 172793 - RNA, 83 nt, Homo sapiens
cgccgagcgcaacagcggcgggcggggcaccccaggccgagggagcaacaagagcagaaaggaagaaccacccgcccaggaga

SEQ ID NO: 172794 - RNA, 77 nt, Homo sapiens
gggaggagaccacccaaacgcggcacgggaggacagacgggcagagggggagacgcccggacgagcaggggggagga

SEQ ID NO: 172795 - RNA, 73 nt, Homo sapiens
cgccggccagaggccggcacacggagacacgagaccagaagccaagaaacgaggagagccaccaccaaggaga

SEQ ID NO: 172796 - RNA, 76 nt, Homo sapiens
agaggcacgagagccaagacggaaaaacaaacagccaacagaccaaggaagagcgccggagaggcaggacaaagca

SEQ ID NO: 172797 - RNA, 76 nt, Homo sapiens
gcggaagacccaagccaacccaccaacacggaaaaccgacccaaaaagaaaacaccgaaggaaaagggggaagggg

SEQ ID NO: 172798 - RNA, 71 nt, Homo sapiens
acaaaagcagaggcggacagagcagacacccgaagagagaagaaaagaagacgccacaaacaaccaacaac

SEQ ID NO: 172799 - RNA, 76 nt, Homo sapiens
aaaaccaaaggaagaagcaccacgaggaggaacacccgcgcaggcacggacaagaccgggcccggcagcaacggac

SEQ ID NO: 172800 - RNA, 50 nt, Homo sapiens
ccagggcaagagcaaaaggggagcacagacccaaacagacagggaaccgg

SEQ ID NO: 172801 - RNA, 83 nt, Homo sapiens
caggcccaggccccccaccaccagaggcaagacagccggcaggcagcagacaagccgggcgggggcagccggaaacgcggaca

SEQ ID NO: 172802 - RNA, 81 nt, Homo sapiens
ccaaggccacaaaggagagcccgggagagaaggccggcaaagcaccaggcacagcaagcgccgaaagaccagggaaaaaac

SEQ ID NO: 172803 - RNA, 78 nt, Homo sapiens
cagacaggcaccgcgcccacaaagaaaccgcaggaaacgagccgggggagacaacccggagggggagaaacacccaca

SEQ ID NO: 172804 - RNA, 81 nt, Homo sapiens
gcaaaccggagcaacagaagagcagagggaccaccccagaacccgaaacgacaaagccccagagaagagaacgagacccca

SEQ ID NO: 172805 - RNA, 74 nt, Homo sapiens
cacggggcgaaggaggcccgcgaaacgcgggcgcagaggagacaagacagcaggagaacgcgcccccccgccag

SEQ ID NO: 172806 - RNA, 67 nt, Homo sapiens
gaaaagcggaaacaaagagagccagacccaggccggggagccaaacgcaaccgaggaacaaggaggc

SEQ ID NO: 172807 - RNA, 81 nt, Homo sapiens
ggggcagggcccggccccgaccccgcggccggacgacccaagcccgcgagcaggagaggggcccaaaacccaaggaacagc

SEQ ID NO: 172808 - RNA, 80 nt, Homo sapiens
ggccggccgcggaacgaaaggaacaggagccgccaggcgacacaccggaagcagaagccgggcaaggagaacaacacaaa

SEQ ID NO: 172809 - RNA, 71 nt, Homo sapiens
ccaggcgccggcccaacaccccaacaagaacaggcagacgcacacaggcccgaacaagcgacaaaaacgag

SEQ ID NO: 172810 - RNA, 76 nt, Homo sapiens
acaccaagaacacaggcacgggagaccgcaagagaagaacagcgagagagccagaggacagcgggcccaagggcag

SEQ ID NO: 172811 - RNA, 39 nt, Homo sapiens
gcgagggacccgcagggagccaccgaacgcaacgggaag

SEQ ID NO: 172812 - RNA, 74 nt, Homo sapiens
ggccgccgcgagcagccaggcggcgggccagcggaaagcaaagacagcggaagccaaagccaccaaggccgagg

SEQ ID NO: 172813 - RNA, 71 nt, Homo sapiens
ccacgcaccgcacaacaagaggccggcggggcgacagcacagggaacaccagaggcgggaccacgggcagc

SEQ ID NO: 172814 - RNA, 83 nt, Homo sapiens
ccggccaggaacagggacagcacccaccccggagggggaccacaagacccacgacaggggagaaccgccagcgacgggaaggc

SEQ ID NO: 172815 - RNA, 42 nt, Homo sapiens
gcccgccggcgcaccagcccagcccagcagaagccccagggg

SEQ ID NO: 172816 - RNA, 82 nt, Homo sapiens
ggaaagcccgaagaccagggggagcgacgcaacaggagacaggagcaccacccaaccgaaagagaccagaagccggaagaaa

SEQ ID NO: 172817 - RNA, 71 nt, Homo sapiens
gcaaaaacaagacggggcgccccacagaggggcgacggagaaaagaaagccagaaggaaggaagcaacgaa

SEQ ID NO: 172818 - RNA, 71 nt, Homo sapiens
agaaagcacacagccaagccagggcaacaaacgcgcagccgaagcgagcgaacaaccaagaaacagaaggg

SEQ ID NO: 172819 - RNA, 67 nt, Homo sapiens
caagaaacaagacaggaaaaggacccgcacacagggacagagaagaggacggagcgaggaggggagc

SEQ ID NO: 172820 - RNA, 68 nt, Homo sapiens
cggccgaccccagggagcaagagcaaagggcagaacacaagcgcaaagagaaacacacaagcagcagc

SEQ ID NO: 172821 - RNA, 72 nt, Homo sapiens
cccggagcagagaaggcccccggcaggcccaagccaggagagcccgaacggagggaaaaagaccgagaagcg

SEQ ID NO: 172822 - RNA, 66 nt, Homo sapiens
ccgacgccaggcagcgcccccaaacgaagggaaggggaaaaaaaaccgaaacagaaggacggaaag

SEQ ID NO: 172823 - RNA, 60 nt, Homo sapiens
gggcacgaggaccagcgggccggagccccgagaaacaacgacgaaagacccacagaagcg

SEQ ID NO: 172824 - RNA, 50 nt, Homo sapiens
ccccggagagcgggaacagcagggaagacacacccaggaccaaccgaaaa

SEQ ID NO: 172825 - RNA, 78 nt, Homo sapiens
cagggcgccgccacgccgcaggaggcggaggacccccgaccggcgggggcccacaaccggggccgaaccaacccacag

SEQ ID NO: 172826 - RNA, 71 nt, Homo sapiens
accgcagacgggggacgcagggaggagcgggacaccccggaagcgggaaagcagagggacaaaaaaaacaa

SEQ ID NO: 172827 - RNA, 74 nt, Homo sapiens
caagcaaagggacaccaccagcagggcccagagagcaaagcccgaggacggacccggccaccagacagaaccag

SEQ ID NO: 172828 - RNA, 36 nt, Homo sapiens
gaagcagcgcacgccaggcacggccaacacccaaac

SEQ ID NO: 172829 - RNA, 68 nt, Homo sapiens
aagggaggaaaagggcagggacagcgcaggcagcagagcggcacgagggggagcaagagaacaaccgg

SEQ ID NO: 172830 - RNA, 86 nt, Homo sapiens
aaccagagccacccgggagaggaagagcgaggaggaacgcgcaaggcaaagcaccggcccccggcagagggcagagagaggccggc

SEQ ID NO: 172831 - RNA, 83 nt, Homo sapiens
ggaggaccgcacgagaaggagcgcaagcaccagaaggaggagacacacagccccagacgggaggaaaaaaggaaggaccgcga

SEQ ID NO: 172832 - RNA, 67 nt, Homo sapiens
agcagaccagccggacaacgaggcccacaagcgaaagccgacaggagggaagaaaccagacaagaaa

SEQ ID NO: 172833 - RNA, 62 nt, Homo sapiens
gccgcggcaaggcaagagcggcggcgccaaggccacacgccaacgaggacgacaagcgacac

SEQ ID NO: 172834 - RNA, 69 nt, Homo sapiens
agagcagggagacggaggaggaggagaagaagagagacgcgcggaaccacaggaggcacacgagcgggg

SEQ ID NO: 172835 - RNA, 83 nt, Homo sapiens
aaacaggaagaagaggccaacaacggccccaagggacacggaacccaaggagacgaagcgaagcaggagaaggaggggaaaaa

SEQ ID NO: 172836 - RNA, 71 nt, Homo sapiens
aagaggggacagaaagaaaacggcaaaggcagccgaggaccccaaccccgagcgcggaccggccagagccc

SEQ ID NO: 172837 - RNA, 65 nt, Homo sapiens
gaacagacacggcaggaggcgccaaagggcgaggcccaccagagcaaaacgcggaacgaaagagc

SEQ ID NO: 172838 - RNA, 79 nt, Homo sapiens
cgcagccaagcgccccggcgacagcccagacgggaaagagaaaggagaccacaagaccccgcgccaccaaagggagggc

SEQ ID NO: 172839 - RNA, 48 nt, Homo sapiens
acccgggccagcgggcgaccggcccgaggaccgccgcacgaccaaacg

SEQ ID NO: 172840 - RNA, 74 nt, Homo sapiens
cccgcccgcagaagagagcgaccggagcggggaacacgaggaacccaagacacggcccgggaaaacaagcaggg

SEQ ID NO: 172841 - RNA, 85 nt, Homo sapiens
cccggcgggagccccgcgacgcgcccggcccggagcccccagcgcagcggccgcgccgcgggcggcaccagcgccccaggccaac

SEQ ID NO: 172842 - RNA, 65 nt, Homo sapiens
gaggcagccgcagaacggagcggcccaagcgggcgagcccagggaggcgcccgcccacagccggg

SEQ ID NO: 172843 - RNA, 80 nt, Homo sapiens
gccggaggggcggcagagacaacccagcgacaccagcagcgggcaaggagggggcaccacagggaccgagccgcaacacg

SEQ ID NO: 172844 - RNA, 34 nt, Homo sapiens
ccaggcacgcacaaaaaggaaccgcggcgccaag

SEQ ID NO: 172845 - RNA, 71 nt, Homo sapiens
gaggaagggcggcggaccggacggagaggccgcccacggagcgcagagccaaccccaagccccgcaccgga

SEQ ID NO: 172846 - RNA, 72 nt, Homo sapiens
acaaagcaaaagaacgagacgacgccaagaaacccgggccgggaagaccaacacgcacgaagggaacacacg

SEQ ID NO: 172847 - RNA, 78 nt, Homo sapiens
gcaggacgcagcacgcgcacagaagaaaggcagagaccacaagaaccaggagagacccagagccagcgcaggggaagc

SEQ ID NO: 172848 - RNA, 88 nt, Homo sapiens
cccgacggggcgcgcgcgaagcgagcgagaaggcacggagcgccgcggagcgcagggaacgaagcccaaaaggcagagacggaccgag

SEQ ID NO: 172849 - RNA, 85 nt, Homo sapiens
cgagccagccaacagcagaagagaaagccagaccacggacggaagacaaaagaggaaagccacacgcccaggagaagagaagcgc

SEQ ID NO: 172850 - RNA, 81 nt, Homo sapiens
gagaccaagccacagaacggcaaagaaggaggaccacgaaggcagggaagaacaccgcgcccaggcgcgaagccaagaccg

SEQ ID NO: 172851 - RNA, 77 nt, Homo sapiens
gccagcccccaggagcagacagcacaagacccgccagaggcacagccccaggaccccaccgaagcccgggcaggcga

SEQ ID NO: 172852 - RNA, 67 nt, Homo sapiens
cgcgccccgcgcgcccggcggcgcgggccaagcaggccgcggggcagcgagcccccgaggcccaacc

SEQ ID NO: 172853 - RNA, 71 nt, Homo sapiens
ccagaccgcgcgccaagccgcacgcaaccaccgcccggccacaccaggggacaagagaaaaaaagggcggg

SEQ ID NO: 172854 - RNA, 83 nt, Homo sapiens
accccaacgcgcccgggcggcaagacggacccacggagaagggaacgcggaaaggaaaggaggaggacagagccggagaaaag

SEQ ID NO: 172855 - RNA, 82 nt, Homo sapiens
ggaccccaaagccagaccaaagaagccacacacagaagacccaaagagaacacaggagaggcaagaggggaaagggcaagaa

SEQ ID NO: 172856 - RNA, 38 nt, Homo sapiens
gcagaacagaaacaaggcggacccggacgacaccaaag

SEQ ID NO: 172857 - RNA, 78 nt, Homo sapiens
acccaaacaaggaaagcccgcaccaaggggagaacgggaaacccagacgacaaggaaggccaagggacccacgaccaa

SEQ ID NO: 172858 - RNA, 71 nt, Homo sapiens
aaaagcagacaaacaagcaggcgggacaacacaagggaaccaaggagggcgccgcgggcgcgccgccggcg

SEQ ID NO: 172859 - RNA, 82 nt, Homo sapiens
gaggccggcgggacgcgggcgccaggaccggccgaacgcagagggccaaccgccccccagcagcaggcacgggcgaaccccg

SEQ ID NO: 172860 - RNA, 64 nt, Homo sapiens
gcgccaccgcgccaccccgcgaggccagaagcggacccagaagaggggagcagcaaggaggaag

SEQ ID NO: 172861 - RNA, 65 nt, Homo sapiens
cggccgaaacagaaaacaagagaccacagaagggcccggcaggaaccggaacaacccacagggca

SEQ ID NO: 172862 - RNA, 60 nt, Homo sapiens
ccggaaccccggggcaccgcggggaaagaagaacggaccgaagccaaagaacaagagcgc

SEQ ID NO: 172863 - RNA, 78 nt, Homo sapiens
cgaaggccacaaagaacaggggggagaagcgaccgaggccggccaggaggacagcaggaacaggcggaaacaacggcc

SEQ ID NO: 172864 - RNA, 35 nt, Homo sapiens
acaaagaaagacggacggcggagaacggaaaagca

SEQ ID NO: 172865 - RNA, 75 nt, Homo sapiens
ggagcgcgccgacccgaggagaaccagcggagaggagagagccggagggcaggaagccgccaccaggaaccccaa

SEQ ID NO: 172866 - RNA, 39 nt, Homo sapiens
agcaccaaagcgcgccaagagggacgaagggaacccgcc

SEQ ID NO: 172867 - RNA, 75 nt, Homo sapiens
ggaggaaaacaaccgagggcagacggggcaagcgcccagcagaaacaagccacgggggacgccgagcgacggacg

SEQ ID NO: 172868 - RNA, 79 nt, Homo sapiens
aagcccgccggccacccagaagcacggcaacagccaaacaggggcgaaagacggaaaggcccagaggacgaccgccgaa

SEQ ID NO: 172869 - RNA, 74 nt, Homo sapiens
aaaccaccggaacggcgaagaggcaccaaaaagaaccgcagacagggcgagcaacggcccaaccaacccccgga

SEQ ID NO: 172870 - RNA, 62 nt, Homo sapiens
agcgccgacagaccccagcgggcacaggcgacagccgaagggcaaggccagagaaggcggga

SEQ ID NO: 172871 - RNA, 33 nt, Homo sapiens
cagaggccgcgagcaaggcggaggcaaggggac

SEQ ID NO: 172872 - RNA, 90 nt, Homo sapiens
cagaccaccgaggaggaaaacgggcacaggcccacagagggggcaagcacacagaaaagggaaggacgaacaagaaccaaagaagacaga

SEQ ID NO: 172873 - RNA, 69 nt, Homo sapiens
acgggaaaccggcggccagcaggccgcaagaaacccaggaaagaacaggcaaaagagacacagcagacc

SEQ ID NO: 172874 - RNA, 93 nt, Homo sapiens
ccagggccgcggggaccgaaaggacagaacaggaccggaaagaaccccgaacaggcccaagggccggcagagagacaaccccaggcgcacgga

SEQ ID NO: 172875 - RNA, 54 nt, Homo sapiens
cacgccgcccggggccagacccccgcggagacgaccgcagccccacaaggcgcc

SEQ ID NO: 172876 - RNA, 69 nt, Homo sapiens
cggacccggagcgacaagcgccccgacggagcgccaggacggcccggaggggaccgaagacaaccgcaa

SEQ ID NO: 172877 - RNA, 78 nt, Homo sapiens
gcgcgagggcgggggcagcggcagcggcggagaaaccaccacaaacacgaggccagcaacgaccaacaagacagaccc

SEQ ID NO: 172878 - RNA, 35 nt, Homo sapiens
ccggagagcgggacacagagcacaggcccggcaac

SEQ ID NO: 172879 - RNA, 77 nt, Homo sapiens
aggcgagcccaaacaggagcaggaggcagacagaaaggggaaagaaaagcgcaacagaagaacaagccagaaaaaca

SEQ ID NO: 172880 - RNA, 74 nt, Homo sapiens
gaagccacggcagacacacaacccgacccgacgacaaaaaccgcagcccaaagccgaaccaaagcagaagcaaa

SEQ ID NO: 172881 - RNA, 68 nt, Homo sapiens
aacagaccaaagaccacgaccgaccgcaaaaaccaaggcgccaagcccacgggcgcaccaacggagag

SEQ ID NO: 172882 - RNA, 79 nt, Homo sapiens
cacagaaagaagccagcccggcaagagcaccagaagcggccgaggcggcaaagaaacggagcagaaagcccagggcccc

SEQ ID NO: 172883 - RNA, 79 nt, Homo sapiens
gacaagacggcgcaccacggggcgaggaagcgccccgaaacccccagaagacacgccgcagaggcccaccacgcgaggc

SEQ ID NO: 172884 - RNA, 77 nt, Homo sapiens
aagaggaccaggagcaaacagaaggccgggaggaagggaaggggccgacgcgggcagccacgccagaaggccaagaa

SEQ ID NO: 172885 - RNA, 80 nt, Homo sapiens
acagccggaagggcggggggcgggccggaggggagacgggaggcaggcgcagcgggaagaggcacacccccggaaggacc

SEQ ID NO: 172886 - RNA, 81 nt, Homo sapiens
gaagcgaaaaagcagcaccaacaccccaggaagacaagcaacggccgcaaacagcagaaaaggggccaaagaccggacaag

SEQ ID NO: 172887 - RNA, 60 nt, Homo sapiens
aaaagagcccggaaagaagagacagcgaggagacaacccccagagaagaacggcacacac

SEQ ID NO: 172888 - RNA, 71 nt, Homo sapiens
ggcacgagaacgggacccggccagaggaaagaacccgagacccccaggcaaaccgccccgcagcaccaccc

SEQ ID NO: 172889 - RNA, 74 nt, Homo sapiens
caacccgccaaggagccaccggccacaaggcccgaggggaaagagggggcagacccggaagccgaaccaacgga

SEQ ID NO: 172890 - RNA, 79 nt, Homo sapiens
cggccggggcggcgcgacggcgggcgcaggagggagagcacggcgcaccaacggcagagaagcacagcacaagcgagga

SEQ ID NO: 172891 - RNA, 78 nt, Homo sapiens
cggcccgcgcccgcccccgggagcccgcacggaccggacgcagggagggccaagaaccccggaggagggaaagccgga

SEQ ID NO: 172892 - RNA, 79 nt, Homo sapiens
ggcgcccgggagcggccggagacgccaggacggagaagaagacaaacggcagcgcaagacacccgaggggccgaggcaa

SEQ ID NO: 172893 - RNA, 71 nt, Homo sapiens
ggcccagaacagcaagagaagacgacaacggagacgcgggaaccggcggggccggcagccccgagcccccg

SEQ ID NO: 172894 - RNA, 79 nt, Homo sapiens
gcagggcaccgcgcgaagcggccaaagccgcccagacggccaccggcgggaggaacaaaagcagcccagcacgaccagg

SEQ ID NO: 172895 - RNA, 80 nt, Homo sapiens
aaaaggcgacgcacacaacccccgaaagcggggccccaggacccggacagacccaaaagggaaaaaggaaaaccagaagc

SEQ ID NO: 172896 - RNA, 78 nt, Homo sapiens
gacgcacacaggagagccaggacagccacaccccaagagacgaacaccacgacgaaaggaaaagaagagaccgggagg

SEQ ID NO: 172897 - RNA, 33 nt, Homo sapiens
gcaggacgcacaggagagcaacaccgagacaac

SEQ ID NO: 172898 - RNA, 77 nt, Homo sapiens
gcccgcgcagccgagagccgggggagcggggccccacacccccccgggggggccagagacgcgcacgaaacgacgaa

SEQ ID NO: 172899 - RNA, 69 nt, Homo sapiens
gcgaagacaaaaaacccaagaacccaaagccaacaacaggcccaccacgcggggaggggaaaaccgcgg

SEQ ID NO: 172900 - RNA, 58 nt, Homo sapiens
cccgggcggcggggagggagggggagaggcaccagcaacagaccaaccgcagcaagca

SEQ ID NO: 172901 - RNA, 58 nt, Homo sapiens
cacccggggagcccccacagccaagacacagggacgacccagcgagcccaccaaaggc

SEQ ID NO: 172902 - RNA, 62 nt, Homo sapiens
ggcaacagacggaccaccaccaaccgggcagcagaagaaccaggacaagaacgcgccacaaa

SEQ ID NO: 172903 - RNA, 83 nt, Homo sapiens
gcagcgcagccgccgaccacggcgacggacacgaggagcagaagcaggcaccgccagggaggagagcggggcacgcgcccaac

SEQ ID NO: 172904 - RNA, 69 nt, Homo sapiens
accagcccgaaacccgacaggaaggaaggaaccaagcacccagggaacaccagcacgccaacaggccac

SEQ ID NO: 172905 - RNA, 59 nt, Homo sapiens
gaccgcggaacaaacagaagacagccacagcagaaacacacaaaccaagggagacaaag

SEQ ID NO: 172906 - RNA, 72 nt, Homo sapiens
ggaaccgccagcaaaccacacagacagaagcgaaggggacagggggagaaccgccagggaaacccgggggac

SEQ ID NO: 172907 - RNA, 78 nt, Homo sapiens
cccgcggagcgcgcagcccgcgccccccgcccccccaccgacacagcccagccgcaagacagcaggacacagcgcacg

SEQ ID NO: 172908 - RNA, 72 nt, Homo sapiens
gacagccaggagcacagaggagggggccgaggagacgagacggggagcgcagagggacagaccggaaaggac

SEQ ID NO: 172909 - RNA, 86 nt, Homo sapiens
aggcgaaaggaagcaagcagcagaagagccaaggaaaaacagcaagaacccaaaaggagcccaacgaaagggaaggcagaacagcc

SEQ ID NO: 172910 - RNA, 57 nt, Homo sapiens
cggccccaccgcaggcaccaccacaaggggccgcggcccaccaggacccagaagcgc

SEQ ID NO: 172911 - RNA, 79 nt, Homo sapiens
cggaggaggaagagggggcacccagcacacccaagacgcggcaacagagccgagacaacccaacggagaggcgggaaac

SEQ ID NO: 172912 - RNA, 78 nt, Homo sapiens
ccgaggccggccccccacgcgcacacaagggagcccccccaccacccccgaagcaaagaaggcaaaggagcaagcaag

SEQ ID NO: 172913 - RNA, 66 nt, Homo sapiens
agagggagagccaaagaaggaaggagaagagcagccaggcaacagggaagcgcagcaacaaggagg

SEQ ID NO: 172914 - RNA, 77 nt, Homo sapiens
gaacaccaggcaccagacaccgagaccccggagcacacgacagcagcaaaaaaaagaggccgcacagcgaaagaaag

SEQ ID NO: 172915 - RNA, 53 nt, Homo sapiens
ggggaggaggcaacgccgcggcgcccgcagacgcagaagaccgcagagccgcg

SEQ ID NO: 172916 - RNA, 81 nt, Homo sapiens
ggcgcaggacgggcacagcagagaccaaaggcagggcaaggaaacggccacaagaagaccgaggagcagggagcaaccaca

SEQ ID NO: 172917 - RNA, 74 nt, Homo sapiens
accaccacagagcgggaagaggggcgagaaaggcgaaaagcgaagacagccccgcggaaggacaaaagcacaca

SEQ ID NO: 172918 - RNA, 54 nt, Homo sapiens
ggccacccccccggagcccggagcaaggagacggaagcggaagcacacgccaga

SEQ ID NO: 172919 - RNA, 91 nt, Homo sapiens
cagacggagcaaagcccccacgcccagccaggagcaccgccgaggacccagcacaccgaggagcaagaacgaggccaaggaggagggacac

SEQ ID NO: 172920 - RNA, 72 nt, Homo sapiens
gccagagcaaggggaacgccacggacggggccaacggggcaacaaaagaaccggaaaaaagaacaggggaag

SEQ ID NO: 172921 - RNA, 79 nt, Homo sapiens
aggaggaagacgaacgaaacacaggcaggcgcagccaaacggagcagggagacgagcccagggccaaggggcgaaaaga

SEQ ID NO: 172922 - RNA, 75 nt, Homo sapiens
gcggaggccgccgggagcccacgaccagccggcaccgggaggcgcgaccagaagaagaacaaacagcagaaagaa

SEQ ID NO: 172923 - RNA, 78 nt, Homo sapiens
gccgcgcgcgcaaccccaagagcggagacacggggaaacgcagagcaaagaggcccaggaccggaccccgacggagag

SEQ ID NO: 172924 - RNA, 76 nt, Homo sapiens
ggcaacagaaagagcaacagcagggcaacagcacgggcccagacgcagacaaacgagaagagagaagagggacaga

SEQ ID NO: 172925 - RNA, 81 nt, Homo sapiens
gcgagcaaacccaagagcgaggcgccgcgacccaaccgaggaagcaccagcagaagagggggcaagggagacgaagaaaga

SEQ ID NO: 172926 - RNA, 80 nt, Homo sapiens
ggaccgcaccggggacacgcgcagaaaccaaccgaagggagaggagcagacaagcacgacgaagaaccagaaaacggggc

SEQ ID NO: 172927 - RNA, 68 nt, Homo sapiens
agcaagccaaccaaaaccgaacagagcccaccgaagaccgaaaaaaccacggaaggccccgaccgagg

SEQ ID NO: 172928 - RNA, 81 nt, Homo sapiens
cgccgcagcacagcgccaggacaaacggaccccgcgcccacccaacaaggcaggcgaaacagcaggagagggaagaggaaa

SEQ ID NO: 172929 - RNA, 82 nt, Homo sapiens
cccgagccgggcgggccagaacagcccaagaggccgaccgagacgggcggagaggagaaggaccagaacagagaagaaagca

SEQ ID NO: 172930 - RNA, 69 nt, Homo sapiens
gccgcggggcggaggcaccgcgcggggggacagaaaacgggccccagacacaagccccaccaagaggac

SEQ ID NO: 172931 - RNA, 72 nt, Homo sapiens
aacacagcaacgccggagcaagccaccaacaagaagaggcccagacacagacacacaaaaagcccagccaaa

SEQ ID NO: 172932 - RNA, 77 nt, Homo sapiens
ggcagacgggaaagggggccaaggccgggccaccagaggacagaagcaaaaagcgggccaggcagcaagaacagaca

SEQ ID NO: 172933 - RNA, 74 nt, Homo sapiens
aaccagagggaaacggcacaccaggcggcaggggcaaccagacgggccaagaagccgggcaaggagaacaacac

SEQ ID NO: 172934 - RNA, 79 nt, Homo sapiens
caggcacaacaaccaagaaaaacgggggccgccgccaagaccagcagaagagacacgggagcaccagggcggcagaagg

SEQ ID NO: 172935 - RNA, 82 nt, Homo sapiens
cgggaggccaccgccagggacaagggagaagaagccacaccaaaccaggccccagaccaacacagacacaggccgcgaggcg

SEQ ID NO: 172936 - RNA, 69 nt, Homo sapiens
gggagccgccgccggagcgagaacacgggaggggggagcccagagaggaccagaaggggcacaggaagg

SEQ ID NO: 172937 - RNA, 75 nt, Homo sapiens
ggccagcacgccaccgggaaggcggggaggaggccccaaagggcgaggaccagaggaaggcggggaggcggaaga

SEQ ID NO: 172938 - RNA, 78 nt, Homo sapiens
gagggggcgggggcccaacgcgggacaggaagggccgagcggcgggaaaggccaggcccaaaaggaagaaggaagaga

SEQ ID NO: 172939 - RNA, 63 nt, Homo sapiens
accaggaggcgagcaacagaggaccacagccggaaggcagcgcccgcagacaacgaggccaac

SEQ ID NO: 172940 - RNA, 77 nt, Homo sapiens
aaccagaggccccagaccagagcccccgagaagagaaacaggcaagacccacaaaccaccaccaacacagaaagcca

SEQ ID NO: 172941 - RNA, 81 nt, Homo sapiens
agggagggcccagaagaaggagacccagaaggccacgaggagggcacgcggaggagacgaagaggaggccggcagaagaaa

SEQ ID NO: 172942 - RNA, 74 nt, Homo sapiens
ccaggaacagccccgggcagcaagaaaccacagcaacagaacagccgagagacggaaaagaacaaacaacacaa

SEQ ID NO: 172943 - RNA, 114 nt, Homo sapiens
gagacgagaccagaggccgaaccgggcgacaagaggccgggcgccccgcaggacacaagggcgcgggagagcagccggacccagaccagggagcccaggaggaggaaggaaccc

SEQ ID NO: 172944 - RNA, 81 nt, Homo sapiens
ggaaaaggagcagaccggacgagagagagcacaaggagagaacaggggggcccacacgcccccagcgcgagaccgagccaa

SEQ ID NO: 172945 - RNA, 69 nt, Homo sapiens
gaaaaggagaagggaggccaaggcccccggggaaagagcaaaaaccccgaaagggaaaagccaacagag

SEQ ID NO: 172946 - RNA, 77 nt, Homo sapiens
ggggccggggccgcgcgggccaagcgccggcgcggcgcggcgcggccaaggcggacccaggagacaagagaaaaacg

SEQ ID NO: 172947 - RNA, 55 nt, Homo sapiens
aggccgacccgaccggaccagacaagacaagcaggggaccaaaacaaccccggaa

SEQ ID NO: 172948 - RNA, 62 nt, Homo sapiens
ggaaggagaaggagggacgcaggcgcaggccagcccagagaaacagagggcaaagaggacca

SEQ ID NO: 172949 - RNA, 73 nt, Homo sapiens
gacacaacacagacggggagcacaggcagaccaagaggcccagccaagacgcaggcagagacgacaacccggc

SEQ ID NO: 172950 - RNA, 59 nt, Homo sapiens
ggaaagccgcacccaagccacagagcaagggccagagaaggaggagaaggagacaggcg

SEQ ID NO: 172951 - RNA, 81 nt, Homo sapiens
ggcggaagcgaggaggcccacacggccggcagcaccgcagccaggcgagagccacagaaggaggaggggacagcagcagga

SEQ ID NO: 172952 - RNA, 50 nt, Homo sapiens
gggacagcgcaggcagcaggcgcacgcccccagccccccccgcccaccag

SEQ ID NO: 172953 - RNA, 84 nt, Homo sapiens
acacagcggaaaccgaagaaccaccggcgcaccacacagaggacagcaaagggagaggaagccacggggaaaggacaagagcca

SEQ ID NO: 172954 - RNA, 61 nt, Homo sapiens
agcaaggaagcccgaaggggaggagcgaccaggaagaccacagaagacggcccagcagagc

SEQ ID NO: 172955 - RNA, 50 nt, Homo sapiens
aggacagccaccagcgaacaccagcaccacccaaacggcgggcgaaaaag

SEQ ID NO: 172956 - RNA, 82 nt, Homo sapiens
gcccgccaaccccggaccccgcggccggggcagcggcgccgcgccgcgcccgagggagcagagcaccggccagaacaagcca

SEQ ID NO: 172957 - RNA, 84 nt, Homo sapiens
gagagcaggcccggccgagcaaccgaggccaaaagaaaggaagaaaacccccaaaaagccaaaaggccaagacaagaagaagga

SEQ ID NO: 172958 - RNA, 82 nt, Homo sapiens
cacaaacagaaacacaagaagcagccagaaccacaccgcaggccaccgacgacacagaaaaagcaccgaaggacagaagagg

SEQ ID NO: 172959 - RNA, 85 nt, Homo sapiens
gcccgggcccgaggaggcagccaagccgagccgccacccggcgggcaacgaggaacaggccaagaaacaacacagccaaggccag

SEQ ID NO: 172960 - RNA, 36 nt, Homo sapiens
gcccgggcaccacagaaaaggaagagagaaggcgaa

SEQ ID NO: 172961 - RNA, 80 nt, Homo sapiens
aagccagagcgaggacgccggcagggcccaccgcaccggacgacgggggacacagaacgcaagaccaccgcgacacaaaa

SEQ ID NO: 172962 - RNA, 78 nt, Homo sapiens
aaaggaagccaagaacaagcacaaagccacagcgaccaagccagaagaaagagagaccagaggagaagagaagggcgg

SEQ ID NO: 172963 - RNA, 75 nt, Homo sapiens
cgggccgcccgacggcggccaccgcaacggggcggcacacaaggagcgaagggcagggagaacgccaggcacagc

SEQ ID NO: 172964 - RNA, 36 nt, Homo sapiens
gcgggggagaagcgcgccaggccaagccgacgccag

SEQ ID NO: 172965 - RNA, 77 nt, Homo sapiens
acaaggaacggagcaaaaagacggaaaaaacccaggaccaaaacagagaaaggagaccaagcgaagaacaccgcaga

SEQ ID NO: 172966 - RNA, 77 nt, Homo sapiens
ccccccaggggcgccacccaaagacggcacggcagaaaaagcggggaaggggggcaaaaaaaagaagcaagcgaagc

SEQ ID NO: 172967 - RNA, 81 nt, Homo sapiens
cgccccgccaggcgccccggacagagcaagcccccgacagccagccagacccccaggcagagggaaacaacacgaggagga

SEQ ID NO: 172968 - RNA, 97 nt, Homo sapiens
cgccgcgaaggcggaggcccaggcccccagcgagggcagcagcgcccaagaggagcaggcaaaagggaaagcaaggggaagggcccaagaagacacc

SEQ ID NO: 172969 - RNA, 82 nt, Homo sapiens
gcggcagcggccggagccgggccgggcagcagcagggcgccggcgccccccccaacccaacggcaccaaggaagagagaagg

SEQ ID NO: 172970 - RNA, 74 nt, Homo sapiens
ggcagagcgagccggagaagcaggggggccaggaggggagaggaggcaggcccgcggccagcgcgcgggaggaa

SEQ ID NO: 172971 - RNA, 83 nt, Homo sapiens
agccggaagcaacacgcagaagcacaagccagcagacgacaacaggcgcaggagacacagcaaagacgcaagaacggaacgaa

SEQ ID NO: 172972 - RNA, 72 nt, Homo sapiens
gcccgaacacacaccgacgccgacaaccccgaaaccaaagagaagcagcgaagacagaagagcaacgaagca

SEQ ID NO: 172973 - RNA, 72 nt, Homo sapiens
ggagacacgagcaaaaacagccacccaagcccagcaaggacaaaggccggggagagcaaaaccagcaccacg

SEQ ID NO: 172974 - RNA, 59 nt, Homo sapiens
gccgaacccgcggccaccgggaaaaggaaaccagacgacaaaagaggaaaaaagccaga

SEQ ID NO: 172975 - RNA, 75 nt, Homo sapiens
cgccgcagggaccagacgcggcagcaacaggagacccggggcgaggaccccaagccagggccaccgcaccaggcg

SEQ ID NO: 172976 - RNA, 101 nt, Homo sapiens
caaaacacccagcaagaaaacaaagccagaaaccaaagcccgggggacaccggaaaggaagacacaggacaaagcagaaaacggagaagaagagcagggcc

SEQ ID NO: 172977 - RNA, 61 nt, Homo sapiens
cagacacacagaagaaaagccagcgagaagaccgagaggccgcgacccaacaccgcaacgc

SEQ ID NO: 172978 - RNA, 68 nt, Homo sapiens
aaacggcaaagggagagcaggcggggcaagcagaaaacaagccgacagaagaaagcagacagagagag

SEQ ID NO: 172979 - RNA, 62 nt, Homo sapiens
gccggggacccggacaagccggagcagacggcagcacgggaccagaacagagaagaaagcag

SEQ ID NO: 172980 - RNA, 72 nt, Homo sapiens
ccaagaaaaaaaccacaaagcggccgaaacagaaaacaagagaccacagaaggcgggggagcgggaggagcc

SEQ ID NO: 172981 - RNA, 74 nt, Homo sapiens
caaggcaaaaaaaggcagaccaccaaggcaccaaggaaaggaacagagcgagagaaagaacagggcagcaaacg

SEQ ID NO: 172982 - RNA, 74 nt, Homo sapiens
caccaggcccaagaaacggccggcagccaggcaccgacacgaggcccaggagagaggagccgggcacgagaaac

SEQ ID NO: 172983 - RNA, 70 nt, Homo sapiens
gaccagccccacagcagggccccaggacaaaaagagaggggggaggggcgcaaaacgagaacaaagccaa

SEQ ID NO: 172984 - RNA, 69 nt, Homo sapiens
gggggcagagggcagcaagaggcgcgcagagggcgcagggcggggaggagagagaccccacgggacgcc

SEQ ID NO: 172985 - RNA, 75 nt, Homo sapiens
acccagagagcagagaaacagaaaccgagcacacgccgaacacaggcagcaagaaaggagccaccacacccaggc

SEQ ID NO: 172986 - RNA, 83 nt, Homo sapiens
aaagcagaaggacaggacacagagcccacaagagcacaagccggggagagccaaagacaaaagcccagaacgcccccagcggc

SEQ ID NO: 172987 - RNA, 65 nt, Homo sapiens
accaaaccaagaggcggccagcaggaggcgagaaggaggacggagccgagaaggagaacacccgc

SEQ ID NO: 172988 - RNA, 74 nt, Homo sapiens
caccacaaaaccacagccaaggggccagcacgaaagcagccaggagaagagcacaagaaacaagagccagcagg

SEQ ID NO: 172989 - RNA, 81 nt, Homo sapiens
aagggacagccgagcgggaggcagggggacgacaaggagggcagacaacccgcagccacgcgagaggacggggacgggccc

SEQ ID NO: 172990 - RNA, 75 nt, Homo sapiens
gcccacagagaacaaggagccagagggccgccccccgggcgaggcagagacgccaggggcaaagcgcgggaagcg

SEQ ID NO: 172991 - RNA, 76 nt, Homo sapiens
agaccacagcaagacgccgggaccccggaaaccagaaaggagcgacaaggcggaacagaaaccagagagcacagaa

SEQ ID NO: 172992 - RNA, 86 nt, Homo sapiens
gaaaggcgagccccaaaaggcacaaagaaccaagagggagacaagggaaaaggaagacaaaaaacacaaggaaagaacccagaaag

SEQ ID NO: 172993 - RNA, 69 nt, Homo sapiens
aacgacgcggaccagaagccagagcgaggacgccggcagcggagcaacaccccgcaccgggaaccgcgg

SEQ ID NO: 172994 - RNA, 55 nt, Homo sapiens
cacaaacaggccagaggaccagccgccgaccagcagggcggagaacggaaaagca

SEQ ID NO: 172995 - RNA, 70 nt, Homo sapiens
ccgaaacaggccggggcacagcacagcgccggcgcaaggccgcacccagaggaagagggcccggcgggcc

SEQ ID NO: 172996 - RNA, 78 nt, Homo sapiens
gccgcacgccagagggcccgggggcgggcccgcgcgccgcgacccgggacaagacggacagaaacgaacagcgggcga

SEQ ID NO: 172997 - RNA, 75 nt, Homo sapiens
cagcgggcaaggcagaccggaccacaaaaaggacaccagcaagcgcaagaggaggagaagcgcccgggaccaccc

SEQ ID NO: 172998 - RNA, 71 nt, Homo sapiens
aggggggcgcacacaccaggagccgcacaaagcgcaggaagaggagggaccacggaacagaacccggaaaa

SEQ ID NO: 172999 - RNA, 78 nt, Homo sapiens
gcccagccagcacgccgggaagggcagacgccgagaaggccgcgcggacccaccaccccacacgccagcccggagccg

SEQ ID NO: 173000 - RNA, 76 nt, Homo sapiens
gaaccggccagccagggccgggccgcgaccggccccggagcacaggcccggggacacgagcggccccagcgcccgc

SEQ ID NO: 173001 - RNA, 57 nt, Homo sapiens
aaggagcaggaaccaaagggggcgacccaggcacgggagacggggggaaacaccccc

SEQ ID NO: 173002 - RNA, 77 nt, Homo sapiens
gaagaaggcccagcccaccaggagggcggagacagaggagacacagcaccagggcacagcagccgcaacccagcaga

SEQ ID NO: 173003 - RNA, 88 nt, Homo sapiens
agaaggcggcggcccggccgcagcggcaacagaacgaaaaacagggccccaggaggcggcccagggaccggaggacgcgcgccaacgg

SEQ ID NO: 173004 - RNA, 81 nt, Homo sapiens
cggccaagaagacacaaaggacggaggcacggagcaggaggagaagaaaccccaagaccagagggcagcccagaaagagaa

SEQ ID NO: 173005 - RNA, 82 nt, Homo sapiens
ccgccaccagccgggcaccggggagccggccggacacgccgaacacccaacaagaaggcaacgacaaacagccaagcaagcc

SEQ ID NO: 173006 - RNA, 90 nt, Homo sapiens
ggaggccaaggcggagaacccaagacgccccaaaggaagagacaccccaagccaagcgagccagcccggcagccggagagccacccggag

SEQ ID NO: 173007 - RNA, 84 nt, Homo sapiens
gccgccaccacgcgcgggcgggcagccccgggccaggccgcggccggggcaggagcgcagagaggaggcagagagccccgcgac

SEQ ID NO: 173008 - RNA, 71 nt, Homo sapiens
agcagcagaacggacagggcaaggaagagaggcacgcccaagcagcccagaaccgcaccgcccaaaagcag

SEQ ID NO: 173009 - RNA, 75 nt, Homo sapiens
cagaggcgcggggcgccggagaccggccgcagggggaagcaagaagcacagcacaccggacgggaaacagccaga

SEQ ID NO: 173010 - RNA, 75 nt, Homo sapiens
gaccgccaaaaaggacacggagccaggcaagagacagcacgcacgccgagccaggaccaccagaggaccaaggcg

SEQ ID NO: 173011 - RNA, 75 nt, Homo sapiens
gacccagcaaagggggaagccaggcgcggaagaagccaaaaagccccgacaggaccgggaggaaggcaagggcca

SEQ ID NO: 173012 - RNA, 41 nt, Homo sapiens
cggcgcagcgggcgcggagggcacgcccccgaagaccgagc

SEQ ID NO: 173013 - RNA, 77 nt, Homo sapiens
cagaggccccgggacacccgaacaaagcacacaaggaagacaggaggccagagcgaccaaaccgcagcagagaacaa

SEQ ID NO: 173014 - RNA, 75 nt, Homo sapiens
cccaccccagcgcgacgcggcgagcccaaaaagcccgcaggggcgagggaggagaccgagccgccaacgagcagg

SEQ ID NO: 173015 - RNA, 48 nt, Homo sapiens
ggacagccaaacggaaacaaggccccgcgagaccggcgcggcggcaga

SEQ ID NO: 173016 - RNA, 80 nt, Homo sapiens
cgacccgcggagacagacaagacaagaccggcggggaagcgaaagacccgaggcaggaaccccacggccgaaagaagaag

SEQ ID NO: 173017 - RNA, 77 nt, Homo sapiens
gcaacgagccagcccgaacgaaaacacagaaaacagcaaagcccgacaaaggaaaaagacgaccgccaaacgaaagc

SEQ ID NO: 173018 - RNA, 77 nt, Homo sapiens
ccacacccccccggggggggggaccagaagccaggagaggcgccgggacgggcgcacgccacgcaagaccaacacgc

SEQ ID NO: 173019 - RNA, 55 nt, Homo sapiens
ccgcaacgaaaaccggaaaaggaccggagagaacagaaaaaaagcggcccgggac

SEQ ID NO: 173020 - RNA, 85 nt, Homo sapiens
cgcgcccgaggcgaggaggagcgcggcggagggagagcacggcgcaccaacggcagagaagcacagcacaagcgaggagccacca

SEQ ID NO: 173021 - RNA, 67 nt, Homo sapiens
cccccacagaaaaggaaagcaacggggcggcacacaaggagcgaagggcagggagaacgccaggcac

SEQ ID NO: 173022 - RNA, 56 nt, Homo sapiens
cgccgaacacgacggcacagggggggacccaaggaccagacgaagagaaagccggc

SEQ ID NO: 173023 - RNA, 84 nt, Homo sapiens
agccaagaggcggacaaaacgccaggcggaccagaaggccagcaaagggcgccaggcgcccagcggcccagaggagggacagag

SEQ ID NO: 173024 - RNA, 77 nt, Homo sapiens
gcaggaggcaagaaaggggaaccccggagaaaaggccaagaaggcagaccccaaggaagccgggcacaggcggagag

SEQ ID NO: 173025 - RNA, 71 nt, Homo sapiens
ggagcccgcagaccgcagaaggccggagacaccagcagcggcggagaaaacggaagcgggcccgacacagc

SEQ ID NO: 173026 - RNA, 75 nt, Homo sapiens
cccggagcgcccagggcgccgcccaaggcaggagcggcaaagcaggaaggaagccacggcccacaagagagggaa

SEQ ID NO: 173027 - RNA, 67 nt, Homo sapiens
gagacaaaaaaaaggaagaagaacaagcacagaccgaagggacaaccaagggacagacaggacgaga

SEQ ID NO: 173028 - RNA, 71 nt, Homo sapiens
gaaaaagaacccaaacaagacgcaagagcccgaagaggcacaggagcgaaccgccgacggacccagcagaa

SEQ ID NO: 173029 - RNA, 76 nt, Homo sapiens
ggaacaagcagccgaacccaaagccagggcagggaagcgacgggcaccaggggaaaggcgaaagcaccaaaggaac

SEQ ID NO: 173030 - RNA, 39 nt, Homo sapiens
gcggggggcaggagcggaagcgaaccacagagaagcagg

SEQ ID NO: 173031 - RNA, 78 nt, Homo sapiens
agagaagcaaaagcacaaagcagcaccaaggaaacaggcgggcgagaacaaggcaacacacgggccgacgccaggaaa

SEQ ID NO: 173032 - RNA, 79 nt, Homo sapiens
cgacaagaggcggacggggagcgaacgggacagcccacacccggcgcggagggacaggaggccagggcacgggaaggca

SEQ ID NO: 173033 - RNA, 76 nt, Homo sapiens
gcaaagaagcgaaaccgagcaggcagagagcagaagaacacagacagcggaagaggacaaccacaccgaaggccac

SEQ ID NO: 173034 - RNA, 71 nt, Homo sapiens
gccaaaacgggcaggaagaaggaaggaggcgaagccggaaaggaaaaacaccagaacggaaacagaaggac

SEQ ID NO: 173035 - RNA, 74 nt, Homo sapiens
ggagagaccgccgcgaaggcccccaaaacagcccaaagcagaaagccaaggacacgcaggacgaagaaggagga

SEQ ID NO: 173036 - RNA, 72 nt, Homo sapiens
gggaggcaaaaaaaacgacccgaagggagaacgcgagggcaccaccagagaaggagggggccccggcggccc

SEQ ID NO: 173037 - RNA, 34 nt, Homo sapiens
ggcgccacgaaccaaagagcccgcccgaccggag

SEQ ID NO: 173038 - RNA, 70 nt, Homo sapiens
gccgcaccgcgcgagcacgggcggagcgaacggaccgacagaagaccgcagccccaacagaggaggaccc

SEQ ID NO: 173039 - RNA, 77 nt, Homo sapiens
ggggaaaacaaggggacccgggaagagaaacaacgaacgagcaaggaagggccaaggcagaccccacaccggagaac

SEQ ID NO: 173040 - RNA, 77 nt, Homo sapiens
gggcacccgcggccggcccggggccccgggaccggcgcccccccgaggcagcgagaagaaaaagaagagagagacac

SEQ ID NO: 173041 - RNA, 75 nt, Homo sapiens
agggcggcggccagcgccacgcgccccgagccccggccccaaagacccaaaacagagacaccccccagcccccgc

SEQ ID NO: 173042 - RNA, 72 nt, Homo sapiens
gccccccccgccgcaccagaaagccacacacgaggaggggcacggaagcaaaagccacgcccagaacccagg

SEQ ID NO: 173043 - RNA, 70 nt, Homo sapiens
aggaccagagcggacccgccagcgaaggggaaagagcacagaccgagagcaagcaccaaacgcacccaaa

SEQ ID NO: 173044 - RNA, 68 nt, Homo sapiens
ggggcgggccggcggggcacggggggcgacggccaagcgaacagcgaaaaagagagcagcgaggaagg

SEQ ID NO: 173045 - RNA, 74 nt, Homo sapiens
acacgcaggcccgagggaaccccggagccggcacagccgccaaagggagacccgaccaccggaagccacggccc

SEQ ID NO: 173046 - RNA, 57 nt, Homo sapiens
gcccagcggccagcgccacacggcaagcccagaagggggccgcggaccaaagaagaa

SEQ ID NO: 173047 - RNA, 59 nt, Homo sapiens
ccgaccgcggagcagcagcgacggccgcaacgccggccaggcgagacgcagccgcgccc

SEQ ID NO: 173048 - RNA, 51 nt, Homo sapiens
gaggccaggacggagagggagaagaaagccggacccacagccgccagagag

SEQ ID NO: 173049 - RNA, 75 nt, Homo sapiens
agaccaaaccacaacagcgcgaacagaggcacccgaagccaaagggaaaaggaacaagcacacagagacggggac

SEQ ID NO: 173050 - RNA, 86 nt, Homo sapiens
aaggagaagaagcggccccacaccacccgcagggccggcacggccaaggagaggacacacaacagccccaagcggggggagcgcag

SEQ ID NO: 173051 - RNA, 72 nt, Homo sapiens
aggagagccacaacgcagaaaaaccacagaccaggacccaagaaaacccagcggggaccggccacaaggaca

SEQ ID NO: 173052 - RNA, 70 nt, Homo sapiens
acaccagaaaggcacagagagaagcagaagagaaagaggacagaagcccaagcgcagaaccgggcaaaac

SEQ ID NO: 173053 - RNA, 35 nt, Homo sapiens
aaaacaagggaaagcaagccagggggagccccacc

SEQ ID NO: 173054 - RNA, 59 nt, Homo sapiens
cccaagcccgaggcccagaggaggagggccccggaagcccggaccccaaggccccgggc

SEQ ID NO: 173055 - RNA, 66 nt, Homo sapiens
gaagaagaacgacccgcccggggcagcagcggagcggaggcagacacacacggggggagagggagg

SEQ ID NO: 173056 - RNA, 80 nt, Homo sapiens
aggagaacccaccacaagaagaaaggccagcacggcaggagaagaaccagcaaccagagaacaacagaaaaccaaaaacc

SEQ ID NO: 173057 - RNA, 75 nt, Homo sapiens
ggagaggacagcagccgagagacacaacgacgacggaccacgcacaccccacgggccggcggcgcgggcgggagg

SEQ ID NO: 173058 - RNA, 82 nt, Homo sapiens
gacggggcggagggaacggagcgggcgggaggaggccggggaccacacaggccggcgcggaagaggccggcggcgggacggc

SEQ ID NO: 173059 - RNA, 72 nt, Homo sapiens
aggacgaagcgcccgccaccaaggccggacccagcagggcccccggaacaaacccgggagccacgccagacc

SEQ ID NO: 173060 - RNA, 73 nt, Homo sapiens
agagaccacggcgcgccccggccggaggggaaggcaggacgcagccggggaaaacgagagagcagccaacgcc

SEQ ID NO: 173061 - RNA, 87 nt, Homo sapiens
gcggacgccagccaccagccggcagccagccgcgccccagccccgaccccgagccggacgagcgggagaggacaccacacaaaaaac

SEQ ID NO: 173062 - RNA, 52 nt, Homo sapiens
agagagacagacccggacgagagaggaggggaagcagccccgacaagggggg

SEQ ID NO: 173063 - RNA, 82 nt, Homo sapiens
caaaccaggaggaaaaccaaaacaagcagaggagacaagcgcaagcagccagagcccgggcgcaaagaaccaggcccggacc

SEQ ID NO: 173064 - RNA, 67 nt, Homo sapiens
gcggcgagcagaacacggcgagcgggaggaggaagccaagaacgggagcgaagccacgcagcggcac

SEQ ID NO: 173065 - RNA, 34 nt, Homo sapiens
agagccgcggcgcaaggagcacgaaaaaccgaac

SEQ ID NO: 173066 - RNA, 70 nt, Homo sapiens
acagagaggaggagccgcagacgaaggcaacagcaggcgggacacggggcgacccacccaaaagccccac

SEQ ID NO: 173067 - RNA, 76 nt, Homo sapiens
cgaccgggagaggagagcccccaggggagccggcggaagaccaagaacgcccagcccgcgggcaccggcagaaagg

SEQ ID NO: 173068 - RNA, 67 nt, Homo sapiens
agcagccaccaggagcccgagagagaaggggaaagcacgaagggagcccagcgacacaccagcagca

SEQ ID NO: 173069 - RNA, 93 nt, Homo sapiens
cgcaggacagaaagaccaacagaaacgaggacaaggaccgccgggcaagacccaagaagcccacccagagagagaagaacaaggcggccaaac

SEQ ID NO: 173070 - RNA, 102 nt, Homo sapiens
agcgggagcaaaagggaccggcagcaaacaaacgagccagaccggcccgcaggagacgaagccaaggaaccagcagagccaacagccaagccgggccgcgac

SEQ ID NO: 173071 - RNA, 68 nt, Homo sapiens
aggccggaaaagccccaaacgcgccaacgggacaagaacccaagaaacaggaaaaaacccaaaacacc

SEQ ID NO: 173072 - RNA, 92 nt, Homo sapiens
acccaggagacagagaaacaagagccgcaaggacagacaggaccggacaaacaccacggggggggccaggcagccggggccaaaaaagcgac

SEQ ID NO: 173073 - RNA, 55 nt, Homo sapiens
aggggcaaaaggcaaaggggagagaaggcagaggacagggagaaggagagcgagc

SEQ ID NO: 173074 - RNA, 79 nt, Homo sapiens
aggaaaagaaggagagaggagccagcgaggcgggcagaagaagaaagaaacagcccagacgagccagagaaagaggccc

SEQ ID NO: 173075 - RNA, 58 nt, Homo sapiens
acgcagcagaaggcagcacccggccgacacacggacagacaaagaaacagccggaaaa

SEQ ID NO: 173076 - RNA, 83 nt, Homo sapiens
ggaaacggcaaagcgcagcccgcagacagaggggcgacgaccgcacaacagaaaagaacggaccgaagccaaagaacaagagc

SEQ ID NO: 173077 - RNA, 78 nt, Homo sapiens
accggccacaggcagacggcagggccggcccagacccacagaggaggcaagcgaaaacacaaaacccgaacgaaacaa

SEQ ID NO: 173078 - RNA, 71 nt, Homo sapiens
gccacccaagacacaaacggcgacacagagaagagagagaagcagcgggcgagaccaagggaaacagacgg

SEQ ID NO: 173079 - RNA, 100 nt, Homo sapiens
agcaaccccccaggacgggcggaggcggggggaccggcgggcggaccccgccccccgaggcgcagcccgaacccagcagccacacgccaacaacgagaca

SEQ ID NO: 173080 - RNA, 91 nt, Homo sapiens
acaacgcagggagaccgcagaaaagccccggcgaacaaccgccaagaagagaggaaaacggagaggggaacgcccccccgagcaaaccggg

SEQ ID NO: 173081 - RNA, 85 nt, Homo sapiens
aagaggaagaagagagagcagaacggcacagccccagcaacaccccgcagccgcgcaaaaaaagcgccggcggcagagcggggag

SEQ ID NO: 173082 - RNA, 76 nt, Homo sapiens
acaggaggcaaccacacagagaccggaagaccgacggaagaccacaccccgagggagcccaggacaccacgagaag

SEQ ID NO: 173083 - RNA, 70 nt, Homo sapiens
cgaggcgacgacaccgccggcacacgcgggggaggcggcggacggccggaaccacgaaggggaggcccga

SEQ ID NO: 173084 - RNA, 78 nt, Homo sapiens
cggggaggcagcgcgggacccagcccaggcggcgcggacggggcggccgagaaaacaaaggcgaagcaagagcgagaa

SEQ ID NO: 173085 - RNA, 82 nt, Homo sapiens
ggagggcggcaggggaggcagagaggaagaagaccccacgccacgcagaggaaggcagccccacagaaggaaagacaggcgc

SEQ ID NO: 173086 - RNA, 70 nt, Homo sapiens
gcaaaaacacagggcagaccccgcaaaacccaccacagcggagaagagaacccgaccgaagaaggaacag

SEQ ID NO: 173087 - RNA, 78 nt, Homo sapiens
ccccaggccaagcagccaccagcagcccccagagcgggaccacagagcagggggaggcacacccaggccccagacaga

SEQ ID NO: 173088 - RNA, 79 nt, Homo sapiens
ccgcggcggagcgccggccggcggggagcgccaaggccgcaggaggacaagcgccggcacgcgaccgaacgcaaaggga

SEQ ID NO: 173089 - RNA, 67 nt, Homo sapiens
aacgagaagaagcaaaaagcaaggccaccaacaagagcaacccagcacgccaggaaagagagaagaa

SEQ ID NO: 173090 - RNA, 62 nt, Homo sapiens
gaagacggaaaaagaaaccaccggaccgaaacagcaacaaccgcaacgagcggcacgccaaa

SEQ ID NO: 173091 - RNA, 84 nt, Homo sapiens
gcgcagcagggcagcgcagagcggcagcagccccagcccaaggccagagcgcgcccaggagaagggagcaggagaagcaccagc

SEQ ID NO: 173092 - RNA, 75 nt, Homo sapiens
cccacccgccgagcagcagacggaaagaggagccaaggacaggacacgaccacgaagcgcaaagcggggaaacac

SEQ ID NO: 173093 - RNA, 79 nt, Homo sapiens
cacaacacagcacaaagaagcagacaggcccgcaccaagaagcgcccagcagcaaaacacggccacccagcagccaggc

SEQ ID NO: 173094 - RNA, 54 nt, Homo sapiens
accgcacagggcagaccgacagcgacagcaaaccagccggcgggcgccacaacg

SEQ ID NO: 173095 - RNA, 78 nt, Homo sapiens
gacgagaggacgggaccaggcgaagcggccgagcaggcgagcgaacgacggcaaaagcagaccggaaaacccaccggc

SEQ ID NO: 173096 - RNA, 74 nt, Homo sapiens
cacaaaagaagaacaagcggcccaagaggaaaagcaacgagcagcacgcaggggaagaaaaggccaaagaggga

SEQ ID NO: 173097 - RNA, 81 nt, Homo sapiens
cacagcgagcaaagggaaccgggagggggcccaagcccaggcacagagcccaaaccgaacacgaacccagacaccaagaag

SEQ ID NO: 173098 - RNA, 81 nt, Homo sapiens
gggaccaacggggaaccccggaccaaaagccccaacagcggcaagaccagcacacagaggccagagcacccagcgcagcag

SEQ ID NO: 173099 - RNA, 48 nt, Homo sapiens
gccacacagccccacccccaggagggccaccccagcggaaaacgagcg

SEQ ID NO: 173100 - RNA, 83 nt, Homo sapiens
gcagccacggaccgcccaaccgcgacgccgagaagcgagagagcgcagggaagagcacagcggcgggggagacggcaggccac

SEQ ID NO: 173101 - RNA, 71 nt, Homo sapiens
ccgaagaggaaaacacacagaaaagacgggggaaaagaagaccagagaggacaaccaaaagcaccgaaccg

SEQ ID NO: 173102 - RNA, 80 nt, Homo sapiens
aaagaacagcaacagagagagaaagaaagaaagaaggccgggagaagcaagaaccgggggacacaaacggcagaggggag

SEQ ID NO: 173103 - RNA, 74 nt, Homo sapiens
ggccaggcgcagacacccagcgaccaggaagaaacaagcgagaggaagcacagcagaggagggagcacaagccg

SEQ ID NO: 173104 - RNA, 85 nt, Homo sapiens
accgcggccacggagaagggcgagaagaagaaggaggcagggacagcagggacagccgggagagcaggagagacccgcgagggaa

SEQ ID NO: 173105 - RNA, 58 nt, Homo sapiens
gaagcgcgggaagggaaagagccaaaaaccgaacacccggaaggggacaagggacggc

SEQ ID NO: 173106 - RNA, 46 nt, Homo sapiens
cagagggcagccgggaaagccgcaaagggaggcaccgcgcggaaac

SEQ ID NO: 173107 - RNA, 74 nt, Homo sapiens
cggcacgccgagaggggcagcgccgggaggacggaccaggcgggcccaggccgcaaagacgacaccagagccgg

SEQ ID NO: 173108 - RNA, 97 nt, Homo sapiens
gccgaggaggaaagaggcccagccccccacccaaccaccggcaggccaaacggagggaggagaagacagagcgaacagaagccgggagaaagcgaag

SEQ ID NO: 173109 - RNA, 68 nt, Homo sapiens
ggacgcaccaccagcaacaacgccagccagcagcaaggaaggcagggggagccccccagacccgaaag

SEQ ID NO: 173110 - RNA, 61 nt, Homo sapiens
ccgacacacgaaacaaccccgaccggccgcagggcaacgcggggcgagccacagagacaac

SEQ ID NO: 173111 - RNA, 80 nt, Homo sapiens
cgccggcccgcaaggcaaagaggcaaagcaccccgcaagaagacgggagacacaggcagaagagaagggggagagaaacg

SEQ ID NO: 173112 - RNA, 65 nt, Homo sapiens
cgaaggaaccggacagaagcgcggcggcgcggcgcaacacagcacccggcggcaaaccaaacaaa

SEQ ID NO: 173113 - RNA, 61 nt, Homo sapiens
cccgacaccaggggacacccagaagcggcgccgccggcagcccacagaagaagggaaaaaa

SEQ ID NO: 173114 - RNA, 77 nt, Homo sapiens
ggccccagcggaccgaacagacacggcagcgacgaagagacgcgcccgacgcccggaagccccggaccacacagaag

SEQ ID NO: 173115 - RNA, 52 nt, Homo sapiens
ggcccgcgggccgccccaccccacaggccccccaccgaagacaagcgagagc

SEQ ID NO: 173116 - RNA, 76 nt, Homo sapiens
gaacggagagaaccgggaccccccgcggggacccggaacgagacaggggaaacgaacaagaaagaagagcaacagg

SEQ ID NO: 173117 - RNA, 80 nt, Homo sapiens
cccaggcaggaacccgagaccacagccaccacacagcaccggaaggagcaggacaggagagacaacggaggcaagaaaga

SEQ ID NO: 173118 - RNA, 81 nt, Homo sapiens
cgcggaacagcaggcccgagcccaccgcgccgggccccggacgccgcgcggaaaagagaaaaccccgggaaacaggaaaaa

SEQ ID NO: 173119 - RNA, 58 nt, Homo sapiens
cgcagggcgcccccgccagagacacaggaagaaggcagcagacaagaaccccgccgcc

SEQ ID NO: 173120 - RNA, 74 nt, Homo sapiens
agggcccgagaccccgcgcgcggaggcaagcacgcagcagagagcaaaagaagacgcggagaggagggcacaca

SEQ ID NO: 173121 - RNA, 69 nt, Homo sapiens
caccaacaggcggacaggaggagcagaggacacgaaaagaagcaagaaggagcaaagacacagcaacga

SEQ ID NO: 173122 - RNA, 76 nt, Homo sapiens
gcagcgcgaggccgggccgggggagaccgcaggcaaaacagaaaggcggaggaaaaacggagccagaggagagaca

SEQ ID NO: 173123 - RNA, 73 nt, Homo sapiens
gggagcagcgccggggccgccgaccaacacccgaggcggacgcagagacagcccaaaaggagaaccgacggga

SEQ ID NO: 173124 - RNA, 74 nt, Homo sapiens
agaagaaagcaagcagaggcgaggagaaacagaggacaggacagcagggcggagggagggaccagccaccgcac

SEQ ID NO: 173125 - RNA, 85 nt, Homo sapiens
agagcaccaacaccaccacgaggagaagacaccaaagcccaccccccaaggcagaggggcggcggaaccagccagcccacaccca

SEQ ID NO: 173126 - RNA, 111 nt, Homo sapiens
ggacccacggagcaagagaaagacccggggaaaaaggagggagaacagaggccggcccagcacgggcaccgcaggccgcccacaccggggcagcagagggaggcgccagcg

SEQ ID NO: 173127 - RNA, 74 nt, Homo sapiens
ggaccaagaaccaggacagagcgggagccaccagcgccaaagggaagccaggagcccgggggcacggggagaag

SEQ ID NO: 173128 - RNA, 74 nt, Homo sapiens
ggggacgacacacacacggaggacaacacaaagaaggagagaaccggcagagggggaggagcgagcccggagaa

SEQ ID NO: 173129 - RNA, 73 nt, Homo sapiens
caggaccggccaccccacacggcgcaccagggggcggcggggccccccgccagcggcagcagcaaagaacaca

SEQ ID NO: 173130 - RNA, 70 nt, Homo sapiens
caagcgaaaaacaggcaaggaggagaccacggagagaaaagagaccagagagcaagccgagggccgaaca

SEQ ID NO: 173131 - RNA, 73 nt, Homo sapiens
gacgcgcaggcaccaacagagacagcagcccccagggacccaaggacgaccacaggacacggaccccacaaag

SEQ ID NO: 173132 - RNA, 76 nt, Homo sapiens
cggagccgggcccagaggaccggccggcacgccgcccggggccagacccccgaacaacgccagaaagaaagccacc

SEQ ID NO: 173133 - RNA, 71 nt, Homo sapiens
cgaccaaacgacgggggccggagcccacagcgacagggggccgcgcgcaccaaaaccggaagaaggcggcc

SEQ ID NO: 173134 - RNA, 47 nt, Homo sapiens
gaccggacccagccccagaaggggaagaacacggaaaccggacaggg

SEQ ID NO: 173135 - RNA, 78 nt, Homo sapiens
gggacaagcagcaaggcgcggggggccacgcgaggccgagcaccagaagaaaggagagagccgaaagagaaaagcgcg

SEQ ID NO: 173136 - RNA, 67 nt, Homo sapiens
ggaacaaagcccacagcaccgcccgacggccaggaggcgaagagacgaggaagcccaggagcccgaa

SEQ ID NO: 173137 - RNA, 83 nt, Homo sapiens
aggcaccgggacggaccgagaccggaccgagagcggaccgagagcgcgaaacgcacgagaaggccagcggagcacaagaggag

SEQ ID NO: 173138 - RNA, 116 nt, Homo sapiens
ccaagggcggcgcgcaccccacgggggccccaacgcccacaacaaggcggcggggacggcggagaggacaggggccgggggggaccggcccagggagcagcacaaacagccaccgg

SEQ ID NO: 173139 - RNA, 55 nt, Homo sapiens
gccggaacaggcgcgccggcggacacaggaaagggaagcgcccaacaccacaaaa

SEQ ID NO: 173140 - RNA, 68 nt, Homo sapiens
cggggcgagaggaaccggagaccagaaaagaacggcggcacacagggaggggcaggaacacgcaggca

SEQ ID NO: 173141 - RNA, 78 nt, Homo sapiens
ccccgagcccggggaaggagcaggaagaggaccacagggaccccacccggcggaggaacagcggccaagaagaaaaag

SEQ ID NO: 173142 - RNA, 63 nt, Homo sapiens
aaacccaagccaggaccaagcaagagccaagggcagcaagcacagcacaccgggagcagacca

SEQ ID NO: 173143 - RNA, 75 nt, Homo sapiens
agcgccgccaccgagccgggcccaccccccaccaaggaaggggacgaagggaacccgccgggcggcccggcaccc

SEQ ID NO: 173144 - RNA, 73 nt, Homo sapiens
caagacaagaaaacaacaggccagccgaggcaacaggaaagaggcccacgggggggcgcccgaccggccacag

SEQ ID NO: 173145 - RNA, 83 nt, Homo sapiens
agcgagcagcccagacagcggccacccaagggggcacccgaggaggaagagggcagggcccacggaaagaagggaaacccggg

SEQ ID NO: 173146 - RNA, 42 nt, Homo sapiens
gggccgcgggaagaccagccccaaagagacacacaagagaac

SEQ ID NO: 173147 - RNA, 90 nt, Homo sapiens
ggagaaggcagacagcgacaccaaccgcgacaggccaggcccagcccgggcccagcccaggcaaggcacagccagagaacaacacacaca

SEQ ID NO: 173148 - RNA, 86 nt, Homo sapiens
gagaagaggcagagaagaaccgcaaggagccgaggaggccagcaagaccccccgggggcaccagccaccaggccccaggagaaaag

SEQ ID NO: 173149 - RNA, 76 nt, Homo sapiens
cgacccgagcgcagcgggagcagcggaccgcagcccccgacccccaccccaggcgggacagaccggagggaagaca

SEQ ID NO: 173150 - RNA, 81 nt, Homo sapiens
agaagggagacgacgcgcgggccgcgagcggggcgacccgaggccccaaggacgccccccaaggacacggaagcacgggcc

SEQ ID NO: 173151 - RNA, 87 nt, Homo sapiens
ccgcgcagccccggagcacggccagacggggcagggaacaacgggcgaaagggcacacacggagggcgcggagcggggacgcaggcg

SEQ ID NO: 173152 - RNA, 55 nt, Homo sapiens
ccgacggacagaccaacgggacaagaagggcggcgacggcggcgcgaggaccgac

SEQ ID NO: 173153 - RNA, 60 nt, Homo sapiens
cggaaggaaccagcacaggaggagaccccagggccaagacacagagaccggcggcaacga

SEQ ID NO: 173154 - RNA, 80 nt, Homo sapiens
ccagccggcccacccacaccaggccccgaccacccacaggcaccacaggaggcagggaggacagcacgcgcaagagggac

SEQ ID NO: 173155 - RNA, 69 nt, Homo sapiens
ccccaaaaccaggcccagaaagccaaaaagacaagccaaaaaccgaccgcaagagaccaaggaacccaa

SEQ ID NO: 173156 - RNA, 114 nt, Homo sapiens
acagcaaagggcagcggagcccccaccaccaccgccagcgcaggcaagcgacgggcaagggaagccccagacaaggagccaaaagaaaaccaggaggcaacaagacggaagcag

SEQ ID NO: 173157 - RNA, 83 nt, Homo sapiens
gcggcggacaggcgacagcgaccgcggcagcggcggagaaaccaccacaaacacgaggccagcaacgaccaacaagacagacc

SEQ ID NO: 173158 - RNA, 57 nt, Homo sapiens
gaacagcccaccagaaaggaagagaggaagcaggggagcacgccagacacccagaac

SEQ ID NO: 173159 - RNA, 84 nt, Homo sapiens
cgcaggaccacagcgcagcaaagaacacagaggcaagagggcagagcgccggcacaaccaacaggcccgcacccaggcccccca

SEQ ID NO: 173160 - RNA, 71 nt, Homo sapiens
aagcggggggaaggagcgaaagagaaccgggaagaccgccgaagcccgaagcacgggcacagacaggccgg

SEQ ID NO: 173161 - RNA, 73 nt, Homo sapiens
gaaaaggagagccggcgccagccagggacagcagaccacagcccggcaggcccaaaaacccaaagggacagaa

SEQ ID NO: 173162 - RNA, 88 nt, Homo sapiens
gaaccgcccgcggaaccacagcccagcacgggagccgaggagggcgcgcggcccggcggacggaccacggaggaccgcggacacgccg

SEQ ID NO: 173163 - RNA, 56 nt, Homo sapiens
cccgcacggagcaggagagaacaaccaagcggagggcagaagaagacagccagaac

SEQ ID NO: 173164 - RNA, 70 nt, Homo sapiens
gaggaacaaggagcagaaacacgggccagggcgccacaaagaggagggggaaccagccaaaccaacgccg

SEQ ID NO: 173165 - RNA, 82 nt, Homo sapiens
ggagaggccgaggggagaaggggaggcagcgcggcccagccggaaccaaaaagaagccccagagccggggccaggagcccca

SEQ ID NO: 173166 - RNA, 58 nt, Homo sapiens
ggagcccacaacaaccacaggagcgaaaacgccacaacagagggggccagggcgggga

SEQ ID NO: 173167 - RNA, 50 nt, Homo sapiens
cgccgccccccccggcgggcgccaggcagcaggccaggccacacaagccc

SEQ ID NO: 173168 - RNA, 61 nt, Homo sapiens
cagaccaaagaaacgcgacaggagaaggccccaggcaaggcacgcacgaccgagaaagcca

SEQ ID NO: 173169 - RNA, 69 nt, Homo sapiens
gggggggcagcaacaagacgcccacccccaggcccccgaaagcgaaaccaggggaaggaacaaagcaga

SEQ ID NO: 173170 - RNA, 81 nt, Homo sapiens
cccaagagcacagaccagcagccgccaaagcccagcgacgccacgagcgcccagggaaagacaagacacagacagcgccgg

SEQ ID NO: 173171 - RNA, 72 nt, Homo sapiens
gcaagcaggaccaaaggccagaagccagacagaaggacagagaagaacccagaaaaaagcaaggccgaaaaa

SEQ ID NO: 173172 - RNA, 76 nt, Homo sapiens
cgcgcagaaccggcgcaggaccgggcaggagcgaagggcggagaacggaaaagcaccaggaagcagagaggaccgc

SEQ ID NO: 173173 - RNA, 80 nt, Homo sapiens
ggagaggaccggacgggaccagccgcagaagccaggagaaggagccgcacacagagcaggcgacccggcaacaagagaaa

SEQ ID NO: 173174 - RNA, 71 nt, Homo sapiens
cgccaacaggacaccgaagccaaccgggaggaaaagcacgaaggaagccaagcagaacaaaagaaaccaga

SEQ ID NO: 173175 - RNA, 57 nt, Homo sapiens
cgacacggggccagggaacccggcaccgccccaggcaaaagcagaccggaaaaccca

SEQ ID NO: 173176 - RNA, 70 nt, Homo sapiens
acaagggacacaacgcgccacgaaggccaggccagggagagaggaagaagacacggaccgacggacggga

SEQ ID NO: 173177 - RNA, 80 nt, Homo sapiens
gagaaggagaggcgacggcccgcagccggaccccaccggacggcggggccacgggcgccgggaggccagggacaagacgc

SEQ ID NO: 173178 - RNA, 69 nt, Homo sapiens
ccacaccccagaaccacggcgcggacaccgaagcccgaggccacaggacacgccaagggagcggccccc

SEQ ID NO: 173179 - RNA, 75 nt, Homo sapiens
acacgagggaaacagcccggaccggcagacccagcaaaagcgccacagcaacaggacaccagcaacagcgccagg

SEQ ID NO: 173180 - RNA, 58 nt, Homo sapiens
gcaggaggcacccggggcagccaagaaccagaggcaggaagaagaaaaacgccgagga

SEQ ID NO: 173181 - RNA, 76 nt, Homo sapiens
cagcaaaagcacagaaagaccacaagcaaacaaaaccagacacgcaacgaacggagaagccccagcccaagcagcc

SEQ ID NO: 173182 - RNA, 78 nt, Homo sapiens
caccagaacccagcagcgccagcacggcagacgcgagggccacaagacaagaccggacaaccagcacaccagaggccc

SEQ ID NO: 173183 - RNA, 83 nt, Homo sapiens
caccgcgcgaagcggccaaagccgcccagacggccaccggcgggaggaacaaaagggaaagacaaggagccgggccgagaaac

SEQ ID NO: 173184 - RNA, 76 nt, Homo sapiens
aaggggaagaggccgagcaaagaaaaaggagaaggccaaaaagcgaagaaggagcaaagaagaaggagcgagcgca

SEQ ID NO: 173185 - RNA, 63 nt, Homo sapiens
accggccgcaggccaccgacacgagacaaccgggagccggaacaagagcaaacggcgaaaccg

SEQ ID NO: 173186 - RNA, 76 nt, Homo sapiens
gcgaggccagcaccgcgccccgaagcccccagagccgcccgcaggcgcgccccgcaccaggcccccgggaaaccga

SEQ ID NO: 173187 - RNA, 83 nt, Homo sapiens
cggaccgagccgcgaggacacgggcgcaaccgcagcacacagcgaccgggagaacaagacggaaaggcccgagacgccagcaa

SEQ ID NO: 173188 - RNA, 78 nt, Homo sapiens
aggaggggggaggcgaacagccggcgcccggacgcgaggggggagggcggagaacggaaaagcaccaggaagcagaga

SEQ ID NO: 173189 - RNA, 77 nt, Homo sapiens
caacgacagcacaccgcggccaaccagagaggaaagccgaggacagccacacacgccccgggcaccagcaggagaag

SEQ ID NO: 173190 - RNA, 73 nt, Homo sapiens
aagccgacagacaaccaggccagcccgagacgaaaggaccgcccggagagggaccagaccggggccaaacaag

SEQ ID NO: 173191 - RNA, 74 nt, Homo sapiens
gccggcaggagagcgacaaaccaaggagggccaaggcagagagcgagggggcccggacggccaggccggaacag

SEQ ID NO: 173192 - RNA, 60 nt, Homo sapiens
aaaaacacggaagaagagaagaggaacaaaaggagagagcccaccaaggaaccacgaaac

SEQ ID NO: 173193 - RNA, 114 nt, Homo sapiens
gacgcgagaagcccagaccgcagggcgggaaaaaaccaagcagcgagcaccagggacccagcaagcaaaaagaccggagaagcgaacgagagcaggaaaccaaggaaacaggac

SEQ ID NO: 173194 - RNA, 77 nt, Homo sapiens
aacacccaagccggcagcggcgaccagaagacagacccggaaggccggaggccacgagggccgggaacccgggccgg

SEQ ID NO: 173195 - RNA, 68 nt, Homo sapiens
gaccacccgccaccagacaccagggcccgagggcaggacagcaggcaccggcgaagcacagagaggcg

SEQ ID NO: 173196 - RNA, 74 nt, Homo sapiens
agggaccgaagaagccaaaggcaaaccgacaccagcgacacaagcgcgagggaaccacagaggacaggcgaggg

SEQ ID NO: 173197 - RNA, 79 nt, Homo sapiens
cgccaggacacacggcacaagcccccggagcggccagaagaagcacggcaaaccgccgcaccccagccacgaaagcgag

SEQ ID NO: 173198 - RNA, 82 nt, Homo sapiens
cgccgagcgcacgcccgaacgcgaggccaacagccccggacaacacagagaaccggaaagaacaagccaccaaaaagaagga

SEQ ID NO: 173199 - RNA, 65 nt, Homo sapiens
caggggggcggcaggggcggcaggaaccggggcagcgacaggcagccaggaccaacacccagaaa

SEQ ID NO: 173200 - RNA, 81 nt, Homo sapiens
agagaaccggcgccgccaaacagcccagccgcgccagcgcccggcgccgcgcgccacccccgaccggcaccgcggcgcggc

SEQ ID NO: 173201 - RNA, 44 nt, Homo sapiens
cccgccgaacccgaaaggagcggagccgcaacaccaaggcaacc

SEQ ID NO: 173202 - RNA, 91 nt, Homo sapiens
gaggggccaggccagcgacggggccaggaagcaacggaagcgcagcaacagcaagccccgggcaggacgagacaagggcaacgagacaccc

SEQ ID NO: 173203 - RNA, 58 nt, Homo sapiens
ccacgaagcaaaaagacccccaagacagccgccaggaagcaacgcagcgcggaaaggc

SEQ ID NO: 173204 - RNA, 78 nt, Homo sapiens
cccaaagggcaggaaggagccggggccccgacaggacccaggcccaggcggaagaaccggaccagggccaagcaaccc

SEQ ID NO: 173205 - RNA, 75 nt, Homo sapiens
cggaaaggagggcggcccggaccgggagacacggccagacgcccccacggcgagaacaggcaccgaaagggggaa

SEQ ID NO: 173206 - RNA, 74 nt, Homo sapiens
aaacaccgaggcccaacagacagcgcgcacaaagagcacagcaagcgggagcaggcagaccaaaggaacagaag

SEQ ID NO: 173207 - RNA, 68 nt, Homo sapiens
cccgagagagaaggagagcaaacagaccaaagaaagccaaaaggggcccaaaggaaaaaaaggaggca

SEQ ID NO: 173208 - RNA, 98 nt, Homo sapiens
aaagccgcgaagaaaaccaagaaccgaggaggcgcagccagccaggagaaaagaaagccagaaggaaggaagcaacgaaccaagaaaaaacggaacag

SEQ ID NO: 173209 - RNA, 80 nt, Homo sapiens
aagaggccaagaccccagccgccgaagcccagccacgcaccacccagaccagaggagcaggagcggccgcggagcaggag

SEQ ID NO: 173210 - RNA, 68 nt, Homo sapiens
gcgaccgagaggcgcggagccggggacgccccaccacaaaccaaacgagcaagaaggagcgaggcaga

SEQ ID NO: 173211 - RNA, 91 nt, Homo sapiens
gcggcgaggagcgcggagccggagcggacgccgccgccgccaccgccaccgcgcggcagcacaaggcaagcagagcaagaaaaccggcgaa

SEQ ID NO: 173212 - RNA, 64 nt, Homo sapiens
cgcccgcgccgcgccgccgccaccagcccaagagaaaggccacccaccccaccagagccggaca

SEQ ID NO: 173213 - RNA, 68 nt, Homo sapiens
gacgaaaggaaccagacaagcaaagaaccaggacaaaaaggaagggagaagaagcaaaggagcgagca

SEQ ID NO: 173214 - RNA, 55 nt, Homo sapiens
cgcccccgcagcagcgccaggcagaggcggaccggcgccagggcccggaagacac

SEQ ID NO: 173215 - RNA, 74 nt, Homo sapiens
ggaagcgcgcagacgcacgcacaaggccagaccagagccaacggaccacaacagagaaccaaggacgggaagca

SEQ ID NO: 173216 - RNA, 72 nt, Homo sapiens
cacggaacagaccaagccagaggacaggaaggcaagaacaaaggcaccaaaggagccaaggagacagcgaac

SEQ ID NO: 173217 - RNA, 72 nt, Homo sapiens
gaaccacggaaaggcagcaggcggaggccacagcgcgcgcgaagggcagagcggagaggaacaagcagcagg

SEQ ID NO: 173218 - RNA, 69 nt, Homo sapiens
caaagcgaacgaagagcaccgggagcggcgaagaggcaccggaggagcagagggacaaaaaaaacaaaa

SEQ ID NO: 173219 - RNA, 69 nt, Homo sapiens
ccgcgggcgcccgaggggccgagcgaggaaggacaaggcagaggaaaaccacaccaaaaaagccccgac

SEQ ID NO: 173220 - RNA, 78 nt, Homo sapiens
cggcgggcaggccagaggaaccgggggcccgaagagcccccagagggggagcccgcgcgcccagcccagcaggagccg

SEQ ID NO: 173221 - RNA, 80 nt, Homo sapiens
cgggaccaccagagggaaagcggggcggaggggcagcagcaggacagggaacccgggagacagcaacagacggaggaacg

SEQ ID NO: 173222 - RNA, 80 nt, Homo sapiens
cggcccaggaggagcggcgcagcagccgaaggaaacgagccaaggccgggacaacaaagcgcgcagaaacccaagggaaa

SEQ ID NO: 173223 - RNA, 72 nt, Homo sapiens
gacccagaccacgcccacccacccaagagagccaggggagccgccaccaaaagcagacggaaaacccacggg

SEQ ID NO: 173224 - RNA, 53 nt, Homo sapiens
ggggacgcaccacgaggccgggggaacaacaagcaacggaccccacaaaaaca

SEQ ID NO: 173225 - RNA, 72 nt, Homo sapiens
cggcagcccgacacaccagacaccgaggagaagagccacgaggccggaaaggaacccgaggccggaaaccag

SEQ ID NO: 173226 - RNA, 85 nt, Homo sapiens
cacgaccaagaagaagccacggacccgcggacaggaagagcacccaagcgcaagcaaaagaaggcccccccagcagagccacccc

SEQ ID NO: 173227 - RNA, 85 nt, Homo sapiens
agaggaaaccgcaccgcccggaggagccaggaccacagcggagcccagcaccagcagcggcaggggagaccagcacagagccaag

SEQ ID NO: 173228 - RNA, 66 nt, Homo sapiens
gaaaacaggaccaagaagaagaaccagcaaaaaacagagagcccagaccaagcgaacggcccaggc

SEQ ID NO: 173229 - RNA, 57 nt, Homo sapiens
gaggggagacaggcagcacaagcaggcagggcgcaagagaaaacaaaagcaagaaaa

SEQ ID NO: 173230 - RNA, 74 nt, Homo sapiens
agaagcacgggcagaagagcagacaggcagagccacggggagcacgcaagaggagccaaagcccgacaacggga

SEQ ID NO: 173231 - RNA, 69 nt, Homo sapiens
ggagcggccgggggaggcaggggcgcggcagccagcaccagagccggagagacggagcacaaaggaccc

SEQ ID NO: 173232 - RNA, 69 nt, Homo sapiens
ggcgggaacccgaagaagaccaccgggagagagggaaaaaacaaccccgccgaggacccgcccacagac

SEQ ID NO: 173233 - RNA, 72 nt, Homo sapiens
ccacccagccccagaggcgggaacagacaccaggcgcaggagcgcccagaagaacaaccaacaccgggaaaa

SEQ ID NO: 173234 - RNA, 51 nt, Homo sapiens
acaaacggccaagaagggccaccccacagacgcccgagaaaagcacagcac

SEQ ID NO: 173235 - RNA, 68 nt, Homo sapiens
cgacaagagacgggcagacgaaggggacgcgccacagacgggggaacccagaaagagaaccgacggga

SEQ ID NO: 173236 - RNA, 59 nt, Homo sapiens
aaaggcaccaggccaccacagaaacaaaagcaacaaagaggacaccacccaaacgccgg

SEQ ID NO: 173237 - RNA, 77 nt, Homo sapiens
cgagaccccccgcgagagcgcaaacacccccagacaaaggcgggcacaaaccgaagaggacaaggagagaagcagac

SEQ ID NO: 173238 - RNA, 77 nt, Homo sapiens
gcgagcgggaggccccagggaggagagggccggcggcaacggcacaggaccagcgccaggaaacagagaccccaaga

SEQ ID NO: 173239 - RNA, 79 nt, Homo sapiens
ccgccgggcgccgcgccgggaacccgcgcccagaagggaaggccacggacggggaaacgcaaggcaaccccgcaaggcc

SEQ ID NO: 173240 - RNA, 63 nt, Homo sapiens
accagcagaagcgcacccgaagacacaaacgcaaaagcaaggacgaagcaaggcgggacacca

SEQ ID NO: 173241 - RNA, 68 nt, Homo sapiens
aacccaagggagcgcacgacccacgcggaacggaggcaggggaagcacaaaagcgcacccgcgccagc

SEQ ID NO: 173242 - RNA, 80 nt, Homo sapiens
gaccagagaggaaagaagcacaaaaacaacagaagaggaggaaaaagaggggccagggaacaggaagagcgacagaagag

SEQ ID NO: 173243 - RNA, 76 nt, Homo sapiens
accacgccgggcagaaggccgaaagagcacggacccggaagccaaccaccacaggagccccccacggcgacagacc

SEQ ID NO: 173244 - RNA, 75 nt, Homo sapiens
caaaaacaggaggaagcccagggaacggcgaacgaaaacaaacggaagagagggcagcaagaaagaacaagaaag

SEQ ID NO: 173245 - RNA, 79 nt, Homo sapiens
gccggagacgaggggacccaagcggagacagcaccgacagaaggacaaagcagagcccacagacaaggccaaaggcaaa

SEQ ID NO: 173246 - RNA, 80 nt, Homo sapiens
ggaggcacaacccgggccgaggagccacagaggagggcccgggaagaggaggaagccaaacagccaaacgccaaggaagg

SEQ ID NO: 173247 - RNA, 78 nt, Homo sapiens
agcggcggggagcggcgaagccgcgggcgagccaggcccagacagccgccgaagaaaagcccagggagccccccaaca

SEQ ID NO: 173248 - RNA, 80 nt, Homo sapiens
aagagcgcggaacaggacgccccgaacgacgcagccagagcagcaagaggccaaggggacgacggccacgggcccgggaa

SEQ ID NO: 173249 - RNA, 71 nt, Homo sapiens
aaaaagccgagccaggcggacgaccccggacggggacggaagagccccagcccaacagaagacaacaaccc

SEQ ID NO: 173250 - RNA, 74 nt, Homo sapiens
agcaacaaagcccgaacagcagcagcgcgagcgacaacgggacgggaaacaacaccgaccgaggacaacaggag

SEQ ID NO: 173251 - RNA, 69 nt, Homo sapiens
agcgagacaacgagaagagaccaaaacaaaaaggagccagcagcgcgggaacgcgagaggaaaagcaaa

SEQ ID NO: 173252 - RNA, 58 nt, Homo sapiens
gcgagagggagaagaaaccaagaccgccccaccccaaagggggcaaaacgccacaacc

SEQ ID NO: 173253 - RNA, 60 nt, Homo sapiens
gagcggggcaaccgaccggcgcggagggggcccaagaaagcggaggagcggacaacccag

SEQ ID NO: 173254 - RNA, 57 nt, Homo sapiens
gggggagccggcggacgcgcgacgacacagagcgcccacacagccacccacaaagcg

SEQ ID NO: 173255 - RNA, 83 nt, Homo sapiens
gagcgcgaaggccgggacccggccccggcccacaggggggggcaaacccgagagaacggcaccaaaccaggaagcgggaaagc

SEQ ID NO: 173256 - RNA, 95 nt, Homo sapiens
cgacaggggaacagacagaaggagcaggaaccaaagggggacacggaacccaaggagacgaagcgaagcaggagaaggaggggaaaaaaccggcc

SEQ ID NO: 173257 - RNA, 107 nt, Homo sapiens
caaaggagcaaggagaagagccaggaacagagggagaaaccaacgacccaccaggacgaccgaaaacccagccagacaaaagagaagcagaggagcgaagaaagaga

SEQ ID NO: 173258 - RNA, 70 nt, Homo sapiens
gaaaaagccaaagcaagagcaggcgacacgcaggagacgacaagcccgacacccagcggcaccggacaga

SEQ ID NO: 173259 - RNA, 80 nt, Homo sapiens
ccccagcacaaacgaccgccaggcagcggaaaagagaagaagaagcggaaaggcagagaaggagaaagagaagagaacgg

SEQ ID NO: 173260 - RNA, 83 nt, Homo sapiens
cggagccgaccaggccgacgagacgagagccgcggcagcccaagcgaacaccgaagggagagcaagccggcccggcggagaag

SEQ ID NO: 173261 - RNA, 78 nt, Homo sapiens
gaccccaccagaaccaggcccaagccgaaccgggagaagaccccggcgcgggaacgggcgggcagcagcggcgcacaa

SEQ ID NO: 173262 - RNA, 56 nt, Homo sapiens
gcgcgggggcggcccgccccggacccgagcagaggcgggaaaaccgccacaaagcc

SEQ ID NO: 173263 - RNA, 83 nt, Homo sapiens
cggagaacaccagagcaaagccaccccccgaggaaaaagccaccggagaacaggccgcaggagggccagaaaagcgccgagga

SEQ ID NO: 173264 - RNA, 58 nt, Homo sapiens
aggcaggagcgagaggaggacagggcagaccgccagcagcacagcaagccacagagag

SEQ ID NO: 173265 - RNA, 83 nt, Homo sapiens
acgccaaaggcccgcaaggacaagaggcaaccagaacaagagcgggacgaggaagcaacggaggacggacagccaccgcgcgg

SEQ ID NO: 173266 - RNA, 92 nt, Homo sapiens
gggcccccagccgccgaccggacccaagacgagaggaagggagacggcagagacacccggcccgcaccagcggagagcggacccggcgcggc

SEQ ID NO: 173267 - RNA, 56 nt, Homo sapiens
cacaaagagggcacccagaccgcaggccagggacaaagcgagaaaaagcaacggaa

SEQ ID NO: 173268 - RNA, 80 nt, Homo sapiens
caaacggcgcagaggcgggccacccggagaaaggccacggccccagcccaccggaccggaccgcgggcaggggaaggcca

SEQ ID NO: 173269 - RNA, 68 nt, Homo sapiens
cggccaggaggcggccagcgggcggggagcaggcacccccagaaaaaaaccaccgagaagcgaaggga

SEQ ID NO: 173270 - RNA, 75 nt, Homo sapiens
ggaacaaacacagaacaacccaccagaggagcggagcacgacccacagcggggccgggccccgaccacccagaga

SEQ ID NO: 173271 - RNA, 67 nt, Homo sapiens
aggggcgaaccacggaaaggaggaagaagacaccggggacagacaggacaaagggcaaagcgccaag

SEQ ID NO: 173272 - RNA, 68 nt, Homo sapiens
gcccaagccggcgcaaaccaggacacaagagaggacacagagaagcacaagaagaaagaaaccagcaa

SEQ ID NO: 173273 - RNA, 91 nt, Homo sapiens
gccgaaacagaaaacaagagaccacagaagagccaaggccaaaggcccgccaagaacagaaccagaggaggcacccacccggcggaaccgg

SEQ ID NO: 173274 - RNA, 84 nt, Homo sapiens
ggaggaggggagcggggaagccgcagcgccagcgaggggcccggagaccagccaaccggaccgagccccagaccccacggcagg

SEQ ID NO: 173275 - RNA, 62 nt, Homo sapiens
gcagaggaagccgggaggaggggaaacgaggcagcaccaagggcccgagaggagccgggaag

SEQ ID NO: 173276 - RNA, 54 nt, Homo sapiens
accacaacacagaacgaagagaagaagcgagggagaaaacgggccggaggaaaa

SEQ ID NO: 173277 - RNA, 76 nt, Homo sapiens
ggggcggggggaacgaaccagcaacacacaagaaacccagccaccaagggaaaagagaagcaaggaaaggaaggaa

SEQ ID NO: 173278 - RNA, 68 nt, Homo sapiens
ggaaacagagcacagcggacagggagggaaaagccgaacggggacgaggaagaggcagaggcgaaccg

SEQ ID NO: 173279 - RNA, 54 nt, Homo sapiens
gaaaaaggagaaaagaacgaccccacccaaagcgggaggccgaaaaccaggggc

SEQ ID NO: 173280 - RNA, 68 nt, Homo sapiens
gaacgcggaggacacagaagagaaagagcgcgcacgaaagcacacgaaaaggaaggaaaaacgcagcg

SEQ ID NO: 173281 - RNA, 73 nt, Homo sapiens
cagacaccagccccgaggaagcacagacaaagcaccgaggagacccaaaaaaaagccgaagcaacaacacgca

SEQ ID NO: 173282 - RNA, 76 nt, Homo sapiens
ggaacagagcagcagcagcagccgcggggcaggcaaaaggcggcagacagcccaaggaaagacaggcagaaagaaa

SEQ ID NO: 173283 - RNA, 78 nt, Homo sapiens
caagggacggcgggaggagggccgaggaccgcaagccagccgaaccccaggagcaagggaaggagcccggaggggagg

SEQ ID NO: 173284 - RNA, 71 nt, Homo sapiens
gcagggcgagccggagagccggccgagcgaggcggcgcggccagaagggcggcgcagccgaaggaaagcac

SEQ ID NO: 173285 - RNA, 77 nt, Homo sapiens
aaaggaagcaagcagcagaagagccaaggaaaaacagcaagaacccaaaagggaggcagaacagaaagcagccggaa

SEQ ID NO: 173286 - RNA, 61 nt, Homo sapiens
cagggaccgagggcccacagacggaccagacagcaggaaaagacaagaaaaggcgccaaca

SEQ ID NO: 173287 - RNA, 65 nt, Homo sapiens
acgcaagcccacaggcaccaccaaccagaccaggaggaagcaacggaaccacagggggaagaagc

SEQ ID NO: 173288 - RNA, 80 nt, Homo sapiens
aacagcccgcgcacccacgacgcgcacaaagcaggagcaccgaggccaagaaaggcaagccaaccggaaggagaggaaaa

SEQ ID NO: 173289 - RNA, 79 nt, Homo sapiens
acggaaagacgaaggggccccagagccaaggaggaaggggccgggccccgaagagcgaaagcgccaccggaggccgagc

SEQ ID NO: 173290 - RNA, 56 nt, Homo sapiens
acccggaggcaaagcaaggacccacgaagccaaagaaaggaagccccaggaccagc

SEQ ID NO: 173291 - RNA, 66 nt, Homo sapiens
cccgacgagcgcggcaagacaccaacacagacggagcagcccgacggccaggaggcgaagagacga

SEQ ID NO: 173292 - RNA, 59 nt, Homo sapiens
ggcgcccccaccacccacaagagacgaggacgcgcacaggaaaggacgcggaacaagca

SEQ ID NO: 173293 - RNA, 77 nt, Homo sapiens
ccaggaggggaagcgaggcgggcccgcgggaccaagcgaaaagggcgacagcaagccagggggcagagacccgggag

SEQ ID NO: 173294 - RNA, 67 nt, Homo sapiens
gaaggaccaagaaccagggccagagaaacagaaagggaagaacagagagcgcagcccgacaccacac

SEQ ID NO: 173295 - RNA, 87 nt, Homo sapiens
acaggagacccacagaggaaaacaaccccggggccacaaagcgagggagaggcccccagcgcaggggcaaaagaaagaccaaccaag

SEQ ID NO: 173296 - RNA, 76 nt, Homo sapiens
acgcagggcgcccccgccgagaaacacgaaagcggaggccggagcaggacagggaaggagcagccgaggcccccaa

SEQ ID NO: 173297 - RNA, 78 nt, Homo sapiens
cggaaacggccaacaggcagacccgacacgaccgaaaacggagggcccaaggcccacgcgccagacagcggggccagg

SEQ ID NO: 173298 - RNA, 71 nt, Homo sapiens
aacagacacgggacacccagagacaagcgggcgacacgagagggaagccccagagcggggccggcgcccag

SEQ ID NO: 173299 - RNA, 71 nt, Homo sapiens
ggaagcagggaccaggccaagcgacccacacagcagcgggcacaacagagcgaaagcagccccagcagggc

SEQ ID NO: 173300 - RNA, 84 nt, Homo sapiens
acaaaccggcagaaccaagagccaagggaggcggaaccaacccccggccagggaggggccgggggacgagggccccacaggcgc

SEQ ID NO: 173301 - RNA, 70 nt, Homo sapiens
ggagcaaagcagcggcgcagcccggggacgccgccagccaccggcgcgaagccagaccagaccagcaggg

SEQ ID NO: 173302 - RNA, 66 nt, Homo sapiens
ggaagaaccgcagccgagcggggccggccacaggaccacggccgagccgggacaagccgccgcgcc

SEQ ID NO: 173303 - RNA, 59 nt, Homo sapiens
gggcgcggacccagaggggacggcgccgcaggagaagccggaggagaggagccaagccc

SEQ ID NO: 173304 - RNA, 81 nt, Homo sapiens
ggcaggcaaccgagcccgcgggacagggggggaagaaacgagcgagcccgggacagcaagagccaagcgccgggacagcca

SEQ ID NO: 173305 - RNA, 89 nt, Homo sapiens
ggaggccccagggaagcgcagaaagcaggcgaacccgcggcgcaaaacgaggcgggaggcggcagaagcagccagaggagggcacaggc

SEQ ID NO: 173306 - RNA, 59 nt, Homo sapiens
caacgaaaaaagcgcaggacaaaggaacaagacccaaggggacacggaacccaaggaga

SEQ ID NO: 173307 - RNA, 55 nt, Homo sapiens
gaccgcacagggcagaccgacagcgacaggacaagagaaaggagcaagaaccaac

SEQ ID NO: 173308 - RNA, 42 nt, Homo sapiens
gagaccccgacagagcggaaagaacaagaagcggaagcggag

SEQ ID NO: 173309 - RNA, 75 nt, Homo sapiens
gccggcagagcaaagagaccgccggagaggaggagcaacgggaggcacccccgaacaacaacggagaccgggccc

SEQ ID NO: 173310 - RNA, 87 nt, Homo sapiens
aggcgaaagaaacaaggggccagggcagagggcaccgagcggcggagagccgggagaaacacaaagaggaacccgagccggaccagc

SEQ ID NO: 173311 - RNA, 73 nt, Homo sapiens
aggggcccgaagcccccgcaggaaccacaacccaaccaggaggggaaggggccacaggcagcaggacaccacc

SEQ ID NO: 173312 - RNA, 84 nt, Homo sapiens
cgccgcccgccccgccaccgcggacccgaccgcccacccgcccgcccagcccagaagaggcaggaacgaaccaacgcaggacca

SEQ ID NO: 173313 - RNA, 119 nt, Homo sapiens
caacgggccacacaacaagccaccgcgacccagccaaagaccacagcacccagacaacaagacgggccggggcgcagggccagcgagcccagagccccagagcaaccccgaacacccag

SEQ ID NO: 173314 - RNA, 81 nt, Homo sapiens
ccacgccgcccaggagacccccgcgcaccaccaggaggagacaggccgagaccgagggccccgcaccccggagaagagccc

SEQ ID NO: 173315 - RNA, 62 nt, Homo sapiens
aggcggaaaccaccaaggacaagaaaaagaaggcccagagagcacgagccaagggaagaagc

SEQ ID NO: 173316 - RNA, 73 nt, Homo sapiens
caggacagaggaagaggggccccaccagacagggaccggcggcaaccggaaggaacggaggcccccccggggg

SEQ ID NO: 173317 - RNA, 71 nt, Homo sapiens
ccggcccccgaaggcgggaacagaggaaagccaggcccccagagccaacgcccccccagccgaaccaacca

SEQ ID NO: 173318 - RNA, 70 nt, Homo sapiens
gcggcaccacaaccacagagggcaaacagacgcgggcagggaggggagaggacagaaaccgaagcgaaaa

SEQ ID NO: 173319 - RNA, 68 nt, Homo sapiens
aagagggagcaaggcaaacacaccgaaaacgagaaacgaaagagacacgggggcacaaccgagcccgg

SEQ ID NO: 173320 - RNA, 58 nt, Homo sapiens
gcagggacagcgcaggcagcaggcaacaccaccgagaacggggaaaaagacggccgac

SEQ ID NO: 173321 - RNA, 79 nt, Homo sapiens
aacgccaacaaagaaggcccggaaccggaagcccagaccagaagagccaccagcgaccaacgcacaccaccacgcaacc

SEQ ID NO: 173322 - RNA, 74 nt, Homo sapiens
cgaaacgccacaaaaagaaagcacccgggcacggccggagcaacgagagacagcagggaggaaacgagaaaggg

SEQ ID NO: 173323 - RNA, 59 nt, Homo sapiens
gaccgacacgacgcagcacgcggaggcgaccgggaaggagagcccggaggggaccgacc

SEQ ID NO: 173324 - RNA, 50 nt, Homo sapiens
ggcccccccgcccagcgcgaggcgggcgcggacggcaggggcgccgggga

SEQ ID NO: 173325 - RNA, 73 nt, Homo sapiens
gcgcgcgccgggacagcgaagcgcgcggccgagccggagggcgagacaaagcaaccacggaccgaggagggcg

SEQ ID NO: 173326 - RNA, 82 nt, Homo sapiens
aggcccagggggcaagaccaaccagccggcacaccagggaaaagagagcgcaccggaaagcaaaaggaaaccaagaaccaga

SEQ ID NO: 173327 - RNA, 79 nt, Homo sapiens
aaagacggaaaaggcgggaaagaagcaccgagaggaggaaccaagaaaaaaggcaggaccaggcaaaagggaaaaaccg

SEQ ID NO: 173328 - RNA, 81 nt, Homo sapiens
cgcgggcgcgcacccgagccgcaaggcgcagcccagcccgaaagcagaacgacgccggcgagcgggaccgacggccgcgga

SEQ ID NO: 173329 - RNA, 83 nt, Homo sapiens
gccaccacccccaccgacagaacaagcccagacccacccggcacaccgcccgaagcaagaaggacccaccagagcgcccccaa

SEQ ID NO: 173330 - RNA, 61 nt, Homo sapiens
aggggcgaaccacggaaaggaggaagaagacaccggggacagacagggaacgcgaagagac

SEQ ID NO: 173331 - RNA, 126 nt, Homo sapiens
acaacaacccaaggcacgccacgggagcccggcaagccgccaccgggagaagcggccgggccaagggccccacggcacgacaggagaccggggcgaggccccggggccggcggaccgcgaggggcg

SEQ ID NO: 173332 - RNA, 81 nt, Homo sapiens
ccagagccccgccggagaccccagcccggcgggaacacaaccaaagcacccgccccacagcagaaccgcccagacaccgaa

SEQ ID NO: 173333 - RNA, 75 nt, Homo sapiens
caagaaagacaagcaccggcggcaccaggaaagaggaaggacaaggaaacagagcccacccagaggaagcagaga

SEQ ID NO: 173334 - RNA, 71 nt, Homo sapiens
cgccaagcaccacaggagagcccggcaagagcaacgaaccaaagcaaaggaggccgggggaagacggaaaa

SEQ ID NO: 173335 - RNA, 76 nt, Homo sapiens
aggcgccccagagcccagggcaggacaccgacaggaacagggaccacggggaaggagcacaacaggcagacagaca

SEQ ID NO: 173336 - RNA, 75 nt, Homo sapiens
ggcagcagcggcgggggcaggcgccagaagaagaaaaaagcgccgcccagcgcgcaggcagacgacccgaacacc

SEQ ID NO: 173337 - RNA, 77 nt, Homo sapiens
gaagaacccaggacacagcaaaagcaaagaccagaaagaggccacccaagaaacgccaaaagaacagaggaaccaga

SEQ ID NO: 173338 - RNA, 82 nt, Homo sapiens
agaagccacaacacagccccagggggaaagacccacaagcgcaggggagcggagcaagaaaccaagacaaacaaaagacgcc

SEQ ID NO: 173339 - RNA, 94 nt, Homo sapiens
gaagcacaaaccagaacacccaggagagccgcacacgagagcacgagacagcggaaagaagaaaaacaacagcagaacaacggaagaaagaaaa

SEQ ID NO: 173340 - RNA, 65 nt, Homo sapiens
gagccagcaaccgaaacgcacacaaaccacacaaaagagggacaacacaagccacagcgcccagg

SEQ ID NO: 173341 - RNA, 80 nt, Homo sapiens
ccgggcagagcacacaggaccgagaacgagaaacgcaggcacccgaggacagccccccggagggaccgcaccaccgcacc

SEQ ID NO: 173342 - RNA, 57 nt, Homo sapiens
accaacgaggggccgaaccccaggaacaagaaaggggacagcccgaccggacgggca

SEQ ID NO: 173343 - RNA, 76 nt, Homo sapiens
ccgccccggccgccgcgcccggacacacaggacagcccaaggcggaaaagcgaaggaagccacaagcacagcccac

SEQ ID NO: 173344 - RNA, 69 nt, Homo sapiens
cgccagcagcccaagccccgcaccggaaaagaacccagccccgggccggcggggagacccacaaccccc

SEQ ID NO: 173345 - RNA, 86 nt, Homo sapiens
cgaggaccagcagaggccagcacgagaacccagggcaagaggagcagcagcggcggggccaagcgggagagcgagaaggcggaaca

SEQ ID NO: 173346 - RNA, 85 nt, Homo sapiens
ggagaggcagggcgcgagggcgggggcagcggcaggagaccggcaaagacaacgccgcagccaccagaggcggggaaaaaagggg

SEQ ID NO: 173347 - RNA, 79 nt, Homo sapiens
cagggaagaggaccaaagcgaacaacacgagaggcgagggacgacagagcaagcggcagagggcaagcgggaaaaagac

SEQ ID NO: 173348 - RNA, 59 nt, Homo sapiens
cgagaccaaagccgcggaaaggaagcccaccggaaggacaccccgaacacacaacccca

SEQ ID NO: 173349 - RNA, 83 nt, Homo sapiens
ggcaacaaggccagcaccacggcgaggccgcggaaggagcagggcacaacgcccgccccacagggaagacgggaccacaccca

SEQ ID NO: 173350 - RNA, 81 nt, Homo sapiens
gcgcgagccggacaaggcgcaggaagcaagcccgaccccgaggaaccagcgacagaccgggcacccagcgaaaaccgcagg

SEQ ID NO: 173351 - RNA, 78 nt, Homo sapiens
gccaacgggcgccgggagcggagaacacacagcggggggggcacagcccccgcaaccagcgacaaacccgaaggcgag

SEQ ID NO: 173352 - RNA, 85 nt, Homo sapiens
gggacggaccggagcgagcacacgcgcccacagccagagaaccacggcaggccacaaagccacagcacagcaaagccacaacacc

SEQ ID NO: 173353 - RNA, 42 nt, Homo sapiens
gggagcccgccgcgcggagcggccgggaaggagaaaggggaa

SEQ ID NO: 173354 - RNA, 73 nt, Homo sapiens
ccagggccaaaacgccgcaacggccggcggggccaaagccgggacagggagagagaacggggagaagcaacac

SEQ ID NO: 173355 - RNA, 74 nt, Homo sapiens
cgaggggagcaccaggaccgggccggaacgagacgcacggaaccaagaacagagaccagcacaaccagggaaga

SEQ ID NO: 173356 - RNA, 79 nt, Homo sapiens
aaagacaaaagggaagcacaaaaaagcacaacccaaccgggagaggagcagagacaggagaaaaccggaagagaaaggc

SEQ ID NO: 173357 - RNA, 75 nt, Homo sapiens
gagaaacaagggccaaaggaggaacggaaccaagaccaggacaaagaagacccggagagacaagccggaggacgc

SEQ ID NO: 173358 - RNA, 82 nt, Homo sapiens
gggacgggggcggcccagaagaggcggaggcgggggccggggggggcacagagccccggaagacagcccccagcgaccagac

SEQ ID NO: 173359 - RNA, 33 nt, Homo sapiens
caccggggcaggacagcaaacgaacacaagaga

SEQ ID NO: 173360 - RNA, 63 nt, Homo sapiens
ccgaagaagagacaggcaagggacccgaccgagagaaagggaagaagacgccgaacaacagcc

SEQ ID NO: 173361 - RNA, 72 nt, Homo sapiens
ggaaccaccccaccgccaggaacacaccaggaaagagaggcgacgagcgacagaagaaaaagagagggagag

SEQ ID NO: 173362 - RNA, 73 nt, Homo sapiens
gcagcaacagaaccccaggaggaaacaccaaggaagccccgccaacgaagaaaacaccgaacaggaggagccc

SEQ ID NO: 173363 - RNA, 71 nt, Homo sapiens
aaccgccgaccaagagcgaagcgacgagagaaccccagagggcgcggaagccccagcaaacaagaccaccg

SEQ ID NO: 173364 - RNA, 83 nt, Homo sapiens
gcaacgacggaaccggacacggagagcgccggcgcggaaggcgggcccccgcgcaaggcccgccgcgcgcgcccaaccccggg

SEQ ID NO: 173365 - RNA, 76 nt, Homo sapiens
cggagggaacaggcgccccccacgaccccagaccgagcccagaagggcagaaagggacagagccaggggccggagg

SEQ ID NO: 173366 - RNA, 73 nt, Homo sapiens
gccacccagcaaggccgcagagcaagacgcaaacggccaagggagagccaaccaggaggacccagaagggaca

SEQ ID NO: 173367 - RNA, 77 nt, Homo sapiens
cagcggcgagacagggccaaagcagcgagggcggacaaggcaaaggggcagcggaaaacaaaccgcagagcgggagc

SEQ ID NO: 173368 - RNA, 76 nt, Homo sapiens
gaagccagcacgccgggagcggacacagcccaggccacaaccccaggccggcagacccaacccgcgggacccccca

SEQ ID NO: 173369 - RNA, 66 nt, Homo sapiens
ccggggcgagcgaggcaaggaaaacaagcagggcaaaagcccacagagagagccaggaccaaggcc

SEQ ID NO: 173370 - RNA, 79 nt, Homo sapiens
cggcaggcgacgaggaggcggagcggacaaaggccccaggccaggccagacgggcgccagggcggaaccaagcagggaa

SEQ ID NO: 173371 - RNA, 74 nt, Homo sapiens
aaagcaggccccgggaagaagcaccaggcaagcaggacaccccaccgcagcgcgggcggggcaggcgcccgcag

SEQ ID NO: 173372 - RNA, 77 nt, Homo sapiens
gggcaggggcggaggcggaggcagaggggaggcgcgaaaggggaacggcgagggaacccaggaaggagggcgacaaa

SEQ ID NO: 173373 - RNA, 77 nt, Homo sapiens
gcggcggcggcgcggcccaaaaggcacgcaaagaacgcccacaaggcccagaagaagagaaaaaagggaagaaacaa

SEQ ID NO: 173374 - RNA, 74 nt, Homo sapiens
acacagaaaggacaagaaacaccaacgagacacagccgggcaagggagcgcggccacagacgcacaggcagaga

SEQ ID NO: 173375 - RNA, 61 nt, Homo sapiens
gaagaacgaaggcggcccagcaaaacggccaaggaggagagaaagaacccacgcaggacga

SEQ ID NO: 173376 - RNA, 84 nt, Homo sapiens
ggcccaccccaccgcagaccccaggcccccccacccagcggcagccccgcccgccaccgacaacagccaaggcggcacgcgagc

SEQ ID NO: 173377 - RNA, 61 nt, Homo sapiens
gaacccccagacggaaagagaaggggaaacggacgcagaggcaacgcagagacagaagggc

SEQ ID NO: 173378 - RNA, 71 nt, Homo sapiens
cccgagcgccaggcccacacaggaccccgcgcccacccaacaaggcaggcgaaacagcaggagagggaaga

SEQ ID NO: 173379 - RNA, 72 nt, Homo sapiens
agcggacaccaaacggagggagacaggcaccggaaaccgcaacaaaaacagaaggacgagaagggcggcgcg

SEQ ID NO: 173380 - RNA, 69 nt, Homo sapiens
agaaagaaaaaagccggcgacaacgagcacaaaaaggacaaaggccacagcggagagcaaaggacaccc

SEQ ID NO: 173381 - RNA, 58 nt, Homo sapiens
ccggaggccaagaacgggccaacgcaccacaagccaaggcaaggaccgcccaaccgcg

SEQ ID NO: 173382 - RNA, 52 nt, Homo sapiens
aacagaaaggagaacaccacaggccgcagccaagccggaacaggagcggcga

SEQ ID NO: 173383 - RNA, 77 nt, Homo sapiens
gaaagcaaaaagagagcagacggaaggcacaagcgccgaagaggagcggagcgaggcagacacccgacgggggagcg

SEQ ID NO: 173384 - RNA, 78 nt, Homo sapiens
caggaagcacagaaaggagagcacggccacgaggaagcgcaaagaaacaagggaacagaccccggcaggaggggagaa

SEQ ID NO: 173385 - RNA, 73 nt, Homo sapiens
agcgggaaaaccgagcgcgggagaagcaaagcgggccagacacgaagaggccggcgaaggaagaaggaccagc

SEQ ID NO: 173386 - RNA, 76 nt, Homo sapiens
ccgggaccgcgcggacccggccgggagaagcagcagcgcaagaggaaaggcaagggcagaaaagaggggaaaaggc

SEQ ID NO: 173387 - RNA, 65 nt, Homo sapiens
gaaaaggaaacggagaaaacaacccaacaggaaaaagcacaaacgagggggagggcgaacccggc

SEQ ID NO: 173388 - RNA, 56 nt, Homo sapiens
ggcaggacacagggaaaaacggacaaggcaaaaccagcaagcggacccagacaaaa

SEQ ID NO: 173389 - RNA, 69 nt, Homo sapiens
cacggcaccgacaaaccagccggagagcaaaggccaggaggaaggagcaaggcagagaagaccggggac

SEQ ID NO: 173390 - RNA, 81 nt, Homo sapiens
gggccgcaagccccgcgcaaaggaaaagccaaggagacgggccgggaccagggaccaggccccccgccccggccccgccag

SEQ ID NO: 173391 - RNA, 117 nt, Homo sapiens
gccaaaaaggacagaccccaaacgcaagaaacccggcaaaccgacgcgaagacccgagagaacagaccaaacagcggcgcacgaaaacagagcgaagacgacccaggccaggagccg

SEQ ID NO: 173392 - RNA, 70 nt, Homo sapiens
aaccacgcagggaagcccaggggcaggacaaaccggcgaccacacacggggacgacggggaagccggaca

SEQ ID NO: 173393 - RNA, 82 nt, Homo sapiens
cggggcagggccacaacacaaccagcggaaggcagacaagcagcgcaagggaccccgacggagagacaaagaagacggaggg

SEQ ID NO: 173394 - RNA, 55 nt, Homo sapiens
ccgggccagggggggacaaacaaaaaggaagcccaaaaggaaagaaccagagacg

SEQ ID NO: 173395 - RNA, 81 nt, Homo sapiens
aggcagaacaaaacgcagcaaccaaaggcaccggccgagaggcaaggaagggggggccgcccgcccaaggcaggaagaggg

SEQ ID NO: 173396 - RNA, 74 nt, Homo sapiens
cgagccagccgcggccggaggagcccccaggcccaacgaagaggagaagcaggaccaagacacgcagacaccgc

SEQ ID NO: 173397 - RNA, 53 nt, Homo sapiens
gaagagccaaaaggaaaaaaagaggcacgaagcgggcgaagcgagaaacaagg

SEQ ID NO: 173398 - RNA, 71 nt, Homo sapiens
aaaccaaaaacgacaccgacagcaggaaagaagggggaacaacgaggaagcacgagggaaaaccagagaaa

SEQ ID NO: 173399 - RNA, 73 nt, Homo sapiens
ccacagagacaagagagagggacgagggcggaaaggggacgagggcagacaaacccggccggagcaggcaacg

SEQ ID NO: 173400 - RNA, 89 nt, Homo sapiens
accgcgacggcggcgaggcccggcagccccgacggcaccgcaccgaggcgccgcgcacagcaagaagcggacaaggcaaaaccagcaag

SEQ ID NO: 173401 - RNA, 78 nt, Homo sapiens
aaggagggacaggcacaaacagccccagcacaggacaccagcagcaaaaccggggcgaagacaagacccaaaaggaga

SEQ ID NO: 173402 - RNA, 83 nt, Homo sapiens
agacggccgcgccggcagcacagcaccggcagaagccgcccacaccacagggacccaagggacccacaaagcggccgggggag

SEQ ID NO: 173403 - RNA, 93 nt, Homo sapiens
ggcgaccgagggaagaccacaaccacgaccacaaaccggcggagccacaggacccaaagacaggaccacgcaccagcagagaaggaaagcaaa

SEQ ID NO: 173404 - RNA, 78 nt, Homo sapiens
ggaccaagaaccaggagaccgaggagcccaggaggaggaacccacagacccccagcgagcggcggacaacagcgagcg

SEQ ID NO: 173405 - RNA, 54 nt, Homo sapiens
gaccaaggcgccgcccggcagcggacccgaacccaagggcgagaaaaagcggag

SEQ ID NO: 173406 - RNA, 63 nt, Homo sapiens
ccagagccaaggaggaaggggccggggcccaccgaaacagcacagggaccaacccagcaaggc

SEQ ID NO: 173407 - RNA, 63 nt, Homo sapiens
gccaaccgccggcaaccccgggcggccgcaccgccagacaagccgggaagacaagcagacccc

SEQ ID NO: 173408 - RNA, 86 nt, Homo sapiens
caccgggacggaccgagaccggaccgagagcggaccgagagcgcgaaacgcacgagaaggggcccaccagggaggaagaggcaggc

SEQ ID NO: 173409 - RNA, 71 nt, Homo sapiens
cgaccaccagaggaagagacgagaagcaaggaaggggcaccaagaggcccagcccggccagcaggcagcac

SEQ ID NO: 173410 - RNA, 79 nt, Homo sapiens
gcgggcgggcgggagcgcccaagggggcggagagcgggggggggaacaagaccagaaacacgaggcacacggggcaggc

SEQ ID NO: 173411 - RNA, 80 nt, Homo sapiens
agggaagcggcacaaaggacaaacaacaagggagaagcccaagggcagaaaaaggcacaaagaaaacaaaagggaaaacg

SEQ ID NO: 173412 - RNA, 70 nt, Homo sapiens
ggagagaaaaacggagaaacggcggaaggacaaggaaacggggacaggaaagaaaagggcagcccaacac

SEQ ID NO: 173413 - RNA, 74 nt, Homo sapiens
acaccaacgcggccccagggaaaacaaaggcagagaagccagacggcaaaagcagcgggaacagacggccgcaa

SEQ ID NO: 173414 - RNA, 53 nt, Homo sapiens
gacacacaacccgacccgacgaaacccacaggagggccagaggacaaagcacg

SEQ ID NO: 173415 - RNA, 79 nt, Homo sapiens
ccaggggaaaacccccgggaccaggagaaagacagcaaagaaaaggagaagaaaggaaaaaaacaaccccgggcacccc

SEQ ID NO: 173416 - RNA, 73 nt, Homo sapiens
cgcccagcccccaagagcggaaacagcccacaaggcgggaagaccgggcagaaacagaagcgggggaaagcgg

SEQ ID NO: 173417 - RNA, 57 nt, Homo sapiens
gagcccggcgccggcaggccccgggccgaacccaggagaaacgagagggacagcaag

SEQ ID NO: 173418 - RNA, 82 nt, Homo sapiens
agaaccacaccccccagcacaacgcagcaacaagccagagacgcgcacgaaacgacgaagaggcccgaggacagaggagcaa

SEQ ID NO: 173419 - RNA, 78 nt, Homo sapiens
ggccacgcagaccacacacagagagaaagacagcaaagaaaaggagaagaaaggaaaaaaacaaccccgggcaccccg

SEQ ID NO: 173420 - RNA, 76 nt, Homo sapiens
caacaggcgagcccccgccaccgagccaccagcaaggggcgaacgccacggggggcccgccgcgcaaagcgggccg

SEQ ID NO: 173421 - RNA, 71 nt, Homo sapiens
ggcacagagaaggcagaagacagaggaaaagaggaagagggcgggaaggcaggagacgacgacggacccca

SEQ ID NO: 173422 - RNA, 76 nt, Homo sapiens
agccacgggggcagcgccgaaccaggaccggacccggacccaaaggccagcaagcaaaaacgaaccaagggaaggc

SEQ ID NO: 173423 - RNA, 72 nt, Homo sapiens
aaggagccaggaaggaggaggaaaaaaggagcaaaaggaacacaagggagaacaaaacagaagaaaggagaa

SEQ ID NO: 173424 - RNA, 50 nt, Homo sapiens
aggcggagcggcaaaaaccgggcagcacagccaagagccgagcacgggcc

SEQ ID NO: 173425 - RNA, 74 nt, Homo sapiens
cccagagcccgggaagggggggaccgcgccgcgaaaaaggcggagagcaaaaccgggagcacggagaagaaggg

SEQ ID NO: 173426 - RNA, 57 nt, Homo sapiens
cggcggggcaggccagcgaccggccggagcccaggccacagcagaccgggaaaaaag

SEQ ID NO: 173427 - RNA, 46 nt, Homo sapiens
gcaccagggacgcaggacacaagcgcacaggcgagccaagcccagc

SEQ ID NO: 173428 - RNA, 50 nt, Homo sapiens
cggcagaaggaaaacccaagcggagcggcggacaccagaagagaaaaggg

SEQ ID NO: 173429 - RNA, 78 nt, Homo sapiens
ccagaagcacagacagcagagaagaaaggggcaggccaaaaagcgagcggccaggcgacgagagaggcgggagggaag

SEQ ID NO: 173430 - RNA, 68 nt, Homo sapiens
ggagaagaagagaaccacccgagccgacagccaaggcgccaggaacggaggggcagccgcacccaaga

SEQ ID NO: 173431 - RNA, 83 nt, Homo sapiens
gaaaagcagcaacgagaagaagccaccaaggagcaggaaaacgaccagaggaggccccccagccaccagaaccacaccaaaaa

SEQ ID NO: 173432 - RNA, 77 nt, Homo sapiens
acaagggaaagccagaggcacaagaggcaaacccaaaggggaagacagagggaaccgaaccgcggcggcccacaggc

SEQ ID NO: 173433 - RNA, 60 nt, Homo sapiens
gccagagggaaccaccggacggcggaaaggcccaggcgccccgcagacgaaggcacagcc

SEQ ID NO: 173434 - RNA, 53 nt, Homo sapiens
agcccaagcggaaagcacgcgcacagaggggaagggccgaacgcccccggcgg

SEQ ID NO: 173435 - RNA, 74 nt, Homo sapiens
cacaagagcaaagagagaaccacccgcacacagccaaagcgcaaagcgcccccccacgaccgcgacaccaacag

SEQ ID NO: 173436 - RNA, 72 nt, Homo sapiens
ggggaggcacgcagaaggggccagaaaaccggcgcagagccaaaaggaaccgaggaaaagcaggggaaacga

SEQ ID NO: 173437 - RNA, 80 nt, Homo sapiens
gagagggagacgcccaagaggccccagggggcgagaaaagcccgcgggagaagcagggcaggacccgaggcgccagcagc

SEQ ID NO: 173438 - RNA, 75 nt, Homo sapiens
cgcaacccagcgagagaaagacgaaaccacaaaacgcccaccagcacagcggcagaaacaaagcaaccccaaggc

SEQ ID NO: 173439 - RNA, 54 nt, Homo sapiens
ccacgggccgagacacgcagcggcggccagggaccacacccgacgaggaggcaa

SEQ ID NO: 173440 - RNA, 70 nt, Homo sapiens
ccccccccccaccgcgggggcgcagagcgggcaaggccccgccgcaggaagaccacccgcaggaacaccc

SEQ ID NO: 173441 - RNA, 76 nt, Homo sapiens
cgaaccaggcgcacgacgagacgcacaggaggaggacagaggcgagaagaagcggaggagcccgggaagaggccga

SEQ ID NO: 173442 - RNA, 66 nt, Homo sapiens
cggagcccagccggccgggccgcgagcacaggagcaagcgcacacacccaagccaagagcaaaaca

SEQ ID NO: 173443 - RNA, 74 nt, Homo sapiens
gccacaaaccaaacagaaggacaagcaaaaaaaaccgccccgccagcagaaggagagccgaagagagaaacccc

SEQ ID NO: 173444 - RNA, 78 nt, Homo sapiens
cgggccggacgcggacgaggcccaacagcgaggggacgagaaaggccgagagcggcccaggaggaacaaccagcccac

SEQ ID NO: 173445 - RNA, 78 nt, Homo sapiens
gaaggcggcggcccggccgcagcggcaacagaacgaaaaacagggcaacagccagcaaagacaagagcagaccagcag

SEQ ID NO: 173446 - RNA, 71 nt, Homo sapiens
aggccagagcacgagcacgggaagggacaagacggacagaaacgaacagcgggcgagccaggggagccaga

SEQ ID NO: 173447 - RNA, 82 nt, Homo sapiens
agaaccaaacccagccagccacagagaaggcccagcgagccagccaaacgagcaaacgccgggacgagcgggcccagcccgc

SEQ ID NO: 173448 - RNA, 82 nt, Homo sapiens
ccagaagcacaggccagggcagaggaccaacagggcagagagcaagggcagaccgaaggacaggcagcggcgggcgccagga

SEQ ID NO: 173449 - RNA, 63 nt, Homo sapiens
gcaaggcaccgagcaaggcgcggccccacgaggcaggagcgcggggccgcagaagaacagacc

SEQ ID NO: 173450 - RNA, 77 nt, Homo sapiens
gacaacagccggggcagcgagggaacagaggcacagaaaagaagggagacggcaacacaaaaaagacaacaacaaga

SEQ ID NO: 173451 - RNA, 81 nt, Homo sapiens
ccgcagaaggccggagacaccagcaggccacccaccccaccagagccggacaccagagccggacaccagggaggagcgagc

SEQ ID NO: 173452 - RNA, 88 nt, Homo sapiens
agacaaaaaccagaagacaagcagcggaaacggaacgccaagcgaagaagaacgaaacggaagcacaaagcagcgcgagaaagcccag

SEQ ID NO: 173453 - RNA, 56 nt, Homo sapiens
aaaacgaagcgcaaaagaggaaggcgggggagaaggagaggaacaggaagaggccg

SEQ ID NO: 173454 - RNA, 58 nt, Homo sapiens
gagagcaaccagccagaagagccagcccgccccaggggaagggcggagacggaggggg

SEQ ID NO: 173455 - RNA, 85 nt, Homo sapiens
gccacgggcaccacgccggcagcagcggaaggagcagacgcgcagggggcagaggaggacgaagaagggacaccaggccaaacca

SEQ ID NO: 173456 - RNA, 67 nt, Homo sapiens
aaacagaggaaggaaaggcgcaacaacacaaaaaaagcagcaagggcaccacggacaaccaggacaa

SEQ ID NO: 173457 - RNA, 76 nt, Homo sapiens
caaaaacccaagccacgggccacaccagcaccggcagacacgggacaaagccagaaggccaagagaggccaacaga

SEQ ID NO: 173458 - RNA, 43 nt, Homo sapiens
caagaagcacaaaggcaggccagaggccgagagaaaaaagaaa

SEQ ID NO: 173459 - RNA, 79 nt, Homo sapiens
cgcagacaggacaccaaacaccgccgccgggggcacccgaggaggaagagggcagggcccacggaaagaagggaaaccc

SEQ ID NO: 173460 - RNA, 79 nt, Homo sapiens
gcagaggcgcggagcgggcagccgccgccaccccgcggccgcacccccgccccagggggccgaagcggggacaaggaca

SEQ ID NO: 173461 - RNA, 56 nt, Homo sapiens
gaacaaagaaaaccaaaacgcaacagaaacaacagcggagcaacaccccgcaccgg

SEQ ID NO: 173462 - RNA, 79 nt, Homo sapiens
agccaagcccaagacaaaaacccaaggagaccgggagagagacgaaggacgcgcaggggcagcagacacggaaacgaag

SEQ ID NO: 173463 - RNA, 74 nt, Homo sapiens
caagcacgaagagggccagaaggcaaacggacagcgaccagaaggccaaaaaggcggaacaacaaggagaacag

SEQ ID NO: 173464 - RNA, 104 nt, Homo sapiens
caaccagacaagaggaaccgcgccccagaaggcagaggaacacaacaggaaacaggaacacgaaagaggaaaaacgcacaagaaaccgaagccaaggaggagag

SEQ ID NO: 173465 - RNA, 79 nt, Homo sapiens
gcgcgggacccacgacgccgggaccggccaagggcccacacaccaagaccaaggggcgacagcaagaaggagccagcac

SEQ ID NO: 173466 - RNA, 59 nt, Homo sapiens
ccagaggaaaagccaaggaacagggcccgacccaggcaagcgagcaggcgagcaggagc

SEQ ID NO: 173467 - RNA, 69 nt, Homo sapiens
aacaaccgcaccaccaggcagagaaacaggccaggggcaccgaggcaacacaagagcaagacagaaggc

SEQ ID NO: 173468 - RNA, 69 nt, Homo sapiens
cgaaggccccccgggacaagccaggcaccccacacagacacaaggaccacgccgcgaggcaaacgcaag

SEQ ID NO: 173469 - RNA, 79 nt, Homo sapiens
ccgagacaccgcccgcccgagaacaccaggagacacaagccccgagaaccaagaacggaagaccagcccggacccaacg

SEQ ID NO: 173470 - RNA, 79 nt, Homo sapiens
acaaccagaagccagggagaaggaaggaggaggagaacacagggaggccccaaagccggggaagaccagccgaaacccg

SEQ ID NO: 173471 - RNA, 50 nt, Homo sapiens
gacggagaaagagaccacgagcccgaacagggacacaaggacgagcaaag

SEQ ID NO: 173472 - RNA, 87 nt, Homo sapiens
gaacacgccccaaaccagcagaagccacccaaaagaagaacaaaacccaggaaacacaaagccggggaagcaaagagaacaaagaac

SEQ ID NO: 173473 - RNA, 76 nt, Homo sapiens
ggacagccagaaaaaagaacaaggagaaagaaacagacaacccaaggcccaaaaagaccacagcagacacagagac

SEQ ID NO: 173474 - RNA, 70 nt, Homo sapiens
aagcgcaaggaaggggagacccggcgcgaccacgcccggcgccccaccccaggcgagagaacccaccgca

SEQ ID NO: 173475 - RNA, 72 nt, Homo sapiens
ccggcgagaggaccaacggagcgcgaggcgggcgcggagaagcgcggaggaccaagaacgcccagcccgcgg

SEQ ID NO: 173476 - RNA, 85 nt, Homo sapiens
cgggccaagcaggacaacgcacaaccaccgcgaacagacaccaggcgccgagaaggccagcagagaaacaggcaggagaggccca

SEQ ID NO: 173477 - RNA, 84 nt, Homo sapiens
acccagagggggcagcagcgcggaggcaggaggaagcaggaaaagcagacggcacggggaaaaagaaaagggcgaagacccgaa

SEQ ID NO: 173478 - RNA, 65 nt, Homo sapiens
ggccagcacgggaacgcgaagcgccaaagccagacaacaggaaaaccgaaagcgccaggccagcg

SEQ ID NO: 173479 - RNA, 70 nt, Homo sapiens
agcgccggagccgcgcgcggcggccgggacggcgagggcgcggcccaccagcacacacgcgagggcgcaa

SEQ ID NO: 173480 - RNA, 76 nt, Homo sapiens
gaaaggaaaagagacgcagacagaacgaaaacaaacggaagagagggcagcaagaaagaacaagaaagcgaacgga

SEQ ID NO: 173481 - RNA, 52 nt, Homo sapiens
gggggccgaagcagcggcagggcaacggacggggcagccaccagggaccaac

SEQ ID NO: 173482 - RNA, 76 nt, Homo sapiens
gggaagggcaacgccaaagcaagcggccggcacacccacggcgggagggagaaaaccaaacaagagaagaaaaaag

SEQ ID NO: 173483 - RNA, 67 nt, Homo sapiens
ccagaccacggggaaacagaggccaccccgccggacaagccaacaccacaccagaaggagcacaaca

SEQ ID NO: 173484 - RNA, 120 nt, Homo sapiens
accaggacggcagggcccccggagggaacccgcccccagggagggaacaaagcccacagcaccggcacgcacaaaaccagaacgaccacaggaacaaggagaagaccaggaagagaaaga

SEQ ID NO: 173485 - RNA, 68 nt, Homo sapiens
ggcggcgccaggccggcccagagaaaaggacgacggaaccaccacgaaaaaaagcacacccaagacac

SEQ ID NO: 173486 - RNA, 57 nt, Homo sapiens
gaagccaccaaggagcaggaaaacggccagcccagaacaaagcaggccacggaagga

SEQ ID NO: 173487 - RNA, 74 nt, Homo sapiens
ccccaggcaggcgccaagcggcgccggcacccagccgcggaagcagggcccacggggccggccccagagcagcc

SEQ ID NO: 173488 - RNA, 70 nt, Homo sapiens
acgacgaacacccaggcaggccagagccgaaccaaagagcagcaggagacagaaagggaaaaagcgggag

SEQ ID NO: 173489 - RNA, 57 nt, Homo sapiens
cgggacacacgggcggagcaggaccaaccagacaaggaaaggggacaccacaggacg

SEQ ID NO: 173490 - RNA, 80 nt, Homo sapiens
cccggcccccgccaccgggaggaaaggggggcccggaaaaccacacagacgaagcaacacccacggggagcaggaacgag

SEQ ID NO: 173491 - RNA, 73 nt, Homo sapiens
gggaaacggagaagagccaaccgcaccgcgcagcaagcaggccaaacgaccgcggggccacgacaaaggggac

SEQ ID NO: 173492 - RNA, 87 nt, Homo sapiens
ggcgcaccgcgacagcgggagcacaggcccgggagggagagaaacccagacaccagaccagagcacgggcagcagcgccaagacaag

SEQ ID NO: 173493 - RNA, 66 nt, Homo sapiens
aacgaaacagcgcagggcaggagaaccaaaaaacaggaaggaaagagaggacaagagaaaaaaagg

SEQ ID NO: 173494 - RNA, 72 nt, Homo sapiens
cggaaccaggaaggaaaaaggagggacgcgaaacccaaagccgacaggaagaggcacaacaaagaaaagaac

SEQ ID NO: 173495 - RNA, 82 nt, Homo sapiens
ccggccgacccccgcgcgacggcgacgcgggaggccaggagcacacgcagagccaccagaagagagcaggaagaggcagggc

SEQ ID NO: 173496 - RNA, 62 nt, Homo sapiens
aacaccaacggccccagccacgcaccaaaagacagacggacccccccgcggcggcgaggccc

SEQ ID NO: 173497 - RNA, 79 nt, Homo sapiens
gacaccgcagagaggcagaggccggcaaagcaccaggcacagcaagcgccgaaagaccagggaaaaaaccacaacaacc

SEQ ID NO: 173498 - RNA, 76 nt, Homo sapiens
acaggaagaagagcaaagggacaaaacacccaggaaggaaggagaaagacaaacccaagaaaacaagaagagaaaa

SEQ ID NO: 173499 - RNA, 83 nt, Homo sapiens
gacggaaacagcaggagagagcacccaggggacaacaacgcaggaaagagagccaaagcccgggagacccacaggcaacgaag

SEQ ID NO: 173500 - RNA, 55 nt, Homo sapiens
cacccgccaaccccggaaggccggacacaagagggcaagaaaggcgcgacgggcc

SEQ ID NO: 173501 - RNA, 50 nt, Homo sapiens
cgacccccagcaacacacaggccggacacaagagggcaagaaaggcgcga

SEQ ID NO: 173502 - RNA, 37 nt, Homo sapiens
aacggagagcaacagcagggaaagcacagagagcagg

SEQ ID NO: 173503 - RNA, 84 nt, Homo sapiens
cggacaagcccaggagccgaccagagagcagcgggagggacaggagaacaggcacgaccccaccggcaccaccacggggacagc

SEQ ID NO: 173504 - RNA, 76 nt, Homo sapiens
accccccgcgggggggagaggccccagggaagcaagaaggaaagacccaggcgcgcacaacccaaggcccccagac

SEQ ID NO: 173505 - RNA, 70 nt, Homo sapiens
cgggaaagcggggcaagggcaccccaacccccgccccaagggacagggcaaagcccaagcaggagcagca

SEQ ID NO: 173506 - RNA, 66 nt, Homo sapiens
cgggagacccccccagcacaccaccagcaagggcggaggaggacgacaggaggcagggcccacccc

SEQ ID NO: 173507 - RNA, 75 nt, Homo sapiens
aggccgcacagagcccccacaaacaggcgccgccggaagacagcgacaaaacgcacgcgacggggagccgagagc

SEQ ID NO: 173508 - RNA, 73 nt, Homo sapiens
gaaagaccaaaagcggcccaccgaaaggaacccaggacgagcagaggcagagaccccccaagggccagagggc

SEQ ID NO: 173509 - RNA, 70 nt, Homo sapiens
ggaagaagaaacccacgaaccaaaagggacggacaaaggaacaggaccaggacccaaagacaggaccacg

SEQ ID NO: 173510 - RNA, 65 nt, Homo sapiens
gccggccagcgccggaaaccaacaaacaccgccagaagcaccaggacagccacaagggcccacca

SEQ ID NO: 173511 - RNA, 78 nt, Homo sapiens
aagccaaaagaaggcagcggagggaacgaaggaacaaagggaacccacccaccacccagggcacaacaccacagccgg

SEQ ID NO: 173512 - RNA, 102 nt, Homo sapiens
gcggccggcagggggcacccgcggccggcccggggccccgggaccggcgcccccccgaccagacaaagggagcaccagccagaccgggaagaaacgaagggg

SEQ ID NO: 173513 - RNA, 84 nt, Homo sapiens
cgaaacacagggagacagggccaggagcacgaacccaggagccgggcagccgcgacacagcagcaggggcgcagagcagcgaag

SEQ ID NO: 173514 - RNA, 79 nt, Homo sapiens
cgaccagcaggaacgagcgggcgggacccaccggggcaggaggggccacggggcccagcccaagcacgcgcgcccaggg

SEQ ID NO: 173515 - RNA, 39 nt, Homo sapiens
ccaaagggcacacagacagcagagaacaagcagaggaaa

SEQ ID NO: 173516 - RNA, 67 nt, Homo sapiens
gaaacaggacaaaggggacgaggaccgcgcagaaacggccgaaagaacgcccggagagccaaaggac

SEQ ID NO: 173517 - RNA, 70 nt, Homo sapiens
aaagaaagcagcaacgaccaaggacgacgcagcacagagaggaaacgaggaaacgaccaccggaggggac

SEQ ID NO: 173518 - RNA, 56 nt, Homo sapiens
gcggggagccccgcgccacaggccaaaaacaccgagcggccgccagaaagcacccc

SEQ ID NO: 173519 - RNA, 90 nt, Homo sapiens
agaaaagagacggagcaagagaacgcaagagacgaaagccaccacaagaaaaggccccaccggggccagcggcaggaggagagggcccgg

SEQ ID NO: 173520 - RNA, 84 nt, Homo sapiens
ccaaacagcaagagaaaacacaacaaagaacaggaaagaagaagaaggagccccacaggaaggaacggaagaagccgggaccga

SEQ ID NO: 173521 - RNA, 69 nt, Homo sapiens
accaaagaccgcacagaagcagaagaaccgcccggagcaaggaacaggaacgggaaaacggaaagaaga

SEQ ID NO: 173522 - RNA, 71 nt, Homo sapiens
aacgggagaagcagcgagaaagcagaaggacccgccaggaccaaacaagaagcagagcaaaacgcagcaac

SEQ ID NO: 173523 - RNA, 80 nt, Homo sapiens
gggaagaccaggcgcagcagcaggagagaggaacaagacaagagccgaggcagcgccccaggaccccgggcagcggcggg

SEQ ID NO: 173524 - RNA, 61 nt, Homo sapiens
cagaaccggagaccacagccgcccgaaacccgcagaccgaaaagggcggaaaaggaccaag

SEQ ID NO: 173525 - RNA, 72 nt, Homo sapiens
gagagccagccccaaccgaacccagacgcagaacgcgaacccccgggacggcccggagaagaagcggcccaa

SEQ ID NO: 173526 - RNA, 57 nt, Homo sapiens
cgggggcgagcaaaggaagaacaaaagcgcaggaaccggcccgaagccgaaagcgcg

SEQ ID NO: 173527 - RNA, 78 nt, Homo sapiens
accgaaaaggaccccaaaaagcgcaggggagcggagcaagaaaccaagacaaacaaaagacgcccccgagaggaacgg

SEQ ID NO: 173528 - RNA, 86 nt, Homo sapiens
ggagagccgccggaagagacggaaagcgaaaccacaggaccagagaagaaaggccaaaacgacaggacggcgagggaccaggggga

SEQ ID NO: 173529 - RNA, 55 nt, Homo sapiens
ccgagagaacgaggaggagccccacccgcgcagacacggccgagacgccacaagc

SEQ ID NO: 173530 - RNA, 84 nt, Homo sapiens
aacgcccgcgaacaccaagggagagcaaaagccgcgaggcacgcccaggcacggaagaagggggaaaaggacccgaggagagaa

SEQ ID NO: 173531 - RNA, 78 nt, Homo sapiens
gacgcagaaccaggcaccagagcaagacagcggaagaagacccagggaaacccccagacacgcacgagaacccccagc

SEQ ID NO: 173532 - RNA, 84 nt, Homo sapiens
cgcagcccaggcgcgggggcgacgacaggacaaggcgaaggaaaacaacaggcaacagaccaccaggaagcgaaaggcgaacac

SEQ ID NO: 173533 - RNA, 77 nt, Homo sapiens
gagggagaggagaccaacacccacccagggcgcgaggggcacagaggcaggcacaaaaccacaagcgacaacagaag

SEQ ID NO: 173534 - RNA, 57 nt, Homo sapiens
ggaaaggaggaaaagcgcacaggccgcagaaaagagagcggcaaccggcacgcacca

SEQ ID NO: 173535 - RNA, 61 nt, Homo sapiens
agaagccacaagaagaacgaagaagcggaggccagacagaaccccacacaggaaccacccg

SEQ ID NO: 173536 - RNA, 108 nt, Homo sapiens
cgccgcagaagaaagggcaacagcccggcggaggccggaccaaccgcgaaaaggaagcccacaaccaaagagaggccggagaaccagcaacgagacagaagaagaaga

SEQ ID NO: 173537 - RNA, 86 nt, Homo sapiens
cccgggggcgcccccgcgacccggaccaccgggcgcggcgccccagccggccaagacaaggggcgcagagcggggggacaggcgca

SEQ ID NO: 173538 - RNA, 74 nt, Homo sapiens
gcagaaggacccggaaagacaaggaccaaagacagagacaagcggggaagaacggcggagcacaccgaccaaaa

SEQ ID NO: 173539 - RNA, 73 nt, Homo sapiens
agaccagcgggcgccggacaccggaaacgcaccacccggagcgagacgcgccgaaggggggagccaccgaacg

SEQ ID NO: 173540 - RNA, 74 nt, Homo sapiens
gcaaaagacccaccaagaaggcacaaggggacccaaccgcgccacaaagcgaacagccgaagggagagcgccag

SEQ ID NO: 173541 - RNA, 83 nt, Homo sapiens
cggacgccgggcccgggagagaggaccccccagggggcccgagcccaccccagggaaggagaccgccaggccaggaccagacc

SEQ ID NO: 173542 - RNA, 80 nt, Homo sapiens
gaggaagacgacgggcagccccggaccgagccgacgaagaggcagagaccccggagcaacgaccccgcaaagcccgccag

SEQ ID NO: 173543 - RNA, 97 nt, Homo sapiens
cgaccggcagggagggaaggcaagagccaacccaaaaccaaaaccagcgcagaaaggaagccacacacaagcaacggcgaccgaacgcccacagcca

SEQ ID NO: 173544 - RNA, 82 nt, Homo sapiens
cgcggggggccacgcgaggccgagcggaaacagagagcaaggagaagcgagaggcgcagaaagaggaccggccagagcgacg

SEQ ID NO: 173545 - RNA, 81 nt, Homo sapiens
ggcgaggaggcgccacacccccccgacgccgcgcggggacgcaaggagaagacaagggcgaagaggcgggccccaggcacc

SEQ ID NO: 173546 - RNA, 72 nt, Homo sapiens
cggccacggccccccgccagaagccagagacaagcggagaaaggcacagcagaagaagaaacagaagaagaa

SEQ ID NO: 173547 - RNA, 81 nt, Homo sapiens
agagcccgccgggcccagccacacaggggccgccagccccccacccaaccagccaacaccacgcagccagggcagcaggag

SEQ ID NO: 173548 - RNA, 75 nt, Homo sapiens
gacggcgagaagggaagggaaagcagaggaaggcagaagaaaaaggacacgagcgagccacagcggaagaaaaag

SEQ ID NO: 173549 - RNA, 85 nt, Homo sapiens
ccaccaaaccggagggggaaaaaacccaaggcgcaaagacacgagaggcgagggacgacagagcaagcggcagagggcaagcggg

SEQ ID NO: 173550 - RNA, 75 nt, Homo sapiens
aaaagagagagaaaaaggacaaaagccaagaggaggacagcgcacacagcaagcacgagggcacgcagccaggaa

SEQ ID NO: 173551 - RNA, 80 nt, Homo sapiens
aggaaacagcaagcgaagccgaaaaagcgcccgagacgggcccgccgaaagggacaaaggccagaagcaggagagcacag

SEQ ID NO: 173552 - RNA, 36 nt, Homo sapiens
gaggggcgagccagcggccagacaacaaagcacacg

SEQ ID NO: 173553 - RNA, 71 nt, Homo sapiens
cgaagggcggcccgacccaaaaaccaggacacggccaaggccggcgagaacgcccgcggcagcgaggggac

SEQ ID NO: 173554 - RNA, 60 nt, Homo sapiens
cagccacccacaaacagagagaaggaaccacccacgcaggcagggcgcgcgccccacgac

SEQ ID NO: 173555 - RNA, 67 nt, Homo sapiens
aggaggcaggaaggaccgagaccaggaggaagacggcgaaggcccaggagaagcaaaaagccacgag

SEQ ID NO: 173556 - RNA, 67 nt, Homo sapiens
cgagagcaaagaggcccagggcagaagagccgaagaccggaaacccagcaggacgaaaacggaagcc

SEQ ID NO: 173557 - RNA, 77 nt, Homo sapiens
cagcagcaagcacagagagaccaccacaaacccaaccacgaagaagaagcgagcggcgcagaagacagaaacgcacg

SEQ ID NO: 173558 - RNA, 93 nt, Homo sapiens
ccgcccccgccggcgcgcccgcgcggcgcggggaccgcggcccgccggcaggagacgcagagcgcggagccgagccccggggggcccagcccg

SEQ ID NO: 173559 - RNA, 76 nt, Homo sapiens
acaccgagagaggaggagccagacgacaagcacacacaggcgcgaaacggaaaaagagggaaggggaacaggaccg

SEQ ID NO: 173560 - RNA, 80 nt, Homo sapiens
ggccgagaggaagacgagccgggaggaacggcccggaaacaggaggacggagcgcggagcccgggccgaagcgcacgcgc

SEQ ID NO: 173561 - RNA, 87 nt, Homo sapiens
gcgaacggagccaggcgagcgcggcgccggggcggggcccaggagacggaggacccaacagaagacgcaagaagcaaagagaaacca

SEQ ID NO: 173562 - RNA, 59 nt, Homo sapiens
aagaggcgggaggcgcggcaaaacgaggagaccagcacgaaagaagagagacaaggcaa

SEQ ID NO: 173563 - RNA, 62 nt, Homo sapiens
agcccaagacacgcgagcaagcacaccgaaagccacagcaagaaggcggccgggcaaagggc

SEQ ID NO: 173564 - RNA, 67 nt, Homo sapiens
cagggagaggacgcaaggcaggaaaaggaagagcaaaaacaaaaacccagcagacaaaagacagaag

SEQ ID NO: 173565 - RNA, 74 nt, Homo sapiens
cggcgacggcgcagacaccaggcaagaacaaggggagggagaccacagaaaaacaaaaacacagacagaagcca

SEQ ID NO: 173566 - RNA, 53 nt, Homo sapiens
gcccgcagggacgaggccccaaggccccgggggcgccgagggcacaagggcaa

SEQ ID NO: 173567 - RNA, 79 nt, Homo sapiens
agaacgcagacagaggagcggacccccgcggcgcgcagcccagcagcacaccaaaagcagagccaaacgccaccaagag

SEQ ID NO: 173568 - RNA, 77 nt, Homo sapiens
caccagccagcgaaccggcccaaagccacgagggcacagaacgagcggccacgcccgaaccagcaggacaaaaggca

SEQ ID NO: 173569 - RNA, 70 nt, Homo sapiens
cagggcccagaggacccaacaccagaagacacacagggaggaccgggggaaagcaaaaaaaccaccccaa

SEQ ID NO: 173570 - RNA, 78 nt, Homo sapiens
ccagagaagcgagcagccgcagcagaacacccccgacagcagcacacccgaagggaaacccaggaaccaaaagaggcc

SEQ ID NO: 173571 - RNA, 73 nt, Homo sapiens
gaggacagaaaacgcaagacaacaggagaggaaagcggaaagccaaggcggcggaagaggaacggacacaaca

SEQ ID NO: 173572 - RNA, 67 nt, Homo sapiens
cgggaagagggcgggcgcgacagacggcccagggcagcagcagcagcccgccacccaacagaccgga

SEQ ID NO: 173573 - RNA, 63 nt, Homo sapiens
ggccgaccagacggcccgccgcgggaccgcccagggcgacacaccaaagaaaaaacacaccaa

SEQ ID NO: 173574 - RNA, 77 nt, Homo sapiens
cagggagcccccacgcccgaaaagcagccgcgcagacgccgggacgaggaaaaaccagacagagagagagacgacac

SEQ ID NO: 173575 - RNA, 78 nt, Homo sapiens
gacacaccgcacgagagccaggggcaccaccacgaggcgaggggccaaccaaggaggcgaggggccccccgacaaccg

SEQ ID NO: 173576 - RNA, 82 nt, Homo sapiens
gaccagggacacaacgggaaaccggaccggcaaaagcagaccggaaaacccaccggcaagaccacacccgaggggagcccag

SEQ ID NO: 173577 - RNA, 79 nt, Homo sapiens
cacggcagccacgcaggcaccaggagagcaaaacaagcacgacagccacagcacgcgccccagcgcagggagggcccag

SEQ ID NO: 173578 - RNA, 74 nt, Homo sapiens
acgaccgggaaacggagaagagccaaccgcaccgcgcagaacaaccaccgacaccaagcaaccacgagagaagg

SEQ ID NO: 173579 - RNA, 77 nt, Homo sapiens
gcacagaaccaggccccgaggaacagagaaaagaaaccagcagacagaagcagaacagccagcaaagacaagagcag

SEQ ID NO: 173580 - RNA, 79 nt, Homo sapiens
ggcacaccgaggacaggaccgacagcacaacaccgcacggggagccaagccgggagaagaaaggggaccggggacacac

SEQ ID NO: 173581 - RNA, 70 nt, Homo sapiens
ccaagcagcgccagacaaagagcaagggacaagacccgccaccaaggaaaagcacccggcacaacccgcg

SEQ ID NO: 173582 - RNA, 72 nt, Homo sapiens
gaccagaacgaacccccccccccggaaggaggcacaggagagaggcaacaaggccaggaacgggagcccggc

SEQ ID NO: 173583 - RNA, 73 nt, Homo sapiens
cccagcaacgggcagcgggcgcaggaccccgccccacgcccaggggacccgggagacacaccaaccgcggccg

SEQ ID NO: 173584 - RNA, 68 nt, Homo sapiens
gagaaaacaaaaaggccagaaagaggagcagagacgccggacagcacacaggcgaagaagcgaagcgc

SEQ ID NO: 173585 - RNA, 77 nt, Homo sapiens
gcaacgggcgagagagcacagcaggaaacgaaggaggcccaaccacaaaaggagccgacggaacccagacggagaac

SEQ ID NO: 173586 - RNA, 39 nt, Homo sapiens
ggcgcggggaccgcggcccgcacaggagagaccgccagg

SEQ ID NO: 173587 - RNA, 87 nt, Homo sapiens
cggagccggagccgcagaggccccgggcggaccaggcccagggggcccgaaggcaccgcagaacggggcgggacgacaggagccaag

SEQ ID NO: 173588 - RNA, 75 nt, Homo sapiens
gagcagaacccccgaacagaacggaaaaaagggacccaagaaagccccgaacaacaacagaggcaaccagaagga

SEQ ID NO: 173589 - RNA, 72 nt, Homo sapiens
caacccacgagagaacagaggggggggaagacaacccggagaacacccaggggacgcccagaccaaacaaca

SEQ ID NO: 173590 - RNA, 77 nt, Homo sapiens
ccagaagagccggaagagacgagaagccacgaaaagggaggcaagcaggggggcaaaggaaagaaggcagaaaggga

SEQ ID NO: 173591 - RNA, 96 nt, Homo sapiens
ggagccccgcgccgggggagcacgcagcgggcaagggaagaccaccgcagggcggccgagggaaagggagcagcaccggccacacccacagcacga

SEQ ID NO: 173592 - RNA, 62 nt, Homo sapiens
gcccagcagcacccgccccccagccagaacagagccaaggggaagagaaagcgaagcgggaa

SEQ ID NO: 173593 - RNA, 89 nt, Homo sapiens
agcccacagagacacaaccggagcccagagccacgcaaaaccaccggccacacaagccagcaacagcaagaaacaagcaaaggggacaa

SEQ ID NO: 173594 - RNA, 69 nt, Homo sapiens
gccaggggacccccagaccaccgacagcaccaaggacagaaagcgggacacaagcaggagcacagaccc

SEQ ID NO: 173595 - RNA, 70 nt, Homo sapiens
cccgcagccgcacccccggcggcagcacgaaagaccagccgccggcggagagaacaggggagaaccaggc

SEQ ID NO: 173596 - RNA, 79 nt, Homo sapiens
agacccccagccaggcccacgcacccgccccccacgagcccggaagacgcgcggagccgggaacaccgcaaagaccccg

SEQ ID NO: 173597 - RNA, 87 nt, Homo sapiens
cagagagcacaggagagacgccgcgacaaggcgacccgagggacgggaccacgggacgggccaaccacccaaagaaagcacagagag

SEQ ID NO: 173598 - RNA, 72 nt, Homo sapiens
ggaaccgaaagacaaggaccacgaccagcggggcacaaagaaggggaagaaagccccccacggagagcgcag

SEQ ID NO: 173599 - RNA, 68 nt, Homo sapiens
gaggacaagccccaggccgaggagcccacagggagcggaacacaaggggcacaccgggccccggacgc

SEQ ID NO: 173600 - RNA, 82 nt, Homo sapiens
ggggccagaggcgaaggggggagaacggccccccgcccgggcccgcgcccacagacagcgggcgcggaaccaaggacgcccc

SEQ ID NO: 173601 - RNA, 64 nt, Homo sapiens
ccgacgggcacccacagacggcgaaggcagccacagcgcccagagagaacaaccgccagggaac

SEQ ID NO: 173602 - RNA, 79 nt, Homo sapiens
cgcgaccggcccgaaacacaccacgcggcgcgacccacacagacaacagccggggcagcggcccccgggaaaccgaagc

SEQ ID NO: 173603 - RNA, 75 nt, Homo sapiens
acaccaagaacacaggcacgggagaccgcaagagaagaagagccaccggcagcaaaggcgcaccaaggacccagg

SEQ ID NO: 173604 - RNA, 79 nt, Homo sapiens
acggcggcagcagcggcacagggcagagcggcgggaaaccaccaacaacacccccaaaccaaaacagccggaagcgggc

SEQ ID NO: 173605 - RNA, 82 nt, Homo sapiens
ggaagcggcagaaggagacagaaaccacggagaagcagggcccgggaagaacccaccgccagcaggcacagcgcggcagcgc

SEQ ID NO: 173606 - RNA, 91 nt, Homo sapiens
cacgacagaccaagggggagcagaacagcagcacgaagggaacaagccgccccggcccagaggaccgcaggcccggcccggggagagaccg

SEQ ID NO: 173607 - RNA, 66 nt, Homo sapiens
ggcgaccaccaaaaaaacgggcgcacggaggggaaaagccagcaaaaagacaaggccacagccgaa

SEQ ID NO: 173608 - RNA, 80 nt, Homo sapiens
ggcccacagaccagaaggcaccagacggcaaaggacccaaaagagaccgaaggcccaaacagaagacacgaagagcggcg

SEQ ID NO: 173609 - RNA, 65 nt, Homo sapiens
ccacacaaacccgggacgggccgagagcgaaccccaagcccgacggggacccaccccccgacagg

SEQ ID NO: 173610 - RNA, 75 nt, Homo sapiens
cccagggcccggaagccggccacaacgcaaggagcggaaggcgcgaggcaacaagaagaagaagcgcacaaggag

SEQ ID NO: 173611 - RNA, 73 nt, Homo sapiens
gcgccccaaccccggcagccccaggcaagccacagccaggaaacaccagccccccggcacggccaaacaacca

SEQ ID NO: 173612 - RNA, 61 nt, Homo sapiens
ggaaagacgaaggggccccagagccaaggaggaaggggccggcagagggcacggccggcac

SEQ ID NO: 173613 - RNA, 52 nt, Homo sapiens
ggggagaccgggcacacggacgcccacgcggaggaagagagaaccagaggcc

SEQ ID NO: 173614 - RNA, 75 nt, Homo sapiens
accacgggcagaccacggagccgagagcggcccaggaggaacaaccagcccacccggagagggcacgcgcgggga

SEQ ID NO: 173615 - RNA, 82 nt, Homo sapiens
aagcccgggccagggccaccccggcgagagaccaagccacccaccaacacggggccggcacaacccggagccacccaccgag

SEQ ID NO: 173616 - RNA, 82 nt, Homo sapiens
agcgggcccggccaggaacagggacagcacccaccccggagggggaccacaagacccacgacagggccggccgcgcacccag

SEQ ID NO: 173617 - RNA, 70 nt, Homo sapiens
cgcgggaacggcgcggaaggggccccacagacagagcccgaaagagggaacggcaccacgaccccaggca

SEQ ID NO: 173618 - RNA, 79 nt, Homo sapiens
gggagaggcgagccgcgagagggccggcaggcccgggaagggaccgggaccagcccccgaggacacgcaggagacccca

SEQ ID NO: 173619 - RNA, 76 nt, Homo sapiens
acagcgaaggacacgaaacgagacagaggagcccagacccacgcgacaggagaagggcgcggcacccaggcggagg

SEQ ID NO: 173620 - RNA, 74 nt, Homo sapiens
ccagggccggaaaagccaacgccggcgaaggaacacagcacccacccacacccacacccgcgacgggagggagg

SEQ ID NO: 173621 - RNA, 84 nt, Homo sapiens
accagcaggacccgaggccaggagccaggggcccagaaggagaagacagaggagccagaccaagagacagcacaggcgagcgag

SEQ ID NO: 173622 - RNA, 56 nt, Homo sapiens
agggcgacggacagagggcgacagacaaaggcagaaaagcgagccaccccagggga

SEQ ID NO: 173623 - RNA, 61 nt, Homo sapiens
ccggcccccccccggcgccgcggcgccgcgccgccgcgcaggagcaggccgaaagaacacc

SEQ ID NO: 173624 - RNA, 71 nt, Homo sapiens
agaagagaaagccccagaaaagccacagaaagcaacaggaaggccgggaaggaaggagcgcaccgcaacgg

SEQ ID NO: 173625 - RNA, 39 nt, Homo sapiens
agaaagagcagcgcccgaagggaccccaccgcccgaggg

SEQ ID NO: 173626 - RNA, 78 nt, Homo sapiens
acggacacccagcggcgacacgcgacgcgccaaaacccgcccggaaaggggacaccgcgacagggccacgagcccagg

SEQ ID NO: 173627 - RNA, 71 nt, Homo sapiens
ggaggaaggacagagaaagcagcgaagagcgagaagcgggcaggcccggcgcaggacggacggcccaaacc

SEQ ID NO: 173628 - RNA, 86 nt, Homo sapiens
cgcggaggggcgagccagcggccagaagaacggaccgaagccaaagaacaagagcgcagggacagagcgaccaggggcgagagcgg

SEQ ID NO: 173629 - RNA, 56 nt, Homo sapiens
gcgacagcccgggacaccaagaaagaacgagaagcggaggcagacgcgcccggaga

SEQ ID NO: 173630 - RNA, 72 nt, Homo sapiens
cgaaacacaaccaaggagcaccaaaaagaagaaccgcgccaagagcagggaagagaacaacggcgaaagaaa

SEQ ID NO: 173631 - RNA, 70 nt, Homo sapiens
caccagcaaagaaagggaagcagcgggagaggaggagacgacaacgagggagccgcggaagaaggccggc

SEQ ID NO: 173632 - RNA, 59 nt, Homo sapiens
ccagccagaggacgcgggccgaggagagcggaggaggggaagaaacggagagaggcacc

SEQ ID NO: 173633 - RNA, 130 nt, Homo sapiens
ggcggaccaccggcggggaggagaccaggcgacaccgcgacaccccaacaaacaccagcgcgggggaccagggccgaggcggcgacagacacagcacggcgacggaggggggccgacaccacggggcagg

SEQ ID NO: 173634 - RNA, 69 nt, Homo sapiens
ggacgcggaggcccaaccgaagaaaacaaggaccgcaagaaccagggagaccacaaaagagcagaggag

SEQ ID NO: 173635 - RNA, 63 nt, Homo sapiens
aggagccgagggagccaaaaaaggcgacaggcgccaaggagagaagagcgccagagcgcccga

SEQ ID NO: 173636 - RNA, 86 nt, Homo sapiens
cagcacccaccccgagccccggcacccagcaaggaggcaacgcacgggccacaggcagccgcagaacaggccggggacggaggggg

SEQ ID NO: 173637 - RNA, 72 nt, Homo sapiens
agggggacggagaacacagacaaccgacggcacgggaaacacgagaccggcgcagcagagcagaaacaacac

SEQ ID NO: 173638 - RNA, 79 nt, Homo sapiens
ccagacaaggaggaccgcacgacagcggcccgcggggacaacccgccacaacgacaaaggaccccaaagaccccggaag

SEQ ID NO: 173639 - RNA, 69 nt, Homo sapiens
agggaaggccacgaggacgagaggcccaagggaagcaagaaaaaagacgggcccggggagagaaggagc

SEQ ID NO: 173640 - RNA, 75 nt, Homo sapiens
ggagacaggaccgcggcgagcaagaaacccaaaggacaccagagcagcacgcgcacgcgaaagaaacacaagccg

SEQ ID NO: 173641 - RNA, 79 nt, Homo sapiens
cagagcgggaccccggcgccgagccagggcccgcgggcccgaggggagcaggcaaaagcagaccggaaaacccaccggc

SEQ ID NO: 173642 - RNA, 69 nt, Homo sapiens
aagaagccgcagccagaggagacagacccagcacggaccccccccccagccgggcgaggccccgaaacg

SEQ ID NO: 173643 - RNA, 64 nt, Homo sapiens
cagacgaccccacccgcgccgcgacccggcccaggcccaggcccaaggccaaggagagagccca

SEQ ID NO: 173644 - RNA, 70 nt, Homo sapiens
gggaccgccgcccggcaaacacggaaccaccaacacccagccacccaccagcgacaaggcagggccagcc

SEQ ID NO: 173645 - RNA, 69 nt, Homo sapiens
aaagagagcaagacgacggaaccaacacacaaagccgcagaaagcagcagaaaagcgcaggaaaaaccc

SEQ ID NO: 173646 - RNA, 64 nt, Homo sapiens
cgcgcgcggccggagcccagccgcagcaccaaggcaggcagaaagacccgcagagaccagggaa

SEQ ID NO: 173647 - RNA, 74 nt, Homo sapiens
accgaagcggcggcaggggccgcggcccggagcagaggacgacgaacacccaggcaggccagagccgaaccaaa

SEQ ID NO: 173648 - RNA, 63 nt, Homo sapiens
ccggcccacaggggggggcaaacccgagagaacggggcaaagaccaccacaaagagaagaacg

SEQ ID NO: 173649 - RNA, 77 nt, Homo sapiens
cgccccagcgcccgccgcaaggcgggggaggcggcggcccagccacgaggcgccggggaaggaaccagaacggcacc

SEQ ID NO: 173650 - RNA, 75 nt, Homo sapiens
cagccgaggccccccagccacgccgacagccgcagaacgaacccacccagcggggacccagaagaggcccgcagc

SEQ ID NO: 173651 - RNA, 86 nt, Homo sapiens
ccgggggcgcccgcggaggccggggagcagccgaccaggagccccagagagcccacagcaccagagaaaaaaaaagaaggcaaaag

SEQ ID NO: 173652 - RNA, 61 nt, Homo sapiens
ccccccgccacgggggaaagacacggagccccgaggacgggacagagcgggagccaccagc

SEQ ID NO: 173653 - RNA, 56 nt, Homo sapiens
acacagcgaccgggagcacaccacaggcaaggccagaagaaggaagggagaggcaa

SEQ ID NO: 173654 - RNA, 56 nt, Homo sapiens
gggagaccacagcaagacaccgggaccccggaagccaaaaagggcccgaagacacc

SEQ ID NO: 173655 - RNA, 77 nt, Homo sapiens
cgcccacccagccaggagacaggaggccgcggggagacgcgggggacggggcaggaccacaggaacacaaccaacag

SEQ ID NO: 173656 - RNA, 92 nt, Homo sapiens
ggcgggcgggagagaagagccgcagcccgagcccagaaggcggcgaccgggcgcgggcaaggcggagcggcagcccacaagcaggaagacca

SEQ ID NO: 173657 - RNA, 77 nt, Homo sapiens
cacgaaacgcaaggagcagacagaaccacaccaccggagcacaagcaagagagacgaaaagcacgggaccagaaccc

SEQ ID NO: 173658 - RNA, 78 nt, Homo sapiens
gccgccgaagaagcacgaaagccccacccgccgcagcaagcagagggacgcaaggagccgacaaggcgcggagacaca

SEQ ID NO: 173659 - RNA, 81 nt, Homo sapiens
cagggccggcggacagcaacacgaccaccaaggacacaggaacgccacaagaaacaacagcaaggcgagggccacgaaaca

SEQ ID NO: 173660 - RNA, 65 nt, Homo sapiens
agggagaaagacaccgaaaaggggaacccgaaaagcgcagacgaaggaaaacaacgggaagagac

SEQ ID NO: 173661 - RNA, 82 nt, Homo sapiens
cgccagacagcccagagaagccgcaaaggccagcaagcggcaagcccggcagcccggcgcccccaagccagccgcagggcga

SEQ ID NO: 173662 - RNA, 76 nt, Homo sapiens
gagagggggaccccgcagccgcagaggaggagcgcagcccggcccgggaaggggaagcaggccaacccagaacaca

SEQ ID NO: 173663 - RNA, 78 nt, Homo sapiens
gaagaaccccaaccccggaacacagaaacgccccgggccagccgccaaggccgcccagagccccagcacaagacagag

SEQ ID NO: 173664 - RNA, 48 nt, Homo sapiens
cggaagccacgccgaaagcgacgggcgcccagcggccggggaggagca

SEQ ID NO: 173665 - RNA, 77 nt, Homo sapiens
cgaacacaaggagacgacggccgcaaggaggaaacaaaacagcccaccgcgcagcaaagaagagccacgcaggccag

SEQ ID NO: 173666 - RNA, 77 nt, Homo sapiens
caggacagaaacgacccaggaagcgcccgcggaaaagcacagggccaggaagcagagggacagccaggccagaaaca

SEQ ID NO: 173667 - RNA, 75 nt, Homo sapiens
gggggacacccagccacacgcggagaagaggcacagggggacgaaacgaacgacagaaacccaagcagagaaagg

SEQ ID NO: 173668 - RNA, 75 nt, Homo sapiens
ccaagagaagcgacagaagagggaaaggagaaaaacaggcagccgcaacgaacaagaaggcagagggggcgaggg

SEQ ID NO: 173669 - RNA, 77 nt, Homo sapiens
ggaggccgaggcgggcggacacaagaacagaccacagcgcggccagaaggcacagcccaggcgggaagacgagagac

SEQ ID NO: 173670 - RNA, 77 nt, Homo sapiens
ccaccgcacgggcaccggcaagggcaccggcgcagagagccacggacccggccaggaccgcaggggaaccgcacgcc

SEQ ID NO: 173671 - RNA, 117 nt, Homo sapiens
ggaagagaggaacgagcagaaacgaaagagagaaaaccggaacacagcacagcagggcaaagaaaaaggagagaaaaagaggcaaaacaacaagaagaaaagagaaaaaagagagcg

SEQ ID NO: 173672 - RNA, 85 nt, Homo sapiens
aaagcagcagacagagagggaaaagaaaagaccaaagcaagagagagaaagccagagggcggggagcagaaaccaccgccaggag

SEQ ID NO: 173673 - RNA, 80 nt, Homo sapiens
cggcccagacaacccaacccgccaaggagccaccggccacaaggcccgaggggagaacgcgacacacaccaagcgaagcc

SEQ ID NO: 173674 - RNA, 81 nt, Homo sapiens
cccggagccggagaccccccgaaaccggcacgggacccgaccggaggcaccggcaaggacaggggaaccacagagaacaca

SEQ ID NO: 173675 - RNA, 60 nt, Homo sapiens
cacccgccccccgcgcccgccaccggccgccgcccgaacgaaaacaaacggaagagaggg

SEQ ID NO: 173676 - RNA, 69 nt, Homo sapiens
gagagaacgacagggagccacaggaagaaggccacaggggaggcaggaaaaagacacaagacagcagga

SEQ ID NO: 173677 - RNA, 77 nt, Homo sapiens
ccaagaagggccaccccacagacggaccggcagcgccaacccaggcaccagccacaggggagaacaaaacgcccggg

SEQ ID NO: 173678 - RNA, 83 nt, Homo sapiens
gagaaaccacaacaaaaggccacgcaagcaggcggggaccaaacaagacggccgacggcgggccggaagaaagagggaagaca

SEQ ID NO: 173679 - RNA, 86 nt, Homo sapiens
ccgcgccgcccgggcgagcccgcggggacgccgccggccagcagagcgagggacgaacagcggggacgccccagcagaccgcccag

SEQ ID NO: 173680 - RNA, 72 nt, Homo sapiens
aacgaagcaagagaagaagagaacagaaagaaaacaggcgccaccacgaggcggacaaggcaaaggggcagc

SEQ ID NO: 173681 - RNA, 59 nt, Homo sapiens
gggcaagaaccaggcccgcccaaggcaggagaaggaagcgccggccaaacgagcacagc

SEQ ID NO: 173682 - RNA, 79 nt, Homo sapiens
cccagcgcgcgccccgcccccccccagagcaagggaaaccagacgaaacaacagccaaagacaaacagcacaacaaaca

SEQ ID NO: 173683 - RNA, 74 nt, Homo sapiens
gccggacccagagagcaccgagagaggagaaaaacacaccgacagcagaacacacgcgaaaggaaaccaagcgg

SEQ ID NO: 173684 - RNA, 81 nt, Homo sapiens
ggcgaggcgccgccaggcccgcggacccgaccaagaggcagaagacgggggacccagacagacaagccccgagggagagga

SEQ ID NO: 173685 - RNA, 54 nt, Homo sapiens
ccaaacacgccggaaaccccgcccacagcacgagggcacggcaaccagccccga

SEQ ID NO: 173686 - RNA, 37 nt, Homo sapiens
gacccgggagacacgacggggaagggcaaaccggcgg

SEQ ID NO: 173687 - RNA, 78 nt, Homo sapiens
cggacacggcccagacgcaggcgcagccaaacggaacaaaaccgaaccaacaccacacaaacccgacgccaccacggg

SEQ ID NO: 173688 - RNA, 71 nt, Homo sapiens
ggcccagcaggagcgccaaccaggcagcggacaacgggacccaaaaccaacacccaaaccgggagcaaacg

SEQ ID NO: 173689 - RNA, 81 nt, Homo sapiens
aggagggcgggaacaaagaagaccgagccggcgaaggacgggagagcccgcgcggccgcagggacgcgcgcggggagaggc

SEQ ID NO: 173690 - RNA, 74 nt, Homo sapiens
gggcgcggagcggcggcgagcaggccgcgggggacccgagggggacccagcgcccgggcgcccaccgaacgacc

SEQ ID NO: 173691 - RNA, 88 nt, Homo sapiens
aaccacccccaaacaggcggccccgcccaggccccaaggagccacaccggaccagaccccaggaaagaacaacccccaggggcggccc

SEQ ID NO: 173692 - RNA, 65 nt, Homo sapiens
agacgaagagcgaagcggagggggccccaccaaaaccccgaaagaaaacggggacggacccaggc

SEQ ID NO: 173693 - RNA, 83 nt, Homo sapiens
caccgcccagccgaccgaggcgccgccgcgagcgccacgccaaggaggggcagaagacgaccccgacgcaggccaggagccgc

SEQ ID NO: 173694 - RNA, 70 nt, Homo sapiens
ccggaacaggacccggagcgccggcaaccgggaaagcaaccccacaagccgaggccgccagcgccaagaa

SEQ ID NO: 173695 - RNA, 82 nt, Homo sapiens
caagggaagcagaagaaaaggagaaggaaagcgaaggggaaggcgccgaagaggacgaaggcggcccggcccgcagacggcc

SEQ ID NO: 173696 - RNA, 77 nt, Homo sapiens
cagaagcagcacaccaggaccaggccgaaccaccggagccgaccaggggcccaggccgaggaggagacaggccgaga

SEQ ID NO: 173697 - RNA, 75 nt, Homo sapiens
gccagagcggccagccagggggcgaggaagagacaggcgggggagaagaagcagggccaaacgcaggagaaagaa

SEQ ID NO: 173698 - RNA, 67 nt, Homo sapiens
ccgacacagggaacagcaggccccggggcgcgcacaggggccacagagaaagggaccggcagacacg

SEQ ID NO: 173699 - RNA, 84 nt, Homo sapiens
acggcgagggaacgggcgcaggcggcaaaagcagccccagcgaagagagcggcaaaggcaaaagagaaaccgcgccgaccagcg

SEQ ID NO: 173700 - RNA, 76 nt, Homo sapiens
acaaaagaggcagaaggcccaaagggacggacacagggagggccaagaacccgggaggaggggaacaccggaccag

SEQ ID NO: 173701 - RNA, 51 nt, Homo sapiens
cgcacgccggaccgagaaagggagaaacggaaggcgaggacaggaaagaca

SEQ ID NO: 173702 - RNA, 71 nt, Homo sapiens
gaaaggcacgcacgagaagcggccgaagagagcgccaaccgaggccaaagcccacagcgccgaagcaccac

SEQ ID NO: 173703 - RNA, 64 nt, Homo sapiens
agcagcaaaggaacccaccagcgaacacaccagggcagcgcagccccaggacggccgcacgcca

SEQ ID NO: 173704 - RNA, 74 nt, Homo sapiens
gaagagagaaaaaccgcaagaggacgaggggagacggggagaagacggaaaccaaaaggaggaaagagaaagac

SEQ ID NO: 173705 - RNA, 33 nt, Homo sapiens
gagaagcagcggagagaggcacacccagaagcc

SEQ ID NO: 173706 - RNA, 79 nt, Homo sapiens
acaggagacagagagcaagagcaccccaacggcccagagcccggaacagagaaagcccgcccaacaacaaaaaggaggc

SEQ ID NO: 173707 - RNA, 78 nt, Homo sapiens
gaccggaccacaaaaaggacaccagcaagcgcaagaggagggcgaaccgagagcagccccagacaccccgcagggaac

SEQ ID NO: 173708 - RNA, 73 nt, Homo sapiens
cccgccagggggaggacgaagacacgcccagcagggagcggaggagccagacagcgcgggcagagaaaaaacc

SEQ ID NO: 173709 - RNA, 80 nt, Homo sapiens
ggccgaagggggccggcacccgagggagagcgcaccaccccacgcgccaggcgagaccccagggcacgagagcagcgcgg

SEQ ID NO: 173710 - RNA, 55 nt, Homo sapiens
gcgcgccgcccaaggccaggggacaagaaaaccagaaacgggggcccgacaagac

SEQ ID NO: 173711 - RNA, 78 nt, Homo sapiens
gcggaaggcagcgcccagcagcgcagaagacgaccccgacgcaggccaggagccgcggacagaagccgagcacggccg

SEQ ID NO: 173712 - RNA, 71 nt, Homo sapiens
accgagaaacaccgggcgggccccgggcgagcggggacaagccgagaccaccaggagcagagcggaggcaa

SEQ ID NO: 173713 - RNA, 84 nt, Homo sapiens
ccaaggagccagggaccacggagagaacgccagccaagcccgcgggaaggcaccgggggggacggcacggggccgcgccacgcc

SEQ ID NO: 173714 - RNA, 81 nt, Homo sapiens
ggccgagcggagcaccggcacacccggcggcagaaacacggacaaaaaggggaggagacaaagcggccagaagaaaagaga

SEQ ID NO: 173715 - RNA, 101 nt, Homo sapiens
ccccacgaggccccagcgggcacaccaccccaccccgcccacaaggcccagaacgcaagcaggcaccccagcccaaagaggacagagggagcgccgcgccg

SEQ ID NO: 173716 - RNA, 71 nt, Homo sapiens
gaccggaggcgcccccagaaggaagagccggaagagcgcagaagccggaagagagccaagccaggcccagc

SEQ ID NO: 173717 - RNA, 78 nt, Homo sapiens
gaaaagcggaaaaaagaagcaaaacaagaaagaggagaaacgacgggcgccggccgagcccgggaaaacgacagcagc

SEQ ID NO: 173718 - RNA, 70 nt, Homo sapiens
cgaggggccacacgagagagcaacgacggcacagcgccagggaagaagaccaggacaacgcaaagcaccg

SEQ ID NO: 173719 - RNA, 78 nt, Homo sapiens
gcagcagagggaggcgccagcgcgacgagaggcacggaagaaggcaccgcccagaaggaaacagcgaaagcacaggaa

SEQ ID NO: 173720 - RNA, 69 nt, Homo sapiens
gacaaaacaccacaggagacaggaaggcaagaacaaaggcaccaaaggagccaaggagacagcgaaccc

SEQ ID NO: 173721 - RNA, 99 nt, Homo sapiens
ccccagacacagcaagggacgacaccaggccaccaccgcgcacgccagcagcaaacaaagcagccgagcggaaaaggaagacgagcaaagaagaccagg

SEQ ID NO: 173722 - RNA, 82 nt, Homo sapiens
cccgggccccgggaacccagccgcgccaccacgcacgcacacgccggcgcgcgaccgcgcaaaacgagaagaacggcacaca

SEQ ID NO: 173723 - RNA, 88 nt, Homo sapiens
aaccgcaaccagacgccagcgggacgaggaccgagaccgcggccgggaccgaggaacgccaaaagacgaacacaaagggaaagaggag

SEQ ID NO: 173724 - RNA, 90 nt, Homo sapiens
ggagaaaacccgcgacgccaaccacgacgaagcggaaggcagaaggacacgagcaggagaccgaggacgcaaacagcaaagaggcccaaa

SEQ ID NO: 173725 - RNA, 88 nt, Homo sapiens
aaggcgcagcgagacccccccaagaagagcacgaggaagcacccagccaaacccaggcccgagaagaagaggaaaacccaccaccgaa

SEQ ID NO: 173726 - RNA, 74 nt, Homo sapiens
gcgcgaaacgcacgagaagacacggaaccagaggcagcagcccaaccccgaggacagcccaggccacgcaccca

SEQ ID NO: 173727 - RNA, 79 nt, Homo sapiens
ccgaccgcccacagacccaaacaaaggagcccccaggacaggcacacccgggaaaaccgaacacccagcccagacacaa

SEQ ID NO: 173728 - RNA, 71 nt, Homo sapiens
aggggaggaggacacacacgccccaggcaaaggaggggcaaaagggacaaccgaaggcacagagccgaccc

SEQ ID NO: 173729 - RNA, 81 nt, Homo sapiens
ggcgcacggagggaccccagaggaagagagagagcgagagccgccagacccacggacgcgcacgacacgaccccaggccgg

SEQ ID NO: 173730 - RNA, 71 nt, Homo sapiens
gaaggaccaagaaccagaaaagagcacgccacgcgggaaaacagagccagaaaccgaacccggcaccacag

SEQ ID NO: 173731 - RNA, 87 nt, Homo sapiens
cccccgcaaggaggccccaccagacccagaagaagaagagaaaaggagaaccgaagggaaaggaaaagaggcgcagccaaagccgca

SEQ ID NO: 173732 - RNA, 83 nt, Homo sapiens
gagacgagaggacgggaccaggcgaagcggccgagcaggcgagcgaacgacgagagcccagaggaccggcggcccgaccaaag

SEQ ID NO: 173733 - RNA, 73 nt, Homo sapiens
acaagcgacaaccagaaggggaacgaaagacagaagcagagcgaacagagcgccaggagccgagccggccacc

SEQ ID NO: 173734 - RNA, 84 nt, Homo sapiens
ccggcggacgcaaccggcgacagccccaaggcaacaagcccacccgaaaccacaaggccgacgcaaaggaaaagccaaggagac

SEQ ID NO: 173735 - RNA, 73 nt, Homo sapiens
cgcccggaacagcacaggcagagcaggagggaccacagagcccaccacacagcaggccaggacgcgaagggag

SEQ ID NO: 173736 - RNA, 67 nt, Homo sapiens
cccagccgcgcccgggagagcaagcccaagcgcgggacccggcccggggaccgcccgcccgcgccgg

SEQ ID NO: 173737 - RNA, 79 nt, Homo sapiens
gagaccgcgcaggcacccagcagagacagcaaccggccacgaggagggacgggagcgggccgagaaaaaccacagagac

SEQ ID NO: 173738 - RNA, 66 nt, Homo sapiens
caggagcgagagcacaggaaaagaaaaccggagaccagggcaacccagaccagaacgggccaagaa

SEQ ID NO: 173739 - RNA, 70 nt, Homo sapiens
ccgccaccgccgccgccccagggccgcaacacgggcccgcagcgcagaaggaccagcagcccccgccaag

SEQ ID NO: 173740 - RNA, 63 nt, Homo sapiens
cccgggaccggaggggcgcaagcagaaagcgagaaagggaaggaaaaagagacggcaagaacc

SEQ ID NO: 173741 - RNA, 71 nt, Homo sapiens
cggccgagacaaaggcaccaggccaccacagaaacaaaagcaacaaagaggggaacgggagccacacgacg

SEQ ID NO: 173742 - RNA, 75 nt, Homo sapiens
ggacagccacaccccaagagcccagccgacccggagaggaaagcccaccagccgagaaacaagccgggggcgagc

SEQ ID NO: 173743 - RNA, 71 nt, Homo sapiens
gaggaaaggagcgaagacgaaggaaaggccaggcgcaaaaagcaaaaaacacggaacggagaaggggaaaa

SEQ ID NO: 173744 - RNA, 71 nt, Homo sapiens
agccgggcccagaggaccggccggcacgccgcccggggccagacccccgagccgcaccgagcaggcgggca

SEQ ID NO: 173745 - RNA, 88 nt, Homo sapiens
gaaacaaaacgcacggaaagacccagaaagccaagacaaaaaccagcgcagaaaggaagccacacacaagcaacggcgaccgaacgcc

SEQ ID NO: 173746 - RNA, 64 nt, Homo sapiens
agcggcagagaaaaaggccaccgaggcggcgacggcggcgcgaggaccgaccgggcccgcggac

SEQ ID NO: 173747 - RNA, 71 nt, Homo sapiens
gcgcgcccgcagcgcccgccacagaacaaaaggcaagggagagaagaccacaggcagagagagaaacaggg

SEQ ID NO: 173748 - RNA, 52 nt, Homo sapiens
cacgcgcggaaggcagcgcccagcagcgcagaggcaccaaaaagcacgaaag

SEQ ID NO: 173749 - RNA, 61 nt, Homo sapiens
ggaggaggcaaaccagcgggacgaaccacaagacaccgaaaccacagagcgaagcgaggaa

SEQ ID NO: 173750 - RNA, 59 nt, Homo sapiens
ccccccggcgccgcgccggcggcgccagggcgcccaccacgacagccggagagccgcag

SEQ ID NO: 173751 - RNA, 71 nt, Homo sapiens
gcagagccaaggccgggacaccaggaggcaaggaggccacggggccgaagacaccaaccgggcaccagcca

SEQ ID NO: 173752 - RNA, 86 nt, Homo sapiens
accagagagcgcggccggaggacagacaggacccagaccagccaaagagaagaagaaaggaagcaaaacaaagaaaaaaaaaaacc

SEQ ID NO: 173753 - RNA, 77 nt, Homo sapiens
caaaaaacggagcaaagggcagcggcggagccgccaaggcggcgcagcggaaggcccgcacgcagaggaaacggcaa

SEQ ID NO: 173754 - RNA, 66 nt, Homo sapiens
ggccaagaaaaccagccggaccgcgcagaagaccccgcaccagaggaaacagaagacagccgaacc

SEQ ID NO: 173755 - RNA, 53 nt, Homo sapiens
gaaaagcaagggaaagcagcacgaggaagcagcaggacgaagcacgcagagaa

SEQ ID NO: 173756 - RNA, 85 nt, Homo sapiens
aggaggaagaagagacgaagagacagcggagaaacaggggccacacagagaacaaaccaggagagaaacaaaccggagaacacga

SEQ ID NO: 173757 - RNA, 57 nt, Homo sapiens
ggcgcgggggacggccgccagagggcagccacaaggaggcacacgagcggccacgag

SEQ ID NO: 173758 - RNA, 95 nt, Homo sapiens
agaggaaccccgccgggccgggcggccgccgcccgcggagggaagcgccccccacagccccaaaagcacgcacgaaaccggcaagccagcggagg

SEQ ID NO: 173759 - RNA, 74 nt, Homo sapiens
acaagaacagaggcgcaacacggggaccccgagacagagggaagggcgccggaaaaccgcacagccggccaagg

SEQ ID NO: 173760 - RNA, 75 nt, Homo sapiens
cacaccgaagcaacccaaagcacgaacaagcaagcagaacacgagaaccacgaagcacgaaagaaaaaggaagcc

SEQ ID NO: 173761 - RNA, 38 nt, Homo sapiens
ggggacggcacggagaaggaccgacccaaccgaagaaa

SEQ ID NO: 173762 - RNA, 67 nt, Homo sapiens
caagcaaagggacaccaccagcagagagggacgggcaccaaaaaaggcaccacgaccaacgccacgc

SEQ ID NO: 173763 - RNA, 73 nt, Homo sapiens
agaacgcaggacacgcaagagcgacccacaggagaaacaccagcgagcagagggaaagccgccagccaccgcg

SEQ ID NO: 173764 - RNA, 85 nt, Homo sapiens
cgggagcccgggcgcgcaccgccgcccccccagacaagaggacaccgcggaggaaggcccagaacagccgggcccaaagaaaggg

SEQ ID NO: 173765 - RNA, 82 nt, Homo sapiens
ccgccgggacccccaggacgacggaccggacacaccgaccagcaccagacagcgaaaaagaggacccaaaaaagagagaaaa

SEQ ID NO: 173766 - RNA, 88 nt, Homo sapiens
gaaaaacggagaacagggagaccagccaccacaagcccaaagggccggcgcggaagaggccggcggcgggacggccccacgggacccg

SEQ ID NO: 173767 - RNA, 122 nt, Homo sapiens
gcgaccccacccagcaggggacaccagaagcacgaagaccaggacacaaccggaaccgcagggcacggggcgggaggcggaccgccaacacccagggaaggggccgcgcggggaggcggggc

SEQ ID NO: 173768 - RNA, 57 nt, Homo sapiens
aggcgaagacggggagccacgaggagaacgggaaagagagacgcggagagcagcggg

SEQ ID NO: 173769 - RNA, 83 nt, Homo sapiens
cagaccacggaaggagggagagggagccgccccgcaggggccagggcacgcacgcaggccagaaaccccccacacgcagcacc

SEQ ID NO: 173770 - RNA, 79 nt, Homo sapiens
acgccaggccggaggaagccacccgacgaggaagcaaaaaaggccgcagcgcaaacgagagaaagaagggacccagcca

SEQ ID NO: 173771 - RNA, 79 nt, Homo sapiens
aggaacgggcgccacaccggacacaggccagcaacagccaaccagaaaaccagaaacaccggcagggagcaaacccccc

SEQ ID NO: 173772 - RNA, 59 nt, Homo sapiens
aagcacgcgcacagagggggaaaagccagccagaacacagaacagaacacacggaaccc

SEQ ID NO: 173773 - RNA, 81 nt, Homo sapiens
ggggaaagggccggaaaacacacgccccgaaaccgggcaagccgagagggccgccagccaaaaaggggacaggcaggagga

SEQ ID NO: 173774 - RNA, 64 nt, Homo sapiens
aaaaccacaagggaagaaccgaacccaggccgggaacgggaagaaagaagggaaacgcggccga

SEQ ID NO: 173775 - RNA, 70 nt, Homo sapiens
aaaaaagagaaaaaacggcgaaggaagggagcggcaggggaggcgaagaagagcccggacagaaagacga

SEQ ID NO: 173776 - RNA, 71 nt, Homo sapiens
ggagcgagaggagcgcgccggaccagcgcggccaccggagagaagacagggacgcaagggcagccgcgcga

SEQ ID NO: 173777 - RNA, 70 nt, Homo sapiens
cggggaagaaggggccgacccacacccggagcaggcccagggggaccaacaggaggaacgggccagcccg

SEQ ID NO: 173778 - RNA, 83 nt, Homo sapiens
ggcgagcgggggcggagaccaggagaccccacggagcgggcgacgagcgacccgggagacacgacgcgccgcgccaggacggc

SEQ ID NO: 173779 - RNA, 69 nt, Homo sapiens
cagaagcgggcggcgcgggggagaggggaagaaacgagcgagcccgggacagcaagagccaagcgccgg

SEQ ID NO: 173780 - RNA, 58 nt, Homo sapiens
gacacaccagcaccaaacggacacgcaagagcccgccgcacccagggaaaaaacagcc

SEQ ID NO: 173781 - RNA, 62 nt, Homo sapiens
gggaaagccgcaaaggggaggagacgccggaaacacgaggccccagccgaacaagggaagga

SEQ ID NO: 173782 - RNA, 67 nt, Homo sapiens
gcggacaacaccaggaaaagacagagagcccaaaagcaaagcagggcagcaaagaacacaaaggcac

SEQ ID NO: 173783 - RNA, 69 nt, Homo sapiens
accgccagacacccaacgggaaacggaggaaagacaagccccaaaagcagccgggaaaggagccggccg

SEQ ID NO: 173784 - RNA, 75 nt, Homo sapiens
gcagaaccccaaaaccagcagaccacagacccacagcgaaagcaacaggggccgcaaggccaggcgcgcagaggc

SEQ ID NO: 173785 - RNA, 82 nt, Homo sapiens
ccccgcaggaaccacaacccaaccagagggaaaacgggaacacaagccaggacagcccagcaagcggagggcagccaaggga

SEQ ID NO: 173786 - RNA, 98 nt, Homo sapiens
aacagaggaggagacgcaagagacaggaggccggggcacgccacccagggggacacagcggaaaacacggaggagaaggacaccacagccaaagccca

SEQ ID NO: 173787 - RNA, 74 nt, Homo sapiens
gaagaaaggggcaggccaaaaagcgagagcaagcagggaggggcccagggggaagccgcaggcacggccagccg

SEQ ID NO: 173788 - RNA, 56 nt, Homo sapiens
aagaaaccccgacacaaagaacgaaccaaggggccaggacccgaaaagccagcaag

SEQ ID NO: 173789 - RNA, 80 nt, Homo sapiens
agcgggcagaggagcagggaggccacaggggccgaaacacagagcaaggaaggaaaacacccggcagggaaggaaggaac

SEQ ID NO: 173790 - RNA, 84 nt, Homo sapiens
gccaagcacagcggaagaggcgaccgcaaaacgaggagggcccgaaggagcaaagcgcggccaagccagggggagccgggccga

SEQ ID NO: 173791 - RNA, 83 nt, Homo sapiens
gggccaaccagcgaagagcgacaagccgcggcagccgcggaccaccgccgccagggccccggaccagacgagcacagaccaac

SEQ ID NO: 173792 - RNA, 79 nt, Homo sapiens
cgccgggacgacagcgaggccgagacacaggaccagacaacaggcacaaagagagaaggaacacccacagggcagacag

SEQ ID NO: 173793 - RNA, 94 nt, Homo sapiens
cagcaccgcagccgggcccgcgccggcaggccggcccggggcgagccccagggacccccaccaaccaggaaaaggagcgccacaggacagcgcg

SEQ ID NO: 173794 - RNA, 78 nt, Homo sapiens
aaacggggaagccacggcaaccccagcccccagagaaacgaggcgcgcaacagcggacgcggagacaccccgaccccc

SEQ ID NO: 173795 - RNA, 70 nt, Homo sapiens
gaaggccacacccaggcagcaagggcaccgcgagcaaggggggggagcgccaaaaggagcgaaggaccgg

SEQ ID NO: 173796 - RNA, 71 nt, Homo sapiens
aaagaagaaaaacccaagaaagagcgcagcgggagaagaaggacaggagaaacaggggccaaaaaaccaaa

SEQ ID NO: 173797 - RNA, 66 nt, Homo sapiens
ccacagaagagcgaagcacccagccaaacccaggcccgagaagaagaggaaaacccaccaccgaac

SEQ ID NO: 173798 - RNA, 73 nt, Homo sapiens
ggaacaaggaaacaacggaaaaggccagaacccgaaggacggacaacaacgacgaaacggggcagaggcagac

SEQ ID NO: 173799 - RNA, 80 nt, Homo sapiens
ggcggcggagagccgggagcgcggggcgggggcgcccgccgcgccgccacgaccaaacaccaaagaaaggaaaacaaaac

SEQ ID NO: 173800 - RNA, 80 nt, Homo sapiens
gcgagaacgccacgcgggccggcgaaagcgggggcacccgaggaggaagagggcagggcccacggaaagaagggaaaccc

SEQ ID NO: 173801 - RNA, 72 nt, Homo sapiens
gggaggaaggcgcccacccgcagaaggagaacacaaggcgccaccgccccacgggacaccagcaaagagacc

SEQ ID NO: 173802 - RNA, 78 nt, Homo sapiens
cacagccagggagccaagcgccgcccggccgacccgaacacggaagaaagacacgcaggaggccgcggccgagcagcg

SEQ ID NO: 173803 - RNA, 74 nt, Homo sapiens
aagacccggcaccccagcaggccgcggacagagaagaggacgcggagacaagaggacagcaagagcagccccgg

SEQ ID NO: 173804 - RNA, 81 nt, Homo sapiens
gcagccagcccgaagaaaagggaaaacgcgcgggccaaggccaggccacagggcaccacaacacgcccacccaggaggcgg

SEQ ID NO: 173805 - RNA, 60 nt, Homo sapiens
aaggacggacaggaggacaacgggaccggcagccagaacgaaaaggcacagagagccagc

SEQ ID NO: 173806 - RNA, 77 nt, Homo sapiens
cccgggacccccccggaccgagccgacgccgcggggcagcgggccggcgccggcgcgaacaggccgcgagcaagccg

SEQ ID NO: 173807 - RNA, 78 nt, Homo sapiens
aaggcgcagcgggggaacagcagcggcaagccaggacccgaaaagccagcaagcgagaccaacaccaacacgagggcg

SEQ ID NO: 173808 - RNA, 64 nt, Homo sapiens
gcagcacaggaaccaaaccgggcaaacaggggcaagagagccgccagcggagagcagagacgcc

SEQ ID NO: 173809 - RNA, 63 nt, Homo sapiens
gcacggggcgagaggaaaccacggaggcacaagaacggaagaacagcaccaagcgcagacacg

SEQ ID NO: 173810 - RNA, 81 nt, Homo sapiens
gccagcaccaacaggccgccaaaccggaagaagagaggaaacagacccgagaggggccgaaggggacagaaggagacggaa

SEQ ID NO: 173811 - RNA, 73 nt, Homo sapiens
gacccagaaagaggaacagcaaccgaccccacccaaacaaggaggcagaggcacacgccggacaggggaggac

SEQ ID NO: 173812 - RNA, 79 nt, Homo sapiens
ccccaaaccgcagcgcccgaaaggaaagaaggcgaaggcagaaggccccccgccacccagacaaaaaccagaaacccag

SEQ ID NO: 173813 - RNA, 73 nt, Homo sapiens
cgcacagcgaccgacgcgaacaccaggacacaagacacccaagaagcccagcagacccaacgcccagcaccaa

SEQ ID NO: 173814 - RNA, 34 nt, Homo sapiens
gaagcgacccgagaaagagccaacggaccacaac

SEQ ID NO: 173815 - RNA, 76 nt, Homo sapiens
ggacggacacgggagagaggccgggcgagcagcaggagcaccggcccaagaaacagaacgaagcaaacgcggagaa

SEQ ID NO: 173816 - RNA, 73 nt, Homo sapiens
cgcccggccccggcgcagggacagagggccccacgaaggacggccagcgcggcagggaggagagacagaagcc

SEQ ID NO: 173817 - RNA, 55 nt, Homo sapiens
cccagccgcagccacaacaccggcaggaaccaccaggacagaacgcgagggccac

SEQ ID NO: 173818 - RNA, 76 nt, Homo sapiens
agccccggcggccgaacgcccgcggcgcgggacccacgcagcggagcggaggcagacacacacggggggagaggga

SEQ ID NO: 173819 - RNA, 86 nt, Homo sapiens
ggaccggcgcgggcacaggcaggcggaggaagaccacacggcaggaggacgcaagaaacgcaccggcggcacagggagaacacagg

SEQ ID NO: 173820 - RNA, 76 nt, Homo sapiens
gccccaacagccaaggacgaggagaccacgacaaaacacacgaaccccaaaacaggcacagacggcgacggccaca

SEQ ID NO: 173821 - RNA, 71 nt, Homo sapiens
caggccagcccaaggcagcagccacgacacccaagccgcacagaggagagaaggcgaggaagcccaagcac

SEQ ID NO: 173822 - RNA, 74 nt, Homo sapiens
aaagacacgaaaaccaggaccgagaaggcgcagcggaaagggcgcacacacaaaggggagccaggaagaagaca

SEQ ID NO: 173823 - RNA, 33 nt, Homo sapiens
gagggggcccaagaagagcccccggcccaggcg

SEQ ID NO: 173824 - RNA, 74 nt, Homo sapiens
aaaaggccccgaggacggagaggcagaggaggccgaggcgaggcccagaaggggaagacccccagcgaacagag

SEQ ID NO: 173825 - RNA, 75 nt, Homo sapiens
ggcgcgcagaaccagaccgggagcacgcacccacgaggggggggccccagcccggccgaacgggcgcacgacaca

SEQ ID NO: 173826 - RNA, 77 nt, Homo sapiens
agcccaaagcgaagacagacgcaaggggcaacgaggaacaggccaagaaacaacacagccaaggccagcgccacggc

SEQ ID NO: 173827 - RNA, 84 nt, Homo sapiens
gcgcagacacggaccgcgggccagccgccaaagaccccgccggaaacgggggcgcacaggaaacagaaaaaacagcaaagggag

SEQ ID NO: 173828 - RNA, 56 nt, Homo sapiens
agagaggcagcaagcaacgggagcgaacaccaggggaaacacccggggaccaggag

SEQ ID NO: 173829 - RNA, 79 nt, Homo sapiens
cggacacaacgagagcagcgaagcaccacgaaaggagaacggaagaacagacccgagggccggaacgagcaggaacgga

SEQ ID NO: 173830 - RNA, 74 nt, Homo sapiens
gcggccgagacaaaggcaccaggccaccacagaaacaaaagcaacaaagaggggggcccacgagaagagcaggc

SEQ ID NO: 173831 - RNA, 64 nt, Homo sapiens
gccggagaacagagcgccccggagagcacacgaaaaacggccagaaaaagaagccaacgggggc

SEQ ID NO: 173832 - RNA, 91 nt, Homo sapiens
ccaacggggaggccaacggaagaagaaagccaggccagaagaaggaaggccggggaggggacaggaaagacacaccaccccaccgaacaag

SEQ ID NO: 173833 - RNA, 55 nt, Homo sapiens
ggcggggcggaggaagcggacaaagccgaggcaccaaacgacccggacgcgacgg

SEQ ID NO: 173834 - RNA, 72 nt, Homo sapiens
accagacaaagacaaggaacaagaacgcaaggagggacaggacggaaggagcggaggaagacacaagagcga

SEQ ID NO: 173835 - RNA, 58 nt, Homo sapiens
agaaacgacaccgacagacaaaacgggcaagggcgcagcacgcagacccgcaagcccc

SEQ ID NO: 173836 - RNA, 87 nt, Homo sapiens
gggcacagcagaggccgcgcagcagcaaaggagagcggaaccggaaaagagccccccaagagaacccagggggagccacgccggagc

SEQ ID NO: 173837 - RNA, 78 nt, Homo sapiens
cggaggcacaacccgggccgaggagccacagaggagggcccgggaaggcccgggcacccaggacccagaggcgacagc

SEQ ID NO: 173838 - RNA, 79 nt, Homo sapiens
aggggaaaacccagcggaaggcaaaacaagcgagaccaaccaggacacacacaccccccccagaggccccgagcggaga

SEQ ID NO: 173839 - RNA, 73 nt, Homo sapiens
aaccagaggaccggcaacaacccgaggacgaaccaccccgcgccagcagcacagcacgggccaagaacaacgg

SEQ ID NO: 173840 - RNA, 49 nt, Homo sapiens
gcgagcgccgcggggagcccaaaaggcagagcgaggagagaagaaggag

SEQ ID NO: 173841 - RNA, 110 nt, Homo sapiens
aagaagccaaacgcggccaaagagaaaaggcaacaccgcacaggccagccggcaaaaacgaaacgaaggcagcaaaaagaagagcagaaacgaaggaaaaggcgggaaga

SEQ ID NO: 173842 - RNA, 72 nt, Homo sapiens
agaacggcgggccagagcggggcgaccaggaaaggaagcggcggcccgaggacaaggccacgggagagacca

SEQ ID NO: 173843 - RNA, 85 nt, Homo sapiens
gaggcgaagacgagaggaacgcaggggaaaggaaaagacaaagcaggaggacacaagaagggaggaaaggcggacccaggaacca

SEQ ID NO: 173844 - RNA, 63 nt, Homo sapiens
gacgcagggcgcccccgggggaaacccgcccagggcgggagaccgccaagaaacaccacaagg

SEQ ID NO: 173845 - RNA, 55 nt, Homo sapiens
aaaagggccaaagaagggagagaggcagaaccggccacacccaggaccggaacac

SEQ ID NO: 173846 - RNA, 77 nt, Homo sapiens
cggcacgaggcaggcgacgcgagaaggggccacgaccgccccagggccaccgccagcgagccgcgggggaagaagaa

SEQ ID NO: 173847 - RNA, 66 nt, Homo sapiens
gagaagacgacgcaccgcaggcagacaaaagggccaaagaagggagagagagccgacagcccaaca

SEQ ID NO: 173848 - RNA, 73 nt, Homo sapiens
aaggaaaaacggagagccacaaaaaaggaagcgaaaacagcgcacgaaacacacaaagaaccaccaccgggag

SEQ ID NO: 173849 - RNA, 71 nt, Homo sapiens
gcggagaggcacgcgcaccagaaagaccacagcaagaccacgcccccagccgggggaccaggccgaacgac

SEQ ID NO: 173850 - RNA, 97 nt, Homo sapiens
cggagaaccgcaccacccccacaccaaccagagggaagcacacagccgaggagggcaaaacaaaagcagcgaaaaaagcgaagaaaaagaaaagaag

SEQ ID NO: 173851 - RNA, 41 nt, Homo sapiens
acagggcccaccaccaagccggagcagaaagaccaggggag

SEQ ID NO: 173852 - RNA, 34 nt, Homo sapiens
aaaggcagaaaagaaaagccccaaagcagcagca

SEQ ID NO: 173853 - RNA, 80 nt, Homo sapiens
cacaagagcagaaaaggccggacacagccgcccagcacagagggaggaaggccagaagacaaaaaagcaaaaggcagaaa

SEQ ID NO: 173854 - RNA, 74 nt, Homo sapiens
agccccgaccgggagaggagagcccccaggggagccggcggaagggcacaacagcaggacgcccagaacagcgc

SEQ ID NO: 173855 - RNA, 84 nt, Homo sapiens
ccgagccgggaccaggcccgggggcggcggccacgccaaggacgggggggacaggaacagaaagcgaagaaagaccacaacaac

SEQ ID NO: 173856 - RNA, 88 nt, Homo sapiens
gaaagggaggcaagaaggaagcaggcacaaacagcagacaaaaggaaaaaggcgagggaacgaagaagcagcgacggcccaaacagag

SEQ ID NO: 173857 - RNA, 63 nt, Homo sapiens
acagcccgcacggaccgggaagagaaaagaggcacagaggcccgcacacgagacaagacagcc

SEQ ID NO: 173858 - RNA, 64 nt, Homo sapiens
ggggcaccaaggccgcgggcaccgcaacacaggggagggaaaagaggacgaggcgcgaaaaggc

SEQ ID NO: 173859 - RNA, 85 nt, Homo sapiens
ccccccaccacaggcacaccagggcagaagggacccgcaccgcgccggcccgcaaagcaaagaggcaaagcaccccgcaagaaaa

SEQ ID NO: 173860 - RNA, 68 nt, Homo sapiens
aggagaaaacacccgaagccaaacccggcccgcggagagcaggagaggagccaagcccaacgggacgg

SEQ ID NO: 173861 - RNA, 73 nt, Homo sapiens
cgaccgccggccacacgcgcccaccaaccccgccgcccccccccgccagggggaagaaaaggccaaagaggga

SEQ ID NO: 173862 - RNA, 57 nt, Homo sapiens
gagaaaaggccaagaaggcaggcaaccccgcacaaacccagcgaacaacggaggagg

SEQ ID NO: 173863 - RNA, 76 nt, Homo sapiens
ccagacccacaaccacccgccccgaccccaagaagaccaaaccacccacggcccaaggacaaggcacgaggcgcgg

SEQ ID NO: 173864 - RNA, 69 nt, Homo sapiens
gagccaggaagaaagaagcgaaggacgacagcagccagaagggcaagaaccgaagcaaaagagcaaaac

SEQ ID NO: 173865 - RNA, 70 nt, Homo sapiens
acccagacccaccacccccaaggacgcggagcgaaaaaggcaagggcgaaggggggggccaccgggggac

SEQ ID NO: 173866 - RNA, 57 nt, Homo sapiens
gaccgaccaaagcaccacgaaaggccccacgaggcccgggccacagggcccccgcgg

SEQ ID NO: 173867 - RNA, 41 nt, Homo sapiens
gcaccggccccgcacagcaaaccagacgaaacagaggagcc

SEQ ID NO: 173868 - RNA, 108 nt, Homo sapiens
gacggaccgagaccggaccgagagcggaccgagagcgcgaaacgcacgagaaggcaaccgggaccaaaaacaccaggcagacgaggcaggaaaagggggccggggagg

SEQ ID NO: 173869 - RNA, 72 nt, Homo sapiens
gcggaccccagggccggcccggaggcgggacccagggcccaggggacggcaaaacagaacagaaaggcggag

SEQ ID NO: 173870 - RNA, 64 nt, Homo sapiens
gggccaaaggacgaagaacccacagagcagaaagagaaggcagaacagaggaagaccagaaacc

SEQ ID NO: 173871 - RNA, 75 nt, Homo sapiens
gcaggggccggaagcaccaggacagggccggcccagggagaacgcaaaaccaccacccccacaaaaaacgcaggg

SEQ ID NO: 173872 - RNA, 71 nt, Homo sapiens
caacaaaagaaggcccggacgcacaacagcaagaccagaaaagccccaacacccccaaccaccgggcagcc

SEQ ID NO: 173873 - RNA, 79 nt, Homo sapiens
aagccacacgacaagcaacaaagacaacaaccccccccgcgaaacgcgaggaagagggcaagaagccagagcaaaaaaa

SEQ ID NO: 173874 - RNA, 54 nt, Homo sapiens
aaaagcccaggacgacagggaggcgaagaggagaacaagcggagaaaacgaaga

SEQ ID NO: 173875 - RNA, 63 nt, Homo sapiens
gcggcagcagcggggcggggcgaagaagcagcacaaggcgagccaggcgccccggcaaggcca

SEQ ID NO: 173876 - RNA, 76 nt, Homo sapiens
agagcccggaccaagcaccccaccaccaaaccacgcagaccagccagccccaagcagccgcacgacaaagaacgaa

SEQ ID NO: 173877 - RNA, 73 nt, Homo sapiens
ccacccagggggacacagcggaaaacacggaggagaaggccccccaccaggcgcccaccccaccaaccaacaa

SEQ ID NO: 173878 - RNA, 63 nt, Homo sapiens
ccgccaggagcccgaccgggagaggacaagaccacgagccagggcgagccagcccccacccag

SEQ ID NO: 173879 - RNA, 88 nt, Homo sapiens
ccccccagaccacccaagagaaagaaagacccacaaaaggcaaaggagacaggcacggaaaaaccgcgagcccgggggccagcacagg

SEQ ID NO: 173880 - RNA, 74 nt, Homo sapiens
cagcagcccccagagcggaacacagccgcggccgcacgagcggaaggacgaacaccacgcccaggacaagcgcg

SEQ ID NO: 173881 - RNA, 59 nt, Homo sapiens
gaacaccaggacacccagagcgggaaaggcgccaagcccacgggcgcaccaacggagag

SEQ ID NO: 173882 - RNA, 80 nt, Homo sapiens
aagcacagacagcacgaagggacccacagaagaacagccaggacaagcgggcccacgggcaccggacggacgagaagacg

SEQ ID NO: 173883 - RNA, 86 nt, Homo sapiens
aaacaaacgacaccccaaaaagaccaggggcgggaaacgcccgagacagcacaagcagaggaaccagggaaccgccgccagcaacc

SEQ ID NO: 173884 - RNA, 59 nt, Homo sapiens
caaagcacagccgggccaaagcaggagagccgccgccccagccaccgggccgccagcga

SEQ ID NO: 173885 - RNA, 68 nt, Homo sapiens
ggagaaggaccaagaaccaggccacccagagacagaacgccaccaagacaggccaaaaaccggagaca

SEQ ID NO: 173886 - RNA, 67 nt, Homo sapiens
cagcaggcaccaaggaaagcagaagacaaaaaccagggcgaaggacgaggaccgaaaaagggcagag

SEQ ID NO: 173887 - RNA, 60 nt, Homo sapiens
gaccaccggagcagaaaagagggaccaaagggaaggcgccagacacagaaaagaaagaga

SEQ ID NO: 173888 - RNA, 79 nt, Homo sapiens
caagagcaagaccccggaacccgaagcgggaaagggaaagggagcagcaccggccacacccacagcacgaccggaaccc

SEQ ID NO: 173889 - RNA, 80 nt, Homo sapiens
cgcccacccacaccagcggacggcgagggccccccgccgagagcggaagccggcagaagaagacccaccaaggggcaacc

SEQ ID NO: 173890 - RNA, 52 nt, Homo sapiens
caaagacaaggaggagaaaggaaaaagggcaaggccagagaaggcgggagaa

SEQ ID NO: 173891 - RNA, 73 nt, Homo sapiens
ccccccaacaagcgagaggggccaccgcaccaggcggaaaagggcacaacaagcccagagccccaccaaggac

SEQ ID NO: 173892 - RNA, 82 nt, Homo sapiens
gagagagaggccggagcccaccaagcgggaaaaaaggcacacacacccgcaggagagcgccggagaaaggaagaacccagac

SEQ ID NO: 173893 - RNA, 58 nt, Homo sapiens
agcggcccacaccacaaagcccccgccacggaccggaggcgcggcaaaaagaagaaaa

SEQ ID NO: 173894 - RNA, 83 nt, Homo sapiens
cgagcggccggagcagaaacgagcggaccacggagcccgaaggccaagagaggccaacagaggaacaaggcccgcagaaccca

SEQ ID NO: 173895 - RNA, 84 nt, Homo sapiens
ggcgcagggcagcgcccgcgccccgccgcgagccgcgcggagccgcgcagccccggagcacggcgccacggccggaacgcacag

SEQ ID NO: 173896 - RNA, 75 nt, Homo sapiens
cgcccaggagagaaaggagacccgacgcaacgcggagcgcaaggcgagggacgagaacgagcagaaggccggagc

SEQ ID NO: 173897 - RNA, 62 nt, Homo sapiens
cgaccgcacagaggacccccccggccaaggacgaagccaagaggcgaccaggacccgcgggc

SEQ ID NO: 173898 - RNA, 79 nt, Homo sapiens
agagacaagaagcaacagaacacccaaagaaagagggaagcgagaaccaggaacgaagaacaaaggggaaaggcaacaa

SEQ ID NO: 173899 - RNA, 69 nt, Homo sapiens
ccgggacgacggccccagccagcgacggagacgcccgcagcaacagacaaaggccagggcagaaaagag

SEQ ID NO: 173900 - RNA, 79 nt, Homo sapiens
acagcgccacacgacgcgcaggagacggcccggagccggcgcgagccgcaagggagcggccccccgacagccccgggca

SEQ ID NO: 173901 - RNA, 72 nt, Homo sapiens
gcacaacaaccacggcggaaccagagcccaaaaccgccaaggaagcacgggaagaacagaaaagagaagcac

SEQ ID NO: 173902 - RNA, 66 nt, Homo sapiens
gaaggaccaagaaccagacaaggccgacgcgcacgaacacgggggcaaagacagggagagaggagc

SEQ ID NO: 173903 - RNA, 72 nt, Homo sapiens
aggcaacacgagccccagcaacccaagcgaggaaaacgccacgacagacacaaccaagcaccggagaaaacc

SEQ ID NO: 173904 - RNA, 68 nt, Homo sapiens
agccagccgaggcaggacggcaagggcgacaaaggacacacggaacacgcagaaaaccgagaacaggg

SEQ ID NO: 173905 - RNA, 65 nt, Homo sapiens
aagcagggaccccccaacagaggaacgaggaaacagaaagaagccgaacggccacagggacagga

SEQ ID NO: 173906 - RNA, 77 nt, Homo sapiens
aggcaggaaccaccaccacagacccagacaggccaaaacagaagaggcaaagcccagccacagcagcagcccagcag

SEQ ID NO: 173907 - RNA, 78 nt, Homo sapiens
cgccccaagccagaacgcccgcacacgggcaagaaggaacagacaaaaacggccggaaggaaacacaggacaccaggg

SEQ ID NO: 173908 - RNA, 85 nt, Homo sapiens
cggcaccagccgcccaggcgcagagcgggcccgcggaccagccagggcacggccgggacgcagaccaaggaggccgcacccgcag

SEQ ID NO: 173909 - RNA, 82 nt, Homo sapiens
gcgccagccagcgccggaccccccacccacgcgaacgagagggacacggagcaggccagcgggaagcccgggagaccgaggg

SEQ ID NO: 173910 - RNA, 78 nt, Homo sapiens
cggcccggcaggcggagggcaggagcggggccacgcggcgggaaggggcagggaggcgcggcagaggaagaagaaggc

SEQ ID NO: 173911 - RNA, 82 nt, Homo sapiens
acgcagaagaccacaacagggacaccggccagcgcagcacgggacgcgaccggaaggcaggacccgaacacggaagaaagac

SEQ ID NO: 173912 - RNA, 86 nt, Homo sapiens
cccgcgagcacagagcccgccgccgaccgccgcccgccacacccgccgccagcgggcgacgcacgaggcacacaggaaggagggga

SEQ ID NO: 173913 - RNA, 78 nt, Homo sapiens
agccgaaagcacagacaagagcgcaggggccaggaagaagaggacacagaaggcgcacccccagggaaaacacccccc

SEQ ID NO: 173914 - RNA, 54 nt, Homo sapiens
caggcagaacccagaacacaaagagcgagaccggaacaaagcaaagcagcggca

SEQ ID NO: 173915 - RNA, 58 nt, Homo sapiens
gcggcgccaccgccgcccccaggaccagggagaaaaacagacggaaaccgaaagaaca

SEQ ID NO: 173916 - RNA, 48 nt, Homo sapiens
agagcgccgcgacgagacaccaggaggcgaggcaagcagacccacacg

SEQ ID NO: 173917 - RNA, 76 nt, Homo sapiens
caagggccggccggacaccaccgacgccccaggacccaaagacaggaccacgcaccagcagagaaggaaagcaaac

SEQ ID NO: 173918 - RNA, 86 nt, Homo sapiens
ggaggcgcgcggaccggcggcccaggcacggagaggcggcgagaccgcaggacccaaggccagccagccccaggcaccagcggaca

SEQ ID NO: 173919 - RNA, 78 nt, Homo sapiens
agggccaaagaagggagagaggaccgggcgaggccaccccgaggcaaggccccagaggaggaccaagagcgggagccc

SEQ ID NO: 173920 - RNA, 60 nt, Homo sapiens
gggcagcccccagcagggcacaccgaagggcaaaccagaagaacacgacaggcacgagcc

SEQ ID NO: 173921 - RNA, 67 nt, Homo sapiens
gaaaaggcggaagaccgccaaaaaggacacggagccagagcgacgccgacaaaggaggaaaagaaga

SEQ ID NO: 173922 - RNA, 87 nt, Homo sapiens
gcgcgggccgcgagcggggcgacccgagagagaaccgagccaccgcaacggaggcgaaccggcaggagaaaggagcagccagaaagc

SEQ ID NO: 173923 - RNA, 83 nt, Homo sapiens
cgaagcaagcacgaaaaagcaacaacagccacggaggaggaagccaagaacgggagcgaagccacgcagcggcaccaacgacc

SEQ ID NO: 173924 - RNA, 65 nt, Homo sapiens
agaggagaagacaccaaaaagcaaacggaccagaccgaccaccaaaacaaggcaacggggcccgc

SEQ ID NO: 173925 - RNA, 74 nt, Homo sapiens
gacccgacagaggcacaaaaagcggggaccacaccacacaggccggcccggccacccccgggcccgcgccccag

SEQ ID NO: 173926 - RNA, 74 nt, Homo sapiens
ccaggccagaaaggaaaggaacagggacaacagcggaacggagaagaaaccccaagccccagaaaaacaggggg

SEQ ID NO: 173927 - RNA, 53 nt, Homo sapiens
cggaaagaaaaaacaccgacagggccaagaggggaaagaaaacacacaagggg

SEQ ID NO: 173928 - RNA, 79 nt, Homo sapiens
aagagcccaaaagaagaggcacaggcccaggcagaccgcagcaaaacaagccagaggggagaagagaaacaggaagaaa

SEQ ID NO: 173929 - RNA, 115 nt, Homo sapiens
ccacgaagagagccccgacacagcaacagcgcgcgggggggaaagcagacccccaggcccgggcaggacggggcggggaccaggagaggcgccaccgcccggaccgggggggggc

SEQ ID NO: 173930 - RNA, 82 nt, Homo sapiens
cccacggccgccccggagcccgacgcgacacggccacacagaccgaacacaaacagccaacaggacaaaggacaccgaaagc

SEQ ID NO: 173931 - RNA, 71 nt, Homo sapiens
agaagcacgaaagccccacccgccgcagcaagcagaggagaagagagcggacccacaccagggaagacagg

SEQ ID NO: 173932 - RNA, 69 nt, Homo sapiens
ccggcaccaaaacagcgcacccagaagcagccaacgaggaacggacaaaccaggagcacagcagagaaa

SEQ ID NO: 173933 - RNA, 97 nt, Homo sapiens
ccgcccggaccgcgcagaaccagggcggcggccagcgccacgcgagacagacccagcacggaccccccccccagccgggcgaggccccgaaacgcag

SEQ ID NO: 173934 - RNA, 78 nt, Homo sapiens
aaagcgcccccagccggacgcgacaaaggcaaggaacgcccaccgccaagaaacccccccaaaagccgacgagacagg

SEQ ID NO: 173935 - RNA, 86 nt, Homo sapiens
cgagcgcccgaagagcaaaaccagcgggcggccgcgcccccaggacacaaggagacaagggcgggcccccggcagggacaaaggcg

SEQ ID NO: 173936 - RNA, 75 nt, Homo sapiens
ggcagacaaaagggccaaagaagggagagagagccccccaagagaacccagggggagccacgccggagcgggcac

SEQ ID NO: 173937 - RNA, 79 nt, Homo sapiens
gcgagccggagcgccagcccaccggacacgagacggagacccaaaggcaagggaacagccaagggggaagaaaaggaga

SEQ ID NO: 173938 - RNA, 74 nt, Homo sapiens
cggcccggcgccgcggcccaccagcccggcccacgccacgcgagaacgcggacaagcaaacaaagaggaaaaag

SEQ ID NO: 173939 - RNA, 53 nt, Homo sapiens
cggaccaggaggcgagcaacaggcaccccacccccgggaaggggcgaacacgg

SEQ ID NO: 173940 - RNA, 77 nt, Homo sapiens
ccaggcgacaggaaaggggccggcacgccgcaacggaacagaccagaaggagcaaggggaagaggaaaagagaggga

SEQ ID NO: 173941 - RNA, 69 nt, Homo sapiens
acgaccccggcagacccggaaaaaggaagcaacgccaccagaggaagccagagaagcaaaagaaacaag

SEQ ID NO: 173942 - RNA, 42 nt, Homo sapiens
cccagaggcgggaacaggacgcgggcgcagcgagcggggagg

SEQ ID NO: 173943 - RNA, 75 nt, Homo sapiens
cccccaagaaaccaagaaaaagacgcgaaaaagcaaaagagccaacacccaggccaggccgcccggaaggaggcc

SEQ ID NO: 173944 - RNA, 52 nt, Homo sapiens
agacaaaagggccaaagaagggagagaggccggaaaccgcaagccaacccag

SEQ ID NO: 173945 - RNA, 73 nt, Homo sapiens
aaaaagcagccaggaaccaagaaaacgggagaggccgcgacacacaaggcccggaggggccacgggggccgcc

SEQ ID NO: 173946 - RNA, 76 nt, Homo sapiens
agaggggcggcgccgcgcggccgagccgagaaaaagcgaacaaggggccgaagacaagaagaaacaccccaggggc

SEQ ID NO: 173947 - RNA, 77 nt, Homo sapiens
cgcgaggagacaccgcagggggcccacgagaagagcaggcgacgggggagagggagacagcggcgcaaagaagggac

SEQ ID NO: 173948 - RNA, 73 nt, Homo sapiens
aaagcaaaaaacgcccacaccagagaaggccacgaccggaagggcaaaacaagccaaccgaaagaaaagaaaa

SEQ ID NO: 173949 - RNA, 75 nt, Homo sapiens
caaaaaaaagaggagcagcaggcacagcacgggcagagccaggaaccgaggagcaaggaccgggagaaacgagac

SEQ ID NO: 173950 - RNA, 71 nt, Homo sapiens
cgggaccccccaaaccaagggaaacacaaacgagcagcagaaaccaaagaagagccacagaaaacagagga

SEQ ID NO: 173951 - RNA, 78 nt, Homo sapiens
gaggcaaggacaggcacacaaagaaggagacgggggcacgggagcaggaagggaccgacagcaagaaaaggagaaaac

SEQ ID NO: 173952 - RNA, 81 nt, Homo sapiens
aggcgaccaaacagagaggcacggacaagaagagccccgcagcccagaacggcggccaaagcgccagacaagggccgagcc

SEQ ID NO: 173953 - RNA, 51 nt, Homo sapiens
cggcggcggcgcggcccaaaagaaggagaccgcaggaaacacacaaaagcc

SEQ ID NO: 173954 - RNA, 68 nt, Homo sapiens
cccaggcgaagaagcgcagccgcaccggccaagggggccgcaaggccaggcgcgcagaggcacccaac

SEQ ID NO: 173955 - RNA, 79 nt, Homo sapiens
ccgcgaccgcacgccaggcccaccaccaccccaggcaccgagggccgggccgcgcggggcgacgcaagcagagacacag

SEQ ID NO: 173956 - RNA, 75 nt, Homo sapiens
aaggagagcaccacacaagggcaacgccaaagaaaggaaaaccaaagagaagaaacaaagacgaacaaaacaccc

SEQ ID NO: 173957 - RNA, 81 nt, Homo sapiens
ccgggcgaggagaggagggaccccgcgaaagagccacccaggaccccaggaccagaaggcaaccaacagaaccaccagaca

SEQ ID NO: 173958 - RNA, 74 nt, Homo sapiens
caagccagcaaggggagcaagaaacgcaacacggagacggagggggaccacacagggcagcccacagaagaagg

SEQ ID NO: 173959 - RNA, 74 nt, Homo sapiens
gcagacgggaagaagagagaaaacaaaagcgagacaggggcaggaaagggcgcaagaggcagacagacaggcga

SEQ ID NO: 173960 - RNA, 96 nt, Homo sapiens
gcacaaccaccagaagaacgacagagaggagggagaacaagcaacggcggaaaacgccagggagaagaagagaagacaggagacaaacgggaaagc

SEQ ID NO: 173961 - RNA, 72 nt, Homo sapiens
ccggggaagcagaagcacagggcacgccaacccaggacaggagagacaacggaggcaagaaagacggagaag

SEQ ID NO: 173962 - RNA, 83 nt, Homo sapiens
cacacgcccagaaaccagcagaaccgcgggacaagaacagggccacagccagcagagcgccgccgcaggaccccagcgcaaag

SEQ ID NO: 173963 - RNA, 88 nt, Homo sapiens
ccccccagcagccgccaccccgcgcagagccgggcacacgggccgcagcccaccacagcccccaggagccaaggcaaagagggaccac

SEQ ID NO: 173964 - RNA, 75 nt, Homo sapiens
cgaaccaagccccgccaccggggcaagaggaaaaccaacgaacaaaggaagaccaacagaaacagaagaaaagcg

SEQ ID NO: 173965 - RNA, 69 nt, Homo sapiens
gggagcggacggagcggggaacgacaagcccgagcaaaggaacagagcacacagaccacaaggcagcag

SEQ ID NO: 173966 - RNA, 68 nt, Homo sapiens
acagagcaggccacaaaaccaaaggacaaacaaacgcgggccgaggcccaaccgggaccgcaaccaca

SEQ ID NO: 173967 - RNA, 83 nt, Homo sapiens
agagaacaagacgaagaacagaaggcgacaaggccaagaccgccagcaaaggaagacgagagggaggaggggaaccacaccaa

SEQ ID NO: 173968 - RNA, 77 nt, Homo sapiens
cggcgggaggaaccaggacccccagaggcccaaaccgacccagacccagaggccgcgcggaggaagaggaagggcca

SEQ ID NO: 173969 - RNA, 76 nt, Homo sapiens
aagacgggcaaagccgcaacaaagagccgccacaaaagaggcaacaccgcagggagacccagggagaaacaccagg

SEQ ID NO: 173970 - RNA, 78 nt, Homo sapiens
ggcacaaggacagagaaggaaaaggcgcggagccccaccccaaacagccagccagccagacgccagggaccagaaaaa

SEQ ID NO: 173971 - RNA, 99 nt, Homo sapiens
acacccagagacccacagaccaagagaagagaggaggaagaggaaggccagagaacgaaaacaaacggaagagagggcagcaagaaagaacaagaaagc

SEQ ID NO: 173972 - RNA, 58 nt, Homo sapiens
cgaggcaaaaagcacagaagagagagcacagagaccgaagggagagcgcgacccccgg

SEQ ID NO: 173973 - RNA, 66 nt, Homo sapiens
ggggcaggcgagaagaaggacagggcccccaccggcccccccacagccgccggggaaaaccggcgg

SEQ ID NO: 173974 - RNA, 81 nt, Homo sapiens
cacccgccaaccccggccggcggggcggcccgaggagcgggccgccgcagaggaggaagccaaacagccaaacgccaagga

SEQ ID NO: 173975 - RNA, 79 nt, Homo sapiens
cccacgcggccagcgaaaacgcccaggggacacggaacccaaggagacgaagcgaagcaggagaaggaggggaaaaaac

SEQ ID NO: 173976 - RNA, 76 nt, Homo sapiens
cagggcgcccccggggcaccagcgggcacaccaagaagcgccccgcaagacccaccgaggccgcgcaaggggccga

SEQ ID NO: 173977 - RNA, 36 nt, Homo sapiens
cgagcccagcacgggagagacggcgcaccagggcca

SEQ ID NO: 173978 - RNA, 71 nt, Homo sapiens
gcccccaaacacgaagagacgacagaccagaccaagcaacagcgcagaaccggccgaaaagcacaaacagc

SEQ ID NO: 173979 - RNA, 66 nt, Homo sapiens
cgaagggaaaacaagcaagcgccacagagcagggggagaccagacagccgagaacaaacccagcaa

SEQ ID NO: 173980 - RNA, 86 nt, Homo sapiens
cgaggcggagaccgagggggagccccgcgcgcggcgcgggcgacagagaagagagaaggccccagcagcgggcacgcgccgagagc

SEQ ID NO: 173981 - RNA, 41 nt, Homo sapiens
cagcgcacccccaggcacgcaaagaagccggaccgagaacc

SEQ ID NO: 173982 - RNA, 76 nt, Homo sapiens
gaaggaccaagaaccagggcagcagcccagccaaagccggaaaaggacccagagccacgggggcagcgccgaacca

SEQ ID NO: 173983 - RNA, 62 nt, Homo sapiens
aaggaggccccagcggaccgaacaggccacagaccccaccagcacgaagggacacgggggca

SEQ ID NO: 173984 - RNA, 79 nt, Homo sapiens
aaaaaaaagaaagagaagcacacaaacaagcagcgaaacaacagcgaccccaaggaagacaaggagaaccgcacgccac

SEQ ID NO: 173985 - RNA, 71 nt, Homo sapiens
ggacggaaaagcacgccgaaaacaccgggaggaggaagaacacccagaaaaggcagagaagccaccagaga

SEQ ID NO: 173986 - RNA, 77 nt, Homo sapiens
agcgggaaacgacaaagaagccaaggaggcgaggacaagcacagccacaagaaaaacgccacaagccaccccagaga

SEQ ID NO: 173987 - RNA, 82 nt, Homo sapiens
gagcccacggagagccaagacaaaagcaggaaacccagaggagggaaggacaaagcggacacagggacacgacacagggacg

SEQ ID NO: 173988 - RNA, 78 nt, Homo sapiens
cgaagaagaaacgaagaggacgacagccggaggcgaagagcaaagaggggaacgagaagccacacgcagccacaggaa

SEQ ID NO: 173989 - RNA, 79 nt, Homo sapiens
gaagaaaaaagcagaaagaaagcgcggccgacaccagaggagaagacgagcagaagggcgggaggaagagcaaagaagg

SEQ ID NO: 173990 - RNA, 75 nt, Homo sapiens
gagcaaccgccaaccagaccaacaccggggggcgccagagaccagggggagcagaagacagagggaggagggcca

SEQ ID NO: 173991 - RNA, 102 nt, Homo sapiens
ggcgggaggcccggccagccgacgcaggcccaccggcggccacgggccaaggaaagcggagggagccccagaggacggccacagccagaaaagagcacagag

SEQ ID NO: 173992 - RNA, 78 nt, Homo sapiens
aggaccgagaggacccgcacggcaaagaaaccccaaagccagcaagaccacagcagcacgcaccagccagcgaaccgg

SEQ ID NO: 173993 - RNA, 68 nt, Homo sapiens
agcagcgggacgcaagaggggccccagggacgacgagacaacagagaaacgggcaacaagcgaaaaag

SEQ ID NO: 173994 - RNA, 57 nt, Homo sapiens
ccacacccagggaaccaagaaaaaacccagagacgaggacgcgcacaggaaaggacg

SEQ ID NO: 173995 - RNA, 74 nt, Homo sapiens
cgagaagccccagcgcacacgcggagccaggcgcacaaacagccccgaagcagaaggagggaagaaccgcccgg

SEQ ID NO: 173996 - RNA, 71 nt, Homo sapiens
gcaacaccacccccgacagggcggagcaggaccgcacaggcgcaggcgcaaggggccaggggaccaggcac

SEQ ID NO: 173997 - RNA, 80 nt, Homo sapiens
aggacggggaccgcacacccaaggggaacgcccgcggacggcagggcgcgacaagaagcgcccgcccgacgagcggcccg

SEQ ID NO: 173998 - RNA, 75 nt, Homo sapiens
ccaagcagaagaggacggaagacgagaccagaccgccgacccagcggacgccaagaagaaaggcccagaagcgga

SEQ ID NO: 173999 - RNA, 76 nt, Homo sapiens
aaaacagaaaaaaaaaacacgcaaagaccaccagagcccggaacagccaggaaggacgcgagcgacgcccggagcc

SEQ ID NO: 174000 - RNA, 57 nt, Homo sapiens
cacacagaagggccaaggaaaaacgagcagaaagaagccaggaacccaggaagagcc

SEQ ID NO: 174001 - RNA, 80 nt, Homo sapiens
cagccggcgggcagcagccggccgacccagagggccggaaagagggcgggcccgcacggagcgcggggagaaaccggaga

SEQ ID NO: 174002 - RNA, 71 nt, Homo sapiens
aacgcaaccagccccacgcccagagcaggaacgagggccaggagaaaagccacaacaaagacagaggaccg

SEQ ID NO: 174003 - RNA, 64 nt, Homo sapiens
gaaacaagaccgaggcgaccaggggggaaagcgccccagggcaggcggggccacgccgaaccca

SEQ ID NO: 174004 - RNA, 65 nt, Homo sapiens
cacccggaagcagagaaagcccgggagaaaaccaagcaaaagcacaggccgagaagcagcaaagg

SEQ ID NO: 174005 - RNA, 72 nt, Homo sapiens
gagacggcggcggaaaaccccaaaaggacaaagagacaagggcagagccaagcgccgcccgggcccaagcac

SEQ ID NO: 174006 - RNA, 85 nt, Homo sapiens
aacaccaggacacgcaacagcaagcacagcagaagaacccccagggcccagagagccaccgagcgaagacccgagaacaagacgc

SEQ ID NO: 174007 - RNA, 73 nt, Homo sapiens
accacccaaaaggagacccaccaagcaacgggacacagagggcgccagcagaggagcggaggagccccaggaa

SEQ ID NO: 174008 - RNA, 70 nt, Homo sapiens
accaagaaccagcaccgcaggacgaccgaaaacccagccagacaaaagagaagcagaggagcgaagaaag

SEQ ID NO: 174009 - RNA, 58 nt, Homo sapiens
ggccaccccggggagccaaccagcaaaccaagagcacggacaccgcgccaagccagaa

SEQ ID NO: 174010 - RNA, 81 nt, Homo sapiens
agggagggccgacgggaccgaaggcagaccccaagccaaacccaccaagggacgaagcgcaccacgcagagaagggacaag

SEQ ID NO: 174011 - RNA, 74 nt, Homo sapiens
gccaccagcacggaccaggaggcgagcaacagggcacaacaacccaacagcccaggcaaaccccgaccacggcc

SEQ ID NO: 174012 - RNA, 75 nt, Homo sapiens
agggcggagcggagacgggagaagaaaagacgaccagacagcaggaaaagacaagaaaaggcgccaacaaccccc

SEQ ID NO: 174013 - RNA, 85 nt, Homo sapiens
cggccaaccccccgcaccaaagcacgcccagacccccagggcagccagagagacacagcccacgaggacggacagacggggcagg

SEQ ID NO: 174014 - RNA, 60 nt, Homo sapiens
ggccgcgggcgcgaccggaggcagaaacgaggaaagaaccaaggaagacacccgccgaca

SEQ ID NO: 174015 - RNA, 80 nt, Homo sapiens
aaagaacggaaaccgcgaagggaaagggcacgcaaagaaacaccccccgcgaggcccaaaaacccagaacagaagacaaa

SEQ ID NO: 174016 - RNA, 82 nt, Homo sapiens
cgagggcccaacccaaaagaccgaagagaaacaacgggagaaaaggaggacaggacgaaaacgcgaccggccacaggcgcgc

SEQ ID NO: 174017 - RNA, 61 nt, Homo sapiens
gagccggccgcgggcgcgaccggaggcaggaaagcccggaaggaaggagagaacggcgcaa

SEQ ID NO: 174018 - RNA, 71 nt, Homo sapiens
aagcgagaagagagaagcacacacgaagccagaaaaacggcgaaggcgaagaggacgcccaccggaggggc

SEQ ID NO: 174019 - RNA, 79 nt, Homo sapiens
acaaagcaagagacagcgaggacagaaggaagggaaaagcacagggccaggaagcagagggacagccaggccagaaaca

SEQ ID NO: 174020 - RNA, 78 nt, Homo sapiens
ccagcgacccaagcgccgcggaaccacgccgccacgacccccagggacggaaaaggcgcacacgacccggagaacccc

SEQ ID NO: 174021 - RNA, 73 nt, Homo sapiens
gccggacccgccagaggaccaacagggacggagcggagaaaaggaaccggccccgggaggagacagcaaggaa

SEQ ID NO: 174022 - RNA, 75 nt, Homo sapiens
cacaaccccgcccgggccaagcagcccgcaccagcccccaaggagcgggacccagggacagcgaaacagcaaccg

SEQ ID NO: 174023 - RNA, 75 nt, Homo sapiens
aacgagaacgccacacacagagggaagcacaggagcgaccaaggaacgaccaaagcagaagccgcaaacagccaa

SEQ ID NO: 174024 - RNA, 72 nt, Homo sapiens
cgagaaaaccagagaccaagcccagagaagagaagcacgggccagcccaaggggaaaagagacgcaaaccac

SEQ ID NO: 174025 - RNA, 75 nt, Homo sapiens
ccggaaacgcgcacggcgccaccccacgaagagcaaggagcaaaccaagacggccaagggggagccggccgggaa

SEQ ID NO: 174026 - RNA, 68 nt, Homo sapiens
gacaggaccccacgcaacagacgggcgcgagaagacgaaccaaccagagagacgcagaacagaagagg

SEQ ID NO: 174027 - RNA, 78 nt, Homo sapiens
aaggcggggaaaaaaccagagaccacagaaggacgggagaacaccccacagggaagaggcccacagacacacccaaag

SEQ ID NO: 174028 - RNA, 66 nt, Homo sapiens
accaagaaccaggcagcaagaaaacacggcaggggaaaccccagccagcgcccccagcaaggagga

SEQ ID NO: 174029 - RNA, 93 nt, Homo sapiens
ccgagacgcagagcccgggccgggccagcaggcccacaacggggcacgaccgagggcagaaaaccagacgagagacagaagacgaaagggcaa

SEQ ID NO: 174030 - RNA, 63 nt, Homo sapiens
cccgaaaccacaaggccgaacgccggacaaccacagcccggagagccgaccgggagaacacgg

SEQ ID NO: 174031 - RNA, 89 nt, Homo sapiens
cgagggggcggcggcgacagccaggcccggaagcgagggcggccgcgccggcccaggcagaggggaggagacacgaagcgacgcagagc

SEQ ID NO: 174032 - RNA, 66 nt, Homo sapiens
gaaggaccaaacggagaaccagcgagccaaagccgcaaagccgccggaagccaaagagaaaagagg

SEQ ID NO: 174033 - RNA, 67 nt, Homo sapiens
gaaaaggcacccagcggacggggccggacccaggaacccccggcgaaggaaagccgcacagcagcac

SEQ ID NO: 174034 - RNA, 70 nt, Homo sapiens
cggaggcccggagcgggcggggcaggagcgaaaagacaaggcagcacggacaacaagccgaagaaggaac

SEQ ID NO: 174035 - RNA, 75 nt, Homo sapiens
gcgaaaagacccagggcccgagggaccgccaacaagcggcccgcaccgggccagacaacaccacccacaagccca

SEQ ID NO: 174036 - RNA, 67 nt, Homo sapiens
ccgcgcgcggaacagacaagcagagccggcaccacaggaagccgagcagcaccgcacagggacacga

SEQ ID NO: 174037 - RNA, 85 nt, Homo sapiens
cgggccgcgaagcgcagcgccagacccaaggcccccgaggagcgcgggcgccgagagcgccacagcagccaaacggggacgccca

SEQ ID NO: 174038 - RNA, 65 nt, Homo sapiens
cgccgaccgccgcccgccacacccgccgccagcgccgcagcgggaaccgcaagagcggggaggaa

SEQ ID NO: 174039 - RNA, 77 nt, Homo sapiens
gaccggacagggaggaccagcgaagcaccgggagccccccggaccgagcgcccagaaacagcgggagaagagaacga

SEQ ID NO: 174040 - RNA, 67 nt, Homo sapiens
acaaaaaaagcagcaaggcacccgaaagagcgaaagcccagacaggaagcaacgagggagaaggggc

SEQ ID NO: 174041 - RNA, 108 nt, Homo sapiens
ccgccgaccaagacagagcaaggccacgacccacgagacaggggcccaagaaaaagcaccggacgagggagccgagcgcgcccagaagacgacagggcagagagagaa

SEQ ID NO: 174042 - RNA, 84 nt, Homo sapiens
gaccggccccagaacgcagagagggcagcgcccgagggcggagcgcgcgcccacggcgcggagcccaacgcgccgaccccgcca

SEQ ID NO: 174043 - RNA, 44 nt, Homo sapiens
gggagggcccagcgcaccgacaggcagcccagcacccgagacgg

SEQ ID NO: 174044 - RNA, 86 nt, Homo sapiens
ccggagacggccgagaagagggggagcgcggccgaaacgaaacacccccgcccagcaggcaggcgcccacgaggcccccgaggaac

SEQ ID NO: 174045 - RNA, 37 nt, Homo sapiens
cgcagggcgcccccggcggaccggaagcgagcaggag

SEQ ID NO: 174046 - RNA, 79 nt, Homo sapiens
agaaaaagagggaaggagcgagaaaaagagaagcgcagcgaaaagaagagcaccgaggaacggcagcaccccacgcacg

SEQ ID NO: 174047 - RNA, 84 nt, Homo sapiens
gagcgcgacgcgcaagggcgcggagccgcgggccggcgagcgcgcgccaccaggggaggggcgaccccggggcccggccagcac

SEQ ID NO: 174048 - RNA, 75 nt, Homo sapiens
gcccacacccccccccccgacaggcaagaagcagagcgcagagggcccagagaaccaggcacgccaagggaacgc

SEQ ID NO: 174049 - RNA, 89 nt, Homo sapiens
cggggcggcgggagccagcgagccacgggagcgagccagaggaggacggccaacccccgacacgaggccgccgaagacaccaccagccc

SEQ ID NO: 174050 - RNA, 70 nt, Homo sapiens
cagcggcccaagaaacaaaaaaaggaaacacacaaacgcagcaggggaagcgacccaaaacgcagaggca

SEQ ID NO: 174051 - RNA, 72 nt, Homo sapiens
aagcgggagagggaccggaacggcggcgacaaggggcccgaacagaggggaagaagagagggcgaaggaggc

SEQ ID NO: 174052 - RNA, 73 nt, Homo sapiens
gcgaagacagggggcccaaacgggagacaacccccgaaggagggcagagacccgcaccgccagaacacaaagc

SEQ ID NO: 174053 - RNA, 73 nt, Homo sapiens
agaccaccaccagacagaggccagaggacccacaaagcaggaagggacaacaaacgagggaaagagggagcca

SEQ ID NO: 174054 - RNA, 64 nt, Homo sapiens
cgggagcacaccaacaaggcccggacaaagccgaaaccaggcagagggaaccaaaaaaaacaga

SEQ ID NO: 174055 - RNA, 83 nt, Homo sapiens
aaacgggccccaggggacagccgggagaggaacagaagcaggagccccagggcaccaggacgggcagaggggacgccagcccc

SEQ ID NO: 174056 - RNA, 79 nt, Homo sapiens
aggcggaagaccaggagcgccacgggagccaggccgcagaggcgcacaggggcaaacagggaccacaaagcaaagagcg

SEQ ID NO: 174057 - RNA, 81 nt, Homo sapiens
gcacacccgggaaggcaccacgcaggacgagaccagcaggagaggaagcaagcagccggaaggaaggagaaccagagcccg

SEQ ID NO: 174058 - RNA, 76 nt, Homo sapiens
gcaccgaaaacaggaaaaaagggagcacacgaggggcgggccagcggaaaggagcggcgcccggaacaccaccaag

SEQ ID NO: 174059 - RNA, 85 nt, Homo sapiens
agccaccccacgcgcccggcaggcagaagccagggaaggcggcccagcagcgagacacagagaggaaacgaggcgggcaagagga

SEQ ID NO: 174060 - RNA, 77 nt, Homo sapiens
gaagaggaggagcggccgggggaggcaggggcgcggcaggaaggagggaagacggccggagacaaggcgcacagcga

SEQ ID NO: 174061 - RNA, 90 nt, Homo sapiens
cgggcagcagcagccccggggcccggagaggcaaagcgaaggcggagcaggagaaagcggcacagaccccagaggaaaaacccccaaggg

SEQ ID NO: 174062 - RNA, 73 nt, Homo sapiens
aggagagccgaccacaggaccaggaaaagacaggaaaaggagcaagaagagagaagggcacagaccaagacaa

SEQ ID NO: 174063 - RNA, 75 nt, Homo sapiens
cacaaacgccaagggacggaccacgcccgcaccaggcaaaggcggaaaacaacaaaagaaaaagaaagccagaag

SEQ ID NO: 174064 - RNA, 73 nt, Homo sapiens
ccgcccccgccggccggcccaacaagcgacgccgacaaaggaggaaaagaagagaccagcgcagcagacaaac

SEQ ID NO: 174065 - RNA, 41 nt, Homo sapiens
ggccaacgagaacaagcacagggacacaacaagaccaacga

SEQ ID NO: 174066 - RNA, 76 nt, Homo sapiens
cccggcccggccccgcccggccccgaggacgccgcgcccccgcccgggcgggcccagggacggaaaaggcgcacac

SEQ ID NO: 174067 - RNA, 75 nt, Homo sapiens
cgccgggcggaagcgcggaaaggcaacgcgcggggagggcgggcccggaggacgaggagcgcaacaacccaaaca

SEQ ID NO: 174068 - RNA, 34 nt, Homo sapiens
gcggagacaagaggagccggcacaggacccaaag

SEQ ID NO: 174069 - RNA, 84 nt, Homo sapiens
agaaacgaagcaaaagacagcgaggagcagcagcagcccagcaggcgcggcccgccaggggcccacgggcggaacgccgcgggc

SEQ ID NO: 174070 - RNA, 73 nt, Homo sapiens
cgagcccgggccgcgcccgagaggcgcaagccgcagcgggccccgcggaccggaagcccaagaccacccacgg

SEQ ID NO: 174071 - RNA, 79 nt, Homo sapiens
ggaagcggagagcggcgacgcagccggagcaaggcacggcggacagcagcccccggagcagacggcccacccggaggaa

SEQ ID NO: 174072 - RNA, 52 nt, Homo sapiens
aggacaccaacagagagacagcaacgaacagacagcagcccacaaccccagg

SEQ ID NO: 174073 - RNA, 83 nt, Homo sapiens
cagagacaggccagagggggccgccgcggcagcaagaacagagagagaggggacagacgagagaacgagcgagacgacgggac

SEQ ID NO: 174074 - RNA, 71 nt, Homo sapiens
accccgcggagagcgcaagccgggcagcagcccagcggcagcagaaagagcagaaacaacaaggaccaagc

SEQ ID NO: 174075 - RNA, 66 nt, Homo sapiens
gaaccacagcacacagagcaacaggggagcagagaaacagcggacaggagacgcacaggaggacga

SEQ ID NO: 174076 - RNA, 67 nt, Homo sapiens
gggaggcaaggaggcgcggagagcgcaaacgaacaaacggagagacgccgaacgaccacacacagaa

SEQ ID NO: 174077 - RNA, 75 nt, Homo sapiens
gacaacaggaggccggaagacccaaagcgagagaggaaaccaaaagaagacggaaaaaggccaaggaacacaaaa

SEQ ID NO: 174078 - RNA, 85 nt, Homo sapiens
acggagaggcccggcggcgcgcccaaccggcgacggaaccaaggcccagcccccggacacgggcggccggaaggcgaggccccgc

SEQ ID NO: 174079 - RNA, 74 nt, Homo sapiens
ggaaagcgaaagagacgcgcacagcgccgacggccaggagaaagccaccaagaagaagccgggacccggcagaa

SEQ ID NO: 174080 - RNA, 76 nt, Homo sapiens
ccgaaggaaacgagccaaggccggccaagagaaaccaccaagagccaggaaggcaaaggccgagagagagccccag

SEQ ID NO: 174081 - RNA, 73 nt, Homo sapiens
acaaggagaaaaacacccaccgaaaaacagaggagcagggacaaggaagggagcaaacgggagagcagagggc

SEQ ID NO: 174082 - RNA, 56 nt, Homo sapiens
cggacgagccgcaggacacagggccacgccgcaggacacagccgacagggccagca

SEQ ID NO: 174083 - RNA, 67 nt, Homo sapiens
cccacacgccagcgcacaccggggccaccccaaagggaagcggaccaggacaaagagaaagaaaccc

SEQ ID NO: 174084 - RNA, 78 nt, Homo sapiens
aggagcacagagagcagagcaaaaacaacagggacgaaaaaagacaggagacgagcgccaaagacagaagcaagcaga

SEQ ID NO: 174085 - RNA, 54 nt, Homo sapiens
caaacagaaaaggagagagaggggaagagaaaccgagcacaacaggagggggcg

SEQ ID NO: 174086 - RNA, 47 nt, Homo sapiens
ggcagggcaagcggcgacacacgacgggccccccacccggcgccccg

SEQ ID NO: 174087 - RNA, 77 nt, Homo sapiens
caagcacgccggagggaagagcgagggagagggcggcaaggagaccgagcgggcccaccggccgccaggggaggccg

SEQ ID NO: 174088 - RNA, 62 nt, Homo sapiens
caggagcgagagaggaccccggacacgaaagccgggaaagagaccgccaggcggacgaaccc

SEQ ID NO: 174089 - RNA, 72 nt, Homo sapiens
cccgggaagggaacagagcagacccggacggaacaggcaaaagagcacggagcgcggacgcccaggagcggg

SEQ ID NO: 174090 - RNA, 73 nt, Homo sapiens
gacgagggcacgaggcagggggaacgggaccacacgagagaagggagaccgagccaggccaggagagaagaac

SEQ ID NO: 174091 - RNA, 70 nt, Homo sapiens
agcaaaagaacgagacgacgccaagaaacccgggccggaagagaagacacaggggagaaaagcccggacg

SEQ ID NO: 174092 - RNA, 74 nt, Homo sapiens
cgggccccaaagcggaacagcgacgacaaggcggaaacaacacaggaccccagaagggccccgagggaggagaa

SEQ ID NO: 174093 - RNA, 54 nt, Homo sapiens
ccggaagcaacagacacaagaccccagaaagagcaacagaaggagacagagcac

SEQ ID NO: 174094 - RNA, 83 nt, Homo sapiens
ccggacagccgcgcgcgagggccggggcgggcgccgcgggacccccgggccaggcgccgcgccaggacggcagccagacgagc

SEQ ID NO: 174095 - RNA, 95 nt, Homo sapiens
cagccccccgcccccccccccacgcaaccccagaccaacacacaaagaaaaagcagcacgaaggcgaggaaccagcagacaaaaaagaagaaaaa

SEQ ID NO: 174096 - RNA, 37 nt, Homo sapiens
acgcccggaagaggcgaaacgcaggaggaaagaaagg

SEQ ID NO: 174097 - RNA, 88 nt, Homo sapiens
aaagcgggcgagcagcaggagcgagcccgaggacaggagaggaagagacgccccacaaccgcccgggcgcggacggggcccggcgaac

SEQ ID NO: 174098 - RNA, 70 nt, Homo sapiens
agagagcccggccgggcaccggaagagagcagaggccaggccagagggaccaacgaaggcaaacaccaca

SEQ ID NO: 174099 - RNA, 61 nt, Homo sapiens
gcagcgaccacaccgaaggggagccgccaccaaaagcagacggaaaacccacggggaagac

SEQ ID NO: 174100 - RNA, 73 nt, Homo sapiens
gcgggcgccaggcagcagaggggaaagaaccagacgacaggaaggcacagaacgaagccgcagaagccaaaca

SEQ ID NO: 174101 - RNA, 81 nt, Homo sapiens
aggcccagggcccggcccggacgcagccaggccacaggcagcgaacgggaaagaaaagccaccaagaagggcccaggaaac

SEQ ID NO: 174102 - RNA, 80 nt, Homo sapiens
ggacggagcggcgagcccccgcggcgacagggcacgcaaaaaaaccaagggaaaagagacaagaccgagacacaaaaaaa

SEQ ID NO: 174103 - RNA, 77 nt, Homo sapiens
cccaggagacacggcaaggagggaagaaagaaacaagaaaaaccgccgaaaggcaaaaaaacgaaacaagaaccagg

SEQ ID NO: 174104 - RNA, 79 nt, Homo sapiens
ggcaagggggagacaccccgcgcgacagaaggcagggaacaaacggaagcggagaaagagaaaacaaagaaccgagcga

SEQ ID NO: 174105 - RNA, 79 nt, Homo sapiens
agaacagaagccagccgacaagggcagaacgaacaggaacaaagccagacggcgggaacaagcggagcaccacacccag

SEQ ID NO: 174106 - RNA, 63 nt, Homo sapiens
aggccccgagacagaagaagcgaaggcccgaaggacaaagcaaaacaggacaccagagaaaag

SEQ ID NO: 174107 - RNA, 71 nt, Homo sapiens
agaaagagcccgaggaagggcggaccaaccacggcaaaccaacaagaacacagagaacgcaccaagaacag

SEQ ID NO: 174108 - RNA, 74 nt, Homo sapiens
gagaagagaccacggaaaggaagaaacaaccaaggcccagcaaacagaggagaaagccgcaggggagcgcacag

SEQ ID NO: 174109 - RNA, 73 nt, Homo sapiens
ggcccaggacccccaaaaggagcccggaccaaggacacaaccagagcccccggggcccccccccgagcccgga

SEQ ID NO: 174110 - RNA, 94 nt, Homo sapiens
ccagaggcccgcggcccaggcccggggcgcaggcaggggcccggaagaccccaggggcccaggggcgggcagggcagcaacaggaaacgcacag

SEQ ID NO: 174111 - RNA, 74 nt, Homo sapiens
cggccacgggcgagcgcggcagggcccagcaccagagggccggacccccgccggccgggagggccggcagcccc

SEQ ID NO: 174112 - RNA, 70 nt, Homo sapiens
aaaaagaggacacagagggaaaagccgaaaaacggcccgagagcaacaggaccccagaaaggggacccca

SEQ ID NO: 174113 - RNA, 75 nt, Homo sapiens
gccggcccgaaccccgggcccgcgggagcggcccccgagggacgggaggagagcggcgacacacggggagcaaga

SEQ ID NO: 174114 - RNA, 72 nt, Homo sapiens
cgccggccacggagagaagcagcaaaacacaagaaggcagaaggaaagaaaggcagccggccaagcagagac

SEQ ID NO: 174115 - RNA, 61 nt, Homo sapiens
ggccaggagagaaagagaaagagaggagaggagacacaggacagacaggcccaagagcgag

SEQ ID NO: 174116 - RNA, 63 nt, Homo sapiens
cgaaacacgggcagcggccacgaggaagggaacaaaaaccagccacaaacaacccccaccacg

SEQ ID NO: 174117 - RNA, 72 nt, Homo sapiens
gccccggacgccggagaggcaccggaccgccagaacggaagaccaaccagaagacacacaaagcaggggaag

SEQ ID NO: 174118 - RNA, 65 nt, Homo sapiens
ccaagcgaccaaacaaaagagagaaaaaccggacccaagccagaccagacccaggggccaccgag

SEQ ID NO: 174119 - RNA, 79 nt, Homo sapiens
acaacaggaggccggaagacccaaagcgaggcaaaaacaaccaggcagagagacaagcaggagcgaagcaggacaacaa

SEQ ID NO: 174120 - RNA, 78 nt, Homo sapiens
gaagagcgcagcccccggcggaggggccgaaaagaagggaccaagacgcgacacccccgcagaggcgcacaccaaagc

SEQ ID NO: 174121 - RNA, 63 nt, Homo sapiens
caacaacagcagccggcccgaacacaacagaccacggccccgggaccaaggacacgcagaccc

SEQ ID NO: 174122 - RNA, 81 nt, Homo sapiens
gcggcacgcgaccaaggagggcaaagcgccgcgggaggaccacaggccacccagaagggccccaccccaaggggagggcca

SEQ ID NO: 174123 - RNA, 66 nt, Homo sapiens
gaacaacaccggaagaaggcgacagagaagagagggacggcgcaaaccagggcgaggcgggacagc

SEQ ID NO: 174124 - RNA, 67 nt, Homo sapiens
cggaggccaaagaaaagcggagcaggaaagaggcgaacacaaagaaagcacaagaggagagcaagag

SEQ ID NO: 174125 - RNA, 101 nt, Homo sapiens
cagcgagcggagccggcaggaaggggaccgggcggcggagcggcggaagaaggaaaaaaagaaggggagcgcgagaaggaaagcgccgcccagccagcggc

SEQ ID NO: 174126 - RNA, 37 nt, Homo sapiens
ccacacccccccgggggggacaccacgccacccaaga

SEQ ID NO: 174127 - RNA, 49 nt, Homo sapiens
aaaggccaagaaggcagagaagacaggcacaaaagagcacaagaaccca

SEQ ID NO: 174128 - RNA, 87 nt, Homo sapiens
ccccagccgaccggaagagaccggggccccccagccccgccaacccaggacaaagcaaaacaggacaccagagaaaaggggacccag

SEQ ID NO: 174129 - RNA, 33 nt, Homo sapiens
cacagccaagccaacccaggcgcggagacaaca

SEQ ID NO: 174130 - RNA, 83 nt, Homo sapiens
ccaaggcaacaagcccacccgaaaccacaaggccgaggaccggagacagcagcagaagcagaaaaaggcaaacgagaagaagg

SEQ ID NO: 174131 - RNA, 40 nt, Homo sapiens
ggccccgagacagaagccgacaaacccacaagcgaaagaa

SEQ ID NO: 174132 - RNA, 74 nt, Homo sapiens
agaagagagaaagcccgggcgcgagcaggagaggaggcagaagagcggccaggagggggaaacccgcccagggc

SEQ ID NO: 174133 - RNA, 101 nt, Homo sapiens
caagggaagggcccgaggaggacacaacaccgcggaggaggacaggaggagccgcaggcccgagcccaggacccccgaacccagcggaggagccgcgcagc

SEQ ID NO: 174134 - RNA, 86 nt, Homo sapiens
ccgggcccagagcggaagacaagacgaggcgggaggcggcagaagcagccagaggagggcacaggcggcgcggagcgcgccgaggg

SEQ ID NO: 174135 - RNA, 63 nt, Homo sapiens
cgggaaggcgccccaggaaggcgcacacaaaggccccggccgcgggagaggaggaggagggcc

SEQ ID NO: 174136 - RNA, 96 nt, Homo sapiens
aaacgcgagccggagaggagccgcaggagaaggaaccagcggggagaaggcccagcgaggggcacccgaggaggaagagggcagggcccacggaaa

SEQ ID NO: 174137 - RNA, 55 nt, Homo sapiens
gagaacggcaaagaaagcaacggacagcagaccacagcccggcaggcccaaaaac

SEQ ID NO: 174138 - RNA, 88 nt, Homo sapiens
cccagggaagcgcagaaagcaggcgaacccgcggcgcaaaacgcgccgcccaagagagagaagagaggcgcgagggcagggaagaggc

SEQ ID NO: 174139 - RNA, 73 nt, Homo sapiens
ccggcgcccgcggccagccgcaagacccgccacaagcaacgcgggaagagaaggacagagcgcaaaaagaaac

SEQ ID NO: 174140 - RNA, 82 nt, Homo sapiens
caggggcggaaaagaaaggcagcagcggaaccggagcccaaccaagcacagcgagaagagacagcagccgcgcgcggcgaaa

SEQ ID NO: 174141 - RNA, 80 nt, Homo sapiens
caagggcagagccagcaaagagagagcacaaggagagaacaggggggcccacacgcccccagcgcgagaccgagccaaaa

SEQ ID NO: 174142 - RNA, 69 nt, Homo sapiens
cgccaacagcagaaaacacggaaggcaaccccagcggccggccccaaaaggagggcgagccggcccagg

SEQ ID NO: 174143 - RNA, 65 nt, Homo sapiens
cccaagggcggcagaagcccccgagacgggcacacccccggagggaccaggaggagaagcaacca

SEQ ID NO: 174144 - RNA, 79 nt, Homo sapiens
ggaggagagaccacaagagcccaccaggagcaccacacgcaagaaaggaagagcaacccccagccacaacgcgaaccgg

SEQ ID NO: 174145 - RNA, 61 nt, Homo sapiens
ggaacggcccggaaacaggaggacccacgaggacaagagaggcccaccaagaagccccaga

SEQ ID NO: 174146 - RNA, 66 nt, Homo sapiens
gccagacccgcgcgcccgcgccgccagcgccgcccccgccaacagagaaccgcacggaaagcagaa

SEQ ID NO: 174147 - RNA, 75 nt, Homo sapiens
gaagccgacgcgccggcgcaaagaagcccaagccaggacggaccccaagcaagccgagagggaaagggcgggggc

SEQ ID NO: 174148 - RNA, 64 nt, Homo sapiens
cagacagaagagaagacgcccaaggaggagagaacgggcccccaccggaggaagaagaaagccc

SEQ ID NO: 174149 - RNA, 86 nt, Homo sapiens
cgagcccagagcccgacccgcgcgggccgagagccgccccgaacgggggcccccccgccggacaggcgacagcgaccgaagaacag

SEQ ID NO: 174150 - RNA, 67 nt, Homo sapiens
gagcgcaaaggaaggcgccgggcccgacccgcgagaggcacaggaagagggcggcacgcggccagag

SEQ ID NO: 174151 - RNA, 73 nt, Homo sapiens
cacagcgacgaggacgacgccgagcagcgcaggcaggaagaaccacaagcggacgcagcccacgggggaggaa

SEQ ID NO: 174152 - RNA, 76 nt, Homo sapiens
cgaaaaacacggacccaaaaaagcagaaggaagggccagcaggcagcaaagccgaagcaggacacaaagaaaagac

SEQ ID NO: 174153 - RNA, 72 nt, Homo sapiens
ggacgaaccaggcagcccaaacacaacaaagagagcagggagagaagggggagaaaaggaacagaaaaggaa

SEQ ID NO: 174154 - RNA, 77 nt, Homo sapiens
agcaccaggacaagcgaagggcaggcagagagaaagcaagaagcccccgaggaggagagcaaggcgaagagaaggaa

SEQ ID NO: 174155 - RNA, 49 nt, Homo sapiens
acgcagaacgggcggacgggcgcccagccaggcaaaggcaggacaaagc

SEQ ID NO: 174156 - RNA, 72 nt, Homo sapiens
cagcacgcaaccagcccacagcggagaagaaaacaaccaaaccgacaccccacaaaaaagcacaaaaacagc

SEQ ID NO: 174157 - RNA, 82 nt, Homo sapiens
aaccaggagcaccagcggggaacaacaccccccagccaccccagacgacaagagcgcaagcaagggagaggagggagaagcc

SEQ ID NO: 174158 - RNA, 80 nt, Homo sapiens
ggaacacgaagagccccccaaaggagaacgacgccaaaacaaaagcaacaaggcgccggaggaagagcggaaaaggcgga

SEQ ID NO: 174159 - RNA, 79 nt, Homo sapiens
gaagggacaagacccgccagaacagaggcaagagcggacccgggccaaggcccgccacacgggggaaccccccccgggc

SEQ ID NO: 174160 - RNA, 74 nt, Homo sapiens
agcaaagacccacgaacagaacccaggaaagaccacagcaagaccacgcccccagccgggggaccaggccgaac

SEQ ID NO: 174161 - RNA, 65 nt, Homo sapiens
cgccgcaaggaaacacaacgagaaggcgggcgcggacggcaggggcgccggggaacccgcgggaa

SEQ ID NO: 174162 - RNA, 85 nt, Homo sapiens
gcgagaccggagagccgcaggacggcgcggcagagccccgacgccacagaacgcgggaggccaccgccccaccagcaggcaacgc

SEQ ID NO: 174163 - RNA, 43 nt, Homo sapiens
cccgacggccacgaacccgaggggaccgcagcgaagcacagca

SEQ ID NO: 174164 - RNA, 87 nt, Homo sapiens
cgaacgcggagagcacgccagaaggcccgggcacgggaggcggaaccaacccccggccagggaggggccgggggacgagggccccac

SEQ ID NO: 174165 - RNA, 63 nt, Homo sapiens
cggaccgagccgacgccgcggggcagcgggccggcgccggcgcgccccgacaagggaccgggc

SEQ ID NO: 174166 - RNA, 87 nt, Homo sapiens
cgagcgcccggaggggagagagcggaggacagccgagaggagcgcagcccccgggaccggcccgacagagccgccgaccgacagcag

SEQ ID NO: 174167 - RNA, 65 nt, Homo sapiens
aaccgccacagcggaaaaaagagaaaaccgccgccggggccagcaagaacaaaaagcaccaacag

SEQ ID NO: 174168 - RNA, 87 nt, Homo sapiens
gggggcagggccagggcgcaggggagaaacaaggcgccggagcagcgcccgggggcggagaaggccaggcagcagcgcaggaggagc

SEQ ID NO: 174169 - RNA, 80 nt, Homo sapiens
gcaaaggagacaaggcacagccggggaaaacccaagaaacacagggcgggaagcggggaaaggaaaacaccagcacacca

SEQ ID NO: 174170 - RNA, 70 nt, Homo sapiens
ggcgagggggagagggcagcacgcgcgggggaaccggggacccaggaaggggaaaaagagagaaagcagg

SEQ ID NO: 174171 - RNA, 104 nt, Homo sapiens
gcaccacagcaccccaagccaggaaagcgggagcagcaaagaggaagccgaggacagggcaagacagggccacccagggaaacaccacagagggagggcgggca

SEQ ID NO: 174172 - RNA, 81 nt, Homo sapiens
ggcgacacgaccaggaggcggccgccgcagcccaggcgcgggggcgacgacaggaggacagcacaaaaacacaccaagaga

SEQ ID NO: 174173 - RNA, 80 nt, Homo sapiens
cagaccccaccggagaagagcagaagggggcgcggggaggagccagaggacaaaacccagccggcacaaaccaggaaagg

SEQ ID NO: 174174 - RNA, 76 nt, Homo sapiens
cgaggcacaggcagagcaagaaacgggagcaggagaagaagccaggggcagagcgggcgccaccagggaagccggc

SEQ ID NO: 174175 - RNA, 81 nt, Homo sapiens
agcccagaagcggcacaaccagggacagaccagccaccacgcccgcccacacagcgccccagagccggagcgggccgaccc

SEQ ID NO: 174176 - RNA, 77 nt, Homo sapiens
cagacgaaaaagcgaaggaccaggcagaaaacaagccgcggacgggccgggaggaagggaaggggccgacgcgggca

SEQ ID NO: 174177 - RNA, 70 nt, Homo sapiens
cccgcaaagaaacagccccccgacagcccgggaagaagcagacacaagccgaggaagcaggcagaaggag

SEQ ID NO: 174178 - RNA, 80 nt, Homo sapiens
aggagcacgcgacagcgaggaagcgcaccacagcacaaaaggaacccaagaaggcagaagccagccccgcaggccgccac

SEQ ID NO: 174179 - RNA, 81 nt, Homo sapiens
gacaggagagaagaagaagaaaccggagaaggaacagaccccggaggaggagcgggcaaaggaagggaggggccggggagc

SEQ ID NO: 174180 - RNA, 84 nt, Homo sapiens
caaggcgagggacgagaacgagagcaagaaagaacaggccagacaaacagcgaagagcagaaaacccaagaaacaaaagaacag

SEQ ID NO: 174181 - RNA, 73 nt, Homo sapiens
aaacgacaccacgaaggacaagaccaaaacccacgggaaggggaccagcgccccaggacacacagcagcaaag

SEQ ID NO: 174182 - RNA, 74 nt, Homo sapiens
gcaaaggaccaagcaaagaccccgagaggacagcgaggcccaaacaaccacaaggaaacaaggacaacccggga

SEQ ID NO: 174183 - RNA, 78 nt, Homo sapiens
ggaggcaccgagaggaaaggcgagggaagcgccggcaccagacccaccacaggccagaagcgaccggcagcagcaaaa

SEQ ID NO: 174184 - RNA, 52 nt, Homo sapiens
caaccaggggacccccaacccaccggcacgacaggccaccagaacgaggagg

SEQ ID NO: 174185 - RNA, 78 nt, Homo sapiens
ccaccgaagcaacaaggggaaggggcaaaagagcaggccaagaacccaaagcaaggcgagacaaggggccaaccagcc

SEQ ID NO: 174186 - RNA, 70 nt, Homo sapiens
gcagggaccgcagaaagacgaaggcgaacaggaacaaagagagagaaggggacgcaaacgcaggcacacc

SEQ ID NO: 174187 - RNA, 76 nt, Homo sapiens
cgcacccggggacaagcgcgggaacggcgcggaagggccagcccaaggcaagaaaaaaagaccaggagcggcagcg

SEQ ID NO: 174188 - RNA, 75 nt, Homo sapiens
caaccagggcaaaaggaaaggacccaccaagaacaggcaggaacacccgaacgcacagaacaacacgcgcccgaa

SEQ ID NO: 174189 - RNA, 67 nt, Homo sapiens
gacagaccagaccgggcgggggcccggccagcagggagacacaggccagacaaaggggagggcgggc

SEQ ID NO: 174190 - RNA, 74 nt, Homo sapiens
ggcggggcgagagggcggcgaaggaggcagaggcacagcgcagggacaagagaaaaaaagggcgggcgaacaaa

SEQ ID NO: 174191 - RNA, 76 nt, Homo sapiens
cacgcagagaaccgagaaagcaacggaaacgaagaaggcccagcccaccagggaggagggacacacgacaggcccg

SEQ ID NO: 174192 - RNA, 45 nt, Homo sapiens
ccggcacggggccacgcgggaccgccagaagcagcgcgacggaga

SEQ ID NO: 174193 - RNA, 77 nt, Homo sapiens
aaacgaaacccccccccccacccaccaaaccggagggggaaaaaacccaaggcgcaaaggagcacagaccagcgcgc

SEQ ID NO: 174194 - RNA, 35 nt, Homo sapiens
gcccagaacagcgaaaccagcgaaccgaggcaaac

SEQ ID NO: 174195 - RNA, 59 nt, Homo sapiens
aagacaggccgcgccggaagcaacacggcccagcgaaaaaaagcaaaccagccggcggg

SEQ ID NO: 174196 - RNA, 73 nt, Homo sapiens
cccggccaaaacacagcaagacgggacacgcaggccagaagccgcagagcagcagaacagacagaaacacgaa

SEQ ID NO: 174197 - RNA, 62 nt, Homo sapiens
agagccaaacgccaaggcggcaagcagcccgacggccaggaggcgaagagacgaggaagccc

SEQ ID NO: 174198 - RNA, 81 nt, Homo sapiens
agggcgcccgggcagagcacacaggaccgagaacgagaaacgcagagaacacaaggaacgaaaggaagggaagaagcagaa

SEQ ID NO: 174199 - RNA, 78 nt, Homo sapiens
gaaacccagcagcgccggacccgggaagaacgggagccaagggacagccgcgagggaagggcaacaacccaccggggg

SEQ ID NO: 174200 - RNA, 80 nt, Homo sapiens
gaaccgggcccggccgccggggccggcccgggagccgggcccccgcgccacacccaagcccagcccaagccaaagccggg

SEQ ID NO: 174201 - RNA, 70 nt, Homo sapiens
gagcggcaaaaggggagcggcacccgccgccacccacaaggcacaacaggaagggacacaagacgaacgg

SEQ ID NO: 174202 - RNA, 50 nt, Homo sapiens
caggccgggcggggcacccgcagcacgaaggaccacagcgacacagacca

SEQ ID NO: 174203 - RNA, 55 nt, Homo sapiens
gcaggacgcagcgaacgcgaggcgcggcgggaggcggcccagaggaccgcaacac

SEQ ID NO: 174204 - RNA, 76 nt, Homo sapiens
gaacaccggagggaaaagaacggagcccaccgcaggacaccggggccaaccgaaaaaacaaccagagaggcggaca

SEQ ID NO: 174205 - RNA, 71 nt, Homo sapiens
aaaggacaccagggaccgggggaaaggaggcggcaccagacacagggaaagccggaggcggcggcacggcc

SEQ ID NO: 174206 - RNA, 80 nt, Homo sapiens
gcggagcggcagcagaaggaggccaaacacacaggaacgccagaccccagccgagggaggcaacagcaaagggacagcca

SEQ ID NO: 174207 - RNA, 66 nt, Homo sapiens
gaaacagacagaaggaaaagaagggaaaacgaaggagaacagggaagacacacccaggaccaaccg

SEQ ID NO: 174208 - RNA, 74 nt, Homo sapiens
cagacaaaacgaggacagcccgcagacaacacgggcgaccacggaggaagggacaaggaggagggaccacggag

SEQ ID NO: 174209 - RNA, 76 nt, Homo sapiens
ccaccgagacagcagccacacagcagcacccccccggagacgccgggaccagcacccaaacaccgggaagcagggg

SEQ ID NO: 174210 - RNA, 70 nt, Homo sapiens
ggaacagaggaacccagaccagcagcgggcagcaggcacaacaccgggaaaagccgcccccagacagcgc

SEQ ID NO: 174211 - RNA, 74 nt, Homo sapiens
aagaacacccgagaggggggcaaaaggaagagagcaaccccgcccaaccacagcacgggacccaaaaccagagg

SEQ ID NO: 174212 - RNA, 76 nt, Homo sapiens
gaaaaacgccgaaagaagcaccgcaagccaaccagagccggcggcagcaccaaaaagcccgggcaccgcccagcgc

SEQ ID NO: 174213 - RNA, 75 nt, Homo sapiens
aaaacggcaaggaagccccgcaaacccccaacgcaaggagggacaggacggaaggagcggaggaagacacaagag

SEQ ID NO: 174214 - RNA, 78 nt, Homo sapiens
gccagaaagacagaaaagggaagagcacggagccaggaagcagccggaagaaggccgcggcaaagaaggccaagaaga

SEQ ID NO: 174215 - RNA, 60 nt, Homo sapiens
acacccgaaacagcgcggaaaggaaacccgaggagacaaacaagaagcgaccccgcaaca

SEQ ID NO: 174216 - RNA, 87 nt, Homo sapiens
ggcggggccggcgaccaggaaccgggcgagcagcggcgggggcccgagggggccgacgccaccgccgagcccagaccggaacagacg

SEQ ID NO: 174217 - RNA, 80 nt, Homo sapiens
cagaaaccccggacaaggcacgccagacggcaaaagcagaccggaaaacccaccggcaagaccacacccgaggggagccc

SEQ ID NO: 174218 - RNA, 72 nt, Homo sapiens
gcgcaaggccacaaagcagcggcagggcgcggaggcaggaaggaggagcgcaaagagacccgccccgcgcac

SEQ ID NO: 174219 - RNA, 63 nt, Homo sapiens
ccccccagccagggaacgcagaggcgcccagccccaggccagcagccacggagcccggggcag

SEQ ID NO: 174220 - RNA, 80 nt, Homo sapiens
cgcgccgccgaccccccggcgccgcgccggcggcggaggcagcacggcaggagacgaggagaggacagcaggacacccgg

SEQ ID NO: 174221 - RNA, 72 nt, Homo sapiens
cagggcagaaaagcgaccaggcgagccaaccaggaaaccgccagacggccgcaccagaaggaaaggcgacgg

SEQ ID NO: 174222 - RNA, 75 nt, Homo sapiens
cagccgccggagcccgggacacgggaacaacccggcagcagacgacaggaggaaaggcagagaaagccccaggcg

SEQ ID NO: 174223 - RNA, 70 nt, Homo sapiens
acacccaccgagagagaggacacgaaacagagaggggaaggagcccagcgacgcaacagcaagagaaaag

SEQ ID NO: 174224 - RNA, 69 nt, Homo sapiens
ccacgccgacagagacgcccaggaggccgccggcaaacaagaggacccggggcacccagaacagaccgg

SEQ ID NO: 174225 - RNA, 85 nt, Homo sapiens
gcggcggcggcggcggcggcggcggcggcggagcaggaaccaaacacggaggagggcgggaccacgggaggagggcaacccgggc

SEQ ID NO: 174226 - RNA, 98 nt, Homo sapiens
cggaagaggcgcccacgggggcccgcggcgcccggcgcgaaggggaacaacagcaccaccaaccgaagcaaagccagggagggaaccgaagccacggg

SEQ ID NO: 174227 - RNA, 79 nt, Homo sapiens
cgcccaaacgcgaagcagccccgcgaggaccacccgcaccaggacaaaagaagggcagcacaaaggaaagccccaaacc

SEQ ID NO: 174228 - RNA, 61 nt, Homo sapiens
gagcaagcagggccggcagcagccagcccagagagccaggcaggcgggggacaaacaagaa

SEQ ID NO: 174229 - RNA, 54 nt, Homo sapiens
cagacgcagggcgcccccgcacaggagggagcaggaaaaaggcggagaggaagg

SEQ ID NO: 174230 - RNA, 73 nt, Homo sapiens
ccccaagcggggcgcaggcggccgagccggccgggccgcgccacaccggcaccaagaccagaggggaggccgc

SEQ ID NO: 174231 - RNA, 74 nt, Homo sapiens
ggggacggggggaggcaggaccggaccgcaacagaacagccagcaaagacaagagcagaccagcagccgcagcg

SEQ ID NO: 174232 - RNA, 36 nt, Homo sapiens
ccggaggcgcacgaaaaggcccaacagcaccgggaa

SEQ ID NO: 174233 - RNA, 84 nt, Homo sapiens
ccgggcgccagggccgccgccccgcccgggacaggaagggagcccaaaacagcagaggggaggacgccagccagaagcgggacc

SEQ ID NO: 174234 - RNA, 66 nt, Homo sapiens
caccccgaaggacacagcgcgcagagcggagggcgaaccgccccacgagaccaaacgccaacgaac

SEQ ID NO: 174235 - RNA, 76 nt, Homo sapiens
caccaaagaaaccagagaagcaacccaagaacccaaaagggccgagacgccacccaggaggaagcaaggagggggg

SEQ ID NO: 174236 - RNA, 57 nt, Homo sapiens
ggcagacgcacacacagcccagaagggggaaaaagacccgagaagcgcagacccacc

SEQ ID NO: 174237 - RNA, 78 nt, Homo sapiens
cggccaagggggacgggagcggggccggcggccaccggaaccgcaacggcgccaacccccaacccacgcgggcagcca

SEQ ID NO: 174238 - RNA, 76 nt, Homo sapiens
ggcaagaccgaacagaaggaacgacgcggaccagaagccagagcgaggacgccggcagcaggaaccgaaagacgac

SEQ ID NO: 174239 - RNA, 80 nt, Homo sapiens
ccgcgggaggccgcccagaagcggcgcgcacggacgcggagaggggagccgcaggaagaccaaagcaagggaggagaagc

SEQ ID NO: 174240 - RNA, 78 nt, Homo sapiens
ggcgcgggggaagcgggcggaccccgaaaaggcggggcaacagaaaaggggaccgcaacagaagcaggaaacggagaa

SEQ ID NO: 174241 - RNA, 84 nt, Homo sapiens
agcgggccagccggcccgcaacccgagccccccaccgcacgcggcccgggccgcccacccaggcggaggcaggacacaggcagc

SEQ ID NO: 174242 - RNA, 71 nt, Homo sapiens
gacggcacagcccgccgaacccgaaaggagaacaagaaccccgaccagacccaccagcaaaacaaggcaga

SEQ ID NO: 174243 - RNA, 72 nt, Homo sapiens
gggaggcaacagcaggcccccacgccagaacaaggcgagaacgcggacaagcaaacaaagaggaaaaagagg

SEQ ID NO: 174244 - RNA, 41 nt, Homo sapiens
gagaccaagccaaacccccaggcgagagcgagacaaaacag

SEQ ID NO: 174245 - RNA, 73 nt, Homo sapiens
ccccccggccaccggaacgccacgcccccgcccccgccccccaccccgcccaacagaagaaggaagagacggg

SEQ ID NO: 174246 - RNA, 85 nt, Homo sapiens
ggaaaaccgcaagaccacagcagggcgcccgcgccggcagaggaggcgagcacccgccagggagaggaacccccgcgcacccagc

SEQ ID NO: 174247 - RNA, 71 nt, Homo sapiens
acgggcaacaggagccccacgccacggaggcgaggagaaaaacaccgacagcacagagcagaggaggaaag

SEQ ID NO: 174248 - RNA, 76 nt, Homo sapiens
gccgaggcaaaacggacacagaagacagggacccggacaagccgcagaaagccgcaacaccgagaaaaaaaccacg

SEQ ID NO: 174249 - RNA, 70 nt, Homo sapiens
caacaaaacaggcacacaagaaacagggagcgcgaaccaccaaggaaagaaggacagcgggaagccaaag

SEQ ID NO: 174250 - RNA, 84 nt, Homo sapiens
aaaacggcgagaggggcgagaacgccacgcgggccggcgaaagcgaaagagccgcagacgcacagcaaccaccggacccgaagg

SEQ ID NO: 174251 - RNA, 82 nt, Homo sapiens
cggagaacgcggcaaaggaccaagcaaagaccccgagaaaaccgcccccaaagccagagcccaagccaaaaaggccccgcaa

SEQ ID NO: 174252 - RNA, 71 nt, Homo sapiens
gcgaaaaacagggaggagggccacaacacacaggacgcaagagcaacaaagcgggaaccaagagacacaag

SEQ ID NO: 174253 - RNA, 45 nt, Homo sapiens
ccagagcccccgcccgcacagcaggaagcggcccagaggaaaggc

SEQ ID NO: 174254 - RNA, 77 nt, Homo sapiens
agaaggccaaaaaggcaaccacagagagagagagggagggacagcagagacagacgaagagcgacggcgcaaaaacc

SEQ ID NO: 174255 - RNA, 78 nt, Homo sapiens
cagcacgggagaacaaacggagaagaaaagcgcaccgccggaccacacgcagccagacaacacagggacacaacaaac

SEQ ID NO: 174256 - RNA, 68 nt, Homo sapiens
gggaaaaggcaacagcgaaaacagggcgacacaccaaacgcaggaacccgccgaaaacgagaaggcaa

SEQ ID NO: 174257 - RNA, 78 nt, Homo sapiens
gacagcacgcgggcgcgggaaagcccccgcccaaaccacgagggaaggcaccagccggggaaaggagcgcagcgcccg

SEQ ID NO: 174258 - RNA, 55 nt, Homo sapiens
cggacgcacgccacccgcgaccagcaaaccagccggcgggcgccacaacggacga

SEQ ID NO: 174259 - RNA, 79 nt, Homo sapiens
cggcagagggacagagcccggccaggacaaaaagcaagccgcagcaacaccacgacccacccgacacacccaaccagca

SEQ ID NO: 174260 - RNA, 83 nt, Homo sapiens
gcccgggccgcgcccggacggggcccgacacggccacccacgccggaggccggggagccgacgccggcgccagggcagaaccg

SEQ ID NO: 174261 - RNA, 77 nt, Homo sapiens
agaccaggaacccgcgcaaaaaggaacaagccagcacaaggcccggacgaggggcaggaccggggacacacgacgcg

SEQ ID NO: 174262 - RNA, 85 nt, Homo sapiens
ccgcacccggccgcccggcgccccggggacgccgccccccggccagagacccagagcagcagcgaagagaaggcccagccccccc

SEQ ID NO: 174263 - RNA, 71 nt, Homo sapiens
ccccccccccgcagaggaaacaccaggcgcggcggcccagccccgacacaggggagacaacaggaggacac

SEQ ID NO: 174264 - RNA, 88 nt, Homo sapiens
caagaccagacgggaacgggagacaagcgcagcgagcaaacgagaaggagacccaaccagccagacagcccgcggagaagacgggaac

SEQ ID NO: 174265 - RNA, 82 nt, Homo sapiens
gcacccgcacgagcaacagacgagcgcgccaggccgacagccgcggccgggcccgagcgagggcggcacgccacaggacggc

SEQ ID NO: 174266 - RNA, 78 nt, Homo sapiens
gggacaaacagaagaaggccagccaaaaaagccccggaggaacgcgcaagagagggacaagaccaagagaccaaccac

SEQ ID NO: 174267 - RNA, 69 nt, Homo sapiens
ccgacccacaggacagaacggaggcgaagagagcggggaacaggcaagagcgacaagcagaaaggaccg

SEQ ID NO: 174268 - RNA, 69 nt, Homo sapiens
gggcagagccccaggcgcaagcgaaccaggcaaaggaacagagcacacagaccacaaggcagcaggccc

SEQ ID NO: 174269 - RNA, 81 nt, Homo sapiens
gccggccccccggcggagaagaagcgcggccgcaccggccaagacgcaaacagcagacggaagaccccacggcaaaaccac

SEQ ID NO: 174270 - RNA, 65 nt, Homo sapiens
aagaagggcaggaccgggcggaggccgccaagacgggcgagcggcagagcgggacaagacacccc

SEQ ID NO: 174271 - RNA, 64 nt, Homo sapiens
ccggggcgcggcgaccccggcggcgggaggcccggccgggcaggcggaggcagcggcggaccgg

SEQ ID NO: 174272 - RNA, 76 nt, Homo sapiens
cgcagagcaggacgaaacgcacccgaggagagagcagagcgacacgaaaagacagaccgacaacagcccagaagaa

SEQ ID NO: 174273 - RNA, 74 nt, Homo sapiens
gcgcacagggaaaggccgcaaaccaaggcaccgaaggcggcccacacagcggagggcacacaggcccgagcaca

SEQ ID NO: 174274 - RNA, 80 nt, Homo sapiens
ccgccggccaggccccccgagcgcccccagcagccgccccgccgaccaaacagggccccagacggcaccaaagggacccg

SEQ ID NO: 174275 - RNA, 73 nt, Homo sapiens
ccaacccagcgacggcgaggaacggcaaaccccggccggggagaagccaaaacaggcaacaccaacagcggca

SEQ ID NO: 174276 - RNA, 79 nt, Homo sapiens
cggaaccacaggcgaagccacaaagaagagaaccagaaaggaggagagccagagaaagagcacgaggcgagcggggaga

SEQ ID NO: 174277 - RNA, 74 nt, Homo sapiens
cacggccgcaaagaggagcaagaaagaaaaagaggaagaggcaccaggaggagggacagagcgccacacagccc

SEQ ID NO: 174278 - RNA, 78 nt, Homo sapiens
acccccaaccgaccggcaagaaaagaaagggagaccagaagagaaccgggagcgaggcggccagggccccagaagcaa

SEQ ID NO: 174279 - RNA, 74 nt, Homo sapiens
ccacccccggcgggcccgaggcggcgagagaggcaggcggagccgaccgggccaggcgccggcccgcagaccaa

SEQ ID NO: 174280 - RNA, 74 nt, Homo sapiens
gggccagaccgggcgagagaccgagcgcaggcacggggcgagaagggggacggaagcggcagcgggcagccggc

SEQ ID NO: 174281 - RNA, 76 nt, Homo sapiens
ggagagcgaggcagccaccaccgagcccgagccggaaggacacgacacagggaccaagaaaggcccagggaccaaa

SEQ ID NO: 174282 - RNA, 70 nt, Homo sapiens
gcagggaggggaaaagggcggagaacggaaaagcaccaggaagcagagaggaccgcagaagggaaggaga

SEQ ID NO: 174283 - RNA, 72 nt, Homo sapiens
gggcgcggcagggcccaccgagcgcaagagacagaacgcgacgccagagggcaaaaccacagcaagcgagca

SEQ ID NO: 174284 - RNA, 67 nt, Homo sapiens
accaagaaccagcagggcagaaaagaacagacccagaagaagcgaaaggggagaaagaagaaagcaa

SEQ ID NO: 174285 - RNA, 86 nt, Homo sapiens
gagaccgagcacacccccagagccacagcgcacagacaagcagcaagcaccgagaagaacaccaaacaagaagccacaagacagac

SEQ ID NO: 174286 - RNA, 95 nt, Homo sapiens
gccgcacgggacagcgcgagcccaaaccaagcgcgacaagaaaggaacacagaaacgccccgggccagccgccaaggccgcccagagccccagca

SEQ ID NO: 174287 - RNA, 73 nt, Homo sapiens
gcccgaggccccaggcagagaaaacacccgagagcaccgccgagcggaccccaagcggagcaacaccccgcac

SEQ ID NO: 174288 - RNA, 84 nt, Homo sapiens
cggccccacaggccccggaagccccacagaggaagaagaggggaaagagaggaacagaagagaaggaagaacaggagagaagga

SEQ ID NO: 174289 - RNA, 81 nt, Homo sapiens
cggaaggccgcagggacccgccaggaaagccaggggaaccagaagaggccaaccagcacgaacgccagcagcacggcaccc

SEQ ID NO: 174290 - RNA, 77 nt, Homo sapiens
cggaggagcgcgcccgccgagaaggagcccccgcagcgagaaccagccaaaacacacgaacagggaacaagaaacac

SEQ ID NO: 174291 - RNA, 71 nt, Homo sapiens
acggaaaaacgaaggcaggaccacccccagggccaaaacacaggaagaggaggggggccaaacgaaagcag

SEQ ID NO: 174292 - RNA, 72 nt, Homo sapiens
acaccacagaaacaagaaagccaggaacgacaggccacgcgcagagcgaacaccaccgcgaagacgcagcca

SEQ ID NO: 174293 - RNA, 82 nt, Homo sapiens
acaccgacgcaggaagccaccgagacggcgaccgggcgccgagacaccagagccacaagagccaccaaaaccggcaaaggcc

SEQ ID NO: 174294 - RNA, 116 nt, Homo sapiens
caggcccgggacccgcagcgccgcccacgcccagcgccgcccccccggccagcaacagcgagacggcgaagacaaacacccacagagggccacacaggaccaggcggacaagacgg

SEQ ID NO: 174295 - RNA, 70 nt, Homo sapiens
cggggaaaccccgacagcagaagacagcagagagaggagccagccacacggaaagaagaaaagaaaagag

SEQ ID NO: 174296 - RNA, 69 nt, Homo sapiens
cccaacaccaggaagcccagaagggcgagaagcacaacgcaaaacccaagacagccggccccagcgaga

SEQ ID NO: 174297 - RNA, 77 nt, Homo sapiens
cggggcgccaaaacgcccccaacccagcgcaaaggaagaggaaggacagggggagaggcaaggaaacgacaagagaa

SEQ ID NO: 174298 - RNA, 67 nt, Homo sapiens
acaagggcagagggaacaggcagcaggaagcacggcgggcgaaacagaaaagaacgcgggagggaca

SEQ ID NO: 174299 - RNA, 75 nt, Homo sapiens
ggccccgacgacagcgggccgggaaaagggcacgaggccggaaccgcccagccccggaacgcaaaaccccaccca

SEQ ID NO: 174300 - RNA, 39 nt, Homo sapiens
gaacacacacaccagagaacggcagcccgagccaaaaag

SEQ ID NO: 174301 - RNA, 56 nt, Homo sapiens
aacgcgccggaacggaaccaaagggaaagaagaccgagcccaaacaaaagggagag

SEQ ID NO: 174302 - RNA, 76 nt, Homo sapiens
caagacaaagaaaaacccgccccccaacaccggacaccgagaggaaccacaagcaggaaaagaaggaggccagcgg

SEQ ID NO: 174303 - RNA, 70 nt, Homo sapiens
gccgccgcacaacccgagggggggaccagaccaggccaggagaagcccccgcagccgcccccagcaacgc

SEQ ID NO: 174304 - RNA, 75 nt, Homo sapiens
aagcccaagcggaaaaaaggccgaagagcggccacccagacgaagcgaacacacccaacacacagccccgcgagc

SEQ ID NO: 174305 - RNA, 73 nt, Homo sapiens
aggaccaagaaccagagacagagccccagcaacggaaagccaagcaagcaaggagccagcccacgcaagcaca

SEQ ID NO: 174306 - RNA, 76 nt, Homo sapiens
gagcgcacccgacacgggccgcgggcccagccgcgagccgcccccggaagcacaaagcgggaagaacacgggcacc

SEQ ID NO: 174307 - RNA, 76 nt, Homo sapiens
gccagcccgcgaaccggccggagagcggcagaggacacgccacccaggcagaagagagcgaccggaccccggacag

SEQ ID NO: 174308 - RNA, 79 nt, Homo sapiens
caccgcacaacgaacgggcaacacacacgcacgaagaacggaccgaagccaaagaacaagagcgcagggacagagcgac

SEQ ID NO: 174309 - RNA, 75 nt, Homo sapiens
ccaacccgcagagccagaaagaggagcaggaggggcccgagagaagagaagagcggaggaacaggaccggagcca

SEQ ID NO: 174310 - RNA, 81 nt, Homo sapiens
gcggaccgggcagcaaggagggacccgaacccacgacacggccggcaggcagagacaccaagcgcccccacgacacgaaga

SEQ ID NO: 174311 - RNA, 71 nt, Homo sapiens
gaaaacagcaggaaaaccacaccaagggaaggaaggaccagagaaacgaaagaagaagcccaggacccagg

SEQ ID NO: 174312 - RNA, 69 nt, Homo sapiens
cggcggagcagaggaaccacacgcgacaggccgaaagcagccagcaagaaaaggagaaaaacacagagc

SEQ ID NO: 174313 - RNA, 81 nt, Homo sapiens
cggcccccccagccggcgcgcccgcccccgcagggacaagcaaggggccaaggagccaaggaggaaacccacaacagagga

SEQ ID NO: 174314 - RNA, 87 nt, Homo sapiens
ggaggcccgaggcccgcgccccgcgccgcgccccccgcccgcccgggccgccagcagaagaggcggccacccacgagccgacggcaa

SEQ ID NO: 174315 - RNA, 53 nt, Homo sapiens
agagaggaggacacgaccgggcaggcccaaacggagcccaggagaaaaaggag

SEQ ID NO: 174316 - RNA, 76 nt, Homo sapiens
gggagacgcgggggacggggcaggaccacagacggcaaacaaaggaacagaggcacgcggacacggccacagggac

SEQ ID NO: 174317 - RNA, 77 nt, Homo sapiens
acagagggaggaagacagccagcaggaacagaaggagcccagcgacggcagaacacgagaaggccacccgaccacag

SEQ ID NO: 174318 - RNA, 60 nt, Homo sapiens
ggcaccaaaaagaaccgcagacagggacagagacagcaagaagaaagacaccgacagaag

SEQ ID NO: 174319 - RNA, 77 nt, Homo sapiens
cagagcaggaggggagcgaagaagaggaagaacgaccagagcgacccgagcagcgcagaccccgcgggcaacacaac

SEQ ID NO: 174320 - RNA, 73 nt, Homo sapiens
gggggggcccggaaccccgaaaccaggaggcaaaacccaacgaggacgggggaaagaaggaagggaaaaaaac

SEQ ID NO: 174321 - RNA, 97 nt, Homo sapiens
gcagggaggaaggggacggccgggggagacacgccacaacaaggccaaagggaggcagccccagaggccgcaaggcggaagcaaggggaagcaaaca

SEQ ID NO: 174322 - RNA, 72 nt, Homo sapiens
accccaccacccaccccccgagaaaggagaccacaagagcgcacccggccggcagccccaagaggagacagg

SEQ ID NO: 174323 - RNA, 71 nt, Homo sapiens
gggggggcccgccaacgaaccacaggcgagaccgagacaaggaggggcacgcccggaagaccagacccgca

SEQ ID NO: 174324 - RNA, 87 nt, Homo sapiens
gagcaccaacggaaacagccacgagagacgagcaacccccgggaagccaagccgcagaggcggagaagaacccaaccaaaaccaggc

SEQ ID NO: 174325 - RNA, 72 nt, Homo sapiens
agcaccaagacgaaaccggcagaaggcacgcgcccggacagacaggcagagacgaagaagccaaggaaagac

SEQ ID NO: 174326 - RNA, 73 nt, Homo sapiens
aagaaccaagaccaggaaacccgaaccccaggcaaaagggaaaaacacccaaagagcaaggggcacagccacg

SEQ ID NO: 174327 - RNA, 56 nt, Homo sapiens
caaagaaaccgcaggaaacgagccggcgggcaaggagaggggcaaaggaaagcccg

SEQ ID NO: 174328 - RNA, 62 nt, Homo sapiens
ccccccaccgcccccggcaggggaaaaccaaggggcaaaccaggagcaccacgaagaaacgc

SEQ ID NO: 174329 - RNA, 67 nt, Homo sapiens
caaaacgggcgcaacgaccaaaggaacaggcggaagccaggaggacgaaccagcccaagcgcgcaac

SEQ ID NO: 174330 - RNA, 64 nt, Homo sapiens
ggggccccagcagcccccgaaggcccacaggacaggagagaaagacgccccagggcacaccgac

SEQ ID NO: 174331 - RNA, 71 nt, Homo sapiens
ggggcgagcaaaccaccaaaaaagcggaggcgcgcaggagccaagacagagggagacaaagcgggcagaaa

SEQ ID NO: 174332 - RNA, 86 nt, Homo sapiens
gcagaaccgcagccaccggcacggggcgggcagcggcgccgggcacaggagggaagagcaaggggacccccaaaagacaagggcaa

SEQ ID NO: 174333 - RNA, 38 nt, Homo sapiens
agagagggggaggagcgggcagagccgccggcccaggc

SEQ ID NO: 174334 - RNA, 75 nt, Homo sapiens
cccaccaggcccaccacggagagcaccgggcgggcgaaacgacccggcgcggggaggccacacggacggagccga

SEQ ID NO: 174335 - RNA, 86 nt, Homo sapiens
gaccgcagcacacagcaaccaaaagagcccacagaggagcaagaggggggggcccccccgaagaaaggaaccggggagcggcgaaa

SEQ ID NO: 174336 - RNA, 72 nt, Homo sapiens
ggaggagacggaggagaccgacggagagcccccgcaccaccagcccgcaaaacgagaaaggcccagacaaga

SEQ ID NO: 174337 - RNA, 71 nt, Homo sapiens
acacaagccacagaccgaaggacccccacaagaagagagcacagacgcccagaggcgcgcaagaaacacgc

SEQ ID NO: 174338 - RNA, 74 nt, Homo sapiens
acagggcgaccgcggaggcagacgggcggaggagaaagcggcggggagcggagcgcgggccggacacaagaggg

SEQ ID NO: 174339 - RNA, 63 nt, Homo sapiens
agaccaccaaaacaaagccacaagacacgcgaaaggagcgccacgcagagccccgccaggaag

SEQ ID NO: 174340 - RNA, 73 nt, Homo sapiens
cccccaccggcccgcgcagccgccagaacaccaggccgagccggaaggggggcgacgcggaaggcacaacacg

SEQ ID NO: 174341 - RNA, 93 nt, Homo sapiens
gcccgcagaggggagcacaaggagaaaagaaagcggccacgaacaggcaaaccacagaggccgaaaggacaagaggcagacacacacccccga

SEQ ID NO: 174342 - RNA, 78 nt, Homo sapiens
ggcgcagaagaaacccgcggcgaccacagccaaagcgggcggacgcaacaaagcagccagagaaccaggccccaacca

SEQ ID NO: 174343 - RNA, 58 nt, Homo sapiens
aggcgcccgcagggccaggacgcaagaccccagcgagacagcccggagaccacgacca

SEQ ID NO: 174344 - RNA, 71 nt, Homo sapiens
ccgagcccaagcggaaagcacgcgcacagaggagaccccaccagaaccaaggaggaagaggaagagacgac

SEQ ID NO: 174345 - RNA, 88 nt, Homo sapiens
accggagagaggccgcgccgggcagagaagagccacgaacccccgaacaaggagccgacgggccagcacaacggccgcgagcagccaa

SEQ ID NO: 174346 - RNA, 67 nt, Homo sapiens
cgccgacaagaagccccaagagacaccaaagaggggaaccccggaaccagaggcacccaccaccccc

SEQ ID NO: 174347 - RNA, 81 nt, Homo sapiens
cccccggccggagagcagcggcggcggcggcaccccgggcgcgggcggagaacggaaaagcaccaggaagcagagaggacc

SEQ ID NO: 174348 - RNA, 75 nt, Homo sapiens
ggcagcacagcgcaggccgcgagcccggaggagaggacgaggggacccaagggccagaagcgagcaccaccccag

SEQ ID NO: 174349 - RNA, 71 nt, Homo sapiens
aacggagcgcgaggcgggcgcggagaagcgcggaggaaggaggggacagagcagaaacagccaagagaggg

SEQ ID NO: 174350 - RNA, 89 nt, Homo sapiens
gcagggagaagggggcggcgggcggcgggcggcaaaggagcagccagagggccgggcccagcaccgaccaacccccacgaggaagaaag

SEQ ID NO: 174351 - RNA, 76 nt, Homo sapiens
aaccacagggacagacacgacaaagggaagaggagcggaaaaacaagcaaaagaaaaacagggaaagaggagaaag

SEQ ID NO: 174352 - RNA, 53 nt, Homo sapiens
cgacaggaggagacaggcgagagaggaggacacgaccggcgaacaagaggcgc

SEQ ID NO: 174353 - RNA, 56 nt, Homo sapiens
agcccgagaagaccggcggccaacacagccacggacagcgagacgacgggaccgaa

SEQ ID NO: 174354 - RNA, 66 nt, Homo sapiens
cagcaggcaaggagaaaagcaaggcaagaggagcgagggaggccagcagacaacagccccaacgga

SEQ ID NO: 174355 - RNA, 75 nt, Homo sapiens
ggccagaacgcggcacaagccgggcggggcaaggagcggcggcgcggcaaaacgcgcgaaaaaacccggaaaacg

SEQ ID NO: 174356 - RNA, 72 nt, Homo sapiens
gggaagccgggccggccgcgcgacgggggacagaacggcaccgacgagacggagacaagcagaccggaagac

SEQ ID NO: 174357 - RNA, 60 nt, Homo sapiens
agacagcggaagaagacccagggaaacccccagaccaagacacccaggagaaagacagcg

SEQ ID NO: 174358 - RNA, 53 nt, Homo sapiens
agcaagggaacaacaacaggacgccacaggaacggccgagcgaccaggagagg

SEQ ID NO: 174359 - RNA, 77 nt, Homo sapiens
aaagacgagagccccacacacagccacacagaaccacgaagcgcccgagacgccaccacgcgggggagcagagagcc

SEQ ID NO: 174360 - RNA, 70 nt, Homo sapiens
aaaagaaaggaccccaggcggacaagaaccgcaagagcgaggacccagcacacaccacacaccacggcca

SEQ ID NO: 174361 - RNA, 53 nt, Homo sapiens
cagaccccagaaacgggcaagcgcgcaaacccagaaagggaaggggaacagga

SEQ ID NO: 174362 - RNA, 56 nt, Homo sapiens
ccgaaccacaccacagggacgaaggagggacaggcaagaaggaagaaggcagaggc

SEQ ID NO: 174363 - RNA, 71 nt, Homo sapiens
ggaaggagaagaagcagcaggacagagacaaacccgagagcaaaacaaccagccggaaccggacagcacaa

SEQ ID NO: 174364 - RNA, 106 nt, Homo sapiens
ggcgcccccccgaagacgggcccagccggggccgacgccggggcaggggaccccgaagcaggaggcccaaggaacagcacagcagcgacacacggaccggagcagc

SEQ ID NO: 174365 - RNA, 80 nt, Homo sapiens
ccgaccggccgcgacagcgaacagcgcggccgcagcccgacggagcagcagcgccgggaaggaaagcacacaggacagaa

SEQ ID NO: 174366 - RNA, 84 nt, Homo sapiens
acagcccggaacacggcacacgaccagggcccgagggcaggacagcaggcaccggcgaagcacagagaggcgcgaggcaaaaca

SEQ ID NO: 174367 - RNA, 70 nt, Homo sapiens
caaaaaggggggcaggcacagaaaagggggacgaggaaccgcccagaccagaaggacggagaacgccaaa

SEQ ID NO: 174368 - RNA, 52 nt, Homo sapiens
gccagcgccggaaaccaacaaggacaaggcccaggaggccaccagcacggcc

SEQ ID NO: 174369 - RNA, 68 nt, Homo sapiens
ccacaacaccaggcgccaggaagggcgcgcaggaacaagaagaagggcaaccacagagccaagaaaaa

SEQ ID NO: 174370 - RNA, 66 nt, Homo sapiens
cggaaccggcgcagagagaaggagaagaaacggaacagcccccagaagggcgaagcgcagcacagg

SEQ ID NO: 174371 - RNA, 80 nt, Homo sapiens
gagggaacagcgagaaacgagaagcgcagaaccaacgaggggccgaaccccaggaacaaggaagagccagggacggagag

SEQ ID NO: 174372 - RNA, 84 nt, Homo sapiens
gggagaggcggccagaagaaaacgaggggcggaacacccgccaaagcagagaaaagcagaaccagagaccacagaagaaggaag

SEQ ID NO: 174373 - RNA, 82 nt, Homo sapiens
ccgccagccccgcggcgcccgggcccgggcggcggcccaccgcccacggaagccaaggcgcgagaaggcaccggggcaaacg

SEQ ID NO: 174374 - RNA, 66 nt, Homo sapiens
caggaaaaagacagcccgcagcacgaccagcaggaacgggcacgcggaccacccacccaaagagca

SEQ ID NO: 174375 - RNA, 82 nt, Homo sapiens
gacgacgcggccgggcccggcaccgccgcggacggccggaaaagcggccaggaccaccaggcggccacgggcccccagcacc

SEQ ID NO: 174376 - RNA, 54 nt, Homo sapiens
ggggggcccaggcagaccgaggggggcacgagggagaggccgagaagaaacagg

SEQ ID NO: 174377 - RNA, 64 nt, Homo sapiens
gccccaccccaccgaagcaggagcgaagagacgccgaaagcgagaagaaagagcagagaaggag

SEQ ID NO: 174378 - RNA, 67 nt, Homo sapiens
cgaagcgcgaaaaccagcaaggcaaacagaaggaaggcgccgagcacagaaacgaaaacaaaacccc

SEQ ID NO: 174379 - RNA, 55 nt, Homo sapiens
aaaaaacccagcggaaagcaacaaaagaagagcccaaacaaggagcacccagacg

SEQ ID NO: 174380 - RNA, 63 nt, Homo sapiens
cgccgggacgcaccgcaccgagggcgagcccagacagggagcgcagaaacggagaaagaggaa

SEQ ID NO: 174381 - RNA, 54 nt, Homo sapiens
cgaaagagaccagaggaacacagccgagcgcaagccccggggcagagacacagg

SEQ ID NO: 174382 - RNA, 78 nt, Homo sapiens
gaaaaaccggagacgccaaaaaggacagagcgggagccaccagcgccaaagggaagccaggagcccgggggcacgggg

SEQ ID NO: 174383 - RNA, 76 nt, Homo sapiens
cacccagccagcggaagaagaagaacaccaaccaaaaagaaagacgaaaaagaccgcaaaaaccacagaggaacgc

SEQ ID NO: 174384 - RNA, 76 nt, Homo sapiens
gggaagaggcgaaggccagagcacgagcacgggaaggggaaaaagaaaagggcgaagacccgaagcagcgcaggaa

SEQ ID NO: 174385 - RNA, 82 nt, Homo sapiens
gacggacaagagcgcggaacaggacgccccgaggccccgcggacgccgggccgcgggagagccgggaggagacgcgacggag

SEQ ID NO: 174386 - RNA, 77 nt, Homo sapiens
cggacccaaagagaagccaacagggcaagaaccgacaagccaccggcggaaagcgcagggaacaaagagcagaagac

SEQ ID NO: 174387 - RNA, 74 nt, Homo sapiens
gaccggacgcccagacgggaggccccccagacgggaagaggagaagcggacagcgacaccgaaagagaggagcc

SEQ ID NO: 174388 - RNA, 91 nt, Homo sapiens
cggggagagaagcggacccgccgagccccggccccaagaacgccgccgccccggagccgccgggcacagggaccgaagcccagcaacaccg

SEQ ID NO: 174389 - RNA, 72 nt, Homo sapiens
cacacacgaggacggccgggccgggcccaaaggcgcccagcaacaaccgggggagggcgacgcgaccagaac

SEQ ID NO: 174390 - RNA, 78 nt, Homo sapiens
agagcgagggcagcaccgcgcaccaccgcccggcggggcagccgggcggcgcgccgacaccacccggaccgccgcgcc

SEQ ID NO: 174391 - RNA, 70 nt, Homo sapiens
agaaaaaggaaaacgcggaaaaccgacacaacagaaagaagagggaggggacggacaccgaaggcgaagc

SEQ ID NO: 174392 - RNA, 59 nt, Homo sapiens
gcgagccaggccaagagacggcacgacccccccgaggcgcccagaggcccaccggcggg

SEQ ID NO: 174393 - RNA, 77 nt, Homo sapiens
ggaaagaagcaccggagagacagcacagcacccacaaagcaacgcccgcagccgccgagagagagagaagacccccc

SEQ ID NO: 174394 - RNA, 88 nt, Homo sapiens
cggcggcagaccccacccggcaacacacccccgccagaccccgagcggcggcgacggcggcaagggaggggacgcgcgaggaagcgcg

SEQ ID NO: 174395 - RNA, 57 nt, Homo sapiens
cagcaccgggcagcgagacgaaaaacggcggagaacggaaaagcaccaggaagcaga

SEQ ID NO: 174396 - RNA, 82 nt, Homo sapiens
gcgccgcggggcgcgggccggccccgcggggagcgcccccggcgcgagccccaggaaagagccgcgaagcagccacggaccc

SEQ ID NO: 174397 - RNA, 79 nt, Homo sapiens
cggccgccccggagggagacgcgcgccgaggagaacccagcgggccagcgcgcgggaggaaaaagaggacgacaaagcc

SEQ ID NO: 174398 - RNA, 76 nt, Homo sapiens
gcaagggggccgaagcaaccaggaaaacaggaaaagccaaccgggagaggacacagagcgaaacaggggcacaaac

SEQ ID NO: 174399 - RNA, 63 nt, Homo sapiens
ggaaccgaagagccaaagcgcgacacgaagacacagaggaaagagcacgaaacccccaggcac

SEQ ID NO: 174400 - RNA, 39 nt, Homo sapiens
caacaaaagagccacccaagagagaaaaggaacagccga

SEQ ID NO: 174401 - RNA, 88 nt, Homo sapiens
cgggagaagcagggaaggaggccgagccgggaccaggcccgggggcggcggccacgccaaggacggagaccacagcagacacagagac

SEQ ID NO: 174402 - RNA, 55 nt, Homo sapiens
gcacccggcgcaaagaaaggaccgcgcagacgcgcaggacggagcggggccaggc

SEQ ID NO: 174403 - RNA, 72 nt, Homo sapiens
gcgccaccggcacaccgaggacaagggaaacaaccagacgccgcagaagaacaaaagcggaaaaaggacgag

SEQ ID NO: 174404 - RNA, 70 nt, Homo sapiens
caacgaggaaccaaagggagaggaaagaggggcaggagaagccaagagggggagggcagagagagcaaaa

SEQ ID NO: 174405 - RNA, 75 nt, Homo sapiens
acacaaaagaccccccacacgacagagacaaaaggccccaccgcagcggcggacgagcaggacaggccgcaaagg

SEQ ID NO: 174406 - RNA, 74 nt, Homo sapiens
ggaccaagaaccaggccacggggcgccggccacgaggggcggaagaccaggcaggacagccacccggaggagaa

SEQ ID NO: 174407 - RNA, 83 nt, Homo sapiens
gcgaacaaggagaaagccacaacagggcggcaacaggggcgagaaaggcggcccggaccccgcccgcgcagcaagcggccgcc

SEQ ID NO: 174408 - RNA, 82 nt, Homo sapiens
ggcgacaccgagaagaaccggagaagaagaccacacggggagaggcaaggccggaggggaaagaaccagacgacaggaaggc

SEQ ID NO: 174409 - RNA, 73 nt, Homo sapiens
acgccaacaagacggaagcagggcggagaacggaaaagcaccaggaagcagagaggaccgcagaagggaagga

SEQ ID NO: 174410 - RNA, 74 nt, Homo sapiens
ggggccacccacggcccccaagacagcccccggcgccaaaaaaggagaaaaccggaagagaaaggccgggaagc

SEQ ID NO: 174411 - RNA, 75 nt, Homo sapiens
ccacccaaggagaaggcagcgccgacacccgacggccacgaacccgagggccaggccagacaaacaaacgcgagc

SEQ ID NO: 174412 - RNA, 81 nt, Homo sapiens
gcggcagcaacagcgagaccggggcgaggaccccgagccagcagagaccgggaggcagcaacccagaggccaccgccaagc

SEQ ID NO: 174413 - RNA, 72 nt, Homo sapiens
ccacccagaagagcgggccgcccagggggcccccaaagggaagccaaacacaaaggaagaagcccggagacg

SEQ ID NO: 174414 - RNA, 67 nt, Homo sapiens
gaaaacaccagaacgaaaaggacccaacagaggagaaaaagaaggagagaagcaagcacgcccggag

SEQ ID NO: 174415 - RNA, 73 nt, Homo sapiens
agaagaaggcaacaagcaaggaagacgaccagagaggaacccgggccacggagcaaggcgaagacagcaggac

SEQ ID NO: 174416 - RNA, 72 nt, Homo sapiens
cggggagcccgcggcgcgccgccggaggccgaaaggcgccagccaagaacacaccaagccagcaagaacaac

SEQ ID NO: 174417 - RNA, 104 nt, Homo sapiens
gggagacgcagaagaaggccacagagagccagccccaaccgaacccagacgcagaacgaagacgagcgacaggcgacgaggaagcgggccagcggaagaacgag

SEQ ID NO: 174418 - RNA, 73 nt, Homo sapiens
cccggcgccaccaccgacgagcgaagagcaaggaggaagaagaagccagaacacaaaccaggacaggcaagac

SEQ ID NO: 174419 - RNA, 57 nt, Homo sapiens
acgaaaccaccgggaagcgccggggaacgcagcaaaggagagccagagcgaacccaa

SEQ ID NO: 174420 - RNA, 80 nt, Homo sapiens
gcgaagggggaccgaaaggaggaaagggaacccaccggcacaaccgcacgcaagcgacagcgggccagaagagggaacgg

SEQ ID NO: 174421 - RNA, 53 nt, Homo sapiens
gggcccagacgcacccgcacggcggcacggagcgaaccccaagcccgacgggg

SEQ ID NO: 174422 - RNA, 80 nt, Homo sapiens
cccgcaccaggaggaggacgacagcacgaccgaggaagccgacaggaccgggggcacggaggggaagcacccagaacccc

SEQ ID NO: 174423 - RNA, 71 nt, Homo sapiens
ccgccccccgcgccggcgcagcgggaggccaccgccccaccagcaggcaacgccacagaccgccagcgcca

SEQ ID NO: 174424 - RNA, 77 nt, Homo sapiens
ggacacacaggacaaacacacaggggaagcagcgcgcagagacaaccgcagcaccggcagcaacagcgcaccggacg

SEQ ID NO: 174425 - RNA, 74 nt, Homo sapiens
gccggggcacgacgacccaacagcaagcagaccgaaaagggcggaaaaggaccaaggcccgcaaaagggcgcga

SEQ ID NO: 174426 - RNA, 69 nt, Homo sapiens
acgcagggcgcccccggggagcagggcagggcggaacgaagaacgcaggagcaaagaccagacccacag

SEQ ID NO: 174427 - RNA, 83 nt, Homo sapiens
gagcgcgcccgccgcagcggagcgagcaaaggcggaggagaaggagcgaaagcgcgagcccgcccccccagaagaacggagac

SEQ ID NO: 174428 - RNA, 74 nt, Homo sapiens
gggcccgcagagggaaaagaacgggagaaacagggagaggcgaaggccgcaccggcgcagcgcccgccacccga

SEQ ID NO: 174429 - RNA, 69 nt, Homo sapiens
acagacccggaagacagaggcacaaaaggagaaagcagaagaaacaggagaaagcaaaaaagagaacag

SEQ ID NO: 174430 - RNA, 35 nt, Homo sapiens
cagccaggcggcgggccagcaagagcaggaaagca

SEQ ID NO: 174431 - RNA, 64 nt, Homo sapiens
cgccaaacccaccagcagggacaaggaagggagcaaacgggagagcagagggcaaaagaaaaga

SEQ ID NO: 174432 - RNA, 55 nt, Homo sapiens
ccaaagcaccaccccaaacaaggaaggcgggggcggagggcaagacgacgacagg

SEQ ID NO: 174433 - RNA, 80 nt, Homo sapiens
agagcgaaccccgggacacgcaggaacggcccagcacaagaccgcgacagggagacaggaaccaaaaagcaacagaagaa

SEQ ID NO: 174434 - RNA, 77 nt, Homo sapiens
aacggacaagaaaagaagcagcgggccacacaaagcaaccggaggacagcgaacagacaaacagcaggaagccaaca

SEQ ID NO: 174435 - RNA, 79 nt, Homo sapiens
gaaagaggcggcgccgcaaaaaagaagcaaaagcaagaaggagcagaggcaacaggccgagcccgcacaccgggggaac

SEQ ID NO: 174436 - RNA, 56 nt, Homo sapiens
aaaagaaaaccccggcgagcaagagggcggagaacggaaaagcaccaggaagcaga

SEQ ID NO: 174437 - RNA, 50 nt, Homo sapiens
cagagagggccgggagcgcgcagccagccgggccccgaggaccgagacag

SEQ ID NO: 174438 - RNA, 79 nt, Homo sapiens
ccccggaggcgccggcggggcgccgcggaccaacagcccagggcggagaacggaaaagcaccaggaagcagagaggacc

SEQ ID NO: 174439 - RNA, 88 nt, Homo sapiens
cgcagaggcagcagcagccgcggagcagagccgccggggagggagccagaagcaacgagaggcgaggggacggcggggagcgcaggac

SEQ ID NO: 174440 - RNA, 54 nt, Homo sapiens
gagggcccagaacgacgaaggggacacacgggccacagacccaaagaaagggaa

SEQ ID NO: 174441 - RNA, 66 nt, Homo sapiens
aacccaagaaagaacaacagaagagagccaacaccacaacgggcagcaaagcaaacgccagaagga

SEQ ID NO: 174442 - RNA, 78 nt, Homo sapiens
aagggcacacgccacgggcgccaacacagggaagagcacaggagaggacaaaagcaccagccacggggagcacaccaa

SEQ ID NO: 174443 - RNA, 82 nt, Homo sapiens
gcgccgagggaccaggccgacccgcggagacagacaagacaagaccggcggggaagcggccaccagccaggagcccaaggga

SEQ ID NO: 174444 - RNA, 80 nt, Homo sapiens
gggaccggcagaaacaccagaaaagacaagccccagcagagaccagagaagccccccaccagccccaacagcaacaacag

SEQ ID NO: 174445 - RNA, 75 nt, Homo sapiens
aagggcaaaggcacgaacaaaggcgacccagacaacgagcccagaggacagaaccccagcccagagccaacaccc

SEQ ID NO: 174446 - RNA, 87 nt, Homo sapiens
gacccggacccggaagagaagagggggcaagaaagggcggagaacggaaaagcaccaggaagcagagaggaccgcagaagggaagga

SEQ ID NO: 174447 - RNA, 53 nt, Homo sapiens
cggaaccacacacaccacaggaagccaaaacagcagacaaggagccgccaccc

SEQ ID NO: 174448 - RNA, 92 nt, Homo sapiens
cgccggcccccaggcgaagaagcgcagccgcaccggccaaggaaaggccgcgacaccgggaaagagaagagaaaaacaggacaggacccgaa

SEQ ID NO: 174449 - RNA, 76 nt, Homo sapiens
gccgaacggccgaagaaagaagcagccaccagccaaggacagagggcaagagagacccagccaaggcgggacaacc

SEQ ID NO: 174450 - RNA, 77 nt, Homo sapiens
cggcaaaaggcggaccgcccccgccaacgaagaccgagaccagagcaaccgagggacgagacaagccgcggacaaca

SEQ ID NO: 174451 - RNA, 80 nt, Homo sapiens
agaggcgaggaagaggccgaggacggggaagaggacgaggcagaggaaacccgaggaggaagacaaggaacgcccccacg

SEQ ID NO: 174452 - RNA, 83 nt, Homo sapiens
acccggggacggcacccagaggaccaggcggcggggacaacaggagaagcggaaggagaccacccaccaggcgcaggcccagc

SEQ ID NO: 174453 - RNA, 84 nt, Homo sapiens
cgcccgaggagcgcaggggcagcccaggcggccgaacccgcggccggccgagccggagagagcaagcaacaaccacgagagacc

SEQ ID NO: 174454 - RNA, 72 nt, Homo sapiens
aaggaacagaaaccaccaaaaaagccaaagagcgccgcagggccagccacaaggcaagcgcaagcgcacacc

SEQ ID NO: 174455 - RNA, 75 nt, Homo sapiens
cacagagggaaaggaaggcggaaaagcccaaacaggcggacggcgccccccacagaacaccagacaaggacgggg

SEQ ID NO: 174456 - RNA, 74 nt, Homo sapiens
cagaagcgcggcagggagcgcgggggcccgcgcagcagcgaccacggggacgaagggaacccgccgggcggccc

SEQ ID NO: 174457 - RNA, 71 nt, Homo sapiens
gcgcgaaacgcgcccccaggggccaggcgacgagccgggaaagagaaacaaagagaaaggcaaaggcagaa

SEQ ID NO: 174458 - RNA, 51 nt, Homo sapiens
ggaaaaccgacacaacaggcgccaagcccacgggcgcaccaacggagagcc

SEQ ID NO: 174459 - RNA, 72 nt, Homo sapiens
cagaacgagacagcccacagggggagaacaagggacaggaaacagaagagggacaacgcgaaggggcaccgc

SEQ ID NO: 174460 - RNA, 68 nt, Homo sapiens
ccacacccggggccagcccagggaggaaaaaaaaggcaaaccacccgcgagcccaggaggacccacgc

SEQ ID NO: 174461 - RNA, 74 nt, Homo sapiens
gcaccaagaggaggaagacagacaaagaacgaaacaaccggagccagccaaacacccccaccccggagcccccc

SEQ ID NO: 174462 - RNA, 76 nt, Homo sapiens
gaggaccccagacaccggagacgggaaagacggaggagaaccgaaaaaagcagagaaaaggagccaggacgacaca

SEQ ID NO: 174463 - RNA, 75 nt, Homo sapiens
ccccgagagcgggaacagagcagcaagagggacaaaaaaagaccagacacacccaacaccccgacccacaaaaaa

SEQ ID NO: 174464 - RNA, 79 nt, Homo sapiens
gaaagggaccagaggaagagcaagcaccaggacaaaagaagggcagcacaaaggaaagccccaaaccccggaacgggaa

SEQ ID NO: 174465 - RNA, 72 nt, Homo sapiens
gcccgacaggggccaaaccacgggacccgcaggaagcgaggacaggaggaagagacagcgaagaagggagaa

SEQ ID NO: 174466 - RNA, 79 nt, Homo sapiens
cggcgggcacccgacccccgccgggcaaccaaaggaggacgcaaagcgccaggacaagccaggaagagcccagacccga

SEQ ID NO: 174467 - RNA, 65 nt, Homo sapiens
aaccaggggacccccaacccaccggcacgacagggggaggcacaggggcacacgccacagaagca

SEQ ID NO: 174468 - RNA, 79 nt, Homo sapiens
agggcggggcgggacgccccaccggccaggagagacggcaggaccacaggaagcagcgggaaagcgaaaaggaaggaaa

SEQ ID NO: 174469 - RNA, 71 nt, Homo sapiens
caagcagaaagcgggacacacaggagggcaaaacacagaagaagcaggccgcacgaacgcaagaaggaagg

SEQ ID NO: 174470 - RNA, 63 nt, Homo sapiens
acaaaagcgaaggcaaacaccaagccaacgcaaacaaacggaggacaggacaggagacaaggg

SEQ ID NO: 174471 - RNA, 75 nt, Homo sapiens
ggaacgggcgcagcgagagagccaagcgaggggaacgccaagccaggagagaaaggagaggaaccacaggagggg

SEQ ID NO: 174472 - RNA, 68 nt, Homo sapiens
caccacacccgaagcaagaagaaaggacacaccaagggaaacgaagaaggacccgcaccagaacacac

SEQ ID NO: 174473 - RNA, 70 nt, Homo sapiens
aagcacagccacgagccaacacagagagcagaggagcaaggaagaaaggagaaggccaggcggccgggga

SEQ ID NO: 174474 - RNA, 49 nt, Homo sapiens
agaaggccggggcaccacgggcaacacgaggagagagacccgcgaccgg

SEQ ID NO: 174475 - RNA, 82 nt, Homo sapiens
gcagcgaggcgccgccgccgccgccgcagccgccggagccgcaagccaaaggaggggcaaccaagagagcagaccagcgagc

SEQ ID NO: 174476 - RNA, 77 nt, Homo sapiens
ggaggcgggaccggaacaggcacaccccacacaagcacgccaaggagcgagcgagcccgcggaaacgcccgggacac

SEQ ID NO: 174477 - RNA, 81 nt, Homo sapiens
cagaaaccgggaaacaacaggagcccaggcaaaagcagaccggaaaacccaccggcaagaccacacccgaggggagcccag

SEQ ID NO: 174478 - RNA, 86 nt, Homo sapiens
cggagaggagcacgcagggcaggcgcaagacaaggcccgcgggccaagacaaacaccacacaagaccccaggcggggcgaggagcc

SEQ ID NO: 174479 - RNA, 76 nt, Homo sapiens
ccgccagcagccgccggagccagccaacgagcgacaggaagggaaggggcggagacgggcggaacgcaggaggcca

SEQ ID NO: 174480 - RNA, 83 nt, Homo sapiens
gacgaggcgcggacgggcgcggcggggacggcgcccgcgccaccaccggcgaagccacccgaagggccccccaagcccaggga

SEQ ID NO: 174481 - RNA, 70 nt, Homo sapiens
ccggagagaaacacaacaccgaagaacgcccggaaacagaaaacaggaaggaaacagaagcacagagaag

SEQ ID NO: 174482 - RNA, 64 nt, Homo sapiens
ggcgagcagaacacggcgagcggggacaaaaaggaccagaagaaaggcgcacaaaaccagaacg

SEQ ID NO: 174483 - RNA, 74 nt, Homo sapiens
agagaagccaggcagaacagggcccgccacacaggcgccacagcacaggaagagacggggcgccccccaggccc

SEQ ID NO: 174484 - RNA, 74 nt, Homo sapiens
ggacagcgaaaagacagacccaaaccacccagaaacggaagaagggaagaggaaagcacaaagacacccaaccc

SEQ ID NO: 174485 - RNA, 60 nt, Homo sapiens
cgcgaaaccaagcgcggcccagaaggggcaagaagaacagggacgcagacaacgaaaacg

SEQ ID NO: 174486 - RNA, 92 nt, Homo sapiens
caagaagagcagaaggcccaccaagccccccgccaccggccaggacacagggcacaccaggccaggaagaagcaaaggaagacagaaaagac

SEQ ID NO: 174487 - RNA, 82 nt, Homo sapiens
gcgaggaggggccccagcagcccccgaaggcccacaggacaggagagaaagacggggaaaaagaaaagggcgaagacccgaa

SEQ ID NO: 174488 - RNA, 99 nt, Homo sapiens
cggaggccccagggaagcgcagaaagcaggcgaacccgcggcgcaaaacgaccgccagagcggaacgaccccagagcgagcccgcagcagcccagaaac

SEQ ID NO: 174489 - RNA, 69 nt, Homo sapiens
gagggaaagaaacaccggaggacacggaagcagcaggcgcaaaaacgaacccacaaccgaacgacggac

SEQ ID NO: 174490 - RNA, 71 nt, Homo sapiens
cggaaaggagcccgggcgcgggggcggcggcagggggcggagcggggaagaacacggaaaccggacaggga

SEQ ID NO: 174491 - RNA, 104 nt, Homo sapiens
gcccagcgcgagccggcaggccaccgcggccaccgcgcgaaccgccgcaggagcccagggacaggggcagagacgagcccggcgacgagaccggggagggagga

SEQ ID NO: 174492 - RNA, 75 nt, Homo sapiens
cccccccgcccacccgagggagacagacaagggagggccaagaacccggaggaggggaagccgaacccgccagca

SEQ ID NO: 174493 - RNA, 63 nt, Homo sapiens
gacgaagaccacgccggccgcgaccaaggaagcacaacacagaagggaacaagcggacagaaa

SEQ ID NO: 174494 - RNA, 40 nt, Homo sapiens
gcagcacggacaacgggggcacagggcgggcagccccagg

SEQ ID NO: 174495 - RNA, 70 nt, Homo sapiens
agagaagcggcacccccaggaagcgcggacgcgcgcagggcccaggaggcgaccggccaagaagccccca

SEQ ID NO: 174496 - RNA, 80 nt, Homo sapiens
gccccgggaaaccgaagccaagagcacaagaagagcacagaggaagaaaaaaagaacccaagcaggccccgagcccaagc

SEQ ID NO: 174497 - RNA, 72 nt, Homo sapiens
gccgcggacaacggccgcggggccccgagcagccccagcccacgcacgggggcggacggaaagagaacaacc

SEQ ID NO: 174498 - RNA, 73 nt, Homo sapiens
gacacggggcggggaagcgggaacggaagaggaggcaacagaggggcaagaaggaggagaaacaggaaacaag

SEQ ID NO: 174499 - RNA, 73 nt, Homo sapiens
agacaaccgcccagccagaaaaccccacaggagacaggaccgaagcaaaggagcgaccgaaccgggcccgcgg

SEQ ID NO: 174500 - RNA, 88 nt, Homo sapiens
aggagagcccccgggacgccagcgacgccacacaccacgcccgccgaacagggcaggcaacgaggagcggcagcggcacggcagcgag

SEQ ID NO: 174501 - RNA, 87 nt, Homo sapiens
cgggagccgcgcagagcgccgcccgcgaccagccgcgccgacccggaaaaggccggcaaggacccaggagaaggaccagacgacagg

SEQ ID NO: 174502 - RNA, 77 nt, Homo sapiens
cccccgaggagcgggacacagcggacaccccagcaccgggcagcccaacccacccgcggacgagacgggagaccacc

SEQ ID NO: 174503 - RNA, 80 nt, Homo sapiens
ggccgaccgcggacggcccacgggggccccacccccagggcccccgagaagaagagggcacaaggccaaacacagcagag

SEQ ID NO: 174504 - RNA, 72 nt, Homo sapiens
cccaagaaacgccaaaaggcagaacaagaaagcaacaaccacagagaacaagacaagcgaaacgaagaccag

SEQ ID NO: 174505 - RNA, 66 nt, Homo sapiens
cgaagaaaacccgccacgaagaacgccaggagagaacaaggagcaggccaacggccagaagaacga

SEQ ID NO: 174506 - RNA, 72 nt, Homo sapiens
gcggccgcgcacccccggccggaggcaccagcgacgagcagggggaggaacaaagcgaggaagggaagggaa

SEQ ID NO: 174507 - RNA, 74 nt, Homo sapiens
acacacaggcccgaaccggcaacaaccccaagcagacgccaggcggccaacagccacggaagagcgaaggaacg

SEQ ID NO: 174508 - RNA, 83 nt, Homo sapiens
cgaagagccggacccggaacagcaagaacgcaccgaaccagacgcggagcaccgccacagcagaaagaccgaagacagacgaa

SEQ ID NO: 174509 - RNA, 74 nt, Homo sapiens
gggaaagaacccgaagacaaaaacccaacagaaagcaaagacaacgaaggaacacacaaaaacccaagagcaca

SEQ ID NO: 174510 - RNA, 81 nt, Homo sapiens
gaccggcgggccggaagacggcagcggccccggagacacaccgccgcggcgagccgcacagggcaacacacgcaccgcacg

SEQ ID NO: 174511 - RNA, 77 nt, Homo sapiens
ggagggcaagcggacaaggccgaccagggggacaggacggaccaccacagcccagcaaggcagagcaggagccaccc

SEQ ID NO: 174512 - RNA, 76 nt, Homo sapiens
gagggacgggaccggaaaaaagccgggggccacaagaaagaccacaggaccacggacaaaagaacacgcaaaacag

SEQ ID NO: 174513 - RNA, 36 nt, Homo sapiens
gacacaaaggcaaccaccgggccaggcaagcacaaa

SEQ ID NO: 174514 - RNA, 60 nt, Homo sapiens
aaagggacacagcgacgacgggaaaggcagcacaccgcgcccacaggacgaaaccgggcg

SEQ ID NO: 174515 - RNA, 78 nt, Homo sapiens
agcacaacaacagcaacggaggcgggaccggaacaggcacaccccacacaagcacgccaagaagcggaaagaaacacc

SEQ ID NO: 174516 - RNA, 100 nt, Homo sapiens
ccgggaccacggaccaaaggccgggcgcagaacccccagaccacagggagaaccgccagcgacgggaaggcaggacccacgcacgagcaacgagaagaga

SEQ ID NO: 174517 - RNA, 73 nt, Homo sapiens
cggccacaaaaccagagcggagacacccaggaggcagaagccaacggagcaaagagacaggggcagaaaacaa

SEQ ID NO: 174518 - RNA, 79 nt, Homo sapiens
gcggagccaggccaggacggaggcccccccggcagaggccccggaccgccaagggccaacgggccaacgccggcagggg

SEQ ID NO: 174519 - RNA, 85 nt, Homo sapiens
gggcgccacaccggcacgcacggccggcggcccaccccgcagccccacacgcacgggccaagccgcggcccaggagcccgccggc

SEQ ID NO: 174520 - RNA, 58 nt, Homo sapiens
ggccagagcccaaaggcccagaccaacgggccacagcagaagggggaacaaacaaaag

SEQ ID NO: 174521 - RNA, 72 nt, Homo sapiens
gaggggacccaacgcaagaaccaccaaaaaggcccccagagcagacacaaccgagaagaggcccgacaagac

SEQ ID NO: 174522 - RNA, 35 nt, Homo sapiens
aagcacagaacggagggagaagaacccagaaaaaa

SEQ ID NO: 174523 - RNA, 74 nt, Homo sapiens
aaccaaagacgggaacaagggagggggacagaccaaagagggaagacagcgcggacgcacagcagagaacaccc

SEQ ID NO: 174524 - RNA, 82 nt, Homo sapiens
caaccggagggccgggacccgcagccacggaccgcccaaccgcgacgccgaggcgccggccgcagcagaccgcacagcgccg

SEQ ID NO: 174525 - RNA, 74 nt, Homo sapiens
aaaagcgagaagagagaagcacacacgaagccagaaaaacggcgaagacgacgcaccggagaggagaaacgaaa

SEQ ID NO: 174526 - RNA, 75 nt, Homo sapiens
cgaaacaggccggggcacagcacagcgccggcgcaagacacccgacacacaagccacagcaaaagacaccagcac

SEQ ID NO: 174527 - RNA, 79 nt, Homo sapiens
agcagggcggggcccccagagaccgccagcaggcaggcccgagcacgcgcgggagcagcagcaggagcagggaaaaggc

SEQ ID NO: 174528 - RNA, 56 nt, Homo sapiens
gagaacaccccacagggaagaggaaagagccgcagacgcacagcaaccaccggacc

SEQ ID NO: 174529 - RNA, 82 nt, Homo sapiens
agagaccgacgggagaggcggccagaagaaaacgaggggcggaacacccgccaaagcagagaaaaaacggccgagcgaccag

SEQ ID NO: 174530 - RNA, 67 nt, Homo sapiens
cgagagagacgagacaacaggacccagaagccaagagggcagaaaggacaggaagccaaacaggccc

SEQ ID NO: 174531 - RNA, 87 nt, Homo sapiens
ggaggaagaaaagggaggagacaggacccaacgacaaaagggcccaagggagcagacaggagaaaacgacaaagggaaaagaagaac

SEQ ID NO: 174532 - RNA, 44 nt, Homo sapiens
agccaagcaaacagaagcgcggccaaggcccaagggccagcgcg

SEQ ID NO: 174533 - RNA, 68 nt, Homo sapiens
ggcagagaaaaaagagcagcgaggcgaaagcaaccacagcaaggaggcggaaaaaacaaagagagggg

SEQ ID NO: 174534 - RNA, 70 nt, Homo sapiens
aaaaacaagaaggaaaaacgccacgcaccggagagagcacaggacacgaagcgaccccaacaggaagccg

SEQ ID NO: 174535 - RNA, 52 nt, Homo sapiens
cccggcaagaccgaaggcgccggccaaaagaggaagcgcaggcgcagcaacg

SEQ ID NO: 174536 - RNA, 53 nt, Homo sapiens
gcccggcgccggccgagaaggcagaggcggccccgccgaaagcccaaggagcc

SEQ ID NO: 174537 - RNA, 74 nt, Homo sapiens
gacgggcccaagcaaaacagacacccaccagagaaagagcacgaggcgagcggggagacccgagagaccaaggg

SEQ ID NO: 174538 - RNA, 76 nt, Homo sapiens
aacagaagacaacagagaaggccaggcagggaggagaaacacagaagcagggaaagaacaagccaacgccaacgcg

SEQ ID NO: 174539 - RNA, 82 nt, Homo sapiens
agcggaggggaggagcggacaggaggaggccaggcgaagaggagccggaaaccaagggcagaaggcggcagggagcacgcac

SEQ ID NO: 174540 - RNA, 82 nt, Homo sapiens
cccccgggggcccgacgcacacgggggcggacaccacaagaagggcgccagaaacggcgaggaaagagaggagccccggaaa

SEQ ID NO: 174541 - RNA, 67 nt, Homo sapiens
cacgccaccggacgcaggcagcgggccggcaacagcggagaagaccaggcagggacagcagacgcaa

SEQ ID NO: 174542 - RNA, 84 nt, Homo sapiens
agggccgagagccgcggggagaaggccacacccaggcagcaagggcaccgcgagcaagcaggccacacccaagaccaggccagg

SEQ ID NO: 174543 - RNA, 78 nt, Homo sapiens
ggggacaacccagagagaacgcgaggagcggcacgggagcgaagagagagaaacgaaaaagaggaaggagcgagggag

SEQ ID NO: 174544 - RNA, 73 nt, Homo sapiens
ggagccagcaaaaacacaaacgagggagcaaggacaccaccagggagccaggagaggaccaagaaaacgggga

SEQ ID NO: 174545 - RNA, 74 nt, Homo sapiens
ccccccccaacaggcggcccaggagaacacgagacccgcacaaaaccccgccccccaggccacacaggggccga

SEQ ID NO: 174546 - RNA, 84 nt, Homo sapiens
caacccagagaacacaccgcggaacaggaggaggagcggcaacaacgggccagcggaccccagacgaacaccagggggacaagc

SEQ ID NO: 174547 - RNA, 84 nt, Homo sapiens
gggcccgaaaaacggagacggagagggaaagacagggccaaggcaaaagaggagaagagcaggcccagaaaaggcaaaaacggc

SEQ ID NO: 174548 - RNA, 87 nt, Homo sapiens
acggagccagcggcgaggaggggccccagcagcccccgaaggcccacaggacaggagagaaagacggcagggagaacaggagacggc

SEQ ID NO: 174549 - RNA, 59 nt, Homo sapiens
cgacgggccgcgaggggaagaggaagcaaagccaagacagccaagaacgagccaacgcc

SEQ ID NO: 174550 - RNA, 41 nt, Homo sapiens
aagcaacgcgggaagagaaggcgcgggaagggacgccaggg

SEQ ID NO: 174551 - RNA, 79 nt, Homo sapiens
gccccaaaggagacccagcccaaggacaaacagaggagcccaaaaagagagccgcacagccacacgggggagcccgccc

SEQ ID NO: 174552 - RNA, 76 nt, Homo sapiens
cgagacaccgcccgcccgagaacaccaggagacacaaggagacgcagagccccagcggggaggcgcaacacgaggc

SEQ ID NO: 174553 - RNA, 72 nt, Homo sapiens
caagagaagacaggagcaaaacgcacaggaagcaaaggacaacaggcacaaagagagaaggaacacccacag

SEQ ID NO: 174554 - RNA, 63 nt, Homo sapiens
agcagaggaagaacaagaagagaaccgaagcaaggaccaagacacccaggagaaagacagcgg

SEQ ID NO: 174555 - RNA, 74 nt, Homo sapiens
ccaagcccagcccggcgaagagccagagccagcccggaccggaaccccaccagaacagccccaagagccacccc

SEQ ID NO: 174556 - RNA, 76 nt, Homo sapiens
gaccgccgcagaccgcgacgcgccgcacagagcaacgcgccccagcacagggacagggaagggaaacaggagacgg

SEQ ID NO: 174557 - RNA, 88 nt, Homo sapiens
agcccggcggcagcaacagacacgaggaaggcggcggcgccgcaggaccgcagcacccagaggagcgacaaggcggaacagaaaccag

SEQ ID NO: 174558 - RNA, 72 nt, Homo sapiens
gccaggccgcccggcgggaaggaaaaaccacgcgcccggccacgggaggcggacagacgcggggcaccgcac

SEQ ID NO: 174559 - RNA, 72 nt, Homo sapiens
ggacaaggcggcaaagcggggaggccagcgacgccaggaagaaaacgccagaaagcgagcgacggaacacaa

SEQ ID NO: 174560 - RNA, 98 nt, Homo sapiens
gaccggcacggccgcagggaccccagcccagcccaggggcgggggcagaccaacaagagacgagaaaacaacaaaaaaaaaagccccccacaagcggg

SEQ ID NO: 174561 - RNA, 77 nt, Homo sapiens
cacccggccgagacggcggcagcagcggcacaggcaagaacggaagcacgggcggaggaaagcacaagcagagcccc

SEQ ID NO: 174562 - RNA, 58 nt, Homo sapiens
cacaccaccaccaagaaggagggaacaggacaagcgaaccggagcccaaaacagcaag

SEQ ID NO: 174563 - RNA, 77 nt, Homo sapiens
caggcaggaagaacaggaccgggcccaccaccaccaaccaggagacaggccagcgcgcggacaggaaccggacagca

SEQ ID NO: 174564 - RNA, 107 nt, Homo sapiens
caggacaggcgagagcgcaggggaccaaggaggcaaaacgacgacagggccgggaacaacaggagagaaaggcccggacacgacgaacacaaggaaggggaagaaga

SEQ ID NO: 174565 - RNA, 77 nt, Homo sapiens
gggggaagaggcgccccacagacggcgacaaacgggccacaaagcacggaacgaaaacgagggaccacacaaagaca

SEQ ID NO: 174566 - RNA, 86 nt, Homo sapiens
agagcaagacaccggacaccgagggcccccaaaagaaccaagcgccccaggccacacgaagacccaggacccagccaaagccccca

SEQ ID NO: 174567 - RNA, 39 nt, Homo sapiens
cgaaagaccgcaaagggacggcccgccgggaggccccca

SEQ ID NO: 174568 - RNA, 35 nt, Homo sapiens
agacgaccacagaaaggagggagcacgaggcagcc

SEQ ID NO: 174569 - RNA, 82 nt, Homo sapiens
acccgacgagcaacacaaggagccccggcagggcccggcccgccccccacccccggccccagggccgcggaggagagcggca

SEQ ID NO: 174570 - RNA, 71 nt, Homo sapiens
aaaaagggccgggaaacaaaaggcgaaccggggaggcgagagggaagaacaggacgcaggagaagcgaaac

SEQ ID NO: 174571 - RNA, 68 nt, Homo sapiens
aagaaaaggcggcgagccagaccaagcgaagagcgcggagagccaaacgcgaggacgcagagagagcg

SEQ ID NO: 174572 - RNA, 77 nt, Homo sapiens
gagacacaagcacacgaccgggagcgaggagccccgagaagcaagagaagcggaggggcgccaaccaaacaaccaaa

SEQ ID NO: 174573 - RNA, 76 nt, Homo sapiens
gaaaacgcggaaaaccgacacaacaggacagaaagaaggaaaaaacgcaagaaggaagaaagagagaaagcaagga

SEQ ID NO: 174574 - RNA, 75 nt, Homo sapiens
agagcgagcgagggggggcgcgccggaaaccggagcgcgcagcagccaagcaaggcggacaagaccaagcgagca

SEQ ID NO: 174575 - RNA, 77 nt, Homo sapiens
ggcacgagcggagggagaacaagaacgcaggcggccgccacccccgcagagccgggcagacccggaccccgggacca

SEQ ID NO: 174576 - RNA, 58 nt, Homo sapiens
agccgggccaaaggacgaagaacccacagaggggggcgaagaaaaggggaagaaggag

SEQ ID NO: 174577 - RNA, 61 nt, Homo sapiens
aggacaagccagcaccagccagaagccccaccagggggagagcaaggaccgcgacgacagc

SEQ ID NO: 174578 - RNA, 69 nt, Homo sapiens
cagccccaagaagcacagaagcggagacagcacccaggaagaaagccaacaaaggaacgagcagcaacg

SEQ ID NO: 174579 - RNA, 80 nt, Homo sapiens
cgggcaggccggagagagaaggaagaacacccccaccggccaggcgagaaaggcagggaacaccagcggcgagagccgga

SEQ ID NO: 174580 - RNA, 76 nt, Homo sapiens
agcgcacaccccgcagcgagccggggaccgagcgccggccgggcggccacacccgcagcgggaacgcggcccgcaa

SEQ ID NO: 174581 - RNA, 90 nt, Homo sapiens
aggaagaaggggggaggaagaggaggaggaagaagaagggaggggagcacgagggaggggaggaggagccgggacacagccgaagcacaa

SEQ ID NO: 174582 - RNA, 76 nt, Homo sapiens
ggccccagccagcacgcacagagagagaaagccaacccagcgaaggaacaagcaaaccccaagcggcaagagaccg

SEQ ID NO: 174583 - RNA, 71 nt, Homo sapiens
ccgacgccggcagaacacgcgcgggaccccgggcacggcgcgcgggagaagagacacaccccccagaagga

SEQ ID NO: 174584 - RNA, 35 nt, Homo sapiens
gccaccgcacacgggaacaaccaagcggagggcag

SEQ ID NO: 174585 - RNA, 46 nt, Homo sapiens
cgggagcgcggcggggccgcagaggcccgagagagaaagggaaaga

SEQ ID NO: 174586 - RNA, 74 nt, Homo sapiens
gcaaacaaaagcaagcggccgggaaaaaaagaaaaagggaaggagacccgaaacacgaaagcaggaggagacag

SEQ ID NO: 174587 - RNA, 65 nt, Homo sapiens
cagacagcggagaggagcacccagacccaggcccgcaaaacccacgaaaagagacagggcacaag

SEQ ID NO: 174588 - RNA, 79 nt, Homo sapiens
cagagaaagaacaccaaccaaagcgccaaagaaagaaagaaggacagcgggaagccaaagggacaccgaaaagaaaacc

SEQ ID NO: 174589 - RNA, 85 nt, Homo sapiens
gccaaccacaggagggaaaccacgcaggcaaacgagaaaaagccgagaaggccagacggaagaagacggcacgggacccccagca

SEQ ID NO: 174590 - RNA, 82 nt, Homo sapiens
agccaagaaaggagacaccagaaggcagaggaggcgcaagacgcgaccaaagccgacggggcaagaaaaaccgggagaagcg

SEQ ID NO: 174591 - RNA, 79 nt, Homo sapiens
ggccggcgcaccgacggccaacgggggggagcccggcccagccccccaccccccgcccccccgagcgaccagggccggc

SEQ ID NO: 174592 - RNA, 90 nt, Homo sapiens
ccgccacccgcccccaccaggccgaagagaaccacaaggaggagacgcgggggacagccgagccgcgccgggccccggacggcgcgccaa

SEQ ID NO: 174593 - RNA, 73 nt, Homo sapiens
cacagagccgcagagcaaccagcaagaacccaagccagaccgcccgagaaagacaggaagaccgaggcacccc

SEQ ID NO: 174594 - RNA, 71 nt, Homo sapiens
ggccggcccccccccagggccaggcgccgccagaacggaacacgggccagcagcacggggccaccggcccc

SEQ ID NO: 174595 - RNA, 68 nt, Homo sapiens
caccacgcggcccccgcccgccccgccgcccgagccggcgccaaggagaagaggagccggacggcaca

SEQ ID NO: 174596 - RNA, 80 nt, Homo sapiens
gcggagggccgcagggggcgccaggcagcgccagcccggcagaccgaacaagaggcacccaaggacacgacccggaagac

SEQ ID NO: 174597 - RNA, 78 nt, Homo sapiens
agccggggcaccacagagagcgggaaggagggccccggagcagccacaccaccgaggccccacccagcacgagcacag

SEQ ID NO: 174598 - RNA, 59 nt, Homo sapiens
gaaacaccgggcgggccccgggcgagcgggggcgccaaccaaggaaaaggaagcccgga

SEQ ID NO: 174599 - RNA, 73 nt, Homo sapiens
caggaaggccagaagccacgaacaggaagaggacacagcgcgaccaccgccacgcagcggaccggggagagac

SEQ ID NO: 174600 - RNA, 77 nt, Homo sapiens
acacaagcgccagaaaaggagggccaaacaagaaggcccgaagagaccccagcggaggagacccaaacgaggaccag

SEQ ID NO: 174601 - RNA, 86 nt, Homo sapiens
gccagaccacgccaaccacgagccacacccaccgcccgggcaggccacggcggagagggccgggcgcgcaccccgaacccggccgg

SEQ ID NO: 174602 - RNA, 101 nt, Homo sapiens
aaaaccggaagaaggcccaggaaacaggaaaaccggaggagacgaaagaaaccaaaaacaggcgggagagcaggagaggacaggaccgcgggggggagaac

SEQ ID NO: 174603 - RNA, 50 nt, Homo sapiens
acaacagagaccaccagggggaagagacaccggaacgcaagaacggaggg

SEQ ID NO: 174604 - RNA, 72 nt, Homo sapiens
gagccagaccgccaaaccagagaaagaaacacccgaacagcgaggagcagacagaaagcagaaaaagccgac

SEQ ID NO: 174605 - RNA, 55 nt, Homo sapiens
caaaccgggacacgagggcggaagaggcaggggaccccgacggagagacaaagaa

SEQ ID NO: 174606 - RNA, 51 nt, Homo sapiens
gaagaccacaggcaaagcacaacggacacagaccacacgcacaagccccga

SEQ ID NO: 174607 - RNA, 73 nt, Homo sapiens
agaaaaaaaacccagaggagaaggcacaaagcagccaggagggccacaagagggacggaacgggagcagaaaa

SEQ ID NO: 174608 - RNA, 81 nt, Homo sapiens
cggggcagcggagagcgcggaggggaaccccgagccgcaggaccggaggacaggaacgcaagcacaggaccagaaacgaaa

SEQ ID NO: 174609 - RNA, 76 nt, Homo sapiens
caccaccaaccacggccgcaggaccccaaggacggggaggaacagcgaaacaacgagggaaaccacgccgggacgg

SEQ ID NO: 174610 - RNA, 75 nt, Homo sapiens
gaccggcgaggcccaccaagccagacaaagcggccagaagaaaagagaggggcccccgggaacaaaggaagaaac

SEQ ID NO: 174611 - RNA, 66 nt, Homo sapiens
cgggcgggcgagcacaggcacacacacacagcgaacgggcacgacggccagcgaaacagagaacaa

SEQ ID NO: 174612 - RNA, 88 nt, Homo sapiens
ggggccggcgaccaggaaccgggcgagcagcggcgggggcccgagggggacaagcagcagcaggagaggcgcggacaggcagagggca

SEQ ID NO: 174613 - RNA, 72 nt, Homo sapiens
caggagcaccggcccaagaaacaggagagcgaagccgcaccaggcaagccggaaaacagaacggcgagacag

SEQ ID NO: 174614 - RNA, 75 nt, Homo sapiens
ggaaagcacggaaccccagaggcacaacaacaaccaaaaaacaagcagccaacaaacaaggaaggaacagcagca

SEQ ID NO: 174615 - RNA, 41 nt, Homo sapiens
cccccaagagcgggaccacagcgccccgagccggaccgccc

SEQ ID NO: 174616 - RNA, 73 nt, Homo sapiens
cccccccccaccgcgggggcgcagagcgggcaaggagccccgaacaaaaaagaagcgaaggggcagagacaca

SEQ ID NO: 174617 - RNA, 74 nt, Homo sapiens
aggaagccagagcagccccaaaaggagaggacagagaccgaaagcaccggaccagcccgccgagaccgcaaccg

SEQ ID NO: 174618 - RNA, 72 nt, Homo sapiens
gcgcccgagaaggggacggcgggcgagggaggggaccgccgcgggggagaggcaccagcaacagaccaaccg

SEQ ID NO: 174619 - RNA, 77 nt, Homo sapiens
aaagccaaggacgcaggggggcgcagcacaagaacgcgaagaagcgcaaacagggaacacacagccgaaagacgaaa

SEQ ID NO: 174620 - RNA, 69 nt, Homo sapiens
ccaggagcccgagagagaagggaaccagcagcagaagagaaggacggaaaacgcgaccaaccagaggca

SEQ ID NO: 174621 - RNA, 79 nt, Homo sapiens
gagggaaaccagccaagagaggcgccagacagcccagagaagccgcaaaggccagcaagcgccaaacaaaggcagacca

SEQ ID NO: 174622 - RNA, 68 nt, Homo sapiens
agaggaaaaccagagaaacaagaggaggaggggaaacaaccgaaggcagcaagagcagacgacaaaac

SEQ ID NO: 174623 - RNA, 61 nt, Homo sapiens
caaaccccaaccagggacaagccggacgcgggcccgcccggacgagccacgggccaggcac

SEQ ID NO: 174624 - RNA, 52 nt, Homo sapiens
gcaccgaaagagcaccgcacaaaacaacaagggaacggcagaagaaggggaa

SEQ ID NO: 174625 - RNA, 78 nt, Homo sapiens
cgacgcacacgggggcggacaccacaagaagggcgccagagcggggcccggcgcacccaccaccgccgcccacggcag

SEQ ID NO: 174626 - RNA, 36 nt, Homo sapiens
aaaagcacagaagagagggaacgccaggagcgccgg

SEQ ID NO: 174627 - RNA, 81 nt, Homo sapiens
ccccacacggccagcccggaggggacggcccggcaccgcggacggcggccggcacccgggggagcgcccaggacacacccc

SEQ ID NO: 174628 - RNA, 84 nt, Homo sapiens
ggcagggcaccgcgcgaagcggccaaagccgcccagacggccaccggcgggaggaacaaaagggacccgcgaaggggaggcagg

SEQ ID NO: 174629 - RNA, 75 nt, Homo sapiens
gcgcgggggagaacacgacacgccagcacgacaggccgaagcaacagaacagaccaagcacagaagaaacacaga

SEQ ID NO: 174630 - RNA, 60 nt, Homo sapiens
cgagcaggaaccccaggaaacggccagaaaggccccagcagcccagcacaccagggccca

SEQ ID NO: 174631 - RNA, 34 nt, Homo sapiens
agggcaggaaacaaacagaccccgcccgcggcag

SEQ ID NO: 174632 - RNA, 81 nt, Homo sapiens
ggcgcccgcggggcggggaccgccgcccggggcacagagagcgagcacagcgggcaggagggaaaaaggaaaggaaggaga

SEQ ID NO: 174633 - RNA, 77 nt, Homo sapiens
ggaggcggcggggaccgagccggagcgcgggcggagagccgaaagagagcacaggaccgaagaacacgggagggcaa

SEQ ID NO: 174634 - RNA, 81 nt, Homo sapiens
gccgccccagccgcccgcggccgggagcggagccccggggacgaggaaccagaccagaagcacaggaaagacaggacacag

SEQ ID NO: 174635 - RNA, 69 nt, Homo sapiens
ccagaagaagaaaaggaacagaaccggggcgggaccggcacccacagaaggagaacaagcagagcaccg

SEQ ID NO: 174636 - RNA, 81 nt, Homo sapiens
accccaggacagaaacgacccaggaagcgcccgcaaaggggagcaagaagaaagagcagggaggagggagcgacaggaaga

SEQ ID NO: 174637 - RNA, 76 nt, Homo sapiens
gccggccccccacgcgcacacaagggagcccccccaccacccccgagagaacaaccgcaacgaacaaacaggagac

SEQ ID NO: 174638 - RNA, 72 nt, Homo sapiens
cgagccgggacgaccaccaggaccccagcaagcgagacgacgggaccgaaggaccccgccagagacaaccga

SEQ ID NO: 174639 - RNA, 84 nt, Homo sapiens
gggaagcagcggagcagccggaggacgcggagcccaagaaacgggcagccaggcccccacagcccgcagagagacaagcaggag

SEQ ID NO: 174640 - RNA, 58 nt, Homo sapiens
ggaagaaaacgagccaggaacaaagagcaagaaggccagaccgacagaaaacggagca

SEQ ID NO: 174641 - RNA, 76 nt, Homo sapiens
agggaggacaagagcaagaccccggaacccgaagcgggaaagagaaaccccagagaacacacccagggggagccgg

SEQ ID NO: 174642 - RNA, 78 nt, Homo sapiens
gcggaggccggagaggcgggaggaaggaaaccccccaggcaagaggcgcaggaccgggaagaccaacaaacgcaccgc

SEQ ID NO: 174643 - RNA, 76 nt, Homo sapiens
acaaaacacacagaaggccggaagagaaggggaaaagacgcacgcaagagcaggaacgaacaaacaccccagagag

SEQ ID NO: 174644 - RNA, 83 nt, Homo sapiens
cgccgccaccagcccaagagaaagaagacgaccccgacgcaggccaggagccgcggacagaagccgagcacggccgagacaaa

SEQ ID NO: 174645 - RNA, 117 nt, Homo sapiens
agcagcggcagcccgcggcggcgcgcccagggcagggcccaaggaaggacccgccaggcgccccggcaaaacaaaaaaagaaccccggcaaggcccagacggcaaaccaagaccccg

SEQ ID NO: 174646 - RNA, 82 nt, Homo sapiens
cgggaggggaggagagcagagaacgccccaggggcgggccgggacggagcaccaacaagccgccgagccacccacagccagg

SEQ ID NO: 174647 - RNA, 84 nt, Homo sapiens
gaagcgcaccccgacgccgaggaacgagagcgcgaagcaaggagcagaacagaaggcgcacaaaggaaagagaagcaaaaccac

SEQ ID NO: 174648 - RNA, 93 nt, Homo sapiens
cggaaggagcagaacaaacggccaagaagggccaccccacagacggagccaggggggggcgcagccacaaagaagcccgccagccagaaccgg

SEQ ID NO: 174649 - RNA, 80 nt, Homo sapiens
aaaggaaccggccccggaagccgacacacagagacacagccaggccagggcccgggcagcccgcagccaaggaggccgac

SEQ ID NO: 174650 - RNA, 65 nt, Homo sapiens
gggggaagccgcagcggaaagcaggagcacaggaaggggaacagggaagaaaacggggagcccaa

SEQ ID NO: 174651 - RNA, 84 nt, Homo sapiens
gggcggaggagaagcaccgagaggccgagcagcagggaccagccccaagcaagccccgcagggagccggagcaggggccggaag

SEQ ID NO: 174652 - RNA, 87 nt, Homo sapiens
cgaaaccagccccggacgagaagcgcagcaacggcgggggaccacgagagcggagagccagggagagcaccagacgaagagggcagg

SEQ ID NO: 174653 - RNA, 75 nt, Homo sapiens
aaggccgagccaggggaaagaggaagaccacggagcagcgcaggagaaaaaggccacccccaaccaggaccaaag

SEQ ID NO: 174654 - RNA, 77 nt, Homo sapiens
aagcgccccagcacacgggacacaccgcaaaacccgcaagcagaacaccaccccaccgccaccgggaagaaccagcg

SEQ ID NO: 174655 - RNA, 95 nt, Homo sapiens
aagagagcgggcacgcaaaagaaaccaagggcaccgaagagaacggacaaaaccgaggcagagggcaccacagacaagaaagcccccacggaagg

SEQ ID NO: 174656 - RNA, 65 nt, Homo sapiens
gcacgcaggccgggcaggcggcaaccaaacggcgccaaggacaagaagcggaagacccggagaag

SEQ ID NO: 174657 - RNA, 81 nt, Homo sapiens
gagagaacgaagcagagaagagcggaaagaagaccggaaggcaggcaccccgcaacgcccggggccccgcagcccgggcga

SEQ ID NO: 174658 - RNA, 86 nt, Homo sapiens
gacgaggggacacaagacggcgaggagaagacacaaggggcccgcgagcaccgcccagcggggcccggcggcaggcacgagggcca

SEQ ID NO: 174659 - RNA, 79 nt, Homo sapiens
gggccagggacccgcggaaccaccggcgcagcacagcgacgggacagagcagaagggcgaaagaccgggccgcagaaga

SEQ ID NO: 174660 - RNA, 79 nt, Homo sapiens
acagcacaagaagagaaagagacaaagacaaagcccagaaacagagggcacgggaaaagcaaggcgcggcggaaccagg

SEQ ID NO: 174661 - RNA, 74 nt, Homo sapiens
cgcccagacggccaccggcgggaggaacaaaagaaggggaggcccgaacacagaggccggaaaagaagccggcg

SEQ ID NO: 174662 - RNA, 65 nt, Homo sapiens
cacgcaggaaaacagagaaccaagcggcaaagcaccgaacgaccaagaagagaggggggccggca

SEQ ID NO: 174663 - RNA, 72 nt, Homo sapiens
cacagagggggaaagccaaggaaaaacggagagccacaaaaaaggaagcgaaaaggggaagacgccaccgaa

SEQ ID NO: 174664 - RNA, 71 nt, Homo sapiens
agcccacgggaaagcgggaaaaaggaccagcaaaaagagaaagagacgaagaaaaccacacgagccgcaga

SEQ ID NO: 174665 - RNA, 77 nt, Homo sapiens
ccaagaaacagacaaagaagacccaacccggaccacacgaaaaacccccacccgaaggagccaaagcgccaggagca

SEQ ID NO: 174666 - RNA, 74 nt, Homo sapiens
ggagccaccagagggagaagaaacagaacgccccacgaggcggcgccgcgaaagagacagagccccagcaacgg

SEQ ID NO: 174667 - RNA, 85 nt, Homo sapiens
cgggaacgacgccgcgagagccagggagccaaagaccccccacaccggcccacgcccccgacgccaggccgagaacacggggcgg

SEQ ID NO: 174668 - RNA, 76 nt, Homo sapiens
ggaaaagaaaaaccagacaccacaccagacgagagagaccgaggggggcgcacacgcagaaagaacagcgaaaaag

SEQ ID NO: 174669 - RNA, 57 nt, Homo sapiens
cagacagaagagaagggcgagcggaccgcgaagagaggcccacagaaaaagaaaaga

SEQ ID NO: 174670 - RNA, 81 nt, Homo sapiens
agcccgcgagcacaggagcgagagaggaccccggacacgaaagccgggaaaggaacaagacaccaagggaaggaaacacaa

SEQ ID NO: 174671 - RNA, 55 nt, Homo sapiens
accacgggggcaaggcacggggagcgcaggggccaccgcaggccgcgcgcgcggg

SEQ ID NO: 174672 - RNA, 88 nt, Homo sapiens
cccagcacacgcagagaccgaggcaccagaaggcaaggacaagcaggcgcgcaagcccacggagacagaaccagcccccgggccgggg

SEQ ID NO: 174673 - RNA, 36 nt, Homo sapiens
gaggggaacgaccgaaaacgggccgccggcccaggc

SEQ ID NO: 174674 - RNA, 54 nt, Homo sapiens
gacaaaagggccaaagaagggagagaggggaaaggccagacagcgcagcagccg

SEQ ID NO: 174675 - RNA, 78 nt, Homo sapiens
cggccaccgcgacccggccgcgccggcgccgaccccgcgcgccagggagaagacggcccagcagagcacccaaccagc

SEQ ID NO: 174676 - RNA, 66 nt, Homo sapiens
gagcgagaccggagcgccacggccacgccccccgcaacaacccacaagagacaccgaggcccggca

SEQ ID NO: 174677 - RNA, 88 nt, Homo sapiens
cggaggacgcaacacccgaggccaggaacgcccgcggaacggcgcagcagagcaccgaagaaaaaggagcaagaccccccgccaaggc

SEQ ID NO: 174678 - RNA, 60 nt, Homo sapiens
ccccagaagcagcagacggcacacgcagcagaagcccggagcgcagcaggagccgcaaag

SEQ ID NO: 174679 - RNA, 69 nt, Homo sapiens
gccggggcccccaccggaagcagaggcgagccacacgcagcgagggaagcccagcaaggggccggcgcg

SEQ ID NO: 174680 - RNA, 57 nt, Homo sapiens
gagacaccccgcaacccagccgcagaaggccggagccccgggaccgcaccggcaccg

SEQ ID NO: 174681 - RNA, 54 nt, Homo sapiens
cagcaaaaaggacacagacagacggccaaacccaagcgaaaccacggcaggcca

SEQ ID NO: 174682 - RNA, 77 nt, Homo sapiens
aaagcagcgcccgcgccgggcccggaaagcgccgcccagcagccgcaggagacagcggcaacccaagcaggggcaaa

SEQ ID NO: 174683 - RNA, 98 nt, Homo sapiens
ccgcgcgccgcgcacccgcgccagcaccacgcccgcgccgcgccgccgccaccagcccaagagaaaggccgcaggagggaagcgcacggaaaccgccc

SEQ ID NO: 174684 - RNA, 52 nt, Homo sapiens
cggaaaggcccgcggcgaggagcgagcagaggagaaaacgaccgcaaaaaga

SEQ ID NO: 174685 - RNA, 96 nt, Homo sapiens
gagcaaccccccaggacgggcggaggcggggggaccggcgggcgggggccacacgcagggaacgagcgcagaggacaagacccacaaagaccggag

SEQ ID NO: 174686 - RNA, 63 nt, Homo sapiens
ggggacgcgaggagccggcgggcccgggggcccccggagggccacaagccagagcgccccggc

SEQ ID NO: 174687 - RNA, 68 nt, Homo sapiens
cgcaagaggagccaagcaaacagaagcgcggccaagcgggcgagcaagaacaagccggaccaaaagga

SEQ ID NO: 174688 - RNA, 56 nt, Homo sapiens
accagaccgaccaccaaaaagaccagaccgagaggaaacaaaacagagaggagaga

SEQ ID NO: 174689 - RNA, 79 nt, Homo sapiens
ccacccggagaaccccacggagaaccagaggcaccagcaggaggagacagccagaagcaagcggagcgaaggaaccgag

SEQ ID NO: 174690 - RNA, 81 nt, Homo sapiens
caacaaggacaaaccaagaccacaaaagacaagaggacccaccgggggcagggcgcaccacgaaaacaacacagcagggaa

SEQ ID NO: 174691 - RNA, 66 nt, Homo sapiens
gagacaggaaagcccggcccgagagaagaaaagcaaaggacaagaaagcgggagaaaccaccacga

SEQ ID NO: 174692 - RNA, 76 nt, Homo sapiens
agaagggagcaggcagggaggagcaagaggacgcagcccaagcgaacccaccagccccaggaacaaggaaaagcac

SEQ ID NO: 174693 - RNA, 76 nt, Homo sapiens
gagagccccagcaggaaggccaccgagggaacccgaccggacccagccccagaagaacagccaagaacaggaaaac

SEQ ID NO: 174694 - RNA, 69 nt, Homo sapiens
cccgcggggacagggaaaaagagagcgcgcgccgcgcgcccgcacaaacgccggggacaacaacccgaa

SEQ ID NO: 174695 - RNA, 72 nt, Homo sapiens
ggaagcggacaccaaacggagggagacaggcaccggaaaccgcaacaaaaacagccccaaggcacaaaagag

SEQ ID NO: 174696 - RNA, 77 nt, Homo sapiens
ggaagccgagagccagagagaaccagaggcaagccagcacaccgggccgggcccaagaagcacgaagcgggggcagc

SEQ ID NO: 174697 - RNA, 76 nt, Homo sapiens
cagggcgaagacagaggcaggaagaagacgaggcccaacgagagacaacgggccacgccgagccgggcgaacagcg

SEQ ID NO: 174698 - RNA, 77 nt, Homo sapiens
aaccagagccaaccaaaagggagaacagcaacggaaccccggccgggcgaagcggggaccaagcaagcaggaggggc

SEQ ID NO: 174699 - RNA, 87 nt, Homo sapiens
gaagaaagagcagaggaaagaaaagaaacaccgaaccgccacccaggcccaagaagggaccagaccccacaagaaaacacacaacca

SEQ ID NO: 174700 - RNA, 78 nt, Homo sapiens
ggcagccacaccacgggcgccacagggaggagcgcagacacagcagggaccaaagacccaggccccagcgcggcccac

SEQ ID NO: 174701 - RNA, 76 nt, Homo sapiens
acaagaagaaaagacgcccccaagagggacccgccaggcgcacgaagaaaaggaaaagaagacgcacaccaagacc

SEQ ID NO: 174702 - RNA, 61 nt, Homo sapiens
ggaaaggccagaccacagaaggcgcacgcggggaggaagagaagaggcacgcaagaccaga

SEQ ID NO: 174703 - RNA, 68 nt, Homo sapiens
cccaccccagaaggaaggaaaccgagaggaaccggggcaggaagaaagaccagggacacagagagcca

SEQ ID NO: 174704 - RNA, 76 nt, Homo sapiens
cagaccaggggacccgaggaaggcgccgcggcacaccgaggaagaaccaacaccagaggaagacaaaagaagagag

SEQ ID NO: 174705 - RNA, 82 nt, Homo sapiens
acaaggcagaccaaagaccaagcaacggaagggggaccaaggcaaacaaaacaaccaccaaccagagaaaagagaaagcaaa

SEQ ID NO: 174706 - RNA, 54 nt, Homo sapiens
agaggagcagaaggagcaaaaggcggacaggcaggcgcccccgggacacaagga

SEQ ID NO: 174707 - RNA, 81 nt, Homo sapiens
gggcaccggggagccggccggacacggaggaaagaacaaagcaaagaagcaaaagaagaaacgcaggggacccggcagaaa

SEQ ID NO: 174708 - RNA, 62 nt, Homo sapiens
cgcgaaaaaacaggggcagaagaacaaggaagcggagaggcaagaggccacgaacgacggca

SEQ ID NO: 174709 - RNA, 69 nt, Homo sapiens
aacagacaaaagggaaagcagaaccgaagggagcagccaggcccggggccaagagcaacaagaaacgaa

SEQ ID NO: 174710 - RNA, 69 nt, Homo sapiens
cccggaccgcgaggcccgcagccgggacaagggggcagcacgccgaaggagagaccagacaacaggcca

SEQ ID NO: 174711 - RNA, 41 nt, Homo sapiens
cggaccaggaaaccccacccaaacccaccaagggacgaagc

SEQ ID NO: 174712 - RNA, 52 nt, Homo sapiens
gcagcgggacaaccgcaccagcaccagaacagaagaggaacgacagcgccac

SEQ ID NO: 174713 - RNA, 84 nt, Homo sapiens
accgaccggcccgggcgccgcccgcacggcgcggaaaaggaacagaagaggaaccgaaacccaagaaaaaccacccagcaaaga

SEQ ID NO: 174714 - RNA, 71 nt, Homo sapiens
cagacgaacccgcccccgggccgggagcaaccagaggcaagagcccgagggccacaagaacaccgagacga

SEQ ID NO: 174715 - RNA, 62 nt, Homo sapiens
ccagcccagcaccgacagccgacgcgcagaagcagagccaccggggcaccgcgcgccgcgcc

SEQ ID NO: 174716 - RNA, 80 nt, Homo sapiens
agagcgagaccgcggacaacagagagagagggaccagaccccacaagaaaacacacaaccacaggcccaagcaaacacac

SEQ ID NO: 174717 - RNA, 82 nt, Homo sapiens
gccccgcgccgcggggccaccggcgcccccgccccgggaccgcggggagggcccgcgagaggcgagcacacagagaggggaa

SEQ ID NO: 174718 - RNA, 81 nt, Homo sapiens
aagagaacaaccccgaagaagaccaaagagaacccgacagaagaaaagggggacccacagaacaccagcagcaaacacagg

SEQ ID NO: 174719 - RNA, 72 nt, Homo sapiens
gaggaagaggaggccagacgacacaccagcaccaaacggacacgcaagagaccagccccgaacaaccgaacc

SEQ ID NO: 174720 - RNA, 58 nt, Homo sapiens
caagcagcgagcccacacaaaagggcacccgaacgcagacaccaagggagaagccaac

SEQ ID NO: 174721 - RNA, 79 nt, Homo sapiens
gaaacagccaaaacagcacaacagcaagagaagcgaaggacgacagccaggggaggacaccacggcaccggagcacgaa

SEQ ID NO: 174722 - RNA, 85 nt, Homo sapiens
acgacaccccacccagacgaagacagcccggacaccgacagcacagacagaacccgcaccaggcaggcgcccgcaggacccacga

SEQ ID NO: 174723 - RNA, 102 nt, Homo sapiens
cagccagccagcaggggcccgcagcgcccgcaaccggggcgaacaggcggccgccaagaacccaaggaaagaccggaaagaaggaagaaaagacacagcaag

SEQ ID NO: 174724 - RNA, 83 nt, Homo sapiens
gggacacacaaaccccaaccagggacaagccacccggacggcggcacgggcgcgcgcccagcaggagaagaccaccggcggcg

SEQ ID NO: 174725 - RNA, 77 nt, Homo sapiens
cccagagggagccaaaaaccagagaggcaccggccccacgcggagagcgacacgggagcccggacggaccagcaggc

SEQ ID NO: 174726 - RNA, 44 nt, Homo sapiens
gggggcacagcaaagaaaaggaaagaggccaaagaagcaacaag

SEQ ID NO: 174727 - RNA, 67 nt, Homo sapiens
ggaagagccgggcagcccggagcgggccagcacccaggccacagaggaggaaagagaggggaaagaa

SEQ ID NO: 174728 - RNA, 65 nt, Homo sapiens
ccagggaggcaggagacagacgggaggggacacggacgcggaacgcacagcacccaaaaccagag

SEQ ID NO: 174729 - RNA, 70 nt, Homo sapiens
gaaggggcaggaggagaaggcaaagagccagcccgaaaacgacagaagcacgacaacaacgggcagcaag

SEQ ID NO: 174730 - RNA, 82 nt, Homo sapiens
gaagacccccgccaaaaggaaagcacagcagaaacacaaagcagcccaaccaaagggaggacccacagcccaggacccagag

SEQ ID NO: 174731 - RNA, 58 nt, Homo sapiens
ccagagaaccaggacagacggggggccgaaggacaagcaccaacccgggacaggaaaa

SEQ ID NO: 174732 - RNA, 71 nt, Homo sapiens
aggcgaacagaacaagaaccaaagaaaacaaaaggggacagggaaagagggaaggaagaaccaaaaaaaga

SEQ ID NO: 174733 - RNA, 72 nt, Homo sapiens
acaccgggcaaccaaagacgggcgccacagacacaaaaggggaaaggaaccggaccagacaccgagacaaga

SEQ ID NO: 174734 - RNA, 76 nt, Homo sapiens
gacgcagggcgcccccggcagggcaaggagcagccaggccaccgcccaccgggccccaggaccacgggccagagga

SEQ ID NO: 174735 - RNA, 87 nt, Homo sapiens
caagcccagcaaagagcaaaccaaccagagaagagcggagaggaacagaaggcggaggaaacgcaggcgccaaacgagggaccacgg

SEQ ID NO: 174736 - RNA, 73 nt, Homo sapiens
cggccggagaaggccagagcacacacggccaagagcgggcaccaggaagcgaaggcgggaaaaggacaagaga

SEQ ID NO: 174737 - RNA, 81 nt, Homo sapiens
gacgggagggccccgggccccagccccaccgaggaggagaaggggcggcccggaggccgagaggagcggagagacaagacg

SEQ ID NO: 174738 - RNA, 62 nt, Homo sapiens
gcgaacagcagcgcagcccgggaccgggagcccgggaccgggagccggggggccaccccgac

SEQ ID NO: 174739 - RNA, 104 nt, Homo sapiens
gccggagcgggcgggagcggggcgcgggcagggccaagaacgaacggcgggcgcggacggaaggaaaaggacaggaggacccagacccagcaagcagaccgaaa

SEQ ID NO: 174740 - RNA, 77 nt, Homo sapiens
accgggagagcgaccagggacaaaagggggacgaccaccagccaggccggggacaaacaggcaaccgacggggaggg

SEQ ID NO: 174741 - RNA, 76 nt, Homo sapiens
ggacagaggccagaccccaggcccgaacgcggacggcacgcagacgccaggcggcaaccacagaggccacggcaag

SEQ ID NO: 174742 - RNA, 68 nt, Homo sapiens
ggggagcccccacccccaaaaacgcggaagacggggcagcacaaaaagagagcacaaccggccgcgcc

SEQ ID NO: 174743 - RNA, 56 nt, Homo sapiens
aggggcaaaaggcaaaggggagagaagcaccagccaaccaaaggagacacaaggag

SEQ ID NO: 174744 - RNA, 78 nt, Homo sapiens
aacgccaagccccgcgagcgcacgccaacgacgaggaccgacgcagaaggggcagaccaacaccacccagcaaaaacc

SEQ ID NO: 174745 - RNA, 72 nt, Homo sapiens
cggcaaaaccacccaaagaggagaggagaaaaccaggggcggaaggaccgagccagagcaaagaacacgagg

SEQ ID NO: 174746 - RNA, 72 nt, Homo sapiens
aggcaaaagcggaacaagaaagcagaaacagccggacaccagcagaggaggcggggccagacgacgggacca

SEQ ID NO: 174747 - RNA, 78 nt, Homo sapiens
gggacaagcccgcagaggaggcggcaggacagcccccagacggcgaagacaaacacccacagagggccacacaggacc

SEQ ID NO: 174748 - RNA, 77 nt, Homo sapiens
cacacacaggccgccgcacgggcacaaggccacggcgcgcaggagggccagccccgaggcccagccgcccgccgggg

SEQ ID NO: 174749 - RNA, 83 nt, Homo sapiens
cacaagaaacccaagcgcgagaccaaacgcagcggaaacccagacagcgcacacaccaagaaagacgaaagcggaaaaagaac

SEQ ID NO: 174750 - RNA, 78 nt, Homo sapiens
gcgaccaccaacagaccgaagggcagaccagaaacgggggcagagccggccaggggcaccggaaggagccacaagggg

SEQ ID NO: 174751 - RNA, 57 nt, Homo sapiens
caaacgcaacccagagaaggcacgggaccagagcagacggccgccaacaggagcaca

SEQ ID NO: 174752 - RNA, 70 nt, Homo sapiens
ccccccaaagcgggaacaggcgcagaaccgcagcggagaggaaccaggccgcgcaagccgagacgacaag

SEQ ID NO: 174753 - RNA, 78 nt, Homo sapiens
agaggaggaagagcaagcgggggaccgaacaaggcaaaagggccagaaccagagaacagcagaggcccaggaaacagc

SEQ ID NO: 174754 - RNA, 78 nt, Homo sapiens
caacggacgcagcgcaagccggagcaaaacaggaaaggcacggagacagagggaagaaacagacgcggagagaagaga

SEQ ID NO: 174755 - RNA, 87 nt, Homo sapiens
acgaggccagaaggcagaagaacagacggcccaggaggccagaaggaaaacgggagaaaacaagaggagggaaggaacacaaacgag

SEQ ID NO: 174756 - RNA, 83 nt, Homo sapiens
gcccgaggggaagcagccagcggggggggaagaggaggaggcgcccgacacgacaaaccacgcccaaacggagaaaacccagg

SEQ ID NO: 174757 - RNA, 80 nt, Homo sapiens
acagagacagcagccaaacccccaggcggagaaaccagacagaccacagcccagccaaaaagagggcagaacagagaaag

SEQ ID NO: 174758 - RNA, 83 nt, Homo sapiens
ccgcaccaggggccccagggaagagacccgcaaagaccgggagaccaaggaccagaggcccacagcggggagagcaggcccaa

SEQ ID NO: 174759 - RNA, 69 nt, Homo sapiens
cacccagacaaaggaaggagagccccgaaaaagacaacagaccaaagcgagaagaaaccggaagggaag

SEQ ID NO: 174760 - RNA, 78 nt, Homo sapiens
cagacacagggggaggaacagcccgggggagggaagcagccaagcgggcagaagaggaagccccagacacgagggcgg

SEQ ID NO: 174761 - RNA, 71 nt, Homo sapiens
ccaagccggcggccaagacggagccgaaaacgcgaagacgacgagcgcaccaagaggaacacaggcgaccg

SEQ ID NO: 174762 - RNA, 55 nt, Homo sapiens
gcgcgaggaacgaaacccgaggcagggaagacagccgccaccaggcgccccccca

SEQ ID NO: 174763 - RNA, 77 nt, Homo sapiens
caccacccacacccaccaacaacaccacaaaaccacagccaagagagaaaaggaacagccgaagccaggggcaagcg

SEQ ID NO: 174764 - RNA, 76 nt, Homo sapiens
ccgcgcgcaggccgcccccaccggcaagagagagaagaagccggcagcccggcccaggccgagaaaaaagagacag

SEQ ID NO: 174765 - RNA, 73 nt, Homo sapiens
ggaggcgaaagcggaacgaggccccagcagccgagcggaacaacaagcccggaaggaaagaaaacaaagacac

SEQ ID NO: 174766 - RNA, 75 nt, Homo sapiens
gggaaccacgggggccgcggccggaccgagcgcccgacccggcgagcgcagccgaccccaagccgacccccaagc

SEQ ID NO: 174767 - RNA, 75 nt, Homo sapiens
agagcacagagaaccacacagacagggagacgcggccggaagaaacgggacgacaaaacagaacagacggagggc

SEQ ID NO: 174768 - RNA, 78 nt, Homo sapiens
caaggaggccccagcggaccgaacaggccgacggcgcaaggccacggcaagcaccgggagcagcagcgaagccagcca

SEQ ID NO: 174769 - RNA, 69 nt, Homo sapiens
aaagagcaaaacaccggaaaacccagaaaaacagacccgagaagcagagggacagaagaagaagcgaca

SEQ ID NO: 174770 - RNA, 69 nt, Homo sapiens
agcccaacaaaggaacgaacgggaccagagggggacagcgaaaagcaacccagcaaagcgcaagaaacc

SEQ ID NO: 174771 - RNA, 78 nt, Homo sapiens
agccggaggagaagcaagaaggcccggacacagcaaaccgggccacaggcaccaaggaagaaggaggccggcccgaga

SEQ ID NO: 174772 - RNA, 80 nt, Homo sapiens
gaagggagccgagacggaggagagcacggaaaccccaccccgagcaggggcaacggaaacgacgaagagagaaggaagga

SEQ ID NO: 174773 - RNA, 53 nt, Homo sapiens
ccgcacgcacaaacgggcagaaagaaacacggacgccgccagccaccggcgcg

SEQ ID NO: 174774 - RNA, 91 nt, Homo sapiens
cgggcgacggcgcccggcaaggacaaggagcaggaaccaaagcagccgcgaggcgacacgaaggaggaaaaaacaagcagaaccaaaagaa

SEQ ID NO: 174775 - RNA, 58 nt, Homo sapiens
gccaacacccccagagcaggggacaggacaccaagagcaacacgggaagaaccggggc

SEQ ID NO: 174776 - RNA, 41 nt, Homo sapiens
ccccagcggggagacacagaagggccgggcccggagggcgc

SEQ ID NO: 174777 - RNA, 75 nt, Homo sapiens
cccccagccaggccccggggcagaccccggaggcgccggcggcagagcggggagacgagacaaccgccccgccgc

SEQ ID NO: 174778 - RNA, 70 nt, Homo sapiens
aaggcccggcggaacggccacaacgagcaccacagagggagccacaccaaagccggacccccccagccgg

SEQ ID NO: 174779 - RNA, 85 nt, Homo sapiens
agcaacaaggagggaaaaaagagcaggggaaaaggaaagaggggacagccagccggccaacaccggcacagagggacacagagcg

SEQ ID NO: 174780 - RNA, 74 nt, Homo sapiens
aagaccggaagcgaaagaaaaacaggagaagaaggccgacacggagggggccaggaaaaccgccagaacagccc

SEQ ID NO: 174781 - RNA, 64 nt, Homo sapiens
gcacggacggggggggaccccaagaagaagcggaagaggagccgcggaaccaagacacaaggaa

SEQ ID NO: 174782 - RNA, 64 nt, Homo sapiens
agcagaaggggcgagcacagaagcacagccacagagcagagacacaggcgccagcagccagcag

SEQ ID NO: 174783 - RNA, 79 nt, Homo sapiens
aagcaccggccaacagagaaccaggagcggcagaccgccgccaggaggaggcacgcagcccgagaaggagccacgccag

SEQ ID NO: 174784 - RNA, 56 nt, Homo sapiens
gaggagaaaccgccgcccagaagacaggcacacagagaaaaaaagggaacaaaaca

SEQ ID NO: 174785 - RNA, 50 nt, Homo sapiens
cgaggcgagccagggcccgcagcgagggcccgagggcaggacagcaggca

SEQ ID NO: 174786 - RNA, 72 nt, Homo sapiens
gcaaagaggacaaaagagcggaggagcggcgaggaccagacaaagggagcaccagccagaccgggaagaaac

SEQ ID NO: 174787 - RNA, 68 nt, Homo sapiens
gggcccgggcccagcccaggggccgcaaggccaggcgcgcagaggcacccaacggcacagaccccaca

SEQ ID NO: 174788 - RNA, 80 nt, Homo sapiens
aaaagcgaacacagggaggggcagcaggaagaagacgcaaaacgggcggcaaaggcacccaagggaccgccaagggaaga

SEQ ID NO: 174789 - RNA, 82 nt, Homo sapiens
aggcaccgccagcacgcgccgccccgcgcgcgagccacgcagcccccaggaccaagacccacggcgaagaccaacgaaagac

SEQ ID NO: 174790 - RNA, 70 nt, Homo sapiens
gcgacggcggccacgagcagcgaagcggcgacgccaggagcacaccgaaaagaaaggaaaaccgggagga

SEQ ID NO: 174791 - RNA, 73 nt, Homo sapiens
agggagagaaaagcgaagaagaacacgggaacaggccaaacgcagcaacacagaggcacagacccgaacaaca

SEQ ID NO: 174792 - RNA, 76 nt, Homo sapiens
gaggaacccgaagaagaaaggacgacagccagagaggacgcaaaagacagggagaccagacacagaaccaaagcga

SEQ ID NO: 174793 - RNA, 76 nt, Homo sapiens
gcagggcacacccgcgaggaaagccggaggagccaccaacagaagcaggagccaggaaaccaaaacccacagagag

SEQ ID NO: 174794 - RNA, 66 nt, Homo sapiens
gcgaccgacaaaagaagaccaccaccaaaccaagggccgaaagcaaaaccgcccccgggaacgcac

SEQ ID NO: 174795 - RNA, 82 nt, Homo sapiens
cccaaacacacacacacccccggacggaaagcacccaaagccgccccaaggcagggagcaaggggacgcgagagaccacagg

SEQ ID NO: 174796 - RNA, 66 nt, Homo sapiens
agggccgaacacagacagccaaccaggcgcgccaaagccacccccaaaggcagaggaagaacgagc

SEQ ID NO: 174797 - RNA, 71 nt, Homo sapiens
cgaggcagggaaagaaggaccaaaaggaaagaagacggaaagcagagagacacccggccaacccaaaggcc

SEQ ID NO: 174798 - RNA, 78 nt, Homo sapiens
gaggagacgacggacggcgggcaccggccgacgggccccgagacaaggccccggcgccgacccgcagcagaacccaca

SEQ ID NO: 174799 - RNA, 83 nt, Homo sapiens
gagaaacaaagacaaccgcaccagccggacaccgagcccaagcccccacaccaggcaggagaggcggaaggaagggacagggc

SEQ ID NO: 174800 - RNA, 105 nt, Homo sapiens
cagggccaggcacgaggggccgggaggaggcgcccagccggaccgggggggaccacgaggagcaacggcgagccgcgaagccacccccgggacaaagcgaccagc

SEQ ID NO: 174801 - RNA, 82 nt, Homo sapiens
gcggccaggggaccgggaggggcgaaggcgggcggcagaggcgacagggacaacaccgggaacgcgagcccagaaccgaacc

SEQ ID NO: 174802 - RNA, 44 nt, Homo sapiens
cagaaagagcaacagcagggcaacaggagaacaaccgcaacgaa

SEQ ID NO: 174803 - RNA, 72 nt, Homo sapiens
agaacacacgcaccccggggacagggacagaggcacagaagaggaccaagagggcagcccaagaaacagagg

SEQ ID NO: 174804 - RNA, 60 nt, Homo sapiens
acgcaccaggccaaagaaagagaagccaccgggagggcagaggccagcacaaccacgaga

SEQ ID NO: 174805 - RNA, 74 nt, Homo sapiens
cgccgcgaagagcagcagcagggcgcaagggaaagcacgaaagaggccaaagagcaagccaaccaagccaggca

SEQ ID NO: 174806 - RNA, 65 nt, Homo sapiens
ggcacacgcagcagaagcccggagcaaaacggcaaacaagggagcgaaaccagcacgacaaagcc

SEQ ID NO: 174807 - RNA, 58 nt, Homo sapiens
gccccaaggagggaaaagaaagaagagaggagaaccagccaggaccggggccagggag

SEQ ID NO: 174808 - RNA, 69 nt, Homo sapiens
aagggccgaagcagggcacaaaaccaaggccaagcaaggagaaccggcccaagagaaacccagacgcac

SEQ ID NO: 174809 - RNA, 55 nt, Homo sapiens
ggaggggcggcggggcagcgagcgggcaggagcgaggagggacaaggcacacgcg

SEQ ID NO: 174810 - RNA, 61 nt, Homo sapiens
acacgacgccgccggcaggcccgcgcaccagcgccgggggaagacagcgcgacagcacacg

SEQ ID NO: 174811 - RNA, 112 nt, Homo sapiens
gcgaccccggccgcggggccaggaagcggaggagccccggaggcagagcggcgccaggaaaaccaacggcccggaggaccacagcccaggggccccaggcgaaacccagccg

SEQ ID NO: 174812 - RNA, 78 nt, Homo sapiens
ccagacggccaccggcgggaggaacaaaagccaccccgcggaaggcgcgccgaagaaagaaacaagaacaaaagaacc

SEQ ID NO: 174813 - RNA, 99 nt, Homo sapiens
cgcacagcacggaagcggaaaccccgggagaccacaacaccacgaggaacagcgccgagcgggccaaaacagagggaagcaagacgcagagcgccaaca

SEQ ID NO: 174814 - RNA, 85 nt, Homo sapiens
gggcccgaggcgcaccaagggcgaaggagccggcccaaggggccccgagcagagggaccgcacacagagaccccccgggcccggc

SEQ ID NO: 174815 - RNA, 72 nt, Homo sapiens
aaagagacggagcaagagaacgcaagagacggaccaaagacagagacaagcggggaagaacggcggagcaca

SEQ ID NO: 174816 - RNA, 44 nt, Homo sapiens
cacggcgcgaacccacaaggagggccggcgggaagaaagaacac

SEQ ID NO: 174817 - RNA, 58 nt, Homo sapiens
cgcccagaagaagggccgagaaaaacacagggaagggcagaaacaacaccaagacggg

SEQ ID NO: 174818 - RNA, 68 nt, Homo sapiens
gacacaacgcaagaggccacaacgcaggcaggaaacagcagaggcacacaggacaacgagggaaaaac

SEQ ID NO: 174819 - RNA, 82 nt, Homo sapiens
acccgagccaagcaggaaggcccagcaaagagaagaagggcggagaacggaaaagcaccaggaagcagagaggaccgcagaa

SEQ ID NO: 174820 - RNA, 74 nt, Homo sapiens
caacgagaaggcgaccaaaggagggccaagggacgcgggcagaccagagaccgggggggggaaccccgaggagc

SEQ ID NO: 174821 - RNA, 58 nt, Homo sapiens
gccccgcgcgcccggcggcgcgggccaagcaggacccaaaaggcgggcgaaaacgcca

SEQ ID NO: 174822 - RNA, 108 nt, Homo sapiens
agacgcaccggaaaaccaccaggccagaccaacacccccagggcccccgacccaaaagccccacccggagacacgcccgagccaacccacagcccacggaagcgccag

SEQ ID NO: 174823 - RNA, 74 nt, Homo sapiens
cagcccagacgcggcacagagagggccgggagcgcgcagccagggagcgaggcggccagggccccagaagcaaa

SEQ ID NO: 174824 - RNA, 72 nt, Homo sapiens
agcgcgaccgggaggcccagaccccaacaggaaccccccggcggcagagagcagaagggccagcgcgaacag

SEQ ID NO: 174825 - RNA, 78 nt, Homo sapiens
ggaaagggaggcaccacacacaaaaagcacacacaagccaggggcgaaggagaccgaggggaaacaacacagccgacc

SEQ ID NO: 174826 - RNA, 83 nt, Homo sapiens
gcacagccgggacacaggcacacccaagggagcgaagggccccaaagcgccgcacggcagacacaccgaccagaggaaggcga

SEQ ID NO: 174827 - RNA, 68 nt, Homo sapiens
gcggcaagggggcagggggaggagcagaaacacagcaggacagagcgccgcaaggcacagccagcccg

SEQ ID NO: 174828 - RNA, 40 nt, Homo sapiens
aaacagcgacaggcaaagaggcagaagcaggagggaagaa

SEQ ID NO: 174829 - RNA, 79 nt, Homo sapiens
cgcccccgagcgggccgccggggcgcgcgagacggagaagggcgaggaaaaggcagaaaggcccggaacacaaaacagg

SEQ ID NO: 174830 - RNA, 73 nt, Homo sapiens
agcgcgacgcagacgacgagggcggcgcggcaccgcgaagagccccggcaagagaacaagagagaggacggga

SEQ ID NO: 174831 - RNA, 73 nt, Homo sapiens
ggaaaagagacaccaacaccagaccacaaacgggaaacccaaaggacaccagagcagcacgcgcacgcgaaag

SEQ ID NO: 174832 - RNA, 73 nt, Homo sapiens
ggcgagccggagagccggccgagcgaggcggcgcggccagaaggggaaccagaagaggccaaccagcacgaac

SEQ ID NO: 174833 - RNA, 71 nt, Homo sapiens
cgaggaaggaaccaaggaagagaagaaggaacggaaacaaagagccgaccagaggccccacagacaaaacc

SEQ ID NO: 174834 - RNA, 71 nt, Homo sapiens
cgagaaagagcccgaggaagggcggaccaaccacggcaaaccaacaagacagccgaggaagcaagcagcaa

SEQ ID NO: 174835 - RNA, 70 nt, Homo sapiens
caccaggagcccgagagagaagggggcggagagacacagcaggacagcagccagaccacagcaaagaccc

SEQ ID NO: 174836 - RNA, 70 nt, Homo sapiens
gcagggcgcccccgcccaggggcgaggagagaaacagagcccagacgccagaggggagcagaaccgaagg

SEQ ID NO: 174837 - RNA, 74 nt, Homo sapiens
gaaggaccgcgcgaaagcaaccagaaaagagacccggcagacaagacgccggcaagagaggcccaagagacaaa

SEQ ID NO: 174838 - RNA, 80 nt, Homo sapiens
gcacaccggaccaggaaacggaggcggggccgagaagaagcggggacggcaaaacagccaacggaacaccaaggaaaaag

SEQ ID NO: 174839 - RNA, 75 nt, Homo sapiens
gagccaagcggagacacaggcaaacgcagaaaagagagccgggcgcggaaacgaggaagagaccgagaccaggaa

SEQ ID NO: 174840 - RNA, 72 nt, Homo sapiens
gaaaaccaggacgccacaggcacaaaagaaagccagaggaagaacgcagccccgagagcagcagggggacgg

SEQ ID NO: 174841 - RNA, 82 nt, Homo sapiens
agacccaaacacagaagaaagccacgggagggcgcagagagacagcaacgcgaaaaacacaagaaccagacaaagacgcagg

SEQ ID NO: 174842 - RNA, 83 nt, Homo sapiens
gaaccacaaggaaacagacagagcggggcccggcgcacccaccaccgccgcccacggcagcccagggacccgagcaccgccgg

SEQ ID NO: 174843 - RNA, 81 nt, Homo sapiens
ccaccagcaccgggcagcggccagcacccaggcgggagaaccgcagcaggccaagaagcagcagccgcagcaccgagccgc

SEQ ID NO: 174844 - RNA, 55 nt, Homo sapiens
cagagagccaggaggcaggaggaaggaaggggaaaagcgccggcgaaagcaacga

SEQ ID NO: 174845 - RNA, 76 nt, Homo sapiens
ccaaacagaaaggacaaagaacagaccgcggcgggacagacaggcagccaaggccgaaacaacgaacaaggacgga

SEQ ID NO: 174846 - RNA, 76 nt, Homo sapiens
gcacgggagcgcggcgagcggagccgcggggaccgcggacgcacgaaaaaaacagacagcgacgagaaggccacga

SEQ ID NO: 174847 - RNA, 61 nt, Homo sapiens
ggagccccccggccgcggggacgcccccgagcgcgcgccgcgggcggagggcagggcagac

SEQ ID NO: 174848 - RNA, 81 nt, Homo sapiens
gcccgccccacccgcagccgcacccccggcggcagcacgaaagaccacagaaaaaaggccaggagacaaccagaccccggg

SEQ ID NO: 174849 - RNA, 52 nt, Homo sapiens
gggccgcacgggagagcagagacagaacccgagcagggcaaacgaagaaaac

SEQ ID NO: 174850 - RNA, 79 nt, Homo sapiens
cggccaccccggggccgggcagaagggcccaggagaagacagaggagccagaccaagagacagcacaggcgagcgagca

SEQ ID NO: 174851 - RNA, 77 nt, Homo sapiens
ccagcgcgcagcgcgcaggaaccccccaaacgcaaaagccgccccaagcagagcgagacccacaaggcaaggccagg

SEQ ID NO: 174852 - RNA, 73 nt, Homo sapiens
gagaaggaccaagaaccagggagacaaacccagaggcaacgaaaaggaacgcgaggcgcaagcaaggggcgcg

SEQ ID NO: 174853 - RNA, 69 nt, Homo sapiens
ccagccaacaccccaacaccacaccagcgggcagaaaaaccgaaacaccccgccccgcgcagcagcaca

SEQ ID NO: 174854 - RNA, 70 nt, Homo sapiens
gcgagaccaggaaagaagggggcagaagagggacggaagagaaggaccggaacagacaacaccgaaacga

SEQ ID NO: 174855 - RNA, 85 nt, Homo sapiens
cgcgcgccaccgcgccggagcgaagaaacgccccgggacagcggacgcacagaacagccccggggaggagacaaggggcgccacc

SEQ ID NO: 174856 - RNA, 72 nt, Homo sapiens
cccgaagaaaacagcgggaagagacagccaaggcagaaaaggcgcacagaagcacgaacacccgccgacgag

SEQ ID NO: 174857 - RNA, 78 nt, Homo sapiens
ggccagggccgaagcggcagaggggcgaccccacggagccacggagaagaagcagaccaagggggcgaggaagagaca

SEQ ID NO: 174858 - RNA, 83 nt, Homo sapiens
ggagcgcgaaggccgggacccggccccggcccacaggggggggcaaacccgagagaacggagcaaccgaagagagaacaagag

SEQ ID NO: 174859 - RNA, 73 nt, Homo sapiens
ccaccggcggcagagcaccgcgcccagggccggcggacagcaacacgaccaccaagggggcgaaggaacacga

SEQ ID NO: 174860 - RNA, 82 nt, Homo sapiens
cgggagaccgccgaaggcgggaagggaagcggccaaggcacggaggccgcggcagcaccgggaccggaggcccagagcgacg

SEQ ID NO: 174861 - RNA, 65 nt, Homo sapiens
gagagccacacccgggccagccggcaccgccggggaaaagagccacgggaaggcaagagggaaaa

SEQ ID NO: 174862 - RNA, 55 nt, Homo sapiens
cagcggccgcgcacccccggccggaggcaccagcgaccgaccagcgggcagcacg

SEQ ID NO: 174863 - RNA, 87 nt, Homo sapiens
gcggcagcccgacggcaccccgggggacgggggcggcggggcgccggcggcgggacaggcccccagcacaagggggcaccaggcgga

SEQ ID NO: 174864 - RNA, 37 nt, Homo sapiens
aggagagaaaccacagggcaaggccagagaaggcggg

SEQ ID NO: 174865 - RNA, 69 nt, Homo sapiens
aacgagccacacgccaggaaaggagagacagccacgagcgcagacaagagcggaggacagacagagagc

SEQ ID NO: 174866 - RNA, 71 nt, Homo sapiens
cagacgacaaacagaagcgaagcgcgcaggagcagagaggaagaccaggaaaggacggaagaagggggagc

SEQ ID NO: 174867 - RNA, 70 nt, Homo sapiens
accaaagcaagccacccagagcgcaagaccccgaaagccaccgccgaggcgcccccacccaggagccaac

SEQ ID NO: 174868 - RNA, 70 nt, Homo sapiens
gggagacggcggacacacggaggcgcgggggaagacgccacgcccagaccagcggccgcggacaaggaca

SEQ ID NO: 174869 - RNA, 53 nt, Homo sapiens
ccagggccgaaaaagaggaaccaccagaaccaaaaaccacgaggagaggaggg

SEQ ID NO: 174870 - RNA, 77 nt, Homo sapiens
agacagcaagcccacgagcggccccccgagacggaggagagggccgggaccaagaaaggcccagggaccaaagcccg

SEQ ID NO: 174871 - RNA, 82 nt, Homo sapiens
cgccagcgaagagaggagcggagccgcaagcggagccccacaacaccgcaggcgccaccaaggccgacaagccacaaggagg

SEQ ID NO: 174872 - RNA, 68 nt, Homo sapiens
gcgccgaggcaacacgggggggacacccaggccacggaaccgcccagccccaagccccgccacggcga

SEQ ID NO: 174873 - RNA, 58 nt, Homo sapiens
gaaaaccaaggggcaaaccagcggggagagaagaacacagcggacagaccgacacgcc

SEQ ID NO: 174874 - RNA, 74 nt, Homo sapiens
gcagcacagaagacggaccaccgagagcccaccgagaccgccagcgccacagcaaagaaaaccgaagagcgagc

SEQ ID NO: 174875 - RNA, 76 nt, Homo sapiens
ggccgcagcaaagccagccaaagaaacggccaggagggggccacaccgaacccagccgggaggccaaggccaggga

SEQ ID NO: 174876 - RNA, 77 nt, Homo sapiens
ggccgcgccagccagcccgcgaccgcccgcgccggcaccggggcggccggccaaagccagaagggccaaaagaaaca

SEQ ID NO: 174877 - RNA, 59 nt, Homo sapiens
ggccaccacgagcacggcccgcgcacgcccggagagaggcagacccacagcgcaacaac

SEQ ID NO: 174878 - RNA, 83 nt, Homo sapiens
cgccaagagaacaggagcggcgagaggccaagaagcgagagcagagagcgcgcgaggaggcgagaacaggcgaaagccgggca

SEQ ID NO: 174879 - RNA, 82 nt, Homo sapiens
ggggacccaggcgcccgcacgcgaggacgagcggcggaggagcagccaacgaccgacgagccacagaacgagagacgaaccg

SEQ ID NO: 174880 - RNA, 74 nt, Homo sapiens
aaaaaaccagaacacgccaaggcacaggaagagggcggcacgcggccagagagcacaacgggaggaagggaagg

SEQ ID NO: 174881 - RNA, 71 nt, Homo sapiens
cgaaagggagcggcaagcggaccagaacaacaacggacaagccggcacagcaacagccgaaaaaggaaaaa

SEQ ID NO: 174882 - RNA, 77 nt, Homo sapiens
agggaacaggcacaggacggcgcccaaggagccccagcgagccagagggacagcacagcccgcccgcgcaagcccaa

SEQ ID NO: 174883 - RNA, 80 nt, Homo sapiens
ggggcgaggggacaaggagaagaaaggccacgaggcccagggaacccggaccacagaaccaagaaagaggagaacaagcg

SEQ ID NO: 174884 - RNA, 52 nt, Homo sapiens
cagggccgggcaaacacaaacgcgcgaccccccacagcagagaacagcgcga

SEQ ID NO: 174885 - RNA, 77 nt, Homo sapiens
cacgcgccggaaagcagccaagacagagacccgacgccgcccgagacagagccccagcaacggaaagccaagcaagc

SEQ ID NO: 174886 - RNA, 71 nt, Homo sapiens
gcaaaaggcaggcgccgaacgcaccgcccagcagacggcccccgcccgccgccaccccagacccccaggcc

SEQ ID NO: 174887 - RNA, 83 nt, Homo sapiens
ccccggacagcgccacacaaccgcggcccacacccacgacacgacagaccagagcagagcaggagaacgaggcgggaacagag

SEQ ID NO: 174888 - RNA, 76 nt, Homo sapiens
gcgcccagaagaagggaaggcgcgaggaggaaaggaggacgaggaagccaaaaggcgggcagccacgccggagacc

SEQ ID NO: 174889 - RNA, 77 nt, Homo sapiens
cccgcccacgcaaacccaaagaccccgccggagacgagaggaagcagaagcagaaacccagcccaccagaggaccca

SEQ ID NO: 174890 - RNA, 85 nt, Homo sapiens
ccaggaggacgagcggaaaaacggagccacggacgccggacagacccgggcacagggcagcgcccgccgccgcacgaccgggccg

SEQ ID NO: 174891 - RNA, 53 nt, Homo sapiens
cggaaaaggcgccgcgaacgcgggaccagcgacgacgcagaagagaggcacag

SEQ ID NO: 174892 - RNA, 83 nt, Homo sapiens
cggacggcccccaggccgggccggcgcgggaagagcacgcagacaccgaaagaaccacagaagccacgacaaccacgaggcca

SEQ ID NO: 174893 - RNA, 76 nt, Homo sapiens
ccaaagaaagaaacaagcggcaagagaggcaccccgaagaggcgaggagcaacccagccaccccagcagacaggcc

SEQ ID NO: 174894 - RNA, 78 nt, Homo sapiens
agcccgcggggccggagcggcgcagccggagggggccggaggcaccaaccggcccgcagaccccaaggcaaagcagac

SEQ ID NO: 174895 - RNA, 80 nt, Homo sapiens
gacgaccaaacaggcacgagaaagaaccccccacggaaaggacgaaagaaagaagcagccccagaaagaaggacgccgcg

SEQ ID NO: 174896 - RNA, 96 nt, Homo sapiens
aagggagacggcgagacgcgcagcgccggcgcccgggagacccaggaggagcccgcagaggagcaggagcggccgcggagcaggagcgagagcagg

SEQ ID NO: 174897 - RNA, 73 nt, Homo sapiens
gaggaggacgcacgccacggccacacaacacaacgccaggcagaaccagagaccacagaagaaggaagggcca

SEQ ID NO: 174898 - RNA, 84 nt, Homo sapiens
gaacagcccggcacagccccagcggagcgacgcagaagacggggacgcaccacgagcacggggccggcccaccaaacgacacgg

SEQ ID NO: 174899 - RNA, 72 nt, Homo sapiens
gaagaccacggagcggggagagccgccgcaaacccagaccggcagccagccacagagcccggcagcagggcc

SEQ ID NO: 174900 - RNA, 72 nt, Homo sapiens
gagcaggcggggacaaaggcgaccaggaaaagaccaagaaggggaacggaaagggcacacagggaccaagaa

SEQ ID NO: 174901 - RNA, 70 nt, Homo sapiens
ggggggcaacccaaagccgagaaacggcgcaggaacagcgaagacagccagcagaagcggggacagaaga

SEQ ID NO: 174902 - RNA, 63 nt, Homo sapiens
cgccagcggacacgcgggcgaggcaaggggacaggcgaggaagccgaagcgcaccacacccca

SEQ ID NO: 174903 - RNA, 54 nt, Homo sapiens
gagcgccgacaggaaaagcgaaaccacagaaacaaccgaaccagagacagcgaa

SEQ ID NO: 174904 - RNA, 75 nt, Homo sapiens
ccgccccgccacccgcccgcccacccgccagagcacgcccggccaggacacaagaggaggcaagcggacaacagc

SEQ ID NO: 174905 - RNA, 75 nt, Homo sapiens
cgggccgccccagggcaaagcccaccagcaggcaagcccacaggccaagacccaagcaggcgccagcccgaggac

SEQ ID NO: 174906 - RNA, 104 nt, Homo sapiens
aaggaagaacccgaagaagaggaagaggaaagaaagacaagcaggcaggcccacccagacgccgaacggaacaaggaacagcaccacaacaggaaggaacccag

SEQ ID NO: 174907 - RNA, 90 nt, Homo sapiens
ccggagcggggcagcccgcgagcgggaggaccggggaggcgagggaggaggaaggcgagaagggccagagcccccgaacagcagcgcagc

SEQ ID NO: 174908 - RNA, 86 nt, Homo sapiens
caagcaaaagcgaggaaaaggagcagccagggcgagagagagcgcgagggcaggcccagaacacgggaggggcccgcagccgcgac

SEQ ID NO: 174909 - RNA, 64 nt, Homo sapiens
caacagaagaccgccagagacagagaagacaacgccccagccggaaaccagagcccaccccggg

SEQ ID NO: 174910 - RNA, 37 nt, Homo sapiens
aggaacaaagccagacgggagaggcagggaacaggcc

SEQ ID NO: 174911 - RNA, 78 nt, Homo sapiens
gccagcggcgcgagaggaccaccggggcggcccggcggagccagaggagcagccaagaagccccccaggggcccgcag

SEQ ID NO: 174912 - RNA, 49 nt, Homo sapiens
gcccacgaacgaaccagccaaaccaggaaaagacaaagcagccaaccag

SEQ ID NO: 174913 - RNA, 66 nt, Homo sapiens
gggagacacacacacgccggcccacccgaagggaagaacgaggcaagggaagaaaccaccaaagaa

SEQ ID NO: 174914 - RNA, 80 nt, Homo sapiens
gaaaaacccacaggacaaaagaagaagcagcaaggcacccggacacgaccaaaacccccaaagccaccagaaagccgcga

SEQ ID NO: 174915 - RNA, 88 nt, Homo sapiens
ccacgccagccgcaccagccgcccaagccgcacagccgcggcggcagcagcaggagaggaccgcagcgaagcacagcagaaggggcca

SEQ ID NO: 174916 - RNA, 64 nt, Homo sapiens
cgagaacgccacgcgggccggcgaaagcgggccagaagcccccaggaggagaacgagcaacgga

SEQ ID NO: 174917 - RNA, 86 nt, Homo sapiens
aaaaaggaagagagcacgcagccaggaaaccacgaggagccgcccggcaaagcgaaagcgcaggaccgaggagaaggagccgccgg

SEQ ID NO: 174918 - RNA, 74 nt, Homo sapiens
ggagggcggagagacccgggggcgagcacaaacggggcggggccggggaacacacaggacgaaggacagagagg

SEQ ID NO: 174919 - RNA, 74 nt, Homo sapiens
gaggacgaggagggcccaacacagcgcacgcagggcccgagggcaggacagcaggcaccggcgaagcacagaga

SEQ ID NO: 174920 - RNA, 85 nt, Homo sapiens
gagaagaagcgggagaagaccgaccagaagacagggcaagaggcgaaaaaccgagagggcgagagcgccaccgcagaagaagccc

SEQ ID NO: 174921 - RNA, 80 nt, Homo sapiens
cggacccgccacaagcagaacaagaaccccgaccagacccaccagcaaaacaaggcagacacccaccaccggacgcagaa

SEQ ID NO: 174922 - RNA, 69 nt, Homo sapiens
cacccagggaaaggagacaaggaccgaaacagaaacggaacaccaaggacccgcgggacgagcgggagg

SEQ ID NO: 174923 - RNA, 80 nt, Homo sapiens
caggcaacgccagcaacgcgggcagaggagcggagcggagaagccaaggcggcaaggacagaaacgaagaacaagccagg

SEQ ID NO: 174924 - RNA, 68 nt, Homo sapiens
cccccgagcgcagaccgcggccgcaggggcgcgcgcagggaccggaccagaacagccacacgaacaac

SEQ ID NO: 174925 - RNA, 85 nt, Homo sapiens
cagcaacaaagagagaaacagcagcaacagaaaaagagccgggaaccaccacccccggccagaggccacccagcccgacaccaac

SEQ ID NO: 174926 - RNA, 76 nt, Homo sapiens
agggagagccaggccaccgacgagagcaggccaagggcccgaagaagagaaggacaagcccgcgcgccacgaagag

SEQ ID NO: 174927 - RNA, 72 nt, Homo sapiens
aacaagccccacgacagaccacgacaagagcacaaccccggacgacaccccgacgacggagcaagcggggcc

SEQ ID NO: 174928 - RNA, 78 nt, Homo sapiens
gacgcacggagagggcagcggaccagaagccccggccccgccccccccagccaccccagaggcaaacccaaaggggaa

SEQ ID NO: 174929 - RNA, 81 nt, Homo sapiens
cggagaggggccggcgccggcacaagcagaaaagaggagcggccgaacgcgccacaacccagccggcagcagcccgccccg

SEQ ID NO: 174930 - RNA, 75 nt, Homo sapiens
agggaagacagcaggacaaggccaaccaaggagcggcgcgcggcaagcaagaggagcaccgcgccaccccagccg

SEQ ID NO: 174931 - RNA, 77 nt, Homo sapiens
cgaaacaaaagagcacaaaggaaaacgaggaaagcccaggagacacggcaagggaggaggagacccacaaagaaaac

SEQ ID NO: 174932 - RNA, 73 nt, Homo sapiens
gcgcacaggcggcgccgacagccacaccaacaagacaagaaccaaacagaacccacgaagggagaccagacag

SEQ ID NO: 174933 - RNA, 71 nt, Homo sapiens
aagagcgcaacagaaccacgaacaccagagcacacaaaccaccgccaaggaagaggcaaaacgcaccccga

SEQ ID NO: 174934 - RNA, 82 nt, Homo sapiens
cgcccggggagccccgcacaagccaagagggagaccgcagccacgagagacacagccagaacaccagccgacaacaccaaga

SEQ ID NO: 174935 - RNA, 63 nt, Homo sapiens
ggagcggcgcggaaacgcaagacgggccgagaagcagcgcgagagccccccccagcgccgaag

SEQ ID NO: 174936 - RNA, 86 nt, Homo sapiens
cggggcgcgccaaggacacggcacaccgaccgacgggcagcgggggcagagacggggaacagggccacccacacggacgccaacgc

SEQ ID NO: 174937 - RNA, 62 nt, Homo sapiens
gacgcaagacgcccggcccggccacgaaccgacggggaccccaagaggaaggaaccggagac

SEQ ID NO: 174938 - RNA, 74 nt, Homo sapiens
agccaaagaagacacgcggaagcgaggcgcgagaacagacccagcccgaggaaggagaagaggcgccacgacag

SEQ ID NO: 174939 - RNA, 80 nt, Homo sapiens
ggcagcgaagacgcggagaaaaaagccgacacgagaggcgagggacgacagagcaagcggcagagggcaagcgggaaaaa

SEQ ID NO: 174940 - RNA, 83 nt, Homo sapiens
agaaacccgcaaaggagcccagagacaccagaagcaacggaacagaccagaaggagcaaggggaagaggaaaagagagggaag

SEQ ID NO: 174941 - RNA, 79 nt, Homo sapiens
gggcaaccggagaaaccagcagagcacaaccgggacccccccgcggagcgcccagaagaaacgccaaaaagaagaaaca

SEQ ID NO: 174942 - RNA, 65 nt, Homo sapiens
cggagaacgaccaagaggacaccggagaggaagcgcggcgggcgcggccgacacaagacggcgac

SEQ ID NO: 174943 - RNA, 81 nt, Homo sapiens
aaaacacaaaaaaggaagagggaacaccagaagaaaggacgaagcaacaacggcgccacgccgacccgccgcgacgcggaa

SEQ ID NO: 174944 - RNA, 81 nt, Homo sapiens
gccaagaaccacggcaggaggaaaggacgaccagcggacacgaacagcaggagaaggaccaaaaggaacgagacggaagag

SEQ ID NO: 174945 - RNA, 76 nt, Homo sapiens
cagagcaaaacagagcggaacgaacaaggggaccccaaaagagacagacaggcgagcaaaaaaaacaagcccggaa

SEQ ID NO: 174946 - RNA, 62 nt, Homo sapiens
ccgcagccgggcagacacacgacgagaaccggaacggcgcacgaccccagagccgcccaaca

SEQ ID NO: 174947 - RNA, 81 nt, Homo sapiens
cggcggccgcgccagggcgcggggccgcggccgcgcgagcagcgccgcgggcgggacaacacaagggaaccaaggagggcg

SEQ ID NO: 174948 - RNA, 72 nt, Homo sapiens
ccaccggcccaaaggcccggacccaaaacaggaacgcacggaacggcggagaacagaggaagcgcgcgcaga

SEQ ID NO: 174949 - RNA, 76 nt, Homo sapiens
acgcaggcaagaaggccggggaagacagagccccagaaaaaagaccggccaggcggcccaacagcaacacagaagc

SEQ ID NO: 174950 - RNA, 85 nt, Homo sapiens
accagccgcccaagccgcacagccgcggcggcagcagcaggagaggacgaaccaagacacccgaaggccgcggggccccgacccc

SEQ ID NO: 174951 - RNA, 80 nt, Homo sapiens
gcagcagcccccgcgcgcgcgccgaagcggcggggcggaggaagcgggacagagaagacgacagaaagaaaaaagaaaga

SEQ ID NO: 174952 - RNA, 73 nt, Homo sapiens
gaccaacacagagcagcggaaccagacaggcaggaaaagacaggccgcacagcgaccacaggggaaacggcgc

SEQ ID NO: 174953 - RNA, 77 nt, Homo sapiens
caagagaccacagacacaccggagcaggaagcgcacacgccaaaggagagcgcggagaaccaaacccaggaacgccc

SEQ ID NO: 174954 - RNA, 73 nt, Homo sapiens
cccgagacaccacaggaggcccgggaaccgaaaaaagcagggaagaaggaaaagagaaccgccagcaagagcg

SEQ ID NO: 174955 - RNA, 82 nt, Homo sapiens
gcggagcccccagcccccgcgaaggaacacgacacagaccccggccggaacccagggagaccagccccccccacgcaccaga

SEQ ID NO: 174956 - RNA, 79 nt, Homo sapiens
aggaacggcccagcacaagaccgcgacagacagaaggagaccggagccgccccgccagaaagccaggggcaccaccaca

SEQ ID NO: 174957 - RNA, 79 nt, Homo sapiens
cggcgcgaccaccagaagacgcggagaccagggcaagcgggcaaggccagggcccagcagcagcccacggggccagcgg

SEQ ID NO: 174958 - RNA, 80 nt, Homo sapiens
gcagccaagcggaccacgccgcggcgcggccaagacgggaaagacaaggagccgggccgagaaaccgaaccagagaccag

SEQ ID NO: 174959 - RNA, 73 nt, Homo sapiens
accacaacgccgcggacgaccgcacgggcaggacgaacacgaccccgagaggggagaaacgggccagccaggg

SEQ ID NO: 174960 - RNA, 74 nt, Homo sapiens
acaggacccaaaaaacagagcacgcgaccagcgaggagcaacacaggagccggaggccggaaggggggcgacgc

SEQ ID NO: 174961 - RNA, 85 nt, Homo sapiens
aaacgaaacacacagcccacccaaacaggccagggccacagaaaaaagccaaaagggccacgaagagcgaacaaaggaacagagc

SEQ ID NO: 174962 - RNA, 45 nt, Homo sapiens
aaacccagggggcgaacacggaagagagcggcaggccagacgcag

SEQ ID NO: 174963 - RNA, 72 nt, Homo sapiens
cgccgcgagaagcacgcacagggccgcgggaagaccagccccaaaggggaacaaccaaagaacaaagaaggg

SEQ ID NO: 174964 - RNA, 77 nt, Homo sapiens
caagaggggcagcaagggccaagccgagcggggacaacccccgacccagcagaccgagccaccgaaccaacaaagac

SEQ ID NO: 174965 - RNA, 78 nt, Homo sapiens
gcgagagggcggcgaaggaggcagaggcacagcgcagacaggcccagaacaggacagagcaggacacaaaaaggaacc

SEQ ID NO: 174966 - RNA, 61 nt, Homo sapiens
aaagggaaaacgcgcgggccaagaaagagccgcagacgcacagcaaccaccggacccgaag

SEQ ID NO: 174967 - RNA, 78 nt, Homo sapiens
gaaggaccaagaaccaggccggagcgcgaagacgcagggaaagcggcacacgaaaggggcacggcaggacgagcggcc

SEQ ID NO: 174968 - RNA, 90 nt, Homo sapiens
cccacggaggccgcgggaagacgcggcggcggcggcggaggagagccgcagagcgcgcagaccccgacaaagaaacagccggaaaagcac

SEQ ID NO: 174969 - RNA, 82 nt, Homo sapiens
ccacaagaacaggaggacaccagaaaggacaggacccccggcgagcaggaaaggaggggcaggggcgggaacaacacaggaa

SEQ ID NO: 174970 - RNA, 69 nt, Homo sapiens
caggacacaagcccagcgggaccagacaccgcggaagcggaaaacggaagaccggccggccgaacaaaa

SEQ ID NO: 174971 - RNA, 60 nt, Homo sapiens
ggaacgagggggaagcggcccagggaggaagacgaccccgacgcaggccaggagccgcgg

SEQ ID NO: 174972 - RNA, 76 nt, Homo sapiens
gcacgcccgaacgcgagggggcggaccggcccccggaaccagcgggaagcaggagaagaaggaaggggaagaggca

SEQ ID NO: 174973 - RNA, 69 nt, Homo sapiens
ccgcccgcccccgcgccgaggaaccggcgacaacggcaagcggagaagagcaaggccgaaccgagagga

SEQ ID NO: 174974 - RNA, 59 nt, Homo sapiens
cgcccggacagcagggagacgcgagcaggcagccgccgcaaagggacgacgaagggaca

SEQ ID NO: 174975 - RNA, 71 nt, Homo sapiens
acccagagaagcagacaaaggagaggcgagaagggaaagcagaaaggaagacccagagacgcagaaaggaa

SEQ ID NO: 174976 - RNA, 81 nt, Homo sapiens
accaagggagaaacggcgcagcagagcgagaccgccaacaggacaccgaagccaaccgcgaagaaaagggacggccagagc

SEQ ID NO: 174977 - RNA, 79 nt, Homo sapiens
gcagcagcagacccaccaagaacgaggccaggcgaggagagcgaacaaccccagaagagaacaggaaacccaggcccaa

SEQ ID NO: 174978 - RNA, 80 nt, Homo sapiens
gacaaccaagggccccgcggaccaaggaagaacccgaagcaccggagaacacgagacccgcacaaaaccccgccccccag

SEQ ID NO: 174979 - RNA, 67 nt, Homo sapiens
acgggacaacgcaggagaacacagagccacggggccagacagcaacgaccagcagcagcaaaaacaa

SEQ ID NO: 174980 - RNA, 81 nt, Homo sapiens
gccgcggccggggcaggagcgcagagagggaaagggcgggggcaagacccagagaagacaaaacaacaggcgaaaaagaca

SEQ ID NO: 174981 - RNA, 74 nt, Homo sapiens
acggaccgaaggccacaaaaccacgacacggcaggaaggaccgaccaccacgaaaaaaaaccaagcccagagag

SEQ ID NO: 174982 - RNA, 62 nt, Homo sapiens
ggccccgcggggcaaacgcccagggacccagaaagacaggagaaggaagcaaagggagagga

SEQ ID NO: 174983 - RNA, 61 nt, Homo sapiens
agcaccgcaaggacgcagcggaccaccagcgccggcaccggaaggcaccaagaagagcccg

SEQ ID NO: 174984 - RNA, 55 nt, Homo sapiens
gggcgcgcaggccgcgacgagggcgcgagacgagccagagaggcaccaacacaag

SEQ ID NO: 174985 - RNA, 66 nt, Homo sapiens
aaaccaacgcccccccagcacacagaggagagcgacgagaagagagcgccgaaaagcccagaaaac

SEQ ID NO: 174986 - RNA, 56 nt, Homo sapiens
ggccaacaggccaagggcggcgccccagaagaagcggagagggaagggacaggcag

SEQ ID NO: 174987 - RNA, 65 nt, Homo sapiens
caccgccaaagcagggcaccaggaacgcacagggaacaccagaggcgggaccacgggcagcgccc

SEQ ID NO: 174988 - RNA, 75 nt, Homo sapiens
cagcaacgacccgagcacaaggcaagagaccaaccccagccccgaaaggcgaccgggcaaaaggggcccccccgg

SEQ ID NO: 174989 - RNA, 81 nt, Homo sapiens
cagggcagacaagacccggagggcgagccggcaccagggcccagaacaccgcccagccaagggggagggcagcgccaaaca

SEQ ID NO: 174990 - RNA, 115 nt, Homo sapiens
ccggcccacccggagaaagggcccccgaaggaaagagaggccggggaaagccggagagaaaagagggccaggagccagcggaaggccaagaacgaagagaagcgcagccgccaga

SEQ ID NO: 174991 - RNA, 63 nt, Homo sapiens
aaagagcccaacacgcccgggagcgcggcggggaggcgaaccgcgcgcacaaagagcacaacg

SEQ ID NO: 174992 - RNA, 73 nt, Homo sapiens
acagaaagaaaaaaaaaaaggaaagagaaaccaacgaaagacccacaggagggcaagcgaaccaggacacgag

SEQ ID NO: 174993 - RNA, 68 nt, Homo sapiens
aggaccaacaccacaagcaaagagagggagagaaggccccaagaaaagcggaagaagaccgggagcgc

SEQ ID NO: 174994 - RNA, 70 nt, Homo sapiens
gggcccggccacccgcagcaggggcgaaagcaggaacaagccacgcacagcgcggccagagaaggaaagg

SEQ ID NO: 174995 - RNA, 80 nt, Homo sapiens
cgcccgaggcgcgggaggggggaccggccacacgcgaaggcaagaagacaggaacgggacacacaaaccccaaccaggga

SEQ ID NO: 174996 - RNA, 83 nt, Homo sapiens
gcggaggcggggggaccggcgggcgggccagaagcggacccagaagaggggagcagcaaggaggaagacagccggggccggag

SEQ ID NO: 174997 - RNA, 77 nt, Homo sapiens
ggcggacggggggcggcagccagccgcagggcacgaagacagccccaacagacgagaagcaaggaaggcaacaacga

SEQ ID NO: 174998 - RNA, 75 nt, Homo sapiens
aaaagaagccgcagagacagaaagagagaggaaggagaaaagagggagaagccagccgggagcgacacccaagac

SEQ ID NO: 174999 - RNA, 66 nt, Homo sapiens
ggaagcgcagaagcaaccaaaaggaagacgggaacccggcgcaaggggcaccgccgaccgaaaccg

SEQ ID NO: 175000 - RNA, 83 nt, Homo sapiens
aacagaaaaacagggagggcagcccagggacccgaagcgcagccaggagagcagggacgccggcgaacgcagaccaccacaac

SEQ ID NO: 175001 - RNA, 112 nt, Homo sapiens
acaaggaagagagggagcagagggaaagggaaggagaaggagggacgcaggcgcaggccaggcggggagaccgcggggggagcccgcggccggggaccggacaaccccccaa

SEQ ID NO: 175002 - RNA, 103 nt, Homo sapiens
gaccccgcgcgcccccgggccagcagcccggcccccgggggacaacaaccgacaagccagggaagcacagacggaccacagccagggcacaagaccccacccg

SEQ ID NO: 175003 - RNA, 59 nt, Homo sapiens
acgcccaccccgcaagcacacagagaccagccagaggggagcgccaacccgaccgcagg

SEQ ID NO: 175004 - RNA, 67 nt, Homo sapiens
gggcaggcacggacgcagagcaaccacggaggagggcggacgggagacacagaggcaggaaaacggc

SEQ ID NO: 175005 - RNA, 63 nt, Homo sapiens
cccagccaacgaagcgaacaagaggcgccagcgggcgcgccggaagaacagcgccacgccaca

SEQ ID NO: 175006 - RNA, 78 nt, Homo sapiens
acgaaacggagccagagaaggcagaagcggaggaaagcaggaagcagaggcaaagaagacgcagaaaagcaagccaga

SEQ ID NO: 175007 - RNA, 83 nt, Homo sapiens
gcccgagcggagcggggaaggaccagcgcaaacgaggcgaggaaccaaaggccaccccgccgagcccacccaccaagaagcac

SEQ ID NO: 175008 - RNA, 88 nt, Homo sapiens
acacaccaaaagaggagccagaggaggcagaggaaacggagaggcaagcgaagccggaccccaaggagagacagccaaacaaccgcac

SEQ ID NO: 175009 - RNA, 72 nt, Homo sapiens
aggcccagcaacacggcagcagaccagacggccacgcgcccaggcggagacaggggcgacgacgacgcaacc

SEQ ID NO: 175010 - RNA, 82 nt, Homo sapiens
cgcaaacccaaagaccccgccggagacgagagcgccgcgccaggacggcagccagacgagcagggccgcagcaggccgcagc

SEQ ID NO: 175011 - RNA, 78 nt, Homo sapiens
gcacgaggagcccaagaccacacgacgaggagcagccgccccgggacggaggccaagcaacaccagaagcgacccgcg

SEQ ID NO: 175012 - RNA, 79 nt, Homo sapiens
gcggcacccgcacccggggacaagcgcgggaacggcgcggaaggagggggcccccccacccccagcaccccaccggcgg

SEQ ID NO: 175013 - RNA, 64 nt, Homo sapiens
cagacacacaacccgacccgacgagagcgagaacccgagcagcgccagagcaacacaccgcgcc

SEQ ID NO: 175014 - RNA, 57 nt, Homo sapiens
cgcaccgcccgccccgcaccgaacaggaagccacaaaaacaaggggcgggccagcag

SEQ ID NO: 175015 - RNA, 59 nt, Homo sapiens
cggccaacgacacagacagaccgaggggacggacacaaccagagggaagcacgcccggg

SEQ ID NO: 175016 - RNA, 75 nt, Homo sapiens
agacaaccagagacacccgagggccccagagaaagaaacagcagacccaaccgaggcaaggcggaggcaggacca

SEQ ID NO: 175017 - RNA, 78 nt, Homo sapiens
gaagaagagcagggggacgaggccagacaacacaacacaaggcagccacaggccaaaacagagagacggggcgccagg

SEQ ID NO: 175018 - RNA, 75 nt, Homo sapiens
caagagacacacagaggcaaccccaaggacccgggcgacggaccaagcaccagggacagcagggacgggcccaag

SEQ ID NO: 175019 - RNA, 71 nt, Homo sapiens
cacaaaacaccgaggggcagaaaaacaggggaaagcaaaaccagcaaacgagaagaaagaaggaaagagag

SEQ ID NO: 175020 - RNA, 78 nt, Homo sapiens
cggagagagcagcccggcagacgcagaaccagagcaagaggacacagcagagaggccaaagacgagaagagaaccaca

SEQ ID NO: 175021 - RNA, 78 nt, Homo sapiens
gcaggaagcccggaggcgaggagagaggacagcaccagaagcgcgcgcgcacccggccccagagcgccccgcgacccg

SEQ ID NO: 175022 - RNA, 79 nt, Homo sapiens
gcaccacgcagaagggcgcagcccaagcgcgggcaacacaacaaggcgcggacacccagacaagcgcgccaccggcccc

SEQ ID NO: 175023 - RNA, 73 nt, Homo sapiens
cccggcccaaacaagcagccccggaagacaacgcagacgccagcaccaagccaaaggcggagaagggccaccg

SEQ ID NO: 175024 - RNA, 76 nt, Homo sapiens
gggaggaccggggccgagccaagaaggaggcaccaccaggagaaggacgagaagagcacagggggcgacaagacag

SEQ ID NO: 175025 - RNA, 102 nt, Homo sapiens
gaaaagcagaaggcagaccacagcgcaagacgaaaaaccacaaaagagaccaggcacaggaggccaaaacaagcagaagcaagaagagaaaaaccgaacgaa

SEQ ID NO: 175026 - RNA, 56 nt, Homo sapiens
cgcccaaaagaccaccgcccaacacaacacgcagggcaaccccgcacaaacccagc

SEQ ID NO: 175027 - RNA, 94 nt, Homo sapiens
gggaacgcgaggccgaccaccaagacaggaaggaaaggaaggcagaggagcaggggagagcccagggacgcggagggagcccagcggggagccc

SEQ ID NO: 175028 - RNA, 76 nt, Homo sapiens
cgaaacaagaggacagaacaagcagcagccagagaagggagagccagaggaacaagcacgggggaaaacagacgac

SEQ ID NO: 175029 - RNA, 81 nt, Homo sapiens
aaaaaagagcccgcaagaagaacagagacagcagccaaacccccagacgaaaccacaaaacgcccaccagcacagcggcag

SEQ ID NO: 175030 - RNA, 86 nt, Homo sapiens
aagcgggccaggggacggaccagacggacacacaaccgagcagcacgcagcagagcgaaaaacacaagagggccagggaccagggg

SEQ ID NO: 175031 - RNA, 51 nt, Homo sapiens
acaaccccaggaccaccaaaaaaacggcgggcggaaccagcccagccacga

SEQ ID NO: 175032 - RNA, 75 nt, Homo sapiens
ccacgcaggacagaccaggcccgccacaccccggcgccggaaaggcagccaaagcaccggggccagcagcgccgc

SEQ ID NO: 175033 - RNA, 85 nt, Homo sapiens
ggcggagagccgggaagaaggcgcgcaagaacgccaaccgagccccgcgcgggcccagcaggggaacacccccgcgaacaggacc

SEQ ID NO: 175034 - RNA, 85 nt, Homo sapiens
gacaggcggacgaaagaggacacgggaagaacaaagacagaccggccccgagccccggccccaaagacccaaaacagagacaccc

SEQ ID NO: 175035 - RNA, 81 nt, Homo sapiens
cccaccgccgcgaggaggaccgccacgccgggaggcgcgaccccggaggaaaagcggaagcggcagcggcgaacgccggaa

SEQ ID NO: 175036 - RNA, 81 nt, Homo sapiens
gaaacagccacggagaacaacagacgggagacgaacgaggcaaaggcagccgagcaccacgacggagcaagacagacacac

SEQ ID NO: 175037 - RNA, 85 nt, Homo sapiens
gacccaagcgccaggccgcgccgcccgagcccgggcgcgacgcgaggcaacgcaacgcgcagcgccgggccagcaaaccaagacg

SEQ ID NO: 175038 - RNA, 83 nt, Homo sapiens
gcacacagacccacaggccaaaggagcggaagcagccagggcaaaagaggcggcaaggcagcccaggcaaagaagaaaggcga

SEQ ID NO: 175039 - RNA, 80 nt, Homo sapiens
cccccacaacgaagcaggagcggaagcacaaagccgagcagggagaggaggaagaagcgagaagcaaaggagcacagaac

SEQ ID NO: 175040 - RNA, 82 nt, Homo sapiens
gaacaaagagaacagcagcagagccgggcgggcccccgaacaaggaaaagaggccgagcagcagccgaaccagggagcagcg

SEQ ID NO: 175041 - RNA, 69 nt, Homo sapiens
aggaccgccccacaagcagagagcgggacagccgggggccacgaccagcacgggccagcccgacacaga

SEQ ID NO: 175042 - RNA, 73 nt, Homo sapiens
gcaaagccaccaaaacggcgaggagcgacgcagccagcacggaacacagaaccagcccaaacaaagagaccac

SEQ ID NO: 175043 - RNA, 79 nt, Homo sapiens
ccccggcgcaagccgggagacaagaccgacacgagagcgcgaggcagaaacccaacgggaacgaagggcgcagaaaagg

SEQ ID NO: 175044 - RNA, 75 nt, Homo sapiens
cacgaccgcccgcgaccagaagggagacggacccgccgagcgccgaacgcccagaaaagccaagccagcaggggc

SEQ ID NO: 175045 - RNA, 95 nt, Homo sapiens
agggcgacccgagaagcggcggggcggcgggccggcgggcggggcgcagagccaggcagcgcaggacacagggaacacacggcggagaacgacgc

SEQ ID NO: 175046 - RNA, 80 nt, Homo sapiens
gaaagaagggggcagaagagggacgaaaagccaaccagcaagaaaaaaggaacaagaaaagggaaagacagagaagaaag

SEQ ID NO: 175047 - RNA, 50 nt, Homo sapiens
acaacaaggccaccaaacgagagcagccaacgcagaaaacacagagaaaa

SEQ ID NO: 175048 - RNA, 86 nt, Homo sapiens
cggcaagggcgggggagacaagggaggcgaggacggacaaaaggaaacggacgggaggccagccagcagaaggaggaaccagcccc

SEQ ID NO: 175049 - RNA, 73 nt, Homo sapiens
agccaagcacacaagccagggaagacagaagggaccaaaagacacagcagggacgaaggagaaacagaggcgc

SEQ ID NO: 175050 - RNA, 76 nt, Homo sapiens
ggcccaaaggccgccaggccgcagacgcgaaggaacggcaaagcagaagaagaaggagaaggagagaaggaagcga

SEQ ID NO: 175051 - RNA, 77 nt, Homo sapiens
aaagaccgcgaccagacaggcggcgccaccgaacagacccggaaggacggcgaggggcacaaggccaagacggccaa

SEQ ID NO: 175052 - RNA, 73 nt, Homo sapiens
ccaagaagccccccacacacaggaaacacagacccagaccagaagacgaaacccgccaagacccaagagcaga

SEQ ID NO: 175053 - RNA, 88 nt, Homo sapiens
cgggaacccccacgcggccagcgaaaacgcccaggaccgccgggagagccgcccaccccccacccggacgccgggcgcgcccggcccc

SEQ ID NO: 175054 - RNA, 37 nt, Homo sapiens
cacagaaccaccaggagagcaagcgaccggacagaag

SEQ ID NO: 175055 - RNA, 65 nt, Homo sapiens
cgcccgaccagaggcgaccggcccccaggcacgaagcgaagaagaggagagaagcagcggcgcag

SEQ ID NO: 175056 - RNA, 70 nt, Homo sapiens
gcccccaaggggcgggcgcggcaaggaaaacgccaaacgccggaaaccggcagcaagagccagaagcaac

SEQ ID NO: 175057 - RNA, 69 nt, Homo sapiens
caaaagagaaagggcaacacagagacaaaaacaggagaaggaacacaacgacgcgaagcagaagaaggc

SEQ ID NO: 175058 - RNA, 58 nt, Homo sapiens
aggccgacaacgagggagaagcacaagacagcacagaggggcccgggcagagggaaag

SEQ ID NO: 175059 - RNA, 69 nt, Homo sapiens
gggaaagagggagaccaccggagagcccagaagaagcacacacaaaagagggacaacacaagccacagc

SEQ ID NO: 175060 - RNA, 77 nt, Homo sapiens
gaccggacacaaaaggccccggcccgagaaacaacggacacccccgggaacccaccaaaaaggacaccgaaagacgg

SEQ ID NO: 175061 - RNA, 78 nt, Homo sapiens
acccacggggaccagcagccgggccagggccagagcaaagcaggcaacaggaagaagaacccacaggggccaacagag

SEQ ID NO: 175062 - RNA, 70 nt, Homo sapiens
gacgccccaccgcgcacccccgcgccgcgagcagccggcggccggccgcgagcacacgcggcgggaagaa

SEQ ID NO: 175063 - RNA, 73 nt, Homo sapiens
gcagacaccaacgcggccccaggccaccagccggaagaggacacaagaaggaaacgaaccccgccggagccgg

SEQ ID NO: 175064 - RNA, 62 nt, Homo sapiens
gaaccggcaaacgccccgccgacgaggaccacggagaggaaacggccacaagaccaaccagc

SEQ ID NO: 175065 - RNA, 75 nt, Homo sapiens
gcccacagaacaccgaggcagcaagaagggaaaacaaagcaagacaccagaagccaacccagagaaccgaagacc

SEQ ID NO: 175066 - RNA, 75 nt, Homo sapiens
ggagacggcgcacagggcccaggaaggaggaaggcgaacaaggaccgcgacaccaacagcgaccagaaggggccc

SEQ ID NO: 175067 - RNA, 58 nt, Homo sapiens
aggaaaaggggaacggaagagaacaagcaaggccaagacaggggacagccggccgaac

SEQ ID NO: 175068 - RNA, 89 nt, Homo sapiens
gagcacggccgcccggccacgggaacacgcagaagagaacaagaaccgcagccccagggagacgaggaccccgggaagcaaggaggcga

SEQ ID NO: 175069 - RNA, 73 nt, Homo sapiens
cagagaccaggggcacccgcgcccccggaggaggcggacacgggcggacgcagcccccaacccgaccggcaac

SEQ ID NO: 175070 - RNA, 80 nt, Homo sapiens
gcgccggaggcccggccacccgagaagggagacgacgcgcgggccgcgagcggggcgacccgaggacgagaacaaaagaa

SEQ ID NO: 175071 - RNA, 64 nt, Homo sapiens
caccggggcccgcccagcgaccacccaccgaaaggaaaagaaaacccaggagaccagcgccgag

SEQ ID NO: 175072 - RNA, 83 nt, Homo sapiens
gggacccaccagcaagacacaggccagcagggcccagcgggggagcgggcggggggggaagcagccgacacggggcagacacg

SEQ ID NO: 175073 - RNA, 73 nt, Homo sapiens
ggaagcccgcaaggagaaaaggggagaaaccaacaagaaaaagaccgggcaaagaagcagcccgagccaaaaa

SEQ ID NO: 175074 - RNA, 86 nt, Homo sapiens
gagccaaccgggaagggaaccggaaaagacaagggggcaaagagacgaggaacagaaaagagaaaccagggagcgcccaagaaacc

SEQ ID NO: 175075 - RNA, 78 nt, Homo sapiens
ggaagcacggccacggcaggagcacagcaggaggacggaacccaggccgggcgaggcgaggccacccgggccgccggc

SEQ ID NO: 175076 - RNA, 75 nt, Homo sapiens
ccgcgcgagcccgcgggggccggccgcccacgccagccacagcggccacgaccgggcacgggacccaggacgagc

SEQ ID NO: 175077 - RNA, 66 nt, Homo sapiens
acacgacagcccaaccgccacagggaggaggggagagcggagcgaagcgaacaaaaagcagcaaac

SEQ ID NO: 175078 - RNA, 78 nt, Homo sapiens
gccagacgacaagcacacacaggcgcgaaacggaaaaagcgccaccccaagcaccggcacagcaaaagaagggaaaga

SEQ ID NO: 175079 - RNA, 110 nt, Homo sapiens
ccggccccggcggcacggcgccgaccagcaccaggggaagcgggacaacgggggggagggcacaggcacgaacagacagagaaaccaaacaacagggaacagcgacaaga

SEQ ID NO: 175080 - RNA, 77 nt, Homo sapiens
gagcagacacaccacccaacaggcaaacccagcaggaagccacgggcgaaacagaaaagaaaggaagaggagcagca

SEQ ID NO: 175081 - RNA, 57 nt, Homo sapiens
cagcaccccgagaaccgcaggagccagagaaggcgaccgagaacacagagaacggga

SEQ ID NO: 175082 - RNA, 72 nt, Homo sapiens
gaccagggcagccccccccaagccaggcacccaccgggaacggccagagaagggcggcgcgcacaaggccga

SEQ ID NO: 175083 - RNA, 77 nt, Homo sapiens
cgcagaaacaagaggggcgccacccggagagagaaaaccagaagaagagaagcccaacacaggacacagcaggggcc

SEQ ID NO: 175084 - RNA, 78 nt, Homo sapiens
aggacgcggcgagaggggcaccagcccggcaacgagagcgcaccccgaaccgcggccgaggacaaaggccacagcgga

SEQ ID NO: 175085 - RNA, 73 nt, Homo sapiens
gccgacacgcggcccccgaccgggcacacagaggcacgagaacggggaacagaacagcccaggagcggcaccg

SEQ ID NO: 175086 - RNA, 77 nt, Homo sapiens
caaggggcccgaacagagggaaacaacgaacgagcaaggaagggccaaggcagaccccacaccggagaacgcaacca

SEQ ID NO: 175087 - RNA, 58 nt, Homo sapiens
aacaaccgcggacacggagaggaaggggcggagaacggaaaagcaccaggaagcagag

SEQ ID NO: 175088 - RNA, 73 nt, Homo sapiens
cggcgaggaaacgcccccgagaagaaggaggcgcaggggaccagcggccacccaggacgaggcggggggaacc

SEQ ID NO: 175089 - RNA, 78 nt, Homo sapiens
agccggggacgaaagggaaggacaggcagagcaaacaagggaagacagaaggaagcaaagacagagcaaaaggagcgg

SEQ ID NO: 175090 - RNA, 54 nt, Homo sapiens
cgacaggaggagacaggcgagagaggaggacacgaccgggaccagacaggcaaa

SEQ ID NO: 175091 - RNA, 96 nt, Homo sapiens
ccagagcccaggagggggcaggccgaggaacacaacaagagaagagaacacgccagaaacacagcagcaacccggaaacggaaaagacaaacacaa

SEQ ID NO: 175092 - RNA, 39 nt, Homo sapiens
gcgaagcgagaggacagggcagaacaagaaagcaacaac

SEQ ID NO: 175093 - RNA, 81 nt, Homo sapiens
aagcagcggggcgcgcggcgcagcgccggcccgaggggggaccaaggcaacgaacacaagcagcgggcaacaacagaacag

SEQ ID NO: 175094 - RNA, 54 nt, Homo sapiens
gaggaccgcgaagcggaagacagaacacgacccgagagaacccagagacggaaa

SEQ ID NO: 175095 - RNA, 83 nt, Homo sapiens
cgcgagccgggcccgggccagcgaggcggagcgggcccgagaagcgcgcgccaagaggcgggcgaaggggcgccgaaccgagc

SEQ ID NO: 175096 - RNA, 79 nt, Homo sapiens
cagcgcccggccgaaccccccgcagcagccaaccggccggccgcaaccgggcgccacgagacggggcccggcacgaaag

SEQ ID NO: 175097 - RNA, 70 nt, Homo sapiens
ccaccccccgaacccagccgcaccgccccggcgcaggaacacaggacggccgaacacgacgcacacagaa

SEQ ID NO: 175098 - RNA, 77 nt, Homo sapiens
gaaaagagaaaaacacagcgaaggagccggccaggggccacggagaaagccgcaggcacaaaggagccaaccaccgg

SEQ ID NO: 175099 - RNA, 64 nt, Homo sapiens
gagcacacccccacaacacgcaaggaagagacagaggagaaggagaaaaaaccaggggaaacca

SEQ ID NO: 175100 - RNA, 69 nt, Homo sapiens
ggaccagagacggcagaccaagcagggggggaagaggccaaaggagcgaagcgacagggaaaccaggag

SEQ ID NO: 175101 - RNA, 79 nt, Homo sapiens
ccgacagccgcagaacgggagaaccgccagcgacgggaaggcaggacccacgcacgagcaacgagaagagagaaggcga

SEQ ID NO: 175102 - RNA, 66 nt, Homo sapiens
ggccgcggcccgaggcgcagcagcaggaggaggaccgcagcaagggccgaccaccaagagaaggcc

SEQ ID NO: 175103 - RNA, 77 nt, Homo sapiens
agaaggggaggggagggaaaggcccaggaaaaagacggcacacagccgggggccgaggccccacggcccccgggacc

SEQ ID NO: 175104 - RNA, 103 nt, Homo sapiens
ggaaaacaaacaaaaccaccagaccaaggccgagcccccgaaacaaccaaccagccaaagagaagcaggagaaggaacgggaaaagaccaaaaaaccaggcca

SEQ ID NO: 175105 - RNA, 80 nt, Homo sapiens
cccgcacaaccaagagacaccaaggagacgcccaaggaaccccgccggccaccggcgccgcccccccaccgcggaagagc

SEQ ID NO: 175106 - RNA, 81 nt, Homo sapiens
caagaacaagaagaggaagaaaaaacggcacagaaaggaagaaacggaagacaccggagggcaagaaacaacaaagcaaca

SEQ ID NO: 175107 - RNA, 76 nt, Homo sapiens
gcacggaagcgcgacaacacacacacagcgacagcacaagaagaccgaacaggaaggccccggaaccacagagcgg

SEQ ID NO: 175108 - RNA, 47 nt, Homo sapiens
ggaaaaaaaccaagccaggcccaaacacccagaccacggcaacaacg

SEQ ID NO: 175109 - RNA, 68 nt, Homo sapiens
cacgcgagcaggcggccacacggaagccagcggccaaccgcacaaaaaagccgaggaacagaaacagg

SEQ ID NO: 175110 - RNA, 78 nt, Homo sapiens
aaaggcagcaaaaacaagagccccaaagcagccaaaaggagaccggaaaccgagagaaacgaagacgaagaaacagcc

SEQ ID NO: 175111 - RNA, 71 nt, Homo sapiens
agcgagcccccgcggacccacccccgaacccccaagacgaaacaccgcacccagaagccgcagccgaccag

SEQ ID NO: 175112 - RNA, 73 nt, Homo sapiens
caaaacccaccaaccaggccaccagcgaaaggcacagccaccgaaagaggagaccgacagcccccaggaagga

SEQ ID NO: 175113 - RNA, 84 nt, Homo sapiens
gagcagacgccgccacagaggcggacaggaccccccgaggagacaccaggggagaagcgacgggccggcggccgcacccacacc

SEQ ID NO: 175114 - RNA, 65 nt, Homo sapiens
gaccaggccacaggccggaccgggcagcccggccccccagggggaccaccaaggcacgaggccca

SEQ ID NO: 175115 - RNA, 76 nt, Homo sapiens
cgagaggcacacacaacgagaccacgccgcacgcaaggggaacaggaggagaaggaagggcaggcaagacccaccc

SEQ ID NO: 175116 - RNA, 69 nt, Homo sapiens
ggaccacaggcccgcagcccggggcgaacacggacaccaacgagcgaagcaggggacgcgaagaagccc

SEQ ID NO: 175117 - RNA, 72 nt, Homo sapiens
aggcggggagcagcgccgggagaaggaccacgcaggggaccggcggaagcggaacaaacaacggcggaccgc

SEQ ID NO: 175118 - RNA, 62 nt, Homo sapiens
caaggcgcggccaacgacccacccagcaggagaacggacccggagggagaacaacacccaca

SEQ ID NO: 175119 - RNA, 92 nt, Homo sapiens
ggcaaccagccccgccgcaccccgccgaccccggcggacaacggagacgccccagcaagcgcacaagagaaggagaggcacaaacaaaacag

SEQ ID NO: 175120 - RNA, 57 nt, Homo sapiens
agggcgaaccacccacagaccagccggaacaagagacccgggaaccagacaaaccgg

SEQ ID NO: 175121 - RNA, 116 nt, Homo sapiens
cgggggaggccgcaccgcagcgaggccaggaacccggggagaccccgacgggaggccgagaacagggggagccccagcagccaacagccacagagaaaaacaacgaaagacaagaa

SEQ ID NO: 175122 - RNA, 77 nt, Homo sapiens
caccccacggagaagccacaggaagcggggcgaggcaaagaccagcaaggcaccaacagaaaaacaacgccggaagg

SEQ ID NO: 175123 - RNA, 78 nt, Homo sapiens
agacccagcaagcagcagaagccaacaaacagaaccaggggcgaaaacaagaggggccaaaggccaaggcggaggccc

SEQ ID NO: 175124 - RNA, 82 nt, Homo sapiens
cggccgaccaccggaacggacagcccccccagcgaacgaccggaccggggcggccagagcaccaggcgggggacgaaggaga

SEQ ID NO: 175125 - RNA, 81 nt, Homo sapiens
agaacccccgaagacaagacggacaaggcgccagggacggcagggagagccagcgaaccaacgcccacagccccaggaggg

SEQ ID NO: 175126 - RNA, 74 nt, Homo sapiens
cgggggcaacggagaaaacccggaaccgcgacggcggcaggcgagccagaaacccgaaacgcccaggggaggga

SEQ ID NO: 175127 - RNA, 55 nt, Homo sapiens
caaaggacacagcaacacccgaaagaagagacacaccccccagaaggagcagagg

SEQ ID NO: 175128 - RNA, 68 nt, Homo sapiens
aagggcaaaggcgggagcacccaaaggcagggcgagacagccacaacccggggcacagccaacggcgg

SEQ ID NO: 175129 - RNA, 68 nt, Homo sapiens
gagagcacgcaccgaagcaaaaccaacgcaaccaccccaggccagggggcagaacagggaagccgaca

SEQ ID NO: 175130 - RNA, 71 nt, Homo sapiens
aaagcgcaagagcacgcagagagaacagggcaacaggccgagacagcagcccccagggacccaaggacgac

SEQ ID NO: 175131 - RNA, 71 nt, Homo sapiens
gccccccagccggaagggcagagagacgcccccggcgcccgagcgggagagcgggaggcccccggaaccac

SEQ ID NO: 175132 - RNA, 81 nt, Homo sapiens
cgccagccccgcggcgaagggaagaggcccagccggcccgcgggggagccccgggagccgcacggaaagcgagaaccccga

SEQ ID NO: 175133 - RNA, 80 nt, Homo sapiens
acggagccagagcggggggcgcggagagcgaagcgggaaaggagggaaaggcgcagaagacaggcggcagaagaaccaga

SEQ ID NO: 175134 - RNA, 76 nt, Homo sapiens
gaaaccgacgcccgggggaaacagagaaagaaggcggccaggccaaccgaagccgggacaccacagcaagaggaac

SEQ ID NO: 175135 - RNA, 83 nt, Homo sapiens
cgggaccgcggagagaagcagcggacagcagaggggaacaggacgcaagagacgcgccacagccagcggacaaacagcccggg

SEQ ID NO: 175136 - RNA, 85 nt, Homo sapiens
cacccggcccaggaggcagccagggaacaaacaagaggcaggacaggcgcagaaggagggcacgcaacaggccccagccaggccg

SEQ ID NO: 175137 - RNA, 74 nt, Homo sapiens
cggaccaacccaggacccccccacagaaagccagagccccaaagcccccaagccccagaaacacaggaagccag

SEQ ID NO: 175138 - RNA, 57 nt, Homo sapiens
acgcggaccacccaaacacccagcgccaagagccgaaggggccaccacggcaggccc

SEQ ID NO: 175139 - RNA, 84 nt, Homo sapiens
gcaaggcgacgccagaggaggaaaggaagacaagccgcagggccgaggcagccaggcgcccagccggaaggcaggcgaagcccc

SEQ ID NO: 175140 - RNA, 80 nt, Homo sapiens
gagccacccgcccgcccaaggcccgcgggcgggagaacggaaaaccccaacccggacaaaaacgcggaggggaccagaga

SEQ ID NO: 175141 - RNA, 68 nt, Homo sapiens
cagaaggccccacgaaggcaccggggaagacagcaggcagggaaggaaaaaagacccaacgaagaaga

SEQ ID NO: 175142 - RNA, 60 nt, Homo sapiens
gccacagaacaggggaggcagccaggcagcccgggagagaagaggaagaaagcaaagaaa

SEQ ID NO: 175143 - RNA, 67 nt, Homo sapiens
ggagagaccggcggacaggcgccaaacggacgaagcaaaaacacggagacgccaaaaacacaaggaa

SEQ ID NO: 175144 - RNA, 69 nt, Homo sapiens
ccccccagaaggaccaagaggcagcaggaccgcggcggcgaacacagaaggggaccaacagggcggaac

SEQ ID NO: 175145 - RNA, 49 nt, Homo sapiens
caccggcccaagaaacagcgccgccccggcgggggcaccccgcaggggg

SEQ ID NO: 175146 - RNA, 116 nt, Homo sapiens
gacgaggcacagaaggccggaaacaccagaccgcgcccaccaagaccacccaacagccgagcaggcacccccagaccggagcccaagccgcagcggcaaaccagccagcaaggaga

SEQ ID NO: 175147 - RNA, 83 nt, Homo sapiens
cagcccacgagagccaagcgacaaggagacacggaacaaacgcaggacagcgaagagacacagaacggaaggagagcagcaga

SEQ ID NO: 175148 - RNA, 74 nt, Homo sapiens
aaacaccgccaagacacacaaaaagaagcagagagcgggaccagaggcgccgagcgggccacagccgaacgaga

SEQ ID NO: 175149 - RNA, 70 nt, Homo sapiens
cccgccccgcccaaaagaccaccgcccaacacaacacgcaggcgaccccaggaggagaaacaacagagca

SEQ ID NO: 175150 - RNA, 69 nt, Homo sapiens
ccaagcaagaaaccgaaagggaaacaaaggccagggcaggacagcagcccgcaacaggccggccagccc

SEQ ID NO: 175151 - RNA, 73 nt, Homo sapiens
acccgacgaagcaacacgaagaccgaggaaaagcgcgggccagcgaggcagggaagagacaccaggacccagg

SEQ ID NO: 175152 - RNA, 88 nt, Homo sapiens
agcacaagaagaagacgagcccgagagccccaaccagaaaccacagacgccgggaccaacccccacccacagacacaacccagccacc

SEQ ID NO: 175153 - RNA, 77 nt, Homo sapiens
aaaggaggagaacagcccaggcacgcgcacccacccacggcaggcacggccacgaagaggggcacacgcccaagcac

SEQ ID NO: 175154 - RNA, 63 nt, Homo sapiens
gggaaacaccacgaagcagccaaggcacagcgcacccgccccccggagcgcacgggccgagca

SEQ ID NO: 175155 - RNA, 79 nt, Homo sapiens
gaaaaaccccggaagggcggacaccccacacgccgccacccccaccggagacacgagaggcgagggacgacagagcaag

SEQ ID NO: 175156 - RNA, 77 nt, Homo sapiens
acaaaagagcggaggagcggcgaggggaaaaccaagacgaaacaaacgggcaacaacaaggacgaacaggaagacgc

SEQ ID NO: 175157 - RNA, 85 nt, Homo sapiens
gagaagaaggagaaggggaggagaaggcaagccggaaagagcgaaagaaagaagggggaggacaccagaggcggggccggaagcg

SEQ ID NO: 175158 - RNA, 51 nt, Homo sapiens
aaaaagacacgcagacggcccaaagcccagccaaggacccgaaaaacgagc

SEQ ID NO: 175159 - RNA, 55 nt, Homo sapiens
gcaacgcaccccacagcaagggacaaaccgccgggcgagccccgcgagcgcagac

SEQ ID NO: 175160 - RNA, 75 nt, Homo sapiens
ggaagcacacagccagcaaacccggcccagggggagcccggggcggaggaggaaagacccgccaggcccgggagg

SEQ ID NO: 175161 - RNA, 93 nt, Homo sapiens
ggcgagcgcgggagccgggcggcgagccgggggagcgccgaaaagcaccggagccgccgcgcaacgggagagaagcgccggccggaaagaaga

SEQ ID NO: 175162 - RNA, 83 nt, Homo sapiens
gcaagggcgagaccggcgagccgcaggaggcgcggccgagccccgacggccacccggcgggacggcccaccggcggaaagagc

SEQ ID NO: 175163 - RNA, 77 nt, Homo sapiens
cccaagcgcgcaaccccggaagccaaggagcaccgaggaggggggacaagaaaaagcccggaaaccgcgcaaagaag

SEQ ID NO: 175164 - RNA, 79 nt, Homo sapiens
cgagacacgcagcggcggccagggaccagaaaaaccagaagagaaaaaacaaaggggagaggcaccccgcgggacgacc

SEQ ID NO: 175165 - RNA, 53 nt, Homo sapiens
cgcagggcgcccccgacaagccgagaccaccaggagcagagcggaggcaacca

SEQ ID NO: 175166 - RNA, 72 nt, Homo sapiens
caagggaacaaggagaacaacgggacaagaagaggaaccacagggagccgcaggaggagccaggaggagaga

SEQ ID NO: 175167 - RNA, 76 nt, Homo sapiens
accagcggggaggagaggggcgccagcaagagacaacacggaggggggagaacgggcggagaacggaaaagcacca

SEQ ID NO: 175168 - RNA, 69 nt, Homo sapiens
cagaccagaagaagagcgccaacaagagaggaagaggagggcacagaaggaaggaaaccaccaccggac

SEQ ID NO: 175169 - RNA, 82 nt, Homo sapiens
cggccagcccccacaacggggaccaccgccccagcagacgcggaagggcaggacacaaccagacaacgagcacaaagcagcg

SEQ ID NO: 175170 - RNA, 73 nt, Homo sapiens
ccagagacccaagggaggaaaaggaagggggccgcagccaacacccaacagcagggcccgagggcaggacagc

SEQ ID NO: 175171 - RNA, 76 nt, Homo sapiens
agccaggccaggaagaaggcaacgagcccacgaacggcccaggggccggagacccccgcgccccaagcgcgccccg

SEQ ID NO: 175172 - RNA, 77 nt, Homo sapiens
gccgcccggcggccgcagccagcccgggggcccgaggagggaaccggccacggagagcaccaccgggaggcccacaa

SEQ ID NO: 175173 - RNA, 66 nt, Homo sapiens
gcaccagcacccgcagcccggaaccacgcaccagacaacacaggaagccacagggggcagcgcgga

SEQ ID NO: 175174 - RNA, 79 nt, Homo sapiens
aagaaagcaagacccaggacaccccgaagccgagaaagaggcaggaggggcggcaaagggaggcaaagcaagaaaggaa

SEQ ID NO: 175175 - RNA, 85 nt, Homo sapiens
cgcggcgaggacggggcgccggcgccgccgcccccgggccgcggccgcagagaagacacgaggccagagaggaaggaccagccaa

SEQ ID NO: 175176 - RNA, 77 nt, Homo sapiens
ggaggccgaacacgaccagccaggaaaccccaaacacggaggggcagacaccgcgcaggggacccggaggccacgcc

SEQ ID NO: 175177 - RNA, 69 nt, Homo sapiens
aagaggagagaagaagaacagagagaacaaaagagcagccgagaaagcgacaggcaggcccggacgccc

SEQ ID NO: 175178 - RNA, 69 nt, Homo sapiens
acggggccaaaacagacccacaacagggagcagaagaggggaagaaagagacccgcgggccccagacac

SEQ ID NO: 175179 - RNA, 83 nt, Homo sapiens
cggagccgcgccccaccccgccagcccagagccacaaaggcacggcgacgagcccgaaggaccgacgggaccagagcagaccc

SEQ ID NO: 175180 - RNA, 70 nt, Homo sapiens
acgggaggaccgcggacgacggccgcagaccgagaagaaaccgcaagaaagaaagcgggcacaacaaccc

SEQ ID NO: 175181 - RNA, 77 nt, Homo sapiens
ggaacccaagcagggcgaagggaacgcaaggcccccgaccacacgcccgcgcgagggaagcccaccggccacggcag

SEQ ID NO: 175182 - RNA, 76 nt, Homo sapiens
cagagcaggcagcaaaaagagcaacggcaggagccacccggaagccagaggaccaggcccgcccagccaggaaaac

SEQ ID NO: 175183 - RNA, 74 nt, Homo sapiens
cccgcgaaaggaggaggcacagaagcccaggagacagacaagccagaggacccccaacacacacgaggaagcag

SEQ ID NO: 175184 - RNA, 63 nt, Homo sapiens
gcacacgggccaaagcccccggcaacaaggagcaccaaagaacaaggacgaagagagacgcgc

SEQ ID NO: 175185 - RNA, 76 nt, Homo sapiens
aaggggcagcgagcaggacggggaaccgaaaggggcaggaagcgaacccagggaaaaagagcggaaggagcaccca

SEQ ID NO: 175186 - RNA, 82 nt, Homo sapiens
cgaaaagcaggcccagcaccgcccccaggccccaaacccgggaacgcccagccacaaacacccagcgcgcacacacagagcc

SEQ ID NO: 175187 - RNA, 77 nt, Homo sapiens
cgccggagaacccccccagggggaacgacacaacaagccggaagggaagcaggaagaagaagcgcacaaggagcaca

SEQ ID NO: 175188 - RNA, 77 nt, Homo sapiens
gaaacggcaagaccaaaaaacacaaaccaggcaacaggcagaaaaagaaccaggccccacaccggaggaccaccaga

SEQ ID NO: 175189 - RNA, 75 nt, Homo sapiens
gaaaaaggagaaagaacgaagggacaccgggcccacagaggaaggacaggacaacaacaccccacacaaagcggc

SEQ ID NO: 175190 - RNA, 78 nt, Homo sapiens
ccccaagggcgggaacagggcgcgggaaccccggagccggccgccccagcggagcccccggaggggaccaggacaccg

SEQ ID NO: 175191 - RNA, 87 nt, Homo sapiens
gcgccgagccacgcgcagcagaacacaaagagcacgcgccaccaaacccaaggagggacaggaggagcccccgcacaggaccaagaa

SEQ ID NO: 175192 - RNA, 87 nt, Homo sapiens
ccccagccccgccgccggccccgggcgcccggccgccgcacccccaggcaccacagagggagaccgcccccggggcgagagacccca

SEQ ID NO: 175193 - RNA, 76 nt, Homo sapiens
gaggaccaacaaacacaaagacgaacaaagacggcaacgcgcacagcgcagagaagcgcaaagccacaagccaggc

SEQ ID NO: 175194 - RNA, 113 nt, Homo sapiens
gcgccaccacgcagaccacaggaaaaaggaccgccaccgggcccaggaacccaagaggaggccagggacccaagggcggaccgccccaccaaaaaacacagaaacagggaaag

SEQ ID NO: 175195 - RNA, 80 nt, Homo sapiens
caacgcagagcacccggcgagacgagaacgcagagaacgagagcccagacagagaaagcagacacgaacaagccgagcga

SEQ ID NO: 175196 - RNA, 78 nt, Homo sapiens
cgggcggaggccagaagaggcgccagaacgaagacccacaggcaagaacacaggcagcaccccaacgcagccccgccc

SEQ ID NO: 175197 - RNA, 86 nt, Homo sapiens
gggacaagcaggaaacaagaaacaccaacacaaaaaaaaccaacagccccccaggagccaaggcgagcgcaacagcagggacaaaa

SEQ ID NO: 175198 - RNA, 86 nt, Homo sapiens
cggagcgggccacgcgcggaggaagcggagcgccgcgggggccggaaacagcgaggccgcagcaaaggcagccacaggacagaacc

SEQ ID NO: 175199 - RNA, 64 nt, Homo sapiens
ggaacaaagcccacagcaccgaagccagcgaagagagggggaaaaccccagacgccagaaagcg

SEQ ID NO: 175200 - RNA, 39 nt, Homo sapiens
cagggcacaccaaacccacgaggaccacccgcacccagg

SEQ ID NO: 175201 - RNA, 75 nt, Homo sapiens
agcacaccagcccgaaacccgacaggaaggaaggaaccaagcacccagggcaccgccgaccgaaaccgcaaacac

SEQ ID NO: 175202 - RNA, 60 nt, Homo sapiens
gcgcacagaggcgcagcgggccagcaggacgcagcaggccgaccgcgggccgcgcaccca

SEQ ID NO: 175203 - RNA, 100 nt, Homo sapiens
gggcagagcgagccggagaagagggggcccggggggaggaggggcaggcccggcgcgaggcagaagcacggagccacacaaagcggaagagaaagaccca

SEQ ID NO: 175204 - RNA, 74 nt, Homo sapiens
cagaacacccacacacagaggggaaagacccagagaagagggagagaacagcacacagaggcgcaaggggaaga

SEQ ID NO: 175205 - RNA, 75 nt, Homo sapiens
aggcccacacaggacagcgccggccacccaaagcacgggggcaacagagggaaacacacagaagaccgcagacca

SEQ ID NO: 175206 - RNA, 75 nt, Homo sapiens
cacgaaagaagacaaacacaacgagaggagggaacgaccaacacggaaaaagacacagggaaacaagagcaaacc

SEQ ID NO: 175207 - RNA, 74 nt, Homo sapiens
agagcgagcgagggggggcgcgccggaaaccggagcgcgcagcagggggagagccagcaaccggaagcaggaga

SEQ ID NO: 175208 - RNA, 122 nt, Homo sapiens
gacccgggcaaaggcaccacgggaagggaagaaggcgcgggagagccggggcgccggagggagggacaggagagaggcgggagccagaccggcgcagcagcagcccagaagcccgcggggcg

SEQ ID NO: 175209 - RNA, 68 nt, Homo sapiens
cgagacagagaccagccccaggccccagcgcgagagacacaggaacggggagcgcaaccccagaagac

SEQ ID NO: 175210 - RNA, 73 nt, Homo sapiens
ggaccacagagaaaccagagaccaggacagaaaggccacggaagcagagccccggagccagcgggggccaaga

SEQ ID NO: 175211 - RNA, 81 nt, Homo sapiens
cgcccaagccgcacagccgcggcggcagcagcaggagaggagagaagccgcccacagagagacgggagacaggaccgagcc

SEQ ID NO: 175212 - RNA, 74 nt, Homo sapiens
cgccggccgcggccgggaaggcgcagccgcccagaagccgaaaagcaaggcccccacaagcaacccgccacacg

SEQ ID NO: 175213 - RNA, 73 nt, Homo sapiens
gccccgcgccgccgcgcccacggccccgccagcaaggcggcgcgcccaggagacaaggccgacgcgcacgaac

SEQ ID NO: 175214 - RNA, 77 nt, Homo sapiens
gaacccaggaagcagacacaagaggagaaaagaaagccagaaggaaggaagcaacgaaccaagaaaaaacggaacag

SEQ ID NO: 175215 - RNA, 81 nt, Homo sapiens
ggcagaccgcggccccccgggcgcacaagcagagggccagaaccaccgccagagccgagaagagcagagggggggaccccc

SEQ ID NO: 175216 - RNA, 86 nt, Homo sapiens
ggagcgcggaacagcaggcccgagcccaccgcgccgggccccggacgccgcgcggaaaaggagaaccccacaccagaaccgaccga

SEQ ID NO: 175217 - RNA, 78 nt, Homo sapiens
ggaaagcacagcaccgacggggacaaacccgccagcagcgccagcaaaaccagcagcaggccagccccccccaaggcc

SEQ ID NO: 175218 - RNA, 60 nt, Homo sapiens
agacccggcaccaacagaccgccacacaaaaagaaccacaaacacacagagaaacaaccg

SEQ ID NO: 175219 - RNA, 59 nt, Homo sapiens
gagcggcggccacggcaccggcggggggcacgaggaaaggcagcagggagaccagacca

SEQ ID NO: 175220 - RNA, 95 nt, Homo sapiens
cgacgccgggcggaaaaccaccaaaaccggcagcgagccgagcaaaccaaaacaagaaggcagacaggagggcaagaaaccgcaaccgcaacgag

SEQ ID NO: 175221 - RNA, 81 nt, Homo sapiens
ggaccgaaacagaaacggaacaccaaggaccgaaggagaagaaggagaaggggaggagaaggcaagccggaaagagcgaaa

SEQ ID NO: 175222 - RNA, 69 nt, Homo sapiens
gcacaccgagccccacccagaccggaaccaggcaggaccagccgcccccaaaaaaagcagagcagacac

SEQ ID NO: 175223 - RNA, 43 nt, Homo sapiens
gaccgggaccaaccaacaggacacagcaggggccagacaacca

SEQ ID NO: 175224 - RNA, 54 nt, Homo sapiens
ccgggcgcgcgaggccagagagggggaggagccaagaaggcaagaagaggagcg

SEQ ID NO: 175225 - RNA, 53 nt, Homo sapiens
caaccccaaacccaggagggacacaccgccaggcccagcagaggggagaggac

SEQ ID NO: 175226 - RNA, 57 nt, Homo sapiens
agccaagggccaggaagcagagagaacaggagaccggaaaccgagagaaacgaagac

SEQ ID NO: 175227 - RNA, 62 nt, Homo sapiens
agaaaaaaggcaccaccccaaagaccaaggccaaaaaggggggacgcgggcgagaagccggg

SEQ ID NO: 175228 - RNA, 83 nt, Homo sapiens
gaggaagcacacacgcacgaggcaggggcaggaaccagcaggccacgcggaacagggccaacagagaaccaggacgaaagcag

SEQ ID NO: 175229 - RNA, 75 nt, Homo sapiens
ccgggcggccgcgcgagccggcggcccggagggggcggcggggcgacgccaggagcacaccgaaaagaaaggaaa

SEQ ID NO: 175230 - RNA, 66 nt, Homo sapiens
cgagcccccgcgagcagcccagccagcagcacaaaggaggacggggcggagaacggaaaagcacca

SEQ ID NO: 175231 - RNA, 78 nt, Homo sapiens
caggagcacgcgacagcgaggaagcgcaccacagcacaaaaggggcagagcggcgggaaaccaccaacaacaccccca

SEQ ID NO: 175232 - RNA, 51 nt, Homo sapiens
caagcgggggaccgaacaaggcaaaagggacagagcgacagcccaaggaca

SEQ ID NO: 175233 - RNA, 68 nt, Homo sapiens
aaccaacaccccggcagccgggaaggcacccgcagaagaggaaaccacaaaccacgagggaaaagcgc

SEQ ID NO: 175234 - RNA, 81 nt, Homo sapiens
ccggccgggcggcgcaggaacgcgaaccggcaggccgcgccaggagccaccaagcggcaagagcgggagcggggcgccagc

SEQ ID NO: 175235 - RNA, 74 nt, Homo sapiens
acagagggcgcagagggacaacggagcagcccaacccacacagggagcgaaacagaggggcagacagaaaccgg

SEQ ID NO: 175236 - RNA, 80 nt, Homo sapiens
accgggccagacagcgacagcagacccggcagagaacacaacaagcaccagccacagagcagcccgacggccaggaggcg

SEQ ID NO: 175237 - RNA, 77 nt, Homo sapiens
gcggccggcgaaaggagcgggccggcaagggagagaccacggccggccacaaagcgcccggaaggaagcggcgccga

SEQ ID NO: 175238 - RNA, 75 nt, Homo sapiens
acccgaccaacgccccagcagcccaagagaaccaaggaaggagaaggagggaacaaaaagaccccacggccgggc

SEQ ID NO: 175239 - RNA, 76 nt, Homo sapiens
ccacggaccaccgcaaccacaagcgcacccggggccggacggcaggcaacagaggcccacgaggaccggagaagcg

SEQ ID NO: 175240 - RNA, 83 nt, Homo sapiens
ggagcgcagggccagagccaggccgcccacagacgggggcccaaaacaccacccaggcacgacgccccacgggagcaaggagg

SEQ ID NO: 175241 - RNA, 67 nt, Homo sapiens
cacaggacggagaacgccccgaaccccgcacacgaggaagaacccgccggacgggagcccaggacca

SEQ ID NO: 175242 - RNA, 73 nt, Homo sapiens
cagcacagaacaaagcaacccccaccgaaagaacgcccagcaccgccaccagcaggagcaggacggaccccag

SEQ ID NO: 175243 - RNA, 72 nt, Homo sapiens
agaacgggaacgacacgagcgcacgcaggcaccggagacgcgggcagaaaaaggaaaggaaggcggcggggg

SEQ ID NO: 175244 - RNA, 75 nt, Homo sapiens
gccacgggagaagggcagcacggcagaggaaaggcaagggcagaaaagaggggaaaaggccagccgcacgcaggc

SEQ ID NO: 175245 - RNA, 85 nt, Homo sapiens
aggaaccacacgcgacaggcccccccgagaaaagagaaaggaagaaggacacagccaccaaacgcccagcccagggacaagaaaa

SEQ ID NO: 175246 - RNA, 74 nt, Homo sapiens
gacccgcccgccagaaccgcgcgccacccacaaccaggagaacggaagccagagaaaaggaagagagagcaaga

SEQ ID NO: 175247 - RNA, 67 nt, Homo sapiens
cgaaggagaccaggggccccaagaggaagacaggcccaccaggcaccaccaggccacggcacagacc

SEQ ID NO: 175248 - RNA, 73 nt, Homo sapiens
aagaggccagagcagacgaagaccaacgaaagaaaacacacacacacaacgcaggacccagcacccgagaggc

SEQ ID NO: 175249 - RNA, 70 nt, Homo sapiens
ggcaagacaaacgggaaagcgaaaacaccccacgagggggaaggagggcgaacaccgcgaaacgagacag

SEQ ID NO: 175250 - RNA, 78 nt, Homo sapiens
gagacgggcccgccgaaaggaccccccagcgacaccaggccaggccacagccgggagcgaccggaacacacaaagcca

SEQ ID NO: 175251 - RNA, 74 nt, Homo sapiens
agcagccaccagcagcccccagagcgggaccacagggcaaaaaaagagcgaaagggaaccgaaacgagagagaa

SEQ ID NO: 175252 - RNA, 85 nt, Homo sapiens
gaggcagccagaaccaagcggagagagcagcccggcagacgcagaaccaccacacgcccccaccaccaaccacggcaacaccgga

SEQ ID NO: 175253 - RNA, 63 nt, Homo sapiens
ccacaaagacacaggaccaaacccggagcaggaaaggacagggaagcaggagcgaccgcccac

SEQ ID NO: 175254 - RNA, 84 nt, Homo sapiens
ccgcggacccagcgcggcgacgccaggagaccccaagcgcacgccgagggaacacaggaccagcacaccacgggcccggaagcc

SEQ ID NO: 175255 - RNA, 69 nt, Homo sapiens
gggggccggcaagagcaggccagaaagcacggccccagaagccgccggaaaacccgcgaaaccaagggc

SEQ ID NO: 175256 - RNA, 76 nt, Homo sapiens
cccaccgaggagggaaacacccgaaacagcgcggaaaggaaacccgggaacaggcgcggaacagcccggaggagag

SEQ ID NO: 175257 - RNA, 62 nt, Homo sapiens
ggaggagaccaggcacccagggaggaggacggaggaggccccacaaaggccagagagaaccg

SEQ ID NO: 175258 - RNA, 76 nt, Homo sapiens
cccgggcggagcagcggcgggcgcggcggccgcgagcgagaggggagagaagccggacagagagcacagcaaaaaa

SEQ ID NO: 175259 - RNA, 71 nt, Homo sapiens
cagcaaagagaagaagaccagaagaagacccacaaacggaggcgggaagagaaagcagcaagaagcaagaa

SEQ ID NO: 175260 - RNA, 76 nt, Homo sapiens
gaagagcaagcgggggaccgaacaaggcaaaagggaaagagccgcagacgcacagcaaccaccggacccgaaggcc

SEQ ID NO: 175261 - RNA, 86 nt, Homo sapiens
cgcacaccgaggaaagcgcccgagggaggggggagaggcacaggaaacccagcagcgccggacccgggaagaacgggagccaaggg

SEQ ID NO: 175262 - RNA, 70 nt, Homo sapiens
cacccggacagggacaagaacggaaccgcgaaggaccccggcagccgcagccacccgcgccggccggaac

SEQ ID NO: 175263 - RNA, 79 nt, Homo sapiens
aagaaagaagccccacagggagaaccaaggaagccacaaacagacagacacacgcgcgcaacggggacggaggagacga

SEQ ID NO: 175264 - RNA, 60 nt, Homo sapiens
gaggcccaacagcggaacacgagcaggggcccaaaagacggccaggagacaagcccaagc

SEQ ID NO: 175265 - RNA, 49 nt, Homo sapiens
cagacacacaacaccccagggaaagacaaggagccgggccgagaaaccg

SEQ ID NO: 175266 - RNA, 67 nt, Homo sapiens
agaaacgaccaccgggccgggcccaggaggcccccaacggacaaggcagcaaacgaacacaagagac

SEQ ID NO: 175267 - RNA, 55 nt, Homo sapiens
accaaacaggcccccagaagagcggagagacgaaagagcgacggcggcccagaca

SEQ ID NO: 175268 - RNA, 88 nt, Homo sapiens
gcccacagcaccacgcagcccggaaaagaaaacaaggcgaccgcagccccccgcccggaggccgggaaggccgccccccccacacacc

SEQ ID NO: 175269 - RNA, 67 nt, Homo sapiens
gagacagagagcaagagcaccccaacggcccagagcccggaacgccggggggggcacagagccccgg

SEQ ID NO: 175270 - RNA, 55 nt, Homo sapiens
cgggaccgggggggaacggagaagaaggaacgccacagaggagggggacgccaga

SEQ ID NO: 175271 - RNA, 83 nt, Homo sapiens
gcaaggggccaccaggaggccagggggcgccaggggcagcccggaacccgaggagggaccgggagcggcgagaacacgaacgc

SEQ ID NO: 175272 - RNA, 31 nt, Homo sapiens
ggggggaccgcacgggcaagcgcccgcccag

SEQ ID NO: 175273 - RNA, 67 nt, Homo sapiens
ccccgccccccggagccgcgagcacccaaggcgaccccgcacacacacccaccagccacggcagccc

SEQ ID NO: 175274 - RNA, 72 nt, Homo sapiens
ggacacaaaccaaaacgagcaacgcccagaaagcagcaacaagggacgacccaggaaaacaagacgaaaaga

SEQ ID NO: 175275 - RNA, 73 nt, Homo sapiens
ggcaggcggcacaggagagaacgaagaagacacgaacaggggacgaaaaacgagccgggggcaaaaggaagag

SEQ ID NO: 175276 - RNA, 53 nt, Homo sapiens
aaaagaggagcccgcaagaggccagcgaaaaccgaaggggaggcaagcagggg

SEQ ID NO: 175277 - RNA, 61 nt, Homo sapiens
cagggccggggaaccccgcgcccgggggccaaagggcgagggcacaaaaaaccacaccccc

SEQ ID NO: 175278 - RNA, 61 nt, Homo sapiens
gagaacggcacacgcgagcggccgcagacaggaagagagcccccgccgagaaaagacgaag

SEQ ID NO: 175279 - RNA, 79 nt, Homo sapiens
acaaggcaacagaaagagcaacagcagggcaacaggacaaccacaccgaaggccaccccaagaagaggggacagaaaga

SEQ ID NO: 175280 - RNA, 82 nt, Homo sapiens
gccgcagagacgcgcaacccagacaggagaaagccacagagaagaagaagagaggaggaccgccccggcagcgacaggccag

SEQ ID NO: 175281 - RNA, 88 nt, Homo sapiens
gcacggccccggccccccccagccgccgcccggagagccgcccgccgaggagcgacgcaccgcagcgagcgacgcgcccacggaggag

SEQ ID NO: 175282 - RNA, 69 nt, Homo sapiens
gcaagacgggccggagacgcagacgggagaccaaccaagcaacgccacaggggagggagacgcggagcg

SEQ ID NO: 175283 - RNA, 70 nt, Homo sapiens
cccagcaccgagccagcaggcagcagacaccggaggagaagccacccggagaaaggccacggccccagcc

SEQ ID NO: 175284 - RNA, 82 nt, Homo sapiens
cccggcccggcggcgcgccccgcggcgcccgcgccagggcgcccgcgccggcagaggaggcgagcacccgccagggagagga

SEQ ID NO: 175285 - RNA, 54 nt, Homo sapiens
gagcgggagaaggcgcgcgcaagcacgcgaggaggcacccccgacagacaaacc

SEQ ID NO: 175286 - RNA, 74 nt, Homo sapiens
caccacggcaccggcgggcccaccgcggcacccggccaccaagaaccgcaggccaacgggaaccgggccgcaga

SEQ ID NO: 175287 - RNA, 74 nt, Homo sapiens
cacagagaagaccgcgagggcgcccaagggacaccaccccggcacgagaccggcggaccccggagaagaggccc

SEQ ID NO: 175288 - RNA, 77 nt, Homo sapiens
agaccaacaggaagccgccagacaaaagggacggggccacggcgcggcacaggcgccggaggcgccccggaacaaag

SEQ ID NO: 175289 - RNA, 74 nt, Homo sapiens
gaggaagcaggcggagcacccacgaacaccacgacgaaaggaaaagaagagaccgggaggacggagaagcgcag

SEQ ID NO: 175290 - RNA, 86 nt, Homo sapiens
cgcggagaccgcgggaccggcgcgcagcgaggccgaccacggcagaaccccaaagccaagggggaaaaccagcgcccggagcgcaa

SEQ ID NO: 175291 - RNA, 82 nt, Homo sapiens
cggacgcggccccccgcgggagcccccagcaggacagaaggagaccggagccgccccgccagaaagccaggggcaccaccac

SEQ ID NO: 175292 - RNA, 66 nt, Homo sapiens
caggaaacaacaacagcggcacgccgagcaaggaggagccaagggaagaagcagaagcaagcccag

SEQ ID NO: 175293 - RNA, 73 nt, Homo sapiens
caagaagcaggcaggaccagaaaagggaaaagaacagccagcgggccacaccgcgcacggaagaagaacgccg

SEQ ID NO: 175294 - RNA, 77 nt, Homo sapiens
cgaccgcgagaccacaagaggggaagcgacagagaaccacagacggaggcggccacgcaccacaacggaggagaaag

SEQ ID NO: 175295 - RNA, 39 nt, Homo sapiens
gaggccaccaggacagccacaggggggcccccccgggga

SEQ ID NO: 175296 - RNA, 72 nt, Homo sapiens
caccagggggcggcaccccggggaccaacagcaacggacaggacagaaccagagcccaaggaagcaaagcca

SEQ ID NO: 175297 - RNA, 58 nt, Homo sapiens
gaagaaagaagccccagcaggcacagcagcccggaaacgaggcacgcaggcaacggca

SEQ ID NO: 175298 - RNA, 73 nt, Homo sapiens
gcccggacacagaagaggacagagaacagaaagccaaagggaggacaccagagagaaacaccccgggagccaa

SEQ ID NO: 175299 - RNA, 87 nt, Homo sapiens
cgggaacaggcaccaccaccaagcaaaaccccggacaagaaagccagagaaacgacaccagggccgccgcacaagacccagcccgca

SEQ ID NO: 175300 - RNA, 81 nt, Homo sapiens
gcccccgagccaggaagccaccagagccaggcagccaccgggggcgggcccaaagggcccgaagccccccaccagaggaag

SEQ ID NO: 175301 - RNA, 74 nt, Homo sapiens
ccccagcacggcaaagcccggagacaagcgcaagaacgccccggcaaggacggaggcaggcaccaccaacagcg

SEQ ID NO: 175302 - RNA, 52 nt, Homo sapiens
gccccgggcaagcggcccgggaagggcccgggggcacccgaaaagaccagca

SEQ ID NO: 175303 - RNA, 83 nt, Homo sapiens
cagaagagccaaggaaaaacagcaagaacccaaaagggagagcacgagagggaaggaaaagacccccacgagaggaagcaaca

SEQ ID NO: 175304 - RNA, 32 nt, Homo sapiens
cagcgacgaagcaagagagacgggggcaccag

SEQ ID NO: 175305 - RNA, 53 nt, Homo sapiens
caggcgcacaccagggaggcaagcaggggggcaaaggaaagaaggcagaaagg

SEQ ID NO: 175306 - RNA, 77 nt, Homo sapiens
agcgaaggggaaggcgccgaagaggacgaagcggcgcacaacaaggaaagaaccccacccaccgcccccccgcaggg

SEQ ID NO: 175307 - RNA, 77 nt, Homo sapiens
aaaccggagaccacccacaagaagacagcgcgggcagaagaagcgcccaggagaggcagaagagcaccacaggcaca

SEQ ID NO: 175308 - RNA, 83 nt, Homo sapiens
cgaggccgcaggggagcccggcagccgcccggacagccaggaaggcaggaacagaccaacccccggcccccggaaaaccaacc

SEQ ID NO: 175309 - RNA, 71 nt, Homo sapiens
cacccaacggaggccacaaacgcaagcaagagggcacagggagacagcgcaagagccgaacgacagaagac

SEQ ID NO: 175310 - RNA, 75 nt, Homo sapiens
ggagggacagggggaagcagagccccacgaagagccgaagacaaggaggacgcccagacgagaggaaacgaacac

SEQ ID NO: 175311 - RNA, 77 nt, Homo sapiens
gggccgcgaaccgcagacagcggccaagaagacacaaaggacggaggcacgacaccagcaggaggacccacccggcc

SEQ ID NO: 175312 - RNA, 51 nt, Homo sapiens
aaaagccagaaggagaggccggggggggcacagagccccggaagacagccc

SEQ ID NO: 175313 - RNA, 44 nt, Homo sapiens
ggcgggggacggcgccccgggaaggggggaaaaggaagagagag

SEQ ID NO: 175314 - RNA, 52 nt, Homo sapiens
gacaaacgaaagaccacacggaggagcgcaacaggagacgaacccagaccag

SEQ ID NO: 175315 - RNA, 45 nt, Homo sapiens
agggaaaccagccaaggaagaggccagaccaggagcgaccgggag

SEQ ID NO: 175316 - RNA, 78 nt, Homo sapiens
ccgcagagccccccagcagacgagcccagaccgacagcagcgaaagaccaggcaccgaggagggccaaaggagaaacc

SEQ ID NO: 175317 - RNA, 74 nt, Homo sapiens
acgggaccaacaagcacaagcagaggcaggaagaagaacaggaagagccagaagacaagggaggcgaggacgga

SEQ ID NO: 175318 - RNA, 62 nt, Homo sapiens
accgcgcccgcggagagcccaaacaccaccaccaagacgaggagcgccaggaaagaggcaga

SEQ ID NO: 175319 - RNA, 75 nt, Homo sapiens
aaaagaggaaaagaaagcaggcaaagaacaaacgagcagaccgcagccaaggaaacggaacgccaagcgaagaag

SEQ ID NO: 175320 - RNA, 76 nt, Homo sapiens
ggaggaaagccagacaccacccgcccaccccggaaacacgaagcccggcccagagccccgacaacagacaggaaac

SEQ ID NO: 175321 - RNA, 78 nt, Homo sapiens
gcggagcaggcacgagcgcggcgcggagccccggaagcccacagcaagcacccgccgaccgcccagcgacagaagaca

SEQ ID NO: 175322 - RNA, 113 nt, Homo sapiens
accccagacccggaaaccagaacgggcagccagcaagcccaaacccaaaggggaggaaccagaggagggaccgaacaggacgccacggggaaccagaacacaccggagccgag

SEQ ID NO: 175323 - RNA, 73 nt, Homo sapiens
caggggcgggcggcagaacagccaagagcgcggaacgcgggaaaggggcccagacagcggagcagcgcaagca

SEQ ID NO: 175324 - RNA, 36 nt, Homo sapiens
ggaccagcagccaccgggcagcccaaagagaacgaa

SEQ ID NO: 175325 - RNA, 78 nt, Homo sapiens
aggggaccaggcgggagaccagagcccaagagcaggacgcaagcagaaagcaaagaaaagagagacacgcggaaaaac

SEQ ID NO: 175326 - RNA, 103 nt, Homo sapiens
gaagccggagcgcgcggccgggagcacgggcgccggcaagacaagaggcagccagcggacgggaccccaggagcaagcacaagcaaaaccacacacggaagcc

SEQ ID NO: 175327 - RNA, 58 nt, Homo sapiens
aagggcacgggaagaccggaggggacgaagaacggcaaggaccagaaggacccaagga

SEQ ID NO: 175328 - RNA, 68 nt, Homo sapiens
ggaccacacaagcaaaagagacaggagagacaacggaggcaagaaagacggagaagcgagaagagacc

SEQ ID NO: 175329 - RNA, 79 nt, Homo sapiens
gccaacgcaagcgggcgggggacgaggacgacaccgaccccgccgagcggcggcagagcaacacaccaggaagcagagc

SEQ ID NO: 175330 - RNA, 57 nt, Homo sapiens
gagacgagacgagaggaagagaccaagaggggggagaccggaggacccccaaacaac

SEQ ID NO: 175331 - RNA, 74 nt, Homo sapiens
acgaaacaacgcgcaaacaagcaagacgagcaccagcaacgccccagcaccgcgcaccaaggaagacacaagaa

SEQ ID NO: 175332 - RNA, 72 nt, Homo sapiens
caaggcgcccaaaacaagcgaagacaggacgcggcacccagacggaggcaggggcaacaagcacacaagccc

SEQ ID NO: 175333 - RNA, 73 nt, Homo sapiens
acacaagcgcaccagccaaccgagccacacagaaagaaaaagagcccaagacccaccgagacgaagacgacca

SEQ ID NO: 175334 - RNA, 87 nt, Homo sapiens
caacaaagcgaagggccaaccaggccacgaagacggcaaggaggaaaggaagaggaagacggcaagaagcgaaaaagacgaagaaag

SEQ ID NO: 175335 - RNA, 75 nt, Homo sapiens
agccaaagccagcagcggccgcgggagggcgaccgagccggagagagaacaacaggggggagaggagagaaccag

SEQ ID NO: 175336 - RNA, 71 nt, Homo sapiens
ggcaagccgcaaggaagaggccaggcaggaaccagcaaggaaagagcagacaagggcccacaccaaagcca

SEQ ID NO: 175337 - RNA, 78 nt, Homo sapiens
cggacgaccagagaggaaagagccaggacaggaggcaaagagccacccagaggcaccccgagagacgggacaccaggg

SEQ ID NO: 175338 - RNA, 82 nt, Homo sapiens
gcaaccgcacaacagggaaaaaaacaaggccaaacccggacagacacaggaaacggaacgaaacggcagcagcaagagcaag

SEQ ID NO: 175339 - RNA, 68 nt, Homo sapiens
ggcgccgcgcgagccacccagcgagacagagaagagggcacagaggaagcgaaccgggacgcagcagc

SEQ ID NO: 175340 - RNA, 76 nt, Homo sapiens
gccgcgacaccgaaggaggaagagagaggacaaagaggcgaagagagacacggcaacagaagaaaggacgacagag

SEQ ID NO: 175341 - RNA, 71 nt, Homo sapiens
accacggcggcgccgaggccccaagacgcaaacagcagacggaagaccccacggcaaaaccacacccgagg

SEQ ID NO: 175342 - RNA, 77 nt, Homo sapiens
acaaacggccagcagcgaacaggaacagaagcagagacagaagcccaagccagaagcggcaacccgacaggagaagg

SEQ ID NO: 175343 - RNA, 57 nt, Homo sapiens
gccgaagccgcagggaggggaaacgaagcgcacgaaacaccaaggcaggacagacaa

SEQ ID NO: 175344 - RNA, 79 nt, Homo sapiens
caccgggacggaccgagaccggaccgagagcggaccgagagcgcgaaacgcacgagaagaaggaagccggaaggaaaca

SEQ ID NO: 175345 - RNA, 73 nt, Homo sapiens
ccgcggacagcgacccaagcccaaggccacagcgaagggagacggaacacaccaagaaccccacgggccagag

SEQ ID NO: 175346 - RNA, 71 nt, Homo sapiens
aagccgccacagcacaaacggccagaggaagagaaacagagcaacgaacaggagagagaacaaggaagaac

SEQ ID NO: 175347 - RNA, 73 nt, Homo sapiens
ggacggaccgagaccggaccgagagcggaccgagagcgcgaaacgcacgagaagaacgagaccgggacagcgg

SEQ ID NO: 175348 - RNA, 81 nt, Homo sapiens
cccgcggcgcggggacccgcgagcagggggccacgggccccgaccgcccacaagcgcacgggggcacccaacaccgaacga

SEQ ID NO: 175349 - RNA, 42 nt, Homo sapiens
aagaaaccaacaccgcaagaacaagagaacgggcaacccaga

SEQ ID NO: 175350 - RNA, 86 nt, Homo sapiens
gccggaccccagcacacagaagccgagacgggcacccgagaggaacacagcagagaagcaggagacgaacaacggaacgcaggaag

SEQ ID NO: 175351 - RNA, 75 nt, Homo sapiens
cgacagagacggcggagaccccgaaggcgcaaacgacaccacccgaccgaggagcgccgcgcaggcggaggcaag

SEQ ID NO: 175352 - RNA, 73 nt, Homo sapiens
cgaagcccagggccgagcccgccgcccccccacgaagcagacccaggcccaggaaggagcccccccgagggac

SEQ ID NO: 175353 - RNA, 77 nt, Homo sapiens
ccaggccaaggaaaaccggcgacccaagcagggaaagaaaggcaaagcgagcaagagggagaccaaccaggcgggaa

SEQ ID NO: 175354 - RNA, 79 nt, Homo sapiens
aacgacaggcagccagcggcagaggacgcacggcaggaaacaaagagccccgggaaaagaaaaaaaacgccccaaacgg

SEQ ID NO: 175355 - RNA, 68 nt, Homo sapiens
gcccccaagcccacccaccagggaagcccgcacgcggaagcgccagagagccaggaacaaaaggggaa

SEQ ID NO: 175356 - RNA, 70 nt, Homo sapiens
ccacagccaccagagccggcagcaaagagggaacaggcccccaaaggaccaaaacgcaaccaaggaaaag

SEQ ID NO: 175357 - RNA, 37 nt, Homo sapiens
caagaagaacacacccagcaggaccagggccgaagag

SEQ ID NO: 175358 - RNA, 83 nt, Homo sapiens
agaccccgagaaaccgccgaccaagagcgaagcgacgggcaccacacacgacacgagaagggggccagcggaagaaggaaggc

SEQ ID NO: 175359 - RNA, 31 nt, Homo sapiens
gaccaaggaagcaaaacagcaccaggggcgc

SEQ ID NO: 175360 - RNA, 49 nt, Homo sapiens
ggacgaggccgacagcacgccgagaaggacgaccgagacagagaagaag

SEQ ID NO: 175361 - RNA, 60 nt, Homo sapiens
gccagacccaggagagcaaggcccagaaagaggagaaaaccccccacaaccggggaagac

SEQ ID NO: 175362 - RNA, 87 nt, Homo sapiens
ccacggcgccccgcaagggcgggaaggaagagccaaccgcgcaacgaaccgcacccccccaaccccgaacgggcccgcccagccgca

SEQ ID NO: 175363 - RNA, 78 nt, Homo sapiens
caacagccggacccaacagaggcaggagacaaaccaccaggaacccgaaaccaaacacggagggaaacaggaggaccg

SEQ ID NO: 175364 - RNA, 78 nt, Homo sapiens
gcacgagcggaccgcgagagacgagagcacgacacggccgcacgggcccacgccaggagggcgagacagcccgcccga

SEQ ID NO: 175365 - RNA, 76 nt, Homo sapiens
ccacacagggccgccaccaacagagaagacagagcaccaacgaggaagacagaccgcgaggccacacccaagaccg

SEQ ID NO: 175366 - RNA, 83 nt, Homo sapiens
acaacaccacagccggaccgcacccgcaccgccaaccacgggcgaggaggcgccgcgcaggggcggggcaagaaggaaggcca

SEQ ID NO: 175367 - RNA, 70 nt, Homo sapiens
ggggaggacgagcgcccgaagcagcggaccaacaaacagaagggaagcaggaaggaacaaccgagccaaa

SEQ ID NO: 175368 - RNA, 69 nt, Homo sapiens
ggccgcgacgcaggcgcacggagacccgccggcagagacccccacccagaagaccagcgggacagcaga

SEQ ID NO: 175369 - RNA, 70 nt, Homo sapiens
aaagaccggaaacgcacccgcgaaagagagacgacggaaacaggaccgaggccgcgacacagagaaaccc

SEQ ID NO: 175370 - RNA, 75 nt, Homo sapiens
ggggcgaaaagggacaagcagagcacgacagccggcgaagaagaagcaggaaaacccccgaagacaaggaggacg

SEQ ID NO: 175371 - RNA, 88 nt, Homo sapiens
gcgggagaggagagaaaggcggaagacgagggaaaagaagaccccggagcaggcccgaaaggcggaccagccagaggccccgaaggca

SEQ ID NO: 175372 - RNA, 72 nt, Homo sapiens
gaaaacgcggcaaggccaaaaaggcacacgagagcacgaaaaagagaaaaagaagaagaacccggcaagcca

SEQ ID NO: 175373 - RNA, 55 nt, Homo sapiens
cgcagcccccgccaccgcagagaggaacaccgggccaggcggcggagccgaccaa

SEQ ID NO: 175374 - RNA, 54 nt, Homo sapiens
caaagcacaagaagaagacgaggacaaagagaggggcggggccaccaccgccgc

SEQ ID NO: 175375 - RNA, 72 nt, Homo sapiens
ccagcaccgcccgcgcgagggaggaagagaacacccaccggcacaacacacaaaggcaaaagcagaccggaa

SEQ ID NO: 175376 - RNA, 72 nt, Homo sapiens
gggcagaacccagaggcgggaggggccgggaggcagaggggcagggagccggccgacccccgaccccggcgg

SEQ ID NO: 175377 - RNA, 75 nt, Homo sapiens
cgcgccgcgccgcgccgcaccccgagcgaccgaccagacaaagggagcaccagccagaccgggaagaaacgaagg

SEQ ID NO: 175378 - RNA, 79 nt, Homo sapiens
agccagggcagacaaggaaaccgagcagacccacccacaacaccaccgacagaggagcccaggaggagaggcaccaaca

SEQ ID NO: 175379 - RNA, 77 nt, Homo sapiens
aaagagcaaaagcgggagaggggaggaaaccgcacacccagcaaccaggcaaggaaaggcacggacaaaacaaccga

SEQ ID NO: 175380 - RNA, 59 nt, Homo sapiens
gagccgccaaagccagacggaacaggaaaaagggcaagaagcaccaaaaggaagagaaa

SEQ ID NO: 175381 - RNA, 92 nt, Homo sapiens
gggagaacaccgaagcccccacaagggaagaaccacagcaagaaagcgcaaggggaacgcacaacacagcaaaggaaccagggaccacaaag

SEQ ID NO: 175382 - RNA, 71 nt, Homo sapiens
aggaaaagcacccaaccggcccacgagacaagaggaagcagcaggccgggaacgccacacaacagggcccc

SEQ ID NO: 175383 - RNA, 68 nt, Homo sapiens
ggccggagcccagccgcagcgccaaagaccgggccagagggagaagaaaaagaagaaagcgacaaccg

SEQ ID NO: 175384 - RNA, 77 nt, Homo sapiens
cagccaccaggggaagggagaacaagaaggccgcgggaaaggcaaaaccccaagaggggacgaaggaggagggcgcc

SEQ ID NO: 175385 - RNA, 76 nt, Homo sapiens
aggcaccaagacgcaggggggaaccacagcgacaagcccaccaccacggaggccaccagacgagggggagccagag

SEQ ID NO: 175386 - RNA, 73 nt, Homo sapiens
gacaccccaacaaagcgcccagacggagcaacgacacagaaaggcgcgggggagcaagcggagccgacagcgc

SEQ ID NO: 175387 - RNA, 71 nt, Homo sapiens
gcaccacaccccgccgccccccggccgaaaaggcgaccgccccaaggaaccacggaacaggacacccaacc

SEQ ID NO: 175388 - RNA, 76 nt, Homo sapiens
aggcagaagaacggagacacggggaaagagaaggacccgaaaggcacccagggggcaggaacaggagaaaacgaag

SEQ ID NO: 175389 - RNA, 81 nt, Homo sapiens
gaaacaggggccacggagccacggccacggccgcaagccgggacacggccagggccggaagaggagagaccgggaccaccc

SEQ ID NO: 175390 - RNA, 72 nt, Homo sapiens
gagagcgccaggccaaagacccggaacagagagcaacaaccccagggcaaagacaccgaaggaacgggacag

SEQ ID NO: 175391 - RNA, 79 nt, Homo sapiens
aaaccccaagaaccaaacggaagaaggcaggaccggaccaagaccgccggacaagggcagcccggaccggaaagaccaa

SEQ ID NO: 175392 - RNA, 79 nt, Homo sapiens
ccacaaggggacacggcccgacgcggagggccggcaacggccacagcaccgggggccaggggagagcaagaaacaggga

SEQ ID NO: 175393 - RNA, 87 nt, Homo sapiens
gacgacggaggcccggcacacagcccagccgacggcagagcagcccccacagcgggcgcaagcccggagaaaacaggacccggaagg

SEQ ID NO: 175394 - RNA, 78 nt, Homo sapiens
caaggccaagccccaagcagcaccccaagcagggggagggcagagacaggcaacagacggcaacgaaaggcacaaaaa

SEQ ID NO: 175395 - RNA, 73 nt, Homo sapiens
cgagaggcagggagcggcgaggccgaagaagagcggaccaacagcgcacccaacagaaaacacacgcccgcgc

SEQ ID NO: 175396 - RNA, 48 nt, Homo sapiens
cacccagaggagcaacgccagaaaaacggaaccgggagaaaacaagcg

SEQ ID NO: 175397 - RNA, 86 nt, Homo sapiens
agaagccaccaagaggcaacagacagaggaccaggagcaccgcccagcaaacagccggcaccaggagcagcaccagagcgaacgag

SEQ ID NO: 175398 - RNA, 81 nt, Homo sapiens
gcgcccagaagaagggaaggcgcgaggaggaaaggaggacgaggccagaggcacggacgaccccggagagagcgggcgagc

SEQ ID NO: 175399 - RNA, 76 nt, Homo sapiens
caccgggaacgccgacaagagacgccggacagcgacagggcccaggagcacgggcaggcaaaagagccgggaacaa

SEQ ID NO: 175400 - RNA, 50 nt, Homo sapiens
gccccgagaggggaacagaaggcccgggaagaggaccacagcaaagggca

SEQ ID NO: 175401 - RNA, 81 nt, Homo sapiens
gcccgagcgcgagggaggagggcgccggcgcccggggaggcgcacggggaaggcccagccgcagccacccaaggcgccccg

SEQ ID NO: 175402 - RNA, 68 nt, Homo sapiens
aaaagcaggagggacaagaggcagagacagaacagaggaagggagaaaggagaaaacaccagaaaaag

SEQ ID NO: 175403 - RNA, 90 nt, Homo sapiens
cggagccagcggcgaggaggggccccagcagcccccgaaggcccacaggacaggagagaaagacgacaaagaaccggcgcgcaaacgcgc

SEQ ID NO: 175404 - RNA, 66 nt, Homo sapiens
gccggacgcgagagaaaaggaagcggcgcgggcccccccacccccaagaacccacaaccccgcccc

SEQ ID NO: 175405 - RNA, 80 nt, Homo sapiens
accgaccgcagacgagaacgggagaagacccggacacaaaaacccaggaaaggaacaaagaagaaagaagaaaaaaacag

SEQ ID NO: 175406 - RNA, 76 nt, Homo sapiens
ccacgacagagagcagcgcagaccccggcagaacacggcccacgagagcagaaacaccagaggccgcagcaagaga

SEQ ID NO: 175407 - RNA, 75 nt, Homo sapiens
cgggcggaccccacgcggggggggccaagagacagggcacaccaaacccacgagcgagccacccccggcgcccgc

SEQ ID NO: 175408 - RNA, 83 nt, Homo sapiens
cgccaagaagaaccggaggaggaagagcgcacaaccaagagggcaaaaacgaaagcaacggagccagaaaggggccacagcac

SEQ ID NO: 175409 - RNA, 64 nt, Homo sapiens
acggaagccgacagacaaccagggaaacggagaaagaaggcgagaaaggacaagccaggaccca

SEQ ID NO: 175410 - RNA, 69 nt, Homo sapiens
gccagaccgcgacacgagcagcgcagggaagcaagagcaaggcgaacaagaggcgccagcgggcgcgcc

SEQ ID NO: 175411 - RNA, 80 nt, Homo sapiens
gccaaaaaagaccccccgaagacgaagccagaagagcacagcaaagccaagccaacaggaggaacccggaagaaaaaaaa

SEQ ID NO: 175412 - RNA, 71 nt, Homo sapiens
acccagaagccccgggggaaaggaagaccgagagcaagcaaagaagccaaacaaagaagcagaaccaagaa

SEQ ID NO: 175413 - RNA, 80 nt, Homo sapiens
ggagacaacagaccccaaccccaggcgccagccggcgggccaggagcgaagaagcaaacagcagcaaccaaagaagaaaa

SEQ ID NO: 175414 - RNA, 69 nt, Homo sapiens
accacggcaaaccaacaaggaaggccgcggacccccccccccccaccccacaggagaagagacgaaaga

SEQ ID NO: 175415 - RNA, 59 nt, Homo sapiens
gcccgagcaagcacagggacagccgaaccaagacgggagaggaagacgcgggaaagagc

SEQ ID NO: 175416 - RNA, 112 nt, Homo sapiens
agcgagacaccgaacaagcagcaccgggggggggcagcggaagggggcccgaggcaccgcgagccacgaggaagaccgcagcagcgggaccgaagagggcacgaggcaggcg

SEQ ID NO: 175417 - RNA, 56 nt, Homo sapiens
caaggaacgcccgacccacaaggggccccccgggccgaaaggaagcaccccgagca

SEQ ID NO: 175418 - RNA, 52 nt, Homo sapiens
aagagaggaagaagaacgacccgcccggggcagcagggcgaaagcagaggaa

SEQ ID NO: 175419 - RNA, 56 nt, Homo sapiens
gcgccacggccacacgcccagcgagcgccccacacaggccggagagacacagggcc

SEQ ID NO: 175420 - RNA, 65 nt, Homo sapiens
aaccacagaggagcgcagccagacccgcgaccaaccccacacgcgacaagaaaaccaaaacccaa

SEQ ID NO: 175421 - RNA, 44 nt, Homo sapiens
ccccgcagccccgcccaggcccggaccccggaggaaaagcggaa

SEQ ID NO: 175422 - RNA, 78 nt, Homo sapiens
ggaggaagaaccaacagagaaaaaaaccagaaacaacccaaacccccaagaggaccgagcgaaaaaaaacgaaagaga

SEQ ID NO: 175423 - RNA, 82 nt, Homo sapiens
gcgggcggccgggccccaggcagacccgaccgaccagcggcgggagaggagagcgcaggaaggagaagaccaaaaccacgac

SEQ ID NO: 175424 - RNA, 46 nt, Homo sapiens
agggggggaccgaccgcaacagaacggacccggcacgaagacccca

SEQ ID NO: 175425 - RNA, 86 nt, Homo sapiens
ccaccggggcaaagccagaccagcggccgggggcagaccccagcccacaacccacgcgcaccgggcccaacgcagccaggcaagaa

SEQ ID NO: 175426 - RNA, 82 nt, Homo sapiens
gcgagcgagggggcggcggcgacagccaggcccggaagcgagggcggccgcgccggcccagggaggccaacagacccaaccc

SEQ ID NO: 175427 - RNA, 73 nt, Homo sapiens
gccagaaccaagagacagccgaaggcaacggcagagagagcgacgcgcagcgccgccgaccgggggagcggcc

SEQ ID NO: 175428 - RNA, 66 nt, Homo sapiens
cagcccggacaacagccacgcacacagcaaaaaacaaagggcaaaggacacaccgcacaaacggcc

SEQ ID NO: 175429 - RNA, 58 nt, Homo sapiens
acacacggccccccacgaagacaaaaaggaaagggccgagaaagaagagaggaagaag

SEQ ID NO: 175430 - RNA, 78 nt, Homo sapiens
gaaaggagcaaagcaacagaagacaaggcgcacacacaagaaaggcaacaaaaccacgcagaaacgggggagaaggag

SEQ ID NO: 175431 - RNA, 73 nt, Homo sapiens
agcacagccaggccgggaggcccgggggggagccacaccaaggcagccagcaagcacgagcaggcaccagacc

SEQ ID NO: 175432 - RNA, 80 nt, Homo sapiens
cccggcacgagcggccgcggccaggcgacgccacccaagacacaaacggcgacacagccgggaggaccagcccaagggca

SEQ ID NO: 175433 - RNA, 82 nt, Homo sapiens
aaggcacgcaaaaacagccaacgaaagaaacggcgagaaagaaacccgggccccaggagcaccggaggcaaaaagggcccca

SEQ ID NO: 175434 - RNA, 79 nt, Homo sapiens
gcgcccgcagaacgaggagcagaaggagcgcaacggaaccgcgaccccccgccggagagagacgggcaagccaccacac

SEQ ID NO: 175435 - RNA, 82 nt, Homo sapiens
cgggagagcgaccagggacaaaaggagcagaaggcaagaaagggagaagccagaaaagcagaaagagacagcgggaaaacgg

SEQ ID NO: 175436 - RNA, 78 nt, Homo sapiens
caaggacacagagcacaagcccaacaccaacagggccaggccggaagagaagacaccagccaacaaaagccagcgggc

SEQ ID NO: 175437 - RNA, 71 nt, Homo sapiens
gaaacagagcaaaaaccggaaaacagaagcgaaggggacagggggagaaccgccagggaaacccgggggac

SEQ ID NO: 175438 - RNA, 78 nt, Homo sapiens
accaggaggcgcacggggggaacaaggacgacagagcaggcagcaaagaccagaaccgcccggaagcagaggagaaca

SEQ ID NO: 175439 - RNA, 85 nt, Homo sapiens
gggacagacccaggcgggggcgccgccgcgccgccgccaccgcggccgagaccgcgcagccggcggagccggacgagcgggagag

SEQ ID NO: 175440 - RNA, 70 nt, Homo sapiens
aggacaaccaccgagcaaacaacggcaacgaaaagagacacgacgcaaacccccaagagaaacagcacgc

SEQ ID NO: 175441 - RNA, 85 nt, Homo sapiens
agaggaggcccacaaggccccgcaccgccggaggggcaccaagcaagagaacggccaagagagcgaagaaaaacaaagcaacaac

SEQ ID NO: 175442 - RNA, 70 nt, Homo sapiens
aagcagccgggacagaacgaacaggcaaagcccaaaaggcaaggcacaagcacaacacgaaaggagaaga

SEQ ID NO: 175443 - RNA, 104 nt, Homo sapiens
ccagcgggggaaccggcgcgccggcgcgcggcgcggacaggcccaaacggaaagagcaaagaggacaggaagggggggagagggcagaaggccccgagcccagg

SEQ ID NO: 175444 - RNA, 84 nt, Homo sapiens
cgcgcgcgcggacgcggcgccccggagaagacggcccagcagagcacccaaccagcgggaacacagcgccgcccccggccaaag

SEQ ID NO: 175445 - RNA, 77 nt, Homo sapiens
cggcgcgcccagaagaagggaaggcgcgaggaggaaaggaggacgaggcgaaagacaccagcacccgaggccagcaa

SEQ ID NO: 175446 - RNA, 97 nt, Homo sapiens
agaggagagggcaggggccgccggaggcagaccaacccgacagcaccgggcagccgcccaaaacacaaaccaaagaagaaacccgaaggaccacaga

SEQ ID NO: 175447 - RNA, 84 nt, Homo sapiens
ccagccaagcccagccaagccccgccgacgcgggcaccggagccagccccgcagcgggccgacgcccgccgcggccggggaaca

SEQ ID NO: 175448 - RNA, 72 nt, Homo sapiens
cccgagagcaggaacagacacagccggacaacaagcgagaagacaacacagcagccacaacgcgaccacaaa

SEQ ID NO: 175449 - RNA, 85 nt, Homo sapiens
acaagacaccagaaagacagcgaacagagcagagcacgcccagaaggccggaaaggagcacacccagcaaagaagcgaaggagcg

SEQ ID NO: 175450 - RNA, 70 nt, Homo sapiens
agcccaagccggaacagccaacaaagagagggaacagccaaaccaggaaaggaaccagaggaaagcagcc

SEQ ID NO: 175451 - RNA, 41 nt, Homo sapiens
ccaggacacccccagagaagggagagagaaggcccaaaagc

SEQ ID NO: 175452 - RNA, 75 nt, Homo sapiens
gggcgggaacgcagcaggacaaacggacccaagaggcccagaacccccgagaaaagccaaccgaagaagaaagag

SEQ ID NO: 175453 - RNA, 101 nt, Homo sapiens
cgccgaggcccaaggcagaggcgaggcggaagggcaccccacccggacagcgaaaaacagccggagaaaagcacagcgaggccggggaaagacggaagaaa

SEQ ID NO: 175454 - RNA, 77 nt, Homo sapiens
gaccagccgagggccacgccggaccccgccacgggccggcaggagaacacccgaaagagcccagagccgaggcgggg

SEQ ID NO: 175455 - RNA, 64 nt, Homo sapiens
gaaagaggcgaacacaaagaaagaggaggcagcgacaagacggagacaaaggggagccagcgaa

SEQ ID NO: 175456 - RNA, 84 nt, Homo sapiens
gaagaagcagaagcggggaggagcgagcagccaggagccgggccaaagggacgcgccaacagggaggagagggaagggagcggc

SEQ ID NO: 175457 - RNA, 80 nt, Homo sapiens
aaaagccccacaagagccaccaaaagacgaccgaaaacccagccagacaaaagagaagcagaggagcgaagaaagagaga

SEQ ID NO: 175458 - RNA, 78 nt, Homo sapiens
cggaacgccaagacagaccacaagggaaggccgagaagacacacccaaaggaacccccacacaaaagagggacaacac

SEQ ID NO: 175459 - RNA, 71 nt, Homo sapiens
gaagaagacaaagaacccacaagaaacagacgacgggagagacaggacagggcagaggcaggacggagaag

SEQ ID NO: 175460 - RNA, 58 nt, Homo sapiens
aggcagggaagcaacgcagagccaaagcaaacagagcagaccaaccagcagccaagca

SEQ ID NO: 175461 - RNA, 54 nt, Homo sapiens
ccgggcgggcgagcacaggcacacacacgagcacagcaagcgggagcaggcaga

SEQ ID NO: 175462 - RNA, 86 nt, Homo sapiens
caggaagccgagaagagcaagaaccccgcaggccggggaggacagggcgggaaccagcccggcccggggaccgggaggccggggac

SEQ ID NO: 175463 - RNA, 69 nt, Homo sapiens
agccggacccaagagccagaaagaagagggcaacaaccaggaggagcgagaggcgaacacccaaaacgc

SEQ ID NO: 175464 - RNA, 74 nt, Homo sapiens
gggagaaccagaaccagcacaggccgggcaaaaggaacaaagagcagaggccagcagccaccgacagcccgcgg

SEQ ID NO: 175465 - RNA, 68 nt, Homo sapiens
cgcccaggacaacgccgaaggaaaagcacgcccaggccaaaggcgaccaacaaaaccagaagagaggc

SEQ ID NO: 175466 - RNA, 62 nt, Homo sapiens
caaggaggaccagagcacagcaagagccgacaaaaggacaaggggcgaagcccgggggagag

SEQ ID NO: 175467 - RNA, 65 nt, Homo sapiens
ccaagacgaaaccggcagaaggcacgcgcccggacagacaggcagggaagaaaacgccagagaag

SEQ ID NO: 175468 - RNA, 76 nt, Homo sapiens
gagagggaacgcagcgaaagcggaacgcacgggacccgccggagccagagaaccgcagggccacaggaaacggggc

SEQ ID NO: 175469 - RNA, 60 nt, Homo sapiens
gcagggcgcccccgagacacaaaagcaccagcagaaccgccccagggaccccaccacccc

SEQ ID NO: 175470 - RNA, 65 nt, Homo sapiens
aaacaaggcaaacagacaacagaaaagaagcccgacggagcagcagcgccgggaaggaaagcaca

SEQ ID NO: 175471 - RNA, 56 nt, Homo sapiens
gagcccggacggcacaggggccagaagcacaagaaggcaggagagaccaaacggga

SEQ ID NO: 175472 - RNA, 77 nt, Homo sapiens
acagcggccaggcccgcccccccccgaaaaccagaaggcaccgacaggaaaggaaaaggagaaccaggcacccgggg

SEQ ID NO: 175473 - RNA, 65 nt, Homo sapiens
cgcagggacagccacccagcaacaacaagggagccaaggcacaagaagaaagaaaggaacaacag

SEQ ID NO: 175474 - RNA, 71 nt, Homo sapiens
ccgccgcagaagcaaccaacgagacaagagggcacagggcaaggaagcagcggagaagcgaaggaacggaa

SEQ ID NO: 175475 - RNA, 72 nt, Homo sapiens
agaaagagcagcggaaagacgacagcaacccgaagacagggaaaaggcagacacccacgaacgccacaggac

SEQ ID NO: 175476 - RNA, 85 nt, Homo sapiens
agaagaaggggaacccgcgcccaccagcagcggcagggcaaagacagccggccccccagcagggcaggaggccaggaaggcacca

SEQ ID NO: 175477 - RNA, 79 nt, Homo sapiens
ggcaaaacccagaacgaagcgccagccgcgaggcaaaaagcagggacccgggcaggcagcacgaagggagaaggagacc

SEQ ID NO: 175478 - RNA, 39 nt, Homo sapiens
cagcaaccagcagcaccgagaggaagcagcaaaagacca

SEQ ID NO: 175479 - RNA, 81 nt, Homo sapiens
agggagaacacagccgacccccaagagcgaccgggggaacaacaacgagacccaggacaaagacaccaccagccgggacga

SEQ ID NO: 175480 - RNA, 41 nt, Homo sapiens
gccgggaggcagaggggcagggaagcaggggcaaaagaaaa

SEQ ID NO: 175481 - RNA, 73 nt, Homo sapiens
ccaggagacagaccaacaggaagccgccagacaaaagggacggggcgccaagcccacgggcgcaccaacggag

SEQ ID NO: 175482 - RNA, 82 nt, Homo sapiens
ccagggccccagcgccgacggcgacgcggggccgagcaacccggcccggacaagagcagaaacacagagacccaacagcaaa

SEQ ID NO: 175483 - RNA, 80 nt, Homo sapiens
cgccaacgaacgaggggggaccagcacccagagggccacacgggcaggacaccccccgccggaggagcacagggaaggaa

SEQ ID NO: 175484 - RNA, 72 nt, Homo sapiens
gacaagagaccacacccaggaagccaggcacgcacagcggaagaaaacgccagagaagcagagcagcccgga

SEQ ID NO: 175485 - RNA, 70 nt, Homo sapiens
gcggggaggaagacgacaacagggcagcaggcaggcgggaagcagggaacgcccgcgggaggaagagaag

SEQ ID NO: 175486 - RNA, 73 nt, Homo sapiens
gcccaggagggaccggaaagcaccccggccacagcggcacagcaacagcccagcaggcaggggcccaccacca

SEQ ID NO: 175487 - RNA, 72 nt, Homo sapiens
agccgaaaagcgcagcgagcggagccgccggagaccgcgcgaaacgcccagaaaccaagaagcagcacgccg

SEQ ID NO: 175488 - RNA, 84 nt, Homo sapiens
ggcgccacgagcaggggggagcggcgcggaaacgcaagacgggccgagaagcagcgcgaggggcaaagagaaccaggagacccc

SEQ ID NO: 175489 - RNA, 69 nt, Homo sapiens
gcagcgcaaaaaagacccagccaaaggccagggagcgcaggaggagagcggcgacagggacgcccgcac

SEQ ID NO: 175490 - RNA, 80 nt, Homo sapiens
ggaagccaaagcacagagccaaaagggacaggaagacgagagacccgacaaaaccccacagaggagggcagcggagagcc

SEQ ID NO: 175491 - RNA, 85 nt, Homo sapiens
ccaggccccagacacagacgagcaggggaagagaggggccacacagcaggagagaggacgcgcagcgaggcccagcgcgggacac

SEQ ID NO: 175492 - RNA, 75 nt, Homo sapiens
cacccgcgagacccgggcacccaacgcggcgcaaggaagaagagacgccgcgcggcagacaaggcccggcaggca

SEQ ID NO: 175493 - RNA, 38 nt, Homo sapiens
ggagagcgccccagccggggggaaaagccaagaaagac

SEQ ID NO: 175494 - RNA, 73 nt, Homo sapiens
cgagccggcccggccacgagaacacacgggcccgaaccgcgaccaacaaaaaaaagagaagaaaggaaacagc

SEQ ID NO: 175495 - RNA, 60 nt, Homo sapiens
gaacagcgcccacaaccgagggaagggagagaccagaggaggaagaacaggggcaacacc

SEQ ID NO: 175496 - RNA, 83 nt, Homo sapiens
ccagacgcggcacagagagggccgggagcgcgcagccagacccagccgagcccaaccgggcgacaccgcaccaccacccgggg

SEQ ID NO: 175497 - RNA, 62 nt, Homo sapiens
cagccccgggggccacgagcggagagcccgagggaaaagacaggcaacaggaaagcaaggga

SEQ ID NO: 175498 - RNA, 71 nt, Homo sapiens
gcaccagcaacaccccaggccggggagggcgcgccgaaagcgaaggccgcacgagacccccgcccagccaa

SEQ ID NO: 175499 - RNA, 56 nt, Homo sapiens
gcccccccgaaccccgcagcgccgcacgcacagcagcaaggaccagcggcggaccg

SEQ ID NO: 175500 - RNA, 66 nt, Homo sapiens
cgaaacgcgcgcccccgaaggcggccaacggccagacaaccgagagagacgccgcgcgcaccccac

SEQ ID NO: 175501 - RNA, 52 nt, Homo sapiens
aacgggagacaacccccgaaggagggcaaaccgacaccagcgacacaagcgc

SEQ ID NO: 175502 - RNA, 67 nt, Homo sapiens
agagccagcaagcgcagcccggacagaggcagagcaacagggacacaagcaagaagaaagggaccga

SEQ ID NO: 175503 - RNA, 80 nt, Homo sapiens
aaacccaagccaaggagccaaagcggacgccggccaccacgaaggcgacacagaagacgagcgacaaaagcacggaaggg

SEQ ID NO: 175504 - RNA, 81 nt, Homo sapiens
ggacgggagcccgcagccccggcgcgcgaggcaaaagggaaagcaaggggaagggcccaagaagacaccccaccagaaacc

SEQ ID NO: 175505 - RNA, 61 nt, Homo sapiens
gaaaccaagaccccaggacaacaaggagagacgggaaagcgcggcgaggcccccggagcag

SEQ ID NO: 175506 - RNA, 58 nt, Homo sapiens
gaaaagcaccaccagcaagagcacggcaccagacagacaacaggaaccggggaacacc

SEQ ID NO: 175507 - RNA, 81 nt, Homo sapiens
caggacggcccccgcagcaagccccagccaaagccaaggagaccgggagagagacgaaggacgcgcaggggcagcagacac

SEQ ID NO: 175508 - RNA, 82 nt, Homo sapiens
gccgggcggaccggaagagcgggcaaccggaagagacgccccagaccccgcacagacaggaaaagagcgacagcaggacggg

SEQ ID NO: 175509 - RNA, 80 nt, Homo sapiens
acccgccccccaacaccggacaccgagaggaaccacaagcagagcacggcgacagcccgccacggcccccacggggaagc

SEQ ID NO: 175510 - RNA, 72 nt, Homo sapiens
caaagccagccaaagaaacggggagcggacagaaacgccaaagacccccagaagccccaaggggaaccagga

SEQ ID NO: 175511 - RNA, 75 nt, Homo sapiens
aaacaagagaccacagaagcagcagccgcccaaaacacaaaccaaagaagaaacccgaaggaccacagagaacca

SEQ ID NO: 175512 - RNA, 68 nt, Homo sapiens
gcacaaccaagcggagagacaaaagggccagacagccaccgaaggggcccagggaccgggaccgcgca

SEQ ID NO: 175513 - RNA, 78 nt, Homo sapiens
gacagggagacaaggaagaacaaaacggccgaaaaaaaggcccacacgggacaggaagggaaccggacaggggccacc

SEQ ID NO: 175514 - RNA, 77 nt, Homo sapiens
cgcgggcgccgggagcgagcgggagggagccgcgcgccggcgcgcgccgaggaggcaacacggaccagcgccccagc

SEQ ID NO: 175515 - RNA, 80 nt, Homo sapiens
aacacaacagaagggccgccacaaaccccaggccccaaacagaacgggaggagggaagaaaagcgccgaccggaaaacag

SEQ ID NO: 175516 - RNA, 63 nt, Homo sapiens
ggagccggcggagcaggaccgcacgcggaggcggcgcccgcggaaaaagacccgagaagcgca

SEQ ID NO: 175517 - RNA, 74 nt, Homo sapiens
gagcaggccgaggcacagaagaaagggcagagcacaccgaacacccccgccaaaacccgcggagcaaacaaaac

SEQ ID NO: 175518 - RNA, 88 nt, Homo sapiens
cgacccaagcgccgcggaaccacgccgccacgacccccaggaggcaggggaagcacaaaagcgcacccgcgccagcgaggaccggaac

SEQ ID NO: 175519 - RNA, 80 nt, Homo sapiens
ggcggggacgggccggcccgcggaaggaaaccaacaggaaagaggccaggagacaaaaggaccaagcaaccccaggcgag

SEQ ID NO: 175520 - RNA, 30 nt, Homo sapiens
aaaggaaggcggaaccagaagaccggggag

SEQ ID NO: 175521 - RNA, 64 nt, Homo sapiens
ggagagccaaagaaggcggagggcgaacgaacgcccgccagaagccccgaggggccgggcaagc

SEQ ID NO: 175522 - RNA, 64 nt, Homo sapiens
cggcccggaaacaggaggaccacccgagggacccgaggagcccaccaagccgaccgcaggcaag

SEQ ID NO: 175523 - RNA, 81 nt, Homo sapiens
ggaaacggcaagaccaaaaaacacaaaccaggcaacaggcagaaaaagaaccagggcgaccagacgaggggagacggacgg

SEQ ID NO: 175524 - RNA, 75 nt, Homo sapiens
gcaaggggggaggagcgccgccccccgcacaaggggcccggcagccgaccagcgccacagaaggcgccacacgag

SEQ ID NO: 175525 - RNA, 61 nt, Homo sapiens
gcgggccccgcgaaagaccggcagcccacggggcccgcgaacgaaccagccggccgacgag

SEQ ID NO: 175526 - RNA, 83 nt, Homo sapiens
ccacgccggccccggcccggaccgccgccgggagcggaaacagcggcagccagagagccaccacgggcgcccgacccgcacca

SEQ ID NO: 175527 - RNA, 75 nt, Homo sapiens
aaccggacaagcggaggaacacagccccaaacacggaaagggacgaggaacaagagcccggacagaacaaaacaa

SEQ ID NO: 175528 - RNA, 80 nt, Homo sapiens
agccccgacgaacacggggacaccaacaggacccggggcgagcaccaaagccaaggaagcccagaagaaagagcaccccc

SEQ ID NO: 175529 - RNA, 60 nt, Homo sapiens
caccacccacccaccacgcacccgagggacccgaggagcccaccaagccgaccgcaggca

SEQ ID NO: 175530 - RNA, 61 nt, Homo sapiens
agcgacaggcaacagacgccaggacacggccaaggccggcgagaacgcccgcggcagcgag

SEQ ID NO: 175531 - RNA, 64 nt, Homo sapiens
cagccggagaagcgcgcgggcgcgcaggccgcggggagcaccggaccggaaaagccagagagaa

SEQ ID NO: 175532 - RNA, 41 nt, Homo sapiens
gcacgccaacccaaccggccgggagcaggaaagaaaagaag

SEQ ID NO: 175533 - RNA, 72 nt, Homo sapiens
agaacagggccagaggacgccaaggcccccaagcgcgagcaagagggggggcacaggcagcccacgggaacg

SEQ ID NO: 175534 - RNA, 80 nt, Homo sapiens
acagagaagggaggaagaagagggagaagaccaaagaagagagagcaggaccaccaccgcccacagccgcggacggcccg

SEQ ID NO: 175535 - RNA, 40 nt, Homo sapiens
gaccgcgcagcgagaccagggaacaggacacccaaccgcg

SEQ ID NO: 175536 - RNA, 74 nt, Homo sapiens
acaccggccacccagagagcaaaaggcagcgaaacaggggggcgaccgaggaaaaaaagaaccaagagaaaaga

SEQ ID NO: 175537 - RNA, 80 nt, Homo sapiens
caacccagaacggaagccccccggaaaagccagcacgcccaccccagagacccaggcccgccagaccgacggaaaaagca

SEQ ID NO: 175538 - RNA, 53 nt, Homo sapiens
cagccgcccacgggccacggccaggcccaggagaagggacaaagacaagaaga

SEQ ID NO: 175539 - RNA, 90 nt, Homo sapiens
ggcggcgaaaggaacggcgaaggcccacgggagaaaaccgggcgcaagcccgaagaggaaggagaaggaaagagcagaaaggagcggcgg

SEQ ID NO: 175540 - RNA, 72 nt, Homo sapiens
caaggagccaccagcacggaccaggaggcgagcaacagcggggggggaagaggaggaggcgcccgacacgac

SEQ ID NO: 175541 - RNA, 54 nt, Homo sapiens
ccagacagcgaacagaggcagaacaaggaccccaagaagcaggcagacacaggc

SEQ ID NO: 175542 - RNA, 77 nt, Homo sapiens
gggagacggagaaacgccgagaggggagaaccccaaaggcccccaaagaaagccacagcgcgccgcaggagcaccgc

SEQ ID NO: 175543 - RNA, 80 nt, Homo sapiens
gggaggccggccgggccagcacccggccgagacggcggcagcagcggcacagaaacccacggaaagaaaacccgcaggcc

SEQ ID NO: 175544 - RNA, 74 nt, Homo sapiens
ggaggaccccaggcaaacaacaccgaggacgccgcaggggcggcgaaaggacgaagcgcgaccagaagcgaacg

SEQ ID NO: 175545 - RNA, 66 nt, Homo sapiens
cgcacggacggcacagcccgccgaacccgaaaggaggggaaaagaaacaaacaacaagaagaagga

SEQ ID NO: 175546 - RNA, 82 nt, Homo sapiens
ccgaggaggcgcgggggggcgcgcagcgaagcgcacggaaggaagcagggccgagaaaggcagaccagggccagagcaccag

SEQ ID NO: 175547 - RNA, 73 nt, Homo sapiens
cggaccaggaagaaggaagacacacgaacaacacacgagggagagccaacgggaccagaagaacggacaggcc

SEQ ID NO: 175548 - RNA, 103 nt, Homo sapiens
gaggccggagacgaggggacccaagcggagacagcaccgacagaaggaggccagggaaggacacaccgcggaaagaacaagaagcaaaaggggccagagggaa

SEQ ID NO: 175549 - RNA, 86 nt, Homo sapiens
ccgccaggcgacgggccaagggacagccggcggacaccccaccaggagacgcagcccagggagcaaaagagagcgcaggagccggg

SEQ ID NO: 175550 - RNA, 84 nt, Homo sapiens
cgaggagagaccagcccgggagggaagaaggagcggaccaaagccgcaggacccaaagacaggaccacgcaccagcagagaagg

SEQ ID NO: 175551 - RNA, 80 nt, Homo sapiens
ggagcggggacccaggagccggccagcgcgccggagccgccgagggcgacgcgccacagagcgggcgggcgggccacgcg

SEQ ID NO: 175552 - RNA, 58 nt, Homo sapiens
ccgggggaggcggcaagagggaagagagccaacggcacaaaagcagaccaaagccaaa

SEQ ID NO: 175553 - RNA, 71 nt, Homo sapiens
ccaaaaggcgcaggggaggccggccccaggaggaaacaccaaggaagccccgccaacgaagaaaacaccga

SEQ ID NO: 175554 - RNA, 83 nt, Homo sapiens
aagcccgaggaagcgggacgggggccgcggcgcgcgggcacgcgccccagcccgggcggggaaacaggaacacgaaagaggaa

SEQ ID NO: 175555 - RNA, 55 nt, Homo sapiens
gaaacgcaaaaggagagagcaggcccaaaagggcgaaaccagcgaagacacagcc

SEQ ID NO: 175556 - RNA, 75 nt, Homo sapiens
cgcgcgggcccgaggccggaggaacccggacccggcgagcgacgagcaagaagacaaacaagggaaggccgcaca

SEQ ID NO: 175557 - RNA, 76 nt, Homo sapiens
gaggggcggaggcgggagaggcgagccgcgagagggccggcaggcccgggaagggggccgcaaggccaggcgcgca

SEQ ID NO: 175558 - RNA, 50 nt, Homo sapiens
cagaacaagaaggagcggcgggccacaggaaccaacgccccagccggcca

SEQ ID NO: 175559 - RNA, 76 nt, Homo sapiens
agaacaagaagaagaccagggaaccagccgccaggagcaaggcagcgacccagggcacagcggggcacagccccca

SEQ ID NO: 175560 - RNA, 77 nt, Homo sapiens
cacaaaggaccccggaacgggcgggcggcccccgggcccccacgacccgccccagcccccagccccaccacccacga

SEQ ID NO: 175561 - RNA, 55 nt, Homo sapiens
gagcaagaccccgaaaccagaagggggaaaggccgaacgaggcggggggcccgag

SEQ ID NO: 175562 - RNA, 75 nt, Homo sapiens
ggcaccgcgcacgagcagggacggcgagacagaaacagagccacacaccacggcaccaggccacacaaacagaag

SEQ ID NO: 175563 - RNA, 64 nt, Homo sapiens
aaaaccacaccaagggaaggaaggaccagagaaacgaaaggacacgccagccccaaggaccggg

SEQ ID NO: 175564 - RNA, 80 nt, Homo sapiens
gggacaccgagcccggggaggggccccgcgaggcgcacacacaaaggggagccaggaagaagacaaaacagagaggaagc

SEQ ID NO: 175565 - RNA, 81 nt, Homo sapiens
gaagcgcgcgccgcgcccggaccccagggcccaaagcacaagcgaccgccgaaggagcccccgaacggcaacgcccccccc

SEQ ID NO: 175566 - RNA, 72 nt, Homo sapiens
ccccccaagaccacgcagcggggcccggcgaagaacgggcgagagccgaccggccacggcggaggaagaagc

SEQ ID NO: 175567 - RNA, 77 nt, Homo sapiens
gcagcccccagcccgaaagcccagagccaaacagaaaagaagaggagaagcaagcagagggagagaccccgagaagc

SEQ ID NO: 175568 - RNA, 58 nt, Homo sapiens
ccaagagaagcgcaagagcaacaccccaccccaagacgccagaaggagacacacccga

SEQ ID NO: 175569 - RNA, 54 nt, Homo sapiens
cccggcgaggagagcaaggcaaagccaaagcaagagccaccgacagaaaagcac

SEQ ID NO: 175570 - RNA, 72 nt, Homo sapiens
gcccccgggcggccccgcgcgggcagcgcagccaggccgcgggacaagggggaaacagcagcacagacagac

SEQ ID NO: 175571 - RNA, 69 nt, Homo sapiens
gaagccgggaaacaggagagcggccagcacagcagagagaagccagagaggggcgaaaacgcggaagcg

SEQ ID NO: 175572 - RNA, 78 nt, Homo sapiens
ggccccaaagaggagagagaaaaggagacgaagagcaccagagcaaaagagggggaagggaggaaacgccgagaggag

SEQ ID NO: 175573 - RNA, 75 nt, Homo sapiens
ggaacggggccccgcaaggccggcgcggaggaggggagcagcgcgcaaggaccggaagccaccaagcggagcggc

SEQ ID NO: 175574 - RNA, 79 nt, Homo sapiens
ccggccaggagaaacggggacgagagaggcaaaccaaggcccccacggggggagagaccagaaacaaggcacaaaggac

SEQ ID NO: 175575 - RNA, 56 nt, Homo sapiens
aggaggagaggagccaggagaggcaggaaaggagacccaacagcgaagggaggagg

SEQ ID NO: 175576 - RNA, 86 nt, Homo sapiens
gaaccgcacggaccacacagcgcgggagccacgcagaggacgccggaacacccggaagccgagaaagagagaggaccagaaccaga

SEQ ID NO: 175577 - RNA, 51 nt, Homo sapiens
cgacgacccaacagcaaggccagaaaggaggcccacagccgaccgagcggg

SEQ ID NO: 175578 - RNA, 78 nt, Homo sapiens
cgaagcggcaggcacgccaggagagacggagggagagggccccccggacgcccaggccccggggccgaggccgcccgg

SEQ ID NO: 175579 - RNA, 75 nt, Homo sapiens
cagagcaacccgcccccagaaggccaccggccaaaaggacacgagcaccaaaagaaggggccgggcccagggaaa

SEQ ID NO: 175580 - RNA, 33 nt, Homo sapiens
gaccgccagccggaggacaaaccggcgaccaca

SEQ ID NO: 175581 - RNA, 78 nt, Homo sapiens
cgggccgggacaagcacccgcagcaacagcccagcagaagccaggacggaggacccaggagaaggaccagacgacagg

SEQ ID NO: 175582 - RNA, 80 nt, Homo sapiens
ggccccgggcacggcacgcccacccagaagagcaggaaaggagggcaccaaccacaaaggccgacaaccaacaagaagag

SEQ ID NO: 175583 - RNA, 78 nt, Homo sapiens
gcaacagaagcaagcggaagagggccagacaaggggaacacaagaggagagaaggggaccgcagggagaaaaggccag

SEQ ID NO: 175584 - RNA, 90 nt, Homo sapiens
ggcgcagcggcgccgcgcccaggagggagggacacagccccaaacaggacgaaggcggcgaaggagaacacgagacccgcacaaaacccc

SEQ ID NO: 175585 - RNA, 71 nt, Homo sapiens
ccccgccacagccccacccccgaaaagcgccgcccaaggcccaccccccggggacaacaggagaagcggaa

SEQ ID NO: 175586 - RNA, 40 nt, Homo sapiens
agcaccagcaccagcagagggggccgacgacgagccccgc

SEQ ID NO: 175587 - RNA, 57 nt, Homo sapiens
cgaccgaacgcagcaggaggcgcagcagcacaagcaggcgaccccacacaaaaccca

SEQ ID NO: 175588 - RNA, 70 nt, Homo sapiens
ccccaagccgcgggcgcgcaaggggccaacaacgaagagaggaaagaagcggaaaggagggagcacacaa

SEQ ID NO: 175589 - RNA, 75 nt, Homo sapiens
agcgaggagccaaccacgccagagacagcgcaccgacggagccggggaagacacgcaaccgggcagagcgaccgg

SEQ ID NO: 175590 - RNA, 76 nt, Homo sapiens
gcccggccgacaaccacggcccgcccagcccagggaagcaagacccccagcgggaaccagccagcacacaccagag

SEQ ID NO: 175591 - RNA, 77 nt, Homo sapiens
agggagaagcaagaggacacgaagacacagacggcaaggccagagaaggcgggagaaagacacgaaccacagaacgc

SEQ ID NO: 175592 - RNA, 102 nt, Homo sapiens
gcccaggggggaggcgccccagggacgagaggaagaccgaaggacaagcgaaggcgagaagcaagagcaaggcggcacgagagggcccgcgacaccacgggg

SEQ ID NO: 175593 - RNA, 69 nt, Homo sapiens
cagccgcgcagcagaaacgaaaagccccaacacccccaaccaccgggcagccaagcagggaaaagccaa

SEQ ID NO: 175594 - RNA, 79 nt, Homo sapiens
cagaaagcccagcccacgggccacacaggagaagaagaaagccaacgagcggacgccaggaaaaagggagaaagacaaa

SEQ ID NO: 175595 - RNA, 73 nt, Homo sapiens
ccgccaagcgggaaagaacggggagcagcagcgagcagaccgagcaaagaggagaggagaagcgggccccaag

SEQ ID NO: 175596 - RNA, 98 nt, Homo sapiens
acggccgaaggggcgcgcggccccgccgccccagcccgccccccgggccggaaacaaaccaggagccaaagcagaacggcaaaacgaaacagaagaag

SEQ ID NO: 175597 - RNA, 72 nt, Homo sapiens
gagcagcccggggagagcgcgccaagaccgcgcagccgcggcgagacggcagggaaaaaccaaagcccggaa

SEQ ID NO: 175598 - RNA, 85 nt, Homo sapiens
gaaaacagccggacggacgaaccgcccgcaggcccgcgcagcccaaagcaacaccaacacaaggccaccaaaagaaggcggaaga

SEQ ID NO: 175599 - RNA, 75 nt, Homo sapiens
cggaaaaggagagagagccacacaaagaacccccacaaaacaggcggccacgcagacacgacagggaggagaaaa

SEQ ID NO: 175600 - RNA, 57 nt, Homo sapiens
gcaagcgcacacgaagagaagcaaggcccaagacccaggcggcacgaaaagacagca

SEQ ID NO: 175601 - RNA, 84 nt, Homo sapiens
ccgagaagccggaagcaagggggccggagcagagcaaggagacagggagccgcaagccagccaccaccacagacacggcaggga

SEQ ID NO: 175602 - RNA, 67 nt, Homo sapiens
acagagagagaaaaaggaaagaacccggacaaaccaggcaaggagccggaacaggggaggccacaag

SEQ ID NO: 175603 - RNA, 69 nt, Homo sapiens
gcccagacgccaacgcaggagcacccagcgcaccacgacaaagaagagaaaacgcggcagagcaacaaa

SEQ ID NO: 175604 - RNA, 66 nt, Homo sapiens
aaacagaaggggcagagccgggacagggccagaagcgagcaccaaagcaaagaccaccaaggacca

SEQ ID NO: 175605 - RNA, 76 nt, Homo sapiens
aagcaggaaaagcagacgcaaagacaagggcgacccagcaacgcggccggccaggggcaagcgagcacggagggag

SEQ ID NO: 175606 - RNA, 75 nt, Homo sapiens
acagcaaagccagcgacagaagccagaggacagcacggccaccgggacggcaaacaacgcacccgcaccaccgcg

SEQ ID NO: 175607 - RNA, 80 nt, Homo sapiens
ccgagagaaagcaagcaaaggaccagaagaacccaggagaagcgagcaccaaggagaaggcgcgccaggaaaaaaaaaaa

SEQ ID NO: 175608 - RNA, 73 nt, Homo sapiens
cgagcaggcggacgggagggcagacggcgcacagcaagagggcccaaccgcgagagaaggacaaaccagggaa

SEQ ID NO: 175609 - RNA, 52 nt, Homo sapiens
ccaaccgcgcgcaccgccgacccggaagaccgccgccgggcaacaaggaccc

SEQ ID NO: 175610 - RNA, 77 nt, Homo sapiens
ggagagcagaaagccacagagaagagccaagccaacagagccgagagcaggcccaggccccccgagcgcacgcacgc

SEQ ID NO: 175611 - RNA, 89 nt, Homo sapiens
ccgacaccgacgccgccgcccggccaccggcgggcccgaggagagcgcggagccgcgcccccgggcaccccagaaagaagaaaggcccc

SEQ ID NO: 175612 - RNA, 69 nt, Homo sapiens
acgcgcaggagggaagcacaggggaaggccggaaaggcccccaacagggaacagcggggcacacaggcg

SEQ ID NO: 175613 - RNA, 78 nt, Homo sapiens
cccagagccgccaccagggggagaccgaagagcgcaaaaaccgaaaccgcccacgggaacagggagagaaggcagaaa

SEQ ID NO: 175614 - RNA, 75 nt, Homo sapiens
ccgcggagcgccagccaagaaacacgcaagcgaggagcgacgaggccggaggggaacagcaaggacccggacaga

SEQ ID NO: 175615 - RNA, 38 nt, Homo sapiens
gaggacgacgcccagacgcaaagccccgagcccaaaac

SEQ ID NO: 175616 - RNA, 39 nt, Homo sapiens
aggacaggcacaacaggaggaacacgggcagaaggagac

SEQ ID NO: 175617 - RNA, 78 nt, Homo sapiens
acaggggcgcacagggcccacggaaaagcaggaaaagacaggacggccaggccagagcgggagaagcccagaccgcgg

SEQ ID NO: 175618 - RNA, 56 nt, Homo sapiens
agaagggccaagggacgcacgggccgccaagggaaagaagacgagaaagggaaaac

SEQ ID NO: 175619 - RNA, 77 nt, Homo sapiens
cgcagaccgaacgagaccgcagggaccaagaaaggcccagggaccaaagcccggacaaggcccgagcaccaggaccg

SEQ ID NO: 175620 - RNA, 77 nt, Homo sapiens
caagaaaaaaagcgcagcacacgaccggcgacacaaaagagcacacagaaacaagggaagccgggcggaccaggaga

SEQ ID NO: 175621 - RNA, 70 nt, Homo sapiens
aacaaccagacaagaggaaccgcgccccagaaggcagaggaacacaacagaaaaacacaccgacagcaga

SEQ ID NO: 175622 - RNA, 68 nt, Homo sapiens
ggagcccacaacaaccacagccggcaccgggccggaccaacgcccaaccaagagccaagggcacaaac

SEQ ID NO: 175623 - RNA, 82 nt, Homo sapiens
aaagcgaaggagggcccgcccaccggggaggagaggaaggaagagaccagccgacagcgaccaaggccagagcgaaaggcca

SEQ ID NO: 175624 - RNA, 55 nt, Homo sapiens
aggcggggagcgcagagcgggcgagcgcgcggggacgagagccccggcacaaacg

SEQ ID NO: 175625 - RNA, 77 nt, Homo sapiens
aaacaaaagcccagaaagagacgaccgcaagcagaccaaagaagaagcagacacaggccggacagacacgcaaaaag

SEQ ID NO: 175626 - RNA, 92 nt, Homo sapiens
accgccgcccgccacgagcgccccccgagcggggggacgcgccaggcacagcagcagaagacgaccccgacgcaggccaggagccgcggaca

SEQ ID NO: 175627 - RNA, 56 nt, Homo sapiens
gacaagaagcaacagccacgggagcaagaacgaaagccgagccgggccagcccaca

SEQ ID NO: 175628 - RNA, 60 nt, Homo sapiens
cccgcccgaaccgagggaacagcccgacagagaaaggcacaacccagaccagagaagcga

SEQ ID NO: 175629 - RNA, 85 nt, Homo sapiens
cgagcacgccggacagcgcccccgacgccgcgcaccccgcccgacggaagaggaagacaaccacgacgagacaagccccaggagc

SEQ ID NO: 175630 - RNA, 81 nt, Homo sapiens
aagaaccagccacagagacacagacacagaacggccagcagacagcgacgacagagcgcccaccaaaaaggagaagcgaac

SEQ ID NO: 175631 - RNA, 76 nt, Homo sapiens
acacgaagccgagaggccaccggacgagggcagaggcccggagacgggagaccacgcaacaccgccaagaagacgc

SEQ ID NO: 175632 - RNA, 74 nt, Homo sapiens
gcgggccggaggagccagagcgcagaaagggaggccccggcagagaccagcggcgggccagaggcaagacagag

SEQ ID NO: 175633 - RNA, 83 nt, Homo sapiens
ggaccacaagacaacgcggagcggcgaagagcaaccagaggcggcagaagcacacaagaagacaccgcagcggcagccacgcc

SEQ ID NO: 175634 - RNA, 84 nt, Homo sapiens
cagcgcgcggcagccgcgacgaccgccgaccaggcacgcccaaccccgcgaaggaaggggacccaagccgccaggacccagggc

SEQ ID NO: 175635 - RNA, 71 nt, Homo sapiens
ggacccaaaaggcgcaggggaggccggccccagccagcaccgcaagccaggagacaccgaggaacagccaa

SEQ ID NO: 175636 - RNA, 84 nt, Homo sapiens
cccccgccagcccagagagccgagaccacagggcaacaaagaaaaccggggacaggaaccaaccccacacccgagagcagagag

SEQ ID NO: 175637 - RNA, 75 nt, Homo sapiens
aaccagcaaaaaagagagaaagaccggcagacagaaaaaggaaaacaccagggaaaagaagaagccaaaaagaaa

SEQ ID NO: 175638 - RNA, 72 nt, Homo sapiens
aaaaacgcaacaacagacgggccgggagacgcaacgaagcgaaggagccgacaaaccccagagccagcccgg

SEQ ID NO: 175639 - RNA, 56 nt, Homo sapiens
ccggaccaagcaagaccccacccagcggccaccccccaaggggggaacaggggggg

SEQ ID NO: 175640 - RNA, 84 nt, Homo sapiens
ccgcccgagcgccgagaaagccccgggagaagcagcgccgcccggggcagaccaggcagggccaggccgagggcccgcccggcc

SEQ ID NO: 175641 - RNA, 72 nt, Homo sapiens
cgcaggaagggcacaggcaacaggacggaccgagcgcagacaccacccaaagggcaaaccgacacaaagcga

SEQ ID NO: 175642 - RNA, 61 nt, Homo sapiens
acagaagcgcggccaagcgagacgaaaccaaaagaggggggagaagaagaggaagacgcga

SEQ ID NO: 175643 - RNA, 67 nt, Homo sapiens
cagggggggagccagcagacagaacgcccccagcacaaggacccaggagacagagaaacaagagccg

SEQ ID NO: 175644 - RNA, 71 nt, Homo sapiens
gaacaggcggcgggcgagccgcaagcacgcccgggcccgacaacaagccagcaccgggccgacgcccacca

SEQ ID NO: 175645 - RNA, 74 nt, Homo sapiens
gggggagagacggcaggagaccccaggagaagaccccgcgagcaagaaggggagaccgcccgcggcacgaggaa

SEQ ID NO: 175646 - RNA, 79 nt, Homo sapiens
ccacccggcgcgaccgcccggcaccgggagaaccaccgccaccgccaccagggccaggccgagggcccgcccggcccca

SEQ ID NO: 175647 - RNA, 70 nt, Homo sapiens
acaccaacggcaaggacaagccgcacgggaaaccacgcaggcaggaaccaaccaggaggagcacggcgaa

SEQ ID NO: 175648 - RNA, 59 nt, Homo sapiens
gaaaaaggcagaaaacgcccacccgccagggggagccaaggccgcgagacacggcagga

SEQ ID NO: 175649 - RNA, 72 nt, Homo sapiens
agggacccggacaaccagaggcagccagcagggggagggaccaagcgccagaacgaccaacgaccacaacga

SEQ ID NO: 175650 - RNA, 72 nt, Homo sapiens
gcacacaccagcacgagaaggcgggcaaacgaagaaaacgacccagccagaggacaaaggaccgaggacagg

SEQ ID NO: 175651 - RNA, 80 nt, Homo sapiens
cgcccccaaccagccggaggcaagaggcccgcagaccccggcccgagaaagacagcaaagaaaaggagaagaaaggaaaa

SEQ ID NO: 175652 - RNA, 71 nt, Homo sapiens
gaggacagcagccgacaggagacgaaccaggccacccaagaaacaaacaggcaaaccgacaccagcgacac

SEQ ID NO: 175653 - RNA, 83 nt, Homo sapiens
gccacgcggggagagcacggggaccgagacccggcaccacccccggccgcccccagaaaacgcgcgagagaacagagagaaaa

SEQ ID NO: 175654 - RNA, 39 nt, Homo sapiens
gaaggagagcaaaggagacaggggacccaagggagagag

SEQ ID NO: 175655 - RNA, 107 nt, Homo sapiens
cgggacggccccaggagaagagccagagcgggaggacgacgagagagagcggggacgggaaagagggcagaagcagcaagaaaaggccaagagagaaggagaacgga

SEQ ID NO: 175656 - RNA, 79 nt, Homo sapiens
ggccagcagacgagggggagacggcagcccgagcaccaccggggcaccaggcggccaagaccaccaaagagggcccccg

SEQ ID NO: 175657 - RNA, 73 nt, Homo sapiens
agggacggaagcaagaaaacgcacacggaaaggagcgagaaaccaacaaggcgaaagcccagagccaggaccc

SEQ ID NO: 175658 - RNA, 75 nt, Homo sapiens
ggcaccacacagaaaccacgaggagggacggaagggcccgcaacgaacgaacgaaccgagagaaggggaaaaaag

SEQ ID NO: 175659 - RNA, 64 nt, Homo sapiens
cacggcgccccgcaagaaggcaacaacgaacagaacggcaagaaagaaaaaaaaaaccgccaac

SEQ ID NO: 175660 - RNA, 60 nt, Homo sapiens
gggaaaaccagcgccaaaggacaagcgaacggcagaaagccccagaaaagacagccaagc

SEQ ID NO: 175661 - RNA, 65 nt, Homo sapiens
aggaagagaacacccaccggcacaacacacaaaggaagaagagagggcgaaggaggccacacaga

SEQ ID NO: 175662 - RNA, 76 nt, Homo sapiens
caacaaggaaaagaaggcgaaacccccaaagaccacaacaaaaggcacaaccggagcaggaaaacccacacacagg

SEQ ID NO: 175663 - RNA, 55 nt, Homo sapiens
cgcagggcgcccccgggaaagacaagggagcaaacaaagccccgccggaagaagc

SEQ ID NO: 175664 - RNA, 87 nt, Homo sapiens
ggaaccaagaggaagggagggccgacgggaccgaaggcagaccccaaggagccgaggccagagcagaaaccagcccaggaacccagc

SEQ ID NO: 175665 - RNA, 85 nt, Homo sapiens
cgcgggcgcaagagccggcccggggcccgcagggggcacccggcagggcgggaagcggggaaaggaaaacaccagcacaccaaag

SEQ ID NO: 175666 - RNA, 82 nt, Homo sapiens
gccccgggaccgggcgggaacccgcggggagcgggacacgaacggggacgggagcagcggaaggcccagaccgagcggcgcc

SEQ ID NO: 175667 - RNA, 74 nt, Homo sapiens
cagagaggaccgccacgggccggcgcggcggcccacagcccagaagcccgaagaaaggaggcaaacaaaaaaac

SEQ ID NO: 175668 - RNA, 100 nt, Homo sapiens
caaaggcaccggccagaccacccccagcgagcacagccaggaaaaaagcccagcgagcaccaggaccacaggcacaaggcaacccgagacccaaggcaaa

SEQ ID NO: 175669 - RNA, 54 nt, Homo sapiens
gccgcagagaccccaaaccccggcccgacaggagcacagggggccagccccaga

SEQ ID NO: 175670 - RNA, 86 nt, Homo sapiens
ggacaaacggcgggcccgggaagcgggccggcagcgcccggacgaggaggaagaccagacagacggaaaaggagaaagagaaacac

SEQ ID NO: 175671 - RNA, 80 nt, Homo sapiens
acgacggcagaccacagaagcgccaagccggccaagggaagcccgcaaagcgcaaaccacgaccgcccagcaggccgccc

SEQ ID NO: 175672 - RNA, 77 nt, Homo sapiens
aggccccccagccccaaaacccgagaacacgaaacaaggaagaaagaagcaagaaaaacagaccgggggaaaaagcc

SEQ ID NO: 175673 - RNA, 77 nt, Homo sapiens
ccccacaagcggggagacggcgaagcccacagcccaaggagcgcccggccgcagccccggggagaaaccgcaccacc

SEQ ID NO: 175674 - RNA, 67 nt, Homo sapiens
cgcggacccggagcgacaagcgccccgacggagcgccaggacggcaaagaaaccccaaagccagcaa

SEQ ID NO: 175675 - RNA, 116 nt, Homo sapiens
gggacaccagcaagcgcggaagaggaccggaggccggaggaagccaggaggccgggaaccgcagagaccacaagaaccaggagagacccagagccagcgcaggggaagccgcaagg

SEQ ID NO: 175676 - RNA, 86 nt, Homo sapiens
cccccaagagcagggacacaggggccgggggacagcaagccagagcgcagcggccagagcaccgccggcggaaccagccacaagaa

SEQ ID NO: 175677 - RNA, 82 nt, Homo sapiens
gaagcaaacaaccagcccgagcccccaaaccacaggacaagcaccccaacagagcccggagacacagagaggggggccaccc

SEQ ID NO: 175678 - RNA, 65 nt, Homo sapiens
cggcgcgccgggggccggccgcgccggccggccgggaccaggccaggcagagcagcccaccaggg

SEQ ID NO: 175679 - RNA, 71 nt, Homo sapiens
gagcacaaaaaagcggaaaaacgaggaagagggaccgcaagcaaaagacaagaggagggaaccaccaggcg

SEQ ID NO: 175680 - RNA, 73 nt, Homo sapiens
aaagaggaaaccagcacgacacaagaaggaaaaccagacaaggaaaacagaaggagaaaacagccagcgcaag

SEQ ID NO: 175681 - RNA, 63 nt, Homo sapiens
agcccgcgcggggaccgccaccgagcgaggagcaggacacgagacacaggccgcacgcacgcg

SEQ ID NO: 175682 - RNA, 58 nt, Homo sapiens
ccaggcaggccagagcagcaccaggccagagccagaacacccgccgcagcaagagaga

SEQ ID NO: 175683 - RNA, 84 nt, Homo sapiens
cagcgggggaaccggcgcgccggcgcgcggcgcggacaggcccaaacgaacccggcgcggagccgggccgccccagaacccgca

SEQ ID NO: 175684 - RNA, 58 nt, Homo sapiens
gaggagaggaaggacacaagaccgggccacgagagccaaagggaccgaaaacaaggac

SEQ ID NO: 175685 - RNA, 63 nt, Homo sapiens
ggggggaaaggaaaccgacagaccgcacgaaggggagcacaacccgcaacagaagaacggacg

SEQ ID NO: 175686 - RNA, 91 nt, Homo sapiens
caaggggggcaagggcggccggcccccgacagccaggcccgcgagaagggcacaggcagacaaagaggaggcagaggccgaggaggcgagc

SEQ ID NO: 175687 - RNA, 119 nt, Homo sapiens
ccaaggacaacgcaagggggaagagagagaaacaaaagcgccagagccaagaacgaacacaacaccaagcggaaaaacggaagcagcagaacagcggccagacggggaaggaccccgaa

SEQ ID NO: 175688 - RNA, 73 nt, Homo sapiens
cgccggacccgggggagagcgggcgaggcacgcgggcggagaccagggaggcgaagcgcaccaccagacaaag

SEQ ID NO: 175689 - RNA, 75 nt, Homo sapiens
gacacagccaaccagcggaaaaggacaacggaggcagagaccaagcaggggcgaaagccccaggagggacagcgg

SEQ ID NO: 175690 - RNA, 79 nt, Homo sapiens
gagaggggccaaacccgacaagagagacaaccgacggagacggggccagggagaaaggaaggccaggagcaaacagaag

SEQ ID NO: 175691 - RNA, 72 nt, Homo sapiens
cacaggagaaaagggaaggagaaaagggggagccacgggggacaagcagggaccccaggaacgacgaagacc

SEQ ID NO: 175692 - RNA, 83 nt, Homo sapiens
ggcagcggcggcgggcgggggggaaggacgggcgggccggcgccggagacgagccgggaagagcaggaggaaacaagaagggc

SEQ ID NO: 175693 - RNA, 69 nt, Homo sapiens
cgcagggcgcccccgccagcaaaggccaacgcgcgaacccgccaggaagacgaggaagaaagagaggaa

SEQ ID NO: 175694 - RNA, 65 nt, Homo sapiens
ccaccccccagggggaccgggcgcaagcagccccagacaagccaaaaacagcaaaaacccgcggc

SEQ ID NO: 175695 - RNA, 72 nt, Homo sapiens
gggcagaccccaagagaaaggagccccccaaggagaaagccaggaaggcgaagggaggggaccaacagagga

SEQ ID NO: 175696 - RNA, 76 nt, Homo sapiens
ccaagaaccagaacggccacagaacacaggaagcagaacagacacaagaacaggacgacccagagacacaggcaag

SEQ ID NO: 175697 - RNA, 69 nt, Homo sapiens
gaaggggagccacaggagagcgcccagaacaagccaacgccaacgcggaggccgagcagccaaccacaa

SEQ ID NO: 175698 - RNA, 64 nt, Homo sapiens
gagacaggcgagagaggaggacacgaccggagagcggcggaggaggccaagggaggcgggggaa

SEQ ID NO: 175699 - RNA, 71 nt, Homo sapiens
ggaagccaaaggccggaaaaagacgaaacggacaagccgggaccacgagggcacgaaacggcagaccggaa

SEQ ID NO: 175700 - RNA, 73 nt, Homo sapiens
agacaggcaaaagaaacagggaagacaaaggcacaggcaacccaggccagagaaccccgcgggccaccggagg

SEQ ID NO: 175701 - RNA, 72 nt, Homo sapiens
aacggagcgcccgaagggcgagggccagcgagaaccagccaggaaaaagagccgggaccagcaaaccaagcg

SEQ ID NO: 175702 - RNA, 81 nt, Homo sapiens
gcagggggcggcaacgaaaagagcccgcgaggccgacaagagccacccggagcaggacacgggacccaggccacgggccgg

SEQ ID NO: 175703 - RNA, 77 nt, Homo sapiens
gggcccggaggagcgaacaaggcgacaacacagcccccaacggcacgcccaccaccggccgacgacgccacggccgc

SEQ ID NO: 175704 - RNA, 83 nt, Homo sapiens
gaacacggcccggcccgacgagaaggccaaagaccaggccagccaccagcccaggagcgcagaagaggggcacacagagcagc

SEQ ID NO: 175705 - RNA, 78 nt, Homo sapiens
ccgaccccggcgccccaggcggccggacaacggcgcggcgacaagcaaaagcagaccggaaaacccaccggcaagacc

SEQ ID NO: 175706 - RNA, 71 nt, Homo sapiens
gagagaggggacagacgagagaacgagcggaccagcagacaacaggacaggcaacaaggaagaccaacgga

SEQ ID NO: 175707 - RNA, 81 nt, Homo sapiens
agggaggggccagcacgcacggacacccgagcacagagacgaagaggaccaggagcaaacagaaaagaacagcacgaaagc

SEQ ID NO: 175708 - RNA, 71 nt, Homo sapiens
cgagaacaaaggagagaggaccacccagaggagcaacgcagcccaagagaacgaaagcaaaaagcgccgac

SEQ ID NO: 175709 - RNA, 70 nt, Homo sapiens
caccccgcgaaaggaggaggcacagagacacagaagcagagagagccaccggccagcagagagagacaaa

SEQ ID NO: 175710 - RNA, 103 nt, Homo sapiens
cggagcgcgaaggccgggacccggccccggcccacaggggggggcaaacccgagagaacggaacacagaagagaacccgaacacagcaggagcaagcgggggc

SEQ ID NO: 175711 - RNA, 81 nt, Homo sapiens
cgcagcgagggcaaggaccgcggcacccacgccgcaccggccacccggcccgacaccagccgcgcgcacggaagaccagga

SEQ ID NO: 175712 - RNA, 84 nt, Homo sapiens
acacgaaggaggaagaagagacgaagagacagcggagaaaaagagccgcagacgcacagcaaccaccggacccgaaggccacca

SEQ ID NO: 175713 - RNA, 71 nt, Homo sapiens
agcgcgccacgcgcggcgcgccgagacacggaccaccgggggccgggcaccacggcgcccccgcggcaccc

SEQ ID NO: 175714 - RNA, 60 nt, Homo sapiens
caacccggacaagcgggggacacacaggaagacgaacacggaacgggcgagaagaaagca

SEQ ID NO: 175715 - RNA, 62 nt, Homo sapiens
cagcggaagcggaggagacaacggcaagcggagaagagcaaggccgaaccgagaggaagggc

SEQ ID NO: 175716 - RNA, 67 nt, Homo sapiens
aggcccacacagccacaacggccgagcgaagcccgggggcagacgcgaagaccccagacccccaacc

SEQ ID NO: 175717 - RNA, 80 nt, Homo sapiens
ccgggaccggcgcccccccgcgggagaacagagacccaccaagaaaccagaacccggacaagggaagggcccgaggagga

SEQ ID NO: 175718 - RNA, 72 nt, Homo sapiens
cgaaagagggcacccacccacgaagggaggaaaagggcagggacagcgcaggcagcaggcacgagaacaggg

SEQ ID NO: 175719 - RNA, 55 nt, Homo sapiens
gaacccaagggggagacagccaggaccaggcaggaagcagggacaagggaaacgg

SEQ ID NO: 175720 - RNA, 76 nt, Homo sapiens
ggcgcgccaaggacacggcacaccgaccgacgaacccaggacgagaaaaaacagagcggaacaagcggcccaagag

SEQ ID NO: 175721 - RNA, 77 nt, Homo sapiens
cgcgccgcaccccgagcgaccgggggcgaggccaggcggagagcgaggccaccgcagagaggcacgggccaaaacca

SEQ ID NO: 175722 - RNA, 74 nt, Homo sapiens
agcgaacaccaaagaaggcagggcccgcagcaaagcaaacaaaacacccgaggagaagggaaagcacaaggaag

SEQ ID NO: 175723 - RNA, 77 nt, Homo sapiens
gcaccaggccaccgccacgggccgagacacgcagcggcggccagggaccagacccgagccccaaagacagaaaagcc

SEQ ID NO: 175724 - RNA, 36 nt, Homo sapiens
aggcgcgcagagggcgcaggcaggacacaggcggcc

SEQ ID NO: 175725 - RNA, 84 nt, Homo sapiens
ggagaaggaggaggcggcgaacacaaaaggcgccgaagcaggacccgaagccaaaccaggagggacccagcagccagcgaagcc

SEQ ID NO: 175726 - RNA, 76 nt, Homo sapiens
cccacaacagaagaaaaaaaaaaaaaaagaggaagaaaagagcggaacaaaaacgcaccagaaaaccgccagaagc

SEQ ID NO: 175727 - RNA, 80 nt, Homo sapiens
aacccccagcaggccagaggcacagcccccaggcaggaaacgcaaccggacagaagaggaggcaaggaaagcccaaaacc

SEQ ID NO: 175728 - RNA, 90 nt, Homo sapiens
gagccgggaggaacggcccggaaacaggaggacgaaggagggccccggagcagccacaccaccgaggccccacccagcacgagcacagcc

SEQ ID NO: 175729 - RNA, 72 nt, Homo sapiens
cccaaaggcagaaggggggcccaccgcagaacaagaggcaggaaccgcagaacgaagccacaaagggacgga

SEQ ID NO: 175730 - RNA, 49 nt, Homo sapiens
accacagccgacccaggaaacgcagcagaggcagaacggaagggacaca

SEQ ID NO: 175731 - RNA, 70 nt, Homo sapiens
gggggcggcggggccccccgccagcggggagaaacgggcaagccagagaacacaaaaggggacgagacag

SEQ ID NO: 175732 - RNA, 61 nt, Homo sapiens
gcacggacccggaagaacaggagacccccaggcccaggcgggaagcaggggacgaccccgg

SEQ ID NO: 175733 - RNA, 72 nt, Homo sapiens
agaaacaagagcagaagccagcccaacaagacggaggcaggaacccagcaggggagagagcagggaaagccc

SEQ ID NO: 175734 - RNA, 71 nt, Homo sapiens
gcggcgccggcggcgcgcgacccccgcgcaggacgaaggggcccagggcgcacgcgaccaaacacccacga

SEQ ID NO: 175735 - RNA, 83 nt, Homo sapiens
agcgcagcaacggcgggggaccacgagagcgcgcaaggaagaagagacgccgcgcggcagacaaggcccggcaggcaaagcgg

SEQ ID NO: 175736 - RNA, 80 nt, Homo sapiens
cgcccagggaagacacaccgcaggcacaggcagcccagaaagcgagggcaccagaaagcacagaggagccaccggcccag

SEQ ID NO: 175737 - RNA, 78 nt, Homo sapiens
agcccaaggcggcccggcgggcgacggacggccggacaggaaccaacggacccaaaaaacaaggaggaaaggccccaa

SEQ ID NO: 175738 - RNA, 68 nt, Homo sapiens
ggggccaccgaacggcaaaccaggaaccaggcccaaaaagaagacgacaagcaggcggccgaagaacg

SEQ ID NO: 175739 - RNA, 69 nt, Homo sapiens
ggacagggcagccaagcaggaccacccaccagccaccagaaagcccaagcgcaaaaaaaaggccccaac

SEQ ID NO: 175740 - RNA, 62 nt, Homo sapiens
cagagcgccaaacccccaaggaaggaaggcgggaaaacggcacaaggcgacgagggagggca

SEQ ID NO: 175741 - RNA, 78 nt, Homo sapiens
ccggagccagccagccgcccgagcaccagcaggacgaaaaggcccaggccggcggaaaacccaccgccaaaagagccc

SEQ ID NO: 175742 - RNA, 76 nt, Homo sapiens
cacgcaaaagcaaacgagagacaacgacaggaacaaggcaaaagccgagaagcacccgagacaacagcggcaaacc

SEQ ID NO: 175743 - RNA, 64 nt, Homo sapiens
gaacccgagcccggaaagggggaacaaaaccaaagggggcgcaagcagcgaggccaggagcagg

SEQ ID NO: 175744 - RNA, 82 nt, Homo sapiens
ccggccagccccgggcgcgggcaaacccaccggagcccccgcagaggcccgcaaaaaggaaaggcggccagggagacccaac

SEQ ID NO: 175745 - RNA, 81 nt, Homo sapiens
ccaccagcccagccccgaaggcccgcggagacgagaccaagcccaggggacccagcccccaaccagggagccaggacaccc

SEQ ID NO: 175746 - RNA, 94 nt, Homo sapiens
cggcgcaaaaacacaggcggaagagaccaaccggccgcacgaaaggcgaagaggcccagaacccccgagaaaagccaaccgaagaagaaagagg

SEQ ID NO: 175747 - RNA, 71 nt, Homo sapiens
ggaaagacaggacaccgggaagcggcgcacgcgggacagagcacccgaagcgcccagccagcacgccaccc

SEQ ID NO: 175748 - RNA, 69 nt, Homo sapiens
gggaaaaaacaaccccgccggaaacagaagacagccgaaccaagggcgacaaccagagacaagcaggcg

SEQ ID NO: 175749 - RNA, 58 nt, Homo sapiens
cagaagcacaaagcccgaagcaggaaaacaaagagggaaaacggagaaaagccccccc

SEQ ID NO: 175750 - RNA, 66 nt, Homo sapiens
gccgcagaagcaagagaaagccggcagaacgaccgggcgccgaccccggggcgcaaaaacagacgg

SEQ ID NO: 175751 - RNA, 72 nt, Homo sapiens
accggaaaagagagagagcagcaaggacggggaaccaccaaccggcaagaaagcgcacagccgaaaaccaca

SEQ ID NO: 175752 - RNA, 78 nt, Homo sapiens
caggacaccgcaagaaggcgaacacaaggagacgacggccgcaaggagagcaccacaggcggacagcgacagaggcgc

SEQ ID NO: 175753 - RNA, 52 nt, Homo sapiens
acgggcggacgggcgcccagccagacaggggcaaggccgaggggaacagcac

SEQ ID NO: 175754 - RNA, 70 nt, Homo sapiens
ccagcgcccggagaccacagggcagaccccacaagaaagacacgaagacgagagaagaagaagggaaaac

SEQ ID NO: 175755 - RNA, 59 nt, Homo sapiens
gcccgcagaagcaggggcaggagaaacccagcgggcccagagacgcagcgggaaaacca

SEQ ID NO: 175756 - RNA, 87 nt, Homo sapiens
gaagaagaaagaaacagagggcagcgagaaaggagaaagaagccaagaaagaagcgagagagagagcccaaacgagaaggaagccgc

SEQ ID NO: 175757 - RNA, 55 nt, Homo sapiens
ggggaacaagaacggcgacagacaagaggcgaagggaaaacaaaggcagagaagc

SEQ ID NO: 175758 - RNA, 40 nt, Homo sapiens
caggaacaaagagcaagagaagaagaagggagggaaccga

SEQ ID NO: 175759 - RNA, 81 nt, Homo sapiens
gaagggcagagacggagaagccgaagaggaacaggggacccaggaggcagcggcaggcaagagccgcagacaggcggacgc

SEQ ID NO: 175760 - RNA, 86 nt, Homo sapiens
gcggaccgcggcccgacgaggaagcacgaaagcaccaacgagacccgccacacgaaaggaagaggcccagcagaagggaccgcgag

SEQ ID NO: 175761 - RNA, 80 nt, Homo sapiens
acacgggcccaggcccgagggggccggaccgggagggcagggccaggccgagggcccgcccggccccaggagaagaacca

SEQ ID NO: 175762 - RNA, 70 nt, Homo sapiens
cgccacggcgggccgcgggaggacaccacccacagaccgcagaccagggccccacgacccaccaccacac

SEQ ID NO: 175763 - RNA, 82 nt, Homo sapiens
cggggccgcacccggccgcccggcgccccggggacgccgccccccggagaggaggcagagagccccgcgacgagagagacag

SEQ ID NO: 175764 - RNA, 74 nt, Homo sapiens
ggaacgggcccccggcccagggccccccggaggcggacccccgggaacggacggagcgccggcccaggcggagg

SEQ ID NO: 175765 - RNA, 74 nt, Homo sapiens
ggcgcagcgcgacggcgccggcagggaggcaagcgccccgacccgcaggccagggcccgggacgagcggcccag

SEQ ID NO: 175766 - RNA, 68 nt, Homo sapiens
caccacagagacaaggggaggagagaaaaaccacaagagggcggcaaccggaaacaagaccgcgcacg

SEQ ID NO: 175767 - RNA, 68 nt, Homo sapiens
ggagcccgcgcccgccgcgggagagaggacccccccccccccccaagaaggagcacaacaggcagaca

SEQ ID NO: 175768 - RNA, 79 nt, Homo sapiens
gcagggaccgggggcgccagggaagcgggaggcaggcagccagcaggacaggcaaaaagacagccgaaaaagggcggaa

SEQ ID NO: 175769 - RNA, 82 nt, Homo sapiens
acccaagaaggcgcgaagggcaaggaaagcagcaagagaagagaagccgccgagaaagaccaaagacgaccaccaaagccag

SEQ ID NO: 175770 - RNA, 73 nt, Homo sapiens
cgcacacagcacgcgcagccgcccagaagacagagaacagagcagacggcaagacccagaggggcgaggaggc

SEQ ID NO: 175771 - RNA, 80 nt, Homo sapiens
aacgaccgggcccggaccaggcacgcacaaaaagggagagaagcaggaaagccaggggggccaggacgcaggggagcgca

SEQ ID NO: 175772 - RNA, 78 nt, Homo sapiens
caagagcgcggaacaggacgccccgaggcgcccaccgccggagacgccccgccggacgcccgcaccggcagagaagcc

SEQ ID NO: 175773 - RNA, 74 nt, Homo sapiens
gcgcaaaccaggccaggagagagacaacaggcacaaagagagaaggaacacccacagggcagacagagaaagaa

SEQ ID NO: 175774 - RNA, 79 nt, Homo sapiens
gcccccaggcggccccggggagacacagaaccgggaaccgcacggaaagcgaagacgaagaaagaaagagacagacagc

SEQ ID NO: 175775 - RNA, 60 nt, Homo sapiens
agcaagggaaaacagcccaagcaccaagcgccaggaaggggagaaaagaccaaacgaaac

SEQ ID NO: 175776 - RNA, 82 nt, Homo sapiens
gagccgcaagcagcgcggccaagccacgccaacgagagaggaccagaaccagaccggaaagcaccaggcaaagaaaaaaaca

SEQ ID NO: 175777 - RNA, 72 nt, Homo sapiens
cggacaagcacgagggcgcgccgagacgcccgagcacccagccaaacccaggcccgagaagaagaggaaaac

SEQ ID NO: 175778 - RNA, 87 nt, Homo sapiens
ggacaccggaacgccggaagcacagccgaggccccgcaaagaagggggcgagaagaaaaagggccgcgccacaacgaagggaacccg

SEQ ID NO: 175779 - RNA, 71 nt, Homo sapiens
ggacagcgccccaaaggccggcaacggagaggcacaggaacacgaggaaacccacgcgcagcaggagccgc

SEQ ID NO: 175780 - RNA, 87 nt, Homo sapiens
aagaagacccccacaacaaagcagcaacaagaaagcagaggaagcagaaaggaaggaggggccgggccagcacagaaggaagagaag

SEQ ID NO: 175781 - RNA, 81 nt, Homo sapiens
cacccggcaacaagaagaacgcccaccggaggcaggaccagcgcagcgcgcccaggggacacccagcaggccagggaagag

SEQ ID NO: 175782 - RNA, 35 nt, Homo sapiens
ggaaccagacaaacaccaggccgacaaccagcggg

SEQ ID NO: 175783 - RNA, 83 nt, Homo sapiens
gaggccgccgcgaggaaggcgaggcggggccgaagcggacagggaaggaggagccggaaaagagaggagcgagaggaagcgga

SEQ ID NO: 175784 - RNA, 80 nt, Homo sapiens
gcgccagggcccagccccggacccacgccgccagacccacgcggccggaagccgggccccacggggcgagcaggagcgac

SEQ ID NO: 175785 - RNA, 96 nt, Homo sapiens
cccagccccaccagaccccggccgccgaccgcggccccgccggccgccggccgcgcgggggggcgaccagacgaggggagacggacgggggagaga

SEQ ID NO: 175786 - RNA, 84 nt, Homo sapiens
cgacaagcaagcagcgcgccggccccaacacggaccggagacaccaggggagaagcgacgggccggcggccgcacccacacccc

SEQ ID NO: 175787 - RNA, 77 nt, Homo sapiens
ggcaaagccgaaagggagaggcaacgggggaagagggaacagaaacgcccccgacggaaaccgaacccaaacggcga

SEQ ID NO: 175788 - RNA, 80 nt, Homo sapiens
caggcccagacgagcggaggaggcacagggcgcggaccgcacgagcgcgggacccggcaaagagagaggcacacgccgcc

SEQ ID NO: 175789 - RNA, 37 nt, Homo sapiens
gggaggacaggccccgccgcagcgcgcgagcggggaa

SEQ ID NO: 175790 - RNA, 57 nt, Homo sapiens
caacaacccccaagcagcaagaagaaccacccggacacacggggagccaaagcacca

SEQ ID NO: 175791 - RNA, 80 nt, Homo sapiens
aacgagcggcaacggaacagccaacaaggaaggacgacccaggacagcacaggcacggagcgcggacgcccaggagcggg

SEQ ID NO: 175792 - RNA, 66 nt, Homo sapiens
agaggaagcacacggaagagcgaaaaagagaaagcacaccgaaaacgagaaacgaaagagacacgg

SEQ ID NO: 175793 - RNA, 65 nt, Homo sapiens
gggcgcaagcagcaggaaggagaccaaggaagcaagaggcccccaagaacacaccgaggaaaagg

SEQ ID NO: 175794 - RNA, 72 nt, Homo sapiens
gggacaacccaggagcagacagagaagcgcgcagcaggccgagacagcccgccggaagaagccccgcacccc

SEQ ID NO: 175795 - RNA, 82 nt, Homo sapiens
cggggcgcggcgcaaaggccgcaggcgcgcgccgaacgaggcggggggcccgagaccacaccacacccaccagggaggaccg

SEQ ID NO: 175796 - RNA, 71 nt, Homo sapiens
cccacgcaccgcacaacaagaggccggcggggcgacaggaaggacaaagccagcagagggcgagaacagca

SEQ ID NO: 175797 - RNA, 81 nt, Homo sapiens
cggggcgcgggggccgcgcgaagacaggaccagggcacggagaaggcggaaaggacgaggcagccacgggggagcgggcac

SEQ ID NO: 175798 - RNA, 58 nt, Homo sapiens
aagaggcgcggcccagacagagccccaagaaaaccagaagcaagccaggaccaccgca

SEQ ID NO: 175799 - RNA, 67 nt, Homo sapiens
cagaaacaggacaaaggggacgaggaccagagaagacacacaacaaccccacggagccccaccggaa

SEQ ID NO: 175800 - RNA, 76 nt, Homo sapiens
ggagcccggggaaagaggcgggagagggaggagcccagaccgggcgacccgccccacgaggacaagcagaaaccaa

SEQ ID NO: 175801 - RNA, 79 nt, Homo sapiens
cgcaacccagaccacaaagaggaaaggacgccaggacacacggcacaagggcccgagaaacagccagagcaaccagcca

SEQ ID NO: 175802 - RNA, 70 nt, Homo sapiens
ggccgaaggagggcagaacgacaccaaacccaaaagccaaaagccgagaacgacgaagacggccaacaag

SEQ ID NO: 175803 - RNA, 88 nt, Homo sapiens
gaggcgagccggccgcgggcgcgaccggaggcaggagcgaaacggaaaagacaaggaaacaggggcaggaagagaacagggggggcaa

SEQ ID NO: 175804 - RNA, 60 nt, Homo sapiens
cgcaacagacgcccaaagcggcacaacgcccagagccgagagagccacacaggagaacag

SEQ ID NO: 175805 - RNA, 70 nt, Homo sapiens
cggcgggccagagcggggcgaccaggaaagacaccacgccacccaagagagagcaaaaaccgagaaccag

SEQ ID NO: 175806 - RNA, 69 nt, Homo sapiens
caggagaagcaaagaagggaaaagcagcggaccgccccgggacaaaaaaagaacaaagcacaaaggaac

SEQ ID NO: 175807 - RNA, 70 nt, Homo sapiens
ggcgcccacagccacgggaccggcgcaggagcagaggaccacgagcgaccggaagccgcgggggacaccc

SEQ ID NO: 175808 - RNA, 74 nt, Homo sapiens
gcagggggcacccgcggccggcccggggccccgggaccggcgcccccccgacagaacacaagccagcaggaggc

SEQ ID NO: 175809 - RNA, 88 nt, Homo sapiens
acagcgacgacgcggaggcagagaagggaacgcccggcccagccccgggaccccgaagcaggaggcccaaggaacagcacagcagcga

SEQ ID NO: 175810 - RNA, 66 nt, Homo sapiens
gcgggagcaagaagacagaggcagaccacagaagaacagggccagcccgcaacccccggcgaccac

SEQ ID NO: 175811 - RNA, 46 nt, Homo sapiens
acgacaagcccaggggccacccacaacaagcagagacgaagcgaag

SEQ ID NO: 175812 - RNA, 68 nt, Homo sapiens
ggccgaaaagacagagaggggaaaccccgaaaggggggcagggagagaaggggagaaggaagaagccg

SEQ ID NO: 175813 - RNA, 77 nt, Homo sapiens
ggacacgcggcaggaacggaaaacaagccaagcagcacacacagaaagacagagcgcagaaagaggccgggagagca

SEQ ID NO: 175814 - RNA, 56 nt, Homo sapiens
accggacgcccaaagcccacaacgggggccgggagaggaaggccccaagcagccag

SEQ ID NO: 175815 - RNA, 85 nt, Homo sapiens
gccccccaccgccgcccccccggcggcagcccccgggaccccaagaagaagcggaagaggagccgcggaaccaagacacaaggaa

SEQ ID NO: 175816 - RNA, 59 nt, Homo sapiens
agccagccggagaggccgaaccagcgcgggggcgaggcaagccaccgagaaagggagga

SEQ ID NO: 175817 - RNA, 69 nt, Homo sapiens
cccgcccagaaaccaacagaagaaggggcggcaaggagccaacagaagaccagggccacgcacccaggc

SEQ ID NO: 175818 - RNA, 67 nt, Homo sapiens
ggaggaggacgagcgaggagacagggaagacaagcaaggcagggcggagaagggagagggcagaaga

SEQ ID NO: 175819 - RNA, 63 nt, Homo sapiens
ggcacggagcccagggaagccgggccgagagggcaaaaagggacgagccggaaaggggacacc

SEQ ID NO: 175820 - RNA, 74 nt, Homo sapiens
agaaacaacaaaccggaccaaacacgacaagcaagaccaacgacccgggcgcggggcagcggaccccgagaacg

SEQ ID NO: 175821 - RNA, 63 nt, Homo sapiens
cggggcaggggccagggccagggcacagaacggcacccacgaacccgccgagagagaagcaaa

SEQ ID NO: 175822 - RNA, 63 nt, Homo sapiens
ggccagagccaggccgcccacagacgggggcccaaaacaccacccagacggagcggccgcacc

SEQ ID NO: 175823 - RNA, 49 nt, Homo sapiens
cgcagccaaagacccaagaaagggggccgaagcagcggcagggcaacgg

SEQ ID NO: 175824 - RNA, 72 nt, Homo sapiens
gcaagaaagagcagggaacgcaccccacaaccagcgcaaccagcccggccaccagccccacacgagcgaaac

SEQ ID NO: 175825 - RNA, 79 nt, Homo sapiens
agaaaagcaaagacaccgagacccgggcgcagcacccgacaccagaccacccgagaaaggcgggggagaaacgcagaca

SEQ ID NO: 175826 - RNA, 77 nt, Homo sapiens
ccgacccagcggccccgacagcacggaagcagcggaaaagaacaggaagaccaacgacaggcgcaagaaaccgaccg

SEQ ID NO: 175827 - RNA, 78 nt, Homo sapiens
gacaaggagcgaccccacaccaaagagcccagcaaggagaaggcagagcccccccaggcagaagcccgagcgggaacc

SEQ ID NO: 175828 - RNA, 82 nt, Homo sapiens
cggaaacgacacaaccaggcaaagcacaggaccagcacccagcagaaacaccagaaggccaagcacagcaaccagcaacaaa

SEQ ID NO: 175829 - RNA, 57 nt, Homo sapiens
gagaaaaggccaagaaggcaggcccagaaggggaagacccccagcgaacagagaccc

SEQ ID NO: 175830 - RNA, 79 nt, Homo sapiens
acaacaggccacccaaccgaaaacggaccagaacccaggagcccgggagcagcagaagcaggcaagggaaacgaggaaa

SEQ ID NO: 175831 - RNA, 75 nt, Homo sapiens
cacagaccgagagagaggcgacggcggcgggggagcacccaggagcgagaagagaggaagaaacaaacagaagcg

SEQ ID NO: 175832 - RNA, 94 nt, Homo sapiens
ggcgcccaccacagagaagcagaaggcacaggcccgaccagcacgcgaaagccgccaagaaagggaagcaggcaagagacaggaaggccaccag

SEQ ID NO: 175833 - RNA, 113 nt, Homo sapiens
cagaggggcgaggagggacggcaggggaagacaagaggaggaaaggacgaggggaaaggcagcgagaggaagaaaggacacaaagcagaagaaaagccacaaacagaagcaac

SEQ ID NO: 175834 - RNA, 49 nt, Homo sapiens
gggcaggaaccaccgcccaaagcgagacgacgggaccgaaggaccccgc

SEQ ID NO: 175835 - RNA, 70 nt, Homo sapiens
cagcccaagaaaaagaaggaagccaaccgcgacagaggcaacggaagaacaggaggcgaaggcaagagag

SEQ ID NO: 175836 - RNA, 74 nt, Homo sapiens
aaaaccgcggaaacacacagaaggagagagggcaaagaagaagcaaacacagaaaagccgaagcggaagagagg

SEQ ID NO: 175837 - RNA, 71 nt, Homo sapiens
cacaaaacccagacaaaggaggccagaaagcagccgaagccacggagaagccgccgcagcggccggagaca

SEQ ID NO: 175838 - RNA, 53 nt, Homo sapiens
aaggccagagcacgagcacgggaagaggacagcgccaaacccaagaagaagag

SEQ ID NO: 175839 - RNA, 76 nt, Homo sapiens
aaccacgcaggaccccaagccaagaacgagaaggacacacagaaaggaggagcccaggaccaccgacagcaaggcc

SEQ ID NO: 175840 - RNA, 64 nt, Homo sapiens
aagaaacaaaggacaaagagagcacccaagaagagcagagcccagccaaaggcacgcaccaaac

SEQ ID NO: 175841 - RNA, 102 nt, Homo sapiens
cacgaaggcaccgacgcacagcgaccaccaacagaccgaaggccaagacaaggggcgcagagcggggggacaggcgcaagaccggagaagcaggagcggaac

SEQ ID NO: 175842 - RNA, 70 nt, Homo sapiens
cggcccacacgggaagcgcgggaagggaaagcaccaacggacaaccaggcacgggacaaccagcacggag

SEQ ID NO: 175843 - RNA, 71 nt, Homo sapiens
agcagccccaccggggacggcggcgcccaccccccaggcccacggccacaccgcaagcccggccggggaac

SEQ ID NO: 175844 - RNA, 68 nt, Homo sapiens
gcaggcacccggagcaaaagcccacgacgcccaccgaaaggccaggaagaagcaaaggaagacagaaa

SEQ ID NO: 175845 - RNA, 43 nt, Homo sapiens
agacacgggaccaagaaacagcaaagaagccgaaaaccagaca

SEQ ID NO: 175846 - RNA, 71 nt, Homo sapiens
ccacagcggaccgcggaaaacacagacaaagcagccaagcaaaccaagggacgggaaaacgcagcacaccc

SEQ ID NO: 175847 - RNA, 55 nt, Homo sapiens
gaagcggccgagcaggcgagcgaacgacgggaaacacaaagaagacaccagaagg

SEQ ID NO: 175848 - RNA, 82 nt, Homo sapiens
gacgccgcggacccccgcgaccgcgcggaccagggcgacaaagggacccggaaagcgggagcacggggacgggaaggccaca

SEQ ID NO: 175849 - RNA, 83 nt, Homo sapiens
gcaccggcccgccaccgggcccccaccaagcacgcccagcggcgcaggcagcccagggacccgcagaggagaaggcccagaga

SEQ ID NO: 175850 - RNA, 74 nt, Homo sapiens
aggccggcccgccccaggccgcccccacgggggagcacccagcccacccaggccaaccagcacggacaccccaa

SEQ ID NO: 175851 - RNA, 79 nt, Homo sapiens
gagcgagaccgggcggccacagccgcagggagaacccgaggcgggcccaggcagaagacccccccaggcccaaccagac

SEQ ID NO: 175852 - RNA, 86 nt, Homo sapiens
cggcgagcgggggcggagaccaggagaccccacggagcgggcgacgagcgacccgggagacacgacggacgagaacccccgcgaac

SEQ ID NO: 175853 - RNA, 58 nt, Homo sapiens
ggagaacacagaaacccgccccggacaagggaggcgaggacggacaaaaggaaacgga

SEQ ID NO: 175854 - RNA, 71 nt, Homo sapiens
cccagagccaccaacaacccaccagcagccaccaagggaagaagaaggcaagaaggaagaaaacaggaaaa

SEQ ID NO: 175855 - RNA, 83 nt, Homo sapiens
cgcaggaacgcgaaccggcaggccgcgccaggagccaccaagcgagcgagaagaggcgacaccagggcccaaagaacaaccga

SEQ ID NO: 175856 - RNA, 78 nt, Homo sapiens
ccgcaaagagccagaggggagacacgccaaagccccaagacgggaacaaaggagaaagggcacgaagagagaggagac

SEQ ID NO: 175857 - RNA, 73 nt, Homo sapiens
ccaaagaagccacagaacaggggaggcagccagcggcaaaccgacaacagagccgaagaagccccacagcacg

SEQ ID NO: 175858 - RNA, 40 nt, Homo sapiens
caacgcgagcggcgcgcgggacgaagaaggagcacaacag

SEQ ID NO: 175859 - RNA, 49 nt, Homo sapiens
caaagaaacaccaaaaagcaaggcaaaccagggggccacacagagcgca

SEQ ID NO: 175860 - RNA, 77 nt, Homo sapiens
caacaacagaagaccaacaacggaagcgcccaaggacaggacaaacagcgcagaagaacagcaaaagccaaccacac

SEQ ID NO: 175861 - RNA, 76 nt, Homo sapiens
cagccgagagaaggcggggcccccccgcgcggccagaccgcggacccgagccccaaagacagaaaagccccgagac

SEQ ID NO: 175862 - RNA, 42 nt, Homo sapiens
gacccagccaccagcaaaccaggagccgcgagcaggagcacg

SEQ ID NO: 175863 - RNA, 77 nt, Homo sapiens
caccaggcggagccccagccggggcccagcgaacgccagcgcaacaggagacgaacccagaccagcaaaacggagca

SEQ ID NO: 175864 - RNA, 75 nt, Homo sapiens
gagaaacaacggcccgaagagagaccgggacaaaacaccaacacggggagaggagaaccccaaagcagagaagga

SEQ ID NO: 175865 - RNA, 53 nt, Homo sapiens
gaccggccgcgacagcgaacagcgcggccgcagccagcaggacaggcacaccc

SEQ ID NO: 175866 - RNA, 64 nt, Homo sapiens
gaaggaccaagaaccaggacgcccgccaacgcccggggcggccgccaccccaacacaccaccag

SEQ ID NO: 175867 - RNA, 75 nt, Homo sapiens
cggagccagcaaaaacacaaacgagggagcaaggacaccaccagggagccaggagagccgagagcaggagccaga

SEQ ID NO: 175868 - RNA, 62 nt, Homo sapiens
gggacgccagcgcgggaggcgcccggaccaccaagcagagcgcagccgggagaggacgacaa

SEQ ID NO: 175869 - RNA, 78 nt, Homo sapiens
ggcccccccggggcaacccagacggcaacaaaggcgagagccccggggcccgcgcaaaaccaaccggaagggaaaggc

SEQ ID NO: 175870 - RNA, 75 nt, Homo sapiens
ccggccccagccaacagacacaccagcgaaaaccgacacaaaaagcaccaaaccaaccgagaagacacaccgaag

SEQ ID NO: 175871 - RNA, 77 nt, Homo sapiens
ggggaccaaacagcaggggacaaggccccagaaggcagaaccagcaaaacccgagggcaccccgaagaaaaaaagag

SEQ ID NO: 175872 - RNA, 53 nt, Homo sapiens
ccccacggccaggaaaacggggaccaccacgcccagggggcccccaaagggaa

SEQ ID NO: 175873 - RNA, 83 nt, Homo sapiens
gcagaagagcaagaaacagaagcgagaggaaccagaaaaagggagcacaaggaagagaccgaccaacgggcagagggagcggc

SEQ ID NO: 175874 - RNA, 56 nt, Homo sapiens
ccgaccaggaacccaggcccgcgacaggggcggcgccgcagcccgccaccgacggg

SEQ ID NO: 175875 - RNA, 84 nt, Homo sapiens
aagccgacaaggcgcaagcgaaaacagaccgcgagcccagagaaaggcaggcaaggagcaaggaggaaacagaagggacagaca

SEQ ID NO: 175876 - RNA, 53 nt, Homo sapiens
ggcccacggccggaaacccgcaggacacaggaacgccacaagaaacaacagca

SEQ ID NO: 175877 - RNA, 82 nt, Homo sapiens
cgcgcaccgacacgagcgaccgcacgccccgccgcgcacaaagggaccccagcaacaaccggaagaggggaccacacgaccg

SEQ ID NO: 175878 - RNA, 77 nt, Homo sapiens
aaaacacaggcgagaaacagccaaaaggggagccgccaccaaaagcagacggaaaacccacggggaagaccacaccc

SEQ ID NO: 175879 - RNA, 79 nt, Homo sapiens
gcggcgggagcgcggcggggccgcagaggacccaaagacaggaccacgcaccagcagagaaggaaagcaaaccgaagca

SEQ ID NO: 175880 - RNA, 68 nt, Homo sapiens
acaaggaaaaaaccgggagacacgggaccaagaaacagcaaaggggaggagaaacaggaccacacaca

SEQ ID NO: 175881 - RNA, 67 nt, Homo sapiens
gcaaacagagggcccaggggggaaaacgaagaacaggcaaaccgacaccagcgacacaagcgcgagg

SEQ ID NO: 175882 - RNA, 84 nt, Homo sapiens
ccggaagccgcgccgccgccgccaggcacagccagggcgaaagaagaccccgccaccggcccccacgcaccaccaaagccgcac

SEQ ID NO: 175883 - RNA, 70 nt, Homo sapiens
aggcggcaggggcaggaaaggccaccaaaggaacagaggagagaaagacaagaccgccacccagggacgg

SEQ ID NO: 175884 - RNA, 76 nt, Homo sapiens
agccccccggcgagacagccgaggcaggaagcccggcggacgacccggacccccacaccggagcagggccacgccg

SEQ ID NO: 175885 - RNA, 60 nt, Homo sapiens
cccaagaccagagccgggaccccagccagacaagggaggcgaggacggacaaaaggaaac

SEQ ID NO: 175886 - RNA, 66 nt, Homo sapiens
agggccagggaaacagacgaaaacccggcgccggaagcgggcaccaacagacaaccagggcaagca

SEQ ID NO: 175887 - RNA, 76 nt, Homo sapiens
gcggcccaacgagaaaaaggccacacgaaaagcagcacgacaccgccaagaaggagaaagccggaagaagagacgg

SEQ ID NO: 175888 - RNA, 71 nt, Homo sapiens
aggcaacagccagagcaagggcagcgggcacgggaaacaagcggagaagccggccgagaacgcgaacgcca

SEQ ID NO: 175889 - RNA, 94 nt, Homo sapiens
gccccccgggaaagaccgaggaagaaaggggaccacaggccaaggggccgccccccgggcgaggcagagacgccaggggcaaagcgcgggaagc

SEQ ID NO: 175890 - RNA, 65 nt, Homo sapiens
ggccaggggagaacaacgggaaggagggagaagaaggccccggcccaacccgccaaggccacgcc

SEQ ID NO: 175891 - RNA, 69 nt, Homo sapiens
gcgcacggcaccaaggcaagcaaggacaaggaaggcaggaaacaagccaacaacgaagcacagaaggaa

SEQ ID NO: 175892 - RNA, 72 nt, Homo sapiens
gccggccgcaacggccaaagaagagacggacaacaccgggaacgcgagcccagaaccgaaccacgcccggga

SEQ ID NO: 175893 - RNA, 103 nt, Homo sapiens
agcacaaaccggaaaaaccccgagccgacacgagaaggaccacaggaacgcaaccagaagaagaaaaaagaggaacaaaggagcagaaagcgaacggacagaa

SEQ ID NO: 175894 - RNA, 68 nt, Homo sapiens
ccgcgcggggacccgacgcccgcacggggagccagcacacaaacaaaaccaacaacgcccaagcggaa

SEQ ID NO: 175895 - RNA, 72 nt, Homo sapiens
aacacaagaaacaagcaacgacagaaccagaagacaaaaacaaggccgcgcagacggagcgacggcagacca

SEQ ID NO: 175896 - RNA, 83 nt, Homo sapiens
ggcaaccggacaaaggggaaacgaaggggggcaagacacaaaccgcaacagccagaggcccaggacagcgagacagccaggac

SEQ ID NO: 175897 - RNA, 83 nt, Homo sapiens
aacccggagcgaggaacagaagaagaagaaccggaagaaacgccgagaagcccaaaacacaagcgggacggaagaggcccggc

SEQ ID NO: 175898 - RNA, 91 nt, Homo sapiens
ggcacaacgcggccggcgcccgcacccaccgagaaccagccaccgacccaggagcaagaggggggggcccccccgaagaaaggaaccgggg

SEQ ID NO: 175899 - RNA, 75 nt, Homo sapiens
cagcccagggcaaacccacgccaagcacagccagccccaggggaaccaccccaaggggagccgcccagcaaaacc

SEQ ID NO: 175900 - RNA, 79 nt, Homo sapiens
ggggacgcccaacgaagagaccaccgcccgagcaggcagaaaacaccaagacagaagcagacagaacaaagcggaccgg

SEQ ID NO: 175901 - RNA, 113 nt, Homo sapiens
aggcacaaaacgcccagcaaaccaagagggagaagacggaagaaagcagccaagacagaaggacagagaagaacccagaaaaaagcaaggccgaaaaacgagagaggaggacg

SEQ ID NO: 175902 - RNA, 94 nt, Homo sapiens
acgagcggcagagcgggccaggaaccggagagaccggacccccggaaaggggcaacggcgagagggggacacggaaagcacaaggagaaaaaag

SEQ ID NO: 175903 - RNA, 43 nt, Homo sapiens
caagagggagaacgagaaggacagccaggcccacgcacccagg

SEQ ID NO: 175904 - RNA, 93 nt, Homo sapiens
cgccgggacacaccccaggaaaaagacagcccgcagcacgaccagcaggaacggagggagcaacaacaaggagcaagcacagcgcgagccagc

SEQ ID NO: 175905 - RNA, 60 nt, Homo sapiens
gaccggaggggagccgcccggcgagacggagggaaaagccacgggaaagccagacacaca

SEQ ID NO: 175906 - RNA, 71 nt, Homo sapiens
cgcaacaaaggagcacgacggcaggaaggaggagacgaagaaaggaggagaacagaaacggaacccaacaa

SEQ ID NO: 175907 - RNA, 58 nt, Homo sapiens
cagacagaacagaacccaaaagccgacaaccccagaaacagcaacaaggcggcaggag

SEQ ID NO: 175908 - RNA, 65 nt, Homo sapiens
cggaaagaagagacacagaggagccacacccccagaaaccccacagcggagaaaaaggagaaacc

SEQ ID NO: 175909 - RNA, 64 nt, Homo sapiens
cgcagaccgcagaaggccggagacaccagcagaacccgagcaaccccgagaagagaagaacccc

SEQ ID NO: 175910 - RNA, 77 nt, Homo sapiens
ggaccgcgggacaagaaaacagcgggggagacgaaccggcaaggaacagacgaagagcagagccaggcgacccagca

SEQ ID NO: 175911 - RNA, 84 nt, Homo sapiens
gggagagacggaccagaccagggccgagcacaggaggaccgcgccaacaggacgaggagaccgaccaggagaccccagcggaga

SEQ ID NO: 175912 - RNA, 82 nt, Homo sapiens
gccgaaggcccggcccacacgggaagcgcgggaagggaaagagcaggcagaagccgagggaacgagagaagcacaagaacaa

SEQ ID NO: 175913 - RNA, 87 nt, Homo sapiens
gggaggcccggcggaggacgacccaaccggaacagcccccagcggcccaggcccagacccaggcagggccaggccagcaggaggagg

SEQ ID NO: 175914 - RNA, 51 nt, Homo sapiens
gccaagccagaaggggaaaaggcccaccagggcccaggaagggccgagaag

SEQ ID NO: 175915 - RNA, 85 nt, Homo sapiens
gaccccggggcgcagcgcagcgcagcggagcagcgcgaaaacaagaaaccgcccccaaagccagagcccaagccaaaaaggcccc

SEQ ID NO: 175916 - RNA, 83 nt, Homo sapiens
gccgagcggaccagagcccccccagaaaccccgcgccgccacggcccaggcagagagagggcagaaaccgaggcagcagaagc

SEQ ID NO: 175917 - RNA, 69 nt, Homo sapiens
gcagacagcagcggggaaaaacaagagggaaaaaaccaggcagccaaacgcgccagagaaccaggaaaa

SEQ ID NO: 175918 - RNA, 74 nt, Homo sapiens
acacacccacaggaaacaagcgacccgagcaaagcagccgccggaacccaaggaccgcaaagaaaacccagaga

SEQ ID NO: 175919 - RNA, 78 nt, Homo sapiens
gggcaccccaaaaagcgaccagagcaggaaaccagccaagcaaccggaaagaggcagaacaccaaggaaagaagaaga

SEQ ID NO: 175920 - RNA, 85 nt, Homo sapiens
gaaggagaaccggaacggaaaagacagcgaggccaaacgaccaagaaagcgggacgcggaaaacgggacccgcaggggccccccc

SEQ ID NO: 175921 - RNA, 54 nt, Homo sapiens
agccggaaggaaacccagacacgaaacacggcaccgggggcggaaaagcagaaa

SEQ ID NO: 175922 - RNA, 77 nt, Homo sapiens
ggcggggaaaaaaccagagaccacagaaggacgggagaacaccccacagggaagagggacccagagagggaccaggg

SEQ ID NO: 175923 - RNA, 58 nt, Homo sapiens
ccggaggggagacgggaggcagggcaacggggaggcagcccggccgcgcaccacaccg

SEQ ID NO: 175924 - RNA, 70 nt, Homo sapiens
aggcgccgggcccgacccgcgagaggacaccaacccagacaacaggaagaaaccaaaaagagaaaaggag

SEQ ID NO: 175925 - RNA, 84 nt, Homo sapiens
ggacggcggcccagcgagggcggcccggggcacccgcacgggaagcaggcccgccacagggcacacacaacagaggacaaaggg

SEQ ID NO: 175926 - RNA, 39 nt, Homo sapiens
ggcgccagcgagagcccaacaagaacagccagcaaagac

SEQ ID NO: 175927 - RNA, 57 nt, Homo sapiens
agaccgaccaccaaaaaaagaccacacagggaaacgaccagggagagaccaacagga

SEQ ID NO: 175928 - RNA, 71 nt, Homo sapiens
acgccgggccccagccacgaggccgccaggagacagaccgacagcaacaagaaagaaacgggcacaccaac

SEQ ID NO: 175929 - RNA, 81 nt, Homo sapiens
caccggagccacggggaagggacccgaaggggaccccagcccccccagccgaaacagaagacggaacaagaaaggaccagg

SEQ ID NO: 175930 - RNA, 60 nt, Homo sapiens
gcacacgcacccaggggcagccgcaaggaagaacggaccgaagccaaagaacaagagcgc

SEQ ID NO: 175931 - RNA, 35 nt, Homo sapiens
ccaagggacgagacaggggacacgagcaggagacc

SEQ ID NO: 175932 - RNA, 79 nt, Homo sapiens
gaggaagaagcccaggacgagacacacggcacacaccagcaggcgcagaacgagggacaagaggagccaagcgggaaaa

SEQ ID NO: 175933 - RNA, 61 nt, Homo sapiens
aaccgccgccccaaacaccagccagcgagaggacccaagaagaccagccgaagcccggaaa

SEQ ID NO: 175934 - RNA, 72 nt, Homo sapiens
gcaggcgcggcagcacaccagagcggcccgcgagagacagagcagcggcggcgggacgcgagggacgggccg

SEQ ID NO: 175935 - RNA, 65 nt, Homo sapiens
cggcagcggcggcggggacccggcgggcccacggaggggccacacaaaacaaacgaagagacgga

SEQ ID NO: 175936 - RNA, 73 nt, Homo sapiens
ccagaagggaaaccccaccgcaagaagcgagagaaaacgccagagcaaccagaggcagcccaaagaggagagc

SEQ ID NO: 175937 - RNA, 67 nt, Homo sapiens
aagcgacccggccggacccaccgaccagaacgcggcagaacggaggcaggcagcacgagacacacca

SEQ ID NO: 175938 - RNA, 80 nt, Homo sapiens
gccccgaccccgcggccggacgacccaagcccgcgagcaggagaggggaaaaaagacgacaagaaggagcgaacgagaag

SEQ ID NO: 175939 - RNA, 88 nt, Homo sapiens
ggccgcccgcacagggcacaccacggaggccgaccacaccaagcgaagcaagcgcaggggaagacagacggagaaggaacccggccgg

SEQ ID NO: 175940 - RNA, 43 nt, Homo sapiens
ggccagcgcagcccagccccacaaggaaacacaaagaagacac

SEQ ID NO: 175941 - RNA, 63 nt, Homo sapiens
gcaaacgaaaaagaacgacagagcaaccaggaaagaagagggccacaccacgaggcgagccaa

SEQ ID NO: 175942 - RNA, 80 nt, Homo sapiens
caagaacccacacgcgccgagcccggagacacgaacgccggacgggggaagagacgagggccccagccagccacgccagc

SEQ ID NO: 175943 - RNA, 77 nt, Homo sapiens
gcaacaaaggagcacgacggcaggaaggaggagacgaagaaaggagggccaaccgccccccagcagcaggcacgggc

SEQ ID NO: 175944 - RNA, 78 nt, Homo sapiens
cagagcacacacggccaagagcgggcaccaggaagcgaaggcgccgcagaaagcaacaaagcgagagcacaagaaaac

SEQ ID NO: 175945 - RNA, 63 nt, Homo sapiens
aggcccacgggagaaaaccgggcgcaagggaagaaaacgccagagaagcagagcagcccggag

SEQ ID NO: 175946 - RNA, 74 nt, Homo sapiens
cccggcaagcggccaaaggggagaagacagaggagccagaccaagagacagcacaggcgagcgagcagagacac

SEQ ID NO: 175947 - RNA, 83 nt, Homo sapiens
ccaccccacaaggaggaaacggccagagaggggaaggggccaaggcacccagcgaccgcccaagaaccaagggaaaagacaga

SEQ ID NO: 175948 - RNA, 81 nt, Homo sapiens
cgccccccgacgccccgccgccgccgaggaggcgagcagccgggagacaccgccaccgccaggccaaggggccccggggcg

SEQ ID NO: 175949 - RNA, 72 nt, Homo sapiens
agcaccgacgacaaaccccaccagccaggagcgcacccagcgcaggggcacaacgccaagagagaaccagca

SEQ ID NO: 175950 - RNA, 71 nt, Homo sapiens
cgggggccacaaagccccccggagacgcaaccaaggcgagagagacagccggccaccaggggagcacggcg

SEQ ID NO: 175951 - RNA, 90 nt, Homo sapiens
ccgggcggggggcccgggcgccgagccgcaggagagacacgcgggccgaccccagagcggcgcggacaggggcccaccacagccacccac

SEQ ID NO: 175952 - RNA, 66 nt, Homo sapiens
cgagggagcggccaagaaaccaggaggaacagggcgaggagaaaaacggagaaagagaacacaacc

SEQ ID NO: 175953 - RNA, 71 nt, Homo sapiens
cagcgccgccagcagggccgaccagacgcaacaggggaccagcaaaggagcagggcacaaaggaaaaaaac

SEQ ID NO: 175954 - RNA, 39 nt, Homo sapiens
ccgaagcgacccaggagacagcaagggaggggcagcaga

SEQ ID NO: 175955 - RNA, 58 nt, Homo sapiens
ggagcggagccgcgacggcagcggcaagaagggaagggaagagaagaagaccagggaa

SEQ ID NO: 175956 - RNA, 78 nt, Homo sapiens
ggcaaccgggcggccacgcccgcgcagaacggcagcgcggagggggccgcacggaggacacgcacggaccaggccacg

SEQ ID NO: 175957 - RNA, 71 nt, Homo sapiens
ccacagccgcacggacccccaggaggaggaagaaacaagcaagaaaaacagccgcagaaagcaccaaaaag

SEQ ID NO: 175958 - RNA, 74 nt, Homo sapiens
gagcaaggaggaaaacacacgaaaaagggaaccagcgccggccccgagccagaccccagaaaccccgagcgggc

SEQ ID NO: 175959 - RNA, 69 nt, Homo sapiens
cgagcaaacgcgaaccgcgcaggacgccaaaccaagccgcagggggaaggcacaagccagaagacgaac

SEQ ID NO: 175960 - RNA, 65 nt, Homo sapiens
cgccacgggcagaagcagaacaccgagaacaaaggagacaggcaaggagccagcaggagacaacg

SEQ ID NO: 175961 - RNA, 38 nt, Homo sapiens
gggacaccggaagccgagaaagggcccggcaggaaccg

SEQ ID NO: 175962 - RNA, 74 nt, Homo sapiens
gaagacaagcaaaaagacgggaaacggcaaagaaacagaaggccagaaacagcagcaaaaccgccccacggcga

SEQ ID NO: 175963 - RNA, 82 nt, Homo sapiens
agccagggaaccacggagcacgagaaaacggcgggccgagaagccagggcacagaccggaagggaggcgggggagcccccgg

SEQ ID NO: 175964 - RNA, 72 nt, Homo sapiens
agggcggggagcgccggcggcgcccggaaggcgcgcccaaaaggcccaaggagaagcaggaggcgagaccaa

SEQ ID NO: 175965 - RNA, 71 nt, Homo sapiens
acggagagcaacagcagggagaccgccaaagacgacgaacccaaagaacagaaaaggcagaaaaaaagcaa

SEQ ID NO: 175966 - RNA, 71 nt, Homo sapiens
gcgacggagccaggcggagcggcgccgccgggagaccggaaacgagagaaacgaagacgaagaaacagccg

SEQ ID NO: 175967 - RNA, 56 nt, Homo sapiens
ccaaagagaaaacccacaacgcgcccacacccacaccccaagcagccccgccgcaa

SEQ ID NO: 175968 - RNA, 79 nt, Homo sapiens
ccagcacgagacagagacaagacggcgacgcagacagccagcaagggggaccgaagcgacaagaccgccaacaagccac

SEQ ID NO: 175969 - RNA, 39 nt, Homo sapiens
cccgaccccagcaaacacggccaaaagaagacccagaca

SEQ ID NO: 175970 - RNA, 39 nt, Homo sapiens
gaaaaggacaagccaagaaccaagacaggcgcccagggc

SEQ ID NO: 175971 - RNA, 82 nt, Homo sapiens
ccccaggacagcaccagcgggccggaggagccagagcgcagaaagaaaaccggcgcagagccaaaaggaaccgaggaaaagc

SEQ ID NO: 175972 - RNA, 80 nt, Homo sapiens
aaaggagcggaggagcagcgcagcgcccgaggaagccggggccgagacaagcccacgagcagcagaccgcagggaagaac

SEQ ID NO: 175973 - RNA, 83 nt, Homo sapiens
cggccgggcggcgcggccgcccgggccgggccccaccggacgagccggaaaccggccggcgcaggcacacaccggccccagga

SEQ ID NO: 175974 - RNA, 54 nt, Homo sapiens
aggggcaaaaacccacaagacaagaccaggaagacaccaaagaggggaaccccg

SEQ ID NO: 175975 - RNA, 66 nt, Homo sapiens
aaaacgcacggaaagacccagaaagccaagacaaagacgccgccggcaaaaaggcaaaaagagcgc

SEQ ID NO: 175976 - RNA, 74 nt, Homo sapiens
cgacaaaccgaccgaccaggagccacagggacacagcaggcaggagagacaacagcaacccagcaacagaaggc

SEQ ID NO: 175977 - RNA, 59 nt, Homo sapiens
ggggaggcgagcccggggaggcgcgccaggcccagaaggggaagacccccagcgaacag

SEQ ID NO: 175978 - RNA, 57 nt, Homo sapiens
gcaggcaggccaggaaacaccaccaacagggcaaaagcagaccggaaaacccaccgg

SEQ ID NO: 175979 - RNA, 73 nt, Homo sapiens
ccgaagcaaaaagaccagcacgaagggcgacgaaaagcgggcgccaacaagcagacgaaacaagggacaggaa

SEQ ID NO: 175980 - RNA, 71 nt, Homo sapiens
caaaggaaccccagagaaggccagaaggacagaaacgggaaccaggggaaaaacacggcacaacccagaaa

SEQ ID NO: 175981 - RNA, 81 nt, Homo sapiens
ggccggccacagggcgccgccaccggggggagacgccgagggacccacacaaccaccagcgagacggggcgccagggccag

SEQ ID NO: 175982 - RNA, 77 nt, Homo sapiens
cgggcgccacgagcagacagacagggcgcgccaccagagcagcacaggagggagcaggaaaaaggcggagaggaagg

SEQ ID NO: 175983 - RNA, 93 nt, Homo sapiens
ccaagccgcacagccgcggcggcagcagcaggagaggccaggcagagcagcccaccagggaggggagggggggaggcgcaccccgcgcccacc

SEQ ID NO: 175984 - RNA, 59 nt, Homo sapiens
gcgggcgagacggaggagggcccgagggccggggacaaccacagcagcggggagaggcg

SEQ ID NO: 175985 - RNA, 76 nt, Homo sapiens
acagaaagagcaacagcagggcaacagaccgcaacccaccaaggagcacaggacgaagaggaaggaaaaaacaggc

SEQ ID NO: 175986 - RNA, 67 nt, Homo sapiens
cgggaccagggaaggaagggacggggcagaaacagaagaagggacaagagaaaaaaagggcgggcga

SEQ ID NO: 175987 - RNA, 74 nt, Homo sapiens
cgcaaagccgcaaaaccaaggcagacgcggccagccaccagacacaccgcaagggaccgacgaacagacgggag

SEQ ID NO: 175988 - RNA, 110 nt, Homo sapiens
gggacggggaaggccggggcgcccggcgccggccgagaaggcagaggcggacggccagcagaagcaggcgagccccccgagaaaaagaagaaacgcgggaccacagccga

SEQ ID NO: 175989 - RNA, 72 nt, Homo sapiens
aagaaacggccaggagcgaccagcccccagaacagagccaaggcggaagagagagcaggacacgaagagcag

SEQ ID NO: 175990 - RNA, 41 nt, Homo sapiens
gaaacgagaggggagaagagagaaaaggaacagccgaagcc

SEQ ID NO: 175991 - RNA, 81 nt, Homo sapiens
ggggaccgcgaaggaccagagagggagcccgccacacagcccgacggccagcgaagccaccgcaggaagggaggccagccg

SEQ ID NO: 175992 - RNA, 80 nt, Homo sapiens
cacagggcaaggcggcggacggcgcgcgcccgaggcgaggaggagcgcggcgacacagaccagcgcgagagaacaccaag

SEQ ID NO: 175993 - RNA, 104 nt, Homo sapiens
aggcgcggccgcgcgagggaccggagcacagcccgcaggcggcgacagcagagcgcccacgccccagcagaggaacgccacaaagcaggcgaacaagaacacag

SEQ ID NO: 175994 - RNA, 62 nt, Homo sapiens
ccacagcaagacaccgggaccccggaagccaaaaaggaaagaaggggagccagagagcggcc

SEQ ID NO: 175995 - RNA, 78 nt, Homo sapiens
ccaagcccagacgacgcgcggccagggccaggacggccagcagaagcaggcgagccccccgagaaaaagaagaaacgc

SEQ ID NO: 175996 - RNA, 94 nt, Homo sapiens
acaaaacaagacgcccggacaagaggagagaaacaaaccgggcaaggcaggcccggcaaacggaaggcaagcggcaagagagcggaccacccag

SEQ ID NO: 175997 - RNA, 66 nt, Homo sapiens
agaaaggacgaagcggaccagaacaaagggaagcagagccccgggccgggaaggggaaacggccac

SEQ ID NO: 175998 - RNA, 60 nt, Homo sapiens
aaggaccaccccaacaggaaacaagggcagccagcggcaccaaaccaaaccccaggcacc

SEQ ID NO: 175999 - RNA, 86 nt, Homo sapiens
ccgagccaacaggagcagcgcaggccgagaacacccaaggcaagaacccgaccgacggagagcagcagcagcagcagcagcagcag

SEQ ID NO: 176000 - RNA, 51 nt, Homo sapiens
ggacggcgacagcgccgaacagaagcgggccaacggcacaaaaggcacggg

SEQ ID NO: 176001 - RNA, 75 nt, Homo sapiens
accgaaaaaaaaagaaaaggaaggagagaagagaggaaggggaaccacaaagaagagaaggcgggccaagaccga

SEQ ID NO: 176002 - RNA, 63 nt, Homo sapiens
acaaagccagcaaccacagagggcgagcagaggaagagaacccacaacagccacgacccgaag

SEQ ID NO: 176003 - RNA, 31 nt, Homo sapiens
cccgaaggcccacagacagggcgccggccca

SEQ ID NO: 176004 - RNA, 76 nt, Homo sapiens
gacccagaggcagagccgccccagcagcaggggcgccagggcaacaacacggcaccacacaagcgaagaagccgag

SEQ ID NO: 176005 - RNA, 52 nt, Homo sapiens
ccaggagacaacacaccccgccccccccaaagaggcggaggcgaggcacgac

SEQ ID NO: 176006 - RNA, 70 nt, Homo sapiens
cacgagaagagcagagccccaaaagaggagggcaggaaccccagaggcggagagggagaagcacgggagg

SEQ ID NO: 176007 - RNA, 50 nt, Homo sapiens
ccaaagcgccaaagaaaagcaggaaggaacagaagggaggggaccgacca

SEQ ID NO: 176008 - RNA, 70 nt, Homo sapiens
gccagaaaacagaaacgaaacagaacagagagaagcccagcagaacgggaaaaaaaagcacggacaggga

SEQ ID NO: 176009 - RNA, 85 nt, Homo sapiens
cgaggccacggaggagggggggccaaaccaggcccgccaccccggcgcccccagagccgcccacccagccgaccaagccacagcc

SEQ ID NO: 176010 - RNA, 65 nt, Homo sapiens
ccggagaacggccaggcggccccgagcggaacggagaaagcgaggccacccgacgacgccaccca

SEQ ID NO: 176011 - RNA, 69 nt, Homo sapiens
gaacaaccgcggacacggagaggaagggcgaagagcaagaaaggcgaaccggggcagaaaaaaacaacc

SEQ ID NO: 176012 - RNA, 71 nt, Homo sapiens
gacaagaccacaccggacaccaccaccccacgagccgcgcccagaaagcgaccaaccagccgaccaagaaa

SEQ ID NO: 176013 - RNA, 60 nt, Homo sapiens
gcaagacagaccggggagacggaggacaccgcggagccagacaacgaagccgcaagagga

SEQ ID NO: 176014 - RNA, 67 nt, Homo sapiens
gagcgaacgaagaggcacacaaggcgcgaggacggcgagacagagaccagccccaggccccagcgcg

SEQ ID NO: 176015 - RNA, 81 nt, Homo sapiens
ggcaggaacagacacggggaagcgcaaaaacaagacggggcgccccacagaggggcgacggccaaacgaccaagaaagcgg

SEQ ID NO: 176016 - RNA, 67 nt, Homo sapiens
ggcagacaacgccgaacgcccgggggaagggacaacaacacaagagagaccgacgcagaaccaggca

SEQ ID NO: 176017 - RNA, 73 nt, Homo sapiens
gggcaaagagagcagacccgaggagcccgcagaggaagcaccaaccgcccccaggggcagcggggagcggggg

SEQ ID NO: 176018 - RNA, 58 nt, Homo sapiens
cgaagacggcaagcacggccacgccaaggggagacgcgccacgcccccaaggacaccc

SEQ ID NO: 176019 - RNA, 75 nt, Homo sapiens
gcggcacggccacgccggccggggaggcggggccagggggaagagaccaccggaaaccgagggcgggagaaaacc

SEQ ID NO: 176020 - RNA, 72 nt, Homo sapiens
ggggaaacccaaacaacacccgcaccgggcgccccgcaggaacccgacagcaaagcgcaacagacaccaagc

SEQ ID NO: 176021 - RNA, 72 nt, Homo sapiens
caagcccacacaaggaaagccaacaggcaacacccgacacccccaaggaaaccagagaccagaagaggagaa

SEQ ID NO: 176022 - RNA, 76 nt, Homo sapiens
acagaaaagagcgggccaaaggaccaagggcacgagccaaggagcacaacgggcagggacaggacagcagaccaca

SEQ ID NO: 176023 - RNA, 77 nt, Homo sapiens
cgggaagcccaccgacgaggacggaggacggagaggaccgcaccagcacgcccacccagaggcgcgaccgcccaggg

SEQ ID NO: 176024 - RNA, 73 nt, Homo sapiens
gagggcggcccggacaagccagacaacgccgacagcgcgaacaagaggcgccagcgggcgcgccggaagaaca

SEQ ID NO: 176025 - RNA, 78 nt, Homo sapiens
ccgcccccagaccaccagaacacacccgagccgcgcaccacaggcaagacacgcagcggccgaggcaggggaagagag

SEQ ID NO: 176026 - RNA, 83 nt, Homo sapiens
gacaaggaaggaagaaggcgcacaccccagcgcgcaaagcgcgaggggcgagggaaacgaacagccaagacccaaacaaacca

SEQ ID NO: 176027 - RNA, 82 nt, Homo sapiens
agacccacaggccaaaggagcggaagcagccagggaggaaccagaggaaagccccagaagcaaagagaggagaagaaaggaa

SEQ ID NO: 176028 - RNA, 71 nt, Homo sapiens
ggagaagcacaggcaacagaacaagcagaggaaagacacgccagagaagaacaggacacaacaggagacgg

SEQ ID NO: 176029 - RNA, 87 nt, Homo sapiens
agagagcaggccggaccccagggaccgagcccagaacccggacgggcagacaccaggagaagacgcccagaccgcacgcgggaggcc

SEQ ID NO: 176030 - RNA, 74 nt, Homo sapiens
aaggcgggccgcaacgccacgacagaaggcgccaggcgggaaaccggcccagcggcacaaaacagaggagacca

SEQ ID NO: 176031 - RNA, 50 nt, Homo sapiens
ggaagggacaaaacagaggcaacaagacaagcaaacaacggaaaggaggg

SEQ ID NO: 176032 - RNA, 59 nt, Homo sapiens
caggaaccagcagagaaacggccacagaaagcccgccccagacagggccccggcccgcc

SEQ ID NO: 176033 - RNA, 64 nt, Homo sapiens
cacagacgggcaccaccggcagaccccccccagaagaacggcccgggcagaagacccgagcggc

SEQ ID NO: 176034 - RNA, 70 nt, Homo sapiens
agccgcgccggcaggggggagacgggccggaacacccggcgaaccagaggccaaccaccccagaagacgc

SEQ ID NO: 176035 - RNA, 88 nt, Homo sapiens
cagcggaggaggcgcgccgacgcggaggaggaagaaaagagagccagccgagcacccccaagcagagcccgcgggcccccggcccccg

SEQ ID NO: 176036 - RNA, 84 nt, Homo sapiens
gaaacgggcaggacacaccaacccaccaggaccgagcaagacagccaaaagggagcaaacagagcgggcacaaaacccgaaagc

SEQ ID NO: 176037 - RNA, 78 nt, Homo sapiens
cgaacaaaacaggggaggagcccagcaacggcgcaaacccccagagacgaaacggacaagccgggaccacgagggcac

SEQ ID NO: 176038 - RNA, 78 nt, Homo sapiens
agagaaaaagaagaaagaagaagaagagggaaaggagaacagagggacccaaaagcaaaacagccagcagcgcggaag

SEQ ID NO: 176039 - RNA, 73 nt, Homo sapiens
gaaacccccgcaccggggggccgccgggcgcggcaagaggcccacgcggaccggcagcgccaccggaccacca

SEQ ID NO: 176040 - RNA, 75 nt, Homo sapiens
gggcgcgcggccccgccgccccagcccgccccccgggccggggccagcacgaaagcagccaggagaagagcacaa

SEQ ID NO: 176041 - RNA, 56 nt, Homo sapiens
caagacggggcgccccacagaggggcgacgaaccacacccggagcccgcacacaga

SEQ ID NO: 176042 - RNA, 87 nt, Homo sapiens
cccaaaggcgggagcagaggaacaagaggcgagaggcgcaggcagccacaaaaaagcaagagccagaacagaagaggaggaagaaga

SEQ ID NO: 176043 - RNA, 93 nt, Homo sapiens
gaccggacccggcacagacgcggcggggcgcaaaccgagacaagcaccccgaagcgccgagagcagaagacgaccaacgagaacagaaccagc

SEQ ID NO: 176044 - RNA, 77 nt, Homo sapiens
aaacagcgacgagagaccggcaggcacagccacagacagccccgggcaaggggagcagacaacaaaacgagcaagca

SEQ ID NO: 176045 - RNA, 76 nt, Homo sapiens
agaaacggaaagcaagcacagagcacaccaaaagaagcaacagcagcaagaaaccgaggcaaaaagcaacagaacc

SEQ ID NO: 176046 - RNA, 52 nt, Homo sapiens
acaggaaaaaaagcggaagagcgccagcacgggcaacggcgaagacaaggag

SEQ ID NO: 176047 - RNA, 66 nt, Homo sapiens
agaaggaccaagaaccaggcacacagagaaaaaaagggaacaaaacacagcaagcagacaaaaggg

SEQ ID NO: 176048 - RNA, 76 nt, Homo sapiens
aacaagaggaacacggagacaccaagcacacaggaggggacccccggcgaagcccggaaacacgagaggccagcgc

SEQ ID NO: 176049 - RNA, 58 nt, Homo sapiens
acggagcgagagcagaaacgaacgcagaagagagcgagccacagcgcgaaaacaaaaa

SEQ ID NO: 176050 - RNA, 76 nt, Homo sapiens
gcgaccaagaaaaaaaagaagaggcgcagaaagcaaacggccaagagaagaagggcaacgacagaggaagaaccaa

SEQ ID NO: 176051 - RNA, 42 nt, Homo sapiens
agacacagacgagcaggggaagagggcgccccagcacacaga

SEQ ID NO: 176052 - RNA, 75 nt, Homo sapiens
cgaaaggccaaggagcacgcaaagccgggaagacaaagggaagcaaagcgaagcaaacccccgaagcagagcagg

SEQ ID NO: 176053 - RNA, 70 nt, Homo sapiens
agccccgcaacccggaccagcagaaaccagaggagcccgaaaacgggaccaggaagcagaagggcacggg

SEQ ID NO: 176054 - RNA, 53 nt, Homo sapiens
cagccaacacggcacccacagacaggaagggaaggggcggagacgggcggaac

SEQ ID NO: 176055 - RNA, 82 nt, Homo sapiens
acccggccggggccgaaccgaccagaccagacacgcagaccccaccaagaggcggagcgacccggcccaaggacccaacgcc

SEQ ID NO: 176056 - RNA, 71 nt, Homo sapiens
acaaagcggaagaacacgagaggcaagaagacccaaagcggagaaaaagacccaggaaaagaagaaccccc

SEQ ID NO: 176057 - RNA, 74 nt, Homo sapiens
acgaagggaggaaaagggcagggacagcgcaggcagcaggacacggacgacaccgagcccaaccgaccaaccac

SEQ ID NO: 176058 - RNA, 77 nt, Homo sapiens
cgcaggaaccggcagaggagaaacagacggccccgagggcgccaagcccacgggcgcaccaacggagagccagagca

SEQ ID NO: 176059 - RNA, 78 nt, Homo sapiens
ggcagccgccccccgagccccccgcgggcagcgcccaagggcacgcaaccacagccgccgcccacaccaaggacccag

SEQ ID NO: 176060 - RNA, 89 nt, Homo sapiens
accagaccaccagccacacaccagaaaaagccaggaagcacagcaaacgcgaggagagcgaagagagagaaacgaaaaagaggaaggag

SEQ ID NO: 176061 - RNA, 64 nt, Homo sapiens
gagaaggaccaagaaccaggagcccggaccccaacaagaccagcagaggggccaggagccccgg

SEQ ID NO: 176062 - RNA, 67 nt, Homo sapiens
gggcaaccagcgcgccagcaacccagcccaggcccagaagccccacaccaacagcaggcagcacaga

SEQ ID NO: 176063 - RNA, 40 nt, Homo sapiens
gcacagccgggccgcgcgaaggaggaaaaggaaaaagagg

SEQ ID NO: 176064 - RNA, 78 nt, Homo sapiens
gaaaacaagccgacaggagaagcagaacaccaccccaccgccaccgggaagaaccagcgagagccccccacccccccc

SEQ ID NO: 176065 - RNA, 45 nt, Homo sapiens
cagcagcggggaacagaggccgaaaggcggcgggcggaacgcgcg

SEQ ID NO: 176066 - RNA, 89 nt, Homo sapiens
cgggccgaccgggcgcaccgaccaggccccaaagccccaaggcgacaagaccggaccgagggagacgcggcggcagcggagacgaacca

SEQ ID NO: 176067 - RNA, 86 nt, Homo sapiens
gcgaccaagacgcggcccaagggcccggcggcgcgagcaggaagggcagcggcagcggaagagaaagggcagggcaggcccggcag

SEQ ID NO: 176068 - RNA, 70 nt, Homo sapiens
cacaccagcccgaaccacaagagccccccaaacgaaacagggggacagcagaagccagaaggagccacgc

SEQ ID NO: 176069 - RNA, 79 nt, Homo sapiens
cagcaaaagggaggcggaaacaaagaaagcagcggcggcgaaagaagacagaaaaagaagggcaggccaaaagaacaga

SEQ ID NO: 176070 - RNA, 59 nt, Homo sapiens
gcgaggagcaccccccgccggaaagacagggaaaggacccggccaaggcgcaacagaac

SEQ ID NO: 176071 - RNA, 70 nt, Homo sapiens
agacccggaaccccccgccacaccggggacccaggaccagagcaccgcccccaccgagccaaggcgaaga

SEQ ID NO: 176072 - RNA, 77 nt, Homo sapiens
gccgcaaaacgaagcccgcaaagacccaaagagaagagaagggcgccccacccaaagccccggacccaacagcacgg

SEQ ID NO: 176073 - RNA, 53 nt, Homo sapiens
gcacaacgaacacaaagagaacccgaacacgccgcagaccagcaaagaaagag

SEQ ID NO: 176074 - RNA, 54 nt, Homo sapiens
caggaaccgaaggaggagaggggaagcagcgcgcagagacaaccgcagcaccgg

SEQ ID NO: 176075 - RNA, 60 nt, Homo sapiens
ccaggccgaagagaaccacaaggcagaaacgaggcgaccgagcagacagaggcaggccgc

SEQ ID NO: 176076 - RNA, 68 nt, Homo sapiens
aaaaagagcagaaggaacagaagaaggggacacaggcgccaaagccaaaccgagaaagacgcaagcag

SEQ ID NO: 176077 - RNA, 67 nt, Homo sapiens
ggaaaaggccacgggaggaagacccaaaaggaacaggcccaaagacgcacccacagagaaacccgac

SEQ ID NO: 176078 - RNA, 74 nt, Homo sapiens
ggaagacagccagagcgcagcaccccgccgccgagggggccgcaaggccaggcgcgcagaggcacccaacggca

SEQ ID NO: 176079 - RNA, 81 nt, Homo sapiens
acccgggaggagagagagaaggacccgcgccagggccgggaccgggacagaggaagggcgccgggcggccgcgcgcacgga

SEQ ID NO: 176080 - RNA, 71 nt, Homo sapiens
aagaggggcccagagggcaggagagcaacggggcggcacacaaggagcgaagggcagggagaacgccaggc

SEQ ID NO: 176081 - RNA, 73 nt, Homo sapiens
cagaccagcaaggaaaggacacccccaacaagccgccgagggcgggggagagccccacagcgacccggcgagg

SEQ ID NO: 176082 - RNA, 68 nt, Homo sapiens
ccggaccacacagcgcccaggccagagaaggggaaggaggggcagcggcaaacggaggaccgaagcaa

SEQ ID NO: 176083 - RNA, 77 nt, Homo sapiens
acacagccgcaagaggaggcaagacaggaacacgcccggggaagggacagaagagagccgcggccggagggaggggc

SEQ ID NO: 176084 - RNA, 113 nt, Homo sapiens
gaggcccaggagcggggacaggagaaagacccaacccagaacccaaaaacgaccgcacagagagagcgcaagcagaacaaggggagagcccgacgcagaacagcggagccccc

SEQ ID NO: 176085 - RNA, 76 nt, Homo sapiens
accgacccgagagcccacccccaacgcgacggaaaggcacgaaagccaggcagccgccgcaaagggacgacgaagg

SEQ ID NO: 176086 - RNA, 64 nt, Homo sapiens
gggaccacgggaaagcccccgcagccggcagacaaagacagcgcccaaaagaagcaaggaagac

SEQ ID NO: 176087 - RNA, 74 nt, Homo sapiens
caagcaaaaagacagaaacacgagagagggaaacgcacgccagagcaagggccgccgaccaggcggaggcaggg

SEQ ID NO: 176088 - RNA, 71 nt, Homo sapiens
gggcgagcagaggacgacaggccgggagaccaaaaaaccaaggacgacgggaaaccggacccgcaaagagg

SEQ ID NO: 176089 - RNA, 88 nt, Homo sapiens
cggaggccggcccccgagagccgccgacagaagaaagacggcggaccgcgggggagaacaccggaccacgccacaagcgaaggcaccc

SEQ ID NO: 176090 - RNA, 90 nt, Homo sapiens
aggaggaaggaagaggaaggagagcagcggcagccggcgggcagcagccggccgacccagagggcgcagcgcagaaagaagaagaaggca

SEQ ID NO: 176091 - RNA, 79 nt, Homo sapiens
cccaagagcgggaaagacccaggagcacccccgcaggcgccagccccaacagccagaggggacggcgggagaacagaca

SEQ ID NO: 176092 - RNA, 77 nt, Homo sapiens
gcgggaaagcggcgcgagacaacgccgcaagcgacaggaagaacacaaagaaccaggagggagacaccggaggggac

SEQ ID NO: 176093 - RNA, 66 nt, Homo sapiens
agagcaacaaagacgaaagaggagaggaaagacgagggagccaccaagaccggggcagcggggaag

SEQ ID NO: 176094 - RNA, 56 nt, Homo sapiens
gcggccaaggaccggccgacacgcggcccccgaccggacccaaacagacagggggg

SEQ ID NO: 176095 - RNA, 95 nt, Homo sapiens
gacaaaggcaggccgaacagagagaccaaaacacgagccaggacaaaaccaggcagaaccaacacgaacccaagcacaaacaagaaaacgagcag

SEQ ID NO: 176096 - RNA, 78 nt, Homo sapiens
aagaagaacagagacagcagccaaacccccaggaacccaggccgcacagcccagggacgaaagaacacgccccagggg

SEQ ID NO: 176097 - RNA, 81 nt, Homo sapiens
cccccgcgacgcaccgggggaagcgcaggaccggcacggagagggcgcccggcacgcggcgacggcgccggcggacccacc

SEQ ID NO: 176098 - RNA, 57 nt, Homo sapiens
ccgacagccgcagaacgcagaagaaacacacaggagaacccccgagaacagagagaa

SEQ ID NO: 176099 - RNA, 64 nt, Homo sapiens
caaagcagcaggagcgcagcacgaaaacggaaagggaagggaacagacggggacccacagagac

SEQ ID NO: 176100 - RNA, 63 nt, Homo sapiens
aacgggacccgggcagcacacgacccgcaagagccggggccggggcccacggacagcccagcc

SEQ ID NO: 176101 - RNA, 34 nt, Homo sapiens
gaacacgcagcacgaaagcagggcgcaggcgaaa

SEQ ID NO: 176102 - RNA, 75 nt, Homo sapiens
cacacacccggcagccacaaacccccagcccgggcgcaaggccccccagaccccccagggcaagaccccaaacga

SEQ ID NO: 176103 - RNA, 71 nt, Homo sapiens
gacgacagcgggccgggaaaagggcacgaggccggaaccgcccagccccgacacgcggcgcccacgcacaa

SEQ ID NO: 176104 - RNA, 66 nt, Homo sapiens
ggcccacacccaccaaaggggcggcacggagaaacaggggaaacagacaagaggccgccccagaag

SEQ ID NO: 176105 - RNA, 119 nt, Homo sapiens
aaaacaaaaacgagaccaagagaaggcagccgagcaccgagccagcccaggaaaaggagagaccgagaggacagccccaaacacagcaggcagaacgggccgcaggaaggagggcagca

SEQ ID NO: 176106 - RNA, 66 nt, Homo sapiens
gagcgagggaggagagagggagagccaaagaagccgggagacaaggaaaacacacagaaaacaaca

SEQ ID NO: 176107 - RNA, 75 nt, Homo sapiens
cagcaggccgagcccgagcgcgggaagaaagaccgcaacccaccaaggagcacaggacgaagaggaaggaaaaaa

SEQ ID NO: 176108 - RNA, 84 nt, Homo sapiens
ccgaaagcacccacgcagccaaacggagaggggcaaaaaaaggaaggaagaagccacgaagccagaccgaggccaaaagaaagg

SEQ ID NO: 176109 - RNA, 55 nt, Homo sapiens
cagggccggggcacgacgacccaacagcaagccaaaagcggaacaaacgaacgga

SEQ ID NO: 176110 - RNA, 67 nt, Homo sapiens
aaacccggaccgggcagaagggccccagccacccgaaaggcgcaggggagcgcagcccccgcgaccg

SEQ ID NO: 176111 - RNA, 70 nt, Homo sapiens
gcccaacagaaaaagagaggagggagaacacagaaacccgccccggggcagccagcggcaccaaaccaaa

SEQ ID NO: 176112 - RNA, 79 nt, Homo sapiens
gcaccaggacacccaaagacaccacacagggcgaagaggaaagaccagccgacagaaaagagggcaaaggaaggccaaa

SEQ ID NO: 176113 - RNA, 81 nt, Homo sapiens
ggccgaggcagcgcacaggaccacaaccgccagcgcggcaagaacaaacgaagggcaccgggggagacgaagaggccaaag

SEQ ID NO: 176114 - RNA, 79 nt, Homo sapiens
ggacggcccacggcagcgcacgaacggcgcgcccaaaggaaaccccaaggccgccaaggcccagggagaaaaaagaacc

SEQ ID NO: 176115 - RNA, 60 nt, Homo sapiens
ggagcggcccacgacaccaaggagcggagccacgcggaacaccgaggcccggggaccgcc

SEQ ID NO: 176116 - RNA, 96 nt, Homo sapiens
gcagggggacccaaccagggggcaagaagaaggaggggaaccggagagccagaaggcaaacaacaggccgacacccacacgcggaacgcagagacc

SEQ ID NO: 176117 - RNA, 82 nt, Homo sapiens
acacgccgccacccgcccccagaggagaagcgcgccagacacgcgcagggggagcgcaggagcggaccagaggcggaggagg

SEQ ID NO: 176118 - RNA, 53 nt, Homo sapiens
ggaaagcaccccggccacagcgggccggcccagggagaacgcaaaaccaccac

SEQ ID NO: 176119 - RNA, 59 nt, Homo sapiens
cggcaggggaggcagagaggaagaagaccccacgcaaagcagggcgccaagccggcgaa

SEQ ID NO: 176120 - RNA, 77 nt, Homo sapiens
ggacccaggaaaacccagaaaaccagcaggagaccacagcaagcaaaggaccggggagagcaggggagcagcgcgga

SEQ ID NO: 176121 - RNA, 84 nt, Homo sapiens
gacagcgaggagcagcagcagcccagcaggcgcggcccgccaggaacagcgacaccaccagaaaagacagcgcaagcaagccag

SEQ ID NO: 176122 - RNA, 70 nt, Homo sapiens
aagcaaaaaaagcagcacacacaggcaaaccgacaccagcgacacaagcgcgagggaaccacagaggaca

SEQ ID NO: 176123 - RNA, 64 nt, Homo sapiens
cgacgggggagccgcgggaagcggcgcgggcccccccacccccaagaacccacaaccccgcccc

SEQ ID NO: 176124 - RNA, 50 nt, Homo sapiens
ggagacggaaccgggccagccgccaacagagacacagagaggacagccgc

SEQ ID NO: 176125 - RNA, 87 nt, Homo sapiens
aggacaccgacaggaacagggaccacggggaacaagcgggagccggcaggaaagcagcagagcagagcgccagagccgaacgcggcc

SEQ ID NO: 176126 - RNA, 68 nt, Homo sapiens
agcagaaaggagcacaggcgggagccaaggacacccgagggcaacaagggaggcgggcgacaggccag

SEQ ID NO: 176127 - RNA, 78 nt, Homo sapiens
cggcccaccccccacgcaccgcacaacaagaggccggcggggcgacaggaggcggcgcccacgcacagccgacccgac

SEQ ID NO: 176128 - RNA, 55 nt, Homo sapiens
ggcggcccgcagcgaaggaccggaggggcaggagaagccaagagggggagggcag

SEQ ID NO: 176129 - RNA, 34 nt, Homo sapiens
cgcgcgcggcgcccgcgggcaggcacagccgaga

SEQ ID NO: 176130 - RNA, 84 nt, Homo sapiens
ggccccgccagcagcacgggaggccgcccggccagcccgcgggagcgccacacagagcggaagaaccgaccgggacgagggcac

SEQ ID NO: 176131 - RNA, 80 nt, Homo sapiens
cacaacaaaagcaccccacgcacaaggagcgagcagaacacacagagccaccagccggccaagccgcgaggcccaagacc

SEQ ID NO: 176132 - RNA, 75 nt, Homo sapiens
cgggcacgcaacccaccacagccaagccacccccaccagcccccgaacgggaccacagaaagggacgagagaaac

SEQ ID NO: 176133 - RNA, 67 nt, Homo sapiens
ggaaaaacgagccaaaccggaaagaggccgggccaaggagacagggaaaacaccgaaggcgggagaa

SEQ ID NO: 176134 - RNA, 76 nt, Homo sapiens
acacagccgcacgcggccacgcaacaccaccacggaacaaagaggccaacggcaggagaagcggcgaggccgagcg

SEQ ID NO: 176135 - RNA, 81 nt, Homo sapiens
gagagacaaaaggaaagccgaaaaagaaccaaaacccaacagggggaaacaggaagagaacagaacggaagaaagcagaag

SEQ ID NO: 176136 - RNA, 85 nt, Homo sapiens
aggcggaggcggcccgggccaaagcacccgccaggcccgaggggaccaagcagccacgggggccaacgggggaagacacaaggaa

SEQ ID NO: 176137 - RNA, 81 nt, Homo sapiens
cgccgaccggcacgcgccgggacacagacggggggagcccaggaacggccggaggacaggggcagcgccaacaagaagcaa

SEQ ID NO: 176138 - RNA, 83 nt, Homo sapiens
cacgcaacgggacagcgcaggccgagaaggccgaggggccgaggcgcgaccaaggcgagaacgggaagcgcacaaggaaaccc

SEQ ID NO: 176139 - RNA, 82 nt, Homo sapiens
cagaaaggcagccggcgcaggcccgggagaggccagaggcacccaagagcagaggagaccagacaagacaaggaaagcgagg

SEQ ID NO: 176140 - RNA, 80 nt, Homo sapiens
gcggagagggggcgcgagcgggggggacggaaagagagccgcagcgcagaacaagggaaaaaagggcaaaaagggcaaaa

SEQ ID NO: 176141 - RNA, 58 nt, Homo sapiens
cggcagcgcccggacgaggagcggacggcgcgccaccggccacgcaacccccgccgac

SEQ ID NO: 176142 - RNA, 73 nt, Homo sapiens
agagaagaccgcccaagcgcccggaggcccacagcagggggcaggcgacgcccagggaggacgaggcaagccc

SEQ ID NO: 176143 - RNA, 75 nt, Homo sapiens
gccagggcccgaacgccgagcagagggacgccggaaaacagcggaagaggcgacccgcgacacaacaccagaaag

SEQ ID NO: 176144 - RNA, 54 nt, Homo sapiens
ggacacgcaaaccacacaagggggccgcagccggccaggggacccgaagggggc

SEQ ID NO: 176145 - RNA, 69 nt, Homo sapiens
cccaggcggacgggggaagaggaaaggcaagggaacgaagcccaaaaggcagagacggaccgagacagg

SEQ ID NO: 176146 - RNA, 64 nt, Homo sapiens
gaaggagccaagaaagagaagacaacgcgggaacggggacagccggacccagaacagggaggcc

SEQ ID NO: 176147 - RNA, 73 nt, Homo sapiens
gcgagcgggccggaggaaaagaaagggcgccgggggaagaccagcccgcccagacccgaacgaccgaacagag

SEQ ID NO: 176148 - RNA, 76 nt, Homo sapiens
ccacagacgcagccacgcggcccaggacggccggagcagcagaacaagagcggagaccaagggagccccgcagcag

SEQ ID NO: 176149 - RNA, 74 nt, Homo sapiens
gcggggggaggaggggcgaagaaggcgaccccaccggcgggcacacagaagaaaccggaccgaggcggcagggc

SEQ ID NO: 176150 - RNA, 80 nt, Homo sapiens
agacagcgaagcggggggaaggagcgaaagagaacgcaaaacgaagaagcaaggccgacaacacgaggagaccaccaaac

SEQ ID NO: 176151 - RNA, 63 nt, Homo sapiens
gccagcgcagccgcggcggagacgcacaggcccgcgccagcagaaggagacacacagagccca

SEQ ID NO: 176152 - RNA, 97 nt, Homo sapiens
aaggcacaaaaccacagaaacaaagaccagaccaaggagggacccaacagggacaggaaccccggacaaagacagccaagccgacccacgaagccgc

SEQ ID NO: 176153 - RNA, 67 nt, Homo sapiens
acacaggagaaccggggcacagggaagagacccagacaacaaaccaccagcaccgcaaaaacacagg

SEQ ID NO: 176154 - RNA, 81 nt, Homo sapiens
caccccaacggggaggccgaaacagaaaccacccgccacccgcccagcaaagaacagaaacggccccacacgcaacaccca

SEQ ID NO: 176155 - RNA, 81 nt, Homo sapiens
caaaaccacaccgaagacccacgcagagaaggacaccggaagggagccaaaagggagccaagaaaagcgaacaaggcacgg

SEQ ID NO: 176156 - RNA, 84 nt, Homo sapiens
cggaacagacgggccccaagaggccagccccccgagggcaacgagaaagagacggcaaaagcagaccggaaaacccaccggcaa

SEQ ID NO: 176157 - RNA, 61 nt, Homo sapiens
ggacagagaaaccagaaacccagcgccacaaggaacaaacaaagccaggcaggaggaacaa

SEQ ID NO: 176158 - RNA, 83 nt, Homo sapiens
gggaggccacggcggcgcagccccaaagcgagcgaagcagggcgccgccacgccgcaggaggcggagaacgccaggagccaga

SEQ ID NO: 176159 - RNA, 69 nt, Homo sapiens
caccagccacggagggggagcggcagcagaacaggaccagcggccgggaagagggacacaacacagaaa

SEQ ID NO: 176160 - RNA, 60 nt, Homo sapiens
ccagggggggcgagaaagaccgcgccgggccaagaacacacgcgacaaaacagcagacca

SEQ ID NO: 176161 - RNA, 76 nt, Homo sapiens
ccccgagggcgggaacaggggggcgacacaggagagagggcaggcacgaaggggccacacgacaacccagaagacc

SEQ ID NO: 176162 - RNA, 83 nt, Homo sapiens
caggacagaccaggcccgccacaccccggcgccggaaaggcagccaaagggcaaggccagagaaggcgggagaaagacacgaa

SEQ ID NO: 176163 - RNA, 68 nt, Homo sapiens
ggaaggagaaaagaaccagaggaccggcaacaacccgaggacgaaccaccccgcgccagcagcacagc

SEQ ID NO: 176164 - RNA, 74 nt, Homo sapiens
gaggccaaaaaaaaacgaacagacgagcgaagagacccagaacaggagacgaccagaaaaccccaaagagaggg

SEQ ID NO: 176165 - RNA, 76 nt, Homo sapiens
gccgggaaagacaccgcgaagcaggggagaccagcaccagacagcgaaaaagaggacccaaaaaagagagaaaagg

SEQ ID NO: 176166 - RNA, 67 nt, Homo sapiens
gaagcggagaccagcaaaagggggaggggcgcccgaggaaagcagccgaggccaacgaggaagccaa

SEQ ID NO: 176167 - RNA, 76 nt, Homo sapiens
gggacgaggccccccggccagaagcggccccgggcggaagacgcaggagcaaagagaggggccggcacagcagcaa

SEQ ID NO: 176168 - RNA, 88 nt, Homo sapiens
cgaggacggacgccaacgcacccccgacaaacaccacgagaaccgcagcccacacgccggggccaaagcgaccaaccccccaccgcac

SEQ ID NO: 176169 - RNA, 53 nt, Homo sapiens
ccaagacaccaggggagaccccggaaacgaaacagcgcagccaggaacaggac

SEQ ID NO: 176170 - RNA, 67 nt, Homo sapiens
gcagccaagagggaagcagacgagagcaaggagacggggccagggagaaaggaaggccaggagcaaa

SEQ ID NO: 176171 - RNA, 71 nt, Homo sapiens
cagaaaaagaccaaagaagaaaggggcaaagcaaccaacgccagacggccccacccacagagaacaggcaa

SEQ ID NO: 176172 - RNA, 78 nt, Homo sapiens
agcaaggaacaaaccgaagaacagcgggaaagaaggcaaaacacggaaaacgaaggaaggaggacccgaggagagaga

SEQ ID NO: 176173 - RNA, 68 nt, Homo sapiens
gcgaaagggaaaaccacgcgggcgcacccccgccagccgacacaaccagaaagccacagcacggaccc

SEQ ID NO: 176174 - RNA, 75 nt, Homo sapiens
ccggagacgacccgacgaagcccacgccgggacccagcgcaggacagaaagaaggaaaaaacgcaagaaggaaga

SEQ ID NO: 176175 - RNA, 75 nt, Homo sapiens
accagaagaagggacaaaagccacccggggaaccccagcaagaccggcggagagacggagacccggacgacacgg

SEQ ID NO: 176176 - RNA, 76 nt, Homo sapiens
caaagggagagggaagccacaacaagccaaagaagaagggacgcccaggaggcggaaggaaagcccccgccaagcc

SEQ ID NO: 176177 - RNA, 77 nt, Homo sapiens
cgcaaacaggggacaccagccaaggccccaggaaacaagggcagaaagcaaaacagcacacagaccaggagccgcag

SEQ ID NO: 176178 - RNA, 50 nt, Homo sapiens
cgcaccgccggggggcacacaccaccgcccaacaagcacagaggcggacc

SEQ ID NO: 176179 - RNA, 71 nt, Homo sapiens
agaagccggaaagaacaagacgaggaggcccggagaacggcaagcgcagaaagagaggcccaagaagaggc

SEQ ID NO: 176180 - RNA, 76 nt, Homo sapiens
aaaaaagacacagccagccccaggaaagagggaagcgggacgaccaggacacaccacgaggaggacagcggcggag

SEQ ID NO: 176181 - RNA, 72 nt, Homo sapiens
ccagaagccgaccagcaagggaagacacaacaaacggcgggaacccacccagcggaggccaagcgagcccca

SEQ ID NO: 176182 - RNA, 75 nt, Homo sapiens
gaacacacaggacccagggggaaggaggaggaggacgacaggcaagagaccgcaaggcagacggcaccaggacaa

SEQ ID NO: 176183 - RNA, 81 nt, Homo sapiens
ccaccgcccccgacacggggcgacacagcggccgagagaccaggcaaggccagcaaggaggggggccgagccggcggcggc

SEQ ID NO: 176184 - RNA, 62 nt, Homo sapiens
gggagcgaggaaccagaacgaaaagcgccagaaagaacgaaaacaaacggaagagagggcag

SEQ ID NO: 176185 - RNA, 73 nt, Homo sapiens
acaaaagagaagccagaaacggaaacagaacaacgcaaagaacccaaggaccaaccgccaccaccacagaaaa

SEQ ID NO: 176186 - RNA, 81 nt, Homo sapiens
gagagaaccagcgccagaaggggcagaccaacaccacccagcaaaaaccccgacgaacgcgccagggagcgccagacaccc

SEQ ID NO: 176187 - RNA, 51 nt, Homo sapiens
ccaacccgcggaggcaaccacgggagggagaagggccgacagaggcacaac

SEQ ID NO: 176188 - RNA, 72 nt, Homo sapiens
cacgccgcgcagcccggccgccggcccccaacagcgccgacaaccagaagacgacagcacagccgccaaagc

SEQ ID NO: 176189 - RNA, 76 nt, Homo sapiens
cggccaagggcccacacaccaagaccaaggcgggccagcacgcaggaagcgcagaggggggggagcggaggcagga

SEQ ID NO: 176190 - RNA, 62 nt, Homo sapiens
ccgccccggagcacgggggggggggggaagccgcccccggcagcagagccaaagaaccccac

SEQ ID NO: 176191 - RNA, 50 nt, Homo sapiens
caccaccgaaaacgacacggaggaaccaaagaagaccaaccaaaaagaac

SEQ ID NO: 176192 - RNA, 64 nt, Homo sapiens
ccagcccggcccggacccaagcccagcgcgaagcggcccaagggacccggccaccccgccaccg

SEQ ID NO: 176193 - RNA, 69 nt, Homo sapiens
acagaccaaagaaccggagagccggaaacagaagaccccagacacgaccaggcagagggaaggagcgca

SEQ ID NO: 176194 - RNA, 71 nt, Homo sapiens
acgccagaagccggagacccacgcagcaagaacgacccaggccgaaaagaacaggaacagacgacagggaa

SEQ ID NO: 176195 - RNA, 81 nt, Homo sapiens
gacgcagggcgcccccggcaacgaggagaagaggaccgggaaacgcggccccggcagcaaggaggaaaacgaaggcacaca

SEQ ID NO: 176196 - RNA, 78 nt, Homo sapiens
ccagcgaggcccacagaaaagccacaacccaggccacaacgagccgcccccgacccgcgagcaagggggcccaagacc

SEQ ID NO: 176197 - RNA, 84 nt, Homo sapiens
cgaggaagaggacaggagcggagaggcgaaaaccaaagcagcgagagaagagacgcccggcaaacaagcacgagaagacacaag

SEQ ID NO: 176198 - RNA, 65 nt, Homo sapiens
cacgcacacgggcagcaacgaccaggcccaccgccaacgcgggaaggccaccccggcagaaggga

SEQ ID NO: 176199 - RNA, 65 nt, Homo sapiens
ccgccggcgcgcgcccgcgccgccgcacgagccggaaccaaaaagaagccccagagccggggcca

SEQ ID NO: 176200 - RNA, 65 nt, Homo sapiens
ccggagagcaaacaacacgacgacccccaggcaaaccgccccgcagcaccacccggcccggcaac

SEQ ID NO: 176201 - RNA, 61 nt, Homo sapiens
gaggcccccggccgaaagcaggccacggcgacgccgacacaagaggagaagggaagccaag

SEQ ID NO: 176202 - RNA, 77 nt, Homo sapiens
agaaccacaaacgaaacaaagcagcaggagaggagagccagagaaggacagggaagcacaggacaacagaggaacca

SEQ ID NO: 176203 - RNA, 72 nt, Homo sapiens
aagacaaggccgcgcgcccgagcggcgccgacacgggaagagacgcggcgccggcgacgaggcgaaccccag

SEQ ID NO: 176204 - RNA, 42 nt, Homo sapiens
aggccgaggcgggcagacaccgaggcacagacagcacccgcg

SEQ ID NO: 176205 - RNA, 96 nt, Homo sapiens
cggccggagccggagacccagcggccgccgagacagcgggagccggcggcgagcggcagggcgcccgcgccggcagaggaggcgagcacccgccag

SEQ ID NO: 176206 - RNA, 73 nt, Homo sapiens
ccgcaagaaccagggagaccacaaaagagcagaggaggaacaccaggcacaagagcccccccccggaagagaa

SEQ ID NO: 176207 - RNA, 99 nt, Homo sapiens
caagaagaagccaaccaaggcacaaacgcccgagggcagcaacagcaaaacccccaccggaccggacccacaaaccgggagaccaagaacggcacacgg

SEQ ID NO: 176208 - RNA, 83 nt, Homo sapiens
agggacgggggccccaggcgagcggcccagagcaccagcaagagaaagaaggaggaacgaagccggagagacgggggcaccag

SEQ ID NO: 176209 - RNA, 59 nt, Homo sapiens
acccggggaagccaaccaaggaacgaacgcgcaacggcggacgcgaggggaaagccggg

SEQ ID NO: 176210 - RNA, 78 nt, Homo sapiens
ggaggggagacgggaggcagccggcaggagacaggcggacgcagcacccggccgggaaacgaccgcgggggaccgagg

SEQ ID NO: 176211 - RNA, 70 nt, Homo sapiens
accccagcgggaggcaaacgacagaccacacggcccggaagggaaagaaggacaaacagaggccggacag

SEQ ID NO: 176212 - RNA, 75 nt, Homo sapiens
cggcggcgccccaggcgcacaaccaaaccagaccgcagcagccccgggcaaggggagcagacaacaaaacgagca

SEQ ID NO: 176213 - RNA, 75 nt, Homo sapiens
ccccccagccaccaagagaaggcaggaaacgcaaccggacagaagaggaggcaaggaaagcccaaaacccagaga

SEQ ID NO: 176214 - RNA, 79 nt, Homo sapiens
acggagggagcggcgccgccaaggacaacagaccaagcacacaagcacccaggcccggagcaacgcggagccagcgccc

SEQ ID NO: 176215 - RNA, 43 nt, Homo sapiens
gaagaggaagacaggagacgggcggcgacggcggcgcgaggac

SEQ ID NO: 176216 - RNA, 74 nt, Homo sapiens
agacaagcacggagcggaacaagcaagagcgagaaaggagccaggggaacagaggccgccccgggacagcagac

SEQ ID NO: 176217 - RNA, 71 nt, Homo sapiens
cgcacagagaccggaagaccaagcaggagaaccgaccgccgaagccaggcggaaagcaaaagacgaaaccc

SEQ ID NO: 176218 - RNA, 72 nt, Homo sapiens
aaaagagccccggaagggaacaaacagcagccagacgacagcagcacacacaccggaaacggaaaaggagca

SEQ ID NO: 176219 - RNA, 53 nt, Homo sapiens
ccggagccgaggacacccgcgcacagaggggcgccagggcggcaaagccccaa

SEQ ID NO: 176220 - RNA, 84 nt, Homo sapiens
gagacagagagaacagcagccagaacgcaggcaagaaagcagcagggagcgcccaagcagacacggggcccgcccacacaacga

SEQ ID NO: 176221 - RNA, 84 nt, Homo sapiens
cagggaccaaccaaagacgccaaggagaaggcagaccggacacgcccaaccacaggaggggccgaggggaaagcccgaacccca

SEQ ID NO: 176222 - RNA, 75 nt, Homo sapiens
ggaacccgcacagaagaccacgggagaaacaaagaccacaccaggaccacccgagcaggaagacaccagaaaagc

SEQ ID NO: 176223 - RNA, 69 nt, Homo sapiens
aaaacaaaagcgagagggccggacaccagccccacaccagccagccgaggccccccaagcgcaggagcg

SEQ ID NO: 176224 - RNA, 73 nt, Homo sapiens
aagaccagcgcccacacgaggaaaaaaaccgcacagcgagcgggcagccaccaaacaccagacagggggcggg

SEQ ID NO: 176225 - RNA, 65 nt, Homo sapiens
gccccaccccgaaacgccccgaaaagacgggcaacagggaaacacaaagaagacaccagaagggc

SEQ ID NO: 176226 - RNA, 71 nt, Homo sapiens
gggaaccaaggaacacaggcggaaggaccaggcggagagccacgaacgacgcacggaggccacaacaccac

SEQ ID NO: 176227 - RNA, 68 nt, Homo sapiens
cagcaaggaacccaaacagccgacaaccagcgggagaacgacaggagggggccagcgagggaaaggcc

SEQ ID NO: 176228 - RNA, 55 nt, Homo sapiens
ccgccgcgcgcagcagaacaagcaggggcccagcagaggggagaggacggggaga

SEQ ID NO: 176229 - RNA, 73 nt, Homo sapiens
acggccgcaaagaggagcaagaaagaaaaagaggaagaggcaccagcggcccgaaggacccgcaacaggcacg

SEQ ID NO: 176230 - RNA, 69 nt, Homo sapiens
gcaaagccaaaaacaacgggacaaaagccgacgacagggggggcgccacccggagaccggcccggggaa

SEQ ID NO: 176231 - RNA, 73 nt, Homo sapiens
gcccggccccggcggcacggcgccgaccagcaccaggggaagcgggacaacggggggccggagccggaggaac

SEQ ID NO: 176232 - RNA, 52 nt, Homo sapiens
gaggaagagggcgggaaggcaggcgcacacagacccgggcccaacggaccga

SEQ ID NO: 176233 - RNA, 69 nt, Homo sapiens
agaaccgaagaagggccaaaaagaacggcaaagccgcaaccacgcagaaccggccgaaaagcacaaaca

SEQ ID NO: 176234 - RNA, 71 nt, Homo sapiens
cgccccccgcgcccgccaccggccgccgcccggagcaacgcacgaaaacgcacgaggagcacagaaacgca

SEQ ID NO: 176235 - RNA, 65 nt, Homo sapiens
gacgcggcggcacccacgcgggggacggagaggaaccaggagggagcaggagaacgaggcgccag

SEQ ID NO: 176236 - RNA, 82 nt, Homo sapiens
ccggaagcagaggcgaacgccaccagcgcggcacggaggccagacagaaaagggagccaggaccccagagaggagacccagc

SEQ ID NO: 176237 - RNA, 73 nt, Homo sapiens
ggccaccgcaacgagaaaggcgagcggacagacagacgccagcgaggacgccgggagccaggaagcagcagac

SEQ ID NO: 176238 - RNA, 66 nt, Homo sapiens
cgcgcccgggagagcaaggaacggggggccacgacgggccaaagcggagaagacacaaggcgcagc

SEQ ID NO: 176239 - RNA, 84 nt, Homo sapiens
acaggagacccaagaaggaagcaaaaccggaaaccaccggaagaaaaacagcgagcaggagcagccacggaaaggagagaacga

SEQ ID NO: 176240 - RNA, 70 nt, Homo sapiens
accgaagggggcggcgccgcgcgcggagggcacgcccaaggcgcaagagaaagacgaccgccaaccaggg

SEQ ID NO: 176241 - RNA, 80 nt, Homo sapiens
acacagcggagacccagggcgcgaccacagaccaacccccggcagggagaaggaggagggcacccaaacacaggagccag

SEQ ID NO: 176242 - RNA, 77 nt, Homo sapiens
ccccgacccaggaagagccgcagagagcccccagggagggccaccaagggacaaggagagcccgaccagagaaaagg

SEQ ID NO: 176243 - RNA, 68 nt, Homo sapiens
acgcaagacaccggcacgcaacaggacgcgcccgaccagccgaggcgaccggggacaggaaagaaaac

SEQ ID NO: 176244 - RNA, 81 nt, Homo sapiens
gcgcggcgcgccggccgcccaaggcgcccaaggcggccacgacaaagagggcagcagaagagagcagggccaagaagcaac

SEQ ID NO: 176245 - RNA, 69 nt, Homo sapiens
aaagacaaacgaagaagaggcacagaaagaggcagagcaacagggacacaagcaagaagaaagggaccg

SEQ ID NO: 176246 - RNA, 84 nt, Homo sapiens
gccggcccccccaggacaacccagaggcaacaaaggcgagggcggcacccaccccccgagcccgcccgccggccccagccccca

SEQ ID NO: 176247 - RNA, 76 nt, Homo sapiens
acagaaacccgccccgggggagcgacagaaaagcagcacaacccccggagaaccgaagggacacagcagcggcccc

SEQ ID NO: 176248 - RNA, 45 nt, Homo sapiens
caagcacaaaagcggaggaaaaggaaacggcgcccacagaggaaa

SEQ ID NO: 176249 - RNA, 85 nt, Homo sapiens
ggagaaggggaggcagcgcggcccagggcgaccagacgaggggagacggacgggggagagaggccaaacggacaagggaagggcg

SEQ ID NO: 176250 - RNA, 111 nt, Homo sapiens
aaaggccgcaccagcagagagcccgcacggaacagagcggaaaagaccgagcaggccgggggagccgcccgcaaggcggaggcaaggcagaccggccacgcagccccgccc

SEQ ID NO: 176251 - RNA, 77 nt, Homo sapiens
gcagggcaaggaaacggccacaagaaggaagaaggaaaagcggaagcgcagacaagaaaagagagaagccaggaaaa

SEQ ID NO: 176252 - RNA, 65 nt, Homo sapiens
aaagacccggaaagaagagacacagaggagccacacccccagcagaagaggagccccgccgaggc

SEQ ID NO: 176253 - RNA, 93 nt, Homo sapiens
caggcggcgccggccggggacccggcccgggaccggcggcgcgcggcggccgaggccagggagaagcccaccacgcaacgggacggcgcggcg

SEQ ID NO: 176254 - RNA, 86 nt, Homo sapiens
ggagaggagagaaaaagaacccggagaaacgaagcgggacggaggcggaggcagaacaccacgaagccacgaacgaacgcggacgg

SEQ ID NO: 176255 - RNA, 81 nt, Homo sapiens
aaaagcagcgaaaggagcgaaagggaccggagaagggcgggaaacaggcggaggcagaggacgccggacccccgacaggag

SEQ ID NO: 176256 - RNA, 65 nt, Homo sapiens
gaggaaaacaaaagcgcacaggaagaacaaaggaaggacagaaaacgggccccagacacaagccc

SEQ ID NO: 176257 - RNA, 79 nt, Homo sapiens
gccgaggccggagcggcgcagcacagccgggaaccgcaggacggggacaagagcaaggaccaaggggaaggcaagacca

SEQ ID NO: 176258 - RNA, 81 nt, Homo sapiens
cgcagccaagcccggaagacgcgaccgggcaccggcgggcagacaacagggagaccccacgggacaccagcccaccggccg

SEQ ID NO: 176259 - RNA, 61 nt, Homo sapiens
aggcagaagaaggagccagcagagcgccagggccgccgggcggcgggggaccagcggacca

SEQ ID NO: 176260 - RNA, 78 nt, Homo sapiens
gggacgagccaaaacaaaaaaggcacaccgcaaaaaggagccaccccccgcaaaccaggcacagacaaggggaaaaac

SEQ ID NO: 176261 - RNA, 61 nt, Homo sapiens
ggaaagccaacacccggaaggaagaagacggcacgggacccccagcacaggcagcaggccg

SEQ ID NO: 176262 - RNA, 71 nt, Homo sapiens
agcggcccgcgcgcgcgggaaggggggacagcccaccacaagcaggccccaagcccaacagagagcccgga

SEQ ID NO: 176263 - RNA, 74 nt, Homo sapiens
ggaggcgccgagagcgagcgagggcgccgccagcacgcgcacgccagcaaagacgccgagaagagaacgcgccg

SEQ ID NO: 176264 - RNA, 68 nt, Homo sapiens
aacagacaagacaccagaaagacaggccagccaaccccagcaccccagggcagcagagacccccacgc

SEQ ID NO: 176265 - RNA, 85 nt, Homo sapiens
ccagacgaggaagacccggaaacaggggccacggagccacggccacggccgcaaggacccgagccccaaagacagaaaagccccg

SEQ ID NO: 176266 - RNA, 76 nt, Homo sapiens
aaggaaagagacaagccaacagagggagaagaccagaaaccaccaagaagaagacgcagacggcagggacgcaggg

SEQ ID NO: 176267 - RNA, 82 nt, Homo sapiens
cccagcggccccgacagcacggaagcagcggaaaagaacaggagacagaggaagcgcaacaagcggcgaggaccacaccagg

SEQ ID NO: 176268 - RNA, 84 nt, Homo sapiens
gggcgagggcccgggacagcgcacccacacaggggacaccggaacagcagcaggccgcaggacggcgaggcagccccaccagag

SEQ ID NO: 176269 - RNA, 75 nt, Homo sapiens
gcggaggagcccccagcggggcggagcgaccccgcggggcgcgggaagcgagaacgcggcgacaacgggacgccc

SEQ ID NO: 176270 - RNA, 79 nt, Homo sapiens
agaacgcccagccaaagaaacaagccgggaaagggacaagaagggcaaagccgaagggagaaagaagacaaggaaagaa

SEQ ID NO: 176271 - RNA, 126 nt, Homo sapiens
cggaggaggcccggagcagagccgaagccgccggagaagaggagccccagcgccccgggcaaagcagccgcagaacaagaacggcaggcgaaagaccgacagcaagaccgggaagggagagagaac

SEQ ID NO: 176272 - RNA, 74 nt, Homo sapiens
cgggaaagccggaggaacccgaacccaaaccgagccaaacaccaagaggacaagcccccacgaggaaaaccccc

SEQ ID NO: 176273 - RNA, 73 nt, Homo sapiens
ggcgccaaacaagaaaaacaaagccaaggaaaccccaacacagagccaagcgccaagggagaaagaacccaag

SEQ ID NO: 176274 - RNA, 77 nt, Homo sapiens
cggccgccggacgcccccccgcagcgccgagagacgccccaccaggcacaggagggcccagaagagggcacaagccc

SEQ ID NO: 176275 - RNA, 71 nt, Homo sapiens
caggggggaccaagcaacaaaggcgcaacccagggggcagccaaagccgaccccgggacagcagcacagag

SEQ ID NO: 176276 - RNA, 56 nt, Homo sapiens
gcaaacgaacgacagcccggcccgggagcacgggcgacaggagccaagggaaaaca

SEQ ID NO: 176277 - RNA, 74 nt, Homo sapiens
ccaacacagcacaagggcagcaccagaaagcaacaggggaagaacacaggcgaggacagagggagaaagagcca

SEQ ID NO: 176278 - RNA, 68 nt, Homo sapiens
ccgcgcaggccgcaaacgaaggccggcccaagcccccaagaagcccgggacgaacaccaaggccccgc

SEQ ID NO: 176279 - RNA, 91 nt, Homo sapiens
accgacacgccggggcgcccgcgcgcggggaccccacggggacccaaagacaggaccacgcaccagcagagaaggaaagcaaaccgaagca

SEQ ID NO: 176280 - RNA, 85 nt, Homo sapiens
accagacgccagcgggacgaggaccgagaccgcggccgggaccgaggagagcgcggcagcgagcgagcagcgcgcgccggagcgc

SEQ ID NO: 176281 - RNA, 82 nt, Homo sapiens
cgacccaaagggaaaacagaaacagggggggaaagagccagagagaggaacagacagcgagagcaaagaaccaaagacggaa

SEQ ID NO: 176282 - RNA, 50 nt, Homo sapiens
ccagccaccaagagaagagcgccgcaaggcacagccagcccgccagggac

SEQ ID NO: 176283 - RNA, 77 nt, Homo sapiens
cagacccagaagcgccacagcgagggaaaggccagccccagagcagcagacggagggcagcggacacggcagagcgg

SEQ ID NO: 176284 - RNA, 74 nt, Homo sapiens
gaccccagacccaaacaacggcagaagcagcagagccagacgggagaccgagcagaggccggcagcccggccca

SEQ ID NO: 176285 - RNA, 75 nt, Homo sapiens
aacgggccaaaggacagagaagacagagcccgaccccgaggaaccagcgacagaccgggcacccagcgaaaaccg

SEQ ID NO: 176286 - RNA, 78 nt, Homo sapiens
ccgccgccgcgcagggcgcccgcccccccggccccgggggcaccccgcaaggacagcagaccacagcccggcaggccc

SEQ ID NO: 176287 - RNA, 84 nt, Homo sapiens
ggcaaaccggaacccacccgagagcaacaaagcaggcgacacagccacggaagggcccggggacacgagcggccccagcgcccg

SEQ ID NO: 176288 - RNA, 78 nt, Homo sapiens
gcgcgccccgcgcgcccggcggcgcgggccaagcagagcagagaagggaagaggccagcacgccgggcaggaagagcc

SEQ ID NO: 176289 - RNA, 60 nt, Homo sapiens
cacaggggccgggggaacaacacacggacacaggacagcggaggcacaccagaggcagaa

SEQ ID NO: 176290 - RNA, 38 nt, Homo sapiens
aagcagggcacaacggcaagcccggagcgagagcgaga

SEQ ID NO: 176291 - RNA, 70 nt, Homo sapiens
gaagccacggcagacacacaacccgacccgacgagcggcccccagacccacgcgcccaaaacaaggaacc

SEQ ID NO: 176292 - RNA, 78 nt, Homo sapiens
caagaggcaggaaaaccacggaagcgaaggcgggggagacggacaagggagggccaagaacccggaggaggggaagcc

SEQ ID NO: 176293 - RNA, 75 nt, Homo sapiens
ccggcagcaggcccagcgaccaccccgcgcagccaccggacaccgcagccggacagggacggcggcgggcaccca

SEQ ID NO: 176294 - RNA, 63 nt, Homo sapiens
cgccgccagcggccgggaccgaacaggcgacgaaacagcaaccagagcccacgcagagccccc

SEQ ID NO: 176295 - RNA, 79 nt, Homo sapiens
gcggaggccccagggggagagaccgccgcgaaggcccccaaaacagcccaaagcagggcagcagagaagaaaggggaaa

SEQ ID NO: 176296 - RNA, 77 nt, Homo sapiens
agcaggggacaccagaagcacgaagaccaggacacaaccggaaccgcagggagagggcggggacacagcgggcagga

SEQ ID NO: 176297 - RNA, 68 nt, Homo sapiens
cacggaacagacgggcggagaggaacagaagcaaagaaacggaacagaggaaacccgaccgccccagg

SEQ ID NO: 176298 - RNA, 78 nt, Homo sapiens
caagagaagagacacagaaacggaggacaagaagccggacacaaggcgccacggcagcgggaggcacccgagcagagc

SEQ ID NO: 176299 - RNA, 71 nt, Homo sapiens
ccgaccaccccgggcgggaagacagaaccagggccgggggccaggaaaaaagggacaccgggggcaacggc

SEQ ID NO: 176300 - RNA, 39 nt, Homo sapiens
acggagcaacgacacagaaagaacgccaccagaggaaga

SEQ ID NO: 176301 - RNA, 81 nt, Homo sapiens
ccgccgccgcccgccgaggcggcccaggcagccgcgccgaaggacgccgccgggagcgcggagaaagaagagcgaagcaca

SEQ ID NO: 176302 - RNA, 46 nt, Homo sapiens
gggccggggcaccagagagaaggcaccccgaccagcagagggacgc

SEQ ID NO: 176303 - RNA, 78 nt, Homo sapiens
cacagccaacgcgcacagaaaaaaagggcccagcagagaggggaaagaaaaagagcccaccaaaaggaacagacggcc

SEQ ID NO: 176304 - RNA, 94 nt, Homo sapiens
gggacaagaaagagacggaccaccacgagagacgaagagccagacgagcaggcacgcaggagcccgacccacagcagcgagccacccccagccc

SEQ ID NO: 176305 - RNA, 81 nt, Homo sapiens
cccacacgggggaggcggccccggcagcagacacagccacgcacgaccgggagcacagaccagcgcgcgaccggagcccca

SEQ ID NO: 176306 - RNA, 80 nt, Homo sapiens
cgccagcccagagccacgacgggcacacaccccaggagggggaggggggagggggaaacaaacagaagaaacgggccaga

SEQ ID NO: 176307 - RNA, 76 nt, Homo sapiens
cagaaaaggaagaaagggacaaagagaggagcagcaacccgacccggagaacgagcccacggagagccccgcagag

SEQ ID NO: 176308 - RNA, 64 nt, Homo sapiens
gcgcggagggggcccaagaaaggcaagaagacgggaagcgcgggccgaaggaaggcaagacaag

SEQ ID NO: 176309 - RNA, 74 nt, Homo sapiens
gagcaccgggagcggcgaagaggcaccggaggaggaacacagcacccacccacacccacacccgcgacgggagg

SEQ ID NO: 176310 - RNA, 62 nt, Homo sapiens
caacacaagccacacccaggcccggagccaagacgcaacagacagagaaaccggggaaacag

SEQ ID NO: 176311 - RNA, 68 nt, Homo sapiens
ccgcagcagggacgcgggcacgggaccggcgaggacggagcagccggccacaccgcaggagaaagaag

SEQ ID NO: 176312 - RNA, 51 nt, Homo sapiens
aggagcgcagcacgaaaacggaaagggaagggacaaaccggcgaccacaca

SEQ ID NO: 176313 - RNA, 69 nt, Homo sapiens
agcggggcggcggcggcggcggcgcggcccaaaagggacacacaggaagacgaacacggaacgggcgag

SEQ ID NO: 176314 - RNA, 81 nt, Homo sapiens
caccgacgggccgcgaggggaagaggaagcaaagccaagaccagcacaaccaacaaacggaaaacggcaagacaaacagcc

SEQ ID NO: 176315 - RNA, 72 nt, Homo sapiens
ggaaagccaaggaaaaacggagagccacaaaaaaggaagcgaaagcccagagcacgggcacaccaccacggc

SEQ ID NO: 176316 - RNA, 68 nt, Homo sapiens
cggaacagaacgaaaaggaagcacagaaacaccgacaaagagacagaggcacacccagaagccacagg

SEQ ID NO: 176317 - RNA, 74 nt, Homo sapiens
ggaggggaacaggaaggcccccgggaacgaccccacaggaaaacgagggcaacgcagggcgcaccaacagaaga

SEQ ID NO: 176318 - RNA, 66 nt, Homo sapiens
agcgcagaaccagcgaggcaaaccacggaacaagaagaggcaagaaagacacaaagacgagcgagg

SEQ ID NO: 176319 - RNA, 79 nt, Homo sapiens
ccagggggggcgagagggagagccaaaaccaaggaaacaaaccacaggcccccagaaagaccgggacgaaaacaccaaa

SEQ ID NO: 176320 - RNA, 74 nt, Homo sapiens
aaagacccgaaacccaaagaaccccgacccgccaacagagccaggaagcagcagcgagaaaggcgggagaagag

SEQ ID NO: 176321 - RNA, 80 nt, Homo sapiens
cacgggaaacacaaaacgaaggacacgcgccacacccagcagaaggacaccccaagcggaacaacccaggaacacaagca

SEQ ID NO: 176322 - RNA, 79 nt, Homo sapiens
caaagaacagaagcaaggaagcgggcaaggggacccaaaaggaaaaggacaggcagcagagagacaagggaggaacaag

SEQ ID NO: 176323 - RNA, 97 nt, Homo sapiens
gccgagaggaagacgagccgggaggaacggcccggaaacaggaggacgcaaaagcagaccggaaaacccaccggcaagaccacacccgaggggagcc

SEQ ID NO: 176324 - RNA, 72 nt, Homo sapiens
caagaagagcacaccaagaggaaaaaaggcaaaagacacaacagccccaccaagggcacccgccccggaaag

SEQ ID NO: 176325 - RNA, 76 nt, Homo sapiens
aaccgcacggccccccaaggcaggaacaggcgaaaccccccggagccccaaagccaggacagcccagccggagcca

SEQ ID NO: 176326 - RNA, 60 nt, Homo sapiens
gaccagaaaccaggagccacggacaagaccaaaagaaagggcagcaagacacgaagccga

SEQ ID NO: 176327 - RNA, 78 nt, Homo sapiens
agaaacaacggggaccagccgagcggccaaaaccacaggaaagaacaaggcacaggcacaggagaccaccaacacagc

SEQ ID NO: 176328 - RNA, 75 nt, Homo sapiens
agcccccagcccccgcgaaggggccggaggacgcggggaaccagaccgggccagaccccacgggacagacccccg

SEQ ID NO: 176329 - RNA, 75 nt, Homo sapiens
ggcagccgggccacaccaagccacacaggaggaaccccgagcagacagaccaaaaaaccaaggacgacgggaaac

SEQ ID NO: 176330 - RNA, 67 nt, Homo sapiens
caacaagcagggcgagaagggggcacaacagaaaagcagagaccgggcagagcaacaggcggaaaaa

SEQ ID NO: 176331 - RNA, 74 nt, Homo sapiens
gggagcgaggaaccagaacgaaaagcgccagaaagaaaccacaagccgccgggaaccaaaggaagaaggcggcg

SEQ ID NO: 176332 - RNA, 76 nt, Homo sapiens
gggccggcgcggggccggggagggcaaggaagaaaaggcggaccggcgaacgaagaacagccagcaaagacaagag

SEQ ID NO: 176333 - RNA, 56 nt, Homo sapiens
agaggggacagaggcaccaaggaccccaagacagggacagagaaggcgaagaaggg

SEQ ID NO: 176334 - RNA, 35 nt, Homo sapiens
caggagccgcgcagggcaggagccgagacggccac

SEQ ID NO: 176335 - RNA, 70 nt, Homo sapiens
gcagaagaagcacccagcaagcgagggaccgggacgccacagccagggagcggcaggggaggcgaagaag

SEQ ID NO: 176336 - RNA, 76 nt, Homo sapiens
acagcgcaaagcgcccgcgcgaccacgggcccggcgccggcccccgccgcccggccaaagagaaagagaaaggaga

SEQ ID NO: 176337 - RNA, 76 nt, Homo sapiens
ggggaaaaaaaggagcgcccgagcgaccaaagaccgggaaaaagccaccaaagaacaacaagagccgcagaaggca

SEQ ID NO: 176338 - RNA, 48 nt, Homo sapiens
gggaccgccaggccccggacacccagcggacaaaacagggcgacgcaa

SEQ ID NO: 176339 - RNA, 52 nt, Homo sapiens
acaggccccggacagcagaagaggagcgaagggacaggccacgccaccaagg

SEQ ID NO: 176340 - RNA, 80 nt, Homo sapiens
gcccagcaaggacaaaggggcccagaaccaggcccgaaaaaaaaagcacccaaagaccccgccagcgcagcccgccccga

SEQ ID NO: 176341 - RNA, 80 nt, Homo sapiens
ccgggacccggcgccaacgccaggaccaccgggcaaagcccaccacggcagcaggcaggcgcacagaaaagccagcagag

SEQ ID NO: 176342 - RNA, 77 nt, Homo sapiens
gggcagcgccgaaccaggaccggacccggacccaaaggccagcaaggggcagcacgccgaaggagagaccagacaac

SEQ ID NO: 176343 - RNA, 78 nt, Homo sapiens
gaggagagcccccaggggagccggcggaaggcaaagacacagcggaacgacaacaagagggggaacccgcgaagaaca

SEQ ID NO: 176344 - RNA, 57 nt, Homo sapiens
cccaggcaaacgcgcccgagaaggcgcgagaaacccaggccgcgcacaagaaccggc

SEQ ID NO: 176345 - RNA, 71 nt, Homo sapiens
gacacagcccgaacgcaggacagcagaccacagcccggcaggcccaaaaacccaaagggacagaagcaccc

SEQ ID NO: 176346 - RNA, 67 nt, Homo sapiens
gagcgaggcccaacacagacccagagccaaagcccagcaggagaaaccacaacgaaagaggggacgc

SEQ ID NO: 176347 - RNA, 57 nt, Homo sapiens
aaaccagaagaggagggcccagaagaaaaagccccaggcagaagaacaagggcgaca

SEQ ID NO: 176348 - RNA, 81 nt, Homo sapiens
cggcagaaacagaggacaaggcagcaaagaagaggaagcggccagccccagggcagcacacagagacaccaggaacacagc

SEQ ID NO: 176349 - RNA, 41 nt, Homo sapiens
ggccgaagggaccccggaggaggaaagaacagcgaacagca

SEQ ID NO: 176350 - RNA, 66 nt, Homo sapiens
aggcgcagaggcgcgggcaagaccgaggggcaaaccgcggcgcaggacgggccaacgcacggcccg

SEQ ID NO: 176351 - RNA, 84 nt, Homo sapiens
ccgacaacagccggcgccgccacgcaacagggagcgccaccaccggacggcgcgcccagaacggagggcgggagggagaccaac

SEQ ID NO: 176352 - RNA, 75 nt, Homo sapiens
cccaccgcgaaggagggcacgacccaccacccgaggagagcaaggccaaaaagaaggcacccacagccagcaggc

SEQ ID NO: 176353 - RNA, 86 nt, Homo sapiens
cgagggcgacacgaccaggaggcggccgccgcagcccaggcgcgggggcgacgacaggggagcgggaggggccaaccgcgcgagcg

SEQ ID NO: 176354 - RNA, 59 nt, Homo sapiens
aaggcggaacaaaaggccaaggagagcgcgcggcggacgcgcccgggacgcgcggcggc

SEQ ID NO: 176355 - RNA, 60 nt, Homo sapiens
caggccaggcagcgcggaggggcgagccagcggccaggcccggaggagcgaggaaagccc

SEQ ID NO: 176356 - RNA, 71 nt, Homo sapiens
agccaacagcacacacccaggggcaaaggaccaggccgaggagggcggaaccacccaggaagaggggcgcg

SEQ ID NO: 176357 - RNA, 83 nt, Homo sapiens
cacaccaagcccgccaggccgacaggacggagaccggaaagaagggagaccgcggggaaaagagaaaggccaaccaaagacca

SEQ ID NO: 176358 - RNA, 70 nt, Homo sapiens
gcgaaaccggaccgggcccggaggagcgaacaaggcgacaacacagagcgaccaagccagaagaacaacc

SEQ ID NO: 176359 - RNA, 80 nt, Homo sapiens
agcagcccaggaccgagaccggagcagccggggcggagcggagccggggagcccgggaccagggccagggacgcccgcga

SEQ ID NO: 176360 - RNA, 84 nt, Homo sapiens
gcgaaggcgggcggcagaggcgacagggcgaaaagcggcgcacaaagcagcgaagccgcgggcgcggcgggacaggcgcggagg

SEQ ID NO: 176361 - RNA, 90 nt, Homo sapiens
agacaaagcacccggcggccaaaggccaggacaccaacgggaccagaaggcaaccccgcacaaacccagcgaacaacggaggaggacccc

SEQ ID NO: 176362 - RNA, 75 nt, Homo sapiens
caagcgaccggcccagcccccagcagcgggaacaggagcaaacagcaagagggaaacagaaaaaggacaaggagc

SEQ ID NO: 176363 - RNA, 86 nt, Homo sapiens
cagagggccggggcccccgggccgaggacccgcagggagcggggcagcagagaagaaaggggaaaaacacgaaaaccacagacgag

SEQ ID NO: 176364 - RNA, 81 nt, Homo sapiens
caacaccacggaaccaacgggaccccgaacaaccagcgagcgagacccgcagagcgcggacgccccaagccaaggagacaa

SEQ ID NO: 176365 - RNA, 55 nt, Homo sapiens
ggcacccccaggggcaaggccacgcccgcaacgagccgaaccagaacccgaggcc

SEQ ID NO: 176366 - RNA, 52 nt, Homo sapiens
gcagaagacaagaagaggagccccaaaagcacgcacgaaaccggcaagccag

SEQ ID NO: 176367 - RNA, 75 nt, Homo sapiens
cgaggacccagaaggcgcaaacaacccggaccaagagcaaacgcacaaaaccaacccacagaggaacacaaaaaa

SEQ ID NO: 176368 - RNA, 85 nt, Homo sapiens
ggccccagacacagacgagcaggggaaggaaagaccacagcaagaccacgcccccagccgggggaccaggccgaacgacccggac

SEQ ID NO: 176369 - RNA, 77 nt, Homo sapiens
gacaaaggcaccaggccaccacagaaacaaaagcaacaaagaggaccaccgcgaaaccaccacacagaggcccccag

SEQ ID NO: 176370 - RNA, 56 nt, Homo sapiens
ggacacacggaggcgcgggcagaaaagagacacacaaaggaagcaaagccggaacc

SEQ ID NO: 176371 - RNA, 85 nt, Homo sapiens
agaaacgaaaagccccggggagacacagcacaagacagagacgcaggcagaaggaaagggcgcagaccgggcagcagcagccgcg

SEQ ID NO: 176372 - RNA, 84 nt, Homo sapiens
gacgccgggaccgggaccgccgccgccgccgccaccagggcgaacccgacccagaacggcggcgcccagcccgcgggcgggagc

SEQ ID NO: 176373 - RNA, 60 nt, Homo sapiens
agcagagcccaggagaaaccggacgcgacgggacaccgccagaagcaccaggacagccac

SEQ ID NO: 176374 - RNA, 40 nt, Homo sapiens
gcggcgcacggagaacaccgcaacaggggaaagcgcgagc

SEQ ID NO: 176375 - RNA, 79 nt, Homo sapiens
cacagccagggagccaagcgccgcccggccggagagaaagcaggagaaaaccaaagcacgaaaggaacccggcggcggc

SEQ ID NO: 176376 - RNA, 87 nt, Homo sapiens
aaaggaggaacgccggcccgagaaagcccgccagcaggggacgcgaagaagcccccaccaccacgagaccgacccaggacgacacca

SEQ ID NO: 176377 - RNA, 73 nt, Homo sapiens
ccccccccaacaacggacacgacagaggcacaaaaggagaaagcagaagaaacaggagaaagcaaaaaagaga

SEQ ID NO: 176378 - RNA, 76 nt, Homo sapiens
cacagccaacgcccgcgcggggccgcgcagggcggccccggcgggggcgcggggcagcagaagaagccgaaagaca

SEQ ID NO: 176379 - RNA, 94 nt, Homo sapiens
ggaacccacccgagagcaacaaagcaggcgacacagccacggaagcagagaggaagaggagcgaaggaaaaggcgccgggagaagaacaaagcg

SEQ ID NO: 176380 - RNA, 60 nt, Homo sapiens
cgcgaaggagaaaaagcaggggaagcagcgcacgccagggaccggcccgcaacaccggag

SEQ ID NO: 176381 - RNA, 73 nt, Homo sapiens
gcagacaggagccgaaagccaccacaccagacccaaggaacacagcaagccggaggcagggcgagacaccgca

SEQ ID NO: 176382 - RNA, 54 nt, Homo sapiens
cgcagggcgcccccggaggcaaagccagccacaccgaccgggagggaaggcacc

SEQ ID NO: 176383 - RNA, 70 nt, Homo sapiens
gggaaagcggcgcgcgggaccgccaccgggcggggccgcggcggcggagcgaccgacccgcgagacacgc

SEQ ID NO: 176384 - RNA, 70 nt, Homo sapiens
agggcagccgcccggggaagcgcgcgccgggccggcagaaggaggggacaaagccgcgaaaaggaaccca

SEQ ID NO: 176385 - RNA, 60 nt, Homo sapiens
ggacaacccagaaaaacgagggcacacaaacagagcagcacacaggcaaaaggccaaaac

SEQ ID NO: 176386 - RNA, 78 nt, Homo sapiens
ccaaccggcggaccgcgagacagccagccgaccgagacagccccagcacagaggaaagagaaagagccagcaagagga

SEQ ID NO: 176387 - RNA, 77 nt, Homo sapiens
caggcagaccccggggaagagccccaagaacaacggcccaagagcacagagaagaccaagggccgccagcggggccg

SEQ ID NO: 176388 - RNA, 75 nt, Homo sapiens
caggcaacggggcgccgcagccccgccgggcgagcgagcgcggagcccgggggaccgggagacaaaacagaggag

SEQ ID NO: 176389 - RNA, 59 nt, Homo sapiens
ccggggaggaaaaccgacgaaggcccgaaggaggaaacaggacagaccggagacgcagc

SEQ ID NO: 176390 - RNA, 79 nt, Homo sapiens
gcaaggagggcggcgggacgcaccgaggccagaccgccgagccccccgggaagacacaaacgcaccaccagaaagccaa

SEQ ID NO: 176391 - RNA, 73 nt, Homo sapiens
cccagaaagccaagccggggggggaaaaggcgccgaggccgagcggccccgagccgggacacccggcggcggc

SEQ ID NO: 176392 - RNA, 88 nt, Homo sapiens
cagcgggggaaccggcgcgccggcgcgcggcgcggacaggcccaaacggcccagcccccggacacgggcggccggaaggcgaggcccc

SEQ ID NO: 176393 - RNA, 81 nt, Homo sapiens
gccgacgcacccagcacgggccagaacccaaggagaaaggcggcgcccgacgccgccgcaggaagagggaagcggaggcgg

SEQ ID NO: 176394 - RNA, 83 nt, Homo sapiens
aagaccaggagagacgagcagcccagggagcgggagacaggccgaagcccagaacacacaacaccagggaggaaaagcccccg

SEQ ID NO: 176395 - RNA, 54 nt, Homo sapiens
gccgcagcaacggcaccccaccacgcagccgaaggaagcaacaagagggaaaag

SEQ ID NO: 176396 - RNA, 83 nt, Homo sapiens
ccggcggcggcggcagcggggccgggccggagcgccacagaccgccgcgccgaccggagacaacagacgcaccagccggagac

SEQ ID NO: 176397 - RNA, 117 nt, Homo sapiens
ggaagaagggaaggaaggaccccaggacaggaagggaggcccgcccaccgccggccagaaaggccccggagacaggaggccagagaggagggcagggggggccagccacaggagcaa

SEQ ID NO: 176398 - RNA, 67 nt, Homo sapiens
agaagacgacgcaccgcaggcagacaaaagggccaaagaagggagagaggcgcagacaacaaaggaa

SEQ ID NO: 176399 - RNA, 66 nt, Homo sapiens
acccagggcaaaccccgccagaggcacacacggggccgcagaagcgagacaaacagcggggcacgc

SEQ ID NO: 176400 - RNA, 44 nt, Homo sapiens
cccgacccacaggccagagaggagagagagagaggccagggaga

SEQ ID NO: 176401 - RNA, 79 nt, Homo sapiens
cgccgaggcccaccagacgaccacgacgaggccggggcacgacacgcaggggagaaccggaggaagcagagcaaggcaa

SEQ ID NO: 176402 - RNA, 54 nt, Homo sapiens
cgacaaagaaaccagggagaagacacacacccccacgacggcagcgccaaccga

SEQ ID NO: 176403 - RNA, 59 nt, Homo sapiens
accccgcccacagcacgagagagagcgcgacagcaggaaggcgccacccccgcagccac

SEQ ID NO: 176404 - RNA, 71 nt, Homo sapiens
agaccacgccccacaaccaggaaagcacacaggacagcaacgccagcgcacgagcacaccacagaccccaa

SEQ ID NO: 176405 - RNA, 79 nt, Homo sapiens
cggaggccagacaaggaggaccgcacgacagcggcccgcggaaagaccacacagggaaacgaccagggagagaccaaca

SEQ ID NO: 176406 - RNA, 63 nt, Homo sapiens
agcacacagaggagagcgacgagaagagccagacgacagcgagggcaggggcggcacgaagag

SEQ ID NO: 176407 - RNA, 78 nt, Homo sapiens
gagaaagcagacgccccagcgggggacaggggaggcaggaaaaagacacaagacagcaggaccgggaccagcccgaag

SEQ ID NO: 176408 - RNA, 59 nt, Homo sapiens
gggcgggccggcgccggagacgagccggaagaccgcaggaaagcaggaaggcaagaaag

SEQ ID NO: 176409 - RNA, 76 nt, Homo sapiens
cggggcagcccgaggcgcaccaggaaagaccacagcaagaccacgcccccagccgggggaccaggccgaacgaccc

SEQ ID NO: 176410 - RNA, 73 nt, Homo sapiens
gggaaggaagcgaacgcaaccaaggagcaaaccaggcccgcaagccaaggaacaagaacggaaaacgccggcc

SEQ ID NO: 176411 - RNA, 57 nt, Homo sapiens
gcggggcgaagaagcagcacaaggcgagccagacaagacgcggacggagcccacacc

SEQ ID NO: 176412 - RNA, 76 nt, Homo sapiens
gccacagccaagcagagggcacccaccggaccgagccagagagagcacaaggagagaacaggggggcccacacgcc

SEQ ID NO: 176413 - RNA, 62 nt, Homo sapiens
accagaaggagggcgacccccgcgaacccgcaccaggcgggggagcgggaggagccagagca

SEQ ID NO: 176414 - RNA, 67 nt, Homo sapiens
ccgaccacccccaaaccaacccgcaaagggggcagcaccggagaaggcaacgaccggaaaccacaaa

SEQ ID NO: 176415 - RNA, 67 nt, Homo sapiens
cgggcgggcgagcacaggcacacacacgcgaacaacaaagcaacaagagaccccggagggggcagaa

SEQ ID NO: 176416 - RNA, 76 nt, Homo sapiens
gcgagggaaccaggcgaggagccgccgggggccggcaaggaaacccaaccccagagggaacaggcacgccccaccc

SEQ ID NO: 176417 - RNA, 90 nt, Homo sapiens
agggaaccaaacagcagagcagaccacaacaagaaaggggcccccgaaggaaagaccaccgaaggaccaccagaagggccaggcgcggaa

SEQ ID NO: 176418 - RNA, 93 nt, Homo sapiens
gcggaggggccgcgggagcccgaaagcgagagacaccaggcgccgagaaggccagcagagaaacaggcaggagaggcccacaggcgcggacgg

SEQ ID NO: 176419 - RNA, 63 nt, Homo sapiens
ggcggcgccaggcagggcgcaggagcgacaggacccaaacccgggccgcccggagcgccagca

SEQ ID NO: 176420 - RNA, 67 nt, Homo sapiens
aggaacggaaaaaacaggagccgacaagccgaacccaaaagggcccagaccaagaggagagccgggc

SEQ ID NO: 176421 - RNA, 87 nt, Homo sapiens
caggacgcggacaagggcggcagaaaacacggggaaccggaggagaacaccggaccccaggcgcgacgccccagaacagggagcgcc

SEQ ID NO: 176422 - RNA, 58 nt, Homo sapiens
gagccccacaaaagcaggcgagcccgggcgccaccagccgggacagcccagcaacgca

SEQ ID NO: 176423 - RNA, 70 nt, Homo sapiens
ccccacgcggccagcgaaaacgcccagaacggacaccagggcccaggcggcgaaccgggccaagcaacac

SEQ ID NO: 176424 - RNA, 79 nt, Homo sapiens
agaagacccccggaagagaaggcaagggaggaacagcgaaggagacggcaacaacccaggcccagcaacacaggacagg

SEQ ID NO: 176425 - RNA, 56 nt, Homo sapiens
gaaagaggcacagccccaaaagaaaggcagcgccagccgcccggccgaaggcgcac

SEQ ID NO: 176426 - RNA, 65 nt, Homo sapiens
gacgccagaaacagccaccagaagggaaacaagccggcgcgccacagcgggcacagaaacgcacc

SEQ ID NO: 176427 - RNA, 56 nt, Homo sapiens
caggggacacaagcaggccacagcacagcaaagccacaacacccaggaggcccccg

SEQ ID NO: 176428 - RNA, 74 nt, Homo sapiens
aaaggcaagggcagcaccagcagcccgaccacaccacccccgccagcagggccggcccagggagaacgcaaaac

SEQ ID NO: 176429 - RNA, 85 nt, Homo sapiens
cccagggaagcgcagaaagcaggcgaacccgcggcgcaaaacgaggcacagagcggccgcggacccaaaccgcaccgcggaggaa

SEQ ID NO: 176430 - RNA, 69 nt, Homo sapiens
caagcgaaaaagggcagaccaaggcagggccggaaacgaacacccggagagagggcaaaaaacagccgg

SEQ ID NO: 176431 - RNA, 58 nt, Homo sapiens
gggaacccggcaccgccccaggaaagaccacagcaagaccacgcccccagccggggga

SEQ ID NO: 176432 - RNA, 79 nt, Homo sapiens
ccgggacgcggaaaggaggcgcgcccggcgccccaggacaggacggggaaaaaggggacaaggaaagcacagcaagcaa

SEQ ID NO: 176433 - RNA, 80 nt, Homo sapiens
cggcgcagcgacccccgccaggcaaaaggaagaagcacagcccgacagaccgaagaaaagagaaacacaagaggacagac

SEQ ID NO: 176434 - RNA, 77 nt, Homo sapiens
acgaggagcgcgcggcgccggggggcgcgccgcgaccgcccgccgggagcgaagacaaaacgccggccagacagaca

SEQ ID NO: 176435 - RNA, 73 nt, Homo sapiens
aaggaccaagaaccagacgccgcggcccgacaggagccagacggagaaaagaaaggaaagaaaggaagaagga

SEQ ID NO: 176436 - RNA, 77 nt, Homo sapiens
gaagaaacaccacgcagagaaggacggagaagcgaaagccagaccggcaagagcggaagaaagcaccaaagaacaag

SEQ ID NO: 176437 - RNA, 69 nt, Homo sapiens
gccgcaggccaccgcgcccaggacacagcaggggccagacaaccagacccgggaggcaagagacgagga

SEQ ID NO: 176438 - RNA, 60 nt, Homo sapiens
acccagggcccgcgggccaggagagcgccggcgggcaacggcgaagcaagacgaggaaaa

SEQ ID NO: 176439 - RNA, 39 nt, Homo sapiens
acgcgggcacggccggagggagcgggccccgccgcagcc

SEQ ID NO: 176440 - RNA, 71 nt, Homo sapiens
gcaaaaggaggcacgagccacaagcccgcaccaagcccagaccaggagccggagccgggaaagaccaggca

SEQ ID NO: 176441 - RNA, 79 nt, Homo sapiens
ccaaaacgccagaaaggggaagaaagagcgggcagagacgaggcccaggaacagcaggcccagcaaaggagacccccca

SEQ ID NO: 176442 - RNA, 68 nt, Homo sapiens
gccgaaggcgccaacgaacaggaggccaaacggcacggaaaaacacaaggaagggaaaggcaccaaga

SEQ ID NO: 176443 - RNA, 69 nt, Homo sapiens
caggagaagagccagagcgggaggacgacgagagagcaaaccagccagggaccaagacccaagaacaag

SEQ ID NO: 176444 - RNA, 56 nt, Homo sapiens
accagggccaccgcagaaaggccgaggagagcgcgggcgacggggcgagagagccg

SEQ ID NO: 176445 - RNA, 103 nt, Homo sapiens
agagcggggacccgcgggacccgcagccccgcgcgggcaccagggcgaagcggccaggcccgggcggacgcagagccagagcgccccagaggagcagagggcc

SEQ ID NO: 176446 - RNA, 71 nt, Homo sapiens
gccacggagagaagcagcgaaaagaaacgggagaagagcgagcaccagacaaggcccgaccagagcagaag

SEQ ID NO: 176447 - RNA, 56 nt, Homo sapiens
aaacgagaccaaagagaggcagcaagggcaagaggcgcgaccgcccagggagacgg

SEQ ID NO: 176448 - RNA, 79 nt, Homo sapiens
cagagccgccccagcgccaggggggacagccagccagcagcaggagggaggcagcacggcaggagacgaggagaggaca

SEQ ID NO: 176449 - RNA, 87 nt, Homo sapiens
gcgaccggccgcagccccacgcgccggccggaggggcgaagaggacgagggggccaaggcccccgggagacccacgcgcaggcggcc

SEQ ID NO: 176450 - RNA, 76 nt, Homo sapiens
cagaggcaaaccgaaagaccccagaggagggagacagagcaccacaggaaggaaacagcaggaccgaaaagcagga

SEQ ID NO: 176451 - RNA, 82 nt, Homo sapiens
cgcaggacggcgcgacgagacccgaccagcgggggcgcggcggccgcgcagccacccaaggaacagcagcagaggacgacag

SEQ ID NO: 176452 - RNA, 80 nt, Homo sapiens
acggcgcgcggcggcaggcacagaagaaggaaccagcaaagcgccacgaagcacaagcaagaggaccagccaaaaccaca

SEQ ID NO: 176453 - RNA, 78 nt, Homo sapiens
acccgaaaaagaacagcgggaacgcacaagagcgggagagcaagaggcaaagcagcccagaaaccccaaacccaaaac

SEQ ID NO: 176454 - RNA, 74 nt, Homo sapiens
caaacagacaagacaccagaaagacaggcgccacaggagccgcagaagcaaaggcaccgccaaaccgaaaacgc

SEQ ID NO: 176455 - RNA, 62 nt, Homo sapiens
gcgcggcggcccacaagaccgcggggagcgagagacacggagaggacagcgcagaagaggaa

SEQ ID NO: 176456 - RNA, 78 nt, Homo sapiens
gcgcgggggcccggccagcggaaacccggcccaaagacgagacaagaggcaagacaggacgcggcagagcgcaagccg

SEQ ID NO: 176457 - RNA, 59 nt, Homo sapiens
cgaacccaggcgcacaggagaagagacccaagaggaagaaagcaaacaaacggaacaaa

SEQ ID NO: 176458 - RNA, 75 nt, Homo sapiens
gccgcagcccagaggcaaacagcggcagccggcacccgcacaacccagggggccgaacccagaccaacaaaagga

SEQ ID NO: 176459 - RNA, 72 nt, Homo sapiens
acaacccggcccagcggacagaaacaagccgccaaccccacgcgcagcgcggagccccgaaccagaagcggc

SEQ ID NO: 176460 - RNA, 35 nt, Homo sapiens
acgcggccccaacggaacggaccaagcaacacccc

SEQ ID NO: 176461 - RNA, 71 nt, Homo sapiens
cccacgaacccaccgcgacccggccacgccgccccaagacgaagagagaaaggcagggcaccccaccacag

SEQ ID NO: 176462 - RNA, 134 nt, Homo sapiens
gcagagcagcagcacccccgggggaggcagagcgggcgcgccacggccacacgcccagcgagcgccccacacagccccggagcgcacaagaggaggaaagcccgacgagccgaggcccgaacaccacggcaaag

SEQ ID NO: 176463 - RNA, 73 nt, Homo sapiens
cgagaagagcaagacagggggccgggaaacaagagcaggcggcagagcaaagcgagcaaggggaaaaacgaac

SEQ ID NO: 176464 - RNA, 82 nt, Homo sapiens
cggccaccaggccacgccgggcccagcagcacaggcccacccgggcaggagaggccgaccacccggggggcccgcgcgaaca

SEQ ID NO: 176465 - RNA, 82 nt, Homo sapiens
ccggagccaaggccgccgggcccaggccccccgagcgcacgcacgcggagccagcagaccggggaacccacaggagcgcgga

SEQ ID NO: 176466 - RNA, 82 nt, Homo sapiens
agcgcagggcagaaggcccccccgagagaggacaccagagaaggccccggagacgggggcaggggagcagcagaacaagcag

SEQ ID NO: 176467 - RNA, 63 nt, Homo sapiens
gcagggcgcccccggcgaggagccccggagggacggaggaacaaaaccacgacacaccaacca

SEQ ID NO: 176468 - RNA, 84 nt, Homo sapiens
gacgggaaggcgggagacgagaagccgaaaagcgcagcgagcggagccgccggaggagagacagcgcggagaccacccagccgg

SEQ ID NO: 176469 - RNA, 43 nt, Homo sapiens
cggcgggcggggcggcggcgcgacagagacgaaggaaaaggaa

SEQ ID NO: 176470 - RNA, 64 nt, Homo sapiens
ggggcaaacaagccgaccggaaaaaggcggaggcaagaaaccagacacaaaaacggggaagcac

SEQ ID NO: 176471 - RNA, 89 nt, Homo sapiens
ggacacgccggggggccaacggccggagccacacacacagggcccgagggcaggacagcaggcaccggcgaagcacagagaggcgcgag

SEQ ID NO: 176472 - RNA, 33 nt, Homo sapiens
gccaccggaaacaaaaggcggggccggggagcc

SEQ ID NO: 176473 - RNA, 75 nt, Homo sapiens
agcgacgcagggccgaggccacaggggcagagcgagcccaacggaaaagaaacacagagaacaggacaacgcagc

SEQ ID NO: 176474 - RNA, 56 nt, Homo sapiens
caacagcaaggaacacccagccgccagcaggcaagaggaaggagccagacgacagg

SEQ ID NO: 176475 - RNA, 74 nt, Homo sapiens
agggaaacaagaaggggccggaaagggggagcggaaaacacacagcagggcggagaacggaaaagcaccaggaa

SEQ ID NO: 176476 - RNA, 80 nt, Homo sapiens
aaggaaggcccaccgaacagaggagcgagaaagccggccccagcaccaccaagacaacccagaaaagaaaaggccagggg

SEQ ID NO: 176477 - RNA, 71 nt, Homo sapiens
gaggcggggcggaaacgcggaggcaagcacgggccaccaagccacccacaaaccgagagagacaaaacagc

SEQ ID NO: 176478 - RNA, 49 nt, Homo sapiens
ccgaagcggcaggcgccgagaaaagcacggcgccgagaggaaggacaca

SEQ ID NO: 176479 - RNA, 77 nt, Homo sapiens
agcaccagacagagcagcaccccagccagcgaacacagacagacaacaggcgcagcaacccggccaaccagaccgaa

SEQ ID NO: 176480 - RNA, 64 nt, Homo sapiens
ggcaggggagcccgcacccggcgaagccggccaagggcacgaagcaggccggaagagaagggac

SEQ ID NO: 176481 - RNA, 80 nt, Homo sapiens
cgaccggagagcgccggggggacagacagagaggagagaagaccaacccacagaggaccagagagaggacgggcgaagac

SEQ ID NO: 176482 - RNA, 83 nt, Homo sapiens
cagggccgccgggagccagccccaccagccaaggcgaaggcagcaaccacagaggaccgaccaccccccgaagagaacagcac

SEQ ID NO: 176483 - RNA, 76 nt, Homo sapiens
cgagggacccgcagggagccaccgaaacccccacgaggaagaaaggccccggagagggaggcaccgggcacgcgcc

SEQ ID NO: 176484 - RNA, 79 nt, Homo sapiens
gaaggaaaggcggcacgaacagcaccaggaccgcggagccacaggcaaaacgaccgcaagggaagcaagcacaaccaag

SEQ ID NO: 176485 - RNA, 53 nt, Homo sapiens
ccaacccaacaacacccagcagggcagaaaaaagcaacaggagccacacaaaa

SEQ ID NO: 176486 - RNA, 76 nt, Homo sapiens
agaacgccaaggaggagaccagacccggaaggagaggcagccgcaggacccgcgccgggccacgcccgcacccccg

SEQ ID NO: 176487 - RNA, 51 nt, Homo sapiens
acgcgcggaaggcagcgcccagcagcgcagaagaccaagacgaccaagcac

SEQ ID NO: 176488 - RNA, 86 nt, Homo sapiens
ccggcggcagcgacgggccccgaggagcaagagcagccaccgaggcaggggggcccgccacccgagcagccgagcgccagggaagc

SEQ ID NO: 176489 - RNA, 62 nt, Homo sapiens
gcagcgcccagcacgggcacgaaaaccaagacacaaaccgcccgggaacgaagcgggcccca

SEQ ID NO: 176490 - RNA, 77 nt, Homo sapiens
aaggcggagcgaggggaaagcaggggagcacccgcgagggcccaaccccggacgcaggggaaaaccaaaagaggccg

SEQ ID NO: 176491 - RNA, 77 nt, Homo sapiens
ccgacgcagcagaggcgacgcgagaggcggcagccagcggcggcgaccagggaccaggaggagaagcaaccagagag

SEQ ID NO: 176492 - RNA, 75 nt, Homo sapiens
aagggagcccggcaggacacaagcggcgagagcgccaggaacagggcacaaagccgaagcaggacacaaagaaaa

SEQ ID NO: 176493 - RNA, 73 nt, Homo sapiens
gacagcagacggaaggggccaggaaaggagcgaaggcagcgaaccagaacgggaagaaggcacgggagcggca

SEQ ID NO: 176494 - RNA, 79 nt, Homo sapiens
gggaccccccgccccggaccgcggaggcaccgagaacggacgcaagcggggaggggaagggacagaggggggacccaag

SEQ ID NO: 176495 - RNA, 62 nt, Homo sapiens
gaaaagcccgggagcagaagggaggcccaagacccacaacaaaaggacgacgggggacagaa

SEQ ID NO: 176496 - RNA, 67 nt, Homo sapiens
aagcggcaaacgccacagcggggagaacggaagaggacaagagacgacacgcaagcaggcaaccgaa

SEQ ID NO: 176497 - RNA, 77 nt, Homo sapiens
gccacgcccccagcagagacggcgcccaggacaccacggggaccgaggcacagaacgagcaccaagggggcgagcgc

SEQ ID NO: 176498 - RNA, 91 nt, Homo sapiens
gggccggagcagccgcgggcgcccgaggggccgagcgagcggcccccaggcacgaagcgaagaagaggagagaagcagcggcgcagacgac

SEQ ID NO: 176499 - RNA, 75 nt, Homo sapiens
aggagagggaagcaaagaaacacaccacccaggcaaacgaccaaagacaagaaggaggcagcccagaacgcagca

SEQ ID NO: 176500 - RNA, 74 nt, Homo sapiens
cccaccaaccggaaaaagacccccgcgccccgcgaccccacacggcaagcggggcgcagcaggagcagaaaccc

SEQ ID NO: 176501 - RNA, 67 nt, Homo sapiens
agcggagacccgcgcgccaggcgcgcccggacaccgaaaacgagaaacgaaagagacacgggggcac

SEQ ID NO: 176502 - RNA, 67 nt, Homo sapiens
cgaaagaagaaaaacccaagaaagagcgcagcgggagaagaaacaacgaacgagcaaggaagggcca

SEQ ID NO: 176503 - RNA, 41 nt, Homo sapiens
gcccgggacacacacccaggcaagcgcgcggcaggacccag

SEQ ID NO: 176504 - RNA, 56 nt, Homo sapiens
caacaggaaaccaaggaaaaacgcgaccgcggaggggacaccagcagcgccgccgg

SEQ ID NO: 176505 - RNA, 79 nt, Homo sapiens
cccggggacggccaaagaagacccaaaggacaccgcgaccagcaccacccaaacaagaccacaagaccaaaaagcaagg

SEQ ID NO: 176506 - RNA, 38 nt, Homo sapiens
aggagccggaaggagggcaggaccaaagcaggaaggag

SEQ ID NO: 176507 - RNA, 52 nt, Homo sapiens
acggcaccccaccacgcagccgaaggcagcacgcggcccccgaaccccgccg

SEQ ID NO: 176508 - RNA, 75 nt, Homo sapiens
caggggaaccgcccaccgcgcccccagaacagggggaggcccggaacacggggaggagacgacacccgccaggcc

SEQ ID NO: 176509 - RNA, 87 nt, Homo sapiens
cgcgccgcccggcccgcgcccccgccggccccaaagacgcaaacggcccaccgccccgggggagagggaagagcgagacaagagcca

SEQ ID NO: 176510 - RNA, 76 nt, Homo sapiens
ggagaacacagaaacccgccccggcaccaggacaaaagaagggcagcacaaaggaaagccccaaaccccggaacgg

SEQ ID NO: 176511 - RNA, 80 nt, Homo sapiens
cgggggcccccagcccgcccggccacgcacccacgccggaggaggcaaacgagaccgggaaggcccaggaccgcagccca

SEQ ID NO: 176512 - RNA, 78 nt, Homo sapiens
aaggaaaagacccggaaagaagggacacagacggagcaaacccccaggccggaaaggaaaaacaccagaacggaaaca

SEQ ID NO: 176513 - RNA, 81 nt, Homo sapiens
ccgaagcagccgggagccggagcgggcgcggacgccgaggcaccgaggcaccagaggaggacgaaaacggaaggccccagg

SEQ ID NO: 176514 - RNA, 73 nt, Homo sapiens
ggaaaccgaacaaagccaccagggaagcaaagcaaagggggcccccccgagaggaaaagaggaacccaagaca

SEQ ID NO: 176515 - RNA, 55 nt, Homo sapiens
gggacagaaagcagggaggggaaaaggggcaaggcaggcagcgcccggagccgga

SEQ ID NO: 176516 - RNA, 85 nt, Homo sapiens
aggagacgacgcgcagcgcaggcgagaagcagaaggccagggaagaagaggaggagagacggggagaagaacaacgaggaagcca

SEQ ID NO: 176517 - RNA, 69 nt, Homo sapiens
aaggggaaggagacaaaacccaccacagccacagacaaaagccaagaacagaagagacggagaagaaca

SEQ ID NO: 176518 - RNA, 72 nt, Homo sapiens
aagaaccaaaacggccccgccgccccagagcggcgcagccaggaccgaggggaaacaagcaacaagcaagaa

SEQ ID NO: 176519 - RNA, 68 nt, Homo sapiens
cggcccgaacgagcggaggccaacaaagacgccgcgaacagcgcccaacgaggggaagggccgagggg

SEQ ID NO: 176520 - RNA, 37 nt, Homo sapiens
accagggccgcgggccccaagagagacggggcgccag

SEQ ID NO: 176521 - RNA, 83 nt, Homo sapiens
cccaagccggggccgcacccagcggcccacgcgagacagcccccaccccggagcaccccacgacaagagggggagaacgcggc

SEQ ID NO: 176522 - RNA, 69 nt, Homo sapiens
gggacaagaaacggagagccccacaagcggggccggggcagcagaagaggacaagcagacagcaccaac

SEQ ID NO: 176523 - RNA, 77 nt, Homo sapiens
ggagaaggagggacgcaggcgcaggccagggaagcacaaaggagagaaacacagagaccccaccgcaggacgcaaag

SEQ ID NO: 176524 - RNA, 70 nt, Homo sapiens
aaaaccaaccccacggaaaagaaaaccccgccacagaaagggcacagcacacgcccgcacaacacccaca

SEQ ID NO: 176525 - RNA, 60 nt, Homo sapiens
agggccaaagaagggagagagggccgaccaccaagagaaggcccaggaggaagaagagaa

SEQ ID NO: 176526 - RNA, 80 nt, Homo sapiens
gccgcgcggggccccgggagcggcccagcgaccccgcccgggccccccagggcaagaaagccagagcccgaacggaaccc

SEQ ID NO: 176527 - RNA, 68 nt, Homo sapiens
acgacggacagagagacacaggaccgggcaaaccagaacaagaccgaaccgggccagcaggagccccg

SEQ ID NO: 176528 - RNA, 77 nt, Homo sapiens
gggccccgccgggaaaagaggaaggggggacacagcgagccacgcgccaggaagcccggccaaggagccaaccgcgc

SEQ ID NO: 176529 - RNA, 67 nt, Homo sapiens
gacaaaggcgccgcagcaccccccggacccagccccggcaaaagggcagaaaagcagggcaagcagg

SEQ ID NO: 176530 - RNA, 73 nt, Homo sapiens
aagaccagaaggaacgacaaacaggaccgccaaacccaaaccggcacgggaccccaaccaggacgcaggcgac

SEQ ID NO: 176531 - RNA, 81 nt, Homo sapiens
ccggccacccgagaagggagacgacgcgcgggccgcgagcggggcgacccgagacggcaaacaaaggaacagaggcacgcg

SEQ ID NO: 176532 - RNA, 78 nt, Homo sapiens
ggccaagcagcaccaggcccaggggccggcgcggcggcccaggcggggacagaagcgaaggggacagggggagaaccg

SEQ ID NO: 176533 - RNA, 69 nt, Homo sapiens
agaccggccgagggcgccccaaacgggaccaggcaaaccgaggggacggggcaggggccgccgaaccaa

SEQ ID NO: 176534 - RNA, 71 nt, Homo sapiens
caagagaaagaaggaagcggcgccgaaaaaaagggccacccccaaccaggaccaaagacgaccaccaaagc

SEQ ID NO: 176535 - RNA, 54 nt, Homo sapiens
ccgaggagagccccgccaggacgaagcagccaagccagaggggagccaaagacc

SEQ ID NO: 176536 - RNA, 85 nt, Homo sapiens
cccagcagacgcaggcagccccaaagccgaacaggcagggccagacccagggggggccccagcccggccgaacgggcgcacgaca

SEQ ID NO: 176537 - RNA, 74 nt, Homo sapiens
cccacacaaagcggaggagacaaaaggaccagagaagcgagaaggaggcggcgaggaaacggacacggggggcg

SEQ ID NO: 176538 - RNA, 56 nt, Homo sapiens
aggcaacacacgaggccagccagacaccacaagaaaccagggaaaacacaaaacac

SEQ ID NO: 176539 - RNA, 90 nt, Homo sapiens
gcgggggcaggcggagaaggagacaccggaggacgaagagggggagaaagcagagagcgaagacgaacaagaaccaagaccaggaaaccc

SEQ ID NO: 176540 - RNA, 53 nt, Homo sapiens
aggaaaagggcagggacagcgcaggcagcagagccaagacaccacccaccaaa

SEQ ID NO: 176541 - RNA, 80 nt, Homo sapiens
cagaagacacgcccggaagaccagccaacaggcaaaagcagaccggaaaacccaccggcaagaccacacccgaggggagc

SEQ ID NO: 176542 - RNA, 40 nt, Homo sapiens
aacggaaaacaacacaggaaacacaagaccccggacagac

SEQ ID NO: 176543 - RNA, 70 nt, Homo sapiens
gggcgggcgcaccaaggacggaagggaggacgcccgaccccacccagcccgcaccgggcagccaggcccc

SEQ ID NO: 176544 - RNA, 66 nt, Homo sapiens
gagaaacacacggacaacaaacgggcgcccaggaaagccaagcaggcgggacaccaggagcggccg

SEQ ID NO: 176545 - RNA, 53 nt, Homo sapiens
gggacgcggacgcacggaagaaaacaccggagcccaagacaccaaaacagacg

SEQ ID NO: 176546 - RNA, 74 nt, Homo sapiens
aacgagagcagccaacgcacacggcggcggcgaagccaagacacgggcccgccgagggcgggacccgcgcaggc

SEQ ID NO: 176547 - RNA, 77 nt, Homo sapiens
gacggcgccaaacacaggggcagccacaacaacaagggaaccagaccagcgagaacccccacgccggcccaccgaga

SEQ ID NO: 176548 - RNA, 64 nt, Homo sapiens
gggcacgcaccgccgaaggcagccccagaaagccaccgcgagaagccgcagacgccgggaccca

SEQ ID NO: 176549 - RNA, 63 nt, Homo sapiens
cagccgcgcgccaagccagacgaggaaaaaccgggaaagagaaaaaaaacagggcgaccagcg

SEQ ID NO: 176550 - RNA, 79 nt, Homo sapiens
acccgcacgccgggagccaacagacccgcccaacacgcacaacggccaccaaccggcgcgccccagaccccagagcacg

SEQ ID NO: 176551 - RNA, 77 nt, Homo sapiens
gcaagcggggagaaaccggcaaaaagggcgagacgaaaaacaagcaccaggaaggagcaagaccggcacaccacgcc

SEQ ID NO: 176552 - RNA, 104 nt, Homo sapiens
gaacagagaaggacgaaaaaagaaacaacacagagagagccaaaggagcgcagacaaccagaagacgacagcacagccgccaaagcgacgaaaacacaagcgaa

SEQ ID NO: 176553 - RNA, 33 nt, Homo sapiens
cacagagacaagagagagggcggaaacagggag

SEQ ID NO: 176554 - RNA, 75 nt, Homo sapiens
agagcacagaggaagaaacaaacaagagagagaggccaccaacaaacccagaaggcaagcaagaacaaagaggaa

SEQ ID NO: 176555 - RNA, 56 nt, Homo sapiens
ccaagccgaccccacccggaaacagcgggggggaacgccaagcacaacggcagcag

SEQ ID NO: 176556 - RNA, 75 nt, Homo sapiens
gccgcggcggggcccccccgcgaccccacgaggagccgggggggcgagcccgccgagagcgccaaggaggagaca

SEQ ID NO: 176557 - RNA, 80 nt, Homo sapiens
cgacacagacggcgggggccggggccgcgcgggccaagcgccggcgcggcgcggcgcggccaaggcgacgacgcaccaaa

SEQ ID NO: 176558 - RNA, 82 nt, Homo sapiens
cacaacagcccggagcagcgcgaaaacaacaggccggagcacaaagggcaggcacgaggggaaaccaggaacagccagcaag

SEQ ID NO: 176559 - RNA, 82 nt, Homo sapiens
agaggcggcggcggggccgaggcgcgaggaggccacccaccccaccagagccggacaccagagccggacaccagggaggagc

SEQ ID NO: 176560 - RNA, 73 nt, Homo sapiens
ccgcaggagaagcaaagaagggaaaagcagcggaccgccccgggacaaaaaaagagagagcacaaggagagaa

SEQ ID NO: 176561 - RNA, 81 nt, Homo sapiens
cgcacaacaagacccaagggacccaaaacgaaccaacagaccaggcacagcacaacagaccggggccacgagcccgcaccg

SEQ ID NO: 176562 - RNA, 79 nt, Homo sapiens
cacagggggcacagggcagcgcccccagggcaccccagcacaccagggaaccagggggagagcaacccagcccagacac

SEQ ID NO: 176563 - RNA, 59 nt, Homo sapiens
cagcccccagagcgggaccacagacccccggcaccggccaggaggacccgcaggcagca

SEQ ID NO: 176564 - RNA, 82 nt, Homo sapiens
aagcgcaacagaaacagagagaggaggagagagcgaggccacccagaaggccagccccagcggcccccagccccggaagggg

SEQ ID NO: 176565 - RNA, 75 nt, Homo sapiens
cagcacccggccccaacggaacagacccgggaagccagggagaagaggagacggcaccaggacaagcgagggaga

SEQ ID NO: 176566 - RNA, 74 nt, Homo sapiens
gggccaaagcccccggcaacaaggagcacgcaggcaggacagcagcgagaagcagcaacgcgaacaccccaaag

SEQ ID NO: 176567 - RNA, 77 nt, Homo sapiens
cgagacccggggcgaggacccccgagccagaacagaaacgggaggaggcacgagaccaggacgaggagaaaagaaga

SEQ ID NO: 176568 - RNA, 78 nt, Homo sapiens
aaccgagccaagaggaacgacccccagaggggaaagaaagaccacccccaggagaccagagagcggccagccggagaa

SEQ ID NO: 176569 - RNA, 78 nt, Homo sapiens
ggccgcaacggccaaagaagagacccaagaaggacaagaaggggagaagaaaagaaacggcaaaagaaaaaagaaaag

SEQ ID NO: 176570 - RNA, 82 nt, Homo sapiens
acccggcgcacaggaaagcaaccgaagggacaaaagggaaccaaacggagagcaacacaccacggaacgaaaaccaacagaa

SEQ ID NO: 176571 - RNA, 74 nt, Homo sapiens
cagcacggaggaacagaagaaaagccagcccagagcgcgccgaaaagacgaggcgaggaggcgagacacccaac

SEQ ID NO: 176572 - RNA, 73 nt, Homo sapiens
gaagcggaacgaaccagacagccgcaaacaaaagacggagacccaagaggcaagagaagccgggcgccaacaa

SEQ ID NO: 176573 - RNA, 66 nt, Homo sapiens
cccacgaagaacgaagagcggacagaagacacagcaagaacagaaagccaaagggaggacaccaga

SEQ ID NO: 176574 - RNA, 74 nt, Homo sapiens
cacaccagacacaggagccaaaccgcacggccccagagaaaccaggcagggccacaccaccgagagcagccacc

SEQ ID NO: 176575 - RNA, 84 nt, Homo sapiens
caggccgggagagggagaacacagggagaaaacggcagcgagacggccggccgaccagggccggagaaagaagaaaagaagaaa

SEQ ID NO: 176576 - RNA, 37 nt, Homo sapiens
cccaaccgaagaaaacaagggcggagaacggaaaagc

SEQ ID NO: 176577 - RNA, 81 nt, Homo sapiens
cgaggcggcggcgcccggagggcagcgagcgggacagcaagggaggcagcagacgggaagaagagagaaaacaaaagcgag

SEQ ID NO: 176578 - RNA, 54 nt, Homo sapiens
caagcacgccacccggaaggcggaccagaccccggcggcacacccggaccggcc

SEQ ID NO: 176579 - RNA, 77 nt, Homo sapiens
aaagaaaacgccccgggacccaaggaaccaccacagcgcaccacgacaaagaagagaaaacgcggcagagcaacaaa

SEQ ID NO: 176580 - RNA, 85 nt, Homo sapiens
gcgggggcccgggccgccccccggagggcaggaagccagggcaggggccgccccagggaccggagacagcagcagaagcagaaaa

SEQ ID NO: 176581 - RNA, 40 nt, Homo sapiens
ggcacgcagaaggaccggccacgcaacgcccaagccgaac

SEQ ID NO: 176582 - RNA, 69 nt, Homo sapiens
ggcagcgaaaaaaccagcccaagagaccccaaaggaaacgagagagagaccacgggggcccgacgagcc

SEQ ID NO: 176583 - RNA, 74 nt, Homo sapiens
acaaggcagcagcggcgggggcaggcgccagaagaagaaaaaagcgccgcccagcgcgcagggggccgagagga

SEQ ID NO: 176584 - RNA, 101 nt, Homo sapiens
aaggccagcgagccacaccaacaccgccacccagaggggccggccaccccaacccgaagcggcaagcacgcaggcccaacgacggcaggggaaaaacgagg

SEQ ID NO: 176585 - RNA, 72 nt, Homo sapiens
gaaacgaacaaacgcacggaacccgggccagccgccggaacccgaacgggcgggcggccgcggccgggccag

SEQ ID NO: 176586 - RNA, 66 nt, Homo sapiens
cagaccccacggcacaggggccaacacggaaagagagggggccgggcccagacgacgagccgagcc

SEQ ID NO: 176587 - RNA, 57 nt, Homo sapiens
gaaagccagggggaaaccgaggggacacggcagggggaaggacagacggcaaggggg

SEQ ID NO: 176588 - RNA, 84 nt, Homo sapiens
ccgccaacaccagggcggcccgcgccggcccgaggcccgagaacaccgccgcccgcagccacaacgagcgacggacacaagagg

SEQ ID NO: 176589 - RNA, 78 nt, Homo sapiens
aaggaagcaaaaaaaggaacacccagggaaaggaaaccaaaccaggaaagaaggacaaggagcgaggagaaagaggga

SEQ ID NO: 176590 - RNA, 75 nt, Homo sapiens
ccccgcccaaggaggcccagcgaagaaaggaccaggcgggcccgagacaagcggccgcacaccaaggcagcaagc

SEQ ID NO: 176591 - RNA, 66 nt, Homo sapiens
gcccagacacgcaagaaccaagaaagcgacacacacaaccgagggacaagaccagaagcagaacga

SEQ ID NO: 176592 - RNA, 82 nt, Homo sapiens
agaaccggcgccgccaaacagcccagccgcgccagcgcccggcgccgcgcgccacccccgaggcggagaacggaaaagcacc

SEQ ID NO: 176593 - RNA, 78 nt, Homo sapiens
cgggaaggaaacccacacacggagcgacggagggcaggagagagagcagggcagagaaagagcgagagggaaaggaag

SEQ ID NO: 176594 - RNA, 60 nt, Homo sapiens
cagcccgagaccgcagcaggacagggcagaccgccagcagcacagcaagccacagagagg

SEQ ID NO: 176595 - RNA, 86 nt, Homo sapiens
cgcgcgcccgagcaggcaggccccgcccccgcgggggacgggcaccgggaccccaaaagagacagacaggcgagcaaaaaaaacaa

SEQ ID NO: 176596 - RNA, 73 nt, Homo sapiens
gaccccgcggagacagcgagacccgccaggagcaaagaaaaaaggcagcggaaagaagaaaagaaacggccca

SEQ ID NO: 176597 - RNA, 77 nt, Homo sapiens
aacaggacgaaaaaagggcaagaagccagaagggcaaagaggggagcagaagagacgcaggcagcaagcgacgggcc

SEQ ID NO: 176598 - RNA, 83 nt, Homo sapiens
gggaaggcagcaggcacgcgcaggagccaaaacgggcgaggcaaaagggaaagcaaggggaagggcccaagaagacaccccac

SEQ ID NO: 176599 - RNA, 69 nt, Homo sapiens
cgaagcaccacccaccgggagcacaggaaacgaaggacaccgaaggccacgggagagaagcaacaggaa

SEQ ID NO: 176600 - RNA, 73 nt, Homo sapiens
gcacacagggaacgagaacccaagggcaggccaagaagcgaaccaccggaacagaaagagaagggagcaaccg

SEQ ID NO: 176601 - RNA, 70 nt, Homo sapiens
ccaggggaccgccaccagcggccagcacccgggggaggaacgccccacaagaaggagagacgcagagcca

SEQ ID NO: 176602 - RNA, 82 nt, Homo sapiens
gccacaacgggagcaggcgccagacgagcacggaagcacaagcagaagggaagaaagcggaggcggcggcgcgaaaagagaa

SEQ ID NO: 176603 - RNA, 43 nt, Homo sapiens
cagggaccacccccagcacccccgaacaagcacaagcccggcg

SEQ ID NO: 176604 - RNA, 62 nt, Homo sapiens
caaaggcggaaaaaggcaccagcacggaacggaaacagaggcggaggcggccgggcgaaaac

SEQ ID NO: 176605 - RNA, 82 nt, Homo sapiens
cgacacaagaaaaccacaagaacgcaccccccagcaggaggcaaagggaccccaagaaaccaaagggcaagagccgcagccc

SEQ ID NO: 176606 - RNA, 71 nt, Homo sapiens
aaagggccaaaggaggaaccccccgacaagacggagaacaaacaaaggacagggagcccaaggcagaaccg

SEQ ID NO: 176607 - RNA, 54 nt, Homo sapiens
caaccccagagcaggggccaacccgagagaaacggcggaggcagggacacacgc

SEQ ID NO: 176608 - RNA, 68 nt, Homo sapiens
cgagccccaccaggaagcgacgcgagaaccagagaaaaaagccaacccggggcaggacgcaggcagcc

SEQ ID NO: 176609 - RNA, 75 nt, Homo sapiens
gagccgcaccgccggacccaaagcacggcaccggacagaaccaggagaggaaacaggaacaaaaccgaaagccgg

SEQ ID NO: 176610 - RNA, 66 nt, Homo sapiens
aggaagaagacaccggggacagacagggcacaggaagagggcggcacgcggccagagagcacaacg

SEQ ID NO: 176611 - RNA, 55 nt, Homo sapiens
acaacaggacggaagccccaacaggccaaccggacacggagcaagagacgagaag

SEQ ID NO: 176612 - RNA, 84 nt, Homo sapiens
cccaccggagaagagcagaagggggcgcggggaggaggacaagcccaaccagggaccaggccaaaaccagacgccacgccccac

SEQ ID NO: 176613 - RNA, 80 nt, Homo sapiens
gccgcaggaggccaacgccggcgacaccggccggcgcagacaagcagaccggaagaccgacggaagaccacaccccgagg

SEQ ID NO: 176614 - RNA, 70 nt, Homo sapiens
cggggcccagcccggggccggcgcagggcggaaggacaacagcccgacaaccaggcaaccacacaggaac

SEQ ID NO: 176615 - RNA, 46 nt, Homo sapiens
ccaggagcccgagagagaaggcccccccaggccagcgagcccgccc

SEQ ID NO: 176616 - RNA, 73 nt, Homo sapiens
cgccgaccccccggcgccgcgccggcggcgcgccgcccccccggccccaagaaggccacagcacgaccggccc

SEQ ID NO: 176617 - RNA, 81 nt, Homo sapiens
gaggagaccaggagggcgcagagaacagcccaccaccacccgagcgcagcccagagaccccaacaccaagaagaacggagc

SEQ ID NO: 176618 - RNA, 65 nt, Homo sapiens
ccgaaaagcggcacgacaacaaaaccacagagagccgaacccccgccaacaaacaaaggcaacga

SEQ ID NO: 176619 - RNA, 70 nt, Homo sapiens
ccaaaccgcgcgcacccaagccaggacccgagccccaaagacagaaaagccccgagacggaagagaagag

SEQ ID NO: 176620 - RNA, 79 nt, Homo sapiens
caacaagagacaacaccgcgcggaccacaaaccgcgccagaaaaaagccaagcaaagccaaccggcgaagggagaggcg

SEQ ID NO: 176621 - RNA, 64 nt, Homo sapiens
caagggagggccacggacacagaaccacaggggaagaaccacagagacgacgccccagagagca

SEQ ID NO: 176622 - RNA, 37 nt, Homo sapiens
gaaagcagaagacaaaaccaaccccagcacccgggaa

SEQ ID NO: 176623 - RNA, 41 nt, Homo sapiens
cccaagagagcaaacagacggagcgaagaagaagcgcaaac

SEQ ID NO: 176624 - RNA, 79 nt, Homo sapiens
ccccccaacggacgcccgcccaccgcccgaaccagcaaaggcaggagagggaaaaccagcagacagagaaaagaacagc

SEQ ID NO: 176625 - RNA, 64 nt, Homo sapiens
cacagcaacagaagaccggccgcgcaagccccagccaagacccaccaggcaggggaagaagaca

SEQ ID NO: 176626 - RNA, 66 nt, Homo sapiens
aacgcgagggcaccagaccagagacggaggcaacaacgggcaaaggcagagagaaaggaagccgca

SEQ ID NO: 176627 - RNA, 87 nt, Homo sapiens
aagaagccaacggagaaccaaggccaagaccagaaccagcccgggaaagacagaacaaggcagcccgagacaaaggcagggaggaag

SEQ ID NO: 176628 - RNA, 62 nt, Homo sapiens
cagacaagacaagaccggcggggaagcgaggggacagaaaaaaaaagaagaagaaaaagcac

SEQ ID NO: 176629 - RNA, 68 nt, Homo sapiens
cacaaaaaaggaagcgaaaaacccaggagaaacgagagggacagcaaggaagacgccagagagcggca

SEQ ID NO: 176630 - RNA, 83 nt, Homo sapiens
aggaaaggaaagcccacgcagacaggcgaagaccaaaggaaggaggagcaccaccaaagagcaggcggagcgcaaggcggacc

SEQ ID NO: 176631 - RNA, 59 nt, Homo sapiens
cagacccccccccgagaccggaagagaaagagcagagagaggaccagaaccagaccgga

SEQ ID NO: 176632 - RNA, 33 nt, Homo sapiens
agcagagggccgacgaagacaaacagaccccag

SEQ ID NO: 176633 - RNA, 78 nt, Homo sapiens
aggcaccacgggggaccgcacaggggcaggcaagaacagaagaccggggaccagaagggagaagaagcaaaaggaacc

SEQ ID NO: 176634 - RNA, 83 nt, Homo sapiens
gaaggcggacccaggcaacgccagcaacgcgggcagaggagcggagcggagaagccaagcggcaaccggcacgcaccagagca

SEQ ID NO: 176635 - RNA, 79 nt, Homo sapiens
gacgcaggagggagagcacagcaagagccaggaccaccggaagccagaaaggccgaccgggccgaggcgaaccagaaga

SEQ ID NO: 176636 - RNA, 62 nt, Homo sapiens
ccgggggaagccaagacaggccggaccccaagagcaagacgccgccagccaccggcgcgaag

SEQ ID NO: 176637 - RNA, 85 nt, Homo sapiens
cagggaagaaagaaacagagcggagaaacgcaggaaacagcagcgaggaggggaagagagaacaccggaccaaagcagcagcccc

SEQ ID NO: 176638 - RNA, 58 nt, Homo sapiens
gcgagagagcaaacaaggcaggggcaggaaccagcaggccacgcggaacagggccaac

SEQ ID NO: 176639 - RNA, 76 nt, Homo sapiens
ccgccacaccgcacagccagcgcaacgggacgggaggacacgcaccgccccggagccacagcaaagccacccaagg

SEQ ID NO: 176640 - RNA, 69 nt, Homo sapiens
ccgcgcgccgcgcgggcggaggaaacacaaaacagaaaaccgcagacaagaaacccgggagagccaaag

SEQ ID NO: 176641 - RNA, 66 nt, Homo sapiens
aggccaagcaagggccaggaggaagcaagaccaagagggcgggaaagcccaaggcggaaacacgga

SEQ ID NO: 176642 - RNA, 80 nt, Homo sapiens
aagggccaaggcaccaccgcggaaggccgggaaacagagagcagaaaagaaaaagaagaacccacccagaacgggccagg

SEQ ID NO: 176643 - RNA, 62 nt, Homo sapiens
cgagaaacccgcgccagagagccaagacccagggcaagggcaccgaaacacaagagaaggaa

SEQ ID NO: 176644 - RNA, 75 nt, Homo sapiens
gggaggaagaggcaaccaggcccaaagaagccaccgcccaggaccagcccgcggggcccaggcccaggccgagag

SEQ ID NO: 176645 - RNA, 77 nt, Homo sapiens
gcggcacccgcccagcgggggggcagcagaagcccagagcccagacgcagacagggaagcgcagcagacggccaggg

SEQ ID NO: 176646 - RNA, 76 nt, Homo sapiens
ccccaacaccagcaccgcagaggcaaggggccaccaggaggccagggggcgccaggggcaacagacaagcacccag

SEQ ID NO: 176647 - RNA, 73 nt, Homo sapiens
aaaccacagagcagccagcagaagggagaaccaaaaggaaaagccgaaagaagccgcaaagaaaaaaaggacc

SEQ ID NO: 176648 - RNA, 64 nt, Homo sapiens
cacccgagagcaccgccgagcggaccccaaggcgggaaaacggcacaaggcgacgagggagggc

SEQ ID NO: 176649 - RNA, 79 nt, Homo sapiens
gcgagggccgggccccagcgcccggaggcccgaggaagggagcgagggaccaaacgggcgaagcaccccgaggccaccg

SEQ ID NO: 176650 - RNA, 73 nt, Homo sapiens
gggagaaaaaggaaaacgcggaaaaccgacacaacagaacgcgacaacaagacaaaacagcaagacaacaaaa

SEQ ID NO: 176651 - RNA, 62 nt, Homo sapiens
agcaaccacaacccgcagacaccaggggggaaaaaccacacaggcaaagaacgcgcaaaaca

SEQ ID NO: 176652 - RNA, 69 nt, Homo sapiens
gaggcaaagagacaaggagagaagaaccaaagaagcaaaacacgagaaaagcaaacgccagcagaccac

SEQ ID NO: 176653 - RNA, 77 nt, Homo sapiens
aaaaacaacaccaggacacagaaggcgaaacagaaggcggaggcagaacgaaagaggaaaaaagaacccggaaagcg

SEQ ID NO: 176654 - RNA, 69 nt, Homo sapiens
cacgcccacagggagccaaagaggggccaggggggaaccgaagagcaaggaaaagaaaagggggaagga

SEQ ID NO: 176655 - RNA, 77 nt, Homo sapiens
gcgaccaaggcgagggcgaggaagcagccaaaacgggaagaacaacgcaccccgaaagcgccacgaaaaggaaagga

SEQ ID NO: 176656 - RNA, 71 nt, Homo sapiens
cggacagcaagcaccaagcggcagcagggaacaggccgacggcgacacacgggcagacagacaaccccgag

SEQ ID NO: 176657 - RNA, 76 nt, Homo sapiens
agagcgcgggagacagagaggccgggcccagaccccggcggccccgggaggaggccagaagcaaggaaagagcagg

SEQ ID NO: 176658 - RNA, 76 nt, Homo sapiens
cggcccgcagcaagaggcggacgagaaggacagggaagcaacggggcggcacacaaggagcgaagggcagggagaa

SEQ ID NO: 176659 - RNA, 81 nt, Homo sapiens
gacaagccgaggggaggcgggaccggccgaaaccggagaagcggagcacagaccagcgcgcgaccggagccccacagcggc

SEQ ID NO: 176660 - RNA, 62 nt, Homo sapiens
aggggaaacccgacaagagaagggaagagcgagggcccagcggccgggccgagaaaaccccc

SEQ ID NO: 176661 - RNA, 93 nt, Homo sapiens
ccggcagacaagacccacaccacccaagaccacgcccgcaaggccaaacagggacacccaggacaacggcagggaggcacaagcggggaaggc

SEQ ID NO: 176662 - RNA, 51 nt, Homo sapiens
gacaaacaggaccgccaaacccaaaccgggaagaaaacgccagagaagcag

SEQ ID NO: 176663 - RNA, 66 nt, Homo sapiens
aagcagcaggagcagcccgcggcgaccaagacaggaaccgcccgcgagagaagaagagaagagagc

SEQ ID NO: 176664 - RNA, 71 nt, Homo sapiens
gccagagaagaacccaagcaccaccagaccggcacaggacccagagaggacacgaaccacggcggcagccc

SEQ ID NO: 176665 - RNA, 71 nt, Homo sapiens
cagaaacggcaaaacacggcaagaaccgaaaacaccagcagaagaaaggacagagaaaaaaaaaggaagca

SEQ ID NO: 176666 - RNA, 56 nt, Homo sapiens
aacacaggagggcacggggagggagaagcgaggcgaaaagaaagcagagggagaca

SEQ ID NO: 176667 - RNA, 71 nt, Homo sapiens
aaagccaccaggacgagaaaaaccaccggacagaacaaccacaagaagaaacaaccgaccgaacaacgccc

SEQ ID NO: 176668 - RNA, 59 nt, Homo sapiens
aggagaacgacgggcgccgcccagcaaagcgaagaacacagaagagaacccgaacacag

SEQ ID NO: 176669 - RNA, 77 nt, Homo sapiens
ccccccagcacaccaccagcaaggccaccgacaccggacaaagcgaaaagcgagcggagggaaggagcagagggcaa

SEQ ID NO: 176670 - RNA, 105 nt, Homo sapiens
cggaggcaaagcggcagaacgaggcaaccccccgcaggcggaaggaaggcaaagagcgggcccaggcagcgcagagccaacagacgagcagaagccgcaaggagc

SEQ ID NO: 176671 - RNA, 77 nt, Homo sapiens
ggaaaaagcacggagaccacaccccccaggagaagcgggcagcagccagaagaggacgaggagacaaacaagaagcg

SEQ ID NO: 176672 - RNA, 79 nt, Homo sapiens
ggggccaccaacccggaagaggacaaggccccggccagacaaggagcccacagagggcacagcgaaaagcggcaggaca

SEQ ID NO: 176673 - RNA, 73 nt, Homo sapiens
gccggaagaaaaacacgccacacgggcgcaagagaagccacgacacccaggcggaggcagggcgagaccggcc

SEQ ID NO: 176674 - RNA, 68 nt, Homo sapiens
gaccgacccgaggccagcagggaaagccccgcagcaacaggcgaagaggacgcccaccggaggggcgc

SEQ ID NO: 176675 - RNA, 53 nt, Homo sapiens
cccgcggcgggaggagccgccccgaggaacacgaggacccaaagaacaaaccc

SEQ ID NO: 176676 - RNA, 76 nt, Homo sapiens
aagcaagacaaaggccagcagacaggcaggaggacggcccgccaagaaagaggggggaagcgaggcaggaagccca

SEQ ID NO: 176677 - RNA, 79 nt, Homo sapiens
cgaggaagaggacaggagcggagagggacacgggaacacagaggagccaagcgcccgccggacaacaagagccccaaca

SEQ ID NO: 176678 - RNA, 73 nt, Homo sapiens
cacaggggggagacgggaccagcaagccgagaaagggaggcggaacagaagccagaggacaacagagcaacca

SEQ ID NO: 176679 - RNA, 65 nt, Homo sapiens
ccgggaaggaccaaggaggagcacagaggccagaagcaagccagcaccggcccccagaagcccca

SEQ ID NO: 176680 - RNA, 76 nt, Homo sapiens
gccccgagcaccgcgacacacaccccgacgcgagaccgccggggacaggagcccggaaggaagaggcggagcagga

SEQ ID NO: 176681 - RNA, 78 nt, Homo sapiens
cggccggagcacgccaggccgagaaacaacggacacccccgggaacccaccaaaaaggacaccgaaagacgggaaaca

SEQ ID NO: 176682 - RNA, 73 nt, Homo sapiens
aaggaaggaggaccggaggggacggcagaaaggaagccacagccacgagggagagagaagaagacggggccca

SEQ ID NO: 176683 - RNA, 76 nt, Homo sapiens
cagcacaacaaacacaagagaagccgggaggcgcggggcagaagagcaccacacacggaagcagacgcgcagagga

SEQ ID NO: 176684 - RNA, 69 nt, Homo sapiens
gccgcccccaccggacgaggccccccaaccaggcaaggcccacggccccacggggcgacgagccacggg

SEQ ID NO: 176685 - RNA, 71 nt, Homo sapiens
acgcggacacacgcaaaagcgaccccagcccggaacaagaaggaaacaagaagacagcgaccccaagacca

SEQ ID NO: 176686 - RNA, 76 nt, Homo sapiens
cgggagagcaagggaaagaccaggaaggaggcaagcagcaaaaggaagcgcgccccacccaccaagcacaggccca

SEQ ID NO: 176687 - RNA, 87 nt, Homo sapiens
ggccgaggggccaaccagcgaagagcgacaagccgcggcagccgcggaccaccgccgccaggggcggcacccaccccccgagcccgc

SEQ ID NO: 176688 - RNA, 55 nt, Homo sapiens
aagaacgaaggcggcccagcaaaacggccaagggaccggagaagggcgggaaaca

SEQ ID NO: 176689 - RNA, 65 nt, Homo sapiens
aaacaccgaaccgccacccaggcccaagaagacagcgaacccacccaacacggcaaaacaaagac

SEQ ID NO: 176690 - RNA, 83 nt, Homo sapiens
ggcgcaggccggaacacgggcggccacgaggaggagaacacgagacccgcacaaaaccccgccccccaggccacacaggggcc

SEQ ID NO: 176691 - RNA, 77 nt, Homo sapiens
ggcagccgccgacgagcagcaccaggacaaaagaagggcagcacaaaggaaagccccaaaccccggaacgggaagcc

SEQ ID NO: 176692 - RNA, 121 nt, Homo sapiens
gcgcagcgcgccgccgccggaggaaccgaccccggcccggacaccccgggcccgccaggccagcgacgccgaggcccggcaggagccggacaaggacgagggcaggccccccagacgccca

SEQ ID NO: 176693 - RNA, 67 nt, Homo sapiens
cgcggccgagacaaaggcaccaggccaccacagaaacaaaagcaacaaagaggggggagccagacga

SEQ ID NO: 176694 - RNA, 67 nt, Homo sapiens
ggaccccagggcccggacaacaggacggcaggccacccccgcaggcaagcaaggcgccaaagaccgg

SEQ ID NO: 176695 - RNA, 70 nt, Homo sapiens
cagcgcaagaggagccaagcaaacagaagcgcggccaagcgcacggccgccccgaccgggcggccgcccc

SEQ ID NO: 176696 - RNA, 73 nt, Homo sapiens
ggcagcacaaccaccagaagaacgacagagaggagggagaacaagcaacggcggcccgagaaaagcacagcac

SEQ ID NO: 176697 - RNA, 122 nt, Homo sapiens
cgagaagcacacgaccggcgacagcagccaggagcagagcgacagcggcgagcagaacacggcgagcgggcaaaagcagaccggaaaacccaccggcaagaccacacccgaggggagcccag

SEQ ID NO: 176698 - RNA, 77 nt, Homo sapiens
gagagaaccgacaggaaccagacacgcaaacagagacaacggcaacacgacaagaagccggcccaccgcagcacagg

SEQ ID NO: 176699 - RNA, 57 nt, Homo sapiens
gggcacccggaggcgcccgagcgacacccaggaacagcaacagcaacaggaccagac

SEQ ID NO: 176700 - RNA, 67 nt, Homo sapiens
aaggaaagacagaggccaaacggcacacccaacgaaaaaagcagaacaagacaccccgagaccaccc

SEQ ID NO: 176701 - RNA, 52 nt, Homo sapiens
aggagcggccgaaccggaggcgccaggaaaaagggccacaaacgagacgaga

SEQ ID NO: 176702 - RNA, 56 nt, Homo sapiens
gacaagacagaagcaaagagacagaacgaaacagaaacaacacaacggcaaggacg

SEQ ID NO: 176703 - RNA, 71 nt, Homo sapiens
acccgcggggacagggaaaaacgccagcccaccggagaaggcagaggaagaaagaacagacccgggaaaga

SEQ ID NO: 176704 - RNA, 80 nt, Homo sapiens
ggcccgggccgcaccagagcgcccggcccacgacacaggaagaagacagacaagacaaaggcagaagcagggaaggccca

SEQ ID NO: 176705 - RNA, 74 nt, Homo sapiens
cccccagaaaggaggacaacgggacccagaagagcagcggaccaggagaggagaaagaaacagcgcgcaccgca

SEQ ID NO: 176706 - RNA, 78 nt, Homo sapiens
agggagccccaagccggcggccaagacggagccgaaaaacagcagaccaaacaagaagcaaaaaagcaaagcacaagc

SEQ ID NO: 176707 - RNA, 77 nt, Homo sapiens
caaagccgcagaaagggaaaggagccccgaaaacgaggaagaaggaccaaaacagcaggaggagaagggcggcaagc

SEQ ID NO: 176708 - RNA, 76 nt, Homo sapiens
caagacacaaacggcgacacagggcggagaacggaaaagcaccaggaagcagagaggaccgcagaagggaaggaga

SEQ ID NO: 176709 - RNA, 74 nt, Homo sapiens
cccagaccaaccagaaaaccccacgcgccagaaccacccaacagcaaaccaggcgagacagcaggagcaccaaa

SEQ ID NO: 176710 - RNA, 108 nt, Homo sapiens
cggcccgggcgggcgcccgccggcacgccgccagccccgggggccacgagcgggccgccgaccaacgggggagaaccgcacagccaggaagaggaagcggaagcggag

SEQ ID NO: 176711 - RNA, 71 nt, Homo sapiens
agagagagacacccgcaacagggcacccacgcacgagcggaagaagaggcacaaagcagggacacgagcca

SEQ ID NO: 176712 - RNA, 78 nt, Homo sapiens
agcaggaaccaccgggccaaccgaagcaacgacaagggaccacaaagcaagagcaacaaacggaaaaggagacacacc

SEQ ID NO: 176713 - RNA, 91 nt, Homo sapiens
agggggacacccgggcggggcagagcagcccccagccagccgcgaggcagaggaaagggcgcaggcagaggagcagccgccaccccccagg

SEQ ID NO: 176714 - RNA, 71 nt, Homo sapiens
caagagggcagacggaacgaacagaaggccccagggaaaggaccgaggcaggaaagaggccagacgcaggg

SEQ ID NO: 176715 - RNA, 72 nt, Homo sapiens
agacaaggaccgaaacagaaacggaacaccaaggcgcgcagccgagagcaccaggggacccgcggcagaaag

SEQ ID NO: 176716 - RNA, 86 nt, Homo sapiens
cagaccaaggcagcgcagcaggggagccccacccggagcagcgcggaccccccagcccagggcacgcggacaagggggggcgcgcc

SEQ ID NO: 176717 - RNA, 66 nt, Homo sapiens
aaacaaaacaaagcggggggcccagacagggggggcccaggaagcgaaagggggcagacagaagag

SEQ ID NO: 176718 - RNA, 73 nt, Homo sapiens
gagaggagcagaaggagcaaaaggcggacaggcaggaaaacacagcggagcacgacagcaagagagcaagaac

SEQ ID NO: 176719 - RNA, 74 nt, Homo sapiens
aagcaaggagaagaagcaagggcccccaggcggccccggacggcccgccacgggccccgcagccgcgcccgagc

SEQ ID NO: 176720 - RNA, 65 nt, Homo sapiens
ggacccccgacgccaggcagcgcccccaaacgaccgagcagggacgcgaacaaaaaaaacccaac

SEQ ID NO: 176721 - RNA, 85 nt, Homo sapiens
cagggaggaagaagcgagccgcgaggccgacacacaccaggagccggggccagacgcccgaagagcccccaggagcgcagcagag

SEQ ID NO: 176722 - RNA, 67 nt, Homo sapiens
cagccaaagaagacccagaggacacaaccaaggccccgcgggaccccgggcgaagaacaggagcgac

SEQ ID NO: 176723 - RNA, 80 nt, Homo sapiens
aaaaacaaggacagcaaacaagcaggacaacgccagcccccaaccccgccaggcgacagacaaggagaggggggaccgcg

SEQ ID NO: 176724 - RNA, 69 nt, Homo sapiens
cgccgcagcgccaccggcgggggagccaagggagagggaagaaaacaccggcgaaaccaaccgcgggga

SEQ ID NO: 176725 - RNA, 88 nt, Homo sapiens
cggaaggcccgcgagaaagggagaagacagcagagggggccgagccccaacaccacacaagcaaagcgggccacagagaagaggagca

SEQ ID NO: 176726 - RNA, 76 nt, Homo sapiens
cggcccaggcccggccccgaagagagcccggaaccaccggccgcagccgcaggaagaccggaagcgccaagcccac

SEQ ID NO: 176727 - RNA, 76 nt, Homo sapiens
ccgaccaaacaagccagcagcaacagaaccccaggagcaaaagaaaaggccaaaacgaaaaaccaaacagagggag

SEQ ID NO: 176728 - RNA, 76 nt, Homo sapiens
aggaaggacaaagcagccacagcaagccaacaggcaaagcgacacagaccagagagagagagaaccagaagcagac

SEQ ID NO: 176729 - RNA, 41 nt, Homo sapiens
gcacagcgcagcgacgagaggggaagagcacgggacaggaa

SEQ ID NO: 176730 - RNA, 72 nt, Homo sapiens
gggaaggggggacagggagaaaaacaagggcagagccagaaggagagccaagcgccagagaacaggaggagg

SEQ ID NO: 176731 - RNA, 78 nt, Homo sapiens
accccccgcccaacccccaacgaggaaggaaggagcagggcaaccggaacccacaggagggccagaggacaaagcacg

SEQ ID NO: 176732 - RNA, 77 nt, Homo sapiens
gagcccggggcggcagcgcggacccgcccggagagagggaggaacgacggaacaagggagaagcggagcaaggaagc

SEQ ID NO: 176733 - RNA, 72 nt, Homo sapiens
aaacacaggaagcaaagaggaaccacagcgcccacgacaggggaagggaaacagaagaagaccgagaaccag

SEQ ID NO: 176734 - RNA, 90 nt, Homo sapiens
acaagacgacaccgccagcaccgaccaccgaggcggagggggagaacacccagggccccagaaggggaccagagagggaagaacaaggag

SEQ ID NO: 176735 - RNA, 73 nt, Homo sapiens
ggaaaggaaaccagcaacagcaacccgagcccagagacccagggggacggcgcgaagaagagaagacaggaac

SEQ ID NO: 176736 - RNA, 89 nt, Homo sapiens
ggcaccggcagaaaggaggaggaaaacacccccaacagaagaggagcacggcggcggaggaagaaagaccgacacagagaacaggagga

SEQ ID NO: 176737 - RNA, 72 nt, Homo sapiens
gagggagaacacagaaaccggccccaggcaaggcggaggcaggaccacccaaaaccagagcacccaggccgc

SEQ ID NO: 176738 - RNA, 83 nt, Homo sapiens
agagcacagggccgcagaagagcggccggagcgaggggcggaccgcgggcgcccacgaccagagccacgccgccaggagcccg

SEQ ID NO: 176739 - RNA, 89 nt, Homo sapiens
gccacagcacggcgacaaacccaaagacagagagaccagggcaccgaggaagagaaccaaggcagaggccacaggcaagcaagagggag

SEQ ID NO: 176740 - RNA, 84 nt, Homo sapiens
cacaacaggccgcgccggcggcagagaggaacgggcgggggaggagcgcgagcccggcagggaaagagaagggcgagaccacga

SEQ ID NO: 176741 - RNA, 83 nt, Homo sapiens
gcgaaggaaaaaccacacacaccagcaagaagacgacccaagcggcagaagcccggagcagcaagaaaacacggggaaccgga

SEQ ID NO: 176742 - RNA, 79 nt, Homo sapiens
cgcggccccgcccccgccggcgcgcccgcgcggcgcggggaccgcggcccgacacgaaccagacacagaacgaaaagga

SEQ ID NO: 176743 - RNA, 75 nt, Homo sapiens
caggccaccacagaaacaaaagcaacaaagaggaaaccccacagcggagaaaaaggagaaacccccaagacaaac

SEQ ID NO: 176744 - RNA, 82 nt, Homo sapiens
gggcaggcccccagcacaccccgcccgaacaggaggcgcccagcaaggccgcaggccccgggaccaaggacacgcagacccg

SEQ ID NO: 176745 - RNA, 78 nt, Homo sapiens
ccgccgcgcagcccccgcgcgggcagccaccccgcccccgccccccccgccgcaccagagacccggagacccaaaaac

SEQ ID NO: 176746 - RNA, 81 nt, Homo sapiens
gagcgcgagagccgagcggaccaggaagaagcaaagcacacagagaggaaacgccaaaagaaaacggaggaacgcgaggca

SEQ ID NO: 176747 - RNA, 76 nt, Homo sapiens
acacaccccacaggaccccagagcgacagcccgggacaccaagaaagaacgacacgcgaagaggaagaaacgagaa

SEQ ID NO: 176748 - RNA, 84 nt, Homo sapiens
agggacgcggacagagagcggacgggccaacccaaaaccagggcggcaaaacgagcgggccagcgcgagcgagagcgagaagcg

SEQ ID NO: 176749 - RNA, 63 nt, Homo sapiens
ggagaaggaccaagaaccagcggagcccgcgcgcaaaccgcaaagaaacacccacgacggagc

SEQ ID NO: 176750 - RNA, 87 nt, Homo sapiens
cgaggcagcacacagccacccccggaagaaccagaacacgagcggggagcgggcgcgacggccccgcgggagacaacaccaaagcgg

SEQ ID NO: 176751 - RNA, 71 nt, Homo sapiens
cggacgacccccgaaggccaacaacaacgacggggaccaggcccacgacacaaggcccacaaaggccgaga

SEQ ID NO: 176752 - RNA, 107 nt, Homo sapiens
ggaaccagagaaaaaaagaagaccaaccaaggcggcaaagaagagggaccaggaaaagcaacaacaggagaagagaagccagaaaagcaacaacagaagagaggaga

SEQ ID NO: 176753 - RNA, 76 nt, Homo sapiens
gacccagaaaaaggaaagacccagaggccaggcaaaagacaacccgccgggacaccagccgacagccaccaaacag

SEQ ID NO: 176754 - RNA, 71 nt, Homo sapiens
aacgagagagaaggaaggggggacagaaaaccgagaacggacaaacacgcagcgaaggagccaaccaggag

SEQ ID NO: 176755 - RNA, 63 nt, Homo sapiens
gcaccagccgcccaagccgcacagccgcggcggcagcagcaggagaggacgggaggagagaac

SEQ ID NO: 176756 - RNA, 67 nt, Homo sapiens
ggcaccgggagaccagaaggaaacgccaggcccggaggccaggagaggaaagaaacgcggcaagaaa

SEQ ID NO: 176757 - RNA, 40 nt, Homo sapiens
agaacagcgcccgcgaaaggcaggccagacggcacccgac

SEQ ID NO: 176758 - RNA, 64 nt, Homo sapiens
caccaagcaaagaagaggagcacaacaggagccgaggaaggacagggcgggaggggccaccgcc

SEQ ID NO: 176759 - RNA, 79 nt, Homo sapiens
caaggaagagagggagcagagggaaagggaaggagaaggagggacgcaggcgcaggccagggagaccagcacgagccgg

SEQ ID NO: 176760 - RNA, 79 nt, Homo sapiens
gcgaggacgggaccccggggaacgccagaaggggggaggcgccacccgaggggaagagggggagaagaagagcagcggc

SEQ ID NO: 176761 - RNA, 130 nt, Homo sapiens
aggggacaggccaaagagcggcaccgggaggaggaggagacgcaggcggcccaggaccgggaggagagaaggaacgagacgcgaaagggcggggaccagggaagaggggaccggacacgcagagaacccc

SEQ ID NO: 176762 - RNA, 76 nt, Homo sapiens
gagcgcgcggagaaccagagaagccggggaaccagaggaggggaggaaccaccacagaaagcaggagaacacacag

SEQ ID NO: 176763 - RNA, 71 nt, Homo sapiens
gggaagacagggacggaccacgggaccaagcagacaaaccaagggcagccagagcgggaaaggaggcaggc

SEQ ID NO: 176764 - RNA, 84 nt, Homo sapiens
aacacgccaagcgccggccagaccgcaagagccccaccgaaccaacaaacccaacacacaaaggaaaacaacccgaacaggaaa

SEQ ID NO: 176765 - RNA, 70 nt, Homo sapiens
ccagggcacggagcgcaaagagacagaggcacaaaaggagaaagcagaagaaacaggagaaagcaaaaaa

SEQ ID NO: 176766 - RNA, 80 nt, Homo sapiens
cccgccccccccccacccccgaccgggcggcgcggcggccagaggaaccccgagcgagcgacgcgcccacggaggaggcg

SEQ ID NO: 176767 - RNA, 81 nt, Homo sapiens
gaagcgcgggccagcgacccgcgccagcgcccagggggggaaaccaccggagaacggaagccagagaaaaggaagagagag

SEQ ID NO: 176768 - RNA, 75 nt, Homo sapiens
gccacacagcaacagccaccaagacaccccgaccagcacacacgcaaggagacagaggagcccaggcaaacaaac

SEQ ID NO: 176769 - RNA, 78 nt, Homo sapiens
ggcagcgccggccgcggcaagagcgcaaaacggacccccacaaaagcgaggaccggcccagccaggcccggggcagcg

SEQ ID NO: 176770 - RNA, 72 nt, Homo sapiens
cacggccaacagagaacaaccaagccgacagacgaagccaccagcacacgggacccgaggagaggaccagca

SEQ ID NO: 176771 - RNA, 71 nt, Homo sapiens
ggcaaaaaagggaaagaacgggccccagcaaaaaggggacccagaaaccagacaaaagaccaagaagagag

SEQ ID NO: 176772 - RNA, 81 nt, Homo sapiens
gccggcggcccaggcgcacaccgcgcgaacccaccagccccaggaacaaggaaaagcaccaggcaaaccaccacacaccag

SEQ ID NO: 176773 - RNA, 70 nt, Homo sapiens
ccgagccaccaggacacggcgaagaggagaggaaggcaccaaagacagaacaaagaagagaaccgaggaa

SEQ ID NO: 176774 - RNA, 62 nt, Homo sapiens
gggggcccggaggaccggcagccggggggaagacaaggaggggaggaagagaagagaagaga

SEQ ID NO: 176775 - RNA, 72 nt, Homo sapiens
cacacggccaccccccgggacagaccaaaggaagagacaagagcgacgggaaaccgcagagcaagaagaacc

SEQ ID NO: 176776 - RNA, 68 nt, Homo sapiens
ggcagcaccagcacagagaggcacaacgggaacagcccgggccgccgcacccaccgcggagaagcacg

SEQ ID NO: 176777 - RNA, 81 nt, Homo sapiens
acagaagggaaggagccgacgcaaggagcagagggcgccaccgcagacgaggaccagccgaaacaagaaaacgaaaaaccc

SEQ ID NO: 176778 - RNA, 74 nt, Homo sapiens
gcccccgcaagaggacggcgccggcagccgggggagccccagcagccaacagccacagagaaaaacaacgaaag

SEQ ID NO: 176779 - RNA, 85 nt, Homo sapiens
caagcagacggcaaaggcaagagaacagcagcgccgcccgccgacagccaggcccgggagaagcgcacacccagaacggagggac

SEQ ID NO: 176780 - RNA, 102 nt, Homo sapiens
gaaagaggcgcccaggcaagaagcagacggagaagagcggcaaagggaccaccacagaaacagggggggaccgagcacggcgcccaccccggccgaggggac

SEQ ID NO: 176781 - RNA, 77 nt, Homo sapiens
cagaaaaagagaggagggagaacacagaaacccgccccgggcccgggaggagcggggacacgaggaccccccaaagg

SEQ ID NO: 176782 - RNA, 40 nt, Homo sapiens
gaacacccccagcggccagccaaaagccggaaaagagcag

SEQ ID NO: 176783 - RNA, 70 nt, Homo sapiens
aaaaacaacagacagcccagcgcaggaaagcaggaacggcagggggcacagggagagcgggaaaggggga

SEQ ID NO: 176784 - RNA, 59 nt, Homo sapiens
cgagccagcgccggccgcgcgccgcgcccgcgccacaggaaacggaaacggccagaagc

SEQ ID NO: 176785 - RNA, 102 nt, Homo sapiens
caccgccagacggccagaaagccgccagagcggggcacggagcgggcccaaggagaggcacacaggacaggacccccgagaaacgaagaaggagcggaggag

SEQ ID NO: 176786 - RNA, 71 nt, Homo sapiens
gagagacccgccagcagggggagaggcaaagacaccggcagagaaccaaaagaccccaacaggcccgacca

SEQ ID NO: 176787 - RNA, 81 nt, Homo sapiens
aacaacagcgaggaagaagaggacgacgacgacgaggaagaggaggcgaggaaagagcccagacccccccagcaaggacag

SEQ ID NO: 176788 - RNA, 74 nt, Homo sapiens
aaaagaaccgcacgggaaaaggcaacagcgaaaacaggaacccgagaacccgccggccccccccaaggaggaga

SEQ ID NO: 176789 - RNA, 80 nt, Homo sapiens
aaacacacaacgaaccgcgccacgcccaaaacaaaaccacaccaagccgaggcccaaaccaaacggacggagcgccggcc

SEQ ID NO: 176790 - RNA, 83 nt, Homo sapiens
cgaccccgcgcgacgacccgccgccgccgggcggagaaagagccgcagacgcacagcaaccaccggacccgaaggccaccacc

SEQ ID NO: 176791 - RNA, 77 nt, Homo sapiens
cgccaaagagaagcggcgagaaaaggccccaggggggcgagcaccaaagccaaggaagcccagaagaaagagcaccc

SEQ ID NO: 176792 - RNA, 83 nt, Homo sapiens
gaaccagccaccaaagaacaaggaccacggcaagggcgggaggccaggcagcacgcagacaagaagcgcaggacaggcgcagg

SEQ ID NO: 176793 - RNA, 85 nt, Homo sapiens
cggccagggaacggggcacgcggccaacgcagaaaaagccaccggagcgaagcgaaggaagcgaggacaacaccgggagagcgag

SEQ ID NO: 176794 - RNA, 58 nt, Homo sapiens
caacaagaggccggcggggcgacaggaaaggagcagcaagaaagcgaaccaaccagag

SEQ ID NO: 176795 - RNA, 54 nt, Homo sapiens
cacacaagcggggaggaccccagaccacggagaaaaccggaagagaaaggccgg

SEQ ID NO: 176796 - RNA, 99 nt, Homo sapiens
gacagccaggagaagaagagaaaaggagggaacacagacccagccgccaagaagagagaagggcacagaccaagacaacgaaccccggccaggacaggc

SEQ ID NO: 176797 - RNA, 75 nt, Homo sapiens
cgggccagcggcgccgcccccgcggggaccaagagaagagcagaggaccagcaccgccgagacacgcacacaccg

SEQ ID NO: 176798 - RNA, 76 nt, Homo sapiens
gggccgagcgaggaggccgaggccgggaggccggcccggaggggccagagaacaagcccagacagcaagacgcgag

SEQ ID NO: 176799 - RNA, 41 nt, Homo sapiens
aaggcagcaggccccgaggccgaaaaggaaaaggagccagg

SEQ ID NO: 176800 - RNA, 61 nt, Homo sapiens
gggggcacaccaggagggacgcgcaggcccgggcacacaggcccgagcacaaacacaagaa

SEQ ID NO: 176801 - RNA, 75 nt, Homo sapiens
acagggaagagaccagcgaaagcaggcccaacgaaccaggagcggcccccacagcccaggaagacagaaacacag

SEQ ID NO: 176802 - RNA, 70 nt, Homo sapiens
agcgggaggagcccgcggaggcgggaccagcagagcaaaagaacgccacgcagccacacggcagggaacc

SEQ ID NO: 176803 - RNA, 76 nt, Homo sapiens
gaagaagaaggggaggcaagcgcgccagaaagaagaggcccagcacaagcggaagccccagggggggaaaacggaa

SEQ ID NO: 176804 - RNA, 57 nt, Homo sapiens
caaggacgggcccaagacaaaaggagcgcgccccccagaaccgcccacagcccacgg

SEQ ID NO: 176805 - RNA, 80 nt, Homo sapiens
cacaacggagaaggaaaagaaccagaagcgagagaaaagcccccaaaagcagcacaggggcagaacggggagccaaccag

SEQ ID NO: 176806 - RNA, 71 nt, Homo sapiens
aaggaccaagaaccagggagagcacaacaggaaccagagaaacaaggagccaggcgcagagaagggggccg

SEQ ID NO: 176807 - RNA, 87 nt, Homo sapiens
cagggcagcgcgaccggccagcgccgcgacgggaggagcgccggaacgccgaggcccaggccaaagccgacagaaaaggaagagacc

SEQ ID NO: 176808 - RNA, 72 nt, Homo sapiens
cccgaggacgcggggacagaggaggcggggggccgggaggcggagaaaaggggaagagcggaagccggcgaa

SEQ ID NO: 176809 - RNA, 85 nt, Homo sapiens
cgggccgccgacgagccgcggggccgccccccgaagcccagggagagcaaggcgcgcggcgacccggcagccaagcgacgaggcc

SEQ ID NO: 176810 - RNA, 81 nt, Homo sapiens
cgggggcagaccccagcccacaacccacgcgcaccgggggcaacgaggaacaggccaagaaacaacacagccaaggccagc

SEQ ID NO: 176811 - RNA, 73 nt, Homo sapiens
agcacaagagaaggaaaagaggcacgaccacagaaaccagcccgagccgacgcgcgacccagacgcccggcgg

SEQ ID NO: 176812 - RNA, 69 nt, Homo sapiens
acagggagccacgcaccagcggaaaaggagccaaagcagacccccaagcgagcggagcggaaggagcgc

SEQ ID NO: 176813 - RNA, 85 nt, Homo sapiens
gaccaggccgccagccggggcaagaagacaacaggcaggaggaaagcacagagaccccagccaggccaaacaagacaaccaccaa

SEQ ID NO: 176814 - RNA, 70 nt, Homo sapiens
gcgccccgcgcgcccggcggcgcgggccaagcagcggagaaccccgccaaccagaggcaagcacaaacca

SEQ ID NO: 176815 - RNA, 56 nt, Homo sapiens
gggccgccgagcggacccggaccggggaaagaccacacagggaaacgaccagggag

SEQ ID NO: 176816 - RNA, 76 nt, Homo sapiens
gccgagacaaaggcaccaggccaccacagaaacaaaagcaacaaagaggcagggcgaacgcgagccggcaggggcg

SEQ ID NO: 176817 - RNA, 76 nt, Homo sapiens
aacacagcaggacagacagcagagaaggaacagcaaccaacgaagaaaagagaaaacagaccggaaaaccagccaa

SEQ ID NO: 176818 - RNA, 60 nt, Homo sapiens
agccaccaaagagacaaaggaagacacccgccacagcgaaagcgagagcccacggcccag

SEQ ID NO: 176819 - RNA, 79 nt, Homo sapiens
gagaaacggaagagggcaggacggagagcgaccggaagaaaaggagcgcccggagaaggacccggggaaagccaccaga

SEQ ID NO: 176820 - RNA, 57 nt, Homo sapiens
gcgaccgcagccccccgcccggaggccgggaagcagccccacggcaccaacacggcc

SEQ ID NO: 176821 - RNA, 82 nt, Homo sapiens
agagacaggccagagggggccgccgcggcagcaagaacagagagagaggggacagacgagagaacgagagagaacacagggc

SEQ ID NO: 176822 - RNA, 76 nt, Homo sapiens
agacaaacggaggaaacccggacgaaaaccaaaccggagcgggcggaaaacaaagagggaaaacggagaaaagccc

SEQ ID NO: 176823 - RNA, 78 nt, Homo sapiens
gccccagcagcaggggcgccagcaccccagagagaccggaccaaacaaccaggaagcgccaaagggcagcgaaggcga

SEQ ID NO: 176824 - RNA, 43 nt, Homo sapiens
cccccaaaggcgggagacagagggagaagagcggcgagagggc

SEQ ID NO: 176825 - RNA, 76 nt, Homo sapiens
cgcacccaccgcgacccgggacccgcccgcccgcgggaggaagacccgcggaaggcacacaagacacagccaacac

SEQ ID NO: 176826 - RNA, 70 nt, Homo sapiens
gggcccgagcgccagccgaaaagcgaacgagcacacaggacagcaacgccagcgcacgagcacaccacag

SEQ ID NO: 176827 - RNA, 53 nt, Homo sapiens
caagaagacccgacagagcgacccgaagcgccggcgaagagagaacacgcacg

SEQ ID NO: 176828 - RNA, 71 nt, Homo sapiens
cgaaaacgagaacggaaaaagcgaggcagcacaaagcaaaaaagggagcgggaaagaacaaggaagagaga

SEQ ID NO: 176829 - RNA, 73 nt, Homo sapiens
cgggaaaccagacggccggcaagaacagcgacaaggagagaagcgcggagccccaagaaaaggggaaggaaca

SEQ ID NO: 176830 - RNA, 79 nt, Homo sapiens
gaaccaacaaacccaacacacaaaggccgaggagcgagcgacaggcagaggaggcgagccccaccggaccacccggacc

SEQ ID NO: 176831 - RNA, 77 nt, Homo sapiens
gcacgcccagcaccccgccagcccggcgcccgccgccgccccggagcgccgggggggccggacaaggacgacagcag

SEQ ID NO: 176832 - RNA, 69 nt, Homo sapiens
agagcacccccacgagggagccgagggcggagcggagacgaccgagcaaaagcaaacagacccccccag

SEQ ID NO: 176833 - RNA, 83 nt, Homo sapiens
aggaggagcgcgcgggcacaggggccgcgaccgacccaacccggagccggggacggcacacgggcgggggcaacgggaggaga

SEQ ID NO: 176834 - RNA, 50 nt, Homo sapiens
ccgcaacccggcagcagaagacaagaagaggaggaagagcgggacaaaac

SEQ ID NO: 176835 - RNA, 71 nt, Homo sapiens
caccagaggagcagcccgcagaggcccaggagacgacaaagccccgccaagggggaaggagaacagaggga

SEQ ID NO: 176836 - RNA, 80 nt, Homo sapiens
ggcgaggcgaggagaggccgaacccaagggacgacgccgcggaagcagagggggggcggagaacggaaaagcaccaggaa

SEQ ID NO: 176837 - RNA, 82 nt, Homo sapiens
agagcggaccgagagcgcgaaacgcacgagaagaaagggacgcggcacagaacgaagaagaaagcagaagcaagagaaaaaa

SEQ ID NO: 176838 - RNA, 75 nt, Homo sapiens
cgacggccagcccaccggaaccccaagaggaacgccaggagcacccacgggagaccggggggcaagaaaaggaag

SEQ ID NO: 176839 - RNA, 73 nt, Homo sapiens
ccccacaaaaaagaaacaagcccccgagaaaagacaaccagcaacagcccaaaggggaagaagagggaaggcg

SEQ ID NO: 176840 - RNA, 81 nt, Homo sapiens
cgaggaggcagcgcgaccccgcacgcacccacaaaagcgaaaagccagacaggaacaccagacagaagaacgccgggccac

SEQ ID NO: 176841 - RNA, 36 nt, Homo sapiens
cgcaccaccccaccggagccaccccgaggacgaccg

SEQ ID NO: 176842 - RNA, 77 nt, Homo sapiens
agcagagggggaccagagagcccaacgccgggccaagaccccgaggccgcccccagcccagggccagaggaagcccg

SEQ ID NO: 176843 - RNA, 71 nt, Homo sapiens
agaaccggagagacacacagcagcccagccagcccgagcaagaaagagaaacaacgaacgagcaaggaagg

SEQ ID NO: 176844 - RNA, 78 nt, Homo sapiens
aaaagacagcccgcagcacgaccagcaggaacgggaagagaaagccaaacccacccccgggcaggcagacgccggccg

SEQ ID NO: 176845 - RNA, 89 nt, Homo sapiens
gccgcgccaccaccgcgaggcaggagagaggaggaggaggcggcgcggcggccccgggaccaaggagacgggaaacacgaccgccgcgg

SEQ ID NO: 176846 - RNA, 73 nt, Homo sapiens
ggcggagcgagaaagagaagagaaaagggaaggcacggaggaagcccgagaccacgaggcagagaagaaggaa

SEQ ID NO: 176847 - RNA, 80 nt, Homo sapiens
acgcgagagcaagagggcaccagcagcgacggagccacccgcgaaaacggccagggccgccgagacaggacgccaggccc

SEQ ID NO: 176848 - RNA, 83 nt, Homo sapiens
gcgcgcccgcgccggggcaggagggccggcggagcgccaggccgcaccgaaggaaaagacgagggaagaagaccgacaacaac

SEQ ID NO: 176849 - RNA, 74 nt, Homo sapiens
ggacacacaggaggcgcagaagacgcaacaagaaagaaaggccaaggggagagcccgagcgacgaacgagcaca

SEQ ID NO: 176850 - RNA, 88 nt, Homo sapiens
cgggcgggaaaagccgagagaacaggaggaggccgggcgacggcgacggcggcgaaggaacccgaaaggggaaagaaaggcaaagcga

SEQ ID NO: 176851 - RNA, 74 nt, Homo sapiens
cacaccgccccgaagcaaagaggaggaaggagggaccggcccccagcaagccccagaaaaaagaacccagaacc

SEQ ID NO: 176852 - RNA, 57 nt, Homo sapiens
gcagcacaggcacacagcaaagagaaaggcgaaaagcgaagacagccccgcggaagg

SEQ ID NO: 176853 - RNA, 74 nt, Homo sapiens
gaggaagcagggcgggccagcagggcagacagccccggaagcagagaaggcaacgggaaaaaaaggaaaaaaag

SEQ ID NO: 176854 - RNA, 75 nt, Homo sapiens
cacaggcccagcccagcggaaaggaccagaagaggggcagccaggccggcccaacagaccccaacagggcccccg

SEQ ID NO: 176855 - RNA, 77 nt, Homo sapiens
acggggacagaagcaccggccaacaggggccgggagaggaaggccccaagcagccagcagaaaagcaaccagaccca

SEQ ID NO: 176856 - RNA, 85 nt, Homo sapiens
gcagagagcgagagcacgaaccagagcaagcagcaggcgaaaagcccccaccccgcgcacacagcgcaacaaacagccggcacca

SEQ ID NO: 176857 - RNA, 85 nt, Homo sapiens
ggcgagcaggacgaagcgcccgccaccaagagcaaacgaggccccgagagcccaccagcacaggaaaaacccacagcagaaccgg

SEQ ID NO: 176858 - RNA, 72 nt, Homo sapiens
aaaacgaacaggaccagaggaagagaccgagaccaggaaccaggcaggggaacggagcgaaccagggagcgg

SEQ ID NO: 176859 - RNA, 88 nt, Homo sapiens
gcgacgggagacgcgcccacagaaacccggacgagaggcagcgagagggccaagggcaacgccggccaggagggcagcaccgcggagg

SEQ ID NO: 176860 - RNA, 78 nt, Homo sapiens
caagacggccaagcgacagcgccccaaacaaaccagacaaaggaaagggcgccaacaaaggagagaagaaaacaccga

SEQ ID NO: 176861 - RNA, 96 nt, Homo sapiens
gagggccccggacccgacggcggccggacgccgaccggagggggccggggagcccgaccggaccgcggaggaagcgccacgcagagagcaaggcga

SEQ ID NO: 176862 - RNA, 79 nt, Homo sapiens
caacagccggcgggcggaaggcccccacagagagcacacaaacaaagcgaaaccacggaagaaaagggcaaaggaagac

SEQ ID NO: 176863 - RNA, 78 nt, Homo sapiens
acaaaaaaagcagcaaggaccccaaacgacacaagaccacagagaaaacccgccaaacgcccagcaagggacaggaac

SEQ ID NO: 176864 - RNA, 76 nt, Homo sapiens
ggaacagaaaagggaaagggaagagaacggcacgaaaaggcaacacacaagaggggggccgcccgcccaaggcagg

SEQ ID NO: 176865 - RNA, 75 nt, Homo sapiens
cgccaacacccccacaccagaggaccaagagcagccagaggaccacgacaagagagagggaggacgcccgacccc

SEQ ID NO: 176866 - RNA, 93 nt, Homo sapiens
gagcggcgcggacggcgcgcggacaccaggcccagggccccggccaggcccagccccgcgggagacccggccagcaccacggacggcgcccag

SEQ ID NO: 176867 - RNA, 65 nt, Homo sapiens
aagcgcccacaagcgagagacaaaaccaaaggaggaaggccagcggaagacacacccgcaaaacg

SEQ ID NO: 176868 - RNA, 73 nt, Homo sapiens
ggaaagacagacaaacacggaaccgcaccaaaaaggcaggaagacacaaggaggggcaccgaggaagaggacg

SEQ ID NO: 176869 - RNA, 69 nt, Homo sapiens
gcgccggcacgcgggaaaccacaccccccaggcaaagagcagaacgagaacaggaccgccccagccaca

SEQ ID NO: 176870 - RNA, 47 nt, Homo sapiens
aaccagcaccaacggccaaaagcgggagaacagagacccaccaagaa

SEQ ID NO: 176871 - RNA, 84 nt, Homo sapiens
aaggcaccccaagggacccggacaccaagaacaagcagaaagcacgaacaacgagaacaagacacgagcaaaccccaccgaggg

SEQ ID NO: 176872 - RNA, 68 nt, Homo sapiens
gagagcggaacgggagaaagcacgggaggagaggcaaaagggaaagcaaggggaagggcccaagaaga

SEQ ID NO: 176873 - RNA, 71 nt, Homo sapiens
cagccgggacaagacaggcacaaagggggaagcagaaagaagaggggcacacggcagccagggcaccacaa

SEQ ID NO: 176874 - RNA, 38 nt, Homo sapiens
ggcggagggcacaccagaggggaaaagacaggcaggga

SEQ ID NO: 176875 - RNA, 74 nt, Homo sapiens
cggccgggagcccgccgcgcggagcggcaggaccaaaggaaaccaccagaaaaaaggaaaagaggcaaaccaaa

SEQ ID NO: 176876 - RNA, 82 nt, Homo sapiens
cggagcgggagcccggccggagcgggcggagacgccgggcagccgaacggagggcgacggagggagacgcggagcaccgcca

SEQ ID NO: 176877 - RNA, 82 nt, Homo sapiens
ggcagcagcaccagcccaagagaagcaggccgggggagcccaccaggaacagcagcccagcagaccaggcccgagaagaacc

SEQ ID NO: 176878 - RNA, 72 nt, Homo sapiens
gaaaacagagaaccaagcggcaaagcaccgaacgggccgagaagaagcggggacggcaaaacagccaacgga

SEQ ID NO: 176879 - RNA, 71 nt, Homo sapiens
cgcgccggcaggggggagacgggccggaacacccggcgaaccagagacacgagaggcgagggacgacagag

SEQ ID NO: 176880 - RNA, 82 nt, Homo sapiens
cacgacgggcacacaaggccaagggccaaggcggcggggagacgagaagaaggagacggggccagggagaaaggaaggccag

SEQ ID NO: 176881 - RNA, 82 nt, Homo sapiens
gcagcaggcggggaggacgaggggcccgggcccagagcggaagacaagacggaaaagaaaagccaaccaagaccccaaaacg

SEQ ID NO: 176882 - RNA, 81 nt, Homo sapiens
gggaggcgggaaaaagaggccaaagacgacagaacggcagcggagaaaacaaccagccgccgaggccgcgagcaggcgcgc

SEQ ID NO: 176883 - RNA, 73 nt, Homo sapiens
gaagcaggggaaacggagccaaacgagaggggccagccaaggacagggaggcaagaaacaacagcgaccagag

SEQ ID NO: 176884 - RNA, 53 nt, Homo sapiens
ggaaccccggagaaaaggccaagaaggcaggcaacgcggaaaaaagccggggg

SEQ ID NO: 176885 - RNA, 78 nt, Homo sapiens
gaaggacggcaccggccgccggagagagcagccaaagggaagcaagccggaaacaagccaaaaacaacggaaacccag

SEQ ID NO: 176886 - RNA, 72 nt, Homo sapiens
cgcacgggaaggccgacaggcagacaaggggcacacaagcggggaacggcggacaccgcagcacaaccccca

SEQ ID NO: 176887 - RNA, 106 nt, Homo sapiens
agagaaaagcccacaccaaaagcccaggcccaggggaaacgacaccgccagcccaggaacgaccgaagcaggagcagagagcccaagaaaaacaggagaccagcag

SEQ ID NO: 176888 - RNA, 60 nt, Homo sapiens
gggaggaacggcccggaaacaggaggacggcccgaaggccacgagacaccggcgccccca

SEQ ID NO: 176889 - RNA, 80 nt, Homo sapiens
ggaccggggcaggaaaggaaccaggagagagcagccagaggacaggaggaagaggccaccaagagagaccaggagcagac

SEQ ID NO: 176890 - RNA, 76 nt, Homo sapiens
gcgagggaggacgccgggacaccggaagccgagaaagacggagcacggcccaggcggaggcaaggcgcgaccagcc

SEQ ID NO: 176891 - RNA, 73 nt, Homo sapiens
ggacgggcagggcagacacaccacagggcccccgaaacccggacaaagaagaccagacccccagagcccagga

SEQ ID NO: 176892 - RNA, 34 nt, Homo sapiens
cccgggaggagccaccagggaacaaaaccaaagg

SEQ ID NO: 176893 - RNA, 71 nt, Homo sapiens
ccaaaccggagggggaaaaaacccaaggcgcaaagggcacaccaaagggaaccaagaagggacccaaaaag

SEQ ID NO: 176894 - RNA, 94 nt, Homo sapiens
ggcaaacccggaggaaggaaggccgccacagggaccgcaggcaagggacacgacagacggcccgagcacacgcaagagaccacaggcagccccc

SEQ ID NO: 176895 - RNA, 83 nt, Homo sapiens
ggccccccccccacaaaggaaaggggaaaagccagcgaaagagacaaagcaggaggacacaagaagggaggaaaggcggaccc

SEQ ID NO: 176896 - RNA, 90 nt, Homo sapiens
ggcgggcgccgccagggaaccgcggccgcaagaagcagagccgcgcacggagcaggacaaggccaccggaggaggaagggaggacggcga

SEQ ID NO: 176897 - RNA, 78 nt, Homo sapiens
gcgcaaagggagcgggcccagcaccagaacagaagaggaacgacagcgccaccccccagaaggcgacaacagaaggca

SEQ ID NO: 176898 - RNA, 81 nt, Homo sapiens
ccgaccggcgggccccgggcacaccaacaagccacgaccggggagcaggccccgagccccggccccaaagacccaaaacag

SEQ ID NO: 176899 - RNA, 58 nt, Homo sapiens
cagacaagacggggaggcaagcccgggagaagcacgaaacgagaacgccagagcgcgg

SEQ ID NO: 176900 - RNA, 77 nt, Homo sapiens
accggcgcccaggaacagcaggcgagcaccacgccgaaaaacgggagaacgccaaaaaacaaacgcccgcaaacagg

SEQ ID NO: 176901 - RNA, 59 nt, Homo sapiens
ccgaacaagcccagcgaagcgggcacggggcggcaaagagcagaacgagaacaggaccg

SEQ ID NO: 176902 - RNA, 53 nt, Homo sapiens
caagaaggacggcaccgccggccaggaggagagcgcaccaccaaaaaggcaaa

SEQ ID NO: 176903 - RNA, 82 nt, Homo sapiens
cgcgccgcgacggccggccgcgccaccgcaccgccaccggcccgacccacgccggccgcccgcaggacaccgagggcccagc

SEQ ID NO: 176904 - RNA, 66 nt, Homo sapiens
gacggccaaaggcagacccaagaaaaggaaaacaagaaacaacgacaacccccaccccacaccgca

SEQ ID NO: 176905 - RNA, 76 nt, Homo sapiens
aaccagagcggagacacccaggaggcagaagccagaccagcggcgcacaggcgcagggacagaagcaggcccagca

SEQ ID NO: 176906 - RNA, 81 nt, Homo sapiens
gcgggagcgaagagggaaccagcgcgcggcagccgcgacggagggggaagacagagaagaccacacaaccgaaggggccgg

SEQ ID NO: 176907 - RNA, 75 nt, Homo sapiens
caaaggcaggggaggaagccacccgagcacaagagcaggacccaggcccagcaagaccccaccgacaacagcgaa

SEQ ID NO: 176908 - RNA, 77 nt, Homo sapiens
gacgcccggcggggcagggaaggacagcgcaggcccccgcccccgagcagccgaggaaccaaacaagacaaaggagg

SEQ ID NO: 176909 - RNA, 41 nt, Homo sapiens
agcgagaccagccggcaacagggcgggacacaggcagagcc

SEQ ID NO: 176910 - RNA, 64 nt, Homo sapiens
caggaggagcgcgcagaacgggagccgccaccgaggacggggaccgaccagcagacaggcgcag

SEQ ID NO: 176911 - RNA, 72 nt, Homo sapiens
gcggaaaagaagccgaaccaggcacacacagaagcgaaagaggcccggggcccggagcacacaaggcgaaag

SEQ ID NO: 176912 - RNA, 70 nt, Homo sapiens
aaggaccagagcgacgagaagagagagaagggagagagaccaaagacgagaggccccagcccgaggagga

SEQ ID NO: 176913 - RNA, 95 nt, Homo sapiens
cggcggcgaaggcacacgcggcagagagaagcggacagaacaaccgccagggaacagcaaaaaacgagagcagcaaagagcaagcccaaacccag

SEQ ID NO: 176914 - RNA, 79 nt, Homo sapiens
agcccacgaagagccaggcccaagggccgggcaaaacccccgagccaccagaaaagggaagcaggaagaccaagaagga

SEQ ID NO: 176915 - RNA, 79 nt, Homo sapiens
gacaagccgcaccacgccaaggaaagaggacgggcgccgaccgaaggacgcgcagcaacaacagccgagcagcaagcca

SEQ ID NO: 176916 - RNA, 76 nt, Homo sapiens
gacccaggggggaacagcagagacgcaacggaaaggcgcaggcagaaccaagaaaacacggccaaaacaggggaag

SEQ ID NO: 176917 - RNA, 96 nt, Homo sapiens
acaaaaaaacagagcccgcgcagcagaagacggagacaagagggcaacaacacggcaccacacaagcgaagaagccgagaaaccagccacgcagaa

SEQ ID NO: 176918 - RNA, 79 nt, Homo sapiens
aagagcggaggagcggcgaggcggcagaaccaagaaagaccaacagcaacagcaagggacgagccgagacacagaagcc

SEQ ID NO: 176919 - RNA, 84 nt, Homo sapiens
cagaggaccacagaaaggacaccaggcgaagaagaaaccgaacggcgccggggcagcgagaaagagcagaggagaaaaaagcac

SEQ ID NO: 176920 - RNA, 71 nt, Homo sapiens
ggagcacggcagagcccccgggcccaagccaaggagcccagagaaacaaacaagccgaacacaagccaacc

SEQ ID NO: 176921 - RNA, 84 nt, Homo sapiens
ccgcagggaaggagcaggcgcgagccgagcgacggcgcggcggagacgccggcgcccccccccccgccgaaggagaggacagcc

SEQ ID NO: 176922 - RNA, 52 nt, Homo sapiens
cagaaagagagaccggggaccgccagaagcagcgcgacggagagccaagccc

SEQ ID NO: 176923 - RNA, 84 nt, Homo sapiens
gacaagagcgcggaacaggacgccccgacagcacccgcggccgccccgacaagcgggagggaccgccgggacccagggaagcgg

SEQ ID NO: 176924 - RNA, 66 nt, Homo sapiens
ccccaccacccccaacgaaagaaaaagcggggaaggggggcaaaaaaaagaagcaagcgaagcacc

SEQ ID NO: 176925 - RNA, 43 nt, Homo sapiens
ggaaagccaaaacacgacagggaaagaccaggagcaggccaag

SEQ ID NO: 176926 - RNA, 65 nt, Homo sapiens
gccaacacaggaaaggggccaggaccagcaggaccaaggccgagcccagccacggggcccgcccg

SEQ ID NO: 176927 - RNA, 69 nt, Homo sapiens
gagcacccgacccacaggccagagagggaaaagcacagggccaggaagcagagggacagccaggccaga

SEQ ID NO: 176928 - RNA, 83 nt, Homo sapiens
ccgcagccgggcccgcgccggcaggccggcccggggcgagccccagccgagagcggcccaggaggaacaaccagcccacccgg

SEQ ID NO: 176929 - RNA, 83 nt, Homo sapiens
gccgcccgccccgcgcgcggccggcggcccaggcgcacaccgcgaggggggcgggccgagcacccgcaggccccgcagaggcg

SEQ ID NO: 176930 - RNA, 76 nt, Homo sapiens
agcagcccgccccgccgggggagacgacccccgccagccgcggcgagccgcacagggcaacacacgcaccgcacgg

SEQ ID NO: 176931 - RNA, 56 nt, Homo sapiens
agaccccggaaacacccaccaccgaaccagggagacacagggggaacgagaggccg

SEQ ID NO: 176932 - RNA, 78 nt, Homo sapiens
gccgagcaacaccccggccaccgacccacaaggggccagcacgaaagcagccaggagaagagcacaagaaacaagagc

SEQ ID NO: 176933 - RNA, 91 nt, Homo sapiens
gccgccccgcgggggagggcggagcggcgcggccccagcccccgggggggcccgagacacaagacacccaagaagcccagcagacccaacg

SEQ ID NO: 176934 - RNA, 71 nt, Homo sapiens
acaaggaaaaggacaggcacccccccaaacagccccgggccagcagaaaagagaagagacccacgcaacga

SEQ ID NO: 176935 - RNA, 73 nt, Homo sapiens
acgaggagaaggagaccaaaccggaaaccgccaaaaccccccacacaccccgccggagcggagccgcggagcc

SEQ ID NO: 176936 - RNA, 74 nt, Homo sapiens
aaggagagaaaggaggaacagaccagcacgagggagaccaaaagggagggaaaaaagcagccaggcccaaaccg

SEQ ID NO: 176937 - RNA, 86 nt, Homo sapiens
gacaggaggcagagccaaacacccaggcaaaagaagcaggcaggccacaagccggccggacgccccggagggagaccagagggcgc

SEQ ID NO: 176938 - RNA, 73 nt, Homo sapiens
ggcccccagacagcgcaccgacgcagcgagagacaggcggcggagaggcgcggccacacacgggaggcacccg

SEQ ID NO: 176939 - RNA, 75 nt, Homo sapiens
cacaggggcccagaaacacaggcgaaaagcagacgaccaaacaggcacgagaaagacccgcagggaagcagaaca

SEQ ID NO: 176940 - RNA, 78 nt, Homo sapiens
ggcccagagacagcgaaacacgaaggaacccagcagaagccagccgccacgccgagccagccagcaccaaccaacgcc

SEQ ID NO: 176941 - RNA, 77 nt, Homo sapiens
cacaccagaaaacgaaaggcgggcaacgaacgcacacccaacaggacgacaggccagcccacagggccaccggggcc

SEQ ID NO: 176942 - RNA, 78 nt, Homo sapiens
gccagccgcggccggaggagcccccaggccggaaccaagaccaggacaaagaagacccggagagacaagccggaggac

SEQ ID NO: 176943 - RNA, 76 nt, Homo sapiens
acccgccgccgccgggcggagccaaggccagagaggaggagcggccaaccgagcacagagaaaccagcacaagggg

SEQ ID NO: 176944 - RNA, 121 nt, Homo sapiens
ggcaggaacaaagcagcagccggcagaggagcggagcccagcggacgccaaagcgagaggcccgacccaggcaagcgagcaggcgagcaggagcccacagccgagcagcggcccagagcag

SEQ ID NO: 176945 - RNA, 78 nt, Homo sapiens
agaagaccaaaacgccaggaaaggaccccagaggcaccgaaacagcggaccggagccacccaccaggaagggaagaac

SEQ ID NO: 176946 - RNA, 76 nt, Homo sapiens
gacccacagccaccgaggagagagacggggccacaggggccacgcgaccaaacccgagccaaggaccagccgccca

SEQ ID NO: 176947 - RNA, 37 nt, Homo sapiens
cacgcggaacaaacgaaccccagcagggggaggggag

SEQ ID NO: 176948 - RNA, 80 nt, Homo sapiens
gcaaggaaaagacccggaaagaagagacacagaggagccacacccccagaaaggaaacgacacaggaagaaagcggagaa

SEQ ID NO: 176949 - RNA, 75 nt, Homo sapiens
cagccgcgccgccgccgcaggaggccagccggcaagaggaggggcccccggaaccccggacacacccccagcacc

SEQ ID NO: 176950 - RNA, 72 nt, Homo sapiens
ggaagacccaacgaaaggggcgacaccagggccgcagagcacccagccaaacccaggcccgagaagaagagg

SEQ ID NO: 176951 - RNA, 75 nt, Homo sapiens
gccgccgagcagccgccagccccacggacggacgccagccccacaacagaccaggggcgggggcagcaaaggcgg

SEQ ID NO: 176952 - RNA, 40 nt, Homo sapiens
aaccagaccgcggccagagcgcagacagaaggacagagaa

SEQ ID NO: 176953 - RNA, 66 nt, Homo sapiens
aacacggaacaaaggcgcgaggacggcgagacagagaccagccccaggccccagcgcgagagacac

SEQ ID NO: 176954 - RNA, 63 nt, Homo sapiens
aaaccgcgaacagcagcacgccgaaaaccgcccacgcagcaggggaaaccagcaggggagcag

SEQ ID NO: 176955 - RNA, 78 nt, Homo sapiens
aagaggcaccaacagaacaacacaaaggcagaaaagaagcccagaagcaaggaggggcccccccacagagaacaacag

SEQ ID NO: 176956 - RNA, 73 nt, Homo sapiens
gaaaaacacgaaaaccacagacgagccagcgaggggggccggggcaaagaccggcaagacggaagggcgacac

SEQ ID NO: 176957 - RNA, 81 nt, Homo sapiens
gcggaagccgcggcggacagacccccgaaggccggcggccagcgagcgacggcaggaaaaggcgaaagaaggaaccaaacg

SEQ ID NO: 176958 - RNA, 39 nt, Homo sapiens
caccgcaaccccgcccccagggccgaaccagcacgggag

SEQ ID NO: 176959 - RNA, 86 nt, Homo sapiens
aggagggggaacgggcggagagacagggagaggggcgaaccggccccccacagccacgcagcgaacaccagcagaaagaggcacag

SEQ ID NO: 176960 - RNA, 76 nt, Homo sapiens
gaccagcagacaccagaaccaaaggacgcagacacaccaaggaaagcaagaagccggacagggagcaagccaaagg

SEQ ID NO: 176961 - RNA, 86 nt, Homo sapiens
agacacggaccgagccgcgaggacacgggcgcaaccgcagcacacagcgaccgggagaacaagacgggcaaagagcagacccagaa

SEQ ID NO: 176962 - RNA, 75 nt, Homo sapiens
cccaaggcaacagaaggaaaacagcaggaaacccaagggacagagacggcagaaggagaaacgcagacaccggaa

SEQ ID NO: 176963 - RNA, 92 nt, Homo sapiens
cgggacgcgagcggcgagccggagcgcggagcccggccccgcaccaggaggaggacgacagcacggggaagacccagacacacaccggagaa

SEQ ID NO: 176964 - RNA, 74 nt, Homo sapiens
gaaaacaccagaggaccgaagaagccacgccggaaccggaaacacaccagaggcgcagcagcgccacagcacaa

SEQ ID NO: 176965 - RNA, 66 nt, Homo sapiens
ccccccgaaccccaaggccaaccgcgagaagagacccagacggacagcggcaaaggaagaagagac

SEQ ID NO: 176966 - RNA, 78 nt, Homo sapiens
gcgagcgagggggggcgcgccggaaaccggagcgcgcagcaggggaagccaggaaacagaacccacagagcagagggc

SEQ ID NO: 176967 - RNA, 57 nt, Homo sapiens
caagcggagcccaacgaaaccgaacagagccaaagggaccgggacaggggaagaaaa

SEQ ID NO: 176968 - RNA, 75 nt, Homo sapiens
caaaccagacgcacaggaacccaacaggaggaggcccaaggagccggggacagggaaggcaagagccgggaagaa

SEQ ID NO: 176969 - RNA, 53 nt, Homo sapiens
aagaaagaacgcacagccacgcacacaggcaagcccaaagagcacagaaaaca

SEQ ID NO: 176970 - RNA, 84 nt, Homo sapiens
aggcccggaaaggaccgccaccccccgcgcggcgggggacgcggaaccagcggagaaacgcgagagggacgcacagccaggcca

SEQ ID NO: 176971 - RNA, 82 nt, Homo sapiens
ggagccaccccgggcgcagaggccacacccacagagaacccagacaacaggacgccgccaagccccgggcaaggggagcaga

SEQ ID NO: 176972 - RNA, 70 nt, Homo sapiens
ggaccacgaggcaacgccccagaacagaagcagagacagaagcccaagccagaagcggcaacccgacagg

SEQ ID NO: 176973 - RNA, 81 nt, Homo sapiens
cggggaccgcggagaccgccaccaggcccggcaaacacgggggagaggcggcgaaggaccggcgcccaccgggggaacggg

SEQ ID NO: 176974 - RNA, 79 nt, Homo sapiens
acgagcacggcacacccgccagaagacccaccaagcaaacagcgaacggcgggggaagaggaagaaaagcggaacaaga

SEQ ID NO: 176975 - RNA, 73 nt, Homo sapiens
aagcacacagacccaaggccaagaaccccacaggccgaggagcagggaacggaaacacaaagcggaagaacac

SEQ ID NO: 176976 - RNA, 77 nt, Homo sapiens
agcgaaaggaaagagcgaaaccagaagcgaaaaagaacaccaagggagaaggaagaaaccaaacgaaacacaacgac

SEQ ID NO: 176977 - RNA, 71 nt, Homo sapiens
cgggagggacagggggagaaacacccgaacgaaggaggcgaaggagcacgcaagcagggaaaagggcagga

SEQ ID NO: 176978 - RNA, 82 nt, Homo sapiens
gccaccgcgccaccccgcgagacacgagaggcgagggacgacagagcaagcggcagagggcaagcgggaaaaagaccaggca

SEQ ID NO: 176979 - RNA, 83 nt, Homo sapiens
aggcccagccggcccgcgggggagccccgggagccgcacggaggcagcacggcaggagacgaggagaggacagcaggacaccc

SEQ ID NO: 176980 - RNA, 39 nt, Homo sapiens
aggcccagggcccaggcagggaggcacagggccaggcac

SEQ ID NO: 176981 - RNA, 77 nt, Homo sapiens
agcagcgccccgcacccagggggagacgcagcggcaccacaagacaacaggcacaaagagagaaggaacacccacag

SEQ ID NO: 176982 - RNA, 85 nt, Homo sapiens
gcggcgaccgaagaggaggaggaggaagcgcgccagccgcagacgcaggcggccgaggaccccgaggcccgccgcccgcgggccc

SEQ ID NO: 176983 - RNA, 76 nt, Homo sapiens
cggccacggcgccagagccggggacgaaagggaaggacaggcagagcaaacaagccacacccagggagcacagaga

SEQ ID NO: 176984 - RNA, 78 nt, Homo sapiens
cacaggacggggagacagcagcaggaacacagaagcggacccagaagaggagagcaagaagagcaaccacaagaagaa

SEQ ID NO: 176985 - RNA, 74 nt, Homo sapiens
ggcgcagaccaggcccgggccaccacccaccaaggagagagagcggagacaaggccacagcaggccacggcggg

SEQ ID NO: 176986 - RNA, 69 nt, Homo sapiens
aaacacaaccccacagggccagcggagaaaagaagcagcccacgaaccccgacaacagagcagaagccg

SEQ ID NO: 176987 - RNA, 86 nt, Homo sapiens
ggcggcggcgacagccaggcccggaagcgagggcggccgcgccggcccagagcaacagcgagccgccaccgccaagagcaggccca

SEQ ID NO: 176988 - RNA, 73 nt, Homo sapiens
agcagccccagacagccggcgcggcgggcgggcggcggcggcgcgggcccacagcgacgaacacacacaccag

SEQ ID NO: 176989 - RNA, 74 nt, Homo sapiens
cagacaagacaagacaaaagacaaaaacacccgggaaaggcgaagaagaaccaccagcagaacaagcagaacag

SEQ ID NO: 176990 - RNA, 84 nt, Homo sapiens
agcaggagcgaccgcgccaaacaggacaggcagaaaggccagggaagggacaaccaccaggagacgcaaagaagagaggccagc

SEQ ID NO: 176991 - RNA, 73 nt, Homo sapiens
ccagcggccacgcggcgcggggaaacaggcaccgaccccgggggacggacacagggagggccaagaacccggg

SEQ ID NO: 176992 - RNA, 85 nt, Homo sapiens
gcggagcggccaacaggcggaacgcaggagacacaagaagcggaccaggaagcgccgcaagagaggagggccaagcaaacgaaga

SEQ ID NO: 176993 - RNA, 75 nt, Homo sapiens
gccccggaccagcccggacgggggacgaacgagcggaccccaacaagcgcaacaagccaaccaaaggaagacgag

SEQ ID NO: 176994 - RNA, 73 nt, Homo sapiens
ccgggaaggggagccaccagcccccggacaccagaggaccagaacccacgagaaacagacgagccaaccagac

SEQ ID NO: 176995 - RNA, 77 nt, Homo sapiens
cggggggaggccacaggcgcaagcaggaagagagacccagaaacagccgggaagagacgcagaacagaaaagaagcg

SEQ ID NO: 176996 - RNA, 71 nt, Homo sapiens
aacaaaccgacgcaacggaggaaagagcaaggcaaggcgagacagaacaacccccagccacaagcgaagca

SEQ ID NO: 176997 - RNA, 77 nt, Homo sapiens
agccccagagccccaagggaaaacggaggaaacaaagaccaaagaaaaacaaaaagaaaagacaagaaacaacaggg

SEQ ID NO: 176998 - RNA, 78 nt, Homo sapiens
cgaggagccgcgccgccgggacacaccaggagaacaagcccacgcaccgaaggaagacccacaagagaccacgcagag

SEQ ID NO: 176999 - RNA, 70 nt, Homo sapiens
gcccggagagcgggacacagacccaaggcccaagaacacgaccagaagcgggacaagggggcaacggaca

SEQ ID NO: 177000 - RNA, 70 nt, Homo sapiens
caagaaagcaagacgaaacaaaacaagggacgaacagcaaggacaggccaagaagggcacggcagaacga

SEQ ID NO: 177001 - RNA, 70 nt, Homo sapiens
gggccggaagggcaaaacacaaggcaagggacgaaaggccagccgcagcggaagagccagcacacggcag

SEQ ID NO: 177002 - RNA, 77 nt, Homo sapiens
gcccagggaagccgggaacggggcagcggcccagggccaaggggacagaaccccccaggcgccccgccgccgcacag

SEQ ID NO: 177003 - RNA, 52 nt, Homo sapiens
cccaaccggggaggaaaaccgacgaagaaagccaagacgaacgaccaaacaa

SEQ ID NO: 177004 - RNA, 69 nt, Homo sapiens
gccgagcgaacgcgcaacagggccgcacgcaaggagaagacagaggagccagaccaagagacagcacag

SEQ ID NO: 177005 - RNA, 80 nt, Homo sapiens
caggaagagacacgcgacggcaaccccaagcgacccggcccacggacaacacgcacccagaaagcacccggagaacagcc

SEQ ID NO: 177006 - RNA, 80 nt, Homo sapiens
aacagcagaggccgagaaacagagagaaaagagacggagcaagagaacgcaagagacgagagagcacccaggcaaaagca

SEQ ID NO: 177007 - RNA, 76 nt, Homo sapiens
gggaggaccaaagacgagaaccgggagaacagagacccaccaagaaaccagaacccggacaagggaagggcccgag

SEQ ID NO: 177008 - RNA, 68 nt, Homo sapiens
gggaggccagaggaaggggaagcagagccccgggccgggaaggggaaacggccacgcaggaaccacaa

SEQ ID NO: 177009 - RNA, 86 nt, Homo sapiens
agcagacgcgggaggcgcgcgccccgcacagcacagaggggcagccggagagccgggaaaggacccaaagacaggaccacgcacca

SEQ ID NO: 177010 - RNA, 37 nt, Homo sapiens
gcgggccagcacggcccgagccgcggaacacccacag

SEQ ID NO: 177011 - RNA, 83 nt, Homo sapiens
gccgaccgcaggagaagcccccagaaccaggcccccaaccagccacgcggaggcaaggggcaaccaaaagccagaccaaaagg

SEQ ID NO: 177012 - RNA, 56 nt, Homo sapiens
ggcaccccgagccggacccaggacccagaagaaccacgcgcaggccagagcagccc

SEQ ID NO: 177013 - RNA, 65 nt, Homo sapiens
cagcgcagcccaggaggcagcaccaaggacggagcaaacccagacaagaagacccacccacccca

SEQ ID NO: 177014 - RNA, 81 nt, Homo sapiens
cagccggaagggcggggggcgggccggaggggagacgggaggcagagcagagaagggaagaggccagcacgccgggcagga

SEQ ID NO: 177015 - RNA, 76 nt, Homo sapiens
cccccacagcccaccaagcccagccacccaagaagggaggagaagacagccaggcaggcaaggaacccaacaaaaa

SEQ ID NO: 177016 - RNA, 71 nt, Homo sapiens
gagcccaccacgcaccgcccaagaaaaggggcggaaagaaacaagaaagacgcaccgaggcagcaacaaca

SEQ ID NO: 177017 - RNA, 79 nt, Homo sapiens
cgccggagagacgagagcgagcgacccagcccgcgagcgaggaaacagaccccgacaaaaagcagaagacagcgaaacg

SEQ ID NO: 177018 - RNA, 71 nt, Homo sapiens
gaggacagggaaaggagcggggagccccgcgccacaggcagcagcagaaaccgcgccccagaccaagaaac

SEQ ID NO: 177019 - RNA, 83 nt, Homo sapiens
aaacagggccggccgcagagcccaccggaaggagaaggaagaggagcgaacagaccggccccccaaacacccgagcccagccc

SEQ ID NO: 177020 - RNA, 76 nt, Homo sapiens
ccaacagcagcggcagccaagggcgaagaagagcagagcagccgaagcggggacgacacgaggccacgagcccgga

SEQ ID NO: 177021 - RNA, 75 nt, Homo sapiens
acggccacccacgccggaggccggggagccgacgccggacagaagacaggagccgacgcagagcagggccggcaa

SEQ ID NO: 177022 - RNA, 68 nt, Homo sapiens
gagcaaccacaaggggggcaaaggcagcggcaagccagggacaacacacgggagagcacaaaccgaac

SEQ ID NO: 177023 - RNA, 78 nt, Homo sapiens
cgaggcggcggcgccgccgcgccacccgcccggcccccgccggcggcagcacggccaagaaaaaggaagcccaccacc

SEQ ID NO: 177024 - RNA, 53 nt, Homo sapiens
ccaccacgcagcccagaccgccaccaggacacagagagggcgacggaagcagg

SEQ ID NO: 177025 - RNA, 71 nt, Homo sapiens
cacacagcccacccgggcggcgaccagggacgcccccaggcccgcccaggcgggaggggcgaacggggaag

SEQ ID NO: 177026 - RNA, 57 nt, Homo sapiens
ggcgggccgcgggaggacaccacccacagagcggggcccggcgcacccaccaccgcc

SEQ ID NO: 177027 - RNA, 81 nt, Homo sapiens
acagacgagaagagaagggagcaccaggagacgccagaaacccgaagcgacagcgccgcgaagcaccaggcgccggaagac

SEQ ID NO: 177028 - RNA, 69 nt, Homo sapiens
ccacaccaagagacccaagaggacgaaacagacagggaggccgcacagaggaggagcaccaaaccgagg

SEQ ID NO: 177029 - RNA, 73 nt, Homo sapiens
aagcagcggacacccccgccagaaaggaaaagggaacagcggcaagaacgaaccaagccagcaccaagacaca

SEQ ID NO: 177030 - RNA, 75 nt, Homo sapiens
cccaccaagcggcccccggccccgcccacagacgcccagccggaaaaccgacgcccccgcaagcagcaccagcgg

SEQ ID NO: 177031 - RNA, 71 nt, Homo sapiens
caccaggggcaaaaggcaaaggggagagaaggggaagcacaacgggcaccgagaccaacaaacgagacacg

SEQ ID NO: 177032 - RNA, 71 nt, Homo sapiens
ggcggcagcgaagaagacgaaaaaaacccaggacagggacaagcgcacagcggagaaagcagcgcggccag

SEQ ID NO: 177033 - RNA, 78 nt, Homo sapiens
ccagccagagagagaagcacagaaagagaaacagacccggaagaggacgaagaaagggagagagacccagaaaaacaa

SEQ ID NO: 177034 - RNA, 52 nt, Homo sapiens
aaagaggaagcccaccacaaaaacgaaggcggcggagacagaaagagaaaag

SEQ ID NO: 177035 - RNA, 73 nt, Homo sapiens
gagccaggcgagcagaggccgcgagcgacgcggcgccgagccggggcgaggccaccaacggacagcagaacga

SEQ ID NO: 177036 - RNA, 87 nt, Homo sapiens
gccccggccccaggcagggccggccagggcacagcgacccagaaaggagaaggcagagcccccccaggcagaagcccgagcgggaac

SEQ ID NO: 177037 - RNA, 66 nt, Homo sapiens
ccgcccgggccagcggccgcgcacccccggccggaggcaccagccagccacccacgcacccgcggc

SEQ ID NO: 177038 - RNA, 85 nt, Homo sapiens
cacgcgagggggcgcgaggggaacggaggccagagcgcgggcaagaaggaacagacaaaaacggccggaaggaaacacaggacac

SEQ ID NO: 177039 - RNA, 77 nt, Homo sapiens
agaaacaagggagacagccgcccggccaagcacccgcagcagaacagccagcaaagacaagagcagaccagcagccg

SEQ ID NO: 177040 - RNA, 62 nt, Homo sapiens
agggaccgcccgccgcggcgcccggaggccagaccggcccgggccgggccaggaggacacgc

SEQ ID NO: 177041 - RNA, 55 nt, Homo sapiens
ggggagagggaacaagggaaaggaagcagacaccaagccaaaaagcagagcaacc

SEQ ID NO: 177042 - RNA, 71 nt, Homo sapiens
gcccccggccaccacgcccggccgaaggcgggggaggagacccacccaaacaaaaggggagcaagaagaaa

SEQ ID NO: 177043 - RNA, 81 nt, Homo sapiens
ccaaggcggggagagaggaggagaggagaaacagccccaagaagaagaaggcaggcccacgggagccgagacccccgaggg

SEQ ID NO: 177044 - RNA, 71 nt, Homo sapiens
gcccggcgacacgcacccacccggcgcgcgcgcccccagccccaagaaagacaacggcaagcggagaagag

SEQ ID NO: 177045 - RNA, 80 nt, Homo sapiens
ccaaaagaagaggcacaggcccaggcagaccgcagcaaaagcacaacaaacaacggagaagcagaaaaggacggccaccg

SEQ ID NO: 177046 - RNA, 82 nt, Homo sapiens
gcccccaaagagcgggaaagccggaggcaggggcccaaaaccaaggaagagggaagacagagcaccaaacacagacccgcgg

SEQ ID NO: 177047 - RNA, 79 nt, Homo sapiens
caaaccggagcaacagaagagcagagggaccaccccagaacccgcccacaccgcggacagagcaaacagcaacaaggag

SEQ ID NO: 177048 - RNA, 65 nt, Homo sapiens
agaaagcagggccaggcagcgcgaagaaagagaccaacaagcgagcacgaagcaccaagagaaaa

SEQ ID NO: 177049 - RNA, 79 nt, Homo sapiens
agaccgcaaaggaggcgaaccgggcgaaggaccagcgggaccagccccgccccacaccgggaagagagaagacagcagc

SEQ ID NO: 177050 - RNA, 79 nt, Homo sapiens
accgcacgcgggcgcgagaacggccgcccgccgcagcggagaaccaagccgccacagggagaaaagagcagaggccgac

SEQ ID NO: 177051 - RNA, 79 nt, Homo sapiens
gcgacaacacaccaacggcgaggaggcgagagcaaggaaacccgagacaacaaacaagcaggggggaaccaaccaagaa

SEQ ID NO: 177052 - RNA, 58 nt, Homo sapiens
gcgccacggcgacgccccagcccgcccaaagaaagaaggagaaaaccagaaggcaccg

SEQ ID NO: 177053 - RNA, 80 nt, Homo sapiens
ggggccggccgccgcgggaccgaggaaaagccgcaccagggcccggccaggccccaccgccacaagcaggggaacaccgc

SEQ ID NO: 177054 - RNA, 77 nt, Homo sapiens
cgccaaaaccgggacggacaagacccgggaaggaggcgacaggaacagcagcaggggagcaccgagcaggagcacag

SEQ ID NO: 177055 - RNA, 78 nt, Homo sapiens
gccgcccggcgccggccgcggcgcaggaggagccggagagcagccaaggggaagaaagcaggacccaaggggccggca

SEQ ID NO: 177056 - RNA, 81 nt, Homo sapiens
gggaccgcagagagaggcgcagaaggaccgggagcacagccgccgacggaggcacccaccacgggccaggcgggccagagg

SEQ ID NO: 177057 - RNA, 76 nt, Homo sapiens
cgcggagcggaagacggcaacccagggaggcaccgccccaacccccccccgcccggagaaccccgcggaacgagca

SEQ ID NO: 177058 - RNA, 77 nt, Homo sapiens
ccacagccacgccgccgcgccgcggagcggcgccgacaacgaaggaagagccaggaaagcaaaagggcacccgcccc

SEQ ID NO: 177059 - RNA, 82 nt, Homo sapiens
aagaagaaacgggccgcgaaccgcagacagcggccaagaagacacaaaggacggaggcacgggacgcacaccgagacgaaca

SEQ ID NO: 177060 - RNA, 72 nt, Homo sapiens
gcagcccggagaagggagaaccaggccagccagaccaaggacagccaaggaagccaagaccaggaggggacg

SEQ ID NO: 177061 - RNA, 70 nt, Homo sapiens
gagaaaacagacagagcagaagaaaccaagacggcagagacaacgagaagacgacccggccggaggcacc

SEQ ID NO: 177062 - RNA, 89 nt, Homo sapiens
ggaaaggaagaggagacagagggccgagaaggacaggacagacaacaggcacaaagagagaaggaacacccacagggcagacagagaaa

SEQ ID NO: 177063 - RNA, 81 nt, Homo sapiens
ccgcccccagggagggagccgcagccgagaccgccagagcggaacgaccccagagcgagcccgcagcagcccagaaacaaa

SEQ ID NO: 177064 - RNA, 114 nt, Homo sapiens
cggagacggccagacaggaacaagacccggacaccaggccacagccgggaagcagagggagaaagaccagagccacgcacacagaaacagcgagacggaggggacacccaaggc

SEQ ID NO: 177065 - RNA, 78 nt, Homo sapiens
aaggcaggaaagccagccggcgagagcagaaggggagcggcgagcgcggaggcacacaggaaacaccagagagacacg

SEQ ID NO: 177066 - RNA, 73 nt, Homo sapiens
aagaagaagacagaacgcccccaccaccgcaaacagacaagccccagagagagcccgggagcacgggagagaa

SEQ ID NO: 177067 - RNA, 68 nt, Homo sapiens
ggggccacggaagcaccagcgcacacaacggccgaccgaggcaacacggacagccgagggggcgaacc

SEQ ID NO: 177068 - RNA, 66 nt, Homo sapiens
caggcaaacgggccaggcaggcggaagggcacagaggacacagagaggagccaagcccaacgggac

SEQ ID NO: 177069 - RNA, 82 nt, Homo sapiens
ccgccgccgcgagcccccgcggcagaagggaagccggcccggcccgggaggaagaggcgcgcgaacgaggagccaccgcacc

SEQ ID NO: 177070 - RNA, 57 nt, Homo sapiens
cgcgccgccacccccgacacgaaagcagacccaacaccggggaaagaacagaccaga

SEQ ID NO: 177071 - RNA, 60 nt, Homo sapiens
aaagccagaccgccaggcgaaggggaacacccaggccccgggagccgacaaggacaaacc

SEQ ID NO: 177072 - RNA, 80 nt, Homo sapiens
caggaggaccgggcacacggaccagccaggcggcggcaccagacaacagagacaggccccgaccgagggaagaaagccag

SEQ ID NO: 177073 - RNA, 71 nt, Homo sapiens
gggggagaaccgggcagaggcggagcgcccgggccacgaggacgcaccagggcaagcgcgcaggaagaggc

SEQ ID NO: 177074 - RNA, 77 nt, Homo sapiens
cagaagaagcgagggagccggcagcagagcaaaacagagcggaacgaacaaggggaaggcagcaagaaacagaccga

SEQ ID NO: 177075 - RNA, 78 nt, Homo sapiens
cgggaggcgggccagcgacaaaaagagccccgcaggcgccagagaggaagaagggacgcgccgacaaaccaagcaaga

SEQ ID NO: 177076 - RNA, 40 nt, Homo sapiens
aaacagcggcgaccagcaggagaaaaccggaagagaaagg

SEQ ID NO: 177077 - RNA, 119 nt, Homo sapiens
gaacccggggagggcccaccgcaagaccgagccgccgagcgacaacccgcgccccgaggaccaaggagaacagaagcgcgccaggcgccagcaagaaggcagggaggaacgccacaaag

SEQ ID NO: 177078 - RNA, 82 nt, Homo sapiens
accgaaccaggaccaggccccaagcccgaggcccagaggaggagggcccgcggcaccggagcccggacgagggagcccgggg

SEQ ID NO: 177079 - RNA, 81 nt, Homo sapiens
caggccgcagggaggccacacaaccggcgccgggaaccgccgagccaccagaaaaccggaacagaacggcaagcgaacaaa

SEQ ID NO: 177080 - RNA, 82 nt, Homo sapiens
agggcccacggggaagcgagagaggaggagcagacgaagaaagagaagcagaacgaagaaggaaaaagcaacacaaagacac

SEQ ID NO: 177081 - RNA, 90 nt, Homo sapiens
gaaccggagaccccgaaaacggaagcgcagggagaaggaagaggggaaaagggcaccagggcaggggacggaggccaaacacgcagaggc

SEQ ID NO: 177082 - RNA, 94 nt, Homo sapiens
ggcagaggaccggaggccgggaagccaacgaccacacgcacagggagagcaacaagccccggccccagagccagccggagagcgcagcccagag

SEQ ID NO: 177083 - RNA, 61 nt, Homo sapiens
cagcggagaaggagaagggagaagaaacagcagccgcagggcaaagaagacgagaccaacg

SEQ ID NO: 177084 - RNA, 54 nt, Homo sapiens
caaggggcagcagacccaccggaaagggaagggaaccggcagcgaacgaggaag

SEQ ID NO: 177085 - RNA, 76 nt, Homo sapiens
gacaagagaaagaaaaacaagaacgaggaacacgaacaggaacccgcaggcccaacggccagcccccaggaaagag

SEQ ID NO: 177086 - RNA, 62 nt, Homo sapiens
ccgcccgccgagcagccagagcgccaaggggccaagggagagcggggccccccccaaggcac

SEQ ID NO: 177087 - RNA, 83 nt, Homo sapiens
ggaagaacaggaaccagcagcaaagaaggcacggaaagagagccaggacccccagcacagccagcagcggaacagcgaaccag

SEQ ID NO: 177088 - RNA, 78 nt, Homo sapiens
agcagaccacccggacaccacggaccaaaaagacccgaccagagagaaaacgccggcacagagcaagaaagaaagcca

SEQ ID NO: 177089 - RNA, 52 nt, Homo sapiens
agagcgccccacgagagaacggcacacgcgagcggagaccgaggacaggccg

SEQ ID NO: 177090 - RNA, 75 nt, Homo sapiens
gggcagggccggggaagcaccaaaggccggaggcaccacaacacgcagaaaaccaggcccagcacagaaacacac

SEQ ID NO: 177091 - RNA, 60 nt, Homo sapiens
gcggacaggaaccggacagcacaccagggccgggacacacgagaaagaccacagcaagac

SEQ ID NO: 177092 - RNA, 111 nt, Homo sapiens
agcaccggcaacaaagagccgcaggaccacgaaaaacaagcagcccaacaacacagaaaagaggcacagagagaagaaggacagcgcagaaaaaagagacccaaaacagag

SEQ ID NO: 177093 - RNA, 86 nt, Homo sapiens
aagagcggaccagggcgcgccagcaccgccaccagagcgcccgcgcgggaccccaggagagccggagaggaggaaggagaagcccg

SEQ ID NO: 177094 - RNA, 75 nt, Homo sapiens
aaaagccaacagagcagcagcacgggcagcagacccgaagaacgaccagcggcagacgacaacgacgggggacag

SEQ ID NO: 177095 - RNA, 57 nt, Homo sapiens
acccgggacccacccacagggacccagccagaaggagcccgcagggccgccaccagc

SEQ ID NO: 177096 - RNA, 69 nt, Homo sapiens
cccaacgccaaaaaccaaagggcaaaacccacacaccacagggaggaaacaaggccaaggacaacaaag

SEQ ID NO: 177097 - RNA, 108 nt, Homo sapiens
acgcaccgcccccacccccacaccccgcgcccgcaacccagaccaagggcacaaggaggacgaagcgggggcccagcgcaagggccacacggggagcgcgcaagaacg

SEQ ID NO: 177098 - RNA, 83 nt, Homo sapiens
cagcagccacacacaaagggaaaacacagccaccacacacaagggggccgggaccaacgcaacagagaacagagcccggcgaa

SEQ ID NO: 177099 - RNA, 63 nt, Homo sapiens
cagcgcacacagcaagcacgagcgagaggcccggccagagaccgccgggggagcaaggcgacc

SEQ ID NO: 177100 - RNA, 70 nt, Homo sapiens
ggagcgcgcggccgagcgcaagagggcacgacacgccggaaggcaaggccccagcccaagcgggccgacg

SEQ ID NO: 177101 - RNA, 82 nt, Homo sapiens
ggcgcgggcggagcggaaagaggaggagaggggaggaggcgaagcccagccccaaaaggcaaaaaggaccacggaccccgcc

SEQ ID NO: 177102 - RNA, 76 nt, Homo sapiens
agcagagcaaaaacccaaaccccccaccagcgccaagagcgccagaggaagaaaaaagcccaccgcccagaggccc

SEQ ID NO: 177103 - RNA, 80 nt, Homo sapiens
agagaccccagacgccaccacaacccccagacgcaagccaagaagcccaccagaggcgaggggaggaggaagcgagcgaa

SEQ ID NO: 177104 - RNA, 79 nt, Homo sapiens
aaaaccacgccccggaccaagcccgggagcaaggaaacgaaaagagacagcagggcaaaacgggccacacacagggcaa

SEQ ID NO: 177105 - RNA, 68 nt, Homo sapiens
gcccacccagggccggaaaagccaacgccggcgaagaaacacaggggaaacacgagagagcaacagcc

SEQ ID NO: 177106 - RNA, 68 nt, Homo sapiens
aagagaaggaggaggccaagacaacggccaaagccaccgccccgcgccgccccccggccaccgcacag

SEQ ID NO: 177107 - RNA, 77 nt, Homo sapiens
gaagagagagcagccgaacacacggaaaacaaaacaagcacgacagggaagacccagaaaagaaacacaaaacaagc

SEQ ID NO: 177108 - RNA, 76 nt, Homo sapiens
acccgcagcagaccgccagcgagcaacggcagagggacagagcccggccaggacaaaaagaacagaaacgcaacgg

SEQ ID NO: 177109 - RNA, 67 nt, Homo sapiens
aacagccagcaaaggcaggggaggaagccacccgaggggcaaagaaaaaggagagaaaaagaggcaa

SEQ ID NO: 177110 - RNA, 74 nt, Homo sapiens
gagcagcgagaaaccagaaaacacggaacaaagggagaaacggacaacacccggagcagaaggcacgcaagcgg

SEQ ID NO: 177111 - RNA, 72 nt, Homo sapiens
aacagcaagcgaagccgaaaaagcgcccgagacgggcccgccgaaagcggcaccgacgaagccgcaacccga

SEQ ID NO: 177112 - RNA, 80 nt, Homo sapiens
cgaggcccgcgaccgccgagccgcagccgccccgcggccaacagagccggcccgaacaacagggagaaaccgacccaccc

SEQ ID NO: 177113 - RNA, 75 nt, Homo sapiens
gagaagccgaggagaagaagagaacccacagaggagcagccaacacgaacgggcaggaacacaaccgacaccgcg

SEQ ID NO: 177114 - RNA, 75 nt, Homo sapiens
cacagcaaccagcaccagagaaggagcacccggaccacgcaccagggcccggacgcccgcccggcgcagcggccg

SEQ ID NO: 177115 - RNA, 83 nt, Homo sapiens
ccccgcggacagcacagagaaacggccagcccgggcgaagaccaaaagaaggggagcccagaagcgagaggaaaaggcaaacg

SEQ ID NO: 177116 - RNA, 80 nt, Homo sapiens
caagaacaaacagacaaacccaggagcagacgccccgccagaccgaagccaccccaccccaccagacgacaccagagaga

SEQ ID NO: 177117 - RNA, 56 nt, Homo sapiens
aagagcacagaccagcagccgccaaaggggacaccagggacgacaaggacaggagc

SEQ ID NO: 177118 - RNA, 111 nt, Homo sapiens
gcaaagaccaccccacggccgccaccaagagagcagggcccgcggagccgcgccgaggggaagcaccgcaggcagcagaagaccggaggaccggggcgagggaccgagaag

SEQ ID NO: 177119 - RNA, 72 nt, Homo sapiens
gacccgagagggagggagaaccagcaacggcaaacaaaaccacaggcacaaagaggcagccgccgcaaaggg

SEQ ID NO: 177120 - RNA, 128 nt, Homo sapiens
gcaacaagcggacgagaaggggcagacacaaggacgcgaggaagggccagaggagaagccaaaggggcagccggggagccaggagcgcaacaccaaggagaagcgggggaggaggcgcaacaccccag

SEQ ID NO: 177121 - RNA, 93 nt, Homo sapiens
gccagggagacaagaccgacaccagacccaggacaagcaaggggccaaggagccaaggaggaaacccacaacagaggacagaaggcaaagggg

SEQ ID NO: 177122 - RNA, 72 nt, Homo sapiens
gaaggggggagacacaagcgcaaaacaaagcgcaaagaagggaagaacgcaagaggacaggcggggaagcgg

SEQ ID NO: 177123 - RNA, 75 nt, Homo sapiens
agagcgccgagcggggcgcggcgccccccccgcgggaagaacgggcccgccggcccggcaaccagccaggaaaac

SEQ ID NO: 177124 - RNA, 72 nt, Homo sapiens
gaacacaaggcccagacaagcacgggcgggccccacagagccacccgaggaaaaacagccgagaaggaagcg

SEQ ID NO: 177125 - RNA, 76 nt, Homo sapiens
cagggaagccaggaggagcaggccggaaaaagggaaagaacaaaacacacagcgaagcccagaagaaggacccaac

SEQ ID NO: 177126 - RNA, 44 nt, Homo sapiens
gggcggaggccccggcggcagcccccgacccaccggggcccgag

SEQ ID NO: 177127 - RNA, 36 nt, Homo sapiens
ggaccaagaaccagggaagcaaaagcgccgggaagc

SEQ ID NO: 177128 - RNA, 69 nt, Homo sapiens
accccggagcaggggaaaaaggaccaaccggcaagggacaacggccaacaccgagacaaccaagcaagg

SEQ ID NO: 177129 - RNA, 83 nt, Homo sapiens
aaaacacacacccgcagacaagaacggagagggccgccgggcagaagcacgaggacgagggcggcacgccccgcccccgacag

SEQ ID NO: 177130 - RNA, 82 nt, Homo sapiens
cgccaccaggccccccgccccggccgccaggagcagccgccggcgccaagaggacagagggcagccaggacaccaaaacgac

SEQ ID NO: 177131 - RNA, 80 nt, Homo sapiens
ccaaccgcaaccagacgccagcgggacgaggaccgagaccgcggccgggaccgaggggacggaaaaggcgcacacgaccc

SEQ ID NO: 177132 - RNA, 79 nt, Homo sapiens
ccccacggccccccccacggcgggacccccgggccggggcgcagcgggacagcaagggaggcagcagacgggaagaaga

SEQ ID NO: 177133 - RNA, 87 nt, Homo sapiens
ccacaagaggcgaccgcagcagaaggccaaggcagagacagagaaagcggcaagacgggaaccagccacacccgccacgggaagacg

SEQ ID NO: 177134 - RNA, 62 nt, Homo sapiens
gcggcggaaccccgcggcgggagcgcggcggggccgcagaggcggcagagaggccccgagac

SEQ ID NO: 177135 - RNA, 65 nt, Homo sapiens
cgcaagaaggggcaacacagcacaggccgagggagaaaacagcaagagagcagacgccaaagaga

SEQ ID NO: 177136 - RNA, 79 nt, Homo sapiens
aacaccggcaacaggccggaggcccccagaaaacacagcccggagccccagagacagacaacggcaaggcaagacaaaa

SEQ ID NO: 177137 - RNA, 79 nt, Homo sapiens
cacagagaaagaagaggaaaaccagagacgggagaggaagaacacaggcgaacagaagacaagacgaaaacgcaacgcg

SEQ ID NO: 177138 - RNA, 51 nt, Homo sapiens
gagaccccaaaggcacccgcgagcgcaacccaaggacgccgccagccaccg

SEQ ID NO: 177139 - RNA, 84 nt, Homo sapiens
gaaacaaaaagaagagcacaacgcagcagacaacggaggccagaagcggaaacacagaaggcagagggggcgagggaggaaagg

SEQ ID NO: 177140 - RNA, 74 nt, Homo sapiens
ggaaaaaaccgagaacccgaccccgcggagacagcgagacccgccaggagcaaagggagcgacggaaaaagaaa

SEQ ID NO: 177141 - RNA, 58 nt, Homo sapiens
cacggaggaaggagcacgggaaggaagaacacgaggaggcgacggaaggacagggccg

SEQ ID NO: 177142 - RNA, 76 nt, Homo sapiens
gaaagccacggggacgccacagggcaagaggaggaagccggcgagcaaggggaagcccagccgcagaccgcacaaa

SEQ ID NO: 177143 - RNA, 65 nt, Homo sapiens
ggacacagccccaaacaggacgaaggcggcgaaggaccgaaggagaagaaggagaaggggaggag

SEQ ID NO: 177144 - RNA, 72 nt, Homo sapiens
cgggaacggcgcccggagggacgcaaaagcccagggagcggcggcagcaggcgcaggggccccacggaagcc

SEQ ID NO: 177145 - RNA, 59 nt, Homo sapiens
ggggggcggcgcccacccgggaggacagagccgagcccggaagccggcaagacaagcga

SEQ ID NO: 177146 - RNA, 107 nt, Homo sapiens
gcgggcgcggcggccgagcaggcggagcgcacgacgacaggccccgcagaaggcggggcccaaggaggagaaccgcagccacaggggggaggggagccccgccgaca

SEQ ID NO: 177147 - RNA, 71 nt, Homo sapiens
agggcaacaccaaaaacaaaacgaaccaggacggcaagaacagagacaaaggacccagaaggaaagaaacc

SEQ ID NO: 177148 - RNA, 75 nt, Homo sapiens
gagcgcccggagcggccgcgagccaccgaggcccagacaacggcaagcggagaagagcaaggccgaaccgagagg

SEQ ID NO: 177149 - RNA, 76 nt, Homo sapiens
gcgagccaggggcggcggagcgcgggcaaccgcggcagacccagcccgccgccccaggacaccccgcgcgcgccag

SEQ ID NO: 177150 - RNA, 71 nt, Homo sapiens
cgccccagcccgccggcggcggcggacgcggccggagcccccccagacacacgagggggacaccgccagcc

SEQ ID NO: 177151 - RNA, 122 nt, Homo sapiens
agagggaaagacagccaccaaggagaggagcccaagaggcacgcaccccacaaaaaaaagaggaggcaaaccaagggacaaaaccgagggacaaaacgccggaggaagcaccaaccagaccg

SEQ ID NO: 177152 - RNA, 74 nt, Homo sapiens
gaaaagaaaacgaaacaaccgaaaagccacaaagggaaccaggaaaagggaaaagcgagacacagcagaacacc

SEQ ID NO: 177153 - RNA, 64 nt, Homo sapiens
caagaggcaacaaagaaaagcccaggacgcggccagaggacccgggggcgggggcgacgaagaa

SEQ ID NO: 177154 - RNA, 85 nt, Homo sapiens
agggcgggccggaacgggagaccagggccggagaaagaagaaaagaagaaagaaggaagaagaagaagaaagaaaggaggaagaa

SEQ ID NO: 177155 - RNA, 76 nt, Homo sapiens
gggcagccagcaagcccaaacccaaaggggaggaaaggagcagcagaacgaaggaagaagggaaagacaggagcgg

SEQ ID NO: 177156 - RNA, 74 nt, Homo sapiens
cgagggccaaggacaaaggacaacaaggacagcagcagaccagcacgaggaaggaccaagaagcacggaaacag

SEQ ID NO: 177157 - RNA, 86 nt, Homo sapiens
cacaaagcaaaacggcacgggagagccaagaaggacaagaaggggagaagaaaagaaacggcaaaagaaaaaagaaaagagaaagg

SEQ ID NO: 177158 - RNA, 71 nt, Homo sapiens
agccaaccaagaacgcgaaggcggaaaggcaagcagcggcgaggacaacacaaaaaacacaccgacagcag

SEQ ID NO: 177159 - RNA, 78 nt, Homo sapiens
aaggaccggcacaaggacgccaagggggcgagagggccggcccagggagaacgcaaaaccaccacccccacaaaaaac

SEQ ID NO: 177160 - RNA, 66 nt, Homo sapiens
cacccagcccccaccgccgccaagaggacgccaagaagcggaacaaaccagcaagaagcggcaacg

SEQ ID NO: 177161 - RNA, 86 nt, Homo sapiens
ccaggcgggcccgggaggcccgggaagcggggcaccagaagagagaaacaggcccggggagagggcgaagaacgaaacgaaagcgc

SEQ ID NO: 177162 - RNA, 79 nt, Homo sapiens
ggccgagggggccccaacccgcgcggcaagaagacggcgcggcaaccggggagcccgccagaaagccacacacgaggag

SEQ ID NO: 177163 - RNA, 74 nt, Homo sapiens
cacccggacaagaaggcgcaaacaggagaggaagcgccaccccaagcaccggcacagcaaaagaagggaaagag

SEQ ID NO: 177164 - RNA, 68 nt, Homo sapiens
gacaacgacgcaccgcgcggccgccggaaggccacgcggcgacccaacggagacgagacacgggcccg

SEQ ID NO: 177165 - RNA, 64 nt, Homo sapiens
cgcggcgcccgcgccgcagcggcgggaaaacggcacaaggcgacgagggagggcagaccgccag

SEQ ID NO: 177166 - RNA, 82 nt, Homo sapiens
gagacccccgacgggacgcaggagacagacgacggcggagaacggaaaagcaccaggaagcagagaggaccgcagaagggaa

SEQ ID NO: 177167 - RNA, 82 nt, Homo sapiens
aggggaaccgacgaaagaaaaccccgagggaaacaagaaaacacaaagaggcagcaaagaagcagaagaaggacaccccaca

SEQ ID NO: 177168 - RNA, 86 nt, Homo sapiens
cacaggcgaggccaggcaaaggaaccacccaggaaacagcgcaagaaagggacgcggcacagaacgaagaagaaagcagaagcaag

SEQ ID NO: 177169 - RNA, 63 nt, Homo sapiens
cagggaaagcagggccagagggaaggggaacccacacccgcccccagggccaccgcaggacgc

SEQ ID NO: 177170 - RNA, 59 nt, Homo sapiens
gccaccggagaagggaggaaaaccaacaaggcagaccacagggcgcccgccgggagaga

SEQ ID NO: 177171 - RNA, 76 nt, Homo sapiens
gcaccaggggcccgagaagaaggagccgggagcggggaaaagcagggaaggggaagcaggccaacccagaacacac

SEQ ID NO: 177172 - RNA, 72 nt, Homo sapiens
gcacgggccagcccaaggcgcccaagaacaaaccaccgggagaaccaccaaaagaaacggccagaaaaacca

SEQ ID NO: 177173 - RNA, 79 nt, Homo sapiens
agacggcgcccagcaacacagaagccgacaaggcgcaagcgaaaacagaccgcgagcccagagccacaccgcacgacag

SEQ ID NO: 177174 - RNA, 80 nt, Homo sapiens
ccagccgcccgcggccgggagcggagccccgggacacggcacaccgaagaaaaagaacaacaacaagaggaaagaaaacc

SEQ ID NO: 177175 - RNA, 75 nt, Homo sapiens
gagagacaagagacacccccgccgccagagcccacgggcgccgcgccggcccgccgcaccgagaaccgcgaagcc

SEQ ID NO: 177176 - RNA, 78 nt, Homo sapiens
ccggaaaagccaacgccggcgaagggccacccccaaccccgggacacgggcggacacccgcacgaggccgcaacacgg

SEQ ID NO: 177177 - RNA, 56 nt, Homo sapiens
ggccggccagcccgaaccccggacacaacacacggcaacaagagaaacggagaggg

SEQ ID NO: 177178 - RNA, 82 nt, Homo sapiens
gaaacgacagaagcagagaaacgaaggaggcccaaccacaaaaggagccgacggaacccagacggagaacaaaaggaagaaa

SEQ ID NO: 177179 - RNA, 71 nt, Homo sapiens
caggaggacacggaagagggaagaaagaagcagcgccagacccagagagagaggggacaccccccgggagg

SEQ ID NO: 177180 - RNA, 55 nt, Homo sapiens
agacgacagaacggcagcggagaaaacaaccagggaaaagcacagggccaggaag

SEQ ID NO: 177181 - RNA, 59 nt, Homo sapiens
gaaggaccaacgagaaaccagaaccagcgccaaaaaacaggccaagagccaggacaagg

SEQ ID NO: 177182 - RNA, 71 nt, Homo sapiens
gaccagcggaggagaagagaaccaggacagggcagaccgccagcagcacagcaagccacagagagggccgg

SEQ ID NO: 177183 - RNA, 79 nt, Homo sapiens
ggcaaaagcacaaggaccgcggacagagacaacaccgagagagaagcacgacgcgaaagagacgacgcagcaccaagca

SEQ ID NO: 177184 - RNA, 71 nt, Homo sapiens
agagcgacaggaggagacaggcgagagaggaggacacgaccggggccccagccccaggcgcgggaggagcg

SEQ ID NO: 177185 - RNA, 81 nt, Homo sapiens
cggcagagcagggcggcggcgaccgagaaggagggggcagagcacggcaggcagaaggggccaacccgggggaacgcaccg

SEQ ID NO: 177186 - RNA, 69 nt, Homo sapiens
cgccgcgcccgcccgacccgccaccgccaggccaggcaacacaggcaccagccaaaccaaccaccacaa

SEQ ID NO: 177187 - RNA, 84 nt, Homo sapiens
aagccccccagcccccacgagaaaaccacccaaagccaaaggaaaggggacggccaggacgcacagagggacgacaccagacgc

SEQ ID NO: 177188 - RNA, 81 nt, Homo sapiens
cgggggccgagccgccccagccagaccagcgccgggaagaccgaggagcagggagcaaccacaaggaaaggaaaccaccga

SEQ ID NO: 177189 - RNA, 75 nt, Homo sapiens
gaggcaggagagcacaagagacgacgccgggaaccgggccggacacacacccgagggaacgcacaccagcaccag

SEQ ID NO: 177190 - RNA, 65 nt, Homo sapiens
cggcagcagaacccacagaacaacagccccaagcccagcgaaacaagcaacccaaaacgaacacc

SEQ ID NO: 177191 - RNA, 83 nt, Homo sapiens
ccagcacaccggcagaaaggggccgggagcccagcagacgacgggacccccaggaagacccgcagaagcaccgacgcaacacg

SEQ ID NO: 177192 - RNA, 73 nt, Homo sapiens
acaagcccaagagggagccccgcagacgggacacagcacaccggagagacgaggaacagaagcagagacagaa

SEQ ID NO: 177193 - RNA, 79 nt, Homo sapiens
ccccgcgcccccccggggccccaggacgaacgcaaccccaagcagaaaaggcaacgccgaagagcccgcgccggacccc

SEQ ID NO: 177194 - RNA, 74 nt, Homo sapiens
acagccacgggaccggcgcaggcgaagcacacagcagaggcggaccagacgggaagagcccaccccggagccaa

SEQ ID NO: 177195 - RNA, 71 nt, Homo sapiens
aagacggcacgggacccccagcacaggcagcaggccgggagagaaacgacacaagcccacacaaggaccgg

SEQ ID NO: 177196 - RNA, 73 nt, Homo sapiens
ggaaccggacacaggccaggagggggaagagaggcacaaaggacaggaacaaagaacaggaccaggggacagg

SEQ ID NO: 177197 - RNA, 78 nt, Homo sapiens
ggggcgcgccccgagagaacgaggaggagccccacccgcgcagcccacggccagaccggccaacccacaggcccagaa

SEQ ID NO: 177198 - RNA, 106 nt, Homo sapiens
ggcaaagggaaggggggaccgcggcgcaggacgccgacacgggccgcgccaggagaagacagaggagccagaccaagagacagcacaggcgagcgagcagagacac

SEQ ID NO: 177199 - RNA, 39 nt, Homo sapiens
gccgagcccagcgcgagaagggaccgaaaagcccgccgg

SEQ ID NO: 177200 - RNA, 91 nt, Homo sapiens
gaagccgaaaagcgcagcgagcggagccgccggaggccagaagcggcgacagaaaagccgacggaaaaaggaggaaaaggcggcagacagg

SEQ ID NO: 177201 - RNA, 72 nt, Homo sapiens
caaaaaggggaaggggccgacaaaagcgcagcaagacggccgcgcggcccgcagggcgacagagaagagagg

SEQ ID NO: 177202 - RNA, 83 nt, Homo sapiens
gacacgggccggaccagcgggcgcgcggcgcaggagaaaaaaggagcccgaaagccccaaggaaaaaaagaaagcgaaagaag

SEQ ID NO: 177203 - RNA, 78 nt, Homo sapiens
caggagcccaagagcacaggggaagaagcacagccacgagccaacacagcccagccgcccacacaaggaaacaacccc

SEQ ID NO: 177204 - RNA, 83 nt, Homo sapiens
acacacccagggaggcaagcagagcgcggccaagaacagaggaagggggagaccaaagaggaaggggaccaacacagagggag

SEQ ID NO: 177205 - RNA, 67 nt, Homo sapiens
cgacggcggcagcggccggagccgggccgggcagcagcagggcgccgggaaccacaccaagaaagca

SEQ ID NO: 177206 - RNA, 69 nt, Homo sapiens
ggaagagcgagaagaaacaggaaaacagacagaggagacaggcaagaaccgaacaagacagaaagcggg

SEQ ID NO: 177207 - RNA, 74 nt, Homo sapiens
acgaagaacacacaacgggaggagaacaccgggaagcgagggcgcgcagcaggcgggacgcagagagcaaggga

SEQ ID NO: 177208 - RNA, 73 nt, Homo sapiens
accggaagaagaaaaaccagcgcgggaaaaaggaaacacaaagccggggaagcaaagagaacaaagaacaaaa

SEQ ID NO: 177209 - RNA, 75 nt, Homo sapiens
cgaggagggcccgcggagcgccgaggccgggaacgcaggcaggagacaaagagggagaaaagagcgcacaaaaac

SEQ ID NO: 177210 - RNA, 71 nt, Homo sapiens
cgccaccacacgaaacagggcaaggccagcgcagaagacgagaagccaggaggagaagcggcccggcaaga

SEQ ID NO: 177211 - RNA, 68 nt, Homo sapiens
aacggcgcccggagcccgcacccagccacaccggaaccgcgggagccgaagcgaaaaggacgaacaaa

SEQ ID NO: 177212 - RNA, 116 nt, Homo sapiens
cccgaggcgggagccagccggagaagcgcgcgggcgcgcaggccgcggggagcaccggaaagagccgcagacgcacagcaaccaccggacccgaaggccaccacccagaggggccg

SEQ ID NO: 177213 - RNA, 81 nt, Homo sapiens
ccgccagcgcgcgaaagccgaggaaaaagcggccgcaagaggcaggaacgaaccaacgcaggaccaggaaaccaagcgaca

SEQ ID NO: 177214 - RNA, 72 nt, Homo sapiens
aggccccagcggaccgaacagcaaccaccgaaacgggcgaaaaagaagaacagcaaaacacgaaaggcaaag

SEQ ID NO: 177215 - RNA, 80 nt, Homo sapiens
ggcaggaccgggcggaggccgccaagacggaaacaaagccagaccgccgaggggggacgaacccaggagggaaaccgaag

SEQ ID NO: 177216 - RNA, 74 nt, Homo sapiens
ggaaccaggcgccccgagaggacagaagacggaagaaacggagccgaagccagcagaaagaagccgccagcacc

SEQ ID NO: 177217 - RNA, 60 nt, Homo sapiens
ggggggaaacaggcgaggcggcggcgcccggagggcagcgagaaaccagagagcagaggg

SEQ ID NO: 177218 - RNA, 81 nt, Homo sapiens
aaggacccaaggcggagcaggccaaaggaagaaggccagccagaccaaggacagccaaggaagccaagaccaggaggggac

SEQ ID NO: 177219 - RNA, 78 nt, Homo sapiens
gcggccacacgccacgccaccagcggcaagggccgccaaaaacaacgaccacccaggaggaaaaccaagccgacccgc

SEQ ID NO: 177220 - RNA, 71 nt, Homo sapiens
caggggcccggcccggggcgcggaaggggccccacagacagagcccgaaagagggaacggcaccacgaccc

SEQ ID NO: 177221 - RNA, 81 nt, Homo sapiens
gcagcgccgggcgaccccgcccgggcccggcaaagcgggccagacacgaagaggccggcgaaggaagaaggaccagccaga

SEQ ID NO: 177222 - RNA, 56 nt, Homo sapiens
gaacacgacacagggcccagcacaacacaaaaggacgcgcagacaagacaaaacgc

SEQ ID NO: 177223 - RNA, 40 nt, Homo sapiens
cacccccgcaaccgggggaccgcagggcgacgcaccaaag

SEQ ID NO: 177224 - RNA, 94 nt, Homo sapiens
cgggcccgggacccggccggaccgccacgccccgcaggggccgagaaaaggggccagcgagccggacgccgggaaggaagaacagccagaccca

SEQ ID NO: 177225 - RNA, 77 nt, Homo sapiens
ccgccagccccggcacgcaggggcaggaaagaccacagcaagaccacgcccccagccgggggaccaggccgaacgac

SEQ ID NO: 177226 - RNA, 80 nt, Homo sapiens
cccaagcgacaggccagcagaccgaccccaagagaggcgggcaaggagacaggaaggcacgcccgggcaacgaagccgag

SEQ ID NO: 177227 - RNA, 74 nt, Homo sapiens
ccacccccccggcccaaacaagcagccccggaagacaacgcagacgccagcaccaagccagacccgagacgcaa

SEQ ID NO: 177228 - RNA, 92 nt, Homo sapiens
cgggccccaacaccagccgccgccccgcagccccccgcagcacccagccggccacggcccccaaaggaccaaaacgcaaccaaggaaaagcg

SEQ ID NO: 177229 - RNA, 105 nt, Homo sapiens
aacgacgaggaaaaccagaagcgaagcgaaggcagcccacgaccaaagaggcagcacgagaaggaaggaaagggaggacagaagcggccgagccacaacaggaac

SEQ ID NO: 177230 - RNA, 71 nt, Homo sapiens
accaggacgagaaaaaccaccggacagaacagaagccagaacacccaggccacaaacaggacaaggacagc

SEQ ID NO: 177231 - RNA, 74 nt, Homo sapiens
agaggagagaaggacgacaagcccaccgagggacagcgaccaccagggaaccagaggcaggggagccccacgga

SEQ ID NO: 177232 - RNA, 77 nt, Homo sapiens
ggagggagaacacagaaacccgccccggagcgaagaagcaggggagaggccgagcgaagaaccagcggccaaggagg

SEQ ID NO: 177233 - RNA, 58 nt, Homo sapiens
cgacggcagggcccacggcacggccccgcggcgcgcagaaaaaaggagccagaagaac

SEQ ID NO: 177234 - RNA, 80 nt, Homo sapiens
cacacagcggcggaccaaaccgcggagggcggaagcccgccaggccgcccacccgggacccccagccagaagcgcagcaa

SEQ ID NO: 177235 - RNA, 124 nt, Homo sapiens
cacaagggcccaccgacagccgaaggcccaccacgcaagcaccacgcacacagaagcaggaggcggcggggaaagaaggggaagagcgagcggaacggcacgggacagaggacgcacacccccg

SEQ ID NO: 177236 - RNA, 92 nt, Homo sapiens
cgggcgaggcggcccagcggcggcagagccccagcccccagcagccgacaggaggcccgcaagagcaggcaggcagccaccccagggagaag

SEQ ID NO: 177237 - RNA, 38 nt, Homo sapiens
gggggcggcaggaagggaggaggaagaggaccgcccca

SEQ ID NO: 177238 - RNA, 66 nt, Homo sapiens
gacagagccacagaaccgccaccagagacgaaagggaagggagggggagcggcaagagaccggaag

SEQ ID NO: 177239 - RNA, 60 nt, Homo sapiens
gggaacgcaagacaggaagagaggccggcccccaggacgcacggcaaacgaagcagagga

SEQ ID NO: 177240 - RNA, 40 nt, Homo sapiens
cagcagcagcagcgcaccccaggcagaaggcaaagaacag

SEQ ID NO: 177241 - RNA, 81 nt, Homo sapiens
ccacacgaagacccaggacccagccaaagcccccaacaccccgacaccgagacgagcaaaaaagagaggacggggacgggc

SEQ ID NO: 177242 - RNA, 77 nt, Homo sapiens
ggaaagacgagcagcgaccgaagggagagcgacgcaggggaggacagggaacggcgaggagccaccgggacggccgg

SEQ ID NO: 177243 - RNA, 72 nt, Homo sapiens
caccagcggaaagggaacccgacaagaccaagacacccaagacccaggggcgccagcaaagggaagaaaccc

SEQ ID NO: 177244 - RNA, 73 nt, Homo sapiens
gacgccgcggagaacacacaaccaagccccccagggaaagcccaaccagcagacacgccaaaacacagagcag

SEQ ID NO: 177245 - RNA, 73 nt, Homo sapiens
gggcaacaagggcaaacaggggaagaagagaagacccaaaagccaaagccagaaggggggagaacgaggagag

SEQ ID NO: 177246 - RNA, 70 nt, Homo sapiens
acgcgacgggggagaaggccagagagaaaccgaagaaggcccacacacacaggaaggcagaaagcacagc

SEQ ID NO: 177247 - RNA, 79 nt, Homo sapiens
gagaagagagccggggcgacacggcaagaacgccccggcaaggacggaggcaggcaccaccaacagcggggaaaaccca

SEQ ID NO: 177248 - RNA, 73 nt, Homo sapiens
gacagcacggcaagagaggacacaggggaccaggacaaggcacgaggcgcggcgaccaccacagcagagcccg

SEQ ID NO: 177249 - RNA, 73 nt, Homo sapiens
ggcgcgcaggccgcggggagcaccggaccaaaacaagaaggcagacaggagggcaagaaaccgcaaccgcaac

SEQ ID NO: 177250 - RNA, 77 nt, Homo sapiens
gcacggggcaaggaagagcccaaaaagccagaaacaacgccaagcaaaaagaagccggccccagggaagggacgaag

SEQ ID NO: 177251 - RNA, 89 nt, Homo sapiens
gagaaggcacagagcggccgcgccagcgagagggggaagacagagaagaccacacaaccgaaggggccgggcaggacggcccggggcag

SEQ ID NO: 177252 - RNA, 76 nt, Homo sapiens
cggcgccccggcgggaccgggcggcacgcacgcgggcagggaacaggcggagcggaagccaggacacggccaaggc

SEQ ID NO: 177253 - RNA, 76 nt, Homo sapiens
cgcccggcgcgagccaagcgcgcgccggacacggcccccgcacggcaagccgggaccgggccagagagcagccaca

SEQ ID NO: 177254 - RNA, 57 nt, Homo sapiens
aaaagagagagcggaaacgagggaaaggacacccggcacaccacaaaggccgccccc

SEQ ID NO: 177255 - RNA, 57 nt, Homo sapiens
gagcggggggcaggaacacaaggggaccggggcacggcaagacagaaaacccgacag

SEQ ID NO: 177256 - RNA, 67 nt, Homo sapiens
gaccacaccgcccggggccgggcagcgagcccacacagaacccaccagacaacaagcccaagccgga

SEQ ID NO: 177257 - RNA, 75 nt, Homo sapiens
acaggggccgcagccaaggaaggaggccgcaaacagacaggaagagccaagcaggcaccaagcagccaccaagca

SEQ ID NO: 177258 - RNA, 90 nt, Homo sapiens
cgggaaccacacacccgaacccaagaggcggagggcgggagggaaccgcacgcaaacccaagaggcaaaagaccaggcgacggaagagga

SEQ ID NO: 177259 - RNA, 57 nt, Homo sapiens
aagggccaaagaagggagagagcaccgagcgagagcgggcagcccagcagcagaaag

SEQ ID NO: 177260 - RNA, 81 nt, Homo sapiens
ggcaggagccgcgggggagaccccaggacaacgacccaagccaggaacaacagaacagaggcaaagcggaaggggacaaag

SEQ ID NO: 177261 - RNA, 76 nt, Homo sapiens
cgccgagcgacaacccgcgccccgaggagagacaaggaggaacccaaggaacccccaacacggaaagcaacaaaga

SEQ ID NO: 177262 - RNA, 41 nt, Homo sapiens
accacgcaccccaacccacaggaaaccagccaccaccccgc

SEQ ID NO: 177263 - RNA, 75 nt, Homo sapiens
caaaacgcacaggaagcaaaggggagcaagaggcagacagaccgagacgggcaaccaacaagaaacagacacacc

SEQ ID NO: 177264 - RNA, 81 nt, Homo sapiens
ccgcgagccgcccaccggcgccacgcaagggcgaggcagccccaaacaccgaaaacacggggaagagaaagccaaaaagaa

SEQ ID NO: 177265 - RNA, 72 nt, Homo sapiens
cccaccccacgccccccggccacacccgggccaacgggccccacgcagggcgcagccaaagagcacagggac

SEQ ID NO: 177266 - RNA, 74 nt, Homo sapiens
ggaaaaggcgggcacaggccgaccgcgcgaaagacaacgaaacggcaaaccgagccacgcaaaagaaaaggacg

SEQ ID NO: 177267 - RNA, 71 nt, Homo sapiens
aaaggcccaccggccgggagggcccagggcggggcccgaggacgaaaaggcccaggccggcggaaaaccca

SEQ ID NO: 177268 - RNA, 71 nt, Homo sapiens
cggcgcgcacggaacacaggccagagcgcgcagggccagccacaaggcaagcacaagcgcacaccacccag

SEQ ID NO: 177269 - RNA, 84 nt, Homo sapiens
cacccacccgcgcgacacgaagagggaccaccaaaagaaaaaagagccagaaggggccagcaaaaacaaaaaaggaaaacgaaa

SEQ ID NO: 177270 - RNA, 82 nt, Homo sapiens
cagaagcgacggcaggagccccaggaacaaagacaaccccacgaggacaaaggaccgaaccgggggacgagagaacgagaac

SEQ ID NO: 177271 - RNA, 57 nt, Homo sapiens
gggaaagggccagaaagcaccagcgcggacggcgcgccaccggccacgcaacccccg

SEQ ID NO: 177272 - RNA, 61 nt, Homo sapiens
agcgccaccgcccccaaggccgggccgaggccacgggcaagcccgggagggaaagccagac

SEQ ID NO: 177273 - RNA, 80 nt, Homo sapiens
cggagccgcagcggagaaggaacggccgcggagcaacaacggaggaagggacgccaacacagccacacagaccccaaccc

SEQ ID NO: 177274 - RNA, 73 nt, Homo sapiens
ggggaaggcaggaaaaggcgggggaagaggagacagggacacaccgccaacccagggacaggcggagcaggaa

SEQ ID NO: 177275 - RNA, 37 nt, Homo sapiens
accggccgccaccagggcacgacggagcgccgcgccc

SEQ ID NO: 177276 - RNA, 72 nt, Homo sapiens
gaagaaaagcaacgggcagacagaggaggaaacaaagaccaaagaaaaacaaaaagaaaagacaagaaacaa

SEQ ID NO: 177277 - RNA, 82 nt, Homo sapiens
gggaccaaggacacgcagacccggaccccggaggaaaagcggaagcggcagcggcgaacgccggaacggaccaacaggaggc

SEQ ID NO: 177278 - RNA, 72 nt, Homo sapiens
agggccaaagaagggagagagaccccagccacccccagggccaggcaagaaagagcgcgacgaggaaagaca

SEQ ID NO: 177279 - RNA, 79 nt, Homo sapiens
cggcggaaaaagccgccacacgccaaaggggcgcagcgggcagggcccaggggccgcgggacccggggcgggcggcacg

SEQ ID NO: 177280 - RNA, 82 nt, Homo sapiens
agggcggcgcagccccgccacaaggcccccgacagcgcccgggagccgcccccgacacccgagccccgccggcgcccccgcc

SEQ ID NO: 177281 - RNA, 43 nt, Homo sapiens
ccagaagccacaaaaagaccgccaacgagcgcccccaagcgga

SEQ ID NO: 177282 - RNA, 61 nt, Homo sapiens
cccggagaaaaggccaagaaggcaggcaggccagaaagcagacccagggaggaagcacagc

SEQ ID NO: 177283 - RNA, 88 nt, Homo sapiens
agccgacaggcggaggcccccgggcaagaggcgcaaacaagccaacccaggaggaaaaacggaggaacaaccaagcacggacggcaag

SEQ ID NO: 177284 - RNA, 54 nt, Homo sapiens
ccagggacccggcaggccgcccccggcaagggagaaaagaagcagcccacgaac

SEQ ID NO: 177285 - RNA, 47 nt, Homo sapiens
ggccaggccaagaaacgggaaacaaaagcgggagcaccggccaggcg

SEQ ID NO: 177286 - RNA, 75 nt, Homo sapiens
ggagaacagagacgacaagaaagaacaaagggcaacgagggggaaagcaggccaccccgccacagagcccccgcc

SEQ ID NO: 177287 - RNA, 79 nt, Homo sapiens
cccgccccggacccgagcagaggacagcggccagagagccaacgggccggcaagccacggggggaccaccgaagagacg

SEQ ID NO: 177288 - RNA, 74 nt, Homo sapiens
gagcacgggggacacaggaacccgccaccgcggggcgccgcagccagcaacacagaaagcaccgcagacaccgg

SEQ ID NO: 177289 - RNA, 60 nt, Homo sapiens
ccgccgcccagaggacgcccaacaccacccacccaccacggaggaagaacggcaaaacgg

SEQ ID NO: 177290 - RNA, 84 nt, Homo sapiens
cgaggggaagggcaggaggaggaggaggggcccggcggcggggagcagccgcgaacgcggccgggaggcagagcgaggcaccgg

SEQ ID NO: 177291 - RNA, 71 nt, Homo sapiens
cgagccggaccggagacggggccaacaggcgccggggaaggaaccagaacggcaccccccccccggcccgg

SEQ ID NO: 177292 - RNA, 70 nt, Homo sapiens
gaagcggccaagagaaaaagcagcgccgggacccaaaaacaacggagcccaaaagaaaggaagccgcacg

SEQ ID NO: 177293 - RNA, 81 nt, Homo sapiens
gcggcggagcgggcggcagagcagggcggcggcgaccgagccagcgggccggcaccggcacgaggagcgcacacccgccca

SEQ ID NO: 177294 - RNA, 32 nt, Homo sapiens
acagaggggacggagacaagggaggaaccgaa

SEQ ID NO: 177295 - RNA, 71 nt, Homo sapiens
cgggccggaggagccagagcgcagaaaggggaacggcgagggaacccaggaaggagggcgacaaacaccag

SEQ ID NO: 177296 - RNA, 76 nt, Homo sapiens
ccccccaccccaccccgcccggcgcaaccagagggcggccgccccgaccacaaggccgcgaccacccaaccccgag

SEQ ID NO: 177297 - RNA, 60 nt, Homo sapiens
aacaaggaggaggagagcaagagggaccgcacaggacgagcgaagacagggaaaagaaaa

SEQ ID NO: 177298 - RNA, 78 nt, Homo sapiens
cagccaaacccagcacggaggcgaggcgggcagacacgagacaggagcgagaccagccggcggaggcaagacgcgacc

SEQ ID NO: 177299 - RNA, 77 nt, Homo sapiens
cagaagacgcagcccagggcgaaggggcgccgaaccgagcccgaagggaagggccggcgggccaacacaagaaccag

SEQ ID NO: 177300 - RNA, 82 nt, Homo sapiens
gaggagcccgaaggaggaccagccaaggcccagaaggaagaggaacacagggcacaccgacgagaagacaggggccagcggg

SEQ ID NO: 177301 - RNA, 80 nt, Homo sapiens
gaccgccgccaggcggcagaacgggaaacagccgacgcaccccaggagagggaaccagaaggaaacgagacccgggaaga

SEQ ID NO: 177302 - RNA, 81 nt, Homo sapiens
aagccgacccaagaccagacaaccagcgaggagagaaaccacagagacccaagagaagagcaaggcaggaacggaccaaac

SEQ ID NO: 177303 - RNA, 71 nt, Homo sapiens
cccaggggggagaccggaagagccagcgccaaggcggaaaagcccaagaaacaaacaaaagcccaggagcc

SEQ ID NO: 177304 - RNA, 41 nt, Homo sapiens
acagggcaaaggacagaccagagaaggcaccggccaaaggg

SEQ ID NO: 177305 - RNA, 80 nt, Homo sapiens
gcagggaagaacgaccaccagcgacaagaggcaacagcacccacccggagccggagccgggccagcgccgaggagcgacc

SEQ ID NO: 177306 - RNA, 82 nt, Homo sapiens
cgcggagcaaaaaaagagcccgcaagaagaacagagacagcagccaaacccccaggccacacagaaagaaaaagagcccaag

SEQ ID NO: 177307 - RNA, 77 nt, Homo sapiens
ggaccagaagccagagcgaggacgccggcagaccgaagccccgccgccccaagaggagggaaaccggggagaaccac

SEQ ID NO: 177308 - RNA, 71 nt, Homo sapiens
gcaggcaccacagggagagagggggaaagagaagaccgcaacccaccaaggagcacaggacgaagaggaag

SEQ ID NO: 177309 - RNA, 78 nt, Homo sapiens
accagagccagacacagagcagcagccccacaagccccaagagggagaaaaaagagaagaccaaaaaaagggagacag

SEQ ID NO: 177310 - RNA, 71 nt, Homo sapiens
accagcagcaaaagagggggggcggcggagggagacacacaacaccacaaagggaaggcgccagacacaga

SEQ ID NO: 177311 - RNA, 71 nt, Homo sapiens
gaaggaccaagaaccagaaacagacagcaaaggagcgagcagcgccaagaggcacaagaaacagcacaaca

SEQ ID NO: 177312 - RNA, 77 nt, Homo sapiens
gagagaggagagggcagacggacaagagcgcggaacaggacgccccgagccgacagcccacaagaagagaagcgcag

SEQ ID NO: 177313 - RNA, 76 nt, Homo sapiens
cacaagaaacaccgaagcacacgaacaagacagcggggacaggagacacccgggcccccagcgaacccgaaaacac

SEQ ID NO: 177314 - RNA, 66 nt, Homo sapiens
gagaaaaggcacggaaagcgaagccaacaaagaaaggaccggggcaaaacggccagaaggcccaag

SEQ ID NO: 177315 - RNA, 77 nt, Homo sapiens
cgacgggccgcgaggggaagaggaagcaaagccaagggagacacagaaccgggaaccgcacggaaagcgaagacgaa

SEQ ID NO: 177316 - RNA, 49 nt, Homo sapiens
cgacacagagggaacgaagaaaacaccgggaaaggcccaaaccggcgaa

SEQ ID NO: 177317 - RNA, 127 nt, Homo sapiens
cccagcgccaccaccacgccagccgcaccagccgcccaagccgcacagccgcggcggcagcagcaggagagggacacaggacaaggagccaccggagaggaagcggcagacagcgaaaggcacgcag

SEQ ID NO: 177318 - RNA, 80 nt, Homo sapiens
acaaccaagggaaggacgggcaacgagaaaaagccaagaacagcaccagggaaagagaccgacagagccacaagaaacaa

SEQ ID NO: 177319 - RNA, 58 nt, Homo sapiens
ccagaggcaggagcccgccacagccagagcacacagagaacccgaaaacagggccaaa

SEQ ID NO: 177320 - RNA, 71 nt, Homo sapiens
gaggacagcacccggcacgccacggcgccccgcaaggcaggagggggcaaggaccacccagacggcggaac

SEQ ID NO: 177321 - RNA, 98 nt, Homo sapiens
gaacaggagccgccccagaaagagacaacacaggaacaagcaccacagagcacacagaaggaacaaaaagcaaaaaggaacgagaaaaaaacacagcg

SEQ ID NO: 177322 - RNA, 55 nt, Homo sapiens
gagcacgcacgggagcacacagaggcaaaggccgaagaggaccaaaacaaagcaa

SEQ ID NO: 177323 - RNA, 77 nt, Homo sapiens
ccagaagcaggcccccagccgcagccacaacaccggcaggaaccaccaggacagagagggagccacaccaaagccgg

SEQ ID NO: 177324 - RNA, 77 nt, Homo sapiens
aaccagcaacaagccggccggggggggcacagagccccggaagacagcccccagcgaccagacccagggccagagcg

SEQ ID NO: 177325 - RNA, 89 nt, Homo sapiens
gaagacgccgcgccaccgagccggaccggagacggggccaacagggggggacaaaagacggagagcgacagagggacgccaaacaggag

SEQ ID NO: 177326 - RNA, 80 nt, Homo sapiens
gccgagcgccaaggacggaaccccacgacccacgcccaagccgggcaggggagcacacgggagaagcagaagcccgcaca

SEQ ID NO: 177327 - RNA, 75 nt, Homo sapiens
aggagagcacgagcaggagaggaaaaaagccgcaagagaggagaacagaaaacaaacaaagaaaggaaagaagaa

SEQ ID NO: 177328 - RNA, 75 nt, Homo sapiens
aaaaaaaaaccggagaggaagagaagagacaaaagaagaccgaggaagcaacgccggaggacggccacccacaga

SEQ ID NO: 177329 - RNA, 35 nt, Homo sapiens
aaagacaggagaccaaaaagaaccccagccccaca

SEQ ID NO: 177330 - RNA, 71 nt, Homo sapiens
acaccccggcgccggaaaggcagccaaaggggcagagagacagcgaaggacaaaaaggacccgaagagcga

SEQ ID NO: 177331 - RNA, 83 nt, Homo sapiens
aaaaaaggaaacacacaaacgcaggccaaggaaaaggaacagagagagcagaaccgaaacggggaaagaccgaagaaagaaaa

SEQ ID NO: 177332 - RNA, 71 nt, Homo sapiens
gcgacagccccagaagcaagagaggaaaacagaagcgggcgagggacgcccggagccagcggaggcacccg

SEQ ID NO: 177333 - RNA, 79 nt, Homo sapiens
aaggcgcgccagggcacagggagcagccgaagagcaaagaccggaaacaggcacagaacagaaggaaaggacgaagagc

SEQ ID NO: 177334 - RNA, 49 nt, Homo sapiens
gacagggagacaaccaaccagcagcagaccaacccaagcaccacgcaag

SEQ ID NO: 177335 - RNA, 82 nt, Homo sapiens
ccagggaaggcggcccagcagcgagacacagccggccaggcgccgcacccacaggaacgccgcggagcagagccagggcgcc

SEQ ID NO: 177336 - RNA, 82 nt, Homo sapiens
cgcaaccggcgacagccccaaggcaacaagcccacccgaaaccacaaggccgaagcaccaccgagggagagcccagccaggg

SEQ ID NO: 177337 - RNA, 71 nt, Homo sapiens
aaccaaagaccccgagcgacacagaaccaccccaacagggaagaacgcaaagcgaggcaacaaacgaacca

SEQ ID NO: 177338 - RNA, 83 nt, Homo sapiens
cgagccgagggaggggaaaggcgcagggcgccgaccccgacagaacgggccccgcacccgcggccccggggcagcggaggccg

SEQ ID NO: 177339 - RNA, 75 nt, Homo sapiens
aaggacaccgggaaagcaaaaggaacaaaaaaagcacggacacagcaagggacacggaccccggcccaagcggag

SEQ ID NO: 177340 - RNA, 77 nt, Homo sapiens
acacgggagaccgcgagggaaaggagcgggacccggaccccaggagccggaagagaaaggccccagcacacccccag

SEQ ID NO: 177341 - RNA, 74 nt, Homo sapiens
aggggggcggccgggggggaagggacgacagcccgaagaccccgagccgagggccgagcccgacgcggccagaa

SEQ ID NO: 177342 - RNA, 79 nt, Homo sapiens
aaagacaaaaacgggggagcgggaccgacacagaaaagcagggaccagccaacgcaggcggagcacacggcggaagcca

SEQ ID NO: 177343 - RNA, 50 nt, Homo sapiens
gagccggccaggacacacaggacaccagaggaccagaacccacgagaaac

SEQ ID NO: 177344 - RNA, 76 nt, Homo sapiens
acccacacccccccccaccgcagcagcacccgacagccccacacaaggagagcaagcagggagggcccacgaagga

SEQ ID NO: 177345 - RNA, 85 nt, Homo sapiens
cccgccgagcacaggcgaccggccacagccaggcccgagcgcggaagaaaccgccgagagaccggcaagcgggagcgagagaagc

SEQ ID NO: 177346 - RNA, 78 nt, Homo sapiens
gaagccaccgacaggcccgagggcccgagagcaccgcgccagacagggagcacggcccaggcagccaagaaggcagag

SEQ ID NO: 177347 - RNA, 73 nt, Homo sapiens
caaggagcagacgagaaaggacgaagcagccaggcccagacagccgccgaagaaaagcccagggagcccccca

SEQ ID NO: 177348 - RNA, 85 nt, Homo sapiens
gcaccgagaacacacccaacacaccagccagcccgaccagacagcaccaggcccgaagcagaaaacagagggaaagaaacagccc

SEQ ID NO: 177349 - RNA, 78 nt, Homo sapiens
cgccgcccgccccgccgcccgccgccggccggcgcgcgccccacagagaggggcgaaaacgcggaagcggagacacag

SEQ ID NO: 177350 - RNA, 76 nt, Homo sapiens
cgcgcgccgcagcgccgccgcccgcggaagggagcccaagcgcagagccaaaagaaacccccaaaaccggaagaaa

SEQ ID NO: 177351 - RNA, 33 nt, Homo sapiens
gcccaaccgcccgggccccgggggcgccgaggg

SEQ ID NO: 177352 - RNA, 66 nt, Homo sapiens
aacgaagaaacagacacaacagagcagaagcgggaaaacggcacaaggcgacgagggagggcagac

SEQ ID NO: 177353 - RNA, 68 nt, Homo sapiens
gacaagggcagagggaacaggcagcaggaagcacggcgggcgaaacaggggggacagaggaacgacca

SEQ ID NO: 177354 - RNA, 77 nt, Homo sapiens
cagcaccccagggaggaaagccacagcgggaggaccgggaaggcaggaagcacagaagagccacccgccgggggaac

SEQ ID NO: 177355 - RNA, 50 nt, Homo sapiens
agcgcaaggcaacgcgagggccacgaggggaccccaccacgccgggacac

SEQ ID NO: 177356 - RNA, 74 nt, Homo sapiens
gagccccggcccccgaacacccagggagccaacgggagacaaaggacaggcagaaaccagaacaggcaaagggc

SEQ ID NO: 177357 - RNA, 80 nt, Homo sapiens
gacgggcagcagcgcgacccgagccggcgcccgggccggccaggacgacccgagacgaagaggagcagaaccagaaggga

SEQ ID NO: 177358 - RNA, 76 nt, Homo sapiens
cgggggaggcagagcgggcgcgccacggccacacgcccagcgagcgccccacacagggacagccggaaacagcggg

SEQ ID NO: 177359 - RNA, 42 nt, Homo sapiens
ggcgggcacggcccgcacgagaagagcgaaagccagggggcg

SEQ ID NO: 177360 - RNA, 76 nt, Homo sapiens
gggaacgggaccaaaaggaacagcggaaggggggcccaaccggcaccccgaaggaccggagcggagcagccccaag

SEQ ID NO: 177361 - RNA, 61 nt, Homo sapiens
ccgcgcgccaagaccacggccgccggaggggaagcgggacagacagagaagaacagagggg

SEQ ID NO: 177362 - RNA, 86 nt, Homo sapiens
caaccagagaagagcggagaggaacagaaggcggaggaaacgcagcccccaaaggaaagccgaccaagacggcaccccaacacaca

SEQ ID NO: 177363 - RNA, 71 nt, Homo sapiens
gaagacggaaacgaggaaaccgggaaagccaccgaaaagggcgaagcgagaaacaaggcaggaaaacacac

SEQ ID NO: 177364 - RNA, 54 nt, Homo sapiens
ggagccagacggaccaaaagcacgagcaagcccccaacaccagcaaccccgggg

SEQ ID NO: 177365 - RNA, 84 nt, Homo sapiens
cgaaccccgggcagcccgggaaacccaagcagaaaggagccagagaccaggagccccagagagcagagccccccacagaagagc

SEQ ID NO: 177366 - RNA, 110 nt, Homo sapiens
acggacgggacggcaagcgggcgcgaccgaggacagagccaaggccccgaccccaggccccaacgcaaccagacacggacaggagccagcagaagagagggaaagaacag

SEQ ID NO: 177367 - RNA, 73 nt, Homo sapiens
acgcagcccgaacccgggccaagcagccccgccccagcccccagagcgggacaaggccgggagaagcacggaa

SEQ ID NO: 177368 - RNA, 44 nt, Homo sapiens
gcggaacacaccgacgaagccagcccgcaggcacacggggcggg

SEQ ID NO: 177369 - RNA, 71 nt, Homo sapiens
acgaacaccaagccccgaagcacacagaaagaaagcagagagcgaagacgaacaagaaccaagaccaggaa

SEQ ID NO: 177370 - RNA, 78 nt, Homo sapiens
ccgcccagccccaagagcgggacacagcgagaccagacccagcggaccagagaacgcaccagcccgagggcggcccca

SEQ ID NO: 177371 - RNA, 77 nt, Homo sapiens
ccggacccaccccgcgccggggccacggacacaacgaggccacgggagacgcgaaggagacccaaagcaggcggagg

SEQ ID NO: 177372 - RNA, 79 nt, Homo sapiens
agacaaaacaggaacccgggagcacaaagaagaccggcaagggggcagacccaaaggaaacgcacgaaagaaacaggag

SEQ ID NO: 177373 - RNA, 90 nt, Homo sapiens
cgccgaaggcgggaagggaagcggccaaggcacggaggccgcggccacccagaggagaaggccaccccgccggaggcacaggccagaggg

SEQ ID NO: 177374 - RNA, 59 nt, Homo sapiens
gccacacgcgacgggggagccgcggggaaaggaggacaaaaggaaaaaaaaaaagggaa

SEQ ID NO: 177375 - RNA, 59 nt, Homo sapiens
gggccagccccaggcaggggaccggggcaccgccgacggagacagccacaacgacccag

SEQ ID NO: 177376 - RNA, 80 nt, Homo sapiens
cggaaacaagaagcacggggccggaggaaaccaggcagccggaaacggacacaaaaacgaagacgaggaaacggccgagg

SEQ ID NO: 177377 - RNA, 70 nt, Homo sapiens
aaaaaacggcggaaaaaagcggagaagaggaacaggagacagcggagaaagagcccgggaagcacgaagc

SEQ ID NO: 177378 - RNA, 84 nt, Homo sapiens
ccccccagcagggaacgagacacagcaagaaggccccaccagagcgagcagagccggcaccagccgggaccccagccccagaac

SEQ ID NO: 177379 - RNA, 81 nt, Homo sapiens
caagggaaggagcccggaggggagggaagagacaggaagagggcccaggcagaggaaggcggaaggagccggaaggaccac

SEQ ID NO: 177380 - RNA, 70 nt, Homo sapiens
agaaaccggacgcagaaagagagggaaacacaaagaagacaccagaagggccagcaccacgacaacacgg

SEQ ID NO: 177381 - RNA, 80 nt, Homo sapiens
cggagccccgacgcagccaaggagaggcagaaagaccaaagggcgacccaaccccagagcaaccaggcccaggaagaggg

SEQ ID NO: 177382 - RNA, 77 nt, Homo sapiens
caaccaggcgggaccgcggccgagcgccggaccagcgcgagcgccacggcacggccccacccgggcacaccgagccc

SEQ ID NO: 177383 - RNA, 52 nt, Homo sapiens
cgacggcgccaccacagaagcccccaacagccagcagcaaaaaaacgcacac

SEQ ID NO: 177384 - RNA, 75 nt, Homo sapiens
gggccgggcaagacggcgaagcgcgcgccgcgcccggaccccagggacagaggaaacgagaaaggacgcagaaac

SEQ ID NO: 177385 - RNA, 73 nt, Homo sapiens
aaggagccaggaaggaggaggaaaaaaggagcaaaaggaacacaaaacgacagggagaaaaagcaaagaagac

SEQ ID NO: 177386 - RNA, 81 nt, Homo sapiens
agggggaggaagcgcccggacgcgacacccgagccggccgaacaccgggagaacggcccaaggaagacaaccacgcaaaca

SEQ ID NO: 177387 - RNA, 74 nt, Homo sapiens
aggggagcggcacccgccgccacccacaaggcacaacaggaaggaggaaaagcccgccaggagcacggccggga

SEQ ID NO: 177388 - RNA, 77 nt, Homo sapiens
cagaaggcgcccagagaaggcagaaccagcgagcaagggcaaggaagcagcggagaagcgaaggaacggaacgaacc

SEQ ID NO: 177389 - RNA, 77 nt, Homo sapiens
gaggcgggggaccggccggggagagcaaaaccagcaccacgcggcagggaaagccaaggcagacagaggaagaagcg

SEQ ID NO: 177390 - RNA, 79 nt, Homo sapiens
gcgacggcgagccagacacgcgcccgccacccaggaggaaggagcgggagccaagggacgccaagaggaaccagcaaag

SEQ ID NO: 177391 - RNA, 67 nt, Homo sapiens
cggaaaaaaggcaaagaccaagacaacggcaagagaagaagagagggcgaaggaggccacacagaag

SEQ ID NO: 177392 - RNA, 57 nt, Homo sapiens
ggggggacagcaggcgagacgaaagcgaaaagaaacagaaagagacaggacaaacga

SEQ ID NO: 177393 - RNA, 74 nt, Homo sapiens
cccgcgcccagcgcaacggaacagagacgccaagcccgggcccggaggcacgagacaccagaagaaagggacca

SEQ ID NO: 177394 - RNA, 104 nt, Homo sapiens
aagaggcggccaaggggacgagcaaaggaagcgcgaacagcagcgcagacaagcagaccggaagaccgacggaagaccacaccccgagggagcccaggacacca

SEQ ID NO: 177395 - RNA, 81 nt, Homo sapiens
gaaggagcagcagagagccgggccagagccaggggccgggagggcgccaggcgaggccggaacccccaccacccacaggag

SEQ ID NO: 177396 - RNA, 57 nt, Homo sapiens
gccccgccgaccggaccgcggccccagaagcacccgaccacgagaggagaagagcag

SEQ ID NO: 177397 - RNA, 52 nt, Homo sapiens
caaggggcaaaggccccgcggacccgggccagccgccggaacccgaacgggc

SEQ ID NO: 177398 - RNA, 77 nt, Homo sapiens
aaaagcacagcacggaagaccaaaagaagaggcacaccaagcaaagggaaagaaaacaagccacccagacaagagga

SEQ ID NO: 177399 - RNA, 68 nt, Homo sapiens
gagacagccgaacgccggaagcacaagaggggaagggcaaaccaggagcagagaaggcaccagccggc

SEQ ID NO: 177400 - RNA, 58 nt, Homo sapiens
cagaggcaaaaggaaaaaaccaaacaagcaggaaaagggggcccgggccggaaagcgg

SEQ ID NO: 177401 - RNA, 63 nt, Homo sapiens
cccaacaaggggagagcgaaaagagcagaggcaggaaagggcaaaggaaggagcggaggagaa

SEQ ID NO: 177402 - RNA, 72 nt, Homo sapiens
gacaaacaggcccaaagaaaaacgaggggaaagaaccaacgacccagagggaacgggcgacgaagcggcgaa

SEQ ID NO: 177403 - RNA, 39 nt, Homo sapiens
agcgggcggcagccagccagacccacccagggaaccccc

SEQ ID NO: 177404 - RNA, 56 nt, Homo sapiens
cacccaggcgggccacagcgccaacagcaacgcggaccacgacaagccacacaaga

SEQ ID NO: 177405 - RNA, 35 nt, Homo sapiens
cccagagccggggaagacagccgaaggaacgcacc

SEQ ID NO: 177406 - RNA, 56 nt, Homo sapiens
ccaccgcaagacagggaagcagaggaaaagaagccgggcggaacgacgccagcgcc

SEQ ID NO: 177407 - RNA, 71 nt, Homo sapiens
ggggaccgagcggagaggagagcacacggcaccgagggaggaagcccacgcgagagacggggcggaagcac

SEQ ID NO: 177408 - RNA, 72 nt, Homo sapiens
cgaaaggggaaccaccagaaggaggacgacagaagaacaaagaacagaggcaagaaaaaaaaaccgagcagg

SEQ ID NO: 177409 - RNA, 52 nt, Homo sapiens
gaaggcgcaggagcccggccaccacacccagcgggcgcggccgaacccagcg

SEQ ID NO: 177410 - RNA, 78 nt, Homo sapiens
ggcgggcggggaaggcggaagaggagaggagcggcgccgccgggccacggcaggccagggggcagaacagggaagccg

SEQ ID NO: 177411 - RNA, 84 nt, Homo sapiens
gaaagaaaaggaagcaacaacaaagcccagagggagccaaaaaccagacaggcgccggcaaaggggacagagcgagaagagaga

SEQ ID NO: 177412 - RNA, 65 nt, Homo sapiens
caaggacccggcgcggccccaaccacagcccgcaagccgcgaagaaccagcagggagagccggac

SEQ ID NO: 177413 - RNA, 74 nt, Homo sapiens
cgagcaaaagcccagaagaggcagagacagggcgagaagagcaggggggaggacagcaaagaagacagggagca

SEQ ID NO: 177414 - RNA, 86 nt, Homo sapiens
gggcgggagggcgaaaaaaaagaaggaacccaaagaaccaccccaaacaggaggagcaggccgggcccgccagggcacgcgcccgc

SEQ ID NO: 177415 - RNA, 55 nt, Homo sapiens
acgaaaccacgggaaccgggcagacacaaggaacagccagccaggagaaaaacga

SEQ ID NO: 177416 - RNA, 75 nt, Homo sapiens
ggagggggacacacaaccgcccagccggcgagggacgccgcaggaacagcgcaggaggaggcccggccagcagcc

SEQ ID NO: 177417 - RNA, 73 nt, Homo sapiens
acaacccagcacagcaaacccaaaagcaggcgcagaagagcaagaccgaagacaacaaaagaaaacaaagcac

SEQ ID NO: 177418 - RNA, 70 nt, Homo sapiens
ggcgggaccggcgccaccgcaggagggaagcccagaaaaagcgaacacagaagggagggacagacagcaa

SEQ ID NO: 177419 - RNA, 74 nt, Homo sapiens
cagagccaggcaccaggacagcggcggcgggccgggcagcccggccgacaaccacggcccccacagagagcaca

SEQ ID NO: 177420 - RNA, 76 nt, Homo sapiens
cccagagcagggaggggcagaacacggaggaccgcgcgggcaccgcgaccggcagccaggaacgacgggaaaacac

SEQ ID NO: 177421 - RNA, 75 nt, Homo sapiens
ggcgaggccacagaaccagccacagcggggcggagaggaacccagaagagcggagacaaaggcacaacagcaagg

SEQ ID NO: 177422 - RNA, 66 nt, Homo sapiens
gcacagggaccagggacacaacgcaacagagcaacgaagacaggacaggacggcccgcgacaccaa

SEQ ID NO: 177423 - RNA, 82 nt, Homo sapiens
aagaggagagagagggcaaccagcccccccagcccccagggacggccacccggccccgacgcaaccaggcgaagaacaaccg

SEQ ID NO: 177424 - RNA, 63 nt, Homo sapiens
gcagacagggggaggaagaagccggcacagcccaggagaagccgaggccgccagcgccaagaa

SEQ ID NO: 177425 - RNA, 75 nt, Homo sapiens
agccaccccgcagaccccccggcccagcaggacgcgacagagaggcacgacaccccagacgcccaggcacagacg

SEQ ID NO: 177426 - RNA, 77 nt, Homo sapiens
gccaccgcagcaagaggaaaggaaagaggcgggcagaacacggaggccccagggaaaggaccgaggcaggaaagagg

SEQ ID NO: 177427 - RNA, 77 nt, Homo sapiens
aaggagccccaaagacagggaggaccacgccggagcaagcaaggagaagacagcgaaaacagaaacccaaacaagca

SEQ ID NO: 177428 - RNA, 78 nt, Homo sapiens
aggcgccagaagaagaaaaaagcgccgcccagcgcgcaggaccagccaaggaagcaacacagcagcgagagaagcaga

SEQ ID NO: 177429 - RNA, 75 nt, Homo sapiens
ggggaccagccacaggaggcggccgcacaaagaggagaacgccaagccaaccgaaaaagccgacaaaaaaaagca

SEQ ID NO: 177430 - RNA, 53 nt, Homo sapiens
agaggccggcaaacggagcaccaggaagaagaggcggaagaaacaacaagcgc

SEQ ID NO: 177431 - RNA, 69 nt, Homo sapiens
gaccggagccagacgccggggaaggcggcagagcagcagcagagaaacgagcagaacaaaaaggggaca

SEQ ID NO: 177432 - RNA, 79 nt, Homo sapiens
gcccgaccccaagaccagagccgggaccccagccaggagaggagggagacggaagggaaggggaggacgaagacaggag

SEQ ID NO: 177433 - RNA, 92 nt, Homo sapiens
gccgccggcaccgccggaaccggcgcaggcggccggggccgggccggggcacggcagaggcgccaagaagagccgcgcccgaggacccccag

SEQ ID NO: 177434 - RNA, 78 nt, Homo sapiens
cgcaaaggaacggaagccgccggcaagaaccagaggaacaaagaccgacacgaaaaaaaccacgggcagggaaacaca

SEQ ID NO: 177435 - RNA, 57 nt, Homo sapiens
cagagaagcccgagcgggaggagagcgcgaagcagacgggagggacgagcaggcaaa

SEQ ID NO: 177436 - RNA, 80 nt, Homo sapiens
gcccgccgcgcggagcgcccccgcgccccgcaccagagcggggcaccgagccgggccggggcagcagaagaggacaagca

SEQ ID NO: 177437 - RNA, 84 nt, Homo sapiens
cccgagcccgccggaccccccgacccagagccgagcccggaagccggcaagacaagcgaggcgccagccgagaaaaccacgaca

SEQ ID NO: 177438 - RNA, 86 nt, Homo sapiens
cgggaggagaaaacagagcagcacagagcagcaggagggaaaagaagaaggaacgaccgaagaaggacagaacagcagagaacaaa

SEQ ID NO: 177439 - RNA, 79 nt, Homo sapiens
ccccccgggccccgagccagcccacgcagccgccccgaaggagccagggaaagaaaccagcggggcacagccccccggg

SEQ ID NO: 177440 - RNA, 79 nt, Homo sapiens
gaaagccaccacaccagacccaaggaacacagcaagccgcggaaaggcagccacagcagaggaaagagggaaagacaaa

SEQ ID NO: 177441 - RNA, 70 nt, Homo sapiens
ggcgcaaacgacaccacccgaccggaaaggaggcccaagggaggggggccggcaaacacgcaaaacaaga

SEQ ID NO: 177442 - RNA, 82 nt, Homo sapiens
agccccccaagcggccgcgagaagcagcgggggggcaggcgacgaaggaccaaaacagggaaggaagaaccaggagggaaaa

SEQ ID NO: 177443 - RNA, 75 nt, Homo sapiens
ggagaaacagagggagaacaaggaccacaaaacaaaccacccaacacaagcaaagaccacgaagccggaaaagaa

SEQ ID NO: 177444 - RNA, 61 nt, Homo sapiens
gcaggcagacaaaagggccaaagaagggagagagcccccagaaaagccagccagcccaaac

SEQ ID NO: 177445 - RNA, 91 nt, Homo sapiens
cccacgccagacgaccccacccgcgccgcgacccggaagaaggaccggggagacaggaacacgggcaagacagcgcgggcaccgccgcagg

SEQ ID NO: 177446 - RNA, 82 nt, Homo sapiens
ggagagcaccccaccacgccgggcagaaggccgaaagagcacggacccggaagagacgggggggggacggagaccggaccga

SEQ ID NO: 177447 - RNA, 78 nt, Homo sapiens
acacgccaacacaggaaaggggccaggaccaggaccccagccaccagccccggcagggcggcagcaaaaccaaaccgc

SEQ ID NO: 177448 - RNA, 81 nt, Homo sapiens
ccggcacccggcgccggaccccgagaaacagagccggaagcgaggcacgagaagcgcccagaagcagaaaggaaaccaaaa

SEQ ID NO: 177449 - RNA, 57 nt, Homo sapiens
cccagcaagccagccggaaccgaccagagaacgaagaacaagccacgcccaaaggaa

SEQ ID NO: 177450 - RNA, 84 nt, Homo sapiens
aggaccccagggagagcgggcagccccaggggacagggcaggcgccccaacccaagccagaggaggcacccaggacgcgggcaa

SEQ ID NO: 177451 - RNA, 73 nt, Homo sapiens
cgccgcgccgcgccgcaccccgagcgaccgggggcggcacggggccgggacgcacggagacagcaagaaggag

SEQ ID NO: 177452 - RNA, 58 nt, Homo sapiens
gcgccggcgaccgaggggagagggaacgcagcgaaagcggaacggaggacccgaaaac

SEQ ID NO: 177453 - RNA, 58 nt, Homo sapiens
ggaacgcagagacccccgccccgacggcccgccagagcccaagccacccgccccggcc

SEQ ID NO: 177454 - RNA, 73 nt, Homo sapiens
ggacaggagccgagaacacgggccaaccgcgcgcgaaagcgcgcaagggagagaagaagggcaggaccacggc

SEQ ID NO: 177455 - RNA, 46 nt, Homo sapiens
cgcccccagaggccgggccgcacccccgccgacggagaccgcccca

SEQ ID NO: 177456 - RNA, 72 nt, Homo sapiens
caggaccgaaaagagaaacaaagacacaggcaagagcagcagcgcaaaagggcggggaaacgagggaagcag

SEQ ID NO: 177457 - RNA, 78 nt, Homo sapiens
agaaaggagacaccagaaggcagaggaggcgcaagacgcgaccaaagccgacggggcaagcagggacgcaccaaaacg

SEQ ID NO: 177458 - RNA, 72 nt, Homo sapiens
gagcccacgaacccgaagcccccaaagagagaaccggagagcacccaacaaaggaacacgacagaaaaaggc

SEQ ID NO: 177459 - RNA, 72 nt, Homo sapiens
gcagcaaggagggacccgaacccacgacacggccggccaccgaaagacacagggagggcagccagaacgggc

SEQ ID NO: 177460 - RNA, 39 nt, Homo sapiens
ccaacaaacaccagcgcggagcaaaggggaccggacaac

SEQ ID NO: 177461 - RNA, 83 nt, Homo sapiens
cgcccggacccggaggagcccgcaccaccagaggaaggagggggacaccggggagggcgggagaacacaggcacagaagcggc

SEQ ID NO: 177462 - RNA, 79 nt, Homo sapiens
cgggccccacgggcccaaacaagcggagcggacccagggcccagccccggaaggcaggaaggggacggagacacgacga

SEQ ID NO: 177463 - RNA, 79 nt, Homo sapiens
cggcgcgcccagaagaagggaaggcgcgaggaggaaaggaggacgagggcccgggaggaggcggacaaggggacggcac

SEQ ID NO: 177464 - RNA, 64 nt, Homo sapiens
gaccagagaaggaggagggaccacgcgcgagagcacggcccccggagcggggagccccaaccga

SEQ ID NO: 177465 - RNA, 77 nt, Homo sapiens
ggagagcaggagccacgagagaggaggcgcgcgcgcgccgagccgcgggcccgcaggaagaagagagggcgaaggag

SEQ ID NO: 177466 - RNA, 89 nt, Homo sapiens
acagcaagagaaccccagggggccgcaggcaagcagagagaggcaaacccagaaaagcaagccggggccgacccgggacacgagacgcg

SEQ ID NO: 177467 - RNA, 68 nt, Homo sapiens
gcgcaggagaaggcagagcgacccaggcacaaaaagaagggagagcaaagacacagacagccaccgac

SEQ ID NO: 177468 - RNA, 72 nt, Homo sapiens
cggcccagcccaaacgggcagcgaaggagcaaggggaacaaagcggcaaaagaacccacaaaaaaagccaca

SEQ ID NO: 177469 - RNA, 84 nt, Homo sapiens
cgaaggacgccggacaacccccacacggcgcagcggagggccccaaggaaaacgccagcagagccaagaacaccggaagaacag

SEQ ID NO: 177470 - RNA, 51 nt, Homo sapiens
accccagaggaaccagacgcgaaccagaaagagggcaacaacaaggcgaca

SEQ ID NO: 177471 - RNA, 74 nt, Homo sapiens
aggaaacacaacgagaaggagcacccagaaagacgaaaccaaaaaggagaagagcgccaggaccaagccaccgc

SEQ ID NO: 177472 - RNA, 81 nt, Homo sapiens
agaaccccaaaaaaagaacagagcgaagggaagggagagcgaaacgagaacccaggacaagaaacagcacggaaaaacagg

SEQ ID NO: 177473 - RNA, 53 nt, Homo sapiens
agaggagagcgacgagaaggccagcaacagaagaaagcaagcaccggggaaag

SEQ ID NO: 177474 - RNA, 70 nt, Homo sapiens
ggacaccacaagaagggcgccaggcgggcgcggacggcaggggcgccggggaacccgcgggaagaagcaa

SEQ ID NO: 177475 - RNA, 74 nt, Homo sapiens
gaagagaccaacacagagcagcggaaccagacaggcaggaaaagacagggagacagcacggagaaaacgcacgc

SEQ ID NO: 177476 - RNA, 82 nt, Homo sapiens
gggggacggccggcggcacccgcacccggggacaagcgcgggaacggcgcggaagcaggaggcaaagggaccccaagaaacc

SEQ ID NO: 177477 - RNA, 78 nt, Homo sapiens
gggggagggcgcaggcacccggcgcaaaaaggagaaggcagagcccccccaggcagaagcccgagcgggaaccagcga

SEQ ID NO: 177478 - RNA, 80 nt, Homo sapiens
caccagaagaacgcgaaggcccgccacagagaaaaaggagcacacagcaacggccaaacacacagagcgaaaccgggaag

SEQ ID NO: 177479 - RNA, 74 nt, Homo sapiens
ccgagaaacaccgggcgggccccgggcgagcggggccaaaagcaaacgaccaaagacaggaagaaaccaaaaga

SEQ ID NO: 177480 - RNA, 65 nt, Homo sapiens
cggaagacgcagacgcagaccgaccagaggaaggaaggacaagaggagcagcccgcgaacacaca

SEQ ID NO: 177481 - RNA, 85 nt, Homo sapiens
ccgagaccaccgaggagagccggaaacgaaggaggcccaaccacaaaaggagccgacggaacccagacggagaacaaaaggaaga

SEQ ID NO: 177482 - RNA, 66 nt, Homo sapiens
ccagccagaccagggacccaacggaaacagaacgccaaaagcaggcgcgggacaaccaacacaacc

SEQ ID NO: 177483 - RNA, 51 nt, Homo sapiens
acaaaaggcagaagagagcacagaagagggaggagcgccaaagaaggaccg

SEQ ID NO: 177484 - RNA, 64 nt, Homo sapiens
agaaacagggggaaccgacccaacccccagacccacacaccgaacagagggccaaacagaagag

SEQ ID NO: 177485 - RNA, 67 nt, Homo sapiens
ggcgcgcgcgcccccagccccaagaaaggggggcgaagacagcaagaaccgcaaggccaggagcgag

SEQ ID NO: 177486 - RNA, 72 nt, Homo sapiens
agagcgaggacgccggcaggcgcccggcggacacaggacggccaccaggcagcaagacccaggcggaacccc

SEQ ID NO: 177487 - RNA, 81 nt, Homo sapiens
aacaccagcgcaagccaaagccacaagcccacagggaacccagacggggaggggacacccgcggacgggaaggaagcaggg

SEQ ID NO: 177488 - RNA, 71 nt, Homo sapiens
agggggaacagagggcaagaggacgccacaaacacccaccacagcagaggcacagccagggcgaaagaaga

SEQ ID NO: 177489 - RNA, 60 nt, Homo sapiens
gggaaacaggcgaggcggcggcgcccggagggcagcgaggaagccagcggagcagaggcg

SEQ ID NO: 177490 - RNA, 72 nt, Homo sapiens
acagagaaccgggaacaggcggacggccagcccacacagcccagccaacaggcaaggccccggggcaccagc

SEQ ID NO: 177491 - RNA, 73 nt, Homo sapiens
aaggcagcccggcaacgagccccgaaccgaacagcacccagacagagccgcccaagaaccaagggaaaagaca

SEQ ID NO: 177492 - RNA, 79 nt, Homo sapiens
ggacgacgcccggcgccagcacacgcagacaagagagggcggcagaaggaacaccgagaaaccgcacaccggagacggc

SEQ ID NO: 177493 - RNA, 76 nt, Homo sapiens
cggggccgaaaacaacgacaacgagcacagagcacaacagggagaagacagcaagaccccgaaccgagcagacgag

SEQ ID NO: 177494 - RNA, 61 nt, Homo sapiens
aacaggacgaaaaaagggcaagaagccagaagaccgggagaagacaggaagaccggaaggc

SEQ ID NO: 177495 - RNA, 69 nt, Homo sapiens
aggccgcccccacgggggagcacccagcccacccagcgaaccggccaggcagaccgggacgaagacaga

SEQ ID NO: 177496 - RNA, 81 nt, Homo sapiens
gcccagcagccgagggcgggccgaggcggaaaggggggcccacgagacgcgaacaaacgccgcgccgccagaagaacagac

SEQ ID NO: 177497 - RNA, 119 nt, Homo sapiens
cccgaaccaggcgagacgcggggagacaagcaccccaccaaggggacgacagcgcgagggagacccacgcaaggagagaagcacaagaacacgcaagcaaagaaaacccacgaccgagc

SEQ ID NO: 177498 - RNA, 74 nt, Homo sapiens
gggaaacaaggcccaggccaaggaacgaagcccgcagcgaggggggagagcgccgggggagggaagcaggggac

SEQ ID NO: 177499 - RNA, 89 nt, Homo sapiens
agacagccccacccaaacaggcgcccgggagcgggggaaaacagcaaagcagccccgaggagcaccaacgcccagaaacagcaacacgc

SEQ ID NO: 177500 - RNA, 59 nt, Homo sapiens
ggaaaaccacaaccgagaccgcaggcagaacgaagaacaaggaaccaaggacacaacag

SEQ ID NO: 177501 - RNA, 77 nt, Homo sapiens
aaacccagcagaagacaggccaacaaaagggccagccaagccgggagggaacgacgcagcaacgacacaagcagaac

SEQ ID NO: 177502 - RNA, 81 nt, Homo sapiens
gccagagacccgcgaaaccgcaccgcaaaccaacgcgggccgggcaacacgcagccgagcgaagccacacacagaagaccc

SEQ ID NO: 177503 - RNA, 78 nt, Homo sapiens
caccagaaaccaggccaggagagccgagagcacccgcaccaagagaagacccgaggacccagaaggaaaccgacccag

SEQ ID NO: 177504 - RNA, 75 nt, Homo sapiens
acgcgggggagggccggccgcagaaacagcgcgaacgaagaacagacacgagaacaaagagaacagcagcagagc

SEQ ID NO: 177505 - RNA, 56 nt, Homo sapiens
cgcacgaggcccagaagcacgcacaaaaaaacaccgggaagggccagagaggggaa

SEQ ID NO: 177506 - RNA, 79 nt, Homo sapiens
gaaagcacaaaagggaaagagacggagaaaagaagaacacgcccaaaacgagaaagcacagcagacagaaccacacacg

SEQ ID NO: 177507 - RNA, 83 nt, Homo sapiens
gcgacagaggccccgcaaagcggcgcagccgggaagagaggcagcccgcggcgccgaccacgccaagagagagggacccaaca

SEQ ID NO: 177508 - RNA, 79 nt, Homo sapiens
ccgcacccgcacgaccccgagccgcagggaggggcgaccccggggcccggccagcacgaccgaggaggggcggacagcg

SEQ ID NO: 177509 - RNA, 76 nt, Homo sapiens
caccacagcacccagcagccaagccgccacgcccacagaggccccaggacaaggggaccacgaccaccacgcgagc

SEQ ID NO: 177510 - RNA, 94 nt, Homo sapiens
gacgcacggaaagcagcgcaggagccaagaccacagcagcacccaggaagcggacacaggaaaacgagaagaggcaggcaagcaaagagcagag

SEQ ID NO: 177511 - RNA, 71 nt, Homo sapiens
agcggcgccccgccaccgccagccgcacacaaaagagggacaacacaagccacagcgcccaggcccagaga

SEQ ID NO: 177512 - RNA, 71 nt, Homo sapiens
ggaagcacggcgggcgaaacagaagacaagccgcaaagcgccagaccagcgaggaaaaaagaccccagcaa

SEQ ID NO: 177513 - RNA, 75 nt, Homo sapiens
agagacccgacgacggaccgcacacggagaaggaagcccgggacagaccggagcggggaggagcgccggccgaaa

SEQ ID NO: 177514 - RNA, 74 nt, Homo sapiens
gggccggcaaaaaggacgagagaggagcgcgggccgagagcggagagcgggacgcaaggaggaggacggacagc

SEQ ID NO: 177515 - RNA, 76 nt, Homo sapiens
caaccccacagacacacgaccccgagagaaacggcgagaaaaccaaacaggagccgacagccggagaagggcaggg

SEQ ID NO: 177516 - RNA, 75 nt, Homo sapiens
gcacagacacagaggccaggaaggggacacagccagggcgcaggcagcgcccaacaacacgggaaagaagaacag

SEQ ID NO: 177517 - RNA, 59 nt, Homo sapiens
gaggaaaagcgcgccaaaaggacagcggcagaaagaccggcagacaggccaagccaaga

SEQ ID NO: 177518 - RNA, 56 nt, Homo sapiens
aaagaaagggaaaacgagaagcacacagaagaggcaagcagccaggagccggacga

SEQ ID NO: 177519 - RNA, 70 nt, Homo sapiens
aggccaccacagaaacaaaagcaacaaagaggcggagcaacaccccgcaccgggaaccgcggaacccgca

SEQ ID NO: 177520 - RNA, 78 nt, Homo sapiens
aaacaaaaggaacagacaaaaggacgaaacccacggcgacagagacggccagcccaacagaaaaggacaggaccggaa

SEQ ID NO: 177521 - RNA, 81 nt, Homo sapiens
ccggagagacgaaccgaagcgggcgggcccccccacccagagaccgggaagccggaagcaggacgccgcccgaagcgggaa

SEQ ID NO: 177522 - RNA, 101 nt, Homo sapiens
aacgcacaaagggagcagggagaggagcgggaaacgggagggaaccagcaacaagccgggggagcgggccggagagaagagaggggcgcgaggagaaggaa

SEQ ID NO: 177523 - RNA, 70 nt, Homo sapiens
gaaacacccgggcaggggagcagaagccggccccgggcgaagagccggccgccgcgcgcccgacacagaa

SEQ ID NO: 177524 - RNA, 66 nt, Homo sapiens
gcagcacgccaaagcgggccaaccacacagcacgacacaggacagggaagaagccaaaacagaagg

SEQ ID NO: 177525 - RNA, 67 nt, Homo sapiens
gccaaaagccaccgagggagcgaaaaccgggccaggagcgcagaggacagggcccgccaacggggaa

SEQ ID NO: 177526 - RNA, 55 nt, Homo sapiens
cgaagagaacagggccggggcacgacgacccaacagcaagagcccaaaaggcaga

SEQ ID NO: 177527 - RNA, 81 nt, Homo sapiens
acacagggggaagccaagcagaacaagcagagagaagggaagaggcagaacgcaagcaaagaacgccaaagcgaaagaagg

SEQ ID NO: 177528 - RNA, 51 nt, Homo sapiens
cgacacaaggaaacaaaaaccgaggccagaaagaccaggccagagagcacg

SEQ ID NO: 177529 - RNA, 71 nt, Homo sapiens
ggcggcgcagacagcacagcacagagaaagcacaccaggaaagccacccgcgcgcaaaggagaaacaaccc

SEQ ID NO: 177530 - RNA, 83 nt, Homo sapiens
agagagaggagagcaagaaaccggagcggagaaggacccgaaagaaagcagagcagcacaagagccacagaaagaagacaccc

SEQ ID NO: 177531 - RNA, 71 nt, Homo sapiens
gccagccccacgcaccaccaggaaaagcgcagagagagaagagagagggaaagaggcaagaccggaaaggc

SEQ ID NO: 177532 - RNA, 65 nt, Homo sapiens
cggggaagaagaacagaaccaccggccaccaagcacaaccggggaggccgcagcaaggacagcga

SEQ ID NO: 177533 - RNA, 76 nt, Homo sapiens
ccgaggcgacaggaccaaagaaagggggggaaagaaaagaaagcagagcagaccacgaaaaaacaaccaaagagag

SEQ ID NO: 177534 - RNA, 73 nt, Homo sapiens
aaaaacacgagagcgaccaagaagcaagcgcagcgaggggagccaaccccagaagaagagccgaacaagaccc

SEQ ID NO: 177535 - RNA, 70 nt, Homo sapiens
caacgagcggcgcggacggcgcgcggacaccaggagaaagaggacacggccgacagacagcgggccgggg

SEQ ID NO: 177536 - RNA, 76 nt, Homo sapiens
cgagagcgccagaggggaaaaaagcagaggccagggcgccgggaggggggggggaccgagcaacacccggaaggca

SEQ ID NO: 177537 - RNA, 70 nt, Homo sapiens
cacagggaaagggcggccagacccaccacagccaacggcacaggaaccacgaccacggcccgcccaagcc

SEQ ID NO: 177538 - RNA, 55 nt, Homo sapiens
cgaaccggaaaagaagcacagaaccaaacagcccgcgcccccacgcgggcccccc

SEQ ID NO: 177539 - RNA, 57 nt, Homo sapiens
aagaggcccgcgaagacaaaaaacccaagaacccaaggcccgacacccgcggacgca

SEQ ID NO: 177540 - RNA, 74 nt, Homo sapiens
cgccgcgggccgcaggccgcgagcagcggacgccggccgccgcaggagagggaaggaacaccccacgacaagcg

SEQ ID NO: 177541 - RNA, 57 nt, Homo sapiens
gagcggccaggggaagagggcccaggccgcccacaaccggacccaaaacagccaccc

SEQ ID NO: 177542 - RNA, 82 nt, Homo sapiens
gggcgagcggggcgcgccgcagagcggcaccgaaggacaggagccaaagccgcggagacagggcagaaaaagccacagcaac

SEQ ID NO: 177543 - RNA, 87 nt, Homo sapiens
aaacaaaggacggaaacgccgaggaacccggcgaggcggcaggaggaccgcgccaacaggacgaggagaccgaccaggagaccccag

SEQ ID NO: 177544 - RNA, 54 nt, Homo sapiens
ggacccccagcgaaacacaaggacgagaaccaccaccccagccacccaacacca

SEQ ID NO: 177545 - RNA, 63 nt, Homo sapiens
ccgagaggcaagaagccagccaggaggcgcgcagcagaccagcaggccaccaggcaaccgcag

SEQ ID NO: 177546 - RNA, 88 nt, Homo sapiens
cccgggcggggcagagcagcccccagccagccgcgagggcccagcaccagagggccggacccccgccggccgggagggccggcagccc

SEQ ID NO: 177547 - RNA, 76 nt, Homo sapiens
ccccgcagccgcccgggcccgccgagacccaagaaggggaggaccaggaggaggaagaggaggaggaggaggagga

SEQ ID NO: 177548 - RNA, 66 nt, Homo sapiens
cgcaacaagaagaccagcacaagacgcagaaaacagacacacagcggagacaagcagggccggcag

SEQ ID NO: 177549 - RNA, 56 nt, Homo sapiens
gggacaaaaccccgaaaaaggcgaggagagcaaaagacaacacccagaaacagaaa

SEQ ID NO: 177550 - RNA, 68 nt, Homo sapiens
gaccaaaaacaggaggaagcccagggaacggcgaaccaccacgaacggggcccgcgaacgggaaagca

SEQ ID NO: 177551 - RNA, 74 nt, Homo sapiens
gaaccacggaaaggaggaagaagacaccggggacagacaggagggaaaccaaagggcagccagaccacacgcaa

SEQ ID NO: 177552 - RNA, 82 nt, Homo sapiens
gaagggggcaaggaggagaagcggcacggccaaccggcacgggagaaagcagaacaagcgggagccggcaggaaagcagcag

SEQ ID NO: 177553 - RNA, 78 nt, Homo sapiens
ccccagcagccccgcggggaacgcgccacggaccgcgggacaagaaaacagcgagagcaaacggaagaacagaaggcc

SEQ ID NO: 177554 - RNA, 58 nt, Homo sapiens
gaccagagaaaaggcacagaacacccaggaccgggggccgggcgaggaggccgggaga

SEQ ID NO: 177555 - RNA, 79 nt, Homo sapiens
gcggaagggaaccggaggggggcccgggggagcggaaacggagggagcaggccacagaccccaccagcacgaagggaca

SEQ ID NO: 177556 - RNA, 68 nt, Homo sapiens
aaacaaacaaaaaaggacaagcaaaggcgggcacaggagcgaaccagagaaaaaggcccaggaagaca

SEQ ID NO: 177557 - RNA, 81 nt, Homo sapiens
ccaccaaggcgaggacaagccccccgggcagaagaaacaccaccagcgagcaccccagagagagccaacacacagagaacc

SEQ ID NO: 177558 - RNA, 55 nt, Homo sapiens
gggacaagaagggcaaagccgaagcgcaagacaaaaacaaagaagaaaaggccaa

SEQ ID NO: 177559 - RNA, 64 nt, Homo sapiens
gccgcagaagcgcacagccaaaccacacgcggcagggagaagaaaaccaagccacaaagaaaac

SEQ ID NO: 177560 - RNA, 70 nt, Homo sapiens
cacagaagaaccgaacccaaacgagcacaccgaaccagacagaaggacagagaagaacccagaaaaaagc

SEQ ID NO: 177561 - RNA, 79 nt, Homo sapiens
gggccggaagcaccgcacaccacacccgcgccgacagggcgaaccgaccaagaacaacacccagagggccaggagaagg

SEQ ID NO: 177562 - RNA, 75 nt, Homo sapiens
aagccggacagggcccgcggacacgggccaccacaggaagccccagccacgcaaaaagaggggccggacaccaaa

SEQ ID NO: 177563 - RNA, 55 nt, Homo sapiens
agccagacagcgaagaagggaaaaaagagggaaaaagagagaggggcgccagggc

SEQ ID NO: 177564 - RNA, 65 nt, Homo sapiens
aaaaacgaaagccagcccgacagaggcacaaaaggagaaagcagaagaaacaggagaaagcaaaa

SEQ ID NO: 177565 - RNA, 75 nt, Homo sapiens
acggccacagccgccgcagacccagcagccaagagggaagcagacgagagcaagaacaaagggagaaaaagaagg

SEQ ID NO: 177566 - RNA, 55 nt, Homo sapiens
ccgcgacggaggccgcggggcggcagaccagggggggcccggcgaacagccgagg

SEQ ID NO: 177567 - RNA, 81 nt, Homo sapiens
gaacagagaccaggaaaccgacgggacaacggggcaaagaaaaaggagagaaaaagaggcaaaacaacaagaagaaaagag

SEQ ID NO: 177568 - RNA, 84 nt, Homo sapiens
gcggggagcccgcacgagcagcgaacaggagaacacgagacccgcacaaaaccccgccccccaggccacacaggggccgagacg

SEQ ID NO: 177569 - RNA, 79 nt, Homo sapiens
aagcccagggcagaggccggacggcggaagcgggcgagggccgggacaacaggcacaaagagagaaggaacacccacag

SEQ ID NO: 177570 - RNA, 56 nt, Homo sapiens
cacacggaggccgcggcccccacacaggagaaaagccaccaaccccaaccgccagg

SEQ ID NO: 177571 - RNA, 83 nt, Homo sapiens
aaacccagcggcccagccggaaacgaaggaggcccaaccacaaaaggagccgacggaacccagacggagaacaaaaggaagaa

SEQ ID NO: 177572 - RNA, 80 nt, Homo sapiens
cagccccagagacggccgccccgaagaagcgcaacggcgccccgagcccgcgaccaacacacacccagacccgagggcac

SEQ ID NO: 177573 - RNA, 78 nt, Homo sapiens
gcacacacaggcgcgaaacggaaaaagagccccacggaaacacggcgagagggaccagcagagcaacagggcaaggcc

SEQ ID NO: 177574 - RNA, 84 nt, Homo sapiens
gagaccagccaccacaagcccaaagggagcagggacggggggaaaagcgcacccgggcccgggcgagaaagaagacaccaaagg

SEQ ID NO: 177575 - RNA, 73 nt, Homo sapiens
gccgccccgccacaccgggcgccccaggcgcaaaacccgagaaagggcaaccggagaggagcggaagacccgg

SEQ ID NO: 177576 - RNA, 79 nt, Homo sapiens
agccggagaggaagaacacgagaacgcgcaggcacggcagagagaagaaagaaagaccccccaccccgaaaccaaccaa

SEQ ID NO: 177577 - RNA, 58 nt, Homo sapiens
caacaaggaacagaccccgacccagaaaacgaggaaagaaaacaagccacccagacaa

SEQ ID NO: 177578 - RNA, 71 nt, Homo sapiens
agcgaaggcgcgagggacaagagcagaacaacggcaagcggagaagagcaaggccgaaccgagaggaaggg

SEQ ID NO: 177579 - RNA, 76 nt, Homo sapiens
gcaacagggacaggaaagggcacaaggaaggccccgagccccggccccaaagacccaaaacagagacaccccccag

SEQ ID NO: 177580 - RNA, 71 nt, Homo sapiens
gagacgggcccccaaaaagcggcaaaagcaagagaacagggggaaaggcaagggagccagagccacagggg

SEQ ID NO: 177581 - RNA, 80 nt, Homo sapiens
gggcgcccccacgcgggccgggggcgccggccacagcgaggcgacaggccggacacaaccacaaacgagccacgccaaag

SEQ ID NO: 177582 - RNA, 72 nt, Homo sapiens
gaggcccagaaacgggccgcgccaccaagggggacggcgcgaagaagagaagacaggaacggcaaagcaacc

SEQ ID NO: 177583 - RNA, 67 nt, Homo sapiens
cccagaaaccacgggaagagacaccacccacggagagaaccccaccccggcggggcggacacccaac

SEQ ID NO: 177584 - RNA, 79 nt, Homo sapiens
cgcccaggagcggaacaacgcggcgagcgggggcgggagggaaaccgccaaagccaccagggaaagaaaacaccacacc

SEQ ID NO: 177585 - RNA, 77 nt, Homo sapiens
ccggcccacacgggaagcgcgggaagggaaagggagaacgaccaggagcggccgaggaccgcgcggagccagaaggg

SEQ ID NO: 177586 - RNA, 52 nt, Homo sapiens
gagcgggaggacgacgagagagcacccagagggccacacgggcaggacaccc

SEQ ID NO: 177587 - RNA, 77 nt, Homo sapiens
gggacgcggaaccagcggagaaacgcgagagggcggagaacggaaaagcaccaggaagcagagaggaccgcagaagg

SEQ ID NO: 177588 - RNA, 73 nt, Homo sapiens
ggcaggcaccacaaaaaggacaggaggccaaagaacccgcgcaggggaagagggaagggacacagaacaggca

SEQ ID NO: 177589 - RNA, 79 nt, Homo sapiens
aggaaggagcagggagaagaggagcgcgaggcgacagagccaacgcaaaaccagaccaacagccacaggaccagaacag

SEQ ID NO: 177590 - RNA, 79 nt, Homo sapiens
ggcaccgcaggaaacaagcccacccagaaaaaggcccgggacccaggaaccagaacaccccaccagaccacccagcaag

SEQ ID NO: 177591 - RNA, 68 nt, Homo sapiens
ggaacaaaccgaagaacagcgggaaagaaggcaaaacacggggaccaggaggagaagcaaccagagag

SEQ ID NO: 177592 - RNA, 71 nt, Homo sapiens
aaaacggcgaagcccaccagacggagcgaaccaccgaaggggaggcacaggagagcagggagaccccacgg

SEQ ID NO: 177593 - RNA, 55 nt, Homo sapiens
cagcaaaggaagacgagggaggaggacaggacggaaagaacaaccaagaagggag

SEQ ID NO: 177594 - RNA, 82 nt, Homo sapiens
cgaggggcggacgcgcggcggggcagaccgcggggacgcgggcggcgcggccgcgccagacagcgccgcgccaggacggcag

SEQ ID NO: 177595 - RNA, 67 nt, Homo sapiens
gagagaagacgacgcaccgcaggcagacaaaagggccaaagaagggagagaggaacaacgccggcac

SEQ ID NO: 177596 - RNA, 70 nt, Homo sapiens
cccagaagagaggggaccacgaggacagcggaagaaaagccgccgaggcacagagaaccgaccagaacgc

SEQ ID NO: 177597 - RNA, 70 nt, Homo sapiens
aagagccaggggcccggacaaaagcagcagaggaccgcgaacggcaagggacagaagcgcaaacaaacaa

SEQ ID NO: 177598 - RNA, 79 nt, Homo sapiens
cgacaaggaaggaagaaggcgcacaccccagcgcgcaaagcgcgaggggcgagcaaaacaaacggagagaggagggaga

SEQ ID NO: 177599 - RNA, 63 nt, Homo sapiens
caaggaccgcggacagagacaacaccgagagagaagcgaagagacgaggaaggagacaccaga

SEQ ID NO: 177600 - RNA, 74 nt, Homo sapiens
ccaaagcccacagcgcaaacggcggacaaggcaaaggggcagcggaaaacaaaccgcagagcgggagccgacaa

SEQ ID NO: 177601 - RNA, 75 nt, Homo sapiens
cggccagcagaggaaccacgaccgcggccggacaagcacacacaaaccacaagaaggggcgcgacggagagagcc

SEQ ID NO: 177602 - RNA, 74 nt, Homo sapiens
gccagcagcgacgcgccagggccagccgggaaggacaacaagacggacccaggggccggcggacagcgaagacc

SEQ ID NO: 177603 - RNA, 83 nt, Homo sapiens
gagaagcgcagcgacggcgcgggagagcgcgccagccggccgcgacaacaacgaacgcacagacgagccggaaagcaggaacg

SEQ ID NO: 177604 - RNA, 77 nt, Homo sapiens
cagcccacgccagacgaccccacccgcgccgcgacccgacgccaggacggccggcagcaaagaggaccccaagcggg

SEQ ID NO: 177605 - RNA, 94 nt, Homo sapiens
gcaccccccaacagcgggacccggccagcacgcccagccaaggccaagggcaagggacaaggagaccccagccgcccccacgcggacgcccgcg

SEQ ID NO: 177606 - RNA, 80 nt, Homo sapiens
ccgagcgaccaggagccggggcggcgcaggaggagccgaggcgagccaacagcacggcgacccagcaacgcggccggcca

SEQ ID NO: 177607 - RNA, 76 nt, Homo sapiens
cggagcccccggaccacacagcgcccaggccagagaaggggaaggaggggcagcgggcaggaagacccaacaggcg

SEQ ID NO: 177608 - RNA, 47 nt, Homo sapiens
ggcagacaaaagggccaaagaagggagagagggccgacacgcccccg

SEQ ID NO: 177609 - RNA, 62 nt, Homo sapiens
ggcgagccgaaaagcgagcgcgaggaaaaggcggcgggaggcagcgcacccagacaccgggg

SEQ ID NO: 177610 - RNA, 75 nt, Homo sapiens
ggaaagacccgagcaagcgggaagcagccaagcgaaagcaccccgcaggcaccaagaagaccaacaagcagaaga

SEQ ID NO: 177611 - RNA, 63 nt, Homo sapiens
gagagcggaccgagagcgcgaaacgcacgagaagggcagcagcccagccaaagccggaaaagg

SEQ ID NO: 177612 - RNA, 73 nt, Homo sapiens
agaggcacgaacaggacccagcagccagaggaaccaggccaagggaggaaaaacgcgccaggaaaccaggagg

SEQ ID NO: 177613 - RNA, 79 nt, Homo sapiens
ccaaacacgaagagacaaaagagggacacgcagggagccaagcagacaaagccaagaaaaaagaagaggaaagagagag

SEQ ID NO: 177614 - RNA, 55 nt, Homo sapiens
ggcgaaagcggaacgaggcccgccaagcgcccccgggcacgagagcggacgagcc

SEQ ID NO: 177615 - RNA, 74 nt, Homo sapiens
accgcagaggacagacagaaagcggcagcccagaaccggaagcgaccacggacacaaacgccagagaagaaaaa

SEQ ID NO: 177616 - RNA, 63 nt, Homo sapiens
ggcccagcccgaaaccggacaacgcggcccacggggcgacagcaagaaggagccagcacagag

SEQ ID NO: 177617 - RNA, 76 nt, Homo sapiens
cccaaggagaagcgcccaagcggacgggaaggcgccagacacagaaaagaaagagagcaaccacccacaaggaccg

SEQ ID NO: 177618 - RNA, 75 nt, Homo sapiens
aggcccgggcggaggaggaagagggggcacccagcacacccaagacgcggcaacaggaaacgaaaagagacagca

SEQ ID NO: 177619 - RNA, 67 nt, Homo sapiens
gaaagaggagcagagacgccggacaggggccgcaaggccaggcgcgcagaggcacccaacggcacag

SEQ ID NO: 177620 - RNA, 73 nt, Homo sapiens
aacaggaaggggagaacaccgaagcccccacaagggaagaaccacagacggagccccacgcgagaacaacaag

SEQ ID NO: 177621 - RNA, 57 nt, Homo sapiens
cgccgcccaagagagcaagaccgggcccacgaggaaaacaccgaaccgacgaaagag

SEQ ID NO: 177622 - RNA, 50 nt, Homo sapiens
aacaggaacccagacagcgcggcacaggagggcaaaacaccgcgcacccc

SEQ ID NO: 177623 - RNA, 80 nt, Homo sapiens
gcaaccgaaggcagcgcagcagccaaacggcggggaaacgggcgaacacagaacaaagaacggcaggaacggaagaagaa

SEQ ID NO: 177624 - RNA, 70 nt, Homo sapiens
ggaggccacgaacacgccggagccgccaggggaccccagcccaacgccaaacgagccggacccggaggac

SEQ ID NO: 177625 - RNA, 60 nt, Homo sapiens
ggagaggagccggccccagaagaaaagcaacagggcacggcagaaggagggacgccgacc

SEQ ID NO: 177626 - RNA, 69 nt, Homo sapiens
ggaggaccccaggaaaggcaggagcacaacacgaagcgaagcagccagaggaccagaaagccaccgaaa

SEQ ID NO: 177627 - RNA, 77 nt, Homo sapiens
gcagagccgcggggcaagacacgaggggacaacgaaggaggcaagcaacaaagggacaaaaacgacaagcaggaagc

SEQ ID NO: 177628 - RNA, 78 nt, Homo sapiens
accaacacaccacaccgaaagcaggggcagaacgggaagccagagagcgcgcgaggccgcgccagccggaaggacgcc

SEQ ID NO: 177629 - RNA, 60 nt, Homo sapiens
cagaagggaaaagcaacgaacagaccagaaagcaacagagcgccaaaaagaggaccccag

SEQ ID NO: 177630 - RNA, 75 nt, Homo sapiens
gcgcgccaggagacggccgacccgccagaggaggccccccagccacggaaacgcagaacggggccccgcacccag

SEQ ID NO: 177631 - RNA, 67 nt, Homo sapiens
gcggcgagaaggcggacccagacagcgaccccagagaagggaacagcacagacccgcgcccggagaa

SEQ ID NO: 177632 - RNA, 39 nt, Homo sapiens
ggccgagccacccaaaaacaggggccccagccccaggcg

SEQ ID NO: 177633 - RNA, 75 nt, Homo sapiens
gcggcggcgccgcgccccgcccgcgggagagggccccgagccccggccccaaagacccaaaacagagacaccccc

SEQ ID NO: 177634 - RNA, 73 nt, Homo sapiens
ccgagacgccaagcggggagcgcccgcgacagaggagggaggaaaacaaccgagggcagagggcccgggcaga

SEQ ID NO: 177635 - RNA, 70 nt, Homo sapiens
accaaaagaacaggaacgggacaagcagcacacacacagacagggccaaaaccccgccaagaccaaacag

SEQ ID NO: 177636 - RNA, 61 nt, Homo sapiens
accgcacgacacaggaaaggacaaaaccagaagcagggggggaagccagccaagcagacga

SEQ ID NO: 177637 - RNA, 75 nt, Homo sapiens
aacgcaggaggaaacggcccccaagcccgaaaccaacgggacaggaaaaccagcccacagcgcaagaagacgcag

SEQ ID NO: 177638 - RNA, 50 nt, Homo sapiens
gaaggagcacaacaggcagacagacaagccagaggcacggacgaccccgg

SEQ ID NO: 177639 - RNA, 76 nt, Homo sapiens
ccggaggcgcccgagcgaagacccaaccccacaagaggaagaaacggaccccagacaggaagccccaaagaaacca

SEQ ID NO: 177640 - RNA, 55 nt, Homo sapiens
acagaccgcacggcacggcccacgcaggaaagaggcacacccagaagccacagga

SEQ ID NO: 177641 - RNA, 79 nt, Homo sapiens
ccggcccgccccccggcggagggagaccacagaggggccggcccaaaagccccagaacaagcacaagcccggcggagcc

SEQ ID NO: 177642 - RNA, 79 nt, Homo sapiens
caagaccgaaggcgccggccaaaagaggagaaagacagcaaagaaaaggagaagaaaggaaaaaaacaaccccgggcac

SEQ ID NO: 177643 - RNA, 54 nt, Homo sapiens
acagccaggagcacagaggacaaaccggcgaccacacacggggacgacggggaa

SEQ ID NO: 177644 - RNA, 85 nt, Homo sapiens
ggacgaaccacaggaagcgcggggcggcggcgaaaggacgaaaccgccccaagcacagaaggcgacgggcagagggcaagacgga

SEQ ID NO: 177645 - RNA, 74 nt, Homo sapiens
caaagcagcgaagaagaggcccaacccccaccccgcccaaggaggcccagcgagagggccgaggcagacaaggg

SEQ ID NO: 177646 - RNA, 69 nt, Homo sapiens
cgacggacggcgggcaccggccgacgggccacaaagcccagacaagcgcagaagcaacagaacccgaac

SEQ ID NO: 177647 - RNA, 78 nt, Homo sapiens
aagaacaagccccacgacagaccacgacaagagcacaaccccgggcggagaacggaaaagcaccaggaagcagagagg

SEQ ID NO: 177648 - RNA, 59 nt, Homo sapiens
ccaggcccaggacgccagagacagaacaacgcccgaccccgaacccaccggaggcaagc

SEQ ID NO: 177649 - RNA, 81 nt, Homo sapiens
gggcccacagcgcggcaggccaccggggagcaccacaccccgccgcagggccgcaaggagagcaagaagaacaccagacgc

SEQ ID NO: 177650 - RNA, 73 nt, Homo sapiens
cacggcgcaggggcaggaggagcgccagagcgccaaagcgaaacaacgagagaaacacaggcacaggaccccc

SEQ ID NO: 177651 - RNA, 81 nt, Homo sapiens
cggccgggagagagcaggccggaccccaggaagccccccacgccggagagggcacggcggagaggcacgaggaacaaggca

SEQ ID NO: 177652 - RNA, 76 nt, Homo sapiens
cgggagaaggcgcgcgcaagcacgcgaggagacacgaagcccgggcaagacaacaaaacccgcgggcagaaaggag

SEQ ID NO: 177653 - RNA, 76 nt, Homo sapiens
cgagaaacagaacggagaaaagcacaaggaggggacaacaggagaagcggaaggagaccacccaccaggcgcaggc

SEQ ID NO: 177654 - RNA, 76 nt, Homo sapiens
agccggcgaggggaagaccaagacaggccggaacccgaaagggacggagaggccgcccacggagcgcagagccaac

SEQ ID NO: 177655 - RNA, 70 nt, Homo sapiens
cagaagcgggcggcgcgggggagagacacaagcgggacggaagaggcccggcgaccggacagaaaccaag

SEQ ID NO: 177656 - RNA, 36 nt, Homo sapiens
gagcaccggcccaagaaacagaaacacagacggagc

SEQ ID NO: 177657 - RNA, 61 nt, Homo sapiens
gaggccccccagccacgggaacagccggagaccagagcacagcaaagccagagaaagaacc

SEQ ID NO: 177658 - RNA, 60 nt, Homo sapiens
gcgccggcgcgcgccgagcagccgaggaagaagaaggcagcagaaaagagaagagcacgg

SEQ ID NO: 177659 - RNA, 74 nt, Homo sapiens
agacccaagcacagaggcccccaccagagaacggccaacaggaaggcccgaaaggaaggacacgcaaccggaag

SEQ ID NO: 177660 - RNA, 66 nt, Homo sapiens
agagaaaaggggcgggcggcgacggcggagggcccggaacacaagaggacagcgaagccccgccga

SEQ ID NO: 177661 - RNA, 78 nt, Homo sapiens
agaacccagaggcgggaggggccgggaggcagaggggcaggggcgaccgaaacacaagaggaacgaaagagcaaaaag

SEQ ID NO: 177662 - RNA, 78 nt, Homo sapiens
cgcggagcggcacgagcccggggcggcagcgcggacccgcccggagagagggacacagagccacaaaagaggaaacaa

SEQ ID NO: 177663 - RNA, 72 nt, Homo sapiens
cagacccagacagccagcacagaggcgaagaacagcggcgaacccagaggaagagagcagccaaccaggggc

SEQ ID NO: 177664 - RNA, 53 nt, Homo sapiens
ggacaagcccacaaggcaggcagaggggcaggaaggaagggaacacggacgac

SEQ ID NO: 177665 - RNA, 66 nt, Homo sapiens
gaaagacacggaagcacacgaagcagggaggaaggcaagggaacaacacaaaaacgccgaccagcg

SEQ ID NO: 177666 - RNA, 73 nt, Homo sapiens
ggccgagcggcgggaaaggcggcaccaggacgccgaaaagcgaccggacgcaggcacagggacacgcgagacc

SEQ ID NO: 177667 - RNA, 83 nt, Homo sapiens
ccagccaagcacaggagaaggcgacaggaaccagccgggggccaaccgaggagccacgcagcagacgaagagagaaaggcagg

SEQ ID NO: 177668 - RNA, 73 nt, Homo sapiens
agacgccccggacccgcgggccgaagacccaggaggagagaagagaggaagcgagcagcacgggcaagcgggc

SEQ ID NO: 177669 - RNA, 84 nt, Homo sapiens
ccgaagagggggcgaggagagccggagcggggacccaggagccggccagcgcgccggagccgccgagaggagcgcccggcccag

SEQ ID NO: 177670 - RNA, 40 nt, Homo sapiens
gccgcagcacgagccaaaccgagaggagaagacaggacag

SEQ ID NO: 177671 - RNA, 81 nt, Homo sapiens
gccgggcgacgccggggggggcggcccgcagcgaaggaccgagcgaagaagcaggggagaggccgagcgaagaaccagcgg

SEQ ID NO: 177672 - RNA, 58 nt, Homo sapiens
gccgcaccaggcgagcagcgcccccggccgcaggagggaagcgcacggaaaccgcccc

SEQ ID NO: 177673 - RNA, 72 nt, Homo sapiens
ccccagaccccggcgcgggcacagaagagcagagcaagcgacccggacaaaaggacaaacgaggaggaagca

SEQ ID NO: 177674 - RNA, 79 nt, Homo sapiens
accaggagacggaggaagaacccaagccagagcccaggggccagcgcggagagacgggccagaacagaaacggccccca

SEQ ID NO: 177675 - RNA, 72 nt, Homo sapiens
gcgcaaaaagaacaaggcagcagcagcaccagcgcgccggcgaaggcaagaagaaggaaaacaagccaaaaa

SEQ ID NO: 177676 - RNA, 80 nt, Homo sapiens
gaaggcaccgccaccggaaaccaggaaaaggaagagaccaggagagaaaggaggaaacagggcaggagagaagaccacaa

SEQ ID NO: 177677 - RNA, 75 nt, Homo sapiens
aaggcacaggaacaaaacagggagccagcagaagaaaaacgcacaggcaccgggcaaaagagagaacagcagacc

SEQ ID NO: 177678 - RNA, 31 nt, Homo sapiens
accgaagccgcaaaaggaaagcagccgcacg

SEQ ID NO: 177679 - RNA, 70 nt, Homo sapiens
agcgggaagaacacagccaaaaccacgaagcacgaccaaaaacgaggaacggacacagggaggaccaaga

SEQ ID NO: 177680 - RNA, 72 nt, Homo sapiens
gaagcggacaggcccggcccgaccagaaaaagagcgccaaggggcgaagaccaagacacacagccagcgacc

SEQ ID NO: 177681 - RNA, 106 nt, Homo sapiens
caaaccgcaccccggccggggggggcgcaaccgggagcccaggaagcgcagacacagggcaaaggaaaggggcaggcacccccaacaagaaggaagagaaagaaaa

SEQ ID NO: 177682 - RNA, 79 nt, Homo sapiens
cgggacccagacacggaaaacggagcgcagacacgaacgaggagccagggaacgggcgcaccacgccaccccgccacga

SEQ ID NO: 177683 - RNA, 72 nt, Homo sapiens
ggggaggcagcaacacaggggaccggccgcagagacccaaaacccaagacacgaagaaaggaaaggccaaac

SEQ ID NO: 177684 - RNA, 80 nt, Homo sapiens
gggccggcgggcgcggccagcgggggaggaggcggaagaaaccagagccgggaggagacaacgaaggcacagcaacaggg

SEQ ID NO: 177685 - RNA, 71 nt, Homo sapiens
acacaggcggaaggaccaggcggagaaacaggcggccagcccggaaaaacagacaaggcgggcaacaaacg

SEQ ID NO: 177686 - RNA, 99 nt, Homo sapiens
gaacgagggcgagcagaggacgacaggccgggaggcaaaagcagaccggaaaacccaccggcaagaccacacccgaggggagcccaggacaccacgaaa

SEQ ID NO: 177687 - RNA, 83 nt, Homo sapiens
cccaccccccccggagccaggcggcggaaagcccacagcagcagagccgagggaggagaagaagaaacccaagcaagagagac

SEQ ID NO: 177688 - RNA, 85 nt, Homo sapiens
ggcggccgcagcaacccgccggccaccagggaaaaacagagaggaacaacgagcccacaaaggacagaaacccaccaaggaagcc

SEQ ID NO: 177689 - RNA, 39 nt, Homo sapiens
gggaggggggaccggaagaggcgcaggacaagcgagcac

SEQ ID NO: 177690 - RNA, 83 nt, Homo sapiens
gcagggaggggaaacgaagcgcacgaaacaccaagcacaaggcggccgaccaagggaccagcgcagcacccgaacgcgggggc

SEQ ID NO: 177691 - RNA, 81 nt, Homo sapiens
acgcacgccaagccggacacgcggacagagccccgaaggaacccaagacagaccaggagaggagcagccggaaagcaacga

SEQ ID NO: 177692 - RNA, 59 nt, Homo sapiens
ggaggaaaaacgacacgcgaaagccagagacgcgcacgaaacgacgaagaggcccgagg

SEQ ID NO: 177693 - RNA, 59 nt, Homo sapiens
gaaagcacaaccccagcgccaggcaacgcggcggaaaccaagacacccaggagaaagac

SEQ ID NO: 177694 - RNA, 76 nt, Homo sapiens
gacagggcgaaagccgaccacccggcgaaggaacaccagggcaaagcagcggcacagcaccaccagcaggggaaaa

SEQ ID NO: 177695 - RNA, 81 nt, Homo sapiens
gccagcgcggccaagacccaccgcaaggggaaaggaggagcaggaggacgaggacaaggaggaccccggacacccaggcga

SEQ ID NO: 177696 - RNA, 78 nt, Homo sapiens
caagagacgacacgcaagcaggcaaccgaaacaggaaacccgaccgccccaggggcacagcaggaccagcagggcccc

SEQ ID NO: 177697 - RNA, 88 nt, Homo sapiens
ccgagccgggcccaccccccaccaaggaaggacgagaacccccgcgaaccagaggaacccagcgagcgagagcggaccagaggacgga

SEQ ID NO: 177698 - RNA, 78 nt, Homo sapiens
ccgcgggccaggcccccgcccgcgcgcgcgcgcgccgaggcggagcgccgagcgaccaggagaggccaccggaagggc

SEQ ID NO: 177699 - RNA, 78 nt, Homo sapiens
acacagggccgacagaaagggccacacgggacagggcccagaaaaggaaccaaggcaagaagcaagcaaccaggcgcc

SEQ ID NO: 177700 - RNA, 56 nt, Homo sapiens
gaaggccggcgcaggagcccggcgcaggggcaggaccccgggggcgcccccacacc

SEQ ID NO: 177701 - RNA, 79 nt, Homo sapiens
caggacaaaggaagccaagcaggaggccacaggagcagggagccaaccacaccagcacacaagcccccaaacacccagc

SEQ ID NO: 177702 - RNA, 77 nt, Homo sapiens
ccaacgcgacggaaaggcacgaaagccagacacggggccagcaaggaagcacaaggggagaccacacaaccacgaca

SEQ ID NO: 177703 - RNA, 72 nt, Homo sapiens
aaagcacagacaggagaaagaagacagccacagaaaggcgggagccccgcagcacagcccggcccgggcccc

SEQ ID NO: 177704 - RNA, 63 nt, Homo sapiens
gacacagaagaagagcagcaaagccccacaagcaaggcggccaaaaggcaacaggcgacagga

SEQ ID NO: 177705 - RNA, 76 nt, Homo sapiens
gggggacacgcgccggaaggggcccgaagcccccgcaggaaccacaacccaaccaggacacaacagcggaccaagc

SEQ ID NO: 177706 - RNA, 36 nt, Homo sapiens
agagaagggagcgaacacagccaacggaagagcggc

SEQ ID NO: 177707 - RNA, 77 nt, Homo sapiens
gaagacgaacaaaggggacaaagacaacagacgcgggcaagacgccaagagaaaaggcgagagcacaaagcaccaag

SEQ ID NO: 177708 - RNA, 62 nt, Homo sapiens
ccagacgacgcgggagacaccggaaaaaaagggcggcccgaaggcaagagcccaaaagcaaa

SEQ ID NO: 177709 - RNA, 75 nt, Homo sapiens
acgcgcacgggaaccgaagagagccgggcagaccgaaaagacgcggccccaaaggaaacacccgaagaacacagc

SEQ ID NO: 177710 - RNA, 84 nt, Homo sapiens
ccggagccgccccggaggagaaggagagagaagcccagaaacagcggagaagcaaacgagaagcacaaaaaacgacagcagccc

SEQ ID NO: 177711 - RNA, 57 nt, Homo sapiens
ggccccccgggcacaggcagccagaaaaaagcacggccgaaggcaaaagaccaagac

SEQ ID NO: 177712 - RNA, 49 nt, Homo sapiens
gcacacaaaagaggagaaaaccgggcgcagcccaaacgcccagaggacc

SEQ ID NO: 177713 - RNA, 76 nt, Homo sapiens
gcagcaccacccagggcaaagaggccaaccggaggggcggaacggcaagaagaccccaggaggcgggaggccgaag

SEQ ID NO: 177714 - RNA, 68 nt, Homo sapiens
accagaagaacgacagagaggagggagaacaagcaacggcggaaccgccaagacccagccccccagcc

SEQ ID NO: 177715 - RNA, 84 nt, Homo sapiens
gcgaacgagcgacggcggaacccggggccgggacgcagcccggcggcagcaggcagcaggagaaacgagaagaaacagacgcgc

SEQ ID NO: 177716 - RNA, 87 nt, Homo sapiens
agcggccggaagcgcggagggagccgcgggaggaccgcaggcccagcgcacccggacgaccggcgagcccggggcagaaacgggacc

SEQ ID NO: 177717 - RNA, 73 nt, Homo sapiens
gggagggcggccaaccgcacagacgaccagcccgcaagaagcccagcgcagcaagaccgccagccagagaacg

SEQ ID NO: 177718 - RNA, 67 nt, Homo sapiens
ccgcaaagccagaccaggagaagagcagggggccgaaaggcgaacaagaggcgccagcgggcgcgcc

SEQ ID NO: 177719 - RNA, 54 nt, Homo sapiens
ccgacagaggcacaaaaagcggggaccacaccacacaggaccgaagcggcgggc

SEQ ID NO: 177720 - RNA, 73 nt, Homo sapiens
ccccgaaacagcgaggccagcaggagcccggccgcccgggccaccgagcaccagagcgagcgagcgaaggcac

SEQ ID NO: 177721 - RNA, 82 nt, Homo sapiens
caagggcccagggccggcaccacgcggcacgcgaccaaggagggcaaagcgccgcggcagaggcagcgacagagaaaacccc

SEQ ID NO: 177722 - RNA, 77 nt, Homo sapiens
agccacaccgagaaggaggggacacaccggaagacgcaacacaggccgcgagggggcaccgaagagcggccagcggg

SEQ ID NO: 177723 - RNA, 36 nt, Homo sapiens
aacggaggcagacaccaacgagcaagaaaacaagca

SEQ ID NO: 177724 - RNA, 49 nt, Homo sapiens
cgcagggcgcccccggcaggaaggaaccgggaaacacccaaacccccac

SEQ ID NO: 177725 - RNA, 53 nt, Homo sapiens
ccaggacggagagggagaagacccggagacgcccgccaggcacacgcggccgc

SEQ ID NO: 177726 - RNA, 79 nt, Homo sapiens
agcagcagcaacccgcccccacccacgcccagcaacagccacccgaaaacacagaccacagggagggcccagccagggc

SEQ ID NO: 177727 - RNA, 66 nt, Homo sapiens
ggagagccagcgcggcaggccccgcaagaagccaggaagggaaagacggagacaacagagagagag

SEQ ID NO: 177728 - RNA, 79 nt, Homo sapiens
ggagcagacaagaccccaacaacaaggcccccaagacaagcccccaaaacacaagaggacggagaagcgacgaaagaag

SEQ ID NO: 177729 - RNA, 79 nt, Homo sapiens
cgaggagcgccgcgcccgcccgcccccaaaacacaagaggacggagaagcgacgaaagaagccgggacaaggaccagac

SEQ ID NO: 177730 - RNA, 66 nt, Homo sapiens
gcgacaagaccggaccgggaaacacaaagaagacaccagaagggccagcaccacgacaacacggcg

SEQ ID NO: 177731 - RNA, 84 nt, Homo sapiens
aagcgggccaagggcacacaagggggagggaagcgcgccagcgccacggaggccagacgaacaaaaacgcccgacgaccccgcg

SEQ ID NO: 177732 - RNA, 53 nt, Homo sapiens
cccaggaaccaccagccaccaaacagcagagaacacaacacaggacaagcaag

SEQ ID NO: 177733 - RNA, 73 nt, Homo sapiens
cgcgcccgcaagaacggccaagaaagcccgaaaaccaagaggacagaggaccagacgaacaggcaaggagaga

SEQ ID NO: 177734 - RNA, 91 nt, Homo sapiens
cacgcgcacccccaagggcaccccaccgcagagaaccagagagcacagagaaagcgggaaacggccaaacagaacaccaacaaggccaaag

SEQ ID NO: 177735 - RNA, 64 nt, Homo sapiens
gggcaggcacggggacgaaagaaacggcgagacacacaagagaacagaacacaccgacacggaa

SEQ ID NO: 177736 - RNA, 79 nt, Homo sapiens
cagcccaccaggccaccacgcggcgggccggaggacaaaagcagccccccggggcaggggagcagcaacagcacaggga

SEQ ID NO: 177737 - RNA, 77 nt, Homo sapiens
gcgggcagagaccagcaccggagaagccagaggaggacgagccccgccagggagacaacggaggaggaggaccagca

SEQ ID NO: 177738 - RNA, 55 nt, Homo sapiens
agaggagggagaacacagaaacccgccccggccaggaaccagaacgggacacgcc

SEQ ID NO: 177739 - RNA, 83 nt, Homo sapiens
gcggcgaccgggaagaagcgaaaaggagcacgccaggcgaccacgagcccccaggccgagaggggagagagacgcgggaaccg

SEQ ID NO: 177740 - RNA, 78 nt, Homo sapiens
acagccagcaggacggacagcaagcagggagacacagcaacaaaggcccaccaaaccaaagcaagacggaagcagcaa

SEQ ID NO: 177741 - RNA, 73 nt, Homo sapiens
cgagggggggcgcgccggaaaccggagcgcgcagcaggggaaaaccacaagaaagcgggagacgggaccaccc

SEQ ID NO: 177742 - RNA, 79 nt, Homo sapiens
gaggccccagggaagcgcagaaagcaggcgaacccgcggcgcaaaacgagccgcgaagcagccacggaccccagcacga

SEQ ID NO: 177743 - RNA, 53 nt, Homo sapiens
cgcgcaagcggcacaaaggaggaaacagaaacagggaaagaaaacaagccacc

SEQ ID NO: 177744 - RNA, 74 nt, Homo sapiens
gcagcccgggcagagaccaggacaagacgcggcgccgacgggccccgaggccgcgggcggaggacggaagcaaa

SEQ ID NO: 177745 - RNA, 70 nt, Homo sapiens
cggggcggaacaaccgaaggaccgggagacaacaaaaaagggagaacgcacaagggaaaacgagacaagg

SEQ ID NO: 177746 - RNA, 79 nt, Homo sapiens
cagggagccggggggggcggagggggagacggccgggagggcccgccagccgcgcccggagaacagccagggcaggacg

SEQ ID NO: 177747 - RNA, 68 nt, Homo sapiens
agaaaaagcagcgccgggacccaaaaacagccagagcaaacggaaagacaccccaagagacgacggcc

SEQ ID NO: 177748 - RNA, 60 nt, Homo sapiens
gacaccaaacccgacgacaccgaaagccacaaggcgggacagggagcaacaccggagcgg

SEQ ID NO: 177749 - RNA, 79 nt, Homo sapiens
acgcaagagaagagggaggggaaaagaaggaaagcagcgagcagccacagaaccccccagaggaaaccaaaccagagac

SEQ ID NO: 177750 - RNA, 70 nt, Homo sapiens
acgccggagagcagaagaggagccaggaaggccgcaagaaagggcccgccaacccccggaggcgccccgg

SEQ ID NO: 177751 - RNA, 75 nt, Homo sapiens
cgggacccagagcgggcagggcaacaaccacaagcagaagagacggggcaaaccggggggggacccaccgcgagg

SEQ ID NO: 177752 - RNA, 73 nt, Homo sapiens
acagccaacgccagccccacgagcaccaagggccgaaacaaaaaaaaaaaccaaggagcaaccacaagaaaag

SEQ ID NO: 177753 - RNA, 84 nt, Homo sapiens
gggaggcagcggaaggcggcagagcaaagaccaggggacgaaggccgcagacgaaggggaaagggaagcaagagccagacccaa

SEQ ID NO: 177754 - RNA, 73 nt, Homo sapiens
gccccacacgcagaaaagggagaggcaccgaacccccgaggcgaacccagagaagaagagaggcgaagaacac

SEQ ID NO: 177755 - RNA, 71 nt, Homo sapiens
gcagacggagaaacaggaccaggacaaaagaacaccgaaaacaacaggaccagcagaccgcaccggaaccg

SEQ ID NO: 177756 - RNA, 80 nt, Homo sapiens
cgaagacgccccaccacgaggccagcacgggaacgcgaagcgccaaagccagacaagccgagagcagaggacgggcaaga

SEQ ID NO: 177757 - RNA, 112 nt, Homo sapiens
gcaagaccgccccgccgcccagaggacgcccaacaccacccacccaccacgacaagggaggcgaggacggacaaaaggaaacggacgggaggccagccagcagaaggaggaa

SEQ ID NO: 177758 - RNA, 76 nt, Homo sapiens
cgccccggcgccccaaccccggcagccccagaacgcaaaaggcgaaaggagaaagaagagcaaaaagccagaggcc

SEQ ID NO: 177759 - RNA, 72 nt, Homo sapiens
aagaaacagacagaagggaggcaaagaaaaggagaaaagaagccaaagggacacgacgaaagcgaaaagaaa

SEQ ID NO: 177760 - RNA, 78 nt, Homo sapiens
accggcgcccaaggagaggccaaagacacggagggggaagccaacacccgagcggaaaaggaggaccagccagagggc

SEQ ID NO: 177761 - RNA, 73 nt, Homo sapiens
gagccgaagccaacacgagcaccggcacaacaggagggaggaagagaccgacgccggccagccccacccagca

SEQ ID NO: 177762 - RNA, 73 nt, Homo sapiens
gagcagagcaagccacaagcacgaaggcacagaaaaggaccacacagacaaagccgaaaacacaggcagcgac

SEQ ID NO: 177763 - RNA, 73 nt, Homo sapiens
gagaaaaaggaaaacgcggaaaaccgacacaacaggaaccgaacacagggagggccaagaacccccgaagagg

SEQ ID NO: 177764 - RNA, 86 nt, Homo sapiens
ggcggcaggcggcagaggggagaaacgaaggaggcccaaccacaaaaggagccgacggaacccagacggagaacaaaaggaagaaa

SEQ ID NO: 177765 - RNA, 79 nt, Homo sapiens
gcgcccggccgcccgcgggagaggccgggcacaaaaggggccgcgccggcggcacgcaggcccggacgcacacacccac

SEQ ID NO: 177766 - RNA, 72 nt, Homo sapiens
cggcggcccgcaaagaaacagccccccgacagcccgggaagaagcagacacaaggccccccgaaaaagccga

SEQ ID NO: 177767 - RNA, 80 nt, Homo sapiens
gaaccaccgggccagagacagggaacgcaccaagaaaccgagcgaacggaaacacgggcccgggacacccagacagagag

SEQ ID NO: 177768 - RNA, 68 nt, Homo sapiens
aagaaggcagaaccaaaaccaacagccaaacagcacaagaaggagcagggagccagcgaggaaacggc

SEQ ID NO: 177769 - RNA, 88 nt, Homo sapiens
gccacccgacaggagggccccgcccgcacgcccgcgacgcacgggaagcgggggaacgagcaagaagaggcaaccaagccaacagagc

SEQ ID NO: 177770 - RNA, 61 nt, Homo sapiens
gcccggcccggcggaaaaggagaggcagacccaagaggcggggaaaaaggagaagccagaa

SEQ ID NO: 177771 - RNA, 93 nt, Homo sapiens
cgaaccggcccccgcagcgggacccggccccaacaacgaccggggacgcccaagccagaacagaccgccacacccagccagcgggcagagcac

SEQ ID NO: 177772 - RNA, 52 nt, Homo sapiens
agcacaagcagcagaaccggggaaggcgacagccaacagaacccagccagga

SEQ ID NO: 177773 - RNA, 83 nt, Homo sapiens
acccggcagcgagcgcgcaggcccccgcgaacccggcaggcaaccagggcacaggccccagggaagggagccagcggaccgag

SEQ ID NO: 177774 - RNA, 82 nt, Homo sapiens
gacgggggagggggcggccgggcggagagaaccagcgaggacgagagagccacaggccgcacaccccagagcccgaaggggg

SEQ ID NO: 177775 - RNA, 91 nt, Homo sapiens
gccagcccgggccccggcagggaggagacggagcgcagcggcacgcacgcgaagacagcggcaggaaggaacaccagccagccgggaaccc

SEQ ID NO: 177776 - RNA, 73 nt, Homo sapiens
ccaaaagggacggacaaaggaacaggaccagggcgcccagcccaagcagagccgggagcgggcggggggagcc

SEQ ID NO: 177777 - RNA, 75 nt, Homo sapiens
ccagcagagaggaaaaacacaacccaagaaacgggaaaaaaccaggcgggaaccggcagacgccaggagggacag

SEQ ID NO: 177778 - RNA, 51 nt, Homo sapiens
aagacaggcccggccaaacaggaaagcacacggaagaagaaagacggccaa

SEQ ID NO: 177779 - RNA, 68 nt, Homo sapiens
gaagacgcagaggaaacggcagcagaacaggagcggacccaccagaagcagcgaaaccgggaaagcag

SEQ ID NO: 177780 - RNA, 57 nt, Homo sapiens
acaggggcggaaaaaacaagacggaagcccccaaagcagaaacacaagaggacagga

SEQ ID NO: 177781 - RNA, 81 nt, Homo sapiens
gcgacacccgcgcccggaggacggaaacccaggacagccagcaacgcccaggacagcaagacaaaaaagaagcaacgaagc

SEQ ID NO: 177782 - RNA, 78 nt, Homo sapiens
cgccccgccaaggagacgccccacgaggcccaaaccgccaagcccccgaaacaaagagacgcacggcggaccaagagc

SEQ ID NO: 177783 - RNA, 72 nt, Homo sapiens
acaggcacaggccacagccagaccccgacgggacagaaggaagcgaagcaacagaggacggaaacgggaccc

SEQ ID NO: 177784 - RNA, 61 nt, Homo sapiens
gaggggaaaggcgccgaaaacaagccggaagcaccaaggaagaagagacacacagaaaaaa

SEQ ID NO: 177785 - RNA, 57 nt, Homo sapiens
ccccccaccaccgggccgccaccagcacagggacgggggcgcacaggcccagccagc

SEQ ID NO: 177786 - RNA, 79 nt, Homo sapiens
ggagccagcccaaggccacaccaggcagcccccaaacccggcccaggccaaggcacgagaacaagccacgcaggggcac

SEQ ID NO: 177787 - RNA, 73 nt, Homo sapiens
ccccgcccaaaagaccaccgcccaacacaacacgcagggccagaacacaaaccaccaggagaaagcgggaaaa

SEQ ID NO: 177788 - RNA, 78 nt, Homo sapiens
cacgcgaccacaaggaacgaggggccccaagagcacagaccagcagccgccaaagggaccaagaaaggcccagggacc

SEQ ID NO: 177789 - RNA, 76 nt, Homo sapiens
acgggaccaggcgaagcggccgagcaggcgagcgaacgacggggccaaggagaccgcacgccggacggagcccacc

SEQ ID NO: 177790 - RNA, 52 nt, Homo sapiens
ggccagagagacgagagaccacaccgcgccagaccccccaggagagccgccc

SEQ ID NO: 177791 - RNA, 88 nt, Homo sapiens
gggccgcgggccgaaggagcgccagggcgcgaggcgggcgcgcccgcggagaggccggggcagcaccgggaccggaggcccagagcga

SEQ ID NO: 177792 - RNA, 69 nt, Homo sapiens
gagccgaaacccgaccccagggaggagaagcacggccacacaggaacgaaggggaccacaacacaggaa

SEQ ID NO: 177793 - RNA, 70 nt, Homo sapiens
ccgacgccaggcagcgcccccaaacgcacacacagccccggcgcgaagaaccccaggaaaacacacaaag

SEQ ID NO: 177794 - RNA, 80 nt, Homo sapiens
agcaccaaaggggaaagccgaagaaaccagggggcgaccacgcggagaaagcagcaagcagcaccaggcccacggcccgg

SEQ ID NO: 177795 - RNA, 70 nt, Homo sapiens
gcaaaagcacagagaggccccagaaacagagggaaggagagaaggagagagacccagcccaccaaaggaa

SEQ ID NO: 177796 - RNA, 80 nt, Homo sapiens
gaagggagcggaggacacgggggccacaaagccccccggagacgcaaccaagacccaacagaggaagccgcaagaaacgg

SEQ ID NO: 177797 - RNA, 64 nt, Homo sapiens
cgacacgggaggggaggacccgggacaccgcacagccgggaaagggccaaaggcggagcacaca

SEQ ID NO: 177798 - RNA, 87 nt, Homo sapiens
aggagcggcggcgacggccacaggggcggcgacggcgcaggcgaagcgaaacaggaacgaaagagaaccagagcaccccaggaagaa

SEQ ID NO: 177799 - RNA, 79 nt, Homo sapiens
aagaagagagccagcaggaacaagcaggaccaagcaagcacaggaaaacgccagaagccgcagagcagcagaacagaca

SEQ ID NO: 177800 - RNA, 73 nt, Homo sapiens
ggccggccgggacccgaggcgagaggcgcggcgaccaggccggggggggcacagagccccggaagacagcccc

SEQ ID NO: 177801 - RNA, 61 nt, Homo sapiens
gaccgaccaccaaaacgcgaaaagagaaaaaaggagaaacgacagaacgcccacaccacgg

SEQ ID NO: 177802 - RNA, 57 nt, Homo sapiens
gagaaacaaagccacccagccaagaagggaccaagcgccagaacgaccaacgaccac

SEQ ID NO: 177803 - RNA, 74 nt, Homo sapiens
cagggcccgcaggcggcgcacaggaagcacggaccacaaccagaacggaaggcgacagcggggaaagagcaagg

SEQ ID NO: 177804 - RNA, 95 nt, Homo sapiens
ggagacaaagcagcgcccgcgccgggcccggaaagcgccgcccagcagccgcaggcccgacaggcccccagagccgcccacaggaggccccgggc

SEQ ID NO: 177805 - RNA, 78 nt, Homo sapiens
ggagagggggcgcgagcgggggggcacaagaccgaaagagcaggcaagcaaaagcggggccagcagaggacaaaggcc

SEQ ID NO: 177806 - RNA, 72 nt, Homo sapiens
agggaaggaacaagcacgaagagggccagaaggcaaacggacagaaggggccacaggcaccaggaagaaaaa

SEQ ID NO: 177807 - RNA, 73 nt, Homo sapiens
cgcgcgggaggccaagaccgcggggaggagccgcagcgccagcaccagggaggacaggacaggagacaagggg

SEQ ID NO: 177808 - RNA, 76 nt, Homo sapiens
ccggggcacccaacagcggagcaacggcccgaacaggaggcccggacccccagcacaagcgcaggccagggggaga

SEQ ID NO: 177809 - RNA, 70 nt, Homo sapiens
aagccgggaaagggacaagaagggcaaagccgaaccgagcagaccgaagaaccggacacacccaaagagc

SEQ ID NO: 177810 - RNA, 73 nt, Homo sapiens
aggggcagaagacaaaaagaagacggacagggcacacagaaccgaaaaagagcgggcaagccgggcaaggaga

SEQ ID NO: 177811 - RNA, 82 nt, Homo sapiens
gcaagacgggcagcgcaggggcgggaaagacccaggagaagccgcccaaagaacgaggagaacacagcaacagaagagacca

SEQ ID NO: 177812 - RNA, 63 nt, Homo sapiens
acccgggccaaggcacgacaggaacggggcgcgaaagacacggacaacgcaaacccggccccc

SEQ ID NO: 177813 - RNA, 57 nt, Homo sapiens
cccaagaccacagccccaggccccggagacgggggcaggggagcagcagaacaagca

SEQ ID NO: 177814 - RNA, 79 nt, Homo sapiens
gagacagcgcaccggcggcgcggacgacagcgagacaccgcaccaccagaaaagacggggcagaagacaacggaaagcc

SEQ ID NO: 177815 - RNA, 82 nt, Homo sapiens
cccggcccggacgcagccaggccacaggcagcgaacgggaaaggacgcacaagaccagccacgcaccgcacacgaccgccac

SEQ ID NO: 177816 - RNA, 33 nt, Homo sapiens
ggaacagacgcaggaaggaaccgcacgagcgga

SEQ ID NO: 177817 - RNA, 126 nt, Homo sapiens
agcaggggcgcccacgaggggaagcccagcaccacggacgcaagcgaggcacgcaaccgggacagcggaagcacgggccagacccgcggacacagagcagcgagggagcgcgcgcacccgagcagg

SEQ ID NO: 177818 - RNA, 73 nt, Homo sapiens
gggcgacgagagcgcgcgggcacaaggccaagacggccaagggagccacagggcccagagcacggaaccggcc

SEQ ID NO: 177819 - RNA, 81 nt, Homo sapiens
caaagcaagacggaacccagcaggccaacacggaggaaaaaggaggggaccgaggaacccaagaagagagcgggcccagag

SEQ ID NO: 177820 - RNA, 73 nt, Homo sapiens
ggaggcaccggcgcagcgggacgagggggagggcgcaggcacccggcgcaaaaggaagcgggcacggaagagg

SEQ ID NO: 177821 - RNA, 66 nt, Homo sapiens
caccaaggagaggagcccaagaggcacgcaccccacaaaaaaaaggaaaggcaagggcagaaaaga

SEQ ID NO: 177822 - RNA, 37 nt, Homo sapiens
gccggaggcggccgcaccgggccggggcagcagaaga

SEQ ID NO: 177823 - RNA, 75 nt, Homo sapiens
ggcgcggcacgccggcccgcaggccaagagcaaaaaaaagagcacaggaggcaaccaaagaacccagcgcacaaa

SEQ ID NO: 177824 - RNA, 87 nt, Homo sapiens
cgacgaccgccgccgagcgcacgccgccgccgccccgcaggcgaccccgcacacacacccaccagccacggcagcccagcggggacc

SEQ ID NO: 177825 - RNA, 99 nt, Homo sapiens
ggaagaaagggaagacacaaacagaagacagcacagaaacccaggaggagccaaggacgcagggccgaggagggcggaaccacccaggaggaagggcgc

SEQ ID NO: 177826 - RNA, 85 nt, Homo sapiens
cggaggagcccaggagacccggggacagcacgcccaggccccggaaggcgggagacagagggaagcaccacacaccaccacagcc

SEQ ID NO: 177827 - RNA, 83 nt, Homo sapiens
ccaggaaggaaagaagccaaccagaggaagagacagccgaggacagacgagaccgggacacgaggccaccaggggagggccac

SEQ ID NO: 177828 - RNA, 85 nt, Homo sapiens
cacagacccggagcgccgcaccgacaacacagcccaggcaacaggccgggaacagcaggccaggagcgacacaccacacaacccc

SEQ ID NO: 177829 - RNA, 76 nt, Homo sapiens
gggagccggggcgccgggcccgggccgggcagacacaaggggggcccccggagagacagaaccaacaccagagaag

SEQ ID NO: 177830 - RNA, 72 nt, Homo sapiens
gcaagcgggggaccgaacaaggcaaaaggggagcacccgaagaagacaagacaggggaaagacagcccagca

SEQ ID NO: 177831 - RNA, 79 nt, Homo sapiens
gccaggggccgggagggcgccagaaagacccggaagcaagaagacaaacgaggggagaaagaaggggaaggacgcgcgg

SEQ ID NO: 177832 - RNA, 90 nt, Homo sapiens
gacaaggagccagacacccgcaaaagagagacgcagaagacaaacccagaaaggaggaacccaagagggacagaaaaaaaccaagacgcc

SEQ ID NO: 177833 - RNA, 60 nt, Homo sapiens
gcgccccggggccggcccgcagcaggagcagggcgcagaagccgagaacgggagaaagcg

SEQ ID NO: 177834 - RNA, 79 nt, Homo sapiens
gaaagagaagaagacaggaaaaaaaaaacaccgagacgaagggagggaaggaaggaagagccaaaggacagggagaagg

SEQ ID NO: 177835 - RNA, 50 nt, Homo sapiens
gaggccggagaagaaagaggccacggaccggagccaggaggaggaaagga

SEQ ID NO: 177836 - RNA, 70 nt, Homo sapiens
gaacggcgcacgacaagcaagcccgagaagcaagaccgccccaaaaagcaagaaaagaccggagggccaa

SEQ ID NO: 177837 - RNA, 80 nt, Homo sapiens
gagggcagggggcaaacaagccgaccggaaaaagacagcacgagggcccgaaaggcacggacgcagcccaagccgcacag

SEQ ID NO: 177838 - RNA, 75 nt, Homo sapiens
cgaggccgagcaacaccgcgagccgcgcggcgcggggccccgcggcggagacaagcagcagaccccagggcccga

SEQ ID NO: 177839 - RNA, 78 nt, Homo sapiens
gccgccgcccccgccgcccccgcggccggcagccccggggcgcggggacagagcgaagaaccccccaagaagacgaaa

SEQ ID NO: 177840 - RNA, 75 nt, Homo sapiens
gccaaggccagggggcaaggcggaggccagacacagaggcgcggcaccaggcaaaagcggagcaggacggcaccg

SEQ ID NO: 177841 - RNA, 60 nt, Homo sapiens
gcggacagcaaggcgaggaagaagcgcagccagagaaccccaaacccaccagaaaagccc

SEQ ID NO: 177842 - RNA, 64 nt, Homo sapiens
gaccaggagcgggagagggccagcgaaacaacggacccaccgaagaaccggaggccagaaagac

SEQ ID NO: 177843 - RNA, 68 nt, Homo sapiens
gggggcccccggcccaaacaccaaaacaagccaagaagaccgggagcacagaagaaaagaacaaggcc

SEQ ID NO: 177844 - RNA, 84 nt, Homo sapiens
gccagcccaaggacgccacaagaagaagcgacaggcggaaaaacggcccacaagacgagaaaaagcacaccagcaggcacagcg

SEQ ID NO: 177845 - RNA, 70 nt, Homo sapiens
acacgccccgggcagcggaaaagcagaaggcagcagaccgcggccacagggaccaacgcacaaaagcaac

SEQ ID NO: 177846 - RNA, 86 nt, Homo sapiens
cgcacaccaccgcgcgcggcgggagagaccgcacgcagggccacagcagcacgaggacagcccgaggcggagaacaccgaacaccc

SEQ ID NO: 177847 - RNA, 77 nt, Homo sapiens
caccagcaccccagccacccccagcccagcagccgccaggccggccggagccgagcggagacagcagaacaccgaac

SEQ ID NO: 177848 - RNA, 51 nt, Homo sapiens
ccaaaaaaacggcggaaaaaagcggagaagagcgccggaggaagagcggaa

SEQ ID NO: 177849 - RNA, 60 nt, Homo sapiens
ccggagcacagggcggagacaccgaaaccggcggacgggcggagccaagagaagaggcca

SEQ ID NO: 177850 - RNA, 76 nt, Homo sapiens
aggaggcgggcacagcgccaagggagggcaacagagagaaaagcgaacacccaggcgcgcagagaccgacaaggaa

SEQ ID NO: 177851 - RNA, 71 nt, Homo sapiens
ggcccggacccgcaaaaagggagggccacaggagcggggccaccaggaagggcaagcagcacggagagacg

SEQ ID NO: 177852 - RNA, 80 nt, Homo sapiens
aacacagcaacccaccacggaacgacacggcagaagagggcagccaagggccaaaccaaggacggccccggggaagacga

SEQ ID NO: 177853 - RNA, 73 nt, Homo sapiens
cccccacaaacagacggcagcacgccggcccagaggccagaccaacaagcaacaaggaggcgcgcaaaagagc

SEQ ID NO: 177854 - RNA, 41 nt, Homo sapiens
cggccgagcggagacaagcccggcggccgcaccacccaaca

SEQ ID NO: 177855 - RNA, 68 nt, Homo sapiens
gcaaaacccacgacaagaaggcaccccaaaaacagacggagaagagcaaagaggagagacaccggaga

SEQ ID NO: 177856 - RNA, 84 nt, Homo sapiens
acaacagggcagcacagagaccgcgaaagcggaccaaggaaccagggggagcagcccgggaggacaggcgacaagaaggccaag

SEQ ID NO: 177857 - RNA, 65 nt, Homo sapiens
ggagggagaacacagccacagccgggacggaacaaaaagccggacaaagaagaaaaggggcgccc

SEQ ID NO: 177858 - RNA, 65 nt, Homo sapiens
aaccacggggcggcgccggccccaagagccgaacgaacagaacacaaacaagcccggacgaccca

SEQ ID NO: 177859 - RNA, 85 nt, Homo sapiens
ccggcaagagcggcggagcgcaggggagaaccggaagagaaaccggaacagagccccagcccgaaaaagacccggaggacaccgc

SEQ ID NO: 177860 - RNA, 48 nt, Homo sapiens
gaaacagcagggcaaaaccaggcccagcacaccggaaagcgcaaggcc

SEQ ID NO: 177861 - RNA, 74 nt, Homo sapiens
caagacgaaacagcaggggcagagcggggcacgcccaggccagacacacgacggcgcccaaaacgagagaggac

SEQ ID NO: 177862 - RNA, 78 nt, Homo sapiens
aaaaaaaaagcgcacacacgacgaccggaaacaggcacagaacagaaggaaaggacgaagagcccaggaacaccgcag

SEQ ID NO: 177863 - RNA, 74 nt, Homo sapiens
cagggaccgcggaaaggagggcggcccggaccgggagacacggccagacgcccccagccccgggagaagacccc

SEQ ID NO: 177864 - RNA, 59 nt, Homo sapiens
aggaccgcgacggcagcagagcagacaagagaaagaaaaccgcaacagggcgaggcaga

SEQ ID NO: 177865 - RNA, 78 nt, Homo sapiens
caaccaagccacaaaagacacgccacaaccgggaacaaggcaaaagccgagaagcacccgagacaacagcggcaaacc

SEQ ID NO: 177866 - RNA, 70 nt, Homo sapiens
caaggcccaagcccagccaagaaccgcacggccaagcccacacagaggaaaccgggagagagacagaagg

SEQ ID NO: 177867 - RNA, 76 nt, Homo sapiens
agaaggaggaagaagaagcacagaaaaccgcagaacggcgagaacgcggacaagcaaacaaagaggaaaaagaggg

SEQ ID NO: 177868 - RNA, 74 nt, Homo sapiens
gggaagacaaacgacgccgaaaggccccaggaaccacaagcagcaaggcgccaagacgagagcccaaacacagg

SEQ ID NO: 177869 - RNA, 81 nt, Homo sapiens
gaaccagaaacaacgcggcaggaccaagcaacagaccgaccaacgggcagagggagcggccacaagcccaagggccagaca

SEQ ID NO: 177870 - RNA, 91 nt, Homo sapiens
cacgcagcagccgcgccgccgccgcgggagccgcgcccgaaccccggcccgaacccagagaagggcgcccaaggagacaccagccgccagc

SEQ ID NO: 177871 - RNA, 77 nt, Homo sapiens
agcccgggagccccacccccggcggccaccacggagaacaagccaccccagaaagcgcaagcccgcccccgagcaac

SEQ ID NO: 177872 - RNA, 58 nt, Homo sapiens
caagcaaagaagggaaaccaggacagcgacaggggagcgacagaacaagaaagaggag

SEQ ID NO: 177873 - RNA, 86 nt, Homo sapiens
gaaggagaaggggaggagaaggcaagccggaaagagcgaaagaaagaagggggaggggaggcccacggggcaaccggggcgggcgg

SEQ ID NO: 177874 - RNA, 73 nt, Homo sapiens
accgagggaggaagccaagaaggaggggcgacgcacccccagaaagagcacaacaggagacggacaccccaac

SEQ ID NO: 177875 - RNA, 71 nt, Homo sapiens
cccgcgcagagcagacagaacagccgcgcggccagaggcgccagccgagagcaccaccgaccgggaagagg

SEQ ID NO: 177876 - RNA, 84 nt, Homo sapiens
gagagcgagagcgcgaaggaaacggccgccgccgccgcgagcgccccgggagcaccgcggacgccccagggcacaccgcgcacc

SEQ ID NO: 177877 - RNA, 39 nt, Homo sapiens
ggaccacgccggagcaaggagggagaagaccaaagaaga

SEQ ID NO: 177878 - RNA, 76 nt, Homo sapiens
caagagcaccacaagcccaaccccagacaggaggagcgcagccaggagcaaggccacgagagcagcccgccccccg

SEQ ID NO: 177879 - RNA, 72 nt, Homo sapiens
acccggggccgacaaaaccccggaggccccacaggggaacccagccgggaggagagcgaccccacgaagcag

SEQ ID NO: 177880 - RNA, 70 nt, Homo sapiens
agggacccggcaggccgcccccggcaagaggacggaagcaaagggcagccaccgaagacagcgaccagac

SEQ ID NO: 177881 - RNA, 68 nt, Homo sapiens
ggaggcggccccacgaggcagcaagccgaagagggcacggagggaagcagacacgaagagaggaaaca

SEQ ID NO: 177882 - RNA, 100 nt, Homo sapiens
acaggaacgggagacggaagacaagaagccaaagagcggaggcggcccgcggacgacacaagcccacacaaggaccggacccaagcagaaagaaggaccc

SEQ ID NO: 177883 - RNA, 62 nt, Homo sapiens
cgcggagagcccaaacaccaccaccaagagcaagaccacaacaaaaaaggaaagaaaacaac

SEQ ID NO: 177884 - RNA, 80 nt, Homo sapiens
gggccgcgggagcggagcccccgggaccaggaaacgagggaaagagcacggaccgcggaagcaagaagcagccaggggcg

SEQ ID NO: 177885 - RNA, 69 nt, Homo sapiens
cgacggccaagaaacccccaagagggcacaacaccaagcccaaaaggcagagcgaggagagaagaagga

SEQ ID NO: 177886 - RNA, 75 nt, Homo sapiens
gaaaggcaagacgggaaaagcgggaagcgcgcgccggaaggggacccccccccagagccaaagccggcagaccgc

SEQ ID NO: 177887 - RNA, 72 nt, Homo sapiens
aaagccacacacaccaaaggggaggggaagggccgaaacagacaaccgagaggccacacgcacagcaaggaa

SEQ ID NO: 177888 - RNA, 81 nt, Homo sapiens
acggacgacgccccggagacggcacaggccacagaggagaccaggaaacccaaagcacccagcagccaaggacaaggaaac

SEQ ID NO: 177889 - RNA, 71 nt, Homo sapiens
gggcacggggaaggcgcgacccagccaggcccgggaccacgcccgcaagcgacaggcgggggcagcaggag

SEQ ID NO: 177890 - RNA, 77 nt, Homo sapiens
cggagccgaggcgcaggggcgcgggggacgaagggaacccgccgggcggcccggcacccagccccccggcacccagc

SEQ ID NO: 177891 - RNA, 68 nt, Homo sapiens
gagaagccgaccaaaccaagacgccagccacagaccagccggggggcagcagccgccaccaggagccc

SEQ ID NO: 177892 - RNA, 82 nt, Homo sapiens
caggaggcaggccgccggccgaaggcccgagcgcccgaggcgcgggaggggggaccggcggaagaagaacaagaaagaccca

SEQ ID NO: 177893 - RNA, 68 nt, Homo sapiens
aggagggagagcacagcgcggcagaacggacaagaaaaccccaggacacagagcggggagcccgaagc

SEQ ID NO: 177894 - RNA, 102 nt, Homo sapiens
ggcgacaggaggaggacggagaggaggcgaggggagaagaccggacagaagaccgagggggcggcaggacacaagcaggggaggaagaagacgacagacccg

SEQ ID NO: 177895 - RNA, 72 nt, Homo sapiens
agcgccaggcccagacgccaacgcaggagcacccaggagaagcacaagaagacaagggcccagaaaccacaa

SEQ ID NO: 177896 - RNA, 94 nt, Homo sapiens
gccgccaccagccggacacacccgcccgcccagaacagagagccaggggcggcaccccgagaagcaaggccagaccagccgcggggcgaagcga

SEQ ID NO: 177897 - RNA, 72 nt, Homo sapiens
cgccgcgcaccggagccggcacggccggcgagggaaagacaacaaggagaacagaagaacgaccaagaggca

SEQ ID NO: 177898 - RNA, 81 nt, Homo sapiens
cggacgggggcaagcggaagggagcccaagaggaccagcaggagacgaggaggagaagagaaagaagaggaagaagccaaa

SEQ ID NO: 177899 - RNA, 74 nt, Homo sapiens
ccgccgaccaacgccggaaaggcgcggaaggcagaccagggccagagcaccagaccagcagaggagcgccgcca

SEQ ID NO: 177900 - RNA, 70 nt, Homo sapiens
aaaagaaaggggcaaaggaacgggaaagggccccaaaagccccccgaaaacggaggacaggcagaaaaca

SEQ ID NO: 177901 - RNA, 71 nt, Homo sapiens
gagccccgaggagcaggaaaccacaggcggacacgagcgaaccgaaaagagacacggaggggaaaccagaa

SEQ ID NO: 177902 - RNA, 81 nt, Homo sapiens
ggggcagggaggggcgcaggacagccggcggcggagcggccggccacggaggagggaccggagaagggcgggaaacaggcg

SEQ ID NO: 177903 - RNA, 72 nt, Homo sapiens
ggaaggagcgaggaagacggacggcagagccgggccagaagaaaccagaaccacagacaaagccgcccccaa

SEQ ID NO: 177904 - RNA, 83 nt, Homo sapiens
gcgacccagccagcgacgagaggagaaggcagagcccccccaggcagaagcccgagcgggaaccagcgaagccagggcgcaga

SEQ ID NO: 177905 - RNA, 87 nt, Homo sapiens
gccacacccacagagaacccagacaacaggacgccgccaagggccagggggaggacggcagcagaggaagaggaggaaaaaagagga

SEQ ID NO: 177906 - RNA, 74 nt, Homo sapiens
agaagaccaaagaaaaggagacaaggaggcccccagagcagccagcggcggacaaccgaaagcccgggcgaagc

SEQ ID NO: 177907 - RNA, 56 nt, Homo sapiens
caagaggcgcggcaagacacacgacggaccgcggcaagcgggagcggacccaccca

SEQ ID NO: 177908 - RNA, 75 nt, Homo sapiens
gacccaacaggcgggcgccaggcaccaggggaacgcccgcggacggcagggcgcgacaagaagcgcccgcccgac

SEQ ID NO: 177909 - RNA, 39 nt, Homo sapiens
aaaagaccgacgagaacaggccagaaaggaggcccacag

SEQ ID NO: 177910 - RNA, 109 nt, Homo sapiens
ggaccccaccgccaggaccccccaggagagcgccccagggcaagccccgcccggccaacaagaacgggaacagaacaaacgggaaacaggaaccaagccagaaaggaga

SEQ ID NO: 177911 - RNA, 74 nt, Homo sapiens
gcacaccccagcgcgcaaagcgcgaggggcgaggggagcgaacgaagaaaggccaagagggagagacaaggaga

SEQ ID NO: 177912 - RNA, 73 nt, Homo sapiens
acaggcccggacccaaccagagaaagacaaccaaccccaccgaggaggacagagacgcaaaacaccgaccgag

SEQ ID NO: 177913 - RNA, 66 nt, Homo sapiens
gggaggagccgccccgagggaagcagacggaaagcaagacaggaagaacgaaggagccgcacacgc

SEQ ID NO: 177914 - RNA, 93 nt, Homo sapiens
ccgccccgccaaccgcaaccagacgccagcgggacgaggaccgagaccgcggccgggaccgaggaaaccaagggagggaaccgggaacggcgc

SEQ ID NO: 177915 - RNA, 77 nt, Homo sapiens
gcggagcagagaccacacaaacaaaaggaaagccgcacagcgcacaaggggaaacccagaacaaaaccagccaagca

SEQ ID NO: 177916 - RNA, 82 nt, Homo sapiens
gaacagcggcccagggcaggcaagcaaaaagcggggccaagaaaggccaggggcccagaagggagcagccagagccaggaga

SEQ ID NO: 177917 - RNA, 80 nt, Homo sapiens
ggcggggcccgcggaggagccggggacacccacaggagagacgacgccccagcggcccccaccaagcgccccgccccagc

SEQ ID NO: 177918 - RNA, 81 nt, Homo sapiens
cagggaaaagccaaccggcccgaagaacacaggggagccggcccaggagcagcagggaggcgggaacgcccagggagcccc

SEQ ID NO: 177919 - RNA, 81 nt, Homo sapiens
aaagacggaaagcggggaagacaaaaaccgagggaggacccccgcggaaaggcaaagggccaccgagagcagaccggggac

SEQ ID NO: 177920 - RNA, 78 nt, Homo sapiens
gcaaaagggggagaggacaaagccgccaaggcagcagaacacggcggagccgaaaggagggagcaaaggacggcacgg

SEQ ID NO: 177921 - RNA, 60 nt, Homo sapiens
cagggaccaggaaccagagcgagagaaggacagaacggcaaagacccaaggaagagagag

SEQ ID NO: 177922 - RNA, 85 nt, Homo sapiens
cacaacagagcgcacggagagcaaggaaggagggcagcccaagggacgccccgaccaggcgcccagcgcccccccagcacaccca

SEQ ID NO: 177923 - RNA, 70 nt, Homo sapiens
ggaacaaaagccaggcacaagaaagcgaaagcggaaagagaaaaggccccccccaaagagccgagaccga

SEQ ID NO: 177924 - RNA, 69 nt, Homo sapiens
gaagacagcccgcacggcaaaaacgagccccaagacaaacaaagagcaaacacaggccccagacacacg

SEQ ID NO: 177925 - RNA, 85 nt, Homo sapiens
caggccagggcagaggaccaacagggcagagagcaaggggcgggagcccgagccccacaccgccgggcagcagggcggacgcgac

SEQ ID NO: 177926 - RNA, 66 nt, Homo sapiens
cccccgcggagaacaccccaccagggcgcgagccccgccgccccagcccagaccacacgaccacaa

SEQ ID NO: 177927 - RNA, 70 nt, Homo sapiens
gccggcgggccacgaccccacaccacggcgggggagggaagagccgcaggaggagaaccaaacgcgcgca

SEQ ID NO: 177928 - RNA, 79 nt, Homo sapiens
aggacagcgaacagacaaacacagggaaaggaggcgcaccgaggaaggaggaacagaagaaacagggcgagcccccaag

SEQ ID NO: 177929 - RNA, 54 nt, Homo sapiens
ccagaagcgagagaggcggaacaccccccccaagcgccccccccaacccaacgg

SEQ ID NO: 177930 - RNA, 76 nt, Homo sapiens
gagggcggcggcgcgagcgcccaggccacggagcgaggccccgcagaagcgagaagggaggggaagaagcggggaa

SEQ ID NO: 177931 - RNA, 71 nt, Homo sapiens
aaagccagagccaaaaaaacggcggaaaaaagcggagaagagagcacgcgccaagggcacacgcagaggga

SEQ ID NO: 177932 - RNA, 82 nt, Homo sapiens
aaaacaaaagcagcacagcgggccacaggcgaagggagggccgccccaaccgacgcaccagccggaggaggagggacagggc

SEQ ID NO: 177933 - RNA, 70 nt, Homo sapiens
cggaaggaggcagagcgcagaacacggcaggcgaacaagaggcgccagcgggcgcgccggaagaacagcg

SEQ ID NO: 177934 - RNA, 72 nt, Homo sapiens
agcaaccacaaaaaagccaggcccccacccaccccacaaccaaagcgcccgcaaggccaagccggcgaagcc

SEQ ID NO: 177935 - RNA, 68 nt, Homo sapiens
ccgaagccgaacccgcgcgacaaaaggaccagacaaacaaaaggggcaggaaaggggaggagggacac

SEQ ID NO: 177936 - RNA, 58 nt, Homo sapiens
cgacgaacacacgagaccggaggcagcacggcaggagacgaggagaggacagcaggac

SEQ ID NO: 177937 - RNA, 98 nt, Homo sapiens
gccaaagccagcaaccaaaaaaccagggacagcagcaaaacaggaacacaggaaggacacaggaagcgccagaccaggccacgcagaaaaggaaccag

SEQ ID NO: 177938 - RNA, 65 nt, Homo sapiens
gggcacgaccgacacacaacccgccccggacaggacagaaagcgggacacaagcaggagcacaga

SEQ ID NO: 177939 - RNA, 115 nt, Homo sapiens
gaccgggcgccgcgagccgcccaccggcgccacgcaagggcgaggcagccccaaacaccgaaagaccccacccaacccccgagaagaaacgccaagcaagaagggcaaaacaggc

SEQ ID NO: 177940 - RNA, 79 nt, Homo sapiens
agccaccaggaggagcggagaaggggacccgagccagggccccaagcgggccccgccgaacgccacggcgcccggcccc

SEQ ID NO: 177941 - RNA, 71 nt, Homo sapiens
cccagaagacagagggcgagacagagacaacgcgaacccgccaccccccccccagccaggagccggagaaa

SEQ ID NO: 177942 - RNA, 79 nt, Homo sapiens
gaaagagaagcccccccaaaagagcgccggagggcgcgcagggcagaaaagcacaccacagagacaaccagcaggaagg

SEQ ID NO: 177943 - RNA, 85 nt, Homo sapiens
acccggggcaggcgcaggaggcacccaaggggaggaaggccgcgagaaggacagaagagggagcgccgaccccaagaacggcaca

SEQ ID NO: 177944 - RNA, 81 nt, Homo sapiens
caacacgccagagcgcggaagaagacagcccaagagccagagacacggagaggcaaggccccgggaccaaggacacgcaga

SEQ ID NO: 177945 - RNA, 63 nt, Homo sapiens
gcagaaccgccgcgaggacacccggcgcagccccacccaggcacggggccgcaaggccaggcg

SEQ ID NO: 177946 - RNA, 64 nt, Homo sapiens
aggaaaagcaggccaaacccgagagaagcccaccacagaaggcgggacgacagcgcgaagcacc

SEQ ID NO: 177947 - RNA, 80 nt, Homo sapiens
agcccgccccgccgggggagacgacccccgccagaggcgggccaggccagcgggccggggagcgccagccgagaggagcg

SEQ ID NO: 177948 - RNA, 70 nt, Homo sapiens
gaagggaagggaacacccgcagcccgagggaaggccggccgccagggacaaaacacgacagccccaagcc

SEQ ID NO: 177949 - RNA, 67 nt, Homo sapiens
gccggggggccaggcccaccgccacgggggacacagccagggcgcaggcagcgcccaacaacacggg

SEQ ID NO: 177950 - RNA, 75 nt, Homo sapiens
aacggcacacgcgagcgacgccggggagggccgacagcaaccccagcagacgaccccgaccccgaggccagaacc

SEQ ID NO: 177951 - RNA, 76 nt, Homo sapiens
agacggcaagggcagccacagcaccaggcccgaagcagaaaacagagggaaagaaacagccccagagcccagagcc

SEQ ID NO: 177952 - RNA, 40 nt, Homo sapiens
ggccggggggacgggcacgggggaaacgcggccgccgcag

SEQ ID NO: 177953 - RNA, 74 nt, Homo sapiens
agaaaccaaggccagggagggaggagcgaagaaaccgcaaaggggagaaaaacccgaacaccagggagaagcaa

SEQ ID NO: 177954 - RNA, 86 nt, Homo sapiens
caaacgacgcagccacggagagcaggaggagcaagcacaacaggccgaagaggccggagaaggacacgcgaagaagaagagacagg

SEQ ID NO: 177955 - RNA, 67 nt, Homo sapiens
gccagccacgggccccacacggccgcgcggcacacccacccggggaaccgaccccacccccccgccc

SEQ ID NO: 177956 - RNA, 75 nt, Homo sapiens
caaaagcgcaccccaccagaaacgggggaggggaaagcggggcagcaaggcaaggaaaaaacgaagagcagggga

SEQ ID NO: 177957 - RNA, 69 nt, Homo sapiens
ggcacacgccaccgcaccccggccgcccccacggccccggcggccaaacaccgacggagcccccgcgcc

SEQ ID NO: 177958 - RNA, 73 nt, Homo sapiens
gaggccccgagccagccccgacagcgggaaccaggaagaaaggagcccagaggaaccgcgaaccagaccaaag

SEQ ID NO: 177959 - RNA, 63 nt, Homo sapiens
aaaccgggccaggagcgcagaggacagggaaccagaagaggccaaccagcacgaacgccagca

SEQ ID NO: 177960 - RNA, 77 nt, Homo sapiens
aaagggccccgagccagagcccagcagccgagggcgggccgaggcggaaaggggagaagcacagaacaaaagaagca

SEQ ID NO: 177961 - RNA, 89 nt, Homo sapiens
ggcccaaaaaaagggcaggaaccacgaaggacagaagacaccacagaggccggagagacacagggccgccagaagcgacagccccgacg

SEQ ID NO: 177962 - RNA, 73 nt, Homo sapiens
aggaccaagaaccagagaacacaaggaacgaaaggaagggaagaagcagaaccaagacaaaagaagaccccca

SEQ ID NO: 177963 - RNA, 100 nt, Homo sapiens
aacacaggacgcggacagcaacgaaagccaaacagacaaggaacgaaaccagccagaaaggaggagcaaggaagcccaggaacgagaacccaagcgcagg

SEQ ID NO: 177964 - RNA, 73 nt, Homo sapiens
gagaaggaccaagaaccaggcgccacaggagccgcagaagcaaaggcaccgccaaaccgaaaacgcgggaaag

SEQ ID NO: 177965 - RNA, 79 nt, Homo sapiens
gcacgggcaaggcgggcaggagcggcggagacgaggccaccaggaaagccgcagccccggcagcccaccccacaccggg

SEQ ID NO: 177966 - RNA, 59 nt, Homo sapiens
ccaaggcaagccagagaacacccgccgcgcaaaaggggcgacagcaagaaggagccagc

SEQ ID NO: 177967 - RNA, 65 nt, Homo sapiens
agcgaggccaaaaggcacgcccacggcagaagcccccgggcccagaccaaaagagcccagcaacg

SEQ ID NO: 177968 - RNA, 83 nt, Homo sapiens
gccagggacccggagggcgcaagcagcaggaaggagaccaagccgaaaagacgaggcgaggaggcgagacacccaacccaccc

SEQ ID NO: 177969 - RNA, 75 nt, Homo sapiens
aagaaaagaagcgaaagcgcaagacaaacgagaggagcacaaccagaaggaaaagaaccaaggaagagagaaaca

SEQ ID NO: 177970 - RNA, 71 nt, Homo sapiens
aaaagcccgaaggcagagcggacccaccaaaggaaacgacagcaagaacgaccaggaaaagggggaccaag

SEQ ID NO: 177971 - RNA, 71 nt, Homo sapiens
aaccccaccggccagcaaccacgacaggagggaaggagcccccccccgcccgccggccacacgccccggcc

SEQ ID NO: 177972 - RNA, 70 nt, Homo sapiens
gacgcggaccagcagaaccagaagaaagcccggaaaaaggcagaaggagacgcacgaagcagaacaaaaa

SEQ ID NO: 177973 - RNA, 72 nt, Homo sapiens
ggcgaaggccagagcacgagcacgggaaggccagaaaaacggaaccgggagaaaacaagcgagagacagaca

SEQ ID NO: 177974 - RNA, 76 nt, Homo sapiens
agccaaccgggccccccagcagacgcgggccaaccgccccccagcagcaggcacgggcgaaccccgagccccgccc

SEQ ID NO: 177975 - RNA, 74 nt, Homo sapiens
accacgcacgggccaccgcgacgaccgccgccaacaacagaagaaaacaggcgaaacaaggcacccccagcgcc

SEQ ID NO: 177976 - RNA, 69 nt, Homo sapiens
ggccccaacaaaaaaggcagaacagaccgaagccgaagaccccgcaggcggaggcaaggcaagaccggc

SEQ ID NO: 177977 - RNA, 79 nt, Homo sapiens
ggaagggcagcagaaccagccacggggacaggaacgaagcaggagcacccacgaaccccaccagcagaggacagaagag

SEQ ID NO: 177978 - RNA, 58 nt, Homo sapiens
aacgcccagcacccaccaccagcagggaagaaaaggagacaacacaaaacgccacagg

SEQ ID NO: 177979 - RNA, 49 nt, Homo sapiens
aaaccaaggggcaaaccagagaaagagcgcgcacgaaagcacacgaaaa

SEQ ID NO: 177980 - RNA, 75 nt, Homo sapiens
cgggcaggaaaccggagcgaagaaaaaggaaggacgagcccccgcggagacagcccgaagaacccgaacgcaagc

SEQ ID NO: 177981 - RNA, 77 nt, Homo sapiens
aaagggaccagaccagggagaaccaagcccggaccgacaggaaagaaggagcccacaaagaaaagaacaccgccagc

SEQ ID NO: 177982 - RNA, 72 nt, Homo sapiens
gcccaagacagcaagggacagacgggaaaaaagagcaccagaagcgcggcgcagccagacgcaaaaaggagc

SEQ ID NO: 177983 - RNA, 78 nt, Homo sapiens
gaaagcgaccaaaaaagcccgcacagcaggccaagacggaaagcagaggacccagcaaaggaacaggagacagcggag

SEQ ID NO: 177984 - RNA, 76 nt, Homo sapiens
cgacagggcgggcggacgaccccacagacggcggagaacccaggggaacacagcggacaaacgcgacgaacgccag

SEQ ID NO: 177985 - RNA, 84 nt, Homo sapiens
aacggcggcgggacggcggccccgcgcagcccccggccgcagcgcaggcagcccagcaggcgagaacgcggacaagcaaacaaa

SEQ ID NO: 177986 - RNA, 78 nt, Homo sapiens
ggccgggcccaggaaaccagggcacagccaccagggaaaaacagagaggaacaacgagcccacaaaggacagaaaccc

SEQ ID NO: 177987 - RNA, 79 nt, Homo sapiens
aggcagagcgacccaggcacagcaagggcagacgggggaggaggacgcaaagacaagccacagacaggaagcagcagcc

SEQ ID NO: 177988 - RNA, 77 nt, Homo sapiens
ggcgggaggacgggcgccgcaggagaagacagaggagccagaccaagagacagcacaggcgagcgagcagagacacc

SEQ ID NO: 177989 - RNA, 75 nt, Homo sapiens
gaaggaccaagaaccaggagaccggaaaccgagagaaacgaagacgaagaaacagccgcacacagaagaaaacga

SEQ ID NO: 177990 - RNA, 44 nt, Homo sapiens
gagagacagaagccacagccccaggccgccgcggccccgcagcg

SEQ ID NO: 177991 - RNA, 82 nt, Homo sapiens
ccgagggcagccacagcgggaaaagaaagcaacgcgagcccgcacagccaccggcacacggaaacgcacaggaagcagccag

SEQ ID NO: 177992 - RNA, 77 nt, Homo sapiens
ggaaccagcacagagagcaggacaacaaacgagcacggagaaccgccagccgacgcgccaggaggggcgccacagcc

SEQ ID NO: 177993 - RNA, 73 nt, Homo sapiens
aaaggaaaacgaggaaagcccaggagacacggcaaaagacaaacagaccccagaaagaagaagaggaaagccc

SEQ ID NO: 177994 - RNA, 74 nt, Homo sapiens
cgacgcacaccacgccgccacaggccaagagaagggcgaagagaaacaaagaagagaccagccagaggagggcc

SEQ ID NO: 177995 - RNA, 53 nt, Homo sapiens
gaagaagcgagacagagggccaaggcaacacccgacgggacacagagccacaa

SEQ ID NO: 177996 - RNA, 61 nt, Homo sapiens
gaggaggaggggagaggccggaggacaccaacagaggaaccgcagcaccaggcggaggcag

SEQ ID NO: 177997 - RNA, 57 nt, Homo sapiens
cgccgcggcccggagcgcggcccgaggcccgcccagagagacaggggccaggccagg

SEQ ID NO: 177998 - RNA, 74 nt, Homo sapiens
cagggccaagacagggcccgaaggacagccaccagcgaacaccagcaccacccaaagaaaaagaacagaggcca

SEQ ID NO: 177999 - RNA, 71 nt, Homo sapiens
gaacacaaggggcaaccaggcccccgagcggccaagaaccacgagaacaggccagccagaccagacccacc

SEQ ID NO: 178000 - RNA, 76 nt, Homo sapiens
acagggaaaaaccaaagccccgcgcaaagaccgcagaggcaacaccaacagcagaagaggaccagcacaagcaacg

SEQ ID NO: 178001 - RNA, 78 nt, Homo sapiens
cccagaggagcacagccgcaggaggcacccgcggcgagaagaggaaaaaccagaaagaagcaagcaagaccggggggg

SEQ ID NO: 178002 - RNA, 62 nt, Homo sapiens
ggacggccacaaaggcaaggcaagcaggccaagcaggaagcacgccgggaacgaagcacacg

SEQ ID NO: 178003 - RNA, 72 nt, Homo sapiens
cagcgacccaagcgccgcggaaccacgccgccacgacccccaggaaacccggcgcccgggggcccaaacagc

SEQ ID NO: 178004 - RNA, 103 nt, Homo sapiens
gccgcggggcggaggacgcggcagcccgggagcggcgagggaaaagcgaggcaaggcaggcggggagaagagcaaccggacacagaaggggaaggaaacccca

SEQ ID NO: 178005 - RNA, 80 nt, Homo sapiens
ggccgaccagggagaagggcccacggaggagaagcaaggcaccagggcagggagccaccgccaagcccgccccaagcgcc

SEQ ID NO: 178006 - RNA, 61 nt, Homo sapiens
gacaaaagggccaaagaagggagagagcaaccgggggcgacccggaagcggaccccagccg

SEQ ID NO: 178007 - RNA, 57 nt, Homo sapiens
gagagacaaccaaaagacacaagggcacgaaagaggcaaaagcagaccggaaaaccc

SEQ ID NO: 178008 - RNA, 56 nt, Homo sapiens
acccggacaaccagaggcagccagcagggggagcccgaccccgaggaaccagcgac

SEQ ID NO: 178009 - RNA, 73 nt, Homo sapiens
ccagggcaacggcggagcgcaagagagcaaacagaacaaaaacaagaaaagcgacagaggggagacaagaagg

SEQ ID NO: 178010 - RNA, 54 nt, Homo sapiens
cggaacagaccacagggaccaccggggaagcgacccggaaccgggaaaccaggc

SEQ ID NO: 178011 - RNA, 80 nt, Homo sapiens
cacgagcagggaaaacgggccagaccacacacacggcacagaaggcaacaggcccaggaggcaagagcgagaagagcgca

SEQ ID NO: 178012 - RNA, 70 nt, Homo sapiens
ccgggagagaaacacggaaggacgcaaaacaccaaaaggagaggcccgacaagagaggcggagccacccc

SEQ ID NO: 178013 - RNA, 58 nt, Homo sapiens
agcgacaggagcacacccggagaagcaggagcccaccggcagggaggaggacggacac

SEQ ID NO: 178014 - RNA, 82 nt, Homo sapiens
ggcaccgggacggaccgagaccggaccgagagcggaccgagagcgcgaaacgcacgagaagacgcggcgaggaagagggcag

SEQ ID NO: 178015 - RNA, 81 nt, Homo sapiens
gaacaacaaaacagagaaaaaacgccacccaaaggcggccgccacgggacagacaacaggcacaaagagagaaggaacacc

SEQ ID NO: 178016 - RNA, 61 nt, Homo sapiens
cggaggaggcgaccgcggcgcagcgacccccgccaggcaaaaggaaggcccgagaagcagg

SEQ ID NO: 178017 - RNA, 62 nt, Homo sapiens
gaaccgggaccagaaaaggaaaaccaagcaccgacggaaacaggcgaaaaacaacgacgaag

SEQ ID NO: 178018 - RNA, 87 nt, Homo sapiens
ggaccacacggacgcgccagcaagccggccaaacaacaagcagggcagggcaaaacaacagagggccagcccccgcccggccagcgg

SEQ ID NO: 178019 - RNA, 92 nt, Homo sapiens
ggcgaacggaaggccacgcccccccgccgccccccagcccgggcgggggcagagccagagccggagaaagcgggaacagcacaaggagggac

SEQ ID NO: 178020 - RNA, 80 nt, Homo sapiens
gcagggggcacccgcggccggcccggggccccgggaccggcgcccccccggcgaccccgcacacacacccaccagccacg

SEQ ID NO: 178021 - RNA, 77 nt, Homo sapiens
gggcacaggggagaagcccaggaaaggagagcaagcccggaggcacccaagaagcgggcgagggaagcacacaagca

SEQ ID NO: 178022 - RNA, 80 nt, Homo sapiens
cccaaaggggggcaagcagaaagaaggaaagaggccaaagaagcaacaagaaggagaccggaagaagcaaaaccaaggca

SEQ ID NO: 178023 - RNA, 71 nt, Homo sapiens
ggccgaaccccaggaacaaggcaaaccgacaccagcgacacaagcgcgagggaaccacagaggacaggcga

SEQ ID NO: 178024 - RNA, 80 nt, Homo sapiens
ccggaggaccggagcggagggcggagccaggggggggccggagcaacagaagccaggcaaggaacgcggagaaacaaaag

SEQ ID NO: 178025 - RNA, 67 nt, Homo sapiens
ggagaacacagaaaccggccccagaggaggaggggaggaggaggaggaggagagcgcccaagacagg

SEQ ID NO: 178026 - RNA, 77 nt, Homo sapiens
ggccacccagcggggagcacggcgagcagccaggccaggagaggagcgccccaaaagaaacaaagccaaccaggcaa

SEQ ID NO: 178027 - RNA, 73 nt, Homo sapiens
gcaccagcggaaagggaacccgacaagaccaagacacccaagaaaacgaaggaaggaggacccgaggagagag

SEQ ID NO: 178028 - RNA, 70 nt, Homo sapiens
ggaaccggacacagagacaggggagcaagaacaaagggggccaacggagacacaagaacgcggcaagacc

SEQ ID NO: 178029 - RNA, 79 nt, Homo sapiens
cccaggaagggccgccgagcgccaggccacccccgggcagcgggccgcccggcagcaggcggcaggacacaagcagggg

SEQ ID NO: 178030 - RNA, 72 nt, Homo sapiens
gagcccagccacccccccaacccgggggcaaaagcccagccagaaagggcaggaggaaccaaaccaggaccg

SEQ ID NO: 178031 - RNA, 68 nt, Homo sapiens
gggagcccgcgcccgccgcgggagagaggacccccccccccccccaagagcccccgcaccaccagccc

SEQ ID NO: 178032 - RNA, 82 nt, Homo sapiens
ggccggacgcgccgcgcgggcgacagcaagaaggagccagcacagaggcaaaagaaccaacaaaggccaaaagaggaccagg

SEQ ID NO: 178033 - RNA, 74 nt, Homo sapiens
gagacagcgaggacagaaggaagaagacgaccccgacgcaggccaggagccgcggacagaagccgagcacggcc

SEQ ID NO: 178034 - RNA, 66 nt, Homo sapiens
caccccccaagcgcggccagaccgcggggcacacaccgccccgacaagggaccgggcgggccccgc

SEQ ID NO: 178035 - RNA, 45 nt, Homo sapiens
gggacccccaggagggacccgcaggaccgaaggagaagaaggaga

SEQ ID NO: 178036 - RNA, 61 nt, Homo sapiens
cgggccgcccgcaacaggaacagcgaagaagacggcacgggacccccagcacaggcagcag

SEQ ID NO: 178037 - RNA, 71 nt, Homo sapiens
caccggccacccacgaacaaggaaaaggacaaccggggaagcagaacacgacgaggaaggccccaagcaca

SEQ ID NO: 178038 - RNA, 76 nt, Homo sapiens
aacgacaaggaggaggaaaacaggaacaccaccaaaaaaccaagaggcaggacggagcccgcgcgcggcgccacca

SEQ ID NO: 178039 - RNA, 70 nt, Homo sapiens
aaggagcaacagacagcccccagaacagcaccagaaaagcgcccaggaagcggaaaaacaaaagagccgc

SEQ ID NO: 178040 - RNA, 74 nt, Homo sapiens
gggacacgggaccaaaaaaacaaccgagcacaaaaaaggcacccggagaacagacagaccagccgaacccagaa

SEQ ID NO: 178041 - RNA, 65 nt, Homo sapiens
ccgagaccagccgggcaacagcggccgccagcccgccgggccaaaacaaaaggccgccacgccag

SEQ ID NO: 178042 - RNA, 67 nt, Homo sapiens
cggacagcgcaccccacgcggccgcggagggaaggaagcaagaaacagggaggacagaaacacggga

SEQ ID NO: 178043 - RNA, 80 nt, Homo sapiens
acaggggcgggaccgagcacgccacagacaagacaggaccacagaggagccccaggggcagggccccaagggcgccagca

SEQ ID NO: 178044 - RNA, 80 nt, Homo sapiens
cacgggccccacgccggagagggaaaccagacacacgcagacagacgccggaccgcagcgaagccaccagaagcggcacc

SEQ ID NO: 178045 - RNA, 73 nt, Homo sapiens
gccacccaagacacaaacggcgacacagggcggaacagaacgacaggagaacagaccagagcgaagaacagga

SEQ ID NO: 178046 - RNA, 87 nt, Homo sapiens
gcagacagaacagaagacgaaagagggaccaagaaaggcccagggaccaaagcccggacaaggcccgagcaccaggaccgcagaagg

SEQ ID NO: 178047 - RNA, 66 nt, Homo sapiens
gccgaagagccaaaaagaccaagcccgagcaaaggcccccgcccacaacggaaggagaaggacacc

SEQ ID NO: 178048 - RNA, 70 nt, Homo sapiens
cgaggccagcagggaaagccccgcagcaacagggacaaaacacgacagccccaagccccccagaaccgac

SEQ ID NO: 178049 - RNA, 75 nt, Homo sapiens
cagccgaggaccggcaaggaggaggacgaaagggaaagcccgaaaaggaccagcgaagcaagcacagggaggaaa

SEQ ID NO: 178050 - RNA, 81 nt, Homo sapiens
cggagcgcgaaggccgggacccggccccggcccacaggggggggcaaacccgagagaacggggccgggggcaagacggaga

SEQ ID NO: 178051 - RNA, 83 nt, Homo sapiens
cggacccgagacccccaaaggccagaaagccgaacggaccccgccacccaaaacaaggaacaccagcccgaccccgagccaac

SEQ ID NO: 178052 - RNA, 103 nt, Homo sapiens
caagagcaaagcacccaccagaaagaggcacagccccaaaagaaaggcagacagcgcacgccaggcggaggcagggcacaacacagccacgcagccgaccccc

SEQ ID NO: 178053 - RNA, 85 nt, Homo sapiens
gagaggacgggaccaggcgaagcggccgagcaggcgagcgaacgacgacaagcagaccccaggaccggaggagagagcgagacca

SEQ ID NO: 178054 - RNA, 82 nt, Homo sapiens
cccgaggagcgggccgccgcagacacagcgagaagaggccaccagaaaacggccacgacacgagaaacggaacggccgagga

SEQ ID NO: 178055 - RNA, 78 nt, Homo sapiens
ggaccaagaaccagggagaagcgagcgacacaagcccaccaagcaaagaggcgcccagaaagcagaacaggccaccgg

SEQ ID NO: 178056 - RNA, 79 nt, Homo sapiens
caacgcaagagaagagggaggggaaaagaaggaggcagcccaaaggcaagaagggaggccggacgcaccccacccccgg

SEQ ID NO: 178057 - RNA, 77 nt, Homo sapiens
gcccacacagcaggcccgggcgaagagcccccccccaagcgccagaaaagaagagagccagcaggaacaagcaggac

SEQ ID NO: 178058 - RNA, 80 nt, Homo sapiens
gccgccaccgcgaacaggagcccgacagaaggagaagaaaaggcagacaaaccagacagggggaaacgccagccgaaagg

SEQ ID NO: 178059 - RNA, 62 nt, Homo sapiens
ggcgggcgcagccgccaccggcagcagcagcaccaccggacgacacacggcagggaacccca

SEQ ID NO: 178060 - RNA, 57 nt, Homo sapiens
gaggcccgccggagggagcccccggcgggggcaagggacaaagcccccagaggaacc

SEQ ID NO: 178061 - RNA, 83 nt, Homo sapiens
ccgcgcgagcacccgagcggcggcggcggcagcagcggcagcggcaagcaccgaacacaagccagaaaaagggggaagccaga

SEQ ID NO: 178062 - RNA, 74 nt, Homo sapiens
cgccggggccgccgaccaacacccgaggcggacgcagagacaggaacgaacccaacaggagggcggcggcaagg

SEQ ID NO: 178063 - RNA, 74 nt, Homo sapiens
caaacaaagaaagacggacgaggccagagaggagcccacccccaacagaagagagaggaaaccgaaaaaccaaa

SEQ ID NO: 178064 - RNA, 51 nt, Homo sapiens
cgggagcaaggagggcgaagagcgaggaggagccagcaacggaccacgcgc

SEQ ID NO: 178065 - RNA, 78 nt, Homo sapiens
gcgacccgcgacgccgagcacccaggcgacgcccaccaagggagggcagaggccaggcccccgccccgcaggagagga

SEQ ID NO: 178066 - RNA, 78 nt, Homo sapiens
gccccccagcccccgcagacggcgaggggcgaaacaggagacggggagaaggacgccgaccccaagaaacgacaggaa

SEQ ID NO: 178067 - RNA, 71 nt, Homo sapiens
ccccgcagcgacgcggcggcaagacggggcgggggccggaccaaggcaaaagggaaagcaaggggaagggc

SEQ ID NO: 178068 - RNA, 51 nt, Homo sapiens
accaccagaagcaccacaaccgcagaggcagaaacccgcgagcagaacgcc

SEQ ID NO: 178069 - RNA, 74 nt, Homo sapiens
aaaaaagaaggaacccaaagaaccaccccaaacaggagggacgcgagagcccacgaagagcgacggagcgaacc

SEQ ID NO: 178070 - RNA, 77 nt, Homo sapiens
cccgcagggcgagagcgccccagggggcgagagcagagcgacagaggaggagaggaggaggagaagccgccgaggag

SEQ ID NO: 178071 - RNA, 59 nt, Homo sapiens
accccccacgcagaggggagagcggcacgaaacgaaaacaaacggaagagagggcagca

SEQ ID NO: 178072 - RNA, 88 nt, Homo sapiens
caaaaccacccaaggagggaggggcagaggagaaccgacgaaccgggcacacagggaccaagaagccccggggacacgcgagaaaaga

SEQ ID NO: 178073 - RNA, 68 nt, Homo sapiens
aacgagaaaacggcggacaccagaacgcagagaaggaggcaaagaagacgagaaagacagaccagaac

SEQ ID NO: 178074 - RNA, 70 nt, Homo sapiens
aagcaacccgcggggacagggaaaaagcaaccacacaggaaccaacaaccaggacccagaggaacccgaa

SEQ ID NO: 178075 - RNA, 82 nt, Homo sapiens
gggagaaagcgcccacgcacgaaagcccaggccaaaaagagggcggagaacggaaaagcaccaggaagcagagaggaccgca

SEQ ID NO: 178076 - RNA, 63 nt, Homo sapiens
acccagcgccgcggcgcccgagcggcgggccgcagagacacccgagacaaaggaagaaggaaa

SEQ ID NO: 178077 - RNA, 66 nt, Homo sapiens
accggcccagagcacagaagagccaccaaagaacaacaagagccgcagaaggcagcagggaacgga

SEQ ID NO: 178078 - RNA, 69 nt, Homo sapiens
cgagcagcccagcgaccaacgccgcagccgcaggaagcgaagccgaagaagccgcgggggggcgcagcg

SEQ ID NO: 178079 - RNA, 73 nt, Homo sapiens
aggagaacgaacaagaggcagagaaggaagcgacccggaaccgggaaaccaggcaagaagcaacgaagagaac

SEQ ID NO: 178080 - RNA, 75 nt, Homo sapiens
cggaccgagaccggaccgagagcggaccgagagcgcgaaacgcacgagaagcccgcaaaacccacgaaaagagac

SEQ ID NO: 178081 - RNA, 85 nt, Homo sapiens
agccgcagccgagccaccagagaagcggcacagcagagaaggagcagagaacgaccaagaggaggacgggcaggccggagcggca

SEQ ID NO: 178082 - RNA, 70 nt, Homo sapiens
acccagccggcgaccaggagagaagcccacaggccaagcggggaagacccccagagggaagcaggaaggc

SEQ ID NO: 178083 - RNA, 87 nt, Homo sapiens
cgccggcgcccgcaccccggggcccaggaagggcggcccagggcccaccggccccgggccagcgccaggccgggccgccccaggagg

SEQ ID NO: 178084 - RNA, 75 nt, Homo sapiens
cgaagaaacagcggagaaggagaagggagaagaaacagcagccgcaggagcagcagaaagaccaaacaagcagcg

SEQ ID NO: 178085 - RNA, 73 nt, Homo sapiens
cggcaagaggagaaggcgaggccacagaaccagccacagcggggcggagagaggaagagccacaaacccagag

SEQ ID NO: 178086 - RNA, 72 nt, Homo sapiens
cagcaagggaccgaaagcagacccggaaaggacgcgggaaaaagccccgaccgcacccacgaccgaagccgc

SEQ ID NO: 178087 - RNA, 76 nt, Homo sapiens
aaaaaaggaaaacccagcaagaacacaaacagccgggaagcaccgccagcaagcaagagaacaaaagacaaccgcc

SEQ ID NO: 178088 - RNA, 40 nt, Homo sapiens
gcggcaaagcaccgacaacgcagacaggccgcaccaacaa

SEQ ID NO: 178089 - RNA, 63 nt, Homo sapiens
ggacgccccaccgccgacgcccccagccaccagaaaccgcaagaacccaggcacaaggaagac

SEQ ID NO: 178090 - RNA, 77 nt, Homo sapiens
acgaagcaaaagacagcgaggagcagcagcagcccagcaggcgcggcccgccaggagcgggggaggggcccagggca

SEQ ID NO: 178091 - RNA, 78 nt, Homo sapiens
ggccaacaaggccgggccgacagcacggggcagacaccgcccgaacacacaccgacggcccccccaaggagaacagag

SEQ ID NO: 178092 - RNA, 68 nt, Homo sapiens
cccacaagacgccacaggccggcaacgccaggagcgcggggccgcccggccggcgagcgcaccgaccc

SEQ ID NO: 178093 - RNA, 76 nt, Homo sapiens
gggaaggcgccggggccagcgcagccgcggcggagacgcacaggcccgcaaagcagcccgaggaggcacgcaaaac

SEQ ID NO: 178094 - RNA, 65 nt, Homo sapiens
ccccggacagccgccgagagagacaaagagaggagagaggcgaccacggcccagaagcggacaac

SEQ ID NO: 178095 - RNA, 76 nt, Homo sapiens
gagccagccagaaaaaacacagccgacagacgccaccaaaagcaccagggcccggccgccccgcaccgagcgcccc

SEQ ID NO: 178096 - RNA, 74 nt, Homo sapiens
agaccagaagacagccacgaggggcaggggcagcgcgaacaaaccggagacgaccagaaaaccccaaagagagg

SEQ ID NO: 178097 - RNA, 83 nt, Homo sapiens
gagaaccgcgccagacgcgccccagaccaccggcagggaacagccgagcagaccgaggaggcccaccagcagacgccacacag

SEQ ID NO: 178098 - RNA, 74 nt, Homo sapiens
gccacgcgggggcaagacgaaggcacgcggcagaacgccaaaaggaagcccaaggacgacacaacccaagggag

SEQ ID NO: 178099 - RNA, 80 nt, Homo sapiens
gagcggccaagcacgccggccgagggcaccaaggcggcaccaagacaccagccgaagcggcaggacacaagcaggggagg

SEQ ID NO: 178100 - RNA, 66 nt, Homo sapiens
gcccggagcagccggcagagccggcgcggcccggagaaccgagagccagaagcaacaaagagccaa

SEQ ID NO: 178101 - RNA, 78 nt, Homo sapiens
gagcaagaccgggcccacgagagggcccaggcagcggcaagacggcccaagcgaccagacacagaaggcgaaggggac

SEQ ID NO: 178102 - RNA, 82 nt, Homo sapiens
caggagacgagaggacgggaccaggcgaagcggccgagcaggcgagcgaacgacgagcaacaaggagacgcgccgcccggcc

SEQ ID NO: 178103 - RNA, 83 nt, Homo sapiens
accgggcggcacgcacgcgggcagggaacaggcggagcggaaggaggaacggagaagcagccgcgagaggcgcagaccaggag

SEQ ID NO: 178104 - RNA, 81 nt, Homo sapiens
ccgggcagccccccgcaccggcagggagaggcggacacagacaagcacccgacaggaggacgcccgccaggggagcagaca

SEQ ID NO: 178105 - RNA, 74 nt, Homo sapiens
acagccccgggccagcaggaacacgaggacccaaagaacaaacccggagagaagaaaaccccagcagggcgcca

SEQ ID NO: 178106 - RNA, 57 nt, Homo sapiens
gcaggcagccgacgaagagggggggcccccaaagggaagccaaacacaaaggaagaa

SEQ ID NO: 178107 - RNA, 63 nt, Homo sapiens
cagcgcgcaagaggccacggcgggggcaccgagaagccccgaccgacggggggaccgcggggc

SEQ ID NO: 178108 - RNA, 74 nt, Homo sapiens
aaagaccgccagcgaggcagacacacggcaggaagggccacgggaacaaaagaggacgcgcggaaggggaacag

SEQ ID NO: 178109 - RNA, 79 nt, Homo sapiens
ccaaagaagccaaagacgcacagaagcacaaaacgagagccacgacagagcacacgccgcgcggaggcgcacacacagc

SEQ ID NO: 178110 - RNA, 82 nt, Homo sapiens
gcagccacagcccgaagcggcaagaaggacgagagaggagcgcgggccgagagcggagagcgggacgcaaggaggaggacgg

SEQ ID NO: 178111 - RNA, 60 nt, Homo sapiens
ccgagaggaggcggagaccacccaaaccccccaagaaggaagagcaaagaggcggaaaaa

SEQ ID NO: 178112 - RNA, 56 nt, Homo sapiens
agcgcccagagagccagggagggaaaacacaaacaacccgagcccagggccaaccc

SEQ ID NO: 178113 - RNA, 78 nt, Homo sapiens
ggcaaaccgaaagaccccagaggagggaggccaaacacacaggaacgccagaccccagccgagggaggcaacagcaaa

SEQ ID NO: 178114 - RNA, 77 nt, Homo sapiens
agagaacaagacgaagaacagaaggcgacaaggccaagaccgccagcaaaggaagacgagaaagccaaacggcccgc

SEQ ID NO: 178115 - RNA, 73 nt, Homo sapiens
caggggcagcgcgcagcgggcacggaggccggggccagaacgggaagaagagagggcgaaggaggccacacag

SEQ ID NO: 178116 - RNA, 81 nt, Homo sapiens
ccgaggcccagagagaccccagaagcaaacggggacagcgccgaccggaacagggaccacggaagcccaggaccagccccg

SEQ ID NO: 178117 - RNA, 37 nt, Homo sapiens
cccaggcccccaggagcagggcggagagagacgaacc

SEQ ID NO: 178118 - RNA, 81 nt, Homo sapiens
agccaaggaaaaacggagagccacaaaaaaggaagcgaaaaagccaagaagagcagaagaaaaaagccaaccccgagagga

SEQ ID NO: 178119 - RNA, 61 nt, Homo sapiens
cgccgagcccaggcaagagcccgcgagaagggcacacaggccccgagaaccaagagaaccc

SEQ ID NO: 178120 - RNA, 78 nt, Homo sapiens
ccagcccccaccgcgccaagggcacagaagggcacccaacccccgacaagcccaggacaacacaccgcccaaccggga

SEQ ID NO: 178121 - RNA, 39 nt, Homo sapiens
aaaaagaccacagacagcccacggcagacacagcaggcc

SEQ ID NO: 178122 - RNA, 43 nt, Homo sapiens
ccggagggcccgcaccccagaagcacagaagaccccagccagg

SEQ ID NO: 178123 - RNA, 79 nt, Homo sapiens
ggcccgcccccggccggggcgcagcggaggcagcccgggcgcgccaggcacagccaagagcggaccggcagcggccagc

SEQ ID NO: 178124 - RNA, 65 nt, Homo sapiens
gcggcggccgaacaagaagcccgaagccgaccgggcaaccacaagcagccaaaggcagggaagaa

SEQ ID NO: 178125 - RNA, 78 nt, Homo sapiens
gccgagcccagcaccaccaccacccagccgccaccaggccgcccccgaggcccagagcggacacagaggaagggcgcc

SEQ ID NO: 178126 - RNA, 92 nt, Homo sapiens
aagaggagaaaaaccagaggcgggaaaagcaccacgcaagaagaagagcggacgggccccgaagcccaaggggagaccaggaacaaaaccaa

SEQ ID NO: 178127 - RNA, 82 nt, Homo sapiens
caggagcacgggaggacagcgggagaaccaccacagacgacgagcagaagagagcggagagcgggaagccaccaccacccga

SEQ ID NO: 178128 - RNA, 82 nt, Homo sapiens
caggacgcagggggccggggaagccgcacagaggagcaccagcacccccgaagaagggccgaggggaaggaagcacgggaca

SEQ ID NO: 178129 - RNA, 73 nt, Homo sapiens
cgcccgcaccgccgcgggagcaccggagaggggccgcggaaaccggagggaaggggaccaggaggagaagcaa

SEQ ID NO: 178130 - RNA, 89 nt, Homo sapiens
cgcggaccagcagcgcgggagagcggaccccccgccaccgcccgagcccagagcaaacaggaggaagaaaaaaacagggcacggccccc

SEQ ID NO: 178131 - RNA, 69 nt, Homo sapiens
acacgcaaaggagaaaggaaccgacagaaaggaacccaaagcacaaaggcggaggcgggcccaacgcca

SEQ ID NO: 178132 - RNA, 75 nt, Homo sapiens
cagagcaaggaggccccagcggaccgaacaggggcaaaggagcagagaacgacaagccacacgaggacagcccgc

SEQ ID NO: 178133 - RNA, 52 nt, Homo sapiens
gggcagacaagcacgccgcccagacaaccggggaaacccgcccagggcggga

SEQ ID NO: 178134 - RNA, 75 nt, Homo sapiens
acagacgcagggcgcccccgacacagagagacggaaggccacaggccgaggagaaggcgcacaaggaccagacaa

SEQ ID NO: 178135 - RNA, 88 nt, Homo sapiens
ggggccaggaagcggaggagccccggaggcagagcggcgccaggaccaggccaaccggagcgcacccacgccacaagccggacggcgg

SEQ ID NO: 178136 - RNA, 77 nt, Homo sapiens
agagaaaaagagaagaggaagaggagaacacgcacggcaaaggaacgagaaagagcaaggcgccaccggaagaaacg

SEQ ID NO: 178137 - RNA, 80 nt, Homo sapiens
agaagaaagacggagggagaaggaagcccccagccccccaggcccgccagggaaggcgaggagcggaaggcgagcggagc

SEQ ID NO: 178138 - RNA, 69 nt, Homo sapiens
cgaagacaaacaaaagagaacgaaaaaaagcagagaaacaacacacgggagcaccgcacagaagcaacg

SEQ ID NO: 178139 - RNA, 86 nt, Homo sapiens
gcaccagcagaacaacagcgaggaagaagaggacgacgacgacgaggaagaggaggcgaggcaaagcgaaaaagaccgcagggaag

SEQ ID NO: 178140 - RNA, 72 nt, Homo sapiens
aaaacaccaaaggaaagcagcgaacaccccagcggagaggccaaggggagaggcaccagcaacagaccaacc

SEQ ID NO: 178141 - RNA, 74 nt, Homo sapiens
gagacgcgcccgcaccaggcggcaggaagcacaaaggacccagaccacaagacaggaggaccgccccggagcag

SEQ ID NO: 178142 - RNA, 80 nt, Homo sapiens
agagcaacaccccaccccaagccagaccggaggaagacggccgaggaggagaccgcccagaggcacaaggaccgaccgag

SEQ ID NO: 178143 - RNA, 78 nt, Homo sapiens
acgaccgccgcccgcgggcgaggccagaggacaggccgagcgccggccggaacacgggcagagaggccagcacacagc

SEQ ID NO: 178144 - RNA, 81 nt, Homo sapiens
agcaagaccagggcgagacacgcgaccccaggagagaacaacagggggccgccagcagccgccagcaagacccggacagcg

SEQ ID NO: 178145 - RNA, 64 nt, Homo sapiens
aacccgcgcgacaaaaggaccagacaaacaaaaggggccggccaagaacgcccaaacacaacac

SEQ ID NO: 178146 - RNA, 68 nt, Homo sapiens
acaaaagagaagccagaaacggaaacagaacaacgcaaagaacgcggcagaacggaggcaggcagcac

SEQ ID NO: 178147 - RNA, 52 nt, Homo sapiens
cagacaaagacaaggaacaagccccccagcagcaggcccaccaggggaaccg

SEQ ID NO: 178148 - RNA, 71 nt, Homo sapiens
accgccgcccgccgcggccgcgcccgaaaacaaagagggaaaacggagaaaagcccccccaggccagcgca

SEQ ID NO: 178149 - RNA, 78 nt, Homo sapiens
acagggagggaaaggacacaccaagcacccacggagagagagccggagggcaggaagccgccaccaggaaccccaaag

SEQ ID NO: 178150 - RNA, 76 nt, Homo sapiens
gagaaacgcggaggagaaagccccgaggaggacgagaaggacacgacgggagacagcagccaaagaacaccaggag

SEQ ID NO: 178151 - RNA, 72 nt, Homo sapiens
aggggagagcggcccccgcagaccacagagcccgggaagcgcagagggaacacggccacgaggggaacggga

SEQ ID NO: 178152 - RNA, 88 nt, Homo sapiens
ccaccgccagggcccgagaaccgggcggggcggcccaaggggaagcgggcccggccccgcgggaagggccgccaaccggacaacggca

SEQ ID NO: 178153 - RNA, 77 nt, Homo sapiens
gggccgaagcgacaaaccaaccgcgagacgcaagaaaagccaagaaagacccaaaagaccccagaccagaaagaggc

SEQ ID NO: 178154 - RNA, 74 nt, Homo sapiens
gggagaccaacaacaacaaccggaaacacgaaggaacccaaaggacagaggacccgagaacggaagagagggag

SEQ ID NO: 178155 - RNA, 72 nt, Homo sapiens
ggccacaggccaacagaagcaccaaaggagccaggcgcacaaacagccccgaagcagaaggagggaagaacc

SEQ ID NO: 178156 - RNA, 60 nt, Homo sapiens
cagccagggggcagacgcccgcagcagcgccaaagagcaggggggaccacacgccaaagg

SEQ ID NO: 178157 - RNA, 82 nt, Homo sapiens
gggaagcgcccgggccggaacccacgcgcccgggagcacgagagccaacggcacgggggaggcccgcaccccccggccgccg

SEQ ID NO: 178158 - RNA, 82 nt, Homo sapiens
aaacaggaagccgggagagaaacacagagccaggcaaagagagaacgcagcgacccggagcacgagggaccagagacccggc

SEQ ID NO: 178159 - RNA, 80 nt, Homo sapiens
aagaaaaacaagcagcaaaacagaaagggcggccggcgcccgagaaaacggaagaggggccagcagacacgaggccacga

SEQ ID NO: 178160 - RNA, 69 nt, Homo sapiens
cggcgacggcggagggcccgggcggagaacggaaaagcaccaggaagcagagaggaccgcagaagggaa

SEQ ID NO: 178161 - RNA, 73 nt, Homo sapiens
ccacggaaaaacccaaccagaaaagacgggaaacagggccccaacaaaggaagaagacggcacgggaccccca

SEQ ID NO: 178162 - RNA, 53 nt, Homo sapiens
cgcagggcgcccccggccgaggacagaagggcagcccggggacgaaggcagac

SEQ ID NO: 178163 - RNA, 73 nt, Homo sapiens
accaagaaccagaggccggaagagcgggagcgggagccaggcagaaggccaaccaaccccaggaaaagccaaa

SEQ ID NO: 178164 - RNA, 73 nt, Homo sapiens
agacgcagggcgcccccggccagagaaacagcgccccaacacgcggacaggggagagagacccccagggacca

SEQ ID NO: 178165 - RNA, 85 nt, Homo sapiens
ggagggaggcggagcgcggccgggcgcgcggcgccgccacaaggcgcgccgcgacgagacgagcaagaagacaaacaagggaagg

SEQ ID NO: 178166 - RNA, 63 nt, Homo sapiens
cagggagcggccagcccgccagaggagaggaggggaggacaaaaccaacaacaagccacccac

SEQ ID NO: 178167 - RNA, 75 nt, Homo sapiens
aaaccgaagccccacaagccagggaagaccccgaaggaccaaggcccagccagcaccgcgcacccagcagcaccc

SEQ ID NO: 178168 - RNA, 76 nt, Homo sapiens
accccgcaaaaaagccaaaacaaagagccggcccaagacaaggaaacgagaagaacgaaagagaaacccaaaaaaa

SEQ ID NO: 178169 - RNA, 81 nt, Homo sapiens
gccaccaacaagcgggagaaagacagcaaggaaagcgcaggcaggagaaggacagcagagccacaagggacgcaaaaagaa

SEQ ID NO: 178170 - RNA, 69 nt, Homo sapiens
gagcccggccgccagaccacagcacagccgggaaggggagccaccagcccccgggggccgccccggggg

SEQ ID NO: 178171 - RNA, 89 nt, Homo sapiens
gaggaccgagccaagagggcagccgccgaaggaacgcgacggcggcgcccgcaggaccaagaacgcccagcccgcgggcaccggcagaa

SEQ ID NO: 178172 - RNA, 72 nt, Homo sapiens
gcgaccagaccaagagccgacaaccacaacagggggagccgccaccaaaagcagacggaaaacccacgggga

SEQ ID NO: 178173 - RNA, 58 nt, Homo sapiens
gagaggggaagaggcgccgggacaggcagagagcgcagaagacaggacaaaaagccca

SEQ ID NO: 178174 - RNA, 82 nt, Homo sapiens
cacagacagcaggccaggcggaaaccaacagccacaaaggagaaagagcacaccagggaggcccagcaccaccagaccagga

SEQ ID NO: 178175 - RNA, 78 nt, Homo sapiens
ccaagaggaagggacgcacacagaaaggcccgaacggacggacaaccagggccagggagcaaggaaaagaccacccaa

SEQ ID NO: 178176 - RNA, 71 nt, Homo sapiens
gccccggccccaccgacgccaccgccgccccaaaaaagcgggagggacaggagaacaggcacgaccccacc

SEQ ID NO: 178177 - RNA, 57 nt, Homo sapiens
acaacagcacacaacacaccagccgcggaacacccacagcgccacacgagaaccacc

SEQ ID NO: 178178 - RNA, 96 nt, Homo sapiens
gcagaggaaagccagacaaggacggagaaaggccacaggccccccgagaaggcgccccggccagaagggaggagaaagcaggggacacccgacaca

SEQ ID NO: 178179 - RNA, 78 nt, Homo sapiens
ggcgcccggggcgccgcgcgcccgcgccacccggggccgccgcgcaggagcccccggagcgagacccgaagccacaga

SEQ ID NO: 178180 - RNA, 85 nt, Homo sapiens
caaaggcagcaaaccaacccgagcacacggccgcacagcccgccaggaaggccccgaccggcgcaagcaggaccgcggccaccgc

SEQ ID NO: 178181 - RNA, 74 nt, Homo sapiens
agcccgcagaccgcagaaggccggagacaccagcaggccacgcagaacaaaagacgcacagagacggaccaaag

SEQ ID NO: 178182 - RNA, 72 nt, Homo sapiens
caggaaaagacccagcgacaacgaagaccacaccagacacgggggacagaaagcaaaagacaaacagacccc

SEQ ID NO: 178183 - RNA, 84 nt, Homo sapiens
gcgggccgcaggccgcgagcagcggacgccggccgccgcaggagagcagagcaaagcggcagccccggacagggagggccgacc

SEQ ID NO: 178184 - RNA, 78 nt, Homo sapiens
gcagccagacgaagaagggccacccacagaggagggaggaggacgagagcccagacgacacacccagcagcagcgccc

SEQ ID NO: 178185 - RNA, 74 nt, Homo sapiens
gaagggagggcgacgagagccgaagcagaggccaagaccaaccccaaagcaacgaggcgagcgaagaaagccgg

SEQ ID NO: 178186 - RNA, 72 nt, Homo sapiens
ggaagagggcggggggacagaagagagggggaagaaggggaagagaagaaaccagagggacgagggccaaaa

SEQ ID NO: 178187 - RNA, 70 nt, Homo sapiens
cccagccccgcggcccgccagcaccagccagggggaagaaaaccccagagagacccggcgccgacaccca

SEQ ID NO: 178188 - RNA, 85 nt, Homo sapiens
acagcagccaggagcagagcgacagcggcgagcagaacacggcgagcggccgcacggcgccggggaacggcgcagaaggaaggcc

SEQ ID NO: 178189 - RNA, 70 nt, Homo sapiens
caccgccaaccccgcaccggcaccagagcaacaaaggagagaggcaccaccagaccaaagagagcgagaa

SEQ ID NO: 178190 - RNA, 96 nt, Homo sapiens
cccggaccggccgagaggaagacgagccgggaggaacggcccggaaacaggaggacccaggacggcaacccccaccccaaccagcgccaccgcagc

SEQ ID NO: 178191 - RNA, 80 nt, Homo sapiens
cgccccagaacgcagacagaggagcggacccccgcggcgcgcagcccagcaggaggcaccggagagacacaagcaggaaa

SEQ ID NO: 178192 - RNA, 75 nt, Homo sapiens
ggaagagaagccacaacacacaaaaagaaaaagggaaaaccaaggcaaaagaggagaagagcaggcccagaaaag

SEQ ID NO: 178193 - RNA, 85 nt, Homo sapiens
gaaagcagaagacaaggcgagccagcccccacccagaggagaacgaaaccacgacaaccagcgcccaccaccaggagacgccaag

SEQ ID NO: 178194 - RNA, 75 nt, Homo sapiens
ccacaacaagggccggaccacccagacgccagcaacccagagggggaaagaccaaccgaaaccgacaaccgcaag

SEQ ID NO: 178195 - RNA, 112 nt, Homo sapiens
ggagcgcgggcaacggcgggacagcaaaaagacccaccaaggaagcagcggccacgccaggcaaaagcagaccggaaaacccaccggcaagaccacacccgaggggagccca

SEQ ID NO: 178196 - RNA, 74 nt, Homo sapiens
caacccacacccaccaagggccacgccggaacaccgggcgacgggacagcagaggggagcaccagcccaccgag

SEQ ID NO: 178197 - RNA, 58 nt, Homo sapiens
agagacaagaaaggacgggcgccaggaccccgagacaaaacagaggagaccagaccag

SEQ ID NO: 178198 - RNA, 79 nt, Homo sapiens
gcggccccgagagccgcgccgcagggcgcccggccgccaggccagcgggcggaaaacaccccaaaagccaaaagggaaa

SEQ ID NO: 178199 - RNA, 42 nt, Homo sapiens
caggggaagggccaggccagcgccacagaccgggccaaacaa

SEQ ID NO: 178200 - RNA, 74 nt, Homo sapiens
ggacacaagagcaagagggaaggccccacacacccaacacccgcccggcgccgcacacggcagcacggcggcgg

SEQ ID NO: 178201 - RNA, 61 nt, Homo sapiens
cggcggacacgcacgccccggcacagggaaggaaaaaacggagacacaacccaagaccaaa

SEQ ID NO: 178202 - RNA, 73 nt, Homo sapiens
gggagaccagccccaagccacggaccagagacacgccaagcagccagcccaggagaggcgggcaacacaacaa

SEQ ID NO: 178203 - RNA, 77 nt, Homo sapiens
cacccagggccggaaaagccaacgccggcgaagacgaagaacggaagcgccccagaggagagggcggagagacggag

SEQ ID NO: 178204 - RNA, 57 nt, Homo sapiens
ggcgcagacacccaaaacagcagcacaccggaagaccacccaacacacaacggccca

SEQ ID NO: 178205 - RNA, 81 nt, Homo sapiens
cgccgacccgaagaccgacccgagagcccacccccaacgcgacggaaaggcacgaaagccagggccggcccagggagaacg

SEQ ID NO: 178206 - RNA, 104 nt, Homo sapiens
gcagcaacagcagcgccccccaccccaccgccaccgaggcccccccgccccccagggaccagaggagacaacaaagaaacaaacagcacaaggaaccaaaagac

SEQ ID NO: 178207 - RNA, 86 nt, Homo sapiens
cccggggccgacccggcccgaggggaagcagccaggccccccagccagcgcagggcagaaggcccccccgagagaggacaccagag

SEQ ID NO: 178208 - RNA, 71 nt, Homo sapiens
cagcagacccgaggaagcgcgacccaggaccacaccagccgagaggagaagggccacccgaggccagagac

SEQ ID NO: 178209 - RNA, 53 nt, Homo sapiens
acaacacagaacgaagagaagaagcgaggcgacacgaagcagcagacagggga

SEQ ID NO: 178210 - RNA, 67 nt, Homo sapiens
acagaaaggagaacaccacagaacggaccagaccagcaaagcagccagaacagccaaggaacgacca

SEQ ID NO: 178211 - RNA, 73 nt, Homo sapiens
agaccagaagcgacagcaccagcccagccacagccagcccagacccagaggaagaaaaagcccgaagcccaaa

SEQ ID NO: 178212 - RNA, 72 nt, Homo sapiens
gccgccgccccgccagcgccagacggacgaggcggcggagaacaagcggcaggccgccgaagaccccggggc

SEQ ID NO: 178213 - RNA, 78 nt, Homo sapiens
gcaagacgcaacagaaaacaagaaaggaacccaacagagacccgcccacgcaggaccgaaggagaagaaggagaaggg

SEQ ID NO: 178214 - RNA, 52 nt, Homo sapiens
cacccacggacacggcaggagaaccagccaaaaaagggcagaaccgacaacg

SEQ ID NO: 178215 - RNA, 57 nt, Homo sapiens
ccagggacgcagggggcagggcagaggacagggacagagcgggagccaccagcgcca

SEQ ID NO: 178216 - RNA, 62 nt, Homo sapiens
ccgccgccgggaccccgcccagcagggcgcccaagcgcaaggaaaaggcaccagaccaggag

SEQ ID NO: 178217 - RNA, 70 nt, Homo sapiens
ggcccgacgacgagacccaaacacagaagaaagccacgggaggacaaccgagggagcaagaaaggaaaaa

SEQ ID NO: 178218 - RNA, 80 nt, Homo sapiens
gcgcggcggcgccgcgcgcgcagggccgccggcccgcagccgccaccacccaggaccagaagacaagcaaggacaaacga

SEQ ID NO: 178219 - RNA, 71 nt, Homo sapiens
ggagagccgaaccagaagagaaagcaccgaccaaacaaagcaggaaaaacgaccaacaaggagaacacaaa

SEQ ID NO: 178220 - RNA, 44 nt, Homo sapiens
acaccaaaacacagacgggaggggaacggagccgcgcgcccagg

SEQ ID NO: 178221 - RNA, 85 nt, Homo sapiens
cgggacagagcggcgggacagcccaagggccagcaccgcgcccaggcagagccagaccgacaacccccaccagaccaccgcccca

SEQ ID NO: 178222 - RNA, 82 nt, Homo sapiens
gggccgggaggaggacgaaccaacggaacgcggaccaggagggaacccgggacaagacaagcagaacccagagcaccaagcc

SEQ ID NO: 178223 - RNA, 90 nt, Homo sapiens
cacaggagaaggcgacaggaaccagccgggggccaaccgaggagccacgcagcaggagcggaggacaccccggagaggacgggaggacgg

SEQ ID NO: 178224 - RNA, 80 nt, Homo sapiens
ccgcgccccccgggacccccccggaccgagccgacgccgcggggcagcgggccggcgccggcgcgacaaaggagagaggc

SEQ ID NO: 178225 - RNA, 55 nt, Homo sapiens
ggaggcaggagaagaaaggggaacccagaccagccgggggggagagaaacagcaa

SEQ ID NO: 178226 - RNA, 65 nt, Homo sapiens
aagacgagccgggaggaacggcccggaaacaggaggacgcccagcccaaaggaagcaccgaccac

SEQ ID NO: 178227 - RNA, 85 nt, Homo sapiens
ccccccggaccccacccacacccccccccaccgcagcagcacccgacaggccagaacgcccagcagcccagaacgaaccagcccg

SEQ ID NO: 178228 - RNA, 78 nt, Homo sapiens
caccggcagacaagacccacaccacccaagaccacgcccgcaaggccaaacagagaggaaacgaacgccccaagcaca

SEQ ID NO: 178229 - RNA, 74 nt, Homo sapiens
acggccaaccggcaagaccagacgggaacgggagacaagcgcagcgaggaagaccgcaggaaagcaggaaggca

SEQ ID NO: 178230 - RNA, 41 nt, Homo sapiens
ggaagagaaagcgcaaaagaacagaagggagaagccacaac

SEQ ID NO: 178231 - RNA, 72 nt, Homo sapiens
agcacaccgaaagccacagcaagaagcgcccaccccacgggaggccgggacgggacaacgaaccaccccgaa

SEQ ID NO: 178232 - RNA, 81 nt, Homo sapiens
accagacggcgccccaagaccagagcagcagccaagcggacagagaccgccccgccaccccggggggccagccccaaccgc

SEQ ID NO: 178233 - RNA, 72 nt, Homo sapiens
caacaagacacggagcaaggaggaaaacacacgcaacccacaggcgcaccgaggagaccacaaaccaggaac

SEQ ID NO: 178234 - RNA, 79 nt, Homo sapiens
gagcggagcaccggaagacaaagccccgcacacgggagccccgaagaagagaaaggaaaaagaggcgacgagaaagaaa

SEQ ID NO: 178235 - RNA, 64 nt, Homo sapiens
cgcaaggcaggcaacaaggggcccagaagacaccgcgaggggccgccaccgagcccacgaaccc

SEQ ID NO: 178236 - RNA, 77 nt, Homo sapiens
aaggggggcccgaacaaagaagagcccagccacagagcgagaaggaaaaaacagggaagagaaaaagagcagaaggc

SEQ ID NO: 178237 - RNA, 80 nt, Homo sapiens
gcaagggccgggccaggcacaggcgccggcggcagagcggggagacgagacaaccgccccgccgccgggaaacaagaggg

SEQ ID NO: 178238 - RNA, 70 nt, Homo sapiens
caccaagccaggcaccgcaccaaaagaggggacagggccaccaggcaacgcaccaacaacaccacacaaa

SEQ ID NO: 178239 - RNA, 76 nt, Homo sapiens
caaaacaaaaagagcagaggagacaaaccggagaaggagccaagaaagagaagaccaaaaagagccaagcgagaag

SEQ ID NO: 178240 - RNA, 80 nt, Homo sapiens
gcaaacaaggaacggaaaggagaacggggaaaacgccaagaggagggaaagaccagccaggaggaggaggagcgagggaa

SEQ ID NO: 178241 - RNA, 84 nt, Homo sapiens
gccggacgcccaaggcacgagaggacgagcaagccggcagcgcccgagggagcaaggagaagagcggaacccagaccgcgcccg

SEQ ID NO: 178242 - RNA, 79 nt, Homo sapiens
caccgcggagcaaaaaaagagcccgcaagaagaacagagacagcagccaaacccccagggccagcgagacagaccgaaa

SEQ ID NO: 178243 - RNA, 84 nt, Homo sapiens
gagagcacgcccggggcccgcgcgcgacgcgacggcacagcacggaagccgcagggagcaaaacgcccaccacggaggcaccga

SEQ ID NO: 178244 - RNA, 70 nt, Homo sapiens
gggaagcagacgagagcaaggaccacacaaagcaaacacaccacgacggccgcgagcgggagagcagaga

SEQ ID NO: 178245 - RNA, 64 nt, Homo sapiens
cgcggcaggagggagcaggagcggaccggcccggaaggaccccaacaacaggagagagcaagcg

SEQ ID NO: 178246 - RNA, 92 nt, Homo sapiens
aaaacgaaacggaggggaacgaacgccagcagcggaacaaagggacaacccgccacaacgacaaaggaccccaaagaccccggaaggcggac

SEQ ID NO: 178247 - RNA, 75 nt, Homo sapiens
ccccccccaccagaggacgggaggagcagcaacagccggccagaacacacagaaaagggccaaaggaagaagaag

SEQ ID NO: 178248 - RNA, 78 nt, Homo sapiens
cccccaggacaacagcacacgcacccaagcgggcccccaccaccggagccagagaaggggcacacgccacccccggcc

SEQ ID NO: 178249 - RNA, 41 nt, Homo sapiens
aaaggcgccgaagagagagccccccacgaccgaaagaggac

SEQ ID NO: 178250 - RNA, 69 nt, Homo sapiens
aagagccgccggagcagcaggccaaaggcaggccagcaagaggccacaagaagcaaagccagggaggga

SEQ ID NO: 178251 - RNA, 57 nt, Homo sapiens
ccagcccagcagccgccaggccggccggagccgagcggagaagcccaggaaagcgcc

SEQ ID NO: 178252 - RNA, 69 nt, Homo sapiens
cccagcgcacggaccgccggccgggcggccccgccacccacagcgccgcagccgcaggaagcgaagccg

SEQ ID NO: 178253 - RNA, 84 nt, Homo sapiens
cgcggagccacgagacagacgccaggggcacccagccaggcagcaaggccggaggacgccggcagcacgccggagcgcaggagg

SEQ ID NO: 178254 - RNA, 71 nt, Homo sapiens
ccagaccgaaccaccaccacagacccccaccagaaagcaaacgagggcacacggcggaggccaacggcggg

SEQ ID NO: 178255 - RNA, 70 nt, Homo sapiens
gagcccaggagcgccacgcgcggaaggcagcgcccagcagcgcagggagaaaaacgacaaacagagcgaa

SEQ ID NO: 178256 - RNA, 72 nt, Homo sapiens
aaccacgccaccacgcgcagggcacaccaggacccgagccccaaagacagaaaagccccgagacggaagaga

SEQ ID NO: 178257 - RNA, 77 nt, Homo sapiens
gggaccccgcccagggcccagaggacccaacaccagaagacacacaggggacaaaggccagaagcaggagagcacag

SEQ ID NO: 178258 - RNA, 59 nt, Homo sapiens
agcgaaagaagcaaccaggggccccccacaccgaggagcccagaaggaagagaaccgcc

SEQ ID NO: 178259 - RNA, 72 nt, Homo sapiens
gcgaggccagagagggggaggaccggggcgacaggcacggcaagagaacagcccgaacaccacagaggagag

SEQ ID NO: 178260 - RNA, 77 nt, Homo sapiens
aagggcagcggcagcacgaaagaaacaggcgaagcaggaccccccccagccggcaaggccacagggacagcgcagcc

SEQ ID NO: 178261 - RNA, 78 nt, Homo sapiens
aggccgggcgccgcaccaagaccggcggaccggaagccagcacagaggagcccaggaggaggaccccccgaccccagc

SEQ ID NO: 178262 - RNA, 72 nt, Homo sapiens
gcccgccaggccgggccgcgggagccgaggcgccgaaggaccgacgcccgggcagaggcaaggcgcgaccgg

SEQ ID NO: 178263 - RNA, 35 nt, Homo sapiens
ccagacagcagccaagagccaccgagcgaagaccc

SEQ ID NO: 178264 - RNA, 71 nt, Homo sapiens
cgggagacacagacacaccggacaggagagacaacggaggcaagaaagacggagaagcgagaagagaccag

SEQ ID NO: 178265 - RNA, 79 nt, Homo sapiens
gccggagcaaacgacgagaaagcccacagccaaagccgggcggacgcggaacagcaggaaggagaagagccaagaccgc

SEQ ID NO: 178266 - RNA, 75 nt, Homo sapiens
cggggccagagacacacaggaggcccgaggaaaagcagaacacgaagcaaaggggaacaaaagagaagaaggaaa

SEQ ID NO: 178267 - RNA, 67 nt, Homo sapiens
aaggaccaagaaccaggccaaagagaagaggaagcccggaggaggagagagagagagagaggagacc

SEQ ID NO: 178268 - RNA, 83 nt, Homo sapiens
ggacacgacggcgcggcgagaggacagcaccagccgccgaaggaagaagaggagcggagccaaaaaaagcagggaagaaagcg

SEQ ID NO: 178269 - RNA, 81 nt, Homo sapiens
agcgccccacggcccaggcaggaacccgagaccacagccaccacacagcaccggaaggagcaggcagaaaaccaggcccag

SEQ ID NO: 178270 - RNA, 57 nt, Homo sapiens
aagcaagacccaggacaccccgaagccgagaaagcaacggagcaaggaaagagcaga

SEQ ID NO: 178271 - RNA, 73 nt, Homo sapiens
agacgccagccaagcgccgacagcccagcaaaaggaggacggcagccagaacaacaaggccgacgcgcacgaa

SEQ ID NO: 178272 - RNA, 69 nt, Homo sapiens
gaacccgcccaaccagaacggaacgaaagcccccaaccgcggcagcagcaaaacggaaacagaaacaga

SEQ ID NO: 178273 - RNA, 59 nt, Homo sapiens
ggaaagaagagacacagaggagccacacccccaggaaaacaccgaaccgacgaaagagg

SEQ ID NO: 178274 - RNA, 63 nt, Homo sapiens
caggccggccgcgccccccaggacccgccggcgcgagaaccgagagggacagacgggccagcc

SEQ ID NO: 178275 - RNA, 86 nt, Homo sapiens
aggcagccaccggcaggaggagcagagccgccaaggcccgagaccccaagaagaagcggaagaggagccgcggaaccaagacacaa

SEQ ID NO: 178276 - RNA, 79 nt, Homo sapiens
cggagccaggcccaagacgggagccggaagcacacaacccacacagacggaggcaacccccacaacccgggggaccgca

SEQ ID NO: 178277 - RNA, 73 nt, Homo sapiens
cccgcccacgcaaacccaaagaccccgccggagacgagagaggggaaagaaccagacgacaggaaggcacaga

SEQ ID NO: 178278 - RNA, 79 nt, Homo sapiens
ggcaagcacaccaacccccagcacaaagagacaccacacagacaaagggcaaagagcagacccagaaagaaaaagaaag

SEQ ID NO: 178279 - RNA, 83 nt, Homo sapiens
cgcgcccgaacggaaccgcgggccgcagccgccggcaagccgcgaaggaaggaaagagcggaggacccggaccggacaacgca

SEQ ID NO: 178280 - RNA, 73 nt, Homo sapiens
ccaagcaagaccagcagagaggaaaaacacaacccaagaaacgggagaggggcaacggacacaggagacagcc

SEQ ID NO: 178281 - RNA, 74 nt, Homo sapiens
agacaaaacagaggagaccagaccagaagccccgaaaagaggaggagagaaagaaagccagcgcaacgagagaa

SEQ ID NO: 178282 - RNA, 65 nt, Homo sapiens
accgacccaccccagcgagagaagaaccgagagggaacccccagcaagaggcccaccccaaacca

SEQ ID NO: 178283 - RNA, 73 nt, Homo sapiens
gaacggggggcgaaggcaaggcacaaagcccgacagggcaacacccgacaaagggggcaaagaaaaaggagag

SEQ ID NO: 178284 - RNA, 96 nt, Homo sapiens
cgggacgcgcgcgggcacccacggagccccggggcggccggcgcggaagaggccggcggcgggacggccccacgggacccgccccgaccacagcag

SEQ ID NO: 178285 - RNA, 72 nt, Homo sapiens
acaaaaagcaccggacggcaagcacaacgggccaacgccaaagccaccagagccccccggaggggagacaca

SEQ ID NO: 178286 - RNA, 76 nt, Homo sapiens
gagcccagggaagcagccgaccagccgcggagccgggggcagcggagggaagcaggccagccccggacaggaagag

SEQ ID NO: 178287 - RNA, 72 nt, Homo sapiens
ggacagccacaccccaagagggaggcacgccacccagggccagacacgcagggccaccagaccccgcggcac

SEQ ID NO: 178288 - RNA, 74 nt, Homo sapiens
acccccagacccagcgggaagggacgcaaaaaggaagccccacaaggaccaggcaaaacggaagagcacaagac

SEQ ID NO: 178289 - RNA, 31 nt, Homo sapiens
cccgccgcacaacgcagcgggacggccgcac

SEQ ID NO: 178290 - RNA, 75 nt, Homo sapiens
acacccggccaacccagaaccccagcaccgaaagggaccgaaaggagagcaaaggaacaacaaaaggcaaaacaa

SEQ ID NO: 178291 - RNA, 76 nt, Homo sapiens
cggagagaaaccgaagggccccgaacaacagacgaaaaaccgccagaaggcagagccagaaggagagccaagcgcc

SEQ ID NO: 178292 - RNA, 54 nt, Homo sapiens
cagaaacagaagaaacccaggagcaagaggagaagagcgaagcggcgaccagca

SEQ ID NO: 178293 - RNA, 90 nt, Homo sapiens
cgagcccgccgccgccgccaccacccacccggacacaggaaggagggccccggagcagccacaccaccgaggccccacccagcacgagca

SEQ ID NO: 178294 - RNA, 75 nt, Homo sapiens
aaggccaaaacccccaagaggagcaagaggggggggcccccccgaagaaaggaaccggggagcggcgaaaaaaaa

SEQ ID NO: 178295 - RNA, 58 nt, Homo sapiens
aaccagagcggagcgcagaccgaggaaaaggagagagaccgcacccaccagaaccggg

SEQ ID NO: 178296 - RNA, 81 nt, Homo sapiens
agcggaaaccgagccagggcgagccggcgacaacagggccgccaagggaaagaagacgagaaagggaaaaccaaaggagga

SEQ ID NO: 178297 - RNA, 78 nt, Homo sapiens
cagacgcggcagcaacagcgagacccggggcgaggacccccgagccagggaaagaccaaaccccaaagcaggccaaac

SEQ ID NO: 178298 - RNA, 62 nt, Homo sapiens
acacccgaaagaccgaagcgcaaccagcaagacacgcccccggaagagacagacccgcaccg

SEQ ID NO: 178299 - RNA, 83 nt, Homo sapiens
aggagacaaaaaagcccaagaccccccaaagacacacggacccaccaccccaccgaccagaggccacccgagggcgggcccgg

SEQ ID NO: 178300 - RNA, 78 nt, Homo sapiens
acaccccacaggaccccagagcgacagcccgggacaccaagaaagaacgccaccacacacgagcccgacgacagaacc

SEQ ID NO: 178301 - RNA, 79 nt, Homo sapiens
gggaaggggagccaccagcccccgagcacgaaggagagagaggagaagccagaaaagaaacaccaaaaggaggaagagc

SEQ ID NO: 178302 - RNA, 74 nt, Homo sapiens
acaaggccaagggcaaggagacaggcaccagaaacgccacacgggcgggagcccacccacggaaaaaaacacgg

SEQ ID NO: 178303 - RNA, 78 nt, Homo sapiens
cccggagccggaccccggagcaggcagccccgccccccccgacgggcaccacaggccgccagaagcccaaaacaaaaa

SEQ ID NO: 178304 - RNA, 76 nt, Homo sapiens
aaaaggcagaaaaagggcaaagacacggaccaagaagccaacaggagcaagaaggccacggggcaagagacggaga

SEQ ID NO: 178305 - RNA, 56 nt, Homo sapiens
ggagcccggagcggcccggcggccgcgggaagacccgcggaaggcacacaagacac

SEQ ID NO: 178306 - RNA, 70 nt, Homo sapiens
aacgagcagaaagaagccagaggagcggcgagcgcgaaacgcagccaagaaaaggccaaagacaggagaa

SEQ ID NO: 178307 - RNA, 76 nt, Homo sapiens
gggaaggggcgggcagacgcggggacccggcgcggggcgcgggacgacgaggccgcgggccaagagcaaaagccga

SEQ ID NO: 178308 - RNA, 73 nt, Homo sapiens
cagggaaggaccagacggggacgcacacggaagaaacgcaacccaggccggcccagggagaacgcaaaaccac

SEQ ID NO: 178309 - RNA, 64 nt, Homo sapiens
ccaccgagggagaccagaaccccgaggaggagagcaccagaggcaaggacggaagcgcagggcg

SEQ ID NO: 178310 - RNA, 66 nt, Homo sapiens
gaagaagaacacaaacgggagaaacgggcaagccagagaacacaaaaggggacgagacagcaacag

SEQ ID NO: 178311 - RNA, 79 nt, Homo sapiens
cggaagaaccccccgggagccagaccggcaccgaagaccgggacacggaacccaaggagacgaagcgaagcaggagaag

SEQ ID NO: 178312 - RNA, 63 nt, Homo sapiens
cggccgggcgcccggggcggcggagggcgaccagacgaggggagacggacgggggagagaggc

SEQ ID NO: 178313 - RNA, 72 nt, Homo sapiens
aacggggggcgaaggcaaggcacaaagcccgacagggcaacacccgacaaaggggcgcccggacaccaacac

SEQ ID NO: 178314 - RNA, 77 nt, Homo sapiens
agggggcccaggagagggagagccggagggcccaggacgggagcccccccagcgccaaagaaagagccaggcccgaa

SEQ ID NO: 178315 - RNA, 86 nt, Homo sapiens
gcgcgaccaggccgggcaccccgagcgcaaggacagcgcgaggccgcgcagcccagcgcagccaggggcaggcggcggggacaccc

SEQ ID NO: 178316 - RNA, 79 nt, Homo sapiens
cccaccgaccagagacaccaaccagcaggacccccccccaggcaagcgagcacagggagacagaaacaaagaagaacaa

SEQ ID NO: 178317 - RNA, 76 nt, Homo sapiens
cgagagccggccgagcagagcacaagcagagacaggcaggggcgggggcacccacggacgggggcacccacaccac

SEQ ID NO: 178318 - RNA, 97 nt, Homo sapiens
gcgggcgggagacccgcaccagcgcagccggccccggcgggacggacgcagcgcccggggcgcgggggagagagaacccccagacacacagcaccaa

SEQ ID NO: 178319 - RNA, 84 nt, Homo sapiens
accacccggaggagacggggcagacaacggagcccggggaggggcacgcccggaagaccagacccgcagcccagccagaccaag

SEQ ID NO: 178320 - RNA, 65 nt, Homo sapiens
ccagagcaaagaagaaaccggccagaaacagccagagaaggccccccaggccacccaggaccagc

SEQ ID NO: 178321 - RNA, 65 nt, Homo sapiens
gcacggccaacaccagcccacgagccccgggcaccccccgcgcggagcagcacccgagagcacgg

SEQ ID NO: 178322 - RNA, 75 nt, Homo sapiens
agccagccgaacggccacagcgagggccaacaagccaccgaccccagagcaggccccgagagagaggagaaaaga

SEQ ID NO: 178323 - RNA, 73 nt, Homo sapiens
caggccggagggagagagacaagaagaccagaagagcggcggcggaacagcaagcaagaccaccggccggggc

SEQ ID NO: 178324 - RNA, 78 nt, Homo sapiens
cagccgagccggcgcggcccgccaaggaacgggcggcacagggagggacccaccgagagacaaggaaaagacacgaag

SEQ ID NO: 178325 - RNA, 71 nt, Homo sapiens
ggcagacggaaacgacagaagcagagacagaggcacaaaaggagaaagcagaagaaacaggagaaagcaaa

SEQ ID NO: 178326 - RNA, 75 nt, Homo sapiens
ggaccaaccggccacccaggaaagaaagaaggaacacacggacgcccagaaagaggccacagaaggaaacacaaa

SEQ ID NO: 178327 - RNA, 71 nt, Homo sapiens
agccgccaaccgcagaccggaaaccgaacgaaggaaggacccaaacgaagccaagggaacagaagcacccg

SEQ ID NO: 178328 - RNA, 78 nt, Homo sapiens
cgcaaccggcagccccacccaccggcccacccacaagcgcacaggaccgggcaagaacagaagaccggggaccagaag

SEQ ID NO: 178329 - RNA, 81 nt, Homo sapiens
gagggcaggggcgccaggaccaagaaaggcccagggaccaaagcccggacaaggcccgagcaccaggaccgcagaaggccc

SEQ ID NO: 178330 - RNA, 61 nt, Homo sapiens
caagacaaccacaggcagagagaaggacaggagaaacaggggccaaaaaaccaaaggagaa

SEQ ID NO: 178331 - RNA, 75 nt, Homo sapiens
cccaagggaaaagcagcggccgcaagcccggggcaagacggcagcccggggcagaagaggggacacgccagaagc

SEQ ID NO: 178332 - RNA, 71 nt, Homo sapiens
cgcggagcaaacggagccgccaagggggaaggggggcgacaacccggaaaccacaaaaggaaggaccaaag

SEQ ID NO: 178333 - RNA, 76 nt, Homo sapiens
gaggagggggaaggggagaccggccagcgcggcacacgagaagacaccaggccgaagagcggagagcggagcagca

SEQ ID NO: 178334 - RNA, 92 nt, Homo sapiens
agccgcgggcagaggcgggccgccgagcggacccggaccgggggcaagccacagccaggaaacaccagccccccggcacggccaaacaacca

SEQ ID NO: 178335 - RNA, 41 nt, Homo sapiens
aaagcgaagaagcccaaggaaggggggcacaccgcgcacac

SEQ ID NO: 178336 - RNA, 74 nt, Homo sapiens
ccaagccaaagccagacccgaaagcagagcacagcagagccccccacaaggagcaaacaagacggagcgccggc

SEQ ID NO: 178337 - RNA, 70 nt, Homo sapiens
ccccacgaacaccgagaagcgagagaaagagccccgcaccacaaacaagaaggaaacaagaagacagcga

SEQ ID NO: 178338 - RNA, 118 nt, Homo sapiens
gcgcagcaaaaccaagggagaagagcccaagggcagaaaagcccacgagggaacaggcggcccgggacgggccggcgccaccgaggacacgcccagccagacgaggagcacgcccgag

SEQ ID NO: 178339 - RNA, 75 nt, Homo sapiens
cccccacgcaaccccagaccaacacacaaaggggagaggcaaagcagaaagagaaaagcggccagaccaggacac

SEQ ID NO: 178340 - RNA, 71 nt, Homo sapiens
ggcaagggaaccccccacgacggaaagcggccagccgcagaaccacccagccggcaagagagccgagccca

SEQ ID NO: 178341 - RNA, 64 nt, Homo sapiens
gcggcccggaggcggcggagggcaccccgggcgggcggcggcgccgccgcgcccaggcggaggc

SEQ ID NO: 178342 - RNA, 50 nt, Homo sapiens
agggggaaaaggcgagaagccacggagaaggaacaggcaaggagcgaggg

SEQ ID NO: 178343 - RNA, 63 nt, Homo sapiens
gcggaaacaaaaacagcggaagagacaacggcaagcggagaagagcaaggccgaaccgagagg

SEQ ID NO: 178344 - RNA, 88 nt, Homo sapiens
ggcgaggagcggaggcccaaagacagagcggaagacacacggacagcacagccaccagcaggagccaggaaagaccacagcaagacca

SEQ ID NO: 178345 - RNA, 100 nt, Homo sapiens
gccagcacagagggggcacgacgcacccaccaggaagagggcgcacgccagcccgggccgcccaacccagccagggccccagggcccaggcgcagggagg

SEQ ID NO: 178346 - RNA, 76 nt, Homo sapiens
gcacaggcgaggggaagccccaccccggaacaccacgacacggccaccaaccaagcgcgcggaacaccacgccgca

SEQ ID NO: 178347 - RNA, 67 nt, Homo sapiens
aaaaacacgacggagaaaaacggagggagaaaaagcaagaggaaagcaccaacagcaggcaggggcg

SEQ ID NO: 178348 - RNA, 88 nt, Homo sapiens
cccagaagaggaccgcggagacaccaggccgccggccgccggaaggcgacggcgggcccaccgggccggcagcggccagagaacggag

SEQ ID NO: 178349 - RNA, 78 nt, Homo sapiens
aggagggagaacacagaaacccgccccggggcccggagaggcagcagcagccagcaacacacagcacaaaaaggacag

SEQ ID NO: 178350 - RNA, 78 nt, Homo sapiens
cgggcccagaagaaacaccccagcggaagacgccagccgcagagaccgaaaaggaacgcccaagcaggagaaggagag

SEQ ID NO: 178351 - RNA, 83 nt, Homo sapiens
acaacaagacccccggcccaagagcccgggagccgccaggcccccaagaacccgggggcacaaaccgaagaccgaaggacaag

SEQ ID NO: 178352 - RNA, 70 nt, Homo sapiens
aaaacaccagaaaaggagggagaggagcagaggaagcaaaagcagcgcacaaacccacaagcgaaagaac

SEQ ID NO: 178353 - RNA, 78 nt, Homo sapiens
ggggcgggggccgaccccggaaccagacagaagggaacaagaaacagggaaagaacaccaccggagaaaagaagcgaa

SEQ ID NO: 178354 - RNA, 85 nt, Homo sapiens
ggcgcgaggaacccaccgccgcccccaccgccagcccggccgcgagcgcggccgcaggagaggccacaagaggaagcgaagaaga

SEQ ID NO: 178355 - RNA, 50 nt, Homo sapiens
ggcaagcagaagacagcggacagccgaggccgccggagccccagacaccc

SEQ ID NO: 178356 - RNA, 62 nt, Homo sapiens
gacagagaaccaacacccccacaaggacccccccaagccagaccaaacacccaacaccagag

SEQ ID NO: 178357 - RNA, 78 nt, Homo sapiens
gagagcaagagggcaccagcagcgacggagccacccgcgaaaacggccagggccgccggagccccggcacaaaggaag

SEQ ID NO: 178358 - RNA, 84 nt, Homo sapiens
gcaaaccccagcaagagcggaggcgcccggcggagcagaggaaccacacgcgacagaagacgaccccgacgcaggccaggagcc

SEQ ID NO: 178359 - RNA, 75 nt, Homo sapiens
gaaaagccacaaggccgcgagcagaaacaccggccaccaccggacccacaccggcaacgggccacgccgcaggac

SEQ ID NO: 178360 - RNA, 74 nt, Homo sapiens
caggagcaagacaggggaggggaaaaagcccaccaagaagaccgccaagccaagccccgccgccaacaaaaccg

SEQ ID NO: 178361 - RNA, 110 nt, Homo sapiens
aaagcaaccagaggaggaggaagcagcaccggagaagcaaagggcaccaaaccggagaacaggaaacaggacagggcagggaagggcaacaaaggggggaaaggaacacg

SEQ ID NO: 178362 - RNA, 84 nt, Homo sapiens
aaggcgaccaagacgcggcccaagggcccggcggcgcgagcaggaaggacaccaggggggaaaaaccacacaggcaaagaacgc

SEQ ID NO: 178363 - RNA, 76 nt, Homo sapiens
caccacgacagggagccgaagggcccgaggaggcggccaaaaaccccgagaacaccgaaggagaagccaagccagg

SEQ ID NO: 178364 - RNA, 88 nt, Homo sapiens
cccagagagcaccccagcgaggcccacagaaaagccacaacccagcaggccagagagccccgacgccgcaggaacaggcagaggagac

SEQ ID NO: 178365 - RNA, 82 nt, Homo sapiens
agacggacaagagcgcggaacaggacgccccgacccgggcgcgccaggcacagccaagagcggaccggcagcggccagcgca

SEQ ID NO: 178366 - RNA, 46 nt, Homo sapiens
aggacaccaacagagagacaggccccggacgggcaggcagccaacc

SEQ ID NO: 178367 - RNA, 72 nt, Homo sapiens
cccggcgacgacgcccgagaaagaaccaggaagcacaaaggagaagggacagacaaagagaccgcaggaggg

SEQ ID NO: 178368 - RNA, 57 nt, Homo sapiens
gaaaaggaaccggccccgggccggggggggcacagagccccggaagacagcccccag

SEQ ID NO: 178369 - RNA, 70 nt, Homo sapiens
cagagaaaaggcggaagaccgccaaaaaggacacggagccagcccacaagagagggaaggagaaaggcag

SEQ ID NO: 178370 - RNA, 80 nt, Homo sapiens
cacggggaaggaccggacccggcccgggagcaaaggagaaggaagcgccggccaaacgagcacagcaaacgcgaaagagc

SEQ ID NO: 178371 - RNA, 69 nt, Homo sapiens
aagaggcccaacccccaccccgcccaaggaggcccagcggcagaaagaaacgagccgacaaaaaaaagg

SEQ ID NO: 178372 - RNA, 85 nt, Homo sapiens
acacgaagcgacgacaccgggcgcccgcccggcgccagcgagaacgagcgaagaagagcgaacgaagcggaagcaccagaaaaca

SEQ ID NO: 178373 - RNA, 93 nt, Homo sapiens
ggagaagaaaggcagaacagacaacaaagaaacaccacccacaggcgccccccccccggggaccgaggacccaacgggaaggaagcaggccag

SEQ ID NO: 178374 - RNA, 54 nt, Homo sapiens
agcaaccacagaaggaaaagcacgacccgaaggcgcgcgacgggaccacaggcg

SEQ ID NO: 178375 - RNA, 73 nt, Homo sapiens
ggaaccgaccagccaggagaggccccagcgcgcacggcaggacgaggcacagaagcgaggcagaagcacggag

SEQ ID NO: 178376 - RNA, 81 nt, Homo sapiens
gaagacaacgacagcgacggcacgccgaagcaccgccggggggaagccccgcgccggccgcccggacaaaaggacagcgac

SEQ ID NO: 178377 - RNA, 75 nt, Homo sapiens
ccaacagcgacagaagggaaaccaacccaaaagaaaggagggacaggcaaaggaaagaccacagcaagaccacgc

SEQ ID NO: 178378 - RNA, 69 nt, Homo sapiens
ggaaaaaaccagagaacacaaaaagccagacgaggcacagcgcagggacgaaaacccgaggcaccggac

SEQ ID NO: 178379 - RNA, 72 nt, Homo sapiens
cacaagcacaggaggagcgggccgaagacaacccagaggcacagagggacaggggggaagggaggccaacca

SEQ ID NO: 178380 - RNA, 44 nt, Homo sapiens
acagagcgaccagaaggcacaggagcccccaacaagcccaagag

SEQ ID NO: 178381 - RNA, 94 nt, Homo sapiens
cgggcagagcgggagcgcggcgcacagaagcacgggccgcgcccacggacgaccagagcaaggaggaaaaggaaaaagaggcaggaggcgaccg

SEQ ID NO: 178382 - RNA, 65 nt, Homo sapiens
ggagaccaaaagaagaacacaccgccaaaggacaaggcacgaggcgcggcgaccaccacagcaga

SEQ ID NO: 178383 - RNA, 73 nt, Homo sapiens
cgcgggagagaggacccccccccccccccaagaaccacagaagggagaccaaggagggaagaagaccgggaag

SEQ ID NO: 178384 - RNA, 71 nt, Homo sapiens
aaaaaccgagaacccgaccccgcggagacagcgagacccgccaggagcaaagcgagaacaagccaaagaca

SEQ ID NO: 178385 - RNA, 65 nt, Homo sapiens
gccaaagaacagcaacaccaaaaagagacccagcccaaagaaagccagggcgaaaggcacacagc

SEQ ID NO: 178386 - RNA, 85 nt, Homo sapiens
agagggggggaggaggaagacggagccaagacccgacggggcgccaagaacgaagaccacagaaacgagacccacggcacgccac

SEQ ID NO: 178387 - RNA, 78 nt, Homo sapiens
ggccaaagaagggagagagagagaacccaccgcaagagaccaaaggccaagagcaccgcagccaccagcccggaaccc

SEQ ID NO: 178388 - RNA, 75 nt, Homo sapiens
aggagccgcacacaagacacagacccagcaccacgaaaaaagaacagcagggaacacagccagcagggacaacaa

SEQ ID NO: 178389 - RNA, 69 nt, Homo sapiens
gcgacgacgaccaccacccggggcccccccagccgcaccaccaaggacacaaagagaacaagaaggaca

SEQ ID NO: 178390 - RNA, 78 nt, Homo sapiens
gcgaagggaggaagacacaggccgcggcacgccagaagacgccacagggacacaagccaccaaccgcccgggggagag

SEQ ID NO: 178391 - RNA, 82 nt, Homo sapiens
cggcagagcaaggggcacgcagaaggaccggccacggcgaccgaaacacaagaggaacgaaagagcaaaaagcaaacgggca

SEQ ID NO: 178392 - RNA, 73 nt, Homo sapiens
ccacaaaggaacccgaagacgcaacccggccgccaccaaacccaccaaaaggcacggagaacaaagaggaaga

SEQ ID NO: 178393 - RNA, 76 nt, Homo sapiens
cgccaacgccgcccaagagagcaagaccgggcccacgaggagcaccccccggcccagaaccaaacacgcccgccac

SEQ ID NO: 178394 - RNA, 84 nt, Homo sapiens
cgcccagcaacacagaagccgacaaggcgcaagcgaaaacagaccgcgagcccagagccaccacgcaccggaagcgagaccagg

SEQ ID NO: 178395 - RNA, 40 nt, Homo sapiens
ccggaagccagaaagaggagccaccagggaaaaacagaga

SEQ ID NO: 178396 - RNA, 86 nt, Homo sapiens
gacgacccagcagccgccaggccgcccgagccacaggccggcacccgggaagagacaagaagaaagaagaaagaggaagaccagga

SEQ ID NO: 178397 - RNA, 68 nt, Homo sapiens
gacagcaacgaaggggcaacaccccggaaacacgacaagccaaagcaagcccgaaaagaaagcgaaca

SEQ ID NO: 178398 - RNA, 71 nt, Homo sapiens
gaaaagacagaggccagcagacccgaggaagcgcgacccaggaccacaccagcagcaggcgcaaaaacgaa

SEQ ID NO: 178399 - RNA, 76 nt, Homo sapiens
ccagcggagaacgcggcaaagcgagggaggagcacaaacgcccaccacacagcagaaacggcagggcacgcaccag

SEQ ID NO: 178400 - RNA, 73 nt, Homo sapiens
ggaagaccccaaagaagggagccgaagcgaggcggaaaacgaagacagcaccaagaggcgaaaacagcgaaag

SEQ ID NO: 178401 - RNA, 74 nt, Homo sapiens
cccaagaaaacaaaggcaccggggacgccaccggagaagggaggaaaaccaacaaggacagggcagaccgccag

SEQ ID NO: 178402 - RNA, 71 nt, Homo sapiens
cggagcccgcagaccgcagaaggccggagacaccagcagagaagacagcagggccagggccgaagggggga

SEQ ID NO: 178403 - RNA, 78 nt, Homo sapiens
gaaaccacacagaccgccgggaagaaaacacacgcccaagggccgcgccacagcaagaagaaggccaagcgaggacca

SEQ ID NO: 178404 - RNA, 68 nt, Homo sapiens
gccggccacagccccaaccggcccagccccccccggagggcccgagagacccgacccaccacgccaac

SEQ ID NO: 178405 - RNA, 57 nt, Homo sapiens
gggcagcaacggcgacaccagcaagagaaacggggacgcgcagggaaacccacacag

SEQ ID NO: 178406 - RNA, 76 nt, Homo sapiens
gcaaaggagacccaaggaacaggccaagagagccgaacccaccgagccagggaggggaagaaggaccgggaaaagg

SEQ ID NO: 178407 - RNA, 78 nt, Homo sapiens
gaacagaaaacgcgaccaccagaggagaaggcagagcccccccaggcagaagcccgagcgggaaccagcgaagccagg

SEQ ID NO: 178408 - RNA, 52 nt, Homo sapiens
ccaccgaaggcaagagggaagcaggacacaggaacgccacaagaaacaacag

SEQ ID NO: 178409 - RNA, 68 nt, Homo sapiens
gaccggacggccgggccagccacagcaccccgaagaaccaaaaaccacgaggagaggagggcggaaca

SEQ ID NO: 178410 - RNA, 76 nt, Homo sapiens
cggagcgcgagagccgagcggaccaggcgcgaccgcccagggagacggaacccacacagaccaacgcagcagcagg

SEQ ID NO: 178411 - RNA, 79 nt, Homo sapiens
cgcccgccccggcacacgcgcagccccggccccggcccgccggagaaacaggacaggacacgccagccagacgcgcggg

SEQ ID NO: 178412 - RNA, 64 nt, Homo sapiens
aaggaccaagaaccagacggcaccaaacggcaaggaggaaaaaaccagaaaccagacggcggcg

SEQ ID NO: 178413 - RNA, 95 nt, Homo sapiens
gcaaccccaccccccagcaaggacccacccagcccccagagcgggaacagaaagaagacaagccaccagcaagccgccggccgcccccaccagac

SEQ ID NO: 178414 - RNA, 84 nt, Homo sapiens
ggcgcccgcggccagccgcaagacccgccacaagcaacgcgggaagagaaggcaacagcaagagaaaagcccacagaagagggg

SEQ ID NO: 178415 - RNA, 74 nt, Homo sapiens
cagcagccggccaggcgcaacacacacagcagcaacagccgcacagccgaagccaggcggaaagcaaaagacga

SEQ ID NO: 178416 - RNA, 65 nt, Homo sapiens
gcgacgacggacagcaaggaaccccgacccacaggaccgcgaacaaggaggccacaaaacacccg

SEQ ID NO: 178417 - RNA, 60 nt, Homo sapiens
aacaggaccacagcaagacgacaagcacggcacgaaaagacagcagggggagcagcaaag

SEQ ID NO: 178418 - RNA, 75 nt, Homo sapiens
caaggccaggaccaaagcacaccaggaagagcaaagagcaaccccaagggaacaacgagccagcggcacggaacg

SEQ ID NO: 178419 - RNA, 78 nt, Homo sapiens
cgaaccagagcaacagcgcaaggcagacggaagaccaggccgaagcaaacacacagcagcaggagacagaagacccac

SEQ ID NO: 178420 - RNA, 58 nt, Homo sapiens
aggaggagaaaacaggacagagacagacggccaaggcagaccgacacgccgagaggca

SEQ ID NO: 178421 - RNA, 66 nt, Homo sapiens
gaaacccagcacaaagcacagcaagacagcagggcccagaaacagcccccagaaaagccagccagc

SEQ ID NO: 178422 - RNA, 74 nt, Homo sapiens
gagagaaacaagacgggaaggaagacgaggacagggcagaccgccagcagcacagcaagccacagagagggccg

SEQ ID NO: 178423 - RNA, 97 nt, Homo sapiens
agggcccgacagccgacagcccgccaccgcggaaacacaagagcccaagaggaaacaagagacgcagacacagaaacaccagggcccgccggaaaag

SEQ ID NO: 178424 - RNA, 85 nt, Homo sapiens
agaccaccagccccaggaggcgcccggaaacccagacacacagggaggccgccagcagaccgcggacaagcagaccgaagacaga

SEQ ID NO: 178425 - RNA, 79 nt, Homo sapiens
aacagcacaaacacaaccagaggagagaaggcgaggaagcccaagcacaaaggagaagacgcccaagccaagaaaacac

SEQ ID NO: 178426 - RNA, 56 nt, Homo sapiens
acaagcccagaccaaaacagcaacgcgccggagagcagccaagaaagccacagaaa

SEQ ID NO: 178427 - RNA, 77 nt, Homo sapiens
cggcaccccgaacggggccccccgcgcgaggcgggcaacacaacaaggcgcggacacccagacaagcgcgccaccgg

SEQ ID NO: 178428 - RNA, 72 nt, Homo sapiens
caagaggaacggcacagacccaggccagccaacagcacacacccaggggcaaaggcaagaagcccggcgcca

SEQ ID NO: 178429 - RNA, 77 nt, Homo sapiens
ccacggggcggcgccggccccaagcggccaagacccccccaggaagcccccaggcaaggacaaagacgaagagacgc

SEQ ID NO: 178430 - RNA, 77 nt, Homo sapiens
gcccgaggagacgggcgcaggaacccgccagggccgcaagccacagggaccacagccgcaaagagcccaggagagga

SEQ ID NO: 178431 - RNA, 70 nt, Homo sapiens
gaaacaaacgaagcacccccagacagaaaaggggaggcaccagaagcagcgggaaaggggaggacgagcg

SEQ ID NO: 178432 - RNA, 71 nt, Homo sapiens
gcaccaccaagccaagcaggacaaggaaggaaacccaagacggcggcagcagaccgaaaagggcggaaaag

SEQ ID NO: 178433 - RNA, 69 nt, Homo sapiens
agcaacaagaaccagacgacagaggggaacgagacaccgcagccaagagcccaccacacggaagcaaca

SEQ ID NO: 178434 - RNA, 77 nt, Homo sapiens
ggcacagcacgggcagagccagcccacccaagggccagagaccgcaaaaccacacaccgcacacaggacgccaggag

SEQ ID NO: 178435 - RNA, 84 nt, Homo sapiens
gcccgggggcgggcggagggggcggcggcagcgacggcagcggcggcggcggacaaacaggcaccgcagaggagccgccgcacc

SEQ ID NO: 178436 - RNA, 113 nt, Homo sapiens
aagaggaagacccccgccaaaaggaaagcacagcagaaacacaaagcagcccaaccaaagggacgaaagaggggccgaaaaacccacaagagccggagcgaggcacgaaaagg

SEQ ID NO: 178437 - RNA, 82 nt, Homo sapiens
gacgcagggcgcccccggagccgaagagaaacacgggaggcccaagccagcccagcaccagaaggcaccgaaacagaaagag

SEQ ID NO: 178438 - RNA, 82 nt, Homo sapiens
acaagaccacagggaaagaaggcaggcgcgccggaggaagagcggaaaaggcggagacgaaaaccgggaaggacagccgacc

SEQ ID NO: 178439 - RNA, 71 nt, Homo sapiens
cagaggaccccagccgcgcccgggagagcaaggacagggcagaccgccagcagcacagcaagccacagaga

SEQ ID NO: 178440 - RNA, 84 nt, Homo sapiens
gccgcaaacagcccgccagacacggcaggccaagaagcaccgagcgcaggccggaaggaccaggcagggagcaggacaggaagc

SEQ ID NO: 178441 - RNA, 76 nt, Homo sapiens
gaagagaagaagaagcaggagaacgaaacggagccagagaaggcagaagcgggccacacccaaaaccggacaggca

SEQ ID NO: 178442 - RNA, 51 nt, Homo sapiens
acaccacaacacacaagcgcaccaggagggagccaacccagccccagagag

SEQ ID NO: 178443 - RNA, 61 nt, Homo sapiens
cccagccgggaacccccacgcggccagcgaaaacgcccaggccgcaccgcgaggaacccga

SEQ ID NO: 178444 - RNA, 65 nt, Homo sapiens
aacaccggaccgccagacaggaagggaaggggcggagacgggcggaacgcaggaggccagaggac

SEQ ID NO: 178445 - RNA, 58 nt, Homo sapiens
agccgaggacaaccaacaaaggccaacggcacagaagaaggagcagcgcagggaagca

SEQ ID NO: 178446 - RNA, 70 nt, Homo sapiens
ggcgagaacccaacaacccacagacagcacccagagcgaagcagccaagagccccagaaaagacagccaa

SEQ ID NO: 178447 - RNA, 88 nt, Homo sapiens
gcggaacagcaggcccgagcccaccgcgccgggccccggacgccgcgcggaaaaggaacacaccagcgggcacagcacagcagggagg

SEQ ID NO: 178448 - RNA, 77 nt, Homo sapiens
acggaggaaaccacaggacggaagcacaggggccaccagagcgcccgagaaggaacacacacaacgacggagccaac

SEQ ID NO: 178449 - RNA, 75 nt, Homo sapiens
aacaagcggcaagagaggcaccccgaagaggcgaggagcaacccaggcggagaacggaaaagcaccaggaagcag

SEQ ID NO: 178450 - RNA, 78 nt, Homo sapiens
cggaggcggggcggcagcgggcggaggggcaaccgcagcggaggggggcaagccagaaccgcggggaacaacaaccgg

SEQ ID NO: 178451 - RNA, 79 nt, Homo sapiens
cccagcccgggccgccacccgcagcggaaggaacagggcgagacgaacaacgcgcgcaggagaccaccaagccacaggc

SEQ ID NO: 178452 - RNA, 76 nt, Homo sapiens
aaacaagcggaagacacaaacagcagggagaagagacaacaagacagacagcgaggacagacagcgcaggacagcc

SEQ ID NO: 178453 - RNA, 74 nt, Homo sapiens
cggcgccaccggcgacccccccccagcaccggggcgcaagaacccaagggcagaaggggaaagagcgacccagg

SEQ ID NO: 178454 - RNA, 73 nt, Homo sapiens
ggaaagccaaggaaaaacggagagccacaaaaaaggaagcgaaaaggaagaggcaaagcagacacccggacca

SEQ ID NO: 178455 - RNA, 34 nt, Homo sapiens
gccccgagaacgggaacagaagagaagcaagggc

SEQ ID NO: 178456 - RNA, 62 nt, Homo sapiens
accacaaaaacaacaaggccaccaaacgagagcagccaacggagaggcagaaagaccaaagg

SEQ ID NO: 178457 - RNA, 53 nt, Homo sapiens
cccgggcgaccgcaagaaaaggaggagaagggggagcaacagacaagcccgaa

SEQ ID NO: 178458 - RNA, 77 nt, Homo sapiens
ccgacgccaggcagcgcccccaaacgcccaggagccaaaaaaacaaaacaaacaaacaaaaaaaacccagagaaaaa

SEQ ID NO: 178459 - RNA, 92 nt, Homo sapiens
cggcggcgcgccgccccgggcggccgcgggcggccggaaccaaaaagaagccccagagccggggccaggagccccaagcgccccagcagcaa

SEQ ID NO: 178460 - RNA, 80 nt, Homo sapiens
cacacgccaccagccaggacacgcaggagaagacaccacacccccaccggaaagccccccagacaaagaagaaaacaaca

SEQ ID NO: 178461 - RNA, 66 nt, Homo sapiens
ggagcgacccgcgcaaacaaacagagacccagaaccggcggccaaggccgaccaaagacacgacag

SEQ ID NO: 178462 - RNA, 73 nt, Homo sapiens
gagacaccgcagccaagagcccaccacacggaagcaacagcggcagccccgcccaagagccgcgaagcagcca

SEQ ID NO: 178463 - RNA, 80 nt, Homo sapiens
agcggcgcggagcggcgagggacccgcagggagccaccgagggcccccccgggcggcgggcccccggcacccgaaagccc

SEQ ID NO: 178464 - RNA, 72 nt, Homo sapiens
cccccaccgcacgcacaaacgggcagaaagaaacacggccccaggaaggccaaagcggaggcacccgccaca

SEQ ID NO: 178465 - RNA, 76 nt, Homo sapiens
acacccggcgaaccagagacaagggaggcgaggacggacaaaaggaaacggacgggaggccagccagcagaaggag

SEQ ID NO: 178466 - RNA, 51 nt, Homo sapiens
cggagggaccagcgagcgggaggcaagcagcccgcccgacgagagagaagc

SEQ ID NO: 178467 - RNA, 72 nt, Homo sapiens
cgcagaggggagagagcggagccgaaaccaagccggacccgaagaccagagacacaagcagcgaggaccagg

SEQ ID NO: 178468 - RNA, 54 nt, Homo sapiens
aagcaaggacaaggccaggggaaagagggaccagcgcagcagaagcagggagac

SEQ ID NO: 178469 - RNA, 74 nt, Homo sapiens
gcgacacagaaggaacagcagacaagacgagcccaccacggacagcaaacagcccacagaggaacacaaaaaac

SEQ ID NO: 178470 - RNA, 71 nt, Homo sapiens
caggagaaaggacccggaaaccacaaagcgggagacccaggacccggaagaacgccccagcccagacacgg

SEQ ID NO: 178471 - RNA, 35 nt, Homo sapiens
accggaccagccagacccaaaaccagacgagagac

SEQ ID NO: 178472 - RNA, 61 nt, Homo sapiens
gacaccaggcgaaccggccacgcacccccgaagccgaaagagccgcagacgcacagcaacc

SEQ ID NO: 178473 - RNA, 70 nt, Homo sapiens
aacaacaagaaagaaacccaagagagaacgaggaacagagaagggacagaagggaccaacggccaaaagc

SEQ ID NO: 178474 - RNA, 71 nt, Homo sapiens
ggggggccacggcccgagaggaaaagcaaaccaaaacacccagcacagaggaggaacgaacacccgccaag

SEQ ID NO: 178475 - RNA, 53 nt, Homo sapiens
ggaggcgcggccaacggggccacaagagagcgaccaaacccccacaacaagga

SEQ ID NO: 178476 - RNA, 77 nt, Homo sapiens
cggagcaaccccccaggacgggcggaggcggggggaccggcgggcgggccagcggcggggcagccgagggcaggagc

SEQ ID NO: 178477 - RNA, 59 nt, Homo sapiens
gcggggaagcagccgccacggaggcaaagcagccgaaaccgagaccaagaacccgcgga

SEQ ID NO: 178478 - RNA, 70 nt, Homo sapiens
aagcgccaaggagagagcgggcccaagaaaccccgcgaagcagcagcgccaagcaccgggagccgcgaag

SEQ ID NO: 178479 - RNA, 72 nt, Homo sapiens
cacaaagcccgacagggcaacacccgacaaaggggcagcgcaagccacaggaacgagccacgagaagcccca

SEQ ID NO: 178480 - RNA, 77 nt, Homo sapiens
gccagggagcggaccagccaaacaaacagccgaaacacacaagaggagggaagcaccaaacaaaccgaaaaagggaa

SEQ ID NO: 178481 - RNA, 75 nt, Homo sapiens
ggaagacagaaccccggcaaccgcaccgcacaagccacaacaggaaccgaaagaaggaccaccacaaggaaccac

SEQ ID NO: 178482 - RNA, 52 nt, Homo sapiens
gccagaacaggcaccccacccagggggagagacaaccagagcggaaagggag

SEQ ID NO: 178483 - RNA, 88 nt, Homo sapiens
gccgggaccacccagccagcggaagaagcacccacgcgaaacccccgccaggaacaggaccgggaacaccaccccggaaggaaccgcc

SEQ ID NO: 178484 - RNA, 65 nt, Homo sapiens
gggcaggagccgaaagggaagcacacggaccagcagaacagaaacaagcaagaagcaccaggaga

SEQ ID NO: 178485 - RNA, 71 nt, Homo sapiens
agagggaaacggggagcaggaacaggggggaccaaggggaggcaggaggcagagaacaaggcaaagaggca

SEQ ID NO: 178486 - RNA, 105 nt, Homo sapiens
caccaggcgaaccgacgccgggcggaaaaccaccaaaaccggcagcgagccgagcaagcaaaagagccgggaacaacccaggggaaccaggggaccagcagggca

SEQ ID NO: 178487 - RNA, 54 nt, Homo sapiens
aaaaggcgcaaccgaaaggaaacagagccgggggcggcaccgacgacagcccag

SEQ ID NO: 178488 - RNA, 58 nt, Homo sapiens
cggcaaccgaaagccagcagcgggaggggccaggccacgcggggccggccggccaggg

SEQ ID NO: 178489 - RNA, 68 nt, Homo sapiens
gcaccgcaggcagacaaaagggccaaagaagggagagaggaaagcagaggggagcgaaagccacacca

SEQ ID NO: 178490 - RNA, 80 nt, Homo sapiens
acggggagagccggaccccagggaacaaggaagggagcacacaaagaggccaaaccccaagcagaagagaaagaaaaacc

SEQ ID NO: 178491 - RNA, 85 nt, Homo sapiens
ggaccgagaccggaccgagagcggaccgagagcgcgaaacgcacgagaagggcagcacgccaaaggcaaagaagaaaaaagccaa

SEQ ID NO: 178492 - RNA, 70 nt, Homo sapiens
agagaggaacccgaagaagaaaggacgacagccagagagagagggccccgccagagggccaacccagaga

SEQ ID NO: 178493 - RNA, 75 nt, Homo sapiens
ccacaccccgacccccgaacccccagcccaaacccggaaacccagcggcccagccggccccgcggcccagccaac

SEQ ID NO: 178494 - RNA, 55 nt, Homo sapiens
gcacgcgcgcccgaagggcaacgccgcccaacaacggccgagcgaccaggagagg

SEQ ID NO: 178495 - RNA, 75 nt, Homo sapiens
agagcaggcagagccccgcaaaagaagcggaccaaacgcccccccaaggcaccgccaggaaaaagccagccaagc

SEQ ID NO: 178496 - RNA, 86 nt, Homo sapiens
gcagaccggcccaggaccgaaggagaagcaccgaacaggaaacccaggcccaacggcaggggagcaagaagaaagccccaaaacga

SEQ ID NO: 178497 - RNA, 75 nt, Homo sapiens
acggaccggggcagaaccccgggccgcagcagcagagcaggggaagaaagacagcccagccgccagagggagccg

SEQ ID NO: 178498 - RNA, 43 nt, Homo sapiens
ccaagaggggccaacggaggagagaaagaacccacgcaggacg

SEQ ID NO: 178499 - RNA, 72 nt, Homo sapiens
cggaagaagggccgcgaaccccaggaaccagaggcccggccaacgcaacagggagcccacgcaagaggggcc

SEQ ID NO: 178500 - RNA, 70 nt, Homo sapiens
gagcgaagacgaacaagaaccaagaccaggaaacccgaacccgagccgggcagagaaaagaacgcgagga

SEQ ID NO: 178501 - RNA, 83 nt, Homo sapiens
gcgcggggcgggagcggggagcaggagcggcgggcaccccgagacccggggcagacgcccacccagacagggcgccggcccag

SEQ ID NO: 178502 - RNA, 75 nt, Homo sapiens
ggcggcccacgcaacacgcaccgaggggacggaaagagagccgcagcgcagaacaagggaaaaaagggcaaaaag

SEQ ID NO: 178503 - RNA, 86 nt, Homo sapiens
ccgaagcaagaggcgggaacagagccacaccgagaaccgccgcggagccccacccaacgggaaagggaagcagagccccgggccgg

SEQ ID NO: 178504 - RNA, 51 nt, Homo sapiens
gaaagacaacagcacacaagaacacccagcagccaggaagaaagggacccg

SEQ ID NO: 178505 - RNA, 70 nt, Homo sapiens
gacccaaggcacaaggaacacgcagcggccgaggcaggggaagagagcggccccggacacgcgagcggcg

SEQ ID NO: 178506 - RNA, 74 nt, Homo sapiens
gccgaaaagacagagaggggaaaccccgaaaggggggcagggagagaagagaacacagcacggggaagacacga

SEQ ID NO: 178507 - RNA, 77 nt, Homo sapiens
cagccaaaagaaaggccagcaccgaagaagaggacgggcagcacgagaaaggaacgagacagcaagggcagaacgag

SEQ ID NO: 178508 - RNA, 76 nt, Homo sapiens
aagacacccgaccgacaaaagggaaagggagcagcaccggccacacccacagcacgaccggaacccagcgaccgac

SEQ ID NO: 178509 - RNA, 74 nt, Homo sapiens
accggaagaggagaaaggacacacgaaaacagacgggggaacaagaggggagcccggagcaaccaggagcaaaa

SEQ ID NO: 178510 - RNA, 36 nt, Homo sapiens
gcgggggaaaggaggggaagagaacccgcaaacccc

SEQ ID NO: 178511 - RNA, 76 nt, Homo sapiens
cagggggaagaccaggccacaaaggcccggaggcaaggcgaccgcgcccccgcagaaaacaaggggcagccacagg

SEQ ID NO: 178512 - RNA, 73 nt, Homo sapiens
ggacaggagccgccgccgccaacagaggcgcgaacagggcccacccgccacgacacaggggaagaagaccacc

SEQ ID NO: 178513 - RNA, 78 nt, Homo sapiens
gggcgggccgacggagacaaccgcagccccggcaccaaaggaccagcaacggagcgaggagcggccgaacagggggag

SEQ ID NO: 178514 - RNA, 55 nt, Homo sapiens
cgccgccccaggcagagcccgcccgggaccaaaacaaaacgagagcaagaggaaa

SEQ ID NO: 178515 - RNA, 102 nt, Homo sapiens
ggaagaagaagaaacgggccgcgaaccgcagacagcggccaagaagacacaaaggacggaggcacgcaccgaggagcaacacccccagggagcccagaccga

SEQ ID NO: 178516 - RNA, 79 nt, Homo sapiens
caccacacacaccacaccgaacggccaggccgcagccgcagaagacccaggcgaggaacaacagccgccagccaccagc

SEQ ID NO: 178517 - RNA, 60 nt, Homo sapiens
ggaagcagagggaaaaacgagacaaaccaccaggaacccgaaaccaaacacggagggaaa

SEQ ID NO: 178518 - RNA, 78 nt, Homo sapiens
cgaagacaacaaacacagcacaccggccacaggcaggcgaaaaagaccccagcgaacacgaagagaaaagagacaaaa

SEQ ID NO: 178519 - RNA, 81 nt, Homo sapiens
cggagccaaaagaaagaagcgagaggcaccaccacccaaacccggaaacagacacagaagaccacacacaaacccacccac

SEQ ID NO: 178520 - RNA, 92 nt, Homo sapiens
gcaccgacccgacgcgccggcccacgcgcggccaagagccaggacaaaaccaggcagaaccaacacgaacccaagcacaaacaagaaaacga

SEQ ID NO: 178521 - RNA, 85 nt, Homo sapiens
aaaagcaaacgaccagacggcagggaggcacaaaggggaacacaggccaggcgaaccagccgaaaaaggagaaaccaaaaggaaa

SEQ ID NO: 178522 - RNA, 80 nt, Homo sapiens
gacagaaaagcaggaggggagaagacagcgcagcaccaacgaaaacggagcggaaagaaagaacaccaccagagaagacg

SEQ ID NO: 178523 - RNA, 78 nt, Homo sapiens
gaccacggggccgggcggaggggacgaccggacaagcacaggaggccagcgggccgaggagggcagcggggaagaaga

SEQ ID NO: 178524 - RNA, 75 nt, Homo sapiens
aaaaagaaaacagaaagcaacaaagggcggaccgccgggggccgaagggcaacacagcagaccggccagcgcggc

SEQ ID NO: 178525 - RNA, 77 nt, Homo sapiens
acccaaaggcaggaacggggccaaggcgacagcaaaacggagaaagaggagagggcaggggccgccggaggcagacc

SEQ ID NO: 178526 - RNA, 68 nt, Homo sapiens
caaagaaagaagggaaaaggaccaacccaaccaaggaagggaggcagagacacggaacgcaacaaaaa

SEQ ID NO: 178527 - RNA, 76 nt, Homo sapiens
cagaagccgaaaagaaagaaagaacaaggccgcccagagaagcgaaaaggcgaaacggcggaggcggggggaccgg

SEQ ID NO: 178528 - RNA, 72 nt, Homo sapiens
aagcccagagcacccaaggaccacccccacaggccccaggaaccacagacggacagcggcaaaggaagaaga

SEQ ID NO: 178529 - RNA, 116 nt, Homo sapiens
agcgagcccacacagcgccgccccacgggggcagcgcaggacaacggcaggacggaaggcaggaagcgacaggccaaccgaaaacaaacagcgcacaacagagcgccgcaccaaag

SEQ ID NO: 178530 - RNA, 79 nt, Homo sapiens
ggccggagagaagcggaaaggcgcggacaaggagagcaacacgccacccacaagggggagcagagaccaaccccggggc

SEQ ID NO: 178531 - RNA, 69 nt, Homo sapiens
ccccgagagagaccgggagagacagggcgacacggcacaagcggacacccaaggcgacagcgaaaaaca

SEQ ID NO: 178532 - RNA, 63 nt, Homo sapiens
ccggggcaccagggaaaacacacccgagacccagacagagagccagagcccagaggggagcag

SEQ ID NO: 178533 - RNA, 59 nt, Homo sapiens
acacaaagcggccacaaacaagggcgagcgaggacaggccgccgccaccgccagagccc

SEQ ID NO: 178534 - RNA, 75 nt, Homo sapiens
ccgggacaagaaagaccgcaaggggaagggcccaggcggccgagccgcgagaacaacggagacggcgcgccaagc

SEQ ID NO: 178535 - RNA, 62 nt, Homo sapiens
caaggcaccgggacgcgcacccccgcgccgcacggggacgagggaaaagccacgggaaagcc

SEQ ID NO: 178536 - RNA, 71 nt, Homo sapiens
agcgaagcgggacaaaaagccaaaggccccagaagaaaaaaaacacgaacacacaaagccagcgaggacgg

SEQ ID NO: 178537 - RNA, 82 nt, Homo sapiens
cgcgcggcgcgggacgcgcgcgggcacccacggagccccggggcgccgagagcagcagaggccgcgacaagacaaccggcca

SEQ ID NO: 178538 - RNA, 80 nt, Homo sapiens
cagccgacccccagggaagcaggaacagaaggccgcaagcaaagagaccccccaaagaaagaacggagaaaaagaacacc

SEQ ID NO: 178539 - RNA, 78 nt, Homo sapiens
cgcacacaacccccgaaagcggcacgagggaacacaagacccgcaagcgagcagggcccggacccccaccggccgcac

SEQ ID NO: 178540 - RNA, 51 nt, Homo sapiens
aggacaaaaccagaagcaggggcacagcccgcgcccccggccaaaacagaa

SEQ ID NO: 178541 - RNA, 56 nt, Homo sapiens
gcccccagacaaaccgaaggcgacagagacaggggagaaccgccagcgacgggaag

SEQ ID NO: 178542 - RNA, 64 nt, Homo sapiens
caaaccaagaccagaagaccgacaggaggccccggaagacggacccacagaggaagcccaagag

SEQ ID NO: 178543 - RNA, 86 nt, Homo sapiens
gcaggcagaccgggccacagggcagagccggaccccgccagggcacccacacccaccccggggacgggagcagcggaaggcccaga

SEQ ID NO: 178544 - RNA, 58 nt, Homo sapiens
cacggaggaagaggggaggccgcccgagggggcgaagggcagacggagaacaggacac

SEQ ID NO: 178545 - RNA, 77 nt, Homo sapiens
gcacccaaaacgcggggccaagcagcgaggccacggagccccaggaagccagcacaacagacacccggccagaccag

SEQ ID NO: 178546 - RNA, 75 nt, Homo sapiens
aacaaaggagcacgacggcaggaaggaggagacgaagaaaggagaaaaagcggggaaggggggcaaaaaaaagaa

SEQ ID NO: 178547 - RNA, 75 nt, Homo sapiens
agagcacaacaaaccgacggcaggcaagggccggggggggcacagagccccggaagacagcccccagcgaccaga

SEQ ID NO: 178548 - RNA, 80 nt, Homo sapiens
ggcaccaaggacagagcaggaccaaaagaagcaaaaaaaggaagaagcacaagagcaccaggagagaaccgggaagaagc

SEQ ID NO: 178549 - RNA, 75 nt, Homo sapiens
cgcggaagaagcaggaggcaagaaaggggaaccccggagaaaaggccaagaaggcagaaggacaagcaggagacg

SEQ ID NO: 178550 - RNA, 89 nt, Homo sapiens
gcgacaggccaccaacacacgggcgcccgccaagggaaggagagccaacgcagaggacgagggccgcagggcaggacgaggcagacggc

SEQ ID NO: 178551 - RNA, 90 nt, Homo sapiens
cccgcgagaggcggagaaagggggcgccaggagggcgacaaggcaaagaaccgaagacgacccaaaaggagccgagagagcaccccaccc

SEQ ID NO: 178552 - RNA, 65 nt, Homo sapiens
cgaaggcgaacaggaacaaagagagagaagggaaaaagcccaggagcacacggcgcggaaacgac

SEQ ID NO: 178553 - RNA, 55 nt, Homo sapiens
agaccgagcaaagagaccccggaacggcagaaagccaagacaggaaagcccgggg

SEQ ID NO: 178554 - RNA, 73 nt, Homo sapiens
aaccaagaccgaaaaagcccgagacgagaccagccaacagcaacacaaccccccaagaccggagggccaggga

SEQ ID NO: 178555 - RNA, 78 nt, Homo sapiens
gcgggccagcccgggcgggccgcgcgggagagagagaaagagcagaaacgaaccagaagaagaacggaacacaggcca

SEQ ID NO: 178556 - RNA, 58 nt, Homo sapiens
gcagaaacagagaaggaacaggcagcaaacggagaggcgccggaagaagccgacaaag

SEQ ID NO: 178557 - RNA, 74 nt, Homo sapiens
gggcacccaaggggggaacaccccagaaagcacgcggcagggaggaggcaaccggagagcgacccgccggggaa

SEQ ID NO: 178558 - RNA, 100 nt, Homo sapiens
aagggcggccccgaggaagcaaggccgcggggggagaccccaccaccggaggagccgaggaaggcgccaccacgaccgccgaaccggaaggcaacccgcc

SEQ ID NO: 178559 - RNA, 77 nt, Homo sapiens
aaggggagccaggcggcgacagcgggaggagaaaggcaagaaaaggagaagaaagaagaaaaaaaagagcaaaacac

SEQ ID NO: 178560 - RNA, 83 nt, Homo sapiens
ggcagggcccccacgccagccacagaagagaggaaggcggcgagccgcaccacggaaccagacagcacaccccccaggacccc

SEQ ID NO: 178561 - RNA, 77 nt, Homo sapiens
ccacagacgacacaaaacaggcacgagcagaccgagaagcaccgccgaggccgaacgacaagcacgggccgcggccg

SEQ ID NO: 178562 - RNA, 76 nt, Homo sapiens
agcgccacaggaaaccgcaacagcgcgaagcggacaagcacaaaacacaagggccagcaagcaagacagcagaggg

SEQ ID NO: 178563 - RNA, 89 nt, Homo sapiens
cggaggccccagggaagcgcagaaagcaggcgaacccgcggcgcaaaacgccacgccgcaagaagagccacaggaaagcaaagaggcga

SEQ ID NO: 178564 - RNA, 79 nt, Homo sapiens
aaacagaccgaaagacaaaacggcacgacaaacaacagaacccgaaacccacaggcagggaagcggcgaagagacagag

SEQ ID NO: 178565 - RNA, 89 nt, Homo sapiens
cgagcacagagcccgccgccgaccgccgcccgccacacccgccgccagcgagccaccagcaggcggggaagccccgcagggggaccgcc

SEQ ID NO: 178566 - RNA, 74 nt, Homo sapiens
ggaggagcacccaaccccgcgggacaggcggggaagaaagccggagaaaagcaccggccccagagccgccaaac

SEQ ID NO: 178567 - RNA, 76 nt, Homo sapiens
cgggggcggcacccggcaaaggaaggggccggcgaccaacagaagggagaccaggacaaaaccacaaagccaaaaa

SEQ ID NO: 178568 - RNA, 78 nt, Homo sapiens
gaccggcccggcgcccggcgagggcgcgcggcgggccgccccgcccgaaaggaaggaagaaggaaaagcggaagcgca

SEQ ID NO: 178569 - RNA, 74 nt, Homo sapiens
cgaacgccccccagaaccggcacccaaaggcccagcaccagagggccggacccccgccggccgggagggccggc

SEQ ID NO: 178570 - RNA, 51 nt, Homo sapiens
cagagccgaaaaggccggccaagcaaggcggcagggcacaagaaacccgcc

SEQ ID NO: 178571 - RNA, 73 nt, Homo sapiens
gagaacaaccccacaaggcggaaggccaaccaggagagcacgcagcaggaagagccaggggacccacagcccg

SEQ ID NO: 178572 - RNA, 76 nt, Homo sapiens
cgggccagaacggccaggagacgcaacgaacccaggagaaacgagagggacagcaaggaagacgccagagagcggc

SEQ ID NO: 178573 - RNA, 62 nt, Homo sapiens
ggacccgggagaacaccagggccggaggaaccacaccggaaggacaacagacagcggagcgg

SEQ ID NO: 178574 - RNA, 76 nt, Homo sapiens
gccgcacccgcgccccagcagggacacaggcaaggggagaccgagcgcacacagcacaacccacaaccagcaaccg

SEQ ID NO: 178575 - RNA, 80 nt, Homo sapiens
agcccggagggaagaaggagggaacaagaggcccagcccggggccagagaacaagcccagacagcaagacgcgagcgcag

SEQ ID NO: 178576 - RNA, 70 nt, Homo sapiens
ccgaggcaagagccggcaccaagggaaaacaggacgcccccgggccaaacggcagcaaaaacagacagaa

SEQ ID NO: 178577 - RNA, 75 nt, Homo sapiens
accgagaacaagacaccccaaaacagggcgacaaacagacaaggagcaccccccggcccagaaccaaacacgccc

SEQ ID NO: 178578 - RNA, 57 nt, Homo sapiens
ggcgagcagaacacggcgagcgggcccacacgcagccacgcacagccaaaaaaacgc

SEQ ID NO: 178579 - RNA, 85 nt, Homo sapiens
cagggcccagccggcagagcaaaccgcagaagcaccgggccgcccgccgggccgggagcccgaggccagcccggcgccgcaccgc

SEQ ID NO: 178580 - RNA, 86 nt, Homo sapiens
gccgaggaaccggcccggggccccgaaacgggccgcccccacagcaccccgggcggcggagggagagccggggagacaggagagcc

SEQ ID NO: 178581 - RNA, 56 nt, Homo sapiens
ggacagggaccagcgggaaggcagacagcgagggcgacgaaggggcgcacccaacg

SEQ ID NO: 178582 - RNA, 34 nt, Homo sapiens
gcacaggccacagccaggggggagacaagaggaa

SEQ ID NO: 178583 - RNA, 62 nt, Homo sapiens
accgcacagacgaaagcaccacagaacaagcgggaaacggagccaccaacaagcgggagaaa

SEQ ID NO: 178584 - RNA, 76 nt, Homo sapiens
caagcccacgggaggcacggagggggcgaggcagggacgccagaggggaagccgcacgagggagagacggaccaaa

SEQ ID NO: 178585 - RNA, 70 nt, Homo sapiens
ccgagagccgcccgggccagcggccgcgcacccccggccggaggcaccagcgcaagcacgcccgggcccg

SEQ ID NO: 178586 - RNA, 62 nt, Homo sapiens
cacggggacagcgccacccgagggcgaagcagccaaggaggggggaaggcaggcaggcaaac

SEQ ID NO: 178587 - RNA, 95 nt, Homo sapiens
gcccaaagggagcaaggaggaacagcgggaacgccaccggccgggggaacaccggccaagcaaacggggacagcgccgaccggaacagggaccac

SEQ ID NO: 178588 - RNA, 75 nt, Homo sapiens
ggaaagcgggggccgcccgggccccagaaaccccccgaagaagaccccccacacggacaagcagaccggaagacc

SEQ ID NO: 178589 - RNA, 77 nt, Homo sapiens
gccacccaggccgcaacccggagaagcaagaacaggccaagacaaccgggaaagcagcccaaggagggcgacacacg

SEQ ID NO: 178590 - RNA, 76 nt, Homo sapiens
cgcccccgccccgcacaaggaaagacaaggagccgggccgagaaaccgaaccagagaccagagaagaaacgcaaag

SEQ ID NO: 178591 - RNA, 59 nt, Homo sapiens
gcggagaccccgagaaaccgccgaccaagagcgaagcgacgggaagacagccgccacca

SEQ ID NO: 178592 - RNA, 72 nt, Homo sapiens
gacaagaagggcaaagccgaagccaggaacagacaaagcgcacagccacagcaccgaacagacaaaaaaccc

SEQ ID NO: 178593 - RNA, 76 nt, Homo sapiens
gcggcgggcaaaaaacagaaaaacgaccggacagcggagagagaaaccaagaagccgagaggccacaagcacagag

SEQ ID NO: 178594 - RNA, 64 nt, Homo sapiens
agaaaccggaccaacaacgcaaaggggaagaagagcccgaagaagaaccgaagagacagcagaa

SEQ ID NO: 178595 - RNA, 67 nt, Homo sapiens
agccaccagcagaagccccaagcagccgcaagcacagaaaggagaacccagaaaagccaaagggaaa

SEQ ID NO: 178596 - RNA, 83 nt, Homo sapiens
ccccagcgcccgggcgcggggcggaaaaggccggcagaagggaggcacgagacgcccagaagagcacaaagaaccaacgccaa

SEQ ID NO: 178597 - RNA, 37 nt, Homo sapiens
gaacaggcagaagaaagcagagaagggacaagaggag

SEQ ID NO: 178598 - RNA, 78 nt, Homo sapiens
aagaagaccagaaccacaggaagaaaaaagcacaccggcacaggaccaagacagaccgacaaaaaccaaaacaaagaa

SEQ ID NO: 178599 - RNA, 80 nt, Homo sapiens
cccgcggcaggcgcggaggggccgcgggagcccgaaagcgagggcccggccaggccccaccgccacaagcaggggaacac

SEQ ID NO: 178600 - RNA, 50 nt, Homo sapiens
gaagaaagggacaaagagaggagcagacacgcggcgcccacgcacaagag

SEQ ID NO: 178601 - RNA, 35 nt, Homo sapiens
accacgcgccgaagaaagaacccccgggcggaggg

SEQ ID NO: 178602 - RNA, 67 nt, Homo sapiens
cggccaccaccggccccaccagcggaagcgcgcgcgggggaagggaccccacacgggcagcggcccg

SEQ ID NO: 178603 - RNA, 82 nt, Homo sapiens
cggccgcggacgaagaggcgaccgccagacggagcacacggacagagaggaaccgcacccaaggacggcggaggcccagccc

SEQ ID NO: 178604 - RNA, 73 nt, Homo sapiens
cagaaaacgaagaggagaagacaccaaaaagcaaacggaccagaccgaccaccaaaaagggacggggcaccag

SEQ ID NO: 178605 - RNA, 80 nt, Homo sapiens
ggcccaaagcggcggagagacccaccccccaaggcagaggggcggcggaaccagccagcccacacccaccaccggaggcc

SEQ ID NO: 178606 - RNA, 77 nt, Homo sapiens
gacgcaccggcacccaaccaggagggacgaaagagaccggggcaagcggaacggcaccccaccagcaacaacgcaaa

SEQ ID NO: 178607 - RNA, 87 nt, Homo sapiens
cccgagagcgggacgcagcacacagcaagaaggaggccacagcaaacgggaagaggaccccaccaggaaccacacgccagcaccgac

SEQ ID NO: 178608 - RNA, 72 nt, Homo sapiens
cgaaacacaaccaaggagcaccaaaaagaagaaccgcgccaaggaaacagaacgacagcccgcaccgacgcc

SEQ ID NO: 178609 - RNA, 37 nt, Homo sapiens
accgaccaggcaaccacgggagaagcccaccaaaaga

SEQ ID NO: 178610 - RNA, 73 nt, Homo sapiens
ggccgccagaccacagcacagccgggaaggggagccaccagccccccggggaaaaagaaaagggcgaagaccc

SEQ ID NO: 178611 - RNA, 72 nt, Homo sapiens
cgggagccgacgccaccaggggaaggggaagggagccacccggccacacaggaaccccgcccacccgaggcc

SEQ ID NO: 178612 - RNA, 77 nt, Homo sapiens
cagcccggaggccggggaacggcagggcgaaccccgagacccaagacgccgccaaccggcaaggaagaccgcaagcg

SEQ ID NO: 178613 - RNA, 77 nt, Homo sapiens
gaagggcgcgagcggggacaaagcaagcccacccagagagagaagaacaaggcggccaaaccaagaccaacaaccac

SEQ ID NO: 178614 - RNA, 47 nt, Homo sapiens
gccgggcgcgggcccacgcggcgcagagccagcgggccggcaccggc

SEQ ID NO: 178615 - RNA, 75 nt, Homo sapiens
ggggcggggagagaacaagcggagcagaaaggaccgccgggcgaaacagcaagacaacacgcagcgaaggaggag

SEQ ID NO: 178616 - RNA, 73 nt, Homo sapiens
gggaagcagccgccacggaggcaaagcagccgacaggaagggaaggggcggagacgggcggaacgcaggaggc

SEQ ID NO: 178617 - RNA, 82 nt, Homo sapiens
ggccagaagaggccacccgaccgcgagccgcagcaacccagagcccacaggcaaaggagcacgaaccaggaccaaggagcag

SEQ ID NO: 178618 - RNA, 77 nt, Homo sapiens
cgccaggccaagcgccgccggcaagaacaccggccgaaaacccaaagcgaaaggagaacaagcaaaaaacccaaggc

SEQ ID NO: 178619 - RNA, 77 nt, Homo sapiens
ccggcggcgaggaaagcaggaggaggggcggcggcgggaagagaagcggggagaccaggccagggcagcccgcccgg

SEQ ID NO: 178620 - RNA, 76 nt, Homo sapiens
accgcgccggccgcccgcacgccgccggagaagacagaggagccagaccaagagacagcacaggcgagcgagcaga

SEQ ID NO: 178621 - RNA, 75 nt, Homo sapiens
accaggcaccggaaggcggccaccccaaccacgggagcagcagacgagacgcggacccgccagcgccgccagcgc

SEQ ID NO: 178622 - RNA, 81 nt, Homo sapiens
cccccagaagacacccccagggcagaaaagcgaccaggcgaggccggcaaagcaccaggcacagcaagcgccgaaagacca

SEQ ID NO: 178623 - RNA, 67 nt, Homo sapiens
agcaggaccggggcacggggggcagcacgccgaaggagagaccagacaacaggccagggaagggaag

SEQ ID NO: 178624 - RNA, 59 nt, Homo sapiens
caagaaggaggagaagcgaagcaacaaacagagggggggccgaagaagccagggggagg

SEQ ID NO: 178625 - RNA, 73 nt, Homo sapiens
gccgggcccacgcgcggcgcgccacgggcccagacgcagacaaacgagaagagagaagagggacagaaagagc

SEQ ID NO: 178626 - RNA, 73 nt, Homo sapiens
aagaaacaagccgcgaaggagagcgggccagcgagacagaccgaaacccaaagaaaaggagcgcgcccaacga

SEQ ID NO: 178627 - RNA, 68 nt, Homo sapiens
ccagagcccggaaaaacagagagagaaacacaaggaggcccaagggaagagcaacccaaccacagcag

SEQ ID NO: 178628 - RNA, 67 nt, Homo sapiens
ccgagaacaaggcggagcccaagacgaagaaacggaaaaagaaccagggggagacaaagccacaacc

SEQ ID NO: 178629 - RNA, 64 nt, Homo sapiens
ggaaaacaaccgcccgaagacaacagcaccgacggccagagaagggccgaggagcagacgcagc

SEQ ID NO: 178630 - RNA, 77 nt, Homo sapiens
gccaagccgccccccaccgcccgggcccgaggaggcagccaagccgagccgccacccggcaaaccaccaaaccaaaa

SEQ ID NO: 178631 - RNA, 75 nt, Homo sapiens
aggggccccaagagcacagaccagcagccgccaaaggccagggcaggacagcagcccgcaacaggccggccagcc

SEQ ID NO: 178632 - RNA, 37 nt, Homo sapiens
gccgagagacccaagaaacagcacgcacccggcaaag

SEQ ID NO: 178633 - RNA, 53 nt, Homo sapiens
gagccaacacaaggaagggcagagccgaggccggacagagacgagagcagcgc

SEQ ID NO: 178634 - RNA, 70 nt, Homo sapiens
gcacgagcaaacaagcccacaaacagaggcaggggaaaagaaccaaaaagggggacaagaccagggagag

SEQ ID NO: 178635 - RNA, 88 nt, Homo sapiens
gaggcagcggccgcgcggcgcggacggagcagaaccccaggacgcgcccccgggagcgggcgcccagagacaccacgcaaacaaaaga

SEQ ID NO: 178636 - RNA, 79 nt, Homo sapiens
gcgacgccggcggcgccggggcggcgaggcgcgaggagcagagccgagcccacccgaccagggcccggcacccagcaga

SEQ ID NO: 178637 - RNA, 54 nt, Homo sapiens
agagcggagcgcagaccgaggaaaaggagagagaccaggcgaccagaagcaaga

SEQ ID NO: 178638 - RNA, 72 nt, Homo sapiens
ggagcgccacgcgcggaaggcagcgcccagcagcgcagaagagagcaaaaaccgaccaggaccccaaggccg

SEQ ID NO: 178639 - RNA, 109 nt, Homo sapiens
acgagggagggcggcggcccaccaaggaaagggcgacagcaacagccgccggcggaagagcaacgcaagagagccagcaaaaccaaaacaacgcacgagagcggcacaa

SEQ ID NO: 178640 - RNA, 92 nt, Homo sapiens
acccagccagaaccccggaacaagaaccacgcccgcaccagccacagccaaagcagacccccaagcgagcggagcggaaggagcgcgcccca

SEQ ID NO: 178641 - RNA, 104 nt, Homo sapiens
ccaacgggggcccggccaccccgcaggagaacgagcccccaccccggcaagaaagggaggcaagaaagacacaaagacgagcgaggaaacccaaaaagcagcaa

SEQ ID NO: 178642 - RNA, 75 nt, Homo sapiens
gcaggcccgcggccggcaccgagagcggcagggaggggcaaagaaaacgaggaggagagaccaagaacaacacga

SEQ ID NO: 178643 - RNA, 71 nt, Homo sapiens
ggaccgggggaaaggaggcggcaccagacacagggaaagccggagccgagacacggcacgcaagagggagg

SEQ ID NO: 178644 - RNA, 70 nt, Homo sapiens
acagcggccaacgacaaagccggacacaagagggcaagaaaggcgcgacgggccgaaaagggacgaaggg

SEQ ID NO: 178645 - RNA, 79 nt, Homo sapiens
cgagcccagaaggcggcgaccgggcgcgggcaaggcgcaacagaaacggagacgcacgacccagccacagcgggccaca

SEQ ID NO: 178646 - RNA, 84 nt, Homo sapiens
gcgcccagacgcggggagccgccggagcgagaagacggaggaaagaaagaagaagaaccacccccggagaccgagaacgggaca

SEQ ID NO: 178647 - RNA, 116 nt, Homo sapiens
gacggagagaccccacgagcgccacacggccgcaccgcgcgagcacgggcggagcgaacggcccggggccccagccggcccgggcacccggcagaggagagggccggcccggcccg

SEQ ID NO: 178648 - RNA, 66 nt, Homo sapiens
cggagcagagggaagcaaggcaaggcaaaggacccagaggagggcagagccagaaggagagccaag

SEQ ID NO: 178649 - RNA, 66 nt, Homo sapiens
cgccaagacgacggggcgagggaagaaggagaaagggccaaccccgaagaagcaaacagaaacgaa

SEQ ID NO: 178650 - RNA, 58 nt, Homo sapiens
ggagaacggcccaaccgccggacgcagcgaaggccaaggacgcagcgccaagcggcac

SEQ ID NO: 178651 - RNA, 71 nt, Homo sapiens
ggggggcggcggggcgggaggaacgggggagcccacaggagccagaagcggaagccaagcgcacacaggca

SEQ ID NO: 178652 - RNA, 54 nt, Homo sapiens
cccagcgcccacaccgccagccacacaaaccgagcaaccaagaaggggccagca

SEQ ID NO: 178653 - RNA, 62 nt, Homo sapiens
ggcggacgagaaggacagggaaggacccgcccggcggacacgacaaacccaggccccaacac

SEQ ID NO: 178654 - RNA, 73 nt, Homo sapiens
aagcggggccggaaggggccaaacggggcaaaagaagccggaaagcaggacacggaaagcaagaaagccggcc

SEQ ID NO: 178655 - RNA, 76 nt, Homo sapiens
ccaaaggggagcacgaggggaacgcaacccaagcaacgaacagaacgccaaaagacgaacacaaagggaaagagga

SEQ ID NO: 178656 - RNA, 74 nt, Homo sapiens
cccgccaaacccgcggcccacgcaggggacaccaacgggaggaaggccgacggccaaaacccgaacacaaagac

SEQ ID NO: 178657 - RNA, 84 nt, Homo sapiens
cagaacacaaacgcgcagcagcaacaagccgcagcgcagcagcgcaacaacagcaccgagcgagagcgggcagcccagcagcag

SEQ ID NO: 178658 - RNA, 71 nt, Homo sapiens
caggccaaacggaaagacgaaggggccccagagccaaggaggaaggggccgggccccacagcccacccggc

SEQ ID NO: 178659 - RNA, 79 nt, Homo sapiens
agaagcgcgaagagccgagcagccgggggggcggcggcggagacgcgggcccgagcgggccgcgaggcaaaggaacaga

SEQ ID NO: 178660 - RNA, 62 nt, Homo sapiens
ccacaccccaagcacccaggaaccggcaacagcaagaggagccaggagcacggggggaacaa

SEQ ID NO: 178661 - RNA, 51 nt, Homo sapiens
ggaccagcagaaaccagagggggagagcccaaggaccagggggggcaggca

SEQ ID NO: 178662 - RNA, 88 nt, Homo sapiens
cgccacgcgcggaaggcagcgcccagcagcgcagaaccgcacggccaagcccacacagaggaaaccgggagagagacagaaggcgaaa

SEQ ID NO: 178663 - RNA, 77 nt, Homo sapiens
cggcgggcgcgcagacggagggccgcgccacaagcagcaggccaaggcgcagcccagcccgaaagcagaacgacgcc

SEQ ID NO: 178664 - RNA, 71 nt, Homo sapiens
agaaggcgacacaaagaagccaacaggagacaagaaccagagcccaaaggcagagacagcacgaaggaaac

SEQ ID NO: 178665 - RNA, 78 nt, Homo sapiens
gccagcgcccggcgccgcgcgccacccccgaaaaccagaggaaaccgcagacggcagggaagcagcacccggccgcgg

SEQ ID NO: 178666 - RNA, 73 nt, Homo sapiens
ggacagcgcgccccagcgcgcaaggcagcccgcaacgcaccagacagggaggggggaagacagggcccagcac

SEQ ID NO: 178667 - RNA, 85 nt, Homo sapiens
gcggccagcaggaggcgagaaggcaggacagaagaccagcgcccgccacaggggccgccacagcaggaagcggagacagagggag

SEQ ID NO: 178668 - RNA, 81 nt, Homo sapiens
aggggagcgaccgggcacaagccagaggcagccccgagagcgcgggccaggacagaagcagacaacaccacggggaacgcg

SEQ ID NO: 178669 - RNA, 84 nt, Homo sapiens
gaagccaagagggggagggcagagagagcaaaagggagacacagaaccgggaaccgcacggaaagcgaagacgaagaaagaaag

SEQ ID NO: 178670 - RNA, 79 nt, Homo sapiens
gcgccgccagaacccccacgcacccaggaccgcgcccacaggacagcccggacgccacaagagaaaggacgccccgggg

SEQ ID NO: 178671 - RNA, 56 nt, Homo sapiens
ggaaacaggaaaggaaagagccaggacgaccgaaaacccagccagacaaaagagaa

SEQ ID NO: 178672 - RNA, 75 nt, Homo sapiens
gccagaccacagagcaaagaacacgcaccagaaaagcaggcgccccggggcagggcggagaacggaaaagcacca

SEQ ID NO: 178673 - RNA, 60 nt, Homo sapiens
cccgaacccacagacaagcccgagagaggagagaccgcacgcagggccacagcagcacga

SEQ ID NO: 178674 - RNA, 81 nt, Homo sapiens
cggcgggcgagcgagccgaaagagaaaaagcggaaggccacacggagggagcaaaggacggcacgggaaaaacgccaaaag

SEQ ID NO: 178675 - RNA, 77 nt, Homo sapiens
accgcccaccggcggccacgcaccgcgcgaagacggaagacgcgcccgcgccgaacgaaaacaaacggaagagaggg

SEQ ID NO: 178676 - RNA, 86 nt, Homo sapiens
gaaacggccacagaagaccggcacagcagagggcgggcacacacgcgggacgagccggagggaaggaggagaagcgaaccgcagga

SEQ ID NO: 178677 - RNA, 79 nt, Homo sapiens
cggccaggcccgcgaacacacgccgccaccgggaggcccagggaagggcagaagccaggaccccaccaacggacagaga

SEQ ID NO: 178678 - RNA, 78 nt, Homo sapiens
ccggggcgccaaaacgcccccaacccagcgcaaaggaagaggaaggggaaaaccagaaccgaaaacccagaccaacca

SEQ ID NO: 178679 - RNA, 71 nt, Homo sapiens
gagacgaagggccggacaaagagagaaaagaagccggagggcggaccgaggagggcggacacacccaggag

SEQ ID NO: 178680 - RNA, 55 nt, Homo sapiens
cgccggccgagaaggcagaggcggcaaacaggcgggcaacgcggcgcggaagaag

SEQ ID NO: 178681 - RNA, 77 nt, Homo sapiens
gcagaaccggcgcggacacgcaggcgccagcgacggcgaaggccacgcacccggcaaccacaccccaaacaaggaag

SEQ ID NO: 178682 - RNA, 75 nt, Homo sapiens
ccaagccaaccaaaaaacaagacgacaacaagagacaggggaagccaagaaccgagggaggccaccgaggcgaag

SEQ ID NO: 178683 - RNA, 81 nt, Homo sapiens
gaggcaggccgaggcacggagcgcccccacaggagagagggagcccaggcggcaggagagcaaggggcaacgaaggagaca

SEQ ID NO: 178684 - RNA, 56 nt, Homo sapiens
cgccgaggggcgggaacgaaacgagcggggcccggcgcacccaccaccgccgccca

SEQ ID NO: 178685 - RNA, 84 nt, Homo sapiens
cagaggccggggcgggcgcgccccgcggagccggagccgcagaggccccgggcggaccaggcccagaacgcagacccagcagcc

SEQ ID NO: 178686 - RNA, 89 nt, Homo sapiens
aggccggcaggcgagaaaagcgagaccgcggcgaggaccgacagccccagcgccccaggagaccaacaccccacagccaccacaccacc

SEQ ID NO: 178687 - RNA, 74 nt, Homo sapiens
aaacgccagccacaaaagcaaaccgaaagcggcgccaagcgcaagggccacacggggagcgcgcaagaacggac

SEQ ID NO: 178688 - RNA, 88 nt, Homo sapiens
gaggcgcgagcgagccgcgaaccgagcgggcggcgggcgcgcgcaccagggggagaaacccgggaccagaaccgacacgccccggaca

SEQ ID NO: 178689 - RNA, 84 nt, Homo sapiens
gggagaccgcggggagccccgggacccagggccaggagcgcagggcaagcagggagccggacaagcggcccaggggcccaaagg

SEQ ID NO: 178690 - RNA, 55 nt, Homo sapiens
gggggcacagacaggcaggggacgggggaggacaggagacaggaagagagaggag

SEQ ID NO: 178691 - RNA, 57 nt, Homo sapiens
cacccgcgagcgcaacccaagcggccaagaagaaaaagcgggaagaacagaaaacag

SEQ ID NO: 178692 - RNA, 84 nt, Homo sapiens
agccagcagcagagaccagcacaaaggcaaaggcaacaggaagaaccagggcccacccacagcaagggcaaaaacccgaaggag

SEQ ID NO: 178693 - RNA, 48 nt, Homo sapiens
ggagacccgaagcaaggccaagggcagacagaggaacaggcaaggagc

SEQ ID NO: 178694 - RNA, 73 nt, Homo sapiens
ggcacagaaggccaaaaaggcaaccacagagagagagagggagggccgccgaggcacagagaaccgaccagaa

SEQ ID NO: 178695 - RNA, 78 nt, Homo sapiens
gaaaaaccgcgaagcaggggccgcgggaagagcacaggggaggggaagcaacagggcggggggaaccgccaccaaggg

SEQ ID NO: 178696 - RNA, 77 nt, Homo sapiens
ccccaccgagacgaagcgggcggcgaaggaagagcacgggacaggaagaagcaaggccgacgcagcccggccagcac

SEQ ID NO: 178697 - RNA, 48 nt, Homo sapiens
cgagggcggacagcggggcccgcggaaaacaggaacaggaccgaaaag

SEQ ID NO: 178698 - RNA, 47 nt, Homo sapiens
aagccccaacccagagcaaagcagaagaaggccaccccaggccacca

SEQ ID NO: 178699 - RNA, 98 nt, Homo sapiens
aggcgcggagcgggcagccgccgccaccccgcggccgcacccccgccccagggcggagaacggaaaagcaccaggaagcagagaggaccgcagaaggg

SEQ ID NO: 178700 - RNA, 72 nt, Homo sapiens
ggcagacaaaagggccaaagaagggagagagaggccagcccaagcggccaggcgagggaccagcgaggagcc

SEQ ID NO: 178701 - RNA, 75 nt, Homo sapiens
cagaggcaacaagacggaaagagcaaggaggaacaaaagaagccgcgagagagccggagcccaaacagaaccgcc

SEQ ID NO: 178702 - RNA, 66 nt, Homo sapiens
acagacagcgcgcacaaagggaaaaagaaaagggcgaagacccgaagcagcgcaggaacagaagag

SEQ ID NO: 178703 - RNA, 73 nt, Homo sapiens
caccccggagcaggggaaaaaggaccaaccggcaagggacaacggccaaagaaccaggaggaacacggaggac

SEQ ID NO: 178704 - RNA, 70 nt, Homo sapiens
gcccccgaagcacagacacagacgggcaccggcaggcacggaagaacacgggaaagcagcaaaaagaaaa

SEQ ID NO: 178705 - RNA, 77 nt, Homo sapiens
ccagcccaagcgccccccccgccccccaggaggggcgagagggagccgcagcgagcaggaggagcggaagaccccgc

SEQ ID NO: 178706 - RNA, 79 nt, Homo sapiens
cacgaggcaacacgcaaggccgccaccagaagccgaagaaccaagacgagggggaaaagagggccacccccagcacaaa

SEQ ID NO: 178707 - RNA, 78 nt, Homo sapiens
gcgcggggacccgacgcccgcacgggagcagaggcaccagcccaggcagaagaacacccaggaccaacccagaaaagc

SEQ ID NO: 178708 - RNA, 76 nt, Homo sapiens
ggggggcacgacccccccagaggcgaaggagagaacggggacaaggcaagacagacacccagccccgacacggcaa

SEQ ID NO: 178709 - RNA, 78 nt, Homo sapiens
caaaaccccagaaacagaccccaacaccgaggcaaacgcagccccaggcgacaaggcgaagggcaggccgaaggcaaa

SEQ ID NO: 178710 - RNA, 78 nt, Homo sapiens
cccggagccgggggcccggggcgaccaggacagcggagcacccgggcgcgccaggcacagccaagagcggaccggcag

SEQ ID NO: 178711 - RNA, 77 nt, Homo sapiens
acagagaggcaggaaaaagcaacggacaaaccggcagagaaagagaaggacgcggaccagacaggaaaagcacaacc

SEQ ID NO: 178712 - RNA, 81 nt, Homo sapiens
cgccgaggacccagcacaccgagggccccggagccgcagaaccaggcgaggccagcagcaagacacggccagggaggggca

SEQ ID NO: 178713 - RNA, 74 nt, Homo sapiens
cagcgggagccgagccaaggcggcacgggaggagcagccccagagcgcacaccagggaaagcgccaggcgcggc

SEQ ID NO: 178714 - RNA, 71 nt, Homo sapiens
gaaaacaggaccaagaagaagaaccagcaaaagaggcaggagggggggaacggcagcggggacccagggcc

SEQ ID NO: 178715 - RNA, 72 nt, Homo sapiens
gaaggaggcccccgccggacgggagcaagcgacccggccggacccaccgaccagcgcaaacgccaaggcgcc

SEQ ID NO: 178716 - RNA, 89 nt, Homo sapiens
gcgccgaccggacggccggacccagcaccggcccggcccgcgaacgcgagcacgcgcggaaacccaaaggcccgccagcgccagacccg

SEQ ID NO: 178717 - RNA, 62 nt, Homo sapiens
aaacgaaaccgaagcagaagggacaggagggcgaaaggaaccagagcagacaagacgcacgc

SEQ ID NO: 178718 - RNA, 67 nt, Homo sapiens
cgaccaggaacaggagccagaacgaaagaaccggcacgcaaagggccgacgaccaccaccacacaac

SEQ ID NO: 178719 - RNA, 57 nt, Homo sapiens
caaaaccaagccaaacacaagcagaaggagcgaagaagagcagcgaggaggggggga

SEQ ID NO: 178720 - RNA, 76 nt, Homo sapiens
ggcccagacaggccaggcccccgcagcagaccaaaaagaaagacacaggcccgcacaagggggaccaggacaaaga

SEQ ID NO: 178721 - RNA, 69 nt, Homo sapiens
aaagcgaaaggcagcccagcaagagaaccgcccccgagcacacaacaccccccccacaccccaacgccc

SEQ ID NO: 178722 - RNA, 78 nt, Homo sapiens
accgggccgaggcgcggagccgcgcccgccgcgccgccgggcgggcccggggccgaaccccccacggaaaggacgaaa

SEQ ID NO: 178723 - RNA, 56 nt, Homo sapiens
ccggcacccggcgccggaccccgagaaacagcagcggcgggaaggaagagcacaga

SEQ ID NO: 178724 - RNA, 79 nt, Homo sapiens
gacaaaacaaccaacgaagacaccgagcgaaagagaaagaggggcaagacgccaagagaaaaggcgagagcacaaagca

SEQ ID NO: 178725 - RNA, 88 nt, Homo sapiens
gccgacacacacggagaaagggaagcacgcgaagggacccgcagccgcccaccgcgcaagagggagcacaggaaccgcaagaacggcc

SEQ ID NO: 178726 - RNA, 71 nt, Homo sapiens
aaccggccacgaggaggggcggggccgggcgggccgggaagggcaaggcagaagcccgaaaaaaaagccag

SEQ ID NO: 178727 - RNA, 83 nt, Homo sapiens
gaggccggggccgcgcggccacaaagaaccccaccgcgacacacgagcacaggagcaggagaaggaccaaaaggaacgagacg

SEQ ID NO: 178728 - RNA, 70 nt, Homo sapiens
aggagaacagccgcgcccccgaccaacacgagaacaaaacagccagaccaccggggcggccccccacccc

SEQ ID NO: 178729 - RNA, 72 nt, Homo sapiens
accacaaaccagagaaagcccagcagcaggaacaagacaacagagcaacagagagcaggaaagaagaacagc

SEQ ID NO: 178730 - RNA, 84 nt, Homo sapiens
cggaagcggcagcgaggagacccggcgccgccaggccgacgaaaagcccaagcgggaggccaccgccccaccagcaggcaacgc

SEQ ID NO: 178731 - RNA, 72 nt, Homo sapiens
cgcagacagcaggcaagaggggagaccaaagagaggccagagcagaggcggagaggggcagacccagggacc

SEQ ID NO: 178732 - RNA, 73 nt, Homo sapiens
gagaagcccagaccgcagggcgggaaaaaaccaagcagcgagcaccagagaagagaacgagcggaagaggcag

SEQ ID NO: 178733 - RNA, 70 nt, Homo sapiens
caagcaagacaagaacgcgcgcccaacaggaggaacagcacgcaaggagaaccagcgaggcgaccagagg

SEQ ID NO: 178734 - RNA, 78 nt, Homo sapiens
ccacaggcgagagcgaaaagcgagaacccagggcagcccgccgcagcaagagagagcaaggagcaggcgcagagcaga

SEQ ID NO: 178735 - RNA, 54 nt, Homo sapiens
gggaacgcaaggcccccgaccacacgcccgcgcgagggacggacaacccccgcc

SEQ ID NO: 178736 - RNA, 75 nt, Homo sapiens
gcaacaccgcacaggccagccggcaaaaacacaccaaagaggggaaccccggaaccagaggcacccaccaccccc

SEQ ID NO: 178737 - RNA, 90 nt, Homo sapiens
ggggaccaacacgcagcagccgcgccgccgccgcgggagccgcgcccgaaccccggcccgaacccagaaacgaaggaggcccaaccacaa

SEQ ID NO: 178738 - RNA, 36 nt, Homo sapiens
acgagaagacgaggaacacggcaggccggcaccacc

SEQ ID NO: 178739 - RNA, 58 nt, Homo sapiens
ccaccaccaagaagaaaccagccggggggggcgcggcaaggggacacaggcaaaacgg

SEQ ID NO: 178740 - RNA, 69 nt, Homo sapiens
aaccaacaagcagggcgagaagggggcacaacagaaaagcagagaccgggagggcgggacgagcagggg

SEQ ID NO: 178741 - RNA, 70 nt, Homo sapiens
cgccaccagagcagcaggaagggagagccacccaagagacaagcaggccaacagaaaaacagccgaccac

SEQ ID NO: 178742 - RNA, 85 nt, Homo sapiens
cagggcgccggcgccccccgcgggcggaaggcggcgcccaccccccccggacccgcggggccagcggcccaggccagcggcccag

SEQ ID NO: 178743 - RNA, 56 nt, Homo sapiens
gagcccgaaccgccagcagaagaaacggcacaaagggcaaagggaaaagacccgga

SEQ ID NO: 178744 - RNA, 77 nt, Homo sapiens
ggcggcacggcagagacagagacaagagacaggagcgaaaacgccacaacagagggggccagggcggggaagacaaa

SEQ ID NO: 178745 - RNA, 69 nt, Homo sapiens
ggggcacccccggcgcagaccggcagacaccacaggacacaacggcagggccgcgccgacgagcgcgcg

SEQ ID NO: 178746 - RNA, 55 nt, Homo sapiens
gacagggaccggcggcaaccggaaggaacggaggcaaaccggcagacgccgaaaa

SEQ ID NO: 178747 - RNA, 74 nt, Homo sapiens
aggaccaagaaccagcggacagaacaagggcgacacagagcggacagaaaagaaaccccacgagggaacaggac

SEQ ID NO: 178748 - RNA, 70 nt, Homo sapiens
cgcgccgcaaaacagaacgcggcacggcaaaacacaagacaagcaggagaaggaagcgcgaagaaccaag

SEQ ID NO: 178749 - RNA, 56 nt, Homo sapiens
gcgcccaccgcggggagcgggagccccacccaggccgagccaggacagagggcagc

SEQ ID NO: 178750 - RNA, 69 nt, Homo sapiens
aacagacagaaagcaccacagaaaggggcgagccccaacagaccgggaggaacggggggcgggcacagg

SEQ ID NO: 178751 - RNA, 73 nt, Homo sapiens
accagcagcgcgcaggacccagagaagaacggccggggggcgagcgaccgaaagacagaaacagagaaaccaa

SEQ ID NO: 178752 - RNA, 50 nt, Homo sapiens
gaaaaggagagagaggcacaccaacggcacaaagagaagcaacagaacag

SEQ ID NO: 178753 - RNA, 72 nt, Homo sapiens
gaagccccccacacacagggaagggacgacgaagaaaaccaaacaaaaagagaaaaagcgcaagagcaaccc

SEQ ID NO: 178754 - RNA, 68 nt, Homo sapiens
ccaccgacgccgcccaccggcacagcggaccccgcccgaaacacgaagagagggccggcacccgccgg

SEQ ID NO: 178755 - RNA, 67 nt, Homo sapiens
cacaggaagaaaagcaggagggcaaggagcgacgagccagagaggcaccaacacaagagaccacccc

SEQ ID NO: 178756 - RNA, 84 nt, Homo sapiens
cacaccaaacagggaacccaagccgccggagagcccaaagagagcgcccaaccaaacgcaaagcaccgcgccagggacagcagc

SEQ ID NO: 178757 - RNA, 77 nt, Homo sapiens
gcacagcgccgaggcccagagagaccccagaagggcggagaacggaaaagcaccaggaagcagagaggaccgcagaa

SEQ ID NO: 178758 - RNA, 80 nt, Homo sapiens
ccaggagcagggacggaaggacgccagcacaacaccggcgcgaggccgacgaggccgacccccccaaggacagccgcagc

SEQ ID NO: 178759 - RNA, 74 nt, Homo sapiens
cccaggccaagcaaccaccagcagcccccagagcggaacacagggggacgcggaagagacagcagaacaagagc

SEQ ID NO: 178760 - RNA, 84 nt, Homo sapiens
gaaaaggaagccaacgagacacggacaccaggagcacagcacacagaggggcacagaaaacgaacgagaaacgagggagaagaa

SEQ ID NO: 178761 - RNA, 76 nt, Homo sapiens
acagaccccaacaagggggaagaaaccagcaggcaaccaaaaaacggccagccccggaggaggaagcggacacagc

SEQ ID NO: 178762 - RNA, 68 nt, Homo sapiens
cccccaggacgacggaccggacacaccggaaggagggagccccaggaacaggagcccaccgaagaacg

SEQ ID NO: 178763 - RNA, 76 nt, Homo sapiens
ccagcaaacacaccgcacgcacaggaagacacccagacccagggacacccaacacgaacacagaaaacaaaaaggg

SEQ ID NO: 178764 - RNA, 57 nt, Homo sapiens
cacgacacagcccgaacgcagagaggagagaagcgggggccaccgccccgacggggg

SEQ ID NO: 178765 - RNA, 58 nt, Homo sapiens
cgggaggggaggcaaagggaggaggaggaccggagacaaagaagccaggaccaaaaag

SEQ ID NO: 178766 - RNA, 49 nt, Homo sapiens
aaagcaaacggaccagaccgaccaccaaaaagaggcaacggagagaggg

SEQ ID NO: 178767 - RNA, 74 nt, Homo sapiens
cgcgccaaaggagcacgaaaacaaacaggagcaagaaacgagagcacagaaaaacaaggacgcggggccacacc

SEQ ID NO: 178768 - RNA, 41 nt, Homo sapiens
gagcccaccccacaacgagggagaggacgcagacggaaccg

SEQ ID NO: 178769 - RNA, 74 nt, Homo sapiens
gccagcagaggcggagcccgcagaccgcagaaggccggagacaccagcagggcgaagcaggaaaagcgaagcga

SEQ ID NO: 178770 - RNA, 54 nt, Homo sapiens
gggcccaggacaagacagaagggaccccacacgggcagcggcccgaccagccgg

SEQ ID NO: 178771 - RNA, 79 nt, Homo sapiens
gcacggggcgggcagcggcgccgggcacaggagggaagagcaagggggggaggacaggagcaaaggcggaaagcaccga

SEQ ID NO: 178772 - RNA, 74 nt, Homo sapiens
aagcgcagcaccaccaacaaagcgccagaaccagacagccagaaggcaagaggaaccaaaggaaaaggcacaaa

SEQ ID NO: 178773 - RNA, 53 nt, Homo sapiens
aaccccccgcccaccccccaaaaagccgcagcagcgacggccaccggccacgc

SEQ ID NO: 178774 - RNA, 78 nt, Homo sapiens
gacgcggaacgggacccggggacggcacccagaggaccaggcggcggagacggaagcggaagcacacgccagacgcca

SEQ ID NO: 178775 - RNA, 73 nt, Homo sapiens
gggaccaccaagacaagaccagcgcagaaccgggagagcgaggacacccaaaccaagcaccagaagacccgcg

SEQ ID NO: 178776 - RNA, 85 nt, Homo sapiens
cgcagacggcaggagcagaccaaaggcacaggaagaagcgcaggaagcaccgaagaagccaaccagccggagccagccaagacga

SEQ ID NO: 178777 - RNA, 69 nt, Homo sapiens
gcccgcgccggcgcacggcggccgcggcgcggcgccacgcgagacaccaccaagccccccggaccgccc

SEQ ID NO: 178778 - RNA, 89 nt, Homo sapiens
gaacggggcgccgccccgggccccccagcagaagaccccggcggacacaggaggaccgcgccaacaggacgaggagaccgaccaggaga

SEQ ID NO: 178779 - RNA, 60 nt, Homo sapiens
agccgcgagggacgaccgggagacacggacgacaccgagcccaaccgaccaaccacaaca

SEQ ID NO: 178780 - RNA, 48 nt, Homo sapiens
ccccaaagggggaacagagaaggggacccggccagcgacacgagggac

SEQ ID NO: 178781 - RNA, 88 nt, Homo sapiens
cgccccgggccccccagcagaagaccccggcggacacaggccaagaaaaggagacggggcggcgcggccaaagcagaaaccaagagga

SEQ ID NO: 178782 - RNA, 78 nt, Homo sapiens
cgaggagggagaagacgaggagagcggaaaaaccccaagggacaaagaggaggacaagaacccacccgcgcccaaccg

SEQ ID NO: 178783 - RNA, 68 nt, Homo sapiens
gcaaggagaaaaggggagaaaccaacaagaaaaagaccgggcaaagaaggaaggcacacccacggccc

SEQ ID NO: 178784 - RNA, 70 nt, Homo sapiens
gggagccaaaggggaaacgaaaagagacagcagggcaaaacgggccacacacagggcaaaaagaacgggc

SEQ ID NO: 178785 - RNA, 80 nt, Homo sapiens
gaaaacgagacagcccagagcgggaccagcaagagcacacggaaggaccggaaacgagcaggcaagggaaccaacaggcg

SEQ ID NO: 178786 - RNA, 74 nt, Homo sapiens
caagaaggaggcacaaggaaaacaccacaagaaacacccgccgggcagcagaggcggaggagaaacaaaaacaa

SEQ ID NO: 178787 - RNA, 88 nt, Homo sapiens
gcagggggcaggaggaggacggcagcaaccgcagcagcagcccaggcagaagaagagcaacaagagaaaggcggcggcaaacccaaag

SEQ ID NO: 178788 - RNA, 87 nt, Homo sapiens
cgggcgaggcgcagggcccccacaccgcgccgccaaggcaagggagggagagagcaaaaccagccgacaaagcggccccagcaagaa

SEQ ID NO: 178789 - RNA, 81 nt, Homo sapiens
acgcagccacagaggaggccagggaagccagaggcgggccaaggggacccagcaaggagaaaccccacacacaacgcacac

SEQ ID NO: 178790 - RNA, 79 nt, Homo sapiens
gcgggcccaaggaccgcgagacgagaagaggacagacggaggagaaggaggaagaacaacacagggagacgccgccgaa

SEQ ID NO: 178791 - RNA, 76 nt, Homo sapiens
accaaagagaacaaccccgaagaagaggcccacgcggaccggcagcgccaccggaccaccagacaaggacacggcc

SEQ ID NO: 178792 - RNA, 73 nt, Homo sapiens
cgccaggaggaagggacaaaagggacgaagccacgacagcagagaggagcacggcagaggggcaaacacccag

SEQ ID NO: 178793 - RNA, 74 nt, Homo sapiens
ccagagcagacgaagaccaacgaaagaaaacacacacacacaaacgacgcagccagagcagcaagaggccaagg

SEQ ID NO: 178794 - RNA, 99 nt, Homo sapiens
gaagacacgaccgaacgccgccggaccccgggaggcgaggacggccgccagaaaagcaggacggggggaagaaaacagacagaaacagagcccaaaaag

SEQ ID NO: 178795 - RNA, 72 nt, Homo sapiens
agcaccagaagccacgggacggagaaggccgcaaggacgaagagcaccggaaaggagaagaacagcacaggg

SEQ ID NO: 178796 - RNA, 76 nt, Homo sapiens
acacaggcaaagagcgagcacaccagcagggaaacgaacccgaggcgcccagaaccaggcacaggcagggagggga

SEQ ID NO: 178797 - RNA, 53 nt, Homo sapiens
aagaccaacgaaagaaaacacacacacacaacacagggaacaccagaggcggg

SEQ ID NO: 178798 - RNA, 82 nt, Homo sapiens
cggggaccggagcgagaggagcgcgccggaccagcgcgacagaccaggacacaggcaccagagcaacccaggcacccaagac

SEQ ID NO: 178799 - RNA, 67 nt, Homo sapiens
gagagggcagccacagcaggaacaaggaggcaccggccaggcggaggcgggcggaccggccacgcaa

SEQ ID NO: 178800 - RNA, 83 nt, Homo sapiens
cggcgcccagcaacacagaagccgacaaggcgcaagcgaaaacagaccgcgagcccagagggcacacaccccaggagggggag

SEQ ID NO: 178801 - RNA, 56 nt, Homo sapiens
gggacaaggcagaagagcaacaagcaggacgacagcagagagggagccaggcccag

SEQ ID NO: 178802 - RNA, 86 nt, Homo sapiens
ccagagcgacgggcaggaaggagggggcgcacaaacgagccggaaccaaaaagaagccccagagccggggccaggagccccaagcg

SEQ ID NO: 178803 - RNA, 65 nt, Homo sapiens
acagaaaaggaagaaagggacaaagagaggagcaggaccggaacggcaaaggaaagcacaccaca

SEQ ID NO: 178804 - RNA, 77 nt, Homo sapiens
ggcccggccagccagggaacagcccacccaacaagacaccggacaaggccaagaagccaccaccagcacccaccccc

SEQ ID NO: 178805 - RNA, 75 nt, Homo sapiens
gggcaccaacccagaagaaaaccccacaaaagaggaagcaccagagaacagaggagaaagacagcaaagaaaagg

SEQ ID NO: 178806 - RNA, 91 nt, Homo sapiens
ccgccggccagaaggaggccaccagcccagccccgaaggcccgcggagacgagaccaagacagcgacagcagacaagcaacacaaggggaa

SEQ ID NO: 178807 - RNA, 58 nt, Homo sapiens
cgggagcggcgaaaaaacccgagaggaaaaggcccggcagaacagccagcaaagacaa

SEQ ID NO: 178808 - RNA, 73 nt, Homo sapiens
gacggaaagcgaaaccacaggcggcaggagggaaagcaaggaaacgcccccccagaggcccagacggccaaag

SEQ ID NO: 178809 - RNA, 66 nt, Homo sapiens
accaagaaccaggagagaagagcgccccgaaccaaaagcgaacagccaaagaagagagacccgccc

SEQ ID NO: 178810 - RNA, 84 nt, Homo sapiens
aaaagagaaaggaagaaagaaaagagaccgagggacaaccggagaccaagacacaccaccccagggggggcccaaccaccagga

SEQ ID NO: 178811 - RNA, 80 nt, Homo sapiens
gaagagaggagggagaacacagaaaccggccccaggccggacagcccgggagacgagccccggagccccaacgaaaggca

SEQ ID NO: 178812 - RNA, 79 nt, Homo sapiens
gaggggacccggggagaggacccggccagaggcgagccgcggagggagcgcgcacggccgcggggggcgccacagggaa

SEQ ID NO: 178813 - RNA, 49 nt, Homo sapiens
aggacagaggaccaaagcggaccagagacaggaaaagaacgcacgggcc

SEQ ID NO: 178814 - RNA, 73 nt, Homo sapiens
aaagaacaggacaagaaaaacaggaggacccaacaggcagaggggaggagacacgaagcgacgcagagccaga

SEQ ID NO: 178815 - RNA, 68 nt, Homo sapiens
aagccggaaccagacgagcccagggggcacgcggaaacggggaagaagccacagaaccaaaaaacgag

SEQ ID NO: 178816 - RNA, 79 nt, Homo sapiens
cagcaaagcgcccagccgccgcccgcgcccgcggccgggggacaccgaccagaccccggaaacagggaggacccagccg

SEQ ID NO: 178817 - RNA, 44 nt, Homo sapiens
cgggagcaagaagaacacccagaggaggaagagaaggccggccc

SEQ ID NO: 178818 - RNA, 78 nt, Homo sapiens
cgacgcccaaaaaaggaaagcagggccacagaagagggacaggaagggaccacagaccagcacgccggcgccacgaac

SEQ ID NO: 178819 - RNA, 71 nt, Homo sapiens
ggagcccaccgcgagaagagcaagacagggggccgggaaacagaacgaagcaaacaagcgccggcggaagc

SEQ ID NO: 178820 - RNA, 37 nt, Homo sapiens
acgggacagggcaccggcaagggacacacaggaagac

SEQ ID NO: 178821 - RNA, 74 nt, Homo sapiens
acgggacgcagaaagggcagacacaggcacaccaaggggggcggaggcagggagggacggccgggggacagcca

SEQ ID NO: 178822 - RNA, 71 nt, Homo sapiens
ccccacaacggggagaacagcccaaaaaaggaggccggaagaaaacggggagcccgaggcaacgcccaggc

SEQ ID NO: 178823 - RNA, 77 nt, Homo sapiens
cgcgggagggaaggcgcggggagggcacccagcaccaggcacgcaaaagaaaggaggaaaccagaagaaacaggcca

SEQ ID NO: 178824 - RNA, 72 nt, Homo sapiens
gaccaaagcacgcagacgacgagcgagccaaaaggggggacacccaaggcaccggcccggaacaggggacaa

SEQ ID NO: 178825 - RNA, 91 nt, Homo sapiens
gcgggagaggcgccggggccgcacagaaagcagggcgcaggcgaaaccgggccccaacagaggagagccagcaacggccccgccagcgagc

SEQ ID NO: 178826 - RNA, 79 nt, Homo sapiens
gccccgcagaggcagacccagcaccagaccaggcggcacccgccccgaggaggggaccagacacaaggcgagggcgccg

SEQ ID NO: 178827 - RNA, 70 nt, Homo sapiens
cacccaaaacaacagaacagaaccacaggcgagaagcaggcggagggagcgcaaccaggcaccgcagaca

SEQ ID NO: 178828 - RNA, 74 nt, Homo sapiens
aagcacggaaacgaaggaggcgccggcgagcgacggacaccagagacggaaagccggggggcaccagccgaagc

SEQ ID NO: 178829 - RNA, 76 nt, Homo sapiens
acaccgaccgagaagacgaccagggaaggaacaccccgcccgcagccacgccccagggccacaacgaagaagacag

SEQ ID NO: 178830 - RNA, 50 nt, Homo sapiens
acaagagaaaggcgcagaaccacagagcacaggccgcgagacgacgaccc

SEQ ID NO: 178831 - RNA, 64 nt, Homo sapiens
cagcgcagagccagagaccacaggagcgagagcaaacaggcacgcggaaaaaagagcacagaaa

SEQ ID NO: 178832 - RNA, 56 nt, Homo sapiens
gcgcgacccaaccgggggaagaccccagccggaaacgaaacagcgcagccaggaac

SEQ ID NO: 178833 - RNA, 82 nt, Homo sapiens
ggcgcccccccagagagccagaaagaaccgagagcggcccaggaggaacaaccagcccacccggagagggcacgcgcgggga

SEQ ID NO: 178834 - RNA, 75 nt, Homo sapiens
gaccggcgcgccccgcccggaccgcgcagaaccagggcggcggccagcgccacgcggaccgacggggcggacaag

SEQ ID NO: 178835 - RNA, 84 nt, Homo sapiens
agagggccaaggggaggccggcaagacgggccgcgcgccggagagcagccaagaaagccacagaaagacaaccaggacagaaag

SEQ ID NO: 178836 - RNA, 71 nt, Homo sapiens
ccccaacgaaacggcgacgacagagggccagaaaaggcgacagagaagagagggacggcgcaaaccagggc

SEQ ID NO: 178837 - RNA, 72 nt, Homo sapiens
ggacacccgggcggggcagagcagcccccagccagccgcgagacaacaggcacaaagagagaaggaacaccc

SEQ ID NO: 178838 - RNA, 76 nt, Homo sapiens
cacacacaggaccgccccggacaggaggagaaggccgccaaggcaaagaccaccacaaagagaagaacgggagcgg

SEQ ID NO: 178839 - RNA, 79 nt, Homo sapiens
cagcagccgccgagcagcagggaaaaggggcgaggccggccgaccgacaagaagacgacgcaggggaacaccagaagcg

SEQ ID NO: 178840 - RNA, 76 nt, Homo sapiens
gggcagcaggcgaccagcgccacgggccacagagcaaccaaaaaccggccgcaggcacaaaagaagacgggaaaag

SEQ ID NO: 178841 - RNA, 71 nt, Homo sapiens
cggccacccacgagccgacggcaaacgccagggagccaccaagggcaggaggccagggaaaagacggagcc

SEQ ID NO: 178842 - RNA, 71 nt, Homo sapiens
gggaaacggggacacggaagaaccgcgacagacagggaacgcaccccacaaccagcgcaaccagcccggcc

SEQ ID NO: 178843 - RNA, 70 nt, Homo sapiens
cgccgagcccacccgccggagacccagccccgggccggcggggagacccacaacccccggaaggagcaac

SEQ ID NO: 178844 - RNA, 73 nt, Homo sapiens
ggaagccccaagaagacacacgagaggaaaccccggcccgacgagaagaggcggccacaccacggcgcagaga

SEQ ID NO: 178845 - RNA, 85 nt, Homo sapiens
cacggaggagccgcggggcgccgccacggccgcccggagcagaagaggcggccacccacgagccgacggcaaacgccagggagcc

SEQ ID NO: 178846 - RNA, 76 nt, Homo sapiens
accgggcgcagacggcgagaccccgcacaggggcacagaaaagccaccagaagcaacaaagaagcccccagagaga

SEQ ID NO: 178847 - RNA, 76 nt, Homo sapiens
agaagcagaaacacagaccacacaaggcacccggaaacaagccacgaaggagagaaaaccagcagcagcgcagcag

SEQ ID NO: 178848 - RNA, 51 nt, Homo sapiens
ccgaaccagggggagccaccccgcggcgcaagccccggggcagagacacag

SEQ ID NO: 178849 - RNA, 83 nt, Homo sapiens
cacgcagcccgcgagcacaggagggagagaggaccccgggacacgaaagccaggaaagggggacagaggagccaaaggccaaa

SEQ ID NO: 178850 - RNA, 74 nt, Homo sapiens
gagcacgcacgggaaccggaccaggaggaggcaggaccaaaagggaaaagcaccggcagccagaaagcgggggg

SEQ ID NO: 178851 - RNA, 68 nt, Homo sapiens
gggcgcgccgcgaccgcccgccggggcacgaagacagaaggcccggggcggacgcagggggagagcca

SEQ ID NO: 178852 - RNA, 69 nt, Homo sapiens
ccagagcgaggacgccggcaggaccgaacaacagggcggggagggaacaccaagagccaccacagggaa

SEQ ID NO: 178853 - RNA, 76 nt, Homo sapiens
ccgagacaaaggcaccaggccaccacagaaacaaaagcaacaaagaggggcccacggccccacggggcgacgagcc

SEQ ID NO: 178854 - RNA, 70 nt, Homo sapiens
acccgcccaacaggggagaaaacggggacggacccaggccaggaaagaaagaaccgccacgggcgcgcag

SEQ ID NO: 178855 - RNA, 79 nt, Homo sapiens
cccacgggaaaagcaaacaccaccagccgggccccagcaggagcacggagcaagcggcaggggacgaagagccagcgag

SEQ ID NO: 178856 - RNA, 54 nt, Homo sapiens
cggggggccgggaggcggagaaaaggggggcagcacagcccagaagcaggaccg

SEQ ID NO: 178857 - RNA, 93 nt, Homo sapiens
acccagaccagcaggaagagaagagagcggacccacaccagggaagacaggggagagggggcaccagcgggccacaagcacgagaggaagggg

SEQ ID NO: 178858 - RNA, 77 nt, Homo sapiens
acagaacaccagcagcaaacacaggacagccaacaaaaagacgaacagaggggaccaaaacccagcccgggacagcc

SEQ ID NO: 178859 - RNA, 84 nt, Homo sapiens
ggacgggccaaaggagccgaggagagaacgggacggaaaaggagcccaccaacgcccccagcaacagccggcgagcagcgccag

SEQ ID NO: 178860 - RNA, 78 nt, Homo sapiens
ggcccccgacggccgcagaacgggaccagccgcggaggcaagggcgcagcacgcagacccgcaagccccaagcagagg

SEQ ID NO: 178861 - RNA, 53 nt, Homo sapiens
cacaaccagagcgccaagaagcaccacaaagaaaggggggacacaccaccggg

SEQ ID NO: 178862 - RNA, 72 nt, Homo sapiens
gaggcgcggccggcggccggaggagcggcgcgcgcgcgcgcgcggggccccgcagaaccaaaggcaagaacc

SEQ ID NO: 178863 - RNA, 78 nt, Homo sapiens
cagccacccagagaagcgacggcccacccagcccccgagaggaaaaagacccgagaagcgcagacccaccagggaaag

SEQ ID NO: 178864 - RNA, 68 nt, Homo sapiens
aggaccagagacaacacgccccgcacagaccgacaagaaacaaggaccgggagaggggacagggcgac

SEQ ID NO: 178865 - RNA, 74 nt, Homo sapiens
gggaacgggaagaagcaaagcgacagaaggagggaccggccggggcaaggagaaaagcaggacagggcgcgcga

SEQ ID NO: 178866 - RNA, 67 nt, Homo sapiens
gagacaccaagaacgaaacaacagaagagagaagaagcaaaccgggaccggaagcaccaaggagaaa

SEQ ID NO: 178867 - RNA, 39 nt, Homo sapiens
aaggccgccgcccgcagaaacagacggggacagaagacc

SEQ ID NO: 178868 - RNA, 67 nt, Homo sapiens
cacgcacaagacggacgaaagccagagaaaaagcggagaaaaggcacggcacaacaccaaagcaaaa

SEQ ID NO: 178869 - RNA, 74 nt, Homo sapiens
gcgccccccgccgccgccgccgcgcgccaaagcgcgccgccccgggcaaaagccaggaccgacaagagagcagg

SEQ ID NO: 178870 - RNA, 35 nt, Homo sapiens
ccagcccagcgaccagcagcaccgaggagcaacac

SEQ ID NO: 178871 - RNA, 102 nt, Homo sapiens
gcaccccaggcgacgagagcaagccaaagaccaaggggggggcacccccacaacgaaacccacaaaccccagagcaagccaacgcaaggcgcagaaaaaaca

SEQ ID NO: 178872 - RNA, 61 nt, Homo sapiens
agagcaaaaaccggaaagggcccagagcaggcggacaggagcgagaaagcgccgcccaggg

SEQ ID NO: 178873 - RNA, 78 nt, Homo sapiens
cagaaaaccacaaccgaacagaagaagcagcaaaagccaacaaagcagcagacgacggaccaggcacagagaaggccc

SEQ ID NO: 178874 - RNA, 73 nt, Homo sapiens
ggaacgggaaaggaacaacgggcaagaaagacgaggaggggaaaaggaccagaacggaagcaacagggggcgg

SEQ ID NO: 178875 - RNA, 59 nt, Homo sapiens
ccggagagccgggaggagaaaaccacagagcagaaacgggcgaaaggcagaaaaccacg

SEQ ID NO: 178876 - RNA, 80 nt, Homo sapiens
gaaccccgccggcaagagacaggaagcaccggacccagaacgccccaacccgagaccaccaggcacaaagacggagaaag

SEQ ID NO: 178877 - RNA, 70 nt, Homo sapiens
aagacaaaaaacccaagaacccaaagcgccagagaagagacaaaaagcacaccagaagccggcagggaga

SEQ ID NO: 178878 - RNA, 77 nt, Homo sapiens
aacggaggagagaggacaggcaaagaaaaaaagggcgcagaagcccaaagaggccccgggaccaaggacacgcagac

SEQ ID NO: 178879 - RNA, 108 nt, Homo sapiens
cgggcggacgccgcagagcgccgaggaggcccgcggggcaaccgccacgagacaccaaggaggccagagggaagcaaagcagccaacaccagaagaagggacaaaagg

SEQ ID NO: 178880 - RNA, 50 nt, Homo sapiens
aggccgcagaacacgacggagcgaagggggcacaaagaaaccgaagaggg

SEQ ID NO: 178881 - RNA, 71 nt, Homo sapiens
gaggggggaggcgaacagccggcgcccggacgcgaggggggagaggagaacgaaaacccaccaggaaggag

SEQ ID NO: 178882 - RNA, 87 nt, Homo sapiens
ggcgggacagcccaagggccagcaccgcgcccaggcagagccagaccacagcagcagcagacacggcgagaagacaaccagacccgg

SEQ ID NO: 178883 - RNA, 76 nt, Homo sapiens
gggcccgccaggcggggaagcgcccgggcgccgccggcagcagcccccggcgcggccgggcccgggaggagcaggg

SEQ ID NO: 178884 - RNA, 74 nt, Homo sapiens
aagagaaggcagccgagcaccgagccagcccaggaaaaggagagagcacgcagccccgaaggcggcccggcccc

SEQ ID NO: 178885 - RNA, 72 nt, Homo sapiens
aaagaacagaaggaacgcagaaacacaggaccccccccaacgaggcggagaccgacgcggaaaaaaagaccc

SEQ ID NO: 178886 - RNA, 50 nt, Homo sapiens
aggagggagaggacacggcccacccgggcggccgccacccgaggaagacg

SEQ ID NO: 178887 - RNA, 75 nt, Homo sapiens
gcagccagagccaccagcgcagcgcgccaggagcccagcagcaagggcaacgagcaaccaaaaccacggaagaaa

SEQ ID NO: 178888 - RNA, 72 nt, Homo sapiens
aggaaaagaagcaggagcgcacccacggaaagacgaccacgcaaaggagcacaagccgggccagaccccagc

SEQ ID NO: 178889 - RNA, 59 nt, Homo sapiens
ccacaccaggccggaagacagcaggaaagcgccaagaagcagacaaccggacagcgcac

SEQ ID NO: 178890 - RNA, 73 nt, Homo sapiens
caggagcgggaggccagcacggccgcggcggggcccccccgcgaccccacgagacaacggcaagcggagaaga

SEQ ID NO: 178891 - RNA, 75 nt, Homo sapiens
agccgaggaacgcgagagaaaccgaaggccaaggcccagcgacaaagagcaaggggcagccgagaaacgcccaga

SEQ ID NO: 178892 - RNA, 74 nt, Homo sapiens
gggcgcggccgcgcgccgccggcgaaggaggaggcggccggggacaagagaaaaaaagggcgggcgaacaaaaa

SEQ ID NO: 178893 - RNA, 85 nt, Homo sapiens
gcccccaggcgaagaagcgcagccgcaccggccaaggaccccgccccccgaggcgcagcccgaacccagcagccacacgccaaca

SEQ ID NO: 178894 - RNA, 58 nt, Homo sapiens
caaggagggaaaagaaagaagagaggagaaccagccagacacagaaagaaggaccaag

SEQ ID NO: 178895 - RNA, 79 nt, Homo sapiens
aagcccgacacaggagcgggcagaggagcagggaggccacaggggccgaaacacagagcaaggaacccggcaccagccg

SEQ ID NO: 178896 - RNA, 56 nt, Homo sapiens
gagcgcacggcaacaaccagagcccgggaagcgcagagggaacacggccacgaggg

SEQ ID NO: 178897 - RNA, 84 nt, Homo sapiens
caggcggggggcgcagaggacacgaggcggcgggcggagacaggaccgcggcgagcaagggccggcccagggagaacgcaaaac

SEQ ID NO: 178898 - RNA, 86 nt, Homo sapiens
ccccgaccgcaaccccacccccgcccaccagaggcccggcacggccaacggggcccccagccaacgggacccaggggagcgacagc

SEQ ID NO: 178899 - RNA, 58 nt, Homo sapiens
cgggcgcgcgcgaccgcgccccggaaagggcagcaagacacgaagccgagaaagagca

SEQ ID NO: 178900 - RNA, 37 nt, Homo sapiens
caaagcacagccacagaagaggcagcagcgaccagaa

SEQ ID NO: 178901 - RNA, 76 nt, Homo sapiens
cagaagaacccaaaggggagggaccgcagccacggaagagaagcaacgaccggaaaccacaaagcaaagacaggac

SEQ ID NO: 178902 - RNA, 64 nt, Homo sapiens
gagaacccagggcacgggggacagggcgacgggccaggcggccggacccaggagaaggaccaga

SEQ ID NO: 178903 - RNA, 85 nt, Homo sapiens
cgaccacacgcagacccccagggagaagcccaccacgcaacgggacggcgcggcggaaggcgcgccagacgagccacgcgccaca

SEQ ID NO: 178904 - RNA, 84 nt, Homo sapiens
ccgggcgggggggcgggaagaggaaggcgccgaaggggaaggaacaaagcagagaaaccaaaaggccagacgaacacgagaggg

SEQ ID NO: 178905 - RNA, 75 nt, Homo sapiens
aggcgaagccaacgccgagcggggccagagcacccgacaaggagcgaaagacaaacagaaggaagaagggagaag

SEQ ID NO: 178906 - RNA, 81 nt, Homo sapiens
cgggccgggacacaaccgcaggagagcgcccggggacagcccggacgaagaggaccgagggccccaggacagcaggcggga

SEQ ID NO: 178907 - RNA, 89 nt, Homo sapiens
aagacaagagacgaaacacgcaccaaaaacaaaagagagcgcacgaccagccggacgagcgggagaggacaccacacaaaaaacaggaa

SEQ ID NO: 178908 - RNA, 79 nt, Homo sapiens
acaaaggcaggaagagaaaagcaggaagaagagagccaggcgaacgccgaggaacagggaccggcaagaaaggagggac

SEQ ID NO: 178909 - RNA, 76 nt, Homo sapiens
cacacagggagccagcacccgcacacaaaggagcccccaggacaggcacacccgggaaaaccgaacacccagccca

SEQ ID NO: 178910 - RNA, 73 nt, Homo sapiens
gaaaagagcacaaggaaagcgccgaaagcacccacaagcagagcggcgaagacggaggaggggacacaaagga

SEQ ID NO: 178911 - RNA, 75 nt, Homo sapiens
gggcgagcgcaaaggaaggcgccgggcccgacccgcgagagggacaagaacccaagaaacaggaaaaaacccaaa

SEQ ID NO: 178912 - RNA, 73 nt, Homo sapiens
cgcgcccaggagcggaacaacgcggcgagcgggagaacaggacgaggaggcacgccagacagaggcccgccgc

SEQ ID NO: 178913 - RNA, 80 nt, Homo sapiens
ccgcccgaggacagagaggcgagcgcccggaggggagagagcggaggacagccgagaggagcggggacgacgagcccacg

SEQ ID NO: 178914 - RNA, 39 nt, Homo sapiens
ccaagaacagcaccagggaaagagacggggcacggagcc

SEQ ID NO: 178915 - RNA, 75 nt, Homo sapiens
aaaccagcccggacagcgcaccccacgcggccgccaagcaggaaagcaacaggaggagcacaagcaggacccccc

SEQ ID NO: 178916 - RNA, 72 nt, Homo sapiens
cacgagaccagaaaccaacccacagcagcgagagggacagccacggcagcgcaggacggacgcagcaggaac

SEQ ID NO: 178917 - RNA, 76 nt, Homo sapiens
ccaacgcgcgggccggggcgaggccccgccagcgacagcccaccacaggaggagcagggccagcgcagaaaacagg

SEQ ID NO: 178918 - RNA, 75 nt, Homo sapiens
acacacgcaaaccacaagcagggacagagagggccccacagccccggcgccccaaccccgagcaaggacaccccc

SEQ ID NO: 178919 - RNA, 77 nt, Homo sapiens
agaccgcaggacaggacagaggacgaggccccggaaacacaggcaccaccgcagacgcccaggaggccgccggcaaa

SEQ ID NO: 178920 - RNA, 72 nt, Homo sapiens
acgaaagaagaacagagcaggccaaggaggccccccacaggaccaagccaaagggcccccgaaaaaaaaggc

SEQ ID NO: 178921 - RNA, 78 nt, Homo sapiens
gggcacgcagaaggaccggccacgcgaccagccacgcccggacggcccgggcagcagccacgaccgccccagcacagc

SEQ ID NO: 178922 - RNA, 74 nt, Homo sapiens
cgacgcacagaagagcgggagagaggggacggaagcggcagcgggcagccggcccagcacagggagcagaaccc

SEQ ID NO: 178923 - RNA, 56 nt, Homo sapiens
agaacacaaggccagcccaacggcagagaaagacaagagcaccacagcaaaaccca

SEQ ID NO: 178924 - RNA, 71 nt, Homo sapiens
cccaggacgaagcgagcaggcccgcccggcggaagagaacacaagaaggagaggaacagaaaaacgaaacg

SEQ ID NO: 178925 - RNA, 62 nt, Homo sapiens
caggcccagaccaaccagcccaaggaacacgccaacaaacggaggcaggaggggcggcaaag

SEQ ID NO: 178926 - RNA, 84 nt, Homo sapiens
cggagcccgacgagccgacgaccgacccgcacggcacgccgaccccgggagcagcgcaggacagggaacaaaggcagagaaacg

SEQ ID NO: 178927 - RNA, 78 nt, Homo sapiens
agcccaaaccccaggccaagcagccaccagcagcccccagagcgggaccacaggcggccagaccgaacccagaaacag

SEQ ID NO: 178928 - RNA, 65 nt, Homo sapiens
gcagcagaagcagcagaaaggccgcggcagggcggcgcggccgagggggagccacggaccagggg

SEQ ID NO: 178929 - RNA, 49 nt, Homo sapiens
acccgccgccacccacaaggcacaacaggaagcgcccgaacgggccaaa

SEQ ID NO: 178930 - RNA, 80 nt, Homo sapiens
ggcaccacgaaggaccgaagagccgagaaaggggggaggaaggaaggggccacccagagcagagccggggggcgaaccga

SEQ ID NO: 178931 - RNA, 68 nt, Homo sapiens
caggggccagaggacccaacccaggccagggaacagagcccggaaaccaacaggaaaccaacacagcc

SEQ ID NO: 178932 - RNA, 81 nt, Homo sapiens
ggccgagcaggcgagcgaacgacgcgggaccccacaccagccagggaacaacggcccccagcagacagagcgggagggcgg

SEQ ID NO: 178933 - RNA, 71 nt, Homo sapiens
cacccaaaccacgggccaaaaaagcaggagaacacgagcaagcccagaaagaagcagacagcgacggcagg

SEQ ID NO: 178934 - RNA, 85 nt, Homo sapiens
acaagcagccaagcccagacaagccccagggaagccacagcaccccagcacccagaagcggcaaaacgggggccccaccgcggag

SEQ ID NO: 178935 - RNA, 80 nt, Homo sapiens
ccgagagcggaccgagagcgcgaaacgcacgagaagaggagcaagaggggggggcccccccgaagaaaggaaccggggag

SEQ ID NO: 178936 - RNA, 61 nt, Homo sapiens
gaagaaacaaaaggccaccgaagagcgagaacgccagagaaagcccagcagacccagcaaa

SEQ ID NO: 178937 - RNA, 64 nt, Homo sapiens
ggcgggacagcggcagacaagcgagaacaggagaagcaagcaggcgaacgaagaggcggcgccg

SEQ ID NO: 178938 - RNA, 70 nt, Homo sapiens
cgagccaacgcacgcacacagccacccgcgcaggcagcaaaagaagcaggacccgcccaggacaaaaaca

SEQ ID NO: 178939 - RNA, 75 nt, Homo sapiens
gaggagacaccacacgcgcagccggaaccaccagcaagcagaggagccaggaagagacaagcaacgaggaaaaga

SEQ ID NO: 178940 - RNA, 87 nt, Homo sapiens
ggcaacgcaggccagcaaccccagccaagcaaggaccgggccaaagccgaggcaggaaaagaggcccggaagcagcggccgagccgg

SEQ ID NO: 178941 - RNA, 88 nt, Homo sapiens
gcgccgcaggagggagagcccacccgcgccaggaggccgaacgcggaccgccacccggaggcaagcaaaacagacaaacaagcgagaa

SEQ ID NO: 178942 - RNA, 113 nt, Homo sapiens
agaaacaaaaagcaggcagggagcaacaaagcccaacaacccacacagacaggggccaaggaccgacaaggaaccagcggcgaaacaacaccgacgggagcagaacgcgggca

SEQ ID NO: 178943 - RNA, 76 nt, Homo sapiens
agaacccacgccaaagaggaagcccaccacaaaaacgaaggcggcggaagaagaagcagagagccaggaaaagaaa

SEQ ID NO: 178944 - RNA, 28 nt, Homo sapiens
gaagccacgaagacagggggacaggagc

SEQ ID NO: 178945 - RNA, 60 nt, Homo sapiens
gcaaccggagaaccggggaaccgcccaaaagcccgccagaagaaggacgggagccaaaag

SEQ ID NO: 178946 - RNA, 95 nt, Homo sapiens
aagagaaaaagcaaacgaccagacggcagggaggcacaaaggggaacacaggcacaaaccacccaggaccgggccaaaaggaaaccaaggacgag

SEQ ID NO: 178947 - RNA, 74 nt, Homo sapiens
gagggaagaccccaaggacgaccacaccggcggcgagcgcgcccgcaggagcccgcccggccgccgccgcaggc

SEQ ID NO: 178948 - RNA, 76 nt, Homo sapiens
caacaccccacggccaggaaaacggggaccaccacgcccaggacagggccaaagcggcaggagaaggaagggaccg

SEQ ID NO: 178949 - RNA, 55 nt, Homo sapiens
gggggacgggcagaaaaacagagagagggacgccaggcccacgcggccgaacccg

SEQ ID NO: 178950 - RNA, 71 nt, Homo sapiens
gggcggcgcgccgccgcgcggggcagggagcagggagcgcaggcaaggaggcgagcaccaaccgagggacc

SEQ ID NO: 178951 - RNA, 84 nt, Homo sapiens
cgccgccggcaggcccgcgcaccaggccacgaggaggaccccggccaaagccagggcccacccggacccgcccagccgccagag

SEQ ID NO: 178952 - RNA, 80 nt, Homo sapiens
ccacacacaggaccgccccggacaggaggagaaggccgccaaagacagcacccccaggaccagcggccaaacaccggcaa

SEQ ID NO: 178953 - RNA, 70 nt, Homo sapiens
cacaagacccaagggcccagcagggaaggccagcacaaagcgagaaggagggagaagggcgcgagaacca

SEQ ID NO: 178954 - RNA, 55 nt, Homo sapiens
gcggaccgcccccgccaacgaagaccgagaccagaaagcagagagcgaagacgaa

SEQ ID NO: 178955 - RNA, 70 nt, Homo sapiens
gaagaaggaagccaaagaaggcagggacacgacacagggacgggccaagaacccaggaggagggaaagcc

SEQ ID NO: 178956 - RNA, 65 nt, Homo sapiens
aggcaccacacgccaagaaagcaggaaacgaaaagagacagcagggcaaaacgggccacacacag

SEQ ID NO: 178957 - RNA, 122 nt, Homo sapiens
cgacagcaaacaaagaggccgcggaggagaagccggaggaggacaacgacaccaccgcagcgacgagcagaagacgaccccgacgcaggccaggagccgcggacagaagccgagcacggccg

SEQ ID NO: 178958 - RNA, 67 nt, Homo sapiens
acaagacaaacccagaaaagaagggagaggacaggaaaaccaaacaggggaaggaacaaagcagaga

SEQ ID NO: 178959 - RNA, 71 nt, Homo sapiens
gagacgccggacaaccgccccgagggaagggaggcggcggccccaaaaacgagccagagaggcaccaacac

SEQ ID NO: 178960 - RNA, 80 nt, Homo sapiens
ggcgcgagggcgggggcagcggcaggagagaagcccacaggccaagcggggaagacccccagagggaagcaggaaggcaa

SEQ ID NO: 178961 - RNA, 69 nt, Homo sapiens
gaaaggggaaagccgccaggaaaaggaaaacacccaggcggccaggcggcgacacgcgggggaccgagc

SEQ ID NO: 178962 - RNA, 82 nt, Homo sapiens
ggccggccgggccagcacccggccgagacggcggcagcagcggcacagagaagacccggggcaggcgcaggaggcacccaag

SEQ ID NO: 178963 - RNA, 55 nt, Homo sapiens
ggggaccagcgaccgacaaccccgggcaacccccaagagggagagacaccaggcg

SEQ ID NO: 178964 - RNA, 85 nt, Homo sapiens
cgaacggcgaacaagagcaacgagggggagaaccaaggcggggaggcagcccaggcacgcccagccgacacaaccgcaaaaacca

SEQ ID NO: 178965 - RNA, 77 nt, Homo sapiens
cgggacgccggagaggcaggcgcggcccgcggggcgccaggcacgcgaggcccccaggggagaagcagaccgcacca

SEQ ID NO: 178966 - RNA, 43 nt, Homo sapiens
gggcgccaggaccggccgaacgcagagcagggcacaagaggac

SEQ ID NO: 178967 - RNA, 70 nt, Homo sapiens
ccaacggggggagaacccaaagcaacggggcggcacacaaggagcgaagggcagggagaacgccaggcac

SEQ ID NO: 178968 - RNA, 82 nt, Homo sapiens
gcacacgcgcagccccggccccggcccgccggagaaacagaccccaacgaaacgaagacaagacgaagaggagaggcacaga

SEQ ID NO: 178969 - RNA, 74 nt, Homo sapiens
cgaggcgggcgggccggcgagcgcagcgcgaccgggaggcccagagcccccgaggaaagcacgcacaacgagga

SEQ ID NO: 178970 - RNA, 80 nt, Homo sapiens
ccaaaaacaaaacgaaccaggacggcaagaaccaagagcagcgaagacaccaccaaagacgaacagggacaaagaaccac

SEQ ID NO: 178971 - RNA, 71 nt, Homo sapiens
caaagagacaccgcacccaaggcggggcggagcaccgaggagcagggcgggcccgccaccaccggaggccc

SEQ ID NO: 178972 - RNA, 56 nt, Homo sapiens
gcacagaggcacaacgacgaaagcccagaagcaccgaacagcagccaacaaaacgc

SEQ ID NO: 178973 - RNA, 75 nt, Homo sapiens
gcggaagcggacccaaaccaaggccgaccggcagagggaccagaagcagcagccccagaagccccgaagccgggg

SEQ ID NO: 178974 - RNA, 71 nt, Homo sapiens
acgcccgggggaaacagagaaagaaggcggccaggccaaccgaaggacagcgggaaaggcagcaaaacaac

SEQ ID NO: 178975 - RNA, 67 nt, Homo sapiens
gccacccgacgcagagggcaggccccagccagcacacaaaagagggacaacacaagccacagcgccc

SEQ ID NO: 178976 - RNA, 81 nt, Homo sapiens
acaacaaaaacaaaagccagaaaaccccaaagcaaacgggaacaaagaagcagggacaccaggccgaccagagagagccag

SEQ ID NO: 178977 - RNA, 78 nt, Homo sapiens
ccccggcaagacccaacgccccgacccaaccccaccaaaagccaaaagccgagaacgacgaagacggccaacaaggcc

SEQ ID NO: 178978 - RNA, 74 nt, Homo sapiens
aggaagccgccgggagagggaagacagaccgcgaggccacacccaagaccgagcccaagcccggggaaaccagc

SEQ ID NO: 178979 - RNA, 48 nt, Homo sapiens
ccggcccagccgcgggcagggaaggacacgggacccaggccacgggcc

SEQ ID NO: 178980 - RNA, 75 nt, Homo sapiens
gcagaggcgaggaaaaaaccacgacaaaaccacccacaaaccaggggacagggaaagcagaaccgcgggaaaaga

SEQ ID NO: 178981 - RNA, 67 nt, Homo sapiens
aggcagaccgaccaaacagagccaccagggaaggcacggccagagcaagaggccagggaggggggaa

SEQ ID NO: 178982 - RNA, 80 nt, Homo sapiens
gcgcgccggcgcgcggcgcggacaggcccaaacgcaccccccagggcacaggaggccagcagaagagaaaccggagaaaa

SEQ ID NO: 178983 - RNA, 87 nt, Homo sapiens
gaaaccaacagcggcgccagcaagaaagacagagcaccaggaggaccagcagccagcagcacgagcggagaccaagagagggaagac

SEQ ID NO: 178984 - RNA, 58 nt, Homo sapiens
aaaacaaaggggcaggaaagggaagaaggagaacaaaagccgccagaccacaccgaag

SEQ ID NO: 178985 - RNA, 76 nt, Homo sapiens
ggaaaaccccagcgaccaagggcgaccccacaggacaccgcgcaccagccacacacaacacagcgccgccgccgca

SEQ ID NO: 178986 - RNA, 79 nt, Homo sapiens
agcgagcggagccggcaggaaggggaccgggcggcggagcggcggaagaaggggaccagaagccaggagaggcgccggg

SEQ ID NO: 178987 - RNA, 83 nt, Homo sapiens
ccagcaggccgaccgcccgccacgggcgccggccgagcccgggaaaacgacagcagcagcagggccggaagacgccaccgcaa

SEQ ID NO: 178988 - RNA, 79 nt, Homo sapiens
accccgccagcaaacgcacaagagacgacaccaagaggaaaaaccaggcaaggaagcacaagcgacaagaggagcgggc

SEQ ID NO: 178989 - RNA, 77 nt, Homo sapiens
gcaaagagcagagcaccggaacgggaccccggcaaagacggacaagcgcagggacacaagggcgcaaccaaagcacc

SEQ ID NO: 178990 - RNA, 58 nt, Homo sapiens
cggaccgagagcggaccgagagcgcgaaacgcacgagaaggacacaagaggaagccca

SEQ ID NO: 178991 - RNA, 84 nt, Homo sapiens
cggaaacggaaccgggaggcgacgcacacgagcggaggcgaaggaagggaccacagaccagcacgccggcgccacgaaccgagc

SEQ ID NO: 178992 - RNA, 66 nt, Homo sapiens
ggccaggggaccgggaggggcgaaggcgggcggcagaggcgacaggaagaagacggcacgggaccc

SEQ ID NO: 178993 - RNA, 75 nt, Homo sapiens
cgggccccgcgaagaacgaacaaggcacaggcagcacagccaggccaaaaccccagaggcacagaggcaaagaaa

SEQ ID NO: 178994 - RNA, 73 nt, Homo sapiens
cgaacgacaggacgggggcggccggcccccaggggggagcacagaggcaagagcacgggcggcagccccaggg

SEQ ID NO: 178995 - RNA, 63 nt, Homo sapiens
gccgcagaagacagggcggcgggccggacgacaagagaaggcaaccaaaggcaggacacaaaa

SEQ ID NO: 178996 - RNA, 53 nt, Homo sapiens
gcgccgggacgccgggaccgcgccgaggaagcaggcagaaggagaaacccaaa

SEQ ID NO: 178997 - RNA, 73 nt, Homo sapiens
gacaccacagaccacacgcgcacagggcggaagccgcagaaggaccggccagaagcaagccggagaacagaaa

SEQ ID NO: 178998 - RNA, 73 nt, Homo sapiens
accgcggcggcgccggacccacagcggggccgggccccgaccacccagagaaaggaaaggagccagagaagga

SEQ ID NO: 178999 - RNA, 77 nt, Homo sapiens
caccccaccacgacacgggaggacggagccgaaccgccgccggccgcaaccaggggccagcgcagcaccgcgagacc

SEQ ID NO: 179000 - RNA, 73 nt, Homo sapiens
agagccagccagaaaaaacacagccgacagacgccaccaaaagcaccagccagacaccgcacgaaaaagaaga

SEQ ID NO: 179001 - RNA, 83 nt, Homo sapiens
ccgcgccgaccgcgccaggacagacgcacagacaccgcagcggggacgagagccccggcacaaacggaccaccagaaagcacc

SEQ ID NO: 179002 - RNA, 87 nt, Homo sapiens
cccggaagcgagggcggccgcgccggcccaggacccgcgccgggacccgggcgacagccagagagcacagcggccagcccggagagg

SEQ ID NO: 179003 - RNA, 72 nt, Homo sapiens
aacaagacggggcgccccacagaggggcgacggacagcagaggcacacaaacggaaccgcacaaagcagaca

SEQ ID NO: 179004 - RNA, 76 nt, Homo sapiens
caaggagcccaccggagagcagagagcggaaaacggcgcagccaacaaggggcagaagaagaagagcggagaaccg

SEQ ID NO: 179005 - RNA, 56 nt, Homo sapiens
aggcgagagcggcagcagcaccagcccaagagaaggaagaagagagggcgaaggag

SEQ ID NO: 179006 - RNA, 88 nt, Homo sapiens
accggcagaagcgaagggccagaggaggaggcgcggccagcaaagggcgaccccacgagaggacccagacaggagcgcgggaagaagc

SEQ ID NO: 179007 - RNA, 79 nt, Homo sapiens
gaaagacccaccagaaagccaagaaacccaccggcacaaccgcacgcaagcgacagcgggccagaagagggaacggcaa

SEQ ID NO: 179008 - RNA, 86 nt, Homo sapiens
agcacacgaccggcgacagcagccaggagcagagcgacagcggcgagcagaacacggcgagcgggggccagccccaccccaaccaa

SEQ ID NO: 179009 - RNA, 106 nt, Homo sapiens
cagcccgcgaggccgaggaagaagccccaggggcaacgacccagggcgaagccgacgagcccgaacagacgcaccagcgggaggaagagggacggcccaggagcgc

SEQ ID NO: 179010 - RNA, 68 nt, Homo sapiens
agaccaccgcccaggcgcggaagagaagcagcggcaggaggagacaacggcaagcggagaagagcaag

SEQ ID NO: 179011 - RNA, 56 nt, Homo sapiens
caggcacacagggcagaccaaccaccacacgcccccaccaccaaccacggcaacac

SEQ ID NO: 179012 - RNA, 67 nt, Homo sapiens
acgcccgggaagccggccacaggagaacgccgacagagcagaacccaggaaggaaaagaggccaagc

SEQ ID NO: 179013 - RNA, 81 nt, Homo sapiens
cggaggagcagcccgccccgccgggggagacgacccccgccaggccccccggacagaccacccagcccgacagggaccgcg

SEQ ID NO: 179014 - RNA, 59 nt, Homo sapiens
cggaaagcacaggaaaaaccaaaggaaccagagaggaaagggacgaggaggagacgcag

SEQ ID NO: 179015 - RNA, 81 nt, Homo sapiens
cgggaccggcgacccaaaaggacaagccgcaccgcgcgcccagcggcacacaggacagcgccgcaggaccacccagcccaa

SEQ ID NO: 179016 - RNA, 74 nt, Homo sapiens
cgcccaccccccgaacccagccgcaccggaaggaaaacacccggcagggaaggaaggaacgcaaccgaagacgc

SEQ ID NO: 179017 - RNA, 76 nt, Homo sapiens
gcaagaaacccggcaaaccgacgcgaagacccgagagaggacgaacagcggggacgccccagcagaccgcccagga

SEQ ID NO: 179018 - RNA, 59 nt, Homo sapiens
cagacagcgggacagcgcgagaagagcggagccgcggagcccgggccagaccacaggaa

SEQ ID NO: 179019 - RNA, 77 nt, Homo sapiens
acaccaaaaacagaaggagacagaggggaacaacccccccagcaggccccacccccgacggaacgaccaagccaccg

SEQ ID NO: 179020 - RNA, 38 nt, Homo sapiens
gacggaagacgcgcccgcgccggcaccggcacggacca

SEQ ID NO: 179021 - RNA, 71 nt, Homo sapiens
gaccgcacaggagagcgcaaaaaacgcgggaacagaggcccacgcggaccggcagcgccaccggaccacca

SEQ ID NO: 179022 - RNA, 71 nt, Homo sapiens
gccccgagcagcgggacacaggcccaaccgggcacaggccggccaggaccgcagaaggggccagccaaccg

SEQ ID NO: 179023 - RNA, 76 nt, Homo sapiens
gcgaccggaagcgagcagcagcgccgccagaagcacagagcggcgcgcaagcgcgcaggaacggggacgccagcag

SEQ ID NO: 179024 - RNA, 73 nt, Homo sapiens
caggcacccaaccagaaagagaaaaggaagagccaacggaaaaaagaagaaaagagcaacaaaggcgcaaggg

SEQ ID NO: 179025 - RNA, 78 nt, Homo sapiens
aggaacagggcaaaggagagcacaaccacgcagggaagcccaggggcaggagaggaggcaaaagcacgaacaccggcc

SEQ ID NO: 179026 - RNA, 48 nt, Homo sapiens
gacgaggggacacccgaggacccgaagggcccacacacacgcagggcg

SEQ ID NO: 179027 - RNA, 74 nt, Homo sapiens
ccaccaggcacggcacggggcagagcagagacaccgaggcccggcacgagccgccagcccgccagagcgcccga

SEQ ID NO: 179028 - RNA, 84 nt, Homo sapiens
gccaacgccggcgacaccggccggcgcaggccggcgcggaagaggccggcggcgggacggccccacgggacccgccccgaccac

SEQ ID NO: 179029 - RNA, 52 nt, Homo sapiens
cacaccaagccaagaaggacggcggcacagccagggaccagacacagagggg

SEQ ID NO: 179030 - RNA, 54 nt, Homo sapiens
gaaaaaaaaaagacacgcagacggagggcggggcagagcaggggccggaagcac

SEQ ID NO: 179031 - RNA, 87 nt, Homo sapiens
cgcaccgggccacccggggccggcgcggaggcagcgggcacggcaggcaggcaagaaaagcagccccaaagaaagacacaggaggag

SEQ ID NO: 179032 - RNA, 86 nt, Homo sapiens
ccgccgccccgaaaccaccgcgagcggagagaagaagaaggaggccgcggccagaaacccaagaaaaagcgaaggaacgcagagcg

SEQ ID NO: 179033 - RNA, 50 nt, Homo sapiens
caaacaggaagcgaggagacccacaaagcaggaagggacaacaaacgagg

SEQ ID NO: 179034 - RNA, 71 nt, Homo sapiens
aagaaggcgagaggaaccagcaaaaaagagaggcaaagagcaagcacaggagaagcagggggcgacagcac

SEQ ID NO: 179035 - RNA, 76 nt, Homo sapiens
gaacgggaccaccccgcgccccgccagcaccggccccaccacaggaggcagccaccagcaggaggaaaaccaacgc

SEQ ID NO: 179036 - RNA, 83 nt, Homo sapiens
ccgcgcgccgcgcacccgcgccagcaccacgcccgcgccgcgccgccgccaccagcccaagagaaaggacccacccaggaggc

SEQ ID NO: 179037 - RNA, 81 nt, Homo sapiens
cccccaaccaccagcggcacaggagaaagaaggggcaagaggaagaagcagaagcagagagaggagcgaagaagaagaagc

SEQ ID NO: 179038 - RNA, 70 nt, Homo sapiens
cggcagccacaggaggcgcggaggacgccccaccgccgacgcccccagccaccagcgaagccgcccgcag

SEQ ID NO: 179039 - RNA, 68 nt, Homo sapiens
agaaagacccgccaaaaccggcgcacagagaagaaggggggggggacaaagaccagagagcaccaggg

SEQ ID NO: 179040 - RNA, 57 nt, Homo sapiens
cggaagaggggaacccagggcgagagggggaggagccccagccccgcgacgaggagg

SEQ ID NO: 179041 - RNA, 109 nt, Homo sapiens
agcggagcaggaccgaggccaccccagcgccacagaaaaggggcggaacgccggaagccagacaaccacggcccaccagcggccagcagcagccgagagccccagggga

SEQ ID NO: 179042 - RNA, 37 nt, Homo sapiens
aacggagagacggggagaagaacgaaacggaggaccc

SEQ ID NO: 179043 - RNA, 75 nt, Homo sapiens
aacccaccggcacccgcaagaagcaccagcaagggccccagggcaccccgcggggcgcggggggccaccaacacc

SEQ ID NO: 179044 - RNA, 83 nt, Homo sapiens
aagaaggggaagaaaagaaggggaagaagacaaaacccaccagccccagggagccagagcagcgcacaccaggccccaggcag

SEQ ID NO: 179045 - RNA, 68 nt, Homo sapiens
aggggcgccaaaaaggaaaaccgccaaggaccgaccccaaacgcgaagaccaacacgcacgaagggaa

SEQ ID NO: 179046 - RNA, 71 nt, Homo sapiens
aagcagccagaccaagaacaaccgcggacacggagaggaagggcgagggaaaaagcgggaggaggcgggcc

SEQ ID NO: 179047 - RNA, 77 nt, Homo sapiens
cgaagggcccggggcaaagcacagacaggagaaagaagacagccacagaaagggagacaacagccacacaaagcagc

SEQ ID NO: 179048 - RNA, 73 nt, Homo sapiens
ggaacaaaacagaagaaagcagaaaaacaaaaggagcagcagaagccgaccagagacagggcgccggggccag

SEQ ID NO: 179049 - RNA, 43 nt, Homo sapiens
gccaaggcacggaggccgcggggcgggccccggccagggccca

SEQ ID NO: 179050 - RNA, 69 nt, Homo sapiens
cgccccacgaccagaaacgcgaagacgacgagcgcaccaagaggaacacaggcgaccgccaaaccaaac

SEQ ID NO: 179051 - RNA, 59 nt, Homo sapiens
accacggcaccgccccagggaaccaaaacaggcccgacacgcgacaggacccggacagg

SEQ ID NO: 179052 - RNA, 69 nt, Homo sapiens
gcggcagcccagcccggcccggcagcgacaggaagacacagccagcggcccaccccaccagcaggccaa

SEQ ID NO: 179053 - RNA, 82 nt, Homo sapiens
aggaaaaagccaagagagaccggagaacgcgacaggccgaacaagaaggaacacagaggggcgacagcccagacccgaacca

SEQ ID NO: 179054 - RNA, 62 nt, Homo sapiens
ggggcagacaacggagcccgggggagaagagccaaggagaccaaacccagcagcaccgcagc

SEQ ID NO: 179055 - RNA, 56 nt, Homo sapiens
ccgccgcaggagcgcggcgaggccccgccgccagcagaaagcagaaagggaccgcc

SEQ ID NO: 179056 - RNA, 68 nt, Homo sapiens
aacggaaccagcgccgagagcccaaaaggcagagcgaggagagaagaaggagggaaagccaaacaacg

SEQ ID NO: 179057 - RNA, 77 nt, Homo sapiens
aggagccagcgcaggaggcaggaggcggaggcggccgcggccgggggggcccagcacgcaaggaagcgacacaaacc

SEQ ID NO: 179058 - RNA, 81 nt, Homo sapiens
ccaacgcgcggcggcggggagacgcaggcgccagagcccagaccccacagccagccgagggcgagaagcacagaaacccgc

SEQ ID NO: 179059 - RNA, 75 nt, Homo sapiens
agaaacagcccagagaaccgcccggaccacaaaaaccaggagaaggcgacacacgaagagaagagcccggaaaag

SEQ ID NO: 179060 - RNA, 81 nt, Homo sapiens
aacccagaggggccaaaagcgccaaagcgacaggagcgcagaagccaagaccggcccgaggcggccgccacacacgggaca

SEQ ID NO: 179061 - RNA, 81 nt, Homo sapiens
agcaccgggccggcggacaggagggcgcgggcggcaccccaccgcccagccacagccccccccacaggagcaccggccgaa

SEQ ID NO: 179062 - RNA, 74 nt, Homo sapiens
aaaaaacgcggagccaaagcaaggaggcgcagaggggaggcggcaagggacagccagacaagaccccaacgaag

SEQ ID NO: 179063 - RNA, 73 nt, Homo sapiens
cgggaaaagaacccgccaaaacacagcgaggagacagaggaaacgaaaagagacagcagggcaaaacgggcca

SEQ ID NO: 179064 - RNA, 74 nt, Homo sapiens
aagccagaaccccaaggaaagagaacgaacgaaggacgggggaggggggcaacccaaagaagaaacagaacccc

SEQ ID NO: 179065 - RNA, 73 nt, Homo sapiens
cgcacagccacgcacacagcaccaggacaaaagaagggcagcacaaaggaaagccccaaaccccggaacggga

SEQ ID NO: 179066 - RNA, 80 nt, Homo sapiens
aaccaacgccaaacgcacgagaaccccaccagcaggaggggagagccaagcggcggagcccggcacgggcaaacagagca

SEQ ID NO: 179067 - RNA, 81 nt, Homo sapiens
cccgggcaagaaggaaaagaaaggaagccgcacgagaaaagacggagccaggcaaagcaaggcagaagacaacaggagcga

SEQ ID NO: 179068 - RNA, 54 nt, Homo sapiens
ggcgaaagcagaggcacgcacagcccagcaaaaggggcagaagaccgacacgac

SEQ ID NO: 179069 - RNA, 80 nt, Homo sapiens
cgggcggccggcccgaggagggcggcggcgcgacccggggaaccggcaggccagcagaagaggaccagacgcccgggggg

SEQ ID NO: 179070 - RNA, 74 nt, Homo sapiens
accagaagaaaccagaacagagagcggaggacagggaagcagcacccaaaacaggagaagagacagaagagggc

SEQ ID NO: 179071 - RNA, 68 nt, Homo sapiens
agaagaagcacaagcccggcgacgcggcggaacaacacacagaagccagccgcccgaaaaggggaaga

SEQ ID NO: 179072 - RNA, 82 nt, Homo sapiens
cccggcggcccgggccggcgcagccgccccacgcccgccgccgcgccgggcccgggccgggaccaaggccgacgaaaccggc

SEQ ID NO: 179073 - RNA, 71 nt, Homo sapiens
acaagggaaaggaaaggacccccccagggcgcagcaacggcacacagaggggagaccagacagaggacacc

SEQ ID NO: 179074 - RNA, 76 nt, Homo sapiens
cacgcgaggcccggcccacaacagcagcaaacgaaaccaggccaaacaaggaggcggacaccagcagacggaggca

SEQ ID NO: 179075 - RNA, 76 nt, Homo sapiens
cgcggcacagagagggccgggagcgcgcagccaggcgccagccggaagcccgagggcagcgcccacggccgcgacc

SEQ ID NO: 179076 - RNA, 79 nt, Homo sapiens
gaaaccggcccgggcgggggccgccagaccaggcgcggagaaggacgaagaggaagccgggcggagcacgccccggccc

SEQ ID NO: 179077 - RNA, 78 nt, Homo sapiens
agagcggaacgccagccccggcacgcacccgacccaaagcagacaagcagaccggaagaccgacggaagaccacaccc

SEQ ID NO: 179078 - RNA, 49 nt, Homo sapiens
aaccagccccaggacaggggaaaagaaggacggcgccagagaaggaaca

SEQ ID NO: 179079 - RNA, 81 nt, Homo sapiens
ccaggagacacaaacagaaaaggaagaaagggacaaagagaggagcaggacaggcgacacaacagggaagaccgggagacc

SEQ ID NO: 179080 - RNA, 68 nt, Homo sapiens
aaagaaaccaacgaaagccccaagaagacgcaaggccaagccaagaagaagaagcaaaaaaacgaaaa

SEQ ID NO: 179081 - RNA, 60 nt, Homo sapiens
gcagccaccacgccgcagaggccagacgcagcaaagcggaggaacggaagccacagacaa

SEQ ID NO: 179082 - RNA, 76 nt, Homo sapiens
aaaacgggcagggcagccacaaagaggagcacgagaaggacccagaaagagacagaagaagaggaagccaagggga

SEQ ID NO: 179083 - RNA, 74 nt, Homo sapiens
cagccagcgcaagaggcgggcagcacgcgaccgccagcacaacagaaaggaacccgagaacagagaaacgcgag

SEQ ID NO: 179084 - RNA, 90 nt, Homo sapiens
ggcgcgacagcgagagccgagcgggcggcgcgggcaggccacgggaagccacacgcccaaggagagaccggaagaagggaaggaaggacc

SEQ ID NO: 179085 - RNA, 66 nt, Homo sapiens
cccaggacgagaacagcaacaggaacaggacaagcgaaccggagcccaaaacagcaagcggaccag

SEQ ID NO: 179086 - RNA, 88 nt, Homo sapiens
gaccaacgcacggagccgccaaggccacgagcagccagaccccagaccccggccagccacgaggacccaagacgccggagaggacgga

SEQ ID NO: 179087 - RNA, 67 nt, Homo sapiens
aagagccgccaacgggaggacacggcgcagcaacaaacagcggcgacaaaccgagacagcacagcca

SEQ ID NO: 179088 - RNA, 75 nt, Homo sapiens
agaagccagcccccaggcggaacgcccgccccgcagagagcaaaccagaagagacgggcaaaacgccgaaacacg

SEQ ID NO: 179089 - RNA, 77 nt, Homo sapiens
cagagaaagaacccaaacacacagaaaaaccccaaaaaggcacaccggacaagcaaaaggaagcccccgcacaggca

SEQ ID NO: 179090 - RNA, 78 nt, Homo sapiens
ggggagcggcaggcgagaccgcgcgcgaggagaggagcgcaacagcagcaccagggaccaagaaaacggggaaaaaca

SEQ ID NO: 179091 - RNA, 80 nt, Homo sapiens
gcgcaaagcgggagagacggaccagaccagggccgagcacaggcccccccagccacgccgcgcccagccagcccaaaacg

SEQ ID NO: 179092 - RNA, 81 nt, Homo sapiens
cagaaagaagccacccagagagaaccaggaggaggcaaaacagacagaacgcagaaagcaggcaccgacagaccaagggag

SEQ ID NO: 179093 - RNA, 77 nt, Homo sapiens
ccgggcaccagcagccacggaccccaacgaagcagaaagaacaacacaagcgggaggcaaaacaaaagaagcgaagc

SEQ ID NO: 179094 - RNA, 73 nt, Homo sapiens
cacagacccccaccaagcagggaccaaaagacacagcagggacgaaggagaaacagaggcgcaccgggacgga

SEQ ID NO: 179095 - RNA, 70 nt, Homo sapiens
gggccagcggagccgggacggagaaacgcgaagacgacgagcgcaccaagaggaacacaggcgaccgcca

SEQ ID NO: 179096 - RNA, 64 nt, Homo sapiens
agaaaccaagacggcagagacccccccacccacggaagaggaaggaacaaaaggcccggacccc

SEQ ID NO: 179097 - RNA, 74 nt, Homo sapiens
ccaccgagacaccaagggcggggcgaggaagagacccacaggaccgcgaacaaggaggccacaaaacacccgga

SEQ ID NO: 179098 - RNA, 69 nt, Homo sapiens
cacggaggacccaaagacgccggccccacggaaccacgccacaagaaagggccaggcgcagcgccacgg

SEQ ID NO: 179099 - RNA, 79 nt, Homo sapiens
ggagcgccccggcccggacggagccggcggcgcggccggcagccggcagcgcagcggggcggagaacggaaaagcacca

SEQ ID NO: 179100 - RNA, 66 nt, Homo sapiens
acgcggagacaagaggaccagccagcaagaccgagcgacagaagaagggcaccaaaaagcaacacc

SEQ ID NO: 179101 - RNA, 73 nt, Homo sapiens
cacgcgggaagagcaagaggaaaaaagccgaaagggcggagaaaagaaaggggagaaaacgcaggccacaaag

SEQ ID NO: 179102 - RNA, 78 nt, Homo sapiens
cccagggaagaagaaacccaagcccacccggggcccccacgacccgccccagcccccagccccaccacccacgagcca

SEQ ID NO: 179103 - RNA, 58 nt, Homo sapiens
cggaacaggacagaaaggccagcagcggagagccaaacaagaacgaaaccagaacaga

SEQ ID NO: 179104 - RNA, 86 nt, Homo sapiens
cggagcagagaagcgaaagacaaggcaaacggggaccccaggagagcgccggcagcaaaaagcaaaacaagcacgacagggaagac

SEQ ID NO: 179105 - RNA, 77 nt, Homo sapiens
aaacagacgggggaaaaaaaggagcgcccgagcgaccaaagaccgggaaaagggacccccaaaagacaagggcaaaa

SEQ ID NO: 179106 - RNA, 64 nt, Homo sapiens
gagccacacaggaccaacaaagcaaaaaagaccaaccagcaagggagaagcacccaacaaaggg

SEQ ID NO: 179107 - RNA, 56 nt, Homo sapiens
gcagacgggacacagcacaccggagagacgagggcacacggaagacaaagggcaaa

SEQ ID NO: 179108 - RNA, 72 nt, Homo sapiens
cccgcagccccgccagccacccccagaaccagcggaacagccggcagcccggagggccgccggcgcccgccc

SEQ ID NO: 179109 - RNA, 101 nt, Homo sapiens
aggaacagacggaccgccacgaccagcagcaggaggaccggagagcagggcgaagacccggagcagggcaggacagcccacaccacccacggcgcggcagc

SEQ ID NO: 179110 - RNA, 65 nt, Homo sapiens
gaccgcggagagaagcagcggacagcagagaaacggcgaggaaagagaggagccccggaaagaaa

SEQ ID NO: 179111 - RNA, 69 nt, Homo sapiens
cgggaccgggccaacagagaccgcaagcggacacaaaaccaagaccaggagggagagaagaaagagagg

SEQ ID NO: 179112 - RNA, 78 nt, Homo sapiens
ccagaggacaacgaaggcggggagagaccacaacacaggaccgccagacaggcccgagaaagggaaccaaaggcggcc

SEQ ID NO: 179113 - RNA, 70 nt, Homo sapiens
aaaagaaacagagaaaaccaagggccagcaggagggggcccagaaaagagggcccacgaaacgaaacacg

SEQ ID NO: 179114 - RNA, 99 nt, Homo sapiens
agcggacagcggggggcggccgccggcagagaggagagagaggccccggcccggcccccgggaaccggccagagggaaaggaacccggcagagagggcc

SEQ ID NO: 179115 - RNA, 38 nt, Homo sapiens
aggacaggcacaaagccaaagagaaacgagcaccagga

SEQ ID NO: 179116 - RNA, 35 nt, Homo sapiens
gagcacaccgaggaggcaaggacccacaaagcagg

SEQ ID NO: 179117 - RNA, 75 nt, Homo sapiens
ccaagcggccgggcccggcagccccgacgcagccgggaaggacagggccaaagcggcaggagaaggaagggaccg

SEQ ID NO: 179118 - RNA, 86 nt, Homo sapiens
agaagccggcccggggccgcggacgaggaccagcagaggccagcacgagaacccaggccagacgcgaggagacccacaagaccggc

SEQ ID NO: 179119 - RNA, 77 nt, Homo sapiens
aggaccaagaaccagcgacaaagacagacggaaaagaagagaaccgaggcccggccacagagcccgcaggacaccga

SEQ ID NO: 179120 - RNA, 73 nt, Homo sapiens
aagagggagccaggccagaaaacgggaaaccagagagcagagggccagaagccaaggcagaagaagcaaaagg

SEQ ID NO: 179121 - RNA, 73 nt, Homo sapiens
gaacggcgaccaaccacaccggaaacacagaggaagaccaacacgcacgaagggaacacacggaagcaaccag

SEQ ID NO: 179122 - RNA, 81 nt, Homo sapiens
ggagagcagcggcggcggccccggccggggccagcggcccggacgcccaggaccgggggccgggcgaggaggccgggagaa

SEQ ID NO: 179123 - RNA, 79 nt, Homo sapiens
cgcacccaacgcagaggaaaggaaagcaacggcaaccgaaagggcaagccacaagaagagccaagggggaagagccacc

SEQ ID NO: 179124 - RNA, 62 nt, Homo sapiens
agcgggcccggacgggacaagccacacacagacacgagagagaaggagcgcgagcagaaccg

SEQ ID NO: 179125 - RNA, 78 nt, Homo sapiens
cccacccgcaccacccgaagccccacgcgggacgccacacgaaggccaccacaaaagcaggaaaagcaacggcgcaag

SEQ ID NO: 179126 - RNA, 83 nt, Homo sapiens
ggcccggaagcgacggcgccaagacccacacagaagcggcggagggagaaaaaaacacgcgcgccgagccagaggagacccca

SEQ ID NO: 179127 - RNA, 78 nt, Homo sapiens
gacaccgcacccagaaacagggggaagcgggccagggagggaaaacccaggccggggagccccaggcgcagaacccca

SEQ ID NO: 179128 - RNA, 71 nt, Homo sapiens
ccagccccaccacggccaaaacacaaacaagaccgcagggaaagggagcagcaccggccacacccacagca

SEQ ID NO: 179129 - RNA, 64 nt, Homo sapiens
aaaggccaggcccaagagagaccacagcagacacagagacgggcggacacaggccgacaggacc

SEQ ID NO: 179130 - RNA, 80 nt, Homo sapiens
agaggccggggaaagccggcgccacgcagagccccgccaggaagacacgccggggaacgaagcagaagacggaggggggc

SEQ ID NO: 179131 - RNA, 75 nt, Homo sapiens
gcccgggccagcggccgcgcacccccggccggaggcaccagcgggccggccgcgcgaagacgcggaccacggcca

SEQ ID NO: 179132 - RNA, 74 nt, Homo sapiens
ccaggggaccagagaggacggcaccagccaggagccaagaggcgaaaacagcgaaaggaaacagacagaaaaac

SEQ ID NO: 179133 - RNA, 79 nt, Homo sapiens
ggcccccgcgcgcacgccccgacgcaagacgcccggcccggagagaagaagaaggaggccgcggccagaaacccaagaa

SEQ ID NO: 179134 - RNA, 76 nt, Homo sapiens
agcacagagcacaccaagggagacaacaacaagccgaagaggcgaggagccagcacaggggaacacagcaacggag

SEQ ID NO: 179135 - RNA, 73 nt, Homo sapiens
ggggcgcgggggacgggagcggcagccccggaggcgggagacccaagggccagggaaacgggaccggagcccc

SEQ ID NO: 179136 - RNA, 64 nt, Homo sapiens
ggccaggcgacgggaagcgaccgcaggcgggcccccgaccggaggcaaaccggccgaagaccgc

SEQ ID NO: 179137 - RNA, 84 nt, Homo sapiens
gagcgagcgagggggggcgcgccggaaaccggagcgcgcagcaggcggccggcgcggggcgcaggcggcgcggccagggccgca

SEQ ID NO: 179138 - RNA, 77 nt, Homo sapiens
gccggaggcaaggggccagaggacagaggacaggccggccggcccagccacccaaaagcggacaagagccgcgccca

SEQ ID NO: 179139 - RNA, 75 nt, Homo sapiens
gcggagaacacaggggcaaaacaaaaccccagaaggaaaaccgagccaaagcagagcaaaccaaacccagccacc

SEQ ID NO: 179140 - RNA, 59 nt, Homo sapiens
ggcaaggcacaaagcccgacagggcaacacccgacaaaggggacaagggacagaccagg

SEQ ID NO: 179141 - RNA, 72 nt, Homo sapiens
ggcaacaaggcggacaagagaagccgccagagacggaacagagaagcaacccaacagacaggcaaaagaaac

SEQ ID NO: 179142 - RNA, 86 nt, Homo sapiens
ccaagacggacccaagccgggggacgaccgggacagcaccggcgcaccagggcgcggagcccgccggccgccagggagcgcagcgg

SEQ ID NO: 179143 - RNA, 107 nt, Homo sapiens
caacagaaggagagcgaaagcaaagaagcacaacagaaaagcagcaggccacagagaaagacggcacgacaccgccggacggaaagagcagacacggagaggaaaag

SEQ ID NO: 179144 - RNA, 60 nt, Homo sapiens
caggcaacagccccggggcagcaagcacggagggacagaaaacgggccccagacacaagc

SEQ ID NO: 179145 - RNA, 82 nt, Homo sapiens
gaggggaggcaggcgcggcagacggcgacagggcggcggcgccaggcagggcgcagccggccagcggggaagcgcaggagcg

SEQ ID NO: 179146 - RNA, 82 nt, Homo sapiens
gagcggcgacgcggccgagcagcccacgcaaggaagccggcccccacggccacccgagaaaacccacagcccgagggagccc

SEQ ID NO: 179147 - RNA, 49 nt, Homo sapiens
ggaaaaacggagagccacaaaaaaggaagcgaaacgaggcagaagcacg

SEQ ID NO: 179148 - RNA, 33 nt, Homo sapiens
gcccgaccccgccccagggaagacccgcggaag

SEQ ID NO: 179149 - RNA, 57 nt, Homo sapiens
agccccgaggagcgggaacagacaaaaaccggcccagacggaaggaacaacacagga

SEQ ID NO: 179150 - RNA, 81 nt, Homo sapiens
cacgcccgccaacccaagcggggaggccaggaacaagcacacagagacggggacggcaacaacaacaagaaacgggccagg

SEQ ID NO: 179151 - RNA, 68 nt, Homo sapiens
cccaaagcaccaccgcgccggagcgcaccaggacaaaccggcgaccacacacggggacgacggggaag

SEQ ID NO: 179152 - RNA, 112 nt, Homo sapiens
cccagcgaggcgccccagagcccagggcaggacaccgacaggaacagggaccacggggacaggggcaaggccgaggggaacagcacacagagaggaggcggaagcacgccag

SEQ ID NO: 179153 - RNA, 70 nt, Homo sapiens
gacagggggccaaggggagaagaaaaccggaggaaggcgccagaaaaaaaaacacggaaaaaaccaagag

SEQ ID NO: 179154 - RNA, 80 nt, Homo sapiens
agcaagagcgcaagcagaccggacaaggaacaccacacgggggccacagaccggacaccgcacagggaggccaggagaag

SEQ ID NO: 179155 - RNA, 76 nt, Homo sapiens
gcgaaaagcccccagcacaacgaaccgcccagaggagccggacccaagccagaagcccgcaaagcccccagaccgc

SEQ ID NO: 179156 - RNA, 80 nt, Homo sapiens
caccaccaccgcccagccggcccgcacaacccccccgggcccacgccaggacggcggacgaacccaaccccagagacaga

SEQ ID NO: 179157 - RNA, 80 nt, Homo sapiens
caggcgcaggaagggggcagcgcgggcgcgcggccggccggagccagcagcagggcccggggacacgagcggccccagcg

SEQ ID NO: 179158 - RNA, 73 nt, Homo sapiens
gagaaccggagagcacccaacaggaaccagaaaagacaggaaaagcaggaaagaagggggaagagaacgcgga

SEQ ID NO: 179159 - RNA, 79 nt, Homo sapiens
gagcccacccacacccaagaacgccaagcgccaaaggcaaaaagggacagagcgggagccaccagcgccaaagggaagc

SEQ ID NO: 179160 - RNA, 82 nt, Homo sapiens
aggaccccagaacacagggacaggacaaggccaccggcgccagagcaagcccgccccgagccaaaggaagaaaagcgagccg

SEQ ID NO: 179161 - RNA, 81 nt, Homo sapiens
ggaaggcacagaacgaagccgcagaagccaaacaagcaggggagcgagcacaaacgacacacgcaaaccacaaagcccagc

SEQ ID NO: 179162 - RNA, 72 nt, Homo sapiens
gagaagagaaacccccaggaagccacggcccacaaagaaacacggccaagggacgaccgccgccgaaggggg

SEQ ID NO: 179163 - RNA, 93 nt, Homo sapiens
aaaaacgaaagaacacacacaggaagcccaggaggcaaaagcaaggacaaggaaggcaggaaacaagccaacaacgaagcacagaaggaacca

SEQ ID NO: 179164 - RNA, 67 nt, Homo sapiens
cgccgcgcgccagcccaggaaaggcgccgaagaggaggcaagcgccaggaccgcggggggcgagccg

SEQ ID NO: 179165 - RNA, 55 nt, Homo sapiens
ggcccaagaagacaggcaaggagggggcggaggcacagggaacaccagaggcggg

SEQ ID NO: 179166 - RNA, 38 nt, Homo sapiens
gacgagacgagaggaagagggaacacaggccgagacaa

SEQ ID NO: 179167 - RNA, 63 nt, Homo sapiens
cggcggccgacgggacaacaccgccagaagcaccaggacagccacaagggcccaccaggcgcg

SEQ ID NO: 179168 - RNA, 67 nt, Homo sapiens
ggccgcccaccggggcccgcccagcggcgggaccagcagagcaaaagaacgccacgcagccacacgg

SEQ ID NO: 179169 - RNA, 76 nt, Homo sapiens
cccaccagggaagcaccacagccaccacaccaagacaccaggggagaccaccgaagaagaagcaggagacacacca

SEQ ID NO: 179170 - RNA, 38 nt, Homo sapiens
ccgagacagcgcgacaaaaacaaacaggggaaggacac

SEQ ID NO: 179171 - RNA, 76 nt, Homo sapiens
gccgcccccaccggacgaggccccccaaccaggcaagccggcgcggaagaggccggcggcgggacggccccacggg

SEQ ID NO: 179172 - RNA, 72 nt, Homo sapiens
gcgcgggaagcaaggcaaagcgacagaccccaagagaacagaccaaacagagcagaacgaaacagcacaggg

SEQ ID NO: 179173 - RNA, 78 nt, Homo sapiens
agacaccaggggagaccgaaaaggagagagcaagacacgacaaacagcggcgaaaagcagaaaaaaagaagagaacaa

SEQ ID NO: 179174 - RNA, 75 nt, Homo sapiens
cccgccccagccgccggccccccgaaagcgcacccacaaagggcaccgaaggcaacaagaagagaagaaggacca

SEQ ID NO: 179175 - RNA, 74 nt, Homo sapiens
caaggaccaacggaacagacccggcgggggcaaggaagcacggaggcccgggaacaaggacaacgccacaccag

SEQ ID NO: 179176 - RNA, 82 nt, Homo sapiens
aagaggaagcgcgggagaagcggcgcccaccggcgggcaacacccgccgcagagcggaaaagccagggcggaaaccggcaag

SEQ ID NO: 179177 - RNA, 70 nt, Homo sapiens
ggggcccggaccgcgccccccacccgcccggcagaagcacgcgaaaagcgcgggggcccagccgcgccgg

SEQ ID NO: 179178 - RNA, 79 nt, Homo sapiens
gcggcgcggcccgggggcaggggaggagacgagcaaaagagccaacacccaggccaggccgcccggaaggaggccgcca

SEQ ID NO: 179179 - RNA, 75 nt, Homo sapiens
cgccggcccagcaccccgagaaccgcaggagccagagggcaccaagaggcccagcccggccagcaggcagcacac

SEQ ID NO: 179180 - RNA, 69 nt, Homo sapiens
cccggccaggaaacgcaccacaggcgcccccccaaagagaggcgcgagaggcacaggacaagggagaaa

SEQ ID NO: 179181 - RNA, 54 nt, Homo sapiens
aaggcaggcaccacaaaaaggacaggaaaaagaccagaaggccacccccacaca

SEQ ID NO: 179182 - RNA, 81 nt, Homo sapiens
cgagagcgccgccgccccgcgccgccgagccagcgccagaggggggcgggccgagcacccgcaggccccgcagaggcgccc

SEQ ID NO: 179183 - RNA, 52 nt, Homo sapiens
gcggggccacccagaacaaaaagggccagggcaagaccaagagcagccaaca

SEQ ID NO: 179184 - RNA, 35 nt, Homo sapiens
cacaagcaacaggcagaagcacacaaggaagacag

SEQ ID NO: 179185 - RNA, 94 nt, Homo sapiens
gcgggaagccgaaggcagccacagcccgaccccgaggaaccagcgacagaccgggcacccagcgaaaaccgcaggcccagcaccagcaagaccc

SEQ ID NO: 179186 - RNA, 108 nt, Homo sapiens
cccgcccggagcccagccccacgcaaacccggacccggagacgcgggaaggagagggcgacccgggagaagaacaggacacagcggccagacacgggcccgcgcgggg

SEQ ID NO: 179187 - RNA, 64 nt, Homo sapiens
acaacccaggaaggaaaccaaggggcagacccaaaaaacggggagccgccaccaaaagcagacg

SEQ ID NO: 179188 - RNA, 67 nt, Homo sapiens
ggaagaaaagaagacagccagcggggccaaagccgcggacaggcgggcacagcgaaggaggagcccg

SEQ ID NO: 179189 - RNA, 74 nt, Homo sapiens
gaagaccccggagccccagccagggaaccacggagcacgagaaaacggcgggccagcagcgcagcgcccgcagc

SEQ ID NO: 179190 - RNA, 76 nt, Homo sapiens
aaggccgcccgggaacgcgacgcgagagaaggacccacggcgcgcgaagagcagcggagcccaccaaaaaacacgg

SEQ ID NO: 179191 - RNA, 83 nt, Homo sapiens
gaggacccagcacaccgaggacaaagggagccaaaggaaaaaagaccccagacccgcagaaaaccacagcagcagaggaggag

SEQ ID NO: 179192 - RNA, 70 nt, Homo sapiens
cgaggacggaagccacacccagccaacgagggaaggaagccggccggccagccgacccagccaggcccag

SEQ ID NO: 179193 - RNA, 72 nt, Homo sapiens
gaaggaacgcagaaacacaggaccccccccaacgagcaggggccagcgcggagagacgggccagaacagaaa

SEQ ID NO: 179194 - RNA, 60 nt, Homo sapiens
cagagcagggaacacagcaccgacaaccggacggggaaacaacaacacggagccgagggc

SEQ ID NO: 179195 - RNA, 74 nt, Homo sapiens
ggcagcagcaagaggaaaagggggaagaaaggagacgggggggcggagaacggaaaagcaccaggaagcagaga

SEQ ID NO: 179196 - RNA, 73 nt, Homo sapiens
cagaagcaaccaacgagacaagagggcacaaggcagacggagagaaacacacggccggggggcacgagcaggg

SEQ ID NO: 179197 - RNA, 75 nt, Homo sapiens
gcaggccggaggcccccgccggcggagaacagcggggcgcggcaccgagggccaggccaaggacgggcggccaag

SEQ ID NO: 179198 - RNA, 65 nt, Homo sapiens
accaagaaccagagaacccaggaaaaggacccagcgaaaaccgcccacccgagagggcaacgaag

SEQ ID NO: 179199 - RNA, 86 nt, Homo sapiens
aggacgggaccaggcgaagcggccgagcaggcgagcgaacgacgccacgaggcggccccagcgcgggcgacaggccgacaccccca

SEQ ID NO: 179200 - RNA, 57 nt, Homo sapiens
cggagagccacaaaaaaggaagcgaaaacgcaaggcggcggacacaagcaagagaag

SEQ ID NO: 179201 - RNA, 66 nt, Homo sapiens
ccccggggaggcgacacacgcgccagggagaaagacacgcacgccagagagagaacgccgggggaa

SEQ ID NO: 179202 - RNA, 78 nt, Homo sapiens
gacaaccgcagccacagcgcccaccgagccaccaaggagcagcccgggccaggaccgaggcggaagacagaacagaag

SEQ ID NO: 179203 - RNA, 86 nt, Homo sapiens
aacaggacgaggcggcgcgggccgaggccgggacagcaccgcagcagagcgaaagcacacgcggagccacaacacagcagccccca

SEQ ID NO: 179204 - RNA, 75 nt, Homo sapiens
cccgcacaccagcccccaagcccccaggcacccaggagacaagcaagccagcagacgggaaagggccagcgcaag

SEQ ID NO: 179205 - RNA, 83 nt, Homo sapiens
ccggagcgggaggacagccgccagagcgcccacagcgcggcaccgaccccggggggcgcggggggcccagaccaagacagggg

SEQ ID NO: 179206 - RNA, 77 nt, Homo sapiens
agccgccgaggagccacagccagcccagcccgccccggcgccccaaccccggcagccccagggacaagagaaaaaaa

SEQ ID NO: 179207 - RNA, 87 nt, Homo sapiens
gggaccaggcccgggggcggcggccacgccaaggacggagaaaggacagggacaggaaagaaagaaaaagaaaagaaaaacagaaag

SEQ ID NO: 179208 - RNA, 51 nt, Homo sapiens
cggccggaaaaacgaacagacgcacaccacaggccccaaagccggggaaga

SEQ ID NO: 179209 - RNA, 86 nt, Homo sapiens
gaccaggcgaagcggccgagcaggcgagcgaacgacgagcccaaaaggcagagcgaggagagaagaaggagggaaagccaaacaac

SEQ ID NO: 179210 - RNA, 74 nt, Homo sapiens
gagggagggccgagccagccgcggccggaggagcccccaggcccgaggggcccggccgcggggcacagcagagg

SEQ ID NO: 179211 - RNA, 44 nt, Homo sapiens
caggacccaaaaggcgcaggaacgagccaacgggacgcaaagcc

SEQ ID NO: 179212 - RNA, 75 nt, Homo sapiens
gacgccaggacacacggcacaaggacaaacccgaggcgagaaccaagacaacaggcgaagaagggaaacgaggaa

SEQ ID NO: 179213 - RNA, 60 nt, Homo sapiens
gaagcggaacagccacagcagcccccaaggagcgcaaggggaaccgagagacacaggggc

SEQ ID NO: 179214 - RNA, 82 nt, Homo sapiens
cgggcggcagaaaccgcggagaagaggcgccacgccggcagaagcaggaccgagacaggggcccggcaccgcgcccgagccc

SEQ ID NO: 179215 - RNA, 63 nt, Homo sapiens
gagagccgccccgaacgggggcccccccgccggacaggacagcccagagcaagcacacggagg

SEQ ID NO: 179216 - RNA, 62 nt, Homo sapiens
gggagcgagcgggagggagccgcgcgccggcgcgcgccgaggaggcacggacaaaacgcagg

SEQ ID NO: 179217 - RNA, 80 nt, Homo sapiens
gacgaagggaggggaagggccccagcccaaccagagcgaccaggcagagacaagagaagaggagacaggcagcagaagcc

SEQ ID NO: 179218 - RNA, 77 nt, Homo sapiens
ggccaccggcgggcccgaggagagcgcggagccgcgcccccggaccccgagagaaacggcgagaaaaccaaacagga

SEQ ID NO: 179219 - RNA, 78 nt, Homo sapiens
aaagccgaacaggcagggccagacccaggccccgggggcgccgagggcacaagggcaacgacagaagggcgaagccaa

SEQ ID NO: 179220 - RNA, 65 nt, Homo sapiens
aagaggcgacgccggcggaaacggagacacagcagacgggaccagagcaacaaaccgggaagaca

SEQ ID NO: 179221 - RNA, 64 nt, Homo sapiens
cgccccgaagcagcgcacccagggacagcaccaaggacggagggaggggcaggaagaacacgcg

SEQ ID NO: 179222 - RNA, 81 nt, Homo sapiens
aacccagcacgggaggccaagacaagaagcgaggccccaggacacacaaagaaaggcagaggcagaaaaacaccagccccg

SEQ ID NO: 179223 - RNA, 71 nt, Homo sapiens
agagaagcaacccaacagacaggcaaaagaaacagggaagacaaaggcacagagcagggaaagaaggaaac

SEQ ID NO: 179224 - RNA, 64 nt, Homo sapiens
gcgagcagacgacaagccgggagcgggcggccaaccaggaggaacagcacagcagcgggccgga

SEQ ID NO: 179225 - RNA, 77 nt, Homo sapiens
agcagcaaaccgacccaccagccccaacacgcacgcacgccaacagggcccaccagaccaggggaggaggagaaagg

SEQ ID NO: 179226 - RNA, 56 nt, Homo sapiens
acaggcagcgcccgggcacggggacaagggccaggagagcgaagcagagagaggaa

SEQ ID NO: 179227 - RNA, 80 nt, Homo sapiens
agcccaggagcggcgagcggccggcccaggagccgcaggagggcgcgcggcccagagccagggcagcacgggggagccgg

SEQ ID NO: 179228 - RNA, 77 nt, Homo sapiens
aaggcgggcaggagaaagggcggaaccacaaggcaccacgccgcccagaacagcacaagaaccaccgcacccaggcg

SEQ ID NO: 179229 - RNA, 59 nt, Homo sapiens
gaaggcaggccacaggaaacaggaaaagggagaagagacagaggaagaagagagagcgg

SEQ ID NO: 179230 - RNA, 74 nt, Homo sapiens
accgccccgaagcaaagaggaggaaggagggaccggcccccagcaagccccaggcggggccggggagccccggg

SEQ ID NO: 179231 - RNA, 83 nt, Homo sapiens
caggcgggcggagagccagccaagaaaagggccaagacgaaaccagcaccgaggccgcccccaccgagaggacaccagagcag

SEQ ID NO: 179232 - RNA, 86 nt, Homo sapiens
ggacggggacccgcgacccagccccccacccaacgcgggggaagaaggagccgcagccagaaaaggccagccacaaagagcggagg

SEQ ID NO: 179233 - RNA, 81 nt, Homo sapiens
caagaccaaggcaacaaggacaacaagagacgggacaagacagggcaaaggacagaccaggcgcggcagaggaagaagaag

SEQ ID NO: 179234 - RNA, 78 nt, Homo sapiens
gggaagaagaagcgagcggcgccgccgcaggggaacaaaggagccggcagacagcaacacagggcagggcgagcccac

SEQ ID NO: 179235 - RNA, 68 nt, Homo sapiens
agaaccccaccaaagagcaccagacggagaaggaacagcggaaagccagcggaagacccaggaaagga

SEQ ID NO: 179236 - RNA, 81 nt, Homo sapiens
cccgcgagcacagagcccgccgccgaccgccgcccgccacacccgccgccagggcaagacggacgagacgcgcgggcagag

SEQ ID NO: 179237 - RNA, 74 nt, Homo sapiens
gaaaaccgaggggggcacaacgaaacacagcgcgaacggagaaggaaaaagaaacggaaccccaacagagaaaa

SEQ ID NO: 179238 - RNA, 72 nt, Homo sapiens
gaggcgccccaaaaggccccccgcgcaggcacacagcaaaggggaccagcggagcagccaggagagcaaagg

SEQ ID NO: 179239 - RNA, 76 nt, Homo sapiens
ccccacacaaggcagccgccgggagccagaagcacaggcccgggcgaaggggccacgcgagagagagacgaggaaa

SEQ ID NO: 179240 - RNA, 59 nt, Homo sapiens
gaacgccccccagcccgagcgcgcccgagggcgagaagaagagcaagaaggagaggaac

SEQ ID NO: 179241 - RNA, 62 nt, Homo sapiens
aggaggaaagcaaacccaacaaacaccagaggaggagcaaaaaacagaagcagggccagaag

SEQ ID NO: 179242 - RNA, 82 nt, Homo sapiens
aagaagggaaggcgcgaggaggaaaggaggacgaggccggggggggcacagagccccggaagacagcccccagcgaccagac

SEQ ID NO: 179243 - RNA, 78 nt, Homo sapiens
acaccgaagcagaggagcagcaggaccaggaccacagagcagccaagagcaaacgaaggcagaaggaagcaaagaccg

SEQ ID NO: 179244 - RNA, 85 nt, Homo sapiens
aaagcccgggagcagaagggaggcccaagacccacaacaaaaggcaagcacagcccacaaagagcagagggcacggacgacgggg

SEQ ID NO: 179245 - RNA, 110 nt, Homo sapiens
cggaggcacacggaggacggcaggacgggccggggggacacgcgggcgagcccccagcagccgcacgggaggagggccaggaccagggacacagacggacgccggggggc

SEQ ID NO: 179246 - RNA, 74 nt, Homo sapiens
ggaggcacagagaccccaaagacaaaccaggacccagggagcaggcaccgggcgagccccgcggccagcgcccc

SEQ ID NO: 179247 - RNA, 55 nt, Homo sapiens
aaaaaagaaccgggaaaaccgggagaaaccacaaccccagaacgaacaaagacaa

SEQ ID NO: 179248 - RNA, 65 nt, Homo sapiens
aaaaaagccagaacaggcgaccaccgaacgaagcaacggagcaggaggagcggccgcgcccaggc

SEQ ID NO: 179249 - RNA, 79 nt, Homo sapiens
gccgcagccgccgccgccgcgggagccagccggagaggccgaaccagcgcgggggcgagagggccagcaaaagaagcga

SEQ ID NO: 179250 - RNA, 79 nt, Homo sapiens
aaaaggcggaccgcccccgccaacgaagaccgagaccagacacagaaaagcccacgaggaaaaacggccaacaaaaaca

SEQ ID NO: 179251 - RNA, 75 nt, Homo sapiens
agagagcgacacagcggcagcggaggaacaaacgcagcaacccacaccaagggcaccacacgaggggacacagac

SEQ ID NO: 179252 - RNA, 73 nt, Homo sapiens
gagaggcaggggcccggaaaaaagcgccccagaggagcgcccccggggcccccgcccccccacccccagcagc

SEQ ID NO: 179253 - RNA, 75 nt, Homo sapiens
gaccacaccgcgagaagacaaggaccacagggcgcaaggcgaaacagaggcaggaagagaagaccagcaaccaga

SEQ ID NO: 179254 - RNA, 54 nt, Homo sapiens
agggaaaggaccaaaagagaagcaccaaggaccagccagagaaaagacacagac

SEQ ID NO: 179255 - RNA, 68 nt, Homo sapiens
ggaaccacccaccgagggaccaggcgcaaaggacgggcggacacagcaaggcacaggagagaaacaaa

SEQ ID NO: 179256 - RNA, 50 nt, Homo sapiens
caggcgcacggagacccgccggcaagggcgaaccaaagaaggaaggcgac

SEQ ID NO: 179257 - RNA, 53 nt, Homo sapiens
cccccgacggcccacgccagggagggggagacgggcgagcaagaacaagccgg

SEQ ID NO: 179258 - RNA, 90 nt, Homo sapiens
ggggcggagacacggcacgccacagccaagccggcccccccaggccgaaggacagcccccagaagaacccgcgacacacccgcggccgcg

SEQ ID NO: 179259 - RNA, 77 nt, Homo sapiens
ggacggaccgagaccggaccgagagcggaccgagagcgcgaaacgcacgagaagaacagagagaagggcgggagaaa

SEQ ID NO: 179260 - RNA, 70 nt, Homo sapiens
acacccagcaccgacagcaaggcagcaagggagagcgccccagccggggggagaaggacccaaaacaccg

SEQ ID NO: 179261 - RNA, 81 nt, Homo sapiens
caagcagcccaccacgccacaaacgccgcaccaggcgagcagcgcccccgggacagagagggaaagccggcccacgagacc

SEQ ID NO: 179262 - RNA, 108 nt, Homo sapiens
cagaggcggagcgcccgggccacgaggacgcaccagggggcccccccgccccccgaaccgccggggacccaaagaaacggacagaaaaacagaaccacccggacagca

SEQ ID NO: 179263 - RNA, 93 nt, Homo sapiens
gggacacggagagacacagcgccaacccacaggcaccgaccagagcagaggacaagcggggggcccgggcacacgggcagccgcgcccgaaga

SEQ ID NO: 179264 - RNA, 70 nt, Homo sapiens
ggggggcgcgcccgccgacggcaagaacggaagcacgggcggaggaaagcacaagcagagcccccgcaga

SEQ ID NO: 179265 - RNA, 65 nt, Homo sapiens
agcagagaggcacccagcggccacacccgccacccacaggaccagaccggggaccacgggaaagc

SEQ ID NO: 179266 - RNA, 79 nt, Homo sapiens
aaccagcacaaggagaaaagagcagcaaaagcggcgccaggaaagaacaaaaacgaagcaggcagaagaagagagaaag

SEQ ID NO: 179267 - RNA, 72 nt, Homo sapiens
agggggagccacaggacccacaccgcaggagggcgaacgaggcagcagacgacaggacggcagagccccaag

SEQ ID NO: 179268 - RNA, 85 nt, Homo sapiens
cagcgggagacgccggcgccgcccagccgacccccgggccgcggccgacggccccggaacgggcagccgcggagagagaacacaa

SEQ ID NO: 179269 - RNA, 72 nt, Homo sapiens
caccagcgagggccacacaggagcccggacggcacaggggcccaggggacacccagcaggccagggaagagg

SEQ ID NO: 179270 - RNA, 76 nt, Homo sapiens
aggaccggcgcagagaggggccggccagaccggagaccgagaaggaaggggagcaggaggaacaacggggaagacg

SEQ ID NO: 179271 - RNA, 55 nt, Homo sapiens
acacgaccgaagaacaccaaggaggaggcagagaaagcaagagacgcaaccgaac

SEQ ID NO: 179272 - RNA, 76 nt, Homo sapiens
cgacgagcgcagggggcaccgagcgagccccgaggcaaagaggagcgagaagaaaagacaaccgcgcagccaaaga

SEQ ID NO: 179273 - RNA, 67 nt, Homo sapiens
agaccagacccaccacaagagggcagacggaacgaacagaagggcacacagggaccaagaagccccg

SEQ ID NO: 179274 - RNA, 81 nt, Homo sapiens
ccgaacgcaccggagaaaccagacgagaagcaagcgccgggagcgcccggaggaggcccacacagcaaggaacaaaggagg

SEQ ID NO: 179275 - RNA, 66 nt, Homo sapiens
gcacgggaggagagagagaaaccgaagaaggcccacacacacaggaaggcagaaagcacagccgag

SEQ ID NO: 179276 - RNA, 71 nt, Homo sapiens
cgcaggacggagaagggccgacggcaggcgcaaggggcgaagcagcaaaacacacagccccccggagaaaa

SEQ ID NO: 179277 - RNA, 86 nt, Homo sapiens
cggcccggacccccagaagaggaccgcggagccaaggggccccggggcgacacacgccccaacacggacgaagcacagccacacga

SEQ ID NO: 179278 - RNA, 75 nt, Homo sapiens
gcagccagagagcagacagaaccgcccacagaacaccggcacagccacccccacaagaacacggaaaagaaagcc

SEQ ID NO: 179279 - RNA, 84 nt, Homo sapiens
caagccagcccgggaccgagcggagacggagcggcggcaagcagcgagagacaacaagaagggacgggcacaccccggcacacc

SEQ ID NO: 179280 - RNA, 52 nt, Homo sapiens
cgcccccgaagcggggacgcgggccgagagggacggaccccgggcccccccg

SEQ ID NO: 179281 - RNA, 53 nt, Homo sapiens
caaacaccacccagaaccagcaaccccccacgagaacagaacaaacccacaac

SEQ ID NO: 179282 - RNA, 78 nt, Homo sapiens
cggaccggcggccccagcaacacggcgcgaggcaaggccagcgaaaagcgcccaggaagcggaaaaacaaaagagccg

SEQ ID NO: 179283 - RNA, 84 nt, Homo sapiens
gcagaagcccccaagaaagcggggcagccccgcaggcacagaaggagcgacgaaaggaagaagccaggggcgcggggcggggag

SEQ ID NO: 179284 - RNA, 71 nt, Homo sapiens
ccggaccaagcaccccaccaccaaaccacggcacccggaagcaaggcggccagcaaagaggagagaacaca

SEQ ID NO: 179285 - RNA, 106 nt, Homo sapiens
gccggggccgccaggagcccgaccgggagaggacaagaccacgagccagggacaagaacccaagaaacaggaaaaaacccaaaacaccaaaaggaccagcgagaag

SEQ ID NO: 179286 - RNA, 59 nt, Homo sapiens
gccaaccagcgcgcgagcgcccaaggcccaaaccaccccgaaccgagccccagcacaaa

SEQ ID NO: 179287 - RNA, 86 nt, Homo sapiens
ccgcggcgccgcagcacccgggaaggggaacccaggcaccaagccgaagggcagagggagaggaggaaaccaaaaggaaccgacaa

SEQ ID NO: 179288 - RNA, 78 nt, Homo sapiens
ggggccacccccacacgcccccagccaaacagggaaaacgaggcgccacaaaaaccagcccacacagcgcagaccggg

SEQ ID NO: 179289 - RNA, 73 nt, Homo sapiens
cgggacgggcacccaccggcagccaggaaaggaccgcgaagcccagagcacccaaggaccacccccacaggcc

SEQ ID NO: 179290 - RNA, 72 nt, Homo sapiens
ggcacccaacggccgccgcagaggcaccaccaggagcagaagaacggcgccacaaagcgaggcacagaagaa

SEQ ID NO: 179291 - RNA, 75 nt, Homo sapiens
ggccccacccgggaggggggagcggcgggaggccaccgccagagggcaggcacgagcaaggaggagccccgaaaa

SEQ ID NO: 179292 - RNA, 86 nt, Homo sapiens
cggggaggacgcgccgcggccaggcagggaggagaccggcacccagacaggggcgaaggcagaggagcggccagaccgaacccaga

SEQ ID NO: 179293 - RNA, 52 nt, Homo sapiens
gcccagccccacagaggggaacagaaaagaccggaagggaaggccccaaaga

SEQ ID NO: 179294 - RNA, 71 nt, Homo sapiens
aaggaaaaccaaacgacccgggggccagggaggccacccacgccccagaaacacccgaggaggcgcaaaag

SEQ ID NO: 179295 - RNA, 76 nt, Homo sapiens
gcacccagcggccacacccgccacccacaggaccagaacaagagcaaacggcgaaaccggcacagaagcacgggac

SEQ ID NO: 179296 - RNA, 99 nt, Homo sapiens
cggccacacggcggccgcagggcgccggagccccccagggagcagcagccccgagaaggaagaggaggaagcgagggcccgcgagggcgcaggaccgag

SEQ ID NO: 179297 - RNA, 75 nt, Homo sapiens
cacagaagaccaaacgcagaccagcccaggaaggaggagacacacagccccagacgggaggaaaaaaggaaggac

SEQ ID NO: 179298 - RNA, 85 nt, Homo sapiens
ccgccgccagagcaggacgaaccgccaacgcaaggcacccgagaaccaggagccagaggagccccaccgcccagcggcccggagg

SEQ ID NO: 179299 - RNA, 81 nt, Homo sapiens
cgcgccgccaccgcgaacaggagcccgacagaagaggccagaccgaccaccgaaaaggcaacaggcacaggacccgggacc

SEQ ID NO: 179300 - RNA, 71 nt, Homo sapiens
aaaccgccaacccgcgccgccgccaccagcccaaaacggggggaaccgaagagcaaggaaaagaaaagggg

SEQ ID NO: 179301 - RNA, 73 nt, Homo sapiens
aaaccacaaggacccaggcaccaagcaaacaagcggcgaaaggcaagaaaggaacagcagaagagaccagaga

SEQ ID NO: 179302 - RNA, 74 nt, Homo sapiens
aaaccccgcaagccaacgcaccaccagggaccaagaaaggcccagggaccaaagcccggacaaggcccgagcac

SEQ ID NO: 179303 - RNA, 84 nt, Homo sapiens
acaaagcaaaaaagaaccagggaaggcgcagaaacagacaacccaaggagaggaaaagacggaccagacaggggagagcacagg

SEQ ID NO: 179304 - RNA, 73 nt, Homo sapiens
aggagagaagagaagaaaggaggaagggaaagcagcaacacaaccagggaagggccgcaaggaacgcccgcgc

SEQ ID NO: 179305 - RNA, 75 nt, Homo sapiens
agcccccgcccggcagccaccccacgggaaaggcgacccgcggcgagagcccccccagagcgccagggcccgaga

SEQ ID NO: 179306 - RNA, 74 nt, Homo sapiens
acaacagagcgacagaggcagaggacacgagcccagccaggcgagccagcgccaaagaaaaagaacaagaggag

SEQ ID NO: 179307 - RNA, 74 nt, Homo sapiens
ggaagcaccacagccaccacaccaagacaccaggggagaccgaaaaagaagggaacggagagacaaaacccacg

SEQ ID NO: 179308 - RNA, 77 nt, Homo sapiens
accggaagcagagaagaacagcagcacacagccgaggagggcaaaacaaaagcagcgaaaaaagcgaagaaaaagaa

SEQ ID NO: 179309 - RNA, 110 nt, Homo sapiens
aagacgacggggcgagccgcgggaagcggccggaaggcggcgagaagcacacggccacagagcaagggccagagaaggaggagaaggagacaggcggcaagcagggcgaa

SEQ ID NO: 179310 - RNA, 73 nt, Homo sapiens
acaaacgcacggaaccagcgcaaaggagaagcgaaggaagaaggcaaaaaggacaaagccgcagacagggaga

SEQ ID NO: 179311 - RNA, 67 nt, Homo sapiens
accccccggcgccgcgccggcggcgccaaggagagaccaccagaaaacgaggcggggccgcacagga

SEQ ID NO: 179312 - RNA, 37 nt, Homo sapiens
gcacagacagaacccgcaccaggggaagaaggagccg

SEQ ID NO: 179313 - RNA, 70 nt, Homo sapiens
cagcgcccagcagcgcagagcccagagaaagggggccaggaagccaagacagggcagggagggagcagaa

SEQ ID NO: 179314 - RNA, 84 nt, Homo sapiens
aaaaagcagagaggagcggggagcaagcaggaaacccaccagagaaggcgcggccacccaggacccgggggaggcagcgaagaa

SEQ ID NO: 179315 - RNA, 80 nt, Homo sapiens
gacacgggccgcgacagcagccacgaggcgagccagagccgcagcccacacgggaaacccagacgacaaggaaggccaag

SEQ ID NO: 179316 - RNA, 79 nt, Homo sapiens
ggggagccagcgagcgcgcccggcaggccgccgcgagcagccaggcggcgggccagcagaccgaaaagggcggaaaagg

SEQ ID NO: 179317 - RNA, 98 nt, Homo sapiens
agggaagaaacaaaagagaagccagaaacggaaacagaacaacgcaaaggagcggccagccaacaggacagcccccggcgcaaggaagaaagaaaaca

SEQ ID NO: 179318 - RNA, 72 nt, Homo sapiens
cagcccccaagcggcccgcgagcaaacgccgcggccccagcggaacgggcacaaagaaggcgcaggcaagac

SEQ ID NO: 179319 - RNA, 75 nt, Homo sapiens
gaagaggacacaaagcgccaggagaaaggaaaaacaaaaagaagaacaagaggagaagcggaggcaaggcgcgac

SEQ ID NO: 179320 - RNA, 72 nt, Homo sapiens
gaaggccaccgcgcacagaaaacccaagggaaccaccgccacaaacgcaggccacaaagaggcgcaccgcgc

SEQ ID NO: 179321 - RNA, 70 nt, Homo sapiens
gcgaggagaacacccggaccggacacgccgagcgaagaagagcagaaccgcaaaaagaacagcagaaaag

SEQ ID NO: 179322 - RNA, 73 nt, Homo sapiens
aaacggaaaagaaacagaagaaacccacaagcaaccaacgcagccgcaaacgaccgcagacacgcgccgacac

SEQ ID NO: 179323 - RNA, 37 nt, Homo sapiens
gcgggaaggaacaccaaggagagaaaaggacaagcac

SEQ ID NO: 179324 - RNA, 76 nt, Homo sapiens
acagcggccaagaagacacaaaggacggaggcacggagcacagcaagcgggagcaggcagaccaaaggaacagaag

SEQ ID NO: 179325 - RNA, 75 nt, Homo sapiens
aggcggagcagggaccaccccagcgaagaccccccaggcccaccggaagaggacggccgagggagagaaggaagg

SEQ ID NO: 179326 - RNA, 60 nt, Homo sapiens
ccagaaaagaaaggggacaggccgaaagaccgcaaagaagggacaaccaagaagccaacc

SEQ ID NO: 179327 - RNA, 74 nt, Homo sapiens
aggaaaaacggagccagagggagagcaaggcaacgggcaagaccagagccccgacaccgccagcccagggcacc

SEQ ID NO: 179328 - RNA, 68 nt, Homo sapiens
ggaaagaggacaacaggccaccagaagaaggagcgcaaggaggaccccacccaccacacccggaggaa

SEQ ID NO: 179329 - RNA, 82 nt, Homo sapiens
ccgcgcagcgggccagcccccgcggcgacagcggaggcgagaaggagcagcagagcaaaaccgcaggccaagaaccgcccgg

SEQ ID NO: 179330 - RNA, 77 nt, Homo sapiens
cccaagaaggaaaaacgacagcaaaacagccagaggggaccgagaaagagccgccgcagggcgaaggcgaggacccc

SEQ ID NO: 179331 - RNA, 69 nt, Homo sapiens
cgcacgaagcgcggaggccggcacaagaggcaaaaaaccaagaaagggcacaaagagcaaagacgcgcc

SEQ ID NO: 179332 - RNA, 64 nt, Homo sapiens
cgccccggacgcaccagagccaggcgccaacaggaagagagcgacagccagagaccggagcaca

SEQ ID NO: 179333 - RNA, 76 nt, Homo sapiens
ggacccacgggaagaagacgaggcggacaggcggagcggggacgacgagcccacggcacaacggaccgacagagca

SEQ ID NO: 179334 - RNA, 54 nt, Homo sapiens
cagcagccagggaaccccagggaagaccaaggaccaagaacccccgcccggagc

SEQ ID NO: 179335 - RNA, 74 nt, Homo sapiens
gcacaggcacacaagagagcaacggggcggcacacaaggagcgaagggcagggagaacgccaggcacagcacga

SEQ ID NO: 179336 - RNA, 68 nt, Homo sapiens
aaaggagggacgaagacaccgacggaaacaacgcaaggcccgagcaaacagaaaggaaaggggaagcc

SEQ ID NO: 179337 - RNA, 75 nt, Homo sapiens
cccaagagcagcggaaaagaccagcacagggaaagacaaggagccgggccgagaaaccgaaccagagaccagaga

SEQ ID NO: 179338 - RNA, 78 nt, Homo sapiens
acggcgcgggccggcccccagcggcgggcagccgccaggggacaccggggaaggaggccagacggaccgaggccggac

SEQ ID NO: 179339 - RNA, 79 nt, Homo sapiens
cccgggcggacaagagacagcgggcccggaacggagacccaagaagaagagcaaagagggcagcccggaagggacaaac

SEQ ID NO: 179340 - RNA, 43 nt, Homo sapiens
cagcagcagccacgcccacccagaggcgaaaagggccaaggac

SEQ ID NO: 179341 - RNA, 63 nt, Homo sapiens
gccgcgagccaccgaggcccagcggcacacccaaccgagcagcggccgagggccaggagaggg

SEQ ID NO: 179342 - RNA, 81 nt, Homo sapiens
cagcaacacgcagcagggcggaagcgggggcaccagcaccccgcaccacagccaggacgcggcccagagaccccccacggg

SEQ ID NO: 179343 - RNA, 81 nt, Homo sapiens
agccgaaaagcgcagcgagcggagccgccggagagagaccgacagagccacaagaaacaaaggcacggcacggccggcaca

SEQ ID NO: 179344 - RNA, 70 nt, Homo sapiens
caaaacagggagaaacacagccagaagcaacggggcggcacacaaggagcgaagggcagggagaacgcca

SEQ ID NO: 179345 - RNA, 78 nt, Homo sapiens
gaagagaaggaagacgcgccgagccacggcccacaggacagcaagccacagaagcacagcgccgaggcccagagagac

SEQ ID NO: 179346 - RNA, 71 nt, Homo sapiens
aacgaagagacgacacaaggagacgaggggaagaggcagagcagaaccccggggcacggaaagggacaaag

SEQ ID NO: 179347 - RNA, 70 nt, Homo sapiens
agggagccaaaacggaagacaggaaggcccccccagccccgcgggcccaggaggcaagagcgagaagagc

SEQ ID NO: 179348 - RNA, 78 nt, Homo sapiens
ccgggcgagcccggagaagaggaagagaaggcaccaggcccaggcggccaaacccgagccaagagacgcggcccagcc

SEQ ID NO: 179349 - RNA, 82 nt, Homo sapiens
ccgggacggacgaagcgggcgcaaggacagggccaccccccccagccccccgcagcgccgcccggacccgccccccgccccc

SEQ ID NO: 179350 - RNA, 75 nt, Homo sapiens
accaaaaagaacacaccaaaagagcagagaagcaaaaggggcgcaggaagaggggcggacgggggcacagaggag

SEQ ID NO: 179351 - RNA, 77 nt, Homo sapiens
ggggcgaggcccgaagcgcaggcggacggagcccggaagaccacgacacccagcagcgcccgcaaccgcagaacgga

SEQ ID NO: 179352 - RNA, 88 nt, Homo sapiens
cgcagacgcgggcgagcgcggccggacgccagcggacacgcgggcgagacaagcagaccggaagaccgacggaagaccacaccccgag

SEQ ID NO: 179353 - RNA, 75 nt, Homo sapiens
agacgcagggcgcccccgcccaaaggggcaggacaagacagaaggccaagggagggacgggagaaacaagggaaa

SEQ ID NO: 179354 - RNA, 38 nt, Homo sapiens
caggcgcgaccaggggcagagagaagagcacacagaag

SEQ ID NO: 179355 - RNA, 63 nt, Homo sapiens
cggcccccgggcggccgcgggggcggcgcaggcgaaacgaggagggagcagaggcgagcagac

SEQ ID NO: 179356 - RNA, 75 nt, Homo sapiens
agaaggggaaagaacaacgagagaccacggaagcagacccgcagggcgacagccaggaagccacagacccaagga

SEQ ID NO: 179357 - RNA, 66 nt, Homo sapiens
cacaggaggcgcggaggacgccccaccgccgacgcccccagccaccagagacagggcacacgggcc

SEQ ID NO: 179358 - RNA, 43 nt, Homo sapiens
gaggagccgcagcgccagcaccaggccaaaacagaagaggcaa

SEQ ID NO: 179359 - RNA, 70 nt, Homo sapiens
gaagagaagggaaccaacggcagacagagggacggcccccggcccccggccgcgggaaagaagggccggg

SEQ ID NO: 179360 - RNA, 68 nt, Homo sapiens
cacaaaggaagaagcccggagacgaccaagaggcagcaggagaccagagcaaaaacacaacagccaag

SEQ ID NO: 179361 - RNA, 74 nt, Homo sapiens
gacgagacacagagcacacggaccagagcacaaccaaaagcaccaaggaggcagagaaggaaaaggacgccagc

SEQ ID NO: 179362 - RNA, 53 nt, Homo sapiens
agcacaaccgccagaaggaagacaagcccggaagcggcaccgagagaaggcag

SEQ ID NO: 179363 - RNA, 69 nt, Homo sapiens
aagccaagcagacaccacgcaaaacaaaagacccaaaaggaccgaagaggggcgccggagaggagacga

SEQ ID NO: 179364 - RNA, 76 nt, Homo sapiens
gaaaaggcagaaggcgaggaacagaggcgcacccccgagagagccacggaagggcgccaaggagccaccgccacca

SEQ ID NO: 179365 - RNA, 75 nt, Homo sapiens
cacgaaacccacgagcaccgggccaggaacagcggagaccagggaacgccaggagagaaaccagggaccaccgaa

SEQ ID NO: 179366 - RNA, 60 nt, Homo sapiens
cagccgcaccgcgcgccagccgcccacccagagaagcacacggagaaccaagggaaggag

SEQ ID NO: 179367 - RNA, 85 nt, Homo sapiens
gcggcaggagcgaccggaggacaggcgccgcgacggcgcgagcggggcagaacgcagagcggccaagccggcaggagccagcaag

SEQ ID NO: 179368 - RNA, 60 nt, Homo sapiens
ggaccaagaaccagcagaaacggggggggagggggacccggaagaggagaaacagaagac

SEQ ID NO: 179369 - RNA, 44 nt, Homo sapiens
acagacaccccgaaccgcccggcccagcccacccaggaaccgac

SEQ ID NO: 179370 - RNA, 86 nt, Homo sapiens
gaggccccgagccccgggaccgcggagcggagccggccgacgcgggcgcgagggcagaaccggggagagaagcccccagccaggag

SEQ ID NO: 179371 - RNA, 54 nt, Homo sapiens
ccacagacaccccccggagcaggcaagcacaaagaagaagagagggcgaaggag

SEQ ID NO: 179372 - RNA, 69 nt, Homo sapiens
gcggcgccgcgccccggccgcacggacaacggcaagcggagaagagcaaggccgaaccgagaggaaggg

SEQ ID NO: 179373 - RNA, 69 nt, Homo sapiens
cacaagggcacagcacccacgagcagaagcacccgagcagggaaccccggcggaggaagggagcgacag

SEQ ID NO: 179374 - RNA, 88 nt, Homo sapiens
acaccagccccccacggacccaaaccagaagaaaaccgaaccgagcacggcgcccccgacccggggccgggggggcggggaggccaga

SEQ ID NO: 179375 - RNA, 74 nt, Homo sapiens
caaccccacgccaccgaagagccaagcccaggaccagccacaagaagacagacacgaggaaggaaaagaccacc

SEQ ID NO: 179376 - RNA, 80 nt, Homo sapiens
gcgagggaccgggacgccacagccagaggagacaaccgccaaagccccagccccccggaaacgccaacacaaagacccag

SEQ ID NO: 179377 - RNA, 58 nt, Homo sapiens
gacaagccagcagacaacgacagaaaaccacccccaggacccaaagacaggaccacgc

SEQ ID NO: 179378 - RNA, 79 nt, Homo sapiens
ggaccccagggcccagggcccccccggccccaggccaccccagcacggacgaccagaagccccggccccgcccccccca

SEQ ID NO: 179379 - RNA, 52 nt, Homo sapiens
agcaggcggggaagagaaaggagcccaccgggggacgaccagacacgccacc

SEQ ID NO: 179380 - RNA, 75 nt, Homo sapiens
gaccgcgcaagccacacagcaagacccggacgaagccacaaccagaggagcaagaggggggggcccccccgaaga

SEQ ID NO: 179381 - RNA, 76 nt, Homo sapiens
gacacaaaggagacgaggagaccacgggagcaccaaccgaaccgcacagagggggggcaaacgcaagggaccaccg

SEQ ID NO: 179382 - RNA, 49 nt, Homo sapiens
gcgggaccggggaagacgccggccgcaggagcgaaggacaggccagaaa

SEQ ID NO: 179383 - RNA, 74 nt, Homo sapiens
ggcccacggacagaaggggacggagagcggagcccggacgccggaaaggaggaaggagaaacacccccaggccc

SEQ ID NO: 179384 - RNA, 82 nt, Homo sapiens
agcgcagaggcggcggggcgagagggcggcgaaggaggcagaggcacagcgcagaagccccccagccgaggagaacggcaaa

SEQ ID NO: 179385 - RNA, 78 nt, Homo sapiens
ggacaggcacacaaagaaggagacgggggcacgggagcaggaagggcggagaacggaaaagcaccaggaagcagagag

SEQ ID NO: 179386 - RNA, 51 nt, Homo sapiens
gacagagaggaaagagaacaagcaacgggcacgggcaagcagaagaggaac

SEQ ID NO: 179387 - RNA, 84 nt, Homo sapiens
cgagaacgcacaggccgcgcagagcgggaccacccgggcacagcaggcacggagcacccgagggacccgaggagcccaccaagc

SEQ ID NO: 179388 - RNA, 61 nt, Homo sapiens
ggcaagcacaaaaggggccaaccacgccggggacacaggccgccaaaggagggaaaaggga

SEQ ID NO: 179389 - RNA, 79 nt, Homo sapiens
cccgacccgccaaagacccagaaggggagcgcggaccgagacagagcgggagccaccagcgccaaagggaagccaggag

SEQ ID NO: 179390 - RNA, 76 nt, Homo sapiens
caggccacccgggaacggaggaggggacccaaagacaggaccacgcaccagcagagaaggaaagcaaaccgaagca

SEQ ID NO: 179391 - RNA, 63 nt, Homo sapiens
aacgaacaccacgcaccgcagccgcgagagaggcaagccgggggaggggcacgcccggaagac

SEQ ID NO: 179392 - RNA, 70 nt, Homo sapiens
acacagagggcacacggcacagaccagcgacaaggcaccagcacgggacggagaacggcacaacagagag

SEQ ID NO: 179393 - RNA, 59 nt, Homo sapiens
aaagcaccgaggcacaacaggacccaaagacaggaccacgcaccagcagagaaggaaag

SEQ ID NO: 179394 - RNA, 76 nt, Homo sapiens
gcagcgggaccacgccggagccgaggacacccgcgcacagagggagacaaggaaaaaggaaggaaagcgaggccgg

SEQ ID NO: 179395 - RNA, 90 nt, Homo sapiens
ggcggcagagcaaggggcacgcagaaggaccggccacgggaggaagaggaggagagaagagaggaagcgagcagcacgggcaagcgggca

SEQ ID NO: 179396 - RNA, 109 nt, Homo sapiens
gcagcagaggccgaccgcaggagaagcccccagaaccaggcccccaaccagccacgcggaggcaaggcagaacaaccgggagggcggagcaggggagcgaggcacagga

SEQ ID NO: 179397 - RNA, 81 nt, Homo sapiens
gcgccgagcgcacgcccgaacgcgaggccaacagccccggaaacaaagagccccgggaaaagaaaaaaaacgccccaaacg

SEQ ID NO: 179398 - RNA, 80 nt, Homo sapiens
cccagggagcggagcgcccggccggcagcgggaaggccaaaacagaagaggcaaagcccagccacagcagcagcccagca

SEQ ID NO: 179399 - RNA, 78 nt, Homo sapiens
cgccggacgcagcgaaggccaaggcagaagaaggaacgaccgaggaaggagaaacagagcaagaggaagacaaaggcg

SEQ ID NO: 179400 - RNA, 80 nt, Homo sapiens
cgaacccccgaggaagaaggcaaaggaccagaccgagccagagggagcgaacgcagggccgggcgaggaaaacgcaaggg

SEQ ID NO: 179401 - RNA, 65 nt, Homo sapiens
gagcgcaacaagagcaaccagaagaacaagaaagagaggagccccaaccacgaaaaaaccaaacg

SEQ ID NO: 179402 - RNA, 53 nt, Homo sapiens
aaggaccaagaaccagagaacaccgcccagcgcgaagcaccgaggcaaagcag

SEQ ID NO: 179403 - RNA, 53 nt, Homo sapiens
acaggccagcgcggccaagacccgccgcaagaacggccgagcgaccaggagag

SEQ ID NO: 179404 - RNA, 55 nt, Homo sapiens
accacgccgccacaggccaaggagcggcgcgaagaagaggcaggcaccccgggac

SEQ ID NO: 179405 - RNA, 82 nt, Homo sapiens
agcaccccaacaacaccgcgagacgaggcgaacagccaaagaagagcagaagcaaggcgaagcagagaaggagaggcaagcc

SEQ ID NO: 179406 - RNA, 85 nt, Homo sapiens
ccagaaggacagaaacgggaaccaggcacagaggcaaccccgcggcccgccaacggcggggcccccggggaccagccccgcgggg

SEQ ID NO: 179407 - RNA, 80 nt, Homo sapiens
cgcggagccgcgccgaggggaagagcggggcccggcgcacccaccaccgccgcccacggcagcccagggacccgagcacc

SEQ ID NO: 179408 - RNA, 82 nt, Homo sapiens
cagaagcaggcagcggcagagagggaagggcaggcaggcgcgagaaggacgcgcagccaccccaggagagagagagagagag

SEQ ID NO: 179409 - RNA, 75 nt, Homo sapiens
agggcaacaaggagacaagacacgaagaaagcacgccaggaaggaccccaagacagaaaagcagcacgaagcaaa

SEQ ID NO: 179410 - RNA, 66 nt, Homo sapiens
cgcacccagaacccaacacgagcccaggggccaggaaagcacaaggaagaagcggacggggaagag

SEQ ID NO: 179411 - RNA, 73 nt, Homo sapiens
aaaaacccacagggaaccaaagaaaaagggcaaacagcaagaaagcgccaaagccagccacagcccacccgga

SEQ ID NO: 179412 - RNA, 68 nt, Homo sapiens
ccgaaaagacagagaggggaaaccccgaaaggggggcagggagagaagcggagaagcggcaaccagga

SEQ ID NO: 179413 - RNA, 62 nt, Homo sapiens
cgcagacaagacccagcccacagcaggggacccccaaaagacaagggcaaaacggaccagac

SEQ ID NO: 179414 - RNA, 81 nt, Homo sapiens
ccaaagccccggccacccggcccccggcaccaggccgaaaacgaagcagaggaacaacaaggaacgaagacacacacgaaa

SEQ ID NO: 179415 - RNA, 82 nt, Homo sapiens
gaggagcacgggagaaacacgcgcaagcccgcccggggggagaggcaccagcaacagaccaaccgcagcaagcacagagaca

SEQ ID NO: 179416 - RNA, 77 nt, Homo sapiens
gagacagccccgggagacgcaagggcaaggcaaaggggcgcggccggcccgccggggccggggggcagcgcggccac

SEQ ID NO: 179417 - RNA, 57 nt, Homo sapiens
gccccgcaccagagcggggcaccgagccggggcggcgccggccaggcggagacaggg

SEQ ID NO: 179418 - RNA, 81 nt, Homo sapiens
gcggcggcggcggggggaaaggcggagacggccccaccggcaccgagaaagacaacagaggcggagcacagagagcgcggc

SEQ ID NO: 179419 - RNA, 78 nt, Homo sapiens
aaacgaaaaaacaaaaaacccgcacaaaggacagacaggacaggaggaggcaggcgcagcccgaagaaggccaacggc

SEQ ID NO: 179420 - RNA, 83 nt, Homo sapiens
ggaaggcggggcgacccggggggcgcgcccagagccccgcgcagcccagggaaggcacagcaagcaacccggccgaggggggc

SEQ ID NO: 179421 - RNA, 69 nt, Homo sapiens
cggaagcccgagcagccgacccgcccaggccagagccagacaaacgaaccccaagcccgacggggaccc

SEQ ID NO: 179422 - RNA, 82 nt, Homo sapiens
gccgagaggaagacgagccgggaggaacggcccggaaacaggaggacgcgggcgcagcgcccccacaccccccggagggcgc

SEQ ID NO: 179423 - RNA, 73 nt, Homo sapiens
ggggccgggcgcgaggacgcacgagccaggagaaggacagaagcagaagaaggacaccccacaccgaaacaga

SEQ ID NO: 179424 - RNA, 84 nt, Homo sapiens
cgcagcgggagagccccggagagaaaagggcagacaccacacccagagacacccccaaccaggggaagagcagcgacacacgcg

SEQ ID NO: 179425 - RNA, 74 nt, Homo sapiens
cgccaggccggagcgcgacacggagacaggggcagaggagagcacccagacgcgagaccccgaagagcagggac

SEQ ID NO: 179426 - RNA, 69 nt, Homo sapiens
gccgcaccaccgaaaaagcggagagagccacagaccggagcggcacagccggacagaggagaggcggaa

SEQ ID NO: 179427 - RNA, 92 nt, Homo sapiens
gaaaggagcagccagaaagcggcacgaacagagccgggagcaagaagaacacccagagagcgcgcccaaagggagcaaggaggaacagcggg

SEQ ID NO: 179428 - RNA, 68 nt, Homo sapiens
ggccggaacaagcaagcggcccacgaggccagcccaggaacacagaccaccaggagccagccggccac

SEQ ID NO: 179429 - RNA, 64 nt, Homo sapiens
ccaacgcaagcgaagagcaaacagaggagaaccacgagaaggccagcagggagaagaggaggaa

SEQ ID NO: 179430 - RNA, 91 nt, Homo sapiens
cgacagccaccagcaggggaagagacaagagggacgcgagagccagaggcccaaaaaacagaaaccaaacaaagacaaggcaagcaaacac

SEQ ID NO: 179431 - RNA, 58 nt, Homo sapiens
gagacccgagcggaagagaagccaaggaacaagagccaggcccaagaaaagcccaaag

SEQ ID NO: 179432 - RNA, 58 nt, Homo sapiens
ccaccccggcccccacccagacgacccaaccaggaggagacaggccgagaccgagggc

SEQ ID NO: 179433 - RNA, 73 nt, Homo sapiens
caagagggaaggggacccgccgggaggacgcgaaccccccaaaccaaagaaggaaaaaaccagaagccaagcc

SEQ ID NO: 179434 - RNA, 79 nt, Homo sapiens
aaacccaaagaagagaggaagaagaccccaagcaagcggcagacagaagggaacagccaaaaggaacagaagggagaga

SEQ ID NO: 179435 - RNA, 109 nt, Homo sapiens
cgcaccgccacgcgcagggcggcgggcagcagcacaacgggcgcaccaagccgagagaaaaggggacgccacggacaccgggaccgaggcccgggcagcggggagagag

SEQ ID NO: 179436 - RNA, 81 nt, Homo sapiens
caaacgccagccaggagagagagcaccaccggcgcggacgaccggagacccgccacaccagcaacaacccaggcccagcaa

SEQ ID NO: 179437 - RNA, 73 nt, Homo sapiens
gcaagaaaagcggcaaccagaccgcagaacccaaaggcggcacagaacagaggggagccggagggaacagcag

SEQ ID NO: 179438 - RNA, 39 nt, Homo sapiens
cagcagccccccgccccaaagcaggccggagaccagcac

SEQ ID NO: 179439 - RNA, 82 nt, Homo sapiens
cgggccccgccgccacaaaggcagcagcacgggacgcacggcccggggggagacagccacgggaagaccgggaaaaccggag

SEQ ID NO: 179440 - RNA, 75 nt, Homo sapiens
cagggcaaaccagaaagacgaaaaccacgccaaaacaacagaaggaaggcagcacagaagaaacaggagacaagc

SEQ ID NO: 179441 - RNA, 71 nt, Homo sapiens
agcagaaaaaaacaacagaagacggacacggagcagagcacccgagcgggaaaaaaacacaaagaacaagc

SEQ ID NO: 179442 - RNA, 79 nt, Homo sapiens
ggaaaaaacgcagcaaacaccaggagaaaggcaagaaggaacagacaaaaacggccggaaggaaacacaggacaccagg

SEQ ID NO: 179443 - RNA, 77 nt, Homo sapiens
gagcagagccgcgggcgccggagccgaggcgagcgccgcgcgcaccacgggaagggagcccaaaacaggagcgcagc

SEQ ID NO: 179444 - RNA, 74 nt, Homo sapiens
ggcgacacacaggcgcacccggggccaaagcaggccccagagaaggagaagagagagacgcgccgggagagaaa

SEQ ID NO: 179445 - RNA, 78 nt, Homo sapiens
caagaaagacagagcaccaggaggaagccaggagggaagcccagaagacgcacaagagagaccgaccaaaccccggaa

SEQ ID NO: 179446 - RNA, 82 nt, Homo sapiens
aagagcccggaggcaagggacggcgggaggagggccgagagaaaggacagggacaggaaagaaagaaaaagaaaagaaaaac

SEQ ID NO: 179447 - RNA, 74 nt, Homo sapiens
ccaagaaacagcagcaaggaacgcgcagccagcaccacgcggagccagcgcccggcaaggagcgagcgggagac

SEQ ID NO: 179448 - RNA, 83 nt, Homo sapiens
gaccaggcgaagcggccgagcaggcgagcgaacgacgcaacaaacaagcgcacgcacaagaccaaggggaaacggcaccacaa

SEQ ID NO: 179449 - RNA, 80 nt, Homo sapiens
acgacaccgagaaagaaaccagaggaagaggaaagaaagaagaggagggaaggccccagaacgcggaacgggccgcaaag

SEQ ID NO: 179450 - RNA, 64 nt, Homo sapiens
agaaacacagaaagacggggcaaccagggaccgcgaagacagaagacaggagccagagggacgg

SEQ ID NO: 179451 - RNA, 74 nt, Homo sapiens
gccgaacccaggggaaagcacgaagacagaccgcgaaaccaggaagagaggaggcgggagcgaccccggcagga

SEQ ID NO: 179452 - RNA, 87 nt, Homo sapiens
aaagaagcgcagcggaggaaggcgaggggaccgcgagaacccaggacaaccagcgggcccgcagcgcccccgagggcaggagaaggc

SEQ ID NO: 179453 - RNA, 79 nt, Homo sapiens
agacaacagcccagaggaggccccagcaccgcggccggcgcagcaacaaggacgcaggacagagagagaaacggaaaaa

SEQ ID NO: 179454 - RNA, 71 nt, Homo sapiens
gccagggcgaagacagaggcaggaggggggagcccagagaggaccagaaggggcacaggaaggcgcggcgc

SEQ ID NO: 179455 - RNA, 66 nt, Homo sapiens
cgaacagaccggaagaacccggcccagagccaaaggagccccacaaaagacggacaagcaaacacc

SEQ ID NO: 179456 - RNA, 36 nt, Homo sapiens
gcgaggccgccgcgcaagaagccgggcacgaaccgg

SEQ ID NO: 179457 - RNA, 55 nt, Homo sapiens
gggaagaccggaggggacgaagaacggccgccccacccggcgcgagagcagggag

SEQ ID NO: 179458 - RNA, 72 nt, Homo sapiens
cggagacggccagaacaccacagcccacaaagggacagagcgaagaaccccccaagaagacgaaacccccgg

SEQ ID NO: 179459 - RNA, 68 nt, Homo sapiens
gccccaggcgcaaaacccgagaaagggcaaccaggccggaagagcgggagcgggagccaggcagaagg

SEQ ID NO: 179460 - RNA, 74 nt, Homo sapiens
cccgcggacgccaggggccagacccacaaaccccacagcggagaaaaaggagaaacccccaagacaaaccacgg

SEQ ID NO: 179461 - RNA, 71 nt, Homo sapiens
cgacaacgaacagcccaccagaaaggaagagaggaaggaagaaaaaggagagcaaaacagaaggaaccacg

SEQ ID NO: 179462 - RNA, 81 nt, Homo sapiens
ccgccagaccacgccaaccacgagagcaacagcgagccgccaccgccaagagcaggcccacaggacacggagccgacgggc

SEQ ID NO: 179463 - RNA, 70 nt, Homo sapiens
ggaaacgggagggaaccagcaacaagccggccacgcgcagagcgaacaccaccgcgaagacgcagccacc

SEQ ID NO: 179464 - RNA, 83 nt, Homo sapiens
ggaccaggcgcggcgacagacagggcgagggagcaggcagcgggacgaagacgcaggcggcagcgcacagggagggcggcaga

SEQ ID NO: 179465 - RNA, 77 nt, Homo sapiens
acaaccagccccgcccggccgccaccaaggagaccacccagaagaacaacaaccaggcaccaaagacggcaccaaac

SEQ ID NO: 179466 - RNA, 87 nt, Homo sapiens
cgaggggacggacaacccgacgaggaacgaagggacaagacccgccagaacagccagcaagggcaaacccggaagaagaaaaaaaaa

SEQ ID NO: 179467 - RNA, 66 nt, Homo sapiens
gccgcgcgaggaaaggccgaggagccggagccgcaggagacaggagggaccgggcagaagaacggg

SEQ ID NO: 179468 - RNA, 65 nt, Homo sapiens
agaaggacgagcagcaaggaacgcccgacccacaagcggcccgggagggaacaaagaggaacagg

SEQ ID NO: 179469 - RNA, 54 nt, Homo sapiens
ggcaggagaaagagagaacaggaccgagcgaaaaaaaacgaaagagaaaaaaac

SEQ ID NO: 179470 - RNA, 79 nt, Homo sapiens
gagacaccggacaacaacaggaccacgacacacaagcaagcccgggaccgggagcccgggaccgggagccggggggcca

SEQ ID NO: 179471 - RNA, 70 nt, Homo sapiens
cagaaagccgccagagcggggcacggagcgggaccaagcgagacagaggcaaggaaaaagaacaccaacg

SEQ ID NO: 179472 - RNA, 59 nt, Homo sapiens
cggcgaccgaggggagagggaacgcagcgaaagcggaacgaaggaccaacggggggaca

SEQ ID NO: 179473 - RNA, 57 nt, Homo sapiens
agggcgagaacgaccccgagacgaaacgccgaagggaccaggcagacgggaagaacc

SEQ ID NO: 179474 - RNA, 76 nt, Homo sapiens
ccgccagccgcgagggaacggaggggagggacccgccagacccgaggcaggcaggaaagagcacaacgggccagag

SEQ ID NO: 179475 - RNA, 63 nt, Homo sapiens
ccgaggccgaaggcccgcggcgccccggcgcagggaaccaagaccaggacaaagaagacccgg

SEQ ID NO: 179476 - RNA, 65 nt, Homo sapiens
aaacagaaccacagaacaagacgcaacccccagccacaacgcgaaccgggcggacgaaggaggcg

SEQ ID NO: 179477 - RNA, 58 nt, Homo sapiens
agaacccccaaacgacccaggggagccagaacacaaacaaaggagccgggagacagac

SEQ ID NO: 179478 - RNA, 67 nt, Homo sapiens
gcggaccggagagccgcggaggacgggcggagccgaaccggcaaaccgaggggacgcccagccacaa

SEQ ID NO: 179479 - RNA, 70 nt, Homo sapiens
cgcagcggggacgcggacgcacgggggcacccgaggaggaagagggcagggcccacggaaagaagggaaa

SEQ ID NO: 179480 - RNA, 58 nt, Homo sapiens
aagagaagccagagcaacccaaaaagcaagggaaagaaaagaggcccggaagagagcc

SEQ ID NO: 179481 - RNA, 50 nt, Homo sapiens
ccacccccgagggaaaagacggccccaaccagacaacacaacccggacac

SEQ ID NO: 179482 - RNA, 72 nt, Homo sapiens
gccccagaccgaccgcagacgagaacgggagaagacccgggaaaacaacccgaacaggaaacgggcacaaaa

SEQ ID NO: 179483 - RNA, 109 nt, Homo sapiens
agaaagccagccccagacacgggcgacacgaacaacaagcagaggaccaaagggaggcaaaggcaggaaaagcgagacaacccagagagaagaccgagccacccagagc

SEQ ID NO: 179484 - RNA, 82 nt, Homo sapiens
cgcgcgccgccggcgaaggaggaggcggccggggaacaccgaggccagggggagccgaccggagcggaaccccggggcgagg

SEQ ID NO: 179485 - RNA, 60 nt, Homo sapiens
ccaagggaaacaccaagacaacaccgacagaaaggcacggccgacacagccaagggggaa

SEQ ID NO: 179486 - RNA, 85 nt, Homo sapiens
gggggggccaccgggcagcgggggagcggcgcagcggcggcagcggagagcgagagaggggagcaggaggaaccaaggaaacacc

SEQ ID NO: 179487 - RNA, 40 nt, Homo sapiens
aaccccgcccacagcacgagagcagagagacccagcacga

SEQ ID NO: 179488 - RNA, 72 nt, Homo sapiens
cgcagaagaaggcagagaagaggagagaagacgaaggcggagggaagcgagcaacagagccggcacagaaca

SEQ ID NO: 179489 - RNA, 100 nt, Homo sapiens
ggggagcaaaaccaacgccggccggagcagcagcccgagaggcagaagaggccggaccggcgcacacagacccaggaacagagagcagggagcgcaccac

SEQ ID NO: 179490 - RNA, 72 nt, Homo sapiens
cggcggccggaagcacgcgcccgcacccgggaccagcacaaggaacagagacgccaagcccgggcccggagg

SEQ ID NO: 179491 - RNA, 79 nt, Homo sapiens
gaaccagacaacccagaagagcaccaaagaaaccagacaagagcgaagggggacacaccaccgggaacaagccgccggg

SEQ ID NO: 179492 - RNA, 67 nt, Homo sapiens
agaaagaaaacacaacaagagccccgaggagacggaacgcgagacaaaaagaaaaagaagggacaag

SEQ ID NO: 179493 - RNA, 72 nt, Homo sapiens
aagaagacagaacgcccccaccaccgcaaacaacagagccgcgcacccagccggggcagggcaagccacccg

SEQ ID NO: 179494 - RNA, 83 nt, Homo sapiens
gcagacgcccggacgcacacgacaagcagaccggaagaccgacggaagaccacaccccgagggagcccaggacaccacgagaa

SEQ ID NO: 179495 - RNA, 36 nt, Homo sapiens
cagggaccaagaggaaacggccacccagacaaacca

SEQ ID NO: 179496 - RNA, 81 nt, Homo sapiens
ccgcccgggggcgccgcccaccgcgcccgccgaagagaagccagccgaggcgcgcccgcagcggaggcagcccgccagccc

SEQ ID NO: 179497 - RNA, 77 nt, Homo sapiens
gagcaaaagcccacacgcgcacacagagcaaagacccagcgggaaggcggagcaagcagaaacccgcgagcagaacg

SEQ ID NO: 179498 - RNA, 103 nt, Homo sapiens
gcggcgggcagagcgagccggagaagagggggcccggggggaggaggggcaggcccggcgcagccaggcccggggccaagagcaacaagaaacgaaaaaccgg

SEQ ID NO: 179499 - RNA, 76 nt, Homo sapiens
gggcggaggcagggaagggagagcgggccgggaccaggacggggcgaaccgagcaccaggcagaggacagccagcc

SEQ ID NO: 179500 - RNA, 91 nt, Homo sapiens
cggaggcccgggggcgacaggcgcagcggccgcagcagcagcggcagcacaggcacacagcaaagagaaacagagggaggaccaagccaca

SEQ ID NO: 179501 - RNA, 74 nt, Homo sapiens
gacgcccagcccagaacgaggaaacacaaaccaacggcgaggacgcgaggggcaaagggccaacagaagcagaa

SEQ ID NO: 179502 - RNA, 55 nt, Homo sapiens
cccccgagaacgggacacaggaccaacaggaggcaaacagaagcccacccccaac

SEQ ID NO: 179503 - RNA, 78 nt, Homo sapiens
ccccgcaagccaaaaagaacgcgggccaggcacgacaccgcaacgacacagcagcgaagcgccggagaacgcacggga

SEQ ID NO: 179504 - RNA, 117 nt, Homo sapiens
gagaaaccggacagcagaggaaacgagggacaacacagacccaccagcagagccagaaagacaaagaccaaaagacagacagaaggagaaaacgaagaggagaagaagaagaagaag

SEQ ID NO: 179505 - RNA, 69 nt, Homo sapiens
aacccaagacggcgggagccggaacgggccaggaaagacaggaaggggacagaaaccaagcaagacgca

SEQ ID NO: 179506 - RNA, 64 nt, Homo sapiens
gccaaggagaagccccagcggcagaagccagagacccacggcagggcaaccccaccgcggaagg

SEQ ID NO: 179507 - RNA, 53 nt, Homo sapiens
cacaaagccggaaacaagacaccgaaaggacaggcccgggcaggcaacagacc

SEQ ID NO: 179508 - RNA, 72 nt, Homo sapiens
gggccgaaacggccaggagagccaggagagcagcaagccggccaggcagggggcagaaagacaacaccgagc

SEQ ID NO: 179509 - RNA, 66 nt, Homo sapiens
aaaggccggaggcaccacaacacgaccccgcaagcaggcaaccgaccgaacggcgccccggccgac

SEQ ID NO: 179510 - RNA, 52 nt, Homo sapiens
caggggaaaaaaacggagggaacgagggccggagcgagggagagcaggaaca

SEQ ID NO: 179511 - RNA, 80 nt, Homo sapiens
cgggcgcaagcaggcggcgggggccgcgaccaggacgagcacagcgacgaacacacacaccagaccggagaagcacagac

SEQ ID NO: 179512 - RNA, 79 nt, Homo sapiens
ccgccgacgcccgcgccggcgccccggcgcagaaagcggacgagcggcaaagcccgcagcgccgggaagaagccggccc

SEQ ID NO: 179513 - RNA, 76 nt, Homo sapiens
ggacagcaggccccgcgccgggagaggagccaagcccaacgggacgggaaaacggccacagccaacgacgcagcag

SEQ ID NO: 179514 - RNA, 76 nt, Homo sapiens
aaggaagacgggcggagcgccacagccaggagacacgcagaagaggcggccacccacgagccgacggcaaacgcca

SEQ ID NO: 179515 - RNA, 34 nt, Homo sapiens
agcggaagccagagcggagaggagcgccggccag

SEQ ID NO: 179516 - RNA, 73 nt, Homo sapiens
aaaaccaaccagaagacgaacaaacagcaagaaagaccacaagaccagcgaaggcaagagaggggagggagaa

SEQ ID NO: 179517 - RNA, 76 nt, Homo sapiens
aaagacaggcaaaaggcaacccaggcaggagggccaggccggacaaagaggccaggagacacgccaccgccggcgg

SEQ ID NO: 179518 - RNA, 50 nt, Homo sapiens
gccggccgagaaggcagaggcggcaacgaaagcaaaccgagagcaggcga

SEQ ID NO: 179519 - RNA, 113 nt, Homo sapiens
gaggacgcagaagaccacaacagggacaccggccagcgcagcacgggacgcgaccggaaggcaggccggcaagaagccaacggagaaccaaggccaagaccagaaccagcccg

SEQ ID NO: 179520 - RNA, 50 nt, Homo sapiens
gcagaaacagagaaggaacagggaggagcgggagcacccgagcggaagac

SEQ ID NO: 179521 - RNA, 57 nt, Homo sapiens
gacaccccgggaccgcggggccaagcagagaggagccgcggagagagaagcgggacc

SEQ ID NO: 179522 - RNA, 72 nt, Homo sapiens
agagaaaaccacggacaagaaagcgccaaaaacaacaccaaaaagccgcaggggccacgaacgacgcacgga

SEQ ID NO: 179523 - RNA, 57 nt, Homo sapiens
gaggaaaagggcagggacagcgcaggcagcaggagacgacaccaagaggaaaaacca

SEQ ID NO: 179524 - RNA, 77 nt, Homo sapiens
ccaggacagccacacgcgccaagcaggaggggccgaacagcaagggcaggaaccacagagaacagcccggacacgcg

SEQ ID NO: 179525 - RNA, 67 nt, Homo sapiens
accaaagggaagagaaacgcaaccggacggaaaagaaccaacaggaggaagccacaaacgagggagc

SEQ ID NO: 179526 - RNA, 70 nt, Homo sapiens
gggggcaacgaagacaacaaaagagcccgagaaagacagcaaagaaaaggagaagaaaggaaaaaaacaa

SEQ ID NO: 179527 - RNA, 85 nt, Homo sapiens
ggaacacgcacaaaaaagggcagaagagaagcaggaaggaggcagaggcacaccgaaagcccgaggagggccgagcggaggggag

SEQ ID NO: 179528 - RNA, 68 nt, Homo sapiens
gccaggagcacagaagagcgaggaggggacacgcgcccaccagggggagccagcagccgggagcgcca

SEQ ID NO: 179529 - RNA, 77 nt, Homo sapiens
ccccggcggagaagaagcgcggccgcaccggccaagggcccaggacagaaggcgggcaaggagcgccccccgagcac

SEQ ID NO: 179530 - RNA, 58 nt, Homo sapiens
ccagacggcagggaggcacaaaggggaacacagccagaacaggaacacaaggaaagac

SEQ ID NO: 179531 - RNA, 62 nt, Homo sapiens
acgggcggcccagcgggcgagacggaggagggccagagagaccaccggcggccaggacagag

SEQ ID NO: 179532 - RNA, 75 nt, Homo sapiens
gcagggggcacccgcggccggcccggggccccgggaccggcgcccccccggacagcaccagaagcgcgcgcgcac

SEQ ID NO: 179533 - RNA, 38 nt, Homo sapiens
ccggcagcaggcaaaaagacacggaaccagaggcagca

SEQ ID NO: 179534 - RNA, 79 nt, Homo sapiens
ggcgggggcccagacaccggccccgcagcaccgaaggacagaagaggacccagccaacgacaagaagaggaagcccagg

SEQ ID NO: 179535 - RNA, 73 nt, Homo sapiens
aaaacgaccaagccagagaacagcccccacgcagcccagaagcgagacgacgggaccgaaggaccccgccaga

SEQ ID NO: 179536 - RNA, 64 nt, Homo sapiens
cagggggcaggacgaccagcgggaggccagaggaaggagaaacgggacacggggaaggagccgg

SEQ ID NO: 179537 - RNA, 81 nt, Homo sapiens
ggcaacgcaccggggccgccaacagcaccgccggccaggaggagagcgcaccaccaaaaaggcaaacacaccagccccaga

SEQ ID NO: 179538 - RNA, 69 nt, Homo sapiens
ccaagccccaacggcccccgcgccgggcgcagcggccagggggcagaacagggaagccgacagcaaggc

SEQ ID NO: 179539 - RNA, 72 nt, Homo sapiens
aggacccacaggagcccagcggcagaaggaaaagaaaagccaagaggaaagccgagggaagggaagaggcga

SEQ ID NO: 179540 - RNA, 40 nt, Homo sapiens
cgcagcaaacagggcccaccaggagggagccgagcgcgcc

SEQ ID NO: 179541 - RNA, 81 nt, Homo sapiens
gccccagcccaggccggccgcgccagggaggagggacacacgacaggcccgagagggaacccacaccaaaacacccacaga

SEQ ID NO: 179542 - RNA, 72 nt, Homo sapiens
aaaggaggggaaaaagacaagaaaagaaagaaagccacaccaaaagccaagggacagaacaggcaaaagaaa

SEQ ID NO: 179543 - RNA, 79 nt, Homo sapiens
gggggcccgcggggcgagcccggaaaaccagaccagaaacggaggagcccgccgaagcagagcccgggggcgcaccagg

SEQ ID NO: 179544 - RNA, 73 nt, Homo sapiens
agagcgagaaccacgaagagcgagaaacacaagcacaaggagagccgacaaggagcgaaccaagaagaagagg

SEQ ID NO: 179545 - RNA, 82 nt, Homo sapiens
caaggagccgacagggggacacagccaggacacagccagaagcggagggaaagcacagaagaaggcggaagaacaaagaacc

SEQ ID NO: 179546 - RNA, 76 nt, Homo sapiens
ccaaccccaacccggagagcggcgaggcgaagcgcgaaagaggcagaagaagggggagagccaaagaagggcccaa

SEQ ID NO: 179547 - RNA, 57 nt, Homo sapiens
gagacaaggcacccacagaaggccacagaagcgagagagagaccaacggcaacaacc

SEQ ID NO: 179548 - RNA, 81 nt, Homo sapiens
ccggagcgcgaagccaggacgccggcaccacaccaagaccaggacaccccacccaggggccaaccgcaaagagagcaaacg

SEQ ID NO: 179549 - RNA, 89 nt, Homo sapiens
gagccagcggcgaggaggggccccagcagcccccgaaggcccacaggacaggagagaaagacggcccaggaggccagagccacgaagcg

SEQ ID NO: 179550 - RNA, 72 nt, Homo sapiens
caagggaaagccaacgccgcagcgcaaacgagagaaagaagggacccagccacagccgaaagggcggcagaa

SEQ ID NO: 179551 - RNA, 91 nt, Homo sapiens
cgagaggacaggcggaggccccagggaagcgcagaaagcaggcgaacccgcggcgcaaaacgggcaccagccggggaaaggagcgcagcgc

SEQ ID NO: 179552 - RNA, 49 nt, Homo sapiens
aacaaaaaagaacaggggaaagagaccaaaaaccaacagagaaagagga

SEQ ID NO: 179553 - RNA, 69 nt, Homo sapiens
ggggagccaccacacccagccacaaggaccccaacacgggccgacagagcaggggccgcaccaggggcc

SEQ ID NO: 179554 - RNA, 81 nt, Homo sapiens
cacgccggagaccgcgcgccacaacggcggccaagggaagcgcgagcgcgacgagaaagcggaggccccgagccccggccc

SEQ ID NO: 179555 - RNA, 79 nt, Homo sapiens
aacaaaaaaggcacaaaaacagaggggagacagaaggaagaaagagaggccggagaaaacaccaaggaccccaccacgc

SEQ ID NO: 179556 - RNA, 84 nt, Homo sapiens
aaaaggcggcgccgaggagcgggacaacccaggagcagacagagaagcgcgcagcagcagacggccgggggccccagagcccca

SEQ ID NO: 179557 - RNA, 114 nt, Homo sapiens
gggccccaccaaccggaaaaagacccccgcgccccgcgaccccacacggcaagcggggcgcagggggcggggccgacaaaacagacggggcggcgggccgggccgggggacccg

SEQ ID NO: 179558 - RNA, 62 nt, Homo sapiens
cggcagcccagcccggcccggcagcgacaggaagacccgccccgaagccgccccccaggaag

SEQ ID NO: 179559 - RNA, 102 nt, Homo sapiens
cggagacgcgccgcccccgggagagccagaaagaggacaggcgcgggcagcgggaagcgaggccccaggggggaccacgaagaaggcggcagaaagggaaga

SEQ ID NO: 179560 - RNA, 85 nt, Homo sapiens
gcagccggggggcgccaaacccacagggcggacacaaccaggccgacgcagggacccgccccggaccccccagaagggcgggagg

SEQ ID NO: 179561 - RNA, 83 nt, Homo sapiens
ggaccgcaggagggagacccacagcaagacaccgggacccccgaaagccagaaagggccgcaagcagggggaacacccgccca

SEQ ID NO: 179562 - RNA, 62 nt, Homo sapiens
gggccgggagcgcgcagccagccccaagcggacccagcgcagagaagcgagacgggacggac

SEQ ID NO: 179563 - RNA, 87 nt, Homo sapiens
gcgggagagcgaggcacggcaaggggccggagggccggcccagaacgcaggcagaggggaggagacacgaagcgacgcagagccaga

SEQ ID NO: 179564 - RNA, 64 nt, Homo sapiens
gaaagcccggcggaagccgaacgaacccaggaggaagacagcgaaccgcagaagaagacgaaca

SEQ ID NO: 179565 - RNA, 106 nt, Homo sapiens
ccgacgccacccacccccggcggcagcagcagaccacccagcgaaggagcagaaccgaccccacccagaagcacccaagccagggagcggcaaaagcaaaagggcc

SEQ ID NO: 179566 - RNA, 71 nt, Homo sapiens
agcacgagagaaagggacgccggaaaaaagggaacgaaagcaaggcaaggaaacaaagacaaaagagagaa

SEQ ID NO: 179567 - RNA, 84 nt, Homo sapiens
cgcccggcgggccggaccaaggcccaggaaggggcgcagcacgcagccgcgcgacggcggagccccgcggaggacccaggagag

SEQ ID NO: 179568 - RNA, 72 nt, Homo sapiens
accgaaaggaaaacaagggcagcccgccgcgggaacagacagaggaagacggggcagagacgggacacaagc

SEQ ID NO: 179569 - RNA, 73 nt, Homo sapiens
cccgccccacacgggaacccccagggaagaagaaacccaagcccacccggagaaagagcgcgcacgaaagcac

SEQ ID NO: 179570 - RNA, 97 nt, Homo sapiens
acacaacccgaggagcaccagggggcccccaggaccgaccgggaggccgaccggcgagccgagcccgaaccgccgacagagcgcagccgccgccgcc

SEQ ID NO: 179571 - RNA, 78 nt, Homo sapiens
acgggcggcgaacggcggaggcaggaaggacgagcccccgcggagacagcccgaagaacccgaacgcaagcggcaacc

SEQ ID NO: 179572 - RNA, 72 nt, Homo sapiens
agacgcagggcgcccccggcagcacagcaccagaagcagcacgagccccaggcagaccaaagacaaagaccc

SEQ ID NO: 179573 - RNA, 66 nt, Homo sapiens
gaaaaggacccaaggacgggagaaacacaccgagaagagcggaagaacaacggcgcagaccggagc

SEQ ID NO: 179574 - RNA, 85 nt, Homo sapiens
cgaaccaggaccaggccccaagcccgaggcccagaggaggagccagggggaagaggggcagcgcaaaggcccaggccaacgacag

SEQ ID NO: 179575 - RNA, 73 nt, Homo sapiens
cgcggcggggcgcaaaccgagacaagcaccccgaagcgccgaaacagccaacccgcaacaacggcagaagaaa

SEQ ID NO: 179576 - RNA, 76 nt, Homo sapiens
aggaccccagggagagcgggcagccccaggggacaggcggccaaaaggcaacaggcgacaggaggaaacacagacc

SEQ ID NO: 179577 - RNA, 46 nt, Homo sapiens
gagcggaggagcaggagcccaaaaggcagagcgaggagagaagaag

SEQ ID NO: 179578 - RNA, 62 nt, Homo sapiens
gagccgggcgcagaaccagaccgggagcacgcacgccacgaagagggagcccaggcggcagg

SEQ ID NO: 179579 - RNA, 60 nt, Homo sapiens
agcccggagcaggaaaaacacagagacagacggcggcaggaccaaagcagcagaccacag

SEQ ID NO: 179580 - RNA, 85 nt, Homo sapiens
ggcaggagcggcggagacgaggccaccaggaaagccgcagccccggaagaagaccaaaggacaaaaaagacggagagagaacagg

SEQ ID NO: 179581 - RNA, 77 nt, Homo sapiens
cagacacaaaggaaccagagagagcaaggaacagcaagccaaagagcggcgggccacccaagaagcaggaggaccag

SEQ ID NO: 179582 - RNA, 77 nt, Homo sapiens
aagaaacaagccgggaaagggacaagaagggcaaagccgaaaaccagacccaaaagagcaaacaaccgacggagaag

SEQ ID NO: 179583 - RNA, 71 nt, Homo sapiens
gaaccagagcccaaaggcagagccccgccccgccgagcgcagggcggcccgacgccagcgccagcaccgcc

SEQ ID NO: 179584 - RNA, 82 nt, Homo sapiens
gacggaagagggcagacggcaaggcccggccccacaagcacagaccccccccgcggcccgccaggcgacccacggacagacg

SEQ ID NO: 179585 - RNA, 60 nt, Homo sapiens
ccaaggagagcaaaagcgacagaagggggaacaccaggcaggaaaacaagcaacacgccc

SEQ ID NO: 179586 - RNA, 77 nt, Homo sapiens
cacagccgcagacccggagaagagggagaagcacgcacggggagccagcaaaacccagcagccagaccgccaggcag

SEQ ID NO: 179587 - RNA, 68 nt, Homo sapiens
cagaagagcgggggaaagaggacaacagggaaaacaagaagagcgaaggaaccagaccaaagagacgc

SEQ ID NO: 179588 - RNA, 80 nt, Homo sapiens
gccaccggcacggggcgggcagcggcgccgggcacaggagggaagagcaaggcccaggaagcagcgaagggggcagaagc

SEQ ID NO: 179589 - RNA, 76 nt, Homo sapiens
ggaccccgccccgacgaggacgaccaacaggcagcagcgggccccgccaccggcacaccgaaggcagacaggagaa

SEQ ID NO: 179590 - RNA, 73 nt, Homo sapiens
cagcgccagcaggggggaagccagaacacgccaaggcaagagggccgcgggcagaggcccagggagggccaag

SEQ ID NO: 179591 - RNA, 54 nt, Homo sapiens
ccaaaggcccgacaaggagacccggaaagcgccaaagaccaagcgcgcgccagc

SEQ ID NO: 179592 - RNA, 54 nt, Homo sapiens
gcaccagagaccccacccagggggccacacgcacggagcagaggaagcgcggaa

SEQ ID NO: 179593 - RNA, 61 nt, Homo sapiens
aagggaaggccagcagcgcgcggagaagaacggggagccagaaccggagcagcaaagccgc

SEQ ID NO: 179594 - RNA, 67 nt, Homo sapiens
caggcaccacaaaaagacgacagcagcagaagacagacacaacaccggaccaggaaggcacacggac

SEQ ID NO: 179595 - RNA, 57 nt, Homo sapiens
cacaggagcccggacggcacaggggagacccaggaacacaagcaccgaagggcaaag

SEQ ID NO: 179596 - RNA, 81 nt, Homo sapiens
cccagcccaagaaagccaagacaggccgacggcgcaaggccacggcaagcaccgggagcagcagcgaagccagccaccggg

SEQ ID NO: 179597 - RNA, 76 nt, Homo sapiens
gggaggccacaggggccgaaacacagagcaaggaaggaaccgggagaaggacagagcgcagaccacccggaagccg

SEQ ID NO: 179598 - RNA, 55 nt, Homo sapiens
ccccaacgggggcacgaagggggacacaggcgagaggggcggcagaggaacggga

SEQ ID NO: 179599 - RNA, 76 nt, Homo sapiens
gccgaccacacaagggagggcggagggaaccaaagagagcgcagagaggacgccaggaaaaaaggaagcacagcag

SEQ ID NO: 179600 - RNA, 80 nt, Homo sapiens
cggaaagaggcagaggaggaaggcagcaagaagggacgaccaccacagccacacgccaaagggcacaccacacggaacaa

SEQ ID NO: 179601 - RNA, 68 nt, Homo sapiens
ggacgacggccccagccagcgacggagacgcccgcaggggacggcaagcagagaaagggaaacccgcc

SEQ ID NO: 179602 - RNA, 99 nt, Homo sapiens
cggcggcacccgcacccggggacaagcgcgggaacggcgcggaagaacaccccaccagaccacccagcaagcccacaaaaaaggcacaagcagggacag

SEQ ID NO: 179603 - RNA, 76 nt, Homo sapiens
ccggggccgccgccggcccgcaagggcccgcacaccccaggggacccaagggagagagggaacggcgaaagggcag

SEQ ID NO: 179604 - RNA, 41 nt, Homo sapiens
gggaggccgcaggagggacccacaggagaagccagaggagc

SEQ ID NO: 179605 - RNA, 72 nt, Homo sapiens
acgcaggccgagccgagagcccgacccggccaggcggggccacgcaggggccggcggggcgcgaagaagcag

SEQ ID NO: 179606 - RNA, 71 nt, Homo sapiens
caaagggcccaccaagaaccgacagcgacagcaagcaagcccccggcgccagagcaggcaaccggacaaag

SEQ ID NO: 179607 - RNA, 67 nt, Homo sapiens
gcagggcgcagacggagcggagcgaccgagagaggaggcccaaggaacagcacagcagcgacacacg

SEQ ID NO: 179608 - RNA, 77 nt, Homo sapiens
gcaggagcggcggccaggccagacccgaaggccaggagacccgaccccaagaaaaaacaccagcagcccagcaacca

SEQ ID NO: 179609 - RNA, 52 nt, Homo sapiens
aaccgcaggccacacaaaaaagaggacagagaggggcacggcggaaggggcc

SEQ ID NO: 179610 - RNA, 79 nt, Homo sapiens
gcacaaagcaggagaccccccccaggccccagcaggaggacccgccggaccagccacgaaaagccagagacaagggggg

SEQ ID NO: 179611 - RNA, 71 nt, Homo sapiens
ccgcgcagccgaaagagacaggcgcacacggaggaaaaccggaagccacagaaaagacagcccacaaacca

SEQ ID NO: 179612 - RNA, 54 nt, Homo sapiens
gccagccggggcggccggccaggaaccacccgaagaaacgcggagcgaacccgg

SEQ ID NO: 179613 - RNA, 70 nt, Homo sapiens
ccaggagagaaagacaaagaaacgggccacaggaccgcagcaaaagacaaggggacggcagcccaaagaa

SEQ ID NO: 179614 - RNA, 78 nt, Homo sapiens
aagccgcccagacggccaccggcgggaggaacaaaagacggagccaggggagaaacacaaaaagacagaaacggggca

SEQ ID NO: 179615 - RNA, 51 nt, Homo sapiens
gcgggaaacgggagggaaccagcaacaagccgcgacgcacaaggaaaaaca

SEQ ID NO: 179616 - RNA, 74 nt, Homo sapiens
ggcggcccaccaacaggaacagggcagacgagcggaggacacccaacccggagggaacaggcacgccccacccg

SEQ ID NO: 179617 - RNA, 76 nt, Homo sapiens
cagagggcaggacgggcaacaaaccacacaagagcgccccaaacccaagaaggaagcccagagcccaaagaaaaac

SEQ ID NO: 179618 - RNA, 91 nt, Homo sapiens
ggagggacccagcggggccccgcggccccggcggggaagaccgcggcgaaggcaaaccgacaccagcgacacaagcgcgagggaaccacag

SEQ ID NO: 179619 - RNA, 67 nt, Homo sapiens
cgggaaccgaagagagccgggcaaaaccagagaaggaacagccagaagaagacaggcgggaagagcg

SEQ ID NO: 179620 - RNA, 68 nt, Homo sapiens
aaggaagaaacccccagccgacgcccgcgccccccagcaaggcaggacaaaaccggagaaagcgacag

SEQ ID NO: 179621 - RNA, 79 nt, Homo sapiens
cgcgcccggcccggagcccccagcgcagcggccgcgaaagaggaacagagcgaaggcggaacggagcagcggcgccggg

SEQ ID NO: 179622 - RNA, 76 nt, Homo sapiens
aaaagaagcgcaacccgagccagagaaaccagcaacagcagaagagcggagccagaggagcggcaagagacaacca

SEQ ID NO: 179623 - RNA, 55 nt, Homo sapiens
ccccgagagcggccgagggaagaaaccagcgcaaggcacgggcaggagacaacca

SEQ ID NO: 179624 - RNA, 76 nt, Homo sapiens
ggggaacaagacgcaaagcaagagaccgcgcagcaccccaaaggagaagcgagaggacagaaagaaaaaccaccaa

SEQ ID NO: 179625 - RNA, 81 nt, Homo sapiens
cccgagagggagcccgcggacgcagccaaggggacccccgcagccgaagcaagccacacaaacccagagggaagagggcac

SEQ ID NO: 179626 - RNA, 67 nt, Homo sapiens
accagcgagcgggcaagaaaaacaccagcaaccgacggcagcaacaaggacaggcacagccccgcca

SEQ ID NO: 179627 - RNA, 59 nt, Homo sapiens
ccaagcaaggggagacgccccagggcgcagccggccagagacccaaaacccaagacacg

SEQ ID NO: 179628 - RNA, 55 nt, Homo sapiens
gaagaacaaaccccgagcacaggccccagaacagaagccgccccggaaagcacga

SEQ ID NO: 179629 - RNA, 82 nt, Homo sapiens
gcggagcacaaccccaaccccccagccaacgggagcgcagggaccgggcggcgggaggccgaggcccgcaagcagagccagc

SEQ ID NO: 179630 - RNA, 77 nt, Homo sapiens
ccaaagaagaggaaagagcccggaagacgcggcgccggaggcaaagggagagggaaacgggagcggcgaaagaaaaa

SEQ ID NO: 179631 - RNA, 53 nt, Homo sapiens
agacgcagggcgcccccgggagcgccgaccccaagaacggcacaggagcggag

SEQ ID NO: 179632 - RNA, 81 nt, Homo sapiens
cgcgggaagcaggacgcgccgcgccccaagaacgccaaaagacgaacacaaagggaaagaggagaggcacccgaaagccag

SEQ ID NO: 179633 - RNA, 75 nt, Homo sapiens
aagagaggaagacccccagcgacccaggaccacagaagaccgcagcacacagacaccaccaccaagaagcacgaa

SEQ ID NO: 179634 - RNA, 72 nt, Homo sapiens
gccaggggggagcaaaccaaacagaagcccagacggcacaccaggacggccgacggaagcgccacaaaggcc

SEQ ID NO: 179635 - RNA, 53 nt, Homo sapiens
gccagagaaaaagaaaagacaccgcacgaaagaaggagggagagaaaccaaac

SEQ ID NO: 179636 - RNA, 78 nt, Homo sapiens
gggccgaaggcgggggggggaggcccgaggcaggacccagcagccagcgaagccccaaggaagccgggacgcccacag

SEQ ID NO: 179637 - RNA, 81 nt, Homo sapiens
ggggcagaaggcccggaggcaacggcccgccacgggccccgcagccgcgcccgagcgcccgagcagggacagcgaccacgc

SEQ ID NO: 179638 - RNA, 57 nt, Homo sapiens
agagaccaacgagaccgcacagcgcccacggcacagcagcagcggcgaaccgacaaa

SEQ ID NO: 179639 - RNA, 71 nt, Homo sapiens
gaagaagggaagggaaaagagccgggaacaaggggaagggggccagacaaccagggaagcacagacacgcg

SEQ ID NO: 179640 - RNA, 79 nt, Homo sapiens
agcacaaaggaggagacaacgacaaagagcaaagcacaaagcaacaggaggacaacacacacaaagaggcagaaaaaga

SEQ ID NO: 179641 - RNA, 78 nt, Homo sapiens
gagaagcaaaaaagagcaccggaagcagaacagcaaaacagcaagaagccccagagacccaacaccggagcaacaccg

SEQ ID NO: 179642 - RNA, 107 nt, Homo sapiens
gggagcagcgccggggccgccgaccaacacccgaggcggacgcagagacaggcagagagacgaagagagaagcagggcagaaagagcggaaacgagaagagcaaaca

SEQ ID NO: 179643 - RNA, 70 nt, Homo sapiens
cgaggcaagacaggcgccacgccaagaacagccagcaaagacaagagcagaccagcagccgcagcgcgac

SEQ ID NO: 179644 - RNA, 71 nt, Homo sapiens
cggcaacaccagacaccaaggacagcccgcaagcagaggaagggcagcagaacaacgcagccaccagccag

SEQ ID NO: 179645 - RNA, 65 nt, Homo sapiens
gaagaacgacagagaggagggagaacaagcaacggcggggggcccagagagggccgaaccggagg

SEQ ID NO: 179646 - RNA, 78 nt, Homo sapiens
agcgcgagcaggacaagcgaggacaagaaaccacagagccgagaacagaaagggagccagacagaccagcgaaccggg

SEQ ID NO: 179647 - RNA, 85 nt, Homo sapiens
ccgcacgaagcaaggggggcaacaacaagcacggacaaacccagcccaacggggggagaacccaaaggaaagccgcagcggggag

SEQ ID NO: 179648 - RNA, 71 nt, Homo sapiens
aaagcaagaaccagagaaacacacgccgaggccaaagaaagagggaaaagaggacgaggcgcgaaaaggca

SEQ ID NO: 179649 - RNA, 101 nt, Homo sapiens
ccggggccccgcgggaccgcggccacggacggaacccggagggcggaccacaagagccgaaggacgaggcaagcccgaagaccagagaaacggaaaggaca

SEQ ID NO: 179650 - RNA, 46 nt, Homo sapiens
acccccgcgacacaggaaaaccgccagaacagcccaagcccaagag

SEQ ID NO: 179651 - RNA, 54 nt, Homo sapiens
ccaacggaccgcaccaacacccgcccgggagaagagaagaggggcaaggccagg

SEQ ID NO: 179652 - RNA, 79 nt, Homo sapiens
gagaaacccaggccagcaaagacacacccacaagccacagaaaacaacagcgcgaagagaaaccccgcacacgaaggcc

SEQ ID NO: 179653 - RNA, 48 nt, Homo sapiens
ccggcgcaccggacaaccacggcggcaaggccagcccgcagcgggccc

SEQ ID NO: 179654 - RNA, 74 nt, Homo sapiens
gaaaagcacccagagagaggcagggccacaacccagaaacccacacggcaaggccggacagaagccagccagag

SEQ ID NO: 179655 - RNA, 75 nt, Homo sapiens
ggccaaagaagcagcaaccgaaaggcgagggaaaaagacggaaaggcgaccgagaacacagagaacgggaaacaa

SEQ ID NO: 179656 - RNA, 73 nt, Homo sapiens
gacagacaaagaagaccgcacacaagccaacaacaagcgcccgaagagcggaaagagagaagaaaaccaggcc

SEQ ID NO: 179657 - RNA, 74 nt, Homo sapiens
gcacaaacacagcccacagagccgaagaacacaaggaggcgagagaaagaagccccgggcacagcagcaggacc

SEQ ID NO: 179658 - RNA, 71 nt, Homo sapiens
ggagggcggcgcgccgagcgcaccggacacgcaaggaaacgagaggacggccaaaaccccaggagcacaag

SEQ ID NO: 179659 - RNA, 72 nt, Homo sapiens
gcgaccagcccaccgaaaggagagaagcagggggacaggagccagagaaaaaacgacgggcaacaccggcag

SEQ ID NO: 179660 - RNA, 63 nt, Homo sapiens
cagaccaacaagaggacccaggagaaacgccccaaaggggggccccagcccggccgaacgggc

SEQ ID NO: 179661 - RNA, 57 nt, Homo sapiens
accgaaagaaagacaacccgaaagaacaccgaaccagggcacacagggaccaagaag

SEQ ID NO: 179662 - RNA, 68 nt, Homo sapiens
cccacgccgccaagccgccccgaccaaagagagcgagggacagcaaagggaaagagcacaacacaggc

SEQ ID NO: 179663 - RNA, 76 nt, Homo sapiens
gcccagagccacagcagccacgccaaggagcaaggaggcccccccgacaaggaggagaggcacacaccaccaagga

SEQ ID NO: 179664 - RNA, 71 nt, Homo sapiens
aagaccagagacgaggggaggaacagacaacggcaagcggagaagagcaaggccgaaccgagaggaagggc

SEQ ID NO: 179665 - RNA, 69 nt, Homo sapiens
acgggcccccaacacaccgaaaccccaggggccaccgcaggccgcgcgcgcgggacgcgacccagcccc

SEQ ID NO: 179666 - RNA, 83 nt, Homo sapiens
gaggaggaaccggagaccccgaaaacggaagcgcagggagaaggaagaggggaaaagacccggaggaaagcccagagggaagc

SEQ ID NO: 179667 - RNA, 74 nt, Homo sapiens
cggagggacccggcccggaggaagaaagccaaggagggcaggaaggaacggcaccgaggcacgggggcccggca

SEQ ID NO: 179668 - RNA, 97 nt, Homo sapiens
aagcccgaggagcacggaggaagcacacccgccagggacgggcacgggaaggaccccacagccgcccagcaggcccagcggcaccagacagcccgga

SEQ ID NO: 179669 - RNA, 79 nt, Homo sapiens
gggcgccgcccaccgcgcccgccggagcaggccgggcccgccagggcacgcgcccgccacgggaagcccgagaagccgc

SEQ ID NO: 179670 - RNA, 73 nt, Homo sapiens
cccggggacaaagcgagcggcacacgggacaaccaagagcaacagaccacggcccccacccgagacacaacag

SEQ ID NO: 179671 - RNA, 76 nt, Homo sapiens
caccagcagacaaagacaggaagaaaaagagaaccaagcacccaccaaggcaggagaccaaaacgagggccaacaa

SEQ ID NO: 179672 - RNA, 75 nt, Homo sapiens
cagaccaggcacccgcaggagaggccccaacaagagcccaaaaggcagagcgaggagagaagaaggagggaaagc

SEQ ID NO: 179673 - RNA, 60 nt, Homo sapiens
gccccagcaccgccccccggaagaaggaagaggacaaacagcaagacaagacagccaccc

SEQ ID NO: 179674 - RNA, 77 nt, Homo sapiens
gcagcggggcggcgcgcggcgcggcggcggcccgccccgcggcccagggaagaagcccagcggaggcgaacggcccc

SEQ ID NO: 179675 - RNA, 74 nt, Homo sapiens
gggcacgagaaggcaaaaagcaccgccacaagacagagcccagaggcaggcgaaccgcagaagcgcccagagaa

SEQ ID NO: 179676 - RNA, 74 nt, Homo sapiens
aaaaacaaaagagaaaaagcagcacaacacaacccacaaggaaagcaacgaaaagaaccgaccaggcccgcgcc

SEQ ID NO: 179677 - RNA, 76 nt, Homo sapiens
ggcgaccggaagccaacacccaagacacgcagaacagacagacagaagagccgaaaaaacacaaccacccgacaag

SEQ ID NO: 179678 - RNA, 70 nt, Homo sapiens
cacaagagaccgggagagaaggccagcgacagccgggaggccccaagcagcgcacccggaacccaccgag

SEQ ID NO: 179679 - RNA, 84 nt, Homo sapiens
gcaaagagacaaggagagaagaaccaaagaagcaaaacacgaggagggagaagacgcaacaagaagaggacccacaggagaacc

SEQ ID NO: 179680 - RNA, 74 nt, Homo sapiens
ggagcagccagcgggccggggagcgccgccgccgcccgagggagcccaaaaggcagagcgaggagagaagaagg

SEQ ID NO: 179681 - RNA, 83 nt, Homo sapiens
cgagggacaccggccacagcggagaaccgccgcaaaggaagaggcagcccagaaaagccacaggagaagaaaggaagagacga

SEQ ID NO: 179682 - RNA, 72 nt, Homo sapiens
ggcgaaggccagagcacgagcacgggaagaggacacagaacagcggagccgaggaccaaaagcgaagggcga

SEQ ID NO: 179683 - RNA, 84 nt, Homo sapiens
cagcagcggcccacgcagaacccgggagaggagaccagaacgaacccccccccccggacacaggaacgccacaagaaacaacag

SEQ ID NO: 179684 - RNA, 100 nt, Homo sapiens
cgggccccgggcgcccagagagcgcccccccggaaggcgggaaagcaaaggacccgagccccaaagacagaaaagccccgagacggaagagaagagaaga

SEQ ID NO: 179685 - RNA, 70 nt, Homo sapiens
caccccaccaaaaaacacagaccaggaggagaaaaggaaccaaagaaggagagacggggcacccgagcca

SEQ ID NO: 179686 - RNA, 84 nt, Homo sapiens
ccaccaagaagagaagaagagggagccggacaagacaaggacagccacgaggcggccccagcgcgggcgacaggccgacacccc

SEQ ID NO: 179687 - RNA, 74 nt, Homo sapiens
gaagaagagaggagggagaacacagaaaccggccccaggaagcgggcaccaacagacaaccagggcaagcagag

SEQ ID NO: 179688 - RNA, 53 nt, Homo sapiens
accacaggaaagcagcgaggaacacagggcagcagaccgcgcgccagacgcca

SEQ ID NO: 179689 - RNA, 98 nt, Homo sapiens
agcaaggcgaaccacccggcacccgggcaccgcggaccgccccacgggcagagacaggcaacagacggcaacgaaaggcacaaaaacgcaacacaaag

SEQ ID NO: 179690 - RNA, 41 nt, Homo sapiens
cagcgagcgcgccgccgccgcagcagagagggaaagggcgg

SEQ ID NO: 179691 - RNA, 76 nt, Homo sapiens
caaagagacggaccaacaagagagcacgccggaaaaaggagcccaagccccaccaccagcacacccccccacgccg

SEQ ID NO: 179692 - RNA, 73 nt, Homo sapiens
ggacccaggaagagaagaaagaggacaacagacgcaagagccccgacagcagccaagaccccccgaccggcca

SEQ ID NO: 179693 - RNA, 72 nt, Homo sapiens
caagcggccccccaccacaagaaacaggcggccagcccggaaaaacagacaaggcgggcaacaaacgggaga

SEQ ID NO: 179694 - RNA, 64 nt, Homo sapiens
aacggggaaggcaggagcgagaggagaggcacacccagaagccacaggagaagcaagaggcggc

SEQ ID NO: 179695 - RNA, 74 nt, Homo sapiens
aacaggccagcccgagacgcgccagcacaccccgaccgcgccagaccgcacagaggcggaccgcagcgcgcccg

SEQ ID NO: 179696 - RNA, 82 nt, Homo sapiens
aaggagacgggaccccggcccagcagcagcagggaacgagcgggccgaacaggcccacagggcagaggaaaccggaggcgca

SEQ ID NO: 179697 - RNA, 80 nt, Homo sapiens
ggaacgaaaagcggaaaaaagaagcaaaacaagaaagaggagaaacgacgacaagaggcgcaagaagaaccagacgcgga

SEQ ID NO: 179698 - RNA, 76 nt, Homo sapiens
gcagggggggggggaagccgcagcggaaagcaggagcacaggaagaggacaccagcccgggagaagaggcaacacc

SEQ ID NO: 179699 - RNA, 71 nt, Homo sapiens
aacaacaccgaacagccagggcacagcggaggcgacacccagagagcccagagaccgggggagcggccgag

SEQ ID NO: 179700 - RNA, 89 nt, Homo sapiens
gaggaagaaagcacagggacgagacagaacaacgagagagagcaaaaacaccagacaagagagcacagcaagcgggagcaggcagacca

SEQ ID NO: 179701 - RNA, 78 nt, Homo sapiens
ggagaaagggcagaggcccccacggggcgacgaaagaggcgcaaaagaaaagaaccaaaggaaaggaccagcgaagcc

SEQ ID NO: 179702 - RNA, 73 nt, Homo sapiens
gcgggcggaggcgaagcaaacagagaggacgaggggcgaggaccacgaaggcggcgagcggagccgagccgac

SEQ ID NO: 179703 - RNA, 74 nt, Homo sapiens
gagccggccgcgggcgcgaccggaggcaggcaaccaaacgggcgaacaaaaccagccacggagggcaggccgca

SEQ ID NO: 179704 - RNA, 43 nt, Homo sapiens
gaccaagcgggcccagaagcgggcccacccgggcaggagaggc

SEQ ID NO: 179705 - RNA, 76 nt, Homo sapiens
gcgccaaggaaaaggacgagaacgccgcgacagaaaacagcgaaagcagcagaagcacaggcagagaaaagccgca

SEQ ID NO: 179706 - RNA, 70 nt, Homo sapiens
ggccgcggaggggcacgagcgccacaaccccagcccgggaccgggagcccgggaccgggagccggggggc

SEQ ID NO: 179707 - RNA, 82 nt, Homo sapiens
gagagcccccaccccagacaggggaacagggcacagcccacccagaaaaacaaccaccagcgagcaaaaaggcaaagaccaa

SEQ ID NO: 179708 - RNA, 81 nt, Homo sapiens
cgagagcagcccccggaaaaagcaagcgaagacacaagaagaccgagcaaagagaccccggaacgccaagccgacgccagc

SEQ ID NO: 179709 - RNA, 80 nt, Homo sapiens
ggcagagccaggagcccgggccgagacaaaagaggagggggagccgcgggccaggacccgagacaacaccaagaagaaac

SEQ ID NO: 179710 - RNA, 80 nt, Homo sapiens
aagaagacgacaagaaagaaacagacagaagagggaaaagagggccagaagaaacacaggaagccaccaccagagggcaa

SEQ ID NO: 179711 - RNA, 71 nt, Homo sapiens
aacgagcaaaacgggcgcaacgaccaaaggaacaggcgagagggcacagagccacaaggggcgagcgaccc

SEQ ID NO: 179712 - RNA, 87 nt, Homo sapiens
gggccagccgcgcagccagccgccgccgccccagccgcccgcggccgggagcggagccccgggacacagaaaagcccacgaggaaaa

SEQ ID NO: 179713 - RNA, 68 nt, Homo sapiens
agagccaaacaacgccacagaaccaccaacccagcaagcgaggagaaaggacgaaaacagaccgcaag

SEQ ID NO: 179714 - RNA, 79 nt, Homo sapiens
ggcgcccggagggcagcgagcaaggccagcagagcccaagggcgccagccaccacccagacgaccagacgagagcagac

SEQ ID NO: 179715 - RNA, 73 nt, Homo sapiens
gaaaaccaagaaagaacgagggcagaacagacaccccaaacaaagcaggcccagcggggcgagggagaacagg

SEQ ID NO: 179716 - RNA, 71 nt, Homo sapiens
gcggaggggagggagacaggaaacggcccccaccgccgccggcacagacaccaccagaagcgggaggccac

SEQ ID NO: 179717 - RNA, 41 nt, Homo sapiens
cagcccccagagcgggaccacagaggaggggacacaaagga

SEQ ID NO: 179718 - RNA, 80 nt, Homo sapiens
ggccacgaccaagaagaagccgcggaccccgcggccaaacgccagggcgaaggaaccacagcacagccacagccccccag

SEQ ID NO: 179719 - RNA, 63 nt, Homo sapiens
acacgccgaggcccaccagacgaccacgacgaggccggggcacgggaggggcgaccccggggc

SEQ ID NO: 179720 - RNA, 79 nt, Homo sapiens
ggacggaggagcaggcgagaagagaagggcacgacgcaaacggagacaaagaaaggcaaacaccgagcaagaaaaaagg

SEQ ID NO: 179721 - RNA, 82 nt, Homo sapiens
aacgaaggcggacagcccgcgaaaccaggcaagggacacgaggaggggacggcccgccacaggcacagacgaggagggaagc

SEQ ID NO: 179722 - RNA, 85 nt, Homo sapiens
gggagggccacaggaggcggcgggccccgcccgccgaagggaacgaaacccaagagccagaggcggcaggaggagcgggggccgg

SEQ ID NO: 179723 - RNA, 85 nt, Homo sapiens
acaaagacgcaacaggagaagccaagcacgcgacgaggcggagagcagagcgagaacccgagcagcgccagagcaacacaccgcg

SEQ ID NO: 179724 - RNA, 39 nt, Homo sapiens
caccaccgaagcacgaacacagccaagcccagcacgggc

SEQ ID NO: 179725 - RNA, 70 nt, Homo sapiens
agcccccgcccaggagaaagccagggggaaaccgagggacagcagaccacagcccggcaggcccaaaaac

SEQ ID NO: 179726 - RNA, 83 nt, Homo sapiens
cggagcccggaagcagcagccaccgaggacggggaccgccaggcacccagagaagcaggcgaagacgcccgcggcagcgccga

SEQ ID NO: 179727 - RNA, 59 nt, Homo sapiens
ccacaggggggggcaaacccgagagaacgggacaggaacaggcaaaaaggacccacgcc

SEQ ID NO: 179728 - RNA, 84 nt, Homo sapiens
caaggcagggcacacagcggggcgcagagaaaaagacagaacccgacaagccaaggaagagacaagaaccagaggacaacgacg

SEQ ID NO: 179729 - RNA, 67 nt, Homo sapiens
ggggcgcggaggccaagaccggggggagaagcggacggcgcaggcaagagcgggagcggggcgccag

SEQ ID NO: 179730 - RNA, 75 nt, Homo sapiens
aagcccgaggcgcaagagacaagacagaaaagacccacggaaaagaaacagaaagccacccccggagcaagaagc

SEQ ID NO: 179731 - RNA, 54 nt, Homo sapiens
cgccacgcgcccggaccccgccaccaagaacgcagacccccaaaggagacagac

SEQ ID NO: 179732 - RNA, 79 nt, Homo sapiens
gcccagccccgaagcgggaacaggacccacagaaggaggaagaggaggacacagaagaacaacaacagaagaagagaag

SEQ ID NO: 179733 - RNA, 73 nt, Homo sapiens
cagccggaaaagacagcccaccgaacaacgccagggacagacaaaaaaaggaggcggcaacagggaacgccgc

SEQ ID NO: 179734 - RNA, 43 nt, Homo sapiens
cacacgacgggacccacgaggccaaacgaccaagaaagcggga

SEQ ID NO: 179735 - RNA, 65 nt, Homo sapiens
ggccagcagagggcgaagcaagcagaccacgccgacagaggagggagggggggaacggaacccag

SEQ ID NO: 179736 - RNA, 71 nt, Homo sapiens
agccgggcgagaggagcgggcgcccccccgccagaaagccagagagcgaagaagggggggagcgaaggccc

SEQ ID NO: 179737 - RNA, 75 nt, Homo sapiens
cggaaaacgaagacagcagggaggcaagcaggggggcaaaggaaagaaggcagaaagggaggccaggagcgcggg

SEQ ID NO: 179738 - RNA, 76 nt, Homo sapiens
ccaggccgacagccgcggccgggcccgaggaacaagcgggaaacggagccaccaacaagcgggagaaagacagcaa

SEQ ID NO: 179739 - RNA, 73 nt, Homo sapiens
cagcgcagcagagcgccaagacgcagagacagaccaacacccgagaccacccagggaccgaggacggccgggc

SEQ ID NO: 179740 - RNA, 79 nt, Homo sapiens
gggcgggcaagccggacaaggaccggggaccgagagacacgagaggcgagggacgacagagcaagcggcagagggcaag

SEQ ID NO: 179741 - RNA, 69 nt, Homo sapiens
caccaccagcagcgagcaagccagcagacgggaaagggccagcgcaaggacgaacacacgaaagcaaga

SEQ ID NO: 179742 - RNA, 91 nt, Homo sapiens
ggacacacggaggcgcgggcgccacagcaacacccagagcgagcgaacgcgcccagcgcgggcacggagcccccaccgccagcaaccgcgg

SEQ ID NO: 179743 - RNA, 70 nt, Homo sapiens
aaaaacagccccaaccgcgaacggacaaaagacagcgggaacagcccgggccgccgcacccaccgcggag

SEQ ID NO: 179744 - RNA, 85 nt, Homo sapiens
gcccgaccgggacggccggcaggccgccgccgagcggacagcccagagcaagcacacggaggcccgggagccagaccgggagccc

SEQ ID NO: 179745 - RNA, 84 nt, Homo sapiens
cgaccgagcccggcgggccacgaggaggcgaagcgcggcgggcaggcgcacgagaaaggaacaaagagcaagccagaaaaccca

SEQ ID NO: 179746 - RNA, 74 nt, Homo sapiens
aacaaaaggagcagcagaagccgaccaggccagccaggaaagcgggagcgcgggagcaaaggaaagaagagaag

SEQ ID NO: 179747 - RNA, 61 nt, Homo sapiens
agacacgaggagaagaaagagggaagcacagagaccgaaggagcagacgaggcacgagcgc

SEQ ID NO: 179748 - RNA, 59 nt, Homo sapiens
cccgaggaacagcagaaggaagcagcgccacaaggagcaaccaccagacggcaggaagc

SEQ ID NO: 179749 - RNA, 78 nt, Homo sapiens
cggagccaaacgagaggggccagccaaggacagggaggcaagacaaaagagagaagaaagcaaagggaggggccagca

SEQ ID NO: 179750 - RNA, 102 nt, Homo sapiens
gccccaccgggccggcacgcacccccgacgacgcccgccgcccacgagagcccaggggccacgcaagaacaaagagcggagggaaaggaagcaccaccacca

SEQ ID NO: 179751 - RNA, 69 nt, Homo sapiens
cagaggagaaaaaaagggccaagacggagcagaaccgagaagacagcagcgaaccaagaccgccccacc

SEQ ID NO: 179752 - RNA, 62 nt, Homo sapiens
gcagccaagcaggaccacccaccagccaccagggcgagccggcgcacgggccgcggaaccgg

SEQ ID NO: 179753 - RNA, 54 nt, Homo sapiens
accgacgacccacgaggggcagggagaaggagaggccacaagggagcaccagcc

SEQ ID NO: 179754 - RNA, 79 nt, Homo sapiens
gcagagaaaaagggacggcagcgaacaggcggaaaaggccacaaacaggacaaagacgaacagagacagaaaagagcag

SEQ ID NO: 179755 - RNA, 76 nt, Homo sapiens
aaagggcaggaaccacgaaggacagaagacaccacagaggaaaacggagagcgaagagggagcacacgagacgaac

SEQ ID NO: 179756 - RNA, 58 nt, Homo sapiens
cacagcaagacgacaagcacgcccccacccaggaaggaacaaccccacaccaccacac

SEQ ID NO: 179757 - RNA, 57 nt, Homo sapiens
gcgcaccacaagagagccagcggagccgagccggagaacgaggagaccgccagagga

SEQ ID NO: 179758 - RNA, 75 nt, Homo sapiens
cccagccaaagaaacaagccgggaaagggacaagaagggcaaagccgaagaacaggagacagcggagaaagagcc

SEQ ID NO: 179759 - RNA, 69 nt, Homo sapiens
gcaccggacacgaggagaaacagcagaaacgcaccaggccaaagaaagagaacggggagagcacgacca

SEQ ID NO: 179760 - RNA, 70 nt, Homo sapiens
cccagcccaagggaaacaggcaaaggaagaagccagcgagcggggcgcgcggccgcccgagagcacccag

SEQ ID NO: 179761 - RNA, 85 nt, Homo sapiens
ccggaaagcaggaccgcgacggcagcagagcagaagaaggagagacgaccacgcaacagaaaaagagcgcacccaagggaagagc

SEQ ID NO: 179762 - RNA, 63 nt, Homo sapiens
gacaccacagacgcccaccgaaccgacagcgacgacaggacacggcaaagagaccccccaggg

SEQ ID NO: 179763 - RNA, 51 nt, Homo sapiens
cccaggcccaggacgcaagagaggagacaggacagagacggagaagggaac

SEQ ID NO: 179764 - RNA, 44 nt, Homo sapiens
caggagcaaccagaaggccaggaggaagaagacagaagagcccg

SEQ ID NO: 179765 - RNA, 77 nt, Homo sapiens
aagagaacagcagcgccgcccgccgacagccaggcccgggagaacaaacgaacacaagagacagggaacaccagacc

SEQ ID NO: 179766 - RNA, 79 nt, Homo sapiens
aagcccggccacggcgccagagccggggacgaaagggaaggacaggcagagcaaacaaggcggacaaaggccaaaggac

SEQ ID NO: 179767 - RNA, 82 nt, Homo sapiens
ggccgcagcgggcccgagggggcccgggaggcaagagccaggacaaggaccaggggcccaagcccaccagccagcagaccgc

SEQ ID NO: 179768 - RNA, 76 nt, Homo sapiens
acgcggaggacggggcagcgcggcggggcggacagaaccaaggagagacacacggaacaagagacaaaaaaagaag

SEQ ID NO: 179769 - RNA, 72 nt, Homo sapiens
caagaaagagaacaaagaaaagaagccggacagaaagaggaagaaaggagaaggggggagccacacaaacgg

SEQ ID NO: 179770 - RNA, 99 nt, Homo sapiens
ccaaaagcaagaaaccgggagacccccccagcacaccaccagcaaggagaagaagcaggcacagaccccaagaagacccagcggacggggaggggcgcc

SEQ ID NO: 179771 - RNA, 67 nt, Homo sapiens
gcaaaaaaaagcgggcgaggaagaggacaacaccggagacgccggcccaagagccgcagggaggagg

SEQ ID NO: 179772 - RNA, 77 nt, Homo sapiens
cgagagccagagagagcggacgacagaacccggccgacccggaccaacaaccccaaggaagagaaaggcaggaacac

SEQ ID NO: 179773 - RNA, 81 nt, Homo sapiens
ccggccacccagcacgcgcagccggggccagccccgggcagccccgcccggacaggccaaggaaaaggaacagagagagca

SEQ ID NO: 179774 - RNA, 65 nt, Homo sapiens
ccagccgcgaagagacccgacagaccggccagaacacacagaaaagggccaaaggaagaagaagg

SEQ ID NO: 179775 - RNA, 47 nt, Homo sapiens
acgcagggcgcccccgaccaagagggggaaagcacagagcaagacca

SEQ ID NO: 179776 - RNA, 39 nt, Homo sapiens
agggcagcggccacacacagacgagagacggggcgccgg

SEQ ID NO: 179777 - RNA, 72 nt, Homo sapiens
acaacggccgcagggccgaggagacaggagaagggggcacgcaagcgggcagggaaagaacagggggcagcg

SEQ ID NO: 179778 - RNA, 68 nt, Homo sapiens
aaaccagcaggcaccaaggaaagcagaagacaagaaaacacagcggagcacgacagcaagagagcaag

SEQ ID NO: 179779 - RNA, 60 nt, Homo sapiens
ccaacgcccgggcgcgcgaggccagagagggggagaaacccgaaacccacaaacaagcag

SEQ ID NO: 179780 - RNA, 58 nt, Homo sapiens
gcacccagcaggccaacccgggcccaacagcaacaggccaaaggagcgccgcacccag

SEQ ID NO: 179781 - RNA, 69 nt, Homo sapiens
ggaagagagacggagccaggcagcaaaagggcagaaaagcagggcaagcagggaaaagagaaagaaacc

SEQ ID NO: 179782 - RNA, 78 nt, Homo sapiens
gcagggcgcccccggagaagacccgggaaggcgacagcgacgggcgacgacggccgggcccaggagaccggcaggcac

SEQ ID NO: 179783 - RNA, 67 nt, Homo sapiens
ccacgaacaccagacgaacaagagaacagaaaccgacgcccccgaaaaggacacagcacaagcaaga

SEQ ID NO: 179784 - RNA, 76 nt, Homo sapiens
ggaggcccacgccgccaggagcgcagcacagacggacccagaacaccggaacagagagcagaagaggcggccaccc

SEQ ID NO: 179785 - RNA, 84 nt, Homo sapiens
gcagcgacggggcagggcagagaagcgccgccacacacaggccacaggaacggaaggccaggaaaggggcggcgcacagccaag

SEQ ID NO: 179786 - RNA, 77 nt, Homo sapiens
gaaggcaacaaaacgcaggaaggcggagggccccgaagaacagagagaaagggcgcaaaaagaaagaaaacaaaagc

SEQ ID NO: 179787 - RNA, 78 nt, Homo sapiens
cgaaaaagcgggaaggccggaaaggaccagaccgcccaggaaacgggaagagcgagacaagagccaaggacagggccc

SEQ ID NO: 179788 - RNA, 72 nt, Homo sapiens
gacaccaggcccaagaaaagaacacggaccaacagaagcgcgcaagacgcaacacaaacgagaaagacagcc

SEQ ID NO: 179789 - RNA, 81 nt, Homo sapiens
ccaccccacgagccgcgcccaggacggaaggcgaccacaccaccccagacacggccgaccgccaagcacaacgccaaccca

SEQ ID NO: 179790 - RNA, 76 nt, Homo sapiens
gagcggcgagccgaaaagcgagcgcgaggaaaaggcggcgggaggggaccagaagccaggagaggcgccgggacgg

SEQ ID NO: 179791 - RNA, 79 nt, Homo sapiens
gggacggcggccccgggggcccggcgcccggggagacgggacggccgcgggccgcgcgggacgggaacggaaacgggga

SEQ ID NO: 179792 - RNA, 83 nt, Homo sapiens
gagcaccccccgccgcagcagagccgaggggaagacgaggcacaccgcaagaaggcacagggagccggaaaccaaggggaaga

SEQ ID NO: 179793 - RNA, 59 nt, Homo sapiens
aaccacaaacaagaaaggcccaaagcccacagcgcaaacgcgcaaacaccggacaaaaa

SEQ ID NO: 179794 - RNA, 72 nt, Homo sapiens
ccgcgccgccgaccccccggcgccgcgccggcggcggcgggcgcagcgcccccacaccccccggagggcgcg

SEQ ID NO: 179795 - RNA, 69 nt, Homo sapiens
cacaccgcaacccagcgagagaaagaacagccagcaaagacaagagcagaccagcagccgcagcgcgac

SEQ ID NO: 179796 - RNA, 51 nt, Homo sapiens
agagcaagaaaagggaggaacacacgagagagcgaccaaacccccacaaca

SEQ ID NO: 179797 - RNA, 73 nt, Homo sapiens
accgcgagagggaaagcacgcaaagccaagaaaagaggggacgagaaaaaaaagagggaagccggagcgagaa

SEQ ID NO: 179798 - RNA, 66 nt, Homo sapiens
cggagcgggcggggacgggggcgagaggaacgacaacccgggggagccagaagcgacccaggaggc

SEQ ID NO: 179799 - RNA, 54 nt, Homo sapiens
cggaaaggcaacgcgcggggagggcgggcccggaggacgagggacagacaaaca

SEQ ID NO: 179800 - RNA, 73 nt, Homo sapiens
ccgaaagaagacccacgagcaagcagagaaaccagaaaggacccaggaggaacgcaacaacacagaacaagga

SEQ ID NO: 179801 - RNA, 63 nt, Homo sapiens
gaaccagaagcgagagaaaagcccccaaaagcagcacaggcaaacgcaagacaagggaagcgg

SEQ ID NO: 179802 - RNA, 70 nt, Homo sapiens
caagaagaggcagaccccgccagaccaacaagcggagacgcgacccggggcgccgcgggggccaagccac

SEQ ID NO: 179803 - RNA, 82 nt, Homo sapiens
aagaaaccaaaaagccgagagagaagacagaaaccccaccacgcggcaggggccgccgaggaaaaagcaacaagaagaaaac

SEQ ID NO: 179804 - RNA, 40 nt, Homo sapiens
cagcacccacaaagcaacgggacccaaagcagaagccgaa

SEQ ID NO: 179805 - RNA, 74 nt, Homo sapiens
ggacccgaaggcacacaggaacaggaaacgacccacaggaacacagggaaagccagccagggcagcagcaagga

SEQ ID NO: 179806 - RNA, 58 nt, Homo sapiens
accccccgacaagaggaaccacagaggcacagaaacaaagacaggagcgcgaaagggg

SEQ ID NO: 179807 - RNA, 64 nt, Homo sapiens
gaacgaaagccccaccgcgccccagcggccacggaggggcccagggggaggcggcgcaacgcgg

SEQ ID NO: 179808 - RNA, 81 nt, Homo sapiens
cagcaggacgccagcgggagcccagagccgcggggaggaggggcccagcacccaggagcccgggcaggagcaccgccaaca

SEQ ID NO: 179809 - RNA, 72 nt, Homo sapiens
gccgggggccggcaaggaaacccaaccccagccccacaagacacggacacaccaagcccgggccaaggagac

SEQ ID NO: 179810 - RNA, 63 nt, Homo sapiens
gagacaaaaaagcccaaggacacagcaggggccagacaaccagacccgggaggcaagagacga

SEQ ID NO: 179811 - RNA, 99 nt, Homo sapiens
aacaagggacaaaccaaagaccaaccaagaggccagagagcaacaccccccagagacgaagaggagcagaaccagaagggacacacaggacggcaggaa

SEQ ID NO: 179812 - RNA, 73 nt, Homo sapiens
cagggcacgccgaccgagagacccaggcacccagggaaacgagaggggagaaggcagcaaagaccagaaccgc

SEQ ID NO: 179813 - RNA, 74 nt, Homo sapiens
aaaagccgagagacacggacaacagaggaggggaacaggaggagaaacggccccagcccacaagaagaaagcca

SEQ ID NO: 179814 - RNA, 86 nt, Homo sapiens
gaagagaaccggaagagcagagccagcagcaggaccagggccacgccccacgggcccccggcgccccacggcaccaccaccccaag

SEQ ID NO: 179815 - RNA, 36 nt, Homo sapiens
gaaacaccacccaggagggaagcaccacagaaacag

SEQ ID NO: 179816 - RNA, 81 nt, Homo sapiens
ggagagccgaaggagcagcccaggaccgagaccggagcagccggggcggagcggagccgggcacaaagccagcgagcgaaa

SEQ ID NO: 179817 - RNA, 68 nt, Homo sapiens
cacgcggaacacccagaagaaaagggagaacagaagaacagaaaagaaagcaccaacacaaaaagcga

SEQ ID NO: 179818 - RNA, 65 nt, Homo sapiens
acaacgacccaggggggagaggaccagggccggggggaaaaccaagcaccgacggaaacaggcga

SEQ ID NO: 179819 - RNA, 78 nt, Homo sapiens
agcagaggcggagcccgcagaccgcagaaggccggagacaccagcagggcacagcgcgagcgccgcgccgggaagcag

SEQ ID NO: 179820 - RNA, 64 nt, Homo sapiens
caacgccacaaagaaaagagggaaaagcagcgccccagaaagggcggagaacggaaaagcacca

SEQ ID NO: 179821 - RNA, 80 nt, Homo sapiens
cagccccccaacaccgcccgccaggacgaccgaggagccagaggaaagcgggggcacacagaaaccagcaaggaaggaga

SEQ ID NO: 179822 - RNA, 80 nt, Homo sapiens
acgagcagcagagccgaaagaccgaaaggagagaagaacaaaggaacgcggaagcccggcaacagaccccccaccacgcg

SEQ ID NO: 179823 - RNA, 73 nt, Homo sapiens
gacggacaggaagaggcaggcggaaaagggagcagggaagccaggaggagcaggccgggcccgggaggagcag

SEQ ID NO: 179824 - RNA, 69 nt, Homo sapiens
gaaaagacccaccccaagggcacaaaaccgccccagccaggaggcagcagccaaggaaagccaggaaac

SEQ ID NO: 179825 - RNA, 76 nt, Homo sapiens
cagggggagaggcggaggccaggcagcgaggggccagcacagggcagcgcgaaaaaccaaggcgggacccgcgaag

SEQ ID NO: 179826 - RNA, 73 nt, Homo sapiens
aggccaagagcaagcaaagggaacaagcaagaaaagccccagaagggccgaaccgaaacccaagcccccccaa

SEQ ID NO: 179827 - RNA, 81 nt, Homo sapiens
cgcagcgcgcccagcggcccaggcgccgcggcgaggagcgagcgcgcgaggggcggccgagggcaccggagcagagcgcca

SEQ ID NO: 179828 - RNA, 83 nt, Homo sapiens
cgcgggagcgaggcccgcggagcgccgccgcgcggaccaaagacgaccaccaaagccagcccccagaacacgccgacaggaca

SEQ ID NO: 179829 - RNA, 74 nt, Homo sapiens
gaggaaaggacgccgggaggccagaggcgagccgcccggaccgcgcaccacaggacacggggcaggggggcccc

SEQ ID NO: 179830 - RNA, 74 nt, Homo sapiens
gacccggggacgcgcaagagcaggggcaaaggagcagagaacgacaagccacacgaggacagcccgcaacacca

SEQ ID NO: 179831 - RNA, 81 nt, Homo sapiens
cccagacggcacagcccaggcaggccgaaggcgaggggagcccccgagcgcccgcgacgcagcacggacccacaacgaggc

SEQ ID NO: 179832 - RNA, 79 nt, Homo sapiens
gagacgggcccccaaaaagcggcaaaagcaagagaacaggacagggcagaccgccagcagcacagcaagccacagagag

SEQ ID NO: 179833 - RNA, 79 nt, Homo sapiens
ggccccagcaccaggagccacgcccagacgcgggcgcggaaaccgccgcggagcaacagagcgccaaaaagaggacccc

SEQ ID NO: 179834 - RNA, 72 nt, Homo sapiens
gccgggccgccacgcccccgcaaagggccagcgagggcacaccaggccgaggggaagacccagcaggaagaa

SEQ ID NO: 179835 - RNA, 67 nt, Homo sapiens
aagaggaaaacaggaaagaccgaccaggacacgagcgggaacgcaaacgaaggccagaggccaaggc

SEQ ID NO: 179836 - RNA, 55 nt, Homo sapiens
agcggccagggccccacaggggcacaaccgagcggggacagaaaggacagagcac

SEQ ID NO: 179837 - RNA, 71 nt, Homo sapiens
aaaacaacaggaacagggaaagcggcgcaaggaacgcagcaccacaaacccaccgacaacgaggacgaaca

SEQ ID NO: 179838 - RNA, 74 nt, Homo sapiens
aaagcccacagaggccaaggcaagccagagaacacccgccgcgcaaaagccagacgacaaacaagcaacaggcg

SEQ ID NO: 179839 - RNA, 53 nt, Homo sapiens
cgggcgcagggggcgaaagcgagcagaggcggaccggcgccagggcccggaag

SEQ ID NO: 179840 - RNA, 89 nt, Homo sapiens
cggccgaaggcgaacgccgcggccaaggagccgccaaagccagacgggagccgaaaggaggggcagcccgggacagcccgggaaaagga

SEQ ID NO: 179841 - RNA, 85 nt, Homo sapiens
gagcgagagggaagagagcacacgggccaggggagagagaagaaccgagcaggacgaaaggaacccggaccgagaggccaaaggc

SEQ ID NO: 179842 - RNA, 72 nt, Homo sapiens
gaaaaaccaggagacacaaacagaaaaggaagaaagggacaaagagaggagcaggccacagagcgaaaaaaa

SEQ ID NO: 179843 - RNA, 76 nt, Homo sapiens
agaaacgagagcagaaggcaggccaggaggaaggcgaacaaggaccgcgacaccaacagcgaccagaaggggcccg

SEQ ID NO: 179844 - RNA, 84 nt, Homo sapiens
cgaaggggagcaggccgagcccgagccgcagcacgagccaaaccgaggaaggaacgcggccacgaaaaacgaaaaaagccgccc

SEQ ID NO: 179845 - RNA, 77 nt, Homo sapiens
ggagagcaggccagcggaggcgggggaccggagcagccagagcggagccacacaccgagggagagaagaacaagggg

SEQ ID NO: 179846 - RNA, 63 nt, Homo sapiens
gaaaccgcagaccagaacagacaccaaaagagccccgcccagaggccaccaaccccaagaccc

SEQ ID NO: 179847 - RNA, 81 nt, Homo sapiens
aaagacgggcgcaaagagcgaagaaaccagccagaagcagcaggaaaaaaccaggaacgccccaaaccaggagaaaagaaa

SEQ ID NO: 179848 - RNA, 94 nt, Homo sapiens
cacagaagcgggagaagggccggcggacgggaacgacgcgagcagaagaggcagcaagccccacacgggccgcgcccccaaggcggacaaccac

SEQ ID NO: 179849 - RNA, 80 nt, Homo sapiens
gcccagcccagcccagccagccacgcaaaacgccccaaccacgccaaagggaccaagcaaagcagcgccgggaagagaac

SEQ ID NO: 179850 - RNA, 78 nt, Homo sapiens
cgccgccccggagcgccggggcaaaagggagaccacaacagccaccaaacagaagaaccgcccaacggaaggagaagc

SEQ ID NO: 179851 - RNA, 71 nt, Homo sapiens
acacgagacgggcacaacgggcgaagggagagggcccaggacggacagggcaggacgacacacagacccac

SEQ ID NO: 179852 - RNA, 56 nt, Homo sapiens
ggaccccggacgagcccggcgaggccgacacggagcgacccgcaacccgaggaaaa

SEQ ID NO: 179853 - RNA, 58 nt, Homo sapiens
ccaaggggggggcacccccacaacgacagggaggccgcacagaggaggagcaccaaac

SEQ ID NO: 179854 - RNA, 88 nt, Homo sapiens
gcggcggcgcccaggcacccggcccgggaaccacggaaggagggggcgacacacaagcaggggggaccgacgagcaggcgagaaggaa

SEQ ID NO: 179855 - RNA, 39 nt, Homo sapiens
gcagcgcgaaggcgaagggaacaagcaccccgagcagca

SEQ ID NO: 179856 - RNA, 55 nt, Homo sapiens
gacacaaggcccagaaacacccgcccccaagacgaagcccagaagaaaaaagaaa

SEQ ID NO: 179857 - RNA, 74 nt, Homo sapiens
agcgacgggcacggcgcagcgcgcgggcacaaggaacaagcagaaagcacgaacaacgagaacaagacacgagc

SEQ ID NO: 179858 - RNA, 76 nt, Homo sapiens
gggcggcagcaccggcacccacaaggcccgggagcgggcccagggcaagccacagggaaggccagcggcgcacgga

SEQ ID NO: 179859 - RNA, 55 nt, Homo sapiens
cgcgcaaaggccccggcaagaaggaaaggcccgagccaaaagacccagagaaagg

SEQ ID NO: 179860 - RNA, 82 nt, Homo sapiens
ggaaccgccggccggacgccgacaccccaggccacgagccccaggccacggcagcaggcccagcccccagcgaagcagagcc

SEQ ID NO: 179861 - RNA, 67 nt, Homo sapiens
ccacaccggcgggccagcaggcaggccgaaccagggggagccaccccgcggacagagccaccgcgcc

SEQ ID NO: 179862 - RNA, 73 nt, Homo sapiens
ccaacaagggcgacgcccgggcgcgcagaacaggcgcgcggcgacacccacccggagcccgagcagaaggcca

SEQ ID NO: 179863 - RNA, 57 nt, Homo sapiens
ccaaccagggggaaacacagaacgcagggcggaccagagaacagaaacgacacagca

SEQ ID NO: 179864 - RNA, 59 nt, Homo sapiens
gcggcgcggggaccgcggcccggcgcgccgccaccaagaccgacaccaaaggcgcgcag

SEQ ID NO: 179865 - RNA, 109 nt, Homo sapiens
gcgccagcaccacgcccgcgccgcgccgccgccaccagcccaagagaaagggacggggcccgcggccgacaccagaaggccacacaccagcgacgcagcccaccacaga

SEQ ID NO: 179866 - RNA, 75 nt, Homo sapiens
cagggcccgggcccccgccagcggcggaaagaggaagaacggagcaaggccggagcagccagggcgggcacagcg

SEQ ID NO: 179867 - RNA, 65 nt, Homo sapiens
gacccaaaaggcgcaggggagcgcaccacacacaagccacagcaaggggaacccaaaaacgcgag

SEQ ID NO: 179868 - RNA, 74 nt, Homo sapiens
gcccgaccgcaggagggagaccacagcaagacgccaggacccacggaagccagaaagggaaggggaagcaggcc

SEQ ID NO: 179869 - RNA, 81 nt, Homo sapiens
gaaggccaaaggcgaaggccaaagcagccaagggaagcagaaagcgcacgggaagcaggaaaacgaggccgcgggccgggg

SEQ ID NO: 179870 - RNA, 75 nt, Homo sapiens
cccgaggagcaccagggggcccccaggaccgaccggggaaaggggagaacaggacccaggagaggaaaagaagca

SEQ ID NO: 179871 - RNA, 81 nt, Homo sapiens
gagagcagacccgaggagcccgcagacgcagcccagagagggggcagcgagcgagggggcgccgggggccaccgcacacga

SEQ ID NO: 179872 - RNA, 88 nt, Homo sapiens
ccgacaccaaaaaccaggccgccaccgcggcaaaggagggggaaggccagggccagacgcagcgccccagagaaggacgggaggacaa

SEQ ID NO: 179873 - RNA, 74 nt, Homo sapiens
gcggggcccgggccaccggggcggacgaagaacaggacaccaggccgagcacgaaccgaccaacaggcgagagg

SEQ ID NO: 179874 - RNA, 81 nt, Homo sapiens
acacacaccaccgccacacgcgcagcaccgggagcccagggcagaagccaaaccgaccacagacacaaggacaaggagaca

SEQ ID NO: 179875 - RNA, 77 nt, Homo sapiens
caaggcagagcagcgggggccacaccaggagagcgccaccccgaagaaaaaaggagccagaagaacaggaagacgcc

SEQ ID NO: 179876 - RNA, 80 nt, Homo sapiens
cgcagacagaggggcgacgaccgcacaacagaagggcaggcccagccccaggcccagggaacgaacacgaagggagcaga

SEQ ID NO: 179877 - RNA, 37 nt, Homo sapiens
ccaacggaacgcggaccaggaggaaagcagcaaaaac

SEQ ID NO: 179878 - RNA, 72 nt, Homo sapiens
aaagcgggaaggccggaaaggaccagaccgcccaggaaacggcgcagggagcaggagaagcggagcgaaggg

SEQ ID NO: 179879 - RNA, 72 nt, Homo sapiens
cgacaaagggaaccacgacagacacaaggagggagaacagcacaaaccacaacgaagcgaaaacgaacaggc

SEQ ID NO: 179880 - RNA, 87 nt, Homo sapiens
cagcaagagcggaggcgcccggcggagcagaggaaccacacgcgacagcccgccaaggagcacccccggggcacccccgccgaggca

SEQ ID NO: 179881 - RNA, 60 nt, Homo sapiens
caagacaagccagccgaggcaccaccagcacaaagcaagccagaagaacacacacacagc

SEQ ID NO: 179882 - RNA, 78 nt, Homo sapiens
acagggacgagggggcggaaggcagaaaaagaggcacgccagacacgacagcgggacgccccagaaagagcggaagag

SEQ ID NO: 179883 - RNA, 79 nt, Homo sapiens
ccccgcccccggcaggcacagcacgagagccgcaccgccggacccaaagcacggcaccggacagcggagcggaggcaga

SEQ ID NO: 179884 - RNA, 88 nt, Homo sapiens
gcggagacagagcaagaaaagcccgggagcagaagggaggcccaagacccacaacaaaaggccccaggagcagggccccaccacagcc

SEQ ID NO: 179885 - RNA, 34 nt, Homo sapiens
ggaccccgcccgaaaacagcaccagaaaaaggaa

SEQ ID NO: 179886 - RNA, 83 nt, Homo sapiens
gagagggaggcaacggccaaccggcaagaccagacgggaacgggagacaagcgcagcgaggaggaaaggcagagaaagcccca

SEQ ID NO: 179887 - RNA, 78 nt, Homo sapiens
aacgcagagcaaggacccaggggggaacagcagagacgcaacggaaaggcgcaggcagacaccagggcaagagcgcaa

SEQ ID NO: 179888 - RNA, 53 nt, Homo sapiens
cacaagcgcacaggaccgggagcaccacgaagaaacgcccagaggagccagaa

SEQ ID NO: 179889 - RNA, 76 nt, Homo sapiens
accacacgcaggacagccagcaagcaggggggcagaagaaaaagcaggacaacagggcaaggagcgggaggacaga

SEQ ID NO: 179890 - RNA, 81 nt, Homo sapiens
cccaccggaggcaggaccagcgcagcgcgcgaagaaggccgaaggaacaccccagacccccgaagccccagcgagccagag

SEQ ID NO: 179891 - RNA, 74 nt, Homo sapiens
agccacgagcaggcaacaggaacagagacgccaagcccgggcccggaggcacgagacaccagaagaaagggacc

SEQ ID NO: 179892 - RNA, 80 nt, Homo sapiens
gacacgagcaagaccggaccggcaccaccaggaaccacagagagaacaacaggcacagcaaaaacgaccggaaaagcaaa

SEQ ID NO: 179893 - RNA, 78 nt, Homo sapiens
gaccgaagcaccacaacgcaacacgagcgaggccgaagacccagaggaccccagcaccacagaaaccccacaccccgg

SEQ ID NO: 179894 - RNA, 74 nt, Homo sapiens
aaagagacacccagaagaagagcgccgagaaaaggcccggaccaagagacgaggaaaaccccacccacaaaggc

SEQ ID NO: 179895 - RNA, 47 nt, Homo sapiens
ccccaaagaacacagaccaccaaggagaggaagcagaaggagcagca

SEQ ID NO: 179896 - RNA, 87 nt, Homo sapiens
agccagggcacggccgggacggcacgggcgagagcgggaagagcacgcacaagcagagcgcacaccacggcgccggcaccggaggag

SEQ ID NO: 179897 - RNA, 73 nt, Homo sapiens
gggaaccggccccacccgggaggggggagcggcgggaggccaccgccagggcggagaacggaaaagcaccagg

SEQ ID NO: 179898 - RNA, 76 nt, Homo sapiens
aaaagaagaagcgaccccgaaggaaacaaagccagaacgcaaagcagagcaaacgagcaggacagcagggcgagaa

SEQ ID NO: 179899 - RNA, 85 nt, Homo sapiens
gaagcacagccaagcccccaaaggacggcaccccggcccaggacacagggacgggacgccacagagcagcaggcgcaaaaacgaa

SEQ ID NO: 179900 - RNA, 69 nt, Homo sapiens
gaccgacacccaagacaagacagcgcaaggcagagaacaagcagaggaaagacacgccagagaagaaca

SEQ ID NO: 179901 - RNA, 72 nt, Homo sapiens
gcggccgcgaaggccacggcaggggcagcaacggggcggcacacaaggagcgaagggcagggagaacgccag

SEQ ID NO: 179902 - RNA, 77 nt, Homo sapiens
aaacggagaccccgaagacggagaaacgcgggggaccgaggcaccaaaacgggacagaagccggcgccacccagaac

SEQ ID NO: 179903 - RNA, 77 nt, Homo sapiens
gcccggacaccggaagcgggaaaggaaggaccagaaaaagcgaagaggacagaagaagcgggagccgcagccaggag

SEQ ID NO: 179904 - RNA, 77 nt, Homo sapiens
gccccgccgccaagaggagcgagcggacccgcgaggcgggaagaaaaaaacaaacacaccagccccaagagacccaa

SEQ ID NO: 179905 - RNA, 51 nt, Homo sapiens
cgcaacacaagccaacccaacagaaccccaaacccagacgcagagcggccg

SEQ ID NO: 179906 - RNA, 75 nt, Homo sapiens
ccagcgccggcaggacccccgcgccgcgggaccccggcacgcccaggccgagcacgcggcagcggagagccgccc

SEQ ID NO: 179907 - RNA, 66 nt, Homo sapiens
aggggagacacgcgaaagcaaaccgaggaggaaaaggaagagccaacggaaaaaagaagaaaagag

SEQ ID NO: 179908 - RNA, 85 nt, Homo sapiens
caacgggccacacaacaagccaccgcgacccagccaaagaccacagcacccagacaacaaggacccgagcgaccagaaagccaac

SEQ ID NO: 179909 - RNA, 76 nt, Homo sapiens
agaagcagagccgccgacaaagggcacaaacgcagagagcacacgcgcaagcggcaggaagggcggcagccagagc

SEQ ID NO: 179910 - RNA, 61 nt, Homo sapiens
acgaggcaggagcaaagcgaggaggagaggaagaggagagaagcccacccaaagaaacagg

SEQ ID NO: 179911 - RNA, 73 nt, Homo sapiens
cgccgaccccgcgcgccagggagagcacaggagcacgggagcaggggcagacacgggacaccacggacccgcg

SEQ ID NO: 179912 - RNA, 54 nt, Homo sapiens
acacacagcgaccgggagcacaccacaggcaaggcaaaagcagaccggaaaacc

SEQ ID NO: 179913 - RNA, 72 nt, Homo sapiens
cggcacaaaggcggacacgaaaccaccgggaagcgccggggaacgcagaagggaagaacccaagaggacagc

SEQ ID NO: 179914 - RNA, 86 nt, Homo sapiens
gccgggggccggccgcgccggccggccgggaccaggggacgcggacgcaacagggaaaggagaccccaacaagccgcggggcaaaa

SEQ ID NO: 179915 - RNA, 67 nt, Homo sapiens
agaccagagaaaacgggaggacgcacccggggaaccagcaaacaagaagcaagaaaggacagcaaag

SEQ ID NO: 179916 - RNA, 85 nt, Homo sapiens
gagagagcagaacggcacagccccagcaacaccccgcagccgcgcaaaaaaaggagaggagcggaagacccggggggcgggcagc

SEQ ID NO: 179917 - RNA, 74 nt, Homo sapiens
accaaggcagcagcgacaggagggagcacaaaagaacaaaagggaaaaaaggacggcagcacacaacaaaacac

SEQ ID NO: 179918 - RNA, 73 nt, Homo sapiens
ggccgaggggcggacgcggccgaagaaggagccccccgagagcaaaccagaaaaccagaagccccggaacaca

SEQ ID NO: 179919 - RNA, 48 nt, Homo sapiens
gggcggcagagaggagaaggaagcacgagcaggccacaacaccgaaaa

SEQ ID NO: 179920 - RNA, 87 nt, Homo sapiens
cggccacggggccaccgccggcggccgcaggagcgacccacagacagaacaccagcaggaaaaaagagcggcagaaggccaaacggc

SEQ ID NO: 179921 - RNA, 68 nt, Homo sapiens
ccaaggagagacacaaggcaaagagccaggaggaacacacacaagggcagaaccaaaaggaaacggaa

SEQ ID NO: 179922 - RNA, 79 nt, Homo sapiens
gagagaacgcggaaggagacggagaagaagaccggggcgccggcagcgagcacccgcacagagagaagccaggaagaaa

SEQ ID NO: 179923 - RNA, 77 nt, Homo sapiens
gcagacagccggcaacaaggcaggcaggcccggagagccgcacgcgcggaaaggcccgcccaccaccggagcccagc

SEQ ID NO: 179924 - RNA, 83 nt, Homo sapiens
caggagccggggcggcgcaggaggagccgaggcgagccaacagcacagcaaaaggggacaagcaaccgccagccccaaccacc

SEQ ID NO: 179925 - RNA, 80 nt, Homo sapiens
caagaagaagaccgcacgacgcaaggacccacagaccggggcagggcggggggggagagcgcagcccacgcggaaggacc

SEQ ID NO: 179926 - RNA, 73 nt, Homo sapiens
agacaccacaccccgcgccgcggacaggacccaggggccaaccagaagacggagcaggcaaaggagaaaagcc

SEQ ID NO: 179927 - RNA, 71 nt, Homo sapiens
gaaaaaagagacccccagcaacacgcacggaccgccaaacagacgcaaaacaaaaggggccaaggacgcac

SEQ ID NO: 179928 - RNA, 114 nt, Homo sapiens
agaggcggacggcgggaccacaagacaacgcggagcggcgaagagcaaccagggaggggccaaagggagagggacaacacacgagcacaaacacaagcggagacagaagcacga

SEQ ID NO: 179929 - RNA, 80 nt, Homo sapiens
acggacacaggggacggagccaagaggagccgccgcggaccaccagaggccgaaaacgggagaccccagacgcaaccggc

SEQ ID NO: 179930 - RNA, 71 nt, Homo sapiens
gacccaaggccagaaccaggaagaggagggggaaagaaggggccgcccgaaagaagcccggaggggacgga

SEQ ID NO: 179931 - RNA, 60 nt, Homo sapiens
cgcaaccgaaggcacggggcaggaaacagaagagacccaaaaaacgcccaaggaccccac

SEQ ID NO: 179932 - RNA, 81 nt, Homo sapiens
gccgcccggggcagaccaggcagggcccgccccaccgggggccaccccagggaggagaagagggacccagaaggcgaggag

SEQ ID NO: 179933 - RNA, 41 nt, Homo sapiens
aacccagcccccaggaaagcgacaacgaagagaggaaagaa

SEQ ID NO: 179934 - RNA, 75 nt, Homo sapiens
ggaacggaaaagagggagcaaccgcgggaaccagcaggccgggcacccgaccacgcaccgggggcgcacggcggg

SEQ ID NO: 179935 - RNA, 36 nt, Homo sapiens
cgccggggagacccgcgaaagcaaggggaacaaccg

SEQ ID NO: 179936 - RNA, 65 nt, Homo sapiens
gagcaggcagagacagagaagaaacgccgggacagcccaccacaagcaggccccaagcccaacag

SEQ ID NO: 179937 - RNA, 44 nt, Homo sapiens
cccaaacccagcagagaagcgaaccgcaaaagggggagaaaggg

SEQ ID NO: 179938 - RNA, 36 nt, Homo sapiens
aaccggcacagcccccgggcaaaaggagcaggggac

SEQ ID NO: 179939 - RNA, 79 nt, Homo sapiens
ggagcagcggggacagacaaaaggacagcgacagacagcaaacacagccagaacagaggaccggggagaaggggggagg

SEQ ID NO: 179940 - RNA, 74 nt, Homo sapiens
acccaaaccaaccccagaccggagccagacagcagccaaggcacaaccaggcgacggacaaggccaccaaagga

SEQ ID NO: 179941 - RNA, 91 nt, Homo sapiens
aaaccacgaggccacagcacaggcaaccagggcgccagaacaaagaagagaaacgcagcgcaaccaaaaccacgcggagcgggaagaaaca

SEQ ID NO: 179942 - RNA, 83 nt, Homo sapiens
gaggagagcggaggcgggcggacccgagccagcgaccgaagcagaaggacaccaaacaaggacaccaaggacccaagccgaca

SEQ ID NO: 179943 - RNA, 73 nt, Homo sapiens
cccgggacaagccaggcaccccacacagacacaagaccggcaccacgcagcaaaccggaaaagggccaggagc

SEQ ID NO: 179944 - RNA, 68 nt, Homo sapiens
cggggggacgccggcggagacgcgggcgagggccgcaagagacaccacaaaaggacacccgagcgcgg

SEQ ID NO: 179945 - RNA, 72 nt, Homo sapiens
gcggcccccggcacaggcagcggaggagcccgaccgacccgggacaagagaaaaaaagggcgggcgaacaaa

SEQ ID NO: 179946 - RNA, 72 nt, Homo sapiens
cccgcccccgcgggcgccgggccaggacgggagaagacagaggagccagaccaagagacagcacaggcgagc

SEQ ID NO: 179947 - RNA, 72 nt, Homo sapiens
gcaaagagaacacgaaacaaccagccaaaggagcaagaggcagacagaccgagacgggcaaccaacaagaaa

SEQ ID NO: 179948 - RNA, 75 nt, Homo sapiens
gaaacccgccacgacaaccgcaccaacaaagacagccggaagagaaaggccccagcacacccccagcccagcccc

SEQ ID NO: 179949 - RNA, 83 nt, Homo sapiens
gggagccgagcgagggccccaccagcgcccagagcaggggacaggcaaaggagaaacaagaccccagggacgacaccccccag

SEQ ID NO: 179950 - RNA, 76 nt, Homo sapiens
acaccacaggaagccaacagcacgcacagaaaaaaaaaaagcaggaccaagcaagaaggaagcaccggggaaaccg

SEQ ID NO: 179951 - RNA, 86 nt, Homo sapiens
gcccgccgggacgccgaccgccgggacgagccggggccaaagcgaccaaccccccaccgcacgcagggggccccccgcccggggca

SEQ ID NO: 179952 - RNA, 80 nt, Homo sapiens
cccgccagcagcgggccgcgccgcgcccagccgccaacagcagcagacacagacccaccaagagcgggagacagaagccg

SEQ ID NO: 179953 - RNA, 62 nt, Homo sapiens
ccaccagacaagggagcagcggcaagaggaggacagggaacccagagaaggaaggaaaaccc

SEQ ID NO: 179954 - RNA, 76 nt, Homo sapiens
cgcagacagaaaagagggaacaacccaaaacgcggaaaagccaagaaagacccaaaagaccccagaccagaaagag

SEQ ID NO: 179955 - RNA, 72 nt, Homo sapiens
gagaggagcagaaggagcaaaaggcggacaggcagagagggcgaagaaaacgagaaacagagacgaagcgag

SEQ ID NO: 179956 - RNA, 82 nt, Homo sapiens
cgggaagggcgccaccccggagaggcgcaagacaggggcagacagagaggcagagcccagcaagaaaccaacccgggaccgg

SEQ ID NO: 179957 - RNA, 57 nt, Homo sapiens
acaggagacacaaagaagaggcgaccgaacacaaagggaagcagagccccgggccgg

SEQ ID NO: 179958 - RNA, 90 nt, Homo sapiens
ccgcggaagccgccgggccaggccaaggagggacagggcgccggggaagcggaagcacagagggaaggagaaggagacacagaaggagca

SEQ ID NO: 179959 - RNA, 70 nt, Homo sapiens
ccccggcacaaagcgcaggaacggaccaaggcgacaaccaccagaagcggagaccggggaggcagaacgg

SEQ ID NO: 179960 - RNA, 79 nt, Homo sapiens
agaacgcgcgccgcagcgccgccgcccgcggaagggagcccaagcgcagagccaccagaacaagcagaagaaagacaag

SEQ ID NO: 179961 - RNA, 70 nt, Homo sapiens
cgaagagcaccgggagcggcgaagaggcaccggaggagccaagaagagcagcgggggacacgaccgaagc

SEQ ID NO: 179962 - RNA, 93 nt, Homo sapiens
gggaccggaggagacacggcccgcaggcgccgaagaagggagaaaaggacccaagggggcaaaggcggaaacagcagaggacaccaggagagg

SEQ ID NO: 179963 - RNA, 75 nt, Homo sapiens
gacagcaccaacccaggcaaccgcccagaagggacaaacagagcaaagaccaaagcaacagagacccgagcggaa

SEQ ID NO: 179964 - RNA, 54 nt, Homo sapiens
aacaagcaacacggaaccacagagcggccacccgaggccccacaccccacagaa

SEQ ID NO: 179965 - RNA, 82 nt, Homo sapiens
aaggggcccgacagagcccagcagaccaaagggaaaccaccgccagcggccccgcaaccagggcgccacacagaaagaaaga

SEQ ID NO: 179966 - RNA, 58 nt, Homo sapiens
aggagagacgcgcgaggggcgccgaagcgagggaagaagagccgaaacgcgcggccag

SEQ ID NO: 179967 - RNA, 82 nt, Homo sapiens
cggcggcgcggggagccagcgagcgcgcccggcaggccgccgcgagcagccaggcggcgggccagagcccacagagaaaaga

SEQ ID NO: 179968 - RNA, 74 nt, Homo sapiens
cagaaagcagaggccagagcggagacagacgagaccaagccacccaccaacacggggccggcacaacccggagc

SEQ ID NO: 179969 - RNA, 78 nt, Homo sapiens
cggccagggggaggcccgacggcgcggggagagagccaagcaaccaagccagacgggagggcggccagggaagccaag

SEQ ID NO: 179970 - RNA, 73 nt, Homo sapiens
accgagacgaagcgggcggcgaagccaaaggagagaccaaccgacggggagccgaggagcaaaagaacaggaa

SEQ ID NO: 179971 - RNA, 77 nt, Homo sapiens
agccccgggcggcggggaccgccagcccagcgaccagcaggcaggggaagaaacccgaaggcgggcccaagaggccc

SEQ ID NO: 179972 - RNA, 81 nt, Homo sapiens
aaggccgggacccggccccggcccacaggggggggcaaacccgagagaacggaggcgcgaacagggcccacccgccacgac

SEQ ID NO: 179973 - RNA, 71 nt, Homo sapiens
caacaacaaacaaacgggggccgcagccggccaggggacccgaagggggcgagacgacacagaaaagacaa

SEQ ID NO: 179974 - RNA, 73 nt, Homo sapiens
aagaagaccacaaaaaagagacccacagccagcaacaccggaaccaagaccaggacaaagaagacccggagag

SEQ ID NO: 179975 - RNA, 91 nt, Homo sapiens
cgcgccgccgcgccaccaccgcgaggcaggagagaggaggaggaggcggcgcggcggccccgggaccaaggaggaacaaaaaccggagaca

SEQ ID NO: 179976 - RNA, 74 nt, Homo sapiens
aaagacaccgggcccccgagagaaaggaggagccacaacgaccgagcggacaggagacagccagcgcacgagga

SEQ ID NO: 179977 - RNA, 53 nt, Homo sapiens
agaccaagcgcgccacgcgcggcgcgccggccgcaaaagaaagaccggaaggc

SEQ ID NO: 179978 - RNA, 79 nt, Homo sapiens
ggggagagacaccaccccccccgccccaaagcgcgcaaggaacaaggcccaccccaggacccccgcacagcgaacaaca

SEQ ID NO: 179979 - RNA, 81 nt, Homo sapiens
gccggccccgggggggggccccggagcccacggagcaggagaagcccaaggcccagggaacgggcggaggaagaagacgcg

SEQ ID NO: 179980 - RNA, 72 nt, Homo sapiens
gacacggccacccacgccggaggccggggagccgacgccgaaaaccgagaaaacgggacaaagagccagccc

SEQ ID NO: 179981 - RNA, 73 nt, Homo sapiens
cccggccacggcgccagagccggggacgaaagggaaggacaggcagagcaaacaaggcacagccaggaaaagc

SEQ ID NO: 179982 - RNA, 82 nt, Homo sapiens
agagccagacacgcggcaagaccgcaggcgaccagacagcagaggacgggcgccgaccgaaggacgcgcagcaacaacagcc

SEQ ID NO: 179983 - RNA, 73 nt, Homo sapiens
cagacaagaacccaaaggaccgccccacaagcagagaggcgagaacacacgaaaaaagaaaggaggcaaaaag

SEQ ID NO: 179984 - RNA, 116 nt, Homo sapiens
aaggcaagagaccgggaagacagcgcccgcccaacacccagcagccagggaaccccagccagaggcacccaggcaacgcgggccccaggggccacaaggccgccgggccgccccgc

SEQ ID NO: 179985 - RNA, 64 nt, Homo sapiens
gaacagagggaaagggacggcacaggaacgggcgcacccccgagagagccacggaagggcgcca

SEQ ID NO: 179986 - RNA, 40 nt, Homo sapiens
gaccccgccccggagcggggggggccccagcccggccgaa

SEQ ID NO: 179987 - RNA, 55 nt, Homo sapiens
agaagcgggcaaagccggcaaaggagaaacaggaagaacccgagcgaggagccaa

SEQ ID NO: 179988 - RNA, 75 nt, Homo sapiens
cgcgcagcacgcgcggaggccggcccgccgggcgccgcagaccccaccgcgccggggaaggaaccagaacggcac

SEQ ID NO: 179989 - RNA, 77 nt, Homo sapiens
ggagcagaagggaggcccaagacccacaacaaaaggaaagggcacacggcccgaacaagggaacaccagcacagcgg

SEQ ID NO: 179990 - RNA, 70 nt, Homo sapiens
cagccacaggaggcgcggaggacgccccaccgccgacgcccccagccaccaggcaaaagcagaccggaaa

SEQ ID NO: 179991 - RNA, 75 nt, Homo sapiens
agggagaaccgagggcccgcgccacccgcccacgccacaaaggcacacagagaaaaaaagggaacaaaacacagc

SEQ ID NO: 179992 - RNA, 73 nt, Homo sapiens
gagcggcgggaggccaccgccagaggaaaagcggcggagggacagcagcaacacaccggccccgagagccaaa

SEQ ID NO: 179993 - RNA, 74 nt, Homo sapiens
gaagaagaagagcaaagggcccgcaggaaagacggagaaagggcagaagccggccacaaaaaacaaccgaggac

SEQ ID NO: 179994 - RNA, 69 nt, Homo sapiens
cggcgcggcaagggccccagcccccgcaggcacacacccacgcggggcgcgcagagcgggcccgggcgc

SEQ ID NO: 179995 - RNA, 73 nt, Homo sapiens
gggaagagaaaaccagaggcgaagccacgagcacccgcaaaggaaaaaagggcagacaggggagggggagccc

SEQ ID NO: 179996 - RNA, 71 nt, Homo sapiens
cagccgcagccaagcccgcccccacaagggggaccggcgcagaccggaagaggagccagaaagggcgcaca

SEQ ID NO: 179997 - RNA, 57 nt, Homo sapiens
gcgggccgcggccaggaggaagcgcagacccagggagcccacaggagacaaaagcca

SEQ ID NO: 179998 - RNA, 83 nt, Homo sapiens
gcggacaaggagaagcagagaaaggaggaagaaagagaaagacaaggcagccaagggacagaggaaaaccagcaggaaaaaga

SEQ ID NO: 179999 - RNA, 78 nt, Homo sapiens
aaaagaacagagacaaggaccagaaaagcaaaaggacaggaaaaggacaggcgcgcccccacccggggccgagaacca

SEQ ID NO: 180000 - RNA, 73 nt, Homo sapiens
acaccaaagcaggacccgggagggacccaggccaaaagggagccagccacggggccccccaacggggccagag

SEQ ID NO: 180001 - RNA, 78 nt, Homo sapiens
cacccgggccagcacaaacccagaaaccagacggacgggaccagaccccacaagaaaacacacaaccacaggcccaag

SEQ ID NO: 180002 - RNA, 80 nt, Homo sapiens
gaaaaccgggcgcagccccgacggccaggagaaagccaccaagaagaagccgggacccggcagaaggcccggaagaaggg

SEQ ID NO: 180003 - RNA, 62 nt, Homo sapiens
ccaaaaaggagcagccggccgaaacccgagaggagcaggagcaaccgacaggcgggccggac

SEQ ID NO: 180004 - RNA, 77 nt, Homo sapiens
acccaagagggaaacccccccacgaggccgcacagcaaagaagcacccaccaaagcccggcacacggaggagcccag

SEQ ID NO: 180005 - RNA, 68 nt, Homo sapiens
aggaggaaaaaaggagcaaaaggaacacaggcggaagagcgcgggaggggaggccaccaagaagagga

SEQ ID NO: 180006 - RNA, 58 nt, Homo sapiens
gaggcccccagccagggaacggcgccccgaagacaagcacaagagacgcagaccgcca

SEQ ID NO: 180007 - RNA, 63 nt, Homo sapiens
cagcacacagcgaccgggagaacaagacgagggacgaaagggcacacagcgacgccagcaccc

SEQ ID NO: 180008 - RNA, 68 nt, Homo sapiens
gacgcaccgcaggcagacaaaagggccaaagaagggagagagacggggaaaaaacagaaacccaagac

SEQ ID NO: 180009 - RNA, 71 nt, Homo sapiens
ggaccgaggaagccccgcagcagcagcccaaaggaagagacgacgccccagagagcacagaccagagcgag

SEQ ID NO: 180010 - RNA, 85 nt, Homo sapiens
ccgggacacaggaaagcaggcgagaaagggaggaggaaccaggggacgccgcggccagaagcagaagaagagaaaaaggaagccc

SEQ ID NO: 180011 - RNA, 88 nt, Homo sapiens
ccgcccggagcgccggcggcagaccgacacgccggggcgcccgcgcgcggggaccccacgggacggggaagggagaccgcgagacacg

SEQ ID NO: 180012 - RNA, 71 nt, Homo sapiens
caaggagaaaaacgaaaaggacccgaccaaccggcaaaaagacgaggaaaggaagaggggaaaccagaacg

SEQ ID NO: 180013 - RNA, 55 nt, Homo sapiens
aggcaccccccacagaaagggcgccaagagggccagcaggaggacacgccaacaa

SEQ ID NO: 180014 - RNA, 64 nt, Homo sapiens
gcagaagggcaggagcagggccggaggccaagcccgcaggccgggaggcccagcccccgcgcgg

SEQ ID NO: 180015 - RNA, 63 nt, Homo sapiens
cccggggacccccgacgccaggcagcgcccccaaacgacaacggcaagcggagaagagcaagg

SEQ ID NO: 180016 - RNA, 78 nt, Homo sapiens
ggcgcagcagcccgacagggggccaaggggagaagaaaaccggggaaacggagagaaccagagaaaaccaccaaaggc

SEQ ID NO: 180017 - RNA, 81 nt, Homo sapiens
cgccacgccagcacgccaacccggacggacaacaccggggagcgcgggccggaagggacggaaagacacggcagcagcaac

SEQ ID NO: 180018 - RNA, 42 nt, Homo sapiens
agacccccagacgaacaagacgccacggagacaccagccacc

SEQ ID NO: 180019 - RNA, 38 nt, Homo sapiens
agaccgggagccggccccggagagcccccccagcagga

SEQ ID NO: 180020 - RNA, 55 nt, Homo sapiens
ccagccaaaagacccaaaccacacggagcaaaggaggacggaagaaagaccccaa

SEQ ID NO: 180021 - RNA, 75 nt, Homo sapiens
acacccagaaacccacagcaagcccaggacccagaaaacagcaaagaagaagcaagggcagcccgagccgacagg

SEQ ID NO: 180022 - RNA, 100 nt, Homo sapiens
agcggaagacggcccaaaacacagcgcaccacacacagagggaaacggaaaggcagaaaccccagaggcacagaaacacaaggacgacaacccaggaagg

SEQ ID NO: 180023 - RNA, 95 nt, Homo sapiens
aaagaaaccgccaacaagcaaggaggagacaccacagcacagcacaccaggaaccagaggaggggaggaaccaccacagaaagcaggagaacaca

SEQ ID NO: 180024 - RNA, 51 nt, Homo sapiens
gcaggcaagacccaccccacggacccaccgcgcagagacgccggggcccgg

SEQ ID NO: 180025 - RNA, 68 nt, Homo sapiens
ggaaacgcggggacgccacaaggcccgcaggcccgcaggaggaaacacacgggacagcacaccaccaa

SEQ ID NO: 180026 - RNA, 47 nt, Homo sapiens
acccacagaaccaaagcagaaaggccaggagagacagcccaaagagc

SEQ ID NO: 180027 - RNA, 75 nt, Homo sapiens
gcccagccccccagagcgggacacaggcaccaacgagcaaggcgccaaggaggcggcaacagccagaacaaggag

SEQ ID NO: 180028 - RNA, 61 nt, Homo sapiens
cggagaaggccccggccccagagggcaccaaacggccaaaaagcagaaaaacaaaccagcc

SEQ ID NO: 180029 - RNA, 70 nt, Homo sapiens
aaaagaggaacccgcgacccgggcacccagagcagggagggcgcaggggcccaggacaaagggacgcagg

SEQ ID NO: 180030 - RNA, 87 nt, Homo sapiens
ggaggaccagacaagcggaggagagaaagcgagaacaaaaccagcgaggaacaggagacagcggagaaagagcccgggaagcacgaa

SEQ ID NO: 180031 - RNA, 71 nt, Homo sapiens
aaaccgcacccacacggccgaggcagcaagagaagggagacaagcacaccagcaaccaacgaccacacaga

SEQ ID NO: 180032 - RNA, 68 nt, Homo sapiens
cccgccggaccccacagcaacaagggggcagcggcaagcaggggagccagccacacagagacagacca

SEQ ID NO: 180033 - RNA, 70 nt, Homo sapiens
aggagaggaccaggaggaggaggcagagacaggagccggcacggagcacccgccgccgaccaacacgaca

SEQ ID NO: 180034 - RNA, 71 nt, Homo sapiens
ccgggaggcaacgaggcaccaggcagcagaacgggaggaagcagacacgagcaaagccaggagacacaaga

SEQ ID NO: 180035 - RNA, 90 nt, Homo sapiens
gcccgcacagcaggccaagacggaaagcagaggacccagcaaagggggcccacgagaagagcaggcgacgggggagagggagacagcggc

SEQ ID NO: 180036 - RNA, 63 nt, Homo sapiens
gccgcccccaccggacgaggccccccaaccaggcaaaggggcgaggaggcgggccaggaaagg

SEQ ID NO: 180037 - RNA, 51 nt, Homo sapiens
agggccaaagaagggagagagaccaaaccagagagaaagggaaccaaagac

SEQ ID NO: 180038 - RNA, 83 nt, Homo sapiens
ggccgaccgagacgggcggagaggagaagagacagggcagggcagcagcacgaccgacccagcagccccggcagacccaggga

SEQ ID NO: 180039 - RNA, 75 nt, Homo sapiens
cagaaggcaagcaagccagaccaagcgcgcacaagcccgccaccacccaaagagaaccaagcccgcccagcccag

SEQ ID NO: 180040 - RNA, 69 nt, Homo sapiens
agcagcgcagcagccaaggagacaccccagggacagcaacagaccagcgagagcggaccccagccggcc

SEQ ID NO: 180041 - RNA, 38 nt, Homo sapiens
aaaaacggagggacccaaccaagggaagagcggccaag

SEQ ID NO: 180042 - RNA, 71 nt, Homo sapiens
cagacgaggcgacgccgcaaggacggccacggcagcaagcaagccagagacgacaaaaagaggagaccgac

SEQ ID NO: 180043 - RNA, 60 nt, Homo sapiens
cggccccgggcagcggacacccgaaggcccgggccacggacagggacaggcccagaggca

SEQ ID NO: 180044 - RNA, 67 nt, Homo sapiens
gaacagggaaaggaaaagaggacaaaggcccgaagcgcacagaccgcgcacagaaagcccagacaac

SEQ ID NO: 180045 - RNA, 78 nt, Homo sapiens
acagaacagaacaggaaacgggagacagacaagcggaaccagaaccaaaacaaagacaagagaaccacaccgagaaag

SEQ ID NO: 180046 - RNA, 77 nt, Homo sapiens
gcccccggcggacagccgcccgcgccggaaggccgggacagcagaaaacagccagcagaaaaagccaaaaagcaagc

SEQ ID NO: 180047 - RNA, 77 nt, Homo sapiens
gagaacaagacgaagaacagaaggcgacaaggccaagaccgccagcaaaggaagacgagcccggggcaagacggcag

SEQ ID NO: 180048 - RNA, 77 nt, Homo sapiens
aaaaagaacccggagaaacgaagcgggacggagcgccgcacacaggcggaggcagaacaccacgaagccacgaacga

SEQ ID NO: 180049 - RNA, 88 nt, Homo sapiens
cggcgggagcgcagcggcggcggacgggagaagggacgacgggcgccggaggagcgaccgcggcagccaggcgaggaccaccgcgagg

SEQ ID NO: 180050 - RNA, 82 nt, Homo sapiens
ccgaagcagaagaaggggaaggcggagcccccaagacacgagcgaagcgagaccccggaagggggggaacgcgcgcgcgccc

SEQ ID NO: 180051 - RNA, 69 nt, Homo sapiens
ggaagaaggaaacgaaacccaccgggcgcaaaggaagcgcccaaacccgaggagaaggcccgcagcacc

SEQ ID NO: 180052 - RNA, 74 nt, Homo sapiens
aacagcggcaaacccgggaggagccgaggaagaaggagaaagacaaagccccgagaaagaccagcaccgccgaa

SEQ ID NO: 180053 - RNA, 82 nt, Homo sapiens
cagaagaccgcaacggaaccggaagaggcaagggcaggaagaagcaacaggaccccaagaaggaggcacgcgcggaccagcc

SEQ ID NO: 180054 - RNA, 81 nt, Homo sapiens
gcagggaggaaggggaggaggagacaggagacccaaagaccccagagacgggcaagccgacacccacgaggagacccagcc

SEQ ID NO: 180055 - RNA, 58 nt, Homo sapiens
gggcggaaggggccagcggagacagcaagcagaagaaggaagcaagagaagaaccagc

SEQ ID NO: 180056 - RNA, 74 nt, Homo sapiens
ccgcggccggaccgagcgcccgacccggcgaggcccggggacagggcgcaggaagagccagccacaaggaagag

SEQ ID NO: 180057 - RNA, 67 nt, Homo sapiens
ggagacccggggacccccgacgccaggcagcgcccccaaacgcaccggaacagaggaaaccacccca

SEQ ID NO: 180058 - RNA, 74 nt, Homo sapiens
acaaaacgggccacgagaaccaggccaggaaacaggcagcaaaagagcccagaagaggagagccgaccacagga

SEQ ID NO: 180059 - RNA, 68 nt, Homo sapiens
cagacccggaaaccccgaaacagaagccaacaggcgggcgcggacggcaggggcgccggggaacccgc

SEQ ID NO: 180060 - RNA, 78 nt, Homo sapiens
agcgagcgagggggggcgcgccggaaaccggagcgcgcagcagcaggacagcggccgaagccagagccggggcggcgc

SEQ ID NO: 180061 - RNA, 77 nt, Homo sapiens
cgaagcccacacaccccgaaaacaaaggcagacgggagcgggccgagaaaaaccacagagacacacgcaagccgacg

SEQ ID NO: 180062 - RNA, 70 nt, Homo sapiens
aaaaggaaaaaaccaaacaagcaggaaaaggccccagcagccgagcggaacaacaagcccggaaggaaag

SEQ ID NO: 180063 - RNA, 84 nt, Homo sapiens
gcaaccagaagggcccaggccaggccaccaccaagccagacggcaccagggagaaaggagacaggcaggcaacgcagccgccca

SEQ ID NO: 180064 - RNA, 80 nt, Homo sapiens
ggacagccgcaccccccgccaacgcaccggccaccgggcagcaaggaacagacgcaccacaggaagcgccacgcagagag

SEQ ID NO: 180065 - RNA, 82 nt, Homo sapiens
ccccacagcgggcaccgcagggccgacccccacggagagacaagcagaccggaagaccgacggaagaccacaccccgaggga

SEQ ID NO: 180066 - RNA, 74 nt, Homo sapiens
aacaggcacaagcaggacaagagcagaaccgaacacacagcaagcaaacccagagcaagcaggccgacagacag

SEQ ID NO: 180067 - RNA, 104 nt, Homo sapiens
aggccgggagaggaggagggagaccaggaacgaccgcaagcagagcaggaacacagacgcaaacagccgcacgcacaagacaaacccagaaaagaagggagagg

SEQ ID NO: 180068 - RNA, 78 nt, Homo sapiens
cacccacggagccccggggcgacaagcagaccggaagaccgacggaagaccacaccccgagggagcccaggacaccac

SEQ ID NO: 180069 - RNA, 84 nt, Homo sapiens
aaaagaagaggaggaaggcacaaaagccgcacagagccaagccgccaggccaccacagcccggggagcccacagcgccacgccg

SEQ ID NO: 180070 - RNA, 75 nt, Homo sapiens
aaaaagaacaagcagagcgcaagccggaaagcagcaggaaacagacgaggcgcagcgcagaacgaaaagccggaa

SEQ ID NO: 180071 - RNA, 76 nt, Homo sapiens
cccagcgcccggccccccaccggacacccgcggcggaggcacccaccacgggccaggcgggccagaggcaagccgc

SEQ ID NO: 180072 - RNA, 56 nt, Homo sapiens
cggcgccaccccacggccagcgagacagaccgaaacccaaagaaaaggagcgcgcc

SEQ ID NO: 180073 - RNA, 80 nt, Homo sapiens
gacgagagaaacccacgaagacgcgcggagaaagagaccaccgagggcggaaaacaccccaaaagccaaaagggaaagga

SEQ ID NO: 180074 - RNA, 77 nt, Homo sapiens
cggcgggggcggccccccgggccgcggcccacgcccgcggagcagccggcagagaggagggcaaaaagacaaacacc

SEQ ID NO: 180075 - RNA, 74 nt, Homo sapiens
acaaaaacagagcaaagagggcacaaaccagcaccgggagagggaaagcaccgaaaaaacgaagaacgaaacgg

SEQ ID NO: 180076 - RNA, 84 nt, Homo sapiens
gcaccccagcggagcaagggaccgagcagggggcgagagaggaaccacccagggcgccaccagaggcggcgcagaggcggcaca

SEQ ID NO: 180077 - RNA, 70 nt, Homo sapiens
cgcggaaggagaagcaaagaagaaacccccaaaccacgcacgagcagaccgaccaaacagggagcagcgg

SEQ ID NO: 180078 - RNA, 37 nt, Homo sapiens
aaaaggaagcgaaagcgcagaaaggccaagagggagg

SEQ ID NO: 180079 - RNA, 84 nt, Homo sapiens
aggaggcacggaaagagcggccagagagccaggagcaccgaagcgacccaggacgccccgcagaggaggacacccagagacaga

SEQ ID NO: 180080 - RNA, 76 nt, Homo sapiens
ggcgggaggcgacaggaaacccgccacgacaaccgcaccaacaaagacaggaagcgcccggacgcgggaccgagcc

SEQ ID NO: 180081 - RNA, 83 nt, Homo sapiens
aagcggaggaccgcagaagagccccgccagagaggcggagagagagcacaaggagagaacaggggggcccacacgcccccagc

SEQ ID NO: 180082 - RNA, 71 nt, Homo sapiens
caagcacaaagaagaaaacggacccaaagcggaaaacccgcaagggccagcaaaaccgcaagcagaacgca

SEQ ID NO: 180083 - RNA, 80 nt, Homo sapiens
cagccgggccagccccgcgacggcccacgagccaagcccaggagaaaaaggcagccccggagacgaaaagacaaagcacc

SEQ ID NO: 180084 - RNA, 79 nt, Homo sapiens
aggagaaacccacaaacccgccacaggaccaggcaccaaggaacaccgaccagcgccaaccgagcaaagagagcagaaa

SEQ ID NO: 180085 - RNA, 65 nt, Homo sapiens
agccgagaaacacccagaacacaagagccgcccccaacaccaaagcaagccaaaaccgggaccag

SEQ ID NO: 180086 - RNA, 71 nt, Homo sapiens
aaaagagacccacagccagcaacaccgggaaaagagacgcaaaccacgaggacagagaagagagaagccac

SEQ ID NO: 180087 - RNA, 55 nt, Homo sapiens
gacaacacaaggcccccgcaagggcaagagaccaaacaaaccaaggcacggcggc

SEQ ID NO: 180088 - RNA, 84 nt, Homo sapiens
gagaggcccccggccgacaagcaagcagcgcgccggccccaacacggaccggaaaacccagagccagcaggcggccacagagga

SEQ ID NO: 180089 - RNA, 75 nt, Homo sapiens
aggaggccgggaccacccagccagcggaagaagaacagccagcaaagacaagagcagaccagcagccgcagcgcg

SEQ ID NO: 180090 - RNA, 78 nt, Homo sapiens
caaagacagccgcccagaaccgacgagaagacaaccgcccgcgagagagaaaccagggagggcagagacacagaaagg

SEQ ID NO: 180091 - RNA, 40 nt, Homo sapiens
ccacgcaccaagccggggacagagcggaggcagggcggac

SEQ ID NO: 180092 - RNA, 45 nt, Homo sapiens
caaccagaaacacaggccaagcaccccaaaaagggaaagaagcgg

SEQ ID NO: 180093 - RNA, 72 nt, Homo sapiens
agcggcgagaaacagaaacaccaaacggcaagcgccagaaaacaacggaccccgggcccagccagccagaag

SEQ ID NO: 180094 - RNA, 71 nt, Homo sapiens
ggacagcaggacacaaaccaaaacgaggaaaaggcgaaagaaggaaccaaacggcggagaccagaagacag

SEQ ID NO: 180095 - RNA, 85 nt, Homo sapiens
cagggaggagcgggacaccccggaagcgggaaagggggccgacgacgagccccgcgaggagcgcagcggagaggccagaacgccc

SEQ ID NO: 180096 - RNA, 77 nt, Homo sapiens
ggccccgcgcgccggcgcaccagccaccaggagagaacgccgcgccgcgcgacaacggcccggcaggcaaggccggc

SEQ ID NO: 180097 - RNA, 70 nt, Homo sapiens
cgcaccacaaccagcggacacggccgccgggccgcgcccacgggcagcgaggcaaaaaaagaagcgagaa

SEQ ID NO: 180098 - RNA, 81 nt, Homo sapiens
cacagcgcgggagccacgcagaggacgccggaacacccggaagccgagaaaggccagagggaaaggagaaaacaaggggga

SEQ ID NO: 180099 - RNA, 80 nt, Homo sapiens
gagagccggggcgacacgcagccaagaagagggaaagaagacaggaaacaagggaaggacgacaaaagaggaccaaagga

SEQ ID NO: 180100 - RNA, 57 nt, Homo sapiens
ccccacggacgcagcacagggaccccaaggggcaggcaagccgacaggaacacccga

SEQ ID NO: 180101 - RNA, 59 nt, Homo sapiens
gaccgggccggcgcggggaagaagggcggagccacagaacgaggagcccagccccgccc

SEQ ID NO: 180102 - RNA, 52 nt, Homo sapiens
accaagaaccagcccccgcaaccagcgacaaacccgaaggcgagacgagaaa

SEQ ID NO: 180103 - RNA, 79 nt, Homo sapiens
acccgcgccggcccggccgaccccggaagcgagcgcggacgccacccgggggcacagcaagggagcagaagacagaggg

SEQ ID NO: 180104 - RNA, 33 nt, Homo sapiens
gaccgagccaggacaaacagagaaagggcgcaa

SEQ ID NO: 180105 - RNA, 57 nt, Homo sapiens
caaaaaagaccagaagaggagggaagcagacggaaagcaagacaggaagaacgaagg

SEQ ID NO: 180106 - RNA, 93 nt, Homo sapiens
agaagcccgagaacaacaacggaccccgaccaggagaacgcaaggagggacaggacggaaggagcggaggaagacacaagagcgagcgaagaa

SEQ ID NO: 180107 - RNA, 56 nt, Homo sapiens
aagacagaaccgccaaagcgcggaaaacagggagggaaagaacacccagaagaacg

SEQ ID NO: 180108 - RNA, 59 nt, Homo sapiens
agcagaggggaagcggcggagcaggaggagggcggaggagcaaaaaggacagagcacag

SEQ ID NO: 180109 - RNA, 60 nt, Homo sapiens
gcccaggcaagagcccgcgagaagaaagcgcgccaaggagaaggagacgacacagaaaac

SEQ ID NO: 180110 - RNA, 79 nt, Homo sapiens
gccgcaccaggccaccgccacgggccgagacacgcagcggcggccagggaccaggcgcgggaaccccggagccggccgc

SEQ ID NO: 180111 - RNA, 79 nt, Homo sapiens
gacggaagaaaaggaaccggaagaagacagacaacccagcacagacccaagccaaaagcgagacaagacgaaaggacgc

SEQ ID NO: 180112 - RNA, 64 nt, Homo sapiens
cgacacccaaccgggccagaagcaggcggcacccggaaacaagccacgaaggagagaaaaccag

SEQ ID NO: 180113 - RNA, 72 nt, Homo sapiens
aacagaagcgggacagaaaggaacccgaaaacagcccaagaggaaccagaagacacaaaaagacaaggaaag

SEQ ID NO: 180114 - RNA, 123 nt, Homo sapiens
gccgcagaccccgaccagacaggacgagaggcgagcagaggagaggggccgaggagaacaagcagcggagagaaccagcagagaaaagaaggagaaggaaaagcccaacgccaagaaaccgca

SEQ ID NO: 180115 - RNA, 77 nt, Homo sapiens
gccgcaaaaccacccgggaaacaggaacccccaccaacaccgaagagcccagaagcccgggcgaagaccgggccgaa

SEQ ID NO: 180116 - RNA, 79 nt, Homo sapiens
gccagccaggccaaaacccagcaagaagcagccagccgccagggagaaaagacgaggaagcccaaaaaccgcaagaaag

SEQ ID NO: 180117 - RNA, 78 nt, Homo sapiens
gcaccaaacaaaaggaaaccacaccaaccaagaagagccagacgacccagaagagcccggggaagcgagcaaaaggca

SEQ ID NO: 180118 - RNA, 67 nt, Homo sapiens
acggacagacaccaagcgagcagggggggcgagccgacggggcaagccaccaggaccagcgacagaa

SEQ ID NO: 180119 - RNA, 70 nt, Homo sapiens
gacccgaggccagcagggaaagccccgcagcaacagcggaacgcgcacggcagaggcggggaggcgcgag

SEQ ID NO: 180120 - RNA, 56 nt, Homo sapiens
aaagggcagggacagcgcaggcagcaggggaacgcccgcggacggcagggcgcgac

SEQ ID NO: 180121 - RNA, 39 nt, Homo sapiens
ggcacgcccccacacggggaaccacgacccggcacacag

SEQ ID NO: 180122 - RNA, 78 nt, Homo sapiens
agcagccgagaacgagccaaccaggggaagcacaacgggcaccgagaccaacaaacgagacacggccaggacaaggga

SEQ ID NO: 180123 - RNA, 72 nt, Homo sapiens
aaagaaaaaggcagcaaaaggaccaaacgaagggcaaaacagggaaggcccccaggaggcccacaagcggca

SEQ ID NO: 180124 - RNA, 70 nt, Homo sapiens
acaaacaaccacaggggacccccgaagagaccagacccgaagacccacccccaggcacgaaaagacagca

SEQ ID NO: 180125 - RNA, 74 nt, Homo sapiens
accacaaggacgcgcgcacgaggcaacacacccaagcaggccccggcaagcacggcaccgaccaaagggagaaa

SEQ ID NO: 180126 - RNA, 84 nt, Homo sapiens
caacaaccgcaccccagccacaaccgcggaggcaaccgcgcccccagagcccagcacccggaggagaagaggcgcggaacaagc

SEQ ID NO: 180127 - RNA, 94 nt, Homo sapiens
aggcggcaggcgaagccccggagaaccacccggaggagacggggcagacaacggagcccggggagaagggcacacaccaacgaaagcagagaaa

SEQ ID NO: 180128 - RNA, 79 nt, Homo sapiens
gggaagcggcggagcaggaggagggcgcgcgaagaaacgggagagggaacccgacaaggaaacacgacaaaaaacgacg

SEQ ID NO: 180129 - RNA, 56 nt, Homo sapiens
aagaagacaaggaacagaacaggacaaaccgaagaaaaaaagcagcacacaccaac

SEQ ID NO: 180130 - RNA, 77 nt, Homo sapiens
cggaagccgggagcgcagacagcaagggcggagcaccccccggcaacggaccggggaagaggaagcggagagaagaa

SEQ ID NO: 180131 - RNA, 74 nt, Homo sapiens
gggcacaggcacaaagacgagcaagagccaagccagcgacagggaaaggaccaagaccacaaggagcaaagaag

SEQ ID NO: 180132 - RNA, 84 nt, Homo sapiens
agcggccgaaccagcagggaggaggcagagggggaggaacacgaccggaagacaggccaaggagagcagcgcggacaggagaag

SEQ ID NO: 180133 - RNA, 45 nt, Homo sapiens
cagccccaaccgcgaacggacaaaagacagcgaggcagaagcacg

SEQ ID NO: 180134 - RNA, 82 nt, Homo sapiens
aacccacggagcggaggggcggacccaggccgagcggcacacccccgacccacgcacccgcaggcgcgggcacagggagggc

SEQ ID NO: 180135 - RNA, 83 nt, Homo sapiens
ggagccgcacgccacagcgaaggcgcgagggacaagagcagaccggaacaaaagaaagagccgagacaagcagaacaaaaaaa

SEQ ID NO: 180136 - RNA, 80 nt, Homo sapiens
ccacaagggaacgggcggccccggagagagagccgcgcacgcacagacaaggagccggaagagggaagaaggaagcagaa

SEQ ID NO: 180137 - RNA, 81 nt, Homo sapiens
caagcgaagaaaacggagacgcaggagaagaacacccgccgaccaaagagaacaaggcacagggagaagaagagccacagc

SEQ ID NO: 180138 - RNA, 72 nt, Homo sapiens
ccaagggacagggaaaaaggcgccaaagcacagagcaagcggacaaaagaagccggaaaaggagacgaagaa

SEQ ID NO: 180139 - RNA, 85 nt, Homo sapiens
cggaccggacccggaagcggcagcgaggagacccggcgccgccaggccgacgaaaagcccaagaacaccccaccagaccacccag

SEQ ID NO: 180140 - RNA, 82 nt, Homo sapiens
cacagagacaacaaaccacccggcaagaagcacgcaggcagaagcaagaaaaacagcgcaggagcaagaacaggcgcaaaac

SEQ ID NO: 180141 - RNA, 72 nt, Homo sapiens
acagcaccgaaaacaccaggaaagacaggagaccaaaaagcacagcgcgccggaagaccgaggggagaagca

SEQ ID NO: 180142 - RNA, 89 nt, Homo sapiens
cacaagccccaccagaagagggagggaccaaggaggagacaaggacaccgcgcaaggccggcagaaggccaccagcccccgggccaaga

SEQ ID NO: 180143 - RNA, 73 nt, Homo sapiens
gggaagcgcaaaaacaagacggggcgccccacagaggggcgacgaaaaagggagcggcaaagaggcagaccca

SEQ ID NO: 180144 - RNA, 79 nt, Homo sapiens
aagagcggcggagcgcaggggagaaccggaagggacagggaagggaaacaggagacgggacccccaaaaaggaggagga

SEQ ID NO: 180145 - RNA, 64 nt, Homo sapiens
caagcaccaaaagcaccacaagaccacaagcaggcaagaggccacgcaagcccccccgggagag

SEQ ID NO: 180146 - RNA, 68 nt, Homo sapiens
cacaagaaaacaaaagaaacgcccacagaacaccgaggaagggccccacaccaaaccgccacgcaaca

SEQ ID NO: 180147 - RNA, 77 nt, Homo sapiens
cccgaggaacgggcaggggcagccacgcaggcgaggaccagccgaagcaaaagaacagaagggagaagccacaacca

SEQ ID NO: 180148 - RNA, 70 nt, Homo sapiens
gacagcacgagagaaacagacgggacagccggagggggcagccagcgcaagcacgaccagagaaggcggg

SEQ ID NO: 180149 - RNA, 76 nt, Homo sapiens
ccgcagaggaagagaaaaagcaaacgaccagacggcagggaggcacaaaggggaacacagcacacgagaaggaaca

SEQ ID NO: 180150 - RNA, 65 nt, Homo sapiens
cacggggggcaggggcgggcggcagaacagccaagagcgcggaacgcggggacaccagccagcag

SEQ ID NO: 180151 - RNA, 57 nt, Homo sapiens
gagacgcccagaagggagaccagcagaacccaccagacagaagaagagggaaacccg

SEQ ID NO: 180152 - RNA, 41 nt, Homo sapiens
gccaagaaaaagacggaaaggacggagacgcagcagaccaa

SEQ ID NO: 180153 - RNA, 72 nt, Homo sapiens
aaggggagcgggaggagcgggggccgccggcggcccggccaggaaggacacagacaaaagaccaggagagag

SEQ ID NO: 180154 - RNA, 80 nt, Homo sapiens
gcgaagcaggaagaggacgggaaaaaagcagcggaggagaaaaaaaagaagaccgcagcaaggaagaggcaaaaaggagc

SEQ ID NO: 180155 - RNA, 36 nt, Homo sapiens
ggagcccgacccacccaaggaccaaccacggccggg

SEQ ID NO: 180156 - RNA, 80 nt, Homo sapiens
gccgagaccagacgcggagccaggccgaggggcggacgcggccggacaccccccaggcacagccacaccccagcggccaa

SEQ ID NO: 180157 - RNA, 78 nt, Homo sapiens
gcacaaccaggaggcggggccacggccaaggccacggcagccaccggacaaacaccagggaagcaccccgaggaacaa

SEQ ID NO: 180158 - RNA, 79 nt, Homo sapiens
agacaaaaaaaagagaaccgacaagccaaggccgcaggggcgcggcacaggagagggggccaaaggcgcgaggggggcg

SEQ ID NO: 180159 - RNA, 74 nt, Homo sapiens
ggggggggcggacaggcggcaacagaggagccaacaccacagcgaccgggcagaacgggaggagaaagcacagg

SEQ ID NO: 180160 - RNA, 75 nt, Homo sapiens
ccgagaccaagaaggaccagaaaaccgacaacccccagaaagccaagccgggaagaagacggcacgggaccccca

SEQ ID NO: 180161 - RNA, 75 nt, Homo sapiens
gaagccaagcagagcacaggcaaggacccaaagacaggaccacgcaccagcagagaaggaaagcaaaccgaagca

SEQ ID NO: 180162 - RNA, 70 nt, Homo sapiens
ggccccccagccagcgaacgcaagggcagacaaacaaaagaggaaacacggcacgcccagggccgcgccc

SEQ ID NO: 180163 - RNA, 72 nt, Homo sapiens
ccgcccccaaggcagacgaccgcagggcgaaccggcgcgcgggccgcgcccaggagccgcaccccggagacc

SEQ ID NO: 180164 - RNA, 78 nt, Homo sapiens
ggaggcgggcacgccgaaacagaagcagagccagaagccacagacgaacgccccgagagggccggagcgcagccccca

SEQ ID NO: 180165 - RNA, 34 nt, Homo sapiens
gcacaggagagagaaaggcagcaggagaaacgag

SEQ ID NO: 180166 - RNA, 72 nt, Homo sapiens
caagcgccaagacccggagacgaccaaacagcaaagagggaccgaccggccagacccccgaaaaaaccaccg

SEQ ID NO: 180167 - RNA, 79 nt, Homo sapiens
ccacagagagagagagggagggaagggacaagcgaacaggagcgaggagaaaacaagcggacaaagagagcacccagcc

SEQ ID NO: 180168 - RNA, 71 nt, Homo sapiens
accaaccaggccagcaacaggcgccgagcggaagaaccccagccacaaagaggaaaaacgcccccacagca

SEQ ID NO: 180169 - RNA, 72 nt, Homo sapiens
caaggaccgggaaacaaaacgaggaccaaaacggaaggcaaaacacgcaagcgaccccccgagaaagcacga

SEQ ID NO: 180170 - RNA, 67 nt, Homo sapiens
ggagaaggaccgaaggggacccccaaaagacaagggcaaaacggaccagacacaaagaggagggcgg

SEQ ID NO: 180171 - RNA, 69 nt, Homo sapiens
agaagccagcccccaggcggaacgcccgccccgcagagaggaccccgcgggcacggcgggacgggacaa

SEQ ID NO: 180172 - RNA, 65 nt, Homo sapiens
ccgagggaaaggcgcgccccgccgcccaccccggcaggaagcgacccggaaccgggaaaccaggc

SEQ ID NO: 180173 - RNA, 69 nt, Homo sapiens
agaaggaagaggaaagcgacccagaggaccgcccacaagggaggcagaacgcaagagacagccagcgaa

SEQ ID NO: 180174 - RNA, 67 nt, Homo sapiens
aaaggcccacgccgggcgagaggcgggaggcggcagaagcagccagaggagggcacaggcggcgcgg

SEQ ID NO: 180175 - RNA, 68 nt, Homo sapiens
caacaaagagcggagagaacaaaaggcccccaacacagacgagcgacaggggccacgagggggcgcag

SEQ ID NO: 180176 - RNA, 103 nt, Homo sapiens
aacccaacagccaaggacagaggaccaaagcggaccagagacagggaaccccagacagaagacccaggacaacacccccacacgccaaccccgcaagaacgcc

SEQ ID NO: 180177 - RNA, 78 nt, Homo sapiens
cagacaacggagcccggggaaaccagggccgggaagcacacaggaggcgccacgggagcagcggaaggggcccagcag

SEQ ID NO: 180178 - RNA, 55 nt, Homo sapiens
gcgcgaggggcgccgaagcgaggggaggacaaccggaaacacacaggaacagacc

SEQ ID NO: 180179 - RNA, 58 nt, Homo sapiens
acagggaggcgggcagggaccggaaggccgaacaagacaggacagcgagaagggggaa

SEQ ID NO: 180180 - RNA, 110 nt, Homo sapiens
caccaccccagaccaagacccgacacaaggcagccccacagcaggggacagcacagagaggacggggacgggccccaggacgaggaagacaaggccagccacggaaggag

SEQ ID NO: 180181 - RNA, 74 nt, Homo sapiens
caggccagcgccccaggccaagagggacccacccggcggagccccacagcgcggaggacggacgcacacacccg

SEQ ID NO: 180182 - RNA, 77 nt, Homo sapiens
gagcccggcgcggcccgggcagccgcgccccaggaaacaacacgaggaggacggcacaaaaagcaccagcggggagg

SEQ ID NO: 180183 - RNA, 67 nt, Homo sapiens
cgggacccgcgccgcgcccccggcccgcgggcggcccacggcgaggcaagagaagcacgacccagac

SEQ ID NO: 180184 - RNA, 73 nt, Homo sapiens
aaggcagaagcccagcaaggggccggcagggccccgggcgcgggagccagccgaagaaaggaaaagagaggcg

SEQ ID NO: 180185 - RNA, 67 nt, Homo sapiens
cgaagcagaagacgaggacacgcagccggccgaggaccccccagcacacgccaaagagggcagcacc

SEQ ID NO: 180186 - RNA, 96 nt, Homo sapiens
gccacccaacccggaaaggcagaagggaaggagcagaacggaggggaacacaaaaaggcaccaagcagccgaagagaaacaagggacagcagacaa

SEQ ID NO: 180187 - RNA, 81 nt, Homo sapiens
gaggcacaacaggccgcgccggcggcagagaggaacgggcgggggaggagcgcgagcccggcaggaagcccggggcggcga

SEQ ID NO: 180188 - RNA, 48 nt, Homo sapiens
aaccaaaaaccagacgaacaaggaccgcagacacgcgccgacaccggc

SEQ ID NO: 180189 - RNA, 78 nt, Homo sapiens
aacaggaagaagccaaacagcagagcgccaccaaaaagggaaaagacgaaagcgaaaagaaacagaaagagacaggac

SEQ ID NO: 180190 - RNA, 81 nt, Homo sapiens
ggaggcagaagcagcaagaacaacagcaggccaagcccgccggaggcaccggcacggaccaccccaacaccgggggagaac

SEQ ID NO: 180191 - RNA, 76 nt, Homo sapiens
caaaagggccaaagaagggagagagacacaaggagcacggaaacagcagagaaagcggcaggcaaggagccgagac

SEQ ID NO: 180192 - RNA, 72 nt, Homo sapiens
gggcagggggcaaacaagccgaccggaaaaaggaccaagcgcaccagggcaagcaacagccacccagacgca

SEQ ID NO: 180193 - RNA, 90 nt, Homo sapiens
ggagaagcagggaaggaggccgagccgggaccaggcccgggggcggcggccacgccaaggacgggcaagaggcgcagagccagagaccgg

SEQ ID NO: 180194 - RNA, 78 nt, Homo sapiens
ccagccgcggccggaggagcccccaggccgccaggaggacggccagcccccggagcgccacacacgcccgcccgccca

SEQ ID NO: 180195 - RNA, 80 nt, Homo sapiens
gagcggagcgcggcggagaggagggggacgaagcccccagaaagacaccgagaggacggcagggacacacaaaaaaacaa

SEQ ID NO: 180196 - RNA, 77 nt, Homo sapiens
acaccccagagggcgcaagcagagaaaaggagggaaagcacgaccaggaacccgggcgaaccggaaggcggcgaaca

SEQ ID NO: 180197 - RNA, 78 nt, Homo sapiens
gccggccacgggcgccagagaggcagagacccagaccacgccccacgccagcagcaggaccccaggccccaaaagcca

SEQ ID NO: 180198 - RNA, 71 nt, Homo sapiens
ggagaaaagcgagccccgaaaccaggaacgaaagaaaggagaccaaccaccagaggccggaagagcgggag

SEQ ID NO: 180199 - RNA, 74 nt, Homo sapiens
ccgcacgcggggcgcgcccaagggcacaagaaagaaaagcgaggccacaaccaccgccccagaaggggcaggga

SEQ ID NO: 180200 - RNA, 86 nt, Homo sapiens
ccgcgccagcccccacggccgccccagcagcccccaggacacggggagaaaacggcccagaccgccaagcaccagggggaccgcca

SEQ ID NO: 180201 - RNA, 69 nt, Homo sapiens
ccgcgggacaggaaccagggcggagaaggagcgaagaaggcacgcaaacagggaagcacaaggaaacag

SEQ ID NO: 180202 - RNA, 89 nt, Homo sapiens
cgcccgggaggaaggaacgaggcaaggagcaaagcagcggcgcagcccggggagaacacgagacccgcacaaaaccccgccccccaggc

SEQ ID NO: 180203 - RNA, 74 nt, Homo sapiens
ccggagagccagcaacgacgcacaccccagaggagacgacaggaagcgaccggacaaccagaagggacaaagga

SEQ ID NO: 180204 - RNA, 64 nt, Homo sapiens
cgcaggggggcgaaaggcggcagccccccggggccccgcgaggagaggagacgccggagcggga

SEQ ID NO: 180205 - RNA, 51 nt, Homo sapiens
aacagggaagcagcacgagagcgggacgagacaagggcagagccaagcgcc

SEQ ID NO: 180206 - RNA, 77 nt, Homo sapiens
gcaccgcgcaacccgccgggccaggcagccgcacagaggaacagggcgcgccagcgaccggggagcggacagacagc

SEQ ID NO: 180207 - RNA, 82 nt, Homo sapiens
ccgagcagcgcgagccacacggcaagcgcccagccggagccccgggccccacaggagaaacaggcagagcggcgggaaacca

SEQ ID NO: 180208 - RNA, 72 nt, Homo sapiens
cagagccagaagaagcaggaaagcgaccaccacgcgagaaaaccgcacaagacgcaaacgacaaacagcgag

SEQ ID NO: 180209 - RNA, 75 nt, Homo sapiens
cagaaccgcacgggaaagaggaggcagccaccagcaggaggaaaaccaacgccacgaccagagacgaagaaggag

SEQ ID NO: 180210 - RNA, 37 nt, Homo sapiens
ggccagccccgggcgcggggcaaaggaaacaggagaa

SEQ ID NO: 180211 - RNA, 71 nt, Homo sapiens
gccaggacacccacgccaacagcgcccccaccaggacggagaggccgcccacggagcgcagagccaacccc

SEQ ID NO: 180212 - RNA, 63 nt, Homo sapiens
gccccaagccagaagaaacaaccgccaccggggagcgaacacagaaaaccagacgagagacag

SEQ ID NO: 180213 - RNA, 78 nt, Homo sapiens
acggcaaaagaccaagagcacagcagaaggcagaagccccagaggagcccgaaacccccaggcgggcaggaaggagag

SEQ ID NO: 180214 - RNA, 75 nt, Homo sapiens
ccgcgccgccccgagcagcccgccagagacccggaccgggggacgggcaagagggaacgagacacggcacgcgcc

SEQ ID NO: 180215 - RNA, 69 nt, Homo sapiens
ccaccggcccgcgccgcccaggccccgcaggaaacaaagccagaccgccgaggggggacgaacccagga

SEQ ID NO: 180216 - RNA, 71 nt, Homo sapiens
acaaggaaacagagacccaggcgacagacagccacaaggaggaacccgaaaaaggacacaccccaaccaaa

SEQ ID NO: 180217 - RNA, 69 nt, Homo sapiens
acacgcaagcgccccacagagcaagacacagggaccagagcagaggggcccagacgaggcgccagcggg

SEQ ID NO: 180218 - RNA, 66 nt, Homo sapiens
cgggcgagcgcaaaggaaggcgccgggcccgacccgcgagagggaaacacaaagaagacaccagaa

SEQ ID NO: 180219 - RNA, 73 nt, Homo sapiens
caggcccccacgccgagggccaccaggccgccgggggccgcgcgcccggccacaagaaggagagacgcagagc

SEQ ID NO: 180220 - RNA, 78 nt, Homo sapiens
caggaacgggacaggaagagaggccccccaaagcaccgcgcaggagaaaggcgcgcaaaccgaacaagcacagacaag

SEQ ID NO: 180221 - RNA, 63 nt, Homo sapiens
cacgacaacgcagggacggagaaacaaccgaagggaaggggcccggccaggaccggggaaggg

SEQ ID NO: 180222 - RNA, 75 nt, Homo sapiens
cagggaagcagccgaccagccgcggagccgggggcagccagaacggaagaccaaccagaagacacacaaagcagg

SEQ ID NO: 180223 - RNA, 65 nt, Homo sapiens
gaaacgcaaagcagccagaaagaaacccacgcagaacggcaacgaaaagagacacgacgcaaacc

SEQ ID NO: 180224 - RNA, 76 nt, Homo sapiens
acaggcgcgcccagaagcaggggcagacccacccgagaaacaaggaagaagagagggcgaaggaggccacacagaa

SEQ ID NO: 180225 - RNA, 81 nt, Homo sapiens
caaacgcggacgagaagacgagacagccagagagacgaggacgcgcacaggaaaggacgcggaacaagcaggcagccaggc

SEQ ID NO: 180226 - RNA, 79 nt, Homo sapiens
accccgcaacgcggaacccaagaaggcggagagaggaaggacagagagcacagggcccaagaggacagcaggggcgggg

SEQ ID NO: 180227 - RNA, 77 nt, Homo sapiens
ccggccgagaaggcagaggcggcaaaacgccagcgagaccagccacaggcccaggagggaacaacagcaacaacacg

SEQ ID NO: 180228 - RNA, 62 nt, Homo sapiens
gaggagcccgcgggcggccggcgggcggggcggcggcgcgacagcacggaccgccggcaccg

SEQ ID NO: 180229 - RNA, 75 nt, Homo sapiens
ggcaccggcccccacgggcggcgcagggggaggagaagggagcacggcgccacaggccaaagagcccgggaaacg

SEQ ID NO: 180230 - RNA, 55 nt, Homo sapiens
ccacagccaaacacaccgacaaggcaacagagagcaggaaagaagaacagcggga

SEQ ID NO: 180231 - RNA, 90 nt, Homo sapiens
cgagagccgcccgggccagcggccgcgcacccccggccggaggcaccagcgccggcgaccaccaggggccgaggagaagccaagcgcggc

SEQ ID NO: 180232 - RNA, 85 nt, Homo sapiens
ccgcgcaaggaggagaccgacaacagcacccgcgcccaagaccgcgcaacccgagcacagagaccgaaaagggaggagaagaagc

SEQ ID NO: 180233 - RNA, 84 nt, Homo sapiens
gagggcgccgcggggcagccgccgcccccggggccccgagccccggccccaaagacccaaaacagagacaccccccagcccccg

SEQ ID NO: 180234 - RNA, 73 nt, Homo sapiens
gccccaacaccagccgccgccccgcagccccccgcagcacccagccggccacgaccggagagaacagaaaaaa

SEQ ID NO: 180235 - RNA, 49 nt, Homo sapiens
gagaaggaccaagaaccagcccgggaacacagagcaccaagacagccgc

SEQ ID NO: 180236 - RNA, 74 nt, Homo sapiens
acagagaaaaagaagaagagacgagaagagaaagaagacaagcagaccggaagaccgacggaagaccacacccc

SEQ ID NO: 180237 - RNA, 68 nt, Homo sapiens
caacccggcacagagagcaaggggaaacacaccagcacacaaaggaaaggaggacaacacggccccaa

SEQ ID NO: 180238 - RNA, 79 nt, Homo sapiens
ccggcgccccggcgcgaagaggcggaccggacggccgagcaccagagaacgcgcacccacgaccaaccgggcccaggcg

SEQ ID NO: 180239 - RNA, 79 nt, Homo sapiens
cagcccaaccgagaggggaagcaaaaggggagggaccaagaccagcgagagaacgccagcgagggaaagcgaggcaggc

SEQ ID NO: 180240 - RNA, 68 nt, Homo sapiens
agccggacggggacacaggccgccagaaacggagcacacaagcaacagcacaggacagggccccggag

SEQ ID NO: 180241 - RNA, 80 nt, Homo sapiens
gaagaggcccagccggcccgcgggggagccccgggagccgcacgaagggagggcaagcagaaagcagaggaaaacgaaca

SEQ ID NO: 180242 - RNA, 72 nt, Homo sapiens
agagccacaaaaaaggaagcgaaaaagcccgaaaagacacaagcaaaggaaccagcaaccaaagacggaaca

SEQ ID NO: 180243 - RNA, 77 nt, Homo sapiens
aagccagacccgcccaacagaaaaagagaggagggagaacacagaaacccgccccgggacaggaaggaacacaagac

SEQ ID NO: 180244 - RNA, 74 nt, Homo sapiens
caggaagaagcgcaaccacccaaaaggccgggcccaaagaggccccgacacgccacgggcacgcaccccgccag

SEQ ID NO: 180245 - RNA, 82 nt, Homo sapiens
caagaggccgggcgccccgcaggacacaagacggcgaagacaaacacccacagagggccacacaggaccaggcggacaagac

SEQ ID NO: 180246 - RNA, 74 nt, Homo sapiens
cgaagcagggggaggacaagcggcccacggggaaacagaggaaagcaccaaggaaccgagcaccggaacagagc

SEQ ID NO: 180247 - RNA, 81 nt, Homo sapiens
gaagagagcggaacagcagagcgcacaaaagaccacgggccaaaccaacgcgcaaccgggcaggagacggggcccaagcac

SEQ ID NO: 180248 - RNA, 78 nt, Homo sapiens
ccccggaaaaccccccccgaagaaggaaccagcaaagcgccacgaagcacaagcaagaggaccagccaaaaccacaca

SEQ ID NO: 180249 - RNA, 68 nt, Homo sapiens
gaccgggagaggacaagaccacgagccaggaacaagggggcgcaacagcccaggcagcacggcagcac

SEQ ID NO: 180250 - RNA, 80 nt, Homo sapiens
gagaccaagcccagagaagagaagcacgggccagcccaaggagaaagacagcaaagaaaaggagaagaaaggaaaaaaac

SEQ ID NO: 180251 - RNA, 76 nt, Homo sapiens
gggcacaaaccggaagcagagaagccacacaacaggaaacccgaccgccccaggggcacagcaggaccagcagggc

SEQ ID NO: 180252 - RNA, 68 nt, Homo sapiens
ggaacgcaggacccaaagcaacccagaccacccaggcaccccacaccagcccccaaggaggcgacgaa

SEQ ID NO: 180253 - RNA, 60 nt, Homo sapiens
aagccggggaccagaaaggaacggcaagacaacaaagccggagaaagcgggaacagcaca

SEQ ID NO: 180254 - RNA, 54 nt, Homo sapiens
gcgcgccccgcgagaggccggcacgaagggcagcagcacagggagcccccggag

SEQ ID NO: 180255 - RNA, 78 nt, Homo sapiens
acgcaccgccgcgcgcgggcaaaaaaagaagcgagaagcacgcccgaaggccagaaaagaaaaaacgggaaggagaca

SEQ ID NO: 180256 - RNA, 73 nt, Homo sapiens
ccagagcggccaagccacaacagaccccagcaccccccaaagggcacaggacaaaccggcgaccacacacggg

SEQ ID NO: 180257 - RNA, 70 nt, Homo sapiens
gaggagcgaacgagacagaacaggaaaaaggaggaagaaacaagcgagaggaagcacagcagaggaggga

SEQ ID NO: 180258 - RNA, 70 nt, Homo sapiens
gggaggggcccagcaggggcccagaaggcagaccaacaagaaaccgcccccgcaagagcccagaaaaaca

SEQ ID NO: 180259 - RNA, 86 nt, Homo sapiens
gcggggaaaaggcggacgggaaggcgggagacgagaagccgaaaagcgcagcgagcggagccgccggagccagggagccaaggacc

SEQ ID NO: 180260 - RNA, 69 nt, Homo sapiens
caacaaagcaacgagagcgcggaacaacagagaaggcccagggggaggcggcgcaacgcggggaaagca

SEQ ID NO: 180261 - RNA, 70 nt, Homo sapiens
gccccggcaagaccgaaggcgccggccaaaagagcagcgagagccagacaagccagacaccaagacccca

SEQ ID NO: 180262 - RNA, 87 nt, Homo sapiens
gccaagaagggccaccccacagacgacaagccgggaagacaagcagaccccccagaggggcgaggaagccgcagagccccggaggac

SEQ ID NO: 180263 - RNA, 80 nt, Homo sapiens
acagcagacggaggccgggagcaggcaaagggaagcagccgagaggcgagaaagaagaaagaaaggaaagagaaaacaga

SEQ ID NO: 180264 - RNA, 77 nt, Homo sapiens
ggaggcccgggcgcggggaagcagccgccacggaggcaaagcagccgggcaaacagaagacgggcaaaagagcggaa

SEQ ID NO: 180265 - RNA, 55 nt, Homo sapiens
gcagccccaagaagagcaaaggagggagaaagcagaagaccacaaagagggggaa

SEQ ID NO: 180266 - RNA, 79 nt, Homo sapiens
ggagcagccccgggcccgcccgcccgcaccaggacaagccgccgccgggggcaccccgcggcaggccggcgccggcccg

SEQ ID NO: 180267 - RNA, 82 nt, Homo sapiens
ggagggaaaaacagccgcagggaagagaaagacggagaggcgagggagccgaccacagcgaagcagaaggccccccggagga

SEQ ID NO: 180268 - RNA, 63 nt, Homo sapiens
gacccgcaccgcagcggacccggacacgaagacgaaaccagagggagggcccgcaggacagga

SEQ ID NO: 180269 - RNA, 67 nt, Homo sapiens
agaagaggcaaaagcgaggcagaaccccacagccacaccagccaaaggaggccagcgagcggcaccc

SEQ ID NO: 180270 - RNA, 79 nt, Homo sapiens
accacacagggccgccaccaacagagaagacagagcaccaacgagcccgagaccccggggggaccgaccccggacggga

SEQ ID NO: 180271 - RNA, 53 nt, Homo sapiens
cccgaccggaaaagggccaagagcaggaacccgcaacccaaaacgaacacccg

SEQ ID NO: 180272 - RNA, 69 nt, Homo sapiens
aaggaccaagaaccaggcaccgcccaacagcgccacacgagacaaaagagcccaacccaggcacaggag

SEQ ID NO: 180273 - RNA, 67 nt, Homo sapiens
gaaccaacccgcccaggacaagccgcgcggggacccgacgcccgcacggacacagcaggggccagac

SEQ ID NO: 180274 - RNA, 86 nt, Homo sapiens
ccacaaccgcccgaaccagagccggaggcgggaggacgggcgccgcagaaagaaaagcaaggcgaggaaaaaaggaagacgaagaa

SEQ ID NO: 180275 - RNA, 32 nt, Homo sapiens
gaacagcaacaggccaagcgccgcgcccaggc

SEQ ID NO: 180276 - RNA, 69 nt, Homo sapiens
ccgagggcaggggaacccaggcaggaacgcagaggcagagcaacagggacacaagcaagaagaaaggga

SEQ ID NO: 180277 - RNA, 58 nt, Homo sapiens
cgaccaaaccaggaggcgagggaggaagaggaggagagaagagaggaagcgagcagca

SEQ ID NO: 180278 - RNA, 82 nt, Homo sapiens
gcccgccgccccgcccacgaggagcacagccgggccgcgcgaagagggcgcgccgggcaccaaagcgaaccagacaggggaa

SEQ ID NO: 180279 - RNA, 73 nt, Homo sapiens
aaagaggagaccccaggccggccaaagcacagcaaaccagggccaagggaagaagaacagaagaaaccgagac

SEQ ID NO: 180280 - RNA, 36 nt, Homo sapiens
ccccgcgcccgcgccagggccccggggcggcggccg

SEQ ID NO: 180281 - RNA, 61 nt, Homo sapiens
cgcgccagggcgcggggccgcggccgcgcgagcagcgccgcgggcaaacgaagcacggcag

SEQ ID NO: 180282 - RNA, 77 nt, Homo sapiens
gggacccgagaggggggaaagccgggcgggggaggcggcacgacgacccaccgcaacaaaacgcacaagaagacaaa

SEQ ID NO: 180283 - RNA, 74 nt, Homo sapiens
aagagaccgcagagacagccaacacggcacccacaggaacagagacagacccgggggcccccaaggagagggaa

SEQ ID NO: 180284 - RNA, 89 nt, Homo sapiens
aaaaccaggggcaaaggacagacagaaggcccccgcggacccccagccccgggcccaggagcccgagaaggaggagaggagggcggaca

SEQ ID NO: 180285 - RNA, 81 nt, Homo sapiens
gcggcggccgcgcggcgacgcgaccgggagcccgggagcggcccgcgcagcaccaggacaaaagaagggcagcacaaagga

SEQ ID NO: 180286 - RNA, 82 nt, Homo sapiens
gaaagaccaggaggccggagcacagagggaaaaggaggggagccgccaccaaaagcagacggaaaacccacggggaagacca

SEQ ID NO: 180287 - RNA, 71 nt, Homo sapiens
accaaagggaaacggagacacaaaaccaacgcggacaagagacaccagggagccaacagaagggccaggcc

SEQ ID NO: 180288 - RNA, 69 nt, Homo sapiens
ccaccccccaggccggccccagagcccacccaacgccccaccggggagaagcagaccgcaccaggcggg

SEQ ID NO: 180289 - RNA, 78 nt, Homo sapiens
ggagcccgaccgggagaggacaagaccacgagccagaggaagacaccaccggacaccgaccaggccgcccgagcagcg

SEQ ID NO: 180290 - RNA, 75 nt, Homo sapiens
cagaccgccgaccggcgcccgccgaaaaaggacgaaggagcagccaggaacacacggcggcaagaggacccacgc

SEQ ID NO: 180291 - RNA, 80 nt, Homo sapiens
gacggaccgagaccggaccgagagcggaccgagagcgcgaaacgcacgagaaggagagaaaagagggagggaaggaaaag

SEQ ID NO: 180292 - RNA, 88 nt, Homo sapiens
acggcaaaggcaagagaacagcagcgccgcccgccgacagccaggcccgggagaagagagaccgcacgcagggccacagcagcacgag

SEQ ID NO: 180293 - RNA, 79 nt, Homo sapiens
cgggccagccccacaaaggcccacagcccccagaaccagggcacagcacaccagcaggcagagcagaaagcaccaggac

SEQ ID NO: 180294 - RNA, 63 nt, Homo sapiens
gggaggcgaccaggccgacggcccacgcagggcgaaccgaggcgggaggagcaggcagggacg

SEQ ID NO: 180295 - RNA, 68 nt, Homo sapiens
aacgcccccgaacggagaagagcgaaccgccagacccccagcgcaggaggccagcaccaacccaaacg

SEQ ID NO: 180296 - RNA, 79 nt, Homo sapiens
gcccccggacacccgcgcaaagccgcacagagagcagaacaccggcagcagaaaggcccaggaacacagaccaccagga

SEQ ID NO: 180297 - RNA, 72 nt, Homo sapiens
ggagaaacagcagaaacgcaccaggccaaagaaagagaagaaaacgcaaaaccagaagcgcgccgacacggc

SEQ ID NO: 180298 - RNA, 57 nt, Homo sapiens
ccccaccagggcaccggaggccagccggaaggcaaaagcagaccggaaaacccaccg

SEQ ID NO: 180299 - RNA, 79 nt, Homo sapiens
gaaagaagagaaagcagcagcacccaaaccggggagaaggaaaagccaagaaagacccaaaagaccccagaccagaaag

SEQ ID NO: 180300 - RNA, 106 nt, Homo sapiens
gcaccccacgaggggacccagagaggaacggaacggacccaccaggacgaagccggaaaggaaaccgagcagagagaaacacaagcacaagaaaacaagcaacaca

SEQ ID NO: 180301 - RNA, 80 nt, Homo sapiens
gggagacacgccgccacgagcgccacaggacgaaagagcaagacaaagggcgccccacgggcgcagcaaaacggacgggc

SEQ ID NO: 180302 - RNA, 76 nt, Homo sapiens
acagaaggggacaggcggggcccagcaagacaccacagggcaaagaacaggcaggggaaggaaaacacggcaggga

SEQ ID NO: 180303 - RNA, 76 nt, Homo sapiens
cgaaacaaggacacgggaaaagaggaaacaggagacaagcgcaagcagccagagcccgggcgcaaagaaccaggcc

SEQ ID NO: 180304 - RNA, 75 nt, Homo sapiens
ggcagaacgaacaggaacaaagccagacgaaaagcggacagaagagagagacaccacaaggccagaagccacgac

SEQ ID NO: 180305 - RNA, 83 nt, Homo sapiens
ggcccccaaagggggaacaggcggagccaccgcgcccagccccccacaaggcaggcgcagcccagcccgaaagcagaacgacg

SEQ ID NO: 180306 - RNA, 85 nt, Homo sapiens
ccaggagccaggagccaagagcagagcgccagcagaacgggggcagcagcgaggacccccccggggcaggaagacccaacaggcg

SEQ ID NO: 180307 - RNA, 77 nt, Homo sapiens
agaaagcagggcgacgacgacaaaacacagaaaagccccacggcggacgccggcaaccccaccaggagacaaccagc

SEQ ID NO: 180308 - RNA, 88 nt, Homo sapiens
cacccacggcaagagagcgaacgcagccggagcacccccggccagcggccggccaaggacgcgaggaaccggccaccgcggagagcag

SEQ ID NO: 180309 - RNA, 64 nt, Homo sapiens
ggagaagcagcgcacagccgagcggagccccgggcccagcaggaggcggcccccgcggaccgcc

SEQ ID NO: 180310 - RNA, 90 nt, Homo sapiens
cgggcgcgggcgcaggcgccccggggaggcgcgcggaccggcggcccaggcacggagaggcggcgagaccgcagaccccagaagaaaggc

SEQ ID NO: 180311 - RNA, 82 nt, Homo sapiens
cagcgacgcaccagcaagacggcaggcgagagccgacccaggccgccggccccacagggggccaaggggacccgaggccacc

SEQ ID NO: 180312 - RNA, 54 nt, Homo sapiens
cgcacgcgcccaagacagaccccagaacgaacaccagaacgccagaaaaagcca

SEQ ID NO: 180313 - RNA, 79 nt, Homo sapiens
acaaggagggcaaggcccaagggaaggccagcggcgcacggacgcccgccaagcccgggaggaacgcgccccaccaccc

SEQ ID NO: 180314 - RNA, 78 nt, Homo sapiens
ggaagggggcaagaagagccagggccgggaggacaccaggccaaccacaggaaaccggaacccgcaaggcagggcgac

SEQ ID NO: 180315 - RNA, 42 nt, Homo sapiens
cagagcaccagcaccagcagaggggagccaaccaaggagagc

SEQ ID NO: 180316 - RNA, 73 nt, Homo sapiens
agaccgggacagaaggcaagcccgcacacagacggccgcgggcgacagaccccaccacaagaacccgggccgg

SEQ ID NO: 180317 - RNA, 65 nt, Homo sapiens
cggcgcggaggagcgaggcagcgacaggacgggaacgggagaaaaaggcagccccggagacgaaa

SEQ ID NO: 180318 - RNA, 86 nt, Homo sapiens
ggcgcacacgggcgcgaccacccggggccgcggaccgcacgcagcagcacacacgagcgcgaccccaaggagaccgccaaagacga

SEQ ID NO: 180319 - RNA, 74 nt, Homo sapiens
cgcgcgcagggggaggcgacaacaaaagaggacaaacacaaggcgccgcaaaaaaaaacgacaaagaagaggag

SEQ ID NO: 180320 - RNA, 80 nt, Homo sapiens
ccaacgggccaggaggaccgggagaggcgcgggaggcgaggaggcggcggcggagacggggagccggcccaggaggacag

SEQ ID NO: 180321 - RNA, 75 nt, Homo sapiens
caccaagcggccccagggcacaccagacgaggagcagcaggaggccccaaagagggacacaggcggggccggcgg

SEQ ID NO: 180322 - RNA, 63 nt, Homo sapiens
caggaaacgaaggaagcaaaaccacgcgcaaaagcagagggagaggcccaagaaggagacaaa

SEQ ID NO: 180323 - RNA, 83 nt, Homo sapiens
gacggaggcgcccgcggcccggggcgccgcgcgccagccggaccggaggaagccagaggaaccccaccaagaggacgacaggc

SEQ ID NO: 180324 - RNA, 82 nt, Homo sapiens
agaccaccaccagggcggagcgacagcagggggagaccaagagcccacaggcggggagcgcccccaggagcagcggagcggg

SEQ ID NO: 180325 - RNA, 56 nt, Homo sapiens
aagccagcacacaccccgcaggacccgccagcagaaaggcaagaacaaggaagaaa

SEQ ID NO: 180326 - RNA, 36 nt, Homo sapiens
cccaacacacacacagacacagcgagaagaggccac

SEQ ID NO: 180327 - RNA, 56 nt, Homo sapiens
agaagaggggggagaagcaggcggcggaaacccggagagagagagagagaggaagc

SEQ ID NO: 180328 - RNA, 90 nt, Homo sapiens
cgcagcccaccaaacccgcaccaagcagaggagaaggagaaaaaggcagccccggagacgaaaagacaaagcaccaccaacagacgagga

SEQ ID NO: 180329 - RNA, 78 nt, Homo sapiens
cacggcggcacacgcagaccgcaccaggagacaaggcccgcggcggaagccggcaggacacgaaagcccaacgggaga

SEQ ID NO: 180330 - RNA, 112 nt, Homo sapiens
accgggacggaccgagaccggaccgagagcggaccgagagcgcgaaacgcacgagaaggcaaaccgacaccagcgacacaagcgcgagggaaccacagaggacaggcgaggg

SEQ ID NO: 180331 - RNA, 79 nt, Homo sapiens
gcagcccagccgggaaggcccgccacaggacgcggaccccaggacacccgagcgaaacacacaaaggaagaaggcacac

SEQ ID NO: 180332 - RNA, 74 nt, Homo sapiens
cagagcaggaacgcagccggggacaccaaacagggccacagagcaaccaaaaaccggccgcaggcacaaaagaa

SEQ ID NO: 180333 - RNA, 84 nt, Homo sapiens
ccgcgcagagcgggaccacccgggcacagcaggcacggaggcaccagcgcgcaggaggggcacgggagccagggcgcgaccccg

SEQ ID NO: 180334 - RNA, 74 nt, Homo sapiens
acgggcaggcgaacgagggaccaagcacgccagaaagagaggaaagaacccaagggaacagggaggcaaggagc

SEQ ID NO: 180335 - RNA, 52 nt, Homo sapiens
cacaacagggcggcaacaggggcgagaaagggacgccgccagccaccggcgc

SEQ ID NO: 180336 - RNA, 55 nt, Homo sapiens
gggaagagagacggagccaggcagagagaaccccacccaagagacaaagaccaac

SEQ ID NO: 180337 - RNA, 76 nt, Homo sapiens
agacagcaagaagcaagaaggagaaacacaagaggccagggaaggacacaccgcggaaagaacaagaagcaaaagg

SEQ ID NO: 180338 - RNA, 91 nt, Homo sapiens
gaggagcagcccgcagaggcccaggagacgacaaagccccgccaagggcaaaagcggcgagcacaagggcagaagacaggaaacgccaaga

SEQ ID NO: 180339 - RNA, 69 nt, Homo sapiens
ccggccgaagccggagaaaagacccggccgaggagcccaaaaggcagagcgaggagagaagaaggaggg

SEQ ID NO: 180340 - RNA, 72 nt, Homo sapiens
gaccccccgacaccgcccaggagcgccgggcagggacagagagggggcccacgcggcagcagggacccaccc

SEQ ID NO: 180341 - RNA, 62 nt, Homo sapiens
gccgaaaaacggcacacccaccaagcacccaacagaagaagaggcccccccgggggcgagaa

SEQ ID NO: 180342 - RNA, 74 nt, Homo sapiens
cggacccagcgagcgggcggcacgcacgcagggcgggaagcggggaaaggaaaacaccagcacaccaaagaccg

SEQ ID NO: 180343 - RNA, 75 nt, Homo sapiens
ccccaggacgcccggcggccggggagccggcccaagcgggagaggccaaagagaagccaccgaaacgagggagag

SEQ ID NO: 180344 - RNA, 62 nt, Homo sapiens
ccacgaaaaacaacagacccaggccaagaggccaaccaggccaggggaaggagccccaccaa

SEQ ID NO: 180345 - RNA, 74 nt, Homo sapiens
cgcgcaccccgcccgcgcgccaccgcacgagcccgccaagcgagccagccagcgggaacaagagaacaaagccc

SEQ ID NO: 180346 - RNA, 71 nt, Homo sapiens
cccggacggggcggccgccgagggaaggaacaacaggagacaaagaaaccagccaacagaggaagaaggaa

SEQ ID NO: 180347 - RNA, 56 nt, Homo sapiens
acagaccgcagacaggaacacgcgccagagcgacgagacaaaccaaacagggagac

SEQ ID NO: 180348 - RNA, 88 nt, Homo sapiens
agcggggccacaggagaggcggcccccgcgacaggaccagcaggccacgccacccagcgcagaaccagggaaccaagaccaggacaaa

SEQ ID NO: 180349 - RNA, 62 nt, Homo sapiens
cgcccacagggggaagaggcgccgcccgggggacggcagaaacggcgaggaaagagaggagc

SEQ ID NO: 180350 - RNA, 79 nt, Homo sapiens
agaccaggcaagcccgaccaaacacgaggcccggcccagagggacaaaaacacaacacacgcaggacgcaaacgccacc

SEQ ID NO: 180351 - RNA, 74 nt, Homo sapiens
cgcaccgcggaagaggcggggacgaccggggcgggcgacagcgaccgacgccacacgcgagagagagaccaacg

SEQ ID NO: 180352 - RNA, 74 nt, Homo sapiens
agaggacgggagaccagcaggcccggcgaccggcagggagcagccgcccgccacgcgaggccccaagggacagg

SEQ ID NO: 180353 - RNA, 78 nt, Homo sapiens
ccaaccccaacccggagagcggcgagggcccggaagaaaacccgcggccaggcgaggcggggggcaagacagggagcc

SEQ ID NO: 180354 - RNA, 78 nt, Homo sapiens
cacacccgcgcgcgcccgggaggaaggaacgaggcaaggagcaaagcagcggcgcagcccgggaggcgcaacagaaca

SEQ ID NO: 180355 - RNA, 81 nt, Homo sapiens
ccccagcgccaagagagaggcccaggcggggaggagcgcgaggaagaggcggaaggcgccggaagaacagcacagggcccc

SEQ ID NO: 180356 - RNA, 73 nt, Homo sapiens
cccgcccagcagaagaagagaggagggagaacacagaaaccggccccagaggcagagcaacagggacacaagc

SEQ ID NO: 180357 - RNA, 80 nt, Homo sapiens
cgcggcccggggaagcaccaaacgcgccacaacgccgacgcaccacacgacggcgcagggcagacaacaggcacaaagag

SEQ ID NO: 180358 - RNA, 82 nt, Homo sapiens
ccgacgagcgcgcacaacgcaggaccggcgccgaaggcccgccaggcgaagccgacgagcccgaacagacgcaccagcggga

SEQ ID NO: 180359 - RNA, 81 nt, Homo sapiens
gggggaagggaacagggaccaaaccgccaaaaagaaacggcaagaagaagcgaaaaccgcccacaacaccagcacgaaacc

SEQ ID NO: 180360 - RNA, 70 nt, Homo sapiens
ccccccaacaccgcgacacgcagaccagacaaagggagcaccagccagaccgggaagaaacgaagggggg

SEQ ID NO: 180361 - RNA, 72 nt, Homo sapiens
cgcgaaggccgggggaaagacagccggggaggcagagacagggcgagaagagcaggggggaggacagcaaag

SEQ ID NO: 180362 - RNA, 87 nt, Homo sapiens
acgaggacgaccaacaggcagcagcgggccccgccaccggcacaccgaaggccccagacaaacccagacccagaagggaacgggaaa

SEQ ID NO: 180363 - RNA, 76 nt, Homo sapiens
ggaccgcacccgcaccgccaaccacgggcgaggaggcgccgcgcagagcacccgcggccaggcggcaacagccagc

SEQ ID NO: 180364 - RNA, 82 nt, Homo sapiens
gaaacagcaggccacgcagcccaacccccaagccaagcagcaggaagacgaggcgggaaccacaccaagggccggcgccggc

SEQ ID NO: 180365 - RNA, 79 nt, Homo sapiens
cccaccggaaggccaccccgcagccgcaggccggccggcaccgagagagacggagcacccaggacacggagcggaagac

SEQ ID NO: 180366 - RNA, 80 nt, Homo sapiens
gcaacgccgggccgcgggcgcggacgccggcccgcgcgcgcaccccgcggacgccacagcgcacaagcagaccggaagac

SEQ ID NO: 180367 - RNA, 78 nt, Homo sapiens
agcagcaagaacaacagcaggccaagcccgccggagggcggcggcagcacaggagcggaccagcccggggagagcggg

SEQ ID NO: 180368 - RNA, 69 nt, Homo sapiens
agaggccggcggggcgacaggccaacggagagacacaaacacagagcagcaagagagacagggaccgag

SEQ ID NO: 180369 - RNA, 87 nt, Homo sapiens
cccccgcaaaacagcacggaagcgcggacggcgcacgacgagacggcagcgcacgggacaagagccaaaggcacagagacaccgggc

SEQ ID NO: 180370 - RNA, 69 nt, Homo sapiens
gcacccacgaacgcccaccccccgaacccagccgcaccgagcacgcccggccaggacacaagaggaggc

SEQ ID NO: 180371 - RNA, 78 nt, Homo sapiens
aaaggcgcagaaaaggaaagaaaggcaaaggcacggagggcaaagaagacgagaccaacgcgcgggagcgccaaaagc

SEQ ID NO: 180372 - RNA, 55 nt, Homo sapiens
acagaagagggacaacggacagcccgcagaggaagagcaggggaggcaaacagcg

SEQ ID NO: 180373 - RNA, 78 nt, Homo sapiens
gccaagcagcagccacccagcggggacgaacaggggggacgcacgcagcacgggcgaggagaaaaccggaagagaaag

SEQ ID NO: 180374 - RNA, 72 nt, Homo sapiens
cgaaacggaaagaagcaccggagagacagcacagcacccacaaagcaacgaagaaacggcgggggccggggc

SEQ ID NO: 180375 - RNA, 55 nt, Homo sapiens
ggaaaggcaggaaacaagccgcgggaaaggacgacccgggaagcaagggggaccc

SEQ ID NO: 180376 - RNA, 63 nt, Homo sapiens
agccaccccaagccacagggccgccgacagcagagacaggggaacacccagaggaacgcgaga

SEQ ID NO: 180377 - RNA, 85 nt, Homo sapiens
gggcccagcagacagccgaggggagcgcggggcccggcagaaagcccgggcgcgccaggcacagccaagagcggaccggcagcgg

SEQ ID NO: 180378 - RNA, 82 nt, Homo sapiens
ggaagggccggcgagcccggccccgccggcaccagggggcacaaacagacccaaaagaaaaaagcccaccaaaagaagagga

SEQ ID NO: 180379 - RNA, 55 nt, Homo sapiens
aggggggggcaaacccgagagaacggcgcggggaccacgagccaggacccagcgc

SEQ ID NO: 180380 - RNA, 83 nt, Homo sapiens
cagaaggaacgacgcggaccagaagccagagcgaggacgccggcagccacccgaagggccccccaagcccagggaccgcagag

SEQ ID NO: 180381 - RNA, 75 nt, Homo sapiens
agaaaaacaagaacgaggaacacgaacaggaacccgcaggcccagggcggaggcagcaaagacaggccgggggcc

SEQ ID NO: 180382 - RNA, 83 nt, Homo sapiens
accccggccggcaccaccgcgcaagagccggagaaggagggggcagagcacggcaggcagaaggggccaacccgggggaacgc

SEQ ID NO: 180383 - RNA, 40 nt, Homo sapiens
accccccccgccaccaccaggagcaccgcggacgccccag

SEQ ID NO: 180384 - RNA, 83 nt, Homo sapiens
gcagcagcgcgacccgagccggcgcccgggccggccaggacgacccggacgcgggcccggagaccagcaccaccccgcgacag

SEQ ID NO: 180385 - RNA, 71 nt, Homo sapiens
cccaaggagcagcagcgcccgcgccagaaggcaggacaaggaaaaggggcccggcgggcaggagcagaacg

SEQ ID NO: 180386 - RNA, 81 nt, Homo sapiens
ggcccgagcgggagagccggccccggggaagcaagggagcccagccggagccagaacaaggaaacacgcagaaggaaaagc

SEQ ID NO: 180387 - RNA, 79 nt, Homo sapiens
gagagccgaggcgcccccaccacccacaagacccgggggcagcaggggaccacgaccacaagccgaagaggggcaagag

SEQ ID NO: 180388 - RNA, 83 nt, Homo sapiens
caaaaacgaacagaaagcaccgagacaaaccaaaaccacaaccaaagacaagaagaaagccccgcccccaccccaacccgagc

SEQ ID NO: 180389 - RNA, 68 nt, Homo sapiens
gaaccaccccgggggggaaaggaaaccgacagacacaaccgaaaaagaagccgcaccaccacccaaac

SEQ ID NO: 180390 - RNA, 80 nt, Homo sapiens
aggcccggcccagagggacaaaggagcgcgcacccaagcggaggcagggagcaacaggccaccgcagcgcaaccccgggc

SEQ ID NO: 180391 - RNA, 68 nt, Homo sapiens
cacgagaccaaggcccagcaacacaggaaggccagaagccacgaacaggcggggccgacggagcgacg

SEQ ID NO: 180392 - RNA, 78 nt, Homo sapiens
gcggagccgggaggacgcgaggagcccagacacaagacggagaaagaagaacaaacacaaaacacacaccgagcagaa

SEQ ID NO: 180393 - RNA, 81 nt, Homo sapiens
gcagcccaggaagcgagagcgaagccgccacccaaaccagcaaaccagaacaggacagagccacgaccaggggacaccccc

SEQ ID NO: 180394 - RNA, 60 nt, Homo sapiens
gggacgcgcgcgggcacccacggagccccggggcggcggaggcagggcgagaccgaccac

SEQ ID NO: 180395 - RNA, 84 nt, Homo sapiens
gaccggaccagccagaggacgcgggccgaggagagcggaggagggggccaagccgacgccagcgggcgccacccaacaggcgca

SEQ ID NO: 180396 - RNA, 79 nt, Homo sapiens
cagggaaccaaggggacaaaccaacagaagggcaaccagacaacaggcacaaagagagaaggaacacccacagggcaga

SEQ ID NO: 180397 - RNA, 81 nt, Homo sapiens
cccacgagagcaccaccagaaggcccgaggaaggccccgagccccggccccaaagacccaaaacagagacaccccccagcc

SEQ ID NO: 180398 - RNA, 76 nt, Homo sapiens
ccggaagcgaagaccagacgcgacacgggacgggagcgcgagcgccacggcgggaggagggagccacaccaaagcc

SEQ ID NO: 180399 - RNA, 73 nt, Homo sapiens
cacagagacgcgaaaaaggagacgggaacccggaggacccgacagaaaaggaagaggcagaggccaagaggga

SEQ ID NO: 180400 - RNA, 84 nt, Homo sapiens
gcaccggggagccccgccaccgcaagagccgcagcagcgccccgcagccagagcccgcagcccaacacgccgccacaagaaccc

SEQ ID NO: 180401 - RNA, 80 nt, Homo sapiens
cagacagaacaagaaagggacaccaaggcccccaagggggcaaggcaacacaagcacaagccggcacccaacaccccaga

SEQ ID NO: 180402 - RNA, 64 nt, Homo sapiens
aaggaaaccagaagaaacgaccgaagagagagcaaacccccaggcccaaagaggagcgccggcc

SEQ ID NO: 180403 - RNA, 73 nt, Homo sapiens
agacagggcgcgccaccagagcagaccgggccaaagcccggcccacaaaggggaagcagcagcggagcgaaac

SEQ ID NO: 180404 - RNA, 71 nt, Homo sapiens
acccaggcccacagcccaaagggggggaacaacgcccaccaaaaccacacccagaaggcagaacgccaacc

SEQ ID NO: 180405 - RNA, 74 nt, Homo sapiens
aaaggcaaagaaagaggcccacccggcaccgcagaaggggccgagcaccgacagccaagacagaagaccaaaga

SEQ ID NO: 180406 - RNA, 66 nt, Homo sapiens
acgacacagaggacccaagggcaagaagaccggaaggagagaaagccagaccggaaaagaagaacg

SEQ ID NO: 180407 - RNA, 75 nt, Homo sapiens
gagacgccgcaaggcagagggggggggcgcaccgcccccgacccaccaggggagaggcaccagcaacagaccaac

SEQ ID NO: 180408 - RNA, 86 nt, Homo sapiens
ggggggcgggcgaccgcaggcagcaccggaggcccaggcccggcagcccaacccagcaggacaaggccccggagccgcagaaccag

SEQ ID NO: 180409 - RNA, 81 nt, Homo sapiens
ccaggagcaagggaaagaacccggcggggaaaagggaaggaaaagagacgcagacagcaccaggcccgaagcagaaaacag

SEQ ID NO: 180410 - RNA, 68 nt, Homo sapiens
gcagccagaccaagaacaaccgcggacacggagaggaagggaaaccaaagacagagagggacgggcac

SEQ ID NO: 180411 - RNA, 80 nt, Homo sapiens
ggccccgaggaagcaaggccgcggggggagaccccaccaccggaaccagcagcagaagagaaggacggaaaacgcgacca

SEQ ID NO: 180412 - RNA, 73 nt, Homo sapiens
aggccaggcaccccaagaaccagcccccccaagccccggggccagccacaagccccaacaaacagcaccgcga

SEQ ID NO: 180413 - RNA, 79 nt, Homo sapiens
aagaccgaccgccgccgcgcaccgcggggcccagaggcaccaccaggccaacagccccccggccacccacccggacacc

SEQ ID NO: 180414 - RNA, 55 nt, Homo sapiens
cgaaaaggaagcggaaggaaaccagaggaaaccgcagacggcagggaagcagcac

SEQ ID NO: 180415 - RNA, 79 nt, Homo sapiens
cgccgccacccccaccggagcggggagacacagagcaccagccagaggagagggcccagccgccccgcccccccgcccc

SEQ ID NO: 180416 - RNA, 75 nt, Homo sapiens
gaacacggggacaccaacaggacccgcaaggcgccaccggaagaaacgggaggggaggagccgggaaagacagcg

SEQ ID NO: 180417 - RNA, 72 nt, Homo sapiens
aagaggacaagaggagagaaaacgcaaggagccacagaagccagcaccagcccccaccccaggccccccagc

SEQ ID NO: 180418 - RNA, 76 nt, Homo sapiens
gccaacgggccgcagaggggcggcgggcggccaggacaagagaaaggggccaggaaagaccacagcaagaccacgc

SEQ ID NO: 180419 - RNA, 79 nt, Homo sapiens
aaagaaggccgaaggacccccacaacgagcgcccggaggagcccagaaccgccccagacaaggcccggcccgcggcaga

SEQ ID NO: 180420 - RNA, 80 nt, Homo sapiens
cgcagaccgcagaaggccggagacaccagcagggagcgagcaaggccagcaccacgccacgacagcaccggagaagcccc

SEQ ID NO: 180421 - RNA, 70 nt, Homo sapiens
caggagaaggaccgaaggagaggagaacaaccccgagacagaaaggcccgcacaaggacaccagaccaca

SEQ ID NO: 180422 - RNA, 98 nt, Homo sapiens
caaaggaggaaacaccaccagaaaagggagcccaccacgaaagcagcaacagaaagcaagggcggaccagggaccagaggaagagaaaaaacagcccc

SEQ ID NO: 180423 - RNA, 85 nt, Homo sapiens
gaggagagcgaccgaagcagaaagcagacaacagggagaccccacgggacaccagcccaccggccgaggcggggccgaagaagac

SEQ ID NO: 180424 - RNA, 83 nt, Homo sapiens
gggcccccacccgggggagcgaaacagaaccgccaggagcggcagacggcaggccagcgcgaaggcccgccgaaggagaaggg

SEQ ID NO: 180425 - RNA, 86 nt, Homo sapiens
ccaacagacgccacggagagaacggccacagcacagacacgccacgggcccggcccgcggggccggagcaaggaagacagaacgag

SEQ ID NO: 180426 - RNA, 72 nt, Homo sapiens
gggacccggacaaccagaggcagccagcagggggagaccaaggaaagcggcgcggggccacgggccccgaga

SEQ ID NO: 180427 - RNA, 75 nt, Homo sapiens
ccaggggcagaccaagacaaggagccagggacacagagcagaagcgcggacacccagaagaaccgaacggaaggg

SEQ ID NO: 180428 - RNA, 71 nt, Homo sapiens
gcgagcgacggcaggggcaacgaggaacaggccaagaaacaacacagccaaggccagcgccacggcgggaa

SEQ ID NO: 180429 - RNA, 51 nt, Homo sapiens
ccgcccaacacaacacgcagggccgcaggagggaagcgcacggaaaccgcc

SEQ ID NO: 180430 - RNA, 69 nt, Homo sapiens
gaaaagcccgcccaacgcacaccggggacaacagcgagcagcaaaaagaacgaaaagcgcaacaaacca

SEQ ID NO: 180431 - RNA, 80 nt, Homo sapiens
aaaaagcgcgaagcgccgaaagcaagaccaaaagagaggcaccgcggaacacaagaggcagccacagggccaccaggagg

SEQ ID NO: 180432 - RNA, 66 nt, Homo sapiens
cgcgaaaaggaagcggaaggggagcacgccaggaacgaagggaaggagaagggacaagaacaccca

SEQ ID NO: 180433 - RNA, 80 nt, Homo sapiens
cgacggagcacaccgggcgcccgaaccgccgggcccaccacgcccgccggccgccgagagacggcgagcaacccaagcgg

SEQ ID NO: 180434 - RNA, 50 nt, Homo sapiens
cccgggacagcggagaggcgcagaaggggaaggagaacaccagagaaagc

SEQ ID NO: 180435 - RNA, 74 nt, Homo sapiens
ccgccgcagacccagcagccaagagggaagcagacgagagcaaggagcagggagacacgaggaagaagaaaaga

SEQ ID NO: 180436 - RNA, 56 nt, Homo sapiens
cggacacacagacccccaccaagcagggaccagaccaccacagcgccccgagagac

SEQ ID NO: 180437 - RNA, 75 nt, Homo sapiens
ggggacacgcgacgaggcccgccaagaggcgccgcaggaggaccaagaacgcccagcccgcgggcaccggcagaa

SEQ ID NO: 180438 - RNA, 82 nt, Homo sapiens
gccgccgcgccggagccccacagggcccaccgaaaagcgagaaaggccccagaccaccaacaccagccaagcaaacgccccg

SEQ ID NO: 180439 - RNA, 76 nt, Homo sapiens
ccgcaccgcccgccgcccgccgcgcgccgccgcggaggcccagcaaccgccccgcgccgccccggaccaccgccca

SEQ ID NO: 180440 - RNA, 42 nt, Homo sapiens
cacagccggcgacggcgcgaaaagcaaggcagaggaagagcc

SEQ ID NO: 180441 - RNA, 40 nt, Homo sapiens
agcagcggaaaagaccagcacaggagccaagaggccacga

SEQ ID NO: 180442 - RNA, 78 nt, Homo sapiens
ggcgcgagacccagaggccgcggccgcgggcagaagcggaagcggagggggcaagacaacacagggcagcccaagacg

SEQ ID NO: 180443 - RNA, 56 nt, Homo sapiens
cacaaaccccgaagagacgaaaaacagaggaagcagaacccagaagaccaaaccag

SEQ ID NO: 180444 - RNA, 77 nt, Homo sapiens
aggcgcggcgcgccgaggcgcccaccaggaaaccagcaggggagcagcaggacacgggccaccaagagaagggcgac

SEQ ID NO: 180445 - RNA, 79 nt, Homo sapiens
aaaccagaaccgaaacggaaagaagcaccggagagacagcacagcacccacaaagcaacgaccccagccccgcaaaaac

SEQ ID NO: 180446 - RNA, 86 nt, Homo sapiens
agagccagggggggaagcccaaggccggcagcagcggaccggcccagaaaaaccccgggggaaaacaacggagcacgcaaagcaag

SEQ ID NO: 180447 - RNA, 77 nt, Homo sapiens
cacgaggaggccgagagagaggccggagcccaccaagcgggaagcggacccagaccgcggggaagcacggacgaacc

SEQ ID NO: 180448 - RNA, 39 nt, Homo sapiens
cccggacgacccgggaaccaagaggcccagggagaaaag

SEQ ID NO: 180449 - RNA, 99 nt, Homo sapiens
aaagacagccaacaaaagaggcggaacgcagaagcgcccaggaacacagcagaagggaacacccgcacagaaagaccagggaaccacagggaacccaag

SEQ ID NO: 180450 - RNA, 80 nt, Homo sapiens
gccggcccgcgcgaaaccaacccagaggggccaaaagcgccaaagcgacaggagcgcacaacggggccacagagagcagc

SEQ ID NO: 180451 - RNA, 79 nt, Homo sapiens
ggcgcgaccacgcccggcgccccaccccaggcggacaagggaacacaaaccagacaggagaggcacccccaggaccgcg

SEQ ID NO: 180452 - RNA, 66 nt, Homo sapiens
gcacgaagacagagagacgccacggggcccagacgggcagccaagaagcgcgaagacgggagacgg

SEQ ID NO: 180453 - RNA, 77 nt, Homo sapiens
aggccggagacaccagcaggacaccagaaaggaagaagaacagaacccaggaagagcacaagcagacaaaacaaagg

SEQ ID NO: 180454 - RNA, 75 nt, Homo sapiens
aggaaaaccgacgagagccaaaaaccgaacacccggaaggggacaagggacggcgaacagaccccgcgcgggggg

SEQ ID NO: 180455 - RNA, 113 nt, Homo sapiens
agcacccgagcaaaccccagcaagagcggaggcgcccggcggagcagaggaaccacacgcgacaggggcaccccccgggaagaagccccccagcaaagccaaccgcggacgga

SEQ ID NO: 180456 - RNA, 75 nt, Homo sapiens
gaaaagggcagggacagcgcaggcagcaggcgccggcggcagagcggggagacgagacaaccgccccgccgccgg

SEQ ID NO: 180457 - RNA, 53 nt, Homo sapiens
aggagcacccaggaccaccagaacgagaggagagagaagaagagagggcccga

SEQ ID NO: 180458 - RNA, 79 nt, Homo sapiens
cggaccagaagaaacacgggccgggagcggaggaagaccaagaggagcgagggaaaccgagaagacagcgggccccgga

SEQ ID NO: 180459 - RNA, 76 nt, Homo sapiens
aaggagagaaaccccaggcccgagacaccgaaccccccaaccaagcaaaaccggagagacacagagagacggaagg

SEQ ID NO: 180460 - RNA, 76 nt, Homo sapiens
agcggacgggaagaaccaacgggaggcaagcagacaagacggaggagcgggcccaagggagcagacaggagaaaac

SEQ ID NO: 180461 - RNA, 86 nt, Homo sapiens
gcagcgccgaagcagccgggagccggagcgggcgcggacgccgaggcaccgaggcaccagaggaggaacaacaaccgaccccgcgg

SEQ ID NO: 180462 - RNA, 73 nt, Homo sapiens
cgcccgcgaggcccgcgccaagggggcccagagagggccgaaccggaggacaagccaggccacaaggaaccaa

SEQ ID NO: 180463 - RNA, 64 nt, Homo sapiens
cgggcccagcccgagggcgccacccccccccacagcaggaaccaagcgggaagagggcagcaga

SEQ ID NO: 180464 - RNA, 54 nt, Homo sapiens
gccggccggcggcaaagacaaaagcaagccgggaggcggcgcccccccgcgccg

SEQ ID NO: 180465 - RNA, 60 nt, Homo sapiens
cagggggaaagagcaccagcgccgaccgggacgaacacccagagacagggcaccacggcc

SEQ ID NO: 180466 - RNA, 80 nt, Homo sapiens
cgcacgcgaggccgaggcggagaaggggcccgagcgcccagacacgacagagagacggcaagcaggaaacggaggacggg

SEQ ID NO: 180467 - RNA, 48 nt, Homo sapiens
ggagaagcccagggagcgcaccccaggaaaccaaaagacagaccagaa

SEQ ID NO: 180468 - RNA, 80 nt, Homo sapiens
gaccgcaaaagacagcagagcggaggcgaggagccgagaaagcaacaaacacagaagaccggccgcccccacgagccgcc

SEQ ID NO: 180469 - RNA, 72 nt, Homo sapiens
accgggaacaccaggccaagcaccaaccacaggaaagcacacgaggagaaaacaaggaacaacaagagagcc

SEQ ID NO: 180470 - RNA, 82 nt, Homo sapiens
gagaagcgaaggacagaaaggcgacaccaaccgagcccagaaagagacggcgccgaggaagcacaggcaacaccacccgcgc

SEQ ID NO: 180471 - RNA, 73 nt, Homo sapiens
cgcccgccagacccacagcacgccagcgcggccacgcgcccggaggcgggcgggcgagacccgaaaggccacc

SEQ ID NO: 180472 - RNA, 53 nt, Homo sapiens
acaagccgcgggaaagaaaacaagagccgcaaagaaaacagaaaaagcaccag

SEQ ID NO: 180473 - RNA, 57 nt, Homo sapiens
ggcggcccaggcgcacaccgcggaaggagggccccggagcagccacaccaccgaggc

SEQ ID NO: 180474 - RNA, 73 nt, Homo sapiens
cggaaccaaccaagaaaaagcaaggagaggaggagcacaacggagacaaagggccagcgagacagaccgaaac

SEQ ID NO: 180475 - RNA, 55 nt, Homo sapiens
gagaaaaggccaagaaggcaggagggagagaagaggcagcggggcagaacgaaga

SEQ ID NO: 180476 - RNA, 78 nt, Homo sapiens
aaagagagcacagagagaagagacgggaaagccgaccagagcaagcagaagaggaacagaagaagcagagcagagacg

SEQ ID NO: 180477 - RNA, 76 nt, Homo sapiens
gacacaccgccggcccggggcggcgccgaggggaggaggcggaacacccagccacaccccaccgcccagagaaggg

SEQ ID NO: 180478 - RNA, 51 nt, Homo sapiens
ggggaacagggccaacaagagaccacagagaagcaggcgaccaggcgcgcg

SEQ ID NO: 180479 - RNA, 70 nt, Homo sapiens
caggacaacgagccacggaggcggagagaggaaggaagaccagggcgcaaaacagccaacgcccggcgac

SEQ ID NO: 180480 - RNA, 80 nt, Homo sapiens
ccgccaccggaaaaccaccaccaaacaaacaggagcagggaaacgaacagccaagacccaaacaaaccaacaacaacccg

SEQ ID NO: 180481 - RNA, 46 nt, Homo sapiens
gcgaaagaacgaaacaaaagccggagcgagaacgggccacccagac

SEQ ID NO: 180482 - RNA, 83 nt, Homo sapiens
ccccgcccagccaaagcaggccgccgccccccgaggagaccgggcccggaaggagccgcccagcaaaacccaacgggaacccg

SEQ ID NO: 180483 - RNA, 42 nt, Homo sapiens
gaaggcgggccgcgccgcgaaggggacccggacaagcaaggg

SEQ ID NO: 180484 - RNA, 70 nt, Homo sapiens
ccacccaggggagaggagagaaggacgaccccaccggcaagaacaaccgcagaaggccagcgagaagaag

SEQ ID NO: 180485 - RNA, 76 nt, Homo sapiens
caggagcagaggaagcgggagggccagagcacaagaagacgacagagaagaggaaaacgcccccgcaagcgagaaa

SEQ ID NO: 180486 - RNA, 68 nt, Homo sapiens
acccagaccaagcacaggcaagaacggaagcacgggcggaggaaagcacaagcagagcccccgcagag

SEQ ID NO: 180487 - RNA, 88 nt, Homo sapiens
gggcgcagcggggacgcggacgcacgggcgcccgcgccggcagaggaggcgagcacccgccagggagaggaacccccgcgcacccagc

SEQ ID NO: 180488 - RNA, 57 nt, Homo sapiens
cagcagaagacaaaaaccgagcccagaaagacaaaagcaagccgggaggcggcgccc

SEQ ID NO: 180489 - RNA, 79 nt, Homo sapiens
ccggaacacccggaagccgagaaaggaaaaacccaaggaaaaggacaccaaagacagaggacagacccgagacagccac

SEQ ID NO: 180490 - RNA, 78 nt, Homo sapiens
gggaaaacgcgcgggccaagagagacaaggggccccgggaacacagcccggggggccggggagagaaggcgcggccca

SEQ ID NO: 180491 - RNA, 79 nt, Homo sapiens
cgagaccacagaggccggggccgagaacaagaacccgggaccccagggcgcagacaggcccaaaccgccaggaacacac

SEQ ID NO: 180492 - RNA, 45 nt, Homo sapiens
gcgcggcggccagaggaaccccgaggccggcagcagcacccagag

SEQ ID NO: 180493 - RNA, 72 nt, Homo sapiens
agagacaaacaagaagcacgacagacgcacagggcaggacggcagcaaacaaggcccagacggaacaagggc

SEQ ID NO: 180494 - RNA, 78 nt, Homo sapiens
cgcgggcgcgcacgcgagaacaagaacgacaagcacacaccaccgcaggaagcgaaagggggcagacagaagagagac

SEQ ID NO: 180495 - RNA, 65 nt, Homo sapiens
gggaagcaaagccaagcagacaccacgcaaaacaaaagacccaaaagcgagcaggcgacccaaaa

SEQ ID NO: 180496 - RNA, 71 nt, Homo sapiens
aaaaaccagagggaaacggcacaccaggcggcaggggcaaccagacgggccaagagggacccagaggaaga

SEQ ID NO: 180497 - RNA, 80 nt, Homo sapiens
gccaggagcgacccggcggcagcggcggcgagcgccgcgagcggcgcgggacgcgaggccggggagcccgcgcgagcccc

SEQ ID NO: 180498 - RNA, 91 nt, Homo sapiens
ccaggccggagccgggccgccgcggccgcagcgacccgaccccacccgacaggccagaggcagaggccgggagcgcaagaggacagacggg

SEQ ID NO: 180499 - RNA, 74 nt, Homo sapiens
ccagccgaccgagcccaggagcgccacgcgcggaaggcagcgcccagcagcgcagagcaggggagcagcaagcc

SEQ ID NO: 180500 - RNA, 71 nt, Homo sapiens
aggggggccgcgccccccgaagaaccaccggcaagccgcaggcgcacacagagaaagcgagaaggcagagg

SEQ ID NO: 180501 - RNA, 75 nt, Homo sapiens
caaccacagccggggggcgacagcgccccgacaagaagccgaagggggaaaccgagagccggcgcagacaacccg

SEQ ID NO: 180502 - RNA, 68 nt, Homo sapiens
agcaagcagcaaacagccgaggaagcgagacagggaagggcccagccagggcagaagagaggagaccg

SEQ ID NO: 180503 - RNA, 71 nt, Homo sapiens
ggggcagacaacgaccagaagaagccaccaagaacagccacaagccacaccccccaagcccaccggcaggg

SEQ ID NO: 180504 - RNA, 85 nt, Homo sapiens
ggcaagccccgcccggccaacaaggagcggaggcggagggacaagacaacaacggacgccagccgaaaacaccagacgaacgcag

SEQ ID NO: 180505 - RNA, 74 nt, Homo sapiens
ggaaaccagcccggccgccacaggccagcaagaaagggagcgcggcgacaagaaaagaaagccgagggaaaaac

SEQ ID NO: 180506 - RNA, 90 nt, Homo sapiens
gagacgagggaagagccggggacggccaggcccacaacagcaacagcgaagcgccgggaagagagagacagcaaagccccacccagacgg

SEQ ID NO: 180507 - RNA, 79 nt, Homo sapiens
gaagggcaagggccaaaagagggcagcgacacccagacccaccggaccaggcccacccagaagcaacagcccaacagga

SEQ ID NO: 180508 - RNA, 88 nt, Homo sapiens
gcgcgggcggcaggcggcggcgcgggaaggaaggagcagagcggccagaggagcacccccacccccgacagcaccgcaggaagggggg

SEQ ID NO: 180509 - RNA, 52 nt, Homo sapiens
ccaccaggcagaggcaacagaggagcaacaaggagcaccaggacccgggaac

SEQ ID NO: 180510 - RNA, 84 nt, Homo sapiens
gaacagacacggggaagcgcaaaaacaagacggggcgccccacagaggggcgacgaaggacagaaaacgggccccagacacaag

SEQ ID NO: 180511 - RNA, 84 nt, Homo sapiens
gccacagcgaaggcgcgagggacaagagcagagaaacgaaggcagcaaaaagaagagcagaaacgaaggaaaaggcgggaagag

SEQ ID NO: 180512 - RNA, 88 nt, Homo sapiens
agaccaaggcaacaaggacaacaagagacgggacaagacagggcaaaggacagaccagagggggcaggccccaacacgccgccacgcg

SEQ ID NO: 180513 - RNA, 64 nt, Homo sapiens
cggaagcggagagcaacagcgcgccgccagaggcaggaagaagaagacgagacagggcgaacca

SEQ ID NO: 180514 - RNA, 65 nt, Homo sapiens
acagaccagaggggggacggggaggaacacccagacacaacacaccccaggaagacaggccagcg

SEQ ID NO: 180515 - RNA, 88 nt, Homo sapiens
agcgcaaggacagcgcgaggccgcgcagcccagcgcagccaagaggccacacgcaaaaggggccggaggcgaaggacgaaacgcacac

SEQ ID NO: 180516 - RNA, 77 nt, Homo sapiens
gccagaggcgaggcagggaggacccacccccgggggaaaagaacgaggggaaacgggcccagagccgccaagaagca

SEQ ID NO: 180517 - RNA, 65 nt, Homo sapiens
gaaaagaagagacagcgagaacaaaggagagaggaccacccagaggagcaacaggagggaaaaaa

SEQ ID NO: 180518 - RNA, 95 nt, Homo sapiens
cagcgagaaacagaaagaccacgaaccaaaggggaaagcaaggccaaagacagggagaaggcaaagaaaccccaaagccagcaagaccacagcag

SEQ ID NO: 180519 - RNA, 101 nt, Homo sapiens
gcccacccagagccagaggcccgccccacccgcagccgcacccccggcggcagcacgaaagaccacgggaccccacaccagccagggaacaacggccccca

SEQ ID NO: 180520 - RNA, 71 nt, Homo sapiens
ggcgggcgggccggaggcgacagcgaccacagaaagacaacggaggccacggcccacagcagccagcaggc

SEQ ID NO: 180521 - RNA, 76 nt, Homo sapiens
ggagaccacgcagaggacagcccggccgcgcgcaccacggagaaccacggggaccaagaagcgagcagcccaaacg

SEQ ID NO: 180522 - RNA, 86 nt, Homo sapiens
agacggagccggacccgccgcccccgggaaaccagcgcaggcccccagaagacagaaagcgaagaccagacgcgcaccaacagcaa

SEQ ID NO: 180523 - RNA, 53 nt, Homo sapiens
gcggccaccgcgggagaacacaaggccagcaccgacaagcaggggaccaaaac

SEQ ID NO: 180524 - RNA, 77 nt, Homo sapiens
aaccagaaacaagagccccaagaagaaaaaggagaccggaaagagccacaaagggaaaaaaacaaaaacagcaaaag

SEQ ID NO: 180525 - RNA, 38 nt, Homo sapiens
aaccaaaagggccaggagcgccccaaaagaaacaaagc

SEQ ID NO: 180526 - RNA, 41 nt, Homo sapiens
gacccacaggaaacccgaaagggaacggagggaaagcgaca

SEQ ID NO: 180527 - RNA, 79 nt, Homo sapiens
ccagccaggagggaacaaagaagcgggccccaggggaagccacgaccacacagcaaggcagagggcggggcgcgagaga

SEQ ID NO: 180528 - RNA, 72 nt, Homo sapiens
gaccaaagggaagagaaacgcaaccggaacaggagacagcggagaaagagcccgggaagcacgaagccgaga

SEQ ID NO: 180529 - RNA, 76 nt, Homo sapiens
gaaagacacacggagacaaaccgcgccaagccccccgggaagacacaaacgcaccaccagaaagccaagcggaaaa

SEQ ID NO: 180530 - RNA, 74 nt, Homo sapiens
cagagccccacgggaaggagagcagccagcagggagcggcaggggaggcgaagaagagcccggacagaaagacg

SEQ ID NO: 180531 - RNA, 67 nt, Homo sapiens
ggaagcaggaaaaacaaagaagacccaggacagccagacaagaccccaacgaagggccagaaaaggg

SEQ ID NO: 180532 - RNA, 76 nt, Homo sapiens
acgagagcagaacacaggacccgacaaacgaaaagaacaaaaccggggcggggaggggagaggcacacgaaaggac

SEQ ID NO: 180533 - RNA, 52 nt, Homo sapiens
caccgaccagccagagaacccgaggcacacccagaagccacaggagaagcaa

SEQ ID NO: 180534 - RNA, 81 nt, Homo sapiens
ggagaaggaacagaagagaagcaaggcaccgacacagggggagaaacaggcagcagaacgggaggaagcagacacgagcaa

SEQ ID NO: 180535 - RNA, 78 nt, Homo sapiens
caagacgccaggacccacggaagccagaaaggggagcgacagaaaagcagcacaacccccggagaaccgaagggacac

SEQ ID NO: 180536 - RNA, 86 nt, Homo sapiens
cccccaagaaggaagcacagggccggccggaacagaaggaagaggcccagcagaagggaccgcgagccaccccccgccccacccag

SEQ ID NO: 180537 - RNA, 87 nt, Homo sapiens
cagcaagagcggaggcgcccggcggagcagaggaaccacacgcgacaggcagagcaaccagagagcccaggggagagagcaaagcac

SEQ ID NO: 180538 - RNA, 70 nt, Homo sapiens
agaaggaccaagaaccagcggcgcgaccacaagcgagcaggaagcagcagcgcaggcccaggacggagcc

SEQ ID NO: 180539 - RNA, 77 nt, Homo sapiens
agagggcaccagcagcgacggagccacccgcgaaaacggccagggccgccgcacagggaacaccagaggcgggacca

SEQ ID NO: 180540 - RNA, 85 nt, Homo sapiens
acgcaccgccaggcaggcacaaaggacccggacaggaccacccaaagcaagaaagcggaagccgggccaaaggaggcgaagggaa

SEQ ID NO: 180541 - RNA, 52 nt, Homo sapiens
ggaaggacaaccgcacgagaacccagcccgagccaaaaagcaccacccccaa

SEQ ID NO: 180542 - RNA, 56 nt, Homo sapiens
aacccaccgggaaaaggcacgaagggggaccccacaccacaaaccgaggaaagaag

SEQ ID NO: 180543 - RNA, 73 nt, Homo sapiens
ccgcgaccccagcgggcccggggaggcaccgacgaggagacaacggcaagcggagaagagcaaggccgaaccg

SEQ ID NO: 180544 - RNA, 73 nt, Homo sapiens
ccggcgcccccgcaagaggacggcgccggcagccgggaccccgacggagagacaaagaagacggagggggggc

SEQ ID NO: 180545 - RNA, 55 nt, Homo sapiens
ggagagccagggacgggcagcaagagccagagcaaaggcaaggcaggggcggggg

SEQ ID NO: 180546 - RNA, 73 nt, Homo sapiens
gcgggacccacaggcaggccccccgccgccgccgccccacccacgacaacccagccggcagggggaaagaccc

SEQ ID NO: 180547 - RNA, 86 nt, Homo sapiens
gcccgcggagcacccgccggccagagaagagaacaggaagaaggaccggggagacaggaacacgggcaagacagcgcgggcaccgc

SEQ ID NO: 180548 - RNA, 58 nt, Homo sapiens
ggacggaagaccccggccaaagcgaaaggcagcccagcaaggaaagccacagcgaaag

SEQ ID NO: 180549 - RNA, 65 nt, Homo sapiens
agccaaccaggcgcaaaggaggaggaaaaaggaccaaacagcaagggaaggcaccacaacgccgg

SEQ ID NO: 180550 - RNA, 40 nt, Homo sapiens
gggccacggcgcggacgccaggggccccagcgagagaaca

SEQ ID NO: 180551 - RNA, 77 nt, Homo sapiens
ccggcgggagagagagcgcccagaaagccaggaccccggacccagcgaccaacgccccgcagggcggccggcggaac

SEQ ID NO: 180552 - RNA, 41 nt, Homo sapiens
gaagaaagcagcgaagcacacacagccgccagggagaaaag

SEQ ID NO: 180553 - RNA, 32 nt, Homo sapiens
gagggagagccaaagaagaaaagccgagacca

SEQ ID NO: 180554 - RNA, 75 nt, Homo sapiens
cagagaaaaagaaaagacaccgcacgaaaggcaacaagaaaaacgaaaagcgcaggaggaggacagaaaagcagc

SEQ ID NO: 180555 - RNA, 75 nt, Homo sapiens
cagcaggcacacacggacgacgccggcaggccccagacgccaccgcaggcaaggcccaagagggccagcaagccg

SEQ ID NO: 180556 - RNA, 75 nt, Homo sapiens
cacccagagcacaccaggagagaagaagcaaagagaggagagagaaacaccccggagggcaagaagcagcggaga

SEQ ID NO: 180557 - RNA, 54 nt, Homo sapiens
cgggaggagaacacacagaggcgacacgggaaacgcacccgcacagagcgcaga

SEQ ID NO: 180558 - RNA, 74 nt, Homo sapiens
aacaccccgggcgggcagcaccaaaacgaaagagaccgcaggcgggacaagaaaagaaaaagcaacagaaaaac

SEQ ID NO: 180559 - RNA, 78 nt, Homo sapiens
aaacgaaggaacaaaggcagaacaagagaaaggggggcacagaagaagaagaaagcggggagaaacaaaagaggaaaa

SEQ ID NO: 180560 - RNA, 75 nt, Homo sapiens
cggaagacaggccacccagcggggagcacggcgagcagccaggccaggagagacgaaggaaaagccaaaaagcaa

SEQ ID NO: 180561 - RNA, 75 nt, Homo sapiens
ccgaggggaacaacccgcgcccaggccagcgccccaggccaagagggacccacccggcgccgacaaccccggaac

SEQ ID NO: 180562 - RNA, 73 nt, Homo sapiens
cagaaggaacgacgcggaccagaagccagagcgaggacgccggcaggaaaagcgacacaccaggcgccaagcc

SEQ ID NO: 180563 - RNA, 74 nt, Homo sapiens
aaaccgcagcgcacaaccccagacaagaaagggaagaaaacacaacagaaggaagcaagggaccccgacggaga

SEQ ID NO: 180564 - RNA, 81 nt, Homo sapiens
cccaacagaagcccagccgacggcccacaagggcaagggccccagcccaaccagagcgaccaggcagagacaagagaagag

SEQ ID NO: 180565 - RNA, 81 nt, Homo sapiens
gcccacccgcacgacccagcaaggcacggcccagcaggagggcggggccgcggcagccacccccacagcacgccacacggg

SEQ ID NO: 180566 - RNA, 62 nt, Homo sapiens
ccccccaccccaccaaccgcccacccagcgcacaccccagagacgaggacgcgcacaggaaa

SEQ ID NO: 180567 - RNA, 77 nt, Homo sapiens
aagaaacaacacccccaaagcggagcgcccgaagagcaggccaaagagcgggccgaacgaacgaagagagaagggag

SEQ ID NO: 180568 - RNA, 88 nt, Homo sapiens
gccaggccgccgccgagccgaggaccggcacggagagggcgcccggcacgcggcgacggcgccggcggacccacccggcccggacgcg

SEQ ID NO: 180569 - RNA, 75 nt, Homo sapiens
aagagccggccgccaacccagaaggagcaacaaggcacggcaacaagcagaaacggacgggcaaggccggcgagc

SEQ ID NO: 180570 - RNA, 55 nt, Homo sapiens
ccaaaggcccgacaaggagacccggaaagaaggggccgcccgaaagaagcccgga

SEQ ID NO: 180571 - RNA, 77 nt, Homo sapiens
ccaccgggaaaccgagcaaggcggccaaccagggggaacaccaggcaggaaaacaagcaacacgcccacgacacaag

SEQ ID NO: 180572 - RNA, 79 nt, Homo sapiens
ccgaggcgaagggaagaggcgcccgccgcgggcaggagagcagccaggggacaggcaaaggagaaacaagaccccaggg

SEQ ID NO: 180573 - RNA, 80 nt, Homo sapiens
ggaccggcgcgccggaccccgccccccccgcgcggcgcgggcgccgggggcaccgagggcccaagccaggaccacgcacc

SEQ ID NO: 180574 - RNA, 73 nt, Homo sapiens
ccacccagcagcaagaggccacagggaccccagaaggcaaagaaagcacgaggaccagccacgaagaacagaa

SEQ ID NO: 180575 - RNA, 80 nt, Homo sapiens
ccgcccgcggcgccacccacaaacagggcgccaccccggcccagcccggcagccaggcagaaggggacaacaggcccaca

SEQ ID NO: 180576 - RNA, 66 nt, Homo sapiens
caagagaaaacaccaggaccccggcacaacccgacgacacacacagaggagaccccggagaagcac

SEQ ID NO: 180577 - RNA, 79 nt, Homo sapiens
gacccggggacccggaccggggaccagggaagaagccaagacgcaggcagagacgacaacccggcccaagcgggggagc

SEQ ID NO: 180578 - RNA, 79 nt, Homo sapiens
gacaagccgggagcgggcggccaaccagcaaggacaacagcccagaacggacgcaccgggacggaccggaggacacagc

SEQ ID NO: 180579 - RNA, 62 nt, Homo sapiens
gagaagcaagcggaacccgaggacggcccagaccggcgccacaagaccaccaccacggacgc

SEQ ID NO: 180580 - RNA, 101 nt, Homo sapiens
ccgaacccccagcccaaacccggaaacccagcggcccagccggaacaccagcaggaaaaaagagcggcagaaggccaaacggccgagcaggcgagcgaaga

SEQ ID NO: 180581 - RNA, 55 nt, Homo sapiens
agagccggaaccacggagagccgaacaaggacaagacgcccacaggacaaacagc

SEQ ID NO: 180582 - RNA, 80 nt, Homo sapiens
agacgcacgaccagcacaggcggggcggagcaccgaggagcagggcgggcccgccaccaccggaggcccagaaggaccgg

SEQ ID NO: 180583 - RNA, 84 nt, Homo sapiens
gacagagagccaccacaggaagcgcggaaggcgaggagagcaggaccaggcaccgacacgacggcagcgagccggagcgacaga

SEQ ID NO: 180584 - RNA, 79 nt, Homo sapiens
cgggacgccacaggcgggaaggaacaccaagaacccagcccgcgacacacacagagcacgcccacaggggggggccaag

SEQ ID NO: 180585 - RNA, 83 nt, Homo sapiens
aaggagcagcccaggaccgagaccggagcagccggggcggagcggggcgaccaaggaaagagccaaaagagccaggaagggcc

SEQ ID NO: 180586 - RNA, 80 nt, Homo sapiens
aacaacaccacagacaagcaggagccggggaaacgcaggaggcgggcggggagcgcggaccagaagagaacacgccagga

SEQ ID NO: 180587 - RNA, 72 nt, Homo sapiens
gggacacacaggacaaaccacgcagaggcaagcgacagggccacgagcccaggggccgaacccggccaagcg

SEQ ID NO: 180588 - RNA, 57 nt, Homo sapiens
gagagagccagaagaggagaagaagggccaggaggaagaagccagacgacagcagga

SEQ ID NO: 180589 - RNA, 77 nt, Homo sapiens
gccaacagcagacaacagcaacagcaccccaccagaggggggaggcacagaagggggggagagccggcaagggacag

SEQ ID NO: 180590 - RNA, 71 nt, Homo sapiens
gaagagagaccgacacccaagacaagacagcgcaaggcaggaacgcccacgaccagcaccaccgcaaccag

SEQ ID NO: 180591 - RNA, 77 nt, Homo sapiens
cagcaggaggagccaaggggagcagcgcgcgggaggacccaaggcccagggaaagcaccccagagacccacaccaag

SEQ ID NO: 180592 - RNA, 77 nt, Homo sapiens
agcggccacgcgaagagaccgcccacaaagccgcaggagcggggcgcccgaggaaacagaagacagccgaaccaagg

SEQ ID NO: 180593 - RNA, 78 nt, Homo sapiens
cgccaggccgcgccgacgcacccagcacgggccagaacccaaggagaaaggcggcgcaagaggagccaggagcacggg

SEQ ID NO: 180594 - RNA, 81 nt, Homo sapiens
cagaaaaggaagacacagacagaacaacaggagaagagaacggcgccgggccaccacccggaggacgacaagcgcaggggc

SEQ ID NO: 180595 - RNA, 56 nt, Homo sapiens
aagaaccaggggagaagaaggccagggaggagggacagggaccggaaagacaacga

SEQ ID NO: 180596 - RNA, 76 nt, Homo sapiens
cgggacccgccgcggcgagcgccaccgcagggaagcaaaccaggagccacagcggcagggaaaaaaccagcaaccg

SEQ ID NO: 180597 - RNA, 67 nt, Homo sapiens
gcgccaggagcacagaagagcgaggagacaagacaaaggcagaagcagggaaggcccacccagcaga

SEQ ID NO: 180598 - RNA, 77 nt, Homo sapiens
gaaagcgcaggccccgaggacccgccgcacgacaggagaagacagaggagccagaccaagagacagcacaggcgagc

SEQ ID NO: 180599 - RNA, 60 nt, Homo sapiens
gggaacccgcgcccaccagagacgaggaagcgaggggaggcgggccccacaacccggagc

SEQ ID NO: 180600 - RNA, 84 nt, Homo sapiens
agcgcgagggcacgagcgcccgaagagcaaaaccagcgggcggccgcgcccccaggacacaagagggaaagggccccaagagcc

SEQ ID NO: 180601 - RNA, 66 nt, Homo sapiens
caaccaaaaaaagggagcccaagcaggaacgaaggccagaagcagcaaagaagcccgaagaaggaa

SEQ ID NO: 180602 - RNA, 55 nt, Homo sapiens
acagaggagcaacaaggagaaggagaaaccaagagaaagaaggagaacaaacgcc

SEQ ID NO: 180603 - RNA, 80 nt, Homo sapiens
cggagcggggcgacgaggcgagcgggggccgggcagcggcggagaaaccaccacaaacacgaggccagcaacgaccaaca

SEQ ID NO: 180604 - RNA, 73 nt, Homo sapiens
aaacgaagaaggcaaaaccaagaggaaaagagccgggccccaaccgggaagagcggagcagcaccaacacggc

SEQ ID NO: 180605 - RNA, 90 nt, Homo sapiens
aacggggcgggggaggccaccagccggacagccggcggggaaagacaaggagccgggccgagaaaccgaaccagagaccagagaagaaac

SEQ ID NO: 180606 - RNA, 45 nt, Homo sapiens
gcagcgaggaaaagaaggcaaaaaaggaccaccgcagaccgaggg

SEQ ID NO: 180607 - RNA, 76 nt, Homo sapiens
agcgcccaggcacccccagcagcaaggccaggagggggccacaccgaacccagccgggaggccaaggccagggagc

SEQ ID NO: 180608 - RNA, 82 nt, Homo sapiens
cgcgggcaacggcgggacagcaaaaagacccaccaaggaagcagcggccacgccagagccgaggaaggcaccaggagaggag

SEQ ID NO: 180609 - RNA, 91 nt, Homo sapiens
agaacaagaagaagaggagaggaaaaaggaagagagcacgcagccaggaaaccacgagggacaagagaaaaaaagggcgggcgaacaaaaa

SEQ ID NO: 180610 - RNA, 83 nt, Homo sapiens
agaggaagagccaaagagcaacaacgagcgacaccaaaggccaaaacagaagaggcaaagcccagccacagcagcagcccagc

SEQ ID NO: 180611 - RNA, 80 nt, Homo sapiens
gggccggaggagccagagcgcagaaaggcacccacccgcgagacccccaagagacaaaagaagggagaacggaaagaaac

SEQ ID NO: 180612 - RNA, 80 nt, Homo sapiens
ccaaagacaacaaaacgaggacgggacaagacaagcacaagcggccagaagagcgaacccgcccacccacaaaccaaaaa

SEQ ID NO: 180613 - RNA, 67 nt, Homo sapiens
gggcgccccacagaggggcgacggcacgcaaaagccacgacggaacaggagccagccccagcgcaga

SEQ ID NO: 180614 - RNA, 78 nt, Homo sapiens
aaaagaggggaacacgcggagccgcggagacggccaccgcagcgcccgcaaggaagagcgcacgaggagacccaaaag

SEQ ID NO: 180615 - RNA, 77 nt, Homo sapiens
gcggccgagcaggcgagcgaacgacgacgaaaaggggaaaggagaaagaagggagaagaaacagagaaccccaagga

SEQ ID NO: 180616 - RNA, 76 nt, Homo sapiens
gccaggggacggggaaccaagcgcgaacagaccaagaccggacaaggcagggggcccacgcaccaagacggcagac

SEQ ID NO: 180617 - RNA, 80 nt, Homo sapiens
aagacccacgccacaccaccccccaggggaggagagccgcgcccgcggcggggacagcccagcccccggacccgggcgga

SEQ ID NO: 180618 - RNA, 80 nt, Homo sapiens
ggaagcaggacgcgccgcgccccaaggaagaccgcaggaaagcaggaaggcaagaaagccaaggacgaaacccacacgga

SEQ ID NO: 180619 - RNA, 83 nt, Homo sapiens
gacaaggcccgagagcagcgcgccggccaggagacgcagagccccagcggggaggcgcaacacgaggcgccgcagcacccgcg

SEQ ID NO: 180620 - RNA, 78 nt, Homo sapiens
cccacacaaggcagccgccgggagccagaagcacaggcccgggcgaaggggccacgcgaagcgaaccccaggcaccca

SEQ ID NO: 180621 - RNA, 72 nt, Homo sapiens
gccggccccgcccccggccgagcgacgcagcgcggagggaaggacgaaacgcacaagaggcgaagacgcccc

SEQ ID NO: 180622 - RNA, 75 nt, Homo sapiens
cacgccgcgcagcccggccgccggcccccaacagcgccgaaggaggcagcggccacaaaagccacagcggaaccg

SEQ ID NO: 180623 - RNA, 85 nt, Homo sapiens
gggaccacggaccaaaggccgggcgcagaacccccagaccacagcccacgccagggagcgggaggacgaggaggaggccgccacg

SEQ ID NO: 180624 - RNA, 77 nt, Homo sapiens
gagaccaggggcaccgcagcgaccacccacacaaacccgggacgggccgagagaccacagcaccgggaagccagcag

SEQ ID NO: 180625 - RNA, 71 nt, Homo sapiens
gcagggcgcccccggaaaggagaggaaaccacccagaaggaagggccacgaagaagccaaaacgaaaaacc

SEQ ID NO: 180626 - RNA, 58 nt, Homo sapiens
cgaggccggcgcgccacacagcggagggggcacggaccaggagcacccacccaggccc

SEQ ID NO: 180627 - RNA, 73 nt, Homo sapiens
caaaggcggaaaaaggcaccaggaggggcccgagagaagagaagagcggaggaacaggaccggagccaagcaa

SEQ ID NO: 180628 - RNA, 82 nt, Homo sapiens
gcgaggggagggcaccaggaccaggcccgggagacgcccccggcgaagagagccccgccaggagcggagccccgcccaagac

SEQ ID NO: 180629 - RNA, 53 nt, Homo sapiens
ggaggaagcaaccaaggcaagaggggacgagcaagagagcgaggcagaagcac

SEQ ID NO: 180630 - RNA, 80 nt, Homo sapiens
agagggcaggaaccaccgcccaaagccccgcgcagaaagccaaaggaaaccaaccacagcacgcaggcccggccagacca

SEQ ID NO: 180631 - RNA, 74 nt, Homo sapiens
ggcaggcaccacaaaaaggacaggcagaagacaacacagacaagccgacagcacaggccagagcaaacaaagga

SEQ ID NO: 180632 - RNA, 76 nt, Homo sapiens
cggagcggggcaggggcgacgagagcgcgcggacaccagcagcgcaaaacaccaggagcgccaaccggaacgaaag

SEQ ID NO: 180633 - RNA, 68 nt, Homo sapiens
gccgaggcagccaccaagccggaacaagggacaaaccaaagaccaaccaagaggccagagagcaacac

SEQ ID NO: 180634 - RNA, 38 nt, Homo sapiens
ccgaggcgcccccgcgcgaggaaacccgaccgccccag

SEQ ID NO: 180635 - RNA, 44 nt, Homo sapiens
caccggcggccacgacacaacgcaggccaccaccgcagacaggg

SEQ ID NO: 180636 - RNA, 66 nt, Homo sapiens
gacaccaaagagcaccgcgaaaaaaaggaggcggcaacagggaacgccgcgcagagcccagcccgg

SEQ ID NO: 180637 - RNA, 80 nt, Homo sapiens
gaggcggcgagagaggcaggcggagccgaccgggccagcaggaggcggagcgagacgggggccgcagcggggccggcccc

SEQ ID NO: 180638 - RNA, 74 nt, Homo sapiens
cggcagagcagcaccccacaggacaacccgaggagccaccaggagacagacccagcacggaccccccccccagc

SEQ ID NO: 180639 - RNA, 89 nt, Homo sapiens
ccagccagaccgaagaagcaagccaagacggcccacgagaaccgaagcaccagccgggaggcgggaagagagaagaagaaggaggccgc

SEQ ID NO: 180640 - RNA, 77 nt, Homo sapiens
caggcacccgccaccacgcccagggccagagcagaggcggagaggggcagacccagggaccgaaacgagaaagcccg

SEQ ID NO: 180641 - RNA, 81 nt, Homo sapiens
acgcagcccgcgagcacaggagggagagaggaccccgggacacgaaagccaggaaagggcacagaacgaacagagcagcga

SEQ ID NO: 180642 - RNA, 78 nt, Homo sapiens
cgaacgcgggggacgcccgacggcagcgcgggaaacgcaaaccgagaaaagcgcccaggaagcggaaaaacaaaagag

SEQ ID NO: 180643 - RNA, 75 nt, Homo sapiens
gaaccgaagaacaagaagcaacaaggcaagaaaaaggaaccgaagaacaaagagaaccagagagcacagagaaag

SEQ ID NO: 180644 - RNA, 72 nt, Homo sapiens
gcaggaggcgaaaggaagcaccggaaggaagcaccaagcggaaaacgagacgaaggacaagggaccaaaagg

SEQ ID NO: 180645 - RNA, 67 nt, Homo sapiens
aacacccacggaagagaacgcccgagccccaacccacgcgccccaaggaccacaagggcaagagaac

SEQ ID NO: 180646 - RNA, 51 nt, Homo sapiens
gggggcagcccgaaccagccacaaagcaaagggaaacccagacgacaagga

SEQ ID NO: 180647 - RNA, 42 nt, Homo sapiens
cagcaaaggggcgacacggccagcccagcaggagaggccccc

SEQ ID NO: 180648 - RNA, 70 nt, Homo sapiens
caaaaaccgccgaaaaagagaagacgcacccgaccgggccgaccacggagacgggcgaacacagggaaga

SEQ ID NO: 180649 - RNA, 79 nt, Homo sapiens
ggacccgcccagcagaagaagagaggagggagaacacagaaaccggccccagcaaaccggcacgagccaggcaccagaa

SEQ ID NO: 180650 - RNA, 70 nt, Homo sapiens
cgaacagcgcgacacaggagcaccaacagggacgcagcaacgggcaggaaggaaggaaggcaaagacgag

SEQ ID NO: 180651 - RNA, 81 nt, Homo sapiens
ggagggcggcgcgccgagcggaggcaacacggaaaccgaggagcaccacaaccccagggacagaagaagggaaaccacaaa

SEQ ID NO: 180652 - RNA, 68 nt, Homo sapiens
caccgagaggaaacaagcaagcaaaagaagagaaggccaacgaaacgagcagacaagggcccacacca

SEQ ID NO: 180653 - RNA, 86 nt, Homo sapiens
cgccaccaccgcgaggcaggagagaggaggaggaggcggcgcggcggccccgggaccaaggaggcacgcagcacgggggcaggggc

SEQ ID NO: 180654 - RNA, 77 nt, Homo sapiens
aacaagccaagaaggaagaagaagaagcgcaaagaagcaacacaaagccaccgccgggggaccccggcgggggcggg

SEQ ID NO: 180655 - RNA, 72 nt, Homo sapiens
gaaccgaagagcaaggaaaagaaaagggggaaggaaacccgcgagccccccccaggagcggccgccagcgag

SEQ ID NO: 180656 - RNA, 70 nt, Homo sapiens
cggagcaccaagcggcagcagcagacccagaagacaggcggacaggaagggaggcggaagagacacacca

SEQ ID NO: 180657 - RNA, 64 nt, Homo sapiens
aaaggaagaccgccgagggaacgggcaagaggcagacacaggaacacagcacccacccacaccc

SEQ ID NO: 180658 - RNA, 58 nt, Homo sapiens
gccggaaaagccaacgccggcgaaggagcgcacaccaggaagcagcagcacgaggaga

SEQ ID NO: 180659 - RNA, 71 nt, Homo sapiens
agagacaagaggggagacagaacagcggacaagcacaacagaaccacaaggcaagccagagccacccaaag

SEQ ID NO: 180660 - RNA, 55 nt, Homo sapiens
gccagaaggaccggggaaaaagagggagagggagagcgaacagagacgacccacg

SEQ ID NO: 180661 - RNA, 68 nt, Homo sapiens
aggaaccgcagcacaaaaggaagaacaaagacacgcccgagcggcaggacccaggaggagcgacagcg

SEQ ID NO: 180662 - RNA, 76 nt, Homo sapiens
ccccagaagcagaacaggagaaaagagcgcgccaacgaagaaaagggacggccagagcccgaagaagaaccagagg

SEQ ID NO: 180663 - RNA, 104 nt, Homo sapiens
acgagggagccacggacaacaacaagcaccagagaccgggggcggcagagcaaagacaccaggcaagagacgcaagaagcaggacccgggccaccaaaggggac

SEQ ID NO: 180664 - RNA, 83 nt, Homo sapiens
cccgcgcaccgccgcacgcaaaccagccagcacgggggcccagccagccagcagcgaggggggacggaggcggcacggggcca

SEQ ID NO: 180665 - RNA, 77 nt, Homo sapiens
agacgacggcacagggagaaaccgcccgaaaacggagaagcaggcacgagaggaagccgaacccggaggaagaaaag

SEQ ID NO: 180666 - RNA, 92 nt, Homo sapiens
aaccaaaaacagcaagcgcagagccaaacagccaggcaggccggggcaggagggcgggggcgccacccggacccagagcagcacaaggcggc

SEQ ID NO: 180667 - RNA, 82 nt, Homo sapiens
accgcccgcgcggggcacgaggaacagggaagggcgcgagcggggacaaagcaagagagcggaggaaggacagagagcggca

SEQ ID NO: 180668 - RNA, 73 nt, Homo sapiens
gcccagagggcccagacaccccccacgcggccggccaacccgacaggagaaacgacaggaaaaccaaaggacc

SEQ ID NO: 180669 - RNA, 84 nt, Homo sapiens
ggcagaggcagaccagcagcacgccccgagccccggccccaaagacccaaaacagagacaccccccagcccccgcgccccgaaa

SEQ ID NO: 180670 - RNA, 72 nt, Homo sapiens
aaggcagagcggggcacccacccaaggggcagggaacacacacaaaaggagggaggggggcgccaaaccaaa

SEQ ID NO: 180671 - RNA, 39 nt, Homo sapiens
agcaccgcagaggacccaaagcagggaagaagacgccga

SEQ ID NO: 180672 - RNA, 65 nt, Homo sapiens
agcggcaggaaggccaccacagggccaacaagcagcgaggagcgcagagcagaaaggcccccaag

SEQ ID NO: 180673 - RNA, 73 nt, Homo sapiens
cagagaagccccggccgggccggccagcgccggaaaccaacaaccagcaggagaagagacagcagcagaccag

SEQ ID NO: 180674 - RNA, 76 nt, Homo sapiens
gggccacgcgggcccgaggcgcaccaagggcgaaggagccggcccaaggacaacgagccagcccgcaccacacgcg

SEQ ID NO: 180675 - RNA, 80 nt, Homo sapiens
gcccccaggcgaagaagcgcagccgcaccggccaaggaggaagcagaagcagaaggaacccaaagcgaaaccagaaagca

SEQ ID NO: 180676 - RNA, 80 nt, Homo sapiens
accggacgaccaggcacagcaggcaacgaagcgggaaggaaagcgggggcgagaacgacagggcaggagaaacccagcgg

SEQ ID NO: 180677 - RNA, 41 nt, Homo sapiens
gacaagcaggacagccaaaccagccggaggaacgaaacagc

SEQ ID NO: 180678 - RNA, 74 nt, Homo sapiens
ggggcacgcagccggggaccgcccggccgcgagccggcgcagacgggaaagaccaaaccccaaagcaggccaaa

SEQ ID NO: 180679 - RNA, 55 nt, Homo sapiens
cgaaggaacgccccaaacagaggcccagggaccgcaggagacacggacacgagaa

SEQ ID NO: 180680 - RNA, 48 nt, Homo sapiens
aaagggagaaacagaccaaggggaaaagccgcgcggcccggaggaggc

SEQ ID NO: 180681 - RNA, 73 nt, Homo sapiens
ccgcaaccaaggggacggagaccgagaggaagaaaaggccagggggaaggaaaggaagaggacgaacgacaag

SEQ ID NO: 180682 - RNA, 82 nt, Homo sapiens
cgcgcgaaaaaccagccaggagacgccaaggaaagagggacccccggcccagcaaaggagcgcccgggaacaagccaaggga

SEQ ID NO: 180683 - RNA, 71 nt, Homo sapiens
aacgaagagaaacagagaggcgcagaggaccacgcagcaaggcgcacacagcgcgacacaaaaacggggac

SEQ ID NO: 180684 - RNA, 79 nt, Homo sapiens
aagaagggacagcccgccccccaaggaagcggcaaagccagaaagaggaggccagagcggggagacccagaacagaaga

SEQ ID NO: 180685 - RNA, 83 nt, Homo sapiens
gacggagcggccggggccggggcgccgccgggcggccgggcgcggcgagcccaggaacaggaggcccggacccccagcacaag

SEQ ID NO: 180686 - RNA, 48 nt, Homo sapiens
ggaccaagaaccaggcccagcaacggccacccaaagaacaccacgcga

SEQ ID NO: 180687 - RNA, 80 nt, Homo sapiens
ggcgaagaagcgccaccgcagccggggcacccaccgggcgcacgccccggggacccaccgacaccccacacgcgcgaagg

SEQ ID NO: 180688 - RNA, 76 nt, Homo sapiens
aagccggaggagaagcaagaaggcccggacacagcaaaccgggccacagggcacaccgagcccagaaggagggagc

SEQ ID NO: 180689 - RNA, 67 nt, Homo sapiens
gagccagccacacgaggagacggaaccggagaaaagggagaagcagaccgcaccaggcgggaccccg

SEQ ID NO: 180690 - RNA, 78 nt, Homo sapiens
ccgccggcccggggccccacaccaacgaaaagagcaccggccagcagaaccagccggggccggcaagccccgcccaag

SEQ ID NO: 180691 - RNA, 77 nt, Homo sapiens
aaaaaaacagaacaagagcaagcccaagaaccggcaacaagcagcgagccacaggaacgcgccgaaacacgcaccac

SEQ ID NO: 180692 - RNA, 69 nt, Homo sapiens
ggaccccagccgcgcccgggagagcaaggggcagaaagagaagacagaaaggagggaggagcgcgacag

SEQ ID NO: 180693 - RNA, 79 nt, Homo sapiens
gggggcccgacgcacacgggggcggacaccacaagaagggcgccaggggacagcagacgcagagacacggagaaccccg

SEQ ID NO: 180694 - RNA, 52 nt, Homo sapiens
ggaaaggcaggaaacaagccgcgggaaagcggcgccaagaggggcaaagacc

SEQ ID NO: 180695 - RNA, 77 nt, Homo sapiens
agaggacagagcagagcacccccaaagacagagaagaaagcagagacagagaacaggagagggaaggcaaaacaacc

SEQ ID NO: 180696 - RNA, 85 nt, Homo sapiens
aggcagaggaggagggagggagggaaggagcgcggagcccggcccggaagcaggccggcccggccacccccgggcccgcgcccca

SEQ ID NO: 180697 - RNA, 61 nt, Homo sapiens
caagaagccgcggaaccaaaccccaccgagacagggaccggcacaaggagcgaaaagagaa

SEQ ID NO: 180698 - RNA, 77 nt, Homo sapiens
cgccaaggagacgccccacgaggcccaaaccgccaaggcgccgagcggaagaaccccagccacaaagaggaaaaacg

SEQ ID NO: 180699 - RNA, 74 nt, Homo sapiens
gcggccgcgcacccccggccggaggcaccagccaagacggcgcccgaccaagagacaggagacagaaccgaaac

SEQ ID NO: 180700 - RNA, 73 nt, Homo sapiens
gagccccgcaccccgagagcggagaagcccggaggggggagaagccgcgggagcggaagacaggcccggagcc

SEQ ID NO: 180701 - RNA, 54 nt, Homo sapiens
cgggccggcccaagagagagacacggagggggggccgcccgcccaaggcaggaa

SEQ ID NO: 180702 - RNA, 59 nt, Homo sapiens
gaacccgcaggcccccacacagcgaaggaaaacgcacggcaacccacgaagcccagccg

SEQ ID NO: 180703 - RNA, 84 nt, Homo sapiens
caggaacccaacagagccacgaagggggagagaagcgccagggacgaccggcccagcgcccccgaccaggcggaaggagagccg

SEQ ID NO: 180704 - RNA, 119 nt, Homo sapiens
ggcggagccgccgccgcgccgcgcagaaggccggggccggccagaagcgggcggcgcgggggagaggccagggggagcggccaccaaggccaggcacggccgcggacggaagccgagcg

SEQ ID NO: 180705 - RNA, 80 nt, Homo sapiens
cggagccaaccgcccaggaaggacaaaggacccaaagcagcagaagacacgaccaccagaagccgagaaagaaggaagga

SEQ ID NO: 180706 - RNA, 67 nt, Homo sapiens
accgaaccgaggcaaaagaaagggcagcgacacccagacccaccggaccaggcccacccagaagcaa

SEQ ID NO: 180707 - RNA, 76 nt, Homo sapiens
gacagcaggaaagaagggggaacaacgagcacaccgaggagaagaccaggggaacaccaaaaacggaaaaagaaaa

SEQ ID NO: 180708 - RNA, 71 nt, Homo sapiens
cggcgcagcgcccgccgcggcccgggcccccccgccggaaacagggcgccagggaaggaccgcacacaagc

SEQ ID NO: 180709 - RNA, 74 nt, Homo sapiens
ccccccggcgccgcgccggcggcggggaccgcaaagcggagcggcaagcccgaacaaggagggaagaagaagag

SEQ ID NO: 180710 - RNA, 85 nt, Homo sapiens
aaagagaggacagcggacgagcagaccggaggaggagaacaagcagaagcgacacagagccaccggcaaagaagagaaaaagagc

SEQ ID NO: 180711 - RNA, 73 nt, Homo sapiens
aggccagggcggcgggaaggccggcgggacgaaaggcaaggcaacggccccagagggggcgaggaagagacag

SEQ ID NO: 180712 - RNA, 49 nt, Homo sapiens
acggcgacagcgccgaacagccgggacagggccagaagcgagcaccaaa

SEQ ID NO: 180713 - RNA, 69 nt, Homo sapiens
gcaagacggcagcagcggggcacggaaggaaggaaaaaccagggagaacgggaccaggcagcccggccg

SEQ ID NO: 180714 - RNA, 78 nt, Homo sapiens
gcgggcgaccagcagaagccaccggccgggaggaagggaaggggccgacgcgggcagccacgccagaaggccaagaaa

SEQ ID NO: 180715 - RNA, 57 nt, Homo sapiens
ccggagcggcgggcgcggcaggccgccaggcacagagaaggcaaacgggagggcgag

SEQ ID NO: 180716 - RNA, 70 nt, Homo sapiens
gaagaaagcaaggcgggaaccgagaaaagcccacccagaggagagcggcgacacacggggagcaagaaag

SEQ ID NO: 180717 - RNA, 78 nt, Homo sapiens
gaagaggagcgccagaacagccagcccaggcgacaagccaggccgcgagaagcagcccagggccagagccggcgacac

SEQ ID NO: 180718 - RNA, 88 nt, Homo sapiens
acaagccgcagacaagacccgcaagggagcaagaacagccagcggcggggcagccgagggcaggagcaagaaggcgccccccggccgg

SEQ ID NO: 180719 - RNA, 72 nt, Homo sapiens
caagagcagcagcaggggaaaccacaccgcacaaaagacagcaaagaagggcagagacacggagcaacaagc

SEQ ID NO: 180720 - RNA, 73 nt, Homo sapiens
cgccccgggaccccagagcgcccgagaggaggaggcccgccggcgaaaccaaagagccaggcgacccccgcgc

SEQ ID NO: 180721 - RNA, 95 nt, Homo sapiens
gcgcggcgcgggacgcgcgcgggcacccacggagccccggggcgccagggccccccacgcgagaacccgggccggggcccgggggcccgagcccc

SEQ ID NO: 180722 - RNA, 52 nt, Homo sapiens
ccaagagggaaggggacccgccgggaggacgcgaccgaggagccccaggaag

SEQ ID NO: 180723 - RNA, 74 nt, Homo sapiens
ccgcccgggccagcggccgcgcacccccggccggaggcaccagcgagcggggggccgagcacgggcagagaaag

SEQ ID NO: 180724 - RNA, 74 nt, Homo sapiens
ggcacagcccgaccggccgcgagagggagaagaaaccaagcacgaagaacggaacacaccaaaagaccaaagaa

SEQ ID NO: 180725 - RNA, 44 nt, Homo sapiens
cggaggaaaacaaggcggcccacaaagcccagaaagacaagcaa

SEQ ID NO: 180726 - RNA, 82 nt, Homo sapiens
acgcgcagcaggcggggaggacgaggggcccgggcccagagcggaagacaagacgagaggagcgggaaggccccgcacccgg

SEQ ID NO: 180727 - RNA, 62 nt, Homo sapiens
aaaagcaagcacaccaaagcaaagcagacagcgacaagagaagagcgacacccaacaagaga

SEQ ID NO: 180728 - RNA, 62 nt, Homo sapiens
cgcgggggacgggagcggcagccccgacaccagaccagagcacgggcagcagcgccaagaca

SEQ ID NO: 180729 - RNA, 60 nt, Homo sapiens
caagcccacccagaaaaaggcccgggacccaggaaccagaagcaaagaggggcaacggca

SEQ ID NO: 180730 - RNA, 61 nt, Homo sapiens
ggcagaccggagccagaagcacagaccccaaacgcggagaagagagcggaaagagcaacag

SEQ ID NO: 180731 - RNA, 72 nt, Homo sapiens
ggagaggcacccgaaagccaggccagaaaacagagccaaagcagacccccaagcgagcggagcggaaggagc

SEQ ID NO: 180732 - RNA, 76 nt, Homo sapiens
gaaaaccagagaccaagcccagagaagagaagcacgggccagcccaagaggaaaccgagaagggaagccaagcaga

SEQ ID NO: 180733 - RNA, 36 nt, Homo sapiens
gagcacgcggaaggaggggccaaaggcggagcacac

SEQ ID NO: 180734 - RNA, 64 nt, Homo sapiens
gaagagaagaggagacggaacagaaagaaaggaagcggaagagaagaccggcaacaagaaaaaa

SEQ ID NO: 180735 - RNA, 73 nt, Homo sapiens
accggaccgagagcggaccgagagcgcgaaacgcacgagaagaagaaagaagccaaagagaaggcaaagcagg

SEQ ID NO: 180736 - RNA, 55 nt, Homo sapiens
cgcaccgccggccggcggccggagaaacgaggagccagggcgcaggaaacaaccg

SEQ ID NO: 180737 - RNA, 80 nt, Homo sapiens
ggggggacgggacagagcggcgggacagcccaagggccagcaccgcgcccaggcagagccagaccggacggacaagggag

SEQ ID NO: 180738 - RNA, 69 nt, Homo sapiens
ccccccagccgcggagaaggagaacgacggcaccggaagggaccaagaagaacggaacgccaccaagaa

SEQ ID NO: 180739 - RNA, 76 nt, Homo sapiens
agaagacaaccagaaagcccaacaggcaagcaaaaggacaccaggggggaaaaaccacacaggcaaagaacgcgca

SEQ ID NO: 180740 - RNA, 76 nt, Homo sapiens
gccccagaacccaggaaagaaaagaacccagacaagaggcaccacaggaaagggcaaaagaacaaacacgagaccc

SEQ ID NO: 180741 - RNA, 88 nt, Homo sapiens
ggagggggcgcgagccgggaagacgcggggaagaggaggcggaaaaggacgcaaagcccggcgagcccagagggaacccaccagaaaa

SEQ ID NO: 180742 - RNA, 57 nt, Homo sapiens
agaagcaccgagacccaagaaaggcaggcaagaaaagcagccccaaagaaagacaca

SEQ ID NO: 180743 - RNA, 71 nt, Homo sapiens
aaaggggaaaccagcgcgcgccaaagggcgacggcacacagagagaccgagagcgggaaccgaagcaaaag

SEQ ID NO: 180744 - RNA, 70 nt, Homo sapiens
aaaaacaccaacaccagaggggagaggacaggggaacccaccagccggacccagggaaaaaacgcaaacg

SEQ ID NO: 180745 - RNA, 55 nt, Homo sapiens
ccaagccggacccgaagaccagacaacaagggagggcacagccaagacaacaacc

SEQ ID NO: 180746 - RNA, 70 nt, Homo sapiens
ccggcaaccccgggcggccgcaccgccaggaacacgcgaagaggggaacaccagagccaaccgaggagga

SEQ ID NO: 180747 - RNA, 58 nt, Homo sapiens
gaggcagacaaacccacagccagccaccggggacaggagaggagagcgaccacgagcg

SEQ ID NO: 180748 - RNA, 66 nt, Homo sapiens
acgggggaagccaggcaccccccacagaaagggcgccggcacaagacaacaggaccccccagaaac

SEQ ID NO: 180749 - RNA, 74 nt, Homo sapiens
ccagaaggaacgacaaacaggaccgccaaacccaaaccgggcggagaacggaaaagcaccaggaagcagagagg

SEQ ID NO: 180750 - RNA, 85 nt, Homo sapiens
cgaacacagggcccccagaccaggcgccccaacagggacaccaagcagcccacggccagcgacaacagcgcgccgggacggaaac

SEQ ID NO: 180751 - RNA, 80 nt, Homo sapiens
gagaagccgaaaagcgcagcgagcggagccgccggaggggaacggcgagggaacccaggaaggagggcgacaaacaccag

SEQ ID NO: 180752 - RNA, 57 nt, Homo sapiens
ggccccgggaagacaaggggggaaggacaaagcacagaagccagaacgcaaagcaga

SEQ ID NO: 180753 - RNA, 76 nt, Homo sapiens
ggaggccacgcagcaaaccacaggagaggagggccacccccaaccaggaccaaagacgaccaccaaagccagcccc

SEQ ID NO: 180754 - RNA, 60 nt, Homo sapiens
aaggagagcagcccggccaaggaggaaaaccgccgccggggccagcaagaacaaaaagca

SEQ ID NO: 180755 - RNA, 66 nt, Homo sapiens
gaacagagcacacagaccacaaggcagcaggccccgaggcagggaccaaccagcaggcagccggaa

SEQ ID NO: 180756 - RNA, 76 nt, Homo sapiens
cggaggagcccccagcggggcggagcgaccccgcggggcgcgggcccccagagccgacggcccccaccccccacaa

SEQ ID NO: 180757 - RNA, 97 nt, Homo sapiens
aagaggcggacggcgggaccacaagacaacgcggagcggcgaagagcaaccagagggagacggggggcggccccggacacgacccgaggacagcaga

SEQ ID NO: 180758 - RNA, 78 nt, Homo sapiens
cgcccgggggaaacagagaaagaaggcggccaggccaaccgaagaaacggaggagagaggacaggcaaagaaaaaaag

SEQ ID NO: 180759 - RNA, 78 nt, Homo sapiens
gcaagggcgcgccaccgcaaaggcccgcgcaccgccagggaagaaacggaaacccgcgcgaccgcagcaagaagccag

SEQ ID NO: 180760 - RNA, 71 nt, Homo sapiens
agccaggcgaagggggggccgggcacaggggaagaagaaaggaaggcaaccaccaacaggcaaacaaggaa

SEQ ID NO: 180761 - RNA, 82 nt, Homo sapiens
gaaggagaaacaccagcccaagccaagcggagaaccagaacaggccgaagaaggaacagcagagcggagcagcggagaagga

SEQ ID NO: 180762 - RNA, 84 nt, Homo sapiens
cacccaccgacgcggcaggacgcgcggaggaaacacccaggacacggccacaacaccaagaggaacgccagcgccggagaccac

SEQ ID NO: 180763 - RNA, 86 nt, Homo sapiens
agaccaccagagaaacagagcccgcaagggagagccaaacacacacagggccagaggacaccagagacccagcccacccccgcgca

SEQ ID NO: 180764 - RNA, 81 nt, Homo sapiens
ggagaaaggccaacccaaacagcgaggccaaaaagagaggaggaagaagacaaaggccacaggcgcaccccagcaggccag

SEQ ID NO: 180765 - RNA, 75 nt, Homo sapiens
ggagaaggagcacgaacagggagagcaggacaccagcacaccgcggaggcgcccagacgacacagcagaccgccc

SEQ ID NO: 180766 - RNA, 53 nt, Homo sapiens
aaagggccaaagaagggagagagcacaccgggcaacggaccgacacagggcgg

SEQ ID NO: 180767 - RNA, 79 nt, Homo sapiens
cgaaacccgaaacgaaggcacagcgggccgagaaagcaaacagaaaggccaaaacccccaagcggagaccagaggccca

SEQ ID NO: 180768 - RNA, 66 nt, Homo sapiens
caaaaaaagcagcaaggggggcagcggcaagcaggggagccagccacacagagacagaccaccgaa

SEQ ID NO: 180769 - RNA, 77 nt, Homo sapiens
caccgccggcgcgggaaacgggcgaagcgacgagccgcgaggaggggaaaccaaaaccagagaagccggaacccaag

SEQ ID NO: 180770 - RNA, 85 nt, Homo sapiens
cagcgagccagcagcgccccccagaagcgaggaacaggcagaggcaaggcggcagcaaaacgggcgcccgggcagaagcaagaga

SEQ ID NO: 180771 - RNA, 70 nt, Homo sapiens
aaagacaagccgggaagagaaagcgcagcgaagacgacaccaacagaaaaagaaaaccaacacgcgggag

SEQ ID NO: 180772 - RNA, 76 nt, Homo sapiens
gccggacaagaaccgaccgagagggagccggaaggaggcggccaaccagggcacggacgcccgccacagcaaggac

SEQ ID NO: 180773 - RNA, 73 nt, Homo sapiens
gaaggaagagccaccagcgacaaacaggaaagggccaaaaagcagaaaaacaaaccagcccaagaagcgacaa

SEQ ID NO: 180774 - RNA, 79 nt, Homo sapiens
gaaggacgggagagccacggagaagaagcgcggcccacacacccagccgggacgcaggaggcaacagcgaacagagcgc

SEQ ID NO: 180775 - RNA, 81 nt, Homo sapiens
cgcccgcagcgacacaccaagcggaggggacgccacgcaacgccggcaagcggggcagaggggcggggccccgaggccccg

SEQ ID NO: 180776 - RNA, 77 nt, Homo sapiens
acaagggaaagccagaggcacaagacgagaagaggacagacggaggagaaggaggaagaacaacacagggagacgcc

SEQ ID NO: 180777 - RNA, 80 nt, Homo sapiens
cggaacagcagagacacagagggcagcagaggagaaccagggcacagcgcagcggagcgaggaaagcaggcgggcccaga

SEQ ID NO: 180778 - RNA, 65 nt, Homo sapiens
cagccgcggcggcagcagcaggagaggcgggcggcggacgaagggcaaagaccggggcccgggag

SEQ ID NO: 180779 - RNA, 79 nt, Homo sapiens
ccagcccgacagccgcaaaacgggaaagcagagggagaacaaagaggaccaagcaacaaaagaagaagcggagccacag

SEQ ID NO: 180780 - RNA, 77 nt, Homo sapiens
gccccccagaagcgccggacggaacgaggaaggcccggccccgagccccggccccaaagacccaaaacagagacacc

SEQ ID NO: 180781 - RNA, 76 nt, Homo sapiens
ccaggccaccacagaaacaaaagcaacaaagagggcgacagacacagcaccggccccggcagcgggacgcaggacg

SEQ ID NO: 180782 - RNA, 76 nt, Homo sapiens
cccaacaccgagccagggaagggccccgaaaggaaggagcacaagccaaggacgcagagccccaagccaggcacag

SEQ ID NO: 180783 - RNA, 53 nt, Homo sapiens
gggccaagcacgccacccggaagcagaagaaggaagcaagagaagaaccagcc

SEQ ID NO: 180784 - RNA, 58 nt, Homo sapiens
gacgaacgaaacacgaaagggcaggccaaaacagaagaggcaaagcccagccacagca

SEQ ID NO: 180785 - RNA, 54 nt, Homo sapiens
gcgaggggaagaggaagcaaagccaaggggcaaaagcagcgagagcaagcagaa

SEQ ID NO: 180786 - RNA, 70 nt, Homo sapiens
gccagcacgaccggcaagggcaaaagcagcgagagcaagcagaacggaacgcgaggaagaaagcaaagga

SEQ ID NO: 180787 - RNA, 88 nt, Homo sapiens
caagagaagagcccgcgacacacacaggcgccccggcaaggccaccgcagaagccacaggagaccggaggccaacggcagaagccacc

SEQ ID NO: 180788 - RNA, 78 nt, Homo sapiens
ccgacccgagggacccgcaggcccgcggcggaagacggccgccaccacgacaagcagaccggaagaccgacggaagac

SEQ ID NO: 180789 - RNA, 80 nt, Homo sapiens
ccgccaccccccgcacgagggacgaagccagcaggaccccgggcagaccccagaaaagcaggccaaagagcacagggaca

SEQ ID NO: 180790 - RNA, 82 nt, Homo sapiens
cacagggcgcaacaagagcgacaaacgcagaccgaggaggagaaggggcggcccggaggccgagaggagcggagagacaaga

SEQ ID NO: 180791 - RNA, 80 nt, Homo sapiens
caaaacgaacccaaccgaggacgccccccacaccaccgaccaggaccgggaagccgcaaccgaaacgaaaagagacagca

SEQ ID NO: 180792 - RNA, 82 nt, Homo sapiens
caggggcgcagcgcggccgcggagacagggagacccggggcggagggaagggagcaagcccgcaccacgaccagaaacacag

SEQ ID NO: 180793 - RNA, 61 nt, Homo sapiens
ccgcgcggaccacaaaccgcgccagaaaagacccagaagaccccagacggggagcgcagca

SEQ ID NO: 180794 - RNA, 67 nt, Homo sapiens
aagcagcagaaaacagaggcccacggaccgggaaccccggacaaaacgcgcaaaaggagccagagac

SEQ ID NO: 180795 - RNA, 85 nt, Homo sapiens
agcaggcaaaaagaaccaagaaaaacaaacgcacacagaagaacacacagcggggaaaaggcgcgcggggcggccaggcggcgga

SEQ ID NO: 180796 - RNA, 88 nt, Homo sapiens
gcagccagaagaaggaccggaagcacacaacaggaaaacaaaagaggagaaaggacggcgacaggccagaaaggcccaagcgccggga

SEQ ID NO: 180797 - RNA, 81 nt, Homo sapiens
gaggcgagacccccgcccacgcaaacccaaagaccccgccggagacgagagcccgggcgcgccaggcacagccaagagcgg

SEQ ID NO: 180798 - RNA, 77 nt, Homo sapiens
acgggagacacagacacaccgggcgccaagccggcaagagaaagagaggccagaacagccggcaagagcacaggaag

SEQ ID NO: 180799 - RNA, 78 nt, Homo sapiens
aaggcaaccaggaggggccaaagaccgcaagaagacaacaggagacggcaagcaagcgagcgagaaccagccaaaaca

SEQ ID NO: 180800 - RNA, 57 nt, Homo sapiens
ccaaaaccgaaccagaacgaagacgccccgcaaacaccaggggacggaccccggcac

SEQ ID NO: 180801 - RNA, 82 nt, Homo sapiens
agaccgcgacacgggggccagaaggaaagcaaggcgaagacaagacccaaaaggagaccgagagcaaaagaaagacgagaac

SEQ ID NO: 180802 - RNA, 73 nt, Homo sapiens
gcaacgaaaacgcggaccgcgggcaagagcaggccccgggcccacaggcagccacacaaaggaacggagggga

SEQ ID NO: 180803 - RNA, 118 nt, Homo sapiens
cccgcgccggcggccgcccgcccccggacacgcccccgccgccgccggagccgcagcacgagagaggaaccagaaccaccacgaccaagaggccagaaccaccagagcccagcaaaac

SEQ ID NO: 180804 - RNA, 67 nt, Homo sapiens
gccaccgaagacgggccccaacacccagagacgaaagagaaggcagcaggaagaaacagcgaaccaa

SEQ ID NO: 180805 - RNA, 78 nt, Homo sapiens
gcaaagccaaaagagcagggaaggaaacggaaacggccagaagcaggacaaagcagagaacaacccggggacccccag

SEQ ID NO: 180806 - RNA, 75 nt, Homo sapiens
ggcccacgaggggaggacccaaggagaggcacccgggacggaaccaaccagacgacagaaaagaagacaccagaa

SEQ ID NO: 180807 - RNA, 82 nt, Homo sapiens
agaagaagccccaagcagacggcagcaccacgaacaggggcaccggcagcgccccagcacggagaagcagcgcggggggcaa

SEQ ID NO: 180808 - RNA, 72 nt, Homo sapiens
ccaaaaacagaggagaaaaggcggacagcagcgcaggcaaaaaacagacgagggcagaggagaagcgcccag

SEQ ID NO: 180809 - RNA, 37 nt, Homo sapiens
cgcagccgccccgaaggagccagaacacacaaaccag

SEQ ID NO: 180810 - RNA, 65 nt, Homo sapiens
cccagggcaggcgggacagcacagaggcagcgccacccgcgggggaaaagcccaaaggaacccaa

SEQ ID NO: 180811 - RNA, 72 nt, Homo sapiens
ccaggagcacggaaagaacgaacccagaaaagaagaagagaagaagaggcccagaagaaaagggacaccaag

SEQ ID NO: 180812 - RNA, 55 nt, Homo sapiens
cgcccgagggcgagaaaagcaccagcaccaagaccagccagggagacgacccgcg

SEQ ID NO: 180813 - RNA, 72 nt, Homo sapiens
cggcagccgagaaggagcgcagggccagggagggaaccacagcaccgcgggacgcaccaggcaggcacaagc

SEQ ID NO: 180814 - RNA, 86 nt, Homo sapiens
cccgcgaagaggagggggcgcggggccaccgcggcggagcccgaggaccgccagcagcagccgaaaacgcacaagaccaacagacc

SEQ ID NO: 180815 - RNA, 87 nt, Homo sapiens
ggagcggcgccgccaaggacaacagaccaagcacacaagcacccaggcccggagcaagacaggaagaggcagcagcgggaaaccaga

SEQ ID NO: 180816 - RNA, 82 nt, Homo sapiens
cggacgcggccccccgcgcccgcggcaggcgcggaggggccgcgggagcccgaaagcgaggcccgcaggagcaaaacaaaac

SEQ ID NO: 180817 - RNA, 59 nt, Homo sapiens
aacaagccgagcagacgaagcagaggcgcggggccgagaggccgccgggacggcggggg

SEQ ID NO: 180818 - RNA, 77 nt, Homo sapiens
ccgcgccgcgccgcgccgcaccccgagcgaccgcggcggaggcggaccggggggcccgggcccgccagacccgcaga

SEQ ID NO: 180819 - RNA, 79 nt, Homo sapiens
gccaggccgcccagcacggcaggagacgaggcacaggccagaaacaggagaagagaaaagggaaggcacggaggaagcc

SEQ ID NO: 180820 - RNA, 69 nt, Homo sapiens
ggacacagaaaagcagcgggaagagaacccgagaagagacaccgagaagcaggccgcccgaagcagaca

SEQ ID NO: 180821 - RNA, 73 nt, Homo sapiens
ccaggaggggagaggaggcaggcccgcgacaggacggaccgccggagcccagcccagagcaccccaggccacc

SEQ ID NO: 180822 - RNA, 74 nt, Homo sapiens
ccaccgccacagggggaggggccgcagccagcggcaggagagaaagggacccaaaacgaaccaacagaccaggc

SEQ ID NO: 180823 - RNA, 84 nt, Homo sapiens
gacccccagcaggaccggaaacccccaggggcacaggagccaccagggaagacccgcccaaaggaaggaaccgcaagaagaacg

SEQ ID NO: 180824 - RNA, 76 nt, Homo sapiens
gggaaccccagcggcgacaaagaacgcaaacccaagcggcaacacggcggggcacgcagcaagagggagaaagccg

SEQ ID NO: 180825 - RNA, 72 nt, Homo sapiens
cggccgacggccacacggcggccgcagggcgccggagccccccagggaacaaagagcagaagaccccacagg

SEQ ID NO: 180826 - RNA, 61 nt, Homo sapiens
cggcccccaggcgaagaagcgcagccgcaccggccaaggcgccggccacaggcacacggcg

SEQ ID NO: 180827 - RNA, 80 nt, Homo sapiens
aaaaacagcaagaacccaaaaggaaccaaagccagagaaccgcacccgcaggcaggcagaaacccacggccaaacccgaa

SEQ ID NO: 180828 - RNA, 84 nt, Homo sapiens
cgggacgaccacacgccgggggaagggcagggcccccccccggacaagaccagcggcccacccacagccaggccggcccgcccc

SEQ ID NO: 180829 - RNA, 56 nt, Homo sapiens
aacagaaagagcaacagcagggcaacagagcaaccgagggacgagacaagccgcgg

SEQ ID NO: 180830 - RNA, 71 nt, Homo sapiens
cagcgcgagggcccgggcaaggcccgacaggacggaggggggaggagcaggcccccaccgcgacccacaac

SEQ ID NO: 180831 - RNA, 80 nt, Homo sapiens
cccaagcggggaggggccggacgccggacaacaggcggcccgggcggagggacacggaggggccggaagagacaagaccg

SEQ ID NO: 180832 - RNA, 60 nt, Homo sapiens
aggggaacaagaggcgaccgagacggggagcccaaagcaaagaaaagagaggccgccagc

SEQ ID NO: 180833 - RNA, 69 nt, Homo sapiens
acaaaacaaggacccccagaaaaaaaaggaccaaagagagaacacaacagagacaggcgccaggcccag

SEQ ID NO: 180834 - RNA, 40 nt, Homo sapiens
agcaggcagcgcccaacggacggcaagccccacccgccca

SEQ ID NO: 180835 - RNA, 68 nt, Homo sapiens
ccaccccacaggcccacgacccaggagggacggagagaccggaggaaaccagaagaaaaacacaggcc

SEQ ID NO: 180836 - RNA, 64 nt, Homo sapiens
ggggaccaacagcaggcagaaacacaaaaacaagcccggaaccagagaaaaagaagaaagaaac

SEQ ID NO: 180837 - RNA, 52 nt, Homo sapiens
aaccggaccccggccgagcacgaggcccccggaagcggccgacaaacccccc

SEQ ID NO: 180838 - RNA, 78 nt, Homo sapiens
accagaaggacccgcaacagcggagccaccagcccagacggggaggcgggagggagaagccccaacccggcaggggac

SEQ ID NO: 180839 - RNA, 71 nt, Homo sapiens
gaaccagcagcggaccggcaaaaaagcaaagaaagaagcaccgaagggcgagcaaggcaaccagcaagaac

SEQ ID NO: 180840 - RNA, 77 nt, Homo sapiens
cacacagagagagacccagaccagagagcaggccaagaccaagacagaacccgggacacggccaccgcacccaggcg

SEQ ID NO: 180841 - RNA, 75 nt, Homo sapiens
ccacgcgcccgggagcacgagagccaacggcacggggacgcaaggaccaaaaaacaaagggcggaaagaagcaga

SEQ ID NO: 180842 - RNA, 76 nt, Homo sapiens
cggagcagcccgccgagagccaaagcacagggcggaacagaacgacaggagaacagaccagagcgaagaacaggac

SEQ ID NO: 180843 - RNA, 52 nt, Homo sapiens
ggcccgagaagccgacggccaagagaagcaccacacaaaggccacggagaac

SEQ ID NO: 180844 - RNA, 76 nt, Homo sapiens
gaggacagcccaagaacaccgaccgccaccaggaagaaagagacaaagacgaaagaaaagcgacggaagggcagaa

SEQ ID NO: 180845 - RNA, 39 nt, Homo sapiens
cacaagcagacgaaaaggcaagacaaacagagaacagga

SEQ ID NO: 180846 - RNA, 73 nt, Homo sapiens
ccacagaggacggagcgccgccgccgggaccccgcccagcagggaggccaacagacccaacccagaaggcacc

SEQ ID NO: 180847 - RNA, 56 nt, Homo sapiens
gacaccaccagaaaggggaaccaagacaggcgcccagggcacaaaggggcgcgaag

SEQ ID NO: 180848 - RNA, 75 nt, Homo sapiens
caacggagaccgggggggcaagcaaccagggagcgcaccagcccaccgacccagccccgcgagcagaagaaggag

SEQ ID NO: 180849 - RNA, 58 nt, Homo sapiens
cgaaagaaaaaacagagcagacgccaaggaaaaggaacagagagagcagaaccgaaac

SEQ ID NO: 180850 - RNA, 63 nt, Homo sapiens
ggcgcgagagcagcaaggccaggggaagcagggaaaggccggagagaggaagcggcccggggc

SEQ ID NO: 180851 - RNA, 85 nt, Homo sapiens
cgaaagcgggcccgggagacccaggcgggacagagggagccaggcagagaggaaccgcgcgcggccgaaccaagcccgggcgccc

SEQ ID NO: 180852 - RNA, 76 nt, Homo sapiens
ccacgaagccaagagagaacgaaaccccaaagcgcaggcaaccggagaagaggccggaccggaagaccagagaaga

SEQ ID NO: 180853 - RNA, 75 nt, Homo sapiens
ggaaaagagagccgacagaagagccccagggaggcaagcaggggggcaaaggaaagaaggcagaaagggaggcca

SEQ ID NO: 180854 - RNA, 58 nt, Homo sapiens
aagacagaaagagagagaggagagaaaccgcacacgaagaggagccaccagaagcccc

SEQ ID NO: 180855 - RNA, 75 nt, Homo sapiens
caaacagcagaccaggcggcaagacgcacccccccgccgcccaggccggagggacaacaggggaagagccagggc

SEQ ID NO: 180856 - RNA, 82 nt, Homo sapiens
gagaaggcggcggcccggccgcagcggcaacagaacgaaaaacagggcgcccgacaggcccccagagccgcccacaggaggc

SEQ ID NO: 180857 - RNA, 50 nt, Homo sapiens
gaccccagccgcgcccgggagagcaagaaacacgcaaggcaagaagggcc

SEQ ID NO: 180858 - RNA, 78 nt, Homo sapiens
cagcaggccagcggccggcgggagacgcagcgcgacccagcaggaaaaaggaggacaaacgcaagggaagccaagaca

SEQ ID NO: 180859 - RNA, 68 nt, Homo sapiens
gaggaccacgagaaaggggggaaccgcagaccggcaaccggaagcagaagaagagaaacaccccagca

SEQ ID NO: 180860 - RNA, 75 nt, Homo sapiens
ggggacgcggagaagcaagcgccccggcaaggccaccgcagaagccacaggagaccggaggccaacggcagaagc

SEQ ID NO: 180861 - RNA, 73 nt, Homo sapiens
caacaaacaggggaaggacacaaaagaaagcgacaaggaacaagcaaacacccggaagacagcaaaaggcagg

SEQ ID NO: 180862 - RNA, 75 nt, Homo sapiens
gcgccggcgaaccaccggggcccgcccaacagaagacccgccacgcagcaccaggagcgacaaggcggaacagaa

SEQ ID NO: 180863 - RNA, 76 nt, Homo sapiens
ggagaggaccaggaggggcacagcccgacggcccgccagaagcacaggagggagcaggaaaaaggcggagaggaag

SEQ ID NO: 180864 - RNA, 73 nt, Homo sapiens
gcacacgcacacaggccgcgcgacgcgaggcagaagcacggagccacacaaagcggaagagaaagacccagag

SEQ ID NO: 180865 - RNA, 78 nt, Homo sapiens
ggcggcgagcggacggcgcaacggggccccggagggccagagcggaacaagaacccagccgggccaacagaccaggaa

SEQ ID NO: 180866 - RNA, 78 nt, Homo sapiens
ccacagaaaagccacaacccagggcacacggacccccaaagcacaaaggacggagcccaaccccccaggcggccaagg

SEQ ID NO: 180867 - RNA, 58 nt, Homo sapiens
gacccaacggacacgcagaggaggcaccgccccaacccccccccgcccggagaacccc

SEQ ID NO: 180868 - RNA, 84 nt, Homo sapiens
gcggccaggcgcggccgcaagaggagaccaagaggcgggggcgcacgacaaccagcagccgagagacaacggcaagcggagaag

SEQ ID NO: 180869 - RNA, 79 nt, Homo sapiens
gggcaccgcaggacccggagggcagagaaaccaagggcaagggacgagaggacagaggagcagcaagagggacgagaac

SEQ ID NO: 180870 - RNA, 54 nt, Homo sapiens
ccaggagcacggacgccagaacgcagggaagacacacccaggaccaaccgaaaa

SEQ ID NO: 180871 - RNA, 58 nt, Homo sapiens
caacaacaggccacccaaccgaaaacggaccagaacccaagacaggccgccaggcccg

SEQ ID NO: 180872 - RNA, 87 nt, Homo sapiens
cccaaacccggaaacccagcggcccagccgggcccagggccccggccaggcccagccccgcgggagacccggccagcaccacggacg

SEQ ID NO: 180873 - RNA, 77 nt, Homo sapiens
ggggaacaacccgcgcccaggccagcgccccaggccaagagggacccacccggcgcacccccgagcccccccgcccc

SEQ ID NO: 180874 - RNA, 78 nt, Homo sapiens
ggaaaaggagaagaggacgaggcagacgaggccagcgcgcgcggcgcaggcacccccacaccaacaaggcagggcccg

SEQ ID NO: 180875 - RNA, 79 nt, Homo sapiens
gcccgggccacgcccccccagggcccaggcggaccgccccggaagaaagcaccgggaggaaagagagccacacgaagaa

SEQ ID NO: 180876 - RNA, 78 nt, Homo sapiens
aaggggaggggaagcgcaccagcacggcagagcagggggaggcacacccaggccccagacagaaccacaagagagaaa

SEQ ID NO: 180877 - RNA, 77 nt, Homo sapiens
aaacaccaggaaagacaggagaccaaaaaggaaacagagcaaagcagcgacaacaaagacagaggaagaaaaacaga

SEQ ID NO: 180878 - RNA, 38 nt, Homo sapiens
cccagcacgggaggcgagccaggaggccgacccgaccc

SEQ ID NO: 180879 - RNA, 53 nt, Homo sapiens
gagcacgagaccaaaaagaaacgaaccaccaacacccgaaggaccccggggac

SEQ ID NO: 180880 - RNA, 81 nt, Homo sapiens
accgacccgggaccgccccgggccacgcggaagcagccgcccggagaaacagacgacgagccacaggagcccggcccacgc

SEQ ID NO: 180881 - RNA, 75 nt, Homo sapiens
ccaagagaggcaggcagcgacagccacacaacggacagaacagaaacgggaggaggcacgagaccaggacgagga

SEQ ID NO: 180882 - RNA, 84 nt, Homo sapiens
gaggacaaaacaagagggccaggaaacggccaagaagcggaaagagaccagagcagcacccgacaggagagacggagggaacca

SEQ ID NO: 180883 - RNA, 47 nt, Homo sapiens
agccaccacgccaacaggcaaggcaccacaaaggcagcaccaagcaa

SEQ ID NO: 180884 - RNA, 86 nt, Homo sapiens
gcagggcaccgcgcgaagcggccaaagccgcccagacggccaccggcgggaggaacaaaaggggaggggcgaccccggggcccggc

SEQ ID NO: 180885 - RNA, 74 nt, Homo sapiens
agacaagacagggagcaacaaaaaagcgaaaccggaccaagaaaaaacaaaagcaaaaaagaagcaacacaaca

SEQ ID NO: 180886 - RNA, 94 nt, Homo sapiens
cgccacggggcagccgcaacaggggagaagacgcgcgccgaacgcaaggcggggaaaaaaaggcagcacacagacgcagcaacgggcacgcaac

SEQ ID NO: 180887 - RNA, 69 nt, Homo sapiens
ccgccgcgcagccgcgcccggacagggaggcacaagaaggaaagcaggccccagcccgagccgacagca

SEQ ID NO: 180888 - RNA, 81 nt, Homo sapiens
gaacaaggaagaaaagggcaaggcgagacgcagaaaggaccacacgggacccaggccgagccccggacagcagccccaggc

SEQ ID NO: 180889 - RNA, 81 nt, Homo sapiens
aacgcagccaccgccgcaccaaccacaaagacaagcagaccggaagaccgacggaagaccacaccccgagggagcccagga

SEQ ID NO: 180890 - RNA, 68 nt, Homo sapiens
cccggccaccagccggagagaacggagccccacaaccccaggcaagaaacgacacgccgggagaggac

SEQ ID NO: 180891 - RNA, 124 nt, Homo sapiens
gggggagaccgcaccaggaggaaaacagagacaaagacaacgaaagagacagcacaaaaaggcgccgcgggcggacacgccagaggaggaggccggggaaggccgcgggggcagcaagcagcag

SEQ ID NO: 180892 - RNA, 117 nt, Homo sapiens
gaacagcgagcggagccggcaggaaggggaccgggcggcggagcggcggaagaagaggacagcagcggacggccggaccaagaggcgccgccccccagcaaacgagaaaaacccagc

SEQ ID NO: 180893 - RNA, 75 nt, Homo sapiens
gaaagccagcagacccccgagggccgagcaacaggagggcgaccacaagcaaacagcggggacgacgagcccacg

SEQ ID NO: 180894 - RNA, 59 nt, Homo sapiens
agagaaccggagagcacccaacaaacccaagaaggcagaagccagccccgcaggccgcc

SEQ ID NO: 180895 - RNA, 69 nt, Homo sapiens
cgaaagcaggcgggacggccacagagcaccccgcgagacagcggaagcaccgcaaggcgaagaagacga

SEQ ID NO: 180896 - RNA, 36 nt, Homo sapiens
ggaggaggccaggagccgggccagcacaccacggaa

SEQ ID NO: 180897 - RNA, 97 nt, Homo sapiens
cgccgccggggcggcgacacccgggagccgccggcaccgccggaaccggcgcaggaagaaggaggccgaccaggccgacaaagcagacgcccgcaaa

SEQ ID NO: 180898 - RNA, 64 nt, Homo sapiens
gacgcgaccaaagccgacggggcaaggacaagcccaaccagggaccaggccaaaaccagacgcc

SEQ ID NO: 180899 - RNA, 68 nt, Homo sapiens
ggcggccagcccgcggcaccccgcggacagggcgggggggagaaaaggccaagggcaggagacacgag

SEQ ID NO: 180900 - RNA, 72 nt, Homo sapiens
acgcgcaaggacgggcccaagacaaaaggaaacaaagagccccgggaaaagaaaaaaaacgccccaaacggg

SEQ ID NO: 180901 - RNA, 80 nt, Homo sapiens
ccgacccaagcccccccccaccacagcaaccagaggggaaaggccaagaacgccaggcaaccagaaaaaaccggaggaaa

SEQ ID NO: 180902 - RNA, 81 nt, Homo sapiens
ccccagcagcagacccaagaagacagaccccgaggagacgccccaccaggcggggaagagccaagacccaaacacaaccag

SEQ ID NO: 180903 - RNA, 55 nt, Homo sapiens
ggaagcaaggaacaagggcaagcaaccaccgaaacgggcgaaaaagaagaacagc

SEQ ID NO: 180904 - RNA, 72 nt, Homo sapiens
aacagggagaaacacagccagaagggggacaaacaccaggaccagggagagggcacgcgccccggggacggc

SEQ ID NO: 180905 - RNA, 80 nt, Homo sapiens
gaagcggggacacgcggccccagcgcccggccccccaccggacacccgcggagcagaggccaggaggggcccagcccggc

SEQ ID NO: 180906 - RNA, 42 nt, Homo sapiens
agacccgaccccagaaggccacgaggcccagggaacccggac

SEQ ID NO: 180907 - RNA, 73 nt, Homo sapiens
cgaaacagggacaagagccacgaaaggaagcgcgaggccacacagacaacaggagaaccaacggaagaaacag

SEQ ID NO: 180908 - RNA, 57 nt, Homo sapiens
cgggaagggagcaccgagaggcagacaagacacccgcaggaggacagaaacacgaca

SEQ ID NO: 180909 - RNA, 80 nt, Homo sapiens
agccgcacgcgcgggacggagccagcgggaaggaggagagccaggaggagggaggcgagcgaaaagaaggagacagccgg

SEQ ID NO: 180910 - RNA, 56 nt, Homo sapiens
ccgggaggagcggagaacgcaccgagccacgggcgaaaaaaaaagcgaaccacaac

SEQ ID NO: 180911 - RNA, 76 nt, Homo sapiens
cgccgcgcgcgcacaaggcggccgaagagggcgcgcgcagcgaaccaccagggccgacgccaccgccgagcccaga

SEQ ID NO: 180912 - RNA, 57 nt, Homo sapiens
cggcggggcgcgccaaggacacggcacaccgaccgacggcccgcccgggagaagccc

SEQ ID NO: 180913 - RNA, 57 nt, Homo sapiens
aaccaaagacgccaaggagaaggcagaccggagagcacacccaagaaaaaaaagagg

SEQ ID NO: 180914 - RNA, 38 nt, Homo sapiens
gcaagaagagggaaggacagagaggagccaccacaccc

SEQ ID NO: 180915 - RNA, 74 nt, Homo sapiens
aaaacgaaacggggaaagcaacaaccaaaggccagggcacaaaaaaggccaaacagcagccaaacccccgaagg

SEQ ID NO: 180916 - RNA, 76 nt, Homo sapiens
ccacaggaaaccgaaaacaggaagaggcagagaagagagaccaacccgagaggccgacagcaggaacaaagaaaag

SEQ ID NO: 180917 - RNA, 54 nt, Homo sapiens
ccagccagagaagaaccgacaacacaaaggagaaaagagccggaagcaaacccc

SEQ ID NO: 180918 - RNA, 86 nt, Homo sapiens
gcgcccacagccagcagcgggaccgacgaggagcggcaggccaccacgagaagcagggacgccgcccgacgagccccggaagccca

SEQ ID NO: 180919 - RNA, 54 nt, Homo sapiens
gcggaaacgacgcaggaggaccgaccgagagcgacaaagacgaagacccagagc

SEQ ID NO: 180920 - RNA, 81 nt, Homo sapiens
ccacacaaggcagccgccgggagccagaagcacaggcccgggcgaaggggccacgcgaggagagacaagcccagcgcgcac

SEQ ID NO: 180921 - RNA, 79 nt, Homo sapiens
ggaagagcccgccgaaggcgagaaagagaccaagacgaaaaagcgaacgcaaaccaacgaaggaagaggccaaaagaaa

SEQ ID NO: 180922 - RNA, 66 nt, Homo sapiens
gcgacggcagaggaccccggagagcaaggaagaaagcagcccagcgccaaaacggaaggagaacaa

SEQ ID NO: 180923 - RNA, 82 nt, Homo sapiens
gcgaccgggagaacaagacggagcgaaggacaggccagaaaggccaagccggccacggaaagggagggacaagagccaaagg

SEQ ID NO: 180924 - RNA, 66 nt, Homo sapiens
cggagaggcagcaggcccgaagcagccggcaaggccgagaagaagcggggacggcaaaacagccaa

SEQ ID NO: 180925 - RNA, 84 nt, Homo sapiens
gcaaccagcggggcacccggaacaaagcacccaccagagggacacaccccgcccaggaagccccagggcgcaggggacaggaag

SEQ ID NO: 180926 - RNA, 58 nt, Homo sapiens
cagaaggaacgcagaaacacaggaccccccccaacgagcacaggaagaaacgccagga

SEQ ID NO: 180927 - RNA, 79 nt, Homo sapiens
gaccgcagaggaagagaaaaagcaaacgaccagacggcagggaggcacaaaggggaacacaggccaacaggcagagagg

SEQ ID NO: 180928 - RNA, 78 nt, Homo sapiens
aggccaccaaggacagggcagcaagcaagaacaacaggacagggacccagacgcggcaaaccccccaaccgaaaaacc

SEQ ID NO: 180929 - RNA, 61 nt, Homo sapiens
gggaacacgagcggagacgggggcgcagagaccaagggaccgggaaaaccggaggccagcc

SEQ ID NO: 180930 - RNA, 78 nt, Homo sapiens
cggcaggcgcgccaaggagagccaggggaccccacgggcgaccggcaagagagacagaagcgaaggggacagggggag

SEQ ID NO: 180931 - RNA, 75 nt, Homo sapiens
cgagaacgccacgcgggccggcgaaagcgcgagccagcagcaccggaacaccaagagaagacacccaccgggaca

SEQ ID NO: 180932 - RNA, 76 nt, Homo sapiens
caaaggcaagggcagcaccagcagcccgaccacaccacccccgccagcagagaaaagaaaccgacccggaaaagag

SEQ ID NO: 180933 - RNA, 70 nt, Homo sapiens
caagcaacagcacgggaaacgagagcagaagaggggccgaacaagccagggaacaaggcaggaaccacca

SEQ ID NO: 180934 - RNA, 81 nt, Homo sapiens
gaggacggaggacggagaggaccgcaccagcacgcccacccagaggaaaagaccaggcacggacacggaggcgcgggggga

SEQ ID NO: 180935 - RNA, 60 nt, Homo sapiens
ccaccacaggaggccagccaggcgagaaaccggagaaaaagagcccaacggaaaaaaccg

SEQ ID NO: 180936 - RNA, 76 nt, Homo sapiens
aggcgccaggacaccgcaagaaggcgaacacaaggagacgacggccgcaaggaggggaccagaagccaggagaggc

SEQ ID NO: 180937 - RNA, 67 nt, Homo sapiens
gacgggaggggaaaaacagcacaggaaacacagaagaagagaaaaagcaccgccccagaccgcaaac

SEQ ID NO: 180938 - RNA, 72 nt, Homo sapiens
gagcgccccaagcaaggaagcgacaggaccgcgacgagaagagcaaaacggagcccaaaaaaggaccaacga

SEQ ID NO: 180939 - RNA, 104 nt, Homo sapiens
gagcagacggcgcagacgccccccccggccagccccgggcgcggagacagggcagggcagcagcacgaccgacccagcagccccggcagacccagggaacggaa

SEQ ID NO: 180940 - RNA, 75 nt, Homo sapiens
aggcgaagcacgagcagaccggcccgaccgcccacagacccaaacaaaggcgcgagaggccgggaaacgcaagca

SEQ ID NO: 180941 - RNA, 80 nt, Homo sapiens
cccgccaggcgggagaagaaccccccgaaaggaccccccagccgccgcaggaacacaaagaccggaggagaccccacccc

SEQ ID NO: 180942 - RNA, 61 nt, Homo sapiens
caaccacagacaccacgcagagacacccaggccgcaaaccagccggcgggcgccacaacgg

SEQ ID NO: 180943 - RNA, 66 nt, Homo sapiens
cacccggcggccaaaggccaggacaccaacgggaccagaaggcaggagaaggggaaagcaaagccc

SEQ ID NO: 180944 - RNA, 72 nt, Homo sapiens
accgacaagggcagcccaaggacacaaggaaagacacagggcgaaccgaccaagaacaacacccagagggcc

SEQ ID NO: 180945 - RNA, 88 nt, Homo sapiens
gaaggggcgagggccaagggaacggggggaagagaccccaagaagaagcggaagaggagccgcggaaccaagacacaaggaacagaag

SEQ ID NO: 180946 - RNA, 81 nt, Homo sapiens
cgccgcgcgcgcagggccgccggcccgcagccgccaccacccaggaccagaagggaaaggccaccaagacagccagggcaa

SEQ ID NO: 180947 - RNA, 71 nt, Homo sapiens
cggaaacaacgggcaagggagggccccaaggcggcagccccgaccgacggggcaacgcgaagaaacaccgg

SEQ ID NO: 180948 - RNA, 75 nt, Homo sapiens
ggcagccacgaggggaccaaaccccacacccaggcgaagggccaccaggcccaggcggcgaacccggaccaccaa

SEQ ID NO: 180949 - RNA, 73 nt, Homo sapiens
gcaccgcgccggcccgccagaacgggcagcaaggagggccaacccggaggaccccagcaacaaagggagaagg

SEQ ID NO: 180950 - RNA, 49 nt, Homo sapiens
cgcagggcgcccccggcaaaggagaagagaagggggaccagcagcgaag

SEQ ID NO: 180951 - RNA, 86 nt, Homo sapiens
cgagacgagaagcagcgcggcgggacaagcgcgacgcccggcgcgagccaagcgcgcgccggacagcccaaggcggaaaagcgaag

SEQ ID NO: 180952 - RNA, 104 nt, Homo sapiens
ccaacagaggagcagaggaaacgagaccagaccgcaaagccggaaacgaacaaccgccaaacagcaagaggacggaagaagagagacagagacaacacgccaca

SEQ ID NO: 180953 - RNA, 82 nt, Homo sapiens
aaggcagaggcgaggcggaagggcaccccacccggcggaccggaagcgagcaggagcagagcggaagacccaccagaaagag

SEQ ID NO: 180954 - RNA, 60 nt, Homo sapiens
ggccacgccaacgaggaggcagaacagaggaaaccaaaaccggaaccaacgccgggaagg

SEQ ID NO: 180955 - RNA, 53 nt, Homo sapiens
accacacgaaacagggcaagcaacgcacacggcgccacacgaggccacgaggc

SEQ ID NO: 180956 - RNA, 72 nt, Homo sapiens
agggggaaaggaagccaagaacaagcacaaagccacagcgaccaagacaagagaagccacggagcaagacac

SEQ ID NO: 180957 - RNA, 97 nt, Homo sapiens
ccgcccgaggacagagaggcgagcgcccggaggggagagagcggaggacagccgagaggaggccacccaccccaccagagccggacaccagagccgg

SEQ ID NO: 180958 - RNA, 80 nt, Homo sapiens
gggacaagcccgggaacaacacaccagaggagcagccgaaggagaaagaagcaccagggccgaaagaagccccaggcaca

SEQ ID NO: 180959 - RNA, 53 nt, Homo sapiens
gcccagagacaacgagagaacgggccagcacaggcccccccagaaccagggaa

SEQ ID NO: 180960 - RNA, 63 nt, Homo sapiens
ccaggcagcccgaaacagccgagacaggggcgaacaccggagaagaaaaccacgcaggagagg

SEQ ID NO: 180961 - RNA, 67 nt, Homo sapiens
aggaaggaaccagccaaaaagcaagagcccaaaagcaaagcagggcagcaaagaacacaaaggcacg

SEQ ID NO: 180962 - RNA, 68 nt, Homo sapiens
cgccgagaggccggcgggacgcgggcgccaggaccggccgaacgcagagaggcgcagagggaccgaga

SEQ ID NO: 180963 - RNA, 60 nt, Homo sapiens
cgacgcacggcccaggaccgcacaaggacagggagacacccaaaccgacaaggggaaccc

SEQ ID NO: 180964 - RNA, 73 nt, Homo sapiens
aggcccaccggcagcaaaaggaaaaggcgcgaacggcggaggcaaaaaaggagaaagaacaccaagcagaggg

SEQ ID NO: 180965 - RNA, 68 nt, Homo sapiens
aaggaaccaagacagcgccacagacagaaaagcacccggggcagccgcagaggaaggaagggagaagg

SEQ ID NO: 180966 - RNA, 71 nt, Homo sapiens
aaaaagagagcccaaggaggcagacagagaaagacaccgcagagaaggggggaaaaaaccagccgaacaaa

SEQ ID NO: 180967 - RNA, 60 nt, Homo sapiens
aacaacgacaaccacacacacaccaaggggaaaagagggacgcagcacagaaaggaaaga

SEQ ID NO: 180968 - RNA, 79 nt, Homo sapiens
ggacgccaagagacagagaaggacaagaagaccgcaggaaagcaggaaggcaagaaagccaaggacgaaacccacacgg

SEQ ID NO: 180969 - RNA, 76 nt, Homo sapiens
ggagccccggaggggggcggcgcccacgggggagcgagccggagacagaccacacgaaggggcagaagagcacaag

SEQ ID NO: 180970 - RNA, 80 nt, Homo sapiens
acgaggccgccagcagcgacaaacgcccacaaagcggacccaaggccagccagccccaggcaccagcggacaggacaggg

SEQ ID NO: 180971 - RNA, 82 nt, Homo sapiens
aaacccgggacccaccacccaggccccgacgccccgagaccccgccccccgaggcgcagcccgaacccagcagccacacgcc

SEQ ID NO: 180972 - RNA, 69 nt, Homo sapiens
agagcgcagaagccggaagagagccaagccaggcccagcagccgccaccgacgaaccaggaacaaaaag

SEQ ID NO: 180973 - RNA, 57 nt, Homo sapiens
cgccggccagcccgagaagcagggccaggacgaaagggcaagaaggaacagacaaaa

SEQ ID NO: 180974 - RNA, 71 nt, Homo sapiens
gccggcgggcagaagccgcccgccccgggggaaacgggagcggcgaaagaaaaacaggaccgcgcgccacc

SEQ ID NO: 180975 - RNA, 73 nt, Homo sapiens
aagcgggcggcgcgggggagagcagccaggagccggacgagaaaccaggcaaacagccggagaggagcccaag

SEQ ID NO: 180976 - RNA, 63 nt, Homo sapiens
aaaacggcacaaaagcaccgagaacaggccgggcacgggagcgaaaggaaaaaaaaaaacacc

SEQ ID NO: 180977 - RNA, 70 nt, Homo sapiens
gaaaagcgcacacccaaagcacacaaggaaaagcagcagcaacgggaacgaagagagaaagcaaacacgg

SEQ ID NO: 180978 - RNA, 72 nt, Homo sapiens
ccgggacagcgcggcccggccaaggaggccgcggacccgggcggcagacacgcccgggaggacaagaggaca

SEQ ID NO: 180979 - RNA, 80 nt, Homo sapiens
ccagacccgccgaagaccccgcggagcagaccaccgcccagcaaaaagcggcggaaagaaagacaaaaggaaaaagagaa

SEQ ID NO: 180980 - RNA, 69 nt, Homo sapiens
cagcaggacaggaaaaaaagagggaacaggcaggaaaacgacccaaaacagccaccaacgacgacccag

SEQ ID NO: 180981 - RNA, 72 nt, Homo sapiens
gaccgcgaggcacagagaggaaccgacagcaaacccacaaaggacagaaagaaagaagcagccgaaggcgac

SEQ ID NO: 180982 - RNA, 82 nt, Homo sapiens
ggcggcgcgcccgggccggggagcaagcgccaggaacccagaaggccgaggaaggacggcagagcgcaggacgccacagcaa

SEQ ID NO: 180983 - RNA, 91 nt, Homo sapiens
gagccggaggcggcgaggagcgccgccgaggagagcagcgaacagcagaagaagcaacaggaggcgagaaacgcacgacaagaaaggaaaa

SEQ ID NO: 180984 - RNA, 76 nt, Homo sapiens
aaaccgagccggggccacgaggaaaggaagacgggcggagcgccacagccaggagacacgcacccaccccgaagaa

SEQ ID NO: 180985 - RNA, 73 nt, Homo sapiens
cgggggaacacaggaagccagcgaggacagcacgggggccccgaccgaaccaggcccgagagaccccgacaag

SEQ ID NO: 180986 - RNA, 54 nt, Homo sapiens
aggagccgcaacaagaaggaaagccaagcacaaggaccagaccccacaagaaaa

SEQ ID NO: 180987 - RNA, 64 nt, Homo sapiens
agcagcagacggccagggaccgcgccaacggagaacaacaacagggcacggaagcaggagcgaa

SEQ ID NO: 180988 - RNA, 57 nt, Homo sapiens
aaggggacacccggaggcggcgcagcagcaccggagcaagaaagagcaccagaccag

SEQ ID NO: 180989 - RNA, 55 nt, Homo sapiens
acacaggaagccgaggagagccgaggaggacaccaggagcacggaccaaggaccc

SEQ ID NO: 180990 - RNA, 77 nt, Homo sapiens
gccgcgggggcggcgcaggcgaaacgagcgagagccaaccaaacccagccccgaggacaggaaggacgcagacggca

SEQ ID NO: 180991 - RNA, 83 nt, Homo sapiens
cgaagcagccaccaggaggcgcaggcacaaggaagcagaagcagaaacccagcccaccagaggacccagaaaggagccagaac

SEQ ID NO: 180992 - RNA, 59 nt, Homo sapiens
caggagggaggaacagacaccgagccagcaagcccccaacgccggccagaacacacaga

SEQ ID NO: 180993 - RNA, 81 nt, Homo sapiens
ggaaaggcaccaggacaagcaaaggagacgcaccccgaagagggaccccccgagaagcggaccccggaaaagacaaggccc

SEQ ID NO: 180994 - RNA, 59 nt, Homo sapiens
cggccacagacaagaaggacaagccgccgcaagaaaaggagacaggaagagaaaaagag

SEQ ID NO: 180995 - RNA, 74 nt, Homo sapiens
cagcccccgagggcgggaacaggcagaaaggcgcacaggaggcagaaaggaggaaaccacgcaccaaaaacagg

SEQ ID NO: 180996 - RNA, 79 nt, Homo sapiens
gcacgaaaaaagcccgggcaaggggacgcgcagcgacccaagaaccaaccaagaacggccagagggcagaaaggaccca

SEQ ID NO: 180997 - RNA, 51 nt, Homo sapiens
cacaggaccagggaaacacgaaccagggacaggagaaacggaaggcaagac

SEQ ID NO: 180998 - RNA, 77 nt, Homo sapiens
acacaacaacacagaagaaaaccccacagcgggcaagagaacgagcgcagcagggaagcacgaggaagaacggacca

SEQ ID NO: 180999 - RNA, 80 nt, Homo sapiens
ggggagcccgcgcccgccgcgggagagagggccggccgcgcacccagacccgagccgccgccgccggccaggaggggcgc

SEQ ID NO: 181000 - RNA, 89 nt, Homo sapiens
cgcccaaaaagcccggaaaaaccaccccagaccacaggagaggaggggcggccccggcgaggcaggaggacagggccagcggcagcgag

SEQ ID NO: 181001 - RNA, 85 nt, Homo sapiens
aaaacacaggagccggagcagaagcaaagagcaccacaggcggagaccccgaaaaggccaccacggaacacagggagaagagaga

SEQ ID NO: 181002 - RNA, 42 nt, Homo sapiens
cgggagaagcagcagagaaagggaacaagagccaacaaggcc

SEQ ID NO: 181003 - RNA, 84 nt, Homo sapiens
gcacaaaggaggaggaggaggacgacgacgaggggaacggggaagccagcagaaacgaagcagacagaaacaacaacccagcga

SEQ ID NO: 181004 - RNA, 77 nt, Homo sapiens
ggaggccgccccgccgccccgcgggaggaggagcgcccgcccggcgcgaccccgcgggagcccggaccacagaggaa

SEQ ID NO: 181005 - RNA, 81 nt, Homo sapiens
ggaagcaggaagcaccacacacaggagaagagagcggacccacaccagggaagacaggggagagggggcaccagcgggcca

SEQ ID NO: 181006 - RNA, 81 nt, Homo sapiens
ccagcccgcccggcggaccaaaggcgcgcgagccggcggggcacaggaaccgccagaacccaacaaagccaagcaagaagg

SEQ ID NO: 181007 - RNA, 72 nt, Homo sapiens
ccccagccgcagccacaacaccggcaggaaccaccaggacagagaagaacaagcgggggaacggagggaaac

SEQ ID NO: 181008 - RNA, 79 nt, Homo sapiens
ccgggcacacccggcccccggacgcccgccacacgcacagacgccgggaccggaaagcagcaagcccgagaaaccacca

SEQ ID NO: 181009 - RNA, 93 nt, Homo sapiens
gcggccagaagaaaacgaggggcggaacacccgccaaagcagagaaaagagcgccacccgaaaccagcccagaacccgagaaacagacagacc

SEQ ID NO: 181010 - RNA, 57 nt, Homo sapiens
gaaaggaaggcgaaaagagcaaaacaccaaagcagaagcccccggggagagacagac

SEQ ID NO: 181011 - RNA, 81 nt, Homo sapiens
cggagcaggggaaggaacgggccgaaccgggagcgaggaaccagaacgaaaagcgccagaaagaaccacgcgcagaaccca

SEQ ID NO: 181012 - RNA, 79 nt, Homo sapiens
ggcgaacacaaaaggcgccgaagcaggacccgaagccaaaccaggagggccccaacgcaaccagacacggacaggagcc

SEQ ID NO: 181013 - RNA, 72 nt, Homo sapiens
ggccagaaagaccaacagcacgccacaagccgagagacggaaaagaacaaacaacacaagcgagagagaagg

SEQ ID NO: 181014 - RNA, 81 nt, Homo sapiens
cgcaggcacaaaaggcgcccacagccacgggaccggcgcaggacagaccacacgcggacaccaaggcgccaggcgagggga

SEQ ID NO: 181015 - RNA, 82 nt, Homo sapiens
gccgccccgcgcgcgagccacgcagcccccagggcggaaaacaccccaaaagccaaaagggaaaggaaaagaccaacaacag

SEQ ID NO: 181016 - RNA, 79 nt, Homo sapiens
cgcgacacggggacgaggaacagaagggcccggccagggagaaccccccggagcccaggaggggcaccaccgccgggca

SEQ ID NO: 181017 - RNA, 75 nt, Homo sapiens
ccgcggcccgcgcaggcgcgcgcggcccggggcggccccgcgggccacagggacaggaacccccgaaaggcgaga

SEQ ID NO: 181018 - RNA, 97 nt, Homo sapiens
cccacgcagaacccgggagaggagaccagaacgaacccccccccccgcgaacggaggaaccacgcacagaggagcggcgacacgggccggcggggcg

SEQ ID NO: 181019 - RNA, 80 nt, Homo sapiens
acaaagccggaagcagaggcgaacgccaccagcgcggcacggagaacacccagccacccaccagcgacaaggcagggcca

SEQ ID NO: 181020 - RNA, 69 nt, Homo sapiens
cacagaagccgacagggagacacggcaggaacccgcgaagcgggaaggcacagggggacgaaacgaacg

SEQ ID NO: 181021 - RNA, 75 nt, Homo sapiens
ggccaaccggcaagaccagacgggaacgggagacaagcgcagcgagcgcgcccgaaccccaaagaaacaggaaaa

SEQ ID NO: 181022 - RNA, 77 nt, Homo sapiens
gacacaaaaggaggaaaacgagagagaaccacgagccacaggcaaggcccgacacaagagaagacggccaccaacac

SEQ ID NO: 181023 - RNA, 80 nt, Homo sapiens
ccaccaccagagggcaagaaggcacagaaaggaagaccagcagaagaaagcgagccgaccacggagcggaacccagagga

SEQ ID NO: 181024 - RNA, 61 nt, Homo sapiens
cagaaggaaaacccagacgacacaacccgggcgcggcagaccccaggcgacggccgagaag

SEQ ID NO: 181025 - RNA, 79 nt, Homo sapiens
cggacgccggagaggcaccggaccggccacagagagcggcacaagcccagaacccagcagcggaaggagacggcgggaa

SEQ ID NO: 181026 - RNA, 53 nt, Homo sapiens
ggccccagcgcaggaaggggagccgcacggcaaaaggcaaaccggcggaagcg

SEQ ID NO: 181027 - RNA, 69 nt, Homo sapiens
gaagcacgaaagccccacccgccgcagcaagcagagaacgcgcaaaaaaaaagagaggaaaaggacaga

SEQ ID NO: 181028 - RNA, 77 nt, Homo sapiens
gaaccggaagagccagggagcggaagcagaaaaccacaacgccccagaggaaggcccccaaagcagcaggacacccg

SEQ ID NO: 181029 - RNA, 62 nt, Homo sapiens
cccgggcaggcccaaaaggaaacagaacgagagccagagacccgccaaagcccccagggcaa

SEQ ID NO: 181030 - RNA, 42 nt, Homo sapiens
caggggacagccaccacgccgccgaggaggaacgaagacgaa

SEQ ID NO: 181031 - RNA, 71 nt, Homo sapiens
aaaaacaacaccaaaaagccgcaggggaaacgggaagaaggaagccccgcgccccgcagaacccgaagccg

SEQ ID NO: 181032 - RNA, 85 nt, Homo sapiens
cccgggggccagagcccgccagccccgcggacccggccgcggccagcccgagcggccgggggaaggagaagccgggcaccgaaca

SEQ ID NO: 181033 - RNA, 82 nt, Homo sapiens
cggcggcgaagcgggagagccgacgagcgcgcacaacgcaggaccggcgccgaaggcccgccaggcggagggcagggcagac

SEQ ID NO: 181034 - RNA, 82 nt, Homo sapiens
ccgccgccgccgaggcccgcaccagccaggcgcagacccccgcgccaggagcacccagagagaagagggggaaaaaggaagg

SEQ ID NO: 181035 - RNA, 61 nt, Homo sapiens
gcaaggcaggcaacaaggagaaagacagcaaagaaaaggagaagaaaggaaaaaaacaacc

SEQ ID NO: 181036 - RNA, 76 nt, Homo sapiens
acacgagggcacccagacagaggcacgggaagcggagcccaccgccgagagcgggagcggggcagcggccggagcg

SEQ ID NO: 181037 - RNA, 82 nt, Homo sapiens
cccgcggcgcggcccggcgcccggggaaaggcagcagaagcaacgcagcaagaaacgaagcggacgaggccaaagggcccgg

SEQ ID NO: 181038 - RNA, 68 nt, Homo sapiens
caaccagagccgcaacagaaaagagcaccggccagcagaaccagccggggccggcaagccccgcccaa

SEQ ID NO: 181039 - RNA, 80 nt, Homo sapiens
ccacagaacacgaccgaaccagcagggaaccaaagaaaggcaacgaaagccaaccaggaggagcccccggcccaggcgga

SEQ ID NO: 181040 - RNA, 71 nt, Homo sapiens
gccaggcggccacccgggccaagcagccccgcccagccccaaaggcggaaacagggggggcagaaacggcg

SEQ ID NO: 181041 - RNA, 56 nt, Homo sapiens
ccccccggccccccccccagaccaccccccccagcaaaaaagagaccgacccaaac

SEQ ID NO: 181042 - RNA, 76 nt, Homo sapiens
agagccaccagccaggaaagggaggacgaaggacagagagggacgggcagacgccccgacacgcagcgaaagacac

SEQ ID NO: 181043 - RNA, 84 nt, Homo sapiens
cgggcgcaggcggggggcgcagaggacacgaggcggcgggcggagacaggaccgcggcgagcaaggagcgaccggaagggagag

SEQ ID NO: 181044 - RNA, 76 nt, Homo sapiens
ccaccccgggaagaaagcaaacacaagccacacccagaaccagcagcccgcagaagaaaggcaaacccaaggccca

SEQ ID NO: 181045 - RNA, 82 nt, Homo sapiens
aagcccagcaaggaaacaaagggaggcggaaccaggaagacagagagcaagaccccagcccaaccgaggcggcaaggacagc

SEQ ID NO: 181046 - RNA, 84 nt, Homo sapiens
cgcgaccgccgccagcgcccgagaacaacggcccaagagcacagagaagaccaagggccgccagcggggccgccagccgcggga

SEQ ID NO: 181047 - RNA, 75 nt, Homo sapiens
acgggcagccaggcccccacagcccgcaggggacaaagccgcgaaaaggaacccacaaacaccacacaagaggac

SEQ ID NO: 181048 - RNA, 58 nt, Homo sapiens
cagcccagcgagcgccacagggccggccgcggcggaaggccagggggcagacagcgcg

SEQ ID NO: 181049 - RNA, 55 nt, Homo sapiens
ccgaggggcgggaacgaaacgcgcggccgccggagccgccgcgcgcgacggccgg

SEQ ID NO: 181050 - RNA, 78 nt, Homo sapiens
aacaagccagagagagcagaccacggcgccaaggcgaggcacggcccgggcagggccgagacacagcccaccgcaggc

SEQ ID NO: 181051 - RNA, 77 nt, Homo sapiens
acaccgggaggcaaggagcaccggcggcaggaagagagaccaaacaccaagcgcccaggggcggggcacaagccacg

SEQ ID NO: 181052 - RNA, 56 nt, Homo sapiens
ccgccaggcgcccaaacccggaccaggaagaagaagcgcacaaggagcacaacagg

SEQ ID NO: 181053 - RNA, 74 nt, Homo sapiens
cgaggggcgcaaaacgccccggcgcacccgaccgagggacccgcggcggagaaaccaccacaaacacgaggcca

SEQ ID NO: 181054 - RNA, 82 nt, Homo sapiens
agaaccaggggacacaagccggagggcaagagggcgaaacaggccgacgcaaacgggaaagccccaagggagacaaagcgag

SEQ ID NO: 181055 - RNA, 77 nt, Homo sapiens
ggaagaagccggccaaccgcagcaagaagccggagggacacccccaaaaaggcaacaagagacggaagccagaaaaa

SEQ ID NO: 181056 - RNA, 98 nt, Homo sapiens
ccgccgaagaagcacgaaagccccacccgccgcagcaagcagagacgggcccgggacacccagacagagagagcgcacgaagaagggcggaggacaag

SEQ ID NO: 181057 - RNA, 78 nt, Homo sapiens
cgaggacgccggcacaccggcgccaagaccacagccccaccagcgccaacccacggggccagacacgcgaagccacga

SEQ ID NO: 181058 - RNA, 87 nt, Homo sapiens
aaagcaggaagaaaaacggcaaacgagggcccaacccaaaagaccgaagagaaacaacggaacgcccaggagcggcaaagacaaaga

SEQ ID NO: 181059 - RNA, 78 nt, Homo sapiens
aaacagagagccagagacacagaaaaagaagaagcggaaacaacgccccgcaaaagacaggagagacaacggaggcaa

SEQ ID NO: 181060 - RNA, 82 nt, Homo sapiens
gagcaggggcgcagaagggagaggggagcgacccggggaccgaccggggaccccgccgaagagccccagaccagcggcgccg

SEQ ID NO: 181061 - RNA, 33 nt, Homo sapiens
cccccgaaggcgggaacaggggggaaggagacg

SEQ ID NO: 181062 - RNA, 63 nt, Homo sapiens
cgacgaggaacggcggagcagggagcccaaagaccccggagacaggaagggccgggccggggc

SEQ ID NO: 181063 - RNA, 71 nt, Homo sapiens
cagccagaaccccacggggcggcgccaacaaaaggggcggaagccaagaccagaaccgagaagcagcccgg

SEQ ID NO: 181064 - RNA, 78 nt, Homo sapiens
gcaccagcaagcagaaggcaagcggacgaggcgaagacaaaaacaggaagcaaagaagaaaaggacagcagaggcaga

SEQ ID NO: 181065 - RNA, 85 nt, Homo sapiens
agcagaagacagcgaaaagagaagcagaagccccggggcaagagcgaagcggacacgcccaagaagaaccgagaagaaaagcacc

SEQ ID NO: 181066 - RNA, 71 nt, Homo sapiens
cggggccagccccgggcagccccgcccggacaggagggcaccggcgcacccgggacgaacgccaggacgag

SEQ ID NO: 181067 - RNA, 65 nt, Homo sapiens
gcccccccgccaggggggcgcacaggagcgcgaggaaaagagggccggacagaggcagcagcccg

SEQ ID NO: 181068 - RNA, 76 nt, Homo sapiens
acggaacagcgccgaagcgacccaagaaagaccgggaggggacgccggaacggggccccgggaccaaggacacgca

SEQ ID NO: 181069 - RNA, 104 nt, Homo sapiens
ggaccgggaacccacgaggcacccggacccgcaggccgcgcagagaccaccagggcaggcaacccagccaggcccagggaggcgacgacaccagcacccagcca

SEQ ID NO: 181070 - RNA, 77 nt, Homo sapiens
caaaacccgagaaagggcaaccgcacggcagacacaccgaccagaggaaggcgaacccgccacgcagcaggagcagg

SEQ ID NO: 181071 - RNA, 79 nt, Homo sapiens
agagacaccagcggcaccggagaccaccggagcaccccgacacaggccgcaggagggaagcgcacggaaaccgccccgg

SEQ ID NO: 181072 - RNA, 77 nt, Homo sapiens
gcggggccggccgggaccagggcgacggcccgccacgggccccgcagccgcgcccgagcgcccgagcagggacagcg

SEQ ID NO: 181073 - RNA, 82 nt, Homo sapiens
ggagggcagaccgccacgcccgggcccccgggagccacaggacagggggagggcagaggaccgcaggaggaaacaagcccac

SEQ ID NO: 181074 - RNA, 84 nt, Homo sapiens
aaagccaaagaacaccacagaaagaccgaagacaaaaaccagaagacaagcagcggaacgcgaagggaagaaaaaacaagaaag

SEQ ID NO: 181075 - RNA, 69 nt, Homo sapiens
ggcgccggcggcgcgcgacccccgcgcagggagcagggagcgcaggcaaggaggcgagcaccaaccgag

SEQ ID NO: 181076 - RNA, 79 nt, Homo sapiens
gacaacgagggagaagcacaagacagcacagaggacgcagaccggaaaaagccacagacggagcagaacaacagaagcg

SEQ ID NO: 181077 - RNA, 69 nt, Homo sapiens
caacgacaccaccgcagcgacgagcagggaaaaacccgcagaaaacagggcacgagaccaggagcagac

SEQ ID NO: 181078 - RNA, 72 nt, Homo sapiens
cggaacggggagcgccggagcagcggacccaggcaggccagaacacagcagaaaggggggaccaacagaagc

SEQ ID NO: 181079 - RNA, 75 nt, Homo sapiens
gcgaaaccggaccgggcccggaggagcgaacaaggcgacaacacagggcccacccagacaggagcccagcagggg

SEQ ID NO: 181080 - RNA, 80 nt, Homo sapiens
cgccgggcgccagggggccgcagccgcaggcccgcggcaggcggggccaggcccgagccagaaggaggcccacagagccc

SEQ ID NO: 181081 - RNA, 86 nt, Homo sapiens
gcgcacagcggccccgagggcccgggcacccggacacagaaggggccaccaccaacaagacggggcggaacaccgccggaagagac

SEQ ID NO: 181082 - RNA, 82 nt, Homo sapiens
ccgcgggacccccgggccaggacaagcagaccggaagaccgacggaagaccacaccccgagggagcccaggacaccacgaga

SEQ ID NO: 181083 - RNA, 74 nt, Homo sapiens
caaccagacgccagcgggacgaggaccgagaccgcggccgggaccgaggggacaagagaaaaaaagggcgggcg

SEQ ID NO: 181084 - RNA, 79 nt, Homo sapiens
gggcccacagagccagaaacacacggagagccggagagggcccagcaaccccggacggacgacacagcccagggcacca

SEQ ID NO: 181085 - RNA, 80 nt, Homo sapiens
gaccaacagacaaccaccaaaggggaaacagaaacaaggaaaaaccagaagagaaaaaacaaaggggagaggcaccccgc

SEQ ID NO: 181086 - RNA, 93 nt, Homo sapiens
cgaagggccccgaacaacagacgaaaaaccgccagaagggccaagcaaacgaaggaaaaacgacgcacagaagagggaggaacccagacaaac

SEQ ID NO: 181087 - RNA, 90 nt, Homo sapiens
gagccaggcgagcgcggcgccggggcggggcccaggagacggagcgcgaagaaagagaccaacaagcgagcacgaagcaccaagagaaaa

SEQ ID NO: 181088 - RNA, 59 nt, Homo sapiens
aaaaaggcaaccacagagagagagagggaggggaacaggagacagcggagaaagagccc

SEQ ID NO: 181089 - RNA, 77 nt, Homo sapiens
cgagcgcgcagcgcggggggccgggaccaggcgacgcacaagggggcagggcccagggaccggaaagcaggacgaac

SEQ ID NO: 181090 - RNA, 80 nt, Homo sapiens
agggagcggcacagccagaagaccgaagcgcgacggaaggacagcggccgaagccagagccggggcggcgccaggcccca

SEQ ID NO: 181091 - RNA, 73 nt, Homo sapiens
agcagagggaaaagaacagacacgccagcggaggaggagcaggcggcgcaaccgaccccagaaggacagccaa

SEQ ID NO: 181092 - RNA, 42 nt, Homo sapiens
ccaggaagagccgacccaagggcaggcccagcagggcagggg

SEQ ID NO: 181093 - RNA, 71 nt, Homo sapiens
cacggaccaccggccggagggagccccgcgcaggggaaaccgcccccaaaggccagaggacgacaacagca

SEQ ID NO: 181094 - RNA, 70 nt, Homo sapiens
cgagaaccaaggcggacgcggcgagaagggcggaagagcgcgggaggggaggccaccaagaagaggagcc

SEQ ID NO: 181095 - RNA, 58 nt, Homo sapiens
cgccgcacaggccgcgaacggggcaaaggcagcgcggagagcgaggggccaaaagccg

SEQ ID NO: 181096 - RNA, 34 nt, Homo sapiens
agagacagagcaacggggcccaggaaaggccaag

SEQ ID NO: 181097 - RNA, 80 nt, Homo sapiens
ggaggagccggagagcagccaaggggaagaaagggcaaaaaacaggcagccagacgaaacacaggagacgagcgaacaag

SEQ ID NO: 181098 - RNA, 70 nt, Homo sapiens
gaaacacggggaacaaacggcaagagccagaagcccggcggaaggcacagccaagagcccccgagacgcc

SEQ ID NO: 181099 - RNA, 69 nt, Homo sapiens
aagacccggcaccccagcaggccgcggacagagaagaggacgcggagacaagagaggcagagcaacagg

SEQ ID NO: 181100 - RNA, 57 nt, Homo sapiens
gcgccaccggcgccggaggccgaagaaagacgcgccagcaggcaacaaaaccaaggg

SEQ ID NO: 181101 - RNA, 78 nt, Homo sapiens
caaggaggccccagcggaccgaacagccggccagaccacggcgcaagaccgcgggccacaagaagacagcccccgaac

SEQ ID NO: 181102 - RNA, 82 nt, Homo sapiens
ccccgcgagaaggaggagcccccgcccggcagccaccccacgggaaaaacaggaggacagagaccaaacaaggcgagccgcc

SEQ ID NO: 181103 - RNA, 79 nt, Homo sapiens
cggccaaagccgcccagacggccaccggcgggaggaacaaaaggaacacagaaacgccccgggccagccgccaaggccg

SEQ ID NO: 181104 - RNA, 101 nt, Homo sapiens
ccagacccacgcggcgccagcccggcgggaaggaaaaccgcgcagagagggcgaagcggccaggcccgggcggacgcagagccagagcgccccagaggagc

SEQ ID NO: 181105 - RNA, 58 nt, Homo sapiens
gaggagcgccgagccagaacaagagaaaccgggagacagaagacccaaagaccaagcc

SEQ ID NO: 181106 - RNA, 61 nt, Homo sapiens
cgagagacgggccgcgccgcccgcaagcagaggagaccagaccggaagggggggaggacgc

SEQ ID NO: 181107 - RNA, 74 nt, Homo sapiens
gcccgggcagacaagacagagaagaggagccggacggcacaccgcccgggcaccaacaaggcgccacggagacg

SEQ ID NO: 181108 - RNA, 61 nt, Homo sapiens
gcggccggcccggcgcggcccagcgccccaggaagagaccgagaccaggaaccaggcaggg

SEQ ID NO: 181109 - RNA, 87 nt, Homo sapiens
cggaagaacccagagacgccacggaaccaaccgggagccccccaagagacccaggggaagacccaaaggcagcaaaaacaagagccc

SEQ ID NO: 181110 - RNA, 79 nt, Homo sapiens
gcggcccggcaccaagggacccgagagagcgaaaggaaccccacccagaagaaagaaaagcggcgcaccgggcaccggc

SEQ ID NO: 181111 - RNA, 82 nt, Homo sapiens
cggcgaaaaccaacgcccccccagcacacagaggagagcgacgagaaggaaccaccggacaaacaccggaaaccacaagcgg

SEQ ID NO: 181112 - RNA, 69 nt, Homo sapiens
gaggagcgccacacccacacacaaggggcgcggggggccaccaacacccccggaacaccagacccaaaa

SEQ ID NO: 181113 - RNA, 53 nt, Homo sapiens
gcggagcggaacagcaaacagccggacacaagagggcaagaaaggcgcgacgg

SEQ ID NO: 181114 - RNA, 72 nt, Homo sapiens
agaaccaggacacacgggaagaacagacacagcaccgacacgcgcaaaagcacgacaggaccccgaacaaga

SEQ ID NO: 181115 - RNA, 84 nt, Homo sapiens
ccggcacagagcgacaggacccagggcaagaccagacggaggagagacacacaccgggaccggagacaagagggcccaacagca

SEQ ID NO: 181116 - RNA, 77 nt, Homo sapiens
cgcgcgcggcgcgggacgcgcgcgggcacccacggagccccggggcgcccccgcccccggacccaagaccagcccac

SEQ ID NO: 181117 - RNA, 76 nt, Homo sapiens
aggaggcgccgaggagacgcagccaaacaccgggcaaacgaagggcgcggcccaacgcgccccacaagaccaagaa

SEQ ID NO: 181118 - RNA, 62 nt, Homo sapiens
ccgacgccaggcagcgcccccaaacgggcccgcgacccaaaaggcccagaccacaacaggga

SEQ ID NO: 181119 - RNA, 96 nt, Homo sapiens
gaacgaacgcggcgggagcagcaagcccacgggagcagccgaggccccagaaggaaaagaaacgagaccagaaggaaagaaaaggaagcaacaaca

SEQ ID NO: 181120 - RNA, 72 nt, Homo sapiens
ggaaaaggcagaggcaaaaaaaaggagaagaccaacaacgaagaggaggccaacacgccaccacccggggcc

SEQ ID NO: 181121 - RNA, 78 nt, Homo sapiens
aggccgaggcacgccaaaagagccacaggccgcacaccccagagcccgaagggggccccgaccccgacccagcggaga

SEQ ID NO: 181122 - RNA, 76 nt, Homo sapiens
caggaggggagaggaggcaggcccgcggagaaccggggcaagagacggcagacaaacacagccgagagaaggcagg

SEQ ID NO: 181123 - RNA, 76 nt, Homo sapiens
gggagcggaaccgcccggcagcaggccagacgcagacaggaacccggcacacacaacagacgaccgggaagaccca

SEQ ID NO: 181124 - RNA, 80 nt, Homo sapiens
cgcggcgaaccggcgggaccccaagccagcaccaggcaggcaccccagcgcgaggccacaccgggccgcggagcagcccc

SEQ ID NO: 181125 - RNA, 95 nt, Homo sapiens
ccgcccccaggggcacccaccagcgcaccaggaccgaaggagaagaaggagaaggggaggagaaggcaagccggaaagagcgaaagaaagaaggg

SEQ ID NO: 181126 - RNA, 72 nt, Homo sapiens
gcaaaccccaaaaacagaaggggaaaagcaccaagcgcagaaccggccgaaaagcacaaacagcaagaaagg

SEQ ID NO: 181127 - RNA, 97 nt, Homo sapiens
aaaagaaacgacagagacccagaaaagggcaccaacacagccccaacagccaaggacgaggagaacacccagcaaaaggacgaaacaggaacgcgcc

SEQ ID NO: 181128 - RNA, 84 nt, Homo sapiens
agcaagccgacaacacccggagagagagcgccacagaccgggccaaacaacccaggaggaagagacacgcggagggaggacccg

SEQ ID NO: 181129 - RNA, 80 nt, Homo sapiens
gaagggcccgccaggacagagcccgcggaacagccccgggccccgggcacagagcaggcacccaaacaggcaaccccaag

SEQ ID NO: 181130 - RNA, 59 nt, Homo sapiens
gcccgcagagaagcagggcggcacgaacggccagcaggaaaggaagccgggggaccaac

SEQ ID NO: 181131 - RNA, 53 nt, Homo sapiens
cggaagcaacagacacaaggacccgagcggggaccgagaaagacccccgagga

SEQ ID NO: 181132 - RNA, 53 nt, Homo sapiens
aaggaccaagaaccagcaccggaggggccaggaaaagcaggggcgccccgcca

SEQ ID NO: 181133 - RNA, 64 nt, Homo sapiens
aagacaaggagaaccagaccgccaaaggcagaagcaccagaaaaaggaaagagcagaacgccca

SEQ ID NO: 181134 - RNA, 80 nt, Homo sapiens
gggggccagccaggcagcccgggagccccaccaccccgacaacagcccggagacgcgggcaaaggaaggccaggacacca

SEQ ID NO: 181135 - RNA, 72 nt, Homo sapiens
agccgaccgaggcgcccgcggggcggggaccgccgcccggggcagcagcagaaaccgcgccccagaccaaga

SEQ ID NO: 181136 - RNA, 77 nt, Homo sapiens
acaggccaaagccggcagcgaaaccagagagggaagagcgcaagacagcagccacacccagacgagaaagaggagcc

SEQ ID NO: 181137 - RNA, 89 nt, Homo sapiens
ggagacccagcgccccacggggcagcgcagcgaaggcagacgggagcgggccgagaaaaaccacagagacacacgcaagccgacggggg

SEQ ID NO: 181138 - RNA, 81 nt, Homo sapiens
agcacaccagggggcaggcccgacaagcagaccggaagaccgacggaagaccacaccccgagggagcccaggacaccacga

SEQ ID NO: 181139 - RNA, 78 nt, Homo sapiens
agcagcccaggggcgaaggcggcccagcggggcgggcagcggccaacaagaacccgccacaagaccaaaaaaaaaaga

SEQ ID NO: 181140 - RNA, 38 nt, Homo sapiens
gggacacggcaggcgccagacagcaaggacaccaaagc

SEQ ID NO: 181141 - RNA, 71 nt, Homo sapiens
gccgccggccgacggccggcgggcgggggccccgcgccgcggccgagcagcggagacaccaacaacagaca

SEQ ID NO: 181142 - RNA, 72 nt, Homo sapiens
gggaggggagcccgcgcccgccgcgggagagaggacccccccccccccccaagggaggcacccaagacagag

SEQ ID NO: 181143 - RNA, 68 nt, Homo sapiens
accgaaacgccagccggacccaagagccagaaagaaggccacaggcaccacaagcacggaaggggaca

SEQ ID NO: 181144 - RNA, 48 nt, Homo sapiens
gccacggaaagagggagaagaaaacaaagccgaggaccggaagaagag

SEQ ID NO: 181145 - RNA, 77 nt, Homo sapiens
gcgagcgcggcgcgccgagaaagaaacagccaaacaagaagaagagaagggacgaaccagaacaagccaaaagaaaa

SEQ ID NO: 181146 - RNA, 55 nt, Homo sapiens
aaaggacaaggacgccaggaaaccaagacaaaggagaagcgcggcgaggagacca

SEQ ID NO: 181147 - RNA, 68 nt, Homo sapiens
cgcccccgcagacaccgcccccacagaccagcggaccgcggacaggggggcggagacacgcacacaaa

SEQ ID NO: 181148 - RNA, 69 nt, Homo sapiens
ggcgccaggagaaacaaggcgaacgggcacccccagcaggacagcacacccaaccagacacaccacccc

SEQ ID NO: 181149 - RNA, 73 nt, Homo sapiens
cccaagaaccggggagcgacagaagacaaacagcaaggggcaaagaggcagacgccagcagacacacagccgg

SEQ ID NO: 181150 - RNA, 83 nt, Homo sapiens
acgccgcgggcaggcgcgcgcacccgaaaggccagacaaccggacggacggcccggcccccaggcggccaccggacagggagg

SEQ ID NO: 181151 - RNA, 36 nt, Homo sapiens
gagcagccccagagaggggcagaaacacgaccccgc

SEQ ID NO: 181152 - RNA, 86 nt, Homo sapiens
aagcccgggagcagaagggaggcccaagacccacaacaaaagaaacggcagcggcagagaccaccacccaacccccggccccgcca

SEQ ID NO: 181153 - RNA, 79 nt, Homo sapiens
ccacgcagcacccggcacgccccgccagaccacgggagaacaaaccaagaagcacagaagagagaagaagcaaaccggg

SEQ ID NO: 181154 - RNA, 82 nt, Homo sapiens
agacgcagcaacaacagcagccggcccgaacacaacagaccacgggacagcaacagaccagcgagagcggaccccagccggc

SEQ ID NO: 181155 - RNA, 86 nt, Homo sapiens
caaccagacgccagcgggacgaggaccgagaccgcggccgggaccgagggacgagacaagggcaacgagacacccagcggcccggc

SEQ ID NO: 181156 - RNA, 84 nt, Homo sapiens
gggggcagccccggcccccaaagccccacaggccccggccagggagcgagaccaagccagaaaacggcaaggaagaagccgaag

SEQ ID NO: 181157 - RNA, 53 nt, Homo sapiens
gcaccagaacggagcagggaacacgaccccaagggacagcagaccacagcccg

SEQ ID NO: 181158 - RNA, 82 nt, Homo sapiens
cggaggaggcacagggcgcggaccgcacgagcgcgcccgggcgcgccaggcacagccaagagcggaccggcagcggccagcg

SEQ ID NO: 181159 - RNA, 66 nt, Homo sapiens
cggccgccccgcccccaccgccgcagacccccaagcagcaggaccagcgcagaagggccgagagac

SEQ ID NO: 181160 - RNA, 79 nt, Homo sapiens
accccaagcaaaagggcaaacaaggaggaggaagccaagaacgggagcgaagccacgcagcggcaccaacgaccgggcc

SEQ ID NO: 181161 - RNA, 47 nt, Homo sapiens
cagacaaaagggccaaagaagggagagagaccaagaggggggagacc

SEQ ID NO: 181162 - RNA, 76 nt, Homo sapiens
ccggaagcacacaacaggaaaacaaaagaggagaaagaggggcggcgagggccggcacggggcgcaaggccggagc

SEQ ID NO: 181163 - RNA, 73 nt, Homo sapiens
gcgaggcgggaacacgaagacagcaacggcaggacacgcccaccaagaaagaaccggaaaggggaccgggcca

SEQ ID NO: 181164 - RNA, 71 nt, Homo sapiens
cccggggcaccccacggaggcacccgaggcacaaacagcggccagaccgaagggcaaaagagacggacaag

SEQ ID NO: 181165 - RNA, 71 nt, Homo sapiens
aaagcaggcacaagggaacaggaggagagaaagaacccacgcaggacgacagaagaggccggacaagagaa

SEQ ID NO: 181166 - RNA, 72 nt, Homo sapiens
gccccgcagcgaaaacccaacgagaccaaagaggcaagggccagggagcagaagacccaaaagaaacccaca

SEQ ID NO: 181167 - RNA, 103 nt, Homo sapiens
gcggggcccggcgacacgcgaccagagaagcaagccggccagagggaggccggcggaccgaggccgaggcacacagccagcaccagcccacgcaggcaaagca

SEQ ID NO: 181168 - RNA, 83 nt, Homo sapiens
ggccgggagcgcgcagccagcccaccgggggacggcacggcaggcggacgcccggggccccccggaccacgaggagcaccgag

SEQ ID NO: 181169 - RNA, 68 nt, Homo sapiens
aggagcggagaacacagaaccggcccgggggcccaaggagggagcgacggcggagggcacaagggaga

SEQ ID NO: 181170 - RNA, 74 nt, Homo sapiens
ccacaaggacccgaggaacagcgcacgggcgggcgaaggcagcccacgaggaagggccccacaccaaaccgcca

SEQ ID NO: 181171 - RNA, 78 nt, Homo sapiens
gggccccagccccgcccgcccccagcccgggaagaagagggcgggcgggccggccaggacggcccgaggagcggcggg

SEQ ID NO: 181172 - RNA, 65 nt, Homo sapiens
ccgaagccgcagggaggggaaacgaagcgcacgaaacaccaagaagcgaggggaccagaagaagg

SEQ ID NO: 181173 - RNA, 128 nt, Homo sapiens
cggaaggagcggcggcagcgcgaggccggagaaacaggcgccgcgggcccgcgcccggccggacccgggcccgagccggcacagccacaccgagaagaccggcccaagaaccccaccgcccgaagaca

SEQ ID NO: 181174 - RNA, 85 nt, Homo sapiens
cccggggcgcgcccaccgcgccgcaccagcgaacaaagacaccaccagccgggacgaggggaggaaaaaaaccagaccccgcacc

SEQ ID NO: 181175 - RNA, 38 nt, Homo sapiens
agcccccaagagcggcaacaggaaacccaagaagaaac

SEQ ID NO: 181176 - RNA, 80 nt, Homo sapiens
agcaccccccagcccagggccgccggccaaggacccaacaagacggccccaaagggagccaggcaccagggaagacccaa

SEQ ID NO: 181177 - RNA, 59 nt, Homo sapiens
gagagaaccgcagcaccccagaacaagaaacccacgagaagagaagggaggagagagac

SEQ ID NO: 181178 - RNA, 71 nt, Homo sapiens
ggaaaaaacgaaacggagagacagccgacaccgaaggagccagcgccccgaagaaggcccaccaagccgag

SEQ ID NO: 181179 - RNA, 114 nt, Homo sapiens
cggagcagagcccggggccgagcaccgcgcggcgcgacggcccaggagcgcgccggcgggagcccagaagcagagccagagccccggagccccccgggcggccaggggcgacag

SEQ ID NO: 181180 - RNA, 69 nt, Homo sapiens
acacgggggacagaaagcaagaagcagagaaacggcccccaccagaccacaaaaagcagcggcccgacc

SEQ ID NO: 181181 - RNA, 41 nt, Homo sapiens
cccgggcccacaggccaggaagcgcagagaacaaggccaag

SEQ ID NO: 181182 - RNA, 79 nt, Homo sapiens
agaagagggcggagcggagacgggagaagaaaagacgagcgcgggagcgagaccagagggaagaccgggccccacagca

SEQ ID NO: 181183 - RNA, 52 nt, Homo sapiens
cccagggcaaccagcaaccggcagggcaaaaagcacaggagggcaggaccca

SEQ ID NO: 181184 - RNA, 76 nt, Homo sapiens
cgaccccgggcgcacaacgcgggagcccgccagcggcccccgcagcaggcgagaggcagaacccggaaagaaggaa

SEQ ID NO: 181185 - RNA, 73 nt, Homo sapiens
aaggaaagaaccccacccaccgcccccccgcaggggcgagaaccaccccccccagcccagcacggggaccagg

SEQ ID NO: 181186 - RNA, 76 nt, Homo sapiens
cacacaagggggcagggaaccaacgagacagaaagggaaagcgccagcgaggcgaagaagaagaaacaccagaaac

SEQ ID NO: 181187 - RNA, 82 nt, Homo sapiens
cgcggagcgcccccgcgccccgcaccagagcggggcaccgagccgggaacacagaaacgccccgggccagccgccaaggccg

SEQ ID NO: 181188 - RNA, 83 nt, Homo sapiens
gggcaacagagagaagcgaaaggcagaagaagaggagaggacagagcaccaccaaccggggagcaaaagcagccagaagcaaa

SEQ ID NO: 181189 - RNA, 76 nt, Homo sapiens
gacagacagaccggcaggcaggaaaacgggagaacacgacaccggcgaggaacggcagccgacaggcaagacggca

SEQ ID NO: 181190 - RNA, 78 nt, Homo sapiens
agaggcgaccgccagacggagcacacggacaaggaggggacacaaaggaagaggcagccagacagcaccagcgcccaa

SEQ ID NO: 181191 - RNA, 93 nt, Homo sapiens
cggaggccgggacggaccgccagacaggagcggcgaacgcgcgccacggcggaggcgacgcaggagaccagagccgagagcgggacagggcca

SEQ ID NO: 181192 - RNA, 79 nt, Homo sapiens
gagacggggcagacaacggagcccggggacccgcccggcggacacgacaaacccaggccccaacaccaccggaaggcag

SEQ ID NO: 181193 - RNA, 78 nt, Homo sapiens
caagcgaccggggccagcggagacaggaaggaggagacaccgccagagcgaccaggggacccgagcgaccagaaagcc

SEQ ID NO: 181194 - RNA, 80 nt, Homo sapiens
ggccagccgcaagacccgccacaagcaacgcgggaagagaagcaagagggacagggaggacccagaagaggccggcccgg

SEQ ID NO: 181195 - RNA, 53 nt, Homo sapiens
aacaaacgagcacgcaagggaacggcgagggaacccaggaaggagggcgacaa

SEQ ID NO: 181196 - RNA, 74 nt, Homo sapiens
cagagcaaggaccaagagaacaagggaaccagccaaaagaaaggaaggcaaagccagccccgcaccacaaaggc

SEQ ID NO: 181197 - RNA, 42 nt, Homo sapiens
cggcaccagaagcagcggaggaagggggggccccagcccggc

SEQ ID NO: 181198 - RNA, 74 nt, Homo sapiens
cagccccacacccacaacgccgggccacggacaagcccggacggagcccccccggcgccggcagcgcccgggag

SEQ ID NO: 181199 - RNA, 74 nt, Homo sapiens
acaggaaccgccccgagaggaaacacccccagaagaggggagcccggaagcagcaacaggagaagagagaaggc

SEQ ID NO: 181200 - RNA, 84 nt, Homo sapiens
ccgagcgagcgagcggcgcccagcccagcgcccggccgaaccccccgcagcaggagacaggagggaccgggcagaagaacgggg

SEQ ID NO: 181201 - RNA, 83 nt, Homo sapiens
ggagaccccgaaaacggaagcgcagggagaaggaagaggggaaaagaggaagaagccaagccaagagacagcgcccccacagc

SEQ ID NO: 181202 - RNA, 64 nt, Homo sapiens
accagggaaaagcacgccaacgaccgaaaccacagcgaagggaaaagaaggcccggcagaaagc

SEQ ID NO: 181203 - RNA, 71 nt, Homo sapiens
ggcgggcgcaggggaccgcaacaggaacggaggcgggcggccaggcaacagcagcgcaggagaaggagaaa

SEQ ID NO: 181204 - RNA, 89 nt, Homo sapiens
ccgcagcgggagcggacggcgagcgcgagcggcgcgagaaaccacccgaagggccccccaagcccagggaccgcagaggacggggacca

SEQ ID NO: 181205 - RNA, 70 nt, Homo sapiens
aaaagggccaaagaagggagagagagaaggagccccagcgagaaaagacaggaggagagggggcgccagg

SEQ ID NO: 181206 - RNA, 77 nt, Homo sapiens
aggagggagaacacagaaaccggccccaggaacaagcagaaagcacgaacaacgagaacaagacacgagcaaacccc

SEQ ID NO: 181207 - RNA, 66 nt, Homo sapiens
cacgagagaaaagagccaaacaaggaaacagaagacggaaagccagccacagaccagccggggggc

SEQ ID NO: 181208 - RNA, 79 nt, Homo sapiens
gccgagcaggcgagcgaacgacgacgggcggcagagaagagaagagcacagcgggaggaaagggagagacaagagagga

SEQ ID NO: 181209 - RNA, 80 nt, Homo sapiens
ccagcccccaccgagaacagcaccccgcagaagcggcagaagcagagccacccaaggggcggagcggcagcggaggagaa

SEQ ID NO: 181210 - RNA, 104 nt, Homo sapiens
accacaggcccgcagcccggggcgaacacggacaccaacgagcgaagcaggagagaaaacagacagaaaagaaccagaaccggccaaaagcgaaaaggcggaag

SEQ ID NO: 181211 - RNA, 59 nt, Homo sapiens
cccacacgggacggcgcggccacccgcagaggaccgcccgacagagggggaggacggaa

SEQ ID NO: 181212 - RNA, 63 nt, Homo sapiens
gaacaaacagcaagaaagaccacaagaccaacaccagcggggcagaagaggggcagaaaagag

SEQ ID NO: 181213 - RNA, 66 nt, Homo sapiens
agagcacgggaaaccagaggaaaaccgcacgaggaaggaagggcaaggaccaggcacagacaccac

SEQ ID NO: 181214 - RNA, 40 nt, Homo sapiens
ggaagagaggacgcggcgagaggcacagcgcacccgcccc

SEQ ID NO: 181215 - RNA, 71 nt, Homo sapiens
gaaggacccccgcgccggaacaaacacccaaagcagccaggagccagcaaaaagaagagacgacaaaagaa

SEQ ID NO: 181216 - RNA, 58 nt, Homo sapiens
caggcccccaaccagccacgcggaggcaagaaaccaggggcggaaccagcaagacccc

SEQ ID NO: 181217 - RNA, 76 nt, Homo sapiens
cggggaggcgcggagcgcgcggggccgcgccgcgaccccacggccgggcaccgaaagaaaaaagcgaacgcaaggg

SEQ ID NO: 181218 - RNA, 77 nt, Homo sapiens
gccacaggggccgaaacacagagcaagaaagaagagcgaagcacaacacggagaaccggaggacggggcaggaaaaa

SEQ ID NO: 181219 - RNA, 74 nt, Homo sapiens
aagccaggaaaaacacacggccagcaccccaagccaggccagcccaggggaacgaggagcgacccacgcgcgcg

SEQ ID NO: 181220 - RNA, 83 nt, Homo sapiens
agagcacagcaaggaggaaacagcaagggaacaacaacaggacgccacagggcaaaagaggagaagagcaggcccagaaaagg

SEQ ID NO: 181221 - RNA, 68 nt, Homo sapiens
gagggcaccccagggaagcagaaagcaccagaagaaaggagagagccgaaagagaaaagcgcgcgcaa

SEQ ID NO: 181222 - RNA, 76 nt, Homo sapiens
agccaacacaaaccacaaaaacaacaaggccaccaaacgagagcagccaacggaaggaagggaacacggacgacga

SEQ ID NO: 181223 - RNA, 81 nt, Homo sapiens
cggagccggacccgccgcccccggccggaaggccgaccagacagaaggacagaccaagacaaacccgggcacaaaggagca

SEQ ID NO: 181224 - RNA, 75 nt, Homo sapiens
gcccaaggcccaagagcccagcagcaggagaggaaaaccagaaaaagccaacagcccagcgaaggagaccagcga

SEQ ID NO: 181225 - RNA, 61 nt, Homo sapiens
cgcagggcccacacggcacgcagggaagaggacaaaccagcgcgcggggcgcacaaaggcg

SEQ ID NO: 181226 - RNA, 73 nt, Homo sapiens
acacagagacgacacacgcacaagggccagggagaacggcagaaccaagggaccaaagcgggacggcaggcca

SEQ ID NO: 181227 - RNA, 75 nt, Homo sapiens
ggcgggcccccgaaacgacagcccaacccaaaacaggagggcaccggcgcacccgggacgaacgccaggacgagc

SEQ ID NO: 181228 - RNA, 71 nt, Homo sapiens
ccgccacaaccgccagacaaccggagccacgccccacgaccgccaggccccggacgggcaggcagccaacc

SEQ ID NO: 181229 - RNA, 75 nt, Homo sapiens
gggggcccacggcacaagcacacaggaaagcaaacccaggaacacggacccgagaagaagaagaagaaggggagg

SEQ ID NO: 181230 - RNA, 61 nt, Homo sapiens
gcccacaggggggggcaaacccgagagaacggggccccgcaagcgcgcgagcagcgggcgg

SEQ ID NO: 181231 - RNA, 68 nt, Homo sapiens
caaccagaaaaaagaaggacaagacaagagaaccaccgggaccacagccccagggcgaagaccccccc

SEQ ID NO: 181232 - RNA, 102 nt, Homo sapiens
cccgcgccgccgaccccccggcgccgcgccggcggcgcccgggcgcgccaggcacagccaagagcggaccggcagcggccagcgcagcggccggagcagaca

SEQ ID NO: 181233 - RNA, 42 nt, Homo sapiens
ccccagcgaccccaagcaaaccgcagaccagccagccccaag

SEQ ID NO: 181234 - RNA, 80 nt, Homo sapiens
ggggagaacagcccaaaaaaggcaagagcgaaggagaaaggcaacaaggcccgagcggggaacacgagagccacaggcac

SEQ ID NO: 181235 - RNA, 36 nt, Homo sapiens
accacccacgcaggcagccaaggagaccgggagaga

SEQ ID NO: 181236 - RNA, 53 nt, Homo sapiens
cagagacccccgccccgacggagaacacgagacccgcacaaaaccccgccccc

SEQ ID NO: 181237 - RNA, 40 nt, Homo sapiens
ccgccgacccccccacaaggccccgggaccaaggacacgc

SEQ ID NO: 181238 - RNA, 82 nt, Homo sapiens
ccgcggcgcccggggaaagccgggccccgagggcggaccgagacagaaggacagagaagaacccagaaaaaagcaaggccga

SEQ ID NO: 181239 - RNA, 69 nt, Homo sapiens
ggaagcaaaaaccgcgccaaagcaagagccaaagcagacccccaagcgagcggagcggaaggagcgcgc

SEQ ID NO: 181240 - RNA, 84 nt, Homo sapiens
gcgcgggacaccgcaaggggcagccgggccaggggcccccaggggacaagggccaccaggaacaaggacccgggacgcagggac

SEQ ID NO: 181241 - RNA, 73 nt, Homo sapiens
aggcagaggggaggcgcgaaaggagcggcagcccacaagcaggaagaccagccccaggagggaaacagagcac

SEQ ID NO: 181242 - RNA, 78 nt, Homo sapiens
gacaacaagcagccaagcccagacaagccccagggaagccacagcaccccagcacccagcggaagccgcagaaggacc

SEQ ID NO: 181243 - RNA, 73 nt, Homo sapiens
gcaacacaagcacccccgaaccagaggaccggcaacaacccgaggacgaaccaccccgcgccagcagcacagc

SEQ ID NO: 181244 - RNA, 72 nt, Homo sapiens
ccacgccgagaggacgggggaggggcagaccagaccgccgacccagcggacgccaagaagaaaggcccagaa

SEQ ID NO: 181245 - RNA, 77 nt, Homo sapiens
gagaacccaaggcggggaaccgcagcgcaggacaggcagaaccccggcgcggcccggagggaaaaaaccggagcaaa

SEQ ID NO: 181246 - RNA, 54 nt, Homo sapiens
agagggggaaaccaagaccccaggacaacaaggagggggcgaggaagagacagg

SEQ ID NO: 181247 - RNA, 72 nt, Homo sapiens
cggcgccggccggggggacgggcacgggaacacagaagagaacccgaacacagcaggagcaagcgggggcag

SEQ ID NO: 181248 - RNA, 81 nt, Homo sapiens
cggagaacgaccacgaggggccgcaaagacgccgcacccaaggccaaacagcaggaacggcagagcgaaacaaacaagagg

SEQ ID NO: 181249 - RNA, 95 nt, Homo sapiens
gaaacccaacccgagaggaagcagcgagacgcccggcagacggagcaagaacgaaaacaaacggaagagagggcagcaagaaagaacaagaaagc

SEQ ID NO: 181250 - RNA, 83 nt, Homo sapiens
gcgacagcgaaaagaagcaggacgccgcaaccacaggaagaccccaaaccaaagagaagagaccagaggaagggcaccgaaca

SEQ ID NO: 181251 - RNA, 86 nt, Homo sapiens
acaccgagagaggaggagccagacgacaagcacacacaggcgcgaaacggaaaaagggagcaggcccagggcaaaacagaaacgaa

SEQ ID NO: 181252 - RNA, 55 nt, Homo sapiens
gcgcgggccgcgcgggggcgcagggggaaacccgcccagggcgggagaccgccaa

SEQ ID NO: 181253 - RNA, 76 nt, Homo sapiens
caggggcgagggaaggacaacggaaacacgagaaggcggagaaaagaacagagcaccacgaaagaccccgacaaac

SEQ ID NO: 181254 - RNA, 75 nt, Homo sapiens
aaggaccaagaaccaggggaaaggaaaccaaaccaggaaagaaggacaaggagcgaggagaaagagggacaccag

SEQ ID NO: 181255 - RNA, 60 nt, Homo sapiens
ccaacgcaccaccgccgcccacggccaaagcagaaaccccgccccccgaggcgcagcccg

SEQ ID NO: 181256 - RNA, 83 nt, Homo sapiens
cggagggcgacagaggcgaggaggaggagccagggcgagcaccaaggggacacaggcaaaacggacaaagaccgcaaaaagac

SEQ ID NO: 181257 - RNA, 78 nt, Homo sapiens
acccaggagcggggcccgggcccccgggccccggcccccaggggaagccccacagagcaggggccaagcgcggcggca

SEQ ID NO: 181258 - RNA, 59 nt, Homo sapiens
ccagccccgacaccacacccagacccaaaggcaacaacagcagagacagaagacagccc

SEQ ID NO: 181259 - RNA, 74 nt, Homo sapiens
gggcacggagcaacaggaaagggaaggaggccagcagcggacacgaccgagggaacaggcaagaacggagagaa

SEQ ID NO: 181260 - RNA, 77 nt, Homo sapiens
gcagaaagggcagacacaggcacaccaagggagagaacgagcgagaggggaaagagagggaggaggagacaacagag

SEQ ID NO: 181261 - RNA, 78 nt, Homo sapiens
cgacagcagccgcaccgcgcgccagacaagcagaccggaagaccgacggaagaccacaccccgagggagcccaggaca

SEQ ID NO: 181262 - RNA, 77 nt, Homo sapiens
ggcccagagcccgacacgcgaaacacgagacccggaacagccgagagccaggaggagcagcggccacgcaggaacgc

SEQ ID NO: 181263 - RNA, 76 nt, Homo sapiens
cggccccgccaaagggccccaagaagcacccgcccggaacggggagcccaaagaagcgcagcgcggccagccccca

SEQ ID NO: 181264 - RNA, 72 nt, Homo sapiens
cgcccagggccgcgccccccaggcccacaaccagcccagcagcagcaagcaggccaaaagaaagcagaggcc

SEQ ID NO: 181265 - RNA, 73 nt, Homo sapiens
gcgggggcgcgggcggcgggcagcccgcgggcgcccaggaggaaggcaaggacaaagaccacgaggccacagg

SEQ ID NO: 181266 - RNA, 105 nt, Homo sapiens
gacacggccaccgcccagcgggagaggagcccaccaggacgaccgcgccgcccagcacgccaggaagcagggcgggacaagcgggaaaaagacggacacgccccc

SEQ ID NO: 181267 - RNA, 81 nt, Homo sapiens
cccgcccaggaagggacccgagcacgggcaccagacccggaggagcagcaccccggcaggcagaccagccggcccccacca

SEQ ID NO: 181268 - RNA, 74 nt, Homo sapiens
cgcagaaaaagaggcccccccccccgcgacgcagccagagcggagccacacaccgagggagagaagaacaaggg

SEQ ID NO: 181269 - RNA, 67 nt, Homo sapiens
aacacaccagcccagacagcgcaagcaccaggacgcgaagacgggacaccacacagagcaaaacagc

SEQ ID NO: 181270 - RNA, 65 nt, Homo sapiens
aggacccgaccaaccggcaaaagcagggaggccagccgccgcggcaaggaagagggaccgacaag

SEQ ID NO: 181271 - RNA, 87 nt, Homo sapiens
gcccgcgcgcgcgccggcccagccgcgcgacgggaggacgaagccggccgcaggcccaacaaggcacgcagaagaacccccgacgaa

SEQ ID NO: 181272 - RNA, 71 nt, Homo sapiens
agacccccacaaacgaagggcgacccaccaacaggcaacccagacaaagaagagcagccgcagaaaaaaag

SEQ ID NO: 181273 - RNA, 58 nt, Homo sapiens
ccaccgaacagaaaacgcagacaagcaaccgcagaacccgagcggggccagccaccag

SEQ ID NO: 181274 - RNA, 81 nt, Homo sapiens
ccgaaaaacagacaaggaggggagaggacgacagcaagcgagcccgggagcaacacccggaccaccggggccggggaaaga

SEQ ID NO: 181275 - RNA, 72 nt, Homo sapiens
caccgcggaaagcaggggcgccaacgcccggccgcggcccaggacgagccccgaacccacccgaagaaccag

SEQ ID NO: 181276 - RNA, 73 nt, Homo sapiens
gacagaagcgcccccggggagcgggggacagaggagggcgagacgacgggaccgaaggaccccgccagagaca

SEQ ID NO: 181277 - RNA, 69 nt, Homo sapiens
gaagaacgcagaacccgagggcgacacaagggggaaccagggaggcaccgcgcggaaaccccaaacacc

SEQ ID NO: 181278 - RNA, 73 nt, Homo sapiens
ccgagccaaaacagcaggcagaggggacgcccagaaccagcgcaccggcccgccgcaccacgccgcacacgac

SEQ ID NO: 181279 - RNA, 64 nt, Homo sapiens
gccggcaccgccagcccacgaggacagacagcgaaacagggggccgggaaaccaagcaccccac

SEQ ID NO: 181280 - RNA, 84 nt, Homo sapiens
cggaccggagaacaccgcgcgggaagaagaaaccaaagcccaaaccccggccaccacacaaaggcaaccgggagagaacagggg

SEQ ID NO: 181281 - RNA, 75 nt, Homo sapiens
gcggcgggaagcaagcgcccgaaagccagaggccgagacccccaccaccgcaggcagcccaggaccaagaaaacg

SEQ ID NO: 181282 - RNA, 76 nt, Homo sapiens
ccgacaggcgcggcacgggaggcggaggcgccccgccagcagcgagagccagacaagccagacaccaagaccccac

SEQ ID NO: 181283 - RNA, 52 nt, Homo sapiens
gaacgacgccaaaacaaaagcaacaaggcgagacgacgggaccgaaggaccc

SEQ ID NO: 181284 - RNA, 73 nt, Homo sapiens
ggaggggcgcggcagcgcaggaaaaggacacgaaaaaagaacccaccgccaacccagccggcccaggaacaca

SEQ ID NO: 181285 - RNA, 74 nt, Homo sapiens
cacccgggcccagccgggaacccccacgcggccagcgaaaacgcccaggggaagaaggaccgggaaaaggcccc

SEQ ID NO: 181286 - RNA, 75 nt, Homo sapiens
aggagccccacgccacggcgggacgagccggagggaaggaggagaagcgaaccgcaggagagggaccacggcagg

SEQ ID NO: 181287 - RNA, 74 nt, Homo sapiens
caaggagcagccagggcaacgccaccaagaacaagagaacgcagccacgagcgcgagccgaacaggaaaaggga

SEQ ID NO: 181288 - RNA, 78 nt, Homo sapiens
ggaccgagcgggaagaagcgcgccagacacagcggaagacgcagagggagacagggagaaaagaagcagcccacgaac

SEQ ID NO: 181289 - RNA, 72 nt, Homo sapiens
gaagaaaacacagcagagacaagcaggaaaccccacagcaacagggagagaaaagccccgaaaacggagagg

SEQ ID NO: 181290 - RNA, 89 nt, Homo sapiens
acacgaccggcgacagcagccaggagcagagcgacagcggcgagcagaacacggcgagcgggagcccccaggacaggcacacccgggaa

SEQ ID NO: 181291 - RNA, 72 nt, Homo sapiens
ggagaaaaacaggagcagaccagcagagcagcacaggagggacgcacaggggcggcagcgagaaggccgaaa

SEQ ID NO: 181292 - RNA, 72 nt, Homo sapiens
cagaaaaacggcgaaggaaggggagagagagaagcgaaggaagccaaggagggccaagaggggccgcgggcc

SEQ ID NO: 181293 - RNA, 75 nt, Homo sapiens
ggacaggcgccgcgccgccgcacgggaccgccgagccacaccggcgcgccgggggcccggaaagggacgcgcgcc

SEQ ID NO: 181294 - RNA, 71 nt, Homo sapiens
ggccggcaaacggagagggcaccaagccaggagaagggagacgggcaagaccacgccccacacgcaaggcg

SEQ ID NO: 181295 - RNA, 74 nt, Homo sapiens
ccaccgcgcgaccggcgggcccccgcccgggcccccgaagaggcggcgccagacaggacaaacgagcgcaaccc

SEQ ID NO: 181296 - RNA, 74 nt, Homo sapiens
gacgagggacccacgcccgcacgggcggaaacagggagggccacagcccccgcccgggagacaaagccccaggc

SEQ ID NO: 181297 - RNA, 74 nt, Homo sapiens
ccggcagaaggcacgcgcccggacagacaggcaggcggaagccaaaccgaagggacagacccccaacaccaaga

SEQ ID NO: 181298 - RNA, 79 nt, Homo sapiens
gagaccaaaccggaaaccgccaaaaccccccacacaccccgccggaagccccacgagaagaagaagaagaggcggcccg

SEQ ID NO: 181299 - RNA, 88 nt, Homo sapiens
gccgcggagccggcgcgagaggggcgcggccggagcgggcggcgagacaaaggcgacgccgagccccaacaacaaacaaaggcagcgg

SEQ ID NO: 181300 - RNA, 75 nt, Homo sapiens
gggacacaggcgggagagaggcacccggagaagagggagccaagagcaaagaccaagccaaagcgagaagaaggg

SEQ ID NO: 181301 - RNA, 75 nt, Homo sapiens
ccaggggaaagcagaaaacagaaacaccaccgaaaacgacacggaggaccaaccaagaagcgaagaaaagagaaa

SEQ ID NO: 181302 - RNA, 62 nt, Homo sapiens
aagcggccgccaaggagggcaagacgaggaccgggagacaacaaaaaagggagaacgcacaa

SEQ ID NO: 181303 - RNA, 73 nt, Homo sapiens
aacagggaagaaagccaaaggaagccaggccacgaaacggcccgaaggacccgcaacaggcacgcagcagcac

SEQ ID NO: 181304 - RNA, 77 nt, Homo sapiens
gcaaagagaaagaacaagaacacgcagcacgacacacagacgggccaacaaccagccaaaccggccacaagcgccac

SEQ ID NO: 181305 - RNA, 63 nt, Homo sapiens
gcgcgaaaaaagagacagccaggcaaagggaaggaaaggccaagaaagccggacagggccagc

SEQ ID NO: 181306 - RNA, 79 nt, Homo sapiens
cggaggcgagacgacagcccaaacaggagcggagcagccaaagaggacaaaccggcgaccacacacggggacgacgggg

SEQ ID NO: 181307 - RNA, 84 nt, Homo sapiens
aaacggccagcaagccggcacggcggcgagcccggcagagcggcgaggccggcggggcccggggcgggaaaaaggaacccaggc

SEQ ID NO: 181308 - RNA, 64 nt, Homo sapiens
accggggggagccgaaaacaccagccggcccaagcgggcccccggaagaagagagggcgaagga

SEQ ID NO: 181309 - RNA, 59 nt, Homo sapiens
accagccgacggcccaaccccgcaagacccaggccacaacagagcagacgagcagaccg

SEQ ID NO: 181310 - RNA, 72 nt, Homo sapiens
ggcagaagagggaggggacgcacaaccaaggggccgcaaggccaggcgcgcagaggcacccaacggcacaga

SEQ ID NO: 181311 - RNA, 81 nt, Homo sapiens
ggccccgacggggcgggggccccagccccacagaccagcccagcacagagggaacaggcacgccccacccgccagccgagc

SEQ ID NO: 181312 - RNA, 100 nt, Homo sapiens
caacccggcgcagcgcagccaggcccgggccagcggcgccccgccaccgccagccgcgggcacagaaagcgagagagccaaagacgagaggagaggaagc

SEQ ID NO: 181313 - RNA, 100 nt, Homo sapiens
ccgaccggaagacgggcgaggagaccggcaccacggcagcggcccaacgccaagaacaacgccgggcgggggaggcgagacacgggaggcacacacaacg

SEQ ID NO: 181314 - RNA, 72 nt, Homo sapiens
ggcggcgacacccgggagccgccggcaccgccggaaccggcgcagggagcgaggcggccagggccccagaag

SEQ ID NO: 181315 - RNA, 85 nt, Homo sapiens
ggagggcgaggcggcgcggccaggccaccccggggagccaaccagagccccccaagagaacccagggggagccacgccggagcgg

SEQ ID NO: 181316 - RNA, 73 nt, Homo sapiens
ggagacacaagggcacgaaggcgaagaagaaaccgaacggcgccggggcagcgagaaagagcagaggagaaaa

SEQ ID NO: 181317 - RNA, 39 nt, Homo sapiens
ccggaggagaaggcgagaacagagacggagcgcaggccc

SEQ ID NO: 181318 - RNA, 75 nt, Homo sapiens
accagaaaacaggcggaagaagcgagacagagggccaaggcaacacccgacggacagccacgaaccaaggaacca

SEQ ID NO: 181319 - RNA, 63 nt, Homo sapiens
cgcaaaaacaagacggggcgccccacagaggggcgacgcgacgaggaaaccccgaagcaacgg

SEQ ID NO: 181320 - RNA, 63 nt, Homo sapiens
cgcggaggacacagaagaccaccggcccaggcggaggcagggcacaacacagcgaccgcaacc

SEQ ID NO: 181321 - RNA, 103 nt, Homo sapiens
gaggggagagcaccccaccacgccgggcagaaggccgaaagagcacggacccggaaggaaggaggcacaggagagaggcaacaaggccaggaacgggagcccg

SEQ ID NO: 181322 - RNA, 73 nt, Homo sapiens
aggaggagcgaccaggacggaccgggggagccaaacaacaggcccgcggcaggcggggccaggcccgagccag

SEQ ID NO: 181323 - RNA, 71 nt, Homo sapiens
ggcccagggagcagacgccggccgggaacgagaaaaaggaaaagccgagggagcagcgaggaaagggcaca

SEQ ID NO: 181324 - RNA, 82 nt, Homo sapiens
accaaaccccacacccagggcccgaaaagaaagcgaacacacaaaacaagaaaaggcacgcaaacccacaagaacggaaaac

SEQ ID NO: 181325 - RNA, 76 nt, Homo sapiens
aaaacaacagcagagcaaggaaagccagacaccgaaagcgccagcagcgaaccccagacggaaagcccacccacac

SEQ ID NO: 181326 - RNA, 75 nt, Homo sapiens
gaaggcccacccaggggacaccgggcccaggaaaagaacaagaagcaccccaggcaaaggaggcccaagcagccc

SEQ ID NO: 181327 - RNA, 36 nt, Homo sapiens
cacgaaacacagacaaggcacacccaccagaaggga

SEQ ID NO: 181328 - RNA, 81 nt, Homo sapiens
agcacaccaggagagaagcgacagccgcagccccaaggcaaggcccccacaagagccagcaaaggacgccagggccccggc

SEQ ID NO: 181329 - RNA, 87 nt, Homo sapiens
gcccgggagggaggacgaggaggaagcgagcagcccagacagcggccacccaagggaccaagaaaggcccagggaccaaagcccgga

SEQ ID NO: 181330 - RNA, 74 nt, Homo sapiens
ccccacccacggaagagcagcagcgacggcagcaggacaggaagcagggagccaagcggcaggaaaggacccac

SEQ ID NO: 181331 - RNA, 85 nt, Homo sapiens
gcccggacccacgaccccccggccagacaagccgaggaaacccagacccaagaccaaccgaggaggaggaggagggagacgcgcc

SEQ ID NO: 181332 - RNA, 55 nt, Homo sapiens
aggcggagaaagggcagaggcccccacggaaaaagaacgaccaggacacagagcg

SEQ ID NO: 181333 - RNA, 80 nt, Homo sapiens
ggaccaggaacagaacccagaagccgacccaccaccaagaccggaaagggagcagcaccggccacacccacagcacgacc

SEQ ID NO: 181334 - RNA, 74 nt, Homo sapiens
gggacaaaggcgaccaggaaaagaccaagaaggggaacggaaagagcaaggcaccggcaccggaccaacacgaa

SEQ ID NO: 181335 - RNA, 56 nt, Homo sapiens
gccagaaaccaaagacgagaggcaccggaaggcaaccaaccagccgccgaaacacc

SEQ ID NO: 181336 - RNA, 53 nt, Homo sapiens
cagcgccaggcaacacagaaagaagacccgcggacagcaaaaggagaaaaacc

SEQ ID NO: 181337 - RNA, 80 nt, Homo sapiens
gagcccggccgccagaccacagcacagccgggaaggggagccaccagccccccggacccacccgaggacgggcaccaggc

SEQ ID NO: 181338 - RNA, 81 nt, Homo sapiens
aggaggaaacaccaaccacacacacagggggcccacgagaagagcaggcgacgggggagagggagacagcggcgcaaagaa

SEQ ID NO: 181339 - RNA, 76 nt, Homo sapiens
ggaaaagcaagccagaaaagcaaggcgccgaccaagagagaagaagcccagagggaacccaccagaaaacgacaca

SEQ ID NO: 181340 - RNA, 45 nt, Homo sapiens
ggacgagcgagaaagggacggccccaagaggaggcaacacaacgg

SEQ ID NO: 181341 - RNA, 65 nt, Homo sapiens
gaggacaccagccaccaagcggacaaaccccagggaaccggcggcagaagggaccgaacggcaag

SEQ ID NO: 181342 - RNA, 66 nt, Homo sapiens
ggccacaccgccggaggggaccagcagggaccagaagcagcagccccagaagccccgaagccgggg

SEQ ID NO: 181343 - RNA, 54 nt, Homo sapiens
agcggcgcagccggagggggccggagggggggcagcgcagcaggcgggcaccgg

SEQ ID NO: 181344 - RNA, 76 nt, Homo sapiens
cgggaagaagcaaacgaagggcaagaacaaaaaaaaagaccacagcgccaaagagaagagaaggagccaagacacg

SEQ ID NO: 181345 - RNA, 80 nt, Homo sapiens
ccggaacagccaacaaagagaggaaacccagcggcggcagaaccagccggcacaaagccgaaccagagagagcaacgccc

SEQ ID NO: 181346 - RNA, 75 nt, Homo sapiens
acgacgcggaccagaagccagagcgaggacgccggcagccccaggagagaagaccagaggaagagggaccagaac

SEQ ID NO: 181347 - RNA, 76 nt, Homo sapiens
gggacgccaagcccaccgcacaggcacagcccacgcccacaaaggcagggcacacaagcaacagaagaaaaggagg

SEQ ID NO: 181348 - RNA, 87 nt, Homo sapiens
acaggagccccacagccaccgggagcccgggcgcgccaggcacagccaagagcggaccggcagcggccagcgcagcggccggagcag

SEQ ID NO: 181349 - RNA, 110 nt, Homo sapiens
cgaaagagggcacccacccacgaagggaggaaaagggcagggacagcgcaggcagcagcgagacgacgggaccgaaggaccccgccagagacaaccgagcgccaggagag

SEQ ID NO: 181350 - RNA, 67 nt, Homo sapiens
aggagaaagcaggagacaggaacaacccaagccggaaaacaccgcgaaacggggcgaggagaggaga

SEQ ID NO: 181351 - RNA, 65 nt, Homo sapiens
acggggacgcaccaacgagaggggggagcccccaaaaggcggccaggagaaccggcgaccaacag

SEQ ID NO: 181352 - RNA, 70 nt, Homo sapiens
caaggaacccaccgcgagggacaagaagccggacagaggaccacaaagccaccccccccgcgaaaaacca

SEQ ID NO: 181353 - RNA, 110 nt, Homo sapiens
aaagagggcccaccacaggaggccagccaggcgagaaaccggagcaaacacgggggagaggcggcgaaggaccggcgcccaccgggggaacgggagagagggcccggaaa

SEQ ID NO: 181354 - RNA, 77 nt, Homo sapiens
ccccgcccacgcaaacccaaagaccccgccggagacgagagaggaggcgaggaccgccgcaccccaccgggcagcaa

SEQ ID NO: 181355 - RNA, 76 nt, Homo sapiens
ggagccgcgaagcgagagggcgggcgcggcggcggccacgcaggaggcccacccgacgcggagcgaccggcacggg

SEQ ID NO: 181356 - RNA, 43 nt, Homo sapiens
cgcccccccacacacagaaggccgacgcagcagggcccagggc

SEQ ID NO: 181357 - RNA, 56 nt, Homo sapiens
agaccacagaacggaagagaacgagagcccagacagagaaagcagacacgaacaag

SEQ ID NO: 181358 - RNA, 76 nt, Homo sapiens
agccaggcgcaggagaccggcgggccccagggcccgggcagggagcacaaagcggcgggggaggcggagcgagcca

SEQ ID NO: 181359 - RNA, 84 nt, Homo sapiens
gaacggcagccccaagaacggaaagaagaaggaaccagcaaagcgccacgaagcacaagcaagaggaccagccaaaaccacaca

SEQ ID NO: 181360 - RNA, 69 nt, Homo sapiens
cggaggggagcggagcccggagcgcgggaaaggcaaggcagcggaaagcacagccaggccacagcccag

SEQ ID NO: 181361 - RNA, 71 nt, Homo sapiens
acaaacacaagaacgggaccagccagaaccgcgccaacccaggaggcgggcagcccgaagcgaggcaaaaa

SEQ ID NO: 181362 - RNA, 71 nt, Homo sapiens
cccggcgcgcagcccgcgcacagcgcccccgcccgcccccacccgcggcagcgacagcacaagaaaaacgg

SEQ ID NO: 181363 - RNA, 77 nt, Homo sapiens
gccggaaggaggagagggcggcggagaagaggcaggaagaccgccaacagagaggaaaaaagccgcaagagaggaga

SEQ ID NO: 181364 - RNA, 103 nt, Homo sapiens
agaacaaggccgaaaagcaccggaagaaaagagccaacaccacacgagccccccagaagaagagcgaaagaaacacagcaaaaaagaaagacagcaagccgga

SEQ ID NO: 181365 - RNA, 77 nt, Homo sapiens
gcccgccaccgcgcggagccgcagagcgggcaccaggaggagcgccacccgaagaggaggcacacgaaagcggaagg

SEQ ID NO: 181366 - RNA, 75 nt, Homo sapiens
cgacccgcccagccccggagagcgggaacaggcccaagaggcacgagagccacgggccagggaaaggggaggacg

SEQ ID NO: 181367 - RNA, 72 nt, Homo sapiens
cggacccgccaggccgccaaaagaaaagaggacagacacggacccagcaccaggagcgccaagccagaccga

SEQ ID NO: 181368 - RNA, 80 nt, Homo sapiens
agcaccaccgcaaacaccacgggagcacgccggaggaacagcagcaaacgcgcgggcgaagcggaagggaccgcgccagc

SEQ ID NO: 181369 - RNA, 77 nt, Homo sapiens
cccacaagccagcgcgaggaaagcaaaaaagggagcaagagaggcagcaagcaacgggagcacccagaacggggcag

SEQ ID NO: 181370 - RNA, 82 nt, Homo sapiens
cacccacccacaggaaacagcgagacagccacagaaagcccgccccagacagggccccggcccgcccggaagcgcagcagca

SEQ ID NO: 181371 - RNA, 70 nt, Homo sapiens
ccaaagacgagaaccacaaaaacaaccaaaccagcacccaaagcaaaaagcaggccacccagaaaaggcc

SEQ ID NO: 181372 - RNA, 94 nt, Homo sapiens
ggacagaggagacccgcgccagaaaggacaccacacagcaaggaccacccgcggacccggcaccaacagaaagaaggaggaacgaaagaaacac

SEQ ID NO: 181373 - RNA, 67 nt, Homo sapiens
gagacgcagcaaacaagacaacagcggaccacaagaccaaaaggcgacggggcaagcaagggccaaa

SEQ ID NO: 181374 - RNA, 54 nt, Homo sapiens
gccgcggagggagaggcgcagagcgagggcaggagggaccaggaggagaagcaa

SEQ ID NO: 181375 - RNA, 76 nt, Homo sapiens
aagaaagaaagagacaacgacagccaacagccagacggcggaaaacccgaagcagaagcccgacacaggcacaaga

SEQ ID NO: 181376 - RNA, 68 nt, Homo sapiens
ccaaacggagggggaacaggcggcaaacagcggcccgccaggaggaggcgacgagggcaaaacaccag

SEQ ID NO: 181377 - RNA, 77 nt, Homo sapiens
agagccggaagaccaggaaggagccggggcggaccccagccaccagccccggcagggcggcagcaaaaccaaaccgc

SEQ ID NO: 181378 - RNA, 72 nt, Homo sapiens
gaagacaggaggccgcgaagccccccagccaccagccgaccacagcaagcccggggcagaggaccgccccac

SEQ ID NO: 181379 - RNA, 64 nt, Homo sapiens
acaagacaccgccggaaccgacaaaagacggcagcgaacgagaagagcaaggcgccaacgccca

SEQ ID NO: 181380 - RNA, 74 nt, Homo sapiens
gaccagaccagagaaaacgggaggacgcacccggggaaccagcaaacaagggcaggggccagccggccgacaaa

SEQ ID NO: 181381 - RNA, 74 nt, Homo sapiens
aggccaagcaaggccagaggggaggcaagcaggggggcaaaggaaagaaggcagaaagggaggccaggagcgcg

SEQ ID NO: 181382 - RNA, 75 nt, Homo sapiens
gcccagacgcggggagccgccggagcgagaagaaaagcacggcgccgagaggaaggacacaaggcaagaagcaga

SEQ ID NO: 181383 - RNA, 78 nt, Homo sapiens
gacgcccaacaccacccacccaccacgagcaagcccccaacaccagcaaccccgggggagacaagccggacggggcag

SEQ ID NO: 181384 - RNA, 56 nt, Homo sapiens
accgagcccgaccacgagaaagacaaaccaccaccaagcaaaggagccgcgacggc

SEQ ID NO: 181385 - RNA, 82 nt, Homo sapiens
gccccagcagcccccgaaggcccacaggacaggagagaaagacgaccgagacaggggcccggcaccgcgcccgagcccaccc

SEQ ID NO: 181386 - RNA, 85 nt, Homo sapiens
cgagacagaagcagcacaggaggccggaaggaaccaaggaggagaccccaggcacagaggggagaaggggcccagcaggaccaac

SEQ ID NO: 181387 - RNA, 71 nt, Homo sapiens
ggagagaggaccccgggacacgaaagccaggaaaggggaaccagaagaggccaaccagcacgaacgccagc

SEQ ID NO: 181388 - RNA, 52 nt, Homo sapiens
agacacaaaccaggaaagggggaagaggagccggagggcaaagcaagggaga

SEQ ID NO: 181389 - RNA, 54 nt, Homo sapiens
cagaccaagcgaagagcgcggaggggaggcaagcaggggggcaaaggaaagaag

SEQ ID NO: 181390 - RNA, 61 nt, Homo sapiens
cagacacacaacccgacccgacgagggaggaacgcaagcggggagaacagaaaccagagag

SEQ ID NO: 181391 - RNA, 71 nt, Homo sapiens
cgggggggcagacgggcgggcgccccgcgcggagggaagggggcccgaccgagagccacccaggaccccag

SEQ ID NO: 181392 - RNA, 38 nt, Homo sapiens
agagaaagagccccgcaccacaaaagcgaaaagagggc

SEQ ID NO: 181393 - RNA, 76 nt, Homo sapiens
cccagaaaccagcagaaccgcgggacaagaacagggccacagcgcccaacagcggcgacccggccacgagccgaga

SEQ ID NO: 181394 - RNA, 70 nt, Homo sapiens
cggcggagcagaggaaccacacgcgacagacaaaacggggagaccaacaaaacagggaggcgggggacaa

SEQ ID NO: 181395 - RNA, 73 nt, Homo sapiens
acagggagagggcaccagcaccggcggacacagacaggcaggagaagaaggagcggcagaaggggcgaaaaca

SEQ ID NO: 181396 - RNA, 74 nt, Homo sapiens
acgggacgaggcgaaaagaaggccaaacagcaaggacgaacgagagcaccacccgagccggaacagccccaacg

SEQ ID NO: 181397 - RNA, 71 nt, Homo sapiens
cgcagggcgcccccgcccgcgacgaacaaaagaaagcaacgcagacgacgagaagaggggacgcaccacag

SEQ ID NO: 181398 - RNA, 49 nt, Homo sapiens
gaacgcaaaacacgggaaaagagcaggccaagcggagaacgccgaaggc

SEQ ID NO: 181399 - RNA, 75 nt, Homo sapiens
cccaaggagagaggagagaccacgcggcggaccaagccagcgggcagcaaggccccccgggcaggcccccggcag

SEQ ID NO: 181400 - RNA, 70 nt, Homo sapiens
aaaaggccccaacagagccccagcaaggaccaaccagacgccgacacgcagggccaagagaaaaagaaaa

SEQ ID NO: 181401 - RNA, 78 nt, Homo sapiens
gccgcgaggagcgagaacagaaggagacagcgaagcggggggaaggagcgaaagagacggagggaagaaggcaaaaac

SEQ ID NO: 181402 - RNA, 69 nt, Homo sapiens
caacaccaaaaacaaaacgaaccaggacggcaagcgcaccgaacggcccacagcgcccacgacaagaag

SEQ ID NO: 181403 - RNA, 79 nt, Homo sapiens
aaaccaccggacagaacagggcaaagaaaaaggagagaaaaagaggcaaaacaacaagaagaaaagagaaaaaagagag

SEQ ID NO: 181404 - RNA, 64 nt, Homo sapiens
agacaccaaaaagcaaacggaccagaccgaccaccaaaaggagcacggcccaggcagccaagaa

SEQ ID NO: 181405 - RNA, 73 nt, Homo sapiens
ccaagccgcgcgggcagggcggaggggcgcgcgggaacaccggagcccgcgggcagaggcgcgaacagggccc

SEQ ID NO: 181406 - RNA, 81 nt, Homo sapiens
ccaaaacgaaagaagggagaggcggggagcagcgccgggagaaggaccacgcaggagagcagagccggagccagggcaggc

SEQ ID NO: 181407 - RNA, 72 nt, Homo sapiens
gagagagcacgaaggacccagcagggcaccagggcccgagggcaggacagcaggcaccggcgaagcacagag

SEQ ID NO: 181408 - RNA, 85 nt, Homo sapiens
cggaggcccaggcccggcagcccaacccagcaggacaaggccgccaggcacagagaaggcaaacgggagggcgaggacaccaaga

SEQ ID NO: 181409 - RNA, 65 nt, Homo sapiens
gggggggaagccgcagcggaaagcaggagcacagaggagaccgccagaggacaggagacacgcgg

SEQ ID NO: 181410 - RNA, 71 nt, Homo sapiens
aaacgcaagaaacccggcaaaccgacgcgaagacccgagagaagagcgcagaaaggagcaacgcgacagca

SEQ ID NO: 181411 - RNA, 77 nt, Homo sapiens
ccgagccagccgagaccgccggggaccccagagacccagagacccccagcagaggcgaaaaagcgacagaaaacaag

SEQ ID NO: 181412 - RNA, 80 nt, Homo sapiens
agcccccgccggcggcccacggacgaggccgccccaggcgcccgacgcggaccccagaccaagacgggccagcagccaga

SEQ ID NO: 181413 - RNA, 57 nt, Homo sapiens
aagaaagcacaaggagcaccagcgggaccccccaggagaccaagcgaccaagcaagc

SEQ ID NO: 181414 - RNA, 70 nt, Homo sapiens
accagaaagcaccccacaggggagggcgccagaacaaagaagagaaacgcagcgcaaccaaaaccacgcg

SEQ ID NO: 181415 - RNA, 75 nt, Homo sapiens
agaggaggaaaaaaaggaccaccccaacaggaaacaaggccaagaacccaaagcaaggcgagacaaggggccaac

SEQ ID NO: 181416 - RNA, 76 nt, Homo sapiens
gcccaggaaccgcagggggcaggaggacaagccagcagggacagagcgggagccaccagcgccaaagggaagccag

SEQ ID NO: 181417 - RNA, 77 nt, Homo sapiens
cccgacgacagcgggccgggaaaagggcacgaggccggaaccgcccagccccggaccgaaacaacaagaacaaaaaa

SEQ ID NO: 181418 - RNA, 78 nt, Homo sapiens
cccaccaaccgccagaggacccacggacaggaagccagagaaacgccaaccaaaaagggagaaacgggggagaaggag

SEQ ID NO: 181419 - RNA, 74 nt, Homo sapiens
ccgccgaagaagcacgaaagccccacccgccgcagcaagcagagggaccaggcaaaccccggacaagccagaag

SEQ ID NO: 181420 - RNA, 82 nt, Homo sapiens
ccaccacggggcgccgcaagaccgggcagacggcccaacgaggcgagggcgccccaggagacgcagagcgaaagcacacgaa

SEQ ID NO: 181421 - RNA, 71 nt, Homo sapiens
agaagccccggaacacaagcaagcgagcaggcagcagcaaagagaggagcgagaacagaaggcggccggag

SEQ ID NO: 181422 - RNA, 61 nt, Homo sapiens
gacagaacaacaagcgagacccgccggccacacgaggaggagaggaaggagggggaagggc

SEQ ID NO: 181423 - RNA, 67 nt, Homo sapiens
aaaaaaaccacaaagcggccgaaacagaaaacaagagaccacagaagcccacccgggaacgccagag

SEQ ID NO: 181424 - RNA, 69 nt, Homo sapiens
ccagaaccccgaaagagagggagagaaaaccaccgcacagaaggagcagcgaaagcggaccgagcgagc

SEQ ID NO: 181425 - RNA, 51 nt, Homo sapiens
cagaagcccggggaaacgcaaacacagaacagacaccccgaagaaccccaa

SEQ ID NO: 181426 - RNA, 82 nt, Homo sapiens
gccggagcccagagagcgccccggcgggcggcgacggcggcaaacaagaaaaacaccagaggaagacaaaagaagagagccc

SEQ ID NO: 181427 - RNA, 82 nt, Homo sapiens
accggaaccagagagcacgcccagcggagaaggagaagccgcaggacacccccgagggagcaccgaagacgagcagcagcac

SEQ ID NO: 181428 - RNA, 84 nt, Homo sapiens
cggaaaacagagaggccagaaaggcgcaggccaagcgcccacgccggaccgggcagcggaggcacccaccacgggccaggcggg

SEQ ID NO: 181429 - RNA, 126 nt, Homo sapiens
agacggccgccgccccggacccgcggcgccggcccggagcggagccgcgacggcagcggcaagaagcccgccgagggccgggaaccgcagagaagagcaggggggccaggagaaggagcagcccca

SEQ ID NO: 181430 - RNA, 73 nt, Homo sapiens
aacaagaaacaccaacacaaaaaaaaccaacagccccccaggacccaccggcccaggggaacaagagaaggca

SEQ ID NO: 181431 - RNA, 73 nt, Homo sapiens
gaacaccagccgaaagggcccaccgcaaggacggagaagggcaccgagagccgacgaaaccagagagccccgg

SEQ ID NO: 181432 - RNA, 51 nt, Homo sapiens
cggggcccaggcaacccaagaacaggccacacggaacagagaacgaggaag

SEQ ID NO: 181433 - RNA, 81 nt, Homo sapiens
aaacggagccaggcacaagaaaaacaagggaggcgaggacggacaaaaggaaacggacgggaggccagccagcagaaggag

SEQ ID NO: 181434 - RNA, 80 nt, Homo sapiens
cgaggggaaggggcgaagacggacgaggagggccccgaaggaaccacgggggcggaacaccaaccaggaccacccagcaa

SEQ ID NO: 181435 - RNA, 107 nt, Homo sapiens
cggagaggggacccagaggagggagcgggcccagagcgaccacacgggaccaaggcagaggagaccacgacccccgacccaggaaacaggcgccgggaggaggcgca

SEQ ID NO: 181436 - RNA, 78 nt, Homo sapiens
aggggcccgaacagagggaggaaagagcaaccaagaaaagacagccacagaccgaaccgcaaaacaaagaagcagccg

SEQ ID NO: 181437 - RNA, 80 nt, Homo sapiens
aaaaagaggagcagcaggcacagcacgggcagagccagggccgcagaccccgggaggcaccaacaccccggacgagaagc

SEQ ID NO: 181438 - RNA, 90 nt, Homo sapiens
gcagagggacgggagcgagcgggggaaaccaggcggccagccagcggagggcacgagaagagaagcccagagcaaaacaccccaaaccag

SEQ ID NO: 181439 - RNA, 54 nt, Homo sapiens
ccagcacacagaggagagcgacgagaagggcgcacccccgagagagccacggaa

SEQ ID NO: 181440 - RNA, 65 nt, Homo sapiens
gccccgagcgcccccgcaggcccacggccggcgagacgggcccagcaagagccccagggccggag

SEQ ID NO: 181441 - RNA, 76 nt, Homo sapiens
ggccacccagcggggagcacggcgagcagccaggccaggagaggaccacagaaacggccagggcaaccggggcagg

SEQ ID NO: 181442 - RNA, 48 nt, Homo sapiens
gggaagaggagaaaagcaccggaagagaggcgaccggcccgaggaccg

SEQ ID NO: 181443 - RNA, 77 nt, Homo sapiens
aaccgcacccaggcaagccgccagaaacacagaacaaagaaacccccaagggcggagaacggaaaagcaccaggaag

SEQ ID NO: 181444 - RNA, 73 nt, Homo sapiens
ccaccgaccggcagcccagccagccaggcccagccacccacagcgagccaagacccacccccagccacgaagc

SEQ ID NO: 181445 - RNA, 66 nt, Homo sapiens
caccccagaaagcgcagcccgaagggagcagcaacaaaaacaaccaagacagcagacaacaccacg

SEQ ID NO: 181446 - RNA, 68 nt, Homo sapiens
cccaggaggccccggccacgccacagaccacaggacgaagaaagggcagacaccacagaaacaaaccc

SEQ ID NO: 181447 - RNA, 52 nt, Homo sapiens
gccgggaccaaggacaggagcaggaaaccacgagcggggagaaacagcaagg

SEQ ID NO: 181448 - RNA, 72 nt, Homo sapiens
aacggaaacagcaacacaaaggaaaccggaagagaagggaacaaaaaccggaagcaacccccacaggcaaca

SEQ ID NO: 181449 - RNA, 76 nt, Homo sapiens
cccggagaccgggcagcccccaaagacaggagcacaggcagcaaccaccggagggcgcagagaagagacagagcgg

SEQ ID NO: 181450 - RNA, 63 nt, Homo sapiens
gacaccgagcgaaagagaaagagaccacaagacggcacccagcgcacggcagcgagacaaaca

SEQ ID NO: 181451 - RNA, 92 nt, Homo sapiens
acgcaggggccagagaggaaacaggaaacgaccggagaccagagcaaggcagaacaaagaaggaaccccagaagagaagaccacacaagaaa

SEQ ID NO: 181452 - RNA, 87 nt, Homo sapiens
aggggacgagcaccagcgaacgagcaaaggcacgggcagccggaaggacaccaagagcggaccgggccccgggcacaaggccaagac

SEQ ID NO: 181453 - RNA, 75 nt, Homo sapiens
gccagaggagccaggaggaaaacacaccaaggagccacccgggagagggacgaaaaaagcccggaaccaccggga

SEQ ID NO: 181454 - RNA, 56 nt, Homo sapiens
agaaggcagggcaaaccagaaagacggcagcccgacaagacagcaggggggcaaaa

SEQ ID NO: 181455 - RNA, 64 nt, Homo sapiens
gggagcaggggggaacccaccaggagagagaggcggaagcggggacgagagccccggcacaaac

SEQ ID NO: 181456 - RNA, 72 nt, Homo sapiens
aggcaccagggaggcaacccaaaaacaggacgccccagggcggagaacggaaaagcaccaggaagcagagag

SEQ ID NO: 181457 - RNA, 83 nt, Homo sapiens
ccggcgccgcggcagcgaaccagagcgcccggccgcggccagcggagcccgggcggggcaggagccgaacagaagcagagaca

SEQ ID NO: 181458 - RNA, 81 nt, Homo sapiens
ccgccagcagggccgaccagggaaagggagcagcaccggccacacccacagcacgaccggaacccagcgaccgacgccggg

SEQ ID NO: 181459 - RNA, 71 nt, Homo sapiens
ccgccaagaggccacggaggccagccccaacacccggccggggggggcacagagccccggaagacagcccc

SEQ ID NO: 181460 - RNA, 57 nt, Homo sapiens
ggcgccgccaacgcgcccccgagagcggggccaggagggggagacccacacacacac

SEQ ID NO: 181461 - RNA, 79 nt, Homo sapiens
ccaggcccagccccgaagggcacaccggaggccaagaagcgagagaagaaaaacagaaaaagccaagacagaaacaaga

SEQ ID NO: 181462 - RNA, 57 nt, Homo sapiens
gggaaggggggacagggagaaaaacaagacaagaccaggaagaggaaggacaacggg

SEQ ID NO: 181463 - RNA, 39 nt, Homo sapiens
ccaccgccccggggagcagggagcccccaccgccacgcc

SEQ ID NO: 181464 - RNA, 77 nt, Homo sapiens
ggcaacaggcgaccgccacggagcaggggcggggagaggacaggcgcacgaggcagcagacgacaggacggcagagc

SEQ ID NO: 181465 - RNA, 65 nt, Homo sapiens
ccgaagggccccgggacccgccgcgagggacccgggcagcagccagaaagacccagagaagcgag

SEQ ID NO: 181466 - RNA, 76 nt, Homo sapiens
aagggagaagcgagccacacagcggagaagagagcggaaagagcaacaggacaagaacccaaacaaaggacacgca

SEQ ID NO: 181467 - RNA, 70 nt, Homo sapiens
gagaggcagccagacaaccaagggcagcaggacgccgccagccaccggcgcgaagccagaccagaccagc

SEQ ID NO: 181468 - RNA, 78 nt, Homo sapiens
ccggccacccggcccgacaccagccgcaacggccagacggagggagagcgccggaaacagcagcaggcaacccgaagg

SEQ ID NO: 181469 - RNA, 78 nt, Homo sapiens
agcgcaggccccccccacagccgcaggacccacggagccgccccccagcagggccaggccgacacgaacggacaacaa

SEQ ID NO: 181470 - RNA, 67 nt, Homo sapiens
gggagaacaccgaagcccccacaagggaagaaccacacccgggcaacccagggggcaggacgaccag

SEQ ID NO: 181471 - RNA, 78 nt, Homo sapiens
aggaccacggagacggggggaggagagaaagggcaacccacgagagaacagagacacccgcagccgcacagccgggcc

SEQ ID NO: 181472 - RNA, 67 nt, Homo sapiens
agagcgaaaacagcggaggaggagaacaccaacggaaaaaccccgcaaggacggccaggaacagcca

SEQ ID NO: 181473 - RNA, 60 nt, Homo sapiens
aaggaccggaagcacacaacaggaaaacaaaagaggagaaaggaccgacgaagaaaacag

SEQ ID NO: 181474 - RNA, 95 nt, Homo sapiens
aagcgcagggagaaggaagaggggaaaagccaacagcgggaacaagaggcgggagaagacgggaagccaccagagcccaggcacgaggagaccca

SEQ ID NO: 181475 - RNA, 76 nt, Homo sapiens
gagccacagaggggaggacagcagagagaaagcagaggggaagacacacgaagccggcaggaagaaccagaagagg

SEQ ID NO: 181476 - RNA, 119 nt, Homo sapiens
gcaggccaaaaggagccacaaggaagagagagcacaagccagcgcaagaaaggggacgaccagaaaaacagcgaagaccgcggaagcgcaaggagggacagccacgcggcccggcgcca

SEQ ID NO: 181477 - RNA, 75 nt, Homo sapiens
agcaaaccggccacagcaggaacacagagccagagaaaaaaaacacagaaaggcccaagaaaccacagccagcac

SEQ ID NO: 181478 - RNA, 118 nt, Homo sapiens
cagccgaacgggaagccgacaaacagaaaggacacaaccggggaaagacagaccgaggacacaagcaaaccaggcaaagagagaagaaaaagccacacacaagaaaagccaaaagcag

SEQ ID NO: 181479 - RNA, 83 nt, Homo sapiens
cgcggcgcgcggcccgcaggagggaacgcaggccagggccgaccccagagggggagaggcaccagcaacagaccaaccgcagc

SEQ ID NO: 181480 - RNA, 49 nt, Homo sapiens
gagcggggcacggagcggggcgaccagaagacggaagaagcggcggagc

SEQ ID NO: 181481 - RNA, 81 nt, Homo sapiens
cgggcagagccagcaaagggcaggagacagaccgggagacccagaacgaggccccaggagacagaacaggagacccggccc

SEQ ID NO: 181482 - RNA, 79 nt, Homo sapiens
agaaaccaaccacagggcgcaaagggaaggaggcaagaaggcacaggaacaggaccaaaaaaagaagccaaaaaaaagc

SEQ ID NO: 181483 - RNA, 69 nt, Homo sapiens
agacaaaagaccagagcgagagagcaaacaaggcaaagaaaaagccagccgaggacgggaaccagaccc

SEQ ID NO: 181484 - RNA, 87 nt, Homo sapiens
aaaccaccagcagcaccagcaacagggcaagagaccagggaagcagcaccacggggagacaagcaacagcccaaacggacggaaggc

SEQ ID NO: 181485 - RNA, 74 nt, Homo sapiens
cggcagacgggcgccaccgacgccgcccaccggcacagcggaccccgcccgaacgagaagaggacagacggagg

SEQ ID NO: 181486 - RNA, 73 nt, Homo sapiens
gacgaacagcacgcaagccagaccacaggaccaggagaacacagcgaaaaagggcggggaaaaaagaagagga

SEQ ID NO: 181487 - RNA, 64 nt, Homo sapiens
accccgcgggcaaagagaagaaaacaccccaggggcaggccaggcgacggaacccgggccaagg

SEQ ID NO: 181488 - RNA, 73 nt, Homo sapiens
gacagagacaggggccaaacccacagcaccggacggggaaacagaacgagcacagagaacaagacccggaagg

SEQ ID NO: 181489 - RNA, 71 nt, Homo sapiens
agccaggggccggcgccggcgccgcgcccgccccggccacccggccagcgaggcagacgaagccacaagga

SEQ ID NO: 181490 - RNA, 44 nt, Homo sapiens
ccccgccgggcacaggaaaggccaaggaaaaggaacagagagag

SEQ ID NO: 181491 - RNA, 65 nt, Homo sapiens
cgggggaacgcaagcaccccagacaaccggaaaacggacgagaacaagcggaaaacaggggcgag

SEQ ID NO: 181492 - RNA, 79 nt, Homo sapiens
agcgacagcccgggacaccaagaaagaacccagcaagcgcccggaggaccgggacccgggccgacagcagcagaaggac

SEQ ID NO: 181493 - RNA, 75 nt, Homo sapiens
gaaacagggcacaacgacaacaggaacacccagggcccagcagacccaaacagacagcgacaagagagacacaca

SEQ ID NO: 181494 - RNA, 88 nt, Homo sapiens
agcccgaaggccccgggcaaagcggacaccggggcagaaggagagcaggggccaggagggccgaagcccacagcgaggcagagaagcg

SEQ ID NO: 181495 - RNA, 73 nt, Homo sapiens
aggccggggcagaccccagcagagggcaccacagacaagaaagcccccacggaaggccacgagggcggacccc

SEQ ID NO: 181496 - RNA, 58 nt, Homo sapiens
gccaaggaaaaacagcaagaacccaaaagggcaacccagaaaggcagcacagcaagcg

SEQ ID NO: 181497 - RNA, 71 nt, Homo sapiens
cgcagggcgcccccgggaggagggagcgccaccgccaggccccgaccgaaggaggaggaggcagcccagcc

SEQ ID NO: 181498 - RNA, 53 nt, Homo sapiens
agagcgggggcggcgaaagaagacagaacgaggaaagagagccaagcccaagc

SEQ ID NO: 181499 - RNA, 94 nt, Homo sapiens
caaacagaaaggacaaagaacagaccgcggcgggacagacagggaaaagccagccagaaacaaaagaggaggggaaacaagacaacaaggggca

SEQ ID NO: 181500 - RNA, 73 nt, Homo sapiens
ccaggggacaggaggcccggggaaggcagaggcaacaggggacacagcacagaacagaccgagaagacgggcg

SEQ ID NO: 181501 - RNA, 76 nt, Homo sapiens
ccccccggagacgcaaccaagaacaaggacaagacagcaaagcagcgaagcaaagaagaacgaaggaaagacacaa

SEQ ID NO: 181502 - RNA, 72 nt, Homo sapiens
cagcagaaacagcgcccacagaaaccacccccaaacccggcgccaccccgaggccagaccagcgagagagcc

SEQ ID NO: 181503 - RNA, 79 nt, Homo sapiens
ggagcggggagagaggaaggcacacaggaagaagcaaaggcaaggacccagagagggaccagggccaaagaagagccgg

SEQ ID NO: 181504 - RNA, 77 nt, Homo sapiens
gccaacgaggaaccaaagggagaggaaaaaggccgcgggaaaggcaaaaccccaagaggggacgaaggaggagggcg

SEQ ID NO: 181505 - RNA, 38 nt, Homo sapiens
cagccacgagccaacacagcccggaccgacaggaaaga

SEQ ID NO: 181506 - RNA, 75 nt, Homo sapiens
cagcgaggaagcacaccaccaaggaacgggcgcagcgagaggaacaagggacaaaccaaagaccaaccaagaggc

SEQ ID NO: 181507 - RNA, 79 nt, Homo sapiens
cggaaccggcaacgggcgccaagccgcggagccccagacggaacaggacagagccacgaccaggggacacccccgcccc

SEQ ID NO: 181508 - RNA, 70 nt, Homo sapiens
acgaagaggcagagagcaaagaacccccaagcaggaagaaggacaggagaaacaggggccaaaaaaccaa

SEQ ID NO: 181509 - RNA, 42 nt, Homo sapiens
aagcacccaggaaccggcaacaggaagaagacggcacgggac

SEQ ID NO: 181510 - RNA, 52 nt, Homo sapiens
gcgagcaccgagcaacacacgcagaaaaaaggaaccgcgagaaagggccagg

SEQ ID NO: 181511 - RNA, 74 nt, Homo sapiens
gagaccaggggcaccgcagcgaccacccacacaaacccgggacgggccgagagaaggggcagaccaacaccacc

SEQ ID NO: 181512 - RNA, 39 nt, Homo sapiens
gaacccaccgcagaaagaagacagagccggggaaacagc

SEQ ID NO: 181513 - RNA, 78 nt, Homo sapiens
gagaggaggccgccagcagaggcggagcccgcagaccgcagaaggccggagacaccagcaggccagaaccaaggcaaa

SEQ ID NO: 181514 - RNA, 103 nt, Homo sapiens
cgccgccgccgccaccgccaccgcgcggcagcacaaggcaaaacgccagcccagacccccagcaccaagccaggaccggaaaaccagcccccaccagagcgac

SEQ ID NO: 181515 - RNA, 73 nt, Homo sapiens
gcgccacccacggcgcaggccccgcgcccgggggaggggaaaggacaaggaaggagcggggaacgacacagca

SEQ ID NO: 181516 - RNA, 46 nt, Homo sapiens
ggcaacgaacaagggcaagggccgaacaaacgcaagaaaccggccc

SEQ ID NO: 181517 - RNA, 80 nt, Homo sapiens
cggaccggcgcgagacgaacgccacggggcagccgcaacaggggagaagacgcgcgccgccacgaggagggcacgcggag

SEQ ID NO: 181518 - RNA, 79 nt, Homo sapiens
cgccaagccgcggagccccagacgggaacgcgaagggaagaaaaaacaagaaagccaggccaagcacagagacaagaga

SEQ ID NO: 181519 - RNA, 65 nt, Homo sapiens
ggcagacaacgagaagacgaaaacagaaccacaccaccgcgccgccgggaagcccagcaccaaca

SEQ ID NO: 181520 - RNA, 80 nt, Homo sapiens
gccgccgaaccgccacgccagcacgccaacccggacggacaacaccggggagcgcggagacgagcacaacacacaaaggc

SEQ ID NO: 181521 - RNA, 82 nt, Homo sapiens
ccagcacacggggaaggaagcgaaaccacagacagacgagccccagaagaaggcgggaggcggcagaagcagccagaggagg

SEQ ID NO: 181522 - RNA, 76 nt, Homo sapiens
ccagacggggagcggcccagagcggacacccccggaccgcggagacccagaccccggcagagccggaccccgaccc

SEQ ID NO: 181523 - RNA, 75 nt, Homo sapiens
cgaccagaacgcagcaacaaagggacaggcaagggaggacagggccaccaagaggagggcacacggacccgccag

SEQ ID NO: 181524 - RNA, 78 nt, Homo sapiens
accagggacacaacgcaacagggaagggacgacgaagaaaaccaaacaaaaagagaaaaagcgcaagagcaacccaag

SEQ ID NO: 181525 - RNA, 77 nt, Homo sapiens
cggcggccggcgggaccaaagggcaaccaaaaaccccccccaaaaagacacgcgaagaggaagaaacgagaacggca

SEQ ID NO: 181526 - RNA, 76 nt, Homo sapiens
cggagacagaagaggcgccaggacgaaggcccacgggcaaggaaagaacacaagccagacacaaagcagaacgaca

SEQ ID NO: 181527 - RNA, 50 nt, Homo sapiens
ccccccccccaagagaacagacccccaagagcgaccccaccgccagcaac

SEQ ID NO: 181528 - RNA, 82 nt, Homo sapiens
cgaccaaggccaagagagaggggaccaccaccagggcacacagggaccaagaagccccggggacacgcgagaaaagacgccg

SEQ ID NO: 181529 - RNA, 76 nt, Homo sapiens
agaggcgccgaacagagaacaccagcaggaaaaaagagcggcagaaggccaaacggccgagcaggcgagcgaagag

SEQ ID NO: 181530 - RNA, 66 nt, Homo sapiens
aagaccagcagagaggaaaaacacaacccaagaaacgggcggaagccaaaccgaagggacagaccc

SEQ ID NO: 181531 - RNA, 73 nt, Homo sapiens
agaccacaggagccgggaaagacgaacggaaggacgaaccagcgcgcgacaggccaagggcccgggcggagca

SEQ ID NO: 181532 - RNA, 58 nt, Homo sapiens
ccagacaccaaggacagcccgcaagcacacggaaaccgcaaaacccagcagacagagc

SEQ ID NO: 181533 - RNA, 81 nt, Homo sapiens
caacaccaagggcggggcagcagcgcagccggaggcaagaccgccacgcaaaacacaaggcacggagcgcggacgcccagg

SEQ ID NO: 181534 - RNA, 37 nt, Homo sapiens
cggaagaacgggaacccccgcagagaggggcaccgga

SEQ ID NO: 181535 - RNA, 84 nt, Homo sapiens
gcggcggcggcggcggcggcggcggcgcgccccgggggcgacggaggacacagagaccaaaggcagaacaaacagcagaggggc

SEQ ID NO: 181536 - RNA, 108 nt, Homo sapiens
cgccagcaacaggcacgggcaagccgggccgcgcgcgagacacgagacggagcccccaacaagcccaagaggagagaccccagaggagcgcagaagcgagaggaggag

SEQ ID NO: 181537 - RNA, 81 nt, Homo sapiens
aaacagaccaaccaaggcggaaagcaaacaacgaaaggagaacagggaacaaaagggccgacccgccaaggacacagagcg

SEQ ID NO: 181538 - RNA, 71 nt, Homo sapiens
cccagcacaccacaaggaggaaggccggccaagaggccaaacacaggaaacaaaacagggccagcgaagac

SEQ ID NO: 181539 - RNA, 65 nt, Homo sapiens
aaaggaagcggagaaccacaaacgaaggagggccccggagcagccacaccaccgaggccccaccc

SEQ ID NO: 181540 - RNA, 86 nt, Homo sapiens
ccgcacggacaccggcggccccaccagcagacgcagccgagacaccagcccgaaacaccaccaagaggcagaggacagaaggaaca

SEQ ID NO: 181541 - RNA, 66 nt, Homo sapiens
ccaaaacacacaggggagcccaccaaagcccagaaacgcgaagaaccacggagcggagcccggacg

SEQ ID NO: 181542 - RNA, 112 nt, Homo sapiens
ggccgggggccaggagcgccacacacacgaaccggaacaagccccaggcccacagcggcagggaaggagccgggagaggccaggccccccggacgcagccgcccggggcccg

SEQ ID NO: 181543 - RNA, 81 nt, Homo sapiens
ggacgcagggaggagcgggacaccccggaagcgggaaagacgggcggcagagaagagaagagcacagcgggaggaaaggga

SEQ ID NO: 181544 - RNA, 89 nt, Homo sapiens
agaaacaggcgccgcgggcccgcgcccggccggacccgggcccgagcccgggaccgggagcccgggaccgggagccggggggccacccc

SEQ ID NO: 181545 - RNA, 72 nt, Homo sapiens
acccaacagacgcggacaaaagagaagaaccaaaacggccccgccgccccagaccgaaccgggaaccgacca

SEQ ID NO: 181546 - RNA, 82 nt, Homo sapiens
gcccgaggaggcagccaagccgggccgcccgcggcgggagccaaccaaggagagcgaaggagacccacgggagcccacccaa

SEQ ID NO: 181547 - RNA, 105 nt, Homo sapiens
gaagacagaagagccggaaacagaccccaaggagaaagaaggggcaagaggaagaagcagaagcagagagaggagcgaagaagaagaagcgaccaaaggcaacac

SEQ ID NO: 181548 - RNA, 80 nt, Homo sapiens
gccaagagcagcccgacgcacgagcccggcacggacggcccaacaccagcggggacacgacaccacggaagagccacccc

SEQ ID NO: 181549 - RNA, 75 nt, Homo sapiens
ggccacagcagggaaacacacgcgcaaaggagaaccccacaccagaacccaggccggacccgacgacacggccgc

SEQ ID NO: 181550 - RNA, 73 nt, Homo sapiens
gaaccggcacagcccccggggcgcgggaaccaggccgacaccgggcccggcagcaaagcgcaaaccgaccggc

SEQ ID NO: 181551 - RNA, 73 nt, Homo sapiens
aagaaggcgaggcaccggaacagacgcaggaagggacaaggggcggacagggggaagaggaggccgggcaaaa

SEQ ID NO: 181552 - RNA, 80 nt, Homo sapiens
agggcagaagagaccaacacagagcagcggaaccagacaggcaggaaaagacagggcggagaacggaaaagcaccaggaa

SEQ ID NO: 181553 - RNA, 57 nt, Homo sapiens
gcagaaggggaagccagcaacgcggaaggccaaagaagaacaacagaggaggaaaga

SEQ ID NO: 181554 - RNA, 58 nt, Homo sapiens
cgacggagaggggcggagaggaaagaaccacaagcgccaaagaacacacccaagcaga

SEQ ID NO: 181555 - RNA, 107 nt, Homo sapiens
gagggcacaccggacggagggcccagcggagcggcccacaggccgcgaggcgggaggagaaaaggaaggaaggagcccagccccacccaacccgccagcgagcaaag

SEQ ID NO: 181556 - RNA, 83 nt, Homo sapiens
caacccaaagccgcacagcggaaagggaaaagaggggaaaggggaccgggccccgaaggagggacaggcacacacccaggggg

SEQ ID NO: 181557 - RNA, 81 nt, Homo sapiens
aaagacacaagggcacgaaagagggaaagggagcagcaccggccacacccacagcacgaccggaacccagcgaccgacgcc

SEQ ID NO: 181558 - RNA, 85 nt, Homo sapiens
gggacaggccagacccaggagccccccgggaggagcagcaggacgaggaaagccccaggaagaagaagaagccgacaaacccaaa

SEQ ID NO: 181559 - RNA, 78 nt, Homo sapiens
ccgcagagaaacagaacccaagccaggcacccaaaaaaaccccggaccgacaggaaagaaggagcccacaaagaaaag

SEQ ID NO: 181560 - RNA, 74 nt, Homo sapiens
gcacccgcacccggggacaagcgcgggaacggcgcggaaggccacccaagacaagcccaccaagaaggcacgga

SEQ ID NO: 181561 - RNA, 52 nt, Homo sapiens
aacaaccgcggacacggagaggaagggaggaagagaaacaccccgccagcca

SEQ ID NO: 181562 - RNA, 81 nt, Homo sapiens
aaggcagaacgccaagccccgcgagcgcacgccaacgacgaggaccgacgcagaaggagccccgccccggaaaagcagcag

SEQ ID NO: 181563 - RNA, 74 nt, Homo sapiens
aacgacccagccaaaggaacacaacaggcgcgcccacccgggcagaaaacgcagaagcccacaggccacagaga

SEQ ID NO: 181564 - RNA, 63 nt, Homo sapiens
ggacgagaacgccgcgacagaaaagccgcgagaaggggccagcaaagacggagcgggaagaag

SEQ ID NO: 181565 - RNA, 59 nt, Homo sapiens
aacagaacccaaaagccgacaaccccagaaacagggagcaagacgggaagggagcagag

SEQ ID NO: 181566 - RNA, 43 nt, Homo sapiens
gaaggaccaagaaccagagcgggcccacaaggacagaagcccg

SEQ ID NO: 181567 - RNA, 65 nt, Homo sapiens
gcccgcgccacagccaccagagccggcagcaaagagggaacaggccagccccaaaggagccacag

SEQ ID NO: 181568 - RNA, 73 nt, Homo sapiens
gcagcaaagccacgggggagaagaggaaagggagaacaggggacccaccgaccggaaccagacaagcaagaag

SEQ ID NO: 181569 - RNA, 75 nt, Homo sapiens
agccgggccagaggacggcaagggggacggcacggagaaggcaaaggcggaaaacaacaaaagaaaaagaaagcc

SEQ ID NO: 181570 - RNA, 83 nt, Homo sapiens
cgagccaagaaccggcacggcccggccccgcccggcgccgaggacccccgggacgaacagcggggacgccccagcagaccgcc

SEQ ID NO: 181571 - RNA, 72 nt, Homo sapiens
ccgccggcggagaacagcggggcgcggcaccgagggccaggccacaacaggcccacccccaccggagagacc

SEQ ID NO: 181572 - RNA, 98 nt, Homo sapiens
aagaaaacgaggggcggaacacccgccaaagcagagaaaaggaaggaaggaacagagaagacccgcccccagcagggcacagcagacgaggcccgccc

SEQ ID NO: 181573 - RNA, 65 nt, Homo sapiens
ccaagcacacacaccaccggcgggcgggcgcagcgcccccacaccccccggagggcgcggccagc

SEQ ID NO: 181574 - RNA, 76 nt, Homo sapiens
ggaagcagcaggcagaacaccaaaagcaagaggcaagaaaccggcagaaaggaaacagaacgggggaaaaaggaag

SEQ ID NO: 181575 - RNA, 80 nt, Homo sapiens
gcgcacccccggccggaggcaccagcgaaggcccgaacaagacaggaacgccggcccggacgggagcggcagggaggaca

SEQ ID NO: 181576 - RNA, 76 nt, Homo sapiens
aacacaagacgaacgggagaacagcagcagcccacgaacagaaagggggaagggccgaacgcccccggcggacagg

SEQ ID NO: 181577 - RNA, 72 nt, Homo sapiens
gcgaagaaaaggaccaaaaacacaacaaaagaaaccaacaccgcagccgacacagaagagcagaagaccgca

SEQ ID NO: 181578 - RNA, 76 nt, Homo sapiens
ccaaacccccagacaagaacacaacccaaacccgcccgggcggcaccccaccgcccagccacagccccccccacag

SEQ ID NO: 181579 - RNA, 88 nt, Homo sapiens
cgagccagggcgggggagcacgaggaggacgaggagagccggcggcgggaggccaagcaacaggcgacaaggccaagccgccaaagcg

SEQ ID NO: 181580 - RNA, 39 nt, Homo sapiens
caggccagcagcagaacgcaaggaaccgaaggaacaagc

SEQ ID NO: 181581 - RNA, 72 nt, Homo sapiens
agcaaagaagagcccgaacaaacaaacacccagaaacaagagaccgcagaccagggccccacgacccaccac

SEQ ID NO: 181582 - RNA, 88 nt, Homo sapiens
ccgccgcgcgccgccgccgccgcccagagacgcgagcccgccgccgccgccaccacccacccggacacaggcacgcagcacgggggca

SEQ ID NO: 181583 - RNA, 59 nt, Homo sapiens
cggaccgaagacggaccggccgggaagaggacaaaccggcgaccacacacggggacgac

SEQ ID NO: 181584 - RNA, 38 nt, Homo sapiens
acgaggaaacggccgaagacagggcaccgcacccaggc

SEQ ID NO: 181585 - RNA, 78 nt, Homo sapiens
cgacgggacaggccgcggaaccgcccccagagaaggaacgcacaccagcaccagcccaccaaaccagcacgaccccgg

SEQ ID NO: 181586 - RNA, 70 nt, Homo sapiens
aggcggacggacacagacaccaagggaggccacagagacaagagagagccagccagcaggaggccagaaa

SEQ ID NO: 181587 - RNA, 82 nt, Homo sapiens
ccagcgggacgaggaccgagaccgcggccgggaccgagggacaccaagaaaccaagacacggcccagacaaggccagacgaa

SEQ ID NO: 181588 - RNA, 77 nt, Homo sapiens
caggagcacagcaggaggacggaacccagggagccacagccccgacgaggaccaagggcccagggcagagcgccaag

SEQ ID NO: 181589 - RNA, 81 nt, Homo sapiens
agccagggcccaaagaaccggccgcaggagggaagcgcacggaaaccgccccgggaggcacagagcaggagacgccacccg

SEQ ID NO: 181590 - RNA, 67 nt, Homo sapiens
ccgccccagggaacgcgcaacacaaaccgaaagccaccggaacccaccagaggagcaagaacgaggg

SEQ ID NO: 181591 - RNA, 88 nt, Homo sapiens
cggcccccccaccgccaccggaccggggcgcccgcacgacggagagccgacccgacacgagccaagaaaagacgggagcggggaaaga

SEQ ID NO: 181592 - RNA, 88 nt, Homo sapiens
gcggggggcccgggcgccgagccgcaggagagacacgcgggccgaccccagagaggcgcggacaggcgcaagacaaggcccgcgggcc

SEQ ID NO: 181593 - RNA, 83 nt, Homo sapiens
ggaaccacgcacgacggggcggacgcgaagagcagggacgccagagcagcccagggccagaacagcacgacacacccaaccac

SEQ ID NO: 181594 - RNA, 70 nt, Homo sapiens
agaagacgcgcggcgaccgcgcaaccccagaagacaaccagcaagcacaaggcagcgagggcagaagcgg

SEQ ID NO: 181595 - RNA, 90 nt, Homo sapiens
gaagagagaagcacacacgaagccagaaaaacggcgaagggaccagaccccacaagaaaacacacaaccacaggcccaagcaaacacacc

SEQ ID NO: 181596 - RNA, 62 nt, Homo sapiens
cgcaggaccggagaccaggcccgaacggcagaccaagaacgagccgagaagcgaccggcaga

SEQ ID NO: 181597 - RNA, 74 nt, Homo sapiens
cggaagagcgaaaaagagaaagcggggagaccaccgagcagaaaaaccccagaaaagacggggaaagaacccag

SEQ ID NO: 181598 - RNA, 67 nt, Homo sapiens
caggagcaccagcaaagcaacaaggagaagaggagcccaccgagggcgcgcacagggacacaacaag

SEQ ID NO: 181599 - RNA, 74 nt, Homo sapiens
cggcgcggcccgcggcgcgcccgagggacccgcgggcccggcagcgagggagaccacaaaaggccccagccacc

SEQ ID NO: 181600 - RNA, 74 nt, Homo sapiens
gcacggcgcgagccccaagaaccggccaccggccccacacgaccgcgcaagccccggggcagagacacaggaca

SEQ ID NO: 181601 - RNA, 83 nt, Homo sapiens
aaaacagagcagcacagagcagcaggagggaaaagaagaaggaacgaccgaagaaggacaggcccgagggcaggacagcaggc

SEQ ID NO: 181602 - RNA, 62 nt, Homo sapiens
agaccagacaaaacaagacgaaaggcaggaggcaaggccgaaggccaggacagagaaccgaa

SEQ ID NO: 181603 - RNA, 54 nt, Homo sapiens
gccagagcgaggcacacaagaaagcaccaggagagggcggagaagagaaacgag

SEQ ID NO: 181604 - RNA, 92 nt, Homo sapiens
gcccccagccgcagccacaacaccggcaggaaccaccaggacagagagaaagacagcaaagaaaaggagaagaaaggaaaaaaacaaccccg

SEQ ID NO: 181605 - RNA, 78 nt, Homo sapiens
ggccgggacgccagccaggaggacccccggggaaagggagcacagcaagcgggagcaggcagaccaaaggaacagaag

SEQ ID NO: 181606 - RNA, 72 nt, Homo sapiens
cggaacagccccaccccgcaccaacagcagggcggggaacagaccagggaaggggaggagaagagccgggaa

SEQ ID NO: 181607 - RNA, 76 nt, Homo sapiens
ggaccaccggccggagggagagagcaacagaacaacagcacgagcaggccaaagggccacccggaagagagaagca

SEQ ID NO: 181608 - RNA, 51 nt, Homo sapiens
aacgaaggggggaggcccaggccaaaagacgaggagaccgcagccgagcag

SEQ ID NO: 181609 - RNA, 71 nt, Homo sapiens
gaccagagaaaacgggaggacgcacccggggaaccagcaaacaagaccaagacacccaggagaaagacagc

SEQ ID NO: 181610 - RNA, 71 nt, Homo sapiens
acagaaaaggaagaaagggacaaagagaggagcagaacacggaacaggggcgagagaacggccagggcgga

SEQ ID NO: 181611 - RNA, 73 nt, Homo sapiens
caagcaacccccagcaagagagcggagcgcggggaagggagcaggggcaaagggagcccggggaaggaagaga

SEQ ID NO: 181612 - RNA, 59 nt, Homo sapiens
gccgcgcgagggcgggacagccaggcagacgcccagcaaaccgcgggcgacagcggacc

SEQ ID NO: 181613 - RNA, 33 nt, Homo sapiens
gccaaagccagcaaaaacagaaacgcgcgccac

SEQ ID NO: 181614 - RNA, 54 nt, Homo sapiens
aaggcgaagcagagaccccacgccaccaggaagaagacggcacgggacccccag

SEQ ID NO: 181615 - RNA, 74 nt, Homo sapiens
gagcaaaggaagcgcgaacagcagcgcagggggcacacccccagcagccccacaccccgacgaggaaaccgagc

SEQ ID NO: 181616 - RNA, 60 nt, Homo sapiens
ggaccagagacgaagaccacgccggccgcgaccaaggaagcaacggagaaaccggcaccg

SEQ ID NO: 181617 - RNA, 78 nt, Homo sapiens
cggcgaccagcccaccgaaaggagagaagcagaaaggcaagaacagcagcgggaaagacaacaggaagaacagaaagc

SEQ ID NO: 181618 - RNA, 60 nt, Homo sapiens
agccccggagagcgggaaacagaagaagccggaggaggagaagagccgagggagacgacg

SEQ ID NO: 181619 - RNA, 76 nt, Homo sapiens
agccagagaaggccgaagcacggaggacccggcacgaggggcacccagccggccgggacacaaccaaaaccgcggc

SEQ ID NO: 181620 - RNA, 73 nt, Homo sapiens
gacaaagcgaaagcacaccaagcccacagacacacccaaagcagcccacacagggcagacagaccgaaaacac

SEQ ID NO: 181621 - RNA, 78 nt, Homo sapiens
aaacacaagaagaggcccagcaggaacgcaagcacaggaccagaaacgaaaggcagcagaagaggaaagccagaaaga

SEQ ID NO: 181622 - RNA, 78 nt, Homo sapiens
cgcggccacaacccgcaggacccaaggcacgggagaaagccccagcacaagagggccagggaccaggggacgcccaag

SEQ ID NO: 181623 - RNA, 63 nt, Homo sapiens
aacccagggaagccgaagagccagaagagagaagaagcaaaccgggaccggaagcaccaagga

SEQ ID NO: 181624 - RNA, 71 nt, Homo sapiens
accccacaggccgccccaacaccagggaagagacacacccagggcgcacaagaccagaaaacacagcccag

SEQ ID NO: 181625 - RNA, 59 nt, Homo sapiens
cccccccgacggaaccggaaaggcggaacccggaagagacgggaggaaagggcgagaaa

SEQ ID NO: 181626 - RNA, 74 nt, Homo sapiens
aagcaagaaacacacagacacaccaagaagcggaccaagcgacgaaaggcgcagggagcaggaaggcccagagg

SEQ ID NO: 181627 - RNA, 77 nt, Homo sapiens
caggcccagccagccaaacgggccagcccgaggaaagaaccgaaaaacacggacccaaaaaagcagaaggaagggcc

SEQ ID NO: 181628 - RNA, 77 nt, Homo sapiens
ccggcggggccggagcccccgccgcgccccccgccgccgcgcaacgcggaaggcggcacacaacacaaaaccacagc

SEQ ID NO: 181629 - RNA, 80 nt, Homo sapiens
cagcaccacaagaagagcaaaccacgaggcaggagagaggacgaggcagcacggcaggagacgaggagaggacagcagga

SEQ ID NO: 181630 - RNA, 76 nt, Homo sapiens
aagagagcgcaccaccacccagggagacagggacagcgacccgcagccccccggcacagaaaggggaggccacaca

SEQ ID NO: 181631 - RNA, 57 nt, Homo sapiens
ggcggacggcgacgcagcccgcggcagaagacacaagcgggacggaagaggcccggc

SEQ ID NO: 181632 - RNA, 67 nt, Homo sapiens
acaaggaaccaagacagcgccgcagacgaaaaagaccaggcagaggagaagcgcagcaagcgaggga

SEQ ID NO: 181633 - RNA, 75 nt, Homo sapiens
ccccacgacgggaagccaaggagaagagaccaaggcgcaggaacagcgacggggcgacgcgccaaggcgacacaa

SEQ ID NO: 181634 - RNA, 82 nt, Homo sapiens
gaggaagagccgggcagcccggagcgggccagacggacaggcccgggccgagggagccgccgccccgccgcagccaccagcc

SEQ ID NO: 181635 - RNA, 78 nt, Homo sapiens
cacggcgggccgccgaacccggccgaagagcggcggcggcagcggcgaaaagggaacaaccccaaaaaaccgacaccc

SEQ ID NO: 181636 - RNA, 53 nt, Homo sapiens
agcagggaaacaccacgaagcagccaagaccccgagagaaacggcgagaaaac

SEQ ID NO: 181637 - RNA, 82 nt, Homo sapiens
gccacagcagccccggccggcggcggggcccgggcgagcagcccgccccggacggcccgggcgggaaggacaccccaaaacc

SEQ ID NO: 181638 - RNA, 52 nt, Homo sapiens
gacaaccgcccagccagaaaaccaggagggaaggccccggggggggaccagg

SEQ ID NO: 181639 - RNA, 78 nt, Homo sapiens
gaaaccagacccgcccccaggagaaccccccacggaaaggacgaaagaaagaagcagccccagaaagaaggacgccgc

SEQ ID NO: 181640 - RNA, 87 nt, Homo sapiens
caagaacaccggagggcggcggaggacgcaaaacaccgagaggaagcggaccccggcggcgggcagcgggacagcgaacaccaccgc

SEQ ID NO: 181641 - RNA, 78 nt, Homo sapiens
cggaaaagaaggagggacgaagacccaacccggagccggggacggcacacgggcgggggcaacgggaggagaagacga

SEQ ID NO: 181642 - RNA, 40 nt, Homo sapiens
gcggcgcccggcccccgccgcgggccgaagaccccaagaa

SEQ ID NO: 181643 - RNA, 82 nt, Homo sapiens
gcagcccacgaacagaaaggaccgaggccaaaagaaaggaagaaaacccccaaaaagccaaaaggccaagacaagaagaagg

SEQ ID NO: 181644 - RNA, 91 nt, Homo sapiens
gaagacggccgcccgggcacaaaggagaagagggccccaggcagcagggccggcaggggcaagaggcccgcaggcccaagggagagcgagg

SEQ ID NO: 181645 - RNA, 79 nt, Homo sapiens
ggcgaaggacacgccaccagccagcaaacacagggacagacgaacccgcccacgccagcgaagccgacaggaccaacga

SEQ ID NO: 181646 - RNA, 56 nt, Homo sapiens
aggcccaggagacgacaaagccccgccaaggggaccaaccaaacccgcaaaaccac

SEQ ID NO: 181647 - RNA, 86 nt, Homo sapiens
ccgcgccccccccgcccgcgcgaccgcagggcgcccggcaagggcggagaacggaaaagcaccaggaagcagagaggaccgcagaa

SEQ ID NO: 181648 - RNA, 80 nt, Homo sapiens
cagggaggcgggaaaagaaaccgcagggccgaggcagccaggcgcccagccggaaggcaggcgaagccccacccacaagg

SEQ ID NO: 181649 - RNA, 42 nt, Homo sapiens
cgccggagaggggcccaagagaggccccccagaggagaccac

SEQ ID NO: 181650 - RNA, 79 nt, Homo sapiens
cagcccacagcagaaggacacagggaacacacggcggagaacgacgccggcggcgcacgccccgagagacgagccccgc

SEQ ID NO: 181651 - RNA, 34 nt, Homo sapiens
cccccgaagcgagggccgggggaggacgcccgac

SEQ ID NO: 181652 - RNA, 83 nt, Homo sapiens
gagaggagcagcccccggagacagcggcacagagggccgccagcgccacgcagagccccgccaggaagacacgccggggaacg

SEQ ID NO: 181653 - RNA, 66 nt, Homo sapiens
gaggaggcagccccgaccgaccggggccggggagcagcaggcgggaccagcggagaccacaagaag

SEQ ID NO: 181654 - RNA, 77 nt, Homo sapiens
gcaagggagggaagggcaaaacaggagcccagccggagacgccgcagcgcccgacaagagaagccagcggagacccc

SEQ ID NO: 181655 - RNA, 79 nt, Homo sapiens
gagagcagaacggcacagccccagcaacaccccgcagccgcgcaaaaaaagagcaggggggaggacccgcacgcaccca

SEQ ID NO: 181656 - RNA, 73 nt, Homo sapiens
agaccaagaaccaggacggagccaggcgaaacaggagacagaaggaccagcgaccgagaagacagcggaggag

SEQ ID NO: 181657 - RNA, 67 nt, Homo sapiens
cggcgggaaagaaaacgaccgagccagagagaagcaaacaaacaccagaagccaaaaggcaagcaac

SEQ ID NO: 181658 - RNA, 70 nt, Homo sapiens
aaaaggggacccacagcaccgaaaggcaggggacaagcacacagcggaagccgcagaaggaccggccaga

SEQ ID NO: 181659 - RNA, 57 nt, Homo sapiens
gcggggaggggccggacgccgggcagccggcacccgcacaacccagggggccgaacc

SEQ ID NO: 181660 - RNA, 66 nt, Homo sapiens
gacaccccagagaccaaccgggaagccagcagaacggccaaggcacgggacaagccaccaggcccc

SEQ ID NO: 181661 - RNA, 70 nt, Homo sapiens
ggcccaaaggccgccaggccgcagacgcgaaggaacggcaaagaagcaagcagccggccacaaggaacca

SEQ ID NO: 181662 - RNA, 105 nt, Homo sapiens
ggagcccgcgcccgccgcgggagagaggacccccccccccccccaagcaaggcaccagcagaacagacacccccaaagaccagacacgagggcaaaaagagcgga

SEQ ID NO: 181663 - RNA, 77 nt, Homo sapiens
aagaccacggagcagcgcaggagaaaaacaccgccggccaggaggagagcgcaccaccaaaaaggcaaacacaccag

SEQ ID NO: 181664 - RNA, 81 nt, Homo sapiens
ggaaacgcccccgagaagaaggaggcgcagagccaaaacacaccggaagaccccaccacccccgagagaaggccccgccaa

SEQ ID NO: 181665 - RNA, 58 nt, Homo sapiens
cccaaaggcgggagcagggaccagaggcgggccgcagagagcggaagacggagaacga

SEQ ID NO: 181666 - RNA, 79 nt, Homo sapiens
gacagcaaccacagggcaggccagggcaagaaccaggcccgcccaaggcagacgaggcgaggaaccaaaggccaccccg

SEQ ID NO: 181667 - RNA, 64 nt, Homo sapiens
gccgcaggagacacaacgggaccaccccccccccacagagggacagaggagggcaacgcggggc

SEQ ID NO: 181668 - RNA, 76 nt, Homo sapiens
cggggaccccggccgggggcggcggccgggggcccagcccgggcggcgcggccaggaggagacacacagccccaga

SEQ ID NO: 181669 - RNA, 70 nt, Homo sapiens
ggagcgaggggcggggacaggaagaggcgaaccagggagaagcagaccgcaccaggcgggaccccgaaaa

SEQ ID NO: 181670 - RNA, 81 nt, Homo sapiens
gaaccagagaagagacaacagcccaagacacaggaccgcggagcagcggagggaagaggcgaaccccgcccccagggccag

SEQ ID NO: 181671 - RNA, 77 nt, Homo sapiens
agcgcggcccggccaacgccgcccgacaacaccaaggcaggaaaaccaaacccgggggaacacccacccggagaccg

SEQ ID NO: 181672 - RNA, 67 nt, Homo sapiens
aaagccagcagaaaccaggaccaggaaagaagcgcgccacaacaggaggaacagcccaccaccaaaa

SEQ ID NO: 181673 - RNA, 75 nt, Homo sapiens
ccagcggaaggcagacaagcagcgcaaggagaaggagcaagaagagaaaaacaaagcacacacggcaggaacgga

SEQ ID NO: 181674 - RNA, 54 nt, Homo sapiens
caacaaagggaaaagaaaccaagcgccaggaaggcggggaagagaaagggccca

SEQ ID NO: 181675 - RNA, 70 nt, Homo sapiens
agccccggacgaagaggaacaccaagcaaacaccaggccacagaggagcacccgaagaagacaagacagg

SEQ ID NO: 181676 - RNA, 77 nt, Homo sapiens
caaaggccgagggaccaccaggcaggccggcaagaagaaaaaggagcccacagaaggagaaaggggaaagaaaaaga

SEQ ID NO: 181677 - RNA, 90 nt, Homo sapiens
gacacacggcgggcgacacgcgggcgcggcacccggcaaaggaagagcggaagcccggccgcgcaaaacgggcggcccgcgcggaggccg

SEQ ID NO: 181678 - RNA, 75 nt, Homo sapiens
cccggccacggcgccagagccggggacgaaagggaaggacaggcagagcaaacaaggcaaaaacagcaaaagaaa

SEQ ID NO: 181679 - RNA, 82 nt, Homo sapiens
acaaagccgcgaaaggccgggaagagggagagcaaacggccagcccagggggaggcagcaaaggaaggacaaaaccgaaaga

SEQ ID NO: 181680 - RNA, 84 nt, Homo sapiens
ccacaccagaaagagaagaagaacgagaccaccccaaacagcccacgaggcccgccccagaagaggagccagcacagcaccagc

SEQ ID NO: 181681 - RNA, 80 nt, Homo sapiens
ccggcgggcacccgacccccgccggggggccgacgacgagccccgcgaggagcgcagcggagaggccagaacgcccgcca

SEQ ID NO: 181682 - RNA, 77 nt, Homo sapiens
ccccaagagaacacaagaaggcaagagggagcccaaacagaacaccgaaaaccaggagccgagaagcaagaacagga

SEQ ID NO: 181683 - RNA, 70 nt, Homo sapiens
acccccgccggaggaaccgaagaccagccgcaggagaaagcccgaacgcgggaagaacgaagaaggacaa

SEQ ID NO: 181684 - RNA, 76 nt, Homo sapiens
cccaacaccgaacaccaacacacgcagacaccccgccaaagaccgcagacgggagggcagcccgcgaccgcacgac

SEQ ID NO: 181685 - RNA, 63 nt, Homo sapiens
ccgggcccgaggaggcagccaagccgggccgcccgcggcagccgagagagcaccccaccccgc

SEQ ID NO: 181686 - RNA, 77 nt, Homo sapiens
ggagccgccagcgcgggcggaccgacggagacggaaagccgggacaggagagcagccgcccgccccgccccaagaac

SEQ ID NO: 181687 - RNA, 68 nt, Homo sapiens
cagggccacccgcacacgcccgccgagggaccggcagcgaaaccagaggaacagaaaacgcgaccacc

SEQ ID NO: 181688 - RNA, 69 nt, Homo sapiens
agcagcagcaccgcccagaccagagggagaaaaaaaaaacccagaggcaagaaaagccgcaacaacggg

SEQ ID NO: 181689 - RNA, 74 nt, Homo sapiens
ggcgcaaaggaggaggaaaaaggaccaaacagcaagggaaggaagggacgcgagagaaaagacaccgacgagag

SEQ ID NO: 181690 - RNA, 79 nt, Homo sapiens
gacagcagcagccaggaggacgagagcccaagaccgaaacacgagccccaccaaagcaaaggccggaccaggagagagc

SEQ ID NO: 181691 - RNA, 71 nt, Homo sapiens
ggaacaacgcacccaccagcaaagaaagggaagcagcgggagaggaggccggacagcagacaggacaaaga

SEQ ID NO: 181692 - RNA, 65 nt, Homo sapiens
aaggcgggacaacaaaccgcccaggaagagagaaccaacccgggccaagcaaaggaccgacaaca

SEQ ID NO: 181693 - RNA, 66 nt, Homo sapiens
agaaaacaagagggccagaggaggacagcacacaccaaagaggggaaccccggaaccagaggcacc

SEQ ID NO: 181694 - RNA, 71 nt, Homo sapiens
cggcgccgcgcgcgcggaacagggccgccaggggcccccccagagaacggccgaagccaaggagcagccaa

SEQ ID NO: 181695 - RNA, 74 nt, Homo sapiens
caagacaaccccggcacgaggaagcgaggaggaaagagagcccaccaaggcaccagaagccgagaagagaaaaa

SEQ ID NO: 181696 - RNA, 78 nt, Homo sapiens
ccggagaggggacccagaggagggagcgggcccagagcgaccacacgggaccaagagaggaaaaccccgccgcaggcg

SEQ ID NO: 181697 - RNA, 74 nt, Homo sapiens
cggagaaagagagcgaaaagcagaagcagaaacacagaaaaagacgaagaagagaggaaacgaggggaggacaa

SEQ ID NO: 181698 - RNA, 78 nt, Homo sapiens
gacgggagaaccaaccaaggcgaagagccaccagcggcgacgcaggccaaaaccaggaccggagaacacccaccagac

SEQ ID NO: 181699 - RNA, 74 nt, Homo sapiens
cagccccgagcagcgggaacaggagcaagaggggagggaaaaggaaaagcgcgaaagagcaccagcccggaaaa

SEQ ID NO: 181700 - RNA, 65 nt, Homo sapiens
gacacaggcggagaccaccaggacgccccagcgaagcagggccaacagggcaaacaggaacccga

SEQ ID NO: 181701 - RNA, 73 nt, Homo sapiens
aagcccagggcccaaaaaaagggcaggaaccacgaaggacagaagacaccacagagggcagagagagagacac

SEQ ID NO: 181702 - RNA, 68 nt, Homo sapiens
aagaaccagaagacaacaaagggaaagagagggacgaaaccccagacacaagaaaaccagcaaacagg

SEQ ID NO: 181703 - RNA, 79 nt, Homo sapiens
aagaaacccagagggcagccaaagcgcaaagcacagaaaaggaagagccaagggaagaagcagaagcaagcccagggca

SEQ ID NO: 181704 - RNA, 69 nt, Homo sapiens
acagagaccgaaccaaaacggaaacgaaccgcgcccagcgaaggcgcgggagcgacaggccgccggcac

SEQ ID NO: 181705 - RNA, 70 nt, Homo sapiens
cccacgggaggccagccacccgaacccccaggcgcgcggggcacaagaaggccaaccccaaaagagagaa

SEQ ID NO: 181706 - RNA, 83 nt, Homo sapiens
gagagaaaggagacccgacgcaacgcggagcgcaaggcgagggacgagaacgagccccgcaggcgccagagaggaagaaggga

SEQ ID NO: 181707 - RNA, 81 nt, Homo sapiens
agagaggggccgacccaggcagcggaaacacagacgccagagccagaaggagcaaggacgcacaaaacagaaacaaggacc

SEQ ID NO: 181708 - RNA, 52 nt, Homo sapiens
aaaacaacaaccagggacaagacaacgcagggcaacccagggaaaggagacg

SEQ ID NO: 181709 - RNA, 37 nt, Homo sapiens
agcaaaggggcgacacggccaggaccccccgacccag

SEQ ID NO: 181710 - RNA, 90 nt, Homo sapiens
ggagcaaccccggggacgcagcgcccaccccgcccccagcccgcagcagcagcccaccgaaggccaggaacaaaacaggaagcggaaaac

SEQ ID NO: 181711 - RNA, 74 nt, Homo sapiens
agaccacccccagacacacagaggggggagaaaaggccaagggcaggagacacgagacgcaggaagcagcgaaa

SEQ ID NO: 181712 - RNA, 79 nt, Homo sapiens
caaaccgaagaacagcgggaaagaaggcaaaacacggaaaccccgaaccaaacagagcccaaggagcggcaaagaaagg

SEQ ID NO: 181713 - RNA, 82 nt, Homo sapiens
gaaccggagaccccgaaaacggaagcgcagggagaaggaagaggggaaaagagaacccccggcccagacagcaagaggcaca

SEQ ID NO: 181714 - RNA, 76 nt, Homo sapiens
ggaggcggaggcagaggggaggcgcgaaagaacccggagcaggaaaggacagggaagcaggagcgaccgcccaccg

SEQ ID NO: 181715 - RNA, 74 nt, Homo sapiens
gcgaccagaagaggaggcccccgaggacgcgcaggcaccaacaggcagagaccgggcacaaccagccagcaacc

SEQ ID NO: 181716 - RNA, 76 nt, Homo sapiens
gagggcaggacccgcaggccagaccccgggagcccagccaccacagacagaaaaaggcacaaacccagcacagaga

SEQ ID NO: 181717 - RNA, 80 nt, Homo sapiens
ggcggaggcggaggcagaggggaggcgcgaaagggcccaaagcacaagcgaccgccgaaggagcccccgaacggcaacgc

SEQ ID NO: 181718 - RNA, 73 nt, Homo sapiens
ccacgaccaagaagaagccgcggaccccgcagaagaagaaggggagacacgaacaaggagcacaagacagccg

SEQ ID NO: 181719 - RNA, 75 nt, Homo sapiens
accagaccggaagcggaccggccccggcccacaagaccagccggggcccacaccggcaaaggggaggcaccacga

SEQ ID NO: 181720 - RNA, 78 nt, Homo sapiens
gaagcagccgggagccggagcgggcgcggacgccgaggcaccgaggcaccagaggaggaaaagaaaagccaagaggaa

SEQ ID NO: 181721 - RNA, 74 nt, Homo sapiens
agacacgcccaaagcggaagacgagaaaagagagaaaaaccgccgcgcagggaccacgggagaaaaaggcgcac

SEQ ID NO: 181722 - RNA, 79 nt, Homo sapiens
gcacccaaacaccagcacggaaccgccaccagggcagcgagcgcaaacccaggccgagggagcaagccacacccagaac

SEQ ID NO: 181723 - RNA, 72 nt, Homo sapiens
ggaggcccacggcggcgaccaggagagccacgagccaagggggcacgagcggacccaacaagcggcagaggc

SEQ ID NO: 181724 - RNA, 84 nt, Homo sapiens
ccacaaaaacaagcggacaggggaaggcacggggccggaggagaagacagggggccgcaacaagccagcagagcacagggagcc

SEQ ID NO: 181725 - RNA, 84 nt, Homo sapiens
accagccaagaagacacaagcgcaagcacacccaccgaaacaagacagggcaaaggcaagcggggaagaacacccagaggcaac

SEQ ID NO: 181726 - RNA, 72 nt, Homo sapiens
acagccgaggccggggagagccgagaagcggccgcgggccccccacacacgggccggaaacaaagaaacgag

SEQ ID NO: 181727 - RNA, 85 nt, Homo sapiens
ccgagccgggaccaggcccgggggcggcggccacgccaaggacgggaaacacagaggccaacagcaagagcaaccagggaccacc

SEQ ID NO: 181728 - RNA, 67 nt, Homo sapiens
cgaagcacccacagcaacaagggcgacgccaggagcacaccgaaaagaaaggaaaaccgggaggaaa

SEQ ID NO: 181729 - RNA, 72 nt, Homo sapiens
cagcacgggagacaagaggaggaggccaaagagcgcagggaaagaaggcagagggggcgagggaggaaaggg

SEQ ID NO: 181730 - RNA, 74 nt, Homo sapiens
caagaccaaggaagacgaacgcaccccagagccgacccccaccgcaaggaacccggcaccagccgggcaaaaac

SEQ ID NO: 181731 - RNA, 80 nt, Homo sapiens
gcggaggaccgggaggccccgggcgcggggagaagacagaggagccagaccaagagacagcacaggcgagcgagcagaga

SEQ ID NO: 181732 - RNA, 82 nt, Homo sapiens
ggcccccgccaaccgaccggccaacgacgccccaaggcgccaaggaggggacccccaggaggaagcccaaaaggaaagaacc

SEQ ID NO: 181733 - RNA, 84 nt, Homo sapiens
gaggaagggacgcacacagaaaggcccgaacggacggacaaccagggccagggaacgaagacacacacgaaaggccaaaaggag

SEQ ID NO: 181734 - RNA, 69 nt, Homo sapiens
ggcaaggggccaccaggaggccagggggcgccagggggcgaggaagagacaggcgggggagaagaagca

SEQ ID NO: 181735 - RNA, 70 nt, Homo sapiens
ggacaacacgggcagccgaggacaccacaagaacaaagaggcagccaaggagaccgggagagagacgaag

SEQ ID NO: 181736 - RNA, 55 nt, Homo sapiens
ccaggacaaaggaggacagcaccaaaaaccggcgcggccgaacccagcgagaaac

SEQ ID NO: 181737 - RNA, 74 nt, Homo sapiens
gaaaaaggcaggacagacagcagggccgaccaagcaccgcagacccaaccccagagccccggccacaggcccac

SEQ ID NO: 181738 - RNA, 87 nt, Homo sapiens
gccaaacgaagcgggaggggcgaaacgaggaggagaaacgcggccgggccgggaagaagcccagcggaggcgaacggcccccgccaa

SEQ ID NO: 181739 - RNA, 59 nt, Homo sapiens
cgggcaccacagaaaaggaagagccgcgggcagggaaagcagccacagacgccgaaaac

SEQ ID NO: 181740 - RNA, 74 nt, Homo sapiens
cggccgcccgggccgcgccgccgcgccgccgcgccgcgccggcagaaacaaagggcacgagacacaaaccaacc

SEQ ID NO: 181741 - RNA, 72 nt, Homo sapiens
cgccggcccccaaagggaaacagacagggccacacaccggcgacggcaacgacgagcggggcgaagaacaaa

SEQ ID NO: 181742 - RNA, 75 nt, Homo sapiens
agaaggagcggcggacacacagacccccaccaagcagcaccagcccgaagaagccgggcagaccaggcagcagcg

SEQ ID NO: 181743 - RNA, 88 nt, Homo sapiens
cggggaggccaacggaagaaccggaaccaaaaagaagccccagagccggggccaggagccccaagcgccccagcagcaaacacagaag

SEQ ID NO: 181744 - RNA, 78 nt, Homo sapiens
ggagccagaagggaacggacaccgcaacgaaagcacgaaggacgacaaaagaaccgccgaagcgcacagacgaggacc

SEQ ID NO: 181745 - RNA, 77 nt, Homo sapiens
gaggggaagccaagcaaacgcagaaggacgcccacgagcaaccaagaacccggaaaccccagagaaaaagcgggaca

SEQ ID NO: 181746 - RNA, 73 nt, Homo sapiens
ggaaacagaccgaaagacgcccaggagacccggacagaggaaggcggccagaagaggagaaggagaaggacag

SEQ ID NO: 181747 - RNA, 75 nt, Homo sapiens
aggacacggaccgaacccagaaagcgcaaaagaaagccacggagagaaccagaccaggaggcgggcgagcaggag

SEQ ID NO: 181748 - RNA, 83 nt, Homo sapiens
gagagaggaggagccagacgacaagcacacacaggcgcgaaacggaaaaagccacaaacccccccacgacaccgaagcagcga

SEQ ID NO: 181749 - RNA, 39 nt, Homo sapiens
agcacagaccaccacgccaacgaccagcaccagacagcg

SEQ ID NO: 181750 - RNA, 79 nt, Homo sapiens
cacgacagaaaaacaacaagaccccagccaacagaggacgaaagagaggaacggcaaaccgacaccagcgacacaagcg

SEQ ID NO: 181751 - RNA, 83 nt, Homo sapiens
ggaaaacgccagaccagaagcccaaggaacaccgggcaacagaaaggcaaggcgaccgaaggacaggagagagggcaagagac

SEQ ID NO: 181752 - RNA, 78 nt, Homo sapiens
gccccagccggccacccaccacacagaggcagaggcaccacagccccggacgccacagagaagcaagggacaaggccc

SEQ ID NO: 181753 - RNA, 77 nt, Homo sapiens
agagccgaacccaccgagccagggagcggagaagcgacggaggagggggggaggacagccggcaggacggacaccca

SEQ ID NO: 181754 - RNA, 74 nt, Homo sapiens
gggagaacagcagcagcccacgaacagaaaggacagccaagcaccgaacaggacaacacaaacaaaaaagagag

SEQ ID NO: 181755 - RNA, 77 nt, Homo sapiens
gccccagagcccagggcaggacaccgacaggaacagggaccacggggaccagggcaaagcaccccagagcaaaaaac

SEQ ID NO: 181756 - RNA, 76 nt, Homo sapiens
gcaacggagaaaacccggaaccgcgacggcggcagagccaagaaagggagggggaaacagccaaggccgaggagag

SEQ ID NO: 181757 - RNA, 81 nt, Homo sapiens
ccggagaccagaggcaccgacgggagggaggaagacggccaggcaccacaggccagagcgaccgaacaaaagaggccagga

SEQ ID NO: 181758 - RNA, 66 nt, Homo sapiens
ggaaccaccgcaggaggggaggcccagccagcgcagcaggagaaccagacaccggacaaggacgga

SEQ ID NO: 181759 - RNA, 68 nt, Homo sapiens
gacggcccgccccgcgggggggggcgcagccgcgcgcccgcacaaagcccagggccccggccaggccc

SEQ ID NO: 181760 - RNA, 80 nt, Homo sapiens
gagcccgccgcgcggagcggagccgggggggcgagcccgccgagagcgccaaggaggagacaacgggggaagaagaaggc

SEQ ID NO: 181761 - RNA, 79 nt, Homo sapiens
ggggaaaccggaaaccagcccagccggcagcacaccgaccaccgcaagagccacagacaagaccgcaaggagccccggg

SEQ ID NO: 181762 - RNA, 68 nt, Homo sapiens
gaccacagcggaccgccccccacgaaacggccaagagagaaccccgagaagcgggagcccggaaaagc

SEQ ID NO: 181763 - RNA, 76 nt, Homo sapiens
gcagcgccagcagcggacaggcacagacaaccaggagcccacagaacgcagcggaccgcaacggcgcgggccgcgg

SEQ ID NO: 181764 - RNA, 85 nt, Homo sapiens
gcgcaccccgcggacgccacagcgcgcaagccggaacggggcccaggagcaaggaaaagggccgcggacacagaagggacacaca

SEQ ID NO: 181765 - RNA, 82 nt, Homo sapiens
ggagcggacccacaccccggaccgagggacgcggaccagcaccagacagcgaaaaagaggacccaaaaaagagagaaaaggc

SEQ ID NO: 181766 - RNA, 78 nt, Homo sapiens
agcgcgccccccaccccgagacagacaacccagaaaagaaaaggccaggggcgccgaaaaacccgggaacaaacaggg

SEQ ID NO: 181767 - RNA, 77 nt, Homo sapiens
accagcagcggcacgaccggcaccgaacgacccaagccaggcgagaagaaagccaaggcagcaggaagaagcgggaa

SEQ ID NO: 181768 - RNA, 64 nt, Homo sapiens
cacggaagcacacgacccagcgaaaggcacacagcacacacccaggccccggcagaagcccccg

SEQ ID NO: 181769 - RNA, 64 nt, Homo sapiens
aaggaaccgggaagcacgcaagcgacagggaggcaacaaagaagggcagagcgccggcccaggc

SEQ ID NO: 181770 - RNA, 70 nt, Homo sapiens
ccaacggaagccgacgggacggagagagaaagggggacgaaggaaaacaaaaaccacacggagccgcaga

SEQ ID NO: 181771 - RNA, 78 nt, Homo sapiens
ccgcccgcgccccgccgcggggcgcgcggcgccggcggcgcgcgacccccgcgcaggcggcgcccagcggccacacgc

SEQ ID NO: 181772 - RNA, 89 nt, Homo sapiens
agcccaagccagaaggacaggacgcaacgaaaccggcacggccgcccgaccccgagagaaacggcgagaaaaccaaacaggagccgaca

SEQ ID NO: 181773 - RNA, 54 nt, Homo sapiens
caggaagagagggacaggagacgaggaggagaaccagcaaaggagcacaacagg

SEQ ID NO: 181774 - RNA, 77 nt, Homo sapiens
agagaaccagcgaggacgagagcacagagacgggcaagaagggaaccggggaagaaacaagcaaaggaccagaaaac

SEQ ID NO: 181775 - RNA, 73 nt, Homo sapiens
accgcaacacagggggagccagcaggccaagggaaaagcagcggaaaaccagcccaaaaggccgagaaccaaa

SEQ ID NO: 181776 - RNA, 60 nt, Homo sapiens
caaaggcaggccgagccgcccacccacagggacgagcccgccgcagcaagagagagcaag

SEQ ID NO: 181777 - RNA, 77 nt, Homo sapiens
cacccccggccggaggcaccagcaacaccccaccagaccacccagcaagcccacaaaaaaggcacaagcagggacag

SEQ ID NO: 181778 - RNA, 75 nt, Homo sapiens
ggccagccacgacccaggccaaccccggggcacgcgcccacaggcgaaggcggaccccggcagcaagcaacagag

SEQ ID NO: 181779 - RNA, 68 nt, Homo sapiens
agcagagacaggaaaagggagagcccagagaagagaccccaccaccagggccagggaaggggcagcgg

SEQ ID NO: 181780 - RNA, 65 nt, Homo sapiens
cggacgacccagccggggggcacagccggggcccccgccaaggcggaggggaggcacacagcgac

SEQ ID NO: 181781 - RNA, 69 nt, Homo sapiens
ccgcccaaagaccagcgggaccccggcacccgacaaggcgagcccaagagaaaaggcaacaaacacaga

SEQ ID NO: 181782 - RNA, 77 nt, Homo sapiens
acccagagagaccaggcggcggaagagagccgggcccgccgggcgaagccgaacagaggagccaccgcgcccaggcg

SEQ ID NO: 181783 - RNA, 73 nt, Homo sapiens
cagcccccaagagcgggaacaggaacagaagaggggccacaaagaaaccacacacgccagcgaagaggaacac

SEQ ID NO: 181784 - RNA, 70 nt, Homo sapiens
aaaccccgaagagccgccccagggaacgcgcaacacaaagagaacccacccgccccagcagcccccagcc

SEQ ID NO: 181785 - RNA, 73 nt, Homo sapiens
acaaccaaaagaagcacaccagagcgcaagcagaacaaggggagagcccgacgcagaacagcggagcccccgg

SEQ ID NO: 181786 - RNA, 84 nt, Homo sapiens
caagagcagcagggcgagacagcgaaagcacgaacaggaaacaggaagccgggagagaaacacagagccaaggagccgccgggc

SEQ ID NO: 181787 - RNA, 60 nt, Homo sapiens
aacaacggaggaacaggagcaccacgagagcacccagagggggacgaccaccagccaggc

SEQ ID NO: 181788 - RNA, 73 nt, Homo sapiens
ccgcagcgagccggggaccgagcgccggccgggcggccacacccgcaggccccgggaccaaggacacgcagac

SEQ ID NO: 181789 - RNA, 78 nt, Homo sapiens
ggcgaggaggggaaccggccccacccgggaggggggagcggcgggaggccaccgccaggaacccgcgcccagaaggga

SEQ ID NO: 181790 - RNA, 60 nt, Homo sapiens
ggccacacggcccaacaccgcaaagggcagaacacggaggaccgcgcgggcaccgcgacc

SEQ ID NO: 181791 - RNA, 71 nt, Homo sapiens
ccagcgagggacccgcagacaggcgggagagaaccgcagcaccccaggaaggaagggaacacggacgacga

SEQ ID NO: 181792 - RNA, 79 nt, Homo sapiens
ggacaagcaagagcaacaacagaaaacccgccaggccaagcaacccccaagagcagacaaaaaagccaaagaggaccgc

SEQ ID NO: 181793 - RNA, 82 nt, Homo sapiens
agcgcgcccaggcggcgcaggcggccaacgagaggaacggccacgcgccagggaaggggccggaaccaagaaggacgccaca

SEQ ID NO: 181794 - RNA, 65 nt, Homo sapiens
ccgcgccagaccagggaaaaaaagacgccccgagccggacccccggaaacgacggggagaacgaa

SEQ ID NO: 181795 - RNA, 78 nt, Homo sapiens
gaggaacgcgaagagcccagaccagcagcaaggccacgcagaccacacacagagagcaggaaaacagacgaaacaccc

SEQ ID NO: 181796 - RNA, 71 nt, Homo sapiens
gaggaagcgcccgcaagggggaccagacggggagaccagaggaacccgagcaggaacaccccagcccgggc

SEQ ID NO: 181797 - RNA, 69 nt, Homo sapiens
gaaaaagccagaacgagcaagccacacgcaacacacagcgaaggcgggaggcggaggccacccagaccc

SEQ ID NO: 181798 - RNA, 56 nt, Homo sapiens
gggccggaggcgcagcccgcaggggccagcaggcagaccagaaggcgggcccgcag

SEQ ID NO: 181799 - RNA, 67 nt, Homo sapiens
aagaccccccccacaggggagacagagaccaagaggagcggggaaaagagggccgagaagcgggagc

SEQ ID NO: 181800 - RNA, 51 nt, Homo sapiens
gagacagcgggagccacggccacacgggagagaagggaggcagggcacgac

SEQ ID NO: 181801 - RNA, 83 nt, Homo sapiens
aaacaaggagcggacacgagccgagggaggggaaaggcgcaggccaggcggcgaagagagcaggccgcccagaaggccagggc

SEQ ID NO: 181802 - RNA, 76 nt, Homo sapiens
gcgaaggcgagccaagcgaagaggagcgccagaggggaggaaacacaagaaagcggcgcagccaggaccgagggga

SEQ ID NO: 181803 - RNA, 51 nt, Homo sapiens
gcgggacgcgggcagcagcaggccgggcaaacccagcaggaagccacgggc

SEQ ID NO: 181804 - RNA, 54 nt, Homo sapiens
gcgggaaggccggaaaggaccagaccgcccaggaaacgaaaaggggggcgggcc

SEQ ID NO: 181805 - RNA, 48 nt, Homo sapiens
aagaagaaggccagaaaaagaagcgcccccacgagaccccagagcaag

SEQ ID NO: 181806 - RNA, 83 nt, Homo sapiens
cgcgagagcccacgagcgaggccgcaggggagcccggcagccgcccggaggaagaaggcaccacgacaaaccggagccgaggg

SEQ ID NO: 181807 - RNA, 79 nt, Homo sapiens
agaccaggagagaccagcaaaggcccagagaccagagcgagcccagggaagaaacaggcccggcaccccggggaccgcc

SEQ ID NO: 181808 - RNA, 78 nt, Homo sapiens
cacacccaccgggccgccccagggcaaagcccaccagcaggcaagcccacaggccaaggcaaagcgcaaaacggccag

SEQ ID NO: 181809 - RNA, 68 nt, Homo sapiens
gagaggaaaaagaagcacaccgccaaccacccgggcaacacagggggaagaaaaggacccccagagag

SEQ ID NO: 181810 - RNA, 57 nt, Homo sapiens
cgacggaaccaacacacaaagccgcagaaagcagcaggcgcgacaagagacggacaa

SEQ ID NO: 181811 - RNA, 71 nt, Homo sapiens
ggaagagggaaggacgacgccggcccgacagcaggccgacgggagacccaaaccccagagagccgcagaac

SEQ ID NO: 181812 - RNA, 77 nt, Homo sapiens
aacccaaaccccccaccagcgccaagagagaaggagacccggacccgccccgggaccccgccgcacccgggcagcaa

SEQ ID NO: 181813 - RNA, 71 nt, Homo sapiens
caacacgcggcacgagggccggcccgcgggcaggggaaccgcgcacagaaggcgaacccacccaagcccgg

SEQ ID NO: 181814 - RNA, 62 nt, Homo sapiens
gcaaaaagaaaaaccagcgaagcacagaaacaggacagagagaaacacagaaaacggagaca

SEQ ID NO: 181815 - RNA, 84 nt, Homo sapiens
caacaccgcacggggagccaagccgcagcaagcagagcccggacaggcccgccaccggggcacgggcgccccccggaagcggac

SEQ ID NO: 181816 - RNA, 81 nt, Homo sapiens
gaggacaagcacgcccaggcagagccggggcacgggaggagcagcagaccaaaagaacagccccacgaaacacggcaagac

SEQ ID NO: 181817 - RNA, 75 nt, Homo sapiens
caggcagacaggccgaaagaaaaacggggcacacagcaaaaaagcggacacagcccagcacaagaccgcagagac

SEQ ID NO: 181818 - RNA, 60 nt, Homo sapiens
acgacgacagaagaagccaagacacccgggccagcaaacgcggaaccaggcacagaggag

SEQ ID NO: 181819 - RNA, 75 nt, Homo sapiens
cgaaaggcaacaagacaaagaaaccagccgagcaaccaaaccaaagggcggggaacagaccagggaaggggagga

SEQ ID NO: 181820 - RNA, 76 nt, Homo sapiens
cgccgggagcagccggacaagagaccacacccaggaagccaggcacgcacagcggcaagaaagccagagcccgaac

SEQ ID NO: 181821 - RNA, 54 nt, Homo sapiens
aaggaccaagaaccagcgacggcagacgggggaaccagcaaaaagaaaaagcag

SEQ ID NO: 181822 - RNA, 57 nt, Homo sapiens
ccagcacacgagaacacggcagaaaagcaagcagggccagagcacagagaccaaaac

SEQ ID NO: 181823 - RNA, 79 nt, Homo sapiens
cacgccagacacgacgcggcaggaacccggcccagagcgaacaaaaggcacccagcccagcccagggaagcgacccgga

SEQ ID NO: 181824 - RNA, 88 nt, Homo sapiens
ccccccccccccccccagcggggccccaagaagccgagacacgcgggaggcggcgacgggcccggccaagagcgaagcaaaccagaag

SEQ ID NO: 181825 - RNA, 58 nt, Homo sapiens
caacccccgagcacaggggagaggacggagacaagcagagaaaacagaagacaccccg

SEQ ID NO: 181826 - RNA, 81 nt, Homo sapiens
aagacacacaaggacgaccaggccaagcaagaagccgagcagcaccaaaaagccaaggaaagcagccagagcagcagagca

SEQ ID NO: 181827 - RNA, 85 nt, Homo sapiens
aaggggaggggggagaccagagacgaccagcaacagggacggccacccgggaccgcccagacgacgcagcccacagaagagcaag

SEQ ID NO: 181828 - RNA, 63 nt, Homo sapiens
gaagcccaggaacgcacgcgcaaggacgggcccaagacaaaaggggcaagggaccccaagaga

SEQ ID NO: 181829 - RNA, 79 nt, Homo sapiens
acaaagcaaggcccccgcagccacgcacccaagagccaacggacagaggcccggagaaggcaggaaaaccgcagacaag

SEQ ID NO: 181830 - RNA, 74 nt, Homo sapiens
cccagggccggaaaagccaacgccggcgaaggggcgggcacaagggaagacagcgcccgggacccaacggaaga

SEQ ID NO: 181831 - RNA, 75 nt, Homo sapiens
aacccgccccgcccaaaagaccaccgcccaacacaacacgcagggaaggaaacaaaggagggggagaccccacgg

SEQ ID NO: 181832 - RNA, 70 nt, Homo sapiens
agaccccccgggaaagcaagaaagaaacaaaagcacccgcgaaggacaaaccggcgaccacacacgggga

SEQ ID NO: 181833 - RNA, 72 nt, Homo sapiens
gaccgggaaggggccggaccagccccggccccaggaccgaggaccgagacagagagcccaaggccagccccc

SEQ ID NO: 181834 - RNA, 92 nt, Homo sapiens
cgacgcccagcccccagggacagacccacaccgcagcgccccagacaggaaaacggccgccacggccccagcgcccgaacagggaagccagg

SEQ ID NO: 181835 - RNA, 61 nt, Homo sapiens
ggagccaccgagcgaggacgagggcgccggcgacgacaagaaaaaggcgcagcccaacaga

SEQ ID NO: 181836 - RNA, 83 nt, Homo sapiens
ggcgcgagacggaggcgaggcaaacggggggcgcggagggaccagcgagcggaaagccacagccaccccagcccagcaaccac

SEQ ID NO: 181837 - RNA, 80 nt, Homo sapiens
gccggaccccagcgggggaagaaggacaagaggccagggcaggggaccgccagaacaaacgcagggcacggacaaggcag

SEQ ID NO: 181838 - RNA, 69 nt, Homo sapiens
gagcggaggagggaagaacaggggccagggaaaggagcagagagagagagcagaagaggccagacagaa

SEQ ID NO: 181839 - RNA, 73 nt, Homo sapiens
acagcgaggaaggcaccaagaacgaggaagacacacaccccacaggaacacagacgaggccgaggaggggcgc

SEQ ID NO: 181840 - RNA, 74 nt, Homo sapiens
ggaaggcggcccacccgaagcgggcgacgcagggcccacaggaagccaggcgcgcaccccaccacccggacaca

SEQ ID NO: 181841 - RNA, 81 nt, Homo sapiens
gccaaccggagcgcaaggcgccaaccccgaacggggggagacgccacggaacgcaggaggaaaagcgggcgcagcgcgcgg

SEQ ID NO: 181842 - RNA, 124 nt, Homo sapiens
aggaaaagcagcccgccacccagagacacccccgaaaccacccccaggggagaggaagggggacgcgggggaccggagcgcgggcgggcgcggccccccgggaccaggccgggccgacaccgcg

SEQ ID NO: 181843 - RNA, 110 nt, Homo sapiens
caaccgcccaggccggcccaggcgccgagggacgcccaccgcgggaggagcgcccacggaggaaccgaagagccccggaacaaccagcgcgcaccgccccgggaggacaa

SEQ ID NO: 181844 - RNA, 61 nt, Homo sapiens
gcagaccaggccagagcccccgcaccaccagcccgcaaaacgagaaaggcccagacaagaa

SEQ ID NO: 181845 - RNA, 77 nt, Homo sapiens
aagcccagaagcaacaagcccgaaggcaagacccggccagccgggaacaaacccgggagacacagggcgggaagagc

SEQ ID NO: 181846 - RNA, 77 nt, Homo sapiens
gggagagacccaacacccagaaaccgccagacaacgaccccacccgagacccagaagccagccaccaaaagaacacc

SEQ ID NO: 181847 - RNA, 92 nt, Homo sapiens
gaccggcgggcccggagcagccgccgccgcagcgcgaacaggacgccgcaacgcccaaccaggaggaaagacgaggccggaagccacaggag

SEQ ID NO: 181848 - RNA, 70 nt, Homo sapiens
cggcagaaacagaggacaaggcagcaaagaagagggcccagcaagaccgaagccacacccccccagggcc

SEQ ID NO: 181849 - RNA, 58 nt, Homo sapiens
cacagcaagacccaggaccccggaagccagaaaggccaccgcgcggcgccacccaggg

SEQ ID NO: 181850 - RNA, 76 nt, Homo sapiens
accaccggaccgcacgccccgcgcaaggagggagagccaaggaagaccgcaggaaagcaggaaggcaagaaagcca

SEQ ID NO: 181851 - RNA, 79 nt, Homo sapiens
gggacgggcggacagaccaaaccagacccaagcaagccagcagccgagcggcccaacgagacaacaaggagacccagcg

SEQ ID NO: 181852 - RNA, 66 nt, Homo sapiens
gacgccagaagagaaccacaaggagacggcgcaggaccggggaaccgccaaagcccgggcgcggaa

SEQ ID NO: 181853 - RNA, 71 nt, Homo sapiens
gaagagacacagaggagccacacccccaggggacggcagcacacgacgggaggagcggaaaccgggcggcc

SEQ ID NO: 181854 - RNA, 78 nt, Homo sapiens
cacagcacccggggggcgcccgccacccaggaggggagaaccaaaggacccaaagacaggaccacgcaccagcagaga

SEQ ID NO: 181855 - RNA, 72 nt, Homo sapiens
agccaaaggaaacgccacacccgcgcagcgccagaccaaaacgaagaagacgagccaaacccaaaaaggaag

SEQ ID NO: 181856 - RNA, 52 nt, Homo sapiens
gcagggcgcccccggcagaacagaagaggcaacagcacgaaaagaaaccgcg

SEQ ID NO: 181857 - RNA, 68 nt, Homo sapiens
gaaaggaagggccaggacaccaggcaaagaaggcaaagaaccaaaggaacagagagcggcacagaaga

SEQ ID NO: 181858 - RNA, 56 nt, Homo sapiens
accagagaacaagcaccaaagcgaaggagggccgcaagggccagaagaggagcgga

SEQ ID NO: 181859 - RNA, 83 nt, Homo sapiens
caacacgggaccggggcgggcgagaaacagcccggcccgcacagggcccggcacaggcgccgacgggcaccggcacacccccc

SEQ ID NO: 181860 - RNA, 73 nt, Homo sapiens
ggagggccaagacaacaaccagagccgggacaaccccaaccagaacagaaacagcagaccagccagccccaag

SEQ ID NO: 181861 - RNA, 70 nt, Homo sapiens
cgggggaagccaggcaccccccacagaaagggcgcccgggccacccaggagcccgaggcaaggcagggga

SEQ ID NO: 181862 - RNA, 73 nt, Homo sapiens
cgcgcgccccaccccccacgggccgcgaagaccgggggcggcaaggaagcaggagcacacgggaggagaccaa

SEQ ID NO: 181863 - RNA, 66 nt, Homo sapiens
acggagaaaaacggccaagaggcagaccaggaaagggaaacacagaggccaacagcaagagcaacc

SEQ ID NO: 181864 - RNA, 74 nt, Homo sapiens
cacggccagcgagggcgccacgacgggcacgggagaaggaggagcagaacacaggggacagggaagaggccagc

SEQ ID NO: 181865 - RNA, 70 nt, Homo sapiens
caggacaagggggaaggcgcaagggcagaagacaagaccccaagagagaagaagagcaacaacaagaaac

SEQ ID NO: 181866 - RNA, 77 nt, Homo sapiens
gcgcgccacaacaggccgggcgggaacaagcccggaacaggcccacccaagacaggggagaaaccagaagaagaccc

SEQ ID NO: 181867 - RNA, 74 nt, Homo sapiens
aacccggggagaccccgacgggaggccgaggcggcgggccagagaagcagacgcccagcgaacaagcaggagga

SEQ ID NO: 181868 - RNA, 74 nt, Homo sapiens
ggcggacggccacgcagccaggacgcggaacggaaagcccaggaaagagacacgcaaagaagaaaaaaaacgag

SEQ ID NO: 181869 - RNA, 64 nt, Homo sapiens
ccgggcacaagccagcgcacccaggagcacaggagaggacaccagcagccgcaacggcacacac

SEQ ID NO: 181870 - RNA, 73 nt, Homo sapiens
cccggggagaggggagccgcacgccacagcgaaggcgcgagggacaagagcagagcgcagagacaaggaaggg

SEQ ID NO: 181871 - RNA, 102 nt, Homo sapiens
ggcgcagccgcgggcagaggcgggccgccgagcggacccggaccgggggggggacgcgagcgaagggcgcagggacccccagggagccccagcacgccggac

SEQ ID NO: 181872 - RNA, 75 nt, Homo sapiens
cacgcagagccaaaggacgacccaccgagggcaagaagcccggcgacaaaggggcaggggaagcagcaagagaac

SEQ ID NO: 181873 - RNA, 74 nt, Homo sapiens
gagggcggccacaaggcaccgccgaggaagaaccggccccccagcgcgcagggacagcaggccagcaaacagga

SEQ ID NO: 181874 - RNA, 61 nt, Homo sapiens
gggcagcaccacgagccagaagcagagccggacgagagaggagcgcgggccgagagcggag

SEQ ID NO: 181875 - RNA, 68 nt, Homo sapiens
ggcaccacaggcaagagcccccgggcgacacaggagcaggacagaccccgaagaccgcccgcaggagc

SEQ ID NO: 181876 - RNA, 75 nt, Homo sapiens
agaaaaagagaaagaagagcccccccaccacgaaaaccggagaggaggaggacacccacagcgaccgacgaaccc

SEQ ID NO: 181877 - RNA, 71 nt, Homo sapiens
cgaagcgaaaaaaagcgggaggagcgcggcaagacaaccacgaaaacgaagaggggagaagcaccaccacc

SEQ ID NO: 181878 - RNA, 78 nt, Homo sapiens
gcccacacccacagcgcgggaaggccccaaaggggaggaaaggcgaccgggccggaagaaaggacaggaaagacaggg

SEQ ID NO: 181879 - RNA, 80 nt, Homo sapiens
gaggaaaccgccggagccgccgggagggacgccgccgaggcccggagcgcgccgcagcaagaccaggacgggagaaacag

SEQ ID NO: 181880 - RNA, 70 nt, Homo sapiens
aaaaaagggaggcgaggagcggggaggaacgggaggagaaagcacaggaggcacaacaaggcaagccacg

SEQ ID NO: 181881 - RNA, 85 nt, Homo sapiens
ggccagggaacccggcaccgccccaggcacaccaacaggcccgggaaaggaagacaaccacccgcagccccagaccgcggcgaac

SEQ ID NO: 181882 - RNA, 81 nt, Homo sapiens
acgggcaaggcggagaggacggagcggcgagcccccgcggcgacagggaaaccaagccccaggaggcaaccagccgcgccc

SEQ ID NO: 181883 - RNA, 70 nt, Homo sapiens
gcggcggcgccaggagcgcggccccgccggcccgggcgggcgcagcgaggaggggaagccccccgcagga

SEQ ID NO: 181884 - RNA, 102 nt, Homo sapiens
ggcggccaagacgggagccgccgcggggggagccgggcagcccagcaggagaggccccccgccggcagccccgagcggccagcagggcaccaggcaagaccc

SEQ ID NO: 181885 - RNA, 78 nt, Homo sapiens
cgagccacgcaaaagaaaaggacgggaggacaccgggcacgaaggcgggaacaccgagccagaagggagcaaagcgac

SEQ ID NO: 181886 - RNA, 78 nt, Homo sapiens
gagcccccggagcgcgacccgagccaaggcagaaagccccaaggacgggaacggcaacaccaaaggaaggaacccaga

SEQ ID NO: 181887 - RNA, 81 nt, Homo sapiens
gcgcgagagacgcaccccgagacgaggcggagggagaaacgcagcaccaaccgcgagcgccgagaacggacagacacgcgg

SEQ ID NO: 181888 - RNA, 53 nt, Homo sapiens
gcagacaccgcccgggaaccaaaggagcaagggaccccacaccacaaaccgag

SEQ ID NO: 181889 - RNA, 83 nt, Homo sapiens
ggcgccgcccggggcgaggcagggccagcagcaggcgggagcacccagagggccacacgggcaggacaccccccgccggagga

SEQ ID NO: 181890 - RNA, 75 nt, Homo sapiens
gcaggagccccgggcggcggacggcgcccgggcgacggggaagcccaggaaaagccgccacggagccaggccgag

SEQ ID NO: 181891 - RNA, 55 nt, Homo sapiens
caccagcgcccgcccccgccccgcacaagacacccccggcaccgaggaaaacaag

SEQ ID NO: 181892 - RNA, 60 nt, Homo sapiens
ccagagggcaagaaggcacagaaaggaagaccagcagaaggaaacggaacgccaagcgaa

SEQ ID NO: 181893 - RNA, 82 nt, Homo sapiens
aaaaacaaagaacaaaggacacaaaaacccggagaacaagcaaaacaaagcaggccaccaaaggccgcagaccaagaagaaa

SEQ ID NO: 181894 - RNA, 80 nt, Homo sapiens
ggggcggagcggcgacagaccccaaaacacgagacgcgcagaacgcgggcaaaaccacggaccccagcaggcaccaccaa

SEQ ID NO: 181895 - RNA, 77 nt, Homo sapiens
ggaaggagcagagagaaaggagaggacaagaccaggcccaagaaacagagaggagagcgcccgcaggcagcagagaa

SEQ ID NO: 181896 - RNA, 79 nt, Homo sapiens
caaacaagacaacgagcgaaagcgaaaaacagcgaccagaaacccccacgaggaagaaaggccccggagagggaggcac

SEQ ID NO: 181897 - RNA, 40 nt, Homo sapiens
aaccgaggagccacgcagcaggggaccaggcgcccccgag

SEQ ID NO: 181898 - RNA, 56 nt, Homo sapiens
gagaagagcagccagagaccacagcgccgaccacaccaaagaagggggccaccaag

SEQ ID NO: 181899 - RNA, 99 nt, Homo sapiens
cgcgccccggaaacgccccccgggggcagagggcagcaagaggcgcgcagagggcgcaggccaccgacaaggccagagaaagaacaccaaccaaagcgc

SEQ ID NO: 181900 - RNA, 102 nt, Homo sapiens
gacgggagaggcggccagaagaaaacgaggggcggaacacccgccaaagcagagaaaagacacgggggggaaacaagcacgggcgagccaggacacgaccac

SEQ ID NO: 181901 - RNA, 79 nt, Homo sapiens
gcggggacaagaagccaccaaagcaggcgagacgagccagagacgaggaagaccgcaggaaagcaggaaggcaagaaag

SEQ ID NO: 181902 - RNA, 62 nt, Homo sapiens
acggggggaggacccgaccagcagagaccgggaggcagcaacccagaggccaccgccaagca

SEQ ID NO: 181903 - RNA, 90 nt, Homo sapiens
cggcgcgagcccacgaagaggacgaccggagaacgcgaggcagagcgggagcgcgcagccaggagcgacaggacccaaacccgggccgcc

SEQ ID NO: 181904 - RNA, 68 nt, Homo sapiens
ggacagggggaacgaggcgccgaccccacaggaagggaagcacagcgacccgaaagacgcagaggcca

SEQ ID NO: 181905 - RNA, 71 nt, Homo sapiens
caaacggaccaccagaaagcaccccacagcagaccgcgggcccccagcgcacccggaagagcccaccaccc

SEQ ID NO: 181906 - RNA, 77 nt, Homo sapiens
gggaaagggaagacacgaaaaaagagaaagggccaacgggaaaggaagcagacaccaagccaaaaagcagagcaacc

SEQ ID NO: 181907 - RNA, 108 nt, Homo sapiens
accacagcgaagaccagaggaggggcgaagaggaagcccaccgccaccgaaaggggggaacagacaagcaccccggcaaccggacccgcaacccaggacagacgccag

SEQ ID NO: 181908 - RNA, 79 nt, Homo sapiens
gcacgggccgagggaccagcacagcggagccgggagcccccgccacaggggaaagaagcagggaaaagcaacacaggaa

SEQ ID NO: 181909 - RNA, 77 nt, Homo sapiens
gccagccccgggcagccccgcccggacagggccccagggcagccaaccccgcggcaggcacggccaccggaacagcc

SEQ ID NO: 181910 - RNA, 87 nt, Homo sapiens
ggggccaggaggagcgaacaccgccgcggcccccgccggcgcgggccagggcaggacagcagcccgcaacaggccggccagcccccc

SEQ ID NO: 181911 - RNA, 58 nt, Homo sapiens
gcaacagaagaccgccagagacagagaagacaacgagcagacagggaggagaagcagg

SEQ ID NO: 181912 - RNA, 75 nt, Homo sapiens
cgccacacccgacccgccaagaagccgcgagcaccacagggaaaacggccacaaaggggccaagcacaggaagaa

SEQ ID NO: 181913 - RNA, 87 nt, Homo sapiens
ccacacgggccccgaagagcgccgcgacgcccggcccgcagggcagaaaagagcggcagcacgcaaagaacaggaacacaccaccgg

SEQ ID NO: 181914 - RNA, 61 nt, Homo sapiens
gaaaagcaccccccaaagccggagcggggggcggacaacacagcaacgcaaccacgaaggc

SEQ ID NO: 181915 - RNA, 74 nt, Homo sapiens
cgagcgggcgccagaagaagcgaacgcaaggcagcaccccgacgacaagacaccccgagacaagacagccacca

SEQ ID NO: 181916 - RNA, 64 nt, Homo sapiens
cagagacaaaacaagcccccaggaaccacggcccggggcgccccgaccacccaggaggaggggc

SEQ ID NO: 181917 - RNA, 62 nt, Homo sapiens
cggggggccagcgggcacgggcacacgcggagaagagcaacgagggggcccggaggggcgcc

SEQ ID NO: 181918 - RNA, 73 nt, Homo sapiens
gaaggaccaagaaccagccaagggaagaagcagaagcaagcccagggcaaggaccgggaaaacggaccagcag

SEQ ID NO: 181919 - RNA, 69 nt, Homo sapiens
gccggcgccagaggcccggacgacagcccccaggggaaaaagaaaagggcgaagacccgaagcagcgca

SEQ ID NO: 181920 - RNA, 79 nt, Homo sapiens
acagacagggccacacaccggcgacggcaacgaagcaacgcccgccggacggcgaagaacagacggcacagagaaccca

SEQ ID NO: 181921 - RNA, 82 nt, Homo sapiens
aaagcaccccgaggaggaagacgaacgaaacacgaaagggcaggccgcaggagggaagcgcacggaaaccgccccgggaggc

SEQ ID NO: 181922 - RNA, 50 nt, Homo sapiens
gacgaacagcgggccgcagccaagcgccgccggacgaaggagcaagggca

SEQ ID NO: 181923 - RNA, 63 nt, Homo sapiens
ggaggagcacagaacgccaggaccaaaacagggagaaacacagccagaaggcgggggcgaaaa

SEQ ID NO: 181924 - RNA, 65 nt, Homo sapiens
cgcggaggacgccccaccgccgacgcccccagccaccagggcggagaacggaaaagcaccaggaa

SEQ ID NO: 181925 - RNA, 55 nt, Homo sapiens
ggcagccagcagggggaggggcggaaaaacaaacgagccaccagcgcccacccac

SEQ ID NO: 181926 - RNA, 117 nt, Homo sapiens
acgggcacgggggggccccacagccggggccagcccacggcccgcgcaccgggagaggaggccacaggccccacacgccaggcggaaaggcccgcaggcagcagcccggggcgccag

SEQ ID NO: 181927 - RNA, 74 nt, Homo sapiens
cccgcacgacgacagaggcccagagcccccccgcaccagcagcgcgcacccagggcacaggagacagagaggag

SEQ ID NO: 181928 - RNA, 74 nt, Homo sapiens
ccaaagaagaggagagcggggggacccaaaaagggcagaaagggccgggcaaaacccccgagccaccagaaaag

SEQ ID NO: 181929 - RNA, 72 nt, Homo sapiens
ggcgcgccgaaagcgacggagccaggggagaaacacaaaaagacagaaacggggcacaacgggagaaaggaa

SEQ ID NO: 181930 - RNA, 63 nt, Homo sapiens
gccccagcagcccccgaaggcccacaggacaggagagaaagacgaccagagccaaagaagcag

SEQ ID NO: 181931 - RNA, 70 nt, Homo sapiens
gggccccgagagcagcagcgcgcaggacacacacacggacggacaaccagcacgggggcgcgcgcacggc

SEQ ID NO: 181932 - RNA, 72 nt, Homo sapiens
ccacgaagaagccacacccgccagcgccaaccagggagggaaaacacaaacaacccgagcccagggccaacc

SEQ ID NO: 181933 - RNA, 48 nt, Homo sapiens
ggcggcggggagcagcagggggcacagagaacagaacaccaaggagag

SEQ ID NO: 181934 - RNA, 75 nt, Homo sapiens
cgcagaccgccggaccccgagaagggaccacagaccagcacgccggcgccacgaaccgagcgacaggacgggccg

SEQ ID NO: 181935 - RNA, 65 nt, Homo sapiens
aaagaacggaacacaaaagaaagcggcgagagaaaagacacggaggcaagcaagccagaccacaa

SEQ ID NO: 181936 - RNA, 70 nt, Homo sapiens
ggaggaagcccccccggcacgacaccgccccaacccacgagaggacagcccagcaaccggccgacccgcc

SEQ ID NO: 181937 - RNA, 76 nt, Homo sapiens
gaagaaccccggacggacgagggaacaaaacgggacaaacgcagccgcgcagaaccggccgaaaagcacaaacagc

SEQ ID NO: 181938 - RNA, 62 nt, Homo sapiens
ggggacaaacagcaacagcagaagagcaccaaggaggcgcagccccaagcgaaagacagagg

SEQ ID NO: 181939 - RNA, 55 nt, Homo sapiens
gggacccccaaacagagcccaggacaaaaacaccacgccagggcacccccgagag

SEQ ID NO: 181940 - RNA, 76 nt, Homo sapiens
cggggcacgacaaaagaaccagaaaaagagaaggaggcgcgagaggacaaaccggggggcccccaggggggaccag

SEQ ID NO: 181941 - RNA, 50 nt, Homo sapiens
aaaggcaaggccaaaaggccgccaacggaagcagacggaagggaaacccc

SEQ ID NO: 181942 - RNA, 93 nt, Homo sapiens
aggcggggccgccggggccgccaggagcccgaccgggagaggacaagaccacgagccaggagagagagagagagaggaagcgaagaaaaagcg

SEQ ID NO: 181943 - RNA, 68 nt, Homo sapiens
agaaggaccaagaaccagcaccaggacgagcagggcgaaggggggggaggcacccgagcggcccggac

SEQ ID NO: 181944 - RNA, 53 nt, Homo sapiens
gaagaccgggaaccaaccaaccgaaggacgagagaagcccacaaaggaggaaa

SEQ ID NO: 181945 - RNA, 80 nt, Homo sapiens
gagaaggcgcgaagcacaggaggagcgaagaagaaacccacaccaccacaccagcgcagccacaccggccgggccaccac

SEQ ID NO: 181946 - RNA, 83 nt, Homo sapiens
cccgcgcgacggcgacgcgggaggccagcggcagaaccaagaaagaccaacagcaacagcaagggacgagccgagacacagaa

SEQ ID NO: 181947 - RNA, 50 nt, Homo sapiens
gccggcaggggggggggaagaaggccgaagaagaacccccggccgggagg

SEQ ID NO: 181948 - RNA, 73 nt, Homo sapiens
gggaacccaaaaggacagcaacacgcgagagaaacaagacgggaaggaagacgagaagagagaagaagcaaac

SEQ ID NO: 181949 - RNA, 80 nt, Homo sapiens
ggacagaggaagaaacccggaaggggaagaggaaagcaaaggcgcaggaaggccccagggccggaaaagccaacgccggc

SEQ ID NO: 181950 - RNA, 51 nt, Homo sapiens
gaaaacaaaagaggaagcgaaaccacaagaagaaacaaccgaccgaacaac

SEQ ID NO: 181951 - RNA, 60 nt, Homo sapiens
gaaggaacgcaaaacacgggaaaagagcagcgccggcacggccgcacaggcaccacagca

SEQ ID NO: 181952 - RNA, 61 nt, Homo sapiens
caccccgcgcagggccacagggaagggaaagacaggacgccagaaagagggcaacggccga

SEQ ID NO: 181953 - RNA, 74 nt, Homo sapiens
gacggccggcggcacccgcacccggggacaagcgcgggaacggcgcggaaggcaaaaaccgaaagaaggcacaa

SEQ ID NO: 181954 - RNA, 78 nt, Homo sapiens
ggaagacacaccccgagacgccaaggcaggcggaacaacagaggcagggaagacgaggacaacggcacagcagagcgg

SEQ ID NO: 181955 - RNA, 58 nt, Homo sapiens
gagaaaaggacgcgacacaagcacaaaagcggaggaaaagggggcgaggaagagacag

SEQ ID NO: 181956 - RNA, 59 nt, Homo sapiens
gacgaccgcggaacaaacagaagacagcggcccgagggcaggacagcaggcaccggcga

SEQ ID NO: 181957 - RNA, 62 nt, Homo sapiens
cagaagcaaggacaaggcagagagagaggccggcagaggccgcccagacagagcacagggag

SEQ ID NO: 181958 - RNA, 79 nt, Homo sapiens
ggagggagaccacagcaagacaccgggaccccggaagccaaaaagcccacggagaagaacgcgcggcggcagcgacaga

SEQ ID NO: 181959 - RNA, 85 nt, Homo sapiens
cgaccaggcggcacggaggagagccggggcccccaggccaagccggagcagaggacacccgcccgggagccaggccgcaccccag

SEQ ID NO: 181960 - RNA, 66 nt, Homo sapiens
aggaagaagaacggcacaggacagaggagaagagagaagagacaaggacaccccaagacgcacccc

SEQ ID NO: 181961 - RNA, 75 nt, Homo sapiens
aacacgcaggagcgccgggagggaacagggaaaagacgcgaagaagagaaagaagggagaagaaaacccaggagc

SEQ ID NO: 181962 - RNA, 73 nt, Homo sapiens
gaggacgcagaaaacaaccacccccaggaccaacgcagagacagggggaacaagcacgcacacccagagggcc

SEQ ID NO: 181963 - RNA, 46 nt, Homo sapiens
gggaaccgaaagacaagagacccccgacgggacgcaggagacagac

SEQ ID NO: 181964 - RNA, 110 nt, Homo sapiens
cgagacccacagaggagaccaaaaaaaacaacagcagagcaaggaaagccagacaccggcaagaaacacggcagggcagagagcgaaacgcgaagagccgccaacgccgg

SEQ ID NO: 181965 - RNA, 50 nt, Homo sapiens
ccacgcgcggaaggcagcgcccagcagcgcagaaggaggggcagagggaa

SEQ ID NO: 181966 - RNA, 82 nt, Homo sapiens
agaagcaaggcgacgccagaggaggaaaggaagacaaggcaaaagcagaccggaaaacccaccggcaagaccacacccgagg

SEQ ID NO: 181967 - RNA, 64 nt, Homo sapiens
ggcgccgaaacggaacccgcaccaagcccagaaacggacaaggaacccaggggacaaagaggag

SEQ ID NO: 181968 - RNA, 57 nt, Homo sapiens
gcgacaaccccggccaggaacaagggagcccgccagagaaacgcccaggccaaagaa

SEQ ID NO: 181969 - RNA, 86 nt, Homo sapiens
gcggggcaccgcggcggaggaggcagcacccgcggcgcgacggccggggagagcaggcgccgagcagacggacggacgagcccggc

SEQ ID NO: 181970 - RNA, 91 nt, Homo sapiens
cgcgggccagagcgcagcgccgagcgcggcccgggcgccacgagccggcggcggacggcagccggaaccaaaaagaagccccagagccggg

SEQ ID NO: 181971 - RNA, 59 nt, Homo sapiens
cggcgaccgcggcccgagagccaaggaaaagccaagaaagacccaaaagaccccagacc

SEQ ID NO: 181972 - RNA, 62 nt, Homo sapiens
agaccgcagaacacccagccaggggggccgacgacgagccccgcgaggagcgcagcggagag

SEQ ID NO: 181973 - RNA, 55 nt, Homo sapiens
caaggcgggcgaacggggcagcccgggaccaggaggggcaggaggaacacaacag

SEQ ID NO: 181974 - RNA, 74 nt, Homo sapiens
cacaccgggccagccagagcccccaggggaccccaccgcaggaccaaagggaggggaaacaagaaccagacagg

SEQ ID NO: 181975 - RNA, 84 nt, Homo sapiens
gcaggccacgacccccagagcaacgcgaagggagggccgccccaaccgacgcaccagccggaggaggagggacagggccaggaa

SEQ ID NO: 181976 - RNA, 77 nt, Homo sapiens
ccaacgaaacagacgaagacccgcggaggaggaaaccgcagccaaggaggaacacaaggcagcagacgacaggacgg

SEQ ID NO: 181977 - RNA, 60 nt, Homo sapiens
gaaaccagaagccagaggcaacaagcaagagaggcccgagaaagggcgaaaaagaggcga

SEQ ID NO: 181978 - RNA, 75 nt, Homo sapiens
gaggcgggggaaacaagcagaagaacgcagaaagagacacaccgacgaaaaacagcccgagccaaaaagcaccac

SEQ ID NO: 181979 - RNA, 75 nt, Homo sapiens
cagccggagggcagggaacaggccgcggggcgaagccaaacccgaccacagccccacgcagaagacaccaaccca

SEQ ID NO: 181980 - RNA, 60 nt, Homo sapiens
aacggcagccccagacggggagccaaaagaccccagaaagagcaacagaaggagacagag

SEQ ID NO: 181981 - RNA, 79 nt, Homo sapiens
aacaggccaaggcccaagagcgaggagcccgagacgcagccagcgagcccgcgggacaacaccgcccgagcgggggcgg

SEQ ID NO: 181982 - RNA, 77 nt, Homo sapiens
acacaggacggaaaagggacaaaaacagacagcacagaaaagacaaggcgaaaccccagccacaccaaagaggccgg

SEQ ID NO: 181983 - RNA, 89 nt, Homo sapiens
gccgagggcgggggagagcgcgccgcgccccggaccgggccgcgcacgccgcccagaagacgaccccgacgcaggccaggagccgcgga

SEQ ID NO: 181984 - RNA, 55 nt, Homo sapiens
caaacgccagcccggcgaccgcgcgggcggaaggagcagggaacgagccagcgag

SEQ ID NO: 181985 - RNA, 74 nt, Homo sapiens
gggaaaaaccccaagaggaagacaaacaaccagcccagcggaacacaggagcggggaaccgcgcaccgcgcgcc

SEQ ID NO: 181986 - RNA, 60 nt, Homo sapiens
gaacccaaaggcagcggagcacgggaaaagagggacagaccccgaagaggccaggacaaa

SEQ ID NO: 181987 - RNA, 77 nt, Homo sapiens
gcgccccccgacgcccgagcagcaggaggccccagaagagcaccaagcggaaaacgagacgaaggacaagggaccaa

SEQ ID NO: 181988 - RNA, 71 nt, Homo sapiens
cagagcgcacggcgacgccccaggggaaaacccccgggaccagggagagcccgaccagagaaaaggcggaa

SEQ ID NO: 181989 - RNA, 83 nt, Homo sapiens
cgccaggcaccccagacaacgcccagggccgcaagagggaaggccgccgagacaccagagaagaccgggcccaggccagcagg

SEQ ID NO: 181990 - RNA, 71 nt, Homo sapiens
cgcccagcccccgagggcgggaacagaaacgaaccagcacaggacccaggaagaggagaacgccccaaaaa

SEQ ID NO: 181991 - RNA, 81 nt, Homo sapiens
acccccaacaaccagggcaagagacgagcgccaaagacagaagcaagcagaaaagagcaacaccgggggagcagggaggca

SEQ ID NO: 181992 - RNA, 71 nt, Homo sapiens
cccagccccagagagcggaacacagccagaaggagccacgccaccaccgcgcggcccacgcccacagagcc

SEQ ID NO: 181993 - RNA, 60 nt, Homo sapiens
aggaggagccgccagaacgcggaagcgagggggagcaaggcaaccgggcggaaggagcga

SEQ ID NO: 181994 - RNA, 68 nt, Homo sapiens
ccgaacaccccagcacgagccagggagcaggccggcgcaggcccaagagaaacaggcacgccgcacca

SEQ ID NO: 181995 - RNA, 62 nt, Homo sapiens
gggcacccgggcccgggaccccccgcgccgcagcaggccgagacgcaccagagccggaccgg

SEQ ID NO: 181996 - RNA, 86 nt, Homo sapiens
cccaggagccagggagagccgggaaacaagccaaaccgaaaggaagaggaagcacccgcgagaaagaagggcacagcgaaacagcc

SEQ ID NO: 181997 - RNA, 81 nt, Homo sapiens
gaacaacccaagcgaagaacccaccgagaagcgccgagaagcgcagaaagaagaaagaaaggaaagccggaaaaccgaggc

SEQ ID NO: 181998 - RNA, 88 nt, Homo sapiens
cagaaaacagaaacgaaacagaacagagagaagcccagccgccagacccacccggacccccagaaaaggaaacaaggaacaacaaagg

SEQ ID NO: 181999 - RNA, 80 nt, Homo sapiens
cccccccccagcccgccccaaaaggggcaaagaaaaaggagagaaaaagaggcaaaacaacaagaagaaaagagaaaaaa

SEQ ID NO: 182000 - RNA, 67 nt, Homo sapiens
gcagggcaaaccagaaagacggaagcaagaccagagagcaaagggagaggaaaaacaaagaaaagac

SEQ ID NO: 182001 - RNA, 69 nt, Homo sapiens
cccacgaacccgaagcccccaaagagagaaccggagagcacccaacagagccccagaaccaagccagaa

SEQ ID NO: 182002 - RNA, 72 nt, Homo sapiens
accaagaaaggcgaaggaaaaccccagcgaaacaccaagaggcaacggcggcacaagaaaggagagcaagac

SEQ ID NO: 182003 - RNA, 84 nt, Homo sapiens
aggcgacaagaaccgacggaccccacgggcaggagagcgaaccagcaccgcaagagaaggagggggcagagcacggcaggcaga

SEQ ID NO: 182004 - RNA, 75 nt, Homo sapiens
cgagcggcacacgggacaaccaagagcaacagaccacggcgcagccggaaagccagaaaaaggcgccccgccagg

SEQ ID NO: 182005 - RNA, 61 nt, Homo sapiens
agacaaccaggcaagcggaagaaccgaacacacaaagcagaaacaccagaagggaggaaga

SEQ ID NO: 182006 - RNA, 70 nt, Homo sapiens
acccagaccagcaaaagagacaagaagcaacagaacacccaaagaaagagcaccaggaagaagaggcgga

SEQ ID NO: 182007 - RNA, 86 nt, Homo sapiens
cgacgaaagccagcgagccccagcccagaacaccagcaggaaaaaagagcggcagaaggccaaacggccgagcaggcgagcgaaga

SEQ ID NO: 182008 - RNA, 77 nt, Homo sapiens
cggccggaagacaccggcccgccccccaaagcgaagccaaagcgaaggcaaaggccaagaaggcagggaaagggcca

SEQ ID NO: 182009 - RNA, 84 nt, Homo sapiens
ccaggccggggagcggcacggcgaggcccgcaagcgcaaggaccaagaacgcccagcccgcgggcaccggcagaaaggaggagg

SEQ ID NO: 182010 - RNA, 72 nt, Homo sapiens
ccaccgaaagcggcgcaacgaggcccaagaagcccaccgggaaggaaaagcaggggaacccggcggacgggc

SEQ ID NO: 182011 - RNA, 63 nt, Homo sapiens
gaaaacggacacccccggcagacaggaccacgaagcaacgaggcccagacccacacacaaaga

SEQ ID NO: 182012 - RNA, 77 nt, Homo sapiens
ggagggaaggcggcacaacaaagcacagcaggagacgggcagacaacgaacaagcgaagaaccagcagcaagacaac

SEQ ID NO: 182013 - RNA, 50 nt, Homo sapiens
agaggacagcggccggacgcaggaagaagcaagcaaagaacaaaacagga

SEQ ID NO: 182014 - RNA, 73 nt, Homo sapiens
agaagagggaaagggggggagcagaaaccgggcaaacgaccaggaaccaaggacaggacgaaggaggccagcc

SEQ ID NO: 182015 - RNA, 101 nt, Homo sapiens
gagcagggcgggcacaccaccccacaccaccacaccaagacagcgcacgcccagggagccgaaggcccagggcgacacgagaaggcggccagcggggaagc

SEQ ID NO: 182016 - RNA, 73 nt, Homo sapiens
gaacaggcaggaaagaagacgccacaaacgaaggacggagcgcgccagcgccgcagcggccacaccacgacgc

SEQ ID NO: 182017 - RNA, 54 nt, Homo sapiens
cggaacaaggacggaaaaaagaccgaccaggggagagcacaaggcgaacaagcc

SEQ ID NO: 182018 - RNA, 88 nt, Homo sapiens
ggacaaccaacggccaagaacaagaacaaaggccgcgacggagcacccggcaccacagccgccgcccaagaggcaaagagaggacaga

SEQ ID NO: 182019 - RNA, 76 nt, Homo sapiens
ggaagaacaaacggaaaaggccaacgcccaagggagccggcccaggaggacagaccggaacacccagaagaaagcg

SEQ ID NO: 182020 - RNA, 81 nt, Homo sapiens
gagaacgacgggagcggcggagaaaccagagagaaccgcaccaagaagcacgaggggagccagaagaaaagagacggaaaa

SEQ ID NO: 182021 - RNA, 84 nt, Homo sapiens
ggggaggggcccggaggagcagccccagggagagccgacacgaggaccaaaccgcagcgaggaaagcggaacccacaggagaga

SEQ ID NO: 182022 - RNA, 45 nt, Homo sapiens
cagccaacacggcacccacaggcaaacaccagcaacacccgggac

SEQ ID NO: 182023 - RNA, 84 nt, Homo sapiens
gccaccccgcgagcgaccccccgagccccccagccacccaagaggccccgaagaaaaagcaccggagaccagaaggagaagggc

SEQ ID NO: 182024 - RNA, 72 nt, Homo sapiens
aggccaaggggcccgggcaggccgaacacaggagaagaaaagaagcaaccagaaaggaggaagacgcacgcc

SEQ ID NO: 182025 - RNA, 62 nt, Homo sapiens
agggcggcacacgaggacccgaaggccacaccgaggaggcaaaaggaccgccaaaacgacaa

SEQ ID NO: 182026 - RNA, 75 nt, Homo sapiens
aacaaaggaaccggaaaagcaaaacagggcggcagggaccgggggaacagaaagcaacgaggccgcaaagcaacg

SEQ ID NO: 182027 - RNA, 78 nt, Homo sapiens
ccaagagaccgcgcaccaccaggacagcaaaggagaaccaggagaaagaggggaagaggcgccggaaaaccaggcccg

SEQ ID NO: 182028 - RNA, 82 nt, Homo sapiens
cgcgagcggggaaacagcacaggggagaacagacacagaacaggcccaaacccggaaaaagcagccgaagaccagcgggaaa

SEQ ID NO: 182029 - RNA, 73 nt, Homo sapiens
ggaagcgagacccaggccagaaccaacaggggacaacagagccgacacagccaagaagcagagcaaaacagga

SEQ ID NO: 182030 - RNA, 79 nt, Homo sapiens
acagaccaggacaggccagggcgcccaacagaaggggaaaaaacacgaaagaaaaaaaacggccagaaaacggaaaacc

SEQ ID NO: 182031 - RNA, 95 nt, Homo sapiens
agcagccaggagcagagcgacagcggcgagcagaacacggcgagcgggaaagcgcaaagccgacgaggagagaccccgcagcggacaagacagaa

SEQ ID NO: 182032 - RNA, 84 nt, Homo sapiens
aagaagacaaggaaaaagcgccaagggccccggaagcacggacagagccgcaggcaggaagaagagccacgcagagggccacga

SEQ ID NO: 182033 - RNA, 85 nt, Homo sapiens
cccggaggaggcgaagcgagaggacagcaaaacagagagaacccaccaaccaaagaggaacacagaacggagacccggcaaacca

SEQ ID NO: 182034 - RNA, 50 nt, Homo sapiens
accggacagagagccagaaacgaagcaagcggcaccacgacaaccccaca

SEQ ID NO: 182035 - RNA, 75 nt, Homo sapiens
ccggaccagaccggggggaaaggcgacccgccccgaagccgccccccaggaagagaacccaagaaacaaaaggca

SEQ ID NO: 182036 - RNA, 74 nt, Homo sapiens
cagaccagagggagaaaaaaaaaacccagaggcaagccaaggaaagcagacccgaagacaacccggagaagaaa

SEQ ID NO: 182037 - RNA, 71 nt, Homo sapiens
gaagaggaacccgaaaaccccaggcagaacaagaagggcaaccaggggggaaggagggagcggagaacgcg

SEQ ID NO: 182038 - RNA, 36 nt, Homo sapiens
cggagaaaacacggagaagagagcacccaacgagag

SEQ ID NO: 182039 - RNA, 69 nt, Homo sapiens
gagagaagcagaacccacagagagccaggaggagggaaagacaaaccaaggaacaggaccacaacaacc

SEQ ID NO: 182040 - RNA, 77 nt, Homo sapiens
agagacagaggcaccccggacagagacggaagcacgaaacggagccaccaccaccccgagagacggaccggaccacc

SEQ ID NO: 182041 - RNA, 84 nt, Homo sapiens
caacgcggccgggccaagcagagaacacagccagaggagaccgaagaagacggagaccaaacaggacagaagccaaccaaaaga

SEQ ID NO: 182042 - RNA, 75 nt, Homo sapiens
ggcggagcgacggggaggcgcggccaacggggccacaaggggcggaacacggaaggaaacaagaggcaaaaacaa

SEQ ID NO: 182043 - RNA, 83 nt, Homo sapiens
cccacagcccccaccaacacaggaagaggaggcagcgacaagacggagacaaaggggagccagcgaagccacgcgcgaacagc

SEQ ID NO: 182044 - RNA, 75 nt, Homo sapiens
cgcaggacccaaagcgaagcggaggccccagggacacaaaccagaaacgcaagaccggcaagggcaggagaaaca

SEQ ID NO: 182045 - RNA, 80 nt, Homo sapiens
ggcgccagaggacaaggagaccaaagagaacaaccccgaagaaggccccgcgacacccaaggaggcagagaacagggccg

SEQ ID NO: 182046 - RNA, 81 nt, Homo sapiens
gaccacaagccacgaagaagagccggaacaagcaacggcagaaaagcggaaggccaaagacagacgggcccagcacacagg

SEQ ID NO: 182047 - RNA, 61 nt, Homo sapiens
cacgccgggccagcgacggaccccagccacgccgccaggagcccgaacacagccacgcaac

SEQ ID NO: 182048 - RNA, 50 nt, Homo sapiens
aggacaagaagacaaggcggggcaccaggcccagacggcgaacccgagca

SEQ ID NO: 182049 - RNA, 79 nt, Homo sapiens
agccgacggcaaagggcgggggcaaagcggagaccggcgaaaggcccgagcgagggacggacaagacaaaggagaccgc

SEQ ID NO: 182050 - RNA, 81 nt, Homo sapiens
acgccaacgagcggcgcggacggcgcgcggacaccaggcgggccggagaaggggcgacgcgggcaccccccgaaggacaac

SEQ ID NO: 182051 - RNA, 95 nt, Homo sapiens
cgagagggacacgcaggacgagcggccgaagcagcgcggacccagcagccagcgaagccccaaggaagccgggacgcccacagacccagcagcgc

SEQ ID NO: 182052 - RNA, 71 nt, Homo sapiens
cccagaagcgcaaaccacacaacaaacggcaccaacgggccacccgcacggcagcaagaggaaagccgccg

SEQ ID NO: 182053 - RNA, 77 nt, Homo sapiens
cggaagcacggaacccaaaggcagcggagcagcaagaggaacagagaaacaccgagcagggcacgaggaccaggcag

SEQ ID NO: 182054 - RNA, 63 nt, Homo sapiens
aggagaaacacacacacaaagaccggaaaaaaaggggggaacccagaacagccgaaagagaaa

SEQ ID NO: 182055 - RNA, 43 nt, Homo sapiens
cccgggggccagagccaggggacagagagcagcagcgccaggg

SEQ ID NO: 182056 - RNA, 65 nt, Homo sapiens
aaaaaacgggagggaacaaagaaaacgcccacgggcagcgcgcaaaagggaggcaaccgggaaaa

SEQ ID NO: 182057 - RNA, 77 nt, Homo sapiens
acccagaagcaccacgaaggacgcgcggacgcagacagacccgacaaagacgcacaacggccaaagcgaaaaaagcc

SEQ ID NO: 182058 - RNA, 95 nt, Homo sapiens
gagcccaggagcgccacgcgcggaaggcagcgcccagcagcgcagccgagagaaccgggaaagaagacacaagaaaaggagccgaggagggagac

SEQ ID NO: 182059 - RNA, 48 nt, Homo sapiens
aaagagaaaccccaagccaaagggcgggaaaacggcacaaggcgacga

SEQ ID NO: 182060 - RNA, 64 nt, Homo sapiens
aaggacaccaaagcaaacacaagaagggcacccagacgcaacagcagaaaacgcacacaaccca

SEQ ID NO: 182061 - RNA, 78 nt, Homo sapiens
aacaagcgcggaccggaaacagagcaaagcagcgacaacaaagacagaggaagaaaaacagacagaccaagaaagagc

SEQ ID NO: 182062 - RNA, 87 nt, Homo sapiens
ggcccaggaggcggcaggacggccaagaccagcgcgagggcccgggcaaggcccgacagcaaggcgccaccggaagaaacgggaggg

SEQ ID NO: 182063 - RNA, 82 nt, Homo sapiens
gacgccggggcagccgccccgccacccccacggccacccaccaggaccccgcagagccgccccagagagagcgccgcacacc

SEQ ID NO: 182064 - RNA, 77 nt, Homo sapiens
gggaaacggcacaccaggcggcaggggcaaccagacgggccaagagaaggacggagaagcgaaagccagaccggcaa

SEQ ID NO: 182065 - RNA, 84 nt, Homo sapiens
gcgagggccccaggaccccccgggccccggaccaccggaccgaggcgaggcccgggcagcgggccagcgggaggggccccggcc

SEQ ID NO: 182066 - RNA, 76 nt, Homo sapiens
caaacaacacagaacagacgagcaggacgcaaaacgggagagcagagagagagcacgagcaaagaaaaacaacagg

SEQ ID NO: 182067 - RNA, 77 nt, Homo sapiens
ccgaagcaggaagaccggagggagcgcagcacagcggggggaggaggggggggccgagacaacaagaaggggaggaa

SEQ ID NO: 182068 - RNA, 92 nt, Homo sapiens
gccggcggcggcggcggcggcggcggcggcgcagccgagaagccaggccccggcagcaaggaccccaaggccgacagcggcgggccacagcg

SEQ ID NO: 182069 - RNA, 67 nt, Homo sapiens
cggagcggcgcacggcgaccccgagcccacgaaaccaccaaaccaaaaccagccagcggagcgaggg

SEQ ID NO: 182070 - RNA, 59 nt, Homo sapiens
cccagacccaaagcgaacaagggcagaaccaaaaccagaacccaagaaggcagaagcca

SEQ ID NO: 182071 - RNA, 75 nt, Homo sapiens
ccagagcaggacaagaagcaacagccagccgaccggccaaaaaggaggagaggagcaggcaggaaacacgaagaa

SEQ ID NO: 182072 - RNA, 72 nt, Homo sapiens
aagaagcaaaaccacgccagaaccgcaaagaagaacaccaagaaccagaccagggggaggaagcgggcccgc

SEQ ID NO: 182073 - RNA, 40 nt, Homo sapiens
gcccccaaggagcgggacccagcccacggaggaagaagaa

SEQ ID NO: 182074 - RNA, 63 nt, Homo sapiens
caacaccggcagaccgcccagagagaccggaccgcacaagcagcagcagcggcaccaagcgcg

SEQ ID NO: 182075 - RNA, 79 nt, Homo sapiens
cgagaccgcagaggggcgacccaagaagcagggaggcgcgggcgaacccccgagaaaggagacaaggcagaaacagaca

SEQ ID NO: 182076 - RNA, 68 nt, Homo sapiens
gaagcaacgaagcagcaaaaagcggaaaaaaacaacggggcgaggggccgcagcagaccgagagacac

SEQ ID NO: 182077 - RNA, 73 nt, Homo sapiens
caccagaagcaacgccagcggaaccggagacaagcccaggaaagcaacaggccagaggagggacacaaagaac

SEQ ID NO: 182078 - RNA, 64 nt, Homo sapiens
caggccgcgagcagcggacgccggccgccgcaggagcgcccgggggcggagaaggccaggcagc

SEQ ID NO: 182079 - RNA, 75 nt, Homo sapiens
cagcacggaggaaagaggagagaacccaacacagggaaaggaaccgcggacagaaaaaccagacaccaaaggaag

SEQ ID NO: 182080 - RNA, 70 nt, Homo sapiens
aggccacgaacacgccggagccgccaggagccgcagaagccgccgcgggaagcaacgggaaacggagaac

SEQ ID NO: 182081 - RNA, 84 nt, Homo sapiens
caagggcaagaagaggcacgagagccccccacacagccacacagacaccgccacaggagagagcaagaaggaagaaaccaaacg

SEQ ID NO: 182082 - RNA, 75 nt, Homo sapiens
gcaagaggcaccaacagaacaacacaaaggcagaaaagaagcccagaagcggaaggcgccaacaacacgaacagc

SEQ ID NO: 182083 - RNA, 75 nt, Homo sapiens
gcacggcaaccgaaagaacaaaacaccaccggcaagggaccaagaaaggcccagggaccaaagcccggacaaggc

SEQ ID NO: 182084 - RNA, 34 nt, Homo sapiens
aaggacggaaccagccagaccgcacgaaggggag

SEQ ID NO: 182085 - RNA, 78 nt, Homo sapiens
cgggccgcaggaccggggaaggagcacagcacggggagagaagacacaagggcccagggcaccccaaagccagcacac

SEQ ID NO: 182086 - RNA, 82 nt, Homo sapiens
ggagggcggcccggccagcagccaccaagggcaccaggagaccaccaggagccgggaaagcagcaaagggggggggcggcca

SEQ ID NO: 182087 - RNA, 74 nt, Homo sapiens
ggaggaagaaacgagagcaggagagagaggcggcaaaacaggaaaacaaggacggaaacagcagaaacagcagc

SEQ ID NO: 182088 - RNA, 76 nt, Homo sapiens
gcggggaacgcgccacggaccgcgggacaagaaaacagcgggcaaaaaaacagcacagcagagaacggagcagccg

SEQ ID NO: 182089 - RNA, 56 nt, Homo sapiens
agagccggaacaagcaacggcagaaaagggacggaaaaggcgcacacgacccggag

SEQ ID NO: 182090 - RNA, 91 nt, Homo sapiens
gagcgccaagagcccagcaccacggcacggaaggggggcggccgggaggaagcgcaagcaccccccgggggcacaccacgagaggacgcac

SEQ ID NO: 182091 - RNA, 74 nt, Homo sapiens
gccccgagaacgggaccacaggaccggcccaaggggcccagagaacaagccccaggaagacacccagacccagg

SEQ ID NO: 182092 - RNA, 80 nt, Homo sapiens
gggccgagaaagcaaacagaaaggccaaaacccccaagggcgacaagcacaaacagagggggcagaaggccaagacccga

SEQ ID NO: 182093 - RNA, 68 nt, Homo sapiens
cagaagggcaccaccggcagaaggccgcccgaccacacggaccgaaaagacgcggccccaaaggaaac

SEQ ID NO: 182094 - RNA, 73 nt, Homo sapiens
cgggggagagccacggaagccgacagacaaccagggcccaccacgccagcgcacccgggccccccaacagaga

SEQ ID NO: 182095 - RNA, 89 nt, Homo sapiens
ccgccgccccccagaggcgccggagcccggaacccgccggagccagccagccgcccgagcaccagcaggccacggcgagccccgaggac

SEQ ID NO: 182096 - RNA, 82 nt, Homo sapiens
gggagccggggcaccacagagagcgggcacccaaccgccgcagacccgaacagaccgaggcgcaagaccacaagggcaggca

SEQ ID NO: 182097 - RNA, 74 nt, Homo sapiens
ggaacacagcgccgcccccggccaaaggaaccagggccaccgcagaaaggccgagcacacggcggcggcgaagc

SEQ ID NO: 182098 - RNA, 88 nt, Homo sapiens
aaggacagacccagaccgagagccaggcagaaaagaaaagaagaaaagaaagagaaacgggacagcaggaggaaaggaagagaagaaa

SEQ ID NO: 182099 - RNA, 66 nt, Homo sapiens
ggaaacgaacaacagggaaggggagagaagaaaagcagcaaccccagcaaaaggaacgccgcaccc

SEQ ID NO: 182100 - RNA, 69 nt, Homo sapiens
ccccacgcacgccggcgcccaaagagaccagcgccaccgacccgacaggccacagcccccaacaggccg

SEQ ID NO: 182101 - RNA, 88 nt, Homo sapiens
gcacgagcggaggcgcgagaagcgcagcgagcccagggaaagggagcagcaccggccacacccacagcacgaccggaacccagcgacc

SEQ ID NO: 182102 - RNA, 55 nt, Homo sapiens
gcagcccgcgcggagccaaaagcaggccccccggaggccagccccccgcccccag

SEQ ID NO: 182103 - RNA, 68 nt, Homo sapiens
ccaaaccaggggcaacccaaaaacccagaccagaacacacaagaaccgggagaacgaacaaaccaagc

SEQ ID NO: 182104 - RNA, 74 nt, Homo sapiens
ggaacaagcaccacagagcgaaaggggacaaaaaccggacgccgccccccccccccaaaccaaaaaccagcacc

SEQ ID NO: 182105 - RNA, 77 nt, Homo sapiens
gcgggggacgcccacaccagcaggacagggcagaccgccagcagcacagcaagccacagagagggccggcagggcgg

SEQ ID NO: 182106 - RNA, 67 nt, Homo sapiens
gaacagccagggacaggacagaggcaggacggcaaaagaagcacaggagacaaggggccacggggga

SEQ ID NO: 182107 - RNA, 82 nt, Homo sapiens
gcaccgcggagcaaaaaaagagcccgcaagaagaacagagacagcagccaaacccccagaaacaacgaacgagcaaggaagg

SEQ ID NO: 182108 - RNA, 76 nt, Homo sapiens
cccggagcgcgcggcggagaacaacgggggggaaagaacagggccaacccaccgagaccaccggggcaaccgcgaa

SEQ ID NO: 182109 - RNA, 72 nt, Homo sapiens
cggggagagccgccgcaaacccagaccgaagcgcaggagcgaaagcaaggcgaggaagacggaccggaacaa

SEQ ID NO: 182110 - RNA, 76 nt, Homo sapiens
ggacccggagcagccacggggccccagaccggcaggacacagacggaagggagggccacccacggcaggcccagcc

SEQ ID NO: 182111 - RNA, 76 nt, Homo sapiens
gccaaaccgcaagaacgagaacggaaacgcggggccagaacaccaggaaaggcccgagccaaaagacccagagaaa

SEQ ID NO: 182112 - RNA, 46 nt, Homo sapiens
cccggacccagccccggaacggccgagcgaccaggagaggagcccc

SEQ ID NO: 182113 - RNA, 84 nt, Homo sapiens
gcggccgccggagagccgacgcacgcgaggagcggcaggacgcgaggagcgggcaaggcggcgcccagcggccacacgccccaa

SEQ ID NO: 182114 - RNA, 75 nt, Homo sapiens
gggacggaggccagagagagacgacaggacgggaggcacaagaccgcaccagcacaaagagcccaacccggcagc

SEQ ID NO: 182115 - RNA, 84 nt, Homo sapiens
cgcccggcccggagcccccagcgcagcggccgcgggcggaaaacaccccaaaagccaaaagggaaaggaaaagaccaacaacag

SEQ ID NO: 182116 - RNA, 86 nt, Homo sapiens
gagcgcgccggaccaagcgggcccagaagcggccaccaggagagaacgccgcgccgcgcgacaacggcccggcaggcaaggccggc

SEQ ID NO: 182117 - RNA, 77 nt, Homo sapiens
gaaccccggagaaaaggccaagaaggcagggggagaggcaccagcaacagaccaaccgcagcaagcacagagacagg

SEQ ID NO: 182118 - RNA, 80 nt, Homo sapiens
gccaccggccacaaggcccgaggggggagaaagggagaaagagaggacgcagcaagggagaaacgaccccagccaacaag

SEQ ID NO: 182119 - RNA, 74 nt, Homo sapiens
cgaagggacaggcgcaggaagaagaagggacacccacagcacagggaagagcgcacaaccacccagggccggcc

SEQ ID NO: 182120 - RNA, 72 nt, Homo sapiens
cgggcgcgagggcagaaccgggcccggcagaaagcccaaagagcgcgcacggaaaaggggccaaacgcgcgc

SEQ ID NO: 182121 - RNA, 60 nt, Homo sapiens
ggaccgggaaggagcacccaggaccaccagaacggcccggccagaccggagggccgggag

SEQ ID NO: 182122 - RNA, 75 nt, Homo sapiens
cccgagccagccccgacagcgggaaccaaagagcacgaggagcagcacggacgagagaccgcacaccggaggcag

SEQ ID NO: 182123 - RNA, 55 nt, Homo sapiens
cggggccggggccgcgcgcccacccaacccgaggcaccagacccggaggagcagc

SEQ ID NO: 182124 - RNA, 109 nt, Homo sapiens
gccggcaaccaccccgcgagaaggaggagccccccgcccggcagcgccccgcgagaaggacaccagggcggacacggacgcgcggagaggagaagcaaggccccgcaga

SEQ ID NO: 182125 - RNA, 64 nt, Homo sapiens
agggggggcggcggggcgggaggaacgggggagcccacaggagccagacgccagacgacaaaag

SEQ ID NO: 182126 - RNA, 79 nt, Homo sapiens
ggccagccgcgggcgcccccacgcgggccgggggcgccggccacagcgaggcgagagccaagcgaacgaaaccagaggg

SEQ ID NO: 182127 - RNA, 80 nt, Homo sapiens
cgaagcgggagagccgacgagcgcgcacaacgcaggaccggcgccgaaggcccgccagggcagcagcgccggagcagcac

SEQ ID NO: 182128 - RNA, 40 nt, Homo sapiens
caaacacccccagacaaagagcgccggagaaggacaggcc

SEQ ID NO: 182129 - RNA, 73 nt, Homo sapiens
gggaaggaggagacaaaagaagagagacacaaagagcacaaaaaagcggaaaaacgaggcggacaggagagcg

SEQ ID NO: 182130 - RNA, 79 nt, Homo sapiens
ccgagacgcaccgcgggacgggaaccgcgacacaagcaaggccaagacaggggacagccggccgaacggcagccccggg

SEQ ID NO: 182131 - RNA, 58 nt, Homo sapiens
agccacagcaagcaggaccaaaggccagaagccagggaagcaaaaacaacgacggggc

SEQ ID NO: 182132 - RNA, 71 nt, Homo sapiens
ggggcaacggagaaaacccggaaccgcgacggcggcaggccgggagagagcgcgaaccggaaaaagaacga

SEQ ID NO: 182133 - RNA, 45 nt, Homo sapiens
aaacggccaagagaagaagggaaagaaggacaaacagaggccgga

SEQ ID NO: 182134 - RNA, 82 nt, Homo sapiens
cagaggagggcccaccgcgaagggggcagagacagaccggaccgcacaagcagcagcagcggcaccaagcgcggggacagag

SEQ ID NO: 182135 - RNA, 77 nt, Homo sapiens
aagagcggagacacacaagggcagccaaacgaggaagcgggcaccaacagacaaccagggcaagcagaggcaaaggc

SEQ ID NO: 182136 - RNA, 79 nt, Homo sapiens
ggacaggacgccgaggaccacggagccggagaaacagaagcgggacaccgggaacagggaaaagacgcgaagaagagaa

SEQ ID NO: 182137 - RNA, 78 nt, Homo sapiens
ggcccacaggggggggcaaacccgagagaacgggaccacagaaacggccagggcaaccggggcaggcacaggacaaca

SEQ ID NO: 182138 - RNA, 72 nt, Homo sapiens
agcgccgcgggccgcaggccgcgagcagcggacgccggccgccgcaggaggcacggagccagcagcagcaag

SEQ ID NO: 182139 - RNA, 84 nt, Homo sapiens
accaagagggacagcagaggaggaacacagcggggagaaggcagcaagcccggcccgagagccacacgcggcagccgaccagcc

SEQ ID NO: 182140 - RNA, 81 nt, Homo sapiens
cagcgccggaaacgccacgcgccgcgcccggggagacagaaacgaggcgcccccagcagcaggaggacgacgacaaggcag

SEQ ID NO: 182141 - RNA, 81 nt, Homo sapiens
cgggccaagaaacggagaaaccggaggacccgccgcaagcccagagaagagaggagcgggccgcccgcgagcaccagggcc

SEQ ID NO: 182142 - RNA, 34 nt, Homo sapiens
aagaagagaccaacagcaaaaaaacagaaccgga

SEQ ID NO: 182143 - RNA, 84 nt, Homo sapiens
ggaccagcagcgcgccgccgcccaggaagaggcagaaaccaggcagaacgaacgggaaagagcagaaaccacaacggagcgaaa

SEQ ID NO: 182144 - RNA, 78 nt, Homo sapiens
cacaacccaagaaacggggacaagaacccaagaaacaggaaaaaacccaaaacaccaaaaggaccagcgagaagacaa

SEQ ID NO: 182145 - RNA, 77 nt, Homo sapiens
aaagcagcgccagcaggggggaagccagaacacgccaaggcaagagggaagccggagccacagaagaggaccgaagc

SEQ ID NO: 182146 - RNA, 80 nt, Homo sapiens
caagagcgcccgcgccgagacaccccagccccccaggagcaggagcaggaccaccgagaacacccagcgggaggacaaga

SEQ ID NO: 182147 - RNA, 71 nt, Homo sapiens
agccgcaggcaagggacgaccaggaggagggcccagcagaggggaagacacacgaagccggcaggaagaac

SEQ ID NO: 182148 - RNA, 66 nt, Homo sapiens
aaaaccgcacagagacgcaaacaaagacccggacccgaaagaagacagaaagaaaccaggcaccaa

SEQ ID NO: 182149 - RNA, 75 nt, Homo sapiens
cgacaagcacccccgaggcaaagaccacgccgagaggacgggggaggggcaggcaaccagaggccaggccagaga

SEQ ID NO: 182150 - RNA, 59 nt, Homo sapiens
agacagggcaccccggggccaaacacagaagcggccccggagagggaaaggcggagcaa

SEQ ID NO: 182151 - RNA, 66 nt, Homo sapiens
ccaagaggaaggcgcggacaggcccgccagccaccgcagaggcgaccccaggacggacgacaccca

SEQ ID NO: 182152 - RNA, 54 nt, Homo sapiens
ggaaacaaagcagaacaggcacaagcaggacaaggccagcaacagaagaaagca

SEQ ID NO: 182153 - RNA, 83 nt, Homo sapiens
cggcagccgcggaccaccgccgccaggagggaacaggcacgccccacccgccagccgagcccccgacgcagcacaaagccccc

SEQ ID NO: 182154 - RNA, 83 nt, Homo sapiens
cggcaggagccccacgaggaggagcgcaccgcgcaagccaacacgggagcccacagccccaccaccaggacaagaaggagccc

SEQ ID NO: 182155 - RNA, 27 nt, Homo sapiens
ggcccagcgaaacaaaccaacacacga

SEQ ID NO: 182156 - RNA, 73 nt, Homo sapiens
cagccgaccgagcccaggagcgccacgcgcggaaggcagcgcccagcagcgcagaggaacaaagaccgacacg

SEQ ID NO: 182157 - RNA, 69 nt, Homo sapiens
agaaccgacaaccaagggccccgcggaccaaggaagaacccgaagcaccgggggcagcacgccgaagga

SEQ ID NO: 182158 - RNA, 73 nt, Homo sapiens
accccaccggacccggaagcaggcggagcccggcacgggcaaacagagcaggcagggaaccgccaaggcagag

SEQ ID NO: 182159 - RNA, 82 nt, Homo sapiens
gcaagggaccgcccgggaaggcacgggacagcaacagggacgcgacaccgcacgagcggcccaggagacagaacagacagaa

SEQ ID NO: 182160 - RNA, 66 nt, Homo sapiens
acgcagggcgcccccgcagccaaaccaagagcaaccgcacaaggaacaacaaagcacggaacggac

SEQ ID NO: 182161 - RNA, 83 nt, Homo sapiens
cagcaccaggagccacgcccagacgcgggcgcggaaaccgccgcggaggaccgagaggcggagagaagaaagggggacagaga

SEQ ID NO: 182162 - RNA, 56 nt, Homo sapiens
gggaccgccgcccggcaaacacggaaccaccccaaagcaaacagagcagaccaacc

SEQ ID NO: 182163 - RNA, 73 nt, Homo sapiens
ccaggggcccaaaacggggagccaagcgaacaggagacagcggagaaagagcccgggaagcacgaagccgaga

SEQ ID NO: 182164 - RNA, 69 nt, Homo sapiens
aacagcgccccagcgggcggaggggccgacgacgagccccgcgaggagcgcagcggagaggccagaacg

SEQ ID NO: 182165 - RNA, 68 nt, Homo sapiens
caggaggagaaaggaaacagaggagagaacacgggacaggcacccaccgcaggcaagaacagcagaaa

SEQ ID NO: 182166 - RNA, 78 nt, Homo sapiens
gggaacgcgggcgccgaaggagggccggcagcgcccgcggagacggaagaggaaggaagggaacacggacgacgagac

SEQ ID NO: 182167 - RNA, 40 nt, Homo sapiens
cccagcaggcggggaagagaaaggacgaccacagcggacc

SEQ ID NO: 182168 - RNA, 83 nt, Homo sapiens
gggcaagcccgccgcaaacagggcaacccgcagcacgcccagagggagccacacccgcaaaaacaaccaggcagagagacaag

SEQ ID NO: 182169 - RNA, 70 nt, Homo sapiens
aagagcgcgcaagaacagcacagacaggaacccgagccccccaaaccaagccagcagcccccccccacgc

SEQ ID NO: 182170 - RNA, 72 nt, Homo sapiens
ccggcaccaggaccaccgcggcagcacgcggcgcacaagacaagaggcacacgcaacccaaacgaaacacag

SEQ ID NO: 182171 - RNA, 74 nt, Homo sapiens
gaggagcggagcagcacgaacacccagacagcggggcaggcccaacaccgcaggaccgggacgcagaggcagga

SEQ ID NO: 182172 - RNA, 94 nt, Homo sapiens
cggcccgcgccgcgacaagacgggccgagcccgaggggcggagaccagaggcccacggccaacagcccagaccacagaggcacaccgaaccgcg

SEQ ID NO: 182173 - RNA, 76 nt, Homo sapiens
cccaacgcacagacaaaccaagcgccgacaacacccgaaccaagaccagaaaacagaaacgccggagaggaaaaag

SEQ ID NO: 182174 - RNA, 77 nt, Homo sapiens
agaccggaccgagacacgaccgcagccaaccgagcccaagcgcaacaccagcagggagggaagccgggcgccaagag

SEQ ID NO: 182175 - RNA, 82 nt, Homo sapiens
cagaccgccaagaggcacaggccacgaggaggaccccggccaaagccagggcccacccggacccgcccagccgccagaggaa

SEQ ID NO: 182176 - RNA, 83 nt, Homo sapiens
cgggccccgcgggccagcgcccggaccgcggacccgagaggcagcggaaaagagaagaagaagcggaaaggcagagaaggaga

SEQ ID NO: 182177 - RNA, 79 nt, Homo sapiens
gcggggcaggagcagcccaggaagcgagagcgaagccgccacccaaaccagcaaaccagggacgccagaggggaagccg

SEQ ID NO: 182178 - RNA, 91 nt, Homo sapiens
gaccccggccgccgaccgcggccccgccggccgccggccgcgcggggggaaacgccaagagcgagcggacgaggagcccggaagagaccag

SEQ ID NO: 182179 - RNA, 37 nt, Homo sapiens
caagcacggaccaaaagcgccgaccacacgccccggg

SEQ ID NO: 182180 - RNA, 87 nt, Homo sapiens
ggcgcccccaggagaggacggcggccggacgccggcggcggcggcggggacagcgacaggggcgcgaggcggaggcaaggcgcgacc

SEQ ID NO: 182181 - RNA, 46 nt, Homo sapiens
cccaaagaaggcccgcagaccgaagaggagaggaagacaccccccc

SEQ ID NO: 182182 - RNA, 74 nt, Homo sapiens
cacagcaagcccaggacccagaaaacagcaaagaagaagcaaggcgaagacaaggagaaacgacgccccgggga

SEQ ID NO: 182183 - RNA, 78 nt, Homo sapiens
aggcagaaaaacggaaggaggaaggagggccccggagcagccacaccaccgaggccccacccagcacgagcacagccc

SEQ ID NO: 182184 - RNA, 73 nt, Homo sapiens
gaggccggccggcgagagaagcgacagcagaccacagcccggcaggcccaaaaacccaaagggacagaagcac

SEQ ID NO: 182185 - RNA, 96 nt, Homo sapiens
ccgacgccacagcacacgggggcgcacggcccgggccaggcaacaacaccgagagaacaggaaaagagaaacggagaacggcaccaacgagcgaac

SEQ ID NO: 182186 - RNA, 74 nt, Homo sapiens
cacccacaaacagagagaaggaaccacccacgcaggcaggagaaaagaaagccagaaggaaggaagcaacgaac

SEQ ID NO: 182187 - RNA, 74 nt, Homo sapiens
cgcagaagaaggagggaccggcagaaacaccagaaaagacaagccgcaaaccgggaaccaggacaaagaaaaaa

SEQ ID NO: 182188 - RNA, 89 nt, Homo sapiens
ggaacagcagaacaagcgaggccgggcagagggaccacggggagccccacgaggagcgagaacccgagcagcgccagagcaacacaccg

SEQ ID NO: 182189 - RNA, 73 nt, Homo sapiens
caacacaaagagggaggccagccccggcacagaggcaccgaccgcaccggaggagaccgcaagggccgaaacg

SEQ ID NO: 182190 - RNA, 115 nt, Homo sapiens
gacgaaacccgcaccgaaagggccaagcaacggagaccgggggggcaagcaaccagcccgaaaacgcggcgaacccgggacaaaccaccaaaggccaggacgccgggacagacgg

SEQ ID NO: 182191 - RNA, 71 nt, Homo sapiens
cgaaacaaccgaaaagccacaaagggaaccaggaaaagaagaccagccccagacaccagaagcacgcaggc

SEQ ID NO: 182192 - RNA, 89 nt, Homo sapiens
ccggcccgccgcccggccaaggcccgcggaacagcggaggacgaagagcgggacccgagcccggaggcgaggagcccgagcaggcgcag

SEQ ID NO: 182193 - RNA, 75 nt, Homo sapiens
aagaggaccagggagggaaaagcagacccaagcggagggcgacacgagaacaaaaggaaaaagaagccaggaaac

SEQ ID NO: 182194 - RNA, 72 nt, Homo sapiens
caaccaaaaggaagacgggaacccggcgcaagggggcaagacggaagcaaggcaaaggaaagaccgagcggc

SEQ ID NO: 182195 - RNA, 76 nt, Homo sapiens
gacggggaggaagagcgccgggacccggagcaagcaaagcgccaaaccaaggcagagggcaccacagacaagaaag

SEQ ID NO: 182196 - RNA, 78 nt, Homo sapiens
cagcagcggagcaaaacggggcaggacggcaaaagagcccccagagagaaagagacccaaaacccaagacacgaagaa

SEQ ID NO: 182197 - RNA, 42 nt, Homo sapiens
cgagggaccgggacgccacagccagcaagccacacccagaac

SEQ ID NO: 182198 - RNA, 67 nt, Homo sapiens
aagagaggaggaggaggaggaggaagaggaggaagaagggggaaagggaaaagaggaagagagaaac

SEQ ID NO: 182199 - RNA, 74 nt, Homo sapiens
ggaaacgggcaggaggccggaggaaggaaagcccccaggcacagagagcaaccacaggagccggcaaaaaagca

SEQ ID NO: 182200 - RNA, 61 nt, Homo sapiens
accaagcgcgacaggccaggcagaacaaacggaccagcgaccgggcaagcgggccgcacgg

SEQ ID NO: 182201 - RNA, 78 nt, Homo sapiens
gcgggaagccccgcggcgccgcgaggacccgaggaggcgggaaacgaagaagagaaaaagaagaaagcaagaaaggcg

SEQ ID NO: 182202 - RNA, 54 nt, Homo sapiens
cgacaaaaagaccagaaaagcaagacgaaagaaggaagcccgggggaagacaca

SEQ ID NO: 182203 - RNA, 70 nt, Homo sapiens
gggaccgcgcccgcaggagaacacaggaaggaaaggccaaggcgagaagagagcaggagagggaacaaac

SEQ ID NO: 182204 - RNA, 67 nt, Homo sapiens
ccaaggacagagcagacacaccacccaacaggcgccaacggccgacaagcccgacgaagaccggcgg

SEQ ID NO: 182205 - RNA, 60 nt, Homo sapiens
gccccccagccagggaaccgcgaaaggggcggagaacaagagagaaacggagaaaaacgg

SEQ ID NO: 182206 - RNA, 85 nt, Homo sapiens
agggagcagaggacagaaccggaccggaggcaggccgcggagcgggacccagaacgcgaggcagaggcccacagagggacgccgc

SEQ ID NO: 182207 - RNA, 74 nt, Homo sapiens
caacagagagcccagaagagggaacaacgagagcgccccaagggagccagcgcagccacacaagcacaccacga

SEQ ID NO: 182208 - RNA, 77 nt, Homo sapiens
gcgggaccgggccaggccccgggaagcacaacagcgggcagacgcggagacgggcggacccaacacagccacagagc

SEQ ID NO: 182209 - RNA, 84 nt, Homo sapiens
cccggcgcgaggaggaggaggagggcgcgcggaggggaaaggcgccgaaaacaagccggaaggaaacacgagccccaccaaagc

SEQ ID NO: 182210 - RNA, 81 nt, Homo sapiens
agcgcgaaggaagcggggacacgcggccccagcgcccggccccccaccggacacccgcgggaaaccccccaggcaagaggc

SEQ ID NO: 182211 - RNA, 83 nt, Homo sapiens
cccgacggcagccccggcgcccccgaggacgcagaggcggggagagcgcgaggaccgacgaaaacggaaggagaggaaggaaa

SEQ ID NO: 182212 - RNA, 73 nt, Homo sapiens
cgcccaaaccgcgacagagaaagaagagcgcaagggcaccagaaggaaaaccaaacagccccaaaggcagagc

SEQ ID NO: 182213 - RNA, 72 nt, Homo sapiens
caaacacacaccgagcacggggaaaagaaacacagcacacaaggcggaggacccaggccaagccaccaagcg

SEQ ID NO: 182214 - RNA, 60 nt, Homo sapiens
cagcacccaaaggagcaacagacagcccccagaacagcaccagcgcacagccgaggggag

SEQ ID NO: 182215 - RNA, 80 nt, Homo sapiens
agaccaaaggcagggcaaggaaacggccacaaagggaacaggcacgccccacccgccagccgagcccccgacgcagcaca

SEQ ID NO: 182216 - RNA, 75 nt, Homo sapiens
gggaccgaaaccaccagagcaggaggaaagaaaggagcagcagccgcaaaacccagagagagcaagggaccagaa

SEQ ID NO: 182217 - RNA, 72 nt, Homo sapiens
gcccccaagcccacccaccagggaagcccgcacgcggaagcgccagaaccaaacacagccacagcagccaca

SEQ ID NO: 182218 - RNA, 67 nt, Homo sapiens
ccccgccgcggcacgaccccacaggaacgaaggggaccacaacacaggaacaagacacagggcgaag

SEQ ID NO: 182219 - RNA, 77 nt, Homo sapiens
gggcccgaggccccagccgagaggacgcggcggaaacgaaggccgacggagaggcggccagggaggcccacaagaca

SEQ ID NO: 182220 - RNA, 75 nt, Homo sapiens
accacgacgaagcggaaggcagaagacaaggcaccaggagaaagagcgcccccccagaaaggaaaacggaagcaa

SEQ ID NO: 182221 - RNA, 61 nt, Homo sapiens
cgcaaagacaagggagaagcggcggacaaggggagcggaggccaagggagcacgaggagag

SEQ ID NO: 182222 - RNA, 78 nt, Homo sapiens
gaagcgcgacaacacacacacagcgacagcacaagaagcgagagcagcaaaggcgccgagaagcacggaggcgaggaa

SEQ ID NO: 182223 - RNA, 75 nt, Homo sapiens
caggccagaccgacgaagagccggaaggacaccaggcagaaagagcccacaagacaaaaaagcagacggaaacag

SEQ ID NO: 182224 - RNA, 50 nt, Homo sapiens
ggccggacacacacccgaggaggggcgcacccaacgcgcaccgagaagaa

SEQ ID NO: 182225 - RNA, 64 nt, Homo sapiens
gcgcgcgggaaggcagcccgcacgaccagcgaaccgcccaagccaaggacagggccaaaggaga

SEQ ID NO: 182226 - RNA, 61 nt, Homo sapiens
ccaaaagcagggcagaaagcacaggggcaggcggccagcagcagcagagcaggcagggcag

SEQ ID NO: 182227 - RNA, 77 nt, Homo sapiens
agcccggccgccggcccccaacagcgccgcacaggaagaaacgccaggaacacaagaaaagacagcagacgagaagg

SEQ ID NO: 182228 - RNA, 72 nt, Homo sapiens
agaacagaaccaggccaagaaaggccaccccagccccacaccagcagggaaaaaaggccaagggacaccacc

SEQ ID NO: 182229 - RNA, 75 nt, Homo sapiens
cgggcgaagcgacgagccgcgaggagcccggaccaaaaaacaggccaccgaggaaagaggggcccaagcacaaaa

SEQ ID NO: 182230 - RNA, 81 nt, Homo sapiens
caacaccgggaggaggaagaaaagggaaacggcagaagaaacgccaagaagcgccggccgagagaggagagcagaagacga

SEQ ID NO: 182231 - RNA, 78 nt, Homo sapiens
cgccaagggccgacacaacaccgagacaacgcgacagacacagcaccggccccggcagcgggacgcaggacggcagcc

SEQ ID NO: 182232 - RNA, 78 nt, Homo sapiens
aggcgcaccaagggcgaaggagccggcccaagaggaccacccgcacccaggggacgcacggcccaaccccgagcaagg

SEQ ID NO: 182233 - RNA, 49 nt, Homo sapiens
gaaaggcgccgaagagacaacaggcacaaagagagaaggaacacccaca

SEQ ID NO: 182234 - RNA, 86 nt, Homo sapiens
acagagacagcagccaaacccccagaaaccccaaagggagaccacaccagggcaaaggaagaacgcggcaaaggaggaaaaaccaa

SEQ ID NO: 182235 - RNA, 73 nt, Homo sapiens
caaacaaaaacccggggcagacagagaagaacagacgccgcacccccgcgacacaggaacagggaggccaggc

SEQ ID NO: 182236 - RNA, 84 nt, Homo sapiens
cgagaagaagcagaggaagaacaagaagagaaccgaagcaaggggacacgacacagggacgggccaagaacccaggaggaggga

SEQ ID NO: 182237 - RNA, 85 nt, Homo sapiens
cacagcaaagcaacagaaacaaaagcaggcaaaggagcggggaaacccaagcaaaggcaccaagaaacccagaaggaaacaggac

SEQ ID NO: 182238 - RNA, 82 nt, Homo sapiens
agcagcgcggagggagagccagggggagaaggacggacccccaggcgccacccggagccaggcagaaaagaaaagaagaaaa

SEQ ID NO: 182239 - RNA, 72 nt, Homo sapiens
gccgagcgaacgcgcaacagggccgcacgcaagaaaaaggcacaaacccagcacagagaagacggcgacaag

SEQ ID NO: 182240 - RNA, 87 nt, Homo sapiens
agaggacaggggcgaacgccgccgggagacccagccggcgggcgagcaggaaacgaaggaggcccaaccacaaaaggagccgacgga

SEQ ID NO: 182241 - RNA, 79 nt, Homo sapiens
caggacgagaaaagcggagggcaagaggcacccaagccccagccgcgcacccacccgccagcaggggggagcacagagg

SEQ ID NO: 182242 - RNA, 75 nt, Homo sapiens
agaacgaagcccacaagaaggagggagcgccacagagcaaggggagcggaggccaaggggagcccgaagagagac

SEQ ID NO: 182243 - RNA, 71 nt, Homo sapiens
cccccaagagcgggacacagaagcggaacaagacccagaaaaaggcaaagcacaagaggaaaagcgggcag

SEQ ID NO: 182244 - RNA, 81 nt, Homo sapiens
aaagagcccgcggggaggcgcggccgccccgcgggggacgcagaacaacagaggcagcaggcacgaacgccaaaacccaca

SEQ ID NO: 182245 - RNA, 36 nt, Homo sapiens
ccagacagcgcacaacgccaggagacgggaggcaca

SEQ ID NO: 182246 - RNA, 40 nt, Homo sapiens
ggacccgccaccggaggagagggcaggcacgagcaaggag

SEQ ID NO: 182247 - RNA, 78 nt, Homo sapiens
cacaagcgggacgccccaggaaggagaacacacggagcacagaggaagcgaaaagaaagaagaaggagacaagaagaa

SEQ ID NO: 182248 - RNA, 51 nt, Homo sapiens
acccagaggaccacggcagccacgcaggcaccagcgcaagccccggggcag

SEQ ID NO: 182249 - RNA, 66 nt, Homo sapiens
gcccccggacgcccccccgcaaccccgacgacaagcccgacacccagcggcaccggacagagcgga

SEQ ID NO: 182250 - RNA, 80 nt, Homo sapiens
cacacaagacaccaccgcagagacacccggaagcaggcgaacgaaggcaaacgagcagacggcccaggcaaccacgacac

SEQ ID NO: 182251 - RNA, 66 nt, Homo sapiens
agccaggcgcaccacggccaggcaaagaaagacgacaaaggaaagggcgccaacaaaggagagaag

SEQ ID NO: 182252 - RNA, 70 nt, Homo sapiens
acgccaacccaggcgagagaaccaagaaaagggcacgacgaacaaacaccagcgagggacaggaccaaag

SEQ ID NO: 182253 - RNA, 81 nt, Homo sapiens
gcaccccacccgggccgcccgaaggagacagggaaacgaaaaccaccgggcaccacgagcccacgagagaggacagcccca

SEQ ID NO: 182254 - RNA, 68 nt, Homo sapiens
aacaacgaaaggagcgaagcagacaacgaggaccaccaacggcggcagcacgcgggagaggaagaggg

SEQ ID NO: 182255 - RNA, 72 nt, Homo sapiens
agagaacacagagaaagcagccaacagcaaagccaggaaagaacgcagaaaacaccagaagaacccggcgga

SEQ ID NO: 182256 - RNA, 69 nt, Homo sapiens
acacgccgagagacccaagaaacagggaagcccagaggcacggggcagaacaccaacagagggccgacc

SEQ ID NO: 182257 - RNA, 77 nt, Homo sapiens
ggaggcaacggccaaccggcaagaccagacgggaacgggagacaagcgcagcgaggcccagaagaaagagaagagcg

SEQ ID NO: 182258 - RNA, 79 nt, Homo sapiens
cgaagaagacgccaaacaccccgacggaccgccgccagacagcgaagggacaacagagaccagcagccagaaagaccca

SEQ ID NO: 182259 - RNA, 84 nt, Homo sapiens
acccaaggaggacccaggagacgagagagcgaacgccagggacccggcaggccgcccccggcaagacgcgaggaagagggacga

SEQ ID NO: 182260 - RNA, 71 nt, Homo sapiens
agaaccaaaccccgaaggacggaaacaaaggccaacgggagcggccagagagggccgaggagaaagaggag

SEQ ID NO: 182261 - RNA, 74 nt, Homo sapiens
cccccgagaccccgcggaacgcccaccgcggagagcagcacgaccccagcacaggaaacgcaacacaaagagaa

SEQ ID NO: 182262 - RNA, 55 nt, Homo sapiens
aggaaccaccgaaagcggcgcaacgagagcacgcaacagaaaagaagacggccca

SEQ ID NO: 182263 - RNA, 82 nt, Homo sapiens
ccgcccagccccaagagcgggaccacaggaggaccgcgccaacaggacgaggagaccgaccaggagaccccagcggagacga

SEQ ID NO: 182264 - RNA, 78 nt, Homo sapiens
gaagccacccccaccccaccaagggccgggagaggaaagcggccgagaggaaaacagaagaaagagccaaaagacaca

SEQ ID NO: 182265 - RNA, 60 nt, Homo sapiens
ccggccgcagcacgccccgccgcaccccccggaacgcaaggccgggcgggggaggcgaga

SEQ ID NO: 182266 - RNA, 76 nt, Homo sapiens
agcgcgccgccccgggcaaaaggacgggagggcggccagggaagccaaggggaccggcgcggagcacagaccggcc

SEQ ID NO: 182267 - RNA, 35 nt, Homo sapiens
agagaacggcacacgcgagcgacgaagaaccaaga

SEQ ID NO: 182268 - RNA, 82 nt, Homo sapiens
caggccaagcgcccacgccggaccgggcagcccaggcacaggaaaacaagcccgggaccagaccagggacagcgagagcgga

SEQ ID NO: 182269 - RNA, 75 nt, Homo sapiens
gaccggcagcacacagcgcacaagcagccccaacaaagcaagaaagcgcccgcccgaccggggcacacacggaac

SEQ ID NO: 182270 - RNA, 113 nt, Homo sapiens
ggcggacgccacccgggccggcgggggcaggaaacgagcggcagcaacccaacccagaggcccagcccccggacacgggcggccggaaggcgaggccccgccagcccgccggc

SEQ ID NO: 182271 - RNA, 82 nt, Homo sapiens
ggccggcgcccgcacccaccgagaaccagccaccgacccgacgcacgacgaggcgggggaaggagagcgaacggcagacgag

SEQ ID NO: 182272 - RNA, 75 nt, Homo sapiens
aggaacagggcagcccggaggcacgcaagaagagagcagccaagggggggccccagcccggccgaacgggcgcac

SEQ ID NO: 182273 - RNA, 34 nt, Homo sapiens
aaaaacaccagaccagaaaaagcagcaagcccag

SEQ ID NO: 182274 - RNA, 72 nt, Homo sapiens
ccaacgcgcaggagacacacgcaaagaagaggcagggagcaagccgaggggaaagaaggaccacgaacaaag

SEQ ID NO: 182275 - RNA, 72 nt, Homo sapiens
gccccagaaaggaagaagcgaaaagcaaaaaacggcaaggaccagcggagcagccaggagagcaaaggggcg

SEQ ID NO: 182276 - RNA, 86 nt, Homo sapiens
ggaagacgcaccgcggacgcccgcgagcggcgcacgggccgaccaggcccaccgggaacccggcaccgagcgacacaccaggacgc

SEQ ID NO: 182277 - RNA, 65 nt, Homo sapiens
gcggaaaagcccaagaaacaaacaagacagaagagcagcacaggggaagagacagaaggcaggac

SEQ ID NO: 182278 - RNA, 78 nt, Homo sapiens
cccgccgacgggcagcacacccaccgagccgagagggacaggagcaggaagacgaacgaagcacaaccacaaaaacag

SEQ ID NO: 182279 - RNA, 79 nt, Homo sapiens
cgggcgcccaagcgacagcgcagaggggcaggagccgggagccaccgcgaaggcgaggcccgggcagcgggccagcggg

SEQ ID NO: 182280 - RNA, 75 nt, Homo sapiens
gacgcgaaccagccagcaccaagggcacacacccacaaaagcgaaaagccagacaggaacaccagacagaagaac

SEQ ID NO: 182281 - RNA, 67 nt, Homo sapiens
aggccccagggaagcgcagaaagcaggcgaacccgcggcgcaaaacgccggccagcggggaagcgca

SEQ ID NO: 182282 - RNA, 75 nt, Homo sapiens
accgcaaacggaaggagcgcaggagacagcaagaagagaacgcgaccgaaccagaagccaggcagcaaaccagga

SEQ ID NO: 182283 - RNA, 59 nt, Homo sapiens
aggagacagagggccgagaaggacaggacagaggcaggcgaaggccgcacacacccgag

SEQ ID NO: 182284 - RNA, 56 nt, Homo sapiens
accgggccaacgaaaggccgcaagcagggggaacacccgcccagccgccggaccca

SEQ ID NO: 182285 - RNA, 75 nt, Homo sapiens
gggccccccagagaagggccccggccccgcccgggcacagaggcacaacgaccgaagaagaagcaggagacacac

SEQ ID NO: 182286 - RNA, 53 nt, Homo sapiens
ggggcgccccacagaggggcgacggggaaaaagaaaagggcgaagacccgaag

SEQ ID NO: 182287 - RNA, 78 nt, Homo sapiens
gcagagcgggcccgcggaccagccagggcacggccgggacgggaagaaagcacgggaaaaggccgggcccacagggga

SEQ ID NO: 182288 - RNA, 89 nt, Homo sapiens
aaggggccggagggcagggggcagggcggcagaggcccagcacgacagagacccggaaagcgagcagcaaagacccagcacccaacaaa

SEQ ID NO: 182289 - RNA, 83 nt, Homo sapiens
gccgcccgagcgggacgccgggaccccgccgcgcaaaaaccgaggaaggagagggaccggaccagggcccagaagaaggagcc

SEQ ID NO: 182290 - RNA, 78 nt, Homo sapiens
cgccgcggagggaaacggcacgcgaggagggagggggccgggcgcccgcgccggcagaggaggcgagcacccgccagg

SEQ ID NO: 182291 - RNA, 77 nt, Homo sapiens
gagggagcgggccgcgacgggcgaacccccgcgcggacgccggcgcgccaacggaagggcggccacgcgcccaggcg

SEQ ID NO: 182292 - RNA, 96 nt, Homo sapiens
ccgagggcaggccgcgcacgcccaccaccagccggaaaagagggagccggaaacaaagaagaggagaaaaagccaaggaaaggcccacagaaagga

SEQ ID NO: 182293 - RNA, 68 nt, Homo sapiens
aggagaaaagagcagacgaagaagccaaaaccagaagaaggaacaagcgaacgacggagcagggagaa

SEQ ID NO: 182294 - RNA, 87 nt, Homo sapiens
gggccaccagaggcgcaggcgagacgacaacacaagaaccagggaggaaaaaggcaacggcagaaacacacgcagagccgaagccca

SEQ ID NO: 182295 - RNA, 37 nt, Homo sapiens
aaagagcagcgggaggaagagcaaacgaaaccggcag

SEQ ID NO: 182296 - RNA, 81 nt, Homo sapiens
cgccgcccgaggcccgcgaccgccgagccgcagccgccccgcggccaacagagccgccaccaacaacaccagggacacaac

SEQ ID NO: 182297 - RNA, 56 nt, Homo sapiens
gacaggcaaacaagaggggcaagaagcacgccagcagagaagcaggggaagaaacg

SEQ ID NO: 182298 - RNA, 72 nt, Homo sapiens
acaagcggaaaggacacagaggaaaggaaaggagcggaggcaggccaaagggaaagacagaaggaaaccagg

SEQ ID NO: 182299 - RNA, 84 nt, Homo sapiens
caccgccccagccagaagggcacgccagcggcgcgagaggaccaccggggcggcccggcggaggagaggaagaggcagaaggga

SEQ ID NO: 182300 - RNA, 78 nt, Homo sapiens
cgagccacccgcccgcccaaggcccgcgggcgggagaacggaaaaccccaacccgaggaagacgagaaaacacgcaga

SEQ ID NO: 182301 - RNA, 76 nt, Homo sapiens
gcggggacggccggcggggcgcgggagcccgaggccgcgggccacggaaccgcccagccccaagccccgccacggc

SEQ ID NO: 182302 - RNA, 81 nt, Homo sapiens
gggccaccaggaggcagaggagggagagacgcgagcccgagagggaacagagccccgagccacacaaccacaaccccaaaa

SEQ ID NO: 182303 - RNA, 68 nt, Homo sapiens
cagaaaccgaaggcacaaagccaaaaagaaggcggggacggaaaaggcgcacacgacccggagaaccc

SEQ ID NO: 182304 - RNA, 79 nt, Homo sapiens
aaggcaggggcgccagggcaccagacgggcgggaaagagaggcccgcgggaggaagagcagagcagaagagaagaggag

SEQ ID NO: 182305 - RNA, 47 nt, Homo sapiens
ccaggagcccgagagagaaggagaaacggaaccacaacaaaccagga

SEQ ID NO: 182306 - RNA, 76 nt, Homo sapiens
gccgggcccgagcaggaaccgaggagggacacacggcgcagcgaaacccgcagcacgagccaccagcacagaagaa

SEQ ID NO: 182307 - RNA, 74 nt, Homo sapiens
gagggggcgggggcccaacgcgggacaggaagggccgagcggcgggaaaggccgcaggagggaagcgcacggaa

SEQ ID NO: 182308 - RNA, 78 nt, Homo sapiens
cggaggcgcccggcggagcagaggaaccacacgcgacaggcgccgagcggaagaaccccagccacaaagaggaaaaac

SEQ ID NO: 182309 - RNA, 78 nt, Homo sapiens
gacgcgaccgaggggacgccgcccgccgcccgccgcaggccacccgggaacggaggaggggggacaccagcagcgccg

SEQ ID NO: 182310 - RNA, 80 nt, Homo sapiens
ggcggacgcgcagcggcaagaggaaaccgggaaggaccggaccgaggcgcgcagagcaggacgaaagaggagagaacgac

SEQ ID NO: 182311 - RNA, 78 nt, Homo sapiens
ggccaggcgaagcacgagcagaccggcccgaccgcccacagacccaaacaaagagcgcgcccaggagaagggagcagg

SEQ ID NO: 182312 - RNA, 78 nt, Homo sapiens
caggcccccaagccaccgaagccagcccccggagcccaacggagcgagcccagggcggggcgaaaggccacaaaccaa

SEQ ID NO: 182313 - RNA, 88 nt, Homo sapiens
gccgcgcgccgccgccgccgcccagagacgcgagcccgccgccgccgccaccacccacccggacacaggcgacagggggaccgcggcg

SEQ ID NO: 182314 - RNA, 64 nt, Homo sapiens
aacgggacggacaagggcgacgcagccccagccaagggggcaaaaggaaagcgcaaagccgacg

SEQ ID NO: 182315 - RNA, 50 nt, Homo sapiens
gacggagaaaacacgagaggcgcccaggagaacgggaccaggcagcccgg

SEQ ID NO: 182316 - RNA, 73 nt, Homo sapiens
ggaagagagcgcccaggaaggagccaaagcacaagaagaagacgagaaggaggcccagaggaaaaagacacgc

SEQ ID NO: 182317 - RNA, 60 nt, Homo sapiens
ccccacgcgaacccgacgacacccaacaccacccaggcagcccgagacccgcccaaccac

SEQ ID NO: 182318 - RNA, 67 nt, Homo sapiens
agagaggacgaccaaggagaccacgagaaggaaagagcgcccggcagcgcggcccagcggccgaccg

SEQ ID NO: 182319 - RNA, 74 nt, Homo sapiens
gcaacaaaaacaaggagagcccagcaacggacccaacagagcacgcaaaggaaaaaagcgaacgcaaggggcca

SEQ ID NO: 182320 - RNA, 80 nt, Homo sapiens
agagcgcccgagagaacagggggccgcggccaggaacggacgggagacacaggaagagcgggccaaccggggacgagcca

SEQ ID NO: 182321 - RNA, 34 nt, Homo sapiens
gggacccggacaccaagaaaccccagaagcgcac

SEQ ID NO: 182322 - RNA, 78 nt, Homo sapiens
gaacaagccaaacggacaggagaacggcgccacaagaaagagcaggacaagagaaagggaaccaagaccaggacaaag

SEQ ID NO: 182323 - RNA, 75 nt, Homo sapiens
cggaaaacaaggaccgcaccaggagaagcaaaaggaaggagcccgggccccccgcaacacgcaggaaggacggca

SEQ ID NO: 182324 - RNA, 58 nt, Homo sapiens
gcgagcccgcggggagggcaggaagaacaggggaaggaagaggcccacgaggaaggag

SEQ ID NO: 182325 - RNA, 86 nt, Homo sapiens
ccagcgcgagccccggaggggcgcggacccagcacccccgcacccacgcggcccgcgaaagggcgcaaagaaaacaagcacggggg

SEQ ID NO: 182326 - RNA, 78 nt, Homo sapiens
ggcggacggcggaggcggcgggacggcccgacaagcagaccggaagaccgacggaagaccacaccccgagggagccca

SEQ ID NO: 182327 - RNA, 65 nt, Homo sapiens
gcaacgaacaagggcaagggccaaaaaaggaaagaaaaaacaggaaacaaccgaagcagagcgaa

SEQ ID NO: 182328 - RNA, 59 nt, Homo sapiens
cacccacccccacagcacgcgcaacaacagaagacccgggaagaaggaaggccacccgg

SEQ ID NO: 182329 - RNA, 58 nt, Homo sapiens
gcaaaaaaagggcacagagcacacagggcaaggcgcggagagagagcggccgagcgag

SEQ ID NO: 182330 - RNA, 86 nt, Homo sapiens
cggggcagagaccgagggccggggccgggcccggcggcgggacccaggcgggaggcggcaggacagcccagagcaagcacacggag

SEQ ID NO: 182331 - RNA, 73 nt, Homo sapiens
ggagagcggggacgagcccaccggggacgagcaccagggcccacccccaagagagccgcagccgccagggacg

SEQ ID NO: 182332 - RNA, 73 nt, Homo sapiens
agcgagcgagggggggcgcgccggaaaccggagcgcgcagcagggggacaggaccagccggggacaccacaaa

SEQ ID NO: 182333 - RNA, 81 nt, Homo sapiens
gaacaaaccgaagaacagcgggaaagaaggcaaaacacgggggcgcggagaaacaagaaccccccaggaacagccgagccg

SEQ ID NO: 182334 - RNA, 71 nt, Homo sapiens
ccaagcgggaggcgccgcgggaaaaccgccacaaagcccccaagccacaagcaacgcgcaggccggaagac

SEQ ID NO: 182335 - RNA, 80 nt, Homo sapiens
gagccggacaggagccgccgccgccaacagcaaaacaagcacgacagggaagacccagaaaagaaacacaaaacaagcgg

SEQ ID NO: 182336 - RNA, 82 nt, Homo sapiens
ggcggagcaggagcggcggcgacggccacaggggcggcgacggcgcaggcgaagcgaaacagggaccaggaggagaagcaac

SEQ ID NO: 182337 - RNA, 43 nt, Homo sapiens
ccaaggaacgggcgcagcgagagcgccacgcagagccccgcca

SEQ ID NO: 182338 - RNA, 67 nt, Homo sapiens
aaaagccacccccgcacaacaccgccgcaccggagagcccgccggcgccgagggggcgggggacaca

SEQ ID NO: 182339 - RNA, 59 nt, Homo sapiens
cggaaaggcgccacaagggacaccaagccccacccaaggggagcaggaagaagagagcc

SEQ ID NO: 182340 - RNA, 67 nt, Homo sapiens
agagacaacaagggccacggacggagaacggaaaaagcccagaaaacgcacaaaaaaaagaagccac

SEQ ID NO: 182341 - RNA, 74 nt, Homo sapiens
aaggacaccccgccaggcaaaaggacgggccaacgcacggcccggcagagccagcaccccccgcggcagccaag

SEQ ID NO: 182342 - RNA, 89 nt, Homo sapiens
agagcaaaagaggaaccgacccgaagacccgaagaacaggcacacaccaacgggacgacaggaaaagccccaccgcgcacgaagcccag

SEQ ID NO: 182343 - RNA, 75 nt, Homo sapiens
gaggaggggcaccggggccaccccaggaaggcacaaaggcccagccaggcaaggccagggcgaccgggcaaggaa

SEQ ID NO: 182344 - RNA, 75 nt, Homo sapiens
ggggccccgcgccgcggccgagcagcggaccaagagcgagccagagcaaagcaccccaaacaggaggcagagagc

SEQ ID NO: 182345 - RNA, 89 nt, Homo sapiens
gacgcgccgcggccaggcagggaggagaccggcacccagacaggggcgaaggcagaggaaacgacaaaacggaaggcagagaccccaag

SEQ ID NO: 182346 - RNA, 90 nt, Homo sapiens
gaaacgaaaaaagcggaaaaccagagcaggcccggaagaaccacacgagagccagcacgcacaggagggacgccaacaggacacccccgc

SEQ ID NO: 182347 - RNA, 69 nt, Homo sapiens
acacccggcacccggggcgaaggaacaaggcagacgcagccacggcacgcgccaagacaggacgccccg

SEQ ID NO: 182348 - RNA, 80 nt, Homo sapiens
ccggacgagcgcaccagcgaccacaagacgccaaagaccacggaccagagagaagcggaccgcacggccgaccaaggccc

SEQ ID NO: 182349 - RNA, 67 nt, Homo sapiens
gacaaagaaaccagggagaacgaagaagaaagaagaacagaacggagccccacaccaaaagaaaaag

SEQ ID NO: 182350 - RNA, 37 nt, Homo sapiens
gggagaggcaagcacggaccagagaacagaaagccaa

SEQ ID NO: 182351 - RNA, 51 nt, Homo sapiens
ggcagcaaagaagaggcagaagaaggaacagagagagccggagaggacagc

SEQ ID NO: 182352 - RNA, 75 nt, Homo sapiens
cggcgaggagaacgcccgcggacgacccgaggggaaaagccccagagcggaaggcgaagcacaaacagaagagcg

SEQ ID NO: 182353 - RNA, 37 nt, Homo sapiens
cggcgccgaggacccccggcaggggggacacagcagg

SEQ ID NO: 182354 - RNA, 48 nt, Homo sapiens
aagaacagaagcaaggaagcgggcaacccaaaacccacaccagagaaa

SEQ ID NO: 182355 - RNA, 73 nt, Homo sapiens
ccggccccgcccggcgccgaggacccccgcgaaggaagagccaggaaagcaaaagggcacccgcccccaacca

SEQ ID NO: 182356 - RNA, 82 nt, Homo sapiens
ccaagagcaggaacaggagagcaaacaaagaaacagacccggacagaaccggcagccgagcagcagccgccccgaggcgaag

SEQ ID NO: 182357 - RNA, 59 nt, Homo sapiens
cacgacgcaaggacccacagaccggggaagggccgggccggggcacgggcccacggccc

SEQ ID NO: 182358 - RNA, 77 nt, Homo sapiens
cggagaacggccaggcggccccgagcggaacggagaaagcgaggggcagagaaacagcccagaagagaaaagaagcc

SEQ ID NO: 182359 - RNA, 79 nt, Homo sapiens
ggggcggagccaggagccccacggagcgcgcggagcgaacccaccccagggcgcaagagagccaacggaccacaacaga

SEQ ID NO: 182360 - RNA, 85 nt, Homo sapiens
ggaacgagagaaggaaaaggagagaggagacgagcgaaccaagaagcagaagaccgacgaggagacagacagcaaaaaaggaaaa

SEQ ID NO: 182361 - RNA, 79 nt, Homo sapiens
cgcgaccggaccgccccggggaaacccgggcgccgccaagagccgggcaagcaagcccacaagcggaacaaacggaaag

SEQ ID NO: 182362 - RNA, 82 nt, Homo sapiens
ggccacccaccccacagaggcaaagcagcccggaggagagcgggggcgggggagacaggacagccggcaccagcgaacagac

SEQ ID NO: 182363 - RNA, 66 nt, Homo sapiens
gaaagcggccagaggggagaagagcgacagagaacgacccccaggcaaaccgccccgcagcaccac

SEQ ID NO: 182364 - RNA, 73 nt, Homo sapiens
ggacagagccacccgacacccggcagaccaagcacaaagacaggggcggaaagcagggaaaacaccacaccaa

SEQ ID NO: 182365 - RNA, 79 nt, Homo sapiens
ccaagaaagagcgcagcgggagaagggaagaaggagaaagggccaaccccgaagaagcaaacagaaacgaaggagacag

SEQ ID NO: 182366 - RNA, 76 nt, Homo sapiens
cgcgccgaccccccacgcggcggcgccgccgacgagaaggagggggcagagcacggcaggcagaaggggccaaccc

SEQ ID NO: 182367 - RNA, 82 nt, Homo sapiens
ccaccaggagcagagcggaggccaccagcccaacaccaccgggaagcagcagaccaggcacaaccaaccaccgccaggagag

SEQ ID NO: 182368 - RNA, 61 nt, Homo sapiens
cccccaagcaccaggacacaggcagggccccgaacccagccaaagaagaaggacgagcgga

SEQ ID NO: 182369 - RNA, 118 nt, Homo sapiens
gcaacgccgggccgcgggcgcggacgccggcccgcgcgcgcaccccgcggacgccacagcgcgacgcaggaccagggcgcgcacgagccccagccaaaccaaagaccagggacggcgg

SEQ ID NO: 182370 - RNA, 56 nt, Homo sapiens
cggggcacgcccgcggccgccggacggccgggcgcggagaccaccgcccacgaagc

SEQ ID NO: 182371 - RNA, 70 nt, Homo sapiens
gaccagacaaaggaccggacaaagaggaggagaggagagccagagaaggacagggaagcacaggacaaca

SEQ ID NO: 182372 - RNA, 78 nt, Homo sapiens
ggccaagggagccgcgcaaaggccccggcaagaaggaccaccagggccaggggccggaggcagcggcaggcacggcgg

SEQ ID NO: 182373 - RNA, 87 nt, Homo sapiens
cggcggggggcgcgcaggccgcgacgagggcgcgagccaggacggcaacccccaccccaaccagcgccaccgcagccgccacccgag

SEQ ID NO: 182374 - RNA, 78 nt, Homo sapiens
gcaaggggacaggccccaaagcgcaccaaaccgagcccagccagaaccagcggcagaacagccggcgcccagacgaac

SEQ ID NO: 182375 - RNA, 81 nt, Homo sapiens
aggcgaccagagagcggcggaaaggaaagcccgacagaagcaccgagacccaagaaagggcggagaacggaaaagcaccag

SEQ ID NO: 182376 - RNA, 75 nt, Homo sapiens
caagcgacgacgcaccgaagccgaccagaagaagccagcccggagcgggcacaggccagacacacggcagggaac

SEQ ID NO: 182377 - RNA, 81 nt, Homo sapiens
cgggaccgccccagggagacaaaccaccaggaacccgaaaccaaacacggagggaaacaggaggaccgggggcgacggcgg

SEQ ID NO: 182378 - RNA, 88 nt, Homo sapiens
ggagcgaggaccacacccagcagaccaggcccgagaggcaggaagaggccgggaggggaaaccaagacacaaaacagggaccagcccg

SEQ ID NO: 182379 - RNA, 71 nt, Homo sapiens
ccggcgagcgacggacaccagagacggaaagccgggcaaagacacccaacaaaagaaagaaaaccacgcgg

SEQ ID NO: 182380 - RNA, 75 nt, Homo sapiens
gaacccgccggagcacccccaccagccggcagcgccgccagagggcccagaggagacaggggaaccaggaggagg

SEQ ID NO: 182381 - RNA, 64 nt, Homo sapiens
ccccccgaaagaagaacaacagccaacgcaaaaggagaaaacacaagggcgaggagagacggag

SEQ ID NO: 182382 - RNA, 45 nt, Homo sapiens
aaccaagccaacaacaacgaggaagacccacacgaggagacaggg

SEQ ID NO: 182383 - RNA, 74 nt, Homo sapiens
ggccagcaacggcacgaccagaaaaccccggaggggagcaccagaagagccagagggggcagcacgccgaagga

SEQ ID NO: 182384 - RNA, 66 nt, Homo sapiens
accaagcaagaacagcaaaagaaagccacacacacccgcccccgaaacacaggaaaaccgccgccg

SEQ ID NO: 182385 - RNA, 70 nt, Homo sapiens
ggggaaagaggcgggagagggaggagcccagaccgggcgacccgccaacgccccggaacccaaaccgaag

SEQ ID NO: 182386 - RNA, 38 nt, Homo sapiens
aaggagcccagagacaccagaagaagcgcacgcccagg

SEQ ID NO: 182387 - RNA, 57 nt, Homo sapiens
ggcgggggccccgcgccgcggccgagcagcggagaaaccaggcggggaacaagccag

SEQ ID NO: 182388 - RNA, 82 nt, Homo sapiens
cggagcccgcagaccgcagaaggccggagacaccagcagagcgccggaaacaggccagaaagaacacgaggcccagagaaaa

SEQ ID NO: 182389 - RNA, 83 nt, Homo sapiens
aaaaaccacagaaccaaacggaccgaaaccagacagaacagaacaacgacccagcccaaaaaacccaacgggaggggcagcgg

SEQ ID NO: 182390 - RNA, 60 nt, Homo sapiens
agcaccagggcaccacccccgcgagcgaagcaggagagggcggcacggacgagccacgag

SEQ ID NO: 182391 - RNA, 65 nt, Homo sapiens
gaaaggaggacggcagaagcgagaaaaacccgggaagagcccagaaaacaaacaaaaggagcgag

SEQ ID NO: 182392 - RNA, 71 nt, Homo sapiens
gaaaggccaagaccaggaaaggaaggaggagaaggagaagagacaaaagaacacgaggaccaaccccaaac

SEQ ID NO: 182393 - RNA, 76 nt, Homo sapiens
caccaggccgccgggggccgcgcgcccgggccccaccagcgccccccacacccagggagagggcgcagcgagacaa

SEQ ID NO: 182394 - RNA, 74 nt, Homo sapiens
ccccggaagcacacaggcgcggggagcgccacagaggagacaaccacaagacagaacccaggagggggacagac

SEQ ID NO: 182395 - RNA, 64 nt, Homo sapiens
gcaccaccgccggcgcggacggaggccccaaacggggacagggaagacgccagaaggcccacca

SEQ ID NO: 182396 - RNA, 40 nt, Homo sapiens
aaacagacgacaaagagcacgacaggggcaaggccgaggg

SEQ ID NO: 182397 - RNA, 94 nt, Homo sapiens
ggaaccgaccggcgccaccgcccagcacggagccaccaggagagaacgccgcgccgcgcgacaacggcccggcaggcaaggccggccgcgggcg

SEQ ID NO: 182398 - RNA, 73 nt, Homo sapiens
gcggccggacagcgccacggcgggccgcgggaggacaccacccacagcggagcggaggcagacacacacgggg

SEQ ID NO: 182399 - RNA, 66 nt, Homo sapiens
aaacaggagcaccgcggcgcaaaagaacggggagagggaagaaacaagcccgaaacgccacagccc

SEQ ID NO: 182400 - RNA, 78 nt, Homo sapiens
aacgcagccgccggccgaccaccggaacggacagcccccccagcgagcaacagcagaaaagagaagagacccacgcaa

SEQ ID NO: 182401 - RNA, 73 nt, Homo sapiens
ggcgacgagcggagccacgcggacgggacgaaggacagagagggacgggcagacgccccgacacgcagcgaaa

SEQ ID NO: 182402 - RNA, 109 nt, Homo sapiens
cggcgaagaggaaaaaaaacagaacaggaggggagagggcaggaaccaccgcccaaagaacagccagcaaagacaagagcagaccagcagccgcagcgcgacagccaaa

SEQ ID NO: 182403 - RNA, 36 nt, Homo sapiens
aaagacccagacagacagagcgcagccagcagcaca

SEQ ID NO: 182404 - RNA, 70 nt, Homo sapiens
agaagacagacagccacacggaggaggagccacccgaagaaaaagaaaagcacagagaacaggaacggac

SEQ ID NO: 182405 - RNA, 85 nt, Homo sapiens
gcgcggccgcggcggcggagaagcagccgccagccagcagcccgccagccgccgggaggacccggaggagcacccgaagcaacca

SEQ ID NO: 182406 - RNA, 71 nt, Homo sapiens
ccaacgaaaaaccaaaaggacaaaggacgggagggacccaaagcggaaaacccgcaagggccagcaaaacc

SEQ ID NO: 182407 - RNA, 85 nt, Homo sapiens
ccgcgacaggggggagagggagacgagagggacaggagcgagcaagcccagagcggccgccagcaccccggcaggagcagaacac

SEQ ID NO: 182408 - RNA, 84 nt, Homo sapiens
ggcggaacccccggcacgagcgcgcccagcgcccgcagaaggcccagggcgaaaagacaggagggaggaacagacaccgagcca

SEQ ID NO: 182409 - RNA, 73 nt, Homo sapiens
aagaagacagcagacggacgaagagagggaaggggcggcggcgggccgcacacgaacaaccaagcggagggca

SEQ ID NO: 182410 - RNA, 63 nt, Homo sapiens
ggagcagcaggaagaaaacaaggggccaggagaaaaaagagggcaagaaggaacagacaaaaa

SEQ ID NO: 182411 - RNA, 85 nt, Homo sapiens
gcgcggaggagggaaggcggccggggccgggacgccagccaggaggacccccggggaaaggaggggagcaacacgaagaaacgaa

SEQ ID NO: 182412 - RNA, 58 nt, Homo sapiens
gggacggcagaaaggaagccacagccacgagggagacagacccagcacggaccccccc

SEQ ID NO: 182413 - RNA, 67 nt, Homo sapiens
aggaggcgcggaggacgccccaccgccgacgcccccagccaccaggcgcccccgacacgagcagcca

SEQ ID NO: 182414 - RNA, 69 nt, Homo sapiens
ccggccaacgaagcccaaacagaagaagaaggcgcaacacagcagggcaagggggaagagcacacacgg

SEQ ID NO: 182415 - RNA, 57 nt, Homo sapiens
ggcgcccaaagagaccagcgccaccgacccggaggagagaccagcagcaaacccacg

SEQ ID NO: 182416 - RNA, 53 nt, Homo sapiens
cgaacacagaggaaaccgcaccgcccggagccgcaacaacgcagcaaaagcga

SEQ ID NO: 182417 - RNA, 86 nt, Homo sapiens
acagcaggccaacaggaggcagcaacgcacccgcccagggccagaagggccccgggaagaaccacccacgaacacagaagaaagaa

SEQ ID NO: 182418 - RNA, 79 nt, Homo sapiens
gggagggcggaggaggagaacacagaaccaccaggagagcaagggggaagaagagcgcaccgaaggcacaagggaaacc

SEQ ID NO: 182419 - RNA, 82 nt, Homo sapiens
cgacccgaagacacaccgccccggccgccccccagaccgggacagaaggcaaggaaggaagagggaaggaaaaagaagacgc

SEQ ID NO: 182420 - RNA, 99 nt, Homo sapiens
caaacaggcccgacccgggcgcggccaagcacggacccccgggacaaacaacggcccaaggacacgaagaggcaccgaggcaagaaaagcaagagacag

SEQ ID NO: 182421 - RNA, 73 nt, Homo sapiens
ggggagccgggcccccccgcccagcgcgagaggccggaagagcgggagcgggagccaggcagaaggccaacca

SEQ ID NO: 182422 - RNA, 81 nt, Homo sapiens
cgacgcccgccggcacgaagccgagccaaagccagccaacgcgggccggcaggccgagacagaaggcaggcggcgcagccc

SEQ ID NO: 182423 - RNA, 77 nt, Homo sapiens
agcgccgcagacagaagggggagaagcggaggccgacgcccccaacccaccccacccagagacgagccggggggacg

SEQ ID NO: 182424 - RNA, 80 nt, Homo sapiens
accccccgacgcagcacgcccacccgaccaccaccgggacgagcagggggaggaacaaagcgaggaagggaagggaaggc

SEQ ID NO: 182425 - RNA, 53 nt, Homo sapiens
ccagcccagcgaccagcaggggcgcgggaaggacaacagccccaaaggcaagc

SEQ ID NO: 182426 - RNA, 51 nt, Homo sapiens
gaccaacacaagggggccgcaaggaaaggaggcccaagggaggggggccgg

SEQ ID NO: 182427 - RNA, 41 nt, Homo sapiens
gaggaggcacccgcaggagaggccgcgagccaggagagaac

SEQ ID NO: 182428 - RNA, 83 nt, Homo sapiens
ggagaaagaggaagcaggaacccggccccaaggggacagagggaaccgggcccggcagcaaaggagacacgggcaagggagag

SEQ ID NO: 182429 - RNA, 64 nt, Homo sapiens
accaacaggaggccgaaaaggcagacaacggaaggagccgcccccgacagcccacagggagggg

SEQ ID NO: 182430 - RNA, 72 nt, Homo sapiens
acgaaaaggaaaaagcaacaaccggaacagcgagacccgaagcagcgccaggaagagaagcaagagcacccc

SEQ ID NO: 182431 - RNA, 91 nt, Homo sapiens
cagacccaaccaacagaaaccgcgccggagccgcgggccagaccaccgggaagacaacgaagagaggaaagaagcggaaaggagggagcac

SEQ ID NO: 182432 - RNA, 72 nt, Homo sapiens
aggaaggggagaagccgaaagagacagcggccaagggagaagcacgaccccgcgaggcaagacaagaccagg

SEQ ID NO: 182433 - RNA, 71 nt, Homo sapiens
caagcacgcaacggccccaccgccagaggggcacggaacgcaggaaggccggaccaccaccagcagcgaaa

SEQ ID NO: 182434 - RNA, 82 nt, Homo sapiens
cggacaagcacgagggcgcgccgagacgcccgaggagcggcagcccacaagcaggaagaccagccccaggagggaaacagag

SEQ ID NO: 182435 - RNA, 79 nt, Homo sapiens
ggggacgcccagcccggcgcacggcccagacacagcgagaagaggccaccagaaaacggccacgacacgagaaacggaa

SEQ ID NO: 182436 - RNA, 70 nt, Homo sapiens
caaggggcccgaacagagggggcggagaacggaaaagcaccaggaagcagagaggaccgcagaagggaag

SEQ ID NO: 182437 - RNA, 72 nt, Homo sapiens
aacccgcacggaggacccgcccacagggcacccccagaacacacaccacaacacagaagggaacaagcggac

SEQ ID NO: 182438 - RNA, 74 nt, Homo sapiens
cggggggcaaggcgccgaagagagccacaacaaaagccagaaaccgccagaaagagggggaggcagggcgcgac

SEQ ID NO: 182439 - RNA, 85 nt, Homo sapiens
cgcagggccggagcagagaggcacaggagacccaggccaaggaccgagggcacgacggcaaagagagggaggcgaagcggcccag

SEQ ID NO: 182440 - RNA, 76 nt, Homo sapiens
cagagacaaggcacggagagcaacaaagccgacccaacccaagggccaaaggggagccaccgagcccaagcggagg

SEQ ID NO: 182441 - RNA, 76 nt, Homo sapiens
cgcgaccccggaggccggcggacaggccgcacaaaaaggaaacaaagccagaccgccgaggggggacgaacccagg

SEQ ID NO: 182442 - RNA, 83 nt, Homo sapiens
ggacgcgcccgccgcccggcgcgcggccgcgcgcgcggccgcacgcggggcgcgcccaagaaaagacgcagagcccagagaag

SEQ ID NO: 182443 - RNA, 85 nt, Homo sapiens
gacggcggggcccggcagcgccgggagccgagggccagagacaaggaggaccgcgccaacaggacgaggagaccgaccaggagac

SEQ ID NO: 182444 - RNA, 65 nt, Homo sapiens
aaagcaccccggccacagcggaaacacccgccaggcaaaaccggcgagcgcggcaaccccacgca

SEQ ID NO: 182445 - RNA, 78 nt, Homo sapiens
cagaccagggacccccgggcccacggcccagccacccagaaagcagcacccaagaaaacccaggccgcgaaggagaag

SEQ ID NO: 182446 - RNA, 76 nt, Homo sapiens
cggagccacaagcacgcggaagagccagcccgaaaagaaagcgaacacacaaaacaagaaaaggcacgcaaaccca

SEQ ID NO: 182447 - RNA, 82 nt, Homo sapiens
ggaagcaaggaacaaaccgaagaacagcgggaaagaaggcaaaacacgggacgcagaccacagggaaacaagaaaggggaag

SEQ ID NO: 182448 - RNA, 78 nt, Homo sapiens
ggaccccgcccaggaagcccccgaagcccccgccgccgcgagaaggcgaaagagaagagaagaaaggcaaaacacggg

SEQ ID NO: 182449 - RNA, 31 nt, Homo sapiens
acacggacaacaaacggcaccccaacccaac

SEQ ID NO: 182450 - RNA, 69 nt, Homo sapiens
gaggacaagaaaagcaaaacaagcgagaagagggcaaggccagagaaggcgggagaaagacacgaacca

SEQ ID NO: 182451 - RNA, 58 nt, Homo sapiens
cgccggccccgccgccaagaggagcgagcggacccgcgaggaggacaacagcagagcc

SEQ ID NO: 182452 - RNA, 93 nt, Homo sapiens
ccaccgacgcggcaggacgcgcggaggaaacacccaggacacggccacaacaccaagaggccacccaccccaccagagccggacaccagagcc

SEQ ID NO: 182453 - RNA, 76 nt, Homo sapiens
cgaagaaaagagaaggaaaaacagaacggcaaaccggaaaaaaacggaaccaagccgccacagggagaaaagagca

SEQ ID NO: 182454 - RNA, 76 nt, Homo sapiens
gccgacagacgccaccaaaagcaccaggcaccagccaaaggagccagaagagagaaaacaaaacagacagccgaag

SEQ ID NO: 182455 - RNA, 86 nt, Homo sapiens
cgaggaagacccggaaacaggggccacggagccacggccacggccgcaagaaaccccacagcggagaaaaaggagaaacccccaag

SEQ ID NO: 182456 - RNA, 73 nt, Homo sapiens
cgggaggaagaaaaaggaagaacagcccgcccgcagaaacgaaggaggcccaaccacaaaaggagccgacgga

SEQ ID NO: 182457 - RNA, 60 nt, Homo sapiens
aagcccgacagaagcaccgagacccaagaaaggggaccagaagccaggagaggcgccggg

SEQ ID NO: 182458 - RNA, 76 nt, Homo sapiens
ggcaccagcgagaaggggagagcccagcccggacacaaggagaccagagagcggccagccggagaaagaggagggg

SEQ ID NO: 182459 - RNA, 82 nt, Homo sapiens
gcaaagacccagaacaccaagcaaagaagaggagcacaacagggccgcgggaggacgagaccggaccacccccggagaccac

SEQ ID NO: 182460 - RNA, 54 nt, Homo sapiens
gggggcaccaaacagaggagaccggcagggccggggcagggcggagagacacgg

SEQ ID NO: 182461 - RNA, 79 nt, Homo sapiens
ggggccgccgggacccggccaccagcaagccggaggacggaagaaagaccccaaaaaagaaagacccacacagcaagga

SEQ ID NO: 182462 - RNA, 85 nt, Homo sapiens
gcgggcccggagcagccgccgccgcagcgcgaacaggacgccgcaacgcccaaccaggagaaaggaacggcacaagaagaagaca

SEQ ID NO: 182463 - RNA, 53 nt, Homo sapiens
gccccagagaaagaacaggagaagggaaaggccagggggcagaacagggaagc

SEQ ID NO: 182464 - RNA, 88 nt, Homo sapiens
cggagagcggagcccggagcccgccgccccaggaagccaaagcagaaccaagacaaacgaccccggaacacggaggcaaggggcacca

SEQ ID NO: 182465 - RNA, 59 nt, Homo sapiens
cacaccagcaggcgcagaacgagggacaagaggaagaagaagccagaacacaaaccagg

SEQ ID NO: 182466 - RNA, 74 nt, Homo sapiens
gcgccacgaggaagaagacggaacacaggccagagagcacaagaagaaggacacacccaggggacacaacaacg

SEQ ID NO: 182467 - RNA, 72 nt, Homo sapiens
ggccgggcgagcagcaggagcaccggcccaagaaacagagcaaacgagacggaagaaaaaaccgacggcccg

SEQ ID NO: 182468 - RNA, 64 nt, Homo sapiens
gcaaaggagcggggaagaacgagggaaggaagcccccaagagacgccacgaggagcgccaagcc

SEQ ID NO: 182469 - RNA, 78 nt, Homo sapiens
ccagcagcaaccggaaagcaagggagcggcacagccagaagaccgaagcgcgacggaaggccaagggcacagagcgag

SEQ ID NO: 182470 - RNA, 70 nt, Homo sapiens
cagaaaaaacgcccagagccgagccacaagcccacgagaggaagcagcggccaggagaaaacagggaaaa

SEQ ID NO: 182471 - RNA, 73 nt, Homo sapiens
gagcacggcacccggggggcagcgaaagcggaccaggacaccccgggcgggagcacacccggggcagagaccc

SEQ ID NO: 182472 - RNA, 72 nt, Homo sapiens
ggccgccgggggagagccacaagcgggggcacgcacaagcaaggacaaacgaaagcgcaggaagccggaaaa

SEQ ID NO: 182473 - RNA, 73 nt, Homo sapiens
ccaccagggaagacaaccaggagaagaccaaagaccacccacgagaaagagacacaaacaacaccacccgaac

SEQ ID NO: 182474 - RNA, 77 nt, Homo sapiens
ccaagaggcggccaaggggacgagcaaaggaagcgcgaacagcagcgcagggggccgacgacgagccccgcgaggag

SEQ ID NO: 182475 - RNA, 68 nt, Homo sapiens
cagagagccacacacccgaaaggaaagcaagcgccaacgaaaaagacagccgaagcacgaaaagaagg

SEQ ID NO: 182476 - RNA, 63 nt, Homo sapiens
cagaacaagagagaggacccacagaaaagcccccggggcagccgggcaagcagccccccccag

SEQ ID NO: 182477 - RNA, 67 nt, Homo sapiens
ggcgagacaaagacgcgcaggaccggggcagccacgcaggcccccggaggcaaccccggaacaggga

SEQ ID NO: 182478 - RNA, 78 nt, Homo sapiens
aagaagagagcccaagaacaaagcgccccaaaacaccggcgcagggaagaaagaaagacaagcccggagcccgggaga

SEQ ID NO: 182479 - RNA, 73 nt, Homo sapiens
caagacaccagaaagcaccagacgaagaagcgcaagcgagaaagcaccaaagaaaccaggaaacaagaggcga

SEQ ID NO: 182480 - RNA, 90 nt, Homo sapiens
acgaggacgcggcgcggcgcgcgaggcccgagggcgggaggggcgaacggggaagacaggccgaggagcggggagaccaaccagcagaca

SEQ ID NO: 182481 - RNA, 68 nt, Homo sapiens
agccggccaaacaacaagcagggcccagcgagcagaggccacgggcgggcaccaaccgaccgaagacc

SEQ ID NO: 182482 - RNA, 77 nt, Homo sapiens
cccccgacgccaggaaaggccagagagcaggggaagagacggacacacagaaagggagaaccgaacgggaagaccca

SEQ ID NO: 182483 - RNA, 67 nt, Homo sapiens
cggccagcagcggcgacagggcgggacacgacaggacaggaggcaggcggggaagggggcgagaccg

SEQ ID NO: 182484 - RNA, 91 nt, Homo sapiens
agcgcagaaagcaggcgaacccgcggcgcaaaacgggacccagacaggagcgcgggaagaagccggcccggggccgcggacgaggaccagc

SEQ ID NO: 182485 - RNA, 79 nt, Homo sapiens
gaggagggcgggggagaaccgggaacgggagccacacgacggagagcagggcggaaagcagcccaggagggaaagccaa

SEQ ID NO: 182486 - RNA, 72 nt, Homo sapiens
gcggaacaggaggcagcaccagaacggagcagggaacacgaccccaaggagggcgaaccaaagaaggaaggc

SEQ ID NO: 182487 - RNA, 75 nt, Homo sapiens
acgggacgggaggacgaagacgaaagcgaaaagaaacagaaagagacaggacaaacgaagaagacaccacgaggc

SEQ ID NO: 182488 - RNA, 93 nt, Homo sapiens
gaagaggagaggaggaagcagcagaagagaagaagaagcaggagaacgaaacggagccagagaaggcagaagggcccccagcagaaggcagaa

SEQ ID NO: 182489 - RNA, 79 nt, Homo sapiens
cggacagcgagacacaccccaaaggaccagaggaaggcaccaaacgcgagggggaagcaaggaggggggaagcacaaga

SEQ ID NO: 182490 - RNA, 82 nt, Homo sapiens
acagcgcaggaagcccagacaccaggaaaccccagaggaggcgggcccggagcaggcaagaacggcaaggggaaaccagaag

SEQ ID NO: 182491 - RNA, 76 nt, Homo sapiens
ccaaaagcgcagaccacagacagaggagaaggcggcccaccccagagcaccggcagccgccaacaaacgacccacg

SEQ ID NO: 182492 - RNA, 76 nt, Homo sapiens
acagccaccgagacagagagaacgccagcacgaagacagcagacaagggagcggcaggggaggcgaagaagagccc

SEQ ID NO: 182493 - RNA, 75 nt, Homo sapiens
caagcggaagccacacggggcgagccgaaaagcacacccaggcagaagaaaggaaacccggcagaccgcgagggg

SEQ ID NO: 182494 - RNA, 77 nt, Homo sapiens
cccacacaaggcagccgccgggagccagaagcacaggcccgggcgaaggggccacgcgagcaaccagggaccaggag

SEQ ID NO: 182495 - RNA, 54 nt, Homo sapiens
cgggccgcccgagcgcgggaaagagcggacagaagaagggccagacccaggaag

SEQ ID NO: 182496 - RNA, 80 nt, Homo sapiens
ggacaagcgaaggagcaaagagcgaggcaggcccgagggagaggggaagaagcaaccaaggccggacccagcagggcccc

SEQ ID NO: 182497 - RNA, 77 nt, Homo sapiens
accgcagggacggcagacccgagcaagacgccaggaccggaagcagagaaagacaaccagaaacacaccaaaagcca

SEQ ID NO: 182498 - RNA, 77 nt, Homo sapiens
aagacacgccacaaccggcaagacagaaagcggaaggaaaggaaggaaacgaccaagaagcaggaacgggcaaaccc

SEQ ID NO: 182499 - RNA, 79 nt, Homo sapiens
ccgcggccacgcgccaggcagaggacagaaggaacagagaccgccaggggaaagccccgcgaaggccccgagggcgaag

SEQ ID NO: 182500 - RNA, 38 nt, Homo sapiens
ggaagcagaggccacccagaccaaaggcgagcacggaa

SEQ ID NO: 182501 - RNA, 75 nt, Homo sapiens
caagagggaaaggagagggacagaacacagaagagaacccgaacacagcaggagcaagcgggggcaggagccaaa

SEQ ID NO: 182502 - RNA, 69 nt, Homo sapiens
acagcagcccaggagagaaacaaagggcaaaggacacaccgcacaaacggccgcgcaccacacaacacc

SEQ ID NO: 182503 - RNA, 72 nt, Homo sapiens
gagaaccaccaggggacccaggccaccaccgcccagcaacgagcacacaagaaaagaacagaacagccaggc

SEQ ID NO: 182504 - RNA, 76 nt, Homo sapiens
agaccaagcagaaagaaaagaaaccgaaaggcggaaaacaagaaaagcggaaaggcaggagagcgaaagagagcgg

SEQ ID NO: 182505 - RNA, 56 nt, Homo sapiens
gaaccccaaacagagaacgcagaagcggccagcccgaagccaacggggggcaaggc

SEQ ID NO: 182506 - RNA, 62 nt, Homo sapiens
aggagcgcggccaccccccggagcggacgggccccgaagcccaaggggagaccaggaacaaa

SEQ ID NO: 182507 - RNA, 70 nt, Homo sapiens
acccggacaaccagaggcagccagcagggggagacacaaaccgacccagcagaccacgggaggggaaaaa

SEQ ID NO: 182508 - RNA, 69 nt, Homo sapiens
gaacaaaccacccgaaaggcccaggccccccgagcgcacgcacgcggagccagcagaccggggaaccca

SEQ ID NO: 182509 - RNA, 101 nt, Homo sapiens
gcccccgcaacgcccccggcccgcagcccccgccggccgcccaacaccgaacacccagaagaggcggccacccacgagccgacggcaaacgccagggagcc

SEQ ID NO: 182510 - RNA, 82 nt, Homo sapiens
gaagacgcgcgggcgcgcacgcgagaacaagaacgacaagcacacaccaccgcaggggacagaccagagcaggaccaaaggc

SEQ ID NO: 182511 - RNA, 38 nt, Homo sapiens
cccccaaagagcgggaacagggcgccacgcgccgggag

SEQ ID NO: 182512 - RNA, 56 nt, Homo sapiens
cgacaccaacaccaccggaggacgcggacaaggcccagacgagacgaaaagggagc

SEQ ID NO: 182513 - RNA, 95 nt, Homo sapiens
gggaccacgaaaggagcaagagcaagacaccggacaccgagggcccccaaaagcaggagcgagaacccgagcagcgccagagcaacacaccgcgc

SEQ ID NO: 182514 - RNA, 75 nt, Homo sapiens
acagcgagcggagccggcaggaaggggaccgggcggcggagcggcggaagaagagagacggggaccggagccagg

SEQ ID NO: 182515 - RNA, 66 nt, Homo sapiens
gacagcaaacagcgagaagagagacaacagaagacaaacccaagagagcaagagaggaccgcagac

SEQ ID NO: 182516 - RNA, 104 nt, Homo sapiens
cccggcggccgaagacacgcgacccggagacagcccaaaacccggaagagcgccccaggagaaacaagccggggggggcacagagccccggaagacagccccca

SEQ ID NO: 182517 - RNA, 72 nt, Homo sapiens
acccacagaaggcacacgcacaagccacaaacccgccaaaagcgacaggagcaaaagagccggaagagcgca

SEQ ID NO: 182518 - RNA, 57 nt, Homo sapiens
ccagaagaccacaacagacaagcgaccacagggaaagcacgaagggagcccagcgac

SEQ ID NO: 182519 - RNA, 72 nt, Homo sapiens
ccgacgccgccgcccaggcccgaagcgcggacgcggacgacagggggaggaaaaggacagaaggcaagagaa

SEQ ID NO: 182520 - RNA, 77 nt, Homo sapiens
gccaacagcagaaaacacggaagaggccaggcaggacccgaaacaggcaccagagaccagacacagacaaccaccgg

SEQ ID NO: 182521 - RNA, 56 nt, Homo sapiens
cacacccccgcagagacgcaccccgcggagaagccgaaacagcacaaagaagcgca

SEQ ID NO: 182522 - RNA, 51 nt, Homo sapiens
cccaccccgaaacgccccgaaaagacgggcaacagggccacccccaaccag

SEQ ID NO: 182523 - RNA, 75 nt, Homo sapiens
ccacgcgcacccacaacccggacacacagaccaggagagccccacacgccccccccgcagccacccgccagcccc

SEQ ID NO: 182524 - RNA, 62 nt, Homo sapiens
cgccgaggaccgcggacggggggaacgggggcaccgcgaccacacggggggaacaacgcacg

SEQ ID NO: 182525 - RNA, 79 nt, Homo sapiens
cccggccccccagcgcccccggggcaaacccgagccagggcgaaccgaccaagaacaacacccagagggccaggagaag

SEQ ID NO: 182526 - RNA, 77 nt, Homo sapiens
caccggccggcccagcgggaggaaagcgcccggcggaagggaccacagaccagcacgccggcgccacgaaccgagcg

SEQ ID NO: 182527 - RNA, 79 nt, Homo sapiens
agagcgccgcaacgagcaaggcaggcaaaaccccaaaagagccgcgcagcgagccacgcaccaaaccagcagccgggga

SEQ ID NO: 182528 - RNA, 55 nt, Homo sapiens
agaccgaacgaggaacccaaaggcaccgggggcacagacaagggcagggccgaga

SEQ ID NO: 182529 - RNA, 77 nt, Homo sapiens
gccaggaaagaaggaaccccgaccgcagcccccgggcacgaccccggacacgggcaggcagagaaagagcgcgcacg

SEQ ID NO: 182530 - RNA, 80 nt, Homo sapiens
gacgaccaagacccacacaccgaaagccagggaggcccccagcaaaagcagggcaggacaagggcaacgcgggaagagga

SEQ ID NO: 182531 - RNA, 106 nt, Homo sapiens
ccgccacagcggcccggccccccggacagacgccgacgcccaggggcaaagaaaaaggagagaaaaagaggcaaaacaacaagaagaaaagagaaaaaagagagcg

SEQ ID NO: 182532 - RNA, 76 nt, Homo sapiens
ccgccacacgcagaccgcgggaacccgacccaaccccaggccagggagagacaccaagaacgggcgggagcaggga

SEQ ID NO: 182533 - RNA, 82 nt, Homo sapiens
cgccgccgcgccgcgccgcgccgcaccccgagcgaccgagaaggagggggcagagcacggcaggcagaaggggccaacccgg

SEQ ID NO: 182534 - RNA, 74 nt, Homo sapiens
cacggagaagggaacgcggaaagggacaacgggcaccaaagagagaagacagaaggagcaagaagggaacaaca

SEQ ID NO: 182535 - RNA, 82 nt, Homo sapiens
gcagccagaagaacaagaagaggcagaccccgccagaccaacaagcggagaccgccaggcaaacgggaaacaacccacaaac

SEQ ID NO: 182536 - RNA, 77 nt, Homo sapiens
ggaacaaccacacccacacaggaaggagccaaggagggaaaagagcccgggccgggccccggcacaggccccgccgg

SEQ ID NO: 182537 - RNA, 81 nt, Homo sapiens
agaaacgaagaagaaacaacaagagaaagacccaggaagcagaagaagcgaggagaagaagaggaaaagggggccaggaag

SEQ ID NO: 182538 - RNA, 79 nt, Homo sapiens
gggcggccggccagaagacaagagacacggcgcggcaagcccgccgcagcaagagagagcaaggagcaggcgcagagca

SEQ ID NO: 182539 - RNA, 82 nt, Homo sapiens
cggaggaccggagcaccgcagcgggcgccggacacagaagggggcgggaaggcgcaaaagaagccggccccggggaccggga

SEQ ID NO: 182540 - RNA, 78 nt, Homo sapiens
agggaaagcacagagcggaagggaaggcgccgacgcacgaaaagcaaggcagaggaagagcccggcaccagcaggagc

SEQ ID NO: 182541 - RNA, 67 nt, Homo sapiens
gcccgacaagaaaacaccacaaagcaccagaaaaagggaaccagcagggagcggagaaaaaaaggca

SEQ ID NO: 182542 - RNA, 57 nt, Homo sapiens
gccgccgccgaggagaaagggccgccaagggaaagaagacgagaaagggaaaaccaa

SEQ ID NO: 182543 - RNA, 88 nt, Homo sapiens
agaacaccacaccagagggcccaacgccagccccacccggaccaacgcggaggcaccacccaacacacaacggcccagccaaacaagc

SEQ ID NO: 182544 - RNA, 65 nt, Homo sapiens
ggcaagagcgcccgcgcccgagaccccccagccccagaaaacccggaagcagaagaacaaggaac

SEQ ID NO: 182545 - RNA, 75 nt, Homo sapiens
cggggcgggcgagcgcagggacagccgagcccccacagaagagggaaacagaacaaccggccacacccaagcagg

SEQ ID NO: 182546 - RNA, 61 nt, Homo sapiens
agcgacacaccgcgcccgcccaccaggcaaaagcagaccggaaaacccaccggcaagacca

SEQ ID NO: 182547 - RNA, 74 nt, Homo sapiens
gcgccgaaggggagaggcggccggaaggaaaaggaaggccgccaacaaagaccgaaagaaccagccaaaacaga

SEQ ID NO: 182548 - RNA, 51 nt, Homo sapiens
gggcacaagcaggagagcagaaaagcaacaggcccaggcagagacccgcac

SEQ ID NO: 182549 - RNA, 49 nt, Homo sapiens
ccaagccaaccagccagcaggccgggcggggacgaaaaagagccacgcc

SEQ ID NO: 182550 - RNA, 68 nt, Homo sapiens
gaagccccagcaagaaagcagaagagcgccagcacacacaagcaacaagcaaacaacggaaaggaggg

SEQ ID NO: 182551 - RNA, 75 nt, Homo sapiens
ccccgcaacgcccccggcccgcagcccccgccggccgcccaacaccgaacaccccccagggaacccgagaaggcc

SEQ ID NO: 182552 - RNA, 79 nt, Homo sapiens
agaaggagcgcaagcaccagaaggaagaagagacacgaagagcacggagcggaagaggagacgacaaagaccaagaaaa

SEQ ID NO: 182553 - RNA, 82 nt, Homo sapiens
accggagaaaacagcaggaagaagagaaacaaaggccagacaaacagaggagaaggcagagcccccccaggcagaagcccga

SEQ ID NO: 182554 - RNA, 74 nt, Homo sapiens
agccccaccgcgccgggcccccgccccgggcccggggagaagacgcggcggcgacacgggggaccgcggcggga

SEQ ID NO: 182555 - RNA, 59 nt, Homo sapiens
gccgacccgacacagccgagacgcaaacccagggcaaagaaggccaagaagacgacaca

SEQ ID NO: 182556 - RNA, 107 nt, Homo sapiens
acggagagcagcagccgcccgccaaccccaggggaccagaggaaccagcccgagcgaacagcgcgagccacaaggcaaggaagcaggcggcaccacccaagagaacc

SEQ ID NO: 182557 - RNA, 77 nt, Homo sapiens
gccgcccagccccaaagagcgagacacaggcccaaccagagaggaccagaggaacagagggagaaggagaagaggag

SEQ ID NO: 182558 - RNA, 80 nt, Homo sapiens
caaaaagcaagaggggcaaccccccaggcgagaacgaggaggaaagccagacacacacccgaaaaggacgcggcaaaagg

SEQ ID NO: 182559 - RNA, 69 nt, Homo sapiens
cacggcaggagcacacgacaagacaacccggcaaggaacaagccagggggcggacaacacagcaacgca

SEQ ID NO: 182560 - RNA, 68 nt, Homo sapiens
gccaaggcgccagcagagggcaacagaagacgccaaaagaacaggaagaggggaggagagagcagaac

SEQ ID NO: 182561 - RNA, 37 nt, Homo sapiens
gagaacaagggacagggaccaggcacgggcccagacg

SEQ ID NO: 182562 - RNA, 63 nt, Homo sapiens
gcgaaggcaaagcagaggaagaacagagcggggacgagagccccggcacaaacggaccaccag

SEQ ID NO: 182563 - RNA, 75 nt, Homo sapiens
aggagaagcgggaaagaccacgcgccgaagaaagccaccacggcccgagagacagagaagcgcgcggcagaagcc

SEQ ID NO: 182564 - RNA, 80 nt, Homo sapiens
ccaagccaagcagacaggccagggacggaaggggagaaccaaccaggcaccaagaaaaagcggggaaggggggcaaaaaa

SEQ ID NO: 182565 - RNA, 77 nt, Homo sapiens
cgccaagggcacgggaagaccggaggggacgaagaacggcgccccagggggagccaggggagcggaaaacaaggaga

SEQ ID NO: 182566 - RNA, 74 nt, Homo sapiens
ggccaggcgaccggaacccgggcgaagcgaccccaaccggccccaaagcgggaaagacaacccagaaaagaaaa

SEQ ID NO: 182567 - RNA, 59 nt, Homo sapiens
ggccaagcaacaacaggcccacacagagaggacagagacgaggcgggcccaagggcacc

SEQ ID NO: 182568 - RNA, 84 nt, Homo sapiens
gcccacccacaagcgcacaggaccgggagaaacgaggaggaagagaaggaccgaacacagaagaaggaacgcagagaaaccaag

SEQ ID NO: 182569 - RNA, 64 nt, Homo sapiens
gcaccagcacaccacacgcagcgcgcaacaccccacaggaggcagcgaggacagaaaaggggca

SEQ ID NO: 182570 - RNA, 77 nt, Homo sapiens
gaggacccgggacaccgcacagccgggaaagggaggaggaccgggaagaagaaaccgagcaacaccacgaaccaaac

SEQ ID NO: 182571 - RNA, 77 nt, Homo sapiens
cgccaccggcggcgggcacacagacacgcacggagggcccaacccacagcgccccaggccacaccaacaagacaaga

SEQ ID NO: 182572 - RNA, 76 nt, Homo sapiens
cgggggcacgggagcaggaagccaaacacaacaacgagcaggaaaacaaggccagggggggaacagcccgagacgc

SEQ ID NO: 182573 - RNA, 35 nt, Homo sapiens
gcagcgccccgcgagaaggagggcgggggccagaa

SEQ ID NO: 182574 - RNA, 86 nt, Homo sapiens
cggcccggcgagaggcgaggagccgggggcgcccgcggaggccggggagcagccgaccaggagccccagagcggggccccgggccg

SEQ ID NO: 182575 - RNA, 78 nt, Homo sapiens
agacaagccacaaaacgcccagaagcaaaagaccaaaggggcacgaacacacggcagggcagccccgcccaccgacca

SEQ ID NO: 182576 - RNA, 77 nt, Homo sapiens
agacgcggcagcaacagcgagaccggggcgaggaccccgagccaggggagagagaaccgggagacagaacacgaaga

SEQ ID NO: 182577 - RNA, 34 nt, Homo sapiens
aaaccggggaaagcgagccagcgaagacggagga

SEQ ID NO: 182578 - RNA, 74 nt, Homo sapiens
ccacagacacgcacaggagaagggcccggagagacgggaaaagaacagaagcaggcaacaaaaaagcgaacaac

SEQ ID NO: 182579 - RNA, 70 nt, Homo sapiens
acagcaaccagggaccgaaggacgcaggagagcagagagggaagccaaagaagacaacaggcacaaagag

SEQ ID NO: 182580 - RNA, 80 nt, Homo sapiens
gcgcgggccgggcccacagcgcgccgcgccgaccgccggagaagcgcgcgcgccgcggacaacagcagaaaggaagacac

SEQ ID NO: 182581 - RNA, 78 nt, Homo sapiens
aacgaaccggacccagacccagaggcagagccgccccagcagcaggggcgccagcggcccgggagagcccagccgcaa

SEQ ID NO: 182582 - RNA, 44 nt, Homo sapiens
gcaggcaggggacccggacaagggacacagcaggacaggaacgg

SEQ ID NO: 182583 - RNA, 85 nt, Homo sapiens
caacccagcgagggacgcgggcagccaggccgaagcggcgccgcccgggacagggcagaccgccagcagcacagcaagccacaga

SEQ ID NO: 182584 - RNA, 53 nt, Homo sapiens
gagagaacagagcgggagccgcggaggagcagggagccagcgaggaaacggcc

SEQ ID NO: 182585 - RNA, 84 nt, Homo sapiens
ggggcgcccccaggaccgagcaggaaccggagcagcccaggcggcaaggcgacccggcgaccaagaggggcacacggcccgcgg

SEQ ID NO: 182586 - RNA, 39 nt, Homo sapiens
ccaaagacccacacagagggaaggcaagaagaagaacag

SEQ ID NO: 182587 - RNA, 76 nt, Homo sapiens
cacagagccaagcgccaagcaggagaccaaaacgagggccaacaacagccacgagaagaagggaaagacccgagca

SEQ ID NO: 182588 - RNA, 65 nt, Homo sapiens
gcaggcaggggcggcaccaggaggggccaccaggccccccccgcgagcggggacaagcgagggag

SEQ ID NO: 182589 - RNA, 78 nt, Homo sapiens
gcaaaaacaagacggggcgccccacagaggggcgacgcgagagagaaaagaaccacaggggcacaacgaaacagccag

SEQ ID NO: 182590 - RNA, 67 nt, Homo sapiens
cccacccagacagaaaggggaagcagaccaagaagacagaaggggcccgccaccgcaaagcagcaaa

SEQ ID NO: 182591 - RNA, 70 nt, Homo sapiens
aaaacccagaaaccagaaggaacagccggggaacgcacaacggcaaaagagaggggccacaggcccaggc

SEQ ID NO: 182592 - RNA, 35 nt, Homo sapiens
gccagcgaaaacgcccaggaacaggccaacccaac

SEQ ID NO: 182593 - RNA, 75 nt, Homo sapiens
agggagagcgggcagccccaggggacaggaggggaagcaaggccaagccacagccaccaggcccaaggaagcagc

SEQ ID NO: 182594 - RNA, 79 nt, Homo sapiens
agaacaagagaaggcgagacgcgggccacagcgacgagcggacggaggggcacagggcaaacaacccccagggggccac

SEQ ID NO: 182595 - RNA, 88 nt, Homo sapiens
ccgcgcggagggacggcgccgcacccggcgcccgcggccgacgacgcgggagagccgcccccaggcgggcgacaggaagcagacgggg

SEQ ID NO: 182596 - RNA, 80 nt, Homo sapiens
aggagcacggaggaagcacacccgccagggacgggcacgggaagcacagcaacccaaggacagccggaagagagccaaga

SEQ ID NO: 182597 - RNA, 84 nt, Homo sapiens
gagaaaaaggagagcccgagccaacggaggaggccgagaagaacccacagaggcaccaagcagccgaagagaaacaagggacag

SEQ ID NO: 182598 - RNA, 72 nt, Homo sapiens
aagcgcacacaaaagaggagaaaaccgggcgcagcccgagccacgggagggcaggggcagacaggcaggagg

SEQ ID NO: 182599 - RNA, 76 nt, Homo sapiens
aaacaaaaggaccaacggaacacggagcaacagcgagcaacaggcaacgaaaacagacaaaacaacggaaaagcag

SEQ ID NO: 182600 - RNA, 72 nt, Homo sapiens
acaccacggcgaacacgaaacagagaaagagccacagagggcagaacggaaaagcaaccaaaggcccaggcc

SEQ ID NO: 182601 - RNA, 61 nt, Homo sapiens
ccacaaaagaaagaaaccgcgaggcagggaaagaaggccccccaaagccagccggcaccaa

SEQ ID NO: 182602 - RNA, 38 nt, Homo sapiens
aggaagagcccgccgaagggcgccagaacaaagaagag

SEQ ID NO: 182603 - RNA, 57 nt, Homo sapiens
cagagcgcggaacccaagaccacagccccagaggaaccagacagcaccaggggccag

SEQ ID NO: 182604 - RNA, 69 nt, Homo sapiens
agcgggccagagggccagacgggaagcccgggagacaccacaagccaacaaaccgaaaaaagagacgaa

SEQ ID NO: 182605 - RNA, 78 nt, Homo sapiens
caaaaagcacccacccagcacgcaccccaagaaaccaggaagcccggagcgcacccagaagaaagaggaaaaccaccc

SEQ ID NO: 182606 - RNA, 79 nt, Homo sapiens
caccaccgaccagccacccagacagcccaggggcacgggcacagcccagaagaccagcgagaggcgccaacaagagaag

SEQ ID NO: 182607 - RNA, 76 nt, Homo sapiens
caaccaagcagcagaggagcacgaggacggggagcaagaagaagaccgcaggaaagcaggaaggcaagaaagccaa

SEQ ID NO: 182608 - RNA, 78 nt, Homo sapiens
aaaagcgaagccgaaacagaggaacagcggcagggaggagagacaaaagcaggaggaaacaagcgacaagagccaaac

SEQ ID NO: 182609 - RNA, 73 nt, Homo sapiens
cagcgggcgcccgcacccggggcggggaaaaacaagcccaagggcccccagggcacgcaaaagcagaccggaa

SEQ ID NO: 182610 - RNA, 72 nt, Homo sapiens
gagaagcgaggccggaaaaaccgagccacacgaagcaaagaaagggagacaggcagaaccagacccggagca

SEQ ID NO: 182611 - RNA, 79 nt, Homo sapiens
accgaaacaacggaaagcaaaacggggcaaggacccgacgaccaacagacaagccgagaccaccaggagcagagcggag

SEQ ID NO: 182612 - RNA, 80 nt, Homo sapiens
gccaggccgagaaccccagcggagaaccaccgcacaagagccaagaacaagggccgcgagggaaacaacggcaagcggag

SEQ ID NO: 182613 - RNA, 67 nt, Homo sapiens
aaggaccaagaaccaggaggggagagcgccgccgccgccggggccgaggaaaaaagcgccgcccccc

SEQ ID NO: 182614 - RNA, 72 nt, Homo sapiens
gcagggaaaaaagcagcaaacacgggacaaaaaccagaccaggacacaccggaacaaagaaaaccaaaacgc

SEQ ID NO: 182615 - RNA, 80 nt, Homo sapiens
agacgccgcacccaaggccaaacagcagagccccggggcggaaagaagccaaggccaaggagcgggcggcagcgcagcgg

SEQ ID NO: 182616 - RNA, 78 nt, Homo sapiens
gcgccaaacaagaaaaacaaagccaaggaaaccccaacacagagccaagcgccaaggagcgcacggcgagggagaaaa

SEQ ID NO: 182617 - RNA, 82 nt, Homo sapiens
cccgccgggcaggcaaggcggcgccacggccgccgggcagacgcccgaaccggcagaaaccggaccacgcacaaccggccgc

SEQ ID NO: 182618 - RNA, 80 nt, Homo sapiens
agccccgaggaggcaggcgccaccacagacgggcaacgagacacacgcagaaaaaagagggaagaaaacaccggggggac

SEQ ID NO: 182619 - RNA, 57 nt, Homo sapiens
acagaaagagcaacagcagggcaacagagaaaaaccggaagggaaacccgcgacacc

SEQ ID NO: 182620 - RNA, 56 nt, Homo sapiens
gaagcggccaccaccaaaggaggaccgcagaccgagaaacaacgaacgagcaagga

SEQ ID NO: 182621 - RNA, 70 nt, Homo sapiens
ccaggacaaaccaggcggacaaagagccagccagggggcagaacagggaagccgacagcaaggcggaaaa

SEQ ID NO: 182622 - RNA, 91 nt, Homo sapiens
gccgcgcggcccaagggcccggaggggcgcgggaaaccggcagcgggacggaacagcccaaccagcagagaagaggggagccccgaggaga

SEQ ID NO: 182623 - RNA, 76 nt, Homo sapiens
agaagcccagagcacgccgaagccaccagacgggaggcaggaaaaagacacaagacagcaggaccgggaccagccc

SEQ ID NO: 182624 - RNA, 73 nt, Homo sapiens
ggaaggagcagaaaaggagcaaagccacaccagcaggccccagcgcaggcgggaggcggaggccaccagaccg

SEQ ID NO: 182625 - RNA, 81 nt, Homo sapiens
ccgagcagcgcgagccacacggcaagcgcccagccggagccccgggccccacaggagaaacagcaccggaacaccacagca

SEQ ID NO: 182626 - RNA, 64 nt, Homo sapiens
cggaggcgagccggccgcgggcgcgaccggaggcagacaggaggagggcagagccaagacgcca

SEQ ID NO: 182627 - RNA, 73 nt, Homo sapiens
gggacccgggcggcgagagcgaaaaaggcacggacaggacgaggggcccgggacaggacggcaagggagcagc

SEQ ID NO: 182628 - RNA, 82 nt, Homo sapiens
gccggagaaggcacaggccgcccgggcccggcagcggaagccgcagaaggaccggccagaagcaagccggagaacagaaaga

SEQ ID NO: 182629 - RNA, 41 nt, Homo sapiens
caaacaagaggaccagggaggcccccgcggacccccagccc

SEQ ID NO: 182630 - RNA, 65 nt, Homo sapiens
gaaacgacacaagcagcaagaaccagaggagcgagaggaagcagagacgcccaggacacccgacc

SEQ ID NO: 182631 - RNA, 71 nt, Homo sapiens
cgggaacccacagggaggacaaacaggaagaagagagcaggagaaaaaacaccaacgaggcagaacaaaac

SEQ ID NO: 182632 - RNA, 99 nt, Homo sapiens
agggcccccagccagcccgacagccgcaaaaccacacaagagcagaggccaacgcacagaagccaaacgcacgagcaaaacaacagcagcagcaccgca

SEQ ID NO: 182633 - RNA, 70 nt, Homo sapiens
ggaggggagagccccgcaccccccccagaaacagggagaaaagaagcagcccacgaaccccgacaacaga

SEQ ID NO: 182634 - RNA, 69 nt, Homo sapiens
acaaaacacacagaaggccggaagagaaggggaaaagacgcacgcaagaggacagggacaagcgcacag

SEQ ID NO: 182635 - RNA, 72 nt, Homo sapiens
cacgggcaggggccgggggccagacgcacgcccacagggaaggagggcggacggcagacaggcagcaaccgg

SEQ ID NO: 182636 - RNA, 77 nt, Homo sapiens
ccgccacccgcgagcccaccgccaagacggaaaccaggccacaaacgaacagcgaaacggagaacggaagaaagccc

SEQ ID NO: 182637 - RNA, 69 nt, Homo sapiens
gacacagaagccgacagggagacacggcaggaacccgcgaagcgggaagggcagcgcaagaccccgcac

SEQ ID NO: 182638 - RNA, 56 nt, Homo sapiens
acacaacaagcacgacagaaaaaaacggccgcagaaggaacggcagccacacagcc

SEQ ID NO: 182639 - RNA, 83 nt, Homo sapiens
acaccagcaagcgcggaagaggaccggaggccggaggaagccaggaggccgggaaccgcagaagaagaagagcggagaaccga

SEQ ID NO: 182640 - RNA, 77 nt, Homo sapiens
gacaaggcaggcccggaggccaagaaagcaccccacgaacaaccacaggaagagacacacaagaaacaaaacggcag

SEQ ID NO: 182641 - RNA, 65 nt, Homo sapiens
gaggagacacccgggggagcagacgcaagcaccgaaggacacagcccgcagaaaggaagcgggcc

SEQ ID NO: 182642 - RNA, 74 nt, Homo sapiens
cacacaggagcacacccaggacagacagccccaggagccaccgaggaacgggagcgggggccaaacccgggaga

SEQ ID NO: 182643 - RNA, 68 nt, Homo sapiens
gggaacaacccaagcgaagaacccaccgcccaccacaaaccaaacgagcaagaaggagcgaggcagag

SEQ ID NO: 182644 - RNA, 72 nt, Homo sapiens
cgaagaggcagagagcaaagaacccccaagcaggaagcccaacagccgggaaggggaaaagaacagagaaga

SEQ ID NO: 182645 - RNA, 86 nt, Homo sapiens
cccagccacagcacacaggaccaggcgcgagaacagaccccaccccggacagaagcaggccaaccacgcggaaccccaaaccccca

SEQ ID NO: 182646 - RNA, 77 nt, Homo sapiens
gggacagaaagagacagaacagcacaggaaccagggcgggaacaaaagaccacaccgaaagaagaccaaacgagacg

SEQ ID NO: 182647 - RNA, 75 nt, Homo sapiens
gacaaggcccagcggggacgaacaggacaacaaacgagcacggagaaccgccagccgacgcgccaggaggggcgc

SEQ ID NO: 182648 - RNA, 79 nt, Homo sapiens
agaggcgcccggagcaggcagagcagccgagccagggaccaagagggggcaccaggaggaacgggcgcacagaaacgag

SEQ ID NO: 182649 - RNA, 59 nt, Homo sapiens
gcaagaggcggagccgaccaggccgacgagagaagaaggaggccgaccaggccgacaaa

SEQ ID NO: 182650 - RNA, 69 nt, Homo sapiens
aagggcccccgacgggcgcggccgaggcaagaaccggaggcgggaggcggcagaagcagccagaggagg

SEQ ID NO: 182651 - RNA, 70 nt, Homo sapiens
ccccggagggagacgcgcgccgaggagaacccagcggggggaagccaggaaagacgcgggggaggaaggc

SEQ ID NO: 182652 - RNA, 85 nt, Homo sapiens
gagccacccagcaggcgcgcagcggaccgaagacccgggagaaggcgaagccgacgagcccgaacagacgcaccagcgggaggaa

SEQ ID NO: 182653 - RNA, 67 nt, Homo sapiens
cccgaaaaaagagagggggggaccgaccgcaacagaacggacccgaccggaaaaggagaaagaaaca

SEQ ID NO: 182654 - RNA, 73 nt, Homo sapiens
cgagcaacaacggagaaaagaagacgacacaggcagggaagacccgaacgaaggcagaagagaagaggccgca

SEQ ID NO: 182655 - RNA, 67 nt, Homo sapiens
cgggagagaagaagaagagcgaggagcaagaagaggaccggagggaggccaaggacgagagacccac

SEQ ID NO: 182656 - RNA, 79 nt, Homo sapiens
gacggccccggagggagccgcgggccaccgcgggccagcccccaaccccggagggaccacgggagaggaggaagagacc

SEQ ID NO: 182657 - RNA, 79 nt, Homo sapiens
gcccgccgccgcgccgggcccgggccggaaaggagagcgaagaccaaagaacaaaggccgagggaccaccaggcaggcc

SEQ ID NO: 182658 - RNA, 64 nt, Homo sapiens
agccacaccaggaacccccggacaagcacaacaagaacgcggcaggagacccgaggcgcagcaa

SEQ ID NO: 182659 - RNA, 75 nt, Homo sapiens
cgcggagcgggcagccgccgccaccccgcggccgcacccccgccccaggcggggccggggagcccgggccagacc

SEQ ID NO: 182660 - RNA, 79 nt, Homo sapiens
cccgaagcgagggaagggcggacacaccagaaagccaacccagcgaaggaacaagcaaaccccaagcggcaagagaccg

SEQ ID NO: 182661 - RNA, 82 nt, Homo sapiens
acggcgaaccacgcgaggggcgggagccgcgcacaccaccacaccccgaaaagcaaaggcccacccaggcacagggagaaac

SEQ ID NO: 182662 - RNA, 79 nt, Homo sapiens
gccaagcgcgcacacccgccgacgaggaacggcggagcagggagcccaaagaccccggagacagacaaacccacaagcg

SEQ ID NO: 182663 - RNA, 85 nt, Homo sapiens
gaccaccccagcaccagcccagagggaaagcacaccaccccagccagggagggagacgcggagcggggccaggaaggcccggacg

SEQ ID NO: 182664 - RNA, 70 nt, Homo sapiens
gcagacaagcagcagggacaagagaggacacacaaagaaaccgaaaagccgaaaggaaaacgaagcccac

SEQ ID NO: 182665 - RNA, 76 nt, Homo sapiens
ggacaagaccagaaccaggacccaagagaggcacaaacccagggacaacagcaagcagagaggagcgacaacagga

SEQ ID NO: 182666 - RNA, 87 nt, Homo sapiens
cggccggcccccgccaaccgaccggccaacgacgccccaaggcgccaaggaggggacccccagggagaagacagcacggggagccca

SEQ ID NO: 182667 - RNA, 76 nt, Homo sapiens
gaggaaaaggagcgagcagacgacaagccgggagcgggcggccaaccagggcgcacaaaagagcacaaaagcacca

SEQ ID NO: 182668 - RNA, 72 nt, Homo sapiens
cgcacagaacaggagcacggcaggaaaaggaggacgagccacgggagaccaggagagggagccgcaccaacc

SEQ ID NO: 182669 - RNA, 73 nt, Homo sapiens
cggcaaccgcggggccaagggggacagccaacaaagagaagagaaaccaagcccgacacgaagacgagagaag

SEQ ID NO: 182670 - RNA, 82 nt, Homo sapiens
cccgccgcacgggacagcgcgagcccaaaccaagcgcgacaagaaagacaacaagggagaaagcggcgcagcacacaccccg

SEQ ID NO: 182671 - RNA, 51 nt, Homo sapiens
gacagaaggagggaccggccggggcaaggagaaaacacagggccaacgaaa

SEQ ID NO: 182672 - RNA, 78 nt, Homo sapiens
gcaaagaaaaggagaaaagaagccaaagggacacggcgggcccaccgcacagacagcaccgacccagagcccggagcg

SEQ ID NO: 182673 - RNA, 86 nt, Homo sapiens
ccaaaccccccaaacccgcacgcccaggaggagcaagccgaggagaggcaagcgaaaccccccggagccccaaagccaggacagcc

SEQ ID NO: 182674 - RNA, 83 nt, Homo sapiens
ccgggacgcggagcccggagcggggcgacgaggcgagcgggggccgggcagcgaccggacagaagacagaccgacagacgcca

SEQ ID NO: 182675 - RNA, 56 nt, Homo sapiens
cacgcagagggcggagcggcagcagaagaaggaagcaagagaagaaccagccgggg

SEQ ID NO: 182676 - RNA, 34 nt, Homo sapiens
ccgacaagccgaccagccaagcgggaagaacaac

SEQ ID NO: 182677 - RNA, 89 nt, Homo sapiens
ccgagccgcgggaagaggcggcgccgccacccccccccagcagcggcccccaggcacgaagcgaagaagaggagagaagcagcggcgca

SEQ ID NO: 182678 - RNA, 71 nt, Homo sapiens
agggagaacacagaaaccggccccagaaaccaccaaaccaaaaccagccagcggagcgaggggaagcgccc

SEQ ID NO: 182679 - RNA, 68 nt, Homo sapiens
ggcggggccccccgcccccaccccggcccagggaagggcaccagggaagccagggcaagcgagcaacc

SEQ ID NO: 182680 - RNA, 52 nt, Homo sapiens
acagcgggagccacggccacacgggagagaaggggagagccagcaaccggaa

SEQ ID NO: 182681 - RNA, 56 nt, Homo sapiens
cgcaaacccaaagaccccgccggagacgagagaggccggaagagcgggagcgggag

SEQ ID NO: 182682 - RNA, 58 nt, Homo sapiens
gagagcccgcgacaaagcaggcagacgcaaggcagaaaagggcaagacggagagaaac

SEQ ID NO: 182683 - RNA, 84 nt, Homo sapiens
cagcgggaaggcagacagcgagggcgacgaggccagaagcccccaggaggagaacgagcaacggaagccagaagaagcaccccc

SEQ ID NO: 182684 - RNA, 72 nt, Homo sapiens
aagggacgagaccaaacggaagaggcggacagggccgaaagccacgagcccgaaacgggccgaaagaccgcc

SEQ ID NO: 182685 - RNA, 76 nt, Homo sapiens
ccaacaagaccaagcccgcggacgccaggggccagacccacggggcagagaagacacagccgaaagaggaccgcac

SEQ ID NO: 182686 - RNA, 80 nt, Homo sapiens
aagacagggaagggcagaaggaggccccccgggcggagagcccccccaggaacaagccgcaagaccgaaaacccggcacc

SEQ ID NO: 182687 - RNA, 72 nt, Homo sapiens
gaaggaccaagaaccagacgcccccgcaaaacggcccaacacgaagcggcaccggcacccgcgcccgggagc

SEQ ID NO: 182688 - RNA, 71 nt, Homo sapiens
gacggcggagaagccccaaggacaaagggaacacaagaaaggaaagggagggcagaggcggaggagggaaa

SEQ ID NO: 182689 - RNA, 58 nt, Homo sapiens
gacacgcagggcggggaggagccagggagcccagcacaggcgcggaggcggaggccac

SEQ ID NO: 182690 - RNA, 84 nt, Homo sapiens
cagaacacgcgcgggaccccgggcacggcgcgcgggagggaacccagagcagaccacgagaagcaaaaaacagaccaaggaccc

SEQ ID NO: 182691 - RNA, 83 nt, Homo sapiens
ccgagcaccggagaaaacacaaacccaggagcaccacgccagaagacagggccagaaacggcgagccacgagggacaggagga

SEQ ID NO: 182692 - RNA, 76 nt, Homo sapiens
agccgggggcccccacggacgcgcgagacaagaggagccacaaacccagaaaagcgccagccgccccgaggaagga

SEQ ID NO: 182693 - RNA, 81 nt, Homo sapiens
gcgaccggagcgaacgccacgccggggccgccaggcacagagaaggcaaacgggagggcgaggacaccaagagcagcgcgg

SEQ ID NO: 182694 - RNA, 60 nt, Homo sapiens
cggaccaagcggcaggagcccaaggccagcgcaggacaccagccagcagccaggaaccgc

SEQ ID NO: 182695 - RNA, 76 nt, Homo sapiens
cgcagggcgcgagcgcccggggcacgcccgcggccgccggacggccgggcgcggagggcgccggccgagcccggga

SEQ ID NO: 182696 - RNA, 82 nt, Homo sapiens
accccaacaacacccaaagaaaggaccgagccagagacaacaacggcccacgcccggccgcgcacgaagggaagggcgcaca

SEQ ID NO: 182697 - RNA, 64 nt, Homo sapiens
gacggggacccaccccccgacagggaaaacaccagcccaaacggaaagcagggggacagaccgg

SEQ ID NO: 182698 - RNA, 58 nt, Homo sapiens
caagacagaaagcggaaggaaaggggagccgaaagacgaacaggcaggacgccagccc

SEQ ID NO: 182699 - RNA, 75 nt, Homo sapiens
aaaagagcccgcaagaagaacagagacagcagccaaacccccagggcggggcggccggcagaccccgggcccgcc

SEQ ID NO: 182700 - RNA, 76 nt, Homo sapiens
cccggcgcccgcggccagccgcaagacccgccacaagcaacgcgggaagagaagggaggagcgggagcacccgagc

SEQ ID NO: 182701 - RNA, 77 nt, Homo sapiens
ggcggcagcagcggggcggggcgaagaagcagcacaaggcgagccagggaaacacaaagaagacaccagaagggcca

SEQ ID NO: 182702 - RNA, 65 nt, Homo sapiens
gcccggcaaaagcgcacaaacgcccaagcgaaccagaaaaggaaaacgggaccaacggggaaagg

SEQ ID NO: 182703 - RNA, 73 nt, Homo sapiens
gaaccaggacaaaacagcgccaaagcgcgacaggcacaaacgcagaaagggaggggggaaggaggagacaaaa

SEQ ID NO: 182704 - RNA, 57 nt, Homo sapiens
gccgcgccccaggccgcagccccgcgcggcgccccgcgcagcagaagaagccgaaag

SEQ ID NO: 182705 - RNA, 76 nt, Homo sapiens
aagagcacggacggagcagcggagcgggcacggacacaagaacgagagccaaaggccagccacgcacagggcccag

SEQ ID NO: 182706 - RNA, 60 nt, Homo sapiens
accacggcaccgccccagaacggagacgcagaaaaaccacgacaaagaaggccaacagaa

SEQ ID NO: 182707 - RNA, 54 nt, Homo sapiens
accacaggaacaccagcaggaaggccgaagaggagaagcagaagaccaggcagg

SEQ ID NO: 182708 - RNA, 85 nt, Homo sapiens
aaagacccagcaggagcagaccgaaggcaaggaaaaagcagcaaagggagaaaagaaggccaaacagaagcaggcccagccgcaa

SEQ ID NO: 182709 - RNA, 111 nt, Homo sapiens
ccggaaaagaaaacagagcgacgagcaagaagcagcccaaagcgaagacagacgcaaggaccaccgagagcgcgccaaagaaaaaagccaaagccagaaaaaaggaacgcc

SEQ ID NO: 182710 - RNA, 75 nt, Homo sapiens
gagcacggaagcgcgacaacacacacacagcgacagcacaagaagaacaccccaccagaccacccagcaagccca

SEQ ID NO: 182711 - RNA, 80 nt, Homo sapiens
gcacagacgaaagaaggccaaagaagcagaacgacaaaagccaagggcaaacgcggagaagcggaggagaccaaggaggc

SEQ ID NO: 182712 - RNA, 62 nt, Homo sapiens
ccggggcaaaaagaagacacggagcgggccaaagagacaagggaagacaggacgaaaagcaa

SEQ ID NO: 182713 - RNA, 36 nt, Homo sapiens
aacggggcacgcggccaacgggggaccacaggcagc

SEQ ID NO: 182714 - RNA, 65 nt, Homo sapiens
gggggaccagacgcgcgggcggccagcccgccagcaagcccccccgccccgaaccccggcagcgc

SEQ ID NO: 182715 - RNA, 59 nt, Homo sapiens
cggcgaagcaaaggaacgcgccggaagaaaaggccccaccaaacccagagggcccacac

SEQ ID NO: 182716 - RNA, 125 nt, Homo sapiens
cccgccggacagcacagcacacgacacccccgggaccgcggagagaagcagcggacagcagagaccccaagaagaagcggaagaggagccgcggaaccaagacacaaggaacagaagacaggacc

SEQ ID NO: 182717 - RNA, 79 nt, Homo sapiens
gcggaacccggggccgggacgcagcccggcggcagcaggaacagagacgaaacagccgaaacgacagaagaggacaccg

SEQ ID NO: 182718 - RNA, 75 nt, Homo sapiens
ccaggcacccgggcccagccgggaacccccacgcggccagcgaaaacgcccaggaggcaaggaggccacggggcc

SEQ ID NO: 182719 - RNA, 84 nt, Homo sapiens
gcccagaaccaccccgcggagagcgcaagccgggcagcagcccagcggcagcagaaagagcagagcggaaagaagcggagcggg

SEQ ID NO: 182720 - RNA, 53 nt, Homo sapiens
caacccgcagagccagaaagaggagcaggcagcgcaacggccagcagcaaccg

SEQ ID NO: 182721 - RNA, 74 nt, Homo sapiens
cacagaagcaaaacccacccaagcaggaccccaaacgggcgaggagaccagagggcccagcccaggcgaaccag

SEQ ID NO: 182722 - RNA, 70 nt, Homo sapiens
gggcccggaggcgacaaccccggccaggaacaagggagcccgccagacggcaccaggacaagcgagggag

SEQ ID NO: 182723 - RNA, 71 nt, Homo sapiens
cgaagggcccgccagggcccaacacgagcccagacagacaggagaggagccaagcccaacgggacgggaaa

SEQ ID NO: 182724 - RNA, 52 nt, Homo sapiens
ccaggaaaggaacacggaaaaagcgcgggggaaacgccagcggggggggaga

SEQ ID NO: 182725 - RNA, 70 nt, Homo sapiens
cgggagggggcagccagggcacccaacaccgccgaaagccgggccgaacaaggagaagccacaagaagaa

SEQ ID NO: 182726 - RNA, 77 nt, Homo sapiens
ggcaagacgcgggcgacgccaaccgcaaacagagcaaagccgggccaacgggaagggggaaaggaagaaaaggccac

SEQ ID NO: 182727 - RNA, 55 nt, Homo sapiens
agcaccgcacgcccgcaagggagagaccgagcaggccagggcgggcacaggcaaa

SEQ ID NO: 182728 - RNA, 78 nt, Homo sapiens
cggcggagcgcaagaggcaccagaaacaagacccaaacgcacacaagaggaagcagaagcccagaagggacagggcag

SEQ ID NO: 182729 - RNA, 76 nt, Homo sapiens
gggagaccacaaaagagcagaggaggaacaccaggcacaagcagccgcgacgcagaagagccaacaagaaaggccg

SEQ ID NO: 182730 - RNA, 37 nt, Homo sapiens
ggcacgggcgaccggcccgcgaggagaaagagcgcgc

SEQ ID NO: 182731 - RNA, 81 nt, Homo sapiens
acggaaccacacagggccgccaccaacagagaagacagagcaccaacgaggggaagcagggaaaggccggagagaggaagc

SEQ ID NO: 182732 - RNA, 79 nt, Homo sapiens
gaccgggaccgggcgccacgcgggggcaagacgaaggaacggacgggagacacaggaagagcgggccaaccggggacga

SEQ ID NO: 182733 - RNA, 89 nt, Homo sapiens
gccgcccagcccggccccgcccgcgccggaagagccacgccgaacgaagcgcgcggcaggcgcgcgccgccccaggccgcaagacccag

SEQ ID NO: 182734 - RNA, 62 nt, Homo sapiens
cccgaaccacccgcgcgaaacgggaaaaggcaacagaaagacggcaacacaccggaggcaca

SEQ ID NO: 182735 - RNA, 47 nt, Homo sapiens
gcaagcccacaccacaagaccagaagaaaaccgggacacgaaaaaag

SEQ ID NO: 182736 - RNA, 76 nt, Homo sapiens
cgggagaggacaagaccacgagccaggagcggcagcccacaagcaggaagaccagccccaggagggaaacagagca

SEQ ID NO: 182737 - RNA, 79 nt, Homo sapiens
gggcccgcgccggcaggccggcccggggcgagccccaggaaaagaaaagccaagaggaaagccgagggaagggaagagg

SEQ ID NO: 182738 - RNA, 84 nt, Homo sapiens
ggagggcgcgccgcaggcgaggagcggccggggcgggaggcccgcggagccgaggcgggaggcccaggaggcaagagcgagaag

SEQ ID NO: 182739 - RNA, 80 nt, Homo sapiens
ccggcgagcccccacagggagaaaccccacccccaagaaccaacccccaaaggcgggacaggagaaggaagccaacaccg

SEQ ID NO: 182740 - RNA, 73 nt, Homo sapiens
gaagccaagggacggccaccccaggcaagccacagccaggaaacaccagccccccggcacggccaaacaacca

SEQ ID NO: 182741 - RNA, 80 nt, Homo sapiens
gccgccaccagcccaagagaaaggagaagaagagcccggacccccggcgggcgaacaaagacccaggagcgggggcagag

SEQ ID NO: 182742 - RNA, 60 nt, Homo sapiens
aaaggcgcgagacccagaggccgcgagccgcaaaggaccacgcagaaacagcaacaacaa

SEQ ID NO: 182743 - RNA, 80 nt, Homo sapiens
gcggcggcggcggccagagagcagcagccgccgaacaaccggacggcacccccggcaaggggagcaccccaggaccaaca

SEQ ID NO: 182744 - RNA, 75 nt, Homo sapiens
ggacccgccagcagcgaagaccggacggaaagcacccgaggagaaagggaacgaaaaagacgagcagggaagaac

SEQ ID NO: 182745 - RNA, 57 nt, Homo sapiens
ccccaacagcagagaaacaaggggggacagcggccgaagccagagccggggcggcgc

SEQ ID NO: 182746 - RNA, 59 nt, Homo sapiens
ccgaggcgagacggaaagggaaagggagcagcaccggccacacccacagcacgaccgga

SEQ ID NO: 182747 - RNA, 62 nt, Homo sapiens
cagagaagaggacgcggagacaagagaacggccagacccggccccaacacgaggacgaccac

SEQ ID NO: 182748 - RNA, 71 nt, Homo sapiens
gccgccgccgccgccaccaggcagccacaaaccgcgggacccggcaggaacagaccgccaggcaaacaaaa

SEQ ID NO: 182749 - RNA, 72 nt, Homo sapiens
gagggcacgggcggcagcccgagaccgcagcagaggcagaaccccacccgggcagcgcgaagaccgggggca

SEQ ID NO: 182750 - RNA, 84 nt, Homo sapiens
aggacccgggcccaaggccgcgccgaccgcacgcgcacggaacagcagcaaccccagagacgagaaacccacccagcaacaccc

SEQ ID NO: 182751 - RNA, 61 nt, Homo sapiens
aaaggagcagccagagggccgggcccagcaccgaccggacacaacccgccacgcggagcac

SEQ ID NO: 182752 - RNA, 81 nt, Homo sapiens
gcgcggggcgcaggacggcgaggaccaaccggggcccaaagggaccaaaagaggccccccgggccggccgccggacgacac

SEQ ID NO: 182753 - RNA, 60 nt, Homo sapiens
ggccaccaccgcccagcaagaacgcaagcacaggaccagaaacgaaaggcagcagaagag

SEQ ID NO: 182754 - RNA, 75 nt, Homo sapiens
aaacgccaaggcggcaggcacaaggcccacaaagaaaaaaacacacacgaggaaagacggaagcaagcaccgcag

SEQ ID NO: 182755 - RNA, 62 nt, Homo sapiens
ccaccgggcaggcgagaccagcaccaaggagccccccaagagaacccagggggagccacgcc

SEQ ID NO: 182756 - RNA, 73 nt, Homo sapiens
cgcacaaagccgaggccacacaacgggcacccccgacgccccacccgcccagccacaggagaaagccgagcag

SEQ ID NO: 182757 - RNA, 51 nt, Homo sapiens
cgcagcggggacgcggacgcacgggcccggccaggccccaccgccacaagc

SEQ ID NO: 182758 - RNA, 51 nt, Homo sapiens
ggcagacaaaagggccaaagaagggagagagggccacgacgccccgggcgc

SEQ ID NO: 182759 - RNA, 81 nt, Homo sapiens
ggagcccagccaaaacaggcgacaggggaacaaaaggagccaacaggaccgcgggccagcagcagcgcacgggagccaccc

SEQ ID NO: 182760 - RNA, 75 nt, Homo sapiens
ggagcacaggcaaccgagacaggacagcaacaacccagagagacacagagagaagagagggcccgcacaaggagc

SEQ ID NO: 182761 - RNA, 91 nt, Homo sapiens
cagagaggagagcgaggaggaagaggacgaggacgacgaggaggaggaggaggaggaaaaaggcacggaagacaagcggagacaaagggcc

SEQ ID NO: 182762 - RNA, 77 nt, Homo sapiens
aaggaaaaacggagagccacaaaaaaggaagcgaaaaagggacaaagacaagaagaagcaaaagagaaggaaagcgg

SEQ ID NO: 182763 - RNA, 78 nt, Homo sapiens
agaaacagacgcggagagaagagagacccggcaaacacggaaggcggcaaagcacacaggcgagcgcgaggagaggga

SEQ ID NO: 182764 - RNA, 31 nt, Homo sapiens
ccacgaccgggagaccgacacaggaggaggg

SEQ ID NO: 182765 - RNA, 100 nt, Homo sapiens
ggcggacggacacccagcggcgacacgcgacgcgccaaaacccgcccggaaaggggacaccgacaacggcaagcggagaagagcaaggccgaaccgagag

SEQ ID NO: 182766 - RNA, 50 nt, Homo sapiens
gcagaacaaacggaccagcgaccgggcaggccggagcgagggagagcagg

SEQ ID NO: 182767 - RNA, 76 nt, Homo sapiens
gcgagagcagacacgaggaagaccagccccagaggcagacaaggcacaggcgaccgaagccaccgacaaggaaagg

SEQ ID NO: 182768 - RNA, 71 nt, Homo sapiens
aaccggagaaagacacggacgcaggaaagcccgagcagaaaggcgcccggcgggggcgccggccagggcgc

SEQ ID NO: 182769 - RNA, 61 nt, Homo sapiens
cccaccccccggccccggacccaccacacgcagaagacaccagggccgggagggcccgaac

SEQ ID NO: 182770 - RNA, 75 nt, Homo sapiens
caacaggacgccgccaaggagggcacaggaaaggaaacagggaaacaacagaccaaagggcagaaaacaaagaga

SEQ ID NO: 182771 - RNA, 78 nt, Homo sapiens
acgagagcgcagaacccgagcaagagaaaggagagagcgagcgacgcgcccacggaggaggcgggggccccacaagaa

SEQ ID NO: 182772 - RNA, 83 nt, Homo sapiens
caaggaaaagaggagcagacacggggcaggcgagcccgccacagagccgaaagacagcaagaaagcaccagccaagcagaagg

SEQ ID NO: 182773 - RNA, 77 nt, Homo sapiens
cacgggccggaacccgcaggccgcgacccagcaaggagccgcacggggcgagaaaggcgcacaccaagcggcgcaca

SEQ ID NO: 182774 - RNA, 69 nt, Homo sapiens
aggaaaacaggaacagagcgagggaggagagagggagagccaaagaagggcgccggaggaggggccccc

SEQ ID NO: 182775 - RNA, 85 nt, Homo sapiens
ggagccgaagccggagggccacccgacgcagagggcaggccccagccagaaagacgcgccagcaggcaacaaaaccaaggggacc

SEQ ID NO: 182776 - RNA, 70 nt, Homo sapiens
ggcccccgcccgacgcccggcgcacggggcgcacaccacggcccggagggcccagaccgaagccaacccc

SEQ ID NO: 182777 - RNA, 75 nt, Homo sapiens
gagggcggccgacagagccccggcccccccgcagacccccggaagaaggaggccgaccaggccgacaaagcagac

SEQ ID NO: 182778 - RNA, 36 nt, Homo sapiens
gacaggccggaacccgaaagggggggccgcacagag

SEQ ID NO: 182779 - RNA, 83 nt, Homo sapiens
gaacaggcgccgccaccacgcccagagccgccggccccaagcggaggcaggggcaaccagccacgcaacaccaccaccccggg

SEQ ID NO: 182780 - RNA, 81 nt, Homo sapiens
ggaaaaacccaaaacggagcagaaacaccaaaaaccaggccggaaacagaaacaacgcacacggcgccacacgaggccacg

SEQ ID NO: 182781 - RNA, 62 nt, Homo sapiens
gggaagcagccgaccagccgcggagccgggggcagggagcagaagggcagcaaaccgaagag

SEQ ID NO: 182782 - RNA, 39 nt, Homo sapiens
cccccgcaagccacacccagaacggccgacccggggcac

SEQ ID NO: 182783 - RNA, 70 nt, Homo sapiens
gaggcaagaagaaagagacgagagggccggcagaaaacgacaagacgcggacggagcccacacccgcaag

SEQ ID NO: 182784 - RNA, 107 nt, Homo sapiens
cgacaccgcacgcgcacggacggcacagcccgccgaacccgaaaggagaaggacagaaaacgggccccagacacaagccccaccaagaggacaccccaggaacgcgg

SEQ ID NO: 182785 - RNA, 63 nt, Homo sapiens
cccagacaggggaggacagaacagaaaaagggacacccaaacgagacaggaagagggcgaacc

SEQ ID NO: 182786 - RNA, 77 nt, Homo sapiens
ccccgacccacgcccggccccgacacgcaggagcagggcgcagaagccgagaacgggagaaagcgggacaacggagg

SEQ ID NO: 182787 - RNA, 72 nt, Homo sapiens
ccccggccggaggcaccagcaagaaaaagcagcacgaaggcgaggaaccagcagacaaaaaagaagaaaaac

SEQ ID NO: 182788 - RNA, 81 nt, Homo sapiens
aagaaacaaaaaaaggaaacacacaaacgcagcaccaggagacaaagccacaaaaacaccagaaaaaccaagcagaaaagg

SEQ ID NO: 182789 - RNA, 120 nt, Homo sapiens
ccgggacggaccgagaccggaccgagagcggaccgagagcgcgaaacgcacgagaaggggacccagaaagaagcacaaaacaaacgacagcagcagagaaacacgcaaagccgagggacc

SEQ ID NO: 182790 - RNA, 78 nt, Homo sapiens
gggccacccaagaggagccccggggaacccgcagcacaccagggggcaggcccgggggcacccgaggaggaagagggc

SEQ ID NO: 182791 - RNA, 87 nt, Homo sapiens
gcggacgggaaggcgggagacgagaagccgaaaagcgcagcgagcggagccgccggagggaacgaagaaggacagaacggacaaggc

SEQ ID NO: 182792 - RNA, 83 nt, Homo sapiens
gcgacacgacggcggaacggggaacgacggcccagcaggcggggaagagaaaggggcacacgggccacagaggaccagcaagg

SEQ ID NO: 182793 - RNA, 72 nt, Homo sapiens
acaaaccgacagagcaaaacaaaagggaccgacggaacgcacagggggcccccaaagggaagccaaacacaa

SEQ ID NO: 182794 - RNA, 36 nt, Homo sapiens
cgcaagaggcaggaggccccgcaccgccgcgcaccg

SEQ ID NO: 182795 - RNA, 71 nt, Homo sapiens
gaaaacacaaaccaaagccagcggacgaaaaggcccaggccggcggaaaacccaccgccaaaagagcccag

SEQ ID NO: 182796 - RNA, 80 nt, Homo sapiens
cgccgccgcgcgcgggagcccagggagcgccgcgcgaccaggaggcggcggcgccgccggcgcgagacgacgggaccgaa

SEQ ID NO: 182797 - RNA, 86 nt, Homo sapiens
gagacagccagcacaccccgcgagcaagagagaagaagaaggaggccgcggccagaaacccaagaaaaagcgaaggaacgcagagc

SEQ ID NO: 182798 - RNA, 70 nt, Homo sapiens
cggagacaccacaccaacgaacgcaagaaccacccggcaccaccacccccagccggacaagcagcgccaa

SEQ ID NO: 182799 - RNA, 86 nt, Homo sapiens
cgggcgaagcgacgagccgcgaggaggagggggaagacagagaagaccacacaaccgaaggggccgggcaggacggcccggggcag

SEQ ID NO: 182800 - RNA, 86 nt, Homo sapiens
cccaagcgcaacaccagggaggccaagcgaccacccaaagaagaaaccaggagcgaaggccgccccgcgggcgacaccgccgcaac

SEQ ID NO: 182801 - RNA, 64 nt, Homo sapiens
aggacagacgcacagacaccgcaggaaaaacaagaaggggggcacagcagaaggaaggagcaga

SEQ ID NO: 182802 - RNA, 64 nt, Homo sapiens
acaaggaacaacaaccgaaagccacccacacaaacagcagaacaaaaccagccaagcagaggag

SEQ ID NO: 182803 - RNA, 84 nt, Homo sapiens
aggacacccggaagagaagccgaaagcaggggaaaggaagccaaagaccagacacaaaagcacaagggaaaaacaagcaaaagc

SEQ ID NO: 182804 - RNA, 71 nt, Homo sapiens
aggcgaaagcggaacgagcgagaacaagccaaagacagaccgccagcgcagcccacaaaggacaacgaacg

SEQ ID NO: 182805 - RNA, 97 nt, Homo sapiens
ggcgggacccaccacccaggcaccagcaaaagggaggggggaagacagggcccagcaccacaggacgggccgggaagccgccagcagggacagccgg

SEQ ID NO: 182806 - RNA, 58 nt, Homo sapiens
agggaacccgaccggacccagccccagaagagaaccaccaaaggacgaagaaacccgc

SEQ ID NO: 182807 - RNA, 72 nt, Homo sapiens
ggggcagcagcagcggcccgagggcgcggcggacgcagggcccacacacacgcagggcgcccagcacgcccc

SEQ ID NO: 182808 - RNA, 88 nt, Homo sapiens
caggcgcggccaggcgcagcgggaaagcgccaaggagcagaagacgaccggcagcgagacaggaacggccgaacacagagggagaaga

SEQ ID NO: 182809 - RNA, 74 nt, Homo sapiens
accgcaaacaaggagagccacgagcagccgagggggggaaaccacaccacccgccacagacagggaggaggaca

SEQ ID NO: 182810 - RNA, 69 nt, Homo sapiens
ggaagcagggacgaacaaaacagcggaaaagggcacagaccagaacccaaaggcggcggcaaaacggac

SEQ ID NO: 182811 - RNA, 93 nt, Homo sapiens
gcgcccgagaaggggacggcgggcgagggaggggaccgccgcgaacggccgagcgaccaggagaggagcccccgcccgaagaccggggagggc

SEQ ID NO: 182812 - RNA, 80 nt, Homo sapiens
cgggaacgcgacgcgagagaaggacccacggcgcgcgaagggcgcgcaaacgaaggaaaaggaaaaccaacagcgccaca

SEQ ID NO: 182813 - RNA, 77 nt, Homo sapiens
gcgcccgacccagcacccacgagcagacagccccgacacgcgcacacaaggaagggaaaaggccgaggcacagcggg

SEQ ID NO: 182814 - RNA, 53 nt, Homo sapiens
agaaaggggagggaacccaacagaccccccacccccggaccccccccacccga

SEQ ID NO: 182815 - RNA, 81 nt, Homo sapiens
gccgagcaacaccgcgagccgcgcggcgcggggccccgcggcggaggggacaccagcagcgccgccggaccaccgggcagc

SEQ ID NO: 182816 - RNA, 70 nt, Homo sapiens
cgcagccgcggcggccccgagcggcagccagaccgcgagcgcgaaaacgagggacacgcggccaccggac

SEQ ID NO: 182817 - RNA, 54 nt, Homo sapiens
ccaacaaacacccgaaggaccacacgaggacacagagacggcaagcaggaaacg

SEQ ID NO: 182818 - RNA, 81 nt, Homo sapiens
caacccggggccagagcacccgcacccggagggaaacgggcaagaggccccagcccggaaaaggagcaaacgaacacaaga

SEQ ID NO: 182819 - RNA, 84 nt, Homo sapiens
gggaccaggaggagcggcaggacaacaaccggagagagcccgcggcggaagccggcaggacacgaaagcccaacgggagacagc

SEQ ID NO: 182820 - RNA, 79 nt, Homo sapiens
aaccaacaagaaggcaccaggggcgggaggaggaggaagcgacgcgcaacaagcgcagagcgccagcaacccaccgacg

SEQ ID NO: 182821 - RNA, 80 nt, Homo sapiens
caggaaggagacacggccccccaaggaaaacagacccaaagagaagagaagggcgccccacccaaagccccggacccaac

SEQ ID NO: 182822 - RNA, 74 nt, Homo sapiens
ccgccgcgcccacggccccgccagcaaggcggcgcgcccaggaggagcacaaaaggccgcagcgagccgccgca

SEQ ID NO: 182823 - RNA, 78 nt, Homo sapiens
agaagggcgcgggagggggccggcgcccgcggcaggcacccgaagagagacccagagaaggccgcaggcgccgcgaag

SEQ ID NO: 182824 - RNA, 55 nt, Homo sapiens
gagagcccaacgccgggccaagaccccgagaccagaggacaagacaaagggagca

SEQ ID NO: 182825 - RNA, 55 nt, Homo sapiens
caccgggagcggcgaagaggcaccggaggaggcaccggacaagagcagagaaaga

SEQ ID NO: 182826 - RNA, 77 nt, Homo sapiens
cggcggcaacaccccccaacgagggagccgggaggccccacccgccaggccaggagcccaggcgaggaagagacaag

SEQ ID NO: 182827 - RNA, 80 nt, Homo sapiens
gcggcgcgcaggagcggagaccggacgcccggacaagcagcaaaggaggggcagcagcaggacagggaacccgggagaca

SEQ ID NO: 182828 - RNA, 85 nt, Homo sapiens
ggcggaggacgacgcgccaaccagacgcgcgggaggcaaaagcagaccggaaaacccaccggcaagaccacacccgaggggagcc

SEQ ID NO: 182829 - RNA, 106 nt, Homo sapiens
gcagccggagccgggccgcagcgcgaggccgggccgggggagaccgcgagcacagcaagcgggagcaggcagaccaaaggaacagaagccagggccggaaaaccag

SEQ ID NO: 182830 - RNA, 75 nt, Homo sapiens
gcagcagcaagagggaaaaaccccaagaggaagacaaacaaccagcccagcagaaggaaaacccaggcagcaaag

SEQ ID NO: 182831 - RNA, 80 nt, Homo sapiens
agaagggaagcagaggacaccgggcccaaaaaaggccaccccgagaaagggacagaagacaacagaaagaaggggaaaag

SEQ ID NO: 182832 - RNA, 79 nt, Homo sapiens
acagagccaggcaggcacggcaaccaggaggggaaggccaacgcagacaccagagaagaaccggaggacggcacaagca

SEQ ID NO: 182833 - RNA, 71 nt, Homo sapiens
gagaccaagagacagacaccgccccgagacgaggagaagacagaggagccagaccaagagacagcacaggc

SEQ ID NO: 182834 - RNA, 76 nt, Homo sapiens
agacccggcgcgaccacgcccggcgccccaccccaggcgggcacggaagaagcaaacaggagcacaagcaccgaaa

SEQ ID NO: 182835 - RNA, 80 nt, Homo sapiens
ggcgcccgcccccaggcgcgcccagccccgcagccagggcgaacccccgcaggggacagcagacgcagagacacggagaa

SEQ ID NO: 182836 - RNA, 89 nt, Homo sapiens
cgggcggagacaggccaacacgcgggcagcgaacaagcgggagcaaggagggcgaagagcgaggagcaaaagaggcggcaaggcagccc

SEQ ID NO: 182837 - RNA, 75 nt, Homo sapiens
gcgggggcggccggaacaccgcaggcaggggaaaggaagggagcagcgaagccagggaggagccgaaacaaaagg

SEQ ID NO: 182838 - RNA, 69 nt, Homo sapiens
aagccacacagccgaaaacacccacaggaaccacacggacggcggccaaccagagaggaaagccgagga

SEQ ID NO: 182839 - RNA, 73 nt, Homo sapiens
caaacgcacaggcaccccaggcggccaggggccccggagccaggcgagagccacagaaggaggaggggacagc

SEQ ID NO: 182840 - RNA, 59 nt, Homo sapiens
caaaaagaaaagagagagagaccaccccccaaggcacccgaccgacccccagggacaga

SEQ ID NO: 182841 - RNA, 69 nt, Homo sapiens
aaaagaaggggaacccggaccgcgaaggcgggggagacgaaaaccagacacaggacaaccagaagaaca

SEQ ID NO: 182842 - RNA, 65 nt, Homo sapiens
aaggaccaagaaccaggcaaaccgaccaacggcggagagggcgagcgacaccacagaaagagaca

SEQ ID NO: 182843 - RNA, 84 nt, Homo sapiens
cagccagcgccggaccccccacccacgcgaacgagagggacacggagcagagcgccgcaaggcacagccagcccgccagggaca

SEQ ID NO: 182844 - RNA, 54 nt, Homo sapiens
caagaacgcacccagcgagacaaagaggcacccccacggcggaccagcacagaa

SEQ ID NO: 182845 - RNA, 78 nt, Homo sapiens
cgaaggggggagaacgggcggcccccccacgcgacccgggccacccccacgccgaagaacgcggaagacggagccccg

SEQ ID NO: 182846 - RNA, 81 nt, Homo sapiens
cagaaacacaacaaaggaggccggaagaacccaagacggcgaaagggagccgaggagcagcacggcaccacgcaacagacg

SEQ ID NO: 182847 - RNA, 75 nt, Homo sapiens
gacgggcggcgacgccggaggggccaggcaccgccgcaaaccaacgccggggaccagaacagagaagaaagcagg

SEQ ID NO: 182848 - RNA, 73 nt, Homo sapiens
gccagccaacgacaacaccagggaagagcgagacaagagccaaggacagggcccgccaccagaaggacccaag

SEQ ID NO: 182849 - RNA, 80 nt, Homo sapiens
cagacgccaagagaagaacaacaaacggcaaagaacacgacgaggccaggcagcgaacaaagcacaaaagagaccggcca

SEQ ID NO: 182850 - RNA, 82 nt, Homo sapiens
agaggcacgaacaagaaagggacgaccggacagggagcaaccaacaagaggagaagacgggaggaacgcagcaggaggcaaa

SEQ ID NO: 182851 - RNA, 75 nt, Homo sapiens
cagccagccagggagaaaaaaggaaccacaacggaccagcaggcaagcagaagaggaacagaagaagcagagcag

SEQ ID NO: 182852 - RNA, 69 nt, Homo sapiens
gacggcgcgcgaagcagccaaccgcacagaggacccccagacaacggaacgacaacggcgagggcaaag

SEQ ID NO: 182853 - RNA, 81 nt, Homo sapiens
cgccaaggacccgggacagggaccagcgggaaggcagacagcgagggcgacgaggagcagaagaggggaagaaagagaccc

SEQ ID NO: 182854 - RNA, 57 nt, Homo sapiens
cagaccagacggaggaggagccggacgggccagggaaagaaaacaagccacccagac

SEQ ID NO: 182855 - RNA, 80 nt, Homo sapiens
cggagagagagagagcccgcagcggaaagagcgggcaggccccacacaggaaggaggaggaccacaaaccccgcccagca

SEQ ID NO: 182856 - RNA, 77 nt, Homo sapiens
caaaacacacaccggccaaagagcggaaaggcaaaaggacagaccaacaagccacccacggcgccacccaaaagcac

SEQ ID NO: 182857 - RNA, 61 nt, Homo sapiens
aagcaacgcccagcagagagacagagccaggagaaaccaggcaccaaccagcggacacacg

SEQ ID NO: 182858 - RNA, 78 nt, Homo sapiens
acaagcccgagcacgggccagagccagccagggccaggaaagacccaaacaacccgggacagaaacaaagaaacaccg

SEQ ID NO: 182859 - RNA, 105 nt, Homo sapiens
cggagaagggaaacgggccccccggcgagagacgcagccccgcacagaacgaaggggaaaaccgccgccacccaagacagcggggcagggcagaagaggaagcgc

SEQ ID NO: 182860 - RNA, 121 nt, Homo sapiens
aggccccaggggaaggggcccccaaggacccccagccaaggggcccccaaaggccccccagcaagcacagcgccgagacgggccccaagaaggcaaaccggacggcagggaagcggaagca

SEQ ID NO: 182861 - RNA, 85 nt, Homo sapiens
aagaaacacacagcgcaggagaagaagagcaggcacacacccgaaaaaagaagccaaagcgaggaaccaggaggccaaggagaag

SEQ ID NO: 182862 - RNA, 71 nt, Homo sapiens
caagagccaaaagcccagaggaccaaaaagaagccgcgggaggggcagaggccagaagaccgaagacagag

SEQ ID NO: 182863 - RNA, 81 nt, Homo sapiens
acgcgcgcagccaagcccggagccaacaagcggaagggcaacgggcagaggaggaggcagcgccgggaggacagacaaaca

SEQ ID NO: 182864 - RNA, 81 nt, Homo sapiens
acaaaacccggcgaagccaggcgagccaccacagcacagaaaaagcggggaaggggggcaaaaaaaagaagcaagcgaagc

SEQ ID NO: 182865 - RNA, 60 nt, Homo sapiens
ggcgaaaacagagacagaggaaacggcgaggaaagagaggagccccggaaagaaaaggac

SEQ ID NO: 182866 - RNA, 77 nt, Homo sapiens
gcaaagggagccccgaacgcagggccggggaaggccaaagcaaacagcgacggaagacaagacaccgggagggaccc

SEQ ID NO: 182867 - RNA, 77 nt, Homo sapiens
gcgcgcacggcaagaaaaccaggagcacagaggggaagcaacgcggcagcagccaggcccggacggccacggaggca

SEQ ID NO: 182868 - RNA, 75 nt, Homo sapiens
ccgagcagcgggaacagccagcccgagggagaggagggacaaacacacacaggaagagagccacgcgcaggaaac

SEQ ID NO: 182869 - RNA, 70 nt, Homo sapiens
gaaaaagaaaaacgcagcgcacgaagaagagaaaggagcggacgagagaaaaaggccaggagaagagggc

SEQ ID NO: 182870 - RNA, 68 nt, Homo sapiens
gcagaaaggagcagaagacaaaacaggcagaaaacaacccaccgagggcgcgcacagggacacaacaa

SEQ ID NO: 182871 - RNA, 52 nt, Homo sapiens
gcggagacacggggaaacgcagcggagcggcggacaccagaagagaaaaggg

SEQ ID NO: 182872 - RNA, 75 nt, Homo sapiens
cagacgcaaacaacggaaggccaagagaggccaacagaggaacaaggcccgcagaacccaagagcaaaagcagcc

SEQ ID NO: 182873 - RNA, 87 nt, Homo sapiens
accggccgccgaccaagacagagcaaggccacgacccacgagacaggggcccaagaaaaagcaccggacccagacagacacagcaca

SEQ ID NO: 182874 - RNA, 109 nt, Homo sapiens
cgggaacccgaagaagaccaccgggagagagggaaaaaacaaccccgccgaacaagacaaaccagacagagaaagagcaaccagaaaaccaccaacagcagcaggaaac

SEQ ID NO: 182875 - RNA, 69 nt, Homo sapiens
ccgccggcagccacccggccaccaggaaggaggaagcaccggagcaaaacgggaagagccagaagcaaa

SEQ ID NO: 182876 - RNA, 56 nt, Homo sapiens
gcagcgagcccacagaaacgcgcaggcagggccaaagaggaaacgcgaccaaacag

SEQ ID NO: 182877 - RNA, 63 nt, Homo sapiens
gaagacccccggaaccgcaaacccaacagaacccaagaaggcagaagccagccccgcaggccg

SEQ ID NO: 182878 - RNA, 66 nt, Homo sapiens
gggaccagaagacaccgcgacacagcaggggccagacaaccagacccgggaggcaagagacgagga

SEQ ID NO: 182879 - RNA, 78 nt, Homo sapiens
acaaccacgcagggaagcccaggggcagggcgaaagaacaggaccgaaccggacacaccccagagcaagagaaaacca

SEQ ID NO: 182880 - RNA, 78 nt, Homo sapiens
aggcacagaggagcccccaagaggcacccggacacgaccaaaacccccaaagccaccagaaagccgcgagcccacaga

SEQ ID NO: 182881 - RNA, 76 nt, Homo sapiens
gcggcggagacagcggaagggaggcgcgcggcagcaggggcgacgaggcgggacgcaggaagaggggcgaggaggc

SEQ ID NO: 182882 - RNA, 71 nt, Homo sapiens
gagaaggaccaagaaccaggccaggaaaggcgaacaccccaggccgcgaggcccccgagccagcaagcagc

SEQ ID NO: 182883 - RNA, 72 nt, Homo sapiens
agaaaacgaggggcggaacacccgccaaagcagagaaaaaaaaacaaccaccagcgagcaaaaaggcaaaga

SEQ ID NO: 182884 - RNA, 94 nt, Homo sapiens
gcagcagcagccccacaacaggccccccgccccccccccgcgggcaccgaggacccgcccgcccagccaccacccggaagaggcagacggccgg

SEQ ID NO: 182885 - RNA, 83 nt, Homo sapiens
cgggcaggagcggcggccaggccagacccgaaggccaggagacccgaccccaagggaccaaaagccagccccacggaggaacc

SEQ ID NO: 182886 - RNA, 74 nt, Homo sapiens
accagaagagaaagagagaagccaaaccccagagcccagaggcccggaaggcgcaaaagggggagaacaacacc

SEQ ID NO: 182887 - RNA, 61 nt, Homo sapiens
gcagcccacagcgcagccagcacccagaggcgccagggcgccacccccgcgaaaaggcgag

SEQ ID NO: 182888 - RNA, 75 nt, Homo sapiens
ccaggcgccaggaacagcgggacccaggcagaaccaaaggcaagaaggaaaaaacacgacacaccagagaagagg

SEQ ID NO: 182889 - RNA, 67 nt, Homo sapiens
gccccgagagcggacacagccaggaaggaggagggcaacgaacaagccacagaccaagcaccagcag

SEQ ID NO: 182890 - RNA, 72 nt, Homo sapiens
gcaccacccccgcccgaccgcccagcccccccacagagacgaggacgcgcacaggaaaggacgcggaacaag

SEQ ID NO: 182891 - RNA, 76 nt, Homo sapiens
cagccgcagggagaacccgaggcggccgacccacgggaacccacccccacacgagaccaggacacgagacagccag

SEQ ID NO: 182892 - RNA, 96 nt, Homo sapiens
acacagccacaggggggagacgggaccagcaagccgagaaagggaggcggaacagggacagggcgaaacaaccaaggccgacaccacacgacaaaa

SEQ ID NO: 182893 - RNA, 49 nt, Homo sapiens
gccagaaaaggaaggcagacaaaacgaagggagcaccggccagccagga

SEQ ID NO: 182894 - RNA, 39 nt, Homo sapiens
gggaggaggaggaccggagggacccggcaaagagagagg

SEQ ID NO: 182895 - RNA, 96 nt, Homo sapiens
cccgcgacggagggcgccagacggggccggaggcggggaggagcccggccagcccgaggacagaccccgaaaagagcccaacaggaaaagagaaca

SEQ ID NO: 182896 - RNA, 59 nt, Homo sapiens
gaagcgcccgcaccaggacacagaaaaccagaaaacggacaaaaacagaaaacccacaa

SEQ ID NO: 182897 - RNA, 72 nt, Homo sapiens
gcaccaacacgcacaaaaagggcacaccagcagaccaagaaccaacgaggggagcagacaccaaaccagaag

SEQ ID NO: 182898 - RNA, 57 nt, Homo sapiens
accccaagccggaccagacccgggaaaggccccccgggcaagccagcaccgagaaac

SEQ ID NO: 182899 - RNA, 71 nt, Homo sapiens
acaaggggccgcagcgcccagaacacagggccaaagaaggggccgccagcgaaaaccaccgaccggcagca

SEQ ID NO: 182900 - RNA, 73 nt, Homo sapiens
cgcagcaagcccggcccgcagggcgaagagccaagaaggggacaaggagaagaaaccgccgaccagaggggag

SEQ ID NO: 182901 - RNA, 77 nt, Homo sapiens
gcagaaaacaaaaaggccaaacaaagcccagcgagagagccagacagacagaaaggaacacaagccccgaaaggaag

SEQ ID NO: 182902 - RNA, 68 nt, Homo sapiens
caaggacagccaagaacaaaaacagggcaaaaagaaaccaagaggagcagcaagacgggacaaaagaa

SEQ ID NO: 182903 - RNA, 81 nt, Homo sapiens
cgcgcacccaaaacccagacacagcagccccgcacgcaagagagaggagcgagaggaagcggaagaaaaccaacaaaggac

SEQ ID NO: 182904 - RNA, 114 nt, Homo sapiens
ggaggcgggacccaagaaccgaaacagagggccgagacgcgccaaacaggcacagcagacagaacaggccgacggcgcaaggccacggcaagcaccgggagcagcagcgaagcc

SEQ ID NO: 182905 - RNA, 69 nt, Homo sapiens
agcacgcccggcaccccgaccagggccaaggccaagagcagacgagacggagagaagacgaagagaagg

SEQ ID NO: 182906 - RNA, 77 nt, Homo sapiens
gaggcgcgggggaggaggaggccggagaaaggaaaaagacccgccgaggccagcgggagcccccgaccccaggaggg

SEQ ID NO: 182907 - RNA, 83 nt, Homo sapiens
acgaggaagcagcgaacgagaaccaaggcggacgcggcgagaagacacggcacagcgaggagaacgcacccaaccagagaaag

SEQ ID NO: 182908 - RNA, 92 nt, Homo sapiens
gaacaaaccgaagaacagcgggaaagaaggcaaaacacgggacacagagcgggacaaaacagcaggaggacaaaaagaagacagaacgcaaa

SEQ ID NO: 182909 - RNA, 86 nt, Homo sapiens
cagacgcagccgagacaccagcccgaaacaccaccaaggggaacccacacccgcccccagggccaccgcaggacgccgacaccacc

SEQ ID NO: 182910 - RNA, 56 nt, Homo sapiens
aacagaacggaacaaggacggaaaaaagaccgaccaaggacgacccaggggaggag

SEQ ID NO: 182911 - RNA, 69 nt, Homo sapiens
acggaaccaacacacaaagccgcagaaagcagcaaagagaagccagagcccaaggcccgcggaagccag

SEQ ID NO: 182912 - RNA, 83 nt, Homo sapiens
agagccgaggagccagagcaaggggaacgccacggacgggccggacacaagagggcaagaaaggcgcgacgggccgaaaaggg

SEQ ID NO: 182913 - RNA, 70 nt, Homo sapiens
aagaacaagaaacccacacacagacgccaagacgagaagggaaaaggaacaaccgaaggagaaggacacc

SEQ ID NO: 182914 - RNA, 53 nt, Homo sapiens
cgcccagccccgagagcgggaacaggcaaacccacaccaggaaacaggacgcc

SEQ ID NO: 182915 - RNA, 74 nt, Homo sapiens
agcggagggggacaaggcccagaggcagcccagggccgggcaggccaaccagaggacccaagaagaccagccga

SEQ ID NO: 182916 - RNA, 75 nt, Homo sapiens
gcccgcagaaaagacagaaacagacagacagagagaaccaggcgcaacagaccccaggccagacaaacaagagca

SEQ ID NO: 182917 - RNA, 73 nt, Homo sapiens
ggggggacggagagacaagaaacccagagaacgcccccgacaccacaaggcgcgagacacggaccaccacccg

SEQ ID NO: 182918 - RNA, 71 nt, Homo sapiens
agaaccagagaagccccggaacgcagcgaaagcacacccaagggaggccgaagcagagaacacaaacaccc

SEQ ID NO: 182919 - RNA, 57 nt, Homo sapiens
aaacgagccaggaacaaagagcaaggagacagacccagcacggaccccccccccagc

SEQ ID NO: 182920 - RNA, 62 nt, Homo sapiens
gcagggagccccagggccgggaggcacacccagaagccacaggagaagcaagaggcggcccc

SEQ ID NO: 182921 - RNA, 73 nt, Homo sapiens
ggaagaaaggacagggagagaagccaagaaagacagaccccgggcacagaaaaggggaacgaggagaggcgca

SEQ ID NO: 182922 - RNA, 77 nt, Homo sapiens
cgggggccacaaagccccccggagacgcaaccaagccagggaaaagaacagcgagaaccgagccagaaaaacgagac

SEQ ID NO: 182923 - RNA, 65 nt, Homo sapiens
ggcaggaagaaggcgagcggaggcgaaaaccggcaccgcggaaaacaaagccacggaaaaacgcc

SEQ ID NO: 182924 - RNA, 68 nt, Homo sapiens
acagcgggccacggaacaagaaagcaagcaggaagccaagggaaaccaggccaggaaaaaacacggag

SEQ ID NO: 182925 - RNA, 77 nt, Homo sapiens
gacgcagaagcccgccgcccccaaagcggaaccggacaccgagggcaacggcaggaaacggaggaaaacaacagaac

SEQ ID NO: 182926 - RNA, 50 nt, Homo sapiens
aaaccccagccgcccgcgcggacgcgaggccgagagagacggggcgccgg

SEQ ID NO: 182927 - RNA, 86 nt, Homo sapiens
agcggcccccacccagccccaaggagcgacacacaggagcaggggagagaagacagaagaggggagaggcagggagggccagacag

SEQ ID NO: 182928 - RNA, 82 nt, Homo sapiens
ggggacgcacggggcaggcgcgccccccggggcccaggccgccggcccggacgcaacaggcgacaaggccaagccgccaaag

SEQ ID NO: 182929 - RNA, 77 nt, Homo sapiens
acgcacagaggggcaccgggccgggcccgaccccaggacacaaccggaacaggacccacccgaacagcaggcagcgg

SEQ ID NO: 182930 - RNA, 78 nt, Homo sapiens
cgggggaggccccagcgcgccggcggccccaccccacgcagccccccacgcgcagcccgcagacccgcgccaaggaaa

SEQ ID NO: 182931 - RNA, 81 nt, Homo sapiens
agcagcgccgaagcagccgggagccggagcgggcgcggacgccgaggcaccgaggcaccagaggaggggaggacacaaccc

SEQ ID NO: 182932 - RNA, 75 nt, Homo sapiens
aaaacaaacggaaaaaaagaacagagaaaaaaccaacaccccggcagccgggaaaccggagagaacagaaaaaaa

SEQ ID NO: 182933 - RNA, 86 nt, Homo sapiens
agccgcacagccgcggcggcagcagcaggagagggagggggaaggccagggccagacgcagcgccccagagaaggacgggaggaca

SEQ ID NO: 182934 - RNA, 71 nt, Homo sapiens
cgacgccagcagagacgagggccgggggcaagacggagagaacggcccaggaagcccacggccgaacccag

SEQ ID NO: 182935 - RNA, 57 nt, Homo sapiens
ggcccagcagccaggggagccccccccacgacgaagacccaagccggaggcgcagac

SEQ ID NO: 182936 - RNA, 72 nt, Homo sapiens
agggaacagcggacaagaagaagacagaacgcccccaccaccgcaaacaccaagaaaaccaggcccgacagc

SEQ ID NO: 182937 - RNA, 45 nt, Homo sapiens
cggaaggaggcaacaccaccaccagggaagaggaagaacgcgaga

SEQ ID NO: 182938 - RNA, 82 nt, Homo sapiens
acagaccgacacgacgcagcacgagaaagaagaaacaaagagggacccagccaccaaaaggaggcgaagggccaggagaagc

SEQ ID NO: 182939 - RNA, 71 nt, Homo sapiens
caggaggaagcgaggccagacagcaagagcacccgacccacaggccagagagcaaaacaaacggagagagg

SEQ ID NO: 182940 - RNA, 62 nt, Homo sapiens
cgcgaccaggccccccgaggggcgcggcaccgacagaagacagaccacaaacaggaggcgga

SEQ ID NO: 182941 - RNA, 69 nt, Homo sapiens
ccgcccagaagaagggccgagggcgcccccaagcccacagcgaagaagggccacccccgacgcccgggc

SEQ ID NO: 182942 - RNA, 58 nt, Homo sapiens
aaaaaggaccaaccggcaagggacaacggccaaacaaccaggacacaagggaccaaca

SEQ ID NO: 182943 - RNA, 85 nt, Homo sapiens
gacggcagcggcggcggcggacaaacaggcaccgcaggggcaggaaacacagggagagccgcagaggccgcccaccacgcccgaa

SEQ ID NO: 182944 - RNA, 75 nt, Homo sapiens
caccggcagcccgccgccagcacggcccgccacgggccccgcagccgcgcccgagcgcccgagcagggacagcga

SEQ ID NO: 182945 - RNA, 67 nt, Homo sapiens
gcgcagggcacaccaggaggacaaaaagcccgggcagacagaaagccacggggccaggccaggaggg

SEQ ID NO: 182946 - RNA, 61 nt, Homo sapiens
gggagcgcggcggggccgcagagggcaagcaggaggaccaagacgacagcggagggaggag

SEQ ID NO: 182947 - RNA, 100 nt, Homo sapiens
ccacgcagcccgcgcccaggcacacaacagcagggcaacaaggcagagaaggccgccgccgccagcgcgcacgcaaggaggcggcggaacgcccagccga

SEQ ID NO: 182948 - RNA, 76 nt, Homo sapiens
accagacggccggcaagaacagcgacaaggagagaagcgcggagccccaaggaccgaaggagaagaaggagaaggg

SEQ ID NO: 182949 - RNA, 81 nt, Homo sapiens
gaaggagaaggaagaggagcggccccgacggcagcccaccccgagcgcggaaccgcaggggggagggccccgccaacggac

SEQ ID NO: 182950 - RNA, 80 nt, Homo sapiens
ccggaggggccggggccgaggcacccaccccggagcggagacacccaaccgaccgaaaccaagggagaccggcgacggcc

SEQ ID NO: 182951 - RNA, 61 nt, Homo sapiens
agagaagaccagcaaaaggagaccccccgggaaagggagcagcaccggccacacccacagc

SEQ ID NO: 182952 - RNA, 76 nt, Homo sapiens
cgaagcagcgcccaacgaaagccgggagcgccgcgcccccaccgcagggaagcgggcacggaagaggaccaccacg

SEQ ID NO: 182953 - RNA, 75 nt, Homo sapiens
gagccagaggcccgccccacccgcagccgcacccccggcggcagcacgaaagaccaaggcggccccaggggggac

SEQ ID NO: 182954 - RNA, 92 nt, Homo sapiens
ccgcccgccacacccgccgccaggcccagggccccggccaggcccagccccgcgggagacccggccagcaccacggacggcgcccaggaagc

SEQ ID NO: 182955 - RNA, 67 nt, Homo sapiens
aaggaccaagaaccagccacagccaccaagaggaagagagaaaaaccaccagagggaagcccgccgg

SEQ ID NO: 182956 - RNA, 79 nt, Homo sapiens
gaggacggcccaccggaaggccaaagcacaaggggagccgccaccaaaagcagacggaaaacccacggggaagaccaca

SEQ ID NO: 182957 - RNA, 59 nt, Homo sapiens
caggggagaccggggcccagcagagggcaaccccgggaacgaaacaaaagccgccgcgc

SEQ ID NO: 182958 - RNA, 59 nt, Homo sapiens
gggaacggggcacgcggccaacgggagagaaggcgcgcaggagagcgcagagacccgcc

SEQ ID NO: 182959 - RNA, 66 nt, Homo sapiens
gaggaagaagaaaagcgaaaagcaaacacacgcagcaggcaaggcccagcagcacacaaggagcaa

SEQ ID NO: 182960 - RNA, 70 nt, Homo sapiens
aaacagcaggacgcagagcaaacgagacggaagaaaaaaccgacggcccgaaccacagccaacaagcagc

SEQ ID NO: 182961 - RNA, 75 nt, Homo sapiens
ccaggccgccgccgagccgaggcccagagaacagcggggagcgcccgcaggcccccaaggcggaaccaggccgac

SEQ ID NO: 182962 - RNA, 77 nt, Homo sapiens
cgcgccgccccgccagaagaggagacgacggacggcgggcaccggccgacggcacacccaaacaacagagggcgcaa

SEQ ID NO: 182963 - RNA, 79 nt, Homo sapiens
cgaagagggggacacgacccggagcacccgaccccgaaccaacagcaacggacaggacagaaccagagcccaaggaagc

SEQ ID NO: 182964 - RNA, 75 nt, Homo sapiens
gaggggacggccgccggagccgcgaggccaaggaccaggaggagaagcaaccagagaggaagcgagacccaaaag

SEQ ID NO: 182965 - RNA, 66 nt, Homo sapiens
acaaaaaaagccgccaccgagaaagagcaggagcgagaaacgcgaaaaacaaaacagcacagggag

SEQ ID NO: 182966 - RNA, 72 nt, Homo sapiens
gaagagacgcgaaaaagaacggaaagaaaacgagccgaaaacagaagccagcgaaagcgcaacgccgaccac

SEQ ID NO: 182967 - RNA, 75 nt, Homo sapiens
gcaaacaagaccaccggagagaaaaccgcacacacaaaggcacaaacgcagaaagggaggggggaaggaggagac

SEQ ID NO: 182968 - RNA, 78 nt, Homo sapiens
gaggagcgccgccaaagagcgcaccgccgagcagccagcccaagggggagacgaaccggcaaggaacagacgaagagc

SEQ ID NO: 182969 - RNA, 71 nt, Homo sapiens
caggaccagcaaaaaaagaacccaacacggacaacaaagcgcgcagaaacccaagggaaagaagcagccac

SEQ ID NO: 182970 - RNA, 80 nt, Homo sapiens
gacaccaacccaaaaacagcaggaagcccaccagaaaggacaggacacaggaacgccacaagaaacaacagcaaggcgag

SEQ ID NO: 182971 - RNA, 51 nt, Homo sapiens
cgacggaccgcgcggccggggccaccagcagaaggaccagacaaggagggc

SEQ ID NO: 182972 - RNA, 75 nt, Homo sapiens
cagggaagaagcaccaaagacgagagagccaggccagaaggaaagcggggcaaggaggaccgaacggcagacccc

SEQ ID NO: 182973 - RNA, 91 nt, Homo sapiens
cgggcagagagcgcagacaggacaccaaacaccgccgccggccccgagccccggccccaaagacccaaaacagagacaccccccagccccc

SEQ ID NO: 182974 - RNA, 82 nt, Homo sapiens
cccgggccaggcggggggagcggacccgacaagccagcccccagacaggccaacaagggccccaggcagagccgcgaaggca

SEQ ID NO: 182975 - RNA, 76 nt, Homo sapiens
agccgcgcccccccagggaagcagcagaggaaagaaagagagcacgaacgcggaaacgacacgagaagaacaggaa

SEQ ID NO: 182976 - RNA, 97 nt, Homo sapiens
ggaccgccgcggagaaccgccccggacggaggcgcccgcggcccggggcgccgcgcgccagaggaacagggagaaacagcacaagaagacccacaga

SEQ ID NO: 182977 - RNA, 80 nt, Homo sapiens
caaaaacagaggagaaaaggcggacagcagcgcaggcaaaaaacagagaaggcacaaagcggagcagagaggcgaaacac

SEQ ID NO: 182978 - RNA, 83 nt, Homo sapiens
ccgggcccgcgcgagccccgggaaagagcagcgacgggagacagccgggcgcgcaaggagaggggaggaggcggaaggaagaa

SEQ ID NO: 182979 - RNA, 84 nt, Homo sapiens
ggacggcaaagccacgccaccccgaaccgagccgaggaacacccaccagcccacgcccacgcaaaggagggggcgagggaagca

SEQ ID NO: 182980 - RNA, 58 nt, Homo sapiens
agggcaagcgcaccgcagagggacaaagcacacagcaaggagaaaaagcgaaaaagac

SEQ ID NO: 182981 - RNA, 76 nt, Homo sapiens
caccggcgacgggaggacccggcacgggagacacacccgcacacgccagcgaagcaggggccgggagaggaaggcc

SEQ ID NO: 182982 - RNA, 64 nt, Homo sapiens
aacggaaccccccgaagcgagggaagggcggacacaccggaggacaggacaggagacaaggggc

SEQ ID NO: 182983 - RNA, 55 nt, Homo sapiens
caaaaaaacaagccaaaaaccaagcacgaagaaggaacagaggaaccagagccgg

SEQ ID NO: 182984 - RNA, 74 nt, Homo sapiens
gagcggacggcgagcgcgagcggcgcgagaaagacaaggcacgaggcgcggcgaccaccacagcagagcccggc

SEQ ID NO: 182985 - RNA, 79 nt, Homo sapiens
aaacacggcagcggagaagcaggcaagagcgcaggcggaagagagaagggcacagaccaagacaacgaaccccggccag

SEQ ID NO: 182986 - RNA, 68 nt, Homo sapiens
acagagaccacagcagaggagaacacagcgagagccagaacaaaccacaaggaacaggcgacaaggcc

SEQ ID NO: 182987 - RNA, 80 nt, Homo sapiens
caaccccaaaaaacaccaccaaccaagagagggggcaccccagacaggagaacgggacagggcagacgggaggagagaaa

SEQ ID NO: 182988 - RNA, 69 nt, Homo sapiens
ccaaggccaggaagcaagaagaccacagccaggaaaagagccaaagggcagccaagccgaagaaaggaa

SEQ ID NO: 182989 - RNA, 75 nt, Homo sapiens
gggcacacacacggcacagccacagggaggcagggaacacagcacggaaggccaagcggaaaagacgagaagcac

SEQ ID NO: 182990 - RNA, 78 nt, Homo sapiens
cccaggccgcgccgagcccgccgcgcgggcccgcccgacgcggaaggagcagaccacgagcgacagccccagcgcggg

SEQ ID NO: 182991 - RNA, 77 nt, Homo sapiens
gcccagccgaggggccgacgggagcagaggaagccgaggaccaccacagaaggaagaaggcggaggcaaggcggacc

SEQ ID NO: 182992 - RNA, 107 nt, Homo sapiens
gcgcagccgcagccggggaagggagcgcccaccagaggagcgaaagagagaggagcccccaggacaggcacacccgggaaaaccgaacacccagcccagacacaagg

SEQ ID NO: 182993 - RNA, 77 nt, Homo sapiens
aggccgaaggcccgcggcgccccggcgcagacaagggaggcgaggacggacaaaaggaaacggacgggaggccagcc

SEQ ID NO: 182994 - RNA, 75 nt, Homo sapiens
aaaccgagccacacgaaggcaccgacagcacagcagaaaggccgccccgccaaccccccaacaaagggggccggc

SEQ ID NO: 182995 - RNA, 79 nt, Homo sapiens
gaaaaacacaaggagcagagacaaaaccaagccaaacacaagcagaaggagcgaagaagagggaaagcaacggcgcaag

SEQ ID NO: 182996 - RNA, 84 nt, Homo sapiens
gaagaggaagagcgagagggaccggggcggccgagccgggagaggccgcccagcgccaggccgacacacgggaagcccagccgc

SEQ ID NO: 182997 - RNA, 64 nt, Homo sapiens
gcggggcgcgggccgggaagaagcgccgcgcacggaccggcagagggcaccggcacagacagaa

SEQ ID NO: 182998 - RNA, 69 nt, Homo sapiens
cccagaacaaaacgaaacgcaagaaagagcagccgagcagcacaaggaaaacgagagaaacgaaggcga

SEQ ID NO: 182999 - RNA, 81 nt, Homo sapiens
cggagcgcggccgggcgcgcggcgccgccacaaggcgcgccgcgacgaggcagcaccgggaccggaggcccagagcgacgg

SEQ ID NO: 183000 - RNA, 81 nt, Homo sapiens
gccccgcaggacaacgaggccagggcaggacagcagcccgcaacaggccggccagccccccacaaccaccgcaccagccac

SEQ ID NO: 183001 - RNA, 78 nt, Homo sapiens
cagcacgccggggcccgcgagcggcgcgccaccgccaggcacaggccaccccaggcacggagcccacacacgcaccaa

SEQ ID NO: 183002 - RNA, 56 nt, Homo sapiens
caggaaccccaggaaacggccaggcaaaaacaccaagaccagccagaagacagaac

SEQ ID NO: 183003 - RNA, 78 nt, Homo sapiens
gaggccgcggcccgggaaggccagccgagaccgggaggaagcggagaaaagagccccgaacggggcgcccaggccgcc

SEQ ID NO: 183004 - RNA, 83 nt, Homo sapiens
gccgaaggcgcccaagcagcagcgccggagcccgagggacggggacggagagaacacgagcccacagcgccaccccaagcacc

SEQ ID NO: 183005 - RNA, 84 nt, Homo sapiens
cgggaagcccaccgaaggcgccccccaggagaaagaagaaacaaagagggacccagccaccaaaaggaggcgaagggccaggag

SEQ ID NO: 183006 - RNA, 74 nt, Homo sapiens
agaagggccgcacagaaggaagaaaagccaggcaaggggacagcacaccacacgccaacagacgaagggaggcc

SEQ ID NO: 183007 - RNA, 83 nt, Homo sapiens
ccgaagaccccggagccccagccagggaaccacggagcacgagaaaacggcgggcggaagaagagcaccaaaaagaacagaaa

SEQ ID NO: 183008 - RNA, 103 nt, Homo sapiens
gaggaagcgaagaaagagccaaaagaaagcaaagcgcagaaagggagaacccgccggagaacgaggaaaggcggagcagcggaaagaaggaaacgagaaagaa

SEQ ID NO: 183009 - RNA, 74 nt, Homo sapiens
caaaaggccaacccccagaaacggcgacaagggccgcgcaagcggcaggcccgccgccggcagaacaagacacc

SEQ ID NO: 183010 - RNA, 74 nt, Homo sapiens
cacgaaagccacaaaaggggagaggcccaggaggacaggacgcgagagcggaaagggcaccgacccacacgacg

SEQ ID NO: 183011 - RNA, 73 nt, Homo sapiens
gccgccggccgacggccggcgggcgggggccccgcgccgcggccgagcagcgggggcacaaaaccaggggaaa

SEQ ID NO: 183012 - RNA, 80 nt, Homo sapiens
cggcgcaaccgcgcccgccggcccccccccgcgcccgcgaccgccgcggcgaagagccgcagggaggagaagaagagaac

SEQ ID NO: 183013 - RNA, 70 nt, Homo sapiens
cacccccccccccgacaggcaagaagcagagcgcagaggggccgccgacgagccacgaagggaagcagag

SEQ ID NO: 183014 - RNA, 81 nt, Homo sapiens
gccgggaggccggccgggccagcacccggccgagacggcggcagcagcggcacaggggacagaagggccgcccgggcgacg

SEQ ID NO: 183015 - RNA, 56 nt, Homo sapiens
acggcgcgcgcccgcgcgcgcggcgcgggaagaacaacgcaccccgaaagcgccac

SEQ ID NO: 183016 - RNA, 77 nt, Homo sapiens
caaaacaacagggaacgcggggccacgccgaacccagcacggggagccgagaaacaacgaacgagcaaggaagggcc

SEQ ID NO: 183017 - RNA, 86 nt, Homo sapiens
cgagaacgaagaggccgccgccgggcccaggcccgcgaccgccgccagcgcccgagaacgaagcgcgcggcaggcgcgcgccgccc

SEQ ID NO: 183018 - RNA, 97 nt, Homo sapiens
ccggcggcgcgccggacgggacgcccccacgaacccaggcagcagaggaaccagagaaggagaaacagcagggccaaaggcaagaacccgggaaagg

SEQ ID NO: 183019 - RNA, 65 nt, Homo sapiens
ccagcgacgcaccgagaaaggaaggaaaaccgacgaacacgcaaggagggcagcccggaggagcg

SEQ ID NO: 183020 - RNA, 59 nt, Homo sapiens
cgcaccacaagagagccagcggagccgagccggagaacggccaccagcggaagaaagga

SEQ ID NO: 183021 - RNA, 76 nt, Homo sapiens
acgcaggagacagggcagaagaacaggcagaagaaagcaggcccaggaaggaagcgaaagcacaccggagaccaac

SEQ ID NO: 183022 - RNA, 81 nt, Homo sapiens
acgcgcgggccgcgagcggggcgacccgagggcacacaaacaagcgaggcacgaagagcaagaaacgacaagcgaacgcga

SEQ ID NO: 183023 - RNA, 75 nt, Homo sapiens
cagggacgaggagcgccgccgccccgagcccgaagcggaagcaggaggccagcgccaaaaaacggggcgagaggg

SEQ ID NO: 183024 - RNA, 63 nt, Homo sapiens
agcaagacaccgggaccccggaagccaaaaaggaggccagccggcaagaggaggggcccccgg

SEQ ID NO: 183025 - RNA, 86 nt, Homo sapiens
gaccgggcggaggccgccaagacggccaggccacagggcaccacaacacgcccacccaggaggcggccggccaagcccagccaggc

SEQ ID NO: 183026 - RNA, 78 nt, Homo sapiens
aaagggcgggcggaacgacccagaaccggcgagagagaccaagaaaacgggaaggcagccccgggcgcccagaaagga

SEQ ID NO: 183027 - RNA, 81 nt, Homo sapiens
ccggccgggaaaagggagaagggaaagaagcagagcaggaacacagggacgccacgaaccggcacagagaaaacccaccac

SEQ ID NO: 183028 - RNA, 54 nt, Homo sapiens
ccaagaaccaaaaaggaccacgaagggacgccgagcgcgcacaggagcgagggc

SEQ ID NO: 183029 - RNA, 77 nt, Homo sapiens
gaaagacggaggaaaggacaagcaggccacgagaaccgaagagagaggagcgagaggaagcggaagaaaaccaacaa

SEQ ID NO: 183030 - RNA, 74 nt, Homo sapiens
agccggcaaaaaacacagaaaagaggaaacggaccaagaacggaaaagaacgacagggaggagcgcacgacggg

SEQ ID NO: 183031 - RNA, 80 nt, Homo sapiens
acgcacagagcgagaggaagggggcagcagacccaacccccgcagacaaaagggagaggaacacaagcaagaaggccggc

SEQ ID NO: 183032 - RNA, 94 nt, Homo sapiens
ccaggccgcccagcgccggccgcagcccagcacagcaccgccgcgggccggaaagaggagggagggagggcaggccgcagcccgagcccgccgc

SEQ ID NO: 183033 - RNA, 80 nt, Homo sapiens
gcgggaagcgaccgcgagccaaggaggacccacgccccaaggagaccgcacacagccagaggagcagccaagaagccccc

SEQ ID NO: 183034 - RNA, 74 nt, Homo sapiens
accgccccaacccacgagaggacagcccagccagacccggccgggaagccgggagggccgccgcagcccccaga

SEQ ID NO: 183035 - RNA, 49 nt, Homo sapiens
cgaacccgaaaggagaaagacagaaccagcacagcaaaaaaggcagcgc

SEQ ID NO: 183036 - RNA, 82 nt, Homo sapiens
cacccaccaacaacaccacaaaaccacagccaagaacccagaaagcggaccagaaagaagcaaggacagaccacgagcagaa

SEQ ID NO: 183037 - RNA, 80 nt, Homo sapiens
ccccgggagccaccgggggcggaggagggagccagcacaggaaaccgaagggccggcagcccagagcgggaaagaggcgc

SEQ ID NO: 183038 - RNA, 67 nt, Homo sapiens
ggaacacgcaggagggggaggagccacagcggaagggcccgagaagcgcggcagaaggcgcgaggac

SEQ ID NO: 183039 - RNA, 87 nt, Homo sapiens
ggcgccgcgcgcccgcgccacccggggccgccgcgcaggagcccccggagcggcccgggaggagcggggacacgaggaccccccaaa

SEQ ID NO: 183040 - RNA, 114 nt, Homo sapiens
agcccacaagccccgccgcgcaagaaggccgggcgaggaggcccaaagcaccgagcgcccagcacagcgacgaacacacacaccagaccggagaagcacagacgcaaacacgag

SEQ ID NO: 183041 - RNA, 58 nt, Homo sapiens
acccggacccaaaggccagcaaagcagaggaagagaagagaggcgagcaggagacggg

SEQ ID NO: 183042 - RNA, 64 nt, Homo sapiens
acagaaagaaggaaaaagcagaaagccagaggaagaccaagagagcgcggggaggcccgggcgc

SEQ ID NO: 183043 - RNA, 67 nt, Homo sapiens
acccaccagcaaaagccgaacaggaccagcacaagggacccaggcaggccaaacccaccggaaaaag

SEQ ID NO: 183044 - RNA, 83 nt, Homo sapiens
aaacaaggcacacacgggacagagggcgaagccgacgagcccgaacagacgcaccagcgggaggaagagggacggcccaggag

SEQ ID NO: 183045 - RNA, 88 nt, Homo sapiens
gacgaccaccgagggcaggccgaaccaggcgcaagccacaggccagcgcacgcggcccaaaaagagagaggaagccaccacgcaacca

SEQ ID NO: 183046 - RNA, 65 nt, Homo sapiens
agaagacagcgaagaagcccgacaaacgaaggacgcacacaggacaacagacaagaaggaaaaag

SEQ ID NO: 183047 - RNA, 75 nt, Homo sapiens
gaggagagaacaaacccggcccccaaggagggaccacagagcccaccacacagcaggccaggacgcgaagggagg

SEQ ID NO: 183048 - RNA, 80 nt, Homo sapiens
cgggaacgcgcaaagccggcaccgcccggcccgccagcgccagcggcacggcccgccgcccaagcagaaaggaggacacc

SEQ ID NO: 183049 - RNA, 73 nt, Homo sapiens
aaccgaccagaacgcagcaacaaagggaggcccagggggccagcggacccggacggccagcggacaagcaaca

SEQ ID NO: 183050 - RNA, 70 nt, Homo sapiens
aaaccgggcaaaacacccccgggacgcccccacccacagcagagaccgaggacaacgcaacagcacaagg

SEQ ID NO: 183051 - RNA, 76 nt, Homo sapiens
ggaagaccagaaggaagaagcgaggagcagaccacggggccgaggagacacgagcccgccccacgaagcacccccg

SEQ ID NO: 183052 - RNA, 72 nt, Homo sapiens
gggaaaaaagcagagcccaggagaaaccggacgcgacgggggggagcccggcccagccccccaccccccgcc

SEQ ID NO: 183053 - RNA, 90 nt, Homo sapiens
cccgcccagaaaccaacagaagaaggggcggcaaggagccaacagaagaccagcggaacacgggcaacgggggaagacggccagaacaga

SEQ ID NO: 183054 - RNA, 67 nt, Homo sapiens
aggagaagaccaaagaccacccacgagaaagccaaagccacccccaaaggcagaggaagaacgagca

SEQ ID NO: 183055 - RNA, 37 nt, Homo sapiens
caacccagcgagagaaagaggaacagggagggccccc

SEQ ID NO: 183056 - RNA, 81 nt, Homo sapiens
aggaggaggggcggcggcgggaagagaccaagaacgcccagcccgcgggcaccggcagaaaggaggaggaaaacaccccca

SEQ ID NO: 183057 - RNA, 72 nt, Homo sapiens
agccgggaacccacagggaggaccagcaaggaaaagcagcgacgcaccacaggaggaacaaccgaaaagaag

SEQ ID NO: 183058 - RNA, 81 nt, Homo sapiens
gagagcgagcgagggggggcgcgccggaaaccggagcgcgcagcagggaggcagacagaaaaagaaacgcaaggaacagag

SEQ ID NO: 183059 - RNA, 64 nt, Homo sapiens
cggaagcagcagccaccgaggacggggaccgcacgagaagagaagcccagagcaaaacacccca

SEQ ID NO: 183060 - RNA, 58 nt, Homo sapiens
gcaaagaacaccaagacggcgaccacaggaaggacacaggcagagcagaaccaagcca

SEQ ID NO: 183061 - RNA, 69 nt, Homo sapiens
ggaacaagcacgcccggccggacggcaccccccgcaagcagcaagaaggaacgacaaggcgcccagaca

SEQ ID NO: 183062 - RNA, 75 nt, Homo sapiens
aagcaggcggcagagacagcccacccgaggaaaaaaaggcacacgcacgagaacccccagcaacccaaccgaccg

SEQ ID NO: 183063 - RNA, 84 nt, Homo sapiens
cgaaagaacaaaaccagaagagcccagaaaagagaagagggaacagagggacagccagccaggagacgacaaggcgggcagggg

SEQ ID NO: 183064 - RNA, 69 nt, Homo sapiens
accccgacccaggacccacccagggcagaaaccaggcaggcacacgaaggcgccggcgaaagcaacgaa

SEQ ID NO: 183065 - RNA, 80 nt, Homo sapiens
agaagaagcccagagagcaccccagcgaggcccacagaaaagccacaacccagggaggacaggcagggagaagggaccag

SEQ ID NO: 183066 - RNA, 75 nt, Homo sapiens
caagcgcacaccacccaggaacaccacaacgaagagcagacgaggccgggaacccaacaagggagcaaacagaga

SEQ ID NO: 183067 - RNA, 56 nt, Homo sapiens
aaggacagaccagacggaggaggagccggacgggccaggcgaccacagcacacaag

SEQ ID NO: 183068 - RNA, 84 nt, Homo sapiens
ggcgaagcgacgagccgcgaggagagacaccaggcgccgagaaggccagcagagaaacaggcaggagaggcccacaggcgcgga

SEQ ID NO: 183069 - RNA, 80 nt, Homo sapiens
cccggcccacgacacaggaagaagacagcaaacggggacagcgccgaccggaacagggaccacggaagcccaggaccagc

SEQ ID NO: 183070 - RNA, 69 nt, Homo sapiens
aggagaagacaccaaaaagcaaacggaccagaccgaccaccaaaaacaacaggcacaaagagagaagga

SEQ ID NO: 183071 - RNA, 73 nt, Homo sapiens
ggcgggggaccacgagagcgacgacacgggcagaaacgaaaccaggcaggggccaccgaaaacaggagcgaca

SEQ ID NO: 183072 - RNA, 63 nt, Homo sapiens
ccaacgcaaggcacccgagaaccaggacagagcgggagccaccagcgccaaagggaagccagg

SEQ ID NO: 183073 - RNA, 77 nt, Homo sapiens
ggaagccccggcgggagagcggcccaaaaagcggcggccgggaggggcgcggcagcggggcaaaccaggaccgacca

SEQ ID NO: 183074 - RNA, 74 nt, Homo sapiens
caaggacagcagcgacggggcccgcaccccaggaccgcgccggacccacgccagaggaagaggaccaccgaagc

SEQ ID NO: 183075 - RNA, 77 nt, Homo sapiens
ggagcagccaacaaaaacccacagccggccaggggggcggaccacagcacccaaccacgcccccgagagccgccaac

SEQ ID NO: 183076 - RNA, 73 nt, Homo sapiens
gaaacacccgaacagggaagaaagggaagggcaagggggccgaagcaaccagggcaaagagcagacccagaaa

SEQ ID NO: 183077 - RNA, 67 nt, Homo sapiens
cagcacggccgaaggagacagcccagaagaacgaggagccccggggcccgcgcaaaaccaaccggaa

SEQ ID NO: 183078 - RNA, 67 nt, Homo sapiens
gggagcgcccccgaccggacaaagaaacgagcgccgccgccaagaacagcaagccaccaaccaccac

SEQ ID NO: 183079 - RNA, 73 nt, Homo sapiens
gggaaagacaacagcacacaagaacacccagaagccccgaaggacaggaccgcaggggggaaaaacaccagca

SEQ ID NO: 183080 - RNA, 80 nt, Homo sapiens
accagaccgcaaagccagccagcaagcaaaagacagaaggggagcccggaacagcggcgggacacaacacccccgggaag

SEQ ID NO: 183081 - RNA, 81 nt, Homo sapiens
ccaggccgggcaccccgagcgcaaggacagcgcgaggccgcgcagcccagcgcagccaggcagacgaaggaaagagacaaa

SEQ ID NO: 183082 - RNA, 71 nt, Homo sapiens
aggaccccagggacacagaagccaccacagaacagagggagcaaaggaggcgcgcccaccgcgagcggaaa

SEQ ID NO: 183083 - RNA, 78 nt, Homo sapiens
accaccccgccagaagaggaaaaagaaacgaaaccgaagcgacagagaggagaacggaggaggaagaacaccgggggg

SEQ ID NO: 183084 - RNA, 74 nt, Homo sapiens
gggaggccagccggagaagcgagcagcggcagcagggagaccagaccaggacagaccggcaggagggagcagca

SEQ ID NO: 183085 - RNA, 84 nt, Homo sapiens
acggcggcaggagagcaaggagaaggacgccagggcggaggaccccaacggggacacggaacccaaggagacgaagcgaagcag

SEQ ID NO: 183086 - RNA, 57 nt, Homo sapiens
gcagggcgcccccggcacgggaggagcagccccagagcgcacaccagggaaagcgcc

SEQ ID NO: 183087 - RNA, 84 nt, Homo sapiens
gacgccagcacgcgcaccccaaagcagcccaaacagaaagacagggaggagcccaaagggcacgcaaaaagaacagaggaaccc

SEQ ID NO: 183088 - RNA, 73 nt, Homo sapiens
ggcagggaccaccaaagaggaccaacaaaaacagaccagaagaaccaagaaccagggaaagaacggagaagcg

SEQ ID NO: 183089 - RNA, 76 nt, Homo sapiens
cgagcgccgccgcgggcaggcaccgagccgcaagcaagaacggggagcagacgcaaggggggcggggcggccgggc

SEQ ID NO: 183090 - RNA, 55 nt, Homo sapiens
acaaaagagccacccaaggacgccagaaagagggcaacggccgacgaacaccgcc

SEQ ID NO: 183091 - RNA, 79 nt, Homo sapiens
cgcgccggagccccgggccaggaacaagcagaaagcacgaacaacgagaacaagacacgagcaaaccccaccgaggggc

SEQ ID NO: 183092 - RNA, 46 nt, Homo sapiens
cccggggacgccgcaggggaacccgccaaggcagaagggggcggca

SEQ ID NO: 183093 - RNA, 73 nt, Homo sapiens
gacgaccggcgagcgggggaacgcggacaggaaaaggagcgaacaggggccacagcggaagaagcaggggagc

SEQ ID NO: 183094 - RNA, 77 nt, Homo sapiens
caaggaggaaacagcaagggaacaacaacaggacgccacaggggggagaggcaccagcaacagaccaaccgcagcaa

SEQ ID NO: 183095 - RNA, 64 nt, Homo sapiens
cggcaaagaagagaaagaggcccacggccagacacaccaagagcggggggcggaagcaggccgc

SEQ ID NO: 183096 - RNA, 74 nt, Homo sapiens
gcgaggccgggaccggagcaccggcagacccggggaccgggaagcagaaaacacagagaaaacacggagaaaca

SEQ ID NO: 183097 - RNA, 53 nt, Homo sapiens
ggccaggccgccgccgagccgaggcgggaaaacggcacaaggcgacgagggag

SEQ ID NO: 183098 - RNA, 70 nt, Homo sapiens
cgaacagcccagcacgaagggaaaagccacggcaggacaaggggcagaccacaaggagagaagagaggga

SEQ ID NO: 183099 - RNA, 71 nt, Homo sapiens
gcagccgagcggggccggccacagacgggcggcagagaagagaagagcacagcgggaggaaagggagagac

SEQ ID NO: 183100 - RNA, 72 nt, Homo sapiens
cgagaggaccaacggagcgcgaggcgggcgcggagaagcgcggaggaagggccgggccggggcacgggccca

SEQ ID NO: 183101 - RNA, 75 nt, Homo sapiens
cgaagagacgccgggcaccccaacacggcaccaggcgcaccggacccacaaggacaaaaacggcaaaagacaaaa

SEQ ID NO: 183102 - RNA, 61 nt, Homo sapiens
gcgaggacaaagagaggccccagaaacaaacgaccgaggccaaaagaaaggaagaaaaccc

SEQ ID NO: 183103 - RNA, 82 nt, Homo sapiens
caagaccacgaggaccgaggaacaagacaggccaccaccacgacaaccccgggcaccggagacgacaagccaggcggcgcgg

SEQ ID NO: 183104 - RNA, 75 nt, Homo sapiens
aggaggaggacaccaggacccccggcacggcgacagaaccgaaggaagagggaagagagggggccaaagggcgag

SEQ ID NO: 183105 - RNA, 68 nt, Homo sapiens
gagacggcggcaggacggcggcaggaccaaagacgaccaccaaagccagcccccagaacacgccgaca

SEQ ID NO: 183106 - RNA, 75 nt, Homo sapiens
ccaccgaacaaccgcgacagcgaggacacgccggggccacaagaagccaagcagggcacaaccagacccagcaga

SEQ ID NO: 183107 - RNA, 40 nt, Homo sapiens
cacgaagaggacccgcacccccacgcaggccccaccaggc

SEQ ID NO: 183108 - RNA, 61 nt, Homo sapiens
gggcacacaaacgccggacccgcagacaccggcgccccccaccacaccgaccagaccggcc

SEQ ID NO: 183109 - RNA, 83 nt, Homo sapiens
gcacacgaagagaagcaaggcccaagacccaggcggagcaaccagggagcacagaaacggccaaaaccaaagagaaaacgcgg

SEQ ID NO: 183110 - RNA, 70 nt, Homo sapiens
ccacaggagcggaacgggacgcagaaagggcagacacaggcacaccaaggggcagggaacaaacggaagc

SEQ ID NO: 183111 - RNA, 85 nt, Homo sapiens
cggaaccggggaccccacacacacgacccacacagccggcacgcacaccacgcccaagccgaaaggaacccaaagcacaaaggcg

SEQ ID NO: 183112 - RNA, 70 nt, Homo sapiens
agagccagcgccaaggcggaaaagcccaagaaacaaacagaaacccccaaagagaaagaagaagaaaacg

SEQ ID NO: 183113 - RNA, 65 nt, Homo sapiens
gcaaaaccagcaacaaaaagccagaaagggcaaagcaggcgcaggggagaaacagccggaccgag

SEQ ID NO: 183114 - RNA, 70 nt, Homo sapiens
cgggccgcagacaacgcgggacggagagccaggaggaacaaccaccagcgaggaacggggggagccagac

SEQ ID NO: 183115 - RNA, 58 nt, Homo sapiens
gccaaaaaaaaaaaaggaagcacaccaaggcaaagaaaggcagaagagaggcaaaaac

SEQ ID NO: 183116 - RNA, 75 nt, Homo sapiens
ccaaggggagaccacaccaagcgggagacacaccacgccaaggagaacgcggaggaaacacggggaaacgagaaa

SEQ ID NO: 183117 - RNA, 72 nt, Homo sapiens
agccagaaaggaggacacagccacggagaacggcaagaacccgaccacaggacagggaccaagcagacaccc

SEQ ID NO: 183118 - RNA, 76 nt, Homo sapiens
ccgcgcccgccgcgggagagaggacccccccccccccccaagaagcaacccaggcacccccaacaggcacccaccc

SEQ ID NO: 183119 - RNA, 62 nt, Homo sapiens
ccgaacgcgcacgccggcaggcaaaagcagaccggaaaacccaccggcaagaccacacccga

SEQ ID NO: 183120 - RNA, 74 nt, Homo sapiens
ggaggacaagagcccaggggaaagaagaaggagaaacacagaagaggaagaaaaagcaaacggagcacaaaaca

SEQ ID NO: 183121 - RNA, 54 nt, Homo sapiens
cccgaaccggccagaaaaccgcgaaaggccaaacgaccaagaaagcgggacgcg

SEQ ID NO: 183122 - RNA, 54 nt, Homo sapiens
aacgggcgcagaagcaggaacagcagggacggggacaccagacgggaaaacacc

SEQ ID NO: 183123 - RNA, 72 nt, Homo sapiens
aaggaccaagaaccaggaggaccagccaaaagagccgggggaaagccaccagaccgaggagaggggggaagg

SEQ ID NO: 183124 - RNA, 76 nt, Homo sapiens
acaaggacagagcacccaccacaggagaaagcagggcgcaggcgaaaccgggccccaacagaggagagccagcaac

SEQ ID NO: 183125 - RNA, 102 nt, Homo sapiens
cacagggaaggccacccaggaagaagcgcaaccacccaaaaggccgggcccaaagagcgaagagaacaaagggaagcggggaacaaaaaacagacaaagcca

SEQ ID NO: 183126 - RNA, 80 nt, Homo sapiens
gcagcaaaaccaagacaggcaaaacggggggaaggggccgccgagaccccagagggccagcggaaaggagcggcgcccgg

SEQ ID NO: 183127 - RNA, 38 nt, Homo sapiens
cgcagagcgcgccgaccggggaagccagcaaggcagaa

SEQ ID NO: 183128 - RNA, 74 nt, Homo sapiens
agggcacccagcgaggagcgcacggacaagcgcacgggaccgagaaccaggcgaagaagcaggaaaaagaaaca

SEQ ID NO: 183129 - RNA, 71 nt, Homo sapiens
acaacccaagcacagaccaaacccacccaagaccaccagaaaaacaccgggaaaggcccaaaccggcgaaa

SEQ ID NO: 183130 - RNA, 79 nt, Homo sapiens
gaggcgggcgcccgggccgcgcggcgccgcgccggcggccgccagcaggaaaaccaacagagacaacaaagagaagaaa

SEQ ID NO: 183131 - RNA, 41 nt, Homo sapiens
cccagcacgggaagcgagccccagggaacccaaggagcagc

SEQ ID NO: 183132 - RNA, 70 nt, Homo sapiens
cgcggcacgcgccgcgggacccgaggcgagccaagcagagcacggggaccaggggagggggggacaggag

SEQ ID NO: 183133 - RNA, 61 nt, Homo sapiens
ggagggaggggcagaggagaaccgacgaaccggacgccaggaaagcaggcagagcaacccc

SEQ ID NO: 183134 - RNA, 70 nt, Homo sapiens
gagccaacgcaaccaggcgcaggacacacagagaggaaggcagcaacaaccacccagggagaaaaacaag

SEQ ID NO: 183135 - RNA, 50 nt, Homo sapiens
gcagggcgcccccgagcccaaaaccaaacgacgcgaccaaaggaaaagag

SEQ ID NO: 183136 - RNA, 89 nt, Homo sapiens
ccaaagcgccgaggaccggcaacagggcggcggggaaaaggggaagcagaaagagacggaaacaagaaaacagacggagaaggaaacaa

SEQ ID NO: 183137 - RNA, 62 nt, Homo sapiens
agcagacccaagagcagcggaaaagaccagcacagcgaagacagccccagggaaagccgcca

SEQ ID NO: 183138 - RNA, 78 nt, Homo sapiens
cccccgggaggagcggagcagcaggaacgggcaccccagagagaccggaccaaacaaccaggaagcgccaaagggcag

SEQ ID NO: 183139 - RNA, 72 nt, Homo sapiens
ccaccacaaaaacgaaggcggcgggggaaaacaccccaggagaagcacgcacggacaccagagaaaaaccca

SEQ ID NO: 183140 - RNA, 60 nt, Homo sapiens
gcaagaaggacaaccccccgcaacgagaagacgacccggccggaggcaccaagaagaacg

SEQ ID NO: 183141 - RNA, 75 nt, Homo sapiens
ggggggaccgaccgcaacagaacggacccgaggggggccgggagcgacccaagagcaggagggagcacgaccaag

SEQ ID NO: 183142 - RNA, 75 nt, Homo sapiens
agaaggagagcacaagcccgaagacgggagaggaagagcccgccgggacccaccaagggcccccacgacgcaggc

SEQ ID NO: 183143 - RNA, 86 nt, Homo sapiens
acggccccaccccggccacgggacggcggcgcggagaaggcaggaagaaaacaggcgaaacaaggcacccccagcgccgaacacag

SEQ ID NO: 183144 - RNA, 82 nt, Homo sapiens
cgaggaggggccccagcagcccccgaaggcccacaggacaggagagaaagacgccgccaggaggaagaaagcgggcaaaagg

SEQ ID NO: 183145 - RNA, 90 nt, Homo sapiens
gcggcgagccggagcgcggagcccggccccgcaccaggaggaggacgacagcacggaaaggccgagggggacggcaagagcacacacccc

SEQ ID NO: 183146 - RNA, 66 nt, Homo sapiens
cgccggccggaccgcgaagagaaaagccccaaccccgcacgagagcggagagccaccaagcaaacc

SEQ ID NO: 183147 - RNA, 65 nt, Homo sapiens
cagagggaaaaaagagaggagcgaacgagacagaacaggaaaaaggaaaggcccgaagagaggca

SEQ ID NO: 183148 - RNA, 56 nt, Homo sapiens
aagacaccgacacgcaccgaagcaacagcccacgggggagagccagcaaccggaag

SEQ ID NO: 183149 - RNA, 76 nt, Homo sapiens
ggaccaggcacaggggacaagaggaggaggaaagccagggggaaccaagaagaccgaggaagacacgaggacaggc

SEQ ID NO: 183150 - RNA, 76 nt, Homo sapiens
cccgaaggagcagagccgacgaccaagagagcaacacacaccaggagcccccacgaagggaagacgagcacgaagc

SEQ ID NO: 183151 - RNA, 75 nt, Homo sapiens
ccccaagagagaccggaaaacgcaagacacaagcaaagaagcgaagaggagaaggaaaaaaaaaacaccaaaaaa

SEQ ID NO: 183152 - RNA, 52 nt, Homo sapiens
ggagcggagaacgcacagaacacccggaaccaagccgccacagggagaaaag

SEQ ID NO: 183153 - RNA, 75 nt, Homo sapiens
caacaggaacaaagaggacacagacaagagagggcggcagaaggaacaccgagaaaccgcacaccggagacggca

SEQ ID NO: 183154 - RNA, 33 nt, Homo sapiens
ggccaggggaccggacacggaagagaagaaggg

SEQ ID NO: 183155 - RNA, 87 nt, Homo sapiens
cgccacccccagagcaggagaagcgagcccggacagaccaaccgcaggcgcaagccaagaaagcagagaaccacaaagaggaggaaa

SEQ ID NO: 183156 - RNA, 37 nt, Homo sapiens
accagagacccccgaagacggaaacagagcggaaaca

SEQ ID NO: 183157 - RNA, 35 nt, Homo sapiens
gacaacacacccagaagaagacgcgcgcccagcaa

SEQ ID NO: 183158 - RNA, 65 nt, Homo sapiens
agagggagccgacaccaccccccaccaaagaacaaggaccagacccaacacacccaccagacaga

SEQ ID NO: 183159 - RNA, 76 nt, Homo sapiens
cgcgccaggaagcgccgaaacgccgcacagaaacaaggcgcggcggcggagcggccaacgagagcgccgaccgagg

SEQ ID NO: 183160 - RNA, 74 nt, Homo sapiens
cgcaccaacgaccccagaccagccaccaaggggggccaggagacagggaaacgaaaaccaccgggcaccacgag

SEQ ID NO: 183161 - RNA, 94 nt, Homo sapiens
cccaggggccaggcgaagcacgagcagaccggcccgaccgcccacagacccaaacaaaggcaaggggacaggcgaggaagccgaagcgcaccac

SEQ ID NO: 183162 - RNA, 72 nt, Homo sapiens
ggccaggagggggggaagaaccgcggcggcgggagagccagggaacgagcccacgggagccggccccgaacc

SEQ ID NO: 183163 - RNA, 75 nt, Homo sapiens
ggacggcaagggcgacaaaggacacacggaacacgcaggaaggcggggggacgagcaagcgaacacaggacagaa

SEQ ID NO: 183164 - RNA, 42 nt, Homo sapiens
gcccagaagaagcagaaggggacccagcagaacaacccacag

SEQ ID NO: 183165 - RNA, 60 nt, Homo sapiens
acgggaaggccaaaaagcgaaagaccagccacagaaggggaagaagagcccgaagaagaa

SEQ ID NO: 183166 - RNA, 76 nt, Homo sapiens
cgcgggcgccgggccaggacggggaaggacaacaagacggacccaggggccggcggacagcgaagaccaccaaggg

SEQ ID NO: 183167 - RNA, 58 nt, Homo sapiens
cccgacgagcgcaaggagagaggaaggaccagaagaagccgagcagacagggagcaaa

SEQ ID NO: 183168 - RNA, 72 nt, Homo sapiens
ccagaaaagaacagggggggggcgggcaggccggccacagacaagaagagccaagacaggaaaaccaagcag

SEQ ID NO: 183169 - RNA, 86 nt, Homo sapiens
ccaaagcagcaggagcgcagcacgaaaacggaaagggaaggggggagaagcagacggcgggaaagggcaacagcccagaaagcccg

SEQ ID NO: 183170 - RNA, 71 nt, Homo sapiens
cgggcaggagacaggccggacaggacacaaaaacgcccgaaggcgggaaaaggaaagggacacgggaagga

SEQ ID NO: 183171 - RNA, 72 nt, Homo sapiens
aaaggcaagaaaaaaaaagcaaagaagacacacagggggacacaacgaaagcagcaggcgcaaaaacgaacc

SEQ ID NO: 183172 - RNA, 67 nt, Homo sapiens
agacgcagggcgcccccgcccgagaccccggggggaccgaccccggacgggagaggcagcgagaacc

SEQ ID NO: 183173 - RNA, 76 nt, Homo sapiens
ggccgagagccgcccgggccagcggccgcgcacccccggccggaggcaccagcgacaagagaccaacgaagaaccc

SEQ ID NO: 183174 - RNA, 65 nt, Homo sapiens
gaagaccgcgcccgcggagagcccaaacaccaccaccaaggcccccagaagccgccgaacgccgc

SEQ ID NO: 183175 - RNA, 75 nt, Homo sapiens
ggaacaggccaagagagccgaacccaccgagccagggagaccagaggaacaaggagacagggagccgaccccaga

SEQ ID NO: 183176 - RNA, 77 nt, Homo sapiens
acccagaagagacgaaaaagacgggcagcaaacaagccagcagcaaaccaggaccacaccccgaccccacagccaaa

SEQ ID NO: 183177 - RNA, 63 nt, Homo sapiens
acccgagagcaaccagacagaccagggaagcagagcagaggaaggacaagcaagaacaaggga

SEQ ID NO: 183178 - RNA, 77 nt, Homo sapiens
ccccaaagggggaacaggcggagcaccacgcccggcccaggcccacaaccaagaagcgaagccggcacagaaaggga

SEQ ID NO: 183179 - RNA, 73 nt, Homo sapiens
cgaggcgagggcagagccgcggggcaagacgacagcccgagagggaaaccagaagagaaaaagaaacaaaagc

SEQ ID NO: 183180 - RNA, 115 nt, Homo sapiens
gcagaacaaaaaagaagaagaaaaggcaggagaaagaagaacacaacacaccaaaagagagagaagaagaaaggaaacgcagagaagaaacacggcaaaaagaaaaaccagcgaa

SEQ ID NO: 183181 - RNA, 42 nt, Homo sapiens
ccgggccccgagacggggacgccaaaagaagcaagggaaaga

SEQ ID NO: 183182 - RNA, 28 nt, Homo sapiens
ccacaaccccaggcccgggcccgccggc

SEQ ID NO: 183183 - RNA, 74 nt, Homo sapiens
cgccgggacgcggagcccggagcggggcgacgaggcgagcgggggccgggcagaaccagggccaaagaggagcc

SEQ ID NO: 183184 - RNA, 84 nt, Homo sapiens
gacgccgggaccggccaagggcccacacaccaagaccaagaccaagacacccaggagaaagacagcggggaaaagaaaaaggag

SEQ ID NO: 183185 - RNA, 79 nt, Homo sapiens
aaacgcggccgcgccgcgccgcgcggggcggcgccgggccgcgccgagagaagacagccggcaaagggagacaaaacac

SEQ ID NO: 183186 - RNA, 70 nt, Homo sapiens
ggcgcgcaaccgaaagggggagcaagaagagggacacaaggaaaccccaggaaaagaaggaggccagcgg

SEQ ID NO: 183187 - RNA, 61 nt, Homo sapiens
gcagaggagaaagaccccgccaggcagcaaaaacaagcaggcagaaccagagaccacagaa

SEQ ID NO: 183188 - RNA, 75 nt, Homo sapiens
cccgcggccaggcgggggcggcgccaagcgggggccccgaggacggcgacggaggggagcagcagccgagacaag

SEQ ID NO: 183189 - RNA, 37 nt, Homo sapiens
gaagagaagacccaaaagccaaagacaggacaccgcc

SEQ ID NO: 183190 - RNA, 49 nt, Homo sapiens
gcgagcgggacgcgggcagcagcaggccggagccgcaaggaaacccagg

SEQ ID NO: 183191 - RNA, 31 nt, Homo sapiens
accggcccaagaaacagggaaaagcacaggg

SEQ ID NO: 183192 - RNA, 73 nt, Homo sapiens
caggaagccagcaacaggaacaacaacgcagccaccagagcaaagcacacaaggaggaccgaacaaaagaagc

SEQ ID NO: 183193 - RNA, 63 nt, Homo sapiens
cgggacccagcccaggcggcgcggacggggcggagggacgaggccacagcagaaaaaaccggg

SEQ ID NO: 183194 - RNA, 75 nt, Homo sapiens
gaggccaggcaaaggaaccacccaggaaacagcgcaagggagaaacgaacgaggagaaacagacgaggaaccaga

SEQ ID NO: 183195 - RNA, 80 nt, Homo sapiens
ccggggcaccccacggaggcacccgaggcacaaacagcggccagaccgaagaggggagcccaggggcacacagggggacg

SEQ ID NO: 183196 - RNA, 68 nt, Homo sapiens
gcggacgcggaggcccaaccgaagaaaacaagcccaagagacaaccagaagacacagggcgcgaaaca

SEQ ID NO: 183197 - RNA, 82 nt, Homo sapiens
gacgaggacggccgggagacgcgcagaccagggcccccccacggcaccacaccgcggccagaggcagaggcagcaggcagca

SEQ ID NO: 183198 - RNA, 70 nt, Homo sapiens
cacccccagagggcgcgcccgacaccagaagaacccaccagagaagaaaagcgcccaggaagcggaaaaa

SEQ ID NO: 183199 - RNA, 62 nt, Homo sapiens
cccacacaggacgcggacaagggcggcagacaacgagcaagcagaaacacgacaaacaagac

SEQ ID NO: 183200 - RNA, 73 nt, Homo sapiens
ccggggacccagcccccccagcagccaaagaagagcagaggacggcgccaaccaaggaaaaggaagcccggaa

SEQ ID NO: 183201 - RNA, 81 nt, Homo sapiens
gggggaagcaagcggccggagaagaagcggccgggcccaggcgggaacacacacaacccagcgggccaaaagcagagaacc

SEQ ID NO: 183202 - RNA, 81 nt, Homo sapiens
cagaccgcgcggggccgcgccgcgccgccacggccagcccccggaaaccccaaggcgcagacaccgacggagcgggagcca

SEQ ID NO: 183203 - RNA, 82 nt, Homo sapiens
cgcgcgcccgaggcgaggaggagcgcggcgcaacagccagacgccgcacgccagcccagcccaccacccccccccgccagca

SEQ ID NO: 183204 - RNA, 77 nt, Homo sapiens
caggccagagagccccgacgccgcaggaacaggcagaggagacaccgcgccacaaagagacggccggcgacccaccc

SEQ ID NO: 183205 - RNA, 79 nt, Homo sapiens
aacaggaggaaaacgacccggcagagcgccagagcgcgagggggagagcagacagaagccacccaggaaaaggaaccaa

SEQ ID NO: 183206 - RNA, 73 nt, Homo sapiens
gacgcgccccgaggggaggaccaaggacacgccccaggaagcagaagcgagagagcgaagacacagaggagac

SEQ ID NO: 183207 - RNA, 68 nt, Homo sapiens
gcgggacgcaccgaggccagaccgccgaggacacggacaaaacccgcgcagcgcgccacccaaaaccc

SEQ ID NO: 183208 - RNA, 39 nt, Homo sapiens
cggcggagcccgacccacccaagccacgggccccgccag

SEQ ID NO: 183209 - RNA, 79 nt, Homo sapiens
gacaagcagcaaggcgcggggggccacgcgaggccgaggacacgaggagcccgacaggcagagaacggaaggaggcccc

SEQ ID NO: 183210 - RNA, 86 nt, Homo sapiens
cccgcagcgaccggaagacgaggcggcgggggacaagcggcgccccagagcggacgagagcgagcaaccaccaaagacaacagaag

SEQ ID NO: 183211 - RNA, 59 nt, Homo sapiens
aggccccggacgccggagaggcaccggaccgaaagggagaccgaacaaaagggggcaag

SEQ ID NO: 183212 - RNA, 53 nt, Homo sapiens
cacaaagacacacgaaccagaaccccgcaacgcagcagcaccgaagaaggcag

SEQ ID NO: 183213 - RNA, 111 nt, Homo sapiens
ggcaccaggaaggggacgggacggacgggaggggcgccgcggcggcgggcgcccccaggacaccaaaccgccaccgcgacgcaaggagaggccgcaggagggaagaggcaa

SEQ ID NO: 183214 - RNA, 80 nt, Homo sapiens
gcagcgaagaagacgaaaaaaacccaggagcgacgcgggcaggaacgcccaggagaaagagggaagagaaaaggaacaag

SEQ ID NO: 183215 - RNA, 57 nt, Homo sapiens
agaaccagacacacaaccaagagaacggcccaaagaaagcaagggccagagaaggag

SEQ ID NO: 183216 - RNA, 66 nt, Homo sapiens
gagaccggcccagggggcgcaaaagacgagagacagagacaaaaacaaagcacgccgcaaaaaacc

SEQ ID NO: 183217 - RNA, 66 nt, Homo sapiens
ggcgaaccgaagaccaaagaaaaagaagagcacaagaccagcagacgaccacagcaaccccaaacc

SEQ ID NO: 183218 - RNA, 81 nt, Homo sapiens
acacccccaagaagaaggagagaaagcagcagagcaaaaacccaaaccccccaccagcgccaagagcccgggagaggcaaa

SEQ ID NO: 183219 - RNA, 75 nt, Homo sapiens
aagccacgagaccgggagcggggggaaggccgggaacgggcagaacaaccggcccaccacaccgagcgagggaaa

SEQ ID NO: 183220 - RNA, 70 nt, Homo sapiens
aacgcgaaccgaccgagaaagagagaagagggggaaaaaggaaggccgccggacagcgcagagccaagac

SEQ ID NO: 183221 - RNA, 79 nt, Homo sapiens
caggccaccacagaaacaaaagcaacaaagagggaaacagagcaaagcagcgacaacaaagacagaggaagaaaaacag

SEQ ID NO: 183222 - RNA, 82 nt, Homo sapiens
aaagaaaagagaccgagggacaaccgagccaaaaccaggccaaccgcacgcaacgccagaaaaaaccgagaagacccaaaac

SEQ ID NO: 183223 - RNA, 71 nt, Homo sapiens
gggcgcggagggccgagggagggccgagccagccgcggccggaggagcccccaggccagggggcagcacca

SEQ ID NO: 183224 - RNA, 77 nt, Homo sapiens
ccaaagcagcgcccggcaaagcccccccagcccaccccaaacggagcacccaaggaagcggaagccaagaccggaga

SEQ ID NO: 183225 - RNA, 72 nt, Homo sapiens
agggggcaaacaagccgaccggaaaaaggcagaacgaagaacaaggaaccaaggacacaacagaaaacaaaa

SEQ ID NO: 183226 - RNA, 53 nt, Homo sapiens
aggaggagagcacagaaccgcagccagcgacaggagcaagcaacaggacaaga

SEQ ID NO: 183227 - RNA, 85 nt, Homo sapiens
ggggcgaaccacggaaaggaggaagaagacaccggggacagacaggacccaacagaggaagccgcaagaaacgggacgacaggaa

SEQ ID NO: 183228 - RNA, 110 nt, Homo sapiens
ggaaaaaagaggcggcgggccggacgcggacgaggcccaacagcgaggggacgagaaagggcgaccccgcacacacacccaccagccacggcagcccagcggggacccag

SEQ ID NO: 183229 - RNA, 79 nt, Homo sapiens
gcaccaacacggccggacgcagaagcggcggacaaccagggacacccccgaggagagggaccccaacgggacgagcacc

SEQ ID NO: 183230 - RNA, 83 nt, Homo sapiens
ccggcaggacgaggacgaaggccgagggaaaaacaaagccccggcgaggacagaaacgcgaacaaccaagagaggcaaagaaa

SEQ ID NO: 183231 - RNA, 85 nt, Homo sapiens
agacgcaaggccgccaggcacgagcggagcccgccggagagacagacacgggccacacccccggagaccaagagaagaaacagcg

SEQ ID NO: 183232 - RNA, 73 nt, Homo sapiens
cagcccggagcggcaacaggcgggcgccgccacacacaggcagcagcggggcacgcccaaaaggaaccagccc

SEQ ID NO: 183233 - RNA, 84 nt, Homo sapiens
gggaaggccgggcgccggcccgcggaagagccggaccaagcccacagcagagcggacagcagaccagccagccccaagcagccg

SEQ ID NO: 183234 - RNA, 61 nt, Homo sapiens
gggacacagacgacaccaccgggcacgccacgaggagcagacagaccagaacagagaagaa

SEQ ID NO: 183235 - RNA, 50 nt, Homo sapiens
ggccagcgaaaacgcccaggcaggggcaaggcagaaagcggcgcgagacc

SEQ ID NO: 183236 - RNA, 54 nt, Homo sapiens
cacaaccaagccacaaaagacacgccacaaccggcaaaaggagcagaaagcaaa

SEQ ID NO: 183237 - RNA, 69 nt, Homo sapiens
cgcaccgcgcccggagccacgccccacgcacgcaccaaccgaggcaacggcacagacacaagcgggacg

SEQ ID NO: 183238 - RNA, 75 nt, Homo sapiens
cacaccaggaaaaaggacgagcagcacccacaaaagcgaaaagccagacaggaacaccagacagaagaacgccgg

SEQ ID NO: 183239 - RNA, 75 nt, Homo sapiens
ccaggaaaagaccaggacggacaagcacagccggaagacccaagcagagaagaaaaagagacgcgcaaaaacacc

SEQ ID NO: 183240 - RNA, 49 nt, Homo sapiens
gacaccggcggggccgcagggcgagggaggcccgacggagacgagcgag

SEQ ID NO: 183241 - RNA, 53 nt, Homo sapiens
aaacgaaaagaacacgaccgaccgaggagggcacaggaaaagaccccacaagc

SEQ ID NO: 183242 - RNA, 71 nt, Homo sapiens
gaagacagaacgccggcccagccccagcggcagacggaaacgacagaagcagaggggcgaagccgaagacc

SEQ ID NO: 183243 - RNA, 67 nt, Homo sapiens
ggaggaacagaagcggaacagccacagcagcccccaaggagcgcaagggccgggcaggggccacgcc

SEQ ID NO: 183244 - RNA, 84 nt, Homo sapiens
cgccccccgggcggcggggagggagggaagaagcccagcggaggcgaacggcccccgccaacacgaggaccccacggagaggcc

SEQ ID NO: 183245 - RNA, 70 nt, Homo sapiens
aagaagaacgaagaagaacaagaaacacaacaaaaaagagagggaagcaaagagaggacagggcacccga

SEQ ID NO: 183246 - RNA, 78 nt, Homo sapiens
caccagaaagacagaaaaggacggaaaagaaggcacaggcccacgccgggcacagccccagagcccggaaggaacaga

SEQ ID NO: 183247 - RNA, 79 nt, Homo sapiens
gcgcaacgcggccccggcacgcaccacggccacccggccggccgaggccagcaggccggcaagaagccaacggagaacc

SEQ ID NO: 183248 - RNA, 79 nt, Homo sapiens
agcggaggcgggccgaggacagggcggcagggggacagggggccaggagagccaaaaccaagaacccgggccgagacca

SEQ ID NO: 183249 - RNA, 86 nt, Homo sapiens
gaagaggaacagcggccaaagaagcagagaagaagaagcgccgccgaaggcgcgcaaccaaggaaagccaggaagcaggacagcag

SEQ ID NO: 183250 - RNA, 80 nt, Homo sapiens
cccaaagcagcgcccggcaaaggccacagacaagagagccccaggccaaccacggacgcaggaccccagcgacacgccag

SEQ ID NO: 183251 - RNA, 81 nt, Homo sapiens
gccagacacagcggaagacgcagagggagacagacaccacgccacccaagagagagcaaaaaccgagaaccagaggcacac

SEQ ID NO: 183252 - RNA, 83 nt, Homo sapiens
cccaggggccgaaccccccccccaagcgagagcagccacacaggacagggcagaccgccagcagcacagcaagccacagagag

SEQ ID NO: 183253 - RNA, 77 nt, Homo sapiens
gggcaaccagggaaacaggagaggcaccgaaccccacagaagaacgcccccaaggcccggaacacacagagccgccg

SEQ ID NO: 183254 - RNA, 73 nt, Homo sapiens
caggcagggaccaggaaccagggcacccaacaaggccgccgggcaagcaaagccccaggcccccacaccaaga

SEQ ID NO: 183255 - RNA, 77 nt, Homo sapiens
ccaaggcgaccaagggaggccccgggaggccgaggcgggccgaagacaagggggcccgacagcggaagaaacgcaga

SEQ ID NO: 183256 - RNA, 65 nt, Homo sapiens
cccggggaaccaccccccaaaccgcagcgcccgaaagaccaacaccaaagaagcgcaaaagagaa

SEQ ID NO: 183257 - RNA, 83 nt, Homo sapiens
acaacccgacccgacgaaaaaacaaccaccagcgagcaaaaaggcaaagaccaagaccaccaagaagcgccccagcggcaaca

SEQ ID NO: 183258 - RNA, 77 nt, Homo sapiens
aacccggcacacaaaccgcaagacgagcagcccagaaacccaagacgaccgcagaccagggccccacgacccaccac

SEQ ID NO: 183259 - RNA, 62 nt, Homo sapiens
gcggaaccgacggccagggccggacgcggcggaggcgagcgagccagccgagagacgggagg

SEQ ID NO: 183260 - RNA, 71 nt, Homo sapiens
ccccggagcagcagcccgccggcacgcgagccccagcaaggccccgacagcccaagacagaagccggaaag

SEQ ID NO: 183261 - RNA, 78 nt, Homo sapiens
gccagcccagaacagagaacaggccgcacagaggacggccaaagcaagcaccacgacaacacacgaaggggaacaaac

SEQ ID NO: 183262 - RNA, 70 nt, Homo sapiens
acgccccaacccacggagccaaagagaaagagccaaagcagacccccaagcgagcggagcggaaggagcg

SEQ ID NO: 183263 - RNA, 76 nt, Homo sapiens
cgccaacccccacacccccgggggcacgaagacagagagacgccacggggcccagacggagggcgagaaggaggcg

SEQ ID NO: 183264 - RNA, 84 nt, Homo sapiens
ggggcggcaagagcacaccaagagccccaccgaaggcgcacgcgcacgcacacaggggagccgccaccaaaagcagacggaaaa

SEQ ID NO: 183265 - RNA, 69 nt, Homo sapiens
aagacccaccgccagagcagaacaggaggccagcccagccgagacacggcacgcaagagggagggccgg

SEQ ID NO: 183266 - RNA, 58 nt, Homo sapiens
cggaaaacaggggcgaggggacaaggagaagaaagcgggcacgagcggcgacccaccc

SEQ ID NO: 183267 - RNA, 59 nt, Homo sapiens
gaccaccggggacagagacgacggagcccccggcagccgagcacagaagggaagagccg

SEQ ID NO: 183268 - RNA, 77 nt, Homo sapiens
ggagcagggagcccaaagaccccggagacaggcgggacaagggcgcaccggggcgcagcgagggaggacaacggggc

SEQ ID NO: 183269 - RNA, 76 nt, Homo sapiens
gaagagcacacgaccacaccagggagggcgcccacgggccgcgggcccgccaccagccaaggacccagaagaccca

SEQ ID NO: 183270 - RNA, 72 nt, Homo sapiens
agccagggggcgaggacgggcaaggcaacaggcacgagaacacaacaaggcacaaagaccaagacagggacg

SEQ ID NO: 183271 - RNA, 78 nt, Homo sapiens
gccgcgcagcccggccgccggcccccaacagcgccggagagacgagcacggcagccaccgacagaaggaaggcaccgg

SEQ ID NO: 183272 - RNA, 103 nt, Homo sapiens
cgggcgaaccggagcgccaaacgcccgaaagaagcggacggaggaagaccgaggagcagggagcaaccacaaggaaaggaaaccaccgaaccgagccagacgg

SEQ ID NO: 183273 - RNA, 77 nt, Homo sapiens
aacgccacaagaacaagaaaggaagagaaggagaaggccgccgcggcccgcacagacgaggcgaggggccgccggca

SEQ ID NO: 183274 - RNA, 101 nt, Homo sapiens
ggcgcccggagcccgcacccagccacaccggaaccgcgggagccgaagcggggggcccgggcacacgggcagccgcgcccgaagaagaggcagacgcccgg

SEQ ID NO: 183275 - RNA, 73 nt, Homo sapiens
ggcgcggagagcccaccacgcgggaagagaccagcgaagaaggcccgaggaaagaaagcccaagcgcaaaaaa

SEQ ID NO: 183276 - RNA, 71 nt, Homo sapiens
ggagacagggacaagccccggaacacaaccggacagcaccaagagaaaggacggggcccgggcacgagccc

SEQ ID NO: 183277 - RNA, 73 nt, Homo sapiens
acaggagggcaacccagaacacaaaaacaccccacagaacaggaagaccgcaggaaagcaggaaggcaagaaa

SEQ ID NO: 183278 - RNA, 77 nt, Homo sapiens
cggaacagcaagaacgcaccgaaccaggagaagacagaggagccagaccaagagacagcacaggcgagcgagcagag

SEQ ID NO: 183279 - RNA, 78 nt, Homo sapiens
cagacgggggaggagggcggggaagaggaagacccaggcgaggacaagccgccgcagggcgaaggcgaggacccccag

SEQ ID NO: 183280 - RNA, 72 nt, Homo sapiens
cagcaggcccgggcgaagagcccccccccaagcccgccgacacagccaccaagaaggcacaagcagaacggg

SEQ ID NO: 183281 - RNA, 73 nt, Homo sapiens
gaccccgcagggacgaaggggaacgggaaaggaacaacgggcaagaaagggcggcaccgacgcggaccaaacg

SEQ ID NO: 183282 - RNA, 55 nt, Homo sapiens
cccacccaggccagacaggccggggaaaaaagcagcggaggagaaaaaaaagaag

SEQ ID NO: 183283 - RNA, 44 nt, Homo sapiens
cgggcaagcgcgcaaacccagaaaaaaggggaagaaggccaacc

SEQ ID NO: 183284 - RNA, 86 nt, Homo sapiens
gcggacgcggcgccacgcagcagcacgccgagaggagcgaagcccaacgcaggagcgaccggccgggcggaacacccacgcgaccg

SEQ ID NO: 183285 - RNA, 60 nt, Homo sapiens
gccgccacgccgcgggccccacacagcccagccagggggaccgagggaacagccaggaga

SEQ ID NO: 183286 - RNA, 65 nt, Homo sapiens
caaaaccagcgcagcagccagagagcccagagaaaagagagaagacagagcagccgccggacaaa

SEQ ID NO: 183287 - RNA, 83 nt, Homo sapiens
cgccacccgcgccccccgccgccgccgccgcgcgccaaagcgcgccgccccgggcaaaagggacagcggacgcagcgaaccgc

SEQ ID NO: 183288 - RNA, 77 nt, Homo sapiens
ccgacaacccaaccccaaggcaccagcaagggccgaaggcccgagcccggggagaccccaacaccgcagcgccaacc

SEQ ID NO: 183289 - RNA, 74 nt, Homo sapiens
gcaggcgcgggcgagccggcgacggacgcggcgcgcgaccgacacgaagggcaagggagcggccagaaaccgac

SEQ ID NO: 183290 - RNA, 76 nt, Homo sapiens
aaacccagcccggcccagaggacaggcagcccagagggcccgaagacaccccgccaaaaggacagaggaccacgga

SEQ ID NO: 183291 - RNA, 55 nt, Homo sapiens
caaaacccaggccagccggaagaccgaggagcagggagcaaccacaaggaaagga

SEQ ID NO: 183292 - RNA, 73 nt, Homo sapiens
accaacagaagggcaaccaggagagaacggagagccagggcgggcacggcccggagaacggggaacggagaaa

SEQ ID NO: 183293 - RNA, 64 nt, Homo sapiens
ggcgccggccagaaaccgaccggaccgggccgggggagcggaggcaggcacacaaggaaccaag

SEQ ID NO: 183294 - RNA, 36 nt, Homo sapiens
gccgggcgccgagagcaggaggccaagcaccccaga

SEQ ID NO: 183295 - RNA, 72 nt, Homo sapiens
acgggcccggagagcccgaacggggcaaaaaggcggcagaggcacaacaaggccagccgggaccagccccaa

SEQ ID NO: 183296 - RNA, 102 nt, Homo sapiens
ccaggaaaacaagccggaaaggaggaaaaagaagaccagcgacaaaagagaaacccggcagcccggggcaagacggcagcccggggcagaagaggggacacg

SEQ ID NO: 183297 - RNA, 79 nt, Homo sapiens
gcggagcggggccgggcagcagcacccagccgcagggccaacacagggggaaaggcccaggggggccagaaggacaacc

SEQ ID NO: 183298 - RNA, 80 nt, Homo sapiens
aagcgcaggaacgggaacgcaggagcgaccagggcagaacccaagcacgagaaagcgaccgagaggaccagcagagccac

SEQ ID NO: 183299 - RNA, 65 nt, Homo sapiens
cgcacgacgacaggccccgcagaaggcggaccgggccaaggggggggaagaagcggaaaggaggg

SEQ ID NO: 183300 - RNA, 76 nt, Homo sapiens
gaccaacgaacaccaccccagagaccggaggggaaaaagaggaccagggaacgcgggggaccacaggaagaggcac

SEQ ID NO: 183301 - RNA, 72 nt, Homo sapiens
acaaaagagcggaggagcggcgagggcaagagcccccaggaacaggggaaaccggggcaagggcccgccaaa

SEQ ID NO: 183302 - RNA, 76 nt, Homo sapiens
agcgacaaggagcgcagcagcagaaagcaggacagccccaaacccagaggaccagaacggcagcggccgcggacgc

SEQ ID NO: 183303 - RNA, 85 nt, Homo sapiens
cagcccagaaccaggagcagaaccaccggcagaaaagagacggacgcggaggcacacaggaccccgcgagccagcggcgacggga

SEQ ID NO: 183304 - RNA, 82 nt, Homo sapiens
gcacggcccgccccggcgggcagagaccagcaccggagaaggagcgaagaaaccgcaaaggggagaaaaacccgaacaccag

SEQ ID NO: 183305 - RNA, 65 nt, Homo sapiens
ccaacgcggaggccgagcagccaaccacaaaacagccgacgcaggagaggaaccaagaggacaac

SEQ ID NO: 183306 - RNA, 68 nt, Homo sapiens
cggccgccccaccggcggaacccagcaaggaaagacgaggccggaagccacaggagaaaggaggagca

SEQ ID NO: 183307 - RNA, 74 nt, Homo sapiens
cgagccacccgcccaggggcgcccagcacggcacacagagaaaaaaagggaacaaaacacagcaagcagacaaa

SEQ ID NO: 183308 - RNA, 53 nt, Homo sapiens
ggaggcgagcagaagcaaaggccaaacaagaagaggcagcgccaacaagccag

SEQ ID NO: 183309 - RNA, 56 nt, Homo sapiens
gagcccaacgggcccgccagccccagcggcgccgagaaagggcacacggcacggac

SEQ ID NO: 183310 - RNA, 73 nt, Homo sapiens
cgaagcgagcccgagccccggaacggaaaacagccccaaagcagcagaccgaagaaagaagacccgcaacgac

SEQ ID NO: 183311 - RNA, 86 nt, Homo sapiens
agccaccagggcacagcacgaggcgggacgaacagcggggacgccccagcagaccgcccaggagaggaaagcaggaggaaagacca

SEQ ID NO: 183312 - RNA, 80 nt, Homo sapiens
aagggaaagaaacggcggaaaaacagaaccaacagggcaaaccacgacgaagaaagacgaaaaggggaaaaacgcaacgc

SEQ ID NO: 183313 - RNA, 78 nt, Homo sapiens
cgcccaagcaccgcgcacgcacgagaaaaaaagaggcgaccagcccgggggaaaagaagagaacggccgaagacacag

SEQ ID NO: 183314 - RNA, 82 nt, Homo sapiens
ggggcgagccaagacgagccagaaaaccagaagccggaaccgagcggaaggaagcaagaaaccaaggacaaccaggaacagg

SEQ ID NO: 183315 - RNA, 82 nt, Homo sapiens
gaaggccccaagcgccgcggcgagaaccacgccgacaacggcggaagaggaacgggaacggggaagaagagcggcgccaagc

SEQ ID NO: 183316 - RNA, 49 nt, Homo sapiens
acagcaaccggcaagggagaccgagaagcaaagcgccgggcaccagcaa

SEQ ID NO: 183317 - RNA, 78 nt, Homo sapiens
gccggcaaggccagaaaacccgcgagcaggaaccccaggaaacggccaggcagagaaaaccgaaggagcaagagcggc

SEQ ID NO: 183318 - RNA, 56 nt, Homo sapiens
ggggcgccccacagaggggcgacgaacaggcggccagcccggaaaaacagacaagg

SEQ ID NO: 183319 - RNA, 78 nt, Homo sapiens
acaccaggaaagacaggagaccaaaaaggccagaagccgcagagcagcagaacagacagaaacacgaaaaccagacag

SEQ ID NO: 183320 - RNA, 83 nt, Homo sapiens
aagccaagggacaggggggccgggggaacgaggaagcgcccaagggaccacggaccaaggaaggaaagaagggcaacgcgccg

SEQ ID NO: 183321 - RNA, 80 nt, Homo sapiens
cccaagccaccagagcggcccccagcaccacagcccgcagccccgccagccacccccaggaagcgacacaaacccgccgg

SEQ ID NO: 183322 - RNA, 75 nt, Homo sapiens
caggcaagaaagccggaagaacaagaaccaccagaggagagagagagaacccgagcgccgcagcggagaaagaag

SEQ ID NO: 183323 - RNA, 72 nt, Homo sapiens
ggccgaggcgggggacagagagcggcgaagcgggggcaccacgacaaggcaggagccgcaagagcgcggaaa

SEQ ID NO: 183324 - RNA, 79 nt, Homo sapiens
ccgcacgggcccgagaggaggcggagaccacccaaaccccccaagaaggggacaccggggaaggaggccagacggaccg

SEQ ID NO: 183325 - RNA, 76 nt, Homo sapiens
gccgacggccacacggcggccgcagggcgccggagccccccaggcggagcaggagcaaaggagcaagaaaccagac

SEQ ID NO: 183326 - RNA, 86 nt, Homo sapiens
ccaggccccgggcaccagagacggaggcgcacgcagagcggcaccacagaccagagacaaggccccgagggaggagcccgaaggcg

SEQ ID NO: 183327 - RNA, 61 nt, Homo sapiens
ggggcgggagagccccgcagaagacgccgacgaggaggaggagcgcgaagaagaccacagc

SEQ ID NO: 183328 - RNA, 70 nt, Homo sapiens
aacccccagcacagggaagaaaacgccagagaagcagagcagcccggagcgaggggagaccggggaagcg

SEQ ID NO: 183329 - RNA, 73 nt, Homo sapiens
agggagacacaggccaggcgccccggcaaggccaccgcagaagccacaggagaccggaggccaacggcagaag

SEQ ID NO: 183330 - RNA, 71 nt, Homo sapiens
cacaagaagcacaagggcaacgaggaacaggccaagaaacaacacagccaaggccagcgccacggcgggaa

SEQ ID NO: 183331 - RNA, 65 nt, Homo sapiens
aaaaacaccccagaaggcacacagagaaaaaaagggaacaaaacacagcaagcagacaaaagggg

SEQ ID NO: 183332 - RNA, 78 nt, Homo sapiens
ccaggcgagagagggcccaaaggccagagaagacggcccagcagagcacccaaccagcgggaacacagcgccgccccc

SEQ ID NO: 183333 - RNA, 61 nt, Homo sapiens
cgcaccccacccgggccgcccgaaggaagggaccacagaccagcacgccggcgccacgaac

SEQ ID NO: 183334 - RNA, 71 nt, Homo sapiens
gaaagaggagacaaaccccagacgcgccggagggccaggaagcagcaaaagaccaaaccagccaaaacaag

SEQ ID NO: 183335 - RNA, 73 nt, Homo sapiens
gggcgaaggggccacgcgaaaagagccccaagcccgcagccccagaagaaaaacacaggccgccgccaaaacc

SEQ ID NO: 183336 - RNA, 78 nt, Homo sapiens
gcagcggcgggacggagaaaacaacagaggagaaaagcacggaacaaacgccaggaacaggcaggaacacccgaacgc

SEQ ID NO: 183337 - RNA, 71 nt, Homo sapiens
accgcaaggcaaggaaaggaccccaaagccagaccacgggaccccacaccagccagggaacaacggccccc

SEQ ID NO: 183338 - RNA, 72 nt, Homo sapiens
ccggggcacgcggacaggcagcgagacagaagaacgaaacacgcgggcgccaggacccccccagagccaaga

SEQ ID NO: 183339 - RNA, 39 nt, Homo sapiens
ccgagaacgggaacaggaaacgagaggaagcaaagagaa

SEQ ID NO: 183340 - RNA, 77 nt, Homo sapiens
aggggagagagccgggggagagggaccagggaagggggcagaggaagaacgaagcgcgcagaaaacacagaaggcaa

SEQ ID NO: 183341 - RNA, 80 nt, Homo sapiens
cggacaaccagaggcagccagcagggggaggggccaccacagagcccgcagggacacagcagaacaagcaacccccggca

SEQ ID NO: 183342 - RNA, 68 nt, Homo sapiens
aggagaagagagcaggagggcagcagagaacacgggcacacagacagggaggccgcacagaggaggag

SEQ ID NO: 183343 - RNA, 70 nt, Homo sapiens
agaacgagagcagcagagaagggaagcgagaaacagagagacaggccaaagccccaaggccagagaagcg

SEQ ID NO: 183344 - RNA, 74 nt, Homo sapiens
ccgcacgacaggcacaggagcacaggaacaaacgagggaaagccccaggaacagaggggagaagaacagcaaac

SEQ ID NO: 183345 - RNA, 78 nt, Homo sapiens
ggacaggcggaggccccagggaagcgcagaaagcaggcgaacccgcggcgcaaaacggcagccagacaggccaggaca

SEQ ID NO: 183346 - RNA, 73 nt, Homo sapiens
cagcgcgcccacagaggagcaagaggggggggcccccccgaagaaaggaaccggggagcggcgaaaaaaaagg

SEQ ID NO: 183347 - RNA, 73 nt, Homo sapiens
gcccgggacaccagcaccagaccacacgggccgcacaccccgcaccgcgagccgaccgcggacagcagaacaa

SEQ ID NO: 183348 - RNA, 82 nt, Homo sapiens
cagaagccgcgaaaaaggggggccgaggagcagcaccgaggccccccccaccccccgcccgcggcgccaccccgcggcgcca

SEQ ID NO: 183349 - RNA, 71 nt, Homo sapiens
caaagcgaaacagcggggccacccagaacaaaaagggccaggacgcgcagggaacagaccacagccagcca

SEQ ID NO: 183350 - RNA, 73 nt, Homo sapiens
agcgcaacagaaacagagagagaccacagggacaagcagaggcgagccagggcgagaaaccacaaggagagag

SEQ ID NO: 183351 - RNA, 75 nt, Homo sapiens
ggcggaggccagcggggccggaagcggcggcgcagaaccccaggaccccagcgaacccggggccagacgacagcg

SEQ ID NO: 183352 - RNA, 60 nt, Homo sapiens
ggagggcacccgggccgaagccaggacaaaaccaggcagaaccaacacgaacccaagcac

SEQ ID NO: 183353 - RNA, 54 nt, Homo sapiens
aggcgccagccgaaacgacaagcagagcaggacccacacgacacaagggagacc

SEQ ID NO: 183354 - RNA, 70 nt, Homo sapiens
agaggcccaacccccaccccgcccaaggaggcccagcggcacacaacaaagaagaaaagggggaaaagag

SEQ ID NO: 183355 - RNA, 80 nt, Homo sapiens
aggccagccaacagcacacacccaggggcaaagaaggacagaaaacgggccccagacacaagccccaccaagaggacacc

SEQ ID NO: 183356 - RNA, 83 nt, Homo sapiens
cgccgcaaaccgcagcccaggagcccggaagacccgcaccggagcaaaggacccaaccgcggcacacagaaaacccggaccca

SEQ ID NO: 183357 - RNA, 78 nt, Homo sapiens
gccaaacagcaggaccagaacccgcgaaagagggaagcggcaaaccaaaagagcaacgacggcaaacagaagggcgca

SEQ ID NO: 183358 - RNA, 74 nt, Homo sapiens
agaagaaaccaaggccgggacagaccccgcggccccaaggcgggcggcccagggcagcagcacacaaacaacca

SEQ ID NO: 183359 - RNA, 79 nt, Homo sapiens
agaggagaggagcaggggagagaaggcaaagaaaaagcaaaaacgaaggaccgaagcgagacacaaagccagacccaag

SEQ ID NO: 183360 - RNA, 58 nt, Homo sapiens
gcaaggcaagcaagaaggagcggcaggggaaggagaaccccaaacgagaacgcaaagc

SEQ ID NO: 183361 - RNA, 83 nt, Homo sapiens
gggccggagcagccgcgggcgcccgaggggccgagcgagagccacacgaaagccaaagggacccaggggggccgcccccccgc

SEQ ID NO: 183362 - RNA, 71 nt, Homo sapiens
cacaacagaaggacggaaagggcaaaaaggaacaggagacagcggagaaagagcccgggaagcacgaagcc

SEQ ID NO: 183363 - RNA, 80 nt, Homo sapiens
aaaagcgccaaagcgacaggagcgaccccacaaaaagaccgacaccgcaagaccaggccgacggcaacgcacgggccgga

SEQ ID NO: 183364 - RNA, 57 nt, Homo sapiens
gcaaaagccacagaaaagacaagagcccggagaggcccacgcggaccggcagcgcca

SEQ ID NO: 183365 - RNA, 90 nt, Homo sapiens
ccagcccaagcgccccccccgccccccaggaggggcgagagggagccgcagcgagcaggcacaggccaaaacgaacggggaaagcagaac

SEQ ID NO: 183366 - RNA, 77 nt, Homo sapiens
gaggaaacaccaccagaaaagggagcccaccacgaaagcagcaacaggaaaccacacgagacgcgacgagagaaaga

SEQ ID NO: 183367 - RNA, 72 nt, Homo sapiens
acaacaaccggaaacacgaaggaacccaaagaacggaaaacagccccaaagcagcagaccgaagaaagaaga

SEQ ID NO: 183368 - RNA, 78 nt, Homo sapiens
gaggcgccagcggaacaagaagacacaaggacagcgccgcacacgcagcaagagcaggccaggaccagaaacaaggcc

SEQ ID NO: 183369 - RNA, 73 nt, Homo sapiens
gcgacaccaggcgggaaggaaaaacagaacagcgcccgcgaaagcaagaacaggaagaacgccaggaggacga

SEQ ID NO: 183370 - RNA, 70 nt, Homo sapiens
agcgggacccgcagggcaaaggggggaagaacaaggacacacacaaacgcagaacagaaacaggagcgga

SEQ ID NO: 183371 - RNA, 71 nt, Homo sapiens
aaggaccaagaaccaggacagaagacggaagaaacggagccgaagccagcagaaagaagccgccagcaccg

SEQ ID NO: 183372 - RNA, 84 nt, Homo sapiens
gagccacggagccgcaccagacaacgccccgggaccggagcagaacccccgcagagaaagacagcccaccgaggaagaccaaag

SEQ ID NO: 183373 - RNA, 72 nt, Homo sapiens
acaaccacccgggcccaaccagcccagcgcgcggccccaccggacccccccgcggcggcgaggcccgagcca

SEQ ID NO: 183374 - RNA, 80 nt, Homo sapiens
ccaacgacgaggaccgacgcaggaaaccagaggaacagacaggacaagggacagcagcaaggacaaccagcgcgacagcc

SEQ ID NO: 183375 - RNA, 84 nt, Homo sapiens
gagccccgagaacacacggcaacaggcgacaaggccaagccgccaaagcgccaacaggacgccccccaagccccgggggacccc

SEQ ID NO: 183376 - RNA, 78 nt, Homo sapiens
caccacaaaggaacgccacacgcgaaaaacgcagcaggaggaccaggacacaccccagaagaagcccacagaaagcgc

SEQ ID NO: 183377 - RNA, 37 nt, Homo sapiens
gagaggagggcacacagacaacccagaaaagaaaagg

SEQ ID NO: 183378 - RNA, 78 nt, Homo sapiens
acagcacacccgggaacgccagcccaaccccccaacgcagaggagcccacgaaagggccagcagcccccagaagaagc

SEQ ID NO: 183379 - RNA, 65 nt, Homo sapiens
aaaaacaaacacacgcaaaggagaaaggaaccgacagaggaagaaacaagcgagaggaagcacag

SEQ ID NO: 183380 - RNA, 50 nt, Homo sapiens
gccggggaacaccaaagaccaaaaaaccaaggacgacgggaaaccggacc

SEQ ID NO: 183381 - RNA, 117 nt, Homo sapiens
gggagccgccgacccggagcccgagccgggagagggagccgccgcagccgccggcgcgggagaaccaaaggcagacccagaagagcacaaaacagagaaaagggaagggcccggaga

SEQ ID NO: 183382 - RNA, 72 nt, Homo sapiens
aacgacaagcacacaccaccgcagggaggcaaggagcacagaggggcgcaacaggaaggagaacaccagaag

SEQ ID NO: 183383 - RNA, 63 nt, Homo sapiens
accaaaaagcaaacggaccagaccgaccaccaaaagcgggagcgaccccggcaggaaggcgac

SEQ ID NO: 183384 - RNA, 63 nt, Homo sapiens
agaaaaccaaccagcccaggagaagcacgccagaaacaggacgcgggaggcaggcggcagaca

SEQ ID NO: 183385 - RNA, 79 nt, Homo sapiens
gcaggaccaaaagggaaaagcaccgcccgggcgcgccaggcacagccaagagcggaccggcagcggccagcgcagcggc

SEQ ID NO: 183386 - RNA, 73 nt, Homo sapiens
agacaccggcagagaaccaaacgggagaacagagacccaccaagaaaccagaacccggacaagggaagggccc

SEQ ID NO: 183387 - RNA, 74 nt, Homo sapiens
aagccaccgcggaaagcacagcaccgacgggcacccaggccagcaggagcggagcgcaggcaggcgagggcgcc

SEQ ID NO: 183388 - RNA, 67 nt, Homo sapiens
agagcagagaaacggagaaggcagaagaagagggggagacccgcgcacacaagcggcagggccggag

SEQ ID NO: 183389 - RNA, 78 nt, Homo sapiens
aagaacagcgacaaggagagaagcgcggagccccaagaacaaagccagccgaaacaccagcaagacaggccagagggg

SEQ ID NO: 183390 - RNA, 74 nt, Homo sapiens
cggccacacgcgacgggggagccgcggggaaagggagcagcaccggccacacccacagcacgaccggaacccag

SEQ ID NO: 183391 - RNA, 82 nt, Homo sapiens
aaagagaaccaccagcaaagagcaaggagagagcagacacagaagcggcacagagaaggccaggaagacaaggcagaaaccg

SEQ ID NO: 183392 - RNA, 80 nt, Homo sapiens
gacgaccccacccgcgccgcgacccgacaagcagaccggaagaccgacggaagaccacaccccgagggagcccaggacac

SEQ ID NO: 183393 - RNA, 76 nt, Homo sapiens
cccacagaggcaccccagacacaggcccacggccccacggggcgacgagccacgggcgggcccaccgcagggggga

SEQ ID NO: 183394 - RNA, 83 nt, Homo sapiens
cggggcaagagcaggagcccggcaccccccgccgacaaggagggccccccgcagagggcaaggggcgagcggggccggacaga

SEQ ID NO: 183395 - RNA, 78 nt, Homo sapiens
gcgagcggcccgagcaggccacaaggggggggggagacgggaacgagaacccggaccgcggaagcagcaagcgcacac

SEQ ID NO: 183396 - RNA, 80 nt, Homo sapiens
gggcgaagccaagcacacgaagcagcgggccagcccacaacagccacggcccgggagggaaggccgacaaccccgaaacc

SEQ ID NO: 183397 - RNA, 78 nt, Homo sapiens
gaagcggccgccacgagagaaaaaggaggaacaacacgaggaagggcccaacgaaaacaggacccagaagacggcgga

SEQ ID NO: 183398 - RNA, 88 nt, Homo sapiens
cagcgcccagagaggcaagaaagcgcaaggggaacgcacaacacagcaaaggaaccagggaccacaaagagagaacaaacaagccaac

SEQ ID NO: 183399 - RNA, 75 nt, Homo sapiens
ggacagaacagccaccaaaacagaaggaaagagcagccaaagccaaagaagacgaaaaaagggagaaccaaccag

SEQ ID NO: 183400 - RNA, 59 nt, Homo sapiens
accacaaaaccagaagaaaacgggagccaaacccacggcccccacagaggcacccgaca

SEQ ID NO: 183401 - RNA, 79 nt, Homo sapiens
aaacaaaagaacagaaagcgagcagagcccgcgaacaagacaaggcccaaacgggggcccccagacaagacccaaagac

SEQ ID NO: 183402 - RNA, 57 nt, Homo sapiens
caggaggcagcagacggacaccaggaaccggccgaaccagaccggagcaggggcagc

SEQ ID NO: 183403 - RNA, 65 nt, Homo sapiens
aaaggaacggacgaaaggaagagagaagacagcagcgaacaagaaggggcagcccaccgggggcc

SEQ ID NO: 183404 - RNA, 76 nt, Homo sapiens
cagccacgcagacggaaacaaggcaacagaaagagcaacagcagggcaacagggccccagcgcaggggggggggga

SEQ ID NO: 183405 - RNA, 69 nt, Homo sapiens
caacagagaagagaaccccagaaacacaaaacaccgaggggcagaaaaacagggaccgagcacacaaac

SEQ ID NO: 183406 - RNA, 57 nt, Homo sapiens
acagagcagaggacgcgcaggggcacccccacggagcccgggaagagggaaagccca

SEQ ID NO: 183407 - RNA, 55 nt, Homo sapiens
gaaaaaaacccaggcggcccagggcagagaaagcaagagacgcaaccgaacgcag

SEQ ID NO: 183408 - RNA, 77 nt, Homo sapiens
ccaacccccaaaggcgggacaggccaagagcagcacccaaaggccaggagcgccaaggaacaggaaagcaacacgca

SEQ ID NO: 183409 - RNA, 59 nt, Homo sapiens
aggacaaccgccagaccgcacacaacaggcaaaaaccggcgaaaaggcaaccagacagc

SEQ ID NO: 183410 - RNA, 52 nt, Homo sapiens
cgaggcgggcagcagcagccccggggcccggagagaacaggacaggcccaga

SEQ ID NO: 183411 - RNA, 73 nt, Homo sapiens
agacgacgcaccgcaggcagacaaaagggccaaagaagggagagcacccacaagagcaccaggacaaccccac

SEQ ID NO: 183412 - RNA, 46 nt, Homo sapiens
acgcagaggaaacggcagcagaacgagacaggcaaccaagaagaaa

SEQ ID NO: 183413 - RNA, 60 nt, Homo sapiens
cgcggcagcggcgcccgagcggcagaccgaccaccccccagcgagacgacgggaccgaag

SEQ ID NO: 183414 - RNA, 75 nt, Homo sapiens
ggcaaagcaacaccacagacagagagacggccacagcacaacaggccggggggggcacagagccccggaagacag

SEQ ID NO: 183415 - RNA, 76 nt, Homo sapiens
ggaagcgccagacaaagagagaagacgcacaaagcacggcggacccccggccggcagcggcacggggacgagagcc

SEQ ID NO: 183416 - RNA, 50 nt, Homo sapiens
cgccaacccaagaaacaccggacacaagagggcaagaaaggcgcgacggg

SEQ ID NO: 183417 - RNA, 84 nt, Homo sapiens
ggcaagggaacagaaggagcagagacaccaggcgccgagaaggccagcagagaaacaggcaggagaggcccacaggcgcggacg

SEQ ID NO: 183418 - RNA, 78 nt, Homo sapiens
agccacggcacgcccaccgcaccgaccaggaccacagcggcaaggcccaagcccagccaaggcgccgcgggccccgcc

SEQ ID NO: 183419 - RNA, 74 nt, Homo sapiens
caaagacagaaaagaaccgaagaggaaaaaggaaagaaggcgaccgagcccgagaccggaccaaaccagagaca

SEQ ID NO: 183420 - RNA, 86 nt, Homo sapiens
aaaacgacggacgggaaggcgccccaggaaggcgcacacaaagcggagaagaagcaggcgccccccaccagccacagacacagacg

SEQ ID NO: 183421 - RNA, 80 nt, Homo sapiens
acgcaagaaacgaaagcagccacaaaggggagaaggacggcagaaaacgagacgccggcggcgaaaaaaggggacaagac

SEQ ID NO: 183422 - RNA, 81 nt, Homo sapiens
agggacaaagaccgccaggcagaacagggaggagcaggagaaggagaccccgggagaagaagagagaagacagcagcgaac

SEQ ID NO: 183423 - RNA, 75 nt, Homo sapiens
aacccaagccaaagcccagggccagccgagccggccaggaccagggggaacccgcagcagcacagacccagacaa

SEQ ID NO: 183424 - RNA, 63 nt, Homo sapiens
ggagagccccgcggcagccgcgccggggccaagccacaaggagaagagaaggagcgcgggcgc

SEQ ID NO: 183425 - RNA, 77 nt, Homo sapiens
acccgccaggagagaggaaagccagccccagaaagaaaaggaggaaagacaagccccaaaagcagccgggaaaggag

SEQ ID NO: 183426 - RNA, 58 nt, Homo sapiens
cggccccgagacagaagccgacaacaggcacaaagagagaaggaacacccacagggca

SEQ ID NO: 183427 - RNA, 71 nt, Homo sapiens
gacaaagaaaccagggagaacccagggcacccgaccgcccccccccaccgacgccccgagcgaaaaacgca

SEQ ID NO: 183428 - RNA, 55 nt, Homo sapiens
gggggccacagggaggcaaggaagccccggcacagaaaagaagggagagcaaaga

SEQ ID NO: 183429 - RNA, 72 nt, Homo sapiens
gaaccacgggagccccgaccgggagaggagagcccccaggggagccggcggaagagcggcagcccacaagca

SEQ ID NO: 183430 - RNA, 85 nt, Homo sapiens
gcgcgggcggagacaggccaacacgcgggcagcgaacaagcgggagcaaggagggcgaagagcgaggagccaacaggcagaccac

SEQ ID NO: 183431 - RNA, 68 nt, Homo sapiens
gagacccggcaacccgccgcacaacaagcgcggaccggaggccgggggaaccaacaaaccagcccgcc

SEQ ID NO: 183432 - RNA, 68 nt, Homo sapiens
gcgagggcggacagcggggcccgcggaaaacagggcagaaacgcaggagcacggcgcagacacacgaa

SEQ ID NO: 183433 - RNA, 77 nt, Homo sapiens
cgggggccaccaccgaggaggaacaacccacacgccaaggcgacaccacccaagagcgagcccacaagcaagacaag

SEQ ID NO: 183434 - RNA, 82 nt, Homo sapiens
caacaagagcaaggcagaacgccaagccccgcgagcgcacgccaacgacgaggaccgacgcagaagcagaagaaggacaccc

SEQ ID NO: 183435 - RNA, 57 nt, Homo sapiens
cccgcgccgccgaccccccggcgccgcgccggcggcgggaacccaggaccgacccaa

SEQ ID NO: 183436 - RNA, 58 nt, Homo sapiens
gaagggacagcaagaggcgggaaaggaggagacagcgacagggggaggggaaagaacg

SEQ ID NO: 183437 - RNA, 69 nt, Homo sapiens
caagaagccaacagcgaggccagcggaaccacccaccgagggaccaggggacgcagacacgagcagggc

SEQ ID NO: 183438 - RNA, 53 nt, Homo sapiens
ccacaacaccggcaggaaccaccaggacagagacacgccaccacaccgaccca

SEQ ID NO: 183439 - RNA, 80 nt, Homo sapiens
ggcgggcggcgcgcgggcgcaggagaagaggcggcccacagcagaaagcgaagcagaagccgagaacagcggcgagccgg

SEQ ID NO: 183440 - RNA, 79 nt, Homo sapiens
ccgaaagggccaagcaacggagaccgggggggcaagcaaccagcgggagagaggaaggaggccgaagggcggccgcgag

SEQ ID NO: 183441 - RNA, 52 nt, Homo sapiens
ggcgacaagggccgcgcaagcggcaggacaacgaaggaccggggaccggaag

SEQ ID NO: 183442 - RNA, 80 nt, Homo sapiens
gagcccagccaacagcgccccggacgcaccagagccaggcggagagacacccaggaacacaacccacaacacaccccgga

SEQ ID NO: 183443 - RNA, 67 nt, Homo sapiens
gcggcgcccagcaaaacaagggaccgcaacgggaagaggagccgaaggagacgcgcagcgaaaccac

SEQ ID NO: 183444 - RNA, 76 nt, Homo sapiens
aagagaacccaaaggagaaaaagaccgagaaccgggcaaaaacccccaaagccacgccgcgccacacccacgaagc

SEQ ID NO: 183445 - RNA, 60 nt, Homo sapiens
cagaacagagacagaggaagaaccacgccgggagcgggaccagcaacacaccgcggacaa

SEQ ID NO: 183446 - RNA, 74 nt, Homo sapiens
caccccaccagccgaaaaaaagggagagcacagaaggacagcaggaggacagaaggcggagaggccagaaagac

SEQ ID NO: 183447 - RNA, 38 nt, Homo sapiens
cccagacacacaccacaggcaccggcacggaccacccc

SEQ ID NO: 183448 - RNA, 60 nt, Homo sapiens
cacacagacccacaggccaaaggagcggaagcagccagggacgccaaggacagggcaaca

SEQ ID NO: 183449 - RNA, 81 nt, Homo sapiens
gcacccgcccacgaacgagggggcgagaaggcaaggccacaaccggggcgaggccaagccagggagacccagagaagaccg

SEQ ID NO: 183450 - RNA, 54 nt, Homo sapiens
agcccagcgccagcagacaagacagaccacagccgcaaaagagcacaggcgcag

SEQ ID NO: 183451 - RNA, 64 nt, Homo sapiens
cggcggagagcggccgcgggcgacgggccgaggcaccgccagggaggagagcggggcacgcgcc

SEQ ID NO: 183452 - RNA, 75 nt, Homo sapiens
ccacagcgccaacagcaacgcggaccacgagaacaaacgcgaccagaaccgaagaaaacaaaagaaggacagaca

SEQ ID NO: 183453 - RNA, 51 nt, Homo sapiens
cgcaccacacacagagggaaacggaaagcaccgccggccaggaggagagcg

SEQ ID NO: 183454 - RNA, 72 nt, Homo sapiens
aacgcaagaagcagaagggacagccagaagaccaagagagcgagaagacggaacagagagacgaggcaccgg

SEQ ID NO: 183455 - RNA, 74 nt, Homo sapiens
ccccagagagggagcagaggaggccgaaaggcgccagccaagaacacaccaagccagcaagaacaacacccaag

SEQ ID NO: 183456 - RNA, 136 nt, Homo sapiens
caccgcgccccccggacgcgccaaagccacacaagcccgcaccaaagcgcaccgcggacgcacacagggcgggacgaccccacaacccgagcgcccaagccccccgcgcagagggagaaggcacccgggccggggg

SEQ ID NO: 183457 - RNA, 85 nt, Homo sapiens
ccccgaacaccccaacagaagcccagccgacggcccacaagggcaagacccaacagaggaagccgcaagaaacgggacgacagga

SEQ ID NO: 183458 - RNA, 63 nt, Homo sapiens
agcccccaggagcgggaacaggccgcgccccacacagcagaaaagcccacgagcaaaccagag

SEQ ID NO: 183459 - RNA, 76 nt, Homo sapiens
ggaagaggaccgaaaaaagagcgggggcacggaggagcccgcagcagcggcggaccgagccaaagaggacgcgccc

SEQ ID NO: 183460 - RNA, 66 nt, Homo sapiens
ggaccgagagcggaccgagagcgcgaaacgcacgagaaggagcgggcaccaccccagggaggagag

SEQ ID NO: 183461 - RNA, 79 nt, Homo sapiens
cgagcgcagcccccaaagccgcgcgagaggagccgggacacgccagcgcgggcccagggcgccagggaaggaccgcaca

SEQ ID NO: 183462 - RNA, 38 nt, Homo sapiens
ggagagaaaagaagaggaccagacaaagagagaagcgg

SEQ ID NO: 183463 - RNA, 76 nt, Homo sapiens
accacaggaagccacagcaagaaggaacgacaaggcgcccagacaagccgagaaagaagcagcacgaacgaaagag

SEQ ID NO: 183464 - RNA, 61 nt, Homo sapiens
gacccacgacacggcaacgccagaggggacggcagagacaaaaccccgccagacagaacca

SEQ ID NO: 183465 - RNA, 75 nt, Homo sapiens
gcgggaaacgggagggaaccagcaacaagccggcagaccaccccagcaacggcagcagcaccccagcggaaaaag

SEQ ID NO: 183466 - RNA, 63 nt, Homo sapiens
gacgcaccgcaggcagacaaaagggccaaagaagggagagagagaccaccaggagaccaggac

SEQ ID NO: 183467 - RNA, 81 nt, Homo sapiens
gaaagaaaaggaagcaacaacaaagcccagagggagccaaaaaccagaaccgagggcaccggagggaagcgggccaccgcc

SEQ ID NO: 183468 - RNA, 40 nt, Homo sapiens
cgggaccacagcaggacgaagccgccgccagcgcgcacgc

SEQ ID NO: 183469 - RNA, 70 nt, Homo sapiens
acacacaagagcaaacaagcaggagcccaaaagcggggcacccggacacgcacgaccagagggaccaaaa

SEQ ID NO: 183470 - RNA, 81 nt, Homo sapiens
gcagcaggcacgagcaaaggaacacaacgggccaagggcagcgcaggggagacaccgaagaacaagcacgagcacgacaga

SEQ ID NO: 183471 - RNA, 62 nt, Homo sapiens
aaacccgggacccaccacccaggccccgacgccccgagggacccggcaaagagagaggcaca

SEQ ID NO: 183472 - RNA, 72 nt, Homo sapiens
agaccaggccgaacgaggcagacacccaaacgcgacagaggaacaaggaagccccccagaaaagaggcgagg

SEQ ID NO: 183473 - RNA, 42 nt, Homo sapiens
gacccaggcagccgcgcaaggccaccccagcagacaggccaa

SEQ ID NO: 183474 - RNA, 72 nt, Homo sapiens
aacggaggccacaaacgcaaggccggaaccaccaccagaaaccccgaggcgggcgaggccagaaaccagagc

SEQ ID NO: 183475 - RNA, 80 nt, Homo sapiens
ggaccaacagaagaacccagaacaacccaagaggacaaacccccagaccaagaagaacaaccgcagaaaccagaaaccac

SEQ ID NO: 183476 - RNA, 74 nt, Homo sapiens
cacaacggcgaaaaggaacgggacaccaagcgcggacccgaagggagcacagaggagggaaagaccgcgcgaca

SEQ ID NO: 183477 - RNA, 80 nt, Homo sapiens
ggccgggccagcgcaacaacacacagcggcccgggcacggcaacgggaggcccaagaaaccagacggagacgggagagcg

SEQ ID NO: 183478 - RNA, 71 nt, Homo sapiens
gaaggaaggggaaagccagagggcaaaccaccgacacagagaacacacaggacacaggaaagggaagcgcc

SEQ ID NO: 183479 - RNA, 67 nt, Homo sapiens
acagcccaaaaggcggccagccaccgaggccaacaacacaggcagaagagaccacagagaagcccac

SEQ ID NO: 183480 - RNA, 92 nt, Homo sapiens
ggggcccagcagacagccgaggggagcgcggggcccggcagaaagggaggccaacagacccaacccagaaggcaccaaacggagggggaaca

SEQ ID NO: 183481 - RNA, 75 nt, Homo sapiens
ggagaaaaggagagaaacacggagacagcaccaaacccacagaggcacgagaaagaggccagcaaagccaggggc

SEQ ID NO: 183482 - RNA, 71 nt, Homo sapiens
agaaacaccaccaacaaaccgaaaaagagccgggaaggagaaacacgcgaacaacagcccaggcaggccgg

SEQ ID NO: 183483 - RNA, 73 nt, Homo sapiens
cagacacaagcgaaaacagcaagcgagcgaaaggaagcagacaagcgacaagacagcaaagcaagccaagagg

SEQ ID NO: 183484 - RNA, 60 nt, Homo sapiens
ggccagaggcaacaccgaaggacgacccagaaggcaaaagcagaccggaaaacccaccgg

SEQ ID NO: 183485 - RNA, 53 nt, Homo sapiens
gaggaggcagaggaaacggagagacagacaagagaagagaggaaaagaaaccc

SEQ ID NO: 183486 - RNA, 81 nt, Homo sapiens
cccccacaggggagacagagcggagcagaccaccgcccagcaaaaagcggcggaaagaaagacaaaaggaaaaagagaaag

SEQ ID NO: 183487 - RNA, 63 nt, Homo sapiens
cggccacccgacagcaagcaccggagggagaagacagagccgcgagaaggggccagcaaagac

SEQ ID NO: 183488 - RNA, 66 nt, Homo sapiens
gagggccacgggccgggcgcggcaccacgcccgccccagcggagagaaaggaagcggaagagaaga

SEQ ID NO: 183489 - RNA, 72 nt, Homo sapiens
agccgaagaggggcggcacccccgccagggccccccacgcgagaacccgggccggggcccgggggcccgagc

SEQ ID NO: 183490 - RNA, 76 nt, Homo sapiens
cgcgcgggccacccaagaggagccccggggaacccgcagcacaccagggggcaggcccgccgcaggcaccaagaag

SEQ ID NO: 183491 - RNA, 76 nt, Homo sapiens
gcggagcggccgcccggcaggacaagcccgcagccaaaggcgcgcccagacgagacaggaccacggggcaggcggc

SEQ ID NO: 183492 - RNA, 66 nt, Homo sapiens
cagcaacaggacgacaaccaaaaaggcggaagcaccgaaggggagacgcaagccacccggacgcga

SEQ ID NO: 183493 - RNA, 76 nt, Homo sapiens
cacgcccaaacaggaagcagagagacaagccaaaacagaagaggcaaagcccagccacagcagcagcccagcagca

SEQ ID NO: 183494 - RNA, 56 nt, Homo sapiens
ggaggccagggggcgccagggaaaagcacagggccaggaagcagagggacagccag

SEQ ID NO: 183495 - RNA, 53 nt, Homo sapiens
accagaggcagccagcagggggaggggaacggcacagggaggggacagaccaa

SEQ ID NO: 183496 - RNA, 71 nt, Homo sapiens
gcccgggaccggcacggacgggaggccccgacaagcccccaaaccggaggaagccaaggagagcgaaaggg

SEQ ID NO: 183497 - RNA, 73 nt, Homo sapiens
agacaaacaaaagagaaggcaacaaggcacacaagcggggaggaccccagaccacgcgagcaggcgacccaaa

SEQ ID NO: 183498 - RNA, 77 nt, Homo sapiens
cggagccggaggaggaggggagaggccggaggacaccaacagaaaagggaacaaccccaaaaaaccgacacccggga

SEQ ID NO: 183499 - RNA, 77 nt, Homo sapiens
gggagggagggacgggcccaggaagcaggagaagaagagcccggacccccggcgggcgaacaaagacccaggagcgg

SEQ ID NO: 183500 - RNA, 67 nt, Homo sapiens
cagacgggaagcagaggccacccagggggcacccgaggaggaagagggcagggcccacggaaagaag

SEQ ID NO: 183501 - RNA, 83 nt, Homo sapiens
ggccgcaaacgacacccagggacaaagagacggacagaacgccggacagggggggccgaagaagccagggggaggaaagcaga

SEQ ID NO: 183502 - RNA, 70 nt, Homo sapiens
cgccacaccggggacccagagcaggccaggcagcgagggaacggaccagcgggagcgggaggagcgcgag

SEQ ID NO: 183503 - RNA, 78 nt, Homo sapiens
cgcccggccaagaggcaaaggggaggacgcagcaaaccaccagaaggcccaagccaggaccacgcaccgggaggggaa

SEQ ID NO: 183504 - RNA, 75 nt, Homo sapiens
gaaaagccccggggagacacagcacaagacaggaaccaagaccaggacaaagaagacccggagagacaagccgga

SEQ ID NO: 183505 - RNA, 87 nt, Homo sapiens
ggagggagacaaagcagcgcccgcgccgggcccggaaagcgccgcccagcagccgcagacgagaagaggcgaacggaagcaacaccc

SEQ ID NO: 183506 - RNA, 70 nt, Homo sapiens
gcacgagcccggcgccggcaggccccgggccgagaaagggaagcgagaagagcagaagaggcagacacaa

SEQ ID NO: 183507 - RNA, 74 nt, Homo sapiens
ccgccccgagcgaaccacaccgaaccgagggcagaggcaacccggaggacacaggaccaggcggaagcgaaaaa

SEQ ID NO: 183508 - RNA, 49 nt, Homo sapiens
cacggaggaccgacaggagagaacacaacagcgacgacagacccacaag

SEQ ID NO: 183509 - RNA, 89 nt, Homo sapiens
gaggacgcagcaaaccaccagaagccggaaccaaaaagaagccccagagccggggccaggagccccaagcgccccagcagcaaacacag

SEQ ID NO: 183510 - RNA, 82 nt, Homo sapiens
acggggagcagaccggaggaggcgggggcgccggcagaggaccaggcaccaccggccccggaagggcagccaagcaggacca

SEQ ID NO: 183511 - RNA, 77 nt, Homo sapiens
gggacaacaaaagagccacccaagggacaagcaaggggccaaggagccaaggaggaaacccacaacagaggacagaa

SEQ ID NO: 183512 - RNA, 64 nt, Homo sapiens
aaaggagcggggagccccgcgccacagaacagaaggagcggcggacacacagacccccaccaag

SEQ ID NO: 183513 - RNA, 78 nt, Homo sapiens
agaggagcccagaggccgagcaagaaccccaagggcggaaccagaccgcaggcacagaccaggaaacaggccgacagc

SEQ ID NO: 183514 - RNA, 67 nt, Homo sapiens
cgggggcaggggaggagacgaggcgacaaagaacgagaaggaaacccagccaagggaaccacaccca

SEQ ID NO: 183515 - RNA, 77 nt, Homo sapiens
gaggacaggagagaagaagaagaaaccggagaaggaacagaccccggaggagaaccaagaccggcagcgggggagag

SEQ ID NO: 183516 - RNA, 85 nt, Homo sapiens
gcagcggcggcagcggagagcgagagaggggagcagggaccgggcggccacaaggggcaggaccaaagacgacggaccccacggc

SEQ ID NO: 183517 - RNA, 90 nt, Homo sapiens
acgcccgcccacccggaaagccccccaggcgaggcggcagacccacaccgaaggcagagaccccaagagaagccccaaccgagaaagccg

SEQ ID NO: 183518 - RNA, 76 nt, Homo sapiens
ggacggggaaaaaggaccacaagccacgaagaagagccggaacaagcaacggcagaaaaggcaccggacaagagca

SEQ ID NO: 183519 - RNA, 62 nt, Homo sapiens
acccaccacggcgagggcgagagcggccccagggcaacacagggacaagcggcgcgacggcc

SEQ ID NO: 183520 - RNA, 70 nt, Homo sapiens
cgaccaagaagaagccacggacccgcgacaccaggaaagacaccgaggccgcccccccgggggaggaggc

SEQ ID NO: 183521 - RNA, 41 nt, Homo sapiens
caacaccgcccgccaggacgacggggggccccagcccggcc

SEQ ID NO: 183522 - RNA, 69 nt, Homo sapiens
agcggcgcagcgagcacgcccccacaacacccaggagagagccccaccgggagaacacacgcgagcgag

SEQ ID NO: 183523 - RNA, 71 nt, Homo sapiens
acaacaacccagaggaggacaaaaaaacaaacggaaggaggccacccccagacgggacgcgagagcccacg

SEQ ID NO: 183524 - RNA, 73 nt, Homo sapiens
cgcggcccggagcgcggcccgaggcccgcccagagcccgacaaaccgcaaggcaacgaagcaccgccgggaca

SEQ ID NO: 183525 - RNA, 75 nt, Homo sapiens
ggaaaacggggacgcacaaaaacacacgacggcgcccaaaacgagagaggacacgcaccacagacccagcaggag

SEQ ID NO: 183526 - RNA, 82 nt, Homo sapiens
cggggcggcccgcagcccgccgggagccgaccgaggcgcccgcggggcggggaccgccgcccgggagcaggccaagcacccc

SEQ ID NO: 183527 - RNA, 76 nt, Homo sapiens
cacgaggaggcggcggccgacggggcggcgggagcagggaccggcccagcccaccgaagcccggggaagcccgacg

SEQ ID NO: 183528 - RNA, 72 nt, Homo sapiens
ggccaaggacacgcacgcaaacgaccccggccgggaggagcaggaaggaacaacaaaccaagagagacgagc

SEQ ID NO: 183529 - RNA, 64 nt, Homo sapiens
gaccgaagaaggcaaacggcaaagaaacgaccagaagagagagcggggaagaggagaaaacacg

SEQ ID NO: 183530 - RNA, 67 nt, Homo sapiens
cggcggcgccgggggaccccaaagccccaccccacaaacgacacaagcccacacaaggaccggaccc

SEQ ID NO: 183531 - RNA, 73 nt, Homo sapiens
cacgaccagcaggaagaacaaacgagaaggcagagaggggaagaccaagagcacaggacaggcgcaagacaga

SEQ ID NO: 183532 - RNA, 43 nt, Homo sapiens
ggcgcgcccaccccgcagggaggcagaagagcccgccaaaagc

SEQ ID NO: 183533 - RNA, 84 nt, Homo sapiens
cacgcccaggccccccacccaaccccaggacagcagcccacagagaccaggaacccaggacagccgcggcaccacgccccagac

SEQ ID NO: 183534 - RNA, 36 nt, Homo sapiens
gagagcggcagcgcgacaagaggagccacacgcacc

SEQ ID NO: 183535 - RNA, 68 nt, Homo sapiens
aaaccacacaaagaccacggagaaaaaacgaagcacccacagcaacaagcaacaggagaaccgaaagc

SEQ ID NO: 183536 - RNA, 76 nt, Homo sapiens
acgaaggaagagcagcaaaggaagagaggggaaagacaagacaaggaaccgaagaagggcaaggccccacagagaa

SEQ ID NO: 183537 - RNA, 79 nt, Homo sapiens
acaccaaaaagccgcaggggaaacccagcggcggcagaaccagccggcacaaagccgaaccagagagagcaacgcccga

SEQ ID NO: 183538 - RNA, 80 nt, Homo sapiens
gaagaaaccagcaaaggcaccggacaggccaaggcaggggccagaagacaaagcaaccagccggggcgacaaaagcgggc

SEQ ID NO: 183539 - RNA, 68 nt, Homo sapiens
ggacacaagagccaacaaaaggcagaaggaagcgaaaccccacgaggcgaagaaaggacgacaaaccc

SEQ ID NO: 183540 - RNA, 76 nt, Homo sapiens
ccgaagagggagaagagaggcgagcgggaggcacgcggagccacaaggagcggaaagaagaccgcgacggggcgag

SEQ ID NO: 183541 - RNA, 89 nt, Homo sapiens
gcacgcccccggccccgacggggcgggggccccagccccacagaccagcccagcacagggggagaaggagaagcacgaagacgggggaa

SEQ ID NO: 183542 - RNA, 81 nt, Homo sapiens
gcggacccagcaacgggccacccggacaccgccacgagggagcagaagaggggaagaaagagacccgcgggccccagacac

SEQ ID NO: 183543 - RNA, 65 nt, Homo sapiens
accacccgacccagagcccccgcccgcacgcaaaccagcagaggaggccccgggagcaggggccc

SEQ ID NO: 183544 - RNA, 56 nt, Homo sapiens
caaaagggccaaagaagggagagagccagagccagaggggcgccgcagccagaaga

SEQ ID NO: 183545 - RNA, 37 nt, Homo sapiens
aggcccgcacacgccaccccaggaccggaaagcagaa

SEQ ID NO: 183546 - RNA, 61 nt, Homo sapiens
caggcccagcacaaaaaaagagggggaaccgaggagggagcacccacgggagaccgggggg

SEQ ID NO: 183547 - RNA, 70 nt, Homo sapiens
agccaagacccccacccgggaacgggacccgaagacagaaaaagacagcgagacagaggaagggagacac

SEQ ID NO: 183548 - RNA, 72 nt, Homo sapiens
accgccgggagcagccggacaagagaccacacccaggaagccaggcacgcacagcgaggccaccggcgagcc

SEQ ID NO: 183549 - RNA, 87 nt, Homo sapiens
ccggccaggcgagcaagccagggcccgcgaggggagccgagcacgaggcaagcggccaagcaggcaaagacaagcggccgcagggca

SEQ ID NO: 183550 - RNA, 71 nt, Homo sapiens
aggccaaggccaaaagccaaagcggaaccaacgcaaaagcagaccggaaaacccaccggcaagaccacacc

SEQ ID NO: 183551 - RNA, 71 nt, Homo sapiens
gacagcggacgccccagcacccccagcgggcaggaaaccccacgggcccacccgagacaggacgcgaggac

SEQ ID NO: 183552 - RNA, 64 nt, Homo sapiens
ggaagcgaaggaggcgggagcggagacccgcgcgccaggcgcgcccgggacacaccaaagagac

SEQ ID NO: 183553 - RNA, 72 nt, Homo sapiens
cgccccggggggagccaccgggagagccgagcagccccagcaggcaacagcacccacccggagccggagccg

SEQ ID NO: 183554 - RNA, 67 nt, Homo sapiens
agcccgcccaggaagggacccgagcacgggcagaaaaccgcgcgggagggggcaagccaccaggagg

SEQ ID NO: 183555 - RNA, 57 nt, Homo sapiens
ccggagggagacaaagccagcaggaggagcagaaaagcgaggcaagggcggcagggg

SEQ ID NO: 183556 - RNA, 73 nt, Homo sapiens
ccccagccgacagagggcgcgccaggaccagcaaggagagccacaagaagaggacagcagcagacaaagaacg

SEQ ID NO: 183557 - RNA, 74 nt, Homo sapiens
ccacccagcggggagcacggcgagcagccaggccaggagagagaaacccagaaaacgccaaaccgaccaggaga

SEQ ID NO: 183558 - RNA, 78 nt, Homo sapiens
gccagcaccggggcccgcgcggcaggggagcagagggcgcgccaagcaaagccaggccaaggagcggagcaggaccag

SEQ ID NO: 183559 - RNA, 88 nt, Homo sapiens
agagaccaagccaaacccccagggaccaagaaaggcccagggaccaaagcccggacaaggcccgagcaccaggaccgcagaaggcccc

SEQ ID NO: 183560 - RNA, 77 nt, Homo sapiens
cacccgaggaagacgaggacaggacagagcccccgaggccccagaacaccgggccaacggccgccaccaaaaagaag

SEQ ID NO: 183561 - RNA, 78 nt, Homo sapiens
acccaacccgagaggaagcagcgagacgcccggcagacggagcaagggacgaggaaacaccaacaccaaaccagccca

SEQ ID NO: 183562 - RNA, 76 nt, Homo sapiens
cgacacaggaagaagacaggaacaggagacagcggagaaagagcccgggaagcacgaagccgagaccagccaagga

SEQ ID NO: 183563 - RNA, 62 nt, Homo sapiens
acaacgagcggaaagcaacccggagcggaggacaggagaccgaacacggagcaacaccccgc

SEQ ID NO: 183564 - RNA, 72 nt, Homo sapiens
aaaccgcaggcaagaggcaaaccgacaccagcgacacaagcgcgagggaaccacagaggacaggcgaggggg

SEQ ID NO: 183565 - RNA, 86 nt, Homo sapiens
acaccccggaacaaggccggccaacggagacagggaaggaagagaaccgaagaagaaaaccaaaaacgaaaaagcaagggagagca

SEQ ID NO: 183566 - RNA, 75 nt, Homo sapiens
acgcagaaagagacacaccgacgaaaaaggagggggaaagaacgggaggaacaagacaagaggacacccgacgca

SEQ ID NO: 183567 - RNA, 69 nt, Homo sapiens
cacacccggaaggaacagcccccccagccggcacggaggccccagcccaacccagcccaggaggaggag

SEQ ID NO: 183568 - RNA, 88 nt, Homo sapiens
aaacggaccgccagcagccaagagccagaagcagcaggaccggcggaggagcgagagcaggacagaggaccagcgacaaaccgagcag

SEQ ID NO: 183569 - RNA, 71 nt, Homo sapiens
agcggagcgaagcgaacaaaaagcagcaaaccggaccaccccgaagaaagcacaggcgaggaacccacaga

SEQ ID NO: 183570 - RNA, 72 nt, Homo sapiens
gccggggcggggcccaggagacggaggaccaagaaaacggggaaaaacacagagaaggccgcagagcagacg

SEQ ID NO: 183571 - RNA, 75 nt, Homo sapiens
cccacagccagcaacaccggcccgacggaaaagaccagccgaggacggcgccccgaacaccaaaagggaagacgc

SEQ ID NO: 183572 - RNA, 79 nt, Homo sapiens
caggcccaccccagcgaccggaagcgagcagcagcgccgccagaagggggacagccgcgccgcgcgcccgaagagggac

SEQ ID NO: 183573 - RNA, 75 nt, Homo sapiens
agaaggccagcgacagccgggagggacaaccacccccaaggaggacaccccaccagcagcggaccacccccccgc

SEQ ID NO: 183574 - RNA, 84 nt, Homo sapiens
gccgacaaggaaggaagaaggcgcacaccccagcgcgcaaagcgcgaggggcgaggaaaggcaggagagcgaaagagagcggaa

SEQ ID NO: 183575 - RNA, 75 nt, Homo sapiens
aagagaagcagaaaaccagaagcacaaggacagagcacccaccacaggaggacaagaaaccacagagccgagaac

SEQ ID NO: 183576 - RNA, 81 nt, Homo sapiens
accaggcaccggggggcaacacccgagaacggcgggaagagaagacacgagcacaaacgaagacgaccccgacgcaggcca

SEQ ID NO: 183577 - RNA, 69 nt, Homo sapiens
acgaagggaggaaaagggcagggacagcgcaggcagcagccaggaccccaccccacaccaggccccacg

SEQ ID NO: 183578 - RNA, 77 nt, Homo sapiens
ggccgggaccggagcaccggcagacccggggaccgggaaggaagggaccacagaccagcacgccggcgccacgaacc

SEQ ID NO: 183579 - RNA, 73 nt, Homo sapiens
accgcccccagagcgaccagagggggagcaggggaaagcagaaagaagcccccccagacccaacacaccgaaa

SEQ ID NO: 183580 - RNA, 67 nt, Homo sapiens
ggaggcgaaagcggaacgagcccggaacgaccaggagacgcgggaaggacagaagacagccgcaacc

SEQ ID NO: 183581 - RNA, 77 nt, Homo sapiens
cgcgccacggagagacacggcggggggggacgcaaaacaaaaggggccaaggacgcacacaccagagaaggcagacc

SEQ ID NO: 183582 - RNA, 82 nt, Homo sapiens
agaccgccccgaccgcgcagggccgagcgccgcgaacagaccgagcgcccaccggaagccgccaagcgggagaagggaggac

SEQ ID NO: 183583 - RNA, 86 nt, Homo sapiens
agaaggcggcgaccgggcgcgggcaaggcgcaccagcggagagcggacccggcgcggcaggcggaagggcgagagacggacaggag

SEQ ID NO: 183584 - RNA, 74 nt, Homo sapiens
gaacaacggaacacccaagacaccgaagaggcaacaggaaccgacaaggacagaagccagcgaaaggcccggaa

SEQ ID NO: 183585 - RNA, 60 nt, Homo sapiens
cgaaaagccacgaagaaaaggggaaggaggcgaacaggaaggacacaagacaggagagaa

SEQ ID NO: 183586 - RNA, 76 nt, Homo sapiens
cgcccgcgcagccgagagccgggggagcggggccccacacccccccgggggggaggagacgagaaagagcggggaa

SEQ ID NO: 183587 - RNA, 65 nt, Homo sapiens
caaaagaaagaccagagacacgaagaagaggaggaaaccgcacggcaagaggacgggacagagaa

SEQ ID NO: 183588 - RNA, 77 nt, Homo sapiens
ccgaaccaagcacaaagcaaagacagagaaagaagggaagaggggaaccaggaggggaaagcaggaccgaccaagag

SEQ ID NO: 183589 - RNA, 70 nt, Homo sapiens
aaaagaaccaacacgcaagaaaaccagcaagggaccaacgaaagcaccgcacaggcgaagaggagaggaa

SEQ ID NO: 183590 - RNA, 78 nt, Homo sapiens
agggaaggagagagcagccggggcccaggaagagccgcgggcagggaaagcagccacagacgccgaaaaccagccacc

SEQ ID NO: 183591 - RNA, 82 nt, Homo sapiens
gcgccacaagagccccgcacgccagggcgccgccagcgcaccccccacgaccaggcggggcgaggaagcgccccgaaacccc

SEQ ID NO: 183592 - RNA, 79 nt, Homo sapiens
ggcccggggaacacaccggaacgccagggagcagcagggaagagaaaaggccccaaagccggaaggagaccggacaaaa

SEQ ID NO: 183593 - RNA, 87 nt, Homo sapiens
gaccggcggcgcgcagcccgggcggcgccgagaaggagggaggggaaacacaaagccggcacgcgcgcgagggacaagagaaaaaaa

SEQ ID NO: 183594 - RNA, 81 nt, Homo sapiens
aggacaccccgaagccgagaaaggagcagcagccggcccggcgccagcaggaaaacagaaggagccgggggaggcagaccc

SEQ ID NO: 183595 - RNA, 80 nt, Homo sapiens
ccacaggacggaagcacaggggccaccagagcgcccgagaagcaggaagagcggagagcagccccaaaaccagaaaacaa

SEQ ID NO: 183596 - RNA, 75 nt, Homo sapiens
cccaaaacagagcggaggcaagcaaaaaaccagcaagaaggaagagcaagcacaacaaaaggagcagaacaaaag

SEQ ID NO: 183597 - RNA, 60 nt, Homo sapiens
acacgcagaccgcaccaggagacaaggacagaagcaggcacacgacgcacgccgaggaga

SEQ ID NO: 183598 - RNA, 82 nt, Homo sapiens
agcgagcagcacgggcaagcgggcagcgaagagagaggggaacgggacaccaagcagaaccacgccagacaagacccagacg

SEQ ID NO: 183599 - RNA, 73 nt, Homo sapiens
ggggcgcccgccgcgccgccacggggaacaaaggccgacaaagaacacaaggggaaagagaaaagagcaccag

SEQ ID NO: 183600 - RNA, 65 nt, Homo sapiens
ggagcaggaggggaggggcacaggaaacacgcgggaacagcccgggccgccgcacccaccgcgga

SEQ ID NO: 183601 - RNA, 72 nt, Homo sapiens
cgaaaaaagagagggggggaccgaccgcaacagaacggacccggcagaaacccaagaacaaccgaagcacag

SEQ ID NO: 183602 - RNA, 70 nt, Homo sapiens
gcagcggggacgcggacgcacggaaccagcacacgcccgccccacgacggaggcaggcccgccacagaag

SEQ ID NO: 183603 - RNA, 55 nt, Homo sapiens
gagagaaggagacgcaagacccccgggaaccgagcgagagcagagagaagacgga

SEQ ID NO: 183604 - RNA, 34 nt, Homo sapiens
acaaaaacgaaggcggcgggcacacggggggcca

SEQ ID NO: 183605 - RNA, 79 nt, Homo sapiens
caaggaaaagccaaagaaagggaaggggaaaaagaagcagacagcccaccaacacagaagcggagcccaggcacccccc

SEQ ID NO: 183606 - RNA, 81 nt, Homo sapiens
gaggacgaaccaccccgcgccagcagcacagcacgggcgcccgcgccggcagaggaggcgagcacccgccagggagaggaa

SEQ ID NO: 183607 - RNA, 75 nt, Homo sapiens
agagacaagcccggcgcaaacaaaggaaccccaaaggaaagacacaggacaccagaggaccagaacccacgagaa

SEQ ID NO: 183608 - RNA, 74 nt, Homo sapiens
aagagcaagcgggggaccgaacaaggcaaaaggggcccggggccccagccggcccgggcacccggcagaggaga

SEQ ID NO: 183609 - RNA, 76 nt, Homo sapiens
ccggcggacggcggcgaagcaagccagccaagaggccagaccaaaacggacggagcaggaggaaaccacggacgga

SEQ ID NO: 183610 - RNA, 75 nt, Homo sapiens
cccgcggccacccggggagacgcagacagcgggccggacggcccgcagaagggaccaaaagccagccccacggag

SEQ ID NO: 183611 - RNA, 77 nt, Homo sapiens
cccaccaccggccagccggcccgaaccccgggcccgcgggagcggcccccgagggacggaaaacagcacaggaaaca

SEQ ID NO: 183612 - RNA, 35 nt, Homo sapiens
accgggccagccgcggcacagcacggacgacggaa

SEQ ID NO: 183613 - RNA, 90 nt, Homo sapiens
cgcggacaagcagacgagaccgggccccccgaggcgggcccaccgccgcccccgggaaaaggacaagagagacgaagcagaccagacaaa

SEQ ID NO: 183614 - RNA, 77 nt, Homo sapiens
gagcacaagcagagaagagaacggaacaagcacagcaggagaagccggaaagaacaagagagggccccaaggcggca

SEQ ID NO: 183615 - RNA, 67 nt, Homo sapiens
ccagcacacaaccaacagcaaaacgcccgcggaaaaacacgaaagcgcagcgggaagaggcacaccc

SEQ ID NO: 183616 - RNA, 41 nt, Homo sapiens
gagacacgggcaagggagagccggccaacggacggccgggg

SEQ ID NO: 183617 - RNA, 69 nt, Homo sapiens
agaagagcgggaagggacaaaacagaggcaacaagcgaaccaaaacgccacggaggaggcaagcaaagg

SEQ ID NO: 183618 - RNA, 80 nt, Homo sapiens
acggggccccaggaccccacaacaccagaacaaaaggcaggggagccgccaccaaaagcagacggaaaacccacggggaa

SEQ ID NO: 183619 - RNA, 80 nt, Homo sapiens
agagcagccggaacggcggaccgggacgcacgccagcgaggaggacccccaaagaccgacggcagggcaaaccagacgag

SEQ ID NO: 183620 - RNA, 82 nt, Homo sapiens
aggcaggcacgagaaggggaggagccgccagggagggcccgacccggccacagcccaaccgccacgcgacacggggagacac

SEQ ID NO: 183621 - RNA, 73 nt, Homo sapiens
aaccagaagccagcccgacagacagaggagggcacagaacggcacccacgaacccgccgagagagaagcaaaa

SEQ ID NO: 183622 - RNA, 72 nt, Homo sapiens
caaagagccaagaaacccgggaaagcgcagagagcgcgcggcgcacaacagacagagacgggggcacaagaa

SEQ ID NO: 183623 - RNA, 83 nt, Homo sapiens
ccagagaaagcagaggggagaggagagccagcacaagacgaagagggcccaggggcaaagaaaaaggagagaaaaagaggcaa

SEQ ID NO: 183624 - RNA, 77 nt, Homo sapiens
cagcccggccgagcgcaaccgccccgccaacagagggagcagaagggccaacgcccccgcgagccagagaacgaaca

SEQ ID NO: 183625 - RNA, 63 nt, Homo sapiens
ccgacagccgcagaacgcccacgaggccgagaacaccaggcgggggagcaagagacgaggaag

SEQ ID NO: 183626 - RNA, 76 nt, Homo sapiens
aaaaaaagagggagcgaagcaagaaaggaacagcggaaacggaggaagaaaaacaaggggccaggccacgcaaaag

SEQ ID NO: 183627 - RNA, 58 nt, Homo sapiens
gggcggcgacggagcacgacccaaggagcgaaaacgccacaacagagggggccagggc

SEQ ID NO: 183628 - RNA, 80 nt, Homo sapiens
gaaaaggaaaaaggacgaagaggagaaacaagcagaccagcacgacacgacccacgaaacagaacgcgcaaaaaaaaaga

SEQ ID NO: 183629 - RNA, 68 nt, Homo sapiens
ggacgcaggcaaagagagccaccaagaagccacgggaaagaagaaagcaccccgcaaaagaagggaaa

SEQ ID NO: 183630 - RNA, 75 nt, Homo sapiens
gcagccccgaagagaaacacacggacaacaaacgacaacgcaggaccgaaccagaacgcagaggggcgacagggc

SEQ ID NO: 183631 - RNA, 75 nt, Homo sapiens
aaaggcgcccccaggccgcgccaaaaccccaggcaaaccccccgcggccagcggaaaggaagccaggaggccgcc

SEQ ID NO: 183632 - RNA, 69 nt, Homo sapiens
gaccaccgggaggcaacacggccaagaagaggaaaggcgcccccccaaagagaggcgcgagaggcacag

SEQ ID NO: 183633 - RNA, 83 nt, Homo sapiens
aaggagagaaagcagcagagcaaaaacccaaaccccccaccagcgccaagagggggaaacaggaagagaacagaacggaagaa

SEQ ID NO: 183634 - RNA, 53 nt, Homo sapiens
gacccaaccgagacaaccgcggccggggggggcacagagccccggaagacagc

SEQ ID NO: 183635 - RNA, 71 nt, Homo sapiens
acaacaagagcccaaacaagagggccaagggcagggagaagggacaacacagaacacagaccagggcagga

SEQ ID NO: 183636 - RNA, 67 nt, Homo sapiens
gacggaggcggcggacaggcgacagcgaccgcggcagaccaggggcgcaagggacccacgaaggaga

SEQ ID NO: 183637 - RNA, 77 nt, Homo sapiens
gcgacggggcgcagggggcgcagggacgcacacagccaggccaagagcagagggaagcgacaaggacggacaaggag

SEQ ID NO: 183638 - RNA, 71 nt, Homo sapiens
caacccagagccaccgcggcagagggccgggcccgggccaaggcccgcggcaccggacgacccacagcaac

SEQ ID NO: 183639 - RNA, 82 nt, Homo sapiens
gccggcgaggggaagaccaagacaggccggaacccgaaagggcagccacgcggggccaggaggaccaagcacagccagccag

SEQ ID NO: 183640 - RNA, 79 nt, Homo sapiens
gcggcccgacgaggaagcacgaaagcaccaacgagacccgccacacgaacagaagcgaaggggacagggggagaaccgc

SEQ ID NO: 183641 - RNA, 89 nt, Homo sapiens
ccgggaggagcagaccggcgcaggggaaccacagggggcccgcaagaaacgaagaagggcccaagcacgggggaagcgggcggcaccga

SEQ ID NO: 183642 - RNA, 69 nt, Homo sapiens
caagaaagggagggggaaacggaaggccagcgaagcacaaagaggaccacaggaagaagagagggcgaa

SEQ ID NO: 183643 - RNA, 76 nt, Homo sapiens
caacccgccaggagggaccggaggccacagcaggacaccccgggcacgccacgccccaagaagaaagcgaagaagg

SEQ ID NO: 183644 - RNA, 42 nt, Homo sapiens
gcagcaccggggcacccaaggcaccgacagcacagcagaaag

SEQ ID NO: 183645 - RNA, 78 nt, Homo sapiens
agaaggggagaagagcccagagcccggggcccccaaagccagagcccaccaaagccccccagcgggcggccggggcca

SEQ ID NO: 183646 - RNA, 76 nt, Homo sapiens
accccccgccggaccccacagcaacaagggaccagcgccagccagccagggggggcagagccccacacaaggcaga

SEQ ID NO: 183647 - RNA, 81 nt, Homo sapiens
cagaacgcccagccaaagaaacaagccgggaaagggacaagaagggcaaagccgaaaggaagcacccgcgagaaagaaggg

SEQ ID NO: 183648 - RNA, 64 nt, Homo sapiens
cagccaagccgggccgcccgcggcaggacaccccaaggcaccggcgggcgacgagaacaacccc

SEQ ID NO: 183649 - RNA, 76 nt, Homo sapiens
ccgggagacacggccagacgcccccaccccagaggaccagaagaagaagaagggacagagaagcaaaggcagcgca

SEQ ID NO: 183650 - RNA, 76 nt, Homo sapiens
gccgcgcacaccggcggcgggacgacgcggacagcgggcggagccgacgagcggcggggcggagccgagcgaggcc

SEQ ID NO: 183651 - RNA, 76 nt, Homo sapiens
ggaaacagggccagagaggcccagggcgaaggaccccaacagcggaaaccacagagagacagagcagccgccggac

SEQ ID NO: 183652 - RNA, 54 nt, Homo sapiens
aaaacaaggaccacaaacgggcaaacaagaagaggcggccacccacgagccgac

SEQ ID NO: 183653 - RNA, 84 nt, Homo sapiens
caccaggccgaagagaaccacaagggcacacaggccccgagaaccaagagaacccccaccaaccaggcccggccaacggcccca

SEQ ID NO: 183654 - RNA, 63 nt, Homo sapiens
gcaggcggcacaggagagaccacacggccagcgaaaccagggaccccggaggaaaagggacca

SEQ ID NO: 183655 - RNA, 55 nt, Homo sapiens
aaagggccaaagaagggagagccaccgggagggcagaggccagcacaaccacgag

SEQ ID NO: 183656 - RNA, 69 nt, Homo sapiens
cccacgaaaaggagggagccaaaggggagccagcagcgaccacccgagaacggaagggaaaggcagagg

SEQ ID NO: 183657 - RNA, 77 nt, Homo sapiens
gcccacgcagagcccccccgcccacaacacaccacggcagacgcgacccagagagcacccacgcccccaggacaagg

SEQ ID NO: 183658 - RNA, 68 nt, Homo sapiens
gagcagagaggcaaacaaaaaacaccaggccgcaaggagcggccaaagcacggaccacggacccaaca

SEQ ID NO: 183659 - RNA, 41 nt, Homo sapiens
ccgggggagcgggagcgcggaaagagcagaaccgaacacac

SEQ ID NO: 183660 - RNA, 51 nt, Homo sapiens
ggcagggccccagagacacaagacaaccagggacacacaggaagacgaaca

SEQ ID NO: 183661 - RNA, 72 nt, Homo sapiens
caagaagggacccaaaaagacggacagcccacgggaacaagaggggacagaaagcagaaaagcagaccaggc

SEQ ID NO: 183662 - RNA, 75 nt, Homo sapiens
gcaaacaggaagaagggacgggcacccaagccagacaaagaacgaggaaccccagagaggacagaagccaaccag

SEQ ID NO: 183663 - RNA, 69 nt, Homo sapiens
ggcagcagaaggaggcaacagacgcggagccacccaaccaagggagccacgccccaggggagccaacgc

SEQ ID NO: 183664 - RNA, 76 nt, Homo sapiens
aaagagagaaaaaccggacccaagcacacagcacagcacgcgcaccacaacgcaggaaggaacgagaaaccaggga

SEQ ID NO: 183665 - RNA, 71 nt, Homo sapiens
gaaccaggcgaggagccgccgggggccggcaaggaaacccaaccccagagaaagccgcacaccccaccaga

SEQ ID NO: 183666 - RNA, 76 nt, Homo sapiens
gagcagcacgaccccagcacagggccggcccagggagaacgcaaaaccaccacccccacaaaaaacgcagggagaa

SEQ ID NO: 183667 - RNA, 49 nt, Homo sapiens
aagaggccacggaccgcccgccaagaccggcccacgggcacgccaaaac

SEQ ID NO: 183668 - RNA, 78 nt, Homo sapiens
cgagcccaaggcaagacccaaggcgacgaccgacaggggggaaagcgaaaagggcgacagcaagccagggggcagaga

SEQ ID NO: 183669 - RNA, 55 nt, Homo sapiens
gaagagagggaacacgcaggaggggaagcggacacaggaaaacgagaagaggcag

SEQ ID NO: 183670 - RNA, 79 nt, Homo sapiens
aaaaaacccaaggcgcaaagggaccggagggccggaagcgggccgggacaacgggcaggagccggaagggcgacagaac

SEQ ID NO: 183671 - RNA, 55 nt, Homo sapiens
ccgccacagacccaggccagcacccacccaccgggacagggcaggccggagagcg

SEQ ID NO: 183672 - RNA, 37 nt, Homo sapiens
cccgcgcgcgcgggaaggggcaccgccagggaggaga

SEQ ID NO: 183673 - RNA, 84 nt, Homo sapiens
gcgcgccggagggagacaaagccagcaggaggggaaggggcaaaaaaacaaaaaaagaagaccgaccacaaaaggacaagccaa

SEQ ID NO: 183674 - RNA, 72 nt, Homo sapiens
accaagaggacaaccacaggaccgaagcaaaacagcacagcaggaacgagcaaggcagacaaaagagagacg

SEQ ID NO: 183675 - RNA, 77 nt, Homo sapiens
ccaaccagccggagaccgagaaccagcccaaaccagccccggagccgcagaaccaggcgaggccagcagcaagacac

SEQ ID NO: 183676 - RNA, 73 nt, Homo sapiens
ggaagcgcaaacagcacaggccacaaagcagaacacaagaccaacccgccaaaagaaacagagaagcgagaaa

SEQ ID NO: 183677 - RNA, 76 nt, Homo sapiens
ggagcacggcgagcagccaggccaggagaggcgccagggacgaaaccacgcagcgacaaccggaaccagcgccagc

SEQ ID NO: 183678 - RNA, 76 nt, Homo sapiens
cacagaggaaagcacaaaggaagacgaaccggagaagaggaaagacagggccgaccaggaagacagccagaaacag

SEQ ID NO: 183679 - RNA, 98 nt, Homo sapiens
agacccaacaaccacaaagcggaagagacccccccagcgacccagaacgacgaaggaagggaccccacaagcccacacagcagcagccacgggggcac

SEQ ID NO: 183680 - RNA, 77 nt, Homo sapiens
caagagacgggggggaaaaacccggacggcacaccccaggaaccaggaaaggaaaaggaggagcagacagaagagag

SEQ ID NO: 183681 - RNA, 87 nt, Homo sapiens
aagccgcaggacagcagccccgagcacgggccgaggcccaccgcgacacaccgccagcccgggcgcgccaggcacagccaagagcgg

SEQ ID NO: 183682 - RNA, 57 nt, Homo sapiens
cagggaacccggcaccgccccaggcccggccagaccggagggccgggaggaacaccc

SEQ ID NO: 183683 - RNA, 77 nt, Homo sapiens
accgcagcagggacgcgggcacgggaccggcgaggacgggggcccaacaaaggcagcccggcggggagcccaggagg

SEQ ID NO: 183684 - RNA, 74 nt, Homo sapiens
gagacgaaccgaagcgggcgggcccccccacccagagagccgggccagaagaaaccagaaccacagacaaagcc

SEQ ID NO: 183685 - RNA, 89 nt, Homo sapiens
aaaaaaccagagggaaacggcacaccaggcggcaggggcaaccagacgggccaaggcaaaagcagaccggaaaacccaccggcaagacc

SEQ ID NO: 183686 - RNA, 45 nt, Homo sapiens
acagggcccgccaccagcccggcaccaggaggcgaggcaggagaa

SEQ ID NO: 183687 - RNA, 77 nt, Homo sapiens
cgaaccccggggcgcagcggacggcggcacacagggagagagaccaagaccaacgaagaagaagcgagcaaacgcag

SEQ ID NO: 183688 - RNA, 88 nt, Homo sapiens
cggagcgcgaaggccgggacccggccccggcccacaggggggggcaaacccgagagaacggagccccagcccccagcagccgacagga

SEQ ID NO: 183689 - RNA, 75 nt, Homo sapiens
caagaaccccgcacggacagcgacccgccccacccgcagcagaacaaggggggaccagaccggaaagccagagga

SEQ ID NO: 183690 - RNA, 82 nt, Homo sapiens
cgccgggcaagcgggcggcacccggccaggaagcggagggcgcgcgaggccggagaaaaacggagggaacgcccggagcgcc

SEQ ID NO: 183691 - RNA, 75 nt, Homo sapiens
ggcgaacaggaacaaagagagagaaggggggagaaggaacaagccgcccaaacagcggaggggaagaagaggggc

SEQ ID NO: 183692 - RNA, 74 nt, Homo sapiens
ccccaccaccgaccgcgcacaaagcggcgagacacacaagagaacagaacacaccgacacggaaagaaaggaaa

SEQ ID NO: 183693 - RNA, 45 nt, Homo sapiens
aagaagcacgccccccacagggcagagcagcgagagccagaccgg

SEQ ID NO: 183694 - RNA, 52 nt, Homo sapiens
gagaccaccaaacaggcggcgacagagaagagagggacggcgcaaaccaggg

SEQ ID NO: 183695 - RNA, 73 nt, Homo sapiens
caaaccgagaaccgggccaaggcgacaaggaaggccgcggacccccccccccccaccccacaggagaagagac

SEQ ID NO: 183696 - RNA, 82 nt, Homo sapiens
cgccaccgcccggcccgcgcacgagcccacgcccgaccccggcgcacgccagaccccaacaggaaccccccggcggcagaga

SEQ ID NO: 183697 - RNA, 93 nt, Homo sapiens
gcgggcgcgcacccgagccgcaaggagaggaagcagcgggcgagccggggcaccgaccggagagcggagcgccgcagagggcccagaacgaga

SEQ ID NO: 183698 - RNA, 70 nt, Homo sapiens
aaagagcagaaaaagaaaacacccaggagagggaccaacaccacgcaaagacgagaaacaagcgaggcca

SEQ ID NO: 183699 - RNA, 76 nt, Homo sapiens
ccgaaaacagaaggaaagaaggaacggagaaggcaaagaaggcccccccgagaaaagagaaaggaagaaggacaca

SEQ ID NO: 183700 - RNA, 36 nt, Homo sapiens
ggagcccgcccggcgggcaccccagcggcggaggga

SEQ ID NO: 183701 - RNA, 56 nt, Homo sapiens
gaccggggcgggcgcggcgagggaccaaaagccagccccacggaggaacccgggac

SEQ ID NO: 183702 - RNA, 86 nt, Homo sapiens
aaagcgcaggggcagggcgggaaggaagaccggcgcggggcacaggaccggagcggagcccccaggcgacagggggaccgcggcgc

SEQ ID NO: 183703 - RNA, 79 nt, Homo sapiens
ggacccgagcgaagccaagccgggcggcagggggaaaccacaccacccgccacagacagggaggaggacagccgaaaac

SEQ ID NO: 183704 - RNA, 73 nt, Homo sapiens
ggagaaggaccaagaaccaggagaagagagcggacccacaccagggaagacaggggagagggggcaccagcgg

SEQ ID NO: 183705 - RNA, 70 nt, Homo sapiens
gaggcccacacccggggcaacaagagcgaccgggcgcccggaggccggggagcccacgggcgggccccgg

SEQ ID NO: 183706 - RNA, 76 nt, Homo sapiens
cccagcagagacagcaaccggccacgaggaggggagggccgcaaacaagaacgacccacacccgcccacaggggaa

SEQ ID NO: 183707 - RNA, 78 nt, Homo sapiens
gaccagggacccgcgaaagcggggcacaggcgggcacgcgcccaggagggagagcacggcgcaccaacggcagagaag

SEQ ID NO: 183708 - RNA, 66 nt, Homo sapiens
cggcccacgcccggcacgggcgcgaccccgcgggcgggaagaggccggagaagaccggaggaaagg

SEQ ID NO: 183709 - RNA, 73 nt, Homo sapiens
gacagagcaacgaaaggagcgggccagaaagacagaaccagcacagcaaaaaaggcagcgcaccgaccccaac

SEQ ID NO: 183710 - RNA, 58 nt, Homo sapiens
gcccgcgcgccccggagcgcgaaggagcgcggggaaagggagcagcaccggccacacc

SEQ ID NO: 183711 - RNA, 65 nt, Homo sapiens
aaaggaacagaccagaacaggggagaaaaaaagggacgcgcgcccaaagacaagccccgccaagg

SEQ ID NO: 183712 - RNA, 62 nt, Homo sapiens
ccgcgaagacgcccagcccaagccggacgccagccaagggcggagcccccacacggccaacc

SEQ ID NO: 183713 - RNA, 79 nt, Homo sapiens
cccagcgcagcagccgcaccagcgccgggacgggggggccggcaggacgacacgggcagaaacgaaaccaggcaggggc

SEQ ID NO: 183714 - RNA, 62 nt, Homo sapiens
gaggggcgaaaaggggaaaaggaccaagaggacccgaccgcagcgcaggacccgccaaacgc

SEQ ID NO: 183715 - RNA, 72 nt, Homo sapiens
cagcaccacaccccgccgccccccggccgaaaaggcgaccgccccaaggaaccacgcgggcggggagccgga

SEQ ID NO: 183716 - RNA, 78 nt, Homo sapiens
gaaaaggcagagaagcaccccccgcccggaggggagagggggccagcacagacacagccagccaaacacaccaacaaa

SEQ ID NO: 183717 - RNA, 76 nt, Homo sapiens
aggaaggcaacggcacaccagaaacacgcagcaaaaagaaccagggccgaaaacccagaagaacggccacccagag

SEQ ID NO: 183718 - RNA, 81 nt, Homo sapiens
gagaaacagccgaccaacaggccacgaaacgcccacggagaacgccgcagaggagaaggcagagcccccccaggcagaagc

SEQ ID NO: 183719 - RNA, 90 nt, Homo sapiens
gccgcacacccgccaaggcaagaggccaacagcgaggaggccacaccccccagcagagcgccgagcggaacgggacggcaggaaacacga

SEQ ID NO: 183720 - RNA, 56 nt, Homo sapiens
aaggggagggaccaagaccaggcaaccgcacgaaaaccggaacacagagcaaccac

SEQ ID NO: 183721 - RNA, 62 nt, Homo sapiens
aagcacaaagccagggaagcagcgagagggacaagcaaagaggcccaggaccggaccccgac

SEQ ID NO: 183722 - RNA, 85 nt, Homo sapiens
ggaaggcggacagcagcgcgccgcggcgcggggcggaaagcaggaaggacaaaacgcaagcagaagagggacgaaagcagcagaa

SEQ ID NO: 183723 - RNA, 71 nt, Homo sapiens
gagagaaggcgcacaaggggaggggcgaagcaaaagcgaaaaaccccaagagaaagacaagccaacgacca

SEQ ID NO: 183724 - RNA, 75 nt, Homo sapiens
gcagagcagaaaacggaagaacacagcgcaaaggaacggaagccgccggcaagaaccagcccggaccaagagacg

SEQ ID NO: 183725 - RNA, 81 nt, Homo sapiens
ggggcgacgcagagccgagcgaagcggacacaggacaaggagccaccggagaggaagcggcagacagcgaaaggcacgcag

SEQ ID NO: 183726 - RNA, 122 nt, Homo sapiens
gccggagccggggcgggagcagccccagacagccggcgcggcgggcgggcggcggcggcgcgggccacggagccagccaaagaaggcacagggggaccccaagccagaccccccgcggacgc

SEQ ID NO: 183727 - RNA, 86 nt, Homo sapiens
gagccgacaggaggaagaggaggaggcgccgaagacccgaggccgcggcacagaggccccagggcccggccacaggaggggcgcca

SEQ ID NO: 183728 - RNA, 70 nt, Homo sapiens
cggcagccacagcgggcaccacacaggcacagggggacgaaacgaacgacagaaacccaagcagagaaag

SEQ ID NO: 183729 - RNA, 72 nt, Homo sapiens
gcgccggcgccgcgcccgccccggccacccggccagcgaggagaaccagcgcccgacccgcaacaacaacga

SEQ ID NO: 183730 - RNA, 85 nt, Homo sapiens
gacaaccagccagccccaagaaggcaggacccacccccagacagccaagcaaggcgacaaagagcgaaagggcccaaggaacaga

SEQ ID NO: 183731 - RNA, 68 nt, Homo sapiens
gcacggccacacggaggccgcggcccccacacaggaggccccaggccaggccagacgggcgccagggc

SEQ ID NO: 183732 - RNA, 86 nt, Homo sapiens
cagcagaaccgcagccaccggcacggggcgggcagcggcgccgggcacaggagggaagagcaagaccaacaaagccgggccaaggg

SEQ ID NO: 183733 - RNA, 77 nt, Homo sapiens
ggacgcggacgcacgccagagacgcgcacgaaacgacgaagaggcccgaggacagaggagcaaaggagggacggaaa

SEQ ID NO: 183734 - RNA, 73 nt, Homo sapiens
cggcaggaacggcaggaccagggcgcagcagagagcgggcgggggggccgaaaaagacaccggaccccacagg

SEQ ID NO: 183735 - RNA, 82 nt, Homo sapiens
caggaaccccagagagcagacaggagaccgggcacggagcagccaggccagcgggcgcccgcacacacccgccacccgggcg

SEQ ID NO: 183736 - RNA, 83 nt, Homo sapiens
cggggcgcaacgccgaccagcgacacgcggccgcggagaccaccgcggcgcggcagcgcgcccgagcccaagcgcgggacccg

SEQ ID NO: 183737 - RNA, 65 nt, Homo sapiens
cgaaggcagcccgaccgcgaccggaccaacagcggagggccgagggaggaaggacgccgccggca

SEQ ID NO: 183738 - RNA, 78 nt, Homo sapiens
gcggcggaagagagccgggcccgccgggcgaagccgaacaggaaggggaaccacaaagaagagaaggcgggccaagac

SEQ ID NO: 183739 - RNA, 95 nt, Homo sapiens
cagagagacaagccccaaggagcccggccccacaccggcacacagcagcaaaggcaggagagggaaaaccagcagacagagaaaagaacagcgag

SEQ ID NO: 183740 - RNA, 78 nt, Homo sapiens
gccgccagaacacaaccaaaaaggagcaaagaaggacgcagagccagccacacagccccacaggcccagccacaggga

SEQ ID NO: 183741 - RNA, 69 nt, Homo sapiens
ggccggccaacacaaagccccagcccaacaggaccgccgggggaccggaacaagggcacggagaaaagg

SEQ ID NO: 183742 - RNA, 35 nt, Homo sapiens
ggcgccaaaacacccaaaggagagcgaagaccaaa

SEQ ID NO: 183743 - RNA, 105 nt, Homo sapiens
cgggccgcgaaccgcagacagcggccaagaagacacaaaggacggaggcacgcacaagagggccagggaccaggggacgcccaagacggccacccgcgaaggggc

SEQ ID NO: 183744 - RNA, 86 nt, Homo sapiens
cagcccgacggggccaccgcggcggcgcccgcaccgcgcccgcaaaaggcgggaggcggcagaagcagccagaggagggcacaggc

SEQ ID NO: 183745 - RNA, 77 nt, Homo sapiens
agaccaccggcaacagagcggacgccccgccagaccggccaggaacacgcagagggccaccgccagcggcgcagcac

SEQ ID NO: 183746 - RNA, 34 nt, Homo sapiens
cccaagcgaggaccaagaaccacgaaaacaagaa

SEQ ID NO: 183747 - RNA, 54 nt, Homo sapiens
aaaccaggccaccacccggcggcagcgggggccggcccagagacccacagaacc

SEQ ID NO: 183748 - RNA, 70 nt, Homo sapiens
gagagagccgaagaggacgagcacgagagagacaacaggcggcccgggcggagggacacggaggggccgg

SEQ ID NO: 183749 - RNA, 78 nt, Homo sapiens
ccccgccccccccccccagccgcagccccggcaaacagaaaaaaccgggaagaccgacggagccccagcagaagacca

SEQ ID NO: 183750 - RNA, 75 nt, Homo sapiens
gcgaggaggaggaggaagaggaggaggaaaaggccaaagcgacaagaaagagaaacagaaggagaagaaaaggag

SEQ ID NO: 183751 - RNA, 70 nt, Homo sapiens
gagacgcgcgaggggcgccgaagcgaggggcccaagggccagcgcgccgccaggaccgggcccacgcaca

SEQ ID NO: 183752 - RNA, 76 nt, Homo sapiens
ccgcgaccacggcacacgcgacagggacaaaggccagaagcaggagagcacagacacaaagaccaaagccgagcaa

SEQ ID NO: 183753 - RNA, 61 nt, Homo sapiens
acagaggaaccagaaaagaacgaggccaggagaggacggaccacagagacacgggacgcgc

SEQ ID NO: 183754 - RNA, 88 nt, Homo sapiens
gagcgacagcggcgagcagaacacggcgagcgggggcgggccccggccagggcccaggcagccggggcggaacccccagacagcacgc

SEQ ID NO: 183755 - RNA, 75 nt, Homo sapiens
gcagcagcaagggacccagcaggaaacagcgcgagaagaagcagaagaaacgaggagacaaaggagagaggaagg

SEQ ID NO: 183756 - RNA, 78 nt, Homo sapiens
cgagccgcagcacgagccaaaccgagggaccaaaagagcgcccgacacagcagggcgaggaccaccagacgcgccggg

SEQ ID NO: 183757 - RNA, 77 nt, Homo sapiens
acacacaacccgacccgacgagccagaggcacccaagagcagaggagaccagacaagacaaggaaagcgagggagaa

SEQ ID NO: 183758 - RNA, 73 nt, Homo sapiens
ccgcggcgcggagacacaaacacaaagacggcaaggcgccacgaaagacgcgaccggaaaggagagagagaca

SEQ ID NO: 183759 - RNA, 66 nt, Homo sapiens
aaccacaaagacccccgccacacagagcaacacaccaacccgcagacagggggaacgcggaagaca

SEQ ID NO: 183760 - RNA, 73 nt, Homo sapiens
acacacacaaacagggcgcagccagaaaaggggagaagcgcaaaggaacaacggaccggccagagagagacaa

SEQ ID NO: 183761 - RNA, 85 nt, Homo sapiens
cgggcaggcaaacgcggagggcaggccacccccggggggagcggccgagccccaggcagccaccaacaccacaacgggcacacag

SEQ ID NO: 183762 - RNA, 76 nt, Homo sapiens
cgaggcacacaagcgcaccagccaaccgaaacagccagcaaagacaagagcagaccagcagccgcagcgcgacagc

SEQ ID NO: 183763 - RNA, 56 nt, Homo sapiens
caacagaagcccagccgacggcccacaagggcaaggagggcaaacgcagaccaagc

SEQ ID NO: 183764 - RNA, 44 nt, Homo sapiens
caggagacagacacacagcacacgggggaagacgccccggaagc

SEQ ID NO: 183765 - RNA, 84 nt, Homo sapiens
agcgcagaaaggaagcgcgggccagcgacccgcgccagcgcccagggggggaaaccaccggcaccgaaggacagaagaggaccc

SEQ ID NO: 183766 - RNA, 79 nt, Homo sapiens
agagagcgggcgcagaagcgcaagggagcgcggaaaaacaagccagaagaagggagaccaaacacacgaccccaagaga

SEQ ID NO: 183767 - RNA, 73 nt, Homo sapiens
acaccccagccaccgagcccgaccccacaccacacaaaacccgagaagaaggcaggcccacaccacggggcag

SEQ ID NO: 183768 - RNA, 72 nt, Homo sapiens
accgacgggacagcaggaggaggggcccagacgcccgcccaacgccagagcggcagcaacagccggcaggga

SEQ ID NO: 183769 - RNA, 72 nt, Homo sapiens
agggagagcaggcggggcaagcagcccgagagagacgcagcgcaaggccgggggaggccacaaaacaaagcg

SEQ ID NO: 183770 - RNA, 80 nt, Homo sapiens
cgccccgccgcgccgcgcccaaccgcccccccccagaacgcggaaagcaccgggaggaaagagagccacacgaagaacac

SEQ ID NO: 183771 - RNA, 69 nt, Homo sapiens
ggacacaagaaacccccccagcaccgagagcaagacaagcacaccagaccagaaagagccaggacagaa

SEQ ID NO: 183772 - RNA, 73 nt, Homo sapiens
cccggagcaacgagcgcagcgccggcacacagagaaaaaaagggaacaaaacacagcaagcagacaaaagggg

SEQ ID NO: 183773 - RNA, 60 nt, Homo sapiens
cgccgacagggacgaagaaaaggggaaccaagaaggagcgagggaggagcagcgagacag

SEQ ID NO: 183774 - RNA, 102 nt, Homo sapiens
gcgcgcggcgcgcggaagacgaggagcgcgcggcgccggggggcgcgccgcgaccgcccgccggcgcagacggagacagcaaggacaacccccaagacggca

SEQ ID NO: 183775 - RNA, 76 nt, Homo sapiens
cgggagcgaggaaccagaacgaaaagcgccagaaaggacacgcccaccaagaaagaaccggaaaggggaccgggcc

SEQ ID NO: 183776 - RNA, 101 nt, Homo sapiens
gcgaccaagaaaaaaaagaagaggcgcagaaagcaaacggccaagagaagaaggagcggcggagacaggcaaaggagccaggggagagccggccagaccca

SEQ ID NO: 183777 - RNA, 54 nt, Homo sapiens
cgccgcccgcgcccgcggccggggaagaaaaagcagcacgaaggcgaggaacca

SEQ ID NO: 183778 - RNA, 73 nt, Homo sapiens
cggcacaggcaggagcacgcgaaaaaccagaccaaacgaaacgcccgcacagcccgccgacacagccaccaag

SEQ ID NO: 183779 - RNA, 100 nt, Homo sapiens
ggagcccgcagcccgccggcgcgccccacgggccaggaggccgaacacccaacaagaaggcaacgacaaacagccaagcaagccccagggccccgaaacc

SEQ ID NO: 183780 - RNA, 61 nt, Homo sapiens
gcgccgacgcgcaccgcacggcggcggaaaaccaaagacagcgcgacggcaggcgaggacc

SEQ ID NO: 183781 - RNA, 68 nt, Homo sapiens
gacgggcaacagacagaggccaagaaggaaagccagcaccagacagagccccaccccagcagcgggcc

SEQ ID NO: 183782 - RNA, 86 nt, Homo sapiens
gggcgaagcggacgcagccgcgagcccggaggcggcgggaggaggcggcggccgaaagccaacaggcagaccagagacagcgccac

SEQ ID NO: 183783 - RNA, 79 nt, Homo sapiens
caggcaggccagagcagcaccaggccagagccagaacacgcgaagccaggggcaaaacggggaaccgggaggacccacc

SEQ ID NO: 183784 - RNA, 70 nt, Homo sapiens
ccaaagcagcccccggcaacccacggcgccccgcgcccaggccggcagaggccgcccagacagagcacag

SEQ ID NO: 183785 - RNA, 81 nt, Homo sapiens
caggcggaagagacgcccgggcccggaaggcacaggagggcagaccaaaagcacaaaaagaacggcccgaagaccccaagc

SEQ ID NO: 183786 - RNA, 93 nt, Homo sapiens
aggcagccgcaagaccggaccgacagccaccacgaaggcacaggagggcagaccaaaagcacaaaaagaacggcccgaagaccccaagccaga

SEQ ID NO: 183787 - RNA, 81 nt, Homo sapiens
ggaggcaaccccgcccggaccaaggcacccacaccaaggaggagcaccccgggcaaggcacggggccgaaccaggagaccc

SEQ ID NO: 183788 - RNA, 74 nt, Homo sapiens
ggaggaggaggaggaggggaggcaagcagggcggcacgcaaagagggcaggacgcggaagaaaaagaaccggcc

SEQ ID NO: 183789 - RNA, 74 nt, Homo sapiens
ggcccgggccacagaaggcggaccccagccgagaggaccgggcagccagcacaaggaaacgagggaaagagcac

SEQ ID NO: 183790 - RNA, 81 nt, Homo sapiens
aacgaaacgggaagcgcgaggagagcgacggccagcccaccggaaccccaagaggaacgccaggaaggccaaccgaaccgg

SEQ ID NO: 183791 - RNA, 66 nt, Homo sapiens
ggcagccgacccaggcaaccccgcgaacgagggggccgggccccaggagcccgggcacgcccgccc

SEQ ID NO: 183792 - RNA, 60 nt, Homo sapiens
agggccccacgacacaagaaccagcccaaacagccagagaggaaccacacggccccagaa

SEQ ID NO: 183793 - RNA, 88 nt, Homo sapiens
cgcggggaaaggcgcgagacccagaggccgcggccgcgggaaggggaaaccacacgcagaaggaacgggcaccaacaagaaggggcca

SEQ ID NO: 183794 - RNA, 70 nt, Homo sapiens
gcggcagaccagcgccagcccacaggagagggcgcaggagccgcaggcccacccggcaggaagccgccac

SEQ ID NO: 183795 - RNA, 100 nt, Homo sapiens
cccccggaagaaaaggcgcgaagacacaccagcaggacaacaagacgcaagcgggagcgagcgggcagacaagcccgcgaaaacagggagaaagaacccc

SEQ ID NO: 183796 - RNA, 37 nt, Homo sapiens
acccacacgggaggccaagacagggcgccggcccagg

SEQ ID NO: 183797 - RNA, 55 nt, Homo sapiens
cggacgaaacgaccccaccagccccaaaaggcggcaacagcacaggagggagcag

SEQ ID NO: 183798 - RNA, 66 nt, Homo sapiens
acaccgccggcgggcaggcccccaagaagaaccaaccccacagaaaccccacaaggaggacacagg

SEQ ID NO: 183799 - RNA, 61 nt, Homo sapiens
gaagggaaggccagcagcgcgcggagaagaacggggagccaggccgacgcccgccgcggcc

SEQ ID NO: 183800 - RNA, 69 nt, Homo sapiens
gccaaaaaggcacgagggaacgggaaagaacagagaagagcaaacaggaggaagaaaaaaacagggcac

SEQ ID NO: 183801 - RNA, 72 nt, Homo sapiens
aacgggcgacggagccgggaaaggacaagggaaagaacccaacgcggagagccacaacaacgaacaccccaa

SEQ ID NO: 183802 - RNA, 59 nt, Homo sapiens
ggaggggagagcagcggggcaagggggggacagagagaacggcaggacaacccccccca

SEQ ID NO: 183803 - RNA, 82 nt, Homo sapiens
caccagggcgccccgcgagagccaggaagccaggagcaggacgcagaagacgcagggccaagaggagaaggccaaggagaaa

SEQ ID NO: 183804 - RNA, 75 nt, Homo sapiens
cgggggcggcggccacgccaaggacgggagaagcagcgccgaaaagggaggaagcgaagaccggcaaggggacac

SEQ ID NO: 183805 - RNA, 78 nt, Homo sapiens
ccgcggcggccggcccccccccagggccaggcgccgccagaacggacccggcaccccgacccgggcaaggccagccgg

SEQ ID NO: 183806 - RNA, 80 nt, Homo sapiens
ccccaggggaccagaggaaccagcccgagcggcagaccagggccagagcaccagaccagcagaggagcgccgccaggcga

SEQ ID NO: 183807 - RNA, 79 nt, Homo sapiens
gacgaccagcaggggcaaccaccccaggcccccaacagacagccagaaggaggaaaacaggcagagaacacgcaggcaa

SEQ ID NO: 183808 - RNA, 79 nt, Homo sapiens
ccagggaaaacagccacggaaagaagaccagagaggcgcagggagcggccgcccaggagagcgccaccgcacgggaagc

SEQ ID NO: 183809 - RNA, 59 nt, Homo sapiens
caaggagcacaagagcgccccaagcaaggaagcgacagggcagggaggggagcgaagag

SEQ ID NO: 183810 - RNA, 61 nt, Homo sapiens
gaaacaccaccaacaaaccggccggaggaccccaccagcccaccgccggcccgcaaccccc

SEQ ID NO: 183811 - RNA, 76 nt, Homo sapiens
cgagacaacaagggcagggggccaaggccgaaggcggcaggaaggacgagcgcgacggggcggccgggcaaggagg

SEQ ID NO: 183812 - RNA, 80 nt, Homo sapiens
acccaggaagcagaagaagcgaggagaagaagagaagcccggcaggcacccagagagcaagcacgcacaccggccaaacg

SEQ ID NO: 183813 - RNA, 84 nt, Homo sapiens
gcacaggccgaaggggagcccaaggggcacagccccggcacggggcgcggcaggaccacccaggccagaggaaggaccgggacg

SEQ ID NO: 183814 - RNA, 77 nt, Homo sapiens
gaaaaaagcgaaggcaacaggagcgggaaacgggacaccggagaccgaagaacggaagcgcacgaacaaggcggacc

SEQ ID NO: 183815 - RNA, 70 nt, Homo sapiens
gacagccagaggagagagagagacaacagggcgggaaaccaacccgcaaggcagaaccagcaagggaagg

SEQ ID NO: 183816 - RNA, 76 nt, Homo sapiens
gagcgcccaggaaggagccaaagcacaagaagaagacgagaagagcaccccgagaggagcaacgacaggcgacgcc

SEQ ID NO: 183817 - RNA, 80 nt, Homo sapiens
acaccccaaaagacacacaagaaggaacaagccagagaaggcccgaggagagaacaggagaaagacagcaaagaaaagga

SEQ ID NO: 183818 - RNA, 86 nt, Homo sapiens
agcagaccgcgaggggcgccggcgcgccaggaccgcggggagaccgggcacacggacgggaggaaaaccccagcccggccgccgcc

SEQ ID NO: 183819 - RNA, 54 nt, Homo sapiens
gcgaggggcgacggggagaaggaaacccaaccggagaacaagcagaggaaagac

SEQ ID NO: 183820 - RNA, 68 nt, Homo sapiens
ggaagagcaggcaaagcaaagggaagacccagaaacgccacggagagacaagcagccggaagggcaga

SEQ ID NO: 183821 - RNA, 107 nt, Homo sapiens
cgccacgccccagacaggggaacgcggcgaccgccaagaaaggcagcgaggggagagcgccaggaaaagggagaccaccgaccgcagacgggccggaggagcgcaaa

SEQ ID NO: 183822 - RNA, 50 nt, Homo sapiens
ggaacagcccccccagccggagcacccgaagaagacaagacaggggaaag

SEQ ID NO: 183823 - RNA, 74 nt, Homo sapiens
ggggacccgagacgcaagccccagcgaccccaagcaaaccggcgccaaacggacgaagcaaaaacacggagacg

SEQ ID NO: 183824 - RNA, 83 nt, Homo sapiens
gaaaggacccaaagggaacgcccaaggaacgcacagcaaggggagagaggggcgcggcaacacggggagggaagagcagccgg

SEQ ID NO: 183825 - RNA, 86 nt, Homo sapiens
gcggcggggcagccaggggcacacgggccacagaggaccagcaaggagaagaaaggagcagcacagacgggggcagcgcggaccca

SEQ ID NO: 183826 - RNA, 60 nt, Homo sapiens
gacacaaggagcgccgagcagcacacccaggaagcagccgaaccaggcaagacgagccag

SEQ ID NO: 183827 - RNA, 78 nt, Homo sapiens
ggggaagggaaaaccgccaccccgaccaagccgaagagagaagcccacggaaggccggaagcaagaaaagaggggagg

SEQ ID NO: 183828 - RNA, 42 nt, Homo sapiens
gcccgcaccgcgcccgcaaacgccgcgccaggacggcagcca

SEQ ID NO: 183829 - RNA, 65 nt, Homo sapiens
gccgaacgcagacagcaggcaagaggggagaccaaagagaaccagcaccagacagcgaaaaagag

SEQ ID NO: 183830 - RNA, 90 nt, Homo sapiens
ggaaacaagcggggcaagcaaaaaaggggggccgacacgacaccaaccggaagggcaaaccggccagcggaaagaaccgcaagaggaaga

SEQ ID NO: 183831 - RNA, 58 nt, Homo sapiens
gcccccgcgacccaccgaaggccggggcaaccccaacagagcggcaaacagggcagac

SEQ ID NO: 183832 - RNA, 80 nt, Homo sapiens
agcaaaaagagcaagaaaggcaagacgacaccagaaggaagggcgaaagaggaagaagaaagacaaagagagcgaaagga

SEQ ID NO: 183833 - RNA, 79 nt, Homo sapiens
caccgacgcggcaggacgcgcggaggaaacacccaggacacggccacaacaccaagagagcggaacaaacccaagaaaa

SEQ ID NO: 183834 - RNA, 36 nt, Homo sapiens
ccaaagggagccccggggaggcgggacaagggcgca

SEQ ID NO: 183835 - RNA, 77 nt, Homo sapiens
gcgggcaaggaaggcgcggaaggaccaaacacggaacagggcacgcggaacaggagaggaggaaacagaccgagaca

SEQ ID NO: 183836 - RNA, 86 nt, Homo sapiens
cgggaggggccgggaggcagaggggcaggggccgcggcggcaagcgagcagccgcgcaggggcggagcgaacagagaggagccggg

SEQ ID NO: 183837 - RNA, 70 nt, Homo sapiens
gcaaaggacaaaagacccggggcacacagccaagacacaagaacacccagccacccaccagcgacaaggc

SEQ ID NO: 183838 - RNA, 74 nt, Homo sapiens
ggggccgcccagcgcaagagaaagccccgggacggcgaagggcagggcgagcggaaggggagagggaggagagc

SEQ ID NO: 183839 - RNA, 76 nt, Homo sapiens
ccagaaccaggaggggccaggccagggcgaagaagagcgaggacaggcagaacaaggaccgggagaggggacaggg

SEQ ID NO: 183840 - RNA, 75 nt, Homo sapiens
ccccaccagacggagccccgaggagcaggaaaccaccggacaggcaagacaggccaccacgggcacgcggaagcc

SEQ ID NO: 183841 - RNA, 71 nt, Homo sapiens
gaccaagagcaaggagaaaaagaagcacagcccccagcaccaagcagaagcacaagcaagagagacgaaaa

SEQ ID NO: 183842 - RNA, 71 nt, Homo sapiens
caggcggcccggcccggagaccagagagcaccagggggccggccccaaagaaaggaagaccaggagaagag

SEQ ID NO: 183843 - RNA, 59 nt, Homo sapiens
gccacgggaggaagacccaaaagagcgagagaacgcaccgggggcagacaccaccaagg

SEQ ID NO: 183844 - RNA, 80 nt, Homo sapiens
caagaccccagaggaccagaacagaccaagacacgacacagcccgaacgcaggggccgggagaggaaggccccaagcagc

SEQ ID NO: 183845 - RNA, 72 nt, Homo sapiens
gaaagagggacagccgcacggaggcgaaacacaaaggggccaaagagccccaggacgagacaaggacacacc

SEQ ID NO: 183846 - RNA, 72 nt, Homo sapiens
aagcccgggcagaaagcccaccacacgccagaggcgccaaacccaacagaggggcagcaagacaacaagacc

SEQ ID NO: 183847 - RNA, 53 nt, Homo sapiens
gccaggccagaaaacagagagagaaacacaaggaggcccaagggaagagcaac

SEQ ID NO: 183848 - RNA, 68 nt, Homo sapiens
agcccacagaaggagggcggcgcaacaggaaacagaacaggaggaggcaaggaggccacggggccgaa

SEQ ID NO: 183849 - RNA, 71 nt, Homo sapiens
gaccaagaaccagcaaggagacagagccgaacagccgcgacaacccaagggaaaagagaagggaagagacc

SEQ ID NO: 183850 - RNA, 78 nt, Homo sapiens
gacacacaaagcgcgccaaacaggaccacgcaaggaacaacagaacaccggcagagagagagacacaccagacgagaa

SEQ ID NO: 183851 - RNA, 75 nt, Homo sapiens
agagagaaagcccgggcgcgagcaggagaggaggcagaagagcggccaggaggaggggggaaggcaggcaggcaa

SEQ ID NO: 183852 - RNA, 78 nt, Homo sapiens
gcgagaagccacaaaaagcaaaaagcagacccccagcccccaaagaggcagagacccacggccgaccaagcagaaccc

SEQ ID NO: 183853 - RNA, 76 nt, Homo sapiens
agccgagaaggagaacaccccgagcgaggccaacccaggaggaggagggagcgcgcaaggaagcgcgggggcaggc

SEQ ID NO: 183854 - RNA, 38 nt, Homo sapiens
acaagagcgcgagaccaacaggaaacagagcggaaaca

SEQ ID NO: 183855 - RNA, 70 nt, Homo sapiens
accccccaccaccgccgcgcacccccagggcaagccaaacgaaaaaggggggagacgcgagaaaggcaga

SEQ ID NO: 183856 - RNA, 80 nt, Homo sapiens
cgaaccaaaccacggaaacaggcacggccacagaagcaacaaaggaccgcccccagagagagagccagcaccgccgaccg

SEQ ID NO: 183857 - RNA, 59 nt, Homo sapiens
agccccaacggcccccgcgccgggcgcagcgagagaaccccagagggcgcggaagcccc

SEQ ID NO: 183858 - RNA, 71 nt, Homo sapiens
cccgagcggggggacgcgccaggcacagcagcaggaagagcgaccgcaggaaacgcgaccggcccagcgaa

SEQ ID NO: 183859 - RNA, 55 nt, Homo sapiens
gaagcccccagacaggacacaaccccgaggagacccggaagcaaaggcacgccac

SEQ ID NO: 183860 - RNA, 77 nt, Homo sapiens
caccgaggaccagccaagacagacccagacagacaagccccgagggagaggaccacacagacggcgacaaaagggag

SEQ ID NO: 183861 - RNA, 73 nt, Homo sapiens
cgcccggaagaaaggcagaagaccggaagcaaaggcaaaccaacagcgaccacgagggcgaaccacccacaga

SEQ ID NO: 183862 - RNA, 81 nt, Homo sapiens
agccgggaggccggccgggccagcacccggccgagacggcggcagcagcggcacagggcgggccagccaaagaggccagaa

SEQ ID NO: 183863 - RNA, 118 nt, Homo sapiens
ggggccgggccagggcgcccgcgcgccaacacaccgaggggaacacaagaggccccaacgcagaaggagacccaacaccccggccagacgggccaccaggccggcgccccacgcccgg

SEQ ID NO: 183864 - RNA, 89 nt, Homo sapiens
agcggcgcggagcggacgccgcgacgggggcccgcgaggcgggcagccggggcgccagagcagccagacacagcccaacgccaccaaag

SEQ ID NO: 183865 - RNA, 73 nt, Homo sapiens
ccgagagcagaacacgggaccaccggcaaccggcccagagcagccacggaaagggaaaagaacggcgcacaga

SEQ ID NO: 183866 - RNA, 34 nt, Homo sapiens
cccagccagaaaaccaaggcacggcggagaaacc

SEQ ID NO: 183867 - RNA, 49 nt, Homo sapiens
cggggagacaccacgacaaggccgccagagaccaaaggcagggagggga

SEQ ID NO: 183868 - RNA, 74 nt, Homo sapiens
gcgcggcaggagggagcaggagcggaccggcccggaagggggggccccagcccggccgaacgggcgcacgacac

SEQ ID NO: 183869 - RNA, 79 nt, Homo sapiens
agacccgggcgaagacaacgccggaccccgagacacccagagacggaacaagaaagccagcaccacggaggaggagagg

SEQ ID NO: 183870 - RNA, 72 nt, Homo sapiens
ggccgccggcaaaaccacagcaaccggaaagggccaaccggcgcacagggagcagaagggacgagaaaagac

SEQ ID NO: 183871 - RNA, 54 nt, Homo sapiens
cagaaggagcaaaaggcggacaggcaggcagagacagggggaacaagcacgcac

SEQ ID NO: 183872 - RNA, 69 nt, Homo sapiens
cggcccgccaaggcacggggaccgcgcccgcagacgaagaacggaagcgccccagaggagagggcggag

SEQ ID NO: 183873 - RNA, 75 nt, Homo sapiens
agaaacaagaacagccaggcccgggccaagaacgggaaaacggcagaaccagcacagccggcggaagaggaccaa

SEQ ID NO: 183874 - RNA, 82 nt, Homo sapiens
caggccaccggaaacccgggggcagcgggccgaccaacccgaaaacagcagaccagcccaccgcacccagggaaaaaacagc

SEQ ID NO: 183875 - RNA, 75 nt, Homo sapiens
ggaggggcaggaaagcagcgggaccagcaaaagagccacaaggaaggaggggaaaggggacaaggaaaagcgaag

SEQ ID NO: 183876 - RNA, 93 nt, Homo sapiens
ggacgggcagcagcgcgacccgagccggcgcccgggccggccaggacgacccgggaacgacagcgggagagagccaccgaccgacgcagagag

SEQ ID NO: 183877 - RNA, 69 nt, Homo sapiens
gacccaccccgaagagcaacggaaccagcgccgagggagaacacaaaacaggccaaaagggcagaaaac

SEQ ID NO: 183878 - RNA, 59 nt, Homo sapiens
acagaccgagggaggacaccggaccccggacgcgggaaaggagccagaggagccccacc

SEQ ID NO: 183879 - RNA, 78 nt, Homo sapiens
cagagagaaagaacgacgaaacggagcggagaagcggaggagaccaaggaggccaccaccacagaaggagcggcacgg

SEQ ID NO: 183880 - RNA, 65 nt, Homo sapiens
gcagcggcagcaaggggccaggccaggcagcccacgacacagccaggcagaacaaccgggagggc

SEQ ID NO: 183881 - RNA, 65 nt, Homo sapiens
cagcacgggccccgagccgaaaagcgaagccagcaaagagacgacggccaaacacaacaacaagc

SEQ ID NO: 183882 - RNA, 80 nt, Homo sapiens
ggcggagcccgacccacccaagacagccaagcaccgaacaggacaacacaaacaaaaaagagagggagaaaaacaagaga

SEQ ID NO: 183883 - RNA, 57 nt, Homo sapiens
cgccaggcacaagcagccccgggcacccgcagagggagaacaagaccaagaggaaag

SEQ ID NO: 183884 - RNA, 62 nt, Homo sapiens
ccagaaagaccaccaggagcacacggcgcggaagagggagcgcgaaggagcgcaccagcacg

SEQ ID NO: 183885 - RNA, 77 nt, Homo sapiens
cacccccgccaggcaaaaagcacggcacccaggccggaggccacccagcaggccagggccaagggcacaggacaaga

SEQ ID NO: 183886 - RNA, 72 nt, Homo sapiens
aaggcgacccgggcagacccgggggccgggcccacgacacccacccggcagggacaacaacgcagggcaccg

SEQ ID NO: 183887 - RNA, 88 nt, Homo sapiens
gacggccggcggggcgcgggagcccgaggccgcggagaaccaggagcggcagaccgccgccaggaggaggcacgcagcccgagaagga

SEQ ID NO: 183888 - RNA, 73 nt, Homo sapiens
ccgcgagaccccagacacccgccgacgggcagcacacccaccgagccgagagggagaaccaaggacgggaagc

SEQ ID NO: 183889 - RNA, 52 nt, Homo sapiens
ccaggaggcgagcaacagggccagcgagacagaccgaaacccaaagaaaagg

SEQ ID NO: 183890 - RNA, 70 nt, Homo sapiens
cgccaccacccaaagaggaccagagaagacacacaacaaccccacggagccccaccggaaggagaaaacc

SEQ ID NO: 183891 - RNA, 63 nt, Homo sapiens
caaccagcacacaaccaacagcaaaacgcccgcggaaaaacacgaaacgcaacggggaagcag

SEQ ID NO: 183892 - RNA, 77 nt, Homo sapiens
aaccgcaccaaaaagcaggaagacagccggacacagagggcgcgggacacgggagacaaaccagcggccagggagaa

SEQ ID NO: 183893 - RNA, 51 nt, Homo sapiens
agggacggcacgaaccaaaagcgcaaacaccgcacccacaaagccaagaga

SEQ ID NO: 183894 - RNA, 71 nt, Homo sapiens
agccccccggagacgcaaccaaggacagacacaccagaggaagaggcgaaaccaaaccaaccagcaaaaca

SEQ ID NO: 183895 - RNA, 71 nt, Homo sapiens
gccacagcccaacaaaggaacgaacgggaccagagggggacagcgaaaccaagccaagccaaggagcgaag

SEQ ID NO: 183896 - RNA, 75 nt, Homo sapiens
aagcaccgcgccggggcccagagcccaggggggcgcagaaaaaggaggcggcaacagggaacgccgcgcagagcc

SEQ ID NO: 183897 - RNA, 78 nt, Homo sapiens
cgcccaacacgacccagcagccagagagccagaggaacgcggcaccacgagaccacccaacccacagaagggacggga

SEQ ID NO: 183898 - RNA, 75 nt, Homo sapiens
accccggaaacaggaagaggagaaacaaggaccaacaggaacaaagaggacacagaaaagcacggcgccgagagg

SEQ ID NO: 183899 - RNA, 74 nt, Homo sapiens
cacacagcgcgcaacgcgggagagcccgggccacccccccaggcaaggggcccaccacagccacccacggccga

SEQ ID NO: 183900 - RNA, 71 nt, Homo sapiens
gagcccacggcagaacccggccgagggcacggccagcccgacgccagggggaggggggcgaaaccgagcgc

SEQ ID NO: 183901 - RNA, 79 nt, Homo sapiens
acccccaagaaccaacccccaaaggcgggacagggccaggcggaaaggcaaccggccgcaggccagcccggggccccag

SEQ ID NO: 183902 - RNA, 59 nt, Homo sapiens
gcccccaagagcgggaaaggcggaaggaaaagcagaaaagagaaaagaagaagaacggc

SEQ ID NO: 183903 - RNA, 69 nt, Homo sapiens
cgggaaaggcaaaacacaacaagagggagccaggccagaaaacggggcaggcagggaaaggcccccaca

SEQ ID NO: 183904 - RNA, 120 nt, Homo sapiens
ccgacggcgagccgcagcccacccaacgcgccgccggcacgggccgccgcaccacagcaccgagccccacggacacagaccgacccagcgcggaagacaagccaggagcggggcaggggg

SEQ ID NO: 183905 - RNA, 68 nt, Homo sapiens
gaaagcaggggaccacaggaaaaggacaaaccgccagaaaacacacggaccaaagaaaacgaagaacg

SEQ ID NO: 183906 - RNA, 54 nt, Homo sapiens
gcggggaccgaggccgagccgagcagcagccgacacaaaccacccgccaccgca

SEQ ID NO: 183907 - RNA, 35 nt, Homo sapiens
cccgccacagagccgaaagagaccccaacaggcac

SEQ ID NO: 183908 - RNA, 67 nt, Homo sapiens
acggagggggaaaggaagccaagaacaagcacaaagccacagcgaccaaggggacaaacgccacccg

SEQ ID NO: 183909 - RNA, 71 nt, Homo sapiens
cggaggacagagaagccccggccgggccggccagcgccggaaaccaacaaaacagagagaagggcgggaga

SEQ ID NO: 183910 - RNA, 75 nt, Homo sapiens
gacagcccacaaaggcaccgggagcaggaaaccagggaagacaccaaaggaaaaccagccacgcaaaacaaaaca

SEQ ID NO: 183911 - RNA, 85 nt, Homo sapiens
agcaggaggacggaaccagggccaggcgaggaccaacccaccccccagaggaagagcaggccggaacaccggaccagcaccaccg

SEQ ID NO: 183912 - RNA, 79 nt, Homo sapiens
cacccccgccccaagacaagaaagggcccaaagcacaagcgaccgccgaaggagcccccgaacggcaacgccccccccc

SEQ ID NO: 183913 - RNA, 76 nt, Homo sapiens
cagagacaaggcacggagagcaacaaagccgacccaacccaagggccaaaggcacaaaaagggcaagaaagagaag

SEQ ID NO: 183914 - RNA, 82 nt, Homo sapiens
ggaggaagcacacccgccagggacgggcacgggaagggcgcacccacgacgcgcacaccaccggcagaccggcgccacagca

SEQ ID NO: 183915 - RNA, 43 nt, Homo sapiens
ccccaagaagcgggaacagggcgcgggaaccccggagccggcc

SEQ ID NO: 183916 - RNA, 72 nt, Homo sapiens
acaagaagcacgaacagcaggccaaagaccagaggaccccgcgggcacggcgggacgggacaagacaccaag

SEQ ID NO: 183917 - RNA, 67 nt, Homo sapiens
gggaagagagggaacacgcaggaggggaaggaagaaggaaaagcggaagcgcagacaagaaaagaga

SEQ ID NO: 183918 - RNA, 65 nt, Homo sapiens
aacgggaaacagggaacaggaaggacagggaagcagacacaggggggaagcagaccaagaagaca

SEQ ID NO: 183919 - RNA, 58 nt, Homo sapiens
gaccgaccgcgcgggcccaagcaccgagaggcgagggagggccacccccaaccaggac

SEQ ID NO: 183920 - RNA, 72 nt, Homo sapiens
cgaaacaaaacacaaacggcaacagaagggcagagcggcgggaaaccaccaacaacacccccaaaccaaaac

SEQ ID NO: 183921 - RNA, 75 nt, Homo sapiens
gccggggcggcgaagcggaggccggaggacaggagagacaacggaggcaagaaagacggagaagcgagaagagac

SEQ ID NO: 183922 - RNA, 69 nt, Homo sapiens
agcaggagcgaccgcgccaaacagacaacggcaagcggagaagagcaaggccgaaccgagaggaagggc

SEQ ID NO: 183923 - RNA, 72 nt, Homo sapiens
ggacaagacgcggcgccgacgggccccgaggccgcgggcggacaagggaggcgaggacggacaaaaggaaac

SEQ ID NO: 183924 - RNA, 73 nt, Homo sapiens
ggcaggcggcacaggagagagcggacagcaaaaggagaaaaaccgcacaaaggcccaacagaaagacaagaag

SEQ ID NO: 183925 - RNA, 81 nt, Homo sapiens
agaagaaggcaaggaggggagaaacaacaggcaaccggaaggcaggggcaacagacaagcacccagccagaaggaagcaca

SEQ ID NO: 183926 - RNA, 88 nt, Homo sapiens
cggggccgccggggcccaggcccagggaccaggcggaggcgcgcgggagccggggcaccacagagagcgggcccaggaacaccggagg

SEQ ID NO: 183927 - RNA, 51 nt, Homo sapiens
cagccaggcccacgggaaaagggggcgaggaagagacaggcgggggagaag

SEQ ID NO: 183928 - RNA, 80 nt, Homo sapiens
ccgccaccacggaggagggggccacagcacagcagcggggggggaagaggaggaggcgcccgacacgacaaaccacgccc

SEQ ID NO: 183929 - RNA, 73 nt, Homo sapiens
ggaggagcggcgcgcgcgcgcgcgcggggccccgcaggaaaagagaaccgccagcaagagcgcgcacgcaaac

SEQ ID NO: 183930 - RNA, 74 nt, Homo sapiens
cgacagacaagagcaaagcacccaccagaaagaggcacagccccaaaagaaaggcaggggccgaaaagccccaa

SEQ ID NO: 183931 - RNA, 74 nt, Homo sapiens
gccccgggcaggcccccaagagccgaggcgcggcgcgccgaggcgcccaccagggcagagacaggcaacagacg

SEQ ID NO: 183932 - RNA, 82 nt, Homo sapiens
cgacgggagaggcggccagaagaaaacgaggggcggaacacccgccaaagcagagaaaaggcaacccaacaacagccaccgg

SEQ ID NO: 183933 - RNA, 76 nt, Homo sapiens
gggggccaagaccccgccaggcccgcccccgagggccagcggagccgcccagaggcagccagaaagcggggggagg

SEQ ID NO: 183934 - RNA, 73 nt, Homo sapiens
ccacccagacagaagcagaacggcagccccagacggggagccaaaagcaccacacgcagcagagcccggaacc

SEQ ID NO: 183935 - RNA, 77 nt, Homo sapiens
aggagcgggcagaggagcagggaggccacaggggccgaaacacagagcaagagggcccagaggagacaggggaacca

SEQ ID NO: 183936 - RNA, 82 nt, Homo sapiens
gggacacgaagcgagcgccgaggcagcgagccgaggggaggggagggaccggcgggacccaagaagcgccaggccgggagac

SEQ ID NO: 183937 - RNA, 67 nt, Homo sapiens
cggaaggacacagagccaacccagaagagccaagagccaaacgagcaagagaagacagagagaggga

SEQ ID NO: 183938 - RNA, 85 nt, Homo sapiens
agccggggggggcggagggggagacggccgggagggcccgccagccgcgcccgcagaaaaaaggccaggagacaaccagaccccg

SEQ ID NO: 183939 - RNA, 72 nt, Homo sapiens
ccaagcggggagcgcccgcgacagaggagggaggaaaacaaccgagggcagagccgaagaccccaagaagag

SEQ ID NO: 183940 - RNA, 74 nt, Homo sapiens
caagagcgcaccccgcggagcaccaggcagaaaaagcagaggccggaccacggaaagaccccacgccacgcacc

SEQ ID NO: 183941 - RNA, 79 nt, Homo sapiens
aaaaagagaagaagagaagaaacccagcgaaggccggacggccgaccagagcccagagacaacgggaggcaggaagagg

SEQ ID NO: 183942 - RNA, 73 nt, Homo sapiens
ccagagcaggaaaggaggccggaccgaggaaccaccaagaggcaacagccaagcagaagaaccagcacaggcg

SEQ ID NO: 183943 - RNA, 66 nt, Homo sapiens
accgaacaacagccagcaggaacagaacccggaaaacagaggcccaaaacaaaaaaaaacaaagac

SEQ ID NO: 183944 - RNA, 67 nt, Homo sapiens
cgaggacagcggaagaaaaggaacagcgcagcaccaaacacaggcggaaggagacggaacgcagggg

SEQ ID NO: 183945 - RNA, 69 nt, Homo sapiens
caaggacgccgccagccccaaagcgggaacagggcgcagggaagcaacaggaaaccaaacaagggaaga

SEQ ID NO: 183946 - RNA, 79 nt, Homo sapiens
agaaggagcggcggacacacagacccccaccaagcagcacaacaacagcaacggaggcgggaccggaacaggcacaccc

SEQ ID NO: 183947 - RNA, 71 nt, Homo sapiens
gcagacgcggaccaacaacaacgaacaggaaaagaaaaccaaaggaagacgcaagcagagaaccagaccgc

SEQ ID NO: 183948 - RNA, 76 nt, Homo sapiens
gaaggagggaggggaaacacaaagccggcacgcgcgcgaggaccgacagcacgaggaggagagaagaaaagcggcc

SEQ ID NO: 183949 - RNA, 35 nt, Homo sapiens
agagccacgcaacaggacgaggaaaaggcccacac

SEQ ID NO: 183950 - RNA, 98 nt, Homo sapiens
cacggggcaacgacgcagacggcagggggaaaagaccagccaagggcgaagcaaagagggcaaccccaaaaggaggggaagcgcaccgccagaaggag

SEQ ID NO: 183951 - RNA, 84 nt, Homo sapiens
cgccacgccagcacgccaacccggacggacaacaccggggagcgcgggcccagaggcagagcacacaaccaggaaccaaaaacc

SEQ ID NO: 183952 - RNA, 74 nt, Homo sapiens
ccaccgaaggacgagccccggggaaagaccgccagcgaggcagacacacgacggaccccagcagccaccccgaa

SEQ ID NO: 183953 - RNA, 64 nt, Homo sapiens
aagaagggcaaaaaccggggcagggaagcagagagcaaccaagcaccaccaagcccacagcagc

SEQ ID NO: 183954 - RNA, 74 nt, Homo sapiens
gcagacccggcagagaacacaacaagcaccagccacaggagaaggacagaacggcaaagacccaaggaagagag

SEQ ID NO: 183955 - RNA, 85 nt, Homo sapiens
agcagcccagacgcggcacagagagggccgggagcgcgcagccagacgaacaagggacccacgggaaggggggaccacgcagggg

SEQ ID NO: 183956 - RNA, 70 nt, Homo sapiens
gcggaaccgaccggaccaacccagagacccgcagaggagcccaccggcaaccagggggggggcggaccgg

SEQ ID NO: 183957 - RNA, 51 nt, Homo sapiens
gcacccccacagcacaggacacagaagcagagagagccaccggccagcaga

SEQ ID NO: 183958 - RNA, 79 nt, Homo sapiens
cagcccccggagccccccgggacccacagcaccccgaggcccgacccagacccggccgaaccacgcgcgcaccgcggaa

SEQ ID NO: 183959 - RNA, 57 nt, Homo sapiens
cccaccagccccaaaaggcggcaacagccgccaccacaaggccgcggcaggggagcg

SEQ ID NO: 183960 - RNA, 56 nt, Homo sapiens
caaaggggaaacagaaacaaggggcgacaccacggcaaaagaaagaagacagggcc

SEQ ID NO: 183961 - RNA, 61 nt, Homo sapiens
caggggggggcaaacccgagagaacgggccaacgagcgcccccaagcggagccggagggca

SEQ ID NO: 183962 - RNA, 60 nt, Homo sapiens
acaagaagagaaacgacacacagcagcgcccagaccaccacacgacaacccggagggacg

SEQ ID NO: 183963 - RNA, 58 nt, Homo sapiens
ccgcgagggggacgccacgcacagggccggcgccaggcagaagaccggagacccgaaa

SEQ ID NO: 183964 - RNA, 71 nt, Homo sapiens
ccgcaccgggacgacaccggggaccggacaggaacccaggcgccaggccagcaaaggcaaccgacaaacag

SEQ ID NO: 183965 - RNA, 73 nt, Homo sapiens
acgccacgaggcagaacaacacagcgagcaaagccagaaacaagagagagaggaccaggaggcaacaaagaag

SEQ ID NO: 183966 - RNA, 52 nt, Homo sapiens
caggcaccacagcccgaggcccggagcgaccagcgcaggacaagcgagcaca

SEQ ID NO: 183967 - RNA, 72 nt, Homo sapiens
cagaaagcaaaccagcaggcaccaaggaaagcagaagacaaaggaggaagagacaccgagacccgccaaacc

SEQ ID NO: 183968 - RNA, 74 nt, Homo sapiens
agaggaaggaagccggcgggcgggacgcggcgcgcaacgcaagccccaaccgcgaggagagcgcagcaggcgcg

SEQ ID NO: 183969 - RNA, 60 nt, Homo sapiens
cggcgggagccagcgagccacgggagcgagccagggggacggaagcggcagcgggcagcc

SEQ ID NO: 183970 - RNA, 76 nt, Homo sapiens
agggcgaaaacacggagaccaccccagcacgaacagacagccccgggcaaggggagcagacaacaaaacgagcaag

SEQ ID NO: 183971 - RNA, 75 nt, Homo sapiens
cgccggcggggccaacggacgccagaaggaggcgcgggcagacagaaggagaaaggcgggaccgcacaccccacc

SEQ ID NO: 183972 - RNA, 83 nt, Homo sapiens
gcgacgcgaggagcggcccagaggcggcaggggccaacccagccagaccggagccccgggagacgaggccgcccagccccaca

SEQ ID NO: 183973 - RNA, 74 nt, Homo sapiens
cgaaaccaccaccaccgcccgcccagaccgagcccagcggacccaaaggacccccgcgagagccccaagaacag

SEQ ID NO: 183974 - RNA, 76 nt, Homo sapiens
gcagaaaggaagaagggaagccggaagaagacaaagcgccgcgaaacacaacgcacgagaaaacaagggaaagaag

SEQ ID NO: 183975 - RNA, 81 nt, Homo sapiens
gggaaggggacccgccgggaggacgcgccacccggggaaccccagcaagaccggcggagagacggagacccggacgacacg

SEQ ID NO: 183976 - RNA, 73 nt, Homo sapiens
cgcggcgcggagccggacggcagcaggcccgcaggacaaggcacgaggcgcggcgaccaccacagcagagccc

SEQ ID NO: 183977 - RNA, 74 nt, Homo sapiens
acaacaggaaaacaaaagaggagaaaggcccagcacccagaccagcggggcccagcggcggaacagcggccaag

SEQ ID NO: 183978 - RNA, 88 nt, Homo sapiens
aggacaccacagccccgacgaacacggggacaccaacaggacccggaaaaagagggacgcggacagagacgggacgccagcaaagagc

SEQ ID NO: 183979 - RNA, 68 nt, Homo sapiens
gacgggccaacggacgggaaaggccaaggcaggcccgacagagggcaacgcggggcgagccacagaga

SEQ ID NO: 183980 - RNA, 58 nt, Homo sapiens
acggacagcacaaaccgccacacaaaagcggacaagcgaagcacccacacagccgaca

SEQ ID NO: 183981 - RNA, 79 nt, Homo sapiens
cccccgccgcccccggcgggcccggcggcccacaccaggaaaacaaagagggaaaacggagaaaagcccccccaggcca

SEQ ID NO: 183982 - RNA, 86 nt, Homo sapiens
gccagcaagcgcgccgcgccgcagcggcgccgcggacaagcacgagggcgcgccgagacgcccgagaccaaaaaaccaaggacgac

SEQ ID NO: 183983 - RNA, 61 nt, Homo sapiens
gacgacaaagggcagagaaggacagaaaacgggccccagacacaagccccaccaagaggac

SEQ ID NO: 183984 - RNA, 78 nt, Homo sapiens
aggaagaacaggaaccagcagcaaagaaggcacggaaagagaggaaaacaagcgcacgaaagccggacaacgggagcc

SEQ ID NO: 183985 - RNA, 72 nt, Homo sapiens
aacagcgacaaggagagaagcgcggagccccaagcgagaaccagaagccacaggccaaccaagcaaagcaaa

SEQ ID NO: 183986 - RNA, 76 nt, Homo sapiens
ccagggcacagcggaggcgacacccagagagcccagagaccaaaggcgaccaggagagaaaaccaaacacacaggg

SEQ ID NO: 183987 - RNA, 99 nt, Homo sapiens
ccagcgcgcggacaggaaccggacagcacaccagggccgggacacacgaggcaaagaaggagcccaggaagggaccaggacgcaggaacaacaccggcg

SEQ ID NO: 183988 - RNA, 76 nt, Homo sapiens
cgcagcacagggaaccgaggggagccgaccacggacgccaggacgcaaggaccaaaaaacaaagggcggaaagaag

SEQ ID NO: 183989 - RNA, 104 nt, Homo sapiens
gccggagggcggccacgcgggaccaccggcaccaccaaaaacaccagcaggaaaaaagagcggcagaaggccaaacggccgagcaggcgagcgaagagacaggc

SEQ ID NO: 183990 - RNA, 79 nt, Homo sapiens
caccaggggaacaagcagaccaccaccgaagagcagcagacaacaccagaaaacccacacccaaagccgcagaaaaagc

SEQ ID NO: 183991 - RNA, 77 nt, Homo sapiens
agaagccgggaccgaaggcgaagagccggacgagcgggagaggacaccacacaaaaaacaggaaaagagaacaggca

SEQ ID NO: 183992 - RNA, 76 nt, Homo sapiens
caacaagcggcgccccggggcgcggcccgggcacaggcgcgagaacagcccagacccgcggagggccgccgaagac

SEQ ID NO: 183993 - RNA, 74 nt, Homo sapiens
cagcaacaggccgcaaagacgaaaggaacacagaacaagggcagagacgcgcaaagcggggaggagcacagggc

SEQ ID NO: 183994 - RNA, 72 nt, Homo sapiens
aaagcaagacgcagcagaaagcagccggacacaagagggcaagaaaggcgcgacgggccgaaaagggacgaa

SEQ ID NO: 183995 - RNA, 85 nt, Homo sapiens
ggcgcagacgggagccgggagccggcaggcaaaagcagaccggaaaacccaccggcaagaccacacccgaggggagcccaggaca

SEQ ID NO: 183996 - RNA, 69 nt, Homo sapiens
gcaaacggcagggcagccagcccgcaccgcaggagggcggggggaaagccgccacagacaggccgaggg

SEQ ID NO: 183997 - RNA, 78 nt, Homo sapiens
aagccaagggacaggggggccgggggaacgaggaagcgcccaagacaacaggcacaaagagagaaggaacacccacag

SEQ ID NO: 183998 - RNA, 79 nt, Homo sapiens
acaggagagggagagaaaccacgaagcagcaacacgccaccgagccagaggacggagagagggagccagggaagcccca

SEQ ID NO: 183999 - RNA, 72 nt, Homo sapiens
cgccaccgggagcagacggcaagaccccaaaggaaacgagagagagaccacgggggcccgacgagccgccgg

SEQ ID NO: 184000 - RNA, 76 nt, Homo sapiens
gaaaaggaaagagaagagccggcgagcgagcgccccccggaccgagaagcgacgaaggcgccccgccgagccaggg

SEQ ID NO: 184001 - RNA, 74 nt, Homo sapiens
caccacgaggggaccaccaggaacagaggggcacaaacagcgcaccccccacgggcagcagggggagaagcaga

SEQ ID NO: 184002 - RNA, 69 nt, Homo sapiens
cgacacggagagacaagcgaaaggagacggagcgacaccaggaacaaccggaagaaaaagagacccgcc

SEQ ID NO: 184003 - RNA, 81 nt, Homo sapiens
gggcaccggacgccagcaccgcggcgcagagggaccagcggggagagcgacaccacaaggcacaaggagacggccgagacc

SEQ ID NO: 184004 - RNA, 80 nt, Homo sapiens
cacaaagagggggcggaagagacagccaggcacagaagacccagaacaggaagcagaacgggccaagcccagcccggcga

SEQ ID NO: 184005 - RNA, 63 nt, Homo sapiens
cgcgaccgagacggcaggcggcggaagcgggagagaaggcgcgcaggagagcgcagagacccg

SEQ ID NO: 184006 - RNA, 60 nt, Homo sapiens
accaggccagaaggagcagcaagacccgcgccgcaagggagaggaaagaaccagaagagg

SEQ ID NO: 184007 - RNA, 78 nt, Homo sapiens
aaaagaaggaaagacaaaacagggggccaaagggcgagggcacaaaaaaccacaccccccaccgaggaagagcgggag

SEQ ID NO: 184008 - RNA, 71 nt, Homo sapiens
gggaaagggacaagaagggcaaagccgaaaaacgaaaaacgaggaagcaaacgaagggaaacggaaaaaca

SEQ ID NO: 184009 - RNA, 71 nt, Homo sapiens
cagcacgcagagaaccgagaaagcaacggaaacgaagaaggcccagcccaccaggaaaaaccggacaacca

SEQ ID NO: 184010 - RNA, 59 nt, Homo sapiens
cacggcggcacacgcagaccgcaccaggagacaagaaccggaggaaccggaagaaccgc

SEQ ID NO: 184011 - RNA, 69 nt, Homo sapiens
gcccaagaccaaccaccacccaaaagccaccagcaggagaggagccaagcccaacgggacgggaaaacg

SEQ ID NO: 184012 - RNA, 72 nt, Homo sapiens
aaaagcccaagaaacaaacaacgggcggcagagaagagaagagcacagcgggaggaaagggagagacaagag

SEQ ID NO: 184013 - RNA, 84 nt, Homo sapiens
ggcgccgggcacgagcaccgccaccaggggaagggggccccaggaagaggagaagaccagaggcacagcagacacgaagccacc

SEQ ID NO: 184014 - RNA, 70 nt, Homo sapiens
ccaaaggaccgccccacaagcagagaggcggggggccagagagcacgccccggcggacaacgcacagcgc

SEQ ID NO: 184015 - RNA, 79 nt, Homo sapiens
ccagccccaaaaggcggcaacagcccgaccccacgcacccggagccaccgagacgaaccaaacccaggaagcggcgcca

SEQ ID NO: 184016 - RNA, 76 nt, Homo sapiens
cgaggccggacgcacccggggggcccagggccaaagagcgcaggcgagaaaggagagacagggccccacagcaagg

SEQ ID NO: 184017 - RNA, 71 nt, Homo sapiens
cacgagagcaaaagagaaacgaccgaaagaagaaggaagaaccaaagcccgcaagcaaagcgaggaaacag

SEQ ID NO: 184018 - RNA, 77 nt, Homo sapiens
acaagaaaccaaacaagccgaaagagcaagggccgccaagcccggacaagaacccaccggcagaacccgaaccccgc

SEQ ID NO: 184019 - RNA, 67 nt, Homo sapiens
ccccaggcccaggagacggagagggaaagcaaaccaccagagacccacagcaccccgcggaagaccc

SEQ ID NO: 184020 - RNA, 80 nt, Homo sapiens
acacgaccggccagggagggccccaaaaacccccccagaagacccagccaccccagcccccaagacagccaccagcggcc

SEQ ID NO: 184021 - RNA, 67 nt, Homo sapiens
cgacaccagaacgcagaagagggacaaaacccaggaaaggaaacagacggacccccaggcaggacac

SEQ ID NO: 184022 - RNA, 83 nt, Homo sapiens
aagagccgcggggcaaaaacacaagaagagagcgagaacaccgcaaggacccagccgagcccacgggaggcagaaagcaccgg

SEQ ID NO: 184023 - RNA, 68 nt, Homo sapiens
gccagacagccaccacccggcccgggaaaaaaaaggagaaacaaccaaaacgaagaaaagcaaaacag

SEQ ID NO: 184024 - RNA, 72 nt, Homo sapiens
agaaagcacagaaaccaaagccagccaggcccgcaagcaacaagacaacccaccgcaaaacgcagaaaacgc

SEQ ID NO: 184025 - RNA, 82 nt, Homo sapiens
gaaaccccccaaaccccccccgcccgaggccacgcagccgccagaacaccagcgaaaacccagacgaggcgccgcacccagg

SEQ ID NO: 184026 - RNA, 80 nt, Homo sapiens
gcagagaaggcacagaaaagccaccgagggcacagcccgggaaaagccaacacagaacaccacaccgaaagccacgggac

SEQ ID NO: 184027 - RNA, 87 nt, Homo sapiens
cggcagcgaagacccggccgcccagagagcgggggggggaccgccggcacgcgacccccccgggcccaaaccagggccccccacgcg

SEQ ID NO: 184028 - RNA, 81 nt, Homo sapiens
caagggcggccggcccccgacagccaggcccgcgagaaaacacgagaaccaagcagaaggaagaagcgaacacagcggcaa

SEQ ID NO: 184029 - RNA, 38 nt, Homo sapiens
ggccaggccgcgcaccaacggcgaagaggggcaccacg

SEQ ID NO: 184030 - RNA, 77 nt, Homo sapiens
accgcgacaggcccgaaaaaaacccaggcggcccagggacacaggaacgccacaagaaacaacagcaaggcgagggc

SEQ ID NO: 184031 - RNA, 80 nt, Homo sapiens
gaacaccaccgccaggccaggaacaaagccacgcaagagagggggaccgcgacaaaggagcgcccgcgcggccgccagga

SEQ ID NO: 184032 - RNA, 79 nt, Homo sapiens
caacacgacagagagaaggcaagagccgacccacgacagcaacggcgcaaaggagaaagccaaagcgaaggacggaacc

SEQ ID NO: 184033 - RNA, 75 nt, Homo sapiens
agcaggagccgaggccccacagcagggcgcgcccgaggcgccagcagaaaccaccccgcagcagcggccacggcc

SEQ ID NO: 184034 - RNA, 81 nt, Homo sapiens
gaacaagacgaagaacagaaggcgacaaggccaagaccgccagcaaaggaagacgagagcgaagaggggccgcgaggcacg

SEQ ID NO: 184035 - RNA, 65 nt, Homo sapiens
ccagcgcagcagagcgccaagacggaaagcgggcggaggaccagaaacagaaggagaagggagga

SEQ ID NO: 184036 - RNA, 80 nt, Homo sapiens
ccacagaggggcgacggggaaaacagaagcacaacccgaagcagagggcaaacaaaacaagaccagcgaacggaaaaaac

SEQ ID NO: 184037 - RNA, 64 nt, Homo sapiens
cggcagaaaacggacgcccacagaaggaagcacaaaaagggacagcgccaaggccaccgagcca

SEQ ID NO: 184038 - RNA, 78 nt, Homo sapiens
caccgggacaacggaggggaaacacgccgggaggaagagaagccaaaacaaagacaggggccagcgccaccggaccgc

SEQ ID NO: 184039 - RNA, 76 nt, Homo sapiens
gcccccgcccgcccgggacccgcggccccgccgcgacaagcagaccggaagaccgacggaagaccacaccccgagg

SEQ ID NO: 184040 - RNA, 126 nt, Homo sapiens
caaaaggcgaccggcaacacggacacccacagcggggcggcggcggcggcggcgcggcccaaaagaacccggccggaaacggaggggacggccaagacgcccccccgcccccacccaggccaccca

SEQ ID NO: 184041 - RNA, 56 nt, Homo sapiens
cgaacaagaccaacagacagcagcggcaaggaggacagcgaacaagaggagcacga

SEQ ID NO: 184042 - RNA, 67 nt, Homo sapiens
aggaggagaggagagagcgagaggagggagggacagcacgggccgagcggaccgagagagagcagga

SEQ ID NO: 184043 - RNA, 68 nt, Homo sapiens
cgggcgccgaggggcgacgaaacaacagggaaagacaaggagccgggccgagaaaccgaaccagagac

SEQ ID NO: 184044 - RNA, 78 nt, Homo sapiens
ggcgcgagcgccccgccacgcccggagcgcggcggcggggaggaaaaccaaggaggaggaacccaagcccaggccagc

SEQ ID NO: 184045 - RNA, 92 nt, Homo sapiens
acaacgcggccgggccaagcagagaacacagggaccaagaaaggcccagggaccaaagcccggacaaggcccgagcaccaggaccgcagaag

SEQ ID NO: 184046 - RNA, 105 nt, Homo sapiens
gcggagcccgaagaggccccagccaggcagcccgcccagaaggaacggccgacaaccaggaggaggcgaaggggccgcaagcacgccagacaaggagggggccgg

SEQ ID NO: 184047 - RNA, 78 nt, Homo sapiens
gaaagagcaaccggagcagcaggggaaaagcggaagggaaaaagagccagaaaagaaaaaacgaagaccaggagacaa

SEQ ID NO: 184048 - RNA, 72 nt, Homo sapiens
ccccccagccgcgaagagacccgacagaggcaaggcgacaacaagaacacccggaggacaaacccccagaag

SEQ ID NO: 184049 - RNA, 84 nt, Homo sapiens
gaagccaccacacccagccggaagcacccaaccgcggcagccgaacagaggacgaaggacaggcgggcgggacccccaggcgcc

SEQ ID NO: 184050 - RNA, 68 nt, Homo sapiens
caccgcgcacgccagcagcaaacccccgaagccggaggccccgaagccccaacccccagccagaaaca

SEQ ID NO: 184051 - RNA, 76 nt, Homo sapiens
cggacacgggagggaaagagagcgaggagacggcgaccgacaacgaaccgaaagagcgaaaaccaggacaggacac

SEQ ID NO: 184052 - RNA, 76 nt, Homo sapiens
cgggacggaccgagaccggaccgagagcggaccgagagcgcgaaacgcacgagaaggggcaaaaccaacggggcgc

SEQ ID NO: 184053 - RNA, 78 nt, Homo sapiens
acaggaagagaggccccccaaagcaccgcgcagaccagaccgccgacccagcggacgccaagaagaaaggcccagaag

SEQ ID NO: 184054 - RNA, 76 nt, Homo sapiens
cacagcccaggacggacaacaccaaccaagaagacagacagaaacccacgagaaaggaaaaggaggaacaaccaag

SEQ ID NO: 184055 - RNA, 69 nt, Homo sapiens
aaggcaacagcagccgcaaaaacaaggcggaaacaacgggcaaggaagaagcgccccgagaggccagaa

SEQ ID NO: 184056 - RNA, 35 nt, Homo sapiens
gcgccgcaacgagcaagaccacagcaacacggaaa

SEQ ID NO: 184057 - RNA, 65 nt, Homo sapiens
agacagaaaggcagaaggaagaagaagaaacaaaaagcgcaacaggccagccaaaaaaagaaaaa

SEQ ID NO: 184058 - RNA, 73 nt, Homo sapiens
accgagcaacaacagccacagacagagaccaggggccacaacggaaaccaggaaaccgcagaagaaaaggacg

SEQ ID NO: 184059 - RNA, 77 nt, Homo sapiens
gcggagaggaaagagagggaccaccgaaaaaccccaaacccacaaggagcccaggaggcgagcaaggcacccgaggg

SEQ ID NO: 184060 - RNA, 57 nt, Homo sapiens
cagcccccccccagaccacaccggggcccgccggagcacggaagacaacaagaacga

SEQ ID NO: 184061 - RNA, 73 nt, Homo sapiens
caaggggcccccgggcaccccggaccgcgcagccaccgcggcccccgcgggaagaagagagggcgaaggaggc

SEQ ID NO: 184062 - RNA, 32 nt, Homo sapiens
acgaggcaacgccccagagaagcagaggagag

SEQ ID NO: 184063 - RNA, 75 nt, Homo sapiens
gaggggaacaggaaggcccccgggaacgaccccacaggaaaacgagggcaacgcagaaaaggggaagaaggagac

SEQ ID NO: 184064 - RNA, 58 nt, Homo sapiens
cacccacagccaaggcgggagccacggaacaacgaagcacaaagccgaaacagaacga

SEQ ID NO: 184065 - RNA, 80 nt, Homo sapiens
gccacagaaaggaaccaggccccagaaggaccgaaagcacagaacacgggcgaagcagaaccacaccgcaggaaacaagc

SEQ ID NO: 184066 - RNA, 40 nt, Homo sapiens
ggagggacccgggaggccaaggagccagccaacaccccag

SEQ ID NO: 184067 - RNA, 79 nt, Homo sapiens
gcgagagccggccgagcagagcacaagcagagagacgcggggacggccaggggcagagggcccacccagggacccggga

SEQ ID NO: 184068 - RNA, 58 nt, Homo sapiens
caccgacccacaggagcgcccgcggaggagcgcccggcaaaccacgcccgggcaacac

SEQ ID NO: 184069 - RNA, 80 nt, Homo sapiens
cggcgcccccgcaagaggacggcgccggcagccgagcccagaccccacagccagccgagggcgagaagcacagaaacccg

SEQ ID NO: 184070 - RNA, 40 nt, Homo sapiens
cccagggaaggggcagcacaccggaggcgcagaccgggga

SEQ ID NO: 184071 - RNA, 48 nt, Homo sapiens
agacaggaggggaggaggccaggagccggaccgaggaccggaagaagc

SEQ ID NO: 184072 - RNA, 47 nt, Homo sapiens
caccgaagagccaagcccaggagaagacgaacacaagcccgagaaag

SEQ ID NO: 184073 - RNA, 72 nt, Homo sapiens
ccccgggagccggcggcccacccggacgcccacccaccaccgggggggagacccccaggacagaccaggaaa

SEQ ID NO: 184074 - RNA, 75 nt, Homo sapiens
ccagcgggaggcgcaccgcgggggaacgaggggcacagaggcaggcacaaaaccacaagcgacaacagaagacac

SEQ ID NO: 184075 - RNA, 66 nt, Homo sapiens
ggaaacagcccgcaaaggaaaggcccgagccaaaagacccagagaaaggagcacgaaggaacaaag

SEQ ID NO: 184076 - RNA, 73 nt, Homo sapiens
ggggcccggcgccgcccccggcaaccccgggaccgagcagcgcaccggaggcagcgcaggcagcgccaacaaa

SEQ ID NO: 184077 - RNA, 69 nt, Homo sapiens
cgcgcgcgccgggacagcgaagcgcgcggccgagccggaggcacacagagaaaaaaagggaacaaaaca

SEQ ID NO: 184078 - RNA, 67 nt, Homo sapiens
cggacaccgacacagaagggggccgcaaggccaggcgcgcagaggcacccaacggcacagaccccac

SEQ ID NO: 184079 - RNA, 73 nt, Homo sapiens
gaccaaccgaagcggcggcaggggccgcggcccggagccaacagacaaaggccagggcagaaaagagccaccc

SEQ ID NO: 184080 - RNA, 78 nt, Homo sapiens
ggccgagcccggccgccagaccacagcacagccgggaaggggagccaccagccccccggacagcagaggcacacaaac

SEQ ID NO: 184081 - RNA, 75 nt, Homo sapiens
ggcgccgcgcgcccgcgccacccggggccgccgcgcaggagcccccggagcggaagaggaacaggcccggccaca

SEQ ID NO: 184082 - RNA, 82 nt, Homo sapiens
caccggcccccacggccccgacccagaagggccgaaggaggaacacagcaccgagcagcgagcagcgacaggcgcgccagcg

SEQ ID NO: 184083 - RNA, 80 nt, Homo sapiens
ggacaccaaacccacagccccagcacaaaagaccccacagcgagagagagcaaacgaaacaggcaaacgagacaaaggac

SEQ ID NO: 184084 - RNA, 84 nt, Homo sapiens
cgacgcgcgggccgcgagcggggcgacccgagaggggaaagaaaaagagcccaccaaaaggaacagacggccccaggcggacaa

SEQ ID NO: 184085 - RNA, 63 nt, Homo sapiens
gccgccagagcggggcacggagcgggcccgggcgcgccaggcacagccaagagcggaccggca

SEQ ID NO: 184086 - RNA, 57 nt, Homo sapiens
aacccaaccagggggaaacacagaacgcaggggggaaagagcccgggagaggcccgc

SEQ ID NO: 184087 - RNA, 71 nt, Homo sapiens
ggggccaagggggacagccaacaaagagaagagaaaccaagcccgggacgaaaacaagggaggcaaagcca

SEQ ID NO: 184088 - RNA, 69 nt, Homo sapiens
ggcgaagagaaaccagcccggacagcgcaccccacgcggccgcccgacacaaggcgcacaagggggacg

SEQ ID NO: 184089 - RNA, 74 nt, Homo sapiens
gaggagaagacaccaaaaagcaaacggaccagaccgaccaccaaaaggaccaagaaaggcccagggaccaaagc

SEQ ID NO: 184090 - RNA, 51 nt, Homo sapiens
acccaaaccgaaggcagcacggcacacgccaagggccaggaaaaccaggaa

SEQ ID NO: 184091 - RNA, 79 nt, Homo sapiens
ggagcgaggacacaccacgaagaccgaaaagacgcggccccaaaggaaacacccgaagaacacagcgccagcccaacgg

SEQ ID NO: 184092 - RNA, 88 nt, Homo sapiens
aaaccaagaccaccccgccgggaccggaggagacacggcccgcaggcgccgaagaagggagagcccacgcaggagacgggaggagcga

SEQ ID NO: 184093 - RNA, 83 nt, Homo sapiens
gcccagagccgggcgcggcggggcccgaggcagcacccgggagccgcaaggcgagagcgcaaagggccggagcgagggagagc

SEQ ID NO: 184094 - RNA, 79 nt, Homo sapiens
cgccgcgccgcccgagcacgccgcgcagcccggccgccggcccccaacagcgccggcaaccagcaccagcagagagaag

SEQ ID NO: 184095 - RNA, 52 nt, Homo sapiens
cgagccgccaggcagcaggacggaaggcaggggaccccccgagggcagcccg

SEQ ID NO: 184096 - RNA, 67 nt, Homo sapiens
cccagaggcccagggaggcaggggcagaaacagagaaggaacaggacagcgcccgcgccgaccccac

SEQ ID NO: 184097 - RNA, 73 nt, Homo sapiens
acagcggccggaggcagcccaggacccaccaacaaccgaaaacaggggaacagaagcaggcggcagagacagc

SEQ ID NO: 184098 - RNA, 87 nt, Homo sapiens
caggagcgggcccagagacgcggggacgggccggggcccccggaacgagaccgcaacaccagaagggaaagaaaccaggcgaaagga

SEQ ID NO: 184099 - RNA, 84 nt, Homo sapiens
cgacagacgcacagggcaggagacagagcgggagccaccagcgccaaagggaagccaggagcccgggggcacggggagaagacg

SEQ ID NO: 184100 - RNA, 58 nt, Homo sapiens
ggaagacccagacagcggacggccgccaccgaggggagaaagaacccaagggccgggc

SEQ ID NO: 184101 - RNA, 70 nt, Homo sapiens
ccccgaagcgggaacaggcagacagagaacgagagagggagacggacaacggagcaggccgagagaccac

SEQ ID NO: 184102 - RNA, 69 nt, Homo sapiens
gaaaaaaccaagcagcgagcaccagacaacggcaagcggagaagagcaaggccgaaccgagaggaaggg

SEQ ID NO: 184103 - RNA, 61 nt, Homo sapiens
ccgggcaccccgagccaggccgccgcaaagcaggcgacagggggaccgcggcgcgagggac

SEQ ID NO: 184104 - RNA, 72 nt, Homo sapiens
agaaggccacagagagccagccccaaccgaacccagacgcagaacggacggacaagggagggccaagaaccc

SEQ ID NO: 184105 - RNA, 75 nt, Homo sapiens
gcaaaaaaggccggcacgggcagcagggagcagaagcgacaggaagcgacagcagaaggaagcaaaaacagaagg

SEQ ID NO: 184106 - RNA, 77 nt, Homo sapiens
aagcgaaaacgaaagaaacgagaagcgcaaagccagcggcccggcagcaaggcgagaagaaagaggccagacaggag

SEQ ID NO: 184107 - RNA, 72 nt, Homo sapiens
gcgggcggggcaggcacccacggcaaggaggaagagaagcggagagccaggagaagaaagacaagaccgaag

SEQ ID NO: 184108 - RNA, 73 nt, Homo sapiens
aagagcgcccaccggaggccacccagagggacagaggacacgagcccagccaggcgagccagcgccaaagaaa

SEQ ID NO: 184109 - RNA, 53 nt, Homo sapiens
cacgcggggcaccccggaaccgggcacaagcagaggaaccagggaaccgccgc

SEQ ID NO: 184110 - RNA, 55 nt, Homo sapiens
ggaagcccagggacccacgaaagcgcgccccagaccaccggcagggaacagccga

SEQ ID NO: 184111 - RNA, 52 nt, Homo sapiens
ccggcggcagaacccccggaaagaccacagcaagaccacgcccccagccggg

SEQ ID NO: 184112 - RNA, 78 nt, Homo sapiens
aggacccgggaggccccccgcgacagacccagcccccgggcagaccggaaaggccaaggcacaggaagagggcggcac

SEQ ID NO: 184113 - RNA, 87 nt, Homo sapiens
ccaggaggcccaaaagaggggcgacagaacagaggacacgggcgggcgcccccagaagcccgggaacaaacggggaaggaacagcgg

SEQ ID NO: 184114 - RNA, 80 nt, Homo sapiens
gggagggagggagcgagcaggcgaagccgcggaggacgggggaagaggcggcccccgaccgaaccgaagaaccccaaaca

SEQ ID NO: 184115 - RNA, 85 nt, Homo sapiens
aaggaaccaggaaagccacaggaggccaccagaacccaagaagaccgaaagaaacacggcggaggcaaagcggaaaggacagggg

SEQ ID NO: 184116 - RNA, 78 nt, Homo sapiens
gaaagcgaaaagccccagggccaccaaccaaaccggaccacccaaaaagccgaagacccccaagaccacagccagcaa

SEQ ID NO: 184117 - RNA, 61 nt, Homo sapiens
acccggcaccgccccagaccaagggaaagaagccaggccagcaaaggccaaagaccacacc

SEQ ID NO: 184118 - RNA, 70 nt, Homo sapiens
gacacaagagccaaagggagggggcccaacagaccccccccggacgcgagccggacagcaggcggacgca

SEQ ID NO: 184119 - RNA, 118 nt, Homo sapiens
agcagcggcggcggcaagacccccccccggaggcggcgggcggaggcggcggggagaggccggacagacaccccgcaccgggaagggggacaacagcagggagccacagcggagagag

SEQ ID NO: 184120 - RNA, 79 nt, Homo sapiens
gcgccaagaccagcagcaccaggagccccccgcccagacaaggaagccaggagggaagcccagaagacgcacaagagag

SEQ ID NO: 184121 - RNA, 70 nt, Homo sapiens
gggggcggcacaacgcaaggggaaaaacaacccccagaccaccccccgagccacaccgccgcgaagcgcc

SEQ ID NO: 184122 - RNA, 71 nt, Homo sapiens
caccaccggcagacccacagaaggccccccggaggacggcggacgaacccaaccccagagacagacccacc

SEQ ID NO: 184123 - RNA, 73 nt, Homo sapiens
ccgcagcagacagcccggcaacgaaccaggaagagcacccgcggaggagccccagaccggaaagccgcccccg

SEQ ID NO: 184124 - RNA, 78 nt, Homo sapiens
agccacagggacccagcaaaggagagcaggagaaaaacggcagcagaacaaggaagccccccagaaaagaggcgaggc

SEQ ID NO: 184125 - RNA, 82 nt, Homo sapiens
caggaccggacccggacccaaaggccagcaaaacacgaccaacggccccaaaaaccaccggcaagaagaagagcaggaagaa

SEQ ID NO: 184126 - RNA, 67 nt, Homo sapiens
cagccacagaagaccaaacgcagaccagcccaggaagaaccaagaaaagggcacgacgaacaaacac

SEQ ID NO: 184127 - RNA, 49 nt, Homo sapiens
agaccgacccaacaagacagaaaaagaacgcccaacaaggaacccaacc

SEQ ID NO: 184128 - RNA, 62 nt, Homo sapiens
ccaccgaaccccagcccaagccgcgcccgggagagaggagagagaggaacagggagcggggc

SEQ ID NO: 184129 - RNA, 54 nt, Homo sapiens
gcccagaagaggaccgcccaaggcccccaacgcacagagcaccaacgagagcag

SEQ ID NO: 184130 - RNA, 81 nt, Homo sapiens
gaaggaagcgcaccacggcccgccccaccgggggccaccccagggaggagaagagggacccagaaggcgaggagaagaagc

SEQ ID NO: 184131 - RNA, 75 nt, Homo sapiens
aggagcgagcagacgacaagccgggagcgggcggccaaccagaagccagacagccgaaacaacaccagccgggag

SEQ ID NO: 184132 - RNA, 40 nt, Homo sapiens
ggggagggaagccgcgccccgaggacacagccgagaaaga

SEQ ID NO: 184133 - RNA, 73 nt, Homo sapiens
gcgggcgaaaagaagggggcgacccgacgaccagcggggccggcacgcacgggacccccccgcggcggcgagg

SEQ ID NO: 184134 - RNA, 83 nt, Homo sapiens
ggaaaaggagaccccgggagccccggcccgcggccagcacggcaacgcagcccgaggacaagcggcacgggccaagggccacg

SEQ ID NO: 184135 - RNA, 79 nt, Homo sapiens
ggcgggggaaccacagacaacaagggaggcgaggacggacaaaaggaaacggacgggaggccagccagcagaaggagga

SEQ ID NO: 184136 - RNA, 81 nt, Homo sapiens
ggagcggagcagccaaagagcaaagcagacaaaggagagacagcacaaccaggggcgcaacccagcaagagaaggacaagg

SEQ ID NO: 184137 - RNA, 75 nt, Homo sapiens
caagcccgccagaaggacccacacaggagcacacgacgaaggaggacagggaacgaagacccggagacacagagc

SEQ ID NO: 184138 - RNA, 78 nt, Homo sapiens
aacaccgggaaggaaggcacggagccggacaacaaaacgagggaagagcaagggacaacagacaccaaacagccagag

SEQ ID NO: 184139 - RNA, 80 nt, Homo sapiens
cccgggcccgggaaaacacacggccaggcacgcaaagaacgcccacaaggcccagaagaagagaaaaaagggaagaaaca

SEQ ID NO: 184140 - RNA, 71 nt, Homo sapiens
ccacgcaccgggggagcgggagcgcggaaagcccccacgaaagcggaggacgaaacaaggacacgggaaaa

SEQ ID NO: 184141 - RNA, 36 nt, Homo sapiens
cacacaacccgacccgacgaggccgcaacgggagcg

SEQ ID NO: 184142 - RNA, 74 nt, Homo sapiens
cggaggaaaaaaagaggcgggaggcgcggcaaaacggcagccgccgcaaagggacgacgaagggacagccagaa

SEQ ID NO: 184143 - RNA, 73 nt, Homo sapiens
gaaaaggcggacagcagcgcaggcaaaaaacagaccgcccagggcgaaggaagcccagaagacacaagacaac

SEQ ID NO: 184144 - RNA, 71 nt, Homo sapiens
aaaaccagaggagagccggcgacagcaagaagaggcaggcggcaagaaccccagggcccacgcgccccgaa

SEQ ID NO: 184145 - RNA, 73 nt, Homo sapiens
ccacccaggcaccgagaaacagagcggagccgcggagcccgggccagaccacaggaaagcgcaggaccccgac

SEQ ID NO: 184146 - RNA, 74 nt, Homo sapiens
ggcaggcgccagacaaccaggcaagcggaagaaccgaacacacaaagagcacaagacccagaaaaaaaggagaa

SEQ ID NO: 184147 - RNA, 47 nt, Homo sapiens
cgcagggcgcccccgaagagaacaagcgcggaggcacagaccggaag

SEQ ID NO: 184148 - RNA, 76 nt, Homo sapiens
ggacgaagcgggcgcaaggacagggggcccccaaagggaagccaaacacaaaggaagaagcccggagacgaccaag

SEQ ID NO: 184149 - RNA, 73 nt, Homo sapiens
gaaacccaagaaaaccacccgggggcacgagacggaacagccccaagccggaaacccaggaacggaaacagaa

SEQ ID NO: 184150 - RNA, 75 nt, Homo sapiens
ggaagccaacagagccggcgggagacccggacagcagagaggagcccacagaaccagcaaacgcaagcgacacaa

SEQ ID NO: 184151 - RNA, 80 nt, Homo sapiens
cacgggacccagcccaggccgcacggacggggggggaccgacccagacccgcccacggaagggaagcagaaaagacaggc

SEQ ID NO: 184152 - RNA, 85 nt, Homo sapiens
acccaagagaagaagaaaagagggacacaacagcagccacaggaaccgacccggcaggcggggaaacgccggagagcaagaaaaa

SEQ ID NO: 184153 - RNA, 76 nt, Homo sapiens
cacagacagaacccgcaccaacccaagaaccccccagagcacaggaacagaggcccccgccccaacccccccccgc

SEQ ID NO: 184154 - RNA, 67 nt, Homo sapiens
aacacgaaaccaagggaagcaccaacaagagcagacagcagaggaaaaccgggacgacaggcaagcc

SEQ ID NO: 184155 - RNA, 82 nt, Homo sapiens
ccggggacgaaagggaaggacaggcagagcaaacaagcgaaacacagacaacacaagggggaaagaaaggaagacacaaagc

SEQ ID NO: 184156 - RNA, 76 nt, Homo sapiens
ggaccaaagggaaccaaaagcagagccaggacagagggcagcggcacaacccagagggcccagcgaccgagaaagg

SEQ ID NO: 184157 - RNA, 77 nt, Homo sapiens
acccagacagcgaccccagagaagcgcagaacaaaaaaggaaacaaaaaagggccaagacagcaacaaggaccacgg

SEQ ID NO: 184158 - RNA, 81 nt, Homo sapiens
gggacacggagcagccagggcggggacaggaggaaagcaaggcaccaaagcccaggacacggacgacaccgagcccaaccg

SEQ ID NO: 184159 - RNA, 90 nt, Homo sapiens
cgggcggaggggacggcaacgagggacgcccagaacggacgcggcagacaagcggaaccagaaccaaaacaaagacaagagaaccacacc

SEQ ID NO: 184160 - RNA, 72 nt, Homo sapiens
gaaaaaagaaacacgaaaaaagccgcaaaaagaggaggaaaaccccagagaaagcaccaagaaacagggcga

SEQ ID NO: 184161 - RNA, 85 nt, Homo sapiens
ggggagcgcccgccccgccgccccacgggaggaggaggcccgcccggccgagaccccgcgggaggcgcaggcgagagggaaggag

SEQ ID NO: 184162 - RNA, 75 nt, Homo sapiens
gaccaccggaggcacaaagagaaggggcaagcggaagagggccaaggcagagcaggaaaacagaggcccaaaaaa

SEQ ID NO: 184163 - RNA, 63 nt, Homo sapiens
gggaggagccgcagcgccagcaccaggaagccccaacagcgggcacccggcaggcagcaagac

SEQ ID NO: 184164 - RNA, 51 nt, Homo sapiens
gcaccacgggggaccgcacaggggcagccaaggccaccgagccacaagacc

SEQ ID NO: 184165 - RNA, 72 nt, Homo sapiens
aaggagcaggggacccggggcagcaggcgaccaccggggaccagccaaaggaagaccgcaggaaagcaggaa

SEQ ID NO: 184166 - RNA, 80 nt, Homo sapiens
gacccggggggagcgcggggcgacgcggcgcagggacccgggacagcggagagggggaaagcccaccgacacccagaacg

SEQ ID NO: 184167 - RNA, 83 nt, Homo sapiens
ggagcccgcgcccgccgcgggagagaggcagaagaagaagagcggagaaccgaacaggcgcagggagcccccaccacagcagc

SEQ ID NO: 184168 - RNA, 54 nt, Homo sapiens
cgagaccaggaaagaagggggcagaagagggaccagaaggaaaacacaccaggc

SEQ ID NO: 184169 - RNA, 63 nt, Homo sapiens
ccagaggggaaaaaagcagaggccagggcgccggagaagagaaaagggaaggcacggaggaag

SEQ ID NO: 184170 - RNA, 79 nt, Homo sapiens
accccggagcaggggaaaaaggaccaaccggcaagggacaacggccaacccaacagcgcagccggaaggggcaaacgga

SEQ ID NO: 184171 - RNA, 76 nt, Homo sapiens
gaaaccaacagcaaggaagcccgaaggggaggagcgaccaggaagaccacacggcccgccacgggccccgcagccg

SEQ ID NO: 184172 - RNA, 63 nt, Homo sapiens
cgacagcggcgagcagaacacggcgagcgggcccgaagaagccgaagcccaagagcacccccc

SEQ ID NO: 184173 - RNA, 55 nt, Homo sapiens
gggccgccagacgggaagggggaacgcccgcggacggcagggcgcgacaagaagc

SEQ ID NO: 184174 - RNA, 72 nt, Homo sapiens
gcgacgcaaagaacggagcaccgcgcaggaggcagcccgcgggacaggagcgaaggaaaaaacagaagacgc

SEQ ID NO: 184175 - RNA, 56 nt, Homo sapiens
gcagagagaaacagcagcggcacccgcagagaaagaggcgaaagcaagaagcgaag

SEQ ID NO: 184176 - RNA, 80 nt, Homo sapiens
cacagaaggccaaaaaggcaaccacagagagagagagggaggggacccgaagacaaaaccacccacgaaagcgaaaagac

SEQ ID NO: 184177 - RNA, 46 nt, Homo sapiens
gagaaggaccaagaaccaggaccgaagaggggcgccggagaggaga

SEQ ID NO: 184178 - RNA, 79 nt, Homo sapiens
acagaaaacccgcccccagcgggaggaaggacccggggaggccggccacgccccgcacgaaggaagaaaccaaacgaaa

SEQ ID NO: 184179 - RNA, 70 nt, Homo sapiens
gacggcgggccagccgggaggggagagccccgcaccccccccagaaacagggcaaaccgccccgggacgc

SEQ ID NO: 184180 - RNA, 74 nt, Homo sapiens
cggccaagcacggacccccgggacaaaaacgaaaaaggcagaagaacgcagacagaagaaggaaacaagaggca

SEQ ID NO: 184181 - RNA, 75 nt, Homo sapiens
aagcagacgagccgaaaaaggcccagaccaaggaaaaaccaaggaggagcagcacagcccggcgaccacaagaac

SEQ ID NO: 184182 - RNA, 55 nt, Homo sapiens
gaccagaacgcagcaacaaagggccaggggaagaaggaagaagaacaggaagaag

SEQ ID NO: 184183 - RNA, 82 nt, Homo sapiens
aggcaagaacggcgcacgacaagcacagaaagaccggacacccgcacacagggaagagaaggacagaggcaaggaggagccg

SEQ ID NO: 184184 - RNA, 75 nt, Homo sapiens
gcgagaggaccaccggggcggcccggcggagcaccggggggaagaagaagggaacaagcggagggacgcacgaga

SEQ ID NO: 184185 - RNA, 84 nt, Homo sapiens
cccgagggccccaagacaggagccccagcagaaaggccgccgcccgcagaaacagcgggaggaagagcagagcagaagagaaga

SEQ ID NO: 184186 - RNA, 69 nt, Homo sapiens
cggacgccgcgacgggggcccgcgaggcgggcagccggggcgccagggcggcgacggcggcgcgaggac

SEQ ID NO: 184187 - RNA, 117 nt, Homo sapiens
cagaggaggggggcgcggcccacgaggcaggggcgaccgcccgccccacccccaaaaaggaggccccaacccgagcacaacagcaaccggccaaacagaggggcgcagcaaacaagc

SEQ ID NO: 184188 - RNA, 66 nt, Homo sapiens
ccggcagggggggggcgacggcgccgaggcgcggggggaagaagcggacccaagaagggcagaccc

SEQ ID NO: 184189 - RNA, 71 nt, Homo sapiens
gcgaaagcggagagaagaggagacaccaagcacaaaaaggacagaccaggagggccggaggacccaagcgg

SEQ ID NO: 184190 - RNA, 74 nt, Homo sapiens
aaagggaaggagaaggagggacgcaggcgcaggccaggagaccagaaagcgggcaacaccaaccgagacgcgag

SEQ ID NO: 184191 - RNA, 83 nt, Homo sapiens
acacaccagcagcagagagaggaccaacaagagaaggcacgcagggccagcgggaccagagaaccaaccccagcacccgggaa

SEQ ID NO: 184192 - RNA, 77 nt, Homo sapiens
ggaaagcggcggacagccgaagcaaggaccgggacacccagagcaaagccggaaagaacacacggcaccacagcaca

SEQ ID NO: 184193 - RNA, 77 nt, Homo sapiens
aaggggaaaaaagaagaagagaaaagaggcacgaacgagacccacggcacgaaagggcaccagcaacacagaacaaa

SEQ ID NO: 184194 - RNA, 77 nt, Homo sapiens
agaaacccccagacaagaaagaggaacgacgcagggaagcacggccgaaagggaaaaaagagaaaggcaccggagag

SEQ ID NO: 184195 - RNA, 86 nt, Homo sapiens
cgccgacagacgcccgaggacccagaggaaacccagccgccggggccccggcggcaggcagcagcagcggaaccgcaggcaggggg

SEQ ID NO: 184196 - RNA, 72 nt, Homo sapiens
gccagggaaaggccacggaagagcgcggcggccgcgcgaaaggccaaccggcgccaaacgccccgggcccac

SEQ ID NO: 184197 - RNA, 78 nt, Homo sapiens
ggccgggccggggggagccggcggacgcgcgagacgaggacgcgcacaggaaaggacgcggaacaagcaggcagccag

SEQ ID NO: 184198 - RNA, 78 nt, Homo sapiens
ggcagaagcagagacaccaggacagaaaagacaggcgccaggagcacagaagagcgaggagccgcccagccaacccgc

SEQ ID NO: 184199 - RNA, 84 nt, Homo sapiens
gagagagaagagggcagagccggcaggggcgcccccaggaccgagcaggaaccggagcaggaagcgccacgcagagagcaaggc

SEQ ID NO: 184200 - RNA, 76 nt, Homo sapiens
gacaccgcacagccgggaaaggagcgaagaaaccgcaaaggggagaaaaacccgaacaccagggagaagcaaagac

SEQ ID NO: 184201 - RNA, 48 nt, Homo sapiens
ccacagcccaacccccggcacccccaaagacgcggaaggcagaacagc

SEQ ID NO: 184202 - RNA, 79 nt, Homo sapiens
cagccgcccaagccgcacagccgcggcggcagcagcaggagaggggcccccggagggccacaagccagagcgccccggc

SEQ ID NO: 184203 - RNA, 57 nt, Homo sapiens
agggacgggccagcaagccgggcgaaagacaacaggccaggccacacaagccccagc

SEQ ID NO: 184204 - RNA, 78 nt, Homo sapiens
gaagacacaccccacaggaccccagagcgacagcccgggacaccaagaaagaacagagcagcaccagcagaagagggc

SEQ ID NO: 184205 - RNA, 73 nt, Homo sapiens
ggagaagcaccgcggagcagagagaggacggagggcccgagggcaggacagcaggcaccggcgaagcacagag

SEQ ID NO: 184206 - RNA, 105 nt, Homo sapiens
gggccgccgccgccaagaagaaaagcggggaagacacgaaccacccggagaggcaggggaccaggccaaccggagcgcacccacgccacaagccggacggcggca

SEQ ID NO: 184207 - RNA, 36 nt, Homo sapiens
cacaacagagcgaggaacaaacacaggaagaaacgc

SEQ ID NO: 184208 - RNA, 78 nt, Homo sapiens
aaggcgaaggaaagcccccagcgaaccaccaagagggcagccacaaaaaacgccacgccccaggaaggggacaaggcg

SEQ ID NO: 184209 - RNA, 62 nt, Homo sapiens
gcggcgcccgcgcacgcgcaagaccgcgaggcgagacccggacggcaggcgccggaccaacg

SEQ ID NO: 184210 - RNA, 87 nt, Homo sapiens
aggcggaggagacggcggcccgaggaggcagaaggaccgagccgacgcgggccgcgcgggaaaacacacgagcgccagaaacacgag

SEQ ID NO: 184211 - RNA, 79 nt, Homo sapiens
cggagccaggcacaagaaaagcagacacggcccgggcaaacagcagaacgcaagaggggaaccacccaccgagcgcacc

SEQ ID NO: 184212 - RNA, 81 nt, Homo sapiens
ggcagaggcacgcaaagacgacggaacaacagcaggacccccagcacggggccccccaagaacagcacagcaagcccccag

SEQ ID NO: 184213 - RNA, 69 nt, Homo sapiens
ggccaaggggacgagcaaaggaagcgcgaacagcagcgcagccaaagaacacggcagaagcccccaagg

SEQ ID NO: 184214 - RNA, 76 nt, Homo sapiens
cggcgcgcccgcgcacagagcaacaaccgggccacaagagaaagagcacggcacgagcaaaaaaaagccccgagca

SEQ ID NO: 184215 - RNA, 71 nt, Homo sapiens
ccgggcaccagccagcaaaccagagaaagaaccgcaacagaacgagcggcccaacagaggacaacgaaaaa

SEQ ID NO: 184216 - RNA, 74 nt, Homo sapiens
ggagagagggcgccagcgaagaccaccggaaaaccaagcagggacaagcacaccagaaaaaaccgagcagaagg

SEQ ID NO: 184217 - RNA, 89 nt, Homo sapiens
ggacacaaacggacagcgaggacaaggacaaagaaggcaaaccccgcgaaggcccgaaaaccagaacagcaaccgcccacaggaagaag

SEQ ID NO: 184218 - RNA, 65 nt, Homo sapiens
acgcagggcgcccccggaagaaagcaccagcgggcaacaagaaaggaaggccacacggggggccc

SEQ ID NO: 184219 - RNA, 66 nt, Homo sapiens
cgaggaggaggcggagcggggcccgacggcaggcagcggaagagaaagaccgaggcaaagaagcag

SEQ ID NO: 184220 - RNA, 59 nt, Homo sapiens
agagaaagggcaacccacgagagaacagaggcagaggggcgggcaaaggagaggcacag

SEQ ID NO: 184221 - RNA, 74 nt, Homo sapiens
ccccgcccccgcccgagcggagagggaacccccagcaagaggcccaccccaaaccaggaacacagcaccaacag

SEQ ID NO: 184222 - RNA, 81 nt, Homo sapiens
cgcccagaaaaaggaggaccggacagcccgccgcaggaaaaacagaagagccgagggagcaacggccacaggaagcgcgga

SEQ ID NO: 184223 - RNA, 78 nt, Homo sapiens
agcagccgccaggccgcccgagccggagacccgcaccaaggaggagacacgagccggccgagcagaccgaccacaccc

SEQ ID NO: 184224 - RNA, 77 nt, Homo sapiens
cgaccacacaccagaaccggaggaggaccgcggagggaacaccgcccgggaggagcggggacacgaggaccccccaa

SEQ ID NO: 184225 - RNA, 70 nt, Homo sapiens
caaccgcccaggaaacagcccaaaaccgccgcgcgcgaccaaagcccacccgggaacgccagaggcggca

SEQ ID NO: 184226 - RNA, 71 nt, Homo sapiens
gacaaaacccgagccggcaccaaaagggagacaccaggcgcaccagggaaaaaccaggaacgaggagcacc

SEQ ID NO: 184227 - RNA, 67 nt, Homo sapiens
agcaggccgcgcggcgagcgacccggccaaagcacgcgaacaaggaggaacaagcacacagagacgg

SEQ ID NO: 184228 - RNA, 52 nt, Homo sapiens
aaggaccaagaaccaggagaaaaccggaagagaaaggccgggaagcaggaaa

SEQ ID NO: 184229 - RNA, 70 nt, Homo sapiens
caacaaacaaaacagcgggaagggaacaagccaaaccagcagaccacagcacaggcaccggacgggacag

SEQ ID NO: 184230 - RNA, 74 nt, Homo sapiens
ccgagccgcgggcccgcagaggacaagaagggcagagaagccagaacggagaaacaacgaagaccaacacgaag

SEQ ID NO: 184231 - RNA, 83 nt, Homo sapiens
aagcacccaggaaccggcaacagaaaggcagacccggcaccacagggaaaacggggcaagcccagaaacaccccaccaccacg

SEQ ID NO: 184232 - RNA, 76 nt, Homo sapiens
ggcaggggcggaggcggaggcagaggggaggcgcgaaagacgagcaagaagacaaacaagggaaggccgcacaggc

SEQ ID NO: 184233 - RNA, 65 nt, Homo sapiens
aagacaaggacaccaaaggaagggagagggaagaccagagcgaaacgaagccgcacacgacgggg

SEQ ID NO: 184234 - RNA, 38 nt, Homo sapiens
ccgccaagaccagccgggcacggcagcggacaggacac

SEQ ID NO: 184235 - RNA, 85 nt, Homo sapiens
ggcgagcgcggcgagacgccagccacccaggacagcagcggacggccggaccaagaggcgccgccccccagcaaacgagaaaaac

SEQ ID NO: 184236 - RNA, 76 nt, Homo sapiens
cagagccggggccaaccacccgcccagcccgggcacgccccgccgacaggccaagccgacgccagcgggcgccacc

SEQ ID NO: 184237 - RNA, 80 nt, Homo sapiens
gcacccaggccgcacacacgcagagccgccggggccacacccggcagcccccccaggccaccgaggagcgaccgagcccc

SEQ ID NO: 184238 - RNA, 84 nt, Homo sapiens
aggcccggacccgcggcgcagacgcacccgcagcccccaggccgcccagcagccgcgccagccaggaaacccaccagagaaggc

SEQ ID NO: 184239 - RNA, 64 nt, Homo sapiens
cagcggggacaggcagcagaccacacacaaaaccacccgggaaccacacgggaaccccccacga

SEQ ID NO: 184240 - RNA, 73 nt, Homo sapiens
gacagaccgcaagggaccaaggacaggcagaggggcgggcaaaggagaggcacaggaagcagaggcaagaaac

SEQ ID NO: 184241 - RNA, 71 nt, Homo sapiens
ccaagcaaaagaccacaaaacagcagcaagaacacgaccaggaaagacagacaggcccagaggccaccaga

SEQ ID NO: 184242 - RNA, 77 nt, Homo sapiens
gccgaccacaaggggaggacaaccgcccgggaccagaaagcagggcgcaggcgaaaccgggccccaacagaggagag

SEQ ID NO: 184243 - RNA, 77 nt, Homo sapiens
ccgggccccgcagcggaaccggacccagcccgagccgccccacacccacagagacaaccaggggaccgcaggcgcac

SEQ ID NO: 184244 - RNA, 63 nt, Homo sapiens
ggagcccaggaacggccggaggacaggaggaagaaggcaccacgacaaaccggagccgagggg

SEQ ID NO: 184245 - RNA, 86 nt, Homo sapiens
caagagccaaccgagggcgccgagaagccagcacgccgggagcggacacagcccaggaaacggagaggcgggcggaccaagacccc

SEQ ID NO: 184246 - RNA, 76 nt, Homo sapiens
accaccaaaggggaaacagaaacaagaggacggaggagcacccggagccagaccgccacgccaaagacgccagaaa

SEQ ID NO: 184247 - RNA, 77 nt, Homo sapiens
aaggggcaagacgggcagcgcaggggcgggaaagacccaggagaagccgcccaaagaacgagaaagggcgcaaaaag

SEQ ID NO: 184248 - RNA, 83 nt, Homo sapiens
gagagcacagccaggagcccccccgagagcgaggagaggacggaccccgcacacaggcgacccggcacggccacccacccccg

SEQ ID NO: 184249 - RNA, 81 nt, Homo sapiens
ggcgccgccgggcggccgggcgcggcgagcccagacagagccaccccacgcccagacgaggaggaggacacgccacgcagc

SEQ ID NO: 184250 - RNA, 70 nt, Homo sapiens
aaccagcagcgcccacaccaccaaacagcgaagcaaaccaacaccccccgggaacaagaaggcagcacac

SEQ ID NO: 184251 - RNA, 87 nt, Homo sapiens
gggcccgcccgccccagagccgagccaccaaagcacaaggcagaaaggaggccaagaaggacaagaaggggagaagaaaagaaacgg

SEQ ID NO: 184252 - RNA, 80 nt, Homo sapiens
agaaggacggccaggagcgaccagacccacaagcaaaggagaagcaggaagacccacaggaccgcgaacaaggaggccac

SEQ ID NO: 184253 - RNA, 77 nt, Homo sapiens
acccgaggcagcgacacaagcggacagaacagacgggacccccagccaaaggcaaagaacgaaaacaaacggaagag

SEQ ID NO: 184254 - RNA, 74 nt, Homo sapiens
acgcaaaccgagccccgcgccgcagaaaaagcggggaaggggggcaaaaaaaagaagcaagcgaagcaccgagc

SEQ ID NO: 184255 - RNA, 74 nt, Homo sapiens
gcgaaccggcccaccgccgcccaaccgcggaccgagagaagaaccacgcccagcgccaggaggagggagacagg

SEQ ID NO: 184256 - RNA, 73 nt, Homo sapiens
gacagaagagggcaaaggcgggacgcaggaagaacggcgggcacagcagcagaaacaacggacacccccggga

SEQ ID NO: 184257 - RNA, 74 nt, Homo sapiens
cgccgcccggccggcgaggcacgggaaccggagaggacacagcagaagagaacacgcccgaaggagcccagaga

SEQ ID NO: 184258 - RNA, 77 nt, Homo sapiens
caccgcgcggagccgcagagcgggcaccagcacgcaaagaaggaagagggccgaagggacacgcaaaagcgaccagc

SEQ ID NO: 184259 - RNA, 71 nt, Homo sapiens
cacagaggacacgccaaagagaggaaccccaggcaaaccgacacacggaaggacggaaggaaaagaaaaac

SEQ ID NO: 184260 - RNA, 76 nt, Homo sapiens
gacaggaggagacaggcgagagaggaggacacgaccgacagggcacccaaaaagagaggcgagaacacggaaagcc

SEQ ID NO: 184261 - RNA, 87 nt, Homo sapiens
ggggccaggcaggacccaacgacaggcgccccggcccaacgggagaacagcagcgacccgaaccgcagacggagaacaaaggcagcg

SEQ ID NO: 184262 - RNA, 70 nt, Homo sapiens
accaagaagaggggccgaaccagacaacagggaagaagaaggcaagaaggaagaaaacaggaaaagagaa

SEQ ID NO: 184263 - RNA, 69 nt, Homo sapiens
ggagcaggggggaacccaccaggagagagaggcggaagggaggaggaaaccgaccaaacacggagggac

SEQ ID NO: 184264 - RNA, 72 nt, Homo sapiens
aggcgacgagagcaagccaaagaccaaggggggggcacccccacaacgagagaaaccgaagaaggcccacac

SEQ ID NO: 184265 - RNA, 68 nt, Homo sapiens
gaaggcacacaacgacccggacagcgaccgcaagaagaaaaagggaggcaaggaagcggagacgacaa

SEQ ID NO: 184266 - RNA, 64 nt, Homo sapiens
gccacccggagggacacacaggaagaagccgggcagacaaacccagaaagagaaagaaaagcag

SEQ ID NO: 184267 - RNA, 91 nt, Homo sapiens
accccacaggaccccagagcgacagcccgggacaccaagaaagaacggagagaaggcgcgcaggagagcgcagagacccgcccggaagcga

SEQ ID NO: 184268 - RNA, 76 nt, Homo sapiens
ggagaaaagacccggccgagggccgggaacccaacaagggagcaaacagagaaagaacccaaacacacagaaaaac

SEQ ID NO: 184269 - RNA, 75 nt, Homo sapiens
gccagccacacagacagagccacgaaaacgcaaaggaaggacagacccacccagaaagcccaggaaagagacacg

SEQ ID NO: 184270 - RNA, 71 nt, Homo sapiens
aagcggggcagaccaagcaacacagaagaaacgacaccagagcccggcgaaaaacagccaagagaaaggag

SEQ ID NO: 184271 - RNA, 72 nt, Homo sapiens
ccgaagggcgggagggggacacagcaggacacagggacccaaggcagcaagacacggagcaaagccagacgg

SEQ ID NO: 184272 - RNA, 66 nt, Homo sapiens
aggaggaggcagcaccacagaaagagaggccgaggggcccgaagcaggcgcccccagcaggccagg

SEQ ID NO: 184273 - RNA, 70 nt, Homo sapiens
acagggccagcacgccaccgggaaggcggggaggaggccccaaagggcgagacagcagaaagagcaggac

SEQ ID NO: 184274 - RNA, 69 nt, Homo sapiens
cacacaaaccgaaagccaccaaagcaaaaagcgaagagcacaaggagaagaaagggcagcaagacacga

SEQ ID NO: 184275 - RNA, 54 nt, Homo sapiens
cacggacacacaaaaagaacgccccaggggccccccaccaagacacacggacaa

SEQ ID NO: 184276 - RNA, 78 nt, Homo sapiens
ccaaggcgacggcgcccccgggcagacaccggcggcgacgaccacaggagggcggagaacggaaaagcaccaggaagc

SEQ ID NO: 184277 - RNA, 72 nt, Homo sapiens
acccccggaggaaaccggcagaccccagacccaaacaacggcagaagcaggacaaacaggcgaaacaacgcc

SEQ ID NO: 184278 - RNA, 79 nt, Homo sapiens
gggagagaaaaaacccagcgagaccgggccggaacgaaagcaggacggaggagcgaccaccgggagaagccaaaggcca

SEQ ID NO: 184279 - RNA, 80 nt, Homo sapiens
ggcccgcccggacaccgagacaaccaggaaaccgagcggcaccgcggcccccggggaccgaaggaagaagacacaccagc

SEQ ID NO: 184280 - RNA, 75 nt, Homo sapiens
gacagcgccacggcgggccgcgggaggacaccacccacagagaaaccaggcggggaacaagccagcagcccaagg

SEQ ID NO: 184281 - RNA, 61 nt, Homo sapiens
aacccccaacgaagcaaagaagagcggacgagaaccaccaccgaccaggcaccggagacca

SEQ ID NO: 184282 - RNA, 70 nt, Homo sapiens
agccccccaaagccggaacagagggcccacgccaaaaagggaaaaaagagagccacgacgaaagcaaaca

SEQ ID NO: 184283 - RNA, 53 nt, Homo sapiens
aaaaacagaagaggcggcagcagaagacggggagaaggggaggagacaaaaag

SEQ ID NO: 184284 - RNA, 75 nt, Homo sapiens
cggcgcggaggagcgaggcagcgacaggacgggaacggggacgggagaaagaacagacaagccgcaagaaccggg

SEQ ID NO: 184285 - RNA, 56 nt, Homo sapiens
gaccaagggggccagaaaccccggccaggacacagacggaagggagggccacccac

SEQ ID NO: 184286 - RNA, 79 nt, Homo sapiens
cggggaggacccacacagaggccagcaggaaggggggagaagggcggaggaccgcacaccagcgcaagaagacaggacc

SEQ ID NO: 184287 - RNA, 59 nt, Homo sapiens
aagacggggcgccccacagaggggcgacgcaggacaagggaaaaggagaaccccagcgg

SEQ ID NO: 184288 - RNA, 36 nt, Homo sapiens
ccccagcagaacaccagcgggccaaaggagaaacaa

SEQ ID NO: 184289 - RNA, 58 nt, Homo sapiens
gcaaagcacggccaccaggccccgccccaacacaggaggagagaaagaacccacgcag

SEQ ID NO: 184290 - RNA, 63 nt, Homo sapiens
gacagggccgccgcgccggaccaaaccagacggcggaaaacggggacaccggaccggacccgg

SEQ ID NO: 184291 - RNA, 38 nt, Homo sapiens
gaacaagagcggacaggaagcacccggaggagaagagg

SEQ ID NO: 184292 - RNA, 72 nt, Homo sapiens
ccacgcaacaaaagcgacaccggagagaaaggggcaaaaagacccaaagagacagagaacccccaagcccag

SEQ ID NO: 184293 - RNA, 72 nt, Homo sapiens
cccagccccgagagcgggacacaggaccaaaacagggaaggaagaaccaggagggaaaaccccagcgggcag

SEQ ID NO: 184294 - RNA, 71 nt, Homo sapiens
cacaaggagcgagcagaacacacagagccaccaggacagcagaccacagcccggcaggcccaaaaacccaa

SEQ ID NO: 184295 - RNA, 86 nt, Homo sapiens
acagccaccccgagaggcacaggagaaagcaaccaaaacacagcccaacaggcgcgaacggcggaggcaaaaaaggagaaagaaca

SEQ ID NO: 184296 - RNA, 55 nt, Homo sapiens
ggaccaaagcggaccagagacagagagccaagaggaaggaagcccaacaggagaa

SEQ ID NO: 184297 - RNA, 69 nt, Homo sapiens
gggccgcaggcggggaccagaggaaccccaggcacacgacggaagagccaggcggagcgacaaaacgca

SEQ ID NO: 184298 - RNA, 34 nt, Homo sapiens
gccggaaaggcagccaaagaggcccgaagcccga

SEQ ID NO: 184299 - RNA, 65 nt, Homo sapiens
cagagaggggcaccccggggacaagccgcaccacgccaaggaaaggagcacccgaagaagacaag

SEQ ID NO: 184300 - RNA, 80 nt, Homo sapiens
gcggaggagcaagccaccgccaaaaggcaaaggacgcagcgccccaccagccggaaaggcaagcagaagaggaacagaag

SEQ ID NO: 184301 - RNA, 72 nt, Homo sapiens
aaaacacggggaggaaagaagaaaaacagaggggcgcaaaggaaaagcgaacgaaacagcagaagaaagaag

SEQ ID NO: 184302 - RNA, 42 nt, Homo sapiens
gaagagcgccagacccacaggagaagacccgggaaggcgaca

SEQ ID NO: 184303 - RNA, 79 nt, Homo sapiens
ggaaccgccacgaacacagccagagaccgcgacaaagggacccaaaaaggagggaaaaggccgagcgaaaccgaaccca

SEQ ID NO: 184304 - RNA, 43 nt, Homo sapiens
ccggccccaacacggaccgaggagccggcgggcgcccgcaacc

SEQ ID NO: 184305 - RNA, 55 nt, Homo sapiens
ggggcagacagacagcggaacgggagcaaggaggagccaccaagcccgaaggagg

SEQ ID NO: 184306 - RNA, 77 nt, Homo sapiens
accaccagcccgcccccgccccaggacagagcccggcgcaggggggacaggagggcgcagagccaggaaaggcccga

SEQ ID NO: 184307 - RNA, 73 nt, Homo sapiens
gggaaacaggccaccgccccccaaggcacggccgagccccaggaggcgaagagacagcgagcccgaaggagcc

SEQ ID NO: 184308 - RNA, 53 nt, Homo sapiens
aagagcgcagcggggacaaggcccacgggccacgcccacaaggccaaccaccc

SEQ ID NO: 184309 - RNA, 81 nt, Homo sapiens
cggggccgcggacgaggaccagcagaggccagcacgagaacccagaggcagcgagaagaaaaagaagagagagacacggac

SEQ ID NO: 184310 - RNA, 78 nt, Homo sapiens
ccagggagggcgcaagagcagcgaagagcaggaggaggaggagcagaggcggaaggcccccaagcggggcagggaacc

SEQ ID NO: 184311 - RNA, 79 nt, Homo sapiens
ggcgcgcgcccagcgccgccccgcgcgcgcccgccacggcgccgagccgcggccgaccagagacgcgcacgaaacgacg

SEQ ID NO: 184312 - RNA, 75 nt, Homo sapiens
acagcacaagcaaacaaagaacggccgagcgaccaggagaggagcccccgcccgaagaccggggagggcccccca

SEQ ID NO: 184313 - RNA, 75 nt, Homo sapiens
aacgcagcggcccaagcaaacagggacccagaaagcacaagcgacgaagaggaggcccggccgcagggcgggcgg

SEQ ID NO: 184314 - RNA, 67 nt, Homo sapiens
ccgagcaagcggccaaccaccagaaaccgaagagccccgaaagcacaaagcagaccaccagacacag

SEQ ID NO: 184315 - RNA, 85 nt, Homo sapiens
gacggggggggccgcgcccggccccgcgcgggcggacggcggaggcgcccccaggcgggggagcgggaggagccagagcacaccg

SEQ ID NO: 184316 - RNA, 58 nt, Homo sapiens
cggggccacagaggccccccagcagaccaggcggggagacagagaaaaaaaaaacacc

SEQ ID NO: 184317 - RNA, 81 nt, Homo sapiens
cagaaagaagaaggaaagaggcccagaagacgccagacaccacgaagggcacacaagcccacagacacacccaaagcagcc

SEQ ID NO: 184318 - RNA, 73 nt, Homo sapiens
accgaggacggcggccggagggcccacaagaacacaaaccaggcccaggaccaaagacagagacaagcgggga

SEQ ID NO: 184319 - RNA, 88 nt, Homo sapiens
cagagccaggccaagggaggggcaccgaaggacagacaaagggaccaaaagaacccagccaacccgcagagggaggggaggggcgagc

SEQ ID NO: 184320 - RNA, 84 nt, Homo sapiens
ccgcccggcccgcgcacgagcccacgcccgaccccggcgcacgccaggggaccaaaagaacccagccaacccgcagagggaggg

SEQ ID NO: 184321 - RNA, 101 nt, Homo sapiens
gacagggagacgaagaacccaagaagcggagcaggaaggcaaaccagagacgcggccacgccagaacagccacagccagcaaagagaagggaagaagacga

SEQ ID NO: 184322 - RNA, 63 nt, Homo sapiens
cgcacagcagcagccgcacacagaccggaacccgagaagaagcgaagaggaggcggaagccgg

SEQ ID NO: 184323 - RNA, 78 nt, Homo sapiens
aaccacccagcaaagaagcaagcagccaaagacgggccgagacccaaggccaagggaaagggggagcggagcaggggg

SEQ ID NO: 184324 - RNA, 69 nt, Homo sapiens
cccccagccagggaacacggaaggacagaacggaaaagagaaaacaaagccaccaaaggacaaagcaaa

SEQ ID NO: 184325 - RNA, 63 nt, Homo sapiens
gaaagaaagcagagacacaaccagcacaaggagaaaagagcagaacacaagggaaagaaagaa

SEQ ID NO: 184326 - RNA, 78 nt, Homo sapiens
acagagggagccaggcagaggacccaaggccagccagccccaggcaccagcggacaggacagggaggacgaaggcccc

SEQ ID NO: 184327 - RNA, 73 nt, Homo sapiens
ccagaagacagagggcgagacccaggggcgccagcaaagggaagaaaccccaacaggacccacacgacgggaa

SEQ ID NO: 184328 - RNA, 66 nt, Homo sapiens
cgggccccgggaccgggcgggaacccgcggggagcgggacacgaacggaccgggaaaaccggaggc

SEQ ID NO: 184329 - RNA, 79 nt, Homo sapiens
agaaggagacggaacgcacagaggaacgagcgagcggcagagcgaagcccgggggaagacacagaaccgaccgccaagc

SEQ ID NO: 184330 - RNA, 72 nt, Homo sapiens
gcgcgcaccagaggagggcccagagcgcgagggggcagccggcacccgcacaacccagggggccgaacccag

SEQ ID NO: 184331 - RNA, 83 nt, Homo sapiens
ggacggggccggccgccacagagacacgcagcggccgaggcaggggaagagagcggccccggacacgcgagcggcggaaccgg

SEQ ID NO: 184332 - RNA, 29 nt, Homo sapiens
gcagggcgcccccgcccggccacccccag

SEQ ID NO: 184333 - RNA, 50 nt, Homo sapiens
cccggcgacgacgcccgaggacgcacaggagaagcagcaggacagcgcac

SEQ ID NO: 184334 - RNA, 77 nt, Homo sapiens
cggccaccaggccccgccccaacacagggggggaccggcgcacggagagacgcgcgcggccacgccagcgcccgcac

SEQ ID NO: 184335 - RNA, 87 nt, Homo sapiens
cggcgggcccgaggcggcgagagaggcaggcggagccgaccgggccaggcaaccacgagaaaacggaaccgaaagcaagaggacaag

SEQ ID NO: 184336 - RNA, 74 nt, Homo sapiens
gccaaccagccacagcccaccgaggcaccacaggccaagaacccaaagcaaggcgagacaaggggccaaccagc

SEQ ID NO: 184337 - RNA, 70 nt, Homo sapiens
caccaacgcacagaggcagccagagggaggggacacgcacgaagacaggagaaaccagaggcaagcgacg

SEQ ID NO: 184338 - RNA, 76 nt, Homo sapiens
acccacgggccagagcagcagaaacgcagaagagaagaagggcacagagacgcaaaaccgcgccacacagcgccca

SEQ ID NO: 184339 - RNA, 103 nt, Homo sapiens
cggcgaggaggggccccagcagcccccgaaggcccacaggacaggagagaaagacgaagccgaggccgccagcgccaagaaaaaaacaaggccaaagccagcc

SEQ ID NO: 184340 - RNA, 75 nt, Homo sapiens
ggcgcgcgcgcgcgcgcagcaccaggagaggagggaacgcggagcggggcgaagcagcaaaacacacagcccccc

SEQ ID NO: 184341 - RNA, 90 nt, Homo sapiens
cgggagagagagagaggaagaggaccaggaccaaggcaagcagggcgagacaggggcaaagcgacccagggagagaaagcacagaagagc

SEQ ID NO: 184342 - RNA, 68 nt, Homo sapiens
acgcgccgaaacaccaaaagcgggggaagaagagaggacgcgccgacaccaggaacgccaaccccagg

SEQ ID NO: 184343 - RNA, 82 nt, Homo sapiens
caccagggcccggaggaggccaagaacgcagaacgcccccagacaaggccagcgcgagccagagacaacgagaagaagggga

SEQ ID NO: 184344 - RNA, 76 nt, Homo sapiens
ccggaagcgcccgaggcccgggcccgcgggggcaaccgggcgcagacgaggcaagaacggaagcacgggcggagga

SEQ ID NO: 184345 - RNA, 67 nt, Homo sapiens
agcccccccaccgacgcggccgagagaaaaaagccggcaccagagacggaacagacaacacaaagag

SEQ ID NO: 184346 - RNA, 73 nt, Homo sapiens
gaacccgacaagaccaagacacccaagcaaagaggccagacacacgcggccccacaaagaaaacagaggagga

SEQ ID NO: 184347 - RNA, 79 nt, Homo sapiens
gggcagaacccagaggcgggaggggccgggaggcagaggggcaggggaggccaggagcacagaaacacccaccaggagc

SEQ ID NO: 184348 - RNA, 65 nt, Homo sapiens
gagacaaaagagaaagcaggccacgaaaacacaagggcccacaggccacccgccagacgcagcgg

SEQ ID NO: 184349 - RNA, 79 nt, Homo sapiens
cccggcagccaccccacgggaacggaccagcaccaccacagccagccagaacagaaggcccgaaccaggcacaaccgcc

SEQ ID NO: 184350 - RNA, 101 nt, Homo sapiens
gagcaccacggaccccaaggaagccacggcagacacacaacccgacccgacgagaaggggaggagcacagaacgccaggaccaaaacagggagaaacacag

SEQ ID NO: 184351 - RNA, 79 nt, Homo sapiens
agcagccaccgcggaggacgagcgccgagaaaaccagaaggcaccgacaggaaaggaaaaggagaaccaggcacccggg

SEQ ID NO: 184352 - RNA, 69 nt, Homo sapiens
aaggggaagacagggacggaccacgggaccaagcagacaaaccaagaacaggggcaaccgcgcaacggc

SEQ ID NO: 184353 - RNA, 51 nt, Homo sapiens
ggagaaggaccaagaaccaggcgcgccccaaccgaagaccaagacgggaca

SEQ ID NO: 184354 - RNA, 81 nt, Homo sapiens
gaggcaccgggacggaccgagaccggaccgagagcggaccgagagcgcgaaacgcacgagaagcacaggagcgcccagcag

SEQ ID NO: 184355 - RNA, 75 nt, Homo sapiens
agcccgcccaggagcggcggagccgggaggacgcgaggagcccagacacaagggcaacaaaccagaaccggccaa

SEQ ID NO: 184356 - RNA, 63 nt, Homo sapiens
cgaacgagacagaacaggaaaaagggccacgaacgacgcacggaggccacaacaccacaccac

SEQ ID NO: 184357 - RNA, 58 nt, Homo sapiens
gcaaacacaggaacccaacgagccaaagaccaccacccggaacgccgcacagaccaac

SEQ ID NO: 184358 - RNA, 82 nt, Homo sapiens
gcagccgaggccgcgaacgcacaggaggcagagccagagcccaagcccccgcagggagcccaccgcgaccaggaccaccgcc

SEQ ID NO: 184359 - RNA, 40 nt, Homo sapiens
aaacagcagggacagaagaggagaaaggcaggccagccac

SEQ ID NO: 184360 - RNA, 69 nt, Homo sapiens
gcgaaaagagggcccagagagaaagaggcccacacgggaagagaccagccacagaagcaggagggcgga

SEQ ID NO: 184361 - RNA, 77 nt, Homo sapiens
aagaaagaaacgccaaaagcaccagagcaccacagagaagcagaacagcgcgaacacggcacaagcagaggaaccag

SEQ ID NO: 184362 - RNA, 74 nt, Homo sapiens
agcgcgccaggccgacagccgcggccgggcccgaggagaagggcccagacggccacgaggacgggccaggagaa

SEQ ID NO: 184363 - RNA, 76 nt, Homo sapiens
agaggcaaccacgcccaagcaagcggcccgaacacagaacccaagaaggaggacaacacagagaaccggaaagaac

SEQ ID NO: 184364 - RNA, 81 nt, Homo sapiens
gaagaagcccacgcaacgccacgggaagacacacaggacacagagaagggacgaggacggccaaacaagaggcaccgaagc

SEQ ID NO: 184365 - RNA, 68 nt, Homo sapiens
cggacgagaacggagagaacgcggaaggagacggagaagaagagagagacgaggaaagaaggaagcag

SEQ ID NO: 184366 - RNA, 72 nt, Homo sapiens
gacagaaggagcaggaaccaaagggcaacagcgaacagagcgccgccaaggacgaaagaagacagagaagca

SEQ ID NO: 184367 - RNA, 80 nt, Homo sapiens
gaaaaacaccagaacggagaggggcggggacggaaagagagccgcagcgcagaacaagggaaaaaagggcaaaaagggca

SEQ ID NO: 184368 - RNA, 59 nt, Homo sapiens
cggacaagaagacaaccggcgaacggcgcagggaggccggggggggcacagagccccgg

SEQ ID NO: 184369 - RNA, 71 nt, Homo sapiens
ccccgcgccgccgaccccccggcgccgcgccggcggcgggggcggggaagagacacagaagggaggcgagc

SEQ ID NO: 184370 - RNA, 68 nt, Homo sapiens
caaggcggaaaaagacaccaccaacggaaaacaacacaggagaagccgcgggagcggaagacaggccc

SEQ ID NO: 184371 - RNA, 71 nt, Homo sapiens
aaaaaaacacaccaacccgacaggcgaacaggaacgaaggggccgcaaggccaggcgcgcagaggcaccca

SEQ ID NO: 184372 - RNA, 81 nt, Homo sapiens
aaggagggaggcccgaggaggggacggaggcaacggggacacgcacgagaggccggacgcggggcagccgaacccagcacg

SEQ ID NO: 184373 - RNA, 80 nt, Homo sapiens
aaagcgagcgcgaggaaaaggcggcgggagaccaagcaaggaaccagcgagcaaacgcaaacacaacagaaaaaagaaaa

SEQ ID NO: 184374 - RNA, 83 nt, Homo sapiens
cgcgcagcgcgggccccgcagaggaaggaagccggcgggcgggccagcaagagacgggagaagggccgcggacagcccgccag

SEQ ID NO: 184375 - RNA, 99 nt, Homo sapiens
gaaacacggcggccagggccgcggggaccgaaaggacagaacaggaccggaaagacaaacccggggcaaaaagggggaacgcaggaggcaacgaacggc

SEQ ID NO: 184376 - RNA, 75 nt, Homo sapiens
agccacaccaacaccgccacccagaggggccggccaccccaacccggaaacagaacgacagcccgcaccgacgcc

SEQ ID NO: 184377 - RNA, 79 nt, Homo sapiens
ccggagagacgaaccgaagcgggcgggcccccccacccagaggcagcagcacccaagaacggccgacgcacaccggaga

SEQ ID NO: 184378 - RNA, 84 nt, Homo sapiens
cacaaccacaacacccccgggcccccaagacacaccaccgagcggccggacggcccggcaggagggcaagcaggcggaccgccc

SEQ ID NO: 184379 - RNA, 71 nt, Homo sapiens
ggaccggaaaacagcggcgaccagcagaacggagggaacggaagaggacccaaaaaagaagaaaaggcgcg

SEQ ID NO: 184380 - RNA, 73 nt, Homo sapiens
gaagcaaaacaagaaagaggagaaacgacggggacaaagccgcgaaaaggaacccacaaacaccacacaagag

SEQ ID NO: 184381 - RNA, 74 nt, Homo sapiens
gaccggaagcacacaacaggaaaacaaaagaggagaaagagcacccagggcagacaccacaagaaggagagcag

SEQ ID NO: 184382 - RNA, 65 nt, Homo sapiens
aggaacggagagaaccgggaccccccgcggggacccggaacggcgggcaaaacgccgagcccgag

SEQ ID NO: 184383 - RNA, 60 nt, Homo sapiens
cacagagggcgcaagaagaagaagcagcgaagccggggcgaggcgggaggccgaaggcac

SEQ ID NO: 184384 - RNA, 72 nt, Homo sapiens
gcccagccccagaaaaggaacacaagagcggccccaacgcaaaacgggccaaagcgcggggcggggcggaca

SEQ ID NO: 184385 - RNA, 68 nt, Homo sapiens
gaccacagaaaagggggcacggcagacgcggccggaaaccagagagaggaaccagaaccaccacgacc

SEQ ID NO: 184386 - RNA, 75 nt, Homo sapiens
cccaaaagcccccaaaccaggaagcagggcgacccagcaacgcggccggccaggggcaagcgagcacggagggag

SEQ ID NO: 184387 - RNA, 71 nt, Homo sapiens
ccacagcagggggcgaacgaagaaaggccgcaaggcacaaagacagcagaacggaaggccaggaaaggggc

SEQ ID NO: 184388 - RNA, 73 nt, Homo sapiens
cacccccacggcccccggcgccccggcccccgccccagcccgccggcggcggcggggacgaacagcggggacg

SEQ ID NO: 184389 - RNA, 56 nt, Homo sapiens
cgcccagccccgaggagcgggaacagaccagcaccagacagcgaaaaagaggaccc

SEQ ID NO: 184390 - RNA, 73 nt, Homo sapiens
aaaggaccaaagagcccaacggagccagggagaggccagaaaacacagaggcgagccaaggacaaagcccacc

SEQ ID NO: 184391 - RNA, 69 nt, Homo sapiens
agagcaacaaagccgacccaacccaagggccaaagggcgagaacggcccggagacaggcggcagacggg

SEQ ID NO: 184392 - RNA, 74 nt, Homo sapiens
agagcaccacaaggccaagggaccgcaagccagccgaaccccaggagcaagggaaggagcccggaggggaggga

SEQ ID NO: 184393 - RNA, 54 nt, Homo sapiens
gaggagccaagcagcagaagagcaaggagaagccgaggccgccagcgccaagaa

SEQ ID NO: 184394 - RNA, 49 nt, Homo sapiens
gggaaacaggagggaaaaacacaggagaaacacaacggaacaagcagaa

SEQ ID NO: 184395 - RNA, 84 nt, Homo sapiens
acccaagaacgccaagcgccaaaggcaaaaaggccacggccgcggcgcccgcggcaccagacccaccaaggagaagaacaagac

SEQ ID NO: 184396 - RNA, 80 nt, Homo sapiens
aaaacccagacaccgacgggccgcgaggggaagaggaagcaaagccaagcgggcacagagagacccagcgacgagcaaaa

SEQ ID NO: 184397 - RNA, 74 nt, Homo sapiens
ccgggcgggaagacagaaccagggccgggggccagccagaggagcagccaagaagccccccaggggcccgcaga

SEQ ID NO: 184398 - RNA, 79 nt, Homo sapiens
caggaaggaccgagaccccacaagacgcaccaacgcaagggccaggccgccacgaaaacaagaaagaaccccacagcca

SEQ ID NO: 184399 - RNA, 79 nt, Homo sapiens
gcgaccagagagcggcggaaaggaaagcccgacagaagcaccgagacccaagaaagccagggaagaagagacgcaaccc

SEQ ID NO: 184400 - RNA, 76 nt, Homo sapiens
gcaccaccggcccaagcaaccaaccgggcgcgcgacagcaagcaagccaggaacgagggaaaccgccccacccgga

SEQ ID NO: 184401 - RNA, 78 nt, Homo sapiens
cagaaaaaagaacccaagggacggccgaacaagaaaaaagaggaacagccaaagacaccccagagaagcaaagacacg

SEQ ID NO: 184402 - RNA, 76 nt, Homo sapiens
acaccaggcacccgggcccagccgggaacccccacgcggccagcgaaaacgcccagaaagccaaggacacgcagga

SEQ ID NO: 184403 - RNA, 66 nt, Homo sapiens
ggcggagcgaagagagaaaaggacaagcacgcagaccagcaccacaggcagggaagaggacagcca

SEQ ID NO: 184404 - RNA, 52 nt, Homo sapiens
cacagagaaaaagaagaagagacgagaagagaaagaaggcgggcaacacaac

SEQ ID NO: 184405 - RNA, 89 nt, Homo sapiens
cggccaccgcccagcgggagaggagcccaccaggacgaccgcgccgcccagcacgccagagcagcccgacggccaggaggcgaagagac

SEQ ID NO: 184406 - RNA, 82 nt, Homo sapiens
ccggcgccccggcccgcccgccaggacaagcaggaaagccaggccagaagaaggaaggccggggaggggacaggaaagacac

SEQ ID NO: 184407 - RNA, 96 nt, Homo sapiens
aagcaaggaaaacagcggcaacaccaggcgggagcgagggggcgacggggcccggagcagagacgagcggaagagacaggcgacgggaagaagagg

SEQ ID NO: 184408 - RNA, 54 nt, Homo sapiens
ccaccaggacccagcagaaggggggaaagccggggccccggggacccgcggcac

SEQ ID NO: 184409 - RNA, 77 nt, Homo sapiens
gacaagagcacaaccccggaagaaagacccaccagcacggggaggcgacagggaagccacaccggccgacagacccg

SEQ ID NO: 184410 - RNA, 103 nt, Homo sapiens
gggcccccgacacgggccgcaccccagggaccaggaccgaggagagccccgccagaacgagaaggaaaagcagaaaaaagaagaccgcgaaaaaaggccaaag

SEQ ID NO: 184411 - RNA, 48 nt, Homo sapiens
ccgcagccacgccccagacacaccaaaagaacacgaagccaacccggg

SEQ ID NO: 184412 - RNA, 79 nt, Homo sapiens
gccgcgacggggacaggccacgcgccgccgcagaccgacgccgcagacagacacggagacgagcgggggaagaaggcaa

SEQ ID NO: 184413 - RNA, 87 nt, Homo sapiens
cacccccgggcccagccggccagcacccgccagcgcgccaagccagcaccccacggacagcgcggcggaggcaaggcgccaccggcc

SEQ ID NO: 184414 - RNA, 77 nt, Homo sapiens
gcagagcaccgcgcccagggccggcggacagcaacacgaccaccaagaccgaaggcaggggaggaagaaagcggaac

SEQ ID NO: 184415 - RNA, 79 nt, Homo sapiens
ccgccgcggggcgcgcggcgccggcggcgcgcggcccccgcgcaggacgagaacccccgcgaaccagaggaacccagcg

SEQ ID NO: 184416 - RNA, 65 nt, Homo sapiens
ggacaagagacgacacgcaagcaggcaaccgaaacaggcccgcccgggagaagcccgccacacgc

SEQ ID NO: 184417 - RNA, 60 nt, Homo sapiens
gggcgacaggccaccaacacacgggggccaagcgacagagaagcgacggaacagaaggag

SEQ ID NO: 184418 - RNA, 72 nt, Homo sapiens
aaccgaaaaaagagccaagccagaagcaggaggcaaaaggaaagaagaccaaaaacaggcggagaaacgaac

SEQ ID NO: 184419 - RNA, 52 nt, Homo sapiens
ggagacagcgagacccgccaggagcaaagggcaccacagaacagccgaagca

SEQ ID NO: 184420 - RNA, 74 nt, Homo sapiens
gaacgccggcccagccccagcggcagacggaaacgacagaagcagagcaccaggaagaagaggcggaagaaaca

SEQ ID NO: 184421 - RNA, 68 nt, Homo sapiens
agccggagaagcaggggggccaggaggggagaggaggcaggcccgcgcaggaccacaccgcccacgca

SEQ ID NO: 184422 - RNA, 81 nt, Homo sapiens
cagaaagaccaggacaggcaggcacaccagcagcgagacagaccccaccagccccagcaggacaacccagcgcagagcacc

SEQ ID NO: 184423 - RNA, 75 nt, Homo sapiens
acaacgcgagcacacccccagaaggggagccgccaccaaaagcagacggaaaacccacggggaagaccacacccc

SEQ ID NO: 184424 - RNA, 70 nt, Homo sapiens
gagacagagaagacaacggaagacgggaagccaagcaggacaaccacaaaagcagcaaacagaagccagc

SEQ ID NO: 184425 - RNA, 78 nt, Homo sapiens
gagggggaccaccccaggaagaagacaacagggaccggagacagcagcagaagcagaaaaaggcaaacgagaagaagg

SEQ ID NO: 184426 - RNA, 77 nt, Homo sapiens
gaccgcgcccagccgccagaacccgagaggaagggcggggggggggggccgagccggcccggcggagagggacgcgg

SEQ ID NO: 184427 - RNA, 76 nt, Homo sapiens
ccagaagcacaggccagggcagaggaccaacagggcagagagcaaggggcacaccaaaagcacacccaaggagaaa

SEQ ID NO: 184428 - RNA, 77 nt, Homo sapiens
agaagcgggaggagaccacccaaacgcggcacgggaggcagccggcgaggggggagcccagcaggagcgggaaaacc

SEQ ID NO: 184429 - RNA, 77 nt, Homo sapiens
acgcacaccagccacagccagcaggccgcccacgcggagccgccagcgcgaggacccggaacgccccagcgggaacg

SEQ ID NO: 184430 - RNA, 67 nt, Homo sapiens
cgggccccccccggcgccgggccaccccacccccgcacacccccaagagaccaagaccggcccgcgc

SEQ ID NO: 184431 - RNA, 65 nt, Homo sapiens
gcaaacgagagcgaggcaagaaaaacaggggccacaacaacaaacggacaggcaccagccccacg

SEQ ID NO: 184432 - RNA, 67 nt, Homo sapiens
ggcgaccacaggaaggacacaggcaggaggagggagacaggggcaaaaaacggcagggaagaggcga

SEQ ID NO: 184433 - RNA, 68 nt, Homo sapiens
accgaaacccaccagagggagcgacaggcgaggaagaaacaaggcgggccgcgagaccaccagggcga

SEQ ID NO: 184434 - RNA, 80 nt, Homo sapiens
ggggcaccccggaacagacaaaggcacaacggggccacagagagcagccaccaaaacacaagaggacaaagcccggccca

SEQ ID NO: 184435 - RNA, 71 nt, Homo sapiens
gcgacagaccagaagccgacgcgagaggaagacacccgaccgacaaaagggcggagaacggaaaagcacca

SEQ ID NO: 184436 - RNA, 83 nt, Homo sapiens
aagacacaaggcgccgaagaacagacccaaaggccgagggagcaacaagagcagaaaggaagaaccacccgcccaggagaaaa

SEQ ID NO: 184437 - RNA, 71 nt, Homo sapiens
caagacgacaaccaagaggaaagggggccagcaacccagacgcccacaggacaaccccgcacgcgaagacg

SEQ ID NO: 184438 - RNA, 82 nt, Homo sapiens
caaaggcagcccacagaacgaggaaaacgaacagcccacgcgccgggaccagggcagggaccccggaaccgaagggcgacaa

SEQ ID NO: 184439 - RNA, 59 nt, Homo sapiens
gaaaaaggagaggcccacgggaagggaggcacaaagagagacggaacgcagaaagacca

SEQ ID NO: 184440 - RNA, 83 nt, Homo sapiens
accgcacaagagccaagaacaagggccgcgagggaaggcgccaagccggcaagagaaagagaggccagaacagccggcaagag

SEQ ID NO: 184441 - RNA, 72 nt, Homo sapiens
ggccgggaggaagaaaaaggaagaacagcccgcccgcagcgaaacgaagaaagaagcggcagaagaaagacc

SEQ ID NO: 184442 - RNA, 77 nt, Homo sapiens
acacagccccaaacaggacgaaggcggcgaagggaacggaagaagaaggacaagcacagccggggaagcacacggca

SEQ ID NO: 184443 - RNA, 63 nt, Homo sapiens
caggagcgcccgcaccacaccccaccacccaggccacagaggaggaaagagaggggaaagaag

SEQ ID NO: 184444 - RNA, 59 nt, Homo sapiens
gaagaagaccgaagggaagacccagagcccaaggaggaagcaaaaaagacggggaacaa

SEQ ID NO: 184445 - RNA, 78 nt, Homo sapiens
gcggcccaggaaaagcacccggaggaggaagaagaaggaagccaaagaaggcaggcgacagcgaccgaagaacagagc

SEQ ID NO: 184446 - RNA, 71 nt, Homo sapiens
gccaaaaacagggaaagggccagcacaggagaggggggggaagacaacccggagaacacccaggggacgcc

SEQ ID NO: 184447 - RNA, 76 nt, Homo sapiens
gacaagagcaccacgggcaggaaggcagcgcacgacagcaaaagaggaaggcagggacgggaggggaggcaaaggg

SEQ ID NO: 184448 - RNA, 53 nt, Homo sapiens
aaaagggccaaagaagggagagaggcacagaggcaggacagaacaaaggagac

SEQ ID NO: 184449 - RNA, 74 nt, Homo sapiens
gccgcagaagagcggccggagcgaggggcggaccgcgggcgcccacgaccagggaaagaaccccgggagcgaag

SEQ ID NO: 184450 - RNA, 86 nt, Homo sapiens
ccgcccgcccaggcgcggccacgagagagcgggagcccgcggccccacagggggacccgggggccggaagacccccagcagagagg

SEQ ID NO: 184451 - RNA, 63 nt, Homo sapiens
ggcgaagaacgaaagagcccacagaacagcgcggcaaagccgccggcacagcccaccggaaga

SEQ ID NO: 184452 - RNA, 57 nt, Homo sapiens
gaagaggcccgggacccgcggggggcccaaacaaaccagcaacgcaaccaccaccga

SEQ ID NO: 184453 - RNA, 77 nt, Homo sapiens
gagaagcaccaagggccggggagaagcggaggggagcagggaagggacgagccggaaggccgccaggacagcccggg

SEQ ID NO: 184454 - RNA, 74 nt, Homo sapiens
gccccggagccgcacagaaaagccggcaaaggaagcgaaagcccagcacgcagagagcagagaacgagaaagag

SEQ ID NO: 184455 - RNA, 78 nt, Homo sapiens
caacagggagccccgacaccaggagacaccccggaggaaaagaagcacgaccccggaaaacaagagcaaggccgggag

SEQ ID NO: 184456 - RNA, 83 nt, Homo sapiens
gggacgcgcgcgggcacccacggagccccggggcggaaggaggagggcgaccgcgagacccagcccagggacagcccccgggc

SEQ ID NO: 184457 - RNA, 80 nt, Homo sapiens
gcagacggcccaacgaggcgagggcgccccaggagacgcagaccccaaaggcgggaacgggaacaagaacagaagaagga

SEQ ID NO: 184458 - RNA, 51 nt, Homo sapiens
ccagacaagaagacacagacaaaacgggacaaagcgcaaagcacacaaaag

SEQ ID NO: 184459 - RNA, 91 nt, Homo sapiens
aggcggggggcccaagcaaggccggaagaagagcgcagaggacccagcaggacgaccagccaaagagcccaacgccaagcaaccaaagacg

SEQ ID NO: 184460 - RNA, 77 nt, Homo sapiens
agcgggcaaggcagaccggaccacaaaaaggacaccagcaagcgcaagaggagggcagacacagggagggccaagaa

SEQ ID NO: 184461 - RNA, 64 nt, Homo sapiens
ccacggcgcgccccggccggagacacaaccgaaaaagaagccgcaccaccacccaaacacggaa

SEQ ID NO: 184462 - RNA, 70 nt, Homo sapiens
gaccggaggagcgaaggcggcggcagagaacgccgggccagcgaggacggaggggggaggagcaggcccc

SEQ ID NO: 184463 - RNA, 51 nt, Homo sapiens
aggggaaaaagggacgggcggacaggagcaccaggccaagaaccccaaaaa

SEQ ID NO: 184464 - RNA, 97 nt, Homo sapiens
aaaaccaccagacaacagcaaccgaggagcaaggccaaaaaaggacaagcaaacggccagagcaccaccaaccgcgccggccaccacacccaaccgc

SEQ ID NO: 184465 - RNA, 66 nt, Homo sapiens
cagaggccaagcacgccaaaggggggaagggacacggaggaccgaggaagaaggcacgaccgacac

SEQ ID NO: 184466 - RNA, 69 nt, Homo sapiens
acccccggaggcccggcgcaaaaccgggacaggaaggaagaggagaccacacaccagccccgaaggacc

SEQ ID NO: 184467 - RNA, 66 nt, Homo sapiens
acggacggcacagcccgccgaacccgaaaggaggggccaagcgacagagaagcgacggaacagaag

SEQ ID NO: 184468 - RNA, 80 nt, Homo sapiens
gcccgagccccggcgccgccgccaccgcccggcgagggacccccggacaagacaaaggagagaggcaccaccagaccaaa

SEQ ID NO: 184469 - RNA, 65 nt, Homo sapiens
aggaccaagaaccagaaaaagaagccaacgggggcaacgaagagggcgacgggccacacacggga

SEQ ID NO: 184470 - RNA, 76 nt, Homo sapiens
agccagcggcgccccgaacgggccaaacacacaggaacgccagaccccagccgagggaggcaacagcaaagggaca

SEQ ID NO: 184471 - RNA, 82 nt, Homo sapiens
gaggcgcggagagcaacgccgggacagcgcaaggcggaggcagggcgagaccgaccacgcaggcccgacccccagcaagcga

SEQ ID NO: 184472 - RNA, 49 nt, Homo sapiens
caacggaccccgaccaggagggcggagaacggaaaagcaccaggaagca

SEQ ID NO: 184473 - RNA, 70 nt, Homo sapiens
ggcgccacgagggacgcccggcccaaggaccgagagcagaaaagggacaacggcaggcccagacgaggaa

SEQ ID NO: 184474 - RNA, 79 nt, Homo sapiens
ggaggcccgggcgcggggaagcagccgccacggaggcaaagcagccggcccaggcggccgagccgcgagaacaacggag

SEQ ID NO: 184475 - RNA, 64 nt, Homo sapiens
caagaggaaagccacacaaacgccggaccggcacaaagcaaaagaacagaagggagaagccaca

SEQ ID NO: 184476 - RNA, 73 nt, Homo sapiens
ggggggaaaaggcgggcacaggccgaccgcgcgagccaccaaagaacaacaagagccgcagaaggcagcaggg

SEQ ID NO: 184477 - RNA, 75 nt, Homo sapiens
ccaaaggccaacccggagggcccagcaaaaggaacggcggaaaaaggggcgggacaggccagggacagcccaacc

SEQ ID NO: 184478 - RNA, 101 nt, Homo sapiens
cagaccgcgcgagcgggccaagaggggagagcgagaagcagccgcgcgcgccccacacggcgcgcgaaagacaccagcacccgaggccagcaacaacaccg

SEQ ID NO: 184479 - RNA, 73 nt, Homo sapiens
gaaccagccaaaaagcaaggaacccgcgcccagaagggaaggccacggacggggaaacgcaaggcaaccccgc

SEQ ID NO: 184480 - RNA, 71 nt, Homo sapiens
aaccagagcggaagcccaaacgggaaaggaaacacagcgaagaagcaacaggacaaggaacagacagaaca

SEQ ID NO: 184481 - RNA, 73 nt, Homo sapiens
ggggaggggagcccgcgcccgccgcgggagagaggacccccccccccccccaagagacgaagagaccgcagaa

SEQ ID NO: 184482 - RNA, 78 nt, Homo sapiens
accccacacccgcaccagacaggaccaccgagagcggcggacgcagccacgccggaggaggccgggcacgcagggcca

SEQ ID NO: 184483 - RNA, 61 nt, Homo sapiens
ccgccagggaggacccggccagaggcagagggaccaagaaaggcccagggaccaaagcccg

SEQ ID NO: 184484 - RNA, 73 nt, Homo sapiens
gacaaaaggcccaccacccagggggaggaaacgggcgagggaaggaggaaacgggcaccgaccaaaggccagc

SEQ ID NO: 184485 - RNA, 78 nt, Homo sapiens
cgagaagccggaagcgggcgcgaaaacgaacggagaacagagcagcaaaaggaaccaacgaaaagcaaacaccccacg

SEQ ID NO: 184486 - RNA, 84 nt, Homo sapiens
gcgggacaggaggggacggaacgggggccgagccgccccagccagaccagcgccggaagccgggcggaagcccacgcacaggcg

SEQ ID NO: 184487 - RNA, 75 nt, Homo sapiens
gggagggcgcgcagcggcgcggaagagcaacggggcggcacacaaggagcgaagggcagggagaacgccaggcac

SEQ ID NO: 184488 - RNA, 80 nt, Homo sapiens
cccgggagacccaggaggagcccgcagaaaaggcaacagaggccccgcaaaggaggaggacggaaaggagacggacacac

SEQ ID NO: 184489 - RNA, 74 nt, Homo sapiens
accaccagaaagcaagcgcgaaggagcaggccgcagagacgggaagcacgccccaaagcgggacaaaaagacaa

SEQ ID NO: 184490 - RNA, 79 nt, Homo sapiens
ggagagggcgccgggccgaggggcaaaaagacagaccagacccgacaccacggcgcagccaacgcaccgacgacccgag

SEQ ID NO: 184491 - RNA, 77 nt, Homo sapiens
cgagagcccacagcagaggacgcgccccaccgccggagagaccagcgcaaaggggaggcaagcaggggggcaaagga

SEQ ID NO: 184492 - RNA, 81 nt, Homo sapiens
acccccagcccggccgcggcggaggccgcgaggacagcggggagaaggggagcggcaagaggagccaggagcacgggggga

SEQ ID NO: 184493 - RNA, 79 nt, Homo sapiens
acaaccagacccaacagaacgcccaccaaagagccagggcaggaaaagccagaagaaccaccagggccaggaagcaccc

SEQ ID NO: 184494 - RNA, 74 nt, Homo sapiens
cgggcagcccaggaccgccaaggaacacaaccaagacgggacagccagaaacagcacacaagagacaggcagca

SEQ ID NO: 184495 - RNA, 77 nt, Homo sapiens
ccccaagggcgggaacaggacgagaacccccgcgaaccagaggaacccagcgagcgagagcggaccagaggacggaa

SEQ ID NO: 184496 - RNA, 65 nt, Homo sapiens
caacaaacagaagaagaggacaacagcgagcagcaaaaagaacgaaaagcgcaacaaaccagaac

SEQ ID NO: 184497 - RNA, 80 nt, Homo sapiens
cccgccggaagcgccaggacaaggggacccgggacgacgagacgacaccacaaagaacacggagagccggccggacggag

SEQ ID NO: 184498 - RNA, 49 nt, Homo sapiens
acccgcagaggagcccaccggggaaacacccagcagcaacccaggcgca

SEQ ID NO: 184499 - RNA, 63 nt, Homo sapiens
caagacccaggacaccccgaagccgagaaaggcacaagcagaggaaccagggaaccgccgcca

SEQ ID NO: 184500 - RNA, 72 nt, Homo sapiens
aagacggggcgccccacagaggggcgacggagaaaggaggacccgggaagacagagacgggcaacggaaagc

SEQ ID NO: 184501 - RNA, 37 nt, Homo sapiens
accaagaccaccaaggcaaagcacagcaacggagacc

SEQ ID NO: 184502 - RNA, 67 nt, Homo sapiens
agagcccagagcgacccccggccaccgggcggggacacggccaacacgggaaggaaaagcgggagga

SEQ ID NO: 184503 - RNA, 64 nt, Homo sapiens
gaacaagaggggacagaaagacaacggcaagcggagaagagcaaggccgaaccgagaggaaggg

SEQ ID NO: 184504 - RNA, 39 nt, Homo sapiens
ccgagcaacccaaacagaaggcgggacaacacaagggaa

SEQ ID NO: 184505 - RNA, 78 nt, Homo sapiens
cgggccgcggcgcccggggaaagccgggccccgagggcggaccgaggcaaaaggaccgggaagaggaaccagccacca

SEQ ID NO: 184506 - RNA, 68 nt, Homo sapiens
gcggacggaggagcaggcgagaagagaaggccgagccaagaacagaggcgccggacccccgccacggc

SEQ ID NO: 184507 - RNA, 85 nt, Homo sapiens
gcgccgggcaccgaggaccagccaagacagggaagcccgcagccgagcacagagcccagccgaccgaaagccaggccagagccaa

SEQ ID NO: 184508 - RNA, 34 nt, Homo sapiens
ggaggaccagacccaggaggagagaacccaccgc

SEQ ID NO: 184509 - RNA, 71 nt, Homo sapiens
cccagggcagggaccaggagggaaacacgccggcagcgagaccggcgcgagaggcccaacgccccaccccc

SEQ ID NO: 184510 - RNA, 73 nt, Homo sapiens
cccggccgagacggcggcagcagcggcacagggaccaccacacgaaaccaaggaaaaaccgggaacagcagag

SEQ ID NO: 184511 - RNA, 73 nt, Homo sapiens
gacgacgggacaagagaacagccgcgcggcgagcggcccgcacaaggccggcagggccacaaccaaagcgggc

SEQ ID NO: 184512 - RNA, 71 nt, Homo sapiens
ggggacaaaggagccaggacaaggcgcgacacaaaaacggggacggggcaggaagaagccccagaccacag

SEQ ID NO: 184513 - RNA, 75 nt, Homo sapiens
gcaacacagggggccaggacaaggaggaaggccgacaaaaggcagagacgggcaagaggcagcaagggcaccaac

SEQ ID NO: 184514 - RNA, 75 nt, Homo sapiens
cccaggaagaagaagacggaaaggagccgacgggagcgggccgagaaaaaccacagagacacacgcaagccgacg

SEQ ID NO: 184515 - RNA, 76 nt, Homo sapiens
gaggaggcggcccgaaaaccccccaggagaagacagaggagccagaccaagagacagcacaggcgagcgagcagag

SEQ ID NO: 184516 - RNA, 81 nt, Homo sapiens
ggcgaagggccgccaccccgcccacccggggcgcggcccccagccgcaaggcccagcgggaggcggccgaaccagggcaga

SEQ ID NO: 184517 - RNA, 53 nt, Homo sapiens
aggaaacaagggcagagccagcaaagagaaagagcgcgcacgaaagcacacga

SEQ ID NO: 184518 - RNA, 73 nt, Homo sapiens
ggcgccaaagcgagagagggaagcgcccggcccgacaggcgccacccgacaaaagacaaacgggacagagggc

SEQ ID NO: 184519 - RNA, 59 nt, Homo sapiens
gcaaccgggaccagcgagcgacagaacgacccagaaaaagaacgcgacaggaagacggc

SEQ ID NO: 184520 - RNA, 75 nt, Homo sapiens
gcaccgggacgcacagagaccggaagaccaagcaggagaaccgaccgccgagagcgcggcagaagagagacaaca

SEQ ID NO: 184521 - RNA, 83 nt, Homo sapiens
ccacccccaaagacaaaagacacagaagaaaaaggggacgaagacacgaagcagacgcgcagaagaagcccacccagaacgcc

SEQ ID NO: 184522 - RNA, 81 nt, Homo sapiens
aggggaaggacccgaaccagccgccggagcaccgcagcggcgcccgcaggggcaggaggcaaagggaccccaagaaaccaa

SEQ ID NO: 184523 - RNA, 81 nt, Homo sapiens
cggacccgccagaggaccaacagggacggagcggagaaaaggaaccggccccggacaagcagagacgaagcgaagggagca

SEQ ID NO: 184524 - RNA, 72 nt, Homo sapiens
agaagagagacagaagagcaaagggaaggggaaaaaaaaccgaaacagaaggacggaaagagagaaaaagac

SEQ ID NO: 184525 - RNA, 62 nt, Homo sapiens
cgcgagcagccaggcggcgggccagggaggggggcacgaagaccgcacacgacagcgacgag

SEQ ID NO: 184526 - RNA, 68 nt, Homo sapiens
gccgcgccccggcgcccccccgagacaacggcaagcggagaagagcaaggccgaaccgagaggaaggg

SEQ ID NO: 184527 - RNA, 63 nt, Homo sapiens
ccggagcaggagaggacgggacgccaagagacagagaaggacaagacgacgggggacagaaga

SEQ ID NO: 184528 - RNA, 86 nt, Homo sapiens
acggcggaaggccccaacacccggagcagcgccacaagggacaggcaagagccaagccgccaggccaccacagcccggggagccca

SEQ ID NO: 184529 - RNA, 58 nt, Homo sapiens
caagaaaaagagcgaaaaagacacgccggggagacagacccagcacggaccccccccc

SEQ ID NO: 184530 - RNA, 76 nt, Homo sapiens
cgaagcccagggaggccaccagcccggaccgacaggaaagaaggagcccacaaagaaaagaacaccgccagcagcc

SEQ ID NO: 184531 - RNA, 58 nt, Homo sapiens
cgacgccaaccacgacgaagcggaaggcagaagacagagagagcaaaacgacgaagga

SEQ ID NO: 184532 - RNA, 67 nt, Homo sapiens
ccagcaggaggccaccaggcacagcagacaggagcacacgggcagggacagagaagaccggccaggc

SEQ ID NO: 184533 - RNA, 77 nt, Homo sapiens
aaggcaggcgccaaacaggccccaagagacgacagaaaggcagagaaggaaaaaaggaccagagacggagcaagaac

SEQ ID NO: 184534 - RNA, 52 nt, Homo sapiens
agacggacaggaccaaggacgcagggcacagcccgggaagccaccgagagcc

SEQ ID NO: 184535 - RNA, 77 nt, Homo sapiens
accgcccgccacccgcgcgccgccgccgaggagaaaggaggccagggccacgacaggagacaccaccaaaccagaga

SEQ ID NO: 184536 - RNA, 81 nt, Homo sapiens
ccggaccgcagacgggggacgcagggaggagcgggacaccccggaagcgggaaagggagaccaaagaggaaggggaccaac

SEQ ID NO: 184537 - RNA, 77 nt, Homo sapiens
gcgcacagcaccacagccgcggcaaggaggaagccagccaggcccacgagcagcacccaggaccacaacagagaggc

SEQ ID NO: 184538 - RNA, 72 nt, Homo sapiens
ccagaaaaagacgacgcccggaagaggcgaaacgggaccgacagcaagaaaaggagaaaacaaggccgcggg

SEQ ID NO: 184539 - RNA, 79 nt, Homo sapiens
aagaacgccaccccaggaggaaccccccaccaggccggacccacagaagaagaacaggcaaggcccagcagcacacaag

SEQ ID NO: 184540 - RNA, 68 nt, Homo sapiens
ccaacccaccccaccaaggggggcaggacacacggaacccaaacgcgaaaagggggaaggggacagga

SEQ ID NO: 184541 - RNA, 73 nt, Homo sapiens
ggccaccagccggacagccggcggcgagaaccagaagccacaggccaaccaagcaaagcaaacaaagccagaa

SEQ ID NO: 184542 - RNA, 80 nt, Homo sapiens
gggccagcccacgagagaaccccagccccagcacacagaccagaggcggacacaggaaagagaaagcagagcccgcccag

SEQ ID NO: 184543 - RNA, 63 nt, Homo sapiens
ccagccacacgaggagacggaaccggagaaaacaaggccggggaccgaacccgaacagaggca

SEQ ID NO: 184544 - RNA, 79 nt, Homo sapiens
caggcccagaggccggcggcagcagcccagagcgcaaagagggcaagacgccaagagaaaaggcgagagcacaaagcac

SEQ ID NO: 184545 - RNA, 60 nt, Homo sapiens
cacaggcgaggccaggcaaaggaaccacccaggaaacagcgcaagcacagcgacgaacac

SEQ ID NO: 184546 - RNA, 65 nt, Homo sapiens
gccaggagcagagcgacagcggcgagcagaacacggcgagcggaaccccggggccaacagcacca

SEQ ID NO: 184547 - RNA, 70 nt, Homo sapiens
caagaggcgacgcgaaccggggaccgggaggagggcgccaggagcaccaacccgggcacaaacgggcagg

SEQ ID NO: 184548 - RNA, 74 nt, Homo sapiens
gagaggaagccacagagacaggccagacccgcccccgaaagccccgagcagccaaaccggcgcgggaaagcagc

SEQ ID NO: 184549 - RNA, 38 nt, Homo sapiens
gcaccagggccagacggcgggcggacaccgaggcagga

SEQ ID NO: 184550 - RNA, 72 nt, Homo sapiens
ggcccagccccagcggcagacggaaacgacagaagcagagggagccaggaaggccccccacgacccagaaca

SEQ ID NO: 184551 - RNA, 80 nt, Homo sapiens
ggaaacgcagcaaagccacgggggagaaggcacagccagggcgaaagaagaccccgccaccggcccccacgcaccaccaa

SEQ ID NO: 184552 - RNA, 59 nt, Homo sapiens
cagcgccgccgcccgcggaagggagcccaagcgcagaggcagcagagcgggagcgacag

SEQ ID NO: 184553 - RNA, 107 nt, Homo sapiens
gcgacagagacagggcggacacccacaagaggaccagcacccaagccggcaaaaaaccagagaaggaacagccagaagaagacaggcgggaagagcgccacaagagg

SEQ ID NO: 184554 - RNA, 115 nt, Homo sapiens
accaaaggagcaaggagaagagccggggaggagaggagaaaccaagcagacccaggacaaggaagaggggagccaaagaccaagcaccagagaagaggaggaagaaggcgagaag

SEQ ID NO: 184555 - RNA, 72 nt, Homo sapiens
acgagcagaggccagaagaggaaagagagaagggcagacacaaggaacagccagccaggagaaaaacgaacc

SEQ ID NO: 184556 - RNA, 77 nt, Homo sapiens
cgccagggacagaggccagcgcgcgcaacacaagacaagaacccacggaaaaggcgaaagaaggaaccaaacggcgg

SEQ ID NO: 184557 - RNA, 53 nt, Homo sapiens
gaacaccgacggagccaggaaagagcacaacagcggccccacaagccagccgc

SEQ ID NO: 184558 - RNA, 81 nt, Homo sapiens
gcgcgcacgcgagaacaagaacgacaagcacacaccaccgcagagccagacaggaggagaaggacacaggaggccgaggcc

SEQ ID NO: 184559 - RNA, 79 nt, Homo sapiens
ggggggccacccccgggcccccaaagacaaaccagaggaagaaggcggagggcggggaaggaaccgaggccggccccca

SEQ ID NO: 184560 - RNA, 80 nt, Homo sapiens
ggcgaagaagcgcagccgcaccggccaaggggcgcgcgggcgcggacccaacgggagcggcgccggcgcggagcggcacg

SEQ ID NO: 184561 - RNA, 69 nt, Homo sapiens
aagcacaaggacagagcacccaccacaggaggaaaacggcaagccagcacaggggcccccaaggacacg

SEQ ID NO: 184562 - RNA, 99 nt, Homo sapiens
agaggacaaccaagccccagaaccagcacgggaggaagggggcagccggggagccaggagcgcaacaccaaggagaagcgggggaggaggcgcaacacc

SEQ ID NO: 184563 - RNA, 79 nt, Homo sapiens
ggggacaagacggggaacaggaagagagccaagccacgcaggcagagagccacaagagccggagagggccgaggccgga

SEQ ID NO: 184564 - RNA, 79 nt, Homo sapiens
gacacagggcagcagcaagggcgggcccacaggcgaagcaggcaaccaggaggcggccccagcgcgcgccccgccgccc

SEQ ID NO: 184565 - RNA, 75 nt, Homo sapiens
cccccaagggcgggaacagacaaaagagaacgaacgcagaccgggaaaaccaacaaaccaagagggacgaagcag

SEQ ID NO: 184566 - RNA, 68 nt, Homo sapiens
acaccgagacagacagccagaggaaacgagcgagagagaagagggcacaggggcgacagaaggaccag

SEQ ID NO: 184567 - RNA, 75 nt, Homo sapiens
ggaacccgcgaagcgggaagaggagaacacagcaacagaagagaccaacccaagcgacccgccgggaaggaagca

SEQ ID NO: 184568 - RNA, 66 nt, Homo sapiens
cggagcggccgggggccggccgggccgcccggccgcgcagccgaggcgagaacaccgagcaaagcc

SEQ ID NO: 184569 - RNA, 68 nt, Homo sapiens
gaagaggagaaaggacacacgaaaacagacgggggaacaagagaaaaaaggagccagaagaacaggaa

SEQ ID NO: 184570 - RNA, 82 nt, Homo sapiens
gccggcgcggcggcacgacgggcggaacagaacgacaggagaacagaccagagcgaagaacaggaccacccaggcaaccaca

SEQ ID NO: 184571 - RNA, 64 nt, Homo sapiens
caagcacaagcaaagggacaccaccagcagaagccacaggggaagaagcggcacacggaggcag

SEQ ID NO: 184572 - RNA, 78 nt, Homo sapiens
aaaaagaacacggcaacgaaaagcgacagccaacggcccacagcgggaacaagggggcgggaagcgaccggcccacca

SEQ ID NO: 184573 - RNA, 39 nt, Homo sapiens
gccccgaccccgcagcggagcaaccccaagaaagaaaac

SEQ ID NO: 184574 - RNA, 34 nt, Homo sapiens
cccaagagcaggacacagagccggccaaaaagcc

SEQ ID NO: 184575 - RNA, 74 nt, Homo sapiens
aaagcagccgccggccgacccgacgcgaaggaagcagcacagggcaggaggagccagagaccaggagccccaga

SEQ ID NO: 184576 - RNA, 68 nt, Homo sapiens
acacgcaagagcgccacccaccccacagggaacgaggacaggggcagagaaaaagagaagcacggcag

SEQ ID NO: 184577 - RNA, 72 nt, Homo sapiens
gacacggaggcgcccggaacaggaggagaagagaggacccaaagacaggaccacgcaccagcagagaaggaa

SEQ ID NO: 184578 - RNA, 89 nt, Homo sapiens
ggcgcgcccgggagcccggcccggcgccgcgcgagagaccagagccgcgggcgccgagaaggacgcgcgcggggggcgagacgccccag

SEQ ID NO: 184579 - RNA, 84 nt, Homo sapiens
gcgcccagaggcgagcccggggaggaagagagcgaggccgaagacccagaggaccccagcaccacagaaaccccacaccccgga

SEQ ID NO: 184580 - RNA, 74 nt, Homo sapiens
gcgacacccgggagccgccggcaccgccggaaccggcgcaggacggagccccacgcgagaacaacaagcggacc

SEQ ID NO: 184581 - RNA, 86 nt, Homo sapiens
ggaccgccaaggccaaagcacagaccgaggaaccgcggacccgagcggcacacaaccagaggaggccaggagcccccggcccaggc

SEQ ID NO: 184582 - RNA, 87 nt, Homo sapiens
gcccccgcacggccccggcagcggaagcccacagaggaagagcagccagcaacaaaggagagagcgggaagcagaaggcagcaggaa

SEQ ID NO: 184583 - RNA, 73 nt, Homo sapiens
agccgggaagcagagggagaaaggcacaggaagagggcggcacgcggccagagagcacaacgggaggaaggga

SEQ ID NO: 184584 - RNA, 74 nt, Homo sapiens
gaagagaacagggccggggcacgacgacccaacagcaagacgccacccagagcagccgaacgccaaagaaacca

SEQ ID NO: 184585 - RNA, 95 nt, Homo sapiens
cacgagaacgggacccggccagaggaaagaacccgagggaccgaaggaaacaaaagaaagggcagaagaaaagggaccacaaaaacacagggagc

SEQ ID NO: 184586 - RNA, 87 nt, Homo sapiens
ggggaggagcggggggaggaggacccagaaggagaggccacaccccggcgccagagacccacgggaagggcagggaagcaggggcgc

SEQ ID NO: 184587 - RNA, 69 nt, Homo sapiens
cacccgcgcgggcacacaaaacaccaaccaaaagacaccggacacgcagaacggaccagaggagccccg

SEQ ID NO: 184588 - RNA, 57 nt, Homo sapiens
ccaggggcggccgcggcgccgggcgccgaggcgcgggcacagggagggcggaccacc

SEQ ID NO: 184589 - RNA, 87 nt, Homo sapiens
ggccggacccagcgcggccgccgcggagaggacccggcagacggcaaaaggcggagcccagggcccacaacggcaggccacagcggg

SEQ ID NO: 184590 - RNA, 85 nt, Homo sapiens
ccgaacccgcggccggccgagccggagggacccgagggcccgcaccaccagcaaaaacgggaagcccaagccgcagccgccccgg

SEQ ID NO: 184591 - RNA, 75 nt, Homo sapiens
agccacgccggagccggcccagggcgccgagcagggccacggcgaaaacagccggggcacacgagcggccacgag

SEQ ID NO: 184592 - RNA, 67 nt, Homo sapiens
ggaggcggaggcagaggggaggcgcgaaaggcccgagagagaaagggaaagaaggagcggagcagaa

SEQ ID NO: 184593 - RNA, 71 nt, Homo sapiens
gaaacgaaagacggagaccggcagaccagaccaagaagagggaacaggaaacagcacgggacagaaaccaa

SEQ ID NO: 184594 - RNA, 72 nt, Homo sapiens
aggcagaaggaggaagaagaagcacagaaaaccgcagaacgagggaacaggcacgccccacccgccagccga

SEQ ID NO: 184595 - RNA, 60 nt, Homo sapiens
gaagagacagcgagaacaaaggagagaggaccacccagaggagcaacgaggagggagaca

SEQ ID NO: 184596 - RNA, 79 nt, Homo sapiens
gaagaggaagagacacagcccccaaggacagcagacggagagaagacaaaagaggagggggagccgcgggccaggaccc

SEQ ID NO: 184597 - RNA, 74 nt, Homo sapiens
gcgcgcgcgcgcccgcgccgaggccgcgggcggcgggcccggggagcgaggcggccagggccccagaagcaaag

SEQ ID NO: 184598 - RNA, 63 nt, Homo sapiens
ggagacccgccggagaagaacaaaccaggccacaaagcccagacaagcgcagaagcaacagaa

SEQ ID NO: 184599 - RNA, 68 nt, Homo sapiens
accggcagccggagagaacggcaacagggagaaaaagaacaaaaacaaccaggaggagagaagcggag

SEQ ID NO: 184600 - RNA, 77 nt, Homo sapiens
cggccagcgcaccaaccaggccgcacagaggacggccaaagcaagcaccacgacaacacacgaaggggaacaaacaa

SEQ ID NO: 184601 - RNA, 87 nt, Homo sapiens
gggagaagaacgaaagaacaggcgcaaaaagaaaccacgacgagcgagacggaggcgaaggcacaagaacacccgagaggggggcaa

SEQ ID NO: 184602 - RNA, 81 nt, Homo sapiens
acaaccaagcagcagaggagcacgaggacggggagcaagaaaagacaaaggacagacccgcgaggccagacccagagaagc

SEQ ID NO: 184603 - RNA, 88 nt, Homo sapiens
cgcaaagggaccccgggaagacgaaacagcccagcacccgagcgccgaggccgcgaggcgccgcgcagggcggcccggcgggcagcag

SEQ ID NO: 184604 - RNA, 77 nt, Homo sapiens
gcgccccggccgccgagcaaacagaggcgccaccacagagccacacgaggccacgagcggcacaggacagaaccgca

SEQ ID NO: 184605 - RNA, 80 nt, Homo sapiens
cgcggcccacggcgagaggcagacggcggacgcaaaagaccagggacacagagagccacggcccaccaacgggacagccc

SEQ ID NO: 184606 - RNA, 72 nt, Homo sapiens
ccgccgacgacgcaagcagcgggaggagcaaccaacggggcggcacacaaggagcgaagggcagggagaacg

SEQ ID NO: 184607 - RNA, 69 nt, Homo sapiens
aaaaccgaagaaagagggccgccacaaaggacccacgcagagcgaaacccgagaaagagagaacaacca

SEQ ID NO: 184608 - RNA, 79 nt, Homo sapiens
ccaaggacaaaggacaacaagggaaaccacgccgggacgggggagaaggaaaggcagaccgagagaacccaccaagcgc

SEQ ID NO: 184609 - RNA, 80 nt, Homo sapiens
gggcggcaagacacggggcgacgccacagagaaaggagggccagacaaggggaacacaagaggagagaaggggaccgcag

SEQ ID NO: 184610 - RNA, 81 nt, Homo sapiens
gcagacgaggggacgccgcacgccgcccacggagccaggagcaggggcgcggcagaggcgcggacgagcagcgcagggcgg

SEQ ID NO: 184611 - RNA, 75 nt, Homo sapiens
gacacacaaccgcccagccggcgagggacgccgcaggagagaacagaaagaccaagcagaagagaggacaaagca

SEQ ID NO: 184612 - RNA, 83 nt, Homo sapiens
cccaccccgccaggcccccacgccagccccccacgcccaccaggcccaaaccagggagaaaacaggcaagacagagagcgcca

SEQ ID NO: 184613 - RNA, 67 nt, Homo sapiens
aacgggcaggaaggaaggaaggcaaagacgagagcggaaaaaggaaaagagcacgggccaggaccca

SEQ ID NO: 184614 - RNA, 55 nt, Homo sapiens
cgaagcccagcgggccggacggggcggggggaacgcaacagaagccaggcaagga

SEQ ID NO: 184615 - RNA, 96 nt, Homo sapiens
cagcgggagcgcggaacagcaggcccgagcccaccgcgccgggccccggacgccgcgcggaaaaggcccaacgcagccaggcaagaagacccggag

SEQ ID NO: 184616 - RNA, 65 nt, Homo sapiens
acggccagaaccgcaaagcaaagacaagaagaggcgcagagacaaggaagggaagcggagaaaag

SEQ ID NO: 184617 - RNA, 74 nt, Homo sapiens
gccagagaccaaggcgcgcccggcgggccggaccaagggaccccgacggagagacaaagaagacggaggggggg

SEQ ID NO: 184618 - RNA, 78 nt, Homo sapiens
caacgacacacccagcccaggaacgggagcaaggagggcgggaccacccaggaggagggggcaacagaccccccagag

SEQ ID NO: 184619 - RNA, 39 nt, Homo sapiens
agaaaaccaagaaagccccacgaaggaaaacgacagacc

SEQ ID NO: 184620 - RNA, 37 nt, Homo sapiens
gcaaccagggaaacaggagaggcagggagccacggga

SEQ ID NO: 184621 - RNA, 75 nt, Homo sapiens
ccggggccagcgcagccgcggcggagacgcacaggcccgacacaagacacccaagaagcccagcagacccaacgc

SEQ ID NO: 184622 - RNA, 72 nt, Homo sapiens
agcgcgcacaaggaccgaccgggcgagcgagagagagcaagcgcagcgccacaaacagggagggccggggca

SEQ ID NO: 184623 - RNA, 75 nt, Homo sapiens
caagcagcaggaggacaccaaagggaaagagagggacgaaaccccagacacaagaaaaccagcaaacaggggaag

SEQ ID NO: 184624 - RNA, 55 nt, Homo sapiens
gaccagcaggaacgaggccacaggacaccgcagcccaaggcacccaccgaggaca

SEQ ID NO: 184625 - RNA, 69 nt, Homo sapiens
ggcacaaggacgccaagggggcgagagagaacaggacgaggaggcacgccagacagaggcccgccgcgc

SEQ ID NO: 184626 - RNA, 79 nt, Homo sapiens
ggaaagggacaagaagggcaaagccgaaaaggggcagaccaacaccacccagcaaaaaccccgacgaacgcgccaggga

SEQ ID NO: 184627 - RNA, 74 nt, Homo sapiens
caaaggcaccaggccaccacagaaacaaaagcaacaaagaggaggccacgggaggaccaacaggaagcgcgcgc

SEQ ID NO: 184628 - RNA, 73 nt, Homo sapiens
ggaccacgggggcaaaccccacagcggccaccaccaccacagacagagggaagagcggaacaccaacaaacca

SEQ ID NO: 184629 - RNA, 83 nt, Homo sapiens
cagccacccaccccaagggccgccagccaggacagagcgggagccaccagcgccaaagggaagccaggagcccgggggcacgg

SEQ ID NO: 184630 - RNA, 38 nt, Homo sapiens
gggcggcgccaggccggcccaccaccggggaccgcaag

SEQ ID NO: 184631 - RNA, 74 nt, Homo sapiens
caacccgagccagaaaacaccaggaaaccccgaggcggcagaccaacccggacagcaggaacacaaccccccga

SEQ ID NO: 184632 - RNA, 76 nt, Homo sapiens
ggaggaggcaacgccgcgcccagcaagcaaccacgagagcacaaggacaaccaacaacccccagaacccgaaaccg

SEQ ID NO: 184633 - RNA, 50 nt, Homo sapiens
ggcgacacacaggcgcacccggggccaaagcaggggacacaggcaaaacg

SEQ ID NO: 184634 - RNA, 59 nt, Homo sapiens
cccagaaccaggcccgaaaaaaacacacaagcccggaggagccgagccagacacacggc

SEQ ID NO: 184635 - RNA, 78 nt, Homo sapiens
ccagccgaaggagaagggggggaagagcggccaagagagaaacacaagagaacaccaggcagcaccacccccacagcc

SEQ ID NO: 184636 - RNA, 69 nt, Homo sapiens
aggccacgagggacaacccggcggaccaagccgcgggagagaccggaggagccgaccgcgaccagcgga

SEQ ID NO: 184637 - RNA, 79 nt, Homo sapiens
aggaagcagagagagcgggagacgagacaacagacaccaagccagaaaacaggaacagaagagaaacaggaaaaggcag

SEQ ID NO: 184638 - RNA, 69 nt, Homo sapiens
ggagacacggcaggaacccgcgaagcgggaagacggaaggaaaaacaggggccgcagaaaggaagaaac

SEQ ID NO: 184639 - RNA, 57 nt, Homo sapiens
gcggagcagccaggaccagccagcgccaaggggcgaagaccaagacacacagccagc

SEQ ID NO: 184640 - RNA, 77 nt, Homo sapiens
aagaccgaagaaagccaaagacagccgaaaacaaggaaaggaccgccaggacgcacccaagaccaaagaaaagaaac

SEQ ID NO: 184641 - RNA, 80 nt, Homo sapiens
gccaccagggggagaccgaagagcgcaaaaaccgaaaccgcccacggggaaagggagcagcaccggccacacccacagca

SEQ ID NO: 184642 - RNA, 61 nt, Homo sapiens
cggcacagccagaagaccgaagcgcgacggaagcggaaagcagaaacacaaaagaagcagg

SEQ ID NO: 184643 - RNA, 70 nt, Homo sapiens
cacccgcccccgcgggcgccgggccaggacgggcgcgagaccgcacagcaaggaaagcacccagagaagg

SEQ ID NO: 184644 - RNA, 78 nt, Homo sapiens
aagagacagcagcgaacggaagcccggaggcagaggccccacacagacggccgaagcccgcagcccacgcacagccgg

SEQ ID NO: 184645 - RNA, 50 nt, Homo sapiens
ccccgagagcgagaacagcggcaggacacgggacccccagaagagcaaag

SEQ ID NO: 184646 - RNA, 76 nt, Homo sapiens
aacccgaggcccgagagggcgcggcggcggggccaagaggggagagggcagaacagcggaagcgagaagcagagga

SEQ ID NO: 184647 - RNA, 81 nt, Homo sapiens
aagggacgggcgagggcccgcagcaggaccgccccacgccgcgaccccaggagagaacccggacccagaggaaagcagaaa

SEQ ID NO: 184648 - RNA, 69 nt, Homo sapiens
agaagaagcaggaaagggaacccaaagaaacggggccgggcggcgacccgggccggggccaccaggcgc

SEQ ID NO: 184649 - RNA, 72 nt, Homo sapiens
ccgcgccgccccggccccgccaggccagacccgacccggcccaggccagagcaggggcggggcacacggggg

SEQ ID NO: 184650 - RNA, 68 nt, Homo sapiens
aacccggcccgaagaggaaagaagggagccgcgacgaaaccagaacccaagacacagcaaaaaaggaa

SEQ ID NO: 184651 - RNA, 40 nt, Homo sapiens
gacggaagacgagaagggggaaaggagcggaaggcgaaaa

SEQ ID NO: 184652 - RNA, 79 nt, Homo sapiens
ggagcaagccgacaacaccggccaaaaagggccaaggcccaccccagccgcacaccagggacacaaagccaacacgcag

SEQ ID NO: 184653 - RNA, 65 nt, Homo sapiens
aaggaccaagaaccaggaaaggcaccaggccagccggaaacacagaacacaagcgcgacccaggc

SEQ ID NO: 184654 - RNA, 90 nt, Homo sapiens
cgagggcgcgcacaaccggcccagcaggcacccgagcagcgccacgcaagggcccgacccaggcaagcgagcaggcgagcaggagcccac

SEQ ID NO: 184655 - RNA, 86 nt, Homo sapiens
acccagcagacgaggccggggccgcgcggccacaaagaaccccaccgcgacacacgagcacaggagaagggagcacccccaaggac

SEQ ID NO: 184656 - RNA, 78 nt, Homo sapiens
gagggccgcgggcgccaggaggggggcgacaagggaccaacacgagcgcgagaacaagccaaagacagaccgccagcg

SEQ ID NO: 184657 - RNA, 69 nt, Homo sapiens
agaaccagcaggccgggcaggaccccgacgacacgaagcaagcagccaccacgcaccggaagcgagacc

SEQ ID NO: 184658 - RNA, 59 nt, Homo sapiens
gccaaaggaacggggcaccgagaggccaaggccggcggcgacggcggcgcgaggaccga

SEQ ID NO: 184659 - RNA, 40 nt, Homo sapiens
gaccaccaagcagaacccgcccgaccccacgcacccggag

SEQ ID NO: 184660 - RNA, 77 nt, Homo sapiens
cagacgcagggcgcccccgccacaagggcgcagaagccggcagagcccaagagacaacaagccgaaaagagaggcaa

SEQ ID NO: 184661 - RNA, 79 nt, Homo sapiens
gccccacacccccagagggaccacaggcaggaaaagaaggcaagaccccaccacacaagacccagcgggaggaagaaga

SEQ ID NO: 184662 - RNA, 78 nt, Homo sapiens
cagaacgagcacagccaacaggccaggagggggccacaccgaacccagccgggaggccaaggccagggagcgagccca

SEQ ID NO: 184663 - RNA, 74 nt, Homo sapiens
cggaggccagccccggaagcacccgccaggagccggagacgggaggaggggagggagcagagaaaacaacccgg

SEQ ID NO: 184664 - RNA, 70 nt, Homo sapiens
gccaacccacccccacagcggcgggcacaccacgcccccgccgccagaacccaggcgggaaaaagccgaa

SEQ ID NO: 184665 - RNA, 74 nt, Homo sapiens
ccgcggcgcccccacgagagggcaaacgcgcgcagagcggcacgagggggagcaagagaacaaccggagacccc

SEQ ID NO: 184666 - RNA, 80 nt, Homo sapiens
gacgaccggggacggggagcgacagagaagcagccaggccacacggagcagggcagggaggggagagcgaccaggccagg

SEQ ID NO: 184667 - RNA, 84 nt, Homo sapiens
agcagagccgccggggagggagccagaagcaacgagccggagcgggcagggcacacaaccgggcagcggacacggagcagggcc

SEQ ID NO: 184668 - RNA, 60 nt, Homo sapiens
cgaccgcgacaccgcgcaccccccagagaaggagaggaagacagacaaggcagaagaacg

SEQ ID NO: 184669 - RNA, 71 nt, Homo sapiens
agaaacccgaagcgcggaaaacccagggggcgaacacggaaggacgagagcacagcccccaggagaggcag

SEQ ID NO: 184670 - RNA, 86 nt, Homo sapiens
gggaaggcgggagacgagaagccgaaaagcgcagcgagcggagccgccggagcgccccggggaccggaaaggcgcaacggagacac

SEQ ID NO: 184671 - RNA, 55 nt, Homo sapiens
cggccgccgggccgcgcccacgggcagcgaggaaaccccccaggcaagaggcgca

SEQ ID NO: 184672 - RNA, 55 nt, Homo sapiens
ggcgcagaaaccccggacaaggcacgccagacgcaagcccgagaagcaagaccgc

SEQ ID NO: 184673 - RNA, 70 nt, Homo sapiens
aaagaggacggaggggcggaggcggaagcccgaccagggggcaccagccgaagccaggcaagcaagaacc

SEQ ID NO: 184674 - RNA, 71 nt, Homo sapiens
gcccccccaacgcccccaccaggcggacgcagccaccacaaggacccaacaccgcacccccacggagcgcc

SEQ ID NO: 184675 - RNA, 82 nt, Homo sapiens
gcaaaggaaaagcgaaccagaggacaaagacccgagagccggaaaacccgacagcaggacaaaggcagccgacccagagaga

SEQ ID NO: 184676 - RNA, 75 nt, Homo sapiens
ggacggggcgaaccgagcaccagacaaagaggcagcgaacgccaaaaacagagagaagcagcgacagcagaaaaa

SEQ ID NO: 184677 - RNA, 83 nt, Homo sapiens
ggaccagaaagccccacaagccaggaaccagaacacgcacagcaaggcaccaaggaagggaaggaaagaaaacacaaaaagca

SEQ ID NO: 184678 - RNA, 69 nt, Homo sapiens
agggcgaaacaggccgacgcaaacgaagggaggaaacccaccccaagaccaggggcgcccccaccgggc

SEQ ID NO: 184679 - RNA, 64 nt, Homo sapiens
aacggggaacgacggcccagcaggcggggaagagaaagggccagccccgagagcgcagacaggg

SEQ ID NO: 184680 - RNA, 77 nt, Homo sapiens
caagcagccccgcccagccccaaaggcggaaacaggggccagcgcagaagacgagaagccaggaggagaagcggccc

SEQ ID NO: 184681 - RNA, 80 nt, Homo sapiens
ccgcggagaccccaccgccggcgcgggaaacgggcgaagcgacgagccgcgaggagggggaggagagacaagaagaaggg

SEQ ID NO: 184682 - RNA, 55 nt, Homo sapiens
cacagcagaacaagccagacaaaccggaaaaggcccgaagaacagcaacagggga

SEQ ID NO: 184683 - RNA, 37 nt, Homo sapiens
acagaccagccaaccaaagaagaggccggcccgagcc

SEQ ID NO: 184684 - RNA, 80 nt, Homo sapiens
accggagagccgcaggacggcgcggcagagccccgacgccacagaacgccggcacagccacaccgagaagaccggcccaa

SEQ ID NO: 184685 - RNA, 78 nt, Homo sapiens
gcgggggacaagcaggaagagaggcaaaaccacccaccaaggaacgcggagcagacacagccaggggagagaacaaaa

SEQ ID NO: 184686 - RNA, 80 nt, Homo sapiens
gcagccagccggcccgaggacaccgacaccagcagacagaagcgaaggggacagggggagaaccgccagggaaacccggg

SEQ ID NO: 184687 - RNA, 59 nt, Homo sapiens
gccaggccggaggaagccacccgacgaggaagcaaaaaagggaacggagccgcacgaag

SEQ ID NO: 184688 - RNA, 80 nt, Homo sapiens
cccagaagcggcgcgcacggacgcggagaggggagccgcagggacaagcgcacccaagccaggcaagaaggagaaggaac

SEQ ID NO: 184689 - RNA, 50 nt, Homo sapiens
caggcacaggcagaacaaccgcacagcccggcccgccaccgcacagaagc

SEQ ID NO: 184690 - RNA, 70 nt, Homo sapiens
gccggcaacacaaagccccccacgccaccacagagcaacccgaccgaggcacaggggcaagagaaagcag

SEQ ID NO: 184691 - RNA, 77 nt, Homo sapiens
cccggacgaaacgaccccaccagccccaaaaggcggcaacaggccccaagacgcagagaagccaccagggggaaaca

SEQ ID NO: 184692 - RNA, 61 nt, Homo sapiens
agaaagagagacagaccccccagggaagaacaggaagagcagagggggaagcccaaagaac

SEQ ID NO: 184693 - RNA, 75 nt, Homo sapiens
agagccggccgagacgcaccgcgggacgggaaccgcgacacaagagacacaggacacccacccgccggggacaga

SEQ ID NO: 184694 - RNA, 73 nt, Homo sapiens
ggaaggcgcgaggaggaaaggaggacgagagaaagggaagcgagaagagcagaagaggcagacacaagaagaa

SEQ ID NO: 184695 - RNA, 89 nt, Homo sapiens
gcgggcgcggacgccggcccgcgcgcgcaccccgcggacgccacagcgcaggaaccggggagaggagggacagccgagccgcaagaaag

SEQ ID NO: 184696 - RNA, 58 nt, Homo sapiens
gacagggagaaagggccccaagacagcaagagcaccgcgacccacaaccgcaccacca

SEQ ID NO: 184697 - RNA, 82 nt, Homo sapiens
cccggccggagccacgcagccgcggcccggagccccggggcggcggacggccgcgggcagaaagaagcggcacggaaggaaa

SEQ ID NO: 184698 - RNA, 68 nt, Homo sapiens
gccgagccagaggaggagcgaccaggacaaggccaaagcgccccccgggccgccacgcgccccacaga

SEQ ID NO: 184699 - RNA, 73 nt, Homo sapiens
aggcacagccacagacagaaacagggaggcaggacagggaagaagggaaggggaacaaacagggaggaaggac

SEQ ID NO: 184700 - RNA, 60 nt, Homo sapiens
gagaagaccacggccgaaggcagcagagagacgcaagaagaggccgcgacagccaccaaa

SEQ ID NO: 184701 - RNA, 80 nt, Homo sapiens
cccaccagaccccggccgccgaccgcggccccgccggccgccggccgcgcgggggccacgaaccgacggggaccccaaga

SEQ ID NO: 184702 - RNA, 82 nt, Homo sapiens
ccggcggcgccggggagggagccagccagaaaagacgaggaaacaacccagacagaagagggagaacccggccagcagacac

SEQ ID NO: 184703 - RNA, 82 nt, Homo sapiens
gcgggcgagcgaggggcaaccagcggggcaccgggacgggccgagccggcgaacagacaagcagagggagccaaggcccaga

SEQ ID NO: 184704 - RNA, 79 nt, Homo sapiens
cacacccgcggggccgccgcaacgggcaccacgccggccacccacgcccacggccaccgaagagaaacggcagacccac

SEQ ID NO: 184705 - RNA, 71 nt, Homo sapiens
ccagcacaaccaaagccggggagggagggacaagagagaagcgcgcaggcaacaccaggagcacagggagg

SEQ ID NO: 184706 - RNA, 65 nt, Homo sapiens
aaggaccaagaaccaggcagggagcaggaacaccgagccgagagccagagggaaagcagagcaca

SEQ ID NO: 184707 - RNA, 100 nt, Homo sapiens
gggacccggccccggcccacaggggggggcaaacccgagagaacgggggacggcaaaacagaacagaaaggcggagaaaaaagagggggaaaagaccacg

SEQ ID NO: 184708 - RNA, 63 nt, Homo sapiens
gcggcccgcaggagcccaccaagaaggaagcgaccgacacaaggacagagcaccaagaccgaa

SEQ ID NO: 184709 - RNA, 75 nt, Homo sapiens
acagccacgcagacacagccagaggccgaagaaggagcacgcccccgcccccggagcgcccagggcgccgcccaa

SEQ ID NO: 184710 - RNA, 73 nt, Homo sapiens
gcacccacagcagagcgcaggaaagacaagccgggagcagacaagaggcaggaggacagcgggaggcagagag

SEQ ID NO: 184711 - RNA, 75 nt, Homo sapiens
agacccgggcagcgcccaccgcggagcggaaggggaaccacaaagaagagaaggcgggccaagaccgacaacgcc

SEQ ID NO: 184712 - RNA, 75 nt, Homo sapiens
ggcaacaccagccaaacacccccagaagacacccccagggcagaaaagcgaccaggcgagggcagaacaaagaag

SEQ ID NO: 184713 - RNA, 75 nt, Homo sapiens
gcacgggggcagggcaaaacacacagcgagacaaagggagccaaaggaaaaaagaccccagacccgcagaaaacc

SEQ ID NO: 184714 - RNA, 75 nt, Homo sapiens
agacgcccaacagaggaaggaagggaaacccgcagaagaaagaagagaagcaggggaaagaaaaccccaaaaagc

SEQ ID NO: 184715 - RNA, 56 nt, Homo sapiens
gacagacaagcagaaaaagggaagggagccagcggccggcgccggcgcacacacgc

SEQ ID NO: 184716 - RNA, 78 nt, Homo sapiens
gaggaggaggcggcgcggcggccccgggaccaaggagaacacaacacacacagccgggccgcaaccagcccccagcag

SEQ ID NO: 184717 - RNA, 85 nt, Homo sapiens
caagcagaagccgaggagccggagaggggcggcgccgcgcggccgaggaaaggcaggagagcgaaagagagcggaaaaacgacca

SEQ ID NO: 184718 - RNA, 29 nt, Homo sapiens
gcagggcgcccccggggacgaaaagagga

SEQ ID NO: 184719 - RNA, 77 nt, Homo sapiens
ccacgagcgggccgcggagcaggagcgcgcgccaggaggccccggaccagacgagcacagaccaaccaggcgggcag

SEQ ID NO: 184720 - RNA, 36 nt, Homo sapiens
ccgacagccgcagaacacccaggcaaagcgccacca

SEQ ID NO: 184721 - RNA, 66 nt, Homo sapiens
cagccggcaaagaagacagaccagagccagaagaccacccgaggccgccacagggaccggggaaaa

SEQ ID NO: 184722 - RNA, 81 nt, Homo sapiens
accaggccaccgccacgggccgagacacgcagcggcggccagggaccaccaggaagaggccgaccagcagccagacccggc

SEQ ID NO: 184723 - RNA, 76 nt, Homo sapiens
cgacgggcagagcaccgagaggaccccaggacaggccgggcgcaccacccgaagccgacccgaagcaccgggccac

SEQ ID NO: 184724 - RNA, 81 nt, Homo sapiens
caccgggcgggccccggacccggagacaccccgcagcacagccgcgaccaagaaacgccgaagggaccaggcagacgggaa

SEQ ID NO: 184725 - RNA, 78 nt, Homo sapiens
aaaagggcgccaacacgaaaagaacagccacaggaagagggaacaaagaaggaaacaggagaagcgggagaagaagcg

SEQ ID NO: 184726 - RNA, 82 nt, Homo sapiens
cccggacaccaggacaagggggcacgcagccggggaccgcccggccgcgagccggcgcagacggaaagagaagggagggcga

SEQ ID NO: 184727 - RNA, 77 nt, Homo sapiens
ccgagagccgcccgggccagcggccgcgcacccccggccggaggcaccagcacacgagaggcgagggacgacagagc

SEQ ID NO: 184728 - RNA, 86 nt, Homo sapiens
caaaccccagcaagagcggaggcgcccggcggagcagaggaaccacacgcgacaggacagcccacgcgaggaaaaaacccaaaggc

SEQ ID NO: 184729 - RNA, 80 nt, Homo sapiens
gcccgacacccggaagagcaggccgcagcggaggagcgaagcagcaggggacgagaggcaccagaaacggcggacgaaag

SEQ ID NO: 184730 - RNA, 55 nt, Homo sapiens
caaaaaacaaggggcacggcgagaagaacagccaccggaggagcccccggcccag

SEQ ID NO: 184731 - RNA, 77 nt, Homo sapiens
ggcaaccccaccggccgacagccgcgacggcgagcccgggccgcgcccgagggagggaagcaaacaggcagacaagg

SEQ ID NO: 184732 - RNA, 73 nt, Homo sapiens
cggagcggcgacgaggggcgccacacgcgcagggcccaagggcagcccaccccggagcaggaagcagcgcagc

SEQ ID NO: 184733 - RNA, 49 nt, Homo sapiens
cccccgagcccagcaccgcgggaaggaaggaagaaagacggaacagacc

SEQ ID NO: 184734 - RNA, 83 nt, Homo sapiens
cagcggggccgagagggagagacgccgaacgacgccccgcacaccggagcgcccagcgcgaggagcacacggcggcggcgaag

SEQ ID NO: 184735 - RNA, 54 nt, Homo sapiens
cagagacaaggggaggagagaaaaaccacaagaggaaaagccaagaaagaccca

SEQ ID NO: 184736 - RNA, 68 nt, Homo sapiens
gaaggagcccagagagccacagcaaacaccaagaccgagaccagacaaagggagcaccagccagaccg

SEQ ID NO: 184737 - RNA, 50 nt, Homo sapiens
aggccccacgcggggcagaagcccccggggagagacagacagagggacac

SEQ ID NO: 184738 - RNA, 55 nt, Homo sapiens
cgcagggcgcccccgggcagaacaaacaaagagcgggcaaacagagaaaaaacag

SEQ ID NO: 184739 - RNA, 41 nt, Homo sapiens
gaggaccgagagaaaccagacgccaaacggcacagagcaag

SEQ ID NO: 184740 - RNA, 75 nt, Homo sapiens
gagaacaggcccagggcgggcgagaaccccagcggcgagcagaccagacacgaagggacccgaggccacacccgc

SEQ ID NO: 184741 - RNA, 109 nt, Homo sapiens
ggggcgcaagacgccgcccacggcccggcaggggaggcgcccaaaccggagggaggcaaggccccgagccccggccccaaagacccaaaacagagacaccccccagccc

SEQ ID NO: 184742 - RNA, 92 nt, Homo sapiens
gggagagaccccagaaacgccccggcggcgacccagcccgagacgccggggcccaagggaagcgaacgcccggaacagacccaacaggccag

SEQ ID NO: 184743 - RNA, 77 nt, Homo sapiens
aaaggacccagggggaacccggagccaaccaagacgagccaggagcaggggcgcggcagaggcgcggacgagcagcg

SEQ ID NO: 184744 - RNA, 79 nt, Homo sapiens
ccgccggccccccgccggcgccggggcgcgccgccccagccagaccccaagaagcccggcacggaaaaaggagggaaga

SEQ ID NO: 184745 - RNA, 81 nt, Homo sapiens
gcccagaaagggcgacaggccaccaacacacggacaagggaggcgaggacggacaaaaggaaacggacgggaggccagcca

SEQ ID NO: 184746 - RNA, 79 nt, Homo sapiens
cacgaagacggcagcgagaggaaggaacacaacggacaggccaggccagcagcggcgcaccagaaagcagggccgagac

SEQ ID NO: 184747 - RNA, 84 nt, Homo sapiens
gggagaaaccccacccccaagaaccaacccccaaaggcgggacaggccaggagggggccacaccgaacccagccgggaggccaa

SEQ ID NO: 184748 - RNA, 76 nt, Homo sapiens
aagaaagaacaaacaacaagcgagaacacgagaaaagcccgcgacgagaggaaaggaaaaggcccaaggagcagag

SEQ ID NO: 184749 - RNA, 78 nt, Homo sapiens
ccccaacagcaagaccagaaccagacacaaaagcaggaaacagggacccgcaggggaagaagaggcaaaaggaggcca

SEQ ID NO: 184750 - RNA, 83 nt, Homo sapiens
ggcgaagcgcgcgccgcgcccggaccccagggcagcgggggcagagacggggaacagggccacccacacggacgccaacgcgg

SEQ ID NO: 184751 - RNA, 51 nt, Homo sapiens
aaacggaaaggaaacacaacaccaagcccacaagacaagccagcgccaggg

SEQ ID NO: 184752 - RNA, 69 nt, Homo sapiens
aaaggagagaccacaaggaaaaccaagaaccagaacggccacagaacacagacaccaagaaaccaagac

SEQ ID NO: 184753 - RNA, 79 nt, Homo sapiens
aggagcggacccccaagacaggaccgcagaacagccaagagcgggcccgggccaaccgagggaacaaacacccaaagca

SEQ ID NO: 184754 - RNA, 77 nt, Homo sapiens
ccgcccgcccgggacccgcggccccgccgcggggaagccggggaacaccagagcggcgcaccgggcgcagagcagga

SEQ ID NO: 184755 - RNA, 69 nt, Homo sapiens
accagcgcgcagagcaaacagcacgagggaacagccgagcccaaccgccagccgccggaacgcagccac

SEQ ID NO: 184756 - RNA, 76 nt, Homo sapiens
cgcccgacacacaggggcgacgacccacgccgggagggacggcgcgggggacccaagggcgggaagagcacagggc

SEQ ID NO: 184757 - RNA, 71 nt, Homo sapiens
cccagagaagcaaccagcagaggaccaggaaacccaaggcaagcggcggggaaaggaaagaaacgacaagg

SEQ ID NO: 184758 - RNA, 78 nt, Homo sapiens
acagagcccagggacacgaagagagaacacagagaacccagaggaaagacaaggcgagggaaaccaacacaagacggc

SEQ ID NO: 184759 - RNA, 62 nt, Homo sapiens
aaaagagcagacgccagaaaccagagcaagacaaagaggccaaggaaaaggaacagagagag

SEQ ID NO: 184760 - RNA, 86 nt, Homo sapiens
aggcggggagagacggccaagcagcaccagcggccggggaaagggaagcagaccccacgagcgaaagggaaaaaacgaaggaggca

SEQ ID NO: 184761 - RNA, 82 nt, Homo sapiens
gccggagcggaaggagcacagacccagggagagccagccgagaaaggagaaagacagcaaagaaaaggagaagaaaggaaaa

SEQ ID NO: 184762 - RNA, 57 nt, Homo sapiens
caagccagccccggagcaaagagaagacaccggaagaagaaggagacccaacacccc

SEQ ID NO: 184763 - RNA, 67 nt, Homo sapiens
ggcagcgggaccgcacacagaaaagggagacagcccggacgggggccccgaacgcggggcaaggaac

SEQ ID NO: 184764 - RNA, 39 nt, Homo sapiens
ggcgacccccagaagcggcacaccaacggcacaaagaga

SEQ ID NO: 184765 - RNA, 76 nt, Homo sapiens
ggggaaacagagaaagaaggcggccaggccaaccgaagggaaggaaggaacagagaagacccgcccccagcagggc

SEQ ID NO: 184766 - RNA, 85 nt, Homo sapiens
gcgagggccgcccagaggacagagcaaggagcaggcagcagcccagacgcggcacagagagggccgggagcgcgcagccagggag

SEQ ID NO: 184767 - RNA, 59 nt, Homo sapiens
cgcgacgccaaccacgacgaagcggaaggcagaaggaaaaggaaaccagacgacaaaag

SEQ ID NO: 184768 - RNA, 73 nt, Homo sapiens
gccggcaaggccagaaaacccgcgagcaggaaccccaggaaacggccagccacagaaagcccgccccagacag

SEQ ID NO: 184769 - RNA, 70 nt, Homo sapiens
agaaccagcagcaaagaagcacgaaaggcaaggaaacgaaacaggaagagggaccggaggcgcaacgcgc

SEQ ID NO: 184770 - RNA, 58 nt, Homo sapiens
caagccgacgagacggagaggaggcacacaccaacgaggcaggaggggcggcaaaggg

SEQ ID NO: 184771 - RNA, 126 nt, Homo sapiens
ggccacacgccagagccggagcgcgaaggccgggacccggccccggcccacaggggggggcaaacccgagagaacggacagaggcacaaaaggagaaagcagaagaaacaggagaaagcaaaaaag

SEQ ID NO: 184772 - RNA, 80 nt, Homo sapiens
ggccgaagagaggacgggagggcaacgagcacaacaggagcacgaggagggaacaaaccgaaggcaacggcacaaaacag

SEQ ID NO: 184773 - RNA, 66 nt, Homo sapiens
gaagaagaagagggaaccccagcgccaaagcggaggaggaacggccgcgccacggcgaccacgaag

SEQ ID NO: 184774 - RNA, 72 nt, Homo sapiens
gcgcggcccggagggcggcccaggaggggaaagacccgaaacggagaccggaaaaggagcgcaccggcaccg

SEQ ID NO: 184775 - RNA, 80 nt, Homo sapiens
ggcccgcagccgccaccacccaggaccagaagggcaccccgagaaacaaagagacaagaggaaaaggacagcaccgggaa

SEQ ID NO: 184776 - RNA, 86 nt, Homo sapiens
agcagcggcggcggcaagacccccccccggaggcggcgggcggaggcggcggaaaaggcgacggcggagacagaagagaggagagc

SEQ ID NO: 184777 - RNA, 78 nt, Homo sapiens
ccacggaggcaccagaagaagcaccaggggaagcagggaaaggccggagagaggaagcggcccggggcggccagcgaa

SEQ ID NO: 184778 - RNA, 80 nt, Homo sapiens
cggccacgagacgagcggcaagcagggcgcagacggagcggagcgaccgagagagagcccgggaccaaggcagcaaggga

SEQ ID NO: 184779 - RNA, 58 nt, Homo sapiens
ccaagacgagccagaaaaccagaagccgaccgaaacaaggaccccccgggagaagaaa

SEQ ID NO: 184780 - RNA, 78 nt, Homo sapiens
caacacagagccaagcgccaacaaacaagcgaaaaacagacaagaaaccgcagagcggaaaaaaaggaaagagagaga

SEQ ID NO: 184781 - RNA, 95 nt, Homo sapiens
cagcgcccacaccccccggccccgaagggcacgcagcagacagccccgggcaccaggcagcaacagaacccggacgcacaaggagcaaagaccgc

SEQ ID NO: 184782 - RNA, 69 nt, Homo sapiens
caaacaaaagacacgagggggggacaagggaggcgggcacagcacgggaaagaagcaaccaccgccaag

SEQ ID NO: 184783 - RNA, 56 nt, Homo sapiens
cggccgagcaggcgagcgaacgacgggggagccacggaccagggggacggcgacag

SEQ ID NO: 184784 - RNA, 74 nt, Homo sapiens
cgaaggcaacaggagcgggaaacgcaaccaccgaaacgggcgaaaaagaagaacagcaaaacacgaaaggcaaa

SEQ ID NO: 184785 - RNA, 68 nt, Homo sapiens
caggagcaccaggcggcgccgagcgcggacggccaggccccgggccaggccccacaggcagacaaaaa

SEQ ID NO: 184786 - RNA, 83 nt, Homo sapiens
accacagcaagacgacaagcacgccgcggagaaccgaaccaacagccagccaaagccaggcagcacagcacaggaaaacaaac

SEQ ID NO: 184787 - RNA, 73 nt, Homo sapiens
gcccggcaggaagaccacgacgagggcagacgccccggcaaaaaacaggggagaggggccaccagaagaaagg

SEQ ID NO: 184788 - RNA, 66 nt, Homo sapiens
cgcagggcgcccccgccgaagccaagcgaaagcccgaaggcccacgagagcggggaggaagccaaa

SEQ ID NO: 184789 - RNA, 87 nt, Homo sapiens
agcaggcaagccggaggagaagcaagaaggcccggacacagcaaaccgggccacagaacagccagacaccagaaccgcagggcgaag

SEQ ID NO: 184790 - RNA, 44 nt, Homo sapiens
caaggcgggaggccgagggcgaggagccagcccccggagcgccc

SEQ ID NO: 184791 - RNA, 107 nt, Homo sapiens
cgggaaaccccgccccaggggagaacaacaacgcggaccagcacggacgccgaagggaagacgcagaagagcaggcggaggccaaaaggcagagcgagagcagaagc

SEQ ID NO: 184792 - RNA, 32 nt, Homo sapiens
agcggagaagccggaacaagggaggagacgag

SEQ ID NO: 184793 - RNA, 79 nt, Homo sapiens
gagacaaaggcaccaggccaccacagaaacaaaagcaacaaagagggccaccaacggcggggggcgaggagcgagcagg

SEQ ID NO: 184794 - RNA, 75 nt, Homo sapiens
gacaccgaccccgggccaaaagggcaaccaagagagccccaaagccacggagcaccacacagcggcagaggacac

SEQ ID NO: 184795 - RNA, 65 nt, Homo sapiens
cgaacaaacgcgccggaacggaaccaaagacaacggcaagcggagaagagcaaggccgaaccgag

SEQ ID NO: 184796 - RNA, 106 nt, Homo sapiens
gcccggaaaccagccccaaaaaaccacgaaggaaaaaggggcgagagagagaccaggaagcccagcggaagcaagaggagaaccaagcagaaccccagccccaagg

SEQ ID NO: 184797 - RNA, 83 nt, Homo sapiens
ccagagcccgggccggcagagccacaagggcgcagaagccggcagagcccaagagacaacaagccgaaaagagaggcaaacgc

SEQ ID NO: 184798 - RNA, 73 nt, Homo sapiens
caacaccagaagaacagaacaacgcaaaagcaacggccaaacccagacaggaccagagacaacacgccccgca

SEQ ID NO: 184799 - RNA, 61 nt, Homo sapiens
cagagccgggagcaagaagaacacccagaggcaaggacggggacacaagaccagccagccc

SEQ ID NO: 184800 - RNA, 73 nt, Homo sapiens
acgccccggggagaggacaagagcgcaaggagaacaaaacaggccaccacgcggggagagggggagcacgcac

SEQ ID NO: 184801 - RNA, 80 nt, Homo sapiens
agaggcccgagcagccagcacggaggccaggcgaaccagccgaaaaaggagaaaccaaaaggaaaagcgaaccagacaga

SEQ ID NO: 184802 - RNA, 68 nt, Homo sapiens
accccagcaggaagagccacagagaaaaccagggaccccgacggagagacaaagaagacggagggggg

SEQ ID NO: 184803 - RNA, 66 nt, Homo sapiens
gaccaacccaagcgaagaagagcggaaaacaaggggccacagacagagggagggggcacgggaggg

SEQ ID NO: 184804 - RNA, 79 nt, Homo sapiens
ccggcacaaaggccaaggagaaggcggacacaggaacgccacaagaaacaacagcaaggcgagggccacgaaacagagg

SEQ ID NO: 184805 - RNA, 35 nt, Homo sapiens
aagaagagaaagacaggagacaccgaaagccaccc

SEQ ID NO: 184806 - RNA, 75 nt, Homo sapiens
caaacgaggggcggggacaccagaacaacgcaaaaacaaggccagacgaaaggaagaccgaggagcagggagcaa

SEQ ID NO: 184807 - RNA, 73 nt, Homo sapiens
ggccgggagcgcgcagccaggcgcaaggaagaagagacgccgcgcggcagacaaggcccggcaggcaaagcgg

SEQ ID NO: 184808 - RNA, 74 nt, Homo sapiens
aggcgcggggaggggagaagaaggaggaaaaacaggggccgaaagaagagccagagggacgagaaacaaagcca

SEQ ID NO: 184809 - RNA, 77 nt, Homo sapiens
gcccgagaaggggacggcgggcgagggaggggaccgccgcgcgggagaacagagacccaccaagaaaccagaacccg

SEQ ID NO: 184810 - RNA, 77 nt, Homo sapiens
ggcccgagggcccgagagcaccgcgccagacagaaagaggaacagagcgaaggcggaacggagcagcggcgccgggg

SEQ ID NO: 184811 - RNA, 69 nt, Homo sapiens
gcaccccaggaaaccaacaagccagaggggagaagagaaacaggaagaaacacaaaccccgcaagcaca

SEQ ID NO: 184812 - RNA, 75 nt, Homo sapiens
gccgggaacccgggccggacgcgccgcgcgggggcccacgcggaggacgcagaacacggcgggcggcccgccaac

SEQ ID NO: 184813 - RNA, 74 nt, Homo sapiens
ccgccccaccgcccgcacaaacaaggggcaggcgcggggcacccggacccagaggcgagccggggacgccaccc

SEQ ID NO: 184814 - RNA, 81 nt, Homo sapiens
ccggaagggggccgccacagagacgaggacgcgcacaggaaaggacgcggaacaagcaggcagccaggcagcagaaggcag

SEQ ID NO: 184815 - RNA, 108 nt, Homo sapiens
cgccccggcgcaccgacggaccgggaaggagcacccaggaccaccagaacgggcgccggccgagcccgggaaaacgacagcagcagcagggccggaagacgccaccgc

SEQ ID NO: 184816 - RNA, 82 nt, Homo sapiens
caccaggcccgggagcgcgagggagcgccaagggcacgggaagaccggaggggacgaagaacgggaaagaccacagcaagac

SEQ ID NO: 184817 - RNA, 72 nt, Homo sapiens
acgaccacaaggacagggcaacaccgaagaaagagccaaacgccaaggcggcaaaggacaggagaaacaggg

SEQ ID NO: 184818 - RNA, 79 nt, Homo sapiens
caagagaggaaaacagaagcgggcgaaaggccgaggggcaaagaaaaggaaagcacggccgaaaagaaggcgaaaaccc

SEQ ID NO: 184819 - RNA, 45 nt, Homo sapiens
aggacacaaggaaagacacaggcacagaagacaacaggacgcaaa

SEQ ID NO: 184820 - RNA, 85 nt, Homo sapiens
cagagcgcagcagcccgccccgcccggcagcgagcggcgccccaacccgggccaagccgacgccagcgggcgccacccaacaggc

SEQ ID NO: 184821 - RNA, 84 nt, Homo sapiens
ccggggacggggcgggcgaccgccacaggggccagccgggccgccgagacgccgagcgggagcgcagggaccgagaggagcggc

SEQ ID NO: 184822 - RNA, 108 nt, Homo sapiens
agaagaggcccaacccccaccccgcccaaggaggcccagcgggaaaaacgaagccccccaagcaacagacggccggcggagcccggacgcccggcagcagagcacggc

SEQ ID NO: 184823 - RNA, 77 nt, Homo sapiens
ggcggacccgccaagcacaggaaccccggggaagaagcgcccgagaaaaagcgcccgaccccgaggaaccagcgaca

SEQ ID NO: 184824 - RNA, 79 nt, Homo sapiens
ggacgggggaccaaggccgagagccggaacaaacgagggcccgggaggaccgacgcagccagagccgccgcgcccaggc

SEQ ID NO: 184825 - RNA, 51 nt, Homo sapiens
cgccggaaacggggcagaaagaaacccgaaacaaacaacagcaccggccag

SEQ ID NO: 184826 - RNA, 91 nt, Homo sapiens
gagcaggacaaggagacggcagagccaaggccgggacaccaggcgcaaaaaccagacaccccacaccaccacccagacgaccaaaagggca

SEQ ID NO: 184827 - RNA, 78 nt, Homo sapiens
cgcagaagggagaccacagcaagacgccgggaccccggaaaccagaaaggagcagccacagcagcacggagacagaac

SEQ ID NO: 184828 - RNA, 57 nt, Homo sapiens
agacgcgggggccgccccccgggcagaagccaggaccccaccaacggacagagaagg

SEQ ID NO: 184829 - RNA, 36 nt, Homo sapiens
ccaggccagaaaacagggacagccgccggagcgcgc

SEQ ID NO: 184830 - RNA, 71 nt, Homo sapiens
caggcccacccacagaacagaaaagggacagggcacaaggcaaaggggcagggaagaaagggaagggaggg

SEQ ID NO: 184831 - RNA, 52 nt, Homo sapiens
gggacagggcgaagcacagaaccagcacgaaaacgaaggaaggaggacccga

SEQ ID NO: 184832 - RNA, 74 nt, Homo sapiens
aaaaaagaggagagcacggggcgcgagcgaacggagcaaacgaggcgggacgccggcagcaagcaagaaagagg

SEQ ID NO: 184833 - RNA, 67 nt, Homo sapiens
accagaaagccggagcagaaggaaaaagagaacagaggagagagggccggcccagggagaacgcaaa

SEQ ID NO: 184834 - RNA, 74 nt, Homo sapiens
ccgcccaacccacgggcgccggccccgggcacgcaacccccccccgaacagaaacggcagacccaccgaccaac

SEQ ID NO: 184835 - RNA, 84 nt, Homo sapiens
agaagagacaaggcaaacagcgacacagacgacaccaaacaggccacgagaagcaaaggaggaaggaggcgaacggggcgcgga

SEQ ID NO: 184836 - RNA, 72 nt, Homo sapiens
aaggaaacggaagagaaaggaccgaagaacagcacgaagccagagagggagggacaaaagaagaagacaccc

SEQ ID NO: 184837 - RNA, 77 nt, Homo sapiens
agaagaaacgaagagcagaaagacgagcagaaaaccgagccgacaacacggcagcccacggagcaggcgcgcaagag

SEQ ID NO: 184838 - RNA, 80 nt, Homo sapiens
gcgcaaaggcggaggcggaaggggaaagccggagccggccagggaaaagagacgcaaaccacgaggacagagaagagaga

SEQ ID NO: 184839 - RNA, 56 nt, Homo sapiens
ggagacaagcgcagcgagggaaacacaaagaagacaccagaagggccagcaccacg

SEQ ID NO: 184840 - RNA, 82 nt, Homo sapiens
cgagaccggaccgagagcggaccgagagcgcgaaacgcacgagaaggccggacagaagccagccagagcccacaaacagccg

SEQ ID NO: 184841 - RNA, 74 nt, Homo sapiens
cagggaacgcaagggaaaacaaagaaaacgaaaggaaagaaaggggaccccacaccacaaaccgaggaaagaag

SEQ ID NO: 184842 - RNA, 58 nt, Homo sapiens
ccagcaaccgcggaaggaccgagggcggaccgccgggggccgaagggcaacacagcag

SEQ ID NO: 184843 - RNA, 74 nt, Homo sapiens
gggacgaacgagcgcaggagggacgaagccaggaaaaagcccaggaggcggggaggcggaaggcaagcccaagc

SEQ ID NO: 184844 - RNA, 69 nt, Homo sapiens
gcaacgacaaacaccaggaaagaagccaaaaagaggcccggaacgcaccggaaaaacagacacccaaaa

SEQ ID NO: 184845 - RNA, 84 nt, Homo sapiens
aaccgcccccgcccagcagggcacgccccgaacccgcgcgcagggaacagcggggcaaacaaggggggagagcggcgcggggac

SEQ ID NO: 184846 - RNA, 85 nt, Homo sapiens
gaaacacaagcgggcggcgcccaaacaggcacccaccaccagaccgaggcgcagaacaagcaaaagcaagcccagccgagccaag

SEQ ID NO: 184847 - RNA, 76 nt, Homo sapiens
ggcaagacaagaccccagacaaggagcagaagacagagggaggagggccacggacaaacacgggcccggcccagca

SEQ ID NO: 184848 - RNA, 59 nt, Homo sapiens
cccgccggcccccccacggaaacaggaacacgaaagaggaaaaacgcacaagaaaccga

SEQ ID NO: 184849 - RNA, 74 nt, Homo sapiens
caagggcccaggggaccggacaagaggcacaacaaacggagagcaaagacacagccagcgccgcccggcacaca

SEQ ID NO: 184850 - RNA, 66 nt, Homo sapiens
caggaaaaacaaagaagacccagaggagcaagaggggggggcccccccgaagaaaggaaccgggga

SEQ ID NO: 184851 - RNA, 76 nt, Homo sapiens
ggaaggccacgagggcggaccccggagacgaaaccagacagagggcaagacagagaccggcgcaagagcacccgga

SEQ ID NO: 184852 - RNA, 67 nt, Homo sapiens
caaccgccgacaaccccgagaggagccaaggaacgaacagggcgggcggaggcgggaagacaagaga

SEQ ID NO: 184853 - RNA, 72 nt, Homo sapiens
cccagagcaggagaagcgagcccggacagaccaaccgcaggcgcaacgagacgacgggaccgaaggaccccg

SEQ ID NO: 184854 - RNA, 81 nt, Homo sapiens
gaagcagccgcagggcaccgcgggggccccggagacaccaccagccggccaagaggacagaggacaagacaggcggacagg

SEQ ID NO: 184855 - RNA, 69 nt, Homo sapiens
ggagaacaggcgggcgccgagcgaacgcgcaacagggccgcacgcaagaaggcggggacgagacacggg

SEQ ID NO: 184856 - RNA, 59 nt, Homo sapiens
cacagcccgcagccccgccagccacccccagggcccagccagaggaagagaggaaccga

SEQ ID NO: 184857 - RNA, 76 nt, Homo sapiens
gaaccagagggacaacaggcaggagaaagggagcgcaccccagggaaaagagggccggacagaggcagcagcccgg

SEQ ID NO: 184858 - RNA, 49 nt, Homo sapiens
gcggaagcaaccagagcccaggaagaggcgggacggaaagcagacccgc

SEQ ID NO: 184859 - RNA, 73 nt, Homo sapiens
gccgcggccgggcccgagggcacacagaggcacgagaacggggaacagaacagcccaggagcggcaccgccaa

SEQ ID NO: 184860 - RNA, 77 nt, Homo sapiens
aagaaacccaggacgagaacagcaacagacgcgagggccacaagacaagaccggacaaccagcacaccagaggcccc

SEQ ID NO: 184861 - RNA, 80 nt, Homo sapiens
gcagcggcgcagcccggggaccgggcaagcggaaagccggaagacgccacacgcggggagagagaccccccgacaagcag

SEQ ID NO: 184862 - RNA, 87 nt, Homo sapiens
gcgccggccccgcccggccccgagggcaaggagcgcagacaagaagcagccaggagacggaagaccagaccggcagacaaggccgcg

SEQ ID NO: 184863 - RNA, 68 nt, Homo sapiens
cacgccgagccgacggacgcacaggccgcgccccaggggagcggcgacagacacgggaagcaagagaa

SEQ ID NO: 184864 - RNA, 75 nt, Homo sapiens
aggggcgagcaggccggagggaccgggaaggaaacgaaaacaccacgacgaagacgggagaacacagcgccggca

SEQ ID NO: 184865 - RNA, 77 nt, Homo sapiens
acgggaaacacaaaacgggcgggaaagaaaggaagaaaacagggggaagcccagaggaccagccaggccacggccga

SEQ ID NO: 184866 - RNA, 35 nt, Homo sapiens
ggacggggcggggggaacggccgaacccagccacc

SEQ ID NO: 184867 - RNA, 99 nt, Homo sapiens
cgggccgcgccgggcacagccggaaagcaggaccgcgacggcagcagagcagacgaccagccaaggccgcgcccgccaaaaaaacagcagaggcgcgca

SEQ ID NO: 184868 - RNA, 72 nt, Homo sapiens
gaggaaggacacggaaagaacaagcgcacgacaagccaagaacgaaaaaaacagaggcgggaaacacggcaa

SEQ ID NO: 184869 - RNA, 73 nt, Homo sapiens
agaaaaaaccaggaccggaaaagaaggagggacgaagagagccaggggggagaagcaaagcgaaagaacaaaa

SEQ ID NO: 184870 - RNA, 55 nt, Homo sapiens
gccacaaaaagcaagcagcggaaaacccacagggagcaggaaccaggaacggaga

SEQ ID NO: 184871 - RNA, 65 nt, Homo sapiens
agaagggagccagcacaccggcaagccgccgcggagaggccggaaggaccacggaaaccccacca

SEQ ID NO: 184872 - RNA, 72 nt, Homo sapiens
cagccaagaagacacaagaaaacaccaggagaggagaacggccacggcccaaggaggacgccaccccaaccc

SEQ ID NO: 184873 - RNA, 76 nt, Homo sapiens
gaaacgaccaaagaccagcaccggcccgaaacgccgaaaaacccaagcaggagagagccaaaacgacaggccaggg

SEQ ID NO: 184874 - RNA, 83 nt, Homo sapiens
gaacgaagggacagggaacagccagacgagagccagccacacgaggagacggaaccggagaaaagggaaccaagagcccagga

SEQ ID NO: 184875 - RNA, 94 nt, Homo sapiens
gaagcgcgaccagagccaggagggcgcggggacgcaacccaacagggccagccaccaggcccagccggagcgcaccacccaagcaaggcaggag

SEQ ID NO: 184876 - RNA, 63 nt, Homo sapiens
ggaagaaccagacacgcgcccgccgccaacaacaagcaggaacgcaacggaaagggaaggacc

SEQ ID NO: 184877 - RNA, 77 nt, Homo sapiens
gcgaggcgccgcccccccaggacagcggaggggaaccgcgcgcgcaacccccggccggcacaagaccgcagcacccg

SEQ ID NO: 184878 - RNA, 51 nt, Homo sapiens
acaaaaccacaagggaggaaagcaaagcccccaacaccggccgcagaaagc

SEQ ID NO: 184879 - RNA, 60 nt, Homo sapiens
caggagccgcgacaccggaacacaaaccaaaacagaggccaacgcagacccacagcccag

SEQ ID NO: 184880 - RNA, 76 nt, Homo sapiens
aagacagcgaggagcagcagcagcccagcaggcgcggcccgccaggaacagagacgcaggcaagagcgcggaggag

SEQ ID NO: 184881 - RNA, 63 nt, Homo sapiens
gggaggacgcagcaaaccaccagaagcccgggaccgggagcccgggaccgggagccggggggc

SEQ ID NO: 184882 - RNA, 79 nt, Homo sapiens
gccggacccagcgccggcccccaggcgaagaagcgcagccgcaccggccaaggggaaagcaacggcgcaagcggcggcg

SEQ ID NO: 184883 - RNA, 78 nt, Homo sapiens
gcacacaggagcacacccaggacagacagccccaggaggacaggggcggcagccgaggcggcagcgaaaaaaagagcc

SEQ ID NO: 184884 - RNA, 64 nt, Homo sapiens
ccccagcagcgagcgaaggacacgcagccccaggacacagcaggggccagacaaccagacccgg

SEQ ID NO: 184885 - RNA, 87 nt, Homo sapiens
cgccgggcaccgaggaccagccaagacaggagccaagccgccaggccaccacagcccggggagcccacagcgccacgccggaacaag

SEQ ID NO: 184886 - RNA, 114 nt, Homo sapiens
ggcggcgcgcgcggcgcgggacgcgcgcgggcacccacggagccccggggcggcccccccagcgccgccgcccagccagccccagggaagagacccggcccaggcggaaacagc

SEQ ID NO: 184887 - RNA, 71 nt, Homo sapiens
gccccgagaccccagagagggagcagaggagagacaccaccgcgaacaacacaacagggagcaaaaaggcg

SEQ ID NO: 184888 - RNA, 87 nt, Homo sapiens
gaagcgcggagagacggcgcccgccccccgccgccgcccaagaacccccaggcggacaaaccccgcgagagggaccgacgccggacc

SEQ ID NO: 184889 - RNA, 92 nt, Homo sapiens
ccaggaccaaaagaggaagaagcgggacccgcagggcaaaggggggaagaacaaggaggaccagagagagaagaaaaccggaccaaacaggg

SEQ ID NO: 184890 - RNA, 73 nt, Homo sapiens
caaggcaccaagacgcaggggggaaccacagcgacaaggacggggggcccgggcgaaaccggaccgggcccgg

SEQ ID NO: 184891 - RNA, 104 nt, Homo sapiens
caccagccgggcccgcgcgcccggccaagaggcaaaggggaggacgcagcaaaccaccagaagacggcccgccacgggccccgcagccgcgcccgagcgcccga

SEQ ID NO: 184892 - RNA, 88 nt, Homo sapiens
aagaacacggaaaccacggaaccaaagaacccggaaagacccccgaagcaccaaagcgggaagccaacaggcgagcgaagcagaccac

SEQ ID NO: 184893 - RNA, 70 nt, Homo sapiens
gcggcggggcgggaggaacgggggagcccacaggagccagacccccggcggcccaaggcgccacccgggc

SEQ ID NO: 184894 - RNA, 71 nt, Homo sapiens
ggaagaaagcggaaagagcgacaaacaaagaaagacggacaaacaaagcacgcaccagcagacaaggcgcc

SEQ ID NO: 184895 - RNA, 81 nt, Homo sapiens
cccagaaccggaccggccacacccccacgccggcggaggggcgcccccccaagggaccgaggccacccggccagcggggac

SEQ ID NO: 184896 - RNA, 61 nt, Homo sapiens
gccccacgccggaaagcggaaacccggcggcacaccccaaagagaccagaaagcaggcaaa

SEQ ID NO: 184897 - RNA, 56 nt, Homo sapiens
cggagcaccaggcagaaaaagcaggagcgagaccagcaccagaggggcggagaggg

SEQ ID NO: 184898 - RNA, 60 nt, Homo sapiens
gggaccgcggccacaacaagaaggccggcccacagcccaaaaagaaacaggaccgaaagc

SEQ ID NO: 184899 - RNA, 72 nt, Homo sapiens
ggagaagcagaaaacccggccagggacaggaaagaaggaacaacggcaagcggagaagagcaaggccgaacc

SEQ ID NO: 184900 - RNA, 88 nt, Homo sapiens
cggcccggccgaccccggaagcgagcgcggacgccacccgggggcacagcaaggggcggagcaggacccaaagaagccagaaggaaaa

SEQ ID NO: 184901 - RNA, 78 nt, Homo sapiens
gcccccgggggcccgacgcacacgggggcggacaccacaagaagggcgccaggcaagaaggggaaaagggaagaggaa

SEQ ID NO: 184902 - RNA, 77 nt, Homo sapiens
cccggcaaagacggacaagcgcaggagcccccaccgccacgccggaaccccaagaccaagcacaggcgcagcgccag

SEQ ID NO: 184903 - RNA, 60 nt, Homo sapiens
gcacgccgcgcggagccagcgccacggccgcaccaggacaggaggccagggcacgggaag

SEQ ID NO: 184904 - RNA, 117 nt, Homo sapiens
acgagaagaggagagggagagggcccaggcggaagagcaagagaagaccccacagaaaccagcagggcccagaggagcccgcccagcggagagcaaaaccgaagacaaccccaaaac

SEQ ID NO: 184905 - RNA, 72 nt, Homo sapiens
cgaagggaagacagcaggacaaggccaaccaaggacggagcaacaggagcccacgagcggccgcaagaaagg

SEQ ID NO: 184906 - RNA, 76 nt, Homo sapiens
cggaaacgggaggggagcggaccaggagaaggaagccgggccgggacaggaaaccgccaccgagaacggcaccgga

SEQ ID NO: 184907 - RNA, 71 nt, Homo sapiens
cagggacgcagggggcagggcagaggacagggggggcccacgcggaggacgcagaacacggcgggcggccc

SEQ ID NO: 184908 - RNA, 84 nt, Homo sapiens
cgggaacgggagaccggaaggaagcgacgcacgaccaggagagcgacgcaggggaggacagggaacggcgaggagccaccggga

SEQ ID NO: 184909 - RNA, 83 nt, Homo sapiens
caacaagagacgggacaagacagggcaaaggacagaccaggacccaggagggcaccaggggagggaccggacccgagaagcgg

SEQ ID NO: 184910 - RNA, 73 nt, Homo sapiens
gcccggcagcagcgacgggaagaaaggaccaacccgaggaaagagaggcagaaccaggaaacagccagccgag

SEQ ID NO: 184911 - RNA, 83 nt, Homo sapiens
gccgaagcagccgggagccggagcgggcgcggacgccgaggcaccgaggcaccagaggaggcggcgcccagcggccacacgcc

SEQ ID NO: 184912 - RNA, 60 nt, Homo sapiens
ggaggggcgcggaggcgaccgccaggcgcccaaacccggaccaggccggggggggcacag

SEQ ID NO: 184913 - RNA, 72 nt, Homo sapiens
aacaccgggaagaacacagaggaaccagaaaagaacgaggccaggagagcgagcaacagcagaaaagagaag

SEQ ID NO: 184914 - RNA, 86 nt, Homo sapiens
cgagcgcccccagagggagcgaccccagccacagcacacaggaccaggcgcgagaacagcacccgcgccagacaaccagcaaggaa

SEQ ID NO: 184915 - RNA, 69 nt, Homo sapiens
ggaagcgacgaggagcgagacagaaaggccagccacggaacaggcaaggaagaaaacagacaggaaaaa

SEQ ID NO: 184916 - RNA, 106 nt, Homo sapiens
accaggcaggagccgccccaggggcgggccgcgacccgcgagaggcagaggacagaaggaacagagaccgccaggggaaagccccgcgaaggccccgagggcgaag

SEQ ID NO: 184917 - RNA, 71 nt, Homo sapiens
gaaacgccaagaggggcggccgccgagccacagccagacagaaaccgcaggacggacggacgggggccggg

SEQ ID NO: 184918 - RNA, 50 nt, Homo sapiens
gcaggagcacgggaggacagaacagagaaaaggaggccggacaaaaaccc

SEQ ID NO: 184919 - RNA, 77 nt, Homo sapiens
agaaacaggaaaagaaaccgaaagaacgcagaggacgacgaacacccaggcaggccagagccgaaccaaagagcagc

SEQ ID NO: 184920 - RNA, 58 nt, Homo sapiens
acaccgcaagaggacagggacccgccacgcggagcacgcgagagcgcacgcggggagg

SEQ ID NO: 184921 - RNA, 78 nt, Homo sapiens
aaggagcgaaagaacaggccagaaaacagaaggccacgcggaaacaaggcgaccccagaaaggacaggaaaagccaga

SEQ ID NO: 184922 - RNA, 41 nt, Homo sapiens
cccccaaccccgggaaaaaggggccgggcccagggaaagca

SEQ ID NO: 184923 - RNA, 121 nt, Homo sapiens
gaaagcaccagacgccaccacgggcacccgcgccgggcaccgaggaccagccaagacagggcgaaccgaccaagaacaacacccagagggccaggagaaggcgaagagagcagcgaccaac

SEQ ID NO: 184924 - RNA, 74 nt, Homo sapiens
ccggaaacggaggagaaacacaggcgaagccgacgagcccgaacagacgcaccagcgggaggaagagggacggc

SEQ ID NO: 184925 - RNA, 58 nt, Homo sapiens
gccaaacgggcagggccaggaaacaagacgaagcccgcagaaccggccgaaaagcaca

SEQ ID NO: 184926 - RNA, 64 nt, Homo sapiens
cgacagagaggagggagaacaagcaacggcggcggcagcggagagccgcccgaccaaccggcac

SEQ ID NO: 184927 - RNA, 76 nt, Homo sapiens
cccccccccagggccaggcgccgccagaacgagcccaaaaggcagagcgaggagagaagaaggagggaaagccaaa

SEQ ID NO: 184928 - RNA, 70 nt, Homo sapiens
gaggaaaaaaccagggcgcaaaaagagcgaagggacaggccacgccaccaaggcgaacagaaaaccacag

SEQ ID NO: 184929 - RNA, 85 nt, Homo sapiens
gcagaacaccaaccgcccaggcccaccaagcagagcgcccccgaccccgaccggcaggccccaggccccggccccacgcccacgg

SEQ ID NO: 184930 - RNA, 79 nt, Homo sapiens
gggacagagccccgggggaacgaccccacccgaggagcccgagcaggggcagaagagcgaccggcaagccgccaaaggg

SEQ ID NO: 184931 - RNA, 78 nt, Homo sapiens
agccagcacggccaagcagccaccggacggaaagaccacagcaagaccacgcccccagccgggggaccaggccgaacg

SEQ ID NO: 184932 - RNA, 81 nt, Homo sapiens
cgaaaagccccaagaaagcccaggacgggccaagagagcccgggcccggaaaggaaaacaacggagcacgcaaagcaagcc

SEQ ID NO: 184933 - RNA, 95 nt, Homo sapiens
gcccgcaaccagcagagcccaggacacaagcccagcgggaccagacaccgcggaagcgggccggcgagagagaacgcaagaccacccccgacaca

SEQ ID NO: 184934 - RNA, 73 nt, Homo sapiens
gggacccccagaccaccgacagcaccaagaccaacagcaacggacaggacagaaccagagcccaaggaagcaa

SEQ ID NO: 184935 - RNA, 83 nt, Homo sapiens
caggccggcgccggaggaagagcagagggggaccagagagcccaacgccgggccaagaccccgagacaacaggcacaaagaga

SEQ ID NO: 184936 - RNA, 82 nt, Homo sapiens
aagagaagcaccacaggcgcaggcgaccgcagagaccggccagccacagagcagagaaagccggaccagcagggagccgggg

SEQ ID NO: 184937 - RNA, 75 nt, Homo sapiens
cgcgccggcacggcagagcgcagcgccccccccagcccgcgcggcgccgcagcacggagcgcacaggagcaccgg

SEQ ID NO: 184938 - RNA, 68 nt, Homo sapiens
caaaagggccacagcggagaaacccaccaccacaagggcccgcgccgaccccaccacgcccgaaccgc

SEQ ID NO: 184939 - RNA, 83 nt, Homo sapiens
cgggagacccaggcgggacagagggagccaggcagagcgaggaccagacaaaaggagaggcgcccccacacaaaaaggaacaa

SEQ ID NO: 184940 - RNA, 67 nt, Homo sapiens
caaccaggggacccccaacccaccggcacgacagggaccagaaaagacaggacaggggaggcaagac

SEQ ID NO: 184941 - RNA, 42 nt, Homo sapiens
cagcaaaaggaaccacccccagacacggccgccccgaagcgc

SEQ ID NO: 184942 - RNA, 68 nt, Homo sapiens
acagacacacacacgccccacagaggcgggacacaaaaccaaccccgggcaggaacaaagagggagcc

SEQ ID NO: 184943 - RNA, 71 nt, Homo sapiens
cagaaacagcagacggaggccgggagcaggcaaagcgagacagcccaggaaacgagacccagaagcgggga

SEQ ID NO: 184944 - RNA, 57 nt, Homo sapiens
cagaagagaagcgagaacagccagagagaccagaggacaacacaaggaccgaggccc

SEQ ID NO: 184945 - RNA, 66 nt, Homo sapiens
cgcccacgaacgccaagcccggccccaggaccccaagcaggcccccaaaacacaagaggacggaga

SEQ ID NO: 184946 - RNA, 78 nt, Homo sapiens
gggcacaagacgcggccgcgggcccacagcaggcgaggaccaagaacgcccagcccgcgggcaccggcagaaaggagg

SEQ ID NO: 184947 - RNA, 81 nt, Homo sapiens
aaggccaccacaccaagaacagccacagacggaacaagcagcaggaaaggcaccaggccagccggaaacacagaacacaag

SEQ ID NO: 184948 - RNA, 70 nt, Homo sapiens
acaccgacacggggcggggaagcgggccaaagagcacagggacagaaaaacagcgcagacgagccgcaag

SEQ ID NO: 184949 - RNA, 75 nt, Homo sapiens
ccggccccccggcggagaagaagcgcggccgcaccggccaagaggcccacgcggaccggcagcgccaccggacca

SEQ ID NO: 184950 - RNA, 74 nt, Homo sapiens
gaacagcagcagacacccagggacaggaggacaccaccaagaacggagagacaagaaggccaaacagccacaag

SEQ ID NO: 184951 - RNA, 71 nt, Homo sapiens
ccaaggacaaaagagagaggcccgcagaggaggagaccagaaggcgcgaacagggcccacccgccacgaca

SEQ ID NO: 184952 - RNA, 74 nt, Homo sapiens
aacggaccaccagaaagcaccccacaggggagcggaaaaacaagaaggggcaaccccaaacagccacaaacccc

SEQ ID NO: 184953 - RNA, 43 nt, Homo sapiens
caagaggagagggcaagccgcccagggcacagcagccgcagcc

SEQ ID NO: 184954 - RNA, 71 nt, Homo sapiens
ggaggagggcgcggaggagaggagcgagcccagcccagggaagagaacggaccgcagcagcaaacagaagg

SEQ ID NO: 184955 - RNA, 78 nt, Homo sapiens
ccccagacagcaaggaaagagcgcccaagacagcccagcgcaaggggagacggacgcaaagacaagggagaagcggcg

SEQ ID NO: 184956 - RNA, 80 nt, Homo sapiens
gcacgagccacccaccggagaacggccagggccgcaccacgacacgcagcagaccaacgaaacccgcgccagagagccaa

SEQ ID NO: 184957 - RNA, 56 nt, Homo sapiens
gagaacacagaaaccggccccagggggggaggagggacaacacacaacgcaggcgc

SEQ ID NO: 184958 - RNA, 58 nt, Homo sapiens
gcaccggcagacccggggaccgggaagccacagaaagcccgccccagacagggccccg

SEQ ID NO: 184959 - RNA, 71 nt, Homo sapiens
acaggccccaagccagaagaaacaaccgccaccggggagcgaacacaggaaccagggcacaggcacggggg

SEQ ID NO: 184960 - RNA, 42 nt, Homo sapiens
aagagggaaccccagcgccaaagggccgcacccagaaaaagc

SEQ ID NO: 184961 - RNA, 76 nt, Homo sapiens
acgagcagcggagaagcccaccacaggaacgaaaccggaagggacgggcaagggccaccgcgaccgcggggacgga

SEQ ID NO: 184962 - RNA, 84 nt, Homo sapiens
gccggagccagggaggcggcggcgggaacgagggcgagcagaggacgacaggccgggagccgaggccaccaagcaggccaggga

SEQ ID NO: 184963 - RNA, 109 nt, Homo sapiens
ggcacagccgagccccaccgaagagaacagggccggggcacgacgacccaacagcaaggcaaaaagggcgagacgaaaaacaagcaccaggaaggagcaagaccggcac

SEQ ID NO: 184964 - RNA, 68 nt, Homo sapiens
cggaaacggggagaaccagcgggggcccagagccagaaccaagccagacacagaaagaggccacgggg

SEQ ID NO: 184965 - RNA, 77 nt, Homo sapiens
cgacagaggaaaaaaacggagcgagcgggaaacgcggcgaagcgggaccagcgccaaacgcgagagaacgcgaagcc

SEQ ID NO: 184966 - RNA, 73 nt, Homo sapiens
gacaaaaccccgaaaaaggcgggcagaggccggccccagggggcaaaagcgggggagaccaaggacaggaaca

SEQ ID NO: 184967 - RNA, 79 nt, Homo sapiens
ggccagagcgggagcgcgcgcggcgcggcggccgggccccgagacggggacgaggcccacgcggaccggcagcgccacc

SEQ ID NO: 184968 - RNA, 77 nt, Homo sapiens
acaagacaggaaggaaagagggcaaccgaagaccaacaaggaacggaaaacagccccaaagcagcagaccgaagaaa

SEQ ID NO: 184969 - RNA, 39 nt, Homo sapiens
cacccccaaagcagcaccagaaaaagaggcaaaccacac

SEQ ID NO: 184970 - RNA, 73 nt, Homo sapiens
gacagggaggcgccagcccgaaggcggcccgcaaaccccgccgagccgccgagcggaggcgagccggcccccg

SEQ ID NO: 184971 - RNA, 75 nt, Homo sapiens
gaagaaaccggaaaacaggggaccacaacagacaaagaacagaaaaagaaagccagagaacagaaaggaagaagc

SEQ ID NO: 184972 - RNA, 73 nt, Homo sapiens
acaagcaaagaaccaggacaaaaaggaaggcccagaaaaagagaccaggagcgcgcaaaaggagacacaaacg

SEQ ID NO: 184973 - RNA, 69 nt, Homo sapiens
gacacaagccagacaaccggcagaaacagaggacaaggcagcaaagaagagcccagaagccgaaaagca

SEQ ID NO: 184974 - RNA, 62 nt, Homo sapiens
acccggacccaaaggccagcaaagccgaggaaacccagacccaagaccaaccgaggaggagg

SEQ ID NO: 184975 - RNA, 84 nt, Homo sapiens
ggagccggcgcgagaggggcgcggccggagcgggcggcgagacaaaggcgacgagcgcaggagaacaccaaccaccagggaaga

SEQ ID NO: 184976 - RNA, 82 nt, Homo sapiens
cagccccacacggcaagacacagagagacggcagccgcgacagacacaccacgggcaacccccagcccaggaggagacgacc

SEQ ID NO: 184977 - RNA, 74 nt, Homo sapiens
agccacacccagccaccccaacccgcagccaggcaccccgaagaaggagaggagggagaccggcaccgagacgc

SEQ ID NO: 184978 - RNA, 68 nt, Homo sapiens
gccaccaaccgacaagcccaggcagaagggggccaacagaagccacagcccgaaaaagaagaggaaca

SEQ ID NO: 184979 - RNA, 69 nt, Homo sapiens
cagcgaacggagaggagccagagccccacgggaaggagagcagccagcagggaccaggcagacgaccaa

SEQ ID NO: 184980 - RNA, 73 nt, Homo sapiens
gccaaaccggagacaacaaagacccaaagagaagacgaaacggacggcacgggaaaaacaggaaacccacgcc

SEQ ID NO: 184981 - RNA, 73 nt, Homo sapiens
caggcacgagcgcggcgcggggacccacagcccggcgaccacggggaaccgaggcagaagcgaagagcaaaac

SEQ ID NO: 184982 - RNA, 75 nt, Homo sapiens
acggccccagcccaagcccccgggggagccgaaaccggaaccgaagggcggagaacggaaaagcaccaggaagca

SEQ ID NO: 184983 - RNA, 81 nt, Homo sapiens
gccgcccagccgcccagcgccgccgcgcccggccaagggcggagaacggaaaagcaccaggaagcagagaggaccgcagaa

SEQ ID NO: 184984 - RNA, 84 nt, Homo sapiens
gggcacgcccaggaggcgccggggaacgcagggcgccgaggccagcagaccacccccacacacggacggggcacaggacaggag

SEQ ID NO: 184985 - RNA, 71 nt, Homo sapiens
caagaaagacccgccaaaaccggcgcacagagaagaaggggggggggacaaaggcgaccaaaacgaggagg

SEQ ID NO: 184986 - RNA, 78 nt, Homo sapiens
ccaccacggagaacaagccaccccagaaaggcagggacacaacgccacgacgagcgggcaaggcccccacgccgcgcc

SEQ ID NO: 184987 - RNA, 66 nt, Homo sapiens
caaaagccaggcagccccgaggaggcaggcgccaccacagacggaaaaagggccaccccgaccacc

SEQ ID NO: 184988 - RNA, 74 nt, Homo sapiens
aggaggggaaaaagacaagaaaagaaagaaagccacaccaaaagccaagggagccaccagaaaggaacagaaac

SEQ ID NO: 184989 - RNA, 51 nt, Homo sapiens
gggaagccagccggaagaagcaggcagaaacaggaccacacgaaggggcag

SEQ ID NO: 184990 - RNA, 78 nt, Homo sapiens
caagcggcccacagcaggacggaagcgagggcacgggcggcagcccgagaccgcagcagccgcccgggaacgaagcgg

SEQ ID NO: 184991 - RNA, 86 nt, Homo sapiens
gcccggagccggcgcccccggcgcggcagggagcaccggccaaggggcagcgcagcggcaggcgagggcagcgcagggggcgcagc

SEQ ID NO: 184992 - RNA, 77 nt, Homo sapiens
gcaccgaggagacgccacgccagggcacagggaagaaacggcaacagcccagacaacaacaaggaagaaggaagaga

SEQ ID NO: 184993 - RNA, 73 nt, Homo sapiens
gagccgaccgcgccgcacgggagccagcggggacaccgagacggcggaacaggaaaagcaacaacagggacca

SEQ ID NO: 184994 - RNA, 59 nt, Homo sapiens
agcgcacacagcaagcacgaggacacgcccaccaagaaagaaccggaaaggggaccggg

SEQ ID NO: 184995 - RNA, 69 nt, Homo sapiens
gacgcaaccacccaaaacaccgagcagaacaccggcccacaaaacaggagcgaagaaaccgcaaagggg

SEQ ID NO: 184996 - RNA, 55 nt, Homo sapiens
gaacagggacgccagccgcagaggaagacccggggccccggaccgggcccccggg

SEQ ID NO: 184997 - RNA, 59 nt, Homo sapiens
cgccgaccccccggcgccgcgccggcggcggcacacagagaaaaaaagggaacaaaaca

SEQ ID NO: 184998 - RNA, 82 nt, Homo sapiens
aacgaccccccgcggagccggggacccccacgagaaggcagagcccaggccggccggcgacccgggccccggcccaggcgca

SEQ ID NO: 184999 - RNA, 52 nt, Homo sapiens
acagcagacaaggggagggaaggagggggggaggagggccgaaaaagagggg

SEQ ID NO: 185000 - RNA, 51 nt, Homo sapiens
ccgcccagacaaccgacaaaccggcgaccacacacggggacgacggggaag

SEQ ID NO: 185001 - RNA, 82 nt, Homo sapiens
gacaacccagaaaaacgagggcacacaaacagagcagcacacagcccaaggaaaggcccaggcacagcagacgcacggaggc

SEQ ID NO: 185002 - RNA, 77 nt, Homo sapiens
ccgcgcccacggccccgccagcaaggcggcgcgcccaggaggaaaccgggcgccaggccgcaccgcgcacacccagc

SEQ ID NO: 185003 - RNA, 91 nt, Homo sapiens
cgagcagggggggggggaagccgcagcggaaagcaggagcacagacccgggacagaggcaccgaaggcaagaagaacagcagccaccgcca

SEQ ID NO: 185004 - RNA, 60 nt, Homo sapiens
ggcaacagaaagagcaacagcagggcaacaggggacgcacagaaaagacaaaacaaagac

SEQ ID NO: 185005 - RNA, 82 nt, Homo sapiens
aagcaccaggggccccgccgccccagccgaagcagccaccaggaggcgcaggcacaaggcagacaagagaacggaaaacaac

SEQ ID NO: 185006 - RNA, 63 nt, Homo sapiens
gcgccgggagaagagacggagaagagcgaaggcagaaggaagggcagagagcgaagggcagaa

SEQ ID NO: 185007 - RNA, 39 nt, Homo sapiens
ccagggacggggggagaagagagcccgaccaagcccaaa

SEQ ID NO: 185008 - RNA, 72 nt, Homo sapiens
cggccggaacggaaggagccaacaacacgcaaggaacccagacggcaagcagccggaacaagacaaccgccg

SEQ ID NO: 185009 - RNA, 49 nt, Homo sapiens
aaaagggagggacaagagcagcaccaagcgcagacaacgaagagaggaa

SEQ ID NO: 185010 - RNA, 77 nt, Homo sapiens
ggaaacagcaagcgaagccgaaaaagcgcccgagacgggcccgccgaaagacaagggagaccccacaccccagaggc

SEQ ID NO: 185011 - RNA, 74 nt, Homo sapiens
cgcaggagacgggcacaccgacaaagcaccagggcagcgcagccccaggacggccgcacgccaccggggcacca

SEQ ID NO: 185012 - RNA, 74 nt, Homo sapiens
gcccgaaaacgcgcccggcgagcgggaacccagcagacagggaaaggaaggcaaagccagccccgcaccacaaa

SEQ ID NO: 185013 - RNA, 41 nt, Homo sapiens
aaaaaccagggcccacagaggaggcagaagagcacgacgac

SEQ ID NO: 185014 - RNA, 76 nt, Homo sapiens
cagcaaaacaaaagaaggaacgggaccagcggcagagagaaaagcagaccggccaggaccgacgggcagaacacaa

SEQ ID NO: 185015 - RNA, 78 nt, Homo sapiens
gggcagccccgcggagcaaagggagaagaaggaggccgggagcccacggccgcaggacggaggggagagcaggagggg

SEQ ID NO: 185016 - RNA, 75 nt, Homo sapiens
caccccaacaaaagaacgcgcccaggacccggcgcacggaagaaacagcccaggggccgccagagagccgaacaa

SEQ ID NO: 185017 - RNA, 77 nt, Homo sapiens
gccggcccgggcgggcgcccgccggcacgccgccagccccgggggccacgagcggagagaggccgcagaagggcaga

SEQ ID NO: 185018 - RNA, 76 nt, Homo sapiens
gagccacgcaccggccagcagcccgccaggcccagcgagcgacggcaaaagcaggacccaaccgcggcacacagaa

SEQ ID NO: 185019 - RNA, 81 nt, Homo sapiens
gaggagcgggaagaggcggggaaacaggaacacgaaagaggaaaaacgcacaagaaaccgaagccaaggaggagaggagga

SEQ ID NO: 185020 - RNA, 83 nt, Homo sapiens
aaacagaggagagaacacggaggagaaacagaacccaaacaaggcaagaacaaagaagaccaaggggccaggaaagaaggaaa

SEQ ID NO: 185021 - RNA, 74 nt, Homo sapiens
gccggaagagaaggggaaaagacgcacgcaagaggccaaccaaaacggacccaaacgccacgaaaacgaagggc

SEQ ID NO: 185022 - RNA, 82 nt, Homo sapiens
gaaagccaaggaaaaacggagagccacaaaaaaggaagcgaaaccgagaagccaggccccggcagcaaggaccccaaggccg

SEQ ID NO: 185023 - RNA, 74 nt, Homo sapiens
ggaagggacaaaacagaggcaacaagcgccccaggccagcggaagcgcaacacagacgaaaggagacggacggc

SEQ ID NO: 185024 - RNA, 36 nt, Homo sapiens
agggaaacacagcaaagggcacagaacagagcagag

SEQ ID NO: 185025 - RNA, 87 nt, Homo sapiens
accagaccacccaaaggagaaacaccaaaaggaaccgcaggggacaccgcgcagggggcccccggccccgaagcaggccagcagcgg

SEQ ID NO: 185026 - RNA, 72 nt, Homo sapiens
gcgccgcgcgggagcgagaccggagcgccacggccacggcccccacaaaagcccaccgccaagcaagaaaga

SEQ ID NO: 185027 - RNA, 78 nt, Homo sapiens
agcgacgaaccggggaacagaccaggggggaccagaagaagaccgacagccaacagcgggcgccaacacaggagcggc

SEQ ID NO: 185028 - RNA, 49 nt, Homo sapiens
ggaccgaggcagcccaacggcggcaggggaaaaacccgcagaaaacagg

SEQ ID NO: 185029 - RNA, 53 nt, Homo sapiens
gccacacagcaggagcggagcaggaggaggcaccaggggcaagacagccccca

SEQ ID NO: 185030 - RNA, 75 nt, Homo sapiens
cccgccagggccgaccaggggcggcagggggaccagccagcaacccgcccccggaccaagcaacccccacccagc

SEQ ID NO: 185031 - RNA, 78 nt, Homo sapiens
gacccgcccaggccccggagcgggaacaggagcgaagcccacagcagagcacaagggcaagaccccgggaagggaaag

SEQ ID NO: 185032 - RNA, 58 nt, Homo sapiens
ggagaccgggccacaagcaaccccgggccagcgagacagaccgaaacccaaagaaaag

SEQ ID NO: 185033 - RNA, 74 nt, Homo sapiens
gaaaacaagccaaggagaacccagcccgacgggccagcaacagaagaaagcaagcaccggggaaagcggcccga

SEQ ID NO: 185034 - RNA, 78 nt, Homo sapiens
cagggagaccgaagaaagcagagaccgaggcccagaacagggcagggcaagaacccgccacacaaggcgaacagaggg

SEQ ID NO: 185035 - RNA, 73 nt, Homo sapiens
acgccagaaggaggcgggcccgggaggaaaccgacggcgcaagagaaacgcacagggcagagaaggcggcccg

SEQ ID NO: 185036 - RNA, 80 nt, Homo sapiens
gcgggagcagcaccgccgcagagaggaagccaaggcccagcagagcgagaggacgcagagccgccaaccccagccggacc

SEQ ID NO: 185037 - RNA, 57 nt, Homo sapiens
caccagcagccaccaggagcccgagagagaaggaacccacccacagggacaccagcc

SEQ ID NO: 185038 - RNA, 61 nt, Homo sapiens
cagcgcgaagcggcggccagagaagagcaagggcacgagcacggaggccggaccacggaaa

SEQ ID NO: 185039 - RNA, 68 nt, Homo sapiens
aaccagaccccaacagagacagaagccaaaagcgaggccgaccccgacaccaagacaaccgaagggaa

SEQ ID NO: 185040 - RNA, 76 nt, Homo sapiens
agcaccagagcggcgaacacgccgacagggcaaggagagcccacacgacagggaaagcgagcccgagccgcgaccg

SEQ ID NO: 185041 - RNA, 34 nt, Homo sapiens
cgcacgccggacaaaggccccgagaaaggcagag

SEQ ID NO: 185042 - RNA, 58 nt, Homo sapiens
aggagcacaacaagaggcagaagcagccgcacggacggccagcagaagcaggcgagcc

SEQ ID NO: 185043 - RNA, 75 nt, Homo sapiens
gccaaagaccgcggaagaaacagcagggaaaggaggacaaaaggaaaaaaaaaaagggaagacagagaggcgggg

SEQ ID NO: 185044 - RNA, 88 nt, Homo sapiens
gaaaacaagcggaacgccgccacggaaggggcccccggggaggccgacccaccaggcccagggccccggccaggcccagccccgcggg

SEQ ID NO: 185045 - RNA, 75 nt, Homo sapiens
gcggggcacacggcgacggcggggacacacaccaaagaagaaaccagagcaacgaacaccacagacgaaagccaa

SEQ ID NO: 185046 - RNA, 63 nt, Homo sapiens
ccagacccagcccgggcccggagcaggacagacccccaggagaaaggagccaaaaaaagacgc

SEQ ID NO: 185047 - RNA, 69 nt, Homo sapiens
caacggggggcaaacagcaaccggagaaggggcaccaaaacagagggggggaagacaacccggagaaca

SEQ ID NO: 185048 - RNA, 75 nt, Homo sapiens
agcacaggaccagggagacacacaccagggggagggaagaaccggaaggccccagaacaaagcaaaaacaaacaa

SEQ ID NO: 185049 - RNA, 73 nt, Homo sapiens
cccacgcaaggaaaaaaaacaagagaccaaaggacacacagcagcaagccccagccaagacccaccaggcagg

SEQ ID NO: 185050 - RNA, 69 nt, Homo sapiens
cgcaccggcccccagcggcagccgagcccgcccgcgcgccgggcagaggccaagaccggcccaagaagg

SEQ ID NO: 185051 - RNA, 50 nt, Homo sapiens
caacaacccgacagagcagggagacaaggagcccgaaggagagcgcccgg

SEQ ID NO: 185052 - RNA, 71 nt, Homo sapiens
ccggacgagcggggcaaccgaccggcgcggagggggcccaagaaagaaacagacgcacgccgaaaaaaaac

SEQ ID NO: 185053 - RNA, 77 nt, Homo sapiens
cgcgggaagcaggacgcgccgcgccccaaggacgaccgaaaacccagccagacaaaagagaagcagaggagcgaaga

SEQ ID NO: 185054 - RNA, 78 nt, Homo sapiens
ccccggggcccggcagccgcgcgccaaggccggacccgggcccaccgaggacaccgcgccagcggggcgaggaggaca

SEQ ID NO: 185055 - RNA, 62 nt, Homo sapiens
cgcagggcgcccccgccggcagccggaagagaaggcgcccgccccgggacgcccccacacag

SEQ ID NO: 185056 - RNA, 81 nt, Homo sapiens
acccagcggcggcggcggccagcaggccgaccggaccccagcggggacaccaccagaaggaaagcagagcaaaaccagaaa

SEQ ID NO: 185057 - RNA, 73 nt, Homo sapiens
ccggacggcccccaagcaccgagaggcagcaaagacagaaggaggaacccagccaccgagaaccgcaccacga

SEQ ID NO: 185058 - RNA, 76 nt, Homo sapiens
cgccccccaggcccacaaccagcccagcagcagcaagcaggaaaaccaggccggacagaaaagcaaacgaaacaag

SEQ ID NO: 185059 - RNA, 54 nt, Homo sapiens
cgcagggcgcccccgaacagaaggggcaggcacaggagacacagggcgccccgc

SEQ ID NO: 185060 - RNA, 64 nt, Homo sapiens
caaaggaagcgcgaacagcagcgcagaaaagggaacaaccccaaaaaaccgacacccgggagaa

SEQ ID NO: 185061 - RNA, 80 nt, Homo sapiens
cgccggagcggagcgcgggcgccggggagccagagcgaaagagccaaaagccaaagaaaagggaaacaaaggccacaggc

SEQ ID NO: 185062 - RNA, 70 nt, Homo sapiens
gaccacacccagccagaaccccggaacaagaaccacgcccgcaccagccacgcacgacaggcagaaccac

SEQ ID NO: 185063 - RNA, 70 nt, Homo sapiens
ccggaagcccgagggcagcgcccacggccgcgaccggccggaagaagagagggcgaaggaggccacacag

SEQ ID NO: 185064 - RNA, 76 nt, Homo sapiens
gcacgggccgcgcacggcaagagaaagagcgcgcacgaaagcacacgaaaaggaaggaaaaacgcagcgggagaaa

SEQ ID NO: 185065 - RNA, 67 nt, Homo sapiens
ggaacacgcaggaggggacgaaggacagagagggacgggcagacgccccgacacgcagcgaaagaca

SEQ ID NO: 185066 - RNA, 55 nt, Homo sapiens
gcaccgggaacgaagacacagacaacaggcacaaagagagaaggaacacccacag

SEQ ID NO: 185067 - RNA, 78 nt, Homo sapiens
accaggagccacagacgaccggcacacagcagagaggcacgcagaagccagcggacgcccgcaacggggaccggccag

SEQ ID NO: 185068 - RNA, 73 nt, Homo sapiens
gaggacaaaacgaaccaaacgcacggaggcggccacgagagacccaaagagacggcagacagggcagaaaaag

SEQ ID NO: 185069 - RNA, 79 nt, Homo sapiens
ggagagaaaaccgcagcggcacggaggggaaacagaggaagaccggaagcgccaagcccaccagacaccgagccaagag

SEQ ID NO: 185070 - RNA, 70 nt, Homo sapiens
aaccgacaggaaccagacacgcaaacaggcagccgcgaacccccagaaccgaaacgaccaccgagacgcc

SEQ ID NO: 185071 - RNA, 81 nt, Homo sapiens
caggacaggagagaaagacggcaggaagagaacacagaagaagaggagaggaaccagcaagggcgacgcacagaaggcgac

SEQ ID NO: 185072 - RNA, 73 nt, Homo sapiens
gaggggagagaggacgggagaccagcagcacgcggcagggaggaggcaaccggagagcgacccgccggggaaa

SEQ ID NO: 185073 - RNA, 60 nt, Homo sapiens
cgacagagaggagggagaacaagcaacggcggaaagcaggaccggcacgcgccggcaggg

SEQ ID NO: 185074 - RNA, 79 nt, Homo sapiens
acaaaaagcccaggcggcaaggagcacccaggaaggggaaccggcaggcaacaagaagggagaacaagagaagaaagag

SEQ ID NO: 185075 - RNA, 74 nt, Homo sapiens
gcacacgagagcggcgcgcgcgcgaggacggaggccgcaggccggggggggcacagagccccggaagacagccc

SEQ ID NO: 185076 - RNA, 79 nt, Homo sapiens
aaaaaccagaagggccgaccagaaaggaaccccaagcgacgcaggcagaagcgagacggcaagcgcgggggcgcggagg

SEQ ID NO: 185077 - RNA, 74 nt, Homo sapiens
cggaacagacgcaggaaggggaaccacaaaaccaagaaacaaaaagcagcaagaagcaaagaaggaagaaagcc

SEQ ID NO: 185078 - RNA, 75 nt, Homo sapiens
ggacccggacaaccagaggcagccagcagggggaggagagacagcgcggagaccacccagccggcgaaacacaaa

SEQ ID NO: 185079 - RNA, 78 nt, Homo sapiens
agaaacacaggaccccccccaacgaggccggaggaccccaccagcccaccgccggcccgcaaccccccgaagccgcgg

SEQ ID NO: 185080 - RNA, 77 nt, Homo sapiens
cagcagaagagccaaggaaaaacagcaagaacccaaaagggcagcaggggaacgaaaaagacccaaaggccgacccc

SEQ ID NO: 185081 - RNA, 76 nt, Homo sapiens
gagaggggcgcgccgggccccgcaacgccacagggaggagaggcaggccgcggggcccagcgcgggaacgcaccaa

SEQ ID NO: 185082 - RNA, 78 nt, Homo sapiens
cgggagcgagggcgagggcgacggaaaccaagccagggacgaacagcggggacgccccagcagaccgcccaggagagg

SEQ ID NO: 185083 - RNA, 78 nt, Homo sapiens
gggccgggagaaaaagggaagaaaacaaagagagaaagcagcagcaagccccagagaaagcaccgggaggaaagagag

SEQ ID NO: 185084 - RNA, 80 nt, Homo sapiens
ggagacaccgcggcggaggggccgccagagcaagaaccaggcacggagaaggaaaaggacccaccagggaaaggaaggca

SEQ ID NO: 185085 - RNA, 72 nt, Homo sapiens
gggccaacacaccagcggcagcggcagacaccagcagcaggacagccaaaacacgcacaggaccagacaaca

SEQ ID NO: 185086 - RNA, 89 nt, Homo sapiens
gcaggccccgagaggaacccagccgacacgacgccgccggcaggcccgcgcaccagccggcaagagcgggaaggagggcgcacagcgca

SEQ ID NO: 185087 - RNA, 82 nt, Homo sapiens
gcggggagcgaggagcgcgcggagccggccagggcaagcaggcgggagacacaacaacggcaagccccaagggccaagaagc

SEQ ID NO: 185088 - RNA, 75 nt, Homo sapiens
gccccggccgcaggagggagaccacagcaagacaccgggaccccggaagccaaaaagcagaaaagagacacacaa

SEQ ID NO: 185089 - RNA, 82 nt, Homo sapiens
ggggcggccaggagacgcgggcggcagggaaccgagcaagggggcgagaggggaacgccaccggagggagaagagcccacga

SEQ ID NO: 185090 - RNA, 75 nt, Homo sapiens
agggcgacccggcccggggaaagggagcagcaccggccacacccacagcacgaccggaacccagcgaccgacgcc

SEQ ID NO: 185091 - RNA, 55 nt, Homo sapiens
agcggagaacgcggcaaagcgaggcggcaggacacaagcaggggaggaagaagac

SEQ ID NO: 185092 - RNA, 83 nt, Homo sapiens
gagagcggacccagggcccggcgaaggacccggccgaggcgggcgcaagagaaggcaccaagaggcaagaagcaagcaaccag

SEQ ID NO: 185093 - RNA, 72 nt, Homo sapiens
acagagcacgcgaccagcgaggagcaacacaggagccggaggacaggagagacaacggaggcaagaaagacg

SEQ ID NO: 185094 - RNA, 91 nt, Homo sapiens
aacacaagggaaacgaggagccgcaacggcccacacagcggagcaacaggaggcaaacaggcccccgggggaaccacacccagaccggcac

SEQ ID NO: 185095 - RNA, 110 nt, Homo sapiens
gcgggagcccggccggagcgggcggagacgccgggcagccgaacggagggcgacggagggaggcggcgcccagcggccacacgccccaagcgccacgcccgggcgcccac

SEQ ID NO: 185096 - RNA, 59 nt, Homo sapiens
gacgaaccggaacccgcgggaaacggaacgccaagcgaagaagaacgaaacggaagcac

SEQ ID NO: 185097 - RNA, 70 nt, Homo sapiens
gaagcgagagccaaacgccggcagcagccacggcgacaacagacgggcggacgggcacccagcccgccag

SEQ ID NO: 185098 - RNA, 85 nt, Homo sapiens
cgacgcaccgcaggcagacaaaagggccaaagaagggagagaggacccgagccccaaagacagaaaagccccgagacggaagaga

SEQ ID NO: 185099 - RNA, 74 nt, Homo sapiens
aggacaaagaagagggaacaacagaagcaccagggcagggaaggcaagaagaagaacaggaggaagaaaagaaa

SEQ ID NO: 185100 - RNA, 75 nt, Homo sapiens
gagcaggccccagcaccacaagggccaggcagcacaggaggaaccaggagcggacgcaaccgggaaaggggcacc

SEQ ID NO: 185101 - RNA, 80 nt, Homo sapiens
gaggccagcgcagggccggagcagagaggcacaggagacccaggccaaggaccgaggccccaggaggaaaaacaggacag

SEQ ID NO: 185102 - RNA, 89 nt, Homo sapiens
agcaccccagcgcgcagggccgccaggggcgccgggcagagcacaaccccaagggcgggccgagggcggcacgggccccagaacaagca

SEQ ID NO: 185103 - RNA, 89 nt, Homo sapiens
gacgcgcccgagaacacgcggcggccacggcagaaaacgcgcgaaaagcaggagaagagaaacaggacgcgaggaggagagaggagagg

SEQ ID NO: 185104 - RNA, 84 nt, Homo sapiens
cggaaaggcgcggccccgcgccagagggccggggcccccgggccgaggacccgcagggagcggggcaccgccgaggcagacccg

SEQ ID NO: 185105 - RNA, 53 nt, Homo sapiens
ccaccgggccccggccaaccgagccccccccaagaagccggcaccaggggggc

SEQ ID NO: 185106 - RNA, 66 nt, Homo sapiens
gcccccggcccgaccagggcggccaccgagaggaacaaaacaggaagcggaaaacagaaccacaga

SEQ ID NO: 185107 - RNA, 64 nt, Homo sapiens
aaggcaagcaagaaggagaacgaagacagcacaacaggccaaaggcccaacgaggcgcacagca

SEQ ID NO: 185108 - RNA, 50 nt, Homo sapiens
aggagcggacccacccccgaagcaaaggccgacagacagagaacccaggg

SEQ ID NO: 185109 - RNA, 79 nt, Homo sapiens
ggggcaggcggcacaggagagaggcaccacaagccgaacagccagccagcaaaagaacagcagcaccagaagcagccag

SEQ ID NO: 185110 - RNA, 57 nt, Homo sapiens
gggcagcccgcaggagcaagcgcagcaccaccaacagcacggccccggcccgcagga

SEQ ID NO: 185111 - RNA, 75 nt, Homo sapiens
cgaaggaccaccccgagaggccgccaggcacagagaaggcaaacgggagggcgaggacaccaagagcagcgcgga

SEQ ID NO: 185112 - RNA, 50 nt, Homo sapiens
aaggcgggaaacacagcaccaaccagaaaaagaccgcagaagacccaccc

SEQ ID NO: 185113 - RNA, 90 nt, Homo sapiens
cgggccgggggccgccgggacccggccaccagcaagccgacagcaaagcaagccaagagggcccagccaagaagcacggcaagagcagaa

SEQ ID NO: 185114 - RNA, 82 nt, Homo sapiens
cgagcccagagcccgacccgcgcgggccgagagccgccccgaacgggggcccccccgccggacagagggcagccagaaacaa

SEQ ID NO: 185115 - RNA, 77 nt, Homo sapiens
gaggccgagaccagacgcggagccaggccgaggggcggacgcggccggagaagacagaggagccagaccaagagaca

SEQ ID NO: 185116 - RNA, 75 nt, Homo sapiens
cagggcaccagacagccacgcagacacagccagggaggggggccaagggggagagccaaaacgagaaacgaagcc

SEQ ID NO: 185117 - RNA, 43 nt, Homo sapiens
gagagaagggagcgaacacaggccccagggaaaggaccgaggc

SEQ ID NO: 185118 - RNA, 85 nt, Homo sapiens
ggcagggaccgaaacaaaagagcacaaaggaaaacgaggaaagcccaggagacacggcaaaaaccccacagcggagaaaaaggag

SEQ ID NO: 185119 - RNA, 74 nt, Homo sapiens
ccggccagcgcccgaagaccgcaggcgggacaagaaaagaaaaagcaacagaaaaacaaccggaagccggaaga

SEQ ID NO: 185120 - RNA, 73 nt, Homo sapiens
ggggaggaaccagaaaagagagaaaacccaggacaacccgaaaggcaagacgagaaggcggccccagcgggca

SEQ ID NO: 185121 - RNA, 72 nt, Homo sapiens
cggccggccggcaacaccgagcaaaccaaaggcaagaaccggagcaggagaaaagccggaaagaaaacgcag

SEQ ID NO: 185122 - RNA, 77 nt, Homo sapiens
ggaggagcagaagagcccaaaaccaacgaaccaaaagcaaccgcgaagagcaggagccaggcacagcagggaccaga

SEQ ID NO: 185123 - RNA, 77 nt, Homo sapiens
cacgccaaccgggaagaccacaaggcgaagccgacgagcccgaacagacgcaccagcgggaggaagagggacggccc

SEQ ID NO: 185124 - RNA, 80 nt, Homo sapiens
gggcaagccccgcccggccaacaacgaaggccccagaccagaagacagaggaggagcggcaggcagagacaggaagaagg

SEQ ID NO: 185125 - RNA, 73 nt, Homo sapiens
caagcgccggcgccggcgcggcgcggccaaggcgaggcccacaagcggcacccaccaagacaaaccagcaagg

SEQ ID NO: 185126 - RNA, 108 nt, Homo sapiens
gaacggcaagagaaccccgcggggaaggggggcagaggccggaccccagcacacagaagccgagacggggacacacgcccacaccacaacaaggaggacaagacgggc

SEQ ID NO: 185127 - RNA, 62 nt, Homo sapiens
gccccccacacaccggcccggggagggagaacgggcgcccggacaccaacacacaaaccagg

SEQ ID NO: 185128 - RNA, 84 nt, Homo sapiens
ccgggccaggacgagcgagccccgcggcgccgcgggcccagaaccggggagaccacgacgcgccccgggcgccagagccgcagc

SEQ ID NO: 185129 - RNA, 76 nt, Homo sapiens
agaagcggggcagaccaagcaacacagaagaaacgacaccagaggggcaggcccagccccaggcccagggaacgaa

SEQ ID NO: 185130 - RNA, 76 nt, Homo sapiens
gacccacaggcggagaagaggggaggcggccgaaggaggacggcgccacaggcgacgaaggcacggcggcaccagg

SEQ ID NO: 185131 - RNA, 69 nt, Homo sapiens
gccaagaagagaagcaaaacagccaaacgagacacaaagcaccaaccgccccacggaaaaccagaacac

SEQ ID NO: 185132 - RNA, 59 nt, Homo sapiens
ccacagccacaccagccaaaggaggaaggcgaagaggcgcagggggaacaccgaagaag

SEQ ID NO: 185133 - RNA, 74 nt, Homo sapiens
gcagagccagaaagaggagcagggcagagccgaggccggacagagacgagagcagcgcgacccacaaacacaca

SEQ ID NO: 185134 - RNA, 73 nt, Homo sapiens
aacaagcaagagggaaccgcccagaaaaccagcgggggaaccagaaaaggaagcagagccccgggccgggaag

SEQ ID NO: 185135 - RNA, 71 nt, Homo sapiens
aagaaacaagcggcaagagaggcaccccgaagaggcgaggagcaacccaacccccaggccaaggaaagcgg

SEQ ID NO: 185136 - RNA, 63 nt, Homo sapiens
gacagccagggagaggacccaaaggacaaggccgacgcgcacgaacacgggggcaaagacagg

SEQ ID NO: 185137 - RNA, 50 nt, Homo sapiens
agccagcggacagaaaccaaggaccacagagaagcaggcgaccaggcgcg

SEQ ID NO: 185138 - RNA, 75 nt, Homo sapiens
cggacggagggggaaaggaagccaagaacaagcacaaagccacagcgaccaagcaccagaacgcacaccaccacg

SEQ ID NO: 185139 - RNA, 73 nt, Homo sapiens
gccacgacagagacaaggagcccccaccccaccaggcagcgggcggaggacggggcaccagagaacccaccgg

SEQ ID NO: 185140 - RNA, 79 nt, Homo sapiens
agcagagcgcacaaagggaaaggaagacgaccccgacgcaggccaggagccgcggacagaagccgagcacggccgagac

SEQ ID NO: 185141 - RNA, 69 nt, Homo sapiens
gagaaaagccccgagaccccagaaacagagcgccaccccgacagccgcagaccggcccggagaaaagac

SEQ ID NO: 185142 - RNA, 78 nt, Homo sapiens
ccgacacagggaaaaagaaccacgcgaaagggggcaggccgcaggagcgagagaagccaaagagggaacccccaccaa

SEQ ID NO: 185143 - RNA, 50 nt, Homo sapiens
gggggccgccgggcgcggcaagaaagggcccgccgacccaggcggaggcg

SEQ ID NO: 185144 - RNA, 63 nt, Homo sapiens
ggacaccgggggcacaccgagaagggaagccacggcggggcaaaaggaccaaaggaccagacc

SEQ ID NO: 185145 - RNA, 77 nt, Homo sapiens
gagagccccaggccagaagagagacccgacgacggaccgcacacggagaaggaagcagagacgggcaccggagccag

SEQ ID NO: 185146 - RNA, 55 nt, Homo sapiens
cagggaccagcagacgggaagcgagcaggcgacccaaaagagcgaaggaaaacca

SEQ ID NO: 185147 - RNA, 79 nt, Homo sapiens
aaagaagccgcagcccccggacaccagaagagcccagcagaacaaagcggcaaggacacaggaacgccacaagaaacaa

SEQ ID NO: 185148 - RNA, 59 nt, Homo sapiens
ggcgccgccaacgcgcccccgagaaaggcagacccggcaccacagggaaaacggggcaa

SEQ ID NO: 185149 - RNA, 75 nt, Homo sapiens
gcgagccccacacaccagcgcccagcagaggaagaaagggcaggcgagagagggggaacaggaccaacggaacaa

SEQ ID NO: 185150 - RNA, 72 nt, Homo sapiens
ggagcgcaacaccgcggggggagacggcgcggccgggaccaggaggagaagcaaccagagaggaagcgagac

SEQ ID NO: 185151 - RNA, 71 nt, Homo sapiens
gaaaaggccaagaaggcagcaaagcgggccagacacgaagaggccggcgaaggaagaaggaccagccagag

SEQ ID NO: 185152 - RNA, 79 nt, Homo sapiens
cgccagcgggacgaggaccgagaccgcggccgggaccgaggggcccggccaggccccaccgccacaagcaggggaacac

SEQ ID NO: 185153 - RNA, 75 nt, Homo sapiens
cccagagcccacagcgcaacgacgaggaaaaacccaaacaccaccaagcaaggaacaggaaagaccagaagccag

SEQ ID NO: 185154 - RNA, 72 nt, Homo sapiens
gaaacgacccaccccccccgcgccggaccccgagcagaagcagcggaaggggaccccaagccgaggaacagc

SEQ ID NO: 185155 - RNA, 53 nt, Homo sapiens
gcggagacccagaggcccggccccccgggccgggcacgggcgccagcggcacg

SEQ ID NO: 185156 - RNA, 62 nt, Homo sapiens
cagccgccgaggccgcggcccaaaggccagcccaaaaaaaggggagacagccaaggcaacgg

SEQ ID NO: 185157 - RNA, 37 nt, Homo sapiens
cgcagacagcgggcacgggccccgggcgcgggagcca

SEQ ID NO: 185158 - RNA, 90 nt, Homo sapiens
gaagcacgaaagaaaaaggaagccagagcggccagccagaccgacacagacaacgacgaacgacaaacgacgaaacacgcacaacaaacc

SEQ ID NO: 185159 - RNA, 86 nt, Homo sapiens
accgagccacaacagccaaggaaaaaaagcagagaggagcggggagcaagcaggcaaaagaggagaagagcaggcccagaaaaggc

SEQ ID NO: 185160 - RNA, 87 nt, Homo sapiens
cggcgcccccggcccggagcaacgagcgcagcgccggccacccaccccaccagagccggacaccagagccggacaccagggaggagc

SEQ ID NO: 185161 - RNA, 73 nt, Homo sapiens
gacacgcgggggcggcacccggcaaaggaaggagggaaaagaggacgaggcgcgaaaaggcaaaggcaagaaa

SEQ ID NO: 185162 - RNA, 76 nt, Homo sapiens
ggcaagggcacaggaagacccaaaacaccgggacgaagggggggccgcccgcccaaggcaggaagaggggccgcaa

SEQ ID NO: 185163 - RNA, 68 nt, Homo sapiens
aacggaaaccgaaaggacagacaagaaaaaagcacgagagaggcgcgaacagggcccacccgccacga

SEQ ID NO: 185164 - RNA, 75 nt, Homo sapiens
ggcgacggcaaacaaggcgggggacccagcaggcaggagacccagagaaaggccacgcgagccaggcagggagcc

SEQ ID NO: 185165 - RNA, 55 nt, Homo sapiens
aaggggccacagaggccacgagcccagaggaccgcaacaccaggacagaacaaga

SEQ ID NO: 185166 - RNA, 76 nt, Homo sapiens
agaggcggcgcagaggaggagcgcgcagagaccaacgggagccgcaaggacaacagccgcggccagacagcggccg

SEQ ID NO: 185167 - RNA, 78 nt, Homo sapiens
cccacccccgcccaccccacgccaccagcccccggaggagcaaacgccgagagcgcggcagaagagagacaacaaaga

SEQ ID NO: 185168 - RNA, 73 nt, Homo sapiens
aaaaaggacaaccgcgcgggacccaaacggaaggaacggaggcggaagcacgaccacggcacacagaaagggc

SEQ ID NO: 185169 - RNA, 72 nt, Homo sapiens
accccccgaggcaagcccagacccaggcgagcaaggcaccagcagaacagacacccccaaagaccagacacg

SEQ ID NO: 185170 - RNA, 78 nt, Homo sapiens
cccggcgcgaacaaggagcgcccgcacaacaccacagcacccaagaaaacccaggccgcgaaggagaagaccggacac

SEQ ID NO: 185171 - RNA, 73 nt, Homo sapiens
gaccagaaagaggccacccaagaaacgccaaaagaaacaaagagccccgggaaaagaaaaaaaacgccccaaa

SEQ ID NO: 185172 - RNA, 62 nt, Homo sapiens
gcgacaggagcacggcagcaggccacccggagaaaggccacggccccagcccaccggaccgg

SEQ ID NO: 185173 - RNA, 75 nt, Homo sapiens
gacgacgaacggggcgcaccgacccggaagaccagacaaggcagacgcagccgccggagggcgcggagcggggac

SEQ ID NO: 185174 - RNA, 54 nt, Homo sapiens
cgcgacgcccgggacccagagcgggcagaggcaaacggagaggcaagaccagca

SEQ ID NO: 185175 - RNA, 70 nt, Homo sapiens
aaaacaaggcaccaggaccaaaggaacccaagccagaccgcccgagaaagacaggaagaccgaggcaccc

SEQ ID NO: 185176 - RNA, 56 nt, Homo sapiens
aagaagcagccgccaggggacaaaggagccaggacaaggacaagccacacaagaag

SEQ ID NO: 185177 - RNA, 79 nt, Homo sapiens
acagaggacggagcgccgccgccgggaccccgcccagcagcaacagacaacgagcaaccagaagaaggacagaagagag

SEQ ID NO: 185178 - RNA, 78 nt, Homo sapiens
aaccaacacaccccagggggcgccaccacagcgaaaccagggcagccaaagggcaccgacacccccagagaccaaagc

SEQ ID NO: 185179 - RNA, 73 nt, Homo sapiens
ccgagacccggaggaggcgaagcgagaggacaggccagagaaggacaagaagccaagccgaaaggacagccag

SEQ ID NO: 185180 - RNA, 72 nt, Homo sapiens
ggaacgacaagaaggaaaaggaaggaaggcaaagagggggaaagaaccacaagaaagggaaaagacacgcga

SEQ ID NO: 185181 - RNA, 78 nt, Homo sapiens
ccaagccagcagccgggcaaggaggggaggcgagaacacgaggaggacacggaccgcggcgccacccacgaccccgaa

SEQ ID NO: 185182 - RNA, 73 nt, Homo sapiens
cgcagcaggggggccgggaagcaggccggggacgaaaaaggagggagaaaacgcaggacacaaggaagaagaa

SEQ ID NO: 185183 - RNA, 73 nt, Homo sapiens
aaggaacaggccaagagagccgaacccaccgagccagggagggcggagaacggaaaagcaccaggaagcagag

SEQ ID NO: 185184 - RNA, 74 nt, Homo sapiens
gaagagaagaagaagcgcggaggccgaaaagaagcggcgaacgaccgccagcagcagccgaaaacgcacaagac

SEQ ID NO: 185185 - RNA, 82 nt, Homo sapiens
aacagagccacagccaggcgacggccagaaaaggcgacggcggagacagaagagaggagagcccacaaacggcaacagccag

SEQ ID NO: 185186 - RNA, 61 nt, Homo sapiens
gacggccgcccgaggacccgcaggacccgcaacagcgcagaggagccaggcagcgagcggg

SEQ ID NO: 185187 - RNA, 74 nt, Homo sapiens
agcggggagcgcccgcgacagaggagggaggaaaacaaccgagggcagacaccgaggagcaacacccccaggga

SEQ ID NO: 185188 - RNA, 87 nt, Homo sapiens
ccccgccagcagccgccggagccagccaacgagcggggcacagggaccgaagcccagcaacaccgagggacgagccgggaacccgag

SEQ ID NO: 185189 - RNA, 48 nt, Homo sapiens
agaggcaagccgggaacgcaaaaggaccagccagccgggcgcaaaggc

SEQ ID NO: 185190 - RNA, 84 nt, Homo sapiens
cagaccgccaagaggcacaggcagggaagcaaagagcacccgagcccagcaggcaagcagccggcaccaagacaggccaaaagc

SEQ ID NO: 185191 - RNA, 83 nt, Homo sapiens
aacagcaggggcagcgggccgcaggggcgcgcagcgcggggagcgccagcacaccgacagagaacccaggccaacacacagac

SEQ ID NO: 185192 - RNA, 79 nt, Homo sapiens
gggggccgggaaacaggggaaggcagggccggcccgcagccgcccagacccagaacagccaccaaggagcgcagcagca

SEQ ID NO: 185193 - RNA, 88 nt, Homo sapiens
cagggcgggcaccagcccgcgcggggcgcgggcgcggccggaccgcagccgcaaggaagaccgcaggaaagcaggaaggcaagaaagc

SEQ ID NO: 185194 - RNA, 81 nt, Homo sapiens
gcccggggcaacgggccgacagcacagaaaccaccacagggcgggcccaagaccccaaagaacccaagggccggacagccc

SEQ ID NO: 185195 - RNA, 64 nt, Homo sapiens
gggcaacgaggagaggaggagcccaaggaggcagagggcaccacagacaagaaagcccccacgg

SEQ ID NO: 185196 - RNA, 54 nt, Homo sapiens
gcacagccagcaaagaacagacacacaaaaacaccgagcccaaaagcaaagcag

SEQ ID NO: 185197 - RNA, 74 nt, Homo sapiens
aaggaccaagaaccagcgagaagaagaaaagaagagagcgaggagcggcaggagcaagccaagaaagaaccgaa

SEQ ID NO: 185198 - RNA, 76 nt, Homo sapiens
agcgccgacccagacaggaagccacaacccggagcagggaggaaacggcaggcaggaggcaccaccccaagaaaga

SEQ ID NO: 185199 - RNA, 78 nt, Homo sapiens
aagacaaaaagaagacggacagggcacacagaaccgaaaaagagcgggcgagcagcagaacggagagaaacagcagca

SEQ ID NO: 185200 - RNA, 73 nt, Homo sapiens
aggaagaagaccaacccaacgcacagcacgagacccgcagaccacgccaggacagcagaccacagcccggcag

SEQ ID NO: 185201 - RNA, 53 nt, Homo sapiens
cggcccgcccgccccaacgcgggacagcgagacagaacaaggaaagaaaccaa

SEQ ID NO: 185202 - RNA, 77 nt, Homo sapiens
aggagcgggacaccccggaagcgggaaagaccaagccaaagaaacacccaacccagcgcacacgacagcaaagggaa

SEQ ID NO: 185203 - RNA, 74 nt, Homo sapiens
ggcaagcggaccccggcggaacgggaaccagagagccgaagacgggcaggcgagagacagggcaccggagccag

SEQ ID NO: 185204 - RNA, 78 nt, Homo sapiens
aaagcgacagagcagccaacaccccgacagggaggccgcacagaggaggagcaccaaaccgagggagggcagccacac

SEQ ID NO: 185205 - RNA, 62 nt, Homo sapiens
agcgagcgcgaggaaaaggcggcgggagaccaccacaggcagggaggacgggggcgggaggg

SEQ ID NO: 185206 - RNA, 63 nt, Homo sapiens
ccaggcaccaccggccccggaagcaccaggagacaaagccacaaaaacaccagaaaaaccaag

SEQ ID NO: 185207 - RNA, 57 nt, Homo sapiens
cagcaccccaacgggccaaaggaaggcgggaaggcgagggccagaaccaacaccggg

SEQ ID NO: 185208 - RNA, 103 nt, Homo sapiens
gcgcgcgcaccccgccgcgcccacgcccaaccgaaaaagacaccaaggggcaacgaggaacaggccaagaaacaacacagccaaggccagcgccacggcggga

SEQ ID NO: 185209 - RNA, 59 nt, Homo sapiens
cgcgccccccaccccccccagcagaccccgccccccgaggcgcagcccgaacccagcag

SEQ ID NO: 185210 - RNA, 66 nt, Homo sapiens
cgagaagcagaccacgcaacaagccacaaggaagggacgaaccacgaagaccaagagccaaaacac

SEQ ID NO: 185211 - RNA, 83 nt, Homo sapiens
cgccgcacaaggccgcgccggacaagacaagagccaggcgaggccccacgggccaccgcgaccgaggccaacacgggcggcca

SEQ ID NO: 185212 - RNA, 76 nt, Homo sapiens
gcaagaaggaccagccacaccaaggcaaggcaagagcaacgaaccaaagcaaaggaggccgggggaagacggaaaa

SEQ ID NO: 185213 - RNA, 79 nt, Homo sapiens
ggaggggacgggcggcccagcgggcgagacggaggagggcagcgggcccacggcggccagaagaaggggacgggggaca

SEQ ID NO: 185214 - RNA, 86 nt, Homo sapiens
gaccgcacaaaccacacacgagccggcaacaacgacaaccacacacacaccaagaaaccagcaaaaccagaagggagaaggccgag

SEQ ID NO: 185215 - RNA, 66 nt, Homo sapiens
gcgaaaacacacacagaaacaccaagagccagcaccagccgccaagacgcaccaaggcccaggaac

SEQ ID NO: 185216 - RNA, 57 nt, Homo sapiens
cagcaccaacggaaccaaaaagcgaaaacaggaggaacagaaaaagggccaaaaacg

SEQ ID NO: 185217 - RNA, 89 nt, Homo sapiens
cagcagccacagagaccgccgagagacgagacagcccgcacagagcagagcgcagccgccaggccccgcccagccccaccagggcagca

SEQ ID NO: 185218 - RNA, 76 nt, Homo sapiens
ccccgcgacccgagacagccccaagacaaccccaccagcaccacaggacaagcagaagaacagcagagggccagga

SEQ ID NO: 185219 - RNA, 84 nt, Homo sapiens
acgcgggggagacagcgccgggagaggccggcagccccgggacacccccgcaagcgagcaggcaaccagaggccaggccagaga

SEQ ID NO: 185220 - RNA, 71 nt, Homo sapiens
gcagggcaggaagaaacagggaaccacaccaccacgaccacacgacagcagcagggaaacccagacgacaa

SEQ ID NO: 185221 - RNA, 73 nt, Homo sapiens
ggccgggcccggcagccccgacgcagccgggaaggccgagcaaacagggcagcgcccgaaggccaccaaaaag

SEQ ID NO: 185222 - RNA, 55 nt, Homo sapiens
agccgggagcccaccacacaggagcagacaggggagccgccaccaaaagcagacg

SEQ ID NO: 185223 - RNA, 42 nt, Homo sapiens
gacgacgcggaaccacgggaagcgagacaacagagggagacg

SEQ ID NO: 185224 - RNA, 84 nt, Homo sapiens
cgcggcgcgggagacgagccggccgcccgggccgggggacccgcccgccaggccaccaagacaagcagaccggaagaccgacgg

SEQ ID NO: 185225 - RNA, 54 nt, Homo sapiens
gaaaggacgcagcacaagccagaaaggagaaggccacagcagggagcaaagaac

SEQ ID NO: 185226 - RNA, 70 nt, Homo sapiens
agcacaaaccgcgggaccagggggggcaaggcggcccggcacgcacacgggcagaagagcccgaggcggg

SEQ ID NO: 185227 - RNA, 83 nt, Homo sapiens
ggaagcaggacgcgccgcgccccaaggggggcggggggccaccgaacgcgcacgccggcaggagacggaccagcagcacggca

SEQ ID NO: 185228 - RNA, 90 nt, Homo sapiens
agaaaagaagagagagagaagcaacggaccccaagcagagagcaaaagagcggaaaaggcacaggagcggggagaggaaaaggaacagaa

SEQ ID NO: 185229 - RNA, 75 nt, Homo sapiens
gcgacgccgagccccgcagccgcgacccagcgggcccaccagccagggggccgacgacgagccccgcgaggagcg

SEQ ID NO: 185230 - RNA, 71 nt, Homo sapiens
aaagcggagaacaacacacgacgcacggggccaaaacagacccacaacaggaaacgcgagccccaccccac

SEQ ID NO: 185231 - RNA, 80 nt, Homo sapiens
agaaagccagagaacacaagaacagagggacgaccagaaacacagggcacacagaggcacgagaacggggaacagaacag

SEQ ID NO: 185232 - RNA, 74 nt, Homo sapiens
ccacgcccccccccaccgagcggcccgccccaacccgcgcgccaggggaaaaagaaaagggcgaagacccgaag

SEQ ID NO: 185233 - RNA, 94 nt, Homo sapiens
cccgcgccccgccagcaccggccccaccacaggggaaaacgaagccacccaacggcaaagccaaggcagcgaccccaggaccccggagaggaag

SEQ ID NO: 185234 - RNA, 65 nt, Homo sapiens
gcggccccaacaggagccccacacgggccgcgcccccccagcgcgaggggaaacgggagcggcga

SEQ ID NO: 185235 - RNA, 121 nt, Homo sapiens
cgcccggcccggcccggccgccccgccgcccccgcggccccggccggaggagacaggcagcagagcgggagcgacagggagaagaagcgaaggaggggggacaaacaacgcgacgagaccg

SEQ ID NO: 185236 - RNA, 53 nt, Homo sapiens
cgaaggcacaagagaaaacgacggggcacacaaggcacccggacacgaccaaa

SEQ ID NO: 185237 - RNA, 79 nt, Homo sapiens
cgccgggcccgggccccgggccgcggaccccgcagcaagccccagccaagacccaccaggcaggggaagaagacaccac

SEQ ID NO: 185238 - RNA, 75 nt, Homo sapiens
gccaaaaaggcaccaagaagacacagacaagcccaagcgagcgcaccaaacagaacgaggaaccccagagaggac

SEQ ID NO: 185239 - RNA, 84 nt, Homo sapiens
gggcaggagcgaccgccacccggccccagggacgcgccggggcacagggccaaaaaggggggacgcgggcgagaagccgggcag

SEQ ID NO: 185240 - RNA, 51 nt, Homo sapiens
gggcgcgggggacgggagcggcagccccgaacggccgagcgaccaggagag

SEQ ID NO: 185241 - RNA, 74 nt, Homo sapiens
ggagaggacaggaccagggagcccacagcgcccaaaaaggagagccacgagccaagggggcacgagcggaccca

SEQ ID NO: 185242 - RNA, 75 nt, Homo sapiens
gaagcaggcccaggagaaagcacaggacaggcagcgacaccacccacggaaggcacgaagccagaggggccagcc

SEQ ID NO: 185243 - RNA, 76 nt, Homo sapiens
ccgggagcagaagggaggcccaagacccacaacaaaagggggagggccacagcaggccacgggggagggcgcagac

SEQ ID NO: 185244 - RNA, 101 nt, Homo sapiens
gggcacggcggccgagcgcggcagagcggcgagggggcgcggcccggcccgaaccaaaggcagacccagaagagcacaaaacagagaaaagggaagggccc

SEQ ID NO: 185245 - RNA, 48 nt, Homo sapiens
gggaaccccggagaaaaggccaagaaggcagaaaaccgggcggaagcc

SEQ ID NO: 185246 - RNA, 57 nt, Homo sapiens
gaaaaccaaccaaggccccagcacaccagagacagaacacccaggacaccagcaggc

SEQ ID NO: 185247 - RNA, 78 nt, Homo sapiens
ggagaggggccgggccccgcagcggaaccggacccagcccgagccgccccacacccacaggggacaagacccccccca

SEQ ID NO: 185248 - RNA, 34 nt, Homo sapiens
gggggcagggcggcagagaagaggaacagcaacc

SEQ ID NO: 185249 - RNA, 49 nt, Homo sapiens
gggaccgccgacaccggagagagcaaccccaagcgcccacccaagccgc

SEQ ID NO: 185250 - RNA, 53 nt, Homo sapiens
ggccgggccggaggcaaggggccagaggacagaggacagagacccagcagcaa

SEQ ID NO: 185251 - RNA, 70 nt, Homo sapiens
gaacaaacggcaagagccagaagcccggcggaagaaacagccaacccgcaacaacggcagaagaaaagcc

SEQ ID NO: 185252 - RNA, 74 nt, Homo sapiens
gccaaagaacccacacaaggacaaggcgcgacccaacaagcccgaagacgcccgccaccgagccaccagaagag

SEQ ID NO: 185253 - RNA, 71 nt, Homo sapiens
aaaaacacagagacagacggcggcagccagaacgcaaagcagagcaaacgagcaggacagcagggcgagaa

SEQ ID NO: 185254 - RNA, 90 nt, Homo sapiens
gcagaggggacagaggcaccaaggaccccaagacagcgggcgacgcacgaggcacacaggaaggaggggagcagggacgcgcggcggcgg

SEQ ID NO: 185255 - RNA, 67 nt, Homo sapiens
ggaaaccacgggccgggagacccacccgcacgaaaccgccgccagcacacaccgggagagcaggaaa

SEQ ID NO: 185256 - RNA, 68 nt, Homo sapiens
cagcggaagaggacgacgcgacacaaacaaaaggcccgcggcggaagccggcaggacacgaaagccca

SEQ ID NO: 185257 - RNA, 74 nt, Homo sapiens
agaaaagccaaaagacaacccaagcacagaccaaacccacccaagaccaccagagggcccgaaccgcgaccaac

SEQ ID NO: 185258 - RNA, 66 nt, Homo sapiens
aagaggaagcaggaaaaacaaagaagacccaggccagaggcacggacgaccccggagagagcgggc

SEQ ID NO: 185259 - RNA, 79 nt, Homo sapiens
agcgcagagaaccggaagcaaggagaaccagcagaaaccaccaagagcacaggcccaccaggagcaggaaaagagaggg

SEQ ID NO: 185260 - RNA, 58 nt, Homo sapiens
ccggcgcagagacaggcgcgaggagacaccgcaggccccccaggccgccgagacaacc

SEQ ID NO: 185261 - RNA, 70 nt, Homo sapiens
agccgcaggccgcgccgggaccagcagccgccaaaagagccacaaacaaaagaggaagccccaagccggg

SEQ ID NO: 185262 - RNA, 67 nt, Homo sapiens
gccgcgcaccgacccgacgcgccggcccacgcgcggccaagaccgaaacaaggaccccccgggagaa

SEQ ID NO: 185263 - RNA, 58 nt, Homo sapiens
ccagccaagcgccggagcaaggaaggaagaaaacggggcgcaccagggagcaccagag

SEQ ID NO: 185264 - RNA, 58 nt, Homo sapiens
gacgcagggcgcccccgacggaccagcaggcgaggccaggccacccagcgaagagaga

SEQ ID NO: 185265 - RNA, 67 nt, Homo sapiens
caaaagaaaacgcaccgaaagggagaaaggaagggacagaggaaacaaagccagaccgccgaggggg

SEQ ID NO: 185266 - RNA, 86 nt, Homo sapiens
cggcggcgacaccagcaccccagccgggcaagaggcggaggacacggacgggcaagccagaggagagagcacgaaccgcaaacaag

SEQ ID NO: 185267 - RNA, 80 nt, Homo sapiens
acgaaagacaacggaaccgaagaaaaaaacggagccagccgccaggaagcagaggcagcgaaaagccaaaaaaaaaaaag

SEQ ID NO: 185268 - RNA, 94 nt, Homo sapiens
ccccccggcagggcggagaggagcggccggagcagcgagggcccggcgaggagaaccaacggcccgaaagaggaacaggcaacccggggccacc

SEQ ID NO: 185269 - RNA, 86 nt, Homo sapiens
cggagacggcggaagcggagagcaacagcgcgccgcacaaggaccccggaaacggagccaaaaagaccaggccagccaacagaaga

SEQ ID NO: 185270 - RNA, 72 nt, Homo sapiens
cacgcccagggccgcgccccccaggcccacaaccagcccagcagcagcaagcaggcgaaacaaaacaaaaaa

SEQ ID NO: 185271 - RNA, 59 nt, Homo sapiens
cagaagaaagcccccgggcacaggaaaggggagccgccaccaaaagcagacggaaaacc

SEQ ID NO: 185272 - RNA, 74 nt, Homo sapiens
cagccccgcgccgccgaccccccggcgccgcgccggcggcggcgggggagccaagggagagggaagaaaacacc

SEQ ID NO: 185273 - RNA, 33 nt, Homo sapiens
cacccggagaaaggacagcacgaagcccagaag

SEQ ID NO: 185274 - RNA, 70 nt, Homo sapiens
cgacccccgcgccaccagaaaaaggcggagaagaacccaaccaaaaccaggcggcaaccccggggcgaca

SEQ ID NO: 185275 - RNA, 83 nt, Homo sapiens
ggagggcgagcagcaaccaaagcaagccaagaggaggaggaggcggaggccaagcggaaagagaggagggacagcaccaaaga

SEQ ID NO: 185276 - RNA, 76 nt, Homo sapiens
ggagcaaaggaaagagcccggaaggaagaggcagagacagagccaccagccaggcgacagagaagagagggacggc

SEQ ID NO: 185277 - RNA, 68 nt, Homo sapiens
agggacggaaccacaacaagaaggacagcaaaggagcaggaaagcacacacaccagacgaagaaccca

SEQ ID NO: 185278 - RNA, 92 nt, Homo sapiens
ggccaagagcagcaggcggaggaaacagccagaccgagagcagccgccggggcggagggcggaccccaaggagaacagggggggcaggcgag

SEQ ID NO: 185279 - RNA, 56 nt, Homo sapiens
gccgaacccccgaggccagcacgagcgcccaaggggcggcccacggaacgagggca

SEQ ID NO: 185280 - RNA, 76 nt, Homo sapiens
acggcccccagaaaccgacagagaagaaaaagcagcacgaaggcgaggaaccagcagacaaaaaagaagaaaaacc

SEQ ID NO: 185281 - RNA, 71 nt, Homo sapiens
cgaacaggagcccgacagaagagccgaggagaagaacacaggacgaaagccacgggaccacaaagggcaaa

SEQ ID NO: 185282 - RNA, 66 nt, Homo sapiens
cccaggagcgccacgcgcggaaggcagcgcccagcagcgcagaggcgcgaacagggcccacccgcc

SEQ ID NO: 185283 - RNA, 72 nt, Homo sapiens
agaaaacccaagggaaccaccgccacaaacgcaggccacaaagggaaggagcagcgccaccgacacccaccc

SEQ ID NO: 185284 - RNA, 72 nt, Homo sapiens
gggaaaaacaaaaggaagaaaaggaagaaaggacaaggagaaaaccacaggacaaaccggcgaccacacacg

SEQ ID NO: 185285 - RNA, 79 nt, Homo sapiens
gggcgaccacaagcaaacagcccccaggggccggagacaacgccccaggagcggcaagaagcaaaccgcaggaaaagcc

SEQ ID NO: 185286 - RNA, 66 nt, Homo sapiens
gagcaagaaacgaaggaagacacgagcccggggcgggaaaagaagcacacaaggaagacaggaggc

SEQ ID NO: 185287 - RNA, 75 nt, Homo sapiens
agacaccgacgggccgcgaggggaagaggaagcaaagccaaggcagaaccagagaccacagaagaaggaagggcc

SEQ ID NO: 185288 - RNA, 58 nt, Homo sapiens
caaaaccagcaagcaaaagacccacaggaccgaaccgggacaaccagaggcgaagagc

SEQ ID NO: 185289 - RNA, 81 nt, Homo sapiens
gcgacgcgcgcgcccggcccgggaagaaacaggacgagaagaggccccccaaaggacacaggacagaccgagaacgagagc

SEQ ID NO: 185290 - RNA, 76 nt, Homo sapiens
gagcgacaaagcaaagcaaacaacacccaacagcccaaagcaaaggagcaacagcccaggagaaaacgggaggacg

SEQ ID NO: 185291 - RNA, 57 nt, Homo sapiens
ccgcaggcaccaccacaaggacaagaccaaccagcgcggagcccgaagcaaacagca

SEQ ID NO: 185292 - RNA, 74 nt, Homo sapiens
aagagaggaaaaccacacagcaagaagagccccggacagccccgaggaggagaagaggaaccccgcgcgagcca

SEQ ID NO: 185293 - RNA, 75 nt, Homo sapiens
ggaacacaaaccacacaaagaccacggagaaaaaacgaagcacccacagcaacaaggagcagagaaaccaaaagg

SEQ ID NO: 185294 - RNA, 84 nt, Homo sapiens
ggccaagaggaggggccgaagaaagcgcgaggggcgcgaggccaagaagacgcggagggaggcgaggagggaccgagccacacc

SEQ ID NO: 185295 - RNA, 78 nt, Homo sapiens
ggcgcgacacggaggcgcccggaacaggaggagaagagagccaacaaaggaacgagcagcaacggccaggaaccaggc

SEQ ID NO: 185296 - RNA, 73 nt, Homo sapiens
caaaccaccgggcgcaccaccccagcacccaccacccaggcgaggcaaggcagcaggagccccccaaccaggc

SEQ ID NO: 185297 - RNA, 81 nt, Homo sapiens
ggcgggccaccgacccccagacggcccgagcccggaacagacacagagccgcgggacggggcgagggcacacccccggaac

SEQ ID NO: 185298 - RNA, 54 nt, Homo sapiens
cagcccagcggcgcgaagcgaaaccggggccaagaggcgcagcccccaagacgg

SEQ ID NO: 185299 - RNA, 92 nt, Homo sapiens
cgaccggaacgaaacaggcaagcgcccagccaccgcaggacacgacacagagaagaaccacaggaccaggcggcgaaccggcacccaagcga

SEQ ID NO: 185300 - RNA, 78 nt, Homo sapiens
acccggccaccccccagggagccgaagccaagggacggccaccccagagcagccaagcggcagcagcagcaccgccag

SEQ ID NO: 185301 - RNA, 72 nt, Homo sapiens
agagggcgacaaggaagacaacacaccgcccaaccgggacaaagaaaggaaaagagaagaaccggagccgga

SEQ ID NO: 185302 - RNA, 61 nt, Homo sapiens
caggagacggagccaacagaaccagacaggggaccccaagccgaggaacagcgcgccaaga

SEQ ID NO: 185303 - RNA, 74 nt, Homo sapiens
gcgggcggggacgggggcgagaggaacgacaacccgggggagccaggaaacgggcacaccgcaccaacacaaca

SEQ ID NO: 185304 - RNA, 78 nt, Homo sapiens
cagggcaaaccagaaagacggacaaagccggaggcagaagcaggaaaccagagggagagccggcgcaggcggaggagc

SEQ ID NO: 185305 - RNA, 67 nt, Homo sapiens
accggggagcgacagaagacaaacagcaaggggcaaagggagaaacagagagcaggcggaaagcggc

SEQ ID NO: 185306 - RNA, 75 nt, Homo sapiens
gaaaaccacaccaagggaaggaaggaccagagaaacgaaagcacggcgaagcagcggagaagcggccaagaaggc

SEQ ID NO: 185307 - RNA, 55 nt, Homo sapiens
gcaaccacggaagcgccaaggcaacgaagcaagagccccacacaccaagaacccg

SEQ ID NO: 185308 - RNA, 68 nt, Homo sapiens
cccaaacagacaggcacggaggaagcaggaaggaccacccaaggacaccgccgcccagccacaggacc

SEQ ID NO: 185309 - RNA, 61 nt, Homo sapiens
cgcagcagcacaagcgaagaggccacagcacagcaaagccacaacacccaggaggcccccg

SEQ ID NO: 185310 - RNA, 69 nt, Homo sapiens
gccaccgaccggcaccagcaagcaagaaagaccgacagaacaagcgcaaaaaaagaagagcagaaacgc

SEQ ID NO: 185311 - RNA, 54 nt, Homo sapiens
ggaaagccggggccacagcagaaagaagaagcacaggaacaagcagcaaccccg

SEQ ID NO: 185312 - RNA, 76 nt, Homo sapiens
acggcaccaggacacacacaaccgggccccccagcgacagagaggcacaaacccagggacaacagcaagcagagag

SEQ ID NO: 185313 - RNA, 78 nt, Homo sapiens
gggccgagccaggcacaggcgggggcggagaaggagcgcccgagaccacggagacaacgggagggcggcaggaagggg

SEQ ID NO: 185314 - RNA, 84 nt, Homo sapiens
aagcggccaagcagggagaagcacccacaacggcgcccggaggaccagccaacagagaagacagcacggggagcccacaggcca

SEQ ID NO: 185315 - RNA, 67 nt, Homo sapiens
cgccgcagcgccagccaaggcgagagcgagacaaaacagggcaaggcgcccagaagcggcgacgcaa

SEQ ID NO: 185316 - RNA, 72 nt, Homo sapiens
cgcacgcaacccccagaagggagggcaagcagaaagcagaggaaaacgaacaacacccaaagccaaagaaga

SEQ ID NO: 185317 - RNA, 53 nt, Homo sapiens
caaaagaccaaacgagggacaaaacaggggcacagccagggcgaaagaagacc

SEQ ID NO: 185318 - RNA, 77 nt, Homo sapiens
cacaaaaaaagcagcaaggcggagccagagcccagcgggaaggaaaagggaggagcagcaagagagaaacagagagg

SEQ ID NO: 185319 - RNA, 74 nt, Homo sapiens
gcccagacggcgcgcacgggacgccggggagaaggaagccccccacgccggagagggcacggcggagaggcacg

SEQ ID NO: 185320 - RNA, 71 nt, Homo sapiens
cgggcacaccggagaacacacacaagagaagaaacaaaaccaaggaacaggagacagcggagaaagagccc

SEQ ID NO: 185321 - RNA, 63 nt, Homo sapiens
gcagagcgcggaggccgaaccccgaaggaaagaaccaggaccaaggagcagccgcgccagaag

SEQ ID NO: 185322 - RNA, 72 nt, Homo sapiens
gaccgagagcgcgaaacgcacgagaagagaagagcacacccgaagcaggaacacggaccacgcgcaaagaac

SEQ ID NO: 185323 - RNA, 80 nt, Homo sapiens
ccgcgccaagggcacagaagggcacccaacccccgacaagcccagaaacccagcacaaaacccagcgcaaaccccacgaa

SEQ ID NO: 185324 - RNA, 76 nt, Homo sapiens
ccccaagacggccacggaggagaccacaaacagccacaagagagaacccaccgcaagagaccaaaggccaagagca

SEQ ID NO: 185325 - RNA, 73 nt, Homo sapiens
caaagcggaaggacaggcgagaaagcgaaaaaaagagaagagaaaggcaaggaaggagacccaggaagaaagg

SEQ ID NO: 185326 - RNA, 84 nt, Homo sapiens
aaaaggagagcccgagccaacggaggaggccgagaagaacccacagagggagccggagacaccggaggacaacccgggaggaga

SEQ ID NO: 185327 - RNA, 61 nt, Homo sapiens
aaggcaagcaagaaggagggcgaccagacgaggggagacggacgggggagagaggccaaac

SEQ ID NO: 185328 - RNA, 55 nt, Homo sapiens
cacgaagcaaaaagacccccaagagaggaagaagacacggaccgacggacgggaa

SEQ ID NO: 185329 - RNA, 73 nt, Homo sapiens
gagacagaagaagcggaggccggcaaagccaaggccagcaccaaggggaggggaagccggcagcccgaaaccg

SEQ ID NO: 185330 - RNA, 83 nt, Homo sapiens
aggccagcaggagcggggcagaggcggaggcggcgcggcgcccggaggagaacaaagccagccgaaacaccagcaagacaggc

SEQ ID NO: 185331 - RNA, 75 nt, Homo sapiens
ggcagagaagcacgaaaaaggacacgggacaaagaggacagaacacaacgaagccacaggccaaccgcccacagg

SEQ ID NO: 185332 - RNA, 78 nt, Homo sapiens
aaaagccgcagcgagaaggcgcggccgccgacgagccaccaagagaaaaagcggagcggaagaaaccgacaacagacg

SEQ ID NO: 185333 - RNA, 75 nt, Homo sapiens
acggcacagaaccgcagcagggacgcgggcacgggaccggcgaggacggcaaagaccagcaaggcaccaacagaa

SEQ ID NO: 185334 - RNA, 49 nt, Homo sapiens
gaaggaagagccaccagcgacaaacaggaaagggcgaagcaggaccaca

SEQ ID NO: 185335 - RNA, 58 nt, Homo sapiens
ggggccgccacgccgcgggccccacacagcccagccagggggacccgggaaggccacg

SEQ ID NO: 185336 - RNA, 60 nt, Homo sapiens
agcgacccccggccaccgggcggaggaggagagaaagaaagccagcgcaacgagagaacc

SEQ ID NO: 185337 - RNA, 76 nt, Homo sapiens
gacacagaacagagggcagccgcaagaaaggcgaccggaagcccacggccacaccccggggacgagggcaaaccgc

SEQ ID NO: 185338 - RNA, 80 nt, Homo sapiens
cggcagcacgagcgaagaagaggcggccagaccccagaccaggggggagcaggaccagcaggggccgccaaggaccagac

SEQ ID NO: 185339 - RNA, 55 nt, Homo sapiens
aaagcacccacaaaaggggaacggcaacgacagaagcacgcgccagaagaacagc

SEQ ID NO: 185340 - RNA, 68 nt, Homo sapiens
gccaagcgaacggagagccagccgggaggaggaagagggcacccaaaaaacaaaaacagacccaagca

SEQ ID NO: 185341 - RNA, 84 nt, Homo sapiens
aagaggccacagaggcagccaaggaaccgcggcagaaaagcagaaaaccaacacaaaacagccgacacagagggcgcaacaagg

SEQ ID NO: 185342 - RNA, 82 nt, Homo sapiens
gcaacaggaaacaggccaagggcacgggcaaagagcagggggcggcgacggggcgggcggagaggacccccaccacgcacgg

SEQ ID NO: 185343 - RNA, 57 nt, Homo sapiens
acccacaggacggcgcagcgggacgcggaccccgggaggcggagcaccccccagcga

SEQ ID NO: 185344 - RNA, 77 nt, Homo sapiens
ccggacccccgcaaggcaaccgggaggggagaggagaagcaccgacccgcgccaccccgggcaacgagaggaccccc

SEQ ID NO: 185345 - RNA, 75 nt, Homo sapiens
cggccgccgaaccgccacgccagcacgccaacccggacggacaacaccggggagcgcggagccggaaaagaaggc

SEQ ID NO: 185346 - RNA, 51 nt, Homo sapiens
gagaacggcccaaagaagacacggcgcagcaacaaacagcggcgacaaacc

SEQ ID NO: 185347 - RNA, 84 nt, Homo sapiens
agcgggaacggaaaacacaccaggaggggacccaagggagagagggaacggcgaaagggcagcccggaaggagcaccaccaccg

SEQ ID NO: 185348 - RNA, 78 nt, Homo sapiens
aacgcaggagacagaaacggcagaggacgccaccaggaagggcccgcccgagaggacgaagaaccagggaaagaacgg

SEQ ID NO: 185349 - RNA, 82 nt, Homo sapiens
cgcgcccggccccgcgcgggcggacggcggaggcgcccccaggccaagccgacgccagcgggcgccacccaacaggcgcacc

SEQ ID NO: 185350 - RNA, 75 nt, Homo sapiens
caaacccagcaacacgaaacagacagagccggacgagcgggagaggacaccacacaaaaaacaggaaaagagaac

SEQ ID NO: 185351 - RNA, 77 nt, Homo sapiens
cagaaaacagcagagacccagaggagggagaggaggccgaaacgacgccccccagacacagacaagaggggggcacc

SEQ ID NO: 185352 - RNA, 61 nt, Homo sapiens
ccagccaacgaaggaggacgacagcaggcagccccaggagcgacagcaggacccagggccg

SEQ ID NO: 185353 - RNA, 75 nt, Homo sapiens
agcccgaacgccggccaaaccccagccacaccacccccaccagccgaacagggggcgggagaggggagaagacgg

SEQ ID NO: 185354 - RNA, 71 nt, Homo sapiens
ccccacaggaccccaagcaaaccggacagcacgcacagaaaaaaaaaaagcaggaccaagcaagaaggaag

SEQ ID NO: 185355 - RNA, 72 nt, Homo sapiens
gcggccgccgacgagccaccaagagaaaaagggcaaaacggacaacgagaacggcaacgggggccaacagaa

SEQ ID NO: 185356 - RNA, 87 nt, Homo sapiens
gaagacggacagcgaagccacccagcgccgagggaaggcgccgcgccaggccgggcgggcggcgggagaccagggccagcccggcca

SEQ ID NO: 185357 - RNA, 83 nt, Homo sapiens
gcgggacagcacagaggcagcgccacccgcgaaaccgaaggccaccagaagacaaacacaacccagagcagaagcagaaccgg

SEQ ID NO: 185358 - RNA, 80 nt, Homo sapiens
caccaagagggcgggagaaccacgaggagaggggggagggccaagccagaaagccacacagcagacggaagaagcgcaca

SEQ ID NO: 185359 - RNA, 66 nt, Homo sapiens
gccagggaaaaaaccgacccagaaggaggacacgcgaccgaacaggaggagccaacccacgagaac

SEQ ID NO: 185360 - RNA, 87 nt, Homo sapiens
gccggggacagccgcggggcggagaccggagcagcggagcagcggaaaagcaaaggggcaaacacgaaaagagacaagagagaaaac

SEQ ID NO: 185361 - RNA, 62 nt, Homo sapiens
cagcagaagagcagaagagggccccagaacccgagagggaaagggcgggggcaagacccaga

SEQ ID NO: 185362 - RNA, 95 nt, Homo sapiens
cggaagccacacgcgcgagacgagacccagacccacgagcggaggaggagaaccgccaggagggccaaaaccaggcgagaaccaggagaagcggg

SEQ ID NO: 185363 - RNA, 73 nt, Homo sapiens
cagcacagccggcagcccccccccaggaacccggacagaagccagaggaagcggcgaaggggggccacgaggg

SEQ ID NO: 185364 - RNA, 76 nt, Homo sapiens
acgccaagcacggggggcaggccaccgcacccggaggagaagaggcgcggaacaagcgggagagcaaggaaagcga

SEQ ID NO: 185365 - RNA, 79 nt, Homo sapiens
caaaaggcgaagacgccaagaccacgaaggcgcgcacagagcacaccccgggagcccacccccaacagcagcaaggaaa

SEQ ID NO: 185366 - RNA, 71 nt, Homo sapiens
ggaaaccgggccacgcggcagcacaaccaagggaaacgaggaggggcgccacacagaggcgccaggaggga

SEQ ID NO: 185367 - RNA, 39 nt, Homo sapiens
gaaagcggcgcaacgagcagagcaccggccagaacaagc

SEQ ID NO: 185368 - RNA, 76 nt, Homo sapiens
ccggagccccagccagggaaccacggagcacgagaaaacggcgggccggaaaaggagacgaagaaggaacccccac

SEQ ID NO: 185369 - RNA, 78 nt, Homo sapiens
cacccaggcagcaagggcaccgcgagcaagaagcaaagagaggagagagaaacaccccggagggcaagaagcagcgga

SEQ ID NO: 185370 - RNA, 70 nt, Homo sapiens
ggagagacccggaaggccaaaggcgcgcaaggaggaaggccgagaacacccacaagccacccagcgagca

SEQ ID NO: 185371 - RNA, 58 nt, Homo sapiens
aaggcggagacggccccaccggcaccgagaaagacaaggcggagaacggaaaagcacc

SEQ ID NO: 185372 - RNA, 84 nt, Homo sapiens
ggaagcaaggaggcggcggcggccgcagcgagggcgagagggaaacggccgaggggagcccaaggcgcacggggcaggcgggca

SEQ ID NO: 185373 - RNA, 57 nt, Homo sapiens
gagccgggacggacacaacacgagggccggaaaccccggccggagcgagggagagca

SEQ ID NO: 185374 - RNA, 57 nt, Homo sapiens
aagaggagacgacggacggcgggcaccggccgacggcccaagaaaagcccaaagaac

SEQ ID NO: 185375 - RNA, 76 nt, Homo sapiens
caggcccaagcgaaaaagcgggaacgcaggacccaaagcaaaaggacccaagggggcaaaggcggaaacagcagag

SEQ ID NO: 185376 - RNA, 79 nt, Homo sapiens
gggccgcgccagccagcccgcgaccgcccgcgccggcaccggggcggccggccaaagccagggcacgaaggcgggaaca

SEQ ID NO: 185377 - RNA, 68 nt, Homo sapiens
ggcgccgcagcccgggcccaggccccggcagcgccgggacaagcacagagggccggagcggagagggc

SEQ ID NO: 185378 - RNA, 57 nt, Homo sapiens
ccgccaggagcccccccagaacaaccgccagggaacagcaaaaaacgagagcagcaa

SEQ ID NO: 185379 - RNA, 90 nt, Homo sapiens
agggcaagaagaagcccaacgccacggccgagcccaccccccagagaaaaaagaggccggcgggaccaccgcccaccgggccaggaggcg

SEQ ID NO: 185380 - RNA, 68 nt, Homo sapiens
aagagcggagagaaaagaacaggggggcggaaaagaaggacggcgccagagaaggaacagggacgaaa

SEQ ID NO: 185381 - RNA, 45 nt, Homo sapiens
gccgggaacacacccaagcccgaggaggcagagagaggaaggccc

SEQ ID NO: 185382 - RNA, 106 nt, Homo sapiens
ccagggacgcccccgacccggcggccaagacgggagccgccgcggggggagccgggcagaggaagggaagacaaaagaaggggaagggaccagggccaggaaaagg

SEQ ID NO: 185383 - RNA, 70 nt, Homo sapiens
cagaagaacggagacagccaaagcccaagccacagaaaggccagcagaaaggacgcaaggacccgaaaaa

SEQ ID NO: 185384 - RNA, 78 nt, Homo sapiens
gggaaggccaccggcaggcgcacaggcccggccaggcacaagggcaccacaaaggccccccgaaaaagccgaggagga

SEQ ID NO: 185385 - RNA, 58 nt, Homo sapiens
acccgggacgggccgagaggggacccaagggagagagggaacggcgaaagggcagccc

SEQ ID NO: 185386 - RNA, 73 nt, Homo sapiens
gggacaaccccaggaccaccaaaaaaacggcggccccgcggacaggaaggacgggacagacagaaaccccccg

SEQ ID NO: 185387 - RNA, 80 nt, Homo sapiens
gacaggcgccggagcgaccccggaggaggagcaggaaaacagaggcccaaaaaagcaaaacgggagaaccagacaaaccc

SEQ ID NO: 185388 - RNA, 74 nt, Homo sapiens
ggagacagcggaaggaggcggacaacccaaaggacacagcaaacggccaaaggcggagcacacaaaaaacagcg

SEQ ID NO: 185389 - RNA, 78 nt, Homo sapiens
gggaaccggaggagagcgagcccggaagcaggaagaggagggcaggcacgcagccagcagcagcgcagggaacacgag

SEQ ID NO: 185390 - RNA, 82 nt, Homo sapiens
gcgagcgggagggagccgcgcgccggcgcgcgccgagagagaaccgagccaccgcaacggaggcgaaccggcaggagaaagg

SEQ ID NO: 185391 - RNA, 72 nt, Homo sapiens
ccagaacacccgaggggaccagccacaggaggcggccgcacaaaggggcaaagaaaaaggagagaaaaagag

SEQ ID NO: 185392 - RNA, 56 nt, Homo sapiens
agaggacaagagacgacacgcaagcaggcaaccgaaacagcagcgggaagcccgaa

SEQ ID NO: 185393 - RNA, 69 nt, Homo sapiens
aacaagacaaggaggggaacccaaacccgcaacaagcacacgcaaaaaggacggaggggggaggagcag

SEQ ID NO: 185394 - RNA, 69 nt, Homo sapiens
aagcgagcacccgcaagaagagaacccagggaagccgaagagccagcaaccccagaaacccacaagagc

SEQ ID NO: 185395 - RNA, 70 nt, Homo sapiens
caagaggaagacaaacaaccagcccagagagaagagggggaaaaaggaaggccgccggacagcgcagagc

SEQ ID NO: 185396 - RNA, 69 nt, Homo sapiens
aaaggaaagcagaagacaagcagagacaagggcagagccaagcgccgcccgggcccaagcacccgccca

SEQ ID NO: 185397 - RNA, 85 nt, Homo sapiens
cccgagccagcgagccagcgagccgccgacccgccgagcaaaaggaagacgagccaggaggaaggcgagaccaaggccggccacc

SEQ ID NO: 185398 - RNA, 76 nt, Homo sapiens
gggcaccaaaggccaggagaagggagaaacgaagcagccaagaagagggaaagaagacaggaaacaagggaaggac

SEQ ID NO: 185399 - RNA, 84 nt, Homo sapiens
gcggaggaggcggcccggcacccgacaccaggggcccagccggcagcggcccagagacaaggcgcccgcgaagagcccgcggcc

SEQ ID NO: 185400 - RNA, 90 nt, Homo sapiens
agcagaggcgcagggccagcaggccacgaggagggcacgcggaggagacgaagaggaggccggcagaagaaacacacggaagcgcaagcg

SEQ ID NO: 185401 - RNA, 72 nt, Homo sapiens
caggcacacggagcagacagaccggacaagcgccaaacggcaagacgcagcaagaacgggacaacggcaggg

SEQ ID NO: 185402 - RNA, 81 nt, Homo sapiens
gaacagaaaccgaagagaaaggccaacgagaacaagcacagcagcaggcaacaaaagaaaaagaccacagagaggaaggaa

SEQ ID NO: 185403 - RNA, 65 nt, Homo sapiens
acggaggacagggcagaaaacacacggggggaccccgaagcaaacaagagcccaggcgggccggc

SEQ ID NO: 185404 - RNA, 77 nt, Homo sapiens
acggccaaccggcaagaccagacgggaacgggagacaagcgcagcgaggaaacacacacagcagccaagacacagga

SEQ ID NO: 185405 - RNA, 82 nt, Homo sapiens
agcaagagaggacccgcggggcacccgcaggggcagacagcacaaccagcgaaccgggggcggcggcagacaagaggacagc

SEQ ID NO: 185406 - RNA, 85 nt, Homo sapiens
ccacaagggaacgggcggccccggagagagagccgcgcacgcacagacaaggaccacgaaaggcagggagaaaagccagccgggc

SEQ ID NO: 185407 - RNA, 86 nt, Homo sapiens
cggaacaaaaggacggcaacaagcccaggacacgcgcgccccgagccgggaggcagcgaagccaggcggccggcaggagagggaaa

SEQ ID NO: 185408 - RNA, 67 nt, Homo sapiens
ggaggaccaagccgagacagcagaccacagcccggcaggcccaaaaacccaaagggacagaagcacc

SEQ ID NO: 185409 - RNA, 84 nt, Homo sapiens
ccaggaaggaagagaccacacagaggcagacaaaaaccccaagcaagcagggacaccaagaaggcagacgcgggccaggaggag

SEQ ID NO: 185410 - RNA, 69 nt, Homo sapiens
acaccgcagaaccaggggaacgcagaggcaccggaagaacaacgaggaaacgaaaaccagggacgaaca

SEQ ID NO: 185411 - RNA, 83 nt, Homo sapiens
gcgcccggggcccggggacggcgagagggcaagcccaggaacgggcgccacaccggacacaggccagaccggcgccccggaaa

SEQ ID NO: 185412 - RNA, 78 nt, Homo sapiens
gacaccccccgcacggcagccagcaggacaccggaagacagaaggaaacgggacgaaacaaaagggaaagcaaagagg

SEQ ID NO: 185413 - RNA, 81 nt, Homo sapiens
cgacaaccagccgcaagcagcccccagacaggacccagaccagccaaagagaagaagaaaggaagcaaaacaaagaaaaaa

SEQ ID NO: 185414 - RNA, 77 nt, Homo sapiens
cccgacgggcggccgcgcccgcgcggcaggaggggacggccgggccggcgagagagacggggcacccgagccaggag

SEQ ID NO: 185415 - RNA, 97 nt, Homo sapiens
accccacccaacaggcccaagaacgacgaccacgcacaccagggcgacccagcaacgcggccggccaggggcaagcgagcacggagggagccgggag

SEQ ID NO: 185416 - RNA, 38 nt, Homo sapiens
ggcccgccaccaccgcgcgcgggcaaggacacggagcc

SEQ ID NO: 185417 - RNA, 71 nt, Homo sapiens
ggcggacgggcgcccagccagggcacaggagaagagcaggaggccgcccagacaacaaagcggcaggggcg

SEQ ID NO: 185418 - RNA, 79 nt, Homo sapiens
gccaacgaaagaaacgaccaaccaacggcggaaagcaaagcagaagccccagaggagcccgaaacccccaggcgggcag

SEQ ID NO: 185419 - RNA, 80 nt, Homo sapiens
cgagcccagcagaggcggcagccggagagcgaagcagcagcccgcccagaagccacggaaaccccccaggcaagaggcgc

SEQ ID NO: 185420 - RNA, 80 nt, Homo sapiens
acagcgaacagcgcggccgcagggacccccggacagccaacaccaaagccgcgggcacagcggccgcagcggcacgcagg

SEQ ID NO: 185421 - RNA, 70 nt, Homo sapiens
cccaccgcccccggcccgaccagggcggccaccgagagggcaaggagagccaagcggaccaagaaggcaa

SEQ ID NO: 185422 - RNA, 84 nt, Homo sapiens
caagaccaaggcaacaaggacaacaagagacgggacaagacagggcaaaggacagaccagaccaagacaagccgggacaccacg

SEQ ID NO: 185423 - RNA, 73 nt, Homo sapiens
gccgccccgccagcgccagacggacgaggcggcggagaacaagcggcagaacaccggcagagagagagacaca

SEQ ID NO: 185424 - RNA, 80 nt, Homo sapiens
aaaggcacgcccaagcaggagaacagcagaccccaccaccacacaggcaacggagagcaaaggaggcgcggaggggacaa

SEQ ID NO: 185425 - RNA, 79 nt, Homo sapiens
ggaccccagccccagagcccccaacggggcggcagaaggaggcacaaaggaagaccaccaacgcaagcagggaccaaag

SEQ ID NO: 185426 - RNA, 77 nt, Homo sapiens
ccccggccgggagcgccggggccaggagagcgcgccggcgagaagcggccgagccagcagcaggaccgaagaggggc

SEQ ID NO: 185427 - RNA, 60 nt, Homo sapiens
caggcggcggggacacccggacacggcaagcaaggccaagacaggggacagccggccgaa

SEQ ID NO: 185428 - RNA, 67 nt, Homo sapiens
ggcggcacccggcaaaggaaggaacagccaagaacaggaaaacgcaacacaagggaaagagcacgac

SEQ ID NO: 185429 - RNA, 75 nt, Homo sapiens
ggccgggcgcggggccaacagcggaacccgagcggccgccaccccagccgcagaggggaagagcgccgacgccag

SEQ ID NO: 185430 - RNA, 69 nt, Homo sapiens
gggaccagcagacaagagaaacaggccgaaaagaaacccagaccaaagaccacgggggccaaacaccag

SEQ ID NO: 185431 - RNA, 56 nt, Homo sapiens
aacacacaccgaaagaagccaggacagagggcagcggcacaacccagagggcccag

SEQ ID NO: 185432 - RNA, 68 nt, Homo sapiens
gcccgagaaggggacggcgggcgagggaggggaccgccgcgcgggaccagcaccgccgaagggaacag

SEQ ID NO: 185433 - RNA, 71 nt, Homo sapiens
gggggccgacgcaggaaaggcaaacagccaccacaaaaggaggagaacagaaaagagaggcgagaagcggc

SEQ ID NO: 185434 - RNA, 85 nt, Homo sapiens
caacaccgcccgccaggacgacgacgggcccagggaacacgggagccccggaccaccggacaggggagcgcgaggcggcaccaca

SEQ ID NO: 185435 - RNA, 100 nt, Homo sapiens
agaaacggggcgcgggggccgcgcgaagacaggaccagggcacggagaggccgggaagaaggagggacacagcagcgcggagagcggcccgggacgagag

SEQ ID NO: 185436 - RNA, 84 nt, Homo sapiens
ggagcagcgagggcccggcgaggagaaccaacggcccgaaagagaaggaaggcagagcccacaaacccaagcagcaaagaaaga

SEQ ID NO: 185437 - RNA, 78 nt, Homo sapiens
accagaccccaggccgccagcccagcggaccgcgcagacgcgcaggacggagcggggccaggcggccaggacggcggg

SEQ ID NO: 185438 - RNA, 86 nt, Homo sapiens
cggccagcggagcccagaaaagaggcccacagcagacagaaaggggcgcagggccacggcgagcggccaacagggacgaacggaca

SEQ ID NO: 185439 - RNA, 78 nt, Homo sapiens
cgagcaagaccgcgacacccgaagcgagaaaggggaaaaggaacaaccgaaggagaaggacaccaagccgaacagcga

SEQ ID NO: 185440 - RNA, 32 nt, Homo sapiens
ccggccacgaggagggaggaggaaaaccagga

SEQ ID NO: 185441 - RNA, 60 nt, Homo sapiens
cgacccaagcaggaggcaggccgggagagggaaagcggagaggggaagagcacacaccag

SEQ ID NO: 185442 - RNA, 84 nt, Homo sapiens
aacgcccaggaggaacccacacaagaggaagccaaggcccagcagagcgagaggacgcagagccgccaaccccagccggacccc

SEQ ID NO: 185443 - RNA, 74 nt, Homo sapiens
gaaccacgacgaagaaccggagagaggaggaagggaaggaagacaagaaccagcagagagaccaaagacccaga

SEQ ID NO: 185444 - RNA, 41 nt, Homo sapiens
aggaacaggcccacaaacaagacagagggccagacccaggc

SEQ ID NO: 185445 - RNA, 61 nt, Homo sapiens
cggcccgagccgacgcggggcaagagggcccgggagagcaccaacaaaagaacagccaacc

SEQ ID NO: 185446 - RNA, 71 nt, Homo sapiens
aacacaaccaacggcgaacccaaccaaaggaaaaccccaaaaaaacagacgagccccgggggccacgcaag

SEQ ID NO: 185447 - RNA, 53 nt, Homo sapiens
cggcaggcagcaccccaacaacaccgcgagacgagacaagcgccaacacgagc

SEQ ID NO: 185448 - RNA, 107 nt, Homo sapiens
gcggcggccgcgccagggcgcggggccgcggccgcgcgagcagcgccgcggagcaaagaccaggggacgaaggccgcagacgaaggggaaagggaagcaagagccag

SEQ ID NO: 185449 - RNA, 70 nt, Homo sapiens
gagcgagggggggcgcgccggaaaccggagcgcgcagcaggcccaagccaggaccacgcaccgggagggg

SEQ ID NO: 185450 - RNA, 77 nt, Homo sapiens
gagcaagacagggggccgggaaacaggaggcccccccccacaaggcccgcaagcaccagccccacccgcacgcccgg

SEQ ID NO: 185451 - RNA, 85 nt, Homo sapiens
gccggagcgggcggagacgccgggcagccgaacggagggcgacggagggagagaacaacagccccaagcagaacgagaaggaaag

SEQ ID NO: 185452 - RNA, 50 nt, Homo sapiens
cccgcagggacgaggccccaagacagaagacgaaggcgggcgggcggagg

SEQ ID NO: 185453 - RNA, 77 nt, Homo sapiens
ccagggaagcgcagccaacaaaacgagccaacggagaacaacaaaaagccggagcagcaaacggagagcgagcagcc

SEQ ID NO: 185454 - RNA, 68 nt, Homo sapiens
caccggacacgaggagaaacagcagaaacgcaccaggccaaagaaagagaagagcacgccggcagcca

SEQ ID NO: 185455 - RNA, 78 nt, Homo sapiens
acccagacaagagcaccacgggcaggaaggcagcgcacgacagcaaaaggccaggaagaagcaaaggaagacagaaaa

SEQ ID NO: 185456 - RNA, 75 nt, Homo sapiens
aaaaaagaggcggcgggccggacgcggacgaggcccaacagcgaggggacgagaaaggaagaaaacgcagcggaa

SEQ ID NO: 185457 - RNA, 73 nt, Homo sapiens
cgacgaaggggcgcgaaaccaagcgcggcccagaaggggcaagaagaacagggggaccaaaacaaaacgagag

SEQ ID NO: 185458 - RNA, 70 nt, Homo sapiens
ggaggccccaaagggcgagagccgaaggggaaagcccccagacgcggccgcagaacaaaggaaggcagac

SEQ ID NO: 185459 - RNA, 76 nt, Homo sapiens
ccggcgaggccaccgaggcgaggagaggagagccagaccggagaagaacaagccgacccaaagccgccgccgaggg

SEQ ID NO: 185460 - RNA, 74 nt, Homo sapiens
cgggaacggggaaacaggaagggcagcaaagacccagaaaacacccgacacgaagaccagaaccaaaaccagac

SEQ ID NO: 185461 - RNA, 67 nt, Homo sapiens
ggcaccccagagggcagcccacacaaaaagcaggagcgggaaaagaccgagggccaagcaccgggaa

SEQ ID NO: 185462 - RNA, 42 nt, Homo sapiens
ccgcccggcagcgccccgcgagaagcgggccacaccaggccc

SEQ ID NO: 185463 - RNA, 63 nt, Homo sapiens
agagcggagccaagagcgaaggggaccgcagaccgcccaagcaccacccggaagcaaagagcc

SEQ ID NO: 185464 - RNA, 75 nt, Homo sapiens
gcagggcgccgcccaaggaacccgggggcacccgaggaggaagagggcagggcccacggaaagaagggaaacccg

SEQ ID NO: 185465 - RNA, 81 nt, Homo sapiens
ggacgaagagcagggaaacaccacgaagcagccaagaccccaagaagcccggcacggaaaaaggagggaagagaagcagaa

SEQ ID NO: 185466 - RNA, 59 nt, Homo sapiens
gcggggcaccggacggcggaaagcggcagacaaccggaaaagaagagcaaagcccggac

SEQ ID NO: 185467 - RNA, 60 nt, Homo sapiens
acaaaccgaagaacagcgggaaagaaggcaaaacacggcaaggcagacaggacgaggaaa

SEQ ID NO: 185468 - RNA, 65 nt, Homo sapiens
cggaggagcaggcgagaagagaagcccgagcgggaagaagccgcagcaagccgcagcggcgcgca

SEQ ID NO: 185469 - RNA, 99 nt, Homo sapiens
acaacaggaggcggaggcgaaagcggaacgagacgaacaccagggggacaagcggagaggcgagagagaaacacaggccccagaaggaaaaaaacagcg

SEQ ID NO: 185470 - RNA, 85 nt, Homo sapiens
caggcaaggacaaggccacagagcggggccacgcccgagcgggaagaagccgcagcaagccgcagcggcgcgcaccgggcggccc

SEQ ID NO: 185471 - RNA, 54 nt, Homo sapiens
agggggaggcccacagcacgggaggaagagcagagcagaagagaagaggaggag

SEQ ID NO: 185472 - RNA, 76 nt, Homo sapiens
aacaccacaccaaaagagggggaacaagccccacacaaggagagcaagcagggagggcccacgaaggacagagaag

SEQ ID NO: 185473 - RNA, 68 nt, Homo sapiens
aagaaaagaaccaaacggcgagaagacaccggcaggaagaagagagggcgaaggaggccacacagaag

SEQ ID NO: 185474 - RNA, 89 nt, Homo sapiens
gcgcccgccgccgccgcccgccccgccgcccgccgccggccggcgcgcgccccacaggaaaagcggccaggaccaccaggcggccacgg

SEQ ID NO: 185475 - RNA, 76 nt, Homo sapiens
cacagcgacgaagaggaagaggcagccggcacccgcacaacccagggggccgaacccagaccaacaaaaggacccc

SEQ ID NO: 185476 - RNA, 74 nt, Homo sapiens
agacaaaagggccaaagaagggagagcggggagacaaccccccccaagaagcgagggacaagcacgacccaccc

SEQ ID NO: 185477 - RNA, 82 nt, Homo sapiens
gcagagggaggaaccggacgccggaagccgggaaagagaggggcgaaaacgcggaagcggagacacaggcggcgcgggacgc

SEQ ID NO: 185478 - RNA, 41 nt, Homo sapiens
gcccccagaagcccgggaacaaacagagggccgcgggccca

SEQ ID NO: 185479 - RNA, 57 nt, Homo sapiens
caggggcgggggccgaccccggaaccagggaacgacacgggacaaagggaaggcaac

SEQ ID NO: 185480 - RNA, 75 nt, Homo sapiens
gcggcgccgcggacaagcacgagggcgcgccgagacgcccgagacgcgacccggggcgccgcgggggccaagcca

SEQ ID NO: 185481 - RNA, 79 nt, Homo sapiens
cagcgacggcacgccgaagcaccgccggggggaagccccgcgccggccgcccgggagggaaggaaacgcaagagccgcc

SEQ ID NO: 185482 - RNA, 68 nt, Homo sapiens
gacccgggggcgagcacaaacggggcggggccggggaacacacagggcaaagacgacacccggcgaaa

SEQ ID NO: 185483 - RNA, 82 nt, Homo sapiens
acagagccggggggagccgccgaggcagcaaagcaccgccgagggccaggggaagcgaaccggacacgcgaccgcccccagg

SEQ ID NO: 185484 - RNA, 69 nt, Homo sapiens
gaggccaagcgcccacagccaggaccacagaaacggacaacggacagaaccaaaggcacaccgaacaag

SEQ ID NO: 185485 - RNA, 77 nt, Homo sapiens
gagggcgcgcccaagaaccgagccgggaagggaggaccagagcaccccgggcgggccaaccagccaaaagagcaaca

SEQ ID NO: 185486 - RNA, 73 nt, Homo sapiens
gaagcagagagagcgggagacgagacaacaggccaaaacagcagggcaggagagggagacgacgaagggagag

SEQ ID NO: 185487 - RNA, 83 nt, Homo sapiens
ccgagcgcagccagggccggagaagaaaccagaagcagaagagcaaccccagacagacagaagcgaaggggacagggggagaa

SEQ ID NO: 185488 - RNA, 86 nt, Homo sapiens
ccgcgcggaggccaagcaaaggaccggagccccgccggacaggagacagaggaagaacccggagcggaagccagaagcaaaaggcc

SEQ ID NO: 185489 - RNA, 83 nt, Homo sapiens
aaaggcggaccgacaccacgacgacgggccacagcagccggcggcggcagagggacaacacagagaaccggaaagaacaagcc

SEQ ID NO: 185490 - RNA, 57 nt, Homo sapiens
ggcgcggggccgcggccgcgcgagcagcgccgcggggcggagaacggaaaagcacca

SEQ ID NO: 185491 - RNA, 61 nt, Homo sapiens
gcagcggaaaagaccagcacagggaaagggagcagcaccggccacacccacagcacgaccg

SEQ ID NO: 185492 - RNA, 75 nt, Homo sapiens
gagacagcagccaaacccccagaagcaaagagaggagagagaaacaccccggagggcaagaagcagcggagaaca

SEQ ID NO: 185493 - RNA, 34 nt, Homo sapiens
agagaagcgcggagccccaaggaccacaaccaga

SEQ ID NO: 185494 - RNA, 67 nt, Homo sapiens
gccccccagcgaggcgcaaacaccgccgggcagacaacaaagcacacggagagagagaagaaccgag

SEQ ID NO: 185495 - RNA, 73 nt, Homo sapiens
cagaacgccaggaccaaaacagggagaaacacagccagaagcaccgccccggagccacagcaaagccacccaa

SEQ ID NO: 185496 - RNA, 86 nt, Homo sapiens
agcagggaggcagcgccgacaacaccgacacagaccaacaagaccagcagcaggggccaggacagggcaaagggagcccagaccac

SEQ ID NO: 185497 - RNA, 77 nt, Homo sapiens
ccccccgcgggcccagcaccgacggcgccgcccggagaagcgagcgaaggccgggaccggaagcagggggagacggg

SEQ ID NO: 185498 - RNA, 75 nt, Homo sapiens
ccccccggcgccgcgccggcggcggaggcagggagaagggacacagcacaccacggccgcgggaagaaggagggc

SEQ ID NO: 185499 - RNA, 81 nt, Homo sapiens
acggagagggacgaaaagaggagaaggcagagcccccccaggcagaagcccgagcgggaaccagcgaagccagggcgcaga

SEQ ID NO: 185500 - RNA, 88 nt, Homo sapiens
acgacgaggaggagacgaccggccggaaaaccgcaagaccacagcagggcggaaaacaccccaaaagccaaaagggaaaggaaaagac

SEQ ID NO: 185501 - RNA, 72 nt, Homo sapiens
cgagcacggaaagcagcccgagaccgaaaaacccgaagcggcccacagacaggacagcgcagaagaggcaca

SEQ ID NO: 185502 - RNA, 36 nt, Homo sapiens
ggggaacaggcacacgggcccagaaggggaagaccc

SEQ ID NO: 185503 - RNA, 43 nt, Homo sapiens
cgcaagagagcaccacgcaaaggacacgggagagaccagcagc

SEQ ID NO: 185504 - RNA, 56 nt, Homo sapiens
cggaagggccacgacaccccccagcagccgccaggaaagccgcagcggggagaagc

SEQ ID NO: 185505 - RNA, 72 nt, Homo sapiens
ccgacaaccaagggccccgcggaccaaggaagaacccgaagcaccgccccggcacaaagcagaccgccccac

SEQ ID NO: 185506 - RNA, 74 nt, Homo sapiens
caccaagaaaacgccaaggaacggcgacacaccaaagaaaaaacacaccaagcagaaacggagccaaggggcag

SEQ ID NO: 185507 - RNA, 60 nt, Homo sapiens
aggggaggcggcaacggacacaaaggacggagcagccagagaagacggcccagcagagca

SEQ ID NO: 185508 - RNA, 73 nt, Homo sapiens
cacgaaaagaaggggaacccggaccgcgaaggcgggggagacgaaaacagaagcgacgcccagacacgaaccc

SEQ ID NO: 185509 - RNA, 73 nt, Homo sapiens
gcgcacccccagcaggaaacccagagaaacccaacgaccaacaaggcagaaccagccccagagggaaaggcag

SEQ ID NO: 185510 - RNA, 52 nt, Homo sapiens
aaccaaggacccagggccagggccgaaggggagaccgccagccacgaacagc

SEQ ID NO: 185511 - RNA, 68 nt, Homo sapiens
cagggccgcggggacaggaccccggacgagcccggcgagggaaaaagaagggaacggagagacaaaac

SEQ ID NO: 185512 - RNA, 74 nt, Homo sapiens
agaggggacaagccgggaggagaccagggcgaggagagagaaggccagagaggcccagagagacggggcaccgg

SEQ ID NO: 185513 - RNA, 73 nt, Homo sapiens
gccacaggaagaccgcaccacgcgcccacacagggaaccggaaaggaagacaggacgcgccaacgagacagca

SEQ ID NO: 185514 - RNA, 46 nt, Homo sapiens
agaaagagcggcagggcagggccccagggcagaggagagaagcgac

SEQ ID NO: 185515 - RNA, 61 nt, Homo sapiens
acgagagcacgaggaccaaggaagaagaacggcacagcaccgggccgggaccggcaggaca

SEQ ID NO: 185516 - RNA, 72 nt, Homo sapiens
cacagacaacacagaaaggagaacacccagcagaggcgcaggaaaagcaccgaaagaacacggaaagaccag

SEQ ID NO: 185517 - RNA, 77 nt, Homo sapiens
caggccgggcgaggcgaggccacccgggccgccggcggccacgggcaaacagccaagacgcaggcagagacgacaac

SEQ ID NO: 185518 - RNA, 80 nt, Homo sapiens
cgggggaggcaagaccgccccgccgcccagaggacgcccaacaccacccacccaccacgcaccgggaaccccaagaggaa

SEQ ID NO: 185519 - RNA, 79 nt, Homo sapiens
acccaccgcaggacccacagagggaaggaggagacgcgaaggaaagacccgcaggagcggaggaggcagaagaccggag

SEQ ID NO: 185520 - RNA, 38 nt, Homo sapiens
gccgaggcgagccaacagcacgagaaacacaaacggag

SEQ ID NO: 185521 - RNA, 76 nt, Homo sapiens
ccgggaccgacgggaccaacaagaaaaggagaagcagcccaaacagggcgaccgcccaggacaaagccacaaccag

SEQ ID NO: 185522 - RNA, 74 nt, Homo sapiens
accagaaggcagaggaggcgcaagacgcgaccaaagccgacggggcaaggaaacaaagcgagaaaaagacaagc

SEQ ID NO: 185523 - RNA, 72 nt, Homo sapiens
cgggaggcgccagcgccgcgcgggggcgggggccgcggcccaggccccccacccggcgccccgggccagcgg

SEQ ID NO: 185524 - RNA, 55 nt, Homo sapiens
ggcacacccgaaaccacacccagagccagcacgcggccaagacagccccgacccg

SEQ ID NO: 185525 - RNA, 56 nt, Homo sapiens
accgagccagcagcagaaacagaagcccccggccacgcagggcggcacaaacaagg

SEQ ID NO: 185526 - RNA, 84 nt, Homo sapiens
ccgaccccagaagggacaaagaccgccaggcagaacagggaggagcaggagaaggagaccccgggagaacaccgaggcccgaag

SEQ ID NO: 185527 - RNA, 77 nt, Homo sapiens
caacaggaaggcgcaagaagaagcgcacgcgaaggggccagagcccccgaacaaagggagaggaaaaggacacagca

SEQ ID NO: 185528 - RNA, 52 nt, Homo sapiens
aaaaccaggcaaaggcccagaccaggggccgcaaggccaggcgcgcagaggc

SEQ ID NO: 185529 - RNA, 67 nt, Homo sapiens
aaacacagcaccggaacagcagccgccaccagaccacaaaaagaggaggacacgggaaaaccccaaa

SEQ ID NO: 185530 - RNA, 73 nt, Homo sapiens
cggcgggggagcgggcggaaggggcggaggggacaccaaaaggagcacgcaaccccaccaccggagggcaggc

SEQ ID NO: 185531 - RNA, 72 nt, Homo sapiens
gaacccggccacagcaacggaggcggccacacaaagaaagaggaggcaacagagcaaggcgagaaacgccac

SEQ ID NO: 185532 - RNA, 81 nt, Homo sapiens
cccaggcaccaggccaaacgagcggcgaagagggcgacccggacccggaaggggcggaggaaggacagcccgaagaaggag

SEQ ID NO: 185533 - RNA, 76 nt, Homo sapiens
gaaacaccgaagcaaaaagaagcccggcagaagacaagaacaagcagaggaaagacacgccagagaagaacaggac

SEQ ID NO: 185534 - RNA, 35 nt, Homo sapiens
cacaccaccacaacagcagggcacccaccacagaa

SEQ ID NO: 185535 - RNA, 41 nt, Homo sapiens
agcccagcaaccggcaacagggccggcgagaacaggccaag

SEQ ID NO: 185536 - RNA, 73 nt, Homo sapiens
cccccaccaccgggcgagggcggaggccggcagaaggggcgaggagcacagggggagacgaggccgcacagca

SEQ ID NO: 185537 - RNA, 47 nt, Homo sapiens
aagcggcgacacacgacggggagcggcaggggaggcgaagaagagcc

SEQ ID NO: 185538 - RNA, 67 nt, Homo sapiens
aaaagggacagggagaaggcccagccaagaagagaagacaaggaggccagacagaaaagggagccag

SEQ ID NO: 185539 - RNA, 85 nt, Homo sapiens
cagaccagaccgccggggaagccggggccaaagcgaccaaccccccaccgcacgcagggggccccccgcccggggcaagaccaca

SEQ ID NO: 185540 - RNA, 78 nt, Homo sapiens
cagcccacccaaaaagacccagcggagcaggaagcgggaaaccacaaaggaaggaaagagaagggagggcgacgagag

SEQ ID NO: 185541 - RNA, 77 nt, Homo sapiens
cgaagacagacaccaaaagggaaaaagcgcggcaggcaaggccacggaaagagaagcaggacacgcggccgcgagca

SEQ ID NO: 185542 - RNA, 57 nt, Homo sapiens
gccgaagagaaaacccaccagagcacaaaagaagagcgaagcacaacacggagaacc

SEQ ID NO: 185543 - RNA, 51 nt, Homo sapiens
gaagcgaggcggaaaacgaagacagcagaccaacaggggaaccaaaggaca

SEQ ID NO: 185544 - RNA, 97 nt, Homo sapiens
cccggaggagcagggcagagcacgcgcgcagcgaagcccagggaggccaccaggggccgcaaggccaggcgcgcagaggcacccaacggcacagacc

SEQ ID NO: 185545 - RNA, 82 nt, Homo sapiens
cgggacagaacgaggccaagcggaggggcgcgagccaccgcgccggacgggagggccgaacacggcgcaggcgagagggaag

SEQ ID NO: 185546 - RNA, 77 nt, Homo sapiens
cgacgcggggcagcgccgcaccgaggcagcccgcggcaccgggggacaggaagaccgaggagcagggagcaaccaca

SEQ ID NO: 185547 - RNA, 59 nt, Homo sapiens
caagcagcgggccggacgaggaagagaacgaggcaaaccgacaccagcgacacaagcgc

SEQ ID NO: 185548 - RNA, 52 nt, Homo sapiens
aaggacaagaggaaaaaggaccaggcaaacaaagaaacagcccggcacagcc

SEQ ID NO: 185549 - RNA, 70 nt, Homo sapiens
gcagccggaggagggcgccggggcgggcgggacaagggcgcaccggggcgcagcgagggaggacaacggg

SEQ ID NO: 185550 - RNA, 86 nt, Homo sapiens
cgaccccaacacggaagacccaaggacgggacgggagggcaaacaagcaggacagcaagacccaaagaggggcggggggaaaagaa

SEQ ID NO: 185551 - RNA, 64 nt, Homo sapiens
gaggcccgcagcccggaaaggagcccaagccgggccggaaccagagcgagcagaggacacagca

SEQ ID NO: 185552 - RNA, 57 nt, Homo sapiens
cacaacccgacccgacgagcagccggcacccgcacaacccagggggccgaacccaga

SEQ ID NO: 185553 - RNA, 33 nt, Homo sapiens
aaagacaacagaccaaagcggagcagcaccagg

SEQ ID NO: 185554 - RNA, 110 nt, Homo sapiens
ggcggcagaggcacggggccggggcgacggggagcggcaggcggcaggacgcaagagccccgaagaaagagcggcaagggaagagcgacaccccagacgacgggcagcgc

SEQ ID NO: 185555 - RNA, 76 nt, Homo sapiens
gaccacagagcaaacgagagaccaaccagggcggaggaaagaacggcggaccccccaaggagacaagaagcagacc

SEQ ID NO: 185556 - RNA, 72 nt, Homo sapiens
aagaaacacaacaaaaaagagagggaagcaaagagcaacggggcggcacacaaggagcgaagggcagggaga

SEQ ID NO: 185557 - RNA, 57 nt, Homo sapiens
agaccacccccccaccgcgcccccacgcaaaaaggccggcagaaaagagacacacaa

SEQ ID NO: 185558 - RNA, 76 nt, Homo sapiens
caggccagagagggcccgggaagagagcgaggagacaagaccagaagcacaagagacccccacaccccacaaagga

SEQ ID NO: 185559 - RNA, 81 nt, Homo sapiens
agggaagcagcccgccgcgccgccccgagcagcccgccagacgcgccacaccagcccacccgggcgggccaacggggaagc

SEQ ID NO: 185560 - RNA, 61 nt, Homo sapiens
agaggggacagacagaggcagggaccaagaaaggcccagggaccaaagcccggacaaggcc

SEQ ID NO: 185561 - RNA, 81 nt, Homo sapiens
aaacaggcggaagaagcgagacagagggccaaggcaacacccgacgacagacgcgaagcaaagcgccacccagaagacgac

SEQ ID NO: 185562 - RNA, 74 nt, Homo sapiens
gggaagcagcccccagcagggcaggggaacccaacagcccgccaacgaagaacgaaccaggcaaacccgaaaca

SEQ ID NO: 185563 - RNA, 77 nt, Homo sapiens
ggaaagaaggcccaaagagcagaacagagagacagccagcccagaccagggcaacacccccacaaagagcaagccag

SEQ ID NO: 185564 - RNA, 35 nt, Homo sapiens
cgaaacgcacgagaaggcaagacaacagagaacgc

SEQ ID NO: 185565 - RNA, 77 nt, Homo sapiens
gagccaacgaaacaaaaagcagcacagcagaaacacacaaaccaagggagacaaagcaaccaaaaaacccagcaaag

SEQ ID NO: 185566 - RNA, 77 nt, Homo sapiens
agggggacccagcacagaggagacagcacgcccgaagagaccggcacggcacgcaccggcgccgcaagacgcccacc

SEQ ID NO: 185567 - RNA, 70 nt, Homo sapiens
agaaaagcacaaccagacggcgcagaagggcccaagagcaagagcaccaccagcgaggcccaagagccga

SEQ ID NO: 185568 - RNA, 80 nt, Homo sapiens
gcgggcccgaggcggcgagagaggcaggcggagccgaccgggccagcggcggcagagaagaaacgccaggaagccaagca

SEQ ID NO: 185569 - RNA, 129 nt, Homo sapiens
gagaccgcgcaaagaaaccaagagcgaggcgcggagacaaagaggggacggcaaaagggggacggagacccagcaggggcaagaccgcccggcacagacccgcaggaggagcccaccagaaaagcacac

SEQ ID NO: 185570 - RNA, 95 nt, Homo sapiens
ccggagagacgaaccgaagcgggcgggcccccccacccagagacaagcagaccggaagaccgacggaagaccacaccccgagggagcccaggaca

SEQ ID NO: 185571 - RNA, 31 nt, Homo sapiens
cacacgggagagaagggaggcagggcgcgac

SEQ ID NO: 185572 - RNA, 89 nt, Homo sapiens
acaggagccccaggagcccagacaccagccccccaccagcccaggccagcccgcagccggaggggccaccagccccgggaccagccagc

SEQ ID NO: 185573 - RNA, 75 nt, Homo sapiens
ggagaccacaggcgacgcgcacgacgacaccgaagaacggccgcgggaaaccacacggagaccaggaccacccca

SEQ ID NO: 185574 - RNA, 72 nt, Homo sapiens
agagggcccgacgcacgcaccacccgccacccaccagccgcaacgcgagggcggagaggacaacagcagagc

SEQ ID NO: 185575 - RNA, 57 nt, Homo sapiens
gaagacccaacgaaaggggcgacaccagggccgcagagcgaaagggaagcaaaggaa

SEQ ID NO: 185576 - RNA, 75 nt, Homo sapiens
gcaccgggaagcggggcgaacgggccgccacagcggcggaggcgcccaagcagaggaagggcagcagaacaacgc

SEQ ID NO: 185577 - RNA, 75 nt, Homo sapiens
gcaccggcacaccgcggggccgaaaacaacgacaacgagcacagacaagcagaccggaagaccgacggaagacca

SEQ ID NO: 185578 - RNA, 48 nt, Homo sapiens
agaggaaagagaacaagcaacgggcacgggagcaagaaagagcaccag

SEQ ID NO: 185579 - RNA, 83 nt, Homo sapiens
gaagccagaagcaggcccccaccaaggaaaaaacgagaagaccccaaaaccaggagggccccaaggcggcagccccgaccgac

SEQ ID NO: 185580 - RNA, 77 nt, Homo sapiens
gaagaaccggagccggagagcggggacgaagcgacagggagggcggagaaggaacggaccaccagcaaaccggacac

SEQ ID NO: 185581 - RNA, 71 nt, Homo sapiens
gcggacgcaaccaaccgccagccaggcaggggagccaggggagaacagacaaagcaggcaggcagggccaa

SEQ ID NO: 185582 - RNA, 81 nt, Homo sapiens
ccggccgggcacggacagggcgaaagccgaccacccggcgaaggaagcacggagagcaagagacaggccagaccccccccc

SEQ ID NO: 185583 - RNA, 68 nt, Homo sapiens
cagggaccaagcagagaccagaaaccggaagcgaggacaaaagcaggggcacggaagaggacaagaaa

SEQ ID NO: 185584 - RNA, 71 nt, Homo sapiens
caacacagaaacacgaagaagagagacaaccaaaagacacaagggcacgaaagaggacaaacaagggacaa

SEQ ID NO: 185585 - RNA, 59 nt, Homo sapiens
accaacggaaccccaagaggaccgaggggaaaaagaaaagggcgaagacccgaagcagc

SEQ ID NO: 185586 - RNA, 85 nt, Homo sapiens
gagggagaggaccaagaaggagcggaacagcccccgagaggccccggcgacccaaccgccggcggcggccccccaacacgcggcc

SEQ ID NO: 185587 - RNA, 81 nt, Homo sapiens
gaacagccgaagaagggcccccggaagaaccgaaggacacacaggcaggccacagcgcagggaacccagcgcgcccccggc

SEQ ID NO: 185588 - RNA, 75 nt, Homo sapiens
gccaccagaacccaagaagaccgaaagaaacacggaaaaaaagacgggaacggcccgaccgggccccacggaaaa

SEQ ID NO: 185589 - RNA, 77 nt, Homo sapiens
ggcgcccggccgccgcacccccagcggcggagaaaccaccacaaacacgaggccagcaacgaccaacaagacagacc

SEQ ID NO: 185590 - RNA, 70 nt, Homo sapiens
aggccccgcgcgggcgaacacacaaagccgcaccagagaaaagacacagacgacccagaacgaaggaagg

SEQ ID NO: 185591 - RNA, 59 nt, Homo sapiens
ggaacgggggagcccacaggagccagggagaaagagagagcgcgaaagagagaggagcc

SEQ ID NO: 185592 - RNA, 57 nt, Homo sapiens
gagggccccaggaaaggaaacaggaacacgaaagaggaaaaacgcacaagaaaccga

SEQ ID NO: 185593 - RNA, 39 nt, Homo sapiens
agccagagaccaaacaccggaaaacgaaacagaaccgcc

SEQ ID NO: 185594 - RNA, 72 nt, Homo sapiens
ggcgccgaaagaaggcaaaaggagcgcagaccccaaccgggcagcaccccccggacagggccacggcccccg

SEQ ID NO: 185595 - RNA, 82 nt, Homo sapiens
caccgaacgaacacccaacaagccgcaacgaaaaccggaaaaggcccacagcgcggcaccgaccccggggggcgcggggggc

SEQ ID NO: 185596 - RNA, 82 nt, Homo sapiens
gggcgggccagggccgcacccggagaccgcgggcacgcgcaccaggcggagaaaggccaaccacagcacccgggcagcagcc

SEQ ID NO: 185597 - RNA, 80 nt, Homo sapiens
cgcgaaggaagcggggacacgcggccccagcgcccggccccccaccggacacccgcggggcggcacccaccccccgagcc

SEQ ID NO: 185598 - RNA, 52 nt, Homo sapiens
gcccagacggccggaacccgcaaacgagaggacaaaccggcgaccacacacg

SEQ ID NO: 185599 - RNA, 74 nt, Homo sapiens
cgggcaagcaaacccgcccagcccgagagccgagagcgggacaaagggcacccacagaggcaacgaaagcacaa

SEQ ID NO: 185600 - RNA, 54 nt, Homo sapiens
gcagagaccaggagccgacagccagcaggggcagaagcagcagacggaacgagg

SEQ ID NO: 185601 - RNA, 53 nt, Homo sapiens
agcaagggaacaacaacaggacgccacaggcgcacacaagagagggccgggcg

SEQ ID NO: 185602 - RNA, 77 nt, Homo sapiens
caccccccagcagccagcaacaccccggggaaagcagaagccggagcgggcagggcacacaaccgggcagcggacac

SEQ ID NO: 185603 - RNA, 78 nt, Homo sapiens
aaaacaaaaggagccgacaagggaggcgaggacggacaaaaggaaacggacgggaggccagccagcagaaggaggaac

SEQ ID NO: 185604 - RNA, 75 nt, Homo sapiens
ccaaagcgcacagagcggggcaacaacccagacgacgagaggaccgccgaagagcaccagagcgcaccccccgag

SEQ ID NO: 185605 - RNA, 81 nt, Homo sapiens
gacaagcggggacgcgcccagacgcagcgcagcccggccaagcccgccgcgcccgcggagggaaggaagcaagaaacaggg

SEQ ID NO: 185606 - RNA, 76 nt, Homo sapiens
gaaggacaaagagacaagccgagagaaagcaagcaaagggacagcagcagagaaagcaagcaggaaaccgggaccc

SEQ ID NO: 185607 - RNA, 77 nt, Homo sapiens
caggcgcacccccggcggaggccgaggacacccccgccagaagggcccccgccacccaggccagaggcaggacgcag

SEQ ID NO: 185608 - RNA, 57 nt, Homo sapiens
ccggccccccaccccaccaagggcagggaggccaccagggcggaggcacccgccaaa

SEQ ID NO: 185609 - RNA, 64 nt, Homo sapiens
ccacagagacgaaggcggcaacaccaccagaggagaacaaagggcaaaaggccaaaacggaaga

SEQ ID NO: 185610 - RNA, 76 nt, Homo sapiens
cacccgcggggcagacggcgggccggagaaggggcgacgcgggcaccccccgaaggacaaccccgcaacggcaggg

SEQ ID NO: 185611 - RNA, 79 nt, Homo sapiens
cgcgcccaggccagcgccccaggccaagagggacccacccggcggaacgggacacgaggcgcgcggcaaacgcggggca

SEQ ID NO: 185612 - RNA, 74 nt, Homo sapiens
agagagacgagaaagaacacgcggccaaacccggaggaggagggaaagaaaacaagccacccagacaagaggaa

SEQ ID NO: 185613 - RNA, 80 nt, Homo sapiens
acacgcaacccaaggcacaggcaggaagccacagggcacaagggcaggaagcaggaagaaagaccccggacgcaaaggag

SEQ ID NO: 185614 - RNA, 82 nt, Homo sapiens
cccgagcccgaagagagaaggcaaagaacccggggaaagggccaacagccagacaaaaccacaacaccgccaagcaaaaggc

SEQ ID NO: 185615 - RNA, 76 nt, Homo sapiens
gcaacaaagcagacaccagagcaggacgagaagccaaggagagcccggagggcccgggccggggaagaacacgccc

SEQ ID NO: 185616 - RNA, 64 nt, Homo sapiens
cagaaagcggcacgaacagagccgggagcaagaagaacacccagaggcaggacgcggagaaccg

SEQ ID NO: 185617 - RNA, 78 nt, Homo sapiens
aagcaaacaccccccccaccaccccaccagaaaggcggacaaggacagcaggagagagaaacacacgccaggagcgcc

SEQ ID NO: 185618 - RNA, 91 nt, Homo sapiens
ccccccacgcaaccccagaccaacacacaggcggaaaacaccccaaaagccaaaagggaaaggaaaagaccaacaacagcgcaggacacga

SEQ ID NO: 185619 - RNA, 85 nt, Homo sapiens
ggccggccagaagcgggcggcgcgggggagagagccccacggaaacacggcgagagggaccagcagagcaacagggcaaggccac

SEQ ID NO: 185620 - RNA, 42 nt, Homo sapiens
cggccgccagccgggagaagacaagacccgcggcgcggcgga

SEQ ID NO: 185621 - RNA, 71 nt, Homo sapiens
aggacaacaccgcaggacggaaagcaaggaccccacaagcgaccggcaaagcgccagagaacaacaaagga

SEQ ID NO: 185622 - RNA, 67 nt, Homo sapiens
agaaaaaacgaagcacccacagcaacaagacgcaagaggcgccccaaggaaaggggccaacgggcgc

SEQ ID NO: 185623 - RNA, 77 nt, Homo sapiens
gggagcccgccgccccgaaaccaccgcgagcgggggccaggcaccgggcaggggccagcggcaaccaagcccggaag

SEQ ID NO: 185624 - RNA, 61 nt, Homo sapiens
acagaaccccagaacccaaccaaaaacagagagaagagagaggaaggccgcggaccccccc

SEQ ID NO: 185625 - RNA, 78 nt, Homo sapiens
caggcggcgccccggagagccccgcggcagccgcgccggggccaagccggcaaggaaaacgcaaaagaggaccagacg

SEQ ID NO: 185626 - RNA, 78 nt, Homo sapiens
cacgaaggaggaagaagagacgaagagacagcggagaagaaggggaacagggaagaaaacggggagcccaagggaaag

SEQ ID NO: 185627 - RNA, 54 nt, Homo sapiens
aagccagcgacagaagccagacggcaaacagaagggcgcaggaaaaggcgcaca

SEQ ID NO: 185628 - RNA, 78 nt, Homo sapiens
aggaacagcaaccggaagagaacagaaacccccaagagcaaaagaacggggaaaagcaggaaacaagcagagaagaac

SEQ ID NO: 185629 - RNA, 74 nt, Homo sapiens
gcaaaagcagaggccgcagagaagaagaaagagacacagcaagggaaggcagagacagaggaagaggcagagcc

SEQ ID NO: 185630 - RNA, 44 nt, Homo sapiens
ggaaagcaccgaggcacaacaggaaggaagggaacacggacgac

SEQ ID NO: 185631 - RNA, 70 nt, Homo sapiens
cgcccagcccccgacagcgggaacagaggcagagcaacagggacacaagcaagaagaaagggaccgacag

SEQ ID NO: 185632 - RNA, 70 nt, Homo sapiens
gccgagcggccaggacgacgaggagcagggccgacgcgcaggcccggcaagacgcgcaggaagaccagcg

SEQ ID NO: 185633 - RNA, 74 nt, Homo sapiens
cgaagcgaacaggacaggaacggaggaagacgaggaagagagaagaggcaaccagacacacaaccaccagaagg

SEQ ID NO: 185634 - RNA, 80 nt, Homo sapiens
caaagagccaaaggacgggaagaacccacgcgcgacgaaaagcgggacaacacaagggaaccaaggagggcgccgcgggc

SEQ ID NO: 185635 - RNA, 77 nt, Homo sapiens
acacaggagccggagcagaagcaaagagcgccgccagcgaggaacaacgcaggaagcgaaggggcgcggggggcccg

SEQ ID NO: 185636 - RNA, 58 nt, Homo sapiens
cccaccacgcagccgaaggcgaaccgcgcgcacaaagagcacaacgccccacccgacc

SEQ ID NO: 185637 - RNA, 72 nt, Homo sapiens
cgaaaccccacaagggaaaggaaaggacccccccaggaaggagaaaacacaggcaggaagaaagaaacagac

SEQ ID NO: 185638 - RNA, 82 nt, Homo sapiens
cgcggcgcgcgcgagccgagggagcggaaaggggcccggcgcgcccgagacgaagaccgaacaccagcaggaaaaaagagcg

SEQ ID NO: 185639 - RNA, 80 nt, Homo sapiens
ggaaaaaagaagaaaagaaaaagagcaaccccaggaaagaccacccaacgaacaaccagggacacgaggaccgaagagcg

SEQ ID NO: 185640 - RNA, 37 nt, Homo sapiens
ccaggaagaaccccccacccagcacaggagggagcag

SEQ ID NO: 185641 - RNA, 80 nt, Homo sapiens
gacaagaagccagagcagccgcccaaccgcgggaccaaccacccgagcggcgcggacgaagcaaaacaaacggagagagg

SEQ ID NO: 185642 - RNA, 79 nt, Homo sapiens
aggcccggccgacggccacacggcggccgcagggcgccggagccccccagcccagagcgacgggcggaaacccaaaccc

SEQ ID NO: 185643 - RNA, 81 nt, Homo sapiens
accaccggcccaggagcgcccccggccacggcccaggcacggcccccagcgcagccgcagccaggccgaaccaagaacaac

SEQ ID NO: 185644 - RNA, 87 nt, Homo sapiens
aggacggaaggggaagaggcccacccggagaaccccacggagaaccagagagccccccaccaggaaccacgccccgagcgcccggag

SEQ ID NO: 185645 - RNA, 41 nt, Homo sapiens
acacgacagcaccgcaggcgaagagaccaccgcacggaaac

SEQ ID NO: 185646 - RNA, 67 nt, Homo sapiens
ccccaaggaggcgacgaaggacacgcaacccccagcacaggggcaaagaaaaaggagagaaaaagag

SEQ ID NO: 185647 - RNA, 72 nt, Homo sapiens
aaggaccaagaaccagggcaagaggaaaaccaacgaacaaaggaagaccaacagaaacagaagaaaagcgag

SEQ ID NO: 185648 - RNA, 66 nt, Homo sapiens
aagaaaaccgaccagggcaacaccaaaaacaaaacgaaccaggacggcaaaaggggggccggagga

SEQ ID NO: 185649 - RNA, 68 nt, Homo sapiens
aggaccgaccgggcgagcgagagagagcaagcgcagcgccacaaacaggagaacccgcaacacaaacc

SEQ ID NO: 185650 - RNA, 85 nt, Homo sapiens
ggaaggggaggaggagaggggaggagaagagagggggaaaccaagaccccaggacaacaaggagcagggaaaaccgaggggaacc

SEQ ID NO: 185651 - RNA, 75 nt, Homo sapiens
gaaaccaagggcagagcaacaagagaccgcaaccccggaggacaacaaaaggagagaaaagggagaaaagaaggc

SEQ ID NO: 185652 - RNA, 73 nt, Homo sapiens
cgaaaaaggccgaaggacacaacacagccggacggcaaagagcaccaggccaagaaccccaaaaacagcagca

SEQ ID NO: 185653 - RNA, 70 nt, Homo sapiens
aaaaccagacaaaaaggcaagcgggacccgacaaggaagaacgccgaacagccaaaaggaaaaaagacca

SEQ ID NO: 185654 - RNA, 83 nt, Homo sapiens
gaacgagcggcggcggcggcagcgggcgggccccgagagcagcagcgggcgccggccgagcccgggaaaacgacagcagcagc

SEQ ID NO: 185655 - RNA, 59 nt, Homo sapiens
cggggaaggcaacaaaagcggaagaagaacgagacagcagaaagaagcagcgcaaggcc

SEQ ID NO: 185656 - RNA, 50 nt, Homo sapiens
cggcggggcaaaggggaagcaagaagcacagcacaccggacgggaaacag

SEQ ID NO: 185657 - RNA, 83 nt, Homo sapiens
cagggcccggcccgaaaggagagccggacaggggggggccggaaaacagaccccaagaaaaaacgagggagagagaggacgag

SEQ ID NO: 185658 - RNA, 73 nt, Homo sapiens
ggagagggaagagaaaggacccagcagaccgcacacagagaaaaaaagggaacaaaacacagcaagcagacaa

SEQ ID NO: 185659 - RNA, 70 nt, Homo sapiens
ggcgggaacccgaagaagaccaccgggagagagggaaaaaacaaccccgccgggcggcagggcacaagaa

SEQ ID NO: 185660 - RNA, 80 nt, Homo sapiens
aacgggaccaagagcccagccgcggcccccggacaagggcagccccgcggacacaggcccgcgcccgggggccgccgccc

SEQ ID NO: 185661 - RNA, 72 nt, Homo sapiens
acggccgggccgacgggccgagcccagagccggcagccaggcagcaggaaacaccaaaggccggacgcacca

SEQ ID NO: 185662 - RNA, 57 nt, Homo sapiens
aagacagcaagcagacccgagaggaagacgcgacaggcccaccaagccgagaacacc

SEQ ID NO: 185663 - RNA, 108 nt, Homo sapiens
cacacacccaccagagccacaaggaggagagacagccggaggaacggaaacaaaccaacccaagcgggacacgaaagcacggcccggaggaaaaccaccggcggaaac

SEQ ID NO: 185664 - RNA, 76 nt, Homo sapiens
aaccggagcacagagaagccccagcgaaggcgcgggagacggagggaacggaagacaagggcaagagaaacacagg

SEQ ID NO: 185665 - RNA, 71 nt, Homo sapiens
cgaagagagcccggaaccaccggccgcagccgcaggggcaaaagaacagggaccaacaagagcagacaaaa

SEQ ID NO: 185666 - RNA, 70 nt, Homo sapiens
cgagcccacgaacccgaagcccccaaagagagaaccggagagcacccaacagaggaagcaggacggaaca

SEQ ID NO: 185667 - RNA, 69 nt, Homo sapiens
aacgacgccaaagagcacgcagagagcccggcagaagaacgacagaacacggcaaaaccacgacccggc

SEQ ID NO: 185668 - RNA, 78 nt, Homo sapiens
cacgacccagccccacacggcaagacacagagagacggcagccgcgacagacacaccacgcacacaaaccaagaacca

SEQ ID NO: 185669 - RNA, 70 nt, Homo sapiens
cacgggacgaagcgacccgacaccccaccaacacgggagagagagagagagaggaagcgaagaaaaagcg

SEQ ID NO: 185670 - RNA, 72 nt, Homo sapiens
gaagcaccaaagcgcgccaagaggccgcgagggcccggaacaggggcacgcacgaggcggaaccacaggaac

SEQ ID NO: 185671 - RNA, 76 nt, Homo sapiens
cgaggagaaacagcagaaacgcaccaggccaaagaaagagaacagacggagccgcccagaagccgcccacagcaag

SEQ ID NO: 185672 - RNA, 68 nt, Homo sapiens
aaccagcaaccagaaccacgagagaaagacccaccaagagacgaaaaagagccacgcccccacgagcg

SEQ ID NO: 185673 - RNA, 82 nt, Homo sapiens
agaccaccacaacaagagacaacaccgcgcggaccacaaaccgcgccagaaaaggcggagcccacgccccaggacacgcaga

SEQ ID NO: 185674 - RNA, 59 nt, Homo sapiens
gcggaagcacaccccggggaacggagccgcagcggagaaggcggaggcaagggcgaccg

SEQ ID NO: 185675 - RNA, 77 nt, Homo sapiens
gccgacaaggggcggaggaagggaggagacccgaccccagaagaccacagagaagcccacccggaaacaaacgccag

SEQ ID NO: 185676 - RNA, 82 nt, Homo sapiens
cgaaaacggaagcgcagggagaaggaagaggggaaaagagggccaaacaagaaggcccgaagagaccccagcggaggagacc

SEQ ID NO: 185677 - RNA, 83 nt, Homo sapiens
gcggaacaggacgccccgagcagaagaggccaaggaggaaaagggaaaggcaaaaaagcaaaagcgaccccaaagcgaacaag

SEQ ID NO: 185678 - RNA, 68 nt, Homo sapiens
aacgggccccgcaggccaagagcgacgccggccagacgaggcagagccaacaagccacgcagccgaac

SEQ ID NO: 185679 - RNA, 55 nt, Homo sapiens
gagcacaaaaaagcggaaaaacgaggcccaaagcccagccaaggacccgaaaaac

SEQ ID NO: 185680 - RNA, 83 nt, Homo sapiens
cgggcggcggcgccaggccagggccgggggacccgaggggagcggcccgcacagcgcccaccaggaccggcccgcagacaacc

SEQ ID NO: 185681 - RNA, 76 nt, Homo sapiens
ggagagaagacgacgcaccgcaggcagacaaaagggccaaagaagggagaggccacagagccgaacacagcagagg

SEQ ID NO: 185682 - RNA, 80 nt, Homo sapiens
gcggacgccaagaccgggaccgggcgccacgcgggggcaagacgaaggccgggaggcccagcccccgcgcggccggaggc

SEQ ID NO: 185683 - RNA, 59 nt, Homo sapiens
agcgaccccgcccagcccgagcgcgggaacagacaacaaccccccccgcgaaacgcgag

SEQ ID NO: 185684 - RNA, 78 nt, Homo sapiens
cccacagggcacacagcaccgggcgaaaaggaggaaaagaagccagaccgaggcaaaagggaaagcaaggggaagggc

SEQ ID NO: 185685 - RNA, 40 nt, Homo sapiens
gaaacccagaggacggagaccagagaaggaacagaacaga

SEQ ID NO: 185686 - RNA, 67 nt, Homo sapiens
gccggaaaccggagcgcgcagcagaaacgacagggagaaaaagcaaagaagacagcaaagagagagc

SEQ ID NO: 185687 - RNA, 46 nt, Homo sapiens
cgaaggcaccgccaccggaaaccaggaaaaggaagcaaacggaaag

SEQ ID NO: 185688 - RNA, 64 nt, Homo sapiens
cgcgaaaaggaagcggaagggccaggaaacgaacacacagggacgcaccccggacagcggaccg

SEQ ID NO: 185689 - RNA, 111 nt, Homo sapiens
gcagccacgcagaagcgcggcagggagcgcgggggcccgcgcagcagcgaccacggcaaaagggaaagcaaggggaagggcccaagaagacaccccaccagaaaccgaacg

SEQ ID NO: 185690 - RNA, 48 nt, Homo sapiens
aaagcgggccaaccacacagcacgacacagggcagaggcaaggaaagg

SEQ ID NO: 185691 - RNA, 77 nt, Homo sapiens
ccagccgacaagggcagaacgaacaggaacaaagccagacggaaccaaacaagacaaaggaggcagcaaacagcaca

SEQ ID NO: 185692 - RNA, 65 nt, Homo sapiens
aaaacccagcggagccggccgagaaacaagcgagaggagggaacaccgaggaccaaggaagcacg

SEQ ID NO: 185693 - RNA, 74 nt, Homo sapiens
aggcggccagcagcccccgagcaagcggccgagcggagccacccccaggacgcggagacaggcccacaaacagc

SEQ ID NO: 185694 - RNA, 69 nt, Homo sapiens
gaacaaaagccaggcacaagaaagcgaaaggagcgcccaaaacaaaccaaagaagaacaccagagggcc

SEQ ID NO: 185695 - RNA, 67 nt, Homo sapiens
ccccgccacgaaaagccccggcccaggcggagcagggacagcagggcccgcgacccagacccggggc

SEQ ID NO: 185696 - RNA, 80 nt, Homo sapiens
ggaaggaaaggcgcaacaacacaaaaaaagcagcaaggagagcgaaccaggggagcggagacaccacgggcagcgcaaaa

SEQ ID NO: 185697 - RNA, 43 nt, Homo sapiens
ggccacgcaagcccacccccagcaccaggaggcgaagcaggag

SEQ ID NO: 185698 - RNA, 78 nt, Homo sapiens
ggaaccaaggccaccaagagacaaaagaagagaaagccccaagcgacaggggagggacccagagaccaccgcacggaa

SEQ ID NO: 185699 - RNA, 72 nt, Homo sapiens
gcggcggcgcgggggccacggagccgaggccaaaacacagcaccgcgggaaccgagcgaagcacgaagggac

SEQ ID NO: 185700 - RNA, 71 nt, Homo sapiens
cacgggcggacggaacgggcggagaacggaaaagcaccaggaagcagagaggaccgcagaagggaaggaga

SEQ ID NO: 185701 - RNA, 70 nt, Homo sapiens
cacacacaccacaggaagccaacggcaccagagagagccccagaagacccaaaaagggaaagaaacagaa

SEQ ID NO: 185702 - RNA, 90 nt, Homo sapiens
cagcccgggagaagccagcggccgggaagagccagaagaagaaagggaaaaccaggagagcgacggccaggcgccagagcgagccagccc

SEQ ID NO: 185703 - RNA, 83 nt, Homo sapiens
gcggcccagggcacagaggacaggcccaggaaccagcggagccagagagaggcagcgcccggaccagggcgaccaaccagcga

SEQ ID NO: 185704 - RNA, 80 nt, Homo sapiens
cgagcagaccggaaaccgggacaccggagagccaccaggcccggagcaaacagccagacagcccgcccacccagcaaggg

SEQ ID NO: 185705 - RNA, 32 nt, Homo sapiens
cccgagaggggacacagaggagcgccgcgccc

SEQ ID NO: 185706 - RNA, 75 nt, Homo sapiens
aacagcacggaggaaagaggagagaacccaacacagggaaaggaaccgcggacaggccacgcgcagagcgaacac

SEQ ID NO: 185707 - RNA, 55 nt, Homo sapiens
aaaagcaccacgaccagagcagaaaaccggggaccaaagcaggcacccacgggag

SEQ ID NO: 185708 - RNA, 72 nt, Homo sapiens
cacagacccaccggccccagcgggggcccgcgggacggcaccggaggaaaaagaagacaccgcaagaaggga

SEQ ID NO: 185709 - RNA, 71 nt, Homo sapiens
acccggcagcagcgcggccggccggggggaagcgagcgcgggggagccgggcaggacccgggccgcgcgag

SEQ ID NO: 185710 - RNA, 77 nt, Homo sapiens
ccccggggacgcagcaaagcgcagcaagcagagcccggacaggcccgccaccggggcacgggcgccccccggaagcg

SEQ ID NO: 185711 - RNA, 56 nt, Homo sapiens
agagcgcgggacgggcaaaggaaaggggaggcaagcaggggggcaaaggaaagaag

SEQ ID NO: 185712 - RNA, 76 nt, Homo sapiens
cccgccacacagggccgcaaccgccggggacccagggagcacgagccagggagccgccgggaccggcccgggagac

SEQ ID NO: 185713 - RNA, 58 nt, Homo sapiens
agacggcgcgcacgggacgccggggagaagaagggcccggaggggccgccccacgccg

SEQ ID NO: 185714 - RNA, 46 nt, Homo sapiens
gaaaagaaacccaagaagaacaccagaagcagccgaaacgaaccaa

SEQ ID NO: 185715 - RNA, 95 nt, Homo sapiens
gggcgcaccgagaccacaggcgcacccgaagacgagagaaaccaaggaaaccgaagaaccagccccggggacgaaagagacggcagcgccggcca

SEQ ID NO: 185716 - RNA, 75 nt, Homo sapiens
gggccacccggggccggcgcggaggcagcgggcacggcaggacccgaaccacaaagacacacagaggacaagaaa

SEQ ID NO: 185717 - RNA, 76 nt, Homo sapiens
gaaaccaacaccgcccaacacccccccgcccccagccggggaccgaaggagaaagaaccccagagaggcaggacgc

SEQ ID NO: 185718 - RNA, 50 nt, Homo sapiens
cgccacagcacaaacagggcccggccagaaagacaggagcgaaaacccac

SEQ ID NO: 185719 - RNA, 48 nt, Homo sapiens
gcccagcccagcggcaggcgggcaggacagagaggcgcaggcaagacc

SEQ ID NO: 185720 - RNA, 77 nt, Homo sapiens
agagcgccgggacccggagcaagcaaagcgccaaaccaaggcaaacccaccggagcccccgcagaggcccgcaaaaa

SEQ ID NO: 185721 - RNA, 81 nt, Homo sapiens
aagggaggcaagaagaagaaggaccaagccccaaaaggccaccgcacaggcagcaagagcggaacacagaaagcagggagc

SEQ ID NO: 185722 - RNA, 81 nt, Homo sapiens
cccaaaagagccagacaacaggcgccaaaaaggagcaagaggcaggggaccaaccaagaagcgaagaaaagagaaagaaac

SEQ ID NO: 185723 - RNA, 71 nt, Homo sapiens
gacaacccccagaagagaccaacgccaccaaccaaccggaagaagagagggcgaaggaggccacacagaag

SEQ ID NO: 185724 - RNA, 82 nt, Homo sapiens
cggcccgggaccggcggcgcgcggcggccgaggccaggcgggggacagccggcgcggcccaagaagagacaccgggccgaca

SEQ ID NO: 185725 - RNA, 94 nt, Homo sapiens
gcggggagcgaacgcaaagagggcgcccgcggagaacaacaaggagcaggccgggccccgcggggagcggagacccagacgggaacggggcggg

SEQ ID NO: 185726 - RNA, 71 nt, Homo sapiens
aaacgcggaaaaccgacacaacagggcacagaaacgaccaggcgacgggcaaaaaacggcggcaagccaca

SEQ ID NO: 185727 - RNA, 55 nt, Homo sapiens
agaaaaaggaaaacgcggaaaaccgacacaacagaccaagaagaacaaccgcaga

SEQ ID NO: 185728 - RNA, 112 nt, Homo sapiens
cggccccgacggggcgcgcgcgaagcgagcgagaaggcacggagcgccgcggagcgcagaccacgcaccagggcccggacgcccgcccggcgcagcggccgaacgcccagaa

SEQ ID NO: 185729 - RNA, 78 nt, Homo sapiens
cacccaccggcagccaggaaaggaaagcggcgagacaggaagcagagggcagggggcaaacaagccgaccggaaaaag

SEQ ID NO: 185730 - RNA, 69 nt, Homo sapiens
gacagggacagaaccagcacaaccaaggccaccacacggaccagagacacagaagagcgcgaacacaag

SEQ ID NO: 185731 - RNA, 100 nt, Homo sapiens
aagaagagaacaaagaagaggcgggcggagggcacaccagagggggaagcaaagcgaagcaaacccccgaagcagagcaggaaggaacacgagaccaaga

SEQ ID NO: 185732 - RNA, 56 nt, Homo sapiens
gaaaaaagcggagaagagaccagacaaagggagcaccagccagaccgggaagaaac

SEQ ID NO: 185733 - RNA, 72 nt, Homo sapiens
gcgccacagaaccgcccaaaaaggcaaagaaaccacgaggacaaaccacccgagccccaaagggcggagagg

SEQ ID NO: 185734 - RNA, 63 nt, Homo sapiens
ggcagccccaaagggccgccggcaggcggaggcaggggcaacaagcggcagcccaaacccggg

SEQ ID NO: 185735 - RNA, 84 nt, Homo sapiens
ccgggcagccgcggacccgccaagaagcgcccacgcagcagccggacgccacccaccagagcacggcaagcgccggagcggcgg

SEQ ID NO: 185736 - RNA, 77 nt, Homo sapiens
agaaaggagggggcgagaaggcgggaagccgaaggcagccacagaaaagacaggagaacacaaagaaacaagagaaa

SEQ ID NO: 185737 - RNA, 80 nt, Homo sapiens
ccccccccggcgcggaccccgcggcgccgccgcccgcagccccgagaccgcaggacgaaaaacggaaacgccggaccaaa

SEQ ID NO: 185738 - RNA, 81 nt, Homo sapiens
gcgcacgcgcaagaccgcgaggcgagacccggacagggcggaccccgccaacagagcccaccgggccggaggagcagcgag

SEQ ID NO: 185739 - RNA, 60 nt, Homo sapiens
agaagaggacaagcccagcgaagcaggccggccggcgccacgggacacaccaaaaaggaa

SEQ ID NO: 185740 - RNA, 78 nt, Homo sapiens
cccaacggacgccgcgcagggacacggcaccgcgccggcccgccagaacgggcagcaagggagagaacagcacacaga

SEQ ID NO: 185741 - RNA, 80 nt, Homo sapiens
cggggcaccgcaggggaccgcgaagcgaggcaaacccacgagacccggcgacagagcacaggcacgagaagaaacagaga

SEQ ID NO: 185742 - RNA, 70 nt, Homo sapiens
cggcggagagggacgcggaaccacaccccccagcgccgaaccgaggccggcgagcccggaaggcgggcag

SEQ ID NO: 185743 - RNA, 74 nt, Homo sapiens
agcagccaccaaggcaggcaccaggcagcagggaggaaaccaggcaacaggaaggacacagacaaaccagagcc

SEQ ID NO: 185744 - RNA, 73 nt, Homo sapiens
ggacacgcccagcgccccgagaaccacccgccccacccgccaaggacagggagcccagcccaggaacagaaaa

SEQ ID NO: 185745 - RNA, 68 nt, Homo sapiens
caggggaaacccggagggaaccaagaagcaagcaggaaagcagcacggaagaaaaaacaaagaaaccg

SEQ ID NO: 185746 - RNA, 81 nt, Homo sapiens
aagaaaaagacaagaaggccaacaggagcagacgccccgccagaccgaagccaccccaccccaccagacgacaccagagag

SEQ ID NO: 185747 - RNA, 76 nt, Homo sapiens
gggaaagccacgcggaaaggagccccgggaacgcaagaaggaaaacggacgagaacaagcggaaaacaggggcgag

SEQ ID NO: 185748 - RNA, 75 nt, Homo sapiens
cggcgccggcaacagaccacccccggagccccagggcccacggcgcgcggcggaggcagcaaggggacgaggggg

SEQ ID NO: 185749 - RNA, 56 nt, Homo sapiens
gcggggccgagagccccagcacgaaaacggggacccccggaccagccacgccgggg

SEQ ID NO: 185750 - RNA, 53 nt, Homo sapiens
caaaccgccggccaaccagccaggacacggccaaggccggcgagaacgcccgc

SEQ ID NO: 185751 - RNA, 79 nt, Homo sapiens
ccgaaggccgccgaaagcagagaaagggaaggccgccaaagcccaaacagagaaccaaagaacggcgagcagcgaagaa

SEQ ID NO: 185752 - RNA, 82 nt, Homo sapiens
aggcagagacagcagagcccggcaggcccaggcaggacgggaccccgaacaaccagcgagcgagacccgcagagcgcggacg

SEQ ID NO: 185753 - RNA, 72 nt, Homo sapiens
caggcacgccaacagacccagccggcgaccagaaccaagccgccacagggagaaaagagcagaggccgaccc

SEQ ID NO: 185754 - RNA, 76 nt, Homo sapiens
caaggcgcaacaagggaaacacaaaccacccaaacaagggaaggacagaaacgcacgagaccgaacccaaggagag

SEQ ID NO: 185755 - RNA, 75 nt, Homo sapiens
cacagggcagacaacaagcgaggggacccagagaagaaacaacacaggacaggagagacaacggaggcaagaaag

SEQ ID NO: 185756 - RNA, 65 nt, Homo sapiens
cgaccagggaacaacgggagaaacagcaacgagaaaccagaggcaagcgacgggaaggaccacca

SEQ ID NO: 185757 - RNA, 86 nt, Homo sapiens
gccgccgcgccggcagccgcggcaggggcagggaggaggaagggcccagcaaagcacagagaccacccggcggacacacaggacaa

SEQ ID NO: 185758 - RNA, 100 nt, Homo sapiens
gagaacaacacagcggaacggcaaagcagcacacaaagagggcacccagaccgcagggaagcccgcggcgggaagccccggggagcagggcacaggcggc

SEQ ID NO: 185759 - RNA, 80 nt, Homo sapiens
ggacaggaagggccccgaaaagaacagaaccggccccccccccagaagagaacgacccaagagacccaggaagaagggag

SEQ ID NO: 185760 - RNA, 75 nt, Homo sapiens
gaagggcgccgcgccgcgcgccgggccgcgccccaggagacccgagaggaaaacagggagggaaagaacacccag

SEQ ID NO: 185761 - RNA, 80 nt, Homo sapiens
agccacggagccagccagccacccaccggaccccacgggccccagacaggagagagcgcgggaagcccgaaagagagaca

SEQ ID NO: 185762 - RNA, 72 nt, Homo sapiens
acgcacagcagaagccgaacggccgaagaaagaagcaggacgaagaagcagaagccaacaaacagccacgcc

SEQ ID NO: 185763 - RNA, 67 nt, Homo sapiens
agcacgcgcaacaacagaaggaagacccgcggaaggcacacaagacacagccaacaccgaaccgaaa

SEQ ID NO: 185764 - RNA, 91 nt, Homo sapiens
gcaggccgcccacaccggggcagcagagggaggcgccagcgcgacgagaggcacggcagaaccgagaggagagagcccaaaagcgacaaag

SEQ ID NO: 185765 - RNA, 38 nt, Homo sapiens
gagggcagaaaccacgagcgagcacacccccacgggga

SEQ ID NO: 185766 - RNA, 74 nt, Homo sapiens
ggcaggaacaagaccccaaacccaggcaggcgcccagagcaaccgcggaaagaagggaaaacgcaggggagagg

SEQ ID NO: 185767 - RNA, 73 nt, Homo sapiens
ccaggagccccaagggccggccggaacccccacaaccgcaggacaccaggggggaaaaaccacacaggcaaag

SEQ ID NO: 185768 - RNA, 81 nt, Homo sapiens
cccaagcccccgcgaccccgccgcacaccccaccagcccggggcccccaagggccacaagaacgacaaaacccagcgaacc

SEQ ID NO: 185769 - RNA, 76 nt, Homo sapiens
gaacaaaccaaccaacccacacagcgcccagcgggcacgagaaaaaagggcaggaaaacaacccgaacaggaaacg

SEQ ID NO: 185770 - RNA, 73 nt, Homo sapiens
cgaaaagcgccaaggaaaaggacgagaacgccgcgacagaaaggaaaaaccacgcggagaagggagagacaac

SEQ ID NO: 185771 - RNA, 49 nt, Homo sapiens
gccagcgcggagagacagcggaaagaaacacaaacggagacgcagaaaa

SEQ ID NO: 185772 - RNA, 85 nt, Homo sapiens
gcccggccgagcgccccgcccagcagccggccggcccaccggggccgggaggacacaacaagccggggcgccggagcaggggaga

SEQ ID NO: 185773 - RNA, 68 nt, Homo sapiens
gcggaggacgccccaccgccgacgcccccagccaccagaggcccggaaagggccacacgagcagggcg

SEQ ID NO: 185774 - RNA, 81 nt, Homo sapiens
ccggaaggacgcagagaagccgggacggagaaagacagcaaagaaaaggagaagaaaggaaaaaaacaaccccgggcaccc

SEQ ID NO: 185775 - RNA, 78 nt, Homo sapiens
agaacaccaaacagaagaggacaagcggcccaggccggacccaagccagaagcccgcaaagcccccagaccgcagaaa

SEQ ID NO: 185776 - RNA, 90 nt, Homo sapiens
ggcagcgaagaagcgacagcgcaaagggcaccgggaggaagccacacaaagaacaaagcagggagcagcgcaccccccacgggcagcagg

SEQ ID NO: 185777 - RNA, 71 nt, Homo sapiens
gaagacccagcgaaggaaagaaaacgaaggaaggaggacccgaggagagagaagacggaaaggaaacacgg

SEQ ID NO: 185778 - RNA, 50 nt, Homo sapiens
cccggcgaaccaccggccggccgagcgaacccgagggagccagcgaaacg

SEQ ID NO: 185779 - RNA, 64 nt, Homo sapiens
aggaagaagaacgacccgcccggggcagcaggaacacacaggggaggggagggggacgaaaggg

SEQ ID NO: 185780 - RNA, 58 nt, Homo sapiens
gggagaccccagcacagcggcagcaaacaaacggaacaccgaaggggaaaagaagagg

SEQ ID NO: 185781 - RNA, 86 nt, Homo sapiens
ggcccgcccaccagcaagcgcacccaggcacagaagaaaggcagaaagaaaaaggacacagcagaaggagaaggggggaaaacgac

SEQ ID NO: 185782 - RNA, 73 nt, Homo sapiens
gccgcaccagaaggccggccagggcagaagcgggaagggacaagagaaaaaaagggcgggcgaacaaaaagag

SEQ ID NO: 185783 - RNA, 52 nt, Homo sapiens
acgcagggcgcccccgaggccggaccacggaaagaccccacgccacgcacca

SEQ ID NO: 185784 - RNA, 64 nt, Homo sapiens
gacggaccacagaagagcgcggcgcggaccacgccccagaacaggcaaccgggaccaaaaacac

SEQ ID NO: 185785 - RNA, 32 nt, Homo sapiens
acggagcccccccccggagaacagaaagccaa

SEQ ID NO: 185786 - RNA, 114 nt, Homo sapiens
ggggaacggcccgccgccgcgaaggacagccccgcgcgggacccggggcgccacgggggccagaagcagaaagaagaggcccagcacaagcggaagccccagggggggaaaacg

SEQ ID NO: 185787 - RNA, 49 nt, Homo sapiens
acgaaagacaacaaggccagaccaccaaaaaaccaaggacgacgggaaa

SEQ ID NO: 185788 - RNA, 74 nt, Homo sapiens
cgcagggcgcccccggcccccgaggagcccagacagcgcagccacagcccccgacaagaaagccacacgaggga

SEQ ID NO: 185789 - RNA, 56 nt, Homo sapiens
gagagcaaaacacaagagagcagggaggagccacccggggaaccccagcaagaccg

SEQ ID NO: 185790 - RNA, 59 nt, Homo sapiens
gagcaaagaacacgggccacaggaaccacacgggaagaccaacaaaggcacacccaggc

SEQ ID NO: 185791 - RNA, 79 nt, Homo sapiens
cggaggagaccaggcagaccgcacaaacccacggacacccgccccgacccgggcgaagagagcccgcggccccaaaaag

SEQ ID NO: 185792 - RNA, 85 nt, Homo sapiens
caaaaagaggcgaaaggaagcaagcagcagaagagccaaggaaaaacagcaagaacccaaaaggagcacaaagcaaggaggagag

SEQ ID NO: 185793 - RNA, 36 nt, Homo sapiens
cacagcgcaccagcagagaggacgaggagcccccac

SEQ ID NO: 185794 - RNA, 43 nt, Homo sapiens
agaaggagcgcgagcgaacgcagcggacacacagaggaggacc

SEQ ID NO: 185795 - RNA, 74 nt, Homo sapiens
agccccgagagccgggacacagccgcagaggcagaaaacaaacagaagaaaaccaccaaaggaacaccacaaca

SEQ ID NO: 185796 - RNA, 78 nt, Homo sapiens
aaggacccgcccagcccccaagagcgggaaaggccaaagaaaaagggggcggagcacccacccagcgagagagccagg

SEQ ID NO: 185797 - RNA, 68 nt, Homo sapiens
aggccggcgcggaaagagaaaacaaccggcaggggacgaagaagggagaagaacagagacagacccgg

SEQ ID NO: 185798 - RNA, 68 nt, Homo sapiens
ggcacggaggcgcagggccagcgaggacaagcaaagcagacagcgacaagagaagagcgacacccaac

SEQ ID NO: 185799 - RNA, 66 nt, Homo sapiens
accgagggcacggccgaggaccgccgaccagcgggccgacaagaaagccgaggcggggcgggcagc

SEQ ID NO: 185800 - RNA, 82 nt, Homo sapiens
caaaggccagcccacaaccgccaccacccagccgacgcagcagggcccagggcaaagagggcgcacgagagagggaagagga

SEQ ID NO: 185801 - RNA, 80 nt, Homo sapiens
gcaaggacaagccgcacgggaaaccacgcaggcaggaaccaaccagagagggacggaccccgggcccccccggccagggc

SEQ ID NO: 185802 - RNA, 62 nt, Homo sapiens
agacccacgaagggggcagagagacaggggaacagaggcagccccccggaacccaaggcggg

SEQ ID NO: 185803 - RNA, 72 nt, Homo sapiens
gcccgcggggcggggaccgccgcccgggagcccaaaaggcagagcgaggagagaagaaggagggaaagccaa

SEQ ID NO: 185804 - RNA, 75 nt, Homo sapiens
acaggcagccgaagaaccccccacaacaccaagagcaggcaggaaggggccaaggagaccgcacgccggacggag

SEQ ID NO: 185805 - RNA, 35 nt, Homo sapiens
cgaaccaggacggcaaggccaagggcagggagaag

SEQ ID NO: 185806 - RNA, 54 nt, Homo sapiens
gaagacacaaaggacggaggcacggcagacaccacagccaccaaagcccggcca

SEQ ID NO: 185807 - RNA, 74 nt, Homo sapiens
gaagccgcggagcgccggagcagcggagcccgacccaggggacgagaaggacggggaggacaggagcagaaaac

SEQ ID NO: 185808 - RNA, 81 nt, Homo sapiens
gcagcgaggccaggaacccggggagaccccgacgggaggccgaggaagggaccacagaccagcacgccggcgccacgaacc

SEQ ID NO: 185809 - RNA, 82 nt, Homo sapiens
gaagggcagacggcagaagcggcggggcccaacaagcaaagggcaccagaagcaaccccgacccggaccgcagaaaaaccgc

SEQ ID NO: 185810 - RNA, 78 nt, Homo sapiens
ccccagcacggcaaagcccggagacaagcagggaaggagagaaggagagagacccagcccaccaaaggaagcagcaaa

SEQ ID NO: 185811 - RNA, 62 nt, Homo sapiens
gggcgagcggcggggagcggcgaagccgcgggcgagccaccaggagagaacgccgcgccgcg

SEQ ID NO: 185812 - RNA, 66 nt, Homo sapiens
ggggcaccacggcgcgaagaggacggaacacagcacaaaagggagaagacagcccaacaaggcggg

SEQ ID NO: 185813 - RNA, 87 nt, Homo sapiens
cagggcccgccccgcgccggaaagagagaagaagaaggaggccgcggccagaaacccaagaaaaagcgaaggaacgcagagcgaaga

SEQ ID NO: 185814 - RNA, 83 nt, Homo sapiens
ggggagggccgcgacggggacaggccacgcgccgccgcagaccgacgccgcagggacgcggcgcacggcgcggaggggccgag

SEQ ID NO: 185815 - RNA, 83 nt, Homo sapiens
gcgggggcaggcggagaaggagacaccggaggacgaagagggggagaggcgaggggacggcggggagcgcaggacagacgccc

SEQ ID NO: 185816 - RNA, 111 nt, Homo sapiens
gagggaggcaagagcggcccaccaaggaaaggggacagcaacagccggcgggcggaaggaagggacccgaccaaccacggggggacccacagccccagacgaacgcgcccc

SEQ ID NO: 185817 - RNA, 54 nt, Homo sapiens
ggggccgggcagcgagcccacacagggcccccaagccggcaggggaacgaggag

SEQ ID NO: 185818 - RNA, 70 nt, Homo sapiens
caaccgcacggcgcccagcgccggccgcaccgagacaaccaagcaagggccagcagaaaccgacagaaaa

SEQ ID NO: 185819 - RNA, 74 nt, Homo sapiens
gccccagcagcaggggcgccaggccagagaaggacaagaagccaagccgaaaggacagccagccacccaagggg

SEQ ID NO: 185820 - RNA, 52 nt, Homo sapiens
ggaaacgggagggaaccagcaacaagccgaaaaaagaacccagaaccgggca

SEQ ID NO: 185821 - RNA, 75 nt, Homo sapiens
gaacaaaaagcagcaaaccggaccaccccgaagaaagcacaggagaagccccggggaaagaggaggaaaacaaag

SEQ ID NO: 185822 - RNA, 74 nt, Homo sapiens
cgagagcggcgcgcgcgcgaggacggaggccgcagaagaaacgcagaaggacagaaagcaccaggaagaggcga

SEQ ID NO: 185823 - RNA, 76 nt, Homo sapiens
gccggcgcggaaggacgaggcgaggcgagaaacgaggagagcgccagcggaaaggagcacaaaacagggaaccaca

SEQ ID NO: 185824 - RNA, 74 nt, Homo sapiens
caaaaacaaggcggaaacaacgggcaaggcgggccaaggaaagcggagggagccccagaggacggccacagcca

SEQ ID NO: 185825 - RNA, 62 nt, Homo sapiens
cgcggcggcaggcccagaggcggccagcggaaaaccgccgccggggccagcaagaacaaaaa

SEQ ID NO: 185826 - RNA, 106 nt, Homo sapiens
cagcgcgcaccaccgcgaaggcgggccggggaccgcaggcccaggaccgacagcagaggagcgcaagaacggagaacaccgacggagaaaacaggagcgcggcgac

SEQ ID NO: 185827 - RNA, 83 nt, Homo sapiens
cgccgccaggccgacgaaaagcccaaggagcaggggccccgagggagcgcgccccggccgccaccgcgaaagggacccagggc

SEQ ID NO: 185828 - RNA, 76 nt, Homo sapiens
gccggagcgcaccaccgagacaagcaggggcaacgaggaacaggccaagaaacaacacagccaaggccagcgccac

SEQ ID NO: 185829 - RNA, 92 nt, Homo sapiens
acggcaaggcagaccggcgaggacaccgcccagcccgagcaggccaacccaggccagggcacggaggggggggggagagggcaagaaccaac

SEQ ID NO: 185830 - RNA, 85 nt, Homo sapiens
cgccaccacacaaagaggcgcaccagggccgaccaaggacacggcaaccaccccgcaccgccaagaagccgggcccaagaaccca

SEQ ID NO: 185831 - RNA, 77 nt, Homo sapiens
aaaagcagggccgggccgccccgggggcgccaggcgaccggagcgaacgccacgccggggcgcaggaggggacgcac

SEQ ID NO: 185832 - RNA, 76 nt, Homo sapiens
cgacgagagcgcgcggacaacgcgaccgcacaccaacgccacagcggacgcagaaccgccggcgcagccagcgcgc

SEQ ID NO: 185833 - RNA, 52 nt, Homo sapiens
ccaaccccccgaacccccagagacaggaaaaagccgagaggcacaggacccc

SEQ ID NO: 185834 - RNA, 75 nt, Homo sapiens
cggccgccgcgccaccaccgggcgccgaggggcgacgaaacaacaggaacgaaggggaccacaacacaggaacaa

SEQ ID NO: 185835 - RNA, 77 nt, Homo sapiens
ccagccaccaaagaccaaccaagagcagggaaaaaaccaggcagccaaacgcgccagagaaccaggaaaaaccgagg

SEQ ID NO: 185836 - RNA, 76 nt, Homo sapiens
gaagagagcaccaaggcaggccaaccaccgccgggccggacccagcgggcgaagaggcggccccaggggggaccaa

SEQ ID NO: 185837 - RNA, 71 nt, Homo sapiens
caaagacaagagccgagaaagcaagaagaaggaggcccaaagagacgcagaagaaacagcccacaccaggc

SEQ ID NO: 185838 - RNA, 38 nt, Homo sapiens
ggacagaggggaagcaagagggccgccaagggaaagaa

SEQ ID NO: 185839 - RNA, 52 nt, Homo sapiens
aacaaagagaggcaaggcagcacgacaaaggaaaagaccaaggagacagagg

SEQ ID NO: 185840 - RNA, 56 nt, Homo sapiens
agcaaacgggccaaaggacagagaagacagagaagaacagacggcaacaagcggac

SEQ ID NO: 185841 - RNA, 56 nt, Homo sapiens
gaacccaaaagccgacaaccccagaaacagacaccagggcgcccgaggcaacccag

SEQ ID NO: 185842 - RNA, 89 nt, Homo sapiens
gagaccacaaaagagcagaggaggaacaccaggcacaagaacccaccggccacgcccaaaggggccacgaggaaacgcgaccggaccag

SEQ ID NO: 185843 - RNA, 80 nt, Homo sapiens
aggcagggacagaaacaagagcggcacgggaacagcggcgagaccagaccaggacaaaggcgcaaggggacggaaaccaa

SEQ ID NO: 185844 - RNA, 68 nt, Homo sapiens
ccggggccggggcgccgccgggcggccgggcgcggcgagcccaggaacaggagcgaccaggacacccc

SEQ ID NO: 185845 - RNA, 80 nt, Homo sapiens
ggcagcgggccaacagcaacagagagagccaggacaaagaggacagaacacaacgaagccacaggccaaccgcccacagg

SEQ ID NO: 185846 - RNA, 54 nt, Homo sapiens
gaacccagccgcaccggaaacagaacgacagcccgcaccgacgccggcggccag

SEQ ID NO: 185847 - RNA, 69 nt, Homo sapiens
aggaacagccagacacacgaacacaccgaaagacaagaaagcacccgggagacagggaaagagaaggca

SEQ ID NO: 185848 - RNA, 88 nt, Homo sapiens
cgggcccagaccgggacccgggaccagaaccccaggcgccacgcggagaggccccagcgcaccccggaggcccgagcccggaagccgg

SEQ ID NO: 185849 - RNA, 41 nt, Homo sapiens
gaaacagacggccccgaggcaacaaacgacacgcgccccgg

SEQ ID NO: 185850 - RNA, 78 nt, Homo sapiens
gaaccccggccccacagccccgcgcacaggccccgggcacggcagacacaccgaccagaggaaggcgaacccgccacg

SEQ ID NO: 185851 - RNA, 66 nt, Homo sapiens
gccccaggagacgacaagagcaaccgaaagggccagcggccgggacagagcgaagaaccccccaag

SEQ ID NO: 185852 - RNA, 78 nt, Homo sapiens
cccccaccggcaggcagggccgggagcgcggaacaccgcaaaggagagaaggcgaggaagcccaagcacaaaggagaa

SEQ ID NO: 185853 - RNA, 72 nt, Homo sapiens
cccgaacccgaccacccggcggggagcacggaggagacaacacaaggaagaagaaaggaaaggaagcgccac

SEQ ID NO: 185854 - RNA, 75 nt, Homo sapiens
agaaaggaaacaccagaagaagagcagaaaacgggaaccgccaagacagaagagacggagaagaacacccaggag

SEQ ID NO: 185855 - RNA, 72 nt, Homo sapiens
ccccgccggcgcgcccgcgcggcgcggggaccgcggcccggaggagaacagcaccaacccggacacacaagc

SEQ ID NO: 185856 - RNA, 61 nt, Homo sapiens
cgaagcaaaagaaaccacccaaagacggcacaggacaggaagaacaaagacacgcccgagc

SEQ ID NO: 185857 - RNA, 75 nt, Homo sapiens
aaacagcagggagaagagacaacaagacaggagaaacaaggaagagcaacgcgcgagggacagaaaaacagaagc

SEQ ID NO: 185858 - RNA, 75 nt, Homo sapiens
cggcacggccccgcggcgcgcaggaccacagccgcgcaacgggcgaccccgagggaacagagccacagccaggcg

SEQ ID NO: 185859 - RNA, 83 nt, Homo sapiens
cgaacagagccgggagcaagaagaacacccagagaagaagccacacacagaagacccaaagagaacacaggagaggcaagagg

SEQ ID NO: 185860 - RNA, 75 nt, Homo sapiens
aaagcacccgaaagaaagggaccaggcaaaccccggacaagccagaagcagcagccggccgcacgccgcagcagg

SEQ ID NO: 185861 - RNA, 55 nt, Homo sapiens
gggggagacagaccgcagacaggaacacgcgccagagcgcggacagggaaaggag

SEQ ID NO: 185862 - RNA, 83 nt, Homo sapiens
ccgcgcgaagcggccaaagccgcccagacggccaccggcgggaggaacaaaaggcgaaggggagcaagggagaaaagcaaagg

SEQ ID NO: 185863 - RNA, 76 nt, Homo sapiens
acccacagacggcggcagggggacccaggagccccaaaaccacagggcagcaaaacggcacaggggcagagcagca

SEQ ID NO: 185864 - RNA, 76 nt, Homo sapiens
ggaggacaacccgggaggagagacacccccaaggacagaaaccgggaagacgccaaagcagaacgccgcgcccagg

SEQ ID NO: 185865 - RNA, 125 nt, Homo sapiens
gccgcaaggaacaggcgaaggggagcaggccgagcccgagccgcagcacgagccaaaccgagcaaggcggaggcaagacacacaaagcagagagggaaggaaagagcccgacggacagaagcaag

SEQ ID NO: 185866 - RNA, 70 nt, Homo sapiens
gagaaggacagagaaaagcaagcaaaggcgccaccaccaggaaagcgacaacccacacaagcgaaccgcc

SEQ ID NO: 185867 - RNA, 84 nt, Homo sapiens
ccagcaccgcaggcagccagagccgggcggcggccgcgacccccgacgcggggcgcgagaagcagcccagccgcggcaagcgag

SEQ ID NO: 185868 - RNA, 60 nt, Homo sapiens
cagacagaacagaacccaaaagccgacaaccccagaaacaggcggaggggagcgaccgcg

SEQ ID NO: 185869 - RNA, 75 nt, Homo sapiens
aagagcaaagcgccaggccaaccagagacaccagcaggacaggaaaaaaagagggccaagcacacagagccacgg

SEQ ID NO: 185870 - RNA, 83 nt, Homo sapiens
ggcgcccgccccgacccgcccccccgcccgcaacccgccgcccaccaggcccgaggagcgacgagagcggagaaagagggaga

SEQ ID NO: 185871 - RNA, 70 nt, Homo sapiens
gcagcccacaggagccaccaggcaggcggggcacaggccaggcggggaaggcagcggaagaaccggaggg

SEQ ID NO: 185872 - RNA, 78 nt, Homo sapiens
caacaaccgagaaagacagagaaaaggcacagacggaggaggaacgcacagagagaagagaacgaggcccagaggaag

SEQ ID NO: 185873 - RNA, 77 nt, Homo sapiens
gaaagcaacgagggaggcaagcaaaccacccccaagagcacgagcggcccgcaaaaccacgaagaggacacaccgca

SEQ ID NO: 185874 - RNA, 89 nt, Homo sapiens
gaccgcaaggagaagaagagaagagcaaccaaacaacaagggcacacgaaggccgcaaagacggagaagagcagcgggaaaaagccaaa

SEQ ID NO: 185875 - RNA, 67 nt, Homo sapiens
caacggggaccccggagcccagaagacagagggcgagggccaaaaacaaacaaaaaagaacccaccc

SEQ ID NO: 185876 - RNA, 82 nt, Homo sapiens
gaacgaaaccggaaccagacagaagaggagggagagaagccgaagaaaccacgcccccagaagaacacgagacaagccacgc

SEQ ID NO: 185877 - RNA, 76 nt, Homo sapiens
ggcacgccgaccgagagacccaggcacccagggaaacgagaggggacggccaccgaagcaagagcagaggcaggga

SEQ ID NO: 185878 - RNA, 70 nt, Homo sapiens
cgagacggccacagacaacggagaacagccgcggagcccaggcggaggcaaggcggaggccacgcaaccc

SEQ ID NO: 185879 - RNA, 63 nt, Homo sapiens
gcaggacgcagaagacgcagggccaaggcacgccgcccgcacgagcagagccaaaaaagggga

SEQ ID NO: 185880 - RNA, 80 nt, Homo sapiens
gccgaaggggagacccggacccacccagagggcgggggacggagacagccacaaaaggaagaagaaggcagcgggcaagg

SEQ ID NO: 185881 - RNA, 67 nt, Homo sapiens
gagcgaggacgccggcagcagagaccagacgaaacccaacagagaagaaacgagccaaaagaaaggc

SEQ ID NO: 185882 - RNA, 85 nt, Homo sapiens
gaccgcggaagggaaggaaaaaccgagggaaccaccgaaagggccgagaaagaagagaggaagaagaggaggaggaggaagagga

SEQ ID NO: 185883 - RNA, 49 nt, Homo sapiens
ggaccaagaaccagacaaaacagaggagaccagaccagaagccccgaaa

SEQ ID NO: 185884 - RNA, 72 nt, Homo sapiens
aaaggcgcgagacccagaggccgcgcaccggacggggaaacagaacgagcacagagaacaagacccggaagg

SEQ ID NO: 185885 - RNA, 78 nt, Homo sapiens
aacaaggaggcaaccccgcccggaccaagaaaagcaccaaagcagcaacaaagcacacagcgcgccaaagcaagagcg

SEQ ID NO: 185886 - RNA, 81 nt, Homo sapiens
gccggaggacagcgggagagagaagagccagagggacacgcgggcacggccggaggagacagacggcacccacagaaccga

SEQ ID NO: 185887 - RNA, 38 nt, Homo sapiens
aagcagagaccaaagcaggccccagaggaccagaagaa

SEQ ID NO: 185888 - RNA, 42 nt, Homo sapiens
ggcacagagggccgccagaacaagaagaaggcgacagagcac

SEQ ID NO: 185889 - RNA, 76 nt, Homo sapiens
ccggggaccccggcagccacccaccgccgccgcccccagggggagagcacaaggcgaacaagcccccaggcgagag

SEQ ID NO: 185890 - RNA, 38 nt, Homo sapiens
agaaacgcacagaaccaagggacgcaacaaagcagcca

SEQ ID NO: 185891 - RNA, 82 nt, Homo sapiens
gcggggagcggcgaagccgcgggcgaggaaccaggcggacggaggaagccccaagaccacaaagacaaaaccagcccgagca

SEQ ID NO: 185892 - RNA, 73 nt, Homo sapiens
gggagggaaagggaagacacgaaaaaagagaaagggccaacgaagggagggcaagcagaaagcagaggaaaac

SEQ ID NO: 185893 - RNA, 82 nt, Homo sapiens
gacgagaagagcagccagagaccacagcgccgccgagaccgacccgcccgcccgcggccccgcagcagcccaagaaggaacc

SEQ ID NO: 185894 - RNA, 69 nt, Homo sapiens
caggccgcagacgcgaaggaacggcaaagggcagagaacacaccgccggaagaggaaaagaaaaaacaa

SEQ ID NO: 185895 - RNA, 78 nt, Homo sapiens
ggagcgcgaaggccgggacccggccccggcccacaggggggggcaaacccgagagaacgggggccacggggggccggg

SEQ ID NO: 185896 - RNA, 78 nt, Homo sapiens
gacggcccgggagccgccaaccagcgaggccacggcgcaccgcagcagcccacccagcggcagcccgccccgggggcc

SEQ ID NO: 185897 - RNA, 89 nt, Homo sapiens
cgcgccgccagcgccccgccgccaaagccgggggaagcggggcgccggcgcaccggagaggccagggcacagaagaggacacaaagaag

SEQ ID NO: 185898 - RNA, 62 nt, Homo sapiens
cgaggacggaggcaaccagcccgaaaggcaaacacccgccaggcggcagcaacagggaacaa

SEQ ID NO: 185899 - RNA, 71 nt, Homo sapiens
gaaaaaaaggaaccggaacggggcacgaaaccaggaacggcccacagccgggacaccacagcaagaggaac

SEQ ID NO: 185900 - RNA, 61 nt, Homo sapiens
cgagaggacaccgcagacaacagcacacccaggcagcaaaaccccagaagaggcgaaccgc

SEQ ID NO: 185901 - RNA, 82 nt, Homo sapiens
ggcggcagcggcggggcggggcgagcagaggacccggcgggcggcccgcgggcaggaaacccaccagagaaggcgcggccac

SEQ ID NO: 185902 - RNA, 61 nt, Homo sapiens
ggaaaccggaaaggcgaaaaggggaaggagacccaaggaaaggagaggaaagcaacaaaac

SEQ ID NO: 185903 - RNA, 75 nt, Homo sapiens
gcgcacgcgagacgcagccccggccaaacggccagacgccgacgcgaccagcagagacgaaaccgcaagaaccca

SEQ ID NO: 185904 - RNA, 68 nt, Homo sapiens
cccacggaacacgaagaaacagaacacccaagaaggcaaagcgcgaaaacgacagacaggcgaaggaa

SEQ ID NO: 185905 - RNA, 70 nt, Homo sapiens
gacaccagaaggcaaggaagaggagaaggaacgcaaaacggaccaacgaaggagaagaaagcccacgagc

SEQ ID NO: 185906 - RNA, 75 nt, Homo sapiens
acgccaccagccagcaaacacagggacagacgcaagccacagccaggaaacaccagccccccggcacggccaaac

SEQ ID NO: 185907 - RNA, 61 nt, Homo sapiens
ccgacccggaagaccagacaagggaccccgaaaccaagggcccacccacccggggcacagc

SEQ ID NO: 185908 - RNA, 73 nt, Homo sapiens
ccgccgcagcgcgaacaggacgccgcaacgcccaaccaggagcgagacgacgggaccgaaggaccccgccaga

SEQ ID NO: 185909 - RNA, 76 nt, Homo sapiens
cagcaggacagccgaacggaacggagagcagccaagcagacacaaaccgacccagcagaccacgggaggggaaaaa

SEQ ID NO: 185910 - RNA, 84 nt, Homo sapiens
ggaaggcaaaacaggggcaacgcagagagaaacgaagcagcgaggaccaggggaagaaagggccacaggagcggggagggcggc

SEQ ID NO: 185911 - RNA, 64 nt, Homo sapiens
ggccgcaggccgcgagcagcggacgccggccgccgcaggagccaaggggcacgaggaagaaggc

SEQ ID NO: 185912 - RNA, 83 nt, Homo sapiens
ggggcaagcgacaagccaaaaaggagagccaggacaaaaccaggcagaaccaacacgaacccaagcacaaacaagaaaacgag

SEQ ID NO: 185913 - RNA, 74 nt, Homo sapiens
gagggccacaggaggcggcgggccccgcccgccgaaggagagccaacggaccacaacagagaaccaaggacggg

SEQ ID NO: 185914 - RNA, 73 nt, Homo sapiens
ggcagaggcaggcgccagacaaccaggcaagcggaagaaccgaacacacaaaggaccagccaaggaagcaaca

SEQ ID NO: 185915 - RNA, 79 nt, Homo sapiens
aagcgcaacagcgaacagaaaacaaaggccaaacaaacagacgccagcagggaggcgcaggggcccaggacaaagggac

SEQ ID NO: 185916 - RNA, 79 nt, Homo sapiens
agaggcggagagaacccgccgacccaggccaaacgaccaagaaagcgggacgcggaaaacgggacccgcaggggccccc

SEQ ID NO: 185917 - RNA, 61 nt, Homo sapiens
aaacaaggcaacagaaagagcaacagcagggcaacagagaggggcgcccggcaccaggcgg

SEQ ID NO: 185918 - RNA, 43 nt, Homo sapiens
accgcaaacccagaacagaggagcagcgaacgcccggcgccac

SEQ ID NO: 185919 - RNA, 75 nt, Homo sapiens
caggaacgggcgccacaccggacacaggccagaccaaaacaagaaggcagacaggagggcaagaaaccgcaaccg

SEQ ID NO: 185920 - RNA, 68 nt, Homo sapiens
accccgcacgggagaaaacccggaaaggacacagcaggggccagacaaccagacccgggaggcaagag

SEQ ID NO: 185921 - RNA, 71 nt, Homo sapiens
aaaaaaccagagaccacagaaggacgggagaacaccccacagggaagaggggggaaaacaggggcggaggc

SEQ ID NO: 185922 - RNA, 57 nt, Homo sapiens
gacaaacaggaccgccaaacccaaaccggacccaaagacaggaccacgcaccagcag

SEQ ID NO: 185923 - RNA, 81 nt, Homo sapiens
gcggcgcccgcggccgggcggcgcggccgcccgggccgggccccaccggacgggaaacacaaagaagacaccagaagggcc

SEQ ID NO: 185924 - RNA, 35 nt, Homo sapiens
gaacggagacgccaccaggaaaacggccaacggac

SEQ ID NO: 185925 - RNA, 74 nt, Homo sapiens
agcaggggaccaaaaggcggaaggggcgccccgcacccggaaagaggagcaagagagaaacggagcccccgaag

SEQ ID NO: 185926 - RNA, 81 nt, Homo sapiens
ggcccacgccagacacgacgcggcaggaacccggcccagaggcaaaagcagaccggaaaacccaccggcaagaccacaccc

SEQ ID NO: 185927 - RNA, 55 nt, Homo sapiens
agcacaggcacacacacaccaacgggagccgcaaggacaacagccgcggccagac

SEQ ID NO: 185928 - RNA, 52 nt, Homo sapiens
ccgcagcacggggagcggcaggccacgaagaacgcccgccacccgcgcacac

SEQ ID NO: 185929 - RNA, 79 nt, Homo sapiens
gggaacggagcgcccccacgcggggggacgcccacccgggccacgaccagacggcccaacaagggcggggcaggaccag

SEQ ID NO: 185930 - RNA, 59 nt, Homo sapiens
gacccccccgaaagcccggccagggcaaaaagcagcaaacaaaaggaggcaaaggacgc

SEQ ID NO: 185931 - RNA, 75 nt, Homo sapiens
cgggcacgagcaccgccaccaggggaaggggagacaggccgaggccgggcgggcaccggccggacaaggcccggc

SEQ ID NO: 185932 - RNA, 76 nt, Homo sapiens
ggcggccggaggagcggcgcgcgcgcgcgcgcggggccccgcagggaagcacagcacagcagaagcacacgacaga

SEQ ID NO: 185933 - RNA, 39 nt, Homo sapiens
gagcagagagagagagcagaagcggcagcagaagcagcg

SEQ ID NO: 185934 - RNA, 78 nt, Homo sapiens
aaaccaccacaagagaagaccgcccaagcgcccggaggcccacagcagggggcagggaagacaagcaccaggagccag

SEQ ID NO: 185935 - RNA, 80 nt, Homo sapiens
caaggaagcggcaaagccagaaagaggaggccagagcggaccgaaaggaagcggagagagcagcaagggccaacaccacc

SEQ ID NO: 185936 - RNA, 70 nt, Homo sapiens
ccagcccggcccagaggacaggcagcccagagggagaaaacgggccggaggaaaagggcggcaggggacc

SEQ ID NO: 185937 - RNA, 67 nt, Homo sapiens
gcgaggcagggccagcagcaggcgggagggggacacgccagcggcgcagccgacggaagaccgggag

SEQ ID NO: 185938 - RNA, 93 nt, Homo sapiens
gcgagccggggggagcggcggccacggcaccggcggggggcacgaggaaaggacgagagcacagcccccaggagaggcaggcgcaaaggaggc

SEQ ID NO: 185939 - RNA, 90 nt, Homo sapiens
aacggcaccaggagcgccaccgcagaaacacgccaccggaagaccaagccgggggagcacagacacggggaagaaggcaccgggagagga

SEQ ID NO: 185940 - RNA, 73 nt, Homo sapiens
ggggggggacgcggcagccaagaagagagcgggcccagagccgacaagcagaccacgaacccggcccaggaaa

SEQ ID NO: 185941 - RNA, 83 nt, Homo sapiens
ccgacgacaacccaggcaccggccgggaggaccggcgggagccagcaaccccaagcaagccggcagcccggccccagccacca

SEQ ID NO: 185942 - RNA, 70 nt, Homo sapiens
cacagggcagaggccggcgaccagaagcggaaacgaacaaagaggccagccaggaaagcgggagcgcggg

SEQ ID NO: 185943 - RNA, 52 nt, Homo sapiens
acacggcaaaaacggaaaagcggaggcccccgggccagggaccagacaaggc

SEQ ID NO: 185944 - RNA, 72 nt, Homo sapiens
gacaccgaggcaaaacaagcggaggaaccccagacaaagcaccaaaaacagagagaacagaaacgaggaaag

SEQ ID NO: 185945 - RNA, 68 nt, Homo sapiens
ggagcaggcgccagccccagggcccaacgaaaaaagggacccaagaaagccccgaacaacaacagagg

SEQ ID NO: 185946 - RNA, 71 nt, Homo sapiens
aagaggcagaagacgggggcagaaaacacagagaaaacacggagaaacagcaacaggagaaaaggggagag

SEQ ID NO: 185947 - RNA, 73 nt, Homo sapiens
caacaacacagccaagagcaaggccccaaaagccgggaggacacacagcgagggaaccaaaacccaagcacac

SEQ ID NO: 185948 - RNA, 75 nt, Homo sapiens
gcgagcgagggggggcgcgccggaaaccggagcgcgcagcaggccccccagaggagaccacagagaagacgagac

SEQ ID NO: 185949 - RNA, 102 nt, Homo sapiens
gaccaaggccgagagccggaacaaacgagggcccgggaggaccgacgcagccaggaaccgaaggaagaagagaacagagagaaaagaacaacccagcacaga

SEQ ID NO: 185950 - RNA, 89 nt, Homo sapiens
cgagggcagcacacacacgccccacgcccggcgagcccgcgaggacagcccagagcaagcacacggaggcccgggagccagaccgggag

SEQ ID NO: 185951 - RNA, 74 nt, Homo sapiens
cccggcgggcagagaccagcaccggagaagacccgcgaccggcagcagagccgcccgcaccaccaggcacacca

SEQ ID NO: 185952 - RNA, 73 nt, Homo sapiens
ccagcgcccggaggcccgaggaagggagcgggcagagcggcgggaaaccaccaacaacacccccaaaccaaaa

SEQ ID NO: 185953 - RNA, 62 nt, Homo sapiens
gaaagaagcgcagcggaggaaggcgagggcagggaggggagcgaagagccaagaggaccgag

SEQ ID NO: 185954 - RNA, 72 nt, Homo sapiens
gcgggcgggccggcgagcgcagcgcgaccgggaggcccagagcggaagggagaggcggagagagaaggaggg

SEQ ID NO: 185955 - RNA, 54 nt, Homo sapiens
cgcagggcgcccccgggcaccacacccgagagagagacagacagggacaagcag

SEQ ID NO: 185956 - RNA, 76 nt, Homo sapiens
cgaggaccgagcgacgggcaccacaagaacccaggagaaacgagagggacagcaaggaagacgccagagagcggca

SEQ ID NO: 185957 - RNA, 73 nt, Homo sapiens
ggaagccacaaacaccaggccaaagcaggcggaaagccaggcagggcaaccagaggaaagaagaggagggggg

SEQ ID NO: 185958 - RNA, 53 nt, Homo sapiens
ccagcggcaccggagaccaccggagcaccccgacacaggacccacccaggagg

SEQ ID NO: 185959 - RNA, 104 nt, Homo sapiens
cgcagaaacacccggagacaaggacggccagaggcagggccaccagaagcaccccgagccgagcgggacccgcaccagacgccgcgggccgcgcggggggagcc

SEQ ID NO: 185960 - RNA, 85 nt, Homo sapiens
cagccgagagccgggggagcggggccccacacccccccgggggggagccccggagcagggagcgggcacggacagcggggcggac

SEQ ID NO: 185961 - RNA, 75 nt, Homo sapiens
caaaggacaacagcagcagccgaagaaagcaggccgaaagacagacccccaagggccacggccacccagcggaga

SEQ ID NO: 185962 - RNA, 75 nt, Homo sapiens
aagacccacggcgccacgacccagccaaacaggagcgcgggcgcggagacacagcggccagagcagcgaccgcgg

SEQ ID NO: 185963 - RNA, 64 nt, Homo sapiens
ggggggcccgccaacgaaccacaggcgagaccgagacaagaggcaccgaggaagcacaaggacg

SEQ ID NO: 185964 - RNA, 80 nt, Homo sapiens
gggcagggggcaaacaagccgaccggaaaaagggagaagcgagcgacacaagcccaccaagcaaagaggcgcccagaaag

SEQ ID NO: 185965 - RNA, 80 nt, Homo sapiens
ccgcgccagcggagcgaacccgagagcgggagcgggcgggccagaaggccggcccacagcccaaaaagaaacaggaccga

SEQ ID NO: 185966 - RNA, 59 nt, Homo sapiens
gcggaaaaacacagagggcacacggcacagaccagaggacagccccgggggaggccggc

SEQ ID NO: 185967 - RNA, 56 nt, Homo sapiens
cccaggaccaccaccagcacccaaaggggcacgcaaaagggacgccagaaagaggg

SEQ ID NO: 185968 - RNA, 73 nt, Homo sapiens
cggaccggcccgcgaaggaaacaagaggccaaaaccgaagaggaggacgggagcgaggcggccagggccccag

SEQ ID NO: 185969 - RNA, 78 nt, Homo sapiens
agacagaagaggcacccacagggcgccgcccgcggccgcccccgcaccggcagcgcgccccgccagccgcaacccacc

SEQ ID NO: 185970 - RNA, 39 nt, Homo sapiens
gggcgcggcccggcccgcgcggcgacagagcagagagcc

SEQ ID NO: 185971 - RNA, 72 nt, Homo sapiens
ccagaccggcgggaaccggcccgcccacaccacaggccccggcagggcaggacaggcacccgaaccgaagca

SEQ ID NO: 185972 - RNA, 85 nt, Homo sapiens
cccacccaccagagacacagagaaggaggaaacaggccccaggcccgacggccggccgaaagccaacaggcagaccagagacagc

SEQ ID NO: 185973 - RNA, 86 nt, Homo sapiens
ggaaggcggaggccgagaccagacgcggagccaggccgaggggcggacgcggccgggcagggacgggacgaaggccagacggggac

SEQ ID NO: 185974 - RNA, 72 nt, Homo sapiens
cgaaaacccaacgagaccaaagaggcaaggagaagacagaaccaccaaagcgacagaagaaagaaagggcga

SEQ ID NO: 185975 - RNA, 87 nt, Homo sapiens
gccagggccacaaggggcgggacccagcaacccagggagaccacgaaggagagaagagaggccggggacggcccggaaagacgccaa

SEQ ID NO: 185976 - RNA, 97 nt, Homo sapiens
gagcagacggaagcggccaagaccaggcaagaacggcgcacgacaagccgagagcggcccaggaggaacaaccagcccacccggagagggcacgcgc

SEQ ID NO: 185977 - RNA, 82 nt, Homo sapiens
gcgcgcggccccgccgccccagcccgccccccgggccggccccggaacagggcacggccgacccagcaaccccaccaagccg

SEQ ID NO: 185978 - RNA, 80 nt, Homo sapiens
gagcaacccaaaaagcaaggggagcggacagaaacgccaaagacccccagaagccccaaggggaaccaggaggacgccca

SEQ ID NO: 185979 - RNA, 67 nt, Homo sapiens
ggcgcgcccagaagaagggaaggcgcgaggaggaaaggaggacgagggagccagcgccggcagccac

SEQ ID NO: 185980 - RNA, 70 nt, Homo sapiens
gcggcagccggcaaggccagaaaacccgcgagcaggaaccccaggaaacggccagagcgacccccaagga

SEQ ID NO: 185981 - RNA, 69 nt, Homo sapiens
agcggccccaaccaaggagacccccgcgaaacagggacaagacgccacaggcacacggacacccacggc

SEQ ID NO: 185982 - RNA, 75 nt, Homo sapiens
gcggcggaggccgcgagaaccgacgagaacacaggagccagggaggcacagccaccggaagcagagccgccaggg

SEQ ID NO: 185983 - RNA, 74 nt, Homo sapiens
aaaaaagaagaaaaacacgggcaccccagggaggcccgaagcaggaacaggaaccaggacccagacaagacggg

SEQ ID NO: 185984 - RNA, 77 nt, Homo sapiens
cgcggggaccacgacagcgggggcacacgcagccagaagcaacaagagaagcagaaaaacagacacgcaagagaaac

SEQ ID NO: 185985 - RNA, 74 nt, Homo sapiens
gaggccggcacggaaacacccgaccacccaaccacgcgcccagaccaaggaagacagaccgcgaggccacaccc

SEQ ID NO: 185986 - RNA, 89 nt, Homo sapiens
acccaacaaccccaccacggagccggacaagcccgcgggccggcgggcggacccacaaaccgggagaccaagaacggcacacggacgga

SEQ ID NO: 185987 - RNA, 83 nt, Homo sapiens
ccaccaaggagcagcccgggccaggaccggacgagaacccccgcgaaccagaggaacccagcgagcgagagcggaccagagga

SEQ ID NO: 185988 - RNA, 73 nt, Homo sapiens
cagacagcacgccacgcgggcccgccaagacagccgacaccgagagaccaagcgagacggccggccgccacgg

SEQ ID NO: 185989 - RNA, 78 nt, Homo sapiens
ggccggcacacagcggggagagccacagcccaccgcgagaccccagagcgcgccggacaccagaggaccagaacccac

SEQ ID NO: 185990 - RNA, 55 nt, Homo sapiens
agcgcccaggacaacccaagcaaccaccaggcccaggcaggagccgagaaccccc

SEQ ID NO: 185991 - RNA, 74 nt, Homo sapiens
aagaaagaccccaccgaggaaggccaaaggacaggggaaacagagaaacccaggaaagagaccaagaagcaagg

SEQ ID NO: 185992 - RNA, 75 nt, Homo sapiens
cggccaagccgaccccagggcagcaggagaaggaccaaaaggaacgagacggaagagggagcgcggccagcagag

SEQ ID NO: 185993 - RNA, 60 nt, Homo sapiens
ccggacaccaccccacgagggacgaacgccgacgccaccgcgcgcgcgggagcggagcag

SEQ ID NO: 185994 - RNA, 77 nt, Homo sapiens
gaccggcgaccgaacggaagaaaaaacggagagcaggcagccagagaagcagaaccaggaggaacacggaggaccca

SEQ ID NO: 185995 - RNA, 75 nt, Homo sapiens
acgggggaccaaggccgagagccggaacaaacgagggcccgggaggaccgacgcagccaggaaaaaaaccggacg

SEQ ID NO: 185996 - RNA, 74 nt, Homo sapiens
ggccacagccgggaagcagagggagaaagggaggacacgggagccagaggaaccaagcacaccacgagaggggc

SEQ ID NO: 185997 - RNA, 74 nt, Homo sapiens
gacgggggcgcagcagccccgaggagggacgccgcccgccaggcccggcaaaagcagaccggaaaacccaccgg

SEQ ID NO: 185998 - RNA, 101 nt, Homo sapiens
gaggagacgcaaggagccaccagcacggaccaggaggcgagcaacaggggccggggagaagccccaggacccaggaggcacaacgcccgacaggaacgcgg

SEQ ID NO: 185999 - RNA, 75 nt, Homo sapiens
gacaaccagcgaggagagaaaccacagagacccaagagaagagcgagcaggagcacgaaggggagaaaagggaag

SEQ ID NO: 186000 - RNA, 73 nt, Homo sapiens
acaaaagggccaaagaagggagaacgaaagcgaaaagaaacagaaagagacaggacaaacgaagaagacacca

SEQ ID NO: 186001 - RNA, 74 nt, Homo sapiens
cagcgaaaacggaaacacaagagaccagaggacagccaggaagcaacaggaagcaagcaaaaacacagcagggc

SEQ ID NO: 186002 - RNA, 83 nt, Homo sapiens
agacgcggcggggcgcaaaccgagacaagcaccccgaagcgccggacaggaagagcacccaagcgcaagcaaaagaaggcccc

SEQ ID NO: 186003 - RNA, 78 nt, Homo sapiens
gggcaccgaggaccagccaagacaggagggccaacccggaggaccccagcaacaaagggagaaggacgaacccagagc

SEQ ID NO: 186004 - RNA, 77 nt, Homo sapiens
gcaaagagaggggccggaaaacagagaacaggacaggagaaggcggggaaaaaaccagagaccacagaaggacggga

SEQ ID NO: 186005 - RNA, 72 nt, Homo sapiens
acgcgcggaaggcagcgcccagcagcgcaggaccgaggggaagagggagcagccggacaccaaagaggaggc

SEQ ID NO: 186006 - RNA, 70 nt, Homo sapiens
gaacgagggaagccaccaacaggaggaaacaaccaggacacgcaggcccagaaggggaagacccccagcg

SEQ ID NO: 186007 - RNA, 80 nt, Homo sapiens
gacccaaggacagggaggaaggagcggaaggaagccagaagaagggaacccaccggaaacgcagcccagggcacggggag

SEQ ID NO: 186008 - RNA, 77 nt, Homo sapiens
gaacgcaagacaggaagagaggccggcccccaggggacagcccaccacaagcaggccccaagcccaacagagagccc

SEQ ID NO: 186009 - RNA, 76 nt, Homo sapiens
agcacacggggcgaaggaggcccgcgaaacgcgggcgcagaggagacaagacagcaggcgagcagccaaagccgag

SEQ ID NO: 186010 - RNA, 86 nt, Homo sapiens
caagaagagagcacagaagcaaagaaagaggaaagaagacacgaacccaacaccacccaaaccacaggcagaaaagacgagaagac

SEQ ID NO: 186011 - RNA, 69 nt, Homo sapiens
agcagaggaaccacgcccggaagaaggaggccacacgacagagaagagcaggagagaagggcagaaacg

SEQ ID NO: 186012 - RNA, 80 nt, Homo sapiens
ccgagcgcagcccccaaagccgcgcgagaggagccgggacacgccagcgcgggcccaggagaggaagacgaggaagcaga

SEQ ID NO: 186013 - RNA, 89 nt, Homo sapiens
ggacagcggcaccggccgacgggaggcaccaccggagcgccaggggccccgagcagagggaccgcacacagagaccccccgggcccggc

SEQ ID NO: 186014 - RNA, 77 nt, Homo sapiens
ggccagcgaccggggcgccggcgcggccgccggagaggacaccaacaggaaaaggaagccagagacacgaggagaaa

SEQ ID NO: 186015 - RNA, 68 nt, Homo sapiens
ggaagagaggaggcgcgagagcgggaagaggcggcagacagcgggccaccaaccgcaaaagcacgcca

SEQ ID NO: 186016 - RNA, 82 nt, Homo sapiens
gggaagacgccgcgccaccgagccggaccggagacggggccaacagacagggaggccgcacagaggaggagcaccaaaccga

SEQ ID NO: 186017 - RNA, 89 nt, Homo sapiens
ccgggacggaccgagaccggaccgagagcggaccgagagcgcgaaacgcacgagaagcagcccgcacagcggacgcaaagaaaaagacg

SEQ ID NO: 186018 - RNA, 77 nt, Homo sapiens
gcggcgaaggaagaggagggcaagaagggcaagaagcgaaagacaaacagaaggaagaagggagaagaaaccacaac

SEQ ID NO: 186019 - RNA, 73 nt, Homo sapiens
gaagaagaaggacacgcaggcaggaaggaaccagaagagaaagaagaaaaaacccaagaagaagagaaaggaa

SEQ ID NO: 186020 - RNA, 69 nt, Homo sapiens
caagccaggacggaccccaagcaagccgggggacaggagccaggccaagagaaagaaacacagaagcga

SEQ ID NO: 186021 - RNA, 69 nt, Homo sapiens
caaccacgacgaagcggaaggcagaagggcaaaaagcacaggagggcaggacccagcgcgagccaagga

SEQ ID NO: 186022 - RNA, 60 nt, Homo sapiens
ggcgcccggggacggggccgcagggaggacccaaagacaggaccacgcaccagcagagaa

SEQ ID NO: 186023 - RNA, 77 nt, Homo sapiens
caggggaggaggcacacagccacccggagccaggaaagggcgcccgcggacagcaggcaccacacccgagggcgcca

SEQ ID NO: 186024 - RNA, 79 nt, Homo sapiens
gcacgcacacgagaacgacacacccaccacagccacaagacaagagaaacaggaagagagccggaccaggggaacaacc

SEQ ID NO: 186025 - RNA, 81 nt, Homo sapiens
ggcaacggcggggggcaccaaagccagcacagaccccgggcccacaggccaggaagagggcgaagacaggacggcccaggc

SEQ ID NO: 186026 - RNA, 74 nt, Homo sapiens
gcggacccagcacccccgcacccacgcggcccgcgaaagggcgcaaagggggccccaccaccggagaagcgacg

SEQ ID NO: 186027 - RNA, 88 nt, Homo sapiens
aggacccgggcccaaggccgcgccgaccgcacgcgcacggaacagcagcaaccccagaaagccaacaggcagaccagagacagcgcca

SEQ ID NO: 186028 - RNA, 85 nt, Homo sapiens
ggccaccccaccaaaacccaacagaccaccaaaggaccgacgaaaccacaaaaccccggaaacaaaacccgagaagcaagggaaa

SEQ ID NO: 186029 - RNA, 77 nt, Homo sapiens
accagacaagaccccgggggcaccgcccaagaagaaggaggccgagaagaaaggggcggccccggaccccccacgcg

SEQ ID NO: 186030 - RNA, 87 nt, Homo sapiens
gaccagcagcagaacaccaacacccggaggcgggggacgcggaagagacagcagaacaagagccaggaccggacaggaagggagccc

SEQ ID NO: 186031 - RNA, 60 nt, Homo sapiens
ggagcccgagaacaccaacgcggccgccagcagaggcgggaaggaaaacacccggcaggg

SEQ ID NO: 186032 - RNA, 74 nt, Homo sapiens
gaagaagcaaaaaagagcgaagaaaaccaaccaggaaagccagaaacagacaaccagcaacacaggggaaacaa

SEQ ID NO: 186033 - RNA, 83 nt, Homo sapiens
gaggcccggccacccgagaagggagacgacgcgcgggccgcgagcggggcgacccgagacaaagggcaaagcgccaagccccc

SEQ ID NO: 186034 - RNA, 75 nt, Homo sapiens
cgaacagaaggaacgacgcggaccagaagccagagcgaggacgccggcaggcacagcgaccgaacgaggccaaag

SEQ ID NO: 186035 - RNA, 85 nt, Homo sapiens
ccgggccacccgggcgaggcagagaagggccaggagaggagcacgaggacaggccccgacgaggacagaagcccggggcggcgac

SEQ ID NO: 186036 - RNA, 63 nt, Homo sapiens
accaaagagccaccgggagaagcagacgaaggacagggagagaagaagagagggcgcagaaga

SEQ ID NO: 186037 - RNA, 77 nt, Homo sapiens
ccacaagaagaagagccgcccccaccagacgaggccaccagccagggaacccagccccccacgacgaaagccaagaa

SEQ ID NO: 186038 - RNA, 90 nt, Homo sapiens
cgccgacgaacaaaagcggcagcccaacccagaggaacgacccagcggagaagcggaggagaccaaggaggccaccaccacagaaggagc

SEQ ID NO: 186039 - RNA, 78 nt, Homo sapiens
accccccccggccaggacaacaccgcaggacggaaagaccccccccgcggcccgccaggcgacccacggacagacgcg

SEQ ID NO: 186040 - RNA, 65 nt, Homo sapiens
cagaacccaacacagagccaaagagaggaaaaaagcaggccgcgagacaaagacagcggagaaac

SEQ ID NO: 186041 - RNA, 77 nt, Homo sapiens
gcggggcagcgccgcaccgaggcagcccgcggcaccgggggacagagccacgggcccaggcgaagcagcccaaaccc

SEQ ID NO: 186042 - RNA, 66 nt, Homo sapiens
aggggaggccaaagagacacagcccaaggggagaagcagaccgcaccaggcgggaccccgaaaaag

SEQ ID NO: 186043 - RNA, 74 nt, Homo sapiens
acccgaagcccccaaagagagaaccggagagcacccaacaaccgagaggagaagccgacgaccccgccagacgc

SEQ ID NO: 186044 - RNA, 35 nt, Homo sapiens
aagaacagcaaaagcaaagggccggcagccgggag

SEQ ID NO: 186045 - RNA, 75 nt, Homo sapiens
aaccgccaccacccccagagacaacgaagagaggaaagaagcggaaaggagggagcacacaacaaggagcaaaag

SEQ ID NO: 186046 - RNA, 75 nt, Homo sapiens
acagcaccaggcccaggacagcacgagacgagggacacgaccgagaacccccaaaccgagacaggaaccagaacg

SEQ ID NO: 186047 - RNA, 83 nt, Homo sapiens
ccgcgaggaggcgcgggagggcgagaacgaccccgagacgggcccggccaggccccaccgccacaagcaggggaacaccgcca

SEQ ID NO: 186048 - RNA, 43 nt, Homo sapiens
aggaggaggaggaggaggaagaggaagaaaaagaagcggcgga

SEQ ID NO: 186049 - RNA, 106 nt, Homo sapiens
accggcaggaacgacagcacaggaagcccaagaagcaagagacgaagggacagggagcaaaaaaaaagaagaaaggaaaagccagaaaaaagagaagaaaggaacc

SEQ ID NO: 186050 - RNA, 85 nt, Homo sapiens
ccccccaccgagcggccccccggagacgcggagcagccgcggacagggagaagccggagacccagggcccccggacaccgccacc

SEQ ID NO: 186051 - RNA, 78 nt, Homo sapiens
cggcccgaggagccccgagagagcgccagaccaaagcaacggaacaacccgggaggaaaaggacaaggcaagcggaaa

SEQ ID NO: 186052 - RNA, 78 nt, Homo sapiens
gcggaggagacgggccgcacccgccccccgcgcccgccaccggccgccgcccggccgccaggcacagagaaggcaaac

SEQ ID NO: 186053 - RNA, 80 nt, Homo sapiens
cccgaggcgcagaagggagagggcagcaaacaagccagcagcaaaccaggaccacaccccgaccccacagccaaaagggc

SEQ ID NO: 186054 - RNA, 76 nt, Homo sapiens
ccggaaccagacagaggcacgaagacacagagaaagcggggaccaagaaaggcccagggaccaaagcccggacaag

SEQ ID NO: 186055 - RNA, 79 nt, Homo sapiens
cgaagacgagaagcagggcgggcgcaggccacaccgaagaaggaaccagcaaagcgccacgaagcacaagcaagaggac

SEQ ID NO: 186056 - RNA, 72 nt, Homo sapiens
cccaaggcaaacaggaaaccgaagaaagggggacagagagggaaggggaacaggaccggccacagacagccc

SEQ ID NO: 186057 - RNA, 69 nt, Homo sapiens
aggggacgaaggccgcagacgaaggggaaagggaagcaagagccagacccaaaagggccagcaagcacc

SEQ ID NO: 186058 - RNA, 74 nt, Homo sapiens
ccagcagccaccaaggcagcccagcagggaagccgaacccacgacagagaagaagaaacagacaacgacagagg

SEQ ID NO: 186059 - RNA, 36 nt, Homo sapiens
aaacaggccaacccccaggcccacccccccacgagc

SEQ ID NO: 186060 - RNA, 81 nt, Homo sapiens
gcgaagacgccaagaccacgaagagaaaggaaagggcggcaggaagacaggaaaagagaaacaggccccaacgaggagaaa

SEQ ID NO: 186061 - RNA, 75 nt, Homo sapiens
aggacagcgccagaagcagaggcgcaaagaagcgaaggccacgaaagaacgaacagcaaacacagcgacaaacag

SEQ ID NO: 186062 - RNA, 61 nt, Homo sapiens
ggagcaaaaggaggagaggaggacagacaaaaggaggcaaggcaagccacagccaggaaac

SEQ ID NO: 186063 - RNA, 66 nt, Homo sapiens
aggccccggaggcagaaagcaaccgggcccacaaaacaaggaaacacaaagaagacaccagaaggg

SEQ ID NO: 186064 - RNA, 84 nt, Homo sapiens
ccccgggccggcccccaagagccgaggcagcggcggccgaggcgcccaaccaggagccgcccggcaaagcgaaagcgcaggacc

SEQ ID NO: 186065 - RNA, 74 nt, Homo sapiens
ggcacgagaaaaaaccggaaaacccagagggagcacagggagagccggcgagaagacagcaggagaggcagcac

SEQ ID NO: 186066 - RNA, 70 nt, Homo sapiens
gaaccaacgccacgacccagaaggcccggggcggcggcaccggagacagagacagcccccggaggcgcgg

SEQ ID NO: 186067 - RNA, 92 nt, Homo sapiens
ggaccgagccaccaacgcggcccggcggcggaccgccgcgacccgccgcgcgcgcacgcccaggacaacgcgccgcaaaagggaacaagagc

SEQ ID NO: 186068 - RNA, 62 nt, Homo sapiens
ggagaggacaagaccacgagccagacaaagaaccggcgcgcaaacgcgccccgggaggcgcc

SEQ ID NO: 186069 - RNA, 87 nt, Homo sapiens
ggccacccgaagccacgcagggcagccccaggcgggcgcggccagcagccagaggccgggcccgggaggagcaggggcagaggggag

SEQ ID NO: 186070 - RNA, 75 nt, Homo sapiens
gggaaaaggaagaaccagagaaagggagcaggccgcacaaacacgcagaggcaagaagagaggcaggagggccgg

SEQ ID NO: 186071 - RNA, 76 nt, Homo sapiens
agaaaaaagaacagaggacggaaaccaaaacgaaagaagaaaccgagggggaaacaggaagagaacagaacggaag

SEQ ID NO: 186072 - RNA, 71 nt, Homo sapiens
ccggccgcaccccagcgaggcggccgagcgggacgaacagcggggacgccccagcagaccgcccaggagag

SEQ ID NO: 186073 - RNA, 54 nt, Homo sapiens
gaaacaaaagcaacaaagagggaggaaaaggcccaggcgagaaagaaaccggaa

SEQ ID NO: 186074 - RNA, 70 nt, Homo sapiens
cgcacacagcgcgcaacgcgggagagcccgggccacccccccaggcaagacgccaggacggccggcagca

SEQ ID NO: 186075 - RNA, 70 nt, Homo sapiens
cccaagacccacaacaaaagggccacgcgcacaggggcggcagggggaccagccagcaacccgcccccgg

SEQ ID NO: 186076 - RNA, 79 nt, Homo sapiens
gcggaccaaaaccgcgaccaagacagccccaccaggcgcaaccgaaagaagcgggacgggggagggccggggaagaccg

SEQ ID NO: 186077 - RNA, 52 nt, Homo sapiens
cccgcgccggcaggccggcccggggcgagccccaggcgggcgcggacggcag

SEQ ID NO: 186078 - RNA, 76 nt, Homo sapiens
gaaagagagggcacaaaacagccagagacagaccgaaagaaccgcacagagcaggcccaccggcaacacaaagcac

SEQ ID NO: 186079 - RNA, 70 nt, Homo sapiens
aacaagaggggcagcaagggccaaggaaccagaccagggaacagccgaacccaggacaaccacaacacgc

SEQ ID NO: 186080 - RNA, 79 nt, Homo sapiens
cacagcccggagggagcgaggagcgcccgcgggacaggaagaaacgaggccagacaaggccaggccgcccagcacgcca

SEQ ID NO: 186081 - RNA, 80 nt, Homo sapiens
gacggaccgagaccggaccgagagcggaccgagagcgcgaaacgcacgagaagacaacaggcacaaagagagaaggaaca

SEQ ID NO: 186082 - RNA, 78 nt, Homo sapiens
cgggcccagggcccaagggagacccggaccagggcagccgggaggcaagcaggggggcaaaggaaagaaggcagaaag

SEQ ID NO: 186083 - RNA, 54 nt, Homo sapiens
gaccacagcgcgcggcccccacaccacacagagagcgagggaagggggccagac

SEQ ID NO: 186084 - RNA, 87 nt, Homo sapiens
agccaggccgacacaagacgggcaccgccaagaacgccagaagcgaccaaccgcgcgcaggaaaagcacagaggacccgaaaccgga

SEQ ID NO: 186085 - RNA, 57 nt, Homo sapiens
ggacccggagacaccccgcagcacagccgcgaccaagaggcagcgacggaagcccgc

SEQ ID NO: 186086 - RNA, 76 nt, Homo sapiens
gacccccagaaggaacggagacaaaaacggcccggagaggagaaagacagaaccagcacagcaaaaaaggcagcgc

SEQ ID NO: 186087 - RNA, 62 nt, Homo sapiens
gaccacaagaccggagggcagacgacggccccacagccagccacagggcgaggccaccccaa

SEQ ID NO: 186088 - RNA, 48 nt, Homo sapiens
ggagggaaggcaagagccaacccaaaaccaagaccagcgcagaagggc

SEQ ID NO: 186089 - RNA, 64 nt, Homo sapiens
gggcaggaaggcagcgcacgacagcaaaagagccagcccgagaagcaggagagaaagaagccaa

SEQ ID NO: 186090 - RNA, 83 nt, Homo sapiens
gcgcgccgcaccagcccggaccccgacgccgcgggcccggccccggacgcgggggaagcagggaaaggccggagagaggaagc

SEQ ID NO: 186091 - RNA, 57 nt, Homo sapiens
ggccccaaaggcggggaagagagcgccgagccagacccagaacaggccaagacaacc

SEQ ID NO: 186092 - RNA, 53 nt, Homo sapiens
gaaaaccgaccaaccaacgaggagcagggaacgagaagacccgagaaaaaacg

SEQ ID NO: 186093 - RNA, 75 nt, Homo sapiens
aacccagcccagccaaaccccacaaaggacccagagagggaccagggccaaagaagagccggggggcaggcggac

SEQ ID NO: 186094 - RNA, 81 nt, Homo sapiens
gcaggcagcaggaccacgggcgggcggaggggagcgcaggcaggccgggaggcccagcccccgcgcggccggaggccggag

SEQ ID NO: 186095 - RNA, 79 nt, Homo sapiens
aaaaacaacgggcgaacgaagcaggggaaccgcccaaaagcccgccagaagaaggacgggagccaaaagaaggcaagcc

SEQ ID NO: 186096 - RNA, 73 nt, Homo sapiens
ggacccacgcgaccccggggccacccaaggcccccgaggagggaacaagccagaccaggaggagaaaacaaaa

SEQ ID NO: 186097 - RNA, 74 nt, Homo sapiens
gacaaaaaccaaggaacacggagaagaaaaacgcgcaacaagcaggaaaagagagaccagacaaggccaaccag

SEQ ID NO: 186098 - RNA, 81 nt, Homo sapiens
cacaccaggagaacaagcccacgcaccgacccaaggccagccagccccaggcaccagcggacaggacagggaggacgaagg

SEQ ID NO: 186099 - RNA, 70 nt, Homo sapiens
accaagggaagaggacacacacccagcagcggccgaagaaaccaaaaggccaaacgcagaagagcagcac

SEQ ID NO: 186100 - RNA, 102 nt, Homo sapiens
cgacgcggggaccgcccggaggcccgggccagcggcagacaccgccgcggcgggccgacacaagaagaggcccgagacccaagcgcagcacaggaggaggaa

SEQ ID NO: 186101 - RNA, 61 nt, Homo sapiens
aacacccaacagcgggacagaaagagagcacagcagacgaaccgaaaaaaagaaaagcagg

SEQ ID NO: 186102 - RNA, 68 nt, Homo sapiens
ggaagcccgccccagagcaggagcacccagaagcaaacaaggaacgggaaaacacaggacacccacac

SEQ ID NO: 186103 - RNA, 85 nt, Homo sapiens
gcgcgggcgcgcggcggagccggcgccgggcacggcacgggggccggacgcacggcccggcagcagagcagcaaaaaggagggag

SEQ ID NO: 186104 - RNA, 75 nt, Homo sapiens
gaggcccaagcccgcggagcacccgccggccagagaagagaacagacaacgaagagaggaaagaagcggaaagga

SEQ ID NO: 186105 - RNA, 68 nt, Homo sapiens
gaggcaccacaacaccccagaaaggcagggagggacaagaagaacaggcgccgggggcaacacccaga

SEQ ID NO: 186106 - RNA, 85 nt, Homo sapiens
gagcccccgagggacaaaaagaggcgaccgcacggcaggagaccaaggaaaggcccgcaaacacccggaagacagcaaaaggcag

SEQ ID NO: 186107 - RNA, 100 nt, Homo sapiens
gccgcccaagccgcacagccgcggcggcagcagcaggagaggacacggcccccgcacggcaagccgggaccgggccagagagcagccacaggccgggccc

SEQ ID NO: 186108 - RNA, 85 nt, Homo sapiens
ggaggcacaggggcccccaccacccggaggagcagcccgccccgccgggggagacgacccccgccagggccaggccgagggcccg

SEQ ID NO: 186109 - RNA, 75 nt, Homo sapiens
gaccaaaacagggacagggcgaagcacagaaccagcacggccacaggaacgcgccgaaacacgcaccaccacccc

SEQ ID NO: 186110 - RNA, 57 nt, Homo sapiens
gaacagcgacccacagagagagggagaaggacgggccacgaggcaccggccgcgagc

SEQ ID NO: 186111 - RNA, 66 nt, Homo sapiens
acggcgagaggggcgagaacgccacgcgggccggcgaaagcgggcagcgggggcagagacggggaa

SEQ ID NO: 186112 - RNA, 72 nt, Homo sapiens
gcggcgccgccaacgcgcccccgaggcacgcagaagccagcggacgcccgcaacggggaccggccagagacc

SEQ ID NO: 186113 - RNA, 78 nt, Homo sapiens
aaggacaggcagggcccaagaccaaccaccacccaaaagccaccagcagagcaagggccagagaaggaggagaaggag

SEQ ID NO: 186114 - RNA, 56 nt, Homo sapiens
acaaggacagagcacccaccacaggagcgggaagagggcagcagaagacaggccgg

SEQ ID NO: 186115 - RNA, 82 nt, Homo sapiens
cacccccgcgccggccagggccggccagcgccgcaggccccgagccccggccccaaagacccaaaacagagacaccccccag

SEQ ID NO: 186116 - RNA, 76 nt, Homo sapiens
cgagcggggggacgccggcggagacgcgggcgagggaccaggaggagaagcaaccagagaggaagcgagacccaaa

SEQ ID NO: 186117 - RNA, 74 nt, Homo sapiens
ggaaccggcaacgggcgccaagccgcggagccccagacggaaaagggaacaaccccaaaaaaccgacacccggg

SEQ ID NO: 186118 - RNA, 96 nt, Homo sapiens
gagccgaccccaggccagcccgacccgaccaagacgcggaagaggaggaaaagccggacgcgaaggcccagcaggaagagaggcggagagacaaca

SEQ ID NO: 186119 - RNA, 61 nt, Homo sapiens
agcacacaaagaccccccccacaggggagacagaggaagaaccagaccaaccgccggaagg

SEQ ID NO: 186120 - RNA, 68 nt, Homo sapiens
agagacacaccgaggaacggacggcaaaggaacacgcaaacacacaagaggggacaagaccagaacca

SEQ ID NO: 186121 - RNA, 68 nt, Homo sapiens
ccgaaagccacaggaccaggaaaacacagagaagcaaacggaggcggcgcggaacacacacaaaaaag

SEQ ID NO: 186122 - RNA, 82 nt, Homo sapiens
gagcagaagaccggagccccaggaaacccgagggcggccaaaaccaggccagaacacaaagcggaaccggaagaaaagcaac

SEQ ID NO: 186123 - RNA, 80 nt, Homo sapiens
ccggaacccagagacgcacagagccacgcgaggcacagacgggagcagccgcggggcccccccaaggcccgcgagaccca

SEQ ID NO: 186124 - RNA, 73 nt, Homo sapiens
cgcgggggcaacggagaaaacccggaaccgcgacggcggcaggacaccgccgcccagccacaggaccgacacc

SEQ ID NO: 186125 - RNA, 77 nt, Homo sapiens
gcggcgagagaacaggccgaaagggccacaaacccaaggaaccagaaagagacaagaagggaccggcgcgggggacc

SEQ ID NO: 186126 - RNA, 72 nt, Homo sapiens
cccaagaaaaaaaccacaaagcggccgaaacagaaaacaagagaccacagaaggcgaagaaaccaggcaggc

SEQ ID NO: 186127 - RNA, 75 nt, Homo sapiens
cgcgaggccagagccagggcagcggccagagagagcaaagaaagcagaacaaagaagagagaaaggaaggcgccc

SEQ ID NO: 186128 - RNA, 64 nt, Homo sapiens
cccacacaggggaacacagccaacgagggaaaggagacagaaagcagcccaagagaccccaagg

SEQ ID NO: 186129 - RNA, 79 nt, Homo sapiens
cacaggagagccagaggaagaaccagaggaacgggacaaagcggccagggagcacagaaggcgacccagcaacgcggcc

SEQ ID NO: 186130 - RNA, 86 nt, Homo sapiens
gccccgcacccgcccggacccccggccccgccggggagaaagaagaaacaaagagggacccagccaccaaaaggaggcgaagggcc

SEQ ID NO: 186131 - RNA, 61 nt, Homo sapiens
ccgccccgagccaggagaacgagccgaggaggagccgggcccgacccacccaggaggcaga

SEQ ID NO: 186132 - RNA, 84 nt, Homo sapiens
cgccgccccgcgagcacagagcccgccgccgaccgccgcccgccacacccgccgccaggccgaccccgggacacacccagcccg

SEQ ID NO: 186133 - RNA, 80 nt, Homo sapiens
ggagcagaccggaggaggcgggggcgccggcagaggaccaggcaccaccggccccggaagaaccagaggaagagacagcc

SEQ ID NO: 186134 - RNA, 40 nt, Homo sapiens
cgacgacagagggccagaaaagggagcgcacccgaacacc

SEQ ID NO: 186135 - RNA, 76 nt, Homo sapiens
acacagggaggagcaacagagaagagcgggaagacggaaccgagaagcgacgggcgcccagcggccggggaggagc

SEQ ID NO: 186136 - RNA, 81 nt, Homo sapiens
caagagcccgcagccaggcccagaacggacaccacaaagggaaaggaaagcagggggcccgggaaaacagagaacaagaag

SEQ ID NO: 186137 - RNA, 61 nt, Homo sapiens
agaagagccaaggaaaaacagcaagaacccaaaagggggggcaaaccgagggacacccagc

SEQ ID NO: 186138 - RNA, 65 nt, Homo sapiens
caaccaacacacaccccggagaaacacgccaaacagagccccaaggagcagcggccgagagagaa

SEQ ID NO: 186139 - RNA, 81 nt, Homo sapiens
ggaggcagcgggggccgcggcgagcggacggggcgagcaggcgcgcgcgaggagcgggaagcagcacaagcgggacccagg

SEQ ID NO: 186140 - RNA, 65 nt, Homo sapiens
gaacagagacaaaggaccaaaggcaaaggcaggacaaagcggaggcgccagcacacggggcgcac

SEQ ID NO: 186141 - RNA, 74 nt, Homo sapiens
aaacgcccggcggaccacggccgcagcacgaaagaagcaagggagacccaagcagaacgacgccaaaacagaga

SEQ ID NO: 186142 - RNA, 101 nt, Homo sapiens
cggagacaccaagagcgacaaaggaccaccgaagaaaaagcacagcacaggggaagcgaccccaagccaccccaccggacaggagagaggcaggaggccga

SEQ ID NO: 186143 - RNA, 80 nt, Homo sapiens
caggaggagcgggccccaacccaccaaaagcacaggaccaaagacagagacaagcggggaagaacggcggagcacaccga

SEQ ID NO: 186144 - RNA, 68 nt, Homo sapiens
ggccgaagaaaccaaggaggacaggaggcgcggaacccccacaacccgagaggagcaggaccagagag

SEQ ID NO: 186145 - RNA, 80 nt, Homo sapiens
ggcacagcgcagggcagagacgccgcccacaccgcgagcgccaacacaccacagagcaccagaagggagaacgccacccc

SEQ ID NO: 186146 - RNA, 83 nt, Homo sapiens
cagacagcaaagacacagcacaagcgccacgagaaggaaacaaagcagcaggagaggagagccagagaaggacagggaagcac

SEQ ID NO: 186147 - RNA, 63 nt, Homo sapiens
gaggaccaccacagaaggaagaagagcaagggagcacaacacccacccagagcaagggagaag

SEQ ID NO: 186148 - RNA, 63 nt, Homo sapiens
cgcggcaggccaggggaccggaagaccgcaggaaagcaggaaggcaagaaagccaaggacgaa

SEQ ID NO: 186149 - RNA, 67 nt, Homo sapiens
aggacgcaccccaaaagacacccccgaacccagaacacaagaagaagagccgccccacacgcagaaa

SEQ ID NO: 186150 - RNA, 73 nt, Homo sapiens
ggcaccgcgcgccagccaaacgccgaacggaacaaggaacagcaccacaacaggaaggaacccaggagaagac

SEQ ID NO: 186151 - RNA, 86 nt, Homo sapiens
ccgggacgccgccgaccgcccggcaggaaccgggaccgccagcgcaggagggcccaaaggaccagccaaaacccacccaagccacg

SEQ ID NO: 186152 - RNA, 73 nt, Homo sapiens
cagacgccgccccagcaccggcgaacaaaagacagcaccggcgggagaacagagacccaccaagaaaccagaa

SEQ ID NO: 186153 - RNA, 80 nt, Homo sapiens
ggcccggccgccacccgggaaagacaggccgacagcgggcgaagaagagccacagccaagcaggccaggcggacaaaccg

SEQ ID NO: 186154 - RNA, 62 nt, Homo sapiens
acaacaggcaacaaacaaagcgccccggggaagacggaagagacgccacacagagcgcacgc

SEQ ID NO: 186155 - RNA, 73 nt, Homo sapiens
agagaaagaaggcggccaggccaaccgaagaaacgcgaagacgacgagcgcaccaagaggaacacaggcgacc

SEQ ID NO: 186156 - RNA, 75 nt, Homo sapiens
caaggcaagcggccagggacccaaggaagcagacaggccgccgacggcccgcacagggagggcacagcaagccca

SEQ ID NO: 186157 - RNA, 78 nt, Homo sapiens
cgccggcagcgaagacgcggagaaaaaagccggacaaggcacgaggcgcggcgaccaccacagcagagcccggcgaag

SEQ ID NO: 186158 - RNA, 65 nt, Homo sapiens
cgaggccccagaccacacgcacccagccaaacccaggcccgagaagaagaggaaaacccaccacc

SEQ ID NO: 186159 - RNA, 70 nt, Homo sapiens
gcagcaacgacccgagcacaaggcaagagaccaaccccagccccgaaaggggggaaaaccggcaaaacgc

SEQ ID NO: 186160 - RNA, 75 nt, Homo sapiens
ggacgagaaaagcgacgaggagcaaccagccacagggaaagaggcgagcaaccacggggaacagcacagacggcc

SEQ ID NO: 186161 - RNA, 83 nt, Homo sapiens
acacaggaagccgaggagagccgaggaggacaccaggagccacagcacagggacgagagcgaaaccacacaacgcccacccgc

SEQ ID NO: 186162 - RNA, 62 nt, Homo sapiens
gaggcgcgcaggagccaagggggggcagcgcagcaggcgggcaccggcaaggccccaagggc

SEQ ID NO: 186163 - RNA, 79 nt, Homo sapiens
ggcaacaggacgggccaccacgcaaagagcaaagaaacaggccacaggaaaagacccgcaaccgcgcccgggccgccgg

SEQ ID NO: 186164 - RNA, 84 nt, Homo sapiens
aaaaggagaaggaaagcgaaggggaaggcgccgaagaggacgaaggcggacggcgcgcacgaggccgaaccggggcacacgacg

SEQ ID NO: 186165 - RNA, 75 nt, Homo sapiens
aagaagggcaaagccgaagggacccccaaaagacaagggcaaaacggaccagacacaaagaggagggcgggggca

SEQ ID NO: 186166 - RNA, 71 nt, Homo sapiens
aagaaaagaggcaccccaaagagcaacaaaacagagagcaggccccagcaccacacccaccagacgcacgg

SEQ ID NO: 186167 - RNA, 69 nt, Homo sapiens
gcacgaagggaacaaagcgagagacgacaggcgggcaacacaggaaaacaccgaaccgacgaaagagga

SEQ ID NO: 186168 - RNA, 71 nt, Homo sapiens
gccaaagcaggggcaacccagaacccccaggcgggaagaagaacaacagccgaggccaacacagagaacac

SEQ ID NO: 186169 - RNA, 63 nt, Homo sapiens
caggagcgggagcgcagcgaccacaccgaaggaccagaggagaaccagccacccagcaagcag

SEQ ID NO: 186170 - RNA, 88 nt, Homo sapiens
cagggcgcgcccagagccaccagggcacacgggccacagaggaccagcaaggagaagaaaggagcagcacagacgggggcagcgcgga

SEQ ID NO: 186171 - RNA, 91 nt, Homo sapiens
caaccccgcaccggagcgccggaggcacaaccgcacgacggcgccaaccggccacagaacgccaaacaggacccaagaagcaccagaagca

SEQ ID NO: 186172 - RNA, 78 nt, Homo sapiens
cggggggacgcccccaccacaccgggaggcggcaaggaagaggcccggaaagggaaaaaccgaggcagagaaagaaac

SEQ ID NO: 186173 - RNA, 85 nt, Homo sapiens
cccgagcgcggagaacgaaggcggacagcccgcgaaaccaggcaagggccagcaccaggcaggcaccccagcgcgaggccacacc

SEQ ID NO: 186174 - RNA, 34 nt, Homo sapiens
agaacaccagagaaacggagaagcgacagcgagc

SEQ ID NO: 186175 - RNA, 86 nt, Homo sapiens
aggaccggcgggccggaagacggcagcggccccggagacacaccggcgcagggcaccaggagcgcgagaggagcggccaagggaag

SEQ ID NO: 186176 - RNA, 59 nt, Homo sapiens
aaacgggaggcagaccccagacaaagagggacccaggaagcgcagaagagcggacaggc

SEQ ID NO: 186177 - RNA, 70 nt, Homo sapiens
ggcggccccggcggggaccggcggacgagagggcgcggcaggcgcgcgcgcacaacaccgaaaacgagaa

SEQ ID NO: 186178 - RNA, 81 nt, Homo sapiens
gacaaggcaggacgcgcgcgcagggcgcgaccgcacagcgaccgccgggcgggcaccggacggacagcccccggagcagcg

SEQ ID NO: 186179 - RNA, 70 nt, Homo sapiens
accgacccagccagccaacaacaacagagcgacagaggcaggggaagaggcgcaacccagcccagccaac

SEQ ID NO: 186180 - RNA, 79 nt, Homo sapiens
cgcacaggggcgggaccaaggacacggaccgaaacccaggcccccccaccaggccagccgggggggggccggggcgggc

SEQ ID NO: 186181 - RNA, 60 nt, Homo sapiens
cggagacggccggggcggcgaagcggaggccggagcaaagcgagcgaacccgggaccaaa

SEQ ID NO: 186182 - RNA, 73 nt, Homo sapiens
caagagggaggaagaagagggaagcgcagcagggagaagccagaagacggccagccgaacgacacaaccccaa

SEQ ID NO: 186183 - RNA, 86 nt, Homo sapiens
cggacacggaggacgagggcccacagccgaggaggagcgggcacaagcagaccgccacaccagagaccacggcagggcccggcggg

SEQ ID NO: 186184 - RNA, 85 nt, Homo sapiens
aaagccggggcgggcgggggccaggcgcgccacccgaaccgcggaaacggccgcagaggacgccagacgggacacgcacaggggc

SEQ ID NO: 186185 - RNA, 71 nt, Homo sapiens
acagcaacagagaaccaaaccaaaaccacaggcacaaagacagggcacggggcccaccggaccgggccaca

SEQ ID NO: 186186 - RNA, 88 nt, Homo sapiens
ccgagaccgcgccgccccgcgagcacagagcccgccgccgaccgccgcccgccacacccgccgccagccccgccacagccccaccccc

SEQ ID NO: 186187 - RNA, 54 nt, Homo sapiens
ccagccccagcgccagggggcaagaacgcaaagcgcagaacagaagaggcagac

SEQ ID NO: 186188 - RNA, 87 nt, Homo sapiens
ggcggagagcggccgagcgcgaaagaggagccaggagcaggggcgcggcagaggcgcggacgagcagcgcagggcggggcgcgcgcc

SEQ ID NO: 186189 - RNA, 51 nt, Homo sapiens
agcagcagcggagaaacaggaaaagacacacacaaacccagcgaacaccag

SEQ ID NO: 186190 - RNA, 55 nt, Homo sapiens
caccggcagggcacaaggaaaacggaacagaaagaacaacacagcccaaagcaag

SEQ ID NO: 186191 - RNA, 51 nt, Homo sapiens
ccgcgagcggggcgacccgagggcggagaacggaaaagcaccaggaagcag

SEQ ID NO: 186192 - RNA, 65 nt, Homo sapiens
gaaggccgaaagcacgaaagcaccagaaaggagcccaggcgggccggccaccacagaagggaacg

SEQ ID NO: 186193 - RNA, 85 nt, Homo sapiens
gccgcgaagcgccgccggccccgccgccaagaggagcgagcggacccgcgagggaacgaagcaagcagagaaggaaagagcgcac

SEQ ID NO: 186194 - RNA, 72 nt, Homo sapiens
agaaacacaggaccccccccaacgagcgccaacccaaacgagcgagacacacagaaaggaaaagggaacagc

SEQ ID NO: 186195 - RNA, 85 nt, Homo sapiens
agaagggccaccccacagacggccgaaccacaagcgaagcaagacagaaaccaaagaccgccagcaggcaggaaacaccacggcg

SEQ ID NO: 186196 - RNA, 57 nt, Homo sapiens
acaacccaagcgaagaacccaccgcaacccccagccacaacgcgaaccgggcggacg

SEQ ID NO: 186197 - RNA, 61 nt, Homo sapiens
ccggcaacaccagacaccaaggacagcccgcaaggaggaagagcgcgcaaaggggagaccc

SEQ ID NO: 186198 - RNA, 80 nt, Homo sapiens
gccgcaccaccgcacagccgccaccgccagccccagcccgacggagcccagaagcccgggccaacggaacgccgcaccgc

SEQ ID NO: 186199 - RNA, 73 nt, Homo sapiens
cgccaccaagggagagccagggccggaagaaaaccaccaggccacgaagacggcaaggaggaaaggaagagga

SEQ ID NO: 186200 - RNA, 69 nt, Homo sapiens
agaaagagaggagagaggaaggcggaccagaggaaagaacggaaaaaagggcaaggcgacaacaagaac

SEQ ID NO: 186201 - RNA, 80 nt, Homo sapiens
aaaagcccgcaggggcgagggaggcagagaccacaagaaccaggagagacccagagccagcgcaggggaagccgcaagga

SEQ ID NO: 186202 - RNA, 63 nt, Homo sapiens
ccacagggggaggggccgcagccagcggcaggagagaaagggaaaagccaacagagggggaag

SEQ ID NO: 186203 - RNA, 74 nt, Homo sapiens
aggcccgcaccgcaggcccagaggacagagcagaacaaagaagccacagacaaagagggaggaacaaacaacaa

SEQ ID NO: 186204 - RNA, 81 nt, Homo sapiens
gacaaagagaaggcagagaaacgaagcagcccgccccccgcagagaaacagaaaacagccaaaaggacagggacagcaaaa

SEQ ID NO: 186205 - RNA, 73 nt, Homo sapiens
agaaagagacgccaggcgagcggaggaaaaaccagacgagagacagaagacgaaagggcaagaaagagagcac

SEQ ID NO: 186206 - RNA, 82 nt, Homo sapiens
agaaaaagaaggcccgagcaaagaagagcccgaacaaacaaacacccagaaacaagaggacagggcagaccgccagcagcac

SEQ ID NO: 186207 - RNA, 68 nt, Homo sapiens
ggaaaagcgcccagggggcacaaccggagggcgcggaacacgccaagggacaagggggggcccagcgg

SEQ ID NO: 186208 - RNA, 71 nt, Homo sapiens
aaaaacggacaccagagaggacagaagggagaaagcaggagacaaagccaggaccaagaaaagcggagcga

SEQ ID NO: 186209 - RNA, 74 nt, Homo sapiens
acaggcagcggccccagacggagggggacccggacgagccgacaggcgcccacgcaaaaagggaccccgacgga

SEQ ID NO: 186210 - RNA, 79 nt, Homo sapiens
ggagaaggaccaagaaccagcaccaggaagaagaggcggaagaaacaacaagcgcaaggagcgcccaaaccaccgacag

SEQ ID NO: 186211 - RNA, 43 nt, Homo sapiens
agcagccgaaagagaagaaggggcaaggggacccaggagaaag

SEQ ID NO: 186212 - RNA, 78 nt, Homo sapiens
ccgccgcgccgcgggccggagaagcggccgcggccagggaacggggcacgcggccaacgcgccaaagaccaagcgcgc

SEQ ID NO: 186213 - RNA, 74 nt, Homo sapiens
aggggaaccgacgaaagaaaaccccgagggaaacaagaaaacacaaagaggcagcaaagcaccagcagcgcgca

SEQ ID NO: 186214 - RNA, 88 nt, Homo sapiens
gggcgagcggacccccggagaagacagagacgccaaaggagggagccaaggggcaacaaaacaccgcaacaacgaagaagacacagcc

SEQ ID NO: 186215 - RNA, 70 nt, Homo sapiens
cgagagacaacggagaacacaaagaagggagaaccaaagaacacgaaaagcagagaaacccgaagaaggg

SEQ ID NO: 186216 - RNA, 76 nt, Homo sapiens
cagcaacccgaccagaaccaccacagcccggcgaaagccgacacggccggcgccggggacgcaaggcccggacagc

SEQ ID NO: 186217 - RNA, 76 nt, Homo sapiens
ggcccacggcaggacccacgcacgcgccggacccgggccagcggccaagacgggacgaacagcggggacgccccag

SEQ ID NO: 186218 - RNA, 75 nt, Homo sapiens
aagcggagcccagacgaaccggaagggagaaacccccaagacccccgggccggcccccagcacaggaagcaagac

SEQ ID NO: 186219 - RNA, 59 nt, Homo sapiens
agagaacggcacacgcgagcgcggagcgcccaagcccccacccagcaacaacccaaacc

SEQ ID NO: 186220 - RNA, 89 nt, Homo sapiens
ccggagagcccaacgggacgggcaagacgagagggcccgacggaggggaggaagcccgaaaaagcccaagacagcagaagcagacaccc

SEQ ID NO: 186221 - RNA, 72 nt, Homo sapiens
aagccaacagagggagaagaccagaaaccaccaagaagaagacgagaaccagccaaaaaagggcagaaccga

SEQ ID NO: 186222 - RNA, 73 nt, Homo sapiens
ggcaggcaaaaacaggagaccgcggccgaccagagaacagggcacgaccaacaaaacacaagaaaaggcggag

SEQ ID NO: 186223 - RNA, 77 nt, Homo sapiens
ggggacagcggaagaaacgcacacgaagaacaagaaaaagcacaagagcaccaacgaggacaccgagccaaaaaggc

SEQ ID NO: 186224 - RNA, 74 nt, Homo sapiens
caggcggcgcggcgcggcccgcccgccccagggcgaagacccccccccagggcaaaccaccaggcaagaagacc

SEQ ID NO: 186225 - RNA, 76 nt, Homo sapiens
gccagcgaggagaacagccgaaaggcggggacgggccggcccgcggaagccccgcgcaggggaaaccgcccccaaa

SEQ ID NO: 186226 - RNA, 77 nt, Homo sapiens
gagaaaaggccaagaaggcagcgcgccccagaccaccggcagggaacagccgagcagaccgaggaggcccaccagca

SEQ ID NO: 186227 - RNA, 85 nt, Homo sapiens
cggacgggaaggcgggagacgagaagccgaaaagcgcagcgagcggagccgccggagcaaagcgaagaggagcccagacaaagac

SEQ ID NO: 186228 - RNA, 67 nt, Homo sapiens
gggcaccacaacccacggaggccaggagcaggggcgaaagaaggacaccggcagaagaaagcgggac

SEQ ID NO: 186229 - RNA, 87 nt, Homo sapiens
agaccccaacaaggagcaaagaaaagccacccgggccagcccgccgcagcaagagagagcaaggagcaggcgcagagcagagcagag

SEQ ID NO: 186230 - RNA, 35 nt, Homo sapiens
ggggaccgcgcccgcagaacaccggaagaagaccc

SEQ ID NO: 186231 - RNA, 71 nt, Homo sapiens
gaagagcgcggccagcaccccaacgggccaaaggacagcaagagcagccccggaacggaggaagggagccg

SEQ ID NO: 186232 - RNA, 68 nt, Homo sapiens
cgcggaacggccaccacgcaaaaacaacgggaagagaaccacaggaccagacaaggagggccaagaac

SEQ ID NO: 186233 - RNA, 71 nt, Homo sapiens
gcgcgaccaaagaggcaggacacaccggaacaaagaaaaccaaaacgcaacagaaacaacaggcaagagga

SEQ ID NO: 186234 - RNA, 75 nt, Homo sapiens
gaaaccgccgagcagagagaaacagaacgcgaacagacagaggggcgaagaagcaagcccggagaaaacaggacc

SEQ ID NO: 186235 - RNA, 42 nt, Homo sapiens
ccagaagaagggcaccagcgaaggcaagaaaggcacaaaagg

SEQ ID NO: 186236 - RNA, 61 nt, Homo sapiens
gcccagccgggaggagcagcagagcggaggggcaggcaagggcgaaggggggggccaccgg

SEQ ID NO: 186237 - RNA, 73 nt, Homo sapiens
ccggcgcaccaccaggccacccaggggcgccagcggaacgggccagacaggcgcacggacaccaaggcaggca

SEQ ID NO: 186238 - RNA, 79 nt, Homo sapiens
agcaggaccgaccaagagcaccggggggcccccacggaggagaaggcgccagcagcagaaggagcaggacggccacgca

SEQ ID NO: 186239 - RNA, 78 nt, Homo sapiens
gcagccccggccgggcacggacagggcgaaagccgaccacccggcgaagaaggagcgacgaaaggaagaagccagggg

SEQ ID NO: 186240 - RNA, 77 nt, Homo sapiens
ggacccggccagaggaaagaacccgagggggcgacgcaaacccggacacaagcagccaagagaggaaaagacagggc

SEQ ID NO: 186241 - RNA, 81 nt, Homo sapiens
cgcggcgcggcggccgcagccccgacggcgcagagacgcaagcggaagaacagcgcaaggaggggagaaggagcgaggcga

SEQ ID NO: 186242 - RNA, 55 nt, Homo sapiens
gaacaccaaggaagcaaaagccccagaacgccaggaggaccagaaaacagcagaa

SEQ ID NO: 186243 - RNA, 77 nt, Homo sapiens
gggacccgggacagcggagaggcgcagagaggcagcacggcaggagacgaggagaggacagcaggacacccggaccc

SEQ ID NO: 186244 - RNA, 61 nt, Homo sapiens
aggggggagaagacagacccccaggaggaagaacggcaaaacggaggagcagagcgaaacg

SEQ ID NO: 186245 - RNA, 90 nt, Homo sapiens
cgccagcagccccagccaaagacgagccaaaccaggcgaccgagcagccaagcaacgggccccgggccccgacagcacccgccacaccac

SEQ ID NO: 186246 - RNA, 87 nt, Homo sapiens
gcgcccgagcggcgcgcaccaggcggagccccagccggggcccagcgaacgccaggggagagaacaaaaggaaaagacacaaaggag

SEQ ID NO: 186247 - RNA, 54 nt, Homo sapiens
gccccccgcaacgagaaccaagacgcgccggcccgggagaggaggggaaaggag

SEQ ID NO: 186248 - RNA, 81 nt, Homo sapiens
gaaaccaaaaaagcaggaagcagaggaagaggagaaaaaggccaggagcgagccggagaaacacaagcaccgcagaaagac

SEQ ID NO: 186249 - RNA, 57 nt, Homo sapiens
ccagagcgacacaaggaagcgaagaaccaagggagcgccgaggcaagagaaggcgca

SEQ ID NO: 186250 - RNA, 68 nt, Homo sapiens
acaagggaagagaaaggggcaacaagaaagggggagcccccgaccacgagcgcccgaagaagagaaac

SEQ ID NO: 186251 - RNA, 79 nt, Homo sapiens
gccgaaccgaccagaccagaaacgggggagaaggaggaacacaaagaggaccagcgacaaaccagaccagaggcgcacg

SEQ ID NO: 186252 - RNA, 80 nt, Homo sapiens
gccgggggccagacgcacgcccacagggaaggcaaacaacacccaacagcccaaagcaaaggagcaacagcccaggagaa

SEQ ID NO: 186253 - RNA, 71 nt, Homo sapiens
aggggaaggcaaagcacccagcacagaaccgacacaaggacacgagacgagaacagacccgcccgcaagcc

SEQ ID NO: 186254 - RNA, 57 nt, Homo sapiens
aggcggaggcagaggggaggcgcgaaaggaggcagcacggcaggagacgaggagagg

SEQ ID NO: 186255 - RNA, 57 nt, Homo sapiens
agcagaagaagaagggaccccaaaagagccaagcccagagacggcaaccggcacgca

SEQ ID NO: 186256 - RNA, 59 nt, Homo sapiens
aagcaggagaagcaacccgagacgggcagacaacgaacaagcgaagaaccagcagcaag

SEQ ID NO: 186257 - RNA, 90 nt, Homo sapiens
ggcaaaacaaccccagccccccaaagccggaacagaggggggcgagcaccaaagccaaggaagcccagaagaaagagcaccccccggaag

SEQ ID NO: 186258 - RNA, 61 nt, Homo sapiens
cccaaaacccggaagagcgccccaggagaaacaaggcagcgcaagaccccgcacggaagca

SEQ ID NO: 186259 - RNA, 79 nt, Homo sapiens
agaccagggagcgacgaaggcccagccgcgcccggagaagacgacgacaacagggagacggacccaggagcgcgacagc

SEQ ID NO: 186260 - RNA, 78 nt, Homo sapiens
accccaccaaccaggagccaacagagacagcacgcgccacccaggcggaggcaggggcagcagcacgcagcccaaacc

SEQ ID NO: 186261 - RNA, 66 nt, Homo sapiens
gacaaaagggccaaagaagggagagagggggcagaaacggcggggcaagcagccagacggggaaag

SEQ ID NO: 186262 - RNA, 67 nt, Homo sapiens
ggcgcggccagaacggagccccaaccgcgcgccgggacccacaagagggcagaacgaggcccagacc

SEQ ID NO: 186263 - RNA, 85 nt, Homo sapiens
gcgcgccgcgcgggcgcccgaacagagagaagggcgggagaaaccaaggaaagagaaaagcgggaggcgagggaacagaaggagg

SEQ ID NO: 186264 - RNA, 73 nt, Homo sapiens
caacccaagcgaagaagagcggaaaacaagggcacaacagaagggcaaagacagcccaagacagcagcccgac

SEQ ID NO: 186265 - RNA, 75 nt, Homo sapiens
acaaagccccaaccacgcaacagaaggagggcagcccccccacgcaccaaccgccagcacccaacaaacgaagga

SEQ ID NO: 186266 - RNA, 64 nt, Homo sapiens
ggaaacaagaagacagcgaccccaagaccacaaagcaacaccgggcgcgcacagaagggacaac

SEQ ID NO: 186267 - RNA, 69 nt, Homo sapiens
gacccaggaagagaagaaagaggacaacagacgagcccaaaaggcagagcgaggagagaagaaggaggg

SEQ ID NO: 186268 - RNA, 56 nt, Homo sapiens
gagacggaaagagacccagggcgccaaaaacaggcgaaggggcgccgaaccgagcc

SEQ ID NO: 186269 - RNA, 56 nt, Homo sapiens
caccacgaaaccaccagacaagaaacagacagcgcccacaggcagccgaagaaccc

SEQ ID NO: 186270 - RNA, 58 nt, Homo sapiens
aacccacgacccaacaccacaggagcaaaccaggaccgaccaccccgccagagccgag

SEQ ID NO: 186271 - RNA, 70 nt, Homo sapiens
agcagcaacagcgaagaaggagggagcagagaagagaaaaggaaaagaaaaaaagaggcgagaaagcccc

SEQ ID NO: 186272 - RNA, 77 nt, Homo sapiens
aaaacgcgcaacaagcaggaaaagagagaccaggcggcagagcggccgccaggaagacaagcaggcgccaaggcccc

SEQ ID NO: 186273 - RNA, 81 nt, Homo sapiens
gcccgggcgcgggggcggcggcagggggcggagcgggccccacccaaccagaagccggaacaaccggagaaaaagccgcag

SEQ ID NO: 186274 - RNA, 70 nt, Homo sapiens
gcccgacgcgcgggagaggagcagcgggcgggaggaggccacaagaccccggagagggggaaacagaaag

SEQ ID NO: 186275 - RNA, 107 nt, Homo sapiens
aagaagccaacggagaaccaaggccaagaccagaaccagcccgggaaaggcacggagcgcggacgcccaggagcgggcgccggcggagcgccgcccccagggccccg

SEQ ID NO: 186276 - RNA, 80 nt, Homo sapiens
acgggacccgccgaggccgcggcgccaaaccgaggaaaccacacaacaagaacgcgccagaagacccaccaaaggcacca

SEQ ID NO: 186277 - RNA, 73 nt, Homo sapiens
cccccacccggggagccagagcaagggcgagcccgggagaaacaggacaaacaagacacagacacgccccagc

SEQ ID NO: 186278 - RNA, 65 nt, Homo sapiens
acaacaggcccaggacgagaaaggaacaagccacaacaccaacaagcaaggcaccacccgcaacg

SEQ ID NO: 186279 - RNA, 61 nt, Homo sapiens
ccaaagcccgggcgcggaagaagccaaggagaaggccaccagccacgagcagcgagacaac

SEQ ID NO: 186280 - RNA, 61 nt, Homo sapiens
cgggggcgccagagcaacgagcgagaagaggcgacaccagggcccaaagaacaaccgaaag

SEQ ID NO: 186281 - RNA, 60 nt, Homo sapiens
gcaaggcgccccaaggccagacaaaacggggcaagcgcgagaagagcggcgcccacaacc

SEQ ID NO: 186282 - RNA, 72 nt, Homo sapiens
acgaccagaaacacaggagcagcagaacggagagaaacagcagcagcaaaaaggaaaagaagaaagaaccgc

SEQ ID NO: 186283 - RNA, 88 nt, Homo sapiens
cggcggccgaggacggggacagcgacgacgcggaggcagagaagggaacgcccggcccagccccgggaagcaccgggacacgcaagcc

SEQ ID NO: 186284 - RNA, 66 nt, Homo sapiens
gaagaaaaacgcgggggacacccagccacacgcggagaagaggcagaagacgcaagagagccgcga

SEQ ID NO: 186285 - RNA, 74 nt, Homo sapiens
cgccaccaaaagcagacggaaaacccacggggaagaccacaccccgagggcaacggaacgaaggcaacgaggag

SEQ ID NO: 186286 - RNA, 73 nt, Homo sapiens
acgggagaaaaaggaaaacgcggaaaaccgacacaacaggggcaaaggagcagagaacgacaagccacacgag

SEQ ID NO: 186287 - RNA, 82 nt, Homo sapiens
aggagaaaagccaagaagaccgaacagagacagagagaacggacgcaggccgggaacgggaaacgcgcgccgagaagccacc

SEQ ID NO: 186288 - RNA, 77 nt, Homo sapiens
cgagagcgcggcgcccgaaggccccgcggaggagaaggaggaaggaccaggacacaaggaaaacagaccgaaaagag

SEQ ID NO: 186289 - RNA, 73 nt, Homo sapiens
aggcccacagggagaacagggcagaacgaggggaggaaagcagggcaacagcaggcgggacacggggcgaccc

SEQ ID NO: 186290 - RNA, 70 nt, Homo sapiens
gaagggggaaaaggcagacggacagacccacaacaccaggcgccaggaagaccccccggcacagaaggaa

SEQ ID NO: 186291 - RNA, 74 nt, Homo sapiens
acacagccccagaccagagaagaacaaagcggacagcaacacggccaacagcagccccacgacacgccaagacc

SEQ ID NO: 186292 - RNA, 38 nt, Homo sapiens
cggaccgcagcgccggcgaggaccaaaaaaccaaggac

SEQ ID NO: 186293 - RNA, 53 nt, Homo sapiens
ggaccaagaaccagggaacagccaaaccaggaaaggaaccagaggaaagcagc

SEQ ID NO: 186294 - RNA, 71 nt, Homo sapiens
aagcaaacagaagcgcggccaagcccaaagacaacaggcccccccgccccccgcggagccccgcccagcac

SEQ ID NO: 186295 - RNA, 42 nt, Homo sapiens
gagcagaggaaccaaacaaaggacaacggggggaggcccagg

SEQ ID NO: 186296 - RNA, 55 nt, Homo sapiens
caaaccaggaaaacagggagaagaaggaagaggaaaagaggagggccaaaagaga

SEQ ID NO: 186297 - RNA, 80 nt, Homo sapiens
cggacaggagcgccggaagacagccggacacagagggcgcgggacacgggagacaaaccagcggccagggagaaggacgg

SEQ ID NO: 186298 - RNA, 42 nt, Homo sapiens
ccaaaggcgcgcaaggaggaagcgcgccgagaacgcggaacc

SEQ ID NO: 186299 - RNA, 75 nt, Homo sapiens
cgggggcccgacgcacacgggggcggacaccacaagaagggcgccaggggagaagcagaccgcaccaggcgggac

SEQ ID NO: 186300 - RNA, 83 nt, Homo sapiens
gccgcccgaggcccgcgaccgccgagccgcagccgccccgcggccaacagagccgcaggagcgcgcagcaggagcgcccagcg

SEQ ID NO: 186301 - RNA, 78 nt, Homo sapiens
aaggaccaagaaccagggagcccacccagaggcagggggcgacccgaacccaaaggaggaaacagcggcaagccacag

SEQ ID NO: 186302 - RNA, 72 nt, Homo sapiens
acagccccaacccagaaagcagaggccagagcggagacagacgagcgaagccagcaagcagagaaaaagcag

SEQ ID NO: 186303 - RNA, 80 nt, Homo sapiens
cggcccccccacccgcgggccgcggcgcccggggaaagccgggccccgagggcggaccgagaccaaaggccaaaaaaaac

SEQ ID NO: 186304 - RNA, 67 nt, Homo sapiens
gaagaaagccaacaagaggaagcaggaaaaacaaagaagacccaggcccccgaggagggaacaagcc

SEQ ID NO: 186305 - RNA, 40 nt, Homo sapiens
cagcaagacccccagcgccgaaagcgcaggcaggagaagg

SEQ ID NO: 186306 - RNA, 72 nt, Homo sapiens
cagaggaaggaccccagaaaaggccaaggaaaaggaacagagagagcagaaccgaaacggggaaagaccgaa

SEQ ID NO: 186307 - RNA, 63 nt, Homo sapiens
caagcccagcgaagcaggccggccggcgccacggaagggaccacagaccagcacgccggcgcc

SEQ ID NO: 186308 - RNA, 75 nt, Homo sapiens
cagggcaagaaccaggcccgcccaaggcagagaaacagcacccaggacacccaaagagcggaaccaaagaaaccc

SEQ ID NO: 186309 - RNA, 51 nt, Homo sapiens
ccaaaagccgacaaccccagaaacagggcagcaggagcgacgcccccagga

SEQ ID NO: 186310 - RNA, 72 nt, Homo sapiens
cgaccccgaaagaaagcaggaacacgaacaccaagccccgaagcacacagaaagaaggaacacaagacaagc

SEQ ID NO: 186311 - RNA, 77 nt, Homo sapiens
cgacggcccgcagccggaccccaccggacggcggggccacgggcgccgggaggaacccccgaacgcaaagccaccga

SEQ ID NO: 186312 - RNA, 78 nt, Homo sapiens
gccaggaaaggaccccagaggcaccgaaacagcggaccggaggcggcacagggagaacacagggccccaccgcgcccc

SEQ ID NO: 186313 - RNA, 67 nt, Homo sapiens
aaaaaaaagacaaggaaacgcccgcgggacacggagagcgcaaccaacccacgaccgcaacgcaagc

SEQ ID NO: 186314 - RNA, 69 nt, Homo sapiens
aacccaagcgaagaagagcggaaaacaaggggcccggggcgggaagcgacccagcaaaaagccagcccg

SEQ ID NO: 186315 - RNA, 75 nt, Homo sapiens
gagagaagcccagggaaggaggcagaacaaggaagaaacagcggaaagagcacagccagaagcacgacaaagcga

SEQ ID NO: 186316 - RNA, 80 nt, Homo sapiens
gaaccggagcgccaaacgcccgaaagaagcggacggaggcacaagacacccaccaggagccgcccacacccacaggaagg

SEQ ID NO: 186317 - RNA, 72 nt, Homo sapiens
acccgcaggaaagggaacacgggggccagcccagaacaaagcaggccacggaaggagcacacaaaacaagcc

SEQ ID NO: 186318 - RNA, 59 nt, Homo sapiens
aaaagcgaaagggcacaccacaggggaagagacagcagcgggaagccacggccaacccc

SEQ ID NO: 186319 - RNA, 37 nt, Homo sapiens
agagcccaacagcaaagaacagggcaggaaagggaac

SEQ ID NO: 186320 - RNA, 78 nt, Homo sapiens
cggggggcggacgcgcgcggggcagagcccccgaacagcagcgcagcagccaggccccgcccggggcccgccagggcc

SEQ ID NO: 186321 - RNA, 41 nt, Homo sapiens
aaccccacggagaaccagaggacaagagcgcccaagcggac

SEQ ID NO: 186322 - RNA, 71 nt, Homo sapiens
ggcgcaggccagagagggcccgggaagagagcgaggagacaaggaccggaacggcaaaggaaagcacacca

SEQ ID NO: 186323 - RNA, 66 nt, Homo sapiens
caaccagaccccgagaaaaagaagggaacggggcacagagagagcgaagaagaccgaggaaaggaa

SEQ ID NO: 186324 - RNA, 58 nt, Homo sapiens
gcagcaaagcagcccgaacccagaaacccagagccacacaaccacaaccccaaaagag

SEQ ID NO: 186325 - RNA, 82 nt, Homo sapiens
cccaacaccagcacgcagacccacgggccaggcgccgacacccgccccaaggccaaccagggccaccccacgcagcgcagcg

SEQ ID NO: 186326 - RNA, 71 nt, Homo sapiens
cccacggaaagaggcgaggggagaggccgacacgccaaaaggcagaggaagccggaagacgggaaaggaaa

SEQ ID NO: 186327 - RNA, 63 nt, Homo sapiens
aaccacccggagaggcagggcgcgccccagaccaccggcagggaacagccgagcagaccgagg

SEQ ID NO: 186328 - RNA, 42 nt, Homo sapiens
gaggcggcgggcggaggcggcggagcgagaaaacagaagcca

SEQ ID NO: 186329 - RNA, 126 nt, Homo sapiens
ggcggccgcggcggcgcgcgcgcaggggacaggggcggcgaccggcggcgccgaggaggggaaagggcaaagaaaacaagaacagcgagaaaaggaaagggaaaaacaaaaacaacaagaaaagcg

SEQ ID NO: 186330 - RNA, 56 nt, Homo sapiens
aagacccagacagacagagccccagcaaggaggaaaaccagaggaaagaggggcgc

SEQ ID NO: 186331 - RNA, 66 nt, Homo sapiens
aacccagaaacaagcggccacagcagagcgcaccagcgcaagccacccgaagggcagggaagcaga

SEQ ID NO: 186332 - RNA, 82 nt, Homo sapiens
cccggacgcagagcccgcgcccgcgccggcggcaagaagacggagccggagcacggggacacgacgccacagcaacaagcag

SEQ ID NO: 186333 - RNA, 75 nt, Homo sapiens
caaagaccgccaggcagaacagggaggagcaggagaaggagaccccgggagaagccaccgaaagacacagggagg

SEQ ID NO: 186334 - RNA, 85 nt, Homo sapiens
aaagcagcacaagaggaacagaggggacgaggacacgcagggcaggagagaaccagaccacacaaagcagacacggcgggcccag

SEQ ID NO: 186335 - RNA, 72 nt, Homo sapiens
aaccgccaacaagcaaggaggagacaccacagcacagcacaccagacaagagagggcggcagaaggaacacc

SEQ ID NO: 186336 - RNA, 68 nt, Homo sapiens
caccggaaaaaaagacacaagagccaaagcagcaagaaaacacggcaggggaaaccccagccagcgcc

SEQ ID NO: 186337 - RNA, 85 nt, Homo sapiens
gcgagcgcgagcggcgcgagaaaggaacgaagcccaaaaggcagagacggaccgagacaggagagcaggggcccagccaccccca

SEQ ID NO: 186338 - RNA, 70 nt, Homo sapiens
aggagcacacacaaagaggacccgacaggcaggggcacaccagacagacaggaacaggaccaagaccgag

SEQ ID NO: 186339 - RNA, 68 nt, Homo sapiens
aaaaaggcgaacaagagaaagacggcaagcccgacaaaccaggagcaaggcagacgcagcaaagcaaa

SEQ ID NO: 186340 - RNA, 77 nt, Homo sapiens
accagcgcgccgcccaaggacgcacggaagggccggccccaggcccagggccgcgcacccggccggcgggcgcgcag

SEQ ID NO: 186341 - RNA, 81 nt, Homo sapiens
agcccgccgccccgaaaccaccgcgagcgggagaccaggcccaggaaggaacgaggaagggccagaacggagacggggcgc

SEQ ID NO: 186342 - RNA, 78 nt, Homo sapiens
ggaggaagaggcagaggacccaccgccagccacccacgccagcagagagcgggaccgccagcaccgccgcagcccgcc

SEQ ID NO: 186343 - RNA, 70 nt, Homo sapiens
aaaggaacgaaccagaagagcacaagaccacggaaagaaagacaacaagacacacgacacagaagagaga

SEQ ID NO: 186344 - RNA, 80 nt, Homo sapiens
ccagacggacacgggagggaaagagagcgaggagacggcgaccgacaacgacaccgacccccgaagagcagaagaaacag

SEQ ID NO: 186345 - RNA, 87 nt, Homo sapiens
cagaagaaggcaggcaaagagagaccgaccacagcacggggccgacaccgaagccgaagccaggcagggagaaaaggaggcaggggc

SEQ ID NO: 186346 - RNA, 75 nt, Homo sapiens
gaaaaccagccagacacaaacaggcacggagcgagcagaggaggaggaaacccggaacacgcagaagaagcaaga

SEQ ID NO: 186347 - RNA, 78 nt, Homo sapiens
gcggcggcgcgaaggcggcggcccgcccccgccccccgcgccggcgcagaagacgaccccgacgcaggccaggagccg

SEQ ID NO: 186348 - RNA, 77 nt, Homo sapiens
cagcccccgagggcgggaacagaacacagccgaggaagaacaaaccaaagaacagcgcagaagccagagaaagcgaa

SEQ ID NO: 186349 - RNA, 73 nt, Homo sapiens
cacaggcgacgaggaagcggggggacaccccagggccagccgccagagacagagcaccaggcccagacggcca

SEQ ID NO: 186350 - RNA, 82 nt, Homo sapiens
ccggaccccagagccgagggggcagggccagggcccgcggcccccaaggacggaacacacccgaaaccacccgcgggcgggc

SEQ ID NO: 186351 - RNA, 74 nt, Homo sapiens
cccgaggcacgagcaacaacggagaaaagaagacgacacaggcagaacgggcgaaaaacgaagaaggaagacgc

SEQ ID NO: 186352 - RNA, 57 nt, Homo sapiens
ccgaggcaacgccggggcgcccgaggcggaaggcgcaggcaaacaacaggccgacac

SEQ ID NO: 186353 - RNA, 82 nt, Homo sapiens
aaccggagaagaggggcgcaagccaacgggacccaggggagcgacagccaaagcaacaagcccgaaaacagcccagcggagc

SEQ ID NO: 186354 - RNA, 74 nt, Homo sapiens
aagcggaaagcagaagcgcgcagcaacggcggggacaggcacccaccgcaggcaagaacagcagaaacaacaca

SEQ ID NO: 186355 - RNA, 72 nt, Homo sapiens
gaaagaagaagcagcgaaagggacaacgggaaggagaggcaacaaaggccaggcccgcgcccgcgccagcag

SEQ ID NO: 186356 - RNA, 82 nt, Homo sapiens
cgcacggcaacaccccccagagcgcagcagccgcggcgaggacaacggcgcgccgccagaaggaggaacggcgaagccccaa

SEQ ID NO: 186357 - RNA, 79 nt, Homo sapiens
aggaaagaaaccacaccaagaagggacacacccgacagggccccgggcgcgggagccagccgaagaaaggaaaagagag

SEQ ID NO: 186358 - RNA, 76 nt, Homo sapiens
ccaggggagagcgacccaaacaaaggcggagcccggcacgggcaaacagagcaggcagggaaccgccaaggcagag

SEQ ID NO: 186359 - RNA, 73 nt, Homo sapiens
gcgacgggaacgggagcaaaaccgggaacagagggacagaggccacgacaggcacagacggcgaagacaaaca

SEQ ID NO: 186360 - RNA, 80 nt, Homo sapiens
gggaccgaggaaaagccgcaccaggcgacacaccaaagaaaaaacacaccaagcagaaacggagccaaggggcaggcaag

SEQ ID NO: 186361 - RNA, 80 nt, Homo sapiens
cagggcccggccaccgccaagaccagcaggaagaccgaggagcagggagcaaccacaaggaaaggaaaccaccgaaccga

SEQ ID NO: 186362 - RNA, 79 nt, Homo sapiens
agagaagaaggcgcgcaccggaaaagagccccggaaggcccaagaagcccaccgggaaggaaaagcaggggaacccggc

SEQ ID NO: 186363 - RNA, 68 nt, Homo sapiens
gacgccacagagaacaagcagagagaggagcacggcacccaggcggaggcagggcacgaccagccaag

SEQ ID NO: 186364 - RNA, 88 nt, Homo sapiens
ccggggccggccgcaacagcagaccaagcaccgcggcggacccaggcaagcacggaacaagcgagacggccaggccacacaagcccca

SEQ ID NO: 186365 - RNA, 77 nt, Homo sapiens
aacacgaagccccgggcaccccgggggagcaggaaagggcagggacgccggggcacccaggccggccacggggggac

SEQ ID NO: 186366 - RNA, 67 nt, Homo sapiens
gagagaaaagcaggcccagaaggggaaagaggagcacccacagacgaccgaaggcaccggaacaggc

SEQ ID NO: 186367 - RNA, 66 nt, Homo sapiens
caaagaagaaaacacaaaaacgggaaagggaggccaacagacccaacccagaaggcaccaaacgga

SEQ ID NO: 186368 - RNA, 82 nt, Homo sapiens
cggacccagcgccgcggcgcccgagcggcgggccgcagagggcggagaacggaaaagcaccaggaagcagagaggaccgcag

SEQ ID NO: 186369 - RNA, 72 nt, Homo sapiens
acgaagggcaagaacaaaaacccacagaggaacacaaaaaacaggcgacggggaaacaccaggaggagagcc

SEQ ID NO: 186370 - RNA, 83 nt, Homo sapiens
ggacaaaaccagaagcaggggccgagagggccgacggccagcgagcgcgcacccaggggagagaaagggaagcacagcgaggg

SEQ ID NO: 186371 - RNA, 72 nt, Homo sapiens
gcgcaccaggaagcccgggcccagagcgccccaggcaacccagaaaggcagcacagcaagcgaaggacacca

SEQ ID NO: 186372 - RNA, 88 nt, Homo sapiens
ggagagggcagacggacaagagcgcggaacaggacgccccgagaccgaaggagaagaaggagaaggggaggagaaggcaagccggaaa

SEQ ID NO: 186373 - RNA, 79 nt, Homo sapiens
cgcaggccaccaagaccgggaacaagcaagccccagaggccacaaccaaccccaccaacccccgccagggaggcagacc

SEQ ID NO: 186374 - RNA, 76 nt, Homo sapiens
gcccccgcaacgcccccggcccgcagcccccgccggccgcccaacaccgaacaccggcggagaacggaaaagcacc

SEQ ID NO: 186375 - RNA, 74 nt, Homo sapiens
agagcccccaggaagaccccccgagcagaggaaggggagcgaaaaacgggccccagaaacagggagaaaacaac

SEQ ID NO: 186376 - RNA, 59 nt, Homo sapiens
ggagaaccaggcccacccagggcagaacaaggaccaacaccaaggaccagccaccgaac

SEQ ID NO: 186377 - RNA, 78 nt, Homo sapiens
gcgcgggcggggggacaacaagccacaaccgcccaccaccgaaggaccgacaggagcggacccgcggaggggcgggag

SEQ ID NO: 186378 - RNA, 81 nt, Homo sapiens
caaacccccagagccaggcacaaggagaacacgccgaagagaacaagacgggaagaccaggacaaaccggcgaccacacac

SEQ ID NO: 186379 - RNA, 79 nt, Homo sapiens
gcagagagaccaagcgcacagaaaaacacaagaagacagcccgcacggcaaaaggaaacagcgagacaccaaacagaag

SEQ ID NO: 186380 - RNA, 84 nt, Homo sapiens
gcggccgaggagaagcggcgcggagcgaaggccgccgaaccgccggcagccggcgacgaggacgacggcagacaaggcccaaag

SEQ ID NO: 186381 - RNA, 65 nt, Homo sapiens
cgggcagaagccaaccaacacacaccccggagggagagagaacggggagaagcaacaccagagcc

SEQ ID NO: 186382 - RNA, 68 nt, Homo sapiens
gagcggagcacagcagagaacagaaaccacgggagcgaccagcagcccagcccccaccccgggagcga

SEQ ID NO: 186383 - RNA, 89 nt, Homo sapiens
agacagacgcgcaaaacccaggcggcagcggagccgccgggcgaggcagccgagaaaggcgacgggggcggggccgagaacagccgcag

SEQ ID NO: 186384 - RNA, 42 nt, Homo sapiens
ggagaacaagccaccccagaaagagcgaccaaagcagggcac

SEQ ID NO: 186385 - RNA, 78 nt, Homo sapiens
cgcgacggcccggcgggcagggaacggcagagcgaaacaaacaagagggcgaaccagcacagcaacggacgaaaacag

SEQ ID NO: 186386 - RNA, 70 nt, Homo sapiens
gagcgccggaacgccgaccgaaaccaccgagcccaagaccaaccgcccggaggcgaaggagcgaagaaga

SEQ ID NO: 186387 - RNA, 60 nt, Homo sapiens
agcgaggaacgaccaagcaaaaaccaggggggaccacacgccaaaggcacggggcaagcc

SEQ ID NO: 186388 - RNA, 75 nt, Homo sapiens
aagccaccaacacgacagcaacaagaaaagccgacacaagccccgaaggccaggaacaagagcaaagaccaagag

SEQ ID NO: 186389 - RNA, 79 nt, Homo sapiens
cgccgggaccaacaggggcaagacaagccagaacgagaagcgcaccacaggacccgagccccaaagacagaaaagcccc

SEQ ID NO: 186390 - RNA, 76 nt, Homo sapiens
aaggggccgacaaaagcgcagcaagacggccgcgcggcccgcaggcccaaaggggcacaaaacgccccgggagaga

SEQ ID NO: 186391 - RNA, 74 nt, Homo sapiens
agcaccacgcaggccagccgccacccagaccggaaaggagaaacagcaaacgcagaaagccggacgcgaccgac

SEQ ID NO: 186392 - RNA, 63 nt, Homo sapiens
gaacggcggcaagcacaaggggaaaggcgcaacacacgaaaagacaccaagcagcaagcagga

SEQ ID NO: 186393 - RNA, 79 nt, Homo sapiens
cacacgccgccgcggcgcagccagcccacaagaccaggaaagcgaccggccaagaaacaaaagcaaaacgcccacccca

SEQ ID NO: 186394 - RNA, 77 nt, Homo sapiens
ccccagagaccgggaaggcggaaagagaaaggaaagggcggcaggaagacaggaaaagagaaacaggccccaacgag

SEQ ID NO: 186395 - RNA, 82 nt, Homo sapiens
gccgagcggggcccaacaggcggagagagaggggagccggcccccgaaagaggaaaggccaaagaagagacgaagcaaaggc

SEQ ID NO: 186396 - RNA, 72 nt, Homo sapiens
caagaaacgaaggcagccaaaaagaacacggcaacgaaaagcgacagccaacgggcaggccgaaacggagcc

SEQ ID NO: 186397 - RNA, 88 nt, Homo sapiens
ccagccgacaaggagggaagcggccccagcaccccagcgcgcagggccgccaggggcgccgccaagccaaagccagacccgaaagcag

SEQ ID NO: 186398 - RNA, 77 nt, Homo sapiens
ggaccccgccccccccggcgccagagacaggggacacgaacccgaaacaggaacaccggaccccagaaccagcaaca

SEQ ID NO: 186399 - RNA, 68 nt, Homo sapiens
cgccgacacaccagcgcccaaacgcgaggggaacgcagacccgcgaagcgaagcaccccaggcacgcg

SEQ ID NO: 186400 - RNA, 84 nt, Homo sapiens
gcgccccggcccgcaccggggacaagggccgccgacacgcccacgacagcagcgccagcacgagaaggagaacgaaagagaagc

SEQ ID NO: 186401 - RNA, 64 nt, Homo sapiens
gccccagcaggagcagaccggcagaagaagcaccacacccgccacgggcaagacagggggaaag

SEQ ID NO: 186402 - RNA, 75 nt, Homo sapiens
aagagagaaaaccacggacaagaaagcgccaaaaacaacaccaaaaagccgcaggggccccggagacgggggcag

SEQ ID NO: 186403 - RNA, 81 nt, Homo sapiens
ccgggaacccgggccggccccagccccgcaccggacacagcggaggagaagcgcaggagaaagagcgggccgggaaaacga

SEQ ID NO: 186404 - RNA, 53 nt, Homo sapiens
cccgcccggcggggaaggccgccaggcacagagaaggcaaacgggagggcgag

SEQ ID NO: 186405 - RNA, 76 nt, Homo sapiens
cgaagcccccccaacccaccaccgacgcgagggaagcgccccagccgcccagacgagaagaccaacaccacgcgga

SEQ ID NO: 186406 - RNA, 68 nt, Homo sapiens
ggaaacgaccggcagggagggaaggcaagagccaacccaaaaccaaggagagcccgaccagagaaaag

SEQ ID NO: 186407 - RNA, 65 nt, Homo sapiens
cccagaccaacacacaacaacggcaagcggagaagagcaaggccgaaccgagaggaagggcaaca

SEQ ID NO: 186408 - RNA, 78 nt, Homo sapiens
gggagaggcccagggaagccaacaagagcaaggacggggacacaagaccagccagcccagccacagagacaggccgcc

SEQ ID NO: 186409 - RNA, 77 nt, Homo sapiens
agacccggggccggcccgcaaggcgcccccccagagagccagaaagaaaccgccccggcggaacacagccccaaacg

SEQ ID NO: 186410 - RNA, 74 nt, Homo sapiens
accacccacgagacggaggagacacacagccccagacgggaggaaaaaaggaaggaccgcgacgaacacaacca

SEQ ID NO: 186411 - RNA, 77 nt, Homo sapiens
gagggaaggaagcaaaagaggcccccggccccaagccggcaccaccccagaggcaccacgaagaccccgcccagccc

SEQ ID NO: 186412 - RNA, 78 nt, Homo sapiens
gcgccccgcgcggagggaagggggcccgaccgaggccaaaacagaagaggcaaagcccagccacagcagcagcccagc

SEQ ID NO: 186413 - RNA, 69 nt, Homo sapiens
caagaaaagggcggaaggcagaaagcagagcaggggagcagcaagccgggaaacagcgcgcccagaaag

SEQ ID NO: 186414 - RNA, 53 nt, Homo sapiens
gacaaaagggccaaagaagggagagaggccgggccgaggccacgggcaagccc

SEQ ID NO: 186415 - RNA, 66 nt, Homo sapiens
aaccaccaggacggcccgaggaccggaaccagccagagacccagagcagcagcgaagagaaggccc

SEQ ID NO: 186416 - RNA, 65 nt, Homo sapiens
gccgacccagcccccaggccagaagagaagaacggaccgaagccaaagaacaagagcgcagggac

SEQ ID NO: 186417 - RNA, 79 nt, Homo sapiens
cgggagcgcggggcgggggcgcccgccgcgccgccacgacaagcagaccggaagaccgacggaagaccacaccccgagg

SEQ ID NO: 186418 - RNA, 77 nt, Homo sapiens
gagcgggcccgcgcgccgagggcgaggcggacgcgcggcgcgcagcggcagcccggaagaagaaggaagccccggga

SEQ ID NO: 186419 - RNA, 76 nt, Homo sapiens
ccggacaacagacccgggggagacgccgccaagaaggcacaaagagcacacggaacgccagggaaggaccaggaca

SEQ ID NO: 186420 - RNA, 68 nt, Homo sapiens
ccccagggcggggcagggcaacgcaacggcccgaccaccaaaggagagaaacaagggggagacaggag

SEQ ID NO: 186421 - RNA, 78 nt, Homo sapiens
gaagccggaaacaacccaccaggacagcagggaagaacggaaaccagagaaagaaacgcccccacacaaaagcgagac

SEQ ID NO: 186422 - RNA, 38 nt, Homo sapiens
accgcaccaggcagcccacaggacgacgggggacagaa

SEQ ID NO: 186423 - RNA, 72 nt, Homo sapiens
ccggagcaccggcaaggagccgccgccacgccggcagacagaccccgcgaggcaagacaagaccaggcacac

SEQ ID NO: 186424 - RNA, 63 nt, Homo sapiens
gccgaggagacaggagaaggggcgcacaaaagagcacaaaagcaccaaggcgcacaacagcga

SEQ ID NO: 186425 - RNA, 80 nt, Homo sapiens
gcgaggaggggccccagcagcccccgaaggcccacaggacaggagagaaagacgcgaccaccgcagaggccccagcagcg

SEQ ID NO: 186426 - RNA, 80 nt, Homo sapiens
gcgcccggccgcccaacgccagaacaacggcccaacagcggaggaaacccgggccagcggggacaggagaagcggaaacc

SEQ ID NO: 186427 - RNA, 72 nt, Homo sapiens
cacccgcgcggccggcgccggaagcccccaggcaacgcagcaaagaagcagaggagccgcagcaccagcccc

SEQ ID NO: 186428 - RNA, 81 nt, Homo sapiens
gacccgcggccggccgcccacgcgagcggcccgagacccgagaggccgcccgccccccaagaaaggccagccgaagaaaag

SEQ ID NO: 186429 - RNA, 66 nt, Homo sapiens
gaagaagaacgacccgcccggggcagcagcccagaaccacgcacagggcccgggaaggccggagga

SEQ ID NO: 186430 - RNA, 59 nt, Homo sapiens
cccacacccaagaaagcccgagacaacaggcacaaagagagaaggaacacccacagggc

SEQ ID NO: 186431 - RNA, 86 nt, Homo sapiens
agaaaccagcagaaccgcgggacaagaacagggccacagaaaagggacacagacgccaggcagccggggcagaggaagagaagccc

SEQ ID NO: 186432 - RNA, 79 nt, Homo sapiens
ccacaaaagaaagaaaccgcgaggcagggaaagaagagggcgaagacaggacggcccaggcagacacggaggaggagga

SEQ ID NO: 186433 - RNA, 76 nt, Homo sapiens
acacgccaccaagccaacagccggaagccgccaaaacgagaccaaaagggaaaagagagagaaagaaagcccagag

SEQ ID NO: 186434 - RNA, 77 nt, Homo sapiens
ggagacgagaccgaaccggcaccgcacaccggaccaggaaacggaggcgggaccaaagggaggggaaacaagaacca

SEQ ID NO: 186435 - RNA, 78 nt, Homo sapiens
cagaaaccacccacccaaggaagacccacgccacaccaccccccagggcccggagaacaacagagaagcacagacaga

SEQ ID NO: 186436 - RNA, 66 nt, Homo sapiens
ggcgcccagcaaaacaagggaccgcaaccgcacgaaggagagcccgaagcccaaacacacaggcac

SEQ ID NO: 186437 - RNA, 74 nt, Homo sapiens
cggcccccggggacaggagaaggggcccagcgcacaggaagcacacacacccgcacgagaccccggcccgcacc

SEQ ID NO: 186438 - RNA, 37 nt, Homo sapiens
acccgcaccaagagaagacccgcccaggagacagcca

SEQ ID NO: 186439 - RNA, 82 nt, Homo sapiens
gcgacagcagccaggagcagagcgacagcggcgagcagaacacggcgagcggaaagcccaagcgcaaaaaaaaggccccaac

SEQ ID NO: 186440 - RNA, 84 nt, Homo sapiens
gcccgcgggccccacagccaagccccggacccccgggagacgacaccggggccccgcccaccccaggggaggcccaggagcgag

SEQ ID NO: 186441 - RNA, 73 nt, Homo sapiens
gaaaaaagcgcggaagagcagcgcgcagacaggacaaccagcggaggcacgacgccaaaccaaaaagcaaggg

SEQ ID NO: 186442 - RNA, 78 nt, Homo sapiens
caaagcaaaaacagaagcagaagcacagaccgcgaacagagagcacagggagagcgagggagcaggacggaagagggg

SEQ ID NO: 186443 - RNA, 56 nt, Homo sapiens
aacaacgaggcacccaaaaggcagaaccagagaccacagaagaaggaagggccacc

SEQ ID NO: 186444 - RNA, 73 nt, Homo sapiens
ccaagaggagcgagcggacccgcgagggcccccaggcaccggcgccccccaccaccagcaccggagcccgggc

SEQ ID NO: 186445 - RNA, 77 nt, Homo sapiens
gacccgccacaagcaacgcgggaagagaaggacggggaggacgcacgacgcgcggcacgggaacgcagccggcacaa

SEQ ID NO: 186446 - RNA, 79 nt, Homo sapiens
cggcggccccaccagcagacgcagccgagacaccagcccgaaacaccaccaagaaaagcaccgaagggaagagacgagg

SEQ ID NO: 186447 - RNA, 79 nt, Homo sapiens
agggaagcaaagcagccaacaccagaagaagggacaaaagacaaggacagacacaacggcaacaagcggacaagaaggg

SEQ ID NO: 186448 - RNA, 80 nt, Homo sapiens
caggcaggacgacagcagcagcagcacgccccaggagaggagccaagcccaacgggacgggaaaacggccacagccaacg

SEQ ID NO: 186449 - RNA, 78 nt, Homo sapiens
gcggcgaggaggagggccggcaggcgggcgcgcggcagcaggcggaaagggggggcggaagcaagaaagcagggagga

SEQ ID NO: 186450 - RNA, 43 nt, Homo sapiens
gccaaaggaggagggcccggcagaccaaaccggaccacccaaa

SEQ ID NO: 186451 - RNA, 86 nt, Homo sapiens
caaacagaccacgaacgagcgcagagacggccagcaggccgaagaacaggagaaggaagaacaaagaaagacagaggaaaggagaa

SEQ ID NO: 186452 - RNA, 76 nt, Homo sapiens
aagaccagaagggaggagagacagaggcagacaaggccacccccaggagaccccgagaaggccccaagcagacaga

SEQ ID NO: 186453 - RNA, 82 nt, Homo sapiens
cccggccccggcccacaggggggggcaaacccgagagaacggacaacaggcacaaagagagaaggaacacccacagggcaga

SEQ ID NO: 186454 - RNA, 76 nt, Homo sapiens
aggggagcgggcgcgcgcgaccgcgccccggagcgcccagaagaaacgccaaaaagaagaaacacggccccacccc

SEQ ID NO: 186455 - RNA, 82 nt, Homo sapiens
cgggggcccggagcacagcccaccaagacccccacgagcggcgcccagcacgagcagccaagacaagcaaacccaggaacac

SEQ ID NO: 186456 - RNA, 47 nt, Homo sapiens
ccggaaaacaccccagaggaaccagacaccaacccggacaccaaaca

SEQ ID NO: 186457 - RNA, 73 nt, Homo sapiens
aaagacaaaaggagacgagaagaagacaagagaaagaacaagacccgaagagaagccaggcagaggagagagc

SEQ ID NO: 186458 - RNA, 81 nt, Homo sapiens
ccggacaccggaagcgggaaaggggagcgacagaaaagcagcacaacccccggagaaccgaagggacacagcagcggcccc

SEQ ID NO: 186459 - RNA, 61 nt, Homo sapiens
caggaaccgggaccgccagcgcaggaggaaacgaaaagagacagcagggcaaaacgggcca

SEQ ID NO: 186460 - RNA, 56 nt, Homo sapiens
ccggccggcgcgaagacgcgggggccgccccccgaaagcgaggaggccgggcgcac

SEQ ID NO: 186461 - RNA, 68 nt, Homo sapiens
cgaaacgcacgagaagagcagcaaggcgaaccggcgcggagcggccgggccacaggaggaccgggccc

SEQ ID NO: 186462 - RNA, 70 nt, Homo sapiens
acagcccccccagaaccaggccggcggcagccgcggaacacccacagcgccacacgagaaccaccacccc

SEQ ID NO: 186463 - RNA, 74 nt, Homo sapiens
ggaacccaacccagacggccagcccagacggcccacgagagccgcgccgcgccgccgcgcagccccaacaccac

SEQ ID NO: 186464 - RNA, 80 nt, Homo sapiens
agcccgcagaggcgcggagcgggcagccgccgccaccccgcggccgcacccccgccccaggccagcacccgcccgaggac

SEQ ID NO: 186465 - RNA, 73 nt, Homo sapiens
agggccaacaaggaaagaaagggcagaagcaaaacaggacgacccgaggaacagagagccaggacaaaaccag

SEQ ID NO: 186466 - RNA, 72 nt, Homo sapiens
ggccagcgccggaaaccaacaagggaaaagccgcggaaacccacaggaagccgaaaaagcagggcagcacgg

SEQ ID NO: 186467 - RNA, 79 nt, Homo sapiens
gcgcccgcaggccccgagcagaagacagagcggggcgagcacagaagccaccccaggaccacggcgcccagagagacga

SEQ ID NO: 186468 - RNA, 94 nt, Homo sapiens
cacgcagaggaacaaaaaaaggagagccggcagccccgcccgcaaagagcgaaagccagggggcgaaacaaaacaaaaaggagcaaaaggagaa

SEQ ID NO: 186469 - RNA, 79 nt, Homo sapiens
gcacaggaaccgccccgcagcagccgacccggcacaacaaaaaagaccggccagccacagagcagagaaagccggacca

SEQ ID NO: 186470 - RNA, 77 nt, Homo sapiens
ccgggccgccccagggcaaagcccaccagcaggcaagcccacaggccaaggggcaaaggagcagagaacgacaagcc

SEQ ID NO: 186471 - RNA, 71 nt, Homo sapiens
cgagaagaagcccaccgaaaacaagggagaagagacccacaaaacgggaaaccagccagaggagcaggccg

SEQ ID NO: 186472 - RNA, 77 nt, Homo sapiens
acaggcggagaggcagcaacagggacacgggagacgggccaaccgaccggccagagaaggagaacaagaggaagcac

SEQ ID NO: 186473 - RNA, 85 nt, Homo sapiens
caccgcccgggcccgaggaggcagccaagccgagccgccacccggcgaagggcaaagaagggggaacgcacggaaaaccacagcc

SEQ ID NO: 186474 - RNA, 48 nt, Homo sapiens
aagcaacgcacacaacagcagcagacaacagcagaaaggaagacacag

SEQ ID NO: 186475 - RNA, 78 nt, Homo sapiens
gcaggcccacagcgccacagaaccgcccaaaaaggcaaagaaaccacgagcgcaagccccggggcagagacacaggac

SEQ ID NO: 186476 - RNA, 74 nt, Homo sapiens
cccagaaaggaggacaacgggacccagaagaggacacgcccaccaagaaagaaccggaaaggggaccgggccag

SEQ ID NO: 186477 - RNA, 74 nt, Homo sapiens
aaaagaaagacggaagcgcaggaagaccgaacgaggcgcgacacaccagcggagcgggggaacccccccgggca

SEQ ID NO: 186478 - RNA, 75 nt, Homo sapiens
cacggccacggcaacgagcggggcaaccacgcgagacgccaccaggccagagagaccggaaggccagacacaacg

SEQ ID NO: 186479 - RNA, 60 nt, Homo sapiens
ggaagaggggacaaagccgcccacccccagcggcacaggcccagcaagggggacccaaga

SEQ ID NO: 186480 - RNA, 73 nt, Homo sapiens
caacaccccccaaacgcacgcccgaagaagcacgaccacaggacagcccacaaccaagaccaccagaaagccc

SEQ ID NO: 186481 - RNA, 81 nt, Homo sapiens
gcagcagcgaccccacaggcagcgcccgggcacggggacaagggccagcaccgggaaccccaagaggaacagcagggaagg

SEQ ID NO: 186482 - RNA, 49 nt, Homo sapiens
gccgggcgcaacagaggggccgcgcgacagagaacccgcaacacaaacc

SEQ ID NO: 186483 - RNA, 62 nt, Homo sapiens
cgacccacgcagaggcgaagacggggagccacgaggagccggagagaaacacaagccagagg

SEQ ID NO: 186484 - RNA, 83 nt, Homo sapiens
aagaggcgcggccggaggaaaccaagacagcccaaacgccccacgaccagaagccaagacaagaagcggagaagcgagagaaa

SEQ ID NO: 186485 - RNA, 67 nt, Homo sapiens
aaaacaggaacagagcgagggaggagagagggagagccaaagaaggaaacaggacacaaggagggcc

SEQ ID NO: 186486 - RNA, 82 nt, Homo sapiens
aggagccagaggcgccagccgcgaaggggcggcgcgcgccgggcgccggagcacccgacagagcccagacaccagaacgcaa

SEQ ID NO: 186487 - RNA, 72 nt, Homo sapiens
caagcggacagaacagacgggacccccagccaaaggcaaaggagaggagccaagcccaacgggacgggaaaa

SEQ ID NO: 186488 - RNA, 99 nt, Homo sapiens
gcggagaagaaggcggggggcgggggaggcgagcgcgccgcccggagccgcgcacacgacggccagcccccaggaaagagaaaacagcaggaggaagaa

SEQ ID NO: 186489 - RNA, 73 nt, Homo sapiens
aagggcaacaaagagaagaaacgaggcagagaggaagagacccacgaggcacacagccggaagggcagagcgg

SEQ ID NO: 186490 - RNA, 98 nt, Homo sapiens
cccacccacggaagaggaaggaacaaaaggcccggaccccccggacgacggggcgggaccggcgccaccgcaggaacgcgaagggaagaaaaaacaag

SEQ ID NO: 186491 - RNA, 82 nt, Homo sapiens
gaggccccagcggaccgaacagggagagaacgccgagccgcgccgcagccccgccgccgagaagcccgcccgcgcgggaagg

SEQ ID NO: 186492 - RNA, 71 nt, Homo sapiens
gccagccgaaaaacccaacacgagaaacaaagaagcacaggccaacccagcacagacgaccaccgagggca

SEQ ID NO: 186493 - RNA, 67 nt, Homo sapiens
aagagaaggaagagcaagaagacacagaagcgggaccgcgaaaacaggaagacggaggacaaaaggg

SEQ ID NO: 186494 - RNA, 88 nt, Homo sapiens
gccacggcccacaggacagcaagccacagaagcaggaggaagagcgcaggcgccggaagaagagagcggcggcagcaagaagaaagag

SEQ ID NO: 186495 - RNA, 72 nt, Homo sapiens
gacacgggccgcgcgaaaaaggaccaaagggaggggaaacaagaaccagacaggcacaggcgaggggcggaa

SEQ ID NO: 186496 - RNA, 40 nt, Homo sapiens
gaggagaggaggaaaggacaaccagcggcgggagggacca

SEQ ID NO: 186497 - RNA, 69 nt, Homo sapiens
caagagaccccaaggcacaccaaagacccagagccgcgcaacgcgaccagcaggggggacacaggacaa

SEQ ID NO: 186498 - RNA, 80 nt, Homo sapiens
gagggagagaaccagcaccgggacgcacagagaccggaagaccaagcaggagaaccgaccgaagcgagagaaaacgccag

SEQ ID NO: 186499 - RNA, 94 nt, Homo sapiens
cacgaggggaagccccgacaccaggggacacccagaagcggcgccgccggcaggaagccccaacagcgggcacccggcaggcagcaagacaaag

SEQ ID NO: 186500 - RNA, 85 nt, Homo sapiens
gcgcggaggcggcgagggcgagccgcgccgggaccagggcagggaccccggaaccgaagggcgacaaagagaccgcgcggaggag

SEQ ID NO: 186501 - RNA, 64 nt, Homo sapiens
ggaccagaaaggaacggcaagacaacaaaaccagggggaaggccccgggcagccgagcgccagg

SEQ ID NO: 186502 - RNA, 44 nt, Homo sapiens
ccgcgcccgcgccccaggcccggagagaagacacggcaaggaga

SEQ ID NO: 186503 - RNA, 80 nt, Homo sapiens
gaagaggagggcccagaagaaaaaggagcagccaaaccaaggaacagggaaacgcacgggccagaaggcgagcccgcaac

SEQ ID NO: 186504 - RNA, 66 nt, Homo sapiens
aaaagacgaagggaaaaaagcagagcccaggagaaaccggacgcgacggggacagaagagacgagg

SEQ ID NO: 186505 - RNA, 87 nt, Homo sapiens
gagcgcgccgcccgaggccaggggagcggacccgagccgcaagcagcgcggccaagccacgccaacgccagaagggaggaaaacaca

SEQ ID NO: 186506 - RNA, 62 nt, Homo sapiens
ggagaaggaccaagaaccaggaaaaaagcagagagaacacaagccaagccgagacacagcca

SEQ ID NO: 186507 - RNA, 63 nt, Homo sapiens
ggaaagccacgcgcggggagcagcccgcacccggggccccggcaaacggggacagcgccgacc

SEQ ID NO: 186508 - RNA, 81 nt, Homo sapiens
accgaaccaagcaccgggagcccgccgccccgaaaccaccgcgagcgggacacagaagaacgcagcccggggagcagcacc

SEQ ID NO: 186509 - RNA, 75 nt, Homo sapiens
ccggccagacagccacaaccagggggcaaggcggcccggcacgcacacgggcagaagagcccgaggcgggaccgg

SEQ ID NO: 186510 - RNA, 109 nt, Homo sapiens
cgggcgaggggaaaccaacgcaaagcacagggcccccccccggaggaggaccccccaggaaccagggcagagggccccccgcccccaccccacccggccaggcggcacc

SEQ ID NO: 186511 - RNA, 86 nt, Homo sapiens
agaacagcgcccgcgaaagggaacagaaggccaagaggaacagccaggggacccacccgcccaacagccccaccacagagccggcc

SEQ ID NO: 186512 - RNA, 55 nt, Homo sapiens
gggcgggcaccggggccgggggccaggcgcaccccggacagacgaaacaaggaag

SEQ ID NO: 186513 - RNA, 59 nt, Homo sapiens
ggacgccggagaggcaccggaccgggaccgggggaacagaaagcaacgaggccgcaaag

SEQ ID NO: 186514 - RNA, 69 nt, Homo sapiens
ccgggccacgcaaaacccgaaacgagaccgcgccggaacccgcgccggagccccgcagcggcggcacgg

SEQ ID NO: 186515 - RNA, 85 nt, Homo sapiens
cagccagggcgccagaagaaaacggcgagaggggcgagaacgccacgcgggccggcgaaagcgggagggagacgggccgcgcacc

SEQ ID NO: 186516 - RNA, 50 nt, Homo sapiens
ggggccaccgagaaccccacagcgaaggaaaaggacacccagagcaacaa

SEQ ID NO: 186517 - RNA, 71 nt, Homo sapiens
acccgaagcgggcgcgcgcacggcaggacggagggagagcaccaggagcaccagggagcaggacccagccg

SEQ ID NO: 186518 - RNA, 43 nt, Homo sapiens
ccccagaccgacccggggaagagacgggcgccgcccaggaaca

SEQ ID NO: 186519 - RNA, 44 nt, Homo sapiens
ccggaggcagagcggcgccagcggacccacaaaccgggagacca

SEQ ID NO: 186520 - RNA, 72 nt, Homo sapiens
ggcagcaaagagggaacaggcaaaagcagaccggaaaacccaccggcaagaccacacccgaggggagcccag

SEQ ID NO: 186521 - RNA, 48 nt, Homo sapiens
gacccgcccacagggcacccccagaacacacaccaaaagggacgcaac

SEQ ID NO: 186522 - RNA, 81 nt, Homo sapiens
cgggaggacagcggagaaaaaggggaccaggaccccagccgcaaaggaacgccacaaagaggagggcaaagcagaaaagcc

SEQ ID NO: 186523 - RNA, 72 nt, Homo sapiens
ggccccaacgggagcgagggaggccgagaagaagaagccccccaccccacccaggacgaagagacgagagca

SEQ ID NO: 186524 - RNA, 79 nt, Homo sapiens
gaacaagacgacaccgccagcaccgaccaccgaggcggagggggagaacacccagagcagcgagaagggaggaaaaaac

SEQ ID NO: 186525 - RNA, 84 nt, Homo sapiens
ccgcgccgcgcccaaccgcccccccccagaacgcgggaaacgggagacgagagagaaaaaaaagaggaagcagaagaaaaccag

SEQ ID NO: 186526 - RNA, 86 nt, Homo sapiens
cgaggagcgcgcagcggaggggcaggaaggaagcagccaccccgccaggccccccgcccgccgcccccggaggaggacgagagccg

SEQ ID NO: 186527 - RNA, 85 nt, Homo sapiens
gccccccccgccacgagccggggacgacaagcgcccacgaggagacgcggaggacagcccgcaggcaaaggaggcacaagagagg

SEQ ID NO: 186528 - RNA, 72 nt, Homo sapiens
cgagccggccaaaaggaggcgacaagagacccaagcgagccccgagggagacccccgcagagaagaaaaggg

SEQ ID NO: 186529 - RNA, 73 nt, Homo sapiens
gcaagaaggcccggacacagcaaaccgggccacagggccccggaagaggaacccccccaagcgcggggcagga

SEQ ID NO: 186530 - RNA, 61 nt, Homo sapiens
ggcaggaaccaccaggacagagcaaccagaaaacggggagggaccagaagaagccgaagga

SEQ ID NO: 186531 - RNA, 45 nt, Homo sapiens
gaggagcgggcagcaagcggaaacgaccagagcccgcagggagga

SEQ ID NO: 186532 - RNA, 77 nt, Homo sapiens
gaacgaagggacaagacccgccagaacagagaggcggccaaggaaagggccaggagagcgaggaaccggccagacac

SEQ ID NO: 186533 - RNA, 68 nt, Homo sapiens
cagacggggaaaaccacccaccgagaccaggcaggcacaacaccgggaaaagccgcccccagacagcg

SEQ ID NO: 186534 - RNA, 85 nt, Homo sapiens
gcgaagcggccgagcaggcgagcgaacgacggccgggcccgggaggagcaggggcagaggggagaacccagccgggaccaagcac

SEQ ID NO: 186535 - RNA, 81 nt, Homo sapiens
ggggcggggaccccgcacgacaccgggccgcaggccgccggagacccgggggagaggagccaaggccgccgcccgagacac

SEQ ID NO: 186536 - RNA, 88 nt, Homo sapiens
gcggcgcgccgggcccacgcgcggcgcgcgggcgagaacaaccggcagccagagaggagaagggcgccccgcacgacccagaccccgc

SEQ ID NO: 186537 - RNA, 85 nt, Homo sapiens
gagagcgccacccgggacacagcgccaccccgagcagcggggaagcgggcggaaaacaccccaaaagccaaaagggaaaggaaaa

SEQ ID NO: 186538 - RNA, 83 nt, Homo sapiens
cacggaccacacagcgcgggagccacgcagaggacgccggaacacccggaagccgagaaaggcaccagacccggaggagcagc

SEQ ID NO: 186539 - RNA, 70 nt, Homo sapiens
cggccgggcggccccgccacccacagcaccaggacaaaagaagggcagcacaaaggaaagccccaaaccc

SEQ ID NO: 186540 - RNA, 58 nt, Homo sapiens
cagcaggacacgcacgccagaacacaaagccaaggccgccgaggggagcagagaccac

SEQ ID NO: 186541 - RNA, 113 nt, Homo sapiens
ccggacccccccaacaaccaagaaaccgggaacaagaggcggccaagcagggggcaaggacgaagccccaggacccggaagagagggaaagagagaggggagagagagaagcc

SEQ ID NO: 186542 - RNA, 56 nt, Homo sapiens
aagcacccggaggaggaagaagaaggaagccaaagaaggcagcagaaaagagacac

SEQ ID NO: 186543 - RNA, 74 nt, Homo sapiens
gaagggacgacggaccgaaaagggcccggccaggccccaccgccacaagcaggggaacaccgccaaccccaagg

SEQ ID NO: 186544 - RNA, 34 nt, Homo sapiens
cacgccagcggccaaggaaggcgcagccaggcag

SEQ ID NO: 186545 - RNA, 61 nt, Homo sapiens
gagcaaccagacagaccagggcccaagcaagacagaacgcagaagggcaagcacaaggaag

SEQ ID NO: 186546 - RNA, 55 nt, Homo sapiens
ccgaggcgagacggaaagacagagcgcggcacgagcaccagagaggggcccaggc

SEQ ID NO: 186547 - RNA, 74 nt, Homo sapiens
cgagggagcgccgacagcgacacccagcggcagcccgacacaacccagggacacacagcaacgaagcaggggag

SEQ ID NO: 186548 - RNA, 71 nt, Homo sapiens
ggaaaaaccacccgggacggccaggggggggccacgcgaacccagcacgacaggcgagcgagggagggacg

SEQ ID NO: 186549 - RNA, 70 nt, Homo sapiens
cgccccgacggggaggcaccggagcccgaaggaggggccaccacccgacagggggagcagcggaggaagc

SEQ ID NO: 186550 - RNA, 65 nt, Homo sapiens
ccggacccgccaccaccaaaaaaccaccccccagaagaccagggaacagaggcaaaaagggcaag

SEQ ID NO: 186551 - RNA, 58 nt, Homo sapiens
gagcccaggcagcccagcccgcccccagaaaccaggagcagaaggcaagaaagggaga

SEQ ID NO: 186552 - RNA, 73 nt, Homo sapiens
accgccggggacaccaccagcaacgcacacggcgccacacgaggccacgaggcggcgcggggggagaacgcag

SEQ ID NO: 186553 - RNA, 80 nt, Homo sapiens
ccgagagagagacggcccggccagccagggaacagcccacccaacaagacaccggacaaggaccgagaagaagggaacag

SEQ ID NO: 186554 - RNA, 74 nt, Homo sapiens
accgccaaccacgggcgaggaggcgccgcgcagggacgaacagcggggacgccccagcagaccgcccaggagag

SEQ ID NO: 186555 - RNA, 79 nt, Homo sapiens
aggccgcccgggacccccccaccgcgggaggagacccagcggcgccgcggagggaccccagcaacaccaaaaagagacc

SEQ ID NO: 186556 - RNA, 66 nt, Homo sapiens
agacagccggaagcaaggcagaagaggccagcggcacaccacacacaggcagcgccagggggcaag

SEQ ID NO: 186557 - RNA, 76 nt, Homo sapiens
aaggaaaaaaaaggaggaaccacagaagaaagaaccaagaaggcaggcggccacagagggaggccccagagaaggc

SEQ ID NO: 186558 - RNA, 73 nt, Homo sapiens
caagaagaggaaaggggaagaaccacagaaaagcaggcagacagacaggcaacaggaaacagagacacaagca

SEQ ID NO: 186559 - RNA, 79 nt, Homo sapiens
ggcggcagcggcggggcggggcgagcagaggacccggcgggcggcccgcgggcagccaagaagagagcgggcccagagc

SEQ ID NO: 186560 - RNA, 55 nt, Homo sapiens
cacgcgacaccacaggcacaacgggggcaagaaaccagccaccggacaaagaggc

SEQ ID NO: 186561 - RNA, 67 nt, Homo sapiens
gaaagccaagacaaaccccaggcgggggaggaggaggggacgaggcagaaacgcacgaagccggaag

SEQ ID NO: 186562 - RNA, 70 nt, Homo sapiens
ccgacccgagagcccacccccaacgcgacggaaaggcacgaaagccaggcccacacgggccaacacgcaa

SEQ ID NO: 186563 - RNA, 76 nt, Homo sapiens
ggagagaaaggaggaagacccaccgagcaaagccaagcaaacgaagaggaggaaggcaaagcaacgcgaggaaagc

SEQ ID NO: 186564 - RNA, 73 nt, Homo sapiens
cgcggggggcgagccgccgcgccccaggccgcagccccgcgcggcgccccgcgcaggaggggaaagcaggacc

SEQ ID NO: 186565 - RNA, 80 nt, Homo sapiens
gcggagcgggcggaccgaagagccacagacagcccaaggcggaaaagcgaaggaagccacaagcacagcccacacaaacc

SEQ ID NO: 186566 - RNA, 81 nt, Homo sapiens
ccccagagaggggagccggcgaggacaaaaccgaaggaggggcgaaccgaccaagaacaacacccagagggccaggagaag

SEQ ID NO: 186567 - RNA, 76 nt, Homo sapiens
ggacaggcacgccacacacaggcaccggcacggaccaccccaacaccgggggagaaccgggcccaccagggacacg

SEQ ID NO: 186568 - RNA, 36 nt, Homo sapiens
gcagccagcaggacccccgcgaccaggacaccccag

SEQ ID NO: 186569 - RNA, 73 nt, Homo sapiens
agacaaaagggccaaagaagggagagaggggacccccacgagcagacaagcaccgaaaggcaaacaaccagaa

SEQ ID NO: 186570 - RNA, 75 nt, Homo sapiens
caaccgcaacagcagcacaaaaaacccgcagcaacagaccagacagacaagagaagagaggaaaagaaacccggg

SEQ ID NO: 186571 - RNA, 57 nt, Homo sapiens
gccgcccacaccccaccaggagcgaaagcaggagaaacacagcaacagccgaaaaag

SEQ ID NO: 186572 - RNA, 74 nt, Homo sapiens
cacacagcacaacacaacacgccccgaagacccacaccaggaccacgacgcgcccgagcagggcacacggcccg

SEQ ID NO: 186573 - RNA, 75 nt, Homo sapiens
caaaaagaagggagaaaaaaggaccagagccagacacgaaggggggacacaccaccgggaacaagccgccgggcc

SEQ ID NO: 186574 - RNA, 76 nt, Homo sapiens
caacaggcggcccagcgggccgcgcgcggacgcaagcagcaacacggcaagaagacagaagcgccccagaaaaggc

SEQ ID NO: 186575 - RNA, 90 nt, Homo sapiens
gagacagcagccaaacccccaggagagaagagacgaggaggaggggagaccgcggcaggacacgaggacagcaacggcgcacaacacgag

SEQ ID NO: 186576 - RNA, 70 nt, Homo sapiens
aaggaccaagaaccagggcacagaacgaacagagcagcgaagaacaccggacagaggaagacgcaggagc

SEQ ID NO: 186577 - RNA, 73 nt, Homo sapiens
ggagggaaagaaacggagggacgaggcaagccaaggcgcccccaaagagcagaaggaacaaagggacagaggc

SEQ ID NO: 186578 - RNA, 73 nt, Homo sapiens
ggcgcgcgccgccccaggccgcaagacccagcgcccaaccgcccggccggagcgggcagggcacacaaccggg

SEQ ID NO: 186579 - RNA, 64 nt, Homo sapiens
ccaggcgacgcccccaagaagacgagagcaccacaaggccaaggaggccgccaagaacgagcag

SEQ ID NO: 186580 - RNA, 74 nt, Homo sapiens
gagcgaccaggacacagaaaccagaggagaaggcagagggggcgagggaggaaagggggcaaaacgacgaagaa

SEQ ID NO: 186581 - RNA, 83 nt, Homo sapiens
ccagaacaagaaaggcaagaaagcgcgagccgggccaagggccagaagcacgggcggcacggaaacaaacggcgggaggccca

SEQ ID NO: 186582 - RNA, 72 nt, Homo sapiens
ggagcggccacgcagacaaaagcaggcggacaccgaccgcaggaaggaggaggaggagggagccaggcagaa

SEQ ID NO: 186583 - RNA, 66 nt, Homo sapiens
agaggggaaaaaaaaacgagaaacaaaacaaaacccgcacccaaacaaaccggaaagcaaagacag

SEQ ID NO: 186584 - RNA, 69 nt, Homo sapiens
acccagccggggggcacagccggcccaagcaggagcagcaacacgccggcgcccaaacccaaggcgaag

SEQ ID NO: 186585 - RNA, 69 nt, Homo sapiens
gcgccgcagggcgcccggccgccaggccagcgcggagccggagcgaggcgggggaggcagcagaagccc

SEQ ID NO: 186586 - RNA, 77 nt, Homo sapiens
cacaacagaccaaagggacgaaagagaagaccaggggcaggcagaggccaagaaacaagcccaggggggccacaaag

SEQ ID NO: 186587 - RNA, 68 nt, Homo sapiens
cggagagccgacccgacacgagccaagaaaagaacgcaagaaccacccggcaccaccacccccagccg

SEQ ID NO: 186588 - RNA, 37 nt, Homo sapiens
gacgaacgcaagagcccccagaagcaacggaggcggg

SEQ ID NO: 186589 - RNA, 79 nt, Homo sapiens
gaccacggagagcaggcagcgggggggcgagcccgaaacgaggcgggagcagcacagagggacggaaacagacgacgac

SEQ ID NO: 186590 - RNA, 77 nt, Homo sapiens
aacagcccaagaggccgaccgagacgggcggagaggagaaggacggcccggcacacacagacggccaacagggccgg

SEQ ID NO: 186591 - RNA, 37 nt, Homo sapiens
cacagagcagcagccccacaagaacccgggggggcgc

SEQ ID NO: 186592 - RNA, 37 nt, Homo sapiens
gcacaacaagcgcggaccggaggacgaccggacaaga

SEQ ID NO: 186593 - RNA, 76 nt, Homo sapiens
cccagagggcgggaacagagccggcggcacgacagcaaaagccagggcacagggccgcaccccagcggaggcaaaa

SEQ ID NO: 186594 - RNA, 73 nt, Homo sapiens
gaggccacccagcccaccaaacacgccggaaaccccgcccacagcacgaggcggcgggccagagaagcagacg

SEQ ID NO: 186595 - RNA, 74 nt, Homo sapiens
acccagggaggacaaagcacagggcacaaagcccccagggaaaagcacagggccaggaagcagagggacagcca

SEQ ID NO: 186596 - RNA, 76 nt, Homo sapiens
cgggccaagaaacggagaaaccggaggacccgccgcaagggagaacaacacccacagcggcaaagcgccgcaaccg

SEQ ID NO: 186597 - RNA, 73 nt, Homo sapiens
cccaagagcacagaccagcagccgccaaagacaaaagaagaccgaggaagcaacgccggaggacggccaccca

SEQ ID NO: 186598 - RNA, 78 nt, Homo sapiens
cgcgccggacggcgggccccgggaccgggcgggaacccgcggggagcgggacacgaacggagcccaaggggggcaagg

SEQ ID NO: 186599 - RNA, 66 nt, Homo sapiens
aagccaaagcacagcgaagccgaagaagaaaacacggggccaggaggagaaacagaaaaagccaag

SEQ ID NO: 186600 - RNA, 79 nt, Homo sapiens
gcaacggggcaacaaggaacggaaaaaacaggaagaagcacccaggagaggagcagagaaacgcagcaacgccagcgaa

SEQ ID NO: 186601 - RNA, 86 nt, Homo sapiens
gaagcaccaacgggagacacaggaaaccaggggcaacaccggaggacagcaacccccaccgaacaaagaaggaaaaagcgcagcag

SEQ ID NO: 186602 - RNA, 70 nt, Homo sapiens
ggagacgaggcacagaagcaagaaaagcaaaaaacagcaaccaagagggagagcccgaccagagaaaagg

SEQ ID NO: 186603 - RNA, 80 nt, Homo sapiens
gaaacaggccggggcacagcacagcgccggcgcaagggaccaagaaaggcccagggaccaaagcccggacaaggcccgag

SEQ ID NO: 186604 - RNA, 87 nt, Homo sapiens
gacgaagagagaggagacgagacgagaggaagagacccgggaagaaggaaggccacccggcaaaccacagccggaaccaaggcgaga

SEQ ID NO: 186605 - RNA, 84 nt, Homo sapiens
cgccgcccccccacccgagcagagccgccgaggagaaaacacccaggacaggaagggggagcaacagacaagcccgaaaggaac

SEQ ID NO: 186606 - RNA, 72 nt, Homo sapiens
ggcaggggaaggaaacgcaggccccacccaaagacaagggaggcgaggacggacaaaaggaaacggacggga

SEQ ID NO: 186607 - RNA, 76 nt, Homo sapiens
cgcgggcggaagacaggccacccagcggggagcacggcgagcagccaggccaggagaggcgaccacagcacacaag

SEQ ID NO: 186608 - RNA, 73 nt, Homo sapiens
gaacaggaaaaaggaacaccagcaggaaaaaagagcggcagaaggccaaacggccgagcaggcgagcgaagag

SEQ ID NO: 186609 - RNA, 52 nt, Homo sapiens
acggagacaaaacagccaaaccaggggagaagcacgacagcagcaaggcgac

SEQ ID NO: 186610 - RNA, 71 nt, Homo sapiens
cccccaaaagaaaagccaggaagcgcagccaaccccgaaggaaaagaaggaggccagcgggacacacaaag

SEQ ID NO: 186611 - RNA, 64 nt, Homo sapiens
cgacacgccgcagccgagcgggcccgccgccggagcgaggaccagggcggagaacggaaaagca

SEQ ID NO: 186612 - RNA, 57 nt, Homo sapiens
caagcacagagcacaccaaccaaaaggcagcaaaggcgagcaaaacaagagaacaca

SEQ ID NO: 186613 - RNA, 62 nt, Homo sapiens
ggaggaaacccgacagcaaaggccccaaccagggaaagaaggagaagggacacagccccaaa

SEQ ID NO: 186614 - RNA, 53 nt, Homo sapiens
agagagacccagacggggcgaagagaaggaacggggaccacaaaaacacagag

SEQ ID NO: 186615 - RNA, 72 nt, Homo sapiens
cggggcggacgcggcacgggcacaaagccacggaggagagcagcacacagacgaccaggagaagaacgggac

SEQ ID NO: 186616 - RNA, 71 nt, Homo sapiens
ggcggcggagcccaggggcggagggcaggcacgagacggggccggcacagagggccagaagaccgagcaac

SEQ ID NO: 186617 - RNA, 82 nt, Homo sapiens
gaaggaggaccaggacaggggcgagcacgcgccaaacagaaggaccccacaaaaagaccgacaccgcaagaccaggccgacg

SEQ ID NO: 186618 - RNA, 75 nt, Homo sapiens
ggcgaaagacacgccccagaccaaggaagaacaccgagagagaagaaggcacagaaaaccagaaacaaacagaag

SEQ ID NO: 186619 - RNA, 88 nt, Homo sapiens
gcgcgcgcccccaggggcggccgcggcgccgggcgccgagggaaacacacagaagaccgcagaccaagggagcagggcgggggcacca

SEQ ID NO: 186620 - RNA, 75 nt, Homo sapiens
cacccgcccccgcgggcgccgggccaggacggagagacggggcaccagagccaggaggccaacccgacccggacc

SEQ ID NO: 186621 - RNA, 72 nt, Homo sapiens
gccggcaccaggagcaccagcccgggacccacaggcggagaagaggggaacagcgccgaagccaagaagcgc

SEQ ID NO: 186622 - RNA, 71 nt, Homo sapiens
cagaaagagaggagaagggaacaaccgaaaaaccgacggcagggcaaaccagacgagagagaagagggaaa

SEQ ID NO: 186623 - RNA, 118 nt, Homo sapiens
gaggagcccaccacaacaagaagagaaaaaaggcgccagcaaacagcccgcaggaaggagagggaccgacagcacgaggaggagagaagaaaagcggcccgagacaacaagggcaggg

SEQ ID NO: 186624 - RNA, 83 nt, Homo sapiens
gcagaaaagaaaaggccaaacccacccacagcccgcagacacaaggagaaccccagaggcgaagacgacgagaagagacagga

SEQ ID NO: 186625 - RNA, 77 nt, Homo sapiens
caccaaagggacagaaccaaagcgaacaccccccagccacggcgccagaaaccagaagggacgagaacgcaaaccga

SEQ ID NO: 186626 - RNA, 85 nt, Homo sapiens
gggcgagccgggagcgcgacggcccggcgggcagggagaccggaaagaagggagaccgcggggaaaagagaaaggccaaccaaag

SEQ ID NO: 186627 - RNA, 80 nt, Homo sapiens
agaagacgcaaaacgaggaaaagagagccgacagaagagccccaggacggaaaaggcgcacacgacccggagaaccccac

SEQ ID NO: 186628 - RNA, 70 nt, Homo sapiens
cacgccgcgagaagcacgcacagggccgcgggaagaccagccccaaagaaacgacagggagaaaaagcaa

SEQ ID NO: 186629 - RNA, 70 nt, Homo sapiens
ccggcaagaccgcaggccccacaccacccccggcgcggcaaaggggacgcccaacgaagagaccaccgcc

SEQ ID NO: 186630 - RNA, 41 nt, Homo sapiens
cacaggcaggaggcaggccaaggaaaaccaacggcccggag

SEQ ID NO: 186631 - RNA, 68 nt, Homo sapiens
cggaggaccgcccacagagaagccgcacccggagacaggacaacaacaccccacacaaagcggcaaga

SEQ ID NO: 186632 - RNA, 65 nt, Homo sapiens
acccagagcaaagagacgccggcaaacaacacccaacagcccaaagcaaaggagcaacagcccag

SEQ ID NO: 186633 - RNA, 126 nt, Homo sapiens
cgccgagagccagagagagcggacgacagaacccggccgacccggaccaacaaccccaaggggcaaagaaaaaggagagaaaaagaggcaaaacaacaagaagaaaagagaaaaaagagagcgaag

SEQ ID NO: 186634 - RNA, 77 nt, Homo sapiens
aacagaccgaagaagaccaggcacacggcccaggggcccaaacaggaagagagaagggcacagaccaagacaacgaa

SEQ ID NO: 186635 - RNA, 77 nt, Homo sapiens
gcgcgcgccgcgcaccgcgcgcggacgcgggagacgccagcgagcgggaggagcccgcggagagacgccggggcccg

SEQ ID NO: 186636 - RNA, 77 nt, Homo sapiens
agagcgcggaacaggacgccccgaggaggcacccgagcagagcacagaagaagcggcgggagaccaggagcaccggg

SEQ ID NO: 186637 - RNA, 76 nt, Homo sapiens
ggagcccacggcagaacccggccgagggcacggccagcccgacgccaggggagaagccccccgcggggaagaaccg

SEQ ID NO: 186638 - RNA, 81 nt, Homo sapiens
ggggggaggcccgcagcgcagggggacgacacgggcaggggggagggagggcaccacaaaggaaaccccccggagccccaa

SEQ ID NO: 186639 - RNA, 81 nt, Homo sapiens
aggagcaacaccaccggacccgggcaaggacacagaggacacccgcccgggagccaggccgcaccccagaagccaaccaaa

SEQ ID NO: 186640 - RNA, 77 nt, Homo sapiens
ggagaaaagaaaacgccccgggacccaaggaaccaccacagaaaagggggaccaacgaaggcacaccgcccgagcaa

SEQ ID NO: 186641 - RNA, 62 nt, Homo sapiens
gcagccgccgacccccccacaaggacagagcgggagccaccagcgccaaagggaagccagga

SEQ ID NO: 186642 - RNA, 83 nt, Homo sapiens
cgggccggggcgcggaccgggccaggcgcgaaggccaggaaaagcaccaaaggaccaaggaagaacggcagccaagacaggga

SEQ ID NO: 186643 - RNA, 81 nt, Homo sapiens
gagccccagagccccaagggaaaacggaaagcgcaggcaggagaaggacagcagagccacaagggacgcaaaaagaagggg

SEQ ID NO: 186644 - RNA, 67 nt, Homo sapiens
cagcccaaacgggcagcgaaggaaaaagcggggaaggggggcaaaaaaaagaagcaagcgaagcacc

SEQ ID NO: 186645 - RNA, 85 nt, Homo sapiens
ggcggcggcggcggaggaggaagaggcacgcgagggggcgcgaggggaacggaggccagagcgcggcggagggcggcgcgcggcc

SEQ ID NO: 186646 - RNA, 41 nt, Homo sapiens
acgccaggccaccacaccggagacgccggcccaccagccag

SEQ ID NO: 186647 - RNA, 31 nt, Homo sapiens
acacagcggagaaagaagagacggggcacgg

SEQ ID NO: 186648 - RNA, 89 nt, Homo sapiens
cgcagaccgagacccggacagggcaggaaacagggagcgcgacccagcgaccagccacacgcccaccggggcgcccagccgcagcccga

SEQ ID NO: 186649 - RNA, 89 nt, Homo sapiens
cggccgcgcgggccgggaggggacggccgccggagccgcgaggccaaacccacccagggaacccccccaccccccgacggggcgaggcc

SEQ ID NO: 186650 - RNA, 86 nt, Homo sapiens
gcgaggcggaggccgaggacccggggccgaggagcgggaagaggcggggggaccgagacccgacgagagagacgaggggaagagag

SEQ ID NO: 186651 - RNA, 78 nt, Homo sapiens
cgccaccccagccccaccaggagacgacgcagccagagcagcaagaggccaaggggacgacggccacgggcccgggaa

SEQ ID NO: 186652 - RNA, 55 nt, Homo sapiens
ccacgaaccaaaagggacggacaaaggaacaggaccagagcggggacgggaaaga

SEQ ID NO: 186653 - RNA, 76 nt, Homo sapiens
aaaacagaacggaagagggaaggcacgaggaagagacaacaccagagggccccagggccggcccagggagaacgca

SEQ ID NO: 186654 - RNA, 70 nt, Homo sapiens
gacacagccacaagaaggcagcaaaccaagcaaccaggaaagcaccccacgaacaaccacaggaagagac

SEQ ID NO: 186655 - RNA, 51 nt, Homo sapiens
cacccgaaggccaggccccaacacgcggaaggcgaccgagaacacagagaa

SEQ ID NO: 186656 - RNA, 64 nt, Homo sapiens
gcgccaggagggagcgggcagaagccaaaacaggaaagacgaaagacgacaggaggcacgagac

SEQ ID NO: 186657 - RNA, 78 nt, Homo sapiens
cggaaccggcgccgcgcgcgcggaacagggccgccaggggcccccccaggccaggagggacagccaacaagcgacgcg

SEQ ID NO: 186658 - RNA, 66 nt, Homo sapiens
ccgaaagaaagacaacccgaaagaacaccgaaccagcagcacggccagaccaaacaaacgaagagg

SEQ ID NO: 186659 - RNA, 79 nt, Homo sapiens
ggaaacacccaccccgcgaggcccccgggcccgggaaaacacacggccagaacaccagcaggaaaaaagagcggcagaa

SEQ ID NO: 186660 - RNA, 75 nt, Homo sapiens
ggaggaagcggccgaaagggggcgcggccagacgacacccaaccgggccagaagcaggcgccaacagaaccgccc

SEQ ID NO: 186661 - RNA, 82 nt, Homo sapiens
agaaaaacaaacacacgcaaaggagaaaggaaccgacaggagccgaccccacggcacaggccggacgccccacaaggggaga

SEQ ID NO: 186662 - RNA, 75 nt, Homo sapiens
aagaccgaacagaaggaacgacgcggaccagaagccagagcgaggacgccggcagggggagaggcaccagcaaca

SEQ ID NO: 186663 - RNA, 74 nt, Homo sapiens
agcacaggccagcggcccaggagcagaccagaagggagagaccaggacacagagaacaggacgccggcccaggc

SEQ ID NO: 186664 - RNA, 81 nt, Homo sapiens
aacggaggaccacaacccagccacgagacaagacacaaggagggggcagagcgagggcaaacagaaacgcgccacaaccca

SEQ ID NO: 186665 - RNA, 68 nt, Homo sapiens
ggggccaacccgagagaaacggggcggaagcggggcggccgagcaaccggcaagggagcaccaagcca

SEQ ID NO: 186666 - RNA, 60 nt, Homo sapiens
gacgccccgacggccagaagcgacccagacggcggggaaaaacgcaggaccaaaagaagg

SEQ ID NO: 186667 - RNA, 71 nt, Homo sapiens
agcccgacgccagcagagacgagaacccaggagaaacgagagggacagcaaggaagacgccagagagcggc

SEQ ID NO: 186668 - RNA, 75 nt, Homo sapiens
cgccaagaggggagcgcccccagcgcaggacgccaaaccaccggccaggaggcacaggacgcgacgccagacgag

SEQ ID NO: 186669 - RNA, 74 nt, Homo sapiens
cccgcaggagaagcgaaaagaaacccaagaagagaaccgcaaccgcagagccgggccaaggcagggcccacccc

SEQ ID NO: 186670 - RNA, 59 nt, Homo sapiens
gccacccagcacagagaagaagggcccaaaggcagcgcaaagcggagcccagcggccga

SEQ ID NO: 186671 - RNA, 77 nt, Homo sapiens
ggcacccaggaccacaaaagaagaaagggacaaaacgcagccaccacagcagcgcccccccgcgggcccagcgcaac

SEQ ID NO: 186672 - RNA, 89 nt, Homo sapiens
gccccgcgacgcgcccggcccggagcccccagcgcagcggccgcgggaagcacggagaaaagagggaagaaggagaggaggaggacaaa

SEQ ID NO: 186673 - RNA, 65 nt, Homo sapiens
gcgaggagaaccaacggcccgaaagaggcagaaaaccgcgcgggagggggcaagccaccaggagg

SEQ ID NO: 186674 - RNA, 80 nt, Homo sapiens
cgccgccgccgccgcgccgcgccgcgccgcaccccgagcgaccgggacaaggagggacgaagaggcggacccccggagga

SEQ ID NO: 186675 - RNA, 80 nt, Homo sapiens
ccggagggggaagaaaacaaccaacagagcccgcagagcaccaggcccaccggaaaggcagagagacgaagagagaagca

SEQ ID NO: 186676 - RNA, 57 nt, Homo sapiens
ggaaccggagaagagagagaaagaccaaggacccaaagacaggaccacgcaccagca

SEQ ID NO: 186677 - RNA, 75 nt, Homo sapiens
cgggcccgcgagaagcaagcggaacccgaggccaccacgcagagcaaccccgcaggacaccccggaaaaaccaac

SEQ ID NO: 186678 - RNA, 69 nt, Homo sapiens
cgccgccgccccagggccgcaacacgggcccgcagcgcaggcacgccagccaaagggcggcccccgaca

SEQ ID NO: 186679 - RNA, 74 nt, Homo sapiens
ggggccgccaccacacgaaacagggcaaggggcggaggcagcaaagacaggccgggggccagcaaggcagaaaa

SEQ ID NO: 186680 - RNA, 80 nt, Homo sapiens
ggagaccagccgagcggcggcccggggcagcccggcgggcgaacccccgagggcgggaaacggcaagagaccagaggacc

SEQ ID NO: 186681 - RNA, 51 nt, Homo sapiens
gccgacccaagacgggcgaacagaggccgaagggcaagagggcacagaaga

SEQ ID NO: 186682 - RNA, 68 nt, Homo sapiens
cgagagacaagagacacccccgccgccagagaagcagccgacacgagcggcaaaaacagcgaaaggag

SEQ ID NO: 186683 - RNA, 66 nt, Homo sapiens
cgaaagcaaaagacagccggacacaagagggcaagaaaggcgcgacgggccgaaaagggacgaagg

SEQ ID NO: 186684 - RNA, 79 nt, Homo sapiens
gcgaagcgacgagccgcgaggaggaccaagaacgcccagcccgcgggcaccggcagaaaggaggaggaaaacaccccca

SEQ ID NO: 186685 - RNA, 71 nt, Homo sapiens
gagagaggggacagacgagagaacgagacccccgcacggcacaaaacgggccacgagaaccaggccaggaa

SEQ ID NO: 186686 - RNA, 31 nt, Homo sapiens
cggacgcgacggggaaaggccacacgacagc

SEQ ID NO: 186687 - RNA, 78 nt, Homo sapiens
gcgaacagcaggaggagacccccccagaccgcacccgagcaggagggggagccacgcgcccccagcgcccggccccgc

SEQ ID NO: 186688 - RNA, 52 nt, Homo sapiens
ggaagaaggcgaggcaccggaacagacgcaggaaggaaccccgagcccccgg

SEQ ID NO: 186689 - RNA, 66 nt, Homo sapiens
ggaacaacgcaaacagcaagaacaggacagagcaacaacggcacaccagaagggacaagacaaagc

SEQ ID NO: 186690 - RNA, 85 nt, Homo sapiens
acaaaagggccaaagaagggagagagggcagaccacggccccggagaccgggcggaagaaaaagcaagagacgaagcgcccacaa

SEQ ID NO: 186691 - RNA, 69 nt, Homo sapiens
agaggagggagaacacagaaaccggccccagggacggaacggacaacgaggggggaccaccaaacggcc

SEQ ID NO: 186692 - RNA, 64 nt, Homo sapiens
gcggccgagaggcgcggggagaggaacaacggacaggaacagggcacaaccaaggagggccagc

SEQ ID NO: 186693 - RNA, 65 nt, Homo sapiens
aggacaggcccccgcgccaaaagggcccaagggcaggaacaggaaccacagcgagcaggagcacg

SEQ ID NO: 186694 - RNA, 68 nt, Homo sapiens
cgccaggccagccgggacggacgccgagcccggggcgcgacggcgcagcaaagaaggccaagaagacg

SEQ ID NO: 186695 - RNA, 79 nt, Homo sapiens
cccgggccagcgagggcgcgaaagaaggagacgcaacaggggaccagcaaaggagcagggcacaaaggaaaaaaaccac

SEQ ID NO: 186696 - RNA, 76 nt, Homo sapiens
ccacccaaagcggccgggagcgcgccccccaccccgagacagacccacagcggggccgggccccgaccacccagag

SEQ ID NO: 186697 - RNA, 82 nt, Homo sapiens
agagcgagcagccaaaggaggagggcccggcaggccaccccagagaagaggacgagagacaagacaaccaaaagggaaaccc

SEQ ID NO: 186698 - RNA, 66 nt, Homo sapiens
aggcaaggaaaaagaaagaagccaccaggaagagcccaaggcgaagaggacagcagcggacggccg

SEQ ID NO: 186699 - RNA, 57 nt, Homo sapiens
aagaacgagcgccaaaaagacacgcccaacacaccccaggaggaacagaaaaacgaa

SEQ ID NO: 186700 - RNA, 54 nt, Homo sapiens
gcgaaaggcggcagccccccggggccccgcggcacggcaaaacacaagacaagc

SEQ ID NO: 186701 - RNA, 75 nt, Homo sapiens
cagaagaaagaagcaaccaaggcaaggaacccagacagcaaggaacccaaacaagaacgaggaagaagaggagga

SEQ ID NO: 186702 - RNA, 80 nt, Homo sapiens
aaaccaaaacaaacaaaccaacaaggcaccaagacgcaggggggaaccacagcgacaagccacaaacccccccacgacac

SEQ ID NO: 186703 - RNA, 122 nt, Homo sapiens
gaggagacacgaagcgacgcagagccagaagggaggcagggaacacgcggaacacagaagaggcagagaagaagcggaggcaagcagcgagcaaggaagccaggagcgggaacgcggaagcg

SEQ ID NO: 186704 - RNA, 67 nt, Homo sapiens
gaagaagggaagaagcggagagggaccagaagcagcagccccagaagccccgaagccggggcacccc

SEQ ID NO: 186705 - RNA, 76 nt, Homo sapiens
aggcgcgaccggacgacgagaacccaacaccgagccccagcaggaggggcccgagagaagagaagagcggaggaac

SEQ ID NO: 186706 - RNA, 75 nt, Homo sapiens
agggcgggggcccgccgccaagggagacaaccgacccagcaccacacacggaagcagacgcgcagaggacgaccc

SEQ ID NO: 186707 - RNA, 55 nt, Homo sapiens
cagcgcaacaccaagcacggcaagcgagcaggcaccccccaaccaggcacaaggc

SEQ ID NO: 186708 - RNA, 77 nt, Homo sapiens
acacggacccccggaaggacagccaacacaacaaggaggagacaaagccaaagaaacgccaaccgcccaaaaaccca

SEQ ID NO: 186709 - RNA, 57 nt, Homo sapiens
caaggcacaacgccacgaggcacaccccagcaagccgaacgacacaaccccaacggg

SEQ ID NO: 186710 - RNA, 78 nt, Homo sapiens
cgagaagaaggggaggggacagacggggccacccccacacgcccccagccaaacagagaaagagagacgagcgcacag

SEQ ID NO: 186711 - RNA, 63 nt, Homo sapiens
ccagcccggcgcacggcccagccaccagagaaacggcggagaacaagaggacaacaaacgcag

SEQ ID NO: 186712 - RNA, 76 nt, Homo sapiens
cgcagagggacgaaagaagcgcagcggaggaaggcgaggacagaaggaagggagcgcgccaaaggaccaagaagag

SEQ ID NO: 186713 - RNA, 56 nt, Homo sapiens
caaaagacaaccgcccagaaacggccaggacacgcccgcaaaacccacgaaaagag

SEQ ID NO: 186714 - RNA, 75 nt, Homo sapiens
ccagccacccccagccacagccagaggaggcggagaaggaccgcacaacggagaaggaaagagcagcgaaacaaa

SEQ ID NO: 186715 - RNA, 54 nt, Homo sapiens
accccagacccagaacagagaggacagagacgaggcgggcccaagggcaccacc

SEQ ID NO: 186716 - RNA, 81 nt, Homo sapiens
cccacccgagagccgcgagcgcccggccgaacccgcgaggaaaagcccagcggcccgccaggcccggccaccccccacgag

SEQ ID NO: 186717 - RNA, 63 nt, Homo sapiens
ggccccaccccggccacgggacggcggcgcggagaaggcagaaggagcacaacaggcagacag

SEQ ID NO: 186718 - RNA, 72 nt, Homo sapiens
cgcacgcagaagggcaacaaaagaaacagaccaaaggcagcggacaacaaccaaggcaaccagagcaaggca

SEQ ID NO: 186719 - RNA, 79 nt, Homo sapiens
ccagccccgcggcgcccgggcccgggcggcggcccaccgcccacggacgccgcgcgcgacaaggccccaacaccaaaca

SEQ ID NO: 186720 - RNA, 77 nt, Homo sapiens
agacccagcaagccgcccaaaccgacccaaagagaccggcaaggaagaaagagggccacggacagaggcgcagcaga

SEQ ID NO: 186721 - RNA, 69 nt, Homo sapiens
gaccaagaaccagcgggcgcggaacagaggaaagagagccacgaaccacggcacgacagcgggaaaagg

SEQ ID NO: 186722 - RNA, 79 nt, Homo sapiens
ccgaacccggcacaagcagcgggaaggcacgcaacccgacggagcagcagcgccgggaaggaaagcacacaggacagaa

SEQ ID NO: 186723 - RNA, 32 nt, Homo sapiens
caaacagagacgaaagaacacccacaacacaa

SEQ ID NO: 186724 - RNA, 75 nt, Homo sapiens
cgcacagcggggaccacccacgacccgagcgaggaggcccgggcacggcgacggacgcggacggggcggaggcag

SEQ ID NO: 186725 - RNA, 40 nt, Homo sapiens
caggcacagacaaccagaaaccggaaggcgaaacagcgcg

SEQ ID NO: 186726 - RNA, 59 nt, Homo sapiens
agaaagcacaaagcaggagaccccccccagagcaccgaacccagaccagacgcgaaccc

SEQ ID NO: 186727 - RNA, 74 nt, Homo sapiens
gacgcgccagcacaccccgaccgcgccagaccgcacaggggccgacagaaaaagaagaggaggacagggggggc

SEQ ID NO: 186728 - RNA, 73 nt, Homo sapiens
cccagagcaggagcggagaccaccagccgaccagagaggagacccaccagcagggaccagcccagaagaaaac

SEQ ID NO: 186729 - RNA, 55 nt, Homo sapiens
gcggagacggcgagcgcggcgcgccgagaaaggccgcaggaagccggggcaggcc

SEQ ID NO: 186730 - RNA, 79 nt, Homo sapiens
ggagagaaaaacggaaacacgacagaagcagggcgaaccagagaaaacggcaaggaagcagcccacgagaaaaggaaga

SEQ ID NO: 186731 - RNA, 70 nt, Homo sapiens
gaaaaccacagcacagagacaagagagcagcagggacaacgacgagaaaggccccaacgagcaaccgaga

SEQ ID NO: 186732 - RNA, 74 nt, Homo sapiens
cacagcccggagagagggccaaggaccgcgcagcacagagaaggaggcagcagaaaagaagagcaaagaaagca

SEQ ID NO: 186733 - RNA, 77 nt, Homo sapiens
gcagcggaccagccagcggacccgaccaggagggagcggaaaacggggcccgggccggagccccggagcagggagcg

SEQ ID NO: 186734 - RNA, 67 nt, Homo sapiens
ggcagcggaccccagagccagagcacacggaaacaggacccaaaaaacagagcacgcgaccagcgag

SEQ ID NO: 186735 - RNA, 79 nt, Homo sapiens
ccagccccggaagccagcaggcagaaccccagaaacgaagagaagcaaaagaacaaacagccccccagaaaggacacgc

SEQ ID NO: 186736 - RNA, 85 nt, Homo sapiens
ccggaccagcccagaaggcagcggcggcccaggccagcacccgcagacccaaagacaggaccacgcaccagcagagaaggaaagc

SEQ ID NO: 186737 - RNA, 78 nt, Homo sapiens
ccagcgaacagcgcgaggcggcggcagcgagccgggcccaccaggccgcgaagcggagaccgacgcggaaaaaaagac

SEQ ID NO: 186738 - RNA, 76 nt, Homo sapiens
gcaaccacacagaaagagcaaaagacggacggaaccacaaacaaggcgcagagaacaccagaagcagccgaaacga

SEQ ID NO: 186739 - RNA, 69 nt, Homo sapiens
agccgggcagccaggacagggcaaccaggcgggaccgcggccaagaagaggaggagcaccgcacagcac

SEQ ID NO: 186740 - RNA, 74 nt, Homo sapiens
aaaagccaaaacgaagcaggccggagaagcgaaaccacaacacccaaaagcaaggaagaccacggacgaccgac

SEQ ID NO: 186741 - RNA, 53 nt, Homo sapiens
cgcgaacacccacagagggagcgcaggggaaggcgggcaacacaacaaggcgc

SEQ ID NO: 186742 - RNA, 58 nt, Homo sapiens
aaagcggggcacaaaaagacacaacagaaagaggcgcggccgaacccagcgagaaacc

SEQ ID NO: 186743 - RNA, 83 nt, Homo sapiens
gcgcccacggccccgccagcaaggcggcgcgcccaggaggcgccaggcgcggagcggacccggccgcgcaaggccggcggccg

SEQ ID NO: 186744 - RNA, 75 nt, Homo sapiens
aagaagcaacaaaagccaacagacccggggcgacccaggggcagggaagggagggggggccaggcccagggggcc

SEQ ID NO: 186745 - RNA, 72 nt, Homo sapiens
gagccaacgcacccccaacaggcgcacgcggacacgaaaagagcggcccgggagggaacaaagaggaacagg

SEQ ID NO: 186746 - RNA, 81 nt, Homo sapiens
ccaaagaaaagcagaacgcaaacccccaggacagaccaaccgaagcgcgggaagcagagcagcagcgcggaagcaagcaga

SEQ ID NO: 186747 - RNA, 76 nt, Homo sapiens
aacagagaaaaaacgccacccaaaggcggccgccacgggacaggcagagcccaggaccagccgccaagagaggcga

SEQ ID NO: 186748 - RNA, 77 nt, Homo sapiens
cgcgcagcccgcccgcccggcgaccagcaaggccacaccaccacaggaggcaagaaccgcacccaccccagaccagc

SEQ ID NO: 186749 - RNA, 75 nt, Homo sapiens
gaaacgcagaagccggagaggcccaaagcaagaaaaacaaagaggaggccaagaacggaaacgagaggagaaacc

SEQ ID NO: 186750 - RNA, 78 nt, Homo sapiens
gagagaaagagacccaagagaggaccgaagaggcaaagagcgcgaaacgaaagaaacccagaaacaaccaaggccaga

SEQ ID NO: 186751 - RNA, 81 nt, Homo sapiens
gccacaggagaagccagggagcagggggaagcggaggagcccacgcagcaagggcgggagaggaggcagagcggaggacga

SEQ ID NO: 186752 - RNA, 78 nt, Homo sapiens
ccgggaggacagggcaccacaacaacaagccacagggccggagaggggaaccagcagaagcacaagccagcggcaaga

SEQ ID NO: 186753 - RNA, 83 nt, Homo sapiens
agagaccacaaaagcaccaggaccagacagccaccaggaccaaccccagcgcggaacgaggaaggcgggaagcgaaaagaaag

SEQ ID NO: 186754 - RNA, 71 nt, Homo sapiens
cgagagccgcaccgccaacccccgagcaagacggggacgaaaggggagagacgggagagccggggacaaac

SEQ ID NO: 186755 - RNA, 88 nt, Homo sapiens
gaaagacagccaccaaggagaggagcccaagaggcacgcaccccacaaaaaaaaacaccgcgcacccacgcaacggaccgaggaaagg

SEQ ID NO: 186756 - RNA, 79 nt, Homo sapiens
agaccaccgggagagagggaaaaaacaaccccgccgggccaggcgaccgcagccccagagggaacagacgcacaagcgg

SEQ ID NO: 186757 - RNA, 74 nt, Homo sapiens
gggcgcacggccgcacagcgcgcgagacaccgcacgcaaggagcgcgaggaggggcaaagagaaccaggagacc

SEQ ID NO: 186758 - RNA, 71 nt, Homo sapiens
aaaggaaaggggcgaaggggcgccgaaccgagcccgaagggaagggccggcgggccaacacaagaaccaga

SEQ ID NO: 186759 - RNA, 78 nt, Homo sapiens
gccccgccgccccgccgggaacgccgcagaagaccaacccgagagaaaggacacaacccacccagcgcacagagacgg

SEQ ID NO: 186760 - RNA, 78 nt, Homo sapiens
ccaggggaccagagaggacggcaccagccaggaggaccaccgcacagccaaggaggaagcaggaaagaccacggccca

SEQ ID NO: 186761 - RNA, 73 nt, Homo sapiens
agcacgaaacgcccaaagagaacccaaaggagaaaaagaccgagaaccggcccacggcagacacagcaggcca

SEQ ID NO: 186762 - RNA, 49 nt, Homo sapiens
gacccacagccagcaacaccggggaccgaacaaaaccaaaccacagaca

SEQ ID NO: 186763 - RNA, 83 nt, Homo sapiens
caggcgcagacgcgcgggcgggaagaggcggcgggcaaaccacaggaaaccacgcgagcagggaaagcaacccagaccagaga

SEQ ID NO: 186764 - RNA, 70 nt, Homo sapiens
aaaagaccacggaagagacgcaagagaagaggagcacccacgggagaccggggggcaagaaaaggaagaa

SEQ ID NO: 186765 - RNA, 85 nt, Homo sapiens
gccccgcgcggcccggagcgcgcgcggccccgccccgccccggcccggcccgccgggcccgcagggacaagcagaccggaagacc

SEQ ID NO: 186766 - RNA, 75 nt, Homo sapiens
accaaaacaccgggccgcagccaggacgagccacaggagcccagcaaccggcaacagggccgcccaggaccagag

SEQ ID NO: 186767 - RNA, 76 nt, Homo sapiens
cagaaccgagcaccgccggcgcaacccacggggcgggagccgggaagacaaaaggcccgccggcgacagcgaccag

SEQ ID NO: 186768 - RNA, 67 nt, Homo sapiens
acgacgggcagcaaaggaacacagacagagcagaaagaccccagaagaaaggcggacaggaggacca

SEQ ID NO: 186769 - RNA, 78 nt, Homo sapiens
cgcggccccgcccccgccggcgcgcccgcgcggcgcggggaccgcggcccggaaggagggccccggagcagccacacc

SEQ ID NO: 186770 - RNA, 91 nt, Homo sapiens
ccgccgcccgccccggcacacgcgcagccccggccccggcccgccggagaaacagggcggagaacggaaaagcaccaggaagcagagagga

SEQ ID NO: 186771 - RNA, 77 nt, Homo sapiens
caacggggacacgcacgagagaaacaccagacgggacaaagcacgcagagaacgcagcaggcaaggaaaaaccagcc

SEQ ID NO: 186772 - RNA, 74 nt, Homo sapiens
gaacacagaaacccgccccggaaagccaaggacacgcaggacgaagaaggaggagagcccagaagaaaccaaag

SEQ ID NO: 186773 - RNA, 79 nt, Homo sapiens
acggaaacacaagcgccaaggcaggggcaggaaccagcaggccacgcggaacagggccaacagagaaccaggacgaaag

SEQ ID NO: 186774 - RNA, 46 nt, Homo sapiens
ccggcaaccgagggacccgcgccagaaaggagacacggcgcgccgc

SEQ ID NO: 186775 - RNA, 80 nt, Homo sapiens
cccgacgcggaccccagaccaagacgaggggacaacgaaggaggcaagcaacaaagggacaaaaacgacaagcaggaagc

SEQ ID NO: 186776 - RNA, 71 nt, Homo sapiens
cgcgaaagcaggaaagggcaaaagcggcaaagggaaaaaggcggaggaggggcagggggaggagagcagcc

SEQ ID NO: 186777 - RNA, 84 nt, Homo sapiens
ggaaggaagaaacgcgccggacaaggagaacaccggaagggagaaggccccaggggaagccacgaccacacagcaaggcagagg

SEQ ID NO: 186778 - RNA, 52 nt, Homo sapiens
acaaaaccccgaaaaaggcgaacgaggcgcgacacaccagcggagcggggga

SEQ ID NO: 186779 - RNA, 56 nt, Homo sapiens
cgagggcggccaccaagagcccaaaagagcgggaacagacacagcagagcagaaga

SEQ ID NO: 186780 - RNA, 76 nt, Homo sapiens
acagaacaagaagaggggcggccgaagagcgggccgcgcagacgggacgccgccacccacaccgagagaaaagaga

SEQ ID NO: 186781 - RNA, 75 nt, Homo sapiens
cacggacaacacaccggaggcagggggacacagccacccaggaggcagaagccacaggaagagccaaggaagcac

SEQ ID NO: 186782 - RNA, 54 nt, Homo sapiens
gagacagcgggagccacggccacacgggagagaagagaaacaagcagcacacag

SEQ ID NO: 186783 - RNA, 72 nt, Homo sapiens
ccacccccggagcgggccgcgaacacccacagagggagcgcaggggaaggaccgcaagcaggccggccccca

SEQ ID NO: 186784 - RNA, 59 nt, Homo sapiens
cagaaggaagaggcggacggaggagcaggcgagaagagaaggcgaccggcccgaggacc

SEQ ID NO: 186785 - RNA, 75 nt, Homo sapiens
gcccggccgccgaaccgccacgccagcacgccaacccggacggacaacaccggggagcgcgggccccccacccgg

SEQ ID NO: 186786 - RNA, 68 nt, Homo sapiens
agaggcccaggaaagccaagcaaacaagacaggaacagaaaaggcagcgggagcacgacagcgggaga

SEQ ID NO: 186787 - RNA, 79 nt, Homo sapiens
gaaaaggcagaaggcgaggaacagacccgagagacccagaccagagacaaaggggcagcggagcaagggagagccagaa

SEQ ID NO: 186788 - RNA, 67 nt, Homo sapiens
ccgacggggaaaggaaagcagcccgaaaagaaggggaaccagaagaggccaaccagcacgaacgcca

SEQ ID NO: 186789 - RNA, 59 nt, Homo sapiens
gacagagagaggcaggaagaacgaagcacagcggaacaagcgaaccacaaagaaaccga

SEQ ID NO: 186790 - RNA, 89 nt, Homo sapiens
caccggccgcccagccaggacgcgcccggagaagccaaaacagagggagacgagaaaagggccgagcacaagccaagaaggcgccccaa

SEQ ID NO: 186791 - RNA, 122 nt, Homo sapiens
cgcagggcccgggagaaccggcgccggcaccccacaagcccagggaccacgggccaggagcagcaccggacagccagaggagagcgcgggagaccaggagcaggcacagccggagaaaccca

SEQ ID NO: 186792 - RNA, 53 nt, Homo sapiens
gcgaaccagagaaaacggcaaggaagcgaaggccgcggaccccccccccccca

SEQ ID NO: 186793 - RNA, 78 nt, Homo sapiens
aagaacggcccgccaccggagacaacgagaggagcacgagccagggagccgccgggaccggcccgggagacgacaacc

SEQ ID NO: 186794 - RNA, 37 nt, Homo sapiens
cccccagagcgggaccacagggcaggacccgaggcgc

SEQ ID NO: 186795 - RNA, 73 nt, Homo sapiens
cggaaaagcggaacagaagcacaaacaaagaagaaaagggggcaaagcgaaagagcaacccagccaagaagca

SEQ ID NO: 186796 - RNA, 72 nt, Homo sapiens
ggcagcggcggagccgccaaggcggcgcagcggacgaccacggacacgggcagccacaccaagccggaacgc

SEQ ID NO: 186797 - RNA, 84 nt, Homo sapiens
cgagccgagcagaggaaccaacaaagaaggagcggaaaaccaggaacggccaggggaccagacggcaagcccagccaggagcca

SEQ ID NO: 186798 - RNA, 84 nt, Homo sapiens
cggacaagaaccgaccgagagggaggagcacagcaagcgggagcaggcagaccaaaggaacagaagccagggccggaaaaccag

SEQ ID NO: 186799 - RNA, 55 nt, Homo sapiens
ccagcccgagcacaggcgcgacggccaccccccaggacagaaagcgggacacaag

SEQ ID NO: 186800 - RNA, 59 nt, Homo sapiens
caacccgaaaggacaggcacaacaggagggagcgaagaagaagcgcaaacgccggcggg

SEQ ID NO: 186801 - RNA, 58 nt, Homo sapiens
ggcgcggcagccacccgcccacaacacaagaagggcgaaaagccaggagcaaaagacg

SEQ ID NO: 186802 - RNA, 70 nt, Homo sapiens
ccagcgcagcacaagaccgcccgggggagcaccaccggagcccagaggacccagaagaaccacgcgcagg

SEQ ID NO: 186803 - RNA, 71 nt, Homo sapiens
ccagcgggcccagcgcacacggcgcaaaggcccccaagcggggcagggaaccgccagcggcaccggcggca

SEQ ID NO: 186804 - RNA, 65 nt, Homo sapiens
gaaagagcaacagcagggcaacagacgcacaggagaacaaggaagagaaagcaaagcagccacgg

SEQ ID NO: 186805 - RNA, 67 nt, Homo sapiens
ggagaaggacagaggacgacaaaccgggcaggacaagagggcccaaaggcaaaacacaagaagcgca

SEQ ID NO: 186806 - RNA, 58 nt, Homo sapiens
gccggacccaaagcacggcaccggacaggccccaccgaggcaccaccaaccaaagcgg

SEQ ID NO: 186807 - RNA, 69 nt, Homo sapiens
acccaaacggaaggacacagagccaacccagaagagccaagagagggcaaaaaacacagacaccggcga

SEQ ID NO: 186808 - RNA, 68 nt, Homo sapiens
agacaagagcaccacgggcaggaaggcagcgcacgacagcaaaagagcggcaccaaaagaaccacgcc

SEQ ID NO: 186809 - RNA, 82 nt, Homo sapiens
aggccccagcggaccgaacaggagagaaacagcagaggaaagcccgggccacaggagcgaaaaagaagaagaaaaaaaaaag

SEQ ID NO: 186810 - RNA, 73 nt, Homo sapiens
cgcccaggcgggaagaggcgaaggccagagcacgagcacgggaaggcagagggcaccacagacaagaaagccc

SEQ ID NO: 186811 - RNA, 42 nt, Homo sapiens
accacagagagagagagggagggcacccacaaaagcgaaaag

SEQ ID NO: 186812 - RNA, 78 nt, Homo sapiens
caagcaagccaaaggcacaaaagggagaggagagaccacacccccgagagagacgcccccgccgggagccgggggagg

SEQ ID NO: 186813 - RNA, 80 nt, Homo sapiens
acagggccgccaacggccccagcacacagccagagagccaggaagcaaggagacccggaggaaagcccagagggaagcgc

SEQ ID NO: 186814 - RNA, 72 nt, Homo sapiens
caaaaagggccgggaaacaaaaggcgaaccggggaggaaacgaggggaggacaaacccagaccagcccgaga

SEQ ID NO: 186815 - RNA, 63 nt, Homo sapiens
caaagaagagcaccgcagggacccagacaacagagccagacacaccaacgggcgacagagacg

SEQ ID NO: 186816 - RNA, 76 nt, Homo sapiens
ggaagcccagggagaagagcaaagcgaccaaaggaggaccaagaccaaccaggccaagaagaagagagaagaagca

SEQ ID NO: 186817 - RNA, 53 nt, Homo sapiens
ggggacggcgggaacccccccaggacagcagaccacagcccggcaggcccaaa

SEQ ID NO: 186818 - RNA, 82 nt, Homo sapiens
aaaccaagcccgggcagacacgcagggacccccacacggcagcaccaggagacaaagccacaaaaacaccagaaaaaccaag

SEQ ID NO: 186819 - RNA, 62 nt, Homo sapiens
cgccggacaagggaggcggaagaaggaaccccgaagagggcaacagcgcgagcccgcccccg

SEQ ID NO: 186820 - RNA, 77 nt, Homo sapiens
caagaaggaaaaagaccggagggagcgcaccgcccaacgaaagaaggggggaagacgccaggggaaggaacaaacgg

SEQ ID NO: 186821 - RNA, 82 nt, Homo sapiens
aaccaggcgggaccgcggccagccccggagcagggagcgggcacggacagcggggcggaccccgagccaggaccgagcccaa

SEQ ID NO: 186822 - RNA, 69 nt, Homo sapiens
cggcgaccgcaccacaagggacgagaccaaacggaagaggcgaacaagaggcgccagcgggcgcgccgg

SEQ ID NO: 186823 - RNA, 56 nt, Homo sapiens
aggagcgaccaggaagaccacgcaccgcgcgccgcgcccccccaccagccccgccg

SEQ ID NO: 186824 - RNA, 87 nt, Homo sapiens
agccgcaacccagccagccacgccaccgcgacccacacgggaagaggaagaaaagccaaacagaggccaagggcacggcgaaagcac

SEQ ID NO: 186825 - RNA, 77 nt, Homo sapiens
caagaaaggaccagacaccagcacaggaggcagggcgagacaccgcaggacgagccaaaacgaagaacgcgcacacc

SEQ ID NO: 186826 - RNA, 85 nt, Homo sapiens
cgcgacacgccaggccacccggcagagaggacggagacacagcgagcacccccggccccagacagccacaccgggaaggagaagc

SEQ ID NO: 186827 - RNA, 83 nt, Homo sapiens
ggaaagggagaaaacagacagcaagcacgaaggcaggagaacaggccggcaggcgagggcgcccagacggcagcacggcgccc

SEQ ID NO: 186828 - RNA, 34 nt, Homo sapiens
gagagcgacgagaagaacccgaacggcaacagac

SEQ ID NO: 186829 - RNA, 82 nt, Homo sapiens
gccaagaggcaaaggggaggacgcagcaaaccaccagaaggccccagggcaggggcccggagagcgcgccccccaggaccca

SEQ ID NO: 186830 - RNA, 52 nt, Homo sapiens
aggcagccgacacggacaaaacagcgcaaaagagaacggcgagagagaaaga

SEQ ID NO: 186831 - RNA, 88 nt, Homo sapiens
caggcagcaacccaaacagggaccaaccaaagacgccaaggagaaggcagaccggggcggagaacggaaaagcaccaggaagcagaga

SEQ ID NO: 186832 - RNA, 79 nt, Homo sapiens
aaaagaagcaggcagaccacaagagccacgaacaggcaagaagagggacaaccaagacacaaggcacccagcgaggaca

SEQ ID NO: 186833 - RNA, 73 nt, Homo sapiens
caaacagaagggaagcaggaagaagcgggacgagcagagaacaaaagggccagcaagaaacggaaaacagaaa

SEQ ID NO: 186834 - RNA, 76 nt, Homo sapiens
cggcgaaagcccgccgcacaggcgccgcacagaacaaaccgaccgaaagcaccgggaaccccaagaggaacagcag

SEQ ID NO: 186835 - RNA, 82 nt, Homo sapiens
agcgccgccggagcgagaaccacgaaagcagggggccggacaaccaaaaagaagaggagaagaaaaggaaaaggagcccagc

SEQ ID NO: 186836 - RNA, 85 nt, Homo sapiens
caccgccgccccgccgcgcccaggagcggaacaacgcggcgagcgggggggacggagaaaggaaaagccagaacagccggaagaa

SEQ ID NO: 186837 - RNA, 49 nt, Homo sapiens
ccgcgagcagcgggacacgagaggcagaacacaaccagccccggagaac

SEQ ID NO: 186838 - RNA, 69 nt, Homo sapiens
gagaagcaagagaagccaagacgaaggaaagcgcaggacagcaaacaaaggcacaccaacggcaacgga

SEQ ID NO: 186839 - RNA, 71 nt, Homo sapiens
accgcaggacccaggccagaccggagcagcggggacaggagaacacaaagaacccaaacgaaaggaaaagg

SEQ ID NO: 186840 - RNA, 65 nt, Homo sapiens
acgcgaaagagccacagcaccaagaaaacggaacacggcagcaggagaaacgagaagaaacagac

SEQ ID NO: 186841 - RNA, 72 nt, Homo sapiens
ccgccgccccggcgaggcgcagaaaccccggacaaggcacgccagacggccaagccgacgccagcgggcgcc

SEQ ID NO: 186842 - RNA, 96 nt, Homo sapiens
cgcgcgagccggaggggagggggcgagccccgcgcagccgccggcgcgccgccaggaccagccccacccaaacacacccaccccaaggcaagccaa

SEQ ID NO: 186843 - RNA, 77 nt, Homo sapiens
aggaggcacgcggaccccagggccggcccggaggcgggacccagggcccagcaaacgcacaggagcaaaaggacaga

SEQ ID NO: 186844 - RNA, 59 nt, Homo sapiens
accaaggagagggcgcgaaagaaccagggccgggacgcacgggaacagccgcagaaccg

SEQ ID NO: 186845 - RNA, 85 nt, Homo sapiens
caaaacacaaaaggagaggacagcagccgagagacacaacgacggagcgggaagcagcacaagcgggacccaggccaccagaaag

SEQ ID NO: 186846 - RNA, 47 nt, Homo sapiens
aggcgcacggagacccgccggcacgggacaagaccagcaaaggaccg

SEQ ID NO: 186847 - RNA, 74 nt, Homo sapiens
acagcccaacacagcgcacaggcagacaagagagggcggcagaaggaacaccgagaaaccgcacaccggagacg

SEQ ID NO: 186848 - RNA, 74 nt, Homo sapiens
gccacggcccccacaagaacagaaggccgcaagcaaagagaccccccaaagaaagaacggagaaaaagaacacc

SEQ ID NO: 186849 - RNA, 82 nt, Homo sapiens
gaaagcacccacgagccccggaaaacgccggagagagcggaagcccggggacgcccccagggcagcgggggcagagacgggg

SEQ ID NO: 186850 - RNA, 84 nt, Homo sapiens
accgagagcaggagcggcagggcgggccgcagccaccaggcaggagcgcccaagaaagcgaaggacaaggacgggagcaagagc

SEQ ID NO: 186851 - RNA, 57 nt, Homo sapiens
agacgccaacgcaggagcacccagccgggagcaccgggccccgaaggccccgcaaaa

SEQ ID NO: 186852 - RNA, 85 nt, Homo sapiens
cggagaggacggagcggcgagcccccgcggcgacagagagaacccaccgcaagagaccaaaggccaagagcaccgcagccaccag

SEQ ID NO: 186853 - RNA, 75 nt, Homo sapiens
gcaggcggggacaaaggcgaccaggaaaagaccaagaaggggaacggaaagggcagacaggccaagccaagaacc

SEQ ID NO: 186854 - RNA, 55 nt, Homo sapiens
cagccccaggggaacaggacacgcaaacccgcgggcaacccgacgcaccgccgga

SEQ ID NO: 186855 - RNA, 66 nt, Homo sapiens
ggcggccccgggaaaaaggcagggcacacaaaggaacagaaaacaacacgaggaggagaaagggca

SEQ ID NO: 186856 - RNA, 55 nt, Homo sapiens
agagaagaacggaacacagaacacggagagcaaaggcgaaggcaacaccaggaga

SEQ ID NO: 186857 - RNA, 77 nt, Homo sapiens
aaggggaagaggcccacccggagaaccccacggagaaccagaggaaggaagggaacacggacgacgagacacgacca

SEQ ID NO: 186858 - RNA, 82 nt, Homo sapiens
aaacaaaagcaacaaagagggcacggcagacacaccgaccagaggaaggcgaacccgccacgcagcaggagcaggggacgaa

SEQ ID NO: 186859 - RNA, 87 nt, Homo sapiens
gcgccagccagcgccggaccccccacccacgcgaacgagagggacacggagcaggccacgcagaacaaaagacgcacagagacggac

SEQ ID NO: 186860 - RNA, 69 nt, Homo sapiens
gcccagcaaacggggagggccacacaaaagcaacccacccaccaggcaccggagaaacgccaggaccga

SEQ ID NO: 186861 - RNA, 115 nt, Homo sapiens
gcggacggggggggccgcgcccggccccgcgcgggcggacggcggaggcgcccccagaaaacccagggaccagcggagcccagccgcaacacccccccacacaacaaaggggacg

SEQ ID NO: 186862 - RNA, 69 nt, Homo sapiens
aagaacgaaaaacacaacgaaaagcaccaaacaggggaaaaaaggggagcacagaaacaagccccaaaa

SEQ ID NO: 186863 - RNA, 76 nt, Homo sapiens
aaacccgggccaaggaccccgcccagcccccgagaccgagaagcccagggcaaggccagagaaggcgggagaaaga

SEQ ID NO: 186864 - RNA, 73 nt, Homo sapiens
ccgcaacacccgcccggcaagccggacacaagagggcaagaaaggcgcgacgggccgaaaagggacgaagggg

SEQ ID NO: 186865 - RNA, 85 nt, Homo sapiens
gcagcaagcgcaagcaggcaagcgagaaggcagggggcacccaggggagccgccaccaaaagcagacggaaaacccacggggaag

SEQ ID NO: 186866 - RNA, 77 nt, Homo sapiens
gcgcacccggcagcaccagacagccaagcaggcaccaagcagccaccaagcacagcagccgccaacccacgggaccg

SEQ ID NO: 186867 - RNA, 57 nt, Homo sapiens
cgaggccgcaggaggagggagcaacagggagcgccaccaccggacggcgcgcccaga

SEQ ID NO: 186868 - RNA, 59 nt, Homo sapiens
ccaagacaggacgcaccaccaagcaacacacagacaggcagagaagcgcacggcaccac

SEQ ID NO: 186869 - RNA, 37 nt, Homo sapiens
caaccccggggccacaaagcgaggaacaagggaaaaa

SEQ ID NO: 186870 - RNA, 72 nt, Homo sapiens
ggacagagaagccccggccgggccggccagcgccggaaaccaacaaggacaagaaccagaaaacaaaaggcg

SEQ ID NO: 186871 - RNA, 105 nt, Homo sapiens
ggacccgccgaccgcgccccggacggcccaagaagcgggccgccaaggacaggacaccagccgcaaagcacacgaggcagcccgccccgcagcgagccaacggcg

SEQ ID NO: 186872 - RNA, 93 nt, Homo sapiens
ggcgcggagggccgagggagggccgagccagccgcggccggaggagcccccaggccgaaccgaacaagacagaaagcgggacgcgcaacccca

SEQ ID NO: 186873 - RNA, 71 nt, Homo sapiens
ccccggccacacccaaccaggcaaacgaacacgcgcagcgcagaggcccggcagccccaaggaacgcggcc

SEQ ID NO: 186874 - RNA, 60 nt, Homo sapiens
aagaagaggaacacgaacaaccacgccacggggacaaggacgggaaaaacaccggcacga

SEQ ID NO: 186875 - RNA, 84 nt, Homo sapiens
cgagagccgcccgggccagcggccgcgcacccccggccggaggcaccagccagacaggcagcaaagaaaggaggagaagcccag

SEQ ID NO: 186876 - RNA, 60 nt, Homo sapiens
agcagaacgaagaaacccgcaggcacgcgaggccgggcaggaaaaacacaagcaaagcgc

SEQ ID NO: 186877 - RNA, 83 nt, Homo sapiens
aagcacggcaaagggcagcaaccaaaagccagagccgaagagagaaacccccaaagaagagccccccaaagcacaaggaaaga

SEQ ID NO: 186878 - RNA, 82 nt, Homo sapiens
ccggcagggcagagcaggaggccccccgaggagaagagcgggcacggcgggacggaagaaaggaaacagcccggcccagccc

SEQ ID NO: 186879 - RNA, 71 nt, Homo sapiens
aacccgaccccgcggagacagcgagacccgccaggagcaaagcaccccgaacccgaggcaggggaagcggg

SEQ ID NO: 186880 - RNA, 73 nt, Homo sapiens
cgagcccacagggacacgcacgagagaagaacgggcgcagggaccaaggggcaaagagaaccaggagacccca

SEQ ID NO: 186881 - RNA, 70 nt, Homo sapiens
ccccccggcgggcacagaggaacacaccccaaaacggcccacggccaccaggcaacgcaccaacaacacc

SEQ ID NO: 186882 - RNA, 74 nt, Homo sapiens
cgggcacccgcgccgggcaccgaggaccagccaagacaggagaagacagaggagccagaccaagagacagcaca

SEQ ID NO: 186883 - RNA, 74 nt, Homo sapiens
aaggcacaaagcccgacagggcaacacccgacaaaggaggcaagcggacgccaacaaggcgcagagaacggacc

SEQ ID NO: 186884 - RNA, 77 nt, Homo sapiens
ggacccacaccgaggcacccgaagaagagaccaccaaccaggacaacaggcccaacccaagccagggggcccaggaa

SEQ ID NO: 186885 - RNA, 76 nt, Homo sapiens
cccacgcaagacacccagaaagcgcagagcaaacaccaaaggcaacgcccgcgcggcggcggccgcagggggcgga

SEQ ID NO: 186886 - RNA, 81 nt, Homo sapiens
aaaagccacaagacagacagaacagagaagaaagggaacaggggaggggcaccaccacgaggcgaggggccaaccaaggag

SEQ ID NO: 186887 - RNA, 65 nt, Homo sapiens
gcccacaggacagcaagccacagaaaggggaaacgaggccgagccgagaagggaggggaggccag

SEQ ID NO: 186888 - RNA, 40 nt, Homo sapiens
ggggaggcgcacacacaccaaaggccgggcccgggaggag

SEQ ID NO: 186889 - RNA, 64 nt, Homo sapiens
gcacccccccaccggccaggaacaggacagggaacaaaggcagagaaacgcaccccagagcagg

SEQ ID NO: 186890 - RNA, 78 nt, Homo sapiens
acagcaagcgaagccgaaaaagcgcccgagacgggcccgccgaaaggagaaggaaagagcagcgaaacaaagagaaca

SEQ ID NO: 186891 - RNA, 54 nt, Homo sapiens
acgggcccccacggccgccaccgaggccgagccagaggaacaagcacgggggaa

SEQ ID NO: 186892 - RNA, 74 nt, Homo sapiens
caagagggacccacccggcgccaccccccacggaaggcccagaagcagcccagaacaaccaggggaggaagcac

SEQ ID NO: 186893 - RNA, 97 nt, Homo sapiens
gacagaaggacgaaagcaaggaggggaaaaaccgcgaagcaggggccgcgggaagacgaagaacggaagcgccccagaggagagggcggagagacgg

SEQ ID NO: 186894 - RNA, 72 nt, Homo sapiens
cagcgacgcccggaaacggccacacggagccaggacgccacggggacccacagcccggcgaccacggggaac

SEQ ID NO: 186895 - RNA, 52 nt, Homo sapiens
aggaaaaccccagcgaaacaccaagaggacccacaggaccgcgaacaaggag

SEQ ID NO: 186896 - RNA, 84 nt, Homo sapiens
caggagagcggcaccgcaccagggcgaaggacaagcaggagggcggaccaggcgcgcagcagaacagcaagccgggcaccgggg

SEQ ID NO: 186897 - RNA, 46 nt, Homo sapiens
gcccacgcagcgccggacaagccgccacggaggccgcaagcaacag

SEQ ID NO: 186898 - RNA, 72 nt, Homo sapiens
aaaaacccagaacacgggagaaaaaggaaaacgcggaaaaccgacacaacaggagggccgagccagcccggc

SEQ ID NO: 186899 - RNA, 60 nt, Homo sapiens
caggcaggccccgcaggccacccaggcccggaggcagcgcagaaaccggaaggcgaaaca

SEQ ID NO: 186900 - RNA, 73 nt, Homo sapiens
gagccggggaagcccagggaagaaggcgaggcaccggaacagacgcaggaagagagaaacagcggaaaaaaaa

SEQ ID NO: 186901 - RNA, 85 nt, Homo sapiens
aagaaaacaaaaacgagaccaagagaaggcagccgagcaccgagccagcccaggaaaaggagagaagagcccaaggaggagcgag

SEQ ID NO: 186902 - RNA, 72 nt, Homo sapiens
gagcaccacgggcaggaaggcagcgcacgacagcaaaagcggaggaaagcaggaagcagaggcaaagaagac

SEQ ID NO: 186903 - RNA, 56 nt, Homo sapiens
gagaaccccaaccggggaggaaaaccgacgaagaccgaggccaaaagaaaggaaga

SEQ ID NO: 186904 - RNA, 88 nt, Homo sapiens
gaggacacaggagccgggggcagggcccccagcaacgccaggaggccaggagccggaggccgagggagaagagcagaggaggccgcag

SEQ ID NO: 186905 - RNA, 77 nt, Homo sapiens
ccccgggcagcccaacgagaaccggagggcaccggaggggaacaaaggccgacaaagaacacaaggggaaagagaaa

SEQ ID NO: 186906 - RNA, 70 nt, Homo sapiens
caaaagagaaacccggcagcggacaggcaagacaggccaccacgggcacgcggaagccgggccagccggc

SEQ ID NO: 186907 - RNA, 60 nt, Homo sapiens
gcacacagcagcaagagcccaaacgcgagcagcaccgccgcaggggcggacagaaccagc

SEQ ID NO: 186908 - RNA, 83 nt, Homo sapiens
agagccaccgccccgcgaccggcagaggacgaggcacggaccagaagggaccaagcgcgcacacgagaggaagaacaacaacg

SEQ ID NO: 186909 - RNA, 89 nt, Homo sapiens
cgggaagcggccggaaggcggcgagaagcacacggccacagacggggaagggagaccgcgagacacggccggccccacacacagccccc

SEQ ID NO: 186910 - RNA, 67 nt, Homo sapiens
ggaacagcgccagcgcaagaggagccaagcaaacagaagcgcggccaagacaaagaacgcaaaccca

SEQ ID NO: 186911 - RNA, 76 nt, Homo sapiens
caaagcgaaggagggccgcaagacagcgcacgaaacacacaaagaaccaccaccgggaggaagccagacaacccca

SEQ ID NO: 186912 - RNA, 58 nt, Homo sapiens
cggaggagccaccccagggggaagacaagcgccgccaccggaagggcagggaggcccc

SEQ ID NO: 186913 - RNA, 75 nt, Homo sapiens
caaggccaaaagccaaagcggaaccaacagcacagcaaggaggaaacagcaagggaacaacaacaggacgccaca

SEQ ID NO: 186914 - RNA, 74 nt, Homo sapiens
gcgccggccagaacacgacaacaaggaaggacgaaaacccgaggcaccggacagaagggaggaagacccagcag

SEQ ID NO: 186915 - RNA, 77 nt, Homo sapiens
agggacaagaagggcaaagccgaaaacagccacaggaagagggaacaaagaaggaaacaggagaagcgggagaagaa

SEQ ID NO: 186916 - RNA, 70 nt, Homo sapiens
gccgccgcacgacagaagccgccagcgagccccacacagaaaaccagaaggcaccgacaggaaaggaaaa

SEQ ID NO: 186917 - RNA, 70 nt, Homo sapiens
gaggcgcaagagagaggagggggcaccgagcaacgagggcagaccaggcggcagaagccaaaaagaggca

SEQ ID NO: 186918 - RNA, 63 nt, Homo sapiens
ggaccaggcacacaggaggccagaggagcagcagaaagcagagagcccagaagaaaccaaagc

SEQ ID NO: 186919 - RNA, 42 nt, Homo sapiens
gacgcgaccgcggcgcgagcaccagaccggagagcaagggga

SEQ ID NO: 186920 - RNA, 80 nt, Homo sapiens
gagacaacaaaagaagccaaaccgccccaagagccgcagagaacgcgacacacaccaagcgaagcccggagcccgagacg

SEQ ID NO: 186921 - RNA, 72 nt, Homo sapiens
ggagggaagacgcccgggccaccaagcaaggacaaaccggcgaccacacacggggacgacggggaagccgga

SEQ ID NO: 186922 - RNA, 56 nt, Homo sapiens
aggggggccggggaggcgcagagacacaaggaaaacagcaagagagcagacgccaa

SEQ ID NO: 186923 - RNA, 79 nt, Homo sapiens
gagaccgccgaggaagcgccacgaggcacacgaaaacagaagcagaagcaggccagaaagaagccagcaggaagaagag

SEQ ID NO: 186924 - RNA, 70 nt, Homo sapiens
caaccgcaccgcgcagaggacgcgagaaaccgcagccagcaggagcgccagaaaagaacgccaagagccg

SEQ ID NO: 186925 - RNA, 61 nt, Homo sapiens
ggcggcgggccggacgacaagaaagggagaagaggacagaaaaagaccagacgcggaaaaa

SEQ ID NO: 186926 - RNA, 79 nt, Homo sapiens
ccccaggaggacggagaacaggcccccggcgcgaacccaggccccccaggcacccacgcgggaggagaagcaggaccca

SEQ ID NO: 186927 - RNA, 74 nt, Homo sapiens
ggagcagcgaaaacggggagagccggaccccagggagcaagccacaggagaggagaagaggaaagccggcggaa

SEQ ID NO: 186928 - RNA, 79 nt, Homo sapiens
ccaaggccaaagcacagaccgaggaaccgcggacccgagcggcacacaaccagaggaggccgcggaggcagggcggacc

SEQ ID NO: 186929 - RNA, 76 nt, Homo sapiens
caaggcgccaaacaagaaaaacaaagccaaggaaaccccaacacagagccaagcgccaagcgccaagcccacgggc

SEQ ID NO: 186930 - RNA, 70 nt, Homo sapiens
agaagggcaaagccgaaggccaggcagcgaagaagacaaagaagaaaacaaagccagccagaagaagagg

SEQ ID NO: 186931 - RNA, 78 nt, Homo sapiens
gcaccgagagcccggacggaggagagcccagagggccaggggcaggaagaacgcaagagacgcgaacgaaccagccgg

SEQ ID NO: 186932 - RNA, 115 nt, Homo sapiens
gagaggcaccgggacggaccgagaccggaccgagagcggaccgagagcgcgaaacgcacgagaaggacagagaggcgcaggcaagacccggaaggcccagaagaaaccgccacca

SEQ ID NO: 186933 - RNA, 76 nt, Homo sapiens
ggcggcccggaccaggacaccgggacaaggcaggggaccgggggcaaccaggcccagccagacgcaacaacaagcg

SEQ ID NO: 186934 - RNA, 51 nt, Homo sapiens
aaccacccgggggcacgagccgggcaggcggcacacaggaaggggccccag

SEQ ID NO: 186935 - RNA, 85 nt, Homo sapiens
gaagggcagggagcggaccggaggcgccgccgcgacagcagcagccaggaggacgagagcccaagaccacggcaccaggacaagc

SEQ ID NO: 186936 - RNA, 84 nt, Homo sapiens
gcgaagaccagacacgcgggcaccacgaggagagaagaccgggacaccggggacagagggaaaggccgcgggccgcggaggagc

SEQ ID NO: 186937 - RNA, 66 nt, Homo sapiens
agaggggaggggaggagaggacacgggagagccgaaccagaagagaaaggacccacaggcagagcc

SEQ ID NO: 186938 - RNA, 55 nt, Homo sapiens
ccccggccggcagggcaagagccagcggggacgagagccccggcacaaacggacc

SEQ ID NO: 186939 - RNA, 77 nt, Homo sapiens
agcaggacgacaggaagaaaggaggaagaagcagaaaggaaagacagaaccgaaaacagcaggacagcaaaggcggg

SEQ ID NO: 186940 - RNA, 84 nt, Homo sapiens
gagccagccgaccgggcagcggcgaggggacggagccggacaggagccgccgccgccaacaggcagcacaagggaaaccacagg

SEQ ID NO: 186941 - RNA, 66 nt, Homo sapiens
gcaagagaacagcagcgccgcccgccgacagccaggcccgggagaaacgggcggcagagaagagaa

SEQ ID NO: 186942 - RNA, 76 nt, Homo sapiens
aaacaggagcagaccagcagagcagcacaggaggacgggccaggcgacacgcagaacaaccccaagaccgggggca

SEQ ID NO: 186943 - RNA, 80 nt, Homo sapiens
cagaccgcccaggaaacgggcagcaccaccccccccaacaccaacaaagagagaagaacaaagcagcgcaaaccaacaag

SEQ ID NO: 186944 - RNA, 58 nt, Homo sapiens
gggcagggacagcgcaggcagcaggaaaagcccggaaaagcagccaagcggaagacag

SEQ ID NO: 186945 - RNA, 95 nt, Homo sapiens
gagaccagaaggaaagaaaaggaagcaacaacaaagcccagagggagccaaaaaccagcgaagcaaggccaacagagcagcggaaaaggagaaaa

SEQ ID NO: 186946 - RNA, 73 nt, Homo sapiens
caccccacaagacgaggccggcagagcacgcagcacgggggcaggggccgacccagaacgccagcgccgcaag

SEQ ID NO: 186947 - RNA, 69 nt, Homo sapiens
cgaaagaggacgggccgccccggacaggagccgggcaggcaggaaagaaaaggccaaaccaaaagggaa

SEQ ID NO: 186948 - RNA, 82 nt, Homo sapiens
gggcaccgaggggcgacccgccgcgagggacccggccgggcccacgcaccgggagcggcaagaacgagccacgcgcccaggc

SEQ ID NO: 186949 - RNA, 67 nt, Homo sapiens
caaagaaacggggggagccgaccaagaccacagagaagaccgcccacaaagaccaccggcaccagcc

SEQ ID NO: 186950 - RNA, 83 nt, Homo sapiens
ccggccgacaggaccgggccgaccggcagcgacagaagcaaaaagcgggccaggcagcaagaacagacacggcagagaaaagg

SEQ ID NO: 186951 - RNA, 41 nt, Homo sapiens
ggcagagaaccaaaggaaaggcaggagggaaccccacagac

SEQ ID NO: 186952 - RNA, 77 nt, Homo sapiens
cgggccaagacgagcgacaggagcacacccggagaagcaggagcccaccggcaggccgaggaggaggagacaaagag

SEQ ID NO: 186953 - RNA, 52 nt, Homo sapiens
ggccgaccgagacgggcggagaggagaagcggcccgagaaaccccgcggggg

SEQ ID NO: 186954 - RNA, 75 nt, Homo sapiens
agccaccccacgcgcccggcaggcagaagccagggaaggcggcccagcagcgagacacagccgggcccagcaacc

SEQ ID NO: 186955 - RNA, 36 nt, Homo sapiens
aggggaaacccgcaagcccagagaagaagaaaagaa

SEQ ID NO: 186956 - RNA, 64 nt, Homo sapiens
ggagaaggaccaagaaccagaacccccaagcgcaccaggggccgcccacggggccgcccgcccg

SEQ ID NO: 186957 - RNA, 76 nt, Homo sapiens
aggaacaaagagagagaagaaaagggagaacagaagaacagaaaagaaagcaccaacacaaaaagcgagacagaca

SEQ ID NO: 186958 - RNA, 78 nt, Homo sapiens
ccagaccgcaagagccccaccgaaccaacaaacccaacacacaaaggagaggagccaagcccaacgggacgggaaaac

SEQ ID NO: 186959 - RNA, 69 nt, Homo sapiens
agaagaacacaaaacagacaacagaaaggggcagaggaacggccaagacaccgaagcaaaacagggaac

SEQ ID NO: 186960 - RNA, 80 nt, Homo sapiens
cgcccgaaaacagggccggccgcagagcccaccggaaggagaaggaagaggagcgaccgggaagaccgccgaagcccgaa

SEQ ID NO: 186961 - RNA, 120 nt, Homo sapiens
cacaggccaccccagagcaagagcagcaccggacgggcccaccgcccaagaccggccccaggcgcccaaggccgccgagcagcagggcccgcccagaccgccgggccgcaccgcacagcc

SEQ ID NO: 186962 - RNA, 77 nt, Homo sapiens
aagaaccacaacaagaaagcagaaacgaaagaaagcaagaggaaaacgcaaaaccagaagcgcgccgacacggcccg

SEQ ID NO: 186963 - RNA, 39 nt, Homo sapiens
cgcgcccgcccccagcggagggagcagggcgaagcgggc

SEQ ID NO: 186964 - RNA, 67 nt, Homo sapiens
agggagaagacagaaaggcgaaagacacacagaagccaggaaaggaacaaacaaaccacgaacacag

SEQ ID NO: 186965 - RNA, 49 nt, Homo sapiens
gagcaaaaacaaagaacccgggacaaaagggcacgcccggacaacaccc

SEQ ID NO: 186966 - RNA, 62 nt, Homo sapiens
aaagccggacacgaccaagaaaggcgcgaaaagccccccgggagcagccagaacagagaaag

SEQ ID NO: 186967 - RNA, 69 nt, Homo sapiens
ggacccccgcggcgcgcagcccagcagacaccgcacccgaagagccggcacggagaaacaccccggcgg

SEQ ID NO: 186968 - RNA, 113 nt, Homo sapiens
cagagacaagcgcacaggcccgcgcagcgcagcaggagagaagaaaacgggcagcaagccaacacgagggagcggcaagggagaaaagagacacaaggcgcgggagaagacgg

SEQ ID NO: 186969 - RNA, 95 nt, Homo sapiens
gcggcggcggcggccgaggcgaaggaagaggcggacggcgggaccacaagacaacgcggagcggcgaagagcaaccaggaaagcgggaacgaaca

SEQ ID NO: 186970 - RNA, 87 nt, Homo sapiens
cggcgggcggcgggcggcaaaggagcagccagagggccgggcccagcaccgacccaacgcagagcgcggaagcacagcgacaaccag

SEQ ID NO: 186971 - RNA, 68 nt, Homo sapiens
caaccaaagcacaaaaaacaccgaagccagaagacggaaaaaacaggaaaagggggccaggaagcaaa

SEQ ID NO: 186972 - RNA, 82 nt, Homo sapiens
agaaaggacccaccgaaaacgggccgagagacgggcagaaagacaaggacccaaggccagccagccccaggcaccagcggac

SEQ ID NO: 186973 - RNA, 81 nt, Homo sapiens
ccccaccggaggcccgcggccagcaacccccagcagagggagaaccagaagagaaaacagcggcacacaccagaagggcca

SEQ ID NO: 186974 - RNA, 81 nt, Homo sapiens
gcagacgccaagagaagaacaacaaacggcaaagaacacgacgaggaacgcaaggcggggaaaaaaaggcagcacacagac

SEQ ID NO: 186975 - RNA, 87 nt, Homo sapiens
aaaaacggcagggaagggaacgcacggcagacaagaaagccaaacgaggagaggaagagcagaaaagaggaacagacagacccaaca

SEQ ID NO: 186976 - RNA, 56 nt, Homo sapiens
gaaggcaacaaggcaacagagaaccacacagaagaagggaccagggccaagagaag

SEQ ID NO: 186977 - RNA, 79 nt, Homo sapiens
ggcaccgaacaccgggggcgggcagccgaggccgggaaccagcgagggcaaagggaacggaaacaagaagcgaacaggg

SEQ ID NO: 186978 - RNA, 73 nt, Homo sapiens
ggcgccgcccccccggcccccgggacggcccaaggccagcccgcaggacaacaaaaacacggacccaacccac

SEQ ID NO: 186979 - RNA, 77 nt, Homo sapiens
cggccggcagggaggcggaagggaggcacggaagagaggaagggaagggggagcaacagacaagcccgaaaggaaca

SEQ ID NO: 186980 - RNA, 71 nt, Homo sapiens
gcaaagcacgccagacggagaccgggccccggggcagaagagcggcgccgaggagaaggaaaaagaccccc

SEQ ID NO: 186981 - RNA, 86 nt, Homo sapiens
cggggcggccgggcagacccggcggcccccaggcacgaagcgaagaagaggagagaagcagcggcgcagacgacggcacaacaacc

SEQ ID NO: 186982 - RNA, 74 nt, Homo sapiens
gggcccagaggaccccagccgcgcccgggagagcaaggagggagccacaccaaagccggacccccccagccgga

SEQ ID NO: 186983 - RNA, 82 nt, Homo sapiens
gacggaggaacgcaggcgcgccaggcacaaagagagacccgaacagccaggcggcgggggaaagagaaagagagagaaacgc

SEQ ID NO: 186984 - RNA, 72 nt, Homo sapiens
aacaaacaaggccggaaaaacgcagccaaagaaggagagccagccaggcggggcacaggggccagaccccac

SEQ ID NO: 186985 - RNA, 72 nt, Homo sapiens
aggcagaaaccaaggcaacaagaagaagggaggaaagcacaagaggaagagaacgcccaagaagagaagacc

SEQ ID NO: 186986 - RNA, 81 nt, Homo sapiens
ggcaggcggaaggccaaaggccaccgccgcgcgcccgcacagaagagggggaaagagagccaagggagacagccgaacacc

SEQ ID NO: 186987 - RNA, 70 nt, Homo sapiens
gaaagccacccacaaacaaacacccacggaaccagagacgcggcggcccgacagagaccgacgaagaggc

SEQ ID NO: 186988 - RNA, 73 nt, Homo sapiens
cagaccgcagaaggccggagacaccagcaggaaaagcgcaggaaaaacccgaggacccaccgcaaggcgcccc

SEQ ID NO: 186989 - RNA, 69 nt, Homo sapiens
gggaagcagcgcacgccagccgggcaggcggcacacaggaaggggccccagaagcgagaggaagaaccc

SEQ ID NO: 186990 - RNA, 85 nt, Homo sapiens
acaaggggcccgcaacccccagcagcacggggaaggaccggacccggcccgggagcaaagacagaagcgaaggggacagggggag

SEQ ID NO: 186991 - RNA, 84 nt, Homo sapiens
gagcgggcacaggccaggcagacagcaacaagcagaaggcccaacaggaaggccaaagcagcaagcgcccaacaagcccagcgc

SEQ ID NO: 186992 - RNA, 73 nt, Homo sapiens
aaggggcaccgaacagaagccgaccaaagagaaacggaggagaagcagaaccaaagagaagggaccagaggca

SEQ ID NO: 186993 - RNA, 69 nt, Homo sapiens
cgggagcccccccccccgcagaagacgaccccgacgcaggccaggagccgcggacagaagccgagcacg

SEQ ID NO: 186994 - RNA, 77 nt, Homo sapiens
ccggacaaccagaggcagccagcagggggagaacaaggcccgccaagggaggcgcccacagagggcacagcgaagaa

SEQ ID NO: 186995 - RNA, 64 nt, Homo sapiens
cgcgcgccaagccagacgaggaaaaaccgggaaagagagagaacacaagaagaaagacagcacg

SEQ ID NO: 186996 - RNA, 73 nt, Homo sapiens
accaagaaccagggggaagccggaacaacgccagccgggcagcgcaagcccccgggagccgaacagaaggaca

SEQ ID NO: 186997 - RNA, 75 nt, Homo sapiens
agaggcacaaaacgcccagcaaaccaagagggagaagacggaagaaagcagccaagaagcgccagaaccagacag

SEQ ID NO: 186998 - RNA, 70 nt, Homo sapiens
agacagcgacagcagacccggcagagaacacaacaagcaccagccacagcacacaccacagggcaccagg

SEQ ID NO: 186999 - RNA, 78 nt, Homo sapiens
acaaaagagagagcggaaacgagggaaagacagggcgggaccaccaggagcagagcggaggccaccagcccaacacca

SEQ ID NO: 187000 - RNA, 56 nt, Homo sapiens
cggagagcacccaacacggagaacccgcagacgcgcccagcccaccaaggcaggga

SEQ ID NO: 187001 - RNA, 71 nt, Homo sapiens
cgcaggacgcaaacgccaccggacccacacccccgaaagaccccacccaacccccgagaagaaacgccaag

SEQ ID NO: 187002 - RNA, 73 nt, Homo sapiens
ggggccgcccgcccacccagggccggaaaagccaacgccggcgaaggacgcaaagaccacagcagcgcgcaga

SEQ ID NO: 187003 - RNA, 65 nt, Homo sapiens
acccaaggccagaaccaggaagaggagggggaaagccaggacccgaaaagccagcaagcgagacc

SEQ ID NO: 187004 - RNA, 57 nt, Homo sapiens
ccggagagggggaagggcccaaagccagaaggggcaaggggagaacggcaggcccca

SEQ ID NO: 187005 - RNA, 77 nt, Homo sapiens
agacagaggagcggacccccgcggcgcgcagcccagcaggaaaggacggaaacagaacccacgcacccagcgggcag

SEQ ID NO: 187006 - RNA, 74 nt, Homo sapiens
gagacgcagcaaggcaagggaaaaccccacaaaaccagagcaagacaggacagcgagaagggggaaagaaaaga

SEQ ID NO: 187007 - RNA, 70 nt, Homo sapiens
ccgaaaggagagaagcagaagaaaaagcagcacgaaggcgaggaaccagcagacaaaaaagaagaaaaac

SEQ ID NO: 187008 - RNA, 113 nt, Homo sapiens
ggggccagacggagccagaccggaacggggccgcacccgcggggcccccagcaggaggcccaaggaacagcacagcagcgacacacggaccggagcagcccacagccacagga

SEQ ID NO: 187009 - RNA, 83 nt, Homo sapiens
gccgaaggacaaccaagcgagcgacgcgcccacggaggaggcgggggccccacaagaagaccaacaggaaggcgaggagcggg

SEQ ID NO: 187010 - RNA, 73 nt, Homo sapiens
agagccccagcgcagcaaagagccgggaaaccagaaccgcacagcaagccccgggggaaaagagcgcccgcgc

SEQ ID NO: 187011 - RNA, 78 nt, Homo sapiens
cgccgcaccaggccaccgccacgggccgagacacgcagcggcggccagggaccagccaggaggaccagaaaacagcag

SEQ ID NO: 187012 - RNA, 76 nt, Homo sapiens
ggaacccgggccccgccaagacaggggccaggccaggggcaggggaagcacccaaccaacgagcgggccacacagc

SEQ ID NO: 187013 - RNA, 83 nt, Homo sapiens
gaaacacggcggccagggccgcggggaccgaaaggacagaacaggaccggaaagggaaacgggaacacaggccagcacaaaac

SEQ ID NO: 187014 - RNA, 94 nt, Homo sapiens
cgcccgcccccagagcccgaccaggccccacggcacaccgacacacagccccccaaagccgcgcagagggcaaggggggagagggcagaaacca

SEQ ID NO: 187015 - RNA, 66 nt, Homo sapiens
acacaaaccgaaaggaaagaacgcggcagaacggaggcaggcagcacgagacacaccacaagaggg

SEQ ID NO: 187016 - RNA, 67 nt, Homo sapiens
accgacggggaaaggaaagcagcccgaaaagaaggagaccagaaagcgggcaacaccaaccgagacg

SEQ ID NO: 187017 - RNA, 77 nt, Homo sapiens
gagcccaaaaccaacgaaccaaaagcaaccgcgaagagcaggcgagccccaacagaccgggaggaacggggggcggg

SEQ ID NO: 187018 - RNA, 78 nt, Homo sapiens
gccgaggaggcccggggagcgaaggagcgcagcaccaggagacaacaccaagacgaggacgcgagcgccacgaccacg

SEQ ID NO: 187019 - RNA, 88 nt, Homo sapiens
caccagcccgaaacccgacaggaaggaaggaaccaagcacccaggcagaggcaaggcggcagcaaaacgggcgcccgggcagaagcaa

SEQ ID NO: 187020 - RNA, 79 nt, Homo sapiens
gggcgaggagagaccacagaaaagggggcacggcagacgcggccggaaaccagaccgcaggcgggacaagaaaagaaaa

SEQ ID NO: 187021 - RNA, 83 nt, Homo sapiens
ccacccccgccccgcccagcccccgaacccgaggcccgccacacaggacccccaccagccagagagaagggccgaaggagaga

SEQ ID NO: 187022 - RNA, 52 nt, Homo sapiens
agagaccggcggacaggcaccgcccaacagcgccacacgagacaaaagagcc

SEQ ID NO: 187023 - RNA, 74 nt, Homo sapiens
cgaaacccccccccccacccaccaaaccggagggggaaaaaacccaaggcgcaaagggaaacgggaacacaggc

SEQ ID NO: 187024 - RNA, 78 nt, Homo sapiens
gaacggggaggaacaacaacaggacagcagagacagccgaacagggaaaggagccagcaaagaagaacccaccaagcc

SEQ ID NO: 187025 - RNA, 82 nt, Homo sapiens
ccaggacgcagggggccggggaagccgcacagaggagcaccagcacccccgaagaagcggcgggaggaaccgccagccagga

SEQ ID NO: 187026 - RNA, 55 nt, Homo sapiens
gacgaaggagacagcagggacaccccccaggcacagccacaccccagcggccaag

SEQ ID NO: 187027 - RNA, 57 nt, Homo sapiens
accagaccgaccaccaaaaaacaacagcgaccccaaggaagacaaggagaaccgcac

SEQ ID NO: 187028 - RNA, 76 nt, Homo sapiens
gccgaaagcccgccacaacggcagcgacaccgcagacaacccacggcaaacccaacagaggaagccgcaagaaacg

SEQ ID NO: 187029 - RNA, 71 nt, Homo sapiens
gccagagaaaaagcaccgaacagaaagggaaccgggaacgcagagaagcagcaggaagagaccgccgaaac

SEQ ID NO: 187030 - RNA, 81 nt, Homo sapiens
gcgccaggcacagcgggaagcggcggggcaggccagcgaccggccggagcccagggccccaagaaaagcggaagaagaccg

SEQ ID NO: 187031 - RNA, 73 nt, Homo sapiens
aggagcaagagagccaccccaaccccccgaacccccagccccagacaaacccagacccagaagggaacgggaa

SEQ ID NO: 187032 - RNA, 73 nt, Homo sapiens
agcgggcaggggggacccacagaggaaaaggaaaggaagaacccaaggggacgaaaacccgaaccaagaaaga

SEQ ID NO: 187033 - RNA, 78 nt, Homo sapiens
agcggcacccgggacaaggcagacgggagcgcaaggcgccccaaggccagacaaaacgccagcggcggggcagccgag

SEQ ID NO: 187034 - RNA, 72 nt, Homo sapiens
aacaagaccccccacggcaaagagcaccaaagaggcggcacccagccccagccgggccggagccggaggaac

SEQ ID NO: 187035 - RNA, 66 nt, Homo sapiens
cgccccgcaccgagaaccacggaccaggcagaaaggcacgaccagccggggacaggagcccccaac

SEQ ID NO: 187036 - RNA, 76 nt, Homo sapiens
cgcgcggaccacccccacgaacgaggggagacgagggcggagaacggaaaagcaccaggaagcagagaggaccgca

SEQ ID NO: 187037 - RNA, 66 nt, Homo sapiens
aagaccgaagaaacggacgaaagcacccacgaggcggcgacggaaagccccccacgggaggccagc

SEQ ID NO: 187038 - RNA, 68 nt, Homo sapiens
ccaaagaaagcagcaacgaccaagccagaggcgcagaggacaggaggcgaagcacaagggacccagcc

SEQ ID NO: 187039 - RNA, 59 nt, Homo sapiens
agcgcagcacacagagaccccacagggagagagcccaccaaggaaccacgaaaccaccg

SEQ ID NO: 187040 - RNA, 66 nt, Homo sapiens
aagcacaagaagaagacgagaaaaaggagggagcgacgaagagggagagcacagaaaaggaggagc

SEQ ID NO: 187041 - RNA, 84 nt, Homo sapiens
gacggcgcgacgagacccgaccagcgggggcgcggcggccgcgcagccacccaagaacagcaaggaggcacaaacccaggcagc

SEQ ID NO: 187042 - RNA, 71 nt, Homo sapiens
ggaccgccccccccaacgcgggcagcaccccgcagacaccggcgacaccccggcagagccggccgaccccc

SEQ ID NO: 187043 - RNA, 73 nt, Homo sapiens
ggccgccccggccgaaggcccgcgccgggcgcgggcccaggaaaacgcaaaaccagaagcgcgccgacacggc

SEQ ID NO: 187044 - RNA, 59 nt, Homo sapiens
gacgcaccacgaggagccacaaaagcgaaacaagcaaccaaaacgaggagcagacccgc

SEQ ID NO: 187045 - RNA, 63 nt, Homo sapiens
gacagagaggagccaacccccagagcccagcaacacaacagcccggcagcaaaccgaagccgc

SEQ ID NO: 187046 - RNA, 79 nt, Homo sapiens
cacagcccgcaggcggcgacagcagagcgcccacgccccagcagcaggacggaggggggaaccagagaaaacacacaca

SEQ ID NO: 187047 - RNA, 73 nt, Homo sapiens
ggcgaggacagcggccgccgaacaccaagcgccgcacaaggagcagggaaaacggagaccacaagccgccaga

SEQ ID NO: 187048 - RNA, 37 nt, Homo sapiens
ccagaagaacgcccagcagggggagcgacacccaaca

SEQ ID NO: 187049 - RNA, 120 nt, Homo sapiens
gacaacgagcagccacacccagacgagcgggagaaggcgcgcgcaagcacgcgaggaggcgggaggggcgaacggggaagacaggccgaggagcggggagaccaaccagcagacaaagcc

SEQ ID NO: 187050 - RNA, 83 nt, Homo sapiens
agcggacccccgcggcgcgcagcccagcagacaaaggagagaggcaccaccagaccaaagagagcgagaaccaaagaggccgc

SEQ ID NO: 187051 - RNA, 69 nt, Homo sapiens
cagaagaggcgcccagaaacagcacggagaaacaaaacgacagaagaaaaagaaaaacacgaggcccag

SEQ ID NO: 187052 - RNA, 87 nt, Homo sapiens
gaggggaacggaggccagagcgcgagcccgacaggaggaccagccccagggagccgcaggaccccagcaccccacccgaaccgaaga

SEQ ID NO: 187053 - RNA, 56 nt, Homo sapiens
gggaacagaaaaggcaagaaggaacggaaggcacaacaggcgggaacaagcggagc

SEQ ID NO: 187054 - RNA, 65 nt, Homo sapiens
gaaagacgccgcaccaggacccaaggaaccaacaaaccccagggaaccggcggcagaagggaccg

SEQ ID NO: 187055 - RNA, 57 nt, Homo sapiens
agcgcgggagcaccggaccacgcccgcgacgggaccaaccaagccgagggaccccag

SEQ ID NO: 187056 - RNA, 76 nt, Homo sapiens
acacgagcacaagacccaaaaaggcgacgcaaccaagcaccgaaacagcagagagaaccccacccaagagacaaag

SEQ ID NO: 187057 - RNA, 75 nt, Homo sapiens
acgcggcaacccaccgcggcaagggggcagcacggccaccgcaggagccaggccaggcagcgcagacagaccccg

SEQ ID NO: 187058 - RNA, 83 nt, Homo sapiens
agcgccccgagcccggggaaggagcaggaagaggaccacagggaccccacccggcggaggaacaggggaggcgagcagcccag

SEQ ID NO: 187059 - RNA, 66 nt, Homo sapiens
caagccaagaaaagacgccccagggccaccgccagcagacgacagaagggaggcgcaaagaaggga

SEQ ID NO: 187060 - RNA, 83 nt, Homo sapiens
ggggccacggacacaacgaggccacgggagacgcgaagcacccgagggacccgaggagcccaccaagccgaccgcaggcaagg

SEQ ID NO: 187061 - RNA, 73 nt, Homo sapiens
aacaaagcaaaagggccaggacacgcagcacagcagaggacgagaacagaagggccaagaaaagaagcagaaa

SEQ ID NO: 187062 - RNA, 78 nt, Homo sapiens
gagacacagcaggagaaaggagcggaggagaagggaagcgcagcaggaccccgccagcggccggccgggcaggcgagc

SEQ ID NO: 187063 - RNA, 88 nt, Homo sapiens
cgacaagccgcggcagccgcggaccaccgccgccagggcgaccccgcacacacacccaccagccacggcagcccagcggggacccagc

SEQ ID NO: 187064 - RNA, 77 nt, Homo sapiens
gcaggggcggaggcggaggcagaggggaggcgcgaaaggccccaagccggcccaggaaagaaagaagagccgccaga

SEQ ID NO: 187065 - RNA, 67 nt, Homo sapiens
ggccaaccccgccacgcaggcaggggggaggccaacgccgaggggccaaccccgggaccaccccagc

SEQ ID NO: 187066 - RNA, 63 nt, Homo sapiens
caacaaagaacaacagaggaaccgggaggcaccccggcgcagaaggggacaccgaaaacgaga

SEQ ID NO: 187067 - RNA, 62 nt, Homo sapiens
aggaaaacaaaagcgcacaggaagaacaaagggaaacacgagccccaccaaagcaaaggccg

SEQ ID NO: 187068 - RNA, 71 nt, Homo sapiens
gggaggacggcacaccgcggcggcgaagaggagaggaaggcaccaaagacagaacaaagaagagaaccgag

SEQ ID NO: 187069 - RNA, 78 nt, Homo sapiens
agcgacggagagggcagaagaggaggagcccccagaaacccacaaagccccgaggggcagggagcccagagggaaccc

SEQ ID NO: 187070 - RNA, 74 nt, Homo sapiens
ccgccagccccagccccggagaggagcagggggcgaggaagagacaggcgggggagaagaagcagggccaaacg

SEQ ID NO: 187071 - RNA, 79 nt, Homo sapiens
gcgcccggcccgaggcccaggacagccagacggcccgccacgggccccgcagccgcgcccgagcgcccgagcagggaca

SEQ ID NO: 187072 - RNA, 40 nt, Homo sapiens
aggagcgcgggccaggagaaggaccagggaagacacggga

SEQ ID NO: 187073 - RNA, 75 nt, Homo sapiens
cccacaaagccaccaaagcgcaaaccacacaccaggagccagggcggcagagcgacgagaaggagggaggacaga

SEQ ID NO: 187074 - RNA, 79 nt, Homo sapiens
ggacacccggggagaagccaaggagcgcgcccaagcacaaacacccgaggacccagagaccccacggaccagagagcag

SEQ ID NO: 187075 - RNA, 74 nt, Homo sapiens
gagaacagggggccgcggccagcacagaaaggggaggccacacaggaagaaaagaagcgcaagaggaaaacaga

SEQ ID NO: 187076 - RNA, 111 nt, Homo sapiens
aacagccccacgaaacacggcaagaccggaacgacagaccccgggcacaggaagaccgaaagcaccccacgaacaaccacaggaagagacacacaagaaacaaaacggcag

SEQ ID NO: 187077 - RNA, 85 nt, Homo sapiens
agcccccacgggccaccgacccgcagcccagccgacccggagaggaaagcccaccagccgagaaacaagccgggggcgagccagg

SEQ ID NO: 187078 - RNA, 77 nt, Homo sapiens
gggcgaggcggccgcggggcccgagcgcagcgaaggacaagcagcagcaagacccggcgagacaagcagggggggaa

SEQ ID NO: 187079 - RNA, 78 nt, Homo sapiens
agcggcgggaggccaccgccagggaccaagccgagacaccagacccgagccaagaagaccaagagcaaagcaggaaag

SEQ ID NO: 187080 - RNA, 68 nt, Homo sapiens
caacagcagccgcaaaaacaaggcggaaacaacgggcaaggagcccccaaaccggaggaaaggccacc

SEQ ID NO: 187081 - RNA, 83 nt, Homo sapiens
ccggccggcccagcgcccccacggagcagcacccacccgcacagccgaggagaaggcaaccaaaggcaggacacaaaaacaac

SEQ ID NO: 187082 - RNA, 69 nt, Homo sapiens
aggcccaagcgaaaaagcgggaacgcaggacccaaagcgcacaacaacaaccaaaaaacaagcagccaa

SEQ ID NO: 187083 - RNA, 41 nt, Homo sapiens
cacaggcacaccaaggggcagagaccaacagaccagcaaca

SEQ ID NO: 187084 - RNA, 74 nt, Homo sapiens
agagaaggaagggaacaagaggggcagcaagggccaaaaccacacaagacccggcgacacagcaggacgaacag

SEQ ID NO: 187085 - RNA, 67 nt, Homo sapiens
aagaaagcccagaaggaccgagagaacggccaccaagcccgcagcagcaaagaacacaccaagagac

SEQ ID NO: 187086 - RNA, 78 nt, Homo sapiens
gcgagcgagggggggcgcgccggaaaccggagcgcgcagcagaaccaagaaggagcgagggaggagcagcgagacagc

SEQ ID NO: 187087 - RNA, 73 nt, Homo sapiens
gaacccaccggaagggaagagagaaggcagaaacaaaaaagggagagaaaaagcccggcggggagggcacaga

SEQ ID NO: 187088 - RNA, 77 nt, Homo sapiens
caaagaccgcgacgccaggaacacgaggacccaaagaacaaacccggagagaagaaaaccccagcagggcgccagga

SEQ ID NO: 187089 - RNA, 78 nt, Homo sapiens
accgagaccaaaaagacagccaaaagagaagcagaccccacgagcgaaagggaaaaaacgaaggaggcaggaagagcg

SEQ ID NO: 187090 - RNA, 79 nt, Homo sapiens
ggcgaaggagcgcaacccaggaaggaacgcaagcacaggaccagaaacgaaaggcagcagaagaggaaagccagaaaga

SEQ ID NO: 187091 - RNA, 72 nt, Homo sapiens
gggccacccacaggccgcaaagcccggccccaccgcgcccgcagagagaggcaccagagccggacccccagc

SEQ ID NO: 187092 - RNA, 84 nt, Homo sapiens
ccaaagaccggagagcaccgcaaacacagacaaaaggagagacgccagaagcaagaacaaaaggagcagaaaaccagcagaaag

SEQ ID NO: 187093 - RNA, 84 nt, Homo sapiens
ccggcccggagcaacgagcgcagcgccgaagacgaccccgacgcaggccaggagccgcggacagaagccgagcacggccgagac

SEQ ID NO: 187094 - RNA, 80 nt, Homo sapiens
gagggagggacgaagcgcacagcaaacagcgcacggcggaaggaccgggggagagagaagaacaggacgagcaacaacag

SEQ ID NO: 187095 - RNA, 83 nt, Homo sapiens
agcagggacgccacccaacaggcccaacgaaccgaagagaaaaggccaccaggaaacccaaaagccagaacggccagaagaac

SEQ ID NO: 187096 - RNA, 98 nt, Homo sapiens
cgcggcccggcccggccccgaggccggcaacggagacccaaggacaccagaggaccagaacccacgagaaacagacgagccaaccagaccccaggagc

SEQ ID NO: 187097 - RNA, 61 nt, Homo sapiens
gaaggaccaagaaccagacaacgaagagaggaaagaagcggaaaggagggagcacacaaca

SEQ ID NO: 187098 - RNA, 82 nt, Homo sapiens
cggccagaagaaaacgaggggcggaacacccgccaaagcagagaaaacaaacacacggcaagaggaaccaagccaaacccca

SEQ ID NO: 187099 - RNA, 76 nt, Homo sapiens
agccacgaagaaaaggggaaggaggcgaacaggaagggacgccagacgggacacgcacaggggcgaggccggcccg

SEQ ID NO: 187100 - RNA, 85 nt, Homo sapiens
aagcgcagccaggccgcggaggcgggggccgcgcgcgcgcgccgcgccgccgccgggaagcacaggaagccggagaaccgaagga

SEQ ID NO: 187101 - RNA, 90 nt, Homo sapiens
ggagaaggaaaagggaaggacaaggaaacaaacacaaacggggcagagaccaacagaccagcaacaggccggcagggcacagcagccgca

SEQ ID NO: 187102 - RNA, 51 nt, Homo sapiens
gcccagaggaccccagccgcgcccgggagagcaagagagacggagcaccac

SEQ ID NO: 187103 - RNA, 75 nt, Homo sapiens
gcccggggaacagggcagcaagcgacaggcgcagcaggagccgcaaagggcaagacaaaacggcaggaaaaacca

SEQ ID NO: 187104 - RNA, 75 nt, Homo sapiens
ccagcaacaggaacaacaacgcagccaccagaggaaaggggacacaaggagggcggccaccaaggaagagcggca

SEQ ID NO: 187105 - RNA, 71 nt, Homo sapiens
aggaaagcacgcagcaaaaagcaggggccggaacaacacgggcaccacaggaaggcgggaaaaccaagaac

SEQ ID NO: 187106 - RNA, 76 nt, Homo sapiens
gcccagcaagagcggaggagcgaaagcgagaaggaacaagacaggcagaaaagagaccaaaagaccggaagcgaaa

SEQ ID NO: 187107 - RNA, 65 nt, Homo sapiens
caacagcgaggggacgagaaagggacaccaggggggaaaaaccacacaggcaaagaacgcgcaaa

SEQ ID NO: 187108 - RNA, 51 nt, Homo sapiens
ggaaggcaaaaagcaggaagcgacccggaaccgggaaaccaggcaagaagc

SEQ ID NO: 187109 - RNA, 81 nt, Homo sapiens
cgccgcgccggcacgcgagaggagcgccgggaaggcacggcgcaaacggcgccgggccaggaggaggaggaagcccgcgcc

SEQ ID NO: 187110 - RNA, 76 nt, Homo sapiens
gaggagaggccaggcgggagaacaccgcagcagaacagagagaagggcgggagaaaccaaggaaagagaaaagcgg

SEQ ID NO: 187111 - RNA, 77 nt, Homo sapiens
accggaaaggagcgccgcagaggcacgaaccggagaccgaaacagggcccgggacaaacgacaaccccgacgagcac

SEQ ID NO: 187112 - RNA, 78 nt, Homo sapiens
cgaaacccccccccccacccaccaaaccggagggggaaaaaacccaaggcgcaaaggcccgacaagagaacagaaccg

SEQ ID NO: 187113 - RNA, 73 nt, Homo sapiens
acaaaaccacaagggaggaaaggagaaaaccggaagagaaaggccgggaagcaggaaagaaaaaaacaacaga

SEQ ID NO: 187114 - RNA, 82 nt, Homo sapiens
cagggaaaggccacggaagagcgcggcggcgaagggagggccgccccaaccgacgcaccagccggaggaggagggacagggc

SEQ ID NO: 187115 - RNA, 68 nt, Homo sapiens
acaaagcggccgaaacagaaaacaagagaccacagaagagagggcgaagcaaaaaccgaaaggggaga

SEQ ID NO: 187116 - RNA, 93 nt, Homo sapiens
accaagacagagcaaggccacgacccacgagacaggggcccaagaaaaagcaccggacggcaaacagcgcacagcaagggcagaggaaaagga

SEQ ID NO: 187117 - RNA, 60 nt, Homo sapiens
caaggcgcgccagggcacagggagcagccgaagagcaaagggggaaccgcccccgacgga

SEQ ID NO: 187118 - RNA, 53 nt, Homo sapiens
ccagagcgacagcccgggacaccaagaaagaacgcccccccgggggcgagaag

SEQ ID NO: 187119 - RNA, 83 nt, Homo sapiens
agcagcggcacgaccggcaccgaacgacccaagccagccccaacaccacacaagcaaagcgggccacagagaagaggagcaag

SEQ ID NO: 187120 - RNA, 71 nt, Homo sapiens
cggggaggccacgaaagccaagaaaagagcgacacagacaagacggccaacagggagcggccgagaaacga

SEQ ID NO: 187121 - RNA, 110 nt, Homo sapiens
caggcggcgcggcggcggcccgggacccgcggaagccggcagcggagaagcggagcgaggacgaagggaaacccagacgacaaggaaggccaagggacccacgaccaacc

SEQ ID NO: 187122 - RNA, 110 nt, Homo sapiens
gcggaagcaagcacggaaagagacagcgacggcaaaagcgcaaccagggagaaacccccgaaaaaggcagaagcagccagccccaaagaggaaaagaagaggagagacac

SEQ ID NO: 187123 - RNA, 79 nt, Homo sapiens
gcagcagacgaggcggacgcaccgagaccagaccgcagccacaggcaaaggaaggagaacggagcagaggagcggcccg

SEQ ID NO: 187124 - RNA, 86 nt, Homo sapiens
gaagcggggccgccgagccgcgcggcgggaagcggcgaccgccaccgggagggggaagagccgggaggacaccggcccggcaagac

SEQ ID NO: 187125 - RNA, 37 nt, Homo sapiens
agaaacgccaagccaaccccggagcgccggagccccg

SEQ ID NO: 187126 - RNA, 103 nt, Homo sapiens
gaaaacaaaagaaaacgaaaacgcgacaaaacaaaacaccggaggggaaggcgcaagacaacagagcaccaacaaaaagcaagccggggaaccggaggaaaga

SEQ ID NO: 187127 - RNA, 69 nt, Homo sapiens
cggggaggaggagccacggccggggacagagacggagcgcaagaggacggcagcgcggcgaagggaccg

SEQ ID NO: 187128 - RNA, 76 nt, Homo sapiens
cccagaagagcaggaaaggagggcaccaaccacaaaggagacaccaaaggaggcaagcaaagaccaaccaacgaag

SEQ ID NO: 187129 - RNA, 72 nt, Homo sapiens
aaaagaacagcaaagcaggaaaaaaaaccgaaagggggcagcgaccagaacagggagccccacgccacacaa

SEQ ID NO: 187130 - RNA, 69 nt, Homo sapiens
gccaacggaccgcgccgccagggcccgacccgaaaagcgcagccaaccagacgcgcgaagaacgggaca

SEQ ID NO: 187131 - RNA, 70 nt, Homo sapiens
aaagagggaaaacccaccgggagcacgaaggcacccggaaacaagccacgaaggagagaaaaccagcagc

SEQ ID NO: 187132 - RNA, 82 nt, Homo sapiens
gcgcccgccgccagcaggggcgccccggacgagagcccggcgggggcgcagggcggagaacggaaaagcaccaggaagcaga

SEQ ID NO: 187133 - RNA, 64 nt, Homo sapiens
ggacaggacagaagacgaagcaaaacgggagcgaagcagaggcagaacgggaaaaaaaagcacg

SEQ ID NO: 187134 - RNA, 41 nt, Homo sapiens
gccaaccgccgagacaggaaggggacggcaggaagcagccg

SEQ ID NO: 187135 - RNA, 77 nt, Homo sapiens
ccaccacgagcgggagcgaagagggaaccagcgcgcggcagccgcgacggcccccacagagagcacacaaacaaagc

SEQ ID NO: 187136 - RNA, 71 nt, Homo sapiens
gcagaggaaggcccagcccaggggggccgaaagaaacgaggccaaacacacaggaacgccagaccccagcc

SEQ ID NO: 187137 - RNA, 75 nt, Homo sapiens
cagacacaaccgacccgccaagcgcacacaaaagaggagaaaaccgggcgcagccgaggagcagacagaagagag

SEQ ID NO: 187138 - RNA, 54 nt, Homo sapiens
gggagacgacgcgcgggccgcgagcggggcgacccgaggaacaagcgggaaacg

SEQ ID NO: 187139 - RNA, 72 nt, Homo sapiens
cggacagcggggcccgcggaaaacaggaccaagaacgcccagcccgcgggcaccggcagaaaggaggaggaa

SEQ ID NO: 187140 - RNA, 82 nt, Homo sapiens
gcaggagggagagcacagcaagagccaggaccaccggaagccagaaagccaagggaagaagcagaagcaagcccagggcaag

SEQ ID NO: 187141 - RNA, 40 nt, Homo sapiens
cccacagagagagcgcccgggggggggccccagcccggcc

SEQ ID NO: 187142 - RNA, 59 nt, Homo sapiens
aggacccaaaaggcgcagggaccccagacaagccgggaagacaagcagaccccccagag

SEQ ID NO: 187143 - RNA, 74 nt, Homo sapiens
acacaaaggcccagcacgcacgccaagacgaggggccacacaccacagcaaccaaggccacgacggcaagcaac

SEQ ID NO: 187144 - RNA, 77 nt, Homo sapiens
ccgaagcaaaaccaacgcaaccaccccaggcgagagccacagaaggaggaggggacagcagcaggagcccagcaaag

SEQ ID NO: 187145 - RNA, 83 nt, Homo sapiens
cgggcccaaggcgcgccggcgaggggaagccgcgcggccggccggccgacagggacggccaccccggaccgacaagacagcgc

SEQ ID NO: 187146 - RNA, 66 nt, Homo sapiens
cacagccgcccaccggaaggccaccccgcagcccagagaggaccaggaaaaaccccagaccaccaa

SEQ ID NO: 187147 - RNA, 62 nt, Homo sapiens
ccccgcaacacggcacggcacaagacgcgccggagcagccggcagacaccgaaaacgagaaa

SEQ ID NO: 187148 - RNA, 74 nt, Homo sapiens
aaaaacccgcaacagcccccgcccaaggagcggcaggggaggcgaagaagagcccggacagaaagacgacaaaa

SEQ ID NO: 187149 - RNA, 75 nt, Homo sapiens
cggagccagccacaagggcggaacacagagagggaagaggcccggggaggggaggagaggagccgggaccggaga

SEQ ID NO: 187150 - RNA, 63 nt, Homo sapiens
cacgccacacaccaaacgagccaaagcagacccccaagcgagcggagcggaaggagcgcgccc

SEQ ID NO: 187151 - RNA, 54 nt, Homo sapiens
cgcaagcaccgaaccgcacagcaagcccaggccaacagaacgaaggggaccaga

SEQ ID NO: 187152 - RNA, 78 nt, Homo sapiens
aaaagcacaagcaggcagagggcagcacaggacccagggaacagccaagaaaagacgcaaagagagcagagcacaaca

SEQ ID NO: 187153 - RNA, 75 nt, Homo sapiens
cgaaaggcacaagcaggggcggaagccacacaggccagaacgagggggccagaacacccaacagcggccggcagc

SEQ ID NO: 187154 - RNA, 79 nt, Homo sapiens
cgggggggccgccaccggccgccgccgccgccgcccaggcgcagggagacacccacagagccccacagcagccagacca

SEQ ID NO: 187155 - RNA, 71 nt, Homo sapiens
ccaagaaaagacgaagcggacaagcgcggacaccgaagcccgaggccacaggacacgccaagggagcggcc

SEQ ID NO: 187156 - RNA, 56 nt, Homo sapiens
accccaagccaggaaaagccgggaaccccgacagcagagacgacgcggcaagcagc

SEQ ID NO: 187157 - RNA, 82 nt, Homo sapiens
cgcgccggaaaccggagcgcgcagcaggcccccggaacgccacccaacccacgcccccgcccgccgacagagagggaggagg

SEQ ID NO: 187158 - RNA, 68 nt, Homo sapiens
ccaacagcagaaaacacggaagacaccaaacacaaagcgacgcgaggaaaaaaaacgacacacaaagc

SEQ ID NO: 187159 - RNA, 79 nt, Homo sapiens
caagccgcacgcaaccaccgcccggccacaccaggaagagaccgacccaaacccacccaagggcaggacgggaagcagg

SEQ ID NO: 187160 - RNA, 71 nt, Homo sapiens
gggaagcaaaacccgggccaaaacgagcacacagaccacaaacaaaggggcaaagaaaaaggagagaaaaa

SEQ ID NO: 187161 - RNA, 71 nt, Homo sapiens
ccagggaccgggcgggcgggccccccggcaacgcggcaagccaaagcgccacagggaccgaaaacaaggac

SEQ ID NO: 187162 - RNA, 34 nt, Homo sapiens
gcgccccaccccaggcggggaagagacgaccaga

SEQ ID NO: 187163 - RNA, 73 nt, Homo sapiens
ggacagagcgaagcgaccaagcagaagaaggacaggagaaacaggggccaaaaaaccaaaggagaagaaaacc

SEQ ID NO: 187164 - RNA, 59 nt, Homo sapiens
cggccgcaccccagcgcccgggcggcggccgggagaggagggacagcagcgggagaaca

SEQ ID NO: 187165 - RNA, 78 nt, Homo sapiens
ccggagaaacacaggaggaggaggagagacccaaggaaagacagagccagcgaggggggccggggcaaagaccggcaa

SEQ ID NO: 187166 - RNA, 39 nt, Homo sapiens
cagaagccagccagacagaacccgaacggcaacagacga

SEQ ID NO: 187167 - RNA, 69 nt, Homo sapiens
aagaacagcaagcccggccagggcccgaacgccgagcagaggccgcgaaagccaccaagacgcaaacca

SEQ ID NO: 187168 - RNA, 55 nt, Homo sapiens
cgcgcagggacagccacccagcaacaacaaggcagccggcacccgcacaacccag

SEQ ID NO: 187169 - RNA, 82 nt, Homo sapiens
caagggcgggcaggagcccgaacccccccgcgccgggagccgggcccgaccagaccgggcagacgccccgaccaggcgccca

SEQ ID NO: 187170 - RNA, 81 nt, Homo sapiens
ggacagccagggcgcggccgcccgaagaggagagagcgcgggcccaggaaggcaggagccagaagccaggagccacgagag

SEQ ID NO: 187171 - RNA, 82 nt, Homo sapiens
agggcgaggcacaccagcaggaggcgccagaaagaacaacccgaacgcaaaagaaggagaccaggcaccggagagagaagcg

SEQ ID NO: 187172 - RNA, 75 nt, Homo sapiens
ggccccaacaaccaccacaccaccacccccaggcacaccgcgaccccgcgcaagggcgaacaagcagaagaaaag

SEQ ID NO: 187173 - RNA, 76 nt, Homo sapiens
cccaagccccccggcgacgacgcccgaggaagaacgaagcacagcggaacaagcgaaccacaaagaaaccgacccg

SEQ ID NO: 187174 - RNA, 79 nt, Homo sapiens
aagcccgcggagaaaaggcgacagcccgccaagacagaagcaagcgcagcgaggggagccaaccccagaagaagagccg

SEQ ID NO: 187175 - RNA, 57 nt, Homo sapiens
ccaggcgcccaaacccggaccagcccgacagagaaaggcacaacccagaccagagaa

SEQ ID NO: 187176 - RNA, 70 nt, Homo sapiens
gagaggaccggagccgagcgggagggcgaggaagggcgcacggaaaaggcacccgggcaagcagggcaca

SEQ ID NO: 187177 - RNA, 94 nt, Homo sapiens
aacgggcagcgaaagcaacagcccaccggacgggaggcgggggacagccggcgcggcccaagaagagacaccgggccgacagaggggagccacg

SEQ ID NO: 187178 - RNA, 70 nt, Homo sapiens
ccagggaccggacaggaaaggaacacagacagagcgggccaaaggagaaacaagaaggagacaacaacgg

SEQ ID NO: 187179 - RNA, 34 nt, Homo sapiens
gcaccgccacaagaacgggaccacgaacaaacaa

SEQ ID NO: 187180 - RNA, 75 nt, Homo sapiens
cacaaccgcagggaccacagcaccgaaaacaccaggaaagacaggagaccaaaaagcaccaaaaagcccgggcac

SEQ ID NO: 187181 - RNA, 75 nt, Homo sapiens
caaggaagaacaggaaccagcagcaaagaaggcacggaaagagagggcccgagggcaggacagcaggcaccggcg

SEQ ID NO: 187182 - RNA, 61 nt, Homo sapiens
aaacaggagacccaagaaaacacccgaaggcacaagcaacggggcggcacacaaggagcga

SEQ ID NO: 187183 - RNA, 83 nt, Homo sapiens
acaccgcggagcaaggaaaagacccggaaagaagagacacagaggagccacacccccaggaacagcgaaagcagccagaaaaa

SEQ ID NO: 187184 - RNA, 81 nt, Homo sapiens
gcgaacaaagccgaagagggaaaacaaagaaccaagcacacggccgagaacagcgacaccaccagaaaagacagcgcaagc

SEQ ID NO: 187185 - RNA, 57 nt, Homo sapiens
ccgcgggaacgggaccaaaaggaacagcggaaggcaccccgaccagcagagggacgc

SEQ ID NO: 187186 - RNA, 77 nt, Homo sapiens
aacacacaggacccaaggcaaaggacgaagggaggggcgagcgacgcggaaagaagacccccagaaaacagaacccg

SEQ ID NO: 187187 - RNA, 77 nt, Homo sapiens
caaggaagaacccgaagcaccgccagggccccccacgcgagaacccgggccggggcccgggggcccgagcccccacc

SEQ ID NO: 187188 - RNA, 39 nt, Homo sapiens
cgaaggagaccaggcaaaaagaacacaggcagcacccca

SEQ ID NO: 187189 - RNA, 89 nt, Homo sapiens
gggccgggggcggagggccagcgacccgaggacaggcggggccgccagacccacccggacccccagaaaaggaaacaaggaacaacaaa

SEQ ID NO: 187190 - RNA, 43 nt, Homo sapiens
gagagggggcaggccgccagacagagaaggggaaaagagaaag

SEQ ID NO: 187191 - RNA, 56 nt, Homo sapiens
gcgcccgcggagcccgaacacggcgcggaaagacaaggagccgggccgagaaaccg

SEQ ID NO: 187192 - RNA, 79 nt, Homo sapiens
ggaagacacgaggggcagaaagagaccgcagagacagccaacacggcacccacaggaaggaagaaggaaaagcggaagc

SEQ ID NO: 187193 - RNA, 75 nt, Homo sapiens
gcaggcccgaggcccggggagaacagacagcaaagaggaaaggacagggcggagagaaaggacgaggcaagccaa

SEQ ID NO: 187194 - RNA, 80 nt, Homo sapiens
gaacgaccgagaagaggaagagacacagcccccaaggacagcagacggagagaaggaacaacgaaaaagggcaggagcag

SEQ ID NO: 187195 - RNA, 61 nt, Homo sapiens
cacccccggaacagagggggggggcccgccccggggcaacaccggcccgagaggccccgcc

SEQ ID NO: 187196 - RNA, 98 nt, Homo sapiens
agagccaaagacggaccaggccccgacagacaaggcacacagacagagcgggagccaccagcgccaaagggaagccaggagcccgggggcacggggag

SEQ ID NO: 187197 - RNA, 78 nt, Homo sapiens
aaaaagaccggaagcgagaccgcaagaaaggcaaccacagaggagccaggccgcagggaaacacaaccacaccagcga

SEQ ID NO: 187198 - RNA, 78 nt, Homo sapiens
aaacggcaagagccagaagcccggcggaaggaaggacagaagcccccagcaacgcggaaccccaaaccagggaagcgg

SEQ ID NO: 187199 - RNA, 49 nt, Homo sapiens
cgcaggaccccgaacccgcagggccccgaagcccgccgagggccgggaa

SEQ ID NO: 187200 - RNA, 71 nt, Homo sapiens
gaccgccgggcaagacccaagcacaaggaagcgagggaggcgcaggaaagggagagcggccagaaacaaaa

SEQ ID NO: 187201 - RNA, 63 nt, Homo sapiens
ccgggccgcgggacccggagcaccgggccggcggacaggagggcgcgggagacggagcaccgg

SEQ ID NO: 187202 - RNA, 86 nt, Homo sapiens
agggaagcggcagccaaagcaccggcagagcaaaaggggacaagcaaccgccagccccaaccaccacagaccaccagccgcacccc

SEQ ID NO: 187203 - RNA, 55 nt, Homo sapiens
gaagaaaagaaagagcagaggaagaggaaagcgaacggggcccaagaaccagcgg

SEQ ID NO: 187204 - RNA, 55 nt, Homo sapiens
aagggacaaggccccacacacggaaacgggagccaagcgacccacggaacccacc

SEQ ID NO: 187205 - RNA, 77 nt, Homo sapiens
caagagacgggggggaaaaacccggacggcacaccccaggaaccaggaaaggaaaaggagagaagacagagaaagga

SEQ ID NO: 187206 - RNA, 78 nt, Homo sapiens
acaggggcgggaccaaggacgaccgaaaacccagccagacaaaagagaagcagaggagcgaagaaagagagaggaaca

SEQ ID NO: 187207 - RNA, 83 nt, Homo sapiens
gcggggcgcacgggcgccggccacccccaggaaccgagacccaaaggggaacccccccagcgcgcgggaccccaggacccgcc

SEQ ID NO: 187208 - RNA, 85 nt, Homo sapiens
gagccgcgcacgcacagacaagaacaagaacccggagcgaaagccgggcggaacaggaggacggggaggcgcacggcacccacac

SEQ ID NO: 187209 - RNA, 98 nt, Homo sapiens
gacccgaccagcgggggcgcggcggccgcgcagccacccaaggggcgagcaccaaagccaaggaagcccagaagaaagagcaccccccggaagcagca

SEQ ID NO: 187210 - RNA, 71 nt, Homo sapiens
cgggggcggcggccagcagacaccggcccaccagccgccaacaggacaaggagaaagagagacaacaggcc

SEQ ID NO: 187211 - RNA, 77 nt, Homo sapiens
cggcggccagaggcgaggcagggaggacccacccccgggggaaaagaacgagacaaaacagaggagaccagaccaga

SEQ ID NO: 187212 - RNA, 70 nt, Homo sapiens
gccggcggggcacggggggcgacggccaagcgaccagaccgccgacccagcggacgccaagaagaaaggc

SEQ ID NO: 187213 - RNA, 83 nt, Homo sapiens
cccggcccgacaccgcgggccgccagacgggaaggagccgagagagcaccccaccccgccagcgagccccgcagccacagccg

SEQ ID NO: 187214 - RNA, 89 nt, Homo sapiens
aagcagagaagagaacggaacaagcacagcaggagaagccggaaagaacaagagggaggacgcgagcggaagagaagcaaaaagacaag

SEQ ID NO: 187215 - RNA, 77 nt, Homo sapiens
cccgcccggccagccacggccacggcaacgagcggggcaaccacgcgagacgccaccaggacgaaggacacaaggac

SEQ ID NO: 187216 - RNA, 80 nt, Homo sapiens
aaaagggcagaacgaaaaagaagaaccgcaaaagccagaggggacaaacagcaggggccaagaaagaaggagagggggcg

SEQ ID NO: 187217 - RNA, 73 nt, Homo sapiens
ccacgccgccacaggccaaggacacgcccaccaagaaagaaccggaaaggggaccgggccaggaaagcagaaa

SEQ ID NO: 187218 - RNA, 64 nt, Homo sapiens
ccgccccacaagccccacagcgggccacaccgcgcacgacaacggcaagcggagaagagcaagg

SEQ ID NO: 187219 - RNA, 75 nt, Homo sapiens
ccaaagcccagccccaggcacagaccccagcgagagagaagaagaaggaggccgcggccagaaacccaagaaaaa

SEQ ID NO: 187220 - RNA, 74 nt, Homo sapiens
gagcccaggagcgccacgcgcggaaggcagcgcccagcagcgcaggccggcgcggaagaggccggcggcgggac

SEQ ID NO: 187221 - RNA, 74 nt, Homo sapiens
aacacccaaaagaagcaacacacaagaaccgagggcaccggagggaagcgggccaccgcccggcccccaagacg

SEQ ID NO: 187222 - RNA, 54 nt, Homo sapiens
gggagaacacagaaacccgccccggggagaaaaccagcccaaaacaaaaaacac

SEQ ID NO: 187223 - RNA, 90 nt, Homo sapiens
gcaccgaggacccgcccgcccagagaggagccagccacacggaaagaagaaaagaaaagagagagcagaagccaaaaaaacaacggacca

SEQ ID NO: 187224 - RNA, 64 nt, Homo sapiens
gagcagagaccaacccaagcgaagaagagcggaaaacaaggggcgccggcgaaagcaacgaagg

SEQ ID NO: 187225 - RNA, 81 nt, Homo sapiens
gcccccccaccgacacagcccagccggccggagaccacacagggggaggggggggggccaccagcacaacagaaggaacgg

SEQ ID NO: 187226 - RNA, 62 nt, Homo sapiens
gaccaaagacaaaacgagagccagacgaccagccgaacaagcaccccaggagcgaggacggg

SEQ ID NO: 187227 - RNA, 70 nt, Homo sapiens
cagaaaaaagcaagcaaccgaggaagaggaagaacacaaggggaagaggcagcagacacacgccgacgcc

SEQ ID NO: 187228 - RNA, 69 nt, Homo sapiens
cccaccacaccgcaagccaaacagagaagggaaacacgagcgaggggaggccaacggcgagcgccgacg

SEQ ID NO: 187229 - RNA, 79 nt, Homo sapiens
cccgcaagcgggcaaccccaccacacgccgggacaagaaaccagaaccccaggaccccagcgaacccggggccagacga

SEQ ID NO: 187230 - RNA, 56 nt, Homo sapiens
ccagacaccggcgggacgcacccagccaccaggcaacccacgaagaaggcgagaaa

SEQ ID NO: 187231 - RNA, 49 nt, Homo sapiens
cagaaggaaaacaacccaagggcggccaggcaaaaccaagagagcgcaa

SEQ ID NO: 187232 - RNA, 68 nt, Homo sapiens
cccagacccgcccgccagaaccgcgcgccacccacaaccagcaacaggcgacaaggccaagccgccaa

SEQ ID NO: 187233 - RNA, 84 nt, Homo sapiens
ggagcgggacaccccggaagcgggaaagaacgaagagaaagggccagaaggaagacccagaaagagagcgaaaccccaggagcg

SEQ ID NO: 187234 - RNA, 73 nt, Homo sapiens
gcggcaggcaaaccccgccagggccaccagaaacgaggaaaagaaggaggccagcgggacacacaaagaaaga

SEQ ID NO: 187235 - RNA, 76 nt, Homo sapiens
ggcaaggggccaccaggaggccagggggcgccagagccaaagcagccgaaggaagaaaggacacgagaagagcagg

SEQ ID NO: 187236 - RNA, 80 nt, Homo sapiens
ccagaacgccaggcagcccgagcagaggaagagcaggggcacagagagaggagagagaccagagaggaaagagggcaccg

SEQ ID NO: 187237 - RNA, 83 nt, Homo sapiens
ccacggcccaggaaccgaaaaggcgaggagaagacggcaaaaaacgcggcgggcggggagcgcggaccagaagagaacacgcc

SEQ ID NO: 187238 - RNA, 60 nt, Homo sapiens
gggcaagggaccgagggacagccaggaagaagcagccaagcgaaagacagaggcccagcc

SEQ ID NO: 187239 - RNA, 56 nt, Homo sapiens
agcagaacagccccgcggcccggggagaagcgacccgagccacaacgcgaccaaaa

SEQ ID NO: 187240 - RNA, 75 nt, Homo sapiens
gaagacaacaggagacggcaagcaagcgagaggccaagaggaacccgcacaacagaaagcaggaagaacaacagc

SEQ ID NO: 187241 - RNA, 83 nt, Homo sapiens
cgcgaaggccgggacccggccccggcccacaggggggggcaaacccgagagaacggacgacgcagccagagcagcaagaggcc

SEQ ID NO: 187242 - RNA, 69 nt, Homo sapiens
acacccaacccaaaccaaggcaggagcacggagaagagaacgacgaacagaaaaagcccaaagagagaa

SEQ ID NO: 187243 - RNA, 73 nt, Homo sapiens
aaaacaggaccccgcggagaccccgagaaaccgccgaccaagagcgaagcgacggcaccgggaaaacgcagag

SEQ ID NO: 187244 - RNA, 58 nt, Homo sapiens
agccggcccccacggccaccccgacaagggaccgggcgggccccgcaggaaaccccca

SEQ ID NO: 187245 - RNA, 70 nt, Homo sapiens
caccggacacgcagggaccgggggaacagaaagcaacgaggccgcaaagcaacgggacggccgagaaggg

SEQ ID NO: 187246 - RNA, 51 nt, Homo sapiens
gccacacgaggcgacaccaggaaaaggcgaaagaaggaaccaaacggcgga

SEQ ID NO: 187247 - RNA, 72 nt, Homo sapiens
gccaaagccacggaacaagcccaaacaaggacagcagaccacagcccggcaggcccaaaaacccaaagggac

SEQ ID NO: 187248 - RNA, 77 nt, Homo sapiens
ccggagcgcagcggagcagggcgggaggagaccggccgcagccaagccggaacaggagcggcgagcccaaacgcaag

SEQ ID NO: 187249 - RNA, 68 nt, Homo sapiens
cggaccccgccccgcaacgcaagacggaccacgcaaccagcgcccaaaccccgcaaaacgaagggacg

SEQ ID NO: 187250 - RNA, 72 nt, Homo sapiens
aaaacccgaccggaagagacagagagagccaaacccccagggcgacgccaggagcacaccgaaaagaaagga

SEQ ID NO: 187251 - RNA, 88 nt, Homo sapiens
accccagaagaggaggcaaaggggcaaggacccaacccaggagaaaaagagcaagggccagagaaggaggagaaggagacaggcggca

SEQ ID NO: 187252 - RNA, 86 nt, Homo sapiens
ggcggcggcggcggcgcgccccgggggcgacgggcaggcaaaaccccaaaagagccgcgcagcgagccacgcaccaaaccagcagc

SEQ ID NO: 187253 - RNA, 84 nt, Homo sapiens
ccagaagaggaggaagaggaaagaaaaggagcaggaagcccagggcccggacaccgcgccagcaaccacagcgcagggccaaga

SEQ ID NO: 187254 - RNA, 60 nt, Homo sapiens
ccgaaggcgggcgcagcggcggagcggagcggagcccggaggggggggccccagcccggc

SEQ ID NO: 187255 - RNA, 65 nt, Homo sapiens
ggaccccaaggaagccacggcagacacacaacccgacccgacgagaagaaacccgcgccgagcgc

SEQ ID NO: 187256 - RNA, 116 nt, Homo sapiens
acaccgacaccaaaggagacggaaccaagcccagcaaacagagacagcaagcgggggcacaaggccaagacggccaagggagccacagggcccagagcacggaaccggccaggccc

SEQ ID NO: 187257 - RNA, 69 nt, Homo sapiens
gggaacgccgcaccacgaaccagaccaagcggggagcgcaggagaacaccaaccaccagggaagagcgg

SEQ ID NO: 187258 - RNA, 85 nt, Homo sapiens
ggcgaggagaaagcggcgcgcggagggacgaacagcggggacgccccagcagaccgcccaggagaggaaagcaggaggaaagacc

SEQ ID NO: 187259 - RNA, 73 nt, Homo sapiens
cccgcgccgaacaggacgaggccgcacgaaacccgcggcggcacagggaacaccagaggcgggaccacgggca

SEQ ID NO: 187260 - RNA, 72 nt, Homo sapiens
caaaggacacaggccagaggagcacacacaaagaggacccgacaggcagagccacgggcccgggaaccggac

SEQ ID NO: 187261 - RNA, 74 nt, Homo sapiens
aaaaacaaacacacgcaaaggagaaaggaaccgacagaaaccagaagcacgcgagacgcgcgggaggcaggaag

SEQ ID NO: 187262 - RNA, 90 nt, Homo sapiens
cagaggagaacgaaaaaaagagaaaccggggaaccacggacaacccagaggacaacgaaggcggaagcgcaacaggaaaggagagaagaa

SEQ ID NO: 187263 - RNA, 75 nt, Homo sapiens
gcaaacccggaccaggcaccggagaagaacaagacggccccggagcaacaggacaccagcaacagcgccaggaga

SEQ ID NO: 187264 - RNA, 94 nt, Homo sapiens
cgcagccgcccccagcaacgccgccacacccggagaccccaaggccggggggggcacagagccccggaagacagcccccagcgaccagacccag

SEQ ID NO: 187265 - RNA, 75 nt, Homo sapiens
aagccgccgccgagggcccggccaccgcgaccgaggccaacacgggcggccaggcgcccccagggggaccacggc

SEQ ID NO: 187266 - RNA, 40 nt, Homo sapiens
cacccgggagccgcaacggaagagcgagccaaggcagcaa

SEQ ID NO: 187267 - RNA, 79 nt, Homo sapiens
cagggaggaagaaccacgacaaagggggagaggcaccagcaacagaccaaccgcagcaagcacagagacaggaagcccg

SEQ ID NO: 187268 - RNA, 112 nt, Homo sapiens
agacagaggacacaccaaaagcagcccaaaaagccacccagcccaaccaccaaggaagggcggcacggcggagcacgcggcggcacgcgcgcggcgcgaaggaagggaggag

SEQ ID NO: 187269 - RNA, 72 nt, Homo sapiens
cggcccgcgggaagcaggacgcgccgcgccccaaggagcgggcaccgggggggaagaagaccccccagcgca

SEQ ID NO: 187270 - RNA, 77 nt, Homo sapiens
gccagaaaacaccagcagcgcgcaggacccagagaaggaaacacgccaaacagaggccaaaaaggaaaccaggacag

SEQ ID NO: 187271 - RNA, 76 nt, Homo sapiens
caaaaaaaagcgccaaaaccaaaaggccagagagacaccccagagaggagaggcacaggaagggccaaagaagacc

SEQ ID NO: 187272 - RNA, 52 nt, Homo sapiens
acaccacccaggcaaacgaccaaagacaagaagaagagagaagaagcaaacc

SEQ ID NO: 187273 - RNA, 79 nt, Homo sapiens
gacgccgagaaggaggcccagcagcccaggggaaaggaacacccccagcggccaggccgaccaagaagacaggagcaca

SEQ ID NO: 187274 - RNA, 68 nt, Homo sapiens
agggccaaaaaggacagacagacaagaagaggcacgcaggaaaacagggcgacaccccaacgcggaga

SEQ ID NO: 187275 - RNA, 78 nt, Homo sapiens
ggcagcgggcgccagcaaaaccgaaacagaccaccacaaaccaaggcccgcacccccagacgcccaagggcgagcgcg

SEQ ID NO: 187276 - RNA, 77 nt, Homo sapiens
ggaccacaaaacggaggagagagggggagaagcaaccacagacacaacaagcgaaacaagcacagcgcaacagacaa

SEQ ID NO: 187277 - RNA, 55 nt, Homo sapiens
gcgaaggacgacagcagccagaaaaccacggacccaagcccgaaaccacacagca

SEQ ID NO: 187278 - RNA, 85 nt, Homo sapiens
ggcgaccccgcccgggcccgggaaccgcgggccgaccaccaagcacgggcgcagcggcgaacgagcagcgcccgcgggcccgcga

SEQ ID NO: 187279 - RNA, 83 nt, Homo sapiens
aggaacagagaaaagaaaccagcagacagaagcagccccaggaaagagcaaggacaggaggagcagcccccgcagacgaagag

SEQ ID NO: 187280 - RNA, 103 nt, Homo sapiens
gcggggcgcgacgccggcgccccgggcgggcgcagccgccaccggcagcagcagcaccaccggacggaacgccagacccgggagggagaaacgagaggcaggg

SEQ ID NO: 187281 - RNA, 70 nt, Homo sapiens
ccacggcaccacccggggccccgccgagaaaccgcagagcacaggaggagagaccagcagcaaacccacg

SEQ ID NO: 187282 - RNA, 48 nt, Homo sapiens
caagccacaaggaagccccagcacccccccaagccgaggcgggggaca

SEQ ID NO: 187283 - RNA, 69 nt, Homo sapiens
cgcgcggcgcggggaccgcggcccgaaggagagaacggggacaaggcaagacagacacccagccccgac

SEQ ID NO: 187284 - RNA, 80 nt, Homo sapiens
ggcagaccaacaagaggacccaggagaaacgccccaaaaggacagcagcggacggccggaccaagaggcgccgcccccca

SEQ ID NO: 187285 - RNA, 81 nt, Homo sapiens
ggagaaggcgcaacgcggcgcaaccccaaacacagagaaggaggcgcaacagggcaaggcaaagagaaggaccacacaggg

SEQ ID NO: 187286 - RNA, 72 nt, Homo sapiens
ccagaccggcagaagacagcgccaccgcccacacggccacagcggggaagccggcaccaggggggcgcgaga

SEQ ID NO: 187287 - RNA, 79 nt, Homo sapiens
ggaggcgcccccggagccgccccggaggagaaggcagcagagcgggagcgacagggagaagaagcgaaggaggggggac

SEQ ID NO: 187288 - RNA, 83 nt, Homo sapiens
aagaaaaccaccagggagaaaagaagagggaaagggagcagcaccggccacacccacagcacgaccggaacccagcgaccgac

SEQ ID NO: 187289 - RNA, 78 nt, Homo sapiens
gaagagagggccccccgccccccccccccacgcggggggaccggcgaagaaacaggggagaaaccccgcggggaagcc

SEQ ID NO: 187290 - RNA, 86 nt, Homo sapiens
cgggacccccagcgaccacgcagccgcggacgaggccgggacggccgagcggaccaaaaggggaaaagagcccagaaaccaggcgc

SEQ ID NO: 187291 - RNA, 74 nt, Homo sapiens
gccagggcagcgggagcacagcggcgggcgggcaaggcggggacagagaaagaccagggcagaggaagaacgca

SEQ ID NO: 187292 - RNA, 78 nt, Homo sapiens
cgcgcgggccgggaggggacggccgccggagccgcgaggccaagcacacagagaaaaaaagggaacaaaacacagcaa

SEQ ID NO: 187293 - RNA, 81 nt, Homo sapiens
aagaggggccagcagagcaggaaaacgaagaaggcaaaaccaagaggaaaagagacaccgccagaagcaccaggacagcca

SEQ ID NO: 187294 - RNA, 98 nt, Homo sapiens
cggaaagccaagagcgcacgggggaaacaagcgaaaaacaggcaagggcggagggcggcggccccaccccgggcgggacaggaggaagccggcagacg

SEQ ID NO: 187295 - RNA, 89 nt, Homo sapiens
ccgggggagcggcgcggcggcgcgggagcccaaaggggcacaaaacgccccgggagagaagaggaggagcagaagagcgcggaaacaaa

SEQ ID NO: 187296 - RNA, 55 nt, Homo sapiens
acacacagcaagccgccgggacagccacgacgagaggaagaagacacggaccgac

SEQ ID NO: 187297 - RNA, 74 nt, Homo sapiens
cgcccgaggcgaggaggagcgcggcgaaccaaaggcaagaaccggagcaggagaaaagccggaaagaaaacgca

SEQ ID NO: 187298 - RNA, 55 nt, Homo sapiens
gcagggcgagagggcaccgcggacggggccgcccaggacaagggagagacagagc

SEQ ID NO: 187299 - RNA, 73 nt, Homo sapiens
gaaggaccggaacaacgaacagcgaaaagggggaacacaccgaaacagaggaacagcagggcagaggacacga

SEQ ID NO: 187300 - RNA, 92 nt, Homo sapiens
ccggccgcgcccgcggaaccagaccagaacccgagcaaccccgagaagagaagaaccccaaggccggaacagcccaaggagaaggggggaga

SEQ ID NO: 187301 - RNA, 93 nt, Homo sapiens
cgccgcgcgccgcccgagccggagcgccagccagcggcccacccggggggcagcaacggcgacaccagcaagagaaggaacagaacagacacc

SEQ ID NO: 187302 - RNA, 76 nt, Homo sapiens
cagaaacagaacgaaacaacggaaacgggagacgaccccgagggacagagagaggcagaagaaaaagcacccccaa

SEQ ID NO: 187303 - RNA, 73 nt, Homo sapiens
caggaggccgcaagaagggccgaccgcgaacccaccggccaaccaacgggagaccgaagaagcggcaccaagg

SEQ ID NO: 187304 - RNA, 71 nt, Homo sapiens
cgcagggcgcccccgagcaggacgagaagccaaggagagcccggagggcccgggccggggaagaacacgcc

SEQ ID NO: 187305 - RNA, 77 nt, Homo sapiens
cgaaaaccccccgaccccgcgggggcccccggcaggccgaaacacaagcaaggaacacaaagaagaaagaaaggaac

SEQ ID NO: 187306 - RNA, 69 nt, Homo sapiens
acaaggggcggaggaagggaggagacccgaccccagaagaggcccaccgcccagggcgccggacccggg

SEQ ID NO: 187307 - RNA, 78 nt, Homo sapiens
ccagcacacagaggagagcgacgagaaggcgaagaaagcccaaaacacaagagcagaagagaagacagcccacaaggc

SEQ ID NO: 187308 - RNA, 75 nt, Homo sapiens
gagaagaagaaaagcacggaaacgcgcaacggcggaagacccaacaaagaacgcaaacccaagcggcaacacggc

SEQ ID NO: 187309 - RNA, 84 nt, Homo sapiens
ggagagcgagggcccggacccccggcgcgcggccgcggagagcggggcccaggcccgcagggcccagaggagcgcggagaaccg

SEQ ID NO: 187310 - RNA, 82 nt, Homo sapiens
cgaagaagggcgagggagcaagcgcacacgaagagaagcaaggcccaagacccaggcgaaaagaagaagccgacgggggcag

SEQ ID NO: 187311 - RNA, 74 nt, Homo sapiens
aggaacagggaccacggggaaccggaaacacagaagcaccccagaccggacaagggggacccaaccgacgaacg

SEQ ID NO: 187312 - RNA, 66 nt, Homo sapiens
caaggagccaccagcacggaccaggaggcgagcaacaggaggagcacggcgaaccgcaaacagaag

SEQ ID NO: 187313 - RNA, 58 nt, Homo sapiens
caagcaacggacacagaaaggggagcaagaagaaagagcagggaggagggagcgacag

SEQ ID NO: 187314 - RNA, 58 nt, Homo sapiens
caccagagcgacgccagaggacagacacacaccccaggcaacccgccaagagacaaag

SEQ ID NO: 187315 - RNA, 85 nt, Homo sapiens
agacccaggagaagccgcccaaagaacggaaacacagaggccaacagcaagagcaaccagggaccaccccacaacagggaaccac

SEQ ID NO: 187316 - RNA, 82 nt, Homo sapiens
cgggagggcggaggaggagaacacagaaccaccaggagagcaaggcccaggaagacacgagaagcccgaggaggcgaagcca

SEQ ID NO: 187317 - RNA, 77 nt, Homo sapiens
agcagagacccacagaccaggcacccgcaggagaggccccaacaaggcccgaagaccagccgagcccagaagaaaga

SEQ ID NO: 187318 - RNA, 41 nt, Homo sapiens
aaaaggagaacgaaagcggaccagaacagccaaggaccgaa

SEQ ID NO: 187319 - RNA, 71 nt, Homo sapiens
gagcgagcgagggggggcgcgccggaaaccggagcgcgcagcagaagcgaggggaccagaagaaggagaac

SEQ ID NO: 187320 - RNA, 87 nt, Homo sapiens
cgcccgggccagcggccgcgcacccccggccggaggcaccagcggacacaggacaaggagccaccggagaggaagcggcagacagcg

SEQ ID NO: 187321 - RNA, 70 nt, Homo sapiens
ggagacaaaaagacgcggccggccgggggacgcagccacccgcggcccagaaaggaagcgccaaccacag

SEQ ID NO: 187322 - RNA, 76 nt, Homo sapiens
ggcgagagaagcggagaagagcacaggagacgagagggaccagacaacagagggccaagaacccggaggagggcag

SEQ ID NO: 187323 - RNA, 79 nt, Homo sapiens
gaggagccccggaggcagagcggcgccagcgaacaccaggggaaacacccggggaccaggaggggacagcagagaagga

SEQ ID NO: 187324 - RNA, 73 nt, Homo sapiens
cgagaaaccggaggagcaggaaagaaaccccagaaagcaccccaccaacaacgaacgcggcaggcgcacaagg

SEQ ID NO: 187325 - RNA, 69 nt, Homo sapiens
agagacccaaacgccaacagaaacgcaccaccaagcgggcggcaaagaaggggcgaccacagaggcccc

SEQ ID NO: 187326 - RNA, 80 nt, Homo sapiens
acagagaagaggaaaccccaagcaacaacgccccaagcaacagaaaagcaaaggcagggcgagcacacacgggcgacagc

SEQ ID NO: 187327 - RNA, 80 nt, Homo sapiens
gaagaagaacagagaagagccagaaacagagacgcagagcaccaaacaggggggaaggaagacaaacagagccaagcaga

SEQ ID NO: 187328 - RNA, 77 nt, Homo sapiens
cgcagacggccaaaggacgggacaaagaacaccccaccagaccacccagcaagcccacaaaaaaggcacaagcaggg

SEQ ID NO: 187329 - RNA, 53 nt, Homo sapiens
cagacgcagggcgcccccggcagcccagcagagcacccgaaggcccgaaccag

SEQ ID NO: 187330 - RNA, 83 nt, Homo sapiens
gagccgccaccgcaggcgaggacggcggaccccgcggcgggaggagccgccccgaggagcaggacacgagacacaggccgcac

SEQ ID NO: 187331 - RNA, 123 nt, Homo sapiens
gaaaaaacaggaaaacaaacggacagacaaggaaacgaacgaaacgccgagaaaaagggagaacagccagacgcgcgaacaaaaagaagggcgaggaacgaaaaggcacaaaccgaaaaagaa

SEQ ID NO: 187332 - RNA, 71 nt, Homo sapiens
caccccacagacccgccggggcgaaagccacggagcacccggcaaacagagggcggagacagaaaacccga

SEQ ID NO: 187333 - RNA, 77 nt, Homo sapiens
ccagaagaagggaaggcgcgaggaggaaaggaggacgagaccgggcgcggaccaggacagggaccgccgcgaccacc

SEQ ID NO: 187334 - RNA, 101 nt, Homo sapiens
ggaacagcccggcacagccccagcggagcgacgcagaagacggggacgcaccacgagaaccacgagccaacagcaacagagaaaggaaacgcgaacaagaa

SEQ ID NO: 187335 - RNA, 88 nt, Homo sapiens
caaaccccggggccaccgagaaccccacagcgaaggaaaaggagaagcgccggaccgggcaaggggaggaggaacaaaggacgacggg

SEQ ID NO: 187336 - RNA, 80 nt, Homo sapiens
aaaaaaccgccccgccagcagaaggagggcacgccggggagccacgggcacccccccccggaagacccaaagaccccgag

SEQ ID NO: 187337 - RNA, 79 nt, Homo sapiens
ccagagaccaccccgcccggggagaagcacagccacagaaccagcaggcgaagacgcaggagagcacagacggacccgc

SEQ ID NO: 187338 - RNA, 78 nt, Homo sapiens
agcaggcaccgcgccggagacagaggacgagccacgggccgaagaaggacccaaacccccgagcccggaccccagcag

SEQ ID NO: 187339 - RNA, 51 nt, Homo sapiens
cacacgcagaacgggcggacgggcgcccagccagcacagggaacaccagag

SEQ ID NO: 187340 - RNA, 70 nt, Homo sapiens
aaacaccaccaccaagaaacaccggcggacagccagcgcaacaaaagcaaggaaaccccccaaagggcac

SEQ ID NO: 187341 - RNA, 74 nt, Homo sapiens
gccaaggggagaccacaccaagcgggagacacaccacgccaaggaggccggaagcaaaagagacaaacaagaac

SEQ ID NO: 187342 - RNA, 81 nt, Homo sapiens
cgccgccgccgcccccgccgcccccgcggccggcagccccggggcgcgggcaccagacacgaaagagcagaaggcaaaaag

SEQ ID NO: 187343 - RNA, 70 nt, Homo sapiens
gaaaaggaagccagaagacaggccgccgaaaggaaaagcagagggcccagaggagacaggggaaccagga

SEQ ID NO: 187344 - RNA, 71 nt, Homo sapiens
gaggagaggacaggaccagggagcccacagcgcccaaaaaggcccgccaagcgcccccgggcacgagagcg

SEQ ID NO: 187345 - RNA, 79 nt, Homo sapiens
aagagaaccgcggacagggccgaggaggggggaagcagcgcgcagagacaaccgcagcaccggcagcaacagcgcaccg

SEQ ID NO: 187346 - RNA, 78 nt, Homo sapiens
ccggcaccccaggcgggagcggaaccgcccggcagcaggccagacgcagacaggaaggaggagacagacgcacccgca

SEQ ID NO: 187347 - RNA, 78 nt, Homo sapiens
cgaacgccaccccaccccagagaacgagggagagacggggcaccaagaaccacgaaagcgaacaccaaaaaaaaccaa

SEQ ID NO: 187348 - RNA, 70 nt, Homo sapiens
acacccacagagggagcgcaggggaagaagcaccagcaccaagaccagccagggagacgacccgcgggaa

SEQ ID NO: 187349 - RNA, 96 nt, Homo sapiens
cggagcgcagcggcacgcacgcgaagacagcggcagaggaggggccaagggagaagcacgagccgcggcaggagagcaagcgcagaagaagcggcg

SEQ ID NO: 187350 - RNA, 76 nt, Homo sapiens
aggagaggaggacagacaaaaggaggcaagacagccaaaagaccaaacaaaccagcaaggaggccagcaccaaaaa

SEQ ID NO: 187351 - RNA, 61 nt, Homo sapiens
ggagaaggcgcaacgcggcgccaaggccagcaggcaacacgggagaaggaaccgcaaaaac

SEQ ID NO: 187352 - RNA, 79 nt, Homo sapiens
aacacgccggaaaccccgcccacagcacgagcgcaccccccggaggcggccgagcccacgcgacgaagaacaggagagg

SEQ ID NO: 187353 - RNA, 61 nt, Homo sapiens
aaacgcaagacgggccgagaagcagcgcgaggggccaagcaagaggagccaaccgcccacg

SEQ ID NO: 187354 - RNA, 52 nt, Homo sapiens
gcgggggacgggcagaaaaacagagccacacaaccacaaccccaaaagagcc

SEQ ID NO: 187355 - RNA, 75 nt, Homo sapiens
aagcacaagaagaaaggcacaggccagggaaaaggcaggacaacaggaccagcgaagaaacacaaacggaaaagc

SEQ ID NO: 187356 - RNA, 77 nt, Homo sapiens
aagcccaacgcagcccagaacaggaggacaccccaccagaaaaaacaccagcagcccagcaaccaaaaagaagaccg

SEQ ID NO: 187357 - RNA, 63 nt, Homo sapiens
cccgagagcgggacgcaggaagccgccgggagcgcccgcaggcccgggccggcgccgcgcgag

SEQ ID NO: 187358 - RNA, 56 nt, Homo sapiens
ccgacagccgcagaacacagaggcacaaaaggagaaagcagaagaaacaggagaaa

SEQ ID NO: 187359 - RNA, 77 nt, Homo sapiens
caaggacgccgcagcccagccagccgccaagaacgcagcagcagccgccaagacgaccagccggccgcggaagcccg

SEQ ID NO: 187360 - RNA, 70 nt, Homo sapiens
agaaccgccagggcaccagacagccacgcagacacagccaggcagcacaccgcgcccacaggacgaaacc

SEQ ID NO: 187361 - RNA, 71 nt, Homo sapiens
aaggacggaggcaaagggcacggccggccaagccaagacccgccccgacaagaggggggacggccccaacc

SEQ ID NO: 187362 - RNA, 53 nt, Homo sapiens
gcaacgcaagacaccggcacgcaacagacgaccaaagcaaaaaaaaggccaga

SEQ ID NO: 187363 - RNA, 71 nt, Homo sapiens
acacgacggcggggagagaaaacccagcgccaaaggaacaagagagggcggcagaaggaacaccgagaaac

SEQ ID NO: 187364 - RNA, 84 nt, Homo sapiens
ggacagggacggaagagaggacgcggcgagaggcgccaggaacggaggggcagccgcacccaagaaggacagaccccggcaaga

SEQ ID NO: 187365 - RNA, 77 nt, Homo sapiens
ggaacacccccagcggccagagagaaaaggaacagccgaagccaggggcaagcgaaaccacagaagaaaggaggaac

SEQ ID NO: 187366 - RNA, 76 nt, Homo sapiens
gaggacagccaccggcccaggcggccgaaagcacagaagacggacgggcacaaggaaagccaaaaagccaggggga

SEQ ID NO: 187367 - RNA, 79 nt, Homo sapiens
ggggaggccagagcgggagcgcgcgcggcgcggcggccgggccccgagacggggacgggggcgaggaagagacaggcgg

SEQ ID NO: 187368 - RNA, 76 nt, Homo sapiens
ggaccccggagaggaccaccgagagggaacaggagaggagggacagaagaggaaacagcgggaaccgggacagcga

SEQ ID NO: 187369 - RNA, 73 nt, Homo sapiens
ggcaacaagaaaaggacaccagccccagcagaacagggccggaagaaacacaccggaaaccggagaaagacgg

SEQ ID NO: 187370 - RNA, 73 nt, Homo sapiens
cacaaacccggaaaggccggggagggcccgggcgaaggcagcaaaagaagcaggacccgcccaggacaaaaac

SEQ ID NO: 187371 - RNA, 58 nt, Homo sapiens
ggaacccggcaccgccccaggaaaaaccggaacgggccgggcagggaaacagaccaaa

SEQ ID NO: 187372 - RNA, 83 nt, Homo sapiens
caggaaaaaaaagaaaagagagaaaaaaggagagaagaaaagcggcaagcgccaggggcacagaagggaccacaaacgagggc

SEQ ID NO: 187373 - RNA, 54 nt, Homo sapiens
cagacacaccgcagagaaagaagaggaggggaaggaaccagggcacaggcacgg

SEQ ID NO: 187374 - RNA, 80 nt, Homo sapiens
accgagagcggcccgcagaacgccagcagaaggcacacagcggcaggaaaagagcacagggagggagagaccaagaacaa

SEQ ID NO: 187375 - RNA, 66 nt, Homo sapiens
gggccggccagcgccggaaaccaacaaaccccagaagaaaggcggacaggaggaccacccgacgac

SEQ ID NO: 187376 - RNA, 71 nt, Homo sapiens
gacagagaagcaaagagggcagcaggcccagaaacgcacacaagaagaccaagaggagcggggaaaagagg

SEQ ID NO: 187377 - RNA, 72 nt, Homo sapiens
aggaaggaaaaccgacgagaggagcacggcgaaccgcaaacagaagagggagccagaagaacaaggaaagaa

SEQ ID NO: 187378 - RNA, 69 nt, Homo sapiens
gaaaaggcacaaagcgggaaagaccggacaagccaccaaacgcacaggcgcagggccacggcgagcggc

SEQ ID NO: 187379 - RNA, 71 nt, Homo sapiens
aaaccagagaaaacgggccaaacagaggaaagagcggagcccgccagaaacagacaccacggggcggacag

SEQ ID NO: 187380 - RNA, 73 nt, Homo sapiens
ggacacggggaccaaaaacggacaccagaagaaaaaagcacagcaaggcacagagcggccgcggacccaaacc

SEQ ID NO: 187381 - RNA, 77 nt, Homo sapiens
ccaggagacgagagagcgaacgccagggacccggcaggccgcccccggcaagaccagggagaagggcgaaaaaagcc

SEQ ID NO: 187382 - RNA, 66 nt, Homo sapiens
ggccacagacaccgaaggaaggaggcagccggggccgagagccccaggaaccagggggccacgagc

SEQ ID NO: 187383 - RNA, 78 nt, Homo sapiens
cagggggaacgaggcgccgaccccacaggaagggaagcacagcgacccgcagcggaggaggagaaagagaggaccccc

SEQ ID NO: 187384 - RNA, 75 nt, Homo sapiens
ccgcaacccccagcagcacggggaaggaccggacccggcccgggagcaaaggaagcgcaacgagcaaaggaaagc

SEQ ID NO: 187385 - RNA, 76 nt, Homo sapiens
gaaacccgcaaaggacacaggccagaggagcacacacaaagaggacccgacagaagggacaccaccccaaaacgaa

SEQ ID NO: 187386 - RNA, 86 nt, Homo sapiens
cacgaaacgcccgaaaacagggccggccgcagagcccaccggaaggagaaggaagaggagcgcaccgggcagagaacaccagcccg

SEQ ID NO: 187387 - RNA, 45 nt, Homo sapiens
gaaacgaagaaggcccagcccaccaggcgggggaagcaccgcaaa

SEQ ID NO: 187388 - RNA, 89 nt, Homo sapiens
cacacaggcaagcaggagggcaccccaaaagaaaggagcggcgccgggaaccggccccgggcaaccagccagagaaggagggccgggcg

SEQ ID NO: 187389 - RNA, 54 nt, Homo sapiens
ggagcggcaccaggcaacaaggcgcccaaggggcccgcgcagcaaccaaaaacc

SEQ ID NO: 187390 - RNA, 78 nt, Homo sapiens
gggcccagcccacagaacccagcaccccagcgccggcggcaccgaagaaggagagaccaagacacccaggagaaagac

SEQ ID NO: 187391 - RNA, 74 nt, Homo sapiens
ccgcaccaccaacacccaaagagaagcaggagaaggaacgggaaaagaccaaaaaaccaggccagagcaggagc

SEQ ID NO: 187392 - RNA, 77 nt, Homo sapiens
gacacgcaggaacggcccagcacaagaccgcgacaggcgacgacaggaaaagggaaaaaaagaggcaaggcccaacc

SEQ ID NO: 187393 - RNA, 72 nt, Homo sapiens
aggcacaaagaccagggaacaaaaccggaccagcacgagcgggggacccccccacccaaccacggccgccac

SEQ ID NO: 187394 - RNA, 73 nt, Homo sapiens
cgaaacagcgcagccaggaacaggacgaagaccagcgccagggaaagaagggggaaaaacagaccaagccaag

SEQ ID NO: 187395 - RNA, 78 nt, Homo sapiens
ccgaggcgccggacccagaggcccccagggagccggggagcccggaaagcaggggaagacgggagaaaaggacaagac

SEQ ID NO: 187396 - RNA, 69 nt, Homo sapiens
acagcaagaacaggaacagaagaacaaacgagcacggaggaggaccaggccaaggggaacaaggaccaa

SEQ ID NO: 187397 - RNA, 38 nt, Homo sapiens
cacaggccgcccggccagagcaggcgagaagaaacgcc

SEQ ID NO: 187398 - RNA, 75 nt, Homo sapiens
cgcccaggagggagggacacagccccaaacaggacgaaggcggcgaagggccacagccgccaaggggcaaccgcc

SEQ ID NO: 187399 - RNA, 78 nt, Homo sapiens
gacagcacccacaaccaaacagaaaaggaggaagaggaagagaggagagccggggagcgagcacaaacgacacacgca

SEQ ID NO: 187400 - RNA, 91 nt, Homo sapiens
ggacgacggcggggaaccgcgcagcgagcgccggagcacagaccacgacccgggcggcagggaccagcacaacccgcaccccaggaggggc

SEQ ID NO: 187401 - RNA, 78 nt, Homo sapiens
agggaggcgcgcgaccagagagcaaagccgagcagccacgcggcccgcgcgggaggggaaggcggccccggaccccac

SEQ ID NO: 187402 - RNA, 77 nt, Homo sapiens
aagggccacagcagcccagagcagggcagaacgggagcacggggaccagagccccacgcacccgcacgcacacaagc

SEQ ID NO: 187403 - RNA, 79 nt, Homo sapiens
gcgaaaaggccaagaggaacagaaaccgaagagaaaggccaacgagaacaagcacagaggagccacgcacccaggcgga

SEQ ID NO: 187404 - RNA, 87 nt, Homo sapiens
gccagaccagcaagaggaggggcccggagagggggaagggcccaaagccagaaggcgcgggaagggacgccagggcaccggacacag

SEQ ID NO: 187405 - RNA, 71 nt, Homo sapiens
agaacgcgcgacagggaaaagacggaaagaccaacggagacaaaacagccaagcaagaagaaggggccaga

SEQ ID NO: 187406 - RNA, 61 nt, Homo sapiens
acaaaagaaacgcccacagaacaccgaggagagcagcgacaagagggacagaaaaggcagg

SEQ ID NO: 187407 - RNA, 74 nt, Homo sapiens
caacaccaacacgagggcggcggaaaaagccgccacacgccaaagcgcaagccccggggcagagacacaggaca

SEQ ID NO: 187408 - RNA, 84 nt, Homo sapiens
gccgggacccccaggacgacggaccggacacaccgccacccgcgagcggcccgcacgccacgcccggccggcgggcccgccgca

SEQ ID NO: 187409 - RNA, 61 nt, Homo sapiens
agcagaacaaacggccaagaagggccaccccacagacgcaagagccccgacagcagccaag

SEQ ID NO: 187410 - RNA, 84 nt, Homo sapiens
agaagcagaacccagcgaaggacggcccccagggaggccgaacacacagcgagaacacgaaggggccagaaaaccaggagacgc

SEQ ID NO: 187411 - RNA, 77 nt, Homo sapiens
gaaggcagggcacagcagggcccagcaggggcgcaccgagaaccaccagcacgacgggcacacaaggccaagggcca

SEQ ID NO: 187412 - RNA, 72 nt, Homo sapiens
aagaaggaagagagaccaagcaccgagcgaagacagaaaaaggaaaggcaagggcagaaaagaggggaaaag

SEQ ID NO: 187413 - RNA, 79 nt, Homo sapiens
gaagggcagcccgcgcagggcgagagcgacgggccggcccagggagaacgcaaaaccaccacccccacaaaaaacgcag

SEQ ID NO: 187414 - RNA, 42 nt, Homo sapiens
cgggaagggccaacccagggagaggcggccagcggcagcggg

SEQ ID NO: 187415 - RNA, 77 nt, Homo sapiens
caacaagccacgaccggggagcagagagaggaacaaacaggcaaggagcgccacggaaggagagcgcagacgagcag

SEQ ID NO: 187416 - RNA, 70 nt, Homo sapiens
caggcaaaaaagcaaagccagagccagaaaacagcgaaggaggaaccagacccaaaagagcaaacaaccg

SEQ ID NO: 187417 - RNA, 62 nt, Homo sapiens
gggacacgaggggacgaagaaccccacaggggccagcagaacggcaaggggaaaccagaagc

SEQ ID NO: 187418 - RNA, 77 nt, Homo sapiens
acagcagaaacaaagaagcagcgcgaaagagaccacggcgacagaacagaaccaagccgagaacccgaagaagacaa

SEQ ID NO: 187419 - RNA, 82 nt, Homo sapiens
ccacgaaagccgccaggaaaagcgcccccaccggcgggggaagaagcccacgcacaggcccagggcaacccacaggaagggc

SEQ ID NO: 187420 - RNA, 71 nt, Homo sapiens
ggaaagcaggaggaggggcggcggcgggaagagcgccacaggagccgcagaagcaaaggcaccgccaaacc

SEQ ID NO: 187421 - RNA, 80 nt, Homo sapiens
ggccccccagcccaggcaggggcaaagaaaaaggagagaaaaagaggcaaaacaacaagaagaaaagagaaaaaagagag

SEQ ID NO: 187422 - RNA, 55 nt, Homo sapiens
gcccagcaaccaagaaagccacagcgaaaggaggagaacaagacccacggagaac

SEQ ID NO: 187423 - RNA, 50 nt, Homo sapiens
cgcaggacgccaaaccaagccgcagggggaaggaggagaagagcacgcag

SEQ ID NO: 187424 - RNA, 53 nt, Homo sapiens
cccggccagcagggagacacaggccaggccagggcccggacaacagagacggc

SEQ ID NO: 187425 - RNA, 78 nt, Homo sapiens
ggaagggaggcgggacgcgcgccagacggaagaaagcaacaccaaaacgaccccagcagagaaagcaacagagaccaa

SEQ ID NO: 187426 - RNA, 68 nt, Homo sapiens
accaagaaccaggagacggacaaacagaaccaagagcaacacagacaagaagcagaagaagagaaagg

SEQ ID NO: 187427 - RNA, 62 nt, Homo sapiens
caaacgagagggagccaacaaaagcaacaagagacggaagccagaaaaacccacacgaaaca

SEQ ID NO: 187428 - RNA, 84 nt, Homo sapiens
acgcacaggccgcgcagagcgggaccacccgggcacagcaggcacggagggacgacacaagaccaccaccaccgcggacggccg

SEQ ID NO: 187429 - RNA, 99 nt, Homo sapiens
ccgaaccgccacggccacaaccaacaaggaaagcacgaagggagcccagcgacacaccagcagcagccaaagaccaaccagccccgaggcccccaacaa

SEQ ID NO: 187430 - RNA, 72 nt, Homo sapiens
cagaaaggcgggaaaaaagcacggcagcgcgcgccacgggccaacagggcaggaggacgcggcggcggcgag

SEQ ID NO: 187431 - RNA, 89 nt, Homo sapiens
aagaggagcacgaggggcggcggagcgaggccgcccgccagccagaccgggcgcccgccgcagaggagagccaggccccggggccccag

SEQ ID NO: 187432 - RNA, 74 nt, Homo sapiens
acccgcccagcccccaagagcggcaacaggaagaagaagcgcacaaggagcacaacagggagcggaagacgaca

SEQ ID NO: 187433 - RNA, 77 nt, Homo sapiens
cgccccccccccaccgcgccccgggaccagccgcgcggcgggacagcggccagagagccaacgggccggcaagccac

SEQ ID NO: 187434 - RNA, 71 nt, Homo sapiens
gcacagcacgggcagagccaggacaaaccagaacaaggagccagcgaaggaacagacgacagagagcagaa

SEQ ID NO: 187435 - RNA, 69 nt, Homo sapiens
aaaaacgaggaggccagggaagaccaaggaccaagaacccccgcccggagccaagcgcgggaagggccc

SEQ ID NO: 187436 - RNA, 84 nt, Homo sapiens
cgccagccgcaccagccgcccaagccgcacagccgcggcggcagcagcaggagaggggaccgagacccgacgagagagacgagg

SEQ ID NO: 187437 - RNA, 48 nt, Homo sapiens
aggagagggggcagcacaccggcaggggacgcgccacagacgggggaa

SEQ ID NO: 187438 - RNA, 81 nt, Homo sapiens
cccaggaaaagaccaggacggacaagcacagccggaagggcacgagaggaaaggccacccccacccggggaggcaagcagc

SEQ ID NO: 187439 - RNA, 69 nt, Homo sapiens
acaggcaggaaagaagacgccacaaaccggagggacaccgccgcccagccacaggaccgacaccgaaaa

SEQ ID NO: 187440 - RNA, 89 nt, Homo sapiens
ggcgcgagccgcagccggcccgccgggcacacagggaccaagaagccccggggacacgcgagaaaagacgccgaagggaagaccagcgg

SEQ ID NO: 187441 - RNA, 79 nt, Homo sapiens
aagaaaacggcgagaggggcgagaacgccacgcgggccggcgaaagcggaaaacaaagagggaaaacggagaaaagccc

SEQ ID NO: 187442 - RNA, 62 nt, Homo sapiens
ccccgggcagcgggccgcccggcagcagggaaaagggcagaaggggacacacgagccaaaac

SEQ ID NO: 187443 - RNA, 65 nt, Homo sapiens
ggaaaaggccacgggaggaagacccaaaaggacagaaagcgggacacaagcaggagcacagaccc

SEQ ID NO: 187444 - RNA, 78 nt, Homo sapiens
cagccacacaagacacacccacccgaaaagagaacacgaaagaaacccaggaagcccgcagagaggccgcccaagaac

SEQ ID NO: 187445 - RNA, 71 nt, Homo sapiens
caaaacgcgcagagggaaaccacaacagaaggacggaaagggcaaaaagaaggcccccggcccaaggccga

SEQ ID NO: 187446 - RNA, 76 nt, Homo sapiens
cgggaaagaggaagcaaaaaaaaggcagcacagagcacacgagagcccaaaagcaaagcagggcagcaaagaacac

SEQ ID NO: 187447 - RNA, 58 nt, Homo sapiens
aaaacagccaaaagaaaggccagcaccgaagaagagggagacccagggaagcagaacg

SEQ ID NO: 187448 - RNA, 74 nt, Homo sapiens
acgcacagcagaagccgaacggccgaagaaagaagcagaccccaaaaggcggaaagaaagaagagaaagaagcc

SEQ ID NO: 187449 - RNA, 80 nt, Homo sapiens
acggaaacagagcacccaagagaagagcgagccgcagccgacaaaggagacaggagggaccgggcagaagaacgggggac

SEQ ID NO: 187450 - RNA, 80 nt, Homo sapiens
gaaacaaagcaggaaaggcgccagagcacagcaggccggaaaagccggcgggcagcagcggcgcacaaaagcaggaaagg

SEQ ID NO: 187451 - RNA, 65 nt, Homo sapiens
gcggccggagaaacgaggagccagcccgagcgggaagaagccgcagcaagccgcagcggcgcgca

SEQ ID NO: 187452 - RNA, 65 nt, Homo sapiens
ggggccgccagacacccgcggcgaaggcggccgggccgggcccggggcagaagaaaaagcccaac

SEQ ID NO: 187453 - RNA, 61 nt, Homo sapiens
ccggagggggaaaaaacccaaggcgcaaagagggaaccagaggacagacaacaccgagaac

SEQ ID NO: 187454 - RNA, 79 nt, Homo sapiens
cggaccaacagaacaacgagagcaaagggacgaaaaaggacagccaaaacggacaagccaaggcacgagccaaagaaac

SEQ ID NO: 187455 - RNA, 68 nt, Homo sapiens
aagccagccaacgacaacaccagcaaggaacaggaacgggaaaacggaaagaagaccgcaacgaagaa

SEQ ID NO: 187456 - RNA, 76 nt, Homo sapiens
acgagaccaaaggccagcccacaaccgccaccacccagggcggggaagcggaagagggaagcagggagcaccccgg

SEQ ID NO: 187457 - RNA, 76 nt, Homo sapiens
cacaccgggcccccaccagaaggggacagggcaccggagaaacgccaggaccgagacgccaccaccggccacagca

SEQ ID NO: 187458 - RNA, 71 nt, Homo sapiens
gggaaaggcgggacacgaccccggaccacgggaaggcaacagggcacagcacgagaaacaggcaggagacc

SEQ ID NO: 187459 - RNA, 73 nt, Homo sapiens
aaaacccacaagcgggcacgcacagccggaaccgcaccagccaaggcagggcaagaacccgccacacaaggcg

SEQ ID NO: 187460 - RNA, 60 nt, Homo sapiens
cggccccaccgccccaccaccccaccagacggcgccccaagaccagcaaggcacacaagg

SEQ ID NO: 187461 - RNA, 72 nt, Homo sapiens
acccccgaccgcagcgcgcgcggcccacggcgggcgcgcccagagggcggagcgacacggaggagccaaagg

SEQ ID NO: 187462 - RNA, 80 nt, Homo sapiens
gggccgccccaccccacagccagagacgcgcacgaaacgacgaagaggcccgaggacagaggagcaaaggagggacggaa

SEQ ID NO: 187463 - RNA, 69 nt, Homo sapiens
cggggccgcgcagggcggccccggcgggggcgcgggcccccacagagagcacacaaacaaagcgaaacc

SEQ ID NO: 187464 - RNA, 63 nt, Homo sapiens
gacaaaaccccaccaccggcagcaccgaacaaccgggaaaaccaacggcccggaggaccacag

SEQ ID NO: 187465 - RNA, 76 nt, Homo sapiens
aggagcacccggcggagcagagccagaccgccagagccgaggcacccgacgcgacaggcggaagagcggggccagg

SEQ ID NO: 187466 - RNA, 80 nt, Homo sapiens
accggagagagccagcgcagaagggacggagcccagccgaggaccgcgaagaggaacaagagcacggacgcccgggagcg

SEQ ID NO: 187467 - RNA, 71 nt, Homo sapiens
ggggggaggcaggaccggaccgcaacagcaagaggcacggagcccaggcgccggaacccggaccaaggacc

SEQ ID NO: 187468 - RNA, 68 nt, Homo sapiens
caagcagagaaaaacggaggggagccaagaagccaacaaaagaggaaaagcgggaaagcgcagaccag

SEQ ID NO: 187469 - RNA, 71 nt, Homo sapiens
ggaacgcacgcccaggacaacgccgaaggaaaagcacgcccaggccaaaggaaccccggccgggcgaagcg

SEQ ID NO: 187470 - RNA, 79 nt, Homo sapiens
aaggcaggggcgaccgagccggagccgcgaacggaggcaggagagaagagacgaggaggaggggagaccgcggcaggac

SEQ ID NO: 187471 - RNA, 70 nt, Homo sapiens
ggggaagcgcaaaaacaagacggggcgccccacagaggggcgacgggacgcaacccaccacgaagcggag

SEQ ID NO: 187472 - RNA, 76 nt, Homo sapiens
cgggcgggggcgcgccccgcgcgcagggaccgcccgaccaggacggcacagccccaggggcgggccacgcgcgggg

SEQ ID NO: 187473 - RNA, 65 nt, Homo sapiens
aaggcagccacccaggcccggaagcccaaggacccagggcaagaaccagacgacagaaaagaaga

SEQ ID NO: 187474 - RNA, 54 nt, Homo sapiens
accgacacgacgcagcacgggacacaccaaaccgggaagccccgaaaagaagcg

SEQ ID NO: 187475 - RNA, 78 nt, Homo sapiens
accgcgccaccacccaggagaccccacgccgccaagcaggcagaaccagcgcccccagcgagcagacacagggagggg

SEQ ID NO: 187476 - RNA, 54 nt, Homo sapiens
aaaaggagccacagcaaaaagccacgccacaagaggaaacccggccggcgggca

SEQ ID NO: 187477 - RNA, 74 nt, Homo sapiens
gccccggcccccgaacacccagggagccaacgggcagcagacgacaggacggcagagccccaagaaagcgcaac

SEQ ID NO: 187478 - RNA, 78 nt, Homo sapiens
gccggggcagggacggacccggagccgggccagcaacagagcgggccggggacggaccaaccaagaagcgaagaaaag

SEQ ID NO: 187479 - RNA, 73 nt, Homo sapiens
gaccccaaacggaccaccggaagcggccacgcagcccccacgcagaccgaagacgacccacaggagcaaaccc

SEQ ID NO: 187480 - RNA, 70 nt, Homo sapiens
cagggcggcggccagcgccacgcccaaagaagccaaagccccagacaaccacaggcagccaagggagccc

SEQ ID NO: 187481 - RNA, 81 nt, Homo sapiens
caagcccagacgacgcgcggccagggccaggggaagaacccaagacacacacagcggagcaacaaggagggaagccacaag

SEQ ID NO: 187482 - RNA, 73 nt, Homo sapiens
gcggggcgaccaggaaagaggaggcgaggaccgccgcaccccaccgggcagcaaggggggacacggacaagac

SEQ ID NO: 187483 - RNA, 75 nt, Homo sapiens
aggagggaggacggcccacgagacccaccggaacagcaggagagagagcccggaaaagaacacaggagagaaagg

SEQ ID NO: 187484 - RNA, 67 nt, Homo sapiens
gcccaggcaagagcaacacgccacagaaaccaggcgggagggaagggagacagggacaaggaacaga

SEQ ID NO: 187485 - RNA, 80 nt, Homo sapiens
cggaccagccccggccccaggaccgaggaccgagacagagggccgcgaggacccggcgggcgagcccggcgcaggaacgg

SEQ ID NO: 187486 - RNA, 65 nt, Homo sapiens
aagacgggaggcagccacaccaggaacccccgggcacggaaagcaggggaagacaaccggaccca

SEQ ID NO: 187487 - RNA, 70 nt, Homo sapiens
ccgaagaccgcccgcccgggagcggagcgcaagaagaaggccgggggcacgccgcacgcaagaagaggac

SEQ ID NO: 187488 - RNA, 73 nt, Homo sapiens
acgccaggaggcggaggcggagggagagaaccaaaggcaagaaccggagcaggagaaaagccggaaagaaaac

SEQ ID NO: 187489 - RNA, 42 nt, Homo sapiens
aaaagcgggaacgcaggacccaaagcgaagaaacagagcaca

SEQ ID NO: 187490 - RNA, 51 nt, Homo sapiens
ccacaaccgccgacaaccccgagagggccacgaaaaaggagaggagagagc

SEQ ID NO: 187491 - RNA, 76 nt, Homo sapiens
cgacggccacagcccccaccaagagcccccggccagaagagcggacaacgaagaccagagcccaaaagaaccacca

SEQ ID NO: 187492 - RNA, 73 nt, Homo sapiens
cgcgacaccaagagggaagcacagggcgagacgcaaccagaacagccaagggagcgagaagcagaaaaaccag

SEQ ID NO: 187493 - RNA, 39 nt, Homo sapiens
acgcaccaccggggacaggcacacaggaccccgcgagcc

SEQ ID NO: 187494 - RNA, 56 nt, Homo sapiens
cccgcgaaacacacggaaagggccgacggggccggccacgccagcggaaggcgcgc

SEQ ID NO: 187495 - RNA, 84 nt, Homo sapiens
gcccaaggagcgccggcccccacaaagacacccccgccagggcccggcgagcggcagaacagagcggcagggcggccgggccgc

SEQ ID NO: 187496 - RNA, 73 nt, Homo sapiens
cgaggcgggcgcaagagaaggcaccaagagcaagccaaggaaagggagagaacggacaaggcggcagagaagc

SEQ ID NO: 187497 - RNA, 70 nt, Homo sapiens
gagcacaaaggagaaaaccagaggaagagaaacaccaaggaaccacacaagaaaagaaagcaaaaggacc

SEQ ID NO: 187498 - RNA, 52 nt, Homo sapiens
cgggacacggcaaaggggggcacggagcaacaggaaagcggagggaaacccc

SEQ ID NO: 187499 - RNA, 89 nt, Homo sapiens
cggggcaagggcgagaccggcgagccgcaggaggcgcggccgagccccgacggccacccggcggcaccacgccacgggaaggcaggcaa

SEQ ID NO: 187500 - RNA, 35 nt, Homo sapiens
agagacaagagagaggccagaccaagaagccaggc

SEQ ID NO: 187501 - RNA, 78 nt, Homo sapiens
gacggccgggagggcccgccagccgcgcccgaaggacagcaaaaggagaaccagggagaggaggagaaacccacaaac

SEQ ID NO: 187502 - RNA, 80 nt, Homo sapiens
aacccagaaacagagggaggaagacagccagcagcgggggagccgaacgcggaacaacacgagcagaaaacaggggaaga

SEQ ID NO: 187503 - RNA, 76 nt, Homo sapiens
agacggcaagacagaaaacaccgagcacacaggaccagaacagcgcaggagcacagaggaggaggcaaaccaaagc

SEQ ID NO: 187504 - RNA, 78 nt, Homo sapiens
ccgcccaagccgcacagccgcggcggcagcagcaggagagaaaaccagaaggcaccgacaggaaaggaaaaggagaac

SEQ ID NO: 187505 - RNA, 62 nt, Homo sapiens
agaaagcacagaacgaaggaacccccccaaaggcccgagccaaaaaaaggcaggagcacacc

SEQ ID NO: 187506 - RNA, 70 nt, Homo sapiens
caccaggaaacgcgcaagacgcccaagagaagagagacaacggagcccccacaaaggggcccgcaggaac

SEQ ID NO: 187507 - RNA, 85 nt, Homo sapiens
cagcccggccgccacgcgcccccagccccgcaggcccaaccgccgccagcaccaggccagcaccaccgaagacgaccccgacgca

SEQ ID NO: 187508 - RNA, 74 nt, Homo sapiens
gcacacagcaggcgcccaaaagcggggcgaccaggcaggcccacaacccaccagaaaacacgggggccaaagga

SEQ ID NO: 187509 - RNA, 82 nt, Homo sapiens
gcggcagagagacagaagcggagagcagcagaaagaacagaggcgacggcagaagagaccggaccaaaccagagacaaaagg

SEQ ID NO: 187510 - RNA, 75 nt, Homo sapiens
cccccccagggccggccgggagggcggccgcagcaggcccgccgaaacccacaaagaaaccaagagaggacaaca

SEQ ID NO: 187511 - RNA, 70 nt, Homo sapiens
gaggagggggcaccgagcaacgagggcagcaaggaacgcacaaaccgcagccacgcgaggcgaggaaagc

SEQ ID NO: 187512 - RNA, 44 nt, Homo sapiens
caagggagcaccaggagagaaaggaagcggaccccggcggcggg

SEQ ID NO: 187513 - RNA, 74 nt, Homo sapiens
aggaaggccacacaacagagccaaaaagacccgacgcgagcaaacggaagcaccaaaggggcccggacagcggg

SEQ ID NO: 187514 - RNA, 71 nt, Homo sapiens
acgcggggcagcccgaggcgcaccagacacaagacgggaaggagggccgccagaaggagccggccaaaacg

SEQ ID NO: 187515 - RNA, 68 nt, Homo sapiens
gcaaagaggccgagaacgggaagcgagaaacagagagacaggccaaagccccaaggccagagaagcgg

SEQ ID NO: 187516 - RNA, 52 nt, Homo sapiens
ggggcgagaggagccgggcagcagaaaaggcccgagccaaagaaggacagag

SEQ ID NO: 187517 - RNA, 75 nt, Homo sapiens
cagggaacggcaacggcccagaagaaggaacagaccaacggacaagggcgcaagccaccgcgaccccagccgccg

SEQ ID NO: 187518 - RNA, 67 nt, Homo sapiens
ggcaccgcggcaagcaccacaaaggaacgccacacgcgaaaaacgaccaaaccgcacaaacaaagcc

SEQ ID NO: 187519 - RNA, 77 nt, Homo sapiens
aaagggaccccagccgacgaaccacggaggcccaacaaggcgcaccgagcaccacgacgggagcgccaagcccaacg

SEQ ID NO: 187520 - RNA, 108 nt, Homo sapiens
cgagacgaccgcaccacggcaagggcaaccgcggggcaagcgggccacgcacccgcaccaaggccaaggcaccagacccggaggagcagcaccccggcaggcagacca

SEQ ID NO: 187521 - RNA, 80 nt, Homo sapiens
cccaaaccgggcccagcagaagaggaacccgaaaaccccagaagagccgaagcacaaaggcgccagcccacccccggacc

SEQ ID NO: 187522 - RNA, 103 nt, Homo sapiens
gaccgacaggccggcaaaaagcagcccagaccggccccggcacagggcccagagccgggccgagggcaagaggcagcaaaccgagagcccacccggaaaggag

SEQ ID NO: 187523 - RNA, 80 nt, Homo sapiens
ggaaaagacacaaggaggcaccaggagcagcaaaaaagggcagacacaggagggggcccagagagagcaggggcccggag

SEQ ID NO: 187524 - RNA, 76 nt, Homo sapiens
cccagaggaggggaacaggccggcgaacacaaagagacaggaaggaaacccaaggccacaggcccccagccccccg

SEQ ID NO: 187525 - RNA, 88 nt, Homo sapiens
cggcacggcgcaggaggagaccggcggcagggcaagcggcgacggaccccaaggacaaggaagaggggagccaaagaccaagcaccag

SEQ ID NO: 187526 - RNA, 82 nt, Homo sapiens
ccccccgcggcagcagggagccaccagcagcggggggcgacccccagaagcggccccgagccccggccccaaagacccaaaa

SEQ ID NO: 187527 - RNA, 55 nt, Homo sapiens
cgagggcggccgcgccggcccagcaacggggcggcacacaaggagcgaagggcag

SEQ ID NO: 187528 - RNA, 80 nt, Homo sapiens
cgcgccccaccccgccagcccagagccacggcggagaacggaaaagcaccaggaagcagagaggaccgcagaagggaagg

SEQ ID NO: 187529 - RNA, 68 nt, Homo sapiens
cagcacccccagcgggcagaccagaagaagagagggggccggcgcgggacggacagagacaccgcacc

SEQ ID NO: 187530 - RNA, 72 nt, Homo sapiens
agacggcggagaccccgaaggcgcaaacgacaccacccgaccgacgaaaaagagccacgcccccacgagcgc

SEQ ID NO: 187531 - RNA, 50 nt, Homo sapiens
ggaaggagccaaggaggaggaaaacaggccagggcagaccagaccacgca

SEQ ID NO: 187532 - RNA, 72 nt, Homo sapiens
gacagcgagaacaaaggagagaggaccacccagaggagcaacaaccagagagacacccaagaaggacaagcg

SEQ ID NO: 187533 - RNA, 72 nt, Homo sapiens
aaaaacaaaaagccgaagcacagaaagaaacgccccggagcagccaggcacacgggacaagaccaccccagg

SEQ ID NO: 187534 - RNA, 68 nt, Homo sapiens
acaccgcggaagcaaaccaagcgcgggggaagaagagaaagaaaaccagccgagaagaaaccgcaaga

SEQ ID NO: 187535 - RNA, 61 nt, Homo sapiens
ggcgcaggccgggcccggagcgagagcgcccgcccccggacgagaacacaccaacaaaaga

SEQ ID NO: 187536 - RNA, 74 nt, Homo sapiens
gacccggccccaaccacccccgccccccagaacggcggccaaagcgccagacaagggccgagccccggagagcc

SEQ ID NO: 187537 - RNA, 81 nt, Homo sapiens
gagacgacaccagccaaggacccccgggagcccaggcaggccagacccagaagagggcccagcaccagaagcggaaaggga

SEQ ID NO: 187538 - RNA, 90 nt, Homo sapiens
ggaacccggccacagccagcagcaggggaccaaaagaacccagccaacccgcagagggaggggaggggcgagcggaggagagcggggccc

SEQ ID NO: 187539 - RNA, 55 nt, Homo sapiens
agacggggccacccccacacgcccccagccaaacaggcagcccaacacaccggca

SEQ ID NO: 187540 - RNA, 70 nt, Homo sapiens
ggcccccccaccagagaaacccaccagagaaggcgcggccacccaggacccgggggaggcagcgaagaaa

SEQ ID NO: 187541 - RNA, 83 nt, Homo sapiens
gcgaaggccgggacccggccccggcccacaggggggggcaaacccgagagaacggggagcagaagaggggaagaaagagaccc

SEQ ID NO: 187542 - RNA, 56 nt, Homo sapiens
cagaacacagcaaggaacacagaaaccagggaacaggaaagagcagggaaccaccc

SEQ ID NO: 187543 - RNA, 79 nt, Homo sapiens
aaggacaggcagagcaaacaaggacaaaaagccccaaagaaaaccaggaaaaagccaggaaggaaaacgggacagaagc

SEQ ID NO: 187544 - RNA, 72 nt, Homo sapiens
acggcaaacaaggcgggggacccagcaggcaggagggagaggacgcagacggaaccgaccgagcagggcaca

SEQ ID NO: 187545 - RNA, 63 nt, Homo sapiens
agagaaaccaaaagaaccccaaaaagacagcagagcggagagcagacaagaagccccgcccca

SEQ ID NO: 187546 - RNA, 70 nt, Homo sapiens
ggggaccgccgcgagacaagcagaggccgagagcagagaagggcgcggggcagagcacggaggcagcaga

SEQ ID NO: 187547 - RNA, 75 nt, Homo sapiens
agacggcgcagacgccccccccggccagccccgggcgcgggcaaaggaacaaaagcggaagagaaaacagggggc

SEQ ID NO: 187548 - RNA, 66 nt, Homo sapiens
gaagcaaagggaaacgagaaacgacaggaaaaccaaaggaccgaaaaccccaggaaacaacagaac

SEQ ID NO: 187549 - RNA, 55 nt, Homo sapiens
gccagccgcagaggaagacccgacagcacgaaggaaaccagacggacaccggggc

SEQ ID NO: 187550 - RNA, 76 nt, Homo sapiens
gcaccaccaggagaaggacccagcgaggggggccggggcaaagaccggcaagacggaagggcgacacgggggccag

SEQ ID NO: 187551 - RNA, 73 nt, Homo sapiens
aaccagccgccggaacagccaggaaaagggagaccaccgaccgcagacgggccggaggagcgcaaaccgaacc

SEQ ID NO: 187552 - RNA, 63 nt, Homo sapiens
ccccgaagcagacagccccgccaggcccagagacgggacccaggggagaaagcgccggcccag

SEQ ID NO: 187553 - RNA, 84 nt, Homo sapiens
aaacgccgaaaggacgaggaacgggccggaaaagcccagcggcgccagagcaaagaaaaagaaggaagcacagcacaaagaagg

SEQ ID NO: 187554 - RNA, 75 nt, Homo sapiens
caagggccaacaccaggaccacccgagaaggggaagacgagggaagcccagaggcacggggcagaacaccaacag

SEQ ID NO: 187555 - RNA, 55 nt, Homo sapiens
ggcagacgagcggaggacacccaacccggcggcggagaaaccaccacaaacacga

SEQ ID NO: 187556 - RNA, 61 nt, Homo sapiens
gagaagcggagcggcagagaaaaaggccaccgaggaaacgaagaagagaaaaagaagaaag

SEQ ID NO: 187557 - RNA, 73 nt, Homo sapiens
gccaagccggagggggcccaccgaggcccgcacggcagaccaccaaccacggacagaggagccaccggcccag

SEQ ID NO: 187558 - RNA, 78 nt, Homo sapiens
gccagaagcggcaaaagaaaacacaggcagacggacaaaaaagaacaggagaagcgaacacgccaaggcaacacaaca

SEQ ID NO: 187559 - RNA, 69 nt, Homo sapiens
cccggagcgcgaggacccggccacaaaagccaccgcacgacagcagagcaagagcgccagacacagcca

SEQ ID NO: 187560 - RNA, 72 nt, Homo sapiens
aacagcaacaaaaaaaagcaggccaaaggaaaaacagaccgaaagggaaggagaagaaccacagacaaagac

SEQ ID NO: 187561 - RNA, 75 nt, Homo sapiens
gcgccgcaccgaggcagcccgcggcaccgggggacagaaagccaacaggcagaccagagacagcgccacgcaccc

SEQ ID NO: 187562 - RNA, 67 nt, Homo sapiens
caaaagaagacgccacaaacacaggcccaggaagagcggagcagaccaccgcccagcaaaaagcggc

SEQ ID NO: 187563 - RNA, 74 nt, Homo sapiens
acaacagaacgcagagaagggcccccgagcaacagacagaaaagaggagacagagcaccgacagagaaacgaca

SEQ ID NO: 187564 - RNA, 51 nt, Homo sapiens
agagggggcccggggggaggaggggcaggcccggcgcaaccccagaaaccc

SEQ ID NO: 187565 - RNA, 75 nt, Homo sapiens
aaagaggaaccagaagggccaccccgaccccaagggcagccggacaggaggccagggcacgggaaggcagcacga

SEQ ID NO: 187566 - RNA, 52 nt, Homo sapiens
ggcccgaccggccgcgacagcgaacagcgcggccgcagaggagaacagaagc

SEQ ID NO: 187567 - RNA, 57 nt, Homo sapiens
ccggggcaccagggaaaacacacccgagacccagacagaggcgggcaggggcacggc

SEQ ID NO: 187568 - RNA, 47 nt, Homo sapiens
ccgagagcgagaacagagcgcaaaagacaacccacgaaaaccacacc

SEQ ID NO: 187569 - RNA, 70 nt, Homo sapiens
gccgcgaagaaaaccaagaaccgaggaggcgcagccagccagagggcgaaccaaagaaggaaggcgaccc

SEQ ID NO: 187570 - RNA, 61 nt, Homo sapiens
cacccaaagccccaaggagaagaacggagacgggaagaggccacggcgcaaccggaaagcg

SEQ ID NO: 187571 - RNA, 80 nt, Homo sapiens
gaacacgcccagccaaggaagaaccaacgcgggaagcacggaccaccagacacacaacaacaggaggcaaacccacagcc

SEQ ID NO: 187572 - RNA, 84 nt, Homo sapiens
cggcccccgcaacgcccccggcccgcagcccccgccggccgcccaacaccgaacaccgcgcacgggacggcagcgcggaagacc

SEQ ID NO: 187573 - RNA, 75 nt, Homo sapiens
ggcgccacacccccccgacgccgcgcggggacgcaagacaacaaaagccgaacggaaagaaagacaggacaaaca

SEQ ID NO: 187574 - RNA, 60 nt, Homo sapiens
agggccaggaaacaagacgaagccaagacaggccagaaacccagaaagaaagaaaagcaa

SEQ ID NO: 187575 - RNA, 34 nt, Homo sapiens
ccacgggcccccgcgcgcagaccacaggcaaacg

SEQ ID NO: 187576 - RNA, 69 nt, Homo sapiens
gaccaagaaccagaaacgggagggaaggaagagacccgggcagacggaccacaccgcgcgccaccagga

SEQ ID NO: 187577 - RNA, 69 nt, Homo sapiens
gcggaggcacaagaaaagggaccaacggaaccacaagaggcacgcggcagaacgccaaaaggaagccca

SEQ ID NO: 187578 - RNA, 69 nt, Homo sapiens
cggccacgaccaagaagaagccgggaccccacgccggccagaacacacagaaaagggccaaaggaagaa

SEQ ID NO: 187579 - RNA, 36 nt, Homo sapiens
aggaacccaaacagcaaggaaccggaaaaacacccg

SEQ ID NO: 187580 - RNA, 73 nt, Homo sapiens
aaagaacgggcacagcagcggaaaaacacagagggcacacggcacagaccagcgaccccaggaggagaaacaa

SEQ ID NO: 187581 - RNA, 53 nt, Homo sapiens
aggagcacaacaggcagacagacaacagggcgacagccaggaagccacagacc

SEQ ID NO: 187582 - RNA, 78 nt, Homo sapiens
aaaaaagagggcccaaggagaaccacggcaccacaagagacaagacagggagagggacccaagcggccaacggcgcag

SEQ ID NO: 187583 - RNA, 79 nt, Homo sapiens
ggaaaggagcggggagccccgcgccacaggacaaaagccacgaggcacaaagaggagacagccaagcacagggaggaag

SEQ ID NO: 187584 - RNA, 114 nt, Homo sapiens
gcaacacgccgccgagcagccgccagccccacggacggacgccagccccacaacaccccgccacaagaagagggcagacaggagggaaagcacaccagcagggaccaagcccag

SEQ ID NO: 187585 - RNA, 78 nt, Homo sapiens
cgagcggacccggaccggggcgcaaagacccccagcaacagcaggggggggggaagaccgaagaccaagccgcggggg

SEQ ID NO: 187586 - RNA, 58 nt, Homo sapiens
ggagaacagcccgaccacggggggccacgggccccgaccgcccacaagcgcacggggg

SEQ ID NO: 187587 - RNA, 74 nt, Homo sapiens
ggagcgcgcccggcggggagcgcagcgcgaccaggccagagagcacgcagacacgaccgcccagcacggaacgc

SEQ ID NO: 187588 - RNA, 70 nt, Homo sapiens
gaagaaaagagaaccgcagaggaaaacgaaacagccaaagagcacagggacagaaaaacagcgcagacga

SEQ ID NO: 187589 - RNA, 68 nt, Homo sapiens
cgcaggcaggaaaacaagccaggccccgcgaccaagcccccggagcggccagaagaagcacggcaaac

SEQ ID NO: 187590 - RNA, 77 nt, Homo sapiens
ggaacagcgagacacgggacaaaaaccaaagggggcagcggcaagcaggggagccagccacacagagacagaccacc

SEQ ID NO: 187591 - RNA, 107 nt, Homo sapiens
ccccggcgggcccgaggcggcgagagaggcaggcggagccgaccgggccaggaaacgagaagaacgaaagagaaacccaaaaaaaggagcaaaagagcgaaagcagg

SEQ ID NO: 187592 - RNA, 64 nt, Homo sapiens
gccccgccagcagaaggaggggggacacagcgagccacgcgccaggaagcccggccaaggagcc

SEQ ID NO: 187593 - RNA, 73 nt, Homo sapiens
gcgaccgccagcaccaccaccggcaggcgcaccaaggccgcgccgggccggcccagggagaacgcaaaaccac

SEQ ID NO: 187594 - RNA, 66 nt, Homo sapiens
cagagacccaccaacggacaggaccacccagcaaagcagggaagagaaggaggcaggcggggcgcc

SEQ ID NO: 187595 - RNA, 95 nt, Homo sapiens
agaccccaccgccggcgcgggaaacgggcgaagcgacgagccgcgaggaggagaggagccaagcccaacgggacgggaaaacggccacagccaac

SEQ ID NO: 187596 - RNA, 68 nt, Homo sapiens
agcccccagagcggaacacagcagagaacaaagaaggcccccacaacccaagcacgcgacggggcaca

SEQ ID NO: 187597 - RNA, 67 nt, Homo sapiens
cgggaaaagccagccaaaaggaagggccagggcaaaggcacacaaagcaggacgcaagagacaaggc

SEQ ID NO: 187598 - RNA, 53 nt, Homo sapiens
agcaccacccaacacagaccgaacaaccacaggaaaaaagaaaaaggaagcac

SEQ ID NO: 187599 - RNA, 57 nt, Homo sapiens
gagcgggccccgacagacgccgggcagagaaagagcgcgcacgaaagcacacgaaaa

SEQ ID NO: 187600 - RNA, 83 nt, Homo sapiens
gaaggaacagaccccggaggaggacaccaggggggaaaaaccacacaggcaaagaacgcgcaaaacaggacgaaaacaaaggg

SEQ ID NO: 187601 - RNA, 76 nt, Homo sapiens
ccgaggggaagcgaaccaaggagcaagaggggggggcccccccgaagaaaggaaccggggagcggcgaaaaaaaag

SEQ ID NO: 187602 - RNA, 78 nt, Homo sapiens
cggaggcagcgggggccgcggcgagcggacggggcgagcaggcgcgcgcgagagccaccgccccaggcgcaacaccac

SEQ ID NO: 187603 - RNA, 67 nt, Homo sapiens
aagaagagaaaaagcaccgccccagaccgcaaacaggcgaggcggagggggggcggcgcggccagcg

SEQ ID NO: 187604 - RNA, 70 nt, Homo sapiens
agcgcagccaaccgagggaacaaccacagggaagcggagcaggaccgaggccaccccagcgccacagaaa

SEQ ID NO: 187605 - RNA, 84 nt, Homo sapiens
ggacgaaaaggggcggaagaaaaacaaacacacgcaaaggagaaaggaaccgacagggacagacagcaggaaagcagcgaacac

SEQ ID NO: 187606 - RNA, 47 nt, Homo sapiens
cgcgcgcgcgcgcccggaaaccgaaccagcgggcccgccgacagacc

SEQ ID NO: 187607 - RNA, 82 nt, Homo sapiens
ccggcgaaggacccggccgaggcgggcgcaagagaaggcaccaagagcagcagccgcccaaaacacaaaccaaagaagaaac

SEQ ID NO: 187608 - RNA, 75 nt, Homo sapiens
aagcaagagccccccagcgcagcccaccagggccgagcgaggaagacaaaccggccgccgcccaccccccggccg

SEQ ID NO: 187609 - RNA, 74 nt, Homo sapiens
acggacccccaaggcaccgcgcagcaacacggaggagcacgcccggaaaccgaacacgaggcagaccacagacg

SEQ ID NO: 187610 - RNA, 69 nt, Homo sapiens
aacagacagcagcgcaaagcaaaggcagcccggacaaagaagaccggaagggaccacagaccagcacgc

SEQ ID NO: 187611 - RNA, 80 nt, Homo sapiens
gcggaccgcgggggagaacggaagcggcacagcaccagcaggcagagacgccccaggccagagagcgaggaggccggaac

SEQ ID NO: 187612 - RNA, 38 nt, Homo sapiens
cgggggagacgacccccgccagacagccccagcgcccc

SEQ ID NO: 187613 - RNA, 63 nt, Homo sapiens
acccaagagcagcggaaaagaccagcacagcagcagccgcccaaaacacaaaccaaagaagaa

SEQ ID NO: 187614 - RNA, 87 nt, Homo sapiens
gggagggagccgcaggcgcagacccacccgccagaagccccccgcaggaacagggcgagacgaacaacgcgcgcaggagaccaccaa

SEQ ID NO: 187615 - RNA, 73 nt, Homo sapiens
cagcccaccaaggacccggcgcggccccaaccacagcccgcaaggccggagacaagccaggaggcaagaaacc

SEQ ID NO: 187616 - RNA, 54 nt, Homo sapiens
cggagaccaccgagggggcggcaagaggggggaacggccccgagcagccaaacc

SEQ ID NO: 187617 - RNA, 75 nt, Homo sapiens
ccgcccccgcgccccgcaccgcggcaaagagaggacgcagcgagaaaggcgccagcagaaccggcggggagccgc

SEQ ID NO: 187618 - RNA, 76 nt, Homo sapiens
agaacagaagaggaacaggacagagaagacccaagacaaaaagaagcaggaagacgagagaggcgcgggaggcaag

SEQ ID NO: 187619 - RNA, 67 nt, Homo sapiens
gacgagcggagcccgggacaggaggaagaagccacaaagccggagaacaggaagggccgggacaagg

SEQ ID NO: 187620 - RNA, 79 nt, Homo sapiens
aaagaggcgggagagggaggagcccagaccgggcgacccgccgcaggaagagacgaagagaaaaaaagggaacggagca

SEQ ID NO: 187621 - RNA, 82 nt, Homo sapiens
accaagagagcaacacacaccaggagcccccacgaagggaaggcacaaggaccgccagcgggagaccccgagaccagaggcg

SEQ ID NO: 187622 - RNA, 80 nt, Homo sapiens
cggcgcgcgccgggcgccggaggaagaaaacaccggagcccaagacaccaaaacagacgcaggcaagaggcagaaggaca

SEQ ID NO: 187623 - RNA, 79 nt, Homo sapiens
gcccggcagggcgaggacccccgagcccccagccccagcggcccagaaaccccgcgcccaccacggagcacccggccca

SEQ ID NO: 187624 - RNA, 80 nt, Homo sapiens
aagaccccaaaccaggcccaaaaaaccaaaagagaaagggagccacacaggaccaacaaagcaaggcaaggagagccaag

SEQ ID NO: 187625 - RNA, 65 nt, Homo sapiens
gacgaacaaaccgagaaagggggcgcgacccggaaaacaggcaaagcacggcaagaaaacgcccc

SEQ ID NO: 187626 - RNA, 45 nt, Homo sapiens
agaagacagagcaccaacgagcagccaggcaagacaggccaacac

SEQ ID NO: 187627 - RNA, 69 nt, Homo sapiens
gggcacaggcaacccaagacggcgggagccggaacgggccaggaaagacagcagccgcgaacgcggccg

SEQ ID NO: 187628 - RNA, 78 nt, Homo sapiens
ccggggccgggggcccgcccggggcggcaaggaccgagcagccccgccacccgggaacagaggggaagacccaaggag

SEQ ID NO: 187629 - RNA, 80 nt, Homo sapiens
cagaaaccagacgcaccacaggagcaggagccacaaagagagaacaccaagcaaaagccacgccaaacgcgaaagggaga

SEQ ID NO: 187630 - RNA, 81 nt, Homo sapiens
gcggcaacagaagccagaccggcgcgagaacaacggagggaagcggacacacaggacgagaaacccgaccacacccaggca

SEQ ID NO: 187631 - RNA, 76 nt, Homo sapiens
gcgaacggccaaggaaggcccaagaggaagggccaggaccggaccgagacgaaaggaagggagagacgaggaccca

SEQ ID NO: 187632 - RNA, 58 nt, Homo sapiens
cgagagagacaccaccaggccaccccagagaagaggacgagagacaagacaaccaaaa

SEQ ID NO: 187633 - RNA, 78 nt, Homo sapiens
cagaccgggccggaccgcaggagggagaccacagcaagacccaggaccccggaagccagaaagaaaaacaaggacgcg

SEQ ID NO: 187634 - RNA, 77 nt, Homo sapiens
caagggagcaaggaacaccgacaaaccgaccgaccaggagccacagggaaaccagacgaaacaacagccaaagacaa

SEQ ID NO: 187635 - RNA, 99 nt, Homo sapiens
cgcgcagcgaccagaggacggccaggaaggaggacagaacaagccaggagccgccccaggagcgccggaaacccccccgaaccccgaaagccaaagcca

SEQ ID NO: 187636 - RNA, 74 nt, Homo sapiens
aaacggagggagaaaaagcaagaggaaagcagagaacagacagagagccggacggaaaggggaagagaaaagag

SEQ ID NO: 187637 - RNA, 76 nt, Homo sapiens
cgcaccgcacacaacagaggccggggagaagccggagagcgacaagaaaaagggagagaggagaaaggaaggaaga

SEQ ID NO: 187638 - RNA, 102 nt, Homo sapiens
ggacggggaaggccggggcgcccggcgccggccgagaaggcagaggcgggccacagagccgaacacagcagagggggacaagcccacggagacgggagcggc

SEQ ID NO: 187639 - RNA, 89 nt, Homo sapiens
gggaaaaggcggacgggaaggcgggagacgagaagccgaaaagcgcagcgagcggagccgccggagagcgacaccacaggcaagcgggc

SEQ ID NO: 187640 - RNA, 53 nt, Homo sapiens
ccagagcacgagcacgggaagcgcagaaccggccgaaaagcacaaacagcaag

SEQ ID NO: 187641 - RNA, 76 nt, Homo sapiens
cccgaggcgagaaccaagacaacaggcgaagaagggaaacgaggaaggacgcaccggggcagcgcccccagagccg

SEQ ID NO: 187642 - RNA, 69 nt, Homo sapiens
gagaaccacgcaaggacgagcaaagacgaggcagccgaggcaaacgggcagagcgggaaggcggaacac

SEQ ID NO: 187643 - RNA, 78 nt, Homo sapiens
agacggccccgcgcgagaccgcccagaggggcccaccgcgcccggaaagggagcagcaccggccacacccacagcacg

SEQ ID NO: 187644 - RNA, 83 nt, Homo sapiens
agccagaacacgcgcggagccgcaagagaccaaaggagaccaagccaaaccccccggaagggagagaggagagccgagcaaag

SEQ ID NO: 187645 - RNA, 70 nt, Homo sapiens
ccgacaagccgaccagccaagcccagggccacaaaggagaacacgagagacacaagaaggccaacggcaa

SEQ ID NO: 187646 - RNA, 83 nt, Homo sapiens
agaacagaaaaagaagaggaacaggccaaggggcccacccaagagaacgaagagaaaggacacccacccagaaccaggcaacg

SEQ ID NO: 187647 - RNA, 80 nt, Homo sapiens
aagcgcagcgcaccaagagggaaccacgccgggaggggcaggacaagacaaaaaaccaagacgggagaacagcagaaggc

SEQ ID NO: 187648 - RNA, 81 nt, Homo sapiens
cagcacccagccccgccgagggcagaaagggcccagccggcagagggaccggagaacgccgcaggggagaagcagagaaag

SEQ ID NO: 187649 - RNA, 50 nt, Homo sapiens
cggccaacacaacaaaaccaagaagggaggccacgggcgacgaacccgac

SEQ ID NO: 187650 - RNA, 81 nt, Homo sapiens
cgaggcccccagccagcccgaagcgggaacgacccaagcacgcaagccagagcaacgggagccggccaagggacgacaaga

SEQ ID NO: 187651 - RNA, 81 nt, Homo sapiens
gggagaccacagcaagacgccaggacccacggaagccagaaagacagaggcaaaacagaagagcccacaggcaccaggaag

SEQ ID NO: 187652 - RNA, 78 nt, Homo sapiens
gacaccacgggaggcagaccacgagaagccaggagaacgcgccgccggccggggcgcagggacacggggggccaaggg

SEQ ID NO: 187653 - RNA, 61 nt, Homo sapiens
cggcgcgcgaccgcgcaaaacgagggagcccaggcggcaggagagcaaggggcaacgaagg

SEQ ID NO: 187654 - RNA, 75 nt, Homo sapiens
ggagaaaccaccggcggaccgcacaagcaggcggggccgggcgggccgggaagggcaaggcagaagcccgaaaaa

SEQ ID NO: 187655 - RNA, 73 nt, Homo sapiens
agggggaaccaaacccggcagaccccgaaggggacaggaccgccaaaagggacagccccggaaccaagcaaag

SEQ ID NO: 187656 - RNA, 88 nt, Homo sapiens
cagcagagcaggcaggcaaacaaaaacaaccaccagcgagcaaaaaggcaaagaccaagaccaccaagaagcgccccagcggcaacac

SEQ ID NO: 187657 - RNA, 78 nt, Homo sapiens
gcagacagcacaaccagcgggccaagccgcccgccaaccggcagcgccgacgacaaaccaggggccagggggacccgg

SEQ ID NO: 187658 - RNA, 61 nt, Homo sapiens
acagccgccggggaggaggaggaggaggaagaggaggagaagacccagagaaaggccacgc

SEQ ID NO: 187659 - RNA, 74 nt, Homo sapiens
cacgggacaaaaaccagaccagacaggggcaaggccgaggggaacagcacacagagaggaggcggaagcacgcc

SEQ ID NO: 187660 - RNA, 100 nt, Homo sapiens
cccggcggcgcaggcaccaggaccgagcccccacggagcagggccggcccagggagaacgcaaaaccaccacccccacaaaaaacgcagggagaaaagga

SEQ ID NO: 187661 - RNA, 80 nt, Homo sapiens
agggaggcccggcaccccaggcgggagcggaaccgcccggcagcaggccagacgcagacagcgcagcaacggaggagaga

SEQ ID NO: 187662 - RNA, 76 nt, Homo sapiens
gccgagcagcagaaggcaaagaacagaagaccccgaggacacaggaaacgcacagaagaaacaacagagagccacc

SEQ ID NO: 187663 - RNA, 79 nt, Homo sapiens
gcgggcagcaggagacggaggaccagaacacggcagcacccggggccgcacgcccccggcccaaccagcccgccagcca

SEQ ID NO: 187664 - RNA, 88 nt, Homo sapiens
acagcaagaggacacagcgggacaccagcacccccagaccgacccggggaaggaaaagggcggaaagaacgcaggcggggaaccagca

SEQ ID NO: 187665 - RNA, 80 nt, Homo sapiens
acaagcgagcgcacgcgcggagaaggggccgagggcagcggcaaacgcagaaggcggaaaacacaagcggccgaaacgcg

SEQ ID NO: 187666 - RNA, 96 nt, Homo sapiens
agacgcgaggggccgcccggagaagaccgcgggccaaagaaagaaacgaccaagacacagaaaaagccaagacagaacgccgcacaagagccgcga

SEQ ID NO: 187667 - RNA, 68 nt, Homo sapiens
acacacggcagacagccgggaacgggaaacgcgcgccgagaagccacccgccgagagggagcggccaa

SEQ ID NO: 187668 - RNA, 68 nt, Homo sapiens
caagaagaaccaaagagccccgggagaacgacaggcggacacacaacagggcccgagggcaggacagc

SEQ ID NO: 187669 - RNA, 79 nt, Homo sapiens
acgaaggcagccgccccaaagagagaaccccaaagaggacccgcacgaaaaaggcacggacaggacgaggggcccggga

SEQ ID NO: 187670 - RNA, 79 nt, Homo sapiens
ccggcagcagcccccggcgcggcgcaggaggacgcggcacaccaagagacacccacgccacccggggggcgcacccccg

SEQ ID NO: 187671 - RNA, 79 nt, Homo sapiens
agacggcggaagcggagagcaacagcgcgccgggccgagaagaagcggggacggcaaaacagccaacggaacaccaagg

SEQ ID NO: 187672 - RNA, 70 nt, Homo sapiens
caagcagaaccagcagaccggcaacaggacacagagcgaagaacgaaccccaaaagacagagagcggagg

SEQ ID NO: 187673 - RNA, 72 nt, Homo sapiens
aaccacggcacgacagcgggaaaaggggcacaggagccaagagccagcaacgcaaaacaccaccgacgagag

SEQ ID NO: 187674 - RNA, 74 nt, Homo sapiens
aaacccccagccgacgcccgcgccccccagcaagccaggagagagagaaagggaacgggacaagcagaacgcag

SEQ ID NO: 187675 - RNA, 68 nt, Homo sapiens
ccacccagccaaggaagaagcaaaacaaacggagagaggagggagaaacaaaggccaaagacgcagga

SEQ ID NO: 187676 - RNA, 36 nt, Homo sapiens
agacacaggcacaccaagggcccgaccccgaggaac

SEQ ID NO: 187677 - RNA, 83 nt, Homo sapiens
ggggaagggccaggaaaggaagcacagggaaagggagccagaagaaaacaggagggcagccacgaggacgaggagagagagac

SEQ ID NO: 187678 - RNA, 63 nt, Homo sapiens
ggcagacaaaagggccaaagaagggagagagcaagaggaaaggccgccccggaggaagaaaag

SEQ ID NO: 187679 - RNA, 87 nt, Homo sapiens
cggggaaagcagagggccccggacagaaaagagccgagggagcgaaacagaggggacacacggaggcaaggccagcagcgcaggacc

SEQ ID NO: 187680 - RNA, 76 nt, Homo sapiens
gggacgggggcaggggcagcagaccgcgcgccagacgccaaggacgcccacagagcacgccccgcgcaggagccag

SEQ ID NO: 187681 - RNA, 79 nt, Homo sapiens
caccggacgccaagccgaacaaccccgacacccagccacccggacagacacccgggaggaagacggagacgggcggaag

SEQ ID NO: 187682 - RNA, 83 nt, Homo sapiens
ccgccgccgcgcggcggcggggccaggcggcccgaggagcgggcgggcagcggcgagcagagagcaccagaggcgcaccagag

SEQ ID NO: 187683 - RNA, 78 nt, Homo sapiens
accgccggagccccgccgccgccggcgggcacgcaaaaaaaccaagggaaaagagacaagaccgagacacaaaaaaag

SEQ ID NO: 187684 - RNA, 69 nt, Homo sapiens
cggaaagcgcaaaccaagaggccggcacgggaccggggcagcagagaggccgaggaagggcccagcagg

SEQ ID NO: 187685 - RNA, 51 nt, Homo sapiens
cccgcaaaaggccacaaaacggaaaagcggcggcggaggcaaggcgcgacc

SEQ ID NO: 187686 - RNA, 66 nt, Homo sapiens
acgggcgccggcgcgcacaagggcagagggccagagcccagaaaagagaacaaggcacaaggagag

SEQ ID NO: 187687 - RNA, 72 nt, Homo sapiens
gaggagaaggcaagccggaaagagcgaaagaaagaagggggaggcacggaaacaggccgagaagaacgggag

SEQ ID NO: 187688 - RNA, 84 nt, Homo sapiens
ccagcgaccaggaccaagagaagccgacaaggagaagcgccgcaggcgccaaaaggaaacacggaagaccacaacacacaaccc

SEQ ID NO: 187689 - RNA, 77 nt, Homo sapiens
ggggcaaccaccccaggcccccaacagacagccagaagggccaggccccccgcgcccgggaccagacgcagaggaac

SEQ ID NO: 187690 - RNA, 70 nt, Homo sapiens
gaaggcaaacagggcagggccagcacaacaacccagagacggacacaaggacgcgacacgccagggcgca

SEQ ID NO: 187691 - RNA, 75 nt, Homo sapiens
gaacggaaacaaagagccgaagggcccggaggggccgccccacgccggcgagccaggacagcccaaccagcacca

SEQ ID NO: 187692 - RNA, 43 nt, Homo sapiens
gggccgcggggagcacccgggaacacgcagaagagaacaagaa

SEQ ID NO: 187693 - RNA, 53 nt, Homo sapiens
gcaggccggccaaaaggaaggagacggaagcggaagcacacgccagacgccag

SEQ ID NO: 187694 - RNA, 78 nt, Homo sapiens
gggacggcccaaggccagcccgcaggcgacggggacgaccagcgggagccggcgcgcgcgacgggcacgcagcgagca

SEQ ID NO: 187695 - RNA, 81 nt, Homo sapiens
gaagagaaaggcccggagacgggaaagggagccagcagaggcggcgcagccgagagcgcaagcagaagcgggagaaggaag

SEQ ID NO: 187696 - RNA, 76 nt, Homo sapiens
cggaccagccgcaaagagccagaggggagacacgccaaagccccaagacgccccagggccaccgccagcagacgac

SEQ ID NO: 187697 - RNA, 57 nt, Homo sapiens
caacacccgaggcggacgcagagacagagaccgccaggcggacgaaccccccggcga

SEQ ID NO: 187698 - RNA, 72 nt, Homo sapiens
gcgaaacgccggaaggagcgcaaagaaggagggcggggaacacagaggaaggacggcgggggcagggaaagc

SEQ ID NO: 187699 - RNA, 73 nt, Homo sapiens
gaggccccagcgcagcagagcgccaagacggacgaggccgaccggggagcacacaggaggacccagacaagcc

SEQ ID NO: 187700 - RNA, 77 nt, Homo sapiens
gggacgaagggggacacagaagacacccccccacggcacaccaccagcgcacgagcaacggagaaaagcggagccag

SEQ ID NO: 187701 - RNA, 68 nt, Homo sapiens
agaaaggacgaagcggaccagaacaaagccccgcgcaggggaaaccgcccccaaaggccagaggacga

SEQ ID NO: 187702 - RNA, 100 nt, Homo sapiens
caagaagaacacccgaacacgggacaaaccagcaccagcgcaaacaacaccaagagcccagaccccacagccagccgagggcgagaagcacagaaacccg

SEQ ID NO: 187703 - RNA, 70 nt, Homo sapiens
acaggaaccggcacggaggggcgacccaggcacgggagacggggggaaacaccccccaaggcgcgaaacg

SEQ ID NO: 187704 - RNA, 80 nt, Homo sapiens
ggcaagacccaggggggacaagacaggggccggcagcaggaggcaaagggaccccaagaaaccaaagggcaagagccgca

SEQ ID NO: 187705 - RNA, 80 nt, Homo sapiens
cgaacaccagaaggaaggaaacccggcaggccccccagccagcgcagggcagaaggcccccccgagagaggacaccagag

SEQ ID NO: 187706 - RNA, 75 nt, Homo sapiens
cgccccgcccgcgcccggccccgggacgccggagacagaggagaagggaccagcacgcccaccaaggggcgggga

SEQ ID NO: 187707 - RNA, 67 nt, Homo sapiens
aggaggaaacaaccaggacacgcaggaacaaccaccacgggacgaaaagggaaggcggcaggacaaa

SEQ ID NO: 187708 - RNA, 75 nt, Homo sapiens
gcacaggcgccggggagcagagccggaagcggcaggccacaaagccacaggggcgccaccccacgaacagagcac

SEQ ID NO: 187709 - RNA, 81 nt, Homo sapiens
acgcgcgagggccgaaggcagcgcgcagggaagagaggcggcggggcagagagcggccccgagggaccgggccaagggggg

SEQ ID NO: 187710 - RNA, 78 nt, Homo sapiens
aacacagaccgggacagcagcaaaccagcaaacaagaagaaacacagcacacaccagagggaaacaggggaacaagag

SEQ ID NO: 187711 - RNA, 94 nt, Homo sapiens
gacggggccgggcgaccgggcaccagcaggacccgaggccaggagccaggggcccagaaggcaaaaggaaagaagaccaaaaacaggcggagaa

SEQ ID NO: 187712 - RNA, 73 nt, Homo sapiens
ggcagagcaacaggacggaaaaagggcgaagccagaaggacagggcagaccgccagcagcacagcaagccaca

SEQ ID NO: 187713 - RNA, 78 nt, Homo sapiens
aaaaaacccaagagcaagaaagccccggcacaaagcagaccgccccacgggcgcgcccgcgacagcaccccggaggac

SEQ ID NO: 187714 - RNA, 70 nt, Homo sapiens
ggaacacgagagggccgggaggcacggacacacaaaaagagccggcggcacgacagcaaaagccagggca

SEQ ID NO: 187715 - RNA, 50 nt, Homo sapiens
acagcccccagaacagcaccagagcaacggaagagaggaaacgagaagaa

SEQ ID NO: 187716 - RNA, 81 nt, Homo sapiens
aggagcccgcgggcggccggcgggcggggcggcggcgcgacagcaccccaggacaaaagcaaggaaaacagccgcccacca

SEQ ID NO: 187717 - RNA, 35 nt, Homo sapiens
gaaaggggacacagcccaacaaagaaaggacagca

SEQ ID NO: 187718 - RNA, 61 nt, Homo sapiens
ccccgaagccagcaccccagcccaccagacagcagaggagacaggccgagaccgagggccc

SEQ ID NO: 187719 - RNA, 81 nt, Homo sapiens
gacaaccggacgggacccggcccaggggaggcccccacccccccagcgggcccagggagacaaccacccaaagacacgcag

SEQ ID NO: 187720 - RNA, 107 nt, Homo sapiens
ggaagggccacgcgcccccagaggagaagacccgacggaccccagcgccgggcagcgagaaacccccaaagagaaagaagaagaaaacgagacccaaaagggagaaa

SEQ ID NO: 187721 - RNA, 53 nt, Homo sapiens
aagaaaccggaggaaagaaacaacagaagaccagccccagacaccagaagcac

SEQ ID NO: 187722 - RNA, 70 nt, Homo sapiens
accgaggagcagccaccccgggagccccgcccacggccgcacaccagaggacgggaacccagccagccag

SEQ ID NO: 187723 - RNA, 55 nt, Homo sapiens
aaagaaagacacagccgcacaaacacagagcgcaaccgaacgcacacgaaggaag

SEQ ID NO: 187724 - RNA, 48 nt, Homo sapiens
ggaaaaggagccgaacggcccgagcacacgcaagagaccacaggcagc

SEQ ID NO: 187725 - RNA, 72 nt, Homo sapiens
cggggaccccggccagaccccgccgggcccgccagcgccgcgcgccgcgcgggcgggacgaccaggacagcg

SEQ ID NO: 187726 - RNA, 81 nt, Homo sapiens
gaaagcgagaaggccaaggggagccgcggagcgcagagagcccgcagaaagcagccaacagcagccccagaccagcggcgc

SEQ ID NO: 187727 - RNA, 76 nt, Homo sapiens
cgaccagccggggggcccggccgcgccacggccgcggagggaacccgggccccgccccccacacagacacggcacc

SEQ ID NO: 187728 - RNA, 61 nt, Homo sapiens
ggaggcaaggccggcaaccagcgaagcgaggaaaccaccacggacccaaggcggaggccca

SEQ ID NO: 187729 - RNA, 79 nt, Homo sapiens
ggccccagcaaacaccacagaggccggaaaaagcaccacgacgcaccggagaggagaaacgaaaaggacaagagaccca

SEQ ID NO: 187730 - RNA, 75 nt, Homo sapiens
gcacgagggggaaccagaccaggggaggacccaccgaacaaccggacaaccaacaacgcaaagcaggccccacac

SEQ ID NO: 187731 - RNA, 108 nt, Homo sapiens
ggaccacaacccagccacgagacaagacacaaggagggggcagagcgagggcaaacaggccacaagcgcggagccccggggggggcgcgcccaagcgggcgaaacgcc

SEQ ID NO: 187732 - RNA, 70 nt, Homo sapiens
cggccgaaggcgaacgccgcggccaaggagccgccaaagccagacggaaccacagcggccaggcaagaga

SEQ ID NO: 187733 - RNA, 91 nt, Homo sapiens
ggccgaagcgaagggcgacgccaagccggaggcaggacggggagcaacacagcaacaaagccaacccaaccgagacaggacagaagagaac

SEQ ID NO: 187734 - RNA, 76 nt, Homo sapiens
cggaggcgaggcaaacggggggcgcggagggaccagcgagcgggaggcaagcggaaaaggacagaagaggaaggcg

SEQ ID NO: 187735 - RNA, 45 nt, Homo sapiens
cagcgcgcggagaagaacggggagccagggagaagaaagaagaac

SEQ ID NO: 187736 - RNA, 78 nt, Homo sapiens
cacgggagcccaacacgcggcacgagggccggcccgcgggcagaaaaggcgacggcggagacagaagagaggagagcc

SEQ ID NO: 187737 - RNA, 70 nt, Homo sapiens
cgccagggcaccagacagccacgcagacacagccaggagacccccacccagaagaccagcgggacagcag

SEQ ID NO: 187738 - RNA, 84 nt, Homo sapiens
gaaacagaggaggacaaggaagaagcaaaccagaggagaaaaagaccagaaacaacacaggcacggccaagagagcgaggccac

SEQ ID NO: 187739 - RNA, 64 nt, Homo sapiens
gggaagaaagaagacaacaacgccacaccaccgaggagggcagcacaacaaaggccggccaagg

SEQ ID NO: 187740 - RNA, 99 nt, Homo sapiens
aaaccaaacacaaccccggggagcgaaaacacccggccacgaggaacaaagggcgccacaggagccgcagaagcaaaggcaccgccaaaccgaaaacgc

SEQ ID NO: 187741 - RNA, 68 nt, Homo sapiens
cagcggggcggccggccgcgccccagccgcgaggagacggggccggacacagcaggggccagacaacc

SEQ ID NO: 187742 - RNA, 52 nt, Homo sapiens
cccaccgacgaaggggaaccacaacaggggaaaggaaaacgcaaaaccagaa

SEQ ID NO: 187743 - RNA, 82 nt, Homo sapiens
gggccagccgggggggcgggccacccaacagggagaccgaccggaggacaagaacgagggaagaacgcagacacacgggagg

SEQ ID NO: 187744 - RNA, 73 nt, Homo sapiens
gaagcgcggagaccaggagcacaagagcaagagagagaagaagccggcagcccggcccaggccgagaaaaaag

SEQ ID NO: 187745 - RNA, 85 nt, Homo sapiens
cacacgggccagggcagggccacccagaaccagacgccgggcccccagcaggcagccccacggaggggaaaggccaaggaaagaa

SEQ ID NO: 187746 - RNA, 77 nt, Homo sapiens
accaaagaagaggcaggagaaaagcaggcaacaggaagaagaacccacaggggccaacagaggaaggaacaaaggaa

SEQ ID NO: 187747 - RNA, 60 nt, Homo sapiens
gcggcccccggcacaggcagcggaggagcccgaccgacccggccaaggggcagagcacaa

SEQ ID NO: 187748 - RNA, 78 nt, Homo sapiens
ccgccggcgcggacgggacccaggaggaaaccagcagccgcaccgcccgagaaggcggcgggccggaaacgcgggaaa

SEQ ID NO: 187749 - RNA, 76 nt, Homo sapiens
agccgaaaagcgagcgcgaggaaaaggcggcgggagacccaaaggaacaccgggcgcccgccaggagccccagccc

SEQ ID NO: 187750 - RNA, 86 nt, Homo sapiens
gcgagcgagcgccccagcgagaaggagggagaaaggcgggcccgggaacagaggcgacccgcggcgagagcccccccagagcgcca

SEQ ID NO: 187751 - RNA, 81 nt, Homo sapiens
cgcggcacggggacaggggacacgaagggaggcaaggaggcggacgagcgccccaagggcagggccggaaagagggcgggc

SEQ ID NO: 187752 - RNA, 73 nt, Homo sapiens
cgaagaacccacagagagccggaggagccaccaacagaagcaggagccaggaaaccaaaacccacagagaggg

SEQ ID NO: 187753 - RNA, 81 nt, Homo sapiens
ggcacagaaggccaaaaaggcaaccacagagagagagagggaggggaaccaacagaggcaaaacccgacgcaaacgaccca

SEQ ID NO: 187754 - RNA, 62 nt, Homo sapiens
aagaacaccaagacggcgaccacaggaaggacacaggcagggaagagcaggaggaaacaaga

SEQ ID NO: 187755 - RNA, 75 nt, Homo sapiens
aggagagccagaggaagaaccagaggaacgggacaaagcggccagggagcacagaagggggaggcgcaaaaaagg

SEQ ID NO: 187756 - RNA, 79 nt, Homo sapiens
gacgggcaggccggagcggcaccacgccgacgacaggccaacaagaggccaaaggggagagaaggaagagagaaagaaa

SEQ ID NO: 187757 - RNA, 76 nt, Homo sapiens
acaaagcaccggcaggaggagcaaagcccacagaccaggagagaagacgaaaaagaagaagcagcgaacagcgaaa

SEQ ID NO: 187758 - RNA, 64 nt, Homo sapiens
caggaggccgagcaacaagaaccagacgagcgagaacacacgaaaaaagaaaggaggcaaaaag

SEQ ID NO: 187759 - RNA, 72 nt, Homo sapiens
agagagaagaagagaccaacggggcggcacacaaggagcgaagggcagggagaacgccaggcacagcacgac

SEQ ID NO: 187760 - RNA, 73 nt, Homo sapiens
ggcccagacaccggccccgcagcggcacccccgcgagcggcgggcgagggcccgacgcgccacggggcgcgga

SEQ ID NO: 187761 - RNA, 123 nt, Homo sapiens
ggagcggccgaggacaagcacaagcagcaccaaaaggcagcacccggacccaccacgcggaggagcgaggacagacaaaggaggagagaaaaggaagcagggcagaggcagcccccaaagcca

SEQ ID NO: 187762 - RNA, 75 nt, Homo sapiens
ggccagacagcaagagcacccgacccacaggccagagagaccgaccggacagcaagaacgccaggaccgaagaca

SEQ ID NO: 187763 - RNA, 51 nt, Homo sapiens
ggacggcgggcgagggaggggaccgccgcgagccgaagaccggaaacccag

SEQ ID NO: 187764 - RNA, 81 nt, Homo sapiens
gccgggccgcgcacacgccgggacgcgacgccagcacgacccaccgcacgcagaagcggagacaaagcaggaggacacaag

SEQ ID NO: 187765 - RNA, 54 nt, Homo sapiens
aggcaacccggccacgcagccgacccggagccaggagcaaggaccacaggaccc

SEQ ID NO: 187766 - RNA, 96 nt, Homo sapiens
cgggacccacaaccaagcagcagaggagcacgaggacggggagcaagaagaaacacccaaggaaccaaagcaggccagcagaaaaccccgcgcaca

SEQ ID NO: 187767 - RNA, 81 nt, Homo sapiens
cggagccaccaggggcagggcagaagggcgcggagggacgcacccccacagggcagaagggagcagaggcaccagcccagg

SEQ ID NO: 187768 - RNA, 77 nt, Homo sapiens
gcgccggggccggcccgggagccccgcgcgggccgccgaacggcggaacccagacgaaggagcaagggcaacacccg

SEQ ID NO: 187769 - RNA, 81 nt, Homo sapiens
ccaagaggagaaggggaagacacacggaaagaccacagcaagaccacgcccccagccgggggaccaggccgaacgacccgg

SEQ ID NO: 187770 - RNA, 78 nt, Homo sapiens
ccggcgggcccggcggcccacaccaggagaaacaggcgccaaacgacagagaccccaccacgggccggcgaacaccga

SEQ ID NO: 187771 - RNA, 69 nt, Homo sapiens
agacccccaccaagcaggggaaaagaggcacgagaaagaagaccggaccgaaagagacaacacaaagcc

SEQ ID NO: 187772 - RNA, 74 nt, Homo sapiens
ggaaaacaacggcaaggggaagcaaaagaaaaggcaagacaaccacaggcagagagagcggcgcagccaggacc

SEQ ID NO: 187773 - RNA, 63 nt, Homo sapiens
gcggacaccacaagaagggcgccagagaagccggccccaaacaggaacacgaagagcccccca

SEQ ID NO: 187774 - RNA, 78 nt, Homo sapiens
ggaaccacagaaggggacggagaggccccaagaaaaggacgggacacggagaggcgcgggaggaaacggaggcgcggg

SEQ ID NO: 187775 - RNA, 80 nt, Homo sapiens
cgaaggacccagagcagccaacccgcagccggcccacaccagccacaggggaggaaggagaggccagcacccccccgcca

SEQ ID NO: 187776 - RNA, 69 nt, Homo sapiens
aggaggccagagagccgaccggaggacgcggagaaccggcacagcccccggagcggaggagaagaaggg

SEQ ID NO: 187777 - RNA, 90 nt, Homo sapiens
gcgggggaaagggagacggcgagacgcgcagcgccggcgcccgggagacccaggaggagcccgcagcagaaagcgaagcagaagccgaga

SEQ ID NO: 187778 - RNA, 75 nt, Homo sapiens
gagaggagcgggaaacgggagggaaccagcaacaagccgcaaagccgcaggaaaccagagccacggcaccgccgg

SEQ ID NO: 187779 - RNA, 82 nt, Homo sapiens
ggaaaaaaccagggcgcaaaaaacgggggcaagagcagcaagagcgcagcaagaacaggagagggcaccgcaggacggccgg

SEQ ID NO: 187780 - RNA, 75 nt, Homo sapiens
ccgaggccgcgggaggagccaaggcagccccacaaccggacgaccgaaaacccagccagacaaaagagaagcaga

SEQ ID NO: 187781 - RNA, 39 nt, Homo sapiens
ccccaagggcgggaacaggcagaggcagaaaagcagaga

SEQ ID NO: 187782 - RNA, 74 nt, Homo sapiens
cagccaagccaaggggaccgggcacggaaggacgagcgcacaggagccggaggaaccacggacaacaacagcgg

SEQ ID NO: 187783 - RNA, 81 nt, Homo sapiens
agcccgaaagacaaggggggcgaggaggaaaccgaggcgcccccaaggaacccagcacggaggcagggaggcagaggggac

SEQ ID NO: 187784 - RNA, 59 nt, Homo sapiens
ccgaggcaacgccaccacacggacaaccagcccgggaccaggaaagagcacaacagcgg

SEQ ID NO: 187785 - RNA, 54 nt, Homo sapiens
agggagcaaaagggaggggaagaggggaacacaacagggccggggacacaagca

SEQ ID NO: 187786 - RNA, 72 nt, Homo sapiens
ccacccccaagagcgacccacgcagaggcgaagacggggagccacgaggggaagcaggcgggaaggcccagg

SEQ ID NO: 187787 - RNA, 77 nt, Homo sapiens
acgacccgcagcacaccgccacgagaccaccaagcaggcagagacagaggaagaggcagagccggggaaggcgcaac

SEQ ID NO: 187788 - RNA, 77 nt, Homo sapiens
gcagagaccacacaaacaaaaggaaagccgcacagcgcacaaggggaaacccagaagaagagcggacagcaagagca

SEQ ID NO: 187789 - RNA, 72 nt, Homo sapiens
gcgcagggcgccccaagggcgggcgagaggcgaacaaagaagacaccgcgaagacgaaggaaagcagggagg

SEQ ID NO: 187790 - RNA, 83 nt, Homo sapiens
ccagacccgcgcgccaaagaaggaagaaggagagacgaccacgcaacagaaaaagagcgcacccaagggaagagcgaaaacag

SEQ ID NO: 187791 - RNA, 37 nt, Homo sapiens
cccggcaccacccacgagacgagcagcggggagaaag

SEQ ID NO: 187792 - RNA, 37 nt, Homo sapiens
cagacccacaacgaaaagggcggagaacggaaaagca

SEQ ID NO: 187793 - RNA, 74 nt, Homo sapiens
aaacaccaccaacaaaccggaccgggggacacccgacagcccaggcaccggaagaagccagggcagccggaggg

SEQ ID NO: 187794 - RNA, 66 nt, Homo sapiens
gcgcccgggcccgaggaggcagccaagccaggccgccacgcggcagcagaggccaggaggggccca

SEQ ID NO: 187795 - RNA, 78 nt, Homo sapiens
cggacagcacaccagggccgggacacacgagacaaacaggcgaaacaacgcccgaagcccaggagagaaccaaaagca

SEQ ID NO: 187796 - RNA, 72 nt, Homo sapiens
aagagacaagccaaagccgaccagggaacaacgggagaaacagcaacggccagcacgaagcccgaacaaccg

SEQ ID NO: 187797 - RNA, 68 nt, Homo sapiens
gagaggagggcacacaggaaggaaaacacccggcagggaaggaaggaacgcaaccgaagacgcagagg

SEQ ID NO: 187798 - RNA, 79 nt, Homo sapiens
ggaccgagcgcccgacccggcgagggcacagaagagacgaaagggcgagggacgaagaaagaaagaaccgagagaacga

SEQ ID NO: 187799 - RNA, 65 nt, Homo sapiens
cggggaggaaacgcggaggagccggcggaggacggggggcccgggcgaaaccggaccgggcccgg

SEQ ID NO: 187800 - RNA, 72 nt, Homo sapiens
gcggcgagaaagagagcaaacaaggagcagacggccgcagcaaagcggggacgagagccccggcacaaacgg

SEQ ID NO: 187801 - RNA, 40 nt, Homo sapiens
agcaccagaggggagcaaggaacccgccagcaccccacag

SEQ ID NO: 187802 - RNA, 52 nt, Homo sapiens
caacccaaaaggcaagagccagcccggagaaaaaaccgccacacaaaaagaa

SEQ ID NO: 187803 - RNA, 84 nt, Homo sapiens
ccaaaggagaaaagcgcagccagccccagggaacccgagaaggccaacaaaagagcgaggaaccaagaagaggagacaagacca

SEQ ID NO: 187804 - RNA, 72 nt, Homo sapiens
aacaggcaagcccccgaagagaagcccccgcaggcgggcacagagagacccagcgacgagcaaaaggccaag

SEQ ID NO: 187805 - RNA, 71 nt, Homo sapiens
aaccggaacagcaaacggaacaagagaaagcacgacaaaagcagaaaccacagccaccgccagaaccaaga

SEQ ID NO: 187806 - RNA, 63 nt, Homo sapiens
cggagacggccggggcggcgaagcggaggccggagaagcaaagccagggagggaaccgaagcc

SEQ ID NO: 187807 - RNA, 42 nt, Homo sapiens
gggacaccaagaaagaaccagaaaaagccaccggagcgaagc

SEQ ID NO: 187808 - RNA, 58 nt, Homo sapiens
ggggaaaagagaaaggcgagcagaaagacgacgagaagcggggaagggcagccacgga

SEQ ID NO: 187809 - RNA, 75 nt, Homo sapiens
ccggggacccccgacgccaggcagcgcccccaaacggaaaggcagacacaagacgagcacccccgagaaaagaaa

SEQ ID NO: 187810 - RNA, 80 nt, Homo sapiens
aggacgaggcgaggcgagaaacgaggacacgagggcccagcagcagcgaacagagagagggaagagaaaccagagagaag

SEQ ID NO: 187811 - RNA, 76 nt, Homo sapiens
cggacccggagccgggccagcaacagagcgggccggggacggcaaggcaaccaggacccaacacgacaggaggaca

SEQ ID NO: 187812 - RNA, 81 nt, Homo sapiens
gaaccggccagccagggccgggccgcgaccggccccggagcacagcacgaacgagacacgccgggcgcgacccaccggccg

SEQ ID NO: 187813 - RNA, 77 nt, Homo sapiens
gagcacagaacaacagcacgggagaaagcgcccacgcacgaaagcccaggccaaaaagagaaggaagaaaccaaacg

SEQ ID NO: 187814 - RNA, 82 nt, Homo sapiens
gaggcagcaggccaccgggccccagcgggcgcagcgggcagggccggggaaggaaacaaagcagcaggagaggagagccaga

SEQ ID NO: 187815 - RNA, 76 nt, Homo sapiens
ggacggccgaggaaggaacggcccccccccagcccgccccaaaaggaaggcacggcgcaaacggcgccgggccagg

SEQ ID NO: 187816 - RNA, 79 nt, Homo sapiens
cgcccgcaaggccaaacagggcgggacccgagagaacgcaagacccacccccccacacaaaaacgcagcggagaaaggg

SEQ ID NO: 187817 - RNA, 59 nt, Homo sapiens
cggcgccagccgcccaggcaacgcgccaagaccccccgcccgaaagccagacacagaag

SEQ ID NO: 187818 - RNA, 65 nt, Homo sapiens
gaccgaaggaagagccaccagcgacaaacaggaaagggcccagaccaagccccaccaacagaaga

SEQ ID NO: 187819 - RNA, 53 nt, Homo sapiens
ggagaaggagaccaggacaagggccaggcggagccaagaaaacgagacaacgc

SEQ ID NO: 187820 - RNA, 69 nt, Homo sapiens
gccggcaggagcggagaggcccaccaggccagaacgggggccggaccgcagagggcgacccaagacaga

SEQ ID NO: 187821 - RNA, 88 nt, Homo sapiens
accggcggccccaccagcagacgcagccgagacaccagcccgaaacaccaccaagacaggccgacggcgcaaggccacggcaagcacc

SEQ ID NO: 187822 - RNA, 40 nt, Homo sapiens
gggggcagcgagggcgggagcgcgacccagcgaccagcca

SEQ ID NO: 187823 - RNA, 59 nt, Homo sapiens
cccccgcaaagaagcggaaaacacggagaaaaacccagggcacacggggcgggccccgg

SEQ ID NO: 187824 - RNA, 76 nt, Homo sapiens
ccagaacacgggagaaaaaggaaaacgcggaaaaccgacacaacaggagaacaaggggcgggaaacagagaaagga

SEQ ID NO: 187825 - RNA, 78 nt, Homo sapiens
cgggcccggcagacgcccagggcaggagacgggccaacgcacggcccggcagagccagcaccccccgcggcagccaag

SEQ ID NO: 187826 - RNA, 79 nt, Homo sapiens
gcagcagggcgagacagcgaaagcacgaacaggaaacaggaagccgggagagaaacacagagccaaggagccgccggcc

SEQ ID NO: 187827 - RNA, 89 nt, Homo sapiens
agacgagaggacgggaccaggcgaagcggccgagcaggcgagcgaacgacggcccccccaggagcaaggcgcagcccccccggcgagcc

SEQ ID NO: 187828 - RNA, 85 nt, Homo sapiens
ggggcgacggcggcggcggggccgaggaggcccgagcggcggcggggcggcgaaggccgaggcgcacccagccacaccccaccgc

SEQ ID NO: 187829 - RNA, 92 nt, Homo sapiens
caggaagaaaaggacagaccagacagaggagaaacaccaagcacgggggcaaaagggaaagcaaggggaagggcccaagaagacaccccacc

SEQ ID NO: 187830 - RNA, 66 nt, Homo sapiens
agacagcaccaaagcgcgcgggaccgaaacaacacgaagcgaaaccggggccgaggcagggagaag

SEQ ID NO: 187831 - RNA, 81 nt, Homo sapiens
acagcccccagaacagcaccagagcggaaaacgccagcggacaaaagggacgcgcggagaccgaacacgcacagacgggac

SEQ ID NO: 187832 - RNA, 83 nt, Homo sapiens
ccgcaccgccaacccccgagcaagacgggagcccagaaccgccccagacaaggcccggcccgcggcagagacaagagaagaaa

SEQ ID NO: 187833 - RNA, 38 nt, Homo sapiens
ggaaagcccgcagccgcaagagaccccaccggggcccc

SEQ ID NO: 187834 - RNA, 79 nt, Homo sapiens
cccaccaaagagaagaaccacccggcgcgggggaccgcggcgggccgaagacaaacgacccaggccgaaagacaacaag

SEQ ID NO: 187835 - RNA, 74 nt, Homo sapiens
gcacagaaaggggacagcgaaaaaaagccacgagaacagagaaaccagcggcaaaggccccccccaacacccag

SEQ ID NO: 187836 - RNA, 85 nt, Homo sapiens
cgccggccgcgaacccggacccaagaagagcgaaagcacacgaagaggcagcccagaagaagaaagcaagcaggaggggccaggc

SEQ ID NO: 187837 - RNA, 83 nt, Homo sapiens
aggagcgagcagacgacaagccgggagcgggcggccaaccagaccaagcaaggaaccagcgagcaaacgcaaacacaacagaa

SEQ ID NO: 187838 - RNA, 79 nt, Homo sapiens
caccaagagcggaccgggccccgccaggacccccagcacagccagcagcggaacagcgaaccagcagcggcagcggggc

SEQ ID NO: 187839 - RNA, 72 nt, Homo sapiens
acagaggacgacgaagagacaaaggcaccggaaagccaggaaaaacacacaagggccccgcccagagcacca

SEQ ID NO: 187840 - RNA, 79 nt, Homo sapiens
gcaggaaagcgaccaccacgagaaagaagaaacaaagagggacccagccaccaaaaggaggcgaagggccaggagaagc

SEQ ID NO: 187841 - RNA, 64 nt, Homo sapiens
ggcgcggaggagcgaggcagcgacaggacgggaacggaacgaaaacaaacggaagagagggcag

SEQ ID NO: 187842 - RNA, 108 nt, Homo sapiens
caaagagacaagcaagaaccggcagagacacaaccaccagccaaacaagggcgagcaccaaagccaaggaagcccagaagaaagagcaccccccggaagcagcaggga

SEQ ID NO: 187843 - RNA, 77 nt, Homo sapiens
gagccgcccgggacccagggaaccagccggagacccacagcaccgaaggaaaaaggggccaaagcacggaggcaacg

SEQ ID NO: 187844 - RNA, 84 nt, Homo sapiens
agcgagcgaagcagggcgccgccacgccgcaggaggcggagacagaagcgaaggggacagggggagaaccgccagggaaacccg

SEQ ID NO: 187845 - RNA, 84 nt, Homo sapiens
ggccaccccgcgacacaccggggaaggccaagggaagaaagaagacaacaacgccacaccacagaggggaagcggagcgacgga

SEQ ID NO: 187846 - RNA, 73 nt, Homo sapiens
ggagccagcaggaggaaggagggcagcagcgggccagaaggggagagggaagcgcagggaagacccggaggag

SEQ ID NO: 187847 - RNA, 80 nt, Homo sapiens
accggaaaaacagccgcgcgccaaaggagcacgaaaacaaacaggagcaagaaacgagagcacagacaaaccagagacga

SEQ ID NO: 187848 - RNA, 81 nt, Homo sapiens
ggagaacgaacagacaagcacgccggagggaagagcgagggagagagcaaggggaacaaagcggcaaaagaacccacaaaa

SEQ ID NO: 187849 - RNA, 59 nt, Homo sapiens
gccaccaggaggccagggggcgccaggagcacagggaaggaagaaaagacacagacaca

SEQ ID NO: 187850 - RNA, 69 nt, Homo sapiens
gacgcaccacgaggaaggaggaaaaaggcaaacgacgggaagcaagaagaaggcaaaccgaagagagca

SEQ ID NO: 187851 - RNA, 66 nt, Homo sapiens
ggacgaccacacgaaagccgggcccaaccaggacgagacaaacagaacaggcccccagcgcgacca

SEQ ID NO: 187852 - RNA, 80 nt, Homo sapiens
ccccggcccacaggggggggcaaacccgagagaacgggggcgggcacaagggaagacagcgcccgggacccaacggaaga

SEQ ID NO: 187853 - RNA, 33 nt, Homo sapiens
ccgagagccgggaacaggcgagcgagcagcaaa

SEQ ID NO: 187854 - RNA, 77 nt, Homo sapiens
cccagagaagaacacaggcacagagagaagaggaacaggacaaaacagaccaggggcgcagacacccgaggcacagg

SEQ ID NO: 187855 - RNA, 80 nt, Homo sapiens
ccgccagggcaccagacagccacgcagacacagccagaagacgaaagcaggcaccagcaagagaacgcaaaaacagcgca

SEQ ID NO: 187856 - RNA, 82 nt, Homo sapiens
cgcgcccacaaccgggccggccccagagcccaccgggaggagaaggaggaggaacgacgaggaccaaaacggaaggcaaaac

SEQ ID NO: 187857 - RNA, 75 nt, Homo sapiens
acccaaaacaacggaaaagcaaggacaaggccagagccggaagcagccaaagcacggagacaagaacgcgggaaa

SEQ ID NO: 187858 - RNA, 69 nt, Homo sapiens
cgccagggggaggacgaagacacgcccagcagggagcggaggagccagacaggcaaaccgaggggacgg

SEQ ID NO: 187859 - RNA, 60 nt, Homo sapiens
ccacaaacgaagagggaaaaaaaggagggagccccgcacaagaaacccagcaccaccagg

SEQ ID NO: 187860 - RNA, 70 nt, Homo sapiens
aaaacaacaagagagagaccggaaacgaaacagcgcagccaggaacaggacgaagaccagcgccagggaa

SEQ ID NO: 187861 - RNA, 72 nt, Homo sapiens
cgaaagagaagcggagaagggcagaaggagaaaaacaggacgagagcggagaagagaaaggaccgagagaag

SEQ ID NO: 187862 - RNA, 77 nt, Homo sapiens
acaagggcgcccgcggaccaggggggacggggcccgagagagaccaagcgagacggccggccgccacgggggccgag

SEQ ID NO: 187863 - RNA, 83 nt, Homo sapiens
gccggccccgcccccggccgagcgacgaaacaagggacgaacaaaacaccgaggaaggacacacacaacacgaaaccaaacag

SEQ ID NO: 187864 - RNA, 36 nt, Homo sapiens
gagagagccaaacccccaggacgccgccggcaaaaa

SEQ ID NO: 187865 - RNA, 67 nt, Homo sapiens
gcaggcagacaaaagggccaaagaagggagagaggccccgaaagaagcgcacaagcagcgagagcca

SEQ ID NO: 187866 - RNA, 54 nt, Homo sapiens
cgcagggcgcccccggggccacaacaacaaacggacaggcaccagccccacggg

SEQ ID NO: 187867 - RNA, 55 nt, Homo sapiens
aacgaagaggcagagagcaaagaacccccaagcaggaagacggagccacggcgcc

SEQ ID NO: 187868 - RNA, 85 nt, Homo sapiens
accggcaagccacagggcacagaaaggccgaggaggaagagccccaaaggaaagcggcgcggagcagaccaggcaaaagaaacca

SEQ ID NO: 187869 - RNA, 69 nt, Homo sapiens
aaagccgcgaacccaaggcagacacaacaccacaagcaggacacagcaggggccagacaaccagacccg

SEQ ID NO: 187870 - RNA, 74 nt, Homo sapiens
caccaaacccacagaggcacgaggaggccaggagcacagaaacacccaccaggagccaagcagaagagaaaagg

SEQ ID NO: 187871 - RNA, 78 nt, Homo sapiens
gggcagcccgcaggagcaagcgcagcaccaccaacaggaaaggagacagaaagcagcccaagagaccccaaggcacac

SEQ ID NO: 187872 - RNA, 72 nt, Homo sapiens
caaaaaccagaaaaacgggggagagccacggaagccgacagacaaccagccacaggaggcagaggcgaaaaa

SEQ ID NO: 187873 - RNA, 82 nt, Homo sapiens
ggaaccaccagaaggagaaccacgaagcgcccgagacgccaccacgcgggggagcagagagccccacggacccaaaccacga

SEQ ID NO: 187874 - RNA, 124 nt, Homo sapiens
caggccagagggggccgccgcggcagcaagaacagagagagaggggacagacgagagaacgagaccaagacacccaggagaaagacagcggggaaaagaaaaaggagggggcaaaagggggcaa

SEQ ID NO: 187875 - RNA, 55 nt, Homo sapiens
gaggaagaggaacaacggaaccacaggcacagagaaaaacaagagagagaacaga

SEQ ID NO: 187876 - RNA, 92 nt, Homo sapiens
cagagcgacgagcaagaagcagcccaaagcgaagacagacgcaaggacgaacgaaccacggcaacagccggggagggcggacgggagaccgg

SEQ ID NO: 187877 - RNA, 49 nt, Homo sapiens
cacagccagcgaccaaaaacagaaacccagaggagagcacaacaaggca

SEQ ID NO: 187878 - RNA, 68 nt, Homo sapiens
ggagccagggaggcggcggcgggaacgagggcgagcagaggacgacaggccgggagacagccagggcc

SEQ ID NO: 187879 - RNA, 71 nt, Homo sapiens
aagagacaagccgagagaaagcaagcaaagaacaggagccagggaacacacacccgagaacagccgccaag

SEQ ID NO: 187880 - RNA, 79 nt, Homo sapiens
gagaggcgaagcaaggacgaccagccgaaacaagaaaacgaaaaaccccccagaaaacaggagcagaaaaaggagaaca

SEQ ID NO: 187881 - RNA, 66 nt, Homo sapiens
caggcagccaagggagcccaccacggaacgaacccaagacaacgcaccccccggaggcggccgagc

SEQ ID NO: 187882 - RNA, 78 nt, Homo sapiens
gaaaggacgcccgccaacgaggaccgcaggggaaggagaagggagaccagcacgagccgggcgggacgccggaagggg

SEQ ID NO: 187883 - RNA, 68 nt, Homo sapiens
ccaaccgagggcccgaacggcaggaaagaaacacccgccgcgaaaccagcgaccaggaagaaacacca

SEQ ID NO: 187884 - RNA, 71 nt, Homo sapiens
gcgaccaaggagccagcagaaagacagagaccggccacggggcagaggggaacagccggaaaagcgaccgc

SEQ ID NO: 187885 - RNA, 79 nt, Homo sapiens
aaccgccccagcaggaccggagaaacaaaaacacccaccccaagggaagaagaggagaacgaacggagaccaagaggag

SEQ ID NO: 187886 - RNA, 88 nt, Homo sapiens
cgagcgagcgccccagcgagaaggagggagaaaggcgggcccgggaacagggaaagcacgaagggagcccagcgacacaccagcagca

SEQ ID NO: 187887 - RNA, 72 nt, Homo sapiens
ggaccgagagcgcgaaacgcacgagaagagggagacggggggcggccccggacacgacccgaggacagcaga

SEQ ID NO: 187888 - RNA, 77 nt, Homo sapiens
agaagcgcagagcagcgaagcaagcgaggagccagggggggcagaaagaaagaccgcaagcgggcagacaaccacac

SEQ ID NO: 187889 - RNA, 71 nt, Homo sapiens
agaggaggacagcgcacacagcaagcacgaggaaccaaccgggagccccccaagagacccaggggaagacc

SEQ ID NO: 187890 - RNA, 79 nt, Homo sapiens
caaccccagccgaccgagcccaggagcgccacgcgcggaaggcagcgcccagcagcgcagaagggccccgcccagagca

SEQ ID NO: 187891 - RNA, 75 nt, Homo sapiens
acaggggggggcaaacccgagagaacggccagcgggaccagccgcagcaagccagaagaacaaaaaacgcacacc

SEQ ID NO: 187892 - RNA, 62 nt, Homo sapiens
ggaaggcaagagccaacccaaaaccaagaggagccaggaggagagaacaagaaaagcgcgga

SEQ ID NO: 187893 - RNA, 74 nt, Homo sapiens
caacggcccgggaccaccggcgacagcagaaacaaggacaacagcccagaacggacgcaccgggacggaccgga

SEQ ID NO: 187894 - RNA, 83 nt, Homo sapiens
cccaagaggaggagaaaaagacacaggcccaggagaaaaaagacggcacggaaacaaagagggcccaggccaccaacaccaac

SEQ ID NO: 187895 - RNA, 67 nt, Homo sapiens
ggaaggccggccgcaaggaggaggccaccaaccagacggcaacacgaaaccaaccaaaccgccaccg

SEQ ID NO: 187896 - RNA, 75 nt, Homo sapiens
gaacccagcagagaaaacagaaggagaccagggaagggccagaacaccggaagaacagacacacagagccacggc

SEQ ID NO: 187897 - RNA, 81 nt, Homo sapiens
cgacccgggccggaaacaggcggaggcgggaccaaacacaaggggcaacgaggaacaggccaagaaacaacacagccaagg

SEQ ID NO: 187898 - RNA, 61 nt, Homo sapiens
gcccaggacggacaacaccaaccaagaagacagcgagacccggagaaggcaggacacccac

SEQ ID NO: 187899 - RNA, 78 nt, Homo sapiens
ccgagagccgcccgggccagcggccgcgcacccccggccggaggcaccagcccgggccagcacaggccccagccccca

SEQ ID NO: 187900 - RNA, 48 nt, Homo sapiens
aagcaacaacacagcagaagacgcccaaacggaacagcgagacacggg

SEQ ID NO: 187901 - RNA, 73 nt, Homo sapiens
cccgccggcgagaacccacagcaggaaaacaaaccaggcccaagggagaacccccggcccagacagcaagagg

SEQ ID NO: 187902 - RNA, 88 nt, Homo sapiens
cgccgccgccgccgcagagcgcagccggggccgaggcccccaggggggagagcgggccccgcccgaaggggcaccggggcggggggcc

SEQ ID NO: 187903 - RNA, 72 nt, Homo sapiens
gccccggaacagaaggcgcggccgaaaaagagcacaacagggagaagacagcaagaccccgaaccgagcaga

SEQ ID NO: 187904 - RNA, 76 nt, Homo sapiens
gagaacaacacagcggaacggcaaagcagcacacaaagagggcacccagaccgcagaagccgaggccgccagcgcc

SEQ ID NO: 187905 - RNA, 71 nt, Homo sapiens
acgggcaagagcagcaggcaggaccacgcaggcgagacagaacacaagggagagccggccgggccagcaaa

SEQ ID NO: 187906 - RNA, 67 nt, Homo sapiens
ggagacggaaccggagaaaacgagacgacgggaccgaaggaccccgccagagacaaccgagcgccag

SEQ ID NO: 187907 - RNA, 78 nt, Homo sapiens
caggagagcccggacacgcaacccagaccacccacaggagcaacaggcgcagcccagcccgaaagcagaacgacgccg

SEQ ID NO: 187908 - RNA, 112 nt, Homo sapiens
cggcccccccacccgcgggccgcggcgcccggggaaagccgggccccgagggcggaccgagaccagcggacccaaaaacaaggaacacccggcagcgaggcggcggaacaaa

SEQ ID NO: 187909 - RNA, 91 nt, Homo sapiens
agagcaaacggcccccagcgccccggaacgacaaggaggccaggaagaaggccaaacaagggcgaaaagcgaagagaaggagcggcaggca

SEQ ID NO: 187910 - RNA, 61 nt, Homo sapiens
aaaagagggacacaacagcagccacaggaaccgacaaaccagccagcacgggggcccagcc

SEQ ID NO: 187911 - RNA, 67 nt, Homo sapiens
aaccgcgcaaacaagcagaaggggagaccgagaagcaaagcgccgggcaccagcaagcagggcaggc

SEQ ID NO: 187912 - RNA, 71 nt, Homo sapiens
cgacccaacccacaaccccccagccacgagccaaccccaccaagggccacagagcaaccaaaaaccggccg

SEQ ID NO: 187913 - RNA, 75 nt, Homo sapiens
cccacacccaccaacaacaccacaaaaccacagccaaggaaagaacagccaaagggaagcgccggcaaagaggaa

SEQ ID NO: 187914 - RNA, 60 nt, Homo sapiens
gcaccgccagggcgcaggcacagcccgagaaaccgcagcacacacggaccaggaggagaa

SEQ ID NO: 187915 - RNA, 78 nt, Homo sapiens
acccacacgaggccacccagcccaccaaacacgccggaaaccccgcccacagcacgaggaggagagcgcagagagccc

SEQ ID NO: 187916 - RNA, 71 nt, Homo sapiens
agcaaggagaagagccaggaagagaaggagaaccaccagagcaccagcaaaccagcggcgcgacgagggcg

SEQ ID NO: 187917 - RNA, 81 nt, Homo sapiens
cgaagacggaaacgaggaaaccgggaaagccaccgaaaagggaccaagaaaggcccagggaccaaagcccggacaaggccc

SEQ ID NO: 187918 - RNA, 51 nt, Homo sapiens
cgcgccaggccgacagccgcggccgggcccgagacaccgaaaacgagaaac

SEQ ID NO: 187919 - RNA, 77 nt, Homo sapiens
cggaaggcgcacagggaaaggccgcaaaccaaggcaccgaaggcggcccacacagcggagacacgagaggcgaggga

SEQ ID NO: 187920 - RNA, 76 nt, Homo sapiens
ggagcaggcagggaaagcccaccaagccgagaacaccaggaaacagcccaggggaaggccacggagaagcgaggca

SEQ ID NO: 187921 - RNA, 42 nt, Homo sapiens
accaaccgcaggcgcaagaggcgaaccgcgagcccagaaggc

SEQ ID NO: 187922 - RNA, 78 nt, Homo sapiens
cggacagcaaaaccccagcggcagaacgcacagagggagagcagggggagaaaggcaccggacaagagcagagaaaga

SEQ ID NO: 187923 - RNA, 74 nt, Homo sapiens
acagaaaaggacggaaaagaaggaaacaagagggaagcagcgcccagcgagcgacgacaagcggcaaccagcgc

SEQ ID NO: 187924 - RNA, 78 nt, Homo sapiens
caggaccagacgaggcacgcagcaagccagggcaggacagcagcccgcaacaggccggccagccccccacaaccaccg

SEQ ID NO: 187925 - RNA, 75 nt, Homo sapiens
gggaggggccgcgccgccaccgcgaacaggagcccgacagaagggaaggagcggagaccacaggggccgcggcca

SEQ ID NO: 187926 - RNA, 60 nt, Homo sapiens
cggccaaagccgcccagacggccaccggcgggaggaacaaaagggaagcccagaggcacg

SEQ ID NO: 187927 - RNA, 72 nt, Homo sapiens
aaggagaagaaagaaaaaccaaacacacaggacaggaggccagggcacgggaaggcagcacgaggcaaaaca

SEQ ID NO: 187928 - RNA, 71 nt, Homo sapiens
caagggcaccaaagaacacacacaacaacgaagagcaagcccacccggcgcaaaccagaagaagagggggg

SEQ ID NO: 187929 - RNA, 83 nt, Homo sapiens
aagccagcggcaggaccagcgggcgggggcccacgagagacgagagggccccaaagggaccagggacgcgcccgcgcgggaga

SEQ ID NO: 187930 - RNA, 79 nt, Homo sapiens
ggcaaacggaaagagcaagacggcagcccaaagccacaagcccgaagccagggacggcggaaaacaacgaccaccacaa

SEQ ID NO: 187931 - RNA, 63 nt, Homo sapiens
ccgaggccgcgggcggggggagccggagaacacagcagggagaagcgcagaccacaaacaggg

SEQ ID NO: 187932 - RNA, 73 nt, Homo sapiens
aagcagaaccaaacacaggaaaacacgagacgccagcccacccacaaaccggaccaaaccagagacaaaaggc

SEQ ID NO: 187933 - RNA, 62 nt, Homo sapiens
ccagcaccgaccaccgaggcggagggggagaacacccagagggaaagggccccaagagccgg

SEQ ID NO: 187934 - RNA, 73 nt, Homo sapiens
cccggcacgcaggggcaggccgaggaggaaaagacagagcagaccaccgagaaacacagccaaaccaagccaa

SEQ ID NO: 187935 - RNA, 69 nt, Homo sapiens
cccccaagagcgggacacagagagccagagcccagagaggaacgccggccgcgaggcgaacagacccag

SEQ ID NO: 187936 - RNA, 55 nt, Homo sapiens
accggagaccacgcccaaacaggaagcagagagacaaacaacggcaagcggagaa

SEQ ID NO: 187937 - RNA, 77 nt, Homo sapiens
gcgcgggggccggggcgcgcgcagccaaaccagaaaggggacagcggcgggcagggagcacggaaggaaccacaagg

SEQ ID NO: 187938 - RNA, 59 nt, Homo sapiens
ggaaaaacccggaccgggcagaagggccccagccaaccgacaaaccagagcaagagggg

SEQ ID NO: 187939 - RNA, 77 nt, Homo sapiens
gagcggaggaggagccgccgccgccaggaagaccgcaggaaagcaggaaggcaagaaagccaaggacgaaacccaca

SEQ ID NO: 187940 - RNA, 76 nt, Homo sapiens
aggcccgcaggaccgccggagacagggcaagcacggagggcccaggaagcagccaacccccagggaaggaccaacc

SEQ ID NO: 187941 - RNA, 38 nt, Homo sapiens
ggcgggccgccccagagaacagggccaccggcccaggc

SEQ ID NO: 187942 - RNA, 95 nt, Homo sapiens
cgaaggggagcaggccgagcccgagccgcagcacgagccaaaccgagacaagcagaccggaagaccgacggaagaccacaccccgagggagccca

SEQ ID NO: 187943 - RNA, 74 nt, Homo sapiens
gacgagagagcgcgcgagcggccagcacaaggcaaaagcagaccggaaaacccaccggcaagaccacacccgag

SEQ ID NO: 187944 - RNA, 78 nt, Homo sapiens
agccgccaagaacgcagcagcagccgccaagacgggcagcaccccagaacacgggcggccagaaccgggcggacccaa

SEQ ID NO: 187945 - RNA, 87 nt, Homo sapiens
aacgccgacccacgaagcgccagaaaacggcaaggaagccccgcaaacccccgggacacgaggccgcgggccaaacaacaaccaggc

SEQ ID NO: 187946 - RNA, 76 nt, Homo sapiens
ccaaaagaggagccagaggaggcagaggaaacggagagggcccccaagccggcaggggaacgaggagggagcgcgg

SEQ ID NO: 187947 - RNA, 75 nt, Homo sapiens
aaaaaaaaccagagggaaacggcacaccaggcggcaggggcaaccagacgggccaaggcccggccaacgcaacag

SEQ ID NO: 187948 - RNA, 77 nt, Homo sapiens
acaacaggaacaggagccaaaagagaagacacccaaggaaagagccgcagacgcacagcaaccaccggacccgaagg

SEQ ID NO: 187949 - RNA, 75 nt, Homo sapiens
cacagagccacccaacggacggggaggcagcaggacacaccggccgagggcccaccagcagcacaaaaggagaag

SEQ ID NO: 187950 - RNA, 65 nt, Homo sapiens
ccacccaaacgcggcacgggaggaccgaaggagaagaaggagaaggggaggagaaggcaagccgg

SEQ ID NO: 187951 - RNA, 80 nt, Homo sapiens
gccagaccggagcagcggggacagaaaccagccaagaagaaagcagcggcaacaagaagcagcagcacagacaacaaacc

SEQ ID NO: 187952 - RNA, 72 nt, Homo sapiens
ggacgccggcggagacgcgggcgaggagaccgcaaaaaagcaccagcacaccagaccccggagggaaacaag

SEQ ID NO: 187953 - RNA, 70 nt, Homo sapiens
ccgccaagaggccacggaggccagccccaacacccggcaccggcccgaccagccacgacacccacgaaag

SEQ ID NO: 187954 - RNA, 36 nt, Homo sapiens
gaaaccacaaggacccagggagggcacagaaggaag

SEQ ID NO: 187955 - RNA, 44 nt, Homo sapiens
agagagggagagccaaagaaggcaagcggcagccacacccggag

SEQ ID NO: 187956 - RNA, 50 nt, Homo sapiens
cgcccgcaggcgaaagagaaggaagaggaaaaagagccgaccgagggcgc

SEQ ID NO: 187957 - RNA, 76 nt, Homo sapiens
agaacccagaggcgggaggggccgggaggcagaggggcaggggagagagagagagagaggaagcgaagaaaaagcg

SEQ ID NO: 187958 - RNA, 35 nt, Homo sapiens
ccgacagccgcagaaccgaagaaagagacaccacc

SEQ ID NO: 187959 - RNA, 89 nt, Homo sapiens
caccgcagcgaaaggaccgcgggacgagagacagagaccgagagagggaccaaggacaagcgcaggcaggaagaaccggacccggcgaa

SEQ ID NO: 187960 - RNA, 74 nt, Homo sapiens
agccagcccgacagccgcaaaaccaggaggaaagaaaggagcagcagccgcaaaacccagagagagcaagggac

SEQ ID NO: 187961 - RNA, 71 nt, Homo sapiens
cccccgccgcaccacggcccagggcggccagaccagaggcacagcgcccgggaccggagcaccagaggcgc

SEQ ID NO: 187962 - RNA, 64 nt, Homo sapiens
aagcgggcgcgcgcacggcaggacggagacacggccgaagggacaaaggagcaggcggaggaaa

SEQ ID NO: 187963 - RNA, 71 nt, Homo sapiens
ccggggagaggagcggagaagcagcaggcgccgggacacagacggaagggagggccacccacggcaggccc

SEQ ID NO: 187964 - RNA, 84 nt, Homo sapiens
gcggagggcccgggcgcggcggcgggacaccgagcccggggaggggccccgcgagaacgggaacaggaaacgacaaccaggaaa

SEQ ID NO: 187965 - RNA, 77 nt, Homo sapiens
cccacccagggcagaaaccaggcaggcacacgaaggacccgaagacaaaaccacccacgaaagcgaaaagacccaaa

SEQ ID NO: 187966 - RNA, 113 nt, Homo sapiens
caccagaccacacccggccggagcgccacaccaaggccaagaacgggcaccggcggggggagccccccagacccgaaaggagacaagaggacagccgcacggaacacaaaaac

SEQ ID NO: 187967 - RNA, 75 nt, Homo sapiens
ccacgggaggggcccgcaggaaggacggaccaggggcagaaagaccgccccacgccgcagaaggggggaaaagcc

SEQ ID NO: 187968 - RNA, 75 nt, Homo sapiens
aagagcgggcccgggccaaccgagggggaaccgaccagagaccagaggccagacagaggggaaaccacccacgag

SEQ ID NO: 187969 - RNA, 80 nt, Homo sapiens
aaagaagaagcacccacagaaagaagacggaaaagaaaacgcagcagaaagcgaggaggccgggcgcaccccggaggcgg

SEQ ID NO: 187970 - RNA, 33 nt, Homo sapiens
agaaccaggacccaacagcacaacgagaaccag

SEQ ID NO: 187971 - RNA, 86 nt, Homo sapiens
ggggcgagcgaggggaggcaggcgcggcagacggcgacagggcggcggcgccaggcagggcgcagccgagagcggcccaggaggaa

SEQ ID NO: 187972 - RNA, 79 nt, Homo sapiens
agcagacccaagagcagcggaaaagaccagcacaggagggagccaggagcgcgggagcgaaggccagccacacgcgcac

SEQ ID NO: 187973 - RNA, 70 nt, Homo sapiens
ccgagccacccgaaaacccagacagacaaccccaagagaagaggacggcacagaaaagagccaggccacc

SEQ ID NO: 187974 - RNA, 78 nt, Homo sapiens
gaggaacaaagcacaagcagggacacacggacaccagaagcaccagcacggagggcccagcacccccccgaccacgac

SEQ ID NO: 187975 - RNA, 62 nt, Homo sapiens
gacggcccccaccacacagaggcccggccaacgcaacagggagcccacgcaagaggggccgg

SEQ ID NO: 187976 - RNA, 85 nt, Homo sapiens
cccagcaggagcaggagcgggagcggagccacgcgcccaggcgcaggcaggggccacacgcgcacgcaacccgcccccggacaag

SEQ ID NO: 187977 - RNA, 62 nt, Homo sapiens
gggacccgcgcaagcggcacaaaggaggaaacagaaacaggccagggggcagacagcgcgag

SEQ ID NO: 187978 - RNA, 72 nt, Homo sapiens
ccgcgcggggacccgacgcccgcacgcggcagacacaccaaaacgaaagaagagcagcggaggcaaaagaac

SEQ ID NO: 187979 - RNA, 86 nt, Homo sapiens
acgaggccgcggagccggacgcggggggcgggaagagccggggccgggcgacaggagcaggaggcagacagggggaggaagaagcc

SEQ ID NO: 187980 - RNA, 84 nt, Homo sapiens
ccccagccggccgggaggcaccacggccgagcccgaggagcccacgaaagggccagcagcccccagaagaagccagaaagccag

SEQ ID NO: 187981 - RNA, 64 nt, Homo sapiens
gcggcagccagaagggcccggagaagaacggaggcgccaggaaccacggaaggagggggcgaca

SEQ ID NO: 187982 - RNA, 74 nt, Homo sapiens
aggaggaagggagcacccgcggacaggccacacgcaccaggcagcaaaaaccgagaagcggcccacgggaaagc

SEQ ID NO: 187983 - RNA, 71 nt, Homo sapiens
ccggagagaggacgcccaccgggcaggagaaggcagagcggggcacccacccaaggcacgacagccgaagg

SEQ ID NO: 187984 - RNA, 75 nt, Homo sapiens
aaggcaaaacggcaaaggcccgagcagggacgcaaaacgaagaagcaaggccgacaacacgaggagaccaccaaa

SEQ ID NO: 187985 - RNA, 83 nt, Homo sapiens
aaggaccagaccagggcggagaccaccaggggagaggcacaggagcaacaaccgagagaagaacaaacaccacaccagcacag

SEQ ID NO: 187986 - RNA, 56 nt, Homo sapiens
cggcggacacacagacccccaccaagcagggaaccgagcccgcaagagacggcagc

SEQ ID NO: 187987 - RNA, 76 nt, Homo sapiens
gcccaagacccagaggagccaaagaggaaaagcaggggagggaagaccgccccacaaaaacggaggccagcccagg

SEQ ID NO: 187988 - RNA, 87 nt, Homo sapiens
agcccgagaggagccacaaggagacgccgccgcgcccccgccggagagaaccagcagagaaaagaaggagaaggaaaagcccaacgc

SEQ ID NO: 187989 - RNA, 71 nt, Homo sapiens
cacagcgggaaaagaaagcaacgcgagcccgcacaggggccaccgggcacagagagggcccgccaacggga

SEQ ID NO: 187990 - RNA, 79 nt, Homo sapiens
ccccgaccgacacccaaggagccggaccacaccggaggcaggaccggggccaaaagccaagccaaagcaaacagagcag

SEQ ID NO: 187991 - RNA, 83 nt, Homo sapiens
acaacagcagcagaccaccaccaccacgcccagcagcagcgcagccccccaaccgacgccacaggaccgggggcccgaagacc

SEQ ID NO: 187992 - RNA, 58 nt, Homo sapiens
cagaggccggaaaagccccaaacgcgccaacgagacgccggggcccggcgccaccacc

SEQ ID NO: 187993 - RNA, 35 nt, Homo sapiens
gcggcggagcggcggaagaagaccacacgaagggg

SEQ ID NO: 187994 - RNA, 69 nt, Homo sapiens
cggagcccggcccggaagcagccggaaccaaaaagaagccccagagccggggccaggagccccaagcgc

SEQ ID NO: 187995 - RNA, 73 nt, Homo sapiens
agcacggcaaagcccggagacaagcagcccaaaaggcagagcgaggagagaagaaggagggaaagccaaacaa

SEQ ID NO: 187996 - RNA, 88 nt, Homo sapiens
ccagaaccgcgaagaggaacaccaaaggcagagacgagggcccaccgaaaagcgagaaaggccccagaccaccaacaccagccaagca

SEQ ID NO: 187997 - RNA, 57 nt, Homo sapiens
ggaaaagacaagagaccggaagaacagccgaaacgaacaaaaggaacgaccacagcg

SEQ ID NO: 187998 - RNA, 59 nt, Homo sapiens
ccggcaccggagacaggcgaggccgaggggaggggcagggcggaggacacggccggcgg

SEQ ID NO: 187999 - RNA, 70 nt, Homo sapiens
ggacccagccccagaaggaaacccggaaaaacccagaacaccccgacccagggcagaagccaaagaaaaa

SEQ ID NO: 188000 - RNA, 54 nt, Homo sapiens
caaggagccgggggaggcgcggacagcagaccacagcccggcaggcccaaaaac

SEQ ID NO: 188001 - RNA, 60 nt, Homo sapiens
gaacggcgaaagggaaagaaccccaccaaaaaacccaggaacacagaccaccaggagcca

SEQ ID NO: 188002 - RNA, 73 nt, Homo sapiens
aaaaaggcggacgaagaggagggaaagagagcccagcagcacacagacaacgcaaacagccacaccaggcagg

SEQ ID NO: 188003 - RNA, 76 nt, Homo sapiens
cacggccgcaggaggaccaaacccaaagcaggcaagaggcagagaaagggagcagaggaaaggcaagagaaagaga

SEQ ID NO: 188004 - RNA, 58 nt, Homo sapiens
ccgaggcccgcaccagccgcgccgccgccgcagagcagagaaagggggaggcggaccc

SEQ ID NO: 188005 - RNA, 69 nt, Homo sapiens
ggcccgggggcaggggaggagacgaggaacagaaagacaacggacaaggcaggaagaaaacccacacga

SEQ ID NO: 188006 - RNA, 76 nt, Homo sapiens
gaagaaggaccggaagcacacaacaggaaaacaaaagaggagaaagagaaacaggcaggccagaaaggagcgcaaa

SEQ ID NO: 188007 - RNA, 73 nt, Homo sapiens
agagggaagaagccggaaggaccagcagggaaccaaccgaggcacacagagaaaaaaagggaacaaaacacag

SEQ ID NO: 188008 - RNA, 58 nt, Homo sapiens
gcgacaaaaggaccagacaaacaaaagggggagaagccgcgggagcggaagacaggcc

SEQ ID NO: 188009 - RNA, 82 nt, Homo sapiens
gaagggcgcgcgcccggacgccacgcacccgcgcgagaaggacagcaggaagagaacagcaaaaccagacgccgggaagagc

SEQ ID NO: 188010 - RNA, 82 nt, Homo sapiens
aaggaacaggcagggccaggaacaacggaccaagaaaggcccagggaccaaagcccggacaaggcccgagcaccaggaccgc

SEQ ID NO: 188011 - RNA, 79 nt, Homo sapiens
cgaccgccggcccaggggagaaccaggagcggcagaccgccgccaggaggaggcacgcagcccgagaaggagccacgcc

SEQ ID NO: 188012 - RNA, 79 nt, Homo sapiens
ggagcggcgcggccccaaggcgcgcccgcgcaggacagcagcgcccaaggacaagccaagcggcccaaaacccacgagc

SEQ ID NO: 188013 - RNA, 66 nt, Homo sapiens
cggacaacccagaggacaacgaaggcgcccaccgcgccggacacagggagcagcgagcacgcgccc

SEQ ID NO: 188014 - RNA, 62 nt, Homo sapiens
cgcgggaagcaggacgcgccgcgccccaagcgcacgaccggaggggggaccgcagccaccag

SEQ ID NO: 188015 - RNA, 73 nt, Homo sapiens
gcagcggacaggagagcaagcaaaggaacaacccagcaacacacaacaaggaccgggcgcccgaagcaacggg

SEQ ID NO: 188016 - RNA, 63 nt, Homo sapiens
ccacggccacacgggagagaagcgccaacggccgacaagcccgacgaagaccggcggccacag

SEQ ID NO: 188017 - RNA, 78 nt, Homo sapiens
ggccagaagcgggcggcgcgggggagaggcgaaacagaccccgaaaagcccggaaggacaagccagcccaaacgaaca

SEQ ID NO: 188018 - RNA, 85 nt, Homo sapiens
gaagacgcggcggcggcggcggaggagagccgcagagcgcgcagaccccggacgagccaggaaaaacccccgcggaccagagagc

SEQ ID NO: 188019 - RNA, 73 nt, Homo sapiens
caaacccagcagagaagaaggggaaaaccgccgccacccaagacagcggggcagggcagaagaggaagcgccc

SEQ ID NO: 188020 - RNA, 74 nt, Homo sapiens
agagcaggccgcggcgacccagcgagaccaaggcaaggaaacgaccaacccaggacagaaaggaccggacaaga

SEQ ID NO: 188021 - RNA, 74 nt, Homo sapiens
gggaacagacagccccaggacggacggacaaagccaagcaaaccagaggccccacagcaggcccaaacaccccc

SEQ ID NO: 188022 - RNA, 87 nt, Homo sapiens
cggagcggccggggccggggcgccgccgggcggccgggcgcggcgagcccaggcacaaaggacaggaacaaagaacaggaccagggg

SEQ ID NO: 188023 - RNA, 75 nt, Homo sapiens
aagcccacgaggcaacacgcaaggccgccaccaggccgacagaacagaaaggcaaaaagagacacacagggaagg

SEQ ID NO: 188024 - RNA, 60 nt, Homo sapiens
cacgacggacagagcgaagcgaccaagcagaaggggaagccaacagcgggacaaacggac

SEQ ID NO: 188025 - RNA, 76 nt, Homo sapiens
cagaggaacagaaaacgcgaccaccagggccagggaagaaaacaagggaaagacaacaaaggaaagagcacgcggg

SEQ ID NO: 188026 - RNA, 112 nt, Homo sapiens
cagacagacgccggggaggcagcgcgggacccagcccaggcggcgcggacggggcgggcgagcggccggaagaagaagaacacaggccaccggagcagcaacaagaagggaa

SEQ ID NO: 188027 - RNA, 78 nt, Homo sapiens
agaaaacgggagccgggaaaagcaaaacgcaggaaggggggcggaagaaagcccacaggaccaggacaaaaccccaga

SEQ ID NO: 188028 - RNA, 74 nt, Homo sapiens
aagccagagagcagccacacagcaaaagaacccagacggcaagaacaaaaagaagcacgcggagcagcacaaac

SEQ ID NO: 188029 - RNA, 77 nt, Homo sapiens
gcccccgagaagaaggaggcgcagcgaacaagaaaaacgaccgacagaccagcaacaagcaaacaggaacacgacac

SEQ ID NO: 188030 - RNA, 76 nt, Homo sapiens
agggcccgccagccgcgcccggagacgcgggcgggaggccacgaccgaggagcgaagcgagaggagaagcgggggc

SEQ ID NO: 188031 - RNA, 76 nt, Homo sapiens
gacggaccgagaccggaccgagagcggaccgagagcgcgaaacgcacgagaaggaaagcgggcaaaaaaaaaaaaa

SEQ ID NO: 188032 - RNA, 80 nt, Homo sapiens
aacagcagaggaagaggggccaccgagaacccaggcagagcaaagggaagcgccaaagaagcgacgcgaaagaaagaaag

SEQ ID NO: 188033 - RNA, 67 nt, Homo sapiens
aaaagaacagaaaggccgcaccacaacccgcacagagcggaaaaggacagaagaggaaggcggccaa

SEQ ID NO: 188034 - RNA, 53 nt, Homo sapiens
cacagccacgggaccggcgcaggcacggggccaaaaaggcacgagggaacggg

SEQ ID NO: 188035 - RNA, 73 nt, Homo sapiens
aaaaaggaaacagcgcaaagggcagagaaaaaagagcagcgaggcgaaagcaaccacagcacaggccagaccg

SEQ ID NO: 188036 - RNA, 73 nt, Homo sapiens
gagcaacagccggcaaggagaaaaggaagaaagggcaggcgagagagggggaacaggaccaacggaacaacac

SEQ ID NO: 188037 - RNA, 77 nt, Homo sapiens
ggagcgcaggcccggccgacggccacacggcggccgcagggcgccggagccccccaggcggcccggcagcaaggcga

SEQ ID NO: 188038 - RNA, 51 nt, Homo sapiens
gcaaagaagcaacacaaaaggagcgcagcgcccaagcggagaggggccgac

SEQ ID NO: 188039 - RNA, 72 nt, Homo sapiens
cacgacagcaacaagacacggagcaaggaggaaaacacacggagaccagaccacagaagagccgcagggagg

SEQ ID NO: 188040 - RNA, 79 nt, Homo sapiens
gaggcgcgaccgagaccccgccccccacaacgggagagcgcgaaaccagaagggccggagaagccacgagcagacagca

SEQ ID NO: 188041 - RNA, 73 nt, Homo sapiens
acaccccacagcagccaaaccagaagaccccgaaggggacaggaccgccaaaagggacagccccggaaccaag

SEQ ID NO: 188042 - RNA, 77 nt, Homo sapiens
agaccccgcggaacgcccaccgcggagagcagcacgaccccagcacaggagagagaacgaaacccaaccaagaccca

SEQ ID NO: 188043 - RNA, 76 nt, Homo sapiens
cccacacggcccgggcaagagcccaaggcagcagcaccaggaaggaacgggacagcggagcagaggaccgaggaca

SEQ ID NO: 188044 - RNA, 73 nt, Homo sapiens
gcgggcggcgggggacgcggggccagcccaggaggacaaccggaaacacacaggaacagaccaggcaccccaa

SEQ ID NO: 188045 - RNA, 76 nt, Homo sapiens
gccgccagccacgcaggcaggaggacgggaggaccaagagagggggaggagcgggcaggcgaccggcccgaggacc

SEQ ID NO: 188046 - RNA, 89 nt, Homo sapiens
gaagaccagccgacaaggagggaagcggccccagcaccccagcgcgcagggccgccaggggcgccgagaaaccacaaccccagaacgaa

SEQ ID NO: 188047 - RNA, 89 nt, Homo sapiens
acccacaccagccagaggacaagagccaggcgcaggagaccggcgggagcggcggcagaaagccgaaaaagaagaaaccacgaaaaccc

SEQ ID NO: 188048 - RNA, 78 nt, Homo sapiens
agggacaccgaacaagacagcgccgcccggcggggcgcaaggggcacagcaacccaaggacagccggaagagagccaa

SEQ ID NO: 188049 - RNA, 55 nt, Homo sapiens
ggccccagcccgggcccccaacgagagcaaacacgaaggagagaaagagaaggag

SEQ ID NO: 188050 - RNA, 40 nt, Homo sapiens
aagagggcaggggaagaaacaacccccgccaagaagagaa

SEQ ID NO: 188051 - RNA, 85 nt, Homo sapiens
cggcgccgagcagaggcacaagcacaacaaggccgcgcccgcggagggggcaggccacaccccagcaggcgcccaggcgcgaggc

SEQ ID NO: 188052 - RNA, 75 nt, Homo sapiens
acacaacagaagggaacccccacaaagaacagaagcaaggaagcgggcaaggcccgacaagagaggcggagccac

SEQ ID NO: 188053 - RNA, 77 nt, Homo sapiens
ccgccccaagagagcgaggggagaagcgcagcgccaacccgaaaagaagcagaacaaaaaagcgcccaaccaaaaaa

SEQ ID NO: 188054 - RNA, 76 nt, Homo sapiens
gagcggggacccgcgggacccgcagccccgcgcgggcaccagagcggggcccggcgcacccaccaccgccgcccac

SEQ ID NO: 188055 - RNA, 74 nt, Homo sapiens
agcagacccaagagcagcggaaaagaccagcacaggaaaaaaacagggggaagagagaaagacacaaggcagac

SEQ ID NO: 188056 - RNA, 72 nt, Homo sapiens
cacagccaccacaccaagacaccaggggagaccgaacaggcgcccgaagggcaaaacagcagccagaagaac

SEQ ID NO: 188057 - RNA, 77 nt, Homo sapiens
caaggacgaaagaagacagagaagcaaagaagcaggcaacccagaggaagagcaaagaaaagagaagagcagcaagc

SEQ ID NO: 188058 - RNA, 73 nt, Homo sapiens
gcggagcgacggggaggcgcggccaacggggccacaaggaggcgggaccaccaaaaccaacaacccaaggaga

SEQ ID NO: 188059 - RNA, 86 nt, Homo sapiens
gcaggaccccgaggacgaaggggagcgggaggagcgggggccgccggcggcccggccagagacaagaggagcagcagcggcaccgc

SEQ ID NO: 188060 - RNA, 57 nt, Homo sapiens
gcaccgccccgaagcgccgcgcgcgcgccgcgagcgcagacagagccaccgcaccca

SEQ ID NO: 188061 - RNA, 85 nt, Homo sapiens
gagagcccagacccagcccccgggccaagagaagggacaaaaggccgagggaagaaggagaaagggccaaccccgaagaagcaaa

SEQ ID NO: 188062 - RNA, 83 nt, Homo sapiens
ccgcgccggcccagggagccccggcaagcaagagacgaacgcaacagagaggcaacagaccagacaggaaggccgacgaaggc

SEQ ID NO: 188063 - RNA, 96 nt, Homo sapiens
gaaccaccgggacaacggaggggaaacacgccgggaggaagagaagccaaaacaaagacagacagaggggaagcggagcgacggacaccaggggca

SEQ ID NO: 188064 - RNA, 73 nt, Homo sapiens
gaggccccccagccagggaacgcaggaaaacagggcgacaccccaacgcggagacagccgaggagccacggca

SEQ ID NO: 188065 - RNA, 73 nt, Homo sapiens
agcgcaagcgaaaagaaaagaaggaaggccgaacccgaacggccgagcgaccaggagaggagcccccgcccga

SEQ ID NO: 188066 - RNA, 57 nt, Homo sapiens
agaacagagacagcagccaaacccccagaggggcaaggcgaaaagacacgagacacc

SEQ ID NO: 188067 - RNA, 77 nt, Homo sapiens
accccacaggcaggcccagaggccccgcgcccaggaagccaggagaccacccggcaagaggggacccaccacacaga

SEQ ID NO: 188068 - RNA, 75 nt, Homo sapiens
ggcgccggaccccagcaaagcaagccccagccaagacccaccaggcaggggaagaagacaccacaaacaacgaaa

SEQ ID NO: 188069 - RNA, 84 nt, Homo sapiens
ggaaaccacgcaggcaaacgagaaaaagccgagaaggccagacggggaccaaaacaaaacgagagcaagaggaaagaaaaagaa

SEQ ID NO: 188070 - RNA, 69 nt, Homo sapiens
gaaggaccaagaaccaggacccgacaaacggacagcaggaccagaacaaggagaagcaccgggcaggac

SEQ ID NO: 188071 - RNA, 77 nt, Homo sapiens
agagacccgcccacgcaggaggagaccgaaagaagcccaagagccagggcgccgcccagccggcgggagccccggca

SEQ ID NO: 188072 - RNA, 73 nt, Homo sapiens
caggcgggagagggacaacaaaacaaacagcgcaaaggagccccaggaaggcaacacaggaacaaagggcaga

SEQ ID NO: 188073 - RNA, 79 nt, Homo sapiens
ccggaggagcccccaggccggggcacccgaggaggaagagggcagggcccacggaaagaagggaaacccggggagaaaa

SEQ ID NO: 188074 - RNA, 86 nt, Homo sapiens
cggccagaagaaaacgaggggcggaacacccgccaaagcagagaaaacacacagggaacccagaaagaagaagcaggccgcaggac

SEQ ID NO: 188075 - RNA, 67 nt, Homo sapiens
ggagggcccgggagaccaagagaacgcacaaccacggggacgggcagaggaccaagcagcagggccg

SEQ ID NO: 188076 - RNA, 73 nt, Homo sapiens
ggaccccggagcccagaagacagagggcgagggggggccgcccgcccaaggcaggaagaggggccgcaaagaa

SEQ ID NO: 188077 - RNA, 82 nt, Homo sapiens
cagaccgaggccgaagacgaaaaccacaggaacgggaaccagggaacaagcagcagccgagagccgaaagggccaggaacgc

SEQ ID NO: 188078 - RNA, 71 nt, Homo sapiens
agacagaggaccaggagcaccgcccagcccccccacccgcgccgcgggcgaaaacgcaccgagaaaagaag

SEQ ID NO: 188079 - RNA, 79 nt, Homo sapiens
gcagcagggggcagaacccagaggcgggaggggccgggaggcagaggggcaggggcagaggcagcgacagagaaaaccc

SEQ ID NO: 188080 - RNA, 70 nt, Homo sapiens
gcgacaagagaagcgaggcgcggcacacaaccccgggacacacagaggggccgaggagcaaacaggcagg

SEQ ID NO: 188081 - RNA, 73 nt, Homo sapiens
gcagggcccaccccgcgcccgacagaaggacgcgaaagaagacagacccagagagaacacaccgccaccaccc

SEQ ID NO: 188082 - RNA, 67 nt, Homo sapiens
cagggcaaccgggaccagcgagcgacagcacgccgggaaccccagcaggaacaagccacagcagagc

SEQ ID NO: 188083 - RNA, 61 nt, Homo sapiens
ccacccccgggggaaaagaacgaggacagcagggaagaacggaaaccagagaaagaaacgc

SEQ ID NO: 188084 - RNA, 84 nt, Homo sapiens
ggggccgggggacggaggagccccggcggagaccacgcaaggccacagagcgagccacccccggcgcccgcgggcccgccagga

SEQ ID NO: 188085 - RNA, 68 nt, Homo sapiens
gcccagcgcaccagagcccaaaacaaacagacagaagaaggaagggcaaggaaggggaggagcacaga

SEQ ID NO: 188086 - RNA, 57 nt, Homo sapiens
aggcagacccgaccccagcggagacacgagcccacccgagaccacgccggacccgcc

SEQ ID NO: 188087 - RNA, 82 nt, Homo sapiens
ggaggggacggcagaaaggaagccacagccacgagggggcaaagaaaaaggagagaaaaagaggcaaaacaacaagaagaaa

SEQ ID NO: 188088 - RNA, 80 nt, Homo sapiens
agcacgggccgagaccaccgaggagagccgggccacgaggcccagggaacccggaccacagaaccaagaaagaggagaac

SEQ ID NO: 188089 - RNA, 82 nt, Homo sapiens
gccgggacccggccccggcccacaggggggggcaaacccgagagaacgggcgccccccacaacacagcggcggagacaaggg

SEQ ID NO: 188090 - RNA, 83 nt, Homo sapiens
gcaaacggcaccccaggaaaagcagggaggaaagcagacacacagacgaggcagcggcacggacaaccacacgggacgcagcc

SEQ ID NO: 188091 - RNA, 67 nt, Homo sapiens
aacaaaacaagacgcccggacaagagcaaacgaacacaagagacagggaacaccagaccggagcagg

SEQ ID NO: 188092 - RNA, 78 nt, Homo sapiens
gagaggcccccgaggagagaccagcccgggagggaagaaggagcggaccaaagccgcaggacaccacaccagccgccc

SEQ ID NO: 188093 - RNA, 77 nt, Homo sapiens
acagcgcccaaccaccgaagaagaaagagaagaaacgccagaccgagaggagaagccgacgaccccgccagacgcca

SEQ ID NO: 188094 - RNA, 69 nt, Homo sapiens
aggccccccagccagggaacgaaaagagggccggacagaggcagcagcccggcgaacaaaggcagggac

SEQ ID NO: 188095 - RNA, 75 nt, Homo sapiens
acggcccggagagacgaaccgaagcgggcgggcccccccacccagagggggagagagacgcgggaaccgccagca

SEQ ID NO: 188096 - RNA, 70 nt, Homo sapiens
gaaaaccagaagcacaaggacagagcacccaccacaggaggcggcaaaaccgcgcacgagcagcaaaccc

SEQ ID NO: 188097 - RNA, 78 nt, Homo sapiens
agagaaggagagagcgacaacaaaaagacagagacaagaaggcgcgcgccgggcaagaacaccagagcaccacccggg

SEQ ID NO: 188098 - RNA, 67 nt, Homo sapiens
cggcccgaccacacaagaaggagaagagagggaaaaacaaagaagaccgggaagcccgccagaagaa

SEQ ID NO: 188099 - RNA, 76 nt, Homo sapiens
cagcacgggaaaaacagaaaagggaccaagcaccaaggagaggccccagggaaaggccggagcgcgaagacgcagg

SEQ ID NO: 188100 - RNA, 82 nt, Homo sapiens
agacgcaagccccagcgaccccaagcaaaccgagccacggcaggaagcacagaacccgggccgccagagcccacgcaaccag

SEQ ID NO: 188101 - RNA, 68 nt, Homo sapiens
acaacagaaagcacaggccaagcacgagccagaggagacggacggacgagaggagaagaaacagccga

SEQ ID NO: 188102 - RNA, 86 nt, Homo sapiens
aagacagcccggacaccgacagcacagacagaacccgcaccagggccaggaagaagaggacacagaaggcgcacccccagggaaaa

SEQ ID NO: 188103 - RNA, 75 nt, Homo sapiens
agggcggcaggcgcgggcgcggcgggggcggagggaggcgccgggagcggagaaggcagagagacgaagagagaa

SEQ ID NO: 188104 - RNA, 77 nt, Homo sapiens
ggagaagcaagaaccggagggaacgcgggaccgccacggcagcaaggacgcacccgggagaaccggagcaggaaagc

SEQ ID NO: 188105 - RNA, 69 nt, Homo sapiens
gcaccgcagagcccgaacccacaaagaaaccacacaaaggacccggggaccggagacaagggcgccccg

SEQ ID NO: 188106 - RNA, 75 nt, Homo sapiens
cggaagcggggcgcacaccaccggacaaccgacaaaagaaccacgaccacccgaaggaaagcccagaaaagcaga

SEQ ID NO: 188107 - RNA, 54 nt, Homo sapiens
aaccgaaagcggcgccaagggggccggccagaccggagcgagacccaacagagc

SEQ ID NO: 188108 - RNA, 76 nt, Homo sapiens
gccgcagagaggagaaagcaggaaacgagaggagaaaccccgaaagcagcaccagcagcagaggaaacccaggaaa

SEQ ID NO: 188109 - RNA, 58 nt, Homo sapiens
cgcagggcgcccccgacgaagccgcggcaaggccgccagagaagcccccagcggcacc

SEQ ID NO: 188110 - RNA, 62 nt, Homo sapiens
gaccaacggaacacagagcggaaccgcaggggaagccccagaagccgacagcacagagacga

SEQ ID NO: 188111 - RNA, 83 nt, Homo sapiens
cgagaggacaggcggaggccccagggaagcgcagaaagcaggcgaacccgcggcgcaaaacgcccgagagagacgcagcgcaa

SEQ ID NO: 188112 - RNA, 78 nt, Homo sapiens
agagaagccgaccccaagaaagagagagacagaagccacagggaaaagaaagggaaccagacagaagccaggaggaaa

SEQ ID NO: 188113 - RNA, 77 nt, Homo sapiens
gaaagccgaagacgagacacaccaacccgaggccacgagcgagcccacagcccgggccccccgagcggacggaccgg

SEQ ID NO: 188114 - RNA, 70 nt, Homo sapiens
gaggacgcagccagaaaggaacaacccaaaaaacaacaaccggacacagaggacccagcaggagaaggac

SEQ ID NO: 188115 - RNA, 78 nt, Homo sapiens
aggaggcggcggcggccgcagcgagggcgagagggaaacggccgaggggagcccaaggaacccggcaccagccgggca

SEQ ID NO: 188116 - RNA, 76 nt, Homo sapiens
cggcgggcggagacaggaccgcggcgagcaagagcccaaaaggcagagcgaggagagaagaaggagggaaagccaa

SEQ ID NO: 188117 - RNA, 80 nt, Homo sapiens
caggcagcccggggggagcggccagcaggagcgccggggccggggcgaacgcggccgccagccagagacgacaccccagg

SEQ ID NO: 188118 - RNA, 71 nt, Homo sapiens
agaggcggagccacaagcacgcggaagagccaacacagaggaaaaagacaaaccagccccgccgaagaagc

SEQ ID NO: 188119 - RNA, 72 nt, Homo sapiens
cgccagccacccaggagggccagcgcaaccgcaggacccgaacacggaagaaagacacgcaggaggccgcgg

SEQ ID NO: 188120 - RNA, 73 nt, Homo sapiens
ccggccaagaaaaagccgaggccccgaaccaaaggccgagcacgagacacagcgggacgagccggagggaagg

SEQ ID NO: 188121 - RNA, 63 nt, Homo sapiens
accccgcacagcagcacacagacacagaggcaaggaccaagaaaggcccagggaccaaagccc

SEQ ID NO: 188122 - RNA, 61 nt, Homo sapiens
cagagagcgcagcaagaaagaagagaaaccaagcggagccacaaccagaggagcgcgcacc

SEQ ID NO: 188123 - RNA, 74 nt, Homo sapiens
gcaaaggccccggcaagaaggccgcagccaagccggaacaggagcggcgagcccaaacgcaagggggaagaaaa

SEQ ID NO: 188124 - RNA, 78 nt, Homo sapiens
aaagaaggacccagagcaaaaagagggaccagagacgaaaccacaggagaacaaaggccacccagcccggagggccgg

SEQ ID NO: 188125 - RNA, 79 nt, Homo sapiens
gggaggcagcagagaccgaaaaccggaggagggcgaaaccgcagacgaagacgcacggggcgcgagcgcggcacccagg

SEQ ID NO: 188126 - RNA, 60 nt, Homo sapiens
gccaaggaaaaacagcaagaacccaaaaggcaaggggcgaacgccacggggggcccgccg

SEQ ID NO: 188127 - RNA, 74 nt, Homo sapiens
cgaggccagagccagggcagcggccaggggcccgggcagagggaaagcagaggacggaacaacccgggggaccg

SEQ ID NO: 188128 - RNA, 83 nt, Homo sapiens
cacaggccacccaaggagaagaaggaaaaaacccaggaccaaaacagagaaaggagaccaagcgaagaacaccgcagagacag

SEQ ID NO: 188129 - RNA, 58 nt, Homo sapiens
gcggggaccgcggcccgggcacacaggcccgagcacaaacacaagaaacgcacgcccg

SEQ ID NO: 188130 - RNA, 74 nt, Homo sapiens
gaacaggaacaaagagagagaagcagaccagccagccccaagcagccgcacgacaaagaacgaagacaagagcc

SEQ ID NO: 188131 - RNA, 86 nt, Homo sapiens
gcgcaaccgcagcacacagcgaccgggagaacaagacggacaaccaaacccaccacaagaggaaaaaagaggcccccgcaccaaga

SEQ ID NO: 188132 - RNA, 80 nt, Homo sapiens
aggccgccacacacaagcaggcagccagcccagaacagagaacaggaggcgacgagacggagacagcaaacagaaagcac

SEQ ID NO: 188133 - RNA, 69 nt, Homo sapiens
cagagaggacagaagggagaaagcaggagacaaagccagacaacgaagagaggaaagaagcggaaagga

SEQ ID NO: 188134 - RNA, 80 nt, Homo sapiens
cgggacacaggagcagcgcacagcggggaccacccacgacccgagcgaggacacggcgccccacacccccgcaccgaccc

SEQ ID NO: 188135 - RNA, 71 nt, Homo sapiens
agccggggcggcgcaggaggagccgaggcgagccaacagcacacaggaagggaaggggcggagacgggcgg

SEQ ID NO: 188136 - RNA, 73 nt, Homo sapiens
gcccaaacgcgaggggaacgcaggagccgggcagagaaaagaacgcgaggagaaccccaggaggaggccagag

SEQ ID NO: 188137 - RNA, 80 nt, Homo sapiens
gaaggaaaaggccaccgcaaggacacaggaacgccacaagaaacaacagcaaggcgagggccacgaaacagaggagaaga

SEQ ID NO: 188138 - RNA, 75 nt, Homo sapiens
aagggcgaaggagccggcccaaggccagcgcagaagacgagaagccaggaggagaagcggcccggcaagaacgag

SEQ ID NO: 188139 - RNA, 40 nt, Homo sapiens
ccgggggagcaggaaagggcagacgagggaagaaaggagg

SEQ ID NO: 188140 - RNA, 53 nt, Homo sapiens
gaaggaccaagaaccagaacgcccagaaaacaggaaaacagacccaggaagcc

SEQ ID NO: 188141 - RNA, 59 nt, Homo sapiens
gagccccccccgaaaccgaggccaccaccagccagagccccagccccgccccagcccca

SEQ ID NO: 188142 - RNA, 73 nt, Homo sapiens
gcaacagggcagaaaaccagccccaggaggggacaaaaccccgaaaaaggcaacacagagccagagaaaaaaa

SEQ ID NO: 188143 - RNA, 75 nt, Homo sapiens
ccccaccgagaccaagaaggaccagaaaaccgacaacccccagaaagccaagccgggaaagaaaggcacccccag

SEQ ID NO: 188144 - RNA, 55 nt, Homo sapiens
agaaagaagagaccaagcgcacaggacggaagagagggcgaggcaggaagcggga

SEQ ID NO: 188145 - RNA, 71 nt, Homo sapiens
agacccgcccagaagcaaccaggaagccgaagaggacccaaaaaccggaagaaagcgaccaacggaaacca

SEQ ID NO: 188146 - RNA, 76 nt, Homo sapiens
ccacaagggacaggggcagcggaggcgggcaagcagcccgacgccagcaaaacggaggccaaggcaaaagacgaaa

SEQ ID NO: 188147 - RNA, 68 nt, Homo sapiens
gaacgagcgggagagcacgacaacacggcaggacgagccgaggaaacagcagaagaaagaagcgacaa

SEQ ID NO: 188148 - RNA, 60 nt, Homo sapiens
caacccgaaaaacccgcaaaggcgagagggaccaggccgaaggaaacaccagccgggaag

SEQ ID NO: 188149 - RNA, 79 nt, Homo sapiens
aaaaaagcagagcccaggagaaaccggacgcgacggggcagcagagcgggagcgacagggagaagaagcgaaggagggg

SEQ ID NO: 188150 - RNA, 76 nt, Homo sapiens
gccggcaccgccaccccacaggcccccaccaggccgcggcagggcaacaacacggcaccacacaagcgaagaagcc

SEQ ID NO: 188151 - RNA, 59 nt, Homo sapiens
ccagaagacagagggcgaggagaaagacagcaaagaaaaggagaagaaaggaaaaaaac

SEQ ID NO: 188152 - RNA, 64 nt, Homo sapiens
cacacagacacccgggaacccacccaccagcgggcccaggggcaagggggccccagaccgcccc

SEQ ID NO: 188153 - RNA, 75 nt, Homo sapiens
acacccaccagacacgacccccccgcgccaacgccaacagcagaacagcaacaaggggaaggagacgggacggag

SEQ ID NO: 188154 - RNA, 86 nt, Homo sapiens
aggcaaccccagaggggcccccgggcccgggaacgccaaggagcagaggcgcaaggcaaaagaaggaccccagcaggaaaagcaaa

SEQ ID NO: 188155 - RNA, 86 nt, Homo sapiens
ccaagaggcggacaaaacgccaggcggaccagaaggccagcaaagagggcgggaccggagaaaacgaaggaggacccccccacaac

SEQ ID NO: 188156 - RNA, 63 nt, Homo sapiens
aacagccagccacccggcagaggggcggcaccgaggagacaaggcgccccgaagccagggagg

SEQ ID NO: 188157 - RNA, 77 nt, Homo sapiens
cgcgggggcagcagcacggcagccacgacgccggcacccaaccagagaggaagacaacgagaggcggagaagaaccc

SEQ ID NO: 188158 - RNA, 69 nt, Homo sapiens
gaaaagccaagaacaagcacaaggcacaacagacaaccccagcagaccggacacaggcagcaccccgcc

SEQ ID NO: 188159 - RNA, 82 nt, Homo sapiens
gacacaggggggcacaagccaagaaaaccgaagccacagaagggaagaggaaagccaggccagaagaaggaaggccggggag

SEQ ID NO: 188160 - RNA, 79 nt, Homo sapiens
cccaacaccgagccagggaagggccccgaaaggaaggagcacaagccaaggacgcaaaaaacaaccaccagcgagcaaa

SEQ ID NO: 188161 - RNA, 74 nt, Homo sapiens
gcgggcccaggacaagacagaagcgccggggaggcagaaggggccgggagcggcccggcccggcacgggagagg

SEQ ID NO: 188162 - RNA, 76 nt, Homo sapiens
cccgggacgaggcggacgggagacacgggggaaagcagccgcggacgggcgcccgccaagcgcgggaccgcgcggg

SEQ ID NO: 188163 - RNA, 82 nt, Homo sapiens
cgccggcgcgggaaacgggcgaagcgacgagccgcgaggaggacccaaagacaggaccacgcaccagcagagaaggaaagca

SEQ ID NO: 188164 - RNA, 59 nt, Homo sapiens
ggggcgggaaagacccaggagaagccgcccaaagaacgggaagaaaacgccagagaagc

SEQ ID NO: 188165 - RNA, 51 nt, Homo sapiens
aggcagcccaccccagagcgcaaggagaaagggacggcagaaacagaacag

SEQ ID NO: 188166 - RNA, 81 nt, Homo sapiens
ccgcgcagaacggggccggaaagaacaaaaagccccacaaaggcccaccagaggaccacacagaaaccgggagaagccggc

SEQ ID NO: 188167 - RNA, 66 nt, Homo sapiens
agagcgcgaaacgcacgagaaggccccggggcagaagagcggcgccgaggagaaggaaaaagaccc

SEQ ID NO: 188168 - RNA, 77 nt, Homo sapiens
agaagaagaacccggaagaaggcggagaaaaagccaacgcagggaagcaagccaaggagaccgggagagagacgaag

SEQ ID NO: 188169 - RNA, 88 nt, Homo sapiens
gcgcccgggacggcggcggaccgcgcgagcagggcgcgccccgcagcagggaacgcggccaagccagagcgaggcaagagagaggcac

SEQ ID NO: 188170 - RNA, 74 nt, Homo sapiens
cagggcagggagcccgcacggaaaagacgaagaacggaagcgccccagaggagagggcggagagacggagaaaa

SEQ ID NO: 188171 - RNA, 83 nt, Homo sapiens
ggaaccaaccgggaccccaagccaaagaacccacacaaggacaaggggggaaacaggaagagaacagaacggaagaaagcaga

SEQ ID NO: 188172 - RNA, 82 nt, Homo sapiens
gagagaggcagacaaacccacagccaggcagcacagcaccagaagcagcacgagccccaggcagaccaaagacaaagacccg

SEQ ID NO: 188173 - RNA, 67 nt, Homo sapiens
agagacgcaggcccgaggagacccaaggaaacaaacgacggaaaaggccaggaaaagcggacaccgg

SEQ ID NO: 188174 - RNA, 63 nt, Homo sapiens
gacagggcaaaggacagaccagcagcaagcagagcccggacaggcccgccaccggggcacggg

SEQ ID NO: 188175 - RNA, 76 nt, Homo sapiens
cgaagggaaccagacaaggcggagaacgccccagggaacccgagaaggccaacaaaagagcgaggaaccaagaaga

SEQ ID NO: 188176 - RNA, 54 nt, Homo sapiens
cgagaggacgaagcccaagccgggacgccccaggcagggaaccggcgcccggga

SEQ ID NO: 188177 - RNA, 83 nt, Homo sapiens
gaaaagcgaggcaaggcaggcgggagccaaaaaccgaacacccggaaggggacaagggacggcgaacagaccccgcgcggggg

SEQ ID NO: 188178 - RNA, 76 nt, Homo sapiens
ggacgaagcacggcccggcgggagcgccaagcacagccgccgcgccaggcggagccaagcgcgacggacacgcaac

SEQ ID NO: 188179 - RNA, 61 nt, Homo sapiens
ggagggcccagcggagcacgaggggacagaagaggaacagcaccaaaaacgacgcgaaccc

SEQ ID NO: 188180 - RNA, 78 nt, Homo sapiens
acaggaacaccagcaggaaggccgaagagagccggggccggggcccacggacagcccagccaagcgccgaccggcaaa

SEQ ID NO: 188181 - RNA, 69 nt, Homo sapiens
gccccgacgccgagggcccgcaaggccacagcacggggcccaacaaaaacagaagaacaccagcccgca

SEQ ID NO: 188182 - RNA, 80 nt, Homo sapiens
caaggacaggaggagcgggggcccagccggagcggccagccgacagggcagccgccgcaaagggacgacgaagggacagc

SEQ ID NO: 188183 - RNA, 70 nt, Homo sapiens
acaagcagaaacagacaggaccacgcaaggaaggccaggaggggacaagaggagaggccaaagagcgacg

SEQ ID NO: 188184 - RNA, 70 nt, Homo sapiens
aaaaaagcaaaaaaccagggcaaggaccgacagaaccgagaagcaggccgggccaagaacgggaccgaac

SEQ ID NO: 188185 - RNA, 74 nt, Homo sapiens
aacaccccaaaagccgaccgggccaaggagacaggcccggcgcggaggacgcgagaccccagaacgagcccggg

SEQ ID NO: 188186 - RNA, 54 nt, Homo sapiens
ggaaggagagccccgaaaaagacaacagaccaaagagccgcccgcccaggcgga

SEQ ID NO: 188187 - RNA, 72 nt, Homo sapiens
cgcagaaagggcagacacaggcacaccaaggggggcgcgggcaggacaccgccgcccgggacccggcgcagg

SEQ ID NO: 188188 - RNA, 83 nt, Homo sapiens
gcacgagacccgcggccccagaagaccacaagggggcccgagcggcgcggggacggcggggaccgggcgcgccagaggacacc

SEQ ID NO: 188189 - RNA, 71 nt, Homo sapiens
gaaggaccaagaaccaggacaccagaggaccagaacccacgagaaacagacgagccaaccagaccccagga

SEQ ID NO: 188190 - RNA, 87 nt, Homo sapiens
cccgccacgcacaggacagaagacggaccacggccaagccacaaacggacgaacgaagacaaagcaaaaccacaggagaaacagaaa

SEQ ID NO: 188191 - RNA, 77 nt, Homo sapiens
gcgacaacggccagacgagcaaggcgcggagcacacgaacagcaaccaaagaacgcccagaagacagagacaaggaa

SEQ ID NO: 188192 - RNA, 62 nt, Homo sapiens
gacccccgcaaggcaaccgggaggggaggaaggaagacccacaagagaccacgcagagacag

SEQ ID NO: 188193 - RNA, 72 nt, Homo sapiens
aagaaagcagccacgagaagacgaaaaaaaagaaggaagagggcgggagcaagggaagaagaccaaagcacg

SEQ ID NO: 188194 - RNA, 68 nt, Homo sapiens
acaagaaaccgcacaagaccgggagggacccacaggaccgcgaacaaggaggccacaaaacacccgga

SEQ ID NO: 188195 - RNA, 77 nt, Homo sapiens
cgcaggggaccgcaacaggaacggaggcgggcggccaggacacagcgggcaggcggaacacggaccgcgaaggagca

SEQ ID NO: 188196 - RNA, 75 nt, Homo sapiens
cggcccagcccccgcaaggaggccccaccagcgagaaccagccaaaacacacgaacagggaacaagaaacaccga

SEQ ID NO: 188197 - RNA, 80 nt, Homo sapiens
agagaagcacaaaacagcagacccaagagcagcggaaaagaccagcacaggaggaaaagcgggcgcagcgcgcggacagc

SEQ ID NO: 188198 - RNA, 69 nt, Homo sapiens
cacgaaggccaccgaggccggcgagacaaagaggcacccccacggcggaccagcacagaacagaaaccc

SEQ ID NO: 188199 - RNA, 82 nt, Homo sapiens
gaagaaacgggccgcgaaccgcagacagcggccaagaagacacaaaggacggaggcacgcagcaggcgagaggcagaacccg

SEQ ID NO: 188200 - RNA, 86 nt, Homo sapiens
gcagaaagagaccgcagagacagccaacacggcacccacaggcccaggccgaccggccccgacccgccgacaagaacaaagccaca

SEQ ID NO: 188201 - RNA, 76 nt, Homo sapiens
cgacggagcgccaggacggagagaaaacagacagaaaagaaccagaaccggccaaaagcgaaaaggcggaagacgg

SEQ ID NO: 188202 - RNA, 71 nt, Homo sapiens
gaagaaaggccgcccccgccaccaccagaaggagaagaaccaacaacggaaaaccagcgggacaaggcacc

SEQ ID NO: 188203 - RNA, 67 nt, Homo sapiens
cagccgccgaagcgcccgagacagcaaaccccacaaccccaaggggagaaacgacggaaggaaaacc

SEQ ID NO: 188204 - RNA, 76 nt, Homo sapiens
cccccccccaagcgcaggccacgcaagcccacagcagaccagccagccccaagcagccgcacgacaaagaacgaag

SEQ ID NO: 188205 - RNA, 81 nt, Homo sapiens
cgaggacgaccaacaggcagcagcgggccccgccaccggcacaccgaagggagcaaacagcaagagggaaacagaaaaagg

SEQ ID NO: 188206 - RNA, 51 nt, Homo sapiens
gggcaccgccacggaccaccggccggagggagcgcaagccccggggcagag

SEQ ID NO: 188207 - RNA, 54 nt, Homo sapiens
ccacgacccacagaaagggaaaagagaagcaccggaccccgaccgggcgccccg

SEQ ID NO: 188208 - RNA, 76 nt, Homo sapiens
accggcacccggacaggaggagccagggcccggcccgaaaggagagccgcgcccagacgagcccaccacggaccac

SEQ ID NO: 188209 - RNA, 70 nt, Homo sapiens
gacccgcaccggaaggccacgccaagaaagaacgggccgggcggggcagggcacacaccaaaaccaagga

SEQ ID NO: 188210 - RNA, 73 nt, Homo sapiens
gcccacgccagggagggggagagccggcacgggccccgcagagcaccaggagagaccacagccgaggagcccc

SEQ ID NO: 188211 - RNA, 54 nt, Homo sapiens
gccgaggcgccgcacggggccgaggagcccagccccaagcagcacaagaccccg

SEQ ID NO: 188212 - RNA, 73 nt, Homo sapiens
cagagacaccagcaggacaggaaaaaaagaggaaacacgccgcaccagggaggagagaaacgacaccccccac

SEQ ID NO: 188213 - RNA, 67 nt, Homo sapiens
caagggcaccaaagaacacacacaacaacgaagagcaagcccacccgcagaacaagaagggcaacca

SEQ ID NO: 188214 - RNA, 84 nt, Homo sapiens
cagaagcccaagcaaaagcaagaccaaagaagcgccagcagcaagagagacaagagagacaccccaaccgacaaagagcaccag

SEQ ID NO: 188215 - RNA, 82 nt, Homo sapiens
ggagcagggcgggaggagaccgcccagagcgacgggcggaaacccaaaccccaaggaggccggcgcagggggaaccagccgc

SEQ ID NO: 188216 - RNA, 67 nt, Homo sapiens
aacagagacggcagagaaggagagcagaggaagcaaacgcagggaaagggaggacacacagggggag

SEQ ID NO: 188217 - RNA, 79 nt, Homo sapiens
gggaaccgcaagcggccaagcacaaagagcgccccacgagagaacggcacacgcgagcgagcaaaaaagcccgacgcca

SEQ ID NO: 188218 - RNA, 81 nt, Homo sapiens
aaacacgaaagccaaggaggagggaccagaagcgcaggcccgccaggaggaaacaaccacgccgcggggggagaaggggcg

SEQ ID NO: 188219 - RNA, 95 nt, Homo sapiens
gacgacggaccccgcgagaggaacgcgaggagaggcccagaggccggaggagcggacggcgcaggagccccagcggcccggcaccggggggaacc

SEQ ID NO: 188220 - RNA, 36 nt, Homo sapiens
ccaagggcacagagggagaggggaacgcccgcggac

SEQ ID NO: 188221 - RNA, 63 nt, Homo sapiens
gacgcacaaacgagaaaaaggaaggagcagcagaacgaaaagcgaaggaagagccaggaaagc

SEQ ID NO: 188222 - RNA, 85 nt, Homo sapiens
cgcgccccccgccgccgccgccgcgcgccaaagcgcgccgccccgggcaaaagggcccaggcgcacccaggcagaaggaggaggg

SEQ ID NO: 188223 - RNA, 89 nt, Homo sapiens
agaaggacggcgcccacccgccggagcagcccgaggccccagccagcgaacagaaaagaaaccgacccggaaaagagaagacaaacagc

SEQ ID NO: 188224 - RNA, 73 nt, Homo sapiens
gaccaccggggggcccagacgcacccgcacggcggcacggagggcggcggaggacgcagagggaagccacgcg

SEQ ID NO: 188225 - RNA, 70 nt, Homo sapiens
cgaccacgaacaggaccgcaacaggaaccagaaaggagacacgggaagccgaggagaaaagaaaaggaca

SEQ ID NO: 188226 - RNA, 55 nt, Homo sapiens
cgaaacccccacagcgcgcgagaccgaggcacgggcaggcacagcagaccagaag

SEQ ID NO: 188227 - RNA, 82 nt, Homo sapiens
cggccgcaggagggagaccacagcaagacaccgggaccccggaagccaaaaaggaccgaaggccaagagcacgggaaggaca

SEQ ID NO: 188228 - RNA, 80 nt, Homo sapiens
ggacagcgcgaggccgcgcagcccagcgcagccaagagggccgaggcagacaagggaaaggccgcgcaggggaccacccc

SEQ ID NO: 188229 - RNA, 82 nt, Homo sapiens
agccgcaaggaggcgccaccggaccgcacaccaggagcaggccagcgcgcgggaggaaaaagaggacgacaaagccggggaa

SEQ ID NO: 188230 - RNA, 74 nt, Homo sapiens
gaggagccgacagcggaggggggaagaccggacccaaaccgaccaggggggcccagggggcgccggacaaagca

SEQ ID NO: 188231 - RNA, 80 nt, Homo sapiens
aaaggcaagagaacagcagcgccgcccgccgacagccaggcccgggagaaagacaagcagacagcaagccaccggggaca

SEQ ID NO: 188232 - RNA, 83 nt, Homo sapiens
gaagcgccgccaggcccgcaggaccgccggagacagggcaagaccagccaaggaagcaacacagcagcgagagaagcagaaaa

SEQ ID NO: 188233 - RNA, 46 nt, Homo sapiens
cccccaagccacccaacaaggcccggccagcaggagccaccaacac

SEQ ID NO: 188234 - RNA, 70 nt, Homo sapiens
ggacagcagccgacaggagacgaaccaggccacccaagaaacaaacaggaggggcagcagcaggacaggg

SEQ ID NO: 188235 - RNA, 54 nt, Homo sapiens
ccacgcgcggaaggcagcgcccagcagcgcagccgaaaaggaagagcagccgag

SEQ ID NO: 188236 - RNA, 85 nt, Homo sapiens
ggagggcacaggaagacacaccccgagacgccaaggcagggggcagacccaaaggaaacgcacgaaagaaacaggagagcgcagc

SEQ ID NO: 188237 - RNA, 40 nt, Homo sapiens
gccccagggagacgcccgccggagggaaccgagacaaaac

SEQ ID NO: 188238 - RNA, 59 nt, Homo sapiens
cccagagacagcccaagcccagaagggaggagaacaccaggacacacagcaacgaagca

SEQ ID NO: 188239 - RNA, 78 nt, Homo sapiens
cgggcgggcccggcccgggggccgccccggcgagccgcgacggcgccgcccacggcgagacgacaggaggcacgagac

SEQ ID NO: 188240 - RNA, 79 nt, Homo sapiens
ggccccggccaccagccaccgcagaggacagacagcggaaagggagaacgggagaggagcggaaacgcccgaggggacc

SEQ ID NO: 188241 - RNA, 88 nt, Homo sapiens
gacgcaggcacccaggggccgccccaggacacgccggacccccccgagacaaagcaggaggacacaagaagggaggaaaggcggaccc

SEQ ID NO: 188242 - RNA, 72 nt, Homo sapiens
acaggcccagcaaccaagggcaagacaggaaagggggaggaaaaggggcagacagacagacaagacaaaggc

SEQ ID NO: 188243 - RNA, 85 nt, Homo sapiens
aacccagaggcggccaacaagaaaggagaaagagagccaaaacggagacagagaggaaccaccagcgcgcacccaggccaggggg

SEQ ID NO: 188244 - RNA, 73 nt, Homo sapiens
agcacaggggaaaaacgaggaaacgcgcagagaggcaggcacggaggaagaccagaaagcgaaggcggccacc

SEQ ID NO: 188245 - RNA, 81 nt, Homo sapiens
ggggcacaccgaccagccgcacacgcagcggcgcaaggagaacggacaagcagaccggaagaccgacggaagaccacaccc

SEQ ID NO: 188246 - RNA, 68 nt, Homo sapiens
cacccaggaccaacaaacagccaagaagccgggggccccacccgccaagggccccgccgaaagcccaa

SEQ ID NO: 188247 - RNA, 78 nt, Homo sapiens
aagcgggggccccgaggacggcgacggaggggccggaggcgggaagcaagcagaaaccaagagaagggccagcagggc

SEQ ID NO: 188248 - RNA, 42 nt, Homo sapiens
aggacagcggaagaaaaggccagagacggggcagcagcaggg

SEQ ID NO: 188249 - RNA, 56 nt, Homo sapiens
ccccgcaagaggacggcgccggcagccgcacgcagcagagagcaaaagaagacgcg

SEQ ID NO: 188250 - RNA, 81 nt, Homo sapiens
acgaagcccccccaggcccaacgaagagacgacacaaggagacgaggggaagagggaacaggcgcggaacagcccggagga

SEQ ID NO: 188251 - RNA, 85 nt, Homo sapiens
gacgcgcgcggccgagaccggccgcagcgccgccgccgccgccagagccggaggagccaccaacagaagcaggagccaggaaacc

SEQ ID NO: 188252 - RNA, 59 nt, Homo sapiens
gggacccagcccaggcggcgcggacggggcgggaccaacaccacagccccaggaacagc

SEQ ID NO: 188253 - RNA, 78 nt, Homo sapiens
agacacccccgcgcggcccgacagccagagggacccggggagcgggcccccccggcaggcagcgcaacccccaggcgc

SEQ ID NO: 188254 - RNA, 69 nt, Homo sapiens
gaagaggagaagacaccaaaaagcaaacggaccagaccgaccaccaaaaggaacgcccagcgaccccca

SEQ ID NO: 188255 - RNA, 51 nt, Homo sapiens
agaggaccccagccgcgcccgggagagcaaggccaccgaaagacacaggga

SEQ ID NO: 188256 - RNA, 74 nt, Homo sapiens
gccgcgcacaggccggggaagggccaggccgggcagccgccgacgagcagggggggagccagaacgagaaacag

SEQ ID NO: 188257 - RNA, 67 nt, Homo sapiens
ccaggagcccgagagagaaggaggccggaagagcgggagcgggagccaggcagaaggccaaccaacc

SEQ ID NO: 188258 - RNA, 73 nt, Homo sapiens
gggccgcgcgagcaggcacgccgagcgccacgccaggaggcccgaaccggaaggagacgcagaaacccaacgc

SEQ ID NO: 188259 - RNA, 71 nt, Homo sapiens
agcggagaaagcagccagggaagagaaaccgagcaacagacaaagcccgggcacggcggggaacgccggaa

SEQ ID NO: 188260 - RNA, 83 nt, Homo sapiens
aaggccaggagggccacgacaaggccaacccaagcagccgaccgaggagaagaagaaagggccacccggcagaagacagaccg

SEQ ID NO: 188261 - RNA, 36 nt, Homo sapiens
aagacgaacaaaccgaagcagggaggcaccaggcca

SEQ ID NO: 188262 - RNA, 58 nt, Homo sapiens
ggcacccagccacaccagacagagccccagcaacggaaagccaagcaagcaaggagcc

SEQ ID NO: 188263 - RNA, 82 nt, Homo sapiens
cgggcccaccccaccgccagcggaacccggggacacgacgccccaaaccgccaggagaaaaaaggaagaggcaacaagaacc

SEQ ID NO: 188264 - RNA, 87 nt, Homo sapiens
gaggcggcgggacagagcgccgcgaccccagcgggcccggggaggcaccgacgaggaggcgccacgcgggaaaacagcaacagaagg

SEQ ID NO: 188265 - RNA, 39 nt, Homo sapiens
cacagacgcagccccaggaagggcaggaagcagaaccag

SEQ ID NO: 188266 - RNA, 75 nt, Homo sapiens
gcacaacagggaggacagaggaagaaaaagaagacgccagcaccaaggacacgagcccagccaggcgagccagcg

SEQ ID NO: 188267 - RNA, 80 nt, Homo sapiens
cacaccgaagacaacacccgcgaggaaaaggagcccaagaggacagagaacgaagcacagaaaagcagccgcacagaacc

SEQ ID NO: 188268 - RNA, 78 nt, Homo sapiens
ggaagacacaagccagccaaaaaaacaaggcaaaaacaaagcaaaaccagaccacaacaagaaggaccaaaaccaggc

SEQ ID NO: 188269 - RNA, 61 nt, Homo sapiens
caaggagaagagcggaacggcaaagcaccgggaggaaagagagccacacgaagaacacggc

SEQ ID NO: 188270 - RNA, 72 nt, Homo sapiens
gggaggaggcaacgccgcgaggagaacagaagcggagaacacaaagccacaagccaaacccaaaaggaaacg

SEQ ID NO: 188271 - RNA, 79 nt, Homo sapiens
aagcgccgccccccacggcacgggaaggacgccagggcgaggcggacagagcacaggaaagaccacagcaagaccacgc

SEQ ID NO: 188272 - RNA, 72 nt, Homo sapiens
ccgggaccgcgcgcccacgccgcgccagacaggaaaaggaccagcgcagccagacaaaacacgccaaggcag

SEQ ID NO: 188273 - RNA, 82 nt, Homo sapiens
aagcgaggacacacccaggaaaagaccaggacggacaagcacagccggaaggcgcccgaggacaccacacaaaacccgcagc

SEQ ID NO: 188274 - RNA, 76 nt, Homo sapiens
aacagacgcgcccagagcgcagcacgggcgcaggaaaagaaaagccaagaggaaagccgagggaagggaagaggcg

SEQ ID NO: 188275 - RNA, 78 nt, Homo sapiens
ccaccaggacaagaaccgggcacaaaagcccacggccccggcaggccggagcaaggaagacagaacgaggccaggaag

SEQ ID NO: 188276 - RNA, 83 nt, Homo sapiens
accaggcacggcggcagagaccagggaacagcgccacaagaaggcccaggacaagaggcaagagagaggacagacgcccgaaa

SEQ ID NO: 188277 - RNA, 81 nt, Homo sapiens
cccaagagagccaggagcgcacacacgacaggagaaaggaggggcacgccacgggggggcaggccaccccaggcacgcggg

SEQ ID NO: 188278 - RNA, 72 nt, Homo sapiens
gacgaagagaaaaaccaccgcacagcgcgagaagagggggcgaagaagggagccaccagggggagggggagc

SEQ ID NO: 188279 - RNA, 73 nt, Homo sapiens
gagacagacaaggcaaagcgaaaggcaccgcaacaacgcccagcgaggccaaaaacaggggaaacgaaagcgc

SEQ ID NO: 188280 - RNA, 78 nt, Homo sapiens
aaggaacaccacacgggggccacagaccggacaccgcacagagacgggaacagagaagcgagcggaggagacggaggc

SEQ ID NO: 188281 - RNA, 72 nt, Homo sapiens
ggaaacgggcgaagcgacgagccgcgaggaggggcccgggcagagggaaagcagaggacggaacaacccggg

SEQ ID NO: 188282 - RNA, 79 nt, Homo sapiens
acaagcccaaaacgggccagcgaacagggacccacggggccagcgcgcccggcgggccagccccaggaagcacggccag

SEQ ID NO: 188283 - RNA, 73 nt, Homo sapiens
aggcacagggagcggccggccgggccgagaacagccccaacgagcggcccgcgacccgcggccggcagcgaca

SEQ ID NO: 188284 - RNA, 82 nt, Homo sapiens
cccaccaccaccacccacacccaccaacaacaccacaaaaccacagccaagaaaccaaagagccaggcgacccccgcgcccg

SEQ ID NO: 188285 - RNA, 65 nt, Homo sapiens
gagcaaaaggcggacaggcagaggaggccaacacgccaccacccggggccaggaacggacaggca

SEQ ID NO: 188286 - RNA, 71 nt, Homo sapiens
agacaccgcacccaaggcgaggaagaaacagaagaaccgaacgcaagcagaaaaaagaaccagacagcaga

SEQ ID NO: 188287 - RNA, 75 nt, Homo sapiens
gggcgagcggcgagccgaaaagcgagcgcgaggaaaaggcggcgggaggagagaccgggacccaagccgcccccc

SEQ ID NO: 188288 - RNA, 71 nt, Homo sapiens
aagagccgcaggaccacgaaaaacaagcagcccaacaacacaggcgaaggggcgcaacagaaagaagcgag

SEQ ID NO: 188289 - RNA, 81 nt, Homo sapiens
gcccgcggcggagaaaggggcagacgccggcaccacgagagcccggcccgccggggacgaacagagaaaagaccccgggaa

SEQ ID NO: 188290 - RNA, 81 nt, Homo sapiens
cgcgagacgagccaagaaccggcacggcccggccccgcccggcgccgaggacccccgaaccgggcggggcggcccaagggg

SEQ ID NO: 188291 - RNA, 69 nt, Homo sapiens
aggccacacgacggccagacgcgcccacccagccaaagaacccccgccgcgggcgcaccaaaacgaagc

SEQ ID NO: 188292 - RNA, 53 nt, Homo sapiens
gagaaaggggaaacaaaggaacagaagagccaggaagacggccgcccccgacc

SEQ ID NO: 188293 - RNA, 70 nt, Homo sapiens
cccaggcggcgcggacggggcggacggcagaaggggagagccaggcccagacaaggaaccgaggagaagg

SEQ ID NO: 188294 - RNA, 65 nt, Homo sapiens
ggcggcccgcaaagaaacagccccccgacagcccgggaagaagcagacacaagagacgaagagga

SEQ ID NO: 188295 - RNA, 71 nt, Homo sapiens
ggccagcgccgcgccagcccgcaccgcccgccgcccgccgcgcgccgccgccaccaggagagaacgccgcg

SEQ ID NO: 188296 - RNA, 33 nt, Homo sapiens
cccacacagcagcgggggagccccgagcgggaa

SEQ ID NO: 188297 - RNA, 76 nt, Homo sapiens
aggaccagaagcccgcggagaaaaggcgacagcccgccaagacagggcggagaacggaaaagcaccaggaagcaga

SEQ ID NO: 188298 - RNA, 65 nt, Homo sapiens
caaccaaggacaggcacgggccacagagacgagaccccaacaacaaaaccacacgccgaaacagg

SEQ ID NO: 188299 - RNA, 77 nt, Homo sapiens
caaggaaccacggacagggacaagggaacgaagcccaaaaggcagagacggaccgagacaggagagcaggggcccag

SEQ ID NO: 188300 - RNA, 56 nt, Homo sapiens
cggagggggcccaagaaagggccagaccaaaggaaccagagcaggagaaaacgagg

SEQ ID NO: 188301 - RNA, 88 nt, Homo sapiens
cgcggagcggcgcggagcgcggccagcaaaggacgcccgaacggcgcagagcaggagcagacgcgcagggagcaacagccaagccaaa

SEQ ID NO: 188302 - RNA, 64 nt, Homo sapiens
gcggcccagggcaggcaagcaaaaagacccaagcaccagccgccgccacacccccccccggccc

SEQ ID NO: 188303 - RNA, 39 nt, Homo sapiens
aagaccgcgaggcgagaccccagcaaaagcagccgagag

SEQ ID NO: 188304 - RNA, 82 nt, Homo sapiens
cgagaggggcgagaacgccacgcgggccggcgaaagcgcccccgccagccgccgcagcgacccgaccagacaagacggcccc

SEQ ID NO: 188305 - RNA, 69 nt, Homo sapiens
cagcgcgagcgacaacgggacgggaaacgacacagaagcagagagagccaccggccagcagagagagac

SEQ ID NO: 188306 - RNA, 71 nt, Homo sapiens
gggcagccgccgccaccccgcggccgcacccccgccccagacgacacaagcccacacaaggaccggaccca

SEQ ID NO: 188307 - RNA, 98 nt, Homo sapiens
ggaccaaccaaagacgccaaggagaaggcagaccggaacagacaacccagcaacagacggaacagcgcgaggcaagaacagcaagcaaagcaagagaa

SEQ ID NO: 188308 - RNA, 76 nt, Homo sapiens
gaaaacgaggcaaggcagaaaacgcacagcaaaggagcacagaacccacggaggaaggaccccgaggcacccagac

SEQ ID NO: 188309 - RNA, 68 nt, Homo sapiens
cggcccaacccaccgggcccagcacgacagagacccggaaagcgagcagcaaagacccagcacccaac

SEQ ID NO: 188310 - RNA, 59 nt, Homo sapiens
ccgccgcagccgagcggaaggacgaagaacccacaggagggccagaggacaaagcacgg

SEQ ID NO: 188311 - RNA, 38 nt, Homo sapiens
caagccccggggaccgggagacggggcgccagggccag

SEQ ID NO: 188312 - RNA, 80 nt, Homo sapiens
gccaggcaggaccccgccccaagagcccaagaaaccaaagaagaaaacccagggacacaccggacacgggccccggagcc

SEQ ID NO: 188313 - RNA, 96 nt, Homo sapiens
caggaagacaacagcccgcccacacagggagaagagaagaccagagaaagaacaaccccgcgcacaagacaaaggaccaaaaagcacacaccacca

SEQ ID NO: 188314 - RNA, 81 nt, Homo sapiens
ccccggcgccccagcaggcccaggcacaagggcccagagacccggccgacgcccggaagacaagaggaaagccgcagcggg

SEQ ID NO: 188315 - RNA, 81 nt, Homo sapiens
cggccggagcccccgcccaaggagaagcgcccaagcggacgcggaccagaccaagaggaaaggaacagacagcgccggaag

SEQ ID NO: 188316 - RNA, 54 nt, Homo sapiens
aacggggaccccggagcccagaagacagagggcgagggccccgggccacaggcc

SEQ ID NO: 188317 - RNA, 82 nt, Homo sapiens
cccacacgggcgagaagcccacgaggcaacacgcaaggccgccaccagaagagccggcaccccagaccccccgaaaaccaga

SEQ ID NO: 188318 - RNA, 73 nt, Homo sapiens
cagaaaaaaaaggacaaagcaagccaagagacccaaagaaggagagaacccgaggggcgaaccggaagcagaa

SEQ ID NO: 188319 - RNA, 72 nt, Homo sapiens
acagagaagcgcgcagcagggggcgggggaggcgacccacgagacgagagcacaacaggccccgccccagcc

SEQ ID NO: 188320 - RNA, 34 nt, Homo sapiens
gccggggagaagccaaaacagagcaaaacgcgca

SEQ ID NO: 188321 - RNA, 73 nt, Homo sapiens
gccgcccggggccaccacccagaccaaagggacagcaacgcccgccagcccccagaagaggggacaggaccgg

SEQ ID NO: 188322 - RNA, 78 nt, Homo sapiens
ccgccccgcccggagccccggcccccacaggggaccccagcccaacgccaaacgagccggacccggaggacggaaaac

SEQ ID NO: 188323 - RNA, 79 nt, Homo sapiens
gcagccagccagggaagaaggcagcccaccaggcaaagaccggaaacaggcacagaacagaaggaaaggacgaagagcc

SEQ ID NO: 188324 - RNA, 87 nt, Homo sapiens
cagagaaggcagcaccccgaaaaccgcacccccaacacggacaggcgagacaagaggaacacccaaaagacggcaaggacccacaca

SEQ ID NO: 188325 - RNA, 72 nt, Homo sapiens
aacgcggcgaccgccagacgcggccggagcccccccagacacacgagggggacaccgccagcccagcaccgg

SEQ ID NO: 188326 - RNA, 80 nt, Homo sapiens
accacacgccaccaacacaaagcccagccagcagagggcagccggagcagcaagcgggccgaccgcaggaggacagagca

SEQ ID NO: 188327 - RNA, 60 nt, Homo sapiens
cagaggcaccccggacagagacggaagcacgaacggcggagaaaccaccacaaacacgag

SEQ ID NO: 188328 - RNA, 80 nt, Homo sapiens
ccgaaagagcaccgcacaaaacaacaagaccccccggcggaaggcacacgcacacaccgagaccaaaggacccgggagac

SEQ ID NO: 188329 - RNA, 73 nt, Homo sapiens
gaagaagcaggaggcaagaaaggggaaccccggagaaaaggccaagaaggcagcggggacgagagccccggca

SEQ ID NO: 188330 - RNA, 87 nt, Homo sapiens
caccaggaagaggagccgagcacgggccgagaccaccgaggagagccggagccgccaggcagcacacaaagcaggagacccgaagcc

SEQ ID NO: 188331 - RNA, 66 nt, Homo sapiens
agccgacacaaccagaaaggaggagccaagcgggaaaaggggcaccgacgcaccagcgccggacac

SEQ ID NO: 188332 - RNA, 71 nt, Homo sapiens
caggcggcgcggacggggcgggccaagcaggaagcacgccgggaacgaagcacacggagaagcgggccaag

SEQ ID NO: 188333 - RNA, 73 nt, Homo sapiens
cgaggcaacacgcaaggccgccaccagggcggagaacggaaaagcaccaggaagcagagaggaccgcagaagg

SEQ ID NO: 188334 - RNA, 56 nt, Homo sapiens
cgagcagcgcggcgggacaccagaagcagaagcaaggcaccggcaccgcacccaag

SEQ ID NO: 188335 - RNA, 62 nt, Homo sapiens
gcccggccaggcacaagggcaccacaaaggaccgagggaacagccaggagagcaagcaaaag

SEQ ID NO: 188336 - RNA, 71 nt, Homo sapiens
caagaaaagaaagggagaccagaagagaaccgcaggagaaggaccaaaaggaacgagacggaagagggagc

SEQ ID NO: 188337 - RNA, 72 nt, Homo sapiens
cggggacaagaagaggggagaaggcggaagccaggacaagaggaaaagggaaacagcccaggccagacaacc

SEQ ID NO: 188338 - RNA, 81 nt, Homo sapiens
accaaacagcagggacagaaacaaagcagagcccacagacaaggccaaaggcaaagcgcacagaggggcccaggcagagag

SEQ ID NO: 188339 - RNA, 72 nt, Homo sapiens
gccccccagacaaccggaagggaccgacacgacgcccggagacgcgccgcccccgggagagccagaaagagg

SEQ ID NO: 188340 - RNA, 80 nt, Homo sapiens
aggccgcaagccaagaaaagacaacaggcacaaagagagaaggaacacccacagggcagacagagaaagaacacaaagag

SEQ ID NO: 188341 - RNA, 73 nt, Homo sapiens
gaaagggacgcaaggaacaaaaggaaacccaccaagggcaggacaggcgcgacgcccccgcagcagaagcaga

SEQ ID NO: 188342 - RNA, 76 nt, Homo sapiens
aaaaggaagagaagacaagaaacagcgcgaacgaagaacagacacgagaacaaagagaacagcagcagagccgggc

SEQ ID NO: 188343 - RNA, 76 nt, Homo sapiens
ccagggcaagcaaaaagcaacagcaaggacaggaaaaccgaaagagggacgccaaaagccagacggaacgagggaa

SEQ ID NO: 188344 - RNA, 72 nt, Homo sapiens
accaagcgcaaagaagcagcagacggccagggaccgcgccaacggagaggagagggaccggaagcccgggaa

SEQ ID NO: 188345 - RNA, 82 nt, Homo sapiens
ggagcaagacagacacacgcccacaaagcccagaagaagggcaccagcgaagacaagagagggcggcagaaggaacaccgag

SEQ ID NO: 188346 - RNA, 71 nt, Homo sapiens
agcaaaagccaccggcaaccacccgagacacacaaggaaagggccgagacagggcgacgccgggagacccc

SEQ ID NO: 188347 - RNA, 76 nt, Homo sapiens
cagaagcacccccagcaaagccaagccagggaaggccacagaagaaggaaccagaggaggggaggaaccaccacag

SEQ ID NO: 188348 - RNA, 70 nt, Homo sapiens
cgcagagcaccaggcccaccggaaagcgagccaaagccgcaaagccgccggaagccaaagagaaaagagg

SEQ ID NO: 188349 - RNA, 90 nt, Homo sapiens
ccgccccgcccccgccacccgagcgcggagcagcgaccagagagcgcggccggaggacaggcgaacaagaggcgccagcgggcgcgccgg

SEQ ID NO: 188350 - RNA, 119 nt, Homo sapiens
gcgcggcgggacgcgagcggcgagccggagcgcggagcccggccccgcaccaggaggaggacgacagcacggcagcaccgggaccggaggcccagagcgacggacggagaaccaggccc

SEQ ID NO: 188351 - RNA, 67 nt, Homo sapiens
gggaggagagagggagagccaaagaagaggagaggaagacaccccccccaccgaaagaacccgaacg

SEQ ID NO: 188352 - RNA, 103 nt, Homo sapiens
cccaaggccaagcaccacgccgccacacgggggcacgccacacggggacggcgaagaggaaaccacaggcaagcagcccagaggaaccccgggcacaccaacc

SEQ ID NO: 188353 - RNA, 83 nt, Homo sapiens
cgagccgcaagcagcgcggccaagccacgccaacggccgagaaacagacaacccacagaacaaagcggaccaaggcaccccca

SEQ ID NO: 188354 - RNA, 83 nt, Homo sapiens
cgcaaacgacgcgaaaagaaacacgccagccaagagagacagacggcaccaccaccccaacaggccgcccgccgaagaaacac

SEQ ID NO: 188355 - RNA, 74 nt, Homo sapiens
gggggagagcacacgcccgccgccgacgaacggggaaaaggcaaccccacggcggcggcggcggcaggaggcac

SEQ ID NO: 188356 - RNA, 68 nt, Homo sapiens
gaccagcggaaacagaggcaagccgggaacgcaaaaggaccagccaggacagggcagaccgccagcag

SEQ ID NO: 188357 - RNA, 72 nt, Homo sapiens
cgcaagagacacccagagaaggaaaggagagacaaagcagcacgaacaccagaagaacacggccggggggag

SEQ ID NO: 188358 - RNA, 75 nt, Homo sapiens
gcacacagaagaagcccagagagcaccccagcgaggcccacagaaaagccacaacccagaccaccaccagaagag

SEQ ID NO: 188359 - RNA, 99 nt, Homo sapiens
aggcacgcggaccccagggccggcccggaggcgggacccagggcccagaagacgaccccgacgcaggccaggagccgcggacagaagccgagcacggcc

SEQ ID NO: 188360 - RNA, 62 nt, Homo sapiens
aacgccggccgaacagcccacgccaagagacagagcagccgccggacaaaagggaccccacc

SEQ ID NO: 188361 - RNA, 89 nt, Homo sapiens
cacacaacaggagagaggagaaagaagaaacgcagaaccaacccccagagcagccagaagcccccgcaccccccgagagcccgcccagc

SEQ ID NO: 188362 - RNA, 61 nt, Homo sapiens
ccgggcccgaggaggcagccaagccgagccgccacccggcgcaagccaccgagaaagggag

SEQ ID NO: 188363 - RNA, 95 nt, Homo sapiens
agcaagcaggacaaacagcacaagagcggacaaaacaccagcaggaaaaaagagcggcagaaggccaaacggccgagcaggcgagcgaagagaca

SEQ ID NO: 188364 - RNA, 76 nt, Homo sapiens
ggaacagcgacgacaaggcggaaacaacacaggacagccaaaacacgcacaggaccagacaacaagaaaaagagcc

SEQ ID NO: 188365 - RNA, 72 nt, Homo sapiens
accaggccccaagccacaccagaagacaaacaacggcgcaagacagagaacaccgccccaaaacaggaccag

SEQ ID NO: 188366 - RNA, 72 nt, Homo sapiens
acacgagggccgcacccccacacgcaggaaacacgagggcacgcagaaaagaagagcgaaacgggaccacac

SEQ ID NO: 188367 - RNA, 106 nt, Homo sapiens
cgggacccacgacgccgggaccggccaagggcccacacaccaagaccaagaaccggaagagccacccgagaaacccgcagagccagcccgcagccagaagccacag

SEQ ID NO: 188368 - RNA, 78 nt, Homo sapiens
gacaggggaacagacagaaggagcaggaaccaaaggaagacagggggcggggcggggccagagaggaaccccaagacc

SEQ ID NO: 188369 - RNA, 68 nt, Homo sapiens
cccaaacgcggcacgggagagacgccccggcggcgaccggaaaagagcaaggacacgggcaagaccac

SEQ ID NO: 188370 - RNA, 64 nt, Homo sapiens
cacgcagcacacagagggggcaacggggaggacgccagacgaggccggagcgcaggcacggggc

SEQ ID NO: 188371 - RNA, 84 nt, Homo sapiens
agggacaacaggaagcccagaaagaaaaagcgcaaggcaaaacacaggccagcaacagaagaaagcaagcaccggggaaagcgg

SEQ ID NO: 188372 - RNA, 73 nt, Homo sapiens
agggagcaggcccacagccccggacagcgaaagaagagccggccagaaaccaaagacccacggcgaagcggcc

SEQ ID NO: 188373 - RNA, 77 nt, Homo sapiens
gccacacggccgcaccgcgcgagcacgggcggagcgaacgggggacgcccacacagcaccggagaggaccagagaac

SEQ ID NO: 188374 - RNA, 56 nt, Homo sapiens
aggcaacggcaagcaccaagcgagcggcacagggccaggcggcgcaaccccgggcc

SEQ ID NO: 188375 - RNA, 70 nt, Homo sapiens
acggaagcacaacccaaaacccccacgacggcaggcgcacggaacagcgaggccagcaggagacggagcc

SEQ ID NO: 188376 - RNA, 53 nt, Homo sapiens
aagcgaaagcacaccaaggccccggcacaggaacggccaccaccccccgcccg

SEQ ID NO: 188377 - RNA, 86 nt, Homo sapiens
cgacaagccgcggcagccgcggaccaccgccgccaggcaaggagcagggacaagacaggaagcccaagcagcaaccaaaagagcca

SEQ ID NO: 188378 - RNA, 71 nt, Homo sapiens
aggcggaggccagcaaggccagcacagccccgcgacaaccaggcaagaacggcaggacccacagaacaagc

SEQ ID NO: 188379 - RNA, 99 nt, Homo sapiens
gagaaggagaacaccccgagcgaggccaacccaggaggaggagggagcacaaaagaacaaaagggaaaaaaggacggcagcacacaacaaaacacagga

SEQ ID NO: 188380 - RNA, 70 nt, Homo sapiens
ggagccagacacgaaacggggccagacaagggagggccaagaaccggaggagggcaagccggacacgcca

SEQ ID NO: 188381 - RNA, 79 nt, Homo sapiens
gcgacgaggcacagcgcgcaagaagggagagccaaagggaccgggacaggggaagaaaagaagaagaagagagaagaag

SEQ ID NO: 188382 - RNA, 51 nt, Homo sapiens
ggagaaaccaccggcggaccgcacaagcaggcaaaggaacagagcacacag

SEQ ID NO: 188383 - RNA, 61 nt, Homo sapiens
ccgcccacggccaccacggcgcgaggacgccacggggcccgccaacggggaacacgccacc

SEQ ID NO: 188384 - RNA, 79 nt, Homo sapiens
aggcccccgggcccgggaaaacacacggccagcgccggggaggcagaaggggccgggagcggcccggcccggcacggga

SEQ ID NO: 188385 - RNA, 38 nt, Homo sapiens
gagaggagggaagcgccccagaacagccagacgggaag

SEQ ID NO: 188386 - RNA, 82 nt, Homo sapiens
cgcggagcagaccggggcgagaaccggggggccggagaccacgacagaaacccggagcccaagacggagcaggaaagcacac

SEQ ID NO: 188387 - RNA, 80 nt, Homo sapiens
ccgacggagcgaagagcggccccgaaggaggggaagggacggggggcggccacggcaggcggccacgcagacacgacagg

SEQ ID NO: 188388 - RNA, 68 nt, Homo sapiens
accaggcggcaaccccggggcgacaaaaagggaacgggcacaaagcggcggcaaccggaaacaagacc

SEQ ID NO: 188389 - RNA, 60 nt, Homo sapiens
acaaggccagagaaggggaggaaccgaacgagcggcaaaagcagaccggaaaacccaccg

SEQ ID NO: 188390 - RNA, 76 nt, Homo sapiens
ggaagcccagacaccaggaaaccccagaggaggcgggcccggagcaggcaaggacaaaccggcgaccacacacggg

SEQ ID NO: 188391 - RNA, 78 nt, Homo sapiens
ggcaacacgacaccggaaaaccaaagacagcacgagcacagaaagccaaaccaaaaagaagagcgacagcagaaagga

SEQ ID NO: 188392 - RNA, 75 nt, Homo sapiens
ccgaagccaacaaagaagcggaaagcagaggaccggaggaaagcggacgaaccccgggcgcggcaaagagaacgc

SEQ ID NO: 188393 - RNA, 52 nt, Homo sapiens
cggccgcgggcggaggacaggaggaggagcggaagaggaccgccaagaaaaa

SEQ ID NO: 188394 - RNA, 83 nt, Homo sapiens
gccggagagggagcgccgccggagcgaggagaccggaaagaagggagaccgcggggaaaagagaaaggccaaccaaagaccag

SEQ ID NO: 188395 - RNA, 71 nt, Homo sapiens
gaacgacggggagggcagaccaggcgaacccagcgggcagcggcaaaaccaaggccagaaacgcagggccc

SEQ ID NO: 188396 - RNA, 103 nt, Homo sapiens
caagaggcgggcaggagcggcggccaggccagacccgaaggccaggagacccgaccccaagagaaggagggggcagagcacggcaggcagaaggggccaaccc

SEQ ID NO: 188397 - RNA, 89 nt, Homo sapiens
cgggcggccgggagccaggagcgcggcccggggcccgggggcgcgggccgggggaggggggcgggccgagcacccgcaggccccgcaga

SEQ ID NO: 188398 - RNA, 79 nt, Homo sapiens
ccagcagcccaggggaaaggaacacccccagcggccaggcaagaacggaagcacgggcggaggaaagcacaagcagagc

SEQ ID NO: 188399 - RNA, 56 nt, Homo sapiens
cagagaaggaccacgggcacccacaagcagcgggcaaaaaacagagccaaacagcc

SEQ ID NO: 188400 - RNA, 53 nt, Homo sapiens
acaggagggcagcagagcaggcaggcaaacgaggagccaagcgggaaaagggg

SEQ ID NO: 188401 - RNA, 67 nt, Homo sapiens
ggggacccccgacgccaggcagcgcccccaaacgagccagcgggccggcaccggcacgaggagcgca

SEQ ID NO: 188402 - RNA, 77 nt, Homo sapiens
aaccggcagccccacccaccggcccacccacaagcgcacaggaccgggcacaggagggcagaccaaaagcacaaaaa

SEQ ID NO: 188403 - RNA, 62 nt, Homo sapiens
ggaaggggggaccgcggcgcaggacgccgacacgggccgcgccagaagggaggcgggaccca

SEQ ID NO: 188404 - RNA, 78 nt, Homo sapiens
cagcaccagcgcaaacaacaccaagaccaggcaaaagaaaccaccgacgaagcccgagacagaccagaaaaggaaaga

SEQ ID NO: 188405 - RNA, 74 nt, Homo sapiens
gaaggcagcacggcacacgccaagcaaaaccaggagggcccagcaaggaaagaacgacgaaaacagaaagcaaa

SEQ ID NO: 188406 - RNA, 55 nt, Homo sapiens
ccgggggagcgccgaaaagcaccggagccgccgcgcacagaaaagagacacacaa

SEQ ID NO: 188407 - RNA, 81 nt, Homo sapiens
gggccacggcggacacagaccagcgcaaaggagaagcgaaggaagaaggcaaaaaggacaaagccgcagacagggagagaa

SEQ ID NO: 188408 - RNA, 84 nt, Homo sapiens
acagggagaggggcgaaccggccccccacagccacgcagccagagacgcgcacgaaacgacgaagaggcccgaggacagaggag

SEQ ID NO: 188409 - RNA, 73 nt, Homo sapiens
aaggcacaggaaggaaacgcgcaacaagagcgaacggaggaaccacgcacagaggagcggcgacacgggccgg

SEQ ID NO: 188410 - RNA, 77 nt, Homo sapiens
ggcacccggccaccccggcggcgcacggcagggcccccgagcccacggacagcagggggcagcacggaagcacagga

SEQ ID NO: 188411 - RNA, 75 nt, Homo sapiens
cccagggcggacagaaagggcaagaaggaacagacaaaaacggccggaaggaaacacaggacaccagggacagcg

SEQ ID NO: 188412 - RNA, 70 nt, Homo sapiens
caacacaccgccaccgaagacgggccccaacacccagagacgaaaggcagaaggcggcagggagcacgca

SEQ ID NO: 188413 - RNA, 81 nt, Homo sapiens
aaaggagggcggcgcgccgagcgcacacaggacaggccccccagccaccagcggggcccacaggagggcacgggcccgaag

SEQ ID NO: 188414 - RNA, 90 nt, Homo sapiens
caacggcagaagccaccacaaaagcgaaagggcacaccacagccccagcgggggggcacccaggagacccaagacaccaggagagaaaga

SEQ ID NO: 188415 - RNA, 73 nt, Homo sapiens
aaaaaccaaagccaaacacaaggagacccggagaggaaaacaaaagcgagaagggaggacgcacccagaccca

SEQ ID NO: 188416 - RNA, 53 nt, Homo sapiens
agagggccgggagcgcgcagccaggaaggcccgccgaaggagaagggcaggaa

SEQ ID NO: 188417 - RNA, 48 nt, Homo sapiens
gcagaccgagagggggccagcccagacgggaagacaaacagaccccag

SEQ ID NO: 188418 - RNA, 95 nt, Homo sapiens
gccacggaaacagaacacgccggaagagacacccaagcaggagagaagcacaaagggccaacaggcgggagaaggccgggacaaaaacaccagca

SEQ ID NO: 188419 - RNA, 69 nt, Homo sapiens
caaacagcacagaacgaggaaggggagggaaaaaccgcccaccacacacgcagggcgcagcaaagaaga

SEQ ID NO: 188420 - RNA, 68 nt, Homo sapiens
aaaacccaaggggggagacgagccgcagaaagccagcaacagggggcaaaggagcagagaacgacaag

SEQ ID NO: 188421 - RNA, 56 nt, Homo sapiens
cgcagggcagggccccgcccggcggggaagcggacaccgcccacggcccgaaagcg

SEQ ID NO: 188422 - RNA, 80 nt, Homo sapiens
gggcccaggacaagacagaagggcacgaaggcgggaacaccgagccagaagggagcaaagcgacgccacgggagaagaaa

SEQ ID NO: 188423 - RNA, 57 nt, Homo sapiens
gaccagccaggcccagccccgaagggcacaccggaggacagaaagcgggacacaagc

SEQ ID NO: 188424 - RNA, 66 nt, Homo sapiens
cgagcagccagaccgacccacccgcgcggaagaccgagaccacaggggcaacccaaggacgagacc

SEQ ID NO: 188425 - RNA, 76 nt, Homo sapiens
accaagcggaacaggcaccaacaggcccagcgaacacgccccggggagacgcacaccggggccacggccggaaggg

SEQ ID NO: 188426 - RNA, 79 nt, Homo sapiens
gcgcccgagaccagcgccggacacggccgagaccacgagccccgcggggcacgcacagacaggcagccaccagcggaca

SEQ ID NO: 188427 - RNA, 81 nt, Homo sapiens
ccggaggggagacgggaggcagggaggcccccgaaaggcaaggcgcccccccggaccacagcacggccgccggacacaccc

SEQ ID NO: 188428 - RNA, 54 nt, Homo sapiens
cacaggcagaaggcacaaggggaccacgacaaggagggccaagagccggaggag

SEQ ID NO: 188429 - RNA, 57 nt, Homo sapiens
caaagaaagggaagagacacaagggggaggcacccaaaacggccaaagaccacagcc

SEQ ID NO: 188430 - RNA, 77 nt, Homo sapiens
cccccgacacgaaagcagacccaacaccgggggcagaaaacaaaagcagcaaaagccaacgcacaggccagcgaaaa

SEQ ID NO: 188431 - RNA, 74 nt, Homo sapiens
acgcgcagaagcacgccccccaaacagggaagggggggaagagaggagacccagagaaggggagagacccaagg

SEQ ID NO: 188432 - RNA, 81 nt, Homo sapiens
ggaccaccgcggcagcacgcggcgaaagagccgcagacgcacagcaaccaccggacccgaaggccaccacccagaggggcc

SEQ ID NO: 188433 - RNA, 69 nt, Homo sapiens
cagacgcaccaaagggacagaaccaaagcacaccgacacagaagcccacaaagccgccaccgaccgggc

SEQ ID NO: 188434 - RNA, 98 nt, Homo sapiens
cagacccgggggccgggcccacgacacccacccggcagaaccccgaaggccaaacggaagaagaagagaacaagcaaaagaaaagccagaaaagaggg

SEQ ID NO: 188435 - RNA, 55 nt, Homo sapiens
ggccgcccccaccggacgaggccccccaaccaggcaaggcggagaacggaaaagc

SEQ ID NO: 188436 - RNA, 77 nt, Homo sapiens
gaccgcagagacagccaacacggcacccacagggcgaccacgcggagaaagcagcaagcagcaccaggcccacggcc

SEQ ID NO: 188437 - RNA, 71 nt, Homo sapiens
cgagagagagcaaaaacaccagacaagagagcccagagcgcccaaaccgggaccaaccccccgggaggagg

SEQ ID NO: 188438 - RNA, 55 nt, Homo sapiens
cacaccaccgccacaccacaagcccacccgcaggcccaccccagagcaaggcacg

SEQ ID NO: 188439 - RNA, 42 nt, Homo sapiens
aaaagaagaccaagagcaccaagaaaaggccacagccgggac

SEQ ID NO: 188440 - RNA, 37 nt, Homo sapiens
cccaagccccgcaccgacggcacgcaaacaagagaac

SEQ ID NO: 188441 - RNA, 79 nt, Homo sapiens
caggcggcggccggcgggagagccgccagggccacaaggggcgggacccagcaacccaggaaaccacgagcggggagaa

SEQ ID NO: 188442 - RNA, 58 nt, Homo sapiens
gagcacaaacggggcggggccggggaacacacaggacacgaggaggggacggcccgcc

SEQ ID NO: 188443 - RNA, 44 nt, Homo sapiens
gggcagcgggaagcgaggccccagccggccccaaagacgggaaa

SEQ ID NO: 188444 - RNA, 69 nt, Homo sapiens
gcgaccacagccagcggagccccagacagaaccggaagaagaaaagaccgaggcccggccagaaggcgg

SEQ ID NO: 188445 - RNA, 73 nt, Homo sapiens
caaacccgggccaaggaccccgcccagcccccgagaccgagaagcccaggggggggacagaagagaggaggca

SEQ ID NO: 188446 - RNA, 64 nt, Homo sapiens
gacgccaggcagcgcccccaaacgccaccagcccccagccgagaccgaaggcacacaggggagc

SEQ ID NO: 188447 - RNA, 78 nt, Homo sapiens
aaaggccaacggcgcccccggaggcccagggcagcgaacggcagcacagggcccccaggcaggagggaagaaacccag

SEQ ID NO: 188448 - RNA, 80 nt, Homo sapiens
gccgcccagaccgcgcagcgcgggaggcaggccgcacggagaaacaagagaggcccacaaaggggggaggcgaaacaaga

SEQ ID NO: 188449 - RNA, 73 nt, Homo sapiens
agggccaaagaagggagagagcaggagagcccaaaccaaacagagcaccccgcgccaacagcaaacgagcagc

SEQ ID NO: 188450 - RNA, 73 nt, Homo sapiens
agaaagggacccgaacacacgcaggaggggaagagaacgagacaaacagcccggaccaagagacgaggaaaac

SEQ ID NO: 188451 - RNA, 73 nt, Homo sapiens
gagggaccagacacccaagaagaacacggcaagggaaccccccacgacggaaaggccgcgcgaaaggccaacc

SEQ ID NO: 188452 - RNA, 81 nt, Homo sapiens
cggacccggaagagaagagggggcaagaaagggacgcaccaaagaagacagacacgcagaaaaggagccggaccccagggc

SEQ ID NO: 188453 - RNA, 78 nt, Homo sapiens
gcggagacagacaagacaagaccggcggggaagcgcgaaagacaaacggcaaagaagccaacaacaaccccgagaaca

SEQ ID NO: 188454 - RNA, 73 nt, Homo sapiens
ccgagcgccaccagggggggagcgaggccaagcagagaaacgacaagagaggacagagacgaggcgggcccaa

SEQ ID NO: 188455 - RNA, 76 nt, Homo sapiens
caacacgcccccccagagcaccaagccagacacgggaaccacacaagacagaagaacggccagaagcccaaaggga

SEQ ID NO: 188456 - RNA, 71 nt, Homo sapiens
cgcgccgcgcgcgggcccccccccgcgccggcgagagggccgggggcaagacggagagaacggcccaggaa

SEQ ID NO: 188457 - RNA, 63 nt, Homo sapiens
cgccccggcgcgaagaggcggaccggacggccgagaggcgggaggcggcagaagcagccagag

SEQ ID NO: 188458 - RNA, 78 nt, Homo sapiens
cagaaggaaaggaacagggcgaaggcggacgaaaccccaagaacagaaagacgcgagcagaggcccgcagcccagaga

SEQ ID NO: 188459 - RNA, 72 nt, Homo sapiens
ccgcccggagccgcgcacacgacggaaaccaaaaggaggaaagagaaagacaagaagcgagaggaacaaaag

SEQ ID NO: 188460 - RNA, 86 nt, Homo sapiens
ccacgggccgacggaccccacacaggccacccagaggagaaggccaccccgccggaggcacaggccagaggggcccaggagggcgc

SEQ ID NO: 188461 - RNA, 78 nt, Homo sapiens
gaggggagaaggagcggcccgaaacccagaacgcccaggacacggaaagggagaagaggacagaaaaagaccagacgc

SEQ ID NO: 188462 - RNA, 65 nt, Homo sapiens
cagccgcccccgggcacaaagcacgaggacgagaccaaaggcacacgggcagaccgggcgagccc

SEQ ID NO: 188463 - RNA, 80 nt, Homo sapiens
aagaccccgaaggaaaaggaggaacgccggcccgagaaagcccgccagcaggagcgggccccaagaaccaaaaaagaaaa

SEQ ID NO: 188464 - RNA, 69 nt, Homo sapiens
aacccccgaacgcaaagccaccgacggacaagaggagacgacgccaagcgagaggagggaacaccgagg

SEQ ID NO: 188465 - RNA, 79 nt, Homo sapiens
aggacacccaagagggcgagcaggacgaagcgcccgccaccaagaccgagccgaaaggcccgagagaggaagcaggaca

SEQ ID NO: 188466 - RNA, 59 nt, Homo sapiens
gggaccgcacccagcccagcagccacagagaacgaaaacaaacggaagagagggcagca

SEQ ID NO: 188467 - RNA, 69 nt, Homo sapiens
accagcgccgcggcggcgggcaagggcccacacaggggccaagcgcagggaaggaaccgcaccaagaag

SEQ ID NO: 188468 - RNA, 69 nt, Homo sapiens
accagacaagcaaagaaccaggacaaaaaggaagggacaagacggacagaaacgaacagcgggcgagcc

SEQ ID NO: 188469 - RNA, 75 nt, Homo sapiens
aacccacaaaccaggccacaagacagcccgcaagaaagccccaagaggccaagacaaaaagccaagaacagaccc

SEQ ID NO: 188470 - RNA, 70 nt, Homo sapiens
cccgacgggaacccgccccgcccgaaaggaccccaacgcccgccgccgggcagacacaaggaacagccag

SEQ ID NO: 188471 - RNA, 109 nt, Homo sapiens
gcgcagagggaaccagcggacgcggaggcccaaccgaagaaaacaagaagcacagagggaaggagaaggagacacagaaggagcagcaggagacagccagccgacccag

SEQ ID NO: 188472 - RNA, 74 nt, Homo sapiens
cggggccccacccgccacggcgagccaaaaagaacagggcagccaggaggcacagcacaagggggggaaaagaa

SEQ ID NO: 188473 - RNA, 78 nt, Homo sapiens
cacggggcccggggacggccaaagaagacccaaagccaggcggcgaagagagcaggccgcccagaaggccagggccca

SEQ ID NO: 188474 - RNA, 73 nt, Homo sapiens
ccagacgaggcacgcagcaagacaaacccaacgcgaaaagggaaaaagaaggaaacaaggaccaaaagcaaaa

SEQ ID NO: 188475 - RNA, 76 nt, Homo sapiens
cacacaagcgaaggcgcgcaccggaagcaccagcgaggaaggaagggagggcggagggaaaaagacagaggccagc

SEQ ID NO: 188476 - RNA, 80 nt, Homo sapiens
cgccccgcggccaggagaaacgcaggggccccccaagagcgggaacagcccacggcgaccagggccaggccaaggagggc

SEQ ID NO: 188477 - RNA, 76 nt, Homo sapiens
ggacgcccagcggcccacacacgaccgcagccagcaccagcgccaggacacaggcagcgaaccaccgcaccaagcc

SEQ ID NO: 188478 - RNA, 75 nt, Homo sapiens
gaagagagaagaacaggaaaaaccaacccaggcagaaaaagaagagcacaaagcaaggaggagaggcagcacaag

SEQ ID NO: 188479 - RNA, 78 nt, Homo sapiens
acccacagaacacagcaaaggaaacaaacgacggaaaaggccaggaaaagcggacaccggaagacacgaacaaagcag

SEQ ID NO: 188480 - RNA, 71 nt, Homo sapiens
gagcccgggcgcgggggcggcggcagggggcggagcggaaggagccgcagcccaaagcaagaagagcgagg

SEQ ID NO: 188481 - RNA, 76 nt, Homo sapiens
aaagcaaaggagcagggaggcccccagggagcaaaaaagcaggggaagaaaagagaccagaagcccaggaaaagcg

SEQ ID NO: 188482 - RNA, 52 nt, Homo sapiens
gaaggagcggagaaacaggaaccccaggagagggggcagagagccaaacgac

SEQ ID NO: 188483 - RNA, 71 nt, Homo sapiens
gacccggggacccccgacgccaggcagcgcccccaaacggccgggccaagaacgggaaggagggagcgggc

SEQ ID NO: 188484 - RNA, 41 nt, Homo sapiens
agccaacaaaagaagcgccgcaggcgggccaggacacccca

SEQ ID NO: 188485 - RNA, 60 nt, Homo sapiens
acacaagccagccggacagcaacagaaaaaaggcagcggaaagaagaaaagaaacggccc

SEQ ID NO: 188486 - RNA, 74 nt, Homo sapiens
aaccccccacacccgccccacgggcacagggggcgcacagacaggcgacaagaaagcaggagcccggaaaggag

SEQ ID NO: 188487 - RNA, 50 nt, Homo sapiens
cacagcaggccaccacaaagaaggcccgggaagccgagaacgagcaaaaa

SEQ ID NO: 188488 - RNA, 42 nt, Homo sapiens
gggagcgggagcgcggaaaggaaaacccacagcacgggagcc

SEQ ID NO: 188489 - RNA, 75 nt, Homo sapiens
gacgcagggcgcccccgcaaagacccagggccggaggccacggaggaacggccaaggggggccagccggagggcg

SEQ ID NO: 188490 - RNA, 62 nt, Homo sapiens
agagaagaagaccagacgggggaaccagaagaggccaaccagcacgaacgccagcagcacgg

SEQ ID NO: 188491 - RNA, 87 nt, Homo sapiens
caagaagacagcggaagcggaggaggacaggagggccagacaaggggaacacaagaggagagaaggggaccgcagggagaaaaggcc

SEQ ID NO: 188492 - RNA, 81 nt, Homo sapiens
cccgacgcccgggcagagggagccggaagagcgagcccgggcagagacaggcaacagacggcaacgaaaggcacaaaaacg

SEQ ID NO: 188493 - RNA, 78 nt, Homo sapiens
acccccagcggggaccgcccgggacaacagcgcggggcacagggggcagagcccaccaggcgaaaacgcccgaaagcc

SEQ ID NO: 188494 - RNA, 83 nt, Homo sapiens
cacaggagaggcccaggccgaccggcgcgcggaggcacaagacaagcgcagagaccagaagccgcagcagcaggccgaaagcg

SEQ ID NO: 188495 - RNA, 73 nt, Homo sapiens
ccgggcgccgggcccccagccgacagccagggcggaagcccgccccagagcagaagcaaacaggggcaggaaa

SEQ ID NO: 188496 - RNA, 81 nt, Homo sapiens
cgggcccagccgggaacccccacgcggccagcgaaaacgcccaggagaaacaaaggcgcgggggcaagagaccaagacccc

SEQ ID NO: 188497 - RNA, 72 nt, Homo sapiens
cgggcagcccgcgggcgcccaggcacacagagaaaaaaagggaacaaaacacagcaagcagacaaaaggggg

SEQ ID NO: 188498 - RNA, 56 nt, Homo sapiens
cgaaacagaaagcaagacaggcagcaccaggaggagagaaagaacccacgcaggac

SEQ ID NO: 188499 - RNA, 80 nt, Homo sapiens
caaaaaaaaaaaaccagagggaaacggcacaccaggcggcaggggcaaccagacgggccaaggcaaggaggcccagcccg

SEQ ID NO: 188500 - RNA, 84 nt, Homo sapiens
agcagaagccgacaagcccgggagacacaggcagaaacaaggaacaacgaacagagacaagacaaccaacagaaacacagacag

SEQ ID NO: 188501 - RNA, 61 nt, Homo sapiens
ggcccaacagcacgacccgaggaacggcacgcgcaggacaagcacaagaagaggagggagg

SEQ ID NO: 188502 - RNA, 60 nt, Homo sapiens
cgggggagaaaaggaccagcaacgacaaagccaaacacaaggaccacaacagcagcgggg

SEQ ID NO: 188503 - RNA, 72 nt, Homo sapiens
gacagggagacccccacccaacggcaagccaagccaaagacccgagccaaagacgcccaagcagcccagaac

SEQ ID NO: 188504 - RNA, 81 nt, Homo sapiens
gaaaccccggacaaggcacgccagacgcacgcaccccgcgccgccgccccccaccaaggaagcccaagccccaccagaccc

SEQ ID NO: 188505 - RNA, 60 nt, Homo sapiens
cgaccaagaaggagagcgacagcccaagcaccagcaacaaagccagagggagaccaagca

SEQ ID NO: 188506 - RNA, 80 nt, Homo sapiens
ccgccgccggacgcggcaacggagaaggagaagacaagcgaggccccgcacaccaacacagacacccgccgccaggcgga

SEQ ID NO: 188507 - RNA, 63 nt, Homo sapiens
gcgggacaagaagccacgagaaaggggggagggggagaggcagaggaaaacagcgcgggagaa

SEQ ID NO: 188508 - RNA, 61 nt, Homo sapiens
agcgggcgggagaccaggacggacccaaagacaggaccacgcaccagcagagaaggaaagc

SEQ ID NO: 188509 - RNA, 76 nt, Homo sapiens
gaggacaccaccagccggggacgggcgcaccagggcggagcagaccaccgcccagcaaaaagcggcggaaagaaag

SEQ ID NO: 188510 - RNA, 52 nt, Homo sapiens
ggaaaagaaagaaccacgacggcccaagagagggggagagaagagccgagga

SEQ ID NO: 188511 - RNA, 53 nt, Homo sapiens
acaaaacccaccaagaacgaaccccggggagagcagcgccgaccaaagaagga

SEQ ID NO: 188512 - RNA, 77 nt, Homo sapiens
ggccaaggaaagaccacccaagaaaggagacagaaccacacagaacgccccggccccaacaggcccgcgcccagagc

SEQ ID NO: 188513 - RNA, 81 nt, Homo sapiens
aagcaccgggaagaacagcaggaagaccaccagcagaaaaccgccaaccacaaggccaggcagcacggcagaacccgggac

SEQ ID NO: 188514 - RNA, 79 nt, Homo sapiens
cagagaccccccagcaaggcagccagacgggagaaaaacaaccaccagcgagcaaaaaggcaaagaccaagaccaccaa

SEQ ID NO: 188515 - RNA, 77 nt, Homo sapiens
gaacacaagagggcaacccccagcgggggagaggggagccaacagaagccagagcggacgcgcaagacaaggagaaa

SEQ ID NO: 188516 - RNA, 74 nt, Homo sapiens
gaaacagcccgaaggagagggcggcaagcaagccgcggcccgcggcccaccggacaaacccccaacccgcccac

SEQ ID NO: 188517 - RNA, 45 nt, Homo sapiens
cggggcgccgcgcggcccggcccgagagagacgcagcgcaaggcc

SEQ ID NO: 188518 - RNA, 72 nt, Homo sapiens
cccaccagacggagcgaaccaccgaagcagaaacagggcaaccaccggaggcagggggaagagggcagccga

SEQ ID NO: 188519 - RNA, 71 nt, Homo sapiens
gggcgcggagacaggacgcaaagaacccaggacgagaaaaaacagagcggaacaagcggcccaagagaaag

SEQ ID NO: 188520 - RNA, 82 nt, Homo sapiens
cagagcggcgccgagggacagacgcagagcccgaagccaccgcgaccaagcagagaagagccaccacaccaccacacacacc

SEQ ID NO: 188521 - RNA, 76 nt, Homo sapiens
ccagccgagggccaccgggaaggacagaagcccccaacaagcagaaacagcgagcccacccaccgaagagcacgcc

SEQ ID NO: 188522 - RNA, 63 nt, Homo sapiens
ggccaggcaaaaaaggcagaagccacagggaaaacaagggcgacagcaagagggacggacgca

SEQ ID NO: 188523 - RNA, 60 nt, Homo sapiens
ggagagggcagagaggcaacgaaccggccacgggggcccacggggcagggaagagcacaa

SEQ ID NO: 188524 - RNA, 63 nt, Homo sapiens
gcagcgcagcccggagggggagcagacgaaccggaacccgcggggggcggcaccacgcccccc

SEQ ID NO: 188525 - RNA, 41 nt, Homo sapiens
ggagcggagcagccaaagagacgagccacagaccacccaag

SEQ ID NO: 188526 - RNA, 84 nt, Homo sapiens
ggggaccacgaaaggagcaagagcaagacaccggacaccgagggcccccaaaagagagaagaagaaggaggccgcggccagaaa

SEQ ID NO: 188527 - RNA, 65 nt, Homo sapiens
aaagacagacacggaccaccagagaggaggagcaagacagagagagaagaagaagcagagagcca

SEQ ID NO: 188528 - RNA, 83 nt, Homo sapiens
cgacaagcggggacgcgcccagacgcagcgcagcccggccaagcccgccgcgcccgcgggaaggaagaaagaggaaagcgggc

SEQ ID NO: 188529 - RNA, 75 nt, Homo sapiens
aaagacccaccaaggaagcagcggccacgccaggcaggcgggaagaacagggccaggccaagaaacgggaaacaa

SEQ ID NO: 188530 - RNA, 73 nt, Homo sapiens
cccacacccaccaacagaaacagacccaaacacgagaaagacaacaaaggcgcaagcacaaacaagccgaaaa

SEQ ID NO: 188531 - RNA, 79 nt, Homo sapiens
ggaccccaagaagaccacagagggacccggacaaccagaggcagccagcagggggaggccccaagacgcagagaagcca

SEQ ID NO: 188532 - RNA, 70 nt, Homo sapiens
ccacccacagaccagccggaacaagagacccggcaccccagccgacgccacacaggcacaacggccccag

SEQ ID NO: 188533 - RNA, 64 nt, Homo sapiens
agaaggaccaagaaccagaagcaaaagcccccacccgcaagggggccaccaaagaaccaaccgg

SEQ ID NO: 188534 - RNA, 84 nt, Homo sapiens
ggaaccagagcaaagaagaaaccggccagaaacagccagagaaggccaaagaaaaacgaaaagaccccagcgcgcacaggccgc

SEQ ID NO: 188535 - RNA, 79 nt, Homo sapiens
gaccgagagcggaccgagagcgcgaaacgcacgagaaggccccccagccagcgcagggcagaaggcccccccgagagag

SEQ ID NO: 188536 - RNA, 76 nt, Homo sapiens
cacagcagaaggggccacaagacagcacaaaaagaccgcagagccaagccccgaaagaccacagcaagaccacgcc

SEQ ID NO: 188537 - RNA, 80 nt, Homo sapiens
aaaggagagcaggagaaaaacggcagcaggccaggcgaggccaggagacccagagcggcacaccgaccgcccagggcccg

SEQ ID NO: 188538 - RNA, 72 nt, Homo sapiens
cgaaacaggccaaggcccaagagcgaggaggcacgagacaaccagcaaagacaagggaggacaggaagaagc

SEQ ID NO: 188539 - RNA, 47 nt, Homo sapiens
cacacagagaaggagacccaggggacaaaccggcgaccacacacggg

SEQ ID NO: 188540 - RNA, 41 nt, Homo sapiens
ggagggaaaaggcgagaagcaagaaccaagcccagaggaga

SEQ ID NO: 188541 - RNA, 123 nt, Homo sapiens
cccaaggaggaaacccccaagcgcagccaggcggagagaggcgccccgcagcccccaagcaggaggacaccaggaggggaagagcgaaagaagcgcagcagaaagagacaaacacccaaccgg

SEQ ID NO: 188542 - RNA, 66 nt, Homo sapiens
gaagggcaaagccgaagccacaagaccccggagagggggaaacagaaagcgccgggcggcgaaaaa

SEQ ID NO: 188543 - RNA, 79 nt, Homo sapiens
gagcaaaccagcagcaggcagccccagcgaagagagcggcaaaggcaaaagagaaaccgcgccgaccagcgcaggggcc

SEQ ID NO: 188544 - RNA, 56 nt, Homo sapiens
ggccaccggcgggaggaacaaaagagcgagccacccccggcgcccgcgggcccgcc

SEQ ID NO: 188545 - RNA, 81 nt, Homo sapiens
gagaaaagcaggccaccagaagccacgaagaaaagaacggagggcgacccaccaacaggcaacccagacaaagaagagcag

SEQ ID NO: 188546 - RNA, 72 nt, Homo sapiens
aaaccccacgggagggacagggggagaaacacccgaacgaaggagagagaaccgagacccgaagaacggaag

SEQ ID NO: 188547 - RNA, 114 nt, Homo sapiens
ccacagaagagcgaagcgaggacacacccaggaaaagaccaggacggacaagcacagccggaagccaggacacggccaaggccggcgagaacgcccgcggcagcgaggggacca

SEQ ID NO: 188548 - RNA, 69 nt, Homo sapiens
agggccgcgccccccaggcccacaaccagcccagcagcagcaagcagaaggacacggaaacagagcccc

SEQ ID NO: 188549 - RNA, 73 nt, Homo sapiens
cacaacaggcacggcagaagcgccaaccgaggcaaaggaacaaagaaccacggacagggcaggaccagaaaaa

SEQ ID NO: 188550 - RNA, 75 nt, Homo sapiens
ccggggcaacaagagcgaccgggcgcccggaggccggggaggaccaggagcgcaacacagacaaacgaagaaccc

SEQ ID NO: 188551 - RNA, 78 nt, Homo sapiens
aagcggggagcgcccgcgacagaggagggaggaaaacaaccgagggcagagaagcgagcagcgcaaagcacaaagaac

SEQ ID NO: 188552 - RNA, 74 nt, Homo sapiens
gaagaaaccaaagaacggaaaaaaacagcggagaagagaaacagggggacccccggacacgggagaaaaccaaa

SEQ ID NO: 188553 - RNA, 77 nt, Homo sapiens
cagaccgggagcacgcacgccacgaaggcaccacaaagaagacagcagagagaagaacccagggggaagagaaaaga

SEQ ID NO: 188554 - RNA, 78 nt, Homo sapiens
agaggcgggagagcccgccgacagcgcgagaggagcaccggcccaggcggaggcaaggcggacccggcggcgcaaccc

SEQ ID NO: 188555 - RNA, 76 nt, Homo sapiens
gcgacgacaccccggggaggcgaggagagagcgcgagaccgaggcacgggcaggcacagcagaccagaagcagcga

SEQ ID NO: 188556 - RNA, 79 nt, Homo sapiens
gacagacgccggggaggcagcgcgggacccagcccaggcggcgcggacggggcggacggagccaccaccaccccgagag

SEQ ID NO: 188557 - RNA, 74 nt, Homo sapiens
ggagagccaagaaaaacaacgccccagaacacagagagcagagagagcgcgcagagaggcagcccggccggaag

SEQ ID NO: 188558 - RNA, 77 nt, Homo sapiens
gcggagggggcccaagaaagggccagggaaccggacaagcagaccaaggcccgccaagacacgaacagcagcgcgcc

SEQ ID NO: 188559 - RNA, 86 nt, Homo sapiens
gaagcgccacaccggagcaacgaggcgccgggaccggcgcagagacaggcgcgaggagacaccgcagggagagcggcaaaaagaac

SEQ ID NO: 188560 - RNA, 71 nt, Homo sapiens
gaaagcacgagagacaagaggaagacacccagaccacaggaggacaggagcaacaggaacaaccaacaaaa

SEQ ID NO: 188561 - RNA, 47 nt, Homo sapiens
gcggacacagcacggccccacaggcggggagcagggaagagcaccac

SEQ ID NO: 188562 - RNA, 76 nt, Homo sapiens
gggcggcaggaccaggcgcgacggggacgaagccaagcacccagcacggcgaaccaacaagccaccaagcaaagaa

SEQ ID NO: 188563 - RNA, 31 nt, Homo sapiens
gaaggccaagccgccgccccagaggagcccg

SEQ ID NO: 188564 - RNA, 84 nt, Homo sapiens
gagagagaagagggcagagccggcaggggcgcccccaggaccgagcaggaaccggagcagggcaaggaaaggaggaaaacaagc

SEQ ID NO: 188565 - RNA, 75 nt, Homo sapiens
ccaggaagcagaagaagcgaggagaagaagaggcaaagaaccgaagacagcccccgaccacggagacaagacgca

SEQ ID NO: 188566 - RNA, 88 nt, Homo sapiens
ggcccgcagcaagaggcggacgagaaggacagggaaggccacccgaggcggaggggacggacgccccccgcaagcagcagccagccac

SEQ ID NO: 188567 - RNA, 77 nt, Homo sapiens
ccaggccagacgacgccggccacccagaagccggagcacaagaagcaccgcgaaaacgcgaaacgcagcaaaggacc

SEQ ID NO: 188568 - RNA, 81 nt, Homo sapiens
gccgcaccgccgcggcccggcccggccccgaggccggcaacggagacccaaggacccccggacaagcacccaagcaccagg

SEQ ID NO: 188569 - RNA, 94 nt, Homo sapiens
gaaagggggcaaccagaaagccaggagccacgcaggaggggaacgacagagagacgcaaaagaagaccaccaaccccccccccagaagaacaaa

SEQ ID NO: 188570 - RNA, 86 nt, Homo sapiens
cggaaacaaggcaacagaaagagcaacagcagggcaacagcacagacgcagccagcaaggaaggcgggaacgcccggaggaaccca

SEQ ID NO: 188571 - RNA, 72 nt, Homo sapiens
acagacgcaggagccaccccgcccggacccagcaccaacacaggggcacgagacaaggaaagcacaaagagc

SEQ ID NO: 188572 - RNA, 72 nt, Homo sapiens
gccccacaagaacgcagccaccagaggagcacaagacggaagcaccaccgggagaaaccggaagaggaaacc

SEQ ID NO: 188573 - RNA, 85 nt, Homo sapiens
ccaagccgcacgcaaccaccgcccggccacaccagggggacgcggacgcaacagggaaaggagaccccaacaagccgcggggcaa

SEQ ID NO: 188574 - RNA, 57 nt, Homo sapiens
gccggaagaaaggaaagaggacacacggaaacagcccgaacgcacagaagaaaccag

SEQ ID NO: 188575 - RNA, 78 nt, Homo sapiens
agcgacaccccccgacaagaggaaccacagaggcacagaaacaaaggccaagggggagagaagggggagaggccacgg

SEQ ID NO: 188576 - RNA, 86 nt, Homo sapiens
acccaacagcacacacgggcgaaccggaaccaggaccgggcgagaccagacaggccccagaacgaagacgagcggagcgcgcgagg

SEQ ID NO: 188577 - RNA, 71 nt, Homo sapiens
ccaaacgagagcagccaacgcgagcaggcgacccaaaagagcgaaggaaaaccagcaacaaaaccgaaaca

SEQ ID NO: 188578 - RNA, 77 nt, Homo sapiens
cggagaagcaggggggccaggaggggagaggaggcaggcccgcggcccaaccgcgcaccccacggcccggacgaaaa

SEQ ID NO: 188579 - RNA, 79 nt, Homo sapiens
agaaaggaaacagaggagagaacacgcacagacacgagagcacaggagcagcggccgagagggcccgcggaagcagcgc

SEQ ID NO: 188580 - RNA, 75 nt, Homo sapiens
cccgcaccaggaggaggacgacagcacgacacgaagcccgggcaagacaacaaaacccgcgggcagaaaggagcc

SEQ ID NO: 188581 - RNA, 78 nt, Homo sapiens
cgagaacgcgcacgaagaggagcagcaagcagagacagagaacgcagaacagaagggaagaccaaaacgagagaaacc

SEQ ID NO: 188582 - RNA, 73 nt, Homo sapiens
cgccaccccggggccgaggaaaggccaaccgggccacgacgggacacacagggagaagaaaagcaacacagcg

SEQ ID NO: 188583 - RNA, 56 nt, Homo sapiens
ggacggcgccggcagccggccacaggccagaccgccaccccgggccaggggagcaa

SEQ ID NO: 188584 - RNA, 82 nt, Homo sapiens
ccgagccgccacccggcgacagggccaaagcggcaggagaaggaagggaccggaaacgacaaggcaacccacaagaggacca

SEQ ID NO: 188585 - RNA, 114 nt, Homo sapiens
aagagaaaggaggagacaagaagcggcgaacaacaagaagacgaagccagaaaccgccgccgcccacgcaccccaaggccagcgccaccccaccaccgagcccagccgaaggag

SEQ ID NO: 188586 - RNA, 78 nt, Homo sapiens
aagccggaggggggcgccgcggacccggccccggcacaggcggccccacaggcgcaagagcaccgggccggcggcgag

SEQ ID NO: 188587 - RNA, 78 nt, Homo sapiens
ccccacgacacaagcaaggccagcagagcccaagggcgccagccaccacccagacgaccagacgagagcagacacgcc

SEQ ID NO: 188588 - RNA, 82 nt, Homo sapiens
cggcgggaggccaccgccagaaacagaccaccccaggaaaagagaaccgccgaaaagacaagaacaaaccgaacccgagaga

SEQ ID NO: 188589 - RNA, 65 nt, Homo sapiens
ccaacggcagaagccaccacaaaagcgaaagggcacaccacagccgaaaacaaaggacccacgac

SEQ ID NO: 188590 - RNA, 77 nt, Homo sapiens
gcaccacagaagagccaaagacggcaaggcggagaggagacaggagggaccgggcagaagaacgggggacgaaagcc

SEQ ID NO: 188591 - RNA, 72 nt, Homo sapiens
aggggagccaccagcccccgacacgcaagcgaggagcgacgaggccggaggggaacagcaaggacccggaca

SEQ ID NO: 188592 - RNA, 84 nt, Homo sapiens
gaagcccaccggccccaacgcacagccagggagccaagcgccgcccggccgaagggacagaccagagcaggaccaaaggcgcac

SEQ ID NO: 188593 - RNA, 72 nt, Homo sapiens
acagagcacgggaggccacccaggcaagacccaacgacccggcggggcccagccagaggaagagaggaaccg

SEQ ID NO: 188594 - RNA, 84 nt, Homo sapiens
ggacccacaaggacagccagggaggcaagggcagcaggaaagacgagaccgggcacgccaacaaccgacgaccgcacgacggcc

SEQ ID NO: 188595 - RNA, 77 nt, Homo sapiens
caaacgacgccacgaacaaaagagagaaacagccagcaacagaaggagcccagccacccaggagaggagcagggcgc

SEQ ID NO: 188596 - RNA, 60 nt, Homo sapiens
ggaacgaggaaggaagacccggagggcaagaaggaccgaggacgccaagaggccgaggag

SEQ ID NO: 188597 - RNA, 80 nt, Homo sapiens
cagggcccccacgccagccacagaaggcggcggaagccccgcccaccaggccaacaaggacccaaggacaggggaccaga

SEQ ID NO: 188598 - RNA, 78 nt, Homo sapiens
accagagcaggcccgcccaccagggcaggccaccgggaaaccccagaacaaagacagcgccaaaacagccagaaaccc

SEQ ID NO: 188599 - RNA, 72 nt, Homo sapiens
ggcggaggcgagaacagacaagagagggcggcagaaggaacaccgagaaaccgcacaccggagacggcagaa

SEQ ID NO: 188600 - RNA, 78 nt, Homo sapiens
gaaaagaagaagaagagccaccgaccaggaggaaggaccgagcgcaggaaccaggccagcgcccagcaagcggaaggc

SEQ ID NO: 188601 - RNA, 78 nt, Homo sapiens
agggcacaccaaacccacggaggaccccccccagaaaaccaagcgaaaccccaaagggaagagacgcgaaagcaccag

SEQ ID NO: 188602 - RNA, 77 nt, Homo sapiens
gcagagaacaacccgaacaggaggaagaacccacgaaacacaggaaaacagggaagagccgaaaccgcacaaacccc

SEQ ID NO: 188603 - RNA, 78 nt, Homo sapiens
agcggacggaacagaccacagggaccaccggggcgccaccaggggccagaaccgcccacggcccccacagcggacccg

SEQ ID NO: 188604 - RNA, 79 nt, Homo sapiens
ggcccgcaacacccccccaccaggcgcgccagacccccgggcaggcagggcccagcaggacgcggaaacaccccggagg

SEQ ID NO: 188605 - RNA, 54 nt, Homo sapiens
caaaccagggggaggaagagccgggccgagccaggcaggaagacccgccagcgg

SEQ ID NO: 188606 - RNA, 62 nt, Homo sapiens
agccaaggaaaaacggagagccacaaaaaaggaagcgaaaggaggcgccggcgggaccgcgg

SEQ ID NO: 188607 - RNA, 74 nt, Homo sapiens
caaaagagaagccagaaacggaaacagaacaacgcaaagggccaagcgcgcccggaagggcaggagaaacaaaa

SEQ ID NO: 188608 - RNA, 90 nt, Homo sapiens
acgagggcgcccgacccgggacagaggacggaagggcggaaggccagacggggcagggaacaacgggcgaaagggcacacacggagggcg

SEQ ID NO: 188609 - RNA, 83 nt, Homo sapiens
cccagccgccagcaggcaagcggaaagcagaaccggccaagacacgacaggacgcaagccagaggccagagcaggcagcaggg

SEQ ID NO: 188610 - RNA, 37 nt, Homo sapiens
agccaggcccaaggcggagaaccaggagcggcagacc

SEQ ID NO: 188611 - RNA, 70 nt, Homo sapiens
gaaggccggggcgcccggcgccggccgagaaggcagaggcggaaaagcagcagcaacgggaacgaagaga

SEQ ID NO: 188612 - RNA, 76 nt, Homo sapiens
agcggacggccgccaccgaggaccaggggaagccaggcccgaggccaccacccccaggagccggaagggcgaaacg

SEQ ID NO: 188613 - RNA, 69 nt, Homo sapiens
acaccagaaacagcgcaccacccgcaggaagaaacaagcccaggacgaagaaaacaagacccccacaga

SEQ ID NO: 188614 - RNA, 62 nt, Homo sapiens
agcccccggagcgaaggagcagagcgggacgccgggcaggccgggcgcgcaacaacaacgac

SEQ ID NO: 188615 - RNA, 84 nt, Homo sapiens
ggcccggcaaccgcccggcaacgccaaccgcccgcgcgcgcaggcgggcgcaggcccggcgcagcgcggagacggggcgccagg

SEQ ID NO: 188616 - RNA, 78 nt, Homo sapiens
aggacaaacagccacacccaggccacggaaacaggagaagagcaaccggacacagaaggggaaggaaaccccaagcag

SEQ ID NO: 188617 - RNA, 82 nt, Homo sapiens
agggcgggggcgccccaggagccggacaggccgaaagaagaaaacccgagcagagaaaacaacaaagcgcccagcacacagc

SEQ ID NO: 188618 - RNA, 75 nt, Homo sapiens
aacagacccaaccggaggaaacagcccccaggcaccggagcagaagaaacggagagaggcaccagccgaagacca

SEQ ID NO: 188619 - RNA, 74 nt, Homo sapiens
gagccacggaaacagaagaaggcccggagcaaggaggagcgagcgacagaaaccaacccaagagcgcccagcgg

SEQ ID NO: 188620 - RNA, 114 nt, Homo sapiens
ggaaaaggccggagaagggaaacgggccccccggcgagagacgcagccccgcacagaacgggcggcccagggccaggccagggccacgcggcgggaacgcccgccccaagcagc

SEQ ID NO: 188621 - RNA, 75 nt, Homo sapiens
cagcggggggggacaagagggcaagcgaaaaagccgggcagagcgacaacaacggacgcaccccagagaccaccc

SEQ ID NO: 188622 - RNA, 72 nt, Homo sapiens
aaccggaccgcccccaacaaccagggaccccagcccaacgccaaacgagccggacccggaggacggaaaacc

SEQ ID NO: 188623 - RNA, 69 nt, Homo sapiens
aggggcgagagcgggcaccccccaaacgacgcagccacggagaggcacgacgacggagagaggaagaag

SEQ ID NO: 188624 - RNA, 78 nt, Homo sapiens
aaaccaagaaggagagaagagcagaacccagcaaaagcgaaagccggacacaccaaacgcagcccagcaaggcggaag

SEQ ID NO: 188625 - RNA, 67 nt, Homo sapiens
cagcaaagagggaacagggggcacccgaggaggaagagggcagggcccacggaaagaagggaaaccc

SEQ ID NO: 188626 - RNA, 55 nt, Homo sapiens
gcagggacagcgcaggcagcagcaccgaggagcaacacccccagggagcccagac

SEQ ID NO: 188627 - RNA, 80 nt, Homo sapiens
ggacgcggacagagagcggacgggccaacccaaaaccagggcggcaaaacgagcgggccaggcggaaaccccacaagcgg

SEQ ID NO: 188628 - RNA, 75 nt, Homo sapiens
cggccagaccgcggggcacacaccgcaaacgccaggggcagagcggccccaaaaaaggacagagaaggcggaaca

SEQ ID NO: 188629 - RNA, 79 nt, Homo sapiens
agagagagagagggaggggagaagaaggcgcaaggccaaacacagagggaagcaacagaaaaacaagcggccgcagagc

SEQ ID NO: 188630 - RNA, 58 nt, Homo sapiens
agagcgcggaacaggacgccccgagccgaaagaagaaaacccgagcagagaaaacaac

SEQ ID NO: 188631 - RNA, 74 nt, Homo sapiens
gaaggaccaagaaccaggccaggagggggccacaccgaacccagccgggaggccaaggccagggagcgagccca

SEQ ID NO: 188632 - RNA, 74 nt, Homo sapiens
gacccagcgaggaggggcggcacaggacaacccaaggaagagagagcgcagagaggacagaaagagcacaaggc

SEQ ID NO: 188633 - RNA, 61 nt, Homo sapiens
cggaagagcgccccaggagaaacaacaacacccccagggagcgggggcggaaacacggaag

SEQ ID NO: 188634 - RNA, 77 nt, Homo sapiens
cccaagacacaaacggcgacacaggagacgacaccaagaggaaaaaccaggcaaggaagcacaagcgacaagaggag

SEQ ID NO: 188635 - RNA, 74 nt, Homo sapiens
acaagccgaccggaaaaagggggaagcagcaaggcgcacccccgagcaagccagcagggggagccagcaccagg

SEQ ID NO: 188636 - RNA, 33 nt, Homo sapiens
gaaggaccaagaaccaggaagcgccacgcagag

SEQ ID NO: 188637 - RNA, 103 nt, Homo sapiens
ccgcggccccagaagaccacaagggggcccgagcggcgcggggacggcggggaccgccagccccagcggcgccaggcgcgccgagccccgacggcgcgcccgc

SEQ ID NO: 188638 - RNA, 96 nt, Homo sapiens
gaggccaaaacaccaacaagagagaggggaaaaaccgaagcgaaccaacagagccggacggagcagcggcaaagcaacacgcgacagaggaaagga

SEQ ID NO: 188639 - RNA, 76 nt, Homo sapiens
aaaagcaccggcgaaagaagggggacaaagcgacaggaggcagcgggcggggagagagcgacacgccgcacacgaa

SEQ ID NO: 188640 - RNA, 78 nt, Homo sapiens
gaccacaagagggagcagggaaagaagaggagccgcagccaacaagcccaggacaaagccagaaacgggaggcgaccg

SEQ ID NO: 188641 - RNA, 58 nt, Homo sapiens
aaagacgcccccgcgacagacacccgccaacagggcaacgcggggcgagccacagaga

SEQ ID NO: 188642 - RNA, 79 nt, Homo sapiens
cagcagcaacagcagcagcaagagggaaaaaccccaagaggaagacaaacaaccagcccagaccgacagaacaagcgca

SEQ ID NO: 188643 - RNA, 73 nt, Homo sapiens
ggaccagaggagaccggagccaccaaaaacgaagaggaaaccgggcagggcgaggaaaggagacggcaccaac

SEQ ID NO: 188644 - RNA, 75 nt, Homo sapiens
ccccaggcccacaaccagcccagcagcagcaagcagaacaacgaagccgcaccccggaccgcccgagggagagcg

SEQ ID NO: 188645 - RNA, 81 nt, Homo sapiens
gagaaagcccggcccacagaggccggcggcggcaaggaggcggccaagaccaccaaagagggcccccgaggccacgcggca

SEQ ID NO: 188646 - RNA, 75 nt, Homo sapiens
acgcaagcggcgacggcccggcgcggggggacccagccggggcggccccaagaccgggagacggcgccaagcgag

SEQ ID NO: 188647 - RNA, 83 nt, Homo sapiens
agacaaggagagccaggaggagcgggccccaacccaccaaaagcacagccaggagcaggaacaagaccacacagcggagaaca

SEQ ID NO: 188648 - RNA, 66 nt, Homo sapiens
aaacagggcccaccagagcggacggccaaggaggaggagcgcagcacccagggaaggcagagacgg

SEQ ID NO: 188649 - RNA, 59 nt, Homo sapiens
cccgcaaaggagcccagagacaccagaagcgggcaaggagaggggcaaaggaaagcccg

SEQ ID NO: 188650 - RNA, 68 nt, Homo sapiens
ccagaagaccgggcccaaaagcgaaggacagaaaggacaccagccaccacgggacaccagcacagaaa

SEQ ID NO: 188651 - RNA, 63 nt, Homo sapiens
aaccagggccgggggccagggagcagcagcagggaagcaagcagaagacaaaccaaaaaaaac

SEQ ID NO: 188652 - RNA, 69 nt, Homo sapiens
cgcggccaacggggccacaaggaaggcccggcgggggcaacgagaaggacagccaacaccagggaggcg

SEQ ID NO: 188653 - RNA, 52 nt, Homo sapiens
cagagcaaggcccccaggcagacacagcggaacgcagggcgcaccaccagag

SEQ ID NO: 188654 - RNA, 72 nt, Homo sapiens
gcagcccaaaacgccaaagcacacgacccggcgggggcaaggaagcacggaggcccgggaacaaggacaacg

SEQ ID NO: 188655 - RNA, 77 nt, Homo sapiens
acccagggaggagaccaagaaggaaaggcagcacagaccggaaaaaaggggaaagaggagcgaggcccgcacagcgg

SEQ ID NO: 188656 - RNA, 76 nt, Homo sapiens
ggggcaagagcgggggcgggaccccgccgcggcgggagggcccccagggaggccgaacacacagcgagaacacgaa

SEQ ID NO: 188657 - RNA, 90 nt, Homo sapiens
gaggcaccacgccaccgagcacaaacccacgaagccaacgcccagcgaagacaacggggaccaaagaagccgccccccaagacaagacgg

SEQ ID NO: 188658 - RNA, 82 nt, Homo sapiens
ccgaccgcccacaccccgccccggcgccccagaccgccagccggggggaggaggcccgaagcaggcggagcggcggacacca

SEQ ID NO: 188659 - RNA, 59 nt, Homo sapiens
cggcggagaccccccaggaaccagaggaggggaggaaccaccacagaaagcaggagaac

SEQ ID NO: 188660 - RNA, 79 nt, Homo sapiens
acccacccgggcaaggagcaaagaaggacacagcacacacacgagagccacagcgaaacaacacaaacaaaaagagaac

SEQ ID NO: 188661 - RNA, 65 nt, Homo sapiens
agccgcagccacaacaccggcaggaaccaccaggacagagaagcaaggaagaggaaccccccaag

SEQ ID NO: 188662 - RNA, 79 nt, Homo sapiens
ccaggagcccagccacagccaccggacccccagaagcaaaccagccccagaaaagaaaagaagcaggcccgcgagagac

SEQ ID NO: 188663 - RNA, 101 nt, Homo sapiens
gaacgcggcaaacagacaagacacaccccaccaggagcagggccacacgcccccacaggaccaggaggagaagcaaccagagaggaagcgagacccaaaag

SEQ ID NO: 188664 - RNA, 73 nt, Homo sapiens
gcgcaggaagggggaccggaggagcgcgacgagaggccccgacggggcccggaagcagaccagggacggaacg

SEQ ID NO: 188665 - RNA, 84 nt, Homo sapiens
ccagcgcccggagcaagcggagccccccaagagccggaaagagcgacacgcgcgacggaggccgcagggccagaacaacgaaca

SEQ ID NO: 188666 - RNA, 76 nt, Homo sapiens
gggccccagcggcggaggagccagagagccccgaaaggccgggcagacagaagcgaaggggacagggggagaaccg

SEQ ID NO: 188667 - RNA, 66 nt, Homo sapiens
gggacccagcaacccaggaacagagacagacccgggggcccccaaggagagggaagaagccaggca

SEQ ID NO: 188668 - RNA, 59 nt, Homo sapiens
cgccagcaaaggaagacgaggccagaccgccccccggagcgggcccgccccagcccacc

SEQ ID NO: 188669 - RNA, 85 nt, Homo sapiens
gcccagaaaaacacccgcccagcgcccaccaagacaggcagaaggcccacgcaaaaaggaagggaaaaggccgaggcacagcggg

SEQ ID NO: 188670 - RNA, 68 nt, Homo sapiens
ccagcaggacaggaaaaaaagagggcgacgccaggagcacaccgaaaagaaaggaaaaccgggaggaa

SEQ ID NO: 188671 - RNA, 66 nt, Homo sapiens
ccgcgcacggccagcgcagaacgagagagagcgggaaaggcgggacacgaccccggaccacgggaa

SEQ ID NO: 188672 - RNA, 64 nt, Homo sapiens
cgaaacacacaagacaaggcaaagggggcaaaagggaagggcagaagaaggaaacagaaagccc

SEQ ID NO: 188673 - RNA, 109 nt, Homo sapiens
gggagaccccgcgacccgagacagccccaagacaaccccaccagcaccacagggcccggcggcggcggcgagggagcaccacgcgcgccccacgcgagacggagccgcg

SEQ ID NO: 188674 - RNA, 72 nt, Homo sapiens
gcagaaggagcaaaaggcggacaggcaggaagcggcgcgggcccccccacccccaagaacccacaaccccgc

SEQ ID NO: 188675 - RNA, 80 nt, Homo sapiens
cggaagcagaccccagcagcagaacacaagcagcagaacggaaaaggccgaacaaagaacgaagcacgaagcgaagacag

SEQ ID NO: 188676 - RNA, 77 nt, Homo sapiens
cggagcccaggccacaagggccgcaagccccggacgggccaacgcacggcccggcagagccagcaccccccgcggca

SEQ ID NO: 188677 - RNA, 65 nt, Homo sapiens
gagagggagagccaaagaaggcagaagagacaacacagaaaccagggcggaggcaggaacagcag

SEQ ID NO: 188678 - RNA, 69 nt, Homo sapiens
gcaaaaccaccgcaccagaagaagaaggccagaaaaagggaaagacgaagggcgggaccgcaaaaaaga

SEQ ID NO: 188679 - RNA, 78 nt, Homo sapiens
gaaaaggaaacgaccccggccgagcgaggagggagagaaggcgcgcaggagagcgcagagacccgcccggaagcgagg

SEQ ID NO: 188680 - RNA, 73 nt, Homo sapiens
gacgggccgggcgcaaccacacgacaagcaaacaacggaaaggagggggaagcaacggccaaaagccgacacg

SEQ ID NO: 188681 - RNA, 68 nt, Homo sapiens
aaaacgcacaaaaaaaagaagccacgccaaaagacgaaagggggcgaccacaggcaccacaacggagg

SEQ ID NO: 188682 - RNA, 75 nt, Homo sapiens
gcaccggcccgacgcgcccggggagccgggggcccacccgggcgcccaccggagggacccgcaccgcgccggccc

SEQ ID NO: 188683 - RNA, 72 nt, Homo sapiens
ccaggagacgagcagggcagaggaaaagcagaacacgagaacgcagcgggagagcaccaggaaggcagagag

SEQ ID NO: 188684 - RNA, 56 nt, Homo sapiens
ccacgcgcggaaggcagcgcccagcagcgcagagacgacaacccccccggcggaag

SEQ ID NO: 188685 - RNA, 78 nt, Homo sapiens
gagcacggacggacccagcacgaggaggcgcgaggagagccgcagaaacaacaacgagacaaaaagccaagcaaaaaa

SEQ ID NO: 188686 - RNA, 80 nt, Homo sapiens
cggcgcgccgcagcggccacccgcccccgccgcaccgagaaaaagcggggaaaacaaaaaaaagaaggagggaagagggg

SEQ ID NO: 188687 - RNA, 71 nt, Homo sapiens
ccgggggagagaagcggacagggacaccacggaccggagaccggacggcggcaagggcgacggggcaccga

SEQ ID NO: 188688 - RNA, 74 nt, Homo sapiens
aaggaacagcgagcggaccccgaccccgaggcgagacggaaagaagggccccgcccagagcaccacccgagaca

SEQ ID NO: 188689 - RNA, 79 nt, Homo sapiens
aaaaacagcacacaggaaaaccaaacggcaaccaagcaacaaggagaccgcgaaggcgacacccgggggcccaggagaa

SEQ ID NO: 188690 - RNA, 71 nt, Homo sapiens
agaaccggggcgcaccgccaagagcggggacccacccaggaggcagaaacacgccgcgcgccacaccaggc

SEQ ID NO: 188691 - RNA, 70 nt, Homo sapiens
gggacgaaggccaccaagcagcgaggagggggggaagccccgcggagggcgccagcagccgaacagcgga

SEQ ID NO: 188692 - RNA, 71 nt, Homo sapiens
agcccacccgaagaaccgagaaaaccacccgaacacgcaggcagcggagggaaggagaaagacagcaaaga

SEQ ID NO: 188693 - RNA, 70 nt, Homo sapiens
gccagcaaaggcaggggaggaagccacccgagggacggccgcacacagaaaaagagaagggaaacccaag

SEQ ID NO: 188694 - RNA, 71 nt, Homo sapiens
agacagagggaaccggcagggcaagcggcgacacacgacggcgccacgggacagccaacaccagaccgagc

SEQ ID NO: 188695 - RNA, 74 nt, Homo sapiens
aggaaagacaggagaccaaaaagaacagaaaaccaggaccgcagaggacccaggagcacaaccgaacagagaag

SEQ ID NO: 188696 - RNA, 63 nt, Homo sapiens
cggccccgcaggccgggagcagaggggaagaacacggaaaccggacagggacaggaaagaaca

SEQ ID NO: 188697 - RNA, 71 nt, Homo sapiens
aaaaaaagagccgagggcaggggaacccaggcaggaacgcagaagcagaagaaggacaccccacaccgaaa

SEQ ID NO: 188698 - RNA, 77 nt, Homo sapiens
ccagaggcacggaaaaggggaacgggaaaggcgcagagaagcacagaaaagcacacacggaaacacgaaaacagcag

SEQ ID NO: 188699 - RNA, 76 nt, Homo sapiens
agcggcccagccaagaagaggacaagcccagcgaagcaggccggccggcgccacgggcacaagacaccacggcagc

SEQ ID NO: 188700 - RNA, 73 nt, Homo sapiens
cgaacaagccccagagggaaaaaaggagaccccgggacacggaccaacagacgcaccaaagccccagacagag

SEQ ID NO: 188701 - RNA, 71 nt, Homo sapiens
cacagagcgagaccaggaaagaagggggcagaagaggggaaccgcccacagcaccgcaggcggcagccggg

SEQ ID NO: 188702 - RNA, 57 nt, Homo sapiens
gcagggcaccagaggggacggcagccccaggccgccaggacgccagagacgcgcacg

SEQ ID NO: 188703 - RNA, 76 nt, Homo sapiens
gaagacgccgaggagggaaaaaagacacaagcagcgaggaccaggaacaacagagacaagaacaagcaggaaaaaa

SEQ ID NO: 188704 - RNA, 72 nt, Homo sapiens
aaccccaacacagagccaagcgccaagcagcacaagggaggaagcccgcccgggcagcaggagcgcaggcag

SEQ ID NO: 188705 - RNA, 75 nt, Homo sapiens
ccgcacagccgcggcggcagcagcaggagaggcgggggacagccggcgcggcccaagaagagacaccgggccgac

SEQ ID NO: 188706 - RNA, 78 nt, Homo sapiens
gacgccccgccagaccgcgaccgcacgccagcccaagccgacagaccccgccccccgaggcgcagcccgaacccagca

SEQ ID NO: 188707 - RNA, 61 nt, Homo sapiens
caagccgggaaaaacgcagccaaagaggagagagacgacgacgagacgaggagacagacga

SEQ ID NO: 188708 - RNA, 73 nt, Homo sapiens
acgaaaagccggacccaggagaagaggggagagggaccacacagaaacgggaaaagaagcaggggccagccca

SEQ ID NO: 188709 - RNA, 60 nt, Homo sapiens
ggaacgaaacacacaagacaaggacaggccgccagggggacagaaggagcaggcaaaagc

SEQ ID NO: 188710 - RNA, 83 nt, Homo sapiens
ccgaggaggcagccaagccgagccgccacccgaacagacgccccaccaggccagcggggcgcagagagaacccgggcccaggc

SEQ ID NO: 188711 - RNA, 80 nt, Homo sapiens
gaaaacagccacaacccaggaaagagagccacgacggacaccccgaacgccgcaaggccaggacaaacccgaggcgagaa

SEQ ID NO: 188712 - RNA, 92 nt, Homo sapiens
gaagagacaagcaccaggaaggacccacacagcccccagcggagcaggcagaaaaccgcgcgggagggggcaagccaccaggaggggccccc

SEQ ID NO: 188713 - RNA, 56 nt, Homo sapiens
acacccgccagggacgggcacgggaagggagaggacgcagacggaaccgaccgagc

SEQ ID NO: 188714 - RNA, 82 nt, Homo sapiens
gagaagaaaaaacgccaaaagaagagcaaggagaagaggccggaagggaaggaacagaaccaaaaacgcagaaaacagcacg

SEQ ID NO: 188715 - RNA, 77 nt, Homo sapiens
gaccacagcacagccgggaaggggagccaccagcccccgggagagaacagcacacagaggcgcaaggggaagagaaa

SEQ ID NO: 188716 - RNA, 88 nt, Homo sapiens
cccagcagcaaccagccacccgcccccaagaaggaagcacagggccggccggaacagacaccggcccgggcgagcagagacgcgagca

SEQ ID NO: 188717 - RNA, 78 nt, Homo sapiens
aacaagccaggagagggcacaagacgcggacggagcccacacccgcaagaagagcccggcgcaccacgaagcggcaga

SEQ ID NO: 188718 - RNA, 61 nt, Homo sapiens
gacccggacaaccagaggcagccagcagggggaggcccagaagcaaaaccgaacaccggaa

SEQ ID NO: 188719 - RNA, 74 nt, Homo sapiens
gacacgcgacgcggacccacggcgccgacaaaggccaccggccagccacaggaagaaaccagagagggagcagc

SEQ ID NO: 188720 - RNA, 81 nt, Homo sapiens
gcgggccacacgccggcggcggccaggccccaggacagggaggacggccgcaagaaggagaggaagggggagaggacggag

SEQ ID NO: 188721 - RNA, 83 nt, Homo sapiens
cgggccgcgcgggccacccaagaggagccccggggaacccgcagcacaccagggggcaggcccgagagacggggcgccagggc

SEQ ID NO: 188722 - RNA, 42 nt, Homo sapiens
gggaaagaaggcaaaacacggggagagccggggagacaggag

SEQ ID NO: 188723 - RNA, 73 nt, Homo sapiens
agagcccggacaccggaagcgggaaagggagaccgccaagaacgagagaaagaagaaaagcgaacgcgggcac

SEQ ID NO: 188724 - RNA, 67 nt, Homo sapiens
gcccaaaagaagaccaacaagaacacacgaggggagcggcaaacgggaaacccagggggagagaaga

SEQ ID NO: 188725 - RNA, 80 nt, Homo sapiens
gaggaagaagccggcacagcccaggaggggaacagacaagagggacacaggcgaaacagagaggaagacaagccaagcga

SEQ ID NO: 188726 - RNA, 83 nt, Homo sapiens
caccacaccacgcaccgggacaagacaccccgcaccagaaacagcgcagcgcacgcggccacaagcgccagccgcccaaaagc

SEQ ID NO: 188727 - RNA, 105 nt, Homo sapiens
agaacagaccagagcgaagaacaggaccacccaggcaaccacacaacaagcccagcccagccaccaccaggcgagcaggaggagagaaagcgccggcccgcacgg

SEQ ID NO: 188728 - RNA, 83 nt, Homo sapiens
gcgacagacccagcccccgggcagaccggaaaggccaaggggacacgagcagcggaccccgcggccggacccccgcaccggcc

SEQ ID NO: 188729 - RNA, 111 nt, Homo sapiens
ggcagaagcagagacaccaggacagaaaagacaggcgccaggagcacagaagagcgaggagaacgacaccaggagcgcagaaaaaaagcaacaagaaaaacaaggaaacag

SEQ ID NO: 188730 - RNA, 110 nt, Homo sapiens
gccccacgaaacacggcaagaccggaacgacagaccccgggcacaggaagaccaaggaggcccagaggaaaaagacacgcgagaagacgaggacccgggaaaagagccag

SEQ ID NO: 188731 - RNA, 81 nt, Homo sapiens
acgggccacagcaggaaaaaggaaaaagcgcaaaccagcgggacgacccgggacagcccacggggcagaccagcgaccacc

SEQ ID NO: 188732 - RNA, 58 nt, Homo sapiens
gccacaggcacccgagccagaaacacgcagggacagagaaagcaccaaaaccacgaga

SEQ ID NO: 188733 - RNA, 84 nt, Homo sapiens
cagccccgcgcgggcaccaggccaaaacagaagaggcaaagcccagccacagcagcagcccagcagcaaacaaccaaagagaag

SEQ ID NO: 188734 - RNA, 77 nt, Homo sapiens
cgacgccccgaaaaacggagcagccgaaagccagaggacaggagcagacggaaggggaacccaaaagcacaaaagac

SEQ ID NO: 188735 - RNA, 62 nt, Homo sapiens
aacagcgaggccagcggaaccacccaccgagggaccagggcggggaacagaccagggaaggg

SEQ ID NO: 188736 - RNA, 80 nt, Homo sapiens
accccgcagccgcgcaaaaaaaccaaaggacgcccaaggagccagggcagcacaaggaaagcgccaaaagagcaaaggga

SEQ ID NO: 188737 - RNA, 85 nt, Homo sapiens
cccagcgcgcgcaggaccccggcggcgcgcggaccagggggcggcgccaggacaggaaaaagagagccacacccggcacacaggg

SEQ ID NO: 188738 - RNA, 78 nt, Homo sapiens
gcgggaagagaagacacgagcacaaacgcggcgccgacaccggaacagcgcccggaacagaaagaaaggccacagccc

SEQ ID NO: 188739 - RNA, 84 nt, Homo sapiens
cacgcaggccgggggcagccggcagccgcagagcggggaggaggcggggcccgcggaggagccggcccccaaaggaaagccgac

SEQ ID NO: 188740 - RNA, 82 nt, Homo sapiens
gcagcggaggagcagcgcgcccgcgccagcacacgacaccgagccgccgccgaccgagacacaaaagccaggaagacaagag

SEQ ID NO: 188741 - RNA, 55 nt, Homo sapiens
gccacagaagcaacaaaggaccgcccccagagagacggagcggcaagccacccgc

SEQ ID NO: 188742 - RNA, 76 nt, Homo sapiens
gagcaccccaggcgagcagcaggcacaccgcagcaagggggggggagccgcacgacccgaacgccagagacaaaac

SEQ ID NO: 188743 - RNA, 70 nt, Homo sapiens
gagacggcaaggccccaccggaagggacaagcggcccagaagggcagagacggcacccgagaaggcaaga

SEQ ID NO: 188744 - RNA, 91 nt, Homo sapiens
cacagagccgcgacgaacgcaccgggcgaagaaaccacacagcggaagcaagaaaggacagcaaagcgaagaagcaaagaaagacgcaaaa

SEQ ID NO: 188745 - RNA, 72 nt, Homo sapiens
caagccaaggacgcaagcccgagcgaagagaggaaggacaggacaagccaaggcgccagagcccgaagaaga

SEQ ID NO: 188746 - RNA, 92 nt, Homo sapiens
cacacagagcggggcacaagcagcccagggcaaagaccccggcaagagccgcgacgagcgccaacccgggcgccagggccccccacgcacca

SEQ ID NO: 188747 - RNA, 82 nt, Homo sapiens
ggaggcggcaaaacgggcggcgagcagaacggagccgcgccccccagccgcccgggcagcgcgccgggggcccggaaaggga

SEQ ID NO: 188748 - RNA, 81 nt, Homo sapiens
gccccgccagacccccaaccccggccggggccaccgagccaacggagaggaaaggcaggagaggagcagcaaacaaaagag

SEQ ID NO: 188749 - RNA, 53 nt, Homo sapiens
acagccccaagaccccacagcaaagcacacaaggaagacaggaggccagagcg

SEQ ID NO: 188750 - RNA, 70 nt, Homo sapiens
cagaaaagggcacaaggacacagaaaagcgaaagccagaagggagggcaacagagagaaaagcgaacacc

SEQ ID NO: 188751 - RNA, 68 nt, Homo sapiens
gcccgcgccgaggacgcggagcccagcaagcaaaggggaaagaaaaaaacagaaaccagggaacaaga

SEQ ID NO: 188752 - RNA, 74 nt, Homo sapiens
cccgggcggggccccggacacgaagaacgagggccaccagcacggcccagcgccccacggcaaggaagaggaag

SEQ ID NO: 188753 - RNA, 76 nt, Homo sapiens
cgccgcgcaccacccaccaacgccacccagcaggggcccgcggagggggcacccgaggaggaagagggcagggccc

SEQ ID NO: 188754 - RNA, 75 nt, Homo sapiens
aggcgcgcccggcgggccggaccaagcagcacaaggaaaacgagagaaacgaaggcgagagaaacagcaaggccc

SEQ ID NO: 188755 - RNA, 74 nt, Homo sapiens
accaaaagcagggaaaccggccagcccccagaccaagaaagaaaaagccggacaaaagggagcagcagagcagg

SEQ ID NO: 188756 - RNA, 77 nt, Homo sapiens
ggaaaccaacagcaaggaagcccgaaggggaggagcgaccaggaagaccacgaccaaggacgagcacaaggcaagac

SEQ ID NO: 188757 - RNA, 67 nt, Homo sapiens
agcggcacgaacagagccgggagcaagaagaacacccagagccaaccaggaaaccgccagacggccg

SEQ ID NO: 188758 - RNA, 67 nt, Homo sapiens
ccgcgaggggaagaggaagcaaagccaagagcgccgcaaggcacagccagcccgccagggacacaca

SEQ ID NO: 188759 - RNA, 76 nt, Homo sapiens
ggcaaccccggcccggcaggaagaggcccagggaccaagaggggcgacccgcagcccggccaccaccgcagggagg

SEQ ID NO: 188760 - RNA, 79 nt, Homo sapiens
gcagggaggcgggacgcgggaacaagacccgcagaggagaagacaaggccggaaggcgaggaggcacgagcagaggaaa

SEQ ID NO: 188761 - RNA, 72 nt, Homo sapiens
caaaggaggaaacagaaacagggacagcggaggaacggaggccagagggaccaagaagaacccccagaacgg

SEQ ID NO: 188762 - RNA, 70 nt, Homo sapiens
ggcgcaaccggaaagggaaggccacaagacccccagacccaacacagaagaggacgaacagcacccggga

SEQ ID NO: 188763 - RNA, 76 nt, Homo sapiens
aaagcaaagcacagaaccaggggcgacccaaggagcaccacaccagagagcacacaagccacggaagaagacaccc

SEQ ID NO: 188764 - RNA, 73 nt, Homo sapiens
ccccagcggcagacggaaacgacagaagcagagggccaagggcagggagaagggacaacacagaacacagacc

SEQ ID NO: 188765 - RNA, 59 nt, Homo sapiens
ccacgacagaagaccagaacagaagagccaccagaaggaccgacacaagaagcagccag

SEQ ID NO: 188766 - RNA, 75 nt, Homo sapiens
cggggggaggacccgaccagagagggaaagggcgggggcaagacccagagaagacaaaacaacaggcgaaaaaga

SEQ ID NO: 188767 - RNA, 58 nt, Homo sapiens
ccagccccccagagcgcagcggcgccggacgacgagacccacccaacagcgaacaaag

SEQ ID NO: 188768 - RNA, 76 nt, Homo sapiens
aaagccccgaggccccgaagccgagcaaagcgacacgcgacagccgcagagcagagcgcccgcgcccaggcggagg

SEQ ID NO: 188769 - RNA, 59 nt, Homo sapiens
caaagaagccacgaagcaaaaagacccccaagggaacagcgccaccaacaaaacagcaa

SEQ ID NO: 188770 - RNA, 58 nt, Homo sapiens
accaacaacaggccaaagcaagaagggcccaagaaggcacacagggaccaagaagccc

SEQ ID NO: 188771 - RNA, 114 nt, Homo sapiens
ccgagccagcgcgccgcgccggccccaccccggcccgaccccgacccggcccggcaggccccaaccaggagaaggaagcgccggccaaacgagcacagcaaacgcgaaagagcg

SEQ ID NO: 188772 - RNA, 70 nt, Homo sapiens
caacagggaagaccaaaagcgggccaaagaacaagcgcgacaggacagaagcagcccaaaaaaacaagga

SEQ ID NO: 188773 - RNA, 84 nt, Homo sapiens
cgcgccgcccggcagcccggcagccaagggaaaaagccccccgggcgcaaggggcacaggaaaagggaagaccgagcagcagcc

SEQ ID NO: 188774 - RNA, 74 nt, Homo sapiens
gaccagcaccggaggaaccgcaccgagcacggaagaccaggggagagacaggcgccagacagacaagcaccaaa

SEQ ID NO: 188775 - RNA, 76 nt, Homo sapiens
ccaagagggacccacccggcggcgccgcccggagaggcaggggacccgggcaccaggggcgcccaccggccaacgc

SEQ ID NO: 188776 - RNA, 77 nt, Homo sapiens
gcgggccgagcccggccgccagaccacagcacagccgggaaggggagccaccagccccccggacaagagaaagaaaa

SEQ ID NO: 188777 - RNA, 65 nt, Homo sapiens
ccaaccccaggggaccagaggaaccagcccgagcgacccaagcaccagccgccgccacacccccc

SEQ ID NO: 188778 - RNA, 73 nt, Homo sapiens
aagccggacgccgccgggaggggcacgcaaagaacgcccacaaggcccagaagaagagaaaaaagggaagaaa

SEQ ID NO: 188779 - RNA, 81 nt, Homo sapiens
ggagcaagagggaccccagaaacgaccgcaaaggcacccggggcagaccggaccaaggcgcggccgaacccagcgagaaac

SEQ ID NO: 188780 - RNA, 57 nt, Homo sapiens
agaggagaccccggaaggaaaaacaggcagaagcaacacggaaagacaccgagcaga

SEQ ID NO: 188781 - RNA, 49 nt, Homo sapiens
gcgccgcgccggcgaggagggaaacggaacagaacagcggagagcgaaa

SEQ ID NO: 188782 - RNA, 82 nt, Homo sapiens
gcgcaccgcagcgccggggcacgacacaaaaacaggggccgcaccggggcgcgggccacgcgaccacccggaggaggggagc

SEQ ID NO: 188783 - RNA, 87 nt, Homo sapiens
cagaccaagagaggcggggaccgcagcagcgagaaaggagccggggaccccccaaagacaagggagggacccaccgagaaccaccga

SEQ ID NO: 188784 - RNA, 73 nt, Homo sapiens
aacccgaagaagaaaggacgacagccagagaggccagaaaggaggcccacagccgaccgagcggggcaggaca

SEQ ID NO: 188785 - RNA, 79 nt, Homo sapiens
ggagaagaaggccgagaaccacacgagccagagccacagaggaggacagagaagcaccagagcaaagaagacagaaagg

SEQ ID NO: 188786 - RNA, 88 nt, Homo sapiens
agacgaggcagacgggcccgcgcacagagacaggacaagagcgaagaagcaggggagaggccgagcgaagaaccagcggccaaggagg

SEQ ID NO: 188787 - RNA, 77 nt, Homo sapiens
gggcagcgcgggcgcgcggccggccggagccagcagcagggcgacgccaggagcacaccgaaaagaaaggaaaaccg

SEQ ID NO: 188788 - RNA, 59 nt, Homo sapiens
acaagccgcgcggggacccgacgcccgcacggcgaccacgagaaacaggcaaccagcgc

SEQ ID NO: 188789 - RNA, 78 nt, Homo sapiens
ggccggaggaaaccaagacagcccaaacgccccacgaccagaaaaacaaccaccagcgagcaaaaaggcaaagaccaa

SEQ ID NO: 188790 - RNA, 97 nt, Homo sapiens
gaacagaccgccggagagaggagggggccggccgggacgcggcccggagccgggaccgggagagcccacgcaaaaaaggccagcaaacccagggaca

SEQ ID NO: 188791 - RNA, 75 nt, Homo sapiens
aagcacccgcgacccagaaggagcacaggaacaaacgagggaaagccccaggaacagaggggagaagaacagcaa

SEQ ID NO: 188792 - RNA, 79 nt, Homo sapiens
caggcggccgccgagcgacgggaggacaccagaggaccagaacccacgagaaacagacgagccaaccagaccccaggag

SEQ ID NO: 188793 - RNA, 79 nt, Homo sapiens
gaaagagaggggacaacaaacagcaggcccgaaaccggcagagcgacgggagaggcaaagcccgggacgacaaagcaga

SEQ ID NO: 188794 - RNA, 69 nt, Homo sapiens
aagagccaaacggagaaccaaggagaccgggagagagacgaaggacgcgcaggggcagcagacacggaa

SEQ ID NO: 188795 - RNA, 84 nt, Homo sapiens
gagcgaagcggcaccgaggccggggccaacgagccaacgccaggcgccgcccacagggagccgcccgcggagagcacagccccc

SEQ ID NO: 188796 - RNA, 73 nt, Homo sapiens
gaacaaccaggagccgcccggacaccgccggacccagcccagcgcacgccagacgagacccgggacagaggca

SEQ ID NO: 188797 - RNA, 80 nt, Homo sapiens
gggacggggagggggaccgggagaggcaccaaacggccgggggcccgagaagcccccagaccgagagcagaaacaggaca

SEQ ID NO: 188798 - RNA, 79 nt, Homo sapiens
cccaagcccagagcagggaaagccaagaaccggcccaagagagccacaggggggcgcccagccgccccggccaggccac

SEQ ID NO: 188799 - RNA, 72 nt, Homo sapiens
ggggcacgccacccagggggacacagcggaaaacacggaggagaagggaaacacaaagaagacaccagaagg

SEQ ID NO: 188800 - RNA, 82 nt, Homo sapiens
ccgggccccgaggccccgaccgcggcggagcccgacccacccaagacccagagaaaggccacgcgagccaggcagggagccc

SEQ ID NO: 188801 - RNA, 71 nt, Homo sapiens
aaccgggcgacaagcggacaaaggcgcgcacggcagagcccgacggcccagagggacggccaaagaacgag

SEQ ID NO: 188802 - RNA, 67 nt, Homo sapiens
ggccccggagcggccaccacgcgacgaggaagcgcacacacaccggccccggggcaacagcggccac

SEQ ID NO: 188803 - RNA, 61 nt, Homo sapiens
ggagaagccccagaacaacagagcaaggccgggccgcagggaagcccggaagcagaagccc

SEQ ID NO: 188804 - RNA, 57 nt, Homo sapiens
cggaagcagaaacaacacaacagggaaaagaaggaaaacgggcccagagaagaggcc

SEQ ID NO: 188805 - RNA, 75 nt, Homo sapiens
acccggccacgacagggacagcaggaaagaaaccacaccaagaagggacacacccgacagcaaagagacacagga

SEQ ID NO: 188806 - RNA, 75 nt, Homo sapiens
gcaggggcaggaagaacccacgggcagcacacacgaaagagaagccccggagagaggggcgaaaacgcggaagcg

SEQ ID NO: 188807 - RNA, 75 nt, Homo sapiens
acaggcgaagccaaagcagcacgcgaggaggaaaggcaccccaccagcggccaagaagaaaaagcgggaagaaca

SEQ ID NO: 188808 - RNA, 78 nt, Homo sapiens
gggccgggcgcgccgagaccacccggagaaaaaccagggagcagcaggagagaagaggggacgacacgccgacacaac

SEQ ID NO: 188809 - RNA, 71 nt, Homo sapiens
gggcagggaccaccaaagaggaccaacaaaaacagaccagaagaaccaagggcagaggaaagcccccggaa

SEQ ID NO: 188810 - RNA, 79 nt, Homo sapiens
gcagccgcccccgccggccggcccaacaaccggaaacaggcacagaacagaaggaaaggacgaagagcccaggaacacc

SEQ ID NO: 188811 - RNA, 86 nt, Homo sapiens
aagcagcgcccagccccgggcccgggccgcaggaaagcggagggaaaggccacccaccacgagcgccccccgagaccgaccagccc

SEQ ID NO: 188812 - RNA, 64 nt, Homo sapiens
cgcacacaccgggagaggcagagggaaccaaagggcacccgcacggagagaagggaaccgcggg

SEQ ID NO: 188813 - RNA, 70 nt, Homo sapiens
ggccacccgccccagcacacgcgcaaagcacccaggcagcaggagaaacgagaagaaacagacgcgcgag

SEQ ID NO: 188814 - RNA, 77 nt, Homo sapiens
cagacacgggaagccaaaccccagaggagggaacaaccgggcggccgggcacaccgggccggcggcgcaggagggag

SEQ ID NO: 188815 - RNA, 83 nt, Homo sapiens
gcccccggcacaggcagcggaggagcccgaccgacccgggcgaaccgaccaagaacaacacccagagggccaggagaaggcga

SEQ ID NO: 188816 - RNA, 79 nt, Homo sapiens
ggccagccagaacgccggggaccaggcccgggcgccgcaaaaggagagacaggagacccccacaggaagaacagcaaaa

SEQ ID NO: 188817 - RNA, 83 nt, Homo sapiens
cggcgcggcagcgccaggagacggacagcgaggaacccgccgcgccgcggagcgggcacggacacaagaacgagagccaaagg

SEQ ID NO: 188818 - RNA, 74 nt, Homo sapiens
gcagagaccggagagacagggcaagagccgcagagaaagcgcgcgacggacacccaaggaggacagcgcgggag

SEQ ID NO: 188819 - RNA, 75 nt, Homo sapiens
caccaggagccaaggagaaaacgccacggaggcagaggggagccgccaccaaaagcagacggaaaacccacgggg

SEQ ID NO: 188820 - RNA, 50 nt, Homo sapiens
aaccagcaacaccccaacagaccccaacacgggccaagaaacgggaaaca

SEQ ID NO: 188821 - RNA, 74 nt, Homo sapiens
aaagaaaagccacgagcacagcaaaaagcacgacacagaggaccacagaacgggcagcaaacaaagcagcaccc

SEQ ID NO: 188822 - RNA, 78 nt, Homo sapiens
agagcagaaaagcaacaggcccaggcaaccagaacaaacggacgccaccagacaaccacaggggggagcgggagggag

SEQ ID NO: 188823 - RNA, 80 nt, Homo sapiens
ccggaccaccgggcgcggcgccccagccggagcgagagaagaaaacaaagaaaccaaggccagcggaggaacagcgacgc

SEQ ID NO: 188824 - RNA, 83 nt, Homo sapiens
ggaaggaagagacagagaccaagccaaacccccagggcgaaaagccaggagcaaaagacgagcgcgacgccaccagcaacgaa

SEQ ID NO: 188825 - RNA, 75 nt, Homo sapiens
accagccagagcggaggagaaggacgggaaaacagaaaggggccaaccacagggagagaacaaacacaggggcca

SEQ ID NO: 188826 - RNA, 116 nt, Homo sapiens
cggccacagccaacgcccgcgcggggccgcgcagggcggccccggcgggggcgcggaagcgaaaccacaacacccaaaagcaaggaagaccacggacgaccgacggcacgcaggac

SEQ ID NO: 188827 - RNA, 76 nt, Homo sapiens
agcacagagagcaagccccaaagcagagacagagcacagaaaggaaaagcccggaaaagcagccaagcggaagaca

SEQ ID NO: 188828 - RNA, 70 nt, Homo sapiens
cggggacccccgacgccaggcagcgcccccaaacgggccagaccaaaggaaccagagcaggagaaaacga

SEQ ID NO: 188829 - RNA, 89 nt, Homo sapiens
cggaccgcggagcgagaccacccgaacgacgcgggcgagcggggcggacgccggggagacgcaggcgagcggcagacaaggcccaaaga

SEQ ID NO: 188830 - RNA, 82 nt, Homo sapiens
ccgagcgggcggagaccccgccaagcagccaaaacaaccccgacaagggcagcacgaccgacagggccggcgggggccggcg

SEQ ID NO: 188831 - RNA, 48 nt, Homo sapiens
gaagacaagacagacccaggggacggacacggccagaaggaccaaaac

SEQ ID NO: 188832 - RNA, 76 nt, Homo sapiens
gcaaagccggcgacccgcacagccgcaccccaacccccagaaagaggccaagagaaagaagagaagagcgagggac

SEQ ID NO: 188833 - RNA, 74 nt, Homo sapiens
aagcccggaagcgcacagcgaggaagccaaaaaggaagaagaagcggccgcgagaaggagcgccgggaagaagc

SEQ ID NO: 188834 - RNA, 84 nt, Homo sapiens
cagcaagacccccagcgccaccgaggaggagaaggggcggcccggaggccgagaggagcggagagacaagacgaagcccggagg

SEQ ID NO: 188835 - RNA, 82 nt, Homo sapiens
gggaagacggaggccaaggcgcaaggaaagaaaagaaggggagaaccagacacgagccccaagaaagggagagaaaagcgga

SEQ ID NO: 188836 - RNA, 61 nt, Homo sapiens
gcagaagccgcgaaaaaggggggccgagggcggcgacggcggcgcgaggaccgaccgggcc

SEQ ID NO: 188837 - RNA, 77 nt, Homo sapiens
gcgccagcgcccgacagaagcgcaaggagagggccaagccggaagaagccagccaggagaagaaacagaggacggca

SEQ ID NO: 188838 - RNA, 85 nt, Homo sapiens
cgggacggaccgagaccggaccgagagcggaccgagagcgcgaaacgcacgagaaggaaccaaggagcaggaacagcagcacaca

SEQ ID NO: 188839 - RNA, 78 nt, Homo sapiens
aaacccgcaacagcccccgcccaaagccccgggggccacgcaaggccggccccgagagccaaagccgcgggaagcgaa

SEQ ID NO: 188840 - RNA, 67 nt, Homo sapiens
aacaagccgcagcgggcccccggaacagaaagacaacggacaaggcaggaagaaaacccacacgagg

SEQ ID NO: 188841 - RNA, 72 nt, Homo sapiens
aacccacagcccaccaggagggccacagaccaagcccgcccaggcaaggccacccccaccgccgccgggccc

SEQ ID NO: 188842 - RNA, 83 nt, Homo sapiens
cgcgagccgcgcggcgcggggccccgcggcggagggaaagggagcagcaccggccacacccacagcacgaccggaacccagcg

SEQ ID NO: 188843 - RNA, 60 nt, Homo sapiens
aagagcgggcccgggggccccggaccaggaaaccccacagagaacggacgagaccaacgc

SEQ ID NO: 188844 - RNA, 82 nt, Homo sapiens
aagggggagcagcccgggaggacaggcgacaagaaggccaaggcccaaaggggggcaagcagaaagaggaggaagcgagaga

SEQ ID NO: 188845 - RNA, 82 nt, Homo sapiens
cgcccggcgcgcggccgcgcgcgcggccgcacgcggggcgcgcccaagcccaaggagaggcacacaggacaggacccccgag

SEQ ID NO: 188846 - RNA, 124 nt, Homo sapiens
cggaccagggaagcccccgggacaccaggcacgaagcgaaccacaacaacagggggggcgccaggacaagcccaaccagggaccaggccaaaaccagacgccacgccccacgggccccacgccc

SEQ ID NO: 188847 - RNA, 100 nt, Homo sapiens
acagccgcggccaagaagcagaagcgagcaggacgagaacagcaaccagaccccggagacgagaacggcggaggcggaccggggggcccgggcccgccag

SEQ ID NO: 188848 - RNA, 74 nt, Homo sapiens
aaacacgcacagcggaaacaagagagaaccggagagagcacccaccacggaagagaaagaagaaggggaagccc

SEQ ID NO: 188849 - RNA, 65 nt, Homo sapiens
aggaaaaacaaagaagacccagaccgagcagggacgcgaacaaaaaaaacccaacccgaaccaaa

SEQ ID NO: 188850 - RNA, 53 nt, Homo sapiens
ggcagcagagcgcacagccaggagcccagaacacgacagagagcaagcgggcc

SEQ ID NO: 188851 - RNA, 75 nt, Homo sapiens
gcgacacaaacaaaaggaagagagaagggcacagaccaagacaacgaaccccggccaggacaggcccccacggaa

SEQ ID NO: 188852 - RNA, 71 nt, Homo sapiens
ccccaagagagccaggagcgcacacacgacaggagaaaggagagaagggccacgccgcccccagaaccccg

SEQ ID NO: 188853 - RNA, 80 nt, Homo sapiens
acaaccagaggggagacaggccggccaggaggccaaggccagaagcagcgacaggagcggagcgccacgggcgccaccag

SEQ ID NO: 188854 - RNA, 80 nt, Homo sapiens
ccagcgacccgcgccagcgcccagggggggaaaccaccggcccgaaaagaaagcgaacacacaaaacaagaaaaggcacg

SEQ ID NO: 188855 - RNA, 66 nt, Homo sapiens
gaagcgggacaggcggggcccgaaacaaaggaacccgcagcaggagcagccaaaagccaagcacca

SEQ ID NO: 188856 - RNA, 77 nt, Homo sapiens
accgccgcgacccgccgcgcgcgcacgcccaggcaacaaacgaggccgaaggaaggggagacaacgaggggcgcgga

SEQ ID NO: 188857 - RNA, 72 nt, Homo sapiens
ccccgcgccgccgaccccccggcgccgcgccggcggcggaaaaaccagaagagaaaaaacaaaggggagagg

SEQ ID NO: 188858 - RNA, 51 nt, Homo sapiens
gggcaaagggcaaccacccccagaacacagggaaacaaagagggaacgaag

SEQ ID NO: 188859 - RNA, 81 nt, Homo sapiens
gagcacacggggcaacaagacccaaggaacgggaacagcgcaagaaagaagcacccagaacgccaagcaacggccacagaa

SEQ ID NO: 188860 - RNA, 44 nt, Homo sapiens
gggaaaagaagcccaaagaaagcggagagagagagagaaagacg

SEQ ID NO: 188861 - RNA, 55 nt, Homo sapiens
gcccccaagagcggaacagaggagcgccggcccaggcggaagcaaggcagaccgg

SEQ ID NO: 188862 - RNA, 67 nt, Homo sapiens
ccgggaggaccgacgcagccagacagggagcgaggaggacacaggaccaggaaggccaaaagggcac

SEQ ID NO: 188863 - RNA, 78 nt, Homo sapiens
gcagagcaggaacacagggacgccacgaaccgggaaaacgagaaaaaggagcgagcaacaccggaccaaaaacaaaaa

SEQ ID NO: 188864 - RNA, 75 nt, Homo sapiens
ggaagagaaaccagcaggcgaagcaagcacagccaacagcccacaagagcacacgggcacgaggcaagccgagcc

SEQ ID NO: 188865 - RNA, 77 nt, Homo sapiens
accccagccacggggcccgcccagagccgcaagcaccacgaccgagaggcgacaaaaaggcccggaagccaccccga

SEQ ID NO: 188866 - RNA, 102 nt, Homo sapiens
gagagaagacgcaaggggagcacggggccggaccagccccgaaacacgggcgggacaaccagacaacagaaggaacaacagaacgcacgaagcaagcgccag

SEQ ID NO: 188867 - RNA, 56 nt, Homo sapiens
gaaggaagggccagcaggcagcaaagggacgaagccacgacagcagagaggagcac

SEQ ID NO: 188868 - RNA, 73 nt, Homo sapiens
gagacagacaccgccccgagacgaggcccgagccggcaaacgagagcaaaagggaccgaggcaagaagggacg

SEQ ID NO: 188869 - RNA, 80 nt, Homo sapiens
gcacgcacccaggggcagcgcggacccgagcacaccaaaccagggacagcggcaggacaagccccaggcccgcggggcca

SEQ ID NO: 188870 - RNA, 80 nt, Homo sapiens
cccacacgccaccgaaaaggaaggagggcccccggacccgggagcggacccggggcgggaagcccgaggcggcaacggcg

SEQ ID NO: 188871 - RNA, 73 nt, Homo sapiens
aacccagacaacaggacgccgccaagcacccgaaagagcgaaagcccagacaggaagcaacgagggagaaggg

SEQ ID NO: 188872 - RNA, 75 nt, Homo sapiens
cggaaaaggcgccgcgaacgcaaacggggacagcgccgaccggaacagggaccacggaagcccaggaccagcccc

SEQ ID NO: 188873 - RNA, 68 nt, Homo sapiens
cgaggagcagcagcagcccagcaggcgcggcccgccagaagccagcccagaaagggaaaacgacacca

SEQ ID NO: 188874 - RNA, 76 nt, Homo sapiens
ccaaggccggacccgggaacaaccaaagaggaggaaaggacgagcacgaggccgcagcgaggcacccccccagcag

SEQ ID NO: 188875 - RNA, 73 nt, Homo sapiens
ggagggagaacacaggaacccggcccgggacgacacgggcagaaacgaaaccaggcaggggccaccgaaaaca

SEQ ID NO: 188876 - RNA, 57 nt, Homo sapiens
caggaaaaaaaaccacccaaaaggccaaccccgggggagccaacagacagacagcga

SEQ ID NO: 188877 - RNA, 73 nt, Homo sapiens
agcaaggagaggaacggccaaaacgggcgaaacgaaaaccagaagaggcaggcgcaagacggagaaaagccca

SEQ ID NO: 188878 - RNA, 81 nt, Homo sapiens
gggcaagggcccgcccagcccccaagcagagggacacaggggcagagagaagagcacacagaaggccaggagcgacagagc

SEQ ID NO: 188879 - RNA, 79 nt, Homo sapiens
acgagagcacccagcggggcgggcgcgccacacaggacggcaccacgaggaagagaagaaaaccgcagacaacacggaa

SEQ ID NO: 188880 - RNA, 74 nt, Homo sapiens
aaggacggggggcagacaggagcccaagaaacgaaaaaggcagaagaacgcagacagaagaaggaaacaagagg

SEQ ID NO: 188881 - RNA, 83 nt, Homo sapiens
caggaagcaacggaagcgcagcaacagcaagccccgggcagaccgcaagccgccacccgagaccgcgcgccccaccggccgca

SEQ ID NO: 188882 - RNA, 57 nt, Homo sapiens
gcgggcccgcagcgcgacgcccacgcaacggagggagcgaagaaaccgcaaagggga

SEQ ID NO: 188883 - RNA, 60 nt, Homo sapiens
cgggcaggccaacaggacggcgcacgacccaggcaccgggacggcgaggcgggcccgccg

SEQ ID NO: 188884 - RNA, 72 nt, Homo sapiens
ccccaggagcagccaccaagggaaacagaacgacagcccgcaccgacgccggcggccagccagagagcacgc

SEQ ID NO: 188885 - RNA, 57 nt, Homo sapiens
cggaacagcgggacaggcgccgagaggcgcggaagaccaacgacaggcgcaagaaac

SEQ ID NO: 188886 - RNA, 73 nt, Homo sapiens
ccccccccccagcggggccccaagaagccgagacacgcgacccagaggagcccaagccaggaacacacagccg

SEQ ID NO: 188887 - RNA, 90 nt, Homo sapiens
cgaggcgagaacgcacaggccgcgcagagcgggaccacccgggcacagcaggcacggagaggcgggaggcggcagaagcagccagaggag

SEQ ID NO: 188888 - RNA, 73 nt, Homo sapiens
cggcacgggcgccacgagcagacagacagggcgcgccaccagagcaggggggcaaaccgagggacacccagcg

SEQ ID NO: 188889 - RNA, 81 nt, Homo sapiens
agggggcccacccagcaaaacccggggcacgagggaagcgccccacgaagggacacaaaaggcccgggaaaccgcaagacc

SEQ ID NO: 188890 - RNA, 76 nt, Homo sapiens
gcgcagggggacgacacgggcaggggggagggagggcaccacaaagggcggagaacggaaaagcaccaggaagcag

SEQ ID NO: 188891 - RNA, 77 nt, Homo sapiens
gacgcaagacccgcccccaagagccgacacgcgcccgagccaaggagaggggcggcccagcacaggaggccgaaggg

SEQ ID NO: 188892 - RNA, 79 nt, Homo sapiens
aggaaagagcggacgggagaaagacacagcccacacccagaggccaccagcgggagaggaagcgaaaacgaccgggacc

SEQ ID NO: 188893 - RNA, 85 nt, Homo sapiens
caccgggaggccgggccgagcggacacccaaggcagagaaagacaaaagcggagaaggggaacacacgagggaggcaacgagcaa

SEQ ID NO: 188894 - RNA, 91 nt, Homo sapiens
ggcgccccggcccccgccccagcccgccggcggcggcggggcggagaacggaaaagcaccaggaagcagagaggaccgcagaagggaagga

SEQ ID NO: 188895 - RNA, 75 nt, Homo sapiens
acaccccacaggccgccccaacaccagggaagagacacacccagacggcgcgcccggaggagcgagacggacccg

SEQ ID NO: 188896 - RNA, 72 nt, Homo sapiens
aagagccggacagcgacccccgcaaggaaaggcccagaaagggccgccgccacaacagagcggccagaggcg

SEQ ID NO: 188897 - RNA, 84 nt, Homo sapiens
gcaacacgggaccacaccgcacagagaacaggagaccacacaggcggaagaccacacacgagcacagaaccaggccccgccggc

SEQ ID NO: 188898 - RNA, 64 nt, Homo sapiens
ggacaaagcagacaggccaggcacacagaaaagcgccaaaagccagaacaagaagcggaggcgg

SEQ ID NO: 188899 - RNA, 77 nt, Homo sapiens
ggagaaacaaaacccgcagagaaggagaaagacagcaaagaaaaggagaagaaaggaaaaaaacaaccccgggcacc

SEQ ID NO: 188900 - RNA, 66 nt, Homo sapiens
cagacaccgacccacgccagaccagaacaccagaagcagccgaaacgaaccaagaaccgaaggaac

SEQ ID NO: 188901 - RNA, 85 nt, Homo sapiens
agggccccaaagagggccacgagcgcgaaagggcgggaaaggcagggagaagaggcagagggcagaccggaagagaagaaggagc

SEQ ID NO: 188902 - RNA, 75 nt, Homo sapiens
gagcaggagagccagaccaggacacagaccggaaaccgaggaggcggaaccaccggaccaaaacacccccaaggg

SEQ ID NO: 188903 - RNA, 73 nt, Homo sapiens
caccaccaccgaaaaaaaaagaaaaggaaggagagaagagagagaaacggccagcgcacgccacagagcccac

SEQ ID NO: 188904 - RNA, 75 nt, Homo sapiens
caagaacggcagagcgaaacaccaaaaccagcggagcgacacagccaaaccccgaagacacagcaccacccgacc

SEQ ID NO: 188905 - RNA, 53 nt, Homo sapiens
gggagaaacaggaaacaacccgcaaaacggaagaaagcggggagacagagaaa

SEQ ID NO: 188906 - RNA, 81 nt, Homo sapiens
agaaggcgcaacgcggcgcgcgaagggagggccgccccaaccgacgcaccagccggaggaggagggacagggccaggaacg

SEQ ID NO: 188907 - RNA, 60 nt, Homo sapiens
gacagcccgggacaccaagaaagaacgccgcagcgggaagagagcgacagaaacggaccg

SEQ ID NO: 188908 - RNA, 53 nt, Homo sapiens
gagcacccgcagaacaggagagggaaaagcaggagaagacacaaaggaaccag

SEQ ID NO: 188909 - RNA, 83 nt, Homo sapiens
ccgccagggccacgaccccccagcgcagcagccgcaccagcgccgggacgggggggccggcagaacgcgacacaaggacgcag

SEQ ID NO: 188910 - RNA, 85 nt, Homo sapiens
ggaaggggacgggacggacgggaggggcgccgcggcggcgggcgcccccaggaggggaaaggacaaggaaggagcggggaacgac

SEQ ID NO: 188911 - RNA, 75 nt, Homo sapiens
caccccccacccccaggcgcaaggccagggaccaccaggccagcaggagccaccaggggaaccccccggacgagc

SEQ ID NO: 188912 - RNA, 76 nt, Homo sapiens
aagaagaaacacaaaagaccagagacaaaagagcaaagagacaccgcacccaagaaccccgcaggccgggaacgcc

SEQ ID NO: 188913 - RNA, 71 nt, Homo sapiens
gacagcgcacacagcaagcacgagaggacacgaaaccaccgcaacaagaggaagcaaagcagaaacccccg

SEQ ID NO: 188914 - RNA, 80 nt, Homo sapiens
gcccggccccccaccggacacccgcggcggaagcaccagccacgggggcaggcagggccagagggcaagccgcgggagcc

SEQ ID NO: 188915 - RNA, 56 nt, Homo sapiens
ccagggcacaaacacagcaaacagcgcccaaaagacagcccacaccggcaggccaa

SEQ ID NO: 188916 - RNA, 68 nt, Homo sapiens
cagagagggccggcagggcgggcaggcaaagaaaaagccagccgaggacgggaaccagaccccgacca

SEQ ID NO: 188917 - RNA, 71 nt, Homo sapiens
gaggcccacaaccaagccacaaaagacacgccacaaccgaaaccccacaagacgaagcagacgggcagaaa

SEQ ID NO: 188918 - RNA, 68 nt, Homo sapiens
ccgggcaagacaacacgccaaaagggcaaggaagccaggacaggacacagacggaagggagggccacc

SEQ ID NO: 188919 - RNA, 75 nt, Homo sapiens
ggacgggcggggagccccgggcggcggggaccgccagcccagcgaccagcagaacaaggcaacagaacgaggaga

SEQ ID NO: 188920 - RNA, 65 nt, Homo sapiens
cagccccccggggccccgcgcggagcggcaagccacccgcgacgggacgggaaaaagaaaaagga

SEQ ID NO: 188921 - RNA, 72 nt, Homo sapiens
agaaacggaacaccaagggggagccccccagacccgaaaggagacaagaggacagccgcacggaacacaaaa

SEQ ID NO: 188922 - RNA, 83 nt, Homo sapiens
cgcgcggccaagcagaaaggaacagaacgcggccccagccacaccaagcaggacgcccccaggacgccggcaaagcaaagcgc

SEQ ID NO: 188923 - RNA, 79 nt, Homo sapiens
agacgcgggcaggccgcgcgccgcggagcagaccggggcgagaaccggaagagagcgagcggaaaacggccgaaggcaa

SEQ ID NO: 188924 - RNA, 77 nt, Homo sapiens
aaaacagacgggggaaaaaaaggagcgcccgagcgaccaaagaccgggaaaaaggacgggcgccgaccgaaggacgc

SEQ ID NO: 188925 - RNA, 76 nt, Homo sapiens
ggccaggcagcgcagaaggcggggcgagaggaggaagagggccgcgggagggaggggcaagaaaagacggcacgca

SEQ ID NO: 188926 - RNA, 65 nt, Homo sapiens
ccccgaccccaggccccccacagaaaaggaaagggggaaacagcagcacagacagacaagaggca

SEQ ID NO: 188927 - RNA, 71 nt, Homo sapiens
cgagaccaggagaccggcagccccagcgacccaagaaccgggacgggccaacgcacggcccggcagagcca

SEQ ID NO: 188928 - RNA, 78 nt, Homo sapiens
gggagaagaaggagagaggccagagaggaggccacccaggaaaggggaagcgcggagccgagcagacagcggaggacc

SEQ ID NO: 188929 - RNA, 73 nt, Homo sapiens
aggaaagcagcaaggacagaaagcagccaaccagaaaagacgcggacaaaagagaagaaccaaaacggccccg

SEQ ID NO: 188930 - RNA, 83 nt, Homo sapiens
cggccagcacgcccgacagccagcaaaccgccaacccgcgccgccgccaccagcccaaaacggcagaccacaggggacaagga

SEQ ID NO: 188931 - RNA, 81 nt, Homo sapiens
cggcaaaagagcccccagagagaaaggcccgaaccgccaggcagcggccccgccagcccagccccggaccccagagcaggc

SEQ ID NO: 188932 - RNA, 34 nt, Homo sapiens
acccgaccgacaaaagcgcgcccacacaccccgc

SEQ ID NO: 188933 - RNA, 62 nt, Homo sapiens
cccggcgcggcacagcgccgccagcagggccgaccaggcggaggcaaagcggaaaggacagg

SEQ ID NO: 188934 - RNA, 79 nt, Homo sapiens
accagcggagccgcaacaaaggagggaaaaccccgaccaaaagaagcaggacacaggagaagcgagaacaacacgacaa

SEQ ID NO: 188935 - RNA, 78 nt, Homo sapiens
cacaaaggaagacgaaccggagaagagggaagcagcgaaaaaaaagagcgaggggacaaacagacaccagcaaaaggc

SEQ ID NO: 188936 - RNA, 86 nt, Homo sapiens
gagggcagccaccaaaacagacccgggcagcaccagaacacaaaagcgccggggaggcagaaggggccgggagcggcccggcccgg

SEQ ID NO: 188937 - RNA, 65 nt, Homo sapiens
ccggaacaacccaacggaacgcacaagcagcagagcgccacgcgcgcaaaaggacacgggaagcc

SEQ ID NO: 188938 - RNA, 70 nt, Homo sapiens
gggaaaacccccacacggaggggacgaagacaaaaaccaggaaggaagagaggaaagagcggcaaagcag

SEQ ID NO: 188939 - RNA, 65 nt, Homo sapiens
cgcccggggacggggccgcagggaggagcggaagcacaaagccgagcagggagaggaggaagaag

SEQ ID NO: 188940 - RNA, 86 nt, Homo sapiens
ggacgacaaagaggcggcagggaccagcagacgggaaggcaaacgaagccggggcgccagagaccacaccacaccccaccagggag

SEQ ID NO: 188941 - RNA, 78 nt, Homo sapiens
ggacagaagaacagagacagggagaaacacgcccgcaaagacagaaagaaggaaaaaacgcaagaaggaagaaagaga

SEQ ID NO: 188942 - RNA, 59 nt, Homo sapiens
ggagacagaggcagccggggagaaaagggagagcaagggacgcccgccaggagaccccc

SEQ ID NO: 188943 - RNA, 83 nt, Homo sapiens
gccaaggggagcagaaggaccggacacagggcgcaggggcacagcgacgccgggcccccggaccccgcggcggcgggcgggag

SEQ ID NO: 188944 - RNA, 82 nt, Homo sapiens
aacaacaccacaaaaccacagccaagagcgaagaagaacaaagaaaccaccgagagagcacaaagcaaaaaaccaacacggc

SEQ ID NO: 188945 - RNA, 75 nt, Homo sapiens
ggaaacaggcgaaaaacaacgacgaaggaagaaaaggcacaaccaaccaccgccaggagaggccccaggaaaccc

SEQ ID NO: 188946 - RNA, 81 nt, Homo sapiens
caacgacaccaagcggacgcgccggaggaacaagcgaggcagccagcacgagcccccccaccaccacagccccccacccac

SEQ ID NO: 188947 - RNA, 59 nt, Homo sapiens
cggcgaaggagcacgaagaagcaggacaaagcggccagaagaaaagagaggggcccccg

SEQ ID NO: 188948 - RNA, 82 nt, Homo sapiens
acccgcacagggcaacaaaagaacgaggaaacgaagaaccaagcgcgacaccggccaagggggccccaggccccggcagaca

SEQ ID NO: 188949 - RNA, 59 nt, Homo sapiens
ggaggaggcaacgccgcggagcgagagaccaacgggcaagcaaccgaggagaaaagagc

SEQ ID NO: 188950 - RNA, 37 nt, Homo sapiens
gaggcacggacacacaaaaagcccagagagcaaagac

SEQ ID NO: 188951 - RNA, 79 nt, Homo sapiens
aaagggcacaccacacgcaagaggaaaaagaaaggggaagaacaggcaaggaaggcaacaagaaggggaacagcaaagg

SEQ ID NO: 188952 - RNA, 81 nt, Homo sapiens
ggaagcaaagagcgaggaagacggaaacacccagcgggaggaagaagaggccgccagcagcagagcagccaaggggcccaa

SEQ ID NO: 188953 - RNA, 74 nt, Homo sapiens
cccggaagggaaggccagaagcacaaagcgcccgaggcagaggccgcgcgaggaacaacgaagagcaggaccca

SEQ ID NO: 188954 - RNA, 96 nt, Homo sapiens
acagcagacaagaaaagggccgaaagcagaagaaaagggacgcaagaaacccaggacgagaacagcaacaggacgccccacaccccagagacagaa

SEQ ID NO: 188955 - RNA, 61 nt, Homo sapiens
cccagaacaagcggagccaccggcaccacggacacacagcaacgaagcaggggaggaggga

SEQ ID NO: 188956 - RNA, 50 nt, Homo sapiens
aaagcgcgcaaagaaacgaacaacgcgcaaaacaccaggacaaaagaagg

SEQ ID NO: 188957 - RNA, 76 nt, Homo sapiens
cgagacaggccaggcggggaagcaagcggggccacgacgcccgcggcaacaggcaagaaagaaaaaggcacacacc

SEQ ID NO: 188958 - RNA, 70 nt, Homo sapiens
acaacaggcagacagacaaaacgcggaaccccagagaggacagaagccaacgcaaccagccagaggaccg

SEQ ID NO: 188959 - RNA, 66 nt, Homo sapiens
cgagaggcacagcggcgcgcaccagaggagggcccagagcgcgagggggaagcgcaggcgcagcaa

SEQ ID NO: 188960 - RNA, 67 nt, Homo sapiens
agagcaggcagagacagagaagaaacgccgggcaccaccggcagccgaaagagcacaagcaccgacc

SEQ ID NO: 188961 - RNA, 73 nt, Homo sapiens
gacccaccagaaaaagcgaccaaggggaacggggcaaaccaaagaggaacaggacaaagggaaccggaacaac

SEQ ID NO: 188962 - RNA, 61 nt, Homo sapiens
aacaccccaaacagcggcgcacggggcacaacagggcagccaagcaggaccacccaccagc

SEQ ID NO: 188963 - RNA, 113 nt, Homo sapiens
caaggaggagacaggccagcccaaggcagcagccacgacacccaagccgcacaggggaaaaccaagacgagaagaggaaaaaacgcacagcaaacacaaagaacagagcccac

SEQ ID NO: 188964 - RNA, 67 nt, Homo sapiens
gaaaccgaccgaagagaagggacggaagagccaaggagagggccagccgggcagcgccagcgggagg

SEQ ID NO: 188965 - RNA, 66 nt, Homo sapiens
ccacaggaaagcagcgaggaacacaggggacccccgcagccgaagcaagccacacaaacccagagg

SEQ ID NO: 188966 - RNA, 70 nt, Homo sapiens
cccccgacaagaagagggccgaaaacaggaacacggggaggggaggccccgggaccagcccccccgagcc

SEQ ID NO: 188967 - RNA, 75 nt, Homo sapiens
cggaacccgcgcgcgcccacgacgccgaggagcggcagcccacaagcaggaagaccagccccaggagggaaacag

SEQ ID NO: 188968 - RNA, 68 nt, Homo sapiens
cccaaaggggaaacaggaggacaaccggaaacacacaggaacagaccaggcaccccaacaaggcaaca

SEQ ID NO: 188969 - RNA, 78 nt, Homo sapiens
cgaagacacaccccacaggaccccagagcgacagcccgggacaccaagaaagaacgccggaacgccacagcaagggaa

SEQ ID NO: 188970 - RNA, 86 nt, Homo sapiens
ggcgaggaagggcagaagggcacagccacagcgccgagaggaggaagggaaaaggccgaggcacagcgggaagaccgcaaagacga

SEQ ID NO: 188971 - RNA, 74 nt, Homo sapiens
caacaacaccacaaaaccacagccaagagaagaaaccacaccaaaaggcaccggaagaagcggaagcgaacgca

SEQ ID NO: 188972 - RNA, 57 nt, Homo sapiens
cggcggggagggagcccgacggcgcggccagcagggacaaaggcagaagccgaaaca

SEQ ID NO: 188973 - RNA, 83 nt, Homo sapiens
cgggggggccgcgcaggcaaggacaaggccacagagcggggccacgcagcccggagacgaagaggaagacaaaccacagcgcc

SEQ ID NO: 188974 - RNA, 80 nt, Homo sapiens
ggcggccgccccaccgccccaggacagcaccagcgggccggaggagccagagcgcagaaagaccagcccaccgcacccag

SEQ ID NO: 188975 - RNA, 84 nt, Homo sapiens
gcggggggcccgacgacagcgcccgcgggcccagccgacgccaccacgccgcggaggagcgaggagcagcggaggaggaggaga

SEQ ID NO: 188976 - RNA, 80 nt, Homo sapiens
aaacgccacgggaaggcgcgcgagggagcgacacccaagagcagcggcacgaaagaccacagcaagaccacgcccccagc

SEQ ID NO: 188977 - RNA, 56 nt, Homo sapiens
cgaccagacggcagggaggcacaaaggggaacacagagaaaacaaccaagagaaga

SEQ ID NO: 188978 - RNA, 57 nt, Homo sapiens
cgcgagcccaccgccagcgccagagcgagcgccccgcccagacccaacagaggaagc

SEQ ID NO: 188979 - RNA, 67 nt, Homo sapiens
ccacaaaagcagagaacagccacaacgagaaggccgaaagaggggccaaaaacccaagccacgggcc

SEQ ID NO: 188980 - RNA, 33 nt, Homo sapiens
cgaaacgggcaagaacagcacaaaggagcccgc

SEQ ID NO: 188981 - RNA, 71 nt, Homo sapiens
gccggggagcggaggcagacggccggcgcccaggcccaggaggcccaagggccagcgcgccgccaggaccg

SEQ ID NO: 188982 - RNA, 85 nt, Homo sapiens
gggaaagggggccaccagacggagacagcggacaccagagcaagcaaagccagaaaagcaaaccaaagggagcaacaagaaagag

SEQ ID NO: 188983 - RNA, 61 nt, Homo sapiens
gggcgaggaccccagagccaggaccaagcccagaaggaccagaaaggggaccggaccagac

SEQ ID NO: 188984 - RNA, 69 nt, Homo sapiens
cccgcccccgaggcgcagaagggagagaaacagccacccagcgacgggccacgaagaggaagcagaaaa

SEQ ID NO: 188985 - RNA, 68 nt, Homo sapiens
aacagagccaaaaagacccgacgcgagggggggaggagggacaacacacaacgcaggcgcacagccgc

SEQ ID NO: 188986 - RNA, 73 nt, Homo sapiens
gaaggcccgcagaccgaagagggaacaggcacgccccacccgccagccgagcccccgacgcagcacaaagccc

SEQ ID NO: 188987 - RNA, 62 nt, Homo sapiens
gaccggacccagccccagaaggcccccagccggagacccacaccaagcgggaagacagcgcg

SEQ ID NO: 188988 - RNA, 78 nt, Homo sapiens
agggagaagaccaccacaacaagagacaacaccgcgcggaccacaaaccgcgccagaaaagaggggcaaccccccaac

SEQ ID NO: 188989 - RNA, 80 nt, Homo sapiens
cccagggaggcaagcagagcgcggccaagaacagaggaagggcagggccgggaccgaagcggccggggacccgcggaggg

SEQ ID NO: 188990 - RNA, 79 nt, Homo sapiens
caaggcaagaccgaacagaaggaacgacgcggaccagaagccagagcgaggacgccggcaggggaaggacgccgagcgg

SEQ ID NO: 188991 - RNA, 80 nt, Homo sapiens
gcccacgcgagcggcccgagacccgaggaaagaccacagcaagaccacgcccccagccgggggaccaggccgaacgaccc

SEQ ID NO: 188992 - RNA, 73 nt, Homo sapiens
gaacagcaacagagagagaaagaaagaaagaaggccgggagaagcaagaaccgaggaacggcagaaagcaaaa

SEQ ID NO: 188993 - RNA, 84 nt, Homo sapiens
ggcgagcccaggggcagccaccgccaggaccccagaaagccacgagcggcacaggacagaaccgcaaacaacggagccagaaac

SEQ ID NO: 188994 - RNA, 101 nt, Homo sapiens
gggcagcgcccggaccggccgagaggaagacgagccgggaggaacggcccggaaacaggaggacggcggaccccggaggccgagcggcaccgcccccagcc

SEQ ID NO: 188995 - RNA, 75 nt, Homo sapiens
gacgggaagaggccgcccgacaggacccagaccagccaaagagaagaagaaaggaagcaaaacaaagaaaaaaaa

SEQ ID NO: 188996 - RNA, 59 nt, Homo sapiens
caggccccgcccgcaggcccgggcagagccgcccgacacacaaacaaaaaaggaccccc

SEQ ID NO: 188997 - RNA, 71 nt, Homo sapiens
ggacgggaaagcagagaagcacaaacaccagcccgaacgagacgagaaaccggagacccaacaaaggccca

SEQ ID NO: 188998 - RNA, 77 nt, Homo sapiens
gccggacaagcccaggagccgaccagagagcagacaacaggcacaaagagagaaggaacacccacagggcagacaga

SEQ ID NO: 188999 - RNA, 73 nt, Homo sapiens
cgcaaaccgagacaagcaccccgaagcgccgaggcacaggccagacgaaccccagaggcaacgagaaaggcag

SEQ ID NO: 189000 - RNA, 81 nt, Homo sapiens
gcacagcgagacacagcagggcacacgcgccagccagaccaagcccgcggagcggagaaccggaccagaggacaacacaag

SEQ ID NO: 189001 - RNA, 76 nt, Homo sapiens
cccaccccccacaccccccgagcccaccagacaccggccagcacgggaacggagggaaagcgacaaacaaccaacc

SEQ ID NO: 189002 - RNA, 61 nt, Homo sapiens
acagccagggcaggaaggggggggcgacaacggcaccgggaccagcggagaccacaagaag

SEQ ID NO: 189003 - RNA, 73 nt, Homo sapiens
gaccgaggcgcccgcggggcggggaccgccgcccgggcagaggggaagacacacgaagccggcaggaagaacc

SEQ ID NO: 189004 - RNA, 80 nt, Homo sapiens
gacacaagagcaccggagaggagaggcaagagacccagaagaagaagggcaagaagacacagaagcacaaacagcaaaaa

SEQ ID NO: 189005 - RNA, 104 nt, Homo sapiens
aggcaccggggacgccaccggagaagggaggaaaaccaacaagagacgaggacgcgcacaggaaaggacgcggaacaagcaggcagccaggcagcagaaggcag

SEQ ID NO: 189006 - RNA, 58 nt, Homo sapiens
gcggagggaaggcgcgggaggaagaggagcaggacggagggagaaggggccacacgga

SEQ ID NO: 189007 - RNA, 37 nt, Homo sapiens
ccggagcggaaaaacccgggagacagggaaacgaaaa

SEQ ID NO: 189008 - RNA, 83 nt, Homo sapiens
gaaggcggcggcgccaggagcgcggccccgccggcccgggcggcagacccaacaccaacacgaggagaaggcagccccagggg

SEQ ID NO: 189009 - RNA, 95 nt, Homo sapiens
ggcgacagcggcggcgggagcggcgccgagaggccggcgggacgcgggcgccaggaccggccgaacgcagagcccccccccgggagcggaagcca

SEQ ID NO: 189010 - RNA, 59 nt, Homo sapiens
ggaaagagacccagggcgccaaaaacagaacacgcccaggacgggacagaagccacgag

SEQ ID NO: 189011 - RNA, 77 nt, Homo sapiens
aaacccccagagccaggcacaaggagaacacgccgaagagaacaagacgggaagaccaggggaaaaaagcagcggag

SEQ ID NO: 189012 - RNA, 84 nt, Homo sapiens
gaagaaaacaaaggagaacaggaggacgcaggccaaacaaaacgcgaacaacccagccgccagcccagcccagcccagcccagc

SEQ ID NO: 189013 - RNA, 95 nt, Homo sapiens
gaggaggaggaggaggaggaagagccgcaaagaagcaccggaaaacgaaagaaggaaaggccaaacagaaagcagcccgaagccaagaaacagaa

SEQ ID NO: 189014 - RNA, 68 nt, Homo sapiens
gcacaccgaggaggcaagaacagcagaccagaggcccaggccccgcacggcagccgccagccagcgga

SEQ ID NO: 189015 - RNA, 77 nt, Homo sapiens
aacgaccacccccgaacgcccaagaaaaagaaaagggcaccagccccgcgcagaaagccaaaggaaaccaaccacag

SEQ ID NO: 189016 - RNA, 81 nt, Homo sapiens
aggcggaggcaaacggcaaagggagagcaggcggggcaagcaggacagagcgggagccaccagcgccaaagggaagccagg

SEQ ID NO: 189017 - RNA, 62 nt, Homo sapiens
ggagcgaacccgagagcgggagcgggcgggccagggcgcaccggacgcgagaacagaaggac

SEQ ID NO: 189018 - RNA, 71 nt, Homo sapiens
aaaaccaaaacgcaacagaaacaacagggcagagccaagacaggcaaacacacgggggaagaccgacagaa

SEQ ID NO: 189019 - RNA, 76 nt, Homo sapiens
cagagagccccagcaggaaggccaccgagggaacccgaccggacccagccccagaagggcgaggaaccaaagcccc

SEQ ID NO: 189020 - RNA, 95 nt, Homo sapiens
acaggacagcgccggccacccaaagcacgggggcaacagagcccaccacaaaccaaacgagcaagaaggagcgaggcagagccacaggagaagca

SEQ ID NO: 189021 - RNA, 88 nt, Homo sapiens
cggagagcgaagcacgaggccgccaggagcaaacccaacgagccggcagcgcccgagggagcaaggagaagagcggaacccagaccgc

SEQ ID NO: 189022 - RNA, 75 nt, Homo sapiens
acacccgccacggcacaccgcgcgccggcgcgagaagagcagcgagaaggcgcggagcgggcgggagaaggcaag

SEQ ID NO: 189023 - RNA, 68 nt, Homo sapiens
cagacaggaccacgcaaggcaaggccagagaaggcgggagaaagacacgaaccacagaacgcaacagg

SEQ ID NO: 189024 - RNA, 77 nt, Homo sapiens
ccgcacgcgcgccagagggccacgccaggccggccaagagaccaagcgagacggccggccgccacgggggccgagcg

SEQ ID NO: 189025 - RNA, 86 nt, Homo sapiens
ggcggcgggacagagcgccgcgaccccagcgggcccggggaggcaccgacgaggaggaaaccccccaggcaagaggcgcaggaccg

SEQ ID NO: 189026 - RNA, 70 nt, Homo sapiens
gcagacacaacaggagcaggcgacaacagagcaacgggcaggggggaaaagcgcgggcacccagccaggg

SEQ ID NO: 189027 - RNA, 73 nt, Homo sapiens
cgacgaaccggggaacagaccagggacagcgggccacaaaaaccaggacagaagaagaaagaacaaacagccg

SEQ ID NO: 189028 - RNA, 80 nt, Homo sapiens
aagaaacaaggggccagggcagagggcaccgagcggcggagagccgggagaaacacaaagaggcgagcaccgcgggagaa

SEQ ID NO: 189029 - RNA, 82 nt, Homo sapiens
cggggcaaaaacacaagaagagagcgagaacaccgcaaggccccagccaggccggcccacccaccaagccaggccgcaccag

SEQ ID NO: 189030 - RNA, 52 nt, Homo sapiens
ggcgaccagggcacaggaacggaaagcaagagcggcgccagggcgagaccag

SEQ ID NO: 189031 - RNA, 77 nt, Homo sapiens
ggggggccgaaagaaacgagggacgacacagccagcagcagacggcacagcacgaagcagggcaccccgacagcaga

SEQ ID NO: 189032 - RNA, 81 nt, Homo sapiens
cggaccgagaccggaccgagagcggaccgagagcgcgaaacgcacgagaagggaagggacgacgaagaaaaccaaacaaaa

SEQ ID NO: 189033 - RNA, 82 nt, Homo sapiens
aggccccagggaagcgcagaaagcaggcgaacccgcggcgcaaaacggacagggcagaccgccagcagcacagcaagccaca

SEQ ID NO: 189034 - RNA, 87 nt, Homo sapiens
gcggagcggcccacgccccgacggcgaggacacagaggacaagagaggccagggggagcaggcccgggcaagcaccgaccagcaaca

SEQ ID NO: 189035 - RNA, 59 nt, Homo sapiens
gcgaaccaccggccggacgcgggagaccagcggcagacagaacaagaaagggacaccaa

SEQ ID NO: 189036 - RNA, 71 nt, Homo sapiens
cacgccccacgaccgccagaacaaagggacacgcgaaggaaacaagcaaagggccgccagcaggcggcagc

SEQ ID NO: 189037 - RNA, 62 nt, Homo sapiens
gcccccccggaacggcaccacaagcacaggagagaccgccaggccacggaggacccccagag

SEQ ID NO: 189038 - RNA, 81 nt, Homo sapiens
ggcccggcccgacaccgcgggccgccagacgggaagggcggggagccaggaacgggggacaaggagaggcacacacacaga

SEQ ID NO: 189039 - RNA, 61 nt, Homo sapiens
cgacaccaggcgaaccggccacgcacccccgaagccgggggggccccagcccggccgaacg

SEQ ID NO: 189040 - RNA, 78 nt, Homo sapiens
agacaaagccacaaaggagcgaccgaccaaggagggaggggagacaggcagcacaagcagggaccccgaaaaagacca

SEQ ID NO: 189041 - RNA, 67 nt, Homo sapiens
aaggggcgcggcgcaaggccccaacgcaccggaaccagagacccaagaggagaccccagccaggaga

SEQ ID NO: 189042 - RNA, 78 nt, Homo sapiens
cggccggagcgaggggcggaccgcgggcgcccacgaccagggcgacagcaagagggcgcccggaagaggaaaggacga

SEQ ID NO: 189043 - RNA, 59 nt, Homo sapiens
cagacagggcaggccgggccccgccccacgccgaacccccgccaacaaacaaaggcaac

SEQ ID NO: 189044 - RNA, 76 nt, Homo sapiens
caaacacgcccaagccgacgacggacccccggagccagcgaggggaagggcccacccaaacagcaggcagcggaac

SEQ ID NO: 189045 - RNA, 77 nt, Homo sapiens
agaaccgagcgacagagacaagcgagcgccgcacaaaaagcagagagcggggacgagagccccggcacaaacggacc

SEQ ID NO: 189046 - RNA, 82 nt, Homo sapiens
cgagcgcgccgcccggagccgcgcacacgccaccagccaaggacagagggcaagagagacccagccaaggcgggacaaccca

SEQ ID NO: 189047 - RNA, 67 nt, Homo sapiens
gaacaagaaaaccaggacaagaccgcacaagagcaagacaagcaaaggagcccggagaagagacccc

SEQ ID NO: 189048 - RNA, 82 nt, Homo sapiens
gcggcccagcagcgagacacagggggcccacgagaagagcaggcgacgggggagagggagacagcggcgcaaagaagggacg

SEQ ID NO: 189049 - RNA, 61 nt, Homo sapiens
caccaggggaggaggaaaacacacagacgaaggcaaaagagggcaggaggacgcggcggcg

SEQ ID NO: 189050 - RNA, 86 nt, Homo sapiens
ggcaagggagcaccaggagagaaagcaaacggggacagcgccgaccggaacagggaccacggaagcccaggaccagccccgacaag

SEQ ID NO: 189051 - RNA, 80 nt, Homo sapiens
aggcagcccacgcacccagggaaggacagggcacaaggaggcaccccgagggaaggaagaaccaggccgccgccccccag

SEQ ID NO: 189052 - RNA, 67 nt, Homo sapiens
aggcccggaagacggccaggccgcaaggcacaccaccagacacagcaggggccagacaaccagaccc

SEQ ID NO: 189053 - RNA, 51 nt, Homo sapiens
gaagccaccccagaacaaaaacccgcaaaaccgccaccggagagccaccgc

SEQ ID NO: 189054 - RNA, 86 nt, Homo sapiens
gaccaacagaagcgccgcagcaacggcaccccaccacgcagccgaaggcaaggacccccgcccagccgcccagggcgagaacagag

SEQ ID NO: 189055 - RNA, 57 nt, Homo sapiens
gaaacaagacaggaacgccagaacagggggagccccagcagccaacagccacagaga

SEQ ID NO: 189056 - RNA, 76 nt, Homo sapiens
gcaagcgcagcgccacaaacagcgaaggagaggaaaagaggacaaggcaagggaagcacaggacggcaacaaacca

SEQ ID NO: 189057 - RNA, 76 nt, Homo sapiens
gaccaaggacggcgcgcaaaaggacccaacggagccacagaaggagaagagagaggaccccagaagcggccacagg

SEQ ID NO: 189058 - RNA, 96 nt, Homo sapiens
ggaagaggccccgaacaggagaaagaaggcggaacaccacaaggcaccgcaaggcccccacagagagcacacaaacaaagcgaaaccacggaagaa

SEQ ID NO: 189059 - RNA, 81 nt, Homo sapiens
acccacgcagaggcgaagacggggagccacgagaggccggaagagcgggagcgggagccaggcagaaggccaaccaacccc

SEQ ID NO: 189060 - RNA, 76 nt, Homo sapiens
gacggagagcgacaccaaagacgggcagaagcagcgagcacccccggccccagacagccacaccgggaaggagaag

SEQ ID NO: 189061 - RNA, 80 nt, Homo sapiens
ccccaccgcagcccaccccagagaaagaccagggagggcagaacgacgaaagacggacaggacgagggagagggcgacca

SEQ ID NO: 189062 - RNA, 84 nt, Homo sapiens
gcccccagggagagcagccgcccgcgacagccggccgacccccgggacaccccacgaggagcgaaagacccgaaaacaaaggaa

SEQ ID NO: 189063 - RNA, 68 nt, Homo sapiens
acacccacaggacaccgggagcaggcgaagggagcacccccaaggacaccacgagaccaaacccgggg

SEQ ID NO: 189064 - RNA, 72 nt, Homo sapiens
gccccgcccccccccagagcaaggaggcagcacggcaggagacgaggagaggacagcaggacacccggaccc

SEQ ID NO: 189065 - RNA, 48 nt, Homo sapiens
cagcaccgcaagcgaggagcgaagggacaggccacgccaccaaggcga

SEQ ID NO: 189066 - RNA, 58 nt, Homo sapiens
ccggagccacccacaggacccgccaccaaaggcaaggaagaagcaagaaaaagaggcc

SEQ ID NO: 189067 - RNA, 101 nt, Homo sapiens
acgggacaaacggcgggcccgggaagcgggccggcagcgcccggacgaggagcacacccacagaggcagaccgaaaacacccagcaagaagggcgaccaca

SEQ ID NO: 189068 - RNA, 81 nt, Homo sapiens
cggcggaccgcgaggccgcgggcgggggaggcgcgcccggcacgggcccggccaggccccaccgccacaagcaggggaaca

SEQ ID NO: 189069 - RNA, 82 nt, Homo sapiens
cgaacagcggagcaaggcgacgaaccggagagaggagaacgaacaccggaccgccagacaaaccaaggagaaacgaaagacg

SEQ ID NO: 189070 - RNA, 73 nt, Homo sapiens
aaagaacaccaagacggcgaccacaggaaggacacaggcaggacccaccggcccaggggaacaagagaaggca

SEQ ID NO: 189071 - RNA, 75 nt, Homo sapiens
aaagccagcgaaaagggggaaagcaaagcaacaggacaaaagacaaagaggggccaggcccaagcccagcagacc

SEQ ID NO: 189072 - RNA, 75 nt, Homo sapiens
cccagcaaccgacaacgcggcccggcaaaagggaaagcaaggggaagggcccaagaagacaccccaccagaaacc

SEQ ID NO: 189073 - RNA, 78 nt, Homo sapiens
cagaaagacgcaaagaaaggagcacaaacaggaaggagagaaaccaagcaaaagaaggacaacaggcccaacccaagc

SEQ ID NO: 189074 - RNA, 83 nt, Homo sapiens
ggaggaacagaagaaaagccagcccagagcgcgggcggcgacggcggcgcgaggaccgaccgggcccgcggacgaagaaggca

SEQ ID NO: 189075 - RNA, 78 nt, Homo sapiens
ccgaggaccaccacagaaggaagaaggaacggggggccacgacgggccaaagcggagaagacacaaggcgcagcgcgc

SEQ ID NO: 189076 - RNA, 52 nt, Homo sapiens
cgaccgcccacgaagccacagaagggacaagcaaggggccaaggagccaagg

SEQ ID NO: 189077 - RNA, 73 nt, Homo sapiens
agcgcggcaagcgagagaaaccgggcaaccgacccacaggaccgcgaacaaggaggccacaaaacacccggac

SEQ ID NO: 189078 - RNA, 60 nt, Homo sapiens
aagcaaggcaaggcaaaggacccagaggaggccgggcgaggcgaggccacccgggccgcc

SEQ ID NO: 189079 - RNA, 72 nt, Homo sapiens
cggacaacagccacgcacacagcaaaacagcccaggggcacgggcacagcccagaagaccagcgagaggcgc

SEQ ID NO: 189080 - RNA, 83 nt, Homo sapiens
gggggacaacaggacgaagagaacgcccgggaccgagcacccgccccgggcaccaacagcagggcggaacggggaagcggagg

SEQ ID NO: 189081 - RNA, 78 nt, Homo sapiens
gggcgccccacagaggggcgacgccccacacaaggagagcaagcagggagggcccacgaaggacagagaagaaagggc

SEQ ID NO: 189082 - RNA, 64 nt, Homo sapiens
aaacgacacaaaggaggaagcgaaccagaggcccaacaagagagggagacacaccacccacaga

SEQ ID NO: 189083 - RNA, 73 nt, Homo sapiens
acccgccgacgaggaacggcggagcagggagcccaaagaccccggagacaggccccagaggcgcgcccacaaa

SEQ ID NO: 189084 - RNA, 77 nt, Homo sapiens
ggcgacggagccgggaaaggacaagaaaaaagccgccccacaggggagaaaaagacagcacccaaagcagaaccgga

SEQ ID NO: 189085 - RNA, 85 nt, Homo sapiens
gcggaggacggccgcagccggcgggaccgcggccaacggggaacgaggacgcggacgcgaaggcagacaagcagaccggaagacc

SEQ ID NO: 189086 - RNA, 79 nt, Homo sapiens
cacgcacggccccgaaaagccacacacgaggaggggcacggaagcaaaagccacgcccagaacccaggcggagacccga

SEQ ID NO: 189087 - RNA, 81 nt, Homo sapiens
gcaagaagaacagagacagcagccaaacccccagcccacagcgcggcaccgaccccggggggcgcggggggcccagaccaa

SEQ ID NO: 189088 - RNA, 68 nt, Homo sapiens
agaggcaacacaaagacacacgaaccaggaggaaaaagacacaaaggcaacgacaaaaacacaaacag

SEQ ID NO: 189089 - RNA, 89 nt, Homo sapiens
cgggccgcaggggcgcgcagcgcggggagcgccaggaggagccgaggaaggcgccaccacgaccgccgaaccggaaggcaacccgcccg

SEQ ID NO: 189090 - RNA, 74 nt, Homo sapiens
cagggcaacaccaaaaacaaaacgaaccaggacggcaagagcgaggaggccagaccggaggagccggggaaaaa

SEQ ID NO: 189091 - RNA, 64 nt, Homo sapiens
gcgccccaagcgcagccccggaaggcgcgccggggccccagcaaagcaacagcaggagggcccc

SEQ ID NO: 189092 - RNA, 77 nt, Homo sapiens
ggacaccggcggcccagagccgggggccccgggcaacgacgacgcggaccccgacagagcccccgcccacagcaggg

SEQ ID NO: 189093 - RNA, 107 nt, Homo sapiens
ggccgcccgggacccccccaccgcgggaggagacccagcggcgccgcggagggaccccaccccgggaacagagagaccagcgccccacaagaaacccaaagaaggga

SEQ ID NO: 189094 - RNA, 47 nt, Homo sapiens
cgacgacccgaccacggcggagcgccgcaaggcacagccagcccgcc

SEQ ID NO: 189095 - RNA, 36 nt, Homo sapiens
aggaaacaaacacaaacgggaacaaagaaccaggag

SEQ ID NO: 189096 - RNA, 33 nt, Homo sapiens
gaaggaccaagaaccagcacagcgagagccaac

SEQ ID NO: 189097 - RNA, 85 nt, Homo sapiens
ccagccgaagacacaccaagggaaccagcccacccacagcccgccccaagcccccccgaagggcggaccacccgaccggcccaag

SEQ ID NO: 189098 - RNA, 43 nt, Homo sapiens
gacccaggccgccggccccacaggaccagcacacggaagacag

SEQ ID NO: 189099 - RNA, 74 nt, Homo sapiens
cagagacaaagccaggccaagggaccaaaaccggcaaaacaaggccccggagaccaaaaccgggagcaaacggc

SEQ ID NO: 189100 - RNA, 58 nt, Homo sapiens
accggccgggcaccagccagcaaaccagagaagggaagaaagcggaggcggcggcgcg

SEQ ID NO: 189101 - RNA, 87 nt, Homo sapiens
gcggagaccgcacgagggcacccacaccacgacaccgaaaacccaccgagcccgccaaaggcgcagagacgcaagcggaagaacagc

SEQ ID NO: 189102 - RNA, 79 nt, Homo sapiens
gccgaccgccgcccgccacacccgccgccaggaaaaaagccaggggccagcggcgcagcggagaacagagaggacccca

SEQ ID NO: 189103 - RNA, 76 nt, Homo sapiens
ccgcgccagggcgcggggccgcggccgcgcgagcagcgccgcggaacggccgagcgaccaggagaggagcccccgc

SEQ ID NO: 189104 - RNA, 77 nt, Homo sapiens
gggggccggcggcggcgcgcggacccgcacccgcaccccgaggagccgaggagcgggggcgaggaagagacaggcgg

SEQ ID NO: 189105 - RNA, 80 nt, Homo sapiens
cagaagcaccgcagcccgcagcccaggggaggcaagcaggggggcaaaggaaagaaggcagaaagggaggccaggagcgc

SEQ ID NO: 189106 - RNA, 34 nt, Homo sapiens
aaggaccaagaaccagagcacacgggcccaggaa

SEQ ID NO: 189107 - RNA, 125 nt, Homo sapiens
ggaaagaagagcagcagagagaccgaaagaaagacaacccgaaagaacaccgaaccaggcaggcagcgccaggcggcaggcggagccgccgcagcccccgagacagcgcagcacagggcgcggcc

SEQ ID NO: 189108 - RNA, 75 nt, Homo sapiens
gaaagacggaaccaggaagagagacgacgggcaacagacaggacgcacgggccagacacacagagcaccggcgac

SEQ ID NO: 189109 - RNA, 65 nt, Homo sapiens
ggacagagagccagaaacgaaggaaagacaaggagccgggccgagaaaccgaaccagagaccaga

SEQ ID NO: 189110 - RNA, 79 nt, Homo sapiens
acaaaagggaaaaaaggacggcagcacacaacaaaacacaggagggggaaccgaaagacagagaagcaacaacccacgg

SEQ ID NO: 189111 - RNA, 66 nt, Homo sapiens
gaacgcacacacaggcccgggggcgaaaaacaccaccagggcaagggaaggggcagggccaggcaa

SEQ ID NO: 189112 - RNA, 46 nt, Homo sapiens
accagacagacgcgcaaaacccagggccgagaagaagcggggacgg

SEQ ID NO: 189113 - RNA, 78 nt, Homo sapiens
gccagcagcgcgcggagaagaacggggagccaggcgcgcgaccgcccaggcggggaggacaagaggagaaccgcaaag

SEQ ID NO: 189114 - RNA, 72 nt, Homo sapiens
ggccaaagaagggagagagggagcggagaaagagacaacacggccagggaagcacagcagagaagcgggagg

SEQ ID NO: 189115 - RNA, 80 nt, Homo sapiens
ggagaggggaacagacgcagggcagggccccgcccggcggggaagccacgaaccgacggggaccccaagaggaaggaacc

SEQ ID NO: 189116 - RNA, 72 nt, Homo sapiens
gcggccagccgaccggaacgaagggagaagaaaagcaacacagcgaccagaaaaaacagggagccaccagcc

SEQ ID NO: 189117 - RNA, 75 nt, Homo sapiens
acgcccaccccccgaacccagccgcaccgaaagccggccccgacgcgggccccggagcgggcggggaggagaccc

SEQ ID NO: 189118 - RNA, 71 nt, Homo sapiens
cgccaccggggggagacgccgagggacccacacaaccaccagcggacgaacagaaagcacgaccgcgccaa

SEQ ID NO: 189119 - RNA, 68 nt, Homo sapiens
aaacgacaaaacccgaagaaaaaacggaacaagccagcaaaagaagaaagcggggaaaaggcccgagc

SEQ ID NO: 189120 - RNA, 71 nt, Homo sapiens
gggaacgccaccacacaggagaacgaacaagaggcagagaaggcccggcgaggagagaccgcgagcgcagg

SEQ ID NO: 189121 - RNA, 80 nt, Homo sapiens
gggcaccgggaccgagcgggaagaagcgcgccagacacagcggaagacgcagagggagacaggggaccagcggggacaag

SEQ ID NO: 189122 - RNA, 83 nt, Homo sapiens
agagccaggcaccaggacagcggcggcgggccgggcagcccggccgacaaccacgggggagaggcaccagcaacagaccaacc

SEQ ID NO: 189123 - RNA, 60 nt, Homo sapiens
gcagcgaccacccacacaaacccgggacgggccgagagggggagggaagcagccaagcgg

SEQ ID NO: 189124 - RNA, 31 nt, Homo sapiens
cggaaaaacgcccaagaaagagagcagaggg

SEQ ID NO: 189125 - RNA, 70 nt, Homo sapiens
acggcagggaacgaccgggaaaccggaccaccaaaaaaaccggccgggcggcggcgagaaacaccacccg

SEQ ID NO: 189126 - RNA, 35 nt, Homo sapiens
gaacagcacgcccaagcagagacggaaccaccggc

SEQ ID NO: 189127 - RNA, 75 nt, Homo sapiens
gaaagcggccagaggggagaagagcgacagagaacgacagagcaggaccagaagcgccaaacgaggcgaagaagc

SEQ ID NO: 189128 - RNA, 79 nt, Homo sapiens
acgagcgaggccgcaggggagcccggcagccgcccgagggggacagacaacagagcaacgcaacagggcacaagacagg

SEQ ID NO: 189129 - RNA, 82 nt, Homo sapiens
cgaggacaccgcccagcccgagcaggccaacccaggccagacaacggcaagcggagaagagcaaggccgaaccgagaggaag

SEQ ID NO: 189130 - RNA, 83 nt, Homo sapiens
gcggagcgcccagaggcgagcccggggaggaagaggacaggaggaggaaggcgagcgagagagaccgggagaagcagagaggg

SEQ ID NO: 189131 - RNA, 77 nt, Homo sapiens
cacgcagcggaaaaagaaggccaggcccaaaaacaaggaggacagggcagaccgccagcagcacagcaagccacaga

SEQ ID NO: 189132 - RNA, 77 nt, Homo sapiens
gaccccaaggaagccacggcagacacacaacccgacccgacgaagaccaagagggccggaagagacaaaggaacgga

SEQ ID NO: 189133 - RNA, 47 nt, Homo sapiens
gaacaaaaaagggacaggggggacaggagccaggccaagagaaagaa

SEQ ID NO: 189134 - RNA, 77 nt, Homo sapiens
agacccagccgcgccgaaaggccagacacacggccccgaaccgaaacacaccaggagagagcgcgcagagaacagaa

SEQ ID NO: 189135 - RNA, 81 nt, Homo sapiens
cgccgaccaacacgcaaagaacaaaccaaaccacgaaggccaagagagggcagcgaggcacaggccccaccgcgaggcgag

SEQ ID NO: 189136 - RNA, 51 nt, Homo sapiens
agaagaaagcaaggcgggaaccgagaaaagcccacccaacgaccacagcgg

SEQ ID NO: 189137 - RNA, 65 nt, Homo sapiens
agaggagaccacaaccaccagaagaccggcgaaacagcccaccgggcaggacccgaggcgccagc

SEQ ID NO: 189138 - RNA, 73 nt, Homo sapiens
aacgaacaaacgcacggacaaggcaccagcagaacagacacccccaaagaccagacacgagggcaaaaagagc

SEQ ID NO: 189139 - RNA, 73 nt, Homo sapiens
cgaacccagccgcaccggcaggagacgcaaaacacgggaggaaggaggcaggcccaggccacccagcccaccc

SEQ ID NO: 189140 - RNA, 56 nt, Homo sapiens
caagcccacagaaaaagacgaggagaagacccaggaggacaacagccggaagcacg

SEQ ID NO: 189141 - RNA, 41 nt, Homo sapiens
aggagggcgcgagaagacaaaggaccaaagggacacagaag

SEQ ID NO: 189142 - RNA, 75 nt, Homo sapiens
aggcggaaccaagccccagccggagaaggagcccacaacaaccacaggccacaaccccaggccggcagacccaac

SEQ ID NO: 189143 - RNA, 73 nt, Homo sapiens
cgacacggcacccgggaagccgcgacagcaacacgcggaaaaacccaacagccaaggacagaggaccaaagcg

SEQ ID NO: 189144 - RNA, 65 nt, Homo sapiens
cgcgaccgaaagaagaaagcaccacggaggacggaggaggcagaggaagaggcacggccagccca

SEQ ID NO: 189145 - RNA, 72 nt, Homo sapiens
cccgggagacccaggcgggacagagggagccaggcagagggaccaccacacgaaaccaaggaaaaaccggga

SEQ ID NO: 189146 - RNA, 66 nt, Homo sapiens
aaggaacgaacccccgcaacagggaagggaagccaccgcaaaaggggacgcaacggccacagccaa

SEQ ID NO: 189147 - RNA, 65 nt, Homo sapiens
ggacgaaagagcaccaacagccaaggaacggcccaaacacagaagaaagaaaaaaagacacacca

SEQ ID NO: 189148 - RNA, 75 nt, Homo sapiens
cgaccaaccgcaggggacgccacggggaacggcacagggaggggacagaccaaccggcagccaaccgcacaaaag

SEQ ID NO: 189149 - RNA, 64 nt, Homo sapiens
cgagccgccggcccgccggggccggggcgcccgacccgcccgcccggacggcagcgccgcccac

SEQ ID NO: 189150 - RNA, 84 nt, Homo sapiens
cagggaccgggccaagacgagcgacaggagcacacccggagaagcaggagcccaccggcaggccgaagaccccaagaagagaga

SEQ ID NO: 189151 - RNA, 81 nt, Homo sapiens
cggaggccgccggcgagccgccaagaggcggcgcagccaccccgcgggaacgcccagcgcggccgaaagaagaaaacccga

SEQ ID NO: 189152 - RNA, 80 nt, Homo sapiens
aaaccaaagaaaaagggagaagcgagaacgaacaacgacggagagaggacacgcagcacaagagcaaagcagcgccggga

SEQ ID NO: 189153 - RNA, 80 nt, Homo sapiens
agagcgaggccgagcaacaccgcgagccgcgcggcgcggggccccgcggcggagagcccagaaccgccccagacaaggcc

SEQ ID NO: 189154 - RNA, 71 nt, Homo sapiens
aaggcaagcacagccagcgaccaaaaacagaaacccagagacccgggaagaccccacaagggaagggacga

SEQ ID NO: 189155 - RNA, 65 nt, Homo sapiens
cggcgccaacgcccaccgaacggccagagaagccgagaagaaaccgcaagaaagaaagcgggcac

SEQ ID NO: 189156 - RNA, 77 nt, Homo sapiens
cgaaacgccgaaaaacccaagcgggcgaggaccccccaggacgccggacaaagggaaggaggaccgcgagaacaaga

SEQ ID NO: 189157 - RNA, 61 nt, Homo sapiens
cagagggaaaagaacgggagaaacagggagaggcgaaggcgaaaagccaggagcaaaagac

SEQ ID NO: 189158 - RNA, 62 nt, Homo sapiens
accgagcgggaagccgcacggcaccagcgcaagcggcccacaagacagaccagagacaaagc

SEQ ID NO: 189159 - RNA, 80 nt, Homo sapiens
aggcgaaggagcggccgggagcccgccgcgcggagcgagaccccaacaggcccgaccaacaaagaaacccaacagacgga

SEQ ID NO: 189160 - RNA, 72 nt, Homo sapiens
accagggaaaacccaaaccaaccccagaccggagccagacagcagccaaggcggagacaacagggggaaaac

SEQ ID NO: 189161 - RNA, 76 nt, Homo sapiens
caggcggaaccaagccccagccggagaaggagcccacaacaaccacaggccaaacgccggcggacagcaagacagc

SEQ ID NO: 189162 - RNA, 76 nt, Homo sapiens
cagccacagccgcagccaagagcaacaggaaagaacacagcagacaacccagaaaagaaaaggccaggggcgccga

SEQ ID NO: 189163 - RNA, 77 nt, Homo sapiens
agcccccgagggcgggacacaggagccgggcaacccgccccagcggaagaggcggggcccacgagacggaacgaggc

SEQ ID NO: 189164 - RNA, 68 nt, Homo sapiens
ccgccggacacacaccggaaagaggaccggaccaaggccaggaggggaggagggagggccacggcaag

SEQ ID NO: 189165 - RNA, 46 nt, Homo sapiens
gcccggagcccgccacccgacgggggcagacccaaaggaaacgcac

SEQ ID NO: 189166 - RNA, 75 nt, Homo sapiens
caaaccgccgggagcagccggacaagagaccacacccaggaagccaggcacgcacagcaccagccagacaaacaa

SEQ ID NO: 189167 - RNA, 66 nt, Homo sapiens
ccgcacgaggccccgaaaccggaaccgcaggaggcacacccgccagccagcggcgcccggggcaac

SEQ ID NO: 189168 - RNA, 75 nt, Homo sapiens
gccggccagcgccggaaaccaacaaacacagggagggaagccggaccgagacaagggagagaaccaccaagcacc

SEQ ID NO: 189169 - RNA, 81 nt, Homo sapiens
gaacggaggcagggggagcgccccagggaaagaagcggaaaacaggaggaggaggcaccgccccgggaagaagacagagag

SEQ ID NO: 189170 - RNA, 43 nt, Homo sapiens
cccggagagaagagacaggccaggccccgggaccaaggacacg

SEQ ID NO: 189171 - RNA, 67 nt, Homo sapiens
aaagaaggaaacaaagccgccacgcccccccaaacggacagaggcggaaggccgcggaccccccccc

SEQ ID NO: 189172 - RNA, 76 nt, Homo sapiens
ccgaaccagggcaaaaccacggcacgagaaacccaccacacaagaaccccaccaggcggcagacgcagacaaacaa

SEQ ID NO: 189173 - RNA, 49 nt, Homo sapiens
aaaaagagaacacccccgagcggagacagaaggaagaaaccaaacgaaa

SEQ ID NO: 189174 - RNA, 74 nt, Homo sapiens
agaagagccgcgggaccccccagcccacgagccgcgcggagccagcgcccggcaaggagcgagcgggagacacc

SEQ ID NO: 189175 - RNA, 74 nt, Homo sapiens
cagcaaaaaaccaaaaagacccggaggaaaccaaagcggcgcaagcaggagcgaaaacgccacaacagaggggg

SEQ ID NO: 189176 - RNA, 72 nt, Homo sapiens
aaaagaagaaggcgagacgcgaaaagagcggggaagcaaagggcacacaccacacagcagcacaccgcacaa

SEQ ID NO: 189177 - RNA, 78 nt, Homo sapiens
cgccaacaaaccaaaaggcccgagagcaagaagaggaagagaaaaagcccccaggagacgcaacccagaagaacaaaa

SEQ ID NO: 189178 - RNA, 82 nt, Homo sapiens
gcgccgcgcaggagccacggagaagacggggccgcagcgggcccgagggggcccggaagcgaagccagcagaacccgaccag

SEQ ID NO: 189179 - RNA, 61 nt, Homo sapiens
cccaccaggacgaccgcgccgcccagcacgccaggacacgcaaacccgcgggcaacccgac

SEQ ID NO: 189180 - RNA, 74 nt, Homo sapiens
cacgccccccgggcggcaccagagcgcggacgcccaggcggacgaggccggaggagaacaaaaccccgacacgg

SEQ ID NO: 189181 - RNA, 60 nt, Homo sapiens
ccgcagccggggacgcagacgaagggaggaaaaagggccaacacccagaaacaagaccgg

SEQ ID NO: 189182 - RNA, 108 nt, Homo sapiens
ggggaggaagcccccccggcacgacaccgccccaacccacgagaggacagcccaggaccacgcaccaggggaggcagggcacaacacagcagcagcccaaccccgggc

SEQ ID NO: 189183 - RNA, 70 nt, Homo sapiens
ccagaccggcagaagacagcgccaccgcccacacggccacagcggggaagaaacacaggggaaacacgag

SEQ ID NO: 189184 - RNA, 70 nt, Homo sapiens
agaagaagaccacaaaaaagagacccacagccagcaacaccggaaagaaaggcaaagcgagcaagaggga

SEQ ID NO: 189185 - RNA, 67 nt, Homo sapiens
aaagcccccaaaagcagcacagggggagcgggccggagagaagagaggggcgcgaggagaaggaaac

SEQ ID NO: 189186 - RNA, 67 nt, Homo sapiens
ggaggcgcggaggacgccccaccgccgacgcccccagccaccagggaaccagacaaaccgggaggac

SEQ ID NO: 189187 - RNA, 79 nt, Homo sapiens
cgagccagccaacagcagaagagaaagccagaccacggacggaagacaaaagaggcgagacccgaacagaccgaagccc

SEQ ID NO: 189188 - RNA, 92 nt, Homo sapiens
cccgcccggcccaacaggaccagagaaaccagaagcccaagggacaagggcaacaaggccgcaccccagagcagacaggggaaggagccggc

SEQ ID NO: 189189 - RNA, 79 nt, Homo sapiens
aaaagggaaggaacaacaaacaacgggaagaaaagaggggaaaaggaaaagacagcaagcggaaagggagcagcaagga

SEQ ID NO: 189190 - RNA, 63 nt, Homo sapiens
ggccgcggaggggcacgagcgccacaaccccagcaaggcgccaccggaagaaacgggagggga

SEQ ID NO: 189191 - RNA, 80 nt, Homo sapiens
ccaccaccccagccagccagcaggccccaacaggaagacccgcggaaggcacacaagacacagccaacaccgaaccgaaa

SEQ ID NO: 189192 - RNA, 71 nt, Homo sapiens
caacgacacacccagcccaggggaacggcgagggaacccaggaaggagggcgacaaacaccagccggcaca

SEQ ID NO: 189193 - RNA, 73 nt, Homo sapiens
aagaacaaaacaagcgaaagagcgggcgagaaagcggaaagagaagcgaggaaacgcacacaaaccacgagaa

SEQ ID NO: 189194 - RNA, 80 nt, Homo sapiens
cagaggcggagcccgcagaccgcagaaggccggagacaccagcaggcgacagggggaccgcggcgcgagggacgcaccgc

SEQ ID NO: 189195 - RNA, 51 nt, Homo sapiens
acacgccaagaggcacagagcggccgaaaagacgaggcgaggaggcgagac

SEQ ID NO: 189196 - RNA, 61 nt, Homo sapiens
gcagggcgccggggccccggagacccggaggaggaagaggggggacaagaggagagagccc

SEQ ID NO: 189197 - RNA, 78 nt, Homo sapiens
ggagacggggcgagcgggcgacggcgcccggcaaggacaagccacagaaagcccgccccagacagggccccggcccgc

SEQ ID NO: 189198 - RNA, 54 nt, Homo sapiens
ggaaagcgccccagggcacaggagaagaaaggaagagacgacagccagcaggca

SEQ ID NO: 189199 - RNA, 74 nt, Homo sapiens
cgcaaaacaggaccccgcggagaccccgagaaaccgccgaccaagagcgaagcgacggaaagggagcaacaaga

SEQ ID NO: 189200 - RNA, 79 nt, Homo sapiens
gcagaaccagggaaaccacaaacaggaagcagaaacaaggagggaacagaaccagggaaaccagaaggcacgacggccg

SEQ ID NO: 189201 - RNA, 69 nt, Homo sapiens
cccggcagccacaggcggaggcggccggaagaaaacgcccacccggaccacagaaccaaggcacagaga

SEQ ID NO: 189202 - RNA, 77 nt, Homo sapiens
aaaggaaaacgcggaaaaccgacacaacaggggagaagcagaccgcaccaggcgggaccccgaaaaagcccaaacag

SEQ ID NO: 189203 - RNA, 68 nt, Homo sapiens
aaacaaaggcggccacgcgcggcgccgccggaaacaaacagaagcgcacgagaacccaggccgcaagg

SEQ ID NO: 189204 - RNA, 81 nt, Homo sapiens
gcaggagacgagaccacccggcaaaacggaccaagcaggagacaaacaaaggacagggagaccccaagcgagaaaacagcg

SEQ ID NO: 189205 - RNA, 76 nt, Homo sapiens
accgaacgaggcgccaccggccagcccgcgcccccggacaacccaaaaaccagggaaaagagcccagagcacaagc

SEQ ID NO: 189206 - RNA, 80 nt, Homo sapiens
cccccgacgcgccgggcgccacaacgacaagccagggaagcacagacggaccacagccagggcacaagaccccacccgag

SEQ ID NO: 189207 - RNA, 53 nt, Homo sapiens
aggagaaaacacaaccgagacaccaaaaagccacgaggcaggggaaacaaaaa

SEQ ID NO: 189208 - RNA, 55 nt, Homo sapiens
ggacaagcaccagggacagcgacaaggggcaagaaagaggagccccacagagaag

SEQ ID NO: 189209 - RNA, 84 nt, Homo sapiens
aaagcaggaggaggcagcggcccggggaagacgacccagaccccaggacagggccggaagccagacaaccacggcccaccagcg

SEQ ID NO: 189210 - RNA, 77 nt, Homo sapiens
aagaacacaaaaaccaaaaaaggaaaccagacccgcccccaggaggcagacagagacggagaccgccggccaggcca

SEQ ID NO: 189211 - RNA, 81 nt, Homo sapiens
cgaggaaaaggagagaggagcacgaaagaaagaaacagccaacccagagcaggaggccaagcggcagagagccaagccaag

SEQ ID NO: 189212 - RNA, 85 nt, Homo sapiens
ggccgggcgcagaacccccagaccacagagaagaggccgggcgggaggggccagcccggcagaagcagcccagcaacagaaagcg

SEQ ID NO: 189213 - RNA, 53 nt, Homo sapiens
cccagcgcgcgcccggacagacaagaggacggaagcaaagggcagccaccgaa

SEQ ID NO: 189214 - RNA, 77 nt, Homo sapiens
agggccgacaagcggaccaagccagacccaagggcgcaggcccgagaccaccaacaccagagagccgcacaacaacc

SEQ ID NO: 189215 - RNA, 80 nt, Homo sapiens
acaccccggccaaggacaccacagccccgacgaacacggggacaccaacaggacccgggacagagaaaaagggccacaga

SEQ ID NO: 189216 - RNA, 67 nt, Homo sapiens
cgacggcacacagagagaccgaggaggcaggcgacaacagaggagaaggcgaagaaaacagccaagc

SEQ ID NO: 189217 - RNA, 77 nt, Homo sapiens
ggacccgcagccacggaccgcccaaccgcgacgccgagcaacccccggccaccgaaggggggccccggcggcggcag

SEQ ID NO: 189218 - RNA, 79 nt, Homo sapiens
cacggcgcgaaagccagggaagcaaaagagccaacacccaggccaggccgcccggaaggaggccgccacgccccgccgc

SEQ ID NO: 189219 - RNA, 78 nt, Homo sapiens
aagccaggaagagcccagacccgaggaaggccagaaagggccgaagcaaagccagggagggaaccgaagccacgggcg

SEQ ID NO: 189220 - RNA, 67 nt, Homo sapiens
cccaggacaaaaggggccggccagaacacacagaaaagggccaaaggaagaagaagggagcgacaaa

SEQ ID NO: 189221 - RNA, 96 nt, Homo sapiens
ggccgagaggaagacgagccgggaggaacggcccggaaacaggaggacgacaaggcacgaggcgcggcgaccaccacagcagagcccggcgaagga

SEQ ID NO: 189222 - RNA, 75 nt, Homo sapiens
cacagggccgaagaaggcaacgccgacccgaagacccggacgccagacaacacagggacacaacaaacacaaccg

SEQ ID NO: 189223 - RNA, 79 nt, Homo sapiens
ggacgaccagaaacacaggggcgaagcgaaccgcgaccgcggcagcgcacaagagagcgagaagacgccggagcgagga

SEQ ID NO: 189224 - RNA, 70 nt, Homo sapiens
cggagcgggagccaggaaggaaggcccaagaacaagacaccagcccaagacgccgccagccaccggcgcg

SEQ ID NO: 189225 - RNA, 59 nt, Homo sapiens
gcggagccgcagagcgggcaccaggacgaaggagacgcaggagggagagcagccagagg

SEQ ID NO: 189226 - RNA, 74 nt, Homo sapiens
gggagcagaggaaccgacgacgggggccccggaggccgcgcggagggacagcggaggaacggaggccagaggga

SEQ ID NO: 189227 - RNA, 107 nt, Homo sapiens
aggcggccgccgcccgcgcaggcccacgcaccgccggcgccaccgcccacgcaaggaccagagaagacacacaacaaccccacggagccccaccggaaggagaaaac

SEQ ID NO: 189228 - RNA, 73 nt, Homo sapiens
cgaaccccggaggggaggcacagaccaaagggacacagaagacaaagcaggacgagaccggcggggcaggacc

SEQ ID NO: 189229 - RNA, 81 nt, Homo sapiens
aggaaggagaccaagaggagcgcagaagacgccagcccaccagcacaagcagaagaaaagaccagagccaaaaggaaacca

SEQ ID NO: 189230 - RNA, 77 nt, Homo sapiens
gcacagacggaagcaaggaacaaaccgaagaacagcgggaaagaaggcaaaacacggggggaaagggaagaagacag

SEQ ID NO: 189231 - RNA, 79 nt, Homo sapiens
cagcagccaggcaagccgcccgccaacaacggcgccaagagcccaccgggggggaccggaagcacacccacagaggcag

SEQ ID NO: 189232 - RNA, 76 nt, Homo sapiens
gaacggaaacagaggaggaccccaggaaaggcagggggacgaccaccagccaggccggggacaaacaggcaaccga

SEQ ID NO: 189233 - RNA, 65 nt, Homo sapiens
accagcagccgccaaagagcaccggccagaacaagccaaggagccaagacgagagggacacacgg

SEQ ID NO: 189234 - RNA, 72 nt, Homo sapiens
ccaaaccacccagacaagccacccaccgagcagaaaccccgcacacgaaggcccccacaagaagacaccgcg

SEQ ID NO: 189235 - RNA, 83 nt, Homo sapiens
gagagaaacacggagacagcaccaaacccacagaggcacgagcaagaggagccaggagcacggggggaacaagaccgccggga

SEQ ID NO: 189236 - RNA, 75 nt, Homo sapiens
ccccagaggccaggcagggagcagggaccagcgacgcacccaagcccggcggggggagcgcccgcggggaacaaa

SEQ ID NO: 189237 - RNA, 76 nt, Homo sapiens
cgcaggcccggccgacggccacacggcggccgcagggcgccggagccccccagaaacgcgaagacgacgagcgcac

SEQ ID NO: 189238 - RNA, 64 nt, Homo sapiens
ggaggaagcgacgcccagcaccacagcccgcggacaacaagcggaggccacaggacaccgcagc

SEQ ID NO: 189239 - RNA, 83 nt, Homo sapiens
aagcgggaacgcaggacccaaagccacacgacagacaacaacaggcaggaccccaggaaggccagcgcccagagaacgcacag

SEQ ID NO: 189240 - RNA, 41 nt, Homo sapiens
agggacaccgcagagaggcagagggcggagaacggaaaagc

SEQ ID NO: 189241 - RNA, 66 nt, Homo sapiens
gccagaacacccaggcgacagcaccaccacccacccggaacaccgcgaaagcggaccaaggcggag

SEQ ID NO: 189242 - RNA, 64 nt, Homo sapiens
accaaaggaaaacagacacgacccaaggcacaggaaacccagcagcgccggacccgggaagaac

SEQ ID NO: 189243 - RNA, 51 nt, Homo sapiens
aaaaaacaggacacagaaggaggcaacaaaagaccacccaagaagaccaag

SEQ ID NO: 189244 - RNA, 76 nt, Homo sapiens
gcccaacacgccagacggcagaaaacggacagcagaccacagcccggcaggcccaaaaacccaaagggacagaagc

SEQ ID NO: 189245 - RNA, 73 nt, Homo sapiens
cgccagggacccggcaggccgcccccggcaagggcagcggggaagaagaaaaggaaccgaggccccccggcga

SEQ ID NO: 189246 - RNA, 56 nt, Homo sapiens
ccagcggaaaggagcgcgcccggcggggagcgcagcgcgaagccgaggccgccagc

SEQ ID NO: 189247 - RNA, 63 nt, Homo sapiens
cccaggcgcccgcccgggcgcaacgccaggaaagagaagaagggcaagaaaacagaggaaaag

SEQ ID NO: 189248 - RNA, 70 nt, Homo sapiens
cacgcccacagaggcagacccgcagccacacagggaacaccagaggcgggaccacgggcagcgcccaggg

SEQ ID NO: 189249 - RNA, 74 nt, Homo sapiens
gccgccccggggacaagaaacagagcaaaaaccggaaaggcagaaccccagagagggaggagaaggaccgagag

SEQ ID NO: 189250 - RNA, 123 nt, Homo sapiens
ccgggcccgcgcgcccggccaagaggcaaaggggaggacgcagcaaaccaccagaaggggcgggccccggccagggcccaggcagccggggcggaacccccagacagcacgcgacaaagaaca

SEQ ID NO: 189251 - RNA, 77 nt, Homo sapiens
cgaggccggcagcacgaggaccccaaacagaccacccccggcgcggagaaccgaacaacggccgcgaccagaaaaag

SEQ ID NO: 189252 - RNA, 84 nt, Homo sapiens
aggcaccgggacggaccgagaccggaccgagagcggaccgagagcgcgaaacgcacgagaaggacaggcaaggagccaggccaa

SEQ ID NO: 189253 - RNA, 41 nt, Homo sapiens
cgaagagaagggggacaaagggcgcggaaagacagacaaca

SEQ ID NO: 189254 - RNA, 63 nt, Homo sapiens
gcgcacggaaagagcaggcggcggcggcggaacgccaggcagggaaacaggccagccacgcag

SEQ ID NO: 189255 - RNA, 60 nt, Homo sapiens
cgagcgcgaggaaaaggcggcgggagagaccgcggccaggagccaagaagaccagaccgc

SEQ ID NO: 189256 - RNA, 84 nt, Homo sapiens
gaaaaagcgcccgagacgggcccgccgaaaggagaaagacagcaaagaaaaggagaagaaaggaaaaaaacaaccccgggcacc

SEQ ID NO: 189257 - RNA, 80 nt, Homo sapiens
acaccccggaccgagggacgcggaaaccccaaggcgcagacaccgacggagcgggagccagagagcgccgccaccagagc

SEQ ID NO: 189258 - RNA, 75 nt, Homo sapiens
ccccccccgcccgcccaacacagacagacgccacgccgccccggccagccccaggaccgagcagcggccgccgag

SEQ ID NO: 189259 - RNA, 68 nt, Homo sapiens
accaagagcaacagaccacgagaagagaacgagcggaagaggcagaagccgaaggagaggaagagaac

SEQ ID NO: 189260 - RNA, 73 nt, Homo sapiens
gagacggcggcagcagcggcacagagaggagagggggcaaagcccaccccccacaccaaggacgccacgaaac

SEQ ID NO: 189261 - RNA, 78 nt, Homo sapiens
gccgaaccaggaccggacccggacccaaaggccagcaaccccacggacacagaccgacccagcgcggaagacaagcca

SEQ ID NO: 189262 - RNA, 86 nt, Homo sapiens
aacagacagcagaaagggccaacgaagcaacagcccgccaagacccacaaaagagggcacaaagcgggggaggggacgagcgggaa

SEQ ID NO: 189263 - RNA, 61 nt, Homo sapiens
acggggagcaagaacaagaacaagcgggaacccacacccaagaggaggagcaggacaaaac

SEQ ID NO: 189264 - RNA, 83 nt, Homo sapiens
cggaccaaaagcccgggcccccgacgcagcaaacaccagccaggagaacaaccgcaacgaacaaacaggagacagagagcaag

SEQ ID NO: 189265 - RNA, 56 nt, Homo sapiens
aagcgacacaaggagaaaaggcagaacaagaagggcaaccaggggggaaggaggga

SEQ ID NO: 189266 - RNA, 78 nt, Homo sapiens
gaaaacaccccaaaagccaaaagggaaaggaaaagaccaacaacagcgcaggacacgagacggcggaggcagggggac

SEQ ID NO: 189267 - RNA, 40 nt, Homo sapiens
ccgcgaggaccccaacagcgggccggcccagccgagggcg

SEQ ID NO: 189268 - RNA, 88 nt, Homo sapiens
gggcaaggagagccggacgggcacgggcgaccggcccgcgagggggacgcggacgcaacagggaaaggagaccccaacaagccgcggg

SEQ ID NO: 189269 - RNA, 78 nt, Homo sapiens
agaaccaaacaagacaacgagcgaaagcgaaaaacagcgaccagagacacccccggcaccgaggaaaacaagcccaag

SEQ ID NO: 189270 - RNA, 75 nt, Homo sapiens
gagaaaagcagaaaagacagagagagcaaaacgacgaaggagccaagaggaccgggacccaaacagggccagcac

SEQ ID NO: 189271 - RNA, 64 nt, Homo sapiens
aaaccggagcgcgcagcagcggggacgagagccccggcacaaacggaccaccagaaagcacccc

SEQ ID NO: 189272 - RNA, 70 nt, Homo sapiens
ggccaggccggacaggcgcaccccggcccggggccagcccacccacaggacaaaccggcgaccacacacg

SEQ ID NO: 189273 - RNA, 67 nt, Homo sapiens
ccaaccggggaggaaaaccgacgaaggacccgagacagaaggccaaagagacagcagccagggcaac

SEQ ID NO: 189274 - RNA, 82 nt, Homo sapiens
gagggcggcagcggcaccacggggacgcaaagacacacggcagggaaccccaccccggaaggcggggacacagacgagaaca

SEQ ID NO: 189275 - RNA, 75 nt, Homo sapiens
ccaaagaagagaaccaaaagaaaaacaccacccagaggaccccacaaaaggaaagaggaagaacggaaacgggag

SEQ ID NO: 189276 - RNA, 74 nt, Homo sapiens
agccaggcccagccccgaagggcacaccggagggaaacccagacgacaaggaaggccaagggacccacgaccaa

SEQ ID NO: 189277 - RNA, 84 nt, Homo sapiens
cgggacagagccagggcaccaccaggcgcaagaacaggcgggcacccacaggcccgcggacgaagggggccgaagcgggagagg

SEQ ID NO: 189278 - RNA, 70 nt, Homo sapiens
accgagcgggccagaagaccagcggaaaagcgaagccgagcccaaacaaagggaagagagaccaggagag

SEQ ID NO: 189279 - RNA, 71 nt, Homo sapiens
accaccaccacccccgaaccaacacaagggcaaaccccacaggagaaggagaaaagacacgaagggaggcg

SEQ ID NO: 189280 - RNA, 82 nt, Homo sapiens
gggcgcaccgggggcgggggcgccagcccaccaagaagggccgagcacagcaagcaagaggcccagaagaaacaaggccaag

SEQ ID NO: 189281 - RNA, 82 nt, Homo sapiens
ggcgccacgccccagcccgcccccagccgggacgccggcccacccgagagaaaggacagggacaggaaagaaagaaaaagaa

SEQ ID NO: 189282 - RNA, 75 nt, Homo sapiens
aaagaccggaaaaaggcagaaaacgcccacccgccagggggccgccgacccccccccccagcacacacgggcgac

SEQ ID NO: 189283 - RNA, 76 nt, Homo sapiens
cgcagaaaaaaggagaagaaccagccaccaccagagagaacacagacggccacacccgaaggaaggcccgaaggcg

SEQ ID NO: 189284 - RNA, 74 nt, Homo sapiens
cagaaccgcagcagggacgcgggcacgggaccggcgaggacgaaagacgcgccagcaggcaacaaaaccaaggg

SEQ ID NO: 189285 - RNA, 80 nt, Homo sapiens
cccacaggggagggacccgggaaggaaacaggaacacgaaagaggaaaaacgcacaagaaaccgaagccaaggaggagag

SEQ ID NO: 189286 - RNA, 78 nt, Homo sapiens
cagaaggaagagcgaacgagaggcaacagaaaccgccagcgcgaagcggcgagagcccgaaaacacacccgcagccca

SEQ ID NO: 189287 - RNA, 75 nt, Homo sapiens
caaacccccagcaagcaacagcaagcccaacagccgggaaggggaaaagaacagagaagagagaagaaggggaac

SEQ ID NO: 189288 - RNA, 83 nt, Homo sapiens
gggagagacccacggccacggccagaggaccccaagcagcgggccccaggccggggcgagcgggcccgggagcgggaagagca

SEQ ID NO: 189289 - RNA, 72 nt, Homo sapiens
cagaacgcgggcgaacgagcaccaacgcacccaccaggcacggggccaaaaaggcacgagggaacgggaaag

SEQ ID NO: 189290 - RNA, 84 nt, Homo sapiens
cagcacccacagccaaggcgggagccacggaccgcacaggacgagcgaagacagggaaaagaaaagggcgccgaagaagccacg

SEQ ID NO: 189291 - RNA, 51 nt, Homo sapiens
gaaggaccaagaaccaggaccagggggaaggagaccagcccacccccgccc

SEQ ID NO: 189292 - RNA, 75 nt, Homo sapiens
gccgcccagaggcggaggagaagaccgcaggaaagcaggaaggcaagaaagccaaggacgaaacccacacggagg

SEQ ID NO: 189293 - RNA, 73 nt, Homo sapiens
ccaggagcagacaagcgagacccgggggcaacggccgaccaagcagaacccgagaagagccgagaaacacccg

SEQ ID NO: 189294 - RNA, 72 nt, Homo sapiens
ggcaccaaggcggacacccaaaacccgagacagggcagcgaaaaacgaacggagagcaacgaaagagaggac

SEQ ID NO: 189295 - RNA, 67 nt, Homo sapiens
gaaaagggcacagccagaccaagaaagcgccacacgcacagagcgcacaaaaggagcggagccgcca

SEQ ID NO: 189296 - RNA, 91 nt, Homo sapiens
caaggccaggcgccggccggggcgacacgacgggaagacaccgcaaggaaaaccagccaaaacagaggagaccgggcacacagagaaaaaa

SEQ ID NO: 189297 - RNA, 119 nt, Homo sapiens
acagaaggacaggagaaacaggggccaaaaaaccaaaggagaagaaaaccacagaaggggaagcgagagaagcagcaacgcggagcaagagaaagaaacccggaaagaccacagaccaa

SEQ ID NO: 189298 - RNA, 57 nt, Homo sapiens
cgacacaacggaagggggggaaccaaaaaaggggaggaaccacggagaccagaccgc

SEQ ID NO: 189299 - RNA, 79 nt, Homo sapiens
cgaggccccagcaacgcggaagccgcagaacggagaagcaagggccaggcaggaaggagcaaagaaggcaccgacagca

SEQ ID NO: 189300 - RNA, 75 nt, Homo sapiens
cgcgcaggcaggcaagccggacacccagcagcaagacgaaaccccggaccagccggacacaagagggcaagaaag

SEQ ID NO: 189301 - RNA, 76 nt, Homo sapiens
agcacaccgccaaacccaggccagagcacaggccagcaacagaagaaagcaagcaccggggaaagcggcccgaaac

SEQ ID NO: 189302 - RNA, 80 nt, Homo sapiens
cagagccgcggaagaggggaccggcgcggacccaggccaggcgaaccagccgaaaaaggagaaaccaaaaggaaaagcga

SEQ ID NO: 189303 - RNA, 75 nt, Homo sapiens
cagacacggggaagcgcaaaaacaagacggggcgccccacagaggggcgacggggcgggaagaagcccgccgcca

SEQ ID NO: 189304 - RNA, 68 nt, Homo sapiens
cggagaccagcaagacacacgcccaaacacagaacaggaaggaggcgcagccaaaagaaacacccaaa

SEQ ID NO: 189305 - RNA, 69 nt, Homo sapiens
caagaacacgggaggacgcaggggacgaggggacccccaggcacggaaaacagcagcaaagcggccacg

SEQ ID NO: 189306 - RNA, 71 nt, Homo sapiens
gacagacgcagggcgcccccgaggacagaaaaaggcgagcacaaagacaaagagagagcagcaaagggacc

SEQ ID NO: 189307 - RNA, 67 nt, Homo sapiens
ggggacgcacagcaaacccacccagcacaccccgcgaaaggaggaggcacagagaggaggaagaaac

SEQ ID NO: 189308 - RNA, 79 nt, Homo sapiens
agaaagaacgaaaagcagcaacgagaagaagccaccaaggagcaggaaaacggagagaacacagcgcacgggaccggaa

SEQ ID NO: 189309 - RNA, 74 nt, Homo sapiens
acaagggccgagcgccaccagggggggagcgaggccaagcagagaaacgacaaggccacaggcgccaagaagcc

SEQ ID NO: 189310 - RNA, 78 nt, Homo sapiens
aagaaggagggaacacaaaaagagcccagaccacaacaccaacagagaagagagggaacacggccacaggccccacaa

SEQ ID NO: 189311 - RNA, 89 nt, Homo sapiens
caagaccaaggcaacaaggacaacaagagacgggacaagacagggcaaaggacagaccaggccccacggggcaccggagcaggagcgcg

SEQ ID NO: 189312 - RNA, 71 nt, Homo sapiens
aagaaaacaaaagaaacgcccacagaacaccgaggcgcaaaaaccagacaccccacaccaccacccagacg

SEQ ID NO: 189313 - RNA, 78 nt, Homo sapiens
gacggcggcggggcggacagcgggaccccgggaaacggaggaacacaaccagggagcggggaaccaaggagaagcaaa

SEQ ID NO: 189314 - RNA, 69 nt, Homo sapiens
ccagaaagaaaaaggccccaagcgagacgacgggaccgaaggaccccgccagagacaaccgagcgccag

SEQ ID NO: 189315 - RNA, 73 nt, Homo sapiens
acaccgcggaacacggaaggcgcaccaccacccacagcagaccaagacggaccgaacccaccggacaccccca

SEQ ID NO: 189316 - RNA, 118 nt, Homo sapiens
gcgccaccaccacgccagccgcaccagccgcccaagccgcacagccgcggcggcagcagcaggagaggccacccagaggagaaggccaccccgccggaggcacaggccagaggggccc

SEQ ID NO: 189317 - RNA, 73 nt, Homo sapiens
accgacccgaagacccgaagaacaggcacacaccaacgggacgacaggaaaaggccacaagaccccggagagg

SEQ ID NO: 189318 - RNA, 58 nt, Homo sapiens
gggcgggacaacacgcagaacaccccggaccccaacaacaaccccccccgcgaaacgc

SEQ ID NO: 189319 - RNA, 78 nt, Homo sapiens
cgcgggcgccgggccaggacggccggcacagccacaccgagaagaccggcccaagaaccccaccgcccgaagacagcg

SEQ ID NO: 189320 - RNA, 76 nt, Homo sapiens
aggaggagcccgcccccagagaggggagccggcgaggacaaaaccgaaggaggcacccacggagcgagagagaccc

SEQ ID NO: 189321 - RNA, 107 nt, Homo sapiens
gcagcacgcacagaagagaagaaagccaacgacccagaaaaccgacagggaaggacaccacggaccagcgcgccaggccgaaccagcgggcgaagccagcggaagca

SEQ ID NO: 189322 - RNA, 71 nt, Homo sapiens
gaacagacaagcagagccggcaccacaggaagccgagcagcaacagagcgccaaaaagaggaccccagcac

SEQ ID NO: 189323 - RNA, 65 nt, Homo sapiens
ccgaaacccaaagaaccccgacccgccaacagagccaggaagcagcagagaagaccgggaggaca

SEQ ID NO: 189324 - RNA, 72 nt, Homo sapiens
cccaaaggcgggaacagccaccccgcggaaggcgcgccgaagaaagaaacaagaacaaaagaaccagaagcc

SEQ ID NO: 189325 - RNA, 88 nt, Homo sapiens
ggggagccccgagaacgccccagcggggagacacagaagaacaccagcaggaaaaaagagcggcagaaggccaaacggccgagcaggc

SEQ ID NO: 189326 - RNA, 77 nt, Homo sapiens
aacgccgccccaccacgacggaaccagccgggacaaaagacccagcaaacgaggaccccaccacaagaacgcaggaa

SEQ ID NO: 189327 - RNA, 65 nt, Homo sapiens
gaaagaaagaaagaacgaacagcagaaaggaaagagccaacagaaacccgagaggagcaggagca

SEQ ID NO: 189328 - RNA, 74 nt, Homo sapiens
ccacaagcccagggaccacgggccaggagcaggaccgaaaagacgcggccccaaaggaaacacccgaagaacac

SEQ ID NO: 189329 - RNA, 72 nt, Homo sapiens
gccagaacaggccccgcagcgaaaacccaacgagaccaaagaggcaaggcacaaggaccgccagcgggagac

SEQ ID NO: 189330 - RNA, 74 nt, Homo sapiens
ggagggaaaacagacggcaccagccagccagacgccaggacccaccccgcaaaagaccaggccgggaagccagc

SEQ ID NO: 189331 - RNA, 81 nt, Homo sapiens
gggccaaacgaccacccaaaaacagaaaagggaaaagccgggcagagcagccccgagggaaccagggaaacggcgggcgaa

SEQ ID NO: 189332 - RNA, 72 nt, Homo sapiens
ccaccagccacgaccggaccccgagaaaaggcgagagcgagacaaaacagggcaaggcgcccagaagcggcg

SEQ ID NO: 189333 - RNA, 71 nt, Homo sapiens
agccccgggaacgcaagaaggcagaaccaacaggaccggcccacaggaacgagaaagggaggcccaagagg

SEQ ID NO: 189334 - RNA, 73 nt, Homo sapiens
aacaggcacacaagggaggaggcaaagccagggcacgaagaaacgcacagcgcggcacgaaaacagcaccaca

SEQ ID NO: 189335 - RNA, 76 nt, Homo sapiens
gaccgcaaaggcacccggggcagaccggaccaaggacaacaaagaggagagcaacaagcggcagcagggaacaagc

SEQ ID NO: 189336 - RNA, 72 nt, Homo sapiens
ccgcgggcgggccgggcggccgggcagacaaccaacagggcaaaaccgccaacaagacccgcaaagaaaaaa

SEQ ID NO: 189337 - RNA, 78 nt, Homo sapiens
ggaacaagcgcaaagaacagagaaacaagaaggacaccagaaccagggcgaccaggagagaagaggaaaaggacagga

SEQ ID NO: 189338 - RNA, 77 nt, Homo sapiens
ggagggcgccgcggggcagccgccgcccccgggaagcaccagcaccaagaccagccagggagacgacccgcgggaac

SEQ ID NO: 189339 - RNA, 81 nt, Homo sapiens
cgcagaggcaccgggcggggcggggccgagggagcccgcacggaggcccggcgggccccccgggagccgcggcccgaggca

SEQ ID NO: 189340 - RNA, 79 nt, Homo sapiens
aaggagccaccaggccgggaagcccacggcccccagaaacccacaaagccccgaggggcagggagcccagagggaaccc

SEQ ID NO: 189341 - RNA, 38 nt, Homo sapiens
aagccaacggacaaccacagagaagaggcgaaagaaga

SEQ ID NO: 189342 - RNA, 62 nt, Homo sapiens
cggcggaggaagaaccggaaaaccaagggccagagcagcaacagacgaggcaggcagaaaga

SEQ ID NO: 189343 - RNA, 54 nt, Homo sapiens
gaaaagcaaagacaccgagacccgggcgcagcacccgaacagagagaagggcgg

SEQ ID NO: 189344 - RNA, 55 nt, Homo sapiens
ccccaggggagccggcggaacaaaccagccggcgggcgccacaacggacgacgaa

SEQ ID NO: 189345 - RNA, 66 nt, Homo sapiens
acaagccaggccacaaggaaccaagacagcgccacagacagaaaaggaaagaccacagcaagacca

SEQ ID NO: 189346 - RNA, 68 nt, Homo sapiens
gacccccagcacaacacaccggggacacaaagcgcgggaaagaaccccgcacccggaacaccagccag

SEQ ID NO: 189347 - RNA, 72 nt, Homo sapiens
ccgaccgaccagcaacagaggagccacaagaaaaggggcaaagagaaccaggagaccccaccaccacagaaa

SEQ ID NO: 189348 - RNA, 82 nt, Homo sapiens
gccgggagacgccaccgaccccaacggcaccagcccgcacccgcagcaaaaacggccacacgacacacagagcgccgcccgg

SEQ ID NO: 189349 - RNA, 73 nt, Homo sapiens
cagaaacgcaccaggccaaagaaagagaacaacaagaagccagaaaagagggaagaaaccgcaaggcagaagc

SEQ ID NO: 189350 - RNA, 77 nt, Homo sapiens
gggcgccgcccggggcgaggcagggccagcagcaggcgggaggaacaagacaacacacacgcaccagggcagaaaaa

SEQ ID NO: 189351 - RNA, 80 nt, Homo sapiens
ccgccggggagccaagaggcaggcccgagggccccccggggccccccgggcaagggcacacacgaccaaccagcagcaag

SEQ ID NO: 189352 - RNA, 70 nt, Homo sapiens
gagggagcgccgccggagcgaggcccgcggagcagaagcacgccccgagaaacggggcgaacacggggga

SEQ ID NO: 189353 - RNA, 78 nt, Homo sapiens
agacggaggcgaggcaaacggggggcgcggagggaccagcgagcgggaggcaagggagacgagcggacgccccccgag

SEQ ID NO: 189354 - RNA, 79 nt, Homo sapiens
cccaggcacacagacaacagagcaacccaccggacggggcagagaaagacgaccgccaaccagggagaacacagagaaa

SEQ ID NO: 189355 - RNA, 81 nt, Homo sapiens
cggacaagagaccacacccaggaagccaggcacgcacagcaaacggcgaggaaagagaggagccccggaaagaaaaggaca

SEQ ID NO: 189356 - RNA, 74 nt, Homo sapiens
gaaaaggcgggcacaggccgaccgcgcgcgaagagagagaaacgaaaaagaggaaggagcgagggagcacaagc

SEQ ID NO: 189357 - RNA, 81 nt, Homo sapiens
gaagaagccaggcgaaagaacagaccgccgcagagggagaaagaacaaggccaaggaagcgcgggaacgggaaagaagaag

SEQ ID NO: 189358 - RNA, 57 nt, Homo sapiens
gaagccaggcgagccaccacagcacaggcaaacggcgaaaaaccgcaaacacacgca

SEQ ID NO: 189359 - RNA, 95 nt, Homo sapiens
acagcccgccaggcgggagaagaaccccccgaaaggaccccccagaggagaacaagcggagaaaacgaagaccagaacaagagagaacgaaacca

SEQ ID NO: 189360 - RNA, 61 nt, Homo sapiens
acggccacgcccacagaggcagacccgcagccaccacccggggaaccccagcaagaccggc

SEQ ID NO: 189361 - RNA, 70 nt, Homo sapiens
ccaaccgagagccagccagcaggcccccggcacaggcggcaaagacgcaacaacagcgagcaagagagga

SEQ ID NO: 189362 - RNA, 76 nt, Homo sapiens
cgagcgggggagggggccccacgagccggaagagaggggccaccccacgggaagccaggacccagggccaggggcg

SEQ ID NO: 189363 - RNA, 85 nt, Homo sapiens
acacgccgaggcccaccagacgaccacgacgaggccggggcaccccggacagaggagaaggcaccacccaagaggggaggagcgg

SEQ ID NO: 189364 - RNA, 77 nt, Homo sapiens
caaaccggcccgaaagaagagcccaacagaagcaagaagagagaacccaacaggagaaagacagcaaagaaaaggag

SEQ ID NO: 189365 - RNA, 87 nt, Homo sapiens
cacggcggcagagaccagggaacagcgccacaagaaggcccaggacaagaggcaagacggcgcgagcccccccgcagcacaacggca

SEQ ID NO: 189366 - RNA, 79 nt, Homo sapiens
agaacaccggcaaggaccagcaggacagccagcccagagaggaaggaagaacaagcgggggaacggagggaaacgaccc

SEQ ID NO: 189367 - RNA, 59 nt, Homo sapiens
gcgcaacccgacccggaggcgcgaggggcccgggggcaggccccccagagcaacccggg

SEQ ID NO: 189368 - RNA, 60 nt, Homo sapiens
gcaaggggccaccaggaggccagggggcgccagcagccgcgaacgcggccgggaggcaga

SEQ ID NO: 189369 - RNA, 90 nt, Homo sapiens
ggcgaaagcggcgggaagcgacgggcagaacgcgacgggcgcggcaggaaccaaaggcagacccagaagagcacaaaacagagaaaaggg

SEQ ID NO: 189370 - RNA, 110 nt, Homo sapiens
ccagcagaaggccgcacgcggcacgcaccagagcccccaaggcaggcagccgaggcgacaggagacgccaccccgccccaccgaggccggcgggccacagcaggcgcccc

SEQ ID NO: 189371 - RNA, 90 nt, Homo sapiens
cagagaaaacaagacagagggacagacgcgcccgagggccgacaggaggacacccccaggaacgggacggaaccaagaccagaccaggcg

SEQ ID NO: 189372 - RNA, 61 nt, Homo sapiens
ggagacagaaggaagaaagagaggccggagaaaacaccaagaaaagaaggaggccagcggg

SEQ ID NO: 189373 - RNA, 80 nt, Homo sapiens
accccagggagagcgggcagccccaggggacagcggcgcgagggcggcccgcagaagagcacagaaggagaaggccagca

SEQ ID NO: 189374 - RNA, 39 nt, Homo sapiens
cggacaccacaaagggccagaccaaaggaaccagagcag

SEQ ID NO: 189375 - RNA, 76 nt, Homo sapiens
gcagaagcgcggaggcgcaaacccaggaacacggacccgagaagaagaagaagaaggggaggcagcagcacaaagc

SEQ ID NO: 189376 - RNA, 71 nt, Homo sapiens
accccaccacgacacgggaggacggacaaaccggcgaccacacacggggacgacggggaagccggacagca

SEQ ID NO: 189377 - RNA, 83 nt, Homo sapiens
agcacaggcccccagcgccgaagcacccggaagggaaggccagaagcacaaagcgcccgaggacccacccgaggacgggcacc

SEQ ID NO: 189378 - RNA, 53 nt, Homo sapiens
agcgagaccgcggcgcaggaggaggaggagccgggccccgaggaccgagacag

SEQ ID NO: 189379 - RNA, 71 nt, Homo sapiens
accaaaagagaagacggggacaccagccaggagagaaccagaccgggcggagacaagccagccggacgaca

SEQ ID NO: 189380 - RNA, 51 nt, Homo sapiens
ggcggacaccacaagaagggcgccaggcaaggcaaggaggaccaagcgaaa

SEQ ID NO: 189381 - RNA, 67 nt, Homo sapiens
gcgagggggggcgcgccggaaaccggagcgcgcagcaggcacacagagaaaaaaagggaacaaaaca

SEQ ID NO: 189382 - RNA, 71 nt, Homo sapiens
ccggagccagccgcaaagaggcacaaagacggcgaagaaacaggaagaaaagagggaaacaaagcaaggac

SEQ ID NO: 189383 - RNA, 89 nt, Homo sapiens
gccccccgcaacaacccacaagcacccgagggacccgaggagcccaccaagccgaccgcaggcaagggccgggggaggcacaagggcac

SEQ ID NO: 189384 - RNA, 59 nt, Homo sapiens
accccgggacacgaaagccaggaaagagccggaggaaaccacagagcagccagcagaag

SEQ ID NO: 189385 - RNA, 75 nt, Homo sapiens
gcgcggcggcgcgggcgcgcacgccgccgcgcgcgccggggccgccccccgcccaaggccgggcaccccagcagc

SEQ ID NO: 189386 - RNA, 76 nt, Homo sapiens
gaccagcagcgcgccgccgcccagggcggagaacggaaaagcaccaggaagcagagaggaccgcagaagggaagga

SEQ ID NO: 189387 - RNA, 79 nt, Homo sapiens
cggaaccacaccggcaccccaccagggagagagggcaccaccaaaaggaggccacccagggacagccaaagaccggagc

SEQ ID NO: 189388 - RNA, 77 nt, Homo sapiens
cggagccgacgcggggcagcgccgcaccgaggcagcccgcggcaccgggggacagggggagagagacgcgggaaccg

SEQ ID NO: 189389 - RNA, 71 nt, Homo sapiens
ggcaagagccacacccagcaccgaacagaccccgccccagcagaagaggaacaggaggcccggacccccag

SEQ ID NO: 189390 - RNA, 80 nt, Homo sapiens
gccagaagccaggcggaaagaaagacaacaagagacggaaagccaaaacccagagccagcccgagaagcaggagagaaag

SEQ ID NO: 189391 - RNA, 69 nt, Homo sapiens
cgcaggcagacaaaagggccaaagaagggagagagcgcacgagaaggaccgcgaagaaacgcaccagga

SEQ ID NO: 189392 - RNA, 35 nt, Homo sapiens
ggggaggacagaccgaagagcagccgcaaccgaca

SEQ ID NO: 189393 - RNA, 76 nt, Homo sapiens
cccgaaccaacacaagggcaaaccccacaggagaaggaccgagccgcgccgccaggaggccgcgccgggcgccggc

SEQ ID NO: 189394 - RNA, 78 nt, Homo sapiens
cgcaccccgcccgcgcgccaccgcacgagcccgccaagcaggcaggacggggagcagccgaagaacaggaggagaccg

SEQ ID NO: 189395 - RNA, 64 nt, Homo sapiens
ccccggccggaggcaagagcacgaacccaggagccgggcagccgcgacacagcagcaggggcgc

SEQ ID NO: 189396 - RNA, 72 nt, Homo sapiens
gggccggcggcacagccaagggagaaagaagagagaccagaaacgagaggagaagaaaccagccagacagag

SEQ ID NO: 189397 - RNA, 63 nt, Homo sapiens
ccagaccccacggcacaacaagcacaaaggaaaagggaggcagccagccacagagcccggcag

SEQ ID NO: 189398 - RNA, 57 nt, Homo sapiens
gagacacccagagacggaggaaacccgacagcaaagacgacccggagacgcggaggc

SEQ ID NO: 189399 - RNA, 75 nt, Homo sapiens
gagaaccgcgagacaacaaaacaccgccccggagccacagcaaagccacccaaggcaggcacagcaccagaccag

SEQ ID NO: 189400 - RNA, 67 nt, Homo sapiens
gagaggaagaaaccgaagaacggcggaaacgagcacggagcgcccacggagccacggaaggaaacga

SEQ ID NO: 189401 - RNA, 70 nt, Homo sapiens
gagcaacacaggggcggacaccagcccccaggaaggaccccccaggacacgcgggcaggcagaaccaaag

SEQ ID NO: 189402 - RNA, 51 nt, Homo sapiens
agggacaagggcaacagccagaagaccaggccagccaccacccacaaaaag

SEQ ID NO: 189403 - RNA, 66 nt, Homo sapiens
cggaccccccgcagccggggacgcagacgaagacaggggaacagaggcagccccccggaacccaag

SEQ ID NO: 189404 - RNA, 50 nt, Homo sapiens
gaaggaccaagaaccagaacgcagcccaaaaaccagagcaaacaaaggcg

SEQ ID NO: 189405 - RNA, 72 nt, Homo sapiens
gagcaggaaagacccgcagcagcccggaagcgggacgcaagaagcgcggcacaagccgcggggaccaccggg

SEQ ID NO: 189406 - RNA, 67 nt, Homo sapiens
gcgccaagccgagacaagaaggggccaggacaaaagagcacgcagggagaagcacaccgccagagac

SEQ ID NO: 189407 - RNA, 73 nt, Homo sapiens
agaaacagagaaggaacagagggaagaggaaagcacaaagacacccaaccccagaggaaacacgaaggaagaa

SEQ ID NO: 189408 - RNA, 106 nt, Homo sapiens
aaagagaacagggcagaggaaaagcaagaagacgaggagcaggcgcaaaaaagcgagagcgagacaaaacagggcaaggcgcccagaagcggcgacgcaacccccc

SEQ ID NO: 189409 - RNA, 72 nt, Homo sapiens
cagccccagcggaggacacagcagccccagaaaggccagcgccggagcgggggggagacaaagcaaagaagc

SEQ ID NO: 189410 - RNA, 102 nt, Homo sapiens
acaccggagcggcgcggcacccggccgcggcccagcaccgggaggggccgccacacccgggaaacacacccaagcacggcgcggaagcaggaaaggcagacc

SEQ ID NO: 189411 - RNA, 83 nt, Homo sapiens
ccgcgggaccgaggccgggccccggaaaacagggccagacgggaagaaacgagaagggaccaggggcggaagcggaaaacaga

SEQ ID NO: 189412 - RNA, 73 nt, Homo sapiens
caccgaagggaaaaaaggacacaggggaaacgccccagaaaccaaagaagacaaaaggccagaggaaagcaca

SEQ ID NO: 189413 - RNA, 78 nt, Homo sapiens
ccaagaagccagcaagcggccaggcgccgggcgggcagagaggcaggacgagagagggacggagaagcagccccccgg

SEQ ID NO: 189414 - RNA, 66 nt, Homo sapiens
ggcagaacgcagaacacacaagaacagaaagaagagaacgagccaaaaggacaaaccagacgaaga

SEQ ID NO: 189415 - RNA, 76 nt, Homo sapiens
gccccaggagagccgggcaggcccacccagagacacccaggaaaccccacagcaacgcaggagaggggcgaccggc

SEQ ID NO: 189416 - RNA, 77 nt, Homo sapiens
cagaagcagcaaggcagcaaccaaaacaccaccacgcgggcgggccagcgcagccccaggagagagcgaccacaagg

SEQ ID NO: 189417 - RNA, 54 nt, Homo sapiens
agcagagacgccggacagcccgccaaggacaggcgaggcgagccagggcccgca

SEQ ID NO: 189418 - RNA, 64 nt, Homo sapiens
agagccaacacaaggaagggccaccagcccgcagcacccggcccgcgggccccagcgcgcgagg

SEQ ID NO: 189419 - RNA, 66 nt, Homo sapiens
ggagagcagaaaagcaacaggcccagaagaccgagaccacaggggcaacccaaggacgagaccagc

SEQ ID NO: 189420 - RNA, 73 nt, Homo sapiens
agaggcgaacgggagccaaagggccccgggggaccaaaagccagccccacggaggaacccgggaccggccacc

SEQ ID NO: 189421 - RNA, 69 nt, Homo sapiens
gacacaagcggacagaacagacgggacccccagccaaaggcaaaggccccccccacggaaacacgaggc

SEQ ID NO: 189422 - RNA, 82 nt, Homo sapiens
cgaaaggcacgcccaagcaggagaacagcagggggacccaaaaggaaaaggacaggcagcagagagacaagggaggaacaag

SEQ ID NO: 189423 - RNA, 88 nt, Homo sapiens
ggcgcgccccgcggagccggagccgcagaggccccgggcggaccaggcccagcccgaagaggaaggagaaggaaagagcagaaaggag

SEQ ID NO: 189424 - RNA, 91 nt, Homo sapiens
ccagagagcgccgagcacacagccggaaggaacaggaccaaaaagcaggcacaacaccgggaaaagccgcccccagacagcgcccgaaagc

SEQ ID NO: 189425 - RNA, 81 nt, Homo sapiens
cgccagcggcgcagcgcaggcaccgcggagcaaggagccacgccgagcccaccgagggccaggcggaacagcagacagagc

SEQ ID NO: 189426 - RNA, 72 nt, Homo sapiens
ggaccccagcgccagcgccagggagcagggaacaagcaggggagaagaaacgcgagcaccaacacccaggca

SEQ ID NO: 189427 - RNA, 63 nt, Homo sapiens
cacaggaaaggcaaacgaacaccggaggacagccagggcggcgacggcggcgcgaggaccgac

SEQ ID NO: 189428 - RNA, 112 nt, Homo sapiens
gccggcggaggcgggcggcgagccgcaggaggccaacgccggcgacaccggccggcgcagacacgagaggcgagggacgacagagcaagcggcagagggcaagcgggaaaaa

SEQ ID NO: 189429 - RNA, 76 nt, Homo sapiens
gagagaacggcacacgcgagcgcccgccgacacagccaccaagaaggcacaagcagaacgggaaaaggggcggaaa

SEQ ID NO: 189430 - RNA, 95 nt, Homo sapiens
acggaggacggggccgggcgaccgggcaccagcaggacccgaggccaggagccaggggcccagaaggacggagacgagcagagggggcacggagg

SEQ ID NO: 189431 - RNA, 52 nt, Homo sapiens
aaaggaacccggacccccagaagaagaggggaacagaacgaagggcacacga

SEQ ID NO: 189432 - RNA, 54 nt, Homo sapiens
acgagaagaacccggaagcaccagcaggacaggcacacccgggcagccccagcc

SEQ ID NO: 189433 - RNA, 71 nt, Homo sapiens
ccgcacccgcaggaccggagaccaggcccgacggaagagcccggaacacacagcagaaaagcccagggaaa

SEQ ID NO: 189434 - RNA, 65 nt, Homo sapiens
agaaaagccagcccccagaaagaaccgcccacgggccgcgccaggacacagccagcggcccaccc

SEQ ID NO: 189435 - RNA, 59 nt, Homo sapiens
cggacagggcgaaagccgaccacccggcgaaggccagcaacagaagaaagcaagcaccg

SEQ ID NO: 189436 - RNA, 69 nt, Homo sapiens
ggagacccccacagagcaagacaagcagggccaaaacggaaccaaggaaaaacaagacaaggaaggaaa

SEQ ID NO: 189437 - RNA, 77 nt, Homo sapiens
ggaaagcgaaggggaaggcgccgaagaggacgaaggcagcacaagggaggaagcccgcccgggcagcaggagcgcag

SEQ ID NO: 189438 - RNA, 72 nt, Homo sapiens
ccggccagcccccccaaaaaggaaagacaccggcggagcagggaagccggcaagaaggacggcagcaagcac
